United States Patent Application Publication US 2007/0042381 A1 - sequence listing, part 18

SEQ ID NO: 770249 - RNA, 22 nt, Human
acuuccagcuagguucugcuaa

SEQ ID NO: 770250 - RNA, 22 nt, Human
aggcacaaagacagaaaagcac

SEQ ID NO: 770251 - RNA, 22 nt, Human
gucucaguuguaucaccugguu

SEQ ID NO: 770252 - RNA, 22 nt, Human
gucaaguuuauccgcucauuca

SEQ ID NO: 770253 - RNA, 22 nt, Human
acauugaacaguacaaaugauc

SEQ ID NO: 770254 - RNA, 22 nt, Human
gugaggcagggaaagaggauaa

SEQ ID NO: 770255 - RNA, 22 nt, Human
cauggcuuacuuucagggagua

SEQ ID NO: 770256 - RNA, 22 nt, Human
cuagagcagauugcagaguagg

SEQ ID NO: 770257 - RNA, 22 nt, Human
ggguuccaaugaugagcaagag

SEQ ID NO: 770258 - RNA, 22 nt, Human
ggcuggcaagugucugcucaug

SEQ ID NO: 770259 - RNA, 22 nt, Human
cuacuuccagggguggggcuca

SEQ ID NO: 770260 - RNA, 22 nt, Human
ucuguucaucaucuggacacau

SEQ ID NO: 770261 - RNA, 22 nt, Human
aagcagcauccugggcagaccu

SEQ ID NO: 770262 - RNA, 22 nt, Human
cuucuuguaaacgguuccccga

SEQ ID NO: 770263 - RNA, 22 nt, Human
agucacaugaguuucucuuuau

SEQ ID NO: 770264 - RNA, 22 nt, Human
uucuuucucagugggcagauac

SEQ ID NO: 770265 - RNA, 22 nt, Human
gagagugaugaaugguuaaaca

SEQ ID NO: 770266 - RNA, 22 nt, Human
gcuuucugauugcgaaaacaaa

SEQ ID NO: 770267 - RNA, 22 nt, Human
acaaaugccauauauaaauucu

SEQ ID NO: 770268 - RNA, 22 nt, Human
cugguuuuauguuauagaugga

SEQ ID NO: 770269 - RNA, 22 nt, Human
uagaaauggggaaguaguuagg

SEQ ID NO: 770270 - RNA, 22 nt, Human
gagauggggaauaggagcaagc

SEQ ID NO: 770271 - RNA, 22 nt, Human
uugauacacaauggaacaaugu

SEQ ID NO: 770272 - RNA, 22 nt, Human
cuggcuuuucaaacuguucagu

SEQ ID NO: 770273 - RNA, 22 nt, Human
gggaagagaggaggugguuucg

SEQ ID NO: 770274 - RNA, 22 nt, Human
ucagaaguugauaaaguaguug

SEQ ID NO: 770275 - RNA, 22 nt, Human
ucucagaauaaauuccuaacuu

SEQ ID NO: 770276 - RNA, 22 nt, Human
uaaauccuuaucuucuuugaau

SEQ ID NO: 770277 - RNA, 21 nt, Human
ccuugggaugcaagugagacu

SEQ ID NO: 770278 - RNA, 23 nt, Human
uuggaagggaagagcauuugaga

SEQ ID NO: 770279 - RNA, 22 nt, Human
uucaggaaaugucugccuacca

SEQ ID NO: 770280 - RNA, 22 nt, Human
uguggcaguauaagagcuagaa

SEQ ID NO: 770281 - RNA, 22 nt, Human
ucuuuggauauguauggauaga

SEQ ID NO: 770282 - RNA, 22 nt, Human
ucagcuggauguggaagugcua

SEQ ID NO: 770283 - RNA, 22 nt, Human
acuuuaaaaagagccuucuaac

SEQ ID NO: 770284 - RNA, 22 nt, Human
cauuaacaaugacugcuugacu

SEQ ID NO: 770285 - RNA, 22 nt, Human
gcccuggaaucucuccauggga

SEQ ID NO: 770286 - RNA, 22 nt, Human
caggaugggauguagugggccc

SEQ ID NO: 770287 - RNA, 21 nt, Human
ucccagggucuuaugggaugu

SEQ ID NO: 770288 - RNA, 22 nt, Human
ucacacagcugacagagccuuu

SEQ ID NO: 770289 - RNA, 22 nt, Human
uuccuuucccucacagccucgg

SEQ ID NO: 770290 - RNA, 22 nt, Human
ugcuggcugcagugcugucaaa

SEQ ID NO: 770291 - RNA, 22 nt, Human
cuggggcaugggccccuagagg

SEQ ID NO: 770292 - RNA, 17 nt, Human
agcagcuggcacaggag

SEQ ID NO: 770293 - RNA, 23 nt, Human
agggccacugggaaggauuacug

SEQ ID NO: 770294 - RNA, 22 nt, Human
ugguccagucguuccuuuccuu

SEQ ID NO: 770295 - RNA, 22 nt, Human
gggcagugucggggcccaggga

SEQ ID NO: 770296 - RNA, 22 nt, Human
ucugcagacuugauaaccacug

SEQ ID NO: 770297 - RNA, 22 nt, Human
acagagguguguguaggacagu

SEQ ID NO: 770298 - RNA, 22 nt, Human
ccuggcuucagcauugcccucu

SEQ ID NO: 770299 - RNA, 22 nt, Human
acaggaguuucugacagagaca

SEQ ID NO: 770300 - RNA, 22 nt, Human
cugcugcaacucuuuagagggu

SEQ ID NO: 770301 - RNA, 22 nt, Human
uuccaagucuaaguuauaaauc

SEQ ID NO: 770302 - RNA, 22 nt, Human
gccgugggugucauggcccaua

SEQ ID NO: 770303 - RNA, 22 nt, Human
cagcuuuccagagaccugcccc

SEQ ID NO: 770304 - RNA, 22 nt, Human
aggcagcaagauuauuuaaucc

SEQ ID NO: 770305 - RNA, 18 nt, Human
ucagcuuuugaaaaccaa

SEQ ID NO: 770306 - RNA, 20 nt, Human
uggcucucacccugugcgau

SEQ ID NO: 770307 - RNA, 19 nt, Human
auucauuuuugccuucuaa

SEQ ID NO: 770308 - RNA, 20 nt, Human
gccacaguuuucucacugca

SEQ ID NO: 770309 - RNA, 22 nt, Human
augcuuuuaugucacaugguca

SEQ ID NO: 770310 - RNA, 22 nt, Human
cccucaccaggcuccaggcaug

SEQ ID NO: 770311 - RNA, 22 nt, Human
uuucaaggcuaguuuuaauuag

SEQ ID NO: 770312 - RNA, 22 nt, Human
gcugaaaaauagugucguguuu

SEQ ID NO: 770313 - RNA, 19 nt, Human
gcugcuggcucuggcugga

SEQ ID NO: 770314 - RNA, 22 nt, Human
gcugacaguuacugcuguaaca

SEQ ID NO: 770315 - RNA, 19 nt, Human
cucuuuacucccuugccuu

SEQ ID NO: 770316 - RNA, 22 nt, Human
caggaaagagagcuauucacuu

SEQ ID NO: 770317 - RNA, 22 nt, Human
gagcccagucugcuccugcgcc

SEQ ID NO: 770318 - RNA, 22 nt, Human
ugccugucagggggagugggaa

SEQ ID NO: 770319 - RNA, 22 nt, Human
ugaggccagaguuuuuaauucc

SEQ ID NO: 770320 - RNA, 22 nt, Human
auguucuuugugauucugagcu

SEQ ID NO: 770321 - RNA, 22 nt, Human
uaaugcaguacugauauaaaca

SEQ ID NO: 770322 - RNA, 22 nt, Human
ugugcaugucugggccuguaag

SEQ ID NO: 770323 - RNA, 22 nt, Human
ugcaacuaggagguucuuagcu

SEQ ID NO: 770324 - RNA, 22 nt, Human
auguauauacuuacaugugugg

SEQ ID NO: 770325 - RNA, 22 nt, Human
auguaugaugcuaggcucucag

SEQ ID NO: 770326 - RNA, 21 nt, Human
gguggcuagaaagcagugaga

SEQ ID NO: 770327 - RNA, 16 nt, Human
gcuuagugagagcaac

SEQ ID NO: 770328 - RNA, 22 nt, Human
cuaaaaacucuacgaugcacag

SEQ ID NO: 770329 - RNA, 22 nt, Human
agagccagguguagucucggag

SEQ ID NO: 770330 - RNA, 22 nt, Human
uucacauucucacaagaggaaa

SEQ ID NO: 770331 - RNA, 22 nt, Human
auguauuucuauguagugaaga

SEQ ID NO: 770332 - RNA, 22 nt, Human
gagggcuccauuccccgugccc

SEQ ID NO: 770333 - RNA, 22 nt, Human
cuuccaguaguaucauucucau

SEQ ID NO: 770334 - RNA, 22 nt, Human
uucucuggaaggcucuacggga

SEQ ID NO: 770335 - RNA, 17 nt, Human
uugggagagaaagguau

SEQ ID NO: 770336 - RNA, 22 nt, Human
uggcccuuguccugggagaguu

SEQ ID NO: 770337 - RNA, 22 nt, Human
aggcugugagagguggcuccca

SEQ ID NO: 770338 - RNA, 22 nt, Human
uuuaaaaaacuagucugagucu

SEQ ID NO: 770339 - RNA, 22 nt, Human
ucaauacagaaaggauauuuug

SEQ ID NO: 770340 - RNA, 22 nt, Human
acuuuugaacaaacuccucugu

SEQ ID NO: 770341 - RNA, 22 nt, Human
aaggaugcagggacccaaggcu

SEQ ID NO: 770342 - RNA, 22 nt, Human
gacauuaauuucuuugguaauu

SEQ ID NO: 770343 - RNA, 22 nt, Human
cugagcuucagugcacugggag

SEQ ID NO: 770344 - RNA, 22 nt, Human
uaagcugugggagauuggcaua

SEQ ID NO: 770345 - RNA, 22 nt, Human
caccagccagagugacagcucc

SEQ ID NO: 770346 - RNA, 22 nt, Human
auguggcuagugcagaugaaua

SEQ ID NO: 770347 - RNA, 22 nt, Human
acccuccaggcugcagcuccug

SEQ ID NO: 770348 - RNA, 22 nt, Human
guucagggagggacagaugaag

SEQ ID NO: 770349 - RNA, 22 nt, Human
aagcagacagagaauggguuug

SEQ ID NO: 770350 - RNA, 22 nt, Human
uuucuugagugaugcuuagugu

SEQ ID NO: 770351 - RNA, 22 nt, Human
guguuaauuauuggugaauaga

SEQ ID NO: 770352 - RNA, 22 nt, Human
caggaaccugugcguagggaug

SEQ ID NO: 770353 - RNA, 22 nt, Human
aaacugaauucccaagggcaug

SEQ ID NO: 770354 - RNA, 22 nt, Human
ccaaggcagaagauggcucuug

SEQ ID NO: 770355 - RNA, 23 nt, Human
auuuccuaaaagauaaucauuac

SEQ ID NO: 770356 - RNA, 22 nt, Human
aagccuaaaugaugcuauuaug

SEQ ID NO: 770357 - RNA, 22 nt, Human
agcucccagcagagcuggccac

SEQ ID NO: 770358 - RNA, 22 nt, Human
aagccaguaaguuuuugucauu

SEQ ID NO: 770359 - RNA, 22 nt, Human
gugccuggggguaauguaggau

SEQ ID NO: 770360 - RNA, 22 nt, Human
ccacaggaggaacaauuagaug

SEQ ID NO: 770361 - RNA, 18 nt, Human
acagaggcagacauguau

SEQ ID NO: 770362 - RNA, 22 nt, Human
gaccuccagcggcccugcagag

SEQ ID NO: 770363 - RNA, 22 nt, Human
uuuaucugugggaguuguuugg

SEQ ID NO: 770364 - RNA, 22 nt, Human
uuauuaugguauuucuuugcag

SEQ ID NO: 770365 - RNA, 22 nt, Human
caggaauguagcagcgauggaa

SEQ ID NO: 770366 - RNA, 22 nt, Human
aggaaagaaguacauucucaug

SEQ ID NO: 770367 - RNA, 22 nt, Human
guagggacaugccauuaucuca

SEQ ID NO: 770368 - RNA, 22 nt, Human
aauuguacauauuuaugagcga

SEQ ID NO: 770369 - RNA, 19 nt, Human
uuucugcagcccagcagca

SEQ ID NO: 770370 - RNA, 22 nt, Human
auccuuggauccuguguuccug

SEQ ID NO: 770371 - RNA, 22 nt, Human
ugguggccgaagcccucucuca

SEQ ID NO: 770372 - RNA, 22 nt, Human
ggcuuccagugaugccucuuug

SEQ ID NO: 770373 - RNA, 22 nt, Human
cugggcuuagcagcuccugguc

SEQ ID NO: 770374 - RNA, 22 nt, Human
ggcuuaagaugguagcuuugag

SEQ ID NO: 770375 - RNA, 22 nt, Human
ugcagagguuuuuaauacauuu

SEQ ID NO: 770376 - RNA, 22 nt, Human
ugcugccuaggaaucuguauuu

SEQ ID NO: 770377 - RNA, 22 nt, Human
uuccuggggcgacuguaucuga

SEQ ID NO: 770378 - RNA, 22 nt, Human
gucaauaucuugguuguacuau

SEQ ID NO: 770379 - RNA, 22 nt, Human
ugacaaguacauaauuucaugu

SEQ ID NO: 770380 - RNA, 22 nt, Human
cccuuuaaaguuuuaccagcag

SEQ ID NO: 770381 - RNA, 22 nt, Human
gcuuggggagcucaguguccuu

SEQ ID NO: 770382 - RNA, 22 nt, Human
uaugagaaauuauaccuagguu

SEQ ID NO: 770383 - RNA, 22 nt, Human
accaggaggccuugguucugag

SEQ ID NO: 770384 - RNA, 22 nt, Human
uuagccaugcccuagaagagga

SEQ ID NO: 770385 - RNA, 22 nt, Human
uaggucugauuuccauucaguc

SEQ ID NO: 770386 - RNA, 22 nt, Human
auggguggagggugacacggau

SEQ ID NO: 770387 - RNA, 22 nt, Human
cagcaaaugaguggcagggcag

SEQ ID NO: 770388 - RNA, 22 nt, Human
auuugaauggcuuaacacaacg

SEQ ID NO: 770389 - RNA, 22 nt, Human
auugggcuggccuucuggagag

SEQ ID NO: 770390 - RNA, 21 nt, Human
ccucugcucgggcaugcguuu

SEQ ID NO: 770391 - RNA, 22 nt, Human
ucuggaaugauuuccuuccccu

SEQ ID NO: 770392 - RNA, 22 nt, Human
uuuacuuuugguaaggucauuu

SEQ ID NO: 770393 - RNA, 22 nt, Human
gcaaugcaaucuuuauuauauu

SEQ ID NO: 770394 - RNA, 22 nt, Human
ugcagcugugccugaaaaguac

SEQ ID NO: 770395 - RNA, 22 nt, Human
ggcagaggaggggugaauuugc

SEQ ID NO: 770396 - RNA, 23 nt, Human
uuccagaguccacaucugccacc

SEQ ID NO: 770397 - RNA, 22 nt, Human
gagugcugagcccacuuccuug

SEQ ID NO: 770398 - RNA, 22 nt, Human
gugcagaggacguggcggccuc

SEQ ID NO: 770399 - RNA, 22 nt, Human
ucaguucugcuagaaaaacagu

SEQ ID NO: 770400 - RNA, 22 nt, Human
aaaagccaugcauaccuaagag

SEQ ID NO: 770401 - RNA, 22 nt, Human
uaugaacauguucauugacuua

SEQ ID NO: 770402 - RNA, 22 nt, Human
cuacuucuaaguacauggugau

SEQ ID NO: 770403 - RNA, 22 nt, Human
aagccagccagugccagucuua

SEQ ID NO: 770404 - RNA, 22 nt, Human
aagggcagcugacagaugcuua

SEQ ID NO: 770405 - RNA, 22 nt, Human
cucagaaagugacaggggggug

SEQ ID NO: 770406 - RNA, 22 nt, Human
gucugcugacagagcauggacc

SEQ ID NO: 770407 - RNA, 18 nt, Human
gcagagugcgucucugug

SEQ ID NO: 770408 - RNA, 22 nt, Human
cagugaggaugauaauuaaggu

SEQ ID NO: 770409 - RNA, 22 nt, Human
gacauucauuaagccuuucugu

SEQ ID NO: 770410 - RNA, 22 nt, Human
uuauuucuugucuauguagcca

SEQ ID NO: 770411 - RNA, 23 nt, Human
ggggaaagaccaugcuugaggac

SEQ ID NO: 770412 - RNA, 22 nt, Human
auucucuggcuaaaaccugaag

SEQ ID NO: 770413 - RNA, 22 nt, Human
ucccaggaucugagggcagaga

SEQ ID NO: 770414 - RNA, 22 nt, Human
ucugggcuugguuagggcuguu

SEQ ID NO: 770415 - RNA, 22 nt, Human
gggcugagccacagcuuuuguu

SEQ ID NO: 770416 - RNA, 22 nt, Human
agcaggguuccaggaguugcag

SEQ ID NO: 770417 - RNA, 22 nt, Human
ugcugaggcuagaccuggaagu

SEQ ID NO: 770418 - RNA, 22 nt, Human
cacagagaacugugggagugug

SEQ ID NO: 770419 - RNA, 22 nt, Human
agaauaaacugcuuuagggcag

SEQ ID NO: 770420 - RNA, 22 nt, Human
cuguccuccggccaccuacagu

SEQ ID NO: 770421 - RNA, 22 nt, Human
ugccagcacuucuggcugucug

SEQ ID NO: 770422 - RNA, 22 nt, Human
aaggcagaaauucaacuacugg

SEQ ID NO: 770423 - RNA, 22 nt, Human
uuuccuuugugcaggccuuggg

SEQ ID NO: 770424 - RNA, 22 nt, Human
ugggauagggcuauugcucaca

SEQ ID NO: 770425 - RNA, 23 nt, Human
agaggccagccuuuggagacacc

SEQ ID NO: 770426 - RNA, 20 nt, Human
auugacagaaaguguucacc

SEQ ID NO: 770427 - RNA, 22 nt, Human
guauauaucggcacuauuuuaa

SEQ ID NO: 770428 - RNA, 22 nt, Human
ucuguggccugccuccucauuu

SEQ ID NO: 770429 - RNA, 22 nt, Human
uugucaaguaaggcugacauuu

SEQ ID NO: 770430 - RNA, 22 nt, Human
ugagcugugucuuggugagagu

SEQ ID NO: 770431 - RNA, 22 nt, Human
guuucuuagacauaugccauga

SEQ ID NO: 770432 - RNA, 22 nt, Human
gacacuuuuuuaaagcucauua

SEQ ID NO: 770433 - RNA, 22 nt, Human
gcagguggugggggagccguuc

SEQ ID NO: 770434 - RNA, 22 nt, Human
aaaguacaugcaauucuucuga

SEQ ID NO: 770435 - RNA, 22 nt, Human
uuucagaguuauguaagaaaau

SEQ ID NO: 770436 - RNA, 23 nt, Human
cagcucagaguguguccuguuuc

SEQ ID NO: 770437 - RNA, 17 nt, Human
auacaaagccauaaacc

SEQ ID NO: 770438 - RNA, 22 nt, Human
uaauccaaaacugaaucugugg

SEQ ID NO: 770439 - RNA, 22 nt, Human
auguaaguuuaagcacaacaag

SEQ ID NO: 770440 - RNA, 22 nt, Human
ugacugugcaagcagagagcau

SEQ ID NO: 770441 - RNA, 22 nt, Human
cugaacucaugauaugcuuuug

SEQ ID NO: 770442 - RNA, 22 nt, Human
ccuggcagcagcacaugccuuc

SEQ ID NO: 770443 - RNA, 22 nt, Human
caagcuggaguuccucagagug

SEQ ID NO: 770444 - RNA, 22 nt, Human
ggccuugguggcuuugcugaug

SEQ ID NO: 770445 - RNA, 22 nt, Human
ugccuacuaguacuauuuugug

SEQ ID NO: 770446 - RNA, 22 nt, Human
uuggccaaauaaucuugcagau

SEQ ID NO: 770447 - RNA, 22 nt, Human
auuucccagggccugggauuug

SEQ ID NO: 770448 - RNA, 22 nt, Human
gaguuggcuacucucugaggcu

SEQ ID NO: 770449 - RNA, 22 nt, Human
aggcugugacagggucauggag

SEQ ID NO: 770450 - RNA, 22 nt, Human
ucugaggucagugcugcaguua

SEQ ID NO: 770451 - RNA, 18 nt, Human
ggagacuaaacuguugac

SEQ ID NO: 770452 - RNA, 22 nt, Human
auguuuuccauugccauggaaa

SEQ ID NO: 770453 - RNA, 22 nt, Human
ucugcaggcuuggaguggcagc

SEQ ID NO: 770454 - RNA, 22 nt, Human
uccugggaguaauugagucaug

SEQ ID NO: 770455 - RNA, 22 nt, Human
ucucaggcucuuggaaccuguu

SEQ ID NO: 770456 - RNA, 22 nt, Human
gaccuuccaugccuucuuccaa

SEQ ID NO: 770457 - RNA, 18 nt, Human
cacaggagccacacucac

SEQ ID NO: 770458 - RNA, 22 nt, Human
guuuaaagucuuggaaggagga

SEQ ID NO: 770459 - RNA, 22 nt, Human
uucucagaggcugcuaagugca

SEQ ID NO: 770460 - RNA, 23 nt, Human
ccauggagcauggcucacuaggc

SEQ ID NO: 770461 - RNA, 21 nt, Human
ucaugcaggcagaguuuggua

SEQ ID NO: 770462 - RNA, 22 nt, Human
uaguuuccuaggcuguauuguu

SEQ ID NO: 770463 - RNA, 22 nt, Human
ccucuggccauucuuugaugga

SEQ ID NO: 770464 - RNA, 22 nt, Human
guucuucaucauuuuagauagg

SEQ ID NO: 770465 - RNA, 22 nt, Human
cuucacaaucaccuuuucggaa

SEQ ID NO: 770466 - RNA, 22 nt, Human
ugccuggcugggcugcucaugg

SEQ ID NO: 770467 - RNA, 22 nt, Human
aagugucugauggagcgaaaug

SEQ ID NO: 770468 - RNA, 22 nt, Human
guaaaucauggucagaauaaau

SEQ ID NO: 770469 - RNA, 22 nt, Human
uggucucugcaggccaggcuca

SEQ ID NO: 770470 - RNA, 22 nt, Human
ucuggcuucuaugaauguccuu

SEQ ID NO: 770471 - RNA, 22 nt, Human
uacagaaaaacuggcauugaag

SEQ ID NO: 770472 - RNA, 22 nt, Human
cuguggaagguuuagauaggua

SEQ ID NO: 770473 - RNA, 22 nt, Human
cccugaaaguacacugggacgg

SEQ ID NO: 770474 - RNA, 22 nt, Human
cccuccagugucccagugggga

SEQ ID NO: 770475 - RNA, 22 nt, Human
ggcagcacugcagcuuguuggg

SEQ ID NO: 770476 - RNA, 23 nt, Human
uuaaaauguggucucucccuagu

SEQ ID NO: 770477 - RNA, 21 nt, Human
uacagucuccccuguugucca

SEQ ID NO: 770478 - RNA, 22 nt, Human
uuacaguacagaaaauaacaga

SEQ ID NO: 770479 - RNA, 22 nt, Human
gugaggugguacaauauuaacu

SEQ ID NO: 770480 - RNA, 16 nt, Human
ucauugaagacaguac

SEQ ID NO: 770481 - RNA, 22 nt, Human
agcaggaaggggaugaugggca

SEQ ID NO: 770482 - RNA, 22 nt, Human
uuaauuuuuauguauagugugu

SEQ ID NO: 770483 - RNA, 23 nt, Human
uuucagcauucuaguucagguuc

SEQ ID NO: 770484 - RNA, 22 nt, Human
uaugguuauccucaaaagagga

SEQ ID NO: 770485 - RNA, 22 nt, Human
caccugcagggggagucaagag

SEQ ID NO: 770486 - RNA, 22 nt, Human
auggcuagcaccgcguugcugg

SEQ ID NO: 770487 - RNA, 22 nt, Human
ccaggaagauuuauuuuggcuu

SEQ ID NO: 770488 - RNA, 22 nt, Human
gggugguggccagcagugggca

SEQ ID NO: 770489 - RNA, 22 nt, Human
auauacacaucuuuuuaaauau

SEQ ID NO: 770490 - RNA, 22 nt, Human
ccacauuuacuggaugcucagg

SEQ ID NO: 770491 - RNA, 22 nt, Human
ugggccuccuuuccauucagag

SEQ ID NO: 770492 - RNA, 22 nt, Human
cccaaguauuccuccucugccc

SEQ ID NO: 770493 - RNA, 22 nt, Human
agacaauuguucuaaguaaaaa

SEQ ID NO: 770494 - RNA, 18 nt, Human
cccagaggaaugccugga

SEQ ID NO: 770495 - RNA, 22 nt, Human
ucuuauaaaaggacucccauuu

SEQ ID NO: 770496 - RNA, 22 nt, Human
gcucucuugguggcuguccugg

SEQ ID NO: 770497 - RNA, 22 nt, Human
caaggcaguuccccagagggcu

SEQ ID NO: 770498 - RNA, 22 nt, Human
acuuucauuugugaagacugua

SEQ ID NO: 770499 - RNA, 23 nt, Human
ucaaaggaggcaucguucugcag

SEQ ID NO: 770500 - RNA, 22 nt, Human
agcaacagcagguuugcacucc

SEQ ID NO: 770501 - RNA, 22 nt, Human
auggaaagcuaagccauuuacc

SEQ ID NO: 770502 - RNA, 22 nt, Human
guuauacaguuuugggucugcu

SEQ ID NO: 770503 - RNA, 18 nt, Human
uucaguuucuaguuccuu

SEQ ID NO: 770504 - RNA, 22 nt, Human
ucaggaauccagacagggcaca

SEQ ID NO: 770505 - RNA, 17 nt, Human
accaggcaacacgccca

SEQ ID NO: 770506 - RNA, 19 nt, Human
uguggccuggggacaggcc

SEQ ID NO: 770507 - RNA, 22 nt, Human
ugaagauuuuguagcuuucagc

SEQ ID NO: 770508 - RNA, 22 nt, Human
ccuggagcaggagcugcagagg

SEQ ID NO: 770509 - RNA, 19 nt, Human
agaggcagucuccaacagg

SEQ ID NO: 770510 - RNA, 22 nt, Human
augugcugaguguguauauaca

SEQ ID NO: 770511 - RNA, 22 nt, Human
cuucuuuaauguauacaaaaga

SEQ ID NO: 770512 - RNA, 22 nt, Human
cuacauacuguguguaaagaau

SEQ ID NO: 770513 - RNA, 22 nt, Human
ucuccaggaagcccucccugac

SEQ ID NO: 770514 - RNA, 22 nt, Human
agcuguuggcuggcugagcucu

SEQ ID NO: 770515 - RNA, 22 nt, Human
gcaaacauuccacagaaggaag

SEQ ID NO: 770516 - RNA, 23 nt, Human
cucccuggaguuucuggaagaug

SEQ ID NO: 770517 - RNA, 22 nt, Human
cuggguuccauguagccaagag

SEQ ID NO: 770518 - RNA, 22 nt, Human
ucucccaagugaccaggaaaga

SEQ ID NO: 770519 - RNA, 20 nt, Human
ccacaugagcucuuucugac

SEQ ID NO: 770520 - RNA, 22 nt, Human
uucucuccuccuagaggcuuuu

SEQ ID NO: 770521 - RNA, 22 nt, Human
ucuggccccgcaugcacuuuau

SEQ ID NO: 770522 - RNA, 22 nt, Human
acauuaaacuugcuuggcugua

SEQ ID NO: 770523 - RNA, 22 nt, Human
cugcagcugcucauguuacuug

SEQ ID NO: 770524 - RNA, 22 nt, Human
agcagcaaaagagaauaguuug

SEQ ID NO: 770525 - RNA, 22 nt, Human
ucugaaauggggcugaagcacu

SEQ ID NO: 770526 - RNA, 23 nt, Human
ugcugguucaaaaaggaaggagg

SEQ ID NO: 770527 - RNA, 22 nt, Human
caaagggcggcugucggagggu

SEQ ID NO: 770528 - RNA, 22 nt, Human
uagcagagcacaucuucauucu

SEQ ID NO: 770529 - RNA, 22 nt, Human
gacugagaaacaguacauuacc

SEQ ID NO: 770530 - RNA, 20 nt, Human
gacaucauguacacauugcc

SEQ ID NO: 770531 - RNA, 22 nt, Human
ugaaaucugcaugcaaaguccu

SEQ ID NO: 770532 - RNA, 22 nt, Human
uggaguccuuguuggaagugaa

SEQ ID NO: 770533 - RNA, 22 nt, Human
uggcagcaguggagguagaaag

SEQ ID NO: 770534 - RNA, 18 nt, Human
ugagagccugcuuguccc

SEQ ID NO: 770535 - RNA, 22 nt, Human
cccaguaccucuguucccugcu

SEQ ID NO: 770536 - RNA, 22 nt, Human
ugagugagcuggggagccggug

SEQ ID NO: 770537 - RNA, 22 nt, Human
acagugcuaaacacuucuugaa

SEQ ID NO: 770538 - RNA, 22 nt, Human
gcaauagacuguuuuuauuguu

SEQ ID NO: 770539 - RNA, 22 nt, Human
uuuaauuauaucugggcaguua

SEQ ID NO: 770540 - RNA, 22 nt, Human
acacacuggagguaaauggggu

SEQ ID NO: 770541 - RNA, 22 nt, Human
agcugccaucugaagaacugca

SEQ ID NO: 770542 - RNA, 18 nt, Human
ggguccugugggagacag

SEQ ID NO: 770543 - RNA, 20 nt, Human
ugacaguuucauaugguuca

SEQ ID NO: 770544 - RNA, 22 nt, Human
acaggugggcuuaagagucggc

SEQ ID NO: 770545 - RNA, 22 nt, Human
cugggcacaggggagcagaguc

SEQ ID NO: 770546 - RNA, 19 nt, Human
gagaggccugugcuugaag

SEQ ID NO: 770547 - RNA, 22 nt, Human
gacccugguguccagguccugc

SEQ ID NO: 770548 - RNA, 22 nt, Human
cggggcugcucguccuccugug

SEQ ID NO: 770549 - RNA, 22 nt, Human
uggcuggaggcaugcaagcucc

SEQ ID NO: 770550 - RNA, 22 nt, Human
cugccuggccacaacccagggu

SEQ ID NO: 770551 - RNA, 22 nt, Human
cagugucuuauuuguagcucag

SEQ ID NO: 770552 - RNA, 22 nt, Human
aggccugucuggggcucagcca

SEQ ID NO: 770553 - RNA, 22 nt, Human
caagcugguaucagcuagagcg

SEQ ID NO: 770554 - RNA, 22 nt, Human
augcuguguuuuaaauggaaau

SEQ ID NO: 770555 - RNA, 22 nt, Human
cgccuggaaccucuaggaccag

SEQ ID NO: 770556 - RNA, 20 nt, Human
gggcuuggaggacucgaggg

SEQ ID NO: 770557 - RNA, 22 nt, Human
cauccagaccgugccaugcugc

SEQ ID NO: 770558 - RNA, 22 nt, Human
ggagagaggagcccacugcugu

SEQ ID NO: 770559 - RNA, 22 nt, Human
uccuguuaguguuagacuuccc

SEQ ID NO: 770560 - RNA, 22 nt, Human
uacauuguuuuuucuugccauc

SEQ ID NO: 770561 - RNA, 22 nt, Human
uguccccagagccuguuccugc

SEQ ID NO: 770562 - RNA, 19 nt, Human
cugcucaggucagucuguc

SEQ ID NO: 770563 - RNA, 21 nt, Human
agagcaaguuaaggcauuaau

SEQ ID NO: 770564 - RNA, 18 nt, Human
ugugaacacauuuuucug

SEQ ID NO: 770565 - RNA, 22 nt, Human
ucugacauuuugagaaugacau

SEQ ID NO: 770566 - RNA, 22 nt, Human
ccuccagaggguuucccaugaa

SEQ ID NO: 770567 - RNA, 22 nt, Human
gagcaggaacagaucccuugga

SEQ ID NO: 770568 - RNA, 22 nt, Human
uaccaaagaauauuuuaaauag

SEQ ID NO: 770569 - RNA, 22 nt, Human
uuccacggggcuccccgcucuu

SEQ ID NO: 770570 - RNA, 22 nt, Human
uucugcaggagcccuaguguau

SEQ ID NO: 770571 - RNA, 22 nt, Human
cugagccauccauaccagcuua

SEQ ID NO: 770572 - RNA, 20 nt, Human
auagaucagugagacuaaag

SEQ ID NO: 770573 - RNA, 23 nt, Human
acaugcaaaaaucacagucuccu

SEQ ID NO: 770574 - RNA, 21 nt, Human
acagugugcuucucucccucc

SEQ ID NO: 770575 - RNA, 22 nt, Human
uaggaauugcccgugggguccu

SEQ ID NO: 770576 - RNA, 22 nt, Human
aaaugcaugugcuauagaugug

SEQ ID NO: 770577 - RNA, 22 nt, Human
acagucuuuagaguauuguccu

SEQ ID NO: 770578 - RNA, 22 nt, Human
aucuguaaagauaaucauaugu

SEQ ID NO: 770579 - RNA, 22 nt, Human
gacagacacaauugauccauga

SEQ ID NO: 770580 - RNA, 22 nt, Human
aaucagcuaaauaaacuaguca

SEQ ID NO: 770581 - RNA, 23 nt, Human
uggcaaagcauucuuauaacagu

SEQ ID NO: 770582 - RNA, 22 nt, Human
ucugucaggagauuggcagcug

SEQ ID NO: 770583 - RNA, 22 nt, Human
ugcagaggugugcauucuuaag

SEQ ID NO: 770584 - RNA, 22 nt, Human
guggcagggcuuugcuguucuu

SEQ ID NO: 770585 - RNA, 22 nt, Human
acuugaaacccugagaugauaa

SEQ ID NO: 770586 - RNA, 22 nt, Human
agagcuggggccagagucaagg

SEQ ID NO: 770587 - RNA, 22 nt, Human
aucugaaaaaucuccuuuguca

SEQ ID NO: 770588 - RNA, 22 nt, Human
uaugagaaaggagaaugacuuu

SEQ ID NO: 770589 - RNA, 22 nt, Human
cguggccuuugagugagcuccc

SEQ ID NO: 770590 - RNA, 22 nt, Human
guccugugaugaguaccaggug

SEQ ID NO: 770591 - RNA, 22 nt, Human
uccagccaagggagguuacuag

SEQ ID NO: 770592 - RNA, 22 nt, Human
agggaucaaaaaauguacaugc

SEQ ID NO: 770593 - RNA, 22 nt, Human
ccuggagagcucgggccaggca

SEQ ID NO: 770594 - RNA, 22 nt, Human
ugcuuaaacacauacauacaua

SEQ ID NO: 770595 - RNA, 20 nt, Human
gggcuggcgcauggggaaag

SEQ ID NO: 770596 - RNA, 22 nt, Human
uucugagaagggugggucuggc

SEQ ID NO: 770597 - RNA, 22 nt, Human
ugucuucagcagucaucugggg

SEQ ID NO: 770598 - RNA, 22 nt, Human
uaacaaaguaccauagacugga

SEQ ID NO: 770599 - RNA, 19 nt, Human
cucugccucuggcuguggc

SEQ ID NO: 770600 - RNA, 22 nt, Human
gagcuuggacaccuuggcaggu

SEQ ID NO: 770601 - RNA, 19 nt, Human
uaaggcagcagugacaggc

SEQ ID NO: 770602 - RNA, 22 nt, Human
aacuguggcauguugaauuugu

SEQ ID NO: 770603 - RNA, 22 nt, Human
gucuagaaaugccauacgugcc

SEQ ID NO: 770604 - RNA, 22 nt, Human
ucaggccccaucccagacuuau

SEQ ID NO: 770605 - RNA, 21 nt, Human
ucuuuccaauauucaugucuc

SEQ ID NO: 770606 - RNA, 22 nt, Human
gcccacugagugacucccucag

SEQ ID NO: 770607 - RNA, 22 nt, Human
ggauggcuguaaaaggugggaa

SEQ ID NO: 770608 - RNA, 22 nt, Human
aagagcugugggugguaguccu

SEQ ID NO: 770609 - RNA, 23 nt, Human
ugcuucucugcuugacaguucug

SEQ ID NO: 770610 - RNA, 22 nt, Human
agaaaagugcucuagugagagc

SEQ ID NO: 770611 - RNA, 19 nt, Human
ucccuucuauaguaauaaa

SEQ ID NO: 770612 - RNA, 23 nt, Human
cccaggcuacaaauuaugcucug

SEQ ID NO: 770613 - RNA, 22 nt, Human
cagccugcagggcugccuguug

SEQ ID NO: 770614 - RNA, 22 nt, Human
agaaaugaagagagucaagguu

SEQ ID NO: 770615 - RNA, 21 nt, Human
uccuccuucaaguccuggccu

SEQ ID NO: 770616 - RNA, 22 nt, Human
uuacaacagacacauauucuaa

SEQ ID NO: 770617 - RNA, 22 nt, Human
gcuuccccuccaagcacugccu

SEQ ID NO: 770618 - RNA, 22 nt, Human
agcucccagaguccucugccca

SEQ ID NO: 770619 - RNA, 22 nt, Human
uuccugggguacuggagaaaau

SEQ ID NO: 770620 - RNA, 21 nt, Human
acaauagacauaagcagagca

SEQ ID NO: 770621 - RNA, 22 nt, Human
ugcaggcuuuagccccauggcu

SEQ ID NO: 770622 - RNA, 22 nt, Human
ucugaaauggcgauggccguug

SEQ ID NO: 770623 - RNA, 22 nt, Human
uucauaguguuuccuuccagug

SEQ ID NO: 770624 - RNA, 22 nt, Human
ucuuuaauguacuuucuuucac

SEQ ID NO: 770625 - RNA, 22 nt, Human
gugggugucaguaucuuuaacg

SEQ ID NO: 770626 - RNA, 22 nt, Human
gagccugcagcuuucacagcau

SEQ ID NO: 770627 - RNA, 22 nt, Human
gagaggcucugaggacuggggu

SEQ ID NO: 770628 - RNA, 22 nt, Human
ugcagagggaaaaggugcuccu

SEQ ID NO: 770629 - RNA, 22 nt, Human
acuuuacagaugguuuccugac

SEQ ID NO: 770630 - RNA, 22 nt, Human
acagugugggacauuaggaaau

SEQ ID NO: 770631 - RNA, 22 nt, Human
aggaggcuguggagcacuccau

SEQ ID NO: 770632 - RNA, 22 nt, Human
uuucuuaggcucuaaaaugacu

SEQ ID NO: 770633 - RNA, 22 nt, Human
aggugggggcuguguccuugac

SEQ ID NO: 770634 - RNA, 22 nt, Human
gguacaaggagugaagguuugg

SEQ ID NO: 770635 - RNA, 22 nt, Human
gcucuguguccacagcuggaaa

SEQ ID NO: 770636 - RNA, 22 nt, Human
guuccaggcaagugggauagga

SEQ ID NO: 770637 - RNA, 22 nt, Human
gugguccucauaauucagugag

SEQ ID NO: 770638 - RNA, 22 nt, Human
gcugagugauugauauuuuagu

SEQ ID NO: 770639 - RNA, 17 nt, Human
ccaggagcgugggucuc

SEQ ID NO: 770640 - RNA, 22 nt, Human
cucuuuagucuguguggagaag

SEQ ID NO: 770641 - RNA, 22 nt, Human
ugcuuuguguuugaauagauaa

SEQ ID NO: 770642 - RNA, 22 nt, Human
ggucccaggcucccucuugucc

SEQ ID NO: 770643 - RNA, 22 nt, Human
aaacuuauuuuaucacaguuca

SEQ ID NO: 770644 - RNA, 22 nt, Human
gagcagcaagcacucaaaggcu

SEQ ID NO: 770645 - RNA, 22 nt, Human
aguccagugucaaggugccauu

SEQ ID NO: 770646 - RNA, 22 nt, Human
uccagagcuguaugauuuuuuu

SEQ ID NO: 770647 - RNA, 22 nt, Human
caugcuguguguuuuagcucca

SEQ ID NO: 770648 - RNA, 22 nt, Human
acagucugcagggugaacaugu

SEQ ID NO: 770649 - RNA, 22 nt, Human
auaaagccuuucuguuuucagg

SEQ ID NO: 770650 - RNA, 22 nt, Human
agacuucucaguuuuauuagua

SEQ ID NO: 770651 - RNA, 22 nt, Human
agcagccagagaaugaugcagu

SEQ ID NO: 770652 - RNA, 22 nt, Human
ccagcugcccacuauguguucu

SEQ ID NO: 770653 - RNA, 22 nt, Human
caggcgggcaggugcggccccu

SEQ ID NO: 770654 - RNA, 22 nt, Human
cugaauaauguucucuuguaug

SEQ ID NO: 770655 - RNA, 22 nt, Human
agcaaggccgagaggaugcuau

SEQ ID NO: 770656 - RNA, 22 nt, Human
ucugcuuuagugcaaagucuua

SEQ ID NO: 770657 - RNA, 22 nt, Human
ggcugcagaaguacuuccggau

SEQ ID NO: 770658 - RNA, 15 nt, Human
ggugucugcagugug

SEQ ID NO: 770659 - RNA, 22 nt, Human
aaggucauuuuuuccucuguug

SEQ ID NO: 770660 - RNA, 22 nt, Human
aucacagggugaggauuagacc

SEQ ID NO: 770661 - RNA, 22 nt, Human
gcugccagaagaggagggguua

SEQ ID NO: 770662 - RNA, 22 nt, Human
uucauagugacaugcauucugg

SEQ ID NO: 770663 - RNA, 22 nt, Human
ugcuggaguggcacuguguggc

SEQ ID NO: 770664 - RNA, 22 nt, Human
gcagggugccgacuucagggau

SEQ ID NO: 770665 - RNA, 22 nt, Human
auuccaaaaggauguuagaaug

SEQ ID NO: 770666 - RNA, 22 nt, Human
gggcuugguggagagaaugcug

SEQ ID NO: 770667 - RNA, 22 nt, Human
uacuuucaugucuauacauauu

SEQ ID NO: 770668 - RNA, 22 nt, Human
ggcagggaggaggugaaaguga

SEQ ID NO: 770669 - RNA, 22 nt, Human
caugaaaauaacauuguuguga

SEQ ID NO: 770670 - RNA, 22 nt, Human
uuagugguacucagggagggaa

SEQ ID NO: 770671 - RNA, 22 nt, Human
ugcugucugcaacaguacuaca

SEQ ID NO: 770672 - RNA, 22 nt, Human
cagucuuagaggugacugugga

SEQ ID NO: 770673 - RNA, 22 nt, Human
auucuuauuauaguaaaacagu

SEQ ID NO: 770674 - RNA, 22 nt, Human
ccucuucagcaaaguucggccc

SEQ ID NO: 770675 - RNA, 22 nt, Human
ggcucugcuggauugaggccag

SEQ ID NO: 770676 - RNA, 22 nt, Human
caugcaggaggaaaaagcagcu

SEQ ID NO: 770677 - RNA, 22 nt, Human
ugaauugugaccccucuguauu

SEQ ID NO: 770678 - RNA, 22 nt, Human
uaucuguuguaguacagaugau

SEQ ID NO: 770679 - RNA, 18 nt, Human
guuauucucucugcagua

SEQ ID NO: 770680 - RNA, 21 nt, Human
aaggcugagacaacucaggag

SEQ ID NO: 770681 - RNA, 22 nt, Human
agggaaggagguuagaacccac

SEQ ID NO: 770682 - RNA, 23 nt, Human
ugcaguaggauggggcugggccu

SEQ ID NO: 770683 - RNA, 22 nt, Human
ucugggaagcugguccuguucu

SEQ ID NO: 770684 - RNA, 22 nt, Human
uacauacauauucauacaggug

SEQ ID NO: 770685 - RNA, 22 nt, Human
uccccaggggcaucucucugcu

SEQ ID NO: 770686 - RNA, 22 nt, Human
agagaaaugggguaaucuuuca

SEQ ID NO: 770687 - RNA, 22 nt, Human
uuccaguuaaggaagcuauucu

SEQ ID NO: 770688 - RNA, 22 nt, Human
aaucuaaggacuuagcauugcu

SEQ ID NO: 770689 - RNA, 22 nt, Human
augucuguggcauuauauguuu

SEQ ID NO: 770690 - RNA, 22 nt, Human
acugcagccuugaacucugggc

SEQ ID NO: 770691 - RNA, 17 nt, Human
gaaggccugcacaggcc

SEQ ID NO: 770692 - RNA, 22 nt, Human
uggagguggcacaagggagguc

SEQ ID NO: 770693 - RNA, 21 nt, Human
ucagucauugccuccuucugg

SEQ ID NO: 770694 - RNA, 22 nt, Human
agaacaauguuaaauuauuaag

SEQ ID NO: 770695 - RNA, 22 nt, Human
uucauuuauucagcagguauuu

SEQ ID NO: 770696 - RNA, 22 nt, Human
aguaugaauugcuuugccugua

SEQ ID NO: 770697 - RNA, 22 nt, Human
augucuguccaacccugcaggg

SEQ ID NO: 770698 - RNA, 21 nt, Human
ucuccaguugacagugucucc

SEQ ID NO: 770699 - RNA, 22 nt, Human
agggcuuugauggcauucucau

SEQ ID NO: 770700 - RNA, 22 nt, Human
aacauucaaaacccaguucagu

SEQ ID NO: 770701 - RNA, 22 nt, Human
ggucagagaaaaguaggguguu

SEQ ID NO: 770702 - RNA, 22 nt, Human
ucugggccucaguuucuucauc

SEQ ID NO: 770703 - RNA, 19 nt, Human
acacaugcuccuggagccu

SEQ ID NO: 770704 - RNA, 22 nt, Human
caggaaaggugugucaugaugg

SEQ ID NO: 770705 - RNA, 22 nt, Human
cagucucuuuucagcuccaucc

SEQ ID NO: 770706 - RNA, 22 nt, Human
cagguccugccuugguuacccu

SEQ ID NO: 770707 - RNA, 19 nt, Human
cacaacuucgcuugauucc

SEQ ID NO: 770708 - RNA, 22 nt, Human
uggcccugaggggcugugcccc

SEQ ID NO: 770709 - RNA, 22 nt, Human
ccauccauauggugacaaggug

SEQ ID NO: 770710 - RNA, 22 nt, Human
ggagaauucuuuauuagcuuuu

SEQ ID NO: 770711 - RNA, 22 nt, Human
ugcagauggggaucaguggcuc

SEQ ID NO: 770712 - RNA, 22 nt, Human
ucaccccuggcccagucuugga

SEQ ID NO: 770713 - RNA, 22 nt, Human
ucacagugagccaugucagaga

SEQ ID NO: 770714 - RNA, 22 nt, Human
ccacucugcugugcuccaugau

SEQ ID NO: 770715 - RNA, 22 nt, Human
gggcaugagagggcagcuggca

SEQ ID NO: 770716 - RNA, 22 nt, Human
aaucuguuuaguucugcguaug

SEQ ID NO: 770717 - RNA, 22 nt, Human
gugcugagauuacaggugugag

SEQ ID NO: 770718 - RNA, 22 nt, Human
uuugcauaaaggagcauuucuc

SEQ ID NO: 770719 - RNA, 22 nt, Human
ccaggacuucgaggcuacagug

SEQ ID NO: 770720 - RNA, 22 nt, Human
gauggcuuugccugcugugagg

SEQ ID NO: 770721 - RNA, 22 nt, Human
ccagacagcaguuaaaggacau

SEQ ID NO: 770722 - RNA, 22 nt, Human
ucaagucauuugacuguguguu

SEQ ID NO: 770723 - RNA, 22 nt, Human
cagugaggcucugcugagcggu

SEQ ID NO: 770724 - RNA, 22 nt, Human
agagcugucacauagagccaga

SEQ ID NO: 770725 - RNA, 22 nt, Human
gggaacagaggaggguguugcu

SEQ ID NO: 770726 - RNA, 22 nt, Human
augucucucagguuuaacuuua

SEQ ID NO: 770727 - RNA, 22 nt, Human
aacaggcuuuuggaaaguuaca

SEQ ID NO: 770728 - RNA, 19 nt, Human
gcaggcagcugggguaucc

SEQ ID NO: 770729 - RNA, 22 nt, Human
ucuuugaauuucugacugucuu

SEQ ID NO: 770730 - RNA, 17 nt, Human
ucagucucuguccugga

SEQ ID NO: 770731 - RNA, 22 nt, Human
gaucauuuacuuguucuggacu

SEQ ID NO: 770732 - RNA, 22 nt, Human
ucaggaggcgucucgcuggggc

SEQ ID NO: 770733 - RNA, 22 nt, Human
acucugaggagugacuagaggu

SEQ ID NO: 770734 - RNA, 23 nt, Human
cucuggguccgauguccugacag

SEQ ID NO: 770735 - RNA, 22 nt, Human
uagcuuuaggaugguucucuug

SEQ ID NO: 770736 - RNA, 22 nt, Human
ucugugcaggaagucauuauga

SEQ ID NO: 770737 - RNA, 22 nt, Human
ucucugggaauuuuuuggacau

SEQ ID NO: 770738 - RNA, 22 nt, Human
ucauggaagaaagguuuguuuc

SEQ ID NO: 770739 - RNA, 22 nt, Human
auugugaauugagaguacuucu

SEQ ID NO: 770740 - RNA, 22 nt, Human
ccagguucaaauagcuguguga

SEQ ID NO: 770741 - RNA, 22 nt, Human
aggcucuccuccccaggaccau

SEQ ID NO: 770742 - RNA, 22 nt, Human
acaaaaguguaggaauuccuua

SEQ ID NO: 770743 - RNA, 22 nt, Human
aguucccaggugaugcugaugu

SEQ ID NO: 770744 - RNA, 22 nt, Human
uggccucuggcugaggacuaac

SEQ ID NO: 770745 - RNA, 22 nt, Human
augucugucuauagccaugaga

SEQ ID NO: 770746 - RNA, 22 nt, Human
uguuuaauuuuucaugagccaa

SEQ ID NO: 770747 - RNA, 22 nt, Human
gagggagagugauggaccauug

SEQ ID NO: 770748 - RNA, 22 nt, Human
ucugggcugugguuccacuccg

SEQ ID NO: 770749 - RNA, 22 nt, Human
gagguuggcgcccugccuggcc

SEQ ID NO: 770750 - RNA, 22 nt, Human
cucuguguucagccuagcagaa

SEQ ID NO: 770751 - RNA, 22 nt, Human
caggcuagauuggggccaguag

SEQ ID NO: 770752 - RNA, 22 nt, Human
gucaaacagccuccuguucuaa

SEQ ID NO: 770753 - RNA, 22 nt, Human
cccaggucugccagccuguggg

SEQ ID NO: 770754 - RNA, 22 nt, Human
guggggcugaguggagccagaa

SEQ ID NO: 770755 - RNA, 23 nt, Human
guaaaauacgcagugcaguguga

SEQ ID NO: 770756 - RNA, 22 nt, Human
uaugcacacaucgcagcaggaa

SEQ ID NO: 770757 - RNA, 21 nt, Human
aguuuuccauuagggagggag

SEQ ID NO: 770758 - RNA, 22 nt, Human
ugauugaagcuagaacaaccau

SEQ ID NO: 770759 - RNA, 22 nt, Human
uucuucagacucccucuuuaag

SEQ ID NO: 770760 - RNA, 22 nt, Human
uuccaggaggagguacuagagg

SEQ ID NO: 770761 - RNA, 22 nt, Human
uuuaucagagauauguguggac

SEQ ID NO: 770762 - RNA, 22 nt, Human
aaagcagugcaccuuaauugau

SEQ ID NO: 770763 - RNA, 22 nt, Human
agcuggaaagaagguggcagcc

SEQ ID NO: 770764 - RNA, 22 nt, Human
cuacaugaacucuuaagucaca

SEQ ID NO: 770765 - RNA, 22 nt, Human
uucuuuucaagaggggcaagga

SEQ ID NO: 770766 - RNA, 22 nt, Human
cuggcugggcagacagaaugcu

SEQ ID NO: 770767 - RNA, 22 nt, Human
aucuguuguuuuucaccaccca

SEQ ID NO: 770768 - RNA, 22 nt, Human
uuacaaucugauugucucaucu

SEQ ID NO: 770769 - RNA, 22 nt, Human
uacaaguauguuuuaaaauguu

SEQ ID NO: 770770 - RNA, 22 nt, Human
auuuauuaagcaucugcuaugu

SEQ ID NO: 770771 - RNA, 20 nt, Human
gcauggcauguagugaagug

SEQ ID NO: 770772 - RNA, 22 nt, Human
caaugucuucuauaguuacuca

SEQ ID NO: 770773 - RNA, 22 nt, Human
agagccugaggcccugagaggg

SEQ ID NO: 770774 - RNA, 22 nt, Human
acugagaacucaagagaaaagg

SEQ ID NO: 770775 - RNA, 22 nt, Human
uuuguuuagagaauugaagcag

SEQ ID NO: 770776 - RNA, 22 nt, Human
uguauguguggauagauguaua

SEQ ID NO: 770777 - RNA, 22 nt, Human
uaggauggucacagagauggac

SEQ ID NO: 770778 - RNA, 22 nt, Human
ugcacaugugccuguggcacau

SEQ ID NO: 770779 - RNA, 22 nt, Human
ggagacaguauggcuuguagcu

SEQ ID NO: 770780 - RNA, 19 nt, Human
ucugaggguccagaugcau

SEQ ID NO: 770781 - RNA, 22 nt, Human
agauaaucucuaggcuucaugu

SEQ ID NO: 770782 - RNA, 22 nt, Human
uaagcaaauagcuagaucagag

SEQ ID NO: 770783 - RNA, 22 nt, Human
aagcuggccucaaacuccuagc

SEQ ID NO: 770784 - RNA, 22 nt, Human
aagaaugucaagcagaaggucu

SEQ ID NO: 770785 - RNA, 22 nt, Human
cuggucuggcuacccagcgaau

SEQ ID NO: 770786 - RNA, 22 nt, Human
ggcugugcaccauccaccuccc

SEQ ID NO: 770787 - RNA, 22 nt, Human
ggugugggggcagcucugauau

SEQ ID NO: 770788 - RNA, 22 nt, Human
ugacagugacagccaaaggcuu

SEQ ID NO: 770789 - RNA, 22 nt, Human
acaugaaacccagccguggucc

SEQ ID NO: 770790 - RNA, 22 nt, Human
uuucuagucagccauaucuagu

SEQ ID NO: 770791 - RNA, 22 nt, Human
cugaagaggacuggguuggagg

SEQ ID NO: 770792 - RNA, 22 nt, Human
ggccaggccaagaggguuggaa

SEQ ID NO: 770793 - RNA, 22 nt, Human
gugcaugcaaauuacuguaaag

SEQ ID NO: 770794 - RNA, 22 nt, Human
auuaaaacuaaaaugccugauu

SEQ ID NO: 770795 - RNA, 22 nt, Human
gugaaggacuagcauggagggc

SEQ ID NO: 770796 - RNA, 22 nt, Human
uuggaaauugcaagugauuugc

SEQ ID NO: 770797 - RNA, 21 nt, Human
auaucacaaacauauggucug

SEQ ID NO: 770798 - RNA, 22 nt, Human
ucccagaggaaauggcagcuga

SEQ ID NO: 770799 - RNA, 22 nt, Human
ggcacugagcugccuuggggca

SEQ ID NO: 770800 - RNA, 22 nt, Human
acuggcaucuguggguagaggc

SEQ ID NO: 770801 - RNA, 18 nt, Human
uccaggccugaagugucc

SEQ ID NO: 770802 - RNA, 22 nt, Human
cgagcagagcagagacgucugg

SEQ ID NO: 770803 - RNA, 22 nt, Human
cagcaacggaaaauacacauag

SEQ ID NO: 770804 - RNA, 22 nt, Human
acaggaggagcuguuucaggga

SEQ ID NO: 770805 - RNA, 22 nt, Human
aguguguaauucagugcccagc

SEQ ID NO: 770806 - RNA, 22 nt, Human
ugagggggguaaucacuggguu

SEQ ID NO: 770807 - RNA, 22 nt, Human
ucuggaaggaacccuuagagga

SEQ ID NO: 770808 - RNA, 22 nt, Human
caguagcacucugucagugaag

SEQ ID NO: 770809 - RNA, 23 nt, Human
acuuaaaugguucuuuaucucag

SEQ ID NO: 770810 - RNA, 22 nt, Human
ucaguguuggcuacaucugccu

SEQ ID NO: 770811 - RNA, 22 nt, Human
uuucauaugggcauuggcaaua

SEQ ID NO: 770812 - RNA, 22 nt, Human
uucagaaguuuucaaaacuaag

SEQ ID NO: 770813 - RNA, 22 nt, Human
ccagacuggggcuccuugaggg

SEQ ID NO: 770814 - RNA, 22 nt, Human
cacaauguauauguauaucaaa

SEQ ID NO: 770815 - RNA, 20 nt, Human
ucuggacugucagacaggga

SEQ ID NO: 770816 - RNA, 22 nt, Human
agcaggaggguuuuguagaguc

SEQ ID NO: 770817 - RNA, 18 nt, Human
agcuggggccucuggucc

SEQ ID NO: 770818 - RNA, 22 nt, Human
gauucuuacuucuaagcaagcu

SEQ ID NO: 770819 - RNA, 22 nt, Human
ccucacagaggggcagccaucu

SEQ ID NO: 770820 - RNA, 22 nt, Human
acuuucaaauaucaugauucua

SEQ ID NO: 770821 - RNA, 22 nt, Human
aagucagagaucaaggugucua

SEQ ID NO: 770822 - RNA, 18 nt, Human
gcucugguuccuucaacc

SEQ ID NO: 770823 - RNA, 22 nt, Human
ggccuguggcaaggugagaaug

SEQ ID NO: 770824 - RNA, 22 nt, Human
uggaauuuuguauuagcuuuga

SEQ ID NO: 770825 - RNA, 23 nt, Human
gcucaggcaucauucuuccuggc

SEQ ID NO: 770826 - RNA, 22 nt, Human
caguaaaugguacguauauuuu

SEQ ID NO: 770827 - RNA, 22 nt, Human
aaugauauuuauugaauagaug

SEQ ID NO: 770828 - RNA, 22 nt, Human
gcacugcuuucugagucauugu

SEQ ID NO: 770829 - RNA, 22 nt, Human
auucuuugaacaguuuuccugu

SEQ ID NO: 770830 - RNA, 22 nt, Human
uguguguagaaagggcccuggu

SEQ ID NO: 770831 - RNA, 22 nt, Human
uggacaucuuagucaugucaau

SEQ ID NO: 770832 - RNA, 22 nt, Human
aaagugcagaacuguucucacu

SEQ ID NO: 770833 - RNA, 22 nt, Human
ugacauuuuuauaagagucaaa

SEQ ID NO: 770834 - RNA, 22 nt, Human
ucagaaucuuucuagagucuag

SEQ ID NO: 770835 - RNA, 20 nt, Human
uucaaaguguaugauaugca

SEQ ID NO: 770836 - RNA, 22 nt, Human
auuucuugauuccaccagugaa

SEQ ID NO: 770837 - RNA, 22 nt, Human
aagugucugacacaaaauaugu

SEQ ID NO: 770838 - RNA, 22 nt, Human
ggaaagagcuaaaagggugaga

SEQ ID NO: 770839 - RNA, 21 nt, Human
agaucccugaggagagcaucc

SEQ ID NO: 770840 - RNA, 22 nt, Human
gcagcuguacuggcagcauugu

SEQ ID NO: 770841 - RNA, 20 nt, Human
ucuucuguugccuuguucug

SEQ ID NO: 770842 - RNA, 22 nt, Human
aauguuugaccaaaaaacugca

SEQ ID NO: 770843 - RNA, 22 nt, Human
gacaggguccaaaggcagggga

SEQ ID NO: 770844 - RNA, 20 nt, Human
agucucuguagugccugaga

SEQ ID NO: 770845 - RNA, 22 nt, Human
cccuuccuggaguacccucugu

SEQ ID NO: 770846 - RNA, 22 nt, Human
uggauggguugaaaugugagcc

SEQ ID NO: 770847 - RNA, 22 nt, Human
agagaauuaacauuccauggcu

SEQ ID NO: 770848 - RNA, 22 nt, Human
uggagcauacuaacccacucug

SEQ ID NO: 770849 - RNA, 22 nt, Human
uagaaagcguuaaaucuacaga

SEQ ID NO: 770850 - RNA, 22 nt, Human
gauauauuuggaccagagcauu

SEQ ID NO: 770851 - RNA, 22 nt, Human
agugauggcauauauagaugug

SEQ ID NO: 770852 - RNA, 22 nt, Human
caaauguaaauucuuuugaagc

SEQ ID NO: 770853 - RNA, 22 nt, Human
gagugcuguaggacugagcccu

SEQ ID NO: 770854 - RNA, 22 nt, Human
ggcuggcuggcugguagacaag

SEQ ID NO: 770855 - RNA, 22 nt, Human
uagaucauuagcgggggugaga

SEQ ID NO: 770856 - RNA, 22 nt, Human
uauugcuuuuauuucuauggac

SEQ ID NO: 770857 - RNA, 22 nt, Human
ucacaugcacaucucuggaacc

SEQ ID NO: 770858 - RNA, 21 nt, Human
uuugagaauuggucagagugc

SEQ ID NO: 770859 - RNA, 22 nt, Human
ucagaggagccaaaguucugag

SEQ ID NO: 770860 - RNA, 22 nt, Human
uuauuuauggcacuguuggugg

SEQ ID NO: 770861 - RNA, 21 nt, Human
auguuauucuguuccuccagc

SEQ ID NO: 770862 - RNA, 22 nt, Human
cagccagcugucccaagugccu

SEQ ID NO: 770863 - RNA, 22 nt, Human
uucuuauuaugugcucugugaa

SEQ ID NO: 770864 - RNA, 22 nt, Human
gcuggcuggcugugcaaaggca

SEQ ID NO: 770865 - RNA, 22 nt, Human
gccucuccuggagaaggcaggg

SEQ ID NO: 770866 - RNA, 22 nt, Human
gaugggcguggcgcguuuggug

SEQ ID NO: 770867 - RNA, 22 nt, Human
uggaaaaacugagacuuagaca

SEQ ID NO: 770868 - RNA, 23 nt, Human
aacacauugcuaauuacauucaa

SEQ ID NO: 770869 - RNA, 22 nt, Human
cauauggacaagaacauuuaug

SEQ ID NO: 770870 - RNA, 22 nt, Human
aaugccuucaaguaucugagga

SEQ ID NO: 770871 - RNA, 22 nt, Human
uggggccugcacaggcugaaug

SEQ ID NO: 770872 - RNA, 22 nt, Human
ugcacagguaugcaaagcaugu

SEQ ID NO: 770873 - RNA, 22 nt, Human
agcagggggcauccuugcccuu

SEQ ID NO: 770874 - RNA, 22 nt, Human
uaccuggaaauggcuuuaguua

SEQ ID NO: 770875 - RNA, 22 nt, Human
agaaucaggaagacagccuggc

SEQ ID NO: 770876 - RNA, 22 nt, Human
uggcuucaaggugauaauuuac

SEQ ID NO: 770877 - RNA, 20 nt, Human
aaacugucugucaguaucua

SEQ ID NO: 770878 - RNA, 22 nt, Human
ucauuuuugucuccgguuugug

SEQ ID NO: 770879 - RNA, 22 nt, Human
ucuguuuagacucaguugaaac

SEQ ID NO: 770880 - RNA, 19 nt, Human
cagcccagggugcuaccaa

SEQ ID NO: 770881 - RNA, 22 nt, Human
acagucugcuugucuccauggu

SEQ ID NO: 770882 - RNA, 22 nt, Human
ugaacaugcuguugauggccug

SEQ ID NO: 770883 - RNA, 22 nt, Human
ugagguaguuuguuguacagua

SEQ ID NO: 770884 - RNA, 22 nt, Human
gcacaguguaccacagucccua

SEQ ID NO: 770885 - RNA, 22 nt, Human
acugggcugccugguucuucua

SEQ ID NO: 770886 - RNA, 15 nt, Human
cauaucacugggaau

SEQ ID NO: 770887 - RNA, 22 nt, Human
agguuucuggauuuauuauggc

SEQ ID NO: 770888 - RNA, 22 nt, Human
ucagcugcucaaauuuauguca

SEQ ID NO: 770889 - RNA, 22 nt, Human
aaugagaaccuugaaaggaacu

SEQ ID NO: 770890 - RNA, 22 nt, Human
ugcuggccaauggcagaggcgg

SEQ ID NO: 770891 - RNA, 23 nt, Human
ggcucugugcuaauugcugaaaa

SEQ ID NO: 770892 - RNA, 22 nt, Human
gcagccaggaagcccaggacac

SEQ ID NO: 770893 - RNA, 22 nt, Human
uucuggagagaaaccuuacaaa

SEQ ID NO: 770894 - RNA, 22 nt, Human
ucccugaugccuugauccgugg

SEQ ID NO: 770895 - RNA, 21 nt, Human
uaagccaccaugugaaaccag

SEQ ID NO: 770896 - RNA, 22 nt, Human
uagcuauuuggaaaauuccaau

SEQ ID NO: 770897 - RNA, 22 nt, Human
ucucauuauccaucacugcacu

SEQ ID NO: 770898 - RNA, 23 nt, Human
uuauugcuuucccugccuuccug

SEQ ID NO: 770899 - RNA, 22 nt, Human
gccaccuuccaaaauaaucaca

SEQ ID NO: 770900 - RNA, 22 nt, Human
cugcuuuauauugagcuugaaa

SEQ ID NO: 770901 - RNA, 18 nt, Human
uggauugaauugagaggu

SEQ ID NO: 770902 - RNA, 22 nt, Human
gcacaauuauuuaugcaguaug

SEQ ID NO: 770903 - RNA, 22 nt, Human
uuuuccuaguaggccuauuaga

SEQ ID NO: 770904 - RNA, 22 nt, Human
agcauuuaguuaguaaauguuu

SEQ ID NO: 770905 - RNA, 22 nt, Human
aacugagacacgaacuaugauu

SEQ ID NO: 770906 - RNA, 22 nt, Human
ucuucugagacuucucuuuggu

SEQ ID NO: 770907 - RNA, 22 nt, Human
ucuccaggcacuuggcugcuac

SEQ ID NO: 770908 - RNA, 22 nt, Human
cuuaauuacuguccaauaugca

SEQ ID NO: 770909 - RNA, 22 nt, Human
uacaugaacaaaauagcagaaa

SEQ ID NO: 770910 - RNA, 22 nt, Human
aaaguuguuguucacagguuau

SEQ ID NO: 770911 - RNA, 22 nt, Human
aauuaacagagggcuuauuacu

SEQ ID NO: 770912 - RNA, 22 nt, Human
ucauugaguugcacuuuuacua

SEQ ID NO: 770913 - RNA, 22 nt, Human
uucacagguugaagccuaaucc

SEQ ID NO: 770914 - RNA, 22 nt, Human
caggacacagaauaaggcaguu

SEQ ID NO: 770915 - RNA, 22 nt, Human
uaggcugggaagaaagauucuc

SEQ ID NO: 770916 - RNA, 22 nt, Human
uaaaugcuuucuaugaaagagg

SEQ ID NO: 770917 - RNA, 22 nt, Human
gggaacagggccugagcugggg

SEQ ID NO: 770918 - RNA, 22 nt, Human
aggcgcugaguaggcaaggagg

SEQ ID NO: 770919 - RNA, 22 nt, Human
auuguuuacacuaacuucauaa

SEQ ID NO: 770920 - RNA, 22 nt, Human
acaaaugauuaucacagaggag

SEQ ID NO: 770921 - RNA, 22 nt, Human
augauauuugcaaugugcuugc

SEQ ID NO: 770922 - RNA, 22 nt, Human
uagauucuccacauguagcaau

SEQ ID NO: 770923 - RNA, 17 nt, Human
gugagggcagaggaugg

SEQ ID NO: 770924 - RNA, 22 nt, Human
aaaccugaauguaugucagaag

SEQ ID NO: 770925 - RNA, 22 nt, Human
aagaggaguagaugugguuggu

SEQ ID NO: 770926 - RNA, 22 nt, Human
acauucuauucugcaggacaag

SEQ ID NO: 770927 - RNA, 22 nt, Human
ggcccagugcuguucacccagu

SEQ ID NO: 770928 - RNA, 22 nt, Human
cuggccacugcgggccucugcc

SEQ ID NO: 770929 - RNA, 22 nt, Human
ugguuacagagauuuuuaagau

SEQ ID NO: 770930 - RNA, 22 nt, Human
ggccagcuguggggccgagccu

SEQ ID NO: 770931 - RNA, 22 nt, Human
ugucccugauccacuggacccc

SEQ ID NO: 770932 - RNA, 22 nt, Human
gcugcugcuggucuggggccac

SEQ ID NO: 770933 - RNA, 22 nt, Human
acaaugcugcagggaaauuagg

SEQ ID NO: 770934 - RNA, 21 nt, Human
gcucuccagggccagcccagg

SEQ ID NO: 770935 - RNA, 22 nt, Human
gugcaaaaguaauuacaguuuu

SEQ ID NO: 770936 - RNA, 22 nt, Human
cuggaggaccacagaagcuggu

SEQ ID NO: 770937 - RNA, 22 nt, Human
uuuuccucaggaaugcuaagcu

SEQ ID NO: 770938 - RNA, 22 nt, Human
gcgaaucucagcuggugcugcg

SEQ ID NO: 770939 - RNA, 22 nt, Human
agcuucucccuuuccuauuggu

SEQ ID NO: 770940 - RNA, 22 nt, Human
cucagcucugacaggaggcauc

SEQ ID NO: 770941 - RNA, 22 nt, Human
ucugagguucccucaacuaccu

SEQ ID NO: 770942 - RNA, 21 nt, Human
uccaggaguucuaauaggugu

SEQ ID NO: 770943 - RNA, 22 nt, Human
cuuggagagugguuaucccugu

SEQ ID NO: 770944 - RNA, 22 nt, Human
aauccuggaaugaguuugcuga

SEQ ID NO: 770945 - RNA, 22 nt, Human
ccugauuauuguaaauauauuu

SEQ ID NO: 770946 - RNA, 22 nt, Human
ugaaaucuccucuuuauauauc

SEQ ID NO: 770947 - RNA, 22 nt, Human
ucucagagagaugaaacuucca

SEQ ID NO: 770948 - RNA, 22 nt, Human
aaggcuuggaccagcuacagug

SEQ ID NO: 770949 - RNA, 22 nt, Human
cauuagagcagauaauaugugu

SEQ ID NO: 770950 - RNA, 22 nt, Human
augcaguuagguaauagucuca

SEQ ID NO: 770951 - RNA, 22 nt, Human
caguuuagcauuuaccgugaug

SEQ ID NO: 770952 - RNA, 21 nt, Human
cccaggaguccuauuuaaaug

SEQ ID NO: 770953 - RNA, 22 nt, Human
caguuuaggucauccuugcuuu

SEQ ID NO: 770954 - RNA, 22 nt, Human
aagcacuaauauuuuggcaccu

SEQ ID NO: 770955 - RNA, 19 nt, Human
aaagcagaggagcaucuga

SEQ ID NO: 770956 - RNA, 22 nt, Human
cacagagcaacucaaaucagcu

SEQ ID NO: 770957 - RNA, 22 nt, Human
ugcaagggcuuagggggcugug

SEQ ID NO: 770958 - RNA, 22 nt, Human
gccaggaaauucaugccagauc

SEQ ID NO: 770959 - RNA, 22 nt, Human
ucagaaauagucuuuaaaauga

SEQ ID NO: 770960 - RNA, 22 nt, Human
agaaaacauuacauaggugugu

SEQ ID NO: 770961 - RNA, 22 nt, Human
gcugcugggucccucugugcca

SEQ ID NO: 770962 - RNA, 22 nt, Human
augacaguagguaaaugauagc

SEQ ID NO: 770963 - RNA, 22 nt, Human
aguggacaaccaugcugagauu

SEQ ID NO: 770964 - RNA, 22 nt, Human
aggcacugaagaacucuuuuug

SEQ ID NO: 770965 - RNA, 21 nt, Human
ucuaagccuugcagauggguu

SEQ ID NO: 770966 - RNA, 22 nt, Human
agccaccuucuccaaggccuag

SEQ ID NO: 770967 - RNA, 22 nt, Human
ucugcaggugggccccuagaau

SEQ ID NO: 770968 - RNA, 22 nt, Human
gacugggaggguucagcugggu

SEQ ID NO: 770969 - RNA, 22 nt, Human
ggugugugguccucucacuuag

SEQ ID NO: 770970 - RNA, 23 nt, Human
aauuggacuugcugucaaacuuc

SEQ ID NO: 770971 - RNA, 22 nt, Human
ugucugaaucgcuuccuagagg

SEQ ID NO: 770972 - RNA, 22 nt, Human
uucaaagauaauuaccaaacau

SEQ ID NO: 770973 - RNA, 22 nt, Human
ucagcaauaugauaggcuuugu

SEQ ID NO: 770974 - RNA, 23 nt, Human
uggggagggaagucauuucugua

SEQ ID NO: 770975 - RNA, 22 nt, Human
ucaggcuaacccuaggcagaag

SEQ ID NO: 770976 - RNA, 22 nt, Human
gggagggaaggaccuuaugaau

SEQ ID NO: 770977 - RNA, 22 nt, Human
acaagaauuuacauguagugga

SEQ ID NO: 770978 - RNA, 22 nt, Human
caccagcuugcagucuuaaccc

SEQ ID NO: 770979 - RNA, 22 nt, Human
aauggaauaccuagguggccca

SEQ ID NO: 770980 - RNA, 22 nt, Human
aggucagaugggagaugggaug

SEQ ID NO: 770981 - RNA, 22 nt, Human
cauuuggaaagagacuagagaa

SEQ ID NO: 770982 - RNA, 22 nt, Human
uggagcagaggcugagguuggg

SEQ ID NO: 770983 - RNA, 22 nt, Human
aaugucauugagcuccaauccu

SEQ ID NO: 770984 - RNA, 22 nt, Human
agacagcucuggguuccacacu

SEQ ID NO: 770985 - RNA, 18 nt, Human
gaagugaagugacucaau

SEQ ID NO: 770986 - RNA, 22 nt, Human
uuugcauugcauuaaguauucu

SEQ ID NO: 770987 - RNA, 22 nt, Human
acaguaauaaguguuggugagg

SEQ ID NO: 770988 - RNA, 22 nt, Human
gagauucucgagggcuuccagc

SEQ ID NO: 770989 - RNA, 22 nt, Human
uuauucagggauaacauccagg

SEQ ID NO: 770990 - RNA, 22 nt, Human
ucuggacuauaggcugccaagu

SEQ ID NO: 770991 - RNA, 22 nt, Human
aaguugagaugucauaggagac

SEQ ID NO: 770992 - RNA, 22 nt, Human
agaguaguucuuugcagagugg

SEQ ID NO: 770993 - RNA, 22 nt, Human
uuugaagcagaugguuaagcuu

SEQ ID NO: 770994 - RNA, 22 nt, Human
gaugucuuuuuccaggcucuuu

SEQ ID NO: 770995 - RNA, 22 nt, Human
aauugcuuagagaauccaggua

SEQ ID NO: 770996 - RNA, 22 nt, Human
uuugcaguguucaucaguauuu

SEQ ID NO: 770997 - RNA, 22 nt, Human
uuuauauccaucuuugaaguaa

SEQ ID NO: 770998 - RNA, 22 nt, Human
aaggcacugagccagccgucuc

SEQ ID NO: 770999 - RNA, 22 nt, Human
cacagagaaugaugagucacug

SEQ ID NO: 771000 - RNA, 22 nt, Human
uuauaauucuggcauaggcugu

SEQ ID NO: 771001 - RNA, 22 nt, Human
uuuaagaucauuuguauuaucc

SEQ ID NO: 771002 - RNA, 22 nt, Human
uggaaagagaaacucuugcuaa

SEQ ID NO: 771003 - RNA, 22 nt, Human
guauuuuucaguuaggagcuua

SEQ ID NO: 771004 - RNA, 22 nt, Human
agcauuuaagcuucugcaaagc

SEQ ID NO: 771005 - RNA, 22 nt, Human
ugcuucucccaaccagggccug

SEQ ID NO: 771006 - RNA, 22 nt, Human
auaaucuggcuuguuugcuuaa

SEQ ID NO: 771007 - RNA, 22 nt, Human
uuguggcucuugaggcucucgu

SEQ ID NO: 771008 - RNA, 22 nt, Human
uggaugugucgcccuggcucuc

SEQ ID NO: 771009 - RNA, 22 nt, Human
acaacacagcaaaaccccaucu

SEQ ID NO: 771010 - RNA, 22 nt, Human
aguggucugggcuaaaugaggu

SEQ ID NO: 771011 - RNA, 22 nt, Human
ucugggguggagcccuggaguc

SEQ ID NO: 771012 - RNA, 22 nt, Human
caguuauaagacuaagcuauuc

SEQ ID NO: 771013 - RNA, 22 nt, Human
gacaauaagaaaagaggaggca

SEQ ID NO: 771014 - RNA, 22 nt, Human
gcauguaaucacucuaggaagg

SEQ ID NO: 771015 - RNA, 22 nt, Human
agccagcuggugggucagcugg

SEQ ID NO: 771016 - RNA, 22 nt, Human
acccaggaggcaagguugcagu

SEQ ID NO: 771017 - RNA, 22 nt, Human
aggcagcagaaaacaaaugguu

SEQ ID NO: 771018 - RNA, 22 nt, Human
agacagggagggagcgcggcug

SEQ ID NO: 771019 - RNA, 22 nt, Human
auugaacugaauccuggauugc

SEQ ID NO: 771020 - RNA, 22 nt, Human
uucuggagccgggccugggcag

SEQ ID NO: 771021 - RNA, 22 nt, Human
ggaggccuugaggccaggagcu

SEQ ID NO: 771022 - RNA, 22 nt, Human
uuaaaccauaguuuaacauaag

SEQ ID NO: 771023 - RNA, 22 nt, Human
uucucugcagcuccuggcuggg

SEQ ID NO: 771024 - RNA, 22 nt, Human
uuggcagaaauguggcugggag

SEQ ID NO: 771025 - RNA, 22 nt, Human
uacaacauuuacguuaggcugu

SEQ ID NO: 771026 - RNA, 22 nt, Human
cuuagcagaagcuucagcuuca

SEQ ID NO: 771027 - RNA, 22 nt, Human
auuugcuuuaagguauaaaagg

SEQ ID NO: 771028 - RNA, 22 nt, Human
aggugccaagaugucacagaca

SEQ ID NO: 771029 - RNA, 22 nt, Human
cccaggagauggagguugcagu

SEQ ID NO: 771030 - RNA, 22 nt, Human
ucuaacagaaauucugacaaaa

SEQ ID NO: 771031 - RNA, 22 nt, Human
cuccaggccccuggccuucugc

SEQ ID NO: 771032 - RNA, 21 nt, Human
acaggcaaauuuuagacaaug

SEQ ID NO: 771033 - RNA, 22 nt, Human
ucugcugugaaaggugaauauu

SEQ ID NO: 771034 - RNA, 19 nt, Human
ucauucaggaccaguggau

SEQ ID NO: 771035 - RNA, 22 nt, Human
cuuucucaguguuaauuacuuu

SEQ ID NO: 771036 - RNA, 22 nt, Human
ucuauguagugccagcuaguau

SEQ ID NO: 771037 - RNA, 22 nt, Human
uucugaaaugagauauaaggua

SEQ ID NO: 771038 - RNA, 21 nt, Human
aggaagaaagguuggagguug

SEQ ID NO: 771039 - RNA, 21 nt, Human
aauucguuugcaacacugaua

SEQ ID NO: 771040 - RNA, 21 nt, Human
gcacagugccaggcacacagu

SEQ ID NO: 771041 - RNA, 22 nt, Human
gaauacaaagcagaacucauac

SEQ ID NO: 771042 - RNA, 22 nt, Human
acaucucacuucuuugaaggcu

SEQ ID NO: 771043 - RNA, 22 nt, Human
uggggguccuccucugcuuaag

SEQ ID NO: 771044 - RNA, 22 nt, Human
aucaaaguaauuaacacugaga

SEQ ID NO: 771045 - RNA, 22 nt, Human
gagaaggacuacacaucuggcc

SEQ ID NO: 771046 - RNA, 22 nt, Human
gcaguguugacuaugguaugag

SEQ ID NO: 771047 - RNA, 22 nt, Human
gcuccaggugaauccucucacc

SEQ ID NO: 771048 - RNA, 22 nt, Human
ugucccagacacaguaugcgcu

SEQ ID NO: 771049 - RNA, 22 nt, Human
cugcccuggccacugugcccag

SEQ ID NO: 771050 - RNA, 22 nt, Human
cauaguuauaaggcaacacugu

SEQ ID NO: 771051 - RNA, 22 nt, Human
cagccucuuuccacaucaggca

SEQ ID NO: 771052 - RNA, 22 nt, Human
ccagugcauaaucaauacagcc

SEQ ID NO: 771053 - RNA, 22 nt, Human
gccagccacguuagacuggccc

SEQ ID NO: 771054 - RNA, 22 nt, Human
cccuccccacaaagcuucacac

SEQ ID NO: 771055 - RNA, 22 nt, Human
aggcagcagacuguuaaucaga

SEQ ID NO: 771056 - RNA, 22 nt, Human
uuccuucuuugugguagaaagu

SEQ ID NO: 771057 - RNA, 19 nt, Human
gcauuucaggcauguuugc

SEQ ID NO: 771058 - RNA, 22 nt, Human
cagugguuuugagauucagggu

SEQ ID NO: 771059 - RNA, 22 nt, Human
cuggguuuagggucuccccuug

SEQ ID NO: 771060 - RNA, 22 nt, Human
cuccugagaauuuucaguugga

SEQ ID NO: 771061 - RNA, 22 nt, Human
gcucgguggccagccugaggcc

SEQ ID NO: 771062 - RNA, 22 nt, Human
ucugacuuuucucacuguugug

SEQ ID NO: 771063 - RNA, 22 nt, Human
uaaugcauguaaugggcugaua

SEQ ID NO: 771064 - RNA, 22 nt, Human
ugguuuuaaaaacaugcugcau

SEQ ID NO: 771065 - RNA, 22 nt, Human
ccaagaguaaauucaugaugcc

SEQ ID NO: 771066 - RNA, 22 nt, Human
aguccauaacuucagaguguca

SEQ ID NO: 771067 - RNA, 22 nt, Human
agcccugggucccaguccuggc

SEQ ID NO: 771068 - RNA, 22 nt, Human
ugucuucagauaggcauucuuc

SEQ ID NO: 771069 - RNA, 22 nt, Human
caacaaguguucguaaagugcc

SEQ ID NO: 771070 - RNA, 22 nt, Human
cagagacccuucucaguggcca

SEQ ID NO: 771071 - RNA, 22 nt, Human
aaugaagcaguccaucugcucu

SEQ ID NO: 771072 - RNA, 22 nt, Human
ucagaggcucacugucuacuuu

SEQ ID NO: 771073 - RNA, 22 nt, Human
uucauagagcagcucacugaau

SEQ ID NO: 771074 - RNA, 22 nt, Human
ugugacaggaacuauguggaug

SEQ ID NO: 771075 - RNA, 22 nt, Human
aaauucaauuaacuuucaugcu

SEQ ID NO: 771076 - RNA, 22 nt, Human
ggaccaggagcucagagcccuc

SEQ ID NO: 771077 - RNA, 22 nt, Human
ugcugccaaaugcgagcucugu

SEQ ID NO: 771078 - RNA, 22 nt, Human
cugugggagaaguugcuggagu

SEQ ID NO: 771079 - RNA, 22 nt, Human
cuauuauuuccucaucuauaaa

SEQ ID NO: 771080 - RNA, 22 nt, Human
aagacccuaccccuggagagga

SEQ ID NO: 771081 - RNA, 22 nt, Human
cauuggucuucuaacagagaga

SEQ ID NO: 771082 - RNA, 22 nt, Human
aguaagugagucacugugcugg

SEQ ID NO: 771083 - RNA, 22 nt, Human
uuccugagucccggguaaagau

SEQ ID NO: 771084 - RNA, 22 nt, Human
caguguauaaacuuuaacauag

SEQ ID NO: 771085 - RNA, 22 nt, Human
ugaaugaucuccgauuaguccu

SEQ ID NO: 771086 - RNA, 22 nt, Human
uagcuuuaccauagaagaguau

SEQ ID NO: 771087 - RNA, 22 nt, Human
ugugaaauauuuauauacucaa

SEQ ID NO: 771088 - RNA, 22 nt, Human
cucacugugccuuuucccaaac

SEQ ID NO: 771089 - RNA, 22 nt, Human
gcagggcugaaggucccaggcc

SEQ ID NO: 771090 - RNA, 22 nt, Human
ggccagagaagucagacccuug

SEQ ID NO: 771091 - RNA, 22 nt, Human
cagggcccagucccugcuguca

SEQ ID NO: 771092 - RNA, 22 nt, Human
aggcccugaccugggagaucua

SEQ ID NO: 771093 - RNA, 22 nt, Human
uugugaauagugcugcaauaaa

SEQ ID NO: 771094 - RNA, 22 nt, Human
gaagauuuauaggagccuauua

SEQ ID NO: 771095 - RNA, 22 nt, Human
ccugaccuauuuuucucagcug

SEQ ID NO: 771096 - RNA, 22 nt, Human
uccauguggcaauaggagacag

SEQ ID NO: 771097 - RNA, 23 nt, Human
uugauucuuucagggaccuagau

SEQ ID NO: 771098 - RNA, 22 nt, Human
gagacacaggcacagaagaggc

SEQ ID NO: 771099 - RNA, 22 nt, Human
uuaugucuuaaguaugcuaauu

SEQ ID NO: 771100 - RNA, 22 nt, Human
ggggcagauggaacagagcaca

SEQ ID NO: 771101 - RNA, 22 nt, Human
acaugucuguaauuauuuuagg

SEQ ID NO: 771102 - RNA, 22 nt, Human
auuuacauuccauggugguuac

SEQ ID NO: 771103 - RNA, 22 nt, Human
cagggacagggaucauuugcuu

SEQ ID NO: 771104 - RNA, 22 nt, Human
cugugcuuguguucauuguuaa

SEQ ID NO: 771105 - RNA, 22 nt, Human
ucccugggacggccuuuuggag

SEQ ID NO: 771106 - RNA, 22 nt, Human
ugggggagccuucacaguagcu

SEQ ID NO: 771107 - RNA, 22 nt, Human
gaggcuguucaguguccagcuu

SEQ ID NO: 771108 - RNA, 22 nt, Human
ggagacacagagcaacaaaaua

SEQ ID NO: 771109 - RNA, 22 nt, Human
uggcgagguuucagagagcggc

SEQ ID NO: 771110 - RNA, 22 nt, Human
auaaguucagguaaagaaauca

SEQ ID NO: 771111 - RNA, 22 nt, Human
uggcucaguggcagccgcagcu

SEQ ID NO: 771112 - RNA, 22 nt, Human
gcucuggcccaaacccuuucua

SEQ ID NO: 771113 - RNA, 21 nt, Human
ccagcccagccuccuucucuu

SEQ ID NO: 771114 - RNA, 19 nt, Human
caaggccaccauuucuccg

SEQ ID NO: 771115 - RNA, 22 nt, Human
uaaucuguuguuaauauugacu

SEQ ID NO: 771116 - RNA, 22 nt, Human
ugcacagaaucauuuucagcug

SEQ ID NO: 771117 - RNA, 22 nt, Human
gcaguguuuggauccauagcga

SEQ ID NO: 771118 - RNA, 22 nt, Human
agagccccucgguggagggguc

SEQ ID NO: 771119 - RNA, 22 nt, Human
ggccuuggggaggauggugucc

SEQ ID NO: 771120 - RNA, 22 nt, Human
cuccauggaaaaggcuguuguu

SEQ ID NO: 771121 - RNA, 22 nt, Human
aaggucugaguuuugccaggcc

SEQ ID NO: 771122 - RNA, 22 nt, Human
ucaggcuuauuacguuauuguc

SEQ ID NO: 771123 - RNA, 18 nt, Human
gugugcucagagagugag

SEQ ID NO: 771124 - RNA, 16 nt, Human
ggugggguaguuagaa

SEQ ID NO: 771125 - RNA, 22 nt, Human
agucaguuaaacuuuguaaagu

SEQ ID NO: 771126 - RNA, 22 nt, Human
uuuaaauguuuauagagaguac

SEQ ID NO: 771127 - RNA, 22 nt, Human
aaggcaguucacucacgcagcc

SEQ ID NO: 771128 - RNA, 22 nt, Human
uaaacagaaugcguaagaagug

SEQ ID NO: 771129 - RNA, 22 nt, Human
uagauuugccugggaaagcuca

SEQ ID NO: 771130 - RNA, 22 nt, Human
caaagguaguauauauauuguu

SEQ ID NO: 771131 - RNA, 20 nt, Human
agcccaggccugugugaguc

SEQ ID NO: 771132 - RNA, 20 nt, Human
agcccaucucccacagcuac

SEQ ID NO: 771133 - RNA, 22 nt, Human
acuugggucacaugaccuaccu

SEQ ID NO: 771134 - RNA, 22 nt, Human
aaauuaucaugggggagaaaca

SEQ ID NO: 771135 - RNA, 22 nt, Human
ccuggugcccccaagccagcug

SEQ ID NO: 771136 - RNA, 22 nt, Human
ccagcugguaagugauggagcc

SEQ ID NO: 771137 - RNA, 22 nt, Human
gacagugaguaccucaaaggcc

SEQ ID NO: 771138 - RNA, 22 nt, Human
ggcugggucccagcugggagga

SEQ ID NO: 771139 - RNA, 22 nt, Human
uagcuccuccccauccagguuc

SEQ ID NO: 771140 - RNA, 22 nt, Human
cuaagaggaaguacucuguuau

SEQ ID NO: 771141 - RNA, 20 nt, Human
cauuggcauucacagaagcu

SEQ ID NO: 771142 - RNA, 22 nt, Human
aacuccagguccuuugaaucug

SEQ ID NO: 771143 - RNA, 22 nt, Human
ggcaguuuggcaggauggaggg

SEQ ID NO: 771144 - RNA, 20 nt, Human
cuguggcaucugucauggug

SEQ ID NO: 771145 - RNA, 23 nt, Human
aaauggcuuuagacgugccuuau

SEQ ID NO: 771146 - RNA, 22 nt, Human
ucucaguguuuaaaaagauuuc

SEQ ID NO: 771147 - RNA, 22 nt, Human
uuccuaaucacgaacauuauuu

SEQ ID NO: 771148 - RNA, 22 nt, Human
ucagcacuuugaagcagaagga

SEQ ID NO: 771149 - RNA, 22 nt, Human
uggcuucuaguuugaggaaaaa

SEQ ID NO: 771150 - RNA, 22 nt, Human
cacaggaacaaagaagacaauu

SEQ ID NO: 771151 - RNA, 22 nt, Human
aaaaguguccagauuaugaaga

SEQ ID NO: 771152 - RNA, 22 nt, Human
guauuaggaaauaugaagaaag

SEQ ID NO: 771153 - RNA, 22 nt, Human
aaugucugcucuacucaggagg

SEQ ID NO: 771154 - RNA, 22 nt, Human
gggcacugggucuucuccacgc

SEQ ID NO: 771155 - RNA, 22 nt, Human
uagcaggguuuugaagaggguu

SEQ ID NO: 771156 - RNA, 17 nt, Human
uuccagcauguuacuaa

SEQ ID NO: 771157 - RNA, 22 nt, Human
cuauuuggccauagugcaguua

SEQ ID NO: 771158 - RNA, 22 nt, Human
uaauugcucgagaaauaaccuc

SEQ ID NO: 771159 - RNA, 22 nt, Human
ggagcaggcucugugguuucca

SEQ ID NO: 771160 - RNA, 22 nt, Human
ugucuuaaguagauuacagccu

SEQ ID NO: 771161 - RNA, 20 nt, Human
guccaggacccagcaggagg

SEQ ID NO: 771162 - RNA, 22 nt, Human
aagagaggacauggugaaccug

SEQ ID NO: 771163 - RNA, 22 nt, Human
augaaucaaacuguacacugag

SEQ ID NO: 771164 - RNA, 22 nt, Human
gaggaggguuggccuuagguag

SEQ ID NO: 771165 - RNA, 22 nt, Human
uacacugagaugacuuugguuu

SEQ ID NO: 771166 - RNA, 22 nt, Human
caggaguuucuauuguuccaaa

SEQ ID NO: 771167 - RNA, 22 nt, Human
agauuucuguggucauguaaug

SEQ ID NO: 771168 - RNA, 22 nt, Human
ugucccaguuggguauugaauu

SEQ ID NO: 771169 - RNA, 22 nt, Human
ggucacugucuucugggcucug

SEQ ID NO: 771170 - RNA, 22 nt, Human
caagcucugggauagcagagag

SEQ ID NO: 771171 - RNA, 22 nt, Human
aaggaagaugaaaguacugcua

SEQ ID NO: 771172 - RNA, 22 nt, Human
ggagagaauucagcuuaagauu

SEQ ID NO: 771173 - RNA, 22 nt, Human
gcuucaagcuguucagaacuau

SEQ ID NO: 771174 - RNA, 22 nt, Human
ccaggcuuucuccugacucaca

SEQ ID NO: 771175 - RNA, 22 nt, Human
aaaugcauugguuucuacuugu

SEQ ID NO: 771176 - RNA, 22 nt, Human
ucaugcaggaccaccccagcau

SEQ ID NO: 771177 - RNA, 22 nt, Human
auucugcugccuaguuuaugaa

SEQ ID NO: 771178 - RNA, 22 nt, Human
uuauuaauaaaguggcauagcc

SEQ ID NO: 771179 - RNA, 22 nt, Human
acagcaaaggacgaacacucug

SEQ ID NO: 771180 - RNA, 20 nt, Human
cacauuaaggaaaacaacug

SEQ ID NO: 771181 - RNA, 22 nt, Human
uuuucugugauucugagguugg

SEQ ID NO: 771182 - RNA, 22 nt, Human
uccagcugugcuccaggaggug

SEQ ID NO: 771183 - RNA, 22 nt, Human
uccucccaacuuuuccaucuca

SEQ ID NO: 771184 - RNA, 20 nt, Human
cuuuuucuccagcucugagc

SEQ ID NO: 771185 - RNA, 22 nt, Human
guucucauaguggaaaauaggu

SEQ ID NO: 771186 - RNA, 22 nt, Human
aacacagguugcugggccucac

SEQ ID NO: 771187 - RNA, 22 nt, Human
augucuguuuucauaucagaua

SEQ ID NO: 771188 - RNA, 22 nt, Human
ggugcccuguaaaagccaugca

SEQ ID NO: 771189 - RNA, 22 nt, Human
ugugacaugugucaucuuuucu

SEQ ID NO: 771190 - RNA, 22 nt, Human
cucugugugguagauuccauua

SEQ ID NO: 771191 - RNA, 22 nt, Human
ggcaggugccaguuggcuuggg

SEQ ID NO: 771192 - RNA, 21 nt, Human
guggcucugccaggacugaaa

SEQ ID NO: 771193 - RNA, 22 nt, Human
ugggggcugugcacaggcucac

SEQ ID NO: 771194 - RNA, 22 nt, Human
gaaucucauucuaacuaguagg

SEQ ID NO: 771195 - RNA, 22 nt, Human
cauuuguaguaucuguuuauau

SEQ ID NO: 771196 - RNA, 22 nt, Human
uggccucuuaggacauccucua

SEQ ID NO: 771197 - RNA, 22 nt, Human
uggccuggaaaaaugcagaugg

SEQ ID NO: 771198 - RNA, 22 nt, Human
uauuugaaggcauacauuuuga

SEQ ID NO: 771199 - RNA, 22 nt, Human
ggcaggugacggggaugaguau

SEQ ID NO: 771200 - RNA, 19 nt, Human
ugccucagggcuuugagga

SEQ ID NO: 771201 - RNA, 22 nt, Human
caugcagcggcguuugguuuaa

SEQ ID NO: 771202 - RNA, 22 nt, Human
gggcucuggaguucuagaaaga

SEQ ID NO: 771203 - RNA, 22 nt, Human
agcugucaccaggagccggacc

SEQ ID NO: 771204 - RNA, 22 nt, Human
ggcugaggggcccagaggaaca

SEQ ID NO: 771205 - RNA, 22 nt, Human
ccuggcucugcagccacuccag

SEQ ID NO: 771206 - RNA, 22 nt, Human
uuacagugagggugacauuuac

SEQ ID NO: 771207 - RNA, 22 nt, Human
uauuuccaagcugaauccaaug

SEQ ID NO: 771208 - RNA, 22 nt, Human
ucauugcauuuauucacuggca

SEQ ID NO: 771209 - RNA, 22 nt, Human
caaagcagugauccuuaaagga

SEQ ID NO: 771210 - RNA, 23 nt, Human
auggaagucacuguuuucuuguc

SEQ ID NO: 771211 - RNA, 22 nt, Human
ugucauuccuucaauguagaua

SEQ ID NO: 771212 - RNA, 22 nt, Human
uuuuauaaagagagucaguugg

SEQ ID NO: 771213 - RNA, 22 nt, Human
uucugcuaugaaaaaagugcug

SEQ ID NO: 771214 - RNA, 22 nt, Human
auggaaauacagccagagcaga

SEQ ID NO: 771215 - RNA, 22 nt, Human
uuuaauguauucuuuggaacca

SEQ ID NO: 771216 - RNA, 22 nt, Human
uucugcuuuuagcuaaacuaua

SEQ ID NO: 771217 - RNA, 22 nt, Human
uggcagauaaccugcugugccc

SEQ ID NO: 771218 - RNA, 22 nt, Human
uugggggcagagggagcaucug

SEQ ID NO: 771219 - RNA, 22 nt, Human
augugugcgggaaggaaaguga

SEQ ID NO: 771220 - RNA, 22 nt, Human
aaugaagauaaaaugggaugga

SEQ ID NO: 771221 - RNA, 22 nt, Human
agaaggaaggauaacugcauua

SEQ ID NO: 771222 - RNA, 22 nt, Human
uagaaacaagggagaggauucu

SEQ ID NO: 771223 - RNA, 22 nt, Human
ccuccuucuggggccuucugcu

SEQ ID NO: 771224 - RNA, 19 nt, Human
gcugcagcagagaaacugg

SEQ ID NO: 771225 - RNA, 22 nt, Human
auuguauaagucuauuuacaau

SEQ ID NO: 771226 - RNA, 22 nt, Human
uuggagggucuuccacagccau

SEQ ID NO: 771227 - RNA, 22 nt, Human
ccugagucuguguuuuccuaag

SEQ ID NO: 771228 - RNA, 22 nt, Human
uaauucagcugaacaacugugu

SEQ ID NO: 771229 - RNA, 22 nt, Human
gaguccagugauguuccugguc

SEQ ID NO: 771230 - RNA, 22 nt, Human
uucacagugagcuaugucuugu

SEQ ID NO: 771231 - RNA, 22 nt, Human
agcagagcugggauccuggguc

SEQ ID NO: 771232 - RNA, 22 nt, Human
gaauaagugaaguuggcagcuu

SEQ ID NO: 771233 - RNA, 22 nt, Human
ggggcaggagcccuucuucagc

SEQ ID NO: 771234 - RNA, 22 nt, Human
uuauuuaaugugaucugaagag

SEQ ID NO: 771235 - RNA, 22 nt, Human
ccuuucaaaacagaacacuagc

SEQ ID NO: 771236 - RNA, 22 nt, Human
augcuuuggccaaugagaagug

SEQ ID NO: 771237 - RNA, 22 nt, Human
agccacugugugaccagcuguc

SEQ ID NO: 771238 - RNA, 19 nt, Human
uccuguuauggagcuuagg

SEQ ID NO: 771239 - RNA, 22 nt, Human
ucagaggguggcugggagcauc

SEQ ID NO: 771240 - RNA, 22 nt, Human
uacaaguguaagcuugugagac

SEQ ID NO: 771241 - RNA, 22 nt, Human
gcuccaggccacggcuucuugg

SEQ ID NO: 771242 - RNA, 22 nt, Human
gcuaagaggcuauaucuuucuc

SEQ ID NO: 771243 - RNA, 22 nt, Human
agauggggcucaguguggaggc

SEQ ID NO: 771244 - RNA, 22 nt, Human
uccugaaugaguugaucacaau

SEQ ID NO: 771245 - RNA, 22 nt, Human
ugggccacauuccaaaccagcu

SEQ ID NO: 771246 - RNA, 22 nt, Human
agucuccuuaaauauuucccag

SEQ ID NO: 771247 - RNA, 22 nt, Human
caggccugugaguugaggcccc

SEQ ID NO: 771248 - RNA, 22 nt, Human
aucaguuuaaaugggcuguugg

SEQ ID NO: 771249 - RNA, 22 nt, Human
aagauuguuuuggaugcuaacu

SEQ ID NO: 771250 - RNA, 22 nt, Human
gauucuuaugagugaacuuuac

SEQ ID NO: 771251 - RNA, 22 nt, Human
uuguccaaggucccacaguuag

SEQ ID NO: 771252 - RNA, 20 nt, Human
cucucccagcacagcuuccu

SEQ ID NO: 771253 - RNA, 22 nt, Human
uguauuuauauuagaaugguug

SEQ ID NO: 771254 - RNA, 22 nt, Human
cugcugagcaucagggcugccc

SEQ ID NO: 771255 - RNA, 22 nt, Human
acuuuuaaggggccuugauuua

SEQ ID NO: 771256 - RNA, 22 nt, Human
ccacaggaccagaggagaucac

SEQ ID NO: 771257 - RNA, 22 nt, Human
ggacaggugacugcccagagug

SEQ ID NO: 771258 - RNA, 22 nt, Human
agcugagcucaggcugauguaa

SEQ ID NO: 771259 - RNA, 20 nt, Human
ugugugcaucuguauguauu

SEQ ID NO: 771260 - RNA, 22 nt, Human
gacccaggagagaggguugcau

SEQ ID NO: 771261 - RNA, 22 nt, Human
gcuugguuucuaacuuuucaua

SEQ ID NO: 771262 - RNA, 22 nt, Human
uggcagcaguagccaccccagc

SEQ ID NO: 771263 - RNA, 22 nt, Human
agacuguaauuuguggccuccu

SEQ ID NO: 771264 - RNA, 22 nt, Human
acagccaguaaucuaccccugu

SEQ ID NO: 771265 - RNA, 22 nt, Human
gucugccucagccgggggccgc

SEQ ID NO: 771266 - RNA, 22 nt, Human
ugaaaaugcacgcuggaaagca

SEQ ID NO: 771267 - RNA, 22 nt, Human
accucugcuucccggguucaag

SEQ ID NO: 771268 - RNA, 22 nt, Human
aaagcuguaaugcaugcuuucu

SEQ ID NO: 771269 - RNA, 22 nt, Human
ccccugccauagucaaaucuaa

SEQ ID NO: 771270 - RNA, 22 nt, Human
cuguagcagcugaccuggcuaa

SEQ ID NO: 771271 - RNA, 22 nt, Human
uucuuaguucaacuaaaauuua

SEQ ID NO: 771272 - RNA, 22 nt, Human
gcagagaggauauuauugucca

SEQ ID NO: 771273 - RNA, 22 nt, Human
caucuucaccagagacaagcaa

SEQ ID NO: 771274 - RNA, 22 nt, Human
ggaggccuggacuuccugaugg

SEQ ID NO: 771275 - RNA, 21 nt, Human
cucuuuguggcaauguauuuu

SEQ ID NO: 771276 - RNA, 22 nt, Human
gagauggaaucuguguggaggg

SEQ ID NO: 771277 - RNA, 22 nt, Human
augcccugugacucuccuggac

SEQ ID NO: 771278 - RNA, 22 nt, Human
uagcuguuggcuuacaucuguu

SEQ ID NO: 771279 - RNA, 17 nt, Human
gggaaguggagaaagcu

SEQ ID NO: 771280 - RNA, 22 nt, Human
uggaacacacuucaaggagaaa

SEQ ID NO: 771281 - RNA, 22 nt, Human
aggcuguagaucuagacaugua

SEQ ID NO: 771282 - RNA, 22 nt, Human
gcaguggaagccucuuuaagca

SEQ ID NO: 771283 - RNA, 22 nt, Human
uugcuuuauguguaugacuuga

SEQ ID NO: 771284 - RNA, 22 nt, Human
gugagacaauuccucaguagac

SEQ ID NO: 771285 - RNA, 22 nt, Human
ggcucugcccagaugaagagga

SEQ ID NO: 771286 - RNA, 22 nt, Human
ucagcugggaaguucucgcuug

SEQ ID NO: 771287 - RNA, 22 nt, Human
uucuauuuuuguggaacuguag

SEQ ID NO: 771288 - RNA, 22 nt, Human
ugucccagguccuagaugacca

SEQ ID NO: 771289 - RNA, 22 nt, Human
ucacaauucagaaaccaaguag

SEQ ID NO: 771290 - RNA, 22 nt, Human
gaaagugcuuagagugugguau

SEQ ID NO: 771291 - RNA, 22 nt, Human
uauguuuaguauccauuuucag

SEQ ID NO: 771292 - RNA, 22 nt, Human
uuccaagugucagaucagauuu

SEQ ID NO: 771293 - RNA, 22 nt, Human
uauguucuaggaaugguugaug

SEQ ID NO: 771294 - RNA, 22 nt, Human
uggcaucuuugucccagaagcu

SEQ ID NO: 771295 - RNA, 22 nt, Human
acucugccugaaccuccugcaa

SEQ ID NO: 771296 - RNA, 22 nt, Human
uucccucucuccagggcugccu

SEQ ID NO: 771297 - RNA, 22 nt, Human
ucagcuuucucuucuaucgaua

SEQ ID NO: 771298 - RNA, 22 nt, Human
uuugaacaugcugcaugauaau

SEQ ID NO: 771299 - RNA, 22 nt, Human
agguggcagacuaacagaagga

SEQ ID NO: 771300 - RNA, 22 nt, Human
uauuugcuccuuaggcauauuu

SEQ ID NO: 771301 - RNA, 22 nt, Human
guguccacggcugagaaugauu

SEQ ID NO: 771302 - RNA, 22 nt, Human
uggcagaguuauggguauuuau

SEQ ID NO: 771303 - RNA, 22 nt, Human
gaagagcuccaaaaacagugag

SEQ ID NO: 771304 - RNA, 22 nt, Human
gcagcugccuucagcuggaugg

SEQ ID NO: 771305 - RNA, 22 nt, Human
uagaugugagcccaggcugcuu

SEQ ID NO: 771306 - RNA, 22 nt, Human
agcuagcuuagccugugaggua

SEQ ID NO: 771307 - RNA, 22 nt, Human
ccagccaggcauugcaaacuga

SEQ ID NO: 771308 - RNA, 22 nt, Human
aguuuaaaucauguuuuguaac

SEQ ID NO: 771309 - RNA, 22 nt, Human
ggccacuguuuccugggcaguu

SEQ ID NO: 771310 - RNA, 22 nt, Human
aaacucagauguggugaagacc

SEQ ID NO: 771311 - RNA, 23 nt, Human
guuuucaacacaauaaauguaac

SEQ ID NO: 771312 - RNA, 22 nt, Human
ccuuggcuuaccuucugugugg

SEQ ID NO: 771313 - RNA, 22 nt, Human
aggccuggccugggcggcauug

SEQ ID NO: 771314 - RNA, 21 nt, Human
agcuggcagauauggugucug

SEQ ID NO: 771315 - RNA, 19 nt, Human
ucugagggagcacgaaggc

SEQ ID NO: 771316 - RNA, 22 nt, Human
guccucagucaguuuggugggg

SEQ ID NO: 771317 - RNA, 22 nt, Human
ugacauuuuuguacaaagucag

SEQ ID NO: 771318 - RNA, 23 nt, Human
ucugggcugagacuuggaagguc

SEQ ID NO: 771319 - RNA, 22 nt, Human
agggcucuuccuuugccucuca

SEQ ID NO: 771320 - RNA, 22 nt, Human
acucagagccucgagggacugc

SEQ ID NO: 771321 - RNA, 22 nt, Human
guucagcccacagagggggccg

SEQ ID NO: 771322 - RNA, 22 nt, Human
uacugucuggguucccaagcaa

SEQ ID NO: 771323 - RNA, 23 nt, Human
agagcaucaugaugcuaagucug

SEQ ID NO: 771324 - RNA, 22 nt, Human
ucuagcauuucuuuccugagga

SEQ ID NO: 771325 - RNA, 22 nt, Human
agacucaagacugcagaagacg

SEQ ID NO: 771326 - RNA, 22 nt, Human
gugaaauauuuaacguccaggu

SEQ ID NO: 771327 - RNA, 22 nt, Human
uugcuuccaguccaagucuguu

SEQ ID NO: 771328 - RNA, 22 nt, Human
uucuaugauucauuuagaaguu

SEQ ID NO: 771329 - RNA, 22 nt, Human
ccagcagaagcucccgcugggu

SEQ ID NO: 771330 - RNA, 22 nt, Human
acacaggggcucggcugggugc

SEQ ID NO: 771331 - RNA, 22 nt, Human
ucaucccuaaggacagcucugc

SEQ ID NO: 771332 - RNA, 22 nt, Human
caaauuuaagugaggucuuugu

SEQ ID NO: 771333 - RNA, 19 nt, Human
aggcaccuugauggcuucc

SEQ ID NO: 771334 - RNA, 22 nt, Human
ucucuccaacaugguggugcug

SEQ ID NO: 771335 - RNA, 23 nt, Human
gagcugggauacaggcuuacugc

SEQ ID NO: 771336 - RNA, 22 nt, Human
ccucagggccaucucugucccu

SEQ ID NO: 771337 - RNA, 22 nt, Human
cuccuggaucuuagccagauuc

SEQ ID NO: 771338 - RNA, 22 nt, Human
aauggccuguauggaaagugaa

SEQ ID NO: 771339 - RNA, 22 nt, Human
auuucagugucuucuucucccu

SEQ ID NO: 771340 - RNA, 22 nt, Human
uccuguggaagacaguguuggg

SEQ ID NO: 771341 - RNA, 23 nt, Human
uugugucuacuuccuaucuaggg

SEQ ID NO: 771342 - RNA, 22 nt, Human
ccuggccaggcucucagcacug

SEQ ID NO: 771343 - RNA, 22 nt, Human
uuucuccugcccagaugccugg

SEQ ID NO: 771344 - RNA, 22 nt, Human
aaguacauuuuuaacuuacagc

SEQ ID NO: 771345 - RNA, 22 nt, Human
ggccucagaaauagaguaaaau

SEQ ID NO: 771346 - RNA, 22 nt, Human
agcaguggcugaagauguuccu

SEQ ID NO: 771347 - RNA, 22 nt, Human
gagcuuggaugucuuuuguuca

SEQ ID NO: 771348 - RNA, 22 nt, Human
uaguauaugucuaugguuguag

SEQ ID NO: 771349 - RNA, 22 nt, Human
auuaauauugguucauuagcug

SEQ ID NO: 771350 - RNA, 22 nt, Human
auccuucaaaaggaauagcagg

SEQ ID NO: 771351 - RNA, 22 nt, Human
auucaaagcccaguaaacauug

SEQ ID NO: 771352 - RNA, 22 nt, Human
auaacauuuugacaacugguga

SEQ ID NO: 771353 - RNA, 22 nt, Human
gggugcagcagagcuccucugu

SEQ ID NO: 771354 - RNA, 22 nt, Human
uuuugugagcuccuuggaggua

SEQ ID NO: 771355 - RNA, 22 nt, Human
cugucuguuucaaaagugguua

SEQ ID NO: 771356 - RNA, 22 nt, Human
uuucaaagacagccauauuugu

SEQ ID NO: 771357 - RNA, 22 nt, Human
ccaucccugggccauguccccu

SEQ ID NO: 771358 - RNA, 22 nt, Human
cauuuguauagugcuuagacca

SEQ ID NO: 771359 - RNA, 22 nt, Human
ucuguggaguugaggaagguug

SEQ ID NO: 771360 - RNA, 22 nt, Human
aaaaagguugauccagauuagg

SEQ ID NO: 771361 - RNA, 22 nt, Human
cuugauucucagaaugcuugcu

SEQ ID NO: 771362 - RNA, 22 nt, Human
guccagaguauucaaguaacuu

SEQ ID NO: 771363 - RNA, 22 nt, Human
agcaccaggccauggggucccu

SEQ ID NO: 771364 - RNA, 19 nt, Human
ugcccaggccucccaaaag

SEQ ID NO: 771365 - RNA, 22 nt, Human
ugugaggauuaaaugcauagug

SEQ ID NO: 771366 - RNA, 22 nt, Human
uguauauauuucuuucauucua

SEQ ID NO: 771367 - RNA, 22 nt, Human
agaaagaacgcacuugugcugc

SEQ ID NO: 771368 - RNA, 22 nt, Human
cuccaggcuggauccaagucaa

SEQ ID NO: 771369 - RNA, 22 nt, Human
cgagaguggacagggcgcagcu

SEQ ID NO: 771370 - RNA, 22 nt, Human
gaggcugguucccuugaucuuu

SEQ ID NO: 771371 - RNA, 22 nt, Human
ccuggaaggcaggcauggauug

SEQ ID NO: 771372 - RNA, 22 nt, Human
ccaguguuggaggauggcuugc

SEQ ID NO: 771373 - RNA, 22 nt, Human
augucacaugguucuggggccu

SEQ ID NO: 771374 - RNA, 22 nt, Human
ucuucucaguuucucuaggaug

SEQ ID NO: 771375 - RNA, 22 nt, Human
uggcccgaccucugcucaugca

SEQ ID NO: 771376 - RNA, 22 nt, Human
caguuucagaaucaaaacauca

SEQ ID NO: 771377 - RNA, 22 nt, Human
gaagaugggaaugaugaguggg

SEQ ID NO: 771378 - RNA, 22 nt, Human
guucccauacaguaucagugcu

SEQ ID NO: 771379 - RNA, 22 nt, Human
gcugcagcccggcgcgccugag

SEQ ID NO: 771380 - RNA, 22 nt, Human
uggcccuuugggugcaggggca

SEQ ID NO: 771381 - RNA, 22 nt, Human
ugcauuguugaauauuucauag

SEQ ID NO: 771382 - RNA, 22 nt, Human
uuggcaucaguguaggaccugu

SEQ ID NO: 771383 - RNA, 22 nt, Human
ugcuccgggaaagagcagccgc

SEQ ID NO: 771384 - RNA, 22 nt, Human
uccugggguuuuggccgcagcu

SEQ ID NO: 771385 - RNA, 22 nt, Human
gauucaggccugcaucucagca

SEQ ID NO: 771386 - RNA, 22 nt, Human
gacagcaguccuggaguuccca

SEQ ID NO: 771387 - RNA, 22 nt, Human
aguguggagcaucgagggcaga

SEQ ID NO: 771388 - RNA, 22 nt, Human
ggugucuguugccuccugguua

SEQ ID NO: 771389 - RNA, 22 nt, Human
uggaguugcagcuaccagacau

SEQ ID NO: 771390 - RNA, 22 nt, Human
cucagcaacagcgacuuaaggg

SEQ ID NO: 771391 - RNA, 22 nt, Human
agcuccugcagacuccugcuca

SEQ ID NO: 771392 - RNA, 22 nt, Human
ugagcugugcuacgcccuggga

SEQ ID NO: 771393 - RNA, 22 nt, Human
aagacaugacugcacagccaaa

SEQ ID NO: 771394 - RNA, 21 nt, Human
gauuugcagaaacuagacagg

SEQ ID NO: 771395 - RNA, 23 nt, Human
uuucaaagacuuucccuuagagu

SEQ ID NO: 771396 - RNA, 22 nt, Human
guuauucuuuuauagcaauaca

SEQ ID NO: 771397 - RNA, 22 nt, Human
cugggacaugauagaaacagau

SEQ ID NO: 771398 - RNA, 22 nt, Human
acccugggcacaccauuucccc

SEQ ID NO: 771399 - RNA, 22 nt, Human
auggcuaaaccugaacuggucu

SEQ ID NO: 771400 - RNA, 22 nt, Human
gaugcucaucuguccuuugaug

SEQ ID NO: 771401 - RNA, 18 nt, Human
uuccaguagcuguaucac

SEQ ID NO: 771402 - RNA, 22 nt, Human
cugaggccagaacccgacccug

SEQ ID NO: 771403 - RNA, 22 nt, Human
gcagggcacagacagugccaag

SEQ ID NO: 771404 - RNA, 22 nt, Human
uggcugcguuuuccgauguauu

SEQ ID NO: 771405 - RNA, 22 nt, Human
cugaggcacuaacaaggacaag

SEQ ID NO: 771406 - RNA, 22 nt, Human
uaauaauuaguuauugaucgug

SEQ ID NO: 771407 - RNA, 22 nt, Human
agccccuguuuuuccagucaga

SEQ ID NO: 771408 - RNA, 22 nt, Human
gguggcugaaucaaaucaggcc

SEQ ID NO: 771409 - RNA, 22 nt, Human
cuuuaguguuguugugaggauu

SEQ ID NO: 771410 - RNA, 22 nt, Human
ggaggcacuucccgucucagcc

SEQ ID NO: 771411 - RNA, 21 nt, Human
cacuuuaaaaauaucuuuaua

SEQ ID NO: 771412 - RNA, 20 nt, Human
uauacuaacauauaucuguu

SEQ ID NO: 771413 - RNA, 22 nt, Human
uguuuuuuccuuaugcaaucug

SEQ ID NO: 771414 - RNA, 22 nt, Human
caugaaacuuccaaagcugacc

SEQ ID NO: 771415 - RNA, 22 nt, Human
caucucuccacggcagcucucg

SEQ ID NO: 771416 - RNA, 22 nt, Human
aaggugucggguuagcucagcc

SEQ ID NO: 771417 - RNA, 22 nt, Human
aggcagggcucauuucuuaggc

SEQ ID NO: 771418 - RNA, 22 nt, Human
cauucauuagaauagauaugua

SEQ ID NO: 771419 - RNA, 22 nt, Human
uggaggaugccuggggaggccu

SEQ ID NO: 771420 - RNA, 22 nt, Human
gcugggcagccccuacagagag

SEQ ID NO: 771421 - RNA, 22 nt, Human
guaggucagacauaagaggaca

SEQ ID NO: 771422 - RNA, 22 nt, Human
gggagcucucccugaggccugg

SEQ ID NO: 771423 - RNA, 22 nt, Human
acuucacaaagagaucaucuaa

SEQ ID NO: 771424 - RNA, 22 nt, Human
aucuguguaugaaaguauaacu

SEQ ID NO: 771425 - RNA, 22 nt, Human
caggcacagcuaagacuggcca

SEQ ID NO: 771426 - RNA, 22 nt, Human
acauaauaggugccugaauauu

SEQ ID NO: 771427 - RNA, 22 nt, Human
augaaaacggaccagagcuauu

SEQ ID NO: 771428 - RNA, 22 nt, Human
uaugcauaauuggauaaguaga

SEQ ID NO: 771429 - RNA, 22 nt, Human
ggaggccaagucacugaccugg

SEQ ID NO: 771430 - RNA, 22 nt, Human
ucagugcuucggcgagcaccua

SEQ ID NO: 771431 - RNA, 22 nt, Human
cugagaaaccaggugcucugau

SEQ ID NO: 771432 - RNA, 22 nt, Human
agcaggagcccuuaucaccagg

SEQ ID NO: 771433 - RNA, 17 nt, Human
aguggcaggcagauggg

SEQ ID NO: 771434 - RNA, 22 nt, Human
accaccccagaauuuuucaagg

SEQ ID NO: 771435 - RNA, 22 nt, Human
gcguuuaaagauagcuaauaag

SEQ ID NO: 771436 - RNA, 22 nt, Human
uaacacauagauauuuuaacuu

SEQ ID NO: 771437 - RNA, 22 nt, Human
cagggcagcuuccuuuguuagg

SEQ ID NO: 771438 - RNA, 22 nt, Human
gugaggagcucuuugacucacg

SEQ ID NO: 771439 - RNA, 22 nt, Human
agagcacaguaucugcacauca

SEQ ID NO: 771440 - RNA, 22 nt, Human
ugggcccaagagagucuccaac

SEQ ID NO: 771441 - RNA, 22 nt, Human
gagaacucagacgcaggucaug

SEQ ID NO: 771442 - RNA, 22 nt, Human
uuacaaggaggauagcauuucc

SEQ ID NO: 771443 - RNA, 22 nt, Human
aagacuguaugagacaauauaa

SEQ ID NO: 771444 - RNA, 23 nt, Human
cuucaucaaaaguuaacacuagu

SEQ ID NO: 771445 - RNA, 23 nt, Human
aggggcagcaaguuuugguguua

SEQ ID NO: 771446 - RNA, 22 nt, Human
cauguuuucuaggcuuucacaa

SEQ ID NO: 771447 - RNA, 22 nt, Human
ugcuccagaaaaacuugagacu

SEQ ID NO: 771448 - RNA, 22 nt, Human
aagauccugcuuuugcuucugu

SEQ ID NO: 771449 - RNA, 22 nt, Human
cucaggacccgguccagguggg

SEQ ID NO: 771450 - RNA, 22 nt, Human
gaauugucuuggccagugagaa

SEQ ID NO: 771451 - RNA, 22 nt, Human
uuuggguucagacaugauuaca

SEQ ID NO: 771452 - RNA, 22 nt, Human
gaggggucacaugggcuggcuu

SEQ ID NO: 771453 - RNA, 17 nt, Human
acacaagcaccuugagg

SEQ ID NO: 771454 - RNA, 22 nt, Human
ccagcugcucucuucuccgcca

SEQ ID NO: 771455 - RNA, 22 nt, Human
uagauauaagguccuuagaaca

SEQ ID NO: 771456 - RNA, 22 nt, Human
acugccuguuuggcauggcccc

SEQ ID NO: 771457 - RNA, 22 nt, Human
uggcagagaauaaaucuugacu

SEQ ID NO: 771458 - RNA, 21 nt, Human
aggcucagagagaaacucuug

SEQ ID NO: 771459 - RNA, 22 nt, Human
agcaguuuuuauaacacuggaa

SEQ ID NO: 771460 - RNA, 21 nt, Human
agcucuaugacuuggccaggu

SEQ ID NO: 771461 - RNA, 22 nt, Human
aaaucuguaagcaauugcucag

SEQ ID NO: 771462 - RNA, 22 nt, Human
cagggccuuguucaggagugaa

SEQ ID NO: 771463 - RNA, 22 nt, Human
cuuuggcuugcccuggcaguac

SEQ ID NO: 771464 - RNA, 16 nt, Human
cacauauauuuauaug

SEQ ID NO: 771465 - RNA, 22 nt, Human
ggucuuucuuugauaguggaga

SEQ ID NO: 771466 - RNA, 22 nt, Human
gaagaacacuucaugauucauu

SEQ ID NO: 771467 - RNA, 22 nt, Human
aaguucuaauuuugcauucagg

SEQ ID NO: 771468 - RNA, 22 nt, Human
agcaaagcaccauauggcaguu

SEQ ID NO: 771469 - RNA, 22 nt, Human
uuuaugugaugcaucccagaaa

SEQ ID NO: 771470 - RNA, 22 nt, Human
gcagaaagcuccuugcgaucug

SEQ ID NO: 771471 - RNA, 22 nt, Human
aagaaugugcuaaugaaaacuu

SEQ ID NO: 771472 - RNA, 22 nt, Human
gaccacagacuggaaagagggc

SEQ ID NO: 771473 - RNA, 22 nt, Human
gcugcugcaugaacagcgguca

SEQ ID NO: 771474 - RNA, 22 nt, Human
aaacugcaaugacagguaggag

SEQ ID NO: 771475 - RNA, 22 nt, Human
acugugcuaucuacugaauuau

SEQ ID NO: 771476 - RNA, 22 nt, Human
ugcuggaggccagaagucugag

SEQ ID NO: 771477 - RNA, 22 nt, Human
ugaggccaagccuccucugcca

SEQ ID NO: 771478 - RNA, 22 nt, Human
agggagcuaggauccugaaggu

SEQ ID NO: 771479 - RNA, 22 nt, Human
ucauuuuuuuccgguaggaaua

SEQ ID NO: 771480 - RNA, 22 nt, Human
gugccagcaguuauggugauuu

SEQ ID NO: 771481 - RNA, 22 nt, Human
uucagaaaggauaauuggaagg

SEQ ID NO: 771482 - RNA, 22 nt, Human
ugccacagacaggacagaacag

SEQ ID NO: 771483 - RNA, 22 nt, Human
uuuccucauuuaucugcuggga

SEQ ID NO: 771484 - RNA, 22 nt, Human
ucaacaauaggauauagcaggu

SEQ ID NO: 771485 - RNA, 22 nt, Human
aauuguacaagccuugugccau

SEQ ID NO: 771486 - RNA, 22 nt, Human
uauagcaagcuuugagcuuuca

SEQ ID NO: 771487 - RNA, 22 nt, Human
ugcugucaguuggcaggaugag

SEQ ID NO: 771488 - RNA, 22 nt, Human
gagcugaggcugaggccucacu

SEQ ID NO: 771489 - RNA, 22 nt, Human
aguaggcagaaguggcauucgg

SEQ ID NO: 771490 - RNA, 22 nt, Human
aaggugaaacuggaagcuggcc

SEQ ID NO: 771491 - RNA, 22 nt, Human
uccugcuucuucgagcuucugg

SEQ ID NO: 771492 - RNA, 22 nt, Human
ggauccaguccagggcugugug

SEQ ID NO: 771493 - RNA, 22 nt, Human
agaaaguacagaugagacacuu

SEQ ID NO: 771494 - RNA, 22 nt, Human
guaacauuuacaguuccuagag

SEQ ID NO: 771495 - RNA, 22 nt, Human
aaaccuagguuuccucauucag

SEQ ID NO: 771496 - RNA, 22 nt, Human
uggaagccaaggucagaaggag

SEQ ID NO: 771497 - RNA, 22 nt, Human
auagcaauggcaacaacuaagc

SEQ ID NO: 771498 - RNA, 18 nt, Human
ggcaggggugaaccacag

SEQ ID NO: 771499 - RNA, 22 nt, Human
gagcucugaaaaagcuugccuu

SEQ ID NO: 771500 - RNA, 22 nt, Human
agacucugggauuuugaaagca

SEQ ID NO: 771501 - RNA, 18 nt, Human
ggccucagccuggccgga

SEQ ID NO: 771502 - RNA, 22 nt, Human
cagucucuaaaucaaucugaau

SEQ ID NO: 771503 - RNA, 22 nt, Human
uccaggauugucagccagaagg

SEQ ID NO: 771504 - RNA, 22 nt, Human
gacuucaaaggucaaacaucgc

SEQ ID NO: 771505 - RNA, 22 nt, Human
gugcuguucuggcugccaccac

SEQ ID NO: 771506 - RNA, 22 nt, Human
uccagggcagccgcgggugcgc

SEQ ID NO: 771507 - RNA, 22 nt, Human
uuugagaacccuguauuuuaag

SEQ ID NO: 771508 - RNA, 21 nt, Human
acuucccaggaccuacucaga

SEQ ID NO: 771509 - RNA, 22 nt, Human
uauauaacuacuauuuugcuca

SEQ ID NO: 771510 - RNA, 22 nt, Human
uugaagcaaggcgaaucuugug

SEQ ID NO: 771511 - RNA, 22 nt, Human
aguacacaguagacuuucucau

SEQ ID NO: 771512 - RNA, 22 nt, Human
gcccaugcacuuucugugaugg

SEQ ID NO: 771513 - RNA, 22 nt, Human
ccugggcugaagucaagugugg

SEQ ID NO: 771514 - RNA, 22 nt, Human
cggcugugucuucacaggagcc

SEQ ID NO: 771515 - RNA, 22 nt, Human
uuucucuugcgauaugcuacac

SEQ ID NO: 771516 - RNA, 22 nt, Human
ugacccugagagcugaauggcu

SEQ ID NO: 771517 - RNA, 22 nt, Human
aauuauauugaaguugaauguc

SEQ ID NO: 771518 - RNA, 22 nt, Human
gugagagaaauuggagggaaug

SEQ ID NO: 771519 - RNA, 22 nt, Human
uggcaggcagugugggagcugg

SEQ ID NO: 771520 - RNA, 22 nt, Human
augcuuccaaggcuaagacaag

SEQ ID NO: 771521 - RNA, 21 nt, Human
ucccucagacagggugccuau

SEQ ID NO: 771522 - RNA, 22 nt, Human
cauagcaagaucacauucugua

SEQ ID NO: 771523 - RNA, 22 nt, Human
agagaaggcauagaacuugagu

SEQ ID NO: 771524 - RNA, 22 nt, Human
ccuucaaguuccuggucccugg

SEQ ID NO: 771525 - RNA, 22 nt, Human
ucacaucuugugauguuuucau

SEQ ID NO: 771526 - RNA, 22 nt, Human
cuuuccugaaaucucuucugca

SEQ ID NO: 771527 - RNA, 22 nt, Human
acugggccaggugugggugagu

SEQ ID NO: 771528 - RNA, 22 nt, Human
ccaggcugcagucaaggggcau

SEQ ID NO: 771529 - RNA, 22 nt, Human
aaucauguccaucuuaacuuuc

SEQ ID NO: 771530 - RNA, 22 nt, Human
ucuguggcuuccuauuucuugg

SEQ ID NO: 771531 - RNA, 22 nt, Human
cccaccaugugcccauuggcuu

SEQ ID NO: 771532 - RNA, 22 nt, Human
cggcuucaugagaaaugacaga

SEQ ID NO: 771533 - RNA, 22 nt, Human
uuaaaaugaauauugauuagca

SEQ ID NO: 771534 - RNA, 22 nt, Human
uuucuagugguuaagauuuaca

SEQ ID NO: 771535 - RNA, 22 nt, Human
uugcuucacugaguuaugccug

SEQ ID NO: 771536 - RNA, 22 nt, Human
auguuuuugagauacaaacaga

SEQ ID NO: 771537 - RNA, 22 nt, Human
aaacaucucaaagagguauuug

SEQ ID NO: 771538 - RNA, 22 nt, Human
acugucuucaaaugaauauauu

SEQ ID NO: 771539 - RNA, 22 nt, Human
agcugguggagaagcagaccuc

SEQ ID NO: 771540 - RNA, 22 nt, Human
ucacacgugagguucuauccug

SEQ ID NO: 771541 - RNA, 22 nt, Human
caacauuauauagccacaugcc

SEQ ID NO: 771542 - RNA, 22 nt, Human
ugcagccccugaaaauggcagc

SEQ ID NO: 771543 - RNA, 22 nt, Human
uguuagaaauuauuaguaauau

SEQ ID NO: 771544 - RNA, 22 nt, Human
gucuguguuuucaggccuuugu

SEQ ID NO: 771545 - RNA, 22 nt, Human
uucacauuguuuuaaugugaau

SEQ ID NO: 771546 - RNA, 22 nt, Human
aggcuaagugggugucagggcc

SEQ ID NO: 771547 - RNA, 22 nt, Human
uccuggcucggcuuggggacuu

SEQ ID NO: 771548 - RNA, 22 nt, Human
ccuccuuuccuguuuuccugag

SEQ ID NO: 771549 - RNA, 22 nt, Human
auuucauauguaucaccuagcc

SEQ ID NO: 771550 - RNA, 22 nt, Human
ugucaccaugcgaggcuaauuu

SEQ ID NO: 771551 - RNA, 22 nt, Human
agaugaaauuuguguugaguug

SEQ ID NO: 771552 - RNA, 22 nt, Human
guucccacuuggugcacuauga

SEQ ID NO: 771553 - RNA, 22 nt, Human
ggggcagccuccaggaaagcug

SEQ ID NO: 771554 - RNA, 22 nt, Human
augaauauguacacaucuguca

SEQ ID NO: 771555 - RNA, 22 nt, Human
acucacugcacuuugaaaugug

SEQ ID NO: 771556 - RNA, 22 nt, Human
agggggcaucagguccuggcuc

SEQ ID NO: 771557 - RNA, 22 nt, Human
ucagacagcuugcagggaggug

SEQ ID NO: 771558 - RNA, 22 nt, Human
cauuuguacagaacagcuuuau

SEQ ID NO: 771559 - RNA, 22 nt, Human
gcuuugaugaaucugugcuugg

SEQ ID NO: 771560 - RNA, 22 nt, Human
cauuaauaaacauuucagaaga

SEQ ID NO: 771561 - RNA, 22 nt, Human
ggucacaggggagaagagugau

SEQ ID NO: 771562 - RNA, 22 nt, Human
cagagaaagacuugcccuuagu

SEQ ID NO: 771563 - RNA, 22 nt, Human
aaacacuugcaaaaugguuccu

SEQ ID NO: 771564 - RNA, 22 nt, Human
ugcucaggucguucugccccuu

SEQ ID NO: 771565 - RNA, 22 nt, Human
uguuaugugccacacuugaggg

SEQ ID NO: 771566 - RNA, 22 nt, Human
agggaagcccuggcugagaccc

SEQ ID NO: 771567 - RNA, 22 nt, Human
uuuguucacugagcaaugauua

SEQ ID NO: 771568 - RNA, 22 nt, Human
cuggcuuuguucugauugcuuc

SEQ ID NO: 771569 - RNA, 22 nt, Human
caagaagccgagcuacaggcuc

SEQ ID NO: 771570 - RNA, 22 nt, Human
uucucucugagagcaucuggaa

SEQ ID NO: 771571 - RNA, 22 nt, Human
ugaagcaaugauagcagaauga

SEQ ID NO: 771572 - RNA, 18 nt, Human
auuaaggaauucuuuaga

SEQ ID NO: 771573 - RNA, 22 nt, Human
gagucuggacuauucuggucuu

SEQ ID NO: 771574 - RNA, 22 nt, Human
ggcaggagaauggcgugaacuc

SEQ ID NO: 771575 - RNA, 22 nt, Human
gucauauuggcuccacuuccuc

SEQ ID NO: 771576 - RNA, 22 nt, Human
ucacacauucuagguauguuga

SEQ ID NO: 771577 - RNA, 22 nt, Human
agaugauggccauguccucucc

SEQ ID NO: 771578 - RNA, 22 nt, Human
caaagggaaacgcagugucaag

SEQ ID NO: 771579 - RNA, 22 nt, Human
cacagcuucugagugaggauuu

SEQ ID NO: 771580 - RNA, 23 nt, Human
ggccauggagacuuagaaugggc

SEQ ID NO: 771581 - RNA, 22 nt, Human
auggaaggcuuuaugacucaaa

SEQ ID NO: 771582 - RNA, 22 nt, Human
ucccacagguggagcuugcagu

SEQ ID NO: 771583 - RNA, 22 nt, Human
cagauauaaauggaugugguag

SEQ ID NO: 771584 - RNA, 22 nt, Human
agucccagccuguaggauuggg

SEQ ID NO: 771585 - RNA, 22 nt, Human
ucagcuggagaugagaaccgaa

SEQ ID NO: 771586 - RNA, 22 nt, Human
caucccugcccucaugccuaua

SEQ ID NO: 771587 - RNA, 22 nt, Human
gcuugggagaggcuuccucuuu

SEQ ID NO: 771588 - RNA, 22 nt, Human
caugggcuacagaagcaugcug

SEQ ID NO: 771589 - RNA, 22 nt, Human
ucacugaagucuucaaguagga

SEQ ID NO: 771590 - RNA, 22 nt, Human
aaaucucugcaggcaaauguga

SEQ ID NO: 771591 - RNA, 22 nt, Human
acccagagauggaccuggcugc

SEQ ID NO: 771592 - RNA, 22 nt, Human
cauuuuacugacucuugaauua

SEQ ID NO: 771593 - RNA, 22 nt, Human
cagaccagcucuaugaacccaa

SEQ ID NO: 771594 - RNA, 22 nt, Human
gcaacaguuggauuccagagga

SEQ ID NO: 771595 - RNA, 22 nt, Human
uucaagucugaagaggacuaau

SEQ ID NO: 771596 - RNA, 22 nt, Human
agcugcuguccuaggcacugua

SEQ ID NO: 771597 - RNA, 23 nt, Human
uaucauuucagcucucugccugg

SEQ ID NO: 771598 - RNA, 22 nt, Human
uacagcuuuugcagcuguuuug

SEQ ID NO: 771599 - RNA, 19 nt, Human
agcugcagaccagaagugc

SEQ ID NO: 771600 - RNA, 22 nt, Human
cuucuuucccaggcauguuuua

SEQ ID NO: 771601 - RNA, 22 nt, Human
agagacuggagaugggcagugu

SEQ ID NO: 771602 - RNA, 22 nt, Human
gccugggagggcagcagugugg

SEQ ID NO: 771603 - RNA, 22 nt, Human
uagcagcagugguguauuuaga

SEQ ID NO: 771604 - RNA, 21 nt, Human
acaggcuuuagaaaaugacuc

SEQ ID NO: 771605 - RNA, 22 nt, Human
ugaggguggcacaggcacaaag

SEQ ID NO: 771606 - RNA, 22 nt, Human
uaugucuuuuccaaugcugucu

SEQ ID NO: 771607 - RNA, 18 nt, Human
ccuaagcuccagccccag

SEQ ID NO: 771608 - RNA, 22 nt, Human
ggcucuguucuaaauuaauaag

SEQ ID NO: 771609 - RNA, 22 nt, Human
cugcucugugcacuuguucagg

SEQ ID NO: 771610 - RNA, 22 nt, Human
uugcuuugccaccagaagucua

SEQ ID NO: 771611 - RNA, 22 nt, Human
ugagaucuucgcucuucacaga

SEQ ID NO: 771612 - RNA, 22 nt, Human
aucuguaauuuugaaugcaaau

SEQ ID NO: 771613 - RNA, 22 nt, Human
agagaagggaagggauucaccc

SEQ ID NO: 771614 - RNA, 22 nt, Human
auccuucaggaaaccauccuca

SEQ ID NO: 771615 - RNA, 22 nt, Human
uacacagggagagauuggaaac

SEQ ID NO: 771616 - RNA, 22 nt, Human
acucuggguucuuucacuugac

SEQ ID NO: 771617 - RNA, 22 nt, Human
acaacugucuucuucaugcucc

SEQ ID NO: 771618 - RNA, 22 nt, Human
ucugugaacaucacauugacag

SEQ ID NO: 771619 - RNA, 22 nt, Human
agcuccugcccaggaaggcucu

SEQ ID NO: 771620 - RNA, 22 nt, Human
cugcccugucugcagccuggcu

SEQ ID NO: 771621 - RNA, 22 nt, Human
cagggcuggauccuccagacuc

SEQ ID NO: 771622 - RNA, 22 nt, Human
agucucuuaaugggcagaaagu

SEQ ID NO: 771623 - RNA, 18 nt, Human
gcuagggcaugcauggug

SEQ ID NO: 771624 - RNA, 22 nt, Human
ggcugaggcggcgaugcccuug

SEQ ID NO: 771625 - RNA, 22 nt, Human
aauaagccagcccaugugaccc

SEQ ID NO: 771626 - RNA, 22 nt, Human
gcagagauuggugcacugauga

SEQ ID NO: 771627 - RNA, 22 nt, Human
gagcugguggugagaaagcucu

SEQ ID NO: 771628 - RNA, 22 nt, Human
aaaguguugauaugugacaucc

SEQ ID NO: 771629 - RNA, 22 nt, Human
uauggcuucugggccaaauuua

SEQ ID NO: 771630 - RNA, 22 nt, Human
ccaguguugcauaggaugggga

SEQ ID NO: 771631 - RNA, 22 nt, Human
cugccuguauugucugcuuggg

SEQ ID NO: 771632 - RNA, 22 nt, Human
gagaggcuggguuggagaucga

SEQ ID NO: 771633 - RNA, 22 nt, Human
aaaucacugauuaaaguuagaa

SEQ ID NO: 771634 - RNA, 22 nt, Human
ugguaaaguggcuucacagugu

SEQ ID NO: 771635 - RNA, 22 nt, Human
cagugcuguuguaagcucauug

SEQ ID NO: 771636 - RNA, 22 nt, Human
guucuguccucacugcaggccu

SEQ ID NO: 771637 - RNA, 22 nt, Human
cuuuacagugcugcuaauggcu

SEQ ID NO: 771638 - RNA, 22 nt, Human
gacacagaccaccaggcccugg

SEQ ID NO: 771639 - RNA, 23 nt, Human
agucagugcgggauggucagggg

SEQ ID NO: 771640 - RNA, 19 nt, Human
uucauucucuuauuguugu

SEQ ID NO: 771641 - RNA, 22 nt, Human
ugggggugugccagggaccucc

SEQ ID NO: 771642 - RNA, 22 nt, Human
ggacaggugcaaagggcacaug

SEQ ID NO: 771643 - RNA, 22 nt, Human
agguggggugagcugcagacua

SEQ ID NO: 771644 - RNA, 22 nt, Human
guccagagccggaagagugaca

SEQ ID NO: 771645 - RNA, 22 nt, Human
ggcucugcugcacccuuggcuc

SEQ ID NO: 771646 - RNA, 22 nt, Human
uugaaugagaaguuauugccau

SEQ ID NO: 771647 - RNA, 22 nt, Human
uagguagcuuuggcguuucuug

SEQ ID NO: 771648 - RNA, 22 nt, Human
gucuuuagagcuccuggcaucu

SEQ ID NO: 771649 - RNA, 22 nt, Human
acccaggcuggaaugcaguggu

SEQ ID NO: 771650 - RNA, 20 nt, Human
uggagguggucugcuguccu

SEQ ID NO: 771651 - RNA, 22 nt, Human
acugaacaccauuuauaacauu

SEQ ID NO: 771652 - RNA, 22 nt, Human
uguuaaauguuccuuuacugga

SEQ ID NO: 771653 - RNA, 22 nt, Human
uugcuuuuaauuaaucauugcu

SEQ ID NO: 771654 - RNA, 22 nt, Human
ucugcuuugcugccuccugauc

SEQ ID NO: 771655 - RNA, 22 nt, Human
uagauucuacugucacuuaguu

SEQ ID NO: 771656 - RNA, 22 nt, Human
caugaauauuuaguauuuacuu

SEQ ID NO: 771657 - RNA, 22 nt, Human
augaagacaggucucaucacca

SEQ ID NO: 771658 - RNA, 22 nt, Human
augcagaaggagccaugcuugc

SEQ ID NO: 771659 - RNA, 22 nt, Human
ucacagcugaguuuccauuucu

SEQ ID NO: 771660 - RNA, 22 nt, Human
uguguacauaucuauccuagau

SEQ ID NO: 771661 - RNA, 22 nt, Human
uggcucaguaaucgagucuccu

SEQ ID NO: 771662 - RNA, 21 nt, Human
auuuauguuugggguggaaug

SEQ ID NO: 771663 - RNA, 22 nt, Human
uaucaauugggccaaaugguac

SEQ ID NO: 771664 - RNA, 22 nt, Human
cuuuaugaaaaccagauugggg

SEQ ID NO: 771665 - RNA, 21 nt, Human
uacuacagucucuuuaucagu

SEQ ID NO: 771666 - RNA, 22 nt, Human
uucauugagugguuuauucuaa

SEQ ID NO: 771667 - RNA, 22 nt, Human
gaggccaaguuggagaccaggu

SEQ ID NO: 771668 - RNA, 22 nt, Human
gauaauccaagauugccucacu

SEQ ID NO: 771669 - RNA, 23 nt, Human
aggacaguggaauuuagggauug

SEQ ID NO: 771670 - RNA, 22 nt, Human
ugaaaaggguagaucccuaagu

SEQ ID NO: 771671 - RNA, 22 nt, Human
uguguucagaauuugcugcuuu

SEQ ID NO: 771672 - RNA, 21 nt, Human
ccugugugugucccuuuaaga

SEQ ID NO: 771673 - RNA, 22 nt, Human
uuugaaagggaaauaaacuccu

SEQ ID NO: 771674 - RNA, 20 nt, Human
uaugaagauaugugaacagc

SEQ ID NO: 771675 - RNA, 22 nt, Human
aguccuucuuuuaguugcuugg

SEQ ID NO: 771676 - RNA, 22 nt, Human
aggacaaucucuccuuuaucag

SEQ ID NO: 771677 - RNA, 22 nt, Human
acaaauuauagaaaauugagcu

SEQ ID NO: 771678 - RNA, 22 nt, Human
acacugaguauugaguagggua

SEQ ID NO: 771679 - RNA, 22 nt, Human
acugugugccaggcgcuggucu

SEQ ID NO: 771680 - RNA, 22 nt, Human
auguggcucagcaggcucccgu

SEQ ID NO: 771681 - RNA, 22 nt, Human
acucacauuucaucaggccaag

SEQ ID NO: 771682 - RNA, 22 nt, Human
aaguucuuggaggaugaagagu

SEQ ID NO: 771683 - RNA, 23 nt, Human
agaugaggcuucuccauguuggu

SEQ ID NO: 771684 - RNA, 22 nt, Human
agggauguggugggagagaaag

SEQ ID NO: 771685 - RNA, 22 nt, Human
aagugugugagccugucaggcu

SEQ ID NO: 771686 - RNA, 22 nt, Human
agugcuccaaagguuggucauu

SEQ ID NO: 771687 - RNA, 22 nt, Human
uauauuuuagacacccucacgc

SEQ ID NO: 771688 - RNA, 22 nt, Human
caggauggagaguuguugguug

SEQ ID NO: 771689 - RNA, 22 nt, Human
ucucuggaauuuugagagugac

SEQ ID NO: 771690 - RNA, 22 nt, Human
gggcagcacguuucaggaggau

SEQ ID NO: 771691 - RNA, 22 nt, Human
auggccaguguuucccucaguu

SEQ ID NO: 771692 - RNA, 22 nt, Human
gaaacuuuuaaaccucaugagu

SEQ ID NO: 771693 - RNA, 22 nt, Human
gcucccucugcucaggcacuug

SEQ ID NO: 771694 - RNA, 22 nt, Human
uugauucuaaaauaggaggaaa

SEQ ID NO: 771695 - RNA, 22 nt, Human
caucuguaaaguaggaauauug

SEQ ID NO: 771696 - RNA, 22 nt, Human
gugcaaaaugauauccugaagc

SEQ ID NO: 771697 - RNA, 22 nt, Human
agcaccuggagggcugggaccu

SEQ ID NO: 771698 - RNA, 22 nt, Human
ucauuuguucucauucucuacu

SEQ ID NO: 771699 - RNA, 22 nt, Human
caaggccacuccagagacuggu

SEQ ID NO: 771700 - RNA, 22 nt, Human
ggguaggcagugcguccugccu

SEQ ID NO: 771701 - RNA, 22 nt, Human
aagugugggacuagggcuccag

SEQ ID NO: 771702 - RNA, 22 nt, Human
cagucuaaucuguuacucauua

SEQ ID NO: 771703 - RNA, 22 nt, Human
agggaugacucuuggcugauuc

SEQ ID NO: 771704 - RNA, 22 nt, Human
uauagguaugucgagaaaugaa

SEQ ID NO: 771705 - RNA, 22 nt, Human
ugaaugugggagagcuggcaau

SEQ ID NO: 771706 - RNA, 22 nt, Human
uuccaagugcugaggacaguag

SEQ ID NO: 771707 - RNA, 22 nt, Human
auuccacagcucagccucucuu

SEQ ID NO: 771708 - RNA, 22 nt, Human
cagucuccaaaucagucugaau

SEQ ID NO: 771709 - RNA, 22 nt, Human
ucuuuucaggaauggcucuagu

SEQ ID NO: 771710 - RNA, 22 nt, Human
aggugggcggaucacaagguca

SEQ ID NO: 771711 - RNA, 23 nt, Human
cuguggccaccccuagcuggagg

SEQ ID NO: 771712 - RNA, 22 nt, Human
ugcagaggaccauuguccugga

SEQ ID NO: 771713 - RNA, 22 nt, Human
ucagggaaauagcagggcugaa

SEQ ID NO: 771714 - RNA, 22 nt, Human
auguccagcucaugauacuauc

SEQ ID NO: 771715 - RNA, 22 nt, Human
ccuggcucccccaucauagcug

SEQ ID NO: 771716 - RNA, 22 nt, Human
gcaccagcugccuucugugccc

SEQ ID NO: 771717 - RNA, 22 nt, Human
uagacacaucaaguauaguuaa

SEQ ID NO: 771718 - RNA, 22 nt, Human
agcccaggucuggcccagccug

SEQ ID NO: 771719 - RNA, 22 nt, Human
uugucagccagcucgcacucuu

SEQ ID NO: 771720 - RNA, 22 nt, Human
ccugucuggggacucccugggu

SEQ ID NO: 771721 - RNA, 22 nt, Human
ucugcccacugcucugcugccc

SEQ ID NO: 771722 - RNA, 18 nt, Human
cuccagggaacucaguca

SEQ ID NO: 771723 - RNA, 22 nt, Human
ugcagguguagaguugggcucc

SEQ ID NO: 771724 - RNA, 22 nt, Human
agcuggugauggccuaagaagg

SEQ ID NO: 771725 - RNA, 22 nt, Human
ccuaggcccucaaagagcauaa

SEQ ID NO: 771726 - RNA, 22 nt, Human
aagcaugcaaucugugauaagg

SEQ ID NO: 771727 - RNA, 22 nt, Human
acucuuguuuguagagcccacc

SEQ ID NO: 771728 - RNA, 22 nt, Human
augcauauuucuugggcuuacc

SEQ ID NO: 771729 - RNA, 22 nt, Human
ugagacaguuuuucuauuucca

SEQ ID NO: 771730 - RNA, 22 nt, Human
uacaacaugugguccuuuauga

SEQ ID NO: 771731 - RNA, 22 nt, Human
acagcuugcaugcagaggcacu

SEQ ID NO: 771732 - RNA, 22 nt, Human
ccagcagagcuggaagugugcu

SEQ ID NO: 771733 - RNA, 22 nt, Human
cuuauucagcaaguuuggguac

SEQ ID NO: 771734 - RNA, 22 nt, Human
gugugccuuucacacacuggga

SEQ ID NO: 771735 - RNA, 22 nt, Human
acagaggacaacuaggcgcuca

SEQ ID NO: 771736 - RNA, 20 nt, Human
uauuucugggcaaccauuua

SEQ ID NO: 771737 - RNA, 22 nt, Human
ucagggaggugucugccagaga

SEQ ID NO: 771738 - RNA, 22 nt, Human
agggacacacuccaguguuauu

SEQ ID NO: 771739 - RNA, 21 nt, Human
cucuuuauauaguaaagauau

SEQ ID NO: 771740 - RNA, 22 nt, Human
guguccugggcugguagagcug

SEQ ID NO: 771741 - RNA, 22 nt, Human
uuucauuucauagaauuguguu

SEQ ID NO: 771742 - RNA, 22 nt, Human
cagugccuggccggcuuccauu

SEQ ID NO: 771743 - RNA, 22 nt, Human
agaaacauccugcuuuccauuu

SEQ ID NO: 771744 - RNA, 22 nt, Human
uacugcaucgaaaugcuuuuau

SEQ ID NO: 771745 - RNA, 22 nt, Human
aagcuguucucuaaguuucaug

SEQ ID NO: 771746 - RNA, 22 nt, Human
ucucagucuuuuugguuacuca

SEQ ID NO: 771747 - RNA, 22 nt, Human
agucugugacucauuggaucuc

SEQ ID NO: 771748 - RNA, 22 nt, Human
uacaagaaacuacaugaaugca

SEQ ID NO: 771749 - RNA, 22 nt, Human
acuguaaagguuuguagcccag

SEQ ID NO: 771750 - RNA, 23 nt, Human
cuccccaguguccucaugcaucu

SEQ ID NO: 771751 - RNA, 22 nt, Human
agcuugggcaacacagcaagac

SEQ ID NO: 771752 - RNA, 22 nt, Human
gagucaggaguuaugcuccacc

SEQ ID NO: 771753 - RNA, 22 nt, Human
cucuguuucucagccuauuucc

SEQ ID NO: 771754 - RNA, 22 nt, Human
uggcuucucaguuucauaauga

SEQ ID NO: 771755 - RNA, 22 nt, Human
uauauuugugugugauuuauga

SEQ ID NO: 771756 - RNA, 22 nt, Human
acccaggacuuggcaaccucau

SEQ ID NO: 771757 - RNA, 22 nt, Human
ccaggacagggagacgggagcc

SEQ ID NO: 771758 - RNA, 22 nt, Human
uguggcuggucuccgagcgucg

SEQ ID NO: 771759 - RNA, 22 nt, Human
cugggucugggccuccuggagu

SEQ ID NO: 771760 - RNA, 23 nt, Human
agcaccaggaacagugugguccu

SEQ ID NO: 771761 - RNA, 19 nt, Human
ugcugcaggaugcugcugg

SEQ ID NO: 771762 - RNA, 22 nt, Human
gggcagugucugcaaaugaaca

SEQ ID NO: 771763 - RNA, 23 nt, Human
auuuaaugcugaguugaauguua

SEQ ID NO: 771764 - RNA, 22 nt, Human
agccacagucaaccuguccaua

SEQ ID NO: 771765 - RNA, 22 nt, Human
uauacaggaaauuuuggaacag

SEQ ID NO: 771766 - RNA, 22 nt, Human
aaguaaaagcuuuaccaugcgc

SEQ ID NO: 771767 - RNA, 22 nt, Human
ucauggaaacagcaaugcuaau

SEQ ID NO: 771768 - RNA, 22 nt, Human
cuguugugaauuuaguuaccaa

SEQ ID NO: 771769 - RNA, 22 nt, Human
uagugcuuuaaguuuacagaga

SEQ ID NO: 771770 - RNA, 22 nt, Human
ggcucuggcguccaauggagcg

SEQ ID NO: 771771 - RNA, 18 nt, Human
agaagcacaagaugucuu

SEQ ID NO: 771772 - RNA, 22 nt, Human
cuacagaguaucuaaagaggua

SEQ ID NO: 771773 - RNA, 22 nt, Human
ugguggccuugauggcaucugc

SEQ ID NO: 771774 - RNA, 22 nt, Human
ugagugugaggugggagcuugg

SEQ ID NO: 771775 - RNA, 22 nt, Human
uuguccuguuuagggauaagga

SEQ ID NO: 771776 - RNA, 22 nt, Human
uuccuucucuguggggaaggca

SEQ ID NO: 771777 - RNA, 22 nt, Human
acucuacuguaguaugggcacu

SEQ ID NO: 771778 - RNA, 22 nt, Human
cuucucucugcauaggcauggg

SEQ ID NO: 771779 - RNA, 22 nt, Human
cugauuccaaagccaaagcuau

SEQ ID NO: 771780 - RNA, 22 nt, Human
uaugcacacauguaugcaugug

SEQ ID NO: 771781 - RNA, 22 nt, Human
uagaggcuucuacugcucacuu

SEQ ID NO: 771782 - RNA, 22 nt, Human
uccaggagggauugggcugugg

SEQ ID NO: 771783 - RNA, 21 nt, Human
ucugggcagcccaguccugag

SEQ ID NO: 771784 - RNA, 22 nt, Human
caagcaaugcuauacucauuau

SEQ ID NO: 771785 - RNA, 22 nt, Human
aauauaaugcuguuuuaugcca

SEQ ID NO: 771786 - RNA, 22 nt, Human
aauuaggaauaaaugaguacuu

SEQ ID NO: 771787 - RNA, 22 nt, Human
aagcaggcaagguuguggggca

SEQ ID NO: 771788 - RNA, 22 nt, Human
cuuggagauacaagugguaccu

SEQ ID NO: 771789 - RNA, 22 nt, Human
gggaaguuugugggaggaauau

SEQ ID NO: 771790 - RNA, 22 nt, Human
uguuucuuuguagauauucuuu

SEQ ID NO: 771791 - RNA, 22 nt, Human
uaauuuuccacucuguuuaucu

SEQ ID NO: 771792 - RNA, 22 nt, Human
ugcccaaguccuccaccgaggu

SEQ ID NO: 771793 - RNA, 22 nt, Human
ugcagaguagcuauaccauuuu

SEQ ID NO: 771794 - RNA, 18 nt, Human
auuuuucccagauggaua

SEQ ID NO: 771795 - RNA, 22 nt, Human
uggucaacaggcagggaugaaa

SEQ ID NO: 771796 - RNA, 22 nt, Human
gcuucugcagccaaagaagccg

SEQ ID NO: 771797 - RNA, 22 nt, Human
cacugaaggcuaggauuagaug

SEQ ID NO: 771798 - RNA, 23 nt, Human
ugagaaauuuugauucaguagga

SEQ ID NO: 771799 - RNA, 22 nt, Human
guccauuuuauucagagacuuu

SEQ ID NO: 771800 - RNA, 22 nt, Human
aaccagugaaacaccaggcaag

SEQ ID NO: 771801 - RNA, 22 nt, Human
auuugauuuguagauaguguag

SEQ ID NO: 771802 - RNA, 22 nt, Human
cucagggaagcuauggugaggg

SEQ ID NO: 771803 - RNA, 22 nt, Human
agguaauaggguucagaauuau

SEQ ID NO: 771804 - RNA, 23 nt, Human
acagggcuuaucugucacucauc

SEQ ID NO: 771805 - RNA, 22 nt, Human
uggcuucaagucuagguucuac

SEQ ID NO: 771806 - RNA, 21 nt, Human
aucauuaauugcugagugaca

SEQ ID NO: 771807 - RNA, 22 nt, Human
uaccaaaaccaagccauuaucu

SEQ ID NO: 771808 - RNA, 22 nt, Human
uggugacagcauggaagaagug

SEQ ID NO: 771809 - RNA, 22 nt, Human
guucuuaagaccacaauaaaaa

SEQ ID NO: 771810 - RNA, 23 nt, Human
ucacugcuacucagccugagauu

SEQ ID NO: 771811 - RNA, 22 nt, Human
agcugggagcugaaggcugauu

SEQ ID NO: 771812 - RNA, 22 nt, Human
aaggccaugcuugaguugaagg

SEQ ID NO: 771813 - RNA, 22 nt, Human
cuagggagcacuagcugccuug

SEQ ID NO: 771814 - RNA, 22 nt, Human
cuggccuaggaaugguuuuccg

SEQ ID NO: 771815 - RNA, 22 nt, Human
ccugugcccugccaggcuggug

SEQ ID NO: 771816 - RNA, 22 nt, Human
cugcccugaccugccucagagu

SEQ ID NO: 771817 - RNA, 22 nt, Human
aguguuaagagaaaauucugcu

SEQ ID NO: 771818 - RNA, 22 nt, Human
uggcugagaaaaugguuuuagg

SEQ ID NO: 771819 - RNA, 22 nt, Human
uaagcauauuccagucaugucc

SEQ ID NO: 771820 - RNA, 22 nt, Human
ggucacagcuuuuucagcagca

SEQ ID NO: 771821 - RNA, 22 nt, Human
cugcugcauuccucuuuaugag

SEQ ID NO: 771822 - RNA, 22 nt, Human
ucuccagguucagucgauggaa

SEQ ID NO: 771823 - RNA, 22 nt, Human
aaaaguuuaagacucauucuag

SEQ ID NO: 771824 - RNA, 22 nt, Human
acagagucucaaaccuacaaag

SEQ ID NO: 771825 - RNA, 22 nt, Human
ggcugaggguuaagaucagaca

SEQ ID NO: 771826 - RNA, 22 nt, Human
aagcccugauaggaaaaugcug

SEQ ID NO: 771827 - RNA, 22 nt, Human
caggcagaaugaccgaccucgc

SEQ ID NO: 771828 - RNA, 22 nt, Human
uugggagguaauggagccaagu

SEQ ID NO: 771829 - RNA, 22 nt, Human
ugggggagauugugcaucucua

SEQ ID NO: 771830 - RNA, 22 nt, Human
uugaaggacauccuauuucuag

SEQ ID NO: 771831 - RNA, 21 nt, Human
acagaugugauaugcagucuu

SEQ ID NO: 771832 - RNA, 22 nt, Human
gcugauuauuacaugucugugg

SEQ ID NO: 771833 - RNA, 22 nt, Human
cauguacauucuguagauggag

SEQ ID NO: 771834 - RNA, 22 nt, Human
aaacauuguuaugauaaauuac

SEQ ID NO: 771835 - RNA, 19 nt, Human
uggcucuguuucucuggag

SEQ ID NO: 771836 - RNA, 22 nt, Human
agcuaggauaagcagagacugg

SEQ ID NO: 771837 - RNA, 22 nt, Human
uacaguuuaacacuuuggagaa

SEQ ID NO: 771838 - RNA, 22 nt, Human
gccagcucagugccaggccccu

SEQ ID NO: 771839 - RNA, 22 nt, Human
cugggagacaagagagggcuga

SEQ ID NO: 771840 - RNA, 22 nt, Human
uuucuucucaucccugaaauca

SEQ ID NO: 771841 - RNA, 22 nt, Human
ccuguugcucugcaugaguuua

SEQ ID NO: 771842 - RNA, 22 nt, Human
caugagaaguggccuucaaaaa

SEQ ID NO: 771843 - RNA, 22 nt, Human
caacagaccuggauucaaaaac

SEQ ID NO: 771844 - RNA, 22 nt, Human
cagugcagaggccagggaggau

SEQ ID NO: 771845 - RNA, 22 nt, Human
cuccaacgaggcugggguacaa

SEQ ID NO: 771846 - RNA, 22 nt, Human
uggcugagaaguucugguggga

SEQ ID NO: 771847 - RNA, 22 nt, Human
aaauggguuugauucucagcca

SEQ ID NO: 771848 - RNA, 21 nt, Human
uauuuaucucaggcuaucuuu

SEQ ID NO: 771849 - RNA, 22 nt, Human
ucaccacucacucaggcaaguc

SEQ ID NO: 771850 - RNA, 22 nt, Human
aagggggcccagcacuaaguug

SEQ ID NO: 771851 - RNA, 22 nt, Human
ggcugcugggaauaugccagcu

SEQ ID NO: 771852 - RNA, 22 nt, Human
ucagccagguaauguggagaug

SEQ ID NO: 771853 - RNA, 22 nt, Human
ggcugagcguggcugccguggg

SEQ ID NO: 771854 - RNA, 22 nt, Human
cuggcugugcugacugagaggg

SEQ ID NO: 771855 - RNA, 22 nt, Human
gcacaagaauaaccauauuuaa

SEQ ID NO: 771856 - RNA, 22 nt, Human
gcccuccccucuggguggugag

SEQ ID NO: 771857 - RNA, 22 nt, Human
aaaaugaggucaauauccuuuu

SEQ ID NO: 771858 - RNA, 22 nt, Human
cccuggccagcucaugucugag

SEQ ID NO: 771859 - RNA, 22 nt, Human
gguuauauaauucagugcuuuc

SEQ ID NO: 771860 - RNA, 22 nt, Human
gcugugcaguaguagguacagu

SEQ ID NO: 771861 - RNA, 22 nt, Human
gugucccagcagcacauuggcu

SEQ ID NO: 771862 - RNA, 22 nt, Human
cuggcugcgcuaguccagaaga

SEQ ID NO: 771863 - RNA, 22 nt, Human
ucuaucagaguagaaggcaacg

SEQ ID NO: 771864 - RNA, 22 nt, Human
ucccagagacagagccuccucc

SEQ ID NO: 771865 - RNA, 18 nt, Human
cagcugcaggcucaggac

SEQ ID NO: 771866 - RNA, 22 nt, Human
acugaggacagugaggagggcu

SEQ ID NO: 771867 - RNA, 22 nt, Human
uauuuaacuggaaacacaauga

SEQ ID NO: 771868 - RNA, 22 nt, Human
uggcucagucauggaugaguaa

SEQ ID NO: 771869 - RNA, 22 nt, Human
ugaugagggaacugguucauac

SEQ ID NO: 771870 - RNA, 22 nt, Human
ggcaggguuuacaauagcaaua

SEQ ID NO: 771871 - RNA, 22 nt, Human
aaagguaaaguaucugcccaag

SEQ ID NO: 771872 - RNA, 22 nt, Human
ucuuuccuacuuuauugugaac

SEQ ID NO: 771873 - RNA, 22 nt, Human
ugcaggcagcuaaaccauguaa

SEQ ID NO: 771874 - RNA, 22 nt, Human
uggagcaagcuggagagaacau

SEQ ID NO: 771875 - RNA, 22 nt, Human
caggcugugaaacugagaugcg

SEQ ID NO: 771876 - RNA, 22 nt, Human
ugaguggacaccugcuucuuua

SEQ ID NO: 771877 - RNA, 22 nt, Human
gguggguggaaacagcauguac

SEQ ID NO: 771878 - RNA, 22 nt, Human
ggcgggugcacagacccuuccc

SEQ ID NO: 771879 - RNA, 22 nt, Human
caauugcuuuguggaagccuuu

SEQ ID NO: 771880 - RNA, 22 nt, Human
gggcagguguuuccaaggugag

SEQ ID NO: 771881 - RNA, 22 nt, Human
ugaggcagucacccccuccugc

SEQ ID NO: 771882 - RNA, 22 nt, Human
uggguucuagagggaccagaac

SEQ ID NO: 771883 - RNA, 23 nt, Human
cagaaaguuugagaagauacauc

SEQ ID NO: 771884 - RNA, 22 nt, Human
cagcaucucacuucccagaagg

SEQ ID NO: 771885 - RNA, 22 nt, Human
uuaagauuuucuucaguauuau

SEQ ID NO: 771886 - RNA, 22 nt, Human
auagcaacaccccaauuuucua

SEQ ID NO: 771887 - RNA, 21 nt, Human
gucauccaccucucgggcucu

SEQ ID NO: 771888 - RNA, 22 nt, Human
acauguaagacuagcuuaaagu

SEQ ID NO: 771889 - RNA, 22 nt, Human
aggagccaggaaaccugcucug

SEQ ID NO: 771890 - RNA, 22 nt, Human
acucucugucuaaaugcaguuu

SEQ ID NO: 771891 - RNA, 22 nt, Human
uaggccauugauuuuuauaagu

SEQ ID NO: 771892 - RNA, 22 nt, Human
aagucaaagcuuucagaggaaa

SEQ ID NO: 771893 - RNA, 22 nt, Human
uagcuuuuauccacugcuuuug

SEQ ID NO: 771894 - RNA, 22 nt, Human
cagccacguagcccuuggccgu

SEQ ID NO: 771895 - RNA, 22 nt, Human
agcccagggacagggcggaugu

SEQ ID NO: 771896 - RNA, 22 nt, Human
auacacaggugcuaggucaaua

SEQ ID NO: 771897 - RNA, 22 nt, Human
gccugcagggccugggccuacc

SEQ ID NO: 771898 - RNA, 22 nt, Human
caaaaguaauugcaguuuuugc

SEQ ID NO: 771899 - RNA, 22 nt, Human
caugcucuagauucucucuaau

SEQ ID NO: 771900 - RNA, 22 nt, Human
aggaagugaaagggaaggaguu

SEQ ID NO: 771901 - RNA, 22 nt, Human
ugguccagaugccuuggcuuua

SEQ ID NO: 771902 - RNA, 22 nt, Human
cagguccugcagggagaguaaa

SEQ ID NO: 771903 - RNA, 22 nt, Human
uuacuuuggauggucaagaaag

SEQ ID NO: 771904 - RNA, 22 nt, Human
ggcauccucuagaagcuggaaa

SEQ ID NO: 771905 - RNA, 22 nt, Human
ugcaggcuguaaucugaggcua

SEQ ID NO: 771906 - RNA, 21 nt, Human
aacauugguucaaauaaaacu

SEQ ID NO: 771907 - RNA, 22 nt, Human
ccugggcugcucauggggauga

SEQ ID NO: 771908 - RNA, 19 nt, Human
uggggcuguguuuugaccc

SEQ ID NO: 771909 - RNA, 22 nt, Human
gcccucccuacagccuauuucu

SEQ ID NO: 771910 - RNA, 22 nt, Human
cuguuguauuauucaauauuau

SEQ ID NO: 771911 - RNA, 22 nt, Human
gagcugaguguccuaggcaugg

SEQ ID NO: 771912 - RNA, 22 nt, Human
cacaguuuugucuugguuucca

SEQ ID NO: 771913 - RNA, 22 nt, Human
cuucccaguucugcuugagggg

SEQ ID NO: 771914 - RNA, 22 nt, Human
uuccaggaauucagcucucagu

SEQ ID NO: 771915 - RNA, 22 nt, Human
caaauaguaugagcaaugauuc

SEQ ID NO: 771916 - RNA, 22 nt, Human
agcccagccacuauuaaauguu

SEQ ID NO: 771917 - RNA, 22 nt, Human
aauuuacaggugcacucgccau

SEQ ID NO: 771918 - RNA, 22 nt, Human
ccuggcugcccauggacccucu

SEQ ID NO: 771919 - RNA, 22 nt, Human
uagagaaauaagcuuugccuug

SEQ ID NO: 771920 - RNA, 22 nt, Human
ccugugggagcccaggcagaua

SEQ ID NO: 771921 - RNA, 22 nt, Human
acuaagugggacauuuacuagg

SEQ ID NO: 771922 - RNA, 22 nt, Human
aaacucuucauauacauaugcu

SEQ ID NO: 771923 - RNA, 22 nt, Human
ugcacaggugagacucaggaag

SEQ ID NO: 771924 - RNA, 22 nt, Human
cccugcagagccagcccugacc

SEQ ID NO: 771925 - RNA, 22 nt, Human
uuacaaguacugaauaugauuu

SEQ ID NO: 771926 - RNA, 18 nt, Human
uggugaaggguggaggag

SEQ ID NO: 771927 - RNA, 22 nt, Human
aguucacuauagaagacagugu

SEQ ID NO: 771928 - RNA, 22 nt, Human
ugggcugaggggccuugaugac

SEQ ID NO: 771929 - RNA, 22 nt, Human
uguuuuaagagcgcacuuuaua

SEQ ID NO: 771930 - RNA, 22 nt, Human
gugcuuuaaaccacugugcugu

SEQ ID NO: 771931 - RNA, 22 nt, Human
aguuacugcuuucaggaaguuu

SEQ ID NO: 771932 - RNA, 22 nt, Human
gacaaaacacauuaguuuaaaa

SEQ ID NO: 771933 - RNA, 22 nt, Human
aaccuaagugcuguugaacguu

SEQ ID NO: 771934 - RNA, 22 nt, Human
uggucgaccaguuggaaaguaa

SEQ ID NO: 771935 - RNA, 22 nt, Human
acaguggugagugacugauagg

SEQ ID NO: 771936 - RNA, 22 nt, Human
ucuccuggagcaggaagguggg

SEQ ID NO: 771937 - RNA, 22 nt, Human
gaggcagaaguugcagugagca

SEQ ID NO: 771938 - RNA, 22 nt, Human
agcagcagcucauucuuccugu

SEQ ID NO: 771939 - RNA, 20 nt, Human
cguguguggcuauuuugggu

SEQ ID NO: 771940 - RNA, 22 nt, Human
gggcugggaauggcuaaguaug

SEQ ID NO: 771941 - RNA, 22 nt, Human
aagagcuggaugaagaaaucaa

SEQ ID NO: 771942 - RNA, 19 nt, Human
acacaugaggagggacccc

SEQ ID NO: 771943 - RNA, 17 nt, Human
agguuuaugguauuuga

SEQ ID NO: 771944 - RNA, 22 nt, Human
uuauuuacuggauggccuuggg

SEQ ID NO: 771945 - RNA, 22 nt, Human
gaaugcaguggugagaucuugg

SEQ ID NO: 771946 - RNA, 23 nt, Human
aagcugccagucugaagccuggg

SEQ ID NO: 771947 - RNA, 22 nt, Human
aaacaccaagagcuagcuauua

SEQ ID NO: 771948 - RNA, 22 nt, Human
aucccagauagugacccucagg

SEQ ID NO: 771949 - RNA, 22 nt, Human
ggaauaaagaaucugguucccc

SEQ ID NO: 771950 - RNA, 22 nt, Human
acuggcagagacccugauggcc

SEQ ID NO: 771951 - RNA, 22 nt, Human
uguagaaauuaguaagaucaac

SEQ ID NO: 771952 - RNA, 22 nt, Human
cccugaggccucagguucauug

SEQ ID NO: 771953 - RNA, 22 nt, Human
ugacaauggggcacauggaaag

SEQ ID NO: 771954 - RNA, 22 nt, Human
ccccaggacacauggaccaagu

SEQ ID NO: 771955 - RNA, 22 nt, Human
cagcccuggccccagguggucu

SEQ ID NO: 771956 - RNA, 22 nt, Human
uucauuuguccaaauacuaugu

SEQ ID NO: 771957 - RNA, 22 nt, Human
ggguacaguucuuccaguguca

SEQ ID NO: 771958 - RNA, 22 nt, Human
uugaaucucaucccaauguugu

SEQ ID NO: 771959 - RNA, 22 nt, Human
gugucuuaggguugcacagagu

SEQ ID NO: 771960 - RNA, 22 nt, Human
augaggaacagacuugcuggau

SEQ ID NO: 771961 - RNA, 22 nt, Human
aggucugggaguucauucccug

SEQ ID NO: 771962 - RNA, 22 nt, Human
cugaggacauugaugaggcaau

SEQ ID NO: 771963 - RNA, 19 nt, Human
agucccaggcccgaaagag

SEQ ID NO: 771964 - RNA, 22 nt, Human
gccugccuagaauugcagcuuu

SEQ ID NO: 771965 - RNA, 22 nt, Human
cagcaauaacucaaagccauuu

SEQ ID NO: 771966 - RNA, 22 nt, Human
guuccucacguggacagaugau

SEQ ID NO: 771967 - RNA, 22 nt, Human
uaucauuguguuugccagucac

SEQ ID NO: 771968 - RNA, 22 nt, Human
cugcauuucacauuuaaacuuu

SEQ ID NO: 771969 - RNA, 23 nt, Human
cugcaauugccugaucucauugg

SEQ ID NO: 771970 - RNA, 22 nt, Human
cuugcagaugugacuaaauuaa

SEQ ID NO: 771971 - RNA, 22 nt, Human
aaacagaguuugguaaauagcc

SEQ ID NO: 771972 - RNA, 22 nt, Human
aacagcagaggagcgauggcug

SEQ ID NO: 771973 - RNA, 22 nt, Human
cagagcuucugacagcugcugc

SEQ ID NO: 771974 - RNA, 22 nt, Human
ccauucauagcaagcuacaucu

SEQ ID NO: 771975 - RNA, 22 nt, Human
ugcugagggcagaugaauuaga

SEQ ID NO: 771976 - RNA, 22 nt, Human
ucuccagggagguagcccagug

SEQ ID NO: 771977 - RNA, 22 nt, Human
uuuaggcagcagugaggaugaa

SEQ ID NO: 771978 - RNA, 22 nt, Human
gcagaguucucuuccagcuaac

SEQ ID NO: 771979 - RNA, 20 nt, Human
cacuguggcacauugguuua

SEQ ID NO: 771980 - RNA, 17 nt, Human
acaguaacuauguuaug

SEQ ID NO: 771981 - RNA, 22 nt, Human
aaugugcugguaacugcuuugc

SEQ ID NO: 771982 - RNA, 22 nt, Human
gacagcugcucccguuucugcu

SEQ ID NO: 771983 - RNA, 22 nt, Human
ucgaauggcaaggaaagaggcu

SEQ ID NO: 771984 - RNA, 22 nt, Human
guggccuagaggugcaaggaac

SEQ ID NO: 771985 - RNA, 20 nt, Human
ccccuucaucuacagccuga

SEQ ID NO: 771986 - RNA, 22 nt, Human
agagccugucaauuguaaagag

SEQ ID NO: 771987 - RNA, 22 nt, Human
ugucugaugauagugucucucc

SEQ ID NO: 771988 - RNA, 23 nt, Human
ugcuggagacaagugugagaagg

SEQ ID NO: 771989 - RNA, 22 nt, Human
cucugccucagugauuucuuua

SEQ ID NO: 771990 - RNA, 22 nt, Human
caggaugcagugggacccaggg

SEQ ID NO: 771991 - RNA, 20 nt, Human
uucaggauucuagaccacac

SEQ ID NO: 771992 - RNA, 22 nt, Human
uacagauagaauuagugaguua

SEQ ID NO: 771993 - RNA, 22 nt, Human
gggaccagaggcugugcacaau

SEQ ID NO: 771994 - RNA, 22 nt, Human
caucagucagucucuucaguau

SEQ ID NO: 771995 - RNA, 23 nt, Human
gagggcucugagugcuugggcca

SEQ ID NO: 771996 - RNA, 22 nt, Human
gccagcugagcaaauuccagcu

SEQ ID NO: 771997 - RNA, 22 nt, Human
gguuuucaguuugugagcucug

SEQ ID NO: 771998 - RNA, 22 nt, Human
uuccuucuuguaaugaucugcc

SEQ ID NO: 771999 - RNA, 22 nt, Human
ucuacaguagaaagaucccagu

SEQ ID NO: 772000 - RNA, 22 nt, Human
augugucuaauuccaggagcac

SEQ ID NO: 772001 - RNA, 22 nt, Human
gccuggagcagacgugucccgg

SEQ ID NO: 772002 - RNA, 22 nt, Human
uaagagcuccaauauuuguggc

SEQ ID NO: 772003 - RNA, 22 nt, Human
uacccugcuagcuagcaucucu

SEQ ID NO: 772004 - RNA, 22 nt, Human
aaacagcaggaacaucuugcca

SEQ ID NO: 772005 - RNA, 22 nt, Human
uauugugaguucagacuaaaaa

SEQ ID NO: 772006 - RNA, 22 nt, Human
uuuaugucacuuugaaagagag

SEQ ID NO: 772007 - RNA, 22 nt, Human
uccauuuucuaaguaucacuua

SEQ ID NO: 772008 - RNA, 22 nt, Human
gucaggacucugacccgucccg

SEQ ID NO: 772009 - RNA, 22 nt, Human
cccucagggaccacugacuuca

SEQ ID NO: 772010 - RNA, 22 nt, Human
gauuaugguaacaaugauuaaa

SEQ ID NO: 772011 - RNA, 22 nt, Human
ugcuuuggaucuauuugcugag

SEQ ID NO: 772012 - RNA, 22 nt, Human
caggauauaucucuaguguugg

SEQ ID NO: 772013 - RNA, 22 nt, Human
cagcuguuacucugaguaaaug

SEQ ID NO: 772014 - RNA, 22 nt, Human
acugucaucagaagaugaaaau

SEQ ID NO: 772015 - RNA, 22 nt, Human
caaggccagagccagcgauaag

SEQ ID NO: 772016 - RNA, 22 nt, Human
uuauauguaugcuuauaaacca

SEQ ID NO: 772017 - RNA, 22 nt, Human
uggcuucccaggaaaggagaag

SEQ ID NO: 772018 - RNA, 22 nt, Human
aaugauaagacaugaguagagg

SEQ ID NO: 772019 - RNA, 22 nt, Human
uuuuucagccaugaauuacacu

SEQ ID NO: 772020 - RNA, 22 nt, Human
aauuuauucccgucucugggcu

SEQ ID NO: 772021 - RNA, 22 nt, Human
cugggccaguuaugucucaucu

SEQ ID NO: 772022 - RNA, 22 nt, Human
ugaaaguuauuacugaugaugu

SEQ ID NO: 772023 - RNA, 22 nt, Human
uaacacagacagccacuaguaa

SEQ ID NO: 772024 - RNA, 22 nt, Human
ugcacacaaguuggagaaugaa

SEQ ID NO: 772025 - RNA, 22 nt, Human
acacuacagggccgggauggaa

SEQ ID NO: 772026 - RNA, 22 nt, Human
aguagaaagaaggcacugggcc

SEQ ID NO: 772027 - RNA, 22 nt, Human
gcagcuccuucaaucucaccau

SEQ ID NO: 772028 - RNA, 22 nt, Human
cagcccugcucuuagugucucc

SEQ ID NO: 772029 - RNA, 22 nt, Human
auacaugugccauguuggugua

SEQ ID NO: 772030 - RNA, 22 nt, Human
cuguggagcagggcagggucac

SEQ ID NO: 772031 - RNA, 23 nt, Human
uucugaaaauagauaguggcucc

SEQ ID NO: 772032 - RNA, 22 nt, Human
cucaaauaccucuccaugugac

SEQ ID NO: 772033 - RNA, 22 nt, Human
cacacacuggagcaaggagaug

SEQ ID NO: 772034 - RNA, 22 nt, Human
aaaccacacuuagcaguuucgu

SEQ ID NO: 772035 - RNA, 23 nt, Human
acugggcuuaugaggaggcuugu

SEQ ID NO: 772036 - RNA, 22 nt, Human
agucuugcauuuucugaagaug

SEQ ID NO: 772037 - RNA, 20 nt, Human
ucaucugauuaaccucgaag

SEQ ID NO: 772038 - RNA, 22 nt, Human
cccacuucaugggcaggaagga

SEQ ID NO: 772039 - RNA, 22 nt, Human
ucuggagcuuccucauuuacag

SEQ ID NO: 772040 - RNA, 22 nt, Human
gaggaaaucauuccagaaaagg

SEQ ID NO: 772041 - RNA, 22 nt, Human
ucugcccacaguccaauaguug

SEQ ID NO: 772042 - RNA, 22 nt, Human
uuuuccugggcuuucuguguaa

SEQ ID NO: 772043 - RNA, 23 nt, Human
ugcagaggcaugaucacugcuca

SEQ ID NO: 772044 - RNA, 22 nt, Human
uagggacaaagagcugaggccu

SEQ ID NO: 772045 - RNA, 22 nt, Human
gcagggggucauucacgcuggc

SEQ ID NO: 772046 - RNA, 22 nt, Human
uccagcuguugauauucuaggu

SEQ ID NO: 772047 - RNA, 22 nt, Human
gugguccaaggaguuuccagca

SEQ ID NO: 772048 - RNA, 23 nt, Human
cuggcucuguagguggcauccuu

SEQ ID NO: 772049 - RNA, 22 nt, Human
ugucuuaauaugugcauucugu

SEQ ID NO: 772050 - RNA, 22 nt, Human
ugagcaggacugaccggccuua

SEQ ID NO: 772051 - RNA, 22 nt, Human
uuucaggaaggugaggcacaug

SEQ ID NO: 772052 - RNA, 22 nt, Human
gcaggguggauggcagggccag

SEQ ID NO: 772053 - RNA, 22 nt, Human
ucuggcaguugccgcuucaguc

SEQ ID NO: 772054 - RNA, 22 nt, Human
guccucaggaaagcagauaaca

SEQ ID NO: 772055 - RNA, 22 nt, Human
gaggugucaugagggccugcuc

SEQ ID NO: 772056 - RNA, 22 nt, Human
cugggccuccagcucugccagc

SEQ ID NO: 772057 - RNA, 22 nt, Human
uaggugucugcucuuauuuaac

SEQ ID NO: 772058 - RNA, 21 nt, Human
cccaggugggaugguugccuc

SEQ ID NO: 772059 - RNA, 22 nt, Human
agcuccuugcagguugccuugg

SEQ ID NO: 772060 - RNA, 23 nt, Human
ugaaacauuuaggguagaauuuc

SEQ ID NO: 772061 - RNA, 22 nt, Human
ccugggcaucaacaagcagaga

SEQ ID NO: 772062 - RNA, 22 nt, Human
ggucccaggagaauaggugcaa

SEQ ID NO: 772063 - RNA, 22 nt, Human
aauuaaaugacaggggaagaug

SEQ ID NO: 772064 - RNA, 22 nt, Human
ugaaaugauuauaugguguuug

SEQ ID NO: 772065 - RNA, 22 nt, Human
agugguccugcaaacccgugug

SEQ ID NO: 772066 - RNA, 22 nt, Human
ucaggugguccuaagugccauc

SEQ ID NO: 772067 - RNA, 22 nt, Human
cuguuacugcuggagccauuga

SEQ ID NO: 772068 - RNA, 22 nt, Human
guuugcauaucugugaaaugga

SEQ ID NO: 772069 - RNA, 22 nt, Human
aguagacauuuugcaacaucug

SEQ ID NO: 772070 - RNA, 22 nt, Human
uaucauuuuacugugacauuuu

SEQ ID NO: 772071 - RNA, 22 nt, Human
uaugaaagaaucucagagcaca

SEQ ID NO: 772072 - RNA, 22 nt, Human
uacuucuagccugccccuugug

SEQ ID NO: 772073 - RNA, 22 nt, Human
aagcuucagugugagcauguaa

SEQ ID NO: 772074 - RNA, 22 nt, Human
augugcuucauaaucuucucau

SEQ ID NO: 772075 - RNA, 22 nt, Human
acucaggcuacaacgcguggcu

SEQ ID NO: 772076 - RNA, 22 nt, Human
gagcucuguucucguccugcug

SEQ ID NO: 772077 - RNA, 16 nt, Human
auucacaaggcaucgg

SEQ ID NO: 772078 - RNA, 22 nt, Human
gaaggagagagacaucgucccu

SEQ ID NO: 772079 - RNA, 22 nt, Human
caccuggaguagcaagguaauu

SEQ ID NO: 772080 - RNA, 23 nt, Human
acagaaaucauuuguaagguacc

SEQ ID NO: 772081 - RNA, 22 nt, Human
uuuugugagcccauaaaugcca

SEQ ID NO: 772082 - RNA, 22 nt, Human
aagaccucugaaguaccuggug

SEQ ID NO: 772083 - RNA, 22 nt, Human
gccugcagccucaagggcugag

SEQ ID NO: 772084 - RNA, 22 nt, Human
gcagggguagugucuuccugag

SEQ ID NO: 772085 - RNA, 21 nt, Human
ugcauggaggaaaguuauaga

SEQ ID NO: 772086 - RNA, 22 nt, Human
agccuggauccauguggcuacc

SEQ ID NO: 772087 - RNA, 22 nt, Human
cccuuccucccaggcuucugug

SEQ ID NO: 772088 - RNA, 22 nt, Human
aucuacauaaaacgaauacaua

SEQ ID NO: 772089 - RNA, 20 nt, Human
uaaugucaaagucacaaggu

SEQ ID NO: 772090 - RNA, 22 nt, Human
uguuugaguucuagcgcauuua

SEQ ID NO: 772091 - RNA, 22 nt, Human
aaagucauggaaaaucuuggaa

SEQ ID NO: 772092 - RNA, 22 nt, Human
uuuggagaaguugcuaaagugu

SEQ ID NO: 772093 - RNA, 22 nt, Human
acaggcuggugguccuggccau

SEQ ID NO: 772094 - RNA, 22 nt, Human
uucccucuuucacugugauuuu

SEQ ID NO: 772095 - RNA, 22 nt, Human
acagcaggaauuaacauauaag

SEQ ID NO: 772096 - RNA, 22 nt, Human
aaaauuuccaccaucuuugugu

SEQ ID NO: 772097 - RNA, 21 nt, Human
gcagagcuggaaccaggaccc

SEQ ID NO: 772098 - RNA, 20 nt, Human
uacuugaauguugcagcagu

SEQ ID NO: 772099 - RNA, 22 nt, Human
aaauacaauuucaggcuguaau

SEQ ID NO: 772100 - RNA, 22 nt, Human
auccauuugacauaauuucagc

SEQ ID NO: 772101 - RNA, 22 nt, Human
uuccuucuuccuuuaguaacca

SEQ ID NO: 772102 - RNA, 20 nt, Human
uugaaugaaugucuggcuca

SEQ ID NO: 772103 - RNA, 19 nt, Human
agcuggggcgguguguguu

SEQ ID NO: 772104 - RNA, 22 nt, Human
uaacuugauaaguauucucugc

SEQ ID NO: 772105 - RNA, 22 nt, Human
auauuuguaguggguaagaagu

SEQ ID NO: 772106 - RNA, 22 nt, Human
cuggcugcaggaugaggcugcc

SEQ ID NO: 772107 - RNA, 22 nt, Human
aggagguguagauuuccuguca

SEQ ID NO: 772108 - RNA, 22 nt, Human
ggcauugaugggagauggugga

SEQ ID NO: 772109 - RNA, 22 nt, Human
aggaugacuggaacccaaguga

SEQ ID NO: 772110 - RNA, 22 nt, Human
ucuagcaccacauuaaauagca

SEQ ID NO: 772111 - RNA, 22 nt, Human
cucaggaguuggaggcuacagu

SEQ ID NO: 772112 - RNA, 22 nt, Human
ugagaagcucugaaacaguauc

SEQ ID NO: 772113 - RNA, 22 nt, Human
auaaaacuuggguaugaucccu

SEQ ID NO: 772114 - RNA, 20 nt, Human
gaggaaaagcugccaggccu

SEQ ID NO: 772115 - RNA, 22 nt, Human
uagcagggucucaggagucagg

SEQ ID NO: 772116 - RNA, 22 nt, Human
accucucaggucuuccucauau

SEQ ID NO: 772117 - RNA, 22 nt, Human
cagguccaagagauccuccuac

SEQ ID NO: 772118 - RNA, 22 nt, Human
cagcugcuguuacugcuuauua

SEQ ID NO: 772119 - RNA, 22 nt, Human
aagcagcuuccccaaagugccu

SEQ ID NO: 772120 - RNA, 23 nt, Human
ccuguggcaaguagaugagauga

SEQ ID NO: 772121 - RNA, 22 nt, Human
agagaugagaacaugcuuggau

SEQ ID NO: 772122 - RNA, 22 nt, Human
cauccagaguccaaggcugggc

SEQ ID NO: 772123 - RNA, 20 nt, Human
aagguccaaacucuguguuc

SEQ ID NO: 772124 - RNA, 22 nt, Human
uaucuucuugccaggcuggugu

SEQ ID NO: 772125 - RNA, 22 nt, Human
ugcuggcuuuuugguccuugcu

SEQ ID NO: 772126 - RNA, 22 nt, Human
cagcucugguuccugggcccag

SEQ ID NO: 772127 - RNA, 22 nt, Human
ccugucuacauaacugugugaa

SEQ ID NO: 772128 - RNA, 22 nt, Human
cacuguuuuauuccaacauagg

SEQ ID NO: 772129 - RNA, 22 nt, Human
agcucugggggaaagucugcuc

SEQ ID NO: 772130 - RNA, 22 nt, Human
uaggaagcucuuuguuuuguga

SEQ ID NO: 772131 - RNA, 22 nt, Human
agucauauauuuuguuugugca

SEQ ID NO: 772132 - RNA, 19 nt, Human
gaggcaaggaguuuaagcc

SEQ ID NO: 772133 - RNA, 22 nt, Human
auaauauaauccuacuucccau

SEQ ID NO: 772134 - RNA, 22 nt, Human
cuugcugugugguguucucaga

SEQ ID NO: 772135 - RNA, 22 nt, Human
ugcugcuguaucaugccuucau

SEQ ID NO: 772136 - RNA, 22 nt, Human
ccuggcuccgugucacgugccc

SEQ ID NO: 772137 - RNA, 22 nt, Human
aaacaucugacuugcuuuuuca

SEQ ID NO: 772138 - RNA, 22 nt, Human
ugaaaugaaacagaacauauca

SEQ ID NO: 772139 - RNA, 22 nt, Human
ugcuaaggacugggaggcaggg

SEQ ID NO: 772140 - RNA, 22 nt, Human
ggcuauguguguccaguguauu

SEQ ID NO: 772141 - RNA, 22 nt, Human
uccaggcuaauuuugcauuguu

SEQ ID NO: 772142 - RNA, 22 nt, Human
ucccacauaugcaauccugaau

SEQ ID NO: 772143 - RNA, 20 nt, Human
aggcagagcgcacuuuuaga

SEQ ID NO: 772144 - RNA, 22 nt, Human
uccaccagccaggcccaggcug

SEQ ID NO: 772145 - RNA, 22 nt, Human
cacccuuugcugcucuuccucc

SEQ ID NO: 772146 - RNA, 22 nt, Human
uuuuaucaaucauuaagacauu

SEQ ID NO: 772147 - RNA, 18 nt, Human
agauuuugagaaauacaa

SEQ ID NO: 772148 - RNA, 22 nt, Human
guaaauauucccucgguuccua

SEQ ID NO: 772149 - RNA, 22 nt, Human
gcuuccuacaugugucugcgag

SEQ ID NO: 772150 - RNA, 22 nt, Human
cccaggaaugaggggcggaggc

SEQ ID NO: 772151 - RNA, 22 nt, Human
aaagcugcccuacacggaagca

SEQ ID NO: 772152 - RNA, 22 nt, Human
gcaagcagaucuccggagggaa

SEQ ID NO: 772153 - RNA, 22 nt, Human
guguggggucuucucuuggccu

SEQ ID NO: 772154 - RNA, 22 nt, Human
uugagcucccgcuucuucuuug

SEQ ID NO: 772155 - RNA, 22 nt, Human
agcuggguguguaucagauaaa

SEQ ID NO: 772156 - RNA, 22 nt, Human
uguguccugcagacagacucag

SEQ ID NO: 772157 - RNA, 22 nt, Human
ucuccugaagaccaugugcacu

SEQ ID NO: 772158 - RNA, 22 nt, Human
acauugaauguaugugaugaaa

SEQ ID NO: 772159 - RNA, 22 nt, Human
aacauaucauaggaugucauug

SEQ ID NO: 772160 - RNA, 22 nt, Human
gggcacuguguucagagugcag

SEQ ID NO: 772161 - RNA, 22 nt, Human
uaaugaacucuuuacuuuggga

SEQ ID NO: 772162 - RNA, 22 nt, Human
ugaaggcauaaaucuugggaac

SEQ ID NO: 772163 - RNA, 22 nt, Human
cugugccacugggggccggcaa

SEQ ID NO: 772164 - RNA, 22 nt, Human
cugagaguuaagagauggggcu

SEQ ID NO: 772165 - RNA, 22 nt, Human
aacccgggagguggagguuaug

SEQ ID NO: 772166 - RNA, 22 nt, Human
accccaggucuccaggcucugg

SEQ ID NO: 772167 - RNA, 22 nt, Human
uuccugguaguaagacaucugg

SEQ ID NO: 772168 - RNA, 22 nt, Human
uacauuccugggcuccacccua

SEQ ID NO: 772169 - RNA, 22 nt, Human
gcucugugggugaguagaaucu

SEQ ID NO: 772170 - RNA, 22 nt, Human
ugcagcagggcccaggcacaga

SEQ ID NO: 772171 - RNA, 22 nt, Human
auggauaaauacuuggugguau

SEQ ID NO: 772172 - RNA, 22 nt, Human
agucucagaaaagaagcaugga

SEQ ID NO: 772173 - RNA, 22 nt, Human
ugaggccaggcaaaggcgaucu

SEQ ID NO: 772174 - RNA, 22 nt, Human
uaacuucaaaauugccacaugu

SEQ ID NO: 772175 - RNA, 22 nt, Human
ugaaaagacugcaagagagcau

SEQ ID NO: 772176 - RNA, 22 nt, Human
agcucagaagggaggaaaugag

SEQ ID NO: 772177 - RNA, 22 nt, Human
acugugugggccgcucacuggg

SEQ ID NO: 772178 - RNA, 22 nt, Human
auuagcaacauggugaauaugu

SEQ ID NO: 772179 - RNA, 22 nt, Human
agggucuucccaccauuccugc

SEQ ID NO: 772180 - RNA, 22 nt, Human
caggauggagggagggcuguua

SEQ ID NO: 772181 - RNA, 22 nt, Human
uugcuacaugguuucaaagcug

SEQ ID NO: 772182 - RNA, 22 nt, Human
agcuguuuucuucuaggaagac

SEQ ID NO: 772183 - RNA, 22 nt, Human
caggaaauuggcuauuugggau

SEQ ID NO: 772184 - RNA, 22 nt, Human
aagaacugugcuccaggcucca

SEQ ID NO: 772185 - RNA, 22 nt, Human
aagucuaguauccuucuugacu

SEQ ID NO: 772186 - RNA, 22 nt, Human
agaugcugugucuguucccuug

SEQ ID NO: 772187 - RNA, 22 nt, Human
ugcaggccuaugguggggcccc

SEQ ID NO: 772188 - RNA, 15 nt, Human
ggugagaguaggauu

SEQ ID NO: 772189 - RNA, 22 nt, Human
cccugcagaaccacagacaaac

SEQ ID NO: 772190 - RNA, 22 nt, Human
gguuugguuuuggccaucuucc

SEQ ID NO: 772191 - RNA, 22 nt, Human
ugagagcuugaguaucacuggc

SEQ ID NO: 772192 - RNA, 23 nt, Human
uaaagcaaagucaagugcacucc

SEQ ID NO: 772193 - RNA, 22 nt, Human
agcccagaggguagcagaagaa

SEQ ID NO: 772194 - RNA, 22 nt, Human
agguaaauucagcagugacauu

SEQ ID NO: 772195 - RNA, 22 nt, Human
gcccugucggaacugcgaccuc

SEQ ID NO: 772196 - RNA, 22 nt, Human
cucaggucuuaguucugucauc

SEQ ID NO: 772197 - RNA, 22 nt, Human
uggagcaggugccaggugugug

SEQ ID NO: 772198 - RNA, 22 nt, Human
aacagucuacugaauaucugcg

SEQ ID NO: 772199 - RNA, 22 nt, Human
caaccucuguaauguucuagga

SEQ ID NO: 772200 - RNA, 22 nt, Human
cauugcccaguaggaucaccag

SEQ ID NO: 772201 - RNA, 22 nt, Human
ucugagccagacaagacagcca

SEQ ID NO: 772202 - RNA, 22 nt, Human
cucagaagaacaaaggcucuac

SEQ ID NO: 772203 - RNA, 22 nt, Human
ccccuggggaucagcuggaauu

SEQ ID NO: 772204 - RNA, 22 nt, Human
cacagagauggccagggcacau

SEQ ID NO: 772205 - RNA, 22 nt, Human
uggcgagccccgacugaguguu

SEQ ID NO: 772206 - RNA, 22 nt, Human
acauacuuuguccuuaacguac

SEQ ID NO: 772207 - RNA, 22 nt, Human
gguccuucaguagguuccagac

SEQ ID NO: 772208 - RNA, 22 nt, Human
aauugaaauucuuuguggucca

SEQ ID NO: 772209 - RNA, 21 nt, Human
uagcaaauggagaguaagaga

SEQ ID NO: 772210 - RNA, 22 nt, Human
gucugccugucuggaugacaga

SEQ ID NO: 772211 - RNA, 22 nt, Human
cgugaguggguagcuuauucuu

SEQ ID NO: 772212 - RNA, 22 nt, Human
uuggcucugugucuccacucaa

SEQ ID NO: 772213 - RNA, 22 nt, Human
cugcccaggcugaaggaacauc

SEQ ID NO: 772214 - RNA, 22 nt, Human
gagaggcaggaauccuggguga

SEQ ID NO: 772215 - RNA, 22 nt, Human
gaggggugggcuggaaguuaua

SEQ ID NO: 772216 - RNA, 22 nt, Human
uggaggucucugucugggcagg

SEQ ID NO: 772217 - RNA, 22 nt, Human
agugacagccaaauccauccau

SEQ ID NO: 772218 - RNA, 21 nt, Human
agggccagaucaccaaggagc

SEQ ID NO: 772219 - RNA, 22 nt, Human
auugucagugggauuugucaac

SEQ ID NO: 772220 - RNA, 22 nt, Human
gucucuggcuuuaugcugguuu

SEQ ID NO: 772221 - RNA, 22 nt, Human
aacucuuaauuuucaugaaaug

SEQ ID NO: 772222 - RNA, 22 nt, Human
ucucaguggacgugucugucuu

SEQ ID NO: 772223 - RNA, 22 nt, Human
ccggucccaggugccccgguga

SEQ ID NO: 772224 - RNA, 19 nt, Human
ccaggagugguggggugag

SEQ ID NO: 772225 - RNA, 22 nt, Human
acaaguguugcauuuugccauu

SEQ ID NO: 772226 - RNA, 22 nt, Human
caaaccugacuggggaugggcg

SEQ ID NO: 772227 - RNA, 20 nt, Human
uccaggcccacucagcugaa

SEQ ID NO: 772228 - RNA, 19 nt, Human
uccaaagaaguucacauuu

SEQ ID NO: 772229 - RNA, 22 nt, Human
cuuggcacuugggcagugagca

SEQ ID NO: 772230 - RNA, 22 nt, Human
aguggcaucccuuuaacagggu

SEQ ID NO: 772231 - RNA, 22 nt, Human
acugaaagauaaaucaguuagc

SEQ ID NO: 772232 - RNA, 22 nt, Human
agaguuuguauuuuucagugaa

SEQ ID NO: 772233 - RNA, 21 nt, Human
caaaaggauaggaaauuaggg

SEQ ID NO: 772234 - RNA, 22 nt, Human
auauguauguacgcacauauuc

SEQ ID NO: 772235 - RNA, 22 nt, Human
gaggcuagagcaggggcucaau

SEQ ID NO: 772236 - RNA, 22 nt, Human
uauuaaauguuauuuggguugu

SEQ ID NO: 772237 - RNA, 22 nt, Human
acacuguaaauugagugcguga

SEQ ID NO: 772238 - RNA, 22 nt, Human
uauguguauaccuauacaugug

SEQ ID NO: 772239 - RNA, 22 nt, Human
ugcugggcugcacccccagagu

SEQ ID NO: 772240 - RNA, 21 nt, Human
aggaguugcuguggccugguu

SEQ ID NO: 772241 - RNA, 22 nt, Human
uugaggcacagauuuuaguggc

SEQ ID NO: 772242 - RNA, 22 nt, Human
aggagcaaaugaugagacagca

SEQ ID NO: 772243 - RNA, 22 nt, Human
ucuggcuccaccuccuuuacua

SEQ ID NO: 772244 - RNA, 22 nt, Human
ucaugcucugguuuagcuguuu

SEQ ID NO: 772245 - RNA, 22 nt, Human
aaauacacguacauguguaaaa

SEQ ID NO: 772246 - RNA, 22 nt, Human
acaggaguuaaggcugaguuga

SEQ ID NO: 772247 - RNA, 22 nt, Human
gagcugcuggauauguggccug

SEQ ID NO: 772248 - RNA, 22 nt, Human
uucucuuugacauuauucaggu

SEQ ID NO: 772249 - RNA, 22 nt, Human
cacugcccucacugugguucuc

SEQ ID NO: 772250 - RNA, 22 nt, Human
uacauaguauucacauuguuuu

SEQ ID NO: 772251 - RNA, 22 nt, Human
uguguguauaugcauuuaucua

SEQ ID NO: 772252 - RNA, 20 nt, Human
guuuuucucucuugccacua

SEQ ID NO: 772253 - RNA, 22 nt, Human
acacaguaccccaaggcugggc

SEQ ID NO: 772254 - RNA, 22 nt, Human
cagugucugccuuucuguuugg

SEQ ID NO: 772255 - RNA, 22 nt, Human
ugaaugcacugcucuccuagga

SEQ ID NO: 772256 - RNA, 22 nt, Human
aaagguaguacuucuagaaggg

SEQ ID NO: 772257 - RNA, 19 nt, Human
uccaggcuccauuggcaga

SEQ ID NO: 772258 - RNA, 22 nt, Human
uggucugacuugcuuuggacag

SEQ ID NO: 772259 - RNA, 22 nt, Human
uuucuaaguguguuucauagga

SEQ ID NO: 772260 - RNA, 22 nt, Human
uuccaugaaagugaaauggagc

SEQ ID NO: 772261 - RNA, 22 nt, Human
guaggcagugcuugauuuucca

SEQ ID NO: 772262 - RNA, 22 nt, Human
ucugaaagggcuaaauaauuug

SEQ ID NO: 772263 - RNA, 22 nt, Human
gacaagacagcuugcagacaac

SEQ ID NO: 772264 - RNA, 22 nt, Human
uauaggaaauaggucuucugug

SEQ ID NO: 772265 - RNA, 22 nt, Human
cuaggaaugguaccucuuacaa

SEQ ID NO: 772266 - RNA, 22 nt, Human
gcagcccaagagacucuguuga

SEQ ID NO: 772267 - RNA, 22 nt, Human
aaacagucaaaggccuaagcua

SEQ ID NO: 772268 - RNA, 22 nt, Human
uuuucugccugcguguuuagga

SEQ ID NO: 772269 - RNA, 22 nt, Human
caucuuaaauuaaagcuuaagg

SEQ ID NO: 772270 - RNA, 22 nt, Human
ugaaucaauugucuuaagacau

SEQ ID NO: 772271 - RNA, 22 nt, Human
gguccaguccugcucaccacuu

SEQ ID NO: 772272 - RNA, 22 nt, Human
ucugaggggcuggaagggcugc

SEQ ID NO: 772273 - RNA, 22 nt, Human
uagacacaucuucauccacaau

SEQ ID NO: 772274 - RNA, 22 nt, Human
cauuuauucauuugcuagggcu

SEQ ID NO: 772275 - RNA, 22 nt, Human
auuacaacuaugugcucugcaa

SEQ ID NO: 772276 - RNA, 22 nt, Human
gaguccuggagaaacgcaggug

SEQ ID NO: 772277 - RNA, 22 nt, Human
cugaggucaccccacuggcugu

SEQ ID NO: 772278 - RNA, 22 nt, Human
gauucagugggcuuugggacag

SEQ ID NO: 772279 - RNA, 22 nt, Human
uccuccagcuguauccugccug

SEQ ID NO: 772280 - RNA, 22 nt, Human
ucuuuaauuguggaagagcagc

SEQ ID NO: 772281 - RNA, 22 nt, Human
cccaggagaucuggaucucguc

SEQ ID NO: 772282 - RNA, 22 nt, Human
agccuggaauuaaggaaaugca

SEQ ID NO: 772283 - RNA, 22 nt, Human
uuaugcaaaggggccucuuccu

SEQ ID NO: 772284 - RNA, 22 nt, Human
gcagggcaggauuugaacccag

SEQ ID NO: 772285 - RNA, 20 nt, Human
caggccucugggggcccugg

SEQ ID NO: 772286 - RNA, 22 nt, Human
ggaauucucuaugcucuguucc

SEQ ID NO: 772287 - RNA, 22 nt, Human
gacuggaaucccaggcucugug

SEQ ID NO: 772288 - RNA, 22 nt, Human
uggugcaggaguuggcagggac

SEQ ID NO: 772289 - RNA, 22 nt, Human
uucauacuguguuuccaaguuu

SEQ ID NO: 772290 - RNA, 22 nt, Human
caaguuuguguucuaucauucu

SEQ ID NO: 772291 - RNA, 23 nt, Human
aagcuuccuucacgucuccuggg

SEQ ID NO: 772292 - RNA, 22 nt, Human
uagaaguggcaacacucagaaa

SEQ ID NO: 772293 - RNA, 22 nt, Human
uaaacauguugacaucuuaccu

SEQ ID NO: 772294 - RNA, 22 nt, Human
ggccaggcugcccugggagcag

SEQ ID NO: 772295 - RNA, 22 nt, Human
auugucuucugucuuaggugau

SEQ ID NO: 772296 - RNA, 22 nt, Human
gauuucuaaguuuuaccacaaa

SEQ ID NO: 772297 - RNA, 22 nt, Human
uuugaagugggcauuagaaccu

SEQ ID NO: 772298 - RNA, 22 nt, Human
acaugaaaacugguuccuucag

SEQ ID NO: 772299 - RNA, 22 nt, Human
uacaguaaagcugcuaugaauu

SEQ ID NO: 772300 - RNA, 22 nt, Human
cacaugaggugacuuccaagcu

SEQ ID NO: 772301 - RNA, 22 nt, Human
uauuuaaaauagugcuccagca

SEQ ID NO: 772302 - RNA, 22 nt, Human
cauucuuauauuuacucauuca

SEQ ID NO: 772303 - RNA, 22 nt, Human
ugccucagucagcuucccuggg

SEQ ID NO: 772304 - RNA, 23 nt, Human
uacuauaacgcugugucagcucc

SEQ ID NO: 772305 - RNA, 22 nt, Human
cuaaggcaccgaggcaggagcg

SEQ ID NO: 772306 - RNA, 23 nt, Human
ugccacccuucucuucccagcuu

SEQ ID NO: 772307 - RNA, 22 nt, Human
cugugagacugauagggaagag

SEQ ID NO: 772308 - RNA, 23 nt, Human
agagagaguuugugucagguacc

SEQ ID NO: 772309 - RNA, 22 nt, Human
ucugaggucauuccaaggacau

SEQ ID NO: 772310 - RNA, 22 nt, Human
aagaaaugcacacaacugcugg

SEQ ID NO: 772311 - RNA, 20 nt, Human
uucaggaauaagauagcagc

SEQ ID NO: 772312 - RNA, 22 nt, Human
aaggcaccauugucaacgguaa

SEQ ID NO: 772313 - RNA, 22 nt, Human
ucacauuuucuacuacuguacg

SEQ ID NO: 772314 - RNA, 22 nt, Human
cccaggcuggaauuccaggccu

SEQ ID NO: 772315 - RNA, 21 nt, Human
ucaguccuguuagccuuuggg

SEQ ID NO: 772316 - RNA, 20 nt, Human
ggcuuggcugccuggggagg

SEQ ID NO: 772317 - RNA, 17 nt, Human
uaucucuucaaguuuca

SEQ ID NO: 772318 - RNA, 22 nt, Human
gagggaauggugugcaagaggu

SEQ ID NO: 772319 - RNA, 18 nt, Human
auauggaaugccuggcua

SEQ ID NO: 772320 - RNA, 17 nt, Human
ggcagcugugugcaugc

SEQ ID NO: 772321 - RNA, 22 nt, Human
acccaggguuugagcucugcag

SEQ ID NO: 772322 - RNA, 22 nt, Human
agaaacucuggaagaacuuuua

SEQ ID NO: 772323 - RNA, 22 nt, Human
gucugccugggacgcugggagu

SEQ ID NO: 772324 - RNA, 22 nt, Human
cugggucaguggcaagcugggu

SEQ ID NO: 772325 - RNA, 22 nt, Human
ucuggcuuuauuccuucacuga

SEQ ID NO: 772326 - RNA, 22 nt, Human
ggcacagcaccuuuucacauug

SEQ ID NO: 772327 - RNA, 22 nt, Human
ucagggcauggcugcacuuggc

SEQ ID NO: 772328 - RNA, 19 nt, Human
aagggucacaagcagcaga

SEQ ID NO: 772329 - RNA, 22 nt, Human
gggcucuggaaggugcaccaug

SEQ ID NO: 772330 - RNA, 22 nt, Human
gagaggcugcauaugcacacug

SEQ ID NO: 772331 - RNA, 22 nt, Human
gugcugaggagagggggugguc

SEQ ID NO: 772332 - RNA, 22 nt, Human
aaugaaauguagcuuauccaua

SEQ ID NO: 772333 - RNA, 22 nt, Human
ccugggccucacccagcucuug

SEQ ID NO: 772334 - RNA, 21 nt, Human
uaugagaaaacugaggugcau

SEQ ID NO: 772335 - RNA, 22 nt, Human
uucucaggacuccugccugcuu

SEQ ID NO: 772336 - RNA, 22 nt, Human
agugagacaguauacugagcag

SEQ ID NO: 772337 - RNA, 22 nt, Human
cugcagggcagggccuccuggc

SEQ ID NO: 772338 - RNA, 22 nt, Human
uccucacauggugagccacaca

SEQ ID NO: 772339 - RNA, 22 nt, Human
acugaaguagucauugucauua

SEQ ID NO: 772340 - RNA, 22 nt, Human
gggucuccauguuaacaucacu

SEQ ID NO: 772341 - RNA, 22 nt, Human
ucauccagccucaucaggagcu

SEQ ID NO: 772342 - RNA, 18 nt, Human
cugaaggauccaggugua

SEQ ID NO: 772343 - RNA, 22 nt, Human
aggaggguucucuggacagagg

SEQ ID NO: 772344 - RNA, 20 nt, Human
uccugcagucgcuagcgccc

SEQ ID NO: 772345 - RNA, 22 nt, Human
aguuuucugccucuggaugcgu

SEQ ID NO: 772346 - RNA, 22 nt, Human
ugaggccaaaaugacucaaaug

SEQ ID NO: 772347 - RNA, 22 nt, Human
cauaugaaauaugaguugaaca

SEQ ID NO: 772348 - RNA, 22 nt, Human
gcacaaagguggaaggaggaag

SEQ ID NO: 772349 - RNA, 22 nt, Human
gcacccagauauugccuugacc

SEQ ID NO: 772350 - RNA, 22 nt, Human
cccaggacucugacacccccaa

SEQ ID NO: 772351 - RNA, 22 nt, Human
ucaaaugcuucuacuccuaaga

SEQ ID NO: 772352 - RNA, 22 nt, Human
ucuuucuugguauucugagcua

SEQ ID NO: 772353 - RNA, 22 nt, Human
agcugggcugaugacucauguu

SEQ ID NO: 772354 - RNA, 22 nt, Human
caauaugcaagcuauuaaguau

SEQ ID NO: 772355 - RNA, 22 nt, Human
cuucagaagccugcagccuuug

SEQ ID NO: 772356 - RNA, 22 nt, Human
agaggccccaggugagcaugcc

SEQ ID NO: 772357 - RNA, 22 nt, Human
guucuaauuuggggcuccuuag

SEQ ID NO: 772358 - RNA, 22 nt, Human
uuccaaagcugcuuuauuuagu

SEQ ID NO: 772359 - RNA, 22 nt, Human
guuucacagguuggagccagca

SEQ ID NO: 772360 - RNA, 22 nt, Human
agccucccuaugcaccuucagg

SEQ ID NO: 772361 - RNA, 22 nt, Human
agaagcagacucugaggcaagg

SEQ ID NO: 772362 - RNA, 22 nt, Human
gguccuggaaauugacggaaag

SEQ ID NO: 772363 - RNA, 22 nt, Human
uggagagaaaguugaauggagg

SEQ ID NO: 772364 - RNA, 22 nt, Human
cuggaguacaggaaucuuccca

SEQ ID NO: 772365 - RNA, 22 nt, Human
uuggcugugcagaucuugccua

SEQ ID NO: 772366 - RNA, 22 nt, Human
gaaacacauaugaacaguugau

SEQ ID NO: 772367 - RNA, 22 nt, Human
uucucagagcacugcugacaaa

SEQ ID NO: 772368 - RNA, 22 nt, Human
ugagcagaugugccaaacugua

SEQ ID NO: 772369 - RNA, 22 nt, Human
agauucaaagugaagaacuuaa

SEQ ID NO: 772370 - RNA, 18 nt, Human
ugaggaaggggaaguauu

SEQ ID NO: 772371 - RNA, 22 nt, Human
agaggaggcagcuuaacucagu

SEQ ID NO: 772372 - RNA, 22 nt, Human
guucaaaauucaaaugguauac

SEQ ID NO: 772373 - RNA, 22 nt, Human
caggcucccacaagcucccagc

SEQ ID NO: 772374 - RNA, 22 nt, Human
aucacuuugguaccaauucagc

SEQ ID NO: 772375 - RNA, 22 nt, Human
ggcuucucccuucuucugauug

SEQ ID NO: 772376 - RNA, 22 nt, Human
uuugagcuuguagcauugcuau

SEQ ID NO: 772377 - RNA, 22 nt, Human
ucccuuccucauaggcagaagg

SEQ ID NO: 772378 - RNA, 23 nt, Human
ugacaacagcucucagccauguc

SEQ ID NO: 772379 - RNA, 22 nt, Human
ugcugagagauuuaaagggcca

SEQ ID NO: 772380 - RNA, 22 nt, Human
agcuaaggacaguugauuuaga

SEQ ID NO: 772381 - RNA, 22 nt, Human
agcucucaagauaagaaagaac

SEQ ID NO: 772382 - RNA, 22 nt, Human
cuuaagaugaggucaugcuaua

SEQ ID NO: 772383 - RNA, 22 nt, Human
caggaaauucccagaaggacug

SEQ ID NO: 772384 - RNA, 22 nt, Human
gaagugugcacaucuuacaagu

SEQ ID NO: 772385 - RNA, 22 nt, Human
ucccuggccauuccucuaggcc

SEQ ID NO: 772386 - RNA, 22 nt, Human
aggucgaguuucggggcuacuu

SEQ ID NO: 772387 - RNA, 22 nt, Human
agagcagcuggggcagagacca

SEQ ID NO: 772388 - RNA, 22 nt, Human
aggcuguguuuaagugguaaug

SEQ ID NO: 772389 - RNA, 22 nt, Human
uccauuuucuugcucuagguaa

SEQ ID NO: 772390 - RNA, 22 nt, Human
cccagccucuggauucugcccu

SEQ ID NO: 772391 - RNA, 22 nt, Human
agauccaggguuggauuugcau

SEQ ID NO: 772392 - RNA, 22 nt, Human
aaguacaucaaauguuuggcua

SEQ ID NO: 772393 - RNA, 22 nt, Human
gaucugggagccucauggagac

SEQ ID NO: 772394 - RNA, 22 nt, Human
guacaguuuucaguguucacug

SEQ ID NO: 772395 - RNA, 22 nt, Human
guacauguaugagauaugugua

SEQ ID NO: 772396 - RNA, 22 nt, Human
ggacuuggggaaggcacaguua

SEQ ID NO: 772397 - RNA, 22 nt, Human
aggggaaaugccuuggugguac

SEQ ID NO: 772398 - RNA, 22 nt, Human
cucuggacccagacaaaccugg

SEQ ID NO: 772399 - RNA, 22 nt, Human
cacugucugggacauguggucu

SEQ ID NO: 772400 - RNA, 22 nt, Human
cuauucugauuaccagauauug

SEQ ID NO: 772401 - RNA, 22 nt, Human
uguggccaggccccugauggug

SEQ ID NO: 772402 - RNA, 22 nt, Human
gggggcuagagagaugaaauau

SEQ ID NO: 772403 - RNA, 22 nt, Human
gaauaauugugaugcuugaagu

SEQ ID NO: 772404 - RNA, 22 nt, Human
cugagccagagggagucggguc

SEQ ID NO: 772405 - RNA, 22 nt, Human
aagaagaaguguuauuuuuaga

SEQ ID NO: 772406 - RNA, 22 nt, Human
ucacauuugcuaucccacuccu

SEQ ID NO: 772407 - RNA, 22 nt, Human
gguuccccaggcggcccuugga

SEQ ID NO: 772408 - RNA, 22 nt, Human
uagggggcuguccugugcauua

SEQ ID NO: 772409 - RNA, 22 nt, Human
agugcugucuccuucccccggg

SEQ ID NO: 772410 - RNA, 22 nt, Human
ucccagcugagauugagcaagg

SEQ ID NO: 772411 - RNA, 22 nt, Human
gacuucucggcacccuuuggca

SEQ ID NO: 772412 - RNA, 22 nt, Human
ucuuccugcuuuggugaggcuu

SEQ ID NO: 772413 - RNA, 23 nt, Human
agcuucugguucaggucaagcag

SEQ ID NO: 772414 - RNA, 20 nt, Human
agugugguuuucaggaauau

SEQ ID NO: 772415 - RNA, 22 nt, Human
agaucgauuucauauccucuua

SEQ ID NO: 772416 - RNA, 22 nt, Human
gcaggacuugaauccaggcagu

SEQ ID NO: 772417 - RNA, 22 nt, Human
caggcccagggagggagaccaa

SEQ ID NO: 772418 - RNA, 17 nt, Human
cccagcuggcagugccg

SEQ ID NO: 772419 - RNA, 22 nt, Human
ucagaaguuaauacgaggagaa

SEQ ID NO: 772420 - RNA, 22 nt, Human
caggaugcuucuggggccaggc

SEQ ID NO: 772421 - RNA, 21 nt, Human
ugcaggaaagugcugcgaccc

SEQ ID NO: 772422 - RNA, 22 nt, Human
ucagaggaacacuguuucaugc

SEQ ID NO: 772423 - RNA, 22 nt, Human
cacauugaaaugacccaauaau

SEQ ID NO: 772424 - RNA, 22 nt, Human
gcagagcuguuaauggagcuga

SEQ ID NO: 772425 - RNA, 22 nt, Human
uagccaggccuuugaucccggc

SEQ ID NO: 772426 - RNA, 22 nt, Human
ucagcagaauguggcaugucac

SEQ ID NO: 772427 - RNA, 22 nt, Human
augucacagcaggaguauucuu

SEQ ID NO: 772428 - RNA, 22 nt, Human
ccuugcugaccaucaccuuuga

SEQ ID NO: 772429 - RNA, 22 nt, Human
uucuacacaccucugaggacau

SEQ ID NO: 772430 - RNA, 22 nt, Human
auugcuuuguacaugccuagca

SEQ ID NO: 772431 - RNA, 22 nt, Human
ugugccuuuaaggggagcugag

SEQ ID NO: 772432 - RNA, 22 nt, Human
auuguuuccccggaauuauuca

SEQ ID NO: 772433 - RNA, 22 nt, Human
gaagucucacagacagaucaga

SEQ ID NO: 772434 - RNA, 22 nt, Human
aacagucuaaauuauacccuuu

SEQ ID NO: 772435 - RNA, 22 nt, Human
cagcagccucaaguuuauuuuc

SEQ ID NO: 772436 - RNA, 22 nt, Human
cacacauuagagccaaugucag

SEQ ID NO: 772437 - RNA, 22 nt, Human
auaaggcagaaauagggaaagu

SEQ ID NO: 772438 - RNA, 22 nt, Human
cagcuuggcuuccgcuuuacug

SEQ ID NO: 772439 - RNA, 22 nt, Human
acagcaguuaacgaucagacuc

SEQ ID NO: 772440 - RNA, 22 nt, Human
caugucuugcccugauuaguag

SEQ ID NO: 772441 - RNA, 19 nt, Human
agacacacuugauaugugu

SEQ ID NO: 772442 - RNA, 22 nt, Human
ucaaacuggcagacuucuacuu

SEQ ID NO: 772443 - RNA, 22 nt, Human
uacagcauguccuuagcaaggc

SEQ ID NO: 772444 - RNA, 20 nt, Human
cucuuuucacucucaguggu

SEQ ID NO: 772445 - RNA, 22 nt, Human
gggcuggcaucgguugcugaga

SEQ ID NO: 772446 - RNA, 22 nt, Human
auucgcgggccuggaggguggg

SEQ ID NO: 772447 - RNA, 22 nt, Human
uccuguuuaggcuguggucugg

SEQ ID NO: 772448 - RNA, 22 nt, Human
uaucuagauggauuuuagugaa

SEQ ID NO: 772449 - RNA, 22 nt, Human
agaacaauugccccaaagcuug

SEQ ID NO: 772450 - RNA, 22 nt, Human
uagagcagaacuuguuaacacc

SEQ ID NO: 772451 - RNA, 22 nt, Human
agagccugggcagcuccucugg

SEQ ID NO: 772452 - RNA, 22 nt, Human
uaacagcucuguguggcuguaa

SEQ ID NO: 772453 - RNA, 22 nt, Human
agcagcuguacuuucaucuguu

SEQ ID NO: 772454 - RNA, 22 nt, Human
cacagugaauuacauagacgug

SEQ ID NO: 772455 - RNA, 17 nt, Human
cuggagccaagagggcc

SEQ ID NO: 772456 - RNA, 22 nt, Human
cagaauguagaucaucaucaag

SEQ ID NO: 772457 - RNA, 22 nt, Human
cauuggaagacauaucaugcua

SEQ ID NO: 772458 - RNA, 18 nt, Human
gcucagcuaugggagguu

SEQ ID NO: 772459 - RNA, 22 nt, Human
aacaggcaaacugugggauccc

SEQ ID NO: 772460 - RNA, 22 nt, Human
ggacauggagcauguagagaaa

SEQ ID NO: 772461 - RNA, 22 nt, Human
agaggagaauccguuuccuugc

SEQ ID NO: 772462 - RNA, 22 nt, Human
uucugucaugcucauguaauug

SEQ ID NO: 772463 - RNA, 22 nt, Human
caaaaacugcaauuacuuuuac

SEQ ID NO: 772464 - RNA, 22 nt, Human
cuccuggggccauggaaggaac

SEQ ID NO: 772465 - RNA, 22 nt, Human
acacaugaguucucaucuugug

SEQ ID NO: 772466 - RNA, 22 nt, Human
caucuuuaacaauuuacaaugu

SEQ ID NO: 772467 - RNA, 22 nt, Human
gcaccugggacccagaggcacc

SEQ ID NO: 772468 - RNA, 22 nt, Human
caggcagaaugagauuacuuca

SEQ ID NO: 772469 - RNA, 23 nt, Human
uggcagugcccagggagaugauc

SEQ ID NO: 772470 - RNA, 22 nt, Human
ugaguuauauauacuggcucug

SEQ ID NO: 772471 - RNA, 22 nt, Human
aauuagggaaguauuuaguagu

SEQ ID NO: 772472 - RNA, 22 nt, Human
aaauaugagaguaggaguuugg

SEQ ID NO: 772473 - RNA, 22 nt, Human
auuuauuccugauuccuggcuu

SEQ ID NO: 772474 - RNA, 22 nt, Human
gaaaguuucucacacaugcaga

SEQ ID NO: 772475 - RNA, 22 nt, Human
uaauaauuaacagugauggguc

SEQ ID NO: 772476 - RNA, 22 nt, Human
gcagugcagugggacagggcgc

SEQ ID NO: 772477 - RNA, 22 nt, Human
guggugcaggccagcaggggcg

SEQ ID NO: 772478 - RNA, 22 nt, Human
augcuuuauuguuaggucaugu

SEQ ID NO: 772479 - RNA, 23 nt, Human
caucagccucagucuguggaccc

SEQ ID NO: 772480 - RNA, 22 nt, Human
auuacagauuauaaauuugagc

SEQ ID NO: 772481 - RNA, 22 nt, Human
ggcugccugguuuagugcugac

SEQ ID NO: 772482 - RNA, 22 nt, Human
uucugauuguuggaggaugcuu

SEQ ID NO: 772483 - RNA, 22 nt, Human
aaagccaggcagccaagccagu

SEQ ID NO: 772484 - RNA, 22 nt, Human
gccuggcaggggccugggagug

SEQ ID NO: 772485 - RNA, 22 nt, Human
uuucucaacuguauuaugcaga

SEQ ID NO: 772486 - RNA, 22 nt, Human
cugucugggucuacauccucug

SEQ ID NO: 772487 - RNA, 22 nt, Human
caggugggcguggcgagaaggc

SEQ ID NO: 772488 - RNA, 22 nt, Human
auucacaaauaacaggugcaga

SEQ ID NO: 772489 - RNA, 22 nt, Human
ggaugcaggggcagcagagccu

SEQ ID NO: 772490 - RNA, 22 nt, Human
uccaccagagccuucccaugcu

SEQ ID NO: 772491 - RNA, 22 nt, Human
uaagaugagguagguaagacuu

SEQ ID NO: 772492 - RNA, 22 nt, Human
cuguggagugcuuggcucagug

SEQ ID NO: 772493 - RNA, 22 nt, Human
aaagacauugaagaaggacuua

SEQ ID NO: 772494 - RNA, 22 nt, Human
cagguuuagguggacgugcagg

SEQ ID NO: 772495 - RNA, 20 nt, Human
cccaguguccagccuugcca

SEQ ID NO: 772496 - RNA, 22 nt, Human
agcugagagguggcaagcugua

SEQ ID NO: 772497 - RNA, 22 nt, Human
ucccugugagucaacuaaacaa

SEQ ID NO: 772498 - RNA, 22 nt, Human
acauuuggcaagaaagagaaac

SEQ ID NO: 772499 - RNA, 22 nt, Human
ccaaaugugccuguuucaacaa

SEQ ID NO: 772500 - RNA, 22 nt, Human
guuucaaagcacagcucacauu

SEQ ID NO: 772501 - RNA, 22 nt, Human
cuuggagauacagaggacauuu

SEQ ID NO: 772502 - RNA, 18 nt, Human
ccgggcuuuggugacaca

SEQ ID NO: 772503 - RNA, 22 nt, Human
aggucucugaguacugcuggac

SEQ ID NO: 772504 - RNA, 22 nt, Human
uggcacuguggauuucacaagu

SEQ ID NO: 772505 - RNA, 22 nt, Human
caggcagagccaaucguggggu

SEQ ID NO: 772506 - RNA, 22 nt, Human
ucuuuuuuuccugugcagagcu

SEQ ID NO: 772507 - RNA, 23 nt, Human
uaucuguauuuguucacugcugu

SEQ ID NO: 772508 - RNA, 22 nt, Human
acauagaagugaugcuuaucca

SEQ ID NO: 772509 - RNA, 22 nt, Human
ccuggcccuggaauagggcagg

SEQ ID NO: 772510 - RNA, 22 nt, Human
uaguuuagcauacaucuucagg

SEQ ID NO: 772511 - RNA, 22 nt, Human
gcagggcuguucaggagggugg

SEQ ID NO: 772512 - RNA, 22 nt, Human
gcugugcaaaucgauuuguugg

SEQ ID NO: 772513 - RNA, 22 nt, Human
auguuucuaguuguaugucacu

SEQ ID NO: 772514 - RNA, 22 nt, Human
uacaaccagauccucuaaguca

SEQ ID NO: 772515 - RNA, 22 nt, Human
auauucugcuuuugaugcauuc

SEQ ID NO: 772516 - RNA, 22 nt, Human
cagaagugauguugagcuaguc

SEQ ID NO: 772517 - RNA, 22 nt, Human
uugaaguucugcauuucuaaua

SEQ ID NO: 772518 - RNA, 22 nt, Human
aggggccuggacauggacgcgc

SEQ ID NO: 772519 - RNA, 22 nt, Human
uuuacaguuccaugugauaggc

SEQ ID NO: 772520 - RNA, 22 nt, Human
ccauuugaaaugaauguuuuua

SEQ ID NO: 772521 - RNA, 21 nt, Human
uuugaauagaaauagugcuua

SEQ ID NO: 772522 - RNA, 22 nt, Human
uuguuuaaagaacuucugacuu

SEQ ID NO: 772523 - RNA, 22 nt, Human
uuuauuagauuaucaaagaggu

SEQ ID NO: 772524 - RNA, 22 nt, Human
caaagccauagaguagauaaga

SEQ ID NO: 772525 - RNA, 22 nt, Human
ucuauauuccagauacagauua

SEQ ID NO: 772526 - RNA, 22 nt, Human
ugagcccuaccugcucaucucc

SEQ ID NO: 772527 - RNA, 22 nt, Human
acucaucuucccuccuggaggg

SEQ ID NO: 772528 - RNA, 22 nt, Human
gaggaugugucuggucugggca

SEQ ID NO: 772529 - RNA, 21 nt, Human
auaugaacuguggacuuugga

SEQ ID NO: 772530 - RNA, 19 nt, Human
aaguugaucauuuugacag

SEQ ID NO: 772531 - RNA, 22 nt, Human
cucaguuucuuacucuguauaa

SEQ ID NO: 772532 - RNA, 22 nt, Human
ucucagugcagagaggcuaucu

SEQ ID NO: 772533 - RNA, 22 nt, Human
ggaagggcaauaaaaucucagg

SEQ ID NO: 772534 - RNA, 22 nt, Human
agaaaauuacuccagagacaag

SEQ ID NO: 772535 - RNA, 22 nt, Human
gcugcugucagcaggccuuguu

SEQ ID NO: 772536 - RNA, 22 nt, Human
auucuucauacagacaaguccu

SEQ ID NO: 772537 - RNA, 22 nt, Human
auucagggaggaaaggggccuc

SEQ ID NO: 772538 - RNA, 22 nt, Human
aggacuucuuagaugccuuccg

SEQ ID NO: 772539 - RNA, 22 nt, Human
cccagcagugguucucaaacuu

SEQ ID NO: 772540 - RNA, 22 nt, Human
ggcaguggugggaggcucgcuc

SEQ ID NO: 772541 - RNA, 22 nt, Human
uuuagcauccaagguuaugacu

SEQ ID NO: 772542 - RNA, 22 nt, Human
ugcuuucuuuagcuccugaguc

SEQ ID NO: 772543 - RNA, 18 nt, Human
caguuuuuauaucuggca

SEQ ID NO: 772544 - RNA, 22 nt, Human
agcagagcggggccuccggaag

SEQ ID NO: 772545 - RNA, 22 nt, Human
caggagcccagaguccucagcu

SEQ ID NO: 772546 - RNA, 22 nt, Human
uaaguccacuauauccuucucu

SEQ ID NO: 772547 - RNA, 22 nt, Human
aaaaagucauauucuuguuccu

SEQ ID NO: 772548 - RNA, 22 nt, Human
uacaggaggauuaucaaaggau

SEQ ID NO: 772549 - RNA, 22 nt, Human
acuguuuaggaggcuuauaugc

SEQ ID NO: 772550 - RNA, 22 nt, Human
aagagaaggauucugagccugg

SEQ ID NO: 772551 - RNA, 22 nt, Human
agaggaugguugaggaagaccu

SEQ ID NO: 772552 - RNA, 22 nt, Human
gcugucacaucaaggcacuaaa

SEQ ID NO: 772553 - RNA, 22 nt, Human
guggucagcagcagugggagug

SEQ ID NO: 772554 - RNA, 22 nt, Human
augucauuaaaauugugcugca

SEQ ID NO: 772555 - RNA, 22 nt, Human
ucccaggaauugaagccagugu

SEQ ID NO: 772556 - RNA, 22 nt, Human
acaugcaugcuuuggugggugu

SEQ ID NO: 772557 - RNA, 22 nt, Human
ugaucaaauucaggagucugga

SEQ ID NO: 772558 - RNA, 20 nt, Human
auguuguuuacucauagcau

SEQ ID NO: 772559 - RNA, 22 nt, Human
ucaguaauuaccuaugacucga

SEQ ID NO: 772560 - RNA, 22 nt, Human
uucccucccuggcugccauuuc

SEQ ID NO: 772561 - RNA, 22 nt, Human
uaggcagcugcaaacuucgguc

SEQ ID NO: 772562 - RNA, 22 nt, Human
uagacuauagcucacagugcuu

SEQ ID NO: 772563 - RNA, 22 nt, Human
auccugggcaagucaauguccc

SEQ ID NO: 772564 - RNA, 22 nt, Human
uccaauuugaaaugguauaugu

SEQ ID NO: 772565 - RNA, 22 nt, Human
gugaaggaccaauaugacucau

SEQ ID NO: 772566 - RNA, 22 nt, Human
aauggccauaucauugcagagc

SEQ ID NO: 772567 - RNA, 22 nt, Human
ucacagaaggaccuuguuucau

SEQ ID NO: 772568 - RNA, 22 nt, Human
agcugucugucuccugaggaga

SEQ ID NO: 772569 - RNA, 22 nt, Human
cuauuagguuggugcaaaagua

SEQ ID NO: 772570 - RNA, 22 nt, Human
aagggggccacaccugguguga

SEQ ID NO: 772571 - RNA, 22 nt, Human
auuuaaauuuucugauggagag

SEQ ID NO: 772572 - RNA, 22 nt, Human
auacaguaaccacauucuauag

SEQ ID NO: 772573 - RNA, 22 nt, Human
uuacauuagacccacuuucaug

SEQ ID NO: 772574 - RNA, 22 nt, Human
ccagagagauugcuucuaaaga

SEQ ID NO: 772575 - RNA, 22 nt, Human
cugccucuauaggaguccacca

SEQ ID NO: 772576 - RNA, 22 nt, Human
gcuggaguccaguggcaugauc

SEQ ID NO: 772577 - RNA, 22 nt, Human
uggcuuccuaaacugauuucca

SEQ ID NO: 772578 - RNA, 22 nt, Human
cucagcccggugcucgugccac

SEQ ID NO: 772579 - RNA, 22 nt, Human
uuaguguuagggccuguuaccu

SEQ ID NO: 772580 - RNA, 22 nt, Human
ccagugugaaccucaccacccu

SEQ ID NO: 772581 - RNA, 22 nt, Human
aggaucagugaauacucagggu

SEQ ID NO: 772582 - RNA, 22 nt, Human
uggaacacugaucauugccuuu

SEQ ID NO: 772583 - RNA, 22 nt, Human
ucucugggaaugggccugggua

SEQ ID NO: 772584 - RNA, 22 nt, Human
acauacuuaugcuaaaaauaua

SEQ ID NO: 772585 - RNA, 22 nt, Human
ggucauuguucuuuucugugau

SEQ ID NO: 772586 - RNA, 22 nt, Human
uguggagguuuaaguaauggga

SEQ ID NO: 772587 - RNA, 22 nt, Human
acagcccaggacuccagugggc

SEQ ID NO: 772588 - RNA, 22 nt, Human
cucugagagagcuggugagcac

SEQ ID NO: 772589 - RNA, 22 nt, Human
auucauuuagagggauuaagca

SEQ ID NO: 772590 - RNA, 19 nt, Human
aaacuaaggggaaauguuu

SEQ ID NO: 772591 - RNA, 22 nt, Human
cuuguagaccccuggacucacg

SEQ ID NO: 772592 - RNA, 22 nt, Human
cuuuccagauuuguccaguuau

SEQ ID NO: 772593 - RNA, 22 nt, Human
uagcaaggcguggcacucaaau

SEQ ID NO: 772594 - RNA, 22 nt, Human
aacacugaccucuacccucagu

SEQ ID NO: 772595 - RNA, 22 nt, Human
uccacuccuuaugccagacggu

SEQ ID NO: 772596 - RNA, 22 nt, Human
aggcgcugcgcuggggccagaa

SEQ ID NO: 772597 - RNA, 22 nt, Human
uuauucaguuuguguagaggug

SEQ ID NO: 772598 - RNA, 22 nt, Human
agacaucaaugaucagagguag

SEQ ID NO: 772599 - RNA, 22 nt, Human
uguuacugauuugauauacagu

SEQ ID NO: 772600 - RNA, 22 nt, Human
uugcuuuagggcaaauauuuca

SEQ ID NO: 772601 - RNA, 22 nt, Human
gagguuggagggcuggccugca

SEQ ID NO: 772602 - RNA, 22 nt, Human
gugaccagcccauagagaggcg

SEQ ID NO: 772603 - RNA, 22 nt, Human
ugagcuugcuacauagaucaga

SEQ ID NO: 772604 - RNA, 20 nt, Human
gcauggcuaaucuguacuga

SEQ ID NO: 772605 - RNA, 22 nt, Human
ugucuuuacuuaauaaauauac

SEQ ID NO: 772606 - RNA, 19 nt, Human
ggccugaggccacagaucc

SEQ ID NO: 772607 - RNA, 22 nt, Human
gaaggccauugcguccugggau

SEQ ID NO: 772608 - RNA, 22 nt, Human
uaugaagugucuguuguaucug

SEQ ID NO: 772609 - RNA, 22 nt, Human
gaggcuccucauucaguaugcu

SEQ ID NO: 772610 - RNA, 22 nt, Human
ccaggaggcucugacuggaccc

SEQ ID NO: 772611 - RNA, 22 nt, Human
auuugucaauaagaugaacaua

SEQ ID NO: 772612 - RNA, 22 nt, Human
ugggcugcugucugcacaugcu

SEQ ID NO: 772613 - RNA, 22 nt, Human
ucagccaggccaggcauucaca

SEQ ID NO: 772614 - RNA, 22 nt, Human
accugcccuggaggaagauauu

SEQ ID NO: 772615 - RNA, 23 nt, Human
gccucugcucugcguuggggacu

SEQ ID NO: 772616 - RNA, 22 nt, Human
augcuacaggaagacgucaggc

SEQ ID NO: 772617 - RNA, 22 nt, Human
ugugagaauuccugaucacagg

SEQ ID NO: 772618 - RNA, 22 nt, Human
agcaacuagccaggaugcagag

SEQ ID NO: 772619 - RNA, 22 nt, Human
cacuguggugccaaaccuggag

SEQ ID NO: 772620 - RNA, 22 nt, Human
auggauuggauuuuuauggacc

SEQ ID NO: 772621 - RNA, 22 nt, Human
gagcuaaguuucuggaggcaga

SEQ ID NO: 772622 - RNA, 22 nt, Human
uuugccugggaauucuagugua

SEQ ID NO: 772623 - RNA, 22 nt, Human
gucuucaauugcauuugauggg

SEQ ID NO: 772624 - RNA, 22 nt, Human
agggcacaggcuggcaggaucu

SEQ ID NO: 772625 - RNA, 22 nt, Human
gcucucagguacaaagcugugu

SEQ ID NO: 772626 - RNA, 22 nt, Human
gcagagcacccugcagugguau

SEQ ID NO: 772627 - RNA, 22 nt, Human
uaggccaguggcagguugugug

SEQ ID NO: 772628 - RNA, 22 nt, Human
cacugagguaucugucucuccu

SEQ ID NO: 772629 - RNA, 22 nt, Human
acccuggguucccgcagcacca

SEQ ID NO: 772630 - RNA, 22 nt, Human
gggcugacgaaggccaugugug

SEQ ID NO: 772631 - RNA, 22 nt, Human
ugcgcaggagcucugccaggag

SEQ ID NO: 772632 - RNA, 20 nt, Human
auacacauauucuugcaacu

SEQ ID NO: 772633 - RNA, 22 nt, Human
ucucagcugacugcuuuccucg

SEQ ID NO: 772634 - RNA, 22 nt, Human
gguggcucagggcuccaagcau

SEQ ID NO: 772635 - RNA, 22 nt, Human
cauucacagagggggaagcauc

SEQ ID NO: 772636 - RNA, 22 nt, Human
uaucacuacaccuggcuaauua

SEQ ID NO: 772637 - RNA, 22 nt, Human
ccaggggcucucagggugugug

SEQ ID NO: 772638 - RNA, 22 nt, Human
uugagaagaggcuuuguaggaa

SEQ ID NO: 772639 - RNA, 22 nt, Human
auguuucuguccuacgagauaa

SEQ ID NO: 772640 - RNA, 22 nt, Human
guuauugagacauagaguuaug

SEQ ID NO: 772641 - RNA, 22 nt, Human
guucauuuaugauguaacaugu

SEQ ID NO: 772642 - RNA, 22 nt, Human
gcucccuggcuuuuacagugua

SEQ ID NO: 772643 - RNA, 22 nt, Human
uugcuucagagggagacacuuu

SEQ ID NO: 772644 - RNA, 22 nt, Human
uuguuacauggacaacuguaug

SEQ ID NO: 772645 - RNA, 22 nt, Human
ccacauuuuugauacucucacu

SEQ ID NO: 772646 - RNA, 22 nt, Human
ccagaggugccacagaaagagc

SEQ ID NO: 772647 - RNA, 22 nt, Human
ugcauuuguaacauucaagaau

SEQ ID NO: 772648 - RNA, 22 nt, Human
ucuguccaguggcucucaggga

SEQ ID NO: 772649 - RNA, 23 nt, Human
acucagcuuugggagaugacuca

SEQ ID NO: 772650 - RNA, 22 nt, Human
uguuuaugcaucguuaauacca

SEQ ID NO: 772651 - RNA, 22 nt, Human
ugagcagcaggaucuucuggua

SEQ ID NO: 772652 - RNA, 22 nt, Human
agcucagaacugcagacaugug

SEQ ID NO: 772653 - RNA, 22 nt, Human
ucuguucagacacuuuacaugu

SEQ ID NO: 772654 - RNA, 22 nt, Human
uaggucucucuucuugauggga

SEQ ID NO: 772655 - RNA, 22 nt, Human
cacuguaauggaauuuucuuua

SEQ ID NO: 772656 - RNA, 23 nt, Human
agaauuguuguuagggaaaagua

SEQ ID NO: 772657 - RNA, 22 nt, Human
cagccagggucaggcagcuucu

SEQ ID NO: 772658 - RNA, 22 nt, Human
uuuaugacauuacaauaucaag

SEQ ID NO: 772659 - RNA, 22 nt, Human
ugcugcagcuuugucacaugca

SEQ ID NO: 772660 - RNA, 20 nt, Human
uccaggagguuaguguggcu

SEQ ID NO: 772661 - RNA, 22 nt, Human
cuuccuguugucacagucugcg

SEQ ID NO: 772662 - RNA, 22 nt, Human
cuggaggagagucugaaugaca

SEQ ID NO: 772663 - RNA, 22 nt, Human
uccuggagccucauucaaacac

SEQ ID NO: 772664 - RNA, 22 nt, Human
guauacaugugguaaaaugcac

SEQ ID NO: 772665 - RNA, 22 nt, Human
uugaggucuucauucuugggca

SEQ ID NO: 772666 - RNA, 22 nt, Human
ugaugaauuaguaacaaaugag

SEQ ID NO: 772667 - RNA, 22 nt, Human
uugccugugucagcagguggaa

SEQ ID NO: 772668 - RNA, 22 nt, Human
guggccaaaaggaagaagguua

SEQ ID NO: 772669 - RNA, 22 nt, Human
uuccugggagcuagccacaucu

SEQ ID NO: 772670 - RNA, 20 nt, Human
cugaagagacuggaggggca

SEQ ID NO: 772671 - RNA, 22 nt, Human
cugugugcucggauggacucgu

SEQ ID NO: 772672 - RNA, 22 nt, Human
aaauaagaggacagauguuugg

SEQ ID NO: 772673 - RNA, 22 nt, Human
caggccagugggaaauagggau

SEQ ID NO: 772674 - RNA, 22 nt, Human
auuccagauguuacugaaaggc

SEQ ID NO: 772675 - RNA, 22 nt, Human
ggagaaugauauauagcucagu

SEQ ID NO: 772676 - RNA, 22 nt, Human
uuuuguaagaaacugccaagcc

SEQ ID NO: 772677 - RNA, 22 nt, Human
auuccacauaggccuucaugac

SEQ ID NO: 772678 - RNA, 22 nt, Human
ucuacagucaaguuauauugcu

SEQ ID NO: 772679 - RNA, 22 nt, Human
ccuuggguguuuaauagauaua

SEQ ID NO: 772680 - RNA, 22 nt, Human
agcuggugugcucuggaauccu

SEQ ID NO: 772681 - RNA, 22 nt, Human
uguacaguguagucaugagguu

SEQ ID NO: 772682 - RNA, 22 nt, Human
ccucuuccugcacugacauuuu

SEQ ID NO: 772683 - RNA, 22 nt, Human
ucugucacuuauuaagauggau

SEQ ID NO: 772684 - RNA, 22 nt, Human
agagcuguguuuaguaguuacg

SEQ ID NO: 772685 - RNA, 22 nt, Human
aggaaggguucuuucuguuuau

SEQ ID NO: 772686 - RNA, 22 nt, Human
cagaaaccugucuggaguggga

SEQ ID NO: 772687 - RNA, 22 nt, Human
cuccucuuuggggauuuacaca

SEQ ID NO: 772688 - RNA, 22 nt, Human
uaguggggaaggaggacaagaa

SEQ ID NO: 772689 - RNA, 22 nt, Human
cugggagcgcagcaggcacaac

SEQ ID NO: 772690 - RNA, 22 nt, Human
gucaccuugaacaggcuacuca

SEQ ID NO: 772691 - RNA, 22 nt, Human
uugccaucccuuaccucaguca

SEQ ID NO: 772692 - RNA, 22 nt, Human
uauucugcuaagugauuucuac

SEQ ID NO: 772693 - RNA, 22 nt, Human
gcccagcacauugcugaggacc

SEQ ID NO: 772694 - RNA, 19 nt, Human
agccagugagccucugggu

SEQ ID NO: 772695 - RNA, 19 nt, Human
aggcaaccaaugaggcaaa

SEQ ID NO: 772696 - RNA, 18 nt, Human
cugaggcuuagagagguu

SEQ ID NO: 772697 - RNA, 22 nt, Human
gcgacgcucgggcuccgaugcc

SEQ ID NO: 772698 - RNA, 22 nt, Human
gagagguagaggcucugcuuaa

SEQ ID NO: 772699 - RNA, 22 nt, Human
agcaccaggauauuguuggaga

SEQ ID NO: 772700 - RNA, 17 nt, Human
aagagaggcugagcugg

SEQ ID NO: 772701 - RNA, 22 nt, Human
uccaguaugacugauguccuuc

SEQ ID NO: 772702 - RNA, 22 nt, Human
uaaugccaauuuaaugauccau

SEQ ID NO: 772703 - RNA, 22 nt, Human
uccagcccucagccaaguggaa

SEQ ID NO: 772704 - RNA, 22 nt, Human
uccagugguuugaaaggggugu

SEQ ID NO: 772705 - RNA, 22 nt, Human
ucugaagguugagaagggcuga

SEQ ID NO: 772706 - RNA, 22 nt, Human
ucaaccucuggagaaaucagga

SEQ ID NO: 772707 - RNA, 22 nt, Human
ucuaaacacuaagucuugaugc

SEQ ID NO: 772708 - RNA, 22 nt, Human
cuggaagacguuugaagccaug

SEQ ID NO: 772709 - RNA, 22 nt, Human
ccagcuuuucagaaucugccug

SEQ ID NO: 772710 - RNA, 21 nt, Human
ugucuucauaugagauggugu

SEQ ID NO: 772711 - RNA, 22 nt, Human
uauugacaauuugugaaacuau

SEQ ID NO: 772712 - RNA, 22 nt, Human
acuccgacucugagucuacauu

SEQ ID NO: 772713 - RNA, 22 nt, Human
cccuggguucuggcugggcugc

SEQ ID NO: 772714 - RNA, 22 nt, Human
uuccagggaagagcaaggcagu

SEQ ID NO: 772715 - RNA, 22 nt, Human
uuugaaagcaggugugggaggg

SEQ ID NO: 772716 - RNA, 22 nt, Human
gggccuccgugugcuggugcuc

SEQ ID NO: 772717 - RNA, 22 nt, Human
auuguuaauaacuauuacauug

SEQ ID NO: 772718 - RNA, 22 nt, Human
cuguuaaguguagauaaugugg

SEQ ID NO: 772719 - RNA, 22 nt, Human
ggcagugaugucaaacagugaa

SEQ ID NO: 772720 - RNA, 22 nt, Human
aaguacauguugcucaacagcc

SEQ ID NO: 772721 - RNA, 22 nt, Human
gugauuccuauuaguacaugca

SEQ ID NO: 772722 - RNA, 23 nt, Human
ugcauuauccucucugaagacca

SEQ ID NO: 772723 - RNA, 22 nt, Human
ugugcagagaagccacuggggg

SEQ ID NO: 772724 - RNA, 22 nt, Human
uacagcacggugcauuuacuac

SEQ ID NO: 772725 - RNA, 22 nt, Human
uuggaacucaauaauucuucuu

SEQ ID NO: 772726 - RNA, 21 nt, Human
gcauuaaaagcaguuguuggu

SEQ ID NO: 772727 - RNA, 22 nt, Human
gcuggcucuuuuugccgggcuc

SEQ ID NO: 772728 - RNA, 22 nt, Human
aaguggagagcccuggaggucu

SEQ ID NO: 772729 - RNA, 23 nt, Human
uauguguaaggagaaggagugag

SEQ ID NO: 772730 - RNA, 22 nt, Human
cuggggucucaauucuagcggg

SEQ ID NO: 772731 - RNA, 22 nt, Human
gccaguggcuugccaggcagga

SEQ ID NO: 772732 - RNA, 21 nt, Human
aaaggccauaaucacggagca

SEQ ID NO: 772733 - RNA, 22 nt, Human
uuggccagagguuucucucaug

SEQ ID NO: 772734 - RNA, 22 nt, Human
guagaggacauuugacaugaug

SEQ ID NO: 772735 - RNA, 22 nt, Human
cccaggagaugcacuccauugg

SEQ ID NO: 772736 - RNA, 22 nt, Human
ggggggugacaaguagagguug

SEQ ID NO: 772737 - RNA, 22 nt, Human
gugcagugaaaaaagaaugucc

SEQ ID NO: 772738 - RNA, 22 nt, Human
cucucagugccacacagccauu

SEQ ID NO: 772739 - RNA, 22 nt, Human
cuggucaccagguagcauugua

SEQ ID NO: 772740 - RNA, 22 nt, Human
auugcucugcaauccuccccaa

SEQ ID NO: 772741 - RNA, 22 nt, Human
acagucuuuaauuucuuugugg

SEQ ID NO: 772742 - RNA, 22 nt, Human
augcucagggcacacucuggac

SEQ ID NO: 772743 - RNA, 22 nt, Human
gggcacaguacuccaaucaacu

SEQ ID NO: 772744 - RNA, 22 nt, Human
cuccaggagggcuuccugugau

SEQ ID NO: 772745 - RNA, 22 nt, Human
agcagaaaauuggaaaugacaa

SEQ ID NO: 772746 - RNA, 22 nt, Human
uccccuccaacuccaacuaugg

SEQ ID NO: 772747 - RNA, 22 nt, Human
uaagguuuugagaccagaacgu

SEQ ID NO: 772748 - RNA, 22 nt, Human
uuuucuccuuucaagauagcau

SEQ ID NO: 772749 - RNA, 22 nt, Human
ccucugagccugugugcggcac

SEQ ID NO: 772750 - RNA, 22 nt, Human
auggcugugguaucagacgcag

SEQ ID NO: 772751 - RNA, 22 nt, Human
aagauccaugagggcagagauu

SEQ ID NO: 772752 - RNA, 22 nt, Human
gccugggaaagaguagggaaau

SEQ ID NO: 772753 - RNA, 22 nt, Human
ccacaaguuucagcacccagag

SEQ ID NO: 772754 - RNA, 22 nt, Human
ucugucacccgagcaggcgaga

SEQ ID NO: 772755 - RNA, 22 nt, Human
auuugagaugguaaauaacuuu

SEQ ID NO: 772756 - RNA, 22 nt, Human
guuuggcaguguuauguagguu

SEQ ID NO: 772757 - RNA, 22 nt, Human
aaaucccacucagaaacugcca

SEQ ID NO: 772758 - RNA, 22 nt, Human
augaagauaauagcauugguug

SEQ ID NO: 772759 - RNA, 22 nt, Human
uggccagcuuugacuguaaacc

SEQ ID NO: 772760 - RNA, 21 nt, Human
aaaguucaugcuuuaauauuc

SEQ ID NO: 772761 - RNA, 21 nt, Human
uuucugucucugccacuaguu

SEQ ID NO: 772762 - RNA, 22 nt, Human
agccauugaauuuagugccuuu

SEQ ID NO: 772763 - RNA, 22 nt, Human
ugaguacucggagugcuuugga

SEQ ID NO: 772764 - RNA, 22 nt, Human
gcuuccaaugcuucuaucacau

SEQ ID NO: 772765 - RNA, 22 nt, Human
cagagguauuuugauaaacgcc

SEQ ID NO: 772766 - RNA, 22 nt, Human
cugcccacuauguugucauggg

SEQ ID NO: 772767 - RNA, 22 nt, Human
aaagaagagcuggaaggagucu

SEQ ID NO: 772768 - RNA, 22 nt, Human
ggaauucugcauguucaguugg

SEQ ID NO: 772769 - RNA, 22 nt, Human
aaaugcucuccaaaaugaaagu

SEQ ID NO: 772770 - RNA, 22 nt, Human
ucucuguguugcaggaaaaucu

SEQ ID NO: 772771 - RNA, 22 nt, Human
gaggcucagagagguccacaua

SEQ ID NO: 772772 - RNA, 22 nt, Human
ucacuuugacagagaaaugaau

SEQ ID NO: 772773 - RNA, 16 nt, Human
ggagagugucugcaaa

SEQ ID NO: 772774 - RNA, 22 nt, Human
uauuucuuguucccuccaaguu

SEQ ID NO: 772775 - RNA, 22 nt, Human
augcugaagaguucaugauuau

SEQ ID NO: 772776 - RNA, 22 nt, Human
cuggagccggaccagggacggu

SEQ ID NO: 772777 - RNA, 22 nt, Human
uuagcaaauaucuugaaacagg

SEQ ID NO: 772778 - RNA, 22 nt, Human
ugcagaggcgccgugggugggg

SEQ ID NO: 772779 - RNA, 22 nt, Human
agcugcuacugcucugccagag

SEQ ID NO: 772780 - RNA, 22 nt, Human
uggagauggguuaauggagaga

SEQ ID NO: 772781 - RNA, 22 nt, Human
gacuuugugccaaacgccagaa

SEQ ID NO: 772782 - RNA, 22 nt, Human
cagacagaggcuguaugagggc

SEQ ID NO: 772783 - RNA, 22 nt, Human
ucagcacuuuuacucucuuugc

SEQ ID NO: 772784 - RNA, 22 nt, Human
uauuuucuguggaggaccagau

SEQ ID NO: 772785 - RNA, 22 nt, Human
uaugcacauugguuuccucauu

SEQ ID NO: 772786 - RNA, 22 nt, Human
guaacuuuggauuuaggguacc

SEQ ID NO: 772787 - RNA, 22 nt, Human
cacuaagucaacagccucucuu

SEQ ID NO: 772788 - RNA, 22 nt, Human
uuucaguuuuugcucgauguau

SEQ ID NO: 772789 - RNA, 22 nt, Human
caaagguuggaaauguuuacca

SEQ ID NO: 772790 - RNA, 22 nt, Human
acagucuggaagcagggggcaa

SEQ ID NO: 772791 - RNA, 19 nt, Human
cagcacaugcuucucugag

SEQ ID NO: 772792 - RNA, 22 nt, Human
ugcagaaccaguccucagaccc

SEQ ID NO: 772793 - RNA, 22 nt, Human
aaguccuuaggaagcagucguu

SEQ ID NO: 772794 - RNA, 22 nt, Human
gugacauguuauggacuggcua

SEQ ID NO: 772795 - RNA, 22 nt, Human
cugcaguagcagagcugaguag

SEQ ID NO: 772796 - RNA, 22 nt, Human
accaguaugugccuucaguguc

SEQ ID NO: 772797 - RNA, 22 nt, Human
acuugccauaaaugaaaauacu

SEQ ID NO: 772798 - RNA, 19 nt, Human
uguagcaguuuaaaacaac

SEQ ID NO: 772799 - RNA, 22 nt, Human
gcuggagcugaguucccugggc

SEQ ID NO: 772800 - RNA, 23 nt, Human
agccucuuuucuccugcccugca

SEQ ID NO: 772801 - RNA, 22 nt, Human
agaauaaaugcuaccuaucaca

SEQ ID NO: 772802 - RNA, 22 nt, Human
ggacaaaauccaaacuucuuag

SEQ ID NO: 772803 - RNA, 22 nt, Human
aggcaggugggagugauuccuu

SEQ ID NO: 772804 - RNA, 20 nt, Human
cugaaagacguaacagugca

SEQ ID NO: 772805 - RNA, 18 nt, Human
cucagggcaucagucugg

SEQ ID NO: 772806 - RNA, 22 nt, Human
ucagaagcuaaauuugauauuu

SEQ ID NO: 772807 - RNA, 19 nt, Human
aauacaguguuauagaauu

SEQ ID NO: 772808 - RNA, 21 nt, Human
uucuguuuuuuguaccagggc

SEQ ID NO: 772809 - RNA, 22 nt, Human
acaggccuggaaaggaaggagu

SEQ ID NO: 772810 - RNA, 22 nt, Human
gugcuggcccuguccucgagcu

SEQ ID NO: 772811 - RNA, 22 nt, Human
ggccacugccuccgccauggcu

SEQ ID NO: 772812 - RNA, 22 nt, Human
uaauuauacaaaaaggcaugca

SEQ ID NO: 772813 - RNA, 22 nt, Human
uccuugaagcuuguaucuaaua

SEQ ID NO: 772814 - RNA, 20 nt, Human
gugggcagcaggcauacugg

SEQ ID NO: 772815 - RNA, 22 nt, Human
uuuuauacacaugaacaugcag

SEQ ID NO: 772816 - RNA, 22 nt, Human
cccucugccugggaccaagucc

SEQ ID NO: 772817 - RNA, 22 nt, Human
acaauacaggcuucuggacuua

SEQ ID NO: 772818 - RNA, 22 nt, Human
aagaagugguccuuuucuuucu

SEQ ID NO: 772819 - RNA, 22 nt, Human
uaagaaacauuuuuaugacagu

SEQ ID NO: 772820 - RNA, 22 nt, Human
ucaaagaauguuaugaggguag

SEQ ID NO: 772821 - RNA, 20 nt, Human
gcugccuguuucuguaagua

SEQ ID NO: 772822 - RNA, 22 nt, Human
aaugucugccagaacugaucau

SEQ ID NO: 772823 - RNA, 19 nt, Human
ucagcuggcaggccuccuc

SEQ ID NO: 772824 - RNA, 22 nt, Human
agcagcuccccucaugcuccac

SEQ ID NO: 772825 - RNA, 22 nt, Human
ucaugcuuaaaagacacuugag

SEQ ID NO: 772826 - RNA, 22 nt, Human
uguggguccuccugugugcccg

SEQ ID NO: 772827 - RNA, 18 nt, Human
gggugcaggcacugacug

SEQ ID NO: 772828 - RNA, 22 nt, Human
agggguagagauugcuggugua

SEQ ID NO: 772829 - RNA, 22 nt, Human
gaagcaguucgaaagcaguugg

SEQ ID NO: 772830 - RNA, 22 nt, Human
caaaagggaguucucuggaagg

SEQ ID NO: 772831 - RNA, 22 nt, Human
ugcaggugagugcaggggcuca

SEQ ID NO: 772832 - RNA, 22 nt, Human
uagauucugacccucuuuuuac

SEQ ID NO: 772833 - RNA, 22 nt, Human
uuagcauuucauuucaagagga

SEQ ID NO: 772834 - RNA, 22 nt, Human
ucccuggaacagagagacaacg

SEQ ID NO: 772835 - RNA, 22 nt, Human
uugaaauuuuaggccuugcaau

SEQ ID NO: 772836 - RNA, 22 nt, Human
ugaacuguacaucccuaaccua

SEQ ID NO: 772837 - RNA, 22 nt, Human
ugagcuggaggacaggagggua

SEQ ID NO: 772838 - RNA, 22 nt, Human
cauuagaaccuauaaaaagcau

SEQ ID NO: 772839 - RNA, 22 nt, Human
aaaugugcuaaaguauuaacau

SEQ ID NO: 772840 - RNA, 22 nt, Human
ucaggucugaugccucauccau

SEQ ID NO: 772841 - RNA, 22 nt, Human
cagggccucauggccggggugc

SEQ ID NO: 772842 - RNA, 18 nt, Human
ugggauggagaguaacug

SEQ ID NO: 772843 - RNA, 22 nt, Human
aaggguuggggaagagcaaauu

SEQ ID NO: 772844 - RNA, 22 nt, Human
uggaggcaguuuaagucugaga

SEQ ID NO: 772845 - RNA, 22 nt, Human
cagggcuguggcuuugugcugu

SEQ ID NO: 772846 - RNA, 22 nt, Human
aaucagaacgcucgaucuucgg

SEQ ID NO: 772847 - RNA, 22 nt, Human
cggcccugcugagcuugucugg

SEQ ID NO: 772848 - RNA, 22 nt, Human
uagcuucuugagaaagggugcc

SEQ ID NO: 772849 - RNA, 18 nt, Human
gcugggguugagcucucc

SEQ ID NO: 772850 - RNA, 22 nt, Human
ugggacagugaccccagagguc

SEQ ID NO: 772851 - RNA, 22 nt, Human
auaaaaucuuuaugugcucugc

SEQ ID NO: 772852 - RNA, 21 nt, Human
ucuccaguauccuucucugag

SEQ ID NO: 772853 - RNA, 22 nt, Human
aacugcauucagaaagcucacu

SEQ ID NO: 772854 - RNA, 22 nt, Human
caagaggagcaggcaggugugc

SEQ ID NO: 772855 - RNA, 22 nt, Human
cauaggaagccaucucagucac

SEQ ID NO: 772856 - RNA, 22 nt, Human
augaggauguuaguggacugga

SEQ ID NO: 772857 - RNA, 22 nt, Human
agugugagauuaaaccgaauca

SEQ ID NO: 772858 - RNA, 22 nt, Human
aaggguggauuucugagcucua

SEQ ID NO: 772859 - RNA, 22 nt, Human
accagcagaguugaggaggaca

SEQ ID NO: 772860 - RNA, 19 nt, Human
gcaggcacagcccugggug

SEQ ID NO: 772861 - RNA, 22 nt, Human
gguuguaguuggagguuguaua

SEQ ID NO: 772862 - RNA, 22 nt, Human
agggggcccuugcaggugagcg

SEQ ID NO: 772863 - RNA, 22 nt, Human
uaagauaugguaggaaguuugg

SEQ ID NO: 772864 - RNA, 22 nt, Human
gcuccagggaguacauuuauca

SEQ ID NO: 772865 - RNA, 22 nt, Human
gcccaggaagccaccgggaagu

SEQ ID NO: 772866 - RNA, 22 nt, Human
guggccaggucagggacuugug

SEQ ID NO: 772867 - RNA, 22 nt, Human
ucucaaauuuauacagaguuca

SEQ ID NO: 772868 - RNA, 22 nt, Human
aaaauugugaagguuucugaaa

SEQ ID NO: 772869 - RNA, 22 nt, Human
cacauucaucaguguuguacug

SEQ ID NO: 772870 - RNA, 21 nt, Human
agcugcuuucagcuccuagag

SEQ ID NO: 772871 - RNA, 23 nt, Human
uucuuucaagaaguucacagugc

SEQ ID NO: 772872 - RNA, 22 nt, Human
cacaggccaauacccucucucu

SEQ ID NO: 772873 - RNA, 22 nt, Human
uuggccagcgacgaccuucuua

SEQ ID NO: 772874 - RNA, 22 nt, Human
gacauuuaugaaggagauaugc

SEQ ID NO: 772875 - RNA, 20 nt, Human
gcaagcaugaagaguagaga

SEQ ID NO: 772876 - RNA, 20 nt, Human
aaggcagaguggguuggagc

SEQ ID NO: 772877 - RNA, 22 nt, Human
ugugugcucuaaugccuaguac

SEQ ID NO: 772878 - RNA, 22 nt, Human
gcaccugcuggggcugaugaga

SEQ ID NO: 772879 - RNA, 22 nt, Human
uaaaaagcagcugagauuuucu

SEQ ID NO: 772880 - RNA, 22 nt, Human
caacacugacaauggacugauu

SEQ ID NO: 772881 - RNA, 20 nt, Human
acaucaacuagucacagaca

SEQ ID NO: 772882 - RNA, 22 nt, Human
ccuuucucuaucgacccaucgc

SEQ ID NO: 772883 - RNA, 22 nt, Human
augucuucucuguagguaaauu

SEQ ID NO: 772884 - RNA, 21 nt, Human
ucuucccucaggauguccugc

SEQ ID NO: 772885 - RNA, 22 nt, Human
aaguccuuguauacagaaucaa

SEQ ID NO: 772886 - RNA, 22 nt, Human
aaugacaaauauggaagccuga

SEQ ID NO: 772887 - RNA, 17 nt, Human
ccauacugacauauuga

SEQ ID NO: 772888 - RNA, 22 nt, Human
cggcugaggaucuccaggccug

SEQ ID NO: 772889 - RNA, 22 nt, Human
uggaagggaacagguggguguu

SEQ ID NO: 772890 - RNA, 22 nt, Human
aagcacuaggucacacaaguua

SEQ ID NO: 772891 - RNA, 22 nt, Human
aagcacagcagagccuugcuug

SEQ ID NO: 772892 - RNA, 20 nt, Human
ggagggcagcugagaguugg

SEQ ID NO: 772893 - RNA, 22 nt, Human
agccucucauguucucccccag

SEQ ID NO: 772894 - RNA, 20 nt, Human
cagggccacgcuccaaggca

SEQ ID NO: 772895 - RNA, 22 nt, Human
ugcaggaagcaaccagguccaa

SEQ ID NO: 772896 - RNA, 22 nt, Human
aagccauucaucuaauguccug

SEQ ID NO: 772897 - RNA, 22 nt, Human
cggcuucaucuuuacuucaaga

SEQ ID NO: 772898 - RNA, 19 nt, Human
auaacuacauuggcucagu

SEQ ID NO: 772899 - RNA, 22 nt, Human
ccuuacaaugcaguuuacuuag

SEQ ID NO: 772900 - RNA, 22 nt, Human
cuguguccugucuccuaaggug

SEQ ID NO: 772901 - RNA, 18 nt, Human
gcccguguggagaccaug

SEQ ID NO: 772902 - RNA, 22 nt, Human
cuccagggaugagacagaguag

SEQ ID NO: 772903 - RNA, 22 nt, Human
agcaugcugguguucauggcag

SEQ ID NO: 772904 - RNA, 22 nt, Human
auuuacagaugaugcuauuuga

SEQ ID NO: 772905 - RNA, 22 nt, Human
aggccucacauugggcuucaag

SEQ ID NO: 772906 - RNA, 22 nt, Human
aggcggcugguguccugcaggu

SEQ ID NO: 772907 - RNA, 22 nt, Human
uaaauuacucaaugcacauaaa

SEQ ID NO: 772908 - RNA, 22 nt, Human
gaaaguauuagccuagaaguca

SEQ ID NO: 772909 - RNA, 22 nt, Human
ugguuucccauuaucugcagga

SEQ ID NO: 772910 - RNA, 22 nt, Human
cagcucuuccuacccuaguugg

SEQ ID NO: 772911 - RNA, 22 nt, Human
gaucuucuauguaaugaagugu

SEQ ID NO: 772912 - RNA, 22 nt, Human
uucuggaagaauaaugggcaaa

SEQ ID NO: 772913 - RNA, 22 nt, Human
ucuuuaagaguaauuauuuugg

SEQ ID NO: 772914 - RNA, 22 nt, Human
agccagggaagaggccuaccuc

SEQ ID NO: 772915 - RNA, 22 nt, Human
acauccaucuucugccugugaa

SEQ ID NO: 772916 - RNA, 22 nt, Human
uuuaagaucuaucccauuuugu

SEQ ID NO: 772917 - RNA, 22 nt, Human
gcaggaguggagaccaugggga

SEQ ID NO: 772918 - RNA, 22 nt, Human
aguggcuguacuauuuuuucau

SEQ ID NO: 772919 - RNA, 22 nt, Human
uuggcuuucucuguaucugaau

SEQ ID NO: 772920 - RNA, 22 nt, Human
aaugaacccuucaagcucugau

SEQ ID NO: 772921 - RNA, 22 nt, Human
uuacagauguaggaacugaagu

SEQ ID NO: 772922 - RNA, 22 nt, Human
cccugacccaaaacugucagaa

SEQ ID NO: 772923 - RNA, 23 nt, Human
gcccauggagucuggaucuggcc

SEQ ID NO: 772924 - RNA, 22 nt, Human
uuaaucuucagggacucuugcu

SEQ ID NO: 772925 - RNA, 22 nt, Human
uggagaauucuauguugagggg

SEQ ID NO: 772926 - RNA, 22 nt, Human
gcugucccaugguugcaagaug

SEQ ID NO: 772927 - RNA, 22 nt, Human
cagggcuucgcuccuggugcac

SEQ ID NO: 772928 - RNA, 22 nt, Human
ucccagcucacauaugguaacu

SEQ ID NO: 772929 - RNA, 22 nt, Human
cuacccaggcuggagugcagua

SEQ ID NO: 772930 - RNA, 22 nt, Human
ucaggaguuuggccuacagagg

SEQ ID NO: 772931 - RNA, 22 nt, Human
cuccucuuuacccgcauggucu

SEQ ID NO: 772932 - RNA, 22 nt, Human
gaggaaaauauucagggagguu

SEQ ID NO: 772933 - RNA, 22 nt, Human
uuucacaaguaaaguccuaagu

SEQ ID NO: 772934 - RNA, 22 nt, Human
ucccagccacagguguagcccu

SEQ ID NO: 772935 - RNA, 22 nt, Human
aaggcugagggcuguaccuggc

SEQ ID NO: 772936 - RNA, 22 nt, Human
uucuuucuuagcaaucuauggu

SEQ ID NO: 772937 - RNA, 22 nt, Human
uugacaauguccuuugaauuuc

SEQ ID NO: 772938 - RNA, 19 nt, Human
cacagggagaccacauguc

SEQ ID NO: 772939 - RNA, 22 nt, Human
gaggccuguagucauggaugua

SEQ ID NO: 772940 - RNA, 22 nt, Human
agcaaauacuuuucacugagcc

SEQ ID NO: 772941 - RNA, 22 nt, Human
ggaaggaaauuggggcaguugu

SEQ ID NO: 772942 - RNA, 22 nt, Human
caggcagaggaagucugggucu

SEQ ID NO: 772943 - RNA, 22 nt, Human
uggagccaugccuggccuuucc

SEQ ID NO: 772944 - RNA, 22 nt, Human
agcugcagagguuugugcaaca

SEQ ID NO: 772945 - RNA, 22 nt, Human
uuccagcuaacucacaucccuu

SEQ ID NO: 772946 - RNA, 18 nt, Human
ggaaggugcuggagugca

SEQ ID NO: 772947 - RNA, 22 nt, Human
cauaauuuuccaugguuugcua

SEQ ID NO: 772948 - RNA, 22 nt, Human
ucccagggacccagccugauac

SEQ ID NO: 772949 - RNA, 22 nt, Human
acauucauugccaggguggaag

SEQ ID NO: 772950 - RNA, 22 nt, Human
agggacuggcucucugagcagg

SEQ ID NO: 772951 - RNA, 22 nt, Human
agucuccacaacagcccugaua

SEQ ID NO: 772952 - RNA, 22 nt, Human
ugcugccuuagaaauggcuaua

SEQ ID NO: 772953 - RNA, 22 nt, Human
ucuagaaugacaugcaagagua

SEQ ID NO: 772954 - RNA, 23 nt, Human
agcuggguggccugcgugaagcu

SEQ ID NO: 772955 - RNA, 22 nt, Human
ccuggagcaucaggaggaaggg

SEQ ID NO: 772956 - RNA, 18 nt, Human
ucccucccugcuguggcc

SEQ ID NO: 772957 - RNA, 22 nt, Human
ccugggagguggagguugcagc

SEQ ID NO: 772958 - RNA, 22 nt, Human
auacaucuagagucauaaaaac

SEQ ID NO: 772959 - RNA, 22 nt, Human
gagauuuaauuggauuaacuua

SEQ ID NO: 772960 - RNA, 22 nt, Human
uaugacauugcuuuuuagaacu

SEQ ID NO: 772961 - RNA, 22 nt, Human
aagggcucugugugccucccca

SEQ ID NO: 772962 - RNA, 22 nt, Human
uggccaggcauucagauaagac

SEQ ID NO: 772963 - RNA, 22 nt, Human
acagaggucauggagaguucuc

SEQ ID NO: 772964 - RNA, 22 nt, Human
cacccuggccucgcucucugca

SEQ ID NO: 772965 - RNA, 22 nt, Human
ugcagugugaccuguagcgagc

SEQ ID NO: 772966 - RNA, 22 nt, Human
aaaauccuuagccgagugaggu

SEQ ID NO: 772967 - RNA, 22 nt, Human
aauacuauguugugacacauga

SEQ ID NO: 772968 - RNA, 22 nt, Human
guugggaaggcaagaaguagaa

SEQ ID NO: 772969 - RNA, 22 nt, Human
aucacaggugguaggaaaagaa

SEQ ID NO: 772970 - RNA, 22 nt, Human
gcuccagggacccaagagaaaa

SEQ ID NO: 772971 - RNA, 22 nt, Human
aggaagggagcaguuuguuguu

SEQ ID NO: 772972 - RNA, 22 nt, Human
uuccaggaagcucucggccucu

SEQ ID NO: 772973 - RNA, 22 nt, Human
aaaguuugagugauuugacaca

SEQ ID NO: 772974 - RNA, 22 nt, Human
uggcagccaucagagcaggggu

SEQ ID NO: 772975 - RNA, 22 nt, Human
aggagcuaauucauaagccacu

SEQ ID NO: 772976 - RNA, 22 nt, Human
aaaggaagauugagcuuuucca

SEQ ID NO: 772977 - RNA, 22 nt, Human
ugugugcacaugauuugaaaug

SEQ ID NO: 772978 - RNA, 22 nt, Human
uccugagcucccaugaacaggc

SEQ ID NO: 772979 - RNA, 22 nt, Human
aaggcuggggugcagacggccu

SEQ ID NO: 772980 - RNA, 22 nt, Human
cuuucccuuagccccauucuau

SEQ ID NO: 772981 - RNA, 18 nt, Human
ccacccagggggagagga

SEQ ID NO: 772982 - RNA, 22 nt, Human
cuggaucuaaagguggauguag

SEQ ID NO: 772983 - RNA, 22 nt, Human
uauugauuccugcuuucugcuc

SEQ ID NO: 772984 - RNA, 22 nt, Human
cucugagagcggucuguggcuu

SEQ ID NO: 772985 - RNA, 19 nt, Human
ugcaagugucuuggacaag

SEQ ID NO: 772986 - RNA, 22 nt, Human
uuucuccugcuagaacaaggag

SEQ ID NO: 772987 - RNA, 22 nt, Human
aggagggucauguugaagugua

SEQ ID NO: 772988 - RNA, 22 nt, Human
auuuggaacuuauaauaaguuu

SEQ ID NO: 772989 - RNA, 22 nt, Human
accuggcaugaagcaugccuua

SEQ ID NO: 772990 - RNA, 22 nt, Human
agcagcaguacauauaagacua

SEQ ID NO: 772991 - RNA, 22 nt, Human
ccccaggagcuuguuuuagaga

SEQ ID NO: 772992 - RNA, 22 nt, Human
uagaugauagggccagaauuug

SEQ ID NO: 772993 - RNA, 22 nt, Human
auggccaagcuuacucuguugu

SEQ ID NO: 772994 - RNA, 22 nt, Human
ugaguauauacccagaagugga

SEQ ID NO: 772995 - RNA, 22 nt, Human
gccuggaagugugucgugggaa

SEQ ID NO: 772996 - RNA, 22 nt, Human
gagaugaauguaaacaaaggca

SEQ ID NO: 772997 - RNA, 17 nt, Human
uccaggcagcaacugag

SEQ ID NO: 772998 - RNA, 22 nt, Human
ugacugagagagaacucagcuu

SEQ ID NO: 772999 - RNA, 22 nt, Human
ugaacgcagguccacauggcuc

SEQ ID NO: 773000 - RNA, 22 nt, Human
cuuucucuggaggggagugguu

SEQ ID NO: 773001 - RNA, 22 nt, Human
guuauauaauuccugugguagu

SEQ ID NO: 773002 - RNA, 19 nt, Human
cuuggcaucugugaaguga

SEQ ID NO: 773003 - RNA, 22 nt, Human
uaaggaaaauggacaucaaaca

SEQ ID NO: 773004 - RNA, 22 nt, Human
uuucugcuucucagacccugaa

SEQ ID NO: 773005 - RNA, 22 nt, Human
uuuuauugguaaugauaaaagu

SEQ ID NO: 773006 - RNA, 22 nt, Human
uuacaauuacuugaucucagcu

SEQ ID NO: 773007 - RNA, 22 nt, Human
agugcuccugccagcuuucugg

SEQ ID NO: 773008 - RNA, 22 nt, Human
uguaagaagggccagagcucca

SEQ ID NO: 773009 - RNA, 22 nt, Human
uccugauuagguuuccauagcu

SEQ ID NO: 773010 - RNA, 23 nt, Human
aaagacugaggaaagucucuguc

SEQ ID NO: 773011 - RNA, 22 nt, Human
aaaguguugaagaaaauguuca

SEQ ID NO: 773012 - RNA, 22 nt, Human
auguccugguccuccaccaugg

SEQ ID NO: 773013 - RNA, 22 nt, Human
ugaggggguuaauuaggagagu

SEQ ID NO: 773014 - RNA, 22 nt, Human
uggggccagagcugcagggagc

SEQ ID NO: 773015 - RNA, 22 nt, Human
augcuuuuaacuccuuuauccc

SEQ ID NO: 773016 - RNA, 22 nt, Human
cagagacaaccugguagagaaa

SEQ ID NO: 773017 - RNA, 22 nt, Human
aacagcuuuuuuggucagcauu

SEQ ID NO: 773018 - RNA, 22 nt, Human
ggugucugauuccaaggccaca

SEQ ID NO: 773019 - RNA, 22 nt, Human
ugaggugguuuguaucacuggg

SEQ ID NO: 773020 - RNA, 22 nt, Human
aacaauaggagugaugcaguau

SEQ ID NO: 773021 - RNA, 22 nt, Human
accaaggaguuugguauuuuag

SEQ ID NO: 773022 - RNA, 22 nt, Human
acuguuaaaguaauuaauuguc

SEQ ID NO: 773023 - RNA, 22 nt, Human
uuauucagugccuuugaaagaa

SEQ ID NO: 773024 - RNA, 22 nt, Human
ugggccacgucaucucccacaa

SEQ ID NO: 773025 - RNA, 22 nt, Human
gcuucagaaguugggcucugac

SEQ ID NO: 773026 - RNA, 22 nt, Human
uguaaccugacugcuuugcucu

SEQ ID NO: 773027 - RNA, 22 nt, Human
aacagcagcaugacagcugggu

SEQ ID NO: 773028 - RNA, 20 nt, Human
uuuccuuucauuuuaguacc

SEQ ID NO: 773029 - RNA, 22 nt, Human
aguaaacauguaauuguucauu

SEQ ID NO: 773030 - RNA, 22 nt, Human
uuccagcaggcagacaggagau

SEQ ID NO: 773031 - RNA, 22 nt, Human
guguguggacgucugagcccag

SEQ ID NO: 773032 - RNA, 22 nt, Human
acagcugauaguuaccucuguc

SEQ ID NO: 773033 - RNA, 22 nt, Human
uguuauucucugccuacaaguc

SEQ ID NO: 773034 - RNA, 20 nt, Human
ucucuggcaagaagcugcag

SEQ ID NO: 773035 - RNA, 22 nt, Human
gauuuucuugggaaacaaugag

SEQ ID NO: 773036 - RNA, 22 nt, Human
cagcaggcuggacuucaguccc

SEQ ID NO: 773037 - RNA, 22 nt, Human
gaugugggugucuucagcuggu

SEQ ID NO: 773038 - RNA, 22 nt, Human
ugaggccugggcacauaaccuc

SEQ ID NO: 773039 - RNA, 22 nt, Human
uuguuacacauaauaacauuuu

SEQ ID NO: 773040 - RNA, 20 nt, Human
accugggguugccugugcuc

SEQ ID NO: 773041 - RNA, 22 nt, Human
gcagaggugugggaggggccac

SEQ ID NO: 773042 - RNA, 22 nt, Human
gcgugggguagguagacaugga

SEQ ID NO: 773043 - RNA, 22 nt, Human
uauauugacuuuaaagaagcaa

SEQ ID NO: 773044 - RNA, 22 nt, Human
caauaacugcuaaauucccugu

SEQ ID NO: 773045 - RNA, 22 nt, Human
agcugcagcacuccaguagccg

SEQ ID NO: 773046 - RNA, 22 nt, Human
accuuuggaggacuagggucau

SEQ ID NO: 773047 - RNA, 22 nt, Human
agucacugguucuguaauuaau

SEQ ID NO: 773048 - RNA, 22 nt, Human
gcuguguuggugaagcuguagc

SEQ ID NO: 773049 - RNA, 22 nt, Human
caugggcucuucuggacugcac

SEQ ID NO: 773050 - RNA, 22 nt, Human
ggaagugaggaaauauuuuguu

SEQ ID NO: 773051 - RNA, 23 nt, Human
aaagccaagucagucuacuggaa

SEQ ID NO: 773052 - RNA, 22 nt, Human
uucucagauauuuguauggaac

SEQ ID NO: 773053 - RNA, 22 nt, Human
ccuggaaggacaauagauagug

SEQ ID NO: 773054 - RNA, 22 nt, Human
acugagaaauuuccagacuugc

SEQ ID NO: 773055 - RNA, 22 nt, Human
uuugcauuaucucacuuauaua

SEQ ID NO: 773056 - RNA, 22 nt, Human
caggccucagagaguggcgggg

SEQ ID NO: 773057 - RNA, 22 nt, Human
ugguggcuaccagguccugggg

SEQ ID NO: 773058 - RNA, 22 nt, Human
uugcaaauucauggaucugaau

SEQ ID NO: 773059 - RNA, 22 nt, Human
gcacauacccacugucaagcac

SEQ ID NO: 773060 - RNA, 22 nt, Human
uguucaauccccagguccugaa

SEQ ID NO: 773061 - RNA, 20 nt, Human
ugccugcccagguccugcac

SEQ ID NO: 773062 - RNA, 22 nt, Human
auuugcauuuagaaagaucacu

SEQ ID NO: 773063 - RNA, 22 nt, Human
gugcccugaugcaauugucuca

SEQ ID NO: 773064 - RNA, 22 nt, Human
cugcuucacccaacuuugggau

SEQ ID NO: 773065 - RNA, 22 nt, Human
gcacacacaugugaguacaugc

SEQ ID NO: 773066 - RNA, 22 nt, Human
agaaagcacagcggguccauuu

SEQ ID NO: 773067 - RNA, 22 nt, Human
cuguccuggugcuggggauccc

SEQ ID NO: 773068 - RNA, 22 nt, Human
agguucaggcugcacaccugag

SEQ ID NO: 773069 - RNA, 22 nt, Human
gggagcugaacugcugaaguug

SEQ ID NO: 773070 - RNA, 22 nt, Human
gaugaaaaucuugagaugucga

SEQ ID NO: 773071 - RNA, 22 nt, Human
gacagguggggaaacuaaggua

SEQ ID NO: 773072 - RNA, 22 nt, Human
agcaaggcucuuaaugcccaaa

SEQ ID NO: 773073 - RNA, 22 nt, Human
uccuggcuccugaucugucacu

SEQ ID NO: 773074 - RNA, 23 nt, Human
ucaguuuguauaauccauaugca

SEQ ID NO: 773075 - RNA, 22 nt, Human
aacaguaaaaaucauuuaguug

SEQ ID NO: 773076 - RNA, 22 nt, Human
cuugcuuuguccagaaauucag

SEQ ID NO: 773077 - RNA, 22 nt, Human
uccugggcagcgggacgcucag

SEQ ID NO: 773078 - RNA, 22 nt, Human
cuuacacagucuggcacuucuu

SEQ ID NO: 773079 - RNA, 22 nt, Human
ccacuacuuuguuuuuggugcu

SEQ ID NO: 773080 - RNA, 22 nt, Human
gcucucuggaggccauggacag

SEQ ID NO: 773081 - RNA, 22 nt, Human
ucggagagcucacagcuguggc

SEQ ID NO: 773082 - RNA, 22 nt, Human
acugaguguaggacuuugaguu

SEQ ID NO: 773083 - RNA, 23 nt, Human
uaagaacagacaagcauuuacau

SEQ ID NO: 773084 - RNA, 22 nt, Human
aggcuccugagaggcagaggcu

SEQ ID NO: 773085 - RNA, 22 nt, Human
ucauccaguaccauggaaggca

SEQ ID NO: 773086 - RNA, 22 nt, Human
gcuggaagggaggcccagccgg

SEQ ID NO: 773087 - RNA, 22 nt, Human
cuccagugggggugagccuaga

SEQ ID NO: 773088 - RNA, 22 nt, Human
ccugcaguuuguugugaccccg

SEQ ID NO: 773089 - RNA, 22 nt, Human
caugccagggcuugcugccugg

SEQ ID NO: 773090 - RNA, 22 nt, Human
caaagggcauuuuagugaacug

SEQ ID NO: 773091 - RNA, 22 nt, Human
ggcaaagcccugccugguucaa

SEQ ID NO: 773092 - RNA, 22 nt, Human
uuucaaacauagaucugaauau

SEQ ID NO: 773093 - RNA, 19 nt, Human
agcuguggaugugggauuu

SEQ ID NO: 773094 - RNA, 22 nt, Human
cuucaggaaaaucucuaaggau

SEQ ID NO: 773095 - RNA, 20 nt, Human
uccagcugucuuucagagac

SEQ ID NO: 773096 - RNA, 22 nt, Human
ucaugcuuuguuaauguggcac

SEQ ID NO: 773097 - RNA, 22 nt, Human
aggaccugccaggugcaaagca

SEQ ID NO: 773098 - RNA, 22 nt, Human
uggcagaguggaccauacucaa

SEQ ID NO: 773099 - RNA, 18 nt, Human
uggcucagauggcuuuaa

SEQ ID NO: 773100 - RNA, 22 nt, Human
ucaaucauaaugaagugaagaa

SEQ ID NO: 773101 - RNA, 22 nt, Human
uaacaguguggacuugagaucu

SEQ ID NO: 773102 - RNA, 22 nt, Human
uggaaugacaaguuguucagag

SEQ ID NO: 773103 - RNA, 19 nt, Human
ugccugucaguagaucuca

SEQ ID NO: 773104 - RNA, 22 nt, Human
ggccagcucaggguccuugggc

SEQ ID NO: 773105 - RNA, 22 nt, Human
agacaaggcuggaguuuaggca

SEQ ID NO: 773106 - RNA, 22 nt, Human
uugccuugauucuucucaugug

SEQ ID NO: 773107 - RNA, 22 nt, Human
agaggcucugccgccucaggua

SEQ ID NO: 773108 - RNA, 22 nt, Human
uugaggucucuacagaagagug

SEQ ID NO: 773109 - RNA, 22 nt, Human
aauuucaauuacuuuugcacca

SEQ ID NO: 773110 - RNA, 22 nt, Human
ggcugcagaggcgaucugaggu

SEQ ID NO: 773111 - RNA, 22 nt, Human
ugcaguguuccuguggguuuau

SEQ ID NO: 773112 - RNA, 19 nt, Human
uguggucucuguucucagg

SEQ ID NO: 773113 - RNA, 22 nt, Human
cagagggcucuuggcugccugc

SEQ ID NO: 773114 - RNA, 22 nt, Human
uguacaaucugaugauguaugg

SEQ ID NO: 773115 - RNA, 22 nt, Human
ucaggaaauacaagugacauca

SEQ ID NO: 773116 - RNA, 22 nt, Human
augcauauuuucuacuauaucg

SEQ ID NO: 773117 - RNA, 22 nt, Human
uuggccaagggcucuuuaggcu

SEQ ID NO: 773118 - RNA, 22 nt, Human
acugaauagugcugcauuguac

SEQ ID NO: 773119 - RNA, 20 nt, Human
auguccugcuucuccucacc

SEQ ID NO: 773120 - RNA, 22 nt, Human
ccagggcaauaggaacacuuuu

SEQ ID NO: 773121 - RNA, 22 nt, Human
gacacuugugcuguuucugagc

SEQ ID NO: 773122 - RNA, 22 nt, Human
uguacaaagguacuuugauguu

SEQ ID NO: 773123 - RNA, 22 nt, Human
ucucaguguggugcuuaggaua

SEQ ID NO: 773124 - RNA, 22 nt, Human
auacuugagguuguauaaauau

SEQ ID NO: 773125 - RNA, 22 nt, Human
gcaggagaacaaagcaagcugc

SEQ ID NO: 773126 - RNA, 22 nt, Human
ggaggcaggaaagacagguuca

SEQ ID NO: 773127 - RNA, 22 nt, Human
aaugaaaauuggacccuagaac

SEQ ID NO: 773128 - RNA, 22 nt, Human
aguaaaaauugaggugcaaaau

SEQ ID NO: 773129 - RNA, 22 nt, Human
gauuucccagcaaaagcugguu

SEQ ID NO: 773130 - RNA, 22 nt, Human
cauuuagaaacuguuuuuaaca

SEQ ID NO: 773131 - RNA, 22 nt, Human
auucuagcccuggaacggcgac

SEQ ID NO: 773132 - RNA, 22 nt, Human
ugcccagcagggagcuaccugg

SEQ ID NO: 773133 - RNA, 21 nt, Human
cacuauuuauauaugccagcu

SEQ ID NO: 773134 - RNA, 22 nt, Human
gacagcaaugacggggcagcug

SEQ ID NO: 773135 - RNA, 22 nt, Human
ucaggcuguuagccaccuccuc

SEQ ID NO: 773136 - RNA, 22 nt, Human
acauaacaugucaaucacccga

SEQ ID NO: 773137 - RNA, 22 nt, Human
uuucuguagggauuucacaguu

SEQ ID NO: 773138 - RNA, 18 nt, Human
aaacccacucagcgcuga

SEQ ID NO: 773139 - RNA, 22 nt, Human
cacugaaaucgaaaaauguagg

SEQ ID NO: 773140 - RNA, 22 nt, Human
uuaacaguaaagaauugugcaa

SEQ ID NO: 773141 - RNA, 22 nt, Human
acacuuuuguuugaagucucca

SEQ ID NO: 773142 - RNA, 22 nt, Human
acuguccuuuuaaugcagccgu

SEQ ID NO: 773143 - RNA, 22 nt, Human
acugggauuacaggugggaguc

SEQ ID NO: 773144 - RNA, 22 nt, Human
cacccaguugacuacaaagggg

SEQ ID NO: 773145 - RNA, 22 nt, Human
aaaauggucucagcuggcacca

SEQ ID NO: 773146 - RNA, 22 nt, Human
auugcuguggaaauauaagaug

SEQ ID NO: 773147 - RNA, 19 nt, Human
acaguccagcuguuuguac

SEQ ID NO: 773148 - RNA, 22 nt, Human
uucuguacucuuugagaagaau

SEQ ID NO: 773149 - RNA, 22 nt, Human
agaggcacccgcgcgcggccau

SEQ ID NO: 773150 - RNA, 22 nt, Human
ggggcccagcaccccuccucgc

SEQ ID NO: 773151 - RNA, 22 nt, Human
uccuggcuuuucuuggcucauc

SEQ ID NO: 773152 - RNA, 22 nt, Human
uguggcugacuccuggucccca

SEQ ID NO: 773153 - RNA, 19 nt, Human
acauucccaucagcaaugu

SEQ ID NO: 773154 - RNA, 17 nt, Human
gagagcccucagauguc

SEQ ID NO: 773155 - RNA, 22 nt, Human
caguguggcugagacagaggcu

SEQ ID NO: 773156 - RNA, 22 nt, Human
agauggauuucuuccagugaga

SEQ ID NO: 773157 - RNA, 22 nt, Human
uucaauguuucuuaucaaguug

SEQ ID NO: 773158 - RNA, 22 nt, Human
gugggguguccagcagcgagcu

SEQ ID NO: 773159 - RNA, 22 nt, Human
auagagauggguuuaguuauaa

SEQ ID NO: 773160 - RNA, 22 nt, Human
gcagcaucagguucacugcgug

SEQ ID NO: 773161 - RNA, 22 nt, Human
gacccagccugguuuuuauagg

SEQ ID NO: 773162 - RNA, 22 nt, Human
gacauaaaguucuugcuugaau

SEQ ID NO: 773163 - RNA, 22 nt, Human
ugcacaggugguccaucugcac

SEQ ID NO: 773164 - RNA, 22 nt, Human
aagcuugggaaccacgguaauc

SEQ ID NO: 773165 - RNA, 22 nt, Human
aaguugauuuaaacuacuaguc

SEQ ID NO: 773166 - RNA, 22 nt, Human
gacuuugaacaguguaucagua

SEQ ID NO: 773167 - RNA, 22 nt, Human
acugaaggucucagcaaggaug

SEQ ID NO: 773168 - RNA, 22 nt, Human
aacagcagcugaggagcugggc

SEQ ID NO: 773169 - RNA, 22 nt, Human
agguggcuaugaggaugcaguc

SEQ ID NO: 773170 - RNA, 22 nt, Human
uaaaguuuggcagacaauaaca

SEQ ID NO: 773171 - RNA, 23 nt, Human
gggggccguccuggggauuauag

SEQ ID NO: 773172 - RNA, 22 nt, Human
aagggaaacuuucacaaugucc

SEQ ID NO: 773173 - RNA, 22 nt, Human
uggagaggaaagugcaguuuug

SEQ ID NO: 773174 - RNA, 22 nt, Human
aaauuuaaaaagcagcauugca

SEQ ID NO: 773175 - RNA, 22 nt, Human
gcccucaggacaagguuacgcu

SEQ ID NO: 773176 - RNA, 22 nt, Human
aagagcugcccaaggugaacag

SEQ ID NO: 773177 - RNA, 22 nt, Human
agcauggggcaaugcaugugcu

SEQ ID NO: 773178 - RNA, 23 nt, Human
aggucaaccacaagcugacaaac

SEQ ID NO: 773179 - RNA, 22 nt, Human
aggagugaguguccucagcaga

SEQ ID NO: 773180 - RNA, 22 nt, Human
gagcugucuggggacucugggu

SEQ ID NO: 773181 - RNA, 22 nt, Human
ucuucuccagugcuucugcaca

SEQ ID NO: 773182 - RNA, 22 nt, Human
gggucccaggucuggaaaagca

SEQ ID NO: 773183 - RNA, 22 nt, Human
ucacagcaacccugaggcgagu

SEQ ID NO: 773184 - RNA, 22 nt, Human
guacaaauguacacuuguauaa

SEQ ID NO: 773185 - RNA, 22 nt, Human
aggguagguguaagauagcccu

SEQ ID NO: 773186 - RNA, 22 nt, Human
aggcagcaaugaaugaaaugga

SEQ ID NO: 773187 - RNA, 17 nt, Human
uuucuggaaugggcaaa

SEQ ID NO: 773188 - RNA, 22 nt, Human
cagagcugcuucccaguuugug

SEQ ID NO: 773189 - RNA, 22 nt, Human
caggagccacauuccaccuuga

SEQ ID NO: 773190 - RNA, 22 nt, Human
cagguccaguaaaaagaguccu

SEQ ID NO: 773191 - RNA, 22 nt, Human
uuuauagaugucuguauuauaa

SEQ ID NO: 773192 - RNA, 22 nt, Human
uuucauaaacaguagaagacua

SEQ ID NO: 773193 - RNA, 22 nt, Human
ucagaagccgggcagguuuugg

SEQ ID NO: 773194 - RNA, 22 nt, Human
agggcagacuaggauggaagug

SEQ ID NO: 773195 - RNA, 22 nt, Human
uaugaagacaaugauagcauga

SEQ ID NO: 773196 - RNA, 22 nt, Human
gcuggaggauggacuggaagaa

SEQ ID NO: 773197 - RNA, 20 nt, Human
cuguuuauuagaaguggauu

SEQ ID NO: 773198 - RNA, 22 nt, Human
agucccagaucuccauucgguc

SEQ ID NO: 773199 - RNA, 22 nt, Human
cuguggcuggaauaauaaaugu

SEQ ID NO: 773200 - RNA, 22 nt, Human
uagcagagcgggugcgaggcgg

SEQ ID NO: 773201 - RNA, 22 nt, Human
ggaggcucugcuccguguguuc

SEQ ID NO: 773202 - RNA, 22 nt, Human
accuagaaacugacagaauauu

SEQ ID NO: 773203 - RNA, 19 nt, Human
ugguggcaaugucagcuaa

SEQ ID NO: 773204 - RNA, 22 nt, Human
ggcucaggacugcagcguagag

SEQ ID NO: 773205 - RNA, 19 nt, Human
ugcauaaauuauauacuuu

SEQ ID NO: 773206 - RNA, 22 nt, Human
cugaagcaaaggaucgagcuaa

SEQ ID NO: 773207 - RNA, 22 nt, Human
augaggcauucacagaaggcac

SEQ ID NO: 773208 - RNA, 22 nt, Human
ugcaagaggaauucuagaagca

SEQ ID NO: 773209 - RNA, 22 nt, Human
cacuguuuggcuccuguacuua

SEQ ID NO: 773210 - RNA, 22 nt, Human
uccaccugaguuucaguuauuu

SEQ ID NO: 773211 - RNA, 22 nt, Human
aucuuuuacuacaaaucaggug

SEQ ID NO: 773212 - RNA, 22 nt, Human
uucauggaucaugccuuuugug

SEQ ID NO: 773213 - RNA, 22 nt, Human
gacagccaugcacuucugcugu

SEQ ID NO: 773214 - RNA, 22 nt, Human
cguccccucguucccacuuugg

SEQ ID NO: 773215 - RNA, 22 nt, Human
aaaguuuuauucaagcauuagu

SEQ ID NO: 773216 - RNA, 22 nt, Human
cuugccuucuuuuccuauagaa

SEQ ID NO: 773217 - RNA, 20 nt, Human
uuguuuaaaggugaagaggc

SEQ ID NO: 773218 - RNA, 23 nt, Human
ugcccagugggugcaggggguau

SEQ ID NO: 773219 - RNA, 22 nt, Human
uuacagugacaguugcuaugau

SEQ ID NO: 773220 - RNA, 22 nt, Human
agcugugccuauucguggcaag

SEQ ID NO: 773221 - RNA, 22 nt, Human
uuauguuugaguauaugacuca

SEQ ID NO: 773222 - RNA, 22 nt, Human
uggcuacaucacagagaauucc

SEQ ID NO: 773223 - RNA, 22 nt, Human
uucuccucugcaaugacuggca

SEQ ID NO: 773224 - RNA, 22 nt, Human
uagcuuuagugaaaaauaucag

SEQ ID NO: 773225 - RNA, 22 nt, Human
cacaguguagacuaauaauaga

SEQ ID NO: 773226 - RNA, 22 nt, Human
cuauacaucccaauuucagaga

SEQ ID NO: 773227 - RNA, 19 nt, Human
ucugucacuggggguauuc

SEQ ID NO: 773228 - RNA, 22 nt, Human
ccagggcacuuaggcccagccc

SEQ ID NO: 773229 - RNA, 23 nt, Human
uccucagcauguuuugucaugua

SEQ ID NO: 773230 - RNA, 22 nt, Human
ccaggaagcauaauguaguggg

SEQ ID NO: 773231 - RNA, 21 nt, Human
caggaaaucagugugaauuag

SEQ ID NO: 773232 - RNA, 22 nt, Human
aaagcagggaugaggcuagagg

SEQ ID NO: 773233 - RNA, 23 nt, Human
cuagggcaguauuucacagacac

SEQ ID NO: 773234 - RNA, 18 nt, Human
cuggucucccuucgcuuu

SEQ ID NO: 773235 - RNA, 22 nt, Human
cugcaguacaagaagcaucucu

SEQ ID NO: 773236 - RNA, 22 nt, Human
acaauaaggauuuuuaggggca

SEQ ID NO: 773237 - RNA, 22 nt, Human
gccucugcucucagguagccuc

SEQ ID NO: 773238 - RNA, 22 nt, Human
aagcaucuauagguucuaggag

SEQ ID NO: 773239 - RNA, 22 nt, Human
ucugggaaguuggcagccagcu

SEQ ID NO: 773240 - RNA, 22 nt, Human
ugcuuuauuaagagagaaauuu

SEQ ID NO: 773241 - RNA, 22 nt, Human
gccuuuauauuuuucugguguu

SEQ ID NO: 773242 - RNA, 22 nt, Human
gccacccugagcugggccaggg

SEQ ID NO: 773243 - RNA, 22 nt, Human
gccuucugauugcuggacugac

SEQ ID NO: 773244 - RNA, 22 nt, Human
ugcuucuguuucauugaucuua

SEQ ID NO: 773245 - RNA, 22 nt, Human
uugcugaaaucuaugacauccu

SEQ ID NO: 773246 - RNA, 17 nt, Human
agauggccucuaagauu

SEQ ID NO: 773247 - RNA, 22 nt, Human
ugcaguccuggugaggggacau

SEQ ID NO: 773248 - RNA, 22 nt, Human
uugcauuuacugcaccgugagu

SEQ ID NO: 773249 - RNA, 22 nt, Human
ugcaggcaggggaugagcagcc

SEQ ID NO: 773250 - RNA, 22 nt, Human
uagauucuucuaggucuuuagc

SEQ ID NO: 773251 - RNA, 22 nt, Human
uucccugaucacgugucaggag

SEQ ID NO: 773252 - RNA, 22 nt, Human
ugccaagagggcagagggcagu

SEQ ID NO: 773253 - RNA, 22 nt, Human
agaaggcuggccauggugcccu

SEQ ID NO: 773254 - RNA, 22 nt, Human
aguuuuaagaugcgcuucuguu

SEQ ID NO: 773255 - RNA, 23 nt, Human
uauacacauguggcaguauagug

SEQ ID NO: 773256 - RNA, 22 nt, Human
ucucaaauaggccuugguccug

SEQ ID NO: 773257 - RNA, 22 nt, Human
aaggcacugacugugcagggga

SEQ ID NO: 773258 - RNA, 22 nt, Human
agcacauuaguaucuaagaaca

SEQ ID NO: 773259 - RNA, 22 nt, Human
auagauacauuguuauauuugu

SEQ ID NO: 773260 - RNA, 22 nt, Human
gcacugugcuaaacauguauca

SEQ ID NO: 773261 - RNA, 22 nt, Human
caaagcuauaaauucagacaga

SEQ ID NO: 773262 - RNA, 22 nt, Human
ugagcccuggcucuuucacuua

SEQ ID NO: 773263 - RNA, 18 nt, Human
aacaguuuccagauucuc

SEQ ID NO: 773264 - RNA, 22 nt, Human
uguccugugcacuguagcaugu

SEQ ID NO: 773265 - RNA, 18 nt, Human
aaacuggcuuggccugug

SEQ ID NO: 773266 - RNA, 22 nt, Human
cucagagguggaugccuugugg

SEQ ID NO: 773267 - RNA, 17 nt, Human
gcaucacagauaacacg

SEQ ID NO: 773268 - RNA, 21 nt, Human
agacacugguuuagcauucau

SEQ ID NO: 773269 - RNA, 22 nt, Human
cucacaauuuuucagugacuau

SEQ ID NO: 773270 - RNA, 22 nt, Human
ugaguuauaaugaauauuugaa

SEQ ID NO: 773271 - RNA, 22 nt, Human
ggcuggcaggcacaguaugcaa

SEQ ID NO: 773272 - RNA, 22 nt, Human
guauuuccauuagugugugcac

SEQ ID NO: 773273 - RNA, 23 nt, Human
uccauacucuaaacauguuauuu

SEQ ID NO: 773274 - RNA, 17 nt, Human
aaggcacagggcacugg

SEQ ID NO: 773275 - RNA, 22 nt, Human
gagcucagaggauucuggggag

SEQ ID NO: 773276 - RNA, 22 nt, Human
uccuuaauauggaagaguucuc

SEQ ID NO: 773277 - RNA, 22 nt, Human
agcagggcagugaucagaaagg

SEQ ID NO: 773278 - RNA, 22 nt, Human
gcuggcuuuguggucucuccuc

SEQ ID NO: 773279 - RNA, 22 nt, Human
auggcuccuucugugcaguuuu

SEQ ID NO: 773280 - RNA, 22 nt, Human
ucugggccagaucuagggaucu

SEQ ID NO: 773281 - RNA, 22 nt, Human
acauucaaccaauguuugcuau

SEQ ID NO: 773282 - RNA, 22 nt, Human
agagaaggguagcccauucucc

SEQ ID NO: 773283 - RNA, 22 nt, Human
cccagccugugacagccguccu

SEQ ID NO: 773284 - RNA, 20 nt, Human
uggcaggaggcagcagugga

SEQ ID NO: 773285 - RNA, 22 nt, Human
cuccccacacacuaggccugau

SEQ ID NO: 773286 - RNA, 22 nt, Human
ucaucuuuguaucccuaacaca

SEQ ID NO: 773287 - RNA, 22 nt, Human
acagaugagacuccaggaccuu

SEQ ID NO: 773288 - RNA, 22 nt, Human
ggcuauggaaauggcaggacau

SEQ ID NO: 773289 - RNA, 23 nt, Human
agugagcagcuguagggcaagga

SEQ ID NO: 773290 - RNA, 22 nt, Human
gguguugcaguugaagacuggu

SEQ ID NO: 773291 - RNA, 22 nt, Human
uugauucugauccuuugcuagc

SEQ ID NO: 773292 - RNA, 22 nt, Human
gaggggagacagggaaaucagu

SEQ ID NO: 773293 - RNA, 22 nt, Human
cuggagaacuaguuaaacacgu

SEQ ID NO: 773294 - RNA, 22 nt, Human
ucaguauagcuucuaaacuaac

SEQ ID NO: 773295 - RNA, 22 nt, Human
cuuguguuguacauucuauggg

SEQ ID NO: 773296 - RNA, 22 nt, Human
acauaugauauugaggaucuca

SEQ ID NO: 773297 - RNA, 22 nt, Human
auuauagggaauucuagaaguc

SEQ ID NO: 773298 - RNA, 20 nt, Human
agggccuguugcaagcguuu

SEQ ID NO: 773299 - RNA, 22 nt, Human
gcaugcauuucacuagguaugu

SEQ ID NO: 773300 - RNA, 22 nt, Human
uaguguguaugguaaugaugaa

SEQ ID NO: 773301 - RNA, 22 nt, Human
agcacagagagcucuagguaaa

SEQ ID NO: 773302 - RNA, 22 nt, Human
gggggagagacgagcggcucug

SEQ ID NO: 773303 - RNA, 22 nt, Human
aguguuuagcaugaaguucauu

SEQ ID NO: 773304 - RNA, 22 nt, Human
agucaaagaagaugguuccaaa

SEQ ID NO: 773305 - RNA, 22 nt, Human
aaaauugguuccuuucugaggc

SEQ ID NO: 773306 - RNA, 22 nt, Human
gggguggcccuacccucuggaa

SEQ ID NO: 773307 - RNA, 22 nt, Human
acagggagccccagcauuucca

SEQ ID NO: 773308 - RNA, 22 nt, Human
agcauucauugcuagaauguaa

SEQ ID NO: 773309 - RNA, 22 nt, Human
auuucauagauuguaaaucccu

SEQ ID NO: 773310 - RNA, 19 nt, Human
acauuggacauggaucuug

SEQ ID NO: 773311 - RNA, 22 nt, Human
auguagauuugcuucuccugcc

SEQ ID NO: 773312 - RNA, 22 nt, Human
uggcugugucaucauagcugug

SEQ ID NO: 773313 - RNA, 22 nt, Human
auaucauaaaucggugcaugaa

SEQ ID NO: 773314 - RNA, 22 nt, Human
ggcuccagggucucuccuugug

SEQ ID NO: 773315 - RNA, 22 nt, Human
aacugauuucaaguucaguuuc

SEQ ID NO: 773316 - RNA, 22 nt, Human
acagaauuuaaagcucuagacu

SEQ ID NO: 773317 - RNA, 22 nt, Human
aaucuuucaaauuucuuugggu

SEQ ID NO: 773318 - RNA, 22 nt, Human
gcacagcucgagcucaggaggg

SEQ ID NO: 773319 - RNA, 22 nt, Human
uauuggcagcaugagcuccugg

SEQ ID NO: 773320 - RNA, 22 nt, Human
cuccaggguuccccgauccacu

SEQ ID NO: 773321 - RNA, 22 nt, Human
agaagugucagugcaggcagcu

SEQ ID NO: 773322 - RNA, 22 nt, Human
uucagccuguucaugcuguugc

SEQ ID NO: 773323 - RNA, 22 nt, Human
auauuaaugagcaaguaaguga

SEQ ID NO: 773324 - RNA, 22 nt, Human
uggagaaggggcagggucucca

SEQ ID NO: 773325 - RNA, 22 nt, Human
cucagagaagauggaugaggua

SEQ ID NO: 773326 - RNA, 22 nt, Human
ccugcuguagggccccuggggc

SEQ ID NO: 773327 - RNA, 22 nt, Human
ucugacugaaccaauuauuuac

SEQ ID NO: 773328 - RNA, 22 nt, Human
augaaauuuuaauuauaccucu

SEQ ID NO: 773329 - RNA, 22 nt, Human
auucaacauauucugaguaaaa

SEQ ID NO: 773330 - RNA, 22 nt, Human
aggucaaaaucaggcagggaag

SEQ ID NO: 773331 - RNA, 22 nt, Human
uggaccugcuggaugggcaggu

SEQ ID NO: 773332 - RNA, 22 nt, Human
cagcuuuauugagguauaauug

SEQ ID NO: 773333 - RNA, 22 nt, Human
uguacacugcaggaugcauugc

SEQ ID NO: 773334 - RNA, 22 nt, Human
uucagagaguccaguaugcagu

SEQ ID NO: 773335 - RNA, 22 nt, Human
uuaaaagaauccuguuauccuc

SEQ ID NO: 773336 - RNA, 22 nt, Human
agcaaagcacuuugcauacaua

SEQ ID NO: 773337 - RNA, 22 nt, Human
cuccagucuaguagagccugcu

SEQ ID NO: 773338 - RNA, 22 nt, Human
cagagaagagucuggccucucu

SEQ ID NO: 773339 - RNA, 22 nt, Human
ccaucccugccauuauagccca

SEQ ID NO: 773340 - RNA, 22 nt, Human
acuguauaaggcauagguaagc

SEQ ID NO: 773341 - RNA, 22 nt, Human
gacauucagguguucaaugcca

SEQ ID NO: 773342 - RNA, 22 nt, Human
uucugggcuugaaaguuuaaua

SEQ ID NO: 773343 - RNA, 22 nt, Human
ucugugccuuuaagaagcucau

SEQ ID NO: 773344 - RNA, 22 nt, Human
auugagaaauauaaucuggaaa

SEQ ID NO: 773345 - RNA, 22 nt, Human
aaucauguacugcuguggcuuu

SEQ ID NO: 773346 - RNA, 22 nt, Human
ucauggaauagagcaguggcaa

SEQ ID NO: 773347 - RNA, 22 nt, Human
cccaggacucggcacucuccuu

SEQ ID NO: 773348 - RNA, 22 nt, Human
uuccacagcccaagcugguggc

SEQ ID NO: 773349 - RNA, 22 nt, Human
cugggcagagcuaacaccugag

SEQ ID NO: 773350 - RNA, 21 nt, Human
auacacauacacauaaaugug

SEQ ID NO: 773351 - RNA, 22 nt, Human
cauugcuuaucuaguucacaua

SEQ ID NO: 773352 - RNA, 22 nt, Human
gucugcugcuucuguugaagca

SEQ ID NO: 773353 - RNA, 22 nt, Human
uccagcccaucccuagccuggg

SEQ ID NO: 773354 - RNA, 22 nt, Human
cuugccaaugguacaaacgauu

SEQ ID NO: 773355 - RNA, 22 nt, Human
uagagcuggaauuugcagcaag

SEQ ID NO: 773356 - RNA, 22 nt, Human
auguuuaaaggagucagagacu

SEQ ID NO: 773357 - RNA, 22 nt, Human
aaggcuuuuguuccuauuuagu

SEQ ID NO: 773358 - RNA, 22 nt, Human
cccaggcagcggggucuccuug

SEQ ID NO: 773359 - RNA, 19 nt, Human
ucucaauguucagaaagcu

SEQ ID NO: 773360 - RNA, 22 nt, Human
uugcauaaagauuuuauugcau

SEQ ID NO: 773361 - RNA, 17 nt, Human
cucuggggacaguucua

SEQ ID NO: 773362 - RNA, 21 nt, Human
aguaguuuagcacaggguuug

SEQ ID NO: 773363 - RNA, 22 nt, Human
ggagggugggucauucuuacau

SEQ ID NO: 773364 - RNA, 18 nt, Human
agaggcuggacaggggau

SEQ ID NO: 773365 - RNA, 22 nt, Human
aaucaaagaaugggcuaguugg

SEQ ID NO: 773366 - RNA, 22 nt, Human
gagcucugggaaacaaagugua

SEQ ID NO: 773367 - RNA, 22 nt, Human
cuuccgugucaguuccaggugg

SEQ ID NO: 773368 - RNA, 22 nt, Human
gugagaauaccagcagugagaa

SEQ ID NO: 773369 - RNA, 22 nt, Human
acauucucuuccuaaauauacu

SEQ ID NO: 773370 - RNA, 22 nt, Human
cacagggaaccaaggcugggcc

SEQ ID NO: 773371 - RNA, 22 nt, Human
gucagcaccucuuuggggagcu

SEQ ID NO: 773372 - RNA, 18 nt, Human
uucagcagcagacacacu

SEQ ID NO: 773373 - RNA, 22 nt, Human
gaaauuuauuaucuacaucauu

SEQ ID NO: 773374 - RNA, 22 nt, Human
aauucauauggauaugcuagua

SEQ ID NO: 773375 - RNA, 22 nt, Human
guggcauugacauguaaacagu

SEQ ID NO: 773376 - RNA, 22 nt, Human
uggcuuuacuuaaacugaauca

SEQ ID NO: 773377 - RNA, 22 nt, Human
aggcuggaguacaguggcuauu

SEQ ID NO: 773378 - RNA, 22 nt, Human
ggaggaccugcuggcccugcaa

SEQ ID NO: 773379 - RNA, 22 nt, Human
gccaccucuuugucucugccgc

SEQ ID NO: 773380 - RNA, 22 nt, Human
aaucacauugaaucugcuaccu

SEQ ID NO: 773381 - RNA, 22 nt, Human
ggagccagugcccucuggugga

SEQ ID NO: 773382 - RNA, 22 nt, Human
uugcaggguugacacugccugc

SEQ ID NO: 773383 - RNA, 22 nt, Human
agaaggcuaaagaaacagauug

SEQ ID NO: 773384 - RNA, 22 nt, Human
uuucuuuugcccuguggguuag

SEQ ID NO: 773385 - RNA, 22 nt, Human
guugcagacggggugcacugaa

SEQ ID NO: 773386 - RNA, 22 nt, Human
ccucugacuccuggacuugggg

SEQ ID NO: 773387 - RNA, 22 nt, Human
gagguggaggggaaaaauagau

SEQ ID NO: 773388 - RNA, 22 nt, Human
aucauugaaauguaguuucauc

SEQ ID NO: 773389 - RNA, 22 nt, Human
ucacaucuauacccaauaauuu

SEQ ID NO: 773390 - RNA, 22 nt, Human
gcagaggcuccauuuuacagau

SEQ ID NO: 773391 - RNA, 22 nt, Human
aggcgcugugcuuggggcugga

SEQ ID NO: 773392 - RNA, 22 nt, Human
auacagagaagggaggcaaaau

SEQ ID NO: 773393 - RNA, 22 nt, Human
uuggaacucguguuacuuguau

SEQ ID NO: 773394 - RNA, 22 nt, Human
gggugggccugucuggccaugu

SEQ ID NO: 773395 - RNA, 22 nt, Human
uaagaaacuaaugcaauaagag

SEQ ID NO: 773396 - RNA, 21 nt, Human
gagcucucaggcaagaagcag

SEQ ID NO: 773397 - RNA, 22 nt, Human
uaguuaauucuuuaagaacaag

SEQ ID NO: 773398 - RNA, 19 nt, Human
uguaccugggucauggugc

SEQ ID NO: 773399 - RNA, 22 nt, Human
agcucucugauaaauugauaaa

SEQ ID NO: 773400 - RNA, 22 nt, Human
aggaaauugucuuuuuccuugu

SEQ ID NO: 773401 - RNA, 22 nt, Human
gacuguuaccuauauuuaugug

SEQ ID NO: 773402 - RNA, 22 nt, Human
agcuaacauggaggaaaaaguu

SEQ ID NO: 773403 - RNA, 22 nt, Human
ggaaauauuuugucuaauuugu

SEQ ID NO: 773404 - RNA, 22 nt, Human
aaauuagaccagggcuccugga

SEQ ID NO: 773405 - RNA, 21 nt, Human
ugaaugaggaggauggcauuu

SEQ ID NO: 773406 - RNA, 23 nt, Human
aacuuuacuauuuugaauaaugc

SEQ ID NO: 773407 - RNA, 22 nt, Human
ucagcagaggggaaggcaucug

SEQ ID NO: 773408 - RNA, 22 nt, Human
cugccagugaaauugugucagu

SEQ ID NO: 773409 - RNA, 23 nt, Human
acaaugcacuuuaaaugguuccc

SEQ ID NO: 773410 - RNA, 22 nt, Human
auacuuuggggguuaguguaga

SEQ ID NO: 773411 - RNA, 22 nt, Human
gccuggcacucacugaagaggc

SEQ ID NO: 773412 - RNA, 23 nt, Human
cuccuggaggguccggcccugcc

SEQ ID NO: 773413 - RNA, 22 nt, Human
acuccaguucucuuguuuauaa

SEQ ID NO: 773414 - RNA, 22 nt, Human
agcauucaugaugacaacagga

SEQ ID NO: 773415 - RNA, 22 nt, Human
ugggagcuccuggagggcagga

SEQ ID NO: 773416 - RNA, 19 nt, Human
cuguccacacacucgcuuc

SEQ ID NO: 773417 - RNA, 22 nt, Human
uuggcugugaaagcuucucaaa

SEQ ID NO: 773418 - RNA, 22 nt, Human
agaguuuguguccuuuaucagg

SEQ ID NO: 773419 - RNA, 22 nt, Human
uccaagaagagccuuucuccuc

SEQ ID NO: 773420 - RNA, 22 nt, Human
caaggcugucuccagcuuccaa

SEQ ID NO: 773421 - RNA, 22 nt, Human
cucaggacagauuccagagaaa

SEQ ID NO: 773422 - RNA, 22 nt, Human
uguaugaaguuacugagccucu

SEQ ID NO: 773423 - RNA, 22 nt, Human
cuguaugucuugugaauuguag

SEQ ID NO: 773424 - RNA, 22 nt, Human
uuucugcaaguguagauaccca

SEQ ID NO: 773425 - RNA, 22 nt, Human
ccugggcagccugcucaaggac

SEQ ID NO: 773426 - RNA, 22 nt, Human
ucugaggugucacaaggccagg

SEQ ID NO: 773427 - RNA, 23 nt, Human
ucagagaggcccccugcagagau

SEQ ID NO: 773428 - RNA, 21 nt, Human
aaacaucucugcuuuuguguc

SEQ ID NO: 773429 - RNA, 22 nt, Human
cauucucaauaguagaugagua

SEQ ID NO: 773430 - RNA, 21 nt, Human
agugacagaggaaggugcaua

SEQ ID NO: 773431 - RNA, 22 nt, Human
ucccaaggugcucggcaacagg

SEQ ID NO: 773432 - RNA, 22 nt, Human
guuuacuuagaugcucaugcag

SEQ ID NO: 773433 - RNA, 22 nt, Human
uagcaacaugguuaucacauua

SEQ ID NO: 773434 - RNA, 22 nt, Human
aagcacagggacuuuaggaaua

SEQ ID NO: 773435 - RNA, 22 nt, Human
uuuauguaguuacggacuauca

SEQ ID NO: 773436 - RNA, 20 nt, Human
augucugaaguaauccauuu

SEQ ID NO: 773437 - RNA, 22 nt, Human
aaaacuguaggaauugggugcc

SEQ ID NO: 773438 - RNA, 22 nt, Human
cacucccucuaguugcauucug

SEQ ID NO: 773439 - RNA, 22 nt, Human
ucugcacauggcgcugguccug

SEQ ID NO: 773440 - RNA, 22 nt, Human
cagcuucuccagaugacccuca

SEQ ID NO: 773441 - RNA, 22 nt, Human
gguccaccuccaagcuggggac

SEQ ID NO: 773442 - RNA, 22 nt, Human
caggguccaucuuucaucacug

SEQ ID NO: 773443 - RNA, 22 nt, Human
uugguuuacuaggauucaaauu

SEQ ID NO: 773444 - RNA, 22 nt, Human
ucauagaaauggaaaguauauu

SEQ ID NO: 773445 - RNA, 22 nt, Human
auugagaaaauaaguauggaua

SEQ ID NO: 773446 - RNA, 17 nt, Human
agccugcugaucucaca

SEQ ID NO: 773447 - RNA, 22 nt, Human
ggucucugagugaggaccuggg

SEQ ID NO: 773448 - RNA, 22 nt, Human
cagcagcagauucagcgucugg

SEQ ID NO: 773449 - RNA, 22 nt, Human
cucuggagggaggcugagcugg

SEQ ID NO: 773450 - RNA, 22 nt, Human
gaagcagcuuucuggugaggag

SEQ ID NO: 773451 - RNA, 22 nt, Human
ugagguggccgaggagcaggac

SEQ ID NO: 773452 - RNA, 22 nt, Human
gcaggcugaugacuggaguugg

SEQ ID NO: 773453 - RNA, 22 nt, Human
agaggaaucugucuagacacaa

SEQ ID NO: 773454 - RNA, 22 nt, Human
guguaaaaacauacuauuucua

SEQ ID NO: 773455 - RNA, 22 nt, Human
ccaggcuguuuucaaacuuggg

SEQ ID NO: 773456 - RNA, 22 nt, Human
guaggcugugugaggcuagaga

SEQ ID NO: 773457 - RNA, 22 nt, Human
uggaggcauuuuagguugucac

SEQ ID NO: 773458 - RNA, 22 nt, Human
cuaagaaauguugugaaugcca

SEQ ID NO: 773459 - RNA, 20 nt, Human
cagauggcacgucagggcau

SEQ ID NO: 773460 - RNA, 22 nt, Human
uuagagagaaccaucaggaucu

SEQ ID NO: 773461 - RNA, 22 nt, Human
cacauaaauggugccauguuuu

SEQ ID NO: 773462 - RNA, 22 nt, Human
cugcagggagaggggacagccu

SEQ ID NO: 773463 - RNA, 22 nt, Human
gccaaccauuggcuucuuguca

SEQ ID NO: 773464 - RNA, 22 nt, Human
ccagguggcccugcccuacucu

SEQ ID NO: 773465 - RNA, 19 nt, Human
ugugagaggcuagcugccc

SEQ ID NO: 773466 - RNA, 22 nt, Human
gcuggagauacugcucaguauc

SEQ ID NO: 773467 - RNA, 22 nt, Human
aagcgccaugguuccugcgcag

SEQ ID NO: 773468 - RNA, 22 nt, Human
caggaacaggggagugaaccug

SEQ ID NO: 773469 - RNA, 22 nt, Human
gcaauagugccuauucucuuga

SEQ ID NO: 773470 - RNA, 22 nt, Human
ucauaaagcuugccugcagugu

SEQ ID NO: 773471 - RNA, 22 nt, Human
gcaagcuggcuguuagaggaug

SEQ ID NO: 773472 - RNA, 22 nt, Human
acugccuugucucuugccuguu

SEQ ID NO: 773473 - RNA, 22 nt, Human
agccuggggcacuucuccaaac

SEQ ID NO: 773474 - RNA, 22 nt, Human
ccauggccaggaaagccaaggu

SEQ ID NO: 773475 - RNA, 22 nt, Human
guguaaggugaaaucaacaaau

SEQ ID NO: 773476 - RNA, 22 nt, Human
aaaggcaugauuaauucugugu

SEQ ID NO: 773477 - RNA, 22 nt, Human
uuuaucugaaaaaacucuugga

SEQ ID NO: 773478 - RNA, 22 nt, Human
guucugggaagguggaccuguu

SEQ ID NO: 773479 - RNA, 17 nt, Human
cuucucuggcagaagau

SEQ ID NO: 773480 - RNA, 22 nt, Human
aggcuggaucucuguugccuuc

SEQ ID NO: 773481 - RNA, 22 nt, Human
cacaucccuggaguuacccagu

SEQ ID NO: 773482 - RNA, 22 nt, Human
auguaacaggugaagcucugag

SEQ ID NO: 773483 - RNA, 22 nt, Human
gccuuucagugccuucuguuca

SEQ ID NO: 773484 - RNA, 22 nt, Human
caggcuugauuauucagacaau

SEQ ID NO: 773485 - RNA, 22 nt, Human
aacacauagacguuugauauca

SEQ ID NO: 773486 - RNA, 20 nt, Human
cuuagcuucuaagguucugg

SEQ ID NO: 773487 - RNA, 22 nt, Human
acaagcaucagguucagcaaua

SEQ ID NO: 773488 - RNA, 22 nt, Human
ugacauaaaccagugagcaaaa

SEQ ID NO: 773489 - RNA, 22 nt, Human
uacugaauggggcaguaagaaa

SEQ ID NO: 773490 - RNA, 22 nt, Human
agaaagcaucuccauuguaggu

SEQ ID NO: 773491 - RNA, 18 nt, Human
uuauucagacgcauauga

SEQ ID NO: 773492 - RNA, 22 nt, Human
acuguucuccuuuggcuauauc

SEQ ID NO: 773493 - RNA, 22 nt, Human
aaccugcaguuuuuauucugag

SEQ ID NO: 773494 - RNA, 22 nt, Human
auucugggucugggugugauca

SEQ ID NO: 773495 - RNA, 22 nt, Human
aaggugucggcagagccgcuuc

SEQ ID NO: 773496 - RNA, 22 nt, Human
uacauuccauguguguguauuc

SEQ ID NO: 773497 - RNA, 22 nt, Human
gcacuuaggguauguacugggc

SEQ ID NO: 773498 - RNA, 22 nt, Human
ucuggcagugaagucaugaggu

SEQ ID NO: 773499 - RNA, 22 nt, Human
auggaucuaccuucaggcucug

SEQ ID NO: 773500 - RNA, 22 nt, Human
aaagcaaugucucugccugguu

SEQ ID NO: 773501 - RNA, 22 nt, Human
caccagaacaagacaggagaau

SEQ ID NO: 773502 - RNA, 15 nt, Human
cugaacucuaaacca

SEQ ID NO: 773503 - RNA, 22 nt, Human
ucagcuucacccagaguuguag

SEQ ID NO: 773504 - RNA, 22 nt, Human
ugcaauaacccaugagauagaa

SEQ ID NO: 773505 - RNA, 22 nt, Human
ggacaugauauuucaggaagac

SEQ ID NO: 773506 - RNA, 22 nt, Human
uugacacaauguauauuuucaa

SEQ ID NO: 773507 - RNA, 22 nt, Human
gcagagccugacgggauuuuuc

SEQ ID NO: 773508 - RNA, 22 nt, Human
agcucccagaagccagagucgg

SEQ ID NO: 773509 - RNA, 22 nt, Human
uuguuuccauugcagacugugu

SEQ ID NO: 773510 - RNA, 22 nt, Human
caucaucaaaacaaauggaguc

SEQ ID NO: 773511 - RNA, 22 nt, Human
agccccuccaguggcauaaaau

SEQ ID NO: 773512 - RNA, 22 nt, Human
cucagggaguagcacaugugga

SEQ ID NO: 773513 - RNA, 22 nt, Human
uggcccagucagcaggagaggg

SEQ ID NO: 773514 - RNA, 21 nt, Human
ugcuuucagacucuuacagaa

SEQ ID NO: 773515 - RNA, 20 nt, Human
cuaagaggaggacuagguuu

SEQ ID NO: 773516 - RNA, 22 nt, Human
guccucagggaauguggcgggu

SEQ ID NO: 773517 - RNA, 22 nt, Human
aggcagguagaaggaucuuuau

SEQ ID NO: 773518 - RNA, 20 nt, Human
caucagugccugacaggucc

SEQ ID NO: 773519 - RNA, 22 nt, Human
cucugagaugauaccuucugga

SEQ ID NO: 773520 - RNA, 22 nt, Human
ucauuacaguguuuauaugucu

SEQ ID NO: 773521 - RNA, 22 nt, Human
acaguguggugauggcacuugc

SEQ ID NO: 773522 - RNA, 18 nt, Human
cauucuuggcagcuuuug

SEQ ID NO: 773523 - RNA, 22 nt, Human
uacaguuacugcauuucuaaua

SEQ ID NO: 773524 - RNA, 22 nt, Human
guuccucauccagucaugacua

SEQ ID NO: 773525 - RNA, 22 nt, Human
uuucaugcucauggaacacagc

SEQ ID NO: 773526 - RNA, 22 nt, Human
cuggcugaauccuagucucaua

SEQ ID NO: 773527 - RNA, 22 nt, Human
cccccagccagcagugcucagc

SEQ ID NO: 773528 - RNA, 23 nt, Human
ugggauagaauuucauggcugcu

SEQ ID NO: 773529 - RNA, 22 nt, Human
cuguuuuugugcugugucuccc

SEQ ID NO: 773530 - RNA, 22 nt, Human
acagggagaugggugaaagcgg

SEQ ID NO: 773531 - RNA, 19 nt, Human
ugggccugcaucugggucu

SEQ ID NO: 773532 - RNA, 22 nt, Human
ucacugugcacauaugauaggu

SEQ ID NO: 773533 - RNA, 22 nt, Human
cacaguaaccccaggacuggga

SEQ ID NO: 773534 - RNA, 22 nt, Human
uccugcuugaaacucugccuuc

SEQ ID NO: 773535 - RNA, 20 nt, Human
gcccugugaugucuugaccu

SEQ ID NO: 773536 - RNA, 20 nt, Human
uucugccuaggguuagccug

SEQ ID NO: 773537 - RNA, 22 nt, Human
aggcucauucuugccucugagc

SEQ ID NO: 773538 - RNA, 22 nt, Human
uacuuuuccuggaaccacugcu

SEQ ID NO: 773539 - RNA, 22 nt, Human
auacacagccauuaugaauuag

SEQ ID NO: 773540 - RNA, 22 nt, Human
gcaucuaaauaaacgugggagu

SEQ ID NO: 773541 - RNA, 21 nt, Human
agggaaauccagucacuuuuc

SEQ ID NO: 773542 - RNA, 22 nt, Human
agcuagggcuuucguagacagu

SEQ ID NO: 773543 - RNA, 22 nt, Human
uggggagcccacucaccucccc

SEQ ID NO: 773544 - RNA, 22 nt, Human
gccuggaggcgagaacccaaug

SEQ ID NO: 773545 - RNA, 22 nt, Human
gcagaugcaacugcaggugagu

SEQ ID NO: 773546 - RNA, 22 nt, Human
cuccugaggaaaagcuugguca

SEQ ID NO: 773547 - RNA, 22 nt, Human
guguggccuugggagaggucug

SEQ ID NO: 773548 - RNA, 22 nt, Human
agugucucagccccaacuagag

SEQ ID NO: 773549 - RNA, 22 nt, Human
gucugccauguggagaaagcca

SEQ ID NO: 773550 - RNA, 22 nt, Human
auauuuucacagaacuugcaaa

SEQ ID NO: 773551 - RNA, 22 nt, Human
acauuucucagguaagucauuu

SEQ ID NO: 773552 - RNA, 21 nt, Human
uccuuauauuugaauacuuua

SEQ ID NO: 773553 - RNA, 22 nt, Human
cuuuaauucagauuugaaggga

SEQ ID NO: 773554 - RNA, 22 nt, Human
ugcugcuuuaaaaagugcugau

SEQ ID NO: 773555 - RNA, 22 nt, Human
uagugcuuaacacaaagugauu

SEQ ID NO: 773556 - RNA, 18 nt, Human
gucacagcagagaacugc

SEQ ID NO: 773557 - RNA, 22 nt, Human
uagaaacucacguuaucauugc

SEQ ID NO: 773558 - RNA, 22 nt, Human
auugaguaccuccagauucaua

SEQ ID NO: 773559 - RNA, 22 nt, Human
ugcuccuauccuccugcugaca

SEQ ID NO: 773560 - RNA, 22 nt, Human
ugugcaaucuugagcaauuuau

SEQ ID NO: 773561 - RNA, 22 nt, Human
acugaggucaugcauaguuucu

SEQ ID NO: 773562 - RNA, 22 nt, Human
ggucuggaguagaugagucaug

SEQ ID NO: 773563 - RNA, 22 nt, Human
agcauagaguccugagggcagg

SEQ ID NO: 773564 - RNA, 22 nt, Human
guagacagcaaccaaaccaggu

SEQ ID NO: 773565 - RNA, 22 nt, Human
aauguauguguauaucaaauca

SEQ ID NO: 773566 - RNA, 22 nt, Human
aggcucagagaugaguaagcac

SEQ ID NO: 773567 - RNA, 19 nt, Human
cagcaauaaugccagaugg

SEQ ID NO: 773568 - RNA, 22 nt, Human
caucugcuguuccuuggacuca

SEQ ID NO: 773569 - RNA, 22 nt, Human
agggcucagggucaccaucugu

SEQ ID NO: 773570 - RNA, 22 nt, Human
gccucucugggcugccgaggcu

SEQ ID NO: 773571 - RNA, 22 nt, Human
aacuggcauaugaacuuguucu

SEQ ID NO: 773572 - RNA, 21 nt, Human
ucaggaagagccaguucaugc

SEQ ID NO: 773573 - RNA, 22 nt, Human
ucuguucuuuccaacaagacag

SEQ ID NO: 773574 - RNA, 22 nt, Human
acuaaauacacacauuuguuca

SEQ ID NO: 773575 - RNA, 22 nt, Human
uguuugaaacuuugaucacuaa

SEQ ID NO: 773576 - RNA, 22 nt, Human
gcugagggcuguaacagcagag

SEQ ID NO: 773577 - RNA, 22 nt, Human
uugcauuacauuugcucagucu

SEQ ID NO: 773578 - RNA, 22 nt, Human
uggcagcagcuaacuuaggcag

SEQ ID NO: 773579 - RNA, 19 nt, Human
gcaucauuugucucuucuu

SEQ ID NO: 773580 - RNA, 22 nt, Human
uugauucagaaaaagauggaga

SEQ ID NO: 773581 - RNA, 22 nt, Human
auugucuuuggugcuuccagga

SEQ ID NO: 773582 - RNA, 22 nt, Human
cagggcugcuggccgugcccuc

SEQ ID NO: 773583 - RNA, 22 nt, Human
acagccagugcuccgugaggac

SEQ ID NO: 773584 - RNA, 22 nt, Human
ccacaggacaguuaaugugcag

SEQ ID NO: 773585 - RNA, 22 nt, Human
ucaccagggcuccagccagccu

SEQ ID NO: 773586 - RNA, 22 nt, Human
cauguguaaggcucacaggcag

SEQ ID NO: 773587 - RNA, 22 nt, Human
aguguguagcauuuggcaggca

SEQ ID NO: 773588 - RNA, 22 nt, Human
uucagagacagcaaccaggaca

SEQ ID NO: 773589 - RNA, 19 nt, Human
cugagucaaagguuguggg

SEQ ID NO: 773590 - RNA, 22 nt, Human
cagggaagagccgaugcugcag

SEQ ID NO: 773591 - RNA, 22 nt, Human
cugaauaauuuucuguuguaug

SEQ ID NO: 773592 - RNA, 22 nt, Human
gcauugaauccuaucaggcaaa

SEQ ID NO: 773593 - RNA, 22 nt, Human
caccaggggcagagaccaaagu

SEQ ID NO: 773594 - RNA, 22 nt, Human
uucaagacugcgacuaaugccc

SEQ ID NO: 773595 - RNA, 22 nt, Human
agcuccccucguuucucuccau

SEQ ID NO: 773596 - RNA, 22 nt, Human
acagcagauuucccugggcucc

SEQ ID NO: 773597 - RNA, 22 nt, Human
auccagcuuugucuggucuucg

SEQ ID NO: 773598 - RNA, 22 nt, Human
gggcaugccugagccugccacu

SEQ ID NO: 773599 - RNA, 22 nt, Human
ucuccuggccuuuagguuaagg

SEQ ID NO: 773600 - RNA, 22 nt, Human
ccaggccuggacggguggccug

SEQ ID NO: 773601 - RNA, 22 nt, Human
aagacauuggcauugacuguaa

SEQ ID NO: 773602 - RNA, 22 nt, Human
cuauuuguaaagugccuggugu

SEQ ID NO: 773603 - RNA, 22 nt, Human
gaggaagaauugguuauuggag

SEQ ID NO: 773604 - RNA, 22 nt, Human
uggaagaccagacuucccgaac

SEQ ID NO: 773605 - RNA, 22 nt, Human
ucaaagaacaucaucugaaaug

SEQ ID NO: 773606 - RNA, 22 nt, Human
ugcagggccaugguggcggcug

SEQ ID NO: 773607 - RNA, 21 nt, Human
cuuugguuuccuccugccuuc

SEQ ID NO: 773608 - RNA, 22 nt, Human
uuucuaagacauuugucaucuu

SEQ ID NO: 773609 - RNA, 22 nt, Human
uuuccaggagaaagagagccuu

SEQ ID NO: 773610 - RNA, 22 nt, Human
ugcuuggagaaucagucccagc

SEQ ID NO: 773611 - RNA, 22 nt, Human
cucugugauuuugugagccaga

SEQ ID NO: 773612 - RNA, 22 nt, Human
cucaucaccacauauaacaaag

SEQ ID NO: 773613 - RNA, 22 nt, Human
uagagaugugauauagcagagu

SEQ ID NO: 773614 - RNA, 22 nt, Human
ccaggccuucugaggacacucu

SEQ ID NO: 773615 - RNA, 22 nt, Human
agccagaaaaacaccaagagga

SEQ ID NO: 773616 - RNA, 22 nt, Human
gaggccacggaagggagcugug

SEQ ID NO: 773617 - RNA, 22 nt, Human
gcucugggccgggcaccagccu

SEQ ID NO: 773618 - RNA, 22 nt, Human
ucaugacaucuguuuaucucaa

SEQ ID NO: 773619 - RNA, 22 nt, Human
gaaagguuuggcuuuucaguag

SEQ ID NO: 773620 - RNA, 22 nt, Human
ggacaaaucucauuauuucuga

SEQ ID NO: 773621 - RNA, 22 nt, Human
aggaugugagccagccuggccu

SEQ ID NO: 773622 - RNA, 22 nt, Human
agguacauggggugugugcacg

SEQ ID NO: 773623 - RNA, 22 nt, Human
ggcaucuguccaucucuccagc

SEQ ID NO: 773624 - RNA, 22 nt, Human
aagauuucugcuccugagagaa

SEQ ID NO: 773625 - RNA, 22 nt, Human
ccucuggccacaugggacauag

SEQ ID NO: 773626 - RNA, 22 nt, Human
aguaacagaaggccugacuuaa

SEQ ID NO: 773627 - RNA, 22 nt, Human
gcuggcuggaggugaggaagaa

SEQ ID NO: 773628 - RNA, 22 nt, Human
cugcccagaagcuuagagcuua

SEQ ID NO: 773629 - RNA, 22 nt, Human
gacaggcuagguugcuguccuc

SEQ ID NO: 773630 - RNA, 22 nt, Human
caggaaauucuuuuguuugugc

SEQ ID NO: 773631 - RNA, 22 nt, Human
ggcagugccugaugcugcagga

SEQ ID NO: 773632 - RNA, 22 nt, Human
gcuguccugggaacaggcacua

SEQ ID NO: 773633 - RNA, 22 nt, Human
auucuaaagcuuguggagcuua

SEQ ID NO: 773634 - RNA, 22 nt, Human
ugcuggccuguccacgggcugu

SEQ ID NO: 773635 - RNA, 22 nt, Human
ucaaaugaggcugaugaaugug

SEQ ID NO: 773636 - RNA, 22 nt, Human
agaagcagcuuucaaggugauu

SEQ ID NO: 773637 - RNA, 22 nt, Human
agcagcugccagagagaguucc

SEQ ID NO: 773638 - RNA, 22 nt, Human
gccugggauucccagaggggca

SEQ ID NO: 773639 - RNA, 22 nt, Human
agaccagcugccucccagggcc

SEQ ID NO: 773640 - RNA, 22 nt, Human
caggggacauuaaagcuccaua

SEQ ID NO: 773641 - RNA, 22 nt, Human
ggccuggaguuuggggaauaga

SEQ ID NO: 773642 - RNA, 22 nt, Human
ucugcaaauauuagcuuagaca

SEQ ID NO: 773643 - RNA, 22 nt, Human
agagcuccgugccuggcugcca

SEQ ID NO: 773644 - RNA, 22 nt, Human
cugucccucaucaccucugggu

SEQ ID NO: 773645 - RNA, 22 nt, Human
caggccugcaggaaaggcuccc

SEQ ID NO: 773646 - RNA, 22 nt, Human
aauguuugagcaucuacaugcu

SEQ ID NO: 773647 - RNA, 22 nt, Human
gcuguguaccuacuaacugcuu

SEQ ID NO: 773648 - RNA, 22 nt, Human
acagguguagcaggagcaucaa

SEQ ID NO: 773649 - RNA, 22 nt, Human
aggggugaaggcccgauaggag

SEQ ID NO: 773650 - RNA, 22 nt, Human
ccuucaaaacacuaguuuuuga

SEQ ID NO: 773651 - RNA, 20 nt, Human
acugggccuaggggaggcau

SEQ ID NO: 773652 - RNA, 22 nt, Human
ucucccucuuugucugcuuugg

SEQ ID NO: 773653 - RNA, 22 nt, Human
acauucuaacauuguacagaua

SEQ ID NO: 773654 - RNA, 22 nt, Human
agcauuuaggagaauuugagaa

SEQ ID NO: 773655 - RNA, 22 nt, Human
ccagggaaacagcccaguguga

SEQ ID NO: 773656 - RNA, 22 nt, Human
agaaaacuugucacagcucuca

SEQ ID NO: 773657 - RNA, 22 nt, Human
cucugggugagacagaccuggu

SEQ ID NO: 773658 - RNA, 22 nt, Human
agaaucuaaguacacagacaga

SEQ ID NO: 773659 - RNA, 22 nt, Human
ggcugugagcaggcagaaugcu

SEQ ID NO: 773660 - RNA, 22 nt, Human
cagugcuggagauggguggaac

SEQ ID NO: 773661 - RNA, 22 nt, Human
ucuuuaaugugauuguaauuau

SEQ ID NO: 773662 - RNA, 22 nt, Human
uggacugauuuucauuuuaaau

SEQ ID NO: 773663 - RNA, 22 nt, Human
agaugcugccaggccccucagu

SEQ ID NO: 773664 - RNA, 22 nt, Human
ugggcagacgcuguuggaaggc

SEQ ID NO: 773665 - RNA, 22 nt, Human
gggagcaggacauaauagcaau

SEQ ID NO: 773666 - RNA, 22 nt, Human
gugucaugggguuuguuauaca

SEQ ID NO: 773667 - RNA, 22 nt, Human
augcuucuuguauuuggcugac

SEQ ID NO: 773668 - RNA, 22 nt, Human
augcuaaauccagaagcaguca

SEQ ID NO: 773669 - RNA, 18 nt, Human
ugccagccgacuggccug

SEQ ID NO: 773670 - RNA, 22 nt, Human
aaacacuuuagaaagggacuug

SEQ ID NO: 773671 - RNA, 22 nt, Human
ccugggugaaaucucuccugca

SEQ ID NO: 773672 - RNA, 22 nt, Human
cucacuggcaagacuacaggug

SEQ ID NO: 773673 - RNA, 22 nt, Human
ugaggacauugagacuggagac

SEQ ID NO: 773674 - RNA, 22 nt, Human
ggaagauuucccguagcugugc

SEQ ID NO: 773675 - RNA, 22 nt, Human
caggagguggagcucaaguggu

SEQ ID NO: 773676 - RNA, 22 nt, Human
acacacacaagcagguugugga

SEQ ID NO: 773677 - RNA, 22 nt, Human
ccaaggugggcagaucacgagg

SEQ ID NO: 773678 - RNA, 22 nt, Human
cagugcuuuuaaaacaacauca

SEQ ID NO: 773679 - RNA, 20 nt, Human
aucuugggauugagauugcc

SEQ ID NO: 773680 - RNA, 22 nt, Human
caugugugguuaccuacuugac

SEQ ID NO: 773681 - RNA, 22 nt, Human
acaaggcuuuggaggguucuua

SEQ ID NO: 773682 - RNA, 22 nt, Human
aauucagugguuucugcaacaa

SEQ ID NO: 773683 - RNA, 22 nt, Human
cuugcuggugguguuuucuaug

SEQ ID NO: 773684 - RNA, 22 nt, Human
ccugucaguugcugucagggau

SEQ ID NO: 773685 - RNA, 22 nt, Human
aaaguucagugccuucuauaca

SEQ ID NO: 773686 - RNA, 22 nt, Human
ucacccccuguauuaguagcua

SEQ ID NO: 773687 - RNA, 22 nt, Human
gacugaggugaccuaggacuac

SEQ ID NO: 773688 - RNA, 19 nt, Human
aagagggaaagugcuaugc

SEQ ID NO: 773689 - RNA, 22 nt, Human
ucuggcucaaaauacguacucu

SEQ ID NO: 773690 - RNA, 22 nt, Human
uuccaagugcccauauuucauc

SEQ ID NO: 773691 - RNA, 22 nt, Human
agcagaugcgucugagugggag

SEQ ID NO: 773692 - RNA, 22 nt, Human
uaggagaagagucagggccuaa

SEQ ID NO: 773693 - RNA, 22 nt, Human
gucaggggccaugggccaagga

SEQ ID NO: 773694 - RNA, 17 nt, Human
caauuucauagguuuug

SEQ ID NO: 773695 - RNA, 22 nt, Human
uggcuucucauuugcauuaaac

SEQ ID NO: 773696 - RNA, 22 nt, Human
gucauuuaaagaccauuguggg

SEQ ID NO: 773697 - RNA, 22 nt, Human
gcuguggguacaaauacacaau

SEQ ID NO: 773698 - RNA, 22 nt, Human
cuccuggcacucaguguggaag

SEQ ID NO: 773699 - RNA, 22 nt, Human
acugagagcguguacaaacuua

SEQ ID NO: 773700 - RNA, 22 nt, Human
ccucagugaccuauugcauuca

SEQ ID NO: 773701 - RNA, 22 nt, Human
uccagggcuugacagggugccu

SEQ ID NO: 773702 - RNA, 22 nt, Human
agggccuggugaccuggguccu

SEQ ID NO: 773703 - RNA, 22 nt, Human
auagaacagaaacagaugcaca

SEQ ID NO: 773704 - RNA, 22 nt, Human
cauggcuuuugcuuuugcccau

SEQ ID NO: 773705 - RNA, 22 nt, Human
cauuuguaggaugcuucuuguu

SEQ ID NO: 773706 - RNA, 22 nt, Human
gagguggcuccuucagggaaua

SEQ ID NO: 773707 - RNA, 22 nt, Human
cagagaugugauccagcugucu

SEQ ID NO: 773708 - RNA, 22 nt, Human
uucaacaucuuggagcuggaac

SEQ ID NO: 773709 - RNA, 22 nt, Human
cuugcugugugccaucagggcu

SEQ ID NO: 773710 - RNA, 22 nt, Human
agggagugguuaagaaggugca

SEQ ID NO: 773711 - RNA, 22 nt, Human
aggccuccuggcuccaggccuu

SEQ ID NO: 773712 - RNA, 22 nt, Human
gagaauuacuguuuuuauaaca

SEQ ID NO: 773713 - RNA, 22 nt, Human
cagagcagggguuucccagguu

SEQ ID NO: 773714 - RNA, 18 nt, Human
uggagagcagcagugggg

SEQ ID NO: 773715 - RNA, 20 nt, Human
gaugggaaucggagcuggua

SEQ ID NO: 773716 - RNA, 22 nt, Human
ggcucuugcccgcccaggcugg

SEQ ID NO: 773717 - RNA, 21 nt, Human
ucugggcuuucuuauaaggca

SEQ ID NO: 773718 - RNA, 22 nt, Human
ccagcuuuuccucucauugcuu

SEQ ID NO: 773719 - RNA, 22 nt, Human
aacaggaccccgcguggugucu

SEQ ID NO: 773720 - RNA, 22 nt, Human
ggcccagcccgagucagccuuc

SEQ ID NO: 773721 - RNA, 22 nt, Human
ucccaggagcaccuuuugagcc

SEQ ID NO: 773722 - RNA, 22 nt, Human
cccuccugugccugaggccagc

SEQ ID NO: 773723 - RNA, 22 nt, Human
agguaauuacuagaguuauuua

SEQ ID NO: 773724 - RNA, 22 nt, Human
aagacuugaccagguugaaggc

SEQ ID NO: 773725 - RNA, 22 nt, Human
ggacagugaaucuggagguaua

SEQ ID NO: 773726 - RNA, 22 nt, Human
gcaaggauguacugcaauagga

SEQ ID NO: 773727 - RNA, 22 nt, Human
agcuuacaccccccaagauucu

SEQ ID NO: 773728 - RNA, 22 nt, Human
cuucaccuccuccucugugggc

SEQ ID NO: 773729 - RNA, 22 nt, Human
cucauucuuucacagucugugg

SEQ ID NO: 773730 - RNA, 22 nt, Human
ugcuggggcucugaccacucca

SEQ ID NO: 773731 - RNA, 22 nt, Human
auguggccuuagguucuagugg

SEQ ID NO: 773732 - RNA, 22 nt, Human
agagggcauaaaauagagcacg

SEQ ID NO: 773733 - RNA, 22 nt, Human
uuaaacaccugucuaguguagc

SEQ ID NO: 773734 - RNA, 20 nt, Human
ugacacaaauugcuuucuca

SEQ ID NO: 773735 - RNA, 22 nt, Human
agcagcuggugcaacucuaaga

SEQ ID NO: 773736 - RNA, 22 nt, Human
agauguggccggcuagggagag

SEQ ID NO: 773737 - RNA, 22 nt, Human
acacaugauaagaaaguuuaaa

SEQ ID NO: 773738 - RNA, 22 nt, Human
ucagcaucacgugguccgagaa

SEQ ID NO: 773739 - RNA, 22 nt, Human
uuuacagugagagcuuagugag

SEQ ID NO: 773740 - RNA, 22 nt, Human
ccagggagccuggugugucagc

SEQ ID NO: 773741 - RNA, 21 nt, Human
gauugaaaccauggcagugag

SEQ ID NO: 773742 - RNA, 22 nt, Human
ccagcucucuuugaagcauaaa

SEQ ID NO: 773743 - RNA, 22 nt, Human
cuggugccuccucccugugcuu

SEQ ID NO: 773744 - RNA, 22 nt, Human
aagagaaggcccugacccaccc

SEQ ID NO: 773745 - RNA, 22 nt, Human
ugcaggaggcuuuauucaggau

SEQ ID NO: 773746 - RNA, 22 nt, Human
ccucaaauagcccccagucuag

SEQ ID NO: 773747 - RNA, 22 nt, Human
ucucugucugcacccaaucaau

SEQ ID NO: 773748 - RNA, 19 nt, Human
ccuccccuuggaccagcaa

SEQ ID NO: 773749 - RNA, 22 nt, Human
uuuugguucugggauacagaga

SEQ ID NO: 773750 - RNA, 22 nt, Human
aacacugagaggggaguggcac

SEQ ID NO: 773751 - RNA, 22 nt, Human
cacaagggcuuuguaggcuuug

SEQ ID NO: 773752 - RNA, 22 nt, Human
uccaggcaugucugaguccuuc

SEQ ID NO: 773753 - RNA, 22 nt, Human
uucuuauuuuccugaggaagaa

SEQ ID NO: 773754 - RNA, 22 nt, Human
cuuggccugcccagccagaagg

SEQ ID NO: 773755 - RNA, 22 nt, Human
aaaauuauagaucuagugccug

SEQ ID NO: 773756 - RNA, 22 nt, Human
agccaggcggggcagguuuccu

SEQ ID NO: 773757 - RNA, 22 nt, Human
aggcauugcugguauuggaagu

SEQ ID NO: 773758 - RNA, 22 nt, Human
uguacacauuuuuauguuaaca

SEQ ID NO: 773759 - RNA, 18 nt, Human
gcuucauggaaggguugu

SEQ ID NO: 773760 - RNA, 22 nt, Human
aagcugaagacacagcuccagu

SEQ ID NO: 773761 - RNA, 22 nt, Human
gaaccucuauauuugugacauc

SEQ ID NO: 773762 - RNA, 22 nt, Human
aaacugcagccuugaguucagg

SEQ ID NO: 773763 - RNA, 22 nt, Human
auguuuuauauuuugcagcagu

SEQ ID NO: 773764 - RNA, 22 nt, Human
acugagguggggucugcuugga

SEQ ID NO: 773765 - RNA, 22 nt, Human
auuuccucaugaucauaaugca

SEQ ID NO: 773766 - RNA, 22 nt, Human
agucacaugcauuuucuucaau

SEQ ID NO: 773767 - RNA, 22 nt, Human
uggacagguugaguaggaggag

SEQ ID NO: 773768 - RNA, 21 nt, Human
cucagggcuugguguccucau

SEQ ID NO: 773769 - RNA, 21 nt, Human
uccacaaguuagaaggaaauu

SEQ ID NO: 773770 - RNA, 22 nt, Human
uuaugaaggaucagguacuugg

SEQ ID NO: 773771 - RNA, 19 nt, Human
ccuggcugugaagccugca

SEQ ID NO: 773772 - RNA, 22 nt, Human
ugaauggauauaacaacagugu

SEQ ID NO: 773773 - RNA, 22 nt, Human
aacccaggaggcagaggcugca

SEQ ID NO: 773774 - RNA, 22 nt, Human
agagcaggcauaaagcuuugaa

SEQ ID NO: 773775 - RNA, 22 nt, Human
gcuggcagguaaagccccgggg

SEQ ID NO: 773776 - RNA, 22 nt, Human
ugugggcacuaaugacaugcag

SEQ ID NO: 773777 - RNA, 22 nt, Human
cucugagacucaagugaguggg

SEQ ID NO: 773778 - RNA, 22 nt, Human
uccuucagcucucuauuuagau

SEQ ID NO: 773779 - RNA, 22 nt, Human
ccucuucucaacuccagccaga

SEQ ID NO: 773780 - RNA, 22 nt, Human
gucugggguacuuucaucugau

SEQ ID NO: 773781 - RNA, 19 nt, Human
uccuucacuucuuaccagg

SEQ ID NO: 773782 - RNA, 22 nt, Human
ugcccucagcagcagcuccugc

SEQ ID NO: 773783 - RNA, 22 nt, Human
ccccaggagaaaucuuaaacua

SEQ ID NO: 773784 - RNA, 22 nt, Human
acacaggacagggauguguuuu

SEQ ID NO: 773785 - RNA, 22 nt, Human
agcucccagucuccucuccaug

SEQ ID NO: 773786 - RNA, 22 nt, Human
ccaggagcaacuugaaggcaag

SEQ ID NO: 773787 - RNA, 22 nt, Human
ucucugugaauggcgucaccug

SEQ ID NO: 773788 - RNA, 18 nt, Human
ccagagcuggcuccucgc

SEQ ID NO: 773789 - RNA, 19 nt, Human
cuccaaguuaagagggagg

SEQ ID NO: 773790 - RNA, 22 nt, Human
cugcuucuagcaccaagucccu

SEQ ID NO: 773791 - RNA, 22 nt, Human
augugugccugagugauggacu

SEQ ID NO: 773792 - RNA, 22 nt, Human
cagaagccugccucagaugcac

SEQ ID NO: 773793 - RNA, 22 nt, Human
agaauacaguaugcaaaaagau

SEQ ID NO: 773794 - RNA, 20 nt, Human
uuucacuguggugcuggaga

SEQ ID NO: 773795 - RNA, 22 nt, Human
gagggcugugaaggagcggguu

SEQ ID NO: 773796 - RNA, 17 nt, Human
caguggucugagguaug

SEQ ID NO: 773797 - RNA, 22 nt, Human
augcuguguccuagugaaagaa

SEQ ID NO: 773798 - RNA, 18 nt, Human
gucuguguggcuugggga

SEQ ID NO: 773799 - RNA, 22 nt, Human
agaacaggaggaagccagcucc

SEQ ID NO: 773800 - RNA, 22 nt, Human
ccagaagacaagaauguucuua

SEQ ID NO: 773801 - RNA, 22 nt, Human
cuuguccuuuacuugagacuca

SEQ ID NO: 773802 - RNA, 23 nt, Human
agcagguagguugaaauuuuccu

SEQ ID NO: 773803 - RNA, 22 nt, Human
uagcagcauuuuuguagaguau

SEQ ID NO: 773804 - RNA, 22 nt, Human
aggaugccuucauugcauggcc

SEQ ID NO: 773805 - RNA, 22 nt, Human
agcccugguagccugcugccau

SEQ ID NO: 773806 - RNA, 22 nt, Human
ucacugggagagcugacaagga

SEQ ID NO: 773807 - RNA, 22 nt, Human
ccuauugacaauucucuucucc

SEQ ID NO: 773808 - RNA, 22 nt, Human
uauuuggaauagcuugcuaaug

SEQ ID NO: 773809 - RNA, 22 nt, Human
auucagacucuugagcaguccc

SEQ ID NO: 773810 - RNA, 22 nt, Human
aggcuggagugcaauggcguga

SEQ ID NO: 773811 - RNA, 20 nt, Human
gagacagcaaaagccucucc

SEQ ID NO: 773812 - RNA, 22 nt, Human
auaaccugguaguauuaaaugu

SEQ ID NO: 773813 - RNA, 22 nt, Human
auucugaugcuucacaaaggua

SEQ ID NO: 773814 - RNA, 22 nt, Human
ccugugugauuggaagcugaga

SEQ ID NO: 773815 - RNA, 22 nt, Human
acaauauacacauccuaauggg

SEQ ID NO: 773816 - RNA, 22 nt, Human
aggcucugugcauccuccccaa

SEQ ID NO: 773817 - RNA, 22 nt, Human
ucagaacauugacauucuuauu

SEQ ID NO: 773818 - RNA, 23 nt, Human
ccucuccagacacugggccuugu

SEQ ID NO: 773819 - RNA, 22 nt, Human
acaggguuguggccuuaaaggc

SEQ ID NO: 773820 - RNA, 22 nt, Human
cgaagacagaccaucugaguag

SEQ ID NO: 773821 - RNA, 21 nt, Human
aguuaaaccuuuagagaacua

SEQ ID NO: 773822 - RNA, 22 nt, Human
uaagguuugcuuaucuucgccu

SEQ ID NO: 773823 - RNA, 22 nt, Human
aauguguuaguauugauuuguc

SEQ ID NO: 773824 - RNA, 22 nt, Human
agccuaggagguuggggcugca

SEQ ID NO: 773825 - RNA, 22 nt, Human
cuguauuuguccucuauuuauu

SEQ ID NO: 773826 - RNA, 21 nt, Human
auugcucuguugugucuagaa

SEQ ID NO: 773827 - RNA, 22 nt, Human
ucugcuguauuagguugaacug

SEQ ID NO: 773828 - RNA, 22 nt, Human
gcuacagacugagcauggcucu

SEQ ID NO: 773829 - RNA, 22 nt, Human
aaagcaaugcuuguggaaugua

SEQ ID NO: 773830 - RNA, 22 nt, Human
gaugcaaagauaaaacagacgc

SEQ ID NO: 773831 - RNA, 22 nt, Human
gggcugcuacgagaacugaaua

SEQ ID NO: 773832 - RNA, 22 nt, Human
aggugggcacaccucccuucuc

SEQ ID NO: 773833 - RNA, 22 nt, Human
ugcccuccacaguggcuccacc

SEQ ID NO: 773834 - RNA, 22 nt, Human
gaaaaucugcuuauauuauuuu

SEQ ID NO: 773835 - RNA, 22 nt, Human
uuacaugacaaagcuuuggcuc

SEQ ID NO: 773836 - RNA, 21 nt, Human
gccagggaagagaguuggcug

SEQ ID NO: 773837 - RNA, 22 nt, Human
guucaaauuuucuaggugggug

SEQ ID NO: 773838 - RNA, 22 nt, Human
uucaaaucccugcuccacuauu

SEQ ID NO: 773839 - RNA, 22 nt, Human
caaauagugucacauugugagg

SEQ ID NO: 773840 - RNA, 22 nt, Human
gccugcuggaggagccucaggg

SEQ ID NO: 773841 - RNA, 22 nt, Human
uugucugcuccucccagccuca

SEQ ID NO: 773842 - RNA, 22 nt, Human
cugcugugcauauuuaucuagg

SEQ ID NO: 773843 - RNA, 22 nt, Human
cuuuagauuucuauguaucacu

SEQ ID NO: 773844 - RNA, 22 nt, Human
gcucccugccuacacggaccuu

SEQ ID NO: 773845 - RNA, 22 nt, Human
guguuuaugagugaccuugucu

SEQ ID NO: 773846 - RNA, 22 nt, Human
augaaauucaucugagaaugcu

SEQ ID NO: 773847 - RNA, 22 nt, Human
aaucuuuuaggggauccugagg

SEQ ID NO: 773848 - RNA, 19 nt, Human
ggcagcucuugucuucugc

SEQ ID NO: 773849 - RNA, 22 nt, Human
uaggcaggugugcacugcccac

SEQ ID NO: 773850 - RNA, 22 nt, Human
auggaaauguuaagucaguccg

SEQ ID NO: 773851 - RNA, 19 nt, Human
uuccuuagaggaggcggug

SEQ ID NO: 773852 - RNA, 22 nt, Human
auauuuguuagagucuaugugu

SEQ ID NO: 773853 - RNA, 22 nt, Human
accgaaggaaacuggaaccguu

SEQ ID NO: 773854 - RNA, 22 nt, Human
uguucuuucaguuagacacagu

SEQ ID NO: 773855 - RNA, 22 nt, Human
uggucccugccugccaagugcu

SEQ ID NO: 773856 - RNA, 22 nt, Human
gccuggaguuguggugaagcca

SEQ ID NO: 773857 - RNA, 22 nt, Human
ugaagcuugagugucaguuccu

SEQ ID NO: 773858 - RNA, 23 nt, Human
ucacagagcauacugcauuuugc

SEQ ID NO: 773859 - RNA, 22 nt, Human
uccagagcuguccuacugugag

SEQ ID NO: 773860 - RNA, 22 nt, Human
ugcuuuauuuauaaaauagcaa

SEQ ID NO: 773861 - RNA, 22 nt, Human
agcugcagcuguuuucugagug

SEQ ID NO: 773862 - RNA, 22 nt, Human
cagagguagaacuggcccucac

SEQ ID NO: 773863 - RNA, 22 nt, Human
guggccagaaccaggagaauga

SEQ ID NO: 773864 - RNA, 22 nt, Human
gagcaucucuauagugacugug

SEQ ID NO: 773865 - RNA, 22 nt, Human
uugaguucuggucuuuuaaaag

SEQ ID NO: 773866 - RNA, 22 nt, Human
cugcugggcagaggcugcauga

SEQ ID NO: 773867 - RNA, 22 nt, Human
guguauggacacaugucauguu

SEQ ID NO: 773868 - RNA, 19 nt, Human
agggaguuuauauuugcac

SEQ ID NO: 773869 - RNA, 22 nt, Human
uggaaaggacaguugcugauag

SEQ ID NO: 773870 - RNA, 22 nt, Human
ccugucugaaggcagggggaug

SEQ ID NO: 773871 - RNA, 22 nt, Human
acaggacaauuuauaaugggca

SEQ ID NO: 773872 - RNA, 22 nt, Human
ugaagccacagagcaucugccu

SEQ ID NO: 773873 - RNA, 20 nt, Human
aucaaaggcugauucagucc

SEQ ID NO: 773874 - RNA, 22 nt, Human
ccuugcucaucccccagugccu

SEQ ID NO: 773875 - RNA, 22 nt, Human
gccucaggccuauagcugcugu

SEQ ID NO: 773876 - RNA, 22 nt, Human
ugguagcaacaucucaguggcu

SEQ ID NO: 773877 - RNA, 22 nt, Human
cugggagauugcuagagaugca

SEQ ID NO: 773878 - RNA, 22 nt, Human
cccuucccuucugggagaucca

SEQ ID NO: 773879 - RNA, 22 nt, Human
gcacuugucaaauauuauagua

SEQ ID NO: 773880 - RNA, 22 nt, Human
agagaaggucacuaaggaccca

SEQ ID NO: 773881 - RNA, 22 nt, Human
caauaagauguauugagcagag

SEQ ID NO: 773882 - RNA, 22 nt, Human
cuucagcaccauagcuccuucu

SEQ ID NO: 773883 - RNA, 21 nt, Human
auuuucugugauagcugucuc

SEQ ID NO: 773884 - RNA, 22 nt, Human
ucagagcagacuuugaaggagg

SEQ ID NO: 773885 - RNA, 22 nt, Human
ucccagcugcugagauagugcu

SEQ ID NO: 773886 - RNA, 22 nt, Human
ggacugaaaucuuuccauguca

SEQ ID NO: 773887 - RNA, 22 nt, Human
aagccacuuggggaaagaugga

SEQ ID NO: 773888 - RNA, 20 nt, Human
gggagcuggaauugucuuag

SEQ ID NO: 773889 - RNA, 22 nt, Human
auggcagagaaagcgagccaca

SEQ ID NO: 773890 - RNA, 22 nt, Human
acaggaugggcgcacagagcua

SEQ ID NO: 773891 - RNA, 22 nt, Human
acaacacauguguauaugugug

SEQ ID NO: 773892 - RNA, 22 nt, Human
ggcagguggaaggucuccauuc

SEQ ID NO: 773893 - RNA, 20 nt, Human
cucuuaaauguaaaguaggc

SEQ ID NO: 773894 - RNA, 22 nt, Human
auugaguaguaggaaaauaacu

SEQ ID NO: 773895 - RNA, 22 nt, Human
agucuacaaagggaagcccuuu

SEQ ID NO: 773896 - RNA, 22 nt, Human
aggacccagaggcagaggacgu

SEQ ID NO: 773897 - RNA, 22 nt, Human
uucagcagguggugaguucugc

SEQ ID NO: 773898 - RNA, 22 nt, Human
uuacauguggagucugauugca

SEQ ID NO: 773899 - RNA, 22 nt, Human
cuguaugugaaaaugucaagug

SEQ ID NO: 773900 - RNA, 22 nt, Human
aucaggaagaauuggaugcuac

SEQ ID NO: 773901 - RNA, 21 nt, Human
uggcuucagccauuuucucug

SEQ ID NO: 773902 - RNA, 22 nt, Human
guuaaugccuacauauuaagca

SEQ ID NO: 773903 - RNA, 22 nt, Human
gugcagagugucuguggacuga

SEQ ID NO: 773904 - RNA, 22 nt, Human
aucugaagaggucauggcugac

SEQ ID NO: 773905 - RNA, 22 nt, Human
aguauuguaaacuuccuaagga

SEQ ID NO: 773906 - RNA, 22 nt, Human
uucuugauuagucucaugccaa

SEQ ID NO: 773907 - RNA, 22 nt, Human
gagagaggccuccauguacuga

SEQ ID NO: 773908 - RNA, 22 nt, Human
gggcacugaaugccaagcuagg

SEQ ID NO: 773909 - RNA, 22 nt, Human
ggagggcucgucauccaccacu

SEQ ID NO: 773910 - RNA, 22 nt, Human
auguuuuucauaccaguguugg

SEQ ID NO: 773911 - RNA, 22 nt, Human
cuggagaaguacugagacauuu

SEQ ID NO: 773912 - RNA, 22 nt, Human
cagagcuuucugucacauuagu

SEQ ID NO: 773913 - RNA, 22 nt, Human
aaaaggcucuucaaaauggaag

SEQ ID NO: 773914 - RNA, 22 nt, Human
gccugccugaaggcuguaccag

SEQ ID NO: 773915 - RNA, 22 nt, Human
ucugagaagcuagaggacaaag

SEQ ID NO: 773916 - RNA, 22 nt, Human
aguauguugacuuauucuugga

SEQ ID NO: 773917 - RNA, 22 nt, Human
gugguuuucuccaacccagaac

SEQ ID NO: 773918 - RNA, 22 nt, Human
guuuaauucccacaccugcccu

SEQ ID NO: 773919 - RNA, 22 nt, Human
uuucauuggcucccugaugaau

SEQ ID NO: 773920 - RNA, 22 nt, Human
gagguccucuguguccgcgggc

SEQ ID NO: 773921 - RNA, 22 nt, Human
aaaguucagauuagacucaaga

SEQ ID NO: 773922 - RNA, 22 nt, Human
uccagggccacagaggaugcua

SEQ ID NO: 773923 - RNA, 22 nt, Human
cuucugcaauaaguuuuggucc

SEQ ID NO: 773924 - RNA, 22 nt, Human
auuuaugacagaagauaugcug

SEQ ID NO: 773925 - RNA, 22 nt, Human
ccacaggggucucuguagcuga

SEQ ID NO: 773926 - RNA, 22 nt, Human
augcauaugugugcacacgugu

SEQ ID NO: 773927 - RNA, 22 nt, Human
acauggugugcugagaaugaca

SEQ ID NO: 773928 - RNA, 22 nt, Human
uccaugccaggcagucgaugca

SEQ ID NO: 773929 - RNA, 21 nt, Human
cacacaguggagugcccuugc

SEQ ID NO: 773930 - RNA, 23 nt, Human
agcuuugugaaagcagacauggg

SEQ ID NO: 773931 - RNA, 22 nt, Human
guucuccauucagcuuccugug

SEQ ID NO: 773932 - RNA, 22 nt, Human
gaggagacugacagcagauucu

SEQ ID NO: 773933 - RNA, 22 nt, Human
uugugagcaggcugcacaaacc

SEQ ID NO: 773934 - RNA, 22 nt, Human
ucucucuggagcuggggcauga

SEQ ID NO: 773935 - RNA, 22 nt, Human
ugcacagggagggggccagcuc

SEQ ID NO: 773936 - RNA, 22 nt, Human
ugaugagggcaguucuuguugc

SEQ ID NO: 773937 - RNA, 22 nt, Human
aaucuucacucauucagaguug

SEQ ID NO: 773938 - RNA, 22 nt, Human
aagcagcugcagguucaaagga

SEQ ID NO: 773939 - RNA, 22 nt, Human
ugcagauucaaaugaaaugcaa

SEQ ID NO: 773940 - RNA, 22 nt, Human
gaaucuuaccucucuauuguug

SEQ ID NO: 773941 - RNA, 22 nt, Human
uuguggcugucgagaauugagg

SEQ ID NO: 773942 - RNA, 23 nt, Human
ucagaauuccaguuucuuugaag

SEQ ID NO: 773943 - RNA, 22 nt, Human
cacagaacaccaaagaaccuuc

SEQ ID NO: 773944 - RNA, 20 nt, Human
auagaaguauuauguaaugu

SEQ ID NO: 773945 - RNA, 22 nt, Human
aaaugcucucuaauguaauaca

SEQ ID NO: 773946 - RNA, 22 nt, Human
uauuugucaccuauggcugucc

SEQ ID NO: 773947 - RNA, 22 nt, Human
ggaggaagcccucggugcccca

SEQ ID NO: 773948 - RNA, 16 nt, Human
augcugcuauuagagg

SEQ ID NO: 773949 - RNA, 22 nt, Human
ugcaauuuuuaucaauucagca

SEQ ID NO: 773950 - RNA, 22 nt, Human
aagcagcagaccugauuuugaa

SEQ ID NO: 773951 - RNA, 22 nt, Human
cuggggacugaaggauguugcu

SEQ ID NO: 773952 - RNA, 22 nt, Human
uucuacagacuauaacugugau

SEQ ID NO: 773953 - RNA, 22 nt, Human
auaguguguuagugacauaggc

SEQ ID NO: 773954 - RNA, 22 nt, Human
uccugaacagcuccugagcaug

SEQ ID NO: 773955 - RNA, 19 nt, Human
ugcagcugucucuauauua

SEQ ID NO: 773956 - RNA, 22 nt, Human
gccaggcaugggcuucugggcg

SEQ ID NO: 773957 - RNA, 22 nt, Human
ugcauguuauagaauuuuaacu

SEQ ID NO: 773958 - RNA, 21 nt, Human
augcauguuacaguauaugcc

SEQ ID NO: 773959 - RNA, 19 nt, Human
uguuggugcggauguggag

SEQ ID NO: 773960 - RNA, 22 nt, Human
acaugcauaagccuagccauca

SEQ ID NO: 773961 - RNA, 22 nt, Human
ggggccaguaggagugauguac

SEQ ID NO: 773962 - RNA, 22 nt, Human
cuuggagacauugaucuuuugc

SEQ ID NO: 773963 - RNA, 22 nt, Human
uuuauuuaccuuauguccucca

SEQ ID NO: 773964 - RNA, 22 nt, Human
aagcaggcgagggccuggagca

SEQ ID NO: 773965 - RNA, 22 nt, Human
acugcuucacugcgucuuaucu

SEQ ID NO: 773966 - RNA, 22 nt, Human
ucaggagaaggcaauguggaaa

SEQ ID NO: 773967 - RNA, 22 nt, Human
gcccaggaguucaagucuagug

SEQ ID NO: 773968 - RNA, 22 nt, Human
auauggaaauagcaauaugguu

SEQ ID NO: 773969 - RNA, 22 nt, Human
aucagaagaaauggaugugacu

SEQ ID NO: 773970 - RNA, 22 nt, Human
cccuggagcuagucugagcaga

SEQ ID NO: 773971 - RNA, 22 nt, Human
ucagcccuagccucaguccagg

SEQ ID NO: 773972 - RNA, 22 nt, Human
augaacaguaugcaacaugauu

SEQ ID NO: 773973 - RNA, 22 nt, Human
ucacacuuagagcgaauuguuu

SEQ ID NO: 773974 - RNA, 22 nt, Human
agcaggaaguagucuguaagca

SEQ ID NO: 773975 - RNA, 22 nt, Human
uguacaaugcugagguuugggg

SEQ ID NO: 773976 - RNA, 22 nt, Human
gguuaaaacugauauuaugggu

SEQ ID NO: 773977 - RNA, 22 nt, Human
agaugcugccucuccucacaag

SEQ ID NO: 773978 - RNA, 22 nt, Human
aaccagcuaacauguggaauga

SEQ ID NO: 773979 - RNA, 22 nt, Human
uuucugacacaucaguuguaaa

SEQ ID NO: 773980 - RNA, 22 nt, Human
ucugugauagguggcauaguga

SEQ ID NO: 773981 - RNA, 22 nt, Human
augaaaguguuuaaguuuaugu

SEQ ID NO: 773982 - RNA, 20 nt, Human
acuguguaaacaugauucau

SEQ ID NO: 773983 - RNA, 23 nt, Human
caacacugccuucaggugaagaa

SEQ ID NO: 773984 - RNA, 22 nt, Human
auuagaaugaaguauaggauuu

SEQ ID NO: 773985 - RNA, 22 nt, Human
uugaaaguuaucuagauucuga

SEQ ID NO: 773986 - RNA, 22 nt, Human
cacuguaauagcauuauaagug

SEQ ID NO: 773987 - RNA, 22 nt, Human
gccaccagcagaaaaggggcca

SEQ ID NO: 773988 - RNA, 22 nt, Human
ccagcucugauuuugaccucca

SEQ ID NO: 773989 - RNA, 22 nt, Human
acucuggccaggugcgguaugu

SEQ ID NO: 773990 - RNA, 22 nt, Human
auuuguguuguauuaagcugcu

SEQ ID NO: 773991 - RNA, 22 nt, Human
agugcaaagaaaucagcuuugu

SEQ ID NO: 773992 - RNA, 22 nt, Human
uuugaugcuaagauuuaauaaa

SEQ ID NO: 773993 - RNA, 22 nt, Human
cauuucuguacauguuuuggug

SEQ ID NO: 773994 - RNA, 22 nt, Human
ugucugcucgggguucccaccu

SEQ ID NO: 773995 - RNA, 22 nt, Human
ugcuuuuaggagauuaaaauua

SEQ ID NO: 773996 - RNA, 19 nt, Human
augaaugagcugugagguu

SEQ ID NO: 773997 - RNA, 22 nt, Human
aggcaggugcuuaugacuugcu

SEQ ID NO: 773998 - RNA, 23 nt, Human
ucugccagugugugccaggagcc

SEQ ID NO: 773999 - RNA, 22 nt, Human
uugccugugaacgcugaguccu

SEQ ID NO: 774000 - RNA, 22 nt, Human
aguguccccuccaagggccugg

SEQ ID NO: 774001 - RNA, 22 nt, Human
ccugcagagccacgugccagcg

SEQ ID NO: 774002 - RNA, 22 nt, Human
cugaacaguacuuggccaguuu

SEQ ID NO: 774003 - RNA, 22 nt, Human
ugucucuuacuuugauucuugg

SEQ ID NO: 774004 - RNA, 22 nt, Human
aaauauuguuuugguaagcuuc

SEQ ID NO: 774005 - RNA, 22 nt, Human
uuagaaccaggaacucuaauau

SEQ ID NO: 774006 - RNA, 22 nt, Human
uuguuacagcagcaauagaaaa

SEQ ID NO: 774007 - RNA, 22 nt, Human
auguacaaaauguuuugaaaug

SEQ ID NO: 774008 - RNA, 19 nt, Human
ugagacagagaccaguucu

SEQ ID NO: 774009 - RNA, 22 nt, Human
acauuuuuacugggcaucugca

SEQ ID NO: 774010 - RNA, 22 nt, Human
ggaaagagcccagcagugcuug

SEQ ID NO: 774011 - RNA, 22 nt, Human
ggcacucagagauucaggcugu

SEQ ID NO: 774012 - RNA, 22 nt, Human
aaccugagucuuuugauuugcu

SEQ ID NO: 774013 - RNA, 22 nt, Human
ggcugagggccagggcuagucu

SEQ ID NO: 774014 - RNA, 21 nt, Human
ucccacagaaacugcgaaauu

SEQ ID NO: 774015 - RNA, 22 nt, Human
uggaugugagaaggaucaggcu

SEQ ID NO: 774016 - RNA, 22 nt, Human
ggcugagggucccagacccuaa

SEQ ID NO: 774017 - RNA, 22 nt, Human
agugccuggcacauggaaggug

SEQ ID NO: 774018 - RNA, 22 nt, Human
uguccauggauagagcugcucg

SEQ ID NO: 774019 - RNA, 22 nt, Human
gagguagccacagauagagacu

SEQ ID NO: 774020 - RNA, 22 nt, Human
aaggaagacuugagaagguucc

SEQ ID NO: 774021 - RNA, 22 nt, Human
agcugcuuccucuuugauguca

SEQ ID NO: 774022 - RNA, 17 nt, Human
agggucaggugaaguuc

SEQ ID NO: 774023 - RNA, 22 nt, Human
aggaggcugggcacaguggccu

SEQ ID NO: 774024 - RNA, 22 nt, Human
aggcugaggugugcugugaucg

SEQ ID NO: 774025 - RNA, 22 nt, Human
gagaauuuucuaguaguuucau

SEQ ID NO: 774026 - RNA, 18 nt, Human
ugagcccuuaucuuuggc

SEQ ID NO: 774027 - RNA, 22 nt, Human
cccaugaacugucuugcuguag

SEQ ID NO: 774028 - RNA, 22 nt, Human
ggagcaucugaacagggagaag

SEQ ID NO: 774029 - RNA, 20 nt, Human
ggcugccuccuuccuuuccu

SEQ ID NO: 774030 - RNA, 22 nt, Human
uucugucuucccacugaggagc

SEQ ID NO: 774031 - RNA, 22 nt, Human
cagcuggcgccuggggaccaga

SEQ ID NO: 774032 - RNA, 22 nt, Human
gcuggccucuacaggccggcca

SEQ ID NO: 774033 - RNA, 22 nt, Human
aaacucuguauuugcugugggu

SEQ ID NO: 774034 - RNA, 22 nt, Human
aggcuggcgucaggggcuguac

SEQ ID NO: 774035 - RNA, 22 nt, Human
gggaguggauuauguggaccca

SEQ ID NO: 774036 - RNA, 22 nt, Human
agaaaggagaccagcucugccc

SEQ ID NO: 774037 - RNA, 22 nt, Human
ucauugauaaaguacugcuuuu

SEQ ID NO: 774038 - RNA, 22 nt, Human
gaaucuuuuuucuugccaggca

SEQ ID NO: 774039 - RNA, 22 nt, Human
caauuucaugccauguauugcu

SEQ ID NO: 774040 - RNA, 22 nt, Human
auggcauugcaagggcaggagg

SEQ ID NO: 774041 - RNA, 22 nt, Human
aagacaaugaguccugauggga

SEQ ID NO: 774042 - RNA, 22 nt, Human
aaaugacauuaggauccugcau

SEQ ID NO: 774043 - RNA, 22 nt, Human
uggcccugaggacccagugugg

SEQ ID NO: 774044 - RNA, 22 nt, Human
gcugcacuugagccugggagaa

SEQ ID NO: 774045 - RNA, 22 nt, Human
aacuacagcaucuauacaaaua

SEQ ID NO: 774046 - RNA, 22 nt, Human
ucaggcuuccaggcucugcuga

SEQ ID NO: 774047 - RNA, 22 nt, Human
guuugucuuaauuaggcaucga

SEQ ID NO: 774048 - RNA, 22 nt, Human
ggcuauggaagauaaggcugaa

SEQ ID NO: 774049 - RNA, 22 nt, Human
gcccagugcugagggugcugcu

SEQ ID NO: 774050 - RNA, 22 nt, Human
ucacugcaaucucugccuucca

SEQ ID NO: 774051 - RNA, 20 nt, Human
aagcagugaggugaggagug

SEQ ID NO: 774052 - RNA, 20 nt, Human
agcggcagcuuccugcuucg

SEQ ID NO: 774053 - RNA, 22 nt, Human
ggugaggguaaacuaaaacauc

SEQ ID NO: 774054 - RNA, 22 nt, Human
gucugcuggugccuggccugcg

SEQ ID NO: 774055 - RNA, 22 nt, Human
aacuugcuuauauuauuacauu

SEQ ID NO: 774056 - RNA, 22 nt, Human
uccaugcaaacaguggcuagcu

SEQ ID NO: 774057 - RNA, 22 nt, Human
uugugugcauaaauucugaugu

SEQ ID NO: 774058 - RNA, 22 nt, Human
aggcacuuuuugcauuuuagaa

SEQ ID NO: 774059 - RNA, 22 nt, Human
gcagcccaggaggcgggagccc

SEQ ID NO: 774060 - RNA, 22 nt, Human
cugguucugauuuugcugcauu

SEQ ID NO: 774061 - RNA, 22 nt, Human
ugguuccacuaaccugagagcc

SEQ ID NO: 774062 - RNA, 19 nt, Human
cugaagucuuuucagcugg

SEQ ID NO: 774063 - RNA, 21 nt, Human
ucucuuugggaacauuaauca

SEQ ID NO: 774064 - RNA, 22 nt, Human
acagggcuuuuaaucaguaguu

SEQ ID NO: 774065 - RNA, 22 nt, Human
acaggauaguuuuuaaucuucc

SEQ ID NO: 774066 - RNA, 22 nt, Human
gcagagaugggccagugacgca

SEQ ID NO: 774067 - RNA, 19 nt, Human
aguuauuucuaaauuuacc

SEQ ID NO: 774068 - RNA, 22 nt, Human
uuacuucuugucucaugccuau

SEQ ID NO: 774069 - RNA, 21 nt, Human
ucugcauuuuagcaagaucuc

SEQ ID NO: 774070 - RNA, 22 nt, Human
auucuuuuguccuagcuugaua

SEQ ID NO: 774071 - RNA, 22 nt, Human
gaaacaacuacuauugauuucu

SEQ ID NO: 774072 - RNA, 23 nt, Human
uucauuugucuacuucacuuguu

SEQ ID NO: 774073 - RNA, 22 nt, Human
cugcugugacagcugccguguu

SEQ ID NO: 774074 - RNA, 22 nt, Human
auuucuuacauaacaaauuguu

SEQ ID NO: 774075 - RNA, 22 nt, Human
gacagcaggagaucaugauaga

SEQ ID NO: 774076 - RNA, 22 nt, Human
ugccuacccaugguuagacaua

SEQ ID NO: 774077 - RNA, 22 nt, Human
gaagagcuuagacagaaucaaa

SEQ ID NO: 774078 - RNA, 22 nt, Human
caggccucuauggucagcugag

SEQ ID NO: 774079 - RNA, 22 nt, Human
acuucauucauuuucacgaaug

SEQ ID NO: 774080 - RNA, 22 nt, Human
aacuucauguaauuuaaaacag

SEQ ID NO: 774081 - RNA, 22 nt, Human
acacuucauuuacauuauaggc

SEQ ID NO: 774082 - RNA, 22 nt, Human
acaaagauucauuugcauuauu

SEQ ID NO: 774083 - RNA, 22 nt, Human
uuacauuuggcuauguccucua

SEQ ID NO: 774084 - RNA, 22 nt, Human
ucucaucugcgagcucugccag

SEQ ID NO: 774085 - RNA, 22 nt, Human
aaccuggccccagauuccccau

SEQ ID NO: 774086 - RNA, 22 nt, Human
cauuaucucuucuauaugcuag

SEQ ID NO: 774087 - RNA, 22 nt, Human
ccagccauaaacccagaugacu

SEQ ID NO: 774088 - RNA, 23 nt, Human
ucuuuucaaugguucuuuaugug

SEQ ID NO: 774089 - RNA, 22 nt, Human
cacccccaccugugggcuccug

SEQ ID NO: 774090 - RNA, 22 nt, Human
cugcagucuuccuuccuuaggc

SEQ ID NO: 774091 - RNA, 22 nt, Human
ggcugccugccuccaagccggg

SEQ ID NO: 774092 - RNA, 22 nt, Human
gaguagggaugcuggugacucc

SEQ ID NO: 774093 - RNA, 22 nt, Human
aggagucagauuguuugaaugu

SEQ ID NO: 774094 - RNA, 22 nt, Human
uugauugaauuuugaaaaucua

SEQ ID NO: 774095 - RNA, 22 nt, Human
uuacaagacacugcugacacag

SEQ ID NO: 774096 - RNA, 22 nt, Human
ggccuucugccuuucagcaaug

SEQ ID NO: 774097 - RNA, 22 nt, Human
cauuuacacacagaggugugcu

SEQ ID NO: 774098 - RNA, 22 nt, Human
uguuuacuggaccagggagggg

SEQ ID NO: 774099 - RNA, 22 nt, Human
aaaccuguagcaguuuguuaca

SEQ ID NO: 774100 - RNA, 22 nt, Human
acuccaggcaucugcuucugcu

SEQ ID NO: 774101 - RNA, 22 nt, Human
cuagggugugcagauuuugccu

SEQ ID NO: 774102 - RNA, 22 nt, Human
gcuuuucuagcuagaacauccg

SEQ ID NO: 774103 - RNA, 22 nt, Human
acuuccugacuucuggguugga

SEQ ID NO: 774104 - RNA, 22 nt, Human
cagcugcccaagccccagaugu

SEQ ID NO: 774105 - RNA, 22 nt, Human
uuacaguaugaucaacuuuuca

SEQ ID NO: 774106 - RNA, 20 nt, Human
gcugaggagcagugugguug

SEQ ID NO: 774107 - RNA, 22 nt, Human
ucugccuccugcuugucccgac

SEQ ID NO: 774108 - RNA, 22 nt, Human
gcagggugauagugaggcucag

SEQ ID NO: 774109 - RNA, 22 nt, Human
uuuauaguagcaugauuuauaa

SEQ ID NO: 774110 - RNA, 22 nt, Human
gaaggcagguuuuucaaaacug

SEQ ID NO: 774111 - RNA, 22 nt, Human
aacuguuuuucacgugucucau

SEQ ID NO: 774112 - RNA, 22 nt, Human
ggugaaauauuuuugauauguu

SEQ ID NO: 774113 - RNA, 20 nt, Human
ggacagugagacauaucuca

SEQ ID NO: 774114 - RNA, 21 nt, Human
cacuccacuuagaacaggguu

SEQ ID NO: 774115 - RNA, 22 nt, Human
gcucagugugguccucagaugu

SEQ ID NO: 774116 - RNA, 22 nt, Human
gcucaggcuucuucuauaaaga

SEQ ID NO: 774117 - RNA, 22 nt, Human
ggcagagcugcaugagcacuca

SEQ ID NO: 774118 - RNA, 22 nt, Human
uuccaaaugaguuccaucgaau

SEQ ID NO: 774119 - RNA, 20 nt, Human
uagcaagcaggaggugcaga

SEQ ID NO: 774120 - RNA, 22 nt, Human
ucuagaaauuuugccuuguauu

SEQ ID NO: 774121 - RNA, 21 nt, Human
gcucaaagggcuugccaugcu

SEQ ID NO: 774122 - RNA, 19 nt, Human
ucaguuuuagucaucaguu

SEQ ID NO: 774123 - RNA, 22 nt, Human
auccuugagccuuaucuuuugu

SEQ ID NO: 774124 - RNA, 22 nt, Human
acuuggcuuuaguaguaacuga

SEQ ID NO: 774125 - RNA, 22 nt, Human
ggcagcuguuggcucucuagga

SEQ ID NO: 774126 - RNA, 22 nt, Human
caagaugacaaggcuggaggcu

SEQ ID NO: 774127 - RNA, 22 nt, Human
gugacucugcauuuuauggauc

SEQ ID NO: 774128 - RNA, 22 nt, Human
ccaugcugacccugugcaggca

SEQ ID NO: 774129 - RNA, 22 nt, Human
uucaacuuuaggcaaagaaaac

SEQ ID NO: 774130 - RNA, 22 nt, Human
uugauaaaaugauaucuucuuu

SEQ ID NO: 774131 - RNA, 22 nt, Human
agggcuuuguuuaggugaccac

SEQ ID NO: 774132 - RNA, 22 nt, Human
aaggacuccaauucuuucaucu

SEQ ID NO: 774133 - RNA, 22 nt, Human
ugagcccuccaaacccaggauu

SEQ ID NO: 774134 - RNA, 22 nt, Human
ucugagguggacgauggagccu

SEQ ID NO: 774135 - RNA, 22 nt, Human
gcuuugggggcugcagugcgug

SEQ ID NO: 774136 - RNA, 22 nt, Human
ucugagcuauguaagacuugga

SEQ ID NO: 774137 - RNA, 22 nt, Human
uagacacuagggauuuaguacu

SEQ ID NO: 774138 - RNA, 16 nt, Human
aggcagcauguuagug

SEQ ID NO: 774139 - RNA, 22 nt, Human
gcagaugguggggcaggaaaau

SEQ ID NO: 774140 - RNA, 22 nt, Human
uuggcauaaaacucuucaaaau

SEQ ID NO: 774141 - RNA, 22 nt, Human
aauguuugucaucacacagaua

SEQ ID NO: 774142 - RNA, 22 nt, Human
cgaugguucuggcugcuuguau

SEQ ID NO: 774143 - RNA, 22 nt, Human
cuggagaacagagcuguuuaga

SEQ ID NO: 774144 - RNA, 22 nt, Human
uuuucacauugucccagcacua

SEQ ID NO: 774145 - RNA, 22 nt, Human
ugaguucugacugugaugccag

SEQ ID NO: 774146 - RNA, 22 nt, Human
aucugccuguauuuaccaucau

SEQ ID NO: 774147 - RNA, 22 nt, Human
gcuggggagcaagaguagugag

SEQ ID NO: 774148 - RNA, 18 nt, Human
gccuucagacugcaugcu

SEQ ID NO: 774149 - RNA, 18 nt, Human
gacuuuaaaacacugcuc

SEQ ID NO: 774150 - RNA, 22 nt, Human
ucugagcagcuuuguuuugugu

SEQ ID NO: 774151 - RNA, 23 nt, Human
gccaauuuaguaaaggcaguggg

SEQ ID NO: 774152 - RNA, 22 nt, Human
gggucuaggagacaugggcaag

SEQ ID NO: 774153 - RNA, 18 nt, Human
cugagggcagccccuggg

SEQ ID NO: 774154 - RNA, 22 nt, Human
ugguccauguccuccaucucuc

SEQ ID NO: 774155 - RNA, 22 nt, Human
uguguuggaaauagggucuuug

SEQ ID NO: 774156 - RNA, 23 nt, Human
agauuuggaaagcugaguggcgu

SEQ ID NO: 774157 - RNA, 22 nt, Human
gugcccagugcaggcccgcagg

SEQ ID NO: 774158 - RNA, 22 nt, Human
gcuguauuccugcacuguauag

SEQ ID NO: 774159 - RNA, 22 nt, Human
agcugcugagagucugccgggc

SEQ ID NO: 774160 - RNA, 22 nt, Human
ugagcugugaucuaugauaaau

SEQ ID NO: 774161 - RNA, 22 nt, Human
gcccuccaugagacacagugua

SEQ ID NO: 774162 - RNA, 22 nt, Human
ucagcacuggcgcugggcaggu

SEQ ID NO: 774163 - RNA, 22 nt, Human
gcuguggguaaacgcugagggu

SEQ ID NO: 774164 - RNA, 22 nt, Human
caggcuggagugcaguugugca

SEQ ID NO: 774165 - RNA, 22 nt, Human
auaaagucauggcagcuagaau

SEQ ID NO: 774166 - RNA, 22 nt, Human
aagagcauggaauggagaucca

SEQ ID NO: 774167 - RNA, 18 nt, Human
cuuccucuucuggagaaa

SEQ ID NO: 774168 - RNA, 22 nt, Human
ucuggaaauuucaguuuuagag

SEQ ID NO: 774169 - RNA, 23 nt, Human
gcacucaucugaagcuauggugc

SEQ ID NO: 774170 - RNA, 22 nt, Human
aaauauacuagaugaugaccca

SEQ ID NO: 774171 - RNA, 18 nt, Human
ggacccagggccucaccc

SEQ ID NO: 774172 - RNA, 20 nt, Human
guuuauacagaagaccccaa

SEQ ID NO: 774173 - RNA, 22 nt, Human
ccuuuugcucucccauccagaa

SEQ ID NO: 774174 - RNA, 22 nt, Human
cuguguuugacaggcggucucc

SEQ ID NO: 774175 - RNA, 22 nt, Human
uggaaguggcagaggaaguggu

SEQ ID NO: 774176 - RNA, 22 nt, Human
auggccaagaauauuucucaac

SEQ ID NO: 774177 - RNA, 22 nt, Human
ggccuuccugcugcuccgggcc

SEQ ID NO: 774178 - RNA, 22 nt, Human
ucacaugcuguguguggagauc

SEQ ID NO: 774179 - RNA, 22 nt, Human
uccuggccuugcuccugaugcc

SEQ ID NO: 774180 - RNA, 22 nt, Human
gaugggguccuugaccuggcca

SEQ ID NO: 774181 - RNA, 19 nt, Human
cccagaggaaugccuggaa

SEQ ID NO: 774182 - RNA, 19 nt, Human
ugcagagagaggcaaagaa

SEQ ID NO: 774183 - RNA, 22 nt, Human
aaggcagcuucaccacagcauu

SEQ ID NO: 774184 - RNA, 22 nt, Human
ucucccuggagcccugaagcau

SEQ ID NO: 774185 - RNA, 22 nt, Human
aaauugugcucacacugauauu

SEQ ID NO: 774186 - RNA, 22 nt, Human
augggcuguccuaguccagccc

SEQ ID NO: 774187 - RNA, 22 nt, Human
gggccugccauugcugccccag

SEQ ID NO: 774188 - RNA, 22 nt, Human
cgcuuuggauuucgcuuuccaa

SEQ ID NO: 774189 - RNA, 22 nt, Human
caaagucagcugccagucccaa

SEQ ID NO: 774190 - RNA, 22 nt, Human
agcuggcuucucugcagacauu

SEQ ID NO: 774191 - RNA, 22 nt, Human
ggucacauucugaggaaucagg

SEQ ID NO: 774192 - RNA, 22 nt, Human
acuacagaagucuuauuagaga

SEQ ID NO: 774193 - RNA, 22 nt, Human
ugaaccacaugcaaagugaaua

SEQ ID NO: 774194 - RNA, 20 nt, Human
ugaacacugggguguuucag

SEQ ID NO: 774195 - RNA, 22 nt, Human
uucuggaacauagcaagaaguu

SEQ ID NO: 774196 - RNA, 22 nt, Human
ucucuuugucugcucuuaguug

SEQ ID NO: 774197 - RNA, 22 nt, Human
ucagaaauuuaggcuggacuug

SEQ ID NO: 774198 - RNA, 22 nt, Human
gccacuggcgcugugcagagug

SEQ ID NO: 774199 - RNA, 22 nt, Human
augcacauguggcuuuauguau

SEQ ID NO: 774200 - RNA, 22 nt, Human
acagaaauucugggacagaaaa

SEQ ID NO: 774201 - RNA, 22 nt, Human
cucuuccuuaagacuauaaaga

SEQ ID NO: 774202 - RNA, 22 nt, Human
aauauaaauuccugggcccagc

SEQ ID NO: 774203 - RNA, 22 nt, Human
caaugcaagcaagauggucaca

SEQ ID NO: 774204 - RNA, 19 nt, Human
ucaaaacacaaaugguuga

SEQ ID NO: 774205 - RNA, 22 nt, Human
ugguaaaguguacugaauauga

SEQ ID NO: 774206 - RNA, 22 nt, Human
ucugccaccaacugucacuaca

SEQ ID NO: 774207 - RNA, 22 nt, Human
ugggcccugacuucaagcaucc

SEQ ID NO: 774208 - RNA, 22 nt, Human
aguccaguguguucuggcagca

SEQ ID NO: 774209 - RNA, 22 nt, Human
aggucugucuggccccaugaau

SEQ ID NO: 774210 - RNA, 22 nt, Human
ugcuuccuugaucauucccaaa

SEQ ID NO: 774211 - RNA, 22 nt, Human
ucugaagauaugagcuuuauga

SEQ ID NO: 774212 - RNA, 22 nt, Human
agcaucucuaaauccaguaagu

SEQ ID NO: 774213 - RNA, 23 nt, Human
ucuaaaauucaucauuuacguuc

SEQ ID NO: 774214 - RNA, 18 nt, Human
gcagcugacacuggaguu

SEQ ID NO: 774215 - RNA, 22 nt, Human
ucuggagucuaaagaaccaaaa

SEQ ID NO: 774216 - RNA, 22 nt, Human
guauggaaguauaaguuuugaa

SEQ ID NO: 774217 - RNA, 22 nt, Human
cccagggacucgggauucuagg

SEQ ID NO: 774218 - RNA, 22 nt, Human
uagccagugaauguuuccagug

SEQ ID NO: 774219 - RNA, 21 nt, Human
ucuguggcagcaugaugaggu

SEQ ID NO: 774220 - RNA, 22 nt, Human
guucagcagcagugauuuugug

SEQ ID NO: 774221 - RNA, 22 nt, Human
gccagguccccucauggcuccu

SEQ ID NO: 774222 - RNA, 22 nt, Human
ggcugcagaggcccccaguggg

SEQ ID NO: 774223 - RNA, 22 nt, Human
ugugcucuggaguugccuucac

SEQ ID NO: 774224 - RNA, 22 nt, Human
ucagaaaaugaaauggacucuc

SEQ ID NO: 774225 - RNA, 22 nt, Human
aguccagaacuucagcuaguuu

SEQ ID NO: 774226 - RNA, 22 nt, Human
uucuccaggccgcgcagggggc

SEQ ID NO: 774227 - RNA, 22 nt, Human
uggagggcgcuuagauggaggg

SEQ ID NO: 774228 - RNA, 22 nt, Human
cuagggucaggggccugcgucg

SEQ ID NO: 774229 - RNA, 22 nt, Human
ugcugggcggugggcucauccc

SEQ ID NO: 774230 - RNA, 22 nt, Human
cccaugagugcugcucagaggc

SEQ ID NO: 774231 - RNA, 22 nt, Human
uggcagaaagaaccaugugcaa

SEQ ID NO: 774232 - RNA, 22 nt, Human
gggagcuggaucgcgcgcccgg

SEQ ID NO: 774233 - RNA, 22 nt, Human
uggcuucaucacucgggcugcc

SEQ ID NO: 774234 - RNA, 22 nt, Human
cagacaggcuagccagacucac

SEQ ID NO: 774235 - RNA, 22 nt, Human
uacuuucuagcucuccccaguu

SEQ ID NO: 774236 - RNA, 22 nt, Human
cuuuacacaugagaccugcaau

SEQ ID NO: 774237 - RNA, 22 nt, Human
uaaaaugccagaccaguucacg

SEQ ID NO: 774238 - RNA, 22 nt, Human
uaaugcaggugcccuuggguuu

SEQ ID NO: 774239 - RNA, 22 nt, Human
acugcagccuuugggcucauaa

SEQ ID NO: 774240 - RNA, 22 nt, Human
acagauuuggcccagccaaugc

SEQ ID NO: 774241 - RNA, 22 nt, Human
cuucaaauccuguguagggcua

SEQ ID NO: 774242 - RNA, 22 nt, Human
ugccucuuggagccuuuccucu

SEQ ID NO: 774243 - RNA, 22 nt, Human
ugguccagacuuugaccucuca

SEQ ID NO: 774244 - RNA, 22 nt, Human
uugaggucuggcaguagcguug

SEQ ID NO: 774245 - RNA, 19 nt, Human
gguguccuagagauaagag

SEQ ID NO: 774246 - RNA, 22 nt, Human
uaaagugcucauaaaaauggau

SEQ ID NO: 774247 - RNA, 22 nt, Human
aggcagcugaggucuggcgccc

SEQ ID NO: 774248 - RNA, 22 nt, Human
ugaggugccacccaagagccuu

SEQ ID NO: 774249 - RNA, 22 nt, Human
caggcugcagugcaguggcuau

SEQ ID NO: 774250 - RNA, 22 nt, Human
ugguuuugcuaaaauagaaaga

SEQ ID NO: 774251 - RNA, 20 nt, Human
agugaauagagacauugccc

SEQ ID NO: 774252 - RNA, 20 nt, Human
uggaccugucucuuuaggga

SEQ ID NO: 774253 - RNA, 22 nt, Human
ucuggccuuaucuguccaagcc

SEQ ID NO: 774254 - RNA, 22 nt, Human
gucaccucgcugucuuccugag

SEQ ID NO: 774255 - RNA, 22 nt, Human
cuggccagaagcaccuuuggcg

SEQ ID NO: 774256 - RNA, 22 nt, Human
ucuggagaaucugucagugugg

SEQ ID NO: 774257 - RNA, 22 nt, Human
aguaucaucuccauuucacuga

SEQ ID NO: 774258 - RNA, 22 nt, Human
gagguggcugggaguagggaau

SEQ ID NO: 774259 - RNA, 22 nt, Human
cagcucugugggagcguaugug

SEQ ID NO: 774260 - RNA, 22 nt, Human
ucagagaaaugcugagcucaug

SEQ ID NO: 774261 - RNA, 22 nt, Human
aagggagcaaauggacagacgg

SEQ ID NO: 774262 - RNA, 22 nt, Human
gauggcacacagacauccccgc

SEQ ID NO: 774263 - RNA, 22 nt, Human
uguggcugccacccugaagccg

SEQ ID NO: 774264 - RNA, 22 nt, Human
cagcuguucagcaacucgcaga

SEQ ID NO: 774265 - RNA, 22 nt, Human
ccaucccuccuccaccagcuag

SEQ ID NO: 774266 - RNA, 22 nt, Human
cacgacuuguggaggagcgcgg

SEQ ID NO: 774267 - RNA, 22 nt, Human
auucaguuagaucauccuaauu

SEQ ID NO: 774268 - RNA, 22 nt, Human
cagguggcagaggucucuggaa

SEQ ID NO: 774269 - RNA, 22 nt, Human
uguccugugauuccagcucuuc

SEQ ID NO: 774270 - RNA, 22 nt, Human
uuguugggcaugcaguggcugu

SEQ ID NO: 774271 - RNA, 22 nt, Human
uuucuagaguucaucaugguaa

SEQ ID NO: 774272 - RNA, 21 nt, Human
augugaaauaucaucagagca

SEQ ID NO: 774273 - RNA, 23 nt, Human
augcccuguagaggcugcugacc

SEQ ID NO: 774274 - RNA, 22 nt, Human
agcccuggcagagccagguagu

SEQ ID NO: 774275 - RNA, 22 nt, Human
caaguucacuugucuacaaggg

SEQ ID NO: 774276 - RNA, 22 nt, Human
agaagcauuggaccaggggccc

SEQ ID NO: 774277 - RNA, 22 nt, Human
aguuaaagucugaaauagagaa

SEQ ID NO: 774278 - RNA, 22 nt, Human
cagcuuucugucucaugacuga

SEQ ID NO: 774279 - RNA, 22 nt, Human
uauguuucuuccuuuucauaca

SEQ ID NO: 774280 - RNA, 22 nt, Human
acaacuagcagguauuaauuuu

SEQ ID NO: 774281 - RNA, 22 nt, Human
acaaucauuccguucacaacag

SEQ ID NO: 774282 - RNA, 22 nt, Human
ugaggaugguuaaagaacauug

SEQ ID NO: 774283 - RNA, 22 nt, Human
ugcuucugggucccagccuggc

SEQ ID NO: 774284 - RNA, 20 nt, Human
ucuuaaauccccagggccau

SEQ ID NO: 774285 - RNA, 22 nt, Human
auguaauuugcccucaaguuaa

SEQ ID NO: 774286 - RNA, 22 nt, Human
uggcuaagcuggggaggccugg

SEQ ID NO: 774287 - RNA, 22 nt, Human
ugggcaggagagaagcuaaaga

SEQ ID NO: 774288 - RNA, 22 nt, Human
uuauuugaaugauggcacaauu

SEQ ID NO: 774289 - RNA, 22 nt, Human
ucuuuggaaugcuagcauucua

SEQ ID NO: 774290 - RNA, 20 nt, Human
acagguucauucugugugac

SEQ ID NO: 774291 - RNA, 22 nt, Human
ucucugagcgcauuccuccggc

SEQ ID NO: 774292 - RNA, 19 nt, Human
cugcuuccuucccucacug

SEQ ID NO: 774293 - RNA, 19 nt, Human
agugggcaaggaagaugac

SEQ ID NO: 774294 - RNA, 22 nt, Human
aggcuucaggaaauauacauuu

SEQ ID NO: 774295 - RNA, 22 nt, Human
cggcuucagcucaggccccucg

SEQ ID NO: 774296 - RNA, 22 nt, Human
ucuacagugucaaugugucuug

SEQ ID NO: 774297 - RNA, 22 nt, Human
aacaugaaguuuucuauaguga

SEQ ID NO: 774298 - RNA, 22 nt, Human
uggcagugaaagacaauugggc

SEQ ID NO: 774299 - RNA, 22 nt, Human
aaauauuugucugaggcgguug

SEQ ID NO: 774300 - RNA, 22 nt, Human
agaguggcagcaagucagguag

SEQ ID NO: 774301 - RNA, 22 nt, Human
ccccagaaguuugcacaagaga

SEQ ID NO: 774302 - RNA, 22 nt, Human
ugugagcacuggcugggaaagu

SEQ ID NO: 774303 - RNA, 22 nt, Human
aggaaggcaugagguguucaca

SEQ ID NO: 774304 - RNA, 22 nt, Human
aguguuuauauuauggaaauau

SEQ ID NO: 774305 - RNA, 22 nt, Human
gcuguguaucagaugccacggg

SEQ ID NO: 774306 - RNA, 22 nt, Human
uccuucuuucccccuagucauu

SEQ ID NO: 774307 - RNA, 22 nt, Human
ugcagaaauaacucauauugca

SEQ ID NO: 774308 - RNA, 22 nt, Human
ugagguagguggugaaaaauga

SEQ ID NO: 774309 - RNA, 22 nt, Human
uucuagcacugccuggaagaca

SEQ ID NO: 774310 - RNA, 20 nt, Human
uuucaaacugcaccuuugcu

SEQ ID NO: 774311 - RNA, 22 nt, Human
uuucuccuaacucaaauuuaag

SEQ ID NO: 774312 - RNA, 22 nt, Human
ucccagcuacucuagaggcuga

SEQ ID NO: 774313 - RNA, 22 nt, Human
auauacaugggaauauguggag

SEQ ID NO: 774314 - RNA, 22 nt, Human
acugaaauacugcucuuggauu

SEQ ID NO: 774315 - RNA, 22 nt, Human
guggccuuucuugggcuacaga

SEQ ID NO: 774316 - RNA, 22 nt, Human
uaguucaggaagagaaacaaca

SEQ ID NO: 774317 - RNA, 22 nt, Human
augcaauaccuucugaaaauaa

SEQ ID NO: 774318 - RNA, 22 nt, Human
aucuccaggauuuucacacuca

SEQ ID NO: 774319 - RNA, 19 nt, Human
aggcuaaagagucuugcgu

SEQ ID NO: 774320 - RNA, 22 nt, Human
ugagauaacauggaagaguagc

SEQ ID NO: 774321 - RNA, 22 nt, Human
acucuugucucaacuuuuguau

SEQ ID NO: 774322 - RNA, 22 nt, Human
cugacucccaagcuagugcucu

SEQ ID NO: 774323 - RNA, 22 nt, Human
cugugcccuggccaggccucuc

SEQ ID NO: 774324 - RNA, 22 nt, Human
uuuuacaaaugaggagcuggag

SEQ ID NO: 774325 - RNA, 22 nt, Human
agcaguuuuccugagcuccuca

SEQ ID NO: 774326 - RNA, 22 nt, Human
ucuagaaagccaaauuaggaau

SEQ ID NO: 774327 - RNA, 22 nt, Human
auccaaagcccuaaguuaacug

SEQ ID NO: 774328 - RNA, 22 nt, Human
uggcugccaugacgccugggga

SEQ ID NO: 774329 - RNA, 22 nt, Human
ggaggcucuugagaggggagua

SEQ ID NO: 774330 - RNA, 22 nt, Human
aaugaacaggugaaugucagau

SEQ ID NO: 774331 - RNA, 22 nt, Human
caguaacaggcucugugguaua

SEQ ID NO: 774332 - RNA, 22 nt, Human
gccuggagcucaugugggcauu

SEQ ID NO: 774333 - RNA, 22 nt, Human
aggaaacuguccccucauccua

SEQ ID NO: 774334 - RNA, 22 nt, Human
accgggcuaauuuuuguaucuu

SEQ ID NO: 774335 - RNA, 22 nt, Human
uacagccuggcacuacccuggg

SEQ ID NO: 774336 - RNA, 22 nt, Human
ggcugcuggaagacugaacaag

SEQ ID NO: 774337 - RNA, 22 nt, Human
uucugcuugguucuugguauga

SEQ ID NO: 774338 - RNA, 22 nt, Human
aggccagcuuccagaggggcag

SEQ ID NO: 774339 - RNA, 19 nt, Human
agcaguggagccaugccug

SEQ ID NO: 774340 - RNA, 22 nt, Human
acauuuuaauaugcuuagugug

SEQ ID NO: 774341 - RNA, 22 nt, Human
gucagagagggcacgugcacac

SEQ ID NO: 774342 - RNA, 22 nt, Human
agacgagggccuggcacacagu

SEQ ID NO: 774343 - RNA, 22 nt, Human
gugagaguguuuggaaauagaa

SEQ ID NO: 774344 - RNA, 22 nt, Human
uagccaugagcagaucacuaua

SEQ ID NO: 774345 - RNA, 22 nt, Human
acacucuugcauuaccugaaua

SEQ ID NO: 774346 - RNA, 22 nt, Human
agugcuuaauagauguccagca

SEQ ID NO: 774347 - RNA, 22 nt, Human
ucuuggccagguguggugccuc

SEQ ID NO: 774348 - RNA, 22 nt, Human
gggacuucauagcuaggcacuu

SEQ ID NO: 774349 - RNA, 22 nt, Human
ggggcuggcucacuaagagacu

SEQ ID NO: 774350 - RNA, 22 nt, Human
agggaagcaaugauuauuauuc

SEQ ID NO: 774351 - RNA, 22 nt, Human
caguccugugucccuugguggg

SEQ ID NO: 774352 - RNA, 22 nt, Human
cuauucagccucuaagacaagu

SEQ ID NO: 774353 - RNA, 22 nt, Human
uggggaaaggagagcauuauuu

SEQ ID NO: 774354 - RNA, 22 nt, Human
auagaauaugacuuuuagaucc

SEQ ID NO: 774355 - RNA, 22 nt, Human
cuggagagagaaaaagccuuaa

SEQ ID NO: 774356 - RNA, 22 nt, Human
auagauguucaaucagauauuu

SEQ ID NO: 774357 - RNA, 22 nt, Human
caugaucugguccuacuguggg

SEQ ID NO: 774358 - RNA, 22 nt, Human
aucugcuugaaugagcaacagg

SEQ ID NO: 774359 - RNA, 22 nt, Human
cucuuuccucagccacagucua

SEQ ID NO: 774360 - RNA, 22 nt, Human
cagcugccacuugcucucggcu

SEQ ID NO: 774361 - RNA, 22 nt, Human
cucacagagccucugugucuuc

SEQ ID NO: 774362 - RNA, 22 nt, Human
aagugaagaaauacaugagaau

SEQ ID NO: 774363 - RNA, 19 nt, Human
uuagggacaugaauucuag

SEQ ID NO: 774364 - RNA, 22 nt, Human
ucccagggggaugaacacugcc

SEQ ID NO: 774365 - RNA, 22 nt, Human
cccucagcuucucccugcagcu

SEQ ID NO: 774366 - RNA, 22 nt, Human
augaaacugggauaacuauagc

SEQ ID NO: 774367 - RNA, 22 nt, Human
cagggcuuacuggaggcugcuu

SEQ ID NO: 774368 - RNA, 22 nt, Human
ggcuccuucaagccugucacug

SEQ ID NO: 774369 - RNA, 22 nt, Human
ucauaacaaccuggaaggccag

SEQ ID NO: 774370 - RNA, 22 nt, Human
agaggagcugggaggcccucgu

SEQ ID NO: 774371 - RNA, 22 nt, Human
cugcuuuaaguauucaacaaag

SEQ ID NO: 774372 - RNA, 22 nt, Human
uggccacaucugaaaugagugu

SEQ ID NO: 774373 - RNA, 22 nt, Human
acuuauuucauggaucauaaug

SEQ ID NO: 774374 - RNA, 22 nt, Human
ccugggcauaaaucacuccaag

SEQ ID NO: 774375 - RNA, 22 nt, Human
acuuuacuacauccacagaugg

SEQ ID NO: 774376 - RNA, 22 nt, Human
auuugaaaucuggguuacucug

SEQ ID NO: 774377 - RNA, 22 nt, Human
cuugccaaauuaacauacagaa

SEQ ID NO: 774378 - RNA, 22 nt, Human
aaaccucugugcuaugacaccc

SEQ ID NO: 774379 - RNA, 22 nt, Human
gcugugugccaggggaaggcug

SEQ ID NO: 774380 - RNA, 22 nt, Human
caaguucauuguagcauuauug

SEQ ID NO: 774381 - RNA, 22 nt, Human
cuaaagugccaggaauacaggu

SEQ ID NO: 774382 - RNA, 22 nt, Human
accacauuucugaauagcauaa

SEQ ID NO: 774383 - RNA, 22 nt, Human
uacaugcuccacuuucuccugu

SEQ ID NO: 774384 - RNA, 22 nt, Human
gcauuucauguagauugagaac

SEQ ID NO: 774385 - RNA, 22 nt, Human
uuaaaaucacagucacccagua

SEQ ID NO: 774386 - RNA, 22 nt, Human
cacaguaugaucuaaaguaagu

SEQ ID NO: 774387 - RNA, 22 nt, Human
agcccagcugccugccugcugu

SEQ ID NO: 774388 - RNA, 22 nt, Human
aaggugcucguuauggccagug

SEQ ID NO: 774389 - RNA, 22 nt, Human
ucaaaaucaaagauacuugaaa

SEQ ID NO: 774390 - RNA, 22 nt, Human
accugccucuaagcagcaggug

SEQ ID NO: 774391 - RNA, 22 nt, Human
gggcaugacuuuuggaguggga

SEQ ID NO: 774392 - RNA, 22 nt, Human
uuauuacaaugcagaaaauaga

SEQ ID NO: 774393 - RNA, 22 nt, Human
cuuccaggacaccaggguagua

SEQ ID NO: 774394 - RNA, 22 nt, Human
uccugggcuuaagugauccucc

SEQ ID NO: 774395 - RNA, 22 nt, Human
uaggaaacaaaguggaugaaau

SEQ ID NO: 774396 - RNA, 22 nt, Human
aagcugccaaugguaagcugcu

SEQ ID NO: 774397 - RNA, 22 nt, Human
uggcugggugcuauccaguacu

SEQ ID NO: 774398 - RNA, 22 nt, Human
uccagcuuugagauuuuaugga

SEQ ID NO: 774399 - RNA, 22 nt, Human
uuucccaguucccugcucuaua

SEQ ID NO: 774400 - RNA, 22 nt, Human
uugcauuugagaaaguucuccu

SEQ ID NO: 774401 - RNA, 22 nt, Human
acagcuguggggacucuugccc

SEQ ID NO: 774402 - RNA, 22 nt, Human
cagcucugggagucccaccccu

SEQ ID NO: 774403 - RNA, 22 nt, Human
aguuagugaagcucaucacagc

SEQ ID NO: 774404 - RNA, 22 nt, Human
aggaagcucaaagccaugaugu

SEQ ID NO: 774405 - RNA, 20 nt, Human
uauggcuugcagccacccuu

SEQ ID NO: 774406 - RNA, 22 nt, Human
aggugccuaucuggucucugca

SEQ ID NO: 774407 - RNA, 22 nt, Human
cuggcucaggaaaguugcugcu

SEQ ID NO: 774408 - RNA, 22 nt, Human
cugaggcaggagaauugcugga

SEQ ID NO: 774409 - RNA, 22 nt, Human
ugugucugcacugaguccucac

SEQ ID NO: 774410 - RNA, 22 nt, Human
uauguagcaauagcaucauacu

SEQ ID NO: 774411 - RNA, 22 nt, Human
aaagacuggaaggugaggcugu

SEQ ID NO: 774412 - RNA, 22 nt, Human
cagcauuuucuuaauguaggug

SEQ ID NO: 774413 - RNA, 22 nt, Human
auucugggaguguaggaugguu

SEQ ID NO: 774414 - RNA, 22 nt, Human
aagugaugcuacgacuuugaca

SEQ ID NO: 774415 - RNA, 22 nt, Human
uaaaaguggauaagcuguagga

SEQ ID NO: 774416 - RNA, 22 nt, Human
uaucucuagcgcacagaagaaa

SEQ ID NO: 774417 - RNA, 22 nt, Human
cucuggcuugguaaaaacuucu

SEQ ID NO: 774418 - RNA, 22 nt, Human
cagucaccuagacagaacuuac

SEQ ID NO: 774419 - RNA, 22 nt, Human
ucauugcagcuucagguguuca

SEQ ID NO: 774420 - RNA, 22 nt, Human
cuccuguugcacuaguuccuga

SEQ ID NO: 774421 - RNA, 20 nt, Human
gcucugaccauaucaagaca

SEQ ID NO: 774422 - RNA, 22 nt, Human
cagugccaugucugagccccua

SEQ ID NO: 774423 - RNA, 22 nt, Human
ugucccauggacacaacuucuu

SEQ ID NO: 774424 - RNA, 22 nt, Human
agugcuuugaauguucugggca

SEQ ID NO: 774425 - RNA, 22 nt, Human
aggaaccagagguugagcaacu

SEQ ID NO: 774426 - RNA, 22 nt, Human
auauguguacgugcaguauaua

SEQ ID NO: 774427 - RNA, 22 nt, Human
ucaguguccggagccugagugc

SEQ ID NO: 774428 - RNA, 22 nt, Human
cagagccuuaguucuccuagaa

SEQ ID NO: 774429 - RNA, 22 nt, Human
caguccucucugugucugcacc

SEQ ID NO: 774430 - RNA, 23 nt, Human
uugcugccugagccuuccucugg

SEQ ID NO: 774431 - RNA, 21 nt, Human
agcagcagcaguggggcuucu

SEQ ID NO: 774432 - RNA, 22 nt, Human
auccuucaguggaagacaguag

SEQ ID NO: 774433 - RNA, 22 nt, Human
augaacaaguauuugcaugagc

SEQ ID NO: 774434 - RNA, 22 nt, Human
gggcauggaggucugucugcag

SEQ ID NO: 774435 - RNA, 22 nt, Human
ugaguuaucuaaaauagucaaa

SEQ ID NO: 774436 - RNA, 22 nt, Human
aggcacugggggaugagcaagg

SEQ ID NO: 774437 - RNA, 22 nt, Human
uagaucauggaguaaaauggaa

SEQ ID NO: 774438 - RNA, 22 nt, Human
ucaggaguaaagaagacuugac

SEQ ID NO: 774439 - RNA, 22 nt, Human
aggcaagggggcgccaccuucc

SEQ ID NO: 774440 - RNA, 20 nt, Human
agcaccuguguagaagcauc

SEQ ID NO: 774441 - RNA, 22 nt, Human
uuauggaaaauacaauuauaag

SEQ ID NO: 774442 - RNA, 22 nt, Human
ucagugcuuauauucugagccu

SEQ ID NO: 774443 - RNA, 20 nt, Human
cuuugccuauucucugccug

SEQ ID NO: 774444 - RNA, 22 nt, Human
aacucacagcuguuuggauuag

SEQ ID NO: 774445 - RNA, 22 nt, Human
cugggucuucagcagcaggcgg

SEQ ID NO: 774446 - RNA, 22 nt, Human
cauauuagccuccacugggaca

SEQ ID NO: 774447 - RNA, 18 nt, Human
ggcuccgacgggccgugc

SEQ ID NO: 774448 - RNA, 22 nt, Human
uguguuccuucgucuucccuuc

SEQ ID NO: 774449 - RNA, 22 nt, Human
gaaguucuuugcuccccaguac

SEQ ID NO: 774450 - RNA, 22 nt, Human
cuggagugaagcuuauuuuuca

SEQ ID NO: 774451 - RNA, 22 nt, Human
uuucaaacuaugugucaggcag

SEQ ID NO: 774452 - RNA, 22 nt, Human
gugaggacugguaaggacugca

SEQ ID NO: 774453 - RNA, 22 nt, Human
aaagcacauuacaagcucaguc

SEQ ID NO: 774454 - RNA, 22 nt, Human
augucuuucaaauucugccuag

SEQ ID NO: 774455 - RNA, 22 nt, Human
caggaagcucuuagcagucacc

SEQ ID NO: 774456 - RNA, 22 nt, Human
agaccacagucaggcuccuggu

SEQ ID NO: 774457 - RNA, 22 nt, Human
aggcuggagcaagggggcauau

SEQ ID NO: 774458 - RNA, 22 nt, Human
auuaagagccuacuaugugccg

SEQ ID NO: 774459 - RNA, 22 nt, Human
caugaggauccaggugacaggc

SEQ ID NO: 774460 - RNA, 23 nt, Human
auguauuuaaauuucagugauga

SEQ ID NO: 774461 - RNA, 19 nt, Human
uuucuuuuccccucagcac

SEQ ID NO: 774462 - RNA, 22 nt, Human
auuucuuccuucuccuagaaga

SEQ ID NO: 774463 - RNA, 22 nt, Human
caagagcucagaaacccuugcu

SEQ ID NO: 774464 - RNA, 22 nt, Human
uccucccuguaccauuccucug

SEQ ID NO: 774465 - RNA, 22 nt, Human
aauuugauucccugcaccuguu

SEQ ID NO: 774466 - RNA, 22 nt, Human
uaaacaucuguagccuucaguc

SEQ ID NO: 774467 - RNA, 22 nt, Human
uggcagugccccuugaccagug

SEQ ID NO: 774468 - RNA, 22 nt, Human
ucccagcuuagauuugcucauu

SEQ ID NO: 774469 - RNA, 17 nt, Human
cgugugcuugugugcac

SEQ ID NO: 774470 - RNA, 22 nt, Human
cagauaugauaggauuagcaca

SEQ ID NO: 774471 - RNA, 22 nt, Human
cacuagaaagguacagauuaug

SEQ ID NO: 774472 - RNA, 22 nt, Human
agccacugguaaacugguagga

SEQ ID NO: 774473 - RNA, 22 nt, Human
cacuguucuuuuuguaguccaa

SEQ ID NO: 774474 - RNA, 22 nt, Human
uagcugccagaccauucuuacu

SEQ ID NO: 774475 - RNA, 22 nt, Human
auuuccugguugcauuggcuuu

SEQ ID NO: 774476 - RNA, 22 nt, Human
gagguccaacacaauggguguu

SEQ ID NO: 774477 - RNA, 22 nt, Human
ccaggagcaggagcugcagcug

SEQ ID NO: 774478 - RNA, 22 nt, Human
cagaggcacagugcgggccacu

SEQ ID NO: 774479 - RNA, 22 nt, Human
cugaggcuggggaagggaagug

SEQ ID NO: 774480 - RNA, 22 nt, Human
cauggcugaacacucagugacu

SEQ ID NO: 774481 - RNA, 22 nt, Human
cuggccuggcagggagggcaug

SEQ ID NO: 774482 - RNA, 22 nt, Human
uagcaguuaaucugagccaaga

SEQ ID NO: 774483 - RNA, 22 nt, Human
cugccagaucauuggauucaca

SEQ ID NO: 774484 - RNA, 22 nt, Human
agaccaagaaaggaugaggauc

SEQ ID NO: 774485 - RNA, 22 nt, Human
ugaaggaaaugacggcagaaga

SEQ ID NO: 774486 - RNA, 22 nt, Human
gggaucugauuuaggaugggag

SEQ ID NO: 774487 - RNA, 22 nt, Human
uccaauuuuacgucuguauaaa

SEQ ID NO: 774488 - RNA, 22 nt, Human
caguaaauuuuauuugugggug

SEQ ID NO: 774489 - RNA, 20 nt, Human
auguaaaauuauaaggcuga

SEQ ID NO: 774490 - RNA, 22 nt, Human
agcccugcacaggucuguggcu

SEQ ID NO: 774491 - RNA, 22 nt, Human
uaaaacuagaccgugagucuaa

SEQ ID NO: 774492 - RNA, 22 nt, Human
cugggcugcaucaaagaggcau

SEQ ID NO: 774493 - RNA, 22 nt, Human
cauacugugaagcuuacuauuu

SEQ ID NO: 774494 - RNA, 22 nt, Human
uacaaagcaaaucaucuaagag

SEQ ID NO: 774495 - RNA, 22 nt, Human
ucagaagaaagauguuauuacu

SEQ ID NO: 774496 - RNA, 22 nt, Human
ucucuacauaaccucaauacuc

SEQ ID NO: 774497 - RNA, 22 nt, Human
aucaccaggcaaaaugucagag

SEQ ID NO: 774498 - RNA, 22 nt, Human
agugcuuugagcguuugaaaag

SEQ ID NO: 774499 - RNA, 22 nt, Human
aucugagucucugacagcaugu

SEQ ID NO: 774500 - RNA, 22 nt, Human
ggcaucaggguaggaagguauc

SEQ ID NO: 774501 - RNA, 19 nt, Human
ccccaaaguuuagauguug

SEQ ID NO: 774502 - RNA, 22 nt, Human
cccucaggaugcaguggaagug

SEQ ID NO: 774503 - RNA, 22 nt, Human
gcugaggaaaccaaugcucaga

SEQ ID NO: 774504 - RNA, 20 nt, Human
uaucaaucagaaagaagacu

SEQ ID NO: 774505 - RNA, 22 nt, Human
ucugcagagcauuauagcaaaa

SEQ ID NO: 774506 - RNA, 22 nt, Human
aaagacuuggcuuaugauuugc

SEQ ID NO: 774507 - RNA, 22 nt, Human
ggcagcucacugauuagcaauu

SEQ ID NO: 774508 - RNA, 19 nt, Human
cugaggcccauguaccaug

SEQ ID NO: 774509 - RNA, 22 nt, Human
ccugcucuccauacacuuucua

SEQ ID NO: 774510 - RNA, 22 nt, Human
gacuguggauagaacacugcag

SEQ ID NO: 774511 - RNA, 22 nt, Human
aauugauggacagagaugaaga

SEQ ID NO: 774512 - RNA, 22 nt, Human
cagggccucgaagccucugggc

SEQ ID NO: 774513 - RNA, 22 nt, Human
ggcucugcuucucaccuguucc

SEQ ID NO: 774514 - RNA, 22 nt, Human
ccuccccucagacagagacugg

SEQ ID NO: 774515 - RNA, 22 nt, Human
uaaauugcugauuuuagaugcu

SEQ ID NO: 774516 - RNA, 22 nt, Human
aaauaggaaugugguccuggga

SEQ ID NO: 774517 - RNA, 22 nt, Human
ugcuggagaucauuaauguuca

SEQ ID NO: 774518 - RNA, 22 nt, Human
gcugccaggcccuggggcuaug

SEQ ID NO: 774519 - RNA, 21 nt, Human
uggcucugagccucauggcug

SEQ ID NO: 774520 - RNA, 22 nt, Human
uguuugugagaugugagguacg

SEQ ID NO: 774521 - RNA, 23 nt, Human
cuggaacauaguagauggucaga

SEQ ID NO: 774522 - RNA, 22 nt, Human
auuuugaaaagcauuugaguaa

SEQ ID NO: 774523 - RNA, 22 nt, Human
gcauuuuucaucccucuugggu

SEQ ID NO: 774524 - RNA, 21 nt, Human
caggccgggugagcaggcagc

SEQ ID NO: 774525 - RNA, 22 nt, Human
aaccuggaggcuguguagucuu

SEQ ID NO: 774526 - RNA, 22 nt, Human
aggguccaucaaggacugcaca

SEQ ID NO: 774527 - RNA, 22 nt, Human
cuggagcucuucugagugugcu

SEQ ID NO: 774528 - RNA, 22 nt, Human
ugagcuguggugggguagagga

SEQ ID NO: 774529 - RNA, 22 nt, Human
gccuggaucccagggagucagg

SEQ ID NO: 774530 - RNA, 22 nt, Human
aaaguggucaccuucucauuuc

SEQ ID NO: 774531 - RNA, 22 nt, Human
ucuuagcaaauuuucuuugccu

SEQ ID NO: 774532 - RNA, 22 nt, Human
auucauuugcuauuguguaugg

SEQ ID NO: 774533 - RNA, 19 nt, Human
ccaggccugcgggcguugg

SEQ ID NO: 774534 - RNA, 22 nt, Human
gugcuggcuggggcaucaggca

SEQ ID NO: 774535 - RNA, 22 nt, Human
aggucugagucuauauacauug

SEQ ID NO: 774536 - RNA, 22 nt, Human
gugucugugucauuacuaauag

SEQ ID NO: 774537 - RNA, 22 nt, Human
gaggcuucccgcccaugcugga

SEQ ID NO: 774538 - RNA, 22 nt, Human
auacaucauuucccaucaaucg

SEQ ID NO: 774539 - RNA, 22 nt, Human
agaucacagcccccagaugcca

SEQ ID NO: 774540 - RNA, 22 nt, Human
ugcauuucagaagaaaauucgg

SEQ ID NO: 774541 - RNA, 22 nt, Human
gaagagcugcucagaacaugau

SEQ ID NO: 774542 - RNA, 22 nt, Human
cagggccagcgucucgggcuau

SEQ ID NO: 774543 - RNA, 22 nt, Human
ucuucucucauguaggagggaa

SEQ ID NO: 774544 - RNA, 22 nt, Human
gagggcugcaaugagacagaga

SEQ ID NO: 774545 - RNA, 19 nt, Human
agggccaggauucuggaac

SEQ ID NO: 774546 - RNA, 22 nt, Human
acacugcagauguaauuugagu

SEQ ID NO: 774547 - RNA, 22 nt, Human
agaggcaaguucagagcuagga

SEQ ID NO: 774548 - RNA, 22 nt, Human
accuuauuuggaaauauaauua

SEQ ID NO: 774549 - RNA, 21 nt, Human
acucugcugcgggcuuggccu

SEQ ID NO: 774550 - RNA, 20 nt, Human
gucaagucccuggggcagcu

SEQ ID NO: 774551 - RNA, 22 nt, Human
uccugcuguuuaccuacaaugg

SEQ ID NO: 774552 - RNA, 22 nt, Human
cucuggagcgcugcuucccgcg

SEQ ID NO: 774553 - RNA, 22 nt, Human
cacaguuugggucuccggggca

SEQ ID NO: 774554 - RNA, 22 nt, Human
aguuuuuccugauuuuacagaa

SEQ ID NO: 774555 - RNA, 20 nt, Human
gccuggaggcaaugggaaga

SEQ ID NO: 774556 - RNA, 22 nt, Human
aggccagggccagauuagccac

SEQ ID NO: 774557 - RNA, 22 nt, Human
cucauuagacagguauacuuua

SEQ ID NO: 774558 - RNA, 22 nt, Human
agcuaggggaccaagguggccc

SEQ ID NO: 774559 - RNA, 21 nt, Human
accagcauuccacacuguccc

SEQ ID NO: 774560 - RNA, 22 nt, Human
ugauucaacuuucauaacaaaa

SEQ ID NO: 774561 - RNA, 22 nt, Human
ggcuccaagucucagagugaag

SEQ ID NO: 774562 - RNA, 22 nt, Human
cucugugucagcugggugugca

SEQ ID NO: 774563 - RNA, 22 nt, Human
gucuaaacuuuggcccagauuu

SEQ ID NO: 774564 - RNA, 22 nt, Human
ugagauaauuaaaucaaaaccu

SEQ ID NO: 774565 - RNA, 22 nt, Human
cagcaggaaaaucaauucugug

SEQ ID NO: 774566 - RNA, 22 nt, Human
cuaaaccuuugugcuugcaauu

SEQ ID NO: 774567 - RNA, 22 nt, Human
uuccugcccugccugugccacu

SEQ ID NO: 774568 - RNA, 22 nt, Human
auuccacaggacuaccaaugug

SEQ ID NO: 774569 - RNA, 22 nt, Human
caagucugaccucugggugaag

SEQ ID NO: 774570 - RNA, 22 nt, Human
cugcgugucuccuuggggcaga

SEQ ID NO: 774571 - RNA, 23 nt, Human
agacacauaggagcagcuauugg

SEQ ID NO: 774572 - RNA, 22 nt, Human
ugccugggacuguacuaaauuu

SEQ ID NO: 774573 - RNA, 22 nt, Human
aaauugcauuuuaaagguagau

SEQ ID NO: 774574 - RNA, 22 nt, Human
acaagauagguugagucuagcc

SEQ ID NO: 774575 - RNA, 22 nt, Human
guucuuccucauugcuuugaag

SEQ ID NO: 774576 - RNA, 22 nt, Human
acacaagauuguguauugaauu

SEQ ID NO: 774577 - RNA, 21 nt, Human
ggagucauuagucauuuccuu

SEQ ID NO: 774578 - RNA, 22 nt, Human
aaugacagagcacugaacuugg

SEQ ID NO: 774579 - RNA, 22 nt, Human
aaaguuuccugcuaagugcuau

SEQ ID NO: 774580 - RNA, 22 nt, Human
gcaugguggccuuaggguagcc

SEQ ID NO: 774581 - RNA, 22 nt, Human
cauuaugugagugauuaauuca

SEQ ID NO: 774582 - RNA, 22 nt, Human
uugucgggcuuacgcagggcca

SEQ ID NO: 774583 - RNA, 22 nt, Human
auuacaucaguugacaugugag

SEQ ID NO: 774584 - RNA, 18 nt, Human
acaaaggucugcaagacc

SEQ ID NO: 774585 - RNA, 22 nt, Human
cauguacaaaaggcaaaugccu

SEQ ID NO: 774586 - RNA, 22 nt, Human
ugaguucaaauuuuggcucugc

SEQ ID NO: 774587 - RNA, 22 nt, Human
agggaucaguagggacggcagc

SEQ ID NO: 774588 - RNA, 22 nt, Human
cguuggagacacuugaggacuu

SEQ ID NO: 774589 - RNA, 16 nt, Human
gcccaggacgggaggc

SEQ ID NO: 774590 - RNA, 22 nt, Human
cacaaggagguccugaggaagc

SEQ ID NO: 774591 - RNA, 22 nt, Human
uccagguauuacuaaguguuaa

SEQ ID NO: 774592 - RNA, 22 nt, Human
cucccugggccucaguuucucu

SEQ ID NO: 774593 - RNA, 22 nt, Human
uccagcagggaauuaguagucu

SEQ ID NO: 774594 - RNA, 22 nt, Human
cuccacucaccgaggcagagca

SEQ ID NO: 774595 - RNA, 17 nt, Human
aggagucucagaugagc

SEQ ID NO: 774596 - RNA, 22 nt, Human
ugggggagauuagagcuucuua

SEQ ID NO: 774597 - RNA, 18 nt, Human
ggugaggcggcggccagc

SEQ ID NO: 774598 - RNA, 22 nt, Human
aacacugucuuauacuucaaug

SEQ ID NO: 774599 - RNA, 20 nt, Human
uauuuguauuugggaaaguu

SEQ ID NO: 774600 - RNA, 22 nt, Human
uucaaacucuugcucugcuagu

SEQ ID NO: 774601 - RNA, 22 nt, Human
uauauugaccaguacaauuggu

SEQ ID NO: 774602 - RNA, 21 nt, Human
aaagugguaaggauuauuuug

SEQ ID NO: 774603 - RNA, 22 nt, Human
auuaaauuggaucugcauaguu

SEQ ID NO: 774604 - RNA, 22 nt, Human
aagucaagauaaaggugcuggc

SEQ ID NO: 774605 - RNA, 22 nt, Human
aaauuucuugaggcucucuagc

SEQ ID NO: 774606 - RNA, 22 nt, Human
ugccucaguuucaucugcagaa

SEQ ID NO: 774607 - RNA, 22 nt, Human
acagauuuauugaagcugcugc

SEQ ID NO: 774608 - RNA, 22 nt, Human
uaaugcaacgugagauaauuaa

SEQ ID NO: 774609 - RNA, 19 nt, Human
auguuuuaugcugauggga

SEQ ID NO: 774610 - RNA, 22 nt, Human
uucaagucuggagaucuggaac

SEQ ID NO: 774611 - RNA, 22 nt, Human
gugggaagaacuucaaguggcu

SEQ ID NO: 774612 - RNA, 22 nt, Human
acagccagguaaaggcauggca

SEQ ID NO: 774613 - RNA, 20 nt, Human
agagugagacuccaucucag

SEQ ID NO: 774614 - RNA, 22 nt, Human
uauugucaagaaguuuauagug

SEQ ID NO: 774615 - RNA, 18 nt, Human
cacaggcaggugauaggu

SEQ ID NO: 774616 - RNA, 20 nt, Human
cuccaggggaagagccuucc

SEQ ID NO: 774617 - RNA, 22 nt, Human
ccugauucugaugccucaugga

SEQ ID NO: 774618 - RNA, 22 nt, Human
aguggcucuccaagaagucaca

SEQ ID NO: 774619 - RNA, 22 nt, Human
aguggcaguuuuauauuucaug

SEQ ID NO: 774620 - RNA, 22 nt, Human
gggagagagaaaacguggcgca

SEQ ID NO: 774621 - RNA, 22 nt, Human
ucugagaaggguaggcuccauu

SEQ ID NO: 774622 - RNA, 22 nt, Human
uaugccugauaacugugucucu

SEQ ID NO: 774623 - RNA, 23 nt, Human
cauaaaauauuaguaugguagca

SEQ ID NO: 774624 - RNA, 22 nt, Human
gugggaugcaguggugaguggc

SEQ ID NO: 774625 - RNA, 22 nt, Human
auaacccucuggauaggacagg

SEQ ID NO: 774626 - RNA, 22 nt, Human
caucucaucagugagagucagc

SEQ ID NO: 774627 - RNA, 22 nt, Human
augucaaacacaacaccagugg

SEQ ID NO: 774628 - RNA, 22 nt, Human
aaggucugugaggcuguuuguc

SEQ ID NO: 774629 - RNA, 22 nt, Human
gaaaugaaauagcaccaagguu

SEQ ID NO: 774630 - RNA, 22 nt, Human
uuucucaaauacuguuccagga

SEQ ID NO: 774631 - RNA, 23 nt, Human
ugaaagcaaugggucuauaguau

SEQ ID NO: 774632 - RNA, 22 nt, Human
gggcuggaucucacgugagacc

SEQ ID NO: 774633 - RNA, 22 nt, Human
ugaggaagcaaaggcuugugug

SEQ ID NO: 774634 - RNA, 22 nt, Human
ugcguggcgcagcgugugggau

SEQ ID NO: 774635 - RNA, 22 nt, Human
gucaggagauagggcaagcuuc

SEQ ID NO: 774636 - RNA, 22 nt, Human
guggauggauuuugaggaaugg

SEQ ID NO: 774637 - RNA, 22 nt, Human
cugagaggaugcugcaguggag

SEQ ID NO: 774638 - RNA, 22 nt, Human
uuucucuauuaggggcuagcuu

SEQ ID NO: 774639 - RNA, 22 nt, Human
uuacacagaaacacuguucaga

SEQ ID NO: 774640 - RNA, 22 nt, Human
cugggugaauuugaaggaaagg

SEQ ID NO: 774641 - RNA, 22 nt, Human
ggacugugaggucugggugagg

SEQ ID NO: 774642 - RNA, 22 nt, Human
gaugaaauuguuuugauacuuu

SEQ ID NO: 774643 - RNA, 22 nt, Human
uuugacaacacguuauuugccu

SEQ ID NO: 774644 - RNA, 22 nt, Human
ugcucuggaccaugacuaugug

SEQ ID NO: 774645 - RNA, 22 nt, Human
ucuaauaaauaaaugcucuagg

SEQ ID NO: 774646 - RNA, 22 nt, Human
gcagaggcaaucagguaugugg

SEQ ID NO: 774647 - RNA, 21 nt, Human
uggagcugccacuuguccucc

SEQ ID NO: 774648 - RNA, 22 nt, Human
guugaaagagcauggacuugaa

SEQ ID NO: 774649 - RNA, 22 nt, Human
cucuccuuugaagcaacuguau

SEQ ID NO: 774650 - RNA, 22 nt, Human
uggaaggcaugggaacuguucu

SEQ ID NO: 774651 - RNA, 19 nt, Human
augauacaggugaaaauug

SEQ ID NO: 774652 - RNA, 22 nt, Human
gcuguuauaauauucuguuugu

SEQ ID NO: 774653 - RNA, 22 nt, Human
uccacaggaaagcaccucccau

SEQ ID NO: 774654 - RNA, 22 nt, Human
uauuuaauuagugauuguagag

SEQ ID NO: 774655 - RNA, 22 nt, Human
uggagucaguggcuauugggca

SEQ ID NO: 774656 - RNA, 22 nt, Human
accaggccaaaaucauauuuac

SEQ ID NO: 774657 - RNA, 22 nt, Human
gugcccuccugaagccaucaca

SEQ ID NO: 774658 - RNA, 22 nt, Human
acagucuaggccuaggucaaaa

SEQ ID NO: 774659 - RNA, 22 nt, Human
guaaagcagguaguugggacac

SEQ ID NO: 774660 - RNA, 22 nt, Human
uuuagagagaauuuucaaagug

SEQ ID NO: 774661 - RNA, 22 nt, Human
aggcaccuggaucuuggaauuc

SEQ ID NO: 774662 - RNA, 22 nt, Human
gguugguaacucccugugcagu

SEQ ID NO: 774663 - RNA, 22 nt, Human
caggucuggugagagaacaguu

SEQ ID NO: 774664 - RNA, 22 nt, Human
gcucagagaauuuacugcugcc

SEQ ID NO: 774665 - RNA, 22 nt, Human
uuucuaguucucugccaaaaaa

SEQ ID NO: 774666 - RNA, 22 nt, Human
auuaaaccccaguucucuuacu

SEQ ID NO: 774667 - RNA, 22 nt, Human
cagcucuuauuuucucuccuaa

SEQ ID NO: 774668 - RNA, 22 nt, Human
caaacuguucucugugggauuc

SEQ ID NO: 774669 - RNA, 20 nt, Human
ugcucuggaaauggucugag

SEQ ID NO: 774670 - RNA, 22 nt, Human
agcuggccuguuagagcugagu

SEQ ID NO: 774671 - RNA, 19 nt, Human
cuuuucaucaacagccaau

SEQ ID NO: 774672 - RNA, 22 nt, Human
uuggccaaccagaacggagguc

SEQ ID NO: 774673 - RNA, 22 nt, Human
uuugcauuaguuuagauuucaa

SEQ ID NO: 774674 - RNA, 21 nt, Human
cccaccccauaaggcagaacc

SEQ ID NO: 774675 - RNA, 20 nt, Human
acacuucauuugcagcagcu

SEQ ID NO: 774676 - RNA, 22 nt, Human
cacaggaaguggucagugccag

SEQ ID NO: 774677 - RNA, 22 nt, Human
gucagauuaauagcaauaauaa

SEQ ID NO: 774678 - RNA, 22 nt, Human
gaucuuuucagguuucucuagu

SEQ ID NO: 774679 - RNA, 22 nt, Human
ccaggguguagggauuccagau

SEQ ID NO: 774680 - RNA, 22 nt, Human
ggaccuggcaauuugcaucucu

SEQ ID NO: 774681 - RNA, 22 nt, Human
auggaauaauuguuucacagaa

SEQ ID NO: 774682 - RNA, 17 nt, Human
ggcuggaggggacccgg

SEQ ID NO: 774683 - RNA, 21 nt, Human
uggcucaguugcugggcacag

SEQ ID NO: 774684 - RNA, 18 nt, Human
ucagauuuaacuguaucc

SEQ ID NO: 774685 - RNA, 22 nt, Human
augcuuccucuacggccucuga

SEQ ID NO: 774686 - RNA, 22 nt, Human
uaaccaaagggccuaaggaaug

SEQ ID NO: 774687 - RNA, 22 nt, Human
gugaaggauuggagggcaucuu

SEQ ID NO: 774688 - RNA, 22 nt, Human
uugaaaggugacauuguuagag

SEQ ID NO: 774689 - RNA, 22 nt, Human
uacagcuucagugugccccagu

SEQ ID NO: 774690 - RNA, 22 nt, Human
uuucugcucgcucucaaucagg

SEQ ID NO: 774691 - RNA, 22 nt, Human
uccugucagugaggcagaugaa

SEQ ID NO: 774692 - RNA, 20 nt, Human
guuuuucuugggcgagcuau

SEQ ID NO: 774693 - RNA, 22 nt, Human
ccuugggauuucucaugccaau

SEQ ID NO: 774694 - RNA, 19 nt, Human
ccuuccuccccagggccau

SEQ ID NO: 774695 - RNA, 22 nt, Human
uccucagaaaccccugugaggu

SEQ ID NO: 774696 - RNA, 23 nt, Human
ugcuggaauuuguacccuggcag

SEQ ID NO: 774697 - RNA, 22 nt, Human
uuggaaaagcguucucuguagc

SEQ ID NO: 774698 - RNA, 22 nt, Human
aggcccagcuggacaaacugcu

SEQ ID NO: 774699 - RNA, 22 nt, Human
ugucuuaugcugcauagacuau

SEQ ID NO: 774700 - RNA, 22 nt, Human
ccuggcugcucugaugagcgcc

SEQ ID NO: 774701 - RNA, 22 nt, Human
gaugugggguugagggaccagc

SEQ ID NO: 774702 - RNA, 18 nt, Human
gucaccuggaucagauua

SEQ ID NO: 774703 - RNA, 21 nt, Human
uccaggaguggcugggcaggg

SEQ ID NO: 774704 - RNA, 22 nt, Human
uguuccuucacagcaguggaca

SEQ ID NO: 774705 - RNA, 22 nt, Human
cuauacagcagcuuacuaguua

SEQ ID NO: 774706 - RNA, 22 nt, Human
aguccaugguuguaguucucuc

SEQ ID NO: 774707 - RNA, 22 nt, Human
uggauuuaguucuucacaggcc

SEQ ID NO: 774708 - RNA, 19 nt, Human
ugguccagcuucuucuccu

SEQ ID NO: 774709 - RNA, 22 nt, Human
acauuuuuggguugaugucuga

SEQ ID NO: 774710 - RNA, 22 nt, Human
agggaugggaacuccuccagca

SEQ ID NO: 774711 - RNA, 22 nt, Human
guggaggguuugcaaugugcag

SEQ ID NO: 774712 - RNA, 22 nt, Human
cuuccuagugucuacuuuggag

SEQ ID NO: 774713 - RNA, 22 nt, Human
uacauugaaaucaauggaugug

SEQ ID NO: 774714 - RNA, 22 nt, Human
ggagccugagcggcccagggcc

SEQ ID NO: 774715 - RNA, 22 nt, Human
cuguauuucccacauucucuau

SEQ ID NO: 774716 - RNA, 22 nt, Human
ucuuacauauagcaugaguaca

SEQ ID NO: 774717 - RNA, 22 nt, Human
ccuaauuugauuuuaaauagcc

SEQ ID NO: 774718 - RNA, 22 nt, Human
agcagcagauucagcaggaaug

SEQ ID NO: 774719 - RNA, 22 nt, Human
uucacccuggaccagaaauugg

SEQ ID NO: 774720 - RNA, 22 nt, Human
uaaggcagugaaacuauucugu

SEQ ID NO: 774721 - RNA, 22 nt, Human
guggaagggacugccuagagga

SEQ ID NO: 774722 - RNA, 22 nt, Human
uacucugccccagccaauaaug

SEQ ID NO: 774723 - RNA, 22 nt, Human
acuguauucuagucauguuugu

SEQ ID NO: 774724 - RNA, 18 nt, Human
uccugccugcgggcuccc

SEQ ID NO: 774725 - RNA, 22 nt, Human
cggggcugacagcaggugugcu

SEQ ID NO: 774726 - RNA, 22 nt, Human
gcucugggugaauggcagauug

SEQ ID NO: 774727 - RNA, 22 nt, Human
cauacuuugggauaagagugga

SEQ ID NO: 774728 - RNA, 22 nt, Human
acacccagauuaugcacacaaa

SEQ ID NO: 774729 - RNA, 22 nt, Human
ugcuggcccaguauggacugca

SEQ ID NO: 774730 - RNA, 22 nt, Human
agcugccugccaugccgcuggu

SEQ ID NO: 774731 - RNA, 23 nt, Human
aaacuacauuuauaguuuuucuc

SEQ ID NO: 774732 - RNA, 22 nt, Human
auggcugccccaaauuguugcu

SEQ ID NO: 774733 - RNA, 22 nt, Human
aucaagucugccugucuggagg

SEQ ID NO: 774734 - RNA, 22 nt, Human
aucugagucaaauauuucauuu

SEQ ID NO: 774735 - RNA, 22 nt, Human
agagcaauggcauccagcugau

SEQ ID NO: 774736 - RNA, 22 nt, Human
auccagggauaaaaguaagguu

SEQ ID NO: 774737 - RNA, 22 nt, Human
ugcuuccacuaaugagcugugu

SEQ ID NO: 774738 - RNA, 22 nt, Human
ggcuggagguagaagaacacuu

SEQ ID NO: 774739 - RNA, 22 nt, Human
cagaagugcaauuuaaauuagg

SEQ ID NO: 774740 - RNA, 22 nt, Human
ugcaggagcugcuguccugcuc

SEQ ID NO: 774741 - RNA, 22 nt, Human
ugaagaggccgugugcagguga

SEQ ID NO: 774742 - RNA, 22 nt, Human
aaagcaggcagcaggcuggauu

SEQ ID NO: 774743 - RNA, 19 nt, Human
ggcuucaguuuagcaggcu

SEQ ID NO: 774744 - RNA, 22 nt, Human
uucuuuugggaauuacguaugc

SEQ ID NO: 774745 - RNA, 22 nt, Human
cauaaaguagcagagcaugacu

SEQ ID NO: 774746 - RNA, 22 nt, Human
auuuuuuagccaagacucugca

SEQ ID NO: 774747 - RNA, 22 nt, Human
gccccaggugguaaaccuaaga

SEQ ID NO: 774748 - RNA, 22 nt, Human
cacuguaagaugagcuuuuuua

SEQ ID NO: 774749 - RNA, 22 nt, Human
gggaggcacgaggcgcgcagug

SEQ ID NO: 774750 - RNA, 22 nt, Human
uaagaucaguucaaacaugugu

SEQ ID NO: 774751 - RNA, 22 nt, Human
cuacagguaugugcaugacauc

SEQ ID NO: 774752 - RNA, 22 nt, Human
uuguaugaggauagcaagaagc

SEQ ID NO: 774753 - RNA, 22 nt, Human
uaaagugcaggcuacucagaag

SEQ ID NO: 774754 - RNA, 22 nt, Human
cagcugcuuacuagcuguguga

SEQ ID NO: 774755 - RNA, 22 nt, Human
ucugcauuacaugccauagaca

SEQ ID NO: 774756 - RNA, 22 nt, Human
uucauuuguggugaaugaagug

SEQ ID NO: 774757 - RNA, 22 nt, Human
cucaggagguuuccugucuagg

SEQ ID NO: 774758 - RNA, 22 nt, Human
gagcacagccaaaguaagaagg

SEQ ID NO: 774759 - RNA, 22 nt, Human
uuucuccugugaggucagaagu

SEQ ID NO: 774760 - RNA, 22 nt, Human
uuucacacccacuaggacuguu

SEQ ID NO: 774761 - RNA, 22 nt, Human
gaaaaugugucaucccuacugu

SEQ ID NO: 774762 - RNA, 22 nt, Human
cagcauggggcuuggagucagc

SEQ ID NO: 774763 - RNA, 22 nt, Human
ugaaauaauaucuggaucaauc

SEQ ID NO: 774764 - RNA, 22 nt, Human
ugcuuccuauccacacaaugcc

SEQ ID NO: 774765 - RNA, 23 nt, Human
ggcacagaugcugagcaugugca

SEQ ID NO: 774766 - RNA, 22 nt, Human
auacaguagggaccaugucuga

SEQ ID NO: 774767 - RNA, 22 nt, Human
uggggcagccacauagacaaca

SEQ ID NO: 774768 - RNA, 22 nt, Human
cccucacagucuaggagcagcu

SEQ ID NO: 774769 - RNA, 22 nt, Human
caguguuuagaucaagaaggcc

SEQ ID NO: 774770 - RNA, 22 nt, Human
cccaaaggaaggacaaggcaga

SEQ ID NO: 774771 - RNA, 22 nt, Human
uucagagauggaaggcagaaug

SEQ ID NO: 774772 - RNA, 22 nt, Human
ucucagggcucagagcucaggc

SEQ ID NO: 774773 - RNA, 22 nt, Human
gcaccccuggacgguagggcca

SEQ ID NO: 774774 - RNA, 22 nt, Human
auuuaauuguucuucuggcuau

SEQ ID NO: 774775 - RNA, 22 nt, Human
uaaauguauaggcacuaaaccu

SEQ ID NO: 774776 - RNA, 20 nt, Human
uuauguguaccugugcuccc

SEQ ID NO: 774777 - RNA, 20 nt, Human
aguguuucucaacauggggc

SEQ ID NO: 774778 - RNA, 22 nt, Human
uuuauuggaacacagccaugac

SEQ ID NO: 774779 - RNA, 22 nt, Human
uaccucaugcuguacagcacgu

SEQ ID NO: 774780 - RNA, 23 nt, Human
auggggcucaacacuuaguagcu

SEQ ID NO: 774781 - RNA, 22 nt, Human
gagcugaagcgcuacagcaucc

SEQ ID NO: 774782 - RNA, 22 nt, Human
agggagcauugugacauaucac

SEQ ID NO: 774783 - RNA, 22 nt, Human
uuugaagauaaauauggagaaa

SEQ ID NO: 774784 - RNA, 22 nt, Human
ggcaggcaggucuucauggccc

SEQ ID NO: 774785 - RNA, 22 nt, Human
guggaaggugcuagaacaagga

SEQ ID NO: 774786 - RNA, 22 nt, Human
ucaggugaccugagccacuaug

SEQ ID NO: 774787 - RNA, 22 nt, Human
ccuaacuuucauuaggccccag

SEQ ID NO: 774788 - RNA, 22 nt, Human
ucaaugauaguacaaucagccu

SEQ ID NO: 774789 - RNA, 22 nt, Human
ucacagcacauggaccgagucc

SEQ ID NO: 774790 - RNA, 20 nt, Human
gcuguguagcagugugcagu

SEQ ID NO: 774791 - RNA, 22 nt, Human
cuggcacaacuccaccucagcg

SEQ ID NO: 774792 - RNA, 22 nt, Human
ucaagugcuugugagguauuug

SEQ ID NO: 774793 - RNA, 22 nt, Human
ugacagggcuagaggcaaugca

SEQ ID NO: 774794 - RNA, 22 nt, Human
aggaagagguagcugucaaggg

SEQ ID NO: 774795 - RNA, 22 nt, Human
ccaggagggaggaguuccugag

SEQ ID NO: 774796 - RNA, 22 nt, Human
gaauuucagagguaacaucauc

SEQ ID NO: 774797 - RNA, 22 nt, Human
auacacaucuauuuaagagaca

SEQ ID NO: 774798 - RNA, 22 nt, Human
auuauguagguuaggugguugu

SEQ ID NO: 774799 - RNA, 22 nt, Human
aagaaguuagguguaacaauau

SEQ ID NO: 774800 - RNA, 22 nt, Human
aacucauucuaaguauaccaaa

SEQ ID NO: 774801 - RNA, 20 nt, Human
acacauauagcagcauaaac

SEQ ID NO: 774802 - RNA, 22 nt, Human
caguccuugcuaugacccugag

SEQ ID NO: 774803 - RNA, 22 nt, Human
auuuacacuaaaggaaggagga

SEQ ID NO: 774804 - RNA, 22 nt, Human
gcuuucugaagcaguguuucuc

SEQ ID NO: 774805 - RNA, 22 nt, Human
augugugguacagucccguuua

SEQ ID NO: 774806 - RNA, 23 nt, Human
ugugggcgcauuguaaggguagc

SEQ ID NO: 774807 - RNA, 22 nt, Human
gcagcugccgugagcucacgcc

SEQ ID NO: 774808 - RNA, 22 nt, Human
aguaacuaugcuugagaaucag

SEQ ID NO: 774809 - RNA, 22 nt, Human
accaggaacaagccauggagga

SEQ ID NO: 774810 - RNA, 22 nt, Human
ugacucaguacaucuggaguug

SEQ ID NO: 774811 - RNA, 18 nt, Human
cauaauuuucuuucuuua

SEQ ID NO: 774812 - RNA, 22 nt, Human
gcugcugcuugaaggcucggag

SEQ ID NO: 774813 - RNA, 22 nt, Human
uaggccaaggacaguaaggaca

SEQ ID NO: 774814 - RNA, 22 nt, Human
ccucagagguguggcaucucug

SEQ ID NO: 774815 - RNA, 22 nt, Human
guggggcucccaucuccuggcu

SEQ ID NO: 774816 - RNA, 22 nt, Human
gagcuccuggauugcuccuagg

SEQ ID NO: 774817 - RNA, 22 nt, Human
ccucucggcagcccaucuuguc

SEQ ID NO: 774818 - RNA, 22 nt, Human
agaagcagaaggaagcagggcc

SEQ ID NO: 774819 - RNA, 22 nt, Human
auguguccacaggugugagaga

SEQ ID NO: 774820 - RNA, 22 nt, Human
gaagccagcaguggagaaagga

SEQ ID NO: 774821 - RNA, 22 nt, Human
agcacauguauucuccuugaau

SEQ ID NO: 774822 - RNA, 22 nt, Human
ucaaaaguuucacauagagaua

SEQ ID NO: 774823 - RNA, 21 nt, Human
aggauuucugucauuucagau

SEQ ID NO: 774824 - RNA, 22 nt, Human
acauaucuuucccucuccugaa

SEQ ID NO: 774825 - RNA, 22 nt, Human
gagcuuggaagcagauccucac

SEQ ID NO: 774826 - RNA, 22 nt, Human
ggcagugcaaggcuggcacagu

SEQ ID NO: 774827 - RNA, 22 nt, Human
uccacagguaugaggccccacc

SEQ ID NO: 774828 - RNA, 22 nt, Human
agcugaaacccaggccucagcu

SEQ ID NO: 774829 - RNA, 22 nt, Human
agccaccaccacugaaagguua

SEQ ID NO: 774830 - RNA, 22 nt, Human
gcuggccugcugggcaccaccg

SEQ ID NO: 774831 - RNA, 22 nt, Human
ugcagauagcgucauucuugcu

SEQ ID NO: 774832 - RNA, 22 nt, Human
aguggcaguaacauuccacaau

SEQ ID NO: 774833 - RNA, 22 nt, Human
cagugugugacucuggggguac

SEQ ID NO: 774834 - RNA, 22 nt, Human
guuauugacauguauuaagcac

SEQ ID NO: 774835 - RNA, 22 nt, Human
cuucugggagagcuuuugcuuc

SEQ ID NO: 774836 - RNA, 22 nt, Human
aguggcagagcugugucuugaa

SEQ ID NO: 774837 - RNA, 23 nt, Human
ugucccagagggagggauaggcu

SEQ ID NO: 774838 - RNA, 22 nt, Human
ugagcccuaauuuacaacaucu

SEQ ID NO: 774839 - RNA, 22 nt, Human
ugcuguggauucagagaugaaa

SEQ ID NO: 774840 - RNA, 22 nt, Human
gugggaagucucucggaggaag

SEQ ID NO: 774841 - RNA, 22 nt, Human
cggggaagcgguucuggcggua

SEQ ID NO: 774842 - RNA, 22 nt, Human
ucacacuuuccauggcuguuaa

SEQ ID NO: 774843 - RNA, 21 nt, Human
acagcagcaaucugucuuucc

SEQ ID NO: 774844 - RNA, 22 nt, Human
aggcaggcuagucgcuugagcc

SEQ ID NO: 774845 - RNA, 22 nt, Human
uacauugauucaggauauaggc

SEQ ID NO: 774846 - RNA, 22 nt, Human
uaagauuuuuaaaauguccuca

SEQ ID NO: 774847 - RNA, 22 nt, Human
gugugagccaugauguguccag

SEQ ID NO: 774848 - RNA, 22 nt, Human
cacucugaugguuucuguucaa

SEQ ID NO: 774849 - RNA, 22 nt, Human
ucccacacagcccgcucaccgg

SEQ ID NO: 774850 - RNA, 22 nt, Human
ugcuugucacccugccugagug

SEQ ID NO: 774851 - RNA, 22 nt, Human
auugggaagauuuagauccacu

SEQ ID NO: 774852 - RNA, 21 nt, Human
aggaggagagcuuggccuacc

SEQ ID NO: 774853 - RNA, 22 nt, Human
uacuuuauucaggaaggcuggu

SEQ ID NO: 774854 - RNA, 22 nt, Human
ucuuauuugcaacuggcucaga

SEQ ID NO: 774855 - RNA, 19 nt, Human
gcauaaauacacuauuguc

SEQ ID NO: 774856 - RNA, 22 nt, Human
acccggagucggagguugcagu

SEQ ID NO: 774857 - RNA, 22 nt, Human
guggucagaaaucucaguggca

SEQ ID NO: 774858 - RNA, 22 nt, Human
aucacagcacaccugacaugua

SEQ ID NO: 774859 - RNA, 22 nt, Human
guggccuggaguuugauguagg

SEQ ID NO: 774860 - RNA, 22 nt, Human
auaacuuaaugggucaugcucu

SEQ ID NO: 774861 - RNA, 22 nt, Human
uaguuuuacaucagccauuguu

SEQ ID NO: 774862 - RNA, 22 nt, Human
agggcuguaccaucagguuccu

SEQ ID NO: 774863 - RNA, 22 nt, Human
aggaaggugcaguagggugugc

SEQ ID NO: 774864 - RNA, 20 nt, Human
caguccaggcuagaaaacaa

SEQ ID NO: 774865 - RNA, 22 nt, Human
acagaguagcucaagaagauug

SEQ ID NO: 774866 - RNA, 22 nt, Human
gccaggcagcugggagggugcc

SEQ ID NO: 774867 - RNA, 22 nt, Human
gccagagcacaggcugguagua

SEQ ID NO: 774868 - RNA, 22 nt, Human
ggcccugggacacaacaccgaa

SEQ ID NO: 774869 - RNA, 22 nt, Human
gauuuucauuauagcuaguuuc

SEQ ID NO: 774870 - RNA, 22 nt, Human
ugcuugaugagugugccaagca

SEQ ID NO: 774871 - RNA, 22 nt, Human
gucaaaaaguagucauuucugu

SEQ ID NO: 774872 - RNA, 22 nt, Human
ggcaucaggaucugucuugcuu

SEQ ID NO: 774873 - RNA, 22 nt, Human
uuuggcucggcugcugauggug

SEQ ID NO: 774874 - RNA, 22 nt, Human
acagaucacuugacuaaaauga

SEQ ID NO: 774875 - RNA, 22 nt, Human
cugggagcuagcucugagcuga

SEQ ID NO: 774876 - RNA, 22 nt, Human
uuuuaauugcaauuaugguccc

SEQ ID NO: 774877 - RNA, 22 nt, Human
ggucugagagccacugaauccc

SEQ ID NO: 774878 - RNA, 22 nt, Human
aagcaauaaucccaaagugcug

SEQ ID NO: 774879 - RNA, 22 nt, Human
ggcugucagggugagcuggcuu

SEQ ID NO: 774880 - RNA, 22 nt, Human
ucccacuggacgucugugcugg

SEQ ID NO: 774881 - RNA, 23 nt, Human
ugcaauaugucagugcaaagugg

SEQ ID NO: 774882 - RNA, 23 nt, Human
ucagaauaauaaccuaguaacug

SEQ ID NO: 774883 - RNA, 22 nt, Human
uccuugaaugaagagaggugac

SEQ ID NO: 774884 - RNA, 22 nt, Human
uaggaaacaaaccugccucuuc

SEQ ID NO: 774885 - RNA, 22 nt, Human
aacucucauuuuagguguaagg

SEQ ID NO: 774886 - RNA, 22 nt, Human
uccauaagcagguucuuccuga

SEQ ID NO: 774887 - RNA, 22 nt, Human
gcuggcuuugcacugggugcau

SEQ ID NO: 774888 - RNA, 22 nt, Human
ggggcuguugaaguuaguugag

SEQ ID NO: 774889 - RNA, 19 nt, Human
ucugugcugggaggcagca

SEQ ID NO: 774890 - RNA, 22 nt, Human
gcuggaguaucuggggaaggag

SEQ ID NO: 774891 - RNA, 22 nt, Human
caaguccuuuucuuggcucagg

SEQ ID NO: 774892 - RNA, 22 nt, Human
gaaggccuagggaugcucugcg

SEQ ID NO: 774893 - RNA, 22 nt, Human
gugcugcucacaucuggaggua

SEQ ID NO: 774894 - RNA, 19 nt, Human
gggcccagcauggaggguu

SEQ ID NO: 774895 - RNA, 22 nt, Human
gugugugugccugcacacacac

SEQ ID NO: 774896 - RNA, 22 nt, Human
agccugguuuaagcauuuuaua

SEQ ID NO: 774897 - RNA, 22 nt, Human
uaaaggcaaauguguguuugug

SEQ ID NO: 774898 - RNA, 22 nt, Human
acagcuguguuuuauaaucagc

SEQ ID NO: 774899 - RNA, 22 nt, Human
acaacugucaguaaagaauauu

SEQ ID NO: 774900 - RNA, 22 nt, Human
cugggcuacguguugacagcau

SEQ ID NO: 774901 - RNA, 22 nt, Human
cacuugaacccgggaggcugag

SEQ ID NO: 774902 - RNA, 22 nt, Human
aaaggcacuggauagcugggga

SEQ ID NO: 774903 - RNA, 22 nt, Human
gggcugcuuauacugaugauaa

SEQ ID NO: 774904 - RNA, 22 nt, Human
uucuugauuucaugcaguuaag

SEQ ID NO: 774905 - RNA, 22 nt, Human
aucuccgccaucgcgaacgccu

SEQ ID NO: 774906 - RNA, 22 nt, Human
agucaaaggguauuuggauuga

SEQ ID NO: 774907 - RNA, 22 nt, Human
aauaauguugacgauagucuua

SEQ ID NO: 774908 - RNA, 22 nt, Human
aauccagguggcggagguugug

SEQ ID NO: 774909 - RNA, 22 nt, Human
uccugggcagaaugggauggcu

SEQ ID NO: 774910 - RNA, 21 nt, Human
ggagauggguaucgccugggc

SEQ ID NO: 774911 - RNA, 22 nt, Human
agcuggcuauacuugaaaaguc

SEQ ID NO: 774912 - RNA, 22 nt, Human
ucuuugcaguggugaauaaaga

SEQ ID NO: 774913 - RNA, 22 nt, Human
gccacuguccugugccugugcu

SEQ ID NO: 774914 - RNA, 22 nt, Human
gcugucugcugugcacugagca

SEQ ID NO: 774915 - RNA, 22 nt, Human
gcucuauguugaccuucagugg

SEQ ID NO: 774916 - RNA, 22 nt, Human
ucccaggaugaagacaguguug

SEQ ID NO: 774917 - RNA, 22 nt, Human
aggcccagcccguccucgugcu

SEQ ID NO: 774918 - RNA, 22 nt, Human
uguggcuguguccaccugcugc

SEQ ID NO: 774919 - RNA, 22 nt, Human
gagcagcucagaggacuagugu

SEQ ID NO: 774920 - RNA, 22 nt, Human
ugcugguccuggagcuggguuc

SEQ ID NO: 774921 - RNA, 22 nt, Human
ugauucaagcuacuguuacugg

SEQ ID NO: 774922 - RNA, 22 nt, Human
uaggaagggcucagggcucggu

SEQ ID NO: 774923 - RNA, 22 nt, Human
acauagauuuaagagcaauuag

SEQ ID NO: 774924 - RNA, 22 nt, Human
guuugaaaugucugcaagggaa

SEQ ID NO: 774925 - RNA, 22 nt, Human
uucuaagucacucagauuuugg

SEQ ID NO: 774926 - RNA, 22 nt, Human
auuuccauagagcgucucacag

SEQ ID NO: 774927 - RNA, 22 nt, Human
ggaggcgcggcucggcugugcc

SEQ ID NO: 774928 - RNA, 22 nt, Human
gcuggcucuacauuugagguca

SEQ ID NO: 774929 - RNA, 22 nt, Human
ggccagcaggcccugugauccu

SEQ ID NO: 774930 - RNA, 21 nt, Human
uuucaauguguucuuuguagu

SEQ ID NO: 774931 - RNA, 22 nt, Human
ccagucugaggccuggugaggg

SEQ ID NO: 774932 - RNA, 22 nt, Human
guacaugucaaaaaaugcauaa

SEQ ID NO: 774933 - RNA, 22 nt, Human
auauaggcuucaugacagaggg

SEQ ID NO: 774934 - RNA, 22 nt, Human
aggcagcaugggcccagagucc

SEQ ID NO: 774935 - RNA, 22 nt, Human
cugccagcucucuggaggcucu

SEQ ID NO: 774936 - RNA, 22 nt, Human
uggcaccugaacuuagaggugu

SEQ ID NO: 774937 - RNA, 22 nt, Human
cagguccccaggguaccuaccu

SEQ ID NO: 774938 - RNA, 22 nt, Human
gcucagcugggaccaauguguu

SEQ ID NO: 774939 - RNA, 22 nt, Human
caggcagagcugaagauagaug

SEQ ID NO: 774940 - RNA, 22 nt, Human
uaagcauaacuaaaaaugauuu

SEQ ID NO: 774941 - RNA, 19 nt, Human
caaaugggacaggaaggca

SEQ ID NO: 774942 - RNA, 22 nt, Human
uguggggcugugguguucuucu

SEQ ID NO: 774943 - RNA, 22 nt, Human
uugaauaauauguucaggagga

SEQ ID NO: 774944 - RNA, 22 nt, Human
uaaauguaaauggcgucuugcg

SEQ ID NO: 774945 - RNA, 22 nt, Human
gucccagggagguucagggcuu

SEQ ID NO: 774946 - RNA, 22 nt, Human
uuggaaggagccuaaaagagac

SEQ ID NO: 774947 - RNA, 22 nt, Human
ucuugcuaaagaccaacacauu

SEQ ID NO: 774948 - RNA, 22 nt, Human
gagugcaucguggccauuuuaa

SEQ ID NO: 774949 - RNA, 22 nt, Human
cuuucuggaguggaaagguauu

SEQ ID NO: 774950 - RNA, 22 nt, Human
caugaucaccacuugacagccc

SEQ ID NO: 774951 - RNA, 22 nt, Human
cagaaugagauaacccagauug

SEQ ID NO: 774952 - RNA, 19 nt, Human
cugugggcggaggaggggc

SEQ ID NO: 774953 - RNA, 22 nt, Human
uuucugcuaaucuuuuacugag

SEQ ID NO: 774954 - RNA, 22 nt, Human
caguuuauuuccaagaugacaa

SEQ ID NO: 774955 - RNA, 22 nt, Human
augcuuuauguucuggcauuuu

SEQ ID NO: 774956 - RNA, 22 nt, Human
cagccaugagucuaagcaguuu

SEQ ID NO: 774957 - RNA, 22 nt, Human
gccugaaguuucaugccucuau

SEQ ID NO: 774958 - RNA, 22 nt, Human
gaagaacuuauaggaaugucau

SEQ ID NO: 774959 - RNA, 22 nt, Human
aauucagaagcacaaaaccuag

SEQ ID NO: 774960 - RNA, 21 nt, Human
uggcucugaaagagugcugca

SEQ ID NO: 774961 - RNA, 22 nt, Human
ccaggccuagccccugagggua

SEQ ID NO: 774962 - RNA, 22 nt, Human
ugaggccuuuucugucuggcua

SEQ ID NO: 774963 - RNA, 22 nt, Human
uuacacaauuuuauugaccuaa

SEQ ID NO: 774964 - RNA, 22 nt, Human
cuguacaaauggcaguugaguu

SEQ ID NO: 774965 - RNA, 22 nt, Human
uuuuccucugcaauaaaagcag

SEQ ID NO: 774966 - RNA, 22 nt, Human
ucagauggcacacagagccugc

SEQ ID NO: 774967 - RNA, 22 nt, Human
caggccaggguugagaagagaa

SEQ ID NO: 774968 - RNA, 22 nt, Human
aauugcuuuaguuaccauagug

SEQ ID NO: 774969 - RNA, 22 nt, Human
acaugaaaguuauucugaguug

SEQ ID NO: 774970 - RNA, 22 nt, Human
agcugugaccuucaagagcuac

SEQ ID NO: 774971 - RNA, 22 nt, Human
cuggaaagugucuccauccugg

SEQ ID NO: 774972 - RNA, 22 nt, Human
aaauucauuuuucuuagugugc

SEQ ID NO: 774973 - RNA, 22 nt, Human
uugauucaaaggggacaagugg

SEQ ID NO: 774974 - RNA, 22 nt, Human
cccuucagugcuaggcugccug

SEQ ID NO: 774975 - RNA, 22 nt, Human
aguggucaaagacuagauuuca

SEQ ID NO: 774976 - RNA, 22 nt, Human
cucuguggguauuuauauguau

SEQ ID NO: 774977 - RNA, 22 nt, Human
ccccaccauguagaaacugaga

SEQ ID NO: 774978 - RNA, 22 nt, Human
cacauccuucauacucagcucu

SEQ ID NO: 774979 - RNA, 22 nt, Human
ucugaguuuaggaccaggcuga

SEQ ID NO: 774980 - RNA, 22 nt, Human
agagucaguaacauauauggua

SEQ ID NO: 774981 - RNA, 22 nt, Human
ucuggcagagugauaggauaag

SEQ ID NO: 774982 - RNA, 22 nt, Human
ggcugcccucggggucgcaggc

SEQ ID NO: 774983 - RNA, 22 nt, Human
uagcaagcagauuagaagaucc

SEQ ID NO: 774984 - RNA, 22 nt, Human
cugugucuuuccuacuuugugg

SEQ ID NO: 774985 - RNA, 22 nt, Human
auacugauuaguugagaaagca

SEQ ID NO: 774986 - RNA, 22 nt, Human
cauaauaucuccgauuacuugc

SEQ ID NO: 774987 - RNA, 22 nt, Human
cagaaauauuccaaguacugca

SEQ ID NO: 774988 - RNA, 18 nt, Human
cagagcaguaugaauguu

SEQ ID NO: 774989 - RNA, 23 nt, Human
auguaucucauccaaggaagcuc

SEQ ID NO: 774990 - RNA, 22 nt, Human
agucaauuaucucuaggucauc

SEQ ID NO: 774991 - RNA, 22 nt, Human
gguucugaaguggucccauucc

SEQ ID NO: 774992 - RNA, 22 nt, Human
ucuuccagauacuuccugacuu

SEQ ID NO: 774993 - RNA, 22 nt, Human
aaaugucuuugaguuuuuauaa

SEQ ID NO: 774994 - RNA, 22 nt, Human
cuggcccucggaguccagcugc

SEQ ID NO: 774995 - RNA, 22 nt, Human
ccugcccccgucagaggugaug

SEQ ID NO: 774996 - RNA, 22 nt, Human
uguccuugaugaauaugaaauu

SEQ ID NO: 774997 - RNA, 22 nt, Human
auagauauuagcaaaauuuuau

SEQ ID NO: 774998 - RNA, 22 nt, Human
uccuggugggacagaaaaccuc

SEQ ID NO: 774999 - RNA, 19 nt, Human
uccagccccucugugugug

SEQ ID NO: 775000 - RNA, 22 nt, Human
ucugcugagaugcccaugguua

SEQ ID NO: 775001 - RNA, 20 nt, Human
ccucucugcaugcucccuga

SEQ ID NO: 775002 - RNA, 22 nt, Human
guccucuggaagaugaguucuu

SEQ ID NO: 775003 - RNA, 22 nt, Human
uggaacaccuugcuccagaaag

SEQ ID NO: 775004 - RNA, 22 nt, Human
gcagguggauauugcuacuuga

SEQ ID NO: 775005 - RNA, 22 nt, Human
gcgcacauguucagauguguga

SEQ ID NO: 775006 - RNA, 22 nt, Human
gggcugagagugacuguucugu

SEQ ID NO: 775007 - RNA, 22 nt, Human
auucccaccaagcaggccaugc

SEQ ID NO: 775008 - RNA, 22 nt, Human
uuucuaagugugauuuuagauu

SEQ ID NO: 775009 - RNA, 22 nt, Human
ucugagaauggagcuaaaaauc

SEQ ID NO: 775010 - RNA, 22 nt, Human
ccagaaaacucuacaugcuugu

SEQ ID NO: 775011 - RNA, 22 nt, Human
uuguuucaggaugguuuguuac

SEQ ID NO: 775012 - RNA, 20 nt, Human
ugauauuucuggaaguggag

SEQ ID NO: 775013 - RNA, 22 nt, Human
gggcuuuaugagauugagaucu

SEQ ID NO: 775014 - RNA, 22 nt, Human
guuacaaagcacuucaagugaa

SEQ ID NO: 775015 - RNA, 22 nt, Human
cuucagagaguccagggacugc

SEQ ID NO: 775016 - RNA, 22 nt, Human
aaagauuuaugaaguucaauua

SEQ ID NO: 775017 - RNA, 22 nt, Human
ccacaguaagagauaguuuaug

SEQ ID NO: 775018 - RNA, 22 nt, Human
ucucaucucggaucagaaguga

SEQ ID NO: 775019 - RNA, 22 nt, Human
gccugagcagcuauacacacag

SEQ ID NO: 775020 - RNA, 22 nt, Human
uggagcagccuuuucuaagcaa

SEQ ID NO: 775021 - RNA, 22 nt, Human
uauacacauauacguuugugug

SEQ ID NO: 775022 - RNA, 22 nt, Human
uaaucacugugagucuguuuuc

SEQ ID NO: 775023 - RNA, 22 nt, Human
aaguucaagcucugccuaaaau

SEQ ID NO: 775024 - RNA, 22 nt, Human
agguggugaugacagaagacag

SEQ ID NO: 775025 - RNA, 21 nt, Human
uggaaggcugcucugccaggg

SEQ ID NO: 775026 - RNA, 22 nt, Human
ccagucuguacuuugcucuguu

SEQ ID NO: 775027 - RNA, 22 nt, Human
ucugggcugggagcguguggac

SEQ ID NO: 775028 - RNA, 22 nt, Human
ucuccacacuuucucucccagg

SEQ ID NO: 775029 - RNA, 22 nt, Human
uggcagaaguucacuaguagcu

SEQ ID NO: 775030 - RNA, 20 nt, Human
ugcugcugccuccgccucug

SEQ ID NO: 775031 - RNA, 22 nt, Human
uuuuauguugcuauaauaggua

SEQ ID NO: 775032 - RNA, 21 nt, Human
ggugggguaccuaagguagcu

SEQ ID NO: 775033 - RNA, 22 nt, Human
agcacuagccuguuuugcugug

SEQ ID NO: 775034 - RNA, 22 nt, Human
gauguucuuauaccauuguggg

SEQ ID NO: 775035 - RNA, 22 nt, Human
uaaaggcacggaguuguuaugg

SEQ ID NO: 775036 - RNA, 22 nt, Human
aaucacaugaaaacuguguguu

SEQ ID NO: 775037 - RNA, 22 nt, Human
cucaggaggaggaaguucauug

SEQ ID NO: 775038 - RNA, 22 nt, Human
uucucuggggacuugguuggag

SEQ ID NO: 775039 - RNA, 21 nt, Human
ugaauuucgguauggcuauaa

SEQ ID NO: 775040 - RNA, 22 nt, Human
acagcugugauuucuaucauga

SEQ ID NO: 775041 - RNA, 22 nt, Human
gcugagaacagagcucugagcu

SEQ ID NO: 775042 - RNA, 22 nt, Human
uuauucaccaguguaaaacacu

SEQ ID NO: 775043 - RNA, 22 nt, Human
agcccugggcuguagauaagca

SEQ ID NO: 775044 - RNA, 22 nt, Human
ggagcaggagucucuugaauuu

SEQ ID NO: 775045 - RNA, 22 nt, Human
cuguccagcugaccagagcagc

SEQ ID NO: 775046 - RNA, 22 nt, Human
uacauguaguucacugguggca

SEQ ID NO: 775047 - RNA, 22 nt, Human
cucuggcggccaugcucguggu

SEQ ID NO: 775048 - RNA, 22 nt, Human
agucauaaagccagugggaggc

SEQ ID NO: 775049 - RNA, 22 nt, Human
gacaguggaaugacccuuugag

SEQ ID NO: 775050 - RNA, 22 nt, Human
auccuaaaauuguucaauuucu

SEQ ID NO: 775051 - RNA, 22 nt, Human
uuuaucuuuaggacuuugcaga

SEQ ID NO: 775052 - RNA, 22 nt, Human
cagauucugcagucaacuugcu

SEQ ID NO: 775053 - RNA, 22 nt, Human
gcauccagagguagccacugug

SEQ ID NO: 775054 - RNA, 22 nt, Human
gucucucugcuaggccuccagu

SEQ ID NO: 775055 - RNA, 22 nt, Human
cagacacagcaauucuguguug

SEQ ID NO: 775056 - RNA, 22 nt, Human
cccagcucuuccugggagcuaa

SEQ ID NO: 775057 - RNA, 22 nt, Human
gacacuuuaggauuuaaaaguc

SEQ ID NO: 775058 - RNA, 22 nt, Human
auagacaaacacgaagaugaca

SEQ ID NO: 775059 - RNA, 21 nt, Human
augggcagaggcagagaggcu

SEQ ID NO: 775060 - RNA, 22 nt, Human
ucugggcuauauggucucugcu

SEQ ID NO: 775061 - RNA, 22 nt, Human
cagaggcugacaaaauauugcu

SEQ ID NO: 775062 - RNA, 22 nt, Human
aaauguucuaaauuacauguga

SEQ ID NO: 775063 - RNA, 22 nt, Human
acaguccuuguguggaacauua

SEQ ID NO: 775064 - RNA, 22 nt, Human
ugaucaaagccaaaguugagau

SEQ ID NO: 775065 - RNA, 22 nt, Human
acauggaauguguacuaaguua

SEQ ID NO: 775066 - RNA, 22 nt, Human
gcugaggcucaauccccuucug

SEQ ID NO: 775067 - RNA, 22 nt, Human
ggaacacugccuuuuauuuucc

SEQ ID NO: 775068 - RNA, 22 nt, Human
acacagagccagggaauacagu

SEQ ID NO: 775069 - RNA, 22 nt, Human
caguucugacuuucauaauguc

SEQ ID NO: 775070 - RNA, 22 nt, Human
auucugccucacaggcagcugg

SEQ ID NO: 775071 - RNA, 22 nt, Human
ugcuggaguaacaagacacuca

SEQ ID NO: 775072 - RNA, 22 nt, Human
augcuuccagauugguaggggu

SEQ ID NO: 775073 - RNA, 22 nt, Human
ugaaaaggagccuuagguaggu

SEQ ID NO: 775074 - RNA, 22 nt, Human
ucuggagauaagacagacagau

SEQ ID NO: 775075 - RNA, 22 nt, Human
ugggugggagcgcccugucugg

SEQ ID NO: 775076 - RNA, 22 nt, Human
acaaaaaccguggauucagcau

SEQ ID NO: 775077 - RNA, 22 nt, Human
gcccugugagauuagaacagca

SEQ ID NO: 775078 - RNA, 22 nt, Human
gucaggauuaaugggaguaugc

SEQ ID NO: 775079 - RNA, 22 nt, Human
acagcuaacuuaaacuaaccua

SEQ ID NO: 775080 - RNA, 22 nt, Human
aaucacaucucauucaacagcc

SEQ ID NO: 775081 - RNA, 22 nt, Human
gcugucccgcugacuuccagcu

SEQ ID NO: 775082 - RNA, 22 nt, Human
uuuggagagaguuaaauauguu

SEQ ID NO: 775083 - RNA, 22 nt, Human
gagcuggggcggauacucagcu

SEQ ID NO: 775084 - RNA, 22 nt, Human
caguccuugcucugggaugaug

SEQ ID NO: 775085 - RNA, 22 nt, Human
augagcagaugcuccugccucu

SEQ ID NO: 775086 - RNA, 22 nt, Human
aaacagucuugugggcuuggag

SEQ ID NO: 775087 - RNA, 22 nt, Human
uaauaccuggccuugauacagu

SEQ ID NO: 775088 - RNA, 22 nt, Human
gucuccuuguggaucucaagga

SEQ ID NO: 775089 - RNA, 20 nt, Human
cagaaggucuaagcuuuaga

SEQ ID NO: 775090 - RNA, 22 nt, Human
aaguuugagagccuuuaguaua

SEQ ID NO: 775091 - RNA, 22 nt, Human
ugggcccugcccuugucugucc

SEQ ID NO: 775092 - RNA, 22 nt, Human
uuaguuagggcuccugaggacc

SEQ ID NO: 775093 - RNA, 22 nt, Human
auuaggauuuuguccaaguagc

SEQ ID NO: 775094 - RNA, 22 nt, Human
uuucucuucacugugugccuca

SEQ ID NO: 775095 - RNA, 22 nt, Human
ugcucccugcucagagaggcca

SEQ ID NO: 775096 - RNA, 22 nt, Human
ucacauuucucagcacugauga

SEQ ID NO: 775097 - RNA, 22 nt, Human
acugucuuccaggucuggaggu

SEQ ID NO: 775098 - RNA, 22 nt, Human
ucuccugucuucucagcacccc

SEQ ID NO: 775099 - RNA, 22 nt, Human
gcaugauuaauaugcuuacugu

SEQ ID NO: 775100 - RNA, 22 nt, Human
ucaggcugaccagguuuugcuc

SEQ ID NO: 775101 - RNA, 22 nt, Human
aauuuccaaauuucugucacac

SEQ ID NO: 775102 - RNA, 19 nt, Human
ugugauaagcagaauucca

SEQ ID NO: 775103 - RNA, 22 nt, Human
uucucacuauguauguagauug

SEQ ID NO: 775104 - RNA, 22 nt, Human
gcaaggcucccgcagcccaggg

SEQ ID NO: 775105 - RNA, 22 nt, Human
ugauguucuguauaucauauag

SEQ ID NO: 775106 - RNA, 18 nt, Human
ucuccuuccaaaucuuca

SEQ ID NO: 775107 - RNA, 22 nt, Human
acugagcagaagagaucuguga

SEQ ID NO: 775108 - RNA, 22 nt, Human
ccaggggcugcagauccauggu

SEQ ID NO: 775109 - RNA, 22 nt, Human
acagguggcauaggcaguuuga

SEQ ID NO: 775110 - RNA, 22 nt, Human
auaaucaaaguccuaugacauc

SEQ ID NO: 775111 - RNA, 21 nt, Human
ucauuucucuauguauuucac

SEQ ID NO: 775112 - RNA, 22 nt, Human
cugcaguuugcuaagagacaaa

SEQ ID NO: 775113 - RNA, 22 nt, Human
gauuuccaggacgggagguggg

SEQ ID NO: 775114 - RNA, 22 nt, Human
uuuuaacacucagcacuaucuc

SEQ ID NO: 775115 - RNA, 22 nt, Human
auauagguuaucauauuugccc

SEQ ID NO: 775116 - RNA, 22 nt, Human
acauucugucaacagugagcag

SEQ ID NO: 775117 - RNA, 22 nt, Human
agagccugaggaugucccagcu

SEQ ID NO: 775118 - RNA, 23 nt, Human
gcucagaugcccuaggagguggc

SEQ ID NO: 775119 - RNA, 22 nt, Human
gauauuuuugcagacaccuggg

SEQ ID NO: 775120 - RNA, 22 nt, Human
gugcucugggcugccugacaug

SEQ ID NO: 775121 - RNA, 22 nt, Human
aggucauuacaauuaucauuuu

SEQ ID NO: 775122 - RNA, 22 nt, Human
gcacuugaagaauugaacugga

SEQ ID NO: 775123 - RNA, 22 nt, Human
uagucagagucuucucuguugu

SEQ ID NO: 775124 - RNA, 22 nt, Human
aaauaaucaauuuuuguagaua

SEQ ID NO: 775125 - RNA, 18 nt, Human
ccugaagccugugucuuu

SEQ ID NO: 775126 - RNA, 22 nt, Human
ucccaggcgccugguggggagc

SEQ ID NO: 775127 - RNA, 22 nt, Human
agaggggaggcgaaccagaguc

SEQ ID NO: 775128 - RNA, 22 nt, Human
guacagaaaguacccauagaag

SEQ ID NO: 775129 - RNA, 18 nt, Human
cagugucuugguaaaaua

SEQ ID NO: 775130 - RNA, 20 nt, Human
cccugcagccaugggagugg

SEQ ID NO: 775131 - RNA, 22 nt, Human
uuuaacuuaaucugcuugauga

SEQ ID NO: 775132 - RNA, 22 nt, Human
uauguccugcuacucucucaug

SEQ ID NO: 775133 - RNA, 22 nt, Human
aggaccuuuggcaaggcugcuc

SEQ ID NO: 775134 - RNA, 22 nt, Human
ucagagucauugcaaguagaag

SEQ ID NO: 775135 - RNA, 22 nt, Human
ucugcccuaauucagugcuuag

SEQ ID NO: 775136 - RNA, 22 nt, Human
ugcagcugaugauacccccaug

SEQ ID NO: 775137 - RNA, 22 nt, Human
aguccuggguccagcagguccu

SEQ ID NO: 775138 - RNA, 22 nt, Human
gggagggucugagagcugcacc

SEQ ID NO: 775139 - RNA, 22 nt, Human
gaaacauacgauuuaggagaaa

SEQ ID NO: 775140 - RNA, 22 nt, Human
aggugagugugacugcaagaga

SEQ ID NO: 775141 - RNA, 22 nt, Human
gaggcacagucccgaggcaagg

SEQ ID NO: 775142 - RNA, 22 nt, Human
gagcuuuaagggcacuggucuu

SEQ ID NO: 775143 - RNA, 23 nt, Human
ccagccucugggucuucauccag

SEQ ID NO: 775144 - RNA, 22 nt, Human
cugucuguugaccauaguuugc

SEQ ID NO: 775145 - RNA, 22 nt, Human
ucuugggauugcccugcaguuc

SEQ ID NO: 775146 - RNA, 22 nt, Human
acugugggccuuuccuuugacc

SEQ ID NO: 775147 - RNA, 22 nt, Human
ccaagagguugugaggcaggca

SEQ ID NO: 775148 - RNA, 22 nt, Human
cuguggcuggccuuauugcugc

SEQ ID NO: 775149 - RNA, 22 nt, Human
gugcagggagcccagaaggucc

SEQ ID NO: 775150 - RNA, 22 nt, Human
cacagguguuuguuauacucag

SEQ ID NO: 775151 - RNA, 22 nt, Human
auacuuugcuaguaucagugug

SEQ ID NO: 775152 - RNA, 22 nt, Human
aggcaguguguagcuggaagag

SEQ ID NO: 775153 - RNA, 22 nt, Human
cugcuucaaggaaaugaaucgg

SEQ ID NO: 775154 - RNA, 19 nt, Human
aggaggccaugccacuaga

SEQ ID NO: 775155 - RNA, 22 nt, Human
gacagcagacagaacuaccugc

SEQ ID NO: 775156 - RNA, 22 nt, Human
gggggugacgauggcagcuggu

SEQ ID NO: 775157 - RNA, 23 nt, Human
ugcagagggacugaagccagcuu

SEQ ID NO: 775158 - RNA, 22 nt, Human
ugcaggccggcccuaggccuca

SEQ ID NO: 775159 - RNA, 22 nt, Human
ucugucuuagccaucucaggcu

SEQ ID NO: 775160 - RNA, 22 nt, Human
ugggcuccuugggagcaaguga

SEQ ID NO: 775161 - RNA, 22 nt, Human
gugcagcugggcgcugaccuuc

SEQ ID NO: 775162 - RNA, 22 nt, Human
ccuagaggcugcaaggagaggc

SEQ ID NO: 775163 - RNA, 22 nt, Human
ucaauucuaguggagagaguuu

SEQ ID NO: 775164 - RNA, 23 nt, Human
ccaaagucgaagucuaguccaga

SEQ ID NO: 775165 - RNA, 20 nt, Human
cugacagaaaauauuucauc

SEQ ID NO: 775166 - RNA, 22 nt, Human
gcaggaagaugagcucagguaa

SEQ ID NO: 775167 - RNA, 22 nt, Human
uauaugcuugugcaugucuuug

SEQ ID NO: 775168 - RNA, 22 nt, Human
cagcacaucugauuauaugacu

SEQ ID NO: 775169 - RNA, 19 nt, Human
auucuucucaaauauccau

SEQ ID NO: 775170 - RNA, 22 nt, Human
ccagcuuuugcacuggacuggg

SEQ ID NO: 775171 - RNA, 22 nt, Human
ucugauuucucuuguggaugcu

SEQ ID NO: 775172 - RNA, 22 nt, Human
uuggaaagaccgaauuccuguu

SEQ ID NO: 775173 - RNA, 22 nt, Human
ucacuucccucuucagcuccca

SEQ ID NO: 775174 - RNA, 22 nt, Human
cuaaagauaaggaaaguauccu

SEQ ID NO: 775175 - RNA, 21 nt, Human
ccuggcagaagccugauaugc

SEQ ID NO: 775176 - RNA, 19 nt, Human
aggcagucauuggaauaua

SEQ ID NO: 775177 - RNA, 22 nt, Human
uauugaaauucuucauguccuc

SEQ ID NO: 775178 - RNA, 22 nt, Human
cuguggcuuugcagggcuuguu

SEQ ID NO: 775179 - RNA, 22 nt, Human
ccuuuucuagaaagggaggcaa

SEQ ID NO: 775180 - RNA, 22 nt, Human
cacugcaguuccccagugcgca

SEQ ID NO: 775181 - RNA, 22 nt, Human
ggccaccuggcugugggggcag

SEQ ID NO: 775182 - RNA, 21 nt, Human
aguuacauguauagauaaagu

SEQ ID NO: 775183 - RNA, 22 nt, Human
gucaugccuggcuucuuagaca

SEQ ID NO: 775184 - RNA, 22 nt, Human
aauugagaugacagaggaauag

SEQ ID NO: 775185 - RNA, 22 nt, Human
uuuauucuaacuugcugcucua

SEQ ID NO: 775186 - RNA, 22 nt, Human
cuggcucuguggcuuccuucau

SEQ ID NO: 775187 - RNA, 22 nt, Human
gucugcuuuucugcccuuucau

SEQ ID NO: 775188 - RNA, 22 nt, Human
aucagcaaucucguguauuagg

SEQ ID NO: 775189 - RNA, 22 nt, Human
uucugugugccagaguugugcu

SEQ ID NO: 775190 - RNA, 22 nt, Human
uggagcaggacggggaguggua

SEQ ID NO: 775191 - RNA, 22 nt, Human
auguaugcuuugauuuuagaug

SEQ ID NO: 775192 - RNA, 20 nt, Human
ucacauccucucccaacaug

SEQ ID NO: 775193 - RNA, 22 nt, Human
uauuuuaaagugaagggucuug

SEQ ID NO: 775194 - RNA, 22 nt, Human
guccagcccucugccuccaggu

SEQ ID NO: 775195 - RNA, 22 nt, Human
accagcuguuaggcuuggugcu

SEQ ID NO: 775196 - RNA, 22 nt, Human
ugggccugcuggggcauuuuca

SEQ ID NO: 775197 - RNA, 19 nt, Human
acuagauacaacaugcaga

SEQ ID NO: 775198 - RNA, 21 nt, Human
cucuacauucccagcaacucu

SEQ ID NO: 775199 - RNA, 22 nt, Human
ugugugaaucuauugaauauau

SEQ ID NO: 775200 - RNA, 22 nt, Human
uggaggauuaaucuggaaagau

SEQ ID NO: 775201 - RNA, 22 nt, Human
agacauaagcgagcaucacagg

SEQ ID NO: 775202 - RNA, 22 nt, Human
ggucauugaaaucagaaggguu

SEQ ID NO: 775203 - RNA, 22 nt, Human
aauugcuuuugggggcaguuac

SEQ ID NO: 775204 - RNA, 22 nt, Human
aauaguguuguucacucaggag

SEQ ID NO: 775205 - RNA, 20 nt, Human
uggcugcacaccaggacagg

SEQ ID NO: 775206 - RNA, 22 nt, Human
cuguggcucaggccuguaagcc

SEQ ID NO: 775207 - RNA, 22 nt, Human
uugggguggaagugaggaucau

SEQ ID NO: 775208 - RNA, 22 nt, Human
uccaggcucagucaagcacuuc

SEQ ID NO: 775209 - RNA, 22 nt, Human
agacagacagagaauuuaaaua

SEQ ID NO: 775210 - RNA, 21 nt, Human
cuacagaagcucuccuaucca

SEQ ID NO: 775211 - RNA, 22 nt, Human
acagcacaaucugagucccaga

SEQ ID NO: 775212 - RNA, 22 nt, Human
ucuggggagucaaagagaccug

SEQ ID NO: 775213 - RNA, 22 nt, Human
ucugauguggcagcugcaucua

SEQ ID NO: 775214 - RNA, 22 nt, Human
ggcuucagauuucucaguuguu

SEQ ID NO: 775215 - RNA, 22 nt, Human
acuugaaacaucuuuaaaugua

SEQ ID NO: 775216 - RNA, 22 nt, Human
cacuugaaugagaauuuccugg

SEQ ID NO: 775217 - RNA, 21 nt, Human
ugaacaaaguucuuaucguga

SEQ ID NO: 775218 - RNA, 22 nt, Human
cuccuucaugucauguguccgg

SEQ ID NO: 775219 - RNA, 22 nt, Human
uugagacacaaggcacaguaag

SEQ ID NO: 775220 - RNA, 20 nt, Human
ugaauaugaccuuauuugga

SEQ ID NO: 775221 - RNA, 22 nt, Human
ugcagguggauucaauguggga

SEQ ID NO: 775222 - RNA, 22 nt, Human
ucugggcugcuucagccuucgc

SEQ ID NO: 775223 - RNA, 22 nt, Human
gccagcugugcuuuuccuaaaa

SEQ ID NO: 775224 - RNA, 22 nt, Human
cacacaugacccacuuuuaccg

SEQ ID NO: 775225 - RNA, 22 nt, Human
auggguaggauuuacucagaug

SEQ ID NO: 775226 - RNA, 22 nt, Human
caaguaauucugcaagaaacca

SEQ ID NO: 775227 - RNA, 22 nt, Human
uggucucugagccuuccugugg

SEQ ID NO: 775228 - RNA, 22 nt, Human
gcacagaggaugaggcagcucu

SEQ ID NO: 775229 - RNA, 22 nt, Human
gaucagaaucuucauuuucagu

SEQ ID NO: 775230 - RNA, 22 nt, Human
ucagagugaggcgucaacauga

SEQ ID NO: 775231 - RNA, 22 nt, Human
uccagggagcaagucaggccgg

SEQ ID NO: 775232 - RNA, 22 nt, Human
cagguaggauggaagggcucaa

SEQ ID NO: 775233 - RNA, 22 nt, Human
agguaaaugaauguuuagucuu

SEQ ID NO: 775234 - RNA, 22 nt, Human
ccuggagcaaaaaucuaaggag

SEQ ID NO: 775235 - RNA, 22 nt, Human
gcacugugcuagguaucaggga

SEQ ID NO: 775236 - RNA, 22 nt, Human
agaaugcagcuugccaguaucu

SEQ ID NO: 775237 - RNA, 22 nt, Human
uugauucauauagauaugcgug

SEQ ID NO: 775238 - RNA, 22 nt, Human
uuccucagcuguuugggcucau

SEQ ID NO: 775239 - RNA, 22 nt, Human
aaagcucuuggauuuuagacuc

SEQ ID NO: 775240 - RNA, 22 nt, Human
uuuccuggcucuguggccuugu

SEQ ID NO: 775241 - RNA, 22 nt, Human
uacagcacaaagggccuuuacc

SEQ ID NO: 775242 - RNA, 22 nt, Human
aacaauaacuagacaugccaug

SEQ ID NO: 775243 - RNA, 22 nt, Human
uauuugcaggcuuuugucaugg

SEQ ID NO: 775244 - RNA, 22 nt, Human
aaggaucugacagacuauagaa

SEQ ID NO: 775245 - RNA, 22 nt, Human
gaggcaccucgcgggaggaggc

SEQ ID NO: 775246 - RNA, 22 nt, Human
uauugucacgucuuaauucuag

SEQ ID NO: 775247 - RNA, 22 nt, Human
caggcaagcacggugaaccugg

SEQ ID NO: 775248 - RNA, 22 nt, Human
ccagcugcuaucaugccauuuc

SEQ ID NO: 775249 - RNA, 22 nt, Human
augcacaggcugugggcugguu

SEQ ID NO: 775250 - RNA, 23 nt, Human
aaguagauaacacuguucugaga

SEQ ID NO: 775251 - RNA, 22 nt, Human
uaggcaggcugaauguagauuu

SEQ ID NO: 775252 - RNA, 22 nt, Human
caaggccaguuucuccuaguca

SEQ ID NO: 775253 - RNA, 22 nt, Human
aucaagcagugaaaaaugcuag

SEQ ID NO: 775254 - RNA, 22 nt, Human
ugggauaucugucagcagcuuc

SEQ ID NO: 775255 - RNA, 22 nt, Human
caggugcugcagggcuggcguc

SEQ ID NO: 775256 - RNA, 22 nt, Human
cuuuagauguugcuuuaacuau

SEQ ID NO: 775257 - RNA, 23 nt, Human
ggucccugacagcgggcaaguug

SEQ ID NO: 775258 - RNA, 23 nt, Human
ggacacauuuauuucagaauuca

SEQ ID NO: 775259 - RNA, 18 nt, Human
ggcagccuggacaugcuc

SEQ ID NO: 775260 - RNA, 22 nt, Human
uccaguuuauuuuuggcagggu

SEQ ID NO: 775261 - RNA, 20 nt, Human
auuugcuuaccuuguuucua

SEQ ID NO: 775262 - RNA, 22 nt, Human
aggagacauggaauagugaggc

SEQ ID NO: 775263 - RNA, 22 nt, Human
gugauuucuaaucaucugaaug

SEQ ID NO: 775264 - RNA, 22 nt, Human
uuaaugaccuagagcaguaauu

SEQ ID NO: 775265 - RNA, 22 nt, Human
gagauuucuuuugaugccuguc

SEQ ID NO: 775266 - RNA, 22 nt, Human
uccaggcauuccagccauucca

SEQ ID NO: 775267 - RNA, 22 nt, Human
gaguuuaaauaacacauuucca

SEQ ID NO: 775268 - RNA, 22 nt, Human
uaguuuaggaauuaugagggug

SEQ ID NO: 775269 - RNA, 22 nt, Human
ucauacaucuguccuggagcuc

SEQ ID NO: 775270 - RNA, 22 nt, Human
gcugagugauucauacgcugcu

SEQ ID NO: 775271 - RNA, 23 nt, Human
ccagcugugccuggcccaggagc

SEQ ID NO: 775272 - RNA, 22 nt, Human
cagagcugacccaaggauugaa

SEQ ID NO: 775273 - RNA, 21 nt, Human
aauggcuuauacagaaguaag

SEQ ID NO: 775274 - RNA, 22 nt, Human
ugaguagagaauucagcuaagg

SEQ ID NO: 775275 - RNA, 22 nt, Human
gcugcuggccccacaugcucca

SEQ ID NO: 775276 - RNA, 22 nt, Human
ucaguggauuguagaaggcuua

SEQ ID NO: 775277 - RNA, 22 nt, Human
aauaguuugaauuuaucagaug

SEQ ID NO: 775278 - RNA, 22 nt, Human
cagaggaaguuccuugaugaga

SEQ ID NO: 775279 - RNA, 22 nt, Human
ccugggagggcaagugcugaug

SEQ ID NO: 775280 - RNA, 23 nt, Human
uagggcagcugggagggacaugc

SEQ ID NO: 775281 - RNA, 22 nt, Human
aggggcuuauguuucuccaggc

SEQ ID NO: 775282 - RNA, 22 nt, Human
ugccugccaaugaugcuugugu

SEQ ID NO: 775283 - RNA, 22 nt, Human
caguuucuguuuuaaauagcag

SEQ ID NO: 775284 - RNA, 22 nt, Human
caaucagauaugugacauauuu

SEQ ID NO: 775285 - RNA, 22 nt, Human
cuguauuuuuuaagaauaucuc

SEQ ID NO: 775286 - RNA, 21 nt, Human
ccagagagagggaaguggguu

SEQ ID NO: 775287 - RNA, 22 nt, Human
ucaguguugugcacauacaaaa

SEQ ID NO: 775288 - RNA, 23 nt, Human
augcccugugcagaaauguggaa

SEQ ID NO: 775289 - RNA, 19 nt, Human
acacuguagauauagcuau

SEQ ID NO: 775290 - RNA, 22 nt, Human
uacagagaggugacccuugggc

SEQ ID NO: 775291 - RNA, 22 nt, Human
gaaggaaaucugugauuuaugc

SEQ ID NO: 775292 - RNA, 21 nt, Human
aguaucauaaugaauaguucu

SEQ ID NO: 775293 - RNA, 22 nt, Human
cugaagcacagcauauaaauaa

SEQ ID NO: 775294 - RNA, 22 nt, Human
acuaguauucuuggucuuguau

SEQ ID NO: 775295 - RNA, 22 nt, Human
ggucacaugcggggcuguagcc

SEQ ID NO: 775296 - RNA, 22 nt, Human
cugcaucuguuagauuaucacc

SEQ ID NO: 775297 - RNA, 22 nt, Human
aggacccugaggucuccuguga

SEQ ID NO: 775298 - RNA, 22 nt, Human
uuccaaggcccagcagagagga

SEQ ID NO: 775299 - RNA, 22 nt, Human
ccugggagagcugcccggguga

SEQ ID NO: 775300 - RNA, 22 nt, Human
acaggauggccagcugauauug

SEQ ID NO: 775301 - RNA, 22 nt, Human
gucuacaaagcuucaagucucu

SEQ ID NO: 775302 - RNA, 22 nt, Human
agcauauaggaaauguugaauc

SEQ ID NO: 775303 - RNA, 22 nt, Human
gccuccggaguugcagugucuu

SEQ ID NO: 775304 - RNA, 20 nt, Human
cagagcugggauuugaacac

SEQ ID NO: 775305 - RNA, 21 nt, Human
ucaccuggcuucugaccuggc

SEQ ID NO: 775306 - RNA, 22 nt, Human
ugagaagcugcugacuuagccu

SEQ ID NO: 775307 - RNA, 22 nt, Human
ucauggcuaaccaaggccugau

SEQ ID NO: 775308 - RNA, 22 nt, Human
uccuggcugucacucggguuga

SEQ ID NO: 775309 - RNA, 22 nt, Human
aggcuggagugugcaguggcgc

SEQ ID NO: 775310 - RNA, 22 nt, Human
uuccagcccgcgacuuguucag

SEQ ID NO: 775311 - RNA, 22 nt, Human
cuuuaccacaaggacagaacuu

SEQ ID NO: 775312 - RNA, 22 nt, Human
acgaauaagagauaaagcaagg

SEQ ID NO: 775313 - RNA, 22 nt, Human
aggcugagggcuccugagggca

SEQ ID NO: 775314 - RNA, 18 nt, Human
agagaugggaguuggaaa

SEQ ID NO: 775315 - RNA, 22 nt, Human
auuucacaaaccauccugauuu

SEQ ID NO: 775316 - RNA, 22 nt, Human
uuuacagcuacuguccuauuuc

SEQ ID NO: 775317 - RNA, 22 nt, Human
agaguggccuggccuggggcau

SEQ ID NO: 775318 - RNA, 22 nt, Human
ugagggcuaaauuguggcaggu

SEQ ID NO: 775319 - RNA, 22 nt, Human
agagaaaagaguucaggcuuug

SEQ ID NO: 775320 - RNA, 22 nt, Human
agugauguugacuagcuauaag

SEQ ID NO: 775321 - RNA, 22 nt, Human
auaaugugauauuucauuuaca

SEQ ID NO: 775322 - RNA, 22 nt, Human
ugcagggccuugggucuuucuu

SEQ ID NO: 775323 - RNA, 22 nt, Human
cauaauuucuguaucagcacca

SEQ ID NO: 775324 - RNA, 22 nt, Human
uucuggaaacccucagccagug

SEQ ID NO: 775325 - RNA, 22 nt, Human
cugccuugaggagguuguggga

SEQ ID NO: 775326 - RNA, 22 nt, Human
aggccuuuguggagcucauggc

SEQ ID NO: 775327 - RNA, 19 nt, Human
uggagggguuugaaugugg

SEQ ID NO: 775328 - RNA, 22 nt, Human
uacaagaaaguccaguggguuu

SEQ ID NO: 775329 - RNA, 22 nt, Human
aaaggcuucuuugcuccauguc

SEQ ID NO: 775330 - RNA, 23 nt, Human
agacagaggcugaggcuggccgc

SEQ ID NO: 775331 - RNA, 22 nt, Human
ugugugauuccacuuauauggg

SEQ ID NO: 775332 - RNA, 22 nt, Human
uccagccuaggggaacagcugc

SEQ ID NO: 775333 - RNA, 22 nt, Human
agugcuuugguauagaacuauu

SEQ ID NO: 775334 - RNA, 22 nt, Human
agaagccauugaagcagaccuc

SEQ ID NO: 775335 - RNA, 18 nt, Human
ugaacacaguacaauucc

SEQ ID NO: 775336 - RNA, 22 nt, Human
auuugcuuucagguauaaaagg

SEQ ID NO: 775337 - RNA, 22 nt, Human
ugcagugggccggaggccaggg

SEQ ID NO: 775338 - RNA, 21 nt, Human
agacagacugccugacccacg

SEQ ID NO: 775339 - RNA, 22 nt, Human
ggagugagagaguuuaagguca

SEQ ID NO: 775340 - RNA, 21 nt, Human
agggccugugcucuccagguc

SEQ ID NO: 775341 - RNA, 22 nt, Human
aggucaagggcaagagugaggu

SEQ ID NO: 775342 - RNA, 22 nt, Human
ggccccugcggacugccuagag

SEQ ID NO: 775343 - RNA, 22 nt, Human
caagggcugaacacagguuuca

SEQ ID NO: 775344 - RNA, 22 nt, Human
auccuugagaaaauaaaugacc

SEQ ID NO: 775345 - RNA, 19 nt, Human
ccuuccccuucagccucug

SEQ ID NO: 775346 - RNA, 22 nt, Human
guucaucucacagauaggcagu

SEQ ID NO: 775347 - RNA, 21 nt, Human
accuuuggaaagacccuggga

SEQ ID NO: 775348 - RNA, 22 nt, Human
agagauccuucaaucuaguuuu

SEQ ID NO: 775349 - RNA, 22 nt, Human
ugggagaacccagggucaggcu

SEQ ID NO: 775350 - RNA, 22 nt, Human
ucuggcuccuggcuccacugcc

SEQ ID NO: 775351 - RNA, 22 nt, Human
aagggccuccuggggagccugg

SEQ ID NO: 775352 - RNA, 22 nt, Human
cagagggaucaucuuccugaag

SEQ ID NO: 775353 - RNA, 22 nt, Human
ccaggggaaacagggagcacuc

SEQ ID NO: 775354 - RNA, 22 nt, Human
uggcuaggaauccaugacucuc

SEQ ID NO: 775355 - RNA, 22 nt, Human
gaagcccuguaggugcaaaggu

SEQ ID NO: 775356 - RNA, 22 nt, Human
ucuaaacuacgucaaaacuagu

SEQ ID NO: 775357 - RNA, 22 nt, Human
cccagcuccuuacagggccgaa

SEQ ID NO: 775358 - RNA, 22 nt, Human
agcacugauuuuguugcacuua

SEQ ID NO: 775359 - RNA, 22 nt, Human
guuuugugaggcacccacaggu

SEQ ID NO: 775360 - RNA, 22 nt, Human
uguauaaauuuaaauuccugcu

SEQ ID NO: 775361 - RNA, 22 nt, Human
agauuuuaguuuggggaggugc

SEQ ID NO: 775362 - RNA, 21 nt, Human
acagagcauaaugguguggca

SEQ ID NO: 775363 - RNA, 22 nt, Human
ugugggcuguacugagggcagg

SEQ ID NO: 775364 - RNA, 22 nt, Human
gggcuggagagucccacguggg

SEQ ID NO: 775365 - RNA, 22 nt, Human
gccuggcugucuggcaagguuc

SEQ ID NO: 775366 - RNA, 22 nt, Human
ucaucugaccccaucuauucuc

SEQ ID NO: 775367 - RNA, 22 nt, Human
uagaggggaaucugccuccucu

SEQ ID NO: 775368 - RNA, 22 nt, Human
uugcuuuaccauuugaucucua

SEQ ID NO: 775369 - RNA, 22 nt, Human
agcagcaggcuguguggacuga

SEQ ID NO: 775370 - RNA, 22 nt, Human
accugguuccuccucacugcug

SEQ ID NO: 775371 - RNA, 19 nt, Human
ucaaggcucccugagggau

SEQ ID NO: 775372 - RNA, 22 nt, Human
cagcccuggugccaagguuccc

SEQ ID NO: 775373 - RNA, 22 nt, Human
acucugacauuuaaaaagcaau

SEQ ID NO: 775374 - RNA, 22 nt, Human
gccaggaguguguggcuauguu

SEQ ID NO: 775375 - RNA, 22 nt, Human
aaaaguaauugcgguuuuugcu

SEQ ID NO: 775376 - RNA, 22 nt, Human
uucacauuucucugcuguuuga

SEQ ID NO: 775377 - RNA, 22 nt, Human
gcagcugauggaaguccuauug

SEQ ID NO: 775378 - RNA, 22 nt, Human
auuauuuccuugcuuugaggaa

SEQ ID NO: 775379 - RNA, 19 nt, Human
cagcucaguuugauucucu

SEQ ID NO: 775380 - RNA, 18 nt, Human
ugacucacccugucagug

SEQ ID NO: 775381 - RNA, 22 nt, Human
ucacuuuggaagauagcacauc

SEQ ID NO: 775382 - RNA, 22 nt, Human
aagucagcacuccaggaagcca

SEQ ID NO: 775383 - RNA, 22 nt, Human
acuuuucugcagaugaucucuu

SEQ ID NO: 775384 - RNA, 22 nt, Human
ugccugccaggcaaccugggag

SEQ ID NO: 775385 - RNA, 22 nt, Human
gagggcugauaacaggaauaca

SEQ ID NO: 775386 - RNA, 22 nt, Human
ucuggggagcagcccuggugag

SEQ ID NO: 775387 - RNA, 22 nt, Human
gcugggcuucacagagccuuua

SEQ ID NO: 775388 - RNA, 22 nt, Human
caggcuucgcucugugggcagg

SEQ ID NO: 775389 - RNA, 22 nt, Human
gcauggcaagaucaggagacca

SEQ ID NO: 775390 - RNA, 22 nt, Human
aggcccagacucagcggggcgg

SEQ ID NO: 775391 - RNA, 22 nt, Human
caggcugcuguccacaaagcau

SEQ ID NO: 775392 - RNA, 22 nt, Human
uggaggccgcguagucugagca

SEQ ID NO: 775393 - RNA, 22 nt, Human
aaggagagagcuuugcuggaac

SEQ ID NO: 775394 - RNA, 22 nt, Human
caucaagauggaagagcaaaua

SEQ ID NO: 775395 - RNA, 22 nt, Human
uacacugucuuagaaaggggca

SEQ ID NO: 775396 - RNA, 22 nt, Human
caugcacauuauucaaagccca

SEQ ID NO: 775397 - RNA, 22 nt, Human
cuggaaagacagagggcauggg

SEQ ID NO: 775398 - RNA, 22 nt, Human
auccuguggcuccagggagccg

SEQ ID NO: 775399 - RNA, 22 nt, Human
ucugggagagggaaagaagacu

SEQ ID NO: 775400 - RNA, 22 nt, Human
ucagaggacgcacuaggguugu

SEQ ID NO: 775401 - RNA, 22 nt, Human
gagguagcgaguggacagugca

SEQ ID NO: 775402 - RNA, 22 nt, Human
ugugaagaguagacauguggug

SEQ ID NO: 775403 - RNA, 22 nt, Human
ggugaggggcgccucugcccag

SEQ ID NO: 775404 - RNA, 22 nt, Human
gcagggacaccuuugugaagcu

SEQ ID NO: 775405 - RNA, 22 nt, Human
acugucgauuaugaugagucag

SEQ ID NO: 775406 - RNA, 22 nt, Human
ugaggcagcuuuuucugugugu

SEQ ID NO: 775407 - RNA, 22 nt, Human
gauuaguugauuaagagucaga

SEQ ID NO: 775408 - RNA, 22 nt, Human
acaguguuuggcaaugcaugca

SEQ ID NO: 775409 - RNA, 20 nt, Human
uauuugaaauggccaagugu

SEQ ID NO: 775410 - RNA, 22 nt, Human
ugcaaggguagaagugauggca

SEQ ID NO: 775411 - RNA, 22 nt, Human
agcagagccugggcuaggggug

SEQ ID NO: 775412 - RNA, 22 nt, Human
cagguaguccacagugagggag

SEQ ID NO: 775413 - RNA, 22 nt, Human
agggacacuugcuuucaggccc

SEQ ID NO: 775414 - RNA, 19 nt, Human
ccuggaggugaagguucuc

SEQ ID NO: 775415 - RNA, 22 nt, Human
auuguuuuccaaagaugcugcu

SEQ ID NO: 775416 - RNA, 22 nt, Human
guucuuugacuccaagaaagua

SEQ ID NO: 775417 - RNA, 18 nt, Human
gaucucugcagugccuac

SEQ ID NO: 775418 - RNA, 22 nt, Human
gguuaaaaauaauuuacuuggc

SEQ ID NO: 775419 - RNA, 22 nt, Human
aaguuaggaugaaugccuuagc

SEQ ID NO: 775420 - RNA, 22 nt, Human
aguguccucuauuaugacuuua

SEQ ID NO: 775421 - RNA, 22 nt, Human
uucuuccuugguuuccuggaua

SEQ ID NO: 775422 - RNA, 22 nt, Human
agugggguccucaguaugguuc

SEQ ID NO: 775423 - RNA, 22 nt, Human
ggcagagcagccccaggguuug

SEQ ID NO: 775424 - RNA, 20 nt, Human
ucucaggguucagcaaagua

SEQ ID NO: 775425 - RNA, 19 nt, Human
agggcacagggacagaagg

SEQ ID NO: 775426 - RNA, 22 nt, Human
augcauaucacagucuccaugu

SEQ ID NO: 775427 - RNA, 22 nt, Human
ggguagggugacuuaggcuggc

SEQ ID NO: 775428 - RNA, 22 nt, Human
auugcuguacacuucuagaucu

SEQ ID NO: 775429 - RNA, 22 nt, Human
cugauggagagugugauuuggg

SEQ ID NO: 775430 - RNA, 22 nt, Human
ggcuggcuacauuggaggaagg

SEQ ID NO: 775431 - RNA, 22 nt, Human
uacaugcuucuauaugugaagu

SEQ ID NO: 775432 - RNA, 22 nt, Human
gcucccugcagcugagaguucc

SEQ ID NO: 775433 - RNA, 18 nt, Human
ccagcugugcagcaucug

SEQ ID NO: 775434 - RNA, 22 nt, Human
ggccucucagggcagagacccu

SEQ ID NO: 775435 - RNA, 19 nt, Human
acacugggagaagacugcu

SEQ ID NO: 775436 - RNA, 22 nt, Human
uucagacaguuuucagauucau

SEQ ID NO: 775437 - RNA, 22 nt, Human
aauggcuuuaggaauccagugc

SEQ ID NO: 775438 - RNA, 22 nt, Human
ugucucucugcccccauugcuc

SEQ ID NO: 775439 - RNA, 22 nt, Human
agagcagauggagcuggaagag

SEQ ID NO: 775440 - RNA, 22 nt, Human
uuuggccucaugaauuucuugc

SEQ ID NO: 775441 - RNA, 22 nt, Human
uucugcugaagucacugggagc

SEQ ID NO: 775442 - RNA, 22 nt, Human
ucugcaggaggcuggcugcagg

SEQ ID NO: 775443 - RNA, 22 nt, Human
ucagggcagaauccaaagaauu

SEQ ID NO: 775444 - RNA, 22 nt, Human
agaccauggccauccuaggaaa

SEQ ID NO: 775445 - RNA, 22 nt, Human
aauggcuuaaguauaagugaga

SEQ ID NO: 775446 - RNA, 22 nt, Human
ggacaggcugcaucugagcaug

SEQ ID NO: 775447 - RNA, 22 nt, Human
guccagaguagucgaguauucu

SEQ ID NO: 775448 - RNA, 22 nt, Human
uccuguggggaaaagccuaucu

SEQ ID NO: 775449 - RNA, 19 nt, Human
cagaggccagaagcacagg

SEQ ID NO: 775450 - RNA, 19 nt, Human
uacauuccacacaaucucu

SEQ ID NO: 775451 - RNA, 22 nt, Human
uuauauuucugguagccuucag

SEQ ID NO: 775452 - RNA, 22 nt, Human
uccugggcuucacagacucugu

SEQ ID NO: 775453 - RNA, 22 nt, Human
aauauaguguuagcucauuuga

SEQ ID NO: 775454 - RNA, 22 nt, Human
uuugagugcccauguuucccag

SEQ ID NO: 775455 - RNA, 22 nt, Human
ugauuuucaugggugaucuuug

SEQ ID NO: 775456 - RNA, 22 nt, Human
acagacauuuuaagacacuuua

SEQ ID NO: 775457 - RNA, 22 nt, Human
uauuuguugaguuguuaugucu

SEQ ID NO: 775458 - RNA, 20 nt, Human
uacaaaccuccacacuggug

SEQ ID NO: 775459 - RNA, 22 nt, Human
cuagaaaucucuguuuacauca

SEQ ID NO: 775460 - RNA, 22 nt, Human
agcccugaagcuggccaugucc

SEQ ID NO: 775461 - RNA, 22 nt, Human
caucaaagcuuuuuucuguguu

SEQ ID NO: 775462 - RNA, 22 nt, Human
ucaaaugcaccucucauuuguu

SEQ ID NO: 775463 - RNA, 22 nt, Human
aagguacaaaguauuauuuaaa

SEQ ID NO: 775464 - RNA, 19 nt, Human
cuucagcaucuccggagcu

SEQ ID NO: 775465 - RNA, 22 nt, Human
ggccaccuuaaguuaaggauau

SEQ ID NO: 775466 - RNA, 23 nt, Human
cagcuucuuugggauucuuuaua

SEQ ID NO: 775467 - RNA, 22 nt, Human
gcagaggcugggugucccaguc

SEQ ID NO: 775468 - RNA, 22 nt, Human
ccaggagcagaguagguguuca

SEQ ID NO: 775469 - RNA, 22 nt, Human
uagcacaguguucacaacagug

SEQ ID NO: 775470 - RNA, 22 nt, Human
cugcacugagcucucccagccc

SEQ ID NO: 775471 - RNA, 22 nt, Human
uuauguuuuauggcuauaucau

SEQ ID NO: 775472 - RNA, 22 nt, Human
uacuuugguaucaaacuaaaac

SEQ ID NO: 775473 - RNA, 22 nt, Human
uggagucacagugaccugaguc

SEQ ID NO: 775474 - RNA, 22 nt, Human
accauccugaaaccuucaugcu

SEQ ID NO: 775475 - RNA, 22 nt, Human
ucucagaguuuacggggcugaa

SEQ ID NO: 775476 - RNA, 22 nt, Human
ugaaacaagggaccguccuuuc

SEQ ID NO: 775477 - RNA, 22 nt, Human
gccagguggcugagcagcugca

SEQ ID NO: 775478 - RNA, 22 nt, Human
uucacauaaauagaucacauca

SEQ ID NO: 775479 - RNA, 22 nt, Human
uucuccuuccugguuuucaggc

SEQ ID NO: 775480 - RNA, 19 nt, Human
uggcugggcgugccuccgu

SEQ ID NO: 775481 - RNA, 22 nt, Human
uuuucuucuaccugcuguccaa

SEQ ID NO: 775482 - RNA, 22 nt, Human
augaaacuaaacuacauaaguu

SEQ ID NO: 775483 - RNA, 22 nt, Human
cagaaacuuucuuuacugagca

SEQ ID NO: 775484 - RNA, 18 nt, Human
gcucaguguguuaacacu

SEQ ID NO: 775485 - RNA, 22 nt, Human
ccaggcguggcuucagcagccc

SEQ ID NO: 775486 - RNA, 22 nt, Human
gagcccagcuaaauuuauauaa

SEQ ID NO: 775487 - RNA, 22 nt, Human
aaagaccauguuuacagcuagg

SEQ ID NO: 775488 - RNA, 22 nt, Human
ugucauuuccugaaugcugagu

SEQ ID NO: 775489 - RNA, 22 nt, Human
aucgaauaauugcauucuauaa

SEQ ID NO: 775490 - RNA, 22 nt, Human
guccaggaaucaaaagauggaa

SEQ ID NO: 775491 - RNA, 22 nt, Human
gauuuagagaauguuuuguaag

SEQ ID NO: 775492 - RNA, 22 nt, Human
agaagccauucucaguuccuga

SEQ ID NO: 775493 - RNA, 21 nt, Human
guucaaauccugacacuacac

SEQ ID NO: 775494 - RNA, 22 nt, Human
agagaauucuggugcuaacaag

SEQ ID NO: 775495 - RNA, 22 nt, Human
gucacaggaaaggguguaaggg

SEQ ID NO: 775496 - RNA, 22 nt, Human
guuguacauaugaggauaaguu

SEQ ID NO: 775497 - RNA, 22 nt, Human
uaacuacauuucacugcaauua

SEQ ID NO: 775498 - RNA, 22 nt, Human
ggggagcugggaggugaguuac

SEQ ID NO: 775499 - RNA, 22 nt, Human
aguucaaacucuauaagaacuu

SEQ ID NO: 775500 - RNA, 22 nt, Human
acaauauuguacccagaaguuu

SEQ ID NO: 775501 - RNA, 22 nt, Human
aggcagcagugauaagauagga

SEQ ID NO: 775502 - RNA, 22 nt, Human
aaauaagcacuuaacuguauca

SEQ ID NO: 775503 - RNA, 22 nt, Human
ugggaggaaugucacugagcca

SEQ ID NO: 775504 - RNA, 22 nt, Human
uagaaguuaggaaauaggaaua

SEQ ID NO: 775505 - RNA, 22 nt, Human
cuggagcccaggccuggugucu

SEQ ID NO: 775506 - RNA, 22 nt, Human
aauuccagcugauugacuuucc

SEQ ID NO: 775507 - RNA, 22 nt, Human
gcagcccaggagcaggcgaccc

SEQ ID NO: 775508 - RNA, 22 nt, Human
cuaguugcucuccuuuaaaccu

SEQ ID NO: 775509 - RNA, 22 nt, Human
ggcacuggaaggaucaugugag

SEQ ID NO: 775510 - RNA, 22 nt, Human
ucuuggcuguaccauugacuag

SEQ ID NO: 775511 - RNA, 22 nt, Human
ugggguacuuguaucaaagcac

SEQ ID NO: 775512 - RNA, 22 nt, Human
caggucuuuguugcagcaugga

SEQ ID NO: 775513 - RNA, 22 nt, Human
ggguaugagauauaggugaaua

SEQ ID NO: 775514 - RNA, 22 nt, Human
ugucucagauacgccaucaagg

SEQ ID NO: 775515 - RNA, 22 nt, Human
uggcauccacaaaugcuuagau

SEQ ID NO: 775516 - RNA, 22 nt, Human
auguggggacucugagagaauu

SEQ ID NO: 775517 - RNA, 22 nt, Human
gaaagcacgauaguagcaaaag

SEQ ID NO: 775518 - RNA, 22 nt, Human
acagucauuagauacaaugucu

SEQ ID NO: 775519 - RNA, 22 nt, Human
uauaauuuuucuguggccaguu

SEQ ID NO: 775520 - RNA, 20 nt, Human
cuaucuccuggcgugccuuc

SEQ ID NO: 775521 - RNA, 22 nt, Human
uguuguagcuugacagcagcca

SEQ ID NO: 775522 - RNA, 22 nt, Human
gaaggcuggggccuucucaucu

SEQ ID NO: 775523 - RNA, 22 nt, Human
cggaagcguucucagcaggggc

SEQ ID NO: 775524 - RNA, 22 nt, Human
guggcacagagauggggcauga

SEQ ID NO: 775525 - RNA, 21 nt, Human
uuugaaagcccuauguuuuca

SEQ ID NO: 775526 - RNA, 22 nt, Human
uguguguauguuuacuuuuccu

SEQ ID NO: 775527 - RNA, 20 nt, Human
aggcaugggaugcccagauu

SEQ ID NO: 775528 - RNA, 22 nt, Human
ccacuucaucagugcuccauuu

SEQ ID NO: 775529 - RNA, 22 nt, Human
uaugcauucagagguugggugu

SEQ ID NO: 775530 - RNA, 22 nt, Human
gaggcuguaaguguggagccua

SEQ ID NO: 775531 - RNA, 22 nt, Human
gcuuucugaugagcuuaagaaa

SEQ ID NO: 775532 - RNA, 22 nt, Human
gauggcuuguuuucuggcugaa

SEQ ID NO: 775533 - RNA, 23 nt, Human
cauggcagcaagagcucauggcc

SEQ ID NO: 775534 - RNA, 22 nt, Human
acucaaguagauauuaacaaaa

SEQ ID NO: 775535 - RNA, 22 nt, Human
acuauucaagugcucauucaga

SEQ ID NO: 775536 - RNA, 22 nt, Human
augugucuuugagacucugcua

SEQ ID NO: 775537 - RNA, 22 nt, Human
cauuccuauuaugucccuagug

SEQ ID NO: 775538 - RNA, 22 nt, Human
gaguaaggcugcugauggagug

SEQ ID NO: 775539 - RNA, 22 nt, Human
uaaucuuagcaaccuccagugu

SEQ ID NO: 775540 - RNA, 22 nt, Human
guacaauagucccuguuuggau

SEQ ID NO: 775541 - RNA, 22 nt, Human
aagagcugcaucuaagccauga

SEQ ID NO: 775542 - RNA, 20 nt, Human
gaaccucucccagccccugg

SEQ ID NO: 775543 - RNA, 22 nt, Human
gaggccacgguuuuccuugggg

SEQ ID NO: 775544 - RNA, 21 nt, Human
uccagaccucccucuccuagc

SEQ ID NO: 775545 - RNA, 22 nt, Human
gagggccaggcagcaagaaggc

SEQ ID NO: 775546 - RNA, 22 nt, Human
cugggcccuauggaagaaaggg

SEQ ID NO: 775547 - RNA, 22 nt, Human
uucauucucuuagcauaguccu

SEQ ID NO: 775548 - RNA, 22 nt, Human
ucacugcuuugagccacugagc

SEQ ID NO: 775549 - RNA, 22 nt, Human
uuaacagguuauauuguacagg

SEQ ID NO: 775550 - RNA, 22 nt, Human
acugggcuggggcucauucucc

SEQ ID NO: 775551 - RNA, 20 nt, Human
agaaaugugaaaggcugagu

SEQ ID NO: 775552 - RNA, 23 nt, Human
uuuauagcagcaugauuuauagu

SEQ ID NO: 775553 - RNA, 22 nt, Human
uggugugggcguggcaggcaag

SEQ ID NO: 775554 - RNA, 19 nt, Human
uaaaaacugaaggaagcag

SEQ ID NO: 775555 - RNA, 22 nt, Human
auacaguaagugucccugaaac

SEQ ID NO: 775556 - RNA, 22 nt, Human
uugacaaaggcugagaggaaaa

SEQ ID NO: 775557 - RNA, 22 nt, Human
gcuguucucuguaacaugcauu

SEQ ID NO: 775558 - RNA, 22 nt, Human
uacaugcuggugacuguagaca

SEQ ID NO: 775559 - RNA, 22 nt, Human
ucauguauuugugauagaugac

SEQ ID NO: 775560 - RNA, 22 nt, Human
acauuucacuguucacagcagg

SEQ ID NO: 775561 - RNA, 22 nt, Human
ucaggaguuucagguguaagug

SEQ ID NO: 775562 - RNA, 22 nt, Human
gucccucaagguccagucaugg

SEQ ID NO: 775563 - RNA, 22 nt, Human
gcccugcccugagccguagacc

SEQ ID NO: 775564 - RNA, 22 nt, Human
cuaggaaaugaauacaguacac

SEQ ID NO: 775565 - RNA, 21 nt, Human
uuaaugcuaugcagaaaaucu

SEQ ID NO: 775566 - RNA, 22 nt, Human
cccaggaccauccuucugugcc

SEQ ID NO: 775567 - RNA, 23 nt, Human
cugcauugucuccugggagcaug

SEQ ID NO: 775568 - RNA, 22 nt, Human
aaguuugguccuucuaagaaga

SEQ ID NO: 775569 - RNA, 22 nt, Human
uccuguuucuccugcaaaaucc

SEQ ID NO: 775570 - RNA, 23 nt, Human
cuuuucauugccuuagcgcagag

SEQ ID NO: 775571 - RNA, 22 nt, Human
ucagagcuaaggggagagcaaa

SEQ ID NO: 775572 - RNA, 22 nt, Human
cugagauggccacugggucuca

SEQ ID NO: 775573 - RNA, 22 nt, Human
agcuucuuaguucacuuuuaau

SEQ ID NO: 775574 - RNA, 22 nt, Human
uuuuauucucaagacaauggga

SEQ ID NO: 775575 - RNA, 22 nt, Human
cagagacuggagugcaguggcg

SEQ ID NO: 775576 - RNA, 21 nt, Human
acugagagauguuggaucaua

SEQ ID NO: 775577 - RNA, 22 nt, Human
uuuauucuauaggcauuaagca

SEQ ID NO: 775578 - RNA, 19 nt, Human
agacaugagacacaggaug

SEQ ID NO: 775579 - RNA, 20 nt, Human
uuguuuauuauguucugauc

SEQ ID NO: 775580 - RNA, 22 nt, Human
agcaggaguguccccuggcugu

SEQ ID NO: 775581 - RNA, 22 nt, Human
ugagggccgaggagcugugggu

SEQ ID NO: 775582 - RNA, 22 nt, Human
aagauuauggcagauaacaauu

SEQ ID NO: 775583 - RNA, 22 nt, Human
caaaaugugagucccaccucaa

SEQ ID NO: 775584 - RNA, 22 nt, Human
uaaccugcugugcuggucaguc

SEQ ID NO: 775585 - RNA, 20 nt, Human
ccagacagcaccugccuggu

SEQ ID NO: 775586 - RNA, 22 nt, Human
gacaggcuucaugauggcagga

SEQ ID NO: 775587 - RNA, 22 nt, Human
uuuccuucccuggaugagaagu

SEQ ID NO: 775588 - RNA, 21 nt, Human
ccagcuccaggaccuuggauc

SEQ ID NO: 775589 - RNA, 22 nt, Human
gcugccugucuguuucuuuuau

SEQ ID NO: 775590 - RNA, 22 nt, Human
gcccuugggagguuccacuggg

SEQ ID NO: 775591 - RNA, 22 nt, Human
gucuggaagaacuagggauguu

SEQ ID NO: 775592 - RNA, 22 nt, Human
agaccuggagugaagaguuccc

SEQ ID NO: 775593 - RNA, 22 nt, Human
cagaggccaggcugccugacug

SEQ ID NO: 775594 - RNA, 22 nt, Human
ucauucuggaugacuuucuaga

SEQ ID NO: 775595 - RNA, 22 nt, Human
auccuugguaagagaguuggau

SEQ ID NO: 775596 - RNA, 22 nt, Human
uggcugagaccuucccaaauuc

SEQ ID NO: 775597 - RNA, 22 nt, Human
cauuuagagaguaaaaauuagc

SEQ ID NO: 775598 - RNA, 22 nt, Human
ggguuucaugguucucacaaug

SEQ ID NO: 775599 - RNA, 22 nt, Human
ccugaggcucuccugaauaaug

SEQ ID NO: 775600 - RNA, 22 nt, Human
gucagcugucuccccagagugg

SEQ ID NO: 775601 - RNA, 18 nt, Human
aagaggaggaaacccagg

SEQ ID NO: 775602 - RNA, 22 nt, Human
ucuuuucauugagaacacacug

SEQ ID NO: 775603 - RNA, 20 nt, Human
uuuauuggccuuucaggaac

SEQ ID NO: 775604 - RNA, 22 nt, Human
uaugugauagaguuacuuuaua

SEQ ID NO: 775605 - RNA, 22 nt, Human
aguggugcugcgcgcggagcuc

SEQ ID NO: 775606 - RNA, 22 nt, Human
uuugcuuuguuuaaaaguggua

SEQ ID NO: 775607 - RNA, 22 nt, Human
acagcuggaggucugugagcac

SEQ ID NO: 775608 - RNA, 22 nt, Human
cauuucuaagaagaucugggua

SEQ ID NO: 775609 - RNA, 22 nt, Human
aauuugugaaucugucucuuga

SEQ ID NO: 775610 - RNA, 22 nt, Human
aguuaguggcaaagugguuuga

SEQ ID NO: 775611 - RNA, 22 nt, Human
uuuguacauuucacuccauugu

SEQ ID NO: 775612 - RNA, 22 nt, Human
gagcuuggugcugccuguuguc

SEQ ID NO: 775613 - RNA, 22 nt, Human
cugcagcuguagaggacagugg

SEQ ID NO: 775614 - RNA, 22 nt, Human
caggagaagucucuagggggug

SEQ ID NO: 775615 - RNA, 22 nt, Human
acucuuuacuuaaacucuaagu

SEQ ID NO: 775616 - RNA, 22 nt, Human
cuguuuccccaugcccugacuc

SEQ ID NO: 775617 - RNA, 22 nt, Human
auggauaagucaaagaguaucc

SEQ ID NO: 775618 - RNA, 22 nt, Human
ggcaaaguuuucaucucauaac

SEQ ID NO: 775619 - RNA, 22 nt, Human
uagccaggcgaggucagugucg

SEQ ID NO: 775620 - RNA, 22 nt, Human
cagccaggcccagaucaugcug

SEQ ID NO: 775621 - RNA, 22 nt, Human
gacagcaacacucaauucugca

SEQ ID NO: 775622 - RNA, 22 nt, Human
ucacuccauagcuuaacucuuu

SEQ ID NO: 775623 - RNA, 22 nt, Human
gggcccugaucugugagcgcag

SEQ ID NO: 775624 - RNA, 22 nt, Human
caagaggcaaauugucuagaag

SEQ ID NO: 775625 - RNA, 22 nt, Human
cagcaaucgggugauaugcaau

SEQ ID NO: 775626 - RNA, 22 nt, Human
aacacuuuggaauagagauagg

SEQ ID NO: 775627 - RNA, 22 nt, Human
acucuggagauggaugucagga

SEQ ID NO: 775628 - RNA, 21 nt, Human
ucauuguugcaugguaggggg

SEQ ID NO: 775629 - RNA, 22 nt, Human
guggcagaguucaggcguuugg

SEQ ID NO: 775630 - RNA, 22 nt, Human
agaagggcuacacgggcucucc

SEQ ID NO: 775631 - RNA, 22 nt, Human
aauacuauguagccaaaauaau

SEQ ID NO: 775632 - RNA, 22 nt, Human
cagcuccaucuugcuuauacca

SEQ ID NO: 775633 - RNA, 22 nt, Human
agagccacggcaggccuaggaa

SEQ ID NO: 775634 - RNA, 22 nt, Human
cuggcugcauuggcaagucaau

SEQ ID NO: 775635 - RNA, 22 nt, Human
auuugugauaauuuguuacagc

SEQ ID NO: 775636 - RNA, 22 nt, Human
ugggucuccugugccugggagg

SEQ ID NO: 775637 - RNA, 23 nt, Human
agcaaauaaucugcuugcuuuuu

SEQ ID NO: 775638 - RNA, 19 nt, Human
acaggggccuuuccagggu

SEQ ID NO: 775639 - RNA, 22 nt, Human
uccugggguguguuuugcugcu

SEQ ID NO: 775640 - RNA, 22 nt, Human
gcuggggccucugugagguuaa

SEQ ID NO: 775641 - RNA, 22 nt, Human
gccacugauuauucagcagaca

SEQ ID NO: 775642 - RNA, 21 nt, Human
caugggguugcuauagcaaaa

SEQ ID NO: 775643 - RNA, 22 nt, Human
ucuguauuuuaagaugcuguuu

SEQ ID NO: 775644 - RNA, 22 nt, Human
ucugguccucucugugaugcua

SEQ ID NO: 775645 - RNA, 22 nt, Human
ugugcgcuccggcgagucagcg

SEQ ID NO: 775646 - RNA, 22 nt, Human
uagcuucccuagcuaaagaggu

SEQ ID NO: 775647 - RNA, 22 nt, Human
ggggacccucaggacugcgucu

SEQ ID NO: 775648 - RNA, 22 nt, Human
agacaaggcaaggcggccagau

SEQ ID NO: 775649 - RNA, 22 nt, Human
auccagagagguuaggugacau

SEQ ID NO: 775650 - RNA, 22 nt, Human
uucauucuugggaucagagagu

SEQ ID NO: 775651 - RNA, 22 nt, Human
ggggcagagagaaggaagcuug

SEQ ID NO: 775652 - RNA, 22 nt, Human
ugaggggagacagaguggacuc

SEQ ID NO: 775653 - RNA, 22 nt, Human
aauuauacaauugucaaguucu

SEQ ID NO: 775654 - RNA, 21 nt, Human
cagggcacacagaggauggua

SEQ ID NO: 775655 - RNA, 22 nt, Human
gugcauuuggugacucucaccc

SEQ ID NO: 775656 - RNA, 22 nt, Human
gugucaugcacacucaguguug

SEQ ID NO: 775657 - RNA, 22 nt, Human
ccagcauccaugcucccucggg

SEQ ID NO: 775658 - RNA, 22 nt, Human
ucuguucuugcuuuucuccaac

SEQ ID NO: 775659 - RNA, 22 nt, Human
cagcuuuaccuuuaggaguaac

SEQ ID NO: 775660 - RNA, 22 nt, Human
guuucuguaagacugaauugac

SEQ ID NO: 775661 - RNA, 22 nt, Human
gugccuggaaugcgccucggcg

SEQ ID NO: 775662 - RNA, 22 nt, Human
gcuccagcucguggcucccagc

SEQ ID NO: 775663 - RNA, 22 nt, Human
cggcacagccgggcaaggcugg

SEQ ID NO: 775664 - RNA, 22 nt, Human
cagccagggagggcaaaugaga

SEQ ID NO: 775665 - RNA, 22 nt, Human
gaaggaagggcuggcugucuug

SEQ ID NO: 775666 - RNA, 22 nt, Human
cugugcugaggaugcaguuucu

SEQ ID NO: 775667 - RNA, 18 nt, Human
ugcugggcauuaggcuua

SEQ ID NO: 775668 - RNA, 22 nt, Human
cagcagagcugggaauaaaauu

SEQ ID NO: 775669 - RNA, 22 nt, Human
aggcuagaggcuucuggcuuca

SEQ ID NO: 775670 - RNA, 22 nt, Human
uuagacaucaagaagccaaugu

SEQ ID NO: 775671 - RNA, 21 nt, Human
aaugucuuuguccaugcucug

SEQ ID NO: 775672 - RNA, 22 nt, Human
uucaguuuucuuuagaauguag

SEQ ID NO: 775673 - RNA, 22 nt, Human
cuucuuucuuuugaucacaggu

SEQ ID NO: 775674 - RNA, 22 nt, Human
guggcagguggagccuccugca

SEQ ID NO: 775675 - RNA, 22 nt, Human
uuucuaguaaucaauauaaagu

SEQ ID NO: 775676 - RNA, 22 nt, Human
guccagggccccgagcaccagg

SEQ ID NO: 775677 - RNA, 22 nt, Human
cugugugccuagaggguggccg

SEQ ID NO: 775678 - RNA, 22 nt, Human
acagggucaagggugcuacaag

SEQ ID NO: 775679 - RNA, 22 nt, Human
cacacaguggaguauuacucag

SEQ ID NO: 775680 - RNA, 22 nt, Human
ccaguguuuccgucaguacacg

SEQ ID NO: 775681 - RNA, 22 nt, Human
accaggggugucaacagcauuu

SEQ ID NO: 775682 - RNA, 22 nt, Human
gcucugcugucuucuugcaggc

SEQ ID NO: 775683 - RNA, 22 nt, Human
aagcaacagaaacauucuaaua

SEQ ID NO: 775684 - RNA, 22 nt, Human
caggcaccuuugugcaugggca

SEQ ID NO: 775685 - RNA, 22 nt, Human
gcuggaggaggaagugugaggg

SEQ ID NO: 775686 - RNA, 19 nt, Human
gcauuucucuuuacagcca

SEQ ID NO: 775687 - RNA, 22 nt, Human
ugcauaaacuucucugguguga

SEQ ID NO: 775688 - RNA, 22 nt, Human
cuucaaacccagauuaaaugca

SEQ ID NO: 775689 - RNA, 22 nt, Human
uuuuuagauuacucagccacca

SEQ ID NO: 775690 - RNA, 22 nt, Human
auggccuggggagcaugggaag

SEQ ID NO: 775691 - RNA, 22 nt, Human
gggcugacaccacccaggcgca

SEQ ID NO: 775692 - RNA, 22 nt, Human
gguggcagaggugcaucagccc

SEQ ID NO: 775693 - RNA, 22 nt, Human
cugcagagcaugaggaggucug

SEQ ID NO: 775694 - RNA, 22 nt, Human
gugcauuuauauuugccuuugg

SEQ ID NO: 775695 - RNA, 22 nt, Human
uugaaacuuagaaauugagcug

SEQ ID NO: 775696 - RNA, 22 nt, Human
ugagaacuugugcuauugcaca

SEQ ID NO: 775697 - RNA, 22 nt, Human
uucaaagcagagggucaauaca

SEQ ID NO: 775698 - RNA, 22 nt, Human
cuccugggaauuuaguugugag

SEQ ID NO: 775699 - RNA, 22 nt, Human
ugagagaugaaguuaguuguuc

SEQ ID NO: 775700 - RNA, 22 nt, Human
auaaauucucugauguauagua

SEQ ID NO: 775701 - RNA, 22 nt, Human
cauuccuuaacguggggagucu

SEQ ID NO: 775702 - RNA, 23 nt, Human
ccagggagugcuacuaucaagcc

SEQ ID NO: 775703 - RNA, 22 nt, Human
caggacuauguucaacagauag

SEQ ID NO: 775704 - RNA, 22 nt, Human
uuuugcaucuggugaagaccag

SEQ ID NO: 775705 - RNA, 20 nt, Human
aaaaugaugggcagggcagg

SEQ ID NO: 775706 - RNA, 22 nt, Human
gugccuggagcuaauguguaua

SEQ ID NO: 775707 - RNA, 22 nt, Human
gucuuuuuuacaccuuacauca

SEQ ID NO: 775708 - RNA, 22 nt, Human
ugggaggaagugcuaaugggag

SEQ ID NO: 775709 - RNA, 22 nt, Human
ugggagaaagaacccugaguga

SEQ ID NO: 775710 - RNA, 23 nt, Human
ccagggccccuacaccacugucc

SEQ ID NO: 775711 - RNA, 22 nt, Human
uugugcuugcccuggaggugcg

SEQ ID NO: 775712 - RNA, 22 nt, Human
guuucccaaauuguucacaggg

SEQ ID NO: 775713 - RNA, 22 nt, Human
uauuucuuuucgugacuuauug

SEQ ID NO: 775714 - RNA, 22 nt, Human
ggugucucagcugcuggcaggg

SEQ ID NO: 775715 - RNA, 22 nt, Human
uggagagcaaugaggggcaggc

SEQ ID NO: 775716 - RNA, 22 nt, Human
ugagcuuacgugggaacagacu

SEQ ID NO: 775717 - RNA, 22 nt, Human
uggcucuggugcgggcuccugc

SEQ ID NO: 775718 - RNA, 22 nt, Human
aucuucuacuuugccaaucagg

SEQ ID NO: 775719 - RNA, 22 nt, Human
gguggcugcuuccucaagagga

SEQ ID NO: 775720 - RNA, 22 nt, Human
guccaaaagagccagccgggcg

SEQ ID NO: 775721 - RNA, 22 nt, Human
aggcggugcuguggacagugac

SEQ ID NO: 775722 - RNA, 22 nt, Human
accagcucauaauuuucaaaac

SEQ ID NO: 775723 - RNA, 22 nt, Human
uuuuauaagcaagaaagggaaa

SEQ ID NO: 775724 - RNA, 22 nt, Human
acugcaggagacacagcugcug

SEQ ID NO: 775725 - RNA, 22 nt, Human
cuucuaggcuucucagggggca

SEQ ID NO: 775726 - RNA, 22 nt, Human
uuuacagauguggaaagugagc

SEQ ID NO: 775727 - RNA, 22 nt, Human
ugucaguggucauaguagaaaa

SEQ ID NO: 775728 - RNA, 22 nt, Human
gcuuacaagccagcuguaccac

SEQ ID NO: 775729 - RNA, 22 nt, Human
gccacagcucacguuccccauu

SEQ ID NO: 775730 - RNA, 22 nt, Human
cucugagaagaguucaaguaaa

SEQ ID NO: 775731 - RNA, 22 nt, Human
cucccagaaaauucucagacaa

SEQ ID NO: 775732 - RNA, 22 nt, Human
auucugcacuuccuuugcuucc

SEQ ID NO: 775733 - RNA, 22 nt, Human
uccugccaggagugcuggcccu

SEQ ID NO: 775734 - RNA, 22 nt, Human
ccugccagacgcaccagggggc

SEQ ID NO: 775735 - RNA, 22 nt, Human
cuuucucuguggugaggagggu

SEQ ID NO: 775736 - RNA, 22 nt, Human
auaaauguuuguugaaugaaua

SEQ ID NO: 775737 - RNA, 22 nt, Human
gagggccagaguccugggguca

SEQ ID NO: 775738 - RNA, 22 nt, Human
ggguaggccgugggucaccagg

SEQ ID NO: 775739 - RNA, 22 nt, Human
auauuuguaaaauucugugucu

SEQ ID NO: 775740 - RNA, 22 nt, Human
cuaaggaaauaugucacuugcu

SEQ ID NO: 775741 - RNA, 19 nt, Human
cagaaauagcgaaguguaa

SEQ ID NO: 775742 - RNA, 22 nt, Human
cagcaacuccuguagcuuaugc

SEQ ID NO: 775743 - RNA, 21 nt, Human
uuagaaagcucacuacaguua

SEQ ID NO: 775744 - RNA, 22 nt, Human
caucagagugguggccuggugu

SEQ ID NO: 775745 - RNA, 22 nt, Human
ucugagaaggaagcucugugua

SEQ ID NO: 775746 - RNA, 22 nt, Human
gccugcagggcccuuguggguc

SEQ ID NO: 775747 - RNA, 22 nt, Human
ccuagacuagaggcagggagcc

SEQ ID NO: 775748 - RNA, 22 nt, Human
ucuuagaaaugaaguucuuucu

SEQ ID NO: 775749 - RNA, 23 nt, Human
aagcaauaccaggugugggcccu

SEQ ID NO: 775750 - RNA, 22 nt, Human
cuggccagccugucgaugcccu

SEQ ID NO: 775751 - RNA, 22 nt, Human
cuaaccuguugaaggaauugcu

SEQ ID NO: 775752 - RNA, 22 nt, Human
gcaaagaaugcagauuugccuc

SEQ ID NO: 775753 - RNA, 22 nt, Human
aagcaucaacacuauauugaug

SEQ ID NO: 775754 - RNA, 22 nt, Human
acuauagcucggguuauaaugu

SEQ ID NO: 775755 - RNA, 19 nt, Human
ggaaggcagaggggcugug

SEQ ID NO: 775756 - RNA, 22 nt, Human
gcagugcaggaacauagcuucu

SEQ ID NO: 775757 - RNA, 22 nt, Human
guuuccagucaacuugugugug

SEQ ID NO: 775758 - RNA, 22 nt, Human
auacaguguacuauuuagcagu

SEQ ID NO: 775759 - RNA, 22 nt, Human
ccuuucucuuggauaccgauug

SEQ ID NO: 775760 - RNA, 22 nt, Human
uucuagcagagggcaucugcug

SEQ ID NO: 775761 - RNA, 21 nt, Human
ucccagagugcuugggacugc

SEQ ID NO: 775762 - RNA, 22 nt, Human
uccuggcagagagcaugaggcc

SEQ ID NO: 775763 - RNA, 22 nt, Human
ucaggcucucagaccaacagca

SEQ ID NO: 775764 - RNA, 22 nt, Human
aucauugaauugcuuuguucuu

SEQ ID NO: 775765 - RNA, 23 nt, Human
ugggcggggcuuuucacucugcc

SEQ ID NO: 775766 - RNA, 22 nt, Human
caggcacaauuauuucccuuuc

SEQ ID NO: 775767 - RNA, 22 nt, Human
ucuccaggcuuuuugugaauug

SEQ ID NO: 775768 - RNA, 23 nt, Human
auaaacugucaaaagccagcccu

SEQ ID NO: 775769 - RNA, 22 nt, Human
cuuccucuauguucagguagaa

SEQ ID NO: 775770 - RNA, 22 nt, Human
aaguguuuggggaucauuuuaa

SEQ ID NO: 775771 - RNA, 22 nt, Human
gcaggccugguuuacaugguag

SEQ ID NO: 775772 - RNA, 22 nt, Human
ucucuguggagcaguguguuca

SEQ ID NO: 775773 - RNA, 22 nt, Human
uuucuguuaggcaucauuuuaa

SEQ ID NO: 775774 - RNA, 22 nt, Human
uucuggaagaguaaaauaagcc

SEQ ID NO: 775775 - RNA, 22 nt, Human
ugaggcccuagggcaugggaga

SEQ ID NO: 775776 - RNA, 22 nt, Human
ugcaagagcagaaagaacugag

SEQ ID NO: 775777 - RNA, 22 nt, Human
aagagcuccaggcaaugcgguc

SEQ ID NO: 775778 - RNA, 22 nt, Human
uaaggccaauuaacaaccaggg

SEQ ID NO: 775779 - RNA, 22 nt, Human
gcaaucaaugauuuauauuugu

SEQ ID NO: 775780 - RNA, 22 nt, Human
cucaucagaaauaccugacaaa

SEQ ID NO: 775781 - RNA, 22 nt, Human
ugucugugugagcaaaugacuu

SEQ ID NO: 775782 - RNA, 22 nt, Human
cagucucugugccagauccugg

SEQ ID NO: 775783 - RNA, 22 nt, Human
aaacaacuucugcacuaugggu

SEQ ID NO: 775784 - RNA, 22 nt, Human
gaaauucaaauaagauauguag

SEQ ID NO: 775785 - RNA, 22 nt, Human
gaggggccuggcacugagcugg

SEQ ID NO: 775786 - RNA, 19 nt, Human
accuucugggaaacauucc

SEQ ID NO: 775787 - RNA, 22 nt, Human
aguaacaguaacaucuuccuag

SEQ ID NO: 775788 - RNA, 22 nt, Human
ucauuucaguccucugugugag

SEQ ID NO: 775789 - RNA, 22 nt, Human
gggaagcaggugcagcucgccu

SEQ ID NO: 775790 - RNA, 22 nt, Human
guaucuuucccaccaaucacaa

SEQ ID NO: 775791 - RNA, 22 nt, Human
agaaggguguauacauuuccug

SEQ ID NO: 775792 - RNA, 22 nt, Human
acugcaacaccuccuggguuca

SEQ ID NO: 775793 - RNA, 22 nt, Human
ugucaugggcauuuauugaggg

SEQ ID NO: 775794 - RNA, 22 nt, Human
gaggcaggguguugauuacaga

SEQ ID NO: 775795 - RNA, 22 nt, Human
cucaagaaggaugagcuauugc

SEQ ID NO: 775796 - RNA, 22 nt, Human
ugguuauaaaaguccucucauu

SEQ ID NO: 775797 - RNA, 20 nt, Human
caccaggcgcucugagaaca

SEQ ID NO: 775798 - RNA, 19 nt, Human
acacagggaucagaggguu

SEQ ID NO: 775799 - RNA, 22 nt, Human
ggggaacaccgggcagaggcgc

SEQ ID NO: 775800 - RNA, 22 nt, Human
guuacaaaugccaaagcugaga

SEQ ID NO: 775801 - RNA, 22 nt, Human
guauuuauaggggaaugagagu

SEQ ID NO: 775802 - RNA, 22 nt, Human
uauucagaguauuccaugaggu

SEQ ID NO: 775803 - RNA, 22 nt, Human
aggugauaaguguuaaauaaag

SEQ ID NO: 775804 - RNA, 22 nt, Human
gacccauauaggacccuccaaa

SEQ ID NO: 775805 - RNA, 20 nt, Human
ucaugcagguguucuagguu

SEQ ID NO: 775806 - RNA, 22 nt, Human
agaccaugaccugccacuaagc

SEQ ID NO: 775807 - RNA, 22 nt, Human
auuauagaggguuacaguuaau

SEQ ID NO: 775808 - RNA, 22 nt, Human
aaacuugaacccagcucaggcu

SEQ ID NO: 775809 - RNA, 19 nt, Human
uguuuuguuaaagcagucc

SEQ ID NO: 775810 - RNA, 22 nt, Human
agugacuucuccuaaugucaua

SEQ ID NO: 775811 - RNA, 22 nt, Human
cucugggucucccugaggcuaa

SEQ ID NO: 775812 - RNA, 22 nt, Human
ccaguguugaacaguauuugga

SEQ ID NO: 775813 - RNA, 19 nt, Human
gcaggacucccagcuccuc

SEQ ID NO: 775814 - RNA, 22 nt, Human
uccagcuggggacaugggcuuc

SEQ ID NO: 775815 - RNA, 22 nt, Human
gcucacagucugcugagugcag

SEQ ID NO: 775816 - RNA, 22 nt, Human
auuguugagugcuucagcugua

SEQ ID NO: 775817 - RNA, 22 nt, Human
cucugauuuccuuauucuguca

SEQ ID NO: 775818 - RNA, 22 nt, Human
aaugucaaacagagcagagcua

SEQ ID NO: 775819 - RNA, 22 nt, Human
guggcagccgcaggcccugugu

SEQ ID NO: 775820 - RNA, 22 nt, Human
cagacagaccugcaagggcaca

SEQ ID NO: 775821 - RNA, 22 nt, Human
gcaaggcagcgcggaguagcua

SEQ ID NO: 775822 - RNA, 22 nt, Human
gacugggggcagccgcaccagu

SEQ ID NO: 775823 - RNA, 22 nt, Human
ucuaauuuuaggcauuuguuca

SEQ ID NO: 775824 - RNA, 22 nt, Human
gcucuggacccuggaguggcug

SEQ ID NO: 775825 - RNA, 22 nt, Human
uugggacagaaaaggagaagau

SEQ ID NO: 775826 - RNA, 22 nt, Human
aaaucaaggagggauuauauuu

SEQ ID NO: 775827 - RNA, 22 nt, Human
ucuucagaagaucacaucagug

SEQ ID NO: 775828 - RNA, 22 nt, Human
auggcagaauuaggauuucaag

SEQ ID NO: 775829 - RNA, 22 nt, Human
cagcagcuucuguugaucagaa

SEQ ID NO: 775830 - RNA, 17 nt, Human
aaccagcuguccccucc

SEQ ID NO: 775831 - RNA, 22 nt, Human
cuuugcagaaauaaacuugaug

SEQ ID NO: 775832 - RNA, 22 nt, Human
agguagaaggaccagaauuuau

SEQ ID NO: 775833 - RNA, 22 nt, Human
uuuacacugcuugaacaaucuc

SEQ ID NO: 775834 - RNA, 17 nt, Human
cugggccuccccugucc

SEQ ID NO: 775835 - RNA, 22 nt, Human
auagcacugguuuuucuugguu

SEQ ID NO: 775836 - RNA, 22 nt, Human
ucacauuucugauuauaccaaa

SEQ ID NO: 775837 - RNA, 22 nt, Human
cccaugcugugccuagagagca

SEQ ID NO: 775838 - RNA, 22 nt, Human
uggccugcuuucauuugaugcu

SEQ ID NO: 775839 - RNA, 22 nt, Human
aagauguaucaguuaagucuuc

SEQ ID NO: 775840 - RNA, 22 nt, Human
guggcacacaggagagagcuca

SEQ ID NO: 775841 - RNA, 22 nt, Human
ugcagcucauugguguccuggu

SEQ ID NO: 775842 - RNA, 22 nt, Human
uacagggguaacaguggggaau

SEQ ID NO: 775843 - RNA, 22 nt, Human
guauguguugaauucagggguc

SEQ ID NO: 775844 - RNA, 22 nt, Human
ugugggaaugcugaugggaucu

SEQ ID NO: 775845 - RNA, 21 nt, Human
aggcagcgugagggccacuca

SEQ ID NO: 775846 - RNA, 22 nt, Human
agaggcccugggcuggugugcu

SEQ ID NO: 775847 - RNA, 22 nt, Human
ugcuuuauucaggguuuacccc

SEQ ID NO: 775848 - RNA, 23 nt, Human
aggaauggcuagaagugugaccc

SEQ ID NO: 775849 - RNA, 22 nt, Human
ggaccaggcugagcaccugccu

SEQ ID NO: 775850 - RNA, 22 nt, Human
cagugucaccaggcgagucucc

SEQ ID NO: 775851 - RNA, 22 nt, Human
agggacagaugaaugacugagu

SEQ ID NO: 775852 - RNA, 22 nt, Human
ugcacagacaacucuuucuaga

SEQ ID NO: 775853 - RNA, 22 nt, Human
uuucacauaucaacucuauccu

SEQ ID NO: 775854 - RNA, 22 nt, Human
aaguucugccaggcuguggcag

SEQ ID NO: 775855 - RNA, 22 nt, Human
auuacaguaggauuggaaagga

SEQ ID NO: 775856 - RNA, 22 nt, Human
cccucucuuagaagaaacacag

SEQ ID NO: 775857 - RNA, 22 nt, Human
gcugccugggcuggcauuccca

SEQ ID NO: 775858 - RNA, 22 nt, Human
cacuggcugagcuucucuaggg

SEQ ID NO: 775859 - RNA, 22 nt, Human
agcugcaacaucugcuuguccc

SEQ ID NO: 775860 - RNA, 22 nt, Human
uuucaggauuuuaugagauagu

SEQ ID NO: 775861 - RNA, 22 nt, Human
uccugugccuccaccugcuccg

SEQ ID NO: 775862 - RNA, 22 nt, Human
aagauacacguuguauugaaua

SEQ ID NO: 775863 - RNA, 22 nt, Human
aaggggugagcagaggcuucgc

SEQ ID NO: 775864 - RNA, 22 nt, Human
agagacaggaguucuguuucca

SEQ ID NO: 775865 - RNA, 22 nt, Human
uccuuuggaacugacuccguua

SEQ ID NO: 775866 - RNA, 21 nt, Human
ugcaggagucugugagucagg

SEQ ID NO: 775867 - RNA, 22 nt, Human
uccaaagggaagcgcuuucugu

SEQ ID NO: 775868 - RNA, 22 nt, Human
aucagcugaaaaacaggcagca

SEQ ID NO: 775869 - RNA, 22 nt, Human
acucuuacucccucaggcacug

SEQ ID NO: 775870 - RNA, 22 nt, Human
ugucuuuaauucuacauaucuc

SEQ ID NO: 775871 - RNA, 19 nt, Human
caggacagacuucaaagcc

SEQ ID NO: 775872 - RNA, 21 nt, Human
ugggaugggucugggaccagc

SEQ ID NO: 775873 - RNA, 22 nt, Human
cagccagcuggcacugugagua

SEQ ID NO: 775874 - RNA, 23 nt, Human
gccaggcacaugguggacacgca

SEQ ID NO: 775875 - RNA, 21 nt, Human
uuucuucacuuugccccaugu

SEQ ID NO: 775876 - RNA, 23 nt, Human
ucccagggaaggugagcgaggcu

SEQ ID NO: 775877 - RNA, 22 nt, Human
agagaacagcauugcagcuuug

SEQ ID NO: 775878 - RNA, 22 nt, Human
uucccacaaucugcguguguau

SEQ ID NO: 775879 - RNA, 22 nt, Human
agagacuggaguuacgaguuca

SEQ ID NO: 775880 - RNA, 22 nt, Human
acagaugagagacaaugugcua

SEQ ID NO: 775881 - RNA, 22 nt, Human
uuaguguacuuagugcucuaag

SEQ ID NO: 775882 - RNA, 22 nt, Human
gaggcugauucggggaacagca

SEQ ID NO: 775883 - RNA, 22 nt, Human
ucugaccacagacaaccugcua

SEQ ID NO: 775884 - RNA, 22 nt, Human
gauauacauagguuucuaugca

SEQ ID NO: 775885 - RNA, 22 nt, Human
uuucuucuuaauacuggcugcu

SEQ ID NO: 775886 - RNA, 22 nt, Human
uaggccagcccuuaguccuguc

SEQ ID NO: 775887 - RNA, 22 nt, Human
gagguccugucugagaauggag

SEQ ID NO: 775888 - RNA, 22 nt, Human
ggagcucagaagugagugaguu

SEQ ID NO: 775889 - RNA, 22 nt, Human
uacaugcauuggauggcaauag

SEQ ID NO: 775890 - RNA, 22 nt, Human
uuggucccucauggacacauga

SEQ ID NO: 775891 - RNA, 22 nt, Human
gucugaggaagaugcaggggga

SEQ ID NO: 775892 - RNA, 17 nt, Human
cccaugagcccacuccc

SEQ ID NO: 775893 - RNA, 22 nt, Human
ccagcuccaaguuugggcauca

SEQ ID NO: 775894 - RNA, 22 nt, Human
cuugaaugaaaccaacugauga

SEQ ID NO: 775895 - RNA, 22 nt, Human
cuugaggcugcacuccagggcc

SEQ ID NO: 775896 - RNA, 22 nt, Human
ucuggaagacagugagcccgcu

SEQ ID NO: 775897 - RNA, 22 nt, Human
guauuucaucuugaaaaccagu

SEQ ID NO: 775898 - RNA, 22 nt, Human
ggcagcuggguuggccagaaac

SEQ ID NO: 775899 - RNA, 22 nt, Human
aagcagccacuggccaguuaua

SEQ ID NO: 775900 - RNA, 22 nt, Human
ucagacugaucaucuaucagau

SEQ ID NO: 775901 - RNA, 22 nt, Human
cuaggcucagucucuggucugu

SEQ ID NO: 775902 - RNA, 22 nt, Human
ucacuucacacccacuaucaug

SEQ ID NO: 775903 - RNA, 22 nt, Human
gcagaggugagaagggccuccc

SEQ ID NO: 775904 - RNA, 22 nt, Human
acuguauagauggaguugauuu

SEQ ID NO: 775905 - RNA, 22 nt, Human
uugauucuauggcuccgggagu

SEQ ID NO: 775906 - RNA, 22 nt, Human
gcacuucaugacuuugucaaau

SEQ ID NO: 775907 - RNA, 22 nt, Human
uaccugagguaaggaugaugag

SEQ ID NO: 775908 - RNA, 22 nt, Human
gaaucucaguggaagcaggaag

SEQ ID NO: 775909 - RNA, 22 nt, Human
acuguucuucccauuuauauug

SEQ ID NO: 775910 - RNA, 22 nt, Human
gagguggcgcgccaucccugcc

SEQ ID NO: 775911 - RNA, 22 nt, Human
agcagcaucuucuaaguaaggc

SEQ ID NO: 775912 - RNA, 22 nt, Human
agcucugguauuucuuuaaucc

SEQ ID NO: 775913 - RNA, 22 nt, Human
ucacacacauaaucuaagauua

SEQ ID NO: 775914 - RNA, 22 nt, Human
ugucugaaggcagguggagaac

SEQ ID NO: 775915 - RNA, 22 nt, Human
aaagguaugauacugugacaug

SEQ ID NO: 775916 - RNA, 22 nt, Human
aggcaaggugcuacagacagug

SEQ ID NO: 775917 - RNA, 22 nt, Human
aagacacaaagcuucccuuuuc

SEQ ID NO: 775918 - RNA, 20 nt, Human
caccagucaugagucaauac

SEQ ID NO: 775919 - RNA, 22 nt, Human
cgcaacagcguggcgcccagcu

SEQ ID NO: 775920 - RNA, 22 nt, Human
cugggcuguuuguucuggucuc

SEQ ID NO: 775921 - RNA, 22 nt, Human
auggcucuugaauugauacucu

SEQ ID NO: 775922 - RNA, 22 nt, Human
ugagccagucucucagaacccu

SEQ ID NO: 775923 - RNA, 22 nt, Human
cagggugguaccagcaucuagu

SEQ ID NO: 775924 - RNA, 22 nt, Human
uacuucaaacaaugguacaaac

SEQ ID NO: 775925 - RNA, 22 nt, Human
aaguucuuucuggaaggucugc

SEQ ID NO: 775926 - RNA, 22 nt, Human
augcaguagauaggcacuuuua

SEQ ID NO: 775927 - RNA, 22 nt, Human
uuuguguuuuagcuggugaggc

SEQ ID NO: 775928 - RNA, 22 nt, Human
uuuaguuuuaacugaaagcuau

SEQ ID NO: 775929 - RNA, 17 nt, Human
gcauccaguaacaugcc

SEQ ID NO: 775930 - RNA, 22 nt, Human
gggcucugggucgugucuccau

SEQ ID NO: 775931 - RNA, 17 nt, Human
cugaagauaauggcaac

SEQ ID NO: 775932 - RNA, 22 nt, Human
gcgccugccaccaugccaggcu

SEQ ID NO: 775933 - RNA, 22 nt, Human
auggggugagacuaggauuaaa

SEQ ID NO: 775934 - RNA, 22 nt, Human
ugucuuuagagucacaaaacca

SEQ ID NO: 775935 - RNA, 20 nt, Human
ugggagaagaacacuggaac

SEQ ID NO: 775936 - RNA, 19 nt, Human
cuagggcuuggcagcaggc

SEQ ID NO: 775937 - RNA, 21 nt, Human
uucugccuuccccuagcuggg

SEQ ID NO: 775938 - RNA, 23 nt, Human
uguaacuuugggcauguugcuuc

SEQ ID NO: 775939 - RNA, 22 nt, Human
uuauuaaugaguacaaguuauu

SEQ ID NO: 775940 - RNA, 19 nt, Human
auagagacagaguuuaauc

SEQ ID NO: 775941 - RNA, 22 nt, Human
ugcuugacuuaguuucucauuu

SEQ ID NO: 775942 - RNA, 22 nt, Human
uaucacacucggaaaucuagga

SEQ ID NO: 775943 - RNA, 22 nt, Human
aaagaucaugcuguuuugugau

SEQ ID NO: 775944 - RNA, 22 nt, Human
ucucugagcucaggagcugcag

SEQ ID NO: 775945 - RNA, 22 nt, Human
cagcugguguccagggaagugg

SEQ ID NO: 775946 - RNA, 22 nt, Human
ugcagggccgcuggaggucaug

SEQ ID NO: 775947 - RNA, 22 nt, Human
caccaggagccaucaggagucc

SEQ ID NO: 775948 - RNA, 23 nt, Human
ucagggcucacacguuuucuggc

SEQ ID NO: 775949 - RNA, 22 nt, Human
uuaucagaguccccaaaagaaa

SEQ ID NO: 775950 - RNA, 22 nt, Human
ggaucugggcucugccaaucag

SEQ ID NO: 775951 - RNA, 22 nt, Human
cccauucccuuuacuguugcau

SEQ ID NO: 775952 - RNA, 22 nt, Human
cauuuaaagguuguggguaaaa

SEQ ID NO: 775953 - RNA, 22 nt, Human
ccacuugaauuuuagugguuuu

SEQ ID NO: 775954 - RNA, 22 nt, Human
gagccagugaucagacagggag

SEQ ID NO: 775955 - RNA, 22 nt, Human
acuggaaaugagaugauaucag

SEQ ID NO: 775956 - RNA, 22 nt, Human
uccagcucugauucucacuagc

SEQ ID NO: 775957 - RNA, 22 nt, Human
uggggcuggcuauugucucccu

SEQ ID NO: 775958 - RNA, 22 nt, Human
uguacaugaauaaaagaucuug

SEQ ID NO: 775959 - RNA, 22 nt, Human
aaggagagguuguccguguugu

SEQ ID NO: 775960 - RNA, 22 nt, Human
acaugcuuuucccacaauuaua

SEQ ID NO: 775961 - RNA, 22 nt, Human
gcagagguuggauuggugacuu

SEQ ID NO: 775962 - RNA, 22 nt, Human
gcuuuagaaauguaggagauac

SEQ ID NO: 775963 - RNA, 19 nt, Human
aggcuggaugcccaucuua

SEQ ID NO: 775964 - RNA, 22 nt, Human
gccaggcuggugucacaacucu

SEQ ID NO: 775965 - RNA, 22 nt, Human
acaugaacauuauaucagcaag

SEQ ID NO: 775966 - RNA, 22 nt, Human
uaccugagccccugcuggugua

SEQ ID NO: 775967 - RNA, 18 nt, Human
guguuacaggagugcagc

SEQ ID NO: 775968 - RNA, 22 nt, Human
cacugcaguaacucuaggacug

SEQ ID NO: 775969 - RNA, 22 nt, Human
uaucaacauuaauauuuucugg

SEQ ID NO: 775970 - RNA, 22 nt, Human
ugcagggauuauguagggguug

SEQ ID NO: 775971 - RNA, 22 nt, Human
uggagccaguguugcccaacac

SEQ ID NO: 775972 - RNA, 22 nt, Human
ccuccacaggagcugcagugcu

SEQ ID NO: 775973 - RNA, 22 nt, Human
agguaguuuugacuucauggcu

SEQ ID NO: 775974 - RNA, 22 nt, Human
ccagggcaggagaaagacucac

SEQ ID NO: 775975 - RNA, 22 nt, Human
gcaggacaggcguugguccagu

SEQ ID NO: 775976 - RNA, 22 nt, Human
ccagagaggccuuggcaagaca

SEQ ID NO: 775977 - RNA, 22 nt, Human
cagcaugaaaaguguugcuauc

SEQ ID NO: 775978 - RNA, 22 nt, Human
uguacaaaacaagaugggggua

SEQ ID NO: 775979 - RNA, 22 nt, Human
guacauuuuacuuuguuugaau

SEQ ID NO: 775980 - RNA, 22 nt, Human
auuuccuauagauauggugagu

SEQ ID NO: 775981 - RNA, 22 nt, Human
acagcuuugggcaaugcuauga

SEQ ID NO: 775982 - RNA, 22 nt, Human
uaguuucuagucaaucuucuuu

SEQ ID NO: 775983 - RNA, 22 nt, Human
cacccagcuuuugcauccuccg

SEQ ID NO: 775984 - RNA, 22 nt, Human
ucaaugcauaggagguggcaga

SEQ ID NO: 775985 - RNA, 22 nt, Human
agaagucaaugaugagagugcu

SEQ ID NO: 775986 - RNA, 22 nt, Human
ucuggaauugcugugugaguuc

SEQ ID NO: 775987 - RNA, 22 nt, Human
gaggaaggaaugcaguguaugc

SEQ ID NO: 775988 - RNA, 22 nt, Human
ugggccucuguuuccucaucug

SEQ ID NO: 775989 - RNA, 22 nt, Human
aaagucauacauggugcuuacu

SEQ ID NO: 775990 - RNA, 22 nt, Human
agggaggcauuagcuacugcga

SEQ ID NO: 775991 - RNA, 18 nt, Human
aguggucuguuauaucau

SEQ ID NO: 775992 - RNA, 22 nt, Human
agcuccuugaaggcaguagcug

SEQ ID NO: 775993 - RNA, 22 nt, Human
ccuguccuccaagagcacaucu

SEQ ID NO: 775994 - RNA, 22 nt, Human
cccaggacccuucaauggcucc

SEQ ID NO: 775995 - RNA, 23 nt, Human
aguuccagaaaaaugcucaagca

SEQ ID NO: 775996 - RNA, 22 nt, Human
cccuggacuguucagggccuga

SEQ ID NO: 775997 - RNA, 23 nt, Human
cagcaggagggugccugggcugc

SEQ ID NO: 775998 - RNA, 22 nt, Human
uuugucuuggccucaguuuucu

SEQ ID NO: 775999 - RNA, 22 nt, Human
cugggaagauggugacagaauu

SEQ ID NO: 776000 - RNA, 22 nt, Human
ccugaguuaguugcugugucuc

SEQ ID NO: 776001 - RNA, 22 nt, Human
ggcccaguguaccccaggcagu

SEQ ID NO: 776002 - RNA, 22 nt, Human
ucuccaggugaaacuugcaggg

SEQ ID NO: 776003 - RNA, 19 nt, Human
gacuccaacuuuaagcaug

SEQ ID NO: 776004 - RNA, 22 nt, Human
agauugaagacugguggagcug

SEQ ID NO: 776005 - RNA, 22 nt, Human
ugagauaagcaaggauaaaggu

SEQ ID NO: 776006 - RNA, 22 nt, Human
aagcagugcgcucaucuaaggg

SEQ ID NO: 776007 - RNA, 22 nt, Human
gaggcacagaguaggugcacac

SEQ ID NO: 776008 - RNA, 22 nt, Human
agaaguuugguccuuuucaagg

SEQ ID NO: 776009 - RNA, 20 nt, Human
uuucugugagaaacacuguu

SEQ ID NO: 776010 - RNA, 22 nt, Human
ucacaguguggcaacucacaga

SEQ ID NO: 776011 - RNA, 19 nt, Human
gcacacauacacccuuugg

SEQ ID NO: 776012 - RNA, 23 nt, Human
ucuccuccuagauacagucaugg

SEQ ID NO: 776013 - RNA, 22 nt, Human
auucacaaguugauggauauuu

SEQ ID NO: 776014 - RNA, 22 nt, Human
ucccagcagcauagcucagaau

SEQ ID NO: 776015 - RNA, 22 nt, Human
aaaaugaacagaacaaugggga

SEQ ID NO: 776016 - RNA, 22 nt, Human
ccucccugguggcucuggucua

SEQ ID NO: 776017 - RNA, 22 nt, Human
aaccucucccuuugugucccug

SEQ ID NO: 776018 - RNA, 22 nt, Human
agaaaaggauugauggaucaga

SEQ ID NO: 776019 - RNA, 22 nt, Human
uacagaggaggugguugggagu

SEQ ID NO: 776020 - RNA, 22 nt, Human
auccaggguguggagagagcuc

SEQ ID NO: 776021 - RNA, 22 nt, Human
cuguggcucucugcaggguccc

SEQ ID NO: 776022 - RNA, 22 nt, Human
cuuggcuuuugcucccagauca

SEQ ID NO: 776023 - RNA, 19 nt, Human
caggagagcaugcacuuug

SEQ ID NO: 776024 - RNA, 22 nt, Human
auuaguugaacaaguuaaguaa

SEQ ID NO: 776025 - RNA, 22 nt, Human
agaucauuuggcagaagcaacg

SEQ ID NO: 776026 - RNA, 22 nt, Human
uggggguguccuggugcacaca

SEQ ID NO: 776027 - RNA, 22 nt, Human
caauuuuacucuuccucuucca

SEQ ID NO: 776028 - RNA, 22 nt, Human
cacuguacuggguugaaggacg

SEQ ID NO: 776029 - RNA, 22 nt, Human
aucugacaucuacuagaacaga

SEQ ID NO: 776030 - RNA, 18 nt, Human
uggcuuccugcgggcugc

SEQ ID NO: 776031 - RNA, 22 nt, Human
ugcugagguaaccauauccugc

SEQ ID NO: 776032 - RNA, 22 nt, Human
agcuccagaagccugcaaggua

SEQ ID NO: 776033 - RNA, 22 nt, Human
caugaaggaccauuucacgguc

SEQ ID NO: 776034 - RNA, 22 nt, Human
uguaucaaggguuuauguaagc

SEQ ID NO: 776035 - RNA, 22 nt, Human
ucucagggaccaugaugaugac

SEQ ID NO: 776036 - RNA, 22 nt, Human
gaagcacaaaguguaguuccga

SEQ ID NO: 776037 - RNA, 21 nt, Human
aaaaucaccuuaggucacugg

SEQ ID NO: 776038 - RNA, 23 nt, Human
gccuggauuaaggcagugacuuc

SEQ ID NO: 776039 - RNA, 19 nt, Human
uuagccauccacagugaaa

SEQ ID NO: 776040 - RNA, 21 nt, Human
uuuucccacugaaagcuccca

SEQ ID NO: 776041 - RNA, 22 nt, Human
ugaagacaagugugcugguguu

SEQ ID NO: 776042 - RNA, 22 nt, Human
aggggcuguggaaaccaacucu

SEQ ID NO: 776043 - RNA, 22 nt, Human
cugaaggaagcagaagcgaggu

SEQ ID NO: 776044 - RNA, 21 nt, Human
uggaaagauucaaagaccagg

SEQ ID NO: 776045 - RNA, 23 nt, Human
gcugcagcuguggauguucucag

SEQ ID NO: 776046 - RNA, 21 nt, Human
auuucagaaauauugguggga

SEQ ID NO: 776047 - RNA, 22 nt, Human
ugugcacauucuaggacuagua

SEQ ID NO: 776048 - RNA, 22 nt, Human
ucuucuacuauaauaauuuucu

SEQ ID NO: 776049 - RNA, 20 nt, Human
ucugaagaaagacagggacu

SEQ ID NO: 776050 - RNA, 22 nt, Human
ugcauugaggggcucucuuccu

SEQ ID NO: 776051 - RNA, 21 nt, Human
gggggaagaggaguugcuagu

SEQ ID NO: 776052 - RNA, 22 nt, Human
acacagaguaucuuuugccuag

SEQ ID NO: 776053 - RNA, 22 nt, Human
acagccccccgcucaguuucca

SEQ ID NO: 776054 - RNA, 22 nt, Human
aacagcagggaaauuccaaguc

SEQ ID NO: 776055 - RNA, 16 nt, Human
aauugcuucuugcugc

SEQ ID NO: 776056 - RNA, 22 nt, Human
gccuucugauaucucuuggcau

SEQ ID NO: 776057 - RNA, 22 nt, Human
ggagugaaucacuagaugcaga

SEQ ID NO: 776058 - RNA, 22 nt, Human
ugaucuuuccucuuguuugucu

SEQ ID NO: 776059 - RNA, 22 nt, Human
aaagguucucuuguucauuauu

SEQ ID NO: 776060 - RNA, 22 nt, Human
agaggccccaugggauggcggu

SEQ ID NO: 776061 - RNA, 22 nt, Human
uugcuguguaacuccuggccug

SEQ ID NO: 776062 - RNA, 22 nt, Human
accugcccaugaaaauggggag

SEQ ID NO: 776063 - RNA, 22 nt, Human
aguggaagagccauguuccaac

SEQ ID NO: 776064 - RNA, 22 nt, Human
gaugagcugugauuaauaagua

SEQ ID NO: 776065 - RNA, 22 nt, Human
uggccaggcuggucuggaacgc

SEQ ID NO: 776066 - RNA, 22 nt, Human
gcgcaagccacacagccugggg

SEQ ID NO: 776067 - RNA, 22 nt, Human
accaggcacucuuguggcagug

SEQ ID NO: 776068 - RNA, 22 nt, Human
gucuggaggcccgucagcccua

SEQ ID NO: 776069 - RNA, 22 nt, Human
ccaggacacgauuuuuagucug

SEQ ID NO: 776070 - RNA, 22 nt, Human
caggcagggagccacuguauaa

SEQ ID NO: 776071 - RNA, 22 nt, Human
uagguucauauucuagaaucau

SEQ ID NO: 776072 - RNA, 22 nt, Human
uggcucacuguagccuugaccu

SEQ ID NO: 776073 - RNA, 21 nt, Human
uagagccagugguguucugac

SEQ ID NO: 776074 - RNA, 22 nt, Human
ucucuuaaaagaguaauagaga

SEQ ID NO: 776075 - RNA, 22 nt, Human
guggccuuaagaaacaaacaac

SEQ ID NO: 776076 - RNA, 22 nt, Human
ugcugccacaaauucagcugcc

SEQ ID NO: 776077 - RNA, 22 nt, Human
uaaccugaacacacaauaggga

SEQ ID NO: 776078 - RNA, 22 nt, Human
ggggccuguagagcuucaggga

SEQ ID NO: 776079 - RNA, 22 nt, Human
cauauuuaguguuuggagaucg

SEQ ID NO: 776080 - RNA, 22 nt, Human
gccagagcagaauagaguggcc

SEQ ID NO: 776081 - RNA, 21 nt, Human
uccaggagcacgggacuagga

SEQ ID NO: 776082 - RNA, 22 nt, Human
ugcaggagcccuugggcucugg

SEQ ID NO: 776083 - RNA, 22 nt, Human
ggccuggaagaggacagagaaa

SEQ ID NO: 776084 - RNA, 22 nt, Human
gcaggcuggaggcuguucuggg

SEQ ID NO: 776085 - RNA, 22 nt, Human
aggaggcugaacuagggucugg

SEQ ID NO: 776086 - RNA, 22 nt, Human
ugaagccaucaggaagccagca

SEQ ID NO: 776087 - RNA, 22 nt, Human
gccugagagaacugaccaagag

SEQ ID NO: 776088 - RNA, 22 nt, Human
accagagggagacuuccucuuc

SEQ ID NO: 776089 - RNA, 22 nt, Human
agagcagauggccagggggccu

SEQ ID NO: 776090 - RNA, 22 nt, Human
guuacauggagcaaugaugcau

SEQ ID NO: 776091 - RNA, 22 nt, Human
ugccaggcauuugacagacacu

SEQ ID NO: 776092 - RNA, 22 nt, Human
uaaaugugaccuucauuuuaua

SEQ ID NO: 776093 - RNA, 22 nt, Human
ugcuuuuuaguacugucuuauu

SEQ ID NO: 776094 - RNA, 22 nt, Human
ggguggcugacuguuuugugga

SEQ ID NO: 776095 - RNA, 22 nt, Human
gcacagaauaacacucugggcu

SEQ ID NO: 776096 - RNA, 23 nt, Human
ugggccagggaguccgguuucuu

SEQ ID NO: 776097 - RNA, 22 nt, Human
auacaguaauuuguaacucauc

SEQ ID NO: 776098 - RNA, 22 nt, Human
ggcaggaggugaguggcgggug

SEQ ID NO: 776099 - RNA, 22 nt, Human
uaaagugaaguucagaauggcu

SEQ ID NO: 776100 - RNA, 22 nt, Human
ugugaauauuuccuucuuugga

SEQ ID NO: 776101 - RNA, 22 nt, Human
uuacauacuuacuagaucuaug

SEQ ID NO: 776102 - RNA, 20 nt, Human
agugucugggccucaggccc

SEQ ID NO: 776103 - RNA, 22 nt, Human
gaaacagcuagaaagccauugg

SEQ ID NO: 776104 - RNA, 22 nt, Human
uggcucugucacugugagcuau

SEQ ID NO: 776105 - RNA, 22 nt, Human
uucuguacaaguuguggcugcu

SEQ ID NO: 776106 - RNA, 22 nt, Human
uuaaaugugauccugguaugca

SEQ ID NO: 776107 - RNA, 22 nt, Human
gcuggaaaucauauuuuguugu

SEQ ID NO: 776108 - RNA, 22 nt, Human
gaaucccaaucuguuauugaca

SEQ ID NO: 776109 - RNA, 22 nt, Human
aacuauguuaauaaguuucauu

SEQ ID NO: 776110 - RNA, 22 nt, Human
ggccucggcccacugcugcggu

SEQ ID NO: 776111 - RNA, 22 nt, Human
augccaaguacaggcacugcuc

SEQ ID NO: 776112 - RNA, 22 nt, Human
ugaaagcacaaguucuaacagg

SEQ ID NO: 776113 - RNA, 22 nt, Human
ucaagcggacugagauacucug

SEQ ID NO: 776114 - RNA, 22 nt, Human
aaaaguaauugcaguuuucgcc

SEQ ID NO: 776115 - RNA, 22 nt, Human
cuccuccacagaccuacugaau

SEQ ID NO: 776116 - RNA, 22 nt, Human
gggaggagggugcuggcuaaac

SEQ ID NO: 776117 - RNA, 22 nt, Human
gugucugcuuucagcuaguagg

SEQ ID NO: 776118 - RNA, 22 nt, Human
auagauacauuagguaacuugu

SEQ ID NO: 776119 - RNA, 22 nt, Human
uuuucagaggccuaagagguuu

SEQ ID NO: 776120 - RNA, 22 nt, Human
cagagccucccuccucugccau

SEQ ID NO: 776121 - RNA, 22 nt, Human
cacaugcuucuuuugauuauga

SEQ ID NO: 776122 - RNA, 22 nt, Human
uggugacugggacuggauauga

SEQ ID NO: 776123 - RNA, 22 nt, Human
uugcaggguccuguggcucucc

SEQ ID NO: 776124 - RNA, 22 nt, Human
gauuaacauuucuaagaugcca

SEQ ID NO: 776125 - RNA, 22 nt, Human
uaaauaugcauguauccuuauc

SEQ ID NO: 776126 - RNA, 22 nt, Human
gggcacugaguggaugaugcag

SEQ ID NO: 776127 - RNA, 22 nt, Human
augacuuauuacaagucauauu

SEQ ID NO: 776128 - RNA, 20 nt, Human
uuuccacuguaauguaugau

SEQ ID NO: 776129 - RNA, 22 nt, Human
cuggcccugguaaggacaccca

SEQ ID NO: 776130 - RNA, 22 nt, Human
uuggaacaugccgggguccagg

SEQ ID NO: 776131 - RNA, 22 nt, Human
aaagaacuauuaacgaggaagc

SEQ ID NO: 776132 - RNA, 20 nt, Human
uucagagucagcaaaugcag

SEQ ID NO: 776133 - RNA, 22 nt, Human
gcugccugcuucaugugggaga

SEQ ID NO: 776134 - RNA, 22 nt, Human
ugguuucuggguuugucuagga

SEQ ID NO: 776135 - RNA, 22 nt, Human
uucuguggguaauaccucauac

SEQ ID NO: 776136 - RNA, 22 nt, Human
uuccuucuucauuguguuacag

SEQ ID NO: 776137 - RNA, 22 nt, Human
augccaagcucuaucccugacc

SEQ ID NO: 776138 - RNA, 22 nt, Human
acugcugauuuagcuuuguggg

SEQ ID NO: 776139 - RNA, 22 nt, Human
uuugcaaaguccauugaaguua

SEQ ID NO: 776140 - RNA, 22 nt, Human
cccuguccuggaugggagcacu

SEQ ID NO: 776141 - RNA, 22 nt, Human
agcuuuaucagaggagucucua

SEQ ID NO: 776142 - RNA, 22 nt, Human
uccaugagggacacuggaugcu

SEQ ID NO: 776143 - RNA, 22 nt, Human
ucgauagaauauacuagcugug

SEQ ID NO: 776144 - RNA, 22 nt, Human
ugaagccaaucugccaggcaga

SEQ ID NO: 776145 - RNA, 22 nt, Human
cuucaugguaaaucugccuuua

SEQ ID NO: 776146 - RNA, 22 nt, Human
aguccaagaucaaggugucagg

SEQ ID NO: 776147 - RNA, 22 nt, Human
uuccuaacuggccuuuauggau

SEQ ID NO: 776148 - RNA, 22 nt, Human
augcaugucagcugugcccaug

SEQ ID NO: 776149 - RNA, 22 nt, Human
uacacaauuaguugcaaaguga

SEQ ID NO: 776150 - RNA, 22 nt, Human
cagugguuuccaaacuuguucc

SEQ ID NO: 776151 - RNA, 22 nt, Human
guggagugcaacgguuggaguu

SEQ ID NO: 776152 - RNA, 20 nt, Human
auuagugcaucuggacaugc

SEQ ID NO: 776153 - RNA, 22 nt, Human
gagacacaggugguuccuguca

SEQ ID NO: 776154 - RNA, 22 nt, Human
ucuuagcauuucauaacaacug

SEQ ID NO: 776155 - RNA, 22 nt, Human
ugcgggucccagggucacaggc

SEQ ID NO: 776156 - RNA, 22 nt, Human
gccugcagaggugcugcuagcu

SEQ ID NO: 776157 - RNA, 22 nt, Human
cuucccacuaguaucacagagc

SEQ ID NO: 776158 - RNA, 22 nt, Human
aaaucguuucguuccugguuuu

SEQ ID NO: 776159 - RNA, 22 nt, Human
cccaucaggaacccaggagccc

SEQ ID NO: 776160 - RNA, 19 nt, Human
aauaauguucaugagauug

SEQ ID NO: 776161 - RNA, 22 nt, Human
ugccaucacugaacuucugaaa

SEQ ID NO: 776162 - RNA, 23 nt, Human
ucuguguccuccuggaccacaga

SEQ ID NO: 776163 - RNA, 22 nt, Human
ccugccaggcgagucuaggcca

SEQ ID NO: 776164 - RNA, 22 nt, Human
gcaguggauccaaugguaucuu

SEQ ID NO: 776165 - RNA, 22 nt, Human
uaaugguuuuuuggagacugcu

SEQ ID NO: 776166 - RNA, 23 nt, Human
ccugagaucuguaagggaccuug

SEQ ID NO: 776167 - RNA, 22 nt, Human
ccagcuggcacuguggcugccc

SEQ ID NO: 776168 - RNA, 22 nt, Human
auuuccaucaucauuaggccua

SEQ ID NO: 776169 - RNA, 22 nt, Human
uacaauagggagguuuagggga

SEQ ID NO: 776170 - RNA, 22 nt, Human
cuacauuuguucaaauaagcug

SEQ ID NO: 776171 - RNA, 22 nt, Human
uggaagaauaggauagaagaac

SEQ ID NO: 776172 - RNA, 22 nt, Human
agugauggcaucggguccagca

SEQ ID NO: 776173 - RNA, 22 nt, Human
gcuuuaaugcaauuucaccuca

SEQ ID NO: 776174 - RNA, 22 nt, Human
auauuugucaucugccuuaguu

SEQ ID NO: 776175 - RNA, 22 nt, Human
uaacauuaaaagagauaauuga

SEQ ID NO: 776176 - RNA, 22 nt, Human
ggcugaaggaugaaagcugcag

SEQ ID NO: 776177 - RNA, 22 nt, Human
agagggccauaggugcauaguu

SEQ ID NO: 776178 - RNA, 22 nt, Human
ucauaacagcuaagucccuuuc

SEQ ID NO: 776179 - RNA, 22 nt, Human
uggagaagauuggucaccauuc

SEQ ID NO: 776180 - RNA, 22 nt, Human
accagagcucuucagcacagga

SEQ ID NO: 776181 - RNA, 22 nt, Human
gaggccugaaaggggaccuaug

SEQ ID NO: 776182 - RNA, 21 nt, Human
aggugcuggcgccccaggaga

SEQ ID NO: 776183 - RNA, 22 nt, Human
aagcccugccacccauucacug

SEQ ID NO: 776184 - RNA, 20 nt, Human
ugucugaaaaggaagcuauc

SEQ ID NO: 776185 - RNA, 22 nt, Human
acagguggucuuugcuccuuuu

SEQ ID NO: 776186 - RNA, 22 nt, Human
caagucauuacugaaaugucac

SEQ ID NO: 776187 - RNA, 22 nt, Human
uacaagauuaaaacuuauacca

SEQ ID NO: 776188 - RNA, 22 nt, Human
agcucccagcuccuuugagaga

SEQ ID NO: 776189 - RNA, 23 nt, Human
agccuuggagguugaggcugcag

SEQ ID NO: 776190 - RNA, 19 nt, Human
aggggcacugucucuagag

SEQ ID NO: 776191 - RNA, 22 nt, Human
cuggcagcauuuuuuucagaag

SEQ ID NO: 776192 - RNA, 22 nt, Human
uaaaacugcuugguauggucua

SEQ ID NO: 776193 - RNA, 22 nt, Human
uaagacagggucuauucuuagu

SEQ ID NO: 776194 - RNA, 22 nt, Human
ggagggagagugacccuaccaa

SEQ ID NO: 776195 - RNA, 22 nt, Human
uuacuuuaucuccuagauucca

SEQ ID NO: 776196 - RNA, 22 nt, Human
gccaaaguaccuagcccucugc

SEQ ID NO: 776197 - RNA, 22 nt, Human
cuuucuuuguccaccaacaaug

SEQ ID NO: 776198 - RNA, 22 nt, Human
aagagagagcauucuucuguua

SEQ ID NO: 776199 - RNA, 18 nt, Human
aggaaagaaaggcaggug

SEQ ID NO: 776200 - RNA, 22 nt, Human
ccucaggcuagcuacugucccu

SEQ ID NO: 776201 - RNA, 22 nt, Human
ccuugcauuuaaaggcguaggg

SEQ ID NO: 776202 - RNA, 22 nt, Human
ugcaaggaagggacagcugaga

SEQ ID NO: 776203 - RNA, 22 nt, Human
uccaggugccggggacugaggc

SEQ ID NO: 776204 - RNA, 22 nt, Human
aggucaaagaaccuagcuauag

SEQ ID NO: 776205 - RNA, 22 nt, Human
ucauugcaguugaguuguguua

SEQ ID NO: 776206 - RNA, 22 nt, Human
cugggacuuuacccuguggccc

SEQ ID NO: 776207 - RNA, 22 nt, Human
cugugucggacgugggcagcag

SEQ ID NO: 776208 - RNA, 22 nt, Human
cacuguggcuuaccaaagcuaa

SEQ ID NO: 776209 - RNA, 22 nt, Human
uugaaguuuaaugguagauucc

SEQ ID NO: 776210 - RNA, 22 nt, Human
acaggcuuuuuuagaaugacau

SEQ ID NO: 776211 - RNA, 22 nt, Human
uaaaucuuguggcaaugcuucu

SEQ ID NO: 776212 - RNA, 22 nt, Human
gaacaggguuugagaggcuuag

SEQ ID NO: 776213 - RNA, 22 nt, Human
uaugaagauugcggucuggaau

SEQ ID NO: 776214 - RNA, 22 nt, Human
uucagcaucuacauauuuagaa

SEQ ID NO: 776215 - RNA, 22 nt, Human
ucucugugugugugacagcauu

SEQ ID NO: 776216 - RNA, 22 nt, Human
uuuccucugucaugacagcuga

SEQ ID NO: 776217 - RNA, 22 nt, Human
uaaaggccagggccugagugcu

SEQ ID NO: 776218 - RNA, 22 nt, Human
gaggagugccagccguggaguc

SEQ ID NO: 776219 - RNA, 22 nt, Human
agaaaucaugucuuauuucuau

SEQ ID NO: 776220 - RNA, 22 nt, Human
augauucucugcuacucuaaau

SEQ ID NO: 776221 - RNA, 22 nt, Human
gcuguggcccuuggcaucugcg

SEQ ID NO: 776222 - RNA, 22 nt, Human
ccugugcuggcuuuauucucag

SEQ ID NO: 776223 - RNA, 22 nt, Human
agcaccugucaaguccaggcug

SEQ ID NO: 776224 - RNA, 22 nt, Human
auggucauaugcuaauucagga

SEQ ID NO: 776225 - RNA, 22 nt, Human
uuucaguugccaagcuaauucu

SEQ ID NO: 776226 - RNA, 22 nt, Human
aaggugucaccagauuggcagg

SEQ ID NO: 776227 - RNA, 22 nt, Human
cagggugcauacccaugcauac

SEQ ID NO: 776228 - RNA, 22 nt, Human
agaguccauaugugggaggagu

SEQ ID NO: 776229 - RNA, 22 nt, Human
acuggacagaggaaauauggag

SEQ ID NO: 776230 - RNA, 22 nt, Human
uucuuaacucaaauauauaucc

SEQ ID NO: 776231 - RNA, 22 nt, Human
aaaucucaggccucuauuuacu

SEQ ID NO: 776232 - RNA, 22 nt, Human
aaagugcaaggauuacaggcau

SEQ ID NO: 776233 - RNA, 22 nt, Human
acacuuaaucuuacugaggauc

SEQ ID NO: 776234 - RNA, 22 nt, Human
acuuguuaguuuuaucugcaug

SEQ ID NO: 776235 - RNA, 18 nt, Human
acuaugcugaauaaaugg

SEQ ID NO: 776236 - RNA, 22 nt, Human
auaguauuuccagaaauagucu

SEQ ID NO: 776237 - RNA, 22 nt, Human
cuagagaaaacuguguaucuug

SEQ ID NO: 776238 - RNA, 22 nt, Human
aggcagccacaugagcuccuga

SEQ ID NO: 776239 - RNA, 22 nt, Human
agguggcagcagaaucagggag

SEQ ID NO: 776240 - RNA, 22 nt, Human
ucuuuaauucagcaugaugcgg

SEQ ID NO: 776241 - RNA, 18 nt, Human
ugggccugcauccuaguc

SEQ ID NO: 776242 - RNA, 22 nt, Human
cucuuaaauaacaucauugcuu

SEQ ID NO: 776243 - RNA, 22 nt, Human
ggcugaguugagaggauuacuu

SEQ ID NO: 776244 - RNA, 22 nt, Human
guguagguaagcaugcagcuga

SEQ ID NO: 776245 - RNA, 22 nt, Human
auacaauccagccauugccaca

SEQ ID NO: 776246 - RNA, 19 nt, Human
agcuguggggccuagcacc

SEQ ID NO: 776247 - RNA, 22 nt, Human
ugaagcaggugaauggaugucg

SEQ ID NO: 776248 - RNA, 22 nt, Human
gucucccaucguuugugaggaa

SEQ ID NO: 776249 - RNA, 22 nt, Human
uucuugaaaauagccauguaca

SEQ ID NO: 776250 - RNA, 22 nt, Human
uuacauaacgguaugaaaaaug

SEQ ID NO: 776251 - RNA, 22 nt, Human
ugagcugugauuaacucugaga

SEQ ID NO: 776252 - RNA, 22 nt, Human
caaccucuuugggccuugguuu

SEQ ID NO: 776253 - RNA, 22 nt, Human
ugagagucucagaccuccuggu

SEQ ID NO: 776254 - RNA, 22 nt, Human
gaauugcuagcgcaccaauucu

SEQ ID NO: 776255 - RNA, 17 nt, Human
uucaagauauugaaaug

SEQ ID NO: 776256 - RNA, 22 nt, Human
aacucucuuuagagagggacaa

SEQ ID NO: 776257 - RNA, 22 nt, Human
gagguucaguaaggaauacuga

SEQ ID NO: 776258 - RNA, 22 nt, Human
ccucuggaucuuucuccacacu

SEQ ID NO: 776259 - RNA, 22 nt, Human
aucauugaauauaagugcuauu

SEQ ID NO: 776260 - RNA, 22 nt, Human
gggcauggugaugugcaccugu

SEQ ID NO: 776261 - RNA, 22 nt, Human
cugggugagcuggccagagggu

SEQ ID NO: 776262 - RNA, 22 nt, Human
uaagaauauugggaauggaugg

SEQ ID NO: 776263 - RNA, 22 nt, Human
ucagaggaccuuacugagaacc

SEQ ID NO: 776264 - RNA, 22 nt, Human
cugcugggccuggucucugagg

SEQ ID NO: 776265 - RNA, 21 nt, Human
uuucuucccuuggcuucugag

SEQ ID NO: 776266 - RNA, 22 nt, Human
ccaggccuuucuucuuggucug

SEQ ID NO: 776267 - RNA, 22 nt, Human
aaaucucugaacuuaauaaugc

SEQ ID NO: 776268 - RNA, 22 nt, Human
ugcaggcugggaagagggacaa

SEQ ID NO: 776269 - RNA, 22 nt, Human
gaggacagagccgccuggcaag

SEQ ID NO: 776270 - RNA, 22 nt, Human
auacugaauuagguaaagcaua

SEQ ID NO: 776271 - RNA, 21 nt, Human
agagccugagaucuuccagca

SEQ ID NO: 776272 - RNA, 22 nt, Human
agugucugccugggaggagcau

SEQ ID NO: 776273 - RNA, 21 nt, Human
aaaaagcuggggcaugcaugc

SEQ ID NO: 776274 - RNA, 22 nt, Human
gcauuuauuaucugccaggcac

SEQ ID NO: 776275 - RNA, 22 nt, Human
uuguugucauuguagaggauuu

SEQ ID NO: 776276 - RNA, 21 nt, Human
uuguuuccucccaaaaugcca

SEQ ID NO: 776277 - RNA, 22 nt, Human
ucuucacaaagcuguuguuaaa

SEQ ID NO: 776278 - RNA, 22 nt, Human
cuuaacagagagaaguguugcu

SEQ ID NO: 776279 - RNA, 18 nt, Human
gaggcagcuagcaauuuu

SEQ ID NO: 776280 - RNA, 21 nt, Human
uuguaaagguuuagaagaaug

SEQ ID NO: 776281 - RNA, 21 nt, Human
agcuuguguguaucacagugu

SEQ ID NO: 776282 - RNA, 22 nt, Human
uguuuguggaauauucuuuaag

SEQ ID NO: 776283 - RNA, 22 nt, Human
uuagaaagaacuuuagauauca

SEQ ID NO: 776284 - RNA, 22 nt, Human
uuggcccuccaccuggcugugc

SEQ ID NO: 776285 - RNA, 22 nt, Human
agagggcugggaugugcugugu

SEQ ID NO: 776286 - RNA, 22 nt, Human
uacuguuucaagcccucacaga

SEQ ID NO: 776287 - RNA, 22 nt, Human
ggaggaugagcuacgaggagcu

SEQ ID NO: 776288 - RNA, 22 nt, Human
ucugacaauaacugaguuuaac

SEQ ID NO: 776289 - RNA, 22 nt, Human
cccaggagaauauaauguucuu

SEQ ID NO: 776290 - RNA, 22 nt, Human
uccuggcaggucagcaggagca

SEQ ID NO: 776291 - RNA, 22 nt, Human
guguaaaucagcuuguguaaua

SEQ ID NO: 776292 - RNA, 22 nt, Human
auccugggaagcugacauugaa

SEQ ID NO: 776293 - RNA, 22 nt, Human
ugcuuauucuuuccacaauuca

SEQ ID NO: 776294 - RNA, 22 nt, Human
uagcccagaagagggaagcaac

SEQ ID NO: 776295 - RNA, 22 nt, Human
gagcccugugaggaaagagggu

SEQ ID NO: 776296 - RNA, 22 nt, Human
augcugugcuggcuaaccaugg

SEQ ID NO: 776297 - RNA, 22 nt, Human
ccucugugucuugguuucaaga

SEQ ID NO: 776298 - RNA, 22 nt, Human
ccaaauauuaacaaaguaauuu

SEQ ID NO: 776299 - RNA, 22 nt, Human
caggccggccggccccagcucu

SEQ ID NO: 776300 - RNA, 22 nt, Human
gccucuggggcagcugagucau

SEQ ID NO: 776301 - RNA, 16 nt, Human
agaggccuugaggaag

SEQ ID NO: 776302 - RNA, 22 nt, Human
ccccugccagcuaucccugaac

SEQ ID NO: 776303 - RNA, 19 nt, Human
gagcaggccacacaugugu

SEQ ID NO: 776304 - RNA, 22 nt, Human
gggcuggacaucuaagguagcu

SEQ ID NO: 776305 - RNA, 22 nt, Human
agccucucuccagcuuggcaga

SEQ ID NO: 776306 - RNA, 22 nt, Human
agagccaguuacaacuguggag

SEQ ID NO: 776307 - RNA, 22 nt, Human
cagaugaacugugacugaaaau

SEQ ID NO: 776308 - RNA, 22 nt, Human
aaugcacauguuguaauaaaua

SEQ ID NO: 776309 - RNA, 20 nt, Human
caccacagaauuggggacag

SEQ ID NO: 776310 - RNA, 22 nt, Human
gucuuauuuaaagagaucauac

SEQ ID NO: 776311 - RNA, 22 nt, Human
uuauggaagugcaaauugugug

SEQ ID NO: 776312 - RNA, 22 nt, Human
ucacagugacagccaauguuuu

SEQ ID NO: 776313 - RNA, 22 nt, Human
uggcaguggcuuugcuggugga

SEQ ID NO: 776314 - RNA, 20 nt, Human
uccugcuuccaccagagcac

SEQ ID NO: 776315 - RNA, 22 nt, Human
cacaaacaucaauccuguuuuc

SEQ ID NO: 776316 - RNA, 22 nt, Human
acagaaggcggggacaaggcgg

SEQ ID NO: 776317 - RNA, 22 nt, Human
ccuggcugcuuccucugccaug

SEQ ID NO: 776318 - RNA, 19 nt, Human
cucucagccugucuccuug

SEQ ID NO: 776319 - RNA, 21 nt, Human
uaaaucucuguauucuucagu

SEQ ID NO: 776320 - RNA, 22 nt, Human
uugggaggucauaaaucuguuc

SEQ ID NO: 776321 - RNA, 22 nt, Human
ccaaaguccauaguuuacauua

SEQ ID NO: 776322 - RNA, 22 nt, Human
ggaaggcugugcaguguuugca

SEQ ID NO: 776323 - RNA, 22 nt, Human
ucuccagguggcuugggcuucu

SEQ ID NO: 776324 - RNA, 22 nt, Human
ccagagggcaaaaugaagcuua

SEQ ID NO: 776325 - RNA, 22 nt, Human
ccagccagcugcccuuggggcc

SEQ ID NO: 776326 - RNA, 22 nt, Human
gaaggauuugagauuauccuag

SEQ ID NO: 776327 - RNA, 22 nt, Human
gaggggauuggaaggaacaccc

SEQ ID NO: 776328 - RNA, 22 nt, Human
auacaaaaauuagccgggagua

SEQ ID NO: 776329 - RNA, 22 nt, Human
aacugcuuaucuuugguagaug

SEQ ID NO: 776330 - RNA, 22 nt, Human
cacucaggguacaauggagggc

SEQ ID NO: 776331 - RNA, 22 nt, Human
aguguuucaauccuagggguug

SEQ ID NO: 776332 - RNA, 21 nt, Human
auucaguuugacaucuagcag

SEQ ID NO: 776333 - RNA, 22 nt, Human
uguucuugagccuuuagaccua

SEQ ID NO: 776334 - RNA, 22 nt, Human
agucuguguaccuuuggccuuc

SEQ ID NO: 776335 - RNA, 22 nt, Human
augcauauuucuuggagcaccu

SEQ ID NO: 776336 - RNA, 19 nt, Human
ggccaccucucuucccagg

SEQ ID NO: 776337 - RNA, 22 nt, Human
guagaaauuccauuuacuuuga

SEQ ID NO: 776338 - RNA, 22 nt, Human
caguacuuugcaucauuccacu

SEQ ID NO: 776339 - RNA, 22 nt, Human
gugcccuggcucacagugucuc

SEQ ID NO: 776340 - RNA, 22 nt, Human
gagagcuggccagcuucaguau

SEQ ID NO: 776341 - RNA, 22 nt, Human
ccuuuuuucuaugccaacucug

SEQ ID NO: 776342 - RNA, 22 nt, Human
gagaacaaggaagagucggcag

SEQ ID NO: 776343 - RNA, 22 nt, Human
acccucagacagcuguggccag

SEQ ID NO: 776344 - RNA, 22 nt, Human
gcaaaguauuaaccaacaggau

SEQ ID NO: 776345 - RNA, 17 nt, Human
aaacuggggucaggagc

SEQ ID NO: 776346 - RNA, 22 nt, Human
ugccauccaacaguuccaucuu

SEQ ID NO: 776347 - RNA, 22 nt, Human
agauucauuaggagacauucag

SEQ ID NO: 776348 - RNA, 22 nt, Human
aaaaccacaaugacuuuugcac

SEQ ID NO: 776349 - RNA, 22 nt, Human
augugcuuuccaaugcuguagg

SEQ ID NO: 776350 - RNA, 22 nt, Human
caaaggcaugugaguauaugug

SEQ ID NO: 776351 - RNA, 21 nt, Human
aucccagcacccaggagugca

SEQ ID NO: 776352 - RNA, 22 nt, Human
ccuuggugaucugggcuggaag

SEQ ID NO: 776353 - RNA, 22 nt, Human
aaggccacgucuccuuccagag

SEQ ID NO: 776354 - RNA, 22 nt, Human
aagccaguggugagaagauagc

SEQ ID NO: 776355 - RNA, 22 nt, Human
gacccugaggaugcaccagcag

SEQ ID NO: 776356 - RNA, 22 nt, Human
ucagaaauuuucucaguaguuc

SEQ ID NO: 776357 - RNA, 22 nt, Human
aaggggcucuugucaggcgcag

SEQ ID NO: 776358 - RNA, 22 nt, Human
agggcugcuuugcuaaauaugg

SEQ ID NO: 776359 - RNA, 22 nt, Human
uuggcagugucugcaaaaugga

SEQ ID NO: 776360 - RNA, 18 nt, Human
cgaggcaggcggaucacg

SEQ ID NO: 776361 - RNA, 22 nt, Human
ucauagaaauguggccagaaac

SEQ ID NO: 776362 - RNA, 22 nt, Human
auggagcagcagaaggggcuug

SEQ ID NO: 776363 - RNA, 22 nt, Human
accugguuugucucaucaccac

SEQ ID NO: 776364 - RNA, 23 nt, Human
guuguaauggauaaugcaaauug

SEQ ID NO: 776365 - RNA, 22 nt, Human
augaguaaaaccacuauuuaca

SEQ ID NO: 776366 - RNA, 22 nt, Human
ugagguggcuagggaggcacuc

SEQ ID NO: 776367 - RNA, 22 nt, Human
ggaaacaugccugcuggacagu

SEQ ID NO: 776368 - RNA, 22 nt, Human
ucauauuuugcaaggucagcua

SEQ ID NO: 776369 - RNA, 22 nt, Human
augaaggcuguguggagccccc

SEQ ID NO: 776370 - RNA, 22 nt, Human
ugcagcuucuuguccugugauu

SEQ ID NO: 776371 - RNA, 22 nt, Human
uacuuaaaaauuaucaaagugg

SEQ ID NO: 776372 - RNA, 22 nt, Human
cuccuggagcagcaggcgcagg

SEQ ID NO: 776373 - RNA, 22 nt, Human
cugaaacuccaugagaaauugc

SEQ ID NO: 776374 - RNA, 22 nt, Human
agggcugccauuucuggcccaa

SEQ ID NO: 776375 - RNA, 22 nt, Human
ugaguuaaaugagaacaugaaa

SEQ ID NO: 776376 - RNA, 22 nt, Human
cagguggcuuauuagggucagu

SEQ ID NO: 776377 - RNA, 22 nt, Human
ugugaaacggagucagggaagg

SEQ ID NO: 776378 - RNA, 22 nt, Human
ugggcccaagugcaaugcagug

SEQ ID NO: 776379 - RNA, 21 nt, Human
gaacccagcagcagugcucug

SEQ ID NO: 776380 - RNA, 22 nt, Human
gcuggccugggcagaggcuaug

SEQ ID NO: 776381 - RNA, 22 nt, Human
uaguucaggguuauuucaaggu

SEQ ID NO: 776382 - RNA, 22 nt, Human
uugcagggcaggaccauggaca

SEQ ID NO: 776383 - RNA, 22 nt, Human
ucagugccuacuuugaucaauu

SEQ ID NO: 776384 - RNA, 22 nt, Human
caucacuuuuaaaggugaucga

SEQ ID NO: 776385 - RNA, 22 nt, Human
aaaugugacagaugcaguacag

SEQ ID NO: 776386 - RNA, 22 nt, Human
uugcacagaugagggugaugcu

SEQ ID NO: 776387 - RNA, 22 nt, Human
aacuguaaagguugagugguaa

SEQ ID NO: 776388 - RNA, 22 nt, Human
gaggcagccucaguggaccucg

SEQ ID NO: 776389 - RNA, 22 nt, Human
ugucauguguucuuaaauacau

SEQ ID NO: 776390 - RNA, 22 nt, Human
uccagucacuucauuuuacaga

SEQ ID NO: 776391 - RNA, 22 nt, Human
guuaugaagucauucacaaaua

SEQ ID NO: 776392 - RNA, 22 nt, Human
ucagagugguagccuauuuucu

SEQ ID NO: 776393 - RNA, 22 nt, Human
uacaaaaaauugauacugacga

SEQ ID NO: 776394 - RNA, 22 nt, Human
gagacaggcagcuaguggguca

SEQ ID NO: 776395 - RNA, 22 nt, Human
uugugucuggauuucagcuuuc

SEQ ID NO: 776396 - RNA, 22 nt, Human
cacauucuuucacaguucugaa

SEQ ID NO: 776397 - RNA, 22 nt, Human
agagaggcauucggugauccca

SEQ ID NO: 776398 - RNA, 22 nt, Human
cugagagaugauauagcuuaau

SEQ ID NO: 776399 - RNA, 22 nt, Human
ggggagcaauaguugaggugug

SEQ ID NO: 776400 - RNA, 22 nt, Human
ggugguggucccgacuugggag

SEQ ID NO: 776401 - RNA, 22 nt, Human
cuggagcuccagggucuccucu

SEQ ID NO: 776402 - RNA, 22 nt, Human
agugacugguuuugacaggaau

SEQ ID NO: 776403 - RNA, 22 nt, Human
cccaggcagagagcuggugagc

SEQ ID NO: 776404 - RNA, 22 nt, Human
aaagaaauagauggcauuuaaa

SEQ ID NO: 776405 - RNA, 22 nt, Human
aguuuucuucauuuuguggcca

SEQ ID NO: 776406 - RNA, 20 nt, Human
aggagaugauccagagucag

SEQ ID NO: 776407 - RNA, 22 nt, Human
gagcuugggugccaugcugagc

SEQ ID NO: 776408 - RNA, 22 nt, Human
aaauuauuuucagaauggagaa

SEQ ID NO: 776409 - RNA, 22 nt, Human
gcuuccugggacaggcuaugug

SEQ ID NO: 776410 - RNA, 22 nt, Human
aggaggaauacaauccagcagc

SEQ ID NO: 776411 - RNA, 19 nt, Human
ugcucucuggugcuucaug

SEQ ID NO: 776412 - RNA, 22 nt, Human
aaguggugguaugaaccgaggg

SEQ ID NO: 776413 - RNA, 22 nt, Human
aagauacauauuuguucuagug

SEQ ID NO: 776414 - RNA, 22 nt, Human
gccccaagggagcccagcacac

SEQ ID NO: 776415 - RNA, 22 nt, Human
guggcuuccaugugcaucugac

SEQ ID NO: 776416 - RNA, 22 nt, Human
aucagcaucggguggugguggg

SEQ ID NO: 776417 - RNA, 22 nt, Human
auucagaaacucugggcagaac

SEQ ID NO: 776418 - RNA, 22 nt, Human
gccaccuggacucagagccagg

SEQ ID NO: 776419 - RNA, 18 nt, Human
cccagugcucacugccuc

SEQ ID NO: 776420 - RNA, 22 nt, Human
uggcagagguaauucaaauccc

SEQ ID NO: 776421 - RNA, 22 nt, Human
ugaagcuuuccuguggucagga

SEQ ID NO: 776422 - RNA, 22 nt, Human
ugagccaggcucaagugauccu

SEQ ID NO: 776423 - RNA, 22 nt, Human
uaaagcauguguuagaagugca

SEQ ID NO: 776424 - RNA, 22 nt, Human
aaauguuuaaguguaggagcaa

SEQ ID NO: 776425 - RNA, 19 nt, Human
ccagcagguucauuucagg

SEQ ID NO: 776426 - RNA, 22 nt, Human
gagucugagucuaauggcccca

SEQ ID NO: 776427 - RNA, 22 nt, Human
auccucucucccauaccagucu

SEQ ID NO: 776428 - RNA, 22 nt, Human
uuuguucaccuagcaaacuuuu

SEQ ID NO: 776429 - RNA, 22 nt, Human
gcuuggcucuaagacaccuauu

SEQ ID NO: 776430 - RNA, 22 nt, Human
ugaugccuaugaauuguaaugu

SEQ ID NO: 776431 - RNA, 22 nt, Human
aaguuauuuccucgugacugaa

SEQ ID NO: 776432 - RNA, 22 nt, Human
cacagaauaaauugguaucaga

SEQ ID NO: 776433 - RNA, 22 nt, Human
ugggagcucugagccugcugug

SEQ ID NO: 776434 - RNA, 22 nt, Human
gcacuugauaaauguuaacuga

SEQ ID NO: 776435 - RNA, 22 nt, Human
aucauagguguguuaccaguua

SEQ ID NO: 776436 - RNA, 20 nt, Human
acaaaauagguacuggguag

SEQ ID NO: 776437 - RNA, 22 nt, Human
ggcagguguggugaccagagau

SEQ ID NO: 776438 - RNA, 22 nt, Human
gcucucuggaagguaucauuau

SEQ ID NO: 776439 - RNA, 22 nt, Human
aaggccugaacaugaggagaug

SEQ ID NO: 776440 - RNA, 22 nt, Human
gagggcaccagaagagccagau

SEQ ID NO: 776441 - RNA, 22 nt, Human
gcauggcaaauaucgagggcag

SEQ ID NO: 776442 - RNA, 23 nt, Human
ucauuucagguugcaugguacca

SEQ ID NO: 776443 - RNA, 22 nt, Human
gaacuguaguuaauacuacaca

SEQ ID NO: 776444 - RNA, 22 nt, Human
ccaggcagaaugaaaccccugu

SEQ ID NO: 776445 - RNA, 22 nt, Human
ugagaauagcagacugguaacu

SEQ ID NO: 776446 - RNA, 22 nt, Human
guggaauuuuuaccuaugaaug

SEQ ID NO: 776447 - RNA, 22 nt, Human
uguacauauauguauguacgca

SEQ ID NO: 776448 - RNA, 22 nt, Human
ugcaggggcuugucugggccug

SEQ ID NO: 776449 - RNA, 22 nt, Human
ugcaugcguuaguuggcguguu

SEQ ID NO: 776450 - RNA, 22 nt, Human
caccagcuacuccagggccgug

SEQ ID NO: 776451 - RNA, 22 nt, Human
aggagcugugaaugggaggggu

SEQ ID NO: 776452 - RNA, 19 nt, Human
uagcagcugccaaaggaga

SEQ ID NO: 776453 - RNA, 22 nt, Human
gugcugcuugggggcagagcag

SEQ ID NO: 776454 - RNA, 22 nt, Human
cuacauucaacagcagaguuuu

SEQ ID NO: 776455 - RNA, 22 nt, Human
uugcauguguauaaaaguugga

SEQ ID NO: 776456 - RNA, 22 nt, Human
auuucuacugugagaaacauga

SEQ ID NO: 776457 - RNA, 22 nt, Human
uacaaugucucucaccugacuu

SEQ ID NO: 776458 - RNA, 22 nt, Human
uccuuccagguccagggaugug

SEQ ID NO: 776459 - RNA, 22 nt, Human
gauuguaaaacagaucauuauc

SEQ ID NO: 776460 - RNA, 22 nt, Human
ugcuucacuggcuccacauagg

SEQ ID NO: 776461 - RNA, 22 nt, Human
uccaagcuugcuuuagccacag

SEQ ID NO: 776462 - RNA, 22 nt, Human
cuugcaguuuagguccucugug

SEQ ID NO: 776463 - RNA, 22 nt, Human
augucacaugagagcgcagcac

SEQ ID NO: 776464 - RNA, 22 nt, Human
acucuguagggacgguucuccc

SEQ ID NO: 776465 - RNA, 22 nt, Human
aacugugggagaaggcgaugug

SEQ ID NO: 776466 - RNA, 22 nt, Human
ucacaggaaccaucagagaaau

SEQ ID NO: 776467 - RNA, 19 nt, Human
aaacucugaaggccacugg

SEQ ID NO: 776468 - RNA, 22 nt, Human
gggugccacagagcuuccacuu

SEQ ID NO: 776469 - RNA, 22 nt, Human
uuacaaugaugaauaaauggca

SEQ ID NO: 776470 - RNA, 22 nt, Human
uccagagccuauauguucaacu

SEQ ID NO: 776471 - RNA, 22 nt, Human
aagugauaccuaggaaaucaag

SEQ ID NO: 776472 - RNA, 22 nt, Human
guacccagaggcaugaucccag

SEQ ID NO: 776473 - RNA, 22 nt, Human
gguggcaggcccugagcauccc

SEQ ID NO: 776474 - RNA, 22 nt, Human
aagcauuugguucugaagacuc

SEQ ID NO: 776475 - RNA, 22 nt, Human
ggucuagaggauguuccuuucc

SEQ ID NO: 776476 - RNA, 22 nt, Human
agaauuuaggaugcaugugaau

SEQ ID NO: 776477 - RNA, 22 nt, Human
cuccucacuuuccagacugggc

SEQ ID NO: 776478 - RNA, 22 nt, Human
uuaugacauaugaguacaagua

SEQ ID NO: 776479 - RNA, 22 nt, Human
uuuucauuguaaaucaggaaac

SEQ ID NO: 776480 - RNA, 22 nt, Human
uugaaacaguagcucauagacc

SEQ ID NO: 776481 - RNA, 22 nt, Human
auuccaaagccugaauaaugga

SEQ ID NO: 776482 - RNA, 22 nt, Human
gccuuuggaugguuuuucuauu

SEQ ID NO: 776483 - RNA, 22 nt, Human
uggcaguaaagcuggaaaagug

SEQ ID NO: 776484 - RNA, 22 nt, Human
ggcucugggugugaccuugggu

SEQ ID NO: 776485 - RNA, 22 nt, Human
ccuaggaagcugagauugcagu

SEQ ID NO: 776486 - RNA, 23 nt, Human
uuuaaccuuggucaagaauuucc

SEQ ID NO: 776487 - RNA, 22 nt, Human
ugagaggauauuuugggaggau

SEQ ID NO: 776488 - RNA, 22 nt, Human
ugugacagucguuaggagcuca

SEQ ID NO: 776489 - RNA, 22 nt, Human
gcagcauugcacuuuuguucuu

SEQ ID NO: 776490 - RNA, 22 nt, Human
gccuccggagucacagugucuu

SEQ ID NO: 776491 - RNA, 22 nt, Human
uccucauagacugacugcuugc

SEQ ID NO: 776492 - RNA, 23 nt, Human
aggauaaacuaaacucauuuugg

SEQ ID NO: 776493 - RNA, 22 nt, Human
agauacacagagguaaagauga

SEQ ID NO: 776494 - RNA, 22 nt, Human
acauccuugauuauguaaggau

SEQ ID NO: 776495 - RNA, 22 nt, Human
agacccucuccucauggacaug

SEQ ID NO: 776496 - RNA, 19 nt, Human
agcugggcuuacucacucg

SEQ ID NO: 776497 - RNA, 22 nt, Human
gaacuacaguaagaauugaugu

SEQ ID NO: 776498 - RNA, 18 nt, Human
caguggugcugggaugug

SEQ ID NO: 776499 - RNA, 22 nt, Human
cccaggccuggucugggccagu

SEQ ID NO: 776500 - RNA, 22 nt, Human
auucuaaugcccuggccccagc

SEQ ID NO: 776501 - RNA, 22 nt, Human
cauuuguaucauauguaucuua

SEQ ID NO: 776502 - RNA, 22 nt, Human
cccaaaggcuguacuuguaacc

SEQ ID NO: 776503 - RNA, 22 nt, Human
aauaugcauguauacaugugua

SEQ ID NO: 776504 - RNA, 22 nt, Human
ugugugcuuauagucuaguagu

SEQ ID NO: 776505 - RNA, 22 nt, Human
gaaaaggccuccccauaggaau

SEQ ID NO: 776506 - RNA, 20 nt, Human
ugagaaggggucagcuguac

SEQ ID NO: 776507 - RNA, 20 nt, Human
ucacacaugguaagcuauga

SEQ ID NO: 776508 - RNA, 22 nt, Human
gcccuuucuucuucuggacugg

SEQ ID NO: 776509 - RNA, 22 nt, Human
aauagcugggaggcacauucau

SEQ ID NO: 776510 - RNA, 22 nt, Human
ucauuuuugaccauggguagga

SEQ ID NO: 776511 - RNA, 20 nt, Human
gaggcucugggcauggcgcc

SEQ ID NO: 776512 - RNA, 22 nt, Human
cugugcaguaggucagggcugg

SEQ ID NO: 776513 - RNA, 22 nt, Human
aagacucaaggaacaacacagu

SEQ ID NO: 776514 - RNA, 22 nt, Human
cugacucuccucaagcauaaau

SEQ ID NO: 776515 - RNA, 22 nt, Human
cagugcagaggugcaagcaugu

SEQ ID NO: 776516 - RNA, 22 nt, Human
gugcugccggcauagcagugaa

SEQ ID NO: 776517 - RNA, 22 nt, Human
uuauugcuauggugagagggau

SEQ ID NO: 776518 - RNA, 22 nt, Human
uucuaguccuagaaacuacaug

SEQ ID NO: 776519 - RNA, 22 nt, Human
gcacuugagccaaugcuaguag

SEQ ID NO: 776520 - RNA, 22 nt, Human
ccuggccagaggcgugccugug

SEQ ID NO: 776521 - RNA, 22 nt, Human
gaggggcuggguagggcaaccc

SEQ ID NO: 776522 - RNA, 22 nt, Human
uuuugcuuaucugagugcagcc

SEQ ID NO: 776523 - RNA, 20 nt, Human
agaggccaguuaggagucua

SEQ ID NO: 776524 - RNA, 22 nt, Human
uguucuuaacuuuuguguauau

SEQ ID NO: 776525 - RNA, 22 nt, Human
cccagagcuccgguccugccca

SEQ ID NO: 776526 - RNA, 22 nt, Human
ggcucagguuuaaagugcuuua

SEQ ID NO: 776527 - RNA, 22 nt, Human
gggugcgguccccacagcccgu

SEQ ID NO: 776528 - RNA, 22 nt, Human
uccugaggcuaaagugcagugg

SEQ ID NO: 776529 - RNA, 22 nt, Human
cugaggcuuguccucucagcuu

SEQ ID NO: 776530 - RNA, 22 nt, Human
uuacaguuagguguguaguggu

SEQ ID NO: 776531 - RNA, 22 nt, Human
ugucuuuuaguuugugagaucu

SEQ ID NO: 776532 - RNA, 22 nt, Human
ucaaagucuaucuguaauuacu

SEQ ID NO: 776533 - RNA, 20 nt, Human
ggcauggguggggcucccag

SEQ ID NO: 776534 - RNA, 22 nt, Human
auuagaagcgugaauccuuuca

SEQ ID NO: 776535 - RNA, 22 nt, Human
uucugugcucaaaacuuuccaa

SEQ ID NO: 776536 - RNA, 22 nt, Human
aaagcuauuugugaguuauaga

SEQ ID NO: 776537 - RNA, 22 nt, Human
augggcaguguauuggaaggaa

SEQ ID NO: 776538 - RNA, 22 nt, Human
aacuuguaaugaaaggcaauag

SEQ ID NO: 776539 - RNA, 22 nt, Human
auuuauguaucuguguagauca

SEQ ID NO: 776540 - RNA, 18 nt, Human
uggagcugagggcaaugc

SEQ ID NO: 776541 - RNA, 22 nt, Human
uucuccagcucaucagggaggg

SEQ ID NO: 776542 - RNA, 22 nt, Human
cacaugcaggagccaauguaca

SEQ ID NO: 776543 - RNA, 22 nt, Human
agagcuuuucuguaauaacauc

SEQ ID NO: 776544 - RNA, 22 nt, Human
ugaggaguuuuucuagagcuaa

SEQ ID NO: 776545 - RNA, 22 nt, Human
cccuuuccugaagaauauuuuu

SEQ ID NO: 776546 - RNA, 22 nt, Human
aggcagggugaugauaaugauu

SEQ ID NO: 776547 - RNA, 21 nt, Human
acugugggguucaacuggcag

SEQ ID NO: 776548 - RNA, 22 nt, Human
ggcuggaacuucuucuggcauu

SEQ ID NO: 776549 - RNA, 21 nt, Human
gcagccagccgagaccaugcc

SEQ ID NO: 776550 - RNA, 22 nt, Human
ccaugggcacuggguggaggua

SEQ ID NO: 776551 - RNA, 22 nt, Human
cagagggucaccaggaagugca

SEQ ID NO: 776552 - RNA, 22 nt, Human
acagccuuggguucucuggggg

SEQ ID NO: 776553 - RNA, 22 nt, Human
aagauccaugggaauguuuggc

SEQ ID NO: 776554 - RNA, 22 nt, Human
uucauucauuacgugccaggca

SEQ ID NO: 776555 - RNA, 22 nt, Human
cacagaaguuucauagucucga

SEQ ID NO: 776556 - RNA, 22 nt, Human
uaaaugaguaauauagcuguuu

SEQ ID NO: 776557 - RNA, 22 nt, Human
gaggcugcuguuagcccugggc

SEQ ID NO: 776558 - RNA, 22 nt, Human
aucucuccuuaugaagcauuau

SEQ ID NO: 776559 - RNA, 19 nt, Human
agaauuguuuugagacccc

SEQ ID NO: 776560 - RNA, 22 nt, Human
auuucucaguaggugcacagug

SEQ ID NO: 776561 - RNA, 22 nt, Human
uuggugacuccccaccaugaug

SEQ ID NO: 776562 - RNA, 22 nt, Human
ugcagggagcucuggggugcag

SEQ ID NO: 776563 - RNA, 22 nt, Human
uauggguagagauggggguuag

SEQ ID NO: 776564 - RNA, 22 nt, Human
uggcaagcuggguuggguagcc

SEQ ID NO: 776565 - RNA, 22 nt, Human
ggucuggauaauuccaguaccu

SEQ ID NO: 776566 - RNA, 22 nt, Human
uaaacuguagcucucguaauuc

SEQ ID NO: 776567 - RNA, 22 nt, Human
cucuuagaaacuauagagauua

SEQ ID NO: 776568 - RNA, 22 nt, Human
ccagcagcugcuaugugguuuu

SEQ ID NO: 776569 - RNA, 22 nt, Human
gacugagaaucauagaaggcaa

SEQ ID NO: 776570 - RNA, 22 nt, Human
ccugauucugccacuacuagcc

SEQ ID NO: 776571 - RNA, 22 nt, Human
ggguucccugccuggccacucu

SEQ ID NO: 776572 - RNA, 22 nt, Human
uggagcuugggacucuugguag

SEQ ID NO: 776573 - RNA, 22 nt, Human
cagucuggcucagcacaaaggg

SEQ ID NO: 776574 - RNA, 22 nt, Human
uaucacaauuccuauaguuugu

SEQ ID NO: 776575 - RNA, 22 nt, Human
cagagcuuaaaacuccauggaa

SEQ ID NO: 776576 - RNA, 22 nt, Human
cugagaguagcuggagaacauu

SEQ ID NO: 776577 - RNA, 22 nt, Human
augcaugcacacacugcauugc

SEQ ID NO: 776578 - RNA, 22 nt, Human
ucccucugggcuccagcacgga

SEQ ID NO: 776579 - RNA, 22 nt, Human
gcugggccccuugaaaggcguc

SEQ ID NO: 776580 - RNA, 22 nt, Human
gcugggcuucaccuccagaguu

SEQ ID NO: 776581 - RNA, 22 nt, Human
agcaucuaaacuaucaguuuga

SEQ ID NO: 776582 - RNA, 22 nt, Human
ugaggcagggaguuuaauuguc

SEQ ID NO: 776583 - RNA, 22 nt, Human
gacagugcauuuccuggcaugg

SEQ ID NO: 776584 - RNA, 22 nt, Human
agacuaaaagaaggaagcuacc

SEQ ID NO: 776585 - RNA, 22 nt, Human
ucucugugaagcucccguuagg

SEQ ID NO: 776586 - RNA, 22 nt, Human
caggaaauaaaugguaaugcau

SEQ ID NO: 776587 - RNA, 22 nt, Human
cuccuucccuucaaguguuccu

SEQ ID NO: 776588 - RNA, 22 nt, Human
uuugcagagugcagaagcaucu

SEQ ID NO: 776589 - RNA, 22 nt, Human
uacuccugcugauccugccagc

SEQ ID NO: 776590 - RNA, 22 nt, Human
guuuacaugcaugcaagaauga

SEQ ID NO: 776591 - RNA, 22 nt, Human
aaagugcauucgaaaguccauc

SEQ ID NO: 776592 - RNA, 22 nt, Human
aguuaacuaaauuaagagacaa

SEQ ID NO: 776593 - RNA, 22 nt, Human
uguuaacauacugcuuucuaau

SEQ ID NO: 776594 - RNA, 22 nt, Human
cuucuggggauggagcccagaa

SEQ ID NO: 776595 - RNA, 22 nt, Human
aaacaaacauagguuugaaagu

SEQ ID NO: 776596 - RNA, 22 nt, Human
cugagaaggaagccuccacucu

SEQ ID NO: 776597 - RNA, 23 nt, Human
aggcuccacaugggcacuuugca

SEQ ID NO: 776598 - RNA, 22 nt, Human
agugaaauagcauuuaugaagc

SEQ ID NO: 776599 - RNA, 22 nt, Human
ggacacaggcagcugggugggu

SEQ ID NO: 776600 - RNA, 22 nt, Human
aaggcaauauugaguuucccuu

SEQ ID NO: 776601 - RNA, 22 nt, Human
gaggcauggccugaggcuagga

SEQ ID NO: 776602 - RNA, 22 nt, Human
cucuugcagauaccuugaagga

SEQ ID NO: 776603 - RNA, 21 nt, Human
auuuucauuaauucagugugg

SEQ ID NO: 776604 - RNA, 22 nt, Human
uguuuuuacugugauccagaaa

SEQ ID NO: 776605 - RNA, 22 nt, Human
gccagccccagacauccuaucg

SEQ ID NO: 776606 - RNA, 22 nt, Human
gcuuucaaauccuaauuccaac

SEQ ID NO: 776607 - RNA, 22 nt, Human
auccuuuaguccuacaacucga

SEQ ID NO: 776608 - RNA, 22 nt, Human
ucagguggcuucggggaguggc

SEQ ID NO: 776609 - RNA, 22 nt, Human
agaggcugucccuugcuauucc

SEQ ID NO: 776610 - RNA, 22 nt, Human
gcauguguuauuucucuguggg

SEQ ID NO: 776611 - RNA, 22 nt, Human
guggggaggcauucuucucccu

SEQ ID NO: 776612 - RNA, 22 nt, Human
uggcucuggcgugaagcccaga

SEQ ID NO: 776613 - RNA, 22 nt, Human
ugugaggguuuuaagggaauga

SEQ ID NO: 776614 - RNA, 22 nt, Human
aggcacagggaugcggagccag

SEQ ID NO: 776615 - RNA, 22 nt, Human
uggagcugacucacaccagcua

SEQ ID NO: 776616 - RNA, 22 nt, Human
uacuuuuccagggcuggcugag

SEQ ID NO: 776617 - RNA, 23 nt, Human
augugcacaucuccuuguccacc

SEQ ID NO: 776618 - RNA, 22 nt, Human
gcauggcuucugccaggcaccu

SEQ ID NO: 776619 - RNA, 21 nt, Human
ggcuaggaugcugggguuucc

SEQ ID NO: 776620 - RNA, 22 nt, Human
uggaaggcugagaguccugggg

SEQ ID NO: 776621 - RNA, 22 nt, Human
gaugcaaaaguaucauuuuaau

SEQ ID NO: 776622 - RNA, 22 nt, Human
auugaauagcugcuuguuguau

SEQ ID NO: 776623 - RNA, 22 nt, Human
augaguuaguuucuugucuaga

SEQ ID NO: 776624 - RNA, 22 nt, Human
cagggacaggggagaaaagaug

SEQ ID NO: 776625 - RNA, 22 nt, Human
auuucugugcaguaaaugguga

SEQ ID NO: 776626 - RNA, 21 nt, Human
ccugucuuggacugaggcacc

SEQ ID NO: 776627 - RNA, 22 nt, Human
gcauggcagccaguacauggug

SEQ ID NO: 776628 - RNA, 22 nt, Human
caguuuccugaagagaaagaau

SEQ ID NO: 776629 - RNA, 22 nt, Human
uuucagaaauuauauuagaugc

SEQ ID NO: 776630 - RNA, 22 nt, Human
caagagugaaacucugucucaa

SEQ ID NO: 776631 - RNA, 22 nt, Human
agggagcuuucagguagcuuaa

SEQ ID NO: 776632 - RNA, 22 nt, Human
gcuaccugagcaagagcuucaa

SEQ ID NO: 776633 - RNA, 17 nt, Human
agguauaaaaugguagc

SEQ ID NO: 776634 - RNA, 22 nt, Human
aaaaugagcauauugauccuuu

SEQ ID NO: 776635 - RNA, 22 nt, Human
aacaguaacgagauguccuaac

SEQ ID NO: 776636 - RNA, 22 nt, Human
auuuugcuggucugaauuacuu

SEQ ID NO: 776637 - RNA, 20 nt, Human
cucugcuuuaggagagucag

SEQ ID NO: 776638 - RNA, 21 nt, Human
agaggaagaagaguguauuau

SEQ ID NO: 776639 - RNA, 22 nt, Human
ccacaggaggauguucagacaa

SEQ ID NO: 776640 - RNA, 22 nt, Human
uucaucaccuugguagcacucc

SEQ ID NO: 776641 - RNA, 22 nt, Human
cccagggaaugacucuggccuu

SEQ ID NO: 776642 - RNA, 22 nt, Human
uuuacagagaauguacauaaag

SEQ ID NO: 776643 - RNA, 22 nt, Human
gcucugucaacagcuagcugug

SEQ ID NO: 776644 - RNA, 22 nt, Human
aggagguggcaacugucgacag

SEQ ID NO: 776645 - RNA, 22 nt, Human
uguccagugauucucaugagcc

SEQ ID NO: 776646 - RNA, 22 nt, Human
uuucacaaaugucuuuaacuug

SEQ ID NO: 776647 - RNA, 22 nt, Human
cugccaggccucaucccagcca

SEQ ID NO: 776648 - RNA, 23 nt, Human
agcacacuuguacaaugcccuag

SEQ ID NO: 776649 - RNA, 22 nt, Human
uuuggaaacugccucagcucuu

SEQ ID NO: 776650 - RNA, 22 nt, Human
uuuccuuugcccaauacauguc

SEQ ID NO: 776651 - RNA, 18 nt, Human
agccaaggaggaggagga

SEQ ID NO: 776652 - RNA, 22 nt, Human
uuauguguauaauuacaggaag

SEQ ID NO: 776653 - RNA, 22 nt, Human
accugcaggcacaggugugcgc

SEQ ID NO: 776654 - RNA, 22 nt, Human
ggggugggguuacucauugugc

SEQ ID NO: 776655 - RNA, 22 nt, Human
cuuggucauuuggggcugcuau

SEQ ID NO: 776656 - RNA, 22 nt, Human
cucuggacacuggcaugggguc

SEQ ID NO: 776657 - RNA, 22 nt, Human
auuacaacuguucccacugucu

SEQ ID NO: 776658 - RNA, 22 nt, Human
gcaaggacucccugggucauuc

SEQ ID NO: 776659 - RNA, 22 nt, Human
caguguggcuuagggaauaggc

SEQ ID NO: 776660 - RNA, 22 nt, Human
aggagggugggaagcaguuuua

SEQ ID NO: 776661 - RNA, 22 nt, Human
aagggugggcccuggcagccau

SEQ ID NO: 776662 - RNA, 22 nt, Human
cagggcagggccacacccccug

SEQ ID NO: 776663 - RNA, 22 nt, Human
aggagagcaggccagccguccc

SEQ ID NO: 776664 - RNA, 22 nt, Human
uccaggcagcccuuccugacuc

SEQ ID NO: 776665 - RNA, 22 nt, Human
cagcaggaggugaguagcaggu

SEQ ID NO: 776666 - RNA, 22 nt, Human
ugcugugacagagucucaugga

SEQ ID NO: 776667 - RNA, 22 nt, Human
ucagggagagccugucugacgu

SEQ ID NO: 776668 - RNA, 22 nt, Human
uacauuccuguuagcaucuaag

SEQ ID NO: 776669 - RNA, 20 nt, Human
gcuucaguuuccucacuggu

SEQ ID NO: 776670 - RNA, 22 nt, Human
uuaauagauaugccucuagagu

SEQ ID NO: 776671 - RNA, 22 nt, Human
uccaggagacacaagguacaua

SEQ ID NO: 776672 - RNA, 22 nt, Human
ucaguauaauugcuggcacuga

SEQ ID NO: 776673 - RNA, 19 nt, Human
caucacauggucugaugaa

SEQ ID NO: 776674 - RNA, 22 nt, Human
gacagguggguucucguaucug

SEQ ID NO: 776675 - RNA, 22 nt, Human
ugucagagcaaugagguucagc

SEQ ID NO: 776676 - RNA, 22 nt, Human
augauugcagcccuacagcugu

SEQ ID NO: 776677 - RNA, 22 nt, Human
acagcacuuggguuuuccuguu

SEQ ID NO: 776678 - RNA, 22 nt, Human
ccuuuucuauccuucuagguuc

SEQ ID NO: 776679 - RNA, 22 nt, Human
agacaggaugcauacucuuggu

SEQ ID NO: 776680 - RNA, 22 nt, Human
cugauacaaugucugcuuuaua

SEQ ID NO: 776681 - RNA, 22 nt, Human
uauucccagccucuuucuaucu

SEQ ID NO: 776682 - RNA, 23 nt, Human
acaaaguaauuccugcuuccaaa

SEQ ID NO: 776683 - RNA, 22 nt, Human
ccaggguuuaaauucugacuau

SEQ ID NO: 776684 - RNA, 22 nt, Human
agcccuggggugcagaaccaug

SEQ ID NO: 776685 - RNA, 22 nt, Human
acaugcauacaagcacauguag

SEQ ID NO: 776686 - RNA, 22 nt, Human
agcacauucugccuugcuuugc

SEQ ID NO: 776687 - RNA, 22 nt, Human
guuuuguuuugagucaacucca

SEQ ID NO: 776688 - RNA, 22 nt, Human
aauggaacuuguaauuaugucc

SEQ ID NO: 776689 - RNA, 23 nt, Human
uugauucuccaguaugggcugag

SEQ ID NO: 776690 - RNA, 22 nt, Human
uauuauuaaauggcagaauuuu

SEQ ID NO: 776691 - RNA, 22 nt, Human
agauggcucuuugaaggggaau

SEQ ID NO: 776692 - RNA, 22 nt, Human
aguagcagaaggucuugaaggg

SEQ ID NO: 776693 - RNA, 22 nt, Human
ucuucuguauuguuaacucagg

SEQ ID NO: 776694 - RNA, 19 nt, Human
ucacucucccugucugucc

SEQ ID NO: 776695 - RNA, 22 nt, Human
uuauuccaguaaucucuguaau

SEQ ID NO: 776696 - RNA, 22 nt, Human
auguuagaaggaauguuaaaag

SEQ ID NO: 776697 - RNA, 22 nt, Human
cugccccaggccuccuuuucuu

SEQ ID NO: 776698 - RNA, 15 nt, Human
aaucagaaguguggc

SEQ ID NO: 776699 - RNA, 22 nt, Human
acagaugaugugcacagauaga

SEQ ID NO: 776700 - RNA, 22 nt, Human
caggauauuuacguucugcuac

SEQ ID NO: 776701 - RNA, 21 nt, Human
auggccacuauggugcagcag

SEQ ID NO: 776702 - RNA, 18 nt, Human
gcugaaauucuaaacaaa

SEQ ID NO: 776703 - RNA, 22 nt, Human
cuaacauuuauugagcacuuag

SEQ ID NO: 776704 - RNA, 22 nt, Human
guguguggaaugcucauuuauu

SEQ ID NO: 776705 - RNA, 22 nt, Human
ggaggagacaguaaaaagcacg

SEQ ID NO: 776706 - RNA, 22 nt, Human
uucuugaaggggauauaaauag

SEQ ID NO: 776707 - RNA, 22 nt, Human
agucacuuccagacaccugccu

SEQ ID NO: 776708 - RNA, 22 nt, Human
uggcacagacagcacagcaaug

SEQ ID NO: 776709 - RNA, 22 nt, Human
cccugcaguccuuucuuggcuc

SEQ ID NO: 776710 - RNA, 22 nt, Human
acacaguugguggcucagucug

SEQ ID NO: 776711 - RNA, 22 nt, Human
gggucagagcaagacugggguc

SEQ ID NO: 776712 - RNA, 22 nt, Human
ugugaauggacaauuaaaucua

SEQ ID NO: 776713 - RNA, 22 nt, Human
ucuggcucacuucaggcuucac

SEQ ID NO: 776714 - RNA, 22 nt, Human
agaggacacaucuuuccucaaa

SEQ ID NO: 776715 - RNA, 20 nt, Human
ucauaaagaggaaauaaaua

SEQ ID NO: 776716 - RNA, 20 nt, Human
cugcaggguuagaggcucca

SEQ ID NO: 776717 - RNA, 22 nt, Human
ggcucugccacuucuuggcugu

SEQ ID NO: 776718 - RNA, 22 nt, Human
auccugugcaaugacugcaucu

SEQ ID NO: 776719 - RNA, 22 nt, Human
cucugugguuagacuauggcug

SEQ ID NO: 776720 - RNA, 22 nt, Human
aggcugugaaauguggcaagga

SEQ ID NO: 776721 - RNA, 22 nt, Human
ucccucgaagagcuuauucuuu

SEQ ID NO: 776722 - RNA, 20 nt, Human
uggggucuaguuggccuggg

SEQ ID NO: 776723 - RNA, 22 nt, Human
aagugcuuuacaaaugucuguu

SEQ ID NO: 776724 - RNA, 22 nt, Human
cugggcucagaaccuuguuaag

SEQ ID NO: 776725 - RNA, 22 nt, Human
agagagcccgggccagggcaca

SEQ ID NO: 776726 - RNA, 22 nt, Human
gcuggcaucacuggcuucggug

SEQ ID NO: 776727 - RNA, 22 nt, Human
aucacauauuuaagaaacaugu

SEQ ID NO: 776728 - RNA, 22 nt, Human
agaugacaaugaaggaaaaugu

SEQ ID NO: 776729 - RNA, 22 nt, Human
ugguggcacugacaucagacac

SEQ ID NO: 776730 - RNA, 23 nt, Human
gucucuagaguguggagcaaaga

SEQ ID NO: 776731 - RNA, 22 nt, Human
cauacauugaauuugcacgugu

SEQ ID NO: 776732 - RNA, 22 nt, Human
caagagcuagaaauugguuaga

SEQ ID NO: 776733 - RNA, 22 nt, Human
uucucccacuccgugcuucagu

SEQ ID NO: 776734 - RNA, 22 nt, Human
agaugauuaugauagcacuguu

SEQ ID NO: 776735 - RNA, 22 nt, Human
gugauuuugagaccuauauagu

SEQ ID NO: 776736 - RNA, 22 nt, Human
aauucacaaaaccagauugcuu

SEQ ID NO: 776737 - RNA, 22 nt, Human
aaaucugagaaauauuguccag

SEQ ID NO: 776738 - RNA, 22 nt, Human
cuuggcaguuucggaaggauga

SEQ ID NO: 776739 - RNA, 22 nt, Human
cuggaaagauuucuuuggaguc

SEQ ID NO: 776740 - RNA, 22 nt, Human
cuguuuaaccagaucucauauc

SEQ ID NO: 776741 - RNA, 22 nt, Human
ugggccugaaggagcugcgccc

SEQ ID NO: 776742 - RNA, 22 nt, Human
gagggcucugaaaggaggucac

SEQ ID NO: 776743 - RNA, 22 nt, Human
ugcaauaaguauugcuuacaug

SEQ ID NO: 776744 - RNA, 22 nt, Human
gcuggagauagaauggccacug

SEQ ID NO: 776745 - RNA, 22 nt, Human
gggccaccuggauuccaugugu

SEQ ID NO: 776746 - RNA, 22 nt, Human
gcuauucaucaauuguucuagc

SEQ ID NO: 776747 - RNA, 22 nt, Human
uaaguaaaacauucaagaaguc

SEQ ID NO: 776748 - RNA, 18 nt, Human
cccagccucuccuuucua

SEQ ID NO: 776749 - RNA, 22 nt, Human
cacauuuaauugguuuagggug

SEQ ID NO: 776750 - RNA, 22 nt, Human
cugacaaaggcaaggcaggggg

SEQ ID NO: 776751 - RNA, 22 nt, Human
aaacuguauauuuauggcaugu

SEQ ID NO: 776752 - RNA, 22 nt, Human
uccugacuccagguccugugug

SEQ ID NO: 776753 - RNA, 22 nt, Human
gagcagggccacuucuguaccu

SEQ ID NO: 776754 - RNA, 22 nt, Human
uccaggcaugucccaagccgga

SEQ ID NO: 776755 - RNA, 22 nt, Human
uggcacaguccugggugccugc

SEQ ID NO: 776756 - RNA, 22 nt, Human
aucaggauucaguaucuccagc

SEQ ID NO: 776757 - RNA, 22 nt, Human
aaauuagucauguuguauuacu

SEQ ID NO: 776758 - RNA, 19 nt, Human
ggugugugcuggggccugu

SEQ ID NO: 776759 - RNA, 22 nt, Human
gucccaggaacauucuggcuag

SEQ ID NO: 776760 - RNA, 22 nt, Human
auggggcucugcggcugcuccc

SEQ ID NO: 776761 - RNA, 22 nt, Human
ccacauuuggagaagauacuuu

SEQ ID NO: 776762 - RNA, 22 nt, Human
uuucauugucuacauaugacau

SEQ ID NO: 776763 - RNA, 22 nt, Human
ucagaggucccuagcaggagug

SEQ ID NO: 776764 - RNA, 22 nt, Human
ccugcugucagcauccucgcga

SEQ ID NO: 776765 - RNA, 22 nt, Human
uugcagcuucuaccacuguuuc

SEQ ID NO: 776766 - RNA, 22 nt, Human
aaagauugaaagagaauuuguc

SEQ ID NO: 776767 - RNA, 22 nt, Human
uaaccugcaacagaucugucuu

SEQ ID NO: 776768 - RNA, 22 nt, Human
aguguacaagaccuuauuguug

SEQ ID NO: 776769 - RNA, 22 nt, Human
ucaucuccauacggucucgcag

SEQ ID NO: 776770 - RNA, 22 nt, Human
uuuaagacucuuguaguacaca

SEQ ID NO: 776771 - RNA, 22 nt, Human
ccaggugguucaggucaccaua

SEQ ID NO: 776772 - RNA, 22 nt, Human
gcuguucccauguggggcucag

SEQ ID NO: 776773 - RNA, 22 nt, Human
aauguguagggugccuguuuuu

SEQ ID NO: 776774 - RNA, 22 nt, Human
aaauugcuggauccuacuccca

SEQ ID NO: 776775 - RNA, 22 nt, Human
gcccucuggugggugagccccg

SEQ ID NO: 776776 - RNA, 22 nt, Human
cuggguggaaagugcugagaau

SEQ ID NO: 776777 - RNA, 22 nt, Human
auucacaaagaagggaaguaca

SEQ ID NO: 776778 - RNA, 22 nt, Human
aaugggaagccagaagacaagg

SEQ ID NO: 776779 - RNA, 22 nt, Human
ugcccaggguggagugcagcgg

SEQ ID NO: 776780 - RNA, 22 nt, Human
gggcagccgcgugaccugccag

SEQ ID NO: 776781 - RNA, 21 nt, Human
agcagccuugugugccaggca

SEQ ID NO: 776782 - RNA, 22 nt, Human
gccaguguuuauagcagugagg

SEQ ID NO: 776783 - RNA, 20 nt, Human
ucugggagggacaagucucc

SEQ ID NO: 776784 - RNA, 22 nt, Human
ucaguguguaauucuuuguuuc

SEQ ID NO: 776785 - RNA, 22 nt, Human
caaaaguaauuaugguuuuugc

SEQ ID NO: 776786 - RNA, 22 nt, Human
ccuggugccacuagagaauguc

SEQ ID NO: 776787 - RNA, 22 nt, Human
aagggcaggcacccacccucac

SEQ ID NO: 776788 - RNA, 22 nt, Human
uagcuguuucagugcagcagaa

SEQ ID NO: 776789 - RNA, 22 nt, Human
agggggcugccaaggaauguaa

SEQ ID NO: 776790 - RNA, 22 nt, Human
ccugucaggguuugccucagaa

SEQ ID NO: 776791 - RNA, 22 nt, Human
gccucugcacuguggcacacca

SEQ ID NO: 776792 - RNA, 22 nt, Human
guggcagagugcgguucugacc

SEQ ID NO: 776793 - RNA, 22 nt, Human
ugaggugguuacuguggugcuc

SEQ ID NO: 776794 - RNA, 22 nt, Human
cugcucacgccaccguucauca

SEQ ID NO: 776795 - RNA, 22 nt, Human
ucagcagaaguauagaggccau

SEQ ID NO: 776796 - RNA, 22 nt, Human
auggaaauaucuuuagagcuua

SEQ ID NO: 776797 - RNA, 22 nt, Human
auaaauuaggaucugggguucc

SEQ ID NO: 776798 - RNA, 22 nt, Human
auggcuccagcugguagagauu

SEQ ID NO: 776799 - RNA, 22 nt, Human
augauaacaacagcagugcugg

SEQ ID NO: 776800 - RNA, 22 nt, Human
caggcucccugcaggccaguga

SEQ ID NO: 776801 - RNA, 22 nt, Human
uggcucauucuacucucccugg

SEQ ID NO: 776802 - RNA, 23 nt, Human
cuggcucauccugguugcagugg

SEQ ID NO: 776803 - RNA, 22 nt, Human
aaugcuauucauuaagccuacu

SEQ ID NO: 776804 - RNA, 22 nt, Human
gugggcuucuguuagggaggcu

SEQ ID NO: 776805 - RNA, 22 nt, Human
agcagaaaacuuucaugcucug

SEQ ID NO: 776806 - RNA, 22 nt, Human
uuacaguaaucgaguguugugg

SEQ ID NO: 776807 - RNA, 22 nt, Human
uuggaagggaacaccauuugac

SEQ ID NO: 776808 - RNA, 22 nt, Human
gaggacaggagacucacuguuu

SEQ ID NO: 776809 - RNA, 22 nt, Human
uucuggaaauggguauagagca

SEQ ID NO: 776810 - RNA, 21 nt, Human
cacaggugggucagugaggcc

SEQ ID NO: 776811 - RNA, 22 nt, Human
caugaggugauaaagcugggau

SEQ ID NO: 776812 - RNA, 22 nt, Human
auauuuuggcaaaugucuagau

SEQ ID NO: 776813 - RNA, 23 nt, Human
uaaugagaagcuuuguuuccuga

SEQ ID NO: 776814 - RNA, 22 nt, Human
auggcugugcagagauugggaa

SEQ ID NO: 776815 - RNA, 22 nt, Human
gggagcugagcuggaagagaau

SEQ ID NO: 776816 - RNA, 22 nt, Human
cacagugcaaucggccacaaau

SEQ ID NO: 776817 - RNA, 22 nt, Human
guguuuccucacuucucugacu

SEQ ID NO: 776818 - RNA, 22 nt, Human
gucuggccauuugcccauugug

SEQ ID NO: 776819 - RNA, 22 nt, Human
gccuuuaucaguuucauggcuu

SEQ ID NO: 776820 - RNA, 22 nt, Human
agucauuacggacuaguacuac

SEQ ID NO: 776821 - RNA, 22 nt, Human
acagccuucucuucacuguguc

SEQ ID NO: 776822 - RNA, 22 nt, Human
aggcacugggaauaugcugagg

SEQ ID NO: 776823 - RNA, 22 nt, Human
acauuucauguuuuccagagca

SEQ ID NO: 776824 - RNA, 22 nt, Human
aaagcugggcuggccaacccag

SEQ ID NO: 776825 - RNA, 22 nt, Human
aggugcuggagucugggcagga

SEQ ID NO: 776826 - RNA, 22 nt, Human
cagccagagaaagggcacugcc

SEQ ID NO: 776827 - RNA, 22 nt, Human
gucuucuaaguaucaaagcaga

SEQ ID NO: 776828 - RNA, 22 nt, Human
guucucuggagucccugggccc

SEQ ID NO: 776829 - RNA, 22 nt, Human
gcacugccaucaaugcaugaca

SEQ ID NO: 776830 - RNA, 22 nt, Human
ggccagcagucacagggucaga

SEQ ID NO: 776831 - RNA, 18 nt, Human
uuuccuuguaugaacaua

SEQ ID NO: 776832 - RNA, 22 nt, Human
cuuguuuaagccgcuguuaagc

SEQ ID NO: 776833 - RNA, 22 nt, Human
gggauauguuuagguguuggag

SEQ ID NO: 776834 - RNA, 22 nt, Human
ggguuaaacaugcuauaugagu

SEQ ID NO: 776835 - RNA, 22 nt, Human
uggcucagccagcccuaggaac

SEQ ID NO: 776836 - RNA, 22 nt, Human
ccucagggaggccucuguggcu

SEQ ID NO: 776837 - RNA, 22 nt, Human
ggcagcuccuccuagucugccc

SEQ ID NO: 776838 - RNA, 22 nt, Human
caggaggcccaaagggcgcaga

SEQ ID NO: 776839 - RNA, 22 nt, Human
cauuugcagagggugacacucu

SEQ ID NO: 776840 - RNA, 22 nt, Human
cugggaagccacaggguguggg

SEQ ID NO: 776841 - RNA, 22 nt, Human
aagauuguuuugggggaagugg

SEQ ID NO: 776842 - RNA, 22 nt, Human
cuggucaggcugaacugccaca

SEQ ID NO: 776843 - RNA, 22 nt, Human
ggcugcucggagccuccuguga

SEQ ID NO: 776844 - RNA, 22 nt, Human
aauguauaauauuuaaugcuuu

SEQ ID NO: 776845 - RNA, 22 nt, Human
ucugggcuuuguaaugggaggu

SEQ ID NO: 776846 - RNA, 22 nt, Human
cuggcuccauccuaggcaaaug

SEQ ID NO: 776847 - RNA, 22 nt, Human
agcugccucagcaacacagacc

SEQ ID NO: 776848 - RNA, 22 nt, Human
ggaacacagaagggcugaaaaa

SEQ ID NO: 776849 - RNA, 22 nt, Human
augucugucuuuguacuccaca

SEQ ID NO: 776850 - RNA, 22 nt, Human
cuccugacuugugagccccucc

SEQ ID NO: 776851 - RNA, 22 nt, Human
ggcucagaggagcuggaacggu

SEQ ID NO: 776852 - RNA, 22 nt, Human
aaagacugggacugcagcaggc

SEQ ID NO: 776853 - RNA, 22 nt, Human
cccugcuuugcacccaggcugg

SEQ ID NO: 776854 - RNA, 22 nt, Human
cucugccaguuucuggccucag

SEQ ID NO: 776855 - RNA, 22 nt, Human
uguaauugcuuguuuaccugcu

SEQ ID NO: 776856 - RNA, 22 nt, Human
ggacaggauaagagacacugcc

SEQ ID NO: 776857 - RNA, 22 nt, Human
cccuggaggaagaaacaauggc

SEQ ID NO: 776858 - RNA, 22 nt, Human
gggccagugagucgggagagcu

SEQ ID NO: 776859 - RNA, 22 nt, Human
aacacagacauagugauuacag

SEQ ID NO: 776860 - RNA, 22 nt, Human
cuccagcuucccucagcugugg

SEQ ID NO: 776861 - RNA, 22 nt, Human
auugcaagugcuagcuaaaaua

SEQ ID NO: 776862 - RNA, 18 nt, Human
agggaucaucacugcagc

SEQ ID NO: 776863 - RNA, 22 nt, Human
ccacuugugaaauaaucaaaua

SEQ ID NO: 776864 - RNA, 22 nt, Human
ucaaagaagauuacccucccau

SEQ ID NO: 776865 - RNA, 23 nt, Human
ugagacccuaauuuagcaagugu

SEQ ID NO: 776866 - RNA, 22 nt, Human
cuucucagcauuuugucagucu

SEQ ID NO: 776867 - RNA, 21 nt, Human
gcaaggcuuuuguguuuccca

SEQ ID NO: 776868 - RNA, 22 nt, Human
uauuauuauauuggaugagacu

SEQ ID NO: 776869 - RNA, 22 nt, Human
ggcugccugcucaggugcggcg

SEQ ID NO: 776870 - RNA, 17 nt, Human
ugccugccagcauugga

SEQ ID NO: 776871 - RNA, 22 nt, Human
acagccaggaauucuggagaag

SEQ ID NO: 776872 - RNA, 22 nt, Human
cuacugucucaucaguguuauu

SEQ ID NO: 776873 - RNA, 21 nt, Human
ugcauucuagcagcucugagg

SEQ ID NO: 776874 - RNA, 22 nt, Human
ugaaggugaccugacaguggcu

SEQ ID NO: 776875 - RNA, 22 nt, Human
uccuugggucagugagugaggu

SEQ ID NO: 776876 - RNA, 22 nt, Human
ccucuucuaggacguccuugug

SEQ ID NO: 776877 - RNA, 22 nt, Human
ucaaagucacaacucucuaauu

SEQ ID NO: 776878 - RNA, 22 nt, Human
cuuuaauucucaggugcacaua

SEQ ID NO: 776879 - RNA, 22 nt, Human
gcagcccaggucucucucacuc

SEQ ID NO: 776880 - RNA, 22 nt, Human
ugauggaagugacugucaguuc

SEQ ID NO: 776881 - RNA, 22 nt, Human
gugugagggacagagaaagggg

SEQ ID NO: 776882 - RNA, 22 nt, Human
caggccugauacacugaacucu

SEQ ID NO: 776883 - RNA, 22 nt, Human
cauuuguuuagaagucuuuaua

SEQ ID NO: 776884 - RNA, 19 nt, Human
aguuuauuauaggugauuc

SEQ ID NO: 776885 - RNA, 22 nt, Human
ggcccaguguugccagaccuga

SEQ ID NO: 776886 - RNA, 22 nt, Human
cuucugaccccuggucuacagc

SEQ ID NO: 776887 - RNA, 23 nt, Human
uuucuucucgaagagggagcuua

SEQ ID NO: 776888 - RNA, 22 nt, Human
gacuguggcagaaauguuguug

SEQ ID NO: 776889 - RNA, 22 nt, Human
caggcugauuaggccucgucca

SEQ ID NO: 776890 - RNA, 22 nt, Human
ugucagcaugucagccaaagau

SEQ ID NO: 776891 - RNA, 22 nt, Human
cagcaccauuuuccuggucagc

SEQ ID NO: 776892 - RNA, 19 nt, Human
aaaugugaugguacaauuc

SEQ ID NO: 776893 - RNA, 22 nt, Human
agggaccucauguaaguggauu

SEQ ID NO: 776894 - RNA, 22 nt, Human
cucugggcacauuuuccaggac

SEQ ID NO: 776895 - RNA, 22 nt, Human
gcuuccuagcauuagccauugc

SEQ ID NO: 776896 - RNA, 22 nt, Human
aaaauguaaagcuugaguguag

SEQ ID NO: 776897 - RNA, 22 nt, Human
uuuguuuagaugguaaaucagu

SEQ ID NO: 776898 - RNA, 22 nt, Human
ucauguuugagacuaauuuuuc

SEQ ID NO: 776899 - RNA, 22 nt, Human
uugcuaauagaagauuugggaa

SEQ ID NO: 776900 - RNA, 22 nt, Human
uggucaguugugacuagaacac

SEQ ID NO: 776901 - RNA, 22 nt, Human
gucccugguuugcccaggacca

SEQ ID NO: 776902 - RNA, 20 nt, Human
agcaguaggaccucugggcc

SEQ ID NO: 776903 - RNA, 22 nt, Human
aaacaguauuaucaauauauuu

SEQ ID NO: 776904 - RNA, 22 nt, Human
uuuguuuucaaugugucauuca

SEQ ID NO: 776905 - RNA, 22 nt, Human
gaucggguggguucugccauca

SEQ ID NO: 776906 - RNA, 22 nt, Human
aggcccuuggacucaugcucga

SEQ ID NO: 776907 - RNA, 22 nt, Human
uguacuuauuuuaugucagcac

SEQ ID NO: 776908 - RNA, 22 nt, Human
gaugucuuggcuugcucucugu

SEQ ID NO: 776909 - RNA, 22 nt, Human
uucggcuuuccaguuugucucg

SEQ ID NO: 776910 - RNA, 22 nt, Human
caggagugagaugcgaucacuu

SEQ ID NO: 776911 - RNA, 22 nt, Human
agcugcucgaagccgguggccc

SEQ ID NO: 776912 - RNA, 22 nt, Human
uuuuuauaugaaggauagugcg

SEQ ID NO: 776913 - RNA, 22 nt, Human
agcuggagaguuuccaggaagg

SEQ ID NO: 776914 - RNA, 22 nt, Human
aaauggcugacuuuucauggga

SEQ ID NO: 776915 - RNA, 20 nt, Human
cuguccauauuugaaaaugc

SEQ ID NO: 776916 - RNA, 22 nt, Human
gaaacuuucaugaauauaagau

SEQ ID NO: 776917 - RNA, 19 nt, Human
cucuuggguggcagaggcc

SEQ ID NO: 776918 - RNA, 22 nt, Human
augcaaaaguaacugugauuuu

SEQ ID NO: 776919 - RNA, 22 nt, Human
agcugggcuccaagagggaucu

SEQ ID NO: 776920 - RNA, 22 nt, Human
aagagagagugcgcucacagaa

SEQ ID NO: 776921 - RNA, 22 nt, Human
ugcccagccuaaacuuggcaag

SEQ ID NO: 776922 - RNA, 22 nt, Human
uuccaggacuucauggcucuga

SEQ ID NO: 776923 - RNA, 22 nt, Human
ugcagagagauauggcaagagg

SEQ ID NO: 776924 - RNA, 22 nt, Human
ggcugccacccucggacuuccg

SEQ ID NO: 776925 - RNA, 22 nt, Human
ugcaggcugugucauuuaguga

SEQ ID NO: 776926 - RNA, 22 nt, Human
ccucuugauugguuggaagcgg

SEQ ID NO: 776927 - RNA, 22 nt, Human
cugcaaaucaaguucuuauaau

SEQ ID NO: 776928 - RNA, 22 nt, Human
ggaagaagggucauuggcagcc

SEQ ID NO: 776929 - RNA, 22 nt, Human
gcuguggguuccuggcauuuga

SEQ ID NO: 776930 - RNA, 22 nt, Human
agcaaggcagucagcuggcugg

SEQ ID NO: 776931 - RNA, 22 nt, Human
uugucugaauucuucuaggcag

SEQ ID NO: 776932 - RNA, 22 nt, Human
agcaggcaggcccagcggcugg

SEQ ID NO: 776933 - RNA, 22 nt, Human
caugaagcuugaagcaguccac

SEQ ID NO: 776934 - RNA, 22 nt, Human
ucacuguguccuuucugcguag

SEQ ID NO: 776935 - RNA, 20 nt, Human
ccugggguacacuggcaugu

SEQ ID NO: 776936 - RNA, 22 nt, Human
uaccucucuaaacccagggaca

SEQ ID NO: 776937 - RNA, 22 nt, Human
uggguucagaucccagcucugu

SEQ ID NO: 776938 - RNA, 22 nt, Human
ugcccuugaggacagcucccag

SEQ ID NO: 776939 - RNA, 22 nt, Human
guguuuuaagaaagaagcucag

SEQ ID NO: 776940 - RNA, 22 nt, Human
ugucacagucucgugagcaucu

SEQ ID NO: 776941 - RNA, 22 nt, Human
uguuccauaaguggugcuuugu

SEQ ID NO: 776942 - RNA, 22 nt, Human
accaggcaugauguggagcaca

SEQ ID NO: 776943 - RNA, 22 nt, Human
gcuuuagauacucccaaugucc

SEQ ID NO: 776944 - RNA, 22 nt, Human
ugucacauccauuuugcaagua

SEQ ID NO: 776945 - RNA, 22 nt, Human
ugcugggcuucacccccacagu

SEQ ID NO: 776946 - RNA, 20 nt, Human
aauuccagcaugauauuuau

SEQ ID NO: 776947 - RNA, 22 nt, Human
gauaaagggggaccaaaugacu

SEQ ID NO: 776948 - RNA, 22 nt, Human
aguguacaguucuaugaauuuc

SEQ ID NO: 776949 - RNA, 22 nt, Human
auaauccaugucuagaguaaag

SEQ ID NO: 776950 - RNA, 21 nt, Human
gacaaagugaagcaggcagga

SEQ ID NO: 776951 - RNA, 22 nt, Human
acucaggaagaaagcagcuggu

SEQ ID NO: 776952 - RNA, 22 nt, Human
aaacuguagugcuucgaucuga

SEQ ID NO: 776953 - RNA, 22 nt, Human
gugcuucuuucuccucaagccu

SEQ ID NO: 776954 - RNA, 22 nt, Human
uccuucagaaaaccucagucuu

SEQ ID NO: 776955 - RNA, 22 nt, Human
ggaggcaaagcacuuugcuugg

SEQ ID NO: 776956 - RNA, 22 nt, Human
aaacuaaaccuggcuuaguaag

SEQ ID NO: 776957 - RNA, 22 nt, Human
uauuuuguuaauaauccagucc

SEQ ID NO: 776958 - RNA, 22 nt, Human
caaauguaauaaggaguuuccc

SEQ ID NO: 776959 - RNA, 22 nt, Human
aggcugagucaaguuaggguga

SEQ ID NO: 776960 - RNA, 22 nt, Human
uagcuuaaaccaaucugaauaa

SEQ ID NO: 776961 - RNA, 22 nt, Human
ccauuugugguuuauuugcucu

SEQ ID NO: 776962 - RNA, 22 nt, Human
aggagagggguaggauuaauuu

SEQ ID NO: 776963 - RNA, 22 nt, Human
gcugaggccaggccccaccgga

SEQ ID NO: 776964 - RNA, 22 nt, Human
ugcuuaaacccugaucaugugu

SEQ ID NO: 776965 - RNA, 22 nt, Human
auucuucucccuuagggcccag

SEQ ID NO: 776966 - RNA, 22 nt, Human
aggagccaccuaggagcuguuu

SEQ ID NO: 776967 - RNA, 22 nt, Human
ucuggcaguuccuuguugauau

SEQ ID NO: 776968 - RNA, 22 nt, Human
cagagacaaugucucugcuugu

SEQ ID NO: 776969 - RNA, 22 nt, Human
aacuuaaugauuucaugcaugu

SEQ ID NO: 776970 - RNA, 22 nt, Human
acuucagccaagaaaacucagu

SEQ ID NO: 776971 - RNA, 22 nt, Human
ugggucagaaucagagaguugc

SEQ ID NO: 776972 - RNA, 22 nt, Human
guugcucaggcaggaguacagu

SEQ ID NO: 776973 - RNA, 22 nt, Human
ccucugcccuuuuccuguauca

SEQ ID NO: 776974 - RNA, 22 nt, Human
gcagagaacccagcagauuggc

SEQ ID NO: 776975 - RNA, 22 nt, Human
uaaaggcaauucagcaagccac

SEQ ID NO: 776976 - RNA, 22 nt, Human
gggaggaggaauguuuugugua

SEQ ID NO: 776977 - RNA, 22 nt, Human
ugggauauuuugagcuuuccuc

SEQ ID NO: 776978 - RNA, 22 nt, Human
uuaaaauuuccccaccauguau

SEQ ID NO: 776979 - RNA, 22 nt, Human
ugagggcuccccgcugcugugu

SEQ ID NO: 776980 - RNA, 22 nt, Human
cuaaugaagcugcuuucuauga

SEQ ID NO: 776981 - RNA, 22 nt, Human
uggcagggccugaaucuuauac

SEQ ID NO: 776982 - RNA, 22 nt, Human
ccagagcugcagguaaaaugcu

SEQ ID NO: 776983 - RNA, 22 nt, Human
cacccagggcugugccugccca

SEQ ID NO: 776984 - RNA, 22 nt, Human
uuagaaaugucacagaucugau

SEQ ID NO: 776985 - RNA, 22 nt, Human
uuacaagauuaauuauuggagu

SEQ ID NO: 776986 - RNA, 23 nt, Human
cucaacccuaguaagggaguagg

SEQ ID NO: 776987 - RNA, 17 nt, Human
ucaaagaaugcaugcag

SEQ ID NO: 776988 - RNA, 22 nt, Human
caggccucuuccaugcagcagc

SEQ ID NO: 776989 - RNA, 22 nt, Human
cagcccaggucucucuuccagu

SEQ ID NO: 776990 - RNA, 22 nt, Human
ccaauguuuauuuuccugcugc

SEQ ID NO: 776991 - RNA, 22 nt, Human
aaugucaacacaagagaaaugc

SEQ ID NO: 776992 - RNA, 22 nt, Human
cccuggcaaaaucccugguaca

SEQ ID NO: 776993 - RNA, 22 nt, Human
cuccugggagcagggauggaug

SEQ ID NO: 776994 - RNA, 22 nt, Human
uucuuaagcaccuaaaaagugg

SEQ ID NO: 776995 - RNA, 22 nt, Human
augaauaaacaggugccucuuc

SEQ ID NO: 776996 - RNA, 22 nt, Human
augcuguguggucaaguuaauu

SEQ ID NO: 776997 - RNA, 22 nt, Human
gcacccaggcuugggcagcaac

SEQ ID NO: 776998 - RNA, 17 nt, Human
cuggucccaccaagccc

SEQ ID NO: 776999 - RNA, 22 nt, Human
ccauccauuuucuugcuugccu

SEQ ID NO: 777000 - RNA, 22 nt, Human
caguauguccuuccucguuggc

SEQ ID NO: 777001 - RNA, 22 nt, Human
caggacgggcaaacaggauggu

SEQ ID NO: 777002 - RNA, 22 nt, Human
uccuggaagaucucugugagau

SEQ ID NO: 777003 - RNA, 22 nt, Human
gcaggccuccccugcuggagcu

SEQ ID NO: 777004 - RNA, 22 nt, Human
cagcucuguguauuuuccccac

SEQ ID NO: 777005 - RNA, 22 nt, Human
uuacgaauguuagauugcaucu

SEQ ID NO: 777006 - RNA, 22 nt, Human
uaaauacagucauuugagccau

SEQ ID NO: 777007 - RNA, 22 nt, Human
caaaugcuggcccugcuacuua

SEQ ID NO: 777008 - RNA, 22 nt, Human
uauugagacuuccaguauauga

SEQ ID NO: 777009 - RNA, 22 nt, Human
uugcaucuaccauaucaaagau

SEQ ID NO: 777010 - RNA, 22 nt, Human
agcagcugcagggagggucugc

SEQ ID NO: 777011 - RNA, 22 nt, Human
acagggcugaggcuggcuucuu

SEQ ID NO: 777012 - RNA, 18 nt, Human
uccugccugugccccagg

SEQ ID NO: 777013 - RNA, 21 nt, Human
ugguggaccagugcugggaga

SEQ ID NO: 777014 - RNA, 22 nt, Human
agcugcucugauaaaccuacuu

SEQ ID NO: 777015 - RNA, 22 nt, Human
uguggccucuaagcucacgaag

SEQ ID NO: 777016 - RNA, 21 nt, Human
acaggauaggacaguguuccu

SEQ ID NO: 777017 - RNA, 22 nt, Human
uaaagcuagaaggugcuguaca

SEQ ID NO: 777018 - RNA, 22 nt, Human
aacacuguggucuuuucaguaa

SEQ ID NO: 777019 - RNA, 22 nt, Human
ugaggaggucagagucuggcug

SEQ ID NO: 777020 - RNA, 22 nt, Human
ccagggugggguccaggaacca

SEQ ID NO: 777021 - RNA, 18 nt, Human
gccuccaccauggagggu

SEQ ID NO: 777022 - RNA, 22 nt, Human
aagggcuguagacaagauugcu

SEQ ID NO: 777023 - RNA, 18 nt, Human
ucagcuuccagcauguuu

SEQ ID NO: 777024 - RNA, 22 nt, Human
gcuucuguucaaggauauaagg

SEQ ID NO: 777025 - RNA, 22 nt, Human
caauuuuuuccaugcucuuaca

SEQ ID NO: 777026 - RNA, 22 nt, Human
uggccaggccggggacagaacu

SEQ ID NO: 777027 - RNA, 22 nt, Human
ggcugcucaaggacucugaucg

SEQ ID NO: 777028 - RNA, 22 nt, Human
aaggcacugaaaaauugugugu

SEQ ID NO: 777029 - RNA, 22 nt, Human
aagugcuuaggucaaaggacau

SEQ ID NO: 777030 - RNA, 22 nt, Human
agcagggggaguuagacuagau

SEQ ID NO: 777031 - RNA, 22 nt, Human
agaccucaauaccaggcaccac

SEQ ID NO: 777032 - RNA, 22 nt, Human
ggaaggaaguaaaugaugcuau

SEQ ID NO: 777033 - RNA, 22 nt, Human
uucauauuucuuuaaggacuuu

SEQ ID NO: 777034 - RNA, 22 nt, Human
auauacacagagcuuaugguga

SEQ ID NO: 777035 - RNA, 18 nt, Human
uggggucucucagguaag

SEQ ID NO: 777036 - RNA, 22 nt, Human
augaaaugugaaugcuuuucau

SEQ ID NO: 777037 - RNA, 21 nt, Human
ugacccuucuagcagaacaca

SEQ ID NO: 777038 - RNA, 22 nt, Human
ucacagaauuuuugcuuccagu

SEQ ID NO: 777039 - RNA, 22 nt, Human
acagugacguuuauuugagacg

SEQ ID NO: 777040 - RNA, 19 nt, Human
uggggaugcugaugaccaa

SEQ ID NO: 777041 - RNA, 22 nt, Human
agaggcaaugaaagcagucucu

SEQ ID NO: 777042 - RNA, 22 nt, Human
ucuuauuuuguuagaugcugua

SEQ ID NO: 777043 - RNA, 18 nt, Human
ucauuagggauugcaaag

SEQ ID NO: 777044 - RNA, 21 nt, Human
caguguggugaccagggucuc

SEQ ID NO: 777045 - RNA, 22 nt, Human
aauuuguuaaaagugagugaca

SEQ ID NO: 777046 - RNA, 22 nt, Human
gugggguagaucuuucucagga

SEQ ID NO: 777047 - RNA, 22 nt, Human
ugaccacuguagccacuuaaga

SEQ ID NO: 777048 - RNA, 22 nt, Human
uguuuaaugcauugaccuuggg

SEQ ID NO: 777049 - RNA, 22 nt, Human
uccuggggcucuuugaugugau

SEQ ID NO: 777050 - RNA, 22 nt, Human
auugauuucugcuuacucacug

SEQ ID NO: 777051 - RNA, 22 nt, Human
ugucaccaaguugaugaaugca

SEQ ID NO: 777052 - RNA, 22 nt, Human
auuagggcuggaugcaaggaaa

SEQ ID NO: 777053 - RNA, 22 nt, Human
ugucaucuacccguuaggcuuu

SEQ ID NO: 777054 - RNA, 22 nt, Human
cuggaagguaacaaggccauua

SEQ ID NO: 777055 - RNA, 22 nt, Human
caccagcuacucggguuuccug

SEQ ID NO: 777056 - RNA, 22 nt, Human
uuaggaggucuauggacauccu

SEQ ID NO: 777057 - RNA, 22 nt, Human
caguuugucuugauucagaaca

SEQ ID NO: 777058 - RNA, 22 nt, Human
uuagcauuucaguacacauguu

SEQ ID NO: 777059 - RNA, 22 nt, Human
caauugcuuuuccaagggcaga

SEQ ID NO: 777060 - RNA, 20 nt, Human
ucaggagccuaggacaugau

SEQ ID NO: 777061 - RNA, 22 nt, Human
ugcugcugauggaugccuggac

SEQ ID NO: 777062 - RNA, 22 nt, Human
ugcugaggagguggcugugcuu

SEQ ID NO: 777063 - RNA, 22 nt, Human
uagaugaagggguucagcaugg

SEQ ID NO: 777064 - RNA, 22 nt, Human
ugaggcucagugagcccugcag

SEQ ID NO: 777065 - RNA, 20 nt, Human
cagcaggcuauggggcaccc

SEQ ID NO: 777066 - RNA, 22 nt, Human
caggcaagauccagaggcugcu

SEQ ID NO: 777067 - RNA, 22 nt, Human
cacaggccaguaagacuguguu

SEQ ID NO: 777068 - RNA, 22 nt, Human
caggcaaggacucugguaauuu

SEQ ID NO: 777069 - RNA, 22 nt, Human
gccauggggagggcagcgccug

SEQ ID NO: 777070 - RNA, 22 nt, Human
aaaggcuuguuugaggacuggu

SEQ ID NO: 777071 - RNA, 19 nt, Human
aauucuguuucagcagauc

SEQ ID NO: 777072 - RNA, 22 nt, Human
guggacguuaggauuguguaga

SEQ ID NO: 777073 - RNA, 22 nt, Human
acguuaaacauuuagcauagua

SEQ ID NO: 777074 - RNA, 22 nt, Human
gcauucaggguucacggucaac

SEQ ID NO: 777075 - RNA, 22 nt, Human
acacucucagcuuuucaacuua

SEQ ID NO: 777076 - RNA, 22 nt, Human
aaaccugaaguacguuacauaa

SEQ ID NO: 777077 - RNA, 22 nt, Human
acauuguaguuguucugcagca

SEQ ID NO: 777078 - RNA, 19 nt, Human
ugaggccagcuggcauuuu

SEQ ID NO: 777079 - RNA, 22 nt, Human
uggcugugcggccucgggcaga

SEQ ID NO: 777080 - RNA, 22 nt, Human
uagccaggucacacuguguguu

SEQ ID NO: 777081 - RNA, 22 nt, Human
gacaaucagccauauccagggu

SEQ ID NO: 777082 - RNA, 22 nt, Human
ggccaugcuguugccugcuggu

SEQ ID NO: 777083 - RNA, 18 nt, Human
ccuguguguguugcaggc

SEQ ID NO: 777084 - RNA, 22 nt, Human
aggagccuggcuggcccacagg

SEQ ID NO: 777085 - RNA, 22 nt, Human
gcucaggacuggaggagcgggg

SEQ ID NO: 777086 - RNA, 22 nt, Human
guuccuuggaagaacuugaggu

SEQ ID NO: 777087 - RNA, 22 nt, Human
aguuuucugauguguagugaga

SEQ ID NO: 777088 - RNA, 22 nt, Human
agcauaaaggcacuagaaagag

SEQ ID NO: 777089 - RNA, 22 nt, Human
cacaguuauauguucacaagga

SEQ ID NO: 777090 - RNA, 22 nt, Human
auacagaacucucaguuguaua

SEQ ID NO: 777091 - RNA, 22 nt, Human
caguuuuaggacauguggaugu

SEQ ID NO: 777092 - RNA, 22 nt, Human
uucucucuuuuggguaggaggu

SEQ ID NO: 777093 - RNA, 22 nt, Human
gcugccuucuggaggaagugaa

SEQ ID NO: 777094 - RNA, 22 nt, Human
ugaaacuuauucaguuucuacc

SEQ ID NO: 777095 - RNA, 21 nt, Human
aaugaaguggcuauuuugagg

SEQ ID NO: 777096 - RNA, 22 nt, Human
cugaagagaaagggagcucuuc

SEQ ID NO: 777097 - RNA, 22 nt, Human
agcugugucauccuggaaaaug

SEQ ID NO: 777098 - RNA, 22 nt, Human
gagggcuggggcuuaggcuuag

SEQ ID NO: 777099 - RNA, 22 nt, Human
gauccagcuucuacacagagcu

SEQ ID NO: 777100 - RNA, 22 nt, Human
agcagcucaaagccugcaagga

SEQ ID NO: 777101 - RNA, 22 nt, Human
gaaggaggucugcauucuacag

SEQ ID NO: 777102 - RNA, 22 nt, Human
ugugcuuuucucugcuccugga

SEQ ID NO: 777103 - RNA, 22 nt, Human
ggccugagcucuggggaggcaa

SEQ ID NO: 777104 - RNA, 22 nt, Human
auauuucuugagcaccugguau

SEQ ID NO: 777105 - RNA, 22 nt, Human
ugagguggcuggaucucagccu

SEQ ID NO: 777106 - RNA, 22 nt, Human
agugucugcaaaaugaaagagc

SEQ ID NO: 777107 - RNA, 22 nt, Human
cuucagggugacgcaggcugca

SEQ ID NO: 777108 - RNA, 22 nt, Human
cacccugggcugggccuguuaa

SEQ ID NO: 777109 - RNA, 22 nt, Human
gcugggcuuguggccagcuggg

SEQ ID NO: 777110 - RNA, 22 nt, Human
ggcagguggaaguuggcagagc

SEQ ID NO: 777111 - RNA, 23 nt, Human
aucuccugagaacccacaguggu

SEQ ID NO: 777112 - RNA, 22 nt, Human
gcagcuuggggacaugaaaaga

SEQ ID NO: 777113 - RNA, 22 nt, Human
agagguauuagguaauucagua

SEQ ID NO: 777114 - RNA, 23 nt, Human
ugucauugugacuacagaaccag

SEQ ID NO: 777115 - RNA, 22 nt, Human
cacagcugccauggcugcacuu

SEQ ID NO: 777116 - RNA, 22 nt, Human
auccccacugcugcugguguag

SEQ ID NO: 777117 - RNA, 22 nt, Human
augcuucagugcuaccuucaaa

SEQ ID NO: 777118 - RNA, 22 nt, Human
cugccaggauucugugaacccc

SEQ ID NO: 777119 - RNA, 22 nt, Human
guacuuuagaguaaaauagacc

SEQ ID NO: 777120 - RNA, 22 nt, Human
cucuccaggagcucagagucua

SEQ ID NO: 777121 - RNA, 22 nt, Human
ucugcaggaucagagccagagg

SEQ ID NO: 777122 - RNA, 21 nt, Human
aaaaaugaaguuguucaggaa

SEQ ID NO: 777123 - RNA, 22 nt, Human
cuaagaaggaggaaaagugcca

SEQ ID NO: 777124 - RNA, 22 nt, Human
acaucagauuaugcuuugcuua

SEQ ID NO: 777125 - RNA, 22 nt, Human
agucucacuucuugagcuaugc

SEQ ID NO: 777126 - RNA, 22 nt, Human
aauucaaucuaagaaaugauca

SEQ ID NO: 777127 - RNA, 22 nt, Human
ccagagaggccaaggucguggu

SEQ ID NO: 777128 - RNA, 22 nt, Human
gugacucuuaccuacccagccu

SEQ ID NO: 777129 - RNA, 22 nt, Human
ccauggcagccaugggagccac

SEQ ID NO: 777130 - RNA, 22 nt, Human
gaggcagagucacaaagagucu

SEQ ID NO: 777131 - RNA, 17 nt, Human
uucuccucuguguccuu

SEQ ID NO: 777132 - RNA, 22 nt, Human
guauacauagaugaugaacaag

SEQ ID NO: 777133 - RNA, 22 nt, Human
uacagguagagucucuaguuua

SEQ ID NO: 777134 - RNA, 22 nt, Human
uuucaaauaccauaaaccuaau

SEQ ID NO: 777135 - RNA, 22 nt, Human
uguagaaguucuucaggagaau

SEQ ID NO: 777136 - RNA, 22 nt, Human
acaacaaucuacccuagcuucu

SEQ ID NO: 777137 - RNA, 22 nt, Human
acagauccugguuacagccauu

SEQ ID NO: 777138 - RNA, 22 nt, Human
uugagguaguucuauugugagu

SEQ ID NO: 777139 - RNA, 22 nt, Human
gccagagguucaacaacugucu

SEQ ID NO: 777140 - RNA, 22 nt, Human
gcuuagaaguacacaugccuuu

SEQ ID NO: 777141 - RNA, 22 nt, Human
gcugagagugugagaucagauu

SEQ ID NO: 777142 - RNA, 22 nt, Human
agauguggauccuaggguagaa

SEQ ID NO: 777143 - RNA, 23 nt, Human
aucugaaaagcauuugcaguuug

SEQ ID NO: 777144 - RNA, 22 nt, Human
ucaggagguccgcccgggaggg

SEQ ID NO: 777145 - RNA, 22 nt, Human
aguaccauuacucacuuauuuu

SEQ ID NO: 777146 - RNA, 22 nt, Human
agcuuuaaagcauauuucuaag

SEQ ID NO: 777147 - RNA, 22 nt, Human
acauucacuauguccaaacucu

SEQ ID NO: 777148 - RNA, 22 nt, Human
gcaggagagucugugccagguu

SEQ ID NO: 777149 - RNA, 22 nt, Human
accugcagcuaaagauguaggg

SEQ ID NO: 777150 - RNA, 22 nt, Human
uuucuucucuaaucucaaugau

SEQ ID NO: 777151 - RNA, 22 nt, Human
ucauguaaguauagaaagcagu

SEQ ID NO: 777152 - RNA, 22 nt, Human
cuggcacacaguaggcaccaau

SEQ ID NO: 777153 - RNA, 21 nt, Human
gcagcaguguucuagaauacu

SEQ ID NO: 777154 - RNA, 22 nt, Human
uccagcuggggccgaaguggau

SEQ ID NO: 777155 - RNA, 22 nt, Human
augugcagcuuuucuagagaag

SEQ ID NO: 777156 - RNA, 22 nt, Human
gacccuggcuggagcuggccug

SEQ ID NO: 777157 - RNA, 22 nt, Human
ccagcuccggugugcuuauuuc

SEQ ID NO: 777158 - RNA, 22 nt, Human
uggcaggaaccaggaggcucuc

SEQ ID NO: 777159 - RNA, 22 nt, Human
cagagacagaaaauggaucuag

SEQ ID NO: 777160 - RNA, 22 nt, Human
cauuucacaguaaagugauuuc

SEQ ID NO: 777161 - RNA, 22 nt, Human
gggggccagucaucucccaaga

SEQ ID NO: 777162 - RNA, 22 nt, Human
gagcucuguguagccugagggu

SEQ ID NO: 777163 - RNA, 22 nt, Human
uguagaugagucagggugcacc

SEQ ID NO: 777164 - RNA, 22 nt, Human
ucugcucuguacugcacuggcc

SEQ ID NO: 777165 - RNA, 22 nt, Human
ggcugccugaacuuuggggaaa

SEQ ID NO: 777166 - RNA, 22 nt, Human
auguuucauuuagauaucaggc

SEQ ID NO: 777167 - RNA, 22 nt, Human
auaagcauuucacagguguguu

SEQ ID NO: 777168 - RNA, 21 nt, Human
ucacuagugccuucugucauu

SEQ ID NO: 777169 - RNA, 21 nt, Human
guggccugauuaugaaugggu

SEQ ID NO: 777170 - RNA, 22 nt, Human
agcuuccugaugcaagagggcu

SEQ ID NO: 777171 - RNA, 16 nt, Human
ucacauacuuccuugc

SEQ ID NO: 777172 - RNA, 21 nt, Human
ucaaacaugaucugggucauc

SEQ ID NO: 777173 - RNA, 22 nt, Human
gaucauuggccuuucugcagug

SEQ ID NO: 777174 - RNA, 22 nt, Human
cagagccauuauggagacuugc

SEQ ID NO: 777175 - RNA, 22 nt, Human
ggcagcaagcagaaguucuaug

SEQ ID NO: 777176 - RNA, 22 nt, Human
acauuguauaaugauuaucaca

SEQ ID NO: 777177 - RNA, 22 nt, Human
cccaggcuccuacuguauucug

SEQ ID NO: 777178 - RNA, 22 nt, Human
gaaagguuucaucuacuuuuca

SEQ ID NO: 777179 - RNA, 22 nt, Human
cugaaggagguagagugacaua

SEQ ID NO: 777180 - RNA, 22 nt, Human
uuccagagucagccacugggag

SEQ ID NO: 777181 - RNA, 20 nt, Human
agcuuugguuaagccagugg

SEQ ID NO: 777182 - RNA, 22 nt, Human
uuccuggguugugcauuguaca

SEQ ID NO: 777183 - RNA, 22 nt, Human
ugcuggaggggccugaccagga

SEQ ID NO: 777184 - RNA, 22 nt, Human
uuauaugauugagcaucuuggu

SEQ ID NO: 777185 - RNA, 22 nt, Human
acuccugggugcugaccagcgu

SEQ ID NO: 777186 - RNA, 22 nt, Human
ugacuuuggcuuaagcagcagu

SEQ ID NO: 777187 - RNA, 22 nt, Human
ccuggccugugaaucugagagc

SEQ ID NO: 777188 - RNA, 22 nt, Human
cuuacaacuuguaugugauugu

SEQ ID NO: 777189 - RNA, 22 nt, Human
ugcuguuaucacauuuuguaaa

SEQ ID NO: 777190 - RNA, 22 nt, Human
acagcuuuaucucagggaucag

SEQ ID NO: 777191 - RNA, 22 nt, Human
uuauugcugcuaacauuuuaug

SEQ ID NO: 777192 - RNA, 22 nt, Human
ugucauuuaaagcuuuccagau

SEQ ID NO: 777193 - RNA, 22 nt, Human
cuuuacagccuccagaaggaac

SEQ ID NO: 777194 - RNA, 19 nt, Human
uucugcuguuccuaggcug

SEQ ID NO: 777195 - RNA, 22 nt, Human
auucuccagcucacuguccaua

SEQ ID NO: 777196 - RNA, 22 nt, Human
cugugacagagcuugagugaga

SEQ ID NO: 777197 - RNA, 22 nt, Human
uauugacagugacuauugguag

SEQ ID NO: 777198 - RNA, 22 nt, Human
uucaugaacgaacauauguaua

SEQ ID NO: 777199 - RNA, 22 nt, Human
aggcaggcucaaugcccagucu

SEQ ID NO: 777200 - RNA, 22 nt, Human
gcagaugcugagauuuauuucu

SEQ ID NO: 777201 - RNA, 22 nt, Human
gcacccagugggaugcuuagca

SEQ ID NO: 777202 - RNA, 22 nt, Human
cuccucuggaaauuccucugcc

SEQ ID NO: 777203 - RNA, 22 nt, Human
ugagacagucccaugaucugca

SEQ ID NO: 777204 - RNA, 22 nt, Human
uggcuacaguggcauaucaaau

SEQ ID NO: 777205 - RNA, 22 nt, Human
gguguugggcucacugguccuu

SEQ ID NO: 777206 - RNA, 22 nt, Human
uguggggcucccuggcagccug

SEQ ID NO: 777207 - RNA, 23 nt, Human
uggaaacuuaagggggagauguc

SEQ ID NO: 777208 - RNA, 22 nt, Human
uuggaagauucugugucuggug

SEQ ID NO: 777209 - RNA, 22 nt, Human
acacugugugacuucugagacu

SEQ ID NO: 777210 - RNA, 22 nt, Human
uaucacacuagccuauagugga

SEQ ID NO: 777211 - RNA, 22 nt, Human
gugcugucauuagcaucuagag

SEQ ID NO: 777212 - RNA, 17 nt, Human
aaaauucuguaaagagg

SEQ ID NO: 777213 - RNA, 22 nt, Human
cuguguccucccgcugcaccca

SEQ ID NO: 777214 - RNA, 22 nt, Human
gugcccacgaggccaggcuggu

SEQ ID NO: 777215 - RNA, 22 nt, Human
uugaaucauuacaauagauaag

SEQ ID NO: 777216 - RNA, 22 nt, Human
cuggcucaugugaugagggcaa

SEQ ID NO: 777217 - RNA, 22 nt, Human
uuggaaggaagaaccgcgguag

SEQ ID NO: 777218 - RNA, 22 nt, Human
uacauucauggugacuuguaug

SEQ ID NO: 777219 - RNA, 19 nt, Human
aagggcugggcaccucacu

SEQ ID NO: 777220 - RNA, 22 nt, Human
cagaggcucuuccucacugccc

SEQ ID NO: 777221 - RNA, 23 nt, Human
uccagggcuggccagaccucggu

SEQ ID NO: 777222 - RNA, 22 nt, Human
gugauggguaacuguuuaggga

SEQ ID NO: 777223 - RNA, 22 nt, Human
caggccuccuaugagcacuagc

SEQ ID NO: 777224 - RNA, 22 nt, Human
aagaguuucugauucaguaggu

SEQ ID NO: 777225 - RNA, 22 nt, Human
uucucuggccauagcuggcuag

SEQ ID NO: 777226 - RNA, 22 nt, Human
gcccaucuucuagcagcuguua

SEQ ID NO: 777227 - RNA, 22 nt, Human
aacacauugccagagaucagca

SEQ ID NO: 777228 - RNA, 22 nt, Human
uccucacagcaugaccaggcag

SEQ ID NO: 777229 - RNA, 22 nt, Human
aaacaugcuggauuuagaauau

SEQ ID NO: 777230 - RNA, 19 nt, Human
cccaggggacccagcccua

SEQ ID NO: 777231 - RNA, 22 nt, Human
ggagugucagaaacaguguccu

SEQ ID NO: 777232 - RNA, 20 nt, Human
ugcauaguugcugcaguuga

SEQ ID NO: 777233 - RNA, 22 nt, Human
gcugucaguuuuacccacagac

SEQ ID NO: 777234 - RNA, 22 nt, Human
gggucuccugagagaagaugcu

SEQ ID NO: 777235 - RNA, 22 nt, Human
aauggcuucugaagcacacuuu

SEQ ID NO: 777236 - RNA, 22 nt, Human
uuucagagaugcagaauucagg

SEQ ID NO: 777237 - RNA, 22 nt, Human
acauuuauuacucagguuguug

SEQ ID NO: 777238 - RNA, 22 nt, Human
uuccuucuauucagcuccaaga

SEQ ID NO: 777239 - RNA, 22 nt, Human
uggcagugggaagcuggaaguc

SEQ ID NO: 777240 - RNA, 22 nt, Human
auuuacagugugccuacuauau

SEQ ID NO: 777241 - RNA, 22 nt, Human
uuguaugaccacaaucugacgu

SEQ ID NO: 777242 - RNA, 22 nt, Human
ucuucauguuaguuggguuuuc

SEQ ID NO: 777243 - RNA, 22 nt, Human
aaguguauuuuuguacuaacau

SEQ ID NO: 777244 - RNA, 22 nt, Human
auucaccuguuaguaaaaaucu

SEQ ID NO: 777245 - RNA, 22 nt, Human
uccagccccuuuuacucauuca

SEQ ID NO: 777246 - RNA, 22 nt, Human
gugguccugccagccaggucca

SEQ ID NO: 777247 - RNA, 22 nt, Human
cucugguucagggcucccuggc

SEQ ID NO: 777248 - RNA, 22 nt, Human
gcagggucugaggccacagagg

SEQ ID NO: 777249 - RNA, 22 nt, Human
cucugggcacuguauggguucu

SEQ ID NO: 777250 - RNA, 22 nt, Human
caguggcuucuuccuagagcca

SEQ ID NO: 777251 - RNA, 22 nt, Human
agucccagugacuuggccagaa

SEQ ID NO: 777252 - RNA, 22 nt, Human
aucauccauggcugaucauaaa

SEQ ID NO: 777253 - RNA, 22 nt, Human
cagagcagaagguccaagccug

SEQ ID NO: 777254 - RNA, 22 nt, Human
ugcacacaaaugugaacgugcc

SEQ ID NO: 777255 - RNA, 22 nt, Human
aagcaccugcaccggucgccuu

SEQ ID NO: 777256 - RNA, 22 nt, Human
acagcuggaggccccauugucc

SEQ ID NO: 777257 - RNA, 22 nt, Human
uuuguguuguacuucugugcau

SEQ ID NO: 777258 - RNA, 22 nt, Human
auacagauguugaauguuauau

SEQ ID NO: 777259 - RNA, 22 nt, Human
uuugcuauuuuucugugcagcu

SEQ ID NO: 777260 - RNA, 22 nt, Human
acacuucaccccugcucccagu

SEQ ID NO: 777261 - RNA, 22 nt, Human
gccuacuuaguagcugggauua

SEQ ID NO: 777262 - RNA, 22 nt, Human
uugagcaaaucagauuguaauu

SEQ ID NO: 777263 - RNA, 22 nt, Human
cccugaggggcuuacuuugccc

SEQ ID NO: 777264 - RNA, 22 nt, Human
aguugacaauaaauuuaauugg

SEQ ID NO: 777265 - RNA, 22 nt, Human
uugagcaaaggaguaaaaugca

SEQ ID NO: 777266 - RNA, 22 nt, Human
ucaucauaauauggaaucuugu

SEQ ID NO: 777267 - RNA, 20 nt, Human
agcaaaaugcaagauuuuca

SEQ ID NO: 777268 - RNA, 22 nt, Human
agauaauuauuuacuucaaagu

SEQ ID NO: 777269 - RNA, 22 nt, Human
gcacagggcaacaggucuguua

SEQ ID NO: 777270 - RNA, 22 nt, Human
ugcccucaagcaacagagagga

SEQ ID NO: 777271 - RNA, 22 nt, Human
ugaggggcauguguuuacacau

SEQ ID NO: 777272 - RNA, 22 nt, Human
ugucucugaggugagggucagc

SEQ ID NO: 777273 - RNA, 22 nt, Human
ucagaaagacgaaacagauggg

SEQ ID NO: 777274 - RNA, 22 nt, Human
ucucaucuuuaaaugaaaauuu

SEQ ID NO: 777275 - RNA, 22 nt, Human
aggcuccaccagucaggugcau

SEQ ID NO: 777276 - RNA, 22 nt, Human
ugugaguaauaaagucauuuuu

SEQ ID NO: 777277 - RNA, 22 nt, Human
aaguccagacuccuuugcgugg

SEQ ID NO: 777278 - RNA, 20 nt, Human
ccagcacccucucagcugaa

SEQ ID NO: 777279 - RNA, 22 nt, Human
auaaaucuauuggacaugugug

SEQ ID NO: 777280 - RNA, 22 nt, Human
ugguccaagugagguggccucu

SEQ ID NO: 777281 - RNA, 22 nt, Human
gggagggaggugaugcuuggcu

SEQ ID NO: 777282 - RNA, 22 nt, Human
acauuccagguuggugcagggu

SEQ ID NO: 777283 - RNA, 22 nt, Human
ucuucaguauuuggauaacauu

SEQ ID NO: 777284 - RNA, 22 nt, Human
gcacugaaauuauaugcauuug

SEQ ID NO: 777285 - RNA, 22 nt, Human
uucugaaauuucaacuuuacua

SEQ ID NO: 777286 - RNA, 22 nt, Human
caggauggagagugagggguca

SEQ ID NO: 777287 - RNA, 22 nt, Human
cugggccaagaaguuguguaug

SEQ ID NO: 777288 - RNA, 22 nt, Human
auacaccaccuuggaucuuuca

SEQ ID NO: 777289 - RNA, 22 nt, Human
gaggggcugcccuggugucagg

SEQ ID NO: 777290 - RNA, 22 nt, Human
ucuggccuauuucugucagauc

SEQ ID NO: 777291 - RNA, 22 nt, Human
acacuucaugcauucuucacuc

SEQ ID NO: 777292 - RNA, 22 nt, Human
ccaggucuuugacuaauaugcu

SEQ ID NO: 777293 - RNA, 22 nt, Human
gccacagggcgagcggaggcca

SEQ ID NO: 777294 - RNA, 22 nt, Human
gggagcuggaguuguguugccu

SEQ ID NO: 777295 - RNA, 22 nt, Human
gggcugugggacccggcacuuu

SEQ ID NO: 777296 - RNA, 22 nt, Human
agguuuaugccuuggagcuggg

SEQ ID NO: 777297 - RNA, 22 nt, Human
ucuuugcaggagcccuuugaac

SEQ ID NO: 777298 - RNA, 22 nt, Human
auccuguuuuagauaagcuuau

SEQ ID NO: 777299 - RNA, 22 nt, Human
cuggacagaaguggcugggcag

SEQ ID NO: 777300 - RNA, 22 nt, Human
aaauuucaagcaaaguagcuau

SEQ ID NO: 777301 - RNA, 22 nt, Human
auacuugagguagcaacuuaag

SEQ ID NO: 777302 - RNA, 22 nt, Human
ucagagaucuucaggaugggac

SEQ ID NO: 777303 - RNA, 22 nt, Human
aucagaaguugugcaugcaugg

SEQ ID NO: 777304 - RNA, 22 nt, Human
ccuaggcccuaggcuuccauca

SEQ ID NO: 777305 - RNA, 22 nt, Human
agccccuugcacuuccccacgc

SEQ ID NO: 777306 - RNA, 21 nt, Human
acaugucucuaaucucaguga

SEQ ID NO: 777307 - RNA, 22 nt, Human
ucuucacauuuuaagaaguucu

SEQ ID NO: 777308 - RNA, 22 nt, Human
uacaucugauuuaccuacugaa

SEQ ID NO: 777309 - RNA, 22 nt, Human
cucuggaguucucaugaggaac

SEQ ID NO: 777310 - RNA, 22 nt, Human
ggcagagcgcaugcgucgcaga

SEQ ID NO: 777311 - RNA, 22 nt, Human
aaacaucuacuguaggcuggag

SEQ ID NO: 777312 - RNA, 22 nt, Human
uccaggaccugacugggccugc

SEQ ID NO: 777313 - RNA, 22 nt, Human
gugcaggauguugggaaucagg

SEQ ID NO: 777314 - RNA, 22 nt, Human
ugaggauggaaugcugugcaag

SEQ ID NO: 777315 - RNA, 22 nt, Human
agccugagcugccugccgccuc

SEQ ID NO: 777316 - RNA, 22 nt, Human
cuuauacacgaacacaaggugu

SEQ ID NO: 777317 - RNA, 22 nt, Human
gaaaucaucugaguaauaaucu

SEQ ID NO: 777318 - RNA, 22 nt, Human
gaguagaaaguaaaguacgaau

SEQ ID NO: 777319 - RNA, 22 nt, Human
uauuaugauucggacguggcag

SEQ ID NO: 777320 - RNA, 22 nt, Human
ucacagaagggaaagaugccaa

SEQ ID NO: 777321 - RNA, 22 nt, Human
caggaugcacuaggaaccaggg

SEQ ID NO: 777322 - RNA, 22 nt, Human
ugugaauguauaguuuguauau

SEQ ID NO: 777323 - RNA, 22 nt, Human
aaggcuuugugggcugcaggca

SEQ ID NO: 777324 - RNA, 22 nt, Human
uucaguuucagucuugcaaaaa

SEQ ID NO: 777325 - RNA, 22 nt, Human
augauguaauggaaagaacaga

SEQ ID NO: 777326 - RNA, 22 nt, Human
caggaggcuuugggauccaagu

SEQ ID NO: 777327 - RNA, 17 nt, Human
uuucuagauuauccucu

SEQ ID NO: 777328 - RNA, 22 nt, Human
gcaaggcagcauccuuuugagg

SEQ ID NO: 777329 - RNA, 22 nt, Human
uuaguguguccaguucugaaaa

SEQ ID NO: 777330 - RNA, 22 nt, Human
gaaacagcuuuaagugauacug

SEQ ID NO: 777331 - RNA, 22 nt, Human
agccaggaaccagcuacagucu

SEQ ID NO: 777332 - RNA, 22 nt, Human
ccuccaaggugagagaggaugg

SEQ ID NO: 777333 - RNA, 22 nt, Human
cucuguggcuacacaaaccucc

SEQ ID NO: 777334 - RNA, 22 nt, Human
ugcuauuugugagugucuucgu

SEQ ID NO: 777335 - RNA, 22 nt, Human
uacagagacccacaagagacug

SEQ ID NO: 777336 - RNA, 22 nt, Human
aggucugagcaggggagaacag

SEQ ID NO: 777337 - RNA, 22 nt, Human
uccucucugcacuggcccugcc

SEQ ID NO: 777338 - RNA, 22 nt, Human
aaaccaucagauaauucauacu

SEQ ID NO: 777339 - RNA, 22 nt, Human
uugauuacuauguguugaaagc

SEQ ID NO: 777340 - RNA, 22 nt, Human
caggaggagcuggccgccucau

SEQ ID NO: 777341 - RNA, 22 nt, Human
uggcauguuuaauguacuguau

SEQ ID NO: 777342 - RNA, 22 nt, Human
uauuucuuucagguauguguug

SEQ ID NO: 777343 - RNA, 22 nt, Human
agcaauauaaauguuggguaga

SEQ ID NO: 777344 - RNA, 22 nt, Human
uuaaggaaugugcaguuuauau

SEQ ID NO: 777345 - RNA, 22 nt, Human
gacaaaggaucagagguuggga

SEQ ID NO: 777346 - RNA, 22 nt, Human
aaauaugaaugauaagaguuau

SEQ ID NO: 777347 - RNA, 22 nt, Human
caggaaugaaaggucaggguug

SEQ ID NO: 777348 - RNA, 22 nt, Human
ucuauuucgcauauaaguuuug

SEQ ID NO: 777349 - RNA, 22 nt, Human
agccagaggucaugagcacagg

SEQ ID NO: 777350 - RNA, 22 nt, Human
gaaggcuugcagcucuguggca

SEQ ID NO: 777351 - RNA, 22 nt, Human
augcuuucuucuuuccuguaag

SEQ ID NO: 777352 - RNA, 22 nt, Human
uugaagacaagggcagggguuc

SEQ ID NO: 777353 - RNA, 22 nt, Human
ccuggccuccuggccuucucau

SEQ ID NO: 777354 - RNA, 17 nt, Human
aggaggaucagagagua

SEQ ID NO: 777355 - RNA, 22 nt, Human
gagcaggaaggccagaaggguc

SEQ ID NO: 777356 - RNA, 22 nt, Human
ucuccagguaaauggcauccug

SEQ ID NO: 777357 - RNA, 22 nt, Human
uucuuacuaguauguuucagca

SEQ ID NO: 777358 - RNA, 22 nt, Human
ucuguuuaugcauauuuaaaac

SEQ ID NO: 777359 - RNA, 22 nt, Human
agcagcagugacagccgaaagc

SEQ ID NO: 777360 - RNA, 22 nt, Human
uuuuaagaggaggcuguuugaa

SEQ ID NO: 777361 - RNA, 22 nt, Human
gaggagacaguggagccgcuac

SEQ ID NO: 777362 - RNA, 22 nt, Human
cagcuccagccgacuguaagaa

SEQ ID NO: 777363 - RNA, 22 nt, Human
ucagacaugggauaugaagcuc

SEQ ID NO: 777364 - RNA, 22 nt, Human
aaguuugcauagauuaagcauu

SEQ ID NO: 777365 - RNA, 22 nt, Human
aggaggugacagccugcaucug

SEQ ID NO: 777366 - RNA, 22 nt, Human
gcucccaggcauggagguaauu

SEQ ID NO: 777367 - RNA, 22 nt, Human
gguaacaacccuacaaauccac

SEQ ID NO: 777368 - RNA, 22 nt, Human
acuuaaagaggcuacuuuuggu

SEQ ID NO: 777369 - RNA, 22 nt, Human
auucuacaaucauguagauccu

SEQ ID NO: 777370 - RNA, 22 nt, Human
gguggaaggcagcagucucagg

SEQ ID NO: 777371 - RNA, 22 nt, Human
uugaaaaccgugggaggcugaa

SEQ ID NO: 777372 - RNA, 22 nt, Human
gacaucugaggcccucagagcc

SEQ ID NO: 777373 - RNA, 22 nt, Human
aggcagaagccagccagggucc

SEQ ID NO: 777374 - RNA, 15 nt, Human
uacauucauuuccac

SEQ ID NO: 777375 - RNA, 22 nt, Human
ucugcucaauacugcucaugaa

SEQ ID NO: 777376 - RNA, 22 nt, Human
cugccucuauucacugaggcag

SEQ ID NO: 777377 - RNA, 22 nt, Human
agcucugauccauaauuuauac

SEQ ID NO: 777378 - RNA, 22 nt, Human
uuucuacagcuggugcaacuuu

SEQ ID NO: 777379 - RNA, 22 nt, Human
agucccuggauugucucuguca

SEQ ID NO: 777380 - RNA, 22 nt, Human
acuaguauuagacuaaaaguca

SEQ ID NO: 777381 - RNA, 22 nt, Human
guaaaugugcuucuuuuaacuu

SEQ ID NO: 777382 - RNA, 22 nt, Human
auuguuaaaaagguggaaaugc

SEQ ID NO: 777383 - RNA, 22 nt, Human
gcagcaggcuuuucauaccuug

SEQ ID NO: 777384 - RNA, 19 nt, Human
ucaugcacuuugauguaac

SEQ ID NO: 777385 - RNA, 22 nt, Human
agagaauuggagcagugacagg

SEQ ID NO: 777386 - RNA, 22 nt, Human
gagugcaguaucuucugugucc

SEQ ID NO: 777387 - RNA, 22 nt, Human
ugaaugaguuuggcugcuguuc

SEQ ID NO: 777388 - RNA, 19 nt, Human
ggcucagggcgcugccgcc

SEQ ID NO: 777389 - RNA, 23 nt, Human
uguaaaagcauuugucagccugg

SEQ ID NO: 777390 - RNA, 22 nt, Human
auuucccaggacuagaaauaua

SEQ ID NO: 777391 - RNA, 22 nt, Human
aaccuagaaguuagaguaucau

SEQ ID NO: 777392 - RNA, 22 nt, Human
ugggccuguugggguugaguua

SEQ ID NO: 777393 - RNA, 22 nt, Human
uaugcacaguuacaagaauauc

SEQ ID NO: 777394 - RNA, 22 nt, Human
uuggcuucuguuuuggcucugu

SEQ ID NO: 777395 - RNA, 22 nt, Human
ucugggcagaagcagugcaaag

SEQ ID NO: 777396 - RNA, 21 nt, Human
gggcuccagagauguagcuuc

SEQ ID NO: 777397 - RNA, 19 nt, Human
uggcauugguccagauaaa

SEQ ID NO: 777398 - RNA, 22 nt, Human
cugggagucuggaauuuuggua

SEQ ID NO: 777399 - RNA, 22 nt, Human
guuuauugauaaaagcuggaca

SEQ ID NO: 777400 - RNA, 22 nt, Human
acuugaaaccuuggcaaacaau

SEQ ID NO: 777401 - RNA, 22 nt, Human
ggugcagaguccacagaaagcu

SEQ ID NO: 777402 - RNA, 22 nt, Human
agaugcuuacuaugguuguaug

SEQ ID NO: 777403 - RNA, 21 nt, Human
acaugggaccugcgaaaggaa

SEQ ID NO: 777404 - RNA, 22 nt, Human
uccugggcuuaguggcuagguc

SEQ ID NO: 777405 - RNA, 22 nt, Human
ugggcucuuccuauaguuuaua

SEQ ID NO: 777406 - RNA, 22 nt, Human
ggguggccuucauagcucaggg

SEQ ID NO: 777407 - RNA, 22 nt, Human
guucuccuuguggcugcagcag

SEQ ID NO: 777408 - RNA, 22 nt, Human
gauuuucauuugcacucuagaa

SEQ ID NO: 777409 - RNA, 22 nt, Human
uguucuuagcaggagcaucuau

SEQ ID NO: 777410 - RNA, 22 nt, Human
uaaguugauuauaaccacugga

SEQ ID NO: 777411 - RNA, 22 nt, Human
aauggcuucuuuuugguauaau

SEQ ID NO: 777412 - RNA, 22 nt, Human
aggugcuggaguagaagaaaaa

SEQ ID NO: 777413 - RNA, 22 nt, Human
cugugauguuagcucuguguua

SEQ ID NO: 777414 - RNA, 22 nt, Human
uccuugaaaaucuugguuuaga

SEQ ID NO: 777415 - RNA, 22 nt, Human
ugcaucuuacguuuugaaaggg

SEQ ID NO: 777416 - RNA, 22 nt, Human
ggaggcggagcuugcagugagc

SEQ ID NO: 777417 - RNA, 22 nt, Human
gaucauuucaguccaguaaaua

SEQ ID NO: 777418 - RNA, 23 nt, Human
agcccagcagagaaccuaggucc

SEQ ID NO: 777419 - RNA, 22 nt, Human
uacaaacuuguuuuaaguaagu

SEQ ID NO: 777420 - RNA, 22 nt, Human
gaaggaagucauuagugcagac

SEQ ID NO: 777421 - RNA, 22 nt, Human
caggagugcagguggugaggca

SEQ ID NO: 777422 - RNA, 22 nt, Human
accagccugucugagucguggg

SEQ ID NO: 777423 - RNA, 22 nt, Human
cuuccuuuccccaaucauaucg

SEQ ID NO: 777424 - RNA, 22 nt, Human
agcuguguuaggauguuaauaa

SEQ ID NO: 777425 - RNA, 22 nt, Human
gucuaugauauuuuguuauagc

SEQ ID NO: 777426 - RNA, 22 nt, Human
cucuucuguaccucggccucca

SEQ ID NO: 777427 - RNA, 22 nt, Human
cuauuuaucuauuucugaauga

SEQ ID NO: 777428 - RNA, 22 nt, Human
uacucacauucuguuucuugcu

SEQ ID NO: 777429 - RNA, 22 nt, Human
aaauuccaguucuuuuaccugc

SEQ ID NO: 777430 - RNA, 22 nt, Human
ccaggcucagcuauuaagaaac

SEQ ID NO: 777431 - RNA, 22 nt, Human
uuuuaugauugagcuggcuaca

SEQ ID NO: 777432 - RNA, 22 nt, Human
agcccugauuaaccuuggcuuu

SEQ ID NO: 777433 - RNA, 22 nt, Human
aaacuucaagauucaagccugg

SEQ ID NO: 777434 - RNA, 22 nt, Human
gccagugcuuguggagcuggca

SEQ ID NO: 777435 - RNA, 22 nt, Human
ccucccagaugugcccaaugga

SEQ ID NO: 777436 - RNA, 22 nt, Human
gaggcugcccacaccugcgccg

SEQ ID NO: 777437 - RNA, 22 nt, Human
uaagcaguuuuucuuguauuaa

SEQ ID NO: 777438 - RNA, 22 nt, Human
acaugcuaaaucugagaugcuu

SEQ ID NO: 777439 - RNA, 22 nt, Human
uagcagagcugcaauauagacc

SEQ ID NO: 777440 - RNA, 22 nt, Human
ugcuggggcagaagagccaaga

SEQ ID NO: 777441 - RNA, 20 nt, Human
gggcaguggcgcuaucucag

SEQ ID NO: 777442 - RNA, 22 nt, Human
augugucuucuguggguuugaa

SEQ ID NO: 777443 - RNA, 22 nt, Human
aaggucaacacugauuuuaguc

SEQ ID NO: 777444 - RNA, 22 nt, Human
ugcaggugguccuuccucugcu

SEQ ID NO: 777445 - RNA, 22 nt, Human
guggcagugaggcaggagcagu

SEQ ID NO: 777446 - RNA, 22 nt, Human
cugggccagucucggccgcucu

SEQ ID NO: 777447 - RNA, 22 nt, Human
gcugccugugcgggucgcuagg

SEQ ID NO: 777448 - RNA, 22 nt, Human
ggccucaggguugggcccauua

SEQ ID NO: 777449 - RNA, 22 nt, Human
cagagcuggacuuaaauauauu

SEQ ID NO: 777450 - RNA, 22 nt, Human
cgcaggugaaagaggcugggca

SEQ ID NO: 777451 - RNA, 22 nt, Human
aucaggaucugcaucauaagaa

SEQ ID NO: 777452 - RNA, 22 nt, Human
guggcaguggagacccgagccu

SEQ ID NO: 777453 - RNA, 18 nt, Human
ugcugggguagaauccac

SEQ ID NO: 777454 - RNA, 22 nt, Human
uaccugaaguaacaaugaauau

SEQ ID NO: 777455 - RNA, 22 nt, Human
ggcagccuccagggcacuggug

SEQ ID NO: 777456 - RNA, 22 nt, Human
aaagcuuuucaguauguucaug

SEQ ID NO: 777457 - RNA, 22 nt, Human
uaaagucaucuuuaaacaugcc

SEQ ID NO: 777458 - RNA, 22 nt, Human
cacaugaagaccuaauuggauu

SEQ ID NO: 777459 - RNA, 22 nt, Human
uuugcugcuguauauggagccc

SEQ ID NO: 777460 - RNA, 22 nt, Human
uucuuuguuguacuuuccuaca

SEQ ID NO: 777461 - RNA, 22 nt, Human
cucaggcccacagcagacccac

SEQ ID NO: 777462 - RNA, 22 nt, Human
gauuuuauagucaggaaaaaga

SEQ ID NO: 777463 - RNA, 22 nt, Human
gcugagguaggagguugcagug

SEQ ID NO: 777464 - RNA, 22 nt, Human
aaaaccaaguuuuccuuagucu

SEQ ID NO: 777465 - RNA, 22 nt, Human
gugcaggaggaugacaacugca

SEQ ID NO: 777466 - RNA, 22 nt, Human
cacagcuucaguuucugacuug

SEQ ID NO: 777467 - RNA, 22 nt, Human
caguuucugggcguucacaggu

SEQ ID NO: 777468 - RNA, 22 nt, Human
uggcauggaccuuggaagaauu

SEQ ID NO: 777469 - RNA, 22 nt, Human
ucugaggcaaacagaggagugu

SEQ ID NO: 777470 - RNA, 22 nt, Human
ucaagauguccagugccuauaa

SEQ ID NO: 777471 - RNA, 22 nt, Human
uacaaacuguuauuauuauugu

SEQ ID NO: 777472 - RNA, 18 nt, Human
auuguucugugacauguc

SEQ ID NO: 777473 - RNA, 22 nt, Human
agggcagcagcuccuccuagcu

SEQ ID NO: 777474 - RNA, 22 nt, Human
auuaguaaaacauuguauaugu

SEQ ID NO: 777475 - RNA, 22 nt, Human
aggaaggcugaucacugcuugu

SEQ ID NO: 777476 - RNA, 22 nt, Human
gcugcccaaugguagugucuuu

SEQ ID NO: 777477 - RNA, 22 nt, Human
aaguuuaguuaaguaaacucuu

SEQ ID NO: 777478 - RNA, 19 nt, Human
ccuggguccacucagacua

SEQ ID NO: 777479 - RNA, 22 nt, Human
agaggccaucugcucugugggg

SEQ ID NO: 777480 - RNA, 16 nt, Human
gagcagccugggccuu

SEQ ID NO: 777481 - RNA, 22 nt, Human
aaaccggguccagaucuucagg

SEQ ID NO: 777482 - RNA, 22 nt, Human
gcucuggcuuggggcacucguc

SEQ ID NO: 777483 - RNA, 22 nt, Human
uuugauccguugcuggugagga

SEQ ID NO: 777484 - RNA, 22 nt, Human
ucagagugaggcccagcaaucu

SEQ ID NO: 777485 - RNA, 22 nt, Human
gaucauuuugaugcccuuuuag

SEQ ID NO: 777486 - RNA, 21 nt, Human
uagaggcaggagggacugcag

SEQ ID NO: 777487 - RNA, 22 nt, Human
ggcuucgcagcucggcagccgc

SEQ ID NO: 777488 - RNA, 22 nt, Human
cuacagaggacacaaagaucuu

SEQ ID NO: 777489 - RNA, 22 nt, Human
ugagggaguuggguguauagga

SEQ ID NO: 777490 - RNA, 22 nt, Human
ugcaggcugcagucucaggugg

SEQ ID NO: 777491 - RNA, 22 nt, Human
agucaaagcuacaggcauuuga

SEQ ID NO: 777492 - RNA, 22 nt, Human
ucucccaagccuggcaggggca

SEQ ID NO: 777493 - RNA, 22 nt, Human
ggcucuggcaaggggaggcuac

SEQ ID NO: 777494 - RNA, 22 nt, Human
ugaaagauaaguuauuauguac

SEQ ID NO: 777495 - RNA, 22 nt, Human
uuguuaaaacuccauugguuug

SEQ ID NO: 777496 - RNA, 22 nt, Human
gcccuggauggcaggagccauc

SEQ ID NO: 777497 - RNA, 22 nt, Human
uuuggcaagugggaaauuagua

SEQ ID NO: 777498 - RNA, 22 nt, Human
uuugaaauguaucaguauaggu

SEQ ID NO: 777499 - RNA, 22 nt, Human
acaacuuugacccuuguucuua

SEQ ID NO: 777500 - RNA, 22 nt, Human
acacuggguaacauaucuguua

SEQ ID NO: 777501 - RNA, 22 nt, Human
uguguauaaacaagagucugug

SEQ ID NO: 777502 - RNA, 22 nt, Human
uuuacucuugcuacacaacugu

SEQ ID NO: 777503 - RNA, 22 nt, Human
agaggccaugcuagaggccugg

SEQ ID NO: 777504 - RNA, 22 nt, Human
ugaaaucaaugucuucugucuc

SEQ ID NO: 777505 - RNA, 22 nt, Human
cugcaggguucggagaguuccc

SEQ ID NO: 777506 - RNA, 22 nt, Human
gccagacacuccccugggcagg

SEQ ID NO: 777507 - RNA, 22 nt, Human
guuuuucuaggaccaugugauu

SEQ ID NO: 777508 - RNA, 22 nt, Human
cugaucuguccuccucagagcc

SEQ ID NO: 777509 - RNA, 23 nt, Human
gcugucgccagagccccaccuac

SEQ ID NO: 777510 - RNA, 22 nt, Human
auggaacagauuaaagugaggg

SEQ ID NO: 777511 - RNA, 22 nt, Human
ugccaggcugucaauucaccca

SEQ ID NO: 777512 - RNA, 22 nt, Human
ugguuuuauuuauguugaguca

SEQ ID NO: 777513 - RNA, 22 nt, Human
uguucuuuucucuaaacugaua

SEQ ID NO: 777514 - RNA, 22 nt, Human
ucucuggguaugguaacguugg

SEQ ID NO: 777515 - RNA, 22 nt, Human
cagguuccaguugcagggacuu

SEQ ID NO: 777516 - RNA, 19 nt, Human
auccaggucauguaguucu

SEQ ID NO: 777517 - RNA, 19 nt, Human
uagaagcacuaggcaaacu

SEQ ID NO: 777518 - RNA, 22 nt, Human
ggagagagaugccgccuugcuc

SEQ ID NO: 777519 - RNA, 22 nt, Human
uuacagagccucauuuuagaga

SEQ ID NO: 777520 - RNA, 22 nt, Human
ugucuucuucauaaggagagug

SEQ ID NO: 777521 - RNA, 22 nt, Human
cuugcucauuaaguagcucaca

SEQ ID NO: 777522 - RNA, 22 nt, Human
uuuauuaagaugcgaaugcuga

SEQ ID NO: 777523 - RNA, 22 nt, Human
cucugggcaaguaugauagaaa

SEQ ID NO: 777524 - RNA, 22 nt, Human
caaggcagugggcuaggaaccu

SEQ ID NO: 777525 - RNA, 19 nt, Human
gcagguagagacagcagcc

SEQ ID NO: 777526 - RNA, 22 nt, Human
cauaguaaauaaugcagaugau

SEQ ID NO: 777527 - RNA, 22 nt, Human
cauuagaagaacaguuauauua

SEQ ID NO: 777528 - RNA, 22 nt, Human
ucuggucccugcucacuucuug

SEQ ID NO: 777529 - RNA, 22 nt, Human
gcugugcagucuuuggugugcc

SEQ ID NO: 777530 - RNA, 22 nt, Human
cuggcucugggccucagacacu

SEQ ID NO: 777531 - RNA, 22 nt, Human
acaagguugauucuggcaucug

SEQ ID NO: 777532 - RNA, 22 nt, Human
acagcagaccccagugccaugg

SEQ ID NO: 777533 - RNA, 22 nt, Human
ucagggaaaagucacacugggu

SEQ ID NO: 777534 - RNA, 22 nt, Human
aaggcuuucagcuaacuugauu

SEQ ID NO: 777535 - RNA, 22 nt, Human
gcaggcuugcccggccuccuuc

SEQ ID NO: 777536 - RNA, 22 nt, Human
cucugcagauucaucccuucac

SEQ ID NO: 777537 - RNA, 22 nt, Human
auuuggaaaagcgguaacuugc

SEQ ID NO: 777538 - RNA, 22 nt, Human
caguucaaaauuuugaagaagg

SEQ ID NO: 777539 - RNA, 22 nt, Human
agcgggcagaaguggggucugc

SEQ ID NO: 777540 - RNA, 17 nt, Human
gagugcagacacaagca

SEQ ID NO: 777541 - RNA, 23 nt, Human
agggccaggugcggaaacagcuc

SEQ ID NO: 777542 - RNA, 22 nt, Human
uucagugugccuaagucaguug

SEQ ID NO: 777543 - RNA, 22 nt, Human
cccagcagggucucugugucua

SEQ ID NO: 777544 - RNA, 22 nt, Human
uuacaaugagaaaugguuggca

SEQ ID NO: 777545 - RNA, 22 nt, Human
caauucaaguugaguacagcuu

SEQ ID NO: 777546 - RNA, 22 nt, Human
aguccaagguucauggcacaga

SEQ ID NO: 777547 - RNA, 22 nt, Human
ccugggaggcggagguugcagu

SEQ ID NO: 777548 - RNA, 22 nt, Human
cccaggaggcggagguuguggu

SEQ ID NO: 777549 - RNA, 22 nt, Human
uguggccuccuguuccugggua

SEQ ID NO: 777550 - RNA, 22 nt, Human
gcauauuuucacaagcucuugg

SEQ ID NO: 777551 - RNA, 20 nt, Human
ucagguagaucuuugagguc

SEQ ID NO: 777552 - RNA, 20 nt, Human
aaguuuucuccaaauacagu

SEQ ID NO: 777553 - RNA, 22 nt, Human
aggaagaacagauaauggacgc

SEQ ID NO: 777554 - RNA, 22 nt, Human
cugggcugcggugguagguugu

SEQ ID NO: 777555 - RNA, 22 nt, Human
cucugcaugccuugcucagaca

SEQ ID NO: 777556 - RNA, 22 nt, Human
auguaugagagauucuuuuauu

SEQ ID NO: 777557 - RNA, 22 nt, Human
ggguaaaggucgcccucaaggu

SEQ ID NO: 777558 - RNA, 22 nt, Human
auuagcaaguuuuccagcuaau

SEQ ID NO: 777559 - RNA, 22 nt, Human
auucccacagcugguauaaaua

SEQ ID NO: 777560 - RNA, 22 nt, Human
ugcuccagcaacaggcuuagcu

SEQ ID NO: 777561 - RNA, 22 nt, Human
agugacagauuaccggcagagc

SEQ ID NO: 777562 - RNA, 22 nt, Human
ccacuugacaauaaacugagcu

SEQ ID NO: 777563 - RNA, 22 nt, Human
acaugcuuuaucggauugacac

SEQ ID NO: 777564 - RNA, 22 nt, Human
ucuguuauacagucuguggcac

SEQ ID NO: 777565 - RNA, 22 nt, Human
ucagaagcauccauuucaccac

SEQ ID NO: 777566 - RNA, 22 nt, Human
auaagcagggucaaaugccuac

SEQ ID NO: 777567 - RNA, 22 nt, Human
uccagagagccacggacagggg

SEQ ID NO: 777568 - RNA, 22 nt, Human
uucuuucugucaugguguacug

SEQ ID NO: 777569 - RNA, 22 nt, Human
ucuagaauuuugccauauagcu

SEQ ID NO: 777570 - RNA, 22 nt, Human
ccugggcuuugcuggcaaggcc

SEQ ID NO: 777571 - RNA, 22 nt, Human
uuacaacuugcagaggauguug

SEQ ID NO: 777572 - RNA, 19 nt, Human
gcuuuggagggagguucua

SEQ ID NO: 777573 - RNA, 22 nt, Human
ccagucaaaaggaagucaaugu

SEQ ID NO: 777574 - RNA, 20 nt, Human
agaggaggauuauuuuauuc

SEQ ID NO: 777575 - RNA, 22 nt, Human
ugucuguuauugguguauaaga

SEQ ID NO: 777576 - RNA, 22 nt, Human
aaagccaugaauguuauagagg

SEQ ID NO: 777577 - RNA, 22 nt, Human
gcugucaccaaagcaggcacug

SEQ ID NO: 777578 - RNA, 22 nt, Human
uguuuauaaauuuucuugccau

SEQ ID NO: 777579 - RNA, 22 nt, Human
guggugcaggaagcaucuggcu

SEQ ID NO: 777580 - RNA, 22 nt, Human
ucugcacaucccccaaaguauu

SEQ ID NO: 777581 - RNA, 22 nt, Human
acuuaacagacauuauuuaccu

SEQ ID NO: 777582 - RNA, 22 nt, Human
cagguucucagaaggcagucac

SEQ ID NO: 777583 - RNA, 22 nt, Human
aaagaacaaauuagcuguuuua

SEQ ID NO: 777584 - RNA, 22 nt, Human
aggccccaaagcagugcaagua

SEQ ID NO: 777585 - RNA, 22 nt, Human
aagacaauuuauguuaggguca

SEQ ID NO: 777586 - RNA, 17 nt, Human
uccagccuccucugcug

SEQ ID NO: 777587 - RNA, 22 nt, Human
aagugguuauuuugaucuagaa

SEQ ID NO: 777588 - RNA, 22 nt, Human
cagagaagaaagugacuauaau

SEQ ID NO: 777589 - RNA, 22 nt, Human
ugcuucugggcaaaugugugug

SEQ ID NO: 777590 - RNA, 22 nt, Human
agcagcagggacaaaggaacag

SEQ ID NO: 777591 - RNA, 22 nt, Human
cacuuuauaugcauuaccucau

SEQ ID NO: 777592 - RNA, 22 nt, Human
ugccucugcugcuguggcauca

SEQ ID NO: 777593 - RNA, 22 nt, Human
acaauauaguccaugagcaugc

SEQ ID NO: 777594 - RNA, 22 nt, Human
uauggcuuuucauuccuaugug

SEQ ID NO: 777595 - RNA, 22 nt, Human
cagacagggcccugugauggua

SEQ ID NO: 777596 - RNA, 21 nt, Human
ccaccaggucuucugcucggg

SEQ ID NO: 777597 - RNA, 21 nt, Human
uccagcugcacaagcaugggg

SEQ ID NO: 777598 - RNA, 22 nt, Human
cccuaaggcagcccagucugug

SEQ ID NO: 777599 - RNA, 22 nt, Human
auuacaacaagaaaaggguaag

SEQ ID NO: 777600 - RNA, 22 nt, Human
uguuaaggagacacaugaaaaa

SEQ ID NO: 777601 - RNA, 22 nt, Human
uugcuucauuaaguucucacag

SEQ ID NO: 777602 - RNA, 22 nt, Human
ucucugucuuuguugucuucac

SEQ ID NO: 777603 - RNA, 23 nt, Human
ugcaggacuacucgagcacugcu

SEQ ID NO: 777604 - RNA, 22 nt, Human
agccacagccugacuuaacugu

SEQ ID NO: 777605 - RNA, 22 nt, Human
uaauguuuuucucaacauugcu

SEQ ID NO: 777606 - RNA, 22 nt, Human
gccuggaggaauguagcugagg

SEQ ID NO: 777607 - RNA, 20 nt, Human
cuggaguguagcaguggcug

SEQ ID NO: 777608 - RNA, 22 nt, Human
uauagagcuuuggcauugauua

SEQ ID NO: 777609 - RNA, 22 nt, Human
ugaguagaccucacgugucaga

SEQ ID NO: 777610 - RNA, 22 nt, Human
ccauuacuuagaaaggaacuga

SEQ ID NO: 777611 - RNA, 22 nt, Human
uccaggcuagccugguagagaa

SEQ ID NO: 777612 - RNA, 22 nt, Human
ggugcugacuucacagucuuac

SEQ ID NO: 777613 - RNA, 20 nt, Human
gcuucuuuucuggcccauga

SEQ ID NO: 777614 - RNA, 22 nt, Human
uucugcuuauucaaaugaucuu

SEQ ID NO: 777615 - RNA, 22 nt, Human
cuucagcugcaguuauguuuag

SEQ ID NO: 777616 - RNA, 22 nt, Human
agacaaguucugugggucaccu

SEQ ID NO: 777617 - RNA, 22 nt, Human
agcugccauccuguucagcacc

SEQ ID NO: 777618 - RNA, 22 nt, Human
uaguuaggggaaaaacgacagg

SEQ ID NO: 777619 - RNA, 22 nt, Human
ugcaggaggauuuuguggagcu

SEQ ID NO: 777620 - RNA, 22 nt, Human
aggcaggauugcugacaacaau

SEQ ID NO: 777621 - RNA, 22 nt, Human
acacacagguaaaggagccugg

SEQ ID NO: 777622 - RNA, 22 nt, Human
ucaguuuuaagguuugagaauu

SEQ ID NO: 777623 - RNA, 22 nt, Human
uccugaagaugaaaagagaggu

SEQ ID NO: 777624 - RNA, 22 nt, Human
ccaugcauggcacuggacuggg

SEQ ID NO: 777625 - RNA, 22 nt, Human
acauuuacauuuucucuggccu

SEQ ID NO: 777626 - RNA, 21 nt, Human
uguaacaaaauacugcagauu

SEQ ID NO: 777627 - RNA, 22 nt, Human
uuucuuugagucucaguuugcu

SEQ ID NO: 777628 - RNA, 22 nt, Human
cuggucugagggcucuugaggc

SEQ ID NO: 777629 - RNA, 22 nt, Human
uucacaauggcaaaccauuaaa

SEQ ID NO: 777630 - RNA, 22 nt, Human
cuccagagggucagacucugag

SEQ ID NO: 777631 - RNA, 22 nt, Human
ggcuccacccugcuuccagaag

SEQ ID NO: 777632 - RNA, 22 nt, Human
gggaagcaucugaggguccacu

SEQ ID NO: 777633 - RNA, 22 nt, Human
accagaggcucugccaccucca

SEQ ID NO: 777634 - RNA, 22 nt, Human
uuuauucacucauucagccagu

SEQ ID NO: 777635 - RNA, 22 nt, Human
ucagaagcugguguccuuugaa

SEQ ID NO: 777636 - RNA, 23 nt, Human
augugugggaggucagagagcca

SEQ ID NO: 777637 - RNA, 22 nt, Human
gcucucuggguggugggcaaca

SEQ ID NO: 777638 - RNA, 22 nt, Human
uucagagguagagaggaucuug

SEQ ID NO: 777639 - RNA, 23 nt, Human
auucaguugugagagaagacaca

SEQ ID NO: 777640 - RNA, 22 nt, Human
cuccucuccaucagcgccaccc

SEQ ID NO: 777641 - RNA, 22 nt, Human
cagcugugagagugcauugaag

SEQ ID NO: 777642 - RNA, 22 nt, Human
aguuuaauauccuucaacuuuc

SEQ ID NO: 777643 - RNA, 22 nt, Human
cuuuccugccuuauucauucau

SEQ ID NO: 777644 - RNA, 22 nt, Human
ucagaaucucuggaggcuuggc

SEQ ID NO: 777645 - RNA, 22 nt, Human
uucugcuucugugugucccagg

SEQ ID NO: 777646 - RNA, 22 nt, Human
uacaugucuggguuuuguuucc

SEQ ID NO: 777647 - RNA, 22 nt, Human
uacccaggaggaaacugaggcu

SEQ ID NO: 777648 - RNA, 22 nt, Human
agcuuugggcagaagaggauuc

SEQ ID NO: 777649 - RNA, 22 nt, Human
cauuuacacuucuaaccacaag

SEQ ID NO: 777650 - RNA, 22 nt, Human
uuguaugcuguaggcaugcauu

SEQ ID NO: 777651 - RNA, 22 nt, Human
cagcagcuggugagacacagcc

SEQ ID NO: 777652 - RNA, 22 nt, Human
ggaccaggcaagcugaggcggg

SEQ ID NO: 777653 - RNA, 22 nt, Human
ucacuguaucauguugcacuua

SEQ ID NO: 777654 - RNA, 22 nt, Human
ugugaagauuaaguuacugggc

SEQ ID NO: 777655 - RNA, 22 nt, Human
agacacagguguaauuucugcu

SEQ ID NO: 777656 - RNA, 22 nt, Human
aacaaugccacauuaaguguau

SEQ ID NO: 777657 - RNA, 22 nt, Human
ccucacaguguucgugucagau

SEQ ID NO: 777658 - RNA, 22 nt, Human
cuccagugcacccagaggauuu

SEQ ID NO: 777659 - RNA, 22 nt, Human
ggaaagaggauaguggguaggu

SEQ ID NO: 777660 - RNA, 22 nt, Human
aauggagacuucaaaauggauu

SEQ ID NO: 777661 - RNA, 22 nt, Human
cuggaggaaucacagaaggcuu

SEQ ID NO: 777662 - RNA, 22 nt, Human
uugccagggaacagggagaggc

SEQ ID NO: 777663 - RNA, 17 nt, Human
aggcaaugacugugguu

SEQ ID NO: 777664 - RNA, 22 nt, Human
ugccccuucuacccgucucugu

SEQ ID NO: 777665 - RNA, 22 nt, Human
ccccauggcaacugcugggggu

SEQ ID NO: 777666 - RNA, 22 nt, Human
uuguguaaaugucugucuuucu

SEQ ID NO: 777667 - RNA, 22 nt, Human
gaaauauugggacucagagcuu

SEQ ID NO: 777668 - RNA, 22 nt, Human
gagaaagauggaaucuuacagg

SEQ ID NO: 777669 - RNA, 22 nt, Human
uuauaguauuagguacucaaca

SEQ ID NO: 777670 - RNA, 22 nt, Human
gcagcaggcacuuaccguugcu

SEQ ID NO: 777671 - RNA, 22 nt, Human
uauguguauguucauucaugca

SEQ ID NO: 777672 - RNA, 22 nt, Human
ggagaggcuuccagagucgugc

SEQ ID NO: 777673 - RNA, 22 nt, Human
acuguuaugauuuacacagucc

SEQ ID NO: 777674 - RNA, 22 nt, Human
ucucaucuauucacauuaacug

SEQ ID NO: 777675 - RNA, 22 nt, Human
aaugccaguguguugauuccag

SEQ ID NO: 777676 - RNA, 22 nt, Human
cacuguucaucaaaacugcucu

SEQ ID NO: 777677 - RNA, 22 nt, Human
cauuaucugccauugacaccau

SEQ ID NO: 777678 - RNA, 22 nt, Human
gaaauccaguucccuacucuua

SEQ ID NO: 777679 - RNA, 22 nt, Human
uaaaaaguugaaaggacuuauc

SEQ ID NO: 777680 - RNA, 23 nt, Human
uucuucucaauuaguugauucag

SEQ ID NO: 777681 - RNA, 22 nt, Human
ucugcagcaaccuuucaccucc

SEQ ID NO: 777682 - RNA, 22 nt, Human
ugaguguggggaaugucaugag

SEQ ID NO: 777683 - RNA, 22 nt, Human
gacauaaaauucaauaauuugu

SEQ ID NO: 777684 - RNA, 22 nt, Human
uuuuaugugucaaagcaguggu

SEQ ID NO: 777685 - RNA, 22 nt, Human
uucacauaggagcaugguuuuu

SEQ ID NO: 777686 - RNA, 22 nt, Human
uugcuucaguagcucuuuaaag

SEQ ID NO: 777687 - RNA, 21 nt, Human
cggcuucauuuucuucugguu

SEQ ID NO: 777688 - RNA, 22 nt, Human
ucuuuucuugcauuauugcacu

SEQ ID NO: 777689 - RNA, 22 nt, Human
gcagaacaacguaggaguggag

SEQ ID NO: 777690 - RNA, 21 nt, Human
uucaauacuauuucaauaguc

SEQ ID NO: 777691 - RNA, 22 nt, Human
agacaugcuuggaggagaagga

SEQ ID NO: 777692 - RNA, 22 nt, Human
cagaggcgaggcagcugaaccu

SEQ ID NO: 777693 - RNA, 22 nt, Human
ugguccuguguucuuccugccu

SEQ ID NO: 777694 - RNA, 22 nt, Human
ucccagggacuggaugaugcag

SEQ ID NO: 777695 - RNA, 22 nt, Human
ucuggaucucccucauccuggg

SEQ ID NO: 777696 - RNA, 22 nt, Human
acaaugaaccaaauuuaccaau

SEQ ID NO: 777697 - RNA, 23 nt, Human
ucagccucuuaggacuucucacc

SEQ ID NO: 777698 - RNA, 22 nt, Human
agucaggagcugcugcauugua

SEQ ID NO: 777699 - RNA, 22 nt, Human
agucuuacaugagaaagaaccu

SEQ ID NO: 777700 - RNA, 22 nt, Human
agugcugagugauugcaaagga

SEQ ID NO: 777701 - RNA, 22 nt, Human
aggcuuaaugaguuaaaucacu

SEQ ID NO: 777702 - RNA, 22 nt, Human
ccacagggucagccacucugca

SEQ ID NO: 777703 - RNA, 22 nt, Human
cccucucugacuucugaacuug

SEQ ID NO: 777704 - RNA, 17 nt, Human
acacugacaugccacac

SEQ ID NO: 777705 - RNA, 22 nt, Human
aucucugcguccccagcaucga

SEQ ID NO: 777706 - RNA, 22 nt, Human
uaaagugucugccucagcucag

SEQ ID NO: 777707 - RNA, 22 nt, Human
uuaaaucaguaggcuacuccuu

SEQ ID NO: 777708 - RNA, 22 nt, Human
agaagccagcuucagcugcccg

SEQ ID NO: 777709 - RNA, 22 nt, Human
agcacccuggggaagcacaaag

SEQ ID NO: 777710 - RNA, 22 nt, Human
uucuuaauaccuauuuucuacc

SEQ ID NO: 777711 - RNA, 22 nt, Human
accuacugcuccacagugacua

SEQ ID NO: 777712 - RNA, 22 nt, Human
accaugaucugcucugguguuu

SEQ ID NO: 777713 - RNA, 22 nt, Human
cucugggcggcccaggccaacc

SEQ ID NO: 777714 - RNA, 22 nt, Human
uggcuucuugaucuuggacuug

SEQ ID NO: 777715 - RNA, 22 nt, Human
gaggaacuuaugauauucuacu

SEQ ID NO: 777716 - RNA, 22 nt, Human
ggugauuuucgaguuucauguu

SEQ ID NO: 777717 - RNA, 22 nt, Human
aauguucucaacaaaaggaagc

SEQ ID NO: 777718 - RNA, 22 nt, Human
ugcuccugagugugcaggagau

SEQ ID NO: 777719 - RNA, 22 nt, Human
auucugaguccaugggggcagg

SEQ ID NO: 777720 - RNA, 22 nt, Human
ucugucuacagggagaaugaua

SEQ ID NO: 777721 - RNA, 22 nt, Human
uauaucuuauaugugcagguac

SEQ ID NO: 777722 - RNA, 22 nt, Human
gcuggccaggaagagucucaga

SEQ ID NO: 777723 - RNA, 22 nt, Human
ugaagggcaaccccaggcccag

SEQ ID NO: 777724 - RNA, 22 nt, Human
ucuucauggucugguucuccag

SEQ ID NO: 777725 - RNA, 22 nt, Human
agcauacacccuaaacugcuua

SEQ ID NO: 777726 - RNA, 22 nt, Human
guuucucaguuuggucugcaga

SEQ ID NO: 777727 - RNA, 22 nt, Human
aguaauaaacucuuuuuaucuc

SEQ ID NO: 777728 - RNA, 22 nt, Human
ucuaaccuuguggucugcuggu

SEQ ID NO: 777729 - RNA, 22 nt, Human
aaaaugaauaaguuaacccagg

SEQ ID NO: 777730 - RNA, 22 nt, Human
uuguaacagguacuaaauaacu

SEQ ID NO: 777731 - RNA, 22 nt, Human
agcuuguguuuuucuaaguauc

SEQ ID NO: 777732 - RNA, 22 nt, Human
uuggaaucauucuuaaaggucu

SEQ ID NO: 777733 - RNA, 22 nt, Human
auccuuuaucuuuccuaggaau

SEQ ID NO: 777734 - RNA, 22 nt, Human
uuuauccauaucauuaaaaucu

SEQ ID NO: 777735 - RNA, 22 nt, Human
uccuggggcugcaaggccuguc

SEQ ID NO: 777736 - RNA, 22 nt, Human
agccuggaccaggggccucaga

SEQ ID NO: 777737 - RNA, 22 nt, Human
aguccagggcucucugugggau

SEQ ID NO: 777738 - RNA, 22 nt, Human
gagcugggucuccaccuuggca

SEQ ID NO: 777739 - RNA, 22 nt, Human
auagaauucuuugaaauuuaug

SEQ ID NO: 777740 - RNA, 22 nt, Human
uccaggggacacuguuucucca

SEQ ID NO: 777741 - RNA, 22 nt, Human
uggagacucagaaggggaagca

SEQ ID NO: 777742 - RNA, 22 nt, Human
ucacaguucaacuaguucagau

SEQ ID NO: 777743 - RNA, 22 nt, Human
uguccccuuucuuuccuucgua

SEQ ID NO: 777744 - RNA, 22 nt, Human
agucccagcucugccacuuacu

SEQ ID NO: 777745 - RNA, 20 nt, Human
gccagcacagggagcaguuc

SEQ ID NO: 777746 - RNA, 22 nt, Human
cucccuggucuuucccaucauu

SEQ ID NO: 777747 - RNA, 22 nt, Human
gaguuacauggacauucucucc

SEQ ID NO: 777748 - RNA, 22 nt, Human
ucugagcacaucacacagcuca

SEQ ID NO: 777749 - RNA, 22 nt, Human
guuuucugauuagcaaaucuga

SEQ ID NO: 777750 - RNA, 22 nt, Human
gcaauacuaagugacuuuuggg

SEQ ID NO: 777751 - RNA, 22 nt, Human
ugcagccaucuuucuuggagga

SEQ ID NO: 777752 - RNA, 22 nt, Human
ucuuuggcacuucuguuuuaag

SEQ ID NO: 777753 - RNA, 22 nt, Human
cucagaaguucagccuagagua

SEQ ID NO: 777754 - RNA, 22 nt, Human
cauguauagacacucauacagu

SEQ ID NO: 777755 - RNA, 22 nt, Human
acagugcauuauugcugaaugc

SEQ ID NO: 777756 - RNA, 22 nt, Human
aaacaguuucuaaucauggaga

SEQ ID NO: 777757 - RNA, 22 nt, Human
acacagaugcauuacacaucua

SEQ ID NO: 777758 - RNA, 22 nt, Human
acuuuguugaugaaauaguuuu

SEQ ID NO: 777759 - RNA, 22 nt, Human
aaucagaauuuguccccugagu

SEQ ID NO: 777760 - RNA, 22 nt, Human
guggcccuuggaguugugaccu

SEQ ID NO: 777761 - RNA, 22 nt, Human
cagggcucaggcucugggauuc

SEQ ID NO: 777762 - RNA, 22 nt, Human
ucagaggaauuugcuuuucaug

SEQ ID NO: 777763 - RNA, 22 nt, Human
ugaagaaacagaccaagaggau

SEQ ID NO: 777764 - RNA, 22 nt, Human
gggcuugcugauuugggcagga

SEQ ID NO: 777765 - RNA, 22 nt, Human
cccaaaguacaaguaaacaugu

SEQ ID NO: 777766 - RNA, 22 nt, Human
ucaagcaaaguuuagcugguua

SEQ ID NO: 777767 - RNA, 22 nt, Human
cuauaaaucuacccagcauugg

SEQ ID NO: 777768 - RNA, 22 nt, Human
ucugguccccauuccagguggg

SEQ ID NO: 777769 - RNA, 22 nt, Human
cagaccagaaggaagccgacaa

SEQ ID NO: 777770 - RNA, 23 nt, Human
agggcaugaagcagaggacgugg

SEQ ID NO: 777771 - RNA, 22 nt, Human
gccaggagcccugggcaaguuc

SEQ ID NO: 777772 - RNA, 22 nt, Human
cugcccucuagggaugcacugg

SEQ ID NO: 777773 - RNA, 22 nt, Human
uaacaauggaguuuugagaaag

SEQ ID NO: 777774 - RNA, 22 nt, Human
uuuuccucugcagagcaguuag

SEQ ID NO: 777775 - RNA, 22 nt, Human
agguaaaauagauaguauuucu

SEQ ID NO: 777776 - RNA, 22 nt, Human
aaccauuugccauuaucuuaag

SEQ ID NO: 777777 - RNA, 21 nt, Human
acugugacuggguguaugggu

SEQ ID NO: 777778 - RNA, 22 nt, Human
ccccacacucuuuacauucaua

SEQ ID NO: 777779 - RNA, 22 nt, Human
ccacaggggcccacgagccgcu

SEQ ID NO: 777780 - RNA, 22 nt, Human
uacaaguagcucagguuuucug

SEQ ID NO: 777781 - RNA, 22 nt, Human
uuugucaccaguggcuuuggua

SEQ ID NO: 777782 - RNA, 22 nt, Human
uuauuaaaaugcggauuuggcu

SEQ ID NO: 777783 - RNA, 22 nt, Human
ggggcacuuuacugccucaucu

SEQ ID NO: 777784 - RNA, 22 nt, Human
gagaaggaugaggaaaugguau

SEQ ID NO: 777785 - RNA, 22 nt, Human
gaugagaauguuuaucaaaugc

SEQ ID NO: 777786 - RNA, 22 nt, Human
gcagaggugcucaguggcagaa

SEQ ID NO: 777787 - RNA, 22 nt, Human
gcacauaacugaccacaucuaa

SEQ ID NO: 777788 - RNA, 18 nt, Human
ugcccagaaaagcaggga

SEQ ID NO: 777789 - RNA, 22 nt, Human
accuuucacgguaucagacauc

SEQ ID NO: 777790 - RNA, 22 nt, Human
aucaauaucagaucagacagga

SEQ ID NO: 777791 - RNA, 22 nt, Human
caggaggaacaagagguucugg

SEQ ID NO: 777792 - RNA, 22 nt, Human
gcucucagcccacugaggggaa

SEQ ID NO: 777793 - RNA, 22 nt, Human
acucaggccuccuucuguccuu

SEQ ID NO: 777794 - RNA, 19 nt, Human
uuugagaaguuauuaucua

SEQ ID NO: 777795 - RNA, 22 nt, Human
acagagcacauagauuggaguu

SEQ ID NO: 777796 - RNA, 20 nt, Human
uacaacaaguagagacauac

SEQ ID NO: 777797 - RNA, 22 nt, Human
uugagagaaaaaauuuauuggu

SEQ ID NO: 777798 - RNA, 22 nt, Human
uucuuaggacuaguauagcaug

SEQ ID NO: 777799 - RNA, 22 nt, Human
cagcaucucauucauucauguu

SEQ ID NO: 777800 - RNA, 22 nt, Human
gagaggugaaauaguuguccgg

SEQ ID NO: 777801 - RNA, 22 nt, Human
aagguauuauuugcaaucauuu

SEQ ID NO: 777802 - RNA, 22 nt, Human
ucagauccgagugugccaagga

SEQ ID NO: 777803 - RNA, 22 nt, Human
cacaauuuuaauacacagucaa

SEQ ID NO: 777804 - RNA, 22 nt, Human
aauguguaugaggaagagagaa

SEQ ID NO: 777805 - RNA, 22 nt, Human
aaagcacagggugcuagagagu

SEQ ID NO: 777806 - RNA, 22 nt, Human
uugcauguuauuuaaucuguau

SEQ ID NO: 777807 - RNA, 22 nt, Human
acaggcccagcucuucaccaga

SEQ ID NO: 777808 - RNA, 22 nt, Human
ugagcagaagauuggaacuuac

SEQ ID NO: 777809 - RNA, 22 nt, Human
cagcacaggcaggggaacuaua

SEQ ID NO: 777810 - RNA, 23 nt, Human
uucauuuaggaguucauaagagc

SEQ ID NO: 777811 - RNA, 22 nt, Human
gucugccugcuaguggcugccu

SEQ ID NO: 777812 - RNA, 22 nt, Human
guccuggugccaccugcgggau

SEQ ID NO: 777813 - RNA, 22 nt, Human
auauggagaacucaaaaaguga

SEQ ID NO: 777814 - RNA, 22 nt, Human
aucaaaguaucucaauauggua

SEQ ID NO: 777815 - RNA, 22 nt, Human
uaugcauauagaugcacacaca

SEQ ID NO: 777816 - RNA, 22 nt, Human
cugucauuugucugcucccucu

SEQ ID NO: 777817 - RNA, 22 nt, Human
ugauucaagauugguuagcugu

SEQ ID NO: 777818 - RNA, 22 nt, Human
gaagcaguauccugacagcacc

SEQ ID NO: 777819 - RNA, 22 nt, Human
aagagguggguuggacagauac

SEQ ID NO: 777820 - RNA, 20 nt, Human
cacaggaaagcuacucaguu

SEQ ID NO: 777821 - RNA, 22 nt, Human
agggcagaaaucgauuacaccu

SEQ ID NO: 777822 - RNA, 22 nt, Human
ccucagaguuggaaucacauuu

SEQ ID NO: 777823 - RNA, 22 nt, Human
ucuggcucucucaucacccaau

SEQ ID NO: 777824 - RNA, 22 nt, Human
cagggaugugaugagcugagcc

SEQ ID NO: 777825 - RNA, 22 nt, Human
uggcuccagauuuccugcugca

SEQ ID NO: 777826 - RNA, 22 nt, Human
ggagcuaggcaaagcucacgga

SEQ ID NO: 777827 - RNA, 22 nt, Human
uaaauaucaguccagcucuucc

SEQ ID NO: 777828 - RNA, 22 nt, Human
uacacaugcucagauuccugug

SEQ ID NO: 777829 - RNA, 22 nt, Human
acugucaugacguuugucaccc

SEQ ID NO: 777830 - RNA, 22 nt, Human
uuggaagaccagaggccuuguc

SEQ ID NO: 777831 - RNA, 22 nt, Human
guccucugaaagaugaaccaug

SEQ ID NO: 777832 - RNA, 22 nt, Human
caccaggagcaucuaggaggcg

SEQ ID NO: 777833 - RNA, 22 nt, Human
uagaaaugcaguguacuguguc

SEQ ID NO: 777834 - RNA, 22 nt, Human
ugucugugaccucuuaggcaag

SEQ ID NO: 777835 - RNA, 22 nt, Human
uccaauaacaucuaaaaacuua

SEQ ID NO: 777836 - RNA, 22 nt, Human
cacauaagaaaugaauaugaga

SEQ ID NO: 777837 - RNA, 22 nt, Human
auguacaguuucuagacucaaa

SEQ ID NO: 777838 - RNA, 22 nt, Human
acagaagcaaaagcaggaucuu

SEQ ID NO: 777839 - RNA, 23 nt, Human
gggcccagcacaggaccuggcag

SEQ ID NO: 777840 - RNA, 22 nt, Human
guccugggccugcugaggcuga

SEQ ID NO: 777841 - RNA, 21 nt, Human
gggcauccuuucccacccugc

SEQ ID NO: 777842 - RNA, 22 nt, Human
ccagcuccccucagcagguaau

SEQ ID NO: 777843 - RNA, 22 nt, Human
cauaacaccugauggcaaugau

SEQ ID NO: 777844 - RNA, 22 nt, Human
aaagcaauagguuaggucaaga

SEQ ID NO: 777845 - RNA, 22 nt, Human
ccugggaagaccggcagugggg

SEQ ID NO: 777846 - RNA, 22 nt, Human
caaggagaguaauugaaugaga

SEQ ID NO: 777847 - RNA, 22 nt, Human
aauuucagaccauuugcaauua

SEQ ID NO: 777848 - RNA, 22 nt, Human
gccuugggggugaaagaggcua

SEQ ID NO: 777849 - RNA, 22 nt, Human
ucuguuuuguaccagauacagc

SEQ ID NO: 777850 - RNA, 22 nt, Human
acucccacuccagaguagaagc

SEQ ID NO: 777851 - RNA, 22 nt, Human
aaacaguccucuuuauuuaguc

SEQ ID NO: 777852 - RNA, 22 nt, Human
gugugcagggcugccugugccg

SEQ ID NO: 777853 - RNA, 22 nt, Human
ccaggccaguguuugguccagg

SEQ ID NO: 777854 - RNA, 19 nt, Human
gcucagagccaugggggcu

SEQ ID NO: 777855 - RNA, 22 nt, Human
ccagcuaggcuugcacucuugu

SEQ ID NO: 777856 - RNA, 22 nt, Human
gaaggcacagauggcaguccac

SEQ ID NO: 777857 - RNA, 22 nt, Human
ccagagcuccagggcuacagaa

SEQ ID NO: 777858 - RNA, 18 nt, Human
aagcagacagcagacagu

SEQ ID NO: 777859 - RNA, 22 nt, Human
gcagugcuaaguagcuggccca

SEQ ID NO: 777860 - RNA, 22 nt, Human
uuuaugaacuacagauauaacu

SEQ ID NO: 777861 - RNA, 22 nt, Human
augcaaauuaacauauaguaga

SEQ ID NO: 777862 - RNA, 22 nt, Human
ucuggugucaguauucuuugaa

SEQ ID NO: 777863 - RNA, 22 nt, Human
uaaccuuuggugaaauauuaac

SEQ ID NO: 777864 - RNA, 21 nt, Human
ugaaagaaggugcagucugaa

SEQ ID NO: 777865 - RNA, 22 nt, Human
ccacuugaaacuuaguggcaua

SEQ ID NO: 777866 - RNA, 22 nt, Human
agacagaacagaauaauuguug

SEQ ID NO: 777867 - RNA, 22 nt, Human
cuugggcucagacuugaggaca

SEQ ID NO: 777868 - RNA, 22 nt, Human
gccucugcucggacuuugccuc

SEQ ID NO: 777869 - RNA, 22 nt, Human
aagaccagaggauauaaccaga

SEQ ID NO: 777870 - RNA, 22 nt, Human
cauuggcaccucacaggauaga

SEQ ID NO: 777871 - RNA, 22 nt, Human
gccuuggccuuccuaggccuga

SEQ ID NO: 777872 - RNA, 22 nt, Human
gagcaacacauugaaugaggau

SEQ ID NO: 777873 - RNA, 22 nt, Human
uaaagauguucucauuucauag

SEQ ID NO: 777874 - RNA, 22 nt, Human
ucugccugcuucuucauagucu

SEQ ID NO: 777875 - RNA, 20 nt, Human
gucaggauuaguaaacucug

SEQ ID NO: 777876 - RNA, 22 nt, Human
gcugcccaggguggagccggcu

SEQ ID NO: 777877 - RNA, 22 nt, Human
ggcugugcugagggggaagccc

SEQ ID NO: 777878 - RNA, 22 nt, Human
gcauggccuccagccaacagca

SEQ ID NO: 777879 - RNA, 20 nt, Human
uucugagaguucacagcccc

SEQ ID NO: 777880 - RNA, 22 nt, Human
augugcuuggaaaagcaguggu

SEQ ID NO: 777881 - RNA, 22 nt, Human
uguaucuuagugugaaaauauu

SEQ ID NO: 777882 - RNA, 22 nt, Human
caggauaaauaguaaauguaag

SEQ ID NO: 777883 - RNA, 18 nt, Human
ucuaggagaguaccuacc

SEQ ID NO: 777884 - RNA, 22 nt, Human
ucaaacauaggcacacauucag

SEQ ID NO: 777885 - RNA, 22 nt, Human
cuguguguuuauaucauuuccu

SEQ ID NO: 777886 - RNA, 22 nt, Human
gaaacguuaaaccauauguaau

SEQ ID NO: 777887 - RNA, 22 nt, Human
agaaggcuggcccuggguggcc

SEQ ID NO: 777888 - RNA, 22 nt, Human
caggcacagaguuauucauuua

SEQ ID NO: 777889 - RNA, 22 nt, Human
uauauaagauggguaggcuugu

SEQ ID NO: 777890 - RNA, 22 nt, Human
aauaaugaacauuuaaaaccug

SEQ ID NO: 777891 - RNA, 22 nt, Human
guauuucccugaguucugugag

SEQ ID NO: 777892 - RNA, 22 nt, Human
aacccaggagacggaguuugug

SEQ ID NO: 777893 - RNA, 23 nt, Human
cagugggaggacugagauaaaac

SEQ ID NO: 777894 - RNA, 22 nt, Human
aauccugaccugggcaugcuug

SEQ ID NO: 777895 - RNA, 22 nt, Human
uugaaugaguguuuuacucaug

SEQ ID NO: 777896 - RNA, 22 nt, Human
ucagcccugggcuuccucaugg

SEQ ID NO: 777897 - RNA, 22 nt, Human
ucucagaggucuucagccucug

SEQ ID NO: 777898 - RNA, 22 nt, Human
ggcaugcaaaugugggugaccu

SEQ ID NO: 777899 - RNA, 22 nt, Human
acugagguuucauuuuaucgcu

SEQ ID NO: 777900 - RNA, 22 nt, Human
uguaaguaguaauggaaggaca

SEQ ID NO: 777901 - RNA, 22 nt, Human
caugcauucagaaucucucaca

SEQ ID NO: 777902 - RNA, 22 nt, Human
cacaugugcaguuacaugaauu

SEQ ID NO: 777903 - RNA, 22 nt, Human
gcauggaauucccuuaugggcc

SEQ ID NO: 777904 - RNA, 22 nt, Human
cuggcagagucugcugucugca

SEQ ID NO: 777905 - RNA, 22 nt, Human
ccucuuugacaaguaccugccc

SEQ ID NO: 777906 - RNA, 18 nt, Human
aggccugcccagcacugu

SEQ ID NO: 777907 - RNA, 22 nt, Human
gccacauagaggaggauauuaa

SEQ ID NO: 777908 - RNA, 22 nt, Human
ggacugagcugacaucuguugg

SEQ ID NO: 777909 - RNA, 22 nt, Human
aucuuggauugacuggcucugc

SEQ ID NO: 777910 - RNA, 22 nt, Human
aucagaccugucuccucuugcc

SEQ ID NO: 777911 - RNA, 22 nt, Human
cauuccagaugaggccaggccc

SEQ ID NO: 777912 - RNA, 22 nt, Human
cagugucugggacagaaaguca

SEQ ID NO: 777913 - RNA, 22 nt, Human
cuaucaaacagccauuaauaua

SEQ ID NO: 777914 - RNA, 21 nt, Human
ucagcccaggugucuuugccc

SEQ ID NO: 777915 - RNA, 22 nt, Human
caggcgagggcccugaggagcc

SEQ ID NO: 777916 - RNA, 22 nt, Human
caagcagagagguuagaacaca

SEQ ID NO: 777917 - RNA, 22 nt, Human
caaaucuccuuaaagguaaaau

SEQ ID NO: 777918 - RNA, 23 nt, Human
agcugggccagguggucagaccu

SEQ ID NO: 777919 - RNA, 22 nt, Human
agggagaagguccaugccuguc

SEQ ID NO: 777920 - RNA, 22 nt, Human
uucagcuugaaucuggcuuuga

SEQ ID NO: 777921 - RNA, 22 nt, Human
gcggagggagauaggccuugcu

SEQ ID NO: 777922 - RNA, 22 nt, Human
ggccugaaauaaaguagcagaa

SEQ ID NO: 777923 - RNA, 22 nt, Human
gcuggcuggaguaaggagggag

SEQ ID NO: 777924 - RNA, 22 nt, Human
ugcauuuaauagaugcucccug

SEQ ID NO: 777925 - RNA, 22 nt, Human
cuacauuuguucuauagcuuuu

SEQ ID NO: 777926 - RNA, 22 nt, Human
ugaucagucccaugaucuucca

SEQ ID NO: 777927 - RNA, 22 nt, Human
acaguguuuauguacagauugu

SEQ ID NO: 777928 - RNA, 22 nt, Human
aagugucuuaacuccuuuuggg

SEQ ID NO: 777929 - RNA, 22 nt, Human
ucucugugacugcagcuuugca

SEQ ID NO: 777930 - RNA, 22 nt, Human
acauucuaaagcaugcucagga

SEQ ID NO: 777931 - RNA, 22 nt, Human
agauaucugcaauauaauuuaa

SEQ ID NO: 777932 - RNA, 22 nt, Human
gcuucucauguuuauuuuuaca

SEQ ID NO: 777933 - RNA, 22 nt, Human
ugcucccagcuccugcagcaac

SEQ ID NO: 777934 - RNA, 22 nt, Human
cugucccauacuaucuggguga

SEQ ID NO: 777935 - RNA, 22 nt, Human
uuuucuaacaucuaguaauuug

SEQ ID NO: 777936 - RNA, 22 nt, Human
uuucuuuguuguuaucacauca

SEQ ID NO: 777937 - RNA, 22 nt, Human
aggcuccaccccgccagaccuu

SEQ ID NO: 777938 - RNA, 22 nt, Human
cccuggaggagcuuagagcuug

SEQ ID NO: 777939 - RNA, 22 nt, Human
cuggcugacacaaagguaucga

SEQ ID NO: 777940 - RNA, 22 nt, Human
uugcaacuaaaagaacuugaca

SEQ ID NO: 777941 - RNA, 22 nt, Human
aggcaucugaguuugcaagcuu

SEQ ID NO: 777942 - RNA, 22 nt, Human
gcagagugaagcaguauggaaa

SEQ ID NO: 777943 - RNA, 18 nt, Human
uguugaaacuucagguaa

SEQ ID NO: 777944 - RNA, 22 nt, Human
uggggaccagauuagaccaugg

SEQ ID NO: 777945 - RNA, 22 nt, Human
caugcagcagaauaaugacuau

SEQ ID NO: 777946 - RNA, 22 nt, Human
uucacacagcaacuguaugaau

SEQ ID NO: 777947 - RNA, 22 nt, Human
uguccuccagcagcaugguaug

SEQ ID NO: 777948 - RNA, 22 nt, Human
aguguauucagaauguagcaaa

SEQ ID NO: 777949 - RNA, 22 nt, Human
uggcagauuuucucuggaggag

SEQ ID NO: 777950 - RNA, 22 nt, Human
aagggcagaaagggacgcuuug

SEQ ID NO: 777951 - RNA, 22 nt, Human
uggaagagaaaauccacccuua

SEQ ID NO: 777952 - RNA, 22 nt, Human
agcauccagaugccugauguca

SEQ ID NO: 777953 - RNA, 22 nt, Human
ucacagaagcuugaagauuuuc

SEQ ID NO: 777954 - RNA, 22 nt, Human
ugugcaguuucuauguugucca

SEQ ID NO: 777955 - RNA, 22 nt, Human
ucuuuagagccuuuccucccga

SEQ ID NO: 777956 - RNA, 22 nt, Human
ggagcaagucccaggcacuagu

SEQ ID NO: 777957 - RNA, 22 nt, Human
aagaaugauuacaaagcaacga

SEQ ID NO: 777958 - RNA, 22 nt, Human
ugcaggcauuggugagagaagc

SEQ ID NO: 777959 - RNA, 22 nt, Human
cccagagcugggugggcagcgg

SEQ ID NO: 777960 - RNA, 22 nt, Human
ucccugcugagagugcucuccc

SEQ ID NO: 777961 - RNA, 22 nt, Human
ugcacauucacuuagguauugu

SEQ ID NO: 777962 - RNA, 22 nt, Human
augucacaucugggauggcccu

SEQ ID NO: 777963 - RNA, 22 nt, Human
acuuuacaauauccugugacuu

SEQ ID NO: 777964 - RNA, 22 nt, Human
ugaggcaggaguuaaugugcuc

SEQ ID NO: 777965 - RNA, 22 nt, Human
guggggggacguuggucacuuu

SEQ ID NO: 777966 - RNA, 22 nt, Human
ugucccaggcugaaguacagug

SEQ ID NO: 777967 - RNA, 22 nt, Human
uauugaauuagacccuaaaaug

SEQ ID NO: 777968 - RNA, 23 nt, Human
ucugagcugucuuuucagcagaa

SEQ ID NO: 777969 - RNA, 22 nt, Human
acagcuguauucaaguugcaag

SEQ ID NO: 777970 - RNA, 22 nt, Human
ugcaauuuaugugcaagugguu

SEQ ID NO: 777971 - RNA, 22 nt, Human
gccaggcuggggggagaugucu

SEQ ID NO: 777972 - RNA, 22 nt, Human
gguuuuauagcaguacuaucag

SEQ ID NO: 777973 - RNA, 22 nt, Human
guccuuggcuucuuguugacug

SEQ ID NO: 777974 - RNA, 22 nt, Human
agggccugaggcugacggggag

SEQ ID NO: 777975 - RNA, 22 nt, Human
uggcaggaagacguggggcacc

SEQ ID NO: 777976 - RNA, 22 nt, Human
gugcauuccaccgugcagguug

SEQ ID NO: 777977 - RNA, 22 nt, Human
uauuagaaagcuuaauaucgug

SEQ ID NO: 777978 - RNA, 22 nt, Human
auaucuuuuagagcaagcuugu

SEQ ID NO: 777979 - RNA, 22 nt, Human
caugugcauccuuaaucucccu

SEQ ID NO: 777980 - RNA, 22 nt, Human
guggaggacaaaagaagccuuu

SEQ ID NO: 777981 - RNA, 22 nt, Human
ggaacauuuuuuaaggcagaaa

SEQ ID NO: 777982 - RNA, 22 nt, Human
cagggcuccccgcaccgcagcc

SEQ ID NO: 777983 - RNA, 22 nt, Human
gaggucaggcucaagcugggcc

SEQ ID NO: 777984 - RNA, 22 nt, Human
cuacauuuuucaccgagccucu

SEQ ID NO: 777985 - RNA, 22 nt, Human
gacauugaaguauuuuugucga

SEQ ID NO: 777986 - RNA, 22 nt, Human
gcagcaggugugcuuuuaauga

SEQ ID NO: 777987 - RNA, 23 nt, Human
gggagaugggaaaugaaggcucu

SEQ ID NO: 777988 - RNA, 22 nt, Human
guuaauaaagguauagaaucag

SEQ ID NO: 777989 - RNA, 22 nt, Human
caaggccaaagggccacuguca

SEQ ID NO: 777990 - RNA, 22 nt, Human
ggaagagccuggggugucaggc

SEQ ID NO: 777991 - RNA, 22 nt, Human
uguacagauugaucauggagag

SEQ ID NO: 777992 - RNA, 22 nt, Human
aauucagugucuggcacugcug

SEQ ID NO: 777993 - RNA, 22 nt, Human
cucacaggcaucucaucaggcu

SEQ ID NO: 777994 - RNA, 22 nt, Human
uugcauuguugcaaugaaguau

SEQ ID NO: 777995 - RNA, 22 nt, Human
auguuucaggcgaacuaacaug

SEQ ID NO: 777996 - RNA, 22 nt, Human
ccuaggaacccccaggcuucug

SEQ ID NO: 777997 - RNA, 22 nt, Human
ucagugcaaaaaaugggcuaga

SEQ ID NO: 777998 - RNA, 22 nt, Human
auucugcucccaggugaugcug

SEQ ID NO: 777999 - RNA, 22 nt, Human
caugaagucacuggagcuuuca

SEQ ID NO: 778000 - RNA, 22 nt, Human
cuggguggagccuggucaucug

SEQ ID NO: 778001 - RNA, 22 nt, Human
aguuauuacucuuuaacauauu

SEQ ID NO: 778002 - RNA, 22 nt, Human
ucagaggauuggacuuuuaugu

SEQ ID NO: 778003 - RNA, 22 nt, Human
cuccagccucaucuccuggcug

SEQ ID NO: 778004 - RNA, 22 nt, Human
uagcagagguaaguguggcaau

SEQ ID NO: 778005 - RNA, 22 nt, Human
aagaggcuggcauugaugguag

SEQ ID NO: 778006 - RNA, 22 nt, Human
caagggcucuuuugaggaaugu

SEQ ID NO: 778007 - RNA, 22 nt, Human
uaaguuuuaagcaaucugauaa

SEQ ID NO: 778008 - RNA, 22 nt, Human
acuguauuggaaauauagcaaa

SEQ ID NO: 778009 - RNA, 22 nt, Human
cucuggucaagcaaagagguuu

SEQ ID NO: 778010 - RNA, 22 nt, Human
agagcugucagcguuuuggcca

SEQ ID NO: 778011 - RNA, 22 nt, Human
augcgugcagggguccuccugg

SEQ ID NO: 778012 - RNA, 22 nt, Human
ccucagcucuucccugugcaca

SEQ ID NO: 778013 - RNA, 22 nt, Human
ggaaccaguggaaugauaugcu

SEQ ID NO: 778014 - RNA, 22 nt, Human
cagcugaauggcucccugcuaa

SEQ ID NO: 778015 - RNA, 22 nt, Human
aagaaugucguugguauuuuaa

SEQ ID NO: 778016 - RNA, 22 nt, Human
uccagggguaccggccaggcag

SEQ ID NO: 778017 - RNA, 22 nt, Human
gggagguucuguucgcacuuga

SEQ ID NO: 778018 - RNA, 22 nt, Human
ucuucaccaucaacagaaugaa

SEQ ID NO: 778019 - RNA, 22 nt, Human
agaaaguuuguuuuuauccaua

SEQ ID NO: 778020 - RNA, 22 nt, Human
uggccuccucgggcugacccug

SEQ ID NO: 778021 - RNA, 19 nt, Human
ccagcuggccugggaccuc

SEQ ID NO: 778022 - RNA, 18 nt, Human
augaucuuagcaaauauu

SEQ ID NO: 778023 - RNA, 19 nt, Human
ggagaagcccaggaauccu

SEQ ID NO: 778024 - RNA, 22 nt, Human
augacaaccugugagcugguau

SEQ ID NO: 778025 - RNA, 22 nt, Human
auaaagauuuuuaggcauuucu

SEQ ID NO: 778026 - RNA, 22 nt, Human
guuugcaguugucauccuccug

SEQ ID NO: 778027 - RNA, 22 nt, Human
ccaguuauccagcaugcugucu

SEQ ID NO: 778028 - RNA, 22 nt, Human
agcugaggcaugaugcuaucag

SEQ ID NO: 778029 - RNA, 22 nt, Human
acauuucagauucaugaaguga

SEQ ID NO: 778030 - RNA, 22 nt, Human
agaaugugggggaaaagagugu

SEQ ID NO: 778031 - RNA, 22 nt, Human
uggcucacuuccguggagaggu

SEQ ID NO: 778032 - RNA, 22 nt, Human
gaacauaacuauugugaauagu

SEQ ID NO: 778033 - RNA, 22 nt, Human
acucuaaugcuaauaguauuuu

SEQ ID NO: 778034 - RNA, 22 nt, Human
gugcauauauaugggagggagc

SEQ ID NO: 778035 - RNA, 22 nt, Human
ugaggccacuuccccacagccc

SEQ ID NO: 778036 - RNA, 22 nt, Human
gcagaaguuaaucgaaggccau

SEQ ID NO: 778037 - RNA, 22 nt, Human
ugcuucucaaaaggagguaggu

SEQ ID NO: 778038 - RNA, 22 nt, Human
gcagggcagcugaagcuaggug

SEQ ID NO: 778039 - RNA, 20 nt, Human
ccuucuccagcuuguucuug

SEQ ID NO: 778040 - RNA, 22 nt, Human
uacauuccaaaggaaacuggcu

SEQ ID NO: 778041 - RNA, 22 nt, Human
guguccugggcauuaggcuuag

SEQ ID NO: 778042 - RNA, 22 nt, Human
cagcuucuguuucuagccccug

SEQ ID NO: 778043 - RNA, 22 nt, Human
ugggcucaggaccccagaggcc

SEQ ID NO: 778044 - RNA, 22 nt, Human
uugcugccagcgcccugcaggg

SEQ ID NO: 778045 - RNA, 22 nt, Human
cagugagcacggccagagggga

SEQ ID NO: 778046 - RNA, 22 nt, Human
agagaaucuagaauguuuauac

SEQ ID NO: 778047 - RNA, 20 nt, Human
acuuggaacucauuuuucuu

SEQ ID NO: 778048 - RNA, 22 nt, Human
uuaaaaugcagauuaugacuca

SEQ ID NO: 778049 - RNA, 22 nt, Human
gaggggcacaguaaaggguccc

SEQ ID NO: 778050 - RNA, 18 nt, Human
ugaggcagucagugaugg

SEQ ID NO: 778051 - RNA, 22 nt, Human
aauaguaaaagauacagcuaau

SEQ ID NO: 778052 - RNA, 22 nt, Human
cagagcuggagggaacccuggc

SEQ ID NO: 778053 - RNA, 22 nt, Human
cucugggaauucugagcaagca

SEQ ID NO: 778054 - RNA, 22 nt, Human
ucuaugugcccuuugugugaug

SEQ ID NO: 778055 - RNA, 16 nt, Human
cuuccucuucacuggc

SEQ ID NO: 778056 - RNA, 22 nt, Human
agucuuagauaagugaccaaug

SEQ ID NO: 778057 - RNA, 22 nt, Human
ggccugagucccaccuggcugu

SEQ ID NO: 778058 - RNA, 22 nt, Human
cucagcaagauuaagcagcuug

SEQ ID NO: 778059 - RNA, 22 nt, Human
ccugaucaaguuuucuggcucc

SEQ ID NO: 778060 - RNA, 22 nt, Human
ccuuugguaacauuccaaccuu

SEQ ID NO: 778061 - RNA, 22 nt, Human
ucucuguggcaagcaugcugcu

SEQ ID NO: 778062 - RNA, 22 nt, Human
ugcaggaacugggagggauagu

SEQ ID NO: 778063 - RNA, 22 nt, Human
cugucuguagacauuuuugguu

SEQ ID NO: 778064 - RNA, 22 nt, Human
cucauagauuuagauagaucga

SEQ ID NO: 778065 - RNA, 22 nt, Human
ggcucugcuuccuggaauugug

SEQ ID NO: 778066 - RNA, 16 nt, Human
gacacaugggggaaaa

SEQ ID NO: 778067 - RNA, 22 nt, Human
caggcucacuuucucagucaca

SEQ ID NO: 778068 - RNA, 22 nt, Human
aaccuagaguugccuuuuuuaa

SEQ ID NO: 778069 - RNA, 22 nt, Human
caggugguuguuuggauucuaa

SEQ ID NO: 778070 - RNA, 20 nt, Human
uggcucucucuaguaagugg

SEQ ID NO: 778071 - RNA, 22 nt, Human
uuccuuaguguuagauucugug

SEQ ID NO: 778072 - RNA, 22 nt, Human
cagggcaggaauuugacauugc

SEQ ID NO: 778073 - RNA, 22 nt, Human
gauuucuucucucccaagagga

SEQ ID NO: 778074 - RNA, 22 nt, Human
aacuaaaagugugucucuugua

SEQ ID NO: 778075 - RNA, 22 nt, Human
cauucuuacacaauauuuuaau

SEQ ID NO: 778076 - RNA, 22 nt, Human
auugggaugccggcugauaaga

SEQ ID NO: 778077 - RNA, 23 nt, Human
ggggacagagggcagcccgcauc

SEQ ID NO: 778078 - RNA, 22 nt, Human
auucuccacacauccagaccuu

SEQ ID NO: 778079 - RNA, 22 nt, Human
cacagagauggucuggcaggug

SEQ ID NO: 778080 - RNA, 22 nt, Human
ugcccacauggugccauggcca

SEQ ID NO: 778081 - RNA, 22 nt, Human
agguccaggauuuguggggucu

SEQ ID NO: 778082 - RNA, 21 nt, Human
agacaugugaacuaaagguga

SEQ ID NO: 778083 - RNA, 22 nt, Human
guuuucaaggggauuuaacuga

SEQ ID NO: 778084 - RNA, 22 nt, Human
auguggccuaguauagaaauga

SEQ ID NO: 778085 - RNA, 22 nt, Human
uauauucuuaccaguguaugua

SEQ ID NO: 778086 - RNA, 22 nt, Human
uuccagauuucuacacaagacc

SEQ ID NO: 778087 - RNA, 22 nt, Human
uucugcugaagccagggagcaa

SEQ ID NO: 778088 - RNA, 22 nt, Human
gugcuuuaccuuauuggucucg

SEQ ID NO: 778089 - RNA, 22 nt, Human
cagcugcugccucauccacuuu

SEQ ID NO: 778090 - RNA, 22 nt, Human
ggcuggagugggcuccagaguu

SEQ ID NO: 778091 - RNA, 22 nt, Human
caacagaagguguacuacugaa

SEQ ID NO: 778092 - RNA, 22 nt, Human
uguguuaacacugcaugauaau

SEQ ID NO: 778093 - RNA, 20 nt, Human
ucuggguugaaaucaagauc

SEQ ID NO: 778094 - RNA, 22 nt, Human
gcugucacucaccaggccugca

SEQ ID NO: 778095 - RNA, 22 nt, Human
cuccagguaguuauuucaagaa

SEQ ID NO: 778096 - RNA, 22 nt, Human
cugggagggguagccaauccua

SEQ ID NO: 778097 - RNA, 22 nt, Human
aaauagcuguauuuacccugua

SEQ ID NO: 778098 - RNA, 16 nt, Human
ggcuuuaauuuauccc

SEQ ID NO: 778099 - RNA, 22 nt, Human
caguccugggcaggucaggcca

SEQ ID NO: 778100 - RNA, 22 nt, Human
ugccaagugcuuacuuggcccu

SEQ ID NO: 778101 - RNA, 22 nt, Human
ggaaaggggccuggaucuuuug

SEQ ID NO: 778102 - RNA, 22 nt, Human
uuuacuuucucaaguauauagg

SEQ ID NO: 778103 - RNA, 22 nt, Human
aacuauacucuguaaaugugcu

SEQ ID NO: 778104 - RNA, 23 nt, Human
ugcugcccugccuucagcucucc

SEQ ID NO: 778105 - RNA, 22 nt, Human
ccugcagguugcagaggcggaa

SEQ ID NO: 778106 - RNA, 22 nt, Human
augagagacuguguguugggag

SEQ ID NO: 778107 - RNA, 22 nt, Human
ucagcaaugugauacugugcaa

SEQ ID NO: 778108 - RNA, 22 nt, Human
ggcaggugugagcuguaaagga

SEQ ID NO: 778109 - RNA, 22 nt, Human
uuccagagaggcucauguuccc

SEQ ID NO: 778110 - RNA, 22 nt, Human
ccugcacagccuuggcugacac

SEQ ID NO: 778111 - RNA, 22 nt, Human
aggcaggcucuggguaugugca

SEQ ID NO: 778112 - RNA, 22 nt, Human
acagaacaagaccugcuuauug

SEQ ID NO: 778113 - RNA, 22 nt, Human
ucuuccuuuuguaccuucugaa

SEQ ID NO: 778114 - RNA, 22 nt, Human
gagugcugcuaaugcaagggug

SEQ ID NO: 778115 - RNA, 22 nt, Human
gacuucuauuaauaccucuacu

SEQ ID NO: 778116 - RNA, 22 nt, Human
ggcaggaagcucauguggacug

SEQ ID NO: 778117 - RNA, 22 nt, Human
gauuucuuugcaagcuguguuc

SEQ ID NO: 778118 - RNA, 22 nt, Human
uaauaauuggcuaacccuggga

SEQ ID NO: 778119 - RNA, 22 nt, Human
guaaagaaggcaaccugguuau

SEQ ID NO: 778120 - RNA, 22 nt, Human
aggcugccucugcaggaucccu

SEQ ID NO: 778121 - RNA, 22 nt, Human
agcaggguauguuagagcugua

SEQ ID NO: 778122 - RNA, 22 nt, Human
guacaauuccugucaagcuggc

SEQ ID NO: 778123 - RNA, 22 nt, Human
uaauuuuaugacaguguauuuu

SEQ ID NO: 778124 - RNA, 22 nt, Human
gugcugaacuauaaaaagcuuu

SEQ ID NO: 778125 - RNA, 22 nt, Human
gauucuuuacaucucugcugac

SEQ ID NO: 778126 - RNA, 22 nt, Human
aaggcugagccagggccccuau

SEQ ID NO: 778127 - RNA, 22 nt, Human
uuuucauuuacauuagggaaga

SEQ ID NO: 778128 - RNA, 20 nt, Human
agguuccuuuguggagaauu

SEQ ID NO: 778129 - RNA, 22 nt, Human
aagugugagacacacaaaauua

SEQ ID NO: 778130 - RNA, 22 nt, Human
gcugccuggagcucagccugcc

SEQ ID NO: 778131 - RNA, 22 nt, Human
ggccaccuuccuguggucucug

SEQ ID NO: 778132 - RNA, 22 nt, Human
cagaagggacaggguuuguaga

SEQ ID NO: 778133 - RNA, 22 nt, Human
cagcagaggugguucacauugu

SEQ ID NO: 778134 - RNA, 23 nt, Human
ggagccuggcauaugagacgcau

SEQ ID NO: 778135 - RNA, 22 nt, Human
guugcuuguuaguggugagguu

SEQ ID NO: 778136 - RNA, 22 nt, Human
gagcaccugcuaaaugacaguu

SEQ ID NO: 778137 - RNA, 21 nt, Human
auggaaaaacagguagagcau

SEQ ID NO: 778138 - RNA, 22 nt, Human
cuguguccuccccaucacuucu

SEQ ID NO: 778139 - RNA, 22 nt, Human
uagaaaagaauuuuauuugaua

SEQ ID NO: 778140 - RNA, 20 nt, Human
ugcauggcgcacaucugugg

SEQ ID NO: 778141 - RNA, 22 nt, Human
ggucuggccucgggcaccccca

SEQ ID NO: 778142 - RNA, 19 nt, Human
auccuaaauccaguuucua

SEQ ID NO: 778143 - RNA, 22 nt, Human
uacacaucacuguaucuuucag

SEQ ID NO: 778144 - RNA, 22 nt, Human
ucauuuacuguaggcaaaaauu

SEQ ID NO: 778145 - RNA, 22 nt, Human
augcacauuguagccacacaau

SEQ ID NO: 778146 - RNA, 22 nt, Human
gccgggaccaaggccacggagc

SEQ ID NO: 778147 - RNA, 23 nt, Human
gagugcagaauagacaugcagug

SEQ ID NO: 778148 - RNA, 22 nt, Human
acuauuagcauaucaugaaugg

SEQ ID NO: 778149 - RNA, 22 nt, Human
ccauggagcaccucacagaggc

SEQ ID NO: 778150 - RNA, 22 nt, Human
uuguggcucgugagauguuagg

SEQ ID NO: 778151 - RNA, 17 nt, Human
uagagcugguucaggag

SEQ ID NO: 778152 - RNA, 23 nt, Human
aagacuaauucuuaauugcuuag

SEQ ID NO: 778153 - RNA, 23 nt, Human
aagugguuuugaacccggacccu

SEQ ID NO: 778154 - RNA, 22 nt, Human
auuagagagagcauauuacugg

SEQ ID NO: 778155 - RNA, 22 nt, Human
ugcccuggugaagugcucuccu

SEQ ID NO: 778156 - RNA, 22 nt, Human
uuuaugacaagcauuacugauu

SEQ ID NO: 778157 - RNA, 22 nt, Human
aaggacaggcacagugguggag

SEQ ID NO: 778158 - RNA, 22 nt, Human
ucuggccugggccugccggugc

SEQ ID NO: 778159 - RNA, 19 nt, Human
guauauuuauauggcugua

SEQ ID NO: 778160 - RNA, 22 nt, Human
cggcagagcuuccugcucagcg

SEQ ID NO: 778161 - RNA, 22 nt, Human
gcagcaggauggccaauugcca

SEQ ID NO: 778162 - RNA, 22 nt, Human
cagcccugcagccauggccugu

SEQ ID NO: 778163 - RNA, 22 nt, Human
ggagccuguuaguugagugcuc

SEQ ID NO: 778164 - RNA, 22 nt, Human
agcagaugggagauggagcugc

SEQ ID NO: 778165 - RNA, 22 nt, Human
uuuucaugugaugugacauuuc

SEQ ID NO: 778166 - RNA, 22 nt, Human
gagaggagguggcuaugacagc

SEQ ID NO: 778167 - RNA, 22 nt, Human
ggugggcaggcgaggcccaggu

SEQ ID NO: 778168 - RNA, 22 nt, Human
ugagcuguauauuguuuuaaua

SEQ ID NO: 778169 - RNA, 23 nt, Human
ugaaauauucuuuugcaugagcu

SEQ ID NO: 778170 - RNA, 22 nt, Human
cagcccucagguccucagcagc

SEQ ID NO: 778171 - RNA, 22 nt, Human
ccaggaggaugaggggcauaga

SEQ ID NO: 778172 - RNA, 22 nt, Human
cuggcacagagacagaaggauu

SEQ ID NO: 778173 - RNA, 19 nt, Human
ggagccuggagcacgugcc

SEQ ID NO: 778174 - RNA, 22 nt, Human
cagcaccauuugcagccucuuu

SEQ ID NO: 778175 - RNA, 22 nt, Human
uagacaaaagggggcagauaug

SEQ ID NO: 778176 - RNA, 20 nt, Human
aauauaauucucugaauuua

SEQ ID NO: 778177 - RNA, 22 nt, Human
uuuucauuguuacuaugagcua

SEQ ID NO: 778178 - RNA, 22 nt, Human
aaacucuguagcuaaacauaau

SEQ ID NO: 778179 - RNA, 22 nt, Human
gacauuuagaagucuaauggcc

SEQ ID NO: 778180 - RNA, 22 nt, Human
uaauacuuaccuugcagagucu

SEQ ID NO: 778181 - RNA, 22 nt, Human
uucuucugacacugaugcugua

SEQ ID NO: 778182 - RNA, 23 nt, Human
ugcagcaggguggucuacuucuc

SEQ ID NO: 778183 - RNA, 22 nt, Human
acaggugguaaaauggacuguc

SEQ ID NO: 778184 - RNA, 22 nt, Human
ggugcagaaggaagggagcugg

SEQ ID NO: 778185 - RNA, 22 nt, Human
uucagugucccuaguagaaguu

SEQ ID NO: 778186 - RNA, 22 nt, Human
auuugcuggugaaauagugaca

SEQ ID NO: 778187 - RNA, 22 nt, Human
agcugugugacucuaagcaagu

SEQ ID NO: 778188 - RNA, 22 nt, Human
gccuucucugugagcuccuagg

SEQ ID NO: 778189 - RNA, 22 nt, Human
gaacagcccuguuaagucuguu

SEQ ID NO: 778190 - RNA, 22 nt, Human
aauauagcucacuauaccaugg

SEQ ID NO: 778191 - RNA, 22 nt, Human
ccgggggaggcaagagacaugc

SEQ ID NO: 778192 - RNA, 22 nt, Human
ccaggaggcagagguuacagug

SEQ ID NO: 778193 - RNA, 22 nt, Human
ggagagaggcuggccgugauga

SEQ ID NO: 778194 - RNA, 22 nt, Human
agcuagagaaugacagagucug

SEQ ID NO: 778195 - RNA, 22 nt, Human
agagcugggacuuggacucaau

SEQ ID NO: 778196 - RNA, 22 nt, Human
cugcaggggaccaaagucugac

SEQ ID NO: 778197 - RNA, 22 nt, Human
ugaucccuggacuugaguaagu

SEQ ID NO: 778198 - RNA, 22 nt, Human
agacagugaggcagagcuuccg

SEQ ID NO: 778199 - RNA, 22 nt, Human
gaggccaggguaccaucaacau

SEQ ID NO: 778200 - RNA, 22 nt, Human
aguucucagaauugcaccucaa

SEQ ID NO: 778201 - RNA, 22 nt, Human
aguguuuacagaguaguggaaa

SEQ ID NO: 778202 - RNA, 22 nt, Human
ggggaagaaccgggauucccau

SEQ ID NO: 778203 - RNA, 23 nt, Human
uuccugagugcuggagagagugc

SEQ ID NO: 778204 - RNA, 22 nt, Human
ucaggaguaaagacagaguucc

SEQ ID NO: 778205 - RNA, 22 nt, Human
uucugcuucacuggccuggagg

SEQ ID NO: 778206 - RNA, 22 nt, Human
acaguuuaugccucugagccug

SEQ ID NO: 778207 - RNA, 22 nt, Human
ucagaaaggaguuagaggucuc

SEQ ID NO: 778208 - RNA, 21 nt, Human
acaggcucacgauccauuucu

SEQ ID NO: 778209 - RNA, 22 nt, Human
agcugugauuauccacuggaau

SEQ ID NO: 778210 - RNA, 22 nt, Human
agggcacagccuaaagccuaug

SEQ ID NO: 778211 - RNA, 22 nt, Human
caccugcaaggagcuuucauuu

SEQ ID NO: 778212 - RNA, 22 nt, Human
ccagcagcucccucaggguccg

SEQ ID NO: 778213 - RNA, 22 nt, Human
uaguaaguucucgcauuguuau

SEQ ID NO: 778214 - RNA, 22 nt, Human
augacaguucuacacuuaaucu

SEQ ID NO: 778215 - RNA, 22 nt, Human
ggagccagaaaugcugugguug

SEQ ID NO: 778216 - RNA, 22 nt, Human
cuggcugcuggccugaggaugc

SEQ ID NO: 778217 - RNA, 22 nt, Human
caggauggucuucauuuggcuc

SEQ ID NO: 778218 - RNA, 22 nt, Human
uaggucccuucuguccuggucu

SEQ ID NO: 778219 - RNA, 22 nt, Human
gauguguagagggaauuucaaa

SEQ ID NO: 778220 - RNA, 21 nt, Human
agcugccacccuagcuucuga

SEQ ID NO: 778221 - RNA, 22 nt, Human
ucauccagagcuucauaaguaa

SEQ ID NO: 778222 - RNA, 22 nt, Human
aucucauuuugguuucuacuua

SEQ ID NO: 778223 - RNA, 22 nt, Human
agucccagagaggucggggcca

SEQ ID NO: 778224 - RNA, 22 nt, Human
cacaaauaccaguuuccuaaca

SEQ ID NO: 778225 - RNA, 21 nt, Human
agcugcuguggccagaaucca

SEQ ID NO: 778226 - RNA, 22 nt, Human
ccugcucuuauagcuguuucca

SEQ ID NO: 778227 - RNA, 22 nt, Human
uugcauauauuucuaaggaggu

SEQ ID NO: 778228 - RNA, 22 nt, Human
aggaagcuggugugaggaugaa

SEQ ID NO: 778229 - RNA, 22 nt, Human
aggaucuugcuguagaggauag

SEQ ID NO: 778230 - RNA, 23 nt, Human
auuacaugagcaaauauagcuau

SEQ ID NO: 778231 - RNA, 22 nt, Human
acaguuuagagcaugaugacca

SEQ ID NO: 778232 - RNA, 18 nt, Human
uggcagggaggaaauaua

SEQ ID NO: 778233 - RNA, 22 nt, Human
acuuccuugucaggugcaucau

SEQ ID NO: 778234 - RNA, 22 nt, Human
aaggccaggagacuuggaguca

SEQ ID NO: 778235 - RNA, 22 nt, Human
aaugaugggaaggagaaaagca

SEQ ID NO: 778236 - RNA, 21 nt, Human
uggaccuguccuucucgcugu

SEQ ID NO: 778237 - RNA, 22 nt, Human
cccacaggcuagggguagggca

SEQ ID NO: 778238 - RNA, 22 nt, Human
ucucucagacuccccaugguuu

SEQ ID NO: 778239 - RNA, 22 nt, Human
agacagcugcucgcagagcuau

SEQ ID NO: 778240 - RNA, 22 nt, Human
uuuguagaacuguagaacaaug

SEQ ID NO: 778241 - RNA, 22 nt, Human
uucuaacucaaagcuucuuuca

SEQ ID NO: 778242 - RNA, 17 nt, Human
gagauggguggaucacc

SEQ ID NO: 778243 - RNA, 22 nt, Human
aaucacauuuacauugcuaauu

SEQ ID NO: 778244 - RNA, 22 nt, Human
auauuaauuauuuacacaugag

SEQ ID NO: 778245 - RNA, 22 nt, Human
cauucauuuacuuucaacagcu

SEQ ID NO: 778246 - RNA, 22 nt, Human
ugcagguaaauuuguggaggau

SEQ ID NO: 778247 - RNA, 22 nt, Human
auuauucaaauucccacuauac

SEQ ID NO: 778248 - RNA, 22 nt, Human
cucuuaguuuguaaaaauaauu

SEQ ID NO: 778249 - RNA, 22 nt, Human
agcugcucccuauccuuuccuu

SEQ ID NO: 778250 - RNA, 18 nt, Human
ucccuccugccugcuucc

SEQ ID NO: 778251 - RNA, 22 nt, Human
aggagauuguacugucaucacu

SEQ ID NO: 778252 - RNA, 19 nt, Human
uacuuauuagaaauauggg

SEQ ID NO: 778253 - RNA, 22 nt, Human
cucaugucaggggugucaaugu

SEQ ID NO: 778254 - RNA, 22 nt, Human
uccagaggggcagcccugugcu

SEQ ID NO: 778255 - RNA, 22 nt, Human
gauggcccgcuagcuggccucu

SEQ ID NO: 778256 - RNA, 22 nt, Human
uccaggagaggccugaccaggu

SEQ ID NO: 778257 - RNA, 22 nt, Human
cuuggcuccaaucccagcucug

SEQ ID NO: 778258 - RNA, 22 nt, Human
ucagcucaucugagugucagcg

SEQ ID NO: 778259 - RNA, 22 nt, Human
auaaaggcagaguagggaggaa

SEQ ID NO: 778260 - RNA, 22 nt, Human
aagcugcccuguguuagaguuc

SEQ ID NO: 778261 - RNA, 22 nt, Human
ccuggaggcucugggagggcag

SEQ ID NO: 778262 - RNA, 22 nt, Human
acaggcugagcguccaucuuca

SEQ ID NO: 778263 - RNA, 22 nt, Human
agaguucaguuguagccauauu

SEQ ID NO: 778264 - RNA, 22 nt, Human
ucuguucuuguccccacuucag

SEQ ID NO: 778265 - RNA, 22 nt, Human
aagaugcuaauuguggaaguug

SEQ ID NO: 778266 - RNA, 20 nt, Human
gaaggcaaugguuuggcaca

SEQ ID NO: 778267 - RNA, 22 nt, Human
caauagugucugcuuguuucua

SEQ ID NO: 778268 - RNA, 22 nt, Human
ucaguaaaguucuuucuugcug

SEQ ID NO: 778269 - RNA, 22 nt, Human
caggggcucugagauugucuaa

SEQ ID NO: 778270 - RNA, 22 nt, Human
gacccaggccuggggcuuaagg

SEQ ID NO: 778271 - RNA, 22 nt, Human
aaacaauguagauuaccauuua

SEQ ID NO: 778272 - RNA, 22 nt, Human
cugggagcccgcguccuggugg

SEQ ID NO: 778273 - RNA, 22 nt, Human
aggacagagccugugcagaccg

SEQ ID NO: 778274 - RNA, 22 nt, Human
aauacauaauaaguuuugucug

SEQ ID NO: 778275 - RNA, 22 nt, Human
caugaucagaaagagaagcuag

SEQ ID NO: 778276 - RNA, 22 nt, Human
ucauuuaucgcugccuuuuaaa

SEQ ID NO: 778277 - RNA, 22 nt, Human
ccauaagguugaaaacuguaca

SEQ ID NO: 778278 - RNA, 22 nt, Human
agaguucugaauuuuauucucu

SEQ ID NO: 778279 - RNA, 22 nt, Human
ugcaggaguuccccucugccug

SEQ ID NO: 778280 - RNA, 22 nt, Human
uuuggacuaucuguguggcuuu

SEQ ID NO: 778281 - RNA, 23 nt, Human
aggcuuccuaucuuagagcuggg

SEQ ID NO: 778282 - RNA, 21 nt, Human
ggacacugauaaucuuguugc

SEQ ID NO: 778283 - RNA, 22 nt, Human
auucuucacuguuucagaauga

SEQ ID NO: 778284 - RNA, 22 nt, Human
cugccaggcacgugcagcauca

SEQ ID NO: 778285 - RNA, 22 nt, Human
cccuuggaggaagcucuaggcu

SEQ ID NO: 778286 - RNA, 22 nt, Human
aucugcuugcccucuuaggacc

SEQ ID NO: 778287 - RNA, 22 nt, Human
ggaaaauacugauucaugccau

SEQ ID NO: 778288 - RNA, 22 nt, Human
uagcucuucaaucacugucucc

SEQ ID NO: 778289 - RNA, 22 nt, Human
gcaguuguaauaugaugugagg

SEQ ID NO: 778290 - RNA, 22 nt, Human
guagcagguauucuggugugag

SEQ ID NO: 778291 - RNA, 21 nt, Human
ugggccagaucugaguuucua

SEQ ID NO: 778292 - RNA, 22 nt, Human
cuuccugcccacuuccugcugg

SEQ ID NO: 778293 - RNA, 22 nt, Human
acaaauccagugaacuccagug

SEQ ID NO: 778294 - RNA, 22 nt, Human
acagggugaaugugacauuauc

SEQ ID NO: 778295 - RNA, 22 nt, Human
uccagcccgggggcaggugacc

SEQ ID NO: 778296 - RNA, 22 nt, Human
acauaaaggugacuaacaucuu

SEQ ID NO: 778297 - RNA, 22 nt, Human
ugucucuccacacagccagugc

SEQ ID NO: 778298 - RNA, 22 nt, Human
ugggcucagucugcaccugcgg

SEQ ID NO: 778299 - RNA, 22 nt, Human
ucagcaggcacaccaaaaacug

SEQ ID NO: 778300 - RNA, 21 nt, Human
ugcaccugugccccauccuuc

SEQ ID NO: 778301 - RNA, 22 nt, Human
aaaagacauaugugggcauucu

SEQ ID NO: 778302 - RNA, 22 nt, Human
gcacugugcuuaguucacuauu

SEQ ID NO: 778303 - RNA, 22 nt, Human
uucggcuucuuagaggcgcucc

SEQ ID NO: 778304 - RNA, 22 nt, Human
aaaugguaagacaacacauuau

SEQ ID NO: 778305 - RNA, 22 nt, Human
auaaaaaugagggcgguagcua

SEQ ID NO: 778306 - RNA, 22 nt, Human
gagguuuuaggcugccauuauu

SEQ ID NO: 778307 - RNA, 22 nt, Human
uuccagcuuagagcaucauguu

SEQ ID NO: 778308 - RNA, 22 nt, Human
ugugcuauuacacauuuauuua

SEQ ID NO: 778309 - RNA, 20 nt, Human
agaucuuuucuauagaagug

SEQ ID NO: 778310 - RNA, 22 nt, Human
ucugcugaaucagauagcuaag

SEQ ID NO: 778311 - RNA, 22 nt, Human
ggcccagugucccggucguggc

SEQ ID NO: 778312 - RNA, 22 nt, Human
aaggcuuguagauuugggcuuu

SEQ ID NO: 778313 - RNA, 22 nt, Human
gcugggagaggcagcuuucgga

SEQ ID NO: 778314 - RNA, 22 nt, Human
guugggguccaaugaagcgagc

SEQ ID NO: 778315 - RNA, 22 nt, Human
ccccagcaggaauacagggguc

SEQ ID NO: 778316 - RNA, 22 nt, Human
agccagggacgcugcaggcuac

SEQ ID NO: 778317 - RNA, 19 nt, Human
acaaagugcgugcucuuuu

SEQ ID NO: 778318 - RNA, 22 nt, Human
ccagcagcuuuauuggcucucc

SEQ ID NO: 778319 - RNA, 22 nt, Human
aaauacuguugaaugaaguaag

SEQ ID NO: 778320 - RNA, 22 nt, Human
ugugauuagcugaauacacugg

SEQ ID NO: 778321 - RNA, 22 nt, Human
augcuauuuaccacacaucauu

SEQ ID NO: 778322 - RNA, 22 nt, Human
uucuucaaaacaacacuggccu

SEQ ID NO: 778323 - RNA, 22 nt, Human
acacacagcgccuaccaugugc

SEQ ID NO: 778324 - RNA, 22 nt, Human
uucuggagaggaacagaaaggu

SEQ ID NO: 778325 - RNA, 19 nt, Human
augcacagucauuuguaag

SEQ ID NO: 778326 - RNA, 22 nt, Human
aagauggcugcagcaauuccaa

SEQ ID NO: 778327 - RNA, 22 nt, Human
ggcaggcuugguggcaccgguu

SEQ ID NO: 778328 - RNA, 22 nt, Human
uuucaaugacacaaaagagaaa

SEQ ID NO: 778329 - RNA, 22 nt, Human
guuucuuaaaagaggaguuaga

SEQ ID NO: 778330 - RNA, 22 nt, Human
gugaauaauuuuuuaguauaag

SEQ ID NO: 778331 - RNA, 22 nt, Human
uugauuaaacaggcauauucaa

SEQ ID NO: 778332 - RNA, 22 nt, Human
uuucuuuuacaguguggcuauu

SEQ ID NO: 778333 - RNA, 22 nt, Human
gugucauguagaaauugaugaa

SEQ ID NO: 778334 - RNA, 22 nt, Human
gggcgagggcgaaagcgagagc

SEQ ID NO: 778335 - RNA, 22 nt, Human
uugcagggauaaaacaagugaa

SEQ ID NO: 778336 - RNA, 22 nt, Human
gagugcaguaugagaggcugcu

SEQ ID NO: 778337 - RNA, 22 nt, Human
gggagggccaggcucacccagg

SEQ ID NO: 778338 - RNA, 22 nt, Human
aguaggacuagggguugaggca

SEQ ID NO: 778339 - RNA, 22 nt, Human
aggccugccuggaucacacaga

SEQ ID NO: 778340 - RNA, 22 nt, Human
auuagcugaccucuaaggagcc

SEQ ID NO: 778341 - RNA, 22 nt, Human
uguccaggacccuauucucacu

SEQ ID NO: 778342 - RNA, 22 nt, Human
ccuggacagggccaggccaugc

SEQ ID NO: 778343 - RNA, 22 nt, Human
cuuggucuacuagagaaaaaga

SEQ ID NO: 778344 - RNA, 22 nt, Human
cacauaauugaacgugaugagu

SEQ ID NO: 778345 - RNA, 22 nt, Human
ugcauagaggauccaguguggu

SEQ ID NO: 778346 - RNA, 22 nt, Human
uugucuguaaagacggccacca

SEQ ID NO: 778347 - RNA, 22 nt, Human
gggaagggagggaccucagucu

SEQ ID NO: 778348 - RNA, 22 nt, Human
guggagcaugugaggacugagu

SEQ ID NO: 778349 - RNA, 22 nt, Human
gcccaggggaguagucaauuua

SEQ ID NO: 778350 - RNA, 22 nt, Human
ucauaauuguauacauuuaugg

SEQ ID NO: 778351 - RNA, 22 nt, Human
caagucaaagacuagaacuagu

SEQ ID NO: 778352 - RNA, 20 nt, Human
ucuaggcaggcaggcucgug

SEQ ID NO: 778353 - RNA, 22 nt, Human
gugcugccugccagcuucuggg

SEQ ID NO: 778354 - RNA, 22 nt, Human
agaggccaguggcugugcuguc

SEQ ID NO: 778355 - RNA, 22 nt, Human
augaggcagaaaaaagucggag

SEQ ID NO: 778356 - RNA, 22 nt, Human
ccuggcacagauccuucauaca

SEQ ID NO: 778357 - RNA, 21 nt, Human
ugaaacuaccuacaagcuacc

SEQ ID NO: 778358 - RNA, 22 nt, Human
ucuucuuuuugucccacagaau

SEQ ID NO: 778359 - RNA, 22 nt, Human
aguccuuugggaaaaaugacua

SEQ ID NO: 778360 - RNA, 22 nt, Human
agcauuccagugcacaguagaa

SEQ ID NO: 778361 - RNA, 22 nt, Human
agagggugcuggagagacauug

SEQ ID NO: 778362 - RNA, 22 nt, Human
agguaaugcaacuacuuugcua

SEQ ID NO: 778363 - RNA, 22 nt, Human
agcuccaggauaagacaggugc

SEQ ID NO: 778364 - RNA, 22 nt, Human
agucaggaaccucagcaagucu

SEQ ID NO: 778365 - RNA, 22 nt, Human
acauuuauauaacucacuagga

SEQ ID NO: 778366 - RNA, 22 nt, Human
acagucauagcagccuuuguua

SEQ ID NO: 778367 - RNA, 22 nt, Human
aaaguacagauggugagguugg

SEQ ID NO: 778368 - RNA, 22 nt, Human
aaaggcuaugagauagaagaua

SEQ ID NO: 778369 - RNA, 22 nt, Human
ucaggcuuuuccugccuccuac

SEQ ID NO: 778370 - RNA, 22 nt, Human
gcugcucugugacagccuccgg

SEQ ID NO: 778371 - RNA, 22 nt, Human
cuuccuaaaagcuucaagagaa

SEQ ID NO: 778372 - RNA, 22 nt, Human
uuauucaggaagguguuacuua

SEQ ID NO: 778373 - RNA, 22 nt, Human
augacacauuugugcuguugaa

SEQ ID NO: 778374 - RNA, 22 nt, Human
uacuucccacuggggucuacca

SEQ ID NO: 778375 - RNA, 22 nt, Human
uaggaaaugcuccauugcauaa

SEQ ID NO: 778376 - RNA, 22 nt, Human
acucugggcuuugauuuguuac

SEQ ID NO: 778377 - RNA, 22 nt, Human
aguagauuuuugaauguaaguu

SEQ ID NO: 778378 - RNA, 22 nt, Human
aaaugccuguguaaauucuagc

SEQ ID NO: 778379 - RNA, 22 nt, Human
ccaaggcaaugugcagcuggug

SEQ ID NO: 778380 - RNA, 18 nt, Human
uguagaaaagauaggaau

SEQ ID NO: 778381 - RNA, 22 nt, Human
uaaugaacacagaauuucacuu

SEQ ID NO: 778382 - RNA, 19 nt, Human
gaggcaguagucaaagcuu

SEQ ID NO: 778383 - RNA, 22 nt, Human
uaguaaacaggcaagggaccac

SEQ ID NO: 778384 - RNA, 22 nt, Human
gccuuugcaccaucagugcaau

SEQ ID NO: 778385 - RNA, 21 nt, Human
agcuguggcgaggggaacaug

SEQ ID NO: 778386 - RNA, 17 nt, Human
auccccagcaucuagaa

SEQ ID NO: 778387 - RNA, 22 nt, Human
uucucuggaacugaaacaagau

SEQ ID NO: 778388 - RNA, 22 nt, Human
cugggaguugacgaggcuugua

SEQ ID NO: 778389 - RNA, 22 nt, Human
ugucugaacccuggcccugccu

SEQ ID NO: 778390 - RNA, 22 nt, Human
aggagggaauaagaaagaguca

SEQ ID NO: 778391 - RNA, 22 nt, Human
gcccugugguuccaggaagcaa

SEQ ID NO: 778392 - RNA, 22 nt, Human
cuuccagugcauagguagauca

SEQ ID NO: 778393 - RNA, 22 nt, Human
ugcagcauuugcugaagcagga

SEQ ID NO: 778394 - RNA, 22 nt, Human
ucucaucauuccuucaaagccc

SEQ ID NO: 778395 - RNA, 22 nt, Human
gcacucugugaucugcagagcc

SEQ ID NO: 778396 - RNA, 22 nt, Human
uacagaaacagcgugguuagaa

SEQ ID NO: 778397 - RNA, 22 nt, Human
uggcagguggcacagccuggga

SEQ ID NO: 778398 - RNA, 22 nt, Human
agccaaagugguauauagggaa

SEQ ID NO: 778399 - RNA, 22 nt, Human
ugaaggcagcaugcacacuagu

SEQ ID NO: 778400 - RNA, 22 nt, Human
uccagggcagugacuacagcgg

SEQ ID NO: 778401 - RNA, 22 nt, Human
gcuggcaaugguguggucuggu

SEQ ID NO: 778402 - RNA, 22 nt, Human
gugggcaucuccuuggaagcca

SEQ ID NO: 778403 - RNA, 17 nt, Human
ucagcaaagacaaagga

SEQ ID NO: 778404 - RNA, 22 nt, Human
acaaaguuucuucuaacaucug

SEQ ID NO: 778405 - RNA, 22 nt, Human
caaugucagagaagcucauauc

SEQ ID NO: 778406 - RNA, 22 nt, Human
uggcccugcuggacacgccugc

SEQ ID NO: 778407 - RNA, 22 nt, Human
ggagaagaggagcuggaagccu

SEQ ID NO: 778408 - RNA, 22 nt, Human
ccagaggaaaaauaucucccua

SEQ ID NO: 778409 - RNA, 22 nt, Human
uaugaacugugagugugauggg

SEQ ID NO: 778410 - RNA, 22 nt, Human
gaaagugcagucagacaaggca

SEQ ID NO: 778411 - RNA, 22 nt, Human
caucaagagucuuacuaucagu

SEQ ID NO: 778412 - RNA, 22 nt, Human
cacaaugauuugguucaaaaau

SEQ ID NO: 778413 - RNA, 22 nt, Human
ucagcuuucucaaagaagcugg

SEQ ID NO: 778414 - RNA, 22 nt, Human
ucagcaucagguugucugaauu

SEQ ID NO: 778415 - RNA, 22 nt, Human
ucucuggagggcuccaggcggg

SEQ ID NO: 778416 - RNA, 22 nt, Human
ugucuaauggcaauuucaugug

SEQ ID NO: 778417 - RNA, 22 nt, Human
ucuagacaaugcacuguaagga

SEQ ID NO: 778418 - RNA, 22 nt, Human
augacagugggucuugcaaaga

SEQ ID NO: 778419 - RNA, 22 nt, Human
ugggcaagggacaggccuggcu

SEQ ID NO: 778420 - RNA, 22 nt, Human
uagcauaauuuguagaaaauca

SEQ ID NO: 778421 - RNA, 19 nt, Human
ggauccagaggaucugcca

SEQ ID NO: 778422 - RNA, 22 nt, Human
agugcauguccaguaguuuaug

SEQ ID NO: 778423 - RNA, 22 nt, Human
uuuucuaaaagaagucacugau

SEQ ID NO: 778424 - RNA, 22 nt, Human
ucugagaaaucaguggugaaua

SEQ ID NO: 778425 - RNA, 22 nt, Human
ggcugcucugcacaggggcugg

SEQ ID NO: 778426 - RNA, 22 nt, Human
gggcagcucggaagugggaaag

SEQ ID NO: 778427 - RNA, 22 nt, Human
ggucagguagcucugacaggcc

SEQ ID NO: 778428 - RNA, 22 nt, Human
cuuggguguuuuaaaacuagau

SEQ ID NO: 778429 - RNA, 22 nt, Human
uuagaaucagguguuauaauca

SEQ ID NO: 778430 - RNA, 22 nt, Human
aaggaucauaguaaacauugau

SEQ ID NO: 778431 - RNA, 22 nt, Human
ccuuggcuguguugccugcccu

SEQ ID NO: 778432 - RNA, 22 nt, Human
uucugggcacacaggcccuggu

SEQ ID NO: 778433 - RNA, 22 nt, Human
uacuuuggauccuuacaauagc

SEQ ID NO: 778434 - RNA, 22 nt, Human
auagauguguguaaguacauaa

SEQ ID NO: 778435 - RNA, 22 nt, Human
uuggccucauggacagcucauc

SEQ ID NO: 778436 - RNA, 22 nt, Human
acauaauagguaccugaauaau

SEQ ID NO: 778437 - RNA, 22 nt, Human
ucugucauccaggcuggaauau

SEQ ID NO: 778438 - RNA, 22 nt, Human
caagccucagaaucuucuccau

SEQ ID NO: 778439 - RNA, 22 nt, Human
cugugagcuggguggccaggac

SEQ ID NO: 778440 - RNA, 22 nt, Human
guccaugacugugacucacaug

SEQ ID NO: 778441 - RNA, 22 nt, Human
cuuuugauggaguucaagaagc

SEQ ID NO: 778442 - RNA, 22 nt, Human
aauuggcaagcagauuuccacu

SEQ ID NO: 778443 - RNA, 22 nt, Human
acagagcagguccagaagugcc

SEQ ID NO: 778444 - RNA, 18 nt, Human
uggcuucugaacaacugc

SEQ ID NO: 778445 - RNA, 22 nt, Human
ccuggccucuccgaguaaccug

SEQ ID NO: 778446 - RNA, 23 nt, Human
agcuccagcugacgugggcagcc

SEQ ID NO: 778447 - RNA, 22 nt, Human
acugggcuguuuuuugagugga

SEQ ID NO: 778448 - RNA, 21 nt, Human
aauaaaacaguuggugucaau

SEQ ID NO: 778449 - RNA, 20 nt, Human
gggagacagggccagugucc

SEQ ID NO: 778450 - RNA, 22 nt, Human
acaguguuacuugauaguguau

SEQ ID NO: 778451 - RNA, 22 nt, Human
agggacuugaugucagggagau

SEQ ID NO: 778452 - RNA, 22 nt, Human
agcagagcagaaugugaaggug

SEQ ID NO: 778453 - RNA, 21 nt, Human
ggccuaggggcagauggugcu

SEQ ID NO: 778454 - RNA, 22 nt, Human
gggcaaguccggugcccagagc

SEQ ID NO: 778455 - RNA, 22 nt, Human
uuacuuuaugugauggauuagu

SEQ ID NO: 778456 - RNA, 22 nt, Human
ggaacuccugcuccaagcagcu

SEQ ID NO: 778457 - RNA, 22 nt, Human
auguuuuauguuccacucaagg

SEQ ID NO: 778458 - RNA, 22 nt, Human
auuuucauggcuucugcucagu

SEQ ID NO: 778459 - RNA, 22 nt, Human
agggucagugaugagggagccc

SEQ ID NO: 778460 - RNA, 22 nt, Human
ugcugagaggaaagaaugcaca

SEQ ID NO: 778461 - RNA, 22 nt, Human
gcucagagggaacaaggggcug

SEQ ID NO: 778462 - RNA, 22 nt, Human
agggucuguauuucuggcaagc

SEQ ID NO: 778463 - RNA, 22 nt, Human
uugucuguccaggcaccccaag

SEQ ID NO: 778464 - RNA, 22 nt, Human
uugagcaauuaggaaauaaaga

SEQ ID NO: 778465 - RNA, 22 nt, Human
gcagcagagaccccaggaagga

SEQ ID NO: 778466 - RNA, 22 nt, Human
cccaagggaugcuugaguaguu

SEQ ID NO: 778467 - RNA, 22 nt, Human
ggcagagguagcuggaaccagg

SEQ ID NO: 778468 - RNA, 22 nt, Human
ggucagaaggcaguuaaacaaa

SEQ ID NO: 778469 - RNA, 21 nt, Human
uccagggaauuucaacuuuua

SEQ ID NO: 778470 - RNA, 22 nt, Human
gagaggcuccgccacugcucag

SEQ ID NO: 778471 - RNA, 22 nt, Human
uucaaaaugcacaaagggcuag

SEQ ID NO: 778472 - RNA, 22 nt, Human
ucuccuggauagauacuaucca

SEQ ID NO: 778473 - RNA, 22 nt, Human
ucccugagagcacuggggagcc

SEQ ID NO: 778474 - RNA, 22 nt, Human
ugaguacucuucucacuacacc

SEQ ID NO: 778475 - RNA, 22 nt, Human
ucauuuguucaucugcucuucu

SEQ ID NO: 778476 - RNA, 22 nt, Human
ugccugucuuaauaucuggaaa

SEQ ID NO: 778477 - RNA, 20 nt, Human
ucucugaguuuccuaauuug

SEQ ID NO: 778478 - RNA, 22 nt, Human
caggucugaagagucacaugcc

SEQ ID NO: 778479 - RNA, 22 nt, Human
gcccaggauucuuucuuccuua

SEQ ID NO: 778480 - RNA, 22 nt, Human
gaaaauaggcagaugcauugua

SEQ ID NO: 778481 - RNA, 22 nt, Human
uaauauguguuacugacuuuuu

SEQ ID NO: 778482 - RNA, 22 nt, Human
cuucacagcaugagcuuuggag

SEQ ID NO: 778483 - RNA, 22 nt, Human
aacauucuaugugcauucagaa

SEQ ID NO: 778484 - RNA, 22 nt, Human
ugaagauuuaagcaucucaauu

SEQ ID NO: 778485 - RNA, 21 nt, Human
gcuuuuuguauggcccaggaa

SEQ ID NO: 778486 - RNA, 22 nt, Human
agaggaucaucuaguuugacuc

SEQ ID NO: 778487 - RNA, 23 nt, Human
agguagguuauugcugcuaccug

SEQ ID NO: 778488 - RNA, 22 nt, Human
gucuggggguccgggugccugc

SEQ ID NO: 778489 - RNA, 22 nt, Human
auugugcaauguuuuacaauuu

SEQ ID NO: 778490 - RNA, 22 nt, Human
accucugccaagaugugcuccc

SEQ ID NO: 778491 - RNA, 22 nt, Human
agcaggcuaggaaccucacugc

SEQ ID NO: 778492 - RNA, 22 nt, Human
caguaggagguucugagguucu

SEQ ID NO: 778493 - RNA, 22 nt, Human
caguggguggcuaaguggcuga

SEQ ID NO: 778494 - RNA, 22 nt, Human
aggccagugccuuuccagggcu

SEQ ID NO: 778495 - RNA, 22 nt, Human
cuuuacacaaugauuuucuuua

SEQ ID NO: 778496 - RNA, 22 nt, Human
ugcaaggcugccucugaggacc

SEQ ID NO: 778497 - RNA, 22 nt, Human
uucaaacacagacagcagcaug

SEQ ID NO: 778498 - RNA, 21 nt, Human
guacacacagguggaugggcu

SEQ ID NO: 778499 - RNA, 22 nt, Human
agucagaugaugugaggagugg

SEQ ID NO: 778500 - RNA, 22 nt, Human
auaauauuuggauaggacagua

SEQ ID NO: 778501 - RNA, 22 nt, Human
gauaaacacugaugauaugggg

SEQ ID NO: 778502 - RNA, 22 nt, Human
uagguucucuauugcccccaaa

SEQ ID NO: 778503 - RNA, 22 nt, Human
gguggcaccuugaucuuggacu

SEQ ID NO: 778504 - RNA, 22 nt, Human
aguccugucucucccagggcca

SEQ ID NO: 778505 - RNA, 22 nt, Human
cagccaggacagggaaacuagu

SEQ ID NO: 778506 - RNA, 23 nt, Human
ccuggcuggauucucugcauuca

SEQ ID NO: 778507 - RNA, 20 nt, Human
ccagguggugccuggagagg

SEQ ID NO: 778508 - RNA, 22 nt, Human
ugagucacauccauuuuugugu

SEQ ID NO: 778509 - RNA, 22 nt, Human
uuuaguauauaaaaagagaagu

SEQ ID NO: 778510 - RNA, 22 nt, Human
ugagacaguucugcagcugggu

SEQ ID NO: 778511 - RNA, 22 nt, Human
cauacuuucuuuuucacgcaua

SEQ ID NO: 778512 - RNA, 22 nt, Human
ccugaggucaugcauuuccaac

SEQ ID NO: 778513 - RNA, 22 nt, Human
cuggagagauccuccugaaaaa

SEQ ID NO: 778514 - RNA, 22 nt, Human
ucacaguguuggaaucagagcu

SEQ ID NO: 778515 - RNA, 22 nt, Human
aguauauugguguuauuccuca

SEQ ID NO: 778516 - RNA, 22 nt, Human
uugcaaaugugaauaauuacac

SEQ ID NO: 778517 - RNA, 22 nt, Human
cagaguaaaccugucaucaaga

SEQ ID NO: 778518 - RNA, 22 nt, Human
ugcuuggcuagcuuggcagcuc

SEQ ID NO: 778519 - RNA, 22 nt, Human
uccuaguucucugccagucgcu

SEQ ID NO: 778520 - RNA, 22 nt, Human
agcccuccucacaucagcgucc

SEQ ID NO: 778521 - RNA, 22 nt, Human
ucccaggauguuggcggcaggu

SEQ ID NO: 778522 - RNA, 22 nt, Human
cccugagcaacaaacugaauac

SEQ ID NO: 778523 - RNA, 22 nt, Human
ucccaaagcuacucuucugacu

SEQ ID NO: 778524 - RNA, 22 nt, Human
uuuacaauagggucugaaugaa

SEQ ID NO: 778525 - RNA, 22 nt, Human
gaaacauugagcagaaggagaa

SEQ ID NO: 778526 - RNA, 22 nt, Human
ggggcgcucggagggauccccu

SEQ ID NO: 778527 - RNA, 22 nt, Human
gaucuugaaauaucuuuuccua

SEQ ID NO: 778528 - RNA, 22 nt, Human
ucuuuucacagacaaauggaga

SEQ ID NO: 778529 - RNA, 22 nt, Human
cagcuuuuggcaggaugaccag

SEQ ID NO: 778530 - RNA, 22 nt, Human
aauguguagcauuuaaugcagu

SEQ ID NO: 778531 - RNA, 22 nt, Human
aucagaggaccuaguugggcag

SEQ ID NO: 778532 - RNA, 22 nt, Human
uuuggcugagaaguugugcuuu

SEQ ID NO: 778533 - RNA, 22 nt, Human
acagugaucaguuacugucugu

SEQ ID NO: 778534 - RNA, 22 nt, Human
acugggaagcuguuuugcuuuu

SEQ ID NO: 778535 - RNA, 22 nt, Human
agcucuuuagagucucccuucu

SEQ ID NO: 778536 - RNA, 22 nt, Human
aguuuacaugacguguauuuca

SEQ ID NO: 778537 - RNA, 22 nt, Human
aauugcauaaauuucauagcau

SEQ ID NO: 778538 - RNA, 22 nt, Human
agaagugagugugacucagcag

SEQ ID NO: 778539 - RNA, 22 nt, Human
uuuuaugcaaguuaugauuaaa

SEQ ID NO: 778540 - RNA, 22 nt, Human
uagaagauucuaaaguggagag

SEQ ID NO: 778541 - RNA, 22 nt, Human
uuucucaguuacuagcuguggu

SEQ ID NO: 778542 - RNA, 22 nt, Human
gcaggguccauggaggcagccc

SEQ ID NO: 778543 - RNA, 19 nt, Human
cauuuuaagcauccccagu

SEQ ID NO: 778544 - RNA, 22 nt, Human
ucuuuccuagaggcugaugagu

SEQ ID NO: 778545 - RNA, 22 nt, Human
aaaaucucauuaucaggaaggg

SEQ ID NO: 778546 - RNA, 22 nt, Human
gaaugcauuccacgguagugau

SEQ ID NO: 778547 - RNA, 20 nt, Human
caagcccucuuuagccugcc

SEQ ID NO: 778548 - RNA, 22 nt, Human
caggcugcagaggccuuucaug

SEQ ID NO: 778549 - RNA, 22 nt, Human
gcaggugaugugaugugagcau

SEQ ID NO: 778550 - RNA, 22 nt, Human
uuuccagauuaagauaccacuu

SEQ ID NO: 778551 - RNA, 22 nt, Human
aauauucaaguuauucuuucuu

SEQ ID NO: 778552 - RNA, 22 nt, Human
uaggaaauugacaccugcuuga

SEQ ID NO: 778553 - RNA, 22 nt, Human
gcacuugaucauuguuacagau

SEQ ID NO: 778554 - RNA, 17 nt, Human
ugggggcgccagggucu

SEQ ID NO: 778555 - RNA, 22 nt, Human
auggcaaaaacugcaguuaccu

SEQ ID NO: 778556 - RNA, 22 nt, Human
uuuuccagagcugucucuugca

SEQ ID NO: 778557 - RNA, 22 nt, Human
cacagcuugggcucugacaaua

SEQ ID NO: 778558 - RNA, 19 nt, Human
gggcagaauggcaucucag

SEQ ID NO: 778559 - RNA, 22 nt, Human
gccccagccaaggugacacgaa

SEQ ID NO: 778560 - RNA, 22 nt, Human
ugggcuagcagggaagagagac

SEQ ID NO: 778561 - RNA, 22 nt, Human
cacaugagugagaacaugcagu

SEQ ID NO: 778562 - RNA, 22 nt, Human
uuuggaauggaauagagauugc

SEQ ID NO: 778563 - RNA, 22 nt, Human
aaguacaugcuuuauucagagu

SEQ ID NO: 778564 - RNA, 22 nt, Human
cucugggaaguggagacuucag

SEQ ID NO: 778565 - RNA, 22 nt, Human
gccaaaguccuccagccaugca

SEQ ID NO: 778566 - RNA, 19 nt, Human
ucuggcuccugccaggcug

SEQ ID NO: 778567 - RNA, 18 nt, Human
gcaggccuagaacuuggu

SEQ ID NO: 778568 - RNA, 17 nt, Human
cagucgaggaggaccug

SEQ ID NO: 778569 - RNA, 20 nt, Human
agcuucugcugccuuucggc

SEQ ID NO: 778570 - RNA, 22 nt, Human
ucucuggcagacuggcugggcu

SEQ ID NO: 778571 - RNA, 22 nt, Human
uuuguuugaaagucucuacagc

SEQ ID NO: 778572 - RNA, 22 nt, Human
aaaguagcuuuguagguacagu

SEQ ID NO: 778573 - RNA, 18 nt, Human
cccagcuccacuucccuc

SEQ ID NO: 778574 - RNA, 22 nt, Human
aggccaagggcaaagcggagag

SEQ ID NO: 778575 - RNA, 22 nt, Human
aguguuccuugcuuucccagag

SEQ ID NO: 778576 - RNA, 22 nt, Human
cuggccaggccccuugcagggc

SEQ ID NO: 778577 - RNA, 22 nt, Human
agaagcagggcagggaaaagca

SEQ ID NO: 778578 - RNA, 22 nt, Human
caaaccuguccuuuugucuccu

SEQ ID NO: 778579 - RNA, 22 nt, Human
cuuuuuuccuaaggcaacauga

SEQ ID NO: 778580 - RNA, 22 nt, Human
cugcaggacagggaggagcaag

SEQ ID NO: 778581 - RNA, 22 nt, Human
aucccagauggaggcuggucac

SEQ ID NO: 778582 - RNA, 22 nt, Human
gauacacuggccaaguggagga

SEQ ID NO: 778583 - RNA, 22 nt, Human
gcugggcccagaucccaggauc

SEQ ID NO: 778584 - RNA, 22 nt, Human
ggcagcuccaaaaggaaacacu

SEQ ID NO: 778585 - RNA, 21 nt, Human
agaugcugugcuccaggagca

SEQ ID NO: 778586 - RNA, 22 nt, Human
gcugugcuugcaugagugucug

SEQ ID NO: 778587 - RNA, 22 nt, Human
cucuguccuaugcuugauagaa

SEQ ID NO: 778588 - RNA, 22 nt, Human
agguacagcaauauaagagguc

SEQ ID NO: 778589 - RNA, 22 nt, Human
gauucaaaaauaagcuccuauu

SEQ ID NO: 778590 - RNA, 20 nt, Human
cagaagcaaggcagguaccu

SEQ ID NO: 778591 - RNA, 22 nt, Human
ggcccuugcagcaggcgcuggc

SEQ ID NO: 778592 - RNA, 22 nt, Human
auuuuaguuuuagcauccaugc

SEQ ID NO: 778593 - RNA, 22 nt, Human
uuguaugaucaaaagaaaugua

SEQ ID NO: 778594 - RNA, 22 nt, Human
caccuguuagcucuaauuuucu

SEQ ID NO: 778595 - RNA, 22 nt, Human
aacuacagugggcagaggcaau

SEQ ID NO: 778596 - RNA, 22 nt, Human
cuauuuaugugcuauuuuguau

SEQ ID NO: 778597 - RNA, 20 nt, Human
ccagcuuucccugcagcauc

SEQ ID NO: 778598 - RNA, 22 nt, Human
agcccagcuuugaaccauauca

SEQ ID NO: 778599 - RNA, 22 nt, Human
gguguuaacuuguuuaugacaa

SEQ ID NO: 778600 - RNA, 22 nt, Human
cacaauaaauguuugcugauga

SEQ ID NO: 778601 - RNA, 22 nt, Human
aggcucauccccacaaagcaaa

SEQ ID NO: 778602 - RNA, 22 nt, Human
ggaggaaaugaaaggaggguuu

SEQ ID NO: 778603 - RNA, 22 nt, Human
acuugcaucuuagagacucacc

SEQ ID NO: 778604 - RNA, 20 nt, Human
ucauugcacauaauggaagc

SEQ ID NO: 778605 - RNA, 22 nt, Human
aauggcuuagugcuucacuucu

SEQ ID NO: 778606 - RNA, 22 nt, Human
cucugcuggccaugaagagaga

SEQ ID NO: 778607 - RNA, 22 nt, Human
cagagccaggguugcaccccug

SEQ ID NO: 778608 - RNA, 22 nt, Human
gcagagcugucuaagucacuuc

SEQ ID NO: 778609 - RNA, 22 nt, Human
ccugggagugugccaucucugu

SEQ ID NO: 778610 - RNA, 22 nt, Human
uagaaaguagccacuuacagag

SEQ ID NO: 778611 - RNA, 22 nt, Human
auggcucucuugaccuaggcac

SEQ ID NO: 778612 - RNA, 22 nt, Human
gggcuucucucaggggcaugag

SEQ ID NO: 778613 - RNA, 22 nt, Human
aaaccuuucucagugcuaaaau

SEQ ID NO: 778614 - RNA, 22 nt, Human
aaaaugcuauuucauggaggag

SEQ ID NO: 778615 - RNA, 18 nt, Human
aauuucuuugacaacuua

SEQ ID NO: 778616 - RNA, 19 nt, Human
ucugcagaaggcauacaug

SEQ ID NO: 778617 - RNA, 22 nt, Human
auuccuuuggacuccuccuugc

SEQ ID NO: 778618 - RNA, 22 nt, Human
guuucccagucugcagaguucu

SEQ ID NO: 778619 - RNA, 22 nt, Human
ccucggagcgggucagagaggg

SEQ ID NO: 778620 - RNA, 19 nt, Human
ugaccccacgcuccagagc

SEQ ID NO: 778621 - RNA, 22 nt, Human
aagggaaaucauauggugcagu

SEQ ID NO: 778622 - RNA, 22 nt, Human
auggccaagcaugccuguggcc

SEQ ID NO: 778623 - RNA, 22 nt, Human
ucauugcagacuaacaaucuca

SEQ ID NO: 778624 - RNA, 22 nt, Human
ggcucuggguaaggcguuugac

SEQ ID NO: 778625 - RNA, 22 nt, Human
uuugauuuacuauaagcagcac

SEQ ID NO: 778626 - RNA, 22 nt, Human
cacaggagguuaggaagugguc

SEQ ID NO: 778627 - RNA, 23 nt, Human
cacauggaggaccguucuuauaa

SEQ ID NO: 778628 - RNA, 22 nt, Human
aggggucuugaggacuccagca

SEQ ID NO: 778629 - RNA, 22 nt, Human
gccaggaaaagaagcuggugcu

SEQ ID NO: 778630 - RNA, 22 nt, Human
gcagagacuaguagugcagacu

SEQ ID NO: 778631 - RNA, 22 nt, Human
ugguccugaucaccgcugggca

SEQ ID NO: 778632 - RNA, 22 nt, Human
auauauaugcugauggcugcca

SEQ ID NO: 778633 - RNA, 22 nt, Human
agauuucagaugcucggcaguu

SEQ ID NO: 778634 - RNA, 22 nt, Human
aaagucaugaugaaccaccgua

SEQ ID NO: 778635 - RNA, 22 nt, Human
cuucuucaagagaaugggagac

SEQ ID NO: 778636 - RNA, 22 nt, Human
ucucuuagucuuauauguaaaa

SEQ ID NO: 778637 - RNA, 22 nt, Human
cagccaagaaagcagugcucca

SEQ ID NO: 778638 - RNA, 22 nt, Human
aauugacaaaucauacuuguau

SEQ ID NO: 778639 - RNA, 22 nt, Human
aguuuuguaauucucaaaaaua

SEQ ID NO: 778640 - RNA, 23 nt, Human
uccuucagagccucccuccaagc

SEQ ID NO: 778641 - RNA, 22 nt, Human
aauggcuuuugcacuuaaaucg

SEQ ID NO: 778642 - RNA, 22 nt, Human
uagcuauuugagcauauuccag

SEQ ID NO: 778643 - RNA, 22 nt, Human
aaagauguuaugaaauaacuau

SEQ ID NO: 778644 - RNA, 22 nt, Human
gugcccuccguguucauagagc

SEQ ID NO: 778645 - RNA, 22 nt, Human
uucacaggcuuggagguggggg

SEQ ID NO: 778646 - RNA, 22 nt, Human
aagccuggcacauuggagucug

SEQ ID NO: 778647 - RNA, 22 nt, Human
ucuguuuaaugggaaugauacu

SEQ ID NO: 778648 - RNA, 22 nt, Human
cagugaguaaguagacagcuua

SEQ ID NO: 778649 - RNA, 22 nt, Human
ucauuuucaaguuugaacagga

SEQ ID NO: 778650 - RNA, 22 nt, Human
uuuaguagaaugauacagggca

SEQ ID NO: 778651 - RNA, 22 nt, Human
gagugucuguauuuugggcaag

SEQ ID NO: 778652 - RNA, 22 nt, Human
cucacagauacggcuauuccug

SEQ ID NO: 778653 - RNA, 21 nt, Human
uucagcuuaugugucacuugc

SEQ ID NO: 778654 - RNA, 22 nt, Human
guacacacuguuugaucauuuc

SEQ ID NO: 778655 - RNA, 22 nt, Human
aaaguccuguuugaaggaccug

SEQ ID NO: 778656 - RNA, 22 nt, Human
ucagcugguguuucuucuccuu

SEQ ID NO: 778657 - RNA, 20 nt, Human
gucucaaguaucucacaguc

SEQ ID NO: 778658 - RNA, 22 nt, Human
uuacaguuuaguccaagccaga

SEQ ID NO: 778659 - RNA, 21 nt, Human
cugccaggauagcaugcaggc

SEQ ID NO: 778660 - RNA, 22 nt, Human
aggcugucucagccugcuugca

SEQ ID NO: 778661 - RNA, 22 nt, Human
aaacucugcacugcgguaaggu

SEQ ID NO: 778662 - RNA, 22 nt, Human
acauuugaggauguuaagaaug

SEQ ID NO: 778663 - RNA, 22 nt, Human
ugcuggaagggucggcgugggc

SEQ ID NO: 778664 - RNA, 22 nt, Human
gcugccucugcacagcucacuc

SEQ ID NO: 778665 - RNA, 22 nt, Human
acagauguaaucuauucacauu

SEQ ID NO: 778666 - RNA, 22 nt, Human
cuguccugcccacccugcaggg

SEQ ID NO: 778667 - RNA, 22 nt, Human
augcauguguguuuacaugcuu

SEQ ID NO: 778668 - RNA, 22 nt, Human
ggggccagcaauguugaggaau

SEQ ID NO: 778669 - RNA, 22 nt, Human
ucaaagcuuagauaauuucuuu

SEQ ID NO: 778670 - RNA, 22 nt, Human
ugucaugguagcugaaggaugu

SEQ ID NO: 778671 - RNA, 22 nt, Human
ucaagagaaggggaaauagacu

SEQ ID NO: 778672 - RNA, 22 nt, Human
agaaauugccagaaugucaggc

SEQ ID NO: 778673 - RNA, 22 nt, Human
ucauauuuaggccuuuaauuca

SEQ ID NO: 778674 - RNA, 22 nt, Human
auucugggacuccuuccucccc

SEQ ID NO: 778675 - RNA, 22 nt, Human
gaauaaacuccucagcuuccuu

SEQ ID NO: 778676 - RNA, 22 nt, Human
uaggcacaagaccaugcaaagg

SEQ ID NO: 778677 - RNA, 23 nt, Human
gugcaaagauauaccacauggcu

SEQ ID NO: 778678 - RNA, 22 nt, Human
aggguugccucugagugcuccg

SEQ ID NO: 778679 - RNA, 22 nt, Human
agggagcucuaaguagagggac

SEQ ID NO: 778680 - RNA, 22 nt, Human
auuuuaacccucuuauauauac

SEQ ID NO: 778681 - RNA, 22 nt, Human
gcaggauugggcagagggugaa

SEQ ID NO: 778682 - RNA, 20 nt, Human
aguggcaggcgaucauuacu

SEQ ID NO: 778683 - RNA, 23 nt, Human
aguacaauaaguauaauucuuuc

SEQ ID NO: 778684 - RNA, 22 nt, Human
ucuuauuggauaaaaggaaacc

SEQ ID NO: 778685 - RNA, 22 nt, Human
aggcgugggaggaucugaggcc

SEQ ID NO: 778686 - RNA, 22 nt, Human
cgccuggagaggaggcgacgcg

SEQ ID NO: 778687 - RNA, 22 nt, Human
ccugaaacaucuucuguaaaua

SEQ ID NO: 778688 - RNA, 21 nt, Human
ccuccaggugauuccgugcuc

SEQ ID NO: 778689 - RNA, 22 nt, Human
gcagcccucgcuagcucucccc

SEQ ID NO: 778690 - RNA, 22 nt, Human
aagagaauacaagcaggcagga

SEQ ID NO: 778691 - RNA, 22 nt, Human
gagggagugccagagggccagc

SEQ ID NO: 778692 - RNA, 22 nt, Human
cuuaauuggcuuauuuccucaa

SEQ ID NO: 778693 - RNA, 22 nt, Human
ggccaggaacuuuugggauggg

SEQ ID NO: 778694 - RNA, 22 nt, Human
uggggaagaauaauguauguac

SEQ ID NO: 778695 - RNA, 22 nt, Human
uggcuuccugcauggauccucu

SEQ ID NO: 778696 - RNA, 22 nt, Human
cuuuggcugggcaaagggaggu

SEQ ID NO: 778697 - RNA, 22 nt, Human
aaaugcacagagccuuagagau

SEQ ID NO: 778698 - RNA, 22 nt, Human
acagaggucaccuuuguaucuu

SEQ ID NO: 778699 - RNA, 22 nt, Human
auucaucaacugauagccauag

SEQ ID NO: 778700 - RNA, 22 nt, Human
agguggcucugacagcucuggu

SEQ ID NO: 778701 - RNA, 22 nt, Human
ucaggcucugccaccuagauua

SEQ ID NO: 778702 - RNA, 22 nt, Human
accuagaauuuaaaacauugcu

SEQ ID NO: 778703 - RNA, 22 nt, Human
gccuccaggguagaggaggaag

SEQ ID NO: 778704 - RNA, 22 nt, Human
guggauggugguccaguaucau

SEQ ID NO: 778705 - RNA, 22 nt, Human
aggcuguguggucaugguggcu

SEQ ID NO: 778706 - RNA, 22 nt, Human
gcagcaucuguacauagacgcu

SEQ ID NO: 778707 - RNA, 22 nt, Human
uuguacaaaggauuuggaagag

SEQ ID NO: 778708 - RNA, 22 nt, Human
uacugugacagaguacuuaaac

SEQ ID NO: 778709 - RNA, 22 nt, Human
uaaugucuuaguaccuuaauuu

SEQ ID NO: 778710 - RNA, 16 nt, Human
guaacauucuguagcc

SEQ ID NO: 778711 - RNA, 22 nt, Human
caaauacuacgauucuugcagu

SEQ ID NO: 778712 - RNA, 22 nt, Human
aguguccuuguuauuacugcuc

SEQ ID NO: 778713 - RNA, 23 nt, Human
uguuaauacaucugccacucauu

SEQ ID NO: 778714 - RNA, 22 nt, Human
cuugcaugcauuugaagaucau

SEQ ID NO: 778715 - RNA, 22 nt, Human
agcaucuucaacaggcauuuua

SEQ ID NO: 778716 - RNA, 22 nt, Human
uggguccauggaacagaggugc

SEQ ID NO: 778717 - RNA, 22 nt, Human
ggcuucaaaaccuaucuuugau

SEQ ID NO: 778718 - RNA, 22 nt, Human
acaugugaggugugagugauac

SEQ ID NO: 778719 - RNA, 22 nt, Human
gugccuuuucuucauaguuacu

SEQ ID NO: 778720 - RNA, 22 nt, Human
agaaacugcagcucagagaagu

SEQ ID NO: 778721 - RNA, 22 nt, Human
ucugaagagucaucuuugggug

SEQ ID NO: 778722 - RNA, 23 nt, Human
aagaauaaaugacauuaaaggug

SEQ ID NO: 778723 - RNA, 22 nt, Human
gaggggcacagcagcuguugca

SEQ ID NO: 778724 - RNA, 22 nt, Human
uuuguacaccuaccuaauacag

SEQ ID NO: 778725 - RNA, 22 nt, Human
uuucacaacacaaucucguuaa

SEQ ID NO: 778726 - RNA, 22 nt, Human
cauucauaagacuuugcucuug

SEQ ID NO: 778727 - RNA, 22 nt, Human
caguacuuuucaaccaguauga

SEQ ID NO: 778728 - RNA, 22 nt, Human
gcagcaggaauaggauaagcaa

SEQ ID NO: 778729 - RNA, 22 nt, Human
acauauaugugcacaugugcag

SEQ ID NO: 778730 - RNA, 19 nt, Human
uuuucucagcuucuagcgg

SEQ ID NO: 778731 - RNA, 22 nt, Human
agcugccuguccuaggccauca

SEQ ID NO: 778732 - RNA, 19 nt, Human
aauguaguguuaugucaac

SEQ ID NO: 778733 - RNA, 20 nt, Human
agcacagcgcgguguuccuu

SEQ ID NO: 778734 - RNA, 22 nt, Human
uuggugagugcuauguaccaca

SEQ ID NO: 778735 - RNA, 22 nt, Human
aguggcugugaaauacauggga

SEQ ID NO: 778736 - RNA, 22 nt, Human
gcuguauuuaacaacuggcuca

SEQ ID NO: 778737 - RNA, 22 nt, Human
uacaguuuuuauucaugacaag

SEQ ID NO: 778738 - RNA, 18 nt, Human
agcaugagagaggcugug

SEQ ID NO: 778739 - RNA, 22 nt, Human
cagaaagcagagcugagccuuu

SEQ ID NO: 778740 - RNA, 22 nt, Human
aagcuuguagaguuugacuucc

SEQ ID NO: 778741 - RNA, 22 nt, Human
agcagccauccuuagagaaaga

SEQ ID NO: 778742 - RNA, 22 nt, Human
ccauccauguggcagggcuggc

SEQ ID NO: 778743 - RNA, 22 nt, Human
aaguguggggucucagagcuga

SEQ ID NO: 778744 - RNA, 22 nt, Human
agauucauuaucuucuuuguac

SEQ ID NO: 778745 - RNA, 22 nt, Human
acaggaggggcaugaaagacgg

SEQ ID NO: 778746 - RNA, 22 nt, Human
uauaauccauucauugauuucu

SEQ ID NO: 778747 - RNA, 22 nt, Human
agaguguguggggcugagguca

SEQ ID NO: 778748 - RNA, 19 nt, Human
agugagcauccagagaggu

SEQ ID NO: 778749 - RNA, 22 nt, Human
accaggcagcaccaaagccggu

SEQ ID NO: 778750 - RNA, 22 nt, Human
guauuagguuggugcaaaagua

SEQ ID NO: 778751 - RNA, 22 nt, Human
ggagccggagggccacuggcag

SEQ ID NO: 778752 - RNA, 22 nt, Human
gugcuaugauuggacagaauag

SEQ ID NO: 778753 - RNA, 22 nt, Human
caggguugguuucuccucaggc

SEQ ID NO: 778754 - RNA, 22 nt, Human
aaacuguaagugccucaagguc

SEQ ID NO: 778755 - RNA, 22 nt, Human
gcucuguguugucagaggcacc

SEQ ID NO: 778756 - RNA, 22 nt, Human
gggcugagugggccucuuacuu

SEQ ID NO: 778757 - RNA, 22 nt, Human
ucacagcuuugagcagagacca

SEQ ID NO: 778758 - RNA, 22 nt, Human
aaagugcuaggauuacaagcgu

SEQ ID NO: 778759 - RNA, 22 nt, Human
uaugagaaaauaaauaucuguu

SEQ ID NO: 778760 - RNA, 22 nt, Human
ucucagagugacaaugagaauu

SEQ ID NO: 778761 - RNA, 22 nt, Human
uccugagccccagggagguugg

SEQ ID NO: 778762 - RNA, 22 nt, Human
aaauugcuggcagccuuuauuc

SEQ ID NO: 778763 - RNA, 22 nt, Human
ugcugucccccgugucugggcu

SEQ ID NO: 778764 - RNA, 22 nt, Human
acuggaaaacacuacuacaugc

SEQ ID NO: 778765 - RNA, 22 nt, Human
uuuuuccuuggaugugucucuc

SEQ ID NO: 778766 - RNA, 22 nt, Human
ggugaaggucagagcaggaaaa

SEQ ID NO: 778767 - RNA, 22 nt, Human
aauggcuuucagcaaggauaga

SEQ ID NO: 778768 - RNA, 22 nt, Human
auacuuaacuguggagucauug

SEQ ID NO: 778769 - RNA, 22 nt, Human
caaaugaauauuuccauggguu

SEQ ID NO: 778770 - RNA, 22 nt, Human
cuauucaguaagccaaaaccau

SEQ ID NO: 778771 - RNA, 21 nt, Human
uagcagagaucauuuucuccu

SEQ ID NO: 778772 - RNA, 21 nt, Human
ugggggagaauugguugcuuu

SEQ ID NO: 778773 - RNA, 22 nt, Human
cccugaggcugaggauaggugg

SEQ ID NO: 778774 - RNA, 22 nt, Human
cacggguggaaucagggacucc

SEQ ID NO: 778775 - RNA, 22 nt, Human
uaaagguuuauucaacaaaaua

SEQ ID NO: 778776 - RNA, 22 nt, Human
acaguugacagggagaggguua

SEQ ID NO: 778777 - RNA, 22 nt, Human
uauuuguuucuaguggcagcaa

SEQ ID NO: 778778 - RNA, 22 nt, Human
uagcuguuaauauacaaauggu

SEQ ID NO: 778779 - RNA, 22 nt, Human
agagcuguagcuuccuagagcc

SEQ ID NO: 778780 - RNA, 22 nt, Human
uuuccugguuggggacgugguu

SEQ ID NO: 778781 - RNA, 15 nt, Human
aacaucacuauuuug

SEQ ID NO: 778782 - RNA, 21 nt, Human
ccagcccagcugugucccagc

SEQ ID NO: 778783 - RNA, 22 nt, Human
cagcucuggcuauugaggacca

SEQ ID NO: 778784 - RNA, 18 nt, Human
agcagggcauuuugccau

SEQ ID NO: 778785 - RNA, 22 nt, Human
uucaaguccuuuggaaggccug

SEQ ID NO: 778786 - RNA, 22 nt, Human
gcucaguguguucaagggcuca

SEQ ID NO: 778787 - RNA, 22 nt, Human
ccugagcacacaucagaaucac

SEQ ID NO: 778788 - RNA, 22 nt, Human
ucagagguggcaggggugucca

SEQ ID NO: 778789 - RNA, 22 nt, Human
ccaggcucugugugggcuagag

SEQ ID NO: 778790 - RNA, 22 nt, Human
cuauuagguaugcagccuauuu

SEQ ID NO: 778791 - RNA, 22 nt, Human
uggaaagcaguucuuagaaucg

SEQ ID NO: 778792 - RNA, 22 nt, Human
uucucagcuuuccuugcaguua

SEQ ID NO: 778793 - RNA, 22 nt, Human
guggucagagaugacagugggu

SEQ ID NO: 778794 - RNA, 17 nt, Human
aaguccagaguugagca

SEQ ID NO: 778795 - RNA, 22 nt, Human
uguaaaauaccauuccuuguca

SEQ ID NO: 778796 - RNA, 22 nt, Human
ugccuucucccuuggacccuga

SEQ ID NO: 778797 - RNA, 22 nt, Human
aggcagcauuugaauccagguc

SEQ ID NO: 778798 - RNA, 22 nt, Human
cacuggggugggccugguagag

SEQ ID NO: 778799 - RNA, 22 nt, Human
caaugguugaacccugucauga

SEQ ID NO: 778800 - RNA, 22 nt, Human
gccuggggucucugacucacag

SEQ ID NO: 778801 - RNA, 22 nt, Human
uaggcugagcuaagagagcuua

SEQ ID NO: 778802 - RNA, 22 nt, Human
ugguggacaccgcagccaugaa

SEQ ID NO: 778803 - RNA, 22 nt, Human
caaagggcauggccugagcacu

SEQ ID NO: 778804 - RNA, 22 nt, Human
cuggcuugggucuaccugccuu

SEQ ID NO: 778805 - RNA, 22 nt, Human
aguuauaugugaaaacacguau

SEQ ID NO: 778806 - RNA, 22 nt, Human
gccaagagaaugugagagaaau

SEQ ID NO: 778807 - RNA, 22 nt, Human
ggccugaggccaccagcagccc

SEQ ID NO: 778808 - RNA, 22 nt, Human
gaaggcauaaaaccaauuuugu

SEQ ID NO: 778809 - RNA, 16 nt, Human
gagccaggugccuuga

SEQ ID NO: 778810 - RNA, 22 nt, Human
gccugcugaaccucaugcaguc

SEQ ID NO: 778811 - RNA, 22 nt, Human
augcagauguuugguucauugu

SEQ ID NO: 778812 - RNA, 22 nt, Human
augaaacugaaggacaaccaga

SEQ ID NO: 778813 - RNA, 19 nt, Human
ucuccaguugcuuucaggg

SEQ ID NO: 778814 - RNA, 22 nt, Human
guuuguaugaauguuuuaugcu

SEQ ID NO: 778815 - RNA, 22 nt, Human
gccuggcucacagagcagccuu

SEQ ID NO: 778816 - RNA, 22 nt, Human
ggcuggaagguagaagaugagg

SEQ ID NO: 778817 - RNA, 22 nt, Human
gacaggauguauuggcaagagg

SEQ ID NO: 778818 - RNA, 22 nt, Human
ucagugucuugggcuugaaugc

SEQ ID NO: 778819 - RNA, 22 nt, Human
ggcaggugcaccugagccaucu

SEQ ID NO: 778820 - RNA, 22 nt, Human
auacuacauuauuagagccugg

SEQ ID NO: 778821 - RNA, 20 nt, Human
acuuaguuuuucucacagga

SEQ ID NO: 778822 - RNA, 22 nt, Human
cagucuucuaaccuagcagccu

SEQ ID NO: 778823 - RNA, 22 nt, Human
ucucucagggggaaggcugaag

SEQ ID NO: 778824 - RNA, 22 nt, Human
uacugaaacucuuguaaauauc

SEQ ID NO: 778825 - RNA, 22 nt, Human
uuuagccaaucagcuugggagc

SEQ ID NO: 778826 - RNA, 22 nt, Human
auugaaagcacaaagaacaagu

SEQ ID NO: 778827 - RNA, 22 nt, Human
gggcuacugagcuggaacuggg

SEQ ID NO: 778828 - RNA, 22 nt, Human
ucugggcugggcuuaggaaccc

SEQ ID NO: 778829 - RNA, 22 nt, Human
aagagacaaugucuuuuggaua

SEQ ID NO: 778830 - RNA, 22 nt, Human
ucagucucaucaacucuauucc

SEQ ID NO: 778831 - RNA, 22 nt, Human
uacuuuaaagagguguaaugag

SEQ ID NO: 778832 - RNA, 19 nt, Human
ugucacugucauggcccag

SEQ ID NO: 778833 - RNA, 22 nt, Human
gacagugugaacaucuaauagu

SEQ ID NO: 778834 - RNA, 22 nt, Human
agccauuguugucuucaucuuc

SEQ ID NO: 778835 - RNA, 22 nt, Human
uuuuuaagcuccuuugauguca

SEQ ID NO: 778836 - RNA, 20 nt, Human
uccuucugaggugaggagga

SEQ ID NO: 778837 - RNA, 22 nt, Human
ggccucaucacagugcauuagu

SEQ ID NO: 778838 - RNA, 22 nt, Human
uacaucauggugagcaggaggc

SEQ ID NO: 778839 - RNA, 19 nt, Human
gugucugccuuugugccac

SEQ ID NO: 778840 - RNA, 22 nt, Human
cuuuaugugcugggcauuaagg

SEQ ID NO: 778841 - RNA, 22 nt, Human
augaaacaaaccucuauggagu

SEQ ID NO: 778842 - RNA, 22 nt, Human
agcagccuugcaggggucgcac

SEQ ID NO: 778843 - RNA, 22 nt, Human
auauguguauggauuucuaucu

SEQ ID NO: 778844 - RNA, 22 nt, Human
gauuucuuuagguguaauagug

SEQ ID NO: 778845 - RNA, 22 nt, Human
ugcucccaggcauucucuguug

SEQ ID NO: 778846 - RNA, 22 nt, Human
gcacagcaugaagagaggaagc

SEQ ID NO: 778847 - RNA, 22 nt, Human
ucagggucagauuccagagccu

SEQ ID NO: 778848 - RNA, 22 nt, Human
auggggaagagccagugagcug

SEQ ID NO: 778849 - RNA, 22 nt, Human
agagccagcaacucuagcccug

SEQ ID NO: 778850 - RNA, 22 nt, Human
cugcauccauguugcugcaaag

SEQ ID NO: 778851 - RNA, 22 nt, Human
ucaggcaaggcccuuagagugu

SEQ ID NO: 778852 - RNA, 19 nt, Human
agggaaggauucugucauu

SEQ ID NO: 778853 - RNA, 22 nt, Human
uggccugguuguugcugccguu

SEQ ID NO: 778854 - RNA, 22 nt, Human
cugggccuuaugaguaccugga

SEQ ID NO: 778855 - RNA, 22 nt, Human
ugucagagcaaggccaggccag

SEQ ID NO: 778856 - RNA, 22 nt, Human
gcuggcugggacagauuccauu

SEQ ID NO: 778857 - RNA, 22 nt, Human
acugagcugcuugaagugaacu

SEQ ID NO: 778858 - RNA, 22 nt, Human
acaaauagaaaaucuggauugg

SEQ ID NO: 778859 - RNA, 22 nt, Human
auuaucacauggacuuugcuuu

SEQ ID NO: 778860 - RNA, 22 nt, Human
ccugggaggcugugggucugcu

SEQ ID NO: 778861 - RNA, 23 nt, Human
aacuccugaaucgugagccaucu

SEQ ID NO: 778862 - RNA, 19 nt, Human
gcaugcagaguaagaaggu

SEQ ID NO: 778863 - RNA, 22 nt, Human
uggcuggauaucagaggaagug

SEQ ID NO: 778864 - RNA, 22 nt, Human
uuguccugauuuugcaacuucu

SEQ ID NO: 778865 - RNA, 22 nt, Human
aaggaacuuugcagaggugauu

SEQ ID NO: 778866 - RNA, 22 nt, Human
ccacagagacagagcccagggu

SEQ ID NO: 778867 - RNA, 22 nt, Human
uuguuaaauggaugcagaauaa

SEQ ID NO: 778868 - RNA, 22 nt, Human
uggaggccgaauuagagcguug

SEQ ID NO: 778869 - RNA, 22 nt, Human
aagauucucagaaaaaggcuau

SEQ ID NO: 778870 - RNA, 22 nt, Human
gagaacacuaaugguuucuuaa

SEQ ID NO: 778871 - RNA, 22 nt, Human
uggccuggaagagaggucgagg

SEQ ID NO: 778872 - RNA, 22 nt, Human
uacaugcucaguaacuuucagu

SEQ ID NO: 778873 - RNA, 22 nt, Human
auccacaggucauguaaugugg

SEQ ID NO: 778874 - RNA, 19 nt, Human
ugaauacagagauacagaa

SEQ ID NO: 778875 - RNA, 20 nt, Human
agcuccucaucacuggaggu

SEQ ID NO: 778876 - RNA, 22 nt, Human
agucugcacucagguggagguc

SEQ ID NO: 778877 - RNA, 22 nt, Human
cuggcuguuucaaauguauaga

SEQ ID NO: 778878 - RNA, 22 nt, Human
aggagggugauccgggcugguc

SEQ ID NO: 778879 - RNA, 18 nt, Human
cucugcuaaugggcagcu

SEQ ID NO: 778880 - RNA, 21 nt, Human
ccagcagcucaaggaucucuu

SEQ ID NO: 778881 - RNA, 22 nt, Human
gcaguuuuagagcuuuaagaug

SEQ ID NO: 778882 - RNA, 22 nt, Human
caucaucaacuggcagguaagu

SEQ ID NO: 778883 - RNA, 22 nt, Human
gaggcacaguucuuccuccaga

SEQ ID NO: 778884 - RNA, 22 nt, Human
uauggguauuauugguaagaau

SEQ ID NO: 778885 - RNA, 22 nt, Human
gcagcuggagcaucuucucauc

SEQ ID NO: 778886 - RNA, 22 nt, Human
uucuacauugugaaguucuuua

SEQ ID NO: 778887 - RNA, 22 nt, Human
gucuuuggaggcacuguugagu

SEQ ID NO: 778888 - RNA, 22 nt, Human
caugcauuacaauugcauagua

SEQ ID NO: 778889 - RNA, 22 nt, Human
caugggcaccuuaaaaugaggc

SEQ ID NO: 778890 - RNA, 22 nt, Human
ucauucaauguaagcauauaua

SEQ ID NO: 778891 - RNA, 22 nt, Human
uagguucaggagauauugcaca

SEQ ID NO: 778892 - RNA, 22 nt, Human
cucagaaaggugccauuuaugu

SEQ ID NO: 778893 - RNA, 22 nt, Human
ugggcugcugagaaugagagag

SEQ ID NO: 778894 - RNA, 22 nt, Human
uuccaaagucauguugcugaua

SEQ ID NO: 778895 - RNA, 22 nt, Human
gagcagcuggcuguauugguuu

SEQ ID NO: 778896 - RNA, 22 nt, Human
cuucacaaaauauuucauuaua

SEQ ID NO: 778897 - RNA, 22 nt, Human
ugaaagaugcucaaugaauggu

SEQ ID NO: 778898 - RNA, 22 nt, Human
cucugugugcuggugggguccu

SEQ ID NO: 778899 - RNA, 22 nt, Human
uugaaaaugguaagcaugauau

SEQ ID NO: 778900 - RNA, 22 nt, Human
cugccugcgccaccaccacguc

SEQ ID NO: 778901 - RNA, 22 nt, Human
uuucuacaacacuucugaaucu

SEQ ID NO: 778902 - RNA, 22 nt, Human
uuuuugugauaugacacuguau

SEQ ID NO: 778903 - RNA, 22 nt, Human
gcaggcugcugagauccuuagg

SEQ ID NO: 778904 - RNA, 22 nt, Human
gugcuuucugcaugguuccuac

SEQ ID NO: 778905 - RNA, 22 nt, Human
uggaacaaaauauuuauguuug

SEQ ID NO: 778906 - RNA, 22 nt, Human
gagcaagacucacugcaucuug

SEQ ID NO: 778907 - RNA, 22 nt, Human
auuuccaggcuguuuugugaau

SEQ ID NO: 778908 - RNA, 22 nt, Human
aacucacacaaguauugccugc

SEQ ID NO: 778909 - RNA, 19 nt, Human
ugugacaucacugggcagc

SEQ ID NO: 778910 - RNA, 22 nt, Human
agcucuggggccugucccacau

SEQ ID NO: 778911 - RNA, 22 nt, Human
uccugccaucugcuguugaucu

SEQ ID NO: 778912 - RNA, 22 nt, Human
aaucuguucuacucuauucaga

SEQ ID NO: 778913 - RNA, 22 nt, Human
gaaggcucuggggauugagaua

SEQ ID NO: 778914 - RNA, 22 nt, Human
uacacauauguguguauaugug

SEQ ID NO: 778915 - RNA, 22 nt, Human
cuuccucucaauaagaugagaa

SEQ ID NO: 778916 - RNA, 22 nt, Human
aggccuggugaaugaaguaucu

SEQ ID NO: 778917 - RNA, 22 nt, Human
acucucccagcuauauguggug

SEQ ID NO: 778918 - RNA, 22 nt, Human
cccaugagaccugguuuaaggc

SEQ ID NO: 778919 - RNA, 22 nt, Human
ugguuaaaugggaagagcaaca

SEQ ID NO: 778920 - RNA, 20 nt, Human
uuacaaagaggcaucgcuuu

SEQ ID NO: 778921 - RNA, 22 nt, Human
agccuaggucugggucuagcag

SEQ ID NO: 778922 - RNA, 22 nt, Human
uauggcagaggagaggcacuag

SEQ ID NO: 778923 - RNA, 22 nt, Human
auuacaguucugcagguaguuu

SEQ ID NO: 778924 - RNA, 22 nt, Human
auugaaugcuugcuaacacuuu

SEQ ID NO: 778925 - RNA, 22 nt, Human
gcagaggugaccagcagcaggg

SEQ ID NO: 778926 - RNA, 22 nt, Human
uuugagauggagucuugcucug

SEQ ID NO: 778927 - RNA, 22 nt, Human
uuuccucuucuucccaugucau

SEQ ID NO: 778928 - RNA, 22 nt, Human
uuucaguuagcugagacccagg

SEQ ID NO: 778929 - RNA, 22 nt, Human
uugcagggcaucuaugucuggu

SEQ ID NO: 778930 - RNA, 22 nt, Human
guggucagaauggagcccagga

SEQ ID NO: 778931 - RNA, 22 nt, Human
uaggaaauauuugaacauagga

SEQ ID NO: 778932 - RNA, 22 nt, Human
uuacaugguaaacacucuuuua

SEQ ID NO: 778933 - RNA, 17 nt, Human
ugaaagaaucagggaga

SEQ ID NO: 778934 - RNA, 22 nt, Human
uuaugcagauggcaugaggagg

SEQ ID NO: 778935 - RNA, 22 nt, Human
uguguauucugagguagguaua

SEQ ID NO: 778936 - RNA, 22 nt, Human
ggcagacacaaaaacauaaggu

SEQ ID NO: 778937 - RNA, 22 nt, Human
gguggguuuggaagagcaggcu

SEQ ID NO: 778938 - RNA, 22 nt, Human
acauucuauuucaucaugucua

SEQ ID NO: 778939 - RNA, 22 nt, Human
ugggugcucugcgaccguaggg

SEQ ID NO: 778940 - RNA, 22 nt, Human
uaaaugcaagugcuccugggag

SEQ ID NO: 778941 - RNA, 22 nt, Human
guguaucaguaacuguggacag

SEQ ID NO: 778942 - RNA, 22 nt, Human
ucugccugaggacugacaccag

SEQ ID NO: 778943 - RNA, 22 nt, Human
uggagugaaguaaagaggacaa

SEQ ID NO: 778944 - RNA, 22 nt, Human
aaaugucuuugaguauuucugc

SEQ ID NO: 778945 - RNA, 22 nt, Human
uagggcucgggcacaggacagg

SEQ ID NO: 778946 - RNA, 16 nt, Human
gcugggagggagaggu

SEQ ID NO: 778947 - RNA, 22 nt, Human
ugaguccugcugagcagagagg

SEQ ID NO: 778948 - RNA, 22 nt, Human
uccagccccggcuuccuuacag

SEQ ID NO: 778949 - RNA, 22 nt, Human
agcagcuguggggacaagggua

SEQ ID NO: 778950 - RNA, 22 nt, Human
caggccuugucaagaaaaugcc

SEQ ID NO: 778951 - RNA, 22 nt, Human
gaaauucaggacaaagacucuu

SEQ ID NO: 778952 - RNA, 22 nt, Human
uguauugaauuguguuauaucu

SEQ ID NO: 778953 - RNA, 22 nt, Human
agugcugucaguuuuauagaua

SEQ ID NO: 778954 - RNA, 22 nt, Human
aggaaauugggacacagagaaa

SEQ ID NO: 778955 - RNA, 22 nt, Human
aagagccuggcugcuaggcuca

SEQ ID NO: 778956 - RNA, 22 nt, Human
cgcuggggcuuuuugcuugaga

SEQ ID NO: 778957 - RNA, 22 nt, Human
uaccaagguaguggagacagaa

SEQ ID NO: 778958 - RNA, 22 nt, Human
ugacagaaugugacucucagau

SEQ ID NO: 778959 - RNA, 22 nt, Human
ccugaaaugacuccagcugagu

SEQ ID NO: 778960 - RNA, 21 nt, Human
ccugagccuguuuauccagaa

SEQ ID NO: 778961 - RNA, 22 nt, Human
cagugggguuucugugggugcu

SEQ ID NO: 778962 - RNA, 22 nt, Human
agagcacacugacgucagucug

SEQ ID NO: 778963 - RNA, 22 nt, Human
gaugaggaaaccaaggcucagg

SEQ ID NO: 778964 - RNA, 22 nt, Human
gcauggccauggcacuauggac

SEQ ID NO: 778965 - RNA, 22 nt, Human
gaggccuggaauuccagccugg

SEQ ID NO: 778966 - RNA, 22 nt, Human
uccuucuucaugaagauauaug

SEQ ID NO: 778967 - RNA, 22 nt, Human
ggagaggugagagguacaaguu

SEQ ID NO: 778968 - RNA, 22 nt, Human
gagggcugaaguguuuuaugag

SEQ ID NO: 778969 - RNA, 22 nt, Human
cuucuccagccacgcccacucc

SEQ ID NO: 778970 - RNA, 22 nt, Human
agaaaugcauuagcacauauag

SEQ ID NO: 778971 - RNA, 22 nt, Human
agaaagagaugaaugcuuuaag

SEQ ID NO: 778972 - RNA, 22 nt, Human
ucuuuugugauucuucaguuac

SEQ ID NO: 778973 - RNA, 22 nt, Human
agucugucuuuggcuucaccac

SEQ ID NO: 778974 - RNA, 18 nt, Human
uuuacucauaggccugac

SEQ ID NO: 778975 - RNA, 22 nt, Human
aaaccucuuuccauuagaggaa

SEQ ID NO: 778976 - RNA, 22 nt, Human
ccuaggagagggaaaaucuagg

SEQ ID NO: 778977 - RNA, 23 nt, Human
cuuuaaugaaauucucugugaag

SEQ ID NO: 778978 - RNA, 22 nt, Human
cauauuagacacuuauguccac

SEQ ID NO: 778979 - RNA, 22 nt, Human
uggagggcuaagcugagggaua

SEQ ID NO: 778980 - RNA, 22 nt, Human
uccuuucuccgggggacuguug

SEQ ID NO: 778981 - RNA, 22 nt, Human
uauguacauguuaaagggcaaa

SEQ ID NO: 778982 - RNA, 22 nt, Human
ccugucuguaucgguucagagu

SEQ ID NO: 778983 - RNA, 22 nt, Human
aagcacaucuccugugcagaac

SEQ ID NO: 778984 - RNA, 22 nt, Human
uggguccuugcugauugcugag

SEQ ID NO: 778985 - RNA, 22 nt, Human
cagaucugugguaucucuauuu

SEQ ID NO: 778986 - RNA, 22 nt, Human
uuugcaauuugugcugcaaaug

SEQ ID NO: 778987 - RNA, 23 nt, Human
gccucagagaaacagcugcacac

SEQ ID NO: 778988 - RNA, 22 nt, Human
aguggcagacacaaugugggca

SEQ ID NO: 778989 - RNA, 22 nt, Human
caagguuuacauugggcuauca

SEQ ID NO: 778990 - RNA, 22 nt, Human
gcagcuggggaggucgugggga

SEQ ID NO: 778991 - RNA, 22 nt, Human
cugucuguggucucaguaggcc

SEQ ID NO: 778992 - RNA, 22 nt, Human
ugcggcagccaccgcguggccc

SEQ ID NO: 778993 - RNA, 22 nt, Human
cacauguuuggcaugucaccaa

SEQ ID NO: 778994 - RNA, 22 nt, Human
uugcauugggagugaggagacc

SEQ ID NO: 778995 - RNA, 22 nt, Human
gagugcaggccugagcaccauc

SEQ ID NO: 778996 - RNA, 22 nt, Human
auguaugcauagugaguaaaug

SEQ ID NO: 778997 - RNA, 22 nt, Human
gcugcgucgagacagccuggca

SEQ ID NO: 778998 - RNA, 22 nt, Human
ucccagagcagaugugcuaaag

SEQ ID NO: 778999 - RNA, 22 nt, Human
aaacaggcuugcaacauguuuu

SEQ ID NO: 779000 - RNA, 22 nt, Human
accagaggaagggaaucucaag

SEQ ID NO: 779001 - RNA, 22 nt, Human
ggaugcugcuaucaggcuucga

SEQ ID NO: 779002 - RNA, 21 nt, Human
uuaaggucacuucugagccua

SEQ ID NO: 779003 - RNA, 22 nt, Human
cuggcuccaucuuugcuuccug

SEQ ID NO: 779004 - RNA, 22 nt, Human
ccuggggagagaaagcccagcc

SEQ ID NO: 779005 - RNA, 22 nt, Human
ugaaugauauauugggaauaau

SEQ ID NO: 779006 - RNA, 22 nt, Human
caauaaagaagauuuuugcaau

SEQ ID NO: 779007 - RNA, 22 nt, Human
uccugggagcauggugccguga

SEQ ID NO: 779008 - RNA, 22 nt, Human
ugccagccagguucugaggcua

SEQ ID NO: 779009 - RNA, 22 nt, Human
cuuguuaaauuauauaagcaga

SEQ ID NO: 779010 - RNA, 22 nt, Human
uuggccuccacauuuuccaggu

SEQ ID NO: 779011 - RNA, 19 nt, Human
auguacccagugucaaucc

SEQ ID NO: 779012 - RNA, 20 nt, Human
acagaaagagagaaugucag

SEQ ID NO: 779013 - RNA, 22 nt, Human
ccuccagacuuuggccauccuc

SEQ ID NO: 779014 - RNA, 22 nt, Human
agaggggguguuccagaagcau

SEQ ID NO: 779015 - RNA, 22 nt, Human
uagcucucuuuaucuuucuaua

SEQ ID NO: 779016 - RNA, 22 nt, Human
uugaggagucaggggcacggaa

SEQ ID NO: 779017 - RNA, 22 nt, Human
cagcuucugcuaucgaacaucu

SEQ ID NO: 779018 - RNA, 22 nt, Human
uaggcagaauuguugaaugaag

SEQ ID NO: 779019 - RNA, 22 nt, Human
caugugguauugugagauccac

SEQ ID NO: 779020 - RNA, 22 nt, Human
aggaggcuuuugcaggugccac

SEQ ID NO: 779021 - RNA, 22 nt, Human
cagcuagggaguggcagagcuu

SEQ ID NO: 779022 - RNA, 20 nt, Human
ccuucagaacuuacauagua

SEQ ID NO: 779023 - RNA, 22 nt, Human
ggagaugguggaagcuggugca

SEQ ID NO: 779024 - RNA, 22 nt, Human
uuauuuauaucucugcaguuua

SEQ ID NO: 779025 - RNA, 22 nt, Human
uacuuaaaacugauagaaucuc

SEQ ID NO: 779026 - RNA, 22 nt, Human
aggcucuauaccgcugggaguu

SEQ ID NO: 779027 - RNA, 22 nt, Human
uuucccaaguguaaacauggca

SEQ ID NO: 779028 - RNA, 22 nt, Human
gcacuguucucagagcauuaga

SEQ ID NO: 779029 - RNA, 22 nt, Human
ucccacaccugucuauuccuag

SEQ ID NO: 779030 - RNA, 22 nt, Human
cugucuguacugagaguucugu

SEQ ID NO: 779031 - RNA, 22 nt, Human
ugggcugaguggcagccagagu

SEQ ID NO: 779032 - RNA, 22 nt, Human
uucugauacagucccaacacaa

SEQ ID NO: 779033 - RNA, 22 nt, Human
gggaagcugaagcuagagaaaa

SEQ ID NO: 779034 - RNA, 22 nt, Human
gggcugaccaaugccuugcuuu

SEQ ID NO: 779035 - RNA, 22 nt, Human
ccuccagcgcgauccacuccgg

SEQ ID NO: 779036 - RNA, 22 nt, Human
ccacccugugcaggcgugggua

SEQ ID NO: 779037 - RNA, 22 nt, Human
ugcccuguuccugccuccagcu

SEQ ID NO: 779038 - RNA, 22 nt, Human
caguuuuaugucgaauguauac

SEQ ID NO: 779039 - RNA, 22 nt, Human
aggcucaguuugguuuccauug

SEQ ID NO: 779040 - RNA, 22 nt, Human
uggacaggugcacacagcagcc

SEQ ID NO: 779041 - RNA, 22 nt, Human
gaaguuauugccugugaugaaa

SEQ ID NO: 779042 - RNA, 22 nt, Human
aauugguuugaguugucucuau

SEQ ID NO: 779043 - RNA, 22 nt, Human
agugaccaaucacugaaugauu

SEQ ID NO: 779044 - RNA, 22 nt, Human
gccccagcagcaaugcgguuga

SEQ ID NO: 779045 - RNA, 19 nt, Human
cagucccaaauucuuguca

SEQ ID NO: 779046 - RNA, 22 nt, Human
aucuuauuuaacacagcaaaac

SEQ ID NO: 779047 - RNA, 22 nt, Human
agaagcuguugcauuccuggcg

SEQ ID NO: 779048 - RNA, 20 nt, Human
gucuccucuuugcauuccua

SEQ ID NO: 779049 - RNA, 22 nt, Human
ggaugucgaggaugggguagca

SEQ ID NO: 779050 - RNA, 22 nt, Human
guuuuguugcugcagagcucaa

SEQ ID NO: 779051 - RNA, 22 nt, Human
ugccacagagcaauucugcuga

SEQ ID NO: 779052 - RNA, 22 nt, Human
uaggcagagguaugguaaggac

SEQ ID NO: 779053 - RNA, 20 nt, Human
ugugugcuaggacuacagug

SEQ ID NO: 779054 - RNA, 22 nt, Human
uauuuaguuaucuuucauaaaa

SEQ ID NO: 779055 - RNA, 22 nt, Human
guccugaaugccuuuaggcaga

SEQ ID NO: 779056 - RNA, 22 nt, Human
gagccugaaauacaggucacug

SEQ ID NO: 779057 - RNA, 22 nt, Human
uguuacacccacaaaaaauucc

SEQ ID NO: 779058 - RNA, 22 nt, Human
augggaggguggaaaggcucug

SEQ ID NO: 779059 - RNA, 22 nt, Human
aacaugaaaacuaccugugauu

SEQ ID NO: 779060 - RNA, 22 nt, Human
ucaggcuggaaugcaguggggc

SEQ ID NO: 779061 - RNA, 22 nt, Human
cagggcaaagagagcacaugcu

SEQ ID NO: 779062 - RNA, 22 nt, Human
uuuauaugaaagugaccagugg

SEQ ID NO: 779063 - RNA, 22 nt, Human
ugcuccacccucacacucuucc

SEQ ID NO: 779064 - RNA, 22 nt, Human
uagaagugaaagacuugauguc

SEQ ID NO: 779065 - RNA, 22 nt, Human
ugguuauaaauugcuaugcaga

SEQ ID NO: 779066 - RNA, 22 nt, Human
uugaaugaauaaaagaguaagg

SEQ ID NO: 779067 - RNA, 22 nt, Human
gaggccaggaggaucucucuaa

SEQ ID NO: 779068 - RNA, 22 nt, Human
acacuguagcugagggcaugcg

SEQ ID NO: 779069 - RNA, 22 nt, Human
ucugaggccugaagcagcagag

SEQ ID NO: 779070 - RNA, 22 nt, Human
uuauuguuuaaagccauguaaa

SEQ ID NO: 779071 - RNA, 23 nt, Human
acaaugucuguucauaaaauacc

SEQ ID NO: 779072 - RNA, 22 nt, Human
uuuaccaagaguugucacuguu

SEQ ID NO: 779073 - RNA, 22 nt, Human
augugucugugggcacacacac

SEQ ID NO: 779074 - RNA, 22 nt, Human
uccuggguucauguccuggugc

SEQ ID NO: 779075 - RNA, 22 nt, Human
guccugguagggcucugugucu

SEQ ID NO: 779076 - RNA, 22 nt, Human
aggcuccuagccuguggcuggu

SEQ ID NO: 779077 - RNA, 22 nt, Human
aucuuauugcuguugccagaua

SEQ ID NO: 779078 - RNA, 22 nt, Human
gagcuagguugagacucacuua

SEQ ID NO: 779079 - RNA, 22 nt, Human
cagcacagcugaggggcugucu

SEQ ID NO: 779080 - RNA, 22 nt, Human
accuuaaaggccgaaguaaaga

SEQ ID NO: 779081 - RNA, 22 nt, Human
uuaauauacaauuuuacgggcu

SEQ ID NO: 779082 - RNA, 22 nt, Human
cauuuccuuccugcugcuccuc

SEQ ID NO: 779083 - RNA, 22 nt, Human
ucagcaaccaggggcacagucc

SEQ ID NO: 779084 - RNA, 22 nt, Human
acccagagccagggucaggagc

SEQ ID NO: 779085 - RNA, 22 nt, Human
cuccaggaccagggcuccugga

SEQ ID NO: 779086 - RNA, 22 nt, Human
aacuugaaccacagaagcugcc

SEQ ID NO: 779087 - RNA, 21 nt, Human
aggaaaauugaggguuguugu

SEQ ID NO: 779088 - RNA, 22 nt, Human
ucacuugagagauauuagaagu

SEQ ID NO: 779089 - RNA, 22 nt, Human
ucaggcagaccaccgugggcag

SEQ ID NO: 779090 - RNA, 22 nt, Human
aucuaagaggaugguuggaaau

SEQ ID NO: 779091 - RNA, 22 nt, Human
auucaguuucaaucauuguagu

SEQ ID NO: 779092 - RNA, 22 nt, Human
agugcauagggggaugcacagc

SEQ ID NO: 779093 - RNA, 22 nt, Human
ucuccuguaugggacuggcgag

SEQ ID NO: 779094 - RNA, 23 nt, Human
agggagaugccacaaagaugccc

SEQ ID NO: 779095 - RNA, 22 nt, Human
gcucuggagauggagccuugag

SEQ ID NO: 779096 - RNA, 17 nt, Human
uguggccuucugagcuu

SEQ ID NO: 779097 - RNA, 21 nt, Human
gcugcaucaaucuacccaggg

SEQ ID NO: 779098 - RNA, 22 nt, Human
ucuaggagcaugaagggaaggc

SEQ ID NO: 779099 - RNA, 22 nt, Human
gggcucugguacuuccuggcuc

SEQ ID NO: 779100 - RNA, 22 nt, Human
uagauuugugcaagaagggauu

SEQ ID NO: 779101 - RNA, 22 nt, Human
aaacuagaaaucagcaagauag

SEQ ID NO: 779102 - RNA, 23 nt, Human
acaaggcaacauagaucagggca

SEQ ID NO: 779103 - RNA, 22 nt, Human
acagucuacaaagugaugugug

SEQ ID NO: 779104 - RNA, 22 nt, Human
ucuuaugcauauucauaacaca

SEQ ID NO: 779105 - RNA, 22 nt, Human
cuggggucagggaucagagagc

SEQ ID NO: 779106 - RNA, 22 nt, Human
uuaaaaccaucagcuguaagau

SEQ ID NO: 779107 - RNA, 17 nt, Human
ugaguuaaguuuagauc

SEQ ID NO: 779108 - RNA, 22 nt, Human
augaaccauaggcaagacaaua

SEQ ID NO: 779109 - RNA, 22 nt, Human
uagcagcccaguuucuggccaa

SEQ ID NO: 779110 - RNA, 22 nt, Human
agcccaugguguacucuguggc

SEQ ID NO: 779111 - RNA, 22 nt, Human
uggguuaauagaaucauuaacu

SEQ ID NO: 779112 - RNA, 22 nt, Human
uuguuuacuaagaaccugguca

SEQ ID NO: 779113 - RNA, 22 nt, Human
cagggucuuggcgccaucaccc

SEQ ID NO: 779114 - RNA, 22 nt, Human
acagcuggagugaggauggagu

SEQ ID NO: 779115 - RNA, 22 nt, Human
gcuuuauuuugugagggauuac

SEQ ID NO: 779116 - RNA, 22 nt, Human
uggcccugacagguccugggca

SEQ ID NO: 779117 - RNA, 22 nt, Human
gagagaagaauguuccgaggcc

SEQ ID NO: 779118 - RNA, 22 nt, Human
aucuuacauucccucaccauuu

SEQ ID NO: 779119 - RNA, 22 nt, Human
ggucagaggucccagaagaagc

SEQ ID NO: 779120 - RNA, 22 nt, Human
uucuauaaaugaauguguauau

SEQ ID NO: 779121 - RNA, 23 nt, Human
aggucuggacccuuggccccugc

SEQ ID NO: 779122 - RNA, 22 nt, Human
guggcccugugaacagcgcagu

SEQ ID NO: 779123 - RNA, 22 nt, Human
ggaacugauuaagucaugagaa

SEQ ID NO: 779124 - RNA, 22 nt, Human
cccucucucuaucgggccccag

SEQ ID NO: 779125 - RNA, 22 nt, Human
agacauuguuggccuauccucu

SEQ ID NO: 779126 - RNA, 22 nt, Human
uucuuaagucaguaagaugcaa

SEQ ID NO: 779127 - RNA, 22 nt, Human
augugugcaucaaugauagauc

SEQ ID NO: 779128 - RNA, 22 nt, Human
guggcccuugaagcagcuucau

SEQ ID NO: 779129 - RNA, 22 nt, Human
uauguuuaaauguauguguaug

SEQ ID NO: 779130 - RNA, 22 nt, Human
ucacagacacagggagaagcau

SEQ ID NO: 779131 - RNA, 22 nt, Human
agagccaggaugucuucugggg

SEQ ID NO: 779132 - RNA, 19 nt, Human
ccuggcugcugugggaugc

SEQ ID NO: 779133 - RNA, 22 nt, Human
ucauuuauagcuaaccuugaau

SEQ ID NO: 779134 - RNA, 20 nt, Human
aggcucagauacccagggaa

SEQ ID NO: 779135 - RNA, 22 nt, Human
gcucagugaagggugccaagua

SEQ ID NO: 779136 - RNA, 22 nt, Human
cauuugaagacuuagaagagga

SEQ ID NO: 779137 - RNA, 22 nt, Human
uacuuuauuguaaaugcugaug

SEQ ID NO: 779138 - RNA, 22 nt, Human
cagcaggcggcccgcgggcccg

SEQ ID NO: 779139 - RNA, 23 nt, Human
agaucacauaguuaucagaugac

SEQ ID NO: 779140 - RNA, 22 nt, Human
uucuuuaugcuucuguuuaggc

SEQ ID NO: 779141 - RNA, 22 nt, Human
aagugaauuucauuccaauucu

SEQ ID NO: 779142 - RNA, 22 nt, Human
gugcugugcgcuuuuucuguau

SEQ ID NO: 779143 - RNA, 22 nt, Human
agucaguugcaaacaucaggca

SEQ ID NO: 779144 - RNA, 22 nt, Human
acaauaugggauauacauuuua

SEQ ID NO: 779145 - RNA, 22 nt, Human
ggaugaggaagauuacugagaa

SEQ ID NO: 779146 - RNA, 22 nt, Human
gaacagacuuugccaauuacag

SEQ ID NO: 779147 - RNA, 22 nt, Human
ggggaagggaguccaaguguua

SEQ ID NO: 779148 - RNA, 22 nt, Human
ccuuucucauuuuaagcauuag

SEQ ID NO: 779149 - RNA, 22 nt, Human
auacaacagaaaaugauuauuc

SEQ ID NO: 779150 - RNA, 22 nt, Human
gucuucuuuucagucugcuugu

SEQ ID NO: 779151 - RNA, 22 nt, Human
gccaggcuguuuuuauuacugu

SEQ ID NO: 779152 - RNA, 22 nt, Human
uccagaggugaacacccaggca

SEQ ID NO: 779153 - RNA, 23 nt, Human
auauggcuguuguguguuaacau

SEQ ID NO: 779154 - RNA, 22 nt, Human
cagggccaugaggcacaggguc

SEQ ID NO: 779155 - RNA, 22 nt, Human
uaacuacuaauugaugauaaug

SEQ ID NO: 779156 - RNA, 22 nt, Human
cagguggcuucucugcagccuu

SEQ ID NO: 779157 - RNA, 22 nt, Human
auucaguuauucagagaaggga

SEQ ID NO: 779158 - RNA, 22 nt, Human
auaguaugaauuaaaucaugag

SEQ ID NO: 779159 - RNA, 18 nt, Human
agcuccugaacucugugg

SEQ ID NO: 779160 - RNA, 22 nt, Human
uccaagaacccaagcgaaugcc

SEQ ID NO: 779161 - RNA, 22 nt, Human
uccacccugcuuucuuaucucc

SEQ ID NO: 779162 - RNA, 22 nt, Human
cuucuggguauuccagauaccu

SEQ ID NO: 779163 - RNA, 22 nt, Human
uugauaucucugcuguguuagg

SEQ ID NO: 779164 - RNA, 22 nt, Human
uauucugugugauauguaaaug

SEQ ID NO: 779165 - RNA, 22 nt, Human
uucagugugcuucaggacguua

SEQ ID NO: 779166 - RNA, 22 nt, Human
cucuggguucagaacagcaagc

SEQ ID NO: 779167 - RNA, 22 nt, Human
ucaguguguaguaaauuguagg

SEQ ID NO: 779168 - RNA, 22 nt, Human
uuagccauugucagcacauggc

SEQ ID NO: 779169 - RNA, 22 nt, Human
cucuuccuacagucugcuaugc

SEQ ID NO: 779170 - RNA, 22 nt, Human
gugggcuuuggccucuuucucc

SEQ ID NO: 779171 - RNA, 22 nt, Human
agguucuuggugagcauuuggu

SEQ ID NO: 779172 - RNA, 22 nt, Human
ccugggcagguguggcuucccc

SEQ ID NO: 779173 - RNA, 20 nt, Human
agacaggagcccccauucag

SEQ ID NO: 779174 - RNA, 22 nt, Human
cauuugcucugugucaguggca

SEQ ID NO: 779175 - RNA, 19 nt, Human
guacaauguguuguuggua

SEQ ID NO: 779176 - RNA, 22 nt, Human
ggcuaaagauguguucuuugga

SEQ ID NO: 779177 - RNA, 22 nt, Human
uugcuuuguggugguucuucca

SEQ ID NO: 779178 - RNA, 22 nt, Human
ucaggcugcuguacugugaaug

SEQ ID NO: 779179 - RNA, 22 nt, Human
agcuaggacagguagagauggg

SEQ ID NO: 779180 - RNA, 22 nt, Human
uggguccuaaaugcagucacau

SEQ ID NO: 779181 - RNA, 22 nt, Human
cccugucucauugaucacuugu

SEQ ID NO: 779182 - RNA, 22 nt, Human
acauuuaaccuuugaggaacug

SEQ ID NO: 779183 - RNA, 22 nt, Human
acgaugaugaaagagaacauuc

SEQ ID NO: 779184 - RNA, 22 nt, Human
aguguuuaaaaauggaaaugca

SEQ ID NO: 779185 - RNA, 22 nt, Human
aaacccagagacuagaaagacc

SEQ ID NO: 779186 - RNA, 22 nt, Human
gcagagcuccccaagacaccaa

SEQ ID NO: 779187 - RNA, 22 nt, Human
aaagagcucuuacucuagugua

SEQ ID NO: 779188 - RNA, 22 nt, Human
ucuccucugcgcggcagugccc

SEQ ID NO: 779189 - RNA, 22 nt, Human
augagguuuuacugccauuuuc

SEQ ID NO: 779190 - RNA, 22 nt, Human
gcauccauggagagcacucuga

SEQ ID NO: 779191 - RNA, 19 nt, Human
ugcuauuugaagaagugua

SEQ ID NO: 779192 - RNA, 22 nt, Human
aacugucuaaggagaauaugaa

SEQ ID NO: 779193 - RNA, 22 nt, Human
gaggcugguuugccuuuuggca

SEQ ID NO: 779194 - RNA, 19 nt, Human
caugaugagcauccugcag

SEQ ID NO: 779195 - RNA, 22 nt, Human
cccugcucuuagugccugugug

SEQ ID NO: 779196 - RNA, 22 nt, Human
gaggcugaaguguacaugggug

SEQ ID NO: 779197 - RNA, 22 nt, Human
cuggcucagacagcugugcagu

SEQ ID NO: 779198 - RNA, 22 nt, Human
auuugaaaaccugagccucccg

SEQ ID NO: 779199 - RNA, 22 nt, Human
cuggcuuugaggauccccucuu

SEQ ID NO: 779200 - RNA, 23 nt, Human
ucuacccacacugcucuagaagg

SEQ ID NO: 779201 - RNA, 22 nt, Human
ggcaagagggcagauggagugc

SEQ ID NO: 779202 - RNA, 22 nt, Human
ucucaugguuugugauucaaau

SEQ ID NO: 779203 - RNA, 22 nt, Human
cauucagagcuuucuuaucaua

SEQ ID NO: 779204 - RNA, 22 nt, Human
gccacagguaggaaccuaccuc

SEQ ID NO: 779205 - RNA, 22 nt, Human
cucugagguuuccucacaagcu

SEQ ID NO: 779206 - RNA, 22 nt, Human
cccaggcugucuguccuuugcu

SEQ ID NO: 779207 - RNA, 22 nt, Human
uucuaacuggcuugacaguuuc

SEQ ID NO: 779208 - RNA, 19 nt, Human
ucucugcuucucuuggcau

SEQ ID NO: 779209 - RNA, 22 nt, Human
augcaggaguuggaaaaaauga

SEQ ID NO: 779210 - RNA, 20 nt, Human
auagauaucaucuuuagaag

SEQ ID NO: 779211 - RNA, 22 nt, Human
uuagggaaggacagugaagaaa

SEQ ID NO: 779212 - RNA, 20 nt, Human
gagguagggcuuaaggcaag

SEQ ID NO: 779213 - RNA, 22 nt, Human
aaaucagacuugaauuuucauc

SEQ ID NO: 779214 - RNA, 19 nt, Human
ucugcccaguugucugccc

SEQ ID NO: 779215 - RNA, 21 nt, Human
ucuuauacagcaauagaucug

SEQ ID NO: 779216 - RNA, 22 nt, Human
ugguuucuuuccacucuccacc

SEQ ID NO: 779217 - RNA, 22 nt, Human
ugggcacaaacaucugccuguu

SEQ ID NO: 779218 - RNA, 22 nt, Human
agggagcuucuggccucagccu

SEQ ID NO: 779219 - RNA, 22 nt, Human
guucucucagccuuuguuauua

SEQ ID NO: 779220 - RNA, 22 nt, Human
ccaggggggcguagaugcuggg

SEQ ID NO: 779221 - RNA, 22 nt, Human
ggucccaaucuaaucacaugag

SEQ ID NO: 779222 - RNA, 22 nt, Human
ucuggccuguguugguggcccc

SEQ ID NO: 779223 - RNA, 22 nt, Human
ugcugaggaaagaggauaaaag

SEQ ID NO: 779224 - RNA, 19 nt, Human
gccuggcugggaugagccc

SEQ ID NO: 779225 - RNA, 22 nt, Human
agaaagugaccuugaaaacugg

SEQ ID NO: 779226 - RNA, 22 nt, Human
gggugcugaggaagacagcagg

SEQ ID NO: 779227 - RNA, 22 nt, Human
ugcccaaggucaccuaguuagu

SEQ ID NO: 779228 - RNA, 20 nt, Human
ccacuccgcccccagagggc

SEQ ID NO: 779229 - RNA, 22 nt, Human
ugucuccucaacucaugcucga

SEQ ID NO: 779230 - RNA, 22 nt, Human
aggacugacuuuugccaugaaa

SEQ ID NO: 779231 - RNA, 22 nt, Human
auacauuagcucauaugauuaa

SEQ ID NO: 779232 - RNA, 22 nt, Human
aguuuuccuuuauugaguacca

SEQ ID NO: 779233 - RNA, 22 nt, Human
caaauguuucuugaacaccaac

SEQ ID NO: 779234 - RNA, 22 nt, Human
gggcugugaggugagaacuuac

SEQ ID NO: 779235 - RNA, 22 nt, Human
cugaggaaaguauugccuggug

SEQ ID NO: 779236 - RNA, 22 nt, Human
auuucacucauucauguuacuu

SEQ ID NO: 779237 - RNA, 19 nt, Human
acagagggcaacugagaaa

SEQ ID NO: 779238 - RNA, 22 nt, Human
cagcugccccuccagggcuggg

SEQ ID NO: 779239 - RNA, 22 nt, Human
ugggcagaaaucaguaucagau

SEQ ID NO: 779240 - RNA, 22 nt, Human
gggagaaaugucuggccugcug

SEQ ID NO: 779241 - RNA, 22 nt, Human
ucuuaacuaucauuugaacacc

SEQ ID NO: 779242 - RNA, 22 nt, Human
ggacuugcuaagguggcugaac

SEQ ID NO: 779243 - RNA, 20 nt, Human
auucacaggcacaaaacccu

SEQ ID NO: 779244 - RNA, 22 nt, Human
uggaaggcaggaccugccuugg

SEQ ID NO: 779245 - RNA, 22 nt, Human
acacagccccacggugagcaaa

SEQ ID NO: 779246 - RNA, 22 nt, Human
ccucuguguccuggucauugaa

SEQ ID NO: 779247 - RNA, 22 nt, Human
ucccuguguguauauaaacggu

SEQ ID NO: 779248 - RNA, 22 nt, Human
acaggcugccuaccaaguauca

SEQ ID NO: 779249 - RNA, 19 nt, Human
cagaacagaggucauggcc

SEQ ID NO: 779250 - RNA, 22 nt, Human
aaagcagcagcacguggaagag

SEQ ID NO: 779251 - RNA, 22 nt, Human
ggagcagggaauuacagcgcag

SEQ ID NO: 779252 - RNA, 18 nt, Human
agcaccagucacuaacag

SEQ ID NO: 779253 - RNA, 22 nt, Human
ucagucuucuaaagggaugcaa

SEQ ID NO: 779254 - RNA, 21 nt, Human
gccugcacacaguaggugcac

SEQ ID NO: 779255 - RNA, 22 nt, Human
cuuuccaggaauccucacagcc

SEQ ID NO: 779256 - RNA, 22 nt, Human
cauauauuauggacugcagaau

SEQ ID NO: 779257 - RNA, 22 nt, Human
uacauguaggugacauuuuaau

SEQ ID NO: 779258 - RNA, 22 nt, Human
ucagugcacaaugacgguggcu

SEQ ID NO: 779259 - RNA, 22 nt, Human
uaacuuuggggacacuucucuu

SEQ ID NO: 779260 - RNA, 22 nt, Human
uacagauauauagugugugccu

SEQ ID NO: 779261 - RNA, 22 nt, Human
aggucuaacugauagaauucau

SEQ ID NO: 779262 - RNA, 22 nt, Human
acaggacaaggggaagaagaua

SEQ ID NO: 779263 - RNA, 23 nt, Human
auaaugcaaguggugguaaucug

SEQ ID NO: 779264 - RNA, 22 nt, Human
gccaggccugcaagugcuggug

SEQ ID NO: 779265 - RNA, 22 nt, Human
agauugugucaauuucucuuua

SEQ ID NO: 779266 - RNA, 22 nt, Human
uuaaagaugcagcuuuagagaa

SEQ ID NO: 779267 - RNA, 22 nt, Human
gcuuucuguagguaguuacugu

SEQ ID NO: 779268 - RNA, 22 nt, Human
cugucucugucuuaacucccag

SEQ ID NO: 779269 - RNA, 22 nt, Human
gccagauuuacagauuugcccu

SEQ ID NO: 779270 - RNA, 22 nt, Human
agagcuggggcauaaaugccac

SEQ ID NO: 779271 - RNA, 22 nt, Human
uucaguaugacagacgcauugg

SEQ ID NO: 779272 - RNA, 22 nt, Human
gaggagcuugugagaagauguc

SEQ ID NO: 779273 - RNA, 22 nt, Human
cauagcgguauuccacgugguu

SEQ ID NO: 779274 - RNA, 22 nt, Human
ugagagccaggaucugcucuau

SEQ ID NO: 779275 - RNA, 22 nt, Human
uuuuccagauuggacuuagucc

SEQ ID NO: 779276 - RNA, 20 nt, Human
cugagcccccagccugcagg

SEQ ID NO: 779277 - RNA, 22 nt, Human
ucaggcaggacaauuauuuagg

SEQ ID NO: 779278 - RNA, 22 nt, Human
agacacugcggaggucgggugg

SEQ ID NO: 779279 - RNA, 22 nt, Human
ggcaggugccuucugugcuagc

SEQ ID NO: 779280 - RNA, 22 nt, Human
acaggcagagaguggcggacuc

SEQ ID NO: 779281 - RNA, 22 nt, Human
auaaacagaguaguugcuacug

SEQ ID NO: 779282 - RNA, 22 nt, Human
ccuggcagcuccuccccggcgg

SEQ ID NO: 779283 - RNA, 22 nt, Human
agguccuggugaccauggaguu

SEQ ID NO: 779284 - RNA, 22 nt, Human
cuccugggaggaugcggacccg

SEQ ID NO: 779285 - RNA, 22 nt, Human
ugccccagacucugcucaccuc

SEQ ID NO: 779286 - RNA, 22 nt, Human
ggcaaaaacagcaaugacuuuu

SEQ ID NO: 779287 - RNA, 22 nt, Human
ucaagcaaguugcauauugcua

SEQ ID NO: 779288 - RNA, 22 nt, Human
auuuucaugacuaccuuaaaua

SEQ ID NO: 779289 - RNA, 22 nt, Human
ggcacugaauuucuuggcaucu

SEQ ID NO: 779290 - RNA, 22 nt, Human
aaggcaggagcuguaucuuauu

SEQ ID NO: 779291 - RNA, 22 nt, Human
gcucagguagaugggguugucc

SEQ ID NO: 779292 - RNA, 20 nt, Human
ucagacagucgcaguucugg

SEQ ID NO: 779293 - RNA, 22 nt, Human
uuggaauuugcuucagcuaaua

SEQ ID NO: 779294 - RNA, 22 nt, Human
cugcgugcaugucugcgugcau

SEQ ID NO: 779295 - RNA, 22 nt, Human
ccugggugacccgugagcgucc

SEQ ID NO: 779296 - RNA, 22 nt, Human
caggacugaagggcacagggaa

SEQ ID NO: 779297 - RNA, 23 nt, Human
cagagcuggcucagagcugccug

SEQ ID NO: 779298 - RNA, 22 nt, Human
caggauccuggcugcauggacg

SEQ ID NO: 779299 - RNA, 22 nt, Human
ugccauuucucaggcuauuuca

SEQ ID NO: 779300 - RNA, 22 nt, Human
ugauucacagacuucacaaggc

SEQ ID NO: 779301 - RNA, 20 nt, Human
ugggaguacaaucaugagca

SEQ ID NO: 779302 - RNA, 22 nt, Human
cugagccaaaaagcagagcuug

SEQ ID NO: 779303 - RNA, 22 nt, Human
uugaaagucacaauggcauuaa

SEQ ID NO: 779304 - RNA, 23 nt, Human
uaggggaaaaaucuucugcaauu

SEQ ID NO: 779305 - RNA, 22 nt, Human
agcagagcuauucuugugcaau

SEQ ID NO: 779306 - RNA, 22 nt, Human
gacacagaaggucacauguuca

SEQ ID NO: 779307 - RNA, 22 nt, Human
cugcugccuaguccaagacgug

SEQ ID NO: 779308 - RNA, 22 nt, Human
uccccagucccggcggugggug

SEQ ID NO: 779309 - RNA, 22 nt, Human
guguaaaugccccauucauuga

SEQ ID NO: 779310 - RNA, 19 nt, Human
uaaagcacauagcaaaagu

SEQ ID NO: 779311 - RNA, 22 nt, Human
ccagcagagcucaaacuuccug

SEQ ID NO: 779312 - RNA, 22 nt, Human
gggcugacucaaccuugcaaag

SEQ ID NO: 779313 - RNA, 22 nt, Human
agcuccaggucagugcaccccu

SEQ ID NO: 779314 - RNA, 22 nt, Human
uucuggggacauaacaguaagc

SEQ ID NO: 779315 - RNA, 22 nt, Human
gacaauuagaucauuccuuuga

SEQ ID NO: 779316 - RNA, 22 nt, Human
gugagccaguucgacuguuucu

SEQ ID NO: 779317 - RNA, 22 nt, Human
cucuucuugccugaugaggcag

SEQ ID NO: 779318 - RNA, 22 nt, Human
acauucuuccagcuggcuguug

SEQ ID NO: 779319 - RNA, 22 nt, Human
cgccugcucuguuuccaugugg

SEQ ID NO: 779320 - RNA, 22 nt, Human
ucucacaggugcacguggcugu

SEQ ID NO: 779321 - RNA, 22 nt, Human
uuaacagacauauauauuugua

SEQ ID NO: 779322 - RNA, 22 nt, Human
cugggucccacagccugcuggg

SEQ ID NO: 779323 - RNA, 22 nt, Human
augcacagaacaauuuuaagag

SEQ ID NO: 779324 - RNA, 22 nt, Human
ugcaggaguuaagugcucuccu

SEQ ID NO: 779325 - RNA, 22 nt, Human
gagcuggaggcagugcugaggu

SEQ ID NO: 779326 - RNA, 22 nt, Human
uuagaaacucaacucugggaau

SEQ ID NO: 779327 - RNA, 22 nt, Human
ucuguuccaguagaaaggugca

SEQ ID NO: 779328 - RNA, 22 nt, Human
aaauguagaccuauagggaccu

SEQ ID NO: 779329 - RNA, 22 nt, Human
aguggccagcagccuagccuag

SEQ ID NO: 779330 - RNA, 22 nt, Human
cacagacuugagaagcaccuua

SEQ ID NO: 779331 - RNA, 22 nt, Human
aaagccagaauucguccagccu

SEQ ID NO: 779332 - RNA, 22 nt, Human
ugccacauggugcauuuccuag

SEQ ID NO: 779333 - RNA, 22 nt, Human
ugagcagaaguuauaaauaaga

SEQ ID NO: 779334 - RNA, 23 nt, Human
ucuggaauccucccccuugguuc

SEQ ID NO: 779335 - RNA, 22 nt, Human
gaggagcugggcugagaggguc

SEQ ID NO: 779336 - RNA, 22 nt, Human
uuacaaagaaaauuaggcauuu

SEQ ID NO: 779337 - RNA, 22 nt, Human
cugauuagaguguuaaugagga

SEQ ID NO: 779338 - RNA, 22 nt, Human
cacagaaucggccgauggugcu

SEQ ID NO: 779339 - RNA, 22 nt, Human
gcaggaagccuuaccaagccca

SEQ ID NO: 779340 - RNA, 22 nt, Human
guccagugacaaguagcuggcc

SEQ ID NO: 779341 - RNA, 22 nt, Human
ggucuucuggaaagcagacugu

SEQ ID NO: 779342 - RNA, 22 nt, Human
cauuuggauuuugaagagagua

SEQ ID NO: 779343 - RNA, 22 nt, Human
uacagaggcacaugcaauuuuc

SEQ ID NO: 779344 - RNA, 22 nt, Human
cagcccauuucugggaccugag

SEQ ID NO: 779345 - RNA, 22 nt, Human
uugaggagcacuagucagguau

SEQ ID NO: 779346 - RNA, 22 nt, Human
agaaagacgugaugaagaagua

SEQ ID NO: 779347 - RNA, 22 nt, Human
ccuggcucugccguaaccacca

SEQ ID NO: 779348 - RNA, 22 nt, Human
ucagugugauuaggcuaucuga

SEQ ID NO: 779349 - RNA, 22 nt, Human
aucuuucaucucuauuauuuga

SEQ ID NO: 779350 - RNA, 22 nt, Human
ggggcacacuuuugguagauau

SEQ ID NO: 779351 - RNA, 22 nt, Human
uggagcuguagccaccacccug

SEQ ID NO: 779352 - RNA, 18 nt, Human
ucagcuggggcugcagcc

SEQ ID NO: 779353 - RNA, 22 nt, Human
gugcaugugucuuuauaguaga

SEQ ID NO: 779354 - RNA, 22 nt, Human
gucuccugcccccggugcuugg

SEQ ID NO: 779355 - RNA, 22 nt, Human
auugugcagcucugcucuuauu

SEQ ID NO: 779356 - RNA, 22 nt, Human
aggaaaggugagagcggccgcg

SEQ ID NO: 779357 - RNA, 22 nt, Human
gggugacauuucccaaugagcc

SEQ ID NO: 779358 - RNA, 22 nt, Human
cuucagcccugagugccagcag

SEQ ID NO: 779359 - RNA, 22 nt, Human
cugggagcccugacuagccugg

SEQ ID NO: 779360 - RNA, 18 nt, Human
cugccuguugcugagagg

SEQ ID NO: 779361 - RNA, 22 nt, Human
caaggagauaaaauguugagcu

SEQ ID NO: 779362 - RNA, 22 nt, Human
ugggcuccaauuuguccuuuca

SEQ ID NO: 779363 - RNA, 22 nt, Human
aagucagugaaaaggcaucauc

SEQ ID NO: 779364 - RNA, 22 nt, Human
gguagaaagcccaagucccccu

SEQ ID NO: 779365 - RNA, 22 nt, Human
uguccccagguccucugccguc

SEQ ID NO: 779366 - RNA, 22 nt, Human
cugugcaagacuuacuuuaaua

SEQ ID NO: 779367 - RNA, 22 nt, Human
ccaggauaguaugaguagggau

SEQ ID NO: 779368 - RNA, 22 nt, Human
uggucugauuucuuucuggagu

SEQ ID NO: 779369 - RNA, 22 nt, Human
aacaucuacagugagauguuag

SEQ ID NO: 779370 - RNA, 21 nt, Human
aacuuuagaaagacugggaag

SEQ ID NO: 779371 - RNA, 22 nt, Human
acaucuguucuucucuuguccc

SEQ ID NO: 779372 - RNA, 22 nt, Human
uggggcuggcacagucucuauu

SEQ ID NO: 779373 - RNA, 22 nt, Human
cagcuguugacugguacaugaa

SEQ ID NO: 779374 - RNA, 22 nt, Human
uucuguuacuugcaaccacagg

SEQ ID NO: 779375 - RNA, 22 nt, Human
gggucugagcugaggggaaauc

SEQ ID NO: 779376 - RNA, 22 nt, Human
caucacuguccaaaguucaguu

SEQ ID NO: 779377 - RNA, 22 nt, Human
agaggccagcagugccuaucug

SEQ ID NO: 779378 - RNA, 22 nt, Human
auucuucacaccuguuccuguu

SEQ ID NO: 779379 - RNA, 18 nt, Human
ugcauuuaguacaucuag

SEQ ID NO: 779380 - RNA, 22 nt, Human
aggagccauggaggugaggcgg

SEQ ID NO: 779381 - RNA, 22 nt, Human
aaagcaagucucuacaaaguac

SEQ ID NO: 779382 - RNA, 22 nt, Human
gcacaugugagaguagaggccu

SEQ ID NO: 779383 - RNA, 21 nt, Human
agaguuacugucauccuaggu

SEQ ID NO: 779384 - RNA, 22 nt, Human
ggugcuguggcagcuccuccuc

SEQ ID NO: 779385 - RNA, 22 nt, Human
aucauguuguauguaaucuuuu

SEQ ID NO: 779386 - RNA, 19 nt, Human
uagcuucacguggucuaga

SEQ ID NO: 779387 - RNA, 22 nt, Human
agugucuuugucucucaagcac

SEQ ID NO: 779388 - RNA, 22 nt, Human
acaguguuuaaaaaucagaucu

SEQ ID NO: 779389 - RNA, 22 nt, Human
cugcccuggcagccuaccaugg

SEQ ID NO: 779390 - RNA, 22 nt, Human
cagcugagaagugauagcugca

SEQ ID NO: 779391 - RNA, 22 nt, Human
guauuuuauggccuggggccua

SEQ ID NO: 779392 - RNA, 22 nt, Human
uuggagauaucacaccuucaca

SEQ ID NO: 779393 - RNA, 22 nt, Human
cacagugugggcauggugccug

SEQ ID NO: 779394 - RNA, 22 nt, Human
ccagcccuuagauaaaccuggc

SEQ ID NO: 779395 - RNA, 22 nt, Human
ccagggcuucagagguuuuggc

SEQ ID NO: 779396 - RNA, 22 nt, Human
caggagauguaagacuucuguu

SEQ ID NO: 779397 - RNA, 20 nt, Human
ccaauguuuacagauuacuu

SEQ ID NO: 779398 - RNA, 22 nt, Human
cugaaccaucucuguucuguau

SEQ ID NO: 779399 - RNA, 19 nt, Human
ugguggaggugcaccugac

SEQ ID NO: 779400 - RNA, 22 nt, Human
auacuuauacuaagaauguacu

SEQ ID NO: 779401 - RNA, 22 nt, Human
uuuuucuggauaacuguaucuc

SEQ ID NO: 779402 - RNA, 22 nt, Human
ugcagcaucuccuuaaaucuug

SEQ ID NO: 779403 - RNA, 22 nt, Human
auaugacauaaaaucauuuuug

SEQ ID NO: 779404 - RNA, 22 nt, Human
cucccagggccaucgagucacu

SEQ ID NO: 779405 - RNA, 22 nt, Human
gugcugucaauugcuuucagua

SEQ ID NO: 779406 - RNA, 21 nt, Human
agcgucaauaucgucaacagg

SEQ ID NO: 779407 - RNA, 22 nt, Human
uaucuacuccucuuucagaugc

SEQ ID NO: 779408 - RNA, 22 nt, Human
aaucaagaaaaugaggauucuu

SEQ ID NO: 779409 - RNA, 20 nt, Human
aagaggugauaacaggugag

SEQ ID NO: 779410 - RNA, 22 nt, Human
aacuacuaccaguaguaguagu

SEQ ID NO: 779411 - RNA, 22 nt, Human
uccagggcaugcucagacucag

SEQ ID NO: 779412 - RNA, 18 nt, Human
augcuccuaucucugagc

SEQ ID NO: 779413 - RNA, 22 nt, Human
ucuauugauuggcuuccuggau

SEQ ID NO: 779414 - RNA, 22 nt, Human
ccugucccccaggccuguacca

SEQ ID NO: 779415 - RNA, 22 nt, Human
uaagagcacugaagucuucuua

SEQ ID NO: 779416 - RNA, 22 nt, Human
cugugcccucuuugcuggccuu

SEQ ID NO: 779417 - RNA, 22 nt, Human
cuuggagcccagcaggccugga

SEQ ID NO: 779418 - RNA, 22 nt, Human
uuccuuaggcuguuugcagugc

SEQ ID NO: 779419 - RNA, 22 nt, Human
uguaugaauauguauuuucaua

SEQ ID NO: 779420 - RNA, 22 nt, Human
cagcugcugauggccugacaga

SEQ ID NO: 779421 - RNA, 22 nt, Human
aggcacugaauauccaguaaaa

SEQ ID NO: 779422 - RNA, 22 nt, Human
aaacuugauuuagaacuaaggc

SEQ ID NO: 779423 - RNA, 22 nt, Human
acugagcaguagauuuucuguu

SEQ ID NO: 779424 - RNA, 22 nt, Human
gcucucuuuaaacugcauggcu

SEQ ID NO: 779425 - RNA, 22 nt, Human
gucuaaaccucaaaucaguguc

SEQ ID NO: 779426 - RNA, 22 nt, Human
auauuauucuaguaacagugau

SEQ ID NO: 779427 - RNA, 22 nt, Human
gucccucugggccaucaggucc

SEQ ID NO: 779428 - RNA, 22 nt, Human
augaacaaucuguugacuucug

SEQ ID NO: 779429 - RNA, 23 nt, Human
caaaaguuagcccuucccaucuc

SEQ ID NO: 779430 - RNA, 22 nt, Human
uguacagucaugcuuucuguuc

SEQ ID NO: 779431 - RNA, 22 nt, Human
aaggcaguaaaaucuaccuugc

SEQ ID NO: 779432 - RNA, 22 nt, Human
ugggguacacguggggcaggau

SEQ ID NO: 779433 - RNA, 20 nt, Human
ccugccugccucggcucauu

SEQ ID NO: 779434 - RNA, 22 nt, Human
cauucacaucuuguuccaucac

SEQ ID NO: 779435 - RNA, 22 nt, Human
guggaaggaagagauggcccca

SEQ ID NO: 779436 - RNA, 23 nt, Human
uacugccuggggccagagagcgg

SEQ ID NO: 779437 - RNA, 22 nt, Human
uuacaaagugcugcaccauuuu

SEQ ID NO: 779438 - RNA, 22 nt, Human
aaauguccauugaauggaugag

SEQ ID NO: 779439 - RNA, 22 nt, Human
augggaucuugcccugagggcu

SEQ ID NO: 779440 - RNA, 22 nt, Human
uggugcugccaccuccucugcu

SEQ ID NO: 779441 - RNA, 22 nt, Human
gaaugcuggcuuacaggcaguu

SEQ ID NO: 779442 - RNA, 22 nt, Human
caggauguucaagggaccuaug

SEQ ID NO: 779443 - RNA, 19 nt, Human
cccaggguuuccucucucc

SEQ ID NO: 779444 - RNA, 22 nt, Human
cagcacaggucaguuuuuuaag

SEQ ID NO: 779445 - RNA, 22 nt, Human
guguucaugccccagugcagga

SEQ ID NO: 779446 - RNA, 22 nt, Human
uaacuguugugcgggucucugg

SEQ ID NO: 779447 - RNA, 22 nt, Human
uuucacauuuguuuuaagaagu

SEQ ID NO: 779448 - RNA, 20 nt, Human
agcauucauucagcaagccu

SEQ ID NO: 779449 - RNA, 21 nt, Human
ggacuuacauagguaaggggu

SEQ ID NO: 779450 - RNA, 22 nt, Human
gggcagaugucuggacaccuca

SEQ ID NO: 779451 - RNA, 22 nt, Human
acaugugucuaagaaugaaaga

SEQ ID NO: 779452 - RNA, 22 nt, Human
ugucucugugacuccuuccgcc

SEQ ID NO: 779453 - RNA, 22 nt, Human
aaggaugauugguaaugacacu

SEQ ID NO: 779454 - RNA, 22 nt, Human
gcagcagcccagggcucucaga

SEQ ID NO: 779455 - RNA, 22 nt, Human
gcagggcucauugccaggcauu

SEQ ID NO: 779456 - RNA, 22 nt, Human
aauaucuagccuuuagcagcuu

SEQ ID NO: 779457 - RNA, 22 nt, Human
acucuggcacuggguaccucag

SEQ ID NO: 779458 - RNA, 22 nt, Human
augacuuuguuguuuuccagcg

SEQ ID NO: 779459 - RNA, 22 nt, Human
caggcauggagaggcagagacu

SEQ ID NO: 779460 - RNA, 22 nt, Human
ugcugcuuggaaauggggcuga

SEQ ID NO: 779461 - RNA, 22 nt, Human
aucagcucauuuugauggaaau

SEQ ID NO: 779462 - RNA, 22 nt, Human
guggaaauuuuaggaucaucuu

SEQ ID NO: 779463 - RNA, 22 nt, Human
auaaauuuauaauuguuuccug

SEQ ID NO: 779464 - RNA, 22 nt, Human
ccauucaauaccuuagagaaaa

SEQ ID NO: 779465 - RNA, 22 nt, Human
gccugccucaaaaucccaguuc

SEQ ID NO: 779466 - RNA, 22 nt, Human
ugugcacaaugugcagguuugu

SEQ ID NO: 779467 - RNA, 22 nt, Human
aagagucauagagacauugauu

SEQ ID NO: 779468 - RNA, 22 nt, Human
guuauuagaagugaaggauugu

SEQ ID NO: 779469 - RNA, 22 nt, Human
uugagcaucuuauagaaagagc

SEQ ID NO: 779470 - RNA, 22 nt, Human
gggugggaucuguggagccuca

SEQ ID NO: 779471 - RNA, 22 nt, Human
ugcuccuggaugagguacucca

SEQ ID NO: 779472 - RNA, 22 nt, Human
cugcugggaaggucugcucagu

SEQ ID NO: 779473 - RNA, 21 nt, Human
uucuccccagcgaauccucgg

SEQ ID NO: 779474 - RNA, 22 nt, Human
auggcugugugacugaguucua

SEQ ID NO: 779475 - RNA, 22 nt, Human
uggcaggaaaaacauuggagau

SEQ ID NO: 779476 - RNA, 22 nt, Human
aguggagaauaugcagaaagcc

SEQ ID NO: 779477 - RNA, 22 nt, Human
gggacucugagagccugagggu

SEQ ID NO: 779478 - RNA, 23 nt, Human
ugacaaagcgagacuccagcuca

SEQ ID NO: 779479 - RNA, 22 nt, Human
uugauuuuuuucuacuaugcgc

SEQ ID NO: 779480 - RNA, 22 nt, Human
caggugaaaaagcaaccauauu

SEQ ID NO: 779481 - RNA, 22 nt, Human
acagaggccccgugggagagcc

SEQ ID NO: 779482 - RNA, 22 nt, Human
uaugacaggcaugagauccuaa

SEQ ID NO: 779483 - RNA, 22 nt, Human
uauuaacacguauaaaguguuu

SEQ ID NO: 779484 - RNA, 22 nt, Human
cuccugagucuccacgccccgu

SEQ ID NO: 779485 - RNA, 22 nt, Human
aaugcacuuaguaugaaugccu

SEQ ID NO: 779486 - RNA, 23 nt, Human
ucagagagcuguugagagcugcc

SEQ ID NO: 779487 - RNA, 22 nt, Human
cagggcugagucauauagccuu

SEQ ID NO: 779488 - RNA, 22 nt, Human
uacaguuuuggugaugaugaug

SEQ ID NO: 779489 - RNA, 22 nt, Human
uuugaaugugugaguuaacuuu

SEQ ID NO: 779490 - RNA, 22 nt, Human
aguuuagaagaggaacuuguua

SEQ ID NO: 779491 - RNA, 22 nt, Human
auacuguuucucuucuacauga

SEQ ID NO: 779492 - RNA, 22 nt, Human
ucccagggccgcaaacgaguuu

SEQ ID NO: 779493 - RNA, 22 nt, Human
gcagggcacacaagaaugauaa

SEQ ID NO: 779494 - RNA, 22 nt, Human
agggcagaaauauugauacugu

SEQ ID NO: 779495 - RNA, 22 nt, Human
uuagaguuuuuguaaguacaau

SEQ ID NO: 779496 - RNA, 22 nt, Human
guuuacaguacucacuugcauu

SEQ ID NO: 779497 - RNA, 22 nt, Human
cagaaaauagaguuucucugag

SEQ ID NO: 779498 - RNA, 22 nt, Human
ugcuaggagaggcagcacagcg

SEQ ID NO: 779499 - RNA, 22 nt, Human
gaggcugcacuggcuaaaggcu

SEQ ID NO: 779500 - RNA, 22 nt, Human
auucuagaugcuguaaguagca

SEQ ID NO: 779501 - RNA, 18 nt, Human
ucuuuggacaacuacugg

SEQ ID NO: 779502 - RNA, 22 nt, Human
agcagggcuccugaaagccgcg

SEQ ID NO: 779503 - RNA, 18 nt, Human
auguuucucuuggcucug

SEQ ID NO: 779504 - RNA, 22 nt, Human
acaugcaugugaauauggacac

SEQ ID NO: 779505 - RNA, 22 nt, Human
agcccagcccgggcugcgcuuu

SEQ ID NO: 779506 - RNA, 22 nt, Human
uccuuucaccaaaaaguguugu

SEQ ID NO: 779507 - RNA, 22 nt, Human
acuguuucugccacaauagccc

SEQ ID NO: 779508 - RNA, 22 nt, Human
uuccgcuguuuaguugaaguuu

SEQ ID NO: 779509 - RNA, 22 nt, Human
caggcacacugucuacacugag

SEQ ID NO: 779510 - RNA, 22 nt, Human
uaccuugggguuuuguugcucu

SEQ ID NO: 779511 - RNA, 22 nt, Human
aggaaucaggagaugagcacgg

SEQ ID NO: 779512 - RNA, 18 nt, Human
cuggauuaagacagugcu

SEQ ID NO: 779513 - RNA, 22 nt, Human
ugucccuggaacuauggcucca

SEQ ID NO: 779514 - RNA, 22 nt, Human
aucugggccaauccuaguacca

SEQ ID NO: 779515 - RNA, 22 nt, Human
cuugcuucauuagugucuuagu

SEQ ID NO: 779516 - RNA, 22 nt, Human
ccagacaggaacacacaucucc

SEQ ID NO: 779517 - RNA, 22 nt, Human
gcccugagccuaugagccucuc

SEQ ID NO: 779518 - RNA, 22 nt, Human
gaugucuucccauguucaugug

SEQ ID NO: 779519 - RNA, 23 nt, Human
uguaaacaucacccccuggaguu

SEQ ID NO: 779520 - RNA, 22 nt, Human
aaacagcuaaguacauucaagg

SEQ ID NO: 779521 - RNA, 21 nt, Human
uacaaugcacaggagagccuc

SEQ ID NO: 779522 - RNA, 22 nt, Human
cagcuauuauuuucucuaaauu

SEQ ID NO: 779523 - RNA, 22 nt, Human
ucugccugagggagcugaggaa

SEQ ID NO: 779524 - RNA, 22 nt, Human
gguuccagaccacggguguucu

SEQ ID NO: 779525 - RNA, 22 nt, Human
cagcuggcaaguggagcagggu

SEQ ID NO: 779526 - RNA, 22 nt, Human
cagguucagcaggaggcauccc

SEQ ID NO: 779527 - RNA, 22 nt, Human
agugcagcaugaagcacaugug

SEQ ID NO: 779528 - RNA, 22 nt, Human
cauuucacacauaaacuugggu

SEQ ID NO: 779529 - RNA, 22 nt, Human
aagcaagcuguuggcaauaggg

SEQ ID NO: 779530 - RNA, 19 nt, Human
ucaaugcaugaaaucagcc

SEQ ID NO: 779531 - RNA, 22 nt, Human
aacaugcuggguguuuuugaug

SEQ ID NO: 779532 - RNA, 22 nt, Human
gcugucuggcauggcguggcug

SEQ ID NO: 779533 - RNA, 22 nt, Human
uguacacauuaagcucuuuaga

SEQ ID NO: 779534 - RNA, 22 nt, Human
uuuagaaguucacacauuuaaa

SEQ ID NO: 779535 - RNA, 22 nt, Human
gcagcccagcagggcccggagc

SEQ ID NO: 779536 - RNA, 22 nt, Human
aguacauuuuucaguggggagu

SEQ ID NO: 779537 - RNA, 22 nt, Human
cauggccaggcacgcgcauagc

SEQ ID NO: 779538 - RNA, 22 nt, Human
aggggagguguccccaaaucuc

SEQ ID NO: 779539 - RNA, 22 nt, Human
ucugaauagagagagguccuuu

SEQ ID NO: 779540 - RNA, 20 nt, Human
gcaguguguaugaauagcug

SEQ ID NO: 779541 - RNA, 22 nt, Human
aagagacaugaauacucgaagg

SEQ ID NO: 779542 - RNA, 22 nt, Human
uauguggaaaaugcacuuaaaa

SEQ ID NO: 779543 - RNA, 22 nt, Human
uauccuuguacuauaguauuua

SEQ ID NO: 779544 - RNA, 22 nt, Human
augcacaguacaaacuggaaac

SEQ ID NO: 779545 - RNA, 22 nt, Human
uuaaaucaggcaucauuucagu

SEQ ID NO: 779546 - RNA, 22 nt, Human
ucugcuauuuucuaucugugug

SEQ ID NO: 779547 - RNA, 22 nt, Human
ccagaggaauugggaaacaugu

SEQ ID NO: 779548 - RNA, 22 nt, Human
ggcaggugaucuagagucaaua

SEQ ID NO: 779549 - RNA, 22 nt, Human
agccaagcugaucuccugcuga

SEQ ID NO: 779550 - RNA, 22 nt, Human
gcucucccgcagccuggugggc

SEQ ID NO: 779551 - RNA, 22 nt, Human
cagaagaguagcugaacaaguu

SEQ ID NO: 779552 - RNA, 22 nt, Human
uauguucuuagaagaggcagca

SEQ ID NO: 779553 - RNA, 22 nt, Human
acagcuggacaggggagaguuu

SEQ ID NO: 779554 - RNA, 22 nt, Human
uggcuucauucuccugugaaua

SEQ ID NO: 779555 - RNA, 22 nt, Human
cuugggaaguguuuaaagcuga

SEQ ID NO: 779556 - RNA, 22 nt, Human
aaagaguucuaugaucuuucca

SEQ ID NO: 779557 - RNA, 19 nt, Human
ccugugugggguagagauc

SEQ ID NO: 779558 - RNA, 22 nt, Human
gugcucuccagccccacgugga

SEQ ID NO: 779559 - RNA, 22 nt, Human
ccucacaguuuggcuaacugug

SEQ ID NO: 779560 - RNA, 22 nt, Human
ugccagugggugugcagagacu

SEQ ID NO: 779561 - RNA, 22 nt, Human
caaccugagacuccaggcaccu

SEQ ID NO: 779562 - RNA, 22 nt, Human
cagcuucuccauucuucuggcu

SEQ ID NO: 779563 - RNA, 22 nt, Human
cuguucucuggcgguggcuguu

SEQ ID NO: 779564 - RNA, 22 nt, Human
aaaccggggccuuuccacaaug

SEQ ID NO: 779565 - RNA, 22 nt, Human
ugcucuaagaacucuaggaauu

SEQ ID NO: 779566 - RNA, 21 nt, Human
gagauuuagaaggaucaauuu

SEQ ID NO: 779567 - RNA, 22 nt, Human
acaagcaugugguaaaaagacc

SEQ ID NO: 779568 - RNA, 22 nt, Human
guccugugcaccgugggauguu

SEQ ID NO: 779569 - RNA, 23 nt, Human
gccuggcuuccaagguaggggag

SEQ ID NO: 779570 - RNA, 22 nt, Human
ugugugaauuacgcguguccug

SEQ ID NO: 779571 - RNA, 22 nt, Human
auggcuuccucuggauuggauu

SEQ ID NO: 779572 - RNA, 19 nt, Human
ccugccugaccccggcuac

SEQ ID NO: 779573 - RNA, 22 nt, Human
auaagagcuagucuuuuccuug

SEQ ID NO: 779574 - RNA, 22 nt, Human
caugggguggugggcaaccuca

SEQ ID NO: 779575 - RNA, 17 nt, Human
gcacucccccaccuccu

SEQ ID NO: 779576 - RNA, 22 nt, Human
cauaauuugauaugcuugaugg

SEQ ID NO: 779577 - RNA, 22 nt, Human
ugccugucuuggaguccuggcc

SEQ ID NO: 779578 - RNA, 22 nt, Human
agaugugggcaauggaauggag

SEQ ID NO: 779579 - RNA, 22 nt, Human
uggcauguuucauggcugcaaa

SEQ ID NO: 779580 - RNA, 22 nt, Human
guguuuauuuucauaguuggcc

SEQ ID NO: 779581 - RNA, 22 nt, Human
ucucagaggcccgacguucucc

SEQ ID NO: 779582 - RNA, 21 nt, Human
cacagcaggguuccugggcuc

SEQ ID NO: 779583 - RNA, 22 nt, Human
ucuauaauccuauuucaacugc

SEQ ID NO: 779584 - RNA, 22 nt, Human
acugggaaauugcccuaguucu

SEQ ID NO: 779585 - RNA, 22 nt, Human
ucucugcucugugccucaguuu

SEQ ID NO: 779586 - RNA, 23 nt, Human
cugggcauggagcuucagaggcu

SEQ ID NO: 779587 - RNA, 22 nt, Human
cuuggcaccaccaaguggccau

SEQ ID NO: 779588 - RNA, 22 nt, Human
cugaaggagaaggccacuguuc

SEQ ID NO: 779589 - RNA, 22 nt, Human
ucagggccaucuuuugccucaa

SEQ ID NO: 779590 - RNA, 22 nt, Human
uuucaaacuguacuuuccccua

SEQ ID NO: 779591 - RNA, 22 nt, Human
caguguggugagauuccaggug

SEQ ID NO: 779592 - RNA, 22 nt, Human
ccccucuggucaaccagucaca

SEQ ID NO: 779593 - RNA, 22 nt, Human
cuggagcugguauagggacaaa

SEQ ID NO: 779594 - RNA, 22 nt, Human
gcucagugcaucauuccaggcu

SEQ ID NO: 779595 - RNA, 22 nt, Human
cagauggcacagauuuagagug

SEQ ID NO: 779596 - RNA, 22 nt, Human
caaggccauauugccuguaugu

SEQ ID NO: 779597 - RNA, 22 nt, Human
ucagugcagggugggagagaga

SEQ ID NO: 779598 - RNA, 22 nt, Human
uccuggauggagcugcccucgc

SEQ ID NO: 779599 - RNA, 22 nt, Human
aguccuucccaucugacacccu

SEQ ID NO: 779600 - RNA, 22 nt, Human
cccauuuagauaacaguucaaa

SEQ ID NO: 779601 - RNA, 22 nt, Human
uuuacaaggcagaacugauuaa

SEQ ID NO: 779602 - RNA, 22 nt, Human
ugaggccaugcccgugccggcc

SEQ ID NO: 779603 - RNA, 22 nt, Human
uagacauuugaaugugaaauga

SEQ ID NO: 779604 - RNA, 22 nt, Human
aagauacauuaugucucucuga

SEQ ID NO: 779605 - RNA, 22 nt, Human
cugcucagaggaaggaaugucu

SEQ ID NO: 779606 - RNA, 22 nt, Human
gcaugggaggacagucugggcu

SEQ ID NO: 779607 - RNA, 21 nt, Human
caaaggacuguagcucacuga

SEQ ID NO: 779608 - RNA, 22 nt, Human
gucucugggugugugaugccaa

SEQ ID NO: 779609 - RNA, 22 nt, Human
accaggacuuuguauucagcuu

SEQ ID NO: 779610 - RNA, 22 nt, Human
uuacugauacacauaagaauuu

SEQ ID NO: 779611 - RNA, 22 nt, Human
aucucccacaggcugcuacuuc

SEQ ID NO: 779612 - RNA, 21 nt, Human
ucauuuauugagaaaugacug

SEQ ID NO: 779613 - RNA, 22 nt, Human
ucucagggcagcaaggaagcau

SEQ ID NO: 779614 - RNA, 22 nt, Human
ucuuccagccaauagcguccuu

SEQ ID NO: 779615 - RNA, 22 nt, Human
cagggcucagaagacagaccuc

SEQ ID NO: 779616 - RNA, 22 nt, Human
ugcaccauacccauuccccucu

SEQ ID NO: 779617 - RNA, 22 nt, Human
ugguggggccagacuucagcuc

SEQ ID NO: 779618 - RNA, 22 nt, Human
cagccagccucucaaccaugca

SEQ ID NO: 779619 - RNA, 22 nt, Human
ccacuguuggcccgaagggguc

SEQ ID NO: 779620 - RNA, 22 nt, Human
cagcauggggaucacuguaggc

SEQ ID NO: 779621 - RNA, 20 nt, Human
gcucccagccugcagucccc

SEQ ID NO: 779622 - RNA, 22 nt, Human
auguuuuuaaauagacuuacag

SEQ ID NO: 779623 - RNA, 22 nt, Human
aagauaaugugucugucuuugc

SEQ ID NO: 779624 - RNA, 22 nt, Human
ugguggcacaagggagagaauc

SEQ ID NO: 779625 - RNA, 22 nt, Human
acaagcaugggcuuugacauca

SEQ ID NO: 779626 - RNA, 22 nt, Human
ucuuccagcuguaggaccuagg

SEQ ID NO: 779627 - RNA, 22 nt, Human
augcugaauauuagccucauga

SEQ ID NO: 779628 - RNA, 22 nt, Human
ggaagggaguaguuggaaugca

SEQ ID NO: 779629 - RNA, 22 nt, Human
guugaaaaugacuuuauaccau

SEQ ID NO: 779630 - RNA, 22 nt, Human
caagauguggugggcugaguuu

SEQ ID NO: 779631 - RNA, 22 nt, Human
ucagagaacuggcauguuuaga

SEQ ID NO: 779632 - RNA, 22 nt, Human
acugggccuguacagagaaaac

SEQ ID NO: 779633 - RNA, 18 nt, Human
gcuuucaauuucuuuccu

SEQ ID NO: 779634 - RNA, 22 nt, Human
uagcaacagcaauagugguauu

SEQ ID NO: 779635 - RNA, 22 nt, Human
ugccccucuccugugauccaag

SEQ ID NO: 779636 - RNA, 22 nt, Human
uguuucaagcaauagcauuuca

SEQ ID NO: 779637 - RNA, 22 nt, Human
cugugucuucuguuuugaaguu

SEQ ID NO: 779638 - RNA, 22 nt, Human
cuuucuggacaagacagaggga

SEQ ID NO: 779639 - RNA, 22 nt, Human
agacagcaugauacaugaugcu

SEQ ID NO: 779640 - RNA, 22 nt, Human
aggggagguggcagaaaugugc

SEQ ID NO: 779641 - RNA, 22 nt, Human
gccaggaggcuuaacuggacag

SEQ ID NO: 779642 - RNA, 22 nt, Human
ugucucugccagcuagcagaau

SEQ ID NO: 779643 - RNA, 22 nt, Human
aagaacagauucagccugaacu

SEQ ID NO: 779644 - RNA, 18 nt, Human
cucugucauaagugucau

SEQ ID NO: 779645 - RNA, 22 nt, Human
ugaguacuuuauguuaguuauu

SEQ ID NO: 779646 - RNA, 17 nt, Human
uauguguguuugcagca

SEQ ID NO: 779647 - RNA, 22 nt, Human
gccaagcuuugcaggaguguug

SEQ ID NO: 779648 - RNA, 22 nt, Human
auaaauggcuuucauuccuagg

SEQ ID NO: 779649 - RNA, 22 nt, Human
ggcccagcucuauugaauuaca

SEQ ID NO: 779650 - RNA, 22 nt, Human
ugucucaguucccuucucugga

SEQ ID NO: 779651 - RNA, 22 nt, Human
caggcucccacuuggcuuaaag

SEQ ID NO: 779652 - RNA, 20 nt, Human
ugcaguguccucacuuguca

SEQ ID NO: 779653 - RNA, 22 nt, Human
gggaaagaccuuccuggggugu

SEQ ID NO: 779654 - RNA, 22 nt, Human
ucacauguauaugcagcacagc

SEQ ID NO: 779655 - RNA, 22 nt, Human
aacauacagugagcaguggacu

SEQ ID NO: 779656 - RNA, 22 nt, Human
aggccacagauacugugaagua

SEQ ID NO: 779657 - RNA, 19 nt, Human
ccuugccugucccugcagc

SEQ ID NO: 779658 - RNA, 22 nt, Human
auuuucaagggagaggccucug

SEQ ID NO: 779659 - RNA, 22 nt, Human
aauauagcauuguaugacugug

SEQ ID NO: 779660 - RNA, 18 nt, Human
ucuguggcagcagugcac

SEQ ID NO: 779661 - RNA, 22 nt, Human
ucuguaaaacuucuuuguaaau

SEQ ID NO: 779662 - RNA, 22 nt, Human
uagcagcaccuuucuaaucuga

SEQ ID NO: 779663 - RNA, 22 nt, Human
uucuuacagauuuggugaauga

SEQ ID NO: 779664 - RNA, 19 nt, Human
ccucuccgcccaccagccc

SEQ ID NO: 779665 - RNA, 22 nt, Human
gaauacaccaaggaaucagaau

SEQ ID NO: 779666 - RNA, 22 nt, Human
gacaggguacgggcuaggcaca

SEQ ID NO: 779667 - RNA, 22 nt, Human
caggccaauaucacaugcuaug

SEQ ID NO: 779668 - RNA, 22 nt, Human
agggccagcccauaaugccaaa

SEQ ID NO: 779669 - RNA, 22 nt, Human
uuccaggcaugucagacauagg

SEQ ID NO: 779670 - RNA, 23 nt, Human
gggugggccaaauuagguagccu

SEQ ID NO: 779671 - RNA, 19 nt, Human
cuuugcaggggauggguga

SEQ ID NO: 779672 - RNA, 22 nt, Human
acacugagauuuuccugacacc

SEQ ID NO: 779673 - RNA, 22 nt, Human
acaugcauggacauguauauau

SEQ ID NO: 779674 - RNA, 22 nt, Human
ucaggcccuuugcugcugcccc

SEQ ID NO: 779675 - RNA, 22 nt, Human
ugcuuugugacagauuaguuuu

SEQ ID NO: 779676 - RNA, 22 nt, Human
acuguuauuuguaauccauuau

SEQ ID NO: 779677 - RNA, 22 nt, Human
ugugcccaucccucuggagugu

SEQ ID NO: 779678 - RNA, 22 nt, Human
caggcagagaacucauccguga

SEQ ID NO: 779679 - RNA, 22 nt, Human
uuuuugucaucuauuucuggug

SEQ ID NO: 779680 - RNA, 22 nt, Human
caggaguccugaaaucugauga

SEQ ID NO: 779681 - RNA, 22 nt, Human
aaauguauugcauaggauauuu

SEQ ID NO: 779682 - RNA, 22 nt, Human
auuggcaguuagugacgaggcu

SEQ ID NO: 779683 - RNA, 17 nt, Human
uccaggcauaucuccua

SEQ ID NO: 779684 - RNA, 22 nt, Human
cuguccuuacugcuucuggcuu

SEQ ID NO: 779685 - RNA, 18 nt, Human
uaggcugggggcuguagu

SEQ ID NO: 779686 - RNA, 22 nt, Human
uggacucuaagcagaggaucua

SEQ ID NO: 779687 - RNA, 22 nt, Human
aauuucuccaagaaugcuuaga

SEQ ID NO: 779688 - RNA, 22 nt, Human
ucucaugaaaggucucuccugg

SEQ ID NO: 779689 - RNA, 22 nt, Human
gcgaggaggggugcugggcccc

SEQ ID NO: 779690 - RNA, 22 nt, Human
guaaaaccugcuuuucaacacc

SEQ ID NO: 779691 - RNA, 22 nt, Human
guuuaacugggagugugggaaa

SEQ ID NO: 779692 - RNA, 22 nt, Human
ucacccagccuuggcggguuug

SEQ ID NO: 779693 - RNA, 22 nt, Human
ucacuucuucccuugcacauau

SEQ ID NO: 779694 - RNA, 22 nt, Human
gagucugagaacugggcucagu

SEQ ID NO: 779695 - RNA, 22 nt, Human
agauccaggaugucccaaaaua

SEQ ID NO: 779696 - RNA, 22 nt, Human
gagcucagaggcgucuuugucc

SEQ ID NO: 779697 - RNA, 22 nt, Human
gggugggcccagcccagagaag

SEQ ID NO: 779698 - RNA, 19 nt, Human
uuaucuguguugcaguggu

SEQ ID NO: 779699 - RNA, 22 nt, Human
aucagaacaaaagaacaguuua

SEQ ID NO: 779700 - RNA, 22 nt, Human
acagguguacaaugcaugacag

SEQ ID NO: 779701 - RNA, 23 nt, Human
uccaggcacgcauuucuucuagc

SEQ ID NO: 779702 - RNA, 22 nt, Human
gaccaaggcccucagugggagg

SEQ ID NO: 779703 - RNA, 22 nt, Human
gcuuuggaaggggcugguggag

SEQ ID NO: 779704 - RNA, 22 nt, Human
aacacucucuguugguaaggcu

SEQ ID NO: 779705 - RNA, 22 nt, Human
uuggagcccugaggaucuggau

SEQ ID NO: 779706 - RNA, 22 nt, Human
ucuagggagaagcucugucugu

SEQ ID NO: 779707 - RNA, 22 nt, Human
cagauaugcugagacuccugug

SEQ ID NO: 779708 - RNA, 22 nt, Human
agcauuaagagagacugaacug

SEQ ID NO: 779709 - RNA, 22 nt, Human
ucagggaaauuuccauguguuu

SEQ ID NO: 779710 - RNA, 22 nt, Human
uaccacagucugccauuagaug

SEQ ID NO: 779711 - RNA, 22 nt, Human
uccagcucuucaguucugcaaa

SEQ ID NO: 779712 - RNA, 22 nt, Human
uguccccaagguucagcccaca

SEQ ID NO: 779713 - RNA, 22 nt, Human
aggugggugccuauguauguau

SEQ ID NO: 779714 - RNA, 22 nt, Human
gcuguccagguuguggagcaac

SEQ ID NO: 779715 - RNA, 22 nt, Human
acagcuaagcucccacaaccug

SEQ ID NO: 779716 - RNA, 22 nt, Human
uaauaugggcagucugaauaua

SEQ ID NO: 779717 - RNA, 22 nt, Human
agcaacuucuacagauauagca

SEQ ID NO: 779718 - RNA, 22 nt, Human
uuuaucugggauuuugcagucu

SEQ ID NO: 779719 - RNA, 22 nt, Human
gucauugagucgucagagucuu

SEQ ID NO: 779720 - RNA, 22 nt, Human
agcccggcuuccccgguugcua

SEQ ID NO: 779721 - RNA, 22 nt, Human
ugugucaggagauagcaaaggg

SEQ ID NO: 779722 - RNA, 22 nt, Human
cgaaaucagcaucuugaggcaa

SEQ ID NO: 779723 - RNA, 20 nt, Human
uguguguguacuucuaaaua

SEQ ID NO: 779724 - RNA, 22 nt, Human
auguuuaaauuuauagacagug

SEQ ID NO: 779725 - RNA, 22 nt, Human
ggaggccaaggcagguggauca

SEQ ID NO: 779726 - RNA, 22 nt, Human
aagcugccacacggugaguacu

SEQ ID NO: 779727 - RNA, 22 nt, Human
uuuguugacaucccuguacuuu

SEQ ID NO: 779728 - RNA, 22 nt, Human
gcaaacauucaggaguacagga

SEQ ID NO: 779729 - RNA, 22 nt, Human
uaugacaaaugauauauuuggc

SEQ ID NO: 779730 - RNA, 22 nt, Human
gauguuuucuggaaaaugaaug

SEQ ID NO: 779731 - RNA, 22 nt, Human
uuugucauaucacacaauuuug

SEQ ID NO: 779732 - RNA, 22 nt, Human
ggcuucaauguauucacauuca

SEQ ID NO: 779733 - RNA, 22 nt, Human
aucagaagugauguguguuauu

SEQ ID NO: 779734 - RNA, 22 nt, Human
uaaggcacgcauaagagggggc

SEQ ID NO: 779735 - RNA, 22 nt, Human
cugagagacuguuuguaauauu

SEQ ID NO: 779736 - RNA, 22 nt, Human
gcaaaaauuccagggacgacuc

SEQ ID NO: 779737 - RNA, 22 nt, Human
gcacacagacuaaccauauuuc

SEQ ID NO: 779738 - RNA, 22 nt, Human
ugcuggccugggcugcaccuug

SEQ ID NO: 779739 - RNA, 22 nt, Human
aauuccagccucaguucuauua

SEQ ID NO: 779740 - RNA, 19 nt, Human
ugagacagggauucaggug

SEQ ID NO: 779741 - RNA, 22 nt, Human
ugugaaagauacuaggcagagg

SEQ ID NO: 779742 - RNA, 22 nt, Human
ucuuuauuuaagucuguuguaa

SEQ ID NO: 779743 - RNA, 22 nt, Human
gagucagacagggucacccaga

SEQ ID NO: 779744 - RNA, 22 nt, Human
augugagaacucaggaaauacu

SEQ ID NO: 779745 - RNA, 22 nt, Human
gcaccccucagcuuguuuacua

SEQ ID NO: 779746 - RNA, 22 nt, Human
gagagggcucuguguggguacu

SEQ ID NO: 779747 - RNA, 22 nt, Human
cauggcuuuguucauauaauuu

SEQ ID NO: 779748 - RNA, 22 nt, Human
agaguacauucagagcuaccua

SEQ ID NO: 779749 - RNA, 22 nt, Human
uucuuauaaguuaauauuucca

SEQ ID NO: 779750 - RNA, 22 nt, Human
cuauuacaaucugcuacuauga

SEQ ID NO: 779751 - RNA, 22 nt, Human
agcacuuugggagauaaagcug

SEQ ID NO: 779752 - RNA, 22 nt, Human
aaguaggaauccgaaugaguag

SEQ ID NO: 779753 - RNA, 22 nt, Human
agaacaaaucgauggaagccug

SEQ ID NO: 779754 - RNA, 22 nt, Human
augacaggaggcagcugggcag

SEQ ID NO: 779755 - RNA, 22 nt, Human
uagauucuguaugucugcucuc

SEQ ID NO: 779756 - RNA, 22 nt, Human
cuccaggacccaguggcuccag

SEQ ID NO: 779757 - RNA, 22 nt, Human
uuauuucauguaaaauuuaugu

SEQ ID NO: 779758 - RNA, 22 nt, Human
gaaggcuaaaggggcagagguu

SEQ ID NO: 779759 - RNA, 22 nt, Human
uaugcuuuaacccucuuauauu

SEQ ID NO: 779760 - RNA, 22 nt, Human
guauaugagaaccauggaggug

SEQ ID NO: 779761 - RNA, 22 nt, Human
ugagaagcagcuuacagguguc

SEQ ID NO: 779762 - RNA, 22 nt, Human
gcugccacgaucucugcuguag

SEQ ID NO: 779763 - RNA, 22 nt, Human
guuuugaauacuacuagaacuu

SEQ ID NO: 779764 - RNA, 22 nt, Human
auuucauugaaguuaauucuuc

SEQ ID NO: 779765 - RNA, 22 nt, Human
ccuggccucgugcucacggcuc

SEQ ID NO: 779766 - RNA, 22 nt, Human
auguuacagaaagcaaagauga

SEQ ID NO: 779767 - RNA, 22 nt, Human
cugcagaccucugagguccaug

SEQ ID NO: 779768 - RNA, 22 nt, Human
uccucuggcucuuucccuagga

SEQ ID NO: 779769 - RNA, 21 nt, Human
ugaagccugaggcauagcccc

SEQ ID NO: 779770 - RNA, 22 nt, Human
gaggaggaguauauauuagaau

SEQ ID NO: 779771 - RNA, 22 nt, Human
aacaugauuuaguauaaugcag

SEQ ID NO: 779772 - RNA, 22 nt, Human
cugaggaguuuggguuguucaa

SEQ ID NO: 779773 - RNA, 22 nt, Human
cacaaauggccguguucaaaga

SEQ ID NO: 779774 - RNA, 22 nt, Human
cuaaagaauuuugcuugaccag

SEQ ID NO: 779775 - RNA, 23 nt, Human
cacauauagcagccacuaagguc

SEQ ID NO: 779776 - RNA, 22 nt, Human
auccaaaguagauuaagucaca

SEQ ID NO: 779777 - RNA, 22 nt, Human
gucccucucaaauuuauaugcu

SEQ ID NO: 779778 - RNA, 22 nt, Human
auagugucuuucuucacaggca

SEQ ID NO: 779779 - RNA, 22 nt, Human
uuuagcaauuucuaaaaguguu

SEQ ID NO: 779780 - RNA, 21 nt, Human
aggcugcaugcaugagugugg

SEQ ID NO: 779781 - RNA, 22 nt, Human
cccuggaguccuggcaguugau

SEQ ID NO: 779782 - RNA, 22 nt, Human
gucacugccucuuaacuuuuuc

SEQ ID NO: 779783 - RNA, 22 nt, Human
agaucacagucaauugcaaguu

SEQ ID NO: 779784 - RNA, 22 nt, Human
uccagggacagcgcuggagcua

SEQ ID NO: 779785 - RNA, 22 nt, Human
gcccucagugaccacugauuca

SEQ ID NO: 779786 - RNA, 17 nt, Human
uuuaaacuacuacaagg

SEQ ID NO: 779787 - RNA, 22 nt, Human
uagcaacugcucuauucuagga

SEQ ID NO: 779788 - RNA, 22 nt, Human
augacaaaauaaauggucucug

SEQ ID NO: 779789 - RNA, 20 nt, Human
uucauucauuccacaacuuc

SEQ ID NO: 779790 - RNA, 22 nt, Human
cacauuuuuacugccaacuuaa

SEQ ID NO: 779791 - RNA, 22 nt, Human
uaggcacaaaaugaaaauggca

SEQ ID NO: 779792 - RNA, 22 nt, Human
uucagcaggcgguagcugccac

SEQ ID NO: 779793 - RNA, 22 nt, Human
ucagugguaugcgugggagcug

SEQ ID NO: 779794 - RNA, 22 nt, Human
agcucuuaucucuaagcacagc

SEQ ID NO: 779795 - RNA, 22 nt, Human
ucugggaugaagccagaaacuu

SEQ ID NO: 779796 - RNA, 22 nt, Human
ggagcucugaggaugcauuggu

SEQ ID NO: 779797 - RNA, 18 nt, Human
gcaaggcucaggccaggc

SEQ ID NO: 779798 - RNA, 22 nt, Human
ggcaugagagguccuggggauu

SEQ ID NO: 779799 - RNA, 22 nt, Human
auugaaagagaauguagcucuu

SEQ ID NO: 779800 - RNA, 19 nt, Human
aagaggcaacccucgagcc

SEQ ID NO: 779801 - RNA, 22 nt, Human
gaccugagauuuugaggcucau

SEQ ID NO: 779802 - RNA, 19 nt, Human
acuggcacacaggggcugc

SEQ ID NO: 779803 - RNA, 22 nt, Human
aggcuucauguagaugguuccc

SEQ ID NO: 779804 - RNA, 22 nt, Human
aauaucaguauauuguaucagu

SEQ ID NO: 779805 - RNA, 22 nt, Human
caguguuuguggaauucaggug

SEQ ID NO: 779806 - RNA, 22 nt, Human
gugaccagccagugcugucugu

SEQ ID NO: 779807 - RNA, 23 nt, Human
ugcugguguuuuugggaccaggg

SEQ ID NO: 779808 - RNA, 22 nt, Human
cagggccacacggaagggaaca

SEQ ID NO: 779809 - RNA, 22 nt, Human
ugggguaggagucagcgagaga

SEQ ID NO: 779810 - RNA, 22 nt, Human
ugcagggauuguuggcauccau

SEQ ID NO: 779811 - RNA, 22 nt, Human
cuuauucagcacuugcucugua

SEQ ID NO: 779812 - RNA, 22 nt, Human
ucacaugauguuuccucugugc

SEQ ID NO: 779813 - RNA, 22 nt, Human
gacagaggcuggagcaccuccu

SEQ ID NO: 779814 - RNA, 22 nt, Human
uaacacuauccagauaugauaa

SEQ ID NO: 779815 - RNA, 22 nt, Human
uaccagcucacacaaucuuugu

SEQ ID NO: 779816 - RNA, 22 nt, Human
uaagaggcaaaagauacucaga

SEQ ID NO: 779817 - RNA, 22 nt, Human
gugagagccugucuggaugucg

SEQ ID NO: 779818 - RNA, 22 nt, Human
ggucacaugguugagcuugauc

SEQ ID NO: 779819 - RNA, 22 nt, Human
uggcuugcuacugaggugucag

SEQ ID NO: 779820 - RNA, 22 nt, Human
acauucaugcaccuuccuaucc

SEQ ID NO: 779821 - RNA, 22 nt, Human
aggagcucagccugcagggagc

SEQ ID NO: 779822 - RNA, 22 nt, Human
agcuggaauuacaggcacgcac

SEQ ID NO: 779823 - RNA, 21 nt, Human
aggacaggaacuggcugaaua

SEQ ID NO: 779824 - RNA, 22 nt, Human
ugcaaacacuucaacgugcauc

SEQ ID NO: 779825 - RNA, 22 nt, Human
ucauuucugagccuuccaugau

SEQ ID NO: 779826 - RNA, 22 nt, Human
uucuuuaaaauagugagaaaga

SEQ ID NO: 779827 - RNA, 22 nt, Human
uuucuggcagcgggacaggggu

SEQ ID NO: 779828 - RNA, 22 nt, Human
agcugaaaggguguuggagugu

SEQ ID NO: 779829 - RNA, 22 nt, Human
ucagugcaggaauuuccuuaga

SEQ ID NO: 779830 - RNA, 22 nt, Human
ccucaggauacaggagccacag

SEQ ID NO: 779831 - RNA, 21 nt, Human
uaacaaagacuucuggucagg

SEQ ID NO: 779832 - RNA, 22 nt, Human
cagcacugcugcuguacacaca

SEQ ID NO: 779833 - RNA, 22 nt, Human
uagcagaguuugguaccugggg

SEQ ID NO: 779834 - RNA, 22 nt, Human
augagguuugagccucuugacc

SEQ ID NO: 779835 - RNA, 22 nt, Human
uuauuucauauaauguuaucaa

SEQ ID NO: 779836 - RNA, 22 nt, Human
ucauguaaauguggaugcuucc

SEQ ID NO: 779837 - RNA, 22 nt, Human
uggcagggccugcucaucaucc

SEQ ID NO: 779838 - RNA, 22 nt, Human
cagugccacaggaauggccaau

SEQ ID NO: 779839 - RNA, 22 nt, Human
agcagggcagcuuuuuucagaa

SEQ ID NO: 779840 - RNA, 22 nt, Human
auucuaacacaugcucuaagaa

SEQ ID NO: 779841 - RNA, 19 nt, Human
aggaaacugucuuuuccag

SEQ ID NO: 779842 - RNA, 22 nt, Human
ggagccaggcauaucggggcac

SEQ ID NO: 779843 - RNA, 22 nt, Human
cacagcagagggagccauugaa

SEQ ID NO: 779844 - RNA, 22 nt, Human
uuauugcuggcaccuucaauuc

SEQ ID NO: 779845 - RNA, 22 nt, Human
uggcagagacuccuccugggag

SEQ ID NO: 779846 - RNA, 22 nt, Human
uguguacuugaaagggcagguc

SEQ ID NO: 779847 - RNA, 22 nt, Human
gcacacaguagggauucaauga

SEQ ID NO: 779848 - RNA, 22 nt, Human
ccacugaggccugggcccaggg

SEQ ID NO: 779849 - RNA, 22 nt, Human
ugauucaauuaucugaugcuuu

SEQ ID NO: 779850 - RNA, 22 nt, Human
cagcaucaacauucucagcucu

SEQ ID NO: 779851 - RNA, 22 nt, Human
ugcaaagauaugagaagcugua

SEQ ID NO: 779852 - RNA, 22 nt, Human
uccugagauccuuuuagggauc

SEQ ID NO: 779853 - RNA, 21 nt, Human
uucaggguuucacaauacuaa

SEQ ID NO: 779854 - RNA, 22 nt, Human
uagauucucugcuggcugacau

SEQ ID NO: 779855 - RNA, 22 nt, Human
caugugugaagacugcgggcca

SEQ ID NO: 779856 - RNA, 22 nt, Human
aaaugcauuuuuaauuagaccc

SEQ ID NO: 779857 - RNA, 22 nt, Human
cugagaauggacagcagggcag

SEQ ID NO: 779858 - RNA, 22 nt, Human
ugucacauucugaugugaggug

SEQ ID NO: 779859 - RNA, 22 nt, Human
cuggcagcuuagcacucugguu

SEQ ID NO: 779860 - RNA, 22 nt, Human
aacauuuauugagcaccuacug

SEQ ID NO: 779861 - RNA, 22 nt, Human
ccugucucuguuaccacauuug

SEQ ID NO: 779862 - RNA, 21 nt, Human
ggggcagagcuaggcccugca

SEQ ID NO: 779863 - RNA, 22 nt, Human
uuaaggaacuugucuuucucuu

SEQ ID NO: 779864 - RNA, 22 nt, Human
augcccgauaccuaguuaacuc

SEQ ID NO: 779865 - RNA, 22 nt, Human
aaugcauguuuccucucagcag

SEQ ID NO: 779866 - RNA, 22 nt, Human
gcagguggucacucauccccag

SEQ ID NO: 779867 - RNA, 22 nt, Human
cugccagcuggagaccaaggaa

SEQ ID NO: 779868 - RNA, 22 nt, Human
ucagaagcaagcuucuacuucu

SEQ ID NO: 779869 - RNA, 22 nt, Human
aaagacauuagauuaacguaca

SEQ ID NO: 779870 - RNA, 22 nt, Human
gcacugugaauauacuagcaaa

SEQ ID NO: 779871 - RNA, 22 nt, Human
ucauuugugugagugauuugac

SEQ ID NO: 779872 - RNA, 22 nt, Human
aggagucacucagggcuucauc

SEQ ID NO: 779873 - RNA, 22 nt, Human
gauguguaacaugcugugacau

SEQ ID NO: 779874 - RNA, 22 nt, Human
auggccagcaagguagggcaau

SEQ ID NO: 779875 - RNA, 22 nt, Human
gcacaguggaguguguccaggg

SEQ ID NO: 779876 - RNA, 22 nt, Human
aguuuuucuccccuggcuucau

SEQ ID NO: 779877 - RNA, 19 nt, Human
gaacacuuacuauauuucu

SEQ ID NO: 779878 - RNA, 22 nt, Human
uacaguagaaucuuauagccca

SEQ ID NO: 779879 - RNA, 22 nt, Human
augcuacgaaugagagcauaua

SEQ ID NO: 779880 - RNA, 19 nt, Human
ccagagacauuggcaucuu

SEQ ID NO: 779881 - RNA, 22 nt, Human
accagagaaaacacagcaggcu

SEQ ID NO: 779882 - RNA, 22 nt, Human
cucuccaguuaccuaggucuga

SEQ ID NO: 779883 - RNA, 18 nt, Human
cuuuaugugcagagcuuu

SEQ ID NO: 779884 - RNA, 22 nt, Human
ucagucccaagguccugaggug

SEQ ID NO: 779885 - RNA, 22 nt, Human
ggagcccuccaucccuugcggc

SEQ ID NO: 779886 - RNA, 22 nt, Human
cuccagagauacacggucuugc

SEQ ID NO: 779887 - RNA, 22 nt, Human
aggcugaggcuggcagcuccag

SEQ ID NO: 779888 - RNA, 22 nt, Human
ucagggcaucaucaugaauaua

SEQ ID NO: 779889 - RNA, 21 nt, Human
gagcugggcgaggcuccgggg

SEQ ID NO: 779890 - RNA, 17 nt, Human
gaggacagggaaguagg

SEQ ID NO: 779891 - RNA, 22 nt, Human
uucacauuuacugguuuguccg

SEQ ID NO: 779892 - RNA, 20 nt, Human
cagcucugggaaagaggcca

SEQ ID NO: 779893 - RNA, 23 nt, Human
ccuugucuggcuggcuggacuuu

SEQ ID NO: 779894 - RNA, 22 nt, Human
agugagaguauuaaugugaacu

SEQ ID NO: 779895 - RNA, 22 nt, Human
uuucagacaguggguccaucca

SEQ ID NO: 779896 - RNA, 21 nt, Human
uuuaguucaaguacagaacca

SEQ ID NO: 779897 - RNA, 22 nt, Human
agggcucccgcgguguccggga

SEQ ID NO: 779898 - RNA, 22 nt, Human
uauuuggaaacaauucacaugc

SEQ ID NO: 779899 - RNA, 18 nt, Human
guccauggccuccaccca

SEQ ID NO: 779900 - RNA, 22 nt, Human
auguguucacgugcacaugugc

SEQ ID NO: 779901 - RNA, 22 nt, Human
acguuugcuuucuuuggccugg

SEQ ID NO: 779902 - RNA, 22 nt, Human
caugcugugugguuagaacugu

SEQ ID NO: 779903 - RNA, 22 nt, Human
uggcucacaaucucccaugaag

SEQ ID NO: 779904 - RNA, 22 nt, Human
ugaccacagacccaaugacuac

SEQ ID NO: 779905 - RNA, 22 nt, Human
gaaacagucaacuuucuuuccc

SEQ ID NO: 779906 - RNA, 22 nt, Human
cucccugggcagauguggcucu

SEQ ID NO: 779907 - RNA, 19 nt, Human
cuccagaauacauguuccu

SEQ ID NO: 779908 - RNA, 22 nt, Human
aaugaauaccguuucacucagu

SEQ ID NO: 779909 - RNA, 22 nt, Human
uauuuuacaugauccagaguug

SEQ ID NO: 779910 - RNA, 22 nt, Human
accuacauggcuuuaaguaagu

SEQ ID NO: 779911 - RNA, 22 nt, Human
gcauguuauguaucugcccagc

SEQ ID NO: 779912 - RNA, 18 nt, Human
ucucagaggccauccuag

SEQ ID NO: 779913 - RNA, 22 nt, Human
auccaagucagggauaguuuga

SEQ ID NO: 779914 - RNA, 22 nt, Human
gaggcagcugggauacaaggga

SEQ ID NO: 779915 - RNA, 22 nt, Human
ccugaggauuguuggugcuucc

SEQ ID NO: 779916 - RNA, 22 nt, Human
ccuccugggacaggcuggcaca

SEQ ID NO: 779917 - RNA, 22 nt, Human
aggcucagacaggaaaaguaac

SEQ ID NO: 779918 - RNA, 22 nt, Human
cacaggugcuccucggggagcu

SEQ ID NO: 779919 - RNA, 22 nt, Human
cuuuuuacucuguugucucagc

SEQ ID NO: 779920 - RNA, 22 nt, Human
uaagagaugguuaucaaaagca

SEQ ID NO: 779921 - RNA, 22 nt, Human
uaaagcauguacugugugcuag

SEQ ID NO: 779922 - RNA, 22 nt, Human
cgcugggcgcgcuccgaacccg

SEQ ID NO: 779923 - RNA, 23 nt, Human
auguuaccaauggaggaaauugg

SEQ ID NO: 779924 - RNA, 22 nt, Human
ucagaaaagacucaggggcuga

SEQ ID NO: 779925 - RNA, 22 nt, Human
ggcaaaaaccgcaauaacuucu

SEQ ID NO: 779926 - RNA, 22 nt, Human
ucagugcaguagaacuuuaguu

SEQ ID NO: 779927 - RNA, 22 nt, Human
gggcuggaggaccggccucgga

SEQ ID NO: 779928 - RNA, 22 nt, Human
uuuagaaauugcagagugggug

SEQ ID NO: 779929 - RNA, 22 nt, Human
cacaugaacaugcuggaaaagc

SEQ ID NO: 779930 - RNA, 22 nt, Human
auucaaacacuuugagaaguuc

SEQ ID NO: 779931 - RNA, 22 nt, Human
aaucauucucaugccaguuucc

SEQ ID NO: 779932 - RNA, 22 nt, Human
gccugccuggagcuugagguga

SEQ ID NO: 779933 - RNA, 22 nt, Human
uuguuuggaacuuggugccacc

SEQ ID NO: 779934 - RNA, 21 nt, Human
uuuauuaacaacuguggacgu

SEQ ID NO: 779935 - RNA, 19 nt, Human
gcgaggaagucacuguggc

SEQ ID NO: 779936 - RNA, 22 nt, Human
uaaggccaccguuauagaacca

SEQ ID NO: 779937 - RNA, 21 nt, Human
ccauaccuaccucaccugguu

SEQ ID NO: 779938 - RNA, 22 nt, Human
agugcuccucagaagaguugga

SEQ ID NO: 779939 - RNA, 22 nt, Human
ggaccuuccuggcuccuggggu

SEQ ID NO: 779940 - RNA, 22 nt, Human
gcagggcugggugggagacaga

SEQ ID NO: 779941 - RNA, 22 nt, Human
cuguggccuggggacacuaucu

SEQ ID NO: 779942 - RNA, 22 nt, Human
aauucaaauuacaauaguuguu

SEQ ID NO: 779943 - RNA, 18 nt, Human
ucuuccaacacugacacc

SEQ ID NO: 779944 - RNA, 20 nt, Human
agaacaaguacuaaaggaga

SEQ ID NO: 779945 - RNA, 22 nt, Human
aacaccagucccaagagaggcu

SEQ ID NO: 779946 - RNA, 22 nt, Human
uuauuuguaaggcagggccagu

SEQ ID NO: 779947 - RNA, 22 nt, Human
ucauaauguaguucauggcugg

SEQ ID NO: 779948 - RNA, 22 nt, Human
ggcggggccucgcgaacggccu

SEQ ID NO: 779949 - RNA, 22 nt, Human
aauuccaaauguuuucaaucca

SEQ ID NO: 779950 - RNA, 22 nt, Human
auccauucuaugugaaaugucc

SEQ ID NO: 779951 - RNA, 22 nt, Human
acccagagugucugucucaguc

SEQ ID NO: 779952 - RNA, 22 nt, Human
ugggagagcagagaacccucuu

SEQ ID NO: 779953 - RNA, 21 nt, Human
agcaagcagaauccaucuaga

SEQ ID NO: 779954 - RNA, 22 nt, Human
cacaugugggaaauggugcuua

SEQ ID NO: 779955 - RNA, 22 nt, Human
ucccagugcuacagacagggca

SEQ ID NO: 779956 - RNA, 21 nt, Human
caguucucuuagauuuccagu

SEQ ID NO: 779957 - RNA, 22 nt, Human
aggagaggcucuaacucugugu

SEQ ID NO: 779958 - RNA, 22 nt, Human
augcaaauaagugcaggcgugg

SEQ ID NO: 779959 - RNA, 22 nt, Human
cucugucaggcugcagaugcuc

SEQ ID NO: 779960 - RNA, 22 nt, Human
accuggcacauucuaccacagu

SEQ ID NO: 779961 - RNA, 22 nt, Human
uuguaagucacaccagggcagg

SEQ ID NO: 779962 - RNA, 22 nt, Human
augcaaaugucaccacuucuaa

SEQ ID NO: 779963 - RNA, 22 nt, Human
acagauuuguucuuuugggcua

SEQ ID NO: 779964 - RNA, 22 nt, Human
aacccagagcuggaggagagua

SEQ ID NO: 779965 - RNA, 22 nt, Human
ccugauggcugucugggccuga

SEQ ID NO: 779966 - RNA, 22 nt, Human
agagugugaagaaagugcaaug

SEQ ID NO: 779967 - RNA, 22 nt, Human
ucagcuuugcaaguuagaaaau

SEQ ID NO: 779968 - RNA, 22 nt, Human
acuucacauuugcaagucuugg

SEQ ID NO: 779969 - RNA, 22 nt, Human
acucaaauagcaacggugagaa

SEQ ID NO: 779970 - RNA, 22 nt, Human
cagaagcagugagagaugugca

SEQ ID NO: 779971 - RNA, 22 nt, Human
cuucugcacugaccuuuugucc

SEQ ID NO: 779972 - RNA, 22 nt, Human
ugggguugccucccgcccugga

SEQ ID NO: 779973 - RNA, 22 nt, Human
aaucuguuuccauuagagucau

SEQ ID NO: 779974 - RNA, 22 nt, Human
uguucucaguaauucuauuuua

SEQ ID NO: 779975 - RNA, 22 nt, Human
cuacauuuuaauaagcugcuua

SEQ ID NO: 779976 - RNA, 22 nt, Human
uacaaagauaguguuagaguaa

SEQ ID NO: 779977 - RNA, 22 nt, Human
aacacauggcaagagcaggaaa

SEQ ID NO: 779978 - RNA, 22 nt, Human
aaugcaaauucuagggcccuau

SEQ ID NO: 779979 - RNA, 22 nt, Human
ggggaccugggcuucaaggguu

SEQ ID NO: 779980 - RNA, 22 nt, Human
ugagcuguacuccuccccaggg

SEQ ID NO: 779981 - RNA, 22 nt, Human
ccugugugccuggccgcgggag

SEQ ID NO: 779982 - RNA, 22 nt, Human
agcaccauuuaucaucuaggua

SEQ ID NO: 779983 - RNA, 22 nt, Human
ggagguggagguugcaaugagc

SEQ ID NO: 779984 - RNA, 22 nt, Human
uuuaagagccuguacaaauauu

SEQ ID NO: 779985 - RNA, 22 nt, Human
acuguacaacugcugagcagaa

SEQ ID NO: 779986 - RNA, 22 nt, Human
aggccuggcaugagaccugaga

SEQ ID NO: 779987 - RNA, 22 nt, Human
augaaugauuugucagucacag

SEQ ID NO: 779988 - RNA, 22 nt, Human
uugcucugauuagguggaaaca

SEQ ID NO: 779989 - RNA, 23 nt, Human
auuugaaacuuucuuguuuccag

SEQ ID NO: 779990 - RNA, 20 nt, Human
aggacuuguuugggcagagu

SEQ ID NO: 779991 - RNA, 22 nt, Human
ccagaacagaccugccugaccu

SEQ ID NO: 779992 - RNA, 22 nt, Human
cccagggaggcccaggcucugc

SEQ ID NO: 779993 - RNA, 22 nt, Human
ugcagaguagugaggggacaga

SEQ ID NO: 779994 - RNA, 22 nt, Human
uuuccacagcuguauaaaauaa

SEQ ID NO: 779995 - RNA, 22 nt, Human
uagcagcuccuaaacaguggug

SEQ ID NO: 779996 - RNA, 22 nt, Human
uagaaacaaagaccugggugcu

SEQ ID NO: 779997 - RNA, 22 nt, Human
ucagggcacaggccuguggguu

SEQ ID NO: 779998 - RNA, 22 nt, Human
aaacaauguugucuccaagagg

SEQ ID NO: 779999 - RNA, 22 nt, Human
gaaguacaaaggacauggaaac

SEQ ID NO: 780000 - RNA, 22 nt, Human
cucucuuucauuggucgccuug

SEQ ID NO: 780001 - RNA, 22 nt, Human
ucagaggcuucugcucaccuca

SEQ ID NO: 780002 - RNA, 22 nt, Human
agugcaaagggaucagauuggg

SEQ ID NO: 780003 - RNA, 22 nt, Human
cuacauuuggagaguauaggaa

SEQ ID NO: 780004 - RNA, 22 nt, Human
uugggugguggggagaguucag

SEQ ID NO: 780005 - RNA, 22 nt, Human
auuauauuugaaagguuggaag

SEQ ID NO: 780006 - RNA, 22 nt, Human
uccagaggcucugagggagagu

SEQ ID NO: 780007 - RNA, 22 nt, Human
aacagccacugauacugaauag

SEQ ID NO: 780008 - RNA, 22 nt, Human
agagaaggguguagccugggcc

SEQ ID NO: 780009 - RNA, 20 nt, Human
uugauaggcagcuugucagg

SEQ ID NO: 780010 - RNA, 22 nt, Human
ggcugcugugaccucaggugau

SEQ ID NO: 780011 - RNA, 22 nt, Human
ugaggacuuuccauguuaaugu

SEQ ID NO: 780012 - RNA, 22 nt, Human
gcuccgugggcauugcuaggug

SEQ ID NO: 780013 - RNA, 22 nt, Human
auuuuguggcagaugcagaacc

SEQ ID NO: 780014 - RNA, 22 nt, Human
agcccaggaguccuuaaggacc

SEQ ID NO: 780015 - RNA, 22 nt, Human
ucucaucugccauuugcaggag

SEQ ID NO: 780016 - RNA, 22 nt, Human
ucuugggagucccaggacauag

SEQ ID NO: 780017 - RNA, 22 nt, Human
augugucuuauuugauuccaca

SEQ ID NO: 780018 - RNA, 22 nt, Human
gaauguuugugcagagucaucu

SEQ ID NO: 780019 - RNA, 22 nt, Human
uaugcauaugaccccaagcuug

SEQ ID NO: 780020 - RNA, 21 nt, Human
agguuuauuucaacuucagga

SEQ ID NO: 780021 - RNA, 22 nt, Human
gcuuacaaacaacagaaauuaa

SEQ ID NO: 780022 - RNA, 21 nt, Human
ucagggaagugugcagaaggg

SEQ ID NO: 780023 - RNA, 22 nt, Human
cugggcacugcagcaggcauca

SEQ ID NO: 780024 - RNA, 19 nt, Human
cuggccacaccugcugguu

SEQ ID NO: 780025 - RNA, 22 nt, Human
ucugugccaccucuccaguguc

SEQ ID NO: 780026 - RNA, 22 nt, Human
uuucaacagaauaugaucagag

SEQ ID NO: 780027 - RNA, 22 nt, Human
gccuggaguacuccuugaagug

SEQ ID NO: 780028 - RNA, 22 nt, Human
uguuucuaggucaauaauuuuu

SEQ ID NO: 780029 - RNA, 22 nt, Human
ucacaucugccuccauagcacc

SEQ ID NO: 780030 - RNA, 22 nt, Human
ggugaaggaggaagcugaugga

SEQ ID NO: 780031 - RNA, 22 nt, Human
uagagcuggaaaacugcaggua

SEQ ID NO: 780032 - RNA, 22 nt, Human
gcagucaguaaggcagccagaa

SEQ ID NO: 780033 - RNA, 22 nt, Human
ugugggugaugaauuuguucuu

SEQ ID NO: 780034 - RNA, 22 nt, Human
auggccagaugaaauaauagag

SEQ ID NO: 780035 - RNA, 22 nt, Human
gacaauuucucaauauagaaac

SEQ ID NO: 780036 - RNA, 22 nt, Human
ugcacugaauaguagacuguac

SEQ ID NO: 780037 - RNA, 22 nt, Human
aauauccacacugugucccugc

SEQ ID NO: 780038 - RNA, 22 nt, Human
auuaaagcuauccagucaugaa

SEQ ID NO: 780039 - RNA, 22 nt, Human
aguaacaucuuugacauuuguu

SEQ ID NO: 780040 - RNA, 22 nt, Human
uauuagggaacugcaagacuaa

SEQ ID NO: 780041 - RNA, 22 nt, Human
uacaaaguuuucuuggauugag

SEQ ID NO: 780042 - RNA, 22 nt, Human
aauguuugcaucuauucacaug

SEQ ID NO: 780043 - RNA, 22 nt, Human
uuaauuaugcaaaaggccccau

SEQ ID NO: 780044 - RNA, 22 nt, Human
uucucuuucugcugggcuggaa

SEQ ID NO: 780045 - RNA, 22 nt, Human
caaaauugaugaauguaugauu

SEQ ID NO: 780046 - RNA, 22 nt, Human
agaguggggacagggccugucc

SEQ ID NO: 780047 - RNA, 22 nt, Human
uccucuccagcaaacuggcuau

SEQ ID NO: 780048 - RNA, 22 nt, Human
uucuucaauaaauucccauaag

SEQ ID NO: 780049 - RNA, 22 nt, Human
acccacgaagaugagcggcaug

SEQ ID NO: 780050 - RNA, 22 nt, Human
gcagcccuuucugggcagggga

SEQ ID NO: 780051 - RNA, 22 nt, Human
acaguguuuuagaaaagcuuga

SEQ ID NO: 780052 - RNA, 22 nt, Human
uggagccaaaaagggaaggaga

SEQ ID NO: 780053 - RNA, 22 nt, Human
uggaggcaccacuggcugcccg

SEQ ID NO: 780054 - RNA, 22 nt, Human
uccccacacagauacagaguag

SEQ ID NO: 780055 - RNA, 22 nt, Human
cuggcugaggucaccaguagcu

SEQ ID NO: 780056 - RNA, 22 nt, Human
acucugccaucccaggugcugu

SEQ ID NO: 780057 - RNA, 22 nt, Human
ccaggccuggccaggggaugcc

SEQ ID NO: 780058 - RNA, 22 nt, Human
uacugaaggacuugaggguuuc

SEQ ID NO: 780059 - RNA, 22 nt, Human
agagaaaguaaagauucuaccu

SEQ ID NO: 780060 - RNA, 22 nt, Human
aagucccugguuccuagcaaaa

SEQ ID NO: 780061 - RNA, 22 nt, Human
ugcaugaugguuuagauggggu

SEQ ID NO: 780062 - RNA, 22 nt, Human
agcuguaugcccaagaugcuau

SEQ ID NO: 780063 - RNA, 22 nt, Human
uagaaagcagaaaccaucagag

SEQ ID NO: 780064 - RNA, 22 nt, Human
ccagcucuguaagcugugaaau

SEQ ID NO: 780065 - RNA, 22 nt, Human
guggauggauugaggcaguggg

SEQ ID NO: 780066 - RNA, 22 nt, Human
agagcagcugcauucagcaccu

SEQ ID NO: 780067 - RNA, 22 nt, Human
agcagaagugccuuagcaauca

SEQ ID NO: 780068 - RNA, 22 nt, Human
uggagaagucaaagugaacagg

SEQ ID NO: 780069 - RNA, 22 nt, Human
auguuucccuucugauuuggga

SEQ ID NO: 780070 - RNA, 22 nt, Human
caaauguaauggcagguuuugc

SEQ ID NO: 780071 - RNA, 22 nt, Human
aauguggcauugucauuauugg

SEQ ID NO: 780072 - RNA, 22 nt, Human
gcugcuuucuguuaggaauugg

SEQ ID NO: 780073 - RNA, 22 nt, Human
uguaugcuuuccaaaaaugcug

SEQ ID NO: 780074 - RNA, 22 nt, Human
gcucuggugaguguaguucagg

SEQ ID NO: 780075 - RNA, 22 nt, Human
ugcuggcccuggcucagggaac

SEQ ID NO: 780076 - RNA, 22 nt, Human
guaccaugagcaucauguuuuu

SEQ ID NO: 780077 - RNA, 22 nt, Human
auuuacagacguggauuagugc

SEQ ID NO: 780078 - RNA, 23 nt, Human
augauaaugccauuaacuuugau

SEQ ID NO: 780079 - RNA, 22 nt, Human
gggugaagcuccugcaggggcc

SEQ ID NO: 780080 - RNA, 22 nt, Human
ucagcuuuggucacauugaguu

SEQ ID NO: 780081 - RNA, 19 nt, Human
uaucacugggcacugagga

SEQ ID NO: 780082 - RNA, 22 nt, Human
cgucuuccucuuacgaugcgcu

SEQ ID NO: 780083 - RNA, 22 nt, Human
acuguauaguauuuauucuuag

SEQ ID NO: 780084 - RNA, 22 nt, Human
ugaaaucuuuaguuucuguccc

SEQ ID NO: 780085 - RNA, 17 nt, Human
gcuccaggcgugaguga

SEQ ID NO: 780086 - RNA, 22 nt, Human
cuguccagucuuuagcaagcug

SEQ ID NO: 780087 - RNA, 20 nt, Human
gcccucugccucccucagcg

SEQ ID NO: 780088 - RNA, 22 nt, Human
cugcccugcagcuccacggacu

SEQ ID NO: 780089 - RNA, 22 nt, Human
augaggagaccaaggccugaug

SEQ ID NO: 780090 - RNA, 22 nt, Human
uuucagaaccgcuaaaauaaau

SEQ ID NO: 780091 - RNA, 22 nt, Human
ucucaggucucaugccaggccu

SEQ ID NO: 780092 - RNA, 22 nt, Human
guggcagagaacaaggagaggu

SEQ ID NO: 780093 - RNA, 22 nt, Human
uuggagugacagaugaggaaac

SEQ ID NO: 780094 - RNA, 22 nt, Human
cuggcccuucucuugcuuccug

SEQ ID NO: 780095 - RNA, 22 nt, Human
auuaaaugguggucauucauuu

SEQ ID NO: 780096 - RNA, 22 nt, Human
uagggcagauucgguggaguuu

SEQ ID NO: 780097 - RNA, 22 nt, Human
uuggagaggcagucuugcucug

SEQ ID NO: 780098 - RNA, 22 nt, Human
cagggacagcacuaaacucuug

SEQ ID NO: 780099 - RNA, 22 nt, Human
ugucaaagcaaggauuaaaugu

SEQ ID NO: 780100 - RNA, 22 nt, Human
uuuccucuuauacaguguuuau

SEQ ID NO: 780101 - RNA, 22 nt, Human
uggcaguggcaucaccccaaua

SEQ ID NO: 780102 - RNA, 22 nt, Human
cacaauuccauggcauucuuug

SEQ ID NO: 780103 - RNA, 22 nt, Human
caagcagagaagucucuaggcu

SEQ ID NO: 780104 - RNA, 22 nt, Human
cuguccugaggcagguggccug

SEQ ID NO: 780105 - RNA, 22 nt, Human
agagauugugcuacucacccaa

SEQ ID NO: 780106 - RNA, 22 nt, Human
agccaggaaugcaugcucugcu

SEQ ID NO: 780107 - RNA, 22 nt, Human
uuagaucuuaggcaaauguguu

SEQ ID NO: 780108 - RNA, 22 nt, Human
cggcagcuccgcgccguaggac

SEQ ID NO: 780109 - RNA, 21 nt, Human
ccaggcuggccaugguauuga

SEQ ID NO: 780110 - RNA, 22 nt, Human
aggugcuagguguguaguggag

SEQ ID NO: 780111 - RNA, 22 nt, Human
cuagcacaguaugguaucagau

SEQ ID NO: 780112 - RNA, 22 nt, Human
aagugcauaaguaugauuauuu

SEQ ID NO: 780113 - RNA, 22 nt, Human
agcaacauugagacugcaguug

SEQ ID NO: 780114 - RNA, 22 nt, Human
ucacagcaguaaagaaaacacu

SEQ ID NO: 780115 - RNA, 22 nt, Human
uaagguuuggcugucucuuggu

SEQ ID NO: 780116 - RNA, 22 nt, Human
gggcagugauuuuccuuagagg

SEQ ID NO: 780117 - RNA, 22 nt, Human
augaucagcaguuuucaguguu

SEQ ID NO: 780118 - RNA, 22 nt, Human
ggagcucaccuuggagucucug

SEQ ID NO: 780119 - RNA, 22 nt, Human
auauagaauacacagggaaagu

SEQ ID NO: 780120 - RNA, 22 nt, Human
ugaauaagaauuauuauaauga

SEQ ID NO: 780121 - RNA, 22 nt, Human
gauacauugaggguggaggacc

SEQ ID NO: 780122 - RNA, 22 nt, Human
guucuucaccaaggucagaggc

SEQ ID NO: 780123 - RNA, 22 nt, Human
uaagguuucuaguuucuaaacu

SEQ ID NO: 780124 - RNA, 22 nt, Human
ugagccacagugagagcuccug

SEQ ID NO: 780125 - RNA, 22 nt, Human
ggcuuaaaaggaaaaugagagu

SEQ ID NO: 780126 - RNA, 22 nt, Human
ucaggaagugguaaaggauguu

SEQ ID NO: 780127 - RNA, 22 nt, Human
uuacacuuaucuagagccaugg

SEQ ID NO: 780128 - RNA, 22 nt, Human
cacauugauaauuaaggccucc

SEQ ID NO: 780129 - RNA, 22 nt, Human
guuuuggcagccguguucacau

SEQ ID NO: 780130 - RNA, 22 nt, Human
uguucauuuggcccuuuuguau

SEQ ID NO: 780131 - RNA, 22 nt, Human
gugagguccucccugcugggag

SEQ ID NO: 780132 - RNA, 22 nt, Human
uggggcucaugccugcuggaac

SEQ ID NO: 780133 - RNA, 22 nt, Human
caaccugacaagguuaaugaau

SEQ ID NO: 780134 - RNA, 22 nt, Human
ccaucuccaguuuauucuuccu

SEQ ID NO: 780135 - RNA, 22 nt, Human
uacaaugcaaaauacugucugc

SEQ ID NO: 780136 - RNA, 19 nt, Human
gaacaaacuuaaacuuuuc

SEQ ID NO: 780137 - RNA, 22 nt, Human
ugaccaaagaguugcuuguauu

SEQ ID NO: 780138 - RNA, 22 nt, Human
uuuaaauuuguguuuagagggu

SEQ ID NO: 780139 - RNA, 22 nt, Human
agucacacuucguaucucuagc

SEQ ID NO: 780140 - RNA, 22 nt, Human
cccagagcugagucugauauau

SEQ ID NO: 780141 - RNA, 22 nt, Human
ugcagagacuugugugcauuug

SEQ ID NO: 780142 - RNA, 22 nt, Human
ccaccaggcucuguccgagcgg

SEQ ID NO: 780143 - RNA, 22 nt, Human
uccugccucaggcucuggagua

SEQ ID NO: 780144 - RNA, 22 nt, Human
gaggggcuugaggcccugaugg

SEQ ID NO: 780145 - RNA, 19 nt, Human
gggagcuuuccaucugucc

SEQ ID NO: 780146 - RNA, 22 nt, Human
aacuuuggccacaaguacccug

SEQ ID NO: 780147 - RNA, 21 nt, Human
uguggcaucauugaucuguga

SEQ ID NO: 780148 - RNA, 22 nt, Human
aagaacauugacuaagaggggc

SEQ ID NO: 780149 - RNA, 22 nt, Human
gaccuccguguacaccucccag

SEQ ID NO: 780150 - RNA, 22 nt, Human
aaccugagcgcguugcuuucua

SEQ ID NO: 780151 - RNA, 22 nt, Human
uauccaauucaccauugauggg

SEQ ID NO: 780152 - RNA, 22 nt, Human
gggcuggcucccagguguugaa

SEQ ID NO: 780153 - RNA, 22 nt, Human
ucagguggccaaaugggagcgc

SEQ ID NO: 780154 - RNA, 21 nt, Human
ggcacuaggcccggaggaagc

SEQ ID NO: 780155 - RNA, 17 nt, Human
ucaaauccucugucugg

SEQ ID NO: 780156 - RNA, 22 nt, Human
acugccucuuggugcugagaga

SEQ ID NO: 780157 - RNA, 19 nt, Human
uggcuucuguuuucauguu

SEQ ID NO: 780158 - RNA, 22 nt, Human
accaaaaauuguggggcugaau

SEQ ID NO: 780159 - RNA, 22 nt, Human
acuuuguagguuucagugaaac

SEQ ID NO: 780160 - RNA, 22 nt, Human
gagauaacucuaggucuucgag

SEQ ID NO: 780161 - RNA, 20 nt, Human
gcuuggcauaggccacuuga

SEQ ID NO: 780162 - RNA, 22 nt, Human
gccaggcucuuccauuuggguc

SEQ ID NO: 780163 - RNA, 22 nt, Human
auaauccauuaauuaaugacca

SEQ ID NO: 780164 - RNA, 22 nt, Human
aaaguguugggaagaaagugca

SEQ ID NO: 780165 - RNA, 22 nt, Human
agagucuggugcaugauaagca

SEQ ID NO: 780166 - RNA, 22 nt, Human
auuuuuaugacaaaccauccuc

SEQ ID NO: 780167 - RNA, 22 nt, Human
uuacacaacaucuguauuauua

SEQ ID NO: 780168 - RNA, 22 nt, Human
agugggucagagagcuccagau

SEQ ID NO: 780169 - RNA, 22 nt, Human
auuuucuucucucccuggcugc

SEQ ID NO: 780170 - RNA, 21 nt, Human
aggcauggaaauggcacacug

SEQ ID NO: 780171 - RNA, 22 nt, Human
uaggaugugccaggaaagaaag

SEQ ID NO: 780172 - RNA, 22 nt, Human
gucaacuguaccuaaagaaagu

SEQ ID NO: 780173 - RNA, 22 nt, Human
augugaaaccugugaguagagu

SEQ ID NO: 780174 - RNA, 22 nt, Human
ucuaaacaguuucacucuuaau

SEQ ID NO: 780175 - RNA, 22 nt, Human
uuuagacagaugugaggugggu

SEQ ID NO: 780176 - RNA, 22 nt, Human
auaaguguuagguaaacaucuu

SEQ ID NO: 780177 - RNA, 22 nt, Human
cuagggacugggaccuuaguua

SEQ ID NO: 780178 - RNA, 22 nt, Human
uaauuuuguauugccauuguag

SEQ ID NO: 780179 - RNA, 22 nt, Human
ucugcagaaguggcugggccac

SEQ ID NO: 780180 - RNA, 22 nt, Human
aauuuacaguugcugaugguac

SEQ ID NO: 780181 - RNA, 22 nt, Human
agaggcugcacuugcucaugau

SEQ ID NO: 780182 - RNA, 22 nt, Human
augggcaguaacaguggcaguc

SEQ ID NO: 780183 - RNA, 22 nt, Human
cagagacaggagugcucccagu

SEQ ID NO: 780184 - RNA, 22 nt, Human
ggucucauguccuaugugcuua

SEQ ID NO: 780185 - RNA, 22 nt, Human
gaaacuuuggcuaaaagccaga

SEQ ID NO: 780186 - RNA, 20 nt, Human
aggcucagcugagcucuugg

SEQ ID NO: 780187 - RNA, 22 nt, Human
ugacccucuuccccaugcgcuc

SEQ ID NO: 780188 - RNA, 22 nt, Human
gaggagagaugguagauugggu

SEQ ID NO: 780189 - RNA, 23 nt, Human
cuccucguaacucuguggugggu

SEQ ID NO: 780190 - RNA, 22 nt, Human
agugaauauuuuuagacaccca

SEQ ID NO: 780191 - RNA, 22 nt, Human
gguguccgcgcuguagaagguc

SEQ ID NO: 780192 - RNA, 22 nt, Human
ugccagaguuacaugaggguca

SEQ ID NO: 780193 - RNA, 22 nt, Human
cucagcauggagggagaacaag

SEQ ID NO: 780194 - RNA, 22 nt, Human
guccaguguguuuaucuuggau

SEQ ID NO: 780195 - RNA, 21 nt, Human
aggcaggauucaaacacagag

SEQ ID NO: 780196 - RNA, 22 nt, Human
auuuuuucccaguuagccagga

SEQ ID NO: 780197 - RNA, 22 nt, Human
acagugugacaauugugucaga

SEQ ID NO: 780198 - RNA, 22 nt, Human
ugcagcuuuaagcuuucaucag

SEQ ID NO: 780199 - RNA, 22 nt, Human
uguggcuuaagaaugccuuuaa

SEQ ID NO: 780200 - RNA, 22 nt, Human
gcucuggggcccagggaucaca

SEQ ID NO: 780201 - RNA, 22 nt, Human
gaggcuguuaggagggacucug

SEQ ID NO: 780202 - RNA, 20 nt, Human
ugaaggccagcagcauaggg

SEQ ID NO: 780203 - RNA, 22 nt, Human
gagagugcugaacggcaagggu

SEQ ID NO: 780204 - RNA, 22 nt, Human
ggccugugggaggacagcuggg

SEQ ID NO: 780205 - RNA, 22 nt, Human
ucucuggguugagaacuaggac

SEQ ID NO: 780206 - RNA, 22 nt, Human
aaaaagauagcauugugcuccu

SEQ ID NO: 780207 - RNA, 22 nt, Human
caggguugggguagauaagaaa

SEQ ID NO: 780208 - RNA, 22 nt, Human
ugaaagaugaaagcaggcuggu

SEQ ID NO: 780209 - RNA, 22 nt, Human
auggcccuguuuaugguaaggc

SEQ ID NO: 780210 - RNA, 22 nt, Human
augcacaucuuacagaugcaga

SEQ ID NO: 780211 - RNA, 22 nt, Human
ugcaggagaaaguacggagcgu

SEQ ID NO: 780212 - RNA, 22 nt, Human
auuguaacaacaauaguuuagg

SEQ ID NO: 780213 - RNA, 22 nt, Human
uuccuuugggaaaucacuaagg

SEQ ID NO: 780214 - RNA, 22 nt, Human
gagaggcucagggacuugcuga

SEQ ID NO: 780215 - RNA, 22 nt, Human
uauguacagggauagaacuuga

SEQ ID NO: 780216 - RNA, 21 nt, Human
uuccuggaggcagaaacguga

SEQ ID NO: 780217 - RNA, 23 nt, Human
ucuuuccuaaugaaacagugaaa

SEQ ID NO: 780218 - RNA, 23 nt, Human
uucuccugaggaagcagggacug

SEQ ID NO: 780219 - RNA, 22 nt, Human
gucugucucccugugacugaga

SEQ ID NO: 780220 - RNA, 22 nt, Human
uuacaucagaaucacccaggaa

SEQ ID NO: 780221 - RNA, 22 nt, Human
agcuuugaaugagugcauugca

SEQ ID NO: 780222 - RNA, 22 nt, Human
aggugaggauagguggccaagg

SEQ ID NO: 780223 - RNA, 22 nt, Human
ggugcaggaaucugcaauugaa

SEQ ID NO: 780224 - RNA, 22 nt, Human
uucauuccuucuguaccuugcc

SEQ ID NO: 780225 - RNA, 22 nt, Human
uuggcuucauugaucucacuuu

SEQ ID NO: 780226 - RNA, 22 nt, Human
caggacagaaauaaggaauaua

SEQ ID NO: 780227 - RNA, 22 nt, Human
ggaaggcuuuguagaagugcca

SEQ ID NO: 780228 - RNA, 19 nt, Human
ugcuuucuaaacacaugca

SEQ ID NO: 780229 - RNA, 22 nt, Human
cuccagauaggagggggucccc

SEQ ID NO: 780230 - RNA, 23 nt, Human
cuugggcuagagacuuagcagug

SEQ ID NO: 780231 - RNA, 22 nt, Human
auuucucaucaagugccaacuc

SEQ ID NO: 780232 - RNA, 22 nt, Human
ccagaaggcggagauugcagug

SEQ ID NO: 780233 - RNA, 22 nt, Human
uggccccuggcacacggaggau

SEQ ID NO: 780234 - RNA, 22 nt, Human
gcugggaaguggcagagcugga

SEQ ID NO: 780235 - RNA, 22 nt, Human
cugcggugggcugggcuguccc

SEQ ID NO: 780236 - RNA, 22 nt, Human
ucuuuagagcacgggaaaaaca

SEQ ID NO: 780237 - RNA, 22 nt, Human
acuugcugguggcauuuacagu

SEQ ID NO: 780238 - RNA, 22 nt, Human
gcuaggagccgcugcacuaggu

SEQ ID NO: 780239 - RNA, 22 nt, Human
uugggcuggcccuugucucugg

SEQ ID NO: 780240 - RNA, 22 nt, Human
cuggugcaggaaggagcuggca

SEQ ID NO: 780241 - RNA, 22 nt, Human
caugugugacaaacugccugca

SEQ ID NO: 780242 - RNA, 22 nt, Human
cuguggucaucucagaguggcc

SEQ ID NO: 780243 - RNA, 22 nt, Human
uggagaguguagacuucagagu

SEQ ID NO: 780244 - RNA, 22 nt, Human
ccaggcaccaaaguaugcuuua

SEQ ID NO: 780245 - RNA, 22 nt, Human
gaugcuuacauagcccaagugu

SEQ ID NO: 780246 - RNA, 22 nt, Human
cucaggcugugaugugauggca

SEQ ID NO: 780247 - RNA, 22 nt, Human
gcaggagccacuucagggaugc

SEQ ID NO: 780248 - RNA, 22 nt, Human
gaccauuucuaggaaucagacu

SEQ ID NO: 780249 - RNA, 19 nt, Human
cccagcucucguggugugc

SEQ ID NO: 780250 - RNA, 22 nt, Human
ucaagacaggguuuaagguuga

SEQ ID NO: 780251 - RNA, 22 nt, Human
ucacacagcuccuuuccuuagu

SEQ ID NO: 780252 - RNA, 22 nt, Human
cagcugagcugccagacuacug

SEQ ID NO: 780253 - RNA, 22 nt, Human
gggugugcaggucauggcgucu

SEQ ID NO: 780254 - RNA, 22 nt, Human
guggccuggaugagcuucgaca

SEQ ID NO: 780255 - RNA, 22 nt, Human
cuuuguucaugacaucugcuuc

SEQ ID NO: 780256 - RNA, 22 nt, Human
aaaagcagguacucagcuuggg

SEQ ID NO: 780257 - RNA, 22 nt, Human
guuucaugguuguuugauggca

SEQ ID NO: 780258 - RNA, 22 nt, Human
gcucugugaccuuaggcaaguu

SEQ ID NO: 780259 - RNA, 22 nt, Human
uccaggaggccucauuuccugu

SEQ ID NO: 780260 - RNA, 22 nt, Human
caggcucaagcccugcuuauau

SEQ ID NO: 780261 - RNA, 22 nt, Human
aggcuucccagcugagcucagc

SEQ ID NO: 780262 - RNA, 22 nt, Human
cagagugaacagugggaugugc

SEQ ID NO: 780263 - RNA, 22 nt, Human
gcuccacuugcagcuaggcuug

SEQ ID NO: 780264 - RNA, 22 nt, Human
guguguaaugcuuauugugcuu

SEQ ID NO: 780265 - RNA, 22 nt, Human
aaugguuuggacuauucaauag

SEQ ID NO: 780266 - RNA, 22 nt, Human
caggacagaccaagaucgugcu

SEQ ID NO: 780267 - RNA, 22 nt, Human
gaggaaggucccaucagaauuu

SEQ ID NO: 780268 - RNA, 22 nt, Human
gugcacaucgugcagguuuguu

SEQ ID NO: 780269 - RNA, 22 nt, Human
caccaucuauagagguauuugg

SEQ ID NO: 780270 - RNA, 22 nt, Human
cacacugucagguaaauaacac

SEQ ID NO: 780271 - RNA, 22 nt, Human
auaugaaaauguuuuagcugua

SEQ ID NO: 780272 - RNA, 22 nt, Human
augauccaaagccacaggggca

SEQ ID NO: 780273 - RNA, 22 nt, Human
acccaaagcaauauucaucagu

SEQ ID NO: 780274 - RNA, 23 nt, Human
aucuuagcauagacuugaguccc

SEQ ID NO: 780275 - RNA, 22 nt, Human
ugcugaaacaauaacauacugg

SEQ ID NO: 780276 - RNA, 19 nt, Human
augaggaacugaggcucag

SEQ ID NO: 780277 - RNA, 18 nt, Human
auccauuuaaugccugga

SEQ ID NO: 780278 - RNA, 22 nt, Human
cugugaggcccugggugcugga

SEQ ID NO: 780279 - RNA, 22 nt, Human
uaguccugaccuugccaccagc

SEQ ID NO: 780280 - RNA, 22 nt, Human
cuucugcuggcauacugcccca

SEQ ID NO: 780281 - RNA, 22 nt, Human
guuuuggcucuggcauguggaa

SEQ ID NO: 780282 - RNA, 22 nt, Human
cauaaucccccauuugugacau

SEQ ID NO: 780283 - RNA, 22 nt, Human
ggcucugcaugugagugggugg

SEQ ID NO: 780284 - RNA, 22 nt, Human
ucugaagacauaugauauggug

SEQ ID NO: 780285 - RNA, 22 nt, Human
ggaggggcaggucccaaguugu

SEQ ID NO: 780286 - RNA, 22 nt, Human
ucuacagguggggccuggcaau

SEQ ID NO: 780287 - RNA, 22 nt, Human
aacuuuucacaggcuagcucuu

SEQ ID NO: 780288 - RNA, 22 nt, Human
uuguccuuaccucaaucuggaa

SEQ ID NO: 780289 - RNA, 22 nt, Human
auuucucucauuguuagcuagg

SEQ ID NO: 780290 - RNA, 22 nt, Human
ggccauggcgggagccggcguc

SEQ ID NO: 780291 - RNA, 22 nt, Human
cuggagccauguauagccuaug

SEQ ID NO: 780292 - RNA, 22 nt, Human
cgcaggcacagaguggacagcg

SEQ ID NO: 780293 - RNA, 22 nt, Human
aagcugaagccggaucaaaaag

SEQ ID NO: 780294 - RNA, 22 nt, Human
gagagguacggaaagagcgugg

SEQ ID NO: 780295 - RNA, 22 nt, Human
ggcuucagugacuggugcccuc

SEQ ID NO: 780296 - RNA, 21 nt, Human
ccuccugcccgcaagcuaggg

SEQ ID NO: 780297 - RNA, 22 nt, Human
ugcaaagaugaaauauuaaagg

SEQ ID NO: 780298 - RNA, 19 nt, Human
ggagacucagcccaugccu

SEQ ID NO: 780299 - RNA, 22 nt, Human
aaggccaggccuagcacggagg

SEQ ID NO: 780300 - RNA, 22 nt, Human
acacugguuguuaauaguaaca

SEQ ID NO: 780301 - RNA, 22 nt, Human
uaggcagauguuaacaggaaaa

SEQ ID NO: 780302 - RNA, 18 nt, Human
ggcagccuacccacuugu

SEQ ID NO: 780303 - RNA, 22 nt, Human
acagcauccuucuaaaguagcu

SEQ ID NO: 780304 - RNA, 22 nt, Human
cagcuucuaccaucaggaaauu

SEQ ID NO: 780305 - RNA, 22 nt, Human
ucccacauuacccugacugaca

SEQ ID NO: 780306 - RNA, 22 nt, Human
gccccuccgggcgcgucauagc

SEQ ID NO: 780307 - RNA, 22 nt, Human
aggagcuggccacuaggaugca

SEQ ID NO: 780308 - RNA, 22 nt, Human
aaugaauucugaagucuuccaa

SEQ ID NO: 780309 - RNA, 22 nt, Human
guccuggugcuggucauugucg

SEQ ID NO: 780310 - RNA, 22 nt, Human
cugaggcuggcguuugaggaag

SEQ ID NO: 780311 - RNA, 22 nt, Human
cuuuguuagcagccaauuuguu

SEQ ID NO: 780312 - RNA, 22 nt, Human
uccucugguuauacuugcaccc

SEQ ID NO: 780313 - RNA, 22 nt, Human
uucuggcaucugggggaggccu

SEQ ID NO: 780314 - RNA, 22 nt, Human
ggguaggccagaagggccugga

SEQ ID NO: 780315 - RNA, 22 nt, Human
cagcccugggucccugcccugg

SEQ ID NO: 780316 - RNA, 22 nt, Human
aggcccuggggucuguuaaauu

SEQ ID NO: 780317 - RNA, 22 nt, Human
uggcuucauguaguuugaguug

SEQ ID NO: 780318 - RNA, 22 nt, Human
uaaugucuuuaagagcauuggg

SEQ ID NO: 780319 - RNA, 22 nt, Human
gccagccugugggggcucugug

SEQ ID NO: 780320 - RNA, 22 nt, Human
agaaaacucuacaucuguaugu

SEQ ID NO: 780321 - RNA, 22 nt, Human
auccacucggagggaauguuua

SEQ ID NO: 780322 - RNA, 22 nt, Human
ucuccucccaggcucuuccagg

SEQ ID NO: 780323 - RNA, 17 nt, Human
caggugaccuggugaug

SEQ ID NO: 780324 - RNA, 20 nt, Human
uuggaagguggagaagagga

SEQ ID NO: 780325 - RNA, 22 nt, Human
augucugcggcccaggccaggg

SEQ ID NO: 780326 - RNA, 22 nt, Human
acagcuggaguguuggugaggu

SEQ ID NO: 780327 - RNA, 22 nt, Human
ugugugcucgauggcccugcag

SEQ ID NO: 780328 - RNA, 22 nt, Human
aauugcuuuucaaggguacagc

SEQ ID NO: 780329 - RNA, 22 nt, Human
ggcaggcaagucugcucuguga

SEQ ID NO: 780330 - RNA, 22 nt, Human
aggggacacggcuucuccaggg

SEQ ID NO: 780331 - RNA, 22 nt, Human
cuguggcuaauaauuaguauuu

SEQ ID NO: 780332 - RNA, 22 nt, Human
ugcagcucuuacggagggcggg

SEQ ID NO: 780333 - RNA, 22 nt, Human
uuggcucaugcuguuuugugca

SEQ ID NO: 780334 - RNA, 22 nt, Human
guuuccugugggaacucggcug

SEQ ID NO: 780335 - RNA, 23 nt, Human
agccuggcaccugcagaucggag

SEQ ID NO: 780336 - RNA, 23 nt, Human
aaauaccugaauuagauauuauc

SEQ ID NO: 780337 - RNA, 22 nt, Human
uucuggaaaucagcagagggug

SEQ ID NO: 780338 - RNA, 19 nt, Human
gacuucugauguccagaug

SEQ ID NO: 780339 - RNA, 22 nt, Human
aaaguugcacaacuuuguauac

SEQ ID NO: 780340 - RNA, 22 nt, Human
ggagaagggaacugaguuuuug

SEQ ID NO: 780341 - RNA, 22 nt, Human
auguaauaggguaacauaacau

SEQ ID NO: 780342 - RNA, 22 nt, Human
uaauggcagagucaugcuuucu

SEQ ID NO: 780343 - RNA, 22 nt, Human
ucccucucuagccuguucagua

SEQ ID NO: 780344 - RNA, 22 nt, Human
cagccagugugaccgaggagga

SEQ ID NO: 780345 - RNA, 22 nt, Human
gacaugauggaaaaaaaugcuc

SEQ ID NO: 780346 - RNA, 18 nt, Human
acugugguuuauguguag

SEQ ID NO: 780347 - RNA, 22 nt, Human
uacacuaugggcuuuguguaau

SEQ ID NO: 780348 - RNA, 20 nt, Human
augugaaagaucaguugucu

SEQ ID NO: 780349 - RNA, 22 nt, Human
gcccauggcagaacugugagca

SEQ ID NO: 780350 - RNA, 22 nt, Human
cuggggcucacuuuggucaggc

SEQ ID NO: 780351 - RNA, 22 nt, Human
aaauucaguuccucagccacau

SEQ ID NO: 780352 - RNA, 20 nt, Human
aguguacagacacuagaaau

SEQ ID NO: 780353 - RNA, 22 nt, Human
gcccugagcuagugugggcagg

SEQ ID NO: 780354 - RNA, 22 nt, Human
auggcuguuggcaggaggccuc

SEQ ID NO: 780355 - RNA, 23 nt, Human
agcugcaagacucccugucugag

SEQ ID NO: 780356 - RNA, 22 nt, Human
cugcauguuuacauuuuugaga

SEQ ID NO: 780357 - RNA, 22 nt, Human
agcuguauuugugaauauuuaa

SEQ ID NO: 780358 - RNA, 22 nt, Human
gaaaguauuuacauuaacaucu

SEQ ID NO: 780359 - RNA, 22 nt, Human
guuucacauaauuuuaaauugu

SEQ ID NO: 780360 - RNA, 22 nt, Human
ugccuuggugcuucuucaugug

SEQ ID NO: 780361 - RNA, 22 nt, Human
auuuacagaagcauguaauagc

SEQ ID NO: 780362 - RNA, 22 nt, Human
agaggcugugcccaccaggcaa

SEQ ID NO: 780363 - RNA, 22 nt, Human
ugcuuuauggauuuguguccug

SEQ ID NO: 780364 - RNA, 22 nt, Human
agcaggacacgaugcggcagga

SEQ ID NO: 780365 - RNA, 22 nt, Human
uaacacauuaguucuccuagau

SEQ ID NO: 780366 - RNA, 22 nt, Human
uuacuguucauguuguacacuu

SEQ ID NO: 780367 - RNA, 22 nt, Human
uccagggacacagaguccuucu

SEQ ID NO: 780368 - RNA, 22 nt, Human
ugggggaguauagucuggccuc

SEQ ID NO: 780369 - RNA, 22 nt, Human
uccuccccucagggcaacggau

SEQ ID NO: 780370 - RNA, 22 nt, Human
caguguggagggagagagccug

SEQ ID NO: 780371 - RNA, 21 nt, Human
agcagcugggcaacauggagg

SEQ ID NO: 780372 - RNA, 20 nt, Human
uuucugugcccaggucuguu

SEQ ID NO: 780373 - RNA, 22 nt, Human
gccagguacauuuaagaagccu

SEQ ID NO: 780374 - RNA, 21 nt, Human
uuucaauuugccuugagucau

SEQ ID NO: 780375 - RNA, 18 nt, Human
uccagucccagcucugcc

SEQ ID NO: 780376 - RNA, 22 nt, Human
aguuauauuccauagauucaga

SEQ ID NO: 780377 - RNA, 22 nt, Human
uguggcagggauacugaggcag

SEQ ID NO: 780378 - RNA, 22 nt, Human
ccugaccauuugccacaugggu

SEQ ID NO: 780379 - RNA, 19 nt, Human
gacagugcaguuguaguac

SEQ ID NO: 780380 - RNA, 22 nt, Human
guaaauguugcauuuaugggua

SEQ ID NO: 780381 - RNA, 22 nt, Human
agucacugagauggugaggcua

SEQ ID NO: 780382 - RNA, 22 nt, Human
ucaugacaugugaauugaauau

SEQ ID NO: 780383 - RNA, 22 nt, Human
ugcucagugagucugugacagg

SEQ ID NO: 780384 - RNA, 22 nt, Human
aaugcacaaaggugucuauugc

SEQ ID NO: 780385 - RNA, 22 nt, Human
uacuuuuuaugauaagaacuga

SEQ ID NO: 780386 - RNA, 22 nt, Human
ugucucagggcagcagcagggg

SEQ ID NO: 780387 - RNA, 22 nt, Human
agcauauaaauggacauauuug

SEQ ID NO: 780388 - RNA, 22 nt, Human
accugaggccuccccagcagac

SEQ ID NO: 780389 - RNA, 22 nt, Human
ucaucugaagauugcuguucaa

SEQ ID NO: 780390 - RNA, 21 nt, Human
guguuggcauauggugguuga

SEQ ID NO: 780391 - RNA, 22 nt, Human
gccaguuccuguggagucagag

SEQ ID NO: 780392 - RNA, 20 nt, Human
uauuuacaacuuagagccuc

SEQ ID NO: 780393 - RNA, 22 nt, Human
aagaacaugaagucacaaaugc

SEQ ID NO: 780394 - RNA, 22 nt, Human
gguuuccugcauugggaaauuu

SEQ ID NO: 780395 - RNA, 22 nt, Human
uuugacaacguuguugugagga

SEQ ID NO: 780396 - RNA, 22 nt, Human
ucuuaaguaccuccuuuaucac

SEQ ID NO: 780397 - RNA, 22 nt, Human
uuccagggcagcaagugaaugg

SEQ ID NO: 780398 - RNA, 22 nt, Human
uucaaacuuaaggagcagcaga

SEQ ID NO: 780399 - RNA, 22 nt, Human
uguggggugugguccaggcauc

SEQ ID NO: 780400 - RNA, 22 nt, Human
caggucucuuuugucacaccac

SEQ ID NO: 780401 - RNA, 22 nt, Human
acacuucuuugucaccugcuuc

SEQ ID NO: 780402 - RNA, 22 nt, Human
uccaagaguucaaggcuacagu

SEQ ID NO: 780403 - RNA, 20 nt, Human
gggaguggugguagccugug

SEQ ID NO: 780404 - RNA, 22 nt, Human
uauguacacuuaaguuugagaa

SEQ ID NO: 780405 - RNA, 22 nt, Human
gaaucauuggaaccacauccaa

SEQ ID NO: 780406 - RNA, 20 nt, Human
acauggaucaaaugucaguu

SEQ ID NO: 780407 - RNA, 22 nt, Human
uuauaguuaugaaagacugagg

SEQ ID NO: 780408 - RNA, 22 nt, Human
caucugcugacuugacaaguac

SEQ ID NO: 780409 - RNA, 22 nt, Human
cugcaucucaggagacgggucu

SEQ ID NO: 780410 - RNA, 22 nt, Human
aaggaaacacugaacuuuguag

SEQ ID NO: 780411 - RNA, 22 nt, Human
ccugggcuguugcaucauccuu

SEQ ID NO: 780412 - RNA, 23 nt, Human
auuuccuacuauaaaagagguaa

SEQ ID NO: 780413 - RNA, 22 nt, Human
agcugugugcccaugguggagg

SEQ ID NO: 780414 - RNA, 22 nt, Human
cacagguaauagccuaggcuau

SEQ ID NO: 780415 - RNA, 18 nt, Human
acagcagguuucauucuu

SEQ ID NO: 780416 - RNA, 20 nt, Human
uguucugucgucuuucuuca

SEQ ID NO: 780417 - RNA, 23 nt, Human
uccaagaaguagggccuggacuu

SEQ ID NO: 780418 - RNA, 22 nt, Human
uauguagagauaaaauccaaau

SEQ ID NO: 780419 - RNA, 22 nt, Human
aggcugugaacucuaugcugaa

SEQ ID NO: 780420 - RNA, 22 nt, Human
ucugacagguugggauauggaa

SEQ ID NO: 780421 - RNA, 22 nt, Human
uuucaaaccacugagguucuga

SEQ ID NO: 780422 - RNA, 22 nt, Human
ccaggaggcaauaucaagucca

SEQ ID NO: 780423 - RNA, 22 nt, Human
agcuggcaguaugacuggugac

SEQ ID NO: 780424 - RNA, 22 nt, Human
ucaucuuuccucaaaagaucca

SEQ ID NO: 780425 - RNA, 22 nt, Human
cagggcaggaugcugugauuau

SEQ ID NO: 780426 - RNA, 22 nt, Human
agugauuugggugucagaaagu

SEQ ID NO: 780427 - RNA, 22 nt, Human
acaucgauggauagagcuugcu

SEQ ID NO: 780428 - RNA, 20 nt, Human
augcccuguccucuucuguu

SEQ ID NO: 780429 - RNA, 17 nt, Human
accaaugucagacaaag

SEQ ID NO: 780430 - RNA, 22 nt, Human
ucaaggaagggauauucuugaa

SEQ ID NO: 780431 - RNA, 22 nt, Human
gcacagagggcagugagccucu

SEQ ID NO: 780432 - RNA, 19 nt, Human
ugagcaugcgagcugagaa

SEQ ID NO: 780433 - RNA, 21 nt, Human
gacucuggggucagcucaacc

SEQ ID NO: 780434 - RNA, 22 nt, Human
cugcagucagcuuuuaagaucu

SEQ ID NO: 780435 - RNA, 22 nt, Human
uuuccucuccggggccuccagg

SEQ ID NO: 780436 - RNA, 18 nt, Human
auuuugaacaaugcugua

SEQ ID NO: 780437 - RNA, 22 nt, Human
cuggcuuuaaaaugcuccugga

SEQ ID NO: 780438 - RNA, 18 nt, Human
gcacagcuaggagggucc

SEQ ID NO: 780439 - RNA, 22 nt, Human
uuuuaugugugaaaugcugucu

SEQ ID NO: 780440 - RNA, 22 nt, Human
augaggcaaagguggagguggg

SEQ ID NO: 780441 - RNA, 19 nt, Human
ucugcuggcagaauucccu

SEQ ID NO: 780442 - RNA, 19 nt, Human
aaaguugagaaacaaugga

SEQ ID NO: 780443 - RNA, 22 nt, Human
ugagccuggcggaagcagcgug

SEQ ID NO: 780444 - RNA, 22 nt, Human
cucugugcucccaugcuaguaa

SEQ ID NO: 780445 - RNA, 22 nt, Human
ugaggccaacuagggagaugga

SEQ ID NO: 780446 - RNA, 22 nt, Human
uuuguuauaacaauaaaaaguc

SEQ ID NO: 780447 - RNA, 22 nt, Human
guuucuguugcucagauaaugc

SEQ ID NO: 780448 - RNA, 22 nt, Human
ggugcucaaggugacaggacau

SEQ ID NO: 780449 - RNA, 22 nt, Human
ugugucuggaccggggaggagc

SEQ ID NO: 780450 - RNA, 22 nt, Human
aguaaagcagaguugcaguaca

SEQ ID NO: 780451 - RNA, 22 nt, Human
uaaauaagucacugaccauuua

SEQ ID NO: 780452 - RNA, 22 nt, Human
guuccucaguuguaaaaaaugu

SEQ ID NO: 780453 - RNA, 22 nt, Human
uuaccaguuuugccauuugcua

SEQ ID NO: 780454 - RNA, 20 nt, Human
acagccagaggaggcagaca

SEQ ID NO: 780455 - RNA, 22 nt, Human
caggcugccgugaagcaggccu

SEQ ID NO: 780456 - RNA, 22 nt, Human
uguguauauauguuuaagucau

SEQ ID NO: 780457 - RNA, 22 nt, Human
cacccacccacugcucauuggc

SEQ ID NO: 780458 - RNA, 22 nt, Human
gcuguucagaugcgauucagga

SEQ ID NO: 780459 - RNA, 22 nt, Human
ugcagaaaccaauucaaguaag

SEQ ID NO: 780460 - RNA, 22 nt, Human
uguuugcauuaauuagaaggua

SEQ ID NO: 780461 - RNA, 22 nt, Human
gauggauacuauaggaggcaca

SEQ ID NO: 780462 - RNA, 22 nt, Human
gauuauggagaagaacaaugaa

SEQ ID NO: 780463 - RNA, 22 nt, Human
aucaggaagaagaauguguugg

SEQ ID NO: 780464 - RNA, 22 nt, Human
gcucugccaaggacccauucuc

SEQ ID NO: 780465 - RNA, 22 nt, Human
aacuuucuuggaugucucaaca

SEQ ID NO: 780466 - RNA, 22 nt, Human
guuuuauaggcuguugcuauau

SEQ ID NO: 780467 - RNA, 23 nt, Human
ugccagggcccugugugcaaugc

SEQ ID NO: 780468 - RNA, 22 nt, Human
agcagaaacagccagucuggac

SEQ ID NO: 780469 - RNA, 22 nt, Human
augaagaugugaaggcuggauu

SEQ ID NO: 780470 - RNA, 22 nt, Human
uuucauugaugggugauagaaa

SEQ ID NO: 780471 - RNA, 22 nt, Human
acaugaucugacuugcuuuuua

SEQ ID NO: 780472 - RNA, 22 nt, Human
cugcguucauuuugagugcugu

SEQ ID NO: 780473 - RNA, 22 nt, Human
gcauugaaauggcaaaaagaga

SEQ ID NO: 780474 - RNA, 22 nt, Human
uacauccaaaguugaggugccu

SEQ ID NO: 780475 - RNA, 17 nt, Human
cugauggauuuuuucca

SEQ ID NO: 780476 - RNA, 21 nt, Human
gccagccuguuuaccuguggu

SEQ ID NO: 780477 - RNA, 22 nt, Human
gugauauuucaagaguggggca

SEQ ID NO: 780478 - RNA, 21 nt, Human
ccucugugcuaaagggcuccc

SEQ ID NO: 780479 - RNA, 22 nt, Human
aacaguauugguugaacucaag

SEQ ID NO: 780480 - RNA, 18 nt, Human
uggagcagguaggcauga

SEQ ID NO: 780481 - RNA, 17 nt, Human
ugcagcugauggggaaa

SEQ ID NO: 780482 - RNA, 22 nt, Human
cuuccaaguugcucugcugacc

SEQ ID NO: 780483 - RNA, 22 nt, Human
agugucacagacccaaucagga

SEQ ID NO: 780484 - RNA, 22 nt, Human
agcuggugugccaguuccaguu

SEQ ID NO: 780485 - RNA, 16 nt, Human
ugcuggggcgccgucc

SEQ ID NO: 780486 - RNA, 22 nt, Human
ggugugggggcaaguuugagau

SEQ ID NO: 780487 - RNA, 22 nt, Human
ggcagagccuucuggagcucgc

SEQ ID NO: 780488 - RNA, 18 nt, Human
gaaagccaugcagcagug

SEQ ID NO: 780489 - RNA, 19 nt, Human
agggauauuuaaaaagcuc

SEQ ID NO: 780490 - RNA, 22 nt, Human
uaaagcaggccacauaugugau

SEQ ID NO: 780491 - RNA, 22 nt, Human
cugcuguguuucacaccucugg

SEQ ID NO: 780492 - RNA, 22 nt, Human
gauacacauuuuagcuuugucu

SEQ ID NO: 780493 - RNA, 22 nt, Human
gacuccagagugacuauuuguc

SEQ ID NO: 780494 - RNA, 20 nt, Human
gccugggauuauccacuggu

SEQ ID NO: 780495 - RNA, 22 nt, Human
ugugccuggcauucugggcuuc

SEQ ID NO: 780496 - RNA, 22 nt, Human
caguguuuagcacagugcuugg

SEQ ID NO: 780497 - RNA, 22 nt, Human
cauucacucagcgaugccagua

SEQ ID NO: 780498 - RNA, 20 nt, Human
ggcuggaaguguggguuugg

SEQ ID NO: 780499 - RNA, 22 nt, Human
aucuugugugaugaugagaaag

SEQ ID NO: 780500 - RNA, 18 nt, Human
aagugggaaaagcaagca

SEQ ID NO: 780501 - RNA, 22 nt, Human
gcaggccagcugugcagauggg

SEQ ID NO: 780502 - RNA, 22 nt, Human
caaauacugaguuuauuuucaa

SEQ ID NO: 780503 - RNA, 22 nt, Human
auaagagucuuguuuucuuauu

SEQ ID NO: 780504 - RNA, 22 nt, Human
ucagcucuacacacaccugugu

SEQ ID NO: 780505 - RNA, 22 nt, Human
auaucaaaauaaacagcaugca

SEQ ID NO: 780506 - RNA, 22 nt, Human
uagagagguuugaauuggcugc

SEQ ID NO: 780507 - RNA, 22 nt, Human
uucugcaugaaaagaacugaac

SEQ ID NO: 780508 - RNA, 22 nt, Human
uggugaagucagcggagcccgg

SEQ ID NO: 780509 - RNA, 22 nt, Human
uuuauuggaugggucagcucua

SEQ ID NO: 780510 - RNA, 22 nt, Human
uuugaaaaaggccuuugguaug

SEQ ID NO: 780511 - RNA, 22 nt, Human
uccaggccugacuauaaaugua

SEQ ID NO: 780512 - RNA, 22 nt, Human
cuaaacaucuugcaaugcacag

SEQ ID NO: 780513 - RNA, 19 nt, Human
ggcuggagaaaggaaucag

SEQ ID NO: 780514 - RNA, 22 nt, Human
uccugguggucugugcuucuuc

SEQ ID NO: 780515 - RNA, 22 nt, Human
caguacuuguccucagguguua

SEQ ID NO: 780516 - RNA, 22 nt, Human
agagugggugaucucuguuguc

SEQ ID NO: 780517 - RNA, 22 nt, Human
augguacagauaauacaugcug

SEQ ID NO: 780518 - RNA, 22 nt, Human
cugcaggggcuggaguuggcuu

SEQ ID NO: 780519 - RNA, 22 nt, Human
ucuggaguggacccagagcacu

SEQ ID NO: 780520 - RNA, 22 nt, Human
cucuccuacauuucauucacaa

SEQ ID NO: 780521 - RNA, 21 nt, Human
ugucaguuauaaucaccacag

SEQ ID NO: 780522 - RNA, 23 nt, Human
ugauuacaggaaguucaaguguu

SEQ ID NO: 780523 - RNA, 22 nt, Human
uccacauuauguuucuccuuuc

SEQ ID NO: 780524 - RNA, 22 nt, Human
gcccuguucuggacaggcacaa

SEQ ID NO: 780525 - RNA, 22 nt, Human
gacacagcacuguacaaggaau

SEQ ID NO: 780526 - RNA, 22 nt, Human
auccacagucuuagccaucaaa

SEQ ID NO: 780527 - RNA, 22 nt, Human
ucccaguguggcaggccaugga

SEQ ID NO: 780528 - RNA, 22 nt, Human
cagaccugagguugaguaccag

SEQ ID NO: 780529 - RNA, 22 nt, Human
acaguuuaucgauucaccuacc

SEQ ID NO: 780530 - RNA, 22 nt, Human
uggguccagugcagcugcgcgu

SEQ ID NO: 780531 - RNA, 22 nt, Human
ucccucucuugggcguggcuca

SEQ ID NO: 780532 - RNA, 22 nt, Human
ugcgauguaugcaguauuuguu

SEQ ID NO: 780533 - RNA, 22 nt, Human
ggcgggagcagcagcucugagc

SEQ ID NO: 780534 - RNA, 22 nt, Human
guccugugcccagacccucugu

SEQ ID NO: 780535 - RNA, 22 nt, Human
uucaaacagaugacucugcucu

SEQ ID NO: 780536 - RNA, 21 nt, Human
aaggacgagguuuugauuaca

SEQ ID NO: 780537 - RNA, 22 nt, Human
aguaucaaggaucuccagcacc

SEQ ID NO: 780538 - RNA, 22 nt, Human
caucagccuggaaggcagccug

SEQ ID NO: 780539 - RNA, 20 nt, Human
ucaucagauagguuaguaca

SEQ ID NO: 780540 - RNA, 22 nt, Human
aaggcuuggaguaagcuuggcu

SEQ ID NO: 780541 - RNA, 22 nt, Human
uggccguguuagauguuuggcu

SEQ ID NO: 780542 - RNA, 22 nt, Human
ggcagcuccucucagcaaaaga

SEQ ID NO: 780543 - RNA, 22 nt, Human
ucagaggcuuccuuccucggag

SEQ ID NO: 780544 - RNA, 22 nt, Human
ugacuuugucccuuucaaaucc

SEQ ID NO: 780545 - RNA, 22 nt, Human
ggcuucuggugggagcaugacu

SEQ ID NO: 780546 - RNA, 23 nt, Human
cacaugaccugaccuaggcuagg

SEQ ID NO: 780547 - RNA, 22 nt, Human
caggcagaguuagugauuuagg

SEQ ID NO: 780548 - RNA, 19 nt, Human
ugcagaagacacaguggug

SEQ ID NO: 780549 - RNA, 22 nt, Human
ucuuugcaaauguuauuaucuu

SEQ ID NO: 780550 - RNA, 21 nt, Human
ucuggagcugcaggcugggca

SEQ ID NO: 780551 - RNA, 22 nt, Human
acucuccuuuugaucuucagaa

SEQ ID NO: 780552 - RNA, 22 nt, Human
acagugucugacacguaggaag

SEQ ID NO: 780553 - RNA, 22 nt, Human
caauuuuuguacuuauaguacu

SEQ ID NO: 780554 - RNA, 23 nt, Human
uaauucacauauacauugcuuca

SEQ ID NO: 780555 - RNA, 22 nt, Human
gaggccacccuaugggucccag

SEQ ID NO: 780556 - RNA, 22 nt, Human
ggagacaggguugaaccacgca

SEQ ID NO: 780557 - RNA, 22 nt, Human
aguucaaagcugcaguaaugga

SEQ ID NO: 780558 - RNA, 22 nt, Human
guauagaaggaucuggugaauu

SEQ ID NO: 780559 - RNA, 22 nt, Human
ugaaugaccuuugaggauggaa

SEQ ID NO: 780560 - RNA, 22 nt, Human
augcagcugugggcaagaaaug

SEQ ID NO: 780561 - RNA, 22 nt, Human
cccagugugguugugaauucug

SEQ ID NO: 780562 - RNA, 22 nt, Human
uccugaacauuaugcaagcuuc

SEQ ID NO: 780563 - RNA, 22 nt, Human
cuggcuuuggaacaaaucauag

SEQ ID NO: 780564 - RNA, 22 nt, Human
aucacugucgucaucugagauu

SEQ ID NO: 780565 - RNA, 22 nt, Human
ggcaggacucuucugugggccg

SEQ ID NO: 780566 - RNA, 22 nt, Human
agccaucacuugagaaucuauu

SEQ ID NO: 780567 - RNA, 22 nt, Human
uuaagucauuucugauuauaga

SEQ ID NO: 780568 - RNA, 21 nt, Human
caguauuuuaagcagugaguu

SEQ ID NO: 780569 - RNA, 22 nt, Human
aguauaauuagauaucaaaagu

SEQ ID NO: 780570 - RNA, 22 nt, Human
ugauggaaauguucuguaucug

SEQ ID NO: 780571 - RNA, 20 nt, Human
ggcagggagggauacugagg

SEQ ID NO: 780572 - RNA, 22 nt, Human
agacccuugcagucugguuguc

SEQ ID NO: 780573 - RNA, 22 nt, Human
uuacaacugggcuugucagcuu

SEQ ID NO: 780574 - RNA, 22 nt, Human
uccuucagaggauaaggaagaa

SEQ ID NO: 780575 - RNA, 22 nt, Human
uuuauucaagaugagguucaug

SEQ ID NO: 780576 - RNA, 22 nt, Human
uuccugguaacaaucucaaagu

SEQ ID NO: 780577 - RNA, 22 nt, Human
ccuggcacugaccaggcacuga

SEQ ID NO: 780578 - RNA, 22 nt, Human
uggcugagggcacuaugaagcc

SEQ ID NO: 780579 - RNA, 20 nt, Human
aggcuccuguaccugaggaa

SEQ ID NO: 780580 - RNA, 22 nt, Human
cugcagugcaagcccagaugga

SEQ ID NO: 780581 - RNA, 22 nt, Human
ggacagggaucauuaucugagc

SEQ ID NO: 780582 - RNA, 22 nt, Human
aagugcugggauuacagguguc

SEQ ID NO: 780583 - RNA, 22 nt, Human
gcugggcagcaggcucuccggg

SEQ ID NO: 780584 - RNA, 22 nt, Human
agaaauguggaggaacagggcu

SEQ ID NO: 780585 - RNA, 22 nt, Human
acuuucaagcccucuagagaca

SEQ ID NO: 780586 - RNA, 22 nt, Human
aucccugagguuccuccugagc

SEQ ID NO: 780587 - RNA, 22 nt, Human
uggcgucucucauaaguaugug

SEQ ID NO: 780588 - RNA, 22 nt, Human
aauucacaugcaugucugugca

SEQ ID NO: 780589 - RNA, 22 nt, Human
aggggcagccucacaauccucu

SEQ ID NO: 780590 - RNA, 22 nt, Human
augcccugcaucaagugacacu

SEQ ID NO: 780591 - RNA, 22 nt, Human
uugaggucugagacugugcagg

SEQ ID NO: 780592 - RNA, 22 nt, Human
aggcccaaaagaaaccacuggg

SEQ ID NO: 780593 - RNA, 22 nt, Human
ucccacagcuucgugcuucccc

SEQ ID NO: 780594 - RNA, 22 nt, Human
augcagguugggcaaguguggg

SEQ ID NO: 780595 - RNA, 22 nt, Human
caaaccuuguaaaugccaaacu

SEQ ID NO: 780596 - RNA, 22 nt, Human
uguguuuuacaaauucucuuaa

SEQ ID NO: 780597 - RNA, 22 nt, Human
uggcagggugggcuucagcccc

SEQ ID NO: 780598 - RNA, 22 nt, Human
agcacagagcuaggaguggagg

SEQ ID NO: 780599 - RNA, 22 nt, Human
cuucugggauuaauuuuuccug

SEQ ID NO: 780600 - RNA, 22 nt, Human
ugccuggaucugaggacccauu

SEQ ID NO: 780601 - RNA, 22 nt, Human
uuuguauaagaacauucuagca

SEQ ID NO: 780602 - RNA, 22 nt, Human
aagcugccugggaggaagggcu

SEQ ID NO: 780603 - RNA, 22 nt, Human
gcaaaaaaugcuuguugcuuag

SEQ ID NO: 780604 - RNA, 19 nt, Human
cguccaggugcuggaagau

SEQ ID NO: 780605 - RNA, 22 nt, Human
guggugaagccccaucucugcu

SEQ ID NO: 780606 - RNA, 22 nt, Human
ggccugaggcgucccagcugug

SEQ ID NO: 780607 - RNA, 22 nt, Human
gggacgggcaguccaagggguc

SEQ ID NO: 780608 - RNA, 22 nt, Human
ugcaggacucaaggguagcagg

SEQ ID NO: 780609 - RNA, 22 nt, Human
ucaaaauuaaaccaacguccag

SEQ ID NO: 780610 - RNA, 22 nt, Human
uccucugggccuauuuguucac

SEQ ID NO: 780611 - RNA, 23 nt, Human
cccagguguggaggcgguggcag

SEQ ID NO: 780612 - RNA, 22 nt, Human
aacaggggugggugcuacugga

SEQ ID NO: 780613 - RNA, 22 nt, Human
uguuuucaugguuaugugucua

SEQ ID NO: 780614 - RNA, 22 nt, Human
uuccauaauuaaguggagagaa

SEQ ID NO: 780615 - RNA, 22 nt, Human
gcaucccucugaggggccaggc

SEQ ID NO: 780616 - RNA, 23 nt, Human
cauaugaauuuuagaggcaguuu

SEQ ID NO: 780617 - RNA, 21 nt, Human
agaugcaguuaugagaugcag

SEQ ID NO: 780618 - RNA, 22 nt, Human
agguuaggaagauacagaaugu

SEQ ID NO: 780619 - RNA, 22 nt, Human
uauacaagugagaagaagaguu

SEQ ID NO: 780620 - RNA, 22 nt, Human
uacagugaccuagaauaaauac

SEQ ID NO: 780621 - RNA, 22 nt, Human
ucagaaggaaacgaugccagcu

SEQ ID NO: 780622 - RNA, 19 nt, Human
agacacaucacauuucucc

SEQ ID NO: 780623 - RNA, 21 nt, Human
gcuggcugucccagggaagca

SEQ ID NO: 780624 - RNA, 22 nt, Human
cugggcuuguguuagcugacaa

SEQ ID NO: 780625 - RNA, 19 nt, Human
ucagcccaggcugggaagc

SEQ ID NO: 780626 - RNA, 22 nt, Human
gguggcuggaggagcugaugga

SEQ ID NO: 780627 - RNA, 21 nt, Human
ggguggucugcugaagaggga

SEQ ID NO: 780628 - RNA, 22 nt, Human
gcugaccauuaggaggacgaua

SEQ ID NO: 780629 - RNA, 22 nt, Human
cuuugcuucuccaaccugcuca

SEQ ID NO: 780630 - RNA, 20 nt, Human
gcagagcuguucugugggga

SEQ ID NO: 780631 - RNA, 22 nt, Human
ggacagcacagcucuugacaac

SEQ ID NO: 780632 - RNA, 22 nt, Human
gguggggcccaggcaucugaug

SEQ ID NO: 780633 - RNA, 22 nt, Human
ucagggcccagagcucaggcaa

SEQ ID NO: 780634 - RNA, 22 nt, Human
aaauagagcuggguuaaacuuu

SEQ ID NO: 780635 - RNA, 19 nt, Human
cagguggcgcucuacaggg

SEQ ID NO: 780636 - RNA, 22 nt, Human
ccaggcucacagcaucccagga

SEQ ID NO: 780637 - RNA, 22 nt, Human
cauugcacuccaucuugggcaa

SEQ ID NO: 780638 - RNA, 22 nt, Human
gacagccucaugaggagcaaaa

SEQ ID NO: 780639 - RNA, 22 nt, Human
gugcacagaaauugguaagacu

SEQ ID NO: 780640 - RNA, 19 nt, Human
uggcagggagaguuugaag

SEQ ID NO: 780641 - RNA, 22 nt, Human
gaugcacaugugaguauagaag

SEQ ID NO: 780642 - RNA, 23 nt, Human
cuggggcuuucaaaucugggcag

SEQ ID NO: 780643 - RNA, 23 nt, Human
acagucguagguauccuuuuccu

SEQ ID NO: 780644 - RNA, 22 nt, Human
gccauuuucugucuuguuuauu

SEQ ID NO: 780645 - RNA, 22 nt, Human
uugcuaaucauauuucaucacu

SEQ ID NO: 780646 - RNA, 22 nt, Human
uugcacuaggaaaaggcagcca

SEQ ID NO: 780647 - RNA, 22 nt, Human
ucugcgccgcauguguucuuuc

SEQ ID NO: 780648 - RNA, 22 nt, Human
aggcuccagggcugugugggag

SEQ ID NO: 780649 - RNA, 22 nt, Human
uggcagccuggaaucucucagc

SEQ ID NO: 780650 - RNA, 20 nt, Human
agaagucagcucagaaguga

SEQ ID NO: 780651 - RNA, 22 nt, Human
cagacccaggauccaaauguug

SEQ ID NO: 780652 - RNA, 22 nt, Human
cugaaaggguuacauaguaagu

SEQ ID NO: 780653 - RNA, 22 nt, Human
acuuuaugcuaaacuuuacucu

SEQ ID NO: 780654 - RNA, 22 nt, Human
uucuauuuccaguccuucagag

SEQ ID NO: 780655 - RNA, 22 nt, Human
cuguggcugcguaggucuggca

SEQ ID NO: 780656 - RNA, 22 nt, Human
ucgcauuugggcaggagaugcu

SEQ ID NO: 780657 - RNA, 22 nt, Human
aauucugcucuuaacauaaugu

SEQ ID NO: 780658 - RNA, 22 nt, Human
cagcaggucccacugagggccc

SEQ ID NO: 780659 - RNA, 22 nt, Human
cagggugcagugucgcugcuag

SEQ ID NO: 780660 - RNA, 16 nt, Human
ggugggaggugaggug

SEQ ID NO: 780661 - RNA, 22 nt, Human
augcauguaacaguguuaugaa

SEQ ID NO: 780662 - RNA, 22 nt, Human
cuuauacauaaaauggguguag

SEQ ID NO: 780663 - RNA, 22 nt, Human
aacugcauguguguggcaugau

SEQ ID NO: 780664 - RNA, 22 nt, Human
ucagugcauucuaccaaaaggc

SEQ ID NO: 780665 - RNA, 22 nt, Human
ggugaguuucaugguuguuuac

SEQ ID NO: 780666 - RNA, 22 nt, Human
gauucaaaguuaaugaagaugc

SEQ ID NO: 780667 - RNA, 22 nt, Human
uuucagaaagcugaacauauga

SEQ ID NO: 780668 - RNA, 22 nt, Human
uucauugauuuaacaaacaagu

SEQ ID NO: 780669 - RNA, 22 nt, Human
gcauugguuuacacagggugaa

SEQ ID NO: 780670 - RNA, 22 nt, Human
auuccaaacuuaccccagagga

SEQ ID NO: 780671 - RNA, 22 nt, Human
gaagcacugcauuucaagauca

SEQ ID NO: 780672 - RNA, 22 nt, Human
caugggggucuggacaacaggc

SEQ ID NO: 780673 - RNA, 22 nt, Human
cacauauuugaugaagcuuugu

SEQ ID NO: 780674 - RNA, 22 nt, Human
uggcucaggccacuucuuuuau

SEQ ID NO: 780675 - RNA, 22 nt, Human
caucauuucacuuagaugaagu

SEQ ID NO: 780676 - RNA, 22 nt, Human
aagagauuccucacucagaaug

SEQ ID NO: 780677 - RNA, 19 nt, Human
gccaggcucuuauucugug

SEQ ID NO: 780678 - RNA, 22 nt, Human
aaacucuuuugcauauuagagg

SEQ ID NO: 780679 - RNA, 22 nt, Human
ucuauaaauuaugcagucucag

SEQ ID NO: 780680 - RNA, 22 nt, Human
uacguuuagcuuuaugagacau

SEQ ID NO: 780681 - RNA, 19 nt, Human
cugucugcggggccuguuc

SEQ ID NO: 780682 - RNA, 22 nt, Human
uacaaacuccgaaguuuguacc

SEQ ID NO: 780683 - RNA, 22 nt, Human
uggcuaaacuugggucagaugu

SEQ ID NO: 780684 - RNA, 22 nt, Human
cuucuucucaaggggcaggugg

SEQ ID NO: 780685 - RNA, 22 nt, Human
acauuucuauagugcaucuguu

SEQ ID NO: 780686 - RNA, 22 nt, Human
auucaugaaucuacauuguggu

SEQ ID NO: 780687 - RNA, 22 nt, Human
auucagugugagguuuucaagu

SEQ ID NO: 780688 - RNA, 21 nt, Human
guugaauauccauguaugugu

SEQ ID NO: 780689 - RNA, 22 nt, Human
gucauuuuugacuuugaaguga

SEQ ID NO: 780690 - RNA, 22 nt, Human
uacacuaauagccacacuaaug

SEQ ID NO: 780691 - RNA, 22 nt, Human
ugggagcucagaaagggagguc

SEQ ID NO: 780692 - RNA, 22 nt, Human
aauguuguuggcucuucaugau

SEQ ID NO: 780693 - RNA, 22 nt, Human
caguuauaggagccauuguaua

SEQ ID NO: 780694 - RNA, 22 nt, Human
uguccuggugcuucuugggauu

SEQ ID NO: 780695 - RNA, 22 nt, Human
uccagcagaccaucaaggcuca

SEQ ID NO: 780696 - RNA, 22 nt, Human
gaugugugcuuuucgcaguguc

SEQ ID NO: 780697 - RNA, 22 nt, Human
uacaguauuacuguguuguuuu

SEQ ID NO: 780698 - RNA, 22 nt, Human
guuuccuaccagugguuccaga

SEQ ID NO: 780699 - RNA, 22 nt, Human
acuuugcaaugggcagaaccca

SEQ ID NO: 780700 - RNA, 22 nt, Human
cuggccccaucuggagucugag

SEQ ID NO: 780701 - RNA, 22 nt, Human
cucaugauguagcgaaugagaa

SEQ ID NO: 780702 - RNA, 22 nt, Human
gcacacaggcaguuuccagcca

SEQ ID NO: 780703 - RNA, 22 nt, Human
cugcuguguugccagugucacc

SEQ ID NO: 780704 - RNA, 22 nt, Human
uguccuggggacaagaggcccu

SEQ ID NO: 780705 - RNA, 22 nt, Human
auuccaauuguacuugcuuuua

SEQ ID NO: 780706 - RNA, 20 nt, Human
cuuucucuaauuuauaagua

SEQ ID NO: 780707 - RNA, 22 nt, Human
ugguguugaaccucagcagggg

SEQ ID NO: 780708 - RNA, 22 nt, Human
aagaauggugguggggccagca

SEQ ID NO: 780709 - RNA, 22 nt, Human
ucaggcucccugcugggcucug

SEQ ID NO: 780710 - RNA, 22 nt, Human
gaaaggucuuccggucuuccag

SEQ ID NO: 780711 - RNA, 23 nt, Human
aaagugcaguugaggaaucauag

SEQ ID NO: 780712 - RNA, 23 nt, Human
ugacagaccuucccagacaguca

SEQ ID NO: 780713 - RNA, 19 nt, Human
ugccagcucacaggagcuc

SEQ ID NO: 780714 - RNA, 22 nt, Human
gcagcuuggauuucuguaguuu

SEQ ID NO: 780715 - RNA, 22 nt, Human
gugugagcagaaaccaugagua

SEQ ID NO: 780716 - RNA, 22 nt, Human
ugggccacacacagaagaauca

SEQ ID NO: 780717 - RNA, 22 nt, Human
ggggaaggauaugauuagacua

SEQ ID NO: 780718 - RNA, 22 nt, Human
acccuuuagaaggcaucucagu

SEQ ID NO: 780719 - RNA, 20 nt, Human
uauugccuaaauaccagaau

SEQ ID NO: 780720 - RNA, 22 nt, Human
gccacccugacgccgcagaccc

SEQ ID NO: 780721 - RNA, 22 nt, Human
gaggccagggaugcaaugagag

SEQ ID NO: 780722 - RNA, 22 nt, Human
cuggcccuggcuggagcccagg

SEQ ID NO: 780723 - RNA, 22 nt, Human
cagagugagggccugcaccugc

SEQ ID NO: 780724 - RNA, 18 nt, Human
gaugggagcaagagaaga

SEQ ID NO: 780725 - RNA, 19 nt, Human
gggcuggagggauagagcc

SEQ ID NO: 780726 - RNA, 17 nt, Human
aacaauaggauguguau

SEQ ID NO: 780727 - RNA, 18 nt, Human
gugugcaguugcaggggu

SEQ ID NO: 780728 - RNA, 22 nt, Human
uaugcuacuagaaauaaaaugg

SEQ ID NO: 780729 - RNA, 22 nt, Human
uuuguccuugaaucaauucaca

SEQ ID NO: 780730 - RNA, 22 nt, Human
aaggcuggagaugguuggaaug

SEQ ID NO: 780731 - RNA, 22 nt, Human
uucuucuuaauguccugggaac

SEQ ID NO: 780732 - RNA, 22 nt, Human
aacucucuugggaguaccugga

SEQ ID NO: 780733 - RNA, 21 nt, Human
uacauugaagaaugggaauga

SEQ ID NO: 780734 - RNA, 22 nt, Human
aggcuccagcagccagaggaag

SEQ ID NO: 780735 - RNA, 22 nt, Human
ggcaggcaccagcucagcaaua

SEQ ID NO: 780736 - RNA, 23 nt, Human
uggcagagacccagaaucuacau

SEQ ID NO: 780737 - RNA, 22 nt, Human
uggcuggcauagccauugcucc

SEQ ID NO: 780738 - RNA, 21 nt, Human
uauuuauuaauuuguaaggcu

SEQ ID NO: 780739 - RNA, 22 nt, Human
uuauacccuccauaccuggccu

SEQ ID NO: 780740 - RNA, 22 nt, Human
uggccugggugcugcugacauc

SEQ ID NO: 780741 - RNA, 19 nt, Human
acagucagggaauaaagac

SEQ ID NO: 780742 - RNA, 22 nt, Human
aggcuggugauuagaagcagcc

SEQ ID NO: 780743 - RNA, 22 nt, Human
cagagcacccaaggagcauuug

SEQ ID NO: 780744 - RNA, 22 nt, Human
uuuauccaucaucugcugaagg

SEQ ID NO: 780745 - RNA, 22 nt, Human
ccugucagcugauggcuaugua

SEQ ID NO: 780746 - RNA, 22 nt, Human
ucaaguguaguggugucagguc

SEQ ID NO: 780747 - RNA, 22 nt, Human
ccagcaucuaacgcuccuggga

SEQ ID NO: 780748 - RNA, 22 nt, Human
cucaggaucgcuugcccuaggg

SEQ ID NO: 780749 - RNA, 22 nt, Human
agaacugugaaguaugugaaau

SEQ ID NO: 780750 - RNA, 22 nt, Human
ugcagcuucuccaucuccuugu

SEQ ID NO: 780751 - RNA, 22 nt, Human
ccuggagagagaggccaacugc

SEQ ID NO: 780752 - RNA, 17 nt, Human
agagagagcaugccacc

SEQ ID NO: 780753 - RNA, 22 nt, Human
acuguccugaauacugcaugac

SEQ ID NO: 780754 - RNA, 22 nt, Human
uuuuuuguuggguagaacggaa

SEQ ID NO: 780755 - RNA, 22 nt, Human
auaugacagcggauucacauau

SEQ ID NO: 780756 - RNA, 22 nt, Human
agucugcaggcugugauuuuuu

SEQ ID NO: 780757 - RNA, 19 nt, Human
ucacagcaucugucugaac

SEQ ID NO: 780758 - RNA, 22 nt, Human
caugauaacuucauuacacaau

SEQ ID NO: 780759 - RNA, 22 nt, Human
aagggaaauccucagcccagga

SEQ ID NO: 780760 - RNA, 22 nt, Human
aaugcuguaaagaugcuaucug

SEQ ID NO: 780761 - RNA, 22 nt, Human
gcacaggaaaugacucauguua

SEQ ID NO: 780762 - RNA, 22 nt, Human
acaggcugaaaguuaaguucug

SEQ ID NO: 780763 - RNA, 22 nt, Human
gggcuauagcacuauguauggg

SEQ ID NO: 780764 - RNA, 22 nt, Human
caauguuuguuagagcucuaga

SEQ ID NO: 780765 - RNA, 17 nt, Human
ugaaaucagcacccagg

SEQ ID NO: 780766 - RNA, 22 nt, Human
gugaagucaagaaugcaauuug

SEQ ID NO: 780767 - RNA, 18 nt, Human
ucucucagggaaacagaa

SEQ ID NO: 780768 - RNA, 22 nt, Human
uuuagcaucgaaguaaauuuag

SEQ ID NO: 780769 - RNA, 22 nt, Human
uguccuggacaacagccccuag

SEQ ID NO: 780770 - RNA, 22 nt, Human
uccagggagagccgcugcucca

SEQ ID NO: 780771 - RNA, 22 nt, Human
caguggcuuaaauaagauuagg

SEQ ID NO: 780772 - RNA, 20 nt, Human
ccaggcacugucccaugcag

SEQ ID NO: 780773 - RNA, 22 nt, Human
ugcacagagcuggacuccgcgg

SEQ ID NO: 780774 - RNA, 22 nt, Human
ccagccuggggaggcagcuucu

SEQ ID NO: 780775 - RNA, 22 nt, Human
ggcucugcgcgguaaagugacu

SEQ ID NO: 780776 - RNA, 22 nt, Human
aacuuaggaaaauaaggcauga

SEQ ID NO: 780777 - RNA, 18 nt, Human
gagaggcccggcugugcc

SEQ ID NO: 780778 - RNA, 22 nt, Human
aguauauuuaccauuggguggg

SEQ ID NO: 780779 - RNA, 22 nt, Human
gcucaguguucaucuguaugca

SEQ ID NO: 780780 - RNA, 22 nt, Human
uaguuuuauaauguuaacaucu

SEQ ID NO: 780781 - RNA, 22 nt, Human
cuggagaagccaaacuagucac

SEQ ID NO: 780782 - RNA, 22 nt, Human
augucuuuauuaauaucaugcc

SEQ ID NO: 780783 - RNA, 22 nt, Human
uggauuucuccagcucuccauu

SEQ ID NO: 780784 - RNA, 22 nt, Human
gccacuguacuccagccugcga

SEQ ID NO: 780785 - RNA, 19 nt, Human
ugaggauugagguccagua

SEQ ID NO: 780786 - RNA, 22 nt, Human
agcagggccaacaguaaacacc

SEQ ID NO: 780787 - RNA, 22 nt, Human
aagggugcugcuaucaggaagc

SEQ ID NO: 780788 - RNA, 22 nt, Human
agucaagauucuggcacuagca

SEQ ID NO: 780789 - RNA, 22 nt, Human
cguauacaugaagacauugcug

SEQ ID NO: 780790 - RNA, 22 nt, Human
caaaugauaccuauuacuaggc

SEQ ID NO: 780791 - RNA, 22 nt, Human
auacaguaauugcauaggcuuc

SEQ ID NO: 780792 - RNA, 22 nt, Human
uuccuguauucuaaagggaaag

SEQ ID NO: 780793 - RNA, 22 nt, Human
gagggcaggggucuugcacggu

SEQ ID NO: 780794 - RNA, 22 nt, Human
gcaggcuccaacuggaggaguu

SEQ ID NO: 780795 - RNA, 22 nt, Human
ggaagccaugagggacaguucu

SEQ ID NO: 780796 - RNA, 22 nt, Human
uuguaagagagaauugcaaauu

SEQ ID NO: 780797 - RNA, 22 nt, Human
uaucuguuaugggcugaauugc

SEQ ID NO: 780798 - RNA, 22 nt, Human
auugcuucauguccuuugccgg

SEQ ID NO: 780799 - RNA, 22 nt, Human
gcagcagaugcuuucauggaca

SEQ ID NO: 780800 - RNA, 21 nt, Human
aggcagccagucaugcucccu

SEQ ID NO: 780801 - RNA, 22 nt, Human
cugcuguguuagcagguuuagu

SEQ ID NO: 780802 - RNA, 22 nt, Human
acacagagauguaaaguuaggc

SEQ ID NO: 780803 - RNA, 22 nt, Human
cagggugcgccacucagaugua

SEQ ID NO: 780804 - RNA, 23 nt, Human
cuguggcugaguccuguuggagu

SEQ ID NO: 780805 - RNA, 22 nt, Human
augacauugaauauguuaacua

SEQ ID NO: 780806 - RNA, 22 nt, Human
ccucucucuccugcacacacac

SEQ ID NO: 780807 - RNA, 22 nt, Human
ugggaccugcccuggccccauc

SEQ ID NO: 780808 - RNA, 22 nt, Human
gggugagacagaaagagcaaaa

SEQ ID NO: 780809 - RNA, 22 nt, Human
cugagaggugcugguggcugca

SEQ ID NO: 780810 - RNA, 22 nt, Human
uggcaggagagcgucagaucag

SEQ ID NO: 780811 - RNA, 19 nt, Human
ucugagcugauaugacauu

SEQ ID NO: 780812 - RNA, 22 nt, Human
uggcagcagacaaaaggccauu

SEQ ID NO: 780813 - RNA, 22 nt, Human
ugggacacccucacgccugcac

SEQ ID NO: 780814 - RNA, 22 nt, Human
ugagcucauagcucuuauuaug

SEQ ID NO: 780815 - RNA, 22 nt, Human
agguuauaugucauacugaagu

SEQ ID NO: 780816 - RNA, 21 nt, Human
cccaggcugaauuaaaaauau

SEQ ID NO: 780817 - RNA, 22 nt, Human
gcaggaugguggaaggccugcu

SEQ ID NO: 780818 - RNA, 22 nt, Human
agcauacaggucugaaacagcu

SEQ ID NO: 780819 - RNA, 21 nt, Human
uguuuaaguacuccuuucugg

SEQ ID NO: 780820 - RNA, 21 nt, Human
ugcuugggggcuucaggagcu

SEQ ID NO: 780821 - RNA, 22 nt, Human
agggcagagacaugcuuccuga

SEQ ID NO: 780822 - RNA, 22 nt, Human
agugguaagggcauaggcacug

SEQ ID NO: 780823 - RNA, 22 nt, Human
acccuguauacgcuacauuuuu

SEQ ID NO: 780824 - RNA, 22 nt, Human
cagaccccgaguuugcagaguu

SEQ ID NO: 780825 - RNA, 22 nt, Human
uuggacugaaucuuucucacac

SEQ ID NO: 780826 - RNA, 22 nt, Human
uuuuacauugggaaaugccucu

SEQ ID NO: 780827 - RNA, 22 nt, Human
uuaguuagaauaauacaaguaa

SEQ ID NO: 780828 - RNA, 22 nt, Human
uacagucagagugccuuucuaa

SEQ ID NO: 780829 - RNA, 22 nt, Human
agaguuugaauuuugaaaagau

SEQ ID NO: 780830 - RNA, 22 nt, Human
cagggcuuuccugagaagugau

SEQ ID NO: 780831 - RNA, 22 nt, Human
gccuuggacucggguggacuca

SEQ ID NO: 780832 - RNA, 17 nt, Human
cugaaauauuaugauaa

SEQ ID NO: 780833 - RNA, 22 nt, Human
agggcagagaaauguaguugag

SEQ ID NO: 780834 - RNA, 22 nt, Human
ccagaugucugagccacacucc

SEQ ID NO: 780835 - RNA, 17 nt, Human
ucuggccuuccugaacu

SEQ ID NO: 780836 - RNA, 22 nt, Human
agcaauagacacaagauggaua

SEQ ID NO: 780837 - RNA, 22 nt, Human
ucaauuaugccauugcaauauu

SEQ ID NO: 780838 - RNA, 22 nt, Human
gcuucucccuacagaugucagu

SEQ ID NO: 780839 - RNA, 22 nt, Human
accacaggggaggaaugaugcc

SEQ ID NO: 780840 - RNA, 22 nt, Human
uccuggcccucugcaaacgcca

SEQ ID NO: 780841 - RNA, 22 nt, Human
ggaagcugccaguccaccagcu

SEQ ID NO: 780842 - RNA, 22 nt, Human
aggauccuuuggccacuucuua

SEQ ID NO: 780843 - RNA, 22 nt, Human
cuguuucucccauguccaagug

SEQ ID NO: 780844 - RNA, 22 nt, Human
aaaugguagguuuucuuaagaa

SEQ ID NO: 780845 - RNA, 22 nt, Human
caguggcuucucaugucauuca

SEQ ID NO: 780846 - RNA, 22 nt, Human
uauugucuaggaauuguuuaaa

SEQ ID NO: 780847 - RNA, 22 nt, Human
uggaaggcaacggagugagcug

SEQ ID NO: 780848 - RNA, 22 nt, Human
gaauuuacaaguugaauaacaa

SEQ ID NO: 780849 - RNA, 23 nt, Human
acauacauaagcaccacauuuug

SEQ ID NO: 780850 - RNA, 22 nt, Human
uaauugcuguauagauugucau

SEQ ID NO: 780851 - RNA, 22 nt, Human
agggcugacaguaaaaguauga

SEQ ID NO: 780852 - RNA, 22 nt, Human
uaauuuauuucaacugccaagg

SEQ ID NO: 780853 - RNA, 22 nt, Human
ggccccucagcaucugagucag

SEQ ID NO: 780854 - RNA, 22 nt, Human
ggacagcugcuuucaggccaca

SEQ ID NO: 780855 - RNA, 22 nt, Human
ccagaggggcugagcaggucac

SEQ ID NO: 780856 - RNA, 22 nt, Human
gugcaggaguaggagagggcuu

SEQ ID NO: 780857 - RNA, 22 nt, Human
acauucucuccaugucuucuuu

SEQ ID NO: 780858 - RNA, 21 nt, Human
auauuuuuguuuggacuguca

SEQ ID NO: 780859 - RNA, 22 nt, Human
aguuuucacacucaccaaaagg

SEQ ID NO: 780860 - RNA, 17 nt, Human
caucugcucugccccuu

SEQ ID NO: 780861 - RNA, 22 nt, Human
cucugagaaagcugugagcuaa

SEQ ID NO: 780862 - RNA, 22 nt, Human
aaugcugcucucauaauuauag

SEQ ID NO: 780863 - RNA, 22 nt, Human
uggggcaguggcuuuucacccu

SEQ ID NO: 780864 - RNA, 22 nt, Human
ggccccaggccuuuggucuggc

SEQ ID NO: 780865 - RNA, 22 nt, Human
auucuucauuguugauucaugu

SEQ ID NO: 780866 - RNA, 22 nt, Human
ucacauucuagaauguuaucgu

SEQ ID NO: 780867 - RNA, 22 nt, Human
uuaaauuaggacucuaguucug

SEQ ID NO: 780868 - RNA, 22 nt, Human
acauuucuaauuuaauguaaca

SEQ ID NO: 780869 - RNA, 22 nt, Human
aagcagaucugauagggcccug

SEQ ID NO: 780870 - RNA, 20 nt, Human
uggcugcccgaggcacacac

SEQ ID NO: 780871 - RNA, 22 nt, Human
cagucacuccagccugccucag

SEQ ID NO: 780872 - RNA, 22 nt, Human
cuccagauuccugcuggcagaa

SEQ ID NO: 780873 - RNA, 22 nt, Human
auggaauuuggagauuaggcau

SEQ ID NO: 780874 - RNA, 22 nt, Human
ugaagcuggaagcaugcagacu

SEQ ID NO: 780875 - RNA, 22 nt, Human
ccuucuugagguagcacauucu

SEQ ID NO: 780876 - RNA, 22 nt, Human
agcaccagcucaaggugcaccu

SEQ ID NO: 780877 - RNA, 22 nt, Human
gcccugagggucuggguuccca

SEQ ID NO: 780878 - RNA, 22 nt, Human
acugcacugauuuaucauccca

SEQ ID NO: 780879 - RNA, 22 nt, Human
cuguggcuucugcuugggccuc

SEQ ID NO: 780880 - RNA, 22 nt, Human
ucaaguccugcuguggaccaca

SEQ ID NO: 780881 - RNA, 22 nt, Human
auuguauaacagcauguauuuu

SEQ ID NO: 780882 - RNA, 22 nt, Human
uagcauuucccaaaugcauuug

SEQ ID NO: 780883 - RNA, 22 nt, Human
uggcccaggaggccagagggca

SEQ ID NO: 780884 - RNA, 22 nt, Human
caggucuguauuaacagagggu

SEQ ID NO: 780885 - RNA, 22 nt, Human
aguauauaguggcgcuguaugc

SEQ ID NO: 780886 - RNA, 22 nt, Human
cuuuacagauaggaacuacuca

SEQ ID NO: 780887 - RNA, 22 nt, Human
gauguacacucagaaaagucau

SEQ ID NO: 780888 - RNA, 22 nt, Human
uccuggugucgccuggucaguu

SEQ ID NO: 780889 - RNA, 22 nt, Human
gagggagcuggagcagacgccg

SEQ ID NO: 780890 - RNA, 22 nt, Human
acagauauaugauuguguaaau

SEQ ID NO: 780891 - RNA, 22 nt, Human
gccccuggcuggccagcuccuc

SEQ ID NO: 780892 - RNA, 22 nt, Human
uuaacaaaguaacgggaaaaga

SEQ ID NO: 780893 - RNA, 22 nt, Human
ccuguguccuuggcagauaucc

SEQ ID NO: 780894 - RNA, 22 nt, Human
aaauugcuaaauuguaagaggg

SEQ ID NO: 780895 - RNA, 22 nt, Human
guacagcuaagaauuucaucuu

SEQ ID NO: 780896 - RNA, 22 nt, Human
guauuuccucgcuugugggauu

SEQ ID NO: 780897 - RNA, 22 nt, Human
aggucuggcucuucuccacaga

SEQ ID NO: 780898 - RNA, 22 nt, Human
gcucaggcucucccaggggaau

SEQ ID NO: 780899 - RNA, 22 nt, Human
ucucugggcuaaaaucaaggug

SEQ ID NO: 780900 - RNA, 22 nt, Human
ggguggcaggauuggcaggagu

SEQ ID NO: 780901 - RNA, 22 nt, Human
uguucccauuuucugcauaauc

SEQ ID NO: 780902 - RNA, 23 nt, Human
cauguuuuucuaucucagcgugu

SEQ ID NO: 780903 - RNA, 22 nt, Human
ggguggggccaggcaauuugca

SEQ ID NO: 780904 - RNA, 22 nt, Human
gcagggaccucacuacccccag

SEQ ID NO: 780905 - RNA, 21 nt, Human
cagagguggccugaccucuga

SEQ ID NO: 780906 - RNA, 22 nt, Human
accuuuccuggcugaccgagga

SEQ ID NO: 780907 - RNA, 22 nt, Human
auguggcuagggaauaaaauau

SEQ ID NO: 780908 - RNA, 22 nt, Human
gggggacaggaugaauaucugu

SEQ ID NO: 780909 - RNA, 22 nt, Human
augugaaacugaagcauccaua

SEQ ID NO: 780910 - RNA, 22 nt, Human
cacagugagcugggcaucaguu

SEQ ID NO: 780911 - RNA, 22 nt, Human
uucauugaaauguuucuagcug

SEQ ID NO: 780912 - RNA, 22 nt, Human
auucugcuuuugcugaccuacc

SEQ ID NO: 780913 - RNA, 22 nt, Human
ugacacaugcaccagucuuuaa

SEQ ID NO: 780914 - RNA, 22 nt, Human
uagggcagcugcaucaggcacu

SEQ ID NO: 780915 - RNA, 18 nt, Human
gggauauaucagugaaga

SEQ ID NO: 780916 - RNA, 19 nt, Human
cuugcugggugguuucugc

SEQ ID NO: 780917 - RNA, 22 nt, Human
uccucaguauuguggagcagau

SEQ ID NO: 780918 - RNA, 22 nt, Human
uaauugcucuuggccgugccag

SEQ ID NO: 780919 - RNA, 22 nt, Human
ggcacagagcaggccacuaauc

SEQ ID NO: 780920 - RNA, 22 nt, Human
gagucagaccgacugggcucau

SEQ ID NO: 780921 - RNA, 22 nt, Human
ggcucuggaauguguagucagg

SEQ ID NO: 780922 - RNA, 22 nt, Human
aaaguuagaaugauaucaacga

SEQ ID NO: 780923 - RNA, 22 nt, Human
uguggcugcucaggugcagacc

SEQ ID NO: 780924 - RNA, 22 nt, Human
cuaaauuauuugcacauuagag

SEQ ID NO: 780925 - RNA, 22 nt, Human
accugaaaauuauuauuuccgc

SEQ ID NO: 780926 - RNA, 22 nt, Human
cagucccaaggaggaagcaguc

SEQ ID NO: 780927 - RNA, 22 nt, Human
gaaagcacaguucugaccaugu

SEQ ID NO: 780928 - RNA, 22 nt, Human
agcugcuuugccaaugcguucc

SEQ ID NO: 780929 - RNA, 22 nt, Human
ugggcagcauccuccacaguca

SEQ ID NO: 780930 - RNA, 19 nt, Human
gcuuccagcacugcaggag

SEQ ID NO: 780931 - RNA, 22 nt, Human
agauucauuguggauauuuucu

SEQ ID NO: 780932 - RNA, 22 nt, Human
uagagucagagaaucauuacag

SEQ ID NO: 780933 - RNA, 22 nt, Human
ccugugugucugucacugcaca

SEQ ID NO: 780934 - RNA, 22 nt, Human
caggcagcagccacucugguau

SEQ ID NO: 780935 - RNA, 22 nt, Human
uucucagaauugacugggagca

SEQ ID NO: 780936 - RNA, 22 nt, Human
ggcucaccauggccucccugcu

SEQ ID NO: 780937 - RNA, 22 nt, Human
ugaggaugacgauggcaauggc

SEQ ID NO: 780938 - RNA, 22 nt, Human
aaauuagugcaccagguugaag

SEQ ID NO: 780939 - RNA, 22 nt, Human
cugagcugggaguggauagugg

SEQ ID NO: 780940 - RNA, 22 nt, Human
gucucagugucaccuccagcug

SEQ ID NO: 780941 - RNA, 22 nt, Human
auuauggguauaacacaguuau

SEQ ID NO: 780942 - RNA, 23 nt, Human
cagaaaacccagagcucaguccc

SEQ ID NO: 780943 - RNA, 22 nt, Human
aaaaguuagcuauuaguaggug

SEQ ID NO: 780944 - RNA, 19 nt, Human
ucauuguugguuugucggg

SEQ ID NO: 780945 - RNA, 22 nt, Human
ucaggcuguggcuuugaccgca

SEQ ID NO: 780946 - RNA, 22 nt, Human
uagugcuuuaggccugaguguc

SEQ ID NO: 780947 - RNA, 22 nt, Human
gaaauaauacagugcucuucuc

SEQ ID NO: 780948 - RNA, 22 nt, Human
auagaucaauauuuagaaacuu

SEQ ID NO: 780949 - RNA, 22 nt, Human
gcuccaggauaauaaaguuguu

SEQ ID NO: 780950 - RNA, 22 nt, Human
ucuccugguuuguuaaauaauu

SEQ ID NO: 780951 - RNA, 22 nt, Human
cagaugcuauagugcugccaua

SEQ ID NO: 780952 - RNA, 22 nt, Human
cagcugagaaggucugaucagg

SEQ ID NO: 780953 - RNA, 22 nt, Human
uucuuauuucccccuucaucau

SEQ ID NO: 780954 - RNA, 21 nt, Human
gcugggucagcagguccucug

SEQ ID NO: 780955 - RNA, 22 nt, Human
ggaagggcggauaguauaaguu

SEQ ID NO: 780956 - RNA, 22 nt, Human
cacaaugcagcauguaaaugca

SEQ ID NO: 780957 - RNA, 22 nt, Human
ugcagucuggauguccucagau

SEQ ID NO: 780958 - RNA, 22 nt, Human
ccuacaggaaauuguaucaaaa

SEQ ID NO: 780959 - RNA, 22 nt, Human
ugggccuggcccuguggaggag

SEQ ID NO: 780960 - RNA, 22 nt, Human
cauuucaauuauuugcucuucu

SEQ ID NO: 780961 - RNA, 22 nt, Human
agcccaagcuaugaggugaccu

SEQ ID NO: 780962 - RNA, 22 nt, Human
aggugacaggacaggagcuggu

SEQ ID NO: 780963 - RNA, 19 nt, Human
ccucuucucuggcagcaga

SEQ ID NO: 780964 - RNA, 18 nt, Human
gcucaggcccuagucagu

SEQ ID NO: 780965 - RNA, 22 nt, Human
uccccucucugcgcucccaggu

SEQ ID NO: 780966 - RNA, 22 nt, Human
aagcagagccaccagcuuugga

SEQ ID NO: 780967 - RNA, 17 nt, Human
gaacuuuuauuaaauuc

SEQ ID NO: 780968 - RNA, 22 nt, Human
aaucugaaaguauggagcagua

SEQ ID NO: 780969 - RNA, 22 nt, Human
accagucauagaaagcaguggu

SEQ ID NO: 780970 - RNA, 22 nt, Human
caccauuuucuaaaaauaugac

SEQ ID NO: 780971 - RNA, 22 nt, Human
uuuggacugcaugaugaucugg

SEQ ID NO: 780972 - RNA, 22 nt, Human
agggccagcagcuuggccaacc

SEQ ID NO: 780973 - RNA, 22 nt, Human
ugaagcaagauagaaagcugcu

SEQ ID NO: 780974 - RNA, 22 nt, Human
acacuagcuaaaugcugauuaa

SEQ ID NO: 780975 - RNA, 22 nt, Human
gcugcucuugaggggcucacug

SEQ ID NO: 780976 - RNA, 22 nt, Human
ccccagcucagugcagggacau

SEQ ID NO: 780977 - RNA, 22 nt, Human
aucuggcugagcgaggcccaca

SEQ ID NO: 780978 - RNA, 22 nt, Human
gcugccugcacagagcugcuuu

SEQ ID NO: 780979 - RNA, 22 nt, Human
auguauuugcgagguuaggaaa

SEQ ID NO: 780980 - RNA, 22 nt, Human
cuggauggaaggaggauaguau

SEQ ID NO: 780981 - RNA, 20 nt, Human
acguggccaccaguggcuua

SEQ ID NO: 780982 - RNA, 18 nt, Human
ggucaagaaaguaaggca

SEQ ID NO: 780983 - RNA, 22 nt, Human
cagcacuucaaugagcauuuca

SEQ ID NO: 780984 - RNA, 22 nt, Human
guuaucuuaggguacaaaggac

SEQ ID NO: 780985 - RNA, 22 nt, Human
agaacauggauugucaaaggua

SEQ ID NO: 780986 - RNA, 22 nt, Human
cuggggcugcagcgaucuucau

SEQ ID NO: 780987 - RNA, 20 nt, Human
caggcaguuugugguuaggg

SEQ ID NO: 780988 - RNA, 22 nt, Human
aaacugguaaucggcaagugag

SEQ ID NO: 780989 - RNA, 22 nt, Human
uuuagcaaaaaagcucugcgua

SEQ ID NO: 780990 - RNA, 22 nt, Human
auuuagcaagaguacaaaauaa

SEQ ID NO: 780991 - RNA, 22 nt, Human
caagcagggagcaucaagggag

SEQ ID NO: 780992 - RNA, 20 nt, Human
acuuaguguaggguuccuag

SEQ ID NO: 780993 - RNA, 20 nt, Human
agcauacaucauaagaaacc

SEQ ID NO: 780994 - RNA, 22 nt, Human
auuggaaauacugagagauaaa

SEQ ID NO: 780995 - RNA, 19 nt, Human
cuuuuucaccuucuagaag

SEQ ID NO: 780996 - RNA, 22 nt, Human
uagucaaaaggaaggauaugcu

SEQ ID NO: 780997 - RNA, 22 nt, Human
gaauuguagagggaacagaagc

SEQ ID NO: 780998 - RNA, 22 nt, Human
uccaggaggcaccuuuggacca

SEQ ID NO: 780999 - RNA, 23 nt, Human
uuuuuugucuugcuaggcugccc

SEQ ID NO: 781000 - RNA, 22 nt, Human
cuucaguauccuccacauguua

SEQ ID NO: 781001 - RNA, 19 nt, Human
ugagugucacgucagugcc

SEQ ID NO: 781002 - RNA, 22 nt, Human
ggucaugcugugaaucagugcu

SEQ ID NO: 781003 - RNA, 22 nt, Human
ggcacaauugcagcaauaaaca

SEQ ID NO: 781004 - RNA, 22 nt, Human
uuagaaagguuuugcucugaaa

SEQ ID NO: 781005 - RNA, 23 nt, Human
ucacacuaugaaguguguuaucc

SEQ ID NO: 781006 - RNA, 22 nt, Human
uugcagacauuccagagcuuuu

SEQ ID NO: 781007 - RNA, 22 nt, Human
cugagguagcugugaauguucu

SEQ ID NO: 781008 - RNA, 22 nt, Human
aagaacaugcuauaauuaucuu

SEQ ID NO: 781009 - RNA, 22 nt, Human
aaaggccacugcaagggaaggu

SEQ ID NO: 781010 - RNA, 22 nt, Human
ucagggaagacuucuuagagga

SEQ ID NO: 781011 - RNA, 22 nt, Human
gaaagggagugaagaugguaua

SEQ ID NO: 781012 - RNA, 22 nt, Human
ccagcuuucugggugguuucug

SEQ ID NO: 781013 - RNA, 22 nt, Human
acagcuauagacgauguauaga

SEQ ID NO: 781014 - RNA, 22 nt, Human
gacugaaauuauaccaaguggu

SEQ ID NO: 781015 - RNA, 22 nt, Human
ggcuguggacacugagcucaga

SEQ ID NO: 781016 - RNA, 22 nt, Human
ucucccaaccucuggugggugc

SEQ ID NO: 781017 - RNA, 22 nt, Human
auucauguucggggccacguug

SEQ ID NO: 781018 - RNA, 22 nt, Human
cuucagaacuauaaaaaguacu

SEQ ID NO: 781019 - RNA, 22 nt, Human
acaguaacaccuacucuguccc

SEQ ID NO: 781020 - RNA, 22 nt, Human
auagccagcauauagcagggag

SEQ ID NO: 781021 - RNA, 20 nt, Human
gagggcucguggauggauaa

SEQ ID NO: 781022 - RNA, 22 nt, Human
gaccacagcuacaagggcaagg

SEQ ID NO: 781023 - RNA, 22 nt, Human
uuacacaaagcuccccaaauag

SEQ ID NO: 781024 - RNA, 22 nt, Human
agcagagccagaauuggaccag

SEQ ID NO: 781025 - RNA, 22 nt, Human
gcugaagcugcagcaggaggaa

SEQ ID NO: 781026 - RNA, 22 nt, Human
aagcccuguucuuucucucacc

SEQ ID NO: 781027 - RNA, 22 nt, Human
ugcuggggucauggggcgcccg

SEQ ID NO: 781028 - RNA, 22 nt, Human
auguggagaggaagugcaaacu

SEQ ID NO: 781029 - RNA, 22 nt, Human
gucacuuuauuaauuuugguga

SEQ ID NO: 781030 - RNA, 22 nt, Human
uuggcuuuagaccugagacugu

SEQ ID NO: 781031 - RNA, 22 nt, Human
uaaccuggggcgguuucccaau

SEQ ID NO: 781032 - RNA, 22 nt, Human
ccaggaggcucuugucccuggu

SEQ ID NO: 781033 - RNA, 22 nt, Human
ugcucuguaacaaauugacaug

SEQ ID NO: 781034 - RNA, 22 nt, Human
ugggagcacucuuugggaagca

SEQ ID NO: 781035 - RNA, 22 nt, Human
ucccagcccagguaugaugaua

SEQ ID NO: 781036 - RNA, 22 nt, Human
auuucucuuccuccuaggguug

SEQ ID NO: 781037 - RNA, 22 nt, Human
aucuggcucuuccuggaguucc

SEQ ID NO: 781038 - RNA, 22 nt, Human
acugggaaggagcaggaucugu

SEQ ID NO: 781039 - RNA, 22 nt, Human
ccuggcagcuguuuggcuuggc

SEQ ID NO: 781040 - RNA, 22 nt, Human
gcagggcugcugaaacuuguuu

SEQ ID NO: 781041 - RNA, 22 nt, Human
uuuuggucagguuggucucgaa

SEQ ID NO: 781042 - RNA, 22 nt, Human
agaaccucuggauacaguuuaa

SEQ ID NO: 781043 - RNA, 22 nt, Human
aggcuccagcccaaggcugcag

SEQ ID NO: 781044 - RNA, 22 nt, Human
ggacuggccggcgcugaggccc

SEQ ID NO: 781045 - RNA, 20 nt, Human
agccaggcucaagcuccccc

SEQ ID NO: 781046 - RNA, 22 nt, Human
uacauguuauuucacuauuggu

SEQ ID NO: 781047 - RNA, 22 nt, Human
cagcccugggaguuggggccga

SEQ ID NO: 781048 - RNA, 22 nt, Human
aaaugcacaggagaaccaauuc

SEQ ID NO: 781049 - RNA, 22 nt, Human
uccagcaugacuaguuccccau

SEQ ID NO: 781050 - RNA, 21 nt, Human
aggugggcagguggaguggcc

SEQ ID NO: 781051 - RNA, 22 nt, Human
ugcugccagggcucugcccaca

SEQ ID NO: 781052 - RNA, 22 nt, Human
guguggggcucagugggaaugu

SEQ ID NO: 781053 - RNA, 22 nt, Human
acacauuauagagaguauaaua

SEQ ID NO: 781054 - RNA, 22 nt, Human
cauuccagcucucauacucugg

SEQ ID NO: 781055 - RNA, 22 nt, Human
acuugcaaagugagggaguguu

SEQ ID NO: 781056 - RNA, 22 nt, Human
cccuggaggaaaaucugaggcu

SEQ ID NO: 781057 - RNA, 22 nt, Human
auguucaaacuuuuuacacacc

SEQ ID NO: 781058 - RNA, 22 nt, Human
uaagucaucacauugcagagau

SEQ ID NO: 781059 - RNA, 22 nt, Human
ugggguugaagaaaggaucuag

SEQ ID NO: 781060 - RNA, 22 nt, Human
uggaaggcauuucacacaggau

SEQ ID NO: 781061 - RNA, 22 nt, Human
ugcuucuuuacuauaggcaauu

SEQ ID NO: 781062 - RNA, 22 nt, Human
cagaccugaggagcacugagcc

SEQ ID NO: 781063 - RNA, 21 nt, Human
guccuucagcaaguuaguggc

SEQ ID NO: 781064 - RNA, 22 nt, Human
uggcugcugagaaggcagcugu

SEQ ID NO: 781065 - RNA, 22 nt, Human
cagggcucaggaaaucagacgu

SEQ ID NO: 781066 - RNA, 22 nt, Human
agggcagcauugccuuucucca

SEQ ID NO: 781067 - RNA, 22 nt, Human
accaaggaagagauucucaguu

SEQ ID NO: 781068 - RNA, 22 nt, Human
guccuucagcuuuaucugaaca

SEQ ID NO: 781069 - RNA, 22 nt, Human
uacccaaggcccuuucaauuuc

SEQ ID NO: 781070 - RNA, 23 nt, Human
ucugcucugaaguucggcugagc

SEQ ID NO: 781071 - RNA, 16 nt, Human
gcagggguggguggag

SEQ ID NO: 781072 - RNA, 22 nt, Human
aggagguggccugagcgugccc

SEQ ID NO: 781073 - RNA, 22 nt, Human
cuuacacuucaucucauccagg

SEQ ID NO: 781074 - RNA, 22 nt, Human
cuuuacauuaauuucuacugau

SEQ ID NO: 781075 - RNA, 22 nt, Human
agacucugcuaagaauauaauu

SEQ ID NO: 781076 - RNA, 22 nt, Human
uuguauucauugcuuacccaau

SEQ ID NO: 781077 - RNA, 22 nt, Human
aaacuguuccuuuuucagcaac

SEQ ID NO: 781078 - RNA, 22 nt, Human
uagggcaggggaggaaucugaa

SEQ ID NO: 781079 - RNA, 22 nt, Human
gcagguggagcaguagucuggu

SEQ ID NO: 781080 - RNA, 22 nt, Human
auaggagaucaauaugcaauuu

SEQ ID NO: 781081 - RNA, 22 nt, Human
uaaagcaagacacacccauagc

SEQ ID NO: 781082 - RNA, 22 nt, Human
ggucccaggaaucuguguucua

SEQ ID NO: 781083 - RNA, 22 nt, Human
auaggcaagggauacaauauac

SEQ ID NO: 781084 - RNA, 22 nt, Human
auuugcauaaggaugcuacugu

SEQ ID NO: 781085 - RNA, 22 nt, Human
gccuguccuggaugcucugcaa

SEQ ID NO: 781086 - RNA, 23 nt, Human
ugagcugggccugcaggggucuc

SEQ ID NO: 781087 - RNA, 22 nt, Human
uaaugagaucauaucuucugag

SEQ ID NO: 781088 - RNA, 22 nt, Human
aucuugaucaaggcuaucauga

SEQ ID NO: 781089 - RNA, 22 nt, Human
ucacauuuuaguaccaugauuu

SEQ ID NO: 781090 - RNA, 22 nt, Human
ucuuggaaguagaacacagucu

SEQ ID NO: 781091 - RNA, 22 nt, Human
ucacaggguguacaucaccuau

SEQ ID NO: 781092 - RNA, 22 nt, Human
uuuacaauucuggugccagcua

SEQ ID NO: 781093 - RNA, 22 nt, Human
gacacagagcucacagucuccu

SEQ ID NO: 781094 - RNA, 22 nt, Human
ccagaggcggagguuugcagug

SEQ ID NO: 781095 - RNA, 22 nt, Human
aucuauuaugcugagaaacugu

SEQ ID NO: 781096 - RNA, 22 nt, Human
ucagauauucaauuaaguuaaa

SEQ ID NO: 781097 - RNA, 22 nt, Human
cauauucuguuggucacauaga

SEQ ID NO: 781098 - RNA, 22 nt, Human
uuacuacauuguaacacaguac

SEQ ID NO: 781099 - RNA, 22 nt, Human
ugagcucuaagauccccucaag

SEQ ID NO: 781100 - RNA, 22 nt, Human
auguuauuuuggaaaauacaaa

SEQ ID NO: 781101 - RNA, 22 nt, Human
aacuccagacuacuaauuuagu

SEQ ID NO: 781102 - RNA, 22 nt, Human
uagcucuggagucuucucagaa

SEQ ID NO: 781103 - RNA, 18 nt, Human
gccugggaggaggaaaug

SEQ ID NO: 781104 - RNA, 22 nt, Human
cacuggcaucuaguggguugag

SEQ ID NO: 781105 - RNA, 22 nt, Human
aaagugccacaacuggacaacc

SEQ ID NO: 781106 - RNA, 22 nt, Human
ucccugaaccacuagugaugag

SEQ ID NO: 781107 - RNA, 22 nt, Human
uccccagccgugaaggagagga

SEQ ID NO: 781108 - RNA, 19 nt, Human
acaggcagaauugggugug

SEQ ID NO: 781109 - RNA, 22 nt, Human
uuacagaauguucuuccaacag

SEQ ID NO: 781110 - RNA, 19 nt, Human
ugcuucuggaaccaugauc

SEQ ID NO: 781111 - RNA, 22 nt, Human
ccagugacuggcuuucuggugu

SEQ ID NO: 781112 - RNA, 22 nt, Human
aguauacaaauaaauguguaau

SEQ ID NO: 781113 - RNA, 22 nt, Human
ggaggcuccuaagcugacuuga

SEQ ID NO: 781114 - RNA, 21 nt, Human
ucugggcccaugcugccucac

SEQ ID NO: 781115 - RNA, 22 nt, Human
aauggcucugauguuguuguga

SEQ ID NO: 781116 - RNA, 22 nt, Human
gcuucgcugcuagcuaguuggu

SEQ ID NO: 781117 - RNA, 22 nt, Human
uggcugaguuucaugcaucaug

SEQ ID NO: 781118 - RNA, 22 nt, Human
uaguauuuccuguaagcuauag

SEQ ID NO: 781119 - RNA, 22 nt, Human
caaacuguaugacccuaggccg

SEQ ID NO: 781120 - RNA, 22 nt, Human
cuguaucuguguuggaugaguu

SEQ ID NO: 781121 - RNA, 21 nt, Human
agagagggagaugaaacaucc

SEQ ID NO: 781122 - RNA, 23 nt, Human
agaaguucaagaccagccugccc

SEQ ID NO: 781123 - RNA, 22 nt, Human
agacaggcugcugucugcuagg

SEQ ID NO: 781124 - RNA, 22 nt, Human
agagccuugcucuaaauuucuc

SEQ ID NO: 781125 - RNA, 22 nt, Human
ucccacagcaugaguaacucuc

SEQ ID NO: 781126 - RNA, 17 nt, Human
uuaaaggaugcucucuc

SEQ ID NO: 781127 - RNA, 22 nt, Human
ucuucacaccgggcagcaggaa

SEQ ID NO: 781128 - RNA, 22 nt, Human
ggaugaggaaaccacagugucc

SEQ ID NO: 781129 - RNA, 22 nt, Human
gugagucugccuagcacaucac

SEQ ID NO: 781130 - RNA, 22 nt, Human
uggaggaaaaaaccaggcagag

SEQ ID NO: 781131 - RNA, 22 nt, Human
uaggaaaagcacaggauguucu

SEQ ID NO: 781132 - RNA, 22 nt, Human
ugucucugcugcaccuucuggg

SEQ ID NO: 781133 - RNA, 22 nt, Human
aguuagaagugugucaucugug

SEQ ID NO: 781134 - RNA, 22 nt, Human
ucucugucucccguguguccgg

SEQ ID NO: 781135 - RNA, 22 nt, Human
gcuguggcuuucuguuucuguu

SEQ ID NO: 781136 - RNA, 22 nt, Human
ugcucaguccuccugcagugcc

SEQ ID NO: 781137 - RNA, 19 nt, Human
ccucuuccucugacacuau

SEQ ID NO: 781138 - RNA, 20 nt, Human
gcuccaggucagagaggacg

SEQ ID NO: 781139 - RNA, 22 nt, Human
cuaggaauccuuuuagaguugg

SEQ ID NO: 781140 - RNA, 23 nt, Human
ccuguugggacagcuuuaccaga

SEQ ID NO: 781141 - RNA, 22 nt, Human
uauacucugagaaacgugucac

SEQ ID NO: 781142 - RNA, 22 nt, Human
uaauugcuuuauccuguuagaa

SEQ ID NO: 781143 - RNA, 18 nt, Human
ggagagugacagagucgu

SEQ ID NO: 781144 - RNA, 22 nt, Human
agagucccagggacacuccaga

SEQ ID NO: 781145 - RNA, 22 nt, Human
cagagucuuguguguucagccc

SEQ ID NO: 781146 - RNA, 22 nt, Human
gaggcagcuuaggguacugacu

SEQ ID NO: 781147 - RNA, 17 nt, Human
ugcaggcuguuauagcc

SEQ ID NO: 781148 - RNA, 22 nt, Human
augaggcagcugacagcuguuc

SEQ ID NO: 781149 - RNA, 22 nt, Human
gucuggaggcacuuucucauga

SEQ ID NO: 781150 - RNA, 22 nt, Human
gucccaggcuuauguggagcuu

SEQ ID NO: 781151 - RNA, 22 nt, Human
cugaggagcguuggucacgugu

SEQ ID NO: 781152 - RNA, 22 nt, Human
gagaaaagcgaaggaccuggag

SEQ ID NO: 781153 - RNA, 22 nt, Human
agggggaguuucaguuagaaag

SEQ ID NO: 781154 - RNA, 22 nt, Human
aaagccaagcugggaaggcagg

SEQ ID NO: 781155 - RNA, 22 nt, Human
cagagcccuaguccugauggcc

SEQ ID NO: 781156 - RNA, 22 nt, Human
agggccagccaggcccuacaaa

SEQ ID NO: 781157 - RNA, 22 nt, Human
aggcauggcauggggcagaugu

SEQ ID NO: 781158 - RNA, 22 nt, Human
uuacaagacacagugcugaagg

SEQ ID NO: 781159 - RNA, 22 nt, Human
uggcacugagcagccgcggcag

SEQ ID NO: 781160 - RNA, 22 nt, Human
ucaggagagaaagaauacaauu

SEQ ID NO: 781161 - RNA, 22 nt, Human
ucaaaggaaacgugguccuggc

SEQ ID NO: 781162 - RNA, 19 nt, Human
ugcagcucagggcaggggc

SEQ ID NO: 781163 - RNA, 22 nt, Human
ccuugcauauauuauaucuuug

SEQ ID NO: 781164 - RNA, 22 nt, Human
uuggcagcagaguguggugcuc

SEQ ID NO: 781165 - RNA, 22 nt, Human
cuuggagaauccugguuauuca

SEQ ID NO: 781166 - RNA, 22 nt, Human
uucagagucagggaucucagag

SEQ ID NO: 781167 - RNA, 22 nt, Human
ucacagacauggugagguaaca

SEQ ID NO: 781168 - RNA, 22 nt, Human
uugaggccccauggaugagaac

SEQ ID NO: 781169 - RNA, 22 nt, Human
ugagacaguaauuguauaguuu

SEQ ID NO: 781170 - RNA, 22 nt, Human
gcagagccugugucugagcaaa

SEQ ID NO: 781171 - RNA, 22 nt, Human
cuaguauuaagugugaguaaaa

SEQ ID NO: 781172 - RNA, 22 nt, Human
auuuacauaauagacuuuaggu

SEQ ID NO: 781173 - RNA, 22 nt, Human
cagcuguucuugggacagacag

SEQ ID NO: 781174 - RNA, 22 nt, Human
gccaagggggcagugcaugggu

SEQ ID NO: 781175 - RNA, 22 nt, Human
cugagcucagucccagcucuac

SEQ ID NO: 781176 - RNA, 22 nt, Human
agacaagacuaggcaguuguug

SEQ ID NO: 781177 - RNA, 22 nt, Human
aaacaacucggcaacugcuuuu

SEQ ID NO: 781178 - RNA, 19 nt, Human
aguguguacugaaagcacu

SEQ ID NO: 781179 - RNA, 22 nt, Human
aggcagugcugugcccugaacc

SEQ ID NO: 781180 - RNA, 22 nt, Human
uuacaacauauuuagcuugauu

SEQ ID NO: 781181 - RNA, 22 nt, Human
guaacaaaggauaacuugguuu

SEQ ID NO: 781182 - RNA, 22 nt, Human
uugcaaaaucauuucucaggau

SEQ ID NO: 781183 - RNA, 17 nt, Human
agacagugagugccuug

SEQ ID NO: 781184 - RNA, 22 nt, Human
ucccagauuccugcucuuauau

SEQ ID NO: 781185 - RNA, 22 nt, Human
uucaaggaagaaguggcuuuga

SEQ ID NO: 781186 - RNA, 22 nt, Human
gcucuccaaacccuguggcuuu

SEQ ID NO: 781187 - RNA, 22 nt, Human
ucagcuggugccacucagucaa

SEQ ID NO: 781188 - RNA, 22 nt, Human
cagguggcauugucccgccagc

SEQ ID NO: 781189 - RNA, 22 nt, Human
agcccuagagcuggaggucagu

SEQ ID NO: 781190 - RNA, 22 nt, Human
ccuucaggucauauaugucaga

SEQ ID NO: 781191 - RNA, 22 nt, Human
uagcagcaauuacacaguccgu

SEQ ID NO: 781192 - RNA, 22 nt, Human
caggccagaguccaacuccaga

SEQ ID NO: 781193 - RNA, 22 nt, Human
acacugacgcuugacagucacc

SEQ ID NO: 781194 - RNA, 22 nt, Human
gguggccugcccugaucccugg

SEQ ID NO: 781195 - RNA, 22 nt, Human
gccaggugcuaucccugcgcug

SEQ ID NO: 781196 - RNA, 22 nt, Human
acaguagagcauuuguuuugau

SEQ ID NO: 781197 - RNA, 22 nt, Human
ugggauucaccaugggcuucag

SEQ ID NO: 781198 - RNA, 22 nt, Human
ugcccacauucaaaaggugaug

SEQ ID NO: 781199 - RNA, 22 nt, Human
aauuucagauauuaaagaauga

SEQ ID NO: 781200 - RNA, 22 nt, Human
uagucacaaccuucaaguuguc

SEQ ID NO: 781201 - RNA, 22 nt, Human
gacuugggcuugggcguggguu

SEQ ID NO: 781202 - RNA, 22 nt, Human
aaacagucugaugccaucugcc

SEQ ID NO: 781203 - RNA, 22 nt, Human
gaggccuggugugucucccgcu

SEQ ID NO: 781204 - RNA, 22 nt, Human
uuggcacaaauuucugaaauaa

SEQ ID NO: 781205 - RNA, 22 nt, Human
gagcacccuaccugccacugag

SEQ ID NO: 781206 - RNA, 22 nt, Human
cccaggagaccuagaucuguuu

SEQ ID NO: 781207 - RNA, 22 nt, Human
acuggggaguugaagcacuuuc

SEQ ID NO: 781208 - RNA, 22 nt, Human
ugagcuggucacuccuucugaa

SEQ ID NO: 781209 - RNA, 22 nt, Human
cucuggccgcagcucagcucug

SEQ ID NO: 781210 - RNA, 22 nt, Human
cagggcagaacauauagauagu

SEQ ID NO: 781211 - RNA, 21 nt, Human
ccugugugucugacugggcua

SEQ ID NO: 781212 - RNA, 22 nt, Human
cuccuucaaaagucauaguaaa

SEQ ID NO: 781213 - RNA, 22 nt, Human
aggaugugaguggacacagucc

SEQ ID NO: 781214 - RNA, 19 nt, Human
acugagaaccugacccagg

SEQ ID NO: 781215 - RNA, 22 nt, Human
ucauugaauuugguucaauaug

SEQ ID NO: 781216 - RNA, 22 nt, Human
uccuggcuccagcagcucuucc

SEQ ID NO: 781217 - RNA, 20 nt, Human
uggcuggcuuguauuuccuu

SEQ ID NO: 781218 - RNA, 22 nt, Human
uggaauuuaguuaauuccauuu

SEQ ID NO: 781219 - RNA, 22 nt, Human
ccugaggcuccaccuccagaga

SEQ ID NO: 781220 - RNA, 22 nt, Human
gucuccugagacugcagucacc

SEQ ID NO: 781221 - RNA, 22 nt, Human
gcugcucugaaaaugacuguug

SEQ ID NO: 781222 - RNA, 22 nt, Human
auuacaauaauacaugcucauu

SEQ ID NO: 781223 - RNA, 22 nt, Human
cacagaugagcugaauagcuuu

SEQ ID NO: 781224 - RNA, 22 nt, Human
uuuccucugaugcugacuugga

SEQ ID NO: 781225 - RNA, 22 nt, Human
acaaacuaccuacagauguuca

SEQ ID NO: 781226 - RNA, 22 nt, Human
ccaggccuguguuguguggagg

SEQ ID NO: 781227 - RNA, 19 nt, Human
ugucucagugucccuuccu

SEQ ID NO: 781228 - RNA, 22 nt, Human
ggcuucaccugugcacucuacc

SEQ ID NO: 781229 - RNA, 22 nt, Human
caugaauauacauccugauggc

SEQ ID NO: 781230 - RNA, 22 nt, Human
uggcagcuugaaugcagucuuu

SEQ ID NO: 781231 - RNA, 22 nt, Human
aagucacaagcauauaugcauu

SEQ ID NO: 781232 - RNA, 22 nt, Human
uccucugcuccaucuuuacugu

SEQ ID NO: 781233 - RNA, 22 nt, Human
aaggcucuugaguggugauagu

SEQ ID NO: 781234 - RNA, 22 nt, Human
aggacccugagcgggcaugccg

SEQ ID NO: 781235 - RNA, 22 nt, Human
uguaaaccagggucauccuuag

SEQ ID NO: 781236 - RNA, 21 nt, Human
aguuacaaguuuauucagagg

SEQ ID NO: 781237 - RNA, 22 nt, Human
cuguuauuuuccucugaacucu

SEQ ID NO: 781238 - RNA, 22 nt, Human
gcugccuuuuaaagccucgcuu

SEQ ID NO: 781239 - RNA, 22 nt, Human
acucagagaauaucuagaagga

SEQ ID NO: 781240 - RNA, 22 nt, Human
aggccacaaccacccugugccc

SEQ ID NO: 781241 - RNA, 22 nt, Human
gcgugggcuggacugggaugaa

SEQ ID NO: 781242 - RNA, 22 nt, Human
cuuucugaaagacauuuuaacu

SEQ ID NO: 781243 - RNA, 21 nt, Human
acagauuuuauaucucugcug

SEQ ID NO: 781244 - RNA, 22 nt, Human
uagaucugauacaauucaucug

SEQ ID NO: 781245 - RNA, 22 nt, Human
ugggacuuguguggcaguauuu

SEQ ID NO: 781246 - RNA, 22 nt, Human
ccaaagcaagucacaugaucaa

SEQ ID NO: 781247 - RNA, 22 nt, Human
caggaaugauauucgaggagau

SEQ ID NO: 781248 - RNA, 22 nt, Human
cuccuuccugguuagcaccuua

SEQ ID NO: 781249 - RNA, 22 nt, Human
agcucccugcacgacccugccc

SEQ ID NO: 781250 - RNA, 22 nt, Human
cugcuuccacacaagcaaagcu

SEQ ID NO: 781251 - RNA, 22 nt, Human
cagcagccuggagggggccacg

SEQ ID NO: 781252 - RNA, 22 nt, Human
cauccauagcuugaucuguucc

SEQ ID NO: 781253 - RNA, 22 nt, Human
caggaacaaggccuaugggacu

SEQ ID NO: 781254 - RNA, 22 nt, Human
ucagaacauuacauuuugagcu

SEQ ID NO: 781255 - RNA, 19 nt, Human
agcagguggguaagaaaau

SEQ ID NO: 781256 - RNA, 22 nt, Human
ugggaagaugauaauucacagu

SEQ ID NO: 781257 - RNA, 22 nt, Human
caacuucacugugccucuaguu

SEQ ID NO: 781258 - RNA, 22 nt, Human
gaaauagacacuuucuaugaau

SEQ ID NO: 781259 - RNA, 22 nt, Human
acaccuggucuuugcaugagca

SEQ ID NO: 781260 - RNA, 22 nt, Human
ucacaaacaaugcuuuggaauu

SEQ ID NO: 781261 - RNA, 22 nt, Human
cagagcuggagcuugaauggag

SEQ ID NO: 781262 - RNA, 22 nt, Human
agcaccagcgugggggccguug

SEQ ID NO: 781263 - RNA, 22 nt, Human
ucagccagcauuaccccugacu

SEQ ID NO: 781264 - RNA, 22 nt, Human
aaguucaagagugacauauuag

SEQ ID NO: 781265 - RNA, 22 nt, Human
cuuuggaugacuggugcagguu

SEQ ID NO: 781266 - RNA, 22 nt, Human
acucugaagaagacuuccagac

SEQ ID NO: 781267 - RNA, 22 nt, Human
cucaggcuugggaggaggccca

SEQ ID NO: 781268 - RNA, 21 nt, Human
cccgcacagcgguaggccgcc

SEQ ID NO: 781269 - RNA, 22 nt, Human
gcacacaggggaguucucagaa

SEQ ID NO: 781270 - RNA, 22 nt, Human
caggccacagcuaaagaggauu

SEQ ID NO: 781271 - RNA, 22 nt, Human
guaggcagugguuggaagagaa

SEQ ID NO: 781272 - RNA, 22 nt, Human
uguucacaucgauggauuuugc

SEQ ID NO: 781273 - RNA, 22 nt, Human
gcuuccugagacaacauugagu

SEQ ID NO: 781274 - RNA, 22 nt, Human
ugcuuccaauucaaaucugugg

SEQ ID NO: 781275 - RNA, 22 nt, Human
agggcucaucugagacugacau

SEQ ID NO: 781276 - RNA, 22 nt, Human
cuggcagcugcccgagaugccc

SEQ ID NO: 781277 - RNA, 22 nt, Human
aggggcacuucucaggcugugg

SEQ ID NO: 781278 - RNA, 22 nt, Human
cucucucuucuuuguaggggcc

SEQ ID NO: 781279 - RNA, 22 nt, Human
caaguguccaugauagucuuag

SEQ ID NO: 781280 - RNA, 19 nt, Human
auuugaaagcugugcuugc

SEQ ID NO: 781281 - RNA, 22 nt, Human
augaaacaugcuuuguggauga

SEQ ID NO: 781282 - RNA, 22 nt, Human
aacauuaagauggcggaacagu

SEQ ID NO: 781283 - RNA, 22 nt, Human
uagagugguuaacaguuuagaa

SEQ ID NO: 781284 - RNA, 22 nt, Human
acugcugcagguccagccccuu

SEQ ID NO: 781285 - RNA, 22 nt, Human
aaagauacuuaauaguugucug

SEQ ID NO: 781286 - RNA, 22 nt, Human
ccaagaggcagaaugcagagaa

SEQ ID NO: 781287 - RNA, 22 nt, Human
uccugggaacucggaaagcucu

SEQ ID NO: 781288 - RNA, 22 nt, Human
uuacagauacuuuguaggcaag

SEQ ID NO: 781289 - RNA, 22 nt, Human
ggcuggcagugugagagaggga

SEQ ID NO: 781290 - RNA, 22 nt, Human
uaagaacauuuucggaaagaua

SEQ ID NO: 781291 - RNA, 22 nt, Human
uagcuucuauacaacuucagca

SEQ ID NO: 781292 - RNA, 22 nt, Human
uuauaaagguuugugcauauuu

SEQ ID NO: 781293 - RNA, 22 nt, Human
cuggcccugccagagaucaaca

SEQ ID NO: 781294 - RNA, 22 nt, Human
gcagauggcgcaguggaaguuc

SEQ ID NO: 781295 - RNA, 22 nt, Human
uccugagauaaaucucauguga

SEQ ID NO: 781296 - RNA, 22 nt, Human
acauggcucagucucaugacag

SEQ ID NO: 781297 - RNA, 22 nt, Human
agagaauuaauuaggagcacug

SEQ ID NO: 781298 - RNA, 22 nt, Human
uuggcugaagguuaagugcugg

SEQ ID NO: 781299 - RNA, 21 nt, Human
ccccagcaccuugccagccug

SEQ ID NO: 781300 - RNA, 22 nt, Human
ccagcugucagugugaaaauaa

SEQ ID NO: 781301 - RNA, 22 nt, Human
cuggugcuggagccuagucccu

SEQ ID NO: 781302 - RNA, 22 nt, Human
uggggugguaauacaccguucu

SEQ ID NO: 781303 - RNA, 22 nt, Human
uggccucugaggcaccuuugcc

SEQ ID NO: 781304 - RNA, 22 nt, Human
gacagcagcauguuuacaggcc

SEQ ID NO: 781305 - RNA, 22 nt, Human
cacauuccccagagcuggggcu

SEQ ID NO: 781306 - RNA, 22 nt, Human
ugcuaauguccugaccguucug

SEQ ID NO: 781307 - RNA, 22 nt, Human
cagcaugaugcucacacaaaac

SEQ ID NO: 781308 - RNA, 22 nt, Human
aagucacacuagacaacugagg

SEQ ID NO: 781309 - RNA, 22 nt, Human
acaugcaugucuaugggcaggu

SEQ ID NO: 781310 - RNA, 22 nt, Human
agagcuauaacagcacuguaca

SEQ ID NO: 781311 - RNA, 22 nt, Human
ucagccccacggggucagccaa

SEQ ID NO: 781312 - RNA, 22 nt, Human
cccugcaggcucagacuggagu

SEQ ID NO: 781313 - RNA, 22 nt, Human
accuggccauccagcuggcauc

SEQ ID NO: 781314 - RNA, 22 nt, Human
uagccuucucaagacaaaguug

SEQ ID NO: 781315 - RNA, 23 nt, Human
uccagggcaguggcugggucugc

SEQ ID NO: 781316 - RNA, 22 nt, Human
aagagcuggauugugcugcaga

SEQ ID NO: 781317 - RNA, 21 nt, Human
ggugacacguggccccgcucu

SEQ ID NO: 781318 - RNA, 22 nt, Human
gaggcacaauacaugucucaag

SEQ ID NO: 781319 - RNA, 20 nt, Human
auucaugucuuuauaaaagc

SEQ ID NO: 781320 - RNA, 22 nt, Human
guguuaaauuucuaauuuguga

SEQ ID NO: 781321 - RNA, 22 nt, Human
agaguuuggugaagcaauuuga

SEQ ID NO: 781322 - RNA, 22 nt, Human
uuagagaauuccaaaugacuac

SEQ ID NO: 781323 - RNA, 22 nt, Human
uccugaaaauaauuucacaaga

SEQ ID NO: 781324 - RNA, 22 nt, Human
gagggaugugccugaaggcagg

SEQ ID NO: 781325 - RNA, 22 nt, Human
gucuggaagggagugcauuuuc

SEQ ID NO: 781326 - RNA, 22 nt, Human
uccccaguaagccugcacugug

SEQ ID NO: 781327 - RNA, 22 nt, Human
uagguucagagaacugaaaaua

SEQ ID NO: 781328 - RNA, 22 nt, Human
auuacuuucagaugugcuguaa

SEQ ID NO: 781329 - RNA, 22 nt, Human
ucagugugaauucauuuuagau

SEQ ID NO: 781330 - RNA, 22 nt, Human
cucaagucuauugauaagugca

SEQ ID NO: 781331 - RNA, 20 nt, Human
acauagaucagugauugaca

SEQ ID NO: 781332 - RNA, 22 nt, Human
ccccacuugcucagcaugucca

SEQ ID NO: 781333 - RNA, 22 nt, Human
ugagggaggcccuuugagcaga

SEQ ID NO: 781334 - RNA, 22 nt, Human
agcuggaauccuacuucuaaca

SEQ ID NO: 781335 - RNA, 22 nt, Human
gugagacacgugugugaccugg

SEQ ID NO: 781336 - RNA, 22 nt, Human
aagagcuggcucuugcagcagc

SEQ ID NO: 781337 - RNA, 22 nt, Human
gacuucaaagcgugauaaagau

SEQ ID NO: 781338 - RNA, 22 nt, Human
cagcuggcugcggugaggggac

SEQ ID NO: 781339 - RNA, 22 nt, Human
cacagccuuacugagauccacu

SEQ ID NO: 781340 - RNA, 22 nt, Human
cuguggcuguauuuggccagag

SEQ ID NO: 781341 - RNA, 22 nt, Human
gcuucucucucagacugcaagc

SEQ ID NO: 781342 - RNA, 22 nt, Human
cugaggaugguguggucuucuc

SEQ ID NO: 781343 - RNA, 22 nt, Human
uuuccauauuuggucuuuggga

SEQ ID NO: 781344 - RNA, 22 nt, Human
gugggccagcuuuucuccuggg

SEQ ID NO: 781345 - RNA, 22 nt, Human
augcaacaaauugugugcaaua

SEQ ID NO: 781346 - RNA, 23 nt, Human
agcuccuuugaaaguauguuuuu

SEQ ID NO: 781347 - RNA, 22 nt, Human
ccagcacugcucucagacugag

SEQ ID NO: 781348 - RNA, 22 nt, Human
acagaugagaaggcugaccagu

SEQ ID NO: 781349 - RNA, 22 nt, Human
uagucauucuccuuacaaagcc

SEQ ID NO: 781350 - RNA, 22 nt, Human
cuuuuguucuacagcuggggaa

SEQ ID NO: 781351 - RNA, 22 nt, Human
agaucauaugaaaaauuucaag

SEQ ID NO: 781352 - RNA, 22 nt, Human
gcacugagucugucaugcugca

SEQ ID NO: 781353 - RNA, 22 nt, Human
auggacucacuaauuccuccac

SEQ ID NO: 781354 - RNA, 22 nt, Human
guucuucacauuucauugagga

SEQ ID NO: 781355 - RNA, 22 nt, Human
gugcuguaucagaaucugcucu

SEQ ID NO: 781356 - RNA, 22 nt, Human
acagucuggaggcugcuucauu

SEQ ID NO: 781357 - RNA, 22 nt, Human
ugggugugagcccgggagccgc

SEQ ID NO: 781358 - RNA, 22 nt, Human
ggcugcucacgcagcccucccu

SEQ ID NO: 781359 - RNA, 22 nt, Human
caucauugaacacuucuuccug

SEQ ID NO: 781360 - RNA, 22 nt, Human
cagccacuguggucuagcugca

SEQ ID NO: 781361 - RNA, 22 nt, Human
ugagauaacuauucugucaacu

SEQ ID NO: 781362 - RNA, 22 nt, Human
cauuuaauccucacaagccuau

SEQ ID NO: 781363 - RNA, 22 nt, Human
uguaaaagguuguucuuucguu

SEQ ID NO: 781364 - RNA, 22 nt, Human
agugugugccuuuggauaccug

SEQ ID NO: 781365 - RNA, 22 nt, Human
uucagagcaucucuaaagccag

SEQ ID NO: 781366 - RNA, 22 nt, Human
uugaacuaauagguaucuugua

SEQ ID NO: 781367 - RNA, 21 nt, Human
acccuggguucuccauacccu

SEQ ID NO: 781368 - RNA, 22 nt, Human
aaaccucuucucaagauuucug

SEQ ID NO: 781369 - RNA, 22 nt, Human
agcagcauagaagcugggagga

SEQ ID NO: 781370 - RNA, 22 nt, Human
aggcacaggaaugucauccagu

SEQ ID NO: 781371 - RNA, 22 nt, Human
aggguggcuggaggaaucagaa

SEQ ID NO: 781372 - RNA, 17 nt, Human
uuccaaggagcauuuga

SEQ ID NO: 781373 - RNA, 22 nt, Human
gcugagagaaaagugagguucu

SEQ ID NO: 781374 - RNA, 22 nt, Human
gcccagcagaucucagugucuc

SEQ ID NO: 781375 - RNA, 22 nt, Human
ugguuucucugaacucuacgac

SEQ ID NO: 781376 - RNA, 22 nt, Human
gugugcgcgcucauaggugugu

SEQ ID NO: 781377 - RNA, 22 nt, Human
uuucaguuaaguggcuaguccc

SEQ ID NO: 781378 - RNA, 21 nt, Human
uuuagggaccaggucauaggc

SEQ ID NO: 781379 - RNA, 22 nt, Human
ggcuucucucuucacauggcuu

SEQ ID NO: 781380 - RNA, 22 nt, Human
ccuucucuacuccugaugcaug

SEQ ID NO: 781381 - RNA, 22 nt, Human
gcuuuagaaaugaguaaauuag

SEQ ID NO: 781382 - RNA, 22 nt, Human
uaugaacuuuaagcucuguguc

SEQ ID NO: 781383 - RNA, 22 nt, Human
agggacaucucacaaacaacuu

SEQ ID NO: 781384 - RNA, 21 nt, Human
uggaaaacauuuaaauagcaa

SEQ ID NO: 781385 - RNA, 22 nt, Human
agaagcacagguaaagugauuu

SEQ ID NO: 781386 - RNA, 21 nt, Human
acagcauguuuguguguuugc

SEQ ID NO: 781387 - RNA, 22 nt, Human
cacacugauaggcuugacaggc

SEQ ID NO: 781388 - RNA, 22 nt, Human
uccuggcccacuccuagcuucu

SEQ ID NO: 781389 - RNA, 22 nt, Human
uuguggggaggauuugaugaga

SEQ ID NO: 781390 - RNA, 22 nt, Human
gugcucuguggauugaguugaa

SEQ ID NO: 781391 - RNA, 22 nt, Human
ucaggaguugaaggggauccug

SEQ ID NO: 781392 - RNA, 22 nt, Human
acuuccagugucugcugcuagc

SEQ ID NO: 781393 - RNA, 22 nt, Human
accaggaguuuugaccaggggc

SEQ ID NO: 781394 - RNA, 22 nt, Human
uuccugggauuauugucaagca

SEQ ID NO: 781395 - RNA, 17 nt, Human
gggugggcacugcuggc

SEQ ID NO: 781396 - RNA, 22 nt, Human
accaucuuuuccucugccuccu

SEQ ID NO: 781397 - RNA, 17 nt, Human
gcaaggccuguuuguuc

SEQ ID NO: 781398 - RNA, 22 nt, Human
aguuuaacuuuguaaacgugag

SEQ ID NO: 781399 - RNA, 22 nt, Human
cugcaugucacucugcuguccc

SEQ ID NO: 781400 - RNA, 19 nt, Human
gggcuuggggcugaagccu

SEQ ID NO: 781401 - RNA, 22 nt, Human
cauacaaucaaguucuuuauua

SEQ ID NO: 781402 - RNA, 23 nt, Human
gagagcccauuggcagggguacc

SEQ ID NO: 781403 - RNA, 22 nt, Human
uuucuaggacaugauaggauau

SEQ ID NO: 781404 - RNA, 22 nt, Human
ccagggcccacggccagaauag

SEQ ID NO: 781405 - RNA, 19 nt, Human
acaagucacuuacuuagua

SEQ ID NO: 781406 - RNA, 22 nt, Human
agcuguggaguaggggguugga

SEQ ID NO: 781407 - RNA, 22 nt, Human
auacacauguuauuguggaagc

SEQ ID NO: 781408 - RNA, 22 nt, Human
uuuauauuucccaggauuggcc

SEQ ID NO: 781409 - RNA, 22 nt, Human
cucccucugaggcuuugagccu

SEQ ID NO: 781410 - RNA, 22 nt, Human
gagcacagauugauuuaaaaua

SEQ ID NO: 781411 - RNA, 22 nt, Human
acaguguucuuggcgcugagug

SEQ ID NO: 781412 - RNA, 22 nt, Human
acuuugaaauguguaagagaga

SEQ ID NO: 781413 - RNA, 22 nt, Human
cagcacaguguuagguaauuug

SEQ ID NO: 781414 - RNA, 22 nt, Human
ucaugcugugaacuguauacau

SEQ ID NO: 781415 - RNA, 22 nt, Human
cugggcugugguguggcccaaa

SEQ ID NO: 781416 - RNA, 20 nt, Human
uggcuuguuucuaugggcag

SEQ ID NO: 781417 - RNA, 22 nt, Human
accaugggucagccaccucagc

SEQ ID NO: 781418 - RNA, 22 nt, Human
uaaguuugugucucuguuacuu

SEQ ID NO: 781419 - RNA, 22 nt, Human
agcuuguuagaaauguagacuc

SEQ ID NO: 781420 - RNA, 22 nt, Human
uuguaacucugaauacauccua

SEQ ID NO: 781421 - RNA, 19 nt, Human
ucuggagcugaugcaggug

SEQ ID NO: 781422 - RNA, 22 nt, Human
cuuaucuguaaaauggauacaa

SEQ ID NO: 781423 - RNA, 22 nt, Human
agucccagaucuacaggaggga

SEQ ID NO: 781424 - RNA, 22 nt, Human
uguuuacuuaaauguuuucaua

SEQ ID NO: 781425 - RNA, 22 nt, Human
uguguacaagccugaguacaga

SEQ ID NO: 781426 - RNA, 22 nt, Human
auaauuuaauuuucacaguggu

SEQ ID NO: 781427 - RNA, 22 nt, Human
gacaggaaauauggggguuguu

SEQ ID NO: 781428 - RNA, 22 nt, Human
ucagacccaggugccaagcugu

SEQ ID NO: 781429 - RNA, 22 nt, Human
aggcuucagggcuuuugagggu

SEQ ID NO: 781430 - RNA, 22 nt, Human
gguuucaaugagaagugcuugu

SEQ ID NO: 781431 - RNA, 22 nt, Human
uucuucuugaaacuuuagguug

SEQ ID NO: 781432 - RNA, 22 nt, Human
aaagcagcuguuugacuuucca

SEQ ID NO: 781433 - RNA, 22 nt, Human
guuaucaugcuucaucaucacu

SEQ ID NO: 781434 - RNA, 22 nt, Human
ugcaucuuuagucuuaugucug

SEQ ID NO: 781435 - RNA, 22 nt, Human
uuggaaaggagauucuauugug

SEQ ID NO: 781436 - RNA, 22 nt, Human
caggggccuguccuggcuucug

SEQ ID NO: 781437 - RNA, 22 nt, Human
cagcagcuccaaagaauagcca

SEQ ID NO: 781438 - RNA, 22 nt, Human
uugugcagagaaaucuuucuug

SEQ ID NO: 781439 - RNA, 22 nt, Human
uuucacagagaauauugccuug

SEQ ID NO: 781440 - RNA, 22 nt, Human
aggcucaggugccucauucaca

SEQ ID NO: 781441 - RNA, 22 nt, Human
aucugucuauguggcuauguau

SEQ ID NO: 781442 - RNA, 22 nt, Human
uccagagccccaauucaccucu

SEQ ID NO: 781443 - RNA, 22 nt, Human
gagaagggauauggcuucuuga

SEQ ID NO: 781444 - RNA, 22 nt, Human
ucacccagauuacauccuguca

SEQ ID NO: 781445 - RNA, 22 nt, Human
uuucugaagguuaaggaauuag

SEQ ID NO: 781446 - RNA, 22 nt, Human
augcagaugguggauggagaaa

SEQ ID NO: 781447 - RNA, 19 nt, Human
gccugccuggguuucugag

SEQ ID NO: 781448 - RNA, 22 nt, Human
aaacagcuccuuaguuuccauc

SEQ ID NO: 781449 - RNA, 21 nt, Human
ugucacauugucccugcugcu

SEQ ID NO: 781450 - RNA, 22 nt, Human
cguauuuagaaggcugcugaaa

SEQ ID NO: 781451 - RNA, 22 nt, Human
caaagaugucauugguaagaca

SEQ ID NO: 781452 - RNA, 19 nt, Human
ccauccauggggccagagg

SEQ ID NO: 781453 - RNA, 22 nt, Human
cuuucacaagauuugagaugcu

SEQ ID NO: 781454 - RNA, 22 nt, Human
uuauugacugaaaugagaguga

SEQ ID NO: 781455 - RNA, 22 nt, Human
aaagaaucguguguaguuugaa

SEQ ID NO: 781456 - RNA, 22 nt, Human
uuacacaguugguaggggcaga

SEQ ID NO: 781457 - RNA, 22 nt, Human
gcugagagcaguguggccuuaa

SEQ ID NO: 781458 - RNA, 22 nt, Human
guggcugguuuccugcaugcaa

SEQ ID NO: 781459 - RNA, 22 nt, Human
caggagaucuuaggaauucuua

SEQ ID NO: 781460 - RNA, 22 nt, Human
ucaugcaacggcucgcugagcc

SEQ ID NO: 781461 - RNA, 22 nt, Human
uggagccuguucugagaagccg

SEQ ID NO: 781462 - RNA, 22 nt, Human
ucugugcuggacugauuucaua

SEQ ID NO: 781463 - RNA, 22 nt, Human
caggaacacaaguucagggaug

SEQ ID NO: 781464 - RNA, 22 nt, Human
uguccaccguucagcaccagag

SEQ ID NO: 781465 - RNA, 22 nt, Human
agccagagcagggaauuggaca

SEQ ID NO: 781466 - RNA, 22 nt, Human
acaggaacuguuaucucagaug

SEQ ID NO: 781467 - RNA, 22 nt, Human
ggcuagggacuccuccucaggg

SEQ ID NO: 781468 - RNA, 22 nt, Human
ggcucaggaccugggauugcca

SEQ ID NO: 781469 - RNA, 18 nt, Human
ccuggagcuccacagcaa

SEQ ID NO: 781470 - RNA, 22 nt, Human
ucccagggcagcuguccagaag

SEQ ID NO: 781471 - RNA, 22 nt, Human
uguggcuguggaugcuuuccag

SEQ ID NO: 781472 - RNA, 22 nt, Human
aaucugucuucuuuugugguuu

SEQ ID NO: 781473 - RNA, 22 nt, Human
guguacugcaaaugcugcugcc

SEQ ID NO: 781474 - RNA, 22 nt, Human
gccaggaacacaaugccaagcu

SEQ ID NO: 781475 - RNA, 22 nt, Human
acugccuggccuggccucacug

SEQ ID NO: 781476 - RNA, 21 nt, Human
agcucccuguuuccucacucu

SEQ ID NO: 781477 - RNA, 22 nt, Human
gucauuucuguuucuucagugc

SEQ ID NO: 781478 - RNA, 22 nt, Human
gcagcaccaaccagggccuguu

SEQ ID NO: 781479 - RNA, 22 nt, Human
uacugcaugggugcaugcugcu

SEQ ID NO: 781480 - RNA, 22 nt, Human
uggcccugcuggccaaaggcua

SEQ ID NO: 781481 - RNA, 23 nt, Human
uccuccugagugagagugccagc

SEQ ID NO: 781482 - RNA, 22 nt, Human
aaagcaugcuacuuuauauagg

SEQ ID NO: 781483 - RNA, 18 nt, Human
cucauguguggucccagc

SEQ ID NO: 781484 - RNA, 22 nt, Human
aggagcugaaacuucucauaug

SEQ ID NO: 781485 - RNA, 22 nt, Human
uucaaaaagguauguucaaguc

SEQ ID NO: 781486 - RNA, 16 nt, Human
uggcagagguucagcc

SEQ ID NO: 781487 - RNA, 22 nt, Human
gcagggcucugcuguaguccua

SEQ ID NO: 781488 - RNA, 22 nt, Human
gguuaaacacuuuggaaguggc

SEQ ID NO: 781489 - RNA, 22 nt, Human
acaggcacaacugaguagacuc

SEQ ID NO: 781490 - RNA, 22 nt, Human
caucacuguccucagcauucca

SEQ ID NO: 781491 - RNA, 22 nt, Human
aucuugaaauacuuucuagaau

SEQ ID NO: 781492 - RNA, 22 nt, Human
ucagcuuggacagcuugguuga

SEQ ID NO: 781493 - RNA, 22 nt, Human
aaugucauagcaaagagaguga

SEQ ID NO: 781494 - RNA, 22 nt, Human
cugcccugggugcuggggaucc

SEQ ID NO: 781495 - RNA, 21 nt, Human
gagacagcccagugccagggc

SEQ ID NO: 781496 - RNA, 22 nt, Human
cucucagaaguuuaugucagaa

SEQ ID NO: 781497 - RNA, 22 nt, Human
cagcccuugcgacacccuggcu

SEQ ID NO: 781498 - RNA, 22 nt, Human
ugaaacaaugugaaguugcuga

SEQ ID NO: 781499 - RNA, 22 nt, Human
aagugcauaguaauggagucaa

SEQ ID NO: 781500 - RNA, 22 nt, Human
uaggcacuggggaggcagcaug

SEQ ID NO: 781501 - RNA, 22 nt, Human
gcccuguggacccaggaacucu

SEQ ID NO: 781502 - RNA, 22 nt, Human
cacauuucugugagucaauauu

SEQ ID NO: 781503 - RNA, 22 nt, Human
acaguguugaggugcuuguuuc

SEQ ID NO: 781504 - RNA, 22 nt, Human
cuguaguugaugauuucugaua

SEQ ID NO: 781505 - RNA, 22 nt, Human
aaugcuaucggcucuaagcaug

SEQ ID NO: 781506 - RNA, 22 nt, Human
aaguucaagaucaagguuccag

SEQ ID NO: 781507 - RNA, 22 nt, Human
guucacaguucagccuguaaca

SEQ ID NO: 781508 - RNA, 22 nt, Human
ucagacagugugaucagucucu

SEQ ID NO: 781509 - RNA, 22 nt, Human
ugagccagguuuuccaucauuc

SEQ ID NO: 781510 - RNA, 22 nt, Human
aagcugccugccacgcuagaua

SEQ ID NO: 781511 - RNA, 22 nt, Human
gggggcaguaaggauauggaaa

SEQ ID NO: 781512 - RNA, 22 nt, Human
caaugucaaggagaccaaaacg

SEQ ID NO: 781513 - RNA, 22 nt, Human
gaggagagagggacugucugca

SEQ ID NO: 781514 - RNA, 22 nt, Human
cucagggcuggaaagccaggaa

SEQ ID NO: 781515 - RNA, 19 nt, Human
cagaacaggaccaggggcc

SEQ ID NO: 781516 - RNA, 22 nt, Human
cuuuacuguucuucugugggaa

SEQ ID NO: 781517 - RNA, 22 nt, Human
cuggagagaauguucauugcag

SEQ ID NO: 781518 - RNA, 22 nt, Human
ggacaggcccucuggucagcuu

SEQ ID NO: 781519 - RNA, 22 nt, Human
uaaaggcaaacucuccaaggau

SEQ ID NO: 781520 - RNA, 22 nt, Human
ggcccagagcucccuggcaccu

SEQ ID NO: 781521 - RNA, 22 nt, Human
aggguccugggugcaguugcuu

SEQ ID NO: 781522 - RNA, 22 nt, Human
uucagcagugcagacacccagu

SEQ ID NO: 781523 - RNA, 22 nt, Human
aguguguguuugggcgguuuau

SEQ ID NO: 781524 - RNA, 22 nt, Human
cugugcuugcggguguggagcc

SEQ ID NO: 781525 - RNA, 22 nt, Human
ugagccagccucagaagucacg

SEQ ID NO: 781526 - RNA, 22 nt, Human
auuaagacuauugauauuuaca

SEQ ID NO: 781527 - RNA, 22 nt, Human
aaagauugaucaugaauugaca

SEQ ID NO: 781528 - RNA, 22 nt, Human
gcuauucauggagcauguacug

SEQ ID NO: 781529 - RNA, 22 nt, Human
ucacagaaaucuguuuuuucua

SEQ ID NO: 781530 - RNA, 22 nt, Human
cagcuauucucugaaaugaaua

SEQ ID NO: 781531 - RNA, 22 nt, Human
aaagacuacacgggaaagagcu

SEQ ID NO: 781532 - RNA, 22 nt, Human
uccaggcuccugacuuuuuggg

SEQ ID NO: 781533 - RNA, 22 nt, Human
uggcagguuaacuuacaacugu

SEQ ID NO: 781534 - RNA, 22 nt, Human
uagaaaugaauguuuaaaaguc

SEQ ID NO: 781535 - RNA, 22 nt, Human
agaggucuuuuggucugcagaa

SEQ ID NO: 781536 - RNA, 22 nt, Human
guguuauuugagugggagcgug

SEQ ID NO: 781537 - RNA, 22 nt, Human
uaagacacaaauaucuuuuaca

SEQ ID NO: 781538 - RNA, 22 nt, Human
uugcuauaaauggucuaucuuu

SEQ ID NO: 781539 - RNA, 22 nt, Human
gcauugauuuaaacaucucucu

SEQ ID NO: 781540 - RNA, 23 nt, Human
agcaaugcugggagacucuguaa

SEQ ID NO: 781541 - RNA, 22 nt, Human
gcagggcuuagaaaugguggcu

SEQ ID NO: 781542 - RNA, 22 nt, Human
uucccacacuccauauaauuca

SEQ ID NO: 781543 - RNA, 22 nt, Human
ccuggccaggcauggagucaca

SEQ ID NO: 781544 - RNA, 22 nt, Human
augcauauggcuugagggaaua

SEQ ID NO: 781545 - RNA, 22 nt, Human
aggguccuaagccucagauaag

SEQ ID NO: 781546 - RNA, 22 nt, Human
aauguguguauuucuaggcgag

SEQ ID NO: 781547 - RNA, 22 nt, Human
ugagagcagaggugggcagccu

SEQ ID NO: 781548 - RNA, 22 nt, Human
aucuacauguugauuuaaagaa

SEQ ID NO: 781549 - RNA, 22 nt, Human
acagccaggcccagcacgcagg

SEQ ID NO: 781550 - RNA, 22 nt, Human
uucacuauaaaguuucaacuuu

SEQ ID NO: 781551 - RNA, 22 nt, Human
guaacauuuugagcaguaggcu

SEQ ID NO: 781552 - RNA, 22 nt, Human
caaagugccuguaccacuuugc

SEQ ID NO: 781553 - RNA, 20 nt, Human
uggcuccucuuggcuguggc

SEQ ID NO: 781554 - RNA, 22 nt, Human
agcuggccucacugcagaaugc

SEQ ID NO: 781555 - RNA, 22 nt, Human
ucuguucuaagcauucuaugug

SEQ ID NO: 781556 - RNA, 22 nt, Human
ucucagaaaagagcuucagaaa

SEQ ID NO: 781557 - RNA, 22 nt, Human
cagaaagcccuauguacagugg

SEQ ID NO: 781558 - RNA, 22 nt, Human
ggagcucugugucucuccugcc

SEQ ID NO: 781559 - RNA, 22 nt, Human
gagguagguguaggaggccugc

SEQ ID NO: 781560 - RNA, 22 nt, Human
gauuacaaaacucaucuaugac

SEQ ID NO: 781561 - RNA, 22 nt, Human
gcugcugggguggagaaacgcu

SEQ ID NO: 781562 - RNA, 22 nt, Human
uagcuggucuuuaagcauguaa

SEQ ID NO: 781563 - RNA, 18 nt, Human
aggugcccuccuuacacu

SEQ ID NO: 781564 - RNA, 18 nt, Human
uugcuuuguaagcuugca

SEQ ID NO: 781565 - RNA, 21 nt, Human
agcagaggcugccuggugacu

SEQ ID NO: 781566 - RNA, 22 nt, Human
uaacacauauuugcaguaagca

SEQ ID NO: 781567 - RNA, 22 nt, Human
ggccuuggccuagcccuccagg

SEQ ID NO: 781568 - RNA, 22 nt, Human
acagcaggaagcuggagggaaa

SEQ ID NO: 781569 - RNA, 20 nt, Human
aggucugaaugucagggcug

SEQ ID NO: 781570 - RNA, 22 nt, Human
uagcagagagguuucagcuaau

SEQ ID NO: 781571 - RNA, 22 nt, Human
caguaguggggagcccaguguc

SEQ ID NO: 781572 - RNA, 22 nt, Human
agaccugcagggccaggccugc

SEQ ID NO: 781573 - RNA, 22 nt, Human
gaucaauucaaacuauuuuccu

SEQ ID NO: 781574 - RNA, 22 nt, Human
ucugcagagauucugggcugag

SEQ ID NO: 781575 - RNA, 22 nt, Human
ucugccuuguugcaggcgcuau

SEQ ID NO: 781576 - RNA, 22 nt, Human
caacacagggguuaugccaugg

SEQ ID NO: 781577 - RNA, 22 nt, Human
aggcugugaguuuugucucaga

SEQ ID NO: 781578 - RNA, 22 nt, Human
agggugugcuguugggucuuuc

SEQ ID NO: 781579 - RNA, 22 nt, Human
gcacagcagccgaaaugcccuu

SEQ ID NO: 781580 - RNA, 22 nt, Human
cuuggacccacucccagaauug

SEQ ID NO: 781581 - RNA, 23 nt, Human
ggacacaggccuugucugcgccu

SEQ ID NO: 781582 - RNA, 22 nt, Human
ccagcccucgguagucccauag

SEQ ID NO: 781583 - RNA, 22 nt, Human
ucagaacaauuccuuuauaaca

SEQ ID NO: 781584 - RNA, 22 nt, Human
gcucucugucguuaugcuucau

SEQ ID NO: 781585 - RNA, 22 nt, Human
uccugagguuuuaaaacuauuc

SEQ ID NO: 781586 - RNA, 22 nt, Human
cucugaggcuuguucuauguau

SEQ ID NO: 781587 - RNA, 22 nt, Human
ccagggaagucacauugucuag

SEQ ID NO: 781588 - RNA, 22 nt, Human
caggaugagguagaggcagaua

SEQ ID NO: 781589 - RNA, 22 nt, Human
agccucagggcucugcgcagac

SEQ ID NO: 781590 - RNA, 22 nt, Human
gacaggcugugauggccgggag

SEQ ID NO: 781591 - RNA, 22 nt, Human
ccucuaaauuguuugaaguugg

SEQ ID NO: 781592 - RNA, 22 nt, Human
cucagcuacuugggaagcuuag

SEQ ID NO: 781593 - RNA, 18 nt, Human
gauguaaaauaguagcuu

SEQ ID NO: 781594 - RNA, 22 nt, Human
cucuccucagaacaggcccucu

SEQ ID NO: 781595 - RNA, 22 nt, Human
uuuaccaucugccacagauaug

SEQ ID NO: 781596 - RNA, 22 nt, Human
aggaucugugagugcugcagac

SEQ ID NO: 781597 - RNA, 22 nt, Human
acuaaaaacuacugccaauagc

SEQ ID NO: 781598 - RNA, 22 nt, Human
gcagcacauauaaacaaagaga

SEQ ID NO: 781599 - RNA, 22 nt, Human
acagugagcgguagugauugcu

SEQ ID NO: 781600 - RNA, 22 nt, Human
ugcaggcucugguuuauagugc

SEQ ID NO: 781601 - RNA, 22 nt, Human
cuggcugcgucugcucugacag

SEQ ID NO: 781602 - RNA, 22 nt, Human
cugcugggucuaugcaagugga

SEQ ID NO: 781603 - RNA, 22 nt, Human
aggaaaaauaaggcagcagggc

SEQ ID NO: 781604 - RNA, 22 nt, Human
acugaauagaaaugcucauagg

SEQ ID NO: 781605 - RNA, 22 nt, Human
auuaaauacugcaggcuaagca

SEQ ID NO: 781606 - RNA, 22 nt, Human
aggugagaaaacgaggguugca

SEQ ID NO: 781607 - RNA, 22 nt, Human
ggagucaggagcaggcugggcu

SEQ ID NO: 781608 - RNA, 22 nt, Human
gcccagcagcugguggagaagg

SEQ ID NO: 781609 - RNA, 22 nt, Human
acugcacagaaccuuagaauau

SEQ ID NO: 781610 - RNA, 21 nt, Human
agcucacaguucuguccuguc

SEQ ID NO: 781611 - RNA, 22 nt, Human
agaagcacaccaguagacaggg

SEQ ID NO: 781612 - RNA, 22 nt, Human
cugggccucauccccagaguuu

SEQ ID NO: 781613 - RNA, 22 nt, Human
gagccugugagccccaacucca

SEQ ID NO: 781614 - RNA, 22 nt, Human
gcccuggccuccuggaacaggc

SEQ ID NO: 781615 - RNA, 22 nt, Human
caaugcauuauucucccacuuc

SEQ ID NO: 781616 - RNA, 22 nt, Human
ccagaaagauaggaaaucaagu

SEQ ID NO: 781617 - RNA, 22 nt, Human
ccagagggccuuuggaguuauc

SEQ ID NO: 781618 - RNA, 20 nt, Human
uggccuuggggagcucacac

SEQ ID NO: 781619 - RNA, 22 nt, Human
uauacagaaagaauucaagucu

SEQ ID NO: 781620 - RNA, 22 nt, Human
auaaaugauucagcaggaaaua

SEQ ID NO: 781621 - RNA, 22 nt, Human
agagagaacacccucggcaugg

SEQ ID NO: 781622 - RNA, 22 nt, Human
aaaaguacuauuuuaacaaagu

SEQ ID NO: 781623 - RNA, 22 nt, Human
aagauacauuuucuucagagaa

SEQ ID NO: 781624 - RNA, 22 nt, Human
gggaguggguuuggccuaggcc

SEQ ID NO: 781625 - RNA, 22 nt, Human
acagccagaagucaggguggga

SEQ ID NO: 781626 - RNA, 22 nt, Human
cagucuguuucugagaaacaga

SEQ ID NO: 781627 - RNA, 22 nt, Human
uuucauguuacaguguaaaagu

SEQ ID NO: 781628 - RNA, 22 nt, Human
agaagcuugaaggagcagugac

SEQ ID NO: 781629 - RNA, 22 nt, Human
acagacaguaaauaguguggcu

SEQ ID NO: 781630 - RNA, 22 nt, Human
uugagguccaggugugggcagg

SEQ ID NO: 781631 - RNA, 22 nt, Human
ccaggaaaauaccaagcuuuaa

SEQ ID NO: 781632 - RNA, 22 nt, Human
ucucuuuacuuucaccaauuug

SEQ ID NO: 781633 - RNA, 22 nt, Human
acagagggucugggcacaggac

SEQ ID NO: 781634 - RNA, 22 nt, Human
ugucucugaaauauguggcucc

SEQ ID NO: 781635 - RNA, 21 nt, Human
uguauacacacauauauguac

SEQ ID NO: 781636 - RNA, 19 nt, Human
ggcuaaugucuuugaaaua

SEQ ID NO: 781637 - RNA, 22 nt, Human
uaggaaaucagagaaagaggug

SEQ ID NO: 781638 - RNA, 22 nt, Human
uccugccuucauacugcuguau

SEQ ID NO: 781639 - RNA, 22 nt, Human
uccuuccugcaggccaaguccu

SEQ ID NO: 781640 - RNA, 22 nt, Human
ucugagagagggucagaugcua

SEQ ID NO: 781641 - RNA, 22 nt, Human
ccuccuagaggaaccccagggc

SEQ ID NO: 781642 - RNA, 22 nt, Human
aacugaacagaacucagagauu

SEQ ID NO: 781643 - RNA, 22 nt, Human
caggucuccagcucagggucca

SEQ ID NO: 781644 - RNA, 22 nt, Human
acaugcuaauugcaaagucuug

SEQ ID NO: 781645 - RNA, 22 nt, Human
caggcugcggucggcucugguc

SEQ ID NO: 781646 - RNA, 18 nt, Human
cucucuggucuggauccc

SEQ ID NO: 781647 - RNA, 22 nt, Human
cugugaacaauagcagcaucuu

SEQ ID NO: 781648 - RNA, 22 nt, Human
caggcagcugggucaccguccc

SEQ ID NO: 781649 - RNA, 22 nt, Human
auagcuucagaauugagauauc

SEQ ID NO: 781650 - RNA, 22 nt, Human
uucaacagacccuucuuucuuu

SEQ ID NO: 781651 - RNA, 20 nt, Human
ccuggccaaugagauaggaa

SEQ ID NO: 781652 - RNA, 22 nt, Human
ucauccaugaagagugacagaa

SEQ ID NO: 781653 - RNA, 22 nt, Human
ugauuaaauuaauuaagaugag

SEQ ID NO: 781654 - RNA, 22 nt, Human
gcacaaacugcaauuacuuuug

SEQ ID NO: 781655 - RNA, 21 nt, Human
aucugaaguuugagaggaaag

SEQ ID NO: 781656 - RNA, 22 nt, Human
aaauuacagaucaccaaugcau

SEQ ID NO: 781657 - RNA, 22 nt, Human
gccucuccgagccacugccucu

SEQ ID NO: 781658 - RNA, 22 nt, Human
auucagcaugcaauuagguaau

SEQ ID NO: 781659 - RNA, 22 nt, Human
uccaggagaaggccauccagcg

SEQ ID NO: 781660 - RNA, 22 nt, Human
uuucagacaucacauggguuug

SEQ ID NO: 781661 - RNA, 21 nt, Human
auccuauuucugaaaaccugc

SEQ ID NO: 781662 - RNA, 22 nt, Human
uuuccccagguagauagauaau

SEQ ID NO: 781663 - RNA, 22 nt, Human
uaguggagaguuguuuugugca

SEQ ID NO: 781664 - RNA, 22 nt, Human
uaacauuugcugucuccuaugu

SEQ ID NO: 781665 - RNA, 19 nt, Human
ccaggagcaguggugagcu

SEQ ID NO: 781666 - RNA, 22 nt, Human
aggcagcauuucugcuuaucca

SEQ ID NO: 781667 - RNA, 22 nt, Human
uuaguuaguggggcugucaguc

SEQ ID NO: 781668 - RNA, 21 nt, Human
uguuuaauacauauuugugga

SEQ ID NO: 781669 - RNA, 22 nt, Human
agcccaguugcuccacgcugca

SEQ ID NO: 781670 - RNA, 21 nt, Human
gaauggcucgcgcgccacacu

SEQ ID NO: 781671 - RNA, 22 nt, Human
ccagucugcagccccuggggac

SEQ ID NO: 781672 - RNA, 22 nt, Human
uaaaccagguaaagaagcucuc

SEQ ID NO: 781673 - RNA, 22 nt, Human
uauaggcuuuuguugcagaaca

SEQ ID NO: 781674 - RNA, 22 nt, Human
ggcucuggugugaagcagccuc

SEQ ID NO: 781675 - RNA, 22 nt, Human
acauauuuugaaagcuuucuaa

SEQ ID NO: 781676 - RNA, 20 nt, Human
cacugaagacuucuugcuca

SEQ ID NO: 781677 - RNA, 22 nt, Human
gugggcuggacccuccugcucc

SEQ ID NO: 781678 - RNA, 22 nt, Human
agaagccauagucugggaggca

SEQ ID NO: 781679 - RNA, 22 nt, Human
aaaguugugaaaccgaacaugu

SEQ ID NO: 781680 - RNA, 22 nt, Human
uuacuguagcuugacauauguc

SEQ ID NO: 781681 - RNA, 22 nt, Human
uauuuggagaugggaucuucaa

SEQ ID NO: 781682 - RNA, 22 nt, Human
agcuggaagugcauuucucacu

SEQ ID NO: 781683 - RNA, 22 nt, Human
cccagggagguagcaggagaaa

SEQ ID NO: 781684 - RNA, 22 nt, Human
ucucagagggaaacaugaguga

SEQ ID NO: 781685 - RNA, 22 nt, Human
cuggcuuuccuugucugcaucc

SEQ ID NO: 781686 - RNA, 22 nt, Human
ggugaaggcacaagagggcaag

SEQ ID NO: 781687 - RNA, 22 nt, Human
uuguggcugugcaccgcugccu

SEQ ID NO: 781688 - RNA, 22 nt, Human
uuugacagcagauaaaauaaaa

SEQ ID NO: 781689 - RNA, 22 nt, Human
acagucucuccacacugcaggg

SEQ ID NO: 781690 - RNA, 22 nt, Human
agaauguagucuuggagauuua

SEQ ID NO: 781691 - RNA, 22 nt, Human
ucugggucuuaguuuucuugau

SEQ ID NO: 781692 - RNA, 22 nt, Human
agaucaaaaacuuaauggcuuu

SEQ ID NO: 781693 - RNA, 22 nt, Human
gucuggaggggagauuuggguu

SEQ ID NO: 781694 - RNA, 22 nt, Human
aaaguucucuaugguguaaaaa

SEQ ID NO: 781695 - RNA, 22 nt, Human
gguuggaggugggaauagcuag

SEQ ID NO: 781696 - RNA, 22 nt, Human
cggccgcagcagugucggccca

SEQ ID NO: 781697 - RNA, 22 nt, Human
guucuuuaaguggagaaggaaa

SEQ ID NO: 781698 - RNA, 22 nt, Human
agauacaccggaaccugaggcu

SEQ ID NO: 781699 - RNA, 22 nt, Human
aucuucaucaaguucacagugg

SEQ ID NO: 781700 - RNA, 22 nt, Human
agaugcugggaggcugagugca

SEQ ID NO: 781701 - RNA, 22 nt, Human
ucugggaauacacacugauuua

SEQ ID NO: 781702 - RNA, 22 nt, Human
ugaaagcacucacuucugcucu

SEQ ID NO: 781703 - RNA, 22 nt, Human
cugaacuucucugagccucagu

SEQ ID NO: 781704 - RNA, 23 nt, Human
agaaaguuugugccuugugacac

SEQ ID NO: 781705 - RNA, 22 nt, Human
agaaaaaucuuggcgcuugucu

SEQ ID NO: 781706 - RNA, 19 nt, Human
ccaguagagacagcugcag

SEQ ID NO: 781707 - RNA, 21 nt, Human
ccuggcuucagggugcacugg

SEQ ID NO: 781708 - RNA, 22 nt, Human
gaaaauaguucaucacaaugau

SEQ ID NO: 781709 - RNA, 22 nt, Human
ccaaguacagauuccuccacug

SEQ ID NO: 781710 - RNA, 22 nt, Human
ucagauuuaugaauauacuaug

SEQ ID NO: 781711 - RNA, 22 nt, Human
caguauuucauucagaauuguu

SEQ ID NO: 781712 - RNA, 22 nt, Human
uccucagcaaacacuucacucu

SEQ ID NO: 781713 - RNA, 22 nt, Human
ccaggccuuccaguacgcagaa

SEQ ID NO: 781714 - RNA, 22 nt, Human
uuuaacagguaaaguaaaugug

SEQ ID NO: 781715 - RNA, 22 nt, Human
cugcaccacagccugaggcagc

SEQ ID NO: 781716 - RNA, 22 nt, Human
uucugcucuuggcuuugcuggu

SEQ ID NO: 781717 - RNA, 22 nt, Human
cuggggccacaacggcgcacgc

SEQ ID NO: 781718 - RNA, 22 nt, Human
agcuccuggacgaacagggagu

SEQ ID NO: 781719 - RNA, 22 nt, Human
aucauuuugugacaaugccugu

SEQ ID NO: 781720 - RNA, 21 nt, Human
gcccagugauuucuucacagu

SEQ ID NO: 781721 - RNA, 22 nt, Human
uguagaugagucagggugcaug

SEQ ID NO: 781722 - RNA, 22 nt, Human
aucaguauccugcaguuucuau

SEQ ID NO: 781723 - RNA, 22 nt, Human
agcaagcauugcugguuagguc

SEQ ID NO: 781724 - RNA, 22 nt, Human
cagaugucauuucccaugcagc

SEQ ID NO: 781725 - RNA, 22 nt, Human
cagugcuauuuggacacaggga

SEQ ID NO: 781726 - RNA, 22 nt, Human
ugaaagcaugcuugccaagcuu

SEQ ID NO: 781727 - RNA, 22 nt, Human
uaggccacaaauaagauccugu

SEQ ID NO: 781728 - RNA, 22 nt, Human
agauacuaagcauuuccagcac

SEQ ID NO: 781729 - RNA, 22 nt, Human
auuuagacucucaccuccaccu

SEQ ID NO: 781730 - RNA, 22 nt, Human
aguguuuaucagacaagcccug

SEQ ID NO: 781731 - RNA, 22 nt, Human
cuguggcuuugugucuauugua

SEQ ID NO: 781732 - RNA, 19 nt, Human
ucacaugaagccuagagaa

SEQ ID NO: 781733 - RNA, 23 nt, Human
uggagaugccccacucccugucu

SEQ ID NO: 781734 - RNA, 22 nt, Human
aaguaacaaugcuguugaauug

SEQ ID NO: 781735 - RNA, 22 nt, Human
gcuuauuuucaccuucucucag

SEQ ID NO: 781736 - RNA, 22 nt, Human
cagcucugccacuuccuagcua

SEQ ID NO: 781737 - RNA, 22 nt, Human
acucugggcccacccucagagu

SEQ ID NO: 781738 - RNA, 22 nt, Human
cccugaggcaaaggcuagaguu

SEQ ID NO: 781739 - RNA, 22 nt, Human
auugacaauuagcccuuaggug

SEQ ID NO: 781740 - RNA, 22 nt, Human
acuuuagaaaaggaacagagga

SEQ ID NO: 781741 - RNA, 22 nt, Human
aggaaauguacaaaugaagaug

SEQ ID NO: 781742 - RNA, 22 nt, Human
aguuucucucaguauagaauag

SEQ ID NO: 781743 - RNA, 23 nt, Human
aucaccagcggaagcugcagacc

SEQ ID NO: 781744 - RNA, 22 nt, Human
aagaguggagaauaaaauagga

SEQ ID NO: 781745 - RNA, 22 nt, Human
agagguugggucugaggugaga

SEQ ID NO: 781746 - RNA, 22 nt, Human
auacacacauaugugaguuuug

SEQ ID NO: 781747 - RNA, 22 nt, Human
agcagcagaagguuugcaccca

SEQ ID NO: 781748 - RNA, 22 nt, Human
ucucuguagaccugaccagcac

SEQ ID NO: 781749 - RNA, 22 nt, Human
aagagucagcuucuguaugggu

SEQ ID NO: 781750 - RNA, 22 nt, Human
ugcauuggucuuaaucuucagg

SEQ ID NO: 781751 - RNA, 22 nt, Human
accuguuuuagucuuuaaucau

SEQ ID NO: 781752 - RNA, 22 nt, Human
gccagcccagcuccaggggaaa

SEQ ID NO: 781753 - RNA, 22 nt, Human
augcaguggcagcuccuggugu

SEQ ID NO: 781754 - RNA, 22 nt, Human
ccucccagugccuccagagcag

SEQ ID NO: 781755 - RNA, 22 nt, Human
ccaggaggaugguuguuaggug

SEQ ID NO: 781756 - RNA, 22 nt, Human
uucugaaaccuucaguaugaag

SEQ ID NO: 781757 - RNA, 22 nt, Human
uguaaugauguacuuagaagga

SEQ ID NO: 781758 - RNA, 22 nt, Human
uuuaucaguagcaaaguuuuaa

SEQ ID NO: 781759 - RNA, 22 nt, Human
gacaggcaccuugucugucuug

SEQ ID NO: 781760 - RNA, 22 nt, Human
guugaggaggcacucacuguca

SEQ ID NO: 781761 - RNA, 22 nt, Human
acacuuuaagcauuucacacug

SEQ ID NO: 781762 - RNA, 21 nt, Human
ugacuaauugugauaaagugc

SEQ ID NO: 781763 - RNA, 17 nt, Human
gcccacccuuaggagcu

SEQ ID NO: 781764 - RNA, 19 nt, Human
cucuggcuuccaaagcauc

SEQ ID NO: 781765 - RNA, 22 nt, Human
caacuuuucugugaauuuaagu

SEQ ID NO: 781766 - RNA, 22 nt, Human
ucacccaggcugguaugcagug

SEQ ID NO: 781767 - RNA, 22 nt, Human
uucagaauauccguuuaaguuu

SEQ ID NO: 781768 - RNA, 22 nt, Human
gcagaacauggaaagagaacua

SEQ ID NO: 781769 - RNA, 22 nt, Human
uagcuucuaauacuuaccaauu

SEQ ID NO: 781770 - RNA, 22 nt, Human
gaaggcauuuaggaacugcaau

SEQ ID NO: 781771 - RNA, 22 nt, Human
uuguggggcaacagcaggugaa

SEQ ID NO: 781772 - RNA, 22 nt, Human
ucugccugcuaacuccugcacc

SEQ ID NO: 781773 - RNA, 22 nt, Human
uggccagcccuucagccaugcc

SEQ ID NO: 781774 - RNA, 22 nt, Human
aagaaaugcagaaaugugcugg

SEQ ID NO: 781775 - RNA, 22 nt, Human
cgugagcaaaauggacacuccc

SEQ ID NO: 781776 - RNA, 22 nt, Human
aggcacuguggguguggccgga

SEQ ID NO: 781777 - RNA, 22 nt, Human
ggccuggcauggggacuaaggg

SEQ ID NO: 781778 - RNA, 22 nt, Human
ccuggagccccucuggccagcc

SEQ ID NO: 781779 - RNA, 22 nt, Human
aagauuuacuagcauaauagcu

SEQ ID NO: 781780 - RNA, 22 nt, Human
ucucaggcuguguguggaggac

SEQ ID NO: 781781 - RNA, 20 nt, Human
ccaggccugggccugcucua

SEQ ID NO: 781782 - RNA, 22 nt, Human
acuuccagcaccucaagcggaa

SEQ ID NO: 781783 - RNA, 22 nt, Human
ugcugggccaaagcaggguuuu

SEQ ID NO: 781784 - RNA, 22 nt, Human
ggcuuggaaauugcaggacaca

SEQ ID NO: 781785 - RNA, 22 nt, Human
aauucuauaggcaagcuauuuu

SEQ ID NO: 781786 - RNA, 22 nt, Human
gggagagguuacccgagcaacu

SEQ ID NO: 781787 - RNA, 22 nt, Human
gucaggucuuggaagauaggcu

SEQ ID NO: 781788 - RNA, 22 nt, Human
aagaugguuucuguagguuuau

SEQ ID NO: 781789 - RNA, 22 nt, Human
gcagggaccugccacugcuguc

SEQ ID NO: 781790 - RNA, 22 nt, Human
guggcuucaugaacacugauga

SEQ ID NO: 781791 - RNA, 22 nt, Human
aucagagugggucuggcaugag

SEQ ID NO: 781792 - RNA, 22 nt, Human
agaaaagggcaggagggauaca

SEQ ID NO: 781793 - RNA, 22 nt, Human
aucuuuaguagaggaauauauu

SEQ ID NO: 781794 - RNA, 22 nt, Human
guuuauacagugcaugguguua

SEQ ID NO: 781795 - RNA, 17 nt, Human
ugcauuguuggaaauuu

SEQ ID NO: 781796 - RNA, 22 nt, Human
gcccuggacagugacggugacc

SEQ ID NO: 781797 - RNA, 22 nt, Human
gaaucuaugccucauauagacc

SEQ ID NO: 781798 - RNA, 22 nt, Human
cuggggaaggcggugacugcgc

SEQ ID NO: 781799 - RNA, 22 nt, Human
uccugggcaaagaggggcagug

SEQ ID NO: 781800 - RNA, 22 nt, Human
ucacagagcacguaucaugccu

SEQ ID NO: 781801 - RNA, 22 nt, Human
cuaggcacuuguaaggccgcuc

SEQ ID NO: 781802 - RNA, 22 nt, Human
caaaggcaggugcugaauauuc

SEQ ID NO: 781803 - RNA, 22 nt, Human
ucagagaugcagugccaccuac

SEQ ID NO: 781804 - RNA, 22 nt, Human
augucuguuugcugagcccggc

SEQ ID NO: 781805 - RNA, 21 nt, Human
uccagcuccugccacuccuua

SEQ ID NO: 781806 - RNA, 22 nt, Human
uugucccugccccugcuugcuu

SEQ ID NO: 781807 - RNA, 22 nt, Human
gaggaaagaaccccagucaaua

SEQ ID NO: 781808 - RNA, 22 nt, Human
agggcucagcaucucauucugu

SEQ ID NO: 781809 - RNA, 22 nt, Human
uccuggacucaggaccacagga

SEQ ID NO: 781810 - RNA, 22 nt, Human
ucucagugacacucuucauaca

SEQ ID NO: 781811 - RNA, 22 nt, Human
cuuuucuuacucccgcaaggca

SEQ ID NO: 781812 - RNA, 22 nt, Human
ggcggguggcgaggcuucucgg

SEQ ID NO: 781813 - RNA, 22 nt, Human
gcaggcagccacgauucccuug

SEQ ID NO: 781814 - RNA, 22 nt, Human
gagcugagacacacuuuggcaa

SEQ ID NO: 781815 - RNA, 22 nt, Human
ggcuggaauguguggaugugau

SEQ ID NO: 781816 - RNA, 19 nt, Human
cugcuucaggcgccuugcc

SEQ ID NO: 781817 - RNA, 22 nt, Human
aauacaguaauuuugaugaguu

SEQ ID NO: 781818 - RNA, 22 nt, Human
uaugugugcauguauacauuaa

SEQ ID NO: 781819 - RNA, 22 nt, Human
uccaggagagguguggggacug

SEQ ID NO: 781820 - RNA, 22 nt, Human
acuuguuugaaucucucuagag

SEQ ID NO: 781821 - RNA, 22 nt, Human
gggcuggaagugcauugaugcu

SEQ ID NO: 781822 - RNA, 22 nt, Human
ugagaacugccuguauuuaucu

SEQ ID NO: 781823 - RNA, 22 nt, Human
auguggcuaguccaauuaauga

SEQ ID NO: 781824 - RNA, 22 nt, Human
ggcacugggcaccggcugaggg

SEQ ID NO: 781825 - RNA, 20 nt, Human
aaccugaggcaguguuccag

SEQ ID NO: 781826 - RNA, 22 nt, Human
aucaggaucacagaaacuuuua

SEQ ID NO: 781827 - RNA, 22 nt, Human
ccuaagaauuaaugaauacacc

SEQ ID NO: 781828 - RNA, 22 nt, Human
ccacagugguuguggcaugugg

SEQ ID NO: 781829 - RNA, 22 nt, Human
ucugggcuuuacacugugcuua

SEQ ID NO: 781830 - RNA, 22 nt, Human
cucaggaguaguucagcagcug

SEQ ID NO: 781831 - RNA, 22 nt, Human
uuccauccuaauaaaagaaguu

SEQ ID NO: 781832 - RNA, 22 nt, Human
aaacaugagcauuucuguuuaa

SEQ ID NO: 781833 - RNA, 22 nt, Human
uuccauccaugucccguuucug

SEQ ID NO: 781834 - RNA, 22 nt, Human
ucuggcugcugcgugagugcuu

SEQ ID NO: 781835 - RNA, 22 nt, Human
gagcauuuuugucugcauuuua

SEQ ID NO: 781836 - RNA, 22 nt, Human
guguauguucuacuuaauauua

SEQ ID NO: 781837 - RNA, 23 nt, Human
uugggcuggcucucgaugccucu

SEQ ID NO: 781838 - RNA, 22 nt, Human
uauucuugacugcuuacuaugu

SEQ ID NO: 781839 - RNA, 22 nt, Human
auuagcaauugcccugugcaau

SEQ ID NO: 781840 - RNA, 22 nt, Human
ugugugagacaauuggcugugg

SEQ ID NO: 781841 - RNA, 22 nt, Human
agcaaagcucaugacauuacag

SEQ ID NO: 781842 - RNA, 22 nt, Human
aggggcuccaaggaaguuuggg

SEQ ID NO: 781843 - RNA, 22 nt, Human
agcagccaaaugaagauuuuac

SEQ ID NO: 781844 - RNA, 22 nt, Human
uuuucuguauuauugugcuuca

SEQ ID NO: 781845 - RNA, 22 nt, Human
uauuaacauuuuaugaaaauaa

SEQ ID NO: 781846 - RNA, 22 nt, Human
agcuaccuggcuuaucacuguc

SEQ ID NO: 781847 - RNA, 22 nt, Human
uguuugcucugacuaucuugcg

SEQ ID NO: 781848 - RNA, 22 nt, Human
ccuccugguaauuagcgaaagg

SEQ ID NO: 781849 - RNA, 22 nt, Human
uauggcuucucagucaugaaaa

SEQ ID NO: 781850 - RNA, 22 nt, Human
aaaaugcaaaccuaccuacaua

SEQ ID NO: 781851 - RNA, 22 nt, Human
guccagccaggcugcagcaccc

SEQ ID NO: 781852 - RNA, 22 nt, Human
gacuucuccagacugccuggua

SEQ ID NO: 781853 - RNA, 22 nt, Human
ccauggcuuucuuucauuguaa

SEQ ID NO: 781854 - RNA, 23 nt, Human
cccaggagccugaguccucucug

SEQ ID NO: 781855 - RNA, 22 nt, Human
ggagauggcuggcagguagaug

SEQ ID NO: 781856 - RNA, 22 nt, Human
uagcacagggcauaugcggugg

SEQ ID NO: 781857 - RNA, 22 nt, Human
cucaggguaaugaaagacgaau

SEQ ID NO: 781858 - RNA, 22 nt, Human
cagaauuauaguugcuuuuuaa

SEQ ID NO: 781859 - RNA, 22 nt, Human
augcugugucuagcaggaacac

SEQ ID NO: 781860 - RNA, 22 nt, Human
aggcugaggcaagaggaucacu

SEQ ID NO: 781861 - RNA, 22 nt, Human
ugcuucuggcacuugagggggu

SEQ ID NO: 781862 - RNA, 22 nt, Human
aggccagcauucucucuccagg

SEQ ID NO: 781863 - RNA, 22 nt, Human
acuuugcaaauaaacucucuaa

SEQ ID NO: 781864 - RNA, 22 nt, Human
uacauucuggaaaggcacagac

SEQ ID NO: 781865 - RNA, 23 nt, Human
agccaggggaucuugggcccugg

SEQ ID NO: 781866 - RNA, 22 nt, Human
ugucugucuuuagugagauugc

SEQ ID NO: 781867 - RNA, 22 nt, Human
cucagagauauagucccugcuu

SEQ ID NO: 781868 - RNA, 22 nt, Human
caguuaaaaugugcuauaagaa

SEQ ID NO: 781869 - RNA, 22 nt, Human
augugaaauagcuggauaugaa

SEQ ID NO: 781870 - RNA, 22 nt, Human
acugggaggcaaagagcaagga

SEQ ID NO: 781871 - RNA, 22 nt, Human
caggggcucugggugaugugag

SEQ ID NO: 781872 - RNA, 22 nt, Human
agaaugugaagauuuugaauua

SEQ ID NO: 781873 - RNA, 22 nt, Human
ucugucacaaguaauccuuuuc

SEQ ID NO: 781874 - RNA, 22 nt, Human
acaggaaagagcuaggcauagg

SEQ ID NO: 781875 - RNA, 22 nt, Human
uucuccagagggcucugcagga

SEQ ID NO: 781876 - RNA, 22 nt, Human
gcuggcuggaacuagcaguugg

SEQ ID NO: 781877 - RNA, 22 nt, Human
auaugagagaggaaagauuuua

SEQ ID NO: 781878 - RNA, 22 nt, Human
gcagcccacagcuggaggccua

SEQ ID NO: 781879 - RNA, 22 nt, Human
augaguucauacuuucaguacc

SEQ ID NO: 781880 - RNA, 22 nt, Human
gccgugcgugcgcaggugcugu

SEQ ID NO: 781881 - RNA, 22 nt, Human
agaaguaucuugggaaggcacu

SEQ ID NO: 781882 - RNA, 22 nt, Human
ccuacucugagcgccuccgcau

SEQ ID NO: 781883 - RNA, 22 nt, Human
ugcuguguucuccugacucacc

SEQ ID NO: 781884 - RNA, 22 nt, Human
ugguccuguagcucucuaaguu

SEQ ID NO: 781885 - RNA, 22 nt, Human
cagaguuuuauguaugcaugua

SEQ ID NO: 781886 - RNA, 22 nt, Human
ccagcugcugugaggaccacag

SEQ ID NO: 781887 - RNA, 19 nt, Human
gggcacagccuccccccag

SEQ ID NO: 781888 - RNA, 22 nt, Human
aggguggcaccacauaucauag

SEQ ID NO: 781889 - RNA, 22 nt, Human
uccuggcucuaaguccugagug

SEQ ID NO: 781890 - RNA, 22 nt, Human
ugcagaggagcuggaaggcugg

SEQ ID NO: 781891 - RNA, 21 nt, Human
gaauggcaccauuagcauaua

SEQ ID NO: 781892 - RNA, 22 nt, Human
agcagacauggcuuggaugugg

SEQ ID NO: 781893 - RNA, 22 nt, Human
agagugacagccacugcaguaa

SEQ ID NO: 781894 - RNA, 22 nt, Human
uagauuucuaacagugugcuug

SEQ ID NO: 781895 - RNA, 22 nt, Human
gguccuggcagcucugugucca

SEQ ID NO: 781896 - RNA, 22 nt, Human
agcugggucuugggccaggaga

SEQ ID NO: 781897 - RNA, 22 nt, Human
cagucucuggcagcugcuggcc

SEQ ID NO: 781898 - RNA, 22 nt, Human
aagcccuguaaauugcccuuaa

SEQ ID NO: 781899 - RNA, 22 nt, Human
gcuccagaugaaaggccagagg

SEQ ID NO: 781900 - RNA, 22 nt, Human
cccaggagguguagcugcgugg

SEQ ID NO: 781901 - RNA, 22 nt, Human
cuuuuugucucuguccugauga

SEQ ID NO: 781902 - RNA, 22 nt, Human
ccagucaaguugacacaccaag

SEQ ID NO: 781903 - RNA, 22 nt, Human
aauuggcuuccauuuucuguuu

SEQ ID NO: 781904 - RNA, 22 nt, Human
gcagaggucucuucaaaauaau

SEQ ID NO: 781905 - RNA, 22 nt, Human
gcuccaagguauccaccagggu

SEQ ID NO: 781906 - RNA, 22 nt, Human
guacaauaacuagucuuauagu

SEQ ID NO: 781907 - RNA, 22 nt, Human
cacauggguggauggaugcaug

SEQ ID NO: 781908 - RNA, 22 nt, Human
uucuuggcauuuucccauuugg

SEQ ID NO: 781909 - RNA, 22 nt, Human
cagcagucaggcaaaugggagg

SEQ ID NO: 781910 - RNA, 22 nt, Human
gggcaguggguggcugcagccu

SEQ ID NO: 781911 - RNA, 22 nt, Human
aaguuucugauauuguuaaagc

SEQ ID NO: 781912 - RNA, 22 nt, Human
uuuauuccaaagcuugcacuuu

SEQ ID NO: 781913 - RNA, 22 nt, Human
uaaugcacauagaaguacuuag

SEQ ID NO: 781914 - RNA, 20 nt, Human
ucacuguaauugccuacauu

SEQ ID NO: 781915 - RNA, 17 nt, Human
ucuccuggcucuaucag

SEQ ID NO: 781916 - RNA, 22 nt, Human
uacuacauacagaauuuagaga

SEQ ID NO: 781917 - RNA, 22 nt, Human
ucccuggcacaagaaggcuguc

SEQ ID NO: 781918 - RNA, 22 nt, Human
cacauuuaaagguugaagcuga

SEQ ID NO: 781919 - RNA, 22 nt, Human
uuucuuggucuucccgaccugg

SEQ ID NO: 781920 - RNA, 20 nt, Human
ucugccacuuuuucugucac

SEQ ID NO: 781921 - RNA, 20 nt, Human
ucacuguaacauuugggggg

SEQ ID NO: 781922 - RNA, 22 nt, Human
ucuaugucucuggaaggagugu

SEQ ID NO: 781923 - RNA, 22 nt, Human
ucugcuguuuacugugugauau

SEQ ID NO: 781924 - RNA, 22 nt, Human
ccagcagcucccucaggguccg

SEQ ID NO: 781925 - RNA, 22 nt, Human
augucccugagggucucucuga

SEQ ID NO: 781926 - RNA, 22 nt, Human
acagcuggaggucugugagcac

SEQ ID NO: 781927 - RNA, 22 nt, Human
gccugccuucggugcgcagcgg

SEQ ID NO: 781928 - RNA, 22 nt, Human
agucacuguuuaaucuagcuaa

SEQ ID NO: 781929 - RNA, 21 nt, Human
acugaacuuguguucuagagg

SEQ ID NO: 781930 - RNA, 22 nt, Human
caguguuuagcacagugcuugg

SEQ ID NO: 781931 - RNA, 22 nt, Human
ucucugccacagcuucugccuu

SEQ ID NO: 781932 - RNA, 22 nt, Human
ucuccucuauuucuguauguau

SEQ ID NO: 781933 - RNA, 22 nt, Human
cugccuuggcccuaguucaugg

SEQ ID NO: 781934 - RNA, 22 nt, Human
agugacauuauuuuguguacua

SEQ ID NO: 781935 - RNA, 22 nt, Human
accaugucauuuauuggccaaa

SEQ ID NO: 781936 - RNA, 22 nt, Human
cccugccuacaggguuuucuuu

SEQ ID NO: 781937 - RNA, 21 nt, Human
gcagcaugagaaagccccaaa

SEQ ID NO: 781938 - RNA, 22 nt, Human
aucccugugacgagcaucccua

SEQ ID NO: 781939 - RNA, 22 nt, Human
cuccccacgccuggacuaagag

SEQ ID NO: 781940 - RNA, 22 nt, Human
gucugcccugcagacaugccuc

SEQ ID NO: 781941 - RNA, 22 nt, Human
ccuuuguucacuggagagugga

SEQ ID NO: 781942 - RNA, 22 nt, Human
ccagcuggaacggcagcccagc

SEQ ID NO: 781943 - RNA, 22 nt, Human
uguguccugugaucucuagggu

SEQ ID NO: 781944 - RNA, 20 nt, Human
cugaccagcagccugucucc

SEQ ID NO: 781945 - RNA, 22 nt, Human
uccagcagguccgagacaaguu

SEQ ID NO: 781946 - RNA, 22 nt, Human
gucccucugccugugguucucu

SEQ ID NO: 781947 - RNA, 22 nt, Human
uaaguauguuagaaaaucaagu

SEQ ID NO: 781948 - RNA, 22 nt, Human
cagcuauuguucuguauaauga

SEQ ID NO: 781949 - RNA, 22 nt, Human
cccagccugaucucggccagcu

SEQ ID NO: 781950 - RNA, 22 nt, Human
uguuugcucugacuaucuugcg

SEQ ID NO: 781951 - RNA, 19 nt, Human
agcagagcagggccguggg

SEQ ID NO: 781952 - RNA, 22 nt, Human
uccugucucaguguauuugcag

SEQ ID NO: 781953 - RNA, 22 nt, Human
gcugcccauugcucucccacuc

SEQ ID NO: 781954 - RNA, 22 nt, Human
guucucugccggcaccuacccg

SEQ ID NO: 781955 - RNA, 22 nt, Human
uuucuucucacccaggacagag

SEQ ID NO: 781956 - RNA, 22 nt, Human
ugucccuggacuccaggagcca

SEQ ID NO: 781957 - RNA, 17 nt, Human
uguguaaguugcauaga

SEQ ID NO: 781958 - RNA, 22 nt, Human
uacuguauacuacugcuguucu

SEQ ID NO: 781959 - RNA, 22 nt, Human
cucuggcaauugcugcugacuc

SEQ ID NO: 781960 - RNA, 22 nt, Human
uuucucuuucaaucugcaguac

SEQ ID NO: 781961 - RNA, 22 nt, Human
uugcaguuuugacagaccaaau

SEQ ID NO: 781962 - RNA, 22 nt, Human
ggaagccaguugcuuggugugg

SEQ ID NO: 781963 - RNA, 22 nt, Human
augcacuaugaugagcuagucu

SEQ ID NO: 781964 - RNA, 22 nt, Human
uuuccuguccugguacuuggca

SEQ ID NO: 781965 - RNA, 22 nt, Human
cucugccagccaaagucaucac

SEQ ID NO: 781966 - RNA, 22 nt, Human
cucccugggccucaguuucucu

SEQ ID NO: 781967 - RNA, 19 nt, Human
cucugccucuggcuguggc

SEQ ID NO: 781968 - RNA, 22 nt, Human
auuuccuguaggggcuugcgaa

SEQ ID NO: 781969 - RNA, 22 nt, Human
auucugcugccuaguuuaugaa

SEQ ID NO: 781970 - RNA, 22 nt, Human
ccaggcauccauugcuuccucu

SEQ ID NO: 781971 - RNA, 22 nt, Human
aauaucuagccuuuagcagcuu

SEQ ID NO: 781972 - RNA, 22 nt, Human
cugucacagcccgcgucuccuc

SEQ ID NO: 781973 - RNA, 22 nt, Human
cccuuguuuuugaguacaauag

SEQ ID NO: 781974 - RNA, 22 nt, Human
uugguuaccuucagaaaugagu

SEQ ID NO: 781975 - RNA, 20 nt, Human
ucucccugcccaucucagau

SEQ ID NO: 781976 - RNA, 22 nt, Human
ucugccaucaagaugcucuggc

SEQ ID NO: 781977 - RNA, 22 nt, Human
cagggcucgcucgcucgcucgc

SEQ ID NO: 781978 - RNA, 22 nt, Human
cagggcuccccagagagccucu

SEQ ID NO: 781979 - RNA, 17 nt, Human
uaaguccuaguuauuuu

SEQ ID NO: 781980 - RNA, 22 nt, Human
cugaccaguccuuagcaccugg

SEQ ID NO: 781981 - RNA, 23 nt, Human
aguacauuugacccaaauaagcu

SEQ ID NO: 781982 - RNA, 18 nt, Human
cugccagugugcucuccg

SEQ ID NO: 781983 - RNA, 19 nt, Human
ugguucuccuuccacaguc

SEQ ID NO: 781984 - RNA, 22 nt, Human
uggcagccugcgugaaggagcu

SEQ ID NO: 781985 - RNA, 22 nt, Human
cagggccugccugguuccugga

SEQ ID NO: 781986 - RNA, 22 nt, Human
cucuagcucccagggagcgucu

SEQ ID NO: 781987 - RNA, 22 nt, Human
uuguuuguaaggcucuuagaau

SEQ ID NO: 781988 - RNA, 22 nt, Human
uuucuaguggguauucccuguu

SEQ ID NO: 781989 - RNA, 22 nt, Human
gucugcccuuggccugggacuu

SEQ ID NO: 781990 - RNA, 22 nt, Human
ugcccauggcaggauuucugaa

SEQ ID NO: 781991 - RNA, 19 nt, Human
gcagcugugggaagagcca

SEQ ID NO: 781992 - RNA, 22 nt, Human
ugucuguccaucugucugggac

SEQ ID NO: 781993 - RNA, 22 nt, Human
gugcuggggagauaggaagaga

SEQ ID NO: 781994 - RNA, 22 nt, Human
ccaggcuccccaggaggcccuu

SEQ ID NO: 781995 - RNA, 18 nt, Human
cugccuguugcugagagg

SEQ ID NO: 781996 - RNA, 22 nt, Human
guucucucagcgauagugaugg

SEQ ID NO: 781997 - RNA, 22 nt, Human
cccugauguuuucucugccuuu

SEQ ID NO: 781998 - RNA, 22 nt, Human
cuggcagcucugagucccuucu

SEQ ID NO: 781999 - RNA, 23 nt, Human
aagugcucaguggacagcauugc

SEQ ID NO: 782000 - RNA, 22 nt, Human
aaauacaguggcagcagauaau

SEQ ID NO: 782001 - RNA, 21 nt, Human
uccugccuuaguccagagcag

SEQ ID NO: 782002 - RNA, 21 nt, Human
ggagucagggucuggcugggg

SEQ ID NO: 782003 - RNA, 22 nt, Human
cuucucuuggguguggugucuu

SEQ ID NO: 782004 - RNA, 22 nt, Human
cuuccugcaacaccuguguugc

SEQ ID NO: 782005 - RNA, 22 nt, Human
gcagccuccgcacugcgagucc

SEQ ID NO: 782006 - RNA, 22 nt, Human
ggcuucuuagaauuugacuuac

SEQ ID NO: 782007 - RNA, 22 nt, Human
ugucuucuaccuugacagcauu

SEQ ID NO: 782008 - RNA, 22 nt, Human
cucugcaggcacccaggguggg

SEQ ID NO: 782009 - RNA, 22 nt, Human
uacauguuauuucacuauuggu

SEQ ID NO: 782010 - RNA, 22 nt, Human
uagaaguuaaaggaauacagaa

SEQ ID NO: 782011 - RNA, 22 nt, Human
uaucuuugguagcuuuccuaag

SEQ ID NO: 782012 - RNA, 22 nt, Human
uuggcaauauuuacugaaguug

SEQ ID NO: 782013 - RNA, 22 nt, Human
uauucacagcugccgcacucag

SEQ ID NO: 782014 - RNA, 22 nt, Human
auguuuguguuucccauucagg

SEQ ID NO: 782015 - RNA, 22 nt, Human
cagggacugagauccagacugu

SEQ ID NO: 782016 - RNA, 22 nt, Human
cuaguagcccauuuuggauacc

SEQ ID NO: 782017 - RNA, 22 nt, Human
cagaugaaguaggugacgagca

SEQ ID NO: 782018 - RNA, 22 nt, Human
auggcuguguuguuccucugaa

SEQ ID NO: 782019 - RNA, 22 nt, Human
agcuggguacacguugucacaa

SEQ ID NO: 782020 - RNA, 22 nt, Human
cucucuccuuagcugcagacca

SEQ ID NO: 782021 - RNA, 22 nt, Human
uucuacauugugaaguucuuua

SEQ ID NO: 782022 - RNA, 22 nt, Human
uucuccucagcaaggcagcuuu

SEQ ID NO: 782023 - RNA, 22 nt, Human
uccuggcaaagauguugguguu

SEQ ID NO: 782024 - RNA, 22 nt, Human
auuuccuggaggaauggaagca

SEQ ID NO: 782025 - RNA, 22 nt, Human
cuggcagcugcccgagaugccc

SEQ ID NO: 782026 - RNA, 22 nt, Human
guauuucuuuacauaugcucau

SEQ ID NO: 782027 - RNA, 22 nt, Human
cugagaguauuggcaggcuugg

SEQ ID NO: 782028 - RNA, 21 nt, Human
ucugcccacacuggccacugc

SEQ ID NO: 782029 - RNA, 22 nt, Human
uucuguucccuaggaccugggg

SEQ ID NO: 782030 - RNA, 22 nt, Human
uuuucuuggaguggcuguccuu

SEQ ID NO: 782031 - RNA, 22 nt, Human
cuuccucuguggccagagugua

SEQ ID NO: 782032 - RNA, 22 nt, Human
ugcccugcagacccugcagugu

SEQ ID NO: 782033 - RNA, 22 nt, Human
ucaucaucauucucccccacuu

SEQ ID NO: 782034 - RNA, 22 nt, Human
cagacucuugagcugauuguau

SEQ ID NO: 782035 - RNA, 22 nt, Human
aaugugcugguaacugcuuugc

SEQ ID NO: 782036 - RNA, 22 nt, Human
gugagagugguuuauguccaug

SEQ ID NO: 782037 - RNA, 22 nt, Human
ggcucucuuaacuggccauccu

SEQ ID NO: 782038 - RNA, 22 nt, Human
gcacuuguuuuauguuccugag

SEQ ID NO: 782039 - RNA, 22 nt, Human
cagggucuuggcgccaucaccc

SEQ ID NO: 782040 - RNA, 22 nt, Human
cucuccaggcgagguccuacug

SEQ ID NO: 782041 - RNA, 22 nt, Human
gagcucagccugaggccuggcu

SEQ ID NO: 782042 - RNA, 22 nt, Human
ucuuugcauggacauguguuuu

SEQ ID NO: 782043 - RNA, 22 nt, Human
gucaucaucaggcagaugcugc

SEQ ID NO: 782044 - RNA, 22 nt, Human
uccuuucugucuuuacucugga

SEQ ID NO: 782045 - RNA, 22 nt, Human
ucccacacagcccgcucaccgg

SEQ ID NO: 782046 - RNA, 22 nt, Human
agagugaaguaauuguuaggau

SEQ ID NO: 782047 - RNA, 22 nt, Human
ugcuuggagaaucagucccagc

SEQ ID NO: 782048 - RNA, 22 nt, Human
gcuugcuuuguaaauaucugug

SEQ ID NO: 782049 - RNA, 22 nt, Human
cccagccuuugcuuccugguuc

SEQ ID NO: 782050 - RNA, 22 nt, Human
ugcuccaucuagagcucugcag

SEQ ID NO: 782051 - RNA, 22 nt, Human
gcucccuggaauguuggcugcc

SEQ ID NO: 782052 - RNA, 22 nt, Human
agccccuugugggcgcacagca

SEQ ID NO: 782053 - RNA, 22 nt, Human
uugcuucacuacuucuaggcuc

SEQ ID NO: 782054 - RNA, 22 nt, Human
acagcuggccgaggcucaggga

SEQ ID NO: 782055 - RNA, 21 nt, Human
uuccuccucuggagaagaaga

SEQ ID NO: 782056 - RNA, 22 nt, Human
agcuggguguagggcuggacaa

SEQ ID NO: 782057 - RNA, 22 nt, Human
ccagcugggucccugcuggggc

SEQ ID NO: 782058 - RNA, 22 nt, Human
ggugagagaaaagaaacacugu

SEQ ID NO: 782059 - RNA, 22 nt, Human
ucugcuugugucuguccagccu

SEQ ID NO: 782060 - RNA, 22 nt, Human
ugucuuuagccacuugccucuu

SEQ ID NO: 782061 - RNA, 22 nt, Human
gagaugaagaggcccuuggagu

SEQ ID NO: 782062 - RNA, 19 nt, Human
cuggcuucaagcaguccuc

SEQ ID NO: 782063 - RNA, 22 nt, Human
ccaucuucucuugaaccuccuu

SEQ ID NO: 782064 - RNA, 22 nt, Human
uccugcagccauuagaggucaa

SEQ ID NO: 782065 - RNA, 22 nt, Human
ucugcucagccgaucugcuccg

SEQ ID NO: 782066 - RNA, 22 nt, Human
uagauuaucccugauuugucca

SEQ ID NO: 782067 - RNA, 22 nt, Human
cucucugggcccaguuggcacc

SEQ ID NO: 782068 - RNA, 22 nt, Human
gcuucuggaagcauaugcaaga

SEQ ID NO: 782069 - RNA, 22 nt, Human
cuagcagcauucuucuaguuag

SEQ ID NO: 782070 - RNA, 22 nt, Human
cugcaguucuucuccucaaggc

SEQ ID NO: 782071 - RNA, 23 nt, Human
uugcauuaauguggaggcacagg

SEQ ID NO: 782072 - RNA, 22 nt, Human
cuggagauaagcagucccaggc

SEQ ID NO: 782073 - RNA, 22 nt, Human
caaguaugagaaagcuauuacc

SEQ ID NO: 782074 - RNA, 22 nt, Human
ucuucaugucucugcuugaguc

SEQ ID NO: 782075 - RNA, 22 nt, Human
ccucccugccggcuggacuagu

SEQ ID NO: 782076 - RNA, 22 nt, Human
uuuguguuguacuucugugcau

SEQ ID NO: 782077 - RNA, 22 nt, Human
ccucucauagucuguauccuuu

SEQ ID NO: 782078 - RNA, 22 nt, Human
cugucucugauaagcucgaggg

SEQ ID NO: 782079 - RNA, 22 nt, Human
agcugggugcccgaagccacgu

SEQ ID NO: 782080 - RNA, 22 nt, Human
uggaaagaggaagugcccagca

SEQ ID NO: 782081 - RNA, 22 nt, Human
ucaugucccguugcuggcugcc

SEQ ID NO: 782082 - RNA, 22 nt, Human
uguaauguuagaaacaauugcu

SEQ ID NO: 782083 - RNA, 22 nt, Human
uucuuucugggguccuucggcu

SEQ ID NO: 782084 - RNA, 19 nt, Human
ucucccaugccugugucua

SEQ ID NO: 782085 - RNA, 22 nt, Human
acagcugggaacucacacagca

SEQ ID NO: 782086 - RNA, 22 nt, Human
ugccuggcugggcugcucaugg

SEQ ID NO: 782087 - RNA, 22 nt, Human
acuccuggguuccggagauucu

SEQ ID NO: 782088 - RNA, 20 nt, Human
uacaauauucccacuuugcu

SEQ ID NO: 782089 - RNA, 22 nt, Human
uucaguaugcugaaugauuuuu

SEQ ID NO: 782090 - RNA, 22 nt, Human
uuauuugcccauguuuagcaga

SEQ ID NO: 782091 - RNA, 22 nt, Human
caggagagcccggguccgggcu

SEQ ID NO: 782092 - RNA, 22 nt, Human
acccaggacaaaauaaccaggu

SEQ ID NO: 782093 - RNA, 21 nt, Human
ggcagcucagcagauggggac

SEQ ID NO: 782094 - RNA, 22 nt, Human
cuggccagaguuggagggugug

SEQ ID NO: 782095 - RNA, 22 nt, Human
cgaggcagggaagcugcaaaag

SEQ ID NO: 782096 - RNA, 21 nt, Human
uuugaaagugggugauucuuu

SEQ ID NO: 782097 - RNA, 22 nt, Human
aaaggccaagcaugagguggac

SEQ ID NO: 782098 - RNA, 22 nt, Human
cugggaaauggcuucgagcuca

SEQ ID NO: 782099 - RNA, 22 nt, Human
aggcugcugaggccaccacgcu

SEQ ID NO: 782100 - RNA, 22 nt, Human
cagcuuucaucagugacacuca

SEQ ID NO: 782101 - RNA, 22 nt, Human
agcagacauaucucaugucaca

SEQ ID NO: 782102 - RNA, 22 nt, Human
uuaaaugaggcugauguagauu

SEQ ID NO: 782103 - RNA, 22 nt, Human
ugcuagugcaggguuuucaguu

SEQ ID NO: 782104 - RNA, 22 nt, Human
caaaugauaccuauuacuaggc

SEQ ID NO: 782105 - RNA, 22 nt, Human
guggaauguccuugaucauaag

SEQ ID NO: 782106 - RNA, 22 nt, Human
uuugacauugccaauuugcuca

SEQ ID NO: 782107 - RNA, 22 nt, Human
ugucccucugaggcuucccugg

SEQ ID NO: 782108 - RNA, 22 nt, Human
ucuuugcaaaauacaacaaugg

SEQ ID NO: 782109 - RNA, 22 nt, Human
caaggccacuccagagacuggu

SEQ ID NO: 782110 - RNA, 22 nt, Human
uucuucuuuccuauaauuaauu

SEQ ID NO: 782111 - RNA, 22 nt, Human
cugcugugcagacagacucucu

SEQ ID NO: 782112 - RNA, 22 nt, Human
cucuggcuucuaccuugcaguu

SEQ ID NO: 782113 - RNA, 22 nt, Human
ucuucagaggaagucagucuuu

SEQ ID NO: 782114 - RNA, 22 nt, Human
uaauuccaaguugagacaugca

SEQ ID NO: 782115 - RNA, 22 nt, Human
gucuuuaugguaugaaaacuga

SEQ ID NO: 782116 - RNA, 20 nt, Human
gagauggacagaugaagggg

SEQ ID NO: 782117 - RNA, 22 nt, Human
cagauggaacacagaaaggaga

SEQ ID NO: 782118 - RNA, 20 nt, Human
gcccaagguccagaaggggg

SEQ ID NO: 782119 - RNA, 22 nt, Human
agcacauucugccuugcuuugc

SEQ ID NO: 782120 - RNA, 22 nt, Human
uuugaaguggaaaaggauuuaa

SEQ ID NO: 782121 - RNA, 22 nt, Human
ggacagcugcuuucaggccaca

SEQ ID NO: 782122 - RNA, 22 nt, Human
ucaggaggccaccaggaccugu

SEQ ID NO: 782123 - RNA, 22 nt, Human
uaacaguguggacuugagaucu

SEQ ID NO: 782124 - RNA, 21 nt, Human
agcagaggggacauguuugau

SEQ ID NO: 782125 - RNA, 22 nt, Human
uuauucuucuucucuugccagg

SEQ ID NO: 782126 - RNA, 22 nt, Human
ugaaaugagauaauuuaagugc

SEQ ID NO: 782127 - RNA, 22 nt, Human
aggccagcuuccagaggggcag

SEQ ID NO: 782128 - RNA, 21 nt, Human
ugaaugaggaggauggcauuu

SEQ ID NO: 782129 - RNA, 22 nt, Human
gacccaggagagaggguugcau

SEQ ID NO: 782130 - RNA, 22 nt, Human
uuugacauuggcuuauucuguu

SEQ ID NO: 782131 - RNA, 22 nt, Human
aaucuuucccuauuaaaugugg

SEQ ID NO: 782132 - RNA, 22 nt, Human
aggguggcaccuggaagggaug

SEQ ID NO: 782133 - RNA, 20 nt, Human
ugcugucguguuuucugcuu

SEQ ID NO: 782134 - RNA, 22 nt, Human
ggaggggagguccagcugaucu

SEQ ID NO: 782135 - RNA, 22 nt, Human
guaguucugcagugucaccuga

SEQ ID NO: 782136 - RNA, 22 nt, Human
aaaauuauagaucuagugccug

SEQ ID NO: 782137 - RNA, 22 nt, Human
acucuucuugcugcucauuaau

SEQ ID NO: 782138 - RNA, 22 nt, Human
ugaaggccagcucuuuaucagc

SEQ ID NO: 782139 - RNA, 22 nt, Human
ugucugugaccucuuaggcaag

SEQ ID NO: 782140 - RNA, 19 nt, Human
uucccaggaaaggggugca

SEQ ID NO: 782141 - RNA, 22 nt, Human
uuuauuuggcauccagggagaa

SEQ ID NO: 782142 - RNA, 22 nt, Human
uuuccaagacuccaguucuccc

SEQ ID NO: 782143 - RNA, 22 nt, Human
ucaggaugguguggaggaaaua

SEQ ID NO: 782144 - RNA, 22 nt, Human
acaucucaugaaugauaaauca

SEQ ID NO: 782145 - RNA, 17 nt, Human
acagagcacaucaagau

SEQ ID NO: 782146 - RNA, 22 nt, Human
aauaucaacaguguccuucuaa

SEQ ID NO: 782147 - RNA, 22 nt, Human
agucucugggcaugguugugac

SEQ ID NO: 782148 - RNA, 22 nt, Human
gacccaggaagcuacuucuggu

SEQ ID NO: 782149 - RNA, 22 nt, Human
gaaguacaguuuuaucuagcca

SEQ ID NO: 782150 - RNA, 22 nt, Human
agugcuuuccuucuugugacau

SEQ ID NO: 782151 - RNA, 22 nt, Human
aggcucagaggugagcaucugc

SEQ ID NO: 782152 - RNA, 22 nt, Human
gggcagcucuuugguauccuuc

SEQ ID NO: 782153 - RNA, 22 nt, Human
cagaggcagccgggggagaacg

SEQ ID NO: 782154 - RNA, 23 nt, Human
cccaggaguuucacugcaaaggu

SEQ ID NO: 782155 - RNA, 22 nt, Human
cugaacucuuuaugacagcuug

SEQ ID NO: 782156 - RNA, 22 nt, Human
uuuccaagagcuuauuucugaa

SEQ ID NO: 782157 - RNA, 22 nt, Human
ucucucagaggaagaggcagug

SEQ ID NO: 782158 - RNA, 22 nt, Human
ugaaggccagcagagugaaggc

SEQ ID NO: 782159 - RNA, 22 nt, Human
cucaagacugaucgcaguggaa

SEQ ID NO: 782160 - RNA, 22 nt, Human
aggcacagcacaccuggccccc

SEQ ID NO: 782161 - RNA, 22 nt, Human
uuuccagagcaugucugcucag

SEQ ID NO: 782162 - RNA, 22 nt, Human
cugcuuuguaaaauagacauaa

SEQ ID NO: 782163 - RNA, 22 nt, Human
gaggcugcuuugaugacaggag

SEQ ID NO: 782164 - RNA, 22 nt, Human
ugaggcaggaggauugcaggau

SEQ ID NO: 782165 - RNA, 22 nt, Human
ugcacauucacuuagguauugu

SEQ ID NO: 782166 - RNA, 22 nt, Human
aaggcaguagguguuucaaacu

SEQ ID NO: 782167 - RNA, 22 nt, Human
ccaggacaaguguggccauggc

SEQ ID NO: 782168 - RNA, 22 nt, Human
ugugcaggugcaggaagggggc

SEQ ID NO: 782169 - RNA, 22 nt, Human
aaauguuucuacuugugagcau

SEQ ID NO: 782170 - RNA, 22 nt, Human
ggaaaugacuuggugcuucguu

SEQ ID NO: 782171 - RNA, 22 nt, Human
aggcagcauuugaauccagguc

SEQ ID NO: 782172 - RNA, 16 nt, Human
aggaggggaauuagga

SEQ ID NO: 782173 - RNA, 23 nt, Human
cugcuguguuggucucgauggga

SEQ ID NO: 782174 - RNA, 22 nt, Human
ucagagaguuacacaaauuguu

SEQ ID NO: 782175 - RNA, 22 nt, Human
uugagaagaauguguugaguuu

SEQ ID NO: 782176 - RNA, 22 nt, Human
caggaugggauguagugggccc

SEQ ID NO: 782177 - RNA, 22 nt, Human
cagcugcuuuaguuuuccaucc

SEQ ID NO: 782178 - RNA, 22 nt, Human
augcugagcagagcugacaugc

SEQ ID NO: 782179 - RNA, 22 nt, Human
uagugcuuuaggccugaguguc

SEQ ID NO: 782180 - RNA, 22 nt, Human
uaucuguuguccaugcagaaag

SEQ ID NO: 782181 - RNA, 22 nt, Human
aggagacaucuaacuguagguu

SEQ ID NO: 782182 - RNA, 16 nt, Human
cuuccucuucacuggc

SEQ ID NO: 782183 - RNA, 19 nt, Human
uucuccaggcugcagaggg

SEQ ID NO: 782184 - RNA, 22 nt, Human
agugcugucaguuuuauagaua

SEQ ID NO: 782185 - RNA, 22 nt, Human
agucucuuuguggacucugccu

SEQ ID NO: 782186 - RNA, 22 nt, Human
cucagugugaaugcucaguaaa

SEQ ID NO: 782187 - RNA, 22 nt, Human
acaguggagaaggcaugaggcu

SEQ ID NO: 782188 - RNA, 22 nt, Human
uuugaaaggugucgagaugugu

SEQ ID NO: 782189 - RNA, 22 nt, Human
ucuuuuggaaaugaugugcagg

SEQ ID NO: 782190 - RNA, 22 nt, Human
uucaggaucauuuguuuuaucu

SEQ ID NO: 782191 - RNA, 22 nt, Human
uugcuuugccaccagaagucua

SEQ ID NO: 782192 - RNA, 22 nt, Human
auccagucaaaauuaguaaggu

SEQ ID NO: 782193 - RNA, 22 nt, Human
acuugcauuauauuuaucacaa

SEQ ID NO: 782194 - RNA, 22 nt, Human
ggcagaagauaggacagggaau

SEQ ID NO: 782195 - RNA, 22 nt, Human
gcucucuuuuuccagugguggu

SEQ ID NO: 782196 - RNA, 22 nt, Human
ggcaggcagaggcugagacagg

SEQ ID NO: 782197 - RNA, 22 nt, Human
cuuguaauuauaauguacuguu

SEQ ID NO: 782198 - RNA, 22 nt, Human
uuuuguuguaauauaccuaucc

SEQ ID NO: 782199 - RNA, 23 nt, Human
cuccccaguguccucaugcaucu

SEQ ID NO: 782200 - RNA, 22 nt, Human
ccaggcugggcuacaaguugag

SEQ ID NO: 782201 - RNA, 22 nt, Human
caggcagaguuagagcaacugg

SEQ ID NO: 782202 - RNA, 22 nt, Human
cgucuuccucuuacgaugcgcu

SEQ ID NO: 782203 - RNA, 22 nt, Human
aauccugugugacucuggggag

SEQ ID NO: 782204 - RNA, 20 nt, Human
agcugccccugggcacugcc

SEQ ID NO: 782205 - RNA, 22 nt, Human
gcagaggccuagguggaaggcc

SEQ ID NO: 782206 - RNA, 21 nt, Human
agcagaggcugccuggugacu

SEQ ID NO: 782207 - RNA, 22 nt, Human
acagugcuaaacacuucuugaa

SEQ ID NO: 782208 - RNA, 22 nt, Human
acucaggaagaaagcagcuggu

SEQ ID NO: 782209 - RNA, 22 nt, Human
auuugcuugugcuaugaaaguu

SEQ ID NO: 782210 - RNA, 22 nt, Human
cucucuguuaugcuuucaugaa

SEQ ID NO: 782211 - RNA, 22 nt, Human
ugaggcagcaauuguauuguau

SEQ ID NO: 782212 - RNA, 22 nt, Human
uucucagauccaucagaagucc

SEQ ID NO: 782213 - RNA, 23 nt, Human
gggcagcuuaagcuuguuuuucu

SEQ ID NO: 782214 - RNA, 22 nt, Human
uugauguacagaauuguucaca

SEQ ID NO: 782215 - RNA, 22 nt, Human
uuugaaaggaauuaggaugaca

SEQ ID NO: 782216 - RNA, 22 nt, Human
agggagcuuccgaacuacagcu

SEQ ID NO: 782217 - RNA, 22 nt, Human
cccaggaggcagagguugcagu

SEQ ID NO: 782218 - RNA, 22 nt, Human
ugcuuugggucucucuaguuuc

SEQ ID NO: 782219 - RNA, 22 nt, Human
agaggccacuuugccugugaug

SEQ ID NO: 782220 - RNA, 22 nt, Human
gaaacuguauguaguuuuuggg

SEQ ID NO: 782221 - RNA, 22 nt, Human
agcugaaagugcuuugaggacu

SEQ ID NO: 782222 - RNA, 22 nt, Human
uggcagcugucagaaugcaaau

SEQ ID NO: 782223 - RNA, 22 nt, Human
ugaaagggguugaguuacagcu

SEQ ID NO: 782224 - RNA, 22 nt, Human
gagggcauaguuaaauaggagg

SEQ ID NO: 782225 - RNA, 22 nt, Human
aaguaaaauguuuccuuuauua

SEQ ID NO: 782226 - RNA, 22 nt, Human
gucccaggugggcuccaccucu

SEQ ID NO: 782227 - RNA, 22 nt, Human
cccaugagguggagguugcagu

SEQ ID NO: 782228 - RNA, 22 nt, Human
uccaugagcuagcuuuccaaag

SEQ ID NO: 782229 - RNA, 22 nt, Human
aggcaguggaaggagaaagcaa

SEQ ID NO: 782230 - RNA, 22 nt, Human
ucugcuguucauucuuuuagcu

SEQ ID NO: 782231 - RNA, 22 nt, Human
ugaaaugauaucugauaacaaa

SEQ ID NO: 782232 - RNA, 18 nt, Human
uggcagcaggaagccauu

SEQ ID NO: 782233 - RNA, 22 nt, Human
ucagccucucugaguccagacc

SEQ ID NO: 782234 - RNA, 22 nt, Human
ucacccuugauaauguucuucu

SEQ ID NO: 782235 - RNA, 22 nt, Human
cagcugugaauugucuuaucua

SEQ ID NO: 782236 - RNA, 22 nt, Human
uuuguuuagaugguaaaucagu

SEQ ID NO: 782237 - RNA, 22 nt, Human
auggaguucuuuaaauucacag

SEQ ID NO: 782238 - RNA, 22 nt, Human
ugaaaugauguacaagaaggca

SEQ ID NO: 782239 - RNA, 22 nt, Human
aaaauaacuucuacuauuugca

SEQ ID NO: 782240 - RNA, 22 nt, Human
gggcagcugccagaggccaugg

SEQ ID NO: 782241 - RNA, 22 nt, Human
gugggagcuuuggcaucaggcu

SEQ ID NO: 782242 - RNA, 22 nt, Human
ucuucaucucagauuaacagga

SEQ ID NO: 782243 - RNA, 22 nt, Human
agaggcggagcuugcagugagc

SEQ ID NO: 782244 - RNA, 22 nt, Human
gggcagcugcagggauggugac

SEQ ID NO: 782245 - RNA, 22 nt, Human
uugugguuaaccgcacauuuuu

SEQ ID NO: 782246 - RNA, 22 nt, Human
guuuucaaggggauuuaacuga

SEQ ID NO: 782247 - RNA, 22 nt, Human
gccaggagccagcuucuuagca

SEQ ID NO: 782248 - RNA, 22 nt, Human
gaggggcagagguagagaacaa

SEQ ID NO: 782249 - RNA, 22 nt, Human
gaacuguaguuaauacuacaca

SEQ ID NO: 782250 - RNA, 22 nt, Human
gaggagaggccaucguuguuau

SEQ ID NO: 782251 - RNA, 21 nt, Human
uuagaaagcucacuacaguua

SEQ ID NO: 782252 - RNA, 22 nt, Human
auguuucaccaguuuuauaaga

SEQ ID NO: 782253 - RNA, 22 nt, Human
uguggaaaagaauaagggagau

SEQ ID NO: 782254 - RNA, 22 nt, Human
aggacagcccuugagagcacau

SEQ ID NO: 782255 - RNA, 22 nt, Human
gugacaguggucacuuguaguu

SEQ ID NO: 782256 - RNA, 22 nt, Human
cagaccagaaggaagccgacaa

SEQ ID NO: 782257 - RNA, 22 nt, Human
auacagauguugaauguuauau

SEQ ID NO: 782258 - RNA, 23 nt, Human
accaggagccaagaucucccugg

SEQ ID NO: 782259 - RNA, 22 nt, Human
ucauuucaaguucugacagcua

SEQ ID NO: 782260 - RNA, 22 nt, Human
aggggcucaaagugugcaggga

SEQ ID NO: 782261 - RNA, 22 nt, Human
aaagcagagguugcagugagcu

SEQ ID NO: 782262 - RNA, 22 nt, Human
guuugcauauuugcacaggaau

SEQ ID NO: 782263 - RNA, 22 nt, Human
gucaggaugggcagccaaacua

SEQ ID NO: 782264 - RNA, 19 nt, Human
uaaggccaaaaguaagugu

SEQ ID NO: 782265 - RNA, 21 nt, Human
gacaaagugaagcaggcagga

SEQ ID NO: 782266 - RNA, 22 nt, Human
uuucaaauagaaucuuuccaaa

SEQ ID NO: 782267 - RNA, 19 nt, Human
agucuuucccacucgucuu

SEQ ID NO: 782268 - RNA, 22 nt, Human
uuacuuuggguccugcuuauaa

SEQ ID NO: 782269 - RNA, 22 nt, Human
gggcagcuguaucugagcuuau

SEQ ID NO: 782270 - RNA, 22 nt, Human
cagucucuugcuucauuaguug

SEQ ID NO: 782271 - RNA, 22 nt, Human
gggcagcucugcccaucagagg

SEQ ID NO: 782272 - RNA, 22 nt, Human
aaauuauuaugccccucuauaa

SEQ ID NO: 782273 - RNA, 22 nt, Human
ccaugagacagcaacugaaagu

SEQ ID NO: 782274 - RNA, 22 nt, Human
gaauauuuuuaaagggacuaau

SEQ ID NO: 782275 - RNA, 22 nt, Human
uucauuaguucugaagaugucu

SEQ ID NO: 782276 - RNA, 22 nt, Human
ugguaauuaauuugauagguuc

SEQ ID NO: 782277 - RNA, 22 nt, Human
ucugggaaaugcuguuccuugu

SEQ ID NO: 782278 - RNA, 22 nt, Human
uaucuguuggcuccuaguugua

SEQ ID NO: 782279 - RNA, 22 nt, Human
uccaggagucuagccucaggcc

SEQ ID NO: 782280 - RNA, 22 nt, Human
gggcagcugccccucucugggc

SEQ ID NO: 782281 - RNA, 22 nt, Human
augcugugagugugccgcagag

SEQ ID NO: 782282 - RNA, 22 nt, Human
cugaacuuauugagugcuugcu

SEQ ID NO: 782283 - RNA, 22 nt, Human
auuacaaaagaagggagaaggu

SEQ ID NO: 782284 - RNA, 22 nt, Human
uaugaacucuggagucugagug

SEQ ID NO: 782285 - RNA, 22 nt, Human
ucagagaguuggaaagaauuaa

SEQ ID NO: 782286 - RNA, 22 nt, Human
gcuucccacagcuggacugggg

SEQ ID NO: 782287 - RNA, 22 nt, Human
ggaggggaggauuaaugacaaa

SEQ ID NO: 782288 - RNA, 22 nt, Human
uggcagcuggagggcaauggcc

SEQ ID NO: 782289 - RNA, 22 nt, Human
caaauguauaaauguacuuucu

SEQ ID NO: 782290 - RNA, 22 nt, Human
cauuuauuggcauguaguaggu

SEQ ID NO: 782291 - RNA, 22 nt, Human
uuuaaaaucagaugggaguugg

SEQ ID NO: 782292 - RNA, 22 nt, Human
cauuuguauagugcuuagacca

SEQ ID NO: 782293 - RNA, 22 nt, Human
ggauguugauugaauggccauu

SEQ ID NO: 782294 - RNA, 22 nt, Human
cucagaagaacaaaggcucuac

SEQ ID NO: 782295 - RNA, 22 nt, Human
uuaguuuucccaucuuuauggu

SEQ ID NO: 782296 - RNA, 22 nt, Human
uugcccagaguccacagcguac

SEQ ID NO: 782297 - RNA, 22 nt, Human
ucaaauaccagcaauuucaugu

SEQ ID NO: 782298 - RNA, 20 nt, Human
aucuucuuggccagcuugcu

SEQ ID NO: 782299 - RNA, 22 nt, Human
cauuuguuuagaagucuuuaua

SEQ ID NO: 782300 - RNA, 22 nt, Human
gcucaggaaauaguuuaguguu

SEQ ID NO: 782301 - RNA, 22 nt, Human
ucaggagauguaaccuuagcug

SEQ ID NO: 782302 - RNA, 22 nt, Human
aucuugcauuugcuaaaaugca

SEQ ID NO: 782303 - RNA, 22 nt, Human
gacccaggguauccagagcugc

SEQ ID NO: 782304 - RNA, 22 nt, Human
augcugugucaggaauuugaua

SEQ ID NO: 782305 - RNA, 18 nt, Human
agggagagaccgcggguc

SEQ ID NO: 782306 - RNA, 22 nt, Human
cccaggaguucgaggcuguagu

SEQ ID NO: 782307 - RNA, 22 nt, Human
aucugcuugaaugagcaacagg

SEQ ID NO: 782308 - RNA, 22 nt, Human
cuucuucauaggcaguccuguu

SEQ ID NO: 782309 - RNA, 22 nt, Human
aaagcagauucugaugcaguag

SEQ ID NO: 782310 - RNA, 22 nt, Human
cagguaaaaauaaauuugugag

SEQ ID NO: 782311 - RNA, 22 nt, Human
ucucccaggcugcccuguggac

SEQ ID NO: 782312 - RNA, 22 nt, Human
acagucauuagauacaaugucu

SEQ ID NO: 782313 - RNA, 22 nt, Human
acccaggauagagugcugcagu

SEQ ID NO: 782314 - RNA, 22 nt, Human
gcuguucucuguaacaugcauu

SEQ ID NO: 782315 - RNA, 22 nt, Human
aaugucugagucucuguauccc

SEQ ID NO: 782316 - RNA, 22 nt, Human
ucccaggaggugcuuccuagga

SEQ ID NO: 782317 - RNA, 22 nt, Human
uugcuucaguagcucuuuaaag

SEQ ID NO: 782318 - RNA, 22 nt, Human
ucucucuucaacccuuaacuag

SEQ ID NO: 782319 - RNA, 22 nt, Human
agcugcccuguggggaggguug

SEQ ID NO: 782320 - RNA, 22 nt, Human
auucugaguccaugggggcagg

SEQ ID NO: 782321 - RNA, 23 nt, Human
acuauaaaguuguucugauuuac

SEQ ID NO: 782322 - RNA, 22 nt, Human
uggaaggaagccaaggaagguu

SEQ ID NO: 782323 - RNA, 22 nt, Human
gcucaggaucagccaccucuuu

SEQ ID NO: 782324 - RNA, 22 nt, Human
ucagagaggcaauacuguuuaa

SEQ ID NO: 782325 - RNA, 22 nt, Human
uggcagcuccuggggccagcac

SEQ ID NO: 782326 - RNA, 22 nt, Human
agauggagaaugacaauuaagg

SEQ ID NO: 782327 - RNA, 22 nt, Human
cucaggauagcugcgcagccug

SEQ ID NO: 782328 - RNA, 22 nt, Human
augcaucuauucccaagggcag

SEQ ID NO: 782329 - RNA, 22 nt, Human
aaaaugaugcuguaauuuggca

SEQ ID NO: 782330 - RNA, 22 nt, Human
aguccaaggagagacagcauuu

SEQ ID NO: 782331 - RNA, 22 nt, Human
augcuguguccuagugaaagaa

SEQ ID NO: 782332 - RNA, 22 nt, Human
uauagccauuuccaguggcauc

SEQ ID NO: 782333 - RNA, 22 nt, Human
augcugugaaaaagaaggcuga

SEQ ID NO: 782334 - RNA, 22 nt, Human
gcuggcagggacagcugcgugu

SEQ ID NO: 782335 - RNA, 21 nt, Human
cacucaggguaugugccaggc

SEQ ID NO: 782336 - RNA, 22 nt, Human
guuuucugauuagcaaaucuga

SEQ ID NO: 782337 - RNA, 23 nt, Human
uuccagaguccacaucugccacc

SEQ ID NO: 782338 - RNA, 22 nt, Human
cuacccagcaccuaggcugccu

SEQ ID NO: 782339 - RNA, 22 nt, Human
aggcagcuuucagugucucuca

SEQ ID NO: 782340 - RNA, 22 nt, Human
ugaacucgggaggaggcugcag

SEQ ID NO: 782341 - RNA, 22 nt, Human
acauuuuuauucaucaaagcag

SEQ ID NO: 782342 - RNA, 22 nt, Human
gggcagcucggaagugggaaag

SEQ ID NO: 782343 - RNA, 22 nt, Human
ugcuggguagaaguauuagucu

SEQ ID NO: 782344 - RNA, 18 nt, Human
gaugggagcaagagaaga

SEQ ID NO: 782345 - RNA, 22 nt, Human
cagcuuccauaagagauggaga

SEQ ID NO: 782346 - RNA, 23 nt, Human
ggagugcaauggcgccaucucgg

SEQ ID NO: 782347 - RNA, 22 nt, Human
uuugcaguagacaucuuauuuu

SEQ ID NO: 782348 - RNA, 22 nt, Human
ucuucacauggaacaugaagcu

SEQ ID NO: 782349 - RNA, 22 nt, Human
acaauacaggcuucuggacuua

SEQ ID NO: 782350 - RNA, 22 nt, Human
ucacuguugaccuggaaguggg

SEQ ID NO: 782351 - RNA, 22 nt, Human
cugcuguguggauucaauggcu

SEQ ID NO: 782352 - RNA, 22 nt, Human
aguggaccagaagacugaagcu

SEQ ID NO: 782353 - RNA, 22 nt, Human
uccaggagcauccaggugaagc

SEQ ID NO: 782354 - RNA, 22 nt, Human
ccucaggaaccacauugcugcu

SEQ ID NO: 782355 - RNA, 22 nt, Human
ggagguggcagagggacauucu

SEQ ID NO: 782356 - RNA, 22 nt, Human
ugcuucagaggaaaggcaaaag

SEQ ID NO: 782357 - RNA, 22 nt, Human
gagguggucgaggagggguacc

SEQ ID NO: 782358 - RNA, 22 nt, Human
uccauguguuuuccuguccaca

SEQ ID NO: 782359 - RNA, 22 nt, Human
gagaggaguuacuauuuccgag

SEQ ID NO: 782360 - RNA, 22 nt, Human
agccagcuguucuggggcagca

SEQ ID NO: 782361 - RNA, 18 nt, Human
gcaggagauggguggggu

SEQ ID NO: 782362 - RNA, 22 nt, Human
aaaggccaauaaagacaagcug

SEQ ID NO: 782363 - RNA, 22 nt, Human
cacugucuuuugugaagacaau

SEQ ID NO: 782364 - RNA, 22 nt, Human
agaccauagggaccucagguug

SEQ ID NO: 782365 - RNA, 22 nt, Human
uucugagguccaugcaguacug

SEQ ID NO: 782366 - RNA, 20 nt, Human
uugauucaagggcugaugga

SEQ ID NO: 782367 - RNA, 21 nt, Human
ugaggcaggggugcuuuuguc

SEQ ID NO: 782368 - RNA, 22 nt, Human
cugcccagaagccagaugggca

SEQ ID NO: 782369 - RNA, 22 nt, Human
aauauuguuucaagaucacaga

SEQ ID NO: 782370 - RNA, 22 nt, Human
gucaggauuuuaaaaucccagu

SEQ ID NO: 782371 - RNA, 22 nt, Human
ccuugcauauauuauaucuuug

SEQ ID NO: 782372 - RNA, 22 nt, Human
uugcagcuucuaccacuguuuc

SEQ ID NO: 782373 - RNA, 22 nt, Human
ugaggcagugauguuuaagcac

SEQ ID NO: 782374 - RNA, 22 nt, Human
uuucaugaggggcaaaaucuca

SEQ ID NO: 782375 - RNA, 22 nt, Human
uuccaugacaccgagggaaguc

SEQ ID NO: 782376 - RNA, 22 nt, Human
uucucugagauagacuaagugg

SEQ ID NO: 782377 - RNA, 23 nt, Human
acagacaacacugaugagagaaa

SEQ ID NO: 782378 - RNA, 22 nt, Human
ugaguuuugucuugcuagaagu

SEQ ID NO: 782379 - RNA, 21 nt, Human
auucugaguugucagucuuca

SEQ ID NO: 782380 - RNA, 22 nt, Human
caaggccaugagcagcgagugu

SEQ ID NO: 782381 - RNA, 19 nt, Human
uauggcaggccgaggcacu

SEQ ID NO: 782382 - RNA, 22 nt, Human
cagagcagucuggagauccagc

SEQ ID NO: 782383 - RNA, 22 nt, Human
acagucuugagcaucagccaga

SEQ ID NO: 782384 - RNA, 18 nt, Human
ggcagcuugacuagcaac

SEQ ID NO: 782385 - RNA, 22 nt, Human
cagcugacagugaggugggggc

SEQ ID NO: 782386 - RNA, 22 nt, Human
ugaaggaaugaguauacuguuu

SEQ ID NO: 782387 - RNA, 22 nt, Human
gcagaggagcaaguugcuacag

SEQ ID NO: 782388 - RNA, 19 nt, Human
uuugaaagaguuuuauugg

SEQ ID NO: 782389 - RNA, 22 nt, Human
guggcaggagagacacagccau

SEQ ID NO: 782390 - RNA, 22 nt, Human
cugcuguguuucacaccucugg

SEQ ID NO: 782391 - RNA, 22 nt, Human
aggcagcugaccacaguaugau

SEQ ID NO: 782392 - RNA, 22 nt, Human
gucugucuguuguugagaagca

SEQ ID NO: 782393 - RNA, 22 nt, Human
aaagauaauguuuccuuauucu

SEQ ID NO: 782394 - RNA, 22 nt, Human
ccccaggagauuugggagcaca

SEQ ID NO: 782395 - RNA, 22 nt, Human
aagaggagacuucagcaacuug

SEQ ID NO: 782396 - RNA, 22 nt, Human
cccaggaaugggaaggaggaau

SEQ ID NO: 782397 - RNA, 22 nt, Human
ucugagaggcaucugcacuucu

SEQ ID NO: 782398 - RNA, 21 nt, Human
acagcaagccuucacaugagu

SEQ ID NO: 782399 - RNA, 23 nt, Human
acauacauggagauaaagugaug

SEQ ID NO: 782400 - RNA, 22 nt, Human
agacaggaugcauacucuuggu

SEQ ID NO: 782401 - RNA, 22 nt, Human
agacaguguguguauauauggu

SEQ ID NO: 782402 - RNA, 22 nt, Human
ugcugaaauuagaacauugagg

SEQ ID NO: 782403 - RNA, 21 nt, Human
agaggcaggcauuaaguacac

SEQ ID NO: 782404 - RNA, 22 nt, Human
cuuuccaaugcauuuccaaugu

SEQ ID NO: 782405 - RNA, 19 nt, Human
gagcgcagagggcagggga

SEQ ID NO: 782406 - RNA, 22 nt, Human
cuccccagguucaggagguggg

SEQ ID NO: 782407 - RNA, 22 nt, Human
uuauacuaaaacgcauugaauu

SEQ ID NO: 782408 - RNA, 22 nt, Human
ccuucuucuguguggcccaaga

SEQ ID NO: 782409 - RNA, 22 nt, Human
aguacauauaguaauuuagcca

SEQ ID NO: 782410 - RNA, 22 nt, Human
guaggcagggcuguggggagaa

SEQ ID NO: 782411 - RNA, 22 nt, Human
cuucagaauccagaaucagaau

SEQ ID NO: 782412 - RNA, 22 nt, Human
cagcugccccgcuggcugacca

SEQ ID NO: 782413 - RNA, 22 nt, Human
cccaggauggggcugcaguuau

SEQ ID NO: 782414 - RNA, 22 nt, Human
aauagcucacugauuucucuuu

SEQ ID NO: 782415 - RNA, 20 nt, Human
agcuucuucugucuaauuuu

SEQ ID NO: 782416 - RNA, 22 nt, Human
ccucuucugcuucaggagcacu

SEQ ID NO: 782417 - RNA, 22 nt, Human
agauggagaccuuggaugaacu

SEQ ID NO: 782418 - RNA, 22 nt, Human
ugaugaaauguugaggcaguga

SEQ ID NO: 782419 - RNA, 22 nt, Human
aggcaccuugagagcaggagcu

SEQ ID NO: 782420 - RNA, 22 nt, Human
uauuuguauguguguacauaua

SEQ ID NO: 782421 - RNA, 22 nt, Human
uccaggagguugagugaguucc

SEQ ID NO: 782422 - RNA, 22 nt, Human
auguucuuccaaaucuguaaca

SEQ ID NO: 782423 - RNA, 22 nt, Human
gucaggauuuacaaacuucagu

SEQ ID NO: 782424 - RNA, 22 nt, Human
auuuguugcuagcagcacugau

SEQ ID NO: 782425 - RNA, 22 nt, Human
aggcaggcucaaugcccagucu

SEQ ID NO: 782426 - RNA, 22 nt, Human
uuccaugaaauguguuaugcuu

SEQ ID NO: 782427 - RNA, 22 nt, Human
ucaggauggcuucugcaucaaa

SEQ ID NO: 782428 - RNA, 23 nt, Human
uuucaaauuacucugcagaugac

SEQ ID NO: 782429 - RNA, 22 nt, Human
auuucacucauucauguuacuu

SEQ ID NO: 782430 - RNA, 22 nt, Human
gggcaguuuauucuagaugguu

SEQ ID NO: 782431 - RNA, 22 nt, Human
ggcagcuaguuuaagaaagagg

SEQ ID NO: 782432 - RNA, 23 nt, Human
guaaaauacgcagugcaguguga

SEQ ID NO: 782433 - RNA, 22 nt, Human
cugcuuugacuguuaagaacca

SEQ ID NO: 782434 - RNA, 22 nt, Human
aagugagugguaaggagcaugg

SEQ ID NO: 782435 - RNA, 22 nt, Human
gcaggagagucugugccagguu

SEQ ID NO: 782436 - RNA, 22 nt, Human
uguccucagauaugucuacucu

SEQ ID NO: 782437 - RNA, 22 nt, Human
caagauggacauaaggagagaa

SEQ ID NO: 782438 - RNA, 22 nt, Human
cugcugugauugggagaaaccg

SEQ ID NO: 782439 - RNA, 22 nt, Human
aguaccaugcuuccugacuggu

SEQ ID NO: 782440 - RNA, 22 nt, Human
uggagacugugcuaagggaguu

SEQ ID NO: 782441 - RNA, 22 nt, Human
cagaaauguacugacaugcagu

SEQ ID NO: 782442 - RNA, 22 nt, Human
gauguagagggaagauuuuaaa

SEQ ID NO: 782443 - RNA, 22 nt, Human
gaagcagcaaguauaggacagg

SEQ ID NO: 782444 - RNA, 22 nt, Human
gagaggcaggcgcugcaauggu

SEQ ID NO: 782445 - RNA, 22 nt, Human
uucugugaaucuuuuuucccac

SEQ ID NO: 782446 - RNA, 22 nt, Human
aaggaaccauuugugugcaugg

SEQ ID NO: 782447 - RNA, 22 nt, Human
ggcuuggaccagucacaguggu

SEQ ID NO: 782448 - RNA, 22 nt, Human
uuuagaaguucacacauuuaaa

SEQ ID NO: 782449 - RNA, 17 nt, Human
gaggacagggaaguagg

SEQ ID NO: 782450 - RNA, 22 nt, Human
uccaggagcucauccacgucaa

SEQ ID NO: 782451 - RNA, 22 nt, Human
gcugcugucagugguggcaguu

SEQ ID NO: 782452 - RNA, 21 nt, Human
gagacagcccagugccagggc

SEQ ID NO: 782453 - RNA, 22 nt, Human
uugaacugguaguuggaaaucu

SEQ ID NO: 782454 - RNA, 22 nt, Human
gcagcuucaguaggugaagaca

SEQ ID NO: 782455 - RNA, 22 nt, Human
uugcugaaguuaaugcuugcaa

SEQ ID NO: 782456 - RNA, 21 nt, Human
agacaguaacucuucuacucc

SEQ ID NO: 782457 - RNA, 22 nt, Human
ugaaagcagcaccaauaccauu

SEQ ID NO: 782458 - RNA, 22 nt, Human
cucaggaucgcuugcccuaggg

SEQ ID NO: 782459 - RNA, 22 nt, Human
caguucuuaauaccaugugguu

SEQ ID NO: 782460 - RNA, 22 nt, Human
gugcauuugacgaauacucacu

SEQ ID NO: 782461 - RNA, 22 nt, Human
auagucuuagaucagauaaagu

SEQ ID NO: 782462 - RNA, 22 nt, Human
ucccaggaaggauucggcauuu

SEQ ID NO: 782463 - RNA, 22 nt, Human
aggguaggaacugaguggaagg

SEQ ID NO: 782464 - RNA, 22 nt, Human
ucaggagaaaauaucaggaagu

SEQ ID NO: 782465 - RNA, 22 nt, Human
uucaaacaguguagaauauaug

SEQ ID NO: 782466 - RNA, 22 nt, Human
caggcagcugggucaccguccc

SEQ ID NO: 782467 - RNA, 18 nt, Human
cucaccauucugcccaau

SEQ ID NO: 782468 - RNA, 22 nt, Human
ugcccaggcuggaaugcagugg

SEQ ID NO: 782469 - RNA, 22 nt, Human
cugcuguggccagccaggucaa

SEQ ID NO: 782470 - RNA, 22 nt, Human
uaucuaaauggaauauuccaga

SEQ ID NO: 782471 - RNA, 22 nt, Human
gauguuucaugcuagcaugugu

SEQ ID NO: 782472 - RNA, 21 nt, Human
aggcagcaggauccagggaca

SEQ ID NO: 782473 - RNA, 22 nt, Human
gaggcagcggcucacagagaaa

SEQ ID NO: 782474 - RNA, 22 nt, Human
gcugcccaggguggagccggcu

SEQ ID NO: 782475 - RNA, 22 nt, Human
gagaggugaaggcugcccuggg

SEQ ID NO: 782476 - RNA, 22 nt, Human
gaauagcuuccuuuuuuccaaa

SEQ ID NO: 782477 - RNA, 22 nt, Human
gcagcugccuucagcuggaugg

SEQ ID NO: 782478 - RNA, 21 nt, Human
cccaggaggcugagaagagca

SEQ ID NO: 782479 - RNA, 19 nt, Human
aucugccuguuaucacaua

SEQ ID NO: 782480 - RNA, 20 nt, Human
augauuuugcacuaacuuca

SEQ ID NO: 782481 - RNA, 23 nt, Human
cuugcaggaagcagauggcacac

SEQ ID NO: 782482 - RNA, 22 nt, Human
cauuuguauguuccuccuuagg

SEQ ID NO: 782483 - RNA, 22 nt, Human
gcagagcuucuguccuucagga

SEQ ID NO: 782484 - RNA, 22 nt, Human
aguguuugagacacauuucacu

SEQ ID NO: 782485 - RNA, 19 nt, Human
aggcagcaggccagggaug

SEQ ID NO: 782486 - RNA, 23 nt, Human
uggcaaggaaugggauggagacu

SEQ ID NO: 782487 - RNA, 22 nt, Human
caggcagccugagggaucuggg

SEQ ID NO: 782488 - RNA, 22 nt, Human
gucauauacacugcauguaauc

SEQ ID NO: 782489 - RNA, 22 nt, Human
uacacacagaggccaugggauu

SEQ ID NO: 782490 - RNA, 20 nt, Human
gaugggaaucggagcuggua

SEQ ID NO: 782491 - RNA, 22 nt, Human
cagagccauuauggagacuugc

SEQ ID NO: 782492 - RNA, 22 nt, Human
acuuuugguucuguaacuguga

SEQ ID NO: 782493 - RNA, 22 nt, Human
agucucuuccuucaaggcuggu

SEQ ID NO: 782494 - RNA, 22 nt, Human
ccuugcugcgugcuagcacaga

SEQ ID NO: 782495 - RNA, 22 nt, Human
accaggagccacaggaggagcc

SEQ ID NO: 782496 - RNA, 22 nt, Human
ucaggauguuaauauagcauua

SEQ ID NO: 782497 - RNA, 22 nt, Human
ugcuucugggcaaaugugugug

SEQ ID NO: 782498 - RNA, 22 nt, Human
gauuucuucauuuguggugaau

SEQ ID NO: 782499 - RNA, 22 nt, Human
aaggcagccuuuugaguugauu

SEQ ID NO: 782500 - RNA, 22 nt, Human
cuaaucaucuuucucuuaaagc

SEQ ID NO: 782501 - RNA, 22 nt, Human
uacuuccuguuuccaugucugu

SEQ ID NO: 782502 - RNA, 22 nt, Human
gcugcuguugauuuaguccaau

SEQ ID NO: 782503 - RNA, 22 nt, Human
agcugcccuuuaugaugcugaa

SEQ ID NO: 782504 - RNA, 22 nt, Human
ucaucucaaaacccaaggggca

SEQ ID NO: 782505 - RNA, 22 nt, Human
cagcuccugaggacugcuggga

SEQ ID NO: 782506 - RNA, 20 nt, Human
cugcugugauucccuccucc

SEQ ID NO: 782507 - RNA, 22 nt, Human
ccugcuguucuguuuagugaac

SEQ ID NO: 782508 - RNA, 22 nt, Human
ucugcugugauuugcuaccugu

SEQ ID NO: 782509 - RNA, 18 nt, Human
agucuucugauccauuuu

SEQ ID NO: 782510 - RNA, 22 nt, Human
agagguagagguugcagugagc

SEQ ID NO: 782511 - RNA, 22 nt, Human
acugccauuggucaaaugagug

SEQ ID NO: 782512 - RNA, 22 nt, Human
uuguuuuaucuuucuacagacu

SEQ ID NO: 782513 - RNA, 22 nt, Human
aauaucagcacuuuugugguau

SEQ ID NO: 782514 - RNA, 22 nt, Human
ccaggaaaauaccaagcuuuaa

SEQ ID NO: 782515 - RNA, 22 nt, Human
cauuuguagcuauuuacuguau

SEQ ID NO: 782516 - RNA, 22 nt, Human
ugugugucagagucuccauggu

SEQ ID NO: 782517 - RNA, 22 nt, Human
aggagcagaauuuaaugugcag

SEQ ID NO: 782518 - RNA, 22 nt, Human
aauauaaugcuguuuuaugcca

SEQ ID NO: 782519 - RNA, 22 nt, Human
uuacaagcagcuacauaucaca

SEQ ID NO: 782520 - RNA, 22 nt, Human
cugcugugggcaggguagcugg

SEQ ID NO: 782521 - RNA, 22 nt, Human
uagcucuucauuucaucugauu

SEQ ID NO: 782522 - RNA, 22 nt, Human
ccucagaugucuuaaggcacug

SEQ ID NO: 782523 - RNA, 22 nt, Human
agggcagcacaaggcauggacu

SEQ ID NO: 782524 - RNA, 22 nt, Human
uaaugucaaggugauagauuug

SEQ ID NO: 782525 - RNA, 22 nt, Human
uugcauuuccuguacuguuuga

SEQ ID NO: 782526 - RNA, 22 nt, Human
ucugcugucacucauuugcuuc

SEQ ID NO: 782527 - RNA, 22 nt, Human
uauuuuaucugccagaguggag

SEQ ID NO: 782528 - RNA, 22 nt, Human
acaauguguuuuuauacauuug

SEQ ID NO: 782529 - RNA, 22 nt, Human
aaggcagcaacuaauggaucuc

SEQ ID NO: 782530 - RNA, 22 nt, Human
gauugaaacauaggcagucgag

SEQ ID NO: 782531 - RNA, 22 nt, Human
caagaugugccuaaucagaccu

SEQ ID NO: 782532 - RNA, 21 nt, Human
uuucacaaaaguaugugacaa

SEQ ID NO: 782533 - RNA, 22 nt, Human
augcuguguuugagaaccuagg

SEQ ID NO: 782534 - RNA, 22 nt, Human
ccaggagaaugggauuacccua

SEQ ID NO: 782535 - RNA, 22 nt, Human
agucucugcugguugugccuau

SEQ ID NO: 782536 - RNA, 21 nt, Human
ggagggcagcccagacuggcu

SEQ ID NO: 782537 - RNA, 22 nt, Human
gaagcagcuggugagauggagc

SEQ ID NO: 782538 - RNA, 22 nt, Human
uaaggccagccagcaaaucugu

SEQ ID NO: 782539 - RNA, 18 nt, Human
uugcuuuguaagcuugca

SEQ ID NO: 782540 - RNA, 22 nt, Human
cauuuguacagaacagcuuuau

SEQ ID NO: 782541 - RNA, 22 nt, Human
gccaggagugucccacucauuu

SEQ ID NO: 782542 - RNA, 19 nt, Human
ugcuagaaauucugugacu

SEQ ID NO: 782543 - RNA, 22 nt, Human
aaguauaagcuauucuucauga

SEQ ID NO: 782544 - RNA, 22 nt, Human
uuaaauuuuagaaacagacucu

SEQ ID NO: 782545 - RNA, 22 nt, Human
auccaugauuaguaggauaaag

SEQ ID NO: 782546 - RNA, 22 nt, Human
caggauggccccggggcugugc

SEQ ID NO: 782547 - RNA, 22 nt, Human
aaaccgcaauuacuuuugcguc

SEQ ID NO: 782548 - RNA, 22 nt, Human
acccaggaugauaauguucaca

SEQ ID NO: 782549 - RNA, 22 nt, Human
augcuuuuccaggagaaauaua

SEQ ID NO: 782550 - RNA, 21 nt, Human
aggcagcuggaaggccuggcu

SEQ ID NO: 782551 - RNA, 22 nt, Human
ugaggcaggaguuaaugugcuc

SEQ ID NO: 782552 - RNA, 22 nt, Human
cugccaggcgauggauuggcug

SEQ ID NO: 782553 - RNA, 22 nt, Human
uggcagucuggguuggcaguua

SEQ ID NO: 782554 - RNA, 22 nt, Human
gguuauauaauucagugcuuuc

SEQ ID NO: 782555 - RNA, 22 nt, Human
uggcagcucccagagcuuccaa

SEQ ID NO: 782556 - RNA, 22 nt, Human
gauuucuugaccccugucucag

SEQ ID NO: 782557 - RNA, 22 nt, Human
gcuccucugucaaaugagagug

SEQ ID NO: 782558 - RNA, 18 nt, Human
ugcuuggagcauuuacca

SEQ ID NO: 782559 - RNA, 22 nt, Human
aaggcagcccuggcucagccug

SEQ ID NO: 782560 - RNA, 22 nt, Human
gcccaggauggcuggaggugcu

SEQ ID NO: 782561 - RNA, 22 nt, Human
gcagagaacccagcagauuggc

SEQ ID NO: 782562 - RNA, 23 nt, Human
auguuauuauuagcagucuugcc

SEQ ID NO: 782563 - RNA, 22 nt, Human
aaggccaacuaggaugagcuag

SEQ ID NO: 782564 - RNA, 22 nt, Human
cuggcaguguccagcucgugau

SEQ ID NO: 782565 - RNA, 22 nt, Human
caaggccaguuucuccuaguca

SEQ ID NO: 782566 - RNA, 22 nt, Human
gaggucaggcuugcagcagggu

SEQ ID NO: 782567 - RNA, 22 nt, Human
cagugauguuucugcaucagag

SEQ ID NO: 782568 - RNA, 22 nt, Human
cuguaugaggaucagacuggac

SEQ ID NO: 782569 - RNA, 22 nt, Human
ucccaggaugugcgugccgccg

SEQ ID NO: 782570 - RNA, 22 nt, Human
ugagccuguccugugcauguga

SEQ ID NO: 782571 - RNA, 22 nt, Human
gagguagcgaguggacagugca

SEQ ID NO: 782572 - RNA, 22 nt, Human
acuucaugcagaagagagcugu

SEQ ID NO: 782573 - RNA, 22 nt, Human
aaauuguugaucuacaguaagg

SEQ ID NO: 782574 - RNA, 22 nt, Human
ugaggcaggagaaucaccggaa

SEQ ID NO: 782575 - RNA, 22 nt, Human
uccaugaggaccaaauucguag

SEQ ID NO: 782576 - RNA, 22 nt, Human
cccaggagguuggggcuacagu

SEQ ID NO: 782577 - RNA, 22 nt, Human
gaaauauuacaguggaggggau

SEQ ID NO: 782578 - RNA, 22 nt, Human
augcuguggaugccuugcccca

SEQ ID NO: 782579 - RNA, 22 nt, Human
cuacagacccaccuuggaagaa

SEQ ID NO: 782580 - RNA, 20 nt, Human
acaggggcagcacaauaaug

SEQ ID NO: 782581 - RNA, 22 nt, Human
aguucucagcuuaguaugcugu

SEQ ID NO: 782582 - RNA, 22 nt, Human
agaggggacagccaccugcccg

SEQ ID NO: 782583 - RNA, 22 nt, Human
cagcuggcuggucagugcacaa

SEQ ID NO: 782584 - RNA, 22 nt, Human
cugcugugagcacuccagccug

SEQ ID NO: 782585 - RNA, 22 nt, Human
ccaggauggggagcagauagaa

SEQ ID NO: 782586 - RNA, 19 nt, Human
ucauuguugguuugucggg

SEQ ID NO: 782587 - RNA, 20 nt, Human
cugcugugugugccucagcc

SEQ ID NO: 782588 - RNA, 22 nt, Human
ggaggaugccaagcugugcaca

SEQ ID NO: 782589 - RNA, 22 nt, Human
gccaggagaaugcuagcagagg

SEQ ID NO: 782590 - RNA, 22 nt, Human
uguugaagauaaaguucucauu

SEQ ID NO: 782591 - RNA, 22 nt, Human
agcaccugucacaagcagaagg

SEQ ID NO: 782592 - RNA, 22 nt, Human
gcccaggaggcagagguugugg

SEQ ID NO: 782593 - RNA, 22 nt, Human
agacagguaaauagagaugcug

SEQ ID NO: 782594 - RNA, 22 nt, Human
uuuugugagcccauaaaugcca

SEQ ID NO: 782595 - RNA, 22 nt, Human
aucaggaugacuauaaggcugc

SEQ ID NO: 782596 - RNA, 22 nt, Human
aaguccaugaucaagauguggc

SEQ ID NO: 782597 - RNA, 19 nt, Human
caggaaggggcgaaucugg

SEQ ID NO: 782598 - RNA, 22 nt, Human
ucugucuucaucagcaugugau

SEQ ID NO: 782599 - RNA, 22 nt, Human
cugcugugcacccaggaaggcu

SEQ ID NO: 782600 - RNA, 22 nt, Human
gucuccugagccuugacugcaa

SEQ ID NO: 782601 - RNA, 22 nt, Human
aaauguuuugcucccauguggu

SEQ ID NO: 782602 - RNA, 22 nt, Human
gcuuugaagacuuuuccagggu

SEQ ID NO: 782603 - RNA, 16 nt, Human
auuuccagauuaugca

SEQ ID NO: 782604 - RNA, 23 nt, Human
acagaaaguucugcuggacagag

SEQ ID NO: 782605 - RNA, 22 nt, Human
uuucuucagccuucacaaccug

SEQ ID NO: 782606 - RNA, 22 nt, Human
uggcaaggcugugggggcagag

SEQ ID NO: 782607 - RNA, 22 nt, Human
gauuuuauuagcccaaacuuug

SEQ ID NO: 782608 - RNA, 22 nt, Human
uuuguaugugauaagacuauuc

SEQ ID NO: 782609 - RNA, 16 nt, Human
ccccaggacuuggcac

SEQ ID NO: 782610 - RNA, 22 nt, Human
agggagcucuaaguagagggac

SEQ ID NO: 782611 - RNA, 22 nt, Human
auuggcagaaacagcagggcca

SEQ ID NO: 782612 - RNA, 22 nt, Human
aagcagagcaagcguauuuauu

SEQ ID NO: 782613 - RNA, 22 nt, Human
uaauaucuacuucauagaguuu

SEQ ID NO: 782614 - RNA, 19 nt, Human
gaggcgaggcgugcaggag

SEQ ID NO: 782615 - RNA, 22 nt, Human
ggagaggagauuguggcauuuu

SEQ ID NO: 782616 - RNA, 22 nt, Human
uuuacuuuugguaaggucauuu

SEQ ID NO: 782617 - RNA, 22 nt, Human
cuuugaauugccguuucaucug

SEQ ID NO: 782618 - RNA, 22 nt, Human
aaguggacuaauacaaggacua

SEQ ID NO: 782619 - RNA, 22 nt, Human
auacacauauguguguauaugu

SEQ ID NO: 782620 - RNA, 19 nt, Human
auacagauguauccaugau

SEQ ID NO: 782621 - RNA, 22 nt, Human
uugcagcugcaguaaauguuca

SEQ ID NO: 782622 - RNA, 22 nt, Human
gcagcuaccacccaggaaggac

SEQ ID NO: 782623 - RNA, 22 nt, Human
agaaguuguagguuugcauauu

SEQ ID NO: 782624 - RNA, 22 nt, Human
uuauuucauguaaaauuuaugu

SEQ ID NO: 782625 - RNA, 22 nt, Human
gaagcacauggcuauagcuauu

SEQ ID NO: 782626 - RNA, 22 nt, Human
ugcauaguucuccuuccuccuc

SEQ ID NO: 782627 - RNA, 22 nt, Human
ccuucauugcaucuuuaagaga

SEQ ID NO: 782628 - RNA, 22 nt, Human
cccaggagguagagguugcagu

SEQ ID NO: 782629 - RNA, 22 nt, Human
gggcagcugucuugguucucaa

SEQ ID NO: 782630 - RNA, 20 nt, Human
uuuuccagaaaguaucauug

SEQ ID NO: 782631 - RNA, 22 nt, Human
gaccauuucuaggaaucagacu

SEQ ID NO: 782632 - RNA, 22 nt, Human
auuuccagugcacugaauagaa

SEQ ID NO: 782633 - RNA, 22 nt, Human
ggaggugggcuaaggacucucu

SEQ ID NO: 782634 - RNA, 20 nt, Human
gaagcagcuucauguagaca

SEQ ID NO: 782635 - RNA, 22 nt, Human
uucaucaauguguuuaauaaug

SEQ ID NO: 782636 - RNA, 22 nt, Human
gucugucucccugugacugaga

SEQ ID NO: 782637 - RNA, 22 nt, Human
uuuaaauuuagaagaaacacug

SEQ ID NO: 782638 - RNA, 22 nt, Human
auuaaauuggacgcugggggaa

SEQ ID NO: 782639 - RNA, 22 nt, Human
aggagcagcuucugaaccaugu

SEQ ID NO: 782640 - RNA, 22 nt, Human
cacagcauaaugaaauauacuu

SEQ ID NO: 782641 - RNA, 22 nt, Human
aggcagccaaucagaggcugac

SEQ ID NO: 782642 - RNA, 22 nt, Human
ggagaggagcuauugggggcuc

SEQ ID NO: 782643 - RNA, 22 nt, Human
auguuucaaugcacuuuagccu

SEQ ID NO: 782644 - RNA, 22 nt, Human
ucgagcucuggagccaaggaug

SEQ ID NO: 782645 - RNA, 21 nt, Human
uucucagagucuauuacaguu

SEQ ID NO: 782646 - RNA, 22 nt, Human
ucccaggaagaucccagggacc

SEQ ID NO: 782647 - RNA, 22 nt, Human
ugaaaugaagggcuuguucugg

SEQ ID NO: 782648 - RNA, 22 nt, Human
guucuucagucacaucacagaa

SEQ ID NO: 782649 - RNA, 22 nt, Human
ucauuuaauagcuuuugucuuu

SEQ ID NO: 782650 - RNA, 18 nt, Human
gugcugugggcaguggcc

SEQ ID NO: 782651 - RNA, 22 nt, Human
ccccaggacacauggaccaagu

SEQ ID NO: 782652 - RNA, 22 nt, Human
uucuucaacaaggacacuguua

SEQ ID NO: 782653 - RNA, 18 nt, Human
aggcaggugcuggaaguc

SEQ ID NO: 782654 - RNA, 22 nt, Human
cuggcuguauuaguuugauccu

SEQ ID NO: 782655 - RNA, 22 nt, Human
uucaggauuguguuuuuccuga

SEQ ID NO: 782656 - RNA, 21 nt, Human
augucaaaugcuuuauuuuau

SEQ ID NO: 782657 - RNA, 22 nt, Human
augcuguggaaguuccugaagc

SEQ ID NO: 782658 - RNA, 22 nt, Human
auucuucacaccuguuccuguu

SEQ ID NO: 782659 - RNA, 22 nt, Human
aguugcagacgcagagauguug

SEQ ID NO: 782660 - RNA, 22 nt, Human
ggacagcucugccaggagcuca

SEQ ID NO: 782661 - RNA, 22 nt, Human
gcugccagcuuuccuuggcuga

SEQ ID NO: 782662 - RNA, 22 nt, Human
augaaggcaguuaaacgucauc

SEQ ID NO: 782663 - RNA, 22 nt, Human
aggcaguuuaggcagcgauuua

SEQ ID NO: 782664 - RNA, 22 nt, Human
cuuugcaaacgauuaccacaug

SEQ ID NO: 782665 - RNA, 22 nt, Human
guccaugauucuguguaguaga

SEQ ID NO: 782666 - RNA, 22 nt, Human
uuucacauuuaggcgugaauug

SEQ ID NO: 782667 - RNA, 22 nt, Human
accauuuuggguauuuucagag

SEQ ID NO: 782668 - RNA, 22 nt, Human
aggcagcuuucuguaggggugu

SEQ ID NO: 782669 - RNA, 23 nt, Human
uucuucucaauuaguugauucag

SEQ ID NO: 782670 - RNA, 22 nt, Human
gaaaggugccccauaggcagga

SEQ ID NO: 782671 - RNA, 22 nt, Human
aaaauacuguggaguguugaaa

SEQ ID NO: 782672 - RNA, 22 nt, Human
uccacauccauugcuugacuuu

SEQ ID NO: 782673 - RNA, 22 nt, Human
ggcagcacugcagcuuguuggg

SEQ ID NO: 782674 - RNA, 22 nt, Human
uuucacagguacaaacacuccu

SEQ ID NO: 782675 - RNA, 22 nt, Human
ucagugcacagagauuuuuguu

SEQ ID NO: 782676 - RNA, 22 nt, Human
gucaggaucucccaguacauau

SEQ ID NO: 782677 - RNA, 22 nt, Human
ccucuucuaggacguccuugug

SEQ ID NO: 782678 - RNA, 22 nt, Human
ucccaggacuuccaguuggagg

SEQ ID NO: 782679 - RNA, 22 nt, Human
agcuucccaagguuggaagguu

SEQ ID NO: 782680 - RNA, 22 nt, Human
ugaggcaggacuugcauaaagu

SEQ ID NO: 782681 - RNA, 22 nt, Human
aaugagacacgugaagcagaug

SEQ ID NO: 782682 - RNA, 23 nt, Human
agaugaggcuucuccauguuggu

SEQ ID NO: 782683 - RNA, 22 nt, Human
caaggccauauugccuguaugu

SEQ ID NO: 782684 - RNA, 22 nt, Human
guucuucaggccauccucccag

SEQ ID NO: 782685 - RNA, 22 nt, Human
uaaaaugaucucucauguucuu

SEQ ID NO: 782686 - RNA, 22 nt, Human
auaucaguaucuauguauuugu

SEQ ID NO: 782687 - RNA, 22 nt, Human
cccuuagcucaauuucuugccc

SEQ ID NO: 782688 - RNA, 22 nt, Human
ugccugugguuccaguuuuuuc

SEQ ID NO: 782689 - RNA, 22 nt, Human
aggagagggguaggauuaauuu

SEQ ID NO: 782690 - RNA, 22 nt, Human
gcagagaagaugcccaggcuuc

SEQ ID NO: 782691 - RNA, 21 nt, Human
ucacuagugccuucugucauu

SEQ ID NO: 782692 - RNA, 22 nt, Human
aaauauagugacacuuauaguc

SEQ ID NO: 782693 - RNA, 21 nt, Human
ucugagagcaacugcccuuua

SEQ ID NO: 782694 - RNA, 23 nt, Human
aaauuauugcucuucaauugccu

SEQ ID NO: 782695 - RNA, 22 nt, Human
uuugaauguuuuagguacuuaa

SEQ ID NO: 782696 - RNA, 22 nt, Human
guugaaagaucauguggcugcc

SEQ ID NO: 782697 - RNA, 22 nt, Human
ugguaaauauguccauucucuu

SEQ ID NO: 782698 - RNA, 19 nt, Human
ugcaagcuuuuucuuguua

SEQ ID NO: 782699 - RNA, 22 nt, Human
ggaggaggggcgcuuugucuau

SEQ ID NO: 782700 - RNA, 22 nt, Human
gugguaaucggauucuuaccgg

SEQ ID NO: 782701 - RNA, 22 nt, Human
uauuucagcaagaagaaugugg

SEQ ID NO: 782702 - RNA, 22 nt, Human
cugcuguguaucauuuuagaug

SEQ ID NO: 782703 - RNA, 22 nt, Human
uggagacucugcaucugugaca

SEQ ID NO: 782704 - RNA, 22 nt, Human
ucucaggaagauuagggcuaag

SEQ ID NO: 782705 - RNA, 23 nt, Human
uccugaggguuucccagccuugg

SEQ ID NO: 782706 - RNA, 22 nt, Human
gaggaggcuuccgggaggcacg

SEQ ID NO: 782707 - RNA, 22 nt, Human
gggaggugauggcaagcagcgg

SEQ ID NO: 782708 - RNA, 22 nt, Human
uuuuccagagcugucucuugca

SEQ ID NO: 782709 - RNA, 22 nt, Human
ugcauguguuugccacagugag

SEQ ID NO: 782710 - RNA, 22 nt, Human
uauuugcaacauaaaacucuga

SEQ ID NO: 782711 - RNA, 20 nt, Human
caucaucacaugagccaauu

SEQ ID NO: 782712 - RNA, 22 nt, Human
uuuccauguuggugaaaugagg

SEQ ID NO: 782713 - RNA, 23 nt, Human
agaggggagcaucugcuggcuga

SEQ ID NO: 782714 - RNA, 22 nt, Human
gggagacacgcugcaggcauaa

SEQ ID NO: 782715 - RNA, 22 nt, Human
gcagcuccuccugggcuggaga

SEQ ID NO: 782716 - RNA, 22 nt, Human
cauuuguuaaccaguguggauu

SEQ ID NO: 782717 - RNA, 22 nt, Human
ccuugcugaccaucaccuuuga

SEQ ID NO: 782718 - RNA, 22 nt, Human
ugucucugauaaguaguucagu

SEQ ID NO: 782719 - RNA, 22 nt, Human
aagcuggcaugucaccugagaa

SEQ ID NO: 782720 - RNA, 22 nt, Human
gugucccaggccucuggaauua

SEQ ID NO: 782721 - RNA, 22 nt, Human
uaaaugaagaaauggagauugu

SEQ ID NO: 782722 - RNA, 22 nt, Human
ucuuccucuagaucugaggccc

SEQ ID NO: 782723 - RNA, 22 nt, Human
uugaaagugccaaguccuagug

SEQ ID NO: 782724 - RNA, 22 nt, Human
uucuucuuuaucucaguauccu

SEQ ID NO: 782725 - RNA, 22 nt, Human
cccuggaggcaaagguugcagu

SEQ ID NO: 782726 - RNA, 22 nt, Human
ugaaggccucugguacaugcca

SEQ ID NO: 782727 - RNA, 22 nt, Human
aguauugugacucaaguauucu

SEQ ID NO: 782728 - RNA, 22 nt, Human
aauggccagcugggagaguuga

SEQ ID NO: 782729 - RNA, 22 nt, Human
gaggcagagaccuucaggaccu

SEQ ID NO: 782730 - RNA, 22 nt, Human
auuucccagcuuugaucaguuu

SEQ ID NO: 782731 - RNA, 22 nt, Human
aucaggauucaccccagagcug

SEQ ID NO: 782732 - RNA, 22 nt, Human
caaggccaguccauuuuggaag

SEQ ID NO: 782733 - RNA, 22 nt, Human
uguucuuuggcuucacagcucu

SEQ ID NO: 782734 - RNA, 22 nt, Human
cauucuuacacaauauuuuaau

SEQ ID NO: 782735 - RNA, 22 nt, Human
ucacauucucagcaucuauaca

SEQ ID NO: 782736 - RNA, 22 nt, Human
gaggagagccugcacuuugacc

SEQ ID NO: 782737 - RNA, 22 nt, Human
ucuucagagugaaagucuguga

SEQ ID NO: 782738 - RNA, 19 nt, Human
ugcccaggccagguugggc

SEQ ID NO: 782739 - RNA, 22 nt, Human
agagcagcuggggcagagacca

SEQ ID NO: 782740 - RNA, 22 nt, Human
uucacagaauggcaaguuaugg

SEQ ID NO: 782741 - RNA, 22 nt, Human
uuauuuacaacucuucucuucc

SEQ ID NO: 782742 - RNA, 22 nt, Human
guaaaauagaauaacguggcua

SEQ ID NO: 782743 - RNA, 22 nt, Human
ucuggcaggcaaucggcucugg

SEQ ID NO: 782744 - RNA, 22 nt, Human
agcagagguguuuauuauggga

SEQ ID NO: 782745 - RNA, 22 nt, Human
gcccaggaaagauagggccuca

SEQ ID NO: 782746 - RNA, 22 nt, Human
accgaaggaaacuggaaccguu

SEQ ID NO: 782747 - RNA, 20 nt, Human
aggcagcugggaaaugaggg

SEQ ID NO: 782748 - RNA, 19 nt, Human
gaggucagcaagaaguauu

SEQ ID NO: 782749 - RNA, 22 nt, Human
cccaggagauaacguucccaag

SEQ ID NO: 782750 - RNA, 22 nt, Human
caggacagcucaacaccuccuc

SEQ ID NO: 782751 - RNA, 22 nt, Human
cccaggaguuggaggcuacggu

SEQ ID NO: 782752 - RNA, 22 nt, Human
gucaggaugcuauuguuauuaa

SEQ ID NO: 782753 - RNA, 22 nt, Human
uuagcaucugcuguaagcuuau

SEQ ID NO: 782754 - RNA, 22 nt, Human
gcccaggaagccaccgggaagu

SEQ ID NO: 782755 - RNA, 18 nt, Human
cauuguacaaugcuuuau

SEQ ID NO: 782756 - RNA, 22 nt, Human
aaaaugagauacaguuugaaag

SEQ ID NO: 782757 - RNA, 22 nt, Human
aaggcagccagauccuuugggu

SEQ ID NO: 782758 - RNA, 22 nt, Human
ggcuuggaaauugcaggacaca

SEQ ID NO: 782759 - RNA, 22 nt, Human
uucugagacaauugagagucua

SEQ ID NO: 782760 - RNA, 22 nt, Human
aucaggaucacagaaacuuuua

SEQ ID NO: 782761 - RNA, 22 nt, Human
cauuugcagagggugacacucu

SEQ ID NO: 782762 - RNA, 22 nt, Human
ugaggcaggaaguuauauaaug

SEQ ID NO: 782763 - RNA, 20 nt, Human
cagaggcaaggagacuugga

SEQ ID NO: 782764 - RNA, 22 nt, Human
gcccaggaucugcucagaucau

SEQ ID NO: 782765 - RNA, 22 nt, Human
cugaaaauguuacacaggaaga

SEQ ID NO: 782766 - RNA, 22 nt, Human
acagcagcuugcgugucugguc

SEQ ID NO: 782767 - RNA, 22 nt, Human
ucucauugguauauacaugugu

SEQ ID NO: 782768 - RNA, 22 nt, Human
ucaaucacguguuccauguucu

SEQ ID NO: 782769 - RNA, 22 nt, Human
augcagcugucagggagaacau

SEQ ID NO: 782770 - RNA, 22 nt, Human
gcugcccagacauugaaucagg

SEQ ID NO: 782771 - RNA, 22 nt, Human
ucuuucaaugagcauucuuucc

SEQ ID NO: 782772 - RNA, 22 nt, Human
aggagcagaacugauucugacu

SEQ ID NO: 782773 - RNA, 22 nt, Human
uucaauucugcucugaucuuag

SEQ ID NO: 782774 - RNA, 22 nt, Human
cagaggcaggaagaugggcagu

SEQ ID NO: 782775 - RNA, 22 nt, Human
aaacugcugguugcuggccagc

SEQ ID NO: 782776 - RNA, 22 nt, Human
gaccuggaggauccucuucuug

SEQ ID NO: 782777 - RNA, 22 nt, Human
uggaaagucucuuuugacugua

SEQ ID NO: 782778 - RNA, 22 nt, Human
auuaaauuaaguggcuaauuua

SEQ ID NO: 782779 - RNA, 22 nt, Human
ugaaaugaaugugauucgauag

SEQ ID NO: 782780 - RNA, 16 nt, Human
aaggagggaagagaau

SEQ ID NO: 782781 - RNA, 22 nt, Human
gggcaguugauggaggucugga

SEQ ID NO: 782782 - RNA, 22 nt, Human
cccaggaaaugggcucuugccu

SEQ ID NO: 782783 - RNA, 22 nt, Human
ggaggggauuuaguagaugcua

SEQ ID NO: 782784 - RNA, 22 nt, Human
cagucuucuaaccuagcagccu

SEQ ID NO: 782785 - RNA, 22 nt, Human
ucacagacacagggagaagcau

SEQ ID NO: 782786 - RNA, 22 nt, Human
uuucuucauagaccuugucuug

SEQ ID NO: 782787 - RNA, 22 nt, Human
agaggccaugcuagaggccugg

SEQ ID NO: 782788 - RNA, 22 nt, Human
uuucacauaugguuguugauug

SEQ ID NO: 782789 - RNA, 22 nt, Human
aggcggcugguguccugcaggu

SEQ ID NO: 782790 - RNA, 22 nt, Human
cccaggagagggaaccaaaugu

SEQ ID NO: 782791 - RNA, 22 nt, Human
cagcugccccuccagggcuggg

SEQ ID NO: 782792 - RNA, 22 nt, Human
ucuucuucccaucccucaaaug

SEQ ID NO: 782793 - RNA, 22 nt, Human
uggagagguuuaaacaaaaguu

SEQ ID NO: 782794 - RNA, 22 nt, Human
gcucaggacuggaggagcgggg

SEQ ID NO: 782795 - RNA, 22 nt, Human
ugagauguaagguaugcuuacu

SEQ ID NO: 782796 - RNA, 22 nt, Human
caggcagcaucagucugcugua

SEQ ID NO: 782797 - RNA, 22 nt, Human
cuucucaguugcaagugucaga

SEQ ID NO: 782798 - RNA, 22 nt, Human
cucaggauguacuacagaaggc

SEQ ID NO: 782799 - RNA, 22 nt, Human
gaggagcuggcugucgggaggc

SEQ ID NO: 782800 - RNA, 22 nt, Human
gcagcugagagaagaacagggc

SEQ ID NO: 782801 - RNA, 22 nt, Human
ucagagagccucaggcacugcc

SEQ ID NO: 782802 - RNA, 22 nt, Human
gaggagaggggcucccaagagc

SEQ ID NO: 782803 - RNA, 22 nt, Human
cugcuguguggugaaacucagu

SEQ ID NO: 782804 - RNA, 22 nt, Human
auucaaguucuucugucuuugc

SEQ ID NO: 782805 - RNA, 22 nt, Human
uugaaagaggcaaaguuugauc

SEQ ID NO: 782806 - RNA, 17 nt, Human
gcgcagcuccuggcgcg

SEQ ID NO: 782807 - RNA, 22 nt, Human
uaaguucauaagcuuauucuua

SEQ ID NO: 782808 - RNA, 22 nt, Human
cuggguaaguuccuaaggcuca

SEQ ID NO: 782809 - RNA, 22 nt, Human
caggaaaggugugucaugaugg

SEQ ID NO: 782810 - RNA, 18 nt, Human
gagucuuuguuacugcug

SEQ ID NO: 782811 - RNA, 19 nt, Human
uguguguuuauauauguau

SEQ ID NO: 782812 - RNA, 22 nt, Human
aggggaugauccucccgcagcg

SEQ ID NO: 782813 - RNA, 20 nt, Human
auccaugagagucuggauuc

SEQ ID NO: 782814 - RNA, 22 nt, Human
acuggcaggcugcuggccggcg

SEQ ID NO: 782815 - RNA, 22 nt, Human
gaggauggaggugugagcuaug

SEQ ID NO: 782816 - RNA, 19 nt, Human
caagugaagccugggaugg

SEQ ID NO: 782817 - RNA, 22 nt, Human
gcagggaagacccggagcagcg

SEQ ID NO: 782818 - RNA, 22 nt, Human
ugcauggaggaagaugaaugca

SEQ ID NO: 782819 - RNA, 22 nt, Human
acauuuaaauaccuauguuucu

SEQ ID NO: 782820 - RNA, 20 nt, Human
uguuaaaggacacuugcuuu

SEQ ID NO: 782821 - RNA, 22 nt, Human
ugaaggcccagccacagaaugg

SEQ ID NO: 782822 - RNA, 22 nt, Human
caugugguucaaguacuccaca

SEQ ID NO: 782823 - RNA, 22 nt, Human
ggaccuggcaauuugcaucucu

SEQ ID NO: 782824 - RNA, 21 nt, Human
cuugaaagguagagucuacag

SEQ ID NO: 782825 - RNA, 22 nt, Human
gcccaggaguucaagucuagug

SEQ ID NO: 782826 - RNA, 22 nt, Human
uuuguuaauucuuauguuagag

SEQ ID NO: 782827 - RNA, 22 nt, Human
agacccagaaagcagcugcauu

SEQ ID NO: 782828 - RNA, 22 nt, Human
uaucuguugucuuuuacaugua

SEQ ID NO: 782829 - RNA, 22 nt, Human
gucaggauuauaauccccaugg

SEQ ID NO: 782830 - RNA, 22 nt, Human
cagucuuuguucccauuacuga

SEQ ID NO: 782831 - RNA, 17 nt, Human
ggcagccucaggcguuu

SEQ ID NO: 782832 - RNA, 22 nt, Human
auucuucaaagagugucaaagu

SEQ ID NO: 782833 - RNA, 22 nt, Human
uuucucugcugccugugucgau

SEQ ID NO: 782834 - RNA, 22 nt, Human
aagggaggccagagguuuugca

SEQ ID NO: 782835 - RNA, 22 nt, Human
guugaaugaaucauucuaugua

SEQ ID NO: 782836 - RNA, 22 nt, Human
auacuaaaguauagaacuuagu

SEQ ID NO: 782837 - RNA, 22 nt, Human
caaggccacguucugcaugcgg

SEQ ID NO: 782838 - RNA, 22 nt, Human
gaggcaucugggcacagaagug

SEQ ID NO: 782839 - RNA, 22 nt, Human
ucucugguuauuaacuaacucc

SEQ ID NO: 782840 - RNA, 22 nt, Human
uuucacaacugcuuauuugaga

SEQ ID NO: 782841 - RNA, 22 nt, Human
ggagaggaaaugccagcacuuc

SEQ ID NO: 782842 - RNA, 22 nt, Human
gacccaggagugcagagagugg

SEQ ID NO: 782843 - RNA, 22 nt, Human
cuguauuuguccucuauuuauu

SEQ ID NO: 782844 - RNA, 22 nt, Human
gaaucucaguggaagcaggaag

SEQ ID NO: 782845 - RNA, 22 nt, Human
agugugagcccuggaguggugc

SEQ ID NO: 782846 - RNA, 22 nt, Human
agcccagggacagggcggaugu

SEQ ID NO: 782847 - RNA, 22 nt, Human
uugaaguuguaguucagugaag

SEQ ID NO: 782848 - RNA, 22 nt, Human
agagagggcauagaaaaaggga

SEQ ID NO: 782849 - RNA, 22 nt, Human
uggaaggagacugggaagugug

SEQ ID NO: 782850 - RNA, 22 nt, Human
cggagaggaccugcaacucgcu

SEQ ID NO: 782851 - RNA, 21 nt, Human
aucauucuggaaaauucaagc

SEQ ID NO: 782852 - RNA, 22 nt, Human
cucuccucugaaguggugaccc

SEQ ID NO: 782853 - RNA, 17 nt, Human
aggccagaugaggcaag

SEQ ID NO: 782854 - RNA, 17 nt, Human
ucccaggaacagggaau

SEQ ID NO: 782855 - RNA, 22 nt, Human
uuaugauuugccacagauuggu

SEQ ID NO: 782856 - RNA, 22 nt, Human
ggcaagaaggcuucagguagcu

SEQ ID NO: 782857 - RNA, 22 nt, Human
gagguagccacagauagagacu

SEQ ID NO: 782858 - RNA, 22 nt, Human
uuugcauaggauggacauuuua

SEQ ID NO: 782859 - RNA, 22 nt, Human
aggaagcuagagccaccggacu

SEQ ID NO: 782860 - RNA, 22 nt, Human
ucuuagaaguuuauggcacgga

SEQ ID NO: 782861 - RNA, 22 nt, Human
acugcccucccaucuauugcaa

SEQ ID NO: 782862 - RNA, 22 nt, Human
ggcagcuggguuggccagaaac

SEQ ID NO: 782863 - RNA, 22 nt, Human
ggggggugcugaucaguggagc

SEQ ID NO: 782864 - RNA, 22 nt, Human
aguaaaucagaccucauuaugu

SEQ ID NO: 782865 - RNA, 22 nt, Human
auugaaagauaggcuacugugg

SEQ ID NO: 782866 - RNA, 22 nt, Human
aucauucugauggucaaugcua

SEQ ID NO: 782867 - RNA, 22 nt, Human
caacugugaauuuuaugauacc

SEQ ID NO: 782868 - RNA, 22 nt, Human
cagaggcaggauaagaacugcg

SEQ ID NO: 782869 - RNA, 22 nt, Human
uaccauuucauucuuuccucau

SEQ ID NO: 782870 - RNA, 22 nt, Human
aggcagccaucugcaggaagga

SEQ ID NO: 782871 - RNA, 22 nt, Human
ucaggauaaaauguaauggcaa

SEQ ID NO: 782872 - RNA, 22 nt, Human
gaggcagugucgguggcaggau

SEQ ID NO: 782873 - RNA, 22 nt, Human
aggcaguuuauccccagagccu

SEQ ID NO: 782874 - RNA, 22 nt, Human
agauggcagggguaccuggaag

SEQ ID NO: 782875 - RNA, 22 nt, Human
cucccaggguagggagagacua

SEQ ID NO: 782876 - RNA, 22 nt, Human
aaagauuauggcauugaaauac

SEQ ID NO: 782877 - RNA, 22 nt, Human
uugaaaguuuauggagucugca

SEQ ID NO: 782878 - RNA, 22 nt, Human
agagacugcgugucagcgcugg

SEQ ID NO: 782879 - RNA, 18 nt, Human
gcagcuagccaggggggc

SEQ ID NO: 782880 - RNA, 22 nt, Human
uucuucaauuuuccauauacug

SEQ ID NO: 782881 - RNA, 18 nt, Human
uuccaugauuccuuucac

SEQ ID NO: 782882 - RNA, 22 nt, Human
aauacauauggaauuccauguu

SEQ ID NO: 782883 - RNA, 22 nt, Human
aucccaugagaccacguuggcu

SEQ ID NO: 782884 - RNA, 22 nt, Human
ugcaggaaucagaggggaagcg

SEQ ID NO: 782885 - RNA, 22 nt, Human
uucaugugauaaaugugugacu

SEQ ID NO: 782886 - RNA, 22 nt, Human
accaggaguuuugaccaggggc

SEQ ID NO: 782887 - RNA, 22 nt, Human
acucaggaaaugaagacugguu

SEQ ID NO: 782888 - RNA, 22 nt, Human
aagggcagccugacucacgguc

SEQ ID NO: 782889 - RNA, 22 nt, Human
caggcagcucgaugccuuguug

SEQ ID NO: 782890 - RNA, 22 nt, Human
ucacugcucuccaauguggagu

SEQ ID NO: 782891 - RNA, 22 nt, Human
auuucagaugaccaaauggaaa

SEQ ID NO: 782892 - RNA, 22 nt, Human
uucugugauugacauguggcuu

SEQ ID NO: 782893 - RNA, 22 nt, Human
uaggagggcccugaaaauggca

SEQ ID NO: 782894 - RNA, 22 nt, Human
auuugcuuaucuccacaguugu

SEQ ID NO: 782895 - RNA, 23 nt, Human
agggagcuaaaaggcuggagcag

SEQ ID NO: 782896 - RNA, 22 nt, Human
guuauaaaaugcacaguuguuu

SEQ ID NO: 782897 - RNA, 22 nt, Human
ucacuucacacccacuaucaug

SEQ ID NO: 782898 - RNA, 22 nt, Human
gaggaaccaaucugugauauuc

SEQ ID NO: 782899 - RNA, 22 nt, Human
cauuuccugucuggaggucaaa

SEQ ID NO: 782900 - RNA, 22 nt, Human
ucaacugcaaguuugcuuaguu

SEQ ID NO: 782901 - RNA, 22 nt, Human
ccagugcuaagguagccucugc

SEQ ID NO: 782902 - RNA, 21 nt, Human
gcugcccaacccugcaucucc

SEQ ID NO: 782903 - RNA, 23 nt, Human
cugcuguuuucuguaccugaagc

SEQ ID NO: 782904 - RNA, 23 nt, Human
ucucuuucaagagcuuaaugugc

SEQ ID NO: 782905 - RNA, 22 nt, Human
gaggcagcucuucugaaugggg

SEQ ID NO: 782906 - RNA, 22 nt, Human
uucaugugaucacagauuguaa

SEQ ID NO: 782907 - RNA, 22 nt, Human
aacaugcugccuuucuacgagu

SEQ ID NO: 782908 - RNA, 22 nt, Human
cuucuucaaccugaaaguuuca

SEQ ID NO: 782909 - RNA, 22 nt, Human
gcagcugcagagaccggguggg

SEQ ID NO: 782910 - RNA, 22 nt, Human
aggcagugccuggaccccagcu

SEQ ID NO: 782911 - RNA, 22 nt, Human
ucagauggcacacagagccugc

SEQ ID NO: 782912 - RNA, 22 nt, Human
ugaaguuauauauguugaaaau

SEQ ID NO: 782913 - RNA, 19 nt, Human
agccuggcuuugcucugcu

SEQ ID NO: 782914 - RNA, 22 nt, Human
gcaguucuacuuauccauagac

SEQ ID NO: 782915 - RNA, 22 nt, Human
uuugaaguguuauuucuaucac

SEQ ID NO: 782916 - RNA, 22 nt, Human
cccaggaaccuaccagcucgag

SEQ ID NO: 782917 - RNA, 20 nt, Human
auaaaauaacugccacaaga

SEQ ID NO: 782918 - RNA, 22 nt, Human
aauugcuaaagauuauguuuuc

SEQ ID NO: 782919 - RNA, 23 nt, Human
ucaggauauugugugccaaggug

SEQ ID NO: 782920 - RNA, 22 nt, Human
ugcugaaacaauaacauacugg

SEQ ID NO: 782921 - RNA, 22 nt, Human
cauuguuaccaucuuuuaccua

SEQ ID NO: 782922 - RNA, 22 nt, Human
uuucaaaccuacuuguauguuu

SEQ ID NO: 782923 - RNA, 22 nt, Human
gauggcagcagcagccagggau

SEQ ID NO: 782924 - RNA, 22 nt, Human
agucugucugucacuucugcag

SEQ ID NO: 782925 - RNA, 22 nt, Human
uucuuuuacauuaagauuucag

SEQ ID NO: 782926 - RNA, 22 nt, Human
cuccaggagggggauggcugua

SEQ ID NO: 782927 - RNA, 22 nt, Human
ggcaggcaaugaggaugggaag

SEQ ID NO: 782928 - RNA, 22 nt, Human
cccaggaguaagugacauuguu

SEQ ID NO: 782929 - RNA, 19 nt, Human
uugaaauuguuugauaugg

SEQ ID NO: 782930 - RNA, 22 nt, Human
uuugaauaucacaaacuuucaa

SEQ ID NO: 782931 - RNA, 22 nt, Human
uuucuuauacuauauugucauc

SEQ ID NO: 782932 - RNA, 22 nt, Human
uuacuuugcuuucucauuacag

SEQ ID NO: 782933 - RNA, 22 nt, Human
uccucagaaaccccugugaggu

SEQ ID NO: 782934 - RNA, 22 nt, Human
cugccaggcagggagauggcug

SEQ ID NO: 782935 - RNA, 22 nt, Human
ucauucuuuaccaaguugucac

SEQ ID NO: 782936 - RNA, 22 nt, Human
uagcacauacauaauagauaga

SEQ ID NO: 782937 - RNA, 22 nt, Human
gaagcagcgaaguggaagggac

SEQ ID NO: 782938 - RNA, 22 nt, Human
uggcuguguuaccacuucaugu

SEQ ID NO: 782939 - RNA, 22 nt, Human
ucuguggauuuuaguguucaug

SEQ ID NO: 782940 - RNA, 22 nt, Human
acccaggacacagagaugaccc

SEQ ID NO: 782941 - RNA, 22 nt, Human
ccaggagagcucuaaauggcug

SEQ ID NO: 782942 - RNA, 22 nt, Human
uuccagcaggcagacaggagau

SEQ ID NO: 782943 - RNA, 22 nt, Human
accauccugaaaccuucaugcu

SEQ ID NO: 782944 - RNA, 22 nt, Human
aggagaggguggcauuaaguuu

SEQ ID NO: 782945 - RNA, 23 nt, Human
gaggcagcuccugcagugcccug

SEQ ID NO: 782946 - RNA, 22 nt, Human
uuaaauuagucaagcuucucug

SEQ ID NO: 782947 - RNA, 22 nt, Human
gaggcagccagagguucucauu

SEQ ID NO: 782948 - RNA, 22 nt, Human
cuucugugauuugguuaggaua

SEQ ID NO: 782949 - RNA, 23 nt, Human
uuuauccaacucuguaaucucuc

SEQ ID NO: 782950 - RNA, 22 nt, Human
agggagcucacaguccaguaga

SEQ ID NO: 782951 - RNA, 22 nt, Human
agaggaugguugaggaagaccu

SEQ ID NO: 782952 - RNA, 22 nt, Human
gcucagagcuugaaguuccacu

SEQ ID NO: 782953 - RNA, 22 nt, Human
gcaggagagccagcaggcuucc

SEQ ID NO: 782954 - RNA, 20 nt, Human
uucacagaggacucagguca

SEQ ID NO: 782955 - RNA, 22 nt, Human
uuuggaaugguaccuucaguug

SEQ ID NO: 782956 - RNA, 22 nt, Human
ggaggcugagaaguccaagauc

SEQ ID NO: 782957 - RNA, 21 nt, Human
gggugggaggacacagcaggc

SEQ ID NO: 782958 - RNA, 19 nt, Human
aucugccuuagugcugcug

SEQ ID NO: 782959 - RNA, 22 nt, Human
ucucaggaagugauauugagac

SEQ ID NO: 782960 - RNA, 22 nt, Human
uucagaaugugaccuuauuugg

SEQ ID NO: 782961 - RNA, 22 nt, Human
uccauuuucuugcucuagguaa

SEQ ID NO: 782962 - RNA, 22 nt, Human
acacauuucucuuuuuguaagu

SEQ ID NO: 782963 - RNA, 22 nt, Human
uggcagcagacaaaaggccauu

SEQ ID NO: 782964 - RNA, 22 nt, Human
aauauaauuuuauuccuagagu

SEQ ID NO: 782965 - RNA, 22 nt, Human
ugaaagguuauuuaggucugcu

SEQ ID NO: 782966 - RNA, 22 nt, Human
ucuuuccauggccacacagucu

SEQ ID NO: 782967 - RNA, 23 nt, Human
accaggagaaaagcuuugcggga

SEQ ID NO: 782968 - RNA, 22 nt, Human
cccaggagaauauuuuuggguc

SEQ ID NO: 782969 - RNA, 22 nt, Human
cuucucagcauuuugucagucu

SEQ ID NO: 782970 - RNA, 22 nt, Human
cggagccugcuuguugcagcug

SEQ ID NO: 782971 - RNA, 20 nt, Human
uuucaguugguuaauggcau

SEQ ID NO: 782972 - RNA, 22 nt, Human
agcauccaacaggagggaaggg

SEQ ID NO: 782973 - RNA, 22 nt, Human
auauauuugagaauauucauga

SEQ ID NO: 782974 - RNA, 22 nt, Human
gggcagcuggcuuauagguuug

SEQ ID NO: 782975 - RNA, 22 nt, Human
ccaggcugagcaugauuggagc

SEQ ID NO: 782976 - RNA, 22 nt, Human
uuuccagguauuaauacuguau

SEQ ID NO: 782977 - RNA, 22 nt, Human
caucacccggaacugugucugc

SEQ ID NO: 782978 - RNA, 22 nt, Human
uccaggagggggagccgugccg

SEQ ID NO: 782979 - RNA, 22 nt, Human
cccaggaggcagaaguugcagu

SEQ ID NO: 782980 - RNA, 22 nt, Human
cugcauuagucaugcuuugcag

SEQ ID NO: 782981 - RNA, 22 nt, Human
gaggcagaaguugcagugagca

SEQ ID NO: 782982 - RNA, 22 nt, Human
uuucucaguuacuagcuguggu

SEQ ID NO: 782983 - RNA, 22 nt, Human
ccaggaagcugucugauaugaa

SEQ ID NO: 782984 - RNA, 23 nt, Human
ucccaggaaucugcauuuuuaac

SEQ ID NO: 782985 - RNA, 22 nt, Human
aucaggauuauuaaaucuggau

SEQ ID NO: 782986 - RNA, 22 nt, Human
accaggaguaacagugaguggu

SEQ ID NO: 782987 - RNA, 22 nt, Human
ugaauaguccuuggaauaacug

SEQ ID NO: 782988 - RNA, 22 nt, Human
acaggagaauuaucuggaacaa

SEQ ID NO: 782989 - RNA, 22 nt, Human
aucacauugccagugauuaccc

SEQ ID NO: 782990 - RNA, 22 nt, Human
uacacacaugcauuugccuuau

SEQ ID NO: 782991 - RNA, 22 nt, Human
agucucuuauucccuauugcug

SEQ ID NO: 782992 - RNA, 22 nt, Human
cuucucagcaugguuacuguga

SEQ ID NO: 782993 - RNA, 22 nt, Human
cccaggagauggugcguggucu

SEQ ID NO: 782994 - RNA, 22 nt, Human
ggagcacuauaauagagauuuu

SEQ ID NO: 782995 - RNA, 22 nt, Human
auaaauaucacuguugucccuc

SEQ ID NO: 782996 - RNA, 22 nt, Human
gcuggcuugauaguuucugcuu

SEQ ID NO: 782997 - RNA, 22 nt, Human
ucucucuugucaccccaucugc

SEQ ID NO: 782998 - RNA, 22 nt, Human
gcaagcugcucuuauguggagg

SEQ ID NO: 782999 - RNA, 22 nt, Human
gaggggaaaguucugcacaagg

SEQ ID NO: 783000 - RNA, 22 nt, Human
cuuaagaugaggucaugcuaua

SEQ ID NO: 783001 - RNA, 21 nt, Human
uucuccccagcgaauccucgg

SEQ ID NO: 783002 - RNA, 22 nt, Human
uuugaaagcaccauuugaguag

SEQ ID NO: 783003 - RNA, 22 nt, Human
augauauuugcaaugugcuugc

SEQ ID NO: 783004 - RNA, 22 nt, Human
ucuuccaagguugcacacuauc

SEQ ID NO: 783005 - RNA, 22 nt, Human
cugugauuguuaguuccuauac

SEQ ID NO: 783006 - RNA, 22 nt, Human
uucccaugccuggccccuaucc

SEQ ID NO: 783007 - RNA, 22 nt, Human
cugcugugucagaguccagggg

SEQ ID NO: 783008 - RNA, 22 nt, Human
aucauucuaguccuuauggucu

SEQ ID NO: 783009 - RNA, 22 nt, Human
gcccaggagaggccagggcuga

SEQ ID NO: 783010 - RNA, 21 nt, Human
uccaggaguucuaauaggugu

SEQ ID NO: 783011 - RNA, 21 nt, Human
aggcaucuaaagagaguagac

SEQ ID NO: 783012 - RNA, 22 nt, Human
uacccaggagaaacagcagggc

SEQ ID NO: 783013 - RNA, 20 nt, Human
ugcguguguauuuauuuucu

SEQ ID NO: 783014 - RNA, 22 nt, Human
auuuccaguccuaaugaucugg

SEQ ID NO: 783015 - RNA, 22 nt, Human
cagaugaggcaaccucauugcu

SEQ ID NO: 783016 - RNA, 22 nt, Human
cagcuggccaaucagggcgccc

SEQ ID NO: 783017 - RNA, 22 nt, Human
guucuucaaagugacaacuaaa

SEQ ID NO: 783018 - RNA, 22 nt, Human
gaggcagcaaaauauaucauaa

SEQ ID NO: 783019 - RNA, 22 nt, Human
ugauuuuuagcuauucugaaga

SEQ ID NO: 783020 - RNA, 22 nt, Human
aaacauuugcaacucgguuugg

SEQ ID NO: 783021 - RNA, 22 nt, Human
ggagcggagggagggccacugu

SEQ ID NO: 783022 - RNA, 22 nt, Human
cuucuucaauagcaagcgcaua

SEQ ID NO: 783023 - RNA, 22 nt, Human
agccuuguuggucugaguuugg

SEQ ID NO: 783024 - RNA, 22 nt, Human
ucacagacauggugagguaaca

SEQ ID NO: 783025 - RNA, 22 nt, Human
uuuauuguuuagaagggggcug

SEQ ID NO: 783026 - RNA, 22 nt, Human
gaggcacuggaggaaaggagaa

SEQ ID NO: 783027 - RNA, 22 nt, Human
cccaggaaguggagguugcagu

SEQ ID NO: 783028 - RNA, 22 nt, Human
uauuuccagcaguaagaagaca

SEQ ID NO: 783029 - RNA, 22 nt, Human
caaaugauacuguuuuuagucu

SEQ ID NO: 783030 - RNA, 22 nt, Human
uuagccauggacugaauugacu

SEQ ID NO: 783031 - RNA, 22 nt, Human
uucuagaugauaaaccagcagc

SEQ ID NO: 783032 - RNA, 22 nt, Human
cauggagauaaacugaaauauu

SEQ ID NO: 783033 - RNA, 22 nt, Human
aaagcagaggugauaugacuua

SEQ ID NO: 783034 - RNA, 22 nt, Human
aggaagcuccuggagagccagu

SEQ ID NO: 783035 - RNA, 22 nt, Human
uaaggccaaggggccauagucu

SEQ ID NO: 783036 - RNA, 22 nt, Human
gaaaggccauuucugaggguuu

SEQ ID NO: 783037 - RNA, 22 nt, Human
gagagaggccuccauguacuga

SEQ ID NO: 783038 - RNA, 22 nt, Human
acacauuuacauguuuacguau

SEQ ID NO: 783039 - RNA, 22 nt, Human
cugcgcagggguggcgccagaa

SEQ ID NO: 783040 - RNA, 22 nt, Human
cagugguugguagauacuugag

SEQ ID NO: 783041 - RNA, 22 nt, Human
ccagaggaggggggucuuucug

SEQ ID NO: 783042 - RNA, 22 nt, Human
auucucuuuguauaacaucuug

SEQ ID NO: 783043 - RNA, 22 nt, Human
cuugcuggugguguuuucuaug

SEQ ID NO: 783044 - RNA, 22 nt, Human
auucuucacuguuucagaauga

SEQ ID NO: 783045 - RNA, 21 nt, Human
ggcagccucuguggaagggga

SEQ ID NO: 783046 - RNA, 22 nt, Human
gaggggagacagggaaaucagu

SEQ ID NO: 783047 - RNA, 22 nt, Human
uuugacaucaauacccuagaau

SEQ ID NO: 783048 - RNA, 22 nt, Human
uucagaaguagcuaagcaguca

SEQ ID NO: 783049 - RNA, 22 nt, Human
auuucagguaccugugggaucc

SEQ ID NO: 783050 - RNA, 22 nt, Human
ugaaggccacuuccugugagcu

SEQ ID NO: 783051 - RNA, 22 nt, Human
ggaggccagggacccagucagc

SEQ ID NO: 783052 - RNA, 22 nt, Human
ugaaugaguuuggcugcuguuc

SEQ ID NO: 783053 - RNA, 22 nt, Human
cacauuuaauccuuuauaagua

SEQ ID NO: 783054 - RNA, 22 nt, Human
ugcugcuguuuccuacaucuca

SEQ ID NO: 783055 - RNA, 22 nt, Human
guuuauaaggcccaauauuucu

SEQ ID NO: 783056 - RNA, 22 nt, Human
cccaggaacagggcucagaccc

SEQ ID NO: 783057 - RNA, 22 nt, Human
uucuucuucuggcugcaccugg

SEQ ID NO: 783058 - RNA, 22 nt, Human
ucaucugucccaggcuuuuuuc

SEQ ID NO: 783059 - RNA, 22 nt, Human
cccaggaggcggagguuguggu

SEQ ID NO: 783060 - RNA, 22 nt, Human
ugaggcaggacugagcgggaug

SEQ ID NO: 783061 - RNA, 22 nt, Human
gagaggauccacaaaccaggaa

SEQ ID NO: 783062 - RNA, 22 nt, Human
uuucugugguggguaguucaga

SEQ ID NO: 783063 - RNA, 22 nt, Human
acuguguggaccacucugaggc

SEQ ID NO: 783064 - RNA, 22 nt, Human
acaccauacucauguugguucc

SEQ ID NO: 783065 - RNA, 22 nt, Human
agcuacccgaggacaggcuaag

SEQ ID NO: 783066 - RNA, 19 nt, Human
agaggcagucuccaacagg

SEQ ID NO: 783067 - RNA, 22 nt, Human
auuuucaaaacaucugcugugu

SEQ ID NO: 783068 - RNA, 22 nt, Human
aaugcuuuuugcgaaaugugca

SEQ ID NO: 783069 - RNA, 22 nt, Human
cuuaaauucuuaaugcccucau

SEQ ID NO: 783070 - RNA, 21 nt, Human
acaggagaccgccuggcaguc

SEQ ID NO: 783071 - RNA, 22 nt, Human
gcugcugucacggugcuaaggg

SEQ ID NO: 783072 - RNA, 22 nt, Human
ugaggcaguucuuacuuguauu

SEQ ID NO: 783073 - RNA, 22 nt, Human
auauaauacaaccugcuaagug

SEQ ID NO: 783074 - RNA, 22 nt, Human
aaucauucuuauuucacagcaa

SEQ ID NO: 783075 - RNA, 22 nt, Human
augcagcugugggcaagaaaug

SEQ ID NO: 783076 - RNA, 22 nt, Human
cagcucccgccaucgggaggca

SEQ ID NO: 783077 - RNA, 22 nt, Human
cauuuguaggaugcuucuuguu

SEQ ID NO: 783078 - RNA, 22 nt, Human
uagugcuuggcccuaccagaua

SEQ ID NO: 783079 - RNA, 17 nt, Human
cccaugagcccacuccc

SEQ ID NO: 783080 - RNA, 22 nt, Human
accaggagagauuuuauugaga

SEQ ID NO: 783081 - RNA, 22 nt, Human
ucccuucacagaugcgauguuu

SEQ ID NO: 783082 - RNA, 22 nt, Human
cagcugcaguucaaugcuugcu

SEQ ID NO: 783083 - RNA, 22 nt, Human
aagagaggacauggugaaccug

SEQ ID NO: 783084 - RNA, 22 nt, Human
ccaggaaauagugcugugaucu

SEQ ID NO: 783085 - RNA, 22 nt, Human
cuucuucagcacaauauugaug

SEQ ID NO: 783086 - RNA, 22 nt, Human
caggcagcaggagcccugcucg

SEQ ID NO: 783087 - RNA, 22 nt, Human
cauuuuaaaugauuuaagccaa

SEQ ID NO: 783088 - RNA, 22 nt, Human
agagggcagucucagauuggga

SEQ ID NO: 783089 - RNA, 22 nt, Human
uugaagagugccuuccagacau

SEQ ID NO: 783090 - RNA, 22 nt, Human
ugaaaugaucaguuugguuacu

SEQ ID NO: 783091 - RNA, 22 nt, Human
ucuuugcacugugcaagcagaa

SEQ ID NO: 783092 - RNA, 21 nt, Human
uucuucaugaugauuaauggc

SEQ ID NO: 783093 - RNA, 22 nt, Human
uaaggccaggcuguggucggca

SEQ ID NO: 783094 - RNA, 22 nt, Human
uugaacauuggcaauuucauau

SEQ ID NO: 783095 - RNA, 22 nt, Human
uccaggagaaaacugacggugg

SEQ ID NO: 783096 - RNA, 22 nt, Human
gagaggugaauguggaugccac

SEQ ID NO: 783097 - RNA, 22 nt, Human
uucuucucagggucccacaugg

SEQ ID NO: 783098 - RNA, 22 nt, Human
auggagggugguaagacagaga

SEQ ID NO: 783099 - RNA, 22 nt, Human
cuggcugggagcgagcugcuca

SEQ ID NO: 783100 - RNA, 22 nt, Human
auuuagaacuuuguuugccaau

SEQ ID NO: 783101 - RNA, 22 nt, Human
uuagaaagaacuuuagauauca

SEQ ID NO: 783102 - RNA, 22 nt, Human
agguccagcuguugcagccucc

SEQ ID NO: 783103 - RNA, 22 nt, Human
ggcaggcugcuugggucauguc

SEQ ID NO: 783104 - RNA, 22 nt, Human
uauuuuaaagacugccagccua

SEQ ID NO: 783105 - RNA, 22 nt, Human
cuucuucauguauugauagucu

SEQ ID NO: 783106 - RNA, 22 nt, Human
cucaggaaaggccaugcaaggg

SEQ ID NO: 783107 - RNA, 22 nt, Human
guaggcagguggaggagugaag

SEQ ID NO: 783108 - RNA, 22 nt, Human
agggcaguucaacuucauagug

SEQ ID NO: 783109 - RNA, 22 nt, Human
gcaggagaaaugaagauugggu

SEQ ID NO: 783110 - RNA, 22 nt, Human
gcugguuuccuuaucuauaaag

SEQ ID NO: 783111 - RNA, 22 nt, Human
ccucaugguacuuacuguagcu

SEQ ID NO: 783112 - RNA, 22 nt, Human
aacacugcugcuggguucugug

SEQ ID NO: 783113 - RNA, 22 nt, Human
uuuauauuucccaggauuggcc

SEQ ID NO: 783114 - RNA, 22 nt, Human
aggaguggugcaggaccugcca

SEQ ID NO: 783115 - RNA, 22 nt, Human
gcucaggaccgaggggugggaa

SEQ ID NO: 783116 - RNA, 23 nt, Human
uuucuucagaagccuugcgaggc

SEQ ID NO: 783117 - RNA, 22 nt, Human
cucuuucugauucgcugggacc

SEQ ID NO: 783118 - RNA, 22 nt, Human
gcuguguuggugaagcuguagc

SEQ ID NO: 783119 - RNA, 22 nt, Human
aaggcagcucagcucauggcag

SEQ ID NO: 783120 - RNA, 22 nt, Human
uucagaauauuuguuuuacaug

SEQ ID NO: 783121 - RNA, 22 nt, Human
ccaagaugaucuuuacaguguu

SEQ ID NO: 783122 - RNA, 23 nt, Human
uuugaaaguaucaacucgccuga

SEQ ID NO: 783123 - RNA, 22 nt, Human
ugaggggagacagaguggacuc

SEQ ID NO: 783124 - RNA, 22 nt, Human
gauuuuauauggcauacugugg

SEQ ID NO: 783125 - RNA, 22 nt, Human
cucagaagccuucagucuuggc

SEQ ID NO: 783126 - RNA, 22 nt, Human
ggagcuguucaggacugcuuca

SEQ ID NO: 783127 - RNA, 20 nt, Human
cucuccucacccgugucagg

SEQ ID NO: 783128 - RNA, 22 nt, Human
ugaaaugacagucuuaagcucu

SEQ ID NO: 783129 - RNA, 22 nt, Human
auucuucaguauguguggauug

SEQ ID NO: 783130 - RNA, 22 nt, Human
cauuuucaugaguuucuguuca

SEQ ID NO: 783131 - RNA, 18 nt, Human
uggcagcuagguaaagaa

SEQ ID NO: 783132 - RNA, 22 nt, Human
ggggcagccuccaggaaagcug

SEQ ID NO: 783133 - RNA, 22 nt, Human
auuuccaggagaaaggauuuua

SEQ ID NO: 783134 - RNA, 20 nt, Human
gcccaggaucucugaggcau

SEQ ID NO: 783135 - RNA, 19 nt, Human
aaaaacuuaguccagaaag

SEQ ID NO: 783136 - RNA, 22 nt, Human
aggacagggauucaaacuccca

SEQ ID NO: 783137 - RNA, 22 nt, Human
aaggcagcagugcacgacugau

SEQ ID NO: 783138 - RNA, 20 nt, Human
agcaagaguaaggacagcga

SEQ ID NO: 783139 - RNA, 22 nt, Human
agaaggggagaagcuaccagga

SEQ ID NO: 783140 - RNA, 22 nt, Human
cuucucaaaguugugaaucagg

SEQ ID NO: 783141 - RNA, 22 nt, Human
uuagccauauagaaaaagagcu

SEQ ID NO: 783142 - RNA, 22 nt, Human
cauucuuauauuuacucauuca

SEQ ID NO: 783143 - RNA, 22 nt, Human
gagccaggggucagcuccgagg

SEQ ID NO: 783144 - RNA, 22 nt, Human
uuacaagauaaccugaugcugu

SEQ ID NO: 783145 - RNA, 22 nt, Human
augcuguggccagaguucaacu

SEQ ID NO: 783146 - RNA, 22 nt, Human
ugaaucauggauaaauagcuua

SEQ ID NO: 783147 - RNA, 21 nt, Human
aggaggggucuuucccacuga

SEQ ID NO: 783148 - RNA, 22 nt, Human
uccauuuuguagguaugcuaca

SEQ ID NO: 783149 - RNA, 22 nt, Human
gcggagggcgagcccgcggagc

SEQ ID NO: 783150 - RNA, 22 nt, Human
aaggcagcaccgccuccugaaa

SEQ ID NO: 783151 - RNA, 22 nt, Human
ucauuucaaugauacuacuaag

SEQ ID NO: 783152 - RNA, 19 nt, Human
uucauucucuuauuguugu

SEQ ID NO: 783153 - RNA, 22 nt, Human
gcugcugugaauuuuuuaaaug

SEQ ID NO: 783154 - RNA, 20 nt, Human
aagggcagagggaacagacu

SEQ ID NO: 783155 - RNA, 22 nt, Human
ugauugaagaggugaggaaguu

SEQ ID NO: 783156 - RNA, 22 nt, Human
aggcagauuuaggagaaaagaa

SEQ ID NO: 783157 - RNA, 22 nt, Human
uggcagcugagugcacccccuc

SEQ ID NO: 783158 - RNA, 22 nt, Human
uuugacauggaauaacucauuu

SEQ ID NO: 783159 - RNA, 22 nt, Human
agcccaggagguggagguugca

SEQ ID NO: 783160 - RNA, 22 nt, Human
aggcagauauuggggugaugug

SEQ ID NO: 783161 - RNA, 22 nt, Human
uuucacauuagauaugucauuu

SEQ ID NO: 783162 - RNA, 22 nt, Human
gaaccucagugaaacuggaggu

SEQ ID NO: 783163 - RNA, 22 nt, Human
cagcaggaggugaguagcaggu

SEQ ID NO: 783164 - RNA, 22 nt, Human
ggaggcgauccugggaaacacc

SEQ ID NO: 783165 - RNA, 22 nt, Human
uuccaugagcucugaguucaca

SEQ ID NO: 783166 - RNA, 22 nt, Human
cuucucagucaccugugagucu

SEQ ID NO: 783167 - RNA, 19 nt, Human
agcauuuggaauucuacac

SEQ ID NO: 783168 - RNA, 20 nt, Human
ugugaaagcaguagaaugac

SEQ ID NO: 783169 - RNA, 22 nt, Human
uucucugaguacguuucagugu

SEQ ID NO: 783170 - RNA, 22 nt, Human
gucacuguauccagguuccagc

SEQ ID NO: 783171 - RNA, 22 nt, Human
agucuccuuggccucaaugccu

SEQ ID NO: 783172 - RNA, 22 nt, Human
aggcacaggaaugucauccagu

SEQ ID NO: 783173 - RNA, 22 nt, Human
uccugaggcucacuuugaaugu

SEQ ID NO: 783174 - RNA, 21 nt, Human
agccagcuaucacacagcauu

SEQ ID NO: 783175 - RNA, 22 nt, Human
uuugaaagcuacuuucggguca

SEQ ID NO: 783176 - RNA, 23 nt, Human
uguugaaguaacuguuacauaga

SEQ ID NO: 783177 - RNA, 21 nt, Human
uagggcaggcauuggaagaga

SEQ ID NO: 783178 - RNA, 22 nt, Human
auguuuccgugagcauccuuga

SEQ ID NO: 783179 - RNA, 22 nt, Human
ucuuugcaaauguuauuaucuu

SEQ ID NO: 783180 - RNA, 22 nt, Human
aacuuucuuggaugucucaaca

SEQ ID NO: 783181 - RNA, 19 nt, Human
ugaguucugugguucucaa

SEQ ID NO: 783182 - RNA, 22 nt, Human
uuuauuugaaucaggggagaau

SEQ ID NO: 783183 - RNA, 22 nt, Human
aggcagugcugugcccugaacc

SEQ ID NO: 783184 - RNA, 22 nt, Human
cucccaggggaacuaucaagua

SEQ ID NO: 783185 - RNA, 22 nt, Human
uucaggaucacuaaacccucca

SEQ ID NO: 783186 - RNA, 22 nt, Human
agcugcuacugcucugccagag

SEQ ID NO: 783187 - RNA, 22 nt, Human
ucuuugcagaauuuaacuuugc

SEQ ID NO: 783188 - RNA, 22 nt, Human
uucagcaaauggacuguucagg

SEQ ID NO: 783189 - RNA, 22 nt, Human
uuagccauugucagcacauggc

SEQ ID NO: 783190 - RNA, 22 nt, Human
uugcuagcugguguaugcauug

SEQ ID NO: 783191 - RNA, 22 nt, Human
uuugaaagacagaauauuuuug

SEQ ID NO: 783192 - RNA, 22 nt, Human
uucacagacauugcagacugaa

SEQ ID NO: 783193 - RNA, 22 nt, Human
gccaugcuugguaugcugugag

SEQ ID NO: 783194 - RNA, 22 nt, Human
ucaggagggugacaggcccugg

SEQ ID NO: 783195 - RNA, 22 nt, Human
aggaugagaagauuggaaucuu

SEQ ID NO: 783196 - RNA, 22 nt, Human
cagcuggcugcaugaugccaaa

SEQ ID NO: 783197 - RNA, 22 nt, Human
ccaugagccaggcugaggaagc

SEQ ID NO: 783198 - RNA, 22 nt, Human
cagcuacuccucccaugacuuc

SEQ ID NO: 783199 - RNA, 22 nt, Human
gaugagcauuguuucauguguu

SEQ ID NO: 783200 - RNA, 22 nt, Human
uagggcaggggaggaaucugaa

SEQ ID NO: 783201 - RNA, 22 nt, Human
cucuucuugcuagacugagugc

SEQ ID NO: 783202 - RNA, 22 nt, Human
uugaacuguaagcaugucugcc

SEQ ID NO: 783203 - RNA, 22 nt, Human
uaaggccaauuacauauguuca

SEQ ID NO: 783204 - RNA, 22 nt, Human
uaucuguuaugggcugaauugc

SEQ ID NO: 783205 - RNA, 22 nt, Human
aggcaggccccugagaauagac

SEQ ID NO: 783206 - RNA, 22 nt, Human
aggcaguggcugagaccagggg

SEQ ID NO: 783207 - RNA, 22 nt, Human
gcccaggauucuuucuuccuua

SEQ ID NO: 783208 - RNA, 22 nt, Human
auauuguugacuauaagaguaa

SEQ ID NO: 783209 - RNA, 19 nt, Human
uucuccagccugaccugag

SEQ ID NO: 783210 - RNA, 17 nt, Human
uucaaagcuuaucaagg

SEQ ID NO: 783211 - RNA, 22 nt, Human
ggcaggcucagcagccaaggag

SEQ ID NO: 783212 - RNA, 22 nt, Human
gccaggagcccugggcaaguuc

SEQ ID NO: 783213 - RNA, 22 nt, Human
ucuucuccagugcuucugcaca

SEQ ID NO: 783214 - RNA, 22 nt, Human
ggcagcaucucuggcagcagcu

SEQ ID NO: 783215 - RNA, 22 nt, Human
cccaggaauuggaggcugcagu

SEQ ID NO: 783216 - RNA, 22 nt, Human
uugcacuaggaaaaggcagcca

SEQ ID NO: 783217 - RNA, 22 nt, Human
cuuucauucuuagauauuagug

SEQ ID NO: 783218 - RNA, 22 nt, Human
uucaggauucuuucagacuggg

SEQ ID NO: 783219 - RNA, 22 nt, Human
agggaggucuuugaggggcuua

SEQ ID NO: 783220 - RNA, 22 nt, Human
aggagacauaacuaugaugaga

SEQ ID NO: 783221 - RNA, 22 nt, Human
uggcagcuacagacagagguga

SEQ ID NO: 783222 - RNA, 22 nt, Human
agaaaugaaaccaaagccuaga

SEQ ID NO: 783223 - RNA, 22 nt, Human
uuguugguggaauugaugcuag

SEQ ID NO: 783224 - RNA, 22 nt, Human
aagcaccugcaguugacaaaaa

SEQ ID NO: 783225 - RNA, 22 nt, Human
uuugaaagucaaccuuccaguu

SEQ ID NO: 783226 - RNA, 22 nt, Human
cauuuccacuucugaaaacugg

SEQ ID NO: 783227 - RNA, 22 nt, Human
uuaacaugucuugacuucaucu

SEQ ID NO: 783228 - RNA, 22 nt, Human
ucuucucuccugcuuggcagaa

SEQ ID NO: 783229 - RNA, 22 nt, Human
auguuauaguuauaaaaugagg

SEQ ID NO: 783230 - RNA, 22 nt, Human
ucacaauuuggauacagcuaug

SEQ ID NO: 783231 - RNA, 22 nt, Human
aaggccagcuuguagggcuggu

SEQ ID NO: 783232 - RNA, 22 nt, Human
acauuucuaguuguucaucucc

SEQ ID NO: 783233 - RNA, 22 nt, Human
augcuguggggagugaggguag

SEQ ID NO: 783234 - RNA, 22 nt, Human
ugaggggagcccgcccuggacg

SEQ ID NO: 783235 - RNA, 22 nt, Human
augcuguguggucaaguuaauu

SEQ ID NO: 783236 - RNA, 22 nt, Human
ucaggagauggucuuuauaggc

SEQ ID NO: 783237 - RNA, 22 nt, Human
ugucucugggugauucaguccu

SEQ ID NO: 783238 - RNA, 20 nt, Human
ugaaggccagcagcauaggg

SEQ ID NO: 783239 - RNA, 22 nt, Human
aucaggaucagggcuagcagag

SEQ ID NO: 783240 - RNA, 22 nt, Human
gaccaaggaagaggggagccag

SEQ ID NO: 783241 - RNA, 22 nt, Human
cauauaaauacaacauguguua

SEQ ID NO: 783242 - RNA, 22 nt, Human
aggcaguuucugggacagcaua

SEQ ID NO: 783243 - RNA, 22 nt, Human
uccaggagugugugcuaauggg

SEQ ID NO: 783244 - RNA, 22 nt, Human
ucaggaugguccuuuaugagaa

SEQ ID NO: 783245 - RNA, 22 nt, Human
gcccaggaguugaaugcagcag

SEQ ID NO: 783246 - RNA, 22 nt, Human
aaaaaucuaugacugcuucucc

SEQ ID NO: 783247 - RNA, 22 nt, Human
gaaauuauugcuagagacugca

SEQ ID NO: 783248 - RNA, 22 nt, Human
ugcuucuggaaacaguggcugu

SEQ ID NO: 783249 - RNA, 22 nt, Human
uaggaggguuagagggaaauau

SEQ ID NO: 783250 - RNA, 22 nt, Human
cuggcuugcagcucaucauaaa

SEQ ID NO: 783251 - RNA, 17 nt, Human
cucacggaggaugaauc

SEQ ID NO: 783252 - RNA, 22 nt, Human
caggauagaaaggccauggagu

SEQ ID NO: 783253 - RNA, 22 nt, Human
guucuucagaggggaaagaacc

SEQ ID NO: 783254 - RNA, 23 nt, Human
uaauucacauauacauugcuuca

SEQ ID NO: 783255 - RNA, 19 nt, Human
ugaaauggcaguugcuaaa

SEQ ID NO: 783256 - RNA, 22 nt, Human
gacagcugugcaggagaagggg

SEQ ID NO: 783257 - RNA, 22 nt, Human
cugcuuugcauagcugccagag

SEQ ID NO: 783258 - RNA, 22 nt, Human
acaaauaugguacucggagaaa

SEQ ID NO: 783259 - RNA, 22 nt, Human
cugcuguguuggcauuggauag

SEQ ID NO: 783260 - RNA, 22 nt, Human
gagugcagaugaacagaagauu

SEQ ID NO: 783261 - RNA, 22 nt, Human
ccaggagagcgcccucccggcc

SEQ ID NO: 783262 - RNA, 22 nt, Human
cuuuggcagccucugcuauuga

SEQ ID NO: 783263 - RNA, 22 nt, Human
aagcgccaugguuccugcgcag

SEQ ID NO: 783264 - RNA, 22 nt, Human
auuuccuuugcaaagacugugc

SEQ ID NO: 783265 - RNA, 22 nt, Human
acucagaagauauaaugacuca

SEQ ID NO: 783266 - RNA, 22 nt, Human
ugcuuggcuuucugagcuucug

SEQ ID NO: 783267 - RNA, 22 nt, Human
uucagugucaauuuuuaaauau

SEQ ID NO: 783268 - RNA, 19 nt, Human
uuagccauccacagugaaa

SEQ ID NO: 783269 - RNA, 22 nt, Human
agggacuuguguccuauguaug

SEQ ID NO: 783270 - RNA, 22 nt, Human
augcuguguuuuaaauggaaau

SEQ ID NO: 783271 - RNA, 22 nt, Human
uucuuacagaguuuacagagcc

SEQ ID NO: 783272 - RNA, 22 nt, Human
auggcagccugagcagaggaau

SEQ ID NO: 783273 - RNA, 22 nt, Human
agagggcaaguguaguccagua

SEQ ID NO: 783274 - RNA, 22 nt, Human
gcuuuggaugugugccugaggu

SEQ ID NO: 783275 - RNA, 22 nt, Human
ugaggcaggagaauggcgggaa

SEQ ID NO: 783276 - RNA, 20 nt, Human
cuucuucagccuaugcuuca

SEQ ID NO: 783277 - RNA, 22 nt, Human
aggccagacagcuagaaacagg

SEQ ID NO: 783278 - RNA, 22 nt, Human
ucccaggaucugagggcagaga

SEQ ID NO: 783279 - RNA, 22 nt, Human
gagggccagcagccucagcaug

SEQ ID NO: 783280 - RNA, 22 nt, Human
uucucagagcucacuguaguaa

SEQ ID NO: 783281 - RNA, 22 nt, Human
uccaggagagguguggggacug

SEQ ID NO: 783282 - RNA, 22 nt, Human
ucagggugaaccaggcaggaau

SEQ ID NO: 783283 - RNA, 22 nt, Human
ucuucagacccuuagcugugau

SEQ ID NO: 783284 - RNA, 22 nt, Human
ugggagcccaagggagcugccg

SEQ ID NO: 783285 - RNA, 22 nt, Human
guggaaugaauagauuugcauu

SEQ ID NO: 783286 - RNA, 22 nt, Human
ucccaggauguuuauggcuggu

SEQ ID NO: 783287 - RNA, 22 nt, Human
ugcuuagacgucaaguacagcc

SEQ ID NO: 783288 - RNA, 22 nt, Human
agaggggaaggaugugauguga

SEQ ID NO: 783289 - RNA, 22 nt, Human
caguaaagcauguaugucuuca

SEQ ID NO: 783290 - RNA, 22 nt, Human
ucauuucuauugcuacugucug

SEQ ID NO: 783291 - RNA, 22 nt, Human
aagcagaggaccgacggaggga

SEQ ID NO: 783292 - RNA, 22 nt, Human
gguuugaacagcuuuggagaag

SEQ ID NO: 783293 - RNA, 22 nt, Human
gcuccucuauuccccacauuuu

SEQ ID NO: 783294 - RNA, 22 nt, Human
ucuuuggaucccaacuggcugg

SEQ ID NO: 783295 - RNA, 22 nt, Human
auuugcuucugugaaaucaagu

SEQ ID NO: 783296 - RNA, 18 nt, Human
uuugcaaaggaaguaugg

SEQ ID NO: 783297 - RNA, 22 nt, Human
cauuuguuaauuacuauuaucu

SEQ ID NO: 783298 - RNA, 23 nt, Human
uugauuucaaaugcagagaacac

SEQ ID NO: 783299 - RNA, 22 nt, Human
cucuccucagaacaggcccucu

SEQ ID NO: 783300 - RNA, 22 nt, Human
auuuccauagagcgucucacag

SEQ ID NO: 783301 - RNA, 22 nt, Human
gacagguggggaaacuaaggua

SEQ ID NO: 783302 - RNA, 22 nt, Human
auucugagacaauugccgucag

SEQ ID NO: 783303 - RNA, 22 nt, Human
cauucauuuaugaaauaucuau

SEQ ID NO: 783304 - RNA, 22 nt, Human
caguugccuacuacauggcagg

SEQ ID NO: 783305 - RNA, 22 nt, Human
ugacauaauaauccaaacauac

SEQ ID NO: 783306 - RNA, 22 nt, Human
ucugggaaguccucugucaugc

SEQ ID NO: 783307 - RNA, 21 nt, Human
auggagggaccagggaagcag

SEQ ID NO: 783308 - RNA, 22 nt, Human
cucaggaugaaagucaugguga

SEQ ID NO: 783309 - RNA, 22 nt, Human
uuggcaguaaaagaaaaugcuu

SEQ ID NO: 783310 - RNA, 22 nt, Human
acagagagaaacaaucagcagc

SEQ ID NO: 783311 - RNA, 22 nt, Human
uccccagggcugcagagggugu

SEQ ID NO: 783312 - RNA, 22 nt, Human
aaagacuuggcuuaugauuugc

SEQ ID NO: 783313 - RNA, 22 nt, Human
uuauuuaaugugaucugaagag

SEQ ID NO: 783314 - RNA, 22 nt, Human
caggcagcugcgacaagagagc

SEQ ID NO: 783315 - RNA, 22 nt, Human
uaggagagcugaacuauugucu

SEQ ID NO: 783316 - RNA, 22 nt, Human
caggaggggguggaguuucgcc

SEQ ID NO: 783317 - RNA, 22 nt, Human
gaggagagagggacugucugca

SEQ ID NO: 783318 - RNA, 22 nt, Human
uugaaagacuucuccugugaaa

SEQ ID NO: 783319 - RNA, 22 nt, Human
ugaaaugaaacagaacauauca

SEQ ID NO: 783320 - RNA, 22 nt, Human
accaggagacaugaccaaugag

SEQ ID NO: 783321 - RNA, 22 nt, Human
uccaggagauucauuaggucau

SEQ ID NO: 783322 - RNA, 22 nt, Human
ucucugaguaagugacaguuca

SEQ ID NO: 783323 - RNA, 22 nt, Human
cuacccaggcuuagagggcugg

SEQ ID NO: 783324 - RNA, 18 nt, Human
ucuuccaacacugacacc

SEQ ID NO: 783325 - RNA, 22 nt, Human
uagggauguccugagacuuggc

SEQ ID NO: 783326 - RNA, 22 nt, Human
uugaauaggacucagcagugau

SEQ ID NO: 783327 - RNA, 22 nt, Human
uucaggaugcucagaguagucu

SEQ ID NO: 783328 - RNA, 23 nt, Human
gugagucuugccuuugcugugga

SEQ ID NO: 783329 - RNA, 22 nt, Human
aaggcagcagaggaaaggugcu

SEQ ID NO: 783330 - RNA, 22 nt, Human
uuucuucagccacuccaaacug

SEQ ID NO: 783331 - RNA, 22 nt, Human
uuuccuaguucuaagaaaugua

SEQ ID NO: 783332 - RNA, 22 nt, Human
uuugacaaaggaaaaaugcaca

SEQ ID NO: 783333 - RNA, 22 nt, Human
aaggcagcacagcaacugcuca

SEQ ID NO: 783334 - RNA, 22 nt, Human
cggcagcuccgcgccguaggac

SEQ ID NO: 783335 - RNA, 22 nt, Human
cccaugagaccugguuuaaggc

SEQ ID NO: 783336 - RNA, 22 nt, Human
aaggcagccaugugcuuugggu

SEQ ID NO: 783337 - RNA, 22 nt, Human
ucaggagacuuaugucacagug

SEQ ID NO: 783338 - RNA, 22 nt, Human
uuucuaggucuuccauacugcc

SEQ ID NO: 783339 - RNA, 22 nt, Human
acacauuucuaaauuuuuaccg

SEQ ID NO: 783340 - RNA, 22 nt, Human
ucacugucugaaagaaauggcc

SEQ ID NO: 783341 - RNA, 22 nt, Human
cauaauauacuacauugaugaa

SEQ ID NO: 783342 - RNA, 19 nt, Human
ucccaggaagcaaauguca

SEQ ID NO: 783343 - RNA, 19 nt, Human
ucuuucauuucuagcucug

SEQ ID NO: 783344 - RNA, 22 nt, Human
gcaggcaguuauuuaguagaau

SEQ ID NO: 783345 - RNA, 22 nt, Human
acaggagaaaucuggucaaaag

SEQ ID NO: 783346 - RNA, 22 nt, Human
ucuuuguaacugucuauugaga

SEQ ID NO: 783347 - RNA, 22 nt, Human
caguuucuauggcugggcucug

SEQ ID NO: 783348 - RNA, 22 nt, Human
cugcuguguuccuccugcaucu

SEQ ID NO: 783349 - RNA, 22 nt, Human
gaggcagcuuaggguacugacu

SEQ ID NO: 783350 - RNA, 22 nt, Human
caagagagaugcagcucacuca

SEQ ID NO: 783351 - RNA, 22 nt, Human
gaggcagcugggcuggugguuu

SEQ ID NO: 783352 - RNA, 22 nt, Human
gugcugugcgcuuuuucuguau

SEQ ID NO: 783353 - RNA, 22 nt, Human
cucaggauuuacuaauuucaag

SEQ ID NO: 783354 - RNA, 22 nt, Human
uuccaagagcuuuaauuguuga

SEQ ID NO: 783355 - RNA, 22 nt, Human
auucuucauaccuacugagguu

SEQ ID NO: 783356 - RNA, 22 nt, Human
caggcagcgcucguggccuggc

SEQ ID NO: 783357 - RNA, 22 nt, Human
aaaaacugcaauuacuuuuguc

SEQ ID NO: 783358 - RNA, 22 nt, Human
uagaaacaucagcuaaccaaaa

SEQ ID NO: 783359 - RNA, 19 nt, Human
ggcagcuugggaagguagc

SEQ ID NO: 783360 - RNA, 22 nt, Human
cccaggagguggagcuugcagu

SEQ ID NO: 783361 - RNA, 22 nt, Human
acgagagguccuuagaaucugu

SEQ ID NO: 783362 - RNA, 18 nt, Human
ugcuggguaacuguaugg

SEQ ID NO: 783363 - RNA, 22 nt, Human
uaggcagcugcaaacuucgguc

SEQ ID NO: 783364 - RNA, 23 nt, Human
gccaggaguggguagacuaaugc

SEQ ID NO: 783365 - RNA, 22 nt, Human
ggagcugugcagugacuacaga

SEQ ID NO: 783366 - RNA, 22 nt, Human
aucaggaucugcaucauaagaa

SEQ ID NO: 783367 - RNA, 22 nt, Human
ccuccucugggaagauucagag

SEQ ID NO: 783368 - RNA, 22 nt, Human
ugaggcagguggauuacaaggu

SEQ ID NO: 783369 - RNA, 22 nt, Human
cagugucuccagaugcuccaau

SEQ ID NO: 783370 - RNA, 22 nt, Human
gagagggauacugaguuuuggu

SEQ ID NO: 783371 - RNA, 22 nt, Human
gcuacugauugaccuuggagag

SEQ ID NO: 783372 - RNA, 20 nt, Human
cccaggagugagcagcuuua

SEQ ID NO: 783373 - RNA, 22 nt, Human
caacugcugacaccaucacucc

SEQ ID NO: 783374 - RNA, 22 nt, Human
aggcagacaaggacacaguggg

SEQ ID NO: 783375 - RNA, 22 nt, Human
uccaggaggcaccuuuggacca

SEQ ID NO: 783376 - RNA, 22 nt, Human
agucucagaaaagaagcaugga

SEQ ID NO: 783377 - RNA, 22 nt, Human
uucauucuuugaaucugaggua

SEQ ID NO: 783378 - RNA, 22 nt, Human
aacaugcucuguuucuuggaug

SEQ ID NO: 783379 - RNA, 20 nt, Human
gcccaggaauuugcauuucu

SEQ ID NO: 783380 - RNA, 22 nt, Human
uuuuuauaacucuuuugugaca

SEQ ID NO: 783381 - RNA, 22 nt, Human
ccaggagagcaggcgugcagcu

SEQ ID NO: 783382 - RNA, 22 nt, Human
acccaggagcucugggguccuc

SEQ ID NO: 783383 - RNA, 22 nt, Human
gaggccaggacaugaaagcuga

SEQ ID NO: 783384 - RNA, 21 nt, Human
cucaggaucuuauauauuagu

SEQ ID NO: 783385 - RNA, 22 nt, Human
acauacauauguuuaaaugcau

SEQ ID NO: 783386 - RNA, 22 nt, Human
ggaagagggaaccacgacugua

SEQ ID NO: 783387 - RNA, 22 nt, Human
uuccucagcuggccugauuggg

SEQ ID NO: 783388 - RNA, 22 nt, Human
caggcagcccugcaccaagugu

SEQ ID NO: 783389 - RNA, 22 nt, Human
gcaaguuauuuccauuuaaagc

SEQ ID NO: 783390 - RNA, 22 nt, Human
cugucccuucauuauucacuac

SEQ ID NO: 783391 - RNA, 22 nt, Human
gcuaugcaggagccuaaugaca

SEQ ID NO: 783392 - RNA, 22 nt, Human
ccugcuguaaugugucuuuauu

SEQ ID NO: 783393 - RNA, 22 nt, Human
agacaggcagaggcugcagagg

SEQ ID NO: 783394 - RNA, 22 nt, Human
gaggcaugcagagcuggagcag

SEQ ID NO: 783395 - RNA, 22 nt, Human
ggagauggaauagauucugacu

SEQ ID NO: 783396 - RNA, 22 nt, Human
aggcaagcauuuaaccacucau

SEQ ID NO: 783397 - RNA, 22 nt, Human
cauuguuauagcauuacacacc

SEQ ID NO: 783398 - RNA, 22 nt, Human
uuucaggguacauggagcaaau

SEQ ID NO: 783399 - RNA, 22 nt, Human
uauuucuucgggauucaagcua

SEQ ID NO: 783400 - RNA, 19 nt, Human
cuucuggcccugagccacc

SEQ ID NO: 783401 - RNA, 22 nt, Human
ggcucagaccucccagcuccag

SEQ ID NO: 783402 - RNA, 22 nt, Human
cccagcaggaggagguugcagu

SEQ ID NO: 783403 - RNA, 22 nt, Human
uccaggagacacaagguacaua

SEQ ID NO: 783404 - RNA, 22 nt, Human
caaauguaaauucuuuugaagc

SEQ ID NO: 783405 - RNA, 22 nt, Human
uuucagggagccuagaagagcu

SEQ ID NO: 783406 - RNA, 22 nt, Human
agcugaugccauguggaacagu

SEQ ID NO: 783407 - RNA, 22 nt, Human
ucauuuaauaauuuuugaguag

SEQ ID NO: 783408 - RNA, 22 nt, Human
acauguaaaaggaacaugcaug

SEQ ID NO: 783409 - RNA, 22 nt, Human
uuucacaucagagguagauuag

SEQ ID NO: 783410 - RNA, 18 nt, Human
cgaggcaggcggaucacg

SEQ ID NO: 783411 - RNA, 22 nt, Human
aaacaugaauagauauuaaaca

SEQ ID NO: 783412 - RNA, 22 nt, Human
acaaaugugucuaauugugccu

SEQ ID NO: 783413 - RNA, 22 nt, Human
cagcugccugucuggaggcaau

SEQ ID NO: 783414 - RNA, 22 nt, Human
cuucugugcuucacaguugcca

SEQ ID NO: 783415 - RNA, 22 nt, Human
uccuucuuucccccuagucauu

SEQ ID NO: 783416 - RNA, 22 nt, Human
agggcagccauugagggauucu

SEQ ID NO: 783417 - RNA, 22 nt, Human
auugaaagauuuugggcucaug

SEQ ID NO: 783418 - RNA, 22 nt, Human
ucugcaucauuuuucagagccg

SEQ ID NO: 783419 - RNA, 22 nt, Human
uucuacaugguugcucagaggg

SEQ ID NO: 783420 - RNA, 22 nt, Human
gccauuuucugucuuguuuauu

SEQ ID NO: 783421 - RNA, 22 nt, Human
gaauacauuggaaaucagaaua

SEQ ID NO: 783422 - RNA, 22 nt, Human
ggcuuugccuggaauuuccuug

SEQ ID NO: 783423 - RNA, 18 nt, Human
augggaggggccaagaga

SEQ ID NO: 783424 - RNA, 22 nt, Human
ggcagacuguaauaggagaauu

SEQ ID NO: 783425 - RNA, 20 nt, Human
agauuauuccuaagauuucu

SEQ ID NO: 783426 - RNA, 19 nt, Human
aguggcagaucuggaagua

SEQ ID NO: 783427 - RNA, 22 nt, Human
cagcugacccagugaggaggca

SEQ ID NO: 783428 - RNA, 23 nt, Human
cccagggacacgaugacaccucc

SEQ ID NO: 783429 - RNA, 22 nt, Human
uuaauuuuaaccuguuuguguc

SEQ ID NO: 783430 - RNA, 18 nt, Human
agcuucccucugagaggg

SEQ ID NO: 783431 - RNA, 22 nt, Human
ucucacuuuccagacuuuucaa

SEQ ID NO: 783432 - RNA, 23 nt, Human
uugcauagacauccucauagauu

SEQ ID NO: 783433 - RNA, 22 nt, Human
uuuuagcacuaagugauaugcu

SEQ ID NO: 783434 - RNA, 20 nt, Human
ccacaggaguccagucgacc

SEQ ID NO: 783435 - RNA, 22 nt, Human
ccaggcugccgaggaaagaaag

SEQ ID NO: 783436 - RNA, 22 nt, Human
agugcuuuaccuagauaauguu

SEQ ID NO: 783437 - RNA, 22 nt, Human
gauguguuuccaggauuuguuu

SEQ ID NO: 783438 - RNA, 22 nt, Human
cagucucagaggugggaguggg

SEQ ID NO: 783439 - RNA, 22 nt, Human
aucuuucaguuucauaccaauu

SEQ ID NO: 783440 - RNA, 17 nt, Human
uggcagcugaaagcucu

SEQ ID NO: 783441 - RNA, 22 nt, Human
caagauggguguugugaugguu

SEQ ID NO: 783442 - RNA, 22 nt, Human
ccacagcugaccgcaggugagc

SEQ ID NO: 783443 - RNA, 22 nt, Human
cagagagagucaaaucuuugcu

SEQ ID NO: 783444 - RNA, 19 nt, Human
ugaggggcucacagucuca

SEQ ID NO: 783445 - RNA, 22 nt, Human
uaaggccagcaugaaugcagca

SEQ ID NO: 783446 - RNA, 22 nt, Human
ggaggaugagcuacgaggagcu

SEQ ID NO: 783447 - RNA, 19 nt, Human
ugaggggaggagaggccug

SEQ ID NO: 783448 - RNA, 22 nt, Human
aggcaagcgcagaagcggagga

SEQ ID NO: 783449 - RNA, 20 nt, Human
acuugcugggcuuuguuacc

SEQ ID NO: 783450 - RNA, 17 nt, Human
agcugaccagauggacu

SEQ ID NO: 783451 - RNA, 22 nt, Human
auccaugaucaauuuauuacua

SEQ ID NO: 783452 - RNA, 22 nt, Human
caggcagcucugcuuuuccuaa

SEQ ID NO: 783453 - RNA, 22 nt, Human
uuucacagcuggguggcagagu

SEQ ID NO: 783454 - RNA, 22 nt, Human
agcccaggaaucugcaucuuga

SEQ ID NO: 783455 - RNA, 22 nt, Human
uuuuagauaguuuaacugcacu

SEQ ID NO: 783456 - RNA, 22 nt, Human
caggcagcagccacucugguau

SEQ ID NO: 783457 - RNA, 22 nt, Human
uuaaaauagccagugccccucu

SEQ ID NO: 783458 - RNA, 22 nt, Human
caggcagcguccugcuuccugu

SEQ ID NO: 783459 - RNA, 22 nt, Human
gcaggggcuaaggacacagaga

SEQ ID NO: 783460 - RNA, 22 nt, Human
uggcagcuggcucugcgcaggc

SEQ ID NO: 783461 - RNA, 22 nt, Human
augaaggcuguguggagccccc

SEQ ID NO: 783462 - RNA, 22 nt, Human
uacuaucucuucuaacuucaga

SEQ ID NO: 783463 - RNA, 22 nt, Human
cccaggaggguggccucugccc

SEQ ID NO: 783464 - RNA, 22 nt, Human
ugccaggagucaggccaggcag

SEQ ID NO: 783465 - RNA, 22 nt, Human
uuauagaaggagcauucacuua

SEQ ID NO: 783466 - RNA, 22 nt, Human
gucaggauuauuuuauuaaaag

SEQ ID NO: 783467 - RNA, 21 nt, Human
cucaggauggcggccuggugg

SEQ ID NO: 783468 - RNA, 22 nt, Human
uggaaagcgaggaguuggcauu

SEQ ID NO: 783469 - RNA, 22 nt, Human
gaggacaggagacucacuguuu

SEQ ID NO: 783470 - RNA, 21 nt, Human
uaauaauuccacuacagagua

SEQ ID NO: 783471 - RNA, 22 nt, Human
augaguucaauuguuucaguca

SEQ ID NO: 783472 - RNA, 22 nt, Human
aaggaguuuggguagucauaca

SEQ ID NO: 783473 - RNA, 23 nt, Human
aggcagcuggguagcaucuuucu

SEQ ID NO: 783474 - RNA, 22 nt, Human
agcccaggucucaaaguacagg

SEQ ID NO: 783475 - RNA, 22 nt, Human
ugagacaguuuuucuauuucca

SEQ ID NO: 783476 - RNA, 22 nt, Human
uuauacauguguuuugagauga

SEQ ID NO: 783477 - RNA, 22 nt, Human
ucucuguacaguacaugccgug

SEQ ID NO: 783478 - RNA, 22 nt, Human
cuugaaagucagcagaguggau

SEQ ID NO: 783479 - RNA, 22 nt, Human
gagacagugguugcagaagcuc

SEQ ID NO: 783480 - RNA, 22 nt, Human
uggaaauguauuugggcaugcc

SEQ ID NO: 783481 - RNA, 22 nt, Human
gugcuuuuaaaggcaauuagua

SEQ ID NO: 783482 - RNA, 19 nt, Human
uuucccagcccuugcugug

SEQ ID NO: 783483 - RNA, 22 nt, Human
aggcagcuggaggcagagacua

SEQ ID NO: 783484 - RNA, 22 nt, Human
acccaggacaugggcacccgug

SEQ ID NO: 783485 - RNA, 22 nt, Human
aagcaauagcaacaacuuuaca

SEQ ID NO: 783486 - RNA, 22 nt, Human
uagggcaggugaagaaaagcua

SEQ ID NO: 783487 - RNA, 22 nt, Human
uugagaagaaauaguuugcaau

SEQ ID NO: 783488 - RNA, 22 nt, Human
uuauccaagcagaagcugcaca

SEQ ID NO: 783489 - RNA, 22 nt, Human
ggaggaggcggcagaaguuccu

SEQ ID NO: 783490 - RNA, 22 nt, Human
gggaggugauuaggaccaugua

SEQ ID NO: 783491 - RNA, 22 nt, Human
uggaaggaaagguagcagagaa

SEQ ID NO: 783492 - RNA, 22 nt, Human
gaggaggcacuugagcagaugu

SEQ ID NO: 783493 - RNA, 19 nt, Human
agcagcuggagguggagug

SEQ ID NO: 783494 - RNA, 22 nt, Human
ggugguggagccagcugggagu

SEQ ID NO: 783495 - RNA, 22 nt, Human
uuucaacaccagagaccaugcg

SEQ ID NO: 783496 - RNA, 22 nt, Human
cccagggaagccauuucugacu

SEQ ID NO: 783497 - RNA, 20 nt, Human
uaggcagcuugacccuuggu

SEQ ID NO: 783498 - RNA, 19 nt, Human
uucaggauugacccuacug

SEQ ID NO: 783499 - RNA, 22 nt, Human
gaggcagccucaguggaccucg

SEQ ID NO: 783500 - RNA, 22 nt, Human
gagagguccauuccccugucag

SEQ ID NO: 783501 - RNA, 22 nt, Human
ccagaggaaaaauaucucccua

SEQ ID NO: 783502 - RNA, 22 nt, Human
ucucacuggguauaaaugagua

SEQ ID NO: 783503 - RNA, 22 nt, Human
gcagaggccaggccaccagcaa

SEQ ID NO: 783504 - RNA, 22 nt, Human
augaaacaguguguauagcaaa

SEQ ID NO: 783505 - RNA, 22 nt, Human
cagaggaugaucuggccucucu

SEQ ID NO: 783506 - RNA, 22 nt, Human
cuuagaaaugcagauucucagg

SEQ ID NO: 783507 - RNA, 22 nt, Human
ugcauaaagugccauaguauua

SEQ ID NO: 783508 - RNA, 22 nt, Human
aggagaaggaagugcaucacua

SEQ ID NO: 783509 - RNA, 22 nt, Human
cacaauguauauguauaucaaa

SEQ ID NO: 783510 - RNA, 22 nt, Human
agaaaugaagagagucaagguu

SEQ ID NO: 783511 - RNA, 22 nt, Human
acagucucuccacacugcaggg

SEQ ID NO: 783512 - RNA, 22 nt, Human
ucauuugugugagugauuugac

SEQ ID NO: 783513 - RNA, 22 nt, Human
caggcagggagcuggaaaggau

SEQ ID NO: 783514 - RNA, 23 nt, Human
agggugagcaagcuauggagacc

SEQ ID NO: 783515 - RNA, 22 nt, Human
agaggauguucuaggcacucau

SEQ ID NO: 783516 - RNA, 22 nt, Human
ugaggcaggagaaucacaugaa

SEQ ID NO: 783517 - RNA, 22 nt, Human
ccagaagaccccguccaccucc

SEQ ID NO: 783518 - RNA, 22 nt, Human
cugucauugagccugucagggc

SEQ ID NO: 783519 - RNA, 17 nt, Human
gccucugcuugugucau

SEQ ID NO: 783520 - RNA, 22 nt, Human
acucaggaaauugagauaaugg

SEQ ID NO: 783521 - RNA, 20 nt, Human
guggcaggcagugaaggagc

SEQ ID NO: 783522 - RNA, 22 nt, Human
aaggcaguaaaaucuaccuugc

SEQ ID NO: 783523 - RNA, 22 nt, Human
cccaggaggcagagcuugcagu

SEQ ID NO: 783524 - RNA, 22 nt, Human
uuucuucacaggguauugggug

SEQ ID NO: 783525 - RNA, 22 nt, Human
cuccaggaaagccugaggcccg

SEQ ID NO: 783526 - RNA, 20 nt, Human
aggcaguuagaaggagauga

SEQ ID NO: 783527 - RNA, 17 nt, Human
agagggaaaaugcgguu

SEQ ID NO: 783528 - RNA, 22 nt, Human
ucucaggacuuugggaagcuca

SEQ ID NO: 783529 - RNA, 22 nt, Human
cauuuguaguaucuguuuauau

SEQ ID NO: 783530 - RNA, 22 nt, Human
uuucaguuuccagcuuugucau

SEQ ID NO: 783531 - RNA, 22 nt, Human
aggcagcuuuaacugguaguag

SEQ ID NO: 783532 - RNA, 22 nt, Human
auucugauaucuuauucuagcu

SEQ ID NO: 783533 - RNA, 22 nt, Human
gaccauuuguugaaaagauuau

SEQ ID NO: 783534 - RNA, 22 nt, Human
gaggccuggagccgccuaggcg

SEQ ID NO: 783535 - RNA, 22 nt, Human
cagcuggcaaguggagcagggu

SEQ ID NO: 783536 - RNA, 22 nt, Human
uuugaaagggacaaagucacug

SEQ ID NO: 783537 - RNA, 18 nt, Human
ggcaucugcacagcagcc

SEQ ID NO: 783538 - RNA, 22 nt, Human
guaggcagauaggagugcagcc

SEQ ID NO: 783539 - RNA, 22 nt, Human
cagaggauucccuagugaccug

SEQ ID NO: 783540 - RNA, 22 nt, Human
agaggacagacggaaagugcca

SEQ ID NO: 783541 - RNA, 20 nt, Human
aguuauaguaucuagccaug

SEQ ID NO: 783542 - RNA, 22 nt, Human
cucaggauuuaaaggggcacuc

SEQ ID NO: 783543 - RNA, 22 nt, Human
gaggucaggggagaggcugaug

SEQ ID NO: 783544 - RNA, 19 nt, Human
gcuuuggagggagguucua

SEQ ID NO: 783545 - RNA, 22 nt, Human
agcucccagagcucgagaguaa

SEQ ID NO: 783546 - RNA, 22 nt, Human
aaaggagacuucagaucuccuu

SEQ ID NO: 783547 - RNA, 22 nt, Human
uauuuccaaaagccuauuauga

SEQ ID NO: 783548 - RNA, 22 nt, Human
cuguggaaggccuguccugaaa

SEQ ID NO: 783549 - RNA, 22 nt, Human
ugucuuuggaauauuuagcuga

SEQ ID NO: 783550 - RNA, 22 nt, Human
auuucccaugugaaucaauugg

SEQ ID NO: 783551 - RNA, 22 nt, Human
ucagucuucccuccagugcaac

SEQ ID NO: 783552 - RNA, 22 nt, Human
ucuuuccaaggacucuguagca

SEQ ID NO: 783553 - RNA, 22 nt, Human
gaggagcugggcugagaggguc

SEQ ID NO: 783554 - RNA, 22 nt, Human
agaaaugacacacaugagacau

SEQ ID NO: 783555 - RNA, 22 nt, Human
uugguuuaggaacuggcuugga

SEQ ID NO: 783556 - RNA, 22 nt, Human
cuucuucaagagaaugggagac

SEQ ID NO: 783557 - RNA, 22 nt, Human
caaaucuauauguugauauucu

SEQ ID NO: 783558 - RNA, 20 nt, Human
cccagugaagcauggaagag

SEQ ID NO: 783559 - RNA, 23 nt, Human
aggcagcagguuguccaggguga

SEQ ID NO: 783560 - RNA, 22 nt, Human
cagacaggaauucuggcguggu

SEQ ID NO: 783561 - RNA, 22 nt, Human
guccaugauucugugacacccu

SEQ ID NO: 783562 - RNA, 22 nt, Human
aggagaggcucuaacucugugu

SEQ ID NO: 783563 - RNA, 22 nt, Human
uccuuagagauacugucuugaa

SEQ ID NO: 783564 - RNA, 22 nt, Human
ggcagcuuucaauaggguuaug

SEQ ID NO: 783565 - RNA, 22 nt, Human
guguuuuaagaaagaagcucag

SEQ ID NO: 783566 - RNA, 22 nt, Human
gagccaaggguugccauggaga

SEQ ID NO: 783567 - RNA, 22 nt, Human
aggcagcuggcaaauucuagag

SEQ ID NO: 783568 - RNA, 22 nt, Human
cauuuguaucugggcugcugug

SEQ ID NO: 783569 - RNA, 22 nt, Human
gcaucuaaacuugcaucauugu

SEQ ID NO: 783570 - RNA, 22 nt, Human
gagguggugguggaggcauagc

SEQ ID NO: 783571 - RNA, 22 nt, Human
cccaggaguuugaguucagcau

SEQ ID NO: 783572 - RNA, 22 nt, Human
uugcagcuucgagucuaucugu

SEQ ID NO: 783573 - RNA, 22 nt, Human
ggccaggaagggaagaucagca

SEQ ID NO: 783574 - RNA, 22 nt, Human
aggcaggcccucuggaaaggua

SEQ ID NO: 783575 - RNA, 17 nt, Human
uagcuguguuucagcua

SEQ ID NO: 783576 - RNA, 18 nt, Human
aagaggaggaaacccagg

SEQ ID NO: 783577 - RNA, 22 nt, Human
uggcagcuaucuuuaaugagau

SEQ ID NO: 783578 - RNA, 22 nt, Human
uuuugcuugagugcacaaaaug

SEQ ID NO: 783579 - RNA, 22 nt, Human
augauguugauaaauuacuuua

SEQ ID NO: 783580 - RNA, 22 nt, Human
ucugaaggugcuagagaaagcu

SEQ ID NO: 783581 - RNA, 22 nt, Human
gaaacugugaucguguucuggg

SEQ ID NO: 783582 - RNA, 22 nt, Human
uuguuugaggucacugauauuu

SEQ ID NO: 783583 - RNA, 22 nt, Human
ucuuuguaaaugccuagcauaa

SEQ ID NO: 783584 - RNA, 22 nt, Human
gauuucuuuagguguaauagug

SEQ ID NO: 783585 - RNA, 22 nt, Human
uggcagcugguacagugggucu

SEQ ID NO: 783586 - RNA, 22 nt, Human
aaauuaguacauugcaaagucc

SEQ ID NO: 783587 - RNA, 22 nt, Human
ucccaggauuuuaggcucucag

SEQ ID NO: 783588 - RNA, 22 nt, Human
acagaaauugggcaaauggaag

SEQ ID NO: 783589 - RNA, 22 nt, Human
cagagacauuaagugccaugau

SEQ ID NO: 783590 - RNA, 22 nt, Human
ugaguucucacccauucuucuu

SEQ ID NO: 783591 - RNA, 22 nt, Human
aagugaagaaauacaugagaau

SEQ ID NO: 783592 - RNA, 22 nt, Human
ucugcaggcuuauaggaugggu

SEQ ID NO: 783593 - RNA, 22 nt, Human
ucauuuguaccauuuuuuaaga

SEQ ID NO: 783594 - RNA, 22 nt, Human
gcagcugcagacccucagugcu

SEQ ID NO: 783595 - RNA, 20 nt, Human
uggcaucucucaauuguagg

SEQ ID NO: 783596 - RNA, 22 nt, Human
uuugcaguuucauugcugaaau

SEQ ID NO: 783597 - RNA, 22 nt, Human
ugaggcagugcugggaagccug

SEQ ID NO: 783598 - RNA, 22 nt, Human
aaaauuauucauggcuuuugga

SEQ ID NO: 783599 - RNA, 22 nt, Human
gacccaggguggucaccugaaa

SEQ ID NO: 783600 - RNA, 22 nt, Human
uagagcugggcagugcucugag

SEQ ID NO: 783601 - RNA, 22 nt, Human
cagcaggagcagucagacuccu

SEQ ID NO: 783602 - RNA, 22 nt, Human
cagcuucugcuaucgaacaucu

SEQ ID NO: 783603 - RNA, 22 nt, Human
aggagaggucucccuuccccag

SEQ ID NO: 783604 - RNA, 23 nt, Human
cugcccugaucuugaucuauugu

SEQ ID NO: 783605 - RNA, 22 nt, Human
uuucuaggcacagugucuuccc

SEQ ID NO: 783606 - RNA, 22 nt, Human
ccuggagauuucuucaagcuuu

SEQ ID NO: 783607 - RNA, 18 nt, Human
aggcagacacuagagguc

SEQ ID NO: 783608 - RNA, 22 nt, Human
ggaagaggcugaggccaugcug

SEQ ID NO: 783609 - RNA, 22 nt, Human
gagaggggcccaagccacauag

SEQ ID NO: 783610 - RNA, 22 nt, Human
aagcuggaacaucuugaggaag

SEQ ID NO: 783611 - RNA, 22 nt, Human
ucaucuugcugccauugcuuua

SEQ ID NO: 783612 - RNA, 21 nt, Human
agucuguuaggaugacucuga

SEQ ID NO: 783613 - RNA, 22 nt, Human
auaaaugauucagcaggaaaua

SEQ ID NO: 783614 - RNA, 22 nt, Human
aaugaaauguagcuuauccaua

SEQ ID NO: 783615 - RNA, 22 nt, Human
uucugaaagccaauucauugaa

SEQ ID NO: 783616 - RNA, 22 nt, Human
gcauguguggaggagaugugcu

SEQ ID NO: 783617 - RNA, 19 nt, Human
acaaaugauguugcacuga

SEQ ID NO: 783618 - RNA, 22 nt, Human
uugcucagcacuggagccagcu

SEQ ID NO: 783619 - RNA, 22 nt, Human
gcccaggagguugggcugugca

SEQ ID NO: 783620 - RNA, 22 nt, Human
aucuuucaaucaggaaaaaucu

SEQ ID NO: 783621 - RNA, 22 nt, Human
gggagagguuacccgagcaacu

SEQ ID NO: 783622 - RNA, 22 nt, Human
aggucagcaugaguagaaggua

SEQ ID NO: 783623 - RNA, 22 nt, Human
gugguuuugccauuacaaguaa

SEQ ID NO: 783624 - RNA, 22 nt, Human
ucagugugaggucuuccacccg

SEQ ID NO: 783625 - RNA, 22 nt, Human
gagugcaguuggggugagggga

SEQ ID NO: 783626 - RNA, 22 nt, Human
aaaggugacugcagcagcuauu

SEQ ID NO: 783627 - RNA, 22 nt, Human
agcuggcagcucucagggguac

SEQ ID NO: 783628 - RNA, 22 nt, Human
cucaggauucucgacacucaca

SEQ ID NO: 783629 - RNA, 22 nt, Human
gaggagagaacauuccuccaua

SEQ ID NO: 783630 - RNA, 22 nt, Human
cucaggaugcaggucacaggac

SEQ ID NO: 783631 - RNA, 22 nt, Human
ccaggcugugguuuagauagag

SEQ ID NO: 783632 - RNA, 22 nt, Human
uaaggccauuauggugggcccg

SEQ ID NO: 783633 - RNA, 18 nt, Human
ucuuuggacaacuacugg

SEQ ID NO: 783634 - RNA, 22 nt, Human
gaggucagucagaccaggguuu

SEQ ID NO: 783635 - RNA, 22 nt, Human
gcucccagcaauugaggcagcc

SEQ ID NO: 783636 - RNA, 22 nt, Human
gaaggccacaaaaaaugucaua

SEQ ID NO: 783637 - RNA, 22 nt, Human
agaggcagaaguguucaaaccc

SEQ ID NO: 783638 - RNA, 22 nt, Human
gggagcugaauggcaauggaga

SEQ ID NO: 783639 - RNA, 20 nt, Human
uuucugugagaaacacuguu

SEQ ID NO: 783640 - RNA, 22 nt, Human
guuuuauaggugaaauauuacu

SEQ ID NO: 783641 - RNA, 22 nt, Human
agugcuuugguauagaacuauu

SEQ ID NO: 783642 - RNA, 22 nt, Human
cagcagagcugggcuuugaauu

SEQ ID NO: 783643 - RNA, 22 nt, Human
aguuggagugaacaugagauug

SEQ ID NO: 783644 - RNA, 22 nt, Human
ucugggaacacacgucacuuca

SEQ ID NO: 783645 - RNA, 22 nt, Human
uuucuucauucaccuucacccc

SEQ ID NO: 783646 - RNA, 22 nt, Human
uuggaugaagucuagcuuuagu

SEQ ID NO: 783647 - RNA, 22 nt, Human
auucugagaaaugcauugucag

SEQ ID NO: 783648 - RNA, 22 nt, Human
cuugggaaugcuaacagaugac

SEQ ID NO: 783649 - RNA, 22 nt, Human
agaggaugauuuuaaggacacu

SEQ ID NO: 783650 - RNA, 22 nt, Human
guugaaaguggagaaccugguu

SEQ ID NO: 783651 - RNA, 22 nt, Human
aagcaaaggcaggagcuuguga

SEQ ID NO: 783652 - RNA, 21 nt, Human
ucuugaaaauuguagcaguuu

SEQ ID NO: 783653 - RNA, 22 nt, Human
gagcagcucugggugacccagu

SEQ ID NO: 783654 - RNA, 22 nt, Human
caagauggaguccgggaaugug

SEQ ID NO: 783655 - RNA, 22 nt, Human
guuaucaugcuucaucaucacu

SEQ ID NO: 783656 - RNA, 22 nt, Human
uccucagacuucccuuugugua

SEQ ID NO: 783657 - RNA, 22 nt, Human
ggagggacccacucuagaggug

SEQ ID NO: 783658 - RNA, 20 nt, Human
uugagcuuuuaguacagaca

SEQ ID NO: 783659 - RNA, 22 nt, Human
auauuucaugggguuccauacu

SEQ ID NO: 783660 - RNA, 22 nt, Human
gagguagcaugcuggaagggac

SEQ ID NO: 783661 - RNA, 22 nt, Human
ggcagccuugacuagugacuua

SEQ ID NO: 783662 - RNA, 22 nt, Human
ugaggcagaaaauagcaguuca

SEQ ID NO: 783663 - RNA, 22 nt, Human
uguggaaaauuggaacguuccu

SEQ ID NO: 783664 - RNA, 22 nt, Human
cagucucucugaaguauuaaga

SEQ ID NO: 783665 - RNA, 22 nt, Human
cccaggagacauauagaaggac

SEQ ID NO: 783666 - RNA, 22 nt, Human
auauucuucuuguucagacuau

SEQ ID NO: 783667 - RNA, 22 nt, Human
gcaggagacaacuguaaggaga

SEQ ID NO: 783668 - RNA, 20 nt, Human
cgugcugugaccuugagcau

SEQ ID NO: 783669 - RNA, 22 nt, Human
auugcuguggaaauauaagaug

SEQ ID NO: 783670 - RNA, 22 nt, Human
cagaggcauacucccagucuug

SEQ ID NO: 783671 - RNA, 22 nt, Human
acugcuuuaucugagaaguccu

SEQ ID NO: 783672 - RNA, 22 nt, Human
cucuucuuuaguccagaccauc

SEQ ID NO: 783673 - RNA, 22 nt, Human
auucuucauuuacuguuacuug

SEQ ID NO: 783674 - RNA, 22 nt, Human
uuucccaguucccugcucuaua

SEQ ID NO: 783675 - RNA, 22 nt, Human
cgaggcagacaaaaguuggaag

SEQ ID NO: 783676 - RNA, 22 nt, Human
agaccaagacuauaaugagagg

SEQ ID NO: 783677 - RNA, 22 nt, Human
aagcuggagaguuaggugaaua

SEQ ID NO: 783678 - RNA, 22 nt, Human
caggcagcucuaauggaaagug

SEQ ID NO: 783679 - RNA, 22 nt, Human
ccucaggauccgcaggugcagu

SEQ ID NO: 783680 - RNA, 22 nt, Human
uuccaagaguaaauucaaauug

SEQ ID NO: 783681 - RNA, 22 nt, Human
cuggccaggcuugggacagaca

SEQ ID NO: 783682 - RNA, 23 nt, Human
cuuuuaacuugaucugagaccag

SEQ ID NO: 783683 - RNA, 22 nt, Human
gcaggcagagguggaggagaca

SEQ ID NO: 783684 - RNA, 19 nt, Human
cccaggagcaguauugaug

SEQ ID NO: 783685 - RNA, 22 nt, Human
cauggcugcgagaagagugggu

SEQ ID NO: 783686 - RNA, 22 nt, Human
ccaggagcagauauggacauaa

SEQ ID NO: 783687 - RNA, 22 nt, Human
cuugcuucauuagugucuuagu

SEQ ID NO: 783688 - RNA, 22 nt, Human
uggcagcugaggggaggcuuug

SEQ ID NO: 783689 - RNA, 22 nt, Human
aaggagaaaugguagaugugca

SEQ ID NO: 783690 - RNA, 22 nt, Human
cuugaaagcacuuaguaaauua

SEQ ID NO: 783691 - RNA, 22 nt, Human
cagcagagaccaagugauuuga

SEQ ID NO: 783692 - RNA, 22 nt, Human
ugcucccagggacucuggcugg

SEQ ID NO: 783693 - RNA, 21 nt, Human
agcaccuuacagcuauaaugg

SEQ ID NO: 783694 - RNA, 22 nt, Human
aggagggaccuaggaauauugc

SEQ ID NO: 783695 - RNA, 22 nt, Human
cuucugaggcagcuauucaguu

SEQ ID NO: 783696 - RNA, 22 nt, Human
uccaggagguugagacugcagu

SEQ ID NO: 783697 - RNA, 22 nt, Human
agaggagguccuuuucugaugu

SEQ ID NO: 783698 - RNA, 22 nt, Human
uacaucauaauaauacuuagaa

SEQ ID NO: 783699 - RNA, 22 nt, Human
aagggaggggauguaagccugg

SEQ ID NO: 783700 - RNA, 22 nt, Human
aggacuuagaacauuauguacu

SEQ ID NO: 783701 - RNA, 23 nt, Human
uucauuugucuacuucacuuguu

SEQ ID NO: 783702 - RNA, 22 nt, Human
agaggaggcagcuuaacucagu

SEQ ID NO: 783703 - RNA, 22 nt, Human
uuauuugcccauguuuagcaga

SEQ ID NO: 783704 - RNA, 22 nt, Human
uguucucacuggaugcuucaca

SEQ ID NO: 783705 - RNA, 22 nt, Human
uugcaucuaccauaucaaagau

SEQ ID NO: 783706 - RNA, 22 nt, Human
uuugaaguucccccauaucaga

SEQ ID NO: 783707 - RNA, 22 nt, Human
ugccuguguccccuucuuggca

SEQ ID NO: 783708 - RNA, 22 nt, Human
cccuggaguccuggcaguugau

SEQ ID NO: 783709 - RNA, 22 nt, Human
agacucaagacugcagaagacg

SEQ ID NO: 783710 - RNA, 22 nt, Human
auucuucaccugagucagucua

SEQ ID NO: 783711 - RNA, 22 nt, Human
aguccaugguucugacucaucu

SEQ ID NO: 783712 - RNA, 22 nt, Human
auuauucuuaugucaucauggc

SEQ ID NO: 783713 - RNA, 22 nt, Human
ccaggagacuguacugauauuu

SEQ ID NO: 783714 - RNA, 22 nt, Human
auguuucaccagcaaauuaccu

SEQ ID NO: 783715 - RNA, 22 nt, Human
gucuucuuguuuugaaggaaau

SEQ ID NO: 783716 - RNA, 22 nt, Human
uauugaugcuuggauugggcca

SEQ ID NO: 783717 - RNA, 22 nt, Human
acuguugucaggcugcuuugga

SEQ ID NO: 783718 - RNA, 22 nt, Human
gaggccaggagugcuguaaguu

SEQ ID NO: 783719 - RNA, 22 nt, Human
aggguagggcccggagacagac

SEQ ID NO: 783720 - RNA, 17 nt, Human
agauggcaggaggcaga

SEQ ID NO: 783721 - RNA, 22 nt, Human
uucacagacuuuccauagauug

SEQ ID NO: 783722 - RNA, 22 nt, Human
cagcagaggcacgucugugaau

SEQ ID NO: 783723 - RNA, 17 nt, Human
agagagagcaugccacc

SEQ ID NO: 783724 - RNA, 17 nt, Human
ucauuuguugugacuag

SEQ ID NO: 783725 - RNA, 22 nt, Human
uagugcuuuaaguuuacagaga

SEQ ID NO: 783726 - RNA, 22 nt, Human
gaaauauuucucuugagccccu

SEQ ID NO: 783727 - RNA, 22 nt, Human
gggcagcucuggcugugggaag

SEQ ID NO: 783728 - RNA, 22 nt, Human
uuugaaaggguuaugagacuga

SEQ ID NO: 783729 - RNA, 19 nt, Human
cuugcugggugguuucugc

SEQ ID NO: 783730 - RNA, 22 nt, Human
aucacauucuuucaaagcaguc

SEQ ID NO: 783731 - RNA, 22 nt, Human
uucuucaaugugcccuguuuuc

SEQ ID NO: 783732 - RNA, 22 nt, Human
auguagagcaguguuguccaau

SEQ ID NO: 783733 - RNA, 21 nt, Human
aggucagcccagcucuggaag

SEQ ID NO: 783734 - RNA, 22 nt, Human
gugcugugucuaucaggaauaa

SEQ ID NO: 783735 - RNA, 22 nt, Human
cccaggaggugugcccaacucg

SEQ ID NO: 783736 - RNA, 22 nt, Human
aggacaggauugagcugaacug

SEQ ID NO: 783737 - RNA, 22 nt, Human
aggcugcucaguagauggagcu

SEQ ID NO: 783738 - RNA, 22 nt, Human
cucaggauuaaggaaucuaaau

SEQ ID NO: 783739 - RNA, 22 nt, Human
uaucuaaaggauuuaauuuagu

SEQ ID NO: 783740 - RNA, 22 nt, Human
aggcaguggagcuggaauaggc

SEQ ID NO: 783741 - RNA, 22 nt, Human
uuccaugaagggcagccucuca

SEQ ID NO: 783742 - RNA, 22 nt, Human
gagcagcucgagaaggaagcag

SEQ ID NO: 783743 - RNA, 22 nt, Human
auucauuuagguauucacuuac

SEQ ID NO: 783744 - RNA, 22 nt, Human
uuuuaucugcuucauuaguuga

SEQ ID NO: 783745 - RNA, 22 nt, Human
uugcauuuuuagaugcuucugu

SEQ ID NO: 783746 - RNA, 22 nt, Human
aggaaaggccuuugcauuuggu

SEQ ID NO: 783747 - RNA, 22 nt, Human
ggaggcagaacuucccgucagu

SEQ ID NO: 783748 - RNA, 22 nt, Human
gcauguguuauuuuauguauga

SEQ ID NO: 783749 - RNA, 22 nt, Human
agcugccccaugagaggcaggu

SEQ ID NO: 783750 - RNA, 17 nt, Human
cauuuguugaucaguug

SEQ ID NO: 783751 - RNA, 22 nt, Human
auguuuuugagauacaaacaga

SEQ ID NO: 783752 - RNA, 22 nt, Human
uuuucagugggcaaugauguga

SEQ ID NO: 783753 - RNA, 17 nt, Human
aggcaggcagagcggga

SEQ ID NO: 783754 - RNA, 22 nt, Human
aaucauaauuguauacauucau

SEQ ID NO: 783755 - RNA, 22 nt, Human
gugauuuucuccuccuagaagu

SEQ ID NO: 783756 - RNA, 22 nt, Human
ggugaagggccuuaggagacag

SEQ ID NO: 783757 - RNA, 22 nt, Human
uccaugagaacccuuggagaua

SEQ ID NO: 783758 - RNA, 23 nt, Human
ggcagcucucaucugaugacuga

SEQ ID NO: 783759 - RNA, 22 nt, Human
cucacugucuguacuagcugau

SEQ ID NO: 783760 - RNA, 22 nt, Human
gcccaggauaaugcugucccug

SEQ ID NO: 783761 - RNA, 22 nt, Human
cuccacagcucaggcucagagu

SEQ ID NO: 783762 - RNA, 22 nt, Human
ccagcagagucuaggaaggagg

SEQ ID NO: 783763 - RNA, 22 nt, Human
caggacagagcccagacugugu

SEQ ID NO: 783764 - RNA, 22 nt, Human
agcugccgaugcccagcugcau

SEQ ID NO: 783765 - RNA, 17 nt, Human
gcuguaguuugauaaga

SEQ ID NO: 783766 - RNA, 22 nt, Human
ugaaagguuaaaaguaguauug

SEQ ID NO: 783767 - RNA, 21 nt, Human
acagacagggccagugucccc

SEQ ID NO: 783768 - RNA, 22 nt, Human
cccaggcagugugugcaugcgu

SEQ ID NO: 783769 - RNA, 22 nt, Human
agugugucugaucacuugugag

SEQ ID NO: 783770 - RNA, 21 nt, Human
agggagcuggccacacagccu

SEQ ID NO: 783771 - RNA, 22 nt, Human
aucaggaugcugucaguuacca

SEQ ID NO: 783772 - RNA, 22 nt, Human
guugaaagaugucuugguuccc

SEQ ID NO: 783773 - RNA, 22 nt, Human
aggcacaggccucagcacccag

SEQ ID NO: 783774 - RNA, 22 nt, Human
uugaaauacugcauuguucagu

SEQ ID NO: 783775 - RNA, 22 nt, Human
uuggcagugaugcagcuuguuc

SEQ ID NO: 783776 - RNA, 22 nt, Human
uaauacagaaguguauuaaaau

SEQ ID NO: 783777 - RNA, 19 nt, Human
ucucacaguuuccuugccu

SEQ ID NO: 783778 - RNA, 22 nt, Human
ucagguggcuuggagggggacg

SEQ ID NO: 783779 - RNA, 22 nt, Human
ugugaaagcaagucuaguucuc

SEQ ID NO: 783780 - RNA, 22 nt, Human
aggaugaauaacugaaauggug

SEQ ID NO: 783781 - RNA, 22 nt, Human
augaggcaaucaugguccaguu

SEQ ID NO: 783782 - RNA, 22 nt, Human
gcccaggagccuggagaugugu

SEQ ID NO: 783783 - RNA, 22 nt, Human
agcccaggaaguugaggcuugc

SEQ ID NO: 783784 - RNA, 22 nt, Human
caggaugagguagaggcagaua

SEQ ID NO: 783785 - RNA, 18 nt, Human
aagaggaggagcagguug

SEQ ID NO: 783786 - RNA, 22 nt, Human
gucuucuuuaaccuacuaaagc

SEQ ID NO: 783787 - RNA, 22 nt, Human
uucuuuucuuuaggcauugugu

SEQ ID NO: 783788 - RNA, 22 nt, Human
cccgggaggaggaaguugcagu

SEQ ID NO: 783789 - RNA, 22 nt, Human
agugcuuucuugcuccaucagu

SEQ ID NO: 783790 - RNA, 22 nt, Human
guugacagcuggugagcugcua

SEQ ID NO: 783791 - RNA, 22 nt, Human
gagaggcagaggccugaaaccg

SEQ ID NO: 783792 - RNA, 22 nt, Human
gagggcuccauuccccgugccc

SEQ ID NO: 783793 - RNA, 22 nt, Human
cugcugugcaggugccuaugau

SEQ ID NO: 783794 - RNA, 22 nt, Human
caggauggucagaugcauuguc

SEQ ID NO: 783795 - RNA, 22 nt, Human
ccuggauucaagucuuucuuuc

SEQ ID NO: 783796 - RNA, 22 nt, Human
gaggcagcaauaaaaagaauuu

SEQ ID NO: 783797 - RNA, 20 nt, Human
auuuggcaugaaguauugau

SEQ ID NO: 783798 - RNA, 22 nt, Human
guguugaugacauuuuagaaac

SEQ ID NO: 783799 - RNA, 22 nt, Human
ggauggcagucugcaugagaaa

SEQ ID NO: 783800 - RNA, 22 nt, Human
gcaggagacuggcugugguagu

SEQ ID NO: 783801 - RNA, 22 nt, Human
uguucuucuagauugccuuuua

SEQ ID NO: 783802 - RNA, 22 nt, Human
gaacccaggcuuuugaggcugu

SEQ ID NO: 783803 - RNA, 22 nt, Human
cucccagagaccaagcugagaa

SEQ ID NO: 783804 - RNA, 19 nt, Human
gcagcugcuugaaaagaaa

SEQ ID NO: 783805 - RNA, 22 nt, Human
ggguggaguagaaagaugaauu

SEQ ID NO: 783806 - RNA, 22 nt, Human
aaggcaguuugggccaccaucu

SEQ ID NO: 783807 - RNA, 22 nt, Human
ugaguuuuuucaacauaugaag

SEQ ID NO: 783808 - RNA, 22 nt, Human
uggcagcuauuacaaggaaguc

SEQ ID NO: 783809 - RNA, 22 nt, Human
ugaguaauaaacugucuugcuc

SEQ ID NO: 783810 - RNA, 20 nt, Human
uucuucucuaguuaucuuca

SEQ ID NO: 783811 - RNA, 22 nt, Human
ugaaaggugacauuucuuggau

SEQ ID NO: 783812 - RNA, 22 nt, Human
uucugaaccauugagcacugcc

SEQ ID NO: 783813 - RNA, 22 nt, Human
agaagucauuuauguuagauga

SEQ ID NO: 783814 - RNA, 22 nt, Human
uaacaauaguguuugcuaguca

SEQ ID NO: 783815 - RNA, 22 nt, Human
uugaagaggacuuugcagcugu

SEQ ID NO: 783816 - RNA, 23 nt, Human
uugcacauuggagcuggucuucu

SEQ ID NO: 783817 - RNA, 23 nt, Human
uccaggagcaugcuggcuggcga

SEQ ID NO: 783818 - RNA, 22 nt, Human
aaauacagaguugcuuaaaagc

SEQ ID NO: 783819 - RNA, 22 nt, Human
ugaaaugagagcacagaauaaa

SEQ ID NO: 783820 - RNA, 22 nt, Human
guaggcagucucucaggugauc

SEQ ID NO: 783821 - RNA, 22 nt, Human
cuccaugaauuugagcuuugug

SEQ ID NO: 783822 - RNA, 22 nt, Human
gcuuccuaaaugcacagggcag

SEQ ID NO: 783823 - RNA, 22 nt, Human
aaauuauuacaagcuaguuggc

SEQ ID NO: 783824 - RNA, 22 nt, Human
uucuucaaccaucuacauaaac

SEQ ID NO: 783825 - RNA, 22 nt, Human
uguuguuuucucauggagaaua

SEQ ID NO: 783826 - RNA, 19 nt, Human
cucucacucgccacauccu

SEQ ID NO: 783827 - RNA, 23 nt, Human
cuuuuaacuagaguaucagcugc

SEQ ID NO: 783828 - RNA, 22 nt, Human
ucucacugcaaauauuauguau

SEQ ID NO: 783829 - RNA, 22 nt, Human
gagggcuccucacauucucuau

SEQ ID NO: 783830 - RNA, 22 nt, Human
uauuucagcacaugggauaggu

SEQ ID NO: 783831 - RNA, 22 nt, Human
auauucuugugauuauaaagua

SEQ ID NO: 783832 - RNA, 22 nt, Human
aucaggauucaguaucuccagc

SEQ ID NO: 783833 - RNA, 22 nt, Human
gagggagugccagagggccagc

SEQ ID NO: 783834 - RNA, 22 nt, Human
gaggcaguuugccaugccagga

SEQ ID NO: 783835 - RNA, 20 nt, Human
gggcagcuccccucauucug

SEQ ID NO: 783836 - RNA, 22 nt, Human
cagaguggcacucugcuggaug

SEQ ID NO: 783837 - RNA, 22 nt, Human
gagggaugguaguugacacuga

SEQ ID NO: 783838 - RNA, 22 nt, Human
cuuaaauuggaugaguuaaguu

SEQ ID NO: 783839 - RNA, 22 nt, Human
aagagggcugcaaucuuauugc

SEQ ID NO: 783840 - RNA, 22 nt, Human
caguuucuuggaugccaauuuc

SEQ ID NO: 783841 - RNA, 22 nt, Human
cgaggcagaggcugaaacggcu

SEQ ID NO: 783842 - RNA, 21 nt, Human
uggagacucugguucuuugug

SEQ ID NO: 783843 - RNA, 17 nt, Human
aaucuguuuacagucag

SEQ ID NO: 783844 - RNA, 22 nt, Human
cugcuguguuucugcuagaaaa

SEQ ID NO: 783845 - RNA, 22 nt, Human
gauggcagguaguggucucauc

SEQ ID NO: 783846 - RNA, 20 nt, Human
cucaggauacugcaaaguug

SEQ ID NO: 783847 - RNA, 22 nt, Human
ccagacaggaacacacaucucc

SEQ ID NO: 783848 - RNA, 22 nt, Human
aaccauuugccauuaucuuaag

SEQ ID NO: 783849 - RNA, 22 nt, Human
gagagcaggaggcagcgggacg

SEQ ID NO: 783850 - RNA, 20 nt, Human
augugucuguaaacaacucu

SEQ ID NO: 783851 - RNA, 22 nt, Human
acuugcugguggcauuuacagu

SEQ ID NO: 783852 - RNA, 22 nt, Human
gcuggcaggagccuuucccuuu

SEQ ID NO: 783853 - RNA, 22 nt, Human
aggguggcugaguagauggaag

SEQ ID NO: 783854 - RNA, 22 nt, Human
uagcacauuguugaccagaagg

SEQ ID NO: 783855 - RNA, 22 nt, Human
gaaacugugaggaucuuaacuu

SEQ ID NO: 783856 - RNA, 22 nt, Human
ugucucugaggugagggucagc

SEQ ID NO: 783857 - RNA, 22 nt, Human
ucuacuguagugaugcugcagu

SEQ ID NO: 783858 - RNA, 22 nt, Human
auucaaguccagcuucucuaca

SEQ ID NO: 783859 - RNA, 22 nt, Human
aaauuauaggugccaccuugga

SEQ ID NO: 783860 - RNA, 22 nt, Human
auugaaagauauacuguucuca

SEQ ID NO: 783861 - RNA, 15 nt, Human
uggcagcuuguuaag

SEQ ID NO: 783862 - RNA, 22 nt, Human
caggguggggaaauagcgcccu

SEQ ID NO: 783863 - RNA, 22 nt, Human
gaggcugcccaacuggagugga

SEQ ID NO: 783864 - RNA, 22 nt, Human
uugaaaguagcagcugcauaug

SEQ ID NO: 783865 - RNA, 22 nt, Human
ucccaggagcaccuuuugagcc

SEQ ID NO: 783866 - RNA, 18 nt, Human
agaggggagguaagucug

SEQ ID NO: 783867 - RNA, 22 nt, Human
ccagcagagcauggggaggaag

SEQ ID NO: 783868 - RNA, 22 nt, Human
ccucagggaaugggaggcuggg

SEQ ID NO: 783869 - RNA, 20 nt, Human
guugaaaguaauaugaugcu

SEQ ID NO: 783870 - RNA, 22 nt, Human
aaauuagucgguuuaggaauuu

SEQ ID NO: 783871 - RNA, 19 nt, Human
ccaggagagcuuggagaag

SEQ ID NO: 783872 - RNA, 22 nt, Human
agguaggggguuugggaacugc

SEQ ID NO: 783873 - RNA, 22 nt, Human
ggcucagagaccugcgaucuga

SEQ ID NO: 783874 - RNA, 22 nt, Human
uuauccuggauuauauauguga

SEQ ID NO: 783875 - RNA, 22 nt, Human
cucucagacugaagggccugug

SEQ ID NO: 783876 - RNA, 22 nt, Human
uucucagagugaccaagucuuu

SEQ ID NO: 783877 - RNA, 22 nt, Human
cuggcuuucucugugguguuca

SEQ ID NO: 783878 - RNA, 19 nt, Human
uggagggguuugaaugugg

SEQ ID NO: 783879 - RNA, 22 nt, Human
cccaggaagagugaguggcauu

SEQ ID NO: 783880 - RNA, 22 nt, Human
aguuuucacacucaccaaaagg

SEQ ID NO: 783881 - RNA, 22 nt, Human
uguuuucagucauauagcaggu

SEQ ID NO: 783882 - RNA, 22 nt, Human
agucuucucauuucacaugcuu

SEQ ID NO: 783883 - RNA, 22 nt, Human
cacaggagagcugggaggugcc

SEQ ID NO: 783884 - RNA, 22 nt, Human
uuaauuaaauucaugagcauug

SEQ ID NO: 783885 - RNA, 19 nt, Human
ucugccucuggucaggcuc

SEQ ID NO: 783886 - RNA, 22 nt, Human
aucuuucuccauauacaucuuu

SEQ ID NO: 783887 - RNA, 22 nt, Human
gaggcagcaucuauggugggaa

SEQ ID NO: 783888 - RNA, 22 nt, Human
gagggugggccagauaugaggg

SEQ ID NO: 783889 - RNA, 22 nt, Human
uggcagcugcguuguguuucug

SEQ ID NO: 783890 - RNA, 22 nt, Human
cuccaggaaaauagggaaugag

SEQ ID NO: 783891 - RNA, 21 nt, Human
aaaggccauaaucacggagca

SEQ ID NO: 783892 - RNA, 22 nt, Human
ucaugcuuaaaagacacuugag

SEQ ID NO: 783893 - RNA, 22 nt, Human
agagacagaggcaauauagcuu

SEQ ID NO: 783894 - RNA, 23 nt, Human
uuuuccagaaucgacucuguaga

SEQ ID NO: 783895 - RNA, 22 nt, Human
gggauggggagcuggaaagggg

SEQ ID NO: 783896 - RNA, 22 nt, Human
uggaagggagugacagucagag

SEQ ID NO: 783897 - RNA, 22 nt, Human
ggacaagccugugaguggguuu

SEQ ID NO: 783898 - RNA, 22 nt, Human
gaggccagcuaguccaggaagu

SEQ ID NO: 783899 - RNA, 22 nt, Human
cccaggaggacauuccauaccc

SEQ ID NO: 783900 - RNA, 22 nt, Human
aucugccuggcuccaggugagc

SEQ ID NO: 783901 - RNA, 22 nt, Human
cucuucuuauggccguggcuga

SEQ ID NO: 783902 - RNA, 22 nt, Human
uuugacauuauccuguuacugg

SEQ ID NO: 783903 - RNA, 22 nt, Human
cccaugagauucugaauuuggc

SEQ ID NO: 783904 - RNA, 22 nt, Human
aggccagccucaggcagggacc

SEQ ID NO: 783905 - RNA, 22 nt, Human
acacaaugcauauuuuuccaga

SEQ ID NO: 783906 - RNA, 22 nt, Human
acaggccacaguggagucucug

SEQ ID NO: 783907 - RNA, 22 nt, Human
aaacugcuuuccacaguggcua

SEQ ID NO: 783908 - RNA, 22 nt, Human
guucuucagcauuagaagucau

SEQ ID NO: 783909 - RNA, 21 nt, Human
uucuucuuggacuguuuuggc

SEQ ID NO: 783910 - RNA, 22 nt, Human
aaucuucuuucuuaacaguaca

SEQ ID NO: 783911 - RNA, 17 nt, Human
agaacuguaguagcucc

SEQ ID NO: 783912 - RNA, 22 nt, Human
uugacacaguuuucucauuaag

SEQ ID NO: 783913 - RNA, 22 nt, Human
aggcagacucaauggcuagaua

SEQ ID NO: 783914 - RNA, 22 nt, Human
ugcauuuccagauuucuggagu

SEQ ID NO: 783915 - RNA, 22 nt, Human
uuuuaguguagucaccgugggu

SEQ ID NO: 783916 - RNA, 22 nt, Human
cacauauuugaugaagcuuugu

SEQ ID NO: 783917 - RNA, 22 nt, Human
uccaggaguccuggguggcccc

SEQ ID NO: 783918 - RNA, 21 nt, Human
ggauggauagggaagagauuu

SEQ ID NO: 783919 - RNA, 22 nt, Human
cuuugcaaacugucacacuuuc

SEQ ID NO: 783920 - RNA, 22 nt, Human
aggcagacugugcgggaagagu

SEQ ID NO: 783921 - RNA, 22 nt, Human
auggaaagggaagcaaggaaca

SEQ ID NO: 783922 - RNA, 22 nt, Human
cagaauggcuuuuauggcucag

SEQ ID NO: 783923 - RNA, 22 nt, Human
gacccaggcccaaggcugccag

SEQ ID NO: 783924 - RNA, 21 nt, Human
uuugaaagcuacaucuauagc

SEQ ID NO: 783925 - RNA, 22 nt, Human
acauuguuugagaauacagaug

SEQ ID NO: 783926 - RNA, 22 nt, Human
gggcagcuggccagguauucug

SEQ ID NO: 783927 - RNA, 22 nt, Human
gaggcagcuuggggcugugggu

SEQ ID NO: 783928 - RNA, 22 nt, Human
cugcuucugggaugauggagua

SEQ ID NO: 783929 - RNA, 22 nt, Human
ugccgcagugcggggagggccc

SEQ ID NO: 783930 - RNA, 22 nt, Human
uagcuguguaagcuugguaaga

SEQ ID NO: 783931 - RNA, 22 nt, Human
cugcacaguuugauuucuugcu

SEQ ID NO: 783932 - RNA, 22 nt, Human
agaggccagguccagaguuugu

SEQ ID NO: 783933 - RNA, 22 nt, Human
ccaggagaugggaaaguagcag

SEQ ID NO: 783934 - RNA, 22 nt, Human
agugcuuugaacgaaaggcuga

SEQ ID NO: 783935 - RNA, 22 nt, Human
cagcuccugggccaucuccuag

SEQ ID NO: 783936 - RNA, 22 nt, Human
ugcuuuggaucuauuugcugag

SEQ ID NO: 783937 - RNA, 22 nt, Human
agaggggaggcgaaccagaguc

SEQ ID NO: 783938 - RNA, 22 nt, Human
cggcagcucgagggccacccgu

SEQ ID NO: 783939 - RNA, 22 nt, Human
aggagggagaugcccauccugg

SEQ ID NO: 783940 - RNA, 22 nt, Human
uugauuucuauucagauguaga

SEQ ID NO: 783941 - RNA, 22 nt, Human
cccaggagguggagguugcagu

SEQ ID NO: 783942 - RNA, 22 nt, Human
uggcaggcagugugggagcugg

SEQ ID NO: 783943 - RNA, 22 nt, Human
uucacagauguauuggaacucc

SEQ ID NO: 783944 - RNA, 22 nt, Human
gaagcagcagcuggggacaguu

SEQ ID NO: 783945 - RNA, 18 nt, Human
ccagguggugacagagau

SEQ ID NO: 783946 - RNA, 22 nt, Human
uaucuuguaauagguccacuug

SEQ ID NO: 783947 - RNA, 22 nt, Human
cacauauuguaguucaccagga

SEQ ID NO: 783948 - RNA, 22 nt, Human
cccaggaggaggaaaaagcucg

SEQ ID NO: 783949 - RNA, 22 nt, Human
gcugucccgcugacuuccagcu

SEQ ID NO: 783950 - RNA, 22 nt, Human
agucacuguucugucaugucaa

SEQ ID NO: 783951 - RNA, 22 nt, Human
ccaggcagcaaauuuucugaau

SEQ ID NO: 783952 - RNA, 22 nt, Human
ucccaggacaggccacauggaa

SEQ ID NO: 783953 - RNA, 22 nt, Human
acaugauuuuaguaucauaaua

SEQ ID NO: 783954 - RNA, 22 nt, Human
gaggcugccccuuccucagcug

SEQ ID NO: 783955 - RNA, 22 nt, Human
uuuguaaaggccugaauuucag

SEQ ID NO: 783956 - RNA, 22 nt, Human
cugcuguggugucaagcaucuc

SEQ ID NO: 783957 - RNA, 22 nt, Human
uggcaucucaaacaggcagauu

SEQ ID NO: 783958 - RNA, 22 nt, Human
gaaauauuguacuggagauguu

SEQ ID NO: 783959 - RNA, 19 nt, Human
uggagaggaaaugcugcuc

SEQ ID NO: 783960 - RNA, 22 nt, Human
agacagcuaauaaaugagugug

SEQ ID NO: 783961 - RNA, 22 nt, Human
gaggcagcugaaggagugacag

SEQ ID NO: 783962 - RNA, 22 nt, Human
gaggccaggggccuggagauga

SEQ ID NO: 783963 - RNA, 22 nt, Human
caacugagcaguagcgucugga

SEQ ID NO: 783964 - RNA, 23 nt, Human
uccuuccuuugagaggcuccauc

SEQ ID NO: 783965 - RNA, 22 nt, Human
agaggagugggaagcagugcaa

SEQ ID NO: 783966 - RNA, 17 nt, Human
ggcagcugugugcaugc

SEQ ID NO: 783967 - RNA, 22 nt, Human
gaggcugauucggggaacagca

SEQ ID NO: 783968 - RNA, 22 nt, Human
cagaaggcuuuguggaguagac

SEQ ID NO: 783969 - RNA, 22 nt, Human
ugguuuugcuaaaauagaaaga

SEQ ID NO: 783970 - RNA, 22 nt, Human
uagaaaugauugguugagcucu

SEQ ID NO: 783971 - RNA, 22 nt, Human
auggagacgcaagggaccuagg

SEQ ID NO: 783972 - RNA, 22 nt, Human
gaggguggguuucuugcacguc

SEQ ID NO: 783973 - RNA, 22 nt, Human
ggagaggauguuuuaguaacuu

SEQ ID NO: 783974 - RNA, 22 nt, Human
uucugggacaucuggacaguuu

SEQ ID NO: 783975 - RNA, 22 nt, Human
gaaaggccagcucacagaugag

SEQ ID NO: 783976 - RNA, 22 nt, Human
ccugccugcaccuucucugggg

SEQ ID NO: 783977 - RNA, 22 nt, Human
caaauaguuuuucauguauuau

SEQ ID NO: 783978 - RNA, 22 nt, Human
agggcagccucucagccuaggu

SEQ ID NO: 783979 - RNA, 22 nt, Human
uaucuguuaggaucagagcugg

SEQ ID NO: 783980 - RNA, 22 nt, Human
ccuccuuuccuguuuuccugag

SEQ ID NO: 783981 - RNA, 22 nt, Human
agcaccuugcucuuggccuucc

SEQ ID NO: 783982 - RNA, 22 nt, Human
cuggaggcacccuuagagaggc

SEQ ID NO: 783983 - RNA, 22 nt, Human
ugaggcagcccacuuuccuuag

SEQ ID NO: 783984 - RNA, 22 nt, Human
auucuucagaauaucuggcacu

SEQ ID NO: 783985 - RNA, 22 nt, Human
accaggagggacccugguggcc

SEQ ID NO: 783986 - RNA, 22 nt, Human
guagccauuggcaaugaagccu

SEQ ID NO: 783987 - RNA, 22 nt, Human
guuuuauaauugcuucauaaga

SEQ ID NO: 783988 - RNA, 23 nt, Human
uacaugcuauaauuucacccuca

SEQ ID NO: 783989 - RNA, 22 nt, Human
cuugcugucuugcauuuagagc

SEQ ID NO: 783990 - RNA, 22 nt, Human
aacauucuauuuugcuaaaaca

SEQ ID NO: 783991 - RNA, 22 nt, Human
ggccagcuuugagcugcaggaa

SEQ ID NO: 783992 - RNA, 20 nt, Human
gaguuccccauuucuccugg

SEQ ID NO: 783993 - RNA, 22 nt, Human
acuaagugauucuaagcaucuu

SEQ ID NO: 783994 - RNA, 22 nt, Human
ggcacagagcccagcuuccuag

SEQ ID NO: 783995 - RNA, 22 nt, Human
cugcaucaguggauaugauggu

SEQ ID NO: 783996 - RNA, 22 nt, Human
cccaggagaucuggaucucguc

SEQ ID NO: 783997 - RNA, 22 nt, Human
gacccaggcucgugggacggcu

SEQ ID NO: 783998 - RNA, 22 nt, Human
gcuccucuucucccacugaaug

SEQ ID NO: 783999 - RNA, 22 nt, Human
uucugggagagaaagggccuug

SEQ ID NO: 784000 - RNA, 22 nt, Human
agaaaugacaagacugaucagg

SEQ ID NO: 784001 - RNA, 22 nt, Human
uuuccuaggagauugaucacau

SEQ ID NO: 784002 - RNA, 22 nt, Human
acaauauuguacccagaaguuu

SEQ ID NO: 784003 - RNA, 22 nt, Human
uuugaauagcauaggauuacau

SEQ ID NO: 784004 - RNA, 22 nt, Human
auuugcaaagucguaucuguga

SEQ ID NO: 784005 - RNA, 21 nt, Human
agggagcuuuagguagaaguu

SEQ ID NO: 784006 - RNA, 22 nt, Human
ggugagaggcagaggacagcuu

SEQ ID NO: 784007 - RNA, 23 nt, Human
ucguugaauagcaauagcacaac

SEQ ID NO: 784008 - RNA, 22 nt, Human
ggagaggggcaaguuuaucuag

SEQ ID NO: 784009 - RNA, 22 nt, Human
aucaggaucacugggagucuug

SEQ ID NO: 784010 - RNA, 22 nt, Human
cacaaaugugcagaaaugugag

SEQ ID NO: 784011 - RNA, 20 nt, Human
aaacauucauguacaaguga

SEQ ID NO: 784012 - RNA, 22 nt, Human
cauuuccagcuccugcaucaug

SEQ ID NO: 784013 - RNA, 22 nt, Human
uuucaaagucaauaucauuacc

SEQ ID NO: 784014 - RNA, 22 nt, Human
aauaugcauuaacuguguacau

SEQ ID NO: 784015 - RNA, 22 nt, Human
auuauauaggacuugcccuucc

SEQ ID NO: 784016 - RNA, 22 nt, Human
ccucaggaaaugaauaaauggc

SEQ ID NO: 784017 - RNA, 20 nt, Human
uauuuacaacuuagagccuc

SEQ ID NO: 784018 - RNA, 22 nt, Human
uaauuauuugaagacauuagag

SEQ ID NO: 784019 - RNA, 22 nt, Human
ucaggaauccagacagggcaca

SEQ ID NO: 784020 - RNA, 22 nt, Human
auaguuugaaggcuguucuacu

SEQ ID NO: 784021 - RNA, 22 nt, Human
caggaggaagaacucugcaaca

SEQ ID NO: 784022 - RNA, 19 nt, Human
caugcugaccugcuguggu

SEQ ID NO: 784023 - RNA, 22 nt, Human
ugcaugcugcacacaugcguag

SEQ ID NO: 784024 - RNA, 22 nt, Human
ccaggagacccagggaaggagc

SEQ ID NO: 784025 - RNA, 22 nt, Human
ccagaccacccuggccaugcac

SEQ ID NO: 784026 - RNA, 20 nt, Human
aucaggauucuugcuuuguu

SEQ ID NO: 784027 - RNA, 22 nt, Human
aauauuuguuaguguuuuaaug

SEQ ID NO: 784028 - RNA, 22 nt, Human
agugcuguuagguuaauauagu

SEQ ID NO: 784029 - RNA, 22 nt, Human
ucagcugcucaaauuuauguca

SEQ ID NO: 784030 - RNA, 19 nt, Human
augucuggguaacagcugc

SEQ ID NO: 784031 - RNA, 22 nt, Human
ugaugaaaauaugauucugagg

SEQ ID NO: 784032 - RNA, 22 nt, Human
uccagaaacuuuuccagucuca

SEQ ID NO: 784033 - RNA, 22 nt, Human
ucacaguuauagucuguagaau

SEQ ID NO: 784034 - RNA, 22 nt, Human
guucuucaggcugugcucuaga

SEQ ID NO: 784035 - RNA, 22 nt, Human
uggcagcugauuagauggugcc

SEQ ID NO: 784036 - RNA, 22 nt, Human
uuuaaauuauaguuaaugucug

SEQ ID NO: 784037 - RNA, 22 nt, Human
cccaggagaauauaauguucuu

SEQ ID NO: 784038 - RNA, 22 nt, Human
agggaguuagaaauccaggaua

SEQ ID NO: 784039 - RNA, 22 nt, Human
aguggcaggcggagauguagga

SEQ ID NO: 784040 - RNA, 22 nt, Human
ucuccucuauuucuguauguau

SEQ ID NO: 784041 - RNA, 22 nt, Human
cuugaacucaaugugaggaaga

SEQ ID NO: 784042 - RNA, 22 nt, Human
uccaggagagguagaggguucc

SEQ ID NO: 784043 - RNA, 22 nt, Human
aggaggggcaaugauagucugg

SEQ ID NO: 784044 - RNA, 22 nt, Human
ccugucacgaugacugcacucu

SEQ ID NO: 784045 - RNA, 22 nt, Human
uguauuuuuagaccuuuagacc

SEQ ID NO: 784046 - RNA, 22 nt, Human
gugguaauagagcuccaaacua

SEQ ID NO: 784047 - RNA, 23 nt, Human
cuuugccacccagagccugacag

SEQ ID NO: 784048 - RNA, 17 nt, Human
aagagaggcugagcugg

SEQ ID NO: 784049 - RNA, 23 nt, Human
uuuggacuugugacucuucuccu

SEQ ID NO: 784050 - RNA, 22 nt, Human
uuaaauauuuucagcaggguca

SEQ ID NO: 784051 - RNA, 22 nt, Human
uuauucuuuucuccagaauccc

SEQ ID NO: 784052 - RNA, 22 nt, Human
aagacauugucauuuuauaauu

SEQ ID NO: 784053 - RNA, 22 nt, Human
ucagugaucuaaggguauggcc

SEQ ID NO: 784054 - RNA, 17 nt, Human
caaggccagcaucuuca

SEQ ID NO: 784055 - RNA, 22 nt, Human
uuaaauuccagccucauaauag

SEQ ID NO: 784056 - RNA, 22 nt, Human
uguccucuuccagugcuccuuc

SEQ ID NO: 784057 - RNA, 22 nt, Human
cucaacagcucugccauacucc

SEQ ID NO: 784058 - RNA, 22 nt, Human
uugauacauuuuuaggauaaac

SEQ ID NO: 784059 - RNA, 22 nt, Human
aaaauugaagugaucaggaacu

SEQ ID NO: 784060 - RNA, 22 nt, Human
agugcuguaacaacuuauuugg

SEQ ID NO: 784061 - RNA, 22 nt, Human
aagaagagaaaugugcugcugg

SEQ ID NO: 784062 - RNA, 22 nt, Human
aauaauuagugggacagagaac

SEQ ID NO: 784063 - RNA, 22 nt, Human
acagauguacacucauauauaa

SEQ ID NO: 784064 - RNA, 22 nt, Human
acauugcugcauucuccuuccc

SEQ ID NO: 784065 - RNA, 22 nt, Human
uuugaaaguguuuacuugggaa

SEQ ID NO: 784066 - RNA, 22 nt, Human
aaaauuauggaguaucccaaag

SEQ ID NO: 784067 - RNA, 22 nt, Human
acauucuuaacaguuaaaaacu

SEQ ID NO: 784068 - RNA, 22 nt, Human
cuugcugucccuugguaugaac

SEQ ID NO: 784069 - RNA, 20 nt, Human
ugaaggccauuuguuccaga

SEQ ID NO: 784070 - RNA, 22 nt, Human
ucucaagaucucaagauggccc

SEQ ID NO: 784071 - RNA, 22 nt, Human
cucacuguuuaauagcuggauc

SEQ ID NO: 784072 - RNA, 22 nt, Human
ugaggcagaguaagauacauga

SEQ ID NO: 784073 - RNA, 22 nt, Human
aagggcagaauagagaagaugg

SEQ ID NO: 784074 - RNA, 22 nt, Human
uacuuucuguccuucuguuaaa

SEQ ID NO: 784075 - RNA, 22 nt, Human
uuggaauucaaguuguagcuua

SEQ ID NO: 784076 - RNA, 22 nt, Human
ugaggcagaaauuccuguuuuc

SEQ ID NO: 784077 - RNA, 22 nt, Human
caugcuguguguuuuagcucca

SEQ ID NO: 784078 - RNA, 22 nt, Human
uucauucuuauuugugaucugg

SEQ ID NO: 784079 - RNA, 22 nt, Human
aaaagucugcucucauuucaga

SEQ ID NO: 784080 - RNA, 22 nt, Human
ggcagcuucucccaggcuguuu

SEQ ID NO: 784081 - RNA, 22 nt, Human
gaggcagcuggguccggucggg

SEQ ID NO: 784082 - RNA, 22 nt, Human
ucacaaauauuuuaacaguagg

SEQ ID NO: 784083 - RNA, 22 nt, Human
ugaggcagcaauugauuauuca

SEQ ID NO: 784084 - RNA, 22 nt, Human
caguugcuggaugugcagcucu

SEQ ID NO: 784085 - RNA, 18 nt, Human
gagagggaucccucagga

SEQ ID NO: 784086 - RNA, 22 nt, Human
ccaggagagcucucguucagug

SEQ ID NO: 784087 - RNA, 22 nt, Human
gaggcaguguuuacugcccugu

SEQ ID NO: 784088 - RNA, 22 nt, Human
cuagcaucagaugagaagcugu

SEQ ID NO: 784089 - RNA, 22 nt, Human
uguuuuuaaauaaugauagaaa

SEQ ID NO: 784090 - RNA, 22 nt, Human
gcugauguaagacuuuugguuu

SEQ ID NO: 784091 - RNA, 23 nt, Human
agcacacuuguacaaugcccuag

SEQ ID NO: 784092 - RNA, 22 nt, Human
aggguggccaugagggagagau

SEQ ID NO: 784093 - RNA, 20 nt, Human
ccucaguguccuggacuggg

SEQ ID NO: 784094 - RNA, 22 nt, Human
uuuuaucuucauuccuaucuac

SEQ ID NO: 784095 - RNA, 22 nt, Human
aggcaguggaugucaggaaugg

SEQ ID NO: 784096 - RNA, 22 nt, Human
augcugagugagugaaacccag

SEQ ID NO: 784097 - RNA, 22 nt, Human
uuuauucaucaucuguucauau

SEQ ID NO: 784098 - RNA, 22 nt, Human
gugguuuucuccaacccagaac

SEQ ID NO: 784099 - RNA, 22 nt, Human
auuucucuuagcaagacauuac

SEQ ID NO: 784100 - RNA, 22 nt, Human
uuugaacuucuaccugucauau

SEQ ID NO: 784101 - RNA, 22 nt, Human
cuggcaaguacugggccagcuc

SEQ ID NO: 784102 - RNA, 22 nt, Human
uaucuguucaauggaagaugac

SEQ ID NO: 784103 - RNA, 19 nt, Human
gaggagcuaucggagacag

SEQ ID NO: 784104 - RNA, 22 nt, Human
aggaugagccgcgcaagcugac

SEQ ID NO: 784105 - RNA, 22 nt, Human
cuucucagaggccagaagcuau

SEQ ID NO: 784106 - RNA, 22 nt, Human
uaaugucagcauaguuuauuuu

SEQ ID NO: 784107 - RNA, 22 nt, Human
uuuguuaaauauuuauugagug

SEQ ID NO: 784108 - RNA, 22 nt, Human
gagggcaguagccucguacccu

SEQ ID NO: 784109 - RNA, 22 nt, Human
agggagcugagcugugagcagc

SEQ ID NO: 784110 - RNA, 22 nt, Human
accaggaggccuggagcacaaa

SEQ ID NO: 784111 - RNA, 22 nt, Human
agcaccaugaccuugccauuga

SEQ ID NO: 784112 - RNA, 22 nt, Human
acacagaguauuuagaaggggu

SEQ ID NO: 784113 - RNA, 22 nt, Human
aggccagcucuacccuuggacu

SEQ ID NO: 784114 - RNA, 22 nt, Human
cccaggagaccugugaaaggac

SEQ ID NO: 784115 - RNA, 20 nt, Human
aggagggaccuggauuggcg

SEQ ID NO: 784116 - RNA, 22 nt, Human
ucauuauccuaguaucuugaau

SEQ ID NO: 784117 - RNA, 23 nt, Human
acacauuuuucccguucugaggu

SEQ ID NO: 784118 - RNA, 22 nt, Human
acaugcauacacguacauaccu

SEQ ID NO: 784119 - RNA, 22 nt, Human
acugugugacuguuauuacugu

SEQ ID NO: 784120 - RNA, 22 nt, Human
cuucugcaauaaguuuuggucc

SEQ ID NO: 784121 - RNA, 22 nt, Human
caggagaggaggcuacuucuua

SEQ ID NO: 784122 - RNA, 20 nt, Human
ugugcaggagagugaggcug

SEQ ID NO: 784123 - RNA, 22 nt, Human
ugaaaugagcauuuauucuuua

SEQ ID NO: 784124 - RNA, 23 nt, Human
uggaaagcggaccuggggcagag

SEQ ID NO: 784125 - RNA, 22 nt, Human
gcaucuaaauaaacgugggagu

SEQ ID NO: 784126 - RNA, 22 nt, Human
cuuguccccagcagguugguuu

SEQ ID NO: 784127 - RNA, 18 nt, Human
gaggcagcuagcaauuuu

SEQ ID NO: 784128 - RNA, 22 nt, Human
uuaggaguccagaugucuuggg

SEQ ID NO: 784129 - RNA, 21 nt, Human
gauuuuaaagagacugccaca

SEQ ID NO: 784130 - RNA, 22 nt, Human
ggaggacaggggcugcagcaca

SEQ ID NO: 784131 - RNA, 22 nt, Human
aggcaguguguagcuggaagag

SEQ ID NO: 784132 - RNA, 22 nt, Human
cugcugugacagcugccguguu

SEQ ID NO: 784133 - RNA, 22 nt, Human
uccaggaguccugggagugauu

SEQ ID NO: 784134 - RNA, 22 nt, Human
agaggggaguccuaaucugauu

SEQ ID NO: 784135 - RNA, 18 nt, Human
gucacuguguuucugagc

SEQ ID NO: 784136 - RNA, 22 nt, Human
agugagggaugaagaacugcgg

SEQ ID NO: 784137 - RNA, 22 nt, Human
acucagaaccauuuacucugag

SEQ ID NO: 784138 - RNA, 22 nt, Human
gcucacugcaaccucugcuucc

SEQ ID NO: 784139 - RNA, 22 nt, Human
uugugaguagugccgcaauaaa

SEQ ID NO: 784140 - RNA, 22 nt, Human
ccucaggggucacugugaggag

SEQ ID NO: 784141 - RNA, 22 nt, Human
gcuugaaaauucauagguauuu

SEQ ID NO: 784142 - RNA, 22 nt, Human
ucaggagaaagccaauuagagu

SEQ ID NO: 784143 - RNA, 20 nt, Human
cugcccagccacugagggau

SEQ ID NO: 784144 - RNA, 22 nt, Human
cuguuaaucugcuugcaugaug

SEQ ID NO: 784145 - RNA, 22 nt, Human
cagaaggcuggcagauugagau

SEQ ID NO: 784146 - RNA, 22 nt, Human
acuuucugcaguguuggaaaug

SEQ ID NO: 784147 - RNA, 22 nt, Human
ucauuuguacuugugugcuugu

SEQ ID NO: 784148 - RNA, 22 nt, Human
uaucuguuugcucacagguguu

SEQ ID NO: 784149 - RNA, 22 nt, Human
agucucugcaugccugcugugc

SEQ ID NO: 784150 - RNA, 22 nt, Human
cccaagagguggagguugcagu

SEQ ID NO: 784151 - RNA, 22 nt, Human
uaacauuagguagacauaagcc

SEQ ID NO: 784152 - RNA, 22 nt, Human
augcuuuuaugucacaugguca

SEQ ID NO: 784153 - RNA, 22 nt, Human
cauugcuguuaauugucucuag

SEQ ID NO: 784154 - RNA, 17 nt, Human
ugauaguucauuuuaag

SEQ ID NO: 784155 - RNA, 22 nt, Human
accaggagucuagccuagucaa

SEQ ID NO: 784156 - RNA, 22 nt, Human
uguugauuaguguuuagacuua

SEQ ID NO: 784157 - RNA, 22 nt, Human
ggcagucuuaucagcauuggac

SEQ ID NO: 784158 - RNA, 22 nt, Human
gucaggaugagggaugaggagu

SEQ ID NO: 784159 - RNA, 22 nt, Human
cucacugacgaggaagcugaga

SEQ ID NO: 784160 - RNA, 22 nt, Human
aggcagcaugggccccagcucc

SEQ ID NO: 784161 - RNA, 22 nt, Human
ucauggauggccgggaggugau

SEQ ID NO: 784162 - RNA, 22 nt, Human
gaaggccacaagagaaguuaag

SEQ ID NO: 784163 - RNA, 22 nt, Human
aaagauuugaguucugcuuaua

SEQ ID NO: 784164 - RNA, 22 nt, Human
cuggaguuagaguagacacuga

SEQ ID NO: 784165 - RNA, 22 nt, Human
accaggaggccuugguucugag

SEQ ID NO: 784166 - RNA, 22 nt, Human
aaaacaguuuaggcaucacagu

SEQ ID NO: 784167 - RNA, 22 nt, Human
ccuggagagagaggccaacugc

SEQ ID NO: 784168 - RNA, 19 nt, Human
cccaggagucuggcugguu

SEQ ID NO: 784169 - RNA, 22 nt, Human
ucucuguaguugggcagcugcu

SEQ ID NO: 784170 - RNA, 22 nt, Human
ugaaaugauuauaugguguuug

SEQ ID NO: 784171 - RNA, 22 nt, Human
ccucaggauacaggagccacag

SEQ ID NO: 784172 - RNA, 22 nt, Human
guuuuucuaggaccaugugauu

SEQ ID NO: 784173 - RNA, 22 nt, Human
aaggccagccugagagcuaaca

SEQ ID NO: 784174 - RNA, 22 nt, Human
ucugcaggcucuagaugagguu

SEQ ID NO: 784175 - RNA, 22 nt, Human
agaccgagaaguucuccaggcc

SEQ ID NO: 784176 - RNA, 19 nt, Human
ucucugcuucucuuggcau

SEQ ID NO: 784177 - RNA, 22 nt, Human
cccaggaggcagauguugcagu

SEQ ID NO: 784178 - RNA, 22 nt, Human
caaggccaaagggccacuguca

SEQ ID NO: 784179 - RNA, 22 nt, Human
gaaauauucuugucuuguuuuc

SEQ ID NO: 784180 - RNA, 22 nt, Human
auguuuccauuuucuuguauca

SEQ ID NO: 784181 - RNA, 22 nt, Human
cccaggaaaucaggcuuucuag

SEQ ID NO: 784182 - RNA, 22 nt, Human
agucaauucuuuucaacucaag

SEQ ID NO: 784183 - RNA, 20 nt, Human
uuucuugucggcuguugcug

SEQ ID NO: 784184 - RNA, 22 nt, Human
uacaacauuguguugcuucaua

SEQ ID NO: 784185 - RNA, 22 nt, Human
ggcagcuuguccuucaggagag

SEQ ID NO: 784186 - RNA, 22 nt, Human
aggcagguuggugagaagacug

SEQ ID NO: 784187 - RNA, 22 nt, Human
aagauauucaaagauuuauuag

SEQ ID NO: 784188 - RNA, 22 nt, Human
ugcuuggccuacuuguccuuug

SEQ ID NO: 784189 - RNA, 22 nt, Human
aggcagugcaugcaaaggucgg

SEQ ID NO: 784190 - RNA, 22 nt, Human
gaggcacugcaguacagugacu

SEQ ID NO: 784191 - RNA, 22 nt, Human
cuucagaagaaaagcagugugu

SEQ ID NO: 784192 - RNA, 22 nt, Human
aagcagcuggaagaguaagaug

SEQ ID NO: 784193 - RNA, 22 nt, Human
cagagccacuuggagaugagaa

SEQ ID NO: 784194 - RNA, 18 nt, Human
cugcccagagcacuugug

SEQ ID NO: 784195 - RNA, 22 nt, Human
auuggcaggaaccgaggagggg

SEQ ID NO: 784196 - RNA, 22 nt, Human
ucaggaugagcucauaacuaug

SEQ ID NO: 784197 - RNA, 22 nt, Human
acccaggagcaggcugggcagu

SEQ ID NO: 784198 - RNA, 22 nt, Human
ugugauauuugaguauugucaa

SEQ ID NO: 784199 - RNA, 22 nt, Human
uagugcuuaacacaaagugauu

SEQ ID NO: 784200 - RNA, 22 nt, Human
ggagcuguuggcagcuaucuug

SEQ ID NO: 784201 - RNA, 22 nt, Human
ucaggagaaucagggcuguccu

SEQ ID NO: 784202 - RNA, 22 nt, Human
uuugaagugggcauuagaaccu

SEQ ID NO: 784203 - RNA, 22 nt, Human
agcuggcaguaugacuggugac

SEQ ID NO: 784204 - RNA, 22 nt, Human
cuuccuucugaagcauagaagc

SEQ ID NO: 784205 - RNA, 22 nt, Human
uugcauuugaucuuggguucuc

SEQ ID NO: 784206 - RNA, 22 nt, Human
uuauuauagauuaugcaagauu

SEQ ID NO: 784207 - RNA, 22 nt, Human
caaauguauucucacuucaggg

SEQ ID NO: 784208 - RNA, 22 nt, Human
cagcaggaccauugaggcauca

SEQ ID NO: 784209 - RNA, 23 nt, Human
uuugaaguugacugccuuccaga

SEQ ID NO: 784210 - RNA, 22 nt, Human
gugagggguggcugagcaguuu

SEQ ID NO: 784211 - RNA, 22 nt, Human
uuuaaauggcauuuucccagau

SEQ ID NO: 784212 - RNA, 22 nt, Human
augauguuauuuucagaaacau

SEQ ID NO: 784213 - RNA, 22 nt, Human
augugaggaagaaagagguaag

SEQ ID NO: 784214 - RNA, 22 nt, Human
cuguggaauugaugcuuagugu

SEQ ID NO: 784215 - RNA, 22 nt, Human
agcagaggaggauuuaguuagg

SEQ ID NO: 784216 - RNA, 22 nt, Human
caggaugagaggcccagggaag

SEQ ID NO: 784217 - RNA, 20 nt, Human
ugaggcaggagaauggcaug

SEQ ID NO: 784218 - RNA, 22 nt, Human
uuauggcauauuccucauugua

SEQ ID NO: 784219 - RNA, 22 nt, Human
cugucauuuaagacauucugga

SEQ ID NO: 784220 - RNA, 22 nt, Human
gauggcagcauauugacagcau

SEQ ID NO: 784221 - RNA, 22 nt, Human
aagcagaguccccuucccaugg

SEQ ID NO: 784222 - RNA, 22 nt, Human
acacauauucauauguacuuac

SEQ ID NO: 784223 - RNA, 22 nt, Human
ucucagucuuugcaaggaugcu

SEQ ID NO: 784224 - RNA, 21 nt, Human
uggcaggcagcuggaagcuug

SEQ ID NO: 784225 - RNA, 22 nt, Human
gaggcagcagggcugguuccuu

SEQ ID NO: 784226 - RNA, 22 nt, Human
ugaaaugacaaagguuuuucuu

SEQ ID NO: 784227 - RNA, 22 nt, Human
uacugcauaacuggcauguggg

SEQ ID NO: 784228 - RNA, 22 nt, Human
gaggagaggcuggacgcgguga

SEQ ID NO: 784229 - RNA, 19 nt, Human
uggggcuguguuuugaccc

SEQ ID NO: 784230 - RNA, 19 nt, Human
uggagacugagagugagca

SEQ ID NO: 784231 - RNA, 22 nt, Human
uauuauuaaauggcagaauuuu

SEQ ID NO: 784232 - RNA, 22 nt, Human
aaguauuucguucugaaaaagu

SEQ ID NO: 784233 - RNA, 22 nt, Human
cagcuguggcugccacugcucc

SEQ ID NO: 784234 - RNA, 22 nt, Human
cagcagagaaauuaaacuucug

SEQ ID NO: 784235 - RNA, 22 nt, Human
ggcagcuuguccuggaggaugg

SEQ ID NO: 784236 - RNA, 22 nt, Human
uugacaauguccuuugaauuuc

SEQ ID NO: 784237 - RNA, 20 nt, Human
agggcagcuugaggagccgg

SEQ ID NO: 784238 - RNA, 22 nt, Human
ggcagcucacgggcauggggug

SEQ ID NO: 784239 - RNA, 22 nt, Human
gaaauaagaguccaugccaggu

SEQ ID NO: 784240 - RNA, 22 nt, Human
ucuucccuaaucaccaucuuca

SEQ ID NO: 784241 - RNA, 22 nt, Human
aguuucuuuagauagaaaguuc

SEQ ID NO: 784242 - RNA, 22 nt, Human
augaggcauuccacucaaacuc

SEQ ID NO: 784243 - RNA, 22 nt, Human
ccaggagagcagaagcccaggc

SEQ ID NO: 784244 - RNA, 21 nt, Human
ugcuggaaaaagugguucuag

SEQ ID NO: 784245 - RNA, 22 nt, Human
ugaggcaguugagcuuccugag

SEQ ID NO: 784246 - RNA, 22 nt, Human
uuuuaacuuaaaauacauagau

SEQ ID NO: 784247 - RNA, 22 nt, Human
ucucuuucuauaugugagucuu

SEQ ID NO: 784248 - RNA, 22 nt, Human
uuucaguucaguuuauuauauc

SEQ ID NO: 784249 - RNA, 22 nt, Human
uccaggaggcucugguugacgu

SEQ ID NO: 784250 - RNA, 22 nt, Human
ucacugcugcugccaugaugga

SEQ ID NO: 784251 - RNA, 22 nt, Human
aggcagcguagcaaggcuagua

SEQ ID NO: 784252 - RNA, 22 nt, Human
uauuugaaaguguacaaaaacu

SEQ ID NO: 784253 - RNA, 22 nt, Human
guuuuucuuugugugaagacaa

SEQ ID NO: 784254 - RNA, 20 nt, Human
ggaggguggaagaaagcaag

SEQ ID NO: 784255 - RNA, 22 nt, Human
uguguuauugccacugaagacc

SEQ ID NO: 784256 - RNA, 22 nt, Human
cccaggaagaggggucaggugu

SEQ ID NO: 784257 - RNA, 22 nt, Human
cccaggaaugaggggcggaggc

SEQ ID NO: 784258 - RNA, 22 nt, Human
caggagggcccgagacucuucc

SEQ ID NO: 784259 - RNA, 22 nt, Human
gcucucuugguggcuguccugg

SEQ ID NO: 784260 - RNA, 22 nt, Human
aaguugagaugucauaggagac

SEQ ID NO: 784261 - RNA, 20 nt, Human
uuucaguuaucuugaccuuc

SEQ ID NO: 784262 - RNA, 21 nt, Human
aaugaaguggcuauuuugagg

SEQ ID NO: 784263 - RNA, 22 nt, Human
aaugucugcucuacucaggagg

SEQ ID NO: 784264 - RNA, 22 nt, Human
uccugagagcagcugcuuugga

SEQ ID NO: 784265 - RNA, 22 nt, Human
cuucucagaucucagcuuugag

SEQ ID NO: 784266 - RNA, 22 nt, Human
ugaggggagcuagcaugccuug

SEQ ID NO: 784267 - RNA, 22 nt, Human
ccucacugcuauguguuugcuc

SEQ ID NO: 784268 - RNA, 22 nt, Human
uuucaaaguugggaauuguaau

SEQ ID NO: 784269 - RNA, 22 nt, Human
ucuuuucaucauuuaauaggua

SEQ ID NO: 784270 - RNA, 22 nt, Human
ugcauauuguccuugauauuau

SEQ ID NO: 784271 - RNA, 22 nt, Human
uauguguuugacacccugcaag

SEQ ID NO: 784272 - RNA, 22 nt, Human
augcugugccuggaaagcggcu

SEQ ID NO: 784273 - RNA, 21 nt, Human
ucacaucuauguuaagcaaac

SEQ ID NO: 784274 - RNA, 22 nt, Human
aggcagacaaggucccuggucu

SEQ ID NO: 784275 - RNA, 22 nt, Human
caaggccagggaauuuuucugg

SEQ ID NO: 784276 - RNA, 22 nt, Human
ugcugcugauggcaccuaggca

SEQ ID NO: 784277 - RNA, 22 nt, Human
aaguguagauuauggagugucu

SEQ ID NO: 784278 - RNA, 22 nt, Human
aggccagaugucgggcuagaag

SEQ ID NO: 784279 - RNA, 22 nt, Human
gaggcagcugggauacaaggga

SEQ ID NO: 784280 - RNA, 20 nt, Human
cccagguaggugccaugagu

SEQ ID NO: 784281 - RNA, 22 nt, Human
gucauucuuaacaacucaguag

SEQ ID NO: 784282 - RNA, 22 nt, Human
gaggccagaguuccccgaguca

SEQ ID NO: 784283 - RNA, 22 nt, Human
gaucauuugcaggaaacauuaa

SEQ ID NO: 784284 - RNA, 22 nt, Human
agggggugcccagaugaaggau

SEQ ID NO: 784285 - RNA, 20 nt, Human
uugauaggcagcuugucagg

SEQ ID NO: 784286 - RNA, 21 nt, Human
cccagggaagccgcagucacc

SEQ ID NO: 784287 - RNA, 22 nt, Human
acuguagcugccacuggaugca

SEQ ID NO: 784288 - RNA, 22 nt, Human
augcuguguggccaccuccaug

SEQ ID NO: 784289 - RNA, 22 nt, Human
ugucuucagcaaaugccuuucu

SEQ ID NO: 784290 - RNA, 22 nt, Human
gaaggccaagaggcuccaagau

SEQ ID NO: 784291 - RNA, 22 nt, Human
aucauucuauuguugagcugcc

SEQ ID NO: 784292 - RNA, 22 nt, Human
uggaggaaguggcuggccagaa

SEQ ID NO: 784293 - RNA, 22 nt, Human
ucccaggauguuggcggcaggu

SEQ ID NO: 784294 - RNA, 22 nt, Human
ucucaguguguuuucucucaga

SEQ ID NO: 784295 - RNA, 22 nt, Human
guacauuucucuuguucuuauu

SEQ ID NO: 784296 - RNA, 22 nt, Human
agagugucugguagcugcucug

SEQ ID NO: 784297 - RNA, 22 nt, Human
cuugcaggauuuugcugcugua

SEQ ID NO: 784298 - RNA, 22 nt, Human
gaagcagccacggggagacaga

SEQ ID NO: 784299 - RNA, 22 nt, Human
aagcagcuuuugaagagugagg

SEQ ID NO: 784300 - RNA, 22 nt, Human
cucagaauuuagggcucugagg

SEQ ID NO: 784301 - RNA, 22 nt, Human
acuuggcaaguaucuauaaagu

SEQ ID NO: 784302 - RNA, 22 nt, Human
auacuguuuugugacuuaucuu

SEQ ID NO: 784303 - RNA, 22 nt, Human
uaggcagccagcaucaguuggg

SEQ ID NO: 784304 - RNA, 22 nt, Human
uuuucagaggccuaagagguuu

SEQ ID NO: 784305 - RNA, 22 nt, Human
ccagugcuucuuugcuagcugg

SEQ ID NO: 784306 - RNA, 22 nt, Human
auguucuguuuuguaauucaua

SEQ ID NO: 784307 - RNA, 22 nt, Human
uccugucuaaagaccugcaggc

SEQ ID NO: 784308 - RNA, 22 nt, Human
aucuucucauguguaaugaggu

SEQ ID NO: 784309 - RNA, 22 nt, Human
cuugauguauaaguugauaugu

SEQ ID NO: 784310 - RNA, 22 nt, Human
ggcaugcucuuuguccacagua

SEQ ID NO: 784311 - RNA, 22 nt, Human
uauuuccaagcugaauccaaug

SEQ ID NO: 784312 - RNA, 22 nt, Human
cccaggagacagaaacagaggu

SEQ ID NO: 784313 - RNA, 22 nt, Human
agugcagccgagaucaggugcu

SEQ ID NO: 784314 - RNA, 22 nt, Human
ugcaggaacugggagggauagu

SEQ ID NO: 784315 - RNA, 17 nt, Human
agaggcagauacuugga

SEQ ID NO: 784316 - RNA, 22 nt, Human
cccuggagguggagguugcagg

SEQ ID NO: 784317 - RNA, 22 nt, Human
cuuaaauuuucaucuacaagaa

SEQ ID NO: 784318 - RNA, 22 nt, Human
gagacagcacaggccacuggga

SEQ ID NO: 784319 - RNA, 22 nt, Human
caugcugugugguuagaacugu

SEQ ID NO: 784320 - RNA, 22 nt, Human
uauguuauuuucauacaacaga

SEQ ID NO: 784321 - RNA, 22 nt, Human
cugcccaggaaccagaggggca

SEQ ID NO: 784322 - RNA, 22 nt, Human
gcagaggacagggauuuagauu

SEQ ID NO: 784323 - RNA, 19 nt, Human
ugcugcuguccuugcaggg

SEQ ID NO: 784324 - RNA, 18 nt, Human
aguaaagcuuauuacaug

SEQ ID NO: 784325 - RNA, 22 nt, Human
uuucauuuugguuaugccauaa

SEQ ID NO: 784326 - RNA, 22 nt, Human
uggcagcucauuuggaaaugga

SEQ ID NO: 784327 - RNA, 22 nt, Human
ugcuuucaaaggcuuucuagau

SEQ ID NO: 784328 - RNA, 22 nt, Human
gaggcaguuccugagugacaag

SEQ ID NO: 784329 - RNA, 22 nt, Human
gauuucuuugcaagcuguguuc

SEQ ID NO: 784330 - RNA, 22 nt, Human
auucaaauuaaguuaauucagc

SEQ ID NO: 784331 - RNA, 22 nt, Human
ucugggaacucugucauuuccc

SEQ ID NO: 784332 - RNA, 22 nt, Human
aagcaccucuaugauugcuuuu

SEQ ID NO: 784333 - RNA, 22 nt, Human
ugaggcaggacauggacaacug

SEQ ID NO: 784334 - RNA, 22 nt, Human
agccagcugugggcucaggcgg

SEQ ID NO: 784335 - RNA, 22 nt, Human
auacuguuucucuucuacauga

SEQ ID NO: 784336 - RNA, 18 nt, Human
acugugugaauuagcucc

SEQ ID NO: 784337 - RNA, 22 nt, Human
cugagggugcuauucuugccuu

SEQ ID NO: 784338 - RNA, 22 nt, Human
uuucuuguaagauguuuauuaa

SEQ ID NO: 784339 - RNA, 22 nt, Human
uuugaaauuaagauauugucca

SEQ ID NO: 784340 - RNA, 22 nt, Human
uuucauggcuaggacuagagug

SEQ ID NO: 784341 - RNA, 22 nt, Human
uuuaacagaugugaaauuuuca

SEQ ID NO: 784342 - RNA, 22 nt, Human
cugcugugugcuuacuuggguu

SEQ ID NO: 784343 - RNA, 22 nt, Human
aagacuguacauuuuccagucu

SEQ ID NO: 784344 - RNA, 22 nt, Human
uucccucuccuacucaggaaag

SEQ ID NO: 784345 - RNA, 22 nt, Human
ugaggcagggagaguggauaug

SEQ ID NO: 784346 - RNA, 22 nt, Human
gaaggccauuuuuagguagaau

SEQ ID NO: 784347 - RNA, 19 nt, Human
aggguggcaaaggagggug

SEQ ID NO: 784348 - RNA, 22 nt, Human
uuuccucauuuaucugcuggga

SEQ ID NO: 784349 - RNA, 22 nt, Human
ccccaggagcuuguuuuagaga

SEQ ID NO: 784350 - RNA, 22 nt, Human
agucaauuaucucuaggucauc

SEQ ID NO: 784351 - RNA, 22 nt, Human
guuuucaauuauaagauggcuu

SEQ ID NO: 784352 - RNA, 22 nt, Human
ggcuuggaaaugguaaugagcu

SEQ ID NO: 784353 - RNA, 22 nt, Human
ucauuucccuccuacaaagagg

SEQ ID NO: 784354 - RNA, 22 nt, Human
uuucaguuuaugucuugaauua

SEQ ID NO: 784355 - RNA, 23 nt, Human
agaggcaggaguggcuugcccgg

SEQ ID NO: 784356 - RNA, 22 nt, Human
uugcugugucauuuguuuaauc

SEQ ID NO: 784357 - RNA, 22 nt, Human
acucaggaaaaauguagugaua

SEQ ID NO: 784358 - RNA, 22 nt, Human
cccaggagccaucugucuuggc

SEQ ID NO: 784359 - RNA, 22 nt, Human
ucugggaacugagcuccccuag

SEQ ID NO: 784360 - RNA, 22 nt, Human
aaaguauucuugacuguuuuuc

SEQ ID NO: 784361 - RNA, 22 nt, Human
ccauccugcauugcuauucaga

SEQ ID NO: 784362 - RNA, 17 nt, Human
uugaacugcugagucag

SEQ ID NO: 784363 - RNA, 22 nt, Human
aaguguauauaugacuuauaaa

SEQ ID NO: 784364 - RNA, 22 nt, Human
cccaggaacuccagagcuccuc

SEQ ID NO: 784365 - RNA, 22 nt, Human
ucugggaacagccuggcugugu

SEQ ID NO: 784366 - RNA, 22 nt, Human
ggcagcuguaagaugagugaau

SEQ ID NO: 784367 - RNA, 22 nt, Human
acaguacauaauccugagucug

SEQ ID NO: 784368 - RNA, 22 nt, Human
gaggaggccaguggaaggaagc

SEQ ID NO: 784369 - RNA, 22 nt, Human
uucaggauaguggugaguggca

SEQ ID NO: 784370 - RNA, 22 nt, Human
uuagccaugugggaaaaacagc

SEQ ID NO: 784371 - RNA, 22 nt, Human
uacugcaugguggaguggagcu

SEQ ID NO: 784372 - RNA, 22 nt, Human
gaggagcugggucagggagaca

SEQ ID NO: 784373 - RNA, 22 nt, Human
gacagcuggcaguggaaaggug

SEQ ID NO: 784374 - RNA, 22 nt, Human
ucaggagagagaaauuggggcu

SEQ ID NO: 784375 - RNA, 22 nt, Human
ggccagcagucacagggucaga

SEQ ID NO: 784376 - RNA, 22 nt, Human
uaggcagcgcuuggcugugcuu

SEQ ID NO: 784377 - RNA, 21 nt, Human
auacacauacacauaaaugug

SEQ ID NO: 784378 - RNA, 22 nt, Human
auacuuucugaccaauuaauug

SEQ ID NO: 784379 - RNA, 22 nt, Human
uggcagcuccggguaggggcug

SEQ ID NO: 784380 - RNA, 22 nt, Human
agcuucuuggcucagcacuugg

SEQ ID NO: 784381 - RNA, 22 nt, Human
cugccaggcacgugcagcauca

SEQ ID NO: 784382 - RNA, 22 nt, Human
cuacccagagugaaucucuuaa

SEQ ID NO: 784383 - RNA, 22 nt, Human
guccucuguuagaaaugugcuu

SEQ ID NO: 784384 - RNA, 22 nt, Human
ggcagggaagcuggcaucacgg

SEQ ID NO: 784385 - RNA, 22 nt, Human
cuucuucaguugcauguauugg

SEQ ID NO: 784386 - RNA, 22 nt, Human
ucaggagacaaagggugcggag

SEQ ID NO: 784387 - RNA, 22 nt, Human
agcagagccugggcuaggggug

SEQ ID NO: 784388 - RNA, 22 nt, Human
uuugacaugcaaagcacuuuag

SEQ ID NO: 784389 - RNA, 23 nt, Human
ccacuagcaccuguucaacuucu

SEQ ID NO: 784390 - RNA, 22 nt, Human
aagaagagaacuggcauccuaa

SEQ ID NO: 784391 - RNA, 22 nt, Human
gcagcucccagcuugaaagguc

SEQ ID NO: 784392 - RNA, 22 nt, Human
caggauggugugagugugagga

SEQ ID NO: 784393 - RNA, 22 nt, Human
ucucgacagccuggcacagugg

SEQ ID NO: 784394 - RNA, 22 nt, Human
ggauggcauguugggcucuguu

SEQ ID NO: 784395 - RNA, 22 nt, Human
uucuucaaauagcagggaguca

SEQ ID NO: 784396 - RNA, 21 nt, Human
ccauaccuaccucaccugguu

SEQ ID NO: 784397 - RNA, 22 nt, Human
ucuuuuggguucuuaugauuua

SEQ ID NO: 784398 - RNA, 20 nt, Human
gcucccagccugcagucccc

SEQ ID NO: 784399 - RNA, 22 nt, Human
gcuuuggagccuguguucugcc

SEQ ID NO: 784400 - RNA, 22 nt, Human
ucuucucucauguaggagggaa

SEQ ID NO: 784401 - RNA, 22 nt, Human
cucuucuugaaagaggaauuca

SEQ ID NO: 784402 - RNA, 22 nt, Human
ggcaagcucaggccucaggugu

SEQ ID NO: 784403 - RNA, 22 nt, Human
uccaggaguuugaccugugggc

SEQ ID NO: 784404 - RNA, 22 nt, Human
gccaggagggaaaggacaauuu

SEQ ID NO: 784405 - RNA, 22 nt, Human
guagggagcccagagcccagug

SEQ ID NO: 784406 - RNA, 22 nt, Human
ggagagugggagcaacuguugc

SEQ ID NO: 784407 - RNA, 22 nt, Human
cuguucucuggcgguggcuguu

SEQ ID NO: 784408 - RNA, 22 nt, Human
cagaagaguagcugaacaaguu

SEQ ID NO: 784409 - RNA, 22 nt, Human
agucucuuuaaucacagugucu

SEQ ID NO: 784410 - RNA, 22 nt, Human
agugcagcaugcuggggaggcu

SEQ ID NO: 784411 - RNA, 22 nt, Human
gcaagcugaugugauagugaaa

SEQ ID NO: 784412 - RNA, 22 nt, Human
agacaaaugguaauuaugucua

SEQ ID NO: 784413 - RNA, 22 nt, Human
cacaauuuccuugcuucacuuu

SEQ ID NO: 784414 - RNA, 21 nt, Human
cccaggagaagaaaagaugca

SEQ ID NO: 784415 - RNA, 22 nt, Human
uucuuuuccuacacagcgauuu

SEQ ID NO: 784416 - RNA, 22 nt, Human
cagaaccaggaacugauggaga

SEQ ID NO: 784417 - RNA, 22 nt, Human
uugcuuuguuacugcaguuucc

SEQ ID NO: 784418 - RNA, 22 nt, Human
ucugggaagcugguccuguucu

SEQ ID NO: 784419 - RNA, 23 nt, Human
aaugauuucaugaugauagcagc

SEQ ID NO: 784420 - RNA, 22 nt, Human
cacaaaugguuguagacauuaa

SEQ ID NO: 784421 - RNA, 22 nt, Human
aggccagcaagaaagagagucu

SEQ ID NO: 784422 - RNA, 22 nt, Human
ugaggcagugugagauaauaaa

SEQ ID NO: 784423 - RNA, 18 nt, Human
cugcugugucgucugggc

SEQ ID NO: 784424 - RNA, 22 nt, Human
ucaggagaguguucaguggagg

SEQ ID NO: 784425 - RNA, 22 nt, Human
uacagcuaggcaaaaaugacau

SEQ ID NO: 784426 - RNA, 22 nt, Human
ugcccagggauaagccuagaga

SEQ ID NO: 784427 - RNA, 22 nt, Human
ucuuugaacuuggcugaucucu

SEQ ID NO: 784428 - RNA, 22 nt, Human
cugcugugagugguucuugccu

SEQ ID NO: 784429 - RNA, 22 nt, Human
cacagacccagaagggaugaag

SEQ ID NO: 784430 - RNA, 22 nt, Human
uauuucuaagagauaucuguac

SEQ ID NO: 784431 - RNA, 22 nt, Human
cugcugugccuuaaaaugcaag

SEQ ID NO: 784432 - RNA, 22 nt, Human
aaaggccaugguuggaguguuu

SEQ ID NO: 784433 - RNA, 22 nt, Human
cacaauuuguuuuaucaguauu

SEQ ID NO: 784434 - RNA, 22 nt, Human
guaggcagugguuggaagagaa

SEQ ID NO: 784435 - RNA, 22 nt, Human
uugaaagucacaauggcauuaa

SEQ ID NO: 784436 - RNA, 22 nt, Human
aggcaggcacacuuccuccagg

SEQ ID NO: 784437 - RNA, 22 nt, Human
gcugcugugccuggcguccugu

SEQ ID NO: 784438 - RNA, 23 nt, Human
aggucagcaggcaaggaaauggc

SEQ ID NO: 784439 - RNA, 22 nt, Human
aggaagcuaaccagggagugag

SEQ ID NO: 784440 - RNA, 22 nt, Human
cagcucugaggaacacuccuuu

SEQ ID NO: 784441 - RNA, 22 nt, Human
uggucuuuaagguagcugucau

SEQ ID NO: 784442 - RNA, 19 nt, Human
ggcaggcuggauagagagg

SEQ ID NO: 784443 - RNA, 22 nt, Human
cccaguuucaacuuuccagugg

SEQ ID NO: 784444 - RNA, 21 nt, Human
auacauucuauuaagcauuua

SEQ ID NO: 784445 - RNA, 22 nt, Human
aggaagcugcuggaguagugug

SEQ ID NO: 784446 - RNA, 22 nt, Human
ugcuuccuauccacacaaugcc

SEQ ID NO: 784447 - RNA, 20 nt, Human
cucaggauugucuagccccu

SEQ ID NO: 784448 - RNA, 22 nt, Human
uuucaaagaguuguaaauuacu

SEQ ID NO: 784449 - RNA, 22 nt, Human
guucucucugcuuccaagaugg

SEQ ID NO: 784450 - RNA, 22 nt, Human
gcagcugaaagggaucucuaca

SEQ ID NO: 784451 - RNA, 22 nt, Human
acuggcaguagagggagcgcau

SEQ ID NO: 784452 - RNA, 22 nt, Human
guugaaagagcauggacuugaa

SEQ ID NO: 784453 - RNA, 22 nt, Human
gucuucuuuucagucugcuugu

SEQ ID NO: 784454 - RNA, 20 nt, Human
uuugucuguuaaguguuucu

SEQ ID NO: 784455 - RNA, 22 nt, Human
aaggccagaguacuagaggcug

SEQ ID NO: 784456 - RNA, 22 nt, Human
gagaaggaguagcugaccuggg

SEQ ID NO: 784457 - RNA, 20 nt, Human
accaggagauggaggcaggg

SEQ ID NO: 784458 - RNA, 22 nt, Human
agcagagguuuguuggaaaccu

SEQ ID NO: 784459 - RNA, 22 nt, Human
uggcagcuguguccagguagaa

SEQ ID NO: 784460 - RNA, 22 nt, Human
uuucaugagauuccuccacauc

SEQ ID NO: 784461 - RNA, 22 nt, Human
caguucuuauuuggccaguguc

SEQ ID NO: 784462 - RNA, 22 nt, Human
uucaaauacauucuuugccacu

SEQ ID NO: 784463 - RNA, 22 nt, Human
caaguaaagaaucacauuucuu

SEQ ID NO: 784464 - RNA, 22 nt, Human
uccaugaguuugaggaaaagag

SEQ ID NO: 784465 - RNA, 22 nt, Human
agagggcugcugcacagugcuc

SEQ ID NO: 784466 - RNA, 23 nt, Human
cuucucagaagucugugccagga

SEQ ID NO: 784467 - RNA, 22 nt, Human
uuauuuaaaagugguaagauuc

SEQ ID NO: 784468 - RNA, 22 nt, Human
ugaagggggagauauaugugug

SEQ ID NO: 784469 - RNA, 22 nt, Human
cuucagaagccugcagccuuug

SEQ ID NO: 784470 - RNA, 22 nt, Human
cucacugugccuuuucccaaac

SEQ ID NO: 784471 - RNA, 18 nt, Human
aaacuggcuuggccugug

SEQ ID NO: 784472 - RNA, 22 nt, Human
uucuucaaaacaacacuggccu

SEQ ID NO: 784473 - RNA, 22 nt, Human
ucuacugcacuggugucucauc

SEQ ID NO: 784474 - RNA, 22 nt, Human
ugcugaugcuguucuguuagga

SEQ ID NO: 784475 - RNA, 22 nt, Human
aggcagcugugaggacuggauu

SEQ ID NO: 784476 - RNA, 22 nt, Human
caggagaggcuguacguuucuc

SEQ ID NO: 784477 - RNA, 22 nt, Human
cugcuaaaccucucugagagcu

SEQ ID NO: 784478 - RNA, 22 nt, Human
aguaaaaauugaggugcaaaau

SEQ ID NO: 784479 - RNA, 22 nt, Human
ucauuuguggaagugauugugg

SEQ ID NO: 784480 - RNA, 22 nt, Human
uuugaauagaggccccucagaa

SEQ ID NO: 784481 - RNA, 19 nt, Human
ggcagucucaagcagcaca

SEQ ID NO: 784482 - RNA, 22 nt, Human
acauauauuacuaguaaagaca

SEQ ID NO: 784483 - RNA, 22 nt, Human
uggcagcugcaggccuccugag

SEQ ID NO: 784484 - RNA, 22 nt, Human
aagggcaggaaaagauggaugu

SEQ ID NO: 784485 - RNA, 22 nt, Human
gccagagguucaacaacugucu

SEQ ID NO: 784486 - RNA, 22 nt, Human
uuuaagauucaguaaggcaaac

SEQ ID NO: 784487 - RNA, 22 nt, Human
ucacaucucccuggaggacaca

SEQ ID NO: 784488 - RNA, 22 nt, Human
gcccaggaaguugaggcugccg

SEQ ID NO: 784489 - RNA, 22 nt, Human
uuauuacacugaaagaauugcg

SEQ ID NO: 784490 - RNA, 22 nt, Human
aagggcagagggaaucccacau

SEQ ID NO: 784491 - RNA, 22 nt, Human
agggagcuucuggccucagccu

SEQ ID NO: 784492 - RNA, 22 nt, Human
gagggaggcaucaugaauccag

SEQ ID NO: 784493 - RNA, 22 nt, Human
aucugccugcaguggagguggg

SEQ ID NO: 784494 - RNA, 22 nt, Human
agacaaauggaguaugagcaac

SEQ ID NO: 784495 - RNA, 22 nt, Human
ugaggcaggaauggggaaaagu

SEQ ID NO: 784496 - RNA, 22 nt, Human
aggcagucuaguccccaggcaa

SEQ ID NO: 784497 - RNA, 22 nt, Human
gaggcauggccugaggcuagga

SEQ ID NO: 784498 - RNA, 22 nt, Human
cccaggagcuucucucugccuc

SEQ ID NO: 784499 - RNA, 22 nt, Human
ggcaugcugcguacagaugaac

SEQ ID NO: 784500 - RNA, 22 nt, Human
agcagcauuaugauauaucuua

SEQ ID NO: 784501 - RNA, 22 nt, Human
uucuucuccgaggagggcuggu

SEQ ID NO: 784502 - RNA, 22 nt, Human
cuacuucuaaguacauggugau

SEQ ID NO: 784503 - RNA, 22 nt, Human
ggucagagggugggcugccugu

SEQ ID NO: 784504 - RNA, 22 nt, Human
uggagucugugaugcucugggu

SEQ ID NO: 784505 - RNA, 22 nt, Human
ucucugaguauccugaacugcc

SEQ ID NO: 784506 - RNA, 19 nt, Human
gccaggagggcucuggcug

SEQ ID NO: 784507 - RNA, 22 nt, Human
gcccaggaaauaaaagugggcu

SEQ ID NO: 784508 - RNA, 22 nt, Human
uccaggaguggggcagaggucu

SEQ ID NO: 784509 - RNA, 22 nt, Human
ucucuucuaauuaggguccaug

SEQ ID NO: 784510 - RNA, 22 nt, Human
uuuuccagauuggacuuagucc

SEQ ID NO: 784511 - RNA, 23 nt, Human
aucauucuccaaucuggagcagg

SEQ ID NO: 784512 - RNA, 22 nt, Human
ccaggagagcaaaggucacucu

SEQ ID NO: 784513 - RNA, 22 nt, Human
gucagagagggcacgugcacac

SEQ ID NO: 784514 - RNA, 22 nt, Human
gcugcccacaaugauuacaugg

SEQ ID NO: 784515 - RNA, 22 nt, Human
ugguaauuuacgcauuucugua

SEQ ID NO: 784516 - RNA, 22 nt, Human
agagugcagauaagagaauguu

SEQ ID NO: 784517 - RNA, 21 nt, Human
cagcagaguaaugcauucgua

SEQ ID NO: 784518 - RNA, 22 nt, Human
ucauuuguucucauucucuacu

SEQ ID NO: 784519 - RNA, 22 nt, Human
caggcgagugaacagacucuca

SEQ ID NO: 784520 - RNA, 22 nt, Human
aggcagcccacaggacacagga

SEQ ID NO: 784521 - RNA, 23 nt, Human
auuugagaaaguauuuuuaagac

SEQ ID NO: 784522 - RNA, 22 nt, Human
acucaggaaaugagaggcucuc

SEQ ID NO: 784523 - RNA, 22 nt, Human
uucucagauauuuacugagcau

SEQ ID NO: 784524 - RNA, 22 nt, Human
ucaguagcagaaagcaaugagu

SEQ ID NO: 784525 - RNA, 20 nt, Human
ucauuguguugccaauuccc

SEQ ID NO: 784526 - RNA, 18 nt, Human
cugcccagagcauuucau

SEQ ID NO: 784527 - RNA, 22 nt, Human
aggcagugcucaagacagcagc

SEQ ID NO: 784528 - RNA, 22 nt, Human
gagugcagaugccagccccagu

SEQ ID NO: 784529 - RNA, 22 nt, Human
aggcaagcccccagugaggcuc

SEQ ID NO: 784530 - RNA, 22 nt, Human
gacagagaggcugagcaguaca

SEQ ID NO: 784531 - RNA, 22 nt, Human
auacauauaugguacuuccugg

SEQ ID NO: 784532 - RNA, 22 nt, Human
uugcaggaaacugagugugagc

SEQ ID NO: 784533 - RNA, 22 nt, Human
gagaggagguggcuaugacagc

SEQ ID NO: 784534 - RNA, 22 nt, Human
ccucacugaagaggugacauuu

SEQ ID NO: 784535 - RNA, 22 nt, Human
ugcaggaaauuccaggguggcc

SEQ ID NO: 784536 - RNA, 22 nt, Human
ugaggcagguaagcaaguuuug

SEQ ID NO: 784537 - RNA, 22 nt, Human
gcccaggaguucaaggcugcag

SEQ ID NO: 784538 - RNA, 22 nt, Human
acccaggagccgugagagguua

SEQ ID NO: 784539 - RNA, 22 nt, Human
accauguguuuuacacauggua

SEQ ID NO: 784540 - RNA, 22 nt, Human
cucccagagagcaggugggccg

SEQ ID NO: 784541 - RNA, 22 nt, Human
gagugcaggccugagcaccauc

SEQ ID NO: 784542 - RNA, 22 nt, Human
gcugggaagugcaagaucaagg

SEQ ID NO: 784543 - RNA, 22 nt, Human
aaaggugacacucugccagcug

SEQ ID NO: 784544 - RNA, 22 nt, Human
gagggagggaaaguuuaacacu

SEQ ID NO: 784545 - RNA, 22 nt, Human
guugaaagcuuuucauuuaguu

SEQ ID NO: 784546 - RNA, 22 nt, Human
uagggaggaggguuuucaaauc

SEQ ID NO: 784547 - RNA, 22 nt, Human
gucacuguuuccuauuauauuu

SEQ ID NO: 784548 - RNA, 20 nt, Human
uucaggauucuagaccacac

SEQ ID NO: 784549 - RNA, 22 nt, Human
aggaggggcauagaaauguaau

SEQ ID NO: 784550 - RNA, 22 nt, Human
agcugcccagcuaggaagaagg

SEQ ID NO: 784551 - RNA, 22 nt, Human
auuucagauucagaaauguagg

SEQ ID NO: 784552 - RNA, 22 nt, Human
acacaaauuguaggauaauugc

SEQ ID NO: 784553 - RNA, 22 nt, Human
cagcuagcuaagaaggccagag

SEQ ID NO: 784554 - RNA, 22 nt, Human
auuugcuuuaagguauaaaagg

SEQ ID NO: 784555 - RNA, 21 nt, Human
cuguggaagggaacuagaggg

SEQ ID NO: 784556 - RNA, 22 nt, Human
uuugaagucaggcuuucuaccc

SEQ ID NO: 784557 - RNA, 22 nt, Human
ccuggagaccagaggauacuuc

SEQ ID NO: 784558 - RNA, 20 nt, Human
aggcagcuggccaggcaggu

SEQ ID NO: 784559 - RNA, 22 nt, Human
uuugcaaagaaauuauugcugu

SEQ ID NO: 784560 - RNA, 22 nt, Human
ggacagaggguugacagaguau

SEQ ID NO: 784561 - RNA, 22 nt, Human
auuacaguaacagcuacaaugc

SEQ ID NO: 784562 - RNA, 22 nt, Human
cuggcagucugccucuucacug

SEQ ID NO: 784563 - RNA, 21 nt, Human
aaauacagaaacuuguuuuca

SEQ ID NO: 784564 - RNA, 22 nt, Human
cccaggaguuagagguuguggu

SEQ ID NO: 784565 - RNA, 22 nt, Human
gccugcagauauauaggauggu

SEQ ID NO: 784566 - RNA, 21 nt, Human
uguaaguuucaucugaauugg

SEQ ID NO: 784567 - RNA, 22 nt, Human
acagucuacuugagcuuguaua

SEQ ID NO: 784568 - RNA, 22 nt, Human
acccaggacucucuuccaguag

SEQ ID NO: 784569 - RNA, 22 nt, Human
uagggauguggugagaacugag

SEQ ID NO: 784570 - RNA, 22 nt, Human
agucccuguacuuuccacugcc

SEQ ID NO: 784571 - RNA, 21 nt, Human
ucacagacuggucagugaggc

SEQ ID NO: 784572 - RNA, 22 nt, Human
caggcagccuucucgucucaca

SEQ ID NO: 784573 - RNA, 22 nt, Human
uuuguuuagaaagagauuggug

SEQ ID NO: 784574 - RNA, 23 nt, Human
ucuugaaaagccuacagcaguuc

SEQ ID NO: 784575 - RNA, 18 nt, Human
ggcagggaaaagauaggg

SEQ ID NO: 784576 - RNA, 22 nt, Human
auguuuccagguucuuccuaug

SEQ ID NO: 784577 - RNA, 22 nt, Human
aggagaggcaucaagaaaaucg

SEQ ID NO: 784578 - RNA, 22 nt, Human
gaauacaugauacaugaacugc

SEQ ID NO: 784579 - RNA, 22 nt, Human
cauguuuacuaccaggagaaug

SEQ ID NO: 784580 - RNA, 22 nt, Human
uucaggaucaaguugccaguag

SEQ ID NO: 784581 - RNA, 22 nt, Human
agaggccaggcugcagagggau

SEQ ID NO: 784582 - RNA, 18 nt, Human
gaaaggagagacaguagg

SEQ ID NO: 784583 - RNA, 22 nt, Human
aucuucucaagcagcauccugu

SEQ ID NO: 784584 - RNA, 22 nt, Human
auucuuauuauaguaaaacagu

SEQ ID NO: 784585 - RNA, 22 nt, Human
gagggucccugcucagggccag

SEQ ID NO: 784586 - RNA, 22 nt, Human
gauggacagccuggaaggaaag

SEQ ID NO: 784587 - RNA, 22 nt, Human
gugauuuugagaccuauauagu

SEQ ID NO: 784588 - RNA, 22 nt, Human
acacaaguucuaaagauugcgc

SEQ ID NO: 784589 - RNA, 22 nt, Human
uauuucagcccuacuacuuggc

SEQ ID NO: 784590 - RNA, 22 nt, Human
ugcuguguggaugugaagaauc

SEQ ID NO: 784591 - RNA, 22 nt, Human
uucuucaugcuguugcugcuug

SEQ ID NO: 784592 - RNA, 22 nt, Human
caggagagauaugaguccccac

SEQ ID NO: 784593 - RNA, 22 nt, Human
gagcagcucugugccuggagac

SEQ ID NO: 784594 - RNA, 22 nt, Human
uuugcauaagucauguccagug

SEQ ID NO: 784595 - RNA, 22 nt, Human
auguauuucuauguagugaaga

SEQ ID NO: 784596 - RNA, 22 nt, Human
uucauguguauggaacauuuuu

SEQ ID NO: 784597 - RNA, 22 nt, Human
gcccaggaggucaaguagcuau

SEQ ID NO: 784598 - RNA, 22 nt, Human
aagaggaggacgguucccagaa

SEQ ID NO: 784599 - RNA, 22 nt, Human
aacaugauggggaagaacaaga

SEQ ID NO: 784600 - RNA, 22 nt, Human
uugcauuuaaguagauguuaca

SEQ ID NO: 784601 - RNA, 22 nt, Human
uccaggaggugaggggaccaaa

SEQ ID NO: 784602 - RNA, 22 nt, Human
augugucuuugagacucugcua

SEQ ID NO: 784603 - RNA, 22 nt, Human
uacuuuuuagcacagugugugc

SEQ ID NO: 784604 - RNA, 22 nt, Human
uugcugaauugaauccuuuggu

SEQ ID NO: 784605 - RNA, 22 nt, Human
caggcagcucaaccuugggagc

SEQ ID NO: 784606 - RNA, 22 nt, Human
ccacagagcauuagauuucaga

SEQ ID NO: 784607 - RNA, 19 nt, Human
aaagcagaggagcaucuga

SEQ ID NO: 784608 - RNA, 22 nt, Human
aggaagcuccaugaaggcagag

SEQ ID NO: 784609 - RNA, 17 nt, Human
gaggagcuccaguaggu

SEQ ID NO: 784610 - RNA, 22 nt, Human
ugaacucucucaagugacagaa

SEQ ID NO: 784611 - RNA, 22 nt, Human
uagcccagaagagggaagcaac

SEQ ID NO: 784612 - RNA, 22 nt, Human
aaucuucuacuugacaguucuc

SEQ ID NO: 784613 - RNA, 22 nt, Human
gccaggagagcuccuucagguu

SEQ ID NO: 784614 - RNA, 22 nt, Human
aguggcagagccaaguagagcc

SEQ ID NO: 784615 - RNA, 23 nt, Human
uaugaacugcauugcuggugugu

SEQ ID NO: 784616 - RNA, 22 nt, Human
ggguacuuaauauuuacggggu

SEQ ID NO: 784617 - RNA, 22 nt, Human
ggaggugggauuaggaccuaaa

SEQ ID NO: 784618 - RNA, 22 nt, Human
aggcagcccugugcuggaugcu

SEQ ID NO: 784619 - RNA, 22 nt, Human
gcugauguuuaguugauguuac

SEQ ID NO: 784620 - RNA, 22 nt, Human
cuguaaauaugaagaauauaug

SEQ ID NO: 784621 - RNA, 22 nt, Human
cucaggauggaagccuacagga

SEQ ID NO: 784622 - RNA, 22 nt, Human
uauuuuaaagugaagggucuug

SEQ ID NO: 784623 - RNA, 22 nt, Human
aucaggaucaugcuggguggga

SEQ ID NO: 784624 - RNA, 22 nt, Human
ccccaggaagccucagauuugc

SEQ ID NO: 784625 - RNA, 22 nt, Human
ucugucucaaguucuugcacuc

SEQ ID NO: 784626 - RNA, 22 nt, Human
aaggcagcaggauuuggugacu

SEQ ID NO: 784627 - RNA, 22 nt, Human
cccaggagagaggggauaaagc

SEQ ID NO: 784628 - RNA, 22 nt, Human
ugccuguguugauuacuuuguc

SEQ ID NO: 784629 - RNA, 22 nt, Human
ggcagaggagcuggaaacaugg

SEQ ID NO: 784630 - RNA, 21 nt, Human
gccaggaguagauuacauuua

SEQ ID NO: 784631 - RNA, 22 nt, Human
ugaggggauacgguacacauug

SEQ ID NO: 784632 - RNA, 22 nt, Human
gauauuuugagaaauccuauga

SEQ ID NO: 784633 - RNA, 22 nt, Human
uuucuucagagagagcuuuccc

SEQ ID NO: 784634 - RNA, 22 nt, Human
agcccaggugagggguucgaaa

SEQ ID NO: 784635 - RNA, 22 nt, Human
auuaaauuagcaaacugugaaa

SEQ ID NO: 784636 - RNA, 18 nt, Human
acucaggaaaugaugaca

SEQ ID NO: 784637 - RNA, 21 nt, Human
auuucagagcacacaaguaaa

SEQ ID NO: 784638 - RNA, 22 nt, Human
aaucuguucuacucuauucaga

SEQ ID NO: 784639 - RNA, 22 nt, Human
acaaauauuuacugaauccacu

SEQ ID NO: 784640 - RNA, 20 nt, Human
guaaaauauggucuuugggu

SEQ ID NO: 784641 - RNA, 22 nt, Human
ucccaggaaugucugaaaguga

SEQ ID NO: 784642 - RNA, 22 nt, Human
ucugcugugggucuauauuuua

SEQ ID NO: 784643 - RNA, 22 nt, Human
gggcagcugccaagugcaucgc

SEQ ID NO: 784644 - RNA, 20 nt, Human
cugcuguguuauuguagaac

SEQ ID NO: 784645 - RNA, 22 nt, Human
aaggcagcuucaccacagcauu

SEQ ID NO: 784646 - RNA, 22 nt, Human
uuccuuaguguuagauucugug

SEQ ID NO: 784647 - RNA, 22 nt, Human
ccagcagaggggcggagugcag

SEQ ID NO: 784648 - RNA, 22 nt, Human
caaauauuccagguacaucccu

SEQ ID NO: 784649 - RNA, 22 nt, Human
cuugaaagcuuugcgucuucua

SEQ ID NO: 784650 - RNA, 22 nt, Human
cucccaggacucagaggagaag

SEQ ID NO: 784651 - RNA, 22 nt, Human
gcucaggagcucuugguggcgc

SEQ ID NO: 784652 - RNA, 22 nt, Human
uuucagcugguaaaggaguagc

SEQ ID NO: 784653 - RNA, 23 nt, Human
cagaaaacccagagcucaguccc

SEQ ID NO: 784654 - RNA, 22 nt, Human
aauuuccagaccccauccacag

SEQ ID NO: 784655 - RNA, 22 nt, Human
ugaaggccagggauuugcagcc

SEQ ID NO: 784656 - RNA, 22 nt, Human
ggcagccuugagggaggccugg

SEQ ID NO: 784657 - RNA, 22 nt, Human
uucaggauucucucccauuuac

SEQ ID NO: 784658 - RNA, 22 nt, Human
cugcuguguugccagugucacc

SEQ ID NO: 784659 - RNA, 22 nt, Human
cagucucucagcuuucagcugu

SEQ ID NO: 784660 - RNA, 22 nt, Human
cucaggauauugggcuggagca

SEQ ID NO: 784661 - RNA, 22 nt, Human
gcgucugaguugcgggggcuca

SEQ ID NO: 784662 - RNA, 22 nt, Human
ggcucagacucccaggcccucu

SEQ ID NO: 784663 - RNA, 22 nt, Human
aggaagcuuagugaaaggacca

SEQ ID NO: 784664 - RNA, 22 nt, Human
gcagaagucagaccaucugaau

SEQ ID NO: 784665 - RNA, 22 nt, Human
cccaggaccgcgcggcugagcg

SEQ ID NO: 784666 - RNA, 22 nt, Human
auacaaagacaaaucucaaucu

SEQ ID NO: 784667 - RNA, 22 nt, Human
cuuaaagaaauugaggagagga

SEQ ID NO: 784668 - RNA, 22 nt, Human
ucaauucaacacaugcacauug

SEQ ID NO: 784669 - RNA, 22 nt, Human
caggcagcugaggacuuugcua

SEQ ID NO: 784670 - RNA, 22 nt, Human
agagggauggccccguaacuca

SEQ ID NO: 784671 - RNA, 22 nt, Human
ggagaggacauggcucccacag

SEQ ID NO: 784672 - RNA, 22 nt, Human
caucaucaaaagugacagagaa

SEQ ID NO: 784673 - RNA, 22 nt, Human
aggugagggugccagugcaugg

SEQ ID NO: 784674 - RNA, 22 nt, Human
aauaucaguauauuguaucagu

SEQ ID NO: 784675 - RNA, 22 nt, Human
ggcagcugcaaaucugcucugu

SEQ ID NO: 784676 - RNA, 22 nt, Human
uuagccaugcccuagaagagga

SEQ ID NO: 784677 - RNA, 22 nt, Human
acucagaaugacugaugcugug

SEQ ID NO: 784678 - RNA, 17 nt, Human
acacagggagagggagc

SEQ ID NO: 784679 - RNA, 21 nt, Human
ucucugugucuuuaagcugga

SEQ ID NO: 784680 - RNA, 22 nt, Human
ccaggagaugggagcaucuaaa

SEQ ID NO: 784681 - RNA, 22 nt, Human
aggcagcagugauaagauagga

SEQ ID NO: 784682 - RNA, 22 nt, Human
ccacugaggcaggcaguaucua

SEQ ID NO: 784683 - RNA, 22 nt, Human
cagagagggcggcccuggcuuc

SEQ ID NO: 784684 - RNA, 22 nt, Human
ggaggggaugguuugacccugg

SEQ ID NO: 784685 - RNA, 22 nt, Human
agaguucugcucuucucaguga

SEQ ID NO: 784686 - RNA, 22 nt, Human
uacuuuuagccuauuugauucu

SEQ ID NO: 784687 - RNA, 22 nt, Human
ucauuguuucugcuuuucauga

SEQ ID NO: 784688 - RNA, 22 nt, Human
uaggcagcagugcuaugauucu

SEQ ID NO: 784689 - RNA, 22 nt, Human
cauuuauucauuugcuagggcu

SEQ ID NO: 784690 - RNA, 22 nt, Human
gugcauuugugcaugcacaugu

SEQ ID NO: 784691 - RNA, 21 nt, Human
uaaggccaagucuauuucugu

SEQ ID NO: 784692 - RNA, 22 nt, Human
ugccuggaaggcccaugggaag

SEQ ID NO: 784693 - RNA, 22 nt, Human
guaucacuuuugagagugagaa

SEQ ID NO: 784694 - RNA, 22 nt, Human
uaacaucuuuagcagcucgaac

SEQ ID NO: 784695 - RNA, 22 nt, Human
cuaauacacccuauugcuuguu

SEQ ID NO: 784696 - RNA, 22 nt, Human
uuaagauagaacccaguagucu

SEQ ID NO: 784697 - RNA, 22 nt, Human
uucuuuugggaauuacguaugc

SEQ ID NO: 784698 - RNA, 21 nt, Human
auugaaagucaacaaucaguu

SEQ ID NO: 784699 - RNA, 22 nt, Human
uucaggauaugugauaucugaa

SEQ ID NO: 784700 - RNA, 22 nt, Human
aaugucugccagaacugaucau

SEQ ID NO: 784701 - RNA, 22 nt, Human
uucaauucuaaacuaauauucu

SEQ ID NO: 784702 - RNA, 22 nt, Human
ugaaacauuugaugaucuuugg

SEQ ID NO: 784703 - RNA, 22 nt, Human
gugcuuucugcugcauuccucu

SEQ ID NO: 784704 - RNA, 18 nt, Human
ugagaggcagguagagga

SEQ ID NO: 784705 - RNA, 22 nt, Human
ucagucucuggggcuucuguuu

SEQ ID NO: 784706 - RNA, 22 nt, Human
agcaccauugcaaauauggcag

SEQ ID NO: 784707 - RNA, 22 nt, Human
ggaugggagcagaggacgacca

SEQ ID NO: 784708 - RNA, 22 nt, Human
ggauggagguucucagaugcuc

SEQ ID NO: 784709 - RNA, 22 nt, Human
agaccaagaaaggaugaggauc

SEQ ID NO: 784710 - RNA, 22 nt, Human
uucauucugcaguucucagcuc

SEQ ID NO: 784711 - RNA, 18 nt, Human
ugugaacacauuuuucug

SEQ ID NO: 784712 - RNA, 22 nt, Human
aggggagguggcagaaaugugc

SEQ ID NO: 784713 - RNA, 22 nt, Human
uuacacaacaucuguauuauua

SEQ ID NO: 784714 - RNA, 22 nt, Human
uaauuauucuagucacauagca

SEQ ID NO: 784715 - RNA, 22 nt, Human
caggauggagggagggcuguua

SEQ ID NO: 784716 - RNA, 22 nt, Human
ccagagagauugcuucuaaaga

SEQ ID NO: 784717 - RNA, 22 nt, Human
aacauuuaugauugagguaaau

SEQ ID NO: 784718 - RNA, 22 nt, Human
agcugcccagauaggaggaggc

SEQ ID NO: 784719 - RNA, 22 nt, Human
uuaacaauagaguuucuucagg

SEQ ID NO: 784720 - RNA, 22 nt, Human
uuucuagucucgaucucuuaau

SEQ ID NO: 784721 - RNA, 22 nt, Human
cauaauaucuccgauuacuugc

SEQ ID NO: 784722 - RNA, 22 nt, Human
agugauggugagugagaagcuc

SEQ ID NO: 784723 - RNA, 22 nt, Human
ucuucacaggagccugccugcc

SEQ ID NO: 784724 - RNA, 22 nt, Human
uccagccuaggggaacagcugc

SEQ ID NO: 784725 - RNA, 22 nt, Human
gccaggaguguguggcuauguu

SEQ ID NO: 784726 - RNA, 22 nt, Human
cuugaaagcacuccuuugacug

SEQ ID NO: 784727 - RNA, 22 nt, Human
uguucauuuggcccuuuuguau

SEQ ID NO: 784728 - RNA, 22 nt, Human
auucaaguggcugcuauguuaa

SEQ ID NO: 784729 - RNA, 22 nt, Human
cucaucugauaaaucacucuua

SEQ ID NO: 784730 - RNA, 21 nt, Human
acagucuccccagaucucucc

SEQ ID NO: 784731 - RNA, 22 nt, Human
caggauggucuucauuuggcuc

SEQ ID NO: 784732 - RNA, 22 nt, Human
ugcugaaaacucaaccauugug

SEQ ID NO: 784733 - RNA, 22 nt, Human
uugggcucaggaguuugagacc

SEQ ID NO: 784734 - RNA, 22 nt, Human
aggccagcacgacagccgcagg

SEQ ID NO: 784735 - RNA, 22 nt, Human
cccaggagguggaguucacagu

SEQ ID NO: 784736 - RNA, 22 nt, Human
aguuugaaauguuggcaauauu

SEQ ID NO: 784737 - RNA, 22 nt, Human
uucagcaaacacgaugcuuguu

SEQ ID NO: 784738 - RNA, 22 nt, Human
caggcagccugcggucugcaca

SEQ ID NO: 784739 - RNA, 22 nt, Human
uuggcagugucugcaaaaugga

SEQ ID NO: 784740 - RNA, 22 nt, Human
ucuucaaguuccaaagugcagg

SEQ ID NO: 784741 - RNA, 20 nt, Human
ccagaagagaugaucaucca

SEQ ID NO: 784742 - RNA, 22 nt, Human
gaagcagcuuucuggugaggag

SEQ ID NO: 784743 - RNA, 22 nt, Human
auugaaagcacaaagaacaagu

SEQ ID NO: 784744 - RNA, 22 nt, Human
cucuuaguaaugccaugaagca

SEQ ID NO: 784745 - RNA, 22 nt, Human
cugcugugcaacauugcaccua

SEQ ID NO: 784746 - RNA, 22 nt, Human
ucaggagagaguuggguaggcu

SEQ ID NO: 784747 - RNA, 23 nt, Human
uugaaagguagcuggcagcuaga

SEQ ID NO: 784748 - RNA, 22 nt, Human
uuucaucuucccagagaccuug

SEQ ID NO: 784749 - RNA, 22 nt, Human
ucuggcuuucauuuguuuaaag

SEQ ID NO: 784750 - RNA, 22 nt, Human
cccaggagaugcacuccauugg

SEQ ID NO: 784751 - RNA, 20 nt, Human
aggcucagcugagcucuugg

SEQ ID NO: 784752 - RNA, 20 nt, Human
aagcacauuucuacaauaau

SEQ ID NO: 784753 - RNA, 22 nt, Human
uuuacaaccucauauucugaug

SEQ ID NO: 784754 - RNA, 22 nt, Human
gccaggagacuccauucauuug

SEQ ID NO: 784755 - RNA, 22 nt, Human
gcgcaggagccgcggagggccg

SEQ ID NO: 784756 - RNA, 21 nt, Human
uacugagaccucacagugugc

SEQ ID NO: 784757 - RNA, 21 nt, Human
uccuuccuugagguccuuucc

SEQ ID NO: 784758 - RNA, 22 nt, Human
gcccaggaguuugcauuuuaac

SEQ ID NO: 784759 - RNA, 22 nt, Human
auacaacuuuaucuguaaugag

SEQ ID NO: 784760 - RNA, 17 nt, Human
ugaaggccaugaccacg

SEQ ID NO: 784761 - RNA, 23 nt, Human
uucuuucaagaaguucacagugc

SEQ ID NO: 784762 - RNA, 22 nt, Human
gcuuggcauugaccauuaucau

SEQ ID NO: 784763 - RNA, 22 nt, Human
uacucagagucauugcccuucu

SEQ ID NO: 784764 - RNA, 22 nt, Human
uuccucagaaaauacuguccaa

SEQ ID NO: 784765 - RNA, 22 nt, Human
ggagccuggucagguuggcucc

SEQ ID NO: 784766 - RNA, 22 nt, Human
caggaaagggaugggcugccac

SEQ ID NO: 784767 - RNA, 17 nt, Human
gcccaggaaggacggcc

SEQ ID NO: 784768 - RNA, 21 nt, Human
aaugcauuaacauaaagcuga

SEQ ID NO: 784769 - RNA, 22 nt, Human
cugcuuugauuagaagaguaca

SEQ ID NO: 784770 - RNA, 22 nt, Human
cagaguucaaagccugcuggga

SEQ ID NO: 784771 - RNA, 22 nt, Human
aaggcagcaagaauuccagguu

SEQ ID NO: 784772 - RNA, 15 nt, Human
cccaggaguucgaga

SEQ ID NO: 784773 - RNA, 22 nt, Human
gaggagcuugugagaagauguc

SEQ ID NO: 784774 - RNA, 22 nt, Human
aauauaugugguauugaccagc

SEQ ID NO: 784775 - RNA, 21 nt, Human
ggcagccugacccccagagag

SEQ ID NO: 784776 - RNA, 22 nt, Human
uggcagcugccauguccacgug

SEQ ID NO: 784777 - RNA, 21 nt, Human
ugcugaugucagagaagcaag

SEQ ID NO: 784778 - RNA, 22 nt, Human
cauuuguaauacugacuugcag

SEQ ID NO: 784779 - RNA, 22 nt, Human
accaggaguagaauaucuguga

SEQ ID NO: 784780 - RNA, 22 nt, Human
aucugcagaggacaggcgagga

SEQ ID NO: 784781 - RNA, 22 nt, Human
cauuguuaauugguaucuuaca

SEQ ID NO: 784782 - RNA, 22 nt, Human
gagggagggacuagcauucucu

SEQ ID NO: 784783 - RNA, 22 nt, Human
acccaggagacagguugcagug

SEQ ID NO: 784784 - RNA, 22 nt, Human
agaaaacuugucacagcucuca

SEQ ID NO: 784785 - RNA, 22 nt, Human
ugaaggcccuaucuccauauac

SEQ ID NO: 784786 - RNA, 22 nt, Human
uuaaaaugaauauugauuagca

SEQ ID NO: 784787 - RNA, 22 nt, Human
gcucaggaaaacagucuaguaa

SEQ ID NO: 784788 - RNA, 22 nt, Human
augauguuaccaguacuuagag

SEQ ID NO: 784789 - RNA, 22 nt, Human
accaggaguugggggugggacc

SEQ ID NO: 784790 - RNA, 22 nt, Human
gagggaauggugugcaagaggu

SEQ ID NO: 784791 - RNA, 22 nt, Human
cuucuucaucuguaaaacuugg

SEQ ID NO: 784792 - RNA, 22 nt, Human
gcccaggaaaugccccguggug

SEQ ID NO: 784793 - RNA, 22 nt, Human
uaguuaaaauaauggagauguu

SEQ ID NO: 784794 - RNA, 23 nt, Human
acuuuauugaccccaggucaguu

SEQ ID NO: 784795 - RNA, 20 nt, Human
ucacuaguaaccaucugcuu

SEQ ID NO: 784796 - RNA, 22 nt, Human
uucaacuagauuuauacaauuc

SEQ ID NO: 784797 - RNA, 22 nt, Human
ggugaagguggaacgcagagca

SEQ ID NO: 784798 - RNA, 22 nt, Human
ucaugcuuauugcauauuugga

SEQ ID NO: 784799 - RNA, 22 nt, Human
agaggaggaagagcuuuaaaau

SEQ ID NO: 784800 - RNA, 22 nt, Human
auuaaaauuccaagguaugcca

SEQ ID NO: 784801 - RNA, 22 nt, Human
ugccaggauauaagagugcgau

SEQ ID NO: 784802 - RNA, 22 nt, Human
ggugaaggcacaagagggcaag

SEQ ID NO: 784803 - RNA, 22 nt, Human
uugauagguuuuauguauaguu

SEQ ID NO: 784804 - RNA, 22 nt, Human
uggcagcuugaaugcagucuuu

SEQ ID NO: 784805 - RNA, 22 nt, Human
gaugccucuuuuggcugaauua

SEQ ID NO: 784806 - RNA, 22 nt, Human
ucaguucugcuagaaaaacagu

SEQ ID NO: 784807 - RNA, 22 nt, Human
ugaggggaacugaugcccauug

SEQ ID NO: 784808 - RNA, 19 nt, Human
caaggccaccauuucuccg

SEQ ID NO: 784809 - RNA, 22 nt, Human
ccacuguuuuucaguuaacuuu

SEQ ID NO: 784810 - RNA, 22 nt, Human
uuugcagugauucuugcaguga

SEQ ID NO: 784811 - RNA, 20 nt, Human
caggaugauuggacacgaug

SEQ ID NO: 784812 - RNA, 22 nt, Human
gagagucuaggaaccucauaua

SEQ ID NO: 784813 - RNA, 22 nt, Human
aaauacuagaauucagaguuga

SEQ ID NO: 784814 - RNA, 22 nt, Human
uggagagguugaauaacuuguc

SEQ ID NO: 784815 - RNA, 22 nt, Human
aaaacuaaauacgcuuugccuc

SEQ ID NO: 784816 - RNA, 22 nt, Human
aggcagcuggacauaacuaacc

SEQ ID NO: 784817 - RNA, 20 nt, Human
aagagaggaaguuauacuag

SEQ ID NO: 784818 - RNA, 22 nt, Human
ucuccuccuuuuuucaacauag

SEQ ID NO: 784819 - RNA, 22 nt, Human
uagcacaucuucuuggccugca

SEQ ID NO: 784820 - RNA, 22 nt, Human
cccaggcagccugcagggaagg

SEQ ID NO: 784821 - RNA, 22 nt, Human
cacagcuaggaggaaagcagag

SEQ ID NO: 784822 - RNA, 22 nt, Human
cggagggguuugaacagaggag

SEQ ID NO: 784823 - RNA, 23 nt, Human
agacaguggccgagagguacuag

SEQ ID NO: 784824 - RNA, 22 nt, Human
cuuaagauuugcgauaccuaau

SEQ ID NO: 784825 - RNA, 22 nt, Human
accaggagaggcacuugcaaug

SEQ ID NO: 784826 - RNA, 22 nt, Human
gccaggaggggagaguguguca

SEQ ID NO: 784827 - RNA, 22 nt, Human
ugaaaugagauagauaaucagg

SEQ ID NO: 784828 - RNA, 17 nt, Human
ccaggagagaugcuugu

SEQ ID NO: 784829 - RNA, 22 nt, Human
ggcagcugucucugaguuagca

SEQ ID NO: 784830 - RNA, 22 nt, Human
agagugcaaccgaaacaagcag

SEQ ID NO: 784831 - RNA, 22 nt, Human
cuugcaggccuuucuagcucua

SEQ ID NO: 784832 - RNA, 22 nt, Human
gaggggaagacuucuggacagu

SEQ ID NO: 784833 - RNA, 22 nt, Human
uucaggauuauacucucuuccc

SEQ ID NO: 784834 - RNA, 22 nt, Human
cucuucucugcagccuuugaag

SEQ ID NO: 784835 - RNA, 22 nt, Human
gauggcaggcaggugaguagag

SEQ ID NO: 784836 - RNA, 23 nt, Human
cccuggaguaaauucuuggaagg

SEQ ID NO: 784837 - RNA, 22 nt, Human
cugcuguggguuaagacacugu

SEQ ID NO: 784838 - RNA, 22 nt, Human
uaaguggaagguuauaugcuaa

SEQ ID NO: 784839 - RNA, 22 nt, Human
uuccugagggacuuuugagauu

SEQ ID NO: 784840 - RNA, 22 nt, Human
agaggucagauuucuccuggug

SEQ ID NO: 784841 - RNA, 22 nt, Human
aacauauaaacucuuaaguuca

SEQ ID NO: 784842 - RNA, 17 nt, Human
gccaggagguuugagcu

SEQ ID NO: 784843 - RNA, 22 nt, Human
aggcagaugggagcuggaaguu

SEQ ID NO: 784844 - RNA, 20 nt, Human
gggcaguucaaugccacucu

SEQ ID NO: 784845 - RNA, 22 nt, Human
cccuguacagucucuguggcac

SEQ ID NO: 784846 - RNA, 22 nt, Human
aucaggauagucuguaaauugu

SEQ ID NO: 784847 - RNA, 22 nt, Human
acaaauguggacauggauaaug

SEQ ID NO: 784848 - RNA, 22 nt, Human
caaggccauaagagauacaaaa

SEQ ID NO: 784849 - RNA, 22 nt, Human
uagggaggcuacuucuuguagg

SEQ ID NO: 784850 - RNA, 22 nt, Human
cacucaggguacaauggagggc

SEQ ID NO: 784851 - RNA, 22 nt, Human
aaaggccaccaacaugaagcau

SEQ ID NO: 784852 - RNA, 22 nt, Human
gcugaaauucagauuccuaggc

SEQ ID NO: 784853 - RNA, 22 nt, Human
ucuucauuccguagauauuuau

SEQ ID NO: 784854 - RNA, 22 nt, Human
aguggacucuucccagugcuug

SEQ ID NO: 784855 - RNA, 22 nt, Human
uuagagucaaaauggcauguua

SEQ ID NO: 784856 - RNA, 22 nt, Human
ucugcagggaugugagggguga

SEQ ID NO: 784857 - RNA, 22 nt, Human
uggcagagugcagaagaggcau

SEQ ID NO: 784858 - RNA, 22 nt, Human
caaaugauagagccgauuauca

SEQ ID NO: 784859 - RNA, 19 nt, Human
gacagugcaguuguaguac

SEQ ID NO: 784860 - RNA, 22 nt, Human
uuucaaagaccauuaacuauca

SEQ ID NO: 784861 - RNA, 22 nt, Human
gaaggccacggaauggagcugg

SEQ ID NO: 784862 - RNA, 22 nt, Human
aagauaaacucuugauuucuga

SEQ ID NO: 784863 - RNA, 22 nt, Human
auaucacaguaguuguuuaguu

SEQ ID NO: 784864 - RNA, 22 nt, Human
gaggcagcaggcugaggaggau

SEQ ID NO: 784865 - RNA, 22 nt, Human
ucauuucucccggccaaaaacu

SEQ ID NO: 784866 - RNA, 22 nt, Human
gcagcugcaauaggcaucaagc

SEQ ID NO: 784867 - RNA, 22 nt, Human
uccaggagauacacugcaccag

SEQ ID NO: 784868 - RNA, 22 nt, Human
cuugcacacauguacaugugua

SEQ ID NO: 784869 - RNA, 22 nt, Human
aaggcagccauagcaccaucca

SEQ ID NO: 784870 - RNA, 22 nt, Human
cccaggaugucgaggcugcagu

SEQ ID NO: 784871 - RNA, 22 nt, Human
cauagagugauguaagguaugu

SEQ ID NO: 784872 - RNA, 22 nt, Human
uuucugcugugcuuucuugcgu

SEQ ID NO: 784873 - RNA, 17 nt, Human
uuugaaaggaugucagu

SEQ ID NO: 784874 - RNA, 22 nt, Human
uccaggaggccucauuuccugu

SEQ ID NO: 784875 - RNA, 20 nt, Human
agaggaggauuauuuuauuc

SEQ ID NO: 784876 - RNA, 22 nt, Human
ugcuguggcaguuuauguauag

SEQ ID NO: 784877 - RNA, 22 nt, Human
ucuuagcauuucauaacaacug

SEQ ID NO: 784878 - RNA, 22 nt, Human
uucuucaguguagcaacuguau

SEQ ID NO: 784879 - RNA, 19 nt, Human
uuacuuggcaaagucaguc

SEQ ID NO: 784880 - RNA, 20 nt, Human
cuucuucaguaguuuguucu

SEQ ID NO: 784881 - RNA, 22 nt, Human
uuagagucaagcugcauguucu

SEQ ID NO: 784882 - RNA, 22 nt, Human
gugacagucaaagacaugacuu

SEQ ID NO: 784883 - RNA, 23 nt, Human
aaacugcuuccaauuccugccau

SEQ ID NO: 784884 - RNA, 22 nt, Human
gaaggaggcguuagcccuagga

SEQ ID NO: 784885 - RNA, 20 nt, Human
ggcagcuugggcagcaguua

SEQ ID NO: 784886 - RNA, 22 nt, Human
cccaggaaaagcagugccagca

SEQ ID NO: 784887 - RNA, 22 nt, Human
cucaggaugcaauuccaucaag

SEQ ID NO: 784888 - RNA, 22 nt, Human
cagaccagcucuaugaacccaa

SEQ ID NO: 784889 - RNA, 22 nt, Human
aagauggaguaguguaaugguu

SEQ ID NO: 784890 - RNA, 22 nt, Human
uucaggaugaaagugugcaaca

SEQ ID NO: 784891 - RNA, 22 nt, Human
acuucuucuucagcugggggau

SEQ ID NO: 784892 - RNA, 22 nt, Human
guuaaauucgaugauggauaaa

SEQ ID NO: 784893 - RNA, 22 nt, Human
cucuucuugucucugguuagaa

SEQ ID NO: 784894 - RNA, 22 nt, Human
agucuuuccugcuugacuguuc

SEQ ID NO: 784895 - RNA, 22 nt, Human
ugaggcagccugcauuaaagag

SEQ ID NO: 784896 - RNA, 23 nt, Human
ccacagagcugccaauuccugug

SEQ ID NO: 784897 - RNA, 22 nt, Human
ccccggaggcggagguugcagu

SEQ ID NO: 784898 - RNA, 22 nt, Human
cccaggaggcgcagguugcggu

SEQ ID NO: 784899 - RNA, 22 nt, Human
uggcagcuauggucuaagggcc

SEQ ID NO: 784900 - RNA, 22 nt, Human
cagagccaggucuaggagucuc

SEQ ID NO: 784901 - RNA, 22 nt, Human
uuuuauagcugaauaguauucc

SEQ ID NO: 784902 - RNA, 22 nt, Human
cuugaaagauuuggccucugug

SEQ ID NO: 784903 - RNA, 22 nt, Human
aagggagguaaagcuauuuaaa

SEQ ID NO: 784904 - RNA, 22 nt, Human
uuuguuuacucauucauugaug

SEQ ID NO: 784905 - RNA, 22 nt, Human
cuguguuggcuuuucucuugua

SEQ ID NO: 784906 - RNA, 22 nt, Human
ggaggugguggcagugacaauu

SEQ ID NO: 784907 - RNA, 22 nt, Human
gcugaaugaauguauuuuaaaa

SEQ ID NO: 784908 - RNA, 22 nt, Human
agggagcuaggauccugaaggu

SEQ ID NO: 784909 - RNA, 22 nt, Human
ucugucccugagagcucaggag

SEQ ID NO: 784910 - RNA, 22 nt, Human
auugaaaguccuaucuaaggga

SEQ ID NO: 784911 - RNA, 22 nt, Human
aaaggccacugcaagggaaggu

SEQ ID NO: 784912 - RNA, 22 nt, Human
uggcagcuagcuguuuucaugc

SEQ ID NO: 784913 - RNA, 21 nt, Human
uucuucaaagaagaaggcaca

SEQ ID NO: 784914 - RNA, 22 nt, Human
caacagcugaucuuugaugaag

SEQ ID NO: 784915 - RNA, 22 nt, Human
uacccaggaggaaacugaggcu

SEQ ID NO: 784916 - RNA, 22 nt, Human
uucuucuuaauguccugggaac

SEQ ID NO: 784917 - RNA, 22 nt, Human
gugguaauuuaauccuacacug

SEQ ID NO: 784918 - RNA, 22 nt, Human
uccauuuuucaugacuccucaa

SEQ ID NO: 784919 - RNA, 22 nt, Human
aaaugauugucaaaguucuguu

SEQ ID NO: 784920 - RNA, 22 nt, Human
acucaggaauggggcugggacu

SEQ ID NO: 784921 - RNA, 22 nt, Human
gaaggccauuagagccugugcc

SEQ ID NO: 784922 - RNA, 22 nt, Human
uugcaauagccuuauuuccaaa

SEQ ID NO: 784923 - RNA, 22 nt, Human
cagcuggcgggcagagccgcca

SEQ ID NO: 784924 - RNA, 22 nt, Human
uggcaguccccugugccuggaa

SEQ ID NO: 784925 - RNA, 22 nt, Human
aaagcagacugauuugcaucac

SEQ ID NO: 784926 - RNA, 22 nt, Human
augcugugucaccuuaggauuu

SEQ ID NO: 784927 - RNA, 22 nt, Human
auuggcaguuagugacgaggcu

SEQ ID NO: 784928 - RNA, 23 nt, Human
gcagaggagcaagcuggacacca

SEQ ID NO: 784929 - RNA, 21 nt, Human
cccaggaggagcuccggcucc

SEQ ID NO: 784930 - RNA, 22 nt, Human
uucucuuuucaccaguugcuaa

SEQ ID NO: 784931 - RNA, 22 nt, Human
cagucucuaaaucaaucugaau

SEQ ID NO: 784932 - RNA, 22 nt, Human
gcucacugccauucucuagaug

SEQ ID NO: 784933 - RNA, 22 nt, Human
ugaugaauaaacuugagaguca

SEQ ID NO: 784934 - RNA, 22 nt, Human
agagcagcacguuguccccaca

SEQ ID NO: 784935 - RNA, 22 nt, Human
ggagggaaugucuagcauucuu

SEQ ID NO: 784936 - RNA, 22 nt, Human
augcuguguauuuuacucuuuc

SEQ ID NO: 784937 - RNA, 22 nt, Human
acuggcagcagcagcccuuggg

SEQ ID NO: 784938 - RNA, 19 nt, Human
agaaguuagacauugcaau

SEQ ID NO: 784939 - RNA, 22 nt, Human
aucauuacuccuguaaaauugu

SEQ ID NO: 784940 - RNA, 22 nt, Human
gggcagcuagcccucuagccca

SEQ ID NO: 784941 - RNA, 22 nt, Human
ucugcaggcuuggaguggcagc

SEQ ID NO: 784942 - RNA, 22 nt, Human
uuaaagggccgauuuccaggcc

SEQ ID NO: 784943 - RNA, 22 nt, Human
ucuacccagagcuaugaccuga

SEQ ID NO: 784944 - RNA, 22 nt, Human
gcccaggaguugaagggcugac

SEQ ID NO: 784945 - RNA, 22 nt, Human
uuccuuaguugacugucuuagu

SEQ ID NO: 784946 - RNA, 22 nt, Human
ucugcagguguuggaaggguca

SEQ ID NO: 784947 - RNA, 22 nt, Human
cugcgcagcaaucagagaggag

SEQ ID NO: 784948 - RNA, 22 nt, Human
augcugugcuggcuaaccaugg

SEQ ID NO: 784949 - RNA, 22 nt, Human
aucaggauguuuggcugucaua

SEQ ID NO: 784950 - RNA, 22 nt, Human
gagguggaaggcaggaacaaau

SEQ ID NO: 784951 - RNA, 22 nt, Human
uuuaaauucugucugccgcuua

SEQ ID NO: 784952 - RNA, 22 nt, Human
gaggcagagugcaccccaggag

SEQ ID NO: 784953 - RNA, 22 nt, Human
gaggcagcagaacauggaagag

SEQ ID NO: 784954 - RNA, 22 nt, Human
ucucuucuauuugagacuauuu

SEQ ID NO: 784955 - RNA, 22 nt, Human
uacccaggggcugagcagaggu

SEQ ID NO: 784956 - RNA, 22 nt, Human
gacggcagaaacucaugagguc

SEQ ID NO: 784957 - RNA, 15 nt, Human
uucaggauaugacuc

SEQ ID NO: 784958 - RNA, 22 nt, Human
cagcuuccgaccgggggcugca

SEQ ID NO: 784959 - RNA, 22 nt, Human
uccaggagaggccugaccaggu

SEQ ID NO: 784960 - RNA, 22 nt, Human
aaaugaugcucacagauuagug

SEQ ID NO: 784961 - RNA, 22 nt, Human
uuucuucaauugcuaacaagga

SEQ ID NO: 784962 - RNA, 22 nt, Human
acccaggaggcagagguugcag

SEQ ID NO: 784963 - RNA, 20 nt, Human
ucucuucuggggagauaaaa

SEQ ID NO: 784964 - RNA, 22 nt, Human
cuucagaggggacucaaaguca

SEQ ID NO: 784965 - RNA, 22 nt, Human
ugagccugguugcagugucugg

SEQ ID NO: 784966 - RNA, 22 nt, Human
gaaggaggugucaguuggacug

SEQ ID NO: 784967 - RNA, 22 nt, Human
uggcagcuuccugcucauagga

SEQ ID NO: 784968 - RNA, 22 nt, Human
uugcugaaaacaguggguauug

SEQ ID NO: 784969 - RNA, 22 nt, Human
ggagugucagaaacaguguccu

SEQ ID NO: 784970 - RNA, 22 nt, Human
aggcagcuuuguaguaaagcua

SEQ ID NO: 784971 - RNA, 22 nt, Human
agccagcucccuccccugcagg

SEQ ID NO: 784972 - RNA, 23 nt, Human
uuagagaugauuaaaaaaucuug

SEQ ID NO: 784973 - RNA, 22 nt, Human
aaauauaauuucugccucaaua

SEQ ID NO: 784974 - RNA, 22 nt, Human
agcgagggaggucugaggacag

SEQ ID NO: 784975 - RNA, 22 nt, Human
uucuucaaacaaaaguggcaug

SEQ ID NO: 784976 - RNA, 22 nt, Human
uucuucuccuaaggagaguccu

SEQ ID NO: 784977 - RNA, 22 nt, Human
caggcaggucagugaagaagga

SEQ ID NO: 784978 - RNA, 22 nt, Human
cucaggaugucggugacuauug

SEQ ID NO: 784979 - RNA, 23 nt, Human
uggcagcuguguaagagaaagca

SEQ ID NO: 784980 - RNA, 22 nt, Human
cugcuguguuagcagguuuagu

SEQ ID NO: 784981 - RNA, 22 nt, Human
cccaaggaagacgcuugugaua

SEQ ID NO: 784982 - RNA, 22 nt, Human
uucuccaacacaagcaugaugu

SEQ ID NO: 784983 - RNA, 22 nt, Human
gagcagcuccagccgcaugacu

SEQ ID NO: 784984 - RNA, 22 nt, Human
ggcagcuuccugagccagcagc

SEQ ID NO: 784985 - RNA, 22 nt, Human
agaggggagagcuaagcaauuc

SEQ ID NO: 784986 - RNA, 22 nt, Human
uccuucuuugacaaguggcaga

SEQ ID NO: 784987 - RNA, 22 nt, Human
augcugugguagacagcauucc

SEQ ID NO: 784988 - RNA, 22 nt, Human
agccuauuccaggaugagcuca

SEQ ID NO: 784989 - RNA, 22 nt, Human
ucagucucaucaacucuauucc

SEQ ID NO: 784990 - RNA, 22 nt, Human
uugaaaggugaacaugaugcac

SEQ ID NO: 784991 - RNA, 22 nt, Human
uacuaaauaguuuaauuccuca

SEQ ID NO: 784992 - RNA, 22 nt, Human
ccauuguaaauucuguggaagu

SEQ ID NO: 784993 - RNA, 20 nt, Human
ggcaggcuuuauauggaggg

SEQ ID NO: 784994 - RNA, 22 nt, Human
cagcugacuucauaggaagaca

SEQ ID NO: 784995 - RNA, 22 nt, Human
ugaggcagggaguuuaauuguc

SEQ ID NO: 784996 - RNA, 21 nt, Human
ccaggaaggacugagcucccu

SEQ ID NO: 784997 - RNA, 22 nt, Human
agggauggaagacuugaagacc

SEQ ID NO: 784998 - RNA, 22 nt, Human
cccaggaggcagagguuggagc

SEQ ID NO: 784999 - RNA, 22 nt, Human
guggcagcggugugcaaggagg

SEQ ID NO: 785000 - RNA, 19 nt, Human
agggaguuuauauuugcac

SEQ ID NO: 785001 - RNA, 22 nt, Human
aggcagcuuucuggugcaccau

SEQ ID NO: 785002 - RNA, 22 nt, Human
ccaggagauaagcugaguuuau

SEQ ID NO: 785003 - RNA, 23 nt, Human
ucucaagaggaagcagggcucau

SEQ ID NO: 785004 - RNA, 22 nt, Human
caauacuuccuuguuagaggca

SEQ ID NO: 785005 - RNA, 22 nt, Human
aguuugaauugaaaugcagaug

SEQ ID NO: 785006 - RNA, 22 nt, Human
gcucaggacccaggugugaccu

SEQ ID NO: 785007 - RNA, 22 nt, Human
gaggcaguguugaaaaggagag

SEQ ID NO: 785008 - RNA, 22 nt, Human
agacucaagcagauaggaauua

SEQ ID NO: 785009 - RNA, 23 nt, Human
aggcccaacucugugagggcugc

SEQ ID NO: 785010 - RNA, 22 nt, Human
guuuuaguggguggccacugau

SEQ ID NO: 785011 - RNA, 22 nt, Human
agacgagggcccccaggacagc

SEQ ID NO: 785012 - RNA, 19 nt, Human
aauacaguguuauagaauu

SEQ ID NO: 785013 - RNA, 23 nt, Human
cagcccuuccugcauguuuuugu

SEQ ID NO: 785014 - RNA, 22 nt, Human
gucaggauguuuauucuccagu

SEQ ID NO: 785015 - RNA, 22 nt, Human
auuuaaauuuucugauggagag

SEQ ID NO: 785016 - RNA, 22 nt, Human
aaggcagccucugccagccggg

SEQ ID NO: 785017 - RNA, 22 nt, Human
aaagcagagcagggcacuuaug

SEQ ID NO: 785018 - RNA, 22 nt, Human
auucauuugcuauuguguaugg

SEQ ID NO: 785019 - RNA, 22 nt, Human
ugagagggcccagagcacacca

SEQ ID NO: 785020 - RNA, 19 nt, Human
uccaggaggcugccauuga

SEQ ID NO: 785021 - RNA, 22 nt, Human
agcccagggaaccaggaagugg

SEQ ID NO: 785022 - RNA, 22 nt, Human
aaaaacuguaauuacuuuugca

SEQ ID NO: 785023 - RNA, 19 nt, Human
ucccaggaaccuuuuauuu

SEQ ID NO: 785024 - RNA, 22 nt, Human
agaaaugaauauguagugguua

SEQ ID NO: 785025 - RNA, 22 nt, Human
uggcagcugaauggcuggaugg

SEQ ID NO: 785026 - RNA, 22 nt, Human
ucuuaaagagcgcaauuugagg

SEQ ID NO: 785027 - RNA, 22 nt, Human
cauuuuaagaugaccugguuuc

SEQ ID NO: 785028 - RNA, 22 nt, Human
agggaagcuuguuacugagaag

SEQ ID NO: 785029 - RNA, 22 nt, Human
uucuucucggcugucagauagu

SEQ ID NO: 785030 - RNA, 16 nt, Human
ucccaggaggcggaac

SEQ ID NO: 785031 - RNA, 22 nt, Human
ucaccgccuugcccggccgggc

SEQ ID NO: 785032 - RNA, 22 nt, Human
ccaugagcuucaacugacacag

SEQ ID NO: 785033 - RNA, 22 nt, Human
gcucccaggcauggagguaauu

SEQ ID NO: 785034 - RNA, 21 nt, Human
ucaggagagcccaucuacaaa

SEQ ID NO: 785035 - RNA, 22 nt, Human
cugcaucacagcaggaggcaca

SEQ ID NO: 785036 - RNA, 22 nt, Human
auugcuguacacuucuagaucu

SEQ ID NO: 785037 - RNA, 22 nt, Human
uauuucagggagaauaaauuug

SEQ ID NO: 785038 - RNA, 22 nt, Human
uucauugucucuguuugccuuc

SEQ ID NO: 785039 - RNA, 22 nt, Human
ucuuagaaauuccccaguggcu

SEQ ID NO: 785040 - RNA, 22 nt, Human
gggacuucauagcuaggcacuu

SEQ ID NO: 785041 - RNA, 22 nt, Human
ggccagagaauaugccuuacgu

SEQ ID NO: 785042 - RNA, 22 nt, Human
cuguauuucccacauucucuau

SEQ ID NO: 785043 - RNA, 22 nt, Human
agacagcugggaaauggagugu

SEQ ID NO: 785044 - RNA, 22 nt, Human
ugcugaugaguccuucuaucgc

SEQ ID NO: 785045 - RNA, 22 nt, Human
ugccuugcacauaauauacauu

SEQ ID NO: 785046 - RNA, 22 nt, Human
cauugcuuccuaugucccuucu

SEQ ID NO: 785047 - RNA, 22 nt, Human
uccauucauucauugaugaaca

SEQ ID NO: 785048 - RNA, 22 nt, Human
ucaagugcuugugagguauuug

SEQ ID NO: 785049 - RNA, 22 nt, Human
gugcauuuaggucacaugaugu

SEQ ID NO: 785050 - RNA, 22 nt, Human
aggcagauuacuugaggccagg

SEQ ID NO: 785051 - RNA, 22 nt, Human
ggcagcuaggggcagggaauuc

SEQ ID NO: 785052 - RNA, 21 nt, Human
cgcagagcgaacuugcggcgc

SEQ ID NO: 785053 - RNA, 22 nt, Human
ucauuuguugcuguuaccugag

SEQ ID NO: 785054 - RNA, 22 nt, Human
acccaggagacggaggugcagu

SEQ ID NO: 785055 - RNA, 21 nt, Human
uuucuucacuuugccccaugu

SEQ ID NO: 785056 - RNA, 22 nt, Human
ccugcugugaagccaggccugu

SEQ ID NO: 785057 - RNA, 20 nt, Human
uauuuguauuugggaaaguu

SEQ ID NO: 785058 - RNA, 22 nt, Human
ugugaaggagaugaagggagug

SEQ ID NO: 785059 - RNA, 22 nt, Human
gaggacagagccgccuggcaag

SEQ ID NO: 785060 - RNA, 22 nt, Human
aggcugcuucaauggauaagau

SEQ ID NO: 785061 - RNA, 23 nt, Human
uggagcugacagucagagggagg

SEQ ID NO: 785062 - RNA, 22 nt, Human
cgccucagccguggucaucuuc

SEQ ID NO: 785063 - RNA, 22 nt, Human
gcagggaagaucuuggagcugc

SEQ ID NO: 785064 - RNA, 22 nt, Human
uuugaaauaugaggcauuauga

SEQ ID NO: 785065 - RNA, 22 nt, Human
gcagcugccccgacugugaguc

SEQ ID NO: 785066 - RNA, 22 nt, Human
uuugaaagaauuuauguacuuu

SEQ ID NO: 785067 - RNA, 22 nt, Human
cagagcucuauguucauggagg

SEQ ID NO: 785068 - RNA, 22 nt, Human
uucucacuauguauguagauug

SEQ ID NO: 785069 - RNA, 22 nt, Human
gguggaaggccuggaaggaggc

SEQ ID NO: 785070 - RNA, 22 nt, Human
caucaucaaaacaaauggaguc

SEQ ID NO: 785071 - RNA, 22 nt, Human
uuucaguuacugcuauaucauu

SEQ ID NO: 785072 - RNA, 22 nt, Human
cugcugucauagccaucccucc

SEQ ID NO: 785073 - RNA, 22 nt, Human
aagagagggguugcauggaaau

SEQ ID NO: 785074 - RNA, 22 nt, Human
uugaaaguccuucuugaguuac

SEQ ID NO: 785075 - RNA, 22 nt, Human
aauacaguaauuuugaugaguu

SEQ ID NO: 785076 - RNA, 22 nt, Human
agaaaauauucauugagaggcu

SEQ ID NO: 785077 - RNA, 22 nt, Human
cagggaggaugggcuguuuugc

SEQ ID NO: 785078 - RNA, 22 nt, Human
gucuucaacaauaacuaccacu

SEQ ID NO: 785079 - RNA, 22 nt, Human
guugaaaguagaugcuauuugg

SEQ ID NO: 785080 - RNA, 22 nt, Human
ucacaaauagcuauauuaagga

SEQ ID NO: 785081 - RNA, 22 nt, Human
cuagccugggauuugaacuuau

SEQ ID NO: 785082 - RNA, 22 nt, Human
agcuggcagucauccuagugag

SEQ ID NO: 785083 - RNA, 22 nt, Human
ugccuugcgggcguuucuguug

SEQ ID NO: 785084 - RNA, 22 nt, Human
cagaggaguucaguacacagcc

SEQ ID NO: 785085 - RNA, 20 nt, Human
acaggagaucugaggaaagg

SEQ ID NO: 785086 - RNA, 22 nt, Human
uucuucuugaaacuuuagguug

SEQ ID NO: 785087 - RNA, 22 nt, Human
gaucuucuagcagaaguaauuu

SEQ ID NO: 785088 - RNA, 22 nt, Human
agagagcauugaggaaaucuuc

SEQ ID NO: 785089 - RNA, 22 nt, Human
caaggccaagguuuugugaacu

SEQ ID NO: 785090 - RNA, 22 nt, Human
agaccaugggcucugaagagca

SEQ ID NO: 785091 - RNA, 22 nt, Human
ugcccaggaucuggcgaugcuc

SEQ ID NO: 785092 - RNA, 22 nt, Human
caggauggagaguuguugguug

SEQ ID NO: 785093 - RNA, 22 nt, Human
uuugaaagaaaccagugaguga

SEQ ID NO: 785094 - RNA, 22 nt, Human
cauuuucagcacccaucugaaa

SEQ ID NO: 785095 - RNA, 22 nt, Human
gccaggaguucagaugcauguu

SEQ ID NO: 785096 - RNA, 22 nt, Human
ugaaagguagcuggccucauag

SEQ ID NO: 785097 - RNA, 22 nt, Human
gagggaggugauacugaacgua

SEQ ID NO: 785098 - RNA, 22 nt, Human
uucauucuugucuuuguauagu

SEQ ID NO: 785099 - RNA, 22 nt, Human
cuagggaguggcagagcuggga

SEQ ID NO: 785100 - RNA, 19 nt, Human
cuuugucagaacaugcuuc

SEQ ID NO: 785101 - RNA, 22 nt, Human
uaaggccaauuaacaaccaggg

SEQ ID NO: 785102 - RNA, 22 nt, Human
aguucuucauaaccuuacugug

SEQ ID NO: 785103 - RNA, 22 nt, Human
uucuacagacuauaacugugau

SEQ ID NO: 785104 - RNA, 22 nt, Human
uuuuuauaugaaggauagugcg

SEQ ID NO: 785105 - RNA, 22 nt, Human
guguguuucagaagccaggugu

SEQ ID NO: 785106 - RNA, 19 nt, Human
uggcaggcccaggauggac

SEQ ID NO: 785107 - RNA, 22 nt, Human
aggcggcuccgggagugugggc

SEQ ID NO: 785108 - RNA, 22 nt, Human
agcugcccuuaauaggcauuca

SEQ ID NO: 785109 - RNA, 22 nt, Human
ggcagcuggggcagugcccugu

SEQ ID NO: 785110 - RNA, 22 nt, Human
ucacacagguuugcaaugauuu

SEQ ID NO: 785111 - RNA, 22 nt, Human
ccaggagauuuuuccauagcac

SEQ ID NO: 785112 - RNA, 22 nt, Human
ggcagcucugcuccacaugagu

SEQ ID NO: 785113 - RNA, 22 nt, Human
cucccaggcacagggaggagcc

SEQ ID NO: 785114 - RNA, 22 nt, Human
ggaguaggaguagaacucauca

SEQ ID NO: 785115 - RNA, 21 nt, Human
uucugggaaaugagcuggggc

SEQ ID NO: 785116 - RNA, 22 nt, Human
auguggaggaaaugaguguaca

SEQ ID NO: 785117 - RNA, 22 nt, Human
uuaucacuuaugagcuuuuugc

SEQ ID NO: 785118 - RNA, 22 nt, Human
agucucugccagcuuguccucu

SEQ ID NO: 785119 - RNA, 22 nt, Human
uucaggaugcagagguuguagu

SEQ ID NO: 785120 - RNA, 22 nt, Human
uauuucagguauggugugaaau

SEQ ID NO: 785121 - RNA, 22 nt, Human
cccaggaggucgaagcugcagu

SEQ ID NO: 785122 - RNA, 22 nt, Human
cccagaaggucgaggcugcagu

SEQ ID NO: 785123 - RNA, 22 nt, Human
uccaugucuucaugugucuaac

SEQ ID NO: 785124 - RNA, 20 nt, Human
aggaggcauagucuggaaag

SEQ ID NO: 785125 - RNA, 22 nt, Human
aggaagcuggugugaggaugaa

SEQ ID NO: 785126 - RNA, 20 nt, Human
agagcagcaguuggugaggu

SEQ ID NO: 785127 - RNA, 22 nt, Human
ucuuagaaugucaacugauguu

SEQ ID NO: 785128 - RNA, 22 nt, Human
uggcagcuguuaauguuuuguu

SEQ ID NO: 785129 - RNA, 22 nt, Human
uucuccagaccuugugacuaug

SEQ ID NO: 785130 - RNA, 22 nt, Human
auuaaauuggaucugcauaguu

SEQ ID NO: 785131 - RNA, 22 nt, Human
uggcuucuugggaugggucauu

SEQ ID NO: 785132 - RNA, 22 nt, Human
caggauggucucgaucuccuga

SEQ ID NO: 785133 - RNA, 22 nt, Human
uaagaacuucggacauguuauc

SEQ ID NO: 785134 - RNA, 22 nt, Human
aauuuccaaauuucugucacac

SEQ ID NO: 785135 - RNA, 22 nt, Human
aagggaggaggauuuauuguac

SEQ ID NO: 785136 - RNA, 22 nt, Human
acauaccauacauggugagaug

SEQ ID NO: 785137 - RNA, 22 nt, Human
ugaggcagcuuuuucugugugu

SEQ ID NO: 785138 - RNA, 22 nt, Human
agaggcagccguauuucaaagg

SEQ ID NO: 785139 - RNA, 22 nt, Human
uucucugaucuugcuagacuga

SEQ ID NO: 785140 - RNA, 20 nt, Human
gucaggauuaguaaacucug

SEQ ID NO: 785141 - RNA, 22 nt, Human
ucuucucuacaccagcagcccc

SEQ ID NO: 785142 - RNA, 22 nt, Human
ucuuugaauuucugacugucuu

SEQ ID NO: 785143 - RNA, 22 nt, Human
uguuuuaaagccauugccuuuc

SEQ ID NO: 785144 - RNA, 22 nt, Human
ggccaggagcugcacagggcuc

SEQ ID NO: 785145 - RNA, 22 nt, Human
agaggcaggaagagcugauuuu

SEQ ID NO: 785146 - RNA, 22 nt, Human
ucccaggaugaagacaguguug

SEQ ID NO: 785147 - RNA, 22 nt, Human
uaguuuuacuugcgaugauaau

SEQ ID NO: 785148 - RNA, 22 nt, Human
uuugaaaguccuaggagagucc

SEQ ID NO: 785149 - RNA, 22 nt, Human
gcccaggaugguguguaguggu

SEQ ID NO: 785150 - RNA, 22 nt, Human
uguugagacugagggagucagc

SEQ ID NO: 785151 - RNA, 21 nt, Human
agagagggagaugaaacaucc

SEQ ID NO: 785152 - RNA, 22 nt, Human
gccaucacauccaggcuaccuc

SEQ ID NO: 785153 - RNA, 23 nt, Human
ugcaugugaauucauacuuguuu

SEQ ID NO: 785154 - RNA, 22 nt, Human
aggccagcgcugcuagcucccg

SEQ ID NO: 785155 - RNA, 22 nt, Human
cuagccaugggcauuaaaggua

SEQ ID NO: 785156 - RNA, 22 nt, Human
cugacagucucauugauuugcu

SEQ ID NO: 785157 - RNA, 22 nt, Human
gauuuuaauuauaggagguccu

SEQ ID NO: 785158 - RNA, 22 nt, Human
aucacauuguuagcauagacug

SEQ ID NO: 785159 - RNA, 22 nt, Human
agagggaucacccuguuucugg

SEQ ID NO: 785160 - RNA, 22 nt, Human
cccaggugcugcgugaagccuc

SEQ ID NO: 785161 - RNA, 22 nt, Human
cacaugaguccugccagguaug

SEQ ID NO: 785162 - RNA, 17 nt, Human
gucauucucagaaaaug

SEQ ID NO: 785163 - RNA, 22 nt, Human
uaaaauagcaugugcagugaaa

SEQ ID NO: 785164 - RNA, 22 nt, Human
ccaggaugacccccacuuuccu

SEQ ID NO: 785165 - RNA, 22 nt, Human
aguuugaaaguauugacagaag

SEQ ID NO: 785166 - RNA, 22 nt, Human
cucacugugaccucagcagaca

SEQ ID NO: 785167 - RNA, 22 nt, Human
caagaugggcaccccagcaccu

SEQ ID NO: 785168 - RNA, 22 nt, Human
uucaacuauuaugaauaaaauu

SEQ ID NO: 785169 - RNA, 22 nt, Human
ucagagaguuagugucuuagcu

SEQ ID NO: 785170 - RNA, 22 nt, Human
aauuuccagaucagaugacuca

SEQ ID NO: 785171 - RNA, 22 nt, Human
uccaggagucagacagauggug

SEQ ID NO: 785172 - RNA, 22 nt, Human
accaggagcauuuuuuauuagu

SEQ ID NO: 785173 - RNA, 22 nt, Human
gaggagagaagcuaacggugcu

SEQ ID NO: 785174 - RNA, 22 nt, Human
ccaggaguggcuggugaccuuc

SEQ ID NO: 785175 - RNA, 22 nt, Human
uucuucucucauagauuaaggu

SEQ ID NO: 785176 - RNA, 22 nt, Human
aacugcuguggccuaguacuua

SEQ ID NO: 785177 - RNA, 22 nt, Human
uaaggccaaguucauauacaac

SEQ ID NO: 785178 - RNA, 22 nt, Human
auuaucuauguagaaugauuuu

SEQ ID NO: 785179 - RNA, 22 nt, Human
ucagucuuugcuuaugacaaua

SEQ ID NO: 785180 - RNA, 22 nt, Human
ugcuugugagaguuuuuucaga

SEQ ID NO: 785181 - RNA, 22 nt, Human
ucaguucuuuauuucacaguga

SEQ ID NO: 785182 - RNA, 22 nt, Human
cauucucaauaguagaugagua

SEQ ID NO: 785183 - RNA, 19 nt, Human
aaggcagcaguagcaucca

SEQ ID NO: 785184 - RNA, 22 nt, Human
augaggcaguacacacaaagcc

SEQ ID NO: 785185 - RNA, 22 nt, Human
ggcagcauauauucagugggca

SEQ ID NO: 785186 - RNA, 22 nt, Human
agcugcccugguaagauugaug

SEQ ID NO: 785187 - RNA, 22 nt, Human
ccacaucucgguccccucuuug

SEQ ID NO: 785188 - RNA, 20 nt, Human
agcauuugaaauaugacuau

SEQ ID NO: 785189 - RNA, 22 nt, Human
aaauaguucagcuuguaaaccc

SEQ ID NO: 785190 - RNA, 22 nt, Human
aggcagcugaggucuggcgccc

SEQ ID NO: 785191 - RNA, 20 nt, Human
uuuacauuuugaaacaguga

SEQ ID NO: 785192 - RNA, 22 nt, Human
uugaaauaucaaguuauuagug

SEQ ID NO: 785193 - RNA, 22 nt, Human
caggggaguuuuaugcaacaga

SEQ ID NO: 785194 - RNA, 22 nt, Human
aggcaggcucaggcccaugcuu

SEQ ID NO: 785195 - RNA, 21 nt, Human
uucucagaucgaguagugaga

SEQ ID NO: 785196 - RNA, 22 nt, Human
ggaggcagaauagagugugggu

SEQ ID NO: 785197 - RNA, 22 nt, Human
cuggaaauuggagaugauguuu

SEQ ID NO: 785198 - RNA, 20 nt, Human
ggggcugcaugcagagaaga

SEQ ID NO: 785199 - RNA, 22 nt, Human
uacccagggcuuuucugaugca

SEQ ID NO: 785200 - RNA, 22 nt, Human
agagggcagggcgguaaguccu

SEQ ID NO: 785201 - RNA, 22 nt, Human
cccaggagagagacuugaaucu

SEQ ID NO: 785202 - RNA, 22 nt, Human
agucugucuacuuaaagucugu

SEQ ID NO: 785203 - RNA, 23 nt, Human
uccaugagaugugggcuucuagu

SEQ ID NO: 785204 - RNA, 22 nt, Human
ugagggagagggcgaaaaugaa

SEQ ID NO: 785205 - RNA, 22 nt, Human
cagcuucugucugauuagcaag

SEQ ID NO: 785206 - RNA, 20 nt, Human
cuucuucauuaacccuacug

SEQ ID NO: 785207 - RNA, 22 nt, Human
ugugccagccucuggcuguguc

SEQ ID NO: 785208 - RNA, 21 nt, Human
uuucuuaggcucuaaaaugac

SEQ ID NO: 785209 - RNA, 22 nt, Human
uuuuucaagacaaccugcaugu

SEQ ID NO: 785210 - RNA, 22 nt, Human
cagcugacgccagaguggaauu

SEQ ID NO: 785211 - RNA, 22 nt, Human
cugaaugaggaaaagagugagg

SEQ ID NO: 785212 - RNA, 22 nt, Human
cccaggagaccuagaucuguuu

SEQ ID NO: 785213 - RNA, 22 nt, Human
gcccaggauggagaauaguggu

SEQ ID NO: 785214 - RNA, 22 nt, Human
cagaggcacaagaaagcaaggc

SEQ ID NO: 785215 - RNA, 22 nt, Human
gggacgggcaguccaagggguc

SEQ ID NO: 785216 - RNA, 22 nt, Human
aagcaauauacugauaugauua

SEQ ID NO: 785217 - RNA, 17 nt, Human
ccuguguuugcuccuuc

SEQ ID NO: 785218 - RNA, 22 nt, Human
cuuuggcaaggguuuuaauugu

SEQ ID NO: 785219 - RNA, 22 nt, Human
ggcugaaggaugaaagcugcag

SEQ ID NO: 785220 - RNA, 22 nt, Human
agcuagccuaggcagagugcau

SEQ ID NO: 785221 - RNA, 22 nt, Human
uaugaacuuuugaugugacaug

SEQ ID NO: 785222 - RNA, 22 nt, Human
uccaugagcuagggauucauca

SEQ ID NO: 785223 - RNA, 21 nt, Human
gagugcagcaagguagagucu

SEQ ID NO: 785224 - RNA, 22 nt, Human
ggauggcaggacaaggacccag

SEQ ID NO: 785225 - RNA, 22 nt, Human
uuucacaaaugucuuuaacuug

SEQ ID NO: 785226 - RNA, 22 nt, Human
gucuucaauagagccucaauuu

SEQ ID NO: 785227 - RNA, 18 nt, Human
ugaauagggguuugcaga

SEQ ID NO: 785228 - RNA, 22 nt, Human
uccaggagugcugguuagagua

SEQ ID NO: 785229 - RNA, 22 nt, Human
gugcagcugugguggagccagg

SEQ ID NO: 785230 - RNA, 22 nt, Human
uaaaugagggcugacaugauug

SEQ ID NO: 785231 - RNA, 23 nt, Human
acagaaaucauuuguaagguacc

SEQ ID NO: 785232 - RNA, 22 nt, Human
cagagggcacaugguuuccuca

SEQ ID NO: 785233 - RNA, 22 nt, Human
gucuccugagacugcagucacc

SEQ ID NO: 785234 - RNA, 22 nt, Human
aggcagucuaucucuggagccu

SEQ ID NO: 785235 - RNA, 22 nt, Human
cuguggaaauaaacaaugcuaa

SEQ ID NO: 785236 - RNA, 22 nt, Human
uuugcauaaaggagcauuucuc

SEQ ID NO: 785237 - RNA, 22 nt, Human
ccuuaaauucuccauuugaaag

SEQ ID NO: 785238 - RNA, 18 nt, Human
gagaggagccagaauuuu

SEQ ID NO: 785239 - RNA, 22 nt, Human
agagcagcugugacauggacag

SEQ ID NO: 785240 - RNA, 22 nt, Human
uuaaauauuauguugucugcaa

SEQ ID NO: 785241 - RNA, 22 nt, Human
cauuucacaaauggccacauca

SEQ ID NO: 785242 - RNA, 23 nt, Human
gugcugugagccccuuggccucc

SEQ ID NO: 785243 - RNA, 22 nt, Human
aagccgaggccacacagcagga

SEQ ID NO: 785244 - RNA, 22 nt, Human
gaggagagaugguagauugggu

SEQ ID NO: 785245 - RNA, 22 nt, Human
ggugaagggugucauggcauuu

SEQ ID NO: 785246 - RNA, 22 nt, Human
cagaggcaaaagagguggaggu

SEQ ID NO: 785247 - RNA, 22 nt, Human
ucuuugaauucaaacuguucaa

SEQ ID NO: 785248 - RNA, 22 nt, Human
aucauuucccuuuagaucacaa

SEQ ID NO: 785249 - RNA, 20 nt, Human
uccaugaguuagagacuaua

SEQ ID NO: 785250 - RNA, 22 nt, Human
ucacaaaugaggaaaucgagca

SEQ ID NO: 785251 - RNA, 22 nt, Human
cuucagaaugggacuguguuug

SEQ ID NO: 785252 - RNA, 20 nt, Human
ucagugauuuugaagaggaa

SEQ ID NO: 785253 - RNA, 22 nt, Human
ggagguggcagggaacauaauu

SEQ ID NO: 785254 - RNA, 22 nt, Human
ggguggagaggcuaaguccagu

SEQ ID NO: 785255 - RNA, 22 nt, Human
agaggcaggagguugacuugag

SEQ ID NO: 785256 - RNA, 22 nt, Human
uuuaacagaugcuaugucuacc

SEQ ID NO: 785257 - RNA, 22 nt, Human
ucuucagauaaagggagaguau

SEQ ID NO: 785258 - RNA, 22 nt, Human
cagagaaaaaauccugcucuca

SEQ ID NO: 785259 - RNA, 22 nt, Human
cggaggggauacauuuucugaa

SEQ ID NO: 785260 - RNA, 22 nt, Human
aagugggaauagaaaugaaggu

SEQ ID NO: 785261 - RNA, 22 nt, Human
gaucuguuauaaucucuuuuau

SEQ ID NO: 785262 - RNA, 22 nt, Human
aguggcaguagaugagcugguu

SEQ ID NO: 785263 - RNA, 22 nt, Human
aaaggccacacagagcagggag

SEQ ID NO: 785264 - RNA, 22 nt, Human
aauggccagcaacaggagugaa

SEQ ID NO: 785265 - RNA, 22 nt, Human
uugaaagaagaagcugcgaugu

SEQ ID NO: 785266 - RNA, 22 nt, Human
uggaggaaguugcuggaaguca

SEQ ID NO: 785267 - RNA, 20 nt, Human
cuguggaauuuuaccaugcg

SEQ ID NO: 785268 - RNA, 22 nt, Human
uucuucuugucugcccucacau

SEQ ID NO: 785269 - RNA, 22 nt, Human
gggcagcugccacuccgcuugc

SEQ ID NO: 785270 - RNA, 22 nt, Human
agggcagcagcggcccaggccu

SEQ ID NO: 785271 - RNA, 22 nt, Human
uccauuuucuaaguaucacuua

SEQ ID NO: 785272 - RNA, 22 nt, Human
ugaggggagaagcagcagccug

SEQ ID NO: 785273 - RNA, 22 nt, Human
cagacagggaccucgcuccaga

SEQ ID NO: 785274 - RNA, 23 nt, Human
aggcgagcucuucuccagcacgu

SEQ ID NO: 785275 - RNA, 22 nt, Human
cccaggaaaguggaggcggcug

SEQ ID NO: 785276 - RNA, 22 nt, Human
uagggauguaaacauaguaauu

SEQ ID NO: 785277 - RNA, 17 nt, Human
cccacggaggugugaaa

SEQ ID NO: 785278 - RNA, 22 nt, Human
aagauuauggcagauaacaauu

SEQ ID NO: 785279 - RNA, 22 nt, Human
ccugcugugaccggggagcagg

SEQ ID NO: 785280 - RNA, 22 nt, Human
ucuuagaaguucauguuccagc

SEQ ID NO: 785281 - RNA, 22 nt, Human
uggcagcuagauaguguguuua

SEQ ID NO: 785282 - RNA, 18 nt, Human
cugcuugggagacgucag

SEQ ID NO: 785283 - RNA, 22 nt, Human
caagauggagaagcagcaaggg

SEQ ID NO: 785284 - RNA, 22 nt, Human
aggagggagcuuaagccaggca

SEQ ID NO: 785285 - RNA, 20 nt, Human
cauuuguuagcuuucuacug

SEQ ID NO: 785286 - RNA, 22 nt, Human
ggugaguugggguucacagguc

SEQ ID NO: 785287 - RNA, 22 nt, Human
aggccagcagcaugacggcauc

SEQ ID NO: 785288 - RNA, 22 nt, Human
gaggcagcugaagcuucaaaga

SEQ ID NO: 785289 - RNA, 19 nt, Human
ggucagcugggcuagaggc

SEQ ID NO: 785290 - RNA, 22 nt, Human
uuggcaggaauauugcagaggu

SEQ ID NO: 785291 - RNA, 22 nt, Human
cagauccacccuuguagugaca

SEQ ID NO: 785292 - RNA, 22 nt, Human
aggaaaacacaguauugaugga

SEQ ID NO: 785293 - RNA, 22 nt, Human
auuucauugaaguuaauucuuc

SEQ ID NO: 785294 - RNA, 22 nt, Human
uggggcuccuccuggcaggagg

SEQ ID NO: 785295 - RNA, 22 nt, Human
aucuacccacugaacacaauau

SEQ ID NO: 785296 - RNA, 22 nt, Human
gcagagcuccccaagacaccaa

SEQ ID NO: 785297 - RNA, 22 nt, Human
aaggcagcuuuaaaaaagaugc

SEQ ID NO: 785298 - RNA, 23 nt, Human
auugaugacuugauuacacuuuu

SEQ ID NO: 785299 - RNA, 22 nt, Human
ggaggggagauguuugggcuca

SEQ ID NO: 785300 - RNA, 22 nt, Human
cccagcaguaaccaguggaaau

SEQ ID NO: 785301 - RNA, 22 nt, Human
cccaggaacagcacagaacagc

SEQ ID NO: 785302 - RNA, 22 nt, Human
uucuccagagggcucugcagga

SEQ ID NO: 785303 - RNA, 22 nt, Human
cucaggauccaucuccugcccu

SEQ ID NO: 785304 - RNA, 22 nt, Human
uuucaucuaacacuacauaggg

SEQ ID NO: 785305 - RNA, 22 nt, Human
uaaggccaaacuauuauaguuc

SEQ ID NO: 785306 - RNA, 22 nt, Human
cagaguggcgacccccucagcu

SEQ ID NO: 785307 - RNA, 22 nt, Human
ugacaguuaagguauacauuca

SEQ ID NO: 785308 - RNA, 17 nt, Human
uccaugagacaugaaga

SEQ ID NO: 785309 - RNA, 22 nt, Human
ucugggaagcugcgugccuguu

SEQ ID NO: 785310 - RNA, 22 nt, Human
auugaaaggcaaaguaggaagc

SEQ ID NO: 785311 - RNA, 22 nt, Human
acucaggagggaucagcuauca

SEQ ID NO: 785312 - RNA, 22 nt, Human
ucacaguaaaagcauggaagag

SEQ ID NO: 785313 - RNA, 22 nt, Human
uaaggccaccguuauagaacca

SEQ ID NO: 785314 - RNA, 22 nt, Human
cugccagucuaugcugcucggc

SEQ ID NO: 785315 - RNA, 22 nt, Human
uuucuuaguccuagagugauuu

SEQ ID NO: 785316 - RNA, 22 nt, Human
aggcaggcacuccggaaguguc

SEQ ID NO: 785317 - RNA, 22 nt, Human
uugcuuuguggugguucuucca

SEQ ID NO: 785318 - RNA, 22 nt, Human
cggagaggugggggcagcaucu

SEQ ID NO: 785319 - RNA, 22 nt, Human
uuuaaauuuguguuuagagggu

SEQ ID NO: 785320 - RNA, 22 nt, Human
aaagccauuacaaaauuucaua

SEQ ID NO: 785321 - RNA, 18 nt, Human
agggaguuuuagggaagg

SEQ ID NO: 785322 - RNA, 22 nt, Human
aacaaaugaccugauuucuucc

SEQ ID NO: 785323 - RNA, 22 nt, Human
uuugagauggagucuugcucug

SEQ ID NO: 785324 - RNA, 22 nt, Human
ucagaaaagguagcugugacaa

SEQ ID NO: 785325 - RNA, 22 nt, Human
cugcugugcuuguggccacccg

SEQ ID NO: 785326 - RNA, 22 nt, Human
cuggccagcugacagcagggcu

SEQ ID NO: 785327 - RNA, 19 nt, Human
acuggcaguuucugcaugg

SEQ ID NO: 785328 - RNA, 17 nt, Human
agcugaaauugcugaag

SEQ ID NO: 785329 - RNA, 22 nt, Human
uucucagguagugcugaugcug

SEQ ID NO: 785330 - RNA, 22 nt, Human
aaauguauugcauaggauauuu

SEQ ID NO: 785331 - RNA, 21 nt, Human
cucuugugucagagccagagg

SEQ ID NO: 785332 - RNA, 22 nt, Human
cccaggaaagagacugcugggu

SEQ ID NO: 785333 - RNA, 22 nt, Human
ggagaagggacagacucagcuu

SEQ ID NO: 785334 - RNA, 22 nt, Human
agggcagcagcuccuccuagcu

SEQ ID NO: 785335 - RNA, 22 nt, Human
aguuauaaucugcuacugauau

SEQ ID NO: 785336 - RNA, 22 nt, Human
ugcauguggaccccuggugccu

SEQ ID NO: 785337 - RNA, 22 nt, Human
uucuuaacucaaauauauaucc

SEQ ID NO: 785338 - RNA, 22 nt, Human
auuguauaacagcauguauuuu

SEQ ID NO: 785339 - RNA, 22 nt, Human
ugugaacuggcagguggacggg

SEQ ID NO: 785340 - RNA, 22 nt, Human
uugaaauggaagugaaaauucu

SEQ ID NO: 785341 - RNA, 22 nt, Human
uauuucagucacuucuucucug

SEQ ID NO: 785342 - RNA, 22 nt, Human
uagauuuuacuucugucauuac

SEQ ID NO: 785343 - RNA, 22 nt, Human
gagccagcuauguagcaagagg

SEQ ID NO: 785344 - RNA, 19 nt, Human
uaucuguuuccugcuuguc

SEQ ID NO: 785345 - RNA, 23 nt, Human
gagugcagaauagacaugcagug

SEQ ID NO: 785346 - RNA, 21 nt, Human
ggacagcugcgcgcagggcuc

SEQ ID NO: 785347 - RNA, 22 nt, Human
uuucucuguucucuaacuguaa

SEQ ID NO: 785348 - RNA, 22 nt, Human
ugauuuccuaggucuggagaag

SEQ ID NO: 785349 - RNA, 22 nt, Human
cagaggcagugggguugcuccu

SEQ ID NO: 785350 - RNA, 23 nt, Human
ucagagagcuguugagagcugcc

SEQ ID NO: 785351 - RNA, 22 nt, Human
uccuuagagacaagaccaguuu

SEQ ID NO: 785352 - RNA, 22 nt, Human
cccaggagacugagcuguaacc

SEQ ID NO: 785353 - RNA, 22 nt, Human
ggagaggguguggaaaguuauc

SEQ ID NO: 785354 - RNA, 22 nt, Human
uuugcaauuugugcugcaaaug

SEQ ID NO: 785355 - RNA, 22 nt, Human
caguggagagacuuuuacucuu

SEQ ID NO: 785356 - RNA, 22 nt, Human
cccucuacagggaagcgcuuuc

SEQ ID NO: 785357 - RNA, 22 nt, Human
uccaggaggacugagggggcug

SEQ ID NO: 785358 - RNA, 21 nt, Human
gcucagaguauugcacuguuu

SEQ ID NO: 785359 - RNA, 22 nt, Human
aucaggauggguuuggcuuagg

SEQ ID NO: 785360 - RNA, 22 nt, Human
gaggccaaguuggagaccaggu

SEQ ID NO: 785361 - RNA, 22 nt, Human
uuugcaaagugacuauuauaug

SEQ ID NO: 785362 - RNA, 22 nt, Human
ugaggcaguauuuuagugacuu

SEQ ID NO: 785363 - RNA, 22 nt, Human
ucccaggaauugaagccagugu

SEQ ID NO: 785364 - RNA, 22 nt, Human
ugcuugaaagggguuucccagu

SEQ ID NO: 785365 - RNA, 22 nt, Human
cagcuccucacgagucuugaaa

SEQ ID NO: 785366 - RNA, 22 nt, Human
agacgagggccuggcacacagu

SEQ ID NO: 785367 - RNA, 22 nt, Human
aggacagcagugcuggcacuug

SEQ ID NO: 785368 - RNA, 22 nt, Human
uuacaguuuaguccaagccaga

SEQ ID NO: 785369 - RNA, 22 nt, Human
gaggagcuugaggcuaggagcc

SEQ ID NO: 785370 - RNA, 22 nt, Human
gcaaagcauucuguggagucua

SEQ ID NO: 785371 - RNA, 22 nt, Human
ccagguaggagagagggauccu

SEQ ID NO: 785372 - RNA, 22 nt, Human
ucccaggaauccguccucuaga

SEQ ID NO: 785373 - RNA, 22 nt, Human
augugaggcagcacggagauua

SEQ ID NO: 785374 - RNA, 22 nt, Human
cauuaaaauaucucaugguguu

SEQ ID NO: 785375 - RNA, 22 nt, Human
gaggcagcgggucaggaccgug

SEQ ID NO: 785376 - RNA, 23 nt, Human
aguaaagcaauuguuggcgagag

SEQ ID NO: 785377 - RNA, 19 nt, Human
cccaggaggcggagguugc

SEQ ID NO: 785378 - RNA, 22 nt, Human
aggcaggcugcuauggaguaga

SEQ ID NO: 785379 - RNA, 20 nt, Human
agaggccaguuaggagucua

SEQ ID NO: 785380 - RNA, 22 nt, Human
cagugguuauacuuacuguuuc

SEQ ID NO: 785381 - RNA, 22 nt, Human
gacagugcauuuccuggcaugg

SEQ ID NO: 785382 - RNA, 22 nt, Human
aggguagguguaagauagcccu

SEQ ID NO: 785383 - RNA, 18 nt, Human
aggcaggcuggagugacu

SEQ ID NO: 785384 - RNA, 19 nt, Human
accaggagacagugagcuu

SEQ ID NO: 785385 - RNA, 22 nt, Human
gaucuucucuuuaguagaaaca

SEQ ID NO: 785386 - RNA, 22 nt, Human
uguuugaauuuugcuaacgugu

SEQ ID NO: 785387 - RNA, 22 nt, Human
cugcugugccucuuuucacgug

SEQ ID NO: 785388 - RNA, 23 nt, Human
accaggaguugucucaggaaaca

SEQ ID NO: 785389 - RNA, 22 nt, Human
ugcccacauggugccauggcca

SEQ ID NO: 785390 - RNA, 20 nt, Human
uuucugugcccaggucuguu

SEQ ID NO: 785391 - RNA, 22 nt, Human
auaucaaacgaaguuauuuuaa

SEQ ID NO: 785392 - RNA, 22 nt, Human
ucuaaccuuugaaacugcuuuc

SEQ ID NO: 785393 - RNA, 22 nt, Human
gaugccuccaaaugagggcaga

SEQ ID NO: 785394 - RNA, 22 nt, Human
aucugcaggaaugugugcagag

SEQ ID NO: 785395 - RNA, 22 nt, Human
aucuuguuauaagagauaaugg

SEQ ID NO: 785396 - RNA, 22 nt, Human
aagcaccuggguuauaucuuag

SEQ ID NO: 785397 - RNA, 22 nt, Human
uagggaugacgaaaggacagag

SEQ ID NO: 785398 - RNA, 22 nt, Human
aguuauaugugaaaacacguau

SEQ ID NO: 785399 - RNA, 22 nt, Human
ugaugaaacugagguuccaaga

SEQ ID NO: 785400 - RNA, 22 nt, Human
cagcaggauuugaaaggaagag

SEQ ID NO: 785401 - RNA, 22 nt, Human
aggcagcuagagagugaaacug

SEQ ID NO: 785402 - RNA, 22 nt, Human
acacauauauacauauuugugc

SEQ ID NO: 785403 - RNA, 22 nt, Human
ugcugugagguugagaaggaag

SEQ ID NO: 785404 - RNA, 22 nt, Human
uucucuuuugugaugugagaug

SEQ ID NO: 785405 - RNA, 22 nt, Human
auacacauguguaugugcaugc

SEQ ID NO: 785406 - RNA, 22 nt, Human
cugcugugugaccauggacagg

SEQ ID NO: 785407 - RNA, 17 nt, Human
gagacagcaggagcccc

SEQ ID NO: 785408 - RNA, 22 nt, Human
caaauaguaugagcaaugauuc

SEQ ID NO: 785409 - RNA, 22 nt, Human
uccaggaggguuuucugccuuc

SEQ ID NO: 785410 - RNA, 22 nt, Human
ucaggaugaccacgagccucua

SEQ ID NO: 785411 - RNA, 22 nt, Human
accaggagguguuugcucaagu

SEQ ID NO: 785412 - RNA, 22 nt, Human
cuuaagauuugagauaccuaau

SEQ ID NO: 785413 - RNA, 22 nt, Human
agagggagcccagucauagcug

SEQ ID NO: 785414 - RNA, 22 nt, Human
accaggagccauagagucaggc

SEQ ID NO: 785415 - RNA, 19 nt, Human
uugaaagauuagcuuucua

SEQ ID NO: 785416 - RNA, 22 nt, Human
ccauggcaauggucagucuauu

SEQ ID NO: 785417 - RNA, 20 nt, Human
agacaggagcccccauucag

SEQ ID NO: 785418 - RNA, 17 nt, Human
aagacagaagccaugag

SEQ ID NO: 785419 - RNA, 22 nt, Human
aaggcaguuaauuuggcuagaa

SEQ ID NO: 785420 - RNA, 22 nt, Human
aggcagcugcccucuccuuccu

SEQ ID NO: 785421 - RNA, 19 nt, Human
ugccuggacaaaugugggg

SEQ ID NO: 785422 - RNA, 22 nt, Human
gcagaggggaagcugaggaauu

SEQ ID NO: 785423 - RNA, 21 nt, Human
gcaaauguucaggaaaaaaga

SEQ ID NO: 785424 - RNA, 22 nt, Human
ucccaggacccaggcauucaca

SEQ ID NO: 785425 - RNA, 22 nt, Human
cagcagaggugguucacauugu

SEQ ID NO: 785426 - RNA, 22 nt, Human
acaagcaugggcuuugacauca

SEQ ID NO: 785427 - RNA, 22 nt, Human
aucauucuagcuguuguguuga

SEQ ID NO: 785428 - RNA, 22 nt, Human
uuucagaaagcugaacauauga

SEQ ID NO: 785429 - RNA, 22 nt, Human
aaaggccacacugcucuuucuc

SEQ ID NO: 785430 - RNA, 22 nt, Human
aagauggagcacgagcagaagc

SEQ ID NO: 785431 - RNA, 22 nt, Human
cuucuucacacuggucugaagc

SEQ ID NO: 785432 - RNA, 22 nt, Human
auuuuacuacuccaauuaauga

SEQ ID NO: 785433 - RNA, 22 nt, Human
aguucuuuugugaacauaugcu

SEQ ID NO: 785434 - RNA, 22 nt, Human
cacaugugugcugaggacugug

SEQ ID NO: 785435 - RNA, 22 nt, Human
aacauuucagcaaauaagaaca

SEQ ID NO: 785436 - RNA, 22 nt, Human
ggaggggucucuagcgaggaga

SEQ ID NO: 785437 - RNA, 22 nt, Human
uaaagcacauaucuuacaauaa

SEQ ID NO: 785438 - RNA, 22 nt, Human
ggcagaggaggggugaauuugc

SEQ ID NO: 785439 - RNA, 22 nt, Human
ugcacagugaccccuggugacu

SEQ ID NO: 785440 - RNA, 22 nt, Human
gaaauauugggacucagagcuu

SEQ ID NO: 785441 - RNA, 22 nt, Human
ggagugggaacaaugacauggu

SEQ ID NO: 785442 - RNA, 22 nt, Human
caggcagcuagauuuauaacaa

SEQ ID NO: 785443 - RNA, 22 nt, Human
cuuaacagagagaaguguugcu

SEQ ID NO: 785444 - RNA, 22 nt, Human
uucucagagcacugcugacaaa

SEQ ID NO: 785445 - RNA, 22 nt, Human
gugcaagguacauccuugaugu

SEQ ID NO: 785446 - RNA, 22 nt, Human
accuugaugccuuuccaagaug

SEQ ID NO: 785447 - RNA, 22 nt, Human
auucuuauuuaaauagagucug

SEQ ID NO: 785448 - RNA, 22 nt, Human
agcaccuguugcacuucauaau

SEQ ID NO: 785449 - RNA, 22 nt, Human
gagggagggccaggucccaacc

SEQ ID NO: 785450 - RNA, 22 nt, Human
aaggcaguacuuuauguccaua

SEQ ID NO: 785451 - RNA, 22 nt, Human
cagucccuaguggagcucacag

SEQ ID NO: 785452 - RNA, 22 nt, Human
cugccuccugccgugcagcuuc

SEQ ID NO: 785453 - RNA, 22 nt, Human
gaaggccaguuuugagauaggu

SEQ ID NO: 785454 - RNA, 22 nt, Human
cugagacuuucaugugcuuuua

SEQ ID NO: 785455 - RNA, 22 nt, Human
aggaaacuccccuacaucucaa

SEQ ID NO: 785456 - RNA, 22 nt, Human
ugaggggagguuggggcacauc

SEQ ID NO: 785457 - RNA, 20 nt, Human
uacagaaugcaauaaaaugg

SEQ ID NO: 785458 - RNA, 22 nt, Human
ucaauucugguccucaggaacu

SEQ ID NO: 785459 - RNA, 22 nt, Human
augcugugucuagcaggaacac

SEQ ID NO: 785460 - RNA, 22 nt, Human
guccucugaaguugugcaaugc

SEQ ID NO: 785461 - RNA, 22 nt, Human
uccaugagggacacuggaugcu

SEQ ID NO: 785462 - RNA, 19 nt, Human
accaggaguaucagagcug

SEQ ID NO: 785463 - RNA, 22 nt, Human
uguguucuggaaagcucacuga

SEQ ID NO: 785464 - RNA, 22 nt, Human
ucccaggaaaacacucgaggac

SEQ ID NO: 785465 - RNA, 22 nt, Human
uugcuguguaacuccuggccug

SEQ ID NO: 785466 - RNA, 22 nt, Human
cauucauuagaauagauaugua

SEQ ID NO: 785467 - RNA, 22 nt, Human
cucuucuuggcccccaugaggg

SEQ ID NO: 785468 - RNA, 22 nt, Human
caucucaugggcaugccaagcu

SEQ ID NO: 785469 - RNA, 22 nt, Human
aaagccaugggucuuuggcaua

SEQ ID NO: 785470 - RNA, 22 nt, Human
uucaugcuuuuaccgcuguuaa

SEQ ID NO: 785471 - RNA, 23 nt, Human
uccaggagaauuccagggcccgg

SEQ ID NO: 785472 - RNA, 22 nt, Human
uucagggagagcgggacgggug

SEQ ID NO: 785473 - RNA, 22 nt, Human
ucugaaagaagggcagucuuuu

SEQ ID NO: 785474 - RNA, 22 nt, Human
cuucaugcugauauccucgaug

SEQ ID NO: 785475 - RNA, 22 nt, Human
gcccaggaagugacucagaugu

SEQ ID NO: 785476 - RNA, 22 nt, Human
aggcagcuaagauggauaauga

SEQ ID NO: 785477 - RNA, 22 nt, Human
aaaguauuugugauuuuuacca

SEQ ID NO: 785478 - RNA, 22 nt, Human
ucauuauuuuggacuggagugu

SEQ ID NO: 785479 - RNA, 22 nt, Human
aggguggcuggaggaaucagaa

SEQ ID NO: 785480 - RNA, 20 nt, Human
aggacagcagcugccacuug

SEQ ID NO: 785481 - RNA, 22 nt, Human
aaugcauauguaggcaagcagu

SEQ ID NO: 785482 - RNA, 22 nt, Human
cacaaauggccguguucaaaga

SEQ ID NO: 785483 - RNA, 22 nt, Human
uccauuuuagaagaaaauccac

SEQ ID NO: 785484 - RNA, 22 nt, Human
cuguaguugaugauuucugaua

SEQ ID NO: 785485 - RNA, 22 nt, Human
augaaacacacacgcgcauacu

SEQ ID NO: 785486 - RNA, 22 nt, Human
aacuagucagugauucucagaa

SEQ ID NO: 785487 - RNA, 22 nt, Human
ggccagcugggccaccaggugc

SEQ ID NO: 785488 - RNA, 22 nt, Human
cacccugggcugggccuguuaa

SEQ ID NO: 785489 - RNA, 22 nt, Human
ugcucuucggggccacugcuug

SEQ ID NO: 785490 - RNA, 22 nt, Human
gcuccuucaggugguagcuguu

SEQ ID NO: 785491 - RNA, 22 nt, Human
cccaagagcuucuaggacgcug

SEQ ID NO: 785492 - RNA, 22 nt, Human
aggaggcacucacucucagggu

SEQ ID NO: 785493 - RNA, 22 nt, Human
ugaggcagucacccccuccugc

SEQ ID NO: 785494 - RNA, 22 nt, Human
gggaagcaggugcagcucgccu

SEQ ID NO: 785495 - RNA, 22 nt, Human
gcccaguaguucaagguugcag

SEQ ID NO: 785496 - RNA, 21 nt, Human
gauuugcagaaacuagacagg

SEQ ID NO: 785497 - RNA, 22 nt, Human
aucugccugagucuagguuuuc

SEQ ID NO: 785498 - RNA, 22 nt, Human
ucucaggaauagaguggcagca

SEQ ID NO: 785499 - RNA, 22 nt, Human
uuugcacuagcauuuguccaug

SEQ ID NO: 785500 - RNA, 22 nt, Human
gcagaggauagcauaugaaccu

SEQ ID NO: 785501 - RNA, 22 nt, Human
uugcagcuuagugauguuaucu

SEQ ID NO: 785502 - RNA, 22 nt, Human
uuuucauuguuccucgagcauu

SEQ ID NO: 785503 - RNA, 22 nt, Human
uuuugaauaauucagaaacagc

SEQ ID NO: 785504 - RNA, 22 nt, Human
uucaacuaauguuuauuuuaug

SEQ ID NO: 785505 - RNA, 22 nt, Human
auguuauuaaaguacagauucu

SEQ ID NO: 785506 - RNA, 23 nt, Human
ugaguucucaucuuggcuucuau

SEQ ID NO: 785507 - RNA, 22 nt, Human
aggaugaggcuggcaggucuug

SEQ ID NO: 785508 - RNA, 23 nt, Human
uccaggagaaccccugucugucc

SEQ ID NO: 785509 - RNA, 22 nt, Human
uucaggauccccuugaugggcu

SEQ ID NO: 785510 - RNA, 22 nt, Human
uuuuuggguccaggcuguaucu

SEQ ID NO: 785511 - RNA, 22 nt, Human
aaggcagcaugaaucccuguac

SEQ ID NO: 785512 - RNA, 22 nt, Human
aggcagcuucugauuagcagcg

SEQ ID NO: 785513 - RNA, 22 nt, Human
agggaagcccuggcugagaccc

SEQ ID NO: 785514 - RNA, 22 nt, Human
aaauauaguaaaugcauaguuc

SEQ ID NO: 785515 - RNA, 22 nt, Human
aggcagcucuguggccucccag

SEQ ID NO: 785516 - RNA, 22 nt, Human
uuauuauuggugaguuaaggaa

SEQ ID NO: 785517 - RNA, 22 nt, Human
uggaaugacagagagucugaau

SEQ ID NO: 785518 - RNA, 22 nt, Human
gaggagagggcugcgggcccac

SEQ ID NO: 785519 - RNA, 22 nt, Human
gucuucuguaagaugagguccc

SEQ ID NO: 785520 - RNA, 22 nt, Human
agugagaguauuaaugugaacu

SEQ ID NO: 785521 - RNA, 22 nt, Human
uugauuaaacaggcauauucaa

SEQ ID NO: 785522 - RNA, 22 nt, Human
uacaguaagaugaaauagcaau

SEQ ID NO: 785523 - RNA, 22 nt, Human
cccaggagauggagguugcagu

SEQ ID NO: 785524 - RNA, 22 nt, Human
gagucuuugguaaagucugcug

SEQ ID NO: 785525 - RNA, 18 nt, Human
ucaggagacacagacgca

SEQ ID NO: 785526 - RNA, 22 nt, Human
cuucagagugcagaagauuggg

SEQ ID NO: 785527 - RNA, 21 nt, Human
aucacauuggcuguuauuauu

SEQ ID NO: 785528 - RNA, 22 nt, Human
augcuuccaaggcuaagacaag

SEQ ID NO: 785529 - RNA, 22 nt, Human
aguggcagagugcacucaggca

SEQ ID NO: 785530 - RNA, 22 nt, Human
gaggccaggaagcccaagauca

SEQ ID NO: 785531 - RNA, 22 nt, Human
agaggcagcagucauacuacag

SEQ ID NO: 785532 - RNA, 22 nt, Human
uaucuguuccaggcacucagcu

SEQ ID NO: 785533 - RNA, 22 nt, Human
caacauuucaaggucuuuagga

SEQ ID NO: 785534 - RNA, 21 nt, Human
acucaggagacuaacuauguc

SEQ ID NO: 785535 - RNA, 22 nt, Human
gaucauuuugaugcccuuuuag

SEQ ID NO: 785536 - RNA, 22 nt, Human
uucuucuuucccccugugguac

SEQ ID NO: 785537 - RNA, 22 nt, Human
caaugugguggcagaugucagu

SEQ ID NO: 785538 - RNA, 22 nt, Human
ucucagucagccuugauguccc

SEQ ID NO: 785539 - RNA, 22 nt, Human
cagugcugggcagaggagagcg

SEQ ID NO: 785540 - RNA, 22 nt, Human
uguccauggauagagcugcucg

SEQ ID NO: 785541 - RNA, 22 nt, Human
aggcacagagaaugcccuccau

SEQ ID NO: 785542 - RNA, 22 nt, Human
aauguauuccucaugcaagagu

SEQ ID NO: 785543 - RNA, 22 nt, Human
caaggccagagccagcgauaag

SEQ ID NO: 785544 - RNA, 22 nt, Human
ucagagagugcaaaauauagcu

SEQ ID NO: 785545 - RNA, 22 nt, Human
aaaggaagaugccaggacucug

SEQ ID NO: 785546 - RNA, 22 nt, Human
ucauuuguucaucugcucuucu

SEQ ID NO: 785547 - RNA, 22 nt, Human
agaggcggagguugcagugagc

SEQ ID NO: 785548 - RNA, 23 nt, Human
auucuucauuaucuucuagaaaa

SEQ ID NO: 785549 - RNA, 22 nt, Human
uggaguuccuuugaaaggcucu

SEQ ID NO: 785550 - RNA, 22 nt, Human
aggccagaaaugucagggagug

SEQ ID NO: 785551 - RNA, 22 nt, Human
uugcauuugacaaauuauuuaa

SEQ ID NO: 785552 - RNA, 22 nt, Human
cccauugugguuguugaggaua

SEQ ID NO: 785553 - RNA, 19 nt, Human
agcuuccauauucucuagu

SEQ ID NO: 785554 - RNA, 19 nt, Human
ugugaaagcuaguguucuu

SEQ ID NO: 785555 - RNA, 21 nt, Human
acagcauguuuguguguuugc

SEQ ID NO: 785556 - RNA, 22 nt, Human
aaaauauuuuagggccaggaga

SEQ ID NO: 785557 - RNA, 22 nt, Human
gcugcccaggagagguggggcu

SEQ ID NO: 785558 - RNA, 22 nt, Human
gaggcagugcauugucuagggg

SEQ ID NO: 785559 - RNA, 22 nt, Human
acuggcagagacccugauggcc

SEQ ID NO: 785560 - RNA, 22 nt, Human
cugcagagcaaguaacauccuc

SEQ ID NO: 785561 - RNA, 22 nt, Human
ugcccaggauugugaggucagg

SEQ ID NO: 785562 - RNA, 22 nt, Human
cugcugagaaaagacugaggga

SEQ ID NO: 785563 - RNA, 22 nt, Human
uucaauucaauucuaaauauau

SEQ ID NO: 785564 - RNA, 22 nt, Human
auuguucaaagugcuuugcaug

SEQ ID NO: 785565 - RNA, 22 nt, Human
ggcaggcugggugucauggagu

SEQ ID NO: 785566 - RNA, 22 nt, Human
uauuuccaggccccacucuaga

SEQ ID NO: 785567 - RNA, 22 nt, Human
cuuaacauccugcauuuuucuu

SEQ ID NO: 785568 - RNA, 22 nt, Human
gucaggaucaaauugaaguuau

SEQ ID NO: 785569 - RNA, 22 nt, Human
uuuggaauauuaaaaugucuca

SEQ ID NO: 785570 - RNA, 22 nt, Human
agagggauaauauguauuguaa

SEQ ID NO: 785571 - RNA, 22 nt, Human
ucuucagacuccaaauguuuua

SEQ ID NO: 785572 - RNA, 22 nt, Human
aaugauuuccccuacacagaag

SEQ ID NO: 785573 - RNA, 20 nt, Human
ucaggaugugcugagugaag

SEQ ID NO: 785574 - RNA, 22 nt, Human
uuggaaagcaagcuggacauac

SEQ ID NO: 785575 - RNA, 21 nt, Human
ucauuugugaucugauuucca

SEQ ID NO: 785576 - RNA, 22 nt, Human
auuuucaucauggguuuaacau

SEQ ID NO: 785577 - RNA, 21 nt, Human
uucuucaguuuaauauaaaau

SEQ ID NO: 785578 - RNA, 22 nt, Human
cagggagggaggaaaauuugcu

SEQ ID NO: 785579 - RNA, 22 nt, Human
uauuuucuguggaggaccagau

SEQ ID NO: 785580 - RNA, 22 nt, Human
acagugacguuuauuugagacg

SEQ ID NO: 785581 - RNA, 22 nt, Human
aggcaggcuggucugaagagug

SEQ ID NO: 785582 - RNA, 22 nt, Human
agucuugcauuuucugaagaug

SEQ ID NO: 785583 - RNA, 22 nt, Human
aucaggauccaccuugagccug

SEQ ID NO: 785584 - RNA, 22 nt, Human
ugagaacugaggauuugaauuc

SEQ ID NO: 785585 - RNA, 22 nt, Human
uagaagcaguaauagaaauagg

SEQ ID NO: 785586 - RNA, 22 nt, Human
uuuucaguaaugucuacauaau

SEQ ID NO: 785587 - RNA, 22 nt, Human
cuuacagagaagaaaauguagu

SEQ ID NO: 785588 - RNA, 22 nt, Human
auucuucaccauggauaauuug

SEQ ID NO: 785589 - RNA, 22 nt, Human
uuuauuguuaucaugggugagu

SEQ ID NO: 785590 - RNA, 22 nt, Human
agaaaugaagcaggaguuauua

SEQ ID NO: 785591 - RNA, 22 nt, Human
auagcuguuagauuggggucga

SEQ ID NO: 785592 - RNA, 22 nt, Human
auucuucauuguugauucaugu

SEQ ID NO: 785593 - RNA, 22 nt, Human
uccaugaggcagggaggcuggc

SEQ ID NO: 785594 - RNA, 22 nt, Human
agggggugucucugauuggguu

SEQ ID NO: 785595 - RNA, 22 nt, Human
ucacaguaucacacaaggauua

SEQ ID NO: 785596 - RNA, 22 nt, Human
gaggaaccaaaucagcuugcac

SEQ ID NO: 785597 - RNA, 22 nt, Human
ccaggagaauaauggcagauua

SEQ ID NO: 785598 - RNA, 22 nt, Human
auaagcauguuagaauauuuga

SEQ ID NO: 785599 - RNA, 22 nt, Human
gcuuugaagucugugucuuuug

SEQ ID NO: 785600 - RNA, 22 nt, Human
auucacaaaaugauauagauac

SEQ ID NO: 785601 - RNA, 22 nt, Human
agaggacagguuuuccaugggc

SEQ ID NO: 785602 - RNA, 22 nt, Human
guucuucaucuuaaccaucugu

SEQ ID NO: 785603 - RNA, 22 nt, Human
aucaggaugacaacugcugggu

SEQ ID NO: 785604 - RNA, 20 nt, Human
cugagagucugugcuuaguc

SEQ ID NO: 785605 - RNA, 22 nt, Human
gaggcagcaugguaccuuggag

SEQ ID NO: 785606 - RNA, 22 nt, Human
ucuaaagaagaggguucugcgg

SEQ ID NO: 785607 - RNA, 22 nt, Human
caguuuuugccauuaagaguaa

SEQ ID NO: 785608 - RNA, 22 nt, Human
acccaggauaaucuguguaucu

SEQ ID NO: 785609 - RNA, 22 nt, Human
uucuucuucauuucugacgaug

SEQ ID NO: 785610 - RNA, 22 nt, Human
uuuguaaauagcaguacucaug

SEQ ID NO: 785611 - RNA, 22 nt, Human
gcuucccagcagaggaaagacu

SEQ ID NO: 785612 - RNA, 22 nt, Human
gcccaggacucagggugucgcg

SEQ ID NO: 785613 - RNA, 22 nt, Human
cagcaggauaugguggagagag

SEQ ID NO: 785614 - RNA, 22 nt, Human
uugcaucuagggcaacccagag

SEQ ID NO: 785615 - RNA, 22 nt, Human
uccaggagguagugcuuaauuu

SEQ ID NO: 785616 - RNA, 22 nt, Human
agaggcaguauacaauccgagc

SEQ ID NO: 785617 - RNA, 21 nt, Human
uccaggaguggcugggcaggg

SEQ ID NO: 785618 - RNA, 22 nt, Human
uucuucaguuugguaaauguaa

SEQ ID NO: 785619 - RNA, 22 nt, Human
ggcagcuucuuaauauggagac

SEQ ID NO: 785620 - RNA, 22 nt, Human
cuuugaagagauuacugugcuc

SEQ ID NO: 785621 - RNA, 22 nt, Human
gagaggaguagacacuuugguu

SEQ ID NO: 785622 - RNA, 22 nt, Human
uuugaaagagcugauacaugaa

SEQ ID NO: 785623 - RNA, 22 nt, Human
auucuucacaaauauauagaag

SEQ ID NO: 785624 - RNA, 20 nt, Human
caggagggacauuucagcau

SEQ ID NO: 785625 - RNA, 22 nt, Human
ccuugcguuuuacagcuucuag

SEQ ID NO: 785626 - RNA, 22 nt, Human
cucaugucuucacccauucuaa

SEQ ID NO: 785627 - RNA, 22 nt, Human
gacagcuguggagaggcaugug

SEQ ID NO: 785628 - RNA, 20 nt, Human
augcuuucuugugugcugcu

SEQ ID NO: 785629 - RNA, 22 nt, Human
uuauucuuuaaacauauauguu

SEQ ID NO: 785630 - RNA, 22 nt, Human
cugccaggcagcagagggagaa

SEQ ID NO: 785631 - RNA, 22 nt, Human
uuucaguuuuugcucgauguau

SEQ ID NO: 785632 - RNA, 22 nt, Human
ugcauggacucaucagacaaga

SEQ ID NO: 785633 - RNA, 22 nt, Human
cucaggauugugccuagggaga

SEQ ID NO: 785634 - RNA, 22 nt, Human
auacaacagaaaaugauuauuc

SEQ ID NO: 785635 - RNA, 22 nt, Human
ucccaggacaugggcucugcuc

SEQ ID NO: 785636 - RNA, 22 nt, Human
ugcccaggguuucuaagagcag

SEQ ID NO: 785637 - RNA, 22 nt, Human
ggaagaggcugagccagguccc

SEQ ID NO: 785638 - RNA, 19 nt, Human
uuugaaaggauuguuauuu

SEQ ID NO: 785639 - RNA, 19 nt, Human
uuucuuaggccuuuggccu

SEQ ID NO: 785640 - RNA, 22 nt, Human
cagcgucucguugugggccucg

SEQ ID NO: 785641 - RNA, 20 nt, Human
uuucacagucccuguuuccu

SEQ ID NO: 785642 - RNA, 22 nt, Human
gggagggguugcauguuugagu

SEQ ID NO: 785643 - RNA, 22 nt, Human
gagagcuggguucaaguagcug

SEQ ID NO: 785644 - RNA, 22 nt, Human
gccucugcccuccugggacugc

SEQ ID NO: 785645 - RNA, 22 nt, Human
cugcugugaguuuggaggucua

SEQ ID NO: 785646 - RNA, 22 nt, Human
ccaugagcuuccuauauagggu

SEQ ID NO: 785647 - RNA, 22 nt, Human
ggaggacacuggcucugccuuc

SEQ ID NO: 785648 - RNA, 22 nt, Human
gcauguguugguuuaugcaugu

SEQ ID NO: 785649 - RNA, 19 nt, Human
guugaaaguaggugagggu

SEQ ID NO: 785650 - RNA, 17 nt, Human
gcugacccuggagaagu

SEQ ID NO: 785651 - RNA, 22 nt, Human
uuugaaagccuggcuuuucucu

SEQ ID NO: 785652 - RNA, 22 nt, Human
ucuucagauggccaguuguccc

SEQ ID NO: 785653 - RNA, 22 nt, Human
ugaggcaggaguucaggcugcg

SEQ ID NO: 785654 - RNA, 22 nt, Human
uaucuguuguaguacagaugau

SEQ ID NO: 785655 - RNA, 22 nt, Human
uggggcucaccuaggcuggaag

SEQ ID NO: 785656 - RNA, 22 nt, Human
gucaggauuggggucaugaguc

SEQ ID NO: 785657 - RNA, 22 nt, Human
ugauuuccccagucuugcugcu

SEQ ID NO: 785658 - RNA, 22 nt, Human
cugagagugcucuuugauguca

SEQ ID NO: 785659 - RNA, 22 nt, Human
ccaaaugugccuguuucaacaa

SEQ ID NO: 785660 - RNA, 20 nt, Human
cccaggaguuugcucuuacu

SEQ ID NO: 785661 - RNA, 22 nt, Human
gauuucuugauaauucaaaucc

SEQ ID NO: 785662 - RNA, 21 nt, Human
aggcagcucaggcccagagag

SEQ ID NO: 785663 - RNA, 23 nt, Human
cccauuuucauguuaacuccugg

SEQ ID NO: 785664 - RNA, 22 nt, Human
ccauccuaucugaccuacuugu

SEQ ID NO: 785665 - RNA, 22 nt, Human
aggucagcaggccaggggcgaa

SEQ ID NO: 785666 - RNA, 22 nt, Human
cggcagcugauugcagagcacc

SEQ ID NO: 785667 - RNA, 22 nt, Human
ucuacagacagagcagguggga

SEQ ID NO: 785668 - RNA, 22 nt, Human
ugcauguguguguauuuauaaa

SEQ ID NO: 785669 - RNA, 22 nt, Human
auuauuauauagggaaaguccc

SEQ ID NO: 785670 - RNA, 22 nt, Human
uuagccauuaauguccugugca

SEQ ID NO: 785671 - RNA, 22 nt, Human
agagagagggaaacugcuaaac

SEQ ID NO: 785672 - RNA, 22 nt, Human
cccaggaagaaauucugauuug

SEQ ID NO: 785673 - RNA, 22 nt, Human
auuauuauuguugauguuaggg

SEQ ID NO: 785674 - RNA, 22 nt, Human
aagacaauuugauacuaguugc

SEQ ID NO: 785675 - RNA, 22 nt, Human
cuuuggcaaugucauuuucaau

SEQ ID NO: 785676 - RNA, 22 nt, Human
aucaggauuacacggggaugcu

SEQ ID NO: 785677 - RNA, 22 nt, Human
cugcccaggcugaaggaacauc

SEQ ID NO: 785678 - RNA, 22 nt, Human
uuuuaucuaccuaugcucauuu

SEQ ID NO: 785679 - RNA, 21 nt, Human
ucucugguuggaguugugcca

SEQ ID NO: 785680 - RNA, 17 nt, Human
caggcagacauguaagc

SEQ ID NO: 785681 - RNA, 22 nt, Human
ucucaggagccacagcgggagu

SEQ ID NO: 785682 - RNA, 17 nt, Human
caagagagaugacugga

SEQ ID NO: 785683 - RNA, 22 nt, Human
auuucaaggcuauuaauauaaa

SEQ ID NO: 785684 - RNA, 22 nt, Human
gcauugaguccacucugucuuu

SEQ ID NO: 785685 - RNA, 22 nt, Human
cgcagggauuucaaggggccuu

SEQ ID NO: 785686 - RNA, 22 nt, Human
gaccauuuuuacagagcauuca

SEQ ID NO: 785687 - RNA, 22 nt, Human
aaaggccagguuggcugguauu

SEQ ID NO: 785688 - RNA, 22 nt, Human
cccaaggacacgggcagggaca

SEQ ID NO: 785689 - RNA, 22 nt, Human
auugaaagcauggauuuggauu

SEQ ID NO: 785690 - RNA, 22 nt, Human
uucaguaaaacacugcaauguc

SEQ ID NO: 785691 - RNA, 22 nt, Human
ucuucuuccucauuuauacaua

SEQ ID NO: 785692 - RNA, 22 nt, Human
cuuaaaaucuggcaguuagcua

SEQ ID NO: 785693 - RNA, 22 nt, Human
agauggaguuaguaccagaguc

SEQ ID NO: 785694 - RNA, 23 nt, Human
uugcuuucaucaugagaugcucc

SEQ ID NO: 785695 - RNA, 23 nt, Human
cuugcagggcuggaggcuuagaa

SEQ ID NO: 785696 - RNA, 22 nt, Human
ucauuguuauguuuugcugucu

SEQ ID NO: 785697 - RNA, 22 nt, Human
aguuauuacucuuuaacauauu

SEQ ID NO: 785698 - RNA, 22 nt, Human
caaggccaagucucugugaaga

SEQ ID NO: 785699 - RNA, 22 nt, Human
gcagaggcuguagggaagguug

SEQ ID NO: 785700 - RNA, 22 nt, Human
auucuucagcaggggacacuau

SEQ ID NO: 785701 - RNA, 22 nt, Human
ggaggaggggugacugaaugcu

SEQ ID NO: 785702 - RNA, 19 nt, Human
uggcaucuguaaaauggug

SEQ ID NO: 785703 - RNA, 22 nt, Human
uucauugugauucuuggcuagc

SEQ ID NO: 785704 - RNA, 22 nt, Human
ucuucacaugaccuucaugucu

SEQ ID NO: 785705 - RNA, 22 nt, Human
ggccagcucuuguccacggagg

SEQ ID NO: 785706 - RNA, 21 nt, Human
cucaaagaccaaaaguguaga

SEQ ID NO: 785707 - RNA, 17 nt, Human
uuucaucugggaccacc

SEQ ID NO: 785708 - RNA, 22 nt, Human
accaggaggcuacacuguccca

SEQ ID NO: 785709 - RNA, 22 nt, Human
gauuucuugauaaguaguguga

SEQ ID NO: 785710 - RNA, 22 nt, Human
acauuuaaccaaacuguuuaau

SEQ ID NO: 785711 - RNA, 22 nt, Human
ucacacagauugguagagcuga

SEQ ID NO: 785712 - RNA, 17 nt, Human
cagcucugcaucuuccu

SEQ ID NO: 785713 - RNA, 22 nt, Human
gauuucuuuaugaaguacagaa

SEQ ID NO: 785714 - RNA, 22 nt, Human
aggguccugggugcaguugcuu

SEQ ID NO: 785715 - RNA, 22 nt, Human
aucugccuccaaguccaugugu

SEQ ID NO: 785716 - RNA, 22 nt, Human
agugcuuuagagaaauggugcu

SEQ ID NO: 785717 - RNA, 22 nt, Human
cacugagcugauagaauuccag

SEQ ID NO: 785718 - RNA, 20 nt, Human
ucucagcauaagaacccuuc

SEQ ID NO: 785719 - RNA, 22 nt, Human
auuaguaaaacauuguauaugu

SEQ ID NO: 785720 - RNA, 22 nt, Human
uugaaaggguuaaagugguaaa

SEQ ID NO: 785721 - RNA, 20 nt, Human
accaauguuagcuuaguacu

SEQ ID NO: 785722 - RNA, 22 nt, Human
ucucucuuuuuaaucauguaau

SEQ ID NO: 785723 - RNA, 22 nt, Human
ggaggggagucucccaaagccg

SEQ ID NO: 785724 - RNA, 22 nt, Human
gagaaaugcaugcaugucauca

SEQ ID NO: 785725 - RNA, 17 nt, Human
ucaggauguagcaguag

SEQ ID NO: 785726 - RNA, 22 nt, Human
gccaggagcaugucauuguuga

SEQ ID NO: 785727 - RNA, 22 nt, Human
ucauuucuccgaccugcugucc

SEQ ID NO: 785728 - RNA, 22 nt, Human
uggaaauggaucugaugagucu

SEQ ID NO: 785729 - RNA, 22 nt, Human
ccaggagaagcaucugagugua

SEQ ID NO: 785730 - RNA, 22 nt, Human
cagggagggacaauugucaccu

SEQ ID NO: 785731 - RNA, 22 nt, Human
aucaggaucugggagccugaaa

SEQ ID NO: 785732 - RNA, 22 nt, Human
gcccaggaguuggaggcugcag

SEQ ID NO: 785733 - RNA, 22 nt, Human
agugcuuucccugaaaccuucc

SEQ ID NO: 785734 - RNA, 22 nt, Human
uuugacaucuaagaauucuuac

SEQ ID NO: 785735 - RNA, 22 nt, Human
auuuugaugcuaucuaaugaau

SEQ ID NO: 785736 - RNA, 22 nt, Human
uccaggagggguaggcaguaug

SEQ ID NO: 785737 - RNA, 22 nt, Human
cuacccagauccaggauggcua

SEQ ID NO: 785738 - RNA, 22 nt, Human
cagcagagggagccauugaaau

SEQ ID NO: 785739 - RNA, 22 nt, Human
gcugccagccaacuugcugugc

SEQ ID NO: 785740 - RNA, 22 nt, Human
auauucuuccaaaacaucauuu

SEQ ID NO: 785741 - RNA, 20 nt, Human
cugcugugguccuuuauuuu

SEQ ID NO: 785742 - RNA, 22 nt, Human
aaaggaagauugagcuuuucca

SEQ ID NO: 785743 - RNA, 22 nt, Human
cuuuggcacagucucauuugau

SEQ ID NO: 785744 - RNA, 22 nt, Human
ggaggagguggguuaaguugua

SEQ ID NO: 785745 - RNA, 22 nt, Human
gagggagucugugcaaagaauu

SEQ ID NO: 785746 - RNA, 23 nt, Human
uuucaacuccugccauuauuucu

SEQ ID NO: 785747 - RNA, 22 nt, Human
gcaggaagcauagaagaaugcc

SEQ ID NO: 785748 - RNA, 22 nt, Human
aucuuucuauuucuaaaaacua

SEQ ID NO: 785749 - RNA, 20 nt, Human
cagaggcauuuucagacucu

SEQ ID NO: 785750 - RNA, 22 nt, Human
acuuugcagggcuugauaucca

SEQ ID NO: 785751 - RNA, 22 nt, Human
ucuccucucuuaccugguacaa

SEQ ID NO: 785752 - RNA, 22 nt, Human
cacucaggcugugucaggagga

SEQ ID NO: 785753 - RNA, 22 nt, Human
gagagcuguuuaucuucuucaa

SEQ ID NO: 785754 - RNA, 22 nt, Human
ugcugcuguauccuuaguguca

SEQ ID NO: 785755 - RNA, 20 nt, Human
ucuggcaggugaacgagcug

SEQ ID NO: 785756 - RNA, 22 nt, Human
ucagugugaguaccaugcucag

SEQ ID NO: 785757 - RNA, 22 nt, Human
aggcuagcuuuggcucaguaaa

SEQ ID NO: 785758 - RNA, 22 nt, Human
caaauagugucacauugugagg

SEQ ID NO: 785759 - RNA, 22 nt, Human
uugacacagaucaauauucaac

SEQ ID NO: 785760 - RNA, 22 nt, Human
gaucauuuacuuguucuggacu

SEQ ID NO: 785761 - RNA, 22 nt, Human
cccaggaaacccgaaggcgacc

SEQ ID NO: 785762 - RNA, 22 nt, Human
auccaugaagguacuucucagg

SEQ ID NO: 785763 - RNA, 22 nt, Human
cuguuucaagugaagucagaca

SEQ ID NO: 785764 - RNA, 22 nt, Human
cugagcugggaguagagacucu

SEQ ID NO: 785765 - RNA, 22 nt, Human
cuugcugggguaagucugugcu

SEQ ID NO: 785766 - RNA, 22 nt, Human
acaaaugucuccucuuuuguua

SEQ ID NO: 785767 - RNA, 20 nt, Human
aggcaccugucacaggugag

SEQ ID NO: 785768 - RNA, 22 nt, Human
aaagccauugaacuguacuuua

SEQ ID NO: 785769 - RNA, 20 nt, Human
aggaggggauagaaucaaag

SEQ ID NO: 785770 - RNA, 22 nt, Human
gaggcugcuguuagcccugggc

SEQ ID NO: 785771 - RNA, 22 nt, Human
gugaaggacuagcauggagggc

SEQ ID NO: 785772 - RNA, 22 nt, Human
gcaugucaugucauguaggaau

SEQ ID NO: 785773 - RNA, 22 nt, Human
ucugaaaugcaaauuugacuga

SEQ ID NO: 785774 - RNA, 22 nt, Human
uuucaaaauuuugcagugguaa

SEQ ID NO: 785775 - RNA, 22 nt, Human
uucuaugccauguucagcuacu

SEQ ID NO: 785776 - RNA, 22 nt, Human
uuugaaagggaaauaaacuccu

SEQ ID NO: 785777 - RNA, 22 nt, Human
auugaaagguuuugagcagaua

SEQ ID NO: 785778 - RNA, 22 nt, Human
ggugaaggucagagcaggaaaa

SEQ ID NO: 785779 - RNA, 22 nt, Human
uuuggaauuggaaagugcugug

SEQ ID NO: 785780 - RNA, 19 nt, Human
cauuuuaagcauccccagu

SEQ ID NO: 785781 - RNA, 22 nt, Human
auuuuacuuugugaauauugac

SEQ ID NO: 785782 - RNA, 22 nt, Human
gcaucuaauccaguccagcauc

SEQ ID NO: 785783 - RNA, 22 nt, Human
augcugugccuucucugugcca

SEQ ID NO: 785784 - RNA, 22 nt, Human
cccaggaggcagagauagcagu

SEQ ID NO: 785785 - RNA, 22 nt, Human
caggcagcauuuacucugauga

SEQ ID NO: 785786 - RNA, 22 nt, Human
uauaucaccaaaaacaguucug

SEQ ID NO: 785787 - RNA, 22 nt, Human
uggcagcuggaucccaaggcag

SEQ ID NO: 785788 - RNA, 22 nt, Human
cccuggaggucagaggccuggg

SEQ ID NO: 785789 - RNA, 22 nt, Human
augaggcaucugcagucacuag

SEQ ID NO: 785790 - RNA, 22 nt, Human
uugaauaguuuuggauagcaua

SEQ ID NO: 785791 - RNA, 21 nt, Human
agccuguugguuuacugcuca

SEQ ID NO: 785792 - RNA, 22 nt, Human
uagcacaucuggcgcuuauagg

SEQ ID NO: 785793 - RNA, 22 nt, Human
uccaggagguuuggaggaagca

SEQ ID NO: 785794 - RNA, 22 nt, Human
aggcugcugccuuggagagugu

SEQ ID NO: 785795 - RNA, 21 nt, Human
cugcuguggcccccgacaugc

SEQ ID NO: 785796 - RNA, 22 nt, Human
gaggccaaucaauagggcaaua

SEQ ID NO: 785797 - RNA, 22 nt, Human
gccucugcaauuacauugugcc

SEQ ID NO: 785798 - RNA, 22 nt, Human
uccaggagaccagauguaggcc

SEQ ID NO: 785799 - RNA, 22 nt, Human
uugcaggauuuuagagaugaca

SEQ ID NO: 785800 - RNA, 22 nt, Human
aaguuugcauagauuaagcauu

SEQ ID NO: 785801 - RNA, 23 nt, Human
cccaggagccugaguccucucug

SEQ ID NO: 785802 - RNA, 22 nt, Human
ggggcagcuaccggaaguaggg

SEQ ID NO: 785803 - RNA, 22 nt, Human
aaggagaguacaggaguuggua

SEQ ID NO: 785804 - RNA, 22 nt, Human
uaaacauuuguuauucuuguuu

SEQ ID NO: 785805 - RNA, 22 nt, Human
agggagcucaguuggaagcggu

SEQ ID NO: 785806 - RNA, 22 nt, Human
aacaguaaagacagaauuuauc

SEQ ID NO: 785807 - RNA, 21 nt, Human
auaagcaugcugauuacauuu

SEQ ID NO: 785808 - RNA, 22 nt, Human
ucugcaggaggcuggcugcagg

SEQ ID NO: 785809 - RNA, 22 nt, Human
uagugcuugagucucuccguac

SEQ ID NO: 785810 - RNA, 22 nt, Human
uuuggacuuagccugcagaauu

SEQ ID NO: 785811 - RNA, 22 nt, Human
uauuuguugaguuguuaugucu

SEQ ID NO: 785812 - RNA, 22 nt, Human
caggagaaauguggcugcuacc

SEQ ID NO: 785813 - RNA, 18 nt, Human
ggucuuuaggucaguguc

SEQ ID NO: 785814 - RNA, 20 nt, Human
gggugggagagucugagggu

SEQ ID NO: 785815 - RNA, 22 nt, Human
aggaagcugccugggaugggaa

SEQ ID NO: 785816 - RNA, 22 nt, Human
caggaugguggcaugaucagaa

SEQ ID NO: 785817 - RNA, 22 nt, Human
uggcagcugugcuucauucuuu

SEQ ID NO: 785818 - RNA, 22 nt, Human
acccaggaggcaagguugcagu

SEQ ID NO: 785819 - RNA, 22 nt, Human
gugcugugugauccaugcuggc

SEQ ID NO: 785820 - RNA, 22 nt, Human
gggcagcucucacagcagccaa

SEQ ID NO: 785821 - RNA, 21 nt, Human
uggaggaauaaagcacagaag

SEQ ID NO: 785822 - RNA, 22 nt, Human
cuucugagcagaccuccugggg

SEQ ID NO: 785823 - RNA, 22 nt, Human
guuugcauuuauuagucuucug

SEQ ID NO: 785824 - RNA, 22 nt, Human
aaauuauucucauguguuucuu

SEQ ID NO: 785825 - RNA, 22 nt, Human
ggguggagcuuggacaccagua

SEQ ID NO: 785826 - RNA, 22 nt, Human
gcagcugagcgugaggaagagu

SEQ ID NO: 785827 - RNA, 22 nt, Human
cugcuuccauaaauaaugugcu

SEQ ID NO: 785828 - RNA, 22 nt, Human
gagagucuagugcaccuaguuu

SEQ ID NO: 785829 - RNA, 22 nt, Human
cccaggagguguagcugcgugg

SEQ ID NO: 785830 - RNA, 22 nt, Human
agugcuuuagcauccaacuguc

SEQ ID NO: 785831 - RNA, 22 nt, Human
caugucuguguacacaugcaca

SEQ ID NO: 785832 - RNA, 22 nt, Human
acccaggacuuggcaaccucau

SEQ ID NO: 785833 - RNA, 19 nt, Human
ucaucucacagggccuggc

SEQ ID NO: 785834 - RNA, 22 nt, Human
auuuucagagacaucuggacuu

SEQ ID NO: 785835 - RNA, 22 nt, Human
uacauaguauucacauuguuuu

SEQ ID NO: 785836 - RNA, 22 nt, Human
uuccaugaaagugaaauggagc

SEQ ID NO: 785837 - RNA, 22 nt, Human
agcuaccuggcuuaucacuguc

SEQ ID NO: 785838 - RNA, 22 nt, Human
cuuuccaagaaugcagauaccu

SEQ ID NO: 785839 - RNA, 22 nt, Human
ccaggagagcauugcacagagg

SEQ ID NO: 785840 - RNA, 22 nt, Human
uucacagaugccugaugugugg

SEQ ID NO: 785841 - RNA, 22 nt, Human
acuuaaaaagaaucuuuucacg

SEQ ID NO: 785842 - RNA, 22 nt, Human
accaggaggaaguguuaaugau

SEQ ID NO: 785843 - RNA, 22 nt, Human
aguguguccagaaaucuguauu

SEQ ID NO: 785844 - RNA, 19 nt, Human
ugagaggcuuaaggcagcu

SEQ ID NO: 785845 - RNA, 22 nt, Human
uauuuccaccuauuauuuucug

SEQ ID NO: 785846 - RNA, 22 nt, Human
aucuccaggcauuucaagagac

SEQ ID NO: 785847 - RNA, 22 nt, Human
uucuuucucaacaugaauguuu

SEQ ID NO: 785848 - RNA, 22 nt, Human
aagcagaggguauggccagguu

SEQ ID NO: 785849 - RNA, 22 nt, Human
aggagaggaaucauuauuacaa

SEQ ID NO: 785850 - RNA, 22 nt, Human
ugcuggaauaauuucauguuaa

SEQ ID NO: 785851 - RNA, 22 nt, Human
uuucacuagaacguucuuguuu

SEQ ID NO: 785852 - RNA, 22 nt, Human
gccaggaggcugcuguguaggc

SEQ ID NO: 785853 - RNA, 22 nt, Human
ggcagcuuucucacccaugacc

SEQ ID NO: 785854 - RNA, 22 nt, Human
aauuuuaaucaguggugcugag

SEQ ID NO: 785855 - RNA, 22 nt, Human
uuagccauuaaauuacaaggug

SEQ ID NO: 785856 - RNA, 22 nt, Human
aggcagcuuaagcccuggccca

SEQ ID NO: 785857 - RNA, 22 nt, Human
uauaucauggagauuaacauuc

SEQ ID NO: 785858 - RNA, 22 nt, Human
uugcugaaaucuaugacauccu

SEQ ID NO: 785859 - RNA, 22 nt, Human
uagggcagaguccaggaugggc

SEQ ID NO: 785860 - RNA, 22 nt, Human
uccaggagugauaaggccacug

SEQ ID NO: 785861 - RNA, 22 nt, Human
uccaggagggauugggcugugg

SEQ ID NO: 785862 - RNA, 22 nt, Human
gaaaggcaguacagcugagccu

SEQ ID NO: 785863 - RNA, 22 nt, Human
gguggagcuggaccaggagagg

SEQ ID NO: 785864 - RNA, 18 nt, Human
ucauuuguuuugcaugaa

SEQ ID NO: 785865 - RNA, 19 nt, Human
ccauggagagagaugcauu

SEQ ID NO: 785866 - RNA, 22 nt, Human
uccaggaggcagggcugugccc

SEQ ID NO: 785867 - RNA, 22 nt, Human
gggagucugggcuagacuccuu

SEQ ID NO: 785868 - RNA, 21 nt, Human
ugaaaugagaaugcugagcac

SEQ ID NO: 785869 - RNA, 22 nt, Human
aauuuuaagcauaugacugguu

SEQ ID NO: 785870 - RNA, 22 nt, Human
ugaacaguuucaagaaaacuuu

SEQ ID NO: 785871 - RNA, 22 nt, Human
uucucuuugacauuauucaggu

SEQ ID NO: 785872 - RNA, 22 nt, Human
uucagcaagaccaccauguacc

SEQ ID NO: 785873 - RNA, 22 nt, Human
aaaggccauuacuugcuuuuag

SEQ ID NO: 785874 - RNA, 22 nt, Human
uucuccucuguuggccuucccu

SEQ ID NO: 785875 - RNA, 22 nt, Human
gcagcugcuggagggaggcagg

SEQ ID NO: 785876 - RNA, 22 nt, Human
agggugguucuuuuaguggaag

SEQ ID NO: 785877 - RNA, 22 nt, Human
uacugccuggagcauuggugcu

SEQ ID NO: 785878 - RNA, 22 nt, Human
uagggaugagccaguggguagu

SEQ ID NO: 785879 - RNA, 21 nt, Human
ggcagcguguggacaggaagg

SEQ ID NO: 785880 - RNA, 19 nt, Human
uccucagugacaaccucag

SEQ ID NO: 785881 - RNA, 22 nt, Human
uuugaaagcaggugugggaggg

SEQ ID NO: 785882 - RNA, 22 nt, Human
uguuuuaagagcgcacuuuaua

SEQ ID NO: 785883 - RNA, 22 nt, Human
acagugcuggcuacaacccugg

SEQ ID NO: 785884 - RNA, 22 nt, Human
uugcauuugagaaaguucuccu

SEQ ID NO: 785885 - RNA, 21 nt, Human
gacaggacuagaccagagcuc

SEQ ID NO: 785886 - RNA, 22 nt, Human
ugaggcaguauucuccauucca

SEQ ID NO: 785887 - RNA, 23 nt, Human
agaugagccaacaccuccaugcc

SEQ ID NO: 785888 - RNA, 22 nt, Human
ucauuuauaaggaugcaauuaa

SEQ ID NO: 785889 - RNA, 22 nt, Human
aggcacaguuucauccccgggc

SEQ ID NO: 785890 - RNA, 22 nt, Human
cugacccauauaagaguggagg

SEQ ID NO: 785891 - RNA, 22 nt, Human
guuauauauaguauuucucuga

SEQ ID NO: 785892 - RNA, 22 nt, Human
uuugaaaucuaaucaaggaaca

SEQ ID NO: 785893 - RNA, 22 nt, Human
cucugcauuuuaacagaugauu

SEQ ID NO: 785894 - RNA, 22 nt, Human
uagcuuuccuuguugccugugc

SEQ ID NO: 785895 - RNA, 22 nt, Human
agaggacaaaaugagaagugcu

SEQ ID NO: 785896 - RNA, 18 nt, Human
uaggagagaauuuauuua

SEQ ID NO: 785897 - RNA, 19 nt, Human
uuugcagugguuccuuugu

SEQ ID NO: 785898 - RNA, 22 nt, Human
aaggccagacaggaccacaucu

SEQ ID NO: 785899 - RNA, 22 nt, Human
gaaucucaaggcuugugaggau

SEQ ID NO: 785900 - RNA, 22 nt, Human
cuucaggauuuaggaagaugaa

SEQ ID NO: 785901 - RNA, 22 nt, Human
cugacuguaauucuguucuuaa

SEQ ID NO: 785902 - RNA, 22 nt, Human
ucugggaauuuauuggcacuuu

SEQ ID NO: 785903 - RNA, 22 nt, Human
ugcugcugaucauuuauagucu

SEQ ID NO: 785904 - RNA, 22 nt, Human
gaggccagaagugccucgggcu

SEQ ID NO: 785905 - RNA, 22 nt, Human
uuugaaaggagcuuuauccaga

SEQ ID NO: 785906 - RNA, 22 nt, Human
ggugagggaguggaacgaggug

SEQ ID NO: 785907 - RNA, 22 nt, Human
uugagaagaggcuuuguaggaa

SEQ ID NO: 785908 - RNA, 22 nt, Human
gcagaggagaugaagauacuuu

SEQ ID NO: 785909 - RNA, 22 nt, Human
agacaggagagggaacugccgg

SEQ ID NO: 785910 - RNA, 22 nt, Human
caggcagcugacugucagauau

SEQ ID NO: 785911 - RNA, 22 nt, Human
cuugcugugugguguucucaga

SEQ ID NO: 785912 - RNA, 22 nt, Human
cacaaugugguuugucaucuuu

SEQ ID NO: 785913 - RNA, 22 nt, Human
cagaagaggacuggguagcuca

SEQ ID NO: 785914 - RNA, 22 nt, Human
ugacccauggucugaucauagg

SEQ ID NO: 785915 - RNA, 22 nt, Human
gaucuucuauguaaugaagugu

SEQ ID NO: 785916 - RNA, 22 nt, Human
ucucuucucuagugagcaacug

SEQ ID NO: 785917 - RNA, 21 nt, Human
gaacauuuggguuguuucuac

SEQ ID NO: 785918 - RNA, 22 nt, Human
caaauacuggguaaguuaauuu

SEQ ID NO: 785919 - RNA, 22 nt, Human
uugaaggacauccuauuucuag

SEQ ID NO: 785920 - RNA, 19 nt, Human
ggcagcuggacgcuguuca

SEQ ID NO: 785921 - RNA, 22 nt, Human
cccaggaaaugaacuucugauu

SEQ ID NO: 785922 - RNA, 22 nt, Human
cuugaaguugcaaaacauuaau

SEQ ID NO: 785923 - RNA, 22 nt, Human
ucugcuguaaagaauuucugcc

SEQ ID NO: 785924 - RNA, 23 nt, Human
gggcaguuauguuguccuuggcu

SEQ ID NO: 785925 - RNA, 22 nt, Human
gggcacagaagucuaagacauc

SEQ ID NO: 785926 - RNA, 22 nt, Human
agugcuuugagcguuugaaaag

SEQ ID NO: 785927 - RNA, 22 nt, Human
aaggagagguuguccguguugu

SEQ ID NO: 785928 - RNA, 22 nt, Human
agcccaggcagagggaugcuug

SEQ ID NO: 785929 - RNA, 22 nt, Human
uuaacauacaucaugaacaaug

SEQ ID NO: 785930 - RNA, 22 nt, Human
aaggcagccgugugacugcaug

SEQ ID NO: 785931 - RNA, 22 nt, Human
uccauuuuagagaugaagaaac

SEQ ID NO: 785932 - RNA, 22 nt, Human
aggcaguuguagagagggcucu

SEQ ID NO: 785933 - RNA, 22 nt, Human
gauaaugaugacaaugacaacc

SEQ ID NO: 785934 - RNA, 22 nt, Human
uauuuucuggacagucuugcuu

SEQ ID NO: 785935 - RNA, 22 nt, Human
auguuucagauacagaucaaau

SEQ ID NO: 785936 - RNA, 22 nt, Human
agaccuggauuccaauccuacc

SEQ ID NO: 785937 - RNA, 22 nt, Human
ucaggagacauucuuaaaguag

SEQ ID NO: 785938 - RNA, 22 nt, Human
aacaucuacuaagugccaggca

SEQ ID NO: 785939 - RNA, 22 nt, Human
gaaggccauugcguccugggau

SEQ ID NO: 785940 - RNA, 22 nt, Human
gagagggagccagccaggaacc

SEQ ID NO: 785941 - RNA, 22 nt, Human
ccaggacagugaacauguaaga

SEQ ID NO: 785942 - RNA, 19 nt, Human
gugcuuuuuaagagcucag

SEQ ID NO: 785943 - RNA, 22 nt, Human
ggaggcaggaaagacagguuca

SEQ ID NO: 785944 - RNA, 22 nt, Human
auacaacuuuacaugcaauucc

SEQ ID NO: 785945 - RNA, 23 nt, Human
cugcugugaaacaugguuuuggu

SEQ ID NO: 785946 - RNA, 22 nt, Human
acacuaaugagaaaggaauuaa

SEQ ID NO: 785947 - RNA, 22 nt, Human
acaacauucuuaaauacacuga

SEQ ID NO: 785948 - RNA, 22 nt, Human
uggagaggagcaccauggccau

SEQ ID NO: 785949 - RNA, 22 nt, Human
gagagaaaugugcaguuugggc

SEQ ID NO: 785950 - RNA, 22 nt, Human
auguucuuguucaaaugucagu

SEQ ID NO: 785951 - RNA, 22 nt, Human
uaggcagcauggauucugaaua

SEQ ID NO: 785952 - RNA, 22 nt, Human
auugaggcagcauaguucaggg

SEQ ID NO: 785953 - RNA, 22 nt, Human
ucugaacuccagcccugcucuc

SEQ ID NO: 785954 - RNA, 22 nt, Human
cagugaaaucacaacuuuaguu

SEQ ID NO: 785955 - RNA, 22 nt, Human
ggccagcucugcacagcagcug

SEQ ID NO: 785956 - RNA, 22 nt, Human
cugaggaagacagcagcugugu

SEQ ID NO: 785957 - RNA, 22 nt, Human
uaaaacuuaacuauccagauua

SEQ ID NO: 785958 - RNA, 22 nt, Human
uaagcugugggagauuggcaua

SEQ ID NO: 785959 - RNA, 22 nt, Human
gaccauuugcuaguaaauugca

SEQ ID NO: 785960 - RNA, 23 nt, Human
ucagucuucccugucaguaauag

SEQ ID NO: 785961 - RNA, 22 nt, Human
aucaggauagugguuaccuggg

SEQ ID NO: 785962 - RNA, 19 nt, Human
uggcagggagaguuugaag

SEQ ID NO: 785963 - RNA, 22 nt, Human
auugcuaggaacagguugcacc

SEQ ID NO: 785964 - RNA, 22 nt, Human
uuccuuaggcuguuugcagugc

SEQ ID NO: 785965 - RNA, 22 nt, Human
gcaggagaacaaagcaagcugc

SEQ ID NO: 785966 - RNA, 22 nt, Human
uucaggauggaguaccuuuuau

SEQ ID NO: 785967 - RNA, 22 nt, Human
uuugaagucagacacugcuuug

SEQ ID NO: 785968 - RNA, 22 nt, Human
aucuuucagggccauuuguauu

SEQ ID NO: 785969 - RNA, 22 nt, Human
augacaguucuacacuuaaucu

SEQ ID NO: 785970 - RNA, 18 nt, Human
uugagggaggggcagagu

SEQ ID NO: 785971 - RNA, 22 nt, Human
ugcuuuggccacuagaauucag

SEQ ID NO: 785972 - RNA, 22 nt, Human
uccaggaguuugagacugcagu

SEQ ID NO: 785973 - RNA, 22 nt, Human
aggguagggccguagggccaug

SEQ ID NO: 785974 - RNA, 22 nt, Human
ucugcaggcuguacaggaagca

SEQ ID NO: 785975 - RNA, 22 nt, Human
aguucucaagacaauuaccugu

SEQ ID NO: 785976 - RNA, 22 nt, Human
ugaaagcacaaguucuaacagg

SEQ ID NO: 785977 - RNA, 22 nt, Human
aggcuagcaaugggagaugagu

SEQ ID NO: 785978 - RNA, 21 nt, Human
ucuuccuccacagcgugccac

SEQ ID NO: 785979 - RNA, 22 nt, Human
ucucaggaaauaggauuugagu

SEQ ID NO: 785980 - RNA, 22 nt, Human
cccauucauccucgcuuccuuc

SEQ ID NO: 785981 - RNA, 22 nt, Human
ccagggaguuuccaaucugaga

SEQ ID NO: 785982 - RNA, 22 nt, Human
acaggacuguggaaggaucucu

SEQ ID NO: 785983 - RNA, 18 nt, Human
aauuuccauaugaauugc

SEQ ID NO: 785984 - RNA, 22 nt, Human
auugaaagaguuuucugcugca

SEQ ID NO: 785985 - RNA, 22 nt, Human
ucaggauguccaaaauccagcc

SEQ ID NO: 785986 - RNA, 22 nt, Human
agagggagugaaauggaauaga

SEQ ID NO: 785987 - RNA, 22 nt, Human
gcucaggaucccaggggugugc

SEQ ID NO: 785988 - RNA, 21 nt, Human
uccaggagcacgggacuagga

SEQ ID NO: 785989 - RNA, 22 nt, Human
cuauuacauuucuggacauuca

SEQ ID NO: 785990 - RNA, 22 nt, Human
aauuuguuaaaagugagugaca

SEQ ID NO: 785991 - RNA, 21 nt, Human
gcugcaucaaucuacccaggg

SEQ ID NO: 785992 - RNA, 22 nt, Human
agacagugcaagaagagcaggc

SEQ ID NO: 785993 - RNA, 22 nt, Human
auugaaagagaauguagcucuu

SEQ ID NO: 785994 - RNA, 22 nt, Human
guucuugccagcauccucaggu

SEQ ID NO: 785995 - RNA, 22 nt, Human
gcuguguuugacaguagcagac

SEQ ID NO: 785996 - RNA, 22 nt, Human
agcccagguucuaaagccaaac

SEQ ID NO: 785997 - RNA, 22 nt, Human
uccaggagguaugaguggcccc

SEQ ID NO: 785998 - RNA, 22 nt, Human
uuucaguguaucuuccaaaagc

SEQ ID NO: 785999 - RNA, 22 nt, Human
aguggcagagguugacugcagu

SEQ ID NO: 786000 - RNA, 22 nt, Human
cugcuuuggacaacuauucuug

SEQ ID NO: 786001 - RNA, 22 nt, Human
aggcagcagucaugaggaaaga

SEQ ID NO: 786002 - RNA, 22 nt, Human
ugaaucaguauaaauucucaaa

SEQ ID NO: 786003 - RNA, 22 nt, Human
gggcagcuggauaguuuuaaau

SEQ ID NO: 786004 - RNA, 22 nt, Human
uguuugaacugaauaacauagu

SEQ ID NO: 786005 - RNA, 22 nt, Human
ugaggggaaggcaugauaaaua

SEQ ID NO: 786006 - RNA, 22 nt, Human
guuguuuuuguucucuauagcu

SEQ ID NO: 786007 - RNA, 22 nt, Human
uacaaaguaauguauaauaucg

SEQ ID NO: 786008 - RNA, 23 nt, Human
aggauguaggauguauggcagag

SEQ ID NO: 786009 - RNA, 23 nt, Human
ugaaggccuggaggacgcguugu

SEQ ID NO: 786010 - RNA, 22 nt, Human
caggcagcugcuggguucagcc

SEQ ID NO: 786011 - RNA, 22 nt, Human
uccaggagacacccuugugugu

SEQ ID NO: 786012 - RNA, 17 nt, Human
cagacaggcugucaccc

SEQ ID NO: 786013 - RNA, 22 nt, Human
aggcagaucacuugaggccagg

SEQ ID NO: 786014 - RNA, 19 nt, Human
agauggcaaaaugcaaaga

SEQ ID NO: 786015 - RNA, 22 nt, Human
acaauucugaugguuucccagu

SEQ ID NO: 786016 - RNA, 22 nt, Human
augcagcuucaggauuaugaug

SEQ ID NO: 786017 - RNA, 20 nt, Human
aggaagcugagauguagagg

SEQ ID NO: 786018 - RNA, 22 nt, Human
gaagcagcugccagagaugucu

SEQ ID NO: 786019 - RNA, 22 nt, Human
aggcagcuggcagcacccaggg

SEQ ID NO: 786020 - RNA, 22 nt, Human
cuuugcaauagaggcacacaug

SEQ ID NO: 786021 - RNA, 22 nt, Human
uuugcaaauaccaugaaacuug

SEQ ID NO: 786022 - RNA, 22 nt, Human
gucaggaugacaagugcuuuca

SEQ ID NO: 786023 - RNA, 22 nt, Human
auggagggugucagagagcgaa

SEQ ID NO: 786024 - RNA, 22 nt, Human
uccauuuucaucucauguauaa

SEQ ID NO: 786025 - RNA, 22 nt, Human
ucuuugcaggccaaauuguuaa

SEQ ID NO: 786026 - RNA, 22 nt, Human
ucaaauaaugccauucaucauc

SEQ ID NO: 786027 - RNA, 22 nt, Human
ucucaggaucuaauacauggua

SEQ ID NO: 786028 - RNA, 22 nt, Human
aggagggacaccaauauauguu

SEQ ID NO: 786029 - RNA, 22 nt, Human
cuggcugugcagucuuccagaa

SEQ ID NO: 786030 - RNA, 22 nt, Human
gaggaaccacucugagaagcca

SEQ ID NO: 786031 - RNA, 22 nt, Human
uuuuuaguagagguggguuuca

SEQ ID NO: 786032 - RNA, 22 nt, Human
cccuugcaucccauguguggcc

SEQ ID NO: 786033 - RNA, 22 nt, Human
acccaggagagagcuauaaaau

SEQ ID NO: 786034 - RNA, 22 nt, Human
gcuguguuuuauguuagguuaa

SEQ ID NO: 786035 - RNA, 22 nt, Human
ggcagcuauuccaagcagcacu

SEQ ID NO: 786036 - RNA, 22 nt, Human
ggaagaggaggagccaggcuuu

SEQ ID NO: 786037 - RNA, 22 nt, Human
ggaggagggguuuacauuggaa

SEQ ID NO: 786038 - RNA, 22 nt, Human
gaggccagggaugcaaugagag

SEQ ID NO: 786039 - RNA, 22 nt, Human
augaaggcuguguagauggaug

SEQ ID NO: 786040 - RNA, 22 nt, Human
uggcagcugucuguggggucuc

SEQ ID NO: 786041 - RNA, 22 nt, Human
acaguuaucuuugaaauagaga

SEQ ID NO: 786042 - RNA, 22 nt, Human
aagggcaggagaagacggauau

SEQ ID NO: 786043 - RNA, 22 nt, Human
cccuggaggcuggaggcaguag

SEQ ID NO: 786044 - RNA, 22 nt, Human
aggccagaaauuuggaguaugu

SEQ ID NO: 786045 - RNA, 22 nt, Human
gucccauaaguagugcaacuug

SEQ ID NO: 786046 - RNA, 22 nt, Human
auucuucaucagagaugcacua

SEQ ID NO: 786047 - RNA, 22 nt, Human
uggaguucucaggugagggcuu

SEQ ID NO: 786048 - RNA, 22 nt, Human
gccaggaggucagccccucaac

SEQ ID NO: 786049 - RNA, 22 nt, Human
cccaggaggccaagguugcagu

SEQ ID NO: 786050 - RNA, 21 nt, Human
cccaggaguccuauuuaaaug

SEQ ID NO: 786051 - RNA, 22 nt, Human
aucacuguguauguauaugcag

SEQ ID NO: 786052 - RNA, 22 nt, Human
acaggagacccugcugguucug

SEQ ID NO: 786053 - RNA, 22 nt, Human
ggccagaggugguacauagcuu

SEQ ID NO: 786054 - RNA, 22 nt, Human
ucauucuugaucacuaguuagu

SEQ ID NO: 786055 - RNA, 21 nt, Human
uuugaaagcccuauguuuuca

SEQ ID NO: 786056 - RNA, 19 nt, Human
uucauucuuucuacuuacc

SEQ ID NO: 786057 - RNA, 22 nt, Human
gcauuuccugugcuuggcauau

SEQ ID NO: 786058 - RNA, 22 nt, Human
gaggggaaagugugaggcugcg

SEQ ID NO: 786059 - RNA, 22 nt, Human
uuagccauuuuauacaagugua

SEQ ID NO: 786060 - RNA, 22 nt, Human
aaggcaguaggaucuuccacag

SEQ ID NO: 786061 - RNA, 22 nt, Human
aagacugugucuauggcuacuc

SEQ ID NO: 786062 - RNA, 22 nt, Human
uauuuccauguuagaacuaagu

SEQ ID NO: 786063 - RNA, 22 nt, Human
ugaacaaacugcauucuucacu

SEQ ID NO: 786064 - RNA, 22 nt, Human
caugauuuugucuuguguuaau

SEQ ID NO: 786065 - RNA, 22 nt, Human
agugcuuuauguuguugugcaa

SEQ ID NO: 786066 - RNA, 22 nt, Human
cagugauggauauggagaaguc

SEQ ID NO: 786067 - RNA, 22 nt, Human
caggcagccaggggaccugucc

SEQ ID NO: 786068 - RNA, 22 nt, Human
guuuuauaggcuguugcuauau

SEQ ID NO: 786069 - RNA, 22 nt, Human
uucccucucacuuaaagcuugg

SEQ ID NO: 786070 - RNA, 22 nt, Human
aagacugucuuuucugagugac

SEQ ID NO: 786071 - RNA, 22 nt, Human
gcccaggagguggaggugcagu

SEQ ID NO: 786072 - RNA, 22 nt, Human
aucacaaaggcugcuucaugau

SEQ ID NO: 786073 - RNA, 17 nt, Human
guccuacccauggucua

SEQ ID NO: 786074 - RNA, 23 nt, Human
ucucaggacacacaugucuauca

SEQ ID NO: 786075 - RNA, 22 nt, Human
gacuucuauuaauaccucuacu

SEQ ID NO: 786076 - RNA, 22 nt, Human
uucuugcaggucacucacugag

SEQ ID NO: 786077 - RNA, 22 nt, Human
uucauucuugggaucagagagu

SEQ ID NO: 786078 - RNA, 22 nt, Human
ggacuucuaagugccagacacu

SEQ ID NO: 786079 - RNA, 22 nt, Human
gcacaauuauuuaugcaguaug

SEQ ID NO: 786080 - RNA, 22 nt, Human
cugcuguggaugcaggaccuca

SEQ ID NO: 786081 - RNA, 22 nt, Human
uucaugugaauauauuugucuu

SEQ ID NO: 786082 - RNA, 22 nt, Human
auuccaguuggguucuaauaca

SEQ ID NO: 786083 - RNA, 22 nt, Human
ucauuuguugaacuuuagugcg

SEQ ID NO: 786084 - RNA, 22 nt, Human
uggccaggcagguagaacggcc

SEQ ID NO: 786085 - RNA, 23 nt, Human
uggaggaaacacaucagaagacc

SEQ ID NO: 786086 - RNA, 22 nt, Human
gaaggggacuggcagcugcaga

SEQ ID NO: 786087 - RNA, 22 nt, Human
caugcugugcaucuugaugacc

SEQ ID NO: 786088 - RNA, 22 nt, Human
uuagaaagcuuuccauagucaa

SEQ ID NO: 786089 - RNA, 22 nt, Human
uugaaaggaauacagaggccua

SEQ ID NO: 786090 - RNA, 22 nt, Human
gaggcagcauucgcauagacag

SEQ ID NO: 786091 - RNA, 21 nt, Human
uuccagagauuguuucaccug

SEQ ID NO: 786092 - RNA, 22 nt, Human
auucauaacggcaaaugucacc

SEQ ID NO: 786093 - RNA, 22 nt, Human
uagcugcugcagcacagggagg

SEQ ID NO: 786094 - RNA, 22 nt, Human
ugaggcaggagguugagaacug

SEQ ID NO: 786095 - RNA, 22 nt, Human
cuuagaaaucgaacucagguua

SEQ ID NO: 786096 - RNA, 22 nt, Human
agggcagcccuucugggagggc

SEQ ID NO: 786097 - RNA, 22 nt, Human
gcaaauauucaagacuuuucca

SEQ ID NO: 786098 - RNA, 22 nt, Human
uuuggaauuggcauucuauucu

SEQ ID NO: 786099 - RNA, 20 nt, Human
ccucaggaugagggugagca

SEQ ID NO: 786100 - RNA, 22 nt, Human
uuauuucauugauuucuaagac

SEQ ID NO: 786101 - RNA, 22 nt, Human
aggcagagcuggguuuugaaau

SEQ ID NO: 786102 - RNA, 22 nt, Human
uuucaucuuccuuggcauaggu

SEQ ID NO: 786103 - RNA, 21 nt, Human
agcagaggcagaauguaugca

SEQ ID NO: 786104 - RNA, 22 nt, Human
gccugcagaacugugaggcaau

SEQ ID NO: 786105 - RNA, 22 nt, Human
aaggagagagcuuugcuggaac

SEQ ID NO: 786106 - RNA, 22 nt, Human
cagaccucaguccucaguagga

SEQ ID NO: 786107 - RNA, 22 nt, Human
cauuuguaguuaaaaaugucuc

SEQ ID NO: 786108 - RNA, 22 nt, Human
uucucagaggagucgggagcug

SEQ ID NO: 786109 - RNA, 20 nt, Human
gggagucuggaugaaagaug

SEQ ID NO: 786110 - RNA, 22 nt, Human
ccucugcucugguccaugugcu

SEQ ID NO: 786111 - RNA, 22 nt, Human
gaagaggaugacaggagccggu

SEQ ID NO: 786112 - RNA, 22 nt, Human
uagggcagagcuuguacacgau

SEQ ID NO: 786113 - RNA, 22 nt, Human
auggaaagugcauggaagucau

SEQ ID NO: 786114 - RNA, 22 nt, Human
uuugaaugcaggacauacagaa

SEQ ID NO: 786115 - RNA, 22 nt, Human
gcccaggaguugguggcugcag

SEQ ID NO: 786116 - RNA, 22 nt, Human
uggcagcagccauggaaggccc

SEQ ID NO: 786117 - RNA, 22 nt, Human
ugcaugugcccacucuggcuua

SEQ ID NO: 786118 - RNA, 18 nt, Human
gcagcugacacuggaguu

SEQ ID NO: 786119 - RNA, 22 nt, Human
uacaaaguagaaauucaguaaa

SEQ ID NO: 786120 - RNA, 22 nt, Human
gcuguggucugugagcuccaaa

SEQ ID NO: 786121 - RNA, 22 nt, Human
uuugaaaggaaguuaauacuuu

SEQ ID NO: 786122 - RNA, 22 nt, Human
cuacccaggcuggagugcagua

SEQ ID NO: 786123 - RNA, 22 nt, Human
gcucccagacugaccagaggug

SEQ ID NO: 786124 - RNA, 23 nt, Human
aaggccagaauuucaauggugcc

SEQ ID NO: 786125 - RNA, 22 nt, Human
auaguuugugaaacacagcagu

SEQ ID NO: 786126 - RNA, 22 nt, Human
aggcaagcugcagagaguccuu

SEQ ID NO: 786127 - RNA, 22 nt, Human
uuguaaaugaccuuuucuaauu

SEQ ID NO: 786128 - RNA, 22 nt, Human
uugaaaguuaucuagauucuga

SEQ ID NO: 786129 - RNA, 22 nt, Human
uucucagaugauucagauaaac

SEQ ID NO: 786130 - RNA, 22 nt, Human
cugcuuugggcagcuuuguggc

SEQ ID NO: 786131 - RNA, 22 nt, Human
aggcuggagggcaauggcaaga

SEQ ID NO: 786132 - RNA, 22 nt, Human
aaggcagccuuuguuugauuga

SEQ ID NO: 786133 - RNA, 22 nt, Human
guucuucaguaaaauuaaaugu

SEQ ID NO: 786134 - RNA, 18 nt, Human
caugucugcgccacaagg

SEQ ID NO: 786135 - RNA, 22 nt, Human
uucuucuucaagugcugcauuc

SEQ ID NO: 786136 - RNA, 22 nt, Human
uuucuucucgacaccuuauccc

SEQ ID NO: 786137 - RNA, 22 nt, Human
ccagagagaaauggauuugagu

SEQ ID NO: 786138 - RNA, 21 nt, Human
ccugcugugaucuuagugagu

SEQ ID NO: 786139 - RNA, 22 nt, Human
ugaguucuaguggcugcagauu

SEQ ID NO: 786140 - RNA, 22 nt, Human
aauacaguagguaauaguucau

SEQ ID NO: 786141 - RNA, 23 nt, Human
uagggcagcugggagggacaugc

SEQ ID NO: 786142 - RNA, 20 nt, Human
ucacaucuggcagcugauga

SEQ ID NO: 786143 - RNA, 17 nt, Human
uccaggagaggcaaugg

SEQ ID NO: 786144 - RNA, 23 nt, Human
gaggcacucaggaaaugugagug

SEQ ID NO: 786145 - RNA, 22 nt, Human
uguagaaagaauauguuucaua

SEQ ID NO: 786146 - RNA, 22 nt, Human
aggaagcucaaagccaugaugu

SEQ ID NO: 786147 - RNA, 22 nt, Human
guccucuggaagaugaguucuu

SEQ ID NO: 786148 - RNA, 20 nt, Human
cccaggagcugugccccauc

SEQ ID NO: 786149 - RNA, 22 nt, Human
ucaggagaaggcaauguggaaa

SEQ ID NO: 786150 - RNA, 23 nt, Human
auguauuuaaauuucagugauga

SEQ ID NO: 786151 - RNA, 22 nt, Human
uucauucugggcucuaaggaac

SEQ ID NO: 786152 - RNA, 22 nt, Human
ucuuugaauccuuuacaucuga

SEQ ID NO: 786153 - RNA, 22 nt, Human
uaugccugauaacugugucucu

SEQ ID NO: 786154 - RNA, 22 nt, Human
aggaaagguagcgugccagcag

SEQ ID NO: 786155 - RNA, 22 nt, Human
aaagccagagcaagcugucaca

SEQ ID NO: 786156 - RNA, 22 nt, Human
uaaauuauguuccauguccuuu

SEQ ID NO: 786157 - RNA, 22 nt, Human
uagcccagcaugagcagagcug

SEQ ID NO: 786158 - RNA, 22 nt, Human
uucaggaugacaccauguccag

SEQ ID NO: 786159 - RNA, 22 nt, Human
acccaggaaaacauggugcaga

SEQ ID NO: 786160 - RNA, 22 nt, Human
uucacauuggugauauguuucu

SEQ ID NO: 786161 - RNA, 22 nt, Human
uuuacauuucccucugucaguu

SEQ ID NO: 786162 - RNA, 22 nt, Human
uuugaaaguucuucugacacua

SEQ ID NO: 786163 - RNA, 19 nt, Human
aggcaggugcagagguccc

SEQ ID NO: 786164 - RNA, 22 nt, Human
uuucauugcagagucugugugc

SEQ ID NO: 786165 - RNA, 22 nt, Human
caggcagcagaggaguguggga

SEQ ID NO: 786166 - RNA, 22 nt, Human
gagggaggggagcuccacccuc

SEQ ID NO: 786167 - RNA, 22 nt, Human
ucugggaaccagugcggcuggg

SEQ ID NO: 786168 - RNA, 19 nt, Human
caggaaugagguaauggcu

SEQ ID NO: 786169 - RNA, 22 nt, Human
uguacauagaucuugaaaauua

SEQ ID NO: 786170 - RNA, 22 nt, Human
auucuuaauugccaugcuguau

SEQ ID NO: 786171 - RNA, 22 nt, Human
cauuuguaucauauguaucuua

SEQ ID NO: 786172 - RNA, 22 nt, Human
ccugcucagagcgucuugugug

SEQ ID NO: 786173 - RNA, 22 nt, Human
ucugggaaugaauaagaccugu

SEQ ID NO: 786174 - RNA, 22 nt, Human
uuccaugaaggagacugagaag

SEQ ID NO: 786175 - RNA, 22 nt, Human
cuuuuauuuugaauuaagggcu

SEQ ID NO: 786176 - RNA, 22 nt, Human
guggcagcaaaugccuggacua

SEQ ID NO: 786177 - RNA, 22 nt, Human
auuguuaugaaaauaagauguu

SEQ ID NO: 786178 - RNA, 22 nt, Human
agaccauggccauccuaggaaa

SEQ ID NO: 786179 - RNA, 22 nt, Human
uggcaaggccacaggugcaguu

SEQ ID NO: 786180 - RNA, 20 nt, Human
gccaggagggugugaugagc

SEQ ID NO: 786181 - RNA, 22 nt, Human
acauuuuuuagagucccacauu

SEQ ID NO: 786182 - RNA, 22 nt, Human
ucauacaucuguccuggagcuc

SEQ ID NO: 786183 - RNA, 22 nt, Human
ugaaucugauuucccuggaggc

SEQ ID NO: 786184 - RNA, 16 nt, Human
gcccaggacgggaggc

SEQ ID NO: 786185 - RNA, 22 nt, Human
ucaggagacuggcagugcccac

SEQ ID NO: 786186 - RNA, 22 nt, Human
uuuuuguagucauuagaagagg

SEQ ID NO: 786187 - RNA, 18 nt, Human
ccucagggagagagacgc

SEQ ID NO: 786188 - RNA, 22 nt, Human
gcugugcuugggaagaaucucu

SEQ ID NO: 786189 - RNA, 22 nt, Human
uugcaaaggggaauaaagcaau

SEQ ID NO: 786190 - RNA, 22 nt, Human
ccuggacucaggcugugggcac

SEQ ID NO: 786191 - RNA, 22 nt, Human
aaauuuucagagcacuagagaa

SEQ ID NO: 786192 - RNA, 22 nt, Human
ucugcuguauuagguugaacug

SEQ ID NO: 786193 - RNA, 22 nt, Human
aggcaacuuuuggggaugaugg

SEQ ID NO: 786194 - RNA, 22 nt, Human
ucuucaauuagauuuaccaauu

SEQ ID NO: 786195 - RNA, 22 nt, Human
aagauuauuuaagacaggaacc

SEQ ID NO: 786196 - RNA, 22 nt, Human
ucuggcaggucaaucauucuuu

SEQ ID NO: 786197 - RNA, 22 nt, Human
uucuuauagaagcaaccauugu

SEQ ID NO: 786198 - RNA, 22 nt, Human
ugcugagguuucgucugcuugc

SEQ ID NO: 786199 - RNA, 22 nt, Human
caggagaucuuaggaauucuua

SEQ ID NO: 786200 - RNA, 22 nt, Human
ggccaggagaggagggcacuga

SEQ ID NO: 786201 - RNA, 22 nt, Human
guucuucagauuccauuucagu

SEQ ID NO: 786202 - RNA, 22 nt, Human
uugguuuacuaggauucaaauu

SEQ ID NO: 786203 - RNA, 22 nt, Human
caaggccacugcucagguuucc

SEQ ID NO: 786204 - RNA, 22 nt, Human
cagagggcucuuggcugccugc

SEQ ID NO: 786205 - RNA, 22 nt, Human
caggaaugaggucguaaguguc

SEQ ID NO: 786206 - RNA, 22 nt, Human
ggagcaggagucucuugaauuu

SEQ ID NO: 786207 - RNA, 17 nt, Human
gagagcugcugcuuccg

SEQ ID NO: 786208 - RNA, 22 nt, Human
uugaacaguccuaagagacccu

SEQ ID NO: 786209 - RNA, 21 nt, Human
gggcagcucuguuuuauuuuc

SEQ ID NO: 786210 - RNA, 22 nt, Human
cagcugccuucugcgggaaguc

SEQ ID NO: 786211 - RNA, 22 nt, Human
uagaaauaaaucugcagcuggg

SEQ ID NO: 786212 - RNA, 22 nt, Human
auucuucaucacuaccuuguga

SEQ ID NO: 786213 - RNA, 21 nt, Human
uugaaaguaaauucagcagcu

SEQ ID NO: 786214 - RNA, 22 nt, Human
gcacagcucgagcucaggaggg

SEQ ID NO: 786215 - RNA, 22 nt, Human
cuugaaagucacaugcagcccu

SEQ ID NO: 786216 - RNA, 22 nt, Human
cacucuccagcacaccccauuu

SEQ ID NO: 786217 - RNA, 22 nt, Human
auuuguagugaagugaaaauaa

SEQ ID NO: 786218 - RNA, 22 nt, Human
uagcucuucaaucacugucucc

SEQ ID NO: 786219 - RNA, 22 nt, Human
auugugcaaauauuaucuguag

SEQ ID NO: 786220 - RNA, 22 nt, Human
acccaggaggugacacagggcu

SEQ ID NO: 786221 - RNA, 22 nt, Human
gcauucuuuuuaggagguuccu

SEQ ID NO: 786222 - RNA, 19 nt, Human
ugcauaaauuauauacuuu

SEQ ID NO: 786223 - RNA, 22 nt, Human
auucuucacauggauaggaucu

SEQ ID NO: 786224 - RNA, 22 nt, Human
auugucuuuccacugagaaguu

SEQ ID NO: 786225 - RNA, 22 nt, Human
gcugcccauuccacuggauggu

SEQ ID NO: 786226 - RNA, 22 nt, Human
agcagccuuugaucaucuggga

SEQ ID NO: 786227 - RNA, 22 nt, Human
cugagccagcuggcaugugcua

SEQ ID NO: 786228 - RNA, 23 nt, Human
uggacgccgacuuuggaggcgcu

SEQ ID NO: 786229 - RNA, 23 nt, Human
acugucugauauguuuuccauca

SEQ ID NO: 786230 - RNA, 22 nt, Human
cuggcugugcugcaggcuuugg

SEQ ID NO: 786231 - RNA, 22 nt, Human
auugcuguaaauuaucuuauua

SEQ ID NO: 786232 - RNA, 22 nt, Human
ugaacuccaaauacugcugauu

SEQ ID NO: 786233 - RNA, 22 nt, Human
uccaggagaaggccauccagcg

SEQ ID NO: 786234 - RNA, 22 nt, Human
ugcacauuaguguuugagaugc

SEQ ID NO: 786235 - RNA, 15 nt, Human
cuccaugauuuugca

SEQ ID NO: 786236 - RNA, 22 nt, Human
uaaauuauggcuggcagagcag

SEQ ID NO: 786237 - RNA, 22 nt, Human
uggaggggcaauggagcgcgga

SEQ ID NO: 786238 - RNA, 22 nt, Human
uuuaacagguaaaguaaaugug

SEQ ID NO: 786239 - RNA, 22 nt, Human
gagcaccucaauuugcuauuug

SEQ ID NO: 786240 - RNA, 22 nt, Human
uuuaucuuuaggacuuugcaga

SEQ ID NO: 786241 - RNA, 22 nt, Human
cgaggcaggcaggcggaggaua

SEQ ID NO: 786242 - RNA, 22 nt, Human
uugcugugaaaccaugggaagu

SEQ ID NO: 786243 - RNA, 22 nt, Human
ggaggggaacuaaucccgugac

SEQ ID NO: 786244 - RNA, 22 nt, Human
uaaauuguuuucuagaaguugu

SEQ ID NO: 786245 - RNA, 22 nt, Human
acagucuugcuguauggucagg

SEQ ID NO: 786246 - RNA, 21 nt, Human
cccacggaaugaugaggcacu

SEQ ID NO: 786247 - RNA, 22 nt, Human
ugucugugaccucuuuggagcc

SEQ ID NO: 786248 - RNA, 21 nt, Human
gugcuuuuccuuaauguucuu

SEQ ID NO: 786249 - RNA, 22 nt, Human
uuucaguuguccuguuaauagc

SEQ ID NO: 786250 - RNA, 22 nt, Human
ugcugaaagucccaaaucucau

SEQ ID NO: 786251 - RNA, 22 nt, Human
aaggaaccuggaguagagggag

SEQ ID NO: 786252 - RNA, 22 nt, Human
agcuagaauguuccuuuucauu

SEQ ID NO: 786253 - RNA, 22 nt, Human
ucuugcuaaagaccaacacauu

SEQ ID NO: 786254 - RNA, 22 nt, Human
ccaggagacaaagaugacugcu

SEQ ID NO: 786255 - RNA, 22 nt, Human
guguguuuagcauuagcagggg

SEQ ID NO: 786256 - RNA, 22 nt, Human
gaggcgagaagcuggagauggu

SEQ ID NO: 786257 - RNA, 22 nt, Human
gauggcaggugauagccgaguc

SEQ ID NO: 786258 - RNA, 22 nt, Human
uaaugcuuaacagcuggcuuuu

SEQ ID NO: 786259 - RNA, 22 nt, Human
cugccaucugagccaaaagugc

SEQ ID NO: 786260 - RNA, 22 nt, Human
uucuacaauaugaauaaugaag

SEQ ID NO: 786261 - RNA, 22 nt, Human
aggcacaguggcucacaccugu

SEQ ID NO: 786262 - RNA, 22 nt, Human
ucuuugaaagcuguucuagagu

SEQ ID NO: 786263 - RNA, 22 nt, Human
cuguguuugaugagaagccacc

SEQ ID NO: 786264 - RNA, 22 nt, Human
gucuuucuaugaugaacuguug

SEQ ID NO: 786265 - RNA, 22 nt, Human
auucuucauacagacaaguccu

SEQ ID NO: 786266 - RNA, 22 nt, Human
ucacaugaguauuauuuuccaa

SEQ ID NO: 786267 - RNA, 22 nt, Human
agugcuuugugcucucacugca

SEQ ID NO: 786268 - RNA, 23 nt, Human
ggagaggggugugggcaucuuua

SEQ ID NO: 786269 - RNA, 22 nt, Human
uagaaaugaauguuuaaaaguc

SEQ ID NO: 786270 - RNA, 22 nt, Human
cccaggagguggagguugcggu

SEQ ID NO: 786271 - RNA, 22 nt, Human
agcugcccugggcuggagaugg

SEQ ID NO: 786272 - RNA, 22 nt, Human
gggcagcuccuguggaauccac

SEQ ID NO: 786273 - RNA, 19 nt, Human
caggaugaucccaugacac

SEQ ID NO: 786274 - RNA, 22 nt, Human
uugaauaguguuuucaguauac

SEQ ID NO: 786275 - RNA, 22 nt, Human
uucaggauggcggauguugggg

SEQ ID NO: 786276 - RNA, 22 nt, Human
uuucaaacauaucuucauuacu

SEQ ID NO: 786277 - RNA, 22 nt, Human
uucucugaaggccaugcucacu

SEQ ID NO: 786278 - RNA, 22 nt, Human
cugguacaaaaugcugauauca

SEQ ID NO: 786279 - RNA, 22 nt, Human
aucugccucuucuucauugcga

SEQ ID NO: 786280 - RNA, 22 nt, Human
uguaggccuauguccagcaauu

SEQ ID NO: 786281 - RNA, 22 nt, Human
agaccaagugcaggugccacua

SEQ ID NO: 786282 - RNA, 22 nt, Human
auguucuuucagccagugcauc

SEQ ID NO: 786283 - RNA, 22 nt, Human
gaaggucaccuccccucucugg

SEQ ID NO: 786284 - RNA, 22 nt, Human
ucucagaguuuagagcugagcc

SEQ ID NO: 786285 - RNA, 22 nt, Human
uuucuagggcucuugucuucug

SEQ ID NO: 786286 - RNA, 22 nt, Human
uacaaagagguaauugcauaua

SEQ ID NO: 786287 - RNA, 22 nt, Human
gauggcagucaaccaggugagg

SEQ ID NO: 786288 - RNA, 22 nt, Human
guucuucaucauuaacacucug

SEQ ID NO: 786289 - RNA, 22 nt, Human
aaucuguuuaguucugcguaug

SEQ ID NO: 786290 - RNA, 22 nt, Human
uaugaaacauucauacaaauaa

SEQ ID NO: 786291 - RNA, 22 nt, Human
ucuacugugguccuuguaacca

SEQ ID NO: 786292 - RNA, 22 nt, Human
cucaugauguagcgaaugagaa

SEQ ID NO: 786293 - RNA, 22 nt, Human
ggggcagcucccgagggcagga

SEQ ID NO: 786294 - RNA, 22 nt, Human
uggagaggaaagugcaguuuug

SEQ ID NO: 786295 - RNA, 22 nt, Human
cagacaggcaggugcugcuuug

SEQ ID NO: 786296 - RNA, 22 nt, Human
cauuuguuggucagauuguagu

SEQ ID NO: 786297 - RNA, 22 nt, Human
cccaggagguggagguugcagc

SEQ ID NO: 786298 - RNA, 17 nt, Human
aggcagcucagaacauc

SEQ ID NO: 786299 - RNA, 22 nt, Human
agaggccggccgagcccauggg

SEQ ID NO: 786300 - RNA, 22 nt, Human
acaacauuauacauagaaagcu

SEQ ID NO: 786301 - RNA, 22 nt, Human
uugauacaggcucuauuucauc

SEQ ID NO: 786302 - RNA, 22 nt, Human
auuuggcaacauuaauugaauc

SEQ ID NO: 786303 - RNA, 22 nt, Human
gucuucuuguguugccugucuu

SEQ ID NO: 786304 - RNA, 22 nt, Human
uuuaaaauuuagaccucuccac

SEQ ID NO: 786305 - RNA, 22 nt, Human
uugcauuucccauugaguaaug

SEQ ID NO: 786306 - RNA, 22 nt, Human
cagcuggccccacaguagaggc

SEQ ID NO: 786307 - RNA, 22 nt, Human
aaaggcaggcuuucacaucuca

SEQ ID NO: 786308 - RNA, 22 nt, Human
uucauugugaacacauucugcc

SEQ ID NO: 786309 - RNA, 22 nt, Human
uucaggauccccaccgcguuua

SEQ ID NO: 786310 - RNA, 22 nt, Human
ucucuucuagcuucuugugguu

SEQ ID NO: 786311 - RNA, 22 nt, Human
uccaugagagguaacuuuacaa

SEQ ID NO: 786312 - RNA, 22 nt, Human
uauucaaaguaccuucauugcc

SEQ ID NO: 786313 - RNA, 22 nt, Human
guccaugacugugacucacaug

SEQ ID NO: 786314 - RNA, 22 nt, Human
cucacuguccaacaggcuuuac

SEQ ID NO: 786315 - RNA, 22 nt, Human
cagcugcuguuacugcuuauua

SEQ ID NO: 786316 - RNA, 20 nt, Human
gcagcuacucugucucgcuc

SEQ ID NO: 786317 - RNA, 22 nt, Human
aggcagaggagaaugaucuucc

SEQ ID NO: 786318 - RNA, 22 nt, Human
gccaggaggcuuaacuggacag

SEQ ID NO: 786319 - RNA, 22 nt, Human
aggcaagcauugggaacagggc

SEQ ID NO: 786320 - RNA, 22 nt, Human
uaucaauacauguuaucagugu

SEQ ID NO: 786321 - RNA, 22 nt, Human
aguccuuugggaaaaaugacua

SEQ ID NO: 786322 - RNA, 22 nt, Human
ggccagaaguuggaaaagagcc

SEQ ID NO: 786323 - RNA, 22 nt, Human
cucuucuugccugaugaggcag

SEQ ID NO: 786324 - RNA, 22 nt, Human
ugaggcagcauucuucaagaca

SEQ ID NO: 786325 - RNA, 22 nt, Human
aagaacuuccuaauauauuuuc

SEQ ID NO: 786326 - RNA, 22 nt, Human
uaggagaggugaauggcacacu

SEQ ID NO: 786327 - RNA, 22 nt, Human
cccuugcacauuugucuuuaau

SEQ ID NO: 786328 - RNA, 22 nt, Human
ggagcagggcagugaauucugg

SEQ ID NO: 786329 - RNA, 22 nt, Human
uucacagucacccuucuccaug

SEQ ID NO: 786330 - RNA, 22 nt, Human
gaucuguuucauucacagucug

SEQ ID NO: 786331 - RNA, 22 nt, Human
ucacugcucagucuguacuaca

SEQ ID NO: 786332 - RNA, 22 nt, Human
gaggcaccucgcgggaggaggc

SEQ ID NO: 786333 - RNA, 22 nt, Human
uggugguuaugcgcuuuguggg

SEQ ID NO: 786334 - RNA, 22 nt, Human
cagcugacccgugggaggcggg

SEQ ID NO: 786335 - RNA, 22 nt, Human
cagggaggcugucuuaugccug

SEQ ID NO: 786336 - RNA, 22 nt, Human
ugauugaacugagcuucaagau

SEQ ID NO: 786337 - RNA, 22 nt, Human
aggcaccuugcgguccagugaa

SEQ ID NO: 786338 - RNA, 22 nt, Human
gaggcaacacauuuggaaagca

SEQ ID NO: 786339 - RNA, 22 nt, Human
cccaucacagacacuggguuau

SEQ ID NO: 786340 - RNA, 22 nt, Human
aacauucugguucuaaaaaccu

SEQ ID NO: 786341 - RNA, 22 nt, Human
ugccaggauggccagggggcca

SEQ ID NO: 786342 - RNA, 22 nt, Human
ugaggcaggaugcuugcacagg

SEQ ID NO: 786343 - RNA, 22 nt, Human
aucaggaugaagcuguagcgaa

SEQ ID NO: 786344 - RNA, 22 nt, Human
agucucugucguagaucagcgu

SEQ ID NO: 786345 - RNA, 22 nt, Human
uuuucaguuccaucucugcucu

SEQ ID NO: 786346 - RNA, 22 nt, Human
uugcugaagugaagguauguuu

SEQ ID NO: 786347 - RNA, 22 nt, Human
aaggcagucugguuucaaagca

SEQ ID NO: 786348 - RNA, 18 nt, Human
guaggucaguaccaagca

SEQ ID NO: 786349 - RNA, 23 nt, Human
cagggaggagauacuguguaucu

SEQ ID NO: 786350 - RNA, 22 nt, Human
gagaggggcgcgcagcucgcga

SEQ ID NO: 786351 - RNA, 22 nt, Human
cucugcaugccuugcucagaca

SEQ ID NO: 786352 - RNA, 22 nt, Human
caggaugagaagggcucuuacg

SEQ ID NO: 786353 - RNA, 22 nt, Human
gccacaggcacuuaagggcugg

SEQ ID NO: 786354 - RNA, 22 nt, Human
cagagggaaaaggggaguaaua

SEQ ID NO: 786355 - RNA, 22 nt, Human
ccagugcuuccaggaauacggu

SEQ ID NO: 786356 - RNA, 22 nt, Human
ccucuucuagguuucagccugc

SEQ ID NO: 786357 - RNA, 22 nt, Human
uaauuauuaugacaacaauugc

SEQ ID NO: 786358 - RNA, 22 nt, Human
auucuucacauaagugcuguac

SEQ ID NO: 786359 - RNA, 22 nt, Human
uucuucagucccacuagccaca

SEQ ID NO: 786360 - RNA, 22 nt, Human
uggaggaaaaaaccaggcagag

SEQ ID NO: 786361 - RNA, 22 nt, Human
uuuuucagccaugaauuacacu

SEQ ID NO: 786362 - RNA, 22 nt, Human
gagaggucaucucccaucagca

SEQ ID NO: 786363 - RNA, 22 nt, Human
ugucucaguacacuccgauguu

SEQ ID NO: 786364 - RNA, 22 nt, Human
auuaaauuuucacuaggcuccc

SEQ ID NO: 786365 - RNA, 22 nt, Human
uugguuuagagagugugguuac

SEQ ID NO: 786366 - RNA, 22 nt, Human
caggguggcacucagcgcaucu

SEQ ID NO: 786367 - RNA, 22 nt, Human
agggagugguuaagaaggugca

SEQ ID NO: 786368 - RNA, 19 nt, Human
caggagagcaugcacuuug

SEQ ID NO: 786369 - RNA, 22 nt, Human
agggcagcucucaccucuggcc

SEQ ID NO: 786370 - RNA, 22 nt, Human
ugcuguguucuccugacucacc

SEQ ID NO: 786371 - RNA, 22 nt, Human
uaucaucuuguugucaugcagc

SEQ ID NO: 786372 - RNA, 22 nt, Human
ccaggaaauggcuugcuucuuu

SEQ ID NO: 786373 - RNA, 22 nt, Human
uuucccagagguaugaauaagu

SEQ ID NO: 786374 - RNA, 22 nt, Human
gucaggauuaaugggaguaugc

SEQ ID NO: 786375 - RNA, 22 nt, Human
gagcgauguggguauguagaag

SEQ ID NO: 786376 - RNA, 22 nt, Human
uccaugagacagauacuguaag

SEQ ID NO: 786377 - RNA, 21 nt, Human
uucaaaaugguguguuugucu

SEQ ID NO: 786378 - RNA, 22 nt, Human
uucuuaaaacuuauggacaggu

SEQ ID NO: 786379 - RNA, 22 nt, Human
guggcaggagacuggaagaugg

SEQ ID NO: 786380 - RNA, 22 nt, Human
uagaaaugugauaauagcuuaa

SEQ ID NO: 786381 - RNA, 22 nt, Human
caguuucuacgaaggucaaccc

SEQ ID NO: 786382 - RNA, 22 nt, Human
uaagauaaguggguugagaugg

SEQ ID NO: 786383 - RNA, 22 nt, Human
uuugcagucaaauuugcuaaau

SEQ ID NO: 786384 - RNA, 23 nt, Human
caguggagacucaugcuuccuua

SEQ ID NO: 786385 - RNA, 22 nt, Human
acagaauugaaaguauaaucug

SEQ ID NO: 786386 - RNA, 22 nt, Human
ugaggcagauauuuauuggguu

SEQ ID NO: 786387 - RNA, 19 nt, Human
cuucuucuuggcagccaag

SEQ ID NO: 786388 - RNA, 22 nt, Human
guuauacauauguguuaacaaa

SEQ ID NO: 786389 - RNA, 22 nt, Human
ucucuucuaauuuucccgagua

SEQ ID NO: 786390 - RNA, 19 nt, Human
uagaggagaagggaagugg

SEQ ID NO: 786391 - RNA, 22 nt, Human
gcagcugaauguccauugcugc

SEQ ID NO: 786392 - RNA, 22 nt, Human
gagcagcugagcuggaaugaga

SEQ ID NO: 786393 - RNA, 22 nt, Human
agucuugcucuugcaucugcuu

SEQ ID NO: 786394 - RNA, 22 nt, Human
ccaggagaugauguuggggauu

SEQ ID NO: 786395 - RNA, 22 nt, Human
aggcagcauccagaggagaaug

SEQ ID NO: 786396 - RNA, 22 nt, Human
ugcuggguuaccuaagccuaaa

SEQ ID NO: 786397 - RNA, 22 nt, Human
acccaggagguggaggcugcag

SEQ ID NO: 786398 - RNA, 22 nt, Human
cugcuucuccaaaguaggacuu

SEQ ID NO: 786399 - RNA, 22 nt, Human
gaggcugaggguuagagaguca

SEQ ID NO: 786400 - RNA, 22 nt, Human
uguacauacauagauauacaca

SEQ ID NO: 786401 - RNA, 22 nt, Human
cccaggagagaggccaguuggc

SEQ ID NO: 786402 - RNA, 20 nt, Human
ucagaugggagugagccauc

SEQ ID NO: 786403 - RNA, 22 nt, Human
ggcaucuccaaaacaugaacuc

SEQ ID NO: 786404 - RNA, 22 nt, Human
ucgcugugguuucuguacaugg

SEQ ID NO: 786405 - RNA, 22 nt, Human
uggcagcucuguucaacaugag

SEQ ID NO: 786406 - RNA, 22 nt, Human
caguucuuuguggggaguucuc

SEQ ID NO: 786407 - RNA, 22 nt, Human
gggugggacugaagucugaggg

SEQ ID NO: 786408 - RNA, 22 nt, Human
aaagccaugaauguuauagagg

SEQ ID NO: 786409 - RNA, 22 nt, Human
aggcagguccccuggaaggcac

SEQ ID NO: 786410 - RNA, 15 nt, Human
caggagaggaagguu

SEQ ID NO: 786411 - RNA, 19 nt, Human
uccaggagcaaagccaguu

SEQ ID NO: 786412 - RNA, 22 nt, Human
aggcagcaugggcccagagucc

SEQ ID NO: 786413 - RNA, 22 nt, Human
aaauugcauuuuaaagguagau

SEQ ID NO: 786414 - RNA, 22 nt, Human
ucauuuuucacacagggucacc

SEQ ID NO: 786415 - RNA, 22 nt, Human
ccaggcugcagucaaggggcau

SEQ ID NO: 786416 - RNA, 22 nt, Human
gugcagcugcaggagucagguc

SEQ ID NO: 786417 - RNA, 22 nt, Human
auacauacauguaugcacauac

SEQ ID NO: 786418 - RNA, 21 nt, Human
uacagaaugcgcuucagucug

SEQ ID NO: 786419 - RNA, 22 nt, Human
aggagagcuggugucuggaauc

SEQ ID NO: 786420 - RNA, 21 nt, Human
gauugaaaccauggcagugag

SEQ ID NO: 786421 - RNA, 22 nt, Human
cccaggaaugagcaggcagggg

SEQ ID NO: 786422 - RNA, 22 nt, Human
ugccuggauucgguuguuguca

SEQ ID NO: 786423 - RNA, 22 nt, Human
uucuuugaguuaguacagucca

SEQ ID NO: 786424 - RNA, 22 nt, Human
cuugaaagaagggucuuuuaau

SEQ ID NO: 786425 - RNA, 22 nt, Human
cucccagggucuaggcugcugg

SEQ ID NO: 786426 - RNA, 22 nt, Human
aaagcagaacugagagagcugg

SEQ ID NO: 786427 - RNA, 22 nt, Human
uagugcuuaauaaauuucagaa

SEQ ID NO: 786428 - RNA, 22 nt, Human
ccccaggacguggcccucauag

SEQ ID NO: 786429 - RNA, 22 nt, Human
cugcccaggaaggagaggaugg

SEQ ID NO: 786430 - RNA, 23 nt, Human
ucuccuccuagauacagucaugg

SEQ ID NO: 786431 - RNA, 22 nt, Human
cugcugugcauauuuaucuagg

SEQ ID NO: 786432 - RNA, 22 nt, Human
aaaggccacuugaaggauuuuu

SEQ ID NO: 786433 - RNA, 22 nt, Human
gggcagcucagccaccaugcag

SEQ ID NO: 786434 - RNA, 22 nt, Human
uaaauuaugucacaugacucug

SEQ ID NO: 786435 - RNA, 22 nt, Human
uguuuuaaucucccauugcucu

SEQ ID NO: 786436 - RNA, 22 nt, Human
ggcagcuuccuaggagagggca

SEQ ID NO: 786437 - RNA, 22 nt, Human
agucauaugacccuucacaaac

SEQ ID NO: 786438 - RNA, 22 nt, Human
uguagggaggaaggguuggaaa

SEQ ID NO: 786439 - RNA, 22 nt, Human
ccacagagacaggguccuugcu

SEQ ID NO: 786440 - RNA, 22 nt, Human
uaugauuuguagacauuugauu

SEQ ID NO: 786441 - RNA, 22 nt, Human
uggaguucauccaugacagcuu

SEQ ID NO: 786442 - RNA, 22 nt, Human
auuugcuuucagguauaaaagg

SEQ ID NO: 786443 - RNA, 20 nt, Human
caguccaaucagaggccacc

SEQ ID NO: 786444 - RNA, 22 nt, Human
auaaagauuucuuuuucucuac

SEQ ID NO: 786445 - RNA, 22 nt, Human
cucaggauagauuguccucuca

SEQ ID NO: 786446 - RNA, 22 nt, Human
gcaccugauugauuucacugcu

SEQ ID NO: 786447 - RNA, 22 nt, Human
caaggccaguucaccaagggca

SEQ ID NO: 786448 - RNA, 22 nt, Human
gccaggagaaaaggcgaaugau

SEQ ID NO: 786449 - RNA, 22 nt, Human
cucagagaggcaguggaaguca

SEQ ID NO: 786450 - RNA, 17 nt, Human
aaggccauuuccaccca

SEQ ID NO: 786451 - RNA, 22 nt, Human
aggcaggcaaccaccugggaag

SEQ ID NO: 786452 - RNA, 17 nt, Human
uucucugagcuguauug

SEQ ID NO: 786453 - RNA, 22 nt, Human
ucaggagagaaagaauacaauu

SEQ ID NO: 786454 - RNA, 23 nt, Human
auuucuaggggauuuucuggugc

SEQ ID NO: 786455 - RNA, 22 nt, Human
aacauacauauuucagugucca

SEQ ID NO: 786456 - RNA, 22 nt, Human
aggacagcaguuggugagguuc

SEQ ID NO: 786457 - RNA, 22 nt, Human
uucucagaauugacugggagca

SEQ ID NO: 786458 - RNA, 22 nt, Human
aggccagcccugggcugagaga

SEQ ID NO: 786459 - RNA, 22 nt, Human
auuuaaaugcuuaagaggguuu

SEQ ID NO: 786460 - RNA, 17 nt, Human
uuucuccuuccaucuca

SEQ ID NO: 786461 - RNA, 22 nt, Human
gaggaacccagcugggguugcc

SEQ ID NO: 786462 - RNA, 22 nt, Human
agaggggaaguaaugaaugaua

SEQ ID NO: 786463 - RNA, 22 nt, Human
ucaggagaacuuccuucuaccc

SEQ ID NO: 786464 - RNA, 22 nt, Human
uucuuaacuggaaaaugucaga

SEQ ID NO: 786465 - RNA, 17 nt, Human
acucaggaucugggagu

SEQ ID NO: 786466 - RNA, 22 nt, Human
uuuguagaggguaauugacaga

SEQ ID NO: 786467 - RNA, 22 nt, Human
uuuuuuaguuaggucagaaugu

SEQ ID NO: 786468 - RNA, 22 nt, Human
ggcagaggaaggaugaauucac

SEQ ID NO: 786469 - RNA, 22 nt, Human
ucuucauuuuauagcaucugug

SEQ ID NO: 786470 - RNA, 22 nt, Human
agacagugauguaagcaggagu

SEQ ID NO: 786471 - RNA, 20 nt, Human
uuucaagucagcaauucuca

SEQ ID NO: 786472 - RNA, 22 nt, Human
uuuggaauguaguuuaaucauc

SEQ ID NO: 786473 - RNA, 22 nt, Human
cuauuucaaggcccagauauga

SEQ ID NO: 786474 - RNA, 22 nt, Human
caggguggcacaucacagcauu

SEQ ID NO: 786475 - RNA, 22 nt, Human
aggagagaauguuccaggcuug

SEQ ID NO: 786476 - RNA, 22 nt, Human
ucucuucuaacacuagaaauuc

SEQ ID NO: 786477 - RNA, 22 nt, Human
uugcucaggcuggugugcagug

SEQ ID NO: 786478 - RNA, 22 nt, Human
ucagauggguuuugaaggaugu

SEQ ID NO: 786479 - RNA, 22 nt, Human
agcaccugccugcauuggcuau

SEQ ID NO: 786480 - RNA, 22 nt, Human
ugaaggccuaacuuccagugcu

SEQ ID NO: 786481 - RNA, 22 nt, Human
ccccaggagaaaucuuaaacua

SEQ ID NO: 786482 - RNA, 22 nt, Human
acaugcauaggagaagucuuua

SEQ ID NO: 786483 - RNA, 22 nt, Human
aucacugucgucaucugagauu

SEQ ID NO: 786484 - RNA, 22 nt, Human
ucugguaaccuuuaucccuccu

SEQ ID NO: 786485 - RNA, 22 nt, Human
aguaaagcagaguugcaguaca

SEQ ID NO: 786486 - RNA, 22 nt, Human
ugucaaauuuuuauugcaguau

SEQ ID NO: 786487 - RNA, 22 nt, Human
uaggcagcuuagguuagaagug

SEQ ID NO: 786488 - RNA, 19 nt, Human
agacagagcucaguggguu

SEQ ID NO: 786489 - RNA, 22 nt, Human
cuuuuccacugagccucacaaa

SEQ ID NO: 786490 - RNA, 22 nt, Human
caggagauguaagacuucuguu

SEQ ID NO: 786491 - RNA, 22 nt, Human
augggaggaugcucgggugcuc

SEQ ID NO: 786492 - RNA, 20 nt, Human
uccaggagguuaguguggcu

SEQ ID NO: 786493 - RNA, 22 nt, Human
uucaggauucugugucugacaa

SEQ ID NO: 786494 - RNA, 22 nt, Human
cuuagcaugugguguccuugua

SEQ ID NO: 786495 - RNA, 20 nt, Human
cagagccaagagcagcaucu

SEQ ID NO: 786496 - RNA, 22 nt, Human
uuugcagucuggccugcuuugg

SEQ ID NO: 786497 - RNA, 22 nt, Human
gaaggccacuuuguguugagaa

SEQ ID NO: 786498 - RNA, 22 nt, Human
guuguuuugcaggauccuuaca

SEQ ID NO: 786499 - RNA, 19 nt, Human
cuggccaggccaggggccc

SEQ ID NO: 786500 - RNA, 20 nt, Human
uccaggagaacugggagccg

SEQ ID NO: 786501 - RNA, 22 nt, Human
cccuuagcuccaagggguuugg

SEQ ID NO: 786502 - RNA, 22 nt, Human
uuaacauuguccuuagcagauu

SEQ ID NO: 786503 - RNA, 22 nt, Human
uuguaaauaguaguaagaugcc

SEQ ID NO: 786504 - RNA, 22 nt, Human
uagcuaucuguguccagaucca

SEQ ID NO: 786505 - RNA, 22 nt, Human
gucaggauuugaacucaggucu

SEQ ID NO: 786506 - RNA, 22 nt, Human
ucugucuccucugaggugccag

SEQ ID NO: 786507 - RNA, 22 nt, Human
cagacaggguccuguccgucac

SEQ ID NO: 786508 - RNA, 22 nt, Human
gacagaggcuggagcaccuccu

SEQ ID NO: 786509 - RNA, 22 nt, Human
augcugugauuguagaaauauu

SEQ ID NO: 786510 - RNA, 21 nt, Human
aaucauacaaaacaugucagg

SEQ ID NO: 786511 - RNA, 22 nt, Human
cuuuguagcugcuucugauuua

SEQ ID NO: 786512 - RNA, 20 nt, Human
ucauuucuugggguuccaag

SEQ ID NO: 786513 - RNA, 18 nt, Human
ugaggcagucagugaugg

SEQ ID NO: 786514 - RNA, 22 nt, Human
uuguuauaaagacuaaauaugu

SEQ ID NO: 786515 - RNA, 22 nt, Human
cuguggaaaauuuguauguaau

SEQ ID NO: 786516 - RNA, 22 nt, Human
aggcaguuguugcugagcagcu

SEQ ID NO: 786517 - RNA, 22 nt, Human
guucuucacauuucauugagga

SEQ ID NO: 786518 - RNA, 22 nt, Human
uccaggaggaggaaggcugcca

SEQ ID NO: 786519 - RNA, 22 nt, Human
aaccauuugcaguuacugagac

SEQ ID NO: 786520 - RNA, 22 nt, Human
ucaucugucauccacaaagcug

SEQ ID NO: 786521 - RNA, 22 nt, Human
uugcugugucugauggcugaga

SEQ ID NO: 786522 - RNA, 22 nt, Human
aauauccacacugugucccugc

SEQ ID NO: 786523 - RNA, 22 nt, Human
uggagcugggguuugaaucugg

SEQ ID NO: 786524 - RNA, 22 nt, Human
gagugucugaauuagagcacaa

SEQ ID NO: 786525 - RNA, 22 nt, Human
uagaaauguugguauuaacauu

SEQ ID NO: 786526 - RNA, 22 nt, Human
cuucccagaccuuagagugcag

SEQ ID NO: 786527 - RNA, 20 nt, Human
augugagggguugaaguggg

SEQ ID NO: 786528 - RNA, 22 nt, Human
gcuagaaaucgacuucagaauu

SEQ ID NO: 786529 - RNA, 22 nt, Human
ucuuagcacagcuauauaaguu

SEQ ID NO: 786530 - RNA, 22 nt, Human
caaguaaacaauaugugauuca

SEQ ID NO: 786531 - RNA, 22 nt, Human
gucuauauauugcuugaauaau

SEQ ID NO: 786532 - RNA, 22 nt, Human
aggcagcuggaaaacuccaggc

SEQ ID NO: 786533 - RNA, 22 nt, Human
uuuccucacuucaugagaguuu

SEQ ID NO: 786534 - RNA, 19 nt, Human
uucacaauuaugaaauuag

SEQ ID NO: 786535 - RNA, 22 nt, Human
aagagggcagcacagguggguc

SEQ ID NO: 786536 - RNA, 22 nt, Human
uuugcagugucagcuucugugu

SEQ ID NO: 786537 - RNA, 22 nt, Human
guucuucaucauuuuagauagg

SEQ ID NO: 786538 - RNA, 22 nt, Human
uggcagcuuuuuguuucaggcu

SEQ ID NO: 786539 - RNA, 22 nt, Human
uggcagagcaaaaagauagaau

SEQ ID NO: 786540 - RNA, 22 nt, Human
acagcauugcuccaucucaaga

SEQ ID NO: 786541 - RNA, 19 nt, Human
acauuuaaauucagaucuc

SEQ ID NO: 786542 - RNA, 22 nt, Human
caggaugaagggcaaaggcaag

SEQ ID NO: 786543 - RNA, 19 nt, Human
auucuucucuuccugcugu

SEQ ID NO: 786544 - RNA, 22 nt, Human
uugauuugauuguaauggcucu

SEQ ID NO: 786545 - RNA, 18 nt, Human
agcucacagaucuguuuu

SEQ ID NO: 786546 - RNA, 22 nt, Human
ugucauauagaauguucuauga

SEQ ID NO: 786547 - RNA, 22 nt, Human
guuguuuuugaacggugguggc

SEQ ID NO: 786548 - RNA, 22 nt, Human
acugguuuuggaaaucaguaca

SEQ ID NO: 786549 - RNA, 22 nt, Human
aagcaauucacaguucacuuaa

SEQ ID NO: 786550 - RNA, 22 nt, Human
acuuuuaaggggccuugauuua

SEQ ID NO: 786551 - RNA, 22 nt, Human
uuuaauuauaucugggcaguua

SEQ ID NO: 786552 - RNA, 22 nt, Human
augcuuucucuuaguucauuga

SEQ ID NO: 786553 - RNA, 22 nt, Human
cugcuguguggauucaauggcu

SEQ ID NO: 786554 - RNA, 22 nt, Human
cuuccucuguggccagagugua

SEQ ID NO: 786555 - RNA, 22 nt, Human
uagauucugacccucuuuuuac

SEQ ID NO: 786556 - RNA, 23 nt, Human
uuguucuuggaucuuccugaagc

SEQ ID NO: 786557 - RNA, 22 nt, Human
aucuucaaggaaaaaauacagu

SEQ ID NO: 786558 - RNA, 22 nt, Human
cugcagaugguauuguucuggu

SEQ ID NO: 786559 - RNA, 21 nt, Human
gacauugagcgugucgcagug

SEQ ID NO: 786560 - RNA, 22 nt, Human
gcuguaacuuuuucauuuucaa

SEQ ID NO: 786561 - RNA, 22 nt, Human
auuugcuuguucaccaguacuu

SEQ ID NO: 786562 - RNA, 22 nt, Human
guucuucaaagugacaacuaaa

SEQ ID NO: 786563 - RNA, 19 nt, Human
ugguucuccuuccacaguc

SEQ ID NO: 786564 - RNA, 22 nt, Human
uugcugccuuuguacucugaug

SEQ ID NO: 786565 - RNA, 22 nt, Human
acauuuuuggguugaugucuga

SEQ ID NO: 786566 - RNA, 22 nt, Human
caacagcuggaggcuuggcccg

SEQ ID NO: 786567 - RNA, 18 nt, Human
auggcuccagugucuucc

SEQ ID NO: 786568 - RNA, 22 nt, Human
uuucugcagcagacucagugug

SEQ ID NO: 786569 - RNA, 22 nt, Human
guucuucagcccucagguccua

SEQ ID NO: 786570 - RNA, 22 nt, Human
ugccugugggugaugauuugau

SEQ ID NO: 786571 - RNA, 22 nt, Human
cugcugagguggagauugcagu

SEQ ID NO: 786572 - RNA, 22 nt, Human
aaugcuuuuugcgaaaugugca

SEQ ID NO: 786573 - RNA, 22 nt, Human
agccugugagggaugcugcagu

SEQ ID NO: 786574 - RNA, 22 nt, Human
gauugcugggucccacucccag

SEQ ID NO: 786575 - RNA, 22 nt, Human
ugcuuguauucauaucacagcu

SEQ ID NO: 786576 - RNA, 22 nt, Human
auguuguugaacucuuugcaug

SEQ ID NO: 786577 - RNA, 22 nt, Human
cuugccagggacucagucaggg

SEQ ID NO: 786578 - RNA, 20 nt, Human
uauuucugggcaaccauuua

SEQ ID NO: 786579 - RNA, 21 nt, Human
gucuuuuuaauugcgauuucc

SEQ ID NO: 786580 - RNA, 22 nt, Human
uuuaauuuucugggcccagcag

SEQ ID NO: 786581 - RNA, 22 nt, Human
uuuggucuggaaucuucagggu

SEQ ID NO: 786582 - RNA, 22 nt, Human
ucuuggcaguucuugugcuuuu

SEQ ID NO: 786583 - RNA, 22 nt, Human
ugcuccugaacacagcccuaug

SEQ ID NO: 786584 - RNA, 22 nt, Human
uuuuuugucuugaagaaauggu

SEQ ID NO: 786585 - RNA, 22 nt, Human
uaauuuugucacagugacaugc

SEQ ID NO: 786586 - RNA, 22 nt, Human
gucugcugacagagcauggacc

SEQ ID NO: 786587 - RNA, 22 nt, Human
uuuucaguuccaucucugcucu

SEQ ID NO: 786588 - RNA, 22 nt, Human
cuuauuugcccauguuucuuua

SEQ ID NO: 786589 - RNA, 22 nt, Human
cagcugcuguucaguuuuguuu

SEQ ID NO: 786590 - RNA, 22 nt, Human
aacaggcuaaauuguccauuuc

SEQ ID NO: 786591 - RNA, 22 nt, Human
uucacagugguagugcauuuag

SEQ ID NO: 786592 - RNA, 22 nt, Human
uucuuuuaauuucugucugcag

SEQ ID NO: 786593 - RNA, 22 nt, Human
uuauuuuguagcucugaucuuu

SEQ ID NO: 786594 - RNA, 20 nt, Human
cagcucugggcaggucgagg

SEQ ID NO: 786595 - RNA, 22 nt, Human
auucaugcaggauugucuccaa

SEQ ID NO: 786596 - RNA, 22 nt, Human
agcuggguacacguugucacaa

SEQ ID NO: 786597 - RNA, 20 nt, Human
cucuuuucacucucaguggu

SEQ ID NO: 786598 - RNA, 22 nt, Human
uuuucuaacaucuaguaauuug

SEQ ID NO: 786599 - RNA, 22 nt, Human
ugauucaguacuuucucuaacu

SEQ ID NO: 786600 - RNA, 22 nt, Human
gguguuguacauucuguggauu

SEQ ID NO: 786601 - RNA, 22 nt, Human
cauugcuguuaauugucucuag

SEQ ID NO: 786602 - RNA, 22 nt, Human
uugcuucacuacuucuaggcuc

SEQ ID NO: 786603 - RNA, 22 nt, Human
gcaguugcaggauuuguguugu

SEQ ID NO: 786604 - RNA, 21 nt, Human
gcacuucugcagggcugcugg

SEQ ID NO: 786605 - RNA, 22 nt, Human
auuguugacuugauuacucaac

SEQ ID NO: 786606 - RNA, 22 nt, Human
gcucugugccccugccguggac

SEQ ID NO: 786607 - RNA, 22 nt, Human
uuaaguccuugguaauuuucuu

SEQ ID NO: 786608 - RNA, 22 nt, Human
uucuaguuacagaagccuugcu

SEQ ID NO: 786609 - RNA, 22 nt, Human
uggccugauuuugcuaagagaa

SEQ ID NO: 786610 - RNA, 22 nt, Human
gagcugcuggccuccugcggga

SEQ ID NO: 786611 - RNA, 22 nt, Human
cuucagggguguuaguuuugug

SEQ ID NO: 786612 - RNA, 22 nt, Human
gugcaggacagcacaucuccug

SEQ ID NO: 786613 - RNA, 22 nt, Human
uaacuugagcucucagugcuau

SEQ ID NO: 786614 - RNA, 22 nt, Human
ucugcuugugucuguccagccu

SEQ ID NO: 786615 - RNA, 22 nt, Human
ugcugcuuguuuuguaaauaaa

SEQ ID NO: 786616 - RNA, 22 nt, Human
ugcuugcugaaaggcauuuaga

SEQ ID NO: 786617 - RNA, 22 nt, Human
cauuguuggcagagggacagag

SEQ ID NO: 786618 - RNA, 22 nt, Human
augguuuuguccucuuugguuc

SEQ ID NO: 786619 - RNA, 22 nt, Human
gucuguggaguugcuugcugga

SEQ ID NO: 786620 - RNA, 22 nt, Human
uuuacuucugcauuuccccuag

SEQ ID NO: 786621 - RNA, 22 nt, Human
cuugcuuuaucugguuucucau

SEQ ID NO: 786622 - RNA, 22 nt, Human
guugcagcaucacugcugagug

SEQ ID NO: 786623 - RNA, 21 nt, Human
caagacauaugaguacucugg

SEQ ID NO: 786624 - RNA, 22 nt, Human
cugcaguucuucuccucaaggc

SEQ ID NO: 786625 - RNA, 22 nt, Human
uucuguuuauaauuugcaguug

SEQ ID NO: 786626 - RNA, 20 nt, Human
uugagcagcagugcuguguc

SEQ ID NO: 786627 - RNA, 22 nt, Human
acuucacagauauuuauuuggu

SEQ ID NO: 786628 - RNA, 22 nt, Human
ucuacaacgugguuuuguugua

SEQ ID NO: 786629 - RNA, 22 nt, Human
ugugagauuuuauuugauaugc

SEQ ID NO: 786630 - RNA, 22 nt, Human
uuuacuuuugguaaggucauuu

SEQ ID NO: 786631 - RNA, 22 nt, Human
gcugcucucucccuaaguuggg

SEQ ID NO: 786632 - RNA, 22 nt, Human
cagcucugguuccugggcccag

SEQ ID NO: 786633 - RNA, 17 nt, Human
uuucugcaugauuggac

SEQ ID NO: 786634 - RNA, 22 nt, Human
uuuggauugcuuggaugcuucg

SEQ ID NO: 786635 - RNA, 22 nt, Human
guucuucagauuccauuucagu

SEQ ID NO: 786636 - RNA, 22 nt, Human
ugguuuguauauguuugugaga

SEQ ID NO: 786637 - RNA, 17 nt, Human
cauucuguaaucuuucu

SEQ ID NO: 786638 - RNA, 22 nt, Human
ugaagccagggacugacacuuc

SEQ ID NO: 786639 - RNA, 22 nt, Human
ccugugcuucacucaacaagcc

SEQ ID NO: 786640 - RNA, 22 nt, Human
gcugcuggcuuccugcuguuuu

SEQ ID NO: 786641 - RNA, 22 nt, Human
uuccuguucaggaaaguugugu

SEQ ID NO: 786642 - RNA, 22 nt, Human
cagcugcucugguggucucucc

SEQ ID NO: 786643 - RNA, 22 nt, Human
uuaggauuugaaaaggggcaga

SEQ ID NO: 786644 - RNA, 22 nt, Human
guuuuguucaugaacauugggu

SEQ ID NO: 786645 - RNA, 23 nt, Human
gguucugccgcuuacugcugugc

SEQ ID NO: 786646 - RNA, 22 nt, Human
uuuucaguugugcucucuaguu

SEQ ID NO: 786647 - RNA, 22 nt, Human
ccaucuucucuugaaccuccuu

SEQ ID NO: 786648 - RNA, 19 nt, Human
ggguccauggugucaagga

SEQ ID NO: 786649 - RNA, 22 nt, Human
gcugcaagugcauguugcaacu

SEQ ID NO: 786650 - RNA, 22 nt, Human
gagcagcuguucugacuugucu

SEQ ID NO: 786651 - RNA, 22 nt, Human
aacagguagggacucuaacuug

SEQ ID NO: 786652 - RNA, 22 nt, Human
cuuuggucuccgucaucaauca

SEQ ID NO: 786653 - RNA, 22 nt, Human
caguuuuucaaaauuacaugau

SEQ ID NO: 786654 - RNA, 22 nt, Human
uucuucauucccuuacuuccga

SEQ ID NO: 786655 - RNA, 22 nt, Human
gcacuuguuuuauguuccugag

SEQ ID NO: 786656 - RNA, 22 nt, Human
ugcuuuauucgacaucugguag

SEQ ID NO: 786657 - RNA, 22 nt, Human
uugagcagaucgggcugugggg

SEQ ID NO: 786658 - RNA, 22 nt, Human
ucuccucuccuuucauguuguu

SEQ ID NO: 786659 - RNA, 22 nt, Human
aauuauguuugcuuuagaugga

SEQ ID NO: 786660 - RNA, 22 nt, Human
uagcugcuugaccaggcagugg

SEQ ID NO: 786661 - RNA, 22 nt, Human
uguuaguauuggcaaauuuguu

SEQ ID NO: 786662 - RNA, 22 nt, Human
guucuucaggcugugcucuaga

SEQ ID NO: 786663 - RNA, 22 nt, Human
ggcucucuuaacuggccauccu

SEQ ID NO: 786664 - RNA, 22 nt, Human
ggaaacugcuuacacuagaggg

SEQ ID NO: 786665 - RNA, 22 nt, Human
uucaguuuugcuuuuaaucaug

SEQ ID NO: 786666 - RNA, 22 nt, Human
uguucaguuugcuaucauaauc

SEQ ID NO: 786667 - RNA, 22 nt, Human
ucugcuguuuacugugugauau

SEQ ID NO: 786668 - RNA, 22 nt, Human
gucuuuuuuacaccuuacauca

SEQ ID NO: 786669 - RNA, 22 nt, Human
uugucaggaacuaugauuaugc

SEQ ID NO: 786670 - RNA, 22 nt, Human
uguucugcaaugcugccuccuu

SEQ ID NO: 786671 - RNA, 23 nt, Human
cguuuuuuccucagauguucugg

SEQ ID NO: 786672 - RNA, 22 nt, Human
ugugucuaaugacuauuucuuc

SEQ ID NO: 786673 - RNA, 22 nt, Human
auguuuguguuucccauucagg

SEQ ID NO: 786674 - RNA, 22 nt, Human
ucuuucagaaacuuugucugcg

SEQ ID NO: 786675 - RNA, 22 nt, Human
guccuguguaaguacuugcuca

SEQ ID NO: 786676 - RNA, 22 nt, Human
cuucucuuggguguggugucuu

SEQ ID NO: 786677 - RNA, 22 nt, Human
acugcauucuuuaucccacaac

SEQ ID NO: 786678 - RNA, 20 nt, Human
uuugauugccccucugacuu

SEQ ID NO: 786679 - RNA, 22 nt, Human
ucucuuugacccuuuagcucca

SEQ ID NO: 786680 - RNA, 22 nt, Human
gugauuucaaauauagagugag

SEQ ID NO: 786681 - RNA, 18 nt, Human
cuuuagcugucaucuuug

SEQ ID NO: 786682 - RNA, 22 nt, Human
cuucaguucuaaaguagaaugu

SEQ ID NO: 786683 - RNA, 22 nt, Human
ugcauguuuuauaccaaagcuu

SEQ ID NO: 786684 - RNA, 22 nt, Human
agcaauguuggccuauauaccu

SEQ ID NO: 786685 - RNA, 22 nt, Human
ccugugggcgcagcuggaguca

SEQ ID NO: 786686 - RNA, 22 nt, Human
uugcaggucuggggguccuggu

SEQ ID NO: 786687 - RNA, 22 nt, Human
cugguuuuccaauguuuugacu

SEQ ID NO: 786688 - RNA, 22 nt, Human
cucuguccugguuuauacuggc

SEQ ID NO: 786689 - RNA, 22 nt, Human
guguuuugugaggccuucuuuc

SEQ ID NO: 786690 - RNA, 22 nt, Human
cacuguugagcaauguacagug

SEQ ID NO: 786691 - RNA, 22 nt, Human
caaauguuugguggcauuuugu

SEQ ID NO: 786692 - RNA, 22 nt, Human
cuuucuuucgaagacgugauua

SEQ ID NO: 786693 - RNA, 22 nt, Human
gcagcucucuggccugcccugg

SEQ ID NO: 786694 - RNA, 22 nt, Human
uuguaacaguagcugucagcuc

SEQ ID NO: 786695 - RNA, 22 nt, Human
ugcagcaucuccuugugccaug

SEQ ID NO: 786696 - RNA, 22 nt, Human
cauugcugugggcauuugcugc

SEQ ID NO: 786697 - RNA, 22 nt, Human
uguuugcucugacuaucuugcg

SEQ ID NO: 786698 - RNA, 22 nt, Human
ccuuuguucacuggagagugga

SEQ ID NO: 786699 - RNA, 22 nt, Human
ccacugcuguuacuuacgcaaa

SEQ ID NO: 786700 - RNA, 22 nt, Human
gugguuguuuccagguuugaaa

SEQ ID NO: 786701 - RNA, 22 nt, Human
cugucucugauaagcucgaggg

SEQ ID NO: 786702 - RNA, 22 nt, Human
cuugccaguguugcagaagcuc

SEQ ID NO: 786703 - RNA, 22 nt, Human
acugcuuacccggccugacuuc

SEQ ID NO: 786704 - RNA, 23 nt, Human
cuguuauauggguguuaugugcu

SEQ ID NO: 786705 - RNA, 22 nt, Human
uuuacagcuacuguccuauuuc

SEQ ID NO: 786706 - RNA, 22 nt, Human
agcugcugcaaguggugcuaac

SEQ ID NO: 786707 - RNA, 22 nt, Human
aucauuugaacagaauuuguuu

SEQ ID NO: 786708 - RNA, 22 nt, Human
auuauguagcuaaaaauugugu

SEQ ID NO: 786709 - RNA, 22 nt, Human
cauugcuuugugcauauuuaaa

SEQ ID NO: 786710 - RNA, 22 nt, Human
caaaauuguugaugcugcuuug

SEQ ID NO: 786711 - RNA, 22 nt, Human
uguguuuuggaaggaacaugca

SEQ ID NO: 786712 - RNA, 22 nt, Human
auugacuuucccuucuccucau

SEQ ID NO: 786713 - RNA, 21 nt, Human
uuuguucaggggcaaaguuaa

SEQ ID NO: 786714 - RNA, 22 nt, Human
ccaaggcuggagggcuuaugua

SEQ ID NO: 786715 - RNA, 22 nt, Human
cugcuucacccugccugagaac

SEQ ID NO: 786716 - RNA, 22 nt, Human
ugcugcacuuauggcucugagg

SEQ ID NO: 786717 - RNA, 22 nt, Human
acauuguugagccucuuguuca

SEQ ID NO: 786718 - RNA, 22 nt, Human
guucaguuauuucugaagauau

SEQ ID NO: 786719 - RNA, 22 nt, Human
cuucauuucaggcugaagaaua

SEQ ID NO: 786720 - RNA, 22 nt, Human
uuguuuguaaggcucuuagaau

SEQ ID NO: 786721 - RNA, 22 nt, Human
uuugacaacugugcaguuugua

SEQ ID NO: 786722 - RNA, 22 nt, Human
aagcucucuguccccuggacug

SEQ ID NO: 786723 - RNA, 22 nt, Human
ccugugucaucagcuguggcua

SEQ ID NO: 786724 - RNA, 22 nt, Human
ucauuguuucugcuuuucauga

SEQ ID NO: 786725 - RNA, 22 nt, Human
cauuuugugcuagacacuaugg

SEQ ID NO: 786726 - RNA, 22 nt, Human
cuuguuuucuucugcagucuau

SEQ ID NO: 786727 - RNA, 22 nt, Human
uugcaguugcuguauuuaagga

SEQ ID NO: 786728 - RNA, 22 nt, Human
ucuauuaaugauucaauagugu

SEQ ID NO: 786729 - RNA, 19 nt, Human
ugcucucuggugcuucaug

SEQ ID NO: 786730 - RNA, 22 nt, Human
gagcagcaggccagguugcagg

SEQ ID NO: 786731 - RNA, 23 nt, Human
auuuccuaaaagauaaucauuac

SEQ ID NO: 786732 - RNA, 21 nt, Human
cuuuucuagucccagccccgc

SEQ ID NO: 786733 - RNA, 22 nt, Human
aauuauugagcaucuacugugu

SEQ ID NO: 786734 - RNA, 22 nt, Human
aacaugaugacauuguaagcuu

SEQ ID NO: 786735 - RNA, 22 nt, Human
uugagcuugaggaguuauuuga

SEQ ID NO: 786736 - RNA, 22 nt, Human
aagugauuucugccugcauguu

SEQ ID NO: 786737 - RNA, 22 nt, Human
acuuggucguggugcagcaugg

SEQ ID NO: 786738 - RNA, 22 nt, Human
acauuuaaugauccuacuguga

SEQ ID NO: 786739 - RNA, 22 nt, Human
uuuuccuuaacagagggagaaa

SEQ ID NO: 786740 - RNA, 22 nt, Human
augauugaaaaugacauugcca

SEQ ID NO: 786741 - RNA, 22 nt, Human
ugcuuucaaugaauuguauacu

SEQ ID NO: 786742 - RNA, 22 nt, Human
cacuuuuaacaggagaauuccc

SEQ ID NO: 786743 - RNA, 22 nt, Human
acauuugauauggaguugugua

SEQ ID NO: 786744 - RNA, 19 nt, Human
uugcuucaugucuuuugcu

SEQ ID NO: 786745 - RNA, 22 nt, Human
uacauguuauuucacuauuggu

SEQ ID NO: 786746 - RNA, 22 nt, Human
agauauguuaggcuuguucccu

SEQ ID NO: 786747 - RNA, 22 nt, Human
cuucauuaaugucuauaaguuu

SEQ ID NO: 786748 - RNA, 19 nt, Human
cucucagccugucuccuug

SEQ ID NO: 786749 - RNA, 22 nt, Human
gcagcugcgcugguguggggca

SEQ ID NO: 786750 - RNA, 21 nt, Human
ugcuaagugucacaugucugc

SEQ ID NO: 786751 - RNA, 22 nt, Human
aucacaguuuuaccauuuggua

SEQ ID NO: 786752 - RNA, 18 nt, Human
agguguguuucuaggagc

SEQ ID NO: 786753 - RNA, 17 nt, Human
aguuuuuggaccugugu

SEQ ID NO: 786754 - RNA, 22 nt, Human
agcagcaggugaccucgaugcc

SEQ ID NO: 786755 - RNA, 20 nt, Human
cuugaguucagagcugucau

SEQ ID NO: 786756 - RNA, 22 nt, Human
uugcaguuuugacagaccaaau

SEQ ID NO: 786757 - RNA, 22 nt, Human
acaguucuguccuagacuucgu

SEQ ID NO: 786758 - RNA, 22 nt, Human
ccacugcuaacuugcugcagcu

SEQ ID NO: 786759 - RNA, 21 nt, Human
aaagugguaaggauuauuuug

SEQ ID NO: 786760 - RNA, 22 nt, Human
uccucuucaaaauagcucugaa

SEQ ID NO: 786761 - RNA, 22 nt, Human
cugguuuuuagugcuuaggagu

SEQ ID NO: 786762 - RNA, 22 nt, Human
augauuuguuaacagacuuaau

SEQ ID NO: 786763 - RNA, 22 nt, Human
ugacuuuggacuagugauuuaa

SEQ ID NO: 786764 - RNA, 22 nt, Human
uuucauguuggauacuguuuca

SEQ ID NO: 786765 - RNA, 22 nt, Human
acucauuugcaugaugugcuau

SEQ ID NO: 786766 - RNA, 22 nt, Human
uuugucaccaguggcuuuggua

SEQ ID NO: 786767 - RNA, 22 nt, Human
caauuuuuaaacuaugaaguug

SEQ ID NO: 786768 - RNA, 22 nt, Human
caaaugaugcauggcuagugag

SEQ ID NO: 786769 - RNA, 22 nt, Human
acugcacuccagcccgagcaac

SEQ ID NO: 786770 - RNA, 22 nt, Human
uuaaguauauccauuugacugg

SEQ ID NO: 786771 - RNA, 22 nt, Human
uuucuucucacccaggacagag

SEQ ID NO: 786772 - RNA, 22 nt, Human
uuccaauaaaauguuauuugca

SEQ ID NO: 786773 - RNA, 22 nt, Human
ucacagcugggguuuuggcagc

SEQ ID NO: 786774 - RNA, 17 nt, Human
uguguaaguugcauaga

SEQ ID NO: 786775 - RNA, 22 nt, Human
caacauuucaaggucuuuagga

SEQ ID NO: 786776 - RNA, 22 nt, Human
acugauuucagggaugagaaga

SEQ ID NO: 786777 - RNA, 20 nt, Human
gacuucaauuucuaucuuuu

SEQ ID NO: 786778 - RNA, 22 nt, Human
aaguuugucucauuugaucuuc

SEQ ID NO: 786779 - RNA, 22 nt, Human
auccauuugccgugcuaugugc

SEQ ID NO: 786780 - RNA, 22 nt, Human
cucucuuuuucgugugccgaag

SEQ ID NO: 786781 - RNA, 22 nt, Human
aucuucaaagcacaucguuugu

SEQ ID NO: 786782 - RNA, 22 nt, Human
ugugcuauuuuugcauaugugu

SEQ ID NO: 786783 - RNA, 22 nt, Human
ucugcucagccgaucugcuccg

SEQ ID NO: 786784 - RNA, 22 nt, Human
ucucagcucauggcagccuuga

SEQ ID NO: 786785 - RNA, 22 nt, Human
ugccuguguccccuucuuggca

SEQ ID NO: 786786 - RNA, 22 nt, Human
agccugugcuguguuugcucca

SEQ ID NO: 786787 - RNA, 22 nt, Human
agacauauuggcuugcuuuaau

SEQ ID NO: 786788 - RNA, 19 nt, Human
cuccacagggauugugauu

SEQ ID NO: 786789 - RNA, 22 nt, Human
ucuuccagauacuuccugacuu

SEQ ID NO: 786790 - RNA, 22 nt, Human
gucauuuuugacuuugaaguga

SEQ ID NO: 786791 - RNA, 22 nt, Human
gauugcugccagcguguccgug

SEQ ID NO: 786792 - RNA, 22 nt, Human
cuuuacuucagcaagcuuuccu

SEQ ID NO: 786793 - RNA, 22 nt, Human
uucucuucacagggaucauccu

SEQ ID NO: 786794 - RNA, 22 nt, Human
cuucuucagaggccagccucug

SEQ ID NO: 786795 - RNA, 22 nt, Human
uccuuucuucuucugcccaugg

SEQ ID NO: 786796 - RNA, 22 nt, Human
acuuuucuuaucagaaaggcca

SEQ ID NO: 786797 - RNA, 21 nt, Human
uugauuuagcagaucuagcug

SEQ ID NO: 786798 - RNA, 22 nt, Human
cuguuuauucucaucuaaaaug

SEQ ID NO: 786799 - RNA, 22 nt, Human
ggcagucuuucccuugagcucu

SEQ ID NO: 786800 - RNA, 22 nt, Human
gcagcugccgugagcucacgcc

SEQ ID NO: 786801 - RNA, 22 nt, Human
auagucuuagaaucuugagugu

SEQ ID NO: 786802 - RNA, 22 nt, Human
gauuugucuauauucaaauaug

SEQ ID NO: 786803 - RNA, 23 nt, Human
augcaacauugccaguaugggca

SEQ ID NO: 786804 - RNA, 22 nt, Human
ugacauuugagagagauauaca

SEQ ID NO: 786805 - RNA, 22 nt, Human
acaguguuacuugauaguguau

SEQ ID NO: 786806 - RNA, 22 nt, Human metapneumovirus
caucgccuaccuccaguguaaa

SEQ ID NO: 786807 - RNA, 22 nt, Human metapneumovirus
ggcauaugaagagucauuuuca

SEQ ID NO: 786808 - RNA, 22 nt, Human
ucuguagcauucaccagcccug

SEQ ID NO: 786809 - RNA, 23 nt, Human
agcaacagugggugaguguugcu

SEQ ID NO: 786810 - RNA, 22 nt, Human
gaaggcaagcagcauaaauguc

SEQ ID NO: 786811 - RNA, 22 nt, Human
gacacuacguggcucacauuuc

SEQ ID NO: 786812 - RNA, 21 nt, Human
acucaucuuuuuggagaccag

SEQ ID NO: 786813 - RNA, 22 nt, Human
uauagcagcaugauuuauaguc

SEQ ID NO: 786814 - RNA, 22 nt, Human
uaugaaggauacaccucugauu

SEQ ID NO: 786815 - RNA, 22 nt, Human
uucuaguuacagaagccuugcu

SEQ ID NO: 786816 - RNA, 22 nt, Human
auuuacucgugcuucauugaau

SEQ ID NO: 786817 - RNA, 22 nt, Human
agcuaguauuucauugaggauu

SEQ ID NO: 786818 - RNA, 22 nt, Human
ucugccaucaagaugcucuggc

SEQ ID NO: 786819 - RNA, 22 nt, Human
aaugacaguggcacagucacuu

SEQ ID NO: 786820 - RNA, 22 nt, Human
uucaacaacuugguucaaaugg

SEQ ID NO: 786821 - RNA, 22 nt, Human
agucauguguucaucuuucauu

SEQ ID NO: 786822 - RNA, 22 nt, Human
ugcauguuuuauaccaaagcuu

SEQ ID NO: 786823 - RNA, 18 nt, Human
uccaccgcgugcaccucu

SEQ ID NO: 786824 - RNA, 22 nt, Human
aaugucaacacaagagaaaugc

SEQ ID NO: 786825 - RNA, 22 nt, Human
uugcuauuuugagagucauagu

SEQ ID NO: 786826 - RNA, 20 nt, Human
gugcccaguuggugacagac

SEQ ID NO: 786827 - RNA, 22 nt, Human
cacaguuuugucuugguuucca

SEQ ID NO: 786828 - RNA, 19 nt, Human
auacacguguauacauaca

SEQ ID NO: 786829 - RNA, 22 nt, Human
uacauguacaugcauagguaga

SEQ ID NO: 786830 - RNA, 22 nt, Human
caggaacacaaugagucucaaa

SEQ ID NO: 786831 - RNA, 22 nt, Human
caagauauguccuguuacuaag

SEQ ID NO: 786832 - RNA, 22 nt, Human
cuucuaauucuuauguaagcuu

SEQ ID NO: 786833 - RNA, 22 nt, Human
gacauacagcccucucccuggu

SEQ ID NO: 786834 - RNA, 22 nt, Human
uuuucuuggaguggcuguccuu

SEQ ID NO: 786835 - RNA, 23 nt, Human
ccccacuaccgugaugugcgagg

SEQ ID NO: 786836 - RNA, 22 nt, Human
auguacauuauucgagugaugg

SEQ ID NO: 786837 - RNA, 22 nt, Human
uuccaauaaaauguuauuugca

SEQ ID NO: 786838 - RNA, 22 nt, Human
auauaaguguguggcuguuagu

SEQ ID NO: 786839 - RNA, 23 nt, Human
uacagccaugucgcugauuuaac

SEQ ID NO: 786840 - RNA, 22 nt, Human
acaguguuucacuuaaccguuu

SEQ ID NO: 786841 - RNA, 22 nt, Human
auggcuguguuguuccucugaa

SEQ ID NO: 786842 - RNA, 22 nt, Human
aaaugcaugugcuauagaugug

SEQ ID NO: 786843 - RNA, 22 nt, Human
uuguugcugcucaaccucuaua

SEQ ID NO: 786844 - RNA, 22 nt, Human
acaguuaguugaggaguguuug

SEQ ID NO: 786845 - RNA, 22 nt, Human
ugucacagagcgugcaacagaa

SEQ ID NO: 786846 - RNA, 21 nt, Human
guucaauagcucuuugaaugc

SEQ ID NO: 786847 - RNA, 22 nt, Human
uaacacauagauauuuuaacuu

SEQ ID NO: 786848 - RNA, 22 nt, Human
cugcgugguaggacucaguucu

SEQ ID NO: 786849 - RNA, 22 nt, Human
uucucucaguuaaacuuuguga

SEQ ID NO: 786850 - RNA, 22 nt, Human
uacaccagauuauuuauaacau

SEQ ID NO: 786851 - RNA, 22 nt, Human
uggcacaguuaaaguuguagaa

SEQ ID NO: 786852 - RNA, 22 nt, Human
auguuugaaauuguaaguauau

SEQ ID NO: 786853 - RNA, 19 nt, Human
aacuacagcgcacuguccu

SEQ ID NO: 786854 - RNA, 22 nt, Human
agaaacaucgcuuaguccucau

SEQ ID NO: 786855 - RNA, 22 nt, Human
cacucucacaugcccugucagu

SEQ ID NO: 786856 - RNA, 22 nt, Human
aggcucaguauagcuggcaagu

SEQ ID NO: 786857 - RNA, 22 nt, Human
augcaguuagguaauagucuca

SEQ ID NO: 786858 - RNA, 21 nt, Human
auacaagaagauggcagucug

SEQ ID NO: 786859 - RNA, 22 nt, Human
auauggcuguugcacaucuaag

SEQ ID NO: 786860 - RNA, 22 nt, Human
ucacuuuaccucauucaggcag

SEQ ID NO: 786861 - RNA, 22 nt, Human
uguguacauguaucaacuaucg

SEQ ID NO: 786862 - RNA, 22 nt, Human
uauaagaaacaaggcaaauuuu

SEQ ID NO: 786863 - RNA, 22 nt, Human
aucccugugacgagcaucccua

SEQ ID NO: 786864 - RNA, 22 nt, Human
auacaugugugugcauacaugu

SEQ ID NO: 786865 - RNA, 22 nt, Human
uuguacacacaggaacaaacgu

SEQ ID NO: 786866 - RNA, 22 nt, Human
uguacauacauagauauacaca

SEQ ID NO: 786867 - RNA, 22 nt, Human
auacaugacucacacauucugc

SEQ ID NO: 786868 - RNA, 22 nt, Human
augcacacguacccuacaaggc

SEQ ID NO: 786869 - RNA, 22 nt, Human
uucguuuaguccacaaaugcau

SEQ ID NO: 786870 - RNA, 22 nt, Human
uaagaaacauuuuuaugacagu

SEQ ID NO: 786871 - RNA, 22 nt, Human
auuguuacuggguuaauuugga

SEQ ID NO: 786872 - RNA, 22 nt, Human
uaaugccuuucuguacuauaug

SEQ ID NO: 786873 - RNA, 22 nt, Human
aaugcaaugcagcaccuccuug

SEQ ID NO: 786874 - RNA, 22 nt, Human
ccucauucucgcguguguuucu

SEQ ID NO: 786875 - RNA, 22 nt, Human
auccauuugccgugcuaugugc

SEQ ID NO: 786876 - RNA, 22 nt, Human
cacuguugagcaauguacagug

SEQ ID NO: 786877 - RNA, 22 nt, Human
uccccaguaagccugcacugug

SEQ ID NO: 786878 - RNA, 22 nt, Human
uguccugugcacuguagcaugu

SEQ ID NO: 786879 - RNA, 22 nt, Human
gauacuuuguggaauccuggau

SEQ ID NO: 786880 - RNA, 22 nt, Human
caugcauuucuaccaaggaaua

SEQ ID NO: 786881 - RNA, 22 nt, Human
aagcauuuuagauaaagcauca

SEQ ID NO: 786882 - RNA, 19 nt, Human
acacaccagugccugugac

SEQ ID NO: 786883 - RNA, 22 nt, Human
ucauacauguuguguucaaaug

SEQ ID NO: 786884 - RNA, 22 nt, Human
uucacauaaucugcagcaagcg

SEQ ID NO: 786885 - RNA, 22 nt, Human
guuuacaacaucuuguccuuca

SEQ ID NO: 786886 - RNA, 22 nt, Human
auauacacuguuucaguugaag

SEQ ID NO: 786887 - RNA, 22 nt, Human
agucaacauuugagaugcaaug

SEQ ID NO: 786888 - RNA, 22 nt, Human
auacaacagaaaaugauuauuc

SEQ ID NO: 786889 - RNA, 22 nt, Human
cucuguccugguuuauacuggc

SEQ ID NO: 786890 - RNA, 22 nt, Human
agucaggacagauuuucugggg

SEQ ID NO: 786891 - RNA, 22 nt, Human
caugugaccgcugggugagcga

SEQ ID NO: 786892 - RNA, 22 nt, Human
uugcaguugcuguauuuaagga

SEQ ID NO: 786893 - RNA, 22 nt, Human
aauaucuagccuuuagcagcuu

SEQ ID NO: 786894 - RNA, 22 nt, Human
aauguuaaguuuagauuauaac

SEQ ID NO: 786895 - RNA, 22 nt, Human
caugccugccuggugggcgugg

SEQ ID NO: 786896 - RNA, 22 nt, Human
ccaucuucucuugaaccuccuu

SEQ ID NO: 786897 - RNA, 22 nt, Human
uguauauacacacucccauguu

SEQ ID NO: 786898 - RNA, 22 nt, Human
gugacagguauacucaccauug

SEQ ID NO: 786899 - RNA, 22 nt, Human
cacauuuaugggcugggaggca

SEQ ID NO: 786900 - RNA, 22 nt, Human
caauguacaaaauaauuacaca

SEQ ID NO: 786901 - RNA, 22 nt, Human
uguguccugugaucucuagggu

SEQ ID NO: 786902 - RNA, 22 nt, Human
ugugcugcucucagugacagcc

SEQ ID NO: 786903 - RNA, 22 nt, Human
uaaaaucaugacagauugacau

SEQ ID NO: 786904 - RNA, 22 nt, Human
cauuuacauuuaagguuaauau

SEQ ID NO: 786905 - RNA, 18 nt, Human
cugccuguugcugagagg

SEQ ID NO: 786906 - RNA, 22 nt, Human
uccugugccuccaccugcuccg

SEQ ID NO: 786907 - RNA, 22 nt, Human
aaauugcaaaaguacuuuuagg

SEQ ID NO: 786908 - RNA, 21 nt, Human
aggcaugagcccugcauggac

SEQ ID NO: 786909 - RNA, 22 nt, Human
acugcauuaucaccaagaugua

SEQ ID NO: 786910 - RNA, 22 nt, Human
accauccuuuaguuugcguuuc

SEQ ID NO: 786911 - RNA, 22 nt, Human
uuuacuuuugguaaggucauuu

SEQ ID NO: 786912 - RNA, 22 nt, Human
uguacauauucaagcacuucua

SEQ ID NO: 786913 - RNA, 22 nt, Human
ccauuuguaccauuucuuugua

SEQ ID NO: 786914 - RNA, 20 nt, Human
acaacuuaguugagagacua

SEQ ID NO: 786915 - RNA, 22 nt, Human
agugaaaaccuaaucaugcagu

SEQ ID NO: 786916 - RNA, 22 nt, Human
uaaaugcaguacaaauuguucu

SEQ ID NO: 786917 - RNA, 22 nt, Human
cacuuuuaacaggagaauuccc

SEQ ID NO: 786918 - RNA, 21 nt, Human
ugcauauauaagugcauacac

SEQ ID NO: 786919 - RNA, 22 nt, Human
gaaggcaagugagccaagagaa

SEQ ID NO: 786920 - RNA, 22 nt, Human
ucgcuuuaauggucuucacagc

SEQ ID NO: 786921 - RNA, 22 nt, Human
uaucacauacuucucauccagg

SEQ ID NO: 786922 - RNA, 22 nt, Human
guccacauaggaacccagcuuc

SEQ ID NO: 786923 - RNA, 22 nt, Human
ucacacaucucagguguuuaau

SEQ ID NO: 786924 - RNA, 22 nt, Human
cuccacagccccuccaguggca

SEQ ID NO: 786925 - RNA, 22 nt, Human
auacacauguuauuguggaagc

SEQ ID NO: 786926 - RNA, 22 nt, Human
uuguguacucaccagcacauac

SEQ ID NO: 786927 - RNA, 22 nt, Human
uagcagcacuauuuguuguagu

SEQ ID NO: 786928 - RNA, 22 nt, Human
gcuacaggggucaguccuuugc

SEQ ID NO: 786929 - RNA, 22 nt, Human
uucaaacaguguagaauauaug

SEQ ID NO: 786930 - RNA, 22 nt, Human
acugcauucuuuaucccacaac

SEQ ID NO: 786931 - RNA, 22 nt, Human
ucaucuguuaugggaguuuuug

SEQ ID NO: 786932 - RNA, 22 nt, Human
ugugacagugccagcuucauag

SEQ ID NO: 786933 - RNA, 22 nt, Human
uguguccuucugggagucccag

SEQ ID NO: 786934 - RNA, 22 nt, Human
ugggaugagcuauauagaaagu

SEQ ID NO: 786935 - RNA, 22 nt, Human
uaccuugugagcuuucuaacau

SEQ ID NO: 786936 - RNA, 22 nt, Human
ugcauuucccauuguguggcuc

SEQ ID NO: 786937 - RNA, 22 nt, Human
ugaaaugccuaugaagucagga

SEQ ID NO: 786938 - RNA, 18 nt, Human
agguauaugaaucucuuu

SEQ ID NO: 786939 - RNA, 22 nt, Human
cacauuuaaagguugaagcuga

SEQ ID NO: 786940 - RNA, 22 nt, Human
acaggaaaugaaaugguaucua

SEQ ID NO: 786941 - RNA, 22 nt, Human
agcacguucuucauuacuucac

SEQ ID NO: 786942 - RNA, 22 nt, Human
auggcuucugucuuggaaauuu

SEQ ID NO: 786943 - RNA, 19 nt, Human
cuccacagggauugugauu

SEQ ID NO: 786944 - RNA, 22 nt, Human
cucagucucuugggcugugaag

SEQ ID NO: 786945 - RNA, 22 nt, Human
acauuuaaugauccuacuguga

SEQ ID NO: 786946 - RNA, 22 nt, Human
acaccacaaguaacucuuuucc

SEQ ID NO: 786947 - RNA, 22 nt, Human
cuuuauguuggggugucuuagu

SEQ ID NO: 786948 - RNA, 22 nt, Human
guuuauuggguauuguggagcc

SEQ ID NO: 786949 - RNA, 22 nt, Human
auugcacaucugcacuacagcc

SEQ ID NO: 786950 - RNA, 22 nt, Human
cacaguuuuaucuuauacugau

SEQ ID NO: 786951 - RNA, 22 nt, Human
ccacuguuggcccgaagggguc

SEQ ID NO: 786952 - RNA, 22 nt, Human
uucaaacacugcuuugagaggg

SEQ ID NO: 786953 - RNA, 22 nt, Human
ugauuugaaaccuuuggcaaga

SEQ ID NO: 786954 - RNA, 22 nt, Human
caguuuuucaaaauuacaugau

SEQ ID NO: 786955 - RNA, 22 nt, Human
auguaacauaugugaucgcauu

SEQ ID NO: 786956 - RNA, 22 nt, Human
ugcauuugcaauggguacacaa

SEQ ID NO: 786957 - RNA, 21 nt, Human
uaaacauaaccuuguauggcu

SEQ ID NO: 786958 - RNA, 22 nt, Human
ccaaacauuucaaauuuagaga

SEQ ID NO: 786959 - RNA, 22 nt, Human
uguuaguauuggcaaauuuguu

SEQ ID NO: 786960 - RNA, 22 nt, Human
ccuguaccgcgaucugcugcgc

SEQ ID NO: 786961 - RNA, 22 nt, Human
aagcacagggacucaggaccgg

SEQ ID NO: 786962 - RNA, 22 nt, Human
ugccuguguccccuucuuggca

SEQ ID NO: 786963 - RNA, 22 nt, Human
aaaugccucauuuucucucacu

SEQ ID NO: 786964 - RNA, 21 nt, Human
cacuccacuuagaacaggguu

SEQ ID NO: 786965 - RNA, 22 nt, Human
uagcuucccugcuggaucauaa

SEQ ID NO: 786966 - RNA, 22 nt, Human
uguaauguuagaaacaauugcu

SEQ ID NO: 786967 - RNA, 22 nt, Human
uacaguaaccagucuacuuaga

SEQ ID NO: 786968 - RNA, 22 nt, Human
uauacuacgcaccaaacaaagg

SEQ ID NO: 786969 - RNA, 21 nt, Human
gccaccucaaucuucuagcgc

SEQ ID NO: 786970 - RNA, 22 nt, Human
cauaacauccuugcuacuuuga

SEQ ID NO: 786971 - RNA, 22 nt, Human
acucaucuuugaauuuucagua

SEQ ID NO: 786972 - RNA, 22 nt, Human
cauuuugugcuagacacuaugg

SEQ ID NO: 786973 - RNA, 22 nt, Human
gcacaaaagguacuucauguag

SEQ ID NO: 786974 - RNA, 22 nt, Human
augcacaagguagauuauuauu

SEQ ID NO: 786975 - RNA, 22 nt, Human
uccucuucaaaauagcucugaa

SEQ ID NO: 786976 - RNA, 22 nt, Human
acaacuuuaauggguuucagcu

SEQ ID NO: 786977 - RNA, 22 nt, Human
aacaguaugugagauuuacaca

SEQ ID NO: 786978 - RNA, 22 nt, Human
gauguauagcuuuaacugaccc

SEQ ID NO: 786979 - RNA, 22 nt, Human
uguccugugaccuggcaccaca

SEQ ID NO: 786980 - RNA, 22 nt, Human
uuaccacagugccugucuaaug

SEQ ID NO: 786981 - RNA, 22 nt, Human
acaugacagugacuuuauaaga

SEQ ID NO: 786982 - RNA, 22 nt, Human
uuuccacacucacugcacucau

SEQ ID NO: 786983 - RNA, 22 nt, Human
acagggcaccugagguaggaag

SEQ ID NO: 786984 - RNA, 22 nt, Human
uacuacauacagaauuuagaga

SEQ ID NO: 786985 - RNA, 22 nt, Human
auuccaaagccugaauaaugga

SEQ ID NO: 786986 - RNA, 22 nt, Human
auauauacuuugacacauucug

SEQ ID NO: 786987 - RNA, 22 nt, Human
auaguguguaaagugcagugau

SEQ ID NO: 786988 - RNA, 22 nt, Human
gguuuguggagcuggaaacacu

SEQ ID NO: 786989 - RNA, 20 nt, Human
uaugauaauuacaaaauagu

SEQ ID NO: 786990 - RNA, 22 nt, Human
ucacacuuuauuuauuucaugc

SEQ ID NO: 786991 - RNA, 22 nt, Human
uuccaaggcugcuauuuguuuc

SEQ ID NO: 786992 - RNA, 22 nt, Human
cuguccuaugaguacucacuag

SEQ ID NO: 786993 - RNA, 22 nt, Human
uuuugguaauuaaguagauauu

SEQ ID NO: 786994 - RNA, 22 nt, Human
ucuucaugucaugguauauuga

SEQ ID NO: 786995 - RNA, 22 nt, Human
ugcugcucuucaccauggccuc

SEQ ID NO: 786996 - RNA, 22 nt, Human
aaacccugagacuuggggccag

SEQ ID NO: 786997 - RNA, 22 nt, Human
uguuuuaagggucaacugucac

SEQ ID NO: 786998 - RNA, 22 nt, Human
uaaugccuuaugucaaauguaa

SEQ ID NO: 786999 - RNA, 22 nt, Human
cagggaugggauggagucaguu

SEQ ID NO: 787000 - RNA, 22 nt, Human
uugcucuauguuuguaaacaga

SEQ ID NO: 787001 - RNA, 22 nt, Human
ugcacacaguucucaggaaaga

SEQ ID NO: 787002 - RNA, 22 nt, Human
ugcaggaacucgaaaacuauag

SEQ ID NO: 787003 - RNA, 22 nt, Human
guuauguaaucuaacacucagu

SEQ ID NO: 787004 - RNA, 22 nt, Human
cuguauaugugcauacacacac

SEQ ID NO: 787005 - RNA, 22 nt, Human
uacauguuauuucacuauuggu

SEQ ID NO: 787006 - RNA, 22 nt, Human
aauggcuguucucugugauugg

SEQ ID NO: 787007 - RNA, 22 nt, Human
augcuacauuuugguuuauaaa

SEQ ID NO: 787008 - RNA, 22 nt, Human
ccccagcagacucagggcaggu

SEQ ID NO: 787009 - RNA, 22 nt, Human
auaguagcgagaucucagcuca

SEQ ID NO: 787010 - RNA, 22 nt, Human
cucagcaacccacacacggucu

SEQ ID NO: 787011 - RNA, 22 nt, Human
accagucauagaaagcaguggu

SEQ ID NO: 787012 - RNA, 22 nt, Human
aggcuguccucucuugcucagu

SEQ ID NO: 787013 - RNA, 22 nt, Human
uuauugcuaugaugauguguag

SEQ ID NO: 787014 - RNA, 22 nt, Human
uagcaggaggcaguuccucgcu

SEQ ID NO: 787015 - RNA, 22 nt, Human
ugcauguuucuguauguuaaug

SEQ ID NO: 787016 - RNA, 22 nt, Human
ucugagugggaacucucaugac

SEQ ID NO: 787017 - RNA, 22 nt, Human
gcaguggccacauggaggagga

SEQ ID NO: 787018 - RNA, 22 nt, Human
cacagcuaccugcaugccugcu

SEQ ID NO: 787019 - RNA, 22 nt, Human
cugucacagcccgcgucuccuc

SEQ ID NO: 787020 - RNA, 22 nt, Human
acaggacagucuaguaacagua

SEQ ID NO: 787021 - RNA, 22 nt, Human
uguccagaucaaugcccacaug

SEQ ID NO: 787022 - RNA, 22 nt, Human
gaaaauaguucaucacaaugau

SEQ ID NO: 787023 - RNA, 22 nt, Human
auuucauccauuaagaguacuc

SEQ ID NO: 787024 - RNA, 22 nt, Human
auuuacagacguggauuagugc

SEQ ID NO: 787025 - RNA, 22 nt, Human
acaaaugcuuaguucaccaaaa

SEQ ID NO: 787026 - RNA, 22 nt, Human
ucaguaaaugagcaaaaauuuc

SEQ ID NO: 787027 - RNA, 22 nt, Human
cacaucauguuaauucauuaca

SEQ ID NO: 787028 - RNA, 22 nt, Human
agucacuguuuaaucuagcuaa

SEQ ID NO: 787029 - RNA, 22 nt, Human
gaggucaggggagaggcugaug

SEQ ID NO: 787030 - RNA, 22 nt, Human
uucagucuuguugaaaacuugg

SEQ ID NO: 787031 - RNA, 20 nt, Human
ucauaugugguuguauacaa

SEQ ID NO: 787032 - RNA, 22 nt, Human
uacugcaaaccauuuacaguag

SEQ ID NO: 787033 - RNA, 22 nt, Human
ugucaccuugcucauccucgga

SEQ ID NO: 787034 - RNA, 22 nt, Human
aagcaauucacaguucacuuaa

SEQ ID NO: 787035 - RNA, 22 nt, Human
auguaguauuuggaaauguaaa

SEQ ID NO: 787036 - RNA, 22 nt, Human
acaugacagugacuuuauaaga

SEQ ID NO: 787037 - RNA, 22 nt, Human
auuauguagcuaaaaauugugu

SEQ ID NO: 787038 - RNA, 22 nt, Human
uggcauuuuguagcuguguauc

SEQ ID NO: 787039 - RNA, 20 nt, Human
uaugauaauuacaaaauagu

SEQ ID NO: 787040 - RNA, 22 nt, Human
uuugcacuuaaauuuacaacac

SEQ ID NO: 787041 - RNA, 19 nt, Human
ugcucucuggugcuucaug

SEQ ID NO: 787042 - RNA, 22 nt, Human
cuaguauuaagugugaguaaaa

SEQ ID NO: 787043 - RNA, 22 nt, Human
uaucuguagucucaugguuccu

SEQ ID NO: 787044 - RNA, 22 nt, Human
acagcugggaacucacacagca

SEQ ID NO: 787045 - RNA, 20 nt, Human
uccaguuuuggagacauucu

SEQ ID NO: 787046 - RNA, 22 nt, Human
aaaugcacugaauauuccaaau

SEQ ID NO: 787047 - RNA, 22 nt, Human
accaaauaggcuuccuggguug

SEQ ID NO: 787048 - RNA, 22 nt, Human
ggugucagugaagguagaguuu

SEQ ID NO: 787049 - RNA, 22 nt, Human
uugcuauuuugagagucauagu

SEQ ID NO: 787050 - RNA, 22 nt, Human
auauaguuggguuucauucuac

SEQ ID NO: 787051 - RNA, 22 nt, Human
aaaacauuuuacugccaucuca

SEQ ID NO: 787052 - RNA, 22 nt, Human
acaguaaucugggaacuuguua

SEQ ID NO: 787053 - RNA, 22 nt, Human
acugccaguuguuuuguccagu

SEQ ID NO: 787054 - RNA, 22 nt, Human
caguuuuucaaaauuacaugau

SEQ ID NO: 787055 - RNA, 22 nt, Human
cacaguuuugucuugguuucca

SEQ ID NO: 787056 - RNA, 22 nt, Human
uccacagugguggaauuguuca

SEQ ID NO: 787057 - RNA, 22 nt, Human
acugcauucuuuaucccacaac

SEQ ID NO: 787058 - RNA, 22 nt, Human
auagacacagcuaugauuugag

SEQ ID NO: 787059 - RNA, 22 nt, Human
uaaaaucaugacagauugacau

SEQ ID NO: 787060 - RNA, 22 nt, Human
ugugguuuugguucagaaacaa

SEQ ID NO: 787061 - RNA, 22 nt, Human
aaugugcugguaacugcuuugc

SEQ ID NO: 787062 - RNA, 22 nt, Human
aaauugcaaaaguacuuuuagg

SEQ ID NO: 787063 - RNA, 22 nt, Human
aguuggcauuuuauuuaaguau

SEQ ID NO: 787064 - RNA, 22 nt, Human
caguauguuuauuagaacugca

SEQ ID NO: 787065 - RNA, 22 nt, Human
uacaucucaucugugcucuccg

SEQ ID NO: 787066 - RNA, 22 nt, Human
augcaguuagguaauagucuca

SEQ ID NO: 787067 - RNA, 22 nt, Human
caacauuucaaggucuuuagga

SEQ ID NO: 787068 - RNA, 22 nt, Human
aauuauguuugcuuuagaugga

SEQ ID NO: 787069 - RNA, 22 nt, Human
cuccugcagcccucagcagcca

SEQ ID NO: 787070 - RNA, 22 nt, Human
uagcauuucacugaucuucacu

SEQ ID NO: 787071 - RNA, 22 nt, Human
gugcaggacagcacaucuccug

SEQ ID NO: 787072 - RNA, 22 nt, Human
ucuuugcauggacauguguuuu

SEQ ID NO: 787073 - RNA, 22 nt, Human
ugcauguuucuguauguuaaug

SEQ ID NO: 787074 - RNA, 22 nt, Human
gucucuaucauagcugaacccu

SEQ ID NO: 787075 - RNA, 22 nt, Human
uuguaacaguagcugucagcuc

SEQ ID NO: 787076 - RNA, 22 nt, Human
ugcaaauauuccaugcuguuca

SEQ ID NO: 787077 - RNA, 22 nt, Human
cucugcaggcacccaggguggg

SEQ ID NO: 787078 - RNA, 22 nt, Human
cuuaagacaggcucaaagauua

SEQ ID NO: 787079 - RNA, 22 nt, Human
uauaugcagauuuucaucaucg

SEQ ID NO: 787080 - RNA, 20 nt, Human
uuucacaaugaacaugucuc

SEQ ID NO: 787081 - RNA, 22 nt, Human
gcacaaaagguacuucauguag

SEQ ID NO: 787082 - RNA, 18 nt, Human
cgauguguaugugauuug

SEQ ID NO: 787083 - RNA, 22 nt, Human
uacuguauacuacugcuguucu

SEQ ID NO: 787084 - RNA, 22 nt, Human
cacuuuuaacaggagaauuccc

SEQ ID NO: 787085 - RNA, 22 nt, Human
gcaguuaccuauuuuguagaaa

SEQ ID NO: 787086 - RNA, 17 nt, Human
acuuguauugugcuuua

SEQ ID NO: 787087 - RNA, 22 nt, Human
uuuauacuccacucugcaagcg

SEQ ID NO: 787088 - RNA, 22 nt, Human
augaacaguacaaagcacagac

SEQ ID NO: 787089 - RNA, 22 nt, Human
cucuggaucugcccugacgcca

SEQ ID NO: 787090 - RNA, 22 nt, Human
ucugagaaugguggauguggug

SEQ ID NO: 787091 - RNA, 22 nt, Human
agucaggacagauuuucugggg

SEQ ID NO: 787092 - RNA, 22 nt, Human
gugucccaaagauuagaaauca

SEQ ID NO: 787093 - RNA, 21 nt, Human
uuuguucaggggcaaaguuaa

SEQ ID NO: 787094 - RNA, 22 nt, Human
cacuguuuuacauguuauuuaa

SEQ ID NO: 787095 - RNA, 22 nt, Human
uucaguaugcugaaugauuuuu

SEQ ID NO: 787096 - RNA, 22 nt, Human
agucuggagugauuauguggga

SEQ ID NO: 787097 - RNA, 22 nt, Human
aucuaugugggaaucauaauag

SEQ ID NO: 787098 - RNA, 22 nt, Human
ugucauauagaauguucuauga

SEQ ID NO: 787099 - RNA, 22 nt, Human
cauguguauuauucuuguggaa

SEQ ID NO: 787100 - RNA, 22 nt, Human
guuauguaaucuaacacucagu

SEQ ID NO: 787101 - RNA, 22 nt, Human
uccucuucaaaauagcucugaa

SEQ ID NO: 787102 - RNA, 22 nt, Human
gguagacaacuuuguaauagcc

SEQ ID NO: 787103 - RNA, 22 nt, Human
auguaguauuuggaaauguaaa

SEQ ID NO: 787104 - RNA, 22 nt, Human
ucugcuugugucuguccagccu

SEQ ID NO: 787105 - RNA, 21 nt, Human
acuguauuguuuucaaggauc

SEQ ID NO: 787106 - RNA, 22 nt, Human
uuauuuaaaagugguaagauuc

SEQ ID NO: 787107 - RNA, 22 nt, Human
uaacacauagauauuuuaacuu

SEQ ID NO: 787108 - RNA, 22 nt, Human
uaucacauacuucucauccagg

SEQ ID NO: 787109 - RNA, 22 nt, Human
augcacaagguagauuauuauu

SEQ ID NO: 787110 - RNA, 22 nt, Human
uuucuacacuucgugguguuuu

SEQ ID NO: 787111 - RNA, 22 nt, Human
uccaaauagcuggaugauggug

SEQ ID NO: 787112 - RNA, 22 nt, Human
auguccaggaagucuuaacuca

SEQ ID NO: 787113 - RNA, 22 nt, Human
caacuuuagaccccaaguagcu

SEQ ID NO: 787114 - RNA, 22 nt, Human
gugcauauguguguauacaaac

SEQ ID NO: 787115 - RNA, 22 nt, Human
acagacacaggcguggagucgc

SEQ ID NO: 787116 - RNA, 22 nt, Human
ccugugauauuguucauaauau

SEQ ID NO: 787117 - RNA, 22 nt, Human
cugcaguucuucuccucaaggc

SEQ ID NO: 787118 - RNA, 22 nt, Human
cugucuacagaugaaauaagca

SEQ ID NO: 787119 - RNA, 22 nt, Human
ucagacaccgucuauuuugccu

SEQ ID NO: 787120 - RNA, 22 nt, Human
uaucuguauucugacagucacu

SEQ ID NO: 787121 - RNA, 22 nt, Human
uuugugcaagagggccaccuua

SEQ ID NO: 787122 - RNA, 22 nt, Human
caagauauguccuguuacuaag

SEQ ID NO: 787123 - RNA, 20 nt, Human
ucauaugugguuguauacaa

SEQ ID NO: 787124 - RNA, 18 nt, Human
ucagacaaguuagacagg

SEQ ID NO: 787125 - RNA, 23 nt, Human
ugucuggauucgacugugguugg

SEQ ID NO: 787126 - RNA, 22 nt, Human
uuccagcuaacucacaucccuu

SEQ ID NO: 787127 - RNA, 22 nt, Human
aagcauuucagguagagauauu

SEQ ID NO: 787128 - RNA, 22 nt, Human
uuacuguagcuugacauauguc

SEQ ID NO: 787129 - RNA, 22 nt, Human
uccccaguaagccugcacugug

SEQ ID NO: 787130 - RNA, 22 nt, Human
aaugcuuuuugcgaaaugugca

SEQ ID NO: 787131 - RNA, 22 nt, Human
acaagucaguggaauuaauauu

SEQ ID NO: 787132 - RNA, 22 nt, Human
cucuguccugguuuauacuggc

SEQ ID NO: 787133 - RNA, 22 nt, Human
auguacaaucuaucacaagaag

SEQ ID NO: 787134 - RNA, 22 nt, Human
gccauguucuugaaucuggguc

SEQ ID NO: 787135 - RNA, 20 nt, Human
acaacuuaguugagagacua

SEQ ID NO: 787136 - RNA, 22 nt, Human
agaguuuacagaaauaagcugu

SEQ ID NO: 787137 - RNA, 22 nt, Human
ugguacauggguagguaucucu

SEQ ID NO: 787138 - RNA, 21 nt, Human
uccugccuuaguccagagcag

SEQ ID NO: 787139 - RNA, 22 nt, Human
aguaacagguguacagacuauc

SEQ ID NO: 787140 - RNA, 22 nt, Human
cauuaacacuuuggauuuagac

SEQ ID NO: 787141 - RNA, 22 nt, Human
uaucuguuuuuacagugucuuu

SEQ ID NO: 787142 - RNA, 22 nt, Human
augauuuguuaacagacuuaau

SEQ ID NO: 787143 - RNA, 22 nt, Human
aaugcugugauuuauuaaguau

SEQ ID NO: 787144 - RNA, 22 nt, Human
uacaguaaccagucuacuuaga

SEQ ID NO: 787145 - RNA, 22 nt, Human
uguauuucugcuuucucuagua

SEQ ID NO: 787146 - RNA, 22 nt, Human
ccucuucuaggacguccuugug

SEQ ID NO: 787147 - RNA, 22 nt, Human
caagcagauauuuuagucaaga

SEQ ID NO: 787148 - RNA, 22 nt, Human
guuagguagaaguuuacuuuga

SEQ ID NO: 787149 - RNA, 21 nt, Human
guucaauagcucuuugaaugc

SEQ ID NO: 787150 - RNA, 22 nt, Human
aaacacaucauucaugucguca

SEQ ID NO: 787151 - RNA, 22 nt, Human
aaaugcacaauaaaguaaaggc

SEQ ID NO: 787152 - RNA, 22 nt, Human
aguaucagaugugauuaaaggg

SEQ ID NO: 787153 - RNA, 22 nt, Human
ccacuguuuccuuucugcuggc

SEQ ID NO: 787154 - RNA, 22 nt, Human
aggcuguccucucuugcucagu

SEQ ID NO: 787155 - RNA, 22 nt, Human
uuauuuaaaauguagguuggga

SEQ ID NO: 787156 - RNA, 22 nt, Human
guuuccagccuccuggguaaag

SEQ ID NO: 787157 - RNA, 20 nt, Human
aaaaacaguaaugcugaaga

SEQ ID NO: 787158 - RNA, 22 nt, Human
aagacacuuucuaaauagaagu

SEQ ID NO: 787159 - RNA, 22 nt, Human
gaaacuguauguaguuuuuggg

SEQ ID NO: 787160 - RNA, 18 nt, Human
augcucuagucuuuccug

SEQ ID NO: 787161 - RNA, 22 nt, Human
gucuuuuuuacaccuuacauca

SEQ ID NO: 787162 - RNA, 22 nt, Human
acaaucagcacugaguuuaucu

SEQ ID NO: 787163 - RNA, 22 nt, Human
uauacuacgcaccaaacaaagg

SEQ ID NO: 787164 - RNA, 22 nt, Human
agacacuguguacagaaaaaga

SEQ ID NO: 787165 - RNA, 22 nt, Human
uuccugcaggccauagagccug

SEQ ID NO: 787166 - RNA, 21 nt, Human
ccacaauucuaguuacauaug

SEQ ID NO: 787167 - RNA, 22 nt, Human
aggagucaccugcccaaaguca

SEQ ID NO: 787168 - RNA, 23 nt, Human
ugucuccaucucauuacuugggg

SEQ ID NO: 787169 - RNA, 23 nt, Human
auaugucaugcaccagcacuuua

SEQ ID NO: 787170 - RNA, 18 nt, Human
uauaaacacacuuagguu

SEQ ID NO: 787171 - RNA, 22 nt, Human
auuacugaggcaaaguaguuuu

SEQ ID NO: 787172 - RNA, 22 nt, Human
uguaauguuagaaacaauugcu

SEQ ID NO: 787173 - RNA, 22 nt, Human
uugcaguuuugacagaccaaau

SEQ ID NO: 787174 - RNA, 22 nt, Human
aguguguccaggaagcagaugg

SEQ ID NO: 787175 - RNA, 22 nt, Human
aacacuaaaggucaguuagaag

SEQ ID NO: 787176 - RNA, 22 nt, Human
uuuaauuauaucugggcaguua

SEQ ID NO: 787177 - RNA, 22 nt, Human
gugcuaugauuggacagaauag

SEQ ID NO: 787178 - RNA, 22 nt, Human
ugcagcaucuccuugugccaug

SEQ ID NO: 787179 - RNA, 22 nt, Human
auauuuguuuggcagaguucag

SEQ ID NO: 787180 - RNA, 22 nt, Human
uugcaguugcuguauuuaagga

SEQ ID NO: 787181 - RNA, 22 nt, Human
auagcaaaggacaauagucagu

SEQ ID NO: 787182 - RNA, 22 nt, Human
ccuguaccgcgaucugcugcgc

SEQ ID NO: 787183 - RNA, 22 nt, Human
cucucuguuaugcuuucaugaa

SEQ ID NO: 787184 - RNA, 22 nt, Human
augguuuuguccucuuugguuc

SEQ ID NO: 787185 - RNA, 22 nt, Human
gacauacagcccucucccuggu

SEQ ID NO: 787186 - RNA, 22 nt, Human
caauaguaaauuacggaggaga

SEQ ID NO: 787187 - RNA, 22 nt, Human
uaauucuagauugacauuuuga

SEQ ID NO: 787188 - RNA, 22 nt, Human
uucaacaacuugguucaaaugg

SEQ ID NO: 787189 - RNA, 22 nt, Human
auacaacagaaaaugauuauuc

SEQ ID NO: 787190 - RNA, 22 nt, Human
uuuaaacuaacaguacacguug

SEQ ID NO: 787191 - RNA, 22 nt, Human
cauagacauugauagguuauau

SEQ ID NO: 787192 - RNA, 22 nt, Human
gcugcagugagccaagaucgug

SEQ ID NO: 787193 - RNA, 22 nt, Human
uguacacauuaagcucuuuaga

SEQ ID NO: 787194 - RNA, 22 nt, Human
aacaucuagguucucaucgaua

SEQ ID NO: 787195 - RNA, 22 nt, Human
aacagaaugcaggggaugcugc

SEQ ID NO: 787196 - RNA, 22 nt, Human
caguuaaacagauugaguguua

SEQ ID NO: 787197 - RNA, 22 nt, Human
uacuuugucauucuaaccuucc

SEQ ID NO: 787198 - RNA, 22 nt, Human
gucuguccacuuggaagcuccc

SEQ ID NO: 787199 - RNA, 17 nt, Human
aguuggcagccguugcu

SEQ ID NO: 787200 - RNA, 22 nt, Human
aagcauuuuagauaaagcauca

SEQ ID NO: 787201 - RNA, 22 nt, Human
ccacaguuauucauuugugaca

SEQ ID NO: 787202 - RNA, 22 nt, Human
cuuuggcuugcacuauuacacu

SEQ ID NO: 787203 - RNA, 22 nt, Human
caucuuuggagaaacuuccguu

SEQ ID NO: 787204 - RNA, 22 nt, Human
aacaauguucuuuuagcuugaa

SEQ ID NO: 787205 - RNA, 22 nt, Human
agguggagaagagaugggcagu

SEQ ID NO: 787206 - RNA, 22 nt, Human
acaucuuugcucuuauagagcu

SEQ ID NO: 787207 - RNA, 22 nt, Human
agcuguuggcuggcugagcucu

SEQ ID NO: 787208 - RNA, 22 nt, Human
ugcaggcuccaugaggacaggc

SEQ ID NO: 787209 - RNA, 22 nt, Human
ggcccagagacgugcaauguac

SEQ ID NO: 787210 - RNA, 22 nt, Human
agcauacaaacauuugaggcag

SEQ ID NO: 787211 - RNA, 22 nt, Human
ggcccagagucugcaauggagu

SEQ ID NO: 787212 - RNA, 22 nt, Human
ucagcccaucacucacguauua

SEQ ID NO: 787213 - RNA, 22 nt, Human
cagcccagcgcaaacaacuggc

SEQ ID NO: 787214 - RNA, 22 nt, Human
ucuguugaccaagucuucuucc

SEQ ID NO: 787215 - RNA, 22 nt, Human
cacaucuacugaaugagcagug

SEQ ID NO: 787216 - RNA, 22 nt, Human
gcaggcuugcccggccuccuuc

SEQ ID NO: 787217 - RNA, 22 nt, Human
ggccagagcucaaacagucgca

SEQ ID NO: 787218 - RNA, 22 nt, Human
gggacagaggcaaacuagcaga

SEQ ID NO: 787219 - RNA, 22 nt, Human
aggccagauauugugcuaccca

SEQ ID NO: 787220 - RNA, 22 nt, Human
gaacacagguggcccggcaggg

SEQ ID NO: 787221 - RNA, 22 nt, Human
uccucaguuuucuaguauggca

SEQ ID NO: 787222 - RNA, 22 nt, Human
uuggauccaucucaggcauagg

SEQ ID NO: 787223 - RNA, 22 nt, Human
uugagcucccgcuucuucuuug

SEQ ID NO: 787224 - RNA, 22 nt, Human
ccagcugcggucucccaaaguu

SEQ ID NO: 787225 - RNA, 22 nt, Human
agccaggggagucagcugcugg

SEQ ID NO: 787226 - RNA, 22 nt, Human
gcagagugaagggagaggugug

SEQ ID NO: 787227 - RNA, 22 nt, Human
aucuuugugaaucucaacuugg

SEQ ID NO: 787228 - RNA, 22 nt, Human
gagguggguguaucacagguca

SEQ ID NO: 787229 - RNA, 22 nt, Human
ccagcccaaacaagccgccuuc

SEQ ID NO: 787230 - RNA, 22 nt, Human
guuccugggaggcaugggcugg

SEQ ID NO: 787231 - RNA, 22 nt, Human
ggccagggccuggggacugucc

SEQ ID NO: 787232 - RNA, 22 nt, Human
gaauaucccgcuaugcaaagua

SEQ ID NO: 787233 - RNA, 22 nt, Human
gccuagggguaagaguacuggc

SEQ ID NO: 787234 - RNA, 20 nt, Human
auuccacuuauaugaggucc

SEQ ID NO: 787235 - RNA, 22 nt, Human
acaaguuagguuuuaauccaaa

SEQ ID NO: 787236 - RNA, 22 nt, Human
acagaguguuuuuaaguauauu

SEQ ID NO: 787237 - RNA, 22 nt, Human
ccugaaaugacuccagcugagu

SEQ ID NO: 787238 - RNA, 22 nt, Human
acauuugagaugccuuuuaggu

SEQ ID NO: 787239 - RNA, 22 nt, Human
uuucuacagcuggugcaacuuu

SEQ ID NO: 787240 - RNA, 22 nt, Human
cacaucuauggagacagagagu

SEQ ID NO: 787241 - RNA, 22 nt, Human
ucaggggcugugcauuucccag

SEQ ID NO: 787242 - RNA, 22 nt, Human
caucuuuguuucaucuguccag

SEQ ID NO: 787243 - RNA, 23 nt, Human
ccagggccccuacaccacugucc

SEQ ID NO: 787244 - RNA, 22 nt, Human
cacucugagcccaagcaggcug

SEQ ID NO: 787245 - RNA, 22 nt, Human
aguggaaggucaggggacagug

SEQ ID NO: 787246 - RNA, 22 nt, Human
aggcccugcccagugccacaag

SEQ ID NO: 787247 - RNA, 22 nt, Human
aggcccuggucaggucuggcug

SEQ ID NO: 787248 - RNA, 18 nt, Human
ugacauuuccagagugua

SEQ ID NO: 787249 - RNA, 22 nt, Human
agggcuaggaauggaacuggag

SEQ ID NO: 787250 - RNA, 22 nt, Human
uucuagcuguugcuguuuauag

SEQ ID NO: 787251 - RNA, 23 nt, Human
gcuuccagaagacucauugacau

SEQ ID NO: 787252 - RNA, 22 nt, Human
aguuugaaagcuuaacaguaca

SEQ ID NO: 787253 - RNA, 22 nt, Human
caguccucugcaacaccccuuc

SEQ ID NO: 787254 - RNA, 22 nt, Human
cacuuucuguguugugcaaaaa

SEQ ID NO: 787255 - RNA, 22 nt, Human
aggcccugcauuguacugaggg

SEQ ID NO: 787256 - RNA, 22 nt, Human
aagccaggagcgaggccucggc

SEQ ID NO: 787257 - RNA, 22 nt, Human
aagcuguuguucauccugaauu

SEQ ID NO: 787258 - RNA, 22 nt, Human
ugagcaggggagagcgaaugug

SEQ ID NO: 787259 - RNA, 22 nt, Human
aagggggagagguguuuggaug

SEQ ID NO: 787260 - RNA, 22 nt, Human
gauccacagcccgcuugggccc

SEQ ID NO: 787261 - RNA, 21 nt, Human
auuccacuuuuccuucaggga

SEQ ID NO: 787262 - RNA, 22 nt, Human
guggaggguuugcaaugugcag

SEQ ID NO: 787263 - RNA, 20 nt, Human
acaggggcagcacaauaaug

SEQ ID NO: 787264 - RNA, 22 nt, Human
uggaaggggagcuggaaagggg

SEQ ID NO: 787265 - RNA, 22 nt, Human
ugucuccaugugauaguggccu

SEQ ID NO: 787266 - RNA, 22 nt, Human
uucuuccucacacucucaccca

SEQ ID NO: 787267 - RNA, 20 nt, Human
acaggcgcuggggagauggc

SEQ ID NO: 787268 - RNA, 22 nt, Human
caguuaaagugcuuaucacaga

SEQ ID NO: 787269 - RNA, 22 nt, Human
gcuggagauagaauggccacug

SEQ ID NO: 787270 - RNA, 22 nt, Human
cuuucauccgcagaugagccuc

SEQ ID NO: 787271 - RNA, 22 nt, Human
gagcccagcugcggcccucagc

SEQ ID NO: 787272 - RNA, 22 nt, Human
uagaggccgaaugcugagcugg

SEQ ID NO: 787273 - RNA, 22 nt, Human
acagggccuuugauggauuaua

SEQ ID NO: 787274 - RNA, 22 nt, Human
cugcaggaggauccugagagug

SEQ ID NO: 787275 - RNA, 22 nt, Human
uggcugcagaucaagggcaggc

SEQ ID NO: 787276 - RNA, 22 nt, Human
ugggccagaggcauggagcuau

SEQ ID NO: 787277 - RNA, 22 nt, Human
ggggccagguccagcuuccaaa

SEQ ID NO: 787278 - RNA, 22 nt, Human
auuauccagcaccaaugucaga

SEQ ID NO: 787279 - RNA, 22 nt, Human
aguuaacacaaguaagauucca

SEQ ID NO: 787280 - RNA, 22 nt, Human
uggagagucucaaggcaggaaa

SEQ ID NO: 787281 - RNA, 22 nt, Human
cccagagagcauuuggacaaag

SEQ ID NO: 787282 - RNA, 22 nt, Human
cccagaguucaaacccugcguc

SEQ ID NO: 787283 - RNA, 22 nt, Human
gugucccagccccacaggccug

SEQ ID NO: 787284 - RNA, 22 nt, Human
gcuggccuugaggugucuuuau

SEQ ID NO: 787285 - RNA, 22 nt, Human
caucuuugccauaugauguaau

SEQ ID NO: 787286 - RNA, 23 nt, Human
ccuggcucaccccuuauguccag

SEQ ID NO: 787287 - RNA, 22 nt, Human
agcaggcuuuccacagaaggag

SEQ ID NO: 787288 - RNA, 22 nt, Human
agggacaguuacaucaucagac

SEQ ID NO: 787289 - RNA, 22 nt, Human
ugagcagggagcugggcugagc

SEQ ID NO: 787290 - RNA, 22 nt, Human
agaaaaaucuuggcgcuugucu

SEQ ID NO: 787291 - RNA, 22 nt, Human
ucagucuucaaaucugagucgu

SEQ ID NO: 787292 - RNA, 21 nt, Human
ugcuggccaugugcugggcau

SEQ ID NO: 787293 - RNA, 22 nt, Human
cagggccucugugggcucucuc

SEQ ID NO: 787294 - RNA, 22 nt, Human
uucuacuucugacacuguuugu

SEQ ID NO: 787295 - RNA, 22 nt, Human
uguuucagucccuguguucaau

SEQ ID NO: 787296 - RNA, 22 nt, Human
uuuggcgucucucaggagcuca

SEQ ID NO: 787297 - RNA, 22 nt, Human
aacaauguguucagcacugugg

SEQ ID NO: 787298 - RNA, 22 nt, Human
cagcccugccauggagccuccu

SEQ ID NO: 787299 - RNA, 22 nt, Human
ugucuccagaaagcaccaggag

SEQ ID NO: 787300 - RNA, 22 nt, Human
auuaaauuaaguggcuaauuua

SEQ ID NO: 787301 - RNA, 22 nt, Human
agggccacaguggggccugaga

SEQ ID NO: 787302 - RNA, 22 nt, Human
ugagcaggugagucuagggcag

SEQ ID NO: 787303 - RNA, 22 nt, Human
cugggcucagugucucacuccu

SEQ ID NO: 787304 - RNA, 22 nt, Human
ccagagugacgugaagugugaa

SEQ ID NO: 787305 - RNA, 22 nt, Human
agcuguuuaauaaaugucuguu

SEQ ID NO: 787306 - RNA, 20 nt, Human
acuguuaguauacuugugcc

SEQ ID NO: 787307 - RNA, 22 nt, Human
acacugugucuagcauuuuaca

SEQ ID NO: 787308 - RNA, 22 nt, Human
ucuaaagauuuggauucauuug

SEQ ID NO: 787309 - RNA, 22 nt, Human
gugucccaggccucuggaauua

SEQ ID NO: 787310 - RNA, 22 nt, Human
uggagcugguaaacagugacau

SEQ ID NO: 787311 - RNA, 22 nt, Human
ugcaaaaagagcgaggagcccu

SEQ ID NO: 787312 - RNA, 22 nt, Human
caggggcucuaaugcaugauca

SEQ ID NO: 787313 - RNA, 22 nt, Human
auccacaguggggguggcggaa

SEQ ID NO: 787314 - RNA, 22 nt, Human
agaguggagagaaacaacucug

SEQ ID NO: 787315 - RNA, 23 nt, Human
agaggccagccuuuggagacacc

SEQ ID NO: 787316 - RNA, 22 nt, Human
agaaaucccaaggcaucaacca

SEQ ID NO: 787317 - RNA, 22 nt, Human
auucuuuccagacacugauugc

SEQ ID NO: 787318 - RNA, 21 nt, Human
agagacagagaaaguaacauu

SEQ ID NO: 787319 - RNA, 21 nt, Human
gauccacugaccuggggaucc

SEQ ID NO: 787320 - RNA, 22 nt, Human
gucaucuugcuguuuuagaucu

SEQ ID NO: 787321 - RNA, 22 nt, Human
cuguuagucuuuugcaggagag

SEQ ID NO: 787322 - RNA, 22 nt, Human
aagauccaugggaauguuuggc

SEQ ID NO: 787323 - RNA, 22 nt, Human
gacaggguacgggcuaggcaca

SEQ ID NO: 787324 - RNA, 22 nt, Human
gaguggggucugggcaucaguc

SEQ ID NO: 787325 - RNA, 19 nt, Human
ucuuucauuucuagcucug

SEQ ID NO: 787326 - RNA, 22 nt, Human
ggguguccuucuguggacucug

SEQ ID NO: 787327 - RNA, 17 nt, Human
ugcaggcuguuauagcc

SEQ ID NO: 787328 - RNA, 22 nt, Human
ucaacaguugcacuggagaggu

SEQ ID NO: 787329 - RNA, 22 nt, Human
gaguuaaauauuuucugaaguu

SEQ ID NO: 787330 - RNA, 22 nt, Human
ggaacagggauuuggccugguu

SEQ ID NO: 787331 - RNA, 22 nt, Human
cagggccaguucucgcagcagu

SEQ ID NO: 787332 - RNA, 22 nt, Human
gcagagugguuucagaguugag

SEQ ID NO: 787333 - RNA, 22 nt, Human
ccuggcuccagcugccuguccu

SEQ ID NO: 787334 - RNA, 22 nt, Human
ggggaaaggccauggcaagaac

SEQ ID NO: 787335 - RNA, 22 nt, Human
cauauccagguuucuuugguuu

SEQ ID NO: 787336 - RNA, 22 nt, Human
acuucuucuucagcugggggau

SEQ ID NO: 787337 - RNA, 22 nt, Human
aguggaguugaguugauggauu

SEQ ID NO: 787338 - RNA, 20 nt, Human
cagggacagcaguggguuuu

SEQ ID NO: 787339 - RNA, 22 nt, Human
uggagaguguagacuucagagu

SEQ ID NO: 787340 - RNA, 22 nt, Human
uguuaaauguuccuuuacugga

SEQ ID NO: 787341 - RNA, 22 nt, Human
ucuguuuugugucucucuggug

SEQ ID NO: 787342 - RNA, 22 nt, Human
gaggagugccagccguggaguc

SEQ ID NO: 787343 - RNA, 22 nt, Human
uauaaauuauuaggcugcuaaa

SEQ ID NO: 787344 - RNA, 22 nt, Human
ugcugcagcuuugucacaugca

SEQ ID NO: 787345 - RNA, 22 nt, Human
uccagccccggcuuccuuacag

SEQ ID NO: 787346 - RNA, 18 nt, Human
gcccagagcccucuuauu

SEQ ID NO: 787347 - RNA, 22 nt, Human
aacuucuaaucuguacaguuuu

SEQ ID NO: 787348 - RNA, 22 nt, Human
cagggccagcgcccaggcccag

SEQ ID NO: 787349 - RNA, 22 nt, Human
aagcuguuaucuucuggcggac

SEQ ID NO: 787350 - RNA, 22 nt, Human
ggcuguggggaccaacaggacu

SEQ ID NO: 787351 - RNA, 17 nt, Human
aggugcuggagcaucag

SEQ ID NO: 787352 - RNA, 22 nt, Human
aucaucuugcuuucuguuuacu

SEQ ID NO: 787353 - RNA, 22 nt, Human
aggcuuggagguucuguagcca

SEQ ID NO: 787354 - RNA, 22 nt, Human
cagcuguugucucucacauauu

SEQ ID NO: 787355 - RNA, 22 nt, Human
ugaggggagacagaguggacuc

SEQ ID NO: 787356 - RNA, 22 nt, Human
guucuauuacucccugcuucuu

SEQ ID NO: 787357 - RNA, 20 nt, Human
aaaaacaguaaugcugaaga

SEQ ID NO: 787358 - RNA, 22 nt, Human
caguuaaaugaugugcccuaga

SEQ ID NO: 787359 - RNA, 22 nt, Human
uccacagugguugaacuaguuu

SEQ ID NO: 787360 - RNA, 21 nt, Human
ugcuguccuagaaccagggcc

SEQ ID NO: 787361 - RNA, 22 nt, Human
aaacaaauagugcaugggaauu

SEQ ID NO: 787362 - RNA, 22 nt, Human
uccugcaggccagaggggugag

SEQ ID NO: 787363 - RNA, 22 nt, Human
gggacaggcugagacuugagcu

SEQ ID NO: 787364 - RNA, 22 nt, Human
ugcagcugauuaaagggcagac

SEQ ID NO: 787365 - RNA, 22 nt, Human
cagugaaaucacaacuuuaguu

SEQ ID NO: 787366 - RNA, 22 nt, Human
gggacaggcaaagguaugcuuc

SEQ ID NO: 787367 - RNA, 22 nt, Human
aaacuguauauuuauggcaugu

SEQ ID NO: 787368 - RNA, 19 nt, Human
cuccacagggauugugauu

SEQ ID NO: 787369 - RNA, 22 nt, Human
aggugggguucagucucagccg

SEQ ID NO: 787370 - RNA, 22 nt, Human
aagcagaggguauggccagguu

SEQ ID NO: 787371 - RNA, 22 nt, Human
gcugggcuggaaggccaaggca

SEQ ID NO: 787372 - RNA, 21 nt, Human
gagugggacaugggagugguu

SEQ ID NO: 787373 - RNA, 22 nt, Human
gcugggcuucucaaugcugccu

SEQ ID NO: 787374 - RNA, 22 nt, Human
gugucccacucuggaggugaag

SEQ ID NO: 787375 - RNA, 22 nt, Human
auuaaauuggaucugcauaguu

SEQ ID NO: 787376 - RNA, 22 nt, Human
agcugcugggauacaguaguga

SEQ ID NO: 787377 - RNA, 19 nt, Human
ccagcccacagugacuuuc

SEQ ID NO: 787378 - RNA, 22 nt, Human
caguggagugggacuggucuga

SEQ ID NO: 787379 - RNA, 22 nt, Human
agcuguuuuacucagaaacaua

SEQ ID NO: 787380 - RNA, 20 nt, Human
ccaggccugggccugcucua

SEQ ID NO: 787381 - RNA, 22 nt, Human
aaacaaauuucaagcugugaca

SEQ ID NO: 787382 - RNA, 22 nt, Human
ggguguccagggcgugucugga

SEQ ID NO: 787383 - RNA, 22 nt, Human
ugucugcagugccacaguggga

SEQ ID NO: 787384 - RNA, 22 nt, Human
aauccauuuacucuuuacaaga

SEQ ID NO: 787385 - RNA, 22 nt, Human
ugcaggcucugugugugccugg

SEQ ID NO: 787386 - RNA, 22 nt, Human
cacaguuuugcccagggcuucu

SEQ ID NO: 787387 - RNA, 22 nt, Human
cagcccugucccugagggaccu

SEQ ID NO: 787388 - RNA, 22 nt, Human
guacagggccccucagcagggc

SEQ ID NO: 787389 - RNA, 22 nt, Human
accuguuuagaaagcuuaugag

SEQ ID NO: 787390 - RNA, 22 nt, Human
ugcaggugugguuccucagcca

SEQ ID NO: 787391 - RNA, 22 nt, Human
ggugucccaggccagcugugug

SEQ ID NO: 787392 - RNA, 22 nt, Human
gugucccaauguucaggacggc

SEQ ID NO: 787393 - RNA, 22 nt, Human
gcugucccgcugacuuccagcu

SEQ ID NO: 787394 - RNA, 22 nt, Human
cccagaguuggucaggggaccc

SEQ ID NO: 787395 - RNA, 20 nt, Human
ugcugggcaugcaguggaaa

SEQ ID NO: 787396 - RNA, 19 nt, Human
uugcuggcauuugaucucu

SEQ ID NO: 787397 - RNA, 22 nt, Human
ugcacgugugagcauucacaug

SEQ ID NO: 787398 - RNA, 22 nt, Human
acacauaucuaagauagaugac

SEQ ID NO: 787399 - RNA, 22 nt, Human
ugagcagggacuuugaguguag

SEQ ID NO: 787400 - RNA, 22 nt, Human
ugcaaaacuucucagagccuuu

SEQ ID NO: 787401 - RNA, 21 nt, Human
gcccagaguccucccacucca

SEQ ID NO: 787402 - RNA, 22 nt, Human
gcagcuuugaagacuuauuugc

SEQ ID NO: 787403 - RNA, 22 nt, Human
ugaggggagguuggggcacauc

SEQ ID NO: 787404 - RNA, 22 nt, Human
gauccacaguuugaugaucaua

SEQ ID NO: 787405 - RNA, 22 nt, Human
gcugcaguguuggaccucaggg

SEQ ID NO: 787406 - RNA, 22 nt, Human
caagucugucugcuccugugug

SEQ ID NO: 787407 - RNA, 22 nt, Human
gcccagaguucaaggcugcagu

SEQ ID NO: 787408 - RNA, 22 nt, Human
agccagggauggcagugcccag

SEQ ID NO: 787409 - RNA, 21 nt, Human
ugcacuuugggggacaggcug

SEQ ID NO: 787410 - RNA, 22 nt, Human
uuacagaauguucuuccaacag

SEQ ID NO: 787411 - RNA, 22 nt, Human
aggccagaacagcucugcacca

SEQ ID NO: 787412 - RNA, 22 nt, Human
uuucuacagaagauacacugcu

SEQ ID NO: 787413 - RNA, 22 nt, Human
ccagagccggcucccucagcuu

SEQ ID NO: 787414 - RNA, 22 nt, Human
agggccugugcugaguagacga

SEQ ID NO: 787415 - RNA, 23 nt, Human
ugcuguccaacagacuggccaug

SEQ ID NO: 787416 - RNA, 22 nt, Human
gcacagagucacuagcuaagca

SEQ ID NO: 787417 - RNA, 22 nt, Human
acuguuuucuguaaagggccag

SEQ ID NO: 787418 - RNA, 22 nt, Human
cauacaagcgugcaugugcuug

SEQ ID NO: 787419 - RNA, 20 nt, Human
cccuggagagaagcuccacg

SEQ ID NO: 787420 - RNA, 21 nt, Human
gacaggggaagaagcaaggag

SEQ ID NO: 787421 - RNA, 20 nt, Human
aucaucuuuacaaugucagu

SEQ ID NO: 787422 - RNA, 22 nt, Human
agugcuuuagcauccaacuguc

SEQ ID NO: 787423 - RNA, 22 nt, Human
aagccaggugugcccaggaucc

SEQ ID NO: 787424 - RNA, 22 nt, Human
cccagagaauuccacauagagg

SEQ ID NO: 787425 - RNA, 22 nt, Human
uaaagcaagacacacccauagc

SEQ ID NO: 787426 - RNA, 22 nt, Human
cugugugucauuugucaauccu

SEQ ID NO: 787427 - RNA, 22 nt, Human
ugacauuuuuauaagagucaaa

SEQ ID NO: 787428 - RNA, 20 nt, Human
uccagcccugcuucucucuu

SEQ ID NO: 787429 - RNA, 22 nt, Human
uacgagcgcucuugcuggccaa

SEQ ID NO: 787430 - RNA, 23 nt, Human
agcaggcugcuucuccacagcug

SEQ ID NO: 787431 - RNA, 22 nt, Human
ggcucagguuaccagucccucc

SEQ ID NO: 787432 - RNA, 22 nt, Human
cccagaguauuugugauguuag

SEQ ID NO: 787433 - RNA, 22 nt, Human
gaguuaaaguaccuuuguaugu

SEQ ID NO: 787434 - RNA, 22 nt, Human
aaagacaguggauucaaaaucc

SEQ ID NO: 787435 - RNA, 22 nt, Human
agcuuaucuuguuaguuucauu

SEQ ID NO: 787436 - RNA, 21 nt, Human
ugagcaggugcagggaagugg

SEQ ID NO: 787437 - RNA, 21 nt, Human
ucagcccaggugucuuugccc

SEQ ID NO: 787438 - RNA, 20 nt, Human
uaugaguauuacuuucagga

SEQ ID NO: 787439 - RNA, 22 nt, Human
ugggcuagcagggaagagagac

SEQ ID NO: 787440 - RNA, 22 nt, Human
ucaucuuuguaucccuaacaca

SEQ ID NO: 787441 - RNA, 20 nt, Human
caucuuuggcaggacuccuu

SEQ ID NO: 787442 - RNA, 19 nt, Human
ccaggccucuggggccugu

SEQ ID NO: 787443 - RNA, 22 nt, Human
agcagggugugguggcccugga

SEQ ID NO: 787444 - RNA, 22 nt, Human
ucauauaccugcaugugcaugu

SEQ ID NO: 787445 - RNA, 22 nt, Human
uccugcagccuugggcuggagc

SEQ ID NO: 787446 - RNA, 22 nt, Human
gucccagcuucccacuagcagc

SEQ ID NO: 787447 - RNA, 22 nt, Human
ugagcagggacuuuggagucug

SEQ ID NO: 787448 - RNA, 22 nt, Human
auccacaggguguguuaagaug

SEQ ID NO: 787449 - RNA, 22 nt, Human
agcuccagccgcugauggguuu

SEQ ID NO: 787450 - RNA, 22 nt, Human
aggccagagaggggaccagccu

SEQ ID NO: 787451 - RNA, 22 nt, Human
ugcugucaagguuacaugcuuu

SEQ ID NO: 787452 - RNA, 22 nt, Human
uuaaauuauugagggauuguca

SEQ ID NO: 787453 - RNA, 18 nt, Human
uucuuuucaugugaucuc

SEQ ID NO: 787454 - RNA, 22 nt, Human
agugcuuuuauaucauuaaucc

SEQ ID NO: 787455 - RNA, 22 nt, Human
ggcccagauuagaagcugaaug

SEQ ID NO: 787456 - RNA, 18 nt, Human
caguccuguuucuacagg

SEQ ID NO: 787457 - RNA, 22 nt, Human
gugcagguguuuuggcugccag

SEQ ID NO: 787458 - RNA, 22 nt, Human
ccaggccuggccaggggaugcc

SEQ ID NO: 787459 - RNA, 22 nt, Human
uuaaagaauagugccccuauug

SEQ ID NO: 787460 - RNA, 22 nt, Human
uggagaguaaauggcagaauca

SEQ ID NO: 787461 - RNA, 18 nt, Human
ccaguaccuccuccucuc

SEQ ID NO: 787462 - RNA, 22 nt, Human
uuucuuucaauucuccuaaugc

SEQ ID NO: 787463 - RNA, 22 nt, Human
aagcacagcuggaacagcagga

SEQ ID NO: 787464 - RNA, 22 nt, Human
cuguuagugaucaaagggagag

SEQ ID NO: 787465 - RNA, 22 nt, Human
ucuaaauuacuuugggcaguau

SEQ ID NO: 787466 - RNA, 22 nt, Human
uuaacauuguccuuagcagauu

SEQ ID NO: 787467 - RNA, 22 nt, Human
caucuuugagacagcauuaccc

SEQ ID NO: 787468 - RNA, 18 nt, Human
ggucaggggcggagagaa

SEQ ID NO: 787469 - RNA, 21 nt, Human
ugagcaggugcugcuuuuaug

SEQ ID NO: 787470 - RNA, 22 nt, Human
agugcagagaccuggucaggca

SEQ ID NO: 787471 - RNA, 22 nt, Human
uaaaaaucuuaugaauggcaag

SEQ ID NO: 787472 - RNA, 22 nt, Human
acagguggggcacuuggagccu

SEQ ID NO: 787473 - RNA, 19 nt, Human
ccaguaguauagcacaguc

SEQ ID NO: 787474 - RNA, 22 nt, Human
ucuacagguggggccuggcaau

SEQ ID NO: 787475 - RNA, 22 nt, Human
agguggagacccagagaaggcg

SEQ ID NO: 787476 - RNA, 22 nt, Human
uggagaugcacgagcaggugga

SEQ ID NO: 787477 - RNA, 22 nt, Human
auccacagucagaacgggccua

SEQ ID NO: 787478 - RNA, 19 nt, Human
uccuccuuacuuccucuug

SEQ ID NO: 787479 - RNA, 22 nt, Human
ucaggcugaggucaucugcauc

SEQ ID NO: 787480 - RNA, 22 nt, Human
gucaucuucucucagcccaggc

SEQ ID NO: 787481 - RNA, 22 nt, Human
uggcugggagcuggaacugggc

SEQ ID NO: 787482 - RNA, 22 nt, Human
gcauuccuugaguucccugugc

SEQ ID NO: 787483 - RNA, 22 nt, Human
gaaccuguuuauguuaccugcg

SEQ ID NO: 787484 - RNA, 22 nt, Human
uucuuuuccuguggcucaucca

SEQ ID NO: 787485 - RNA, 22 nt, Human
ggcccagagggucaggagcuga

SEQ ID NO: 787486 - RNA, 22 nt, Human
ccagagcuucggggcggcugua

SEQ ID NO: 787487 - RNA, 19 nt, Human
acaggggccuuuccagggu

SEQ ID NO: 787488 - RNA, 22 nt, Human
ugcugcagaaauucugugagga

SEQ ID NO: 787489 - RNA, 22 nt, Human
gauccacaggaaccaaaacgca

SEQ ID NO: 787490 - RNA, 22 nt, Human
ccagggcccacggccagaauag

SEQ ID NO: 787491 - RNA, 21 nt, Human
ggccugaaaaagugaaugcuu

SEQ ID NO: 787492 - RNA, 22 nt, Human
cugcagaauggggccaagugga

SEQ ID NO: 787493 - RNA, 19 nt, Human
gcacacaguagggcuggca

SEQ ID NO: 787494 - RNA, 18 nt, Human
ugagcaggggcugaccuu

SEQ ID NO: 787495 - RNA, 22 nt, Human
ugucccagucaaggcugucauc

SEQ ID NO: 787496 - RNA, 22 nt, Human
caucuaccuccacccuauauau

SEQ ID NO: 787497 - RNA, 19 nt, Human
caaggguugggucugucau

SEQ ID NO: 787498 - RNA, 22 nt, Human
gcccagggcagggcaagaguga

SEQ ID NO: 787499 - RNA, 22 nt, Human
uuucuaggucuuccauacugcc

SEQ ID NO: 787500 - RNA, 22 nt, Human
cugcagcuguagaggacagugg

SEQ ID NO: 787501 - RNA, 22 nt, Human
gcacaauuccaugggacagccc

SEQ ID NO: 787502 - RNA, 18 nt, Human
uccaccagucaaucuguc

SEQ ID NO: 787503 - RNA, 22 nt, Human
accuuccucuaagacauuuagc

SEQ ID NO: 787504 - RNA, 22 nt, Human
ccaggcccuugcaagucccacc

SEQ ID NO: 787505 - RNA, 21 nt, Human
gggccacaccuucugcagacc

SEQ ID NO: 787506 - RNA, 22 nt, Human
uagcccaggcuggagggcagug

SEQ ID NO: 787507 - RNA, 22 nt, Human
ccuguaggauauuguagaauac

SEQ ID NO: 787508 - RNA, 22 nt, Human
acaucuuuauacuaguccuuga

SEQ ID NO: 787509 - RNA, 22 nt, Human
auuaaagaaacccagcauguga

SEQ ID NO: 787510 - RNA, 22 nt, Human
uaucuuuguaucaaucuccauu

SEQ ID NO: 787511 - RNA, 22 nt, Human
auccacaggucauguaaugugg

SEQ ID NO: 787512 - RNA, 22 nt, Human
uggagcagaaauuugaagccau

SEQ ID NO: 787513 - RNA, 22 nt, Human
acaggggcuccgaaggugaggg

SEQ ID NO: 787514 - RNA, 22 nt, Human
uagcccagaagagggaagcaac

SEQ ID NO: 787515 - RNA, 22 nt, Human
aauuaugguauguucaacaacu

SEQ ID NO: 787516 - RNA, 22 nt, Human
ggaacaggaaaggagggaugcu

SEQ ID NO: 787517 - RNA, 22 nt, Human
gggaccagugucugugagaaaa

SEQ ID NO: 787518 - RNA, 22 nt, Human
ugagcaggcaaacaaugguuau

SEQ ID NO: 787519 - RNA, 22 nt, Human
agcaguuguagucauggaaaau

SEQ ID NO: 787520 - RNA, 22 nt, Human
uccuggcuuagguuuccagaac

SEQ ID NO: 787521 - RNA, 22 nt, Human
ugagcaggucaagacuccagcu

SEQ ID NO: 787522 - RNA, 22 nt, Human
guaaagaaguuuuugaaugcau

SEQ ID NO: 787523 - RNA, 22 nt, Human
ggcuggagacaacguccugccc

SEQ ID NO: 787524 - RNA, 19 nt, Human
acaggggcuagcggaagca

SEQ ID NO: 787525 - RNA, 22 nt, Human
cagggccugucacgacgcucau

SEQ ID NO: 787526 - RNA, 22 nt, Human
acagggccagccugggaccugg

SEQ ID NO: 787527 - RNA, 22 nt, Human
uugaaauuggguguggcuguca

SEQ ID NO: 787528 - RNA, 22 nt, Human
cacaguuugguauagaagugau

SEQ ID NO: 787529 - RNA, 22 nt, Human
agccuuagaggaaaacauuagu

SEQ ID NO: 787530 - RNA, 22 nt, Human
ggccagagcugaccuaucaaug

SEQ ID NO: 787531 - RNA, 22 nt, Human
aauauccagguagaugucuucu

SEQ ID NO: 787532 - RNA, 22 nt, Human
gagguggauguugcagugagcu

SEQ ID NO: 787533 - RNA, 22 nt, Human
gggauagguuuggaagaggugg

SEQ ID NO: 787534 - RNA, 20 nt, Human
acuggaguacccuagagaag

SEQ ID NO: 787535 - RNA, 22 nt, Human
cuggaguguuauggucaaguca

SEQ ID NO: 787536 - RNA, 22 nt, Human
aaagaaaccuaucagccacaug

SEQ ID NO: 787537 - RNA, 22 nt, Human
uggagcagcauucauccagcag

SEQ ID NO: 787538 - RNA, 22 nt, Human
cccuggagcuagucugagcaga

SEQ ID NO: 787539 - RNA, 17 nt, Human
uguuuuuucccuguucu

SEQ ID NO: 787540 - RNA, 22 nt, Human
uuucuacaauuuuuggcaugag

SEQ ID NO: 787541 - RNA, 22 nt, Human
ggccaaauccuccaugguggcu

SEQ ID NO: 787542 - RNA, 22 nt, Human
acaggcagguaauuuacauauu

SEQ ID NO: 787543 - RNA, 22 nt, Human
uuugucauauagacuauuguga

SEQ ID NO: 787544 - RNA, 22 nt, Human
gcugcuggccccacaugcucca

SEQ ID NO: 787545 - RNA, 22 nt, Human
acaucuuuuuggaaacggcuga

SEQ ID NO: 787546 - RNA, 22 nt, Human
aguaaacaguuucuuagaagaa

SEQ ID NO: 787547 - RNA, 22 nt, Human
caggagcagaggguggucagca

SEQ ID NO: 787548 - RNA, 22 nt, Human
gccaccugcgggccguggugga

SEQ ID NO: 787549 - RNA, 22 nt, Human
ccuggagaggcgcugcagagga

SEQ ID NO: 787550 - RNA, 22 nt, Human
ggcuccaguuugugccuucagc

SEQ ID NO: 787551 - RNA, 22 nt, Human
cagaguggagaaacgcuucguc

SEQ ID NO: 787552 - RNA, 22 nt, Human
uucauucugcaguucucagcuc

SEQ ID NO: 787553 - RNA, 17 nt, Human
ugucccaggcucaacgc

SEQ ID NO: 787554 - RNA, 22 nt, Human
ggaucaggcugaagcuaggacu

SEQ ID NO: 787555 - RNA, 22 nt, Human
auuaaauuagcaaacugugaaa

SEQ ID NO: 787556 - RNA, 22 nt, Human
ugggaagggccgauggagccuc

SEQ ID NO: 787557 - RNA, 20 nt, Human
gcucagagccugaacuucau

SEQ ID NO: 787558 - RNA, 22 nt, Human
ugaguggacaccugcuucuuua

SEQ ID NO: 787559 - RNA, 22 nt, Human
aggccaggcaacauucugaagu

SEQ ID NO: 787560 - RNA, 22 nt, Human
cuggccucucugagcagggagc

SEQ ID NO: 787561 - RNA, 22 nt, Human
cuuaaauucuuaaugcccucau

SEQ ID NO: 787562 - RNA, 22 nt, Human
ugucccaggccucauguugcca

SEQ ID NO: 787563 - RNA, 22 nt, Human
acaguuaauaaguaguaaguca

SEQ ID NO: 787564 - RNA, 22 nt, Human
uggaagagguggaaguggcuuc

SEQ ID NO: 787565 - RNA, 22 nt, Human
gaaaagaacugcaugggauuaa

SEQ ID NO: 787566 - RNA, 22 nt, Human
ugccauuugccccagcacuguc

SEQ ID NO: 787567 - RNA, 22 nt, Human
uggagaguaauuucugaagacc

SEQ ID NO: 787568 - RNA, 22 nt, Human
uaugagcagacagugguuuuac

SEQ ID NO: 787569 - RNA, 22 nt, Human
gcuggagaaacaggaggaggaa

SEQ ID NO: 787570 - RNA, 22 nt, Human
gccaagaguuuccagcugcaag

SEQ ID NO: 787571 - RNA, 22 nt, Human
gcucaggggaaugggcugccgu

SEQ ID NO: 787572 - RNA, 22 nt, Human
aagagaaggauucugagccugg

SEQ ID NO: 787573 - RNA, 22 nt, Human
cacuuuggaugccacuggucua

SEQ ID NO: 787574 - RNA, 22 nt, Human
gugaaauauuuaacguccaggu

SEQ ID NO: 787575 - RNA, 17 nt, Human
ugggccaguagaaggga

SEQ ID NO: 787576 - RNA, 22 nt, Human
auuaaauuuucacuaggcuccc

SEQ ID NO: 787577 - RNA, 22 nt, Human
acaguuaauuaacauuaagggg

SEQ ID NO: 787578 - RNA, 22 nt, Human
uauugcugacuuguucaguguu

SEQ ID NO: 787579 - RNA, 21 nt, Human
acagggcuucagggaggguua

SEQ ID NO: 787580 - RNA, 22 nt, Human
cacauguaguaagcaggcaaug

SEQ ID NO: 787581 - RNA, 22 nt, Human
cugcagagcuugucuggaugug

SEQ ID NO: 787582 - RNA, 22 nt, Human
caucuuugcacccucaaaaccu

SEQ ID NO: 787583 - RNA, 22 nt, Human
gcaucuuucuguccauucagca

SEQ ID NO: 787584 - RNA, 22 nt, Human
agcuuaaacucuuugaaguuau

SEQ ID NO: 787585 - RNA, 22 nt, Human
uccuggcugaguucccaagucg

SEQ ID NO: 787586 - RNA, 22 nt, Human
guaaauuauuucaagaucaucu

SEQ ID NO: 787587 - RNA, 22 nt, Human
acacauauguggcaacuguaga

SEQ ID NO: 787588 - RNA, 22 nt, Human
uggugaucagucaacugucuuc

SEQ ID NO: 787589 - RNA, 21 nt, Human
guucuauuuugcaaacuucug

SEQ ID NO: 787590 - RNA, 22 nt, Human
ugcugcaguguuugcugaaguu

SEQ ID NO: 787591 - RNA, 22 nt, Human
ggacaggguaaguacuagugug

SEQ ID NO: 787592 - RNA, 22 nt, Human
cagcccugcuuccccgcuaguu

SEQ ID NO: 787593 - RNA, 22 nt, Human
cauauccaauaugacuaguguu

SEQ ID NO: 787594 - RNA, 22 nt, Human
auccacaggaggguuuggaaaa

SEQ ID NO: 787595 - RNA, 22 nt, Human
cagccacucggccauaaaggcu

SEQ ID NO: 787596 - RNA, 22 nt, Human
ccagagggagccaccagggugu

SEQ ID NO: 787597 - RNA, 22 nt, Human
caucuuugaacucuguauaaac

SEQ ID NO: 787598 - RNA, 22 nt, Human
ggggugggcgugcagggacacc

SEQ ID NO: 787599 - RNA, 22 nt, Human
caucuuugguuuucuauaugcc

SEQ ID NO: 787600 - RNA, 22 nt, Human
cugcagagaugaagaagguggc

SEQ ID NO: 787601 - RNA, 22 nt, Human
ugcuggccaacaaggcuccaag

SEQ ID NO: 787602 - RNA, 22 nt, Human
ggccagaggugguacauagcuu

SEQ ID NO: 787603 - RNA, 22 nt, Human
aaggccagagcguguccugccu

SEQ ID NO: 787604 - RNA, 22 nt, Human
cagagugcauggugcuguucau

SEQ ID NO: 787605 - RNA, 22 nt, Human
aguacugucagcaggguguuga

SEQ ID NO: 787606 - RNA, 22 nt, Human
gucugcugacagagcauggacc

SEQ ID NO: 787607 - RNA, 22 nt, Human
gccacacuuauucucaugcaca

SEQ ID NO: 787608 - RNA, 22 nt, Human
guggaggucccgggcaggagca

SEQ ID NO: 787609 - RNA, 22 nt, Human
gggcuggagucuucugaaagcc

SEQ ID NO: 787610 - RNA, 22 nt, Human
gcuggcucccagaggccccagc

SEQ ID NO: 787611 - RNA, 22 nt, Human
uggagaggaaagugcaguuuug

SEQ ID NO: 787612 - RNA, 22 nt, Human
ggagagcuagugccugccagua

SEQ ID NO: 787613 - RNA, 22 nt, Human
gaaacaauacuuguccucacua

SEQ ID NO: 787614 - RNA, 22 nt, Human
ugacauuuaucaaagaaauggu

SEQ ID NO: 787615 - RNA, 17 nt, Human
aggccagaugaggcaag

SEQ ID NO: 787616 - RNA, 22 nt, Human
uuugaaacccgucacuuugagu

SEQ ID NO: 787617 - RNA, 22 nt, Human
gcuggcucuucaguggagauag

SEQ ID NO: 787618 - RNA, 22 nt, Human
cuggagugaggucugggagccu

SEQ ID NO: 787619 - RNA, 21 nt, Human
ccagcccagcugugucccagc

SEQ ID NO: 787620 - RNA, 22 nt, Human
gggccuggugcuucugacuccu

SEQ ID NO: 787621 - RNA, 22 nt, Human
gcaggccugguuuacaugguag

SEQ ID NO: 787622 - RNA, 22 nt, Human
acaguuaaucaaauggcauaug

SEQ ID NO: 787623 - RNA, 22 nt, Human
cucucgcgugugccuuuccgcu

SEQ ID NO: 787624 - RNA, 22 nt, Human
ggcaggcuuugagaaagagcau

SEQ ID NO: 787625 - RNA, 22 nt, Human
gggcuagaauccgcgucucuug

SEQ ID NO: 787626 - RNA, 22 nt, Human
gcucagggugcaguguccauga

SEQ ID NO: 787627 - RNA, 22 nt, Human
agggcuggcaucucuaaugcug

SEQ ID NO: 787628 - RNA, 22 nt, Human
acagguggccccgagggagugg

SEQ ID NO: 787629 - RNA, 22 nt, Human
gcuuucaauuaugucagccugu

SEQ ID NO: 787630 - RNA, 22 nt, Human
gcccagagagaugcuguagacc

SEQ ID NO: 787631 - RNA, 22 nt, Human
aacacuguaacagcaucauuuu

SEQ ID NO: 787632 - RNA, 22 nt, Human
gcucagggaguuucacagugua

SEQ ID NO: 787633 - RNA, 22 nt, Human
agagucaguuaugucaagugcu

SEQ ID NO: 787634 - RNA, 22 nt, Human
ggcucaggggccaggccugucc

SEQ ID NO: 787635 - RNA, 22 nt, Human
cuuaaauuuucaucuacaagaa

SEQ ID NO: 787636 - RNA, 18 nt, Human
gucuggaggucaggagcu

SEQ ID NO: 787637 - RNA, 22 nt, Human
agagugcaaccgaaacaagcag

SEQ ID NO: 787638 - RNA, 22 nt, Human
uuuaaauuauaguuaaugucug

SEQ ID NO: 787639 - RNA, 22 nt, Human
gcagagugagccgaggcugcuc

SEQ ID NO: 787640 - RNA, 22 nt, Human
ggcaggcugggagucaucagag

SEQ ID NO: 787641 - RNA, 22 nt, Human
gaggggaagacuucuggacagu

SEQ ID NO: 787642 - RNA, 22 nt, Human
auugcuggcugccaucuugccc

SEQ ID NO: 787643 - RNA, 22 nt, Human
gcaggccuaagagaaggcauug

SEQ ID NO: 787644 - RNA, 22 nt, Human
caguuaaacagauugaguguua

SEQ ID NO: 787645 - RNA, 22 nt, Human
gauccacagggcccuggcccag

SEQ ID NO: 787646 - RNA, 22 nt, Human
gcuguugcaaucaaggccaugg

SEQ ID NO: 787647 - RNA, 22 nt, Human
cagggccuuguucaggagugaa

SEQ ID NO: 787648 - RNA, 22 nt, Human
uuaaauuaggacucuaguucug

SEQ ID NO: 787649 - RNA, 22 nt, Human
gcauguuuugcaacaagugacc

SEQ ID NO: 787650 - RNA, 22 nt, Human
ccacauuuuugauacucucacu

SEQ ID NO: 787651 - RNA, 22 nt, Human
gugggaguggggaagcagagug

SEQ ID NO: 787652 - RNA, 22 nt, Human
aaaauccacaacgcucauuuca

SEQ ID NO: 787653 - RNA, 22 nt, Human
caguuaaaaugugcuauaagaa

SEQ ID NO: 787654 - RNA, 22 nt, Human
gcuccaggugaauccucucacc

SEQ ID NO: 787655 - RNA, 22 nt, Human
aaacuggauuaccaggcuggug

SEQ ID NO: 787656 - RNA, 22 nt, Human
cuggugcuggagccuagucccu

SEQ ID NO: 787657 - RNA, 22 nt, Human
acacuguucuuugcacugagaa

SEQ ID NO: 787658 - RNA, 22 nt, Human
cacuggaggucaguggagcacu

SEQ ID NO: 787659 - RNA, 22 nt, Human
ucugaaauggggcugaagcacu

SEQ ID NO: 787660 - RNA, 22 nt, Human
cccagaguggagggugcagaau

SEQ ID NO: 787661 - RNA, 22 nt, Human
agugcagcucccucaccugcuu

SEQ ID NO: 787662 - RNA, 22 nt, Human
agugggaggaaguggugauauu

SEQ ID NO: 787663 - RNA, 22 nt, Human
gcagcuuucuaagcuuuauugc

SEQ ID NO: 787664 - RNA, 22 nt, Human
guuuaagaggguuucauuccca

SEQ ID NO: 787665 - RNA, 22 nt, Human
gauccacagcugcgguaggaga

SEQ ID NO: 787666 - RNA, 22 nt, Human
gggccagaccucuucucaggga

SEQ ID NO: 787667 - RNA, 22 nt, Human
agguggagugugcagggagagc

SEQ ID NO: 787668 - RNA, 22 nt, Human
uugcugccuuuguacucugaug

SEQ ID NO: 787669 - RNA, 22 nt, Human
gaguuaaaagcccucucagcag

SEQ ID NO: 787670 - RNA, 21 nt, Human
aaguggagaagaaaagcugga

SEQ ID NO: 787671 - RNA, 22 nt, Human
gcugggcucagaccuagugaac

SEQ ID NO: 787672 - RNA, 22 nt, Human
cugcaggagggcuggggaagcc

SEQ ID NO: 787673 - RNA, 20 nt, Human
cacucugagggaguccaugu

SEQ ID NO: 787674 - RNA, 21 nt, Human
ugcaggcuguuuaagaggcaa

SEQ ID NO: 787675 - RNA, 22 nt, Human
gggccagacccuuggcgaucug

SEQ ID NO: 787676 - RNA, 22 nt, Human
auucagucaaaaaugauggaga

SEQ ID NO: 787677 - RNA, 23 nt, Human
gacagggcugacuuggcagcugc

SEQ ID NO: 787678 - RNA, 22 nt, Human
agguggcugguccaggcugcag

SEQ ID NO: 787679 - RNA, 22 nt, Human
agcccagaugguagcccuagaa

SEQ ID NO: 787680 - RNA, 22 nt, Human
gcuccaggcagcauaguggaug

SEQ ID NO: 787681 - RNA, 22 nt, Human
accugaauugauuugaccugua

SEQ ID NO: 787682 - RNA, 22 nt, Human
agguggggaaaccagcgauccc

SEQ ID NO: 787683 - RNA, 22 nt, Human
uauauccagaaaaucaguucau

SEQ ID NO: 787684 - RNA, 22 nt, Human
gggacaggccccucgcuagcuu

SEQ ID NO: 787685 - RNA, 20 nt, Human
aguaggggaaugcaagagca

SEQ ID NO: 787686 - RNA, 20 nt, Human
ggcaggcuuuauauggaggg

SEQ ID NO: 787687 - RNA, 22 nt, Human
agggccugacacccuugccagc

SEQ ID NO: 787688 - RNA, 22 nt, Human
ugggacucacucuuuuggccag

SEQ ID NO: 787689 - RNA, 22 nt, Human
ugggacaggaugaccagaaggu

SEQ ID NO: 787690 - RNA, 22 nt, Human
ccagcccaugcccuuauagcau

SEQ ID NO: 787691 - RNA, 22 nt, Human
cacauuuacauauaaaacuuuc

SEQ ID NO: 787692 - RNA, 22 nt, Human
ugagcaggacugaccggccuua

SEQ ID NO: 787693 - RNA, 20 nt, Human
agguggcuccugcugggggu

SEQ ID NO: 787694 - RNA, 22 nt, Human
cuggaguguaaagagcauagaa

SEQ ID NO: 787695 - RNA, 22 nt, Human
caucuuugggcugcauggaagg

SEQ ID NO: 787696 - RNA, 22 nt, Human
uguuaaauguuuugcuaguguc

SEQ ID NO: 787697 - RNA, 22 nt, Human
cuggcuguggauuaucacaggc

SEQ ID NO: 787698 - RNA, 22 nt, Human
aguaacaugaguuuuucuaaug

SEQ ID NO: 787699 - RNA, 18 nt, Human
gcccagaggucugggccc

SEQ ID NO: 787700 - RNA, 22 nt, Human
agaggccagguccagaguuugu

SEQ ID NO: 787701 - RNA, 22 nt, Human
caucauuucacuuagaugaagu

SEQ ID NO: 787702 - RNA, 22 nt, Human
gaggggaaagugugaggcugcg

SEQ ID NO: 787703 - RNA, 20 nt, Human
uguaaauaggcauuguaguu

SEQ ID NO: 787704 - RNA, 22 nt, Human
gcagugaaaaagugcacccugu

SEQ ID NO: 787705 - RNA, 22 nt, Human
auccugaaaauugaauggaagg

SEQ ID NO: 787706 - RNA, 22 nt, Human
ugcugcagcuaaggugaggugc

SEQ ID NO: 787707 - RNA, 22 nt, Human
gcuggcucugaugggcuccagg

SEQ ID NO: 787708 - RNA, 22 nt, Human
cuaaagaagcuagcaaucuaua

SEQ ID NO: 787709 - RNA, 17 nt, Human
uaaauacacaaggguau

SEQ ID NO: 787710 - RNA, 22 nt, Human
ucucuuugucugcucuuaguug

SEQ ID NO: 787711 - RNA, 22 nt, Human
ugcagagaaaccaguggaggac

SEQ ID NO: 787712 - RNA, 19 nt, Human
ugcugcuguccuugcaggg

SEQ ID NO: 787713 - RNA, 22 nt, Human
gcccagaguuugaagauacagu

SEQ ID NO: 787714 - RNA, 22 nt, Human
ugggaagguuagcaguuuguca

SEQ ID NO: 787715 - RNA, 22 nt, Human
cccagagucucugcucuugccu

SEQ ID NO: 787716 - RNA, 22 nt, Human
ugggacagguuggagagaagca

SEQ ID NO: 787717 - RNA, 22 nt, Human
cacauuuagagguuagcauggu

SEQ ID NO: 787718 - RNA, 22 nt, Human
ugcuggcuuccugugcacagca

SEQ ID NO: 787719 - RNA, 22 nt, Human
agaggccaugcuagaggccugg

SEQ ID NO: 787720 - RNA, 22 nt, Human
uuaggcugggcuacaacaacug

SEQ ID NO: 787721 - RNA, 19 nt, Human
guucuuucauaguaagagc

SEQ ID NO: 787722 - RNA, 22 nt, Human
cagcuguucuugggacagacag

SEQ ID NO: 787723 - RNA, 18 nt, Human
ugcugggcauuaggcuua

SEQ ID NO: 787724 - RNA, 19 nt, Human
ggcaggcuggauagagagg

SEQ ID NO: 787725 - RNA, 22 nt, Human
caaauccagaucccagucguag

SEQ ID NO: 787726 - RNA, 22 nt, Human
ugagcaggcucccacuucagug

SEQ ID NO: 787727 - RNA, 21 nt, Human
uuucuuucuggcucucacagu

SEQ ID NO: 787728 - RNA, 22 nt, Human
uaaggcagauguggaaucaauu

SEQ ID NO: 787729 - RNA, 22 nt, Human
ugcuguccuguuuuggaguaau

SEQ ID NO: 787730 - RNA, 22 nt, Human
aggcccagcugggccaggaaca

SEQ ID NO: 787731 - RNA, 22 nt, Human
acauguguguauacguauuuau

SEQ ID NO: 787732 - RNA, 22 nt, Human
cacauuuaagugcuuguucaga

SEQ ID NO: 787733 - RNA, 22 nt, Human
gagcucuauguggcuggcaugu

SEQ ID NO: 787734 - RNA, 22 nt, Human
uuucuacauuuguaaccagauu

SEQ ID NO: 787735 - RNA, 22 nt, Human
uaguuaaaccaccauucuggua

SEQ ID NO: 787736 - RNA, 22 nt, Human
uuucuuuccagagugauuggca

SEQ ID NO: 787737 - RNA, 22 nt, Human
ccagagggacguuaccaguuca

SEQ ID NO: 787738 - RNA, 22 nt, Human
cagugccacaggaauggccaau

SEQ ID NO: 787739 - RNA, 23 nt, Human
agcuguuucuugugaguugagug

SEQ ID NO: 787740 - RNA, 22 nt, Human
agcccagagccucuccuaaagg

SEQ ID NO: 787741 - RNA, 22 nt, Human
auccacagaaggaacuugaaag

SEQ ID NO: 787742 - RNA, 22 nt, Human
ugagcaggagauaaacagguag

SEQ ID NO: 787743 - RNA, 22 nt, Human
cagucuuugaugcauccuagcc

SEQ ID NO: 787744 - RNA, 20 nt, Human
accaggccccgggcccugca

SEQ ID NO: 787745 - RNA, 22 nt, Human
ucacuuuccucaucacgacuag

SEQ ID NO: 787746 - RNA, 22 nt, Human
ugcugcaggaacuuaagaagcu

SEQ ID NO: 787747 - RNA, 22 nt, Human
uccacagucuauuuuuagucua

SEQ ID NO: 787748 - RNA, 22 nt, Human
agcuggaggggccagcaggugu

SEQ ID NO: 787749 - RNA, 22 nt, Human
uggaagggagcuggaauuugga

SEQ ID NO: 787750 - RNA, 22 nt, Human
agccacaggccaugagauacca

SEQ ID NO: 787751 - RNA, 22 nt, Human
uugcuggcuugaagauagagga

SEQ ID NO: 787752 - RNA, 22 nt, Human
gcaggcuugagagaucagaugg

SEQ ID NO: 787753 - RNA, 22 nt, Human
acacaguuuuucagacagagau

SEQ ID NO: 787754 - RNA, 22 nt, Human
uaaggcagugagaagaaacagg

SEQ ID NO: 787755 - RNA, 22 nt, Human
aguaaacagaaagcaagaugau

SEQ ID NO: 787756 - RNA, 22 nt, Human
acaggugguagaguggaaagag

SEQ ID NO: 787757 - RNA, 22 nt, Human
ggccagagucuauaugcagaca

SEQ ID NO: 787758 - RNA, 22 nt, Human
caugggcuacagaagcaugcug

SEQ ID NO: 787759 - RNA, 22 nt, Human
cuuagcaaggcugccuggagaa

SEQ ID NO: 787760 - RNA, 17 nt, Human
gcuccaggcgugaguga

SEQ ID NO: 787761 - RNA, 22 nt, Human
gggcuggaggagauccagaggc

SEQ ID NO: 787762 - RNA, 22 nt, Human
caggugcucccagagaagugcu

SEQ ID NO: 787763 - RNA, 19 nt, Human
agcaggccacagggccagc

SEQ ID NO: 787764 - RNA, 22 nt, Human
ggccuauguuccugggcuaggg

SEQ ID NO: 787765 - RNA, 22 nt, Human
gucugcuguagguaggacagca

SEQ ID NO: 787766 - RNA, 22 nt, Human
aucuucccaggcuggggagagg

SEQ ID NO: 787767 - RNA, 22 nt, Human
agaggccaggcugcagagggau

SEQ ID NO: 787768 - RNA, 22 nt, Human
gauucacucauauuuuacguuu

SEQ ID NO: 787769 - RNA, 22 nt, Human
gaucuuugcaaacuuugucacu

SEQ ID NO: 787770 - RNA, 19 nt, Human
cuguugcuggggcucucuu

SEQ ID NO: 787771 - RNA, 22 nt, Human
augucccagcugagagacaacu

SEQ ID NO: 787772 - RNA, 22 nt, Human
ugcaggcuggcagugcugaaau

SEQ ID NO: 787773 - RNA, 22 nt, Human
auggagugccuguggcaguggg

SEQ ID NO: 787774 - RNA, 22 nt, Human
guggggagggagaugcugaagu

SEQ ID NO: 787775 - RNA, 22 nt, Human
agguggagugaaggaaaggcag

SEQ ID NO: 787776 - RNA, 22 nt, Human
uagagaaacagaaccaacaggg

SEQ ID NO: 787777 - RNA, 22 nt, Human
gcaucuuuagccucuccguggc

SEQ ID NO: 787778 - RNA, 22 nt, Human
ucugaaauauauuuugaguguu

SEQ ID NO: 787779 - RNA, 22 nt, Human
auuucucacugagcagauaaaa

SEQ ID NO: 787780 - RNA, 22 nt, Human
ugcugggcauuuuuauggcucc

SEQ ID NO: 787781 - RNA, 22 nt, Human
ugcuggcugucccuaccuggcu

SEQ ID NO: 787782 - RNA, 22 nt, Human
cuucuuuccuuccuccaguggc

SEQ ID NO: 787783 - RNA, 22 nt, Human
uggacaggcuccuagggguucc

SEQ ID NO: 787784 - RNA, 22 nt, Human
cugcaguagcagagcugaguag

SEQ ID NO: 787785 - RNA, 22 nt, Human
aguuggagaagaggucgggaau

SEQ ID NO: 787786 - RNA, 22 nt, Human
acagguggaggcuuuaggaggu

SEQ ID NO: 787787 - RNA, 22 nt, Human
ccagagcuccagggcuacagaa

SEQ ID NO: 787788 - RNA, 20 nt, Human
acugugugaucuggaaagcu

SEQ ID NO: 787789 - RNA, 22 nt, Human
uccuggcucuaaguccugagug

SEQ ID NO: 787790 - RNA, 22 nt, Human
gcuggccugggcucaagaccag

SEQ ID NO: 787791 - RNA, 22 nt, Human
ucaucuuuaccccuugcuucaa

SEQ ID NO: 787792 - RNA, 21 nt, Human
gcccagagggagccaagccca

SEQ ID NO: 787793 - RNA, 22 nt, Human
gggauaggagauugggaguguu

SEQ ID NO: 787794 - RNA, 22 nt, Human
gcuggcucugugguaguuggca

SEQ ID NO: 787795 - RNA, 22 nt, Human
aguaaaaucuuaagcacagugg

SEQ ID NO: 787796 - RNA, 22 nt, Human
uuagugcaaaccucagagacac

SEQ ID NO: 787797 - RNA, 22 nt, Human
cagcccaggccgacaguuccuc

SEQ ID NO: 787798 - RNA, 22 nt, Human
acaguuaacuggagagcgaguu

SEQ ID NO: 787799 - RNA, 22 nt, Human
uggaagagggagcuggguggcc

SEQ ID NO: 787800 - RNA, 19 nt, Human
ugcugcaggaugcugcugg

SEQ ID NO: 787801 - RNA, 22 nt, Human
gcagagugaagcaguauggaaa

SEQ ID NO: 787802 - RNA, 22 nt, Human
uggagagucucugagccagggc

SEQ ID NO: 787803 - RNA, 20 nt, Human
guggagaggcuggcgggacu

SEQ ID NO: 787804 - RNA, 22 nt, Human
uuccacuggcuuucagugaucu

SEQ ID NO: 787805 - RNA, 22 nt, Human
aggacagguguagugggcucug

SEQ ID NO: 787806 - RNA, 22 nt, Human
ugcuggccuguccacgggcugu

SEQ ID NO: 787807 - RNA, 22 nt, Human
cagaguggaguuuuucagcggg

SEQ ID NO: 787808 - RNA, 18 nt, Human
agcaacaggaucccaggg

SEQ ID NO: 787809 - RNA, 22 nt, Human
cagaguggcaugaaugaagccu

SEQ ID NO: 787810 - RNA, 22 nt, Human
ucagccacuucccucuggucag

SEQ ID NO: 787811 - RNA, 22 nt, Human
gccuguuuuagaugcauugaug

SEQ ID NO: 787812 - RNA, 22 nt, Human
cuucagcugcaguuauguuuag

SEQ ID NO: 787813 - RNA, 22 nt, Human
uugaucucuguugcugucuuug

SEQ ID NO: 787814 - RNA, 22 nt, Human
uucugcaggagcccuaguguau

SEQ ID NO: 787815 - RNA, 22 nt, Human
acaguuaauuguuguugggugu

SEQ ID NO: 787816 - RNA, 22 nt, Human
gccagaguugaggcaguuuauu

SEQ ID NO: 787817 - RNA, 22 nt, Human
auaaacaagacuggccaacuuu

SEQ ID NO: 787818 - RNA, 22 nt, Human
uuugcugggcucugugccagac

SEQ ID NO: 787819 - RNA, 22 nt, Human
caggcuuggcagggaggcuggu

SEQ ID NO: 787820 - RNA, 21 nt, Human
ugggcucuuuaacccaggcac

SEQ ID NO: 787821 - RNA, 22 nt, Human
agccacagucugaugccugaga

SEQ ID NO: 787822 - RNA, 22 nt, Human
cuacagcagagaccagccacau

SEQ ID NO: 787823 - RNA, 22 nt, Human
cacauuuaaagguugaagcuga

SEQ ID NO: 787824 - RNA, 22 nt, Human
uucuuucccaguagaugugaaa

SEQ ID NO: 787825 - RNA, 22 nt, Human
gugcuucacugaccuguuuuca

SEQ ID NO: 787826 - RNA, 22 nt, Human
ccagagcugauuccugggacuu

SEQ ID NO: 787827 - RNA, 22 nt, Human
aaagacagauggcaaggaugau

SEQ ID NO: 787828 - RNA, 22 nt, Human
cagggcuguuagcugcugcucu

SEQ ID NO: 787829 - RNA, 22 nt, Human
accucccagaaaguuuugcagg

SEQ ID NO: 787830 - RNA, 19 nt, Human
cccuagaguaagacugcau

SEQ ID NO: 787831 - RNA, 22 nt, Human
uuauagaaggagcauucacuua

SEQ ID NO: 787832 - RNA, 20 nt, Human
gcacagagaugagcaaagua

SEQ ID NO: 787833 - RNA, 22 nt, Human
acaggcugggcgcuuccugcgg

SEQ ID NO: 787834 - RNA, 22 nt, Human
guaaagaaggcaaccugguuau

SEQ ID NO: 787835 - RNA, 17 nt, Human
acaagcaguggccaugg

SEQ ID NO: 787836 - RNA, 22 nt, Human
ucugggccugauggcuaaagcc

SEQ ID NO: 787837 - RNA, 22 nt, Human
guuaaagaagaauaguuccuuu

SEQ ID NO: 787838 - RNA, 22 nt, Human
cccagagucacaugggguguuc

SEQ ID NO: 787839 - RNA, 22 nt, Human
aauauccauugggagcaaaugg

SEQ ID NO: 787840 - RNA, 22 nt, Human
agcaggugcauggcgagcgcgg

SEQ ID NO: 787841 - RNA, 22 nt, Human
uuuaaauucugucugccgcuua

SEQ ID NO: 787842 - RNA, 22 nt, Human
cugggcuccuaaccauccaggu

SEQ ID NO: 787843 - RNA, 23 nt, Human
cccagagucaucuguagcugugg

SEQ ID NO: 787844 - RNA, 22 nt, Human
acagguggacacagcagcaguc

SEQ ID NO: 787845 - RNA, 22 nt, Human
uagcucaaagguuaagugugga

SEQ ID NO: 787846 - RNA, 20 nt, Human
caguccugucccugcugccc

SEQ ID NO: 787847 - RNA, 22 nt, Human
ucacucugaaugguacugagga

SEQ ID NO: 787848 - RNA, 22 nt, Human
agccagggcugcagguuccuug

SEQ ID NO: 787849 - RNA, 22 nt, Human
gcugggcuguaguuugcugacc

SEQ ID NO: 787850 - RNA, 22 nt, Human
ccagcccaaagucaccccggga

SEQ ID NO: 787851 - RNA, 20 nt, Human
uggacaggggcauagguugc

SEQ ID NO: 787852 - RNA, 22 nt, Human
acagagcaguaagaacacagcu

SEQ ID NO: 787853 - RNA, 22 nt, Human
ugggacagauuauaagucugca

SEQ ID NO: 787854 - RNA, 22 nt, Human
aagagaaggcccugacccaccc

SEQ ID NO: 787855 - RNA, 22 nt, Human
agccagggaugcagcacaguga

SEQ ID NO: 787856 - RNA, 22 nt, Human
ugggaaggggagcuggaaagga

SEQ ID NO: 787857 - RNA, 22 nt, Human
gacagccaugcacuucugcugu

SEQ ID NO: 787858 - RNA, 22 nt, Human
ccagggcuccccagaaguaccc

SEQ ID NO: 787859 - RNA, 22 nt, Human
cacagcccccuugacacucugg

SEQ ID NO: 787860 - RNA, 22 nt, Human
auuuggcuguaguaacuggauc

SEQ ID NO: 787861 - RNA, 22 nt, Human
aguccuuagaacacuguaucug

SEQ ID NO: 787862 - RNA, 22 nt, Human
ugggagaacccagggucaggcu

SEQ ID NO: 787863 - RNA, 19 nt, Human
ccaggccugcgggcguugg

SEQ ID NO: 787864 - RNA, 22 nt, Human
uucuuuccucccagccuuugga

SEQ ID NO: 787865 - RNA, 22 nt, Human
agcccagauaaaguacaaccau

SEQ ID NO: 787866 - RNA, 22 nt, Human
cccagaguggacgguggccccu

SEQ ID NO: 787867 - RNA, 21 nt, Human
ugcaggcugugcgcuccugcc

SEQ ID NO: 787868 - RNA, 20 nt, Human
gcagagugugagagggugaa

SEQ ID NO: 787869 - RNA, 22 nt, Human
cagaaguggcaucauucaagag

SEQ ID NO: 787870 - RNA, 22 nt, Human
ucagcccagaccaccucauugc

SEQ ID NO: 787871 - RNA, 22 nt, Human
uggaaguggcagaggaaguggu

SEQ ID NO: 787872 - RNA, 22 nt, Human
agcugaugccauguggaacagu

SEQ ID NO: 787873 - RNA, 22 nt, Human
ugucccagguccuagaugacca

SEQ ID NO: 787874 - RNA, 23 nt, Human
ugggauagaauuucauggcugcu

SEQ ID NO: 787875 - RNA, 22 nt, Human
ggcccagaaaaaggcuuagaau

SEQ ID NO: 787876 - RNA, 22 nt, Human
cacaguuaugggaaacguaguu

SEQ ID NO: 787877 - RNA, 22 nt, Human
gauugagucugaggaugcugca

SEQ ID NO: 787878 - RNA, 22 nt, Human
agccacagagagggagcugcaa

SEQ ID NO: 787879 - RNA, 22 nt, Human
caggccugagacaucugagaua

SEQ ID NO: 787880 - RNA, 22 nt, Human
gugucccagcagcacauuggcu

SEQ ID NO: 787881 - RNA, 22 nt, Human
uggagugcaguugggaggacac

SEQ ID NO: 787882 - RNA, 22 nt, Human
ccuggcuccaaagcugugacuc

SEQ ID NO: 787883 - RNA, 22 nt, Human
uucugcagcaugaggcuggagc

SEQ ID NO: 787884 - RNA, 22 nt, Human
ugggacagugaccccagagguc

SEQ ID NO: 787885 - RNA, 22 nt, Human
ucugaaauaggaaagcaaaugg

SEQ ID NO: 787886 - RNA, 22 nt, Human
cacacuguugaggacgagaugu

SEQ ID NO: 787887 - RNA, 21 nt, Human
ccugaaauucucacuagcuua

SEQ ID NO: 787888 - RNA, 20 nt, Human
agagugggugucacaggcug

SEQ ID NO: 787889 - RNA, 22 nt, Human
cagggccaugaggcacaggguc

SEQ ID NO: 787890 - RNA, 22 nt, Human
aggccagacagcuagaaacagg

SEQ ID NO: 787891 - RNA, 22 nt, Human
ccuggcucuagaggccacuccu

SEQ ID NO: 787892 - RNA, 19 nt, Human
uucuuuccacaucuucucu

SEQ ID NO: 787893 - RNA, 19 nt, Human
cccuggagaauacccugga

SEQ ID NO: 787894 - RNA, 22 nt, Human
acaggcgcuggcagagagaaaa

SEQ ID NO: 787895 - RNA, 22 nt, Human
ccuggcucauuaugugccccca

SEQ ID NO: 787896 - RNA, 22 nt, Human
auucuuucaaggaauaguuauu

SEQ ID NO: 787897 - RNA, 21 nt, Human
gcugucuccuccuugcaccag

SEQ ID NO: 787898 - RNA, 22 nt, Human
cagcaggcuguggaaauccugg

SEQ ID NO: 787899 - RNA, 22 nt, Human
uccccuggcaccuaguccuacu

SEQ ID NO: 787900 - RNA, 22 nt, Human
augucccaagauacagcuagag

SEQ ID NO: 787901 - RNA, 22 nt, Human
acaucuuuguuucuuaguguau

SEQ ID NO: 787902 - RNA, 22 nt, Human
gccucucuccuuggcuugcagu

SEQ ID NO: 787903 - RNA, 22 nt, Human
ucagcccaguuuuaucaucugu

SEQ ID NO: 787904 - RNA, 22 nt, Human
gccuagagaagcuuacugaagc

SEQ ID NO: 787905 - RNA, 22 nt, Human
cugcaguaaccacuguaggugu

SEQ ID NO: 787906 - RNA, 22 nt, Human
ucauaaauaguugugccugaau

SEQ ID NO: 787907 - RNA, 22 nt, Human
acaggugguaaaauggacuguc

SEQ ID NO: 787908 - RNA, 19 nt, Human
uccagcagugcuugaaauc

SEQ ID NO: 787909 - RNA, 22 nt, Human
guucuauucauugcuccacgag

SEQ ID NO: 787910 - RNA, 22 nt, Human
uaggacagaguucccugauggc

SEQ ID NO: 787911 - RNA, 19 nt, Human
cagguggcgcucuacaggg

SEQ ID NO: 787912 - RNA, 22 nt, Human
aggugggguguuggauguuuau

SEQ ID NO: 787913 - RNA, 22 nt, Human
aucuuugucacucuacugucua

SEQ ID NO: 787914 - RNA, 22 nt, Human
auucuuucauauaaaggcucag

SEQ ID NO: 787915 - RNA, 22 nt, Human
ugauggccagucgcacuggagg

SEQ ID NO: 787916 - RNA, 22 nt, Human
cagguggcaaaugaguagcauu

SEQ ID NO: 787917 - RNA, 22 nt, Human
gcuggccugcugggcaccaccg

SEQ ID NO: 787918 - RNA, 22 nt, Human
gcuggcucagggggauuagcaa

SEQ ID NO: 787919 - RNA, 22 nt, Human
guuacaauguucuucaguucug

SEQ ID NO: 787920 - RNA, 22 nt, Human
gcagucuuugaaugugaaauag

SEQ ID NO: 787921 - RNA, 22 nt, Human
gcuggcucuuuuugccgggcuc

SEQ ID NO: 787922 - RNA, 22 nt, Human
uggaagaggccagaaaguggga

SEQ ID NO: 787923 - RNA, 22 nt, Human
aacaaugugauugaagcuagaa

SEQ ID NO: 787924 - RNA, 22 nt, Human
gccuggagugguccugcugccc

SEQ ID NO: 787925 - RNA, 22 nt, Human
gugggguguccagcagcgagcu

SEQ ID NO: 787926 - RNA, 22 nt, Human
gccugcagccccucugcaguag

SEQ ID NO: 787927 - RNA, 21 nt, Human
gcuggcucucugacgugcuuu

SEQ ID NO: 787928 - RNA, 22 nt, Human
cuaaagaauuuugcuugaccag

SEQ ID NO: 787929 - RNA, 22 nt, Human
aaugcuguccaauaggaacaua

SEQ ID NO: 787930 - RNA, 22 nt, Human
cagggugcuuccguggagcugu

SEQ ID NO: 787931 - RNA, 18 nt, Human
aguuagaaaugaaggcca

SEQ ID NO: 787932 - RNA, 22 nt, Human
uuuaaauuuguguuuagagggu

SEQ ID NO: 787933 - RNA, 22 nt, Human
caguggagagacuuuuacucuu

SEQ ID NO: 787934 - RNA, 22 nt, Human
gcaggcuuauggggagacagag

SEQ ID NO: 787935 - RNA, 22 nt, Human
aacaaagucguugccuagaaga

SEQ ID NO: 787936 - RNA, 22 nt, Human
aggcccagagagccaguuagug

SEQ ID NO: 787937 - RNA, 22 nt, Human
uuucuuuccauacauauugcua

SEQ ID NO: 787938 - RNA, 22 nt, Human
cuucuuucccaggcauguuuua

SEQ ID NO: 787939 - RNA, 22 nt, Human
ugugcugcucucagugacagcc

SEQ ID NO: 787940 - RNA, 20 nt, Human
gacaggugcuaaagaggggc

SEQ ID NO: 787941 - RNA, 22 nt, Human
ugcugcuguauccuuaguguca

SEQ ID NO: 787942 - RNA, 22 nt, Human
ccacagcuagggcaaucugauu

SEQ ID NO: 787943 - RNA, 22 nt, Human
cugcagauggcucaguggggca

SEQ ID NO: 787944 - RNA, 22 nt, Human
uauuccaccagagaugugaauu

SEQ ID NO: 787945 - RNA, 22 nt, Human
ccagagaugugaaaaugccgga

SEQ ID NO: 787946 - RNA, 22 nt, Human
ggcaggcugcuugggucauguc

SEQ ID NO: 787947 - RNA, 22 nt, Human
acaggggcaggcaggacccuuu

SEQ ID NO: 787948 - RNA, 22 nt, Human
uggagugggcaauguaggcaag

SEQ ID NO: 787949 - RNA, 22 nt, Human
ugagcaggcgcagcaggagguc

SEQ ID NO: 787950 - RNA, 22 nt, Human
acuguguggaccacucugaggc

SEQ ID NO: 787951 - RNA, 22 nt, Human
uuccuuccugucuuccuuacug

SEQ ID NO: 787952 - RNA, 22 nt, Human
ugagcaggauucgccucuugca

SEQ ID NO: 787953 - RNA, 22 nt, Human
uggucucccagagcagggacgc

SEQ ID NO: 787954 - RNA, 22 nt, Human
ugcugggcuaggguggagcucu

SEQ ID NO: 787955 - RNA, 22 nt, Human
cuggagugaagucuggcagcuu

SEQ ID NO: 787956 - RNA, 19 nt, Human
ccuggagucgcgcugccuc

SEQ ID NO: 787957 - RNA, 22 nt, Human
agcuuugaaguauuuggucucc

SEQ ID NO: 787958 - RNA, 22 nt, Human
gagguggaaggcaggaacaaau

SEQ ID NO: 787959 - RNA, 22 nt, Human
gccucucucuacccaguaugau

SEQ ID NO: 787960 - RNA, 22 nt, Human
ccagagauguucacauucuaau

SEQ ID NO: 787961 - RNA, 22 nt, Human
gaguggggaaagccaggacaga

SEQ ID NO: 787962 - RNA, 22 nt, Human
uugcuggcaauuuagagauuuc

SEQ ID NO: 787963 - RNA, 22 nt, Human
uguucuuuggcuucacagcucu

SEQ ID NO: 787964 - RNA, 22 nt, Human
ucccagaaucuccagugcuaca

SEQ ID NO: 787965 - RNA, 22 nt, Human
uggcugcagaucugugggacac

SEQ ID NO: 787966 - RNA, 22 nt, Human
accacugucuacacauugacuc

SEQ ID NO: 787967 - RNA, 22 nt, Human
aguugcuggcaccugugaguau

SEQ ID NO: 787968 - RNA, 22 nt, Human
aagcaggcgagggccuggagca

SEQ ID NO: 787969 - RNA, 22 nt, Human
acaguuaauaugugacagaacu

SEQ ID NO: 787970 - RNA, 22 nt, Human
agucccaguucgguucuuccuc

SEQ ID NO: 787971 - RNA, 22 nt, Human
caggcucagcucuggccagugc

SEQ ID NO: 787972 - RNA, 22 nt, Human
gcagugacauaccuggagggca

SEQ ID NO: 787973 - RNA, 22 nt, Human
acaguuaaggaaauggagguuc

SEQ ID NO: 787974 - RNA, 22 nt, Human
gaaccuguaaguauagaugugg

SEQ ID NO: 787975 - RNA, 22 nt, Human
augguuauuacugcuguuccag

SEQ ID NO: 787976 - RNA, 22 nt, Human
ucaucuuuccucaaaagaucca

SEQ ID NO: 787977 - RNA, 22 nt, Human
acagucuuuaauuucuuugugg

SEQ ID NO: 787978 - RNA, 20 nt, Human
ccagagcugauggcugcccg

SEQ ID NO: 787979 - RNA, 22 nt, Human
ggagagcugguauaugaagaca

SEQ ID NO: 787980 - RNA, 22 nt, Human
gggucaggccucaaggugggcu

SEQ ID NO: 787981 - RNA, 22 nt, Human
agugugagcuaauagcagagcc

SEQ ID NO: 787982 - RNA, 22 nt, Human
ugcaggcuggggaggcagacuu

SEQ ID NO: 787983 - RNA, 22 nt, Human
uucuaguuuccauuuuaagaca

SEQ ID NO: 787984 - RNA, 22 nt, Human
caguggcagaucaccaacugga

SEQ ID NO: 787985 - RNA, 22 nt, Human
agggacaguauccaucucacag

SEQ ID NO: 787986 - RNA, 22 nt, Human
ccagggcuggaccagugcuugg

SEQ ID NO: 787987 - RNA, 20 nt, Human
aagagaagaagucuuugaaa

SEQ ID NO: 787988 - RNA, 22 nt, Human
cacucugauuccacaaggcucc

SEQ ID NO: 787989 - RNA, 22 nt, Human
acaggcugacuuccugccaugu

SEQ ID NO: 787990 - RNA, 22 nt, Human
ccaugaguagcgauuucauuuu

SEQ ID NO: 787991 - RNA, 22 nt, Human
auugcuggaugagcucuuggau

SEQ ID NO: 787992 - RNA, 20 nt, Human
gcugggcuaccacuggcccu

SEQ ID NO: 787993 - RNA, 22 nt, Human
ccaggccucccuuuuccagcca

SEQ ID NO: 787994 - RNA, 22 nt, Human
aggccuggugaaugaaguaucu

SEQ ID NO: 787995 - RNA, 22 nt, Human
aagccagguguuuaggccagcg

SEQ ID NO: 787996 - RNA, 22 nt, Human
caucuuauuuucuucuagugcu

SEQ ID NO: 787997 - RNA, 22 nt, Human
uggaggagugugauugucugcc

SEQ ID NO: 787998 - RNA, 22 nt, Human
uagcccagcaugagcagagcug

SEQ ID NO: 787999 - RNA, 22 nt, Human
uaguggagguggucugugaacu

SEQ ID NO: 788000 - RNA, 22 nt, Human
gcagcugggacacugaggccag

SEQ ID NO: 788001 - RNA, 22 nt, Human
acguggagccacagauggagca

SEQ ID NO: 788002 - RNA, 22 nt, Human
acaggugggcuuaagagucggc

SEQ ID NO: 788003 - RNA, 22 nt, Human
ggguugaggcggaugucggcgg

SEQ ID NO: 788004 - RNA, 22 nt, Human
acagggcuccuugggcugacac

SEQ ID NO: 788005 - RNA, 22 nt, Human
aggagcaaaugaugagacagca

SEQ ID NO: 788006 - RNA, 22 nt, Human
caggggcucccugggugccagu

SEQ ID NO: 788007 - RNA, 22 nt, Human
uauugcugacugucuucugagu

SEQ ID NO: 788008 - RNA, 20 nt, Human
gacaggagaguuagguaggu

SEQ ID NO: 788009 - RNA, 22 nt, Human
ugcugcagguguguucagugag

SEQ ID NO: 788010 - RNA, 22 nt, Human
augaaacucuaacuuaacaagu

SEQ ID NO: 788011 - RNA, 22 nt, Human
cagcccugcagccauggccugu

SEQ ID NO: 788012 - RNA, 22 nt, Human
aaauacagauucugacucagag

SEQ ID NO: 788013 - RNA, 22 nt, Human
cugguguuuauuacaggugcuc

SEQ ID NO: 788014 - RNA, 22 nt, Human
cugucuguuuuguauacaggcc

SEQ ID NO: 788015 - RNA, 22 nt, Human
cuuaaauuggaugaguuaaguu

SEQ ID NO: 788016 - RNA, 17 nt, Human
gcaguuaaauuaagaug

SEQ ID NO: 788017 - RNA, 20 nt, Human
auuccacuuguuugagguac

SEQ ID NO: 788018 - RNA, 18 nt, Human
agcuguuguugacucugu

SEQ ID NO: 788019 - RNA, 19 nt, Human
cacaauuaugagacacuua

SEQ ID NO: 788020 - RNA, 22 nt, Human
auacagaagaacuauagccacu

SEQ ID NO: 788021 - RNA, 22 nt, Human
gccugcagccucagagaauuuu

SEQ ID NO: 788022 - RNA, 22 nt, Human
ugcugggcuagaagcugaggcc

SEQ ID NO: 788023 - RNA, 22 nt, Human
aggugcaggagcugugcaggga

SEQ ID NO: 788024 - RNA, 22 nt, Human
aucaucuuaucugacucauuuu

SEQ ID NO: 788025 - RNA, 22 nt, Human
uuugaaaccuaguuauaugacu

SEQ ID NO: 788026 - RNA, 22 nt, Human
gucugaaaauaugauuuugccu

SEQ ID NO: 788027 - RNA, 22 nt, Human
agggcugguauguccaugaaag

SEQ ID NO: 788028 - RNA, 22 nt, Human
auuucucagugaaaugacaggc

SEQ ID NO: 788029 - RNA, 22 nt, Human
acagguggcuuauuggcugauu

SEQ ID NO: 788030 - RNA, 22 nt, Human
uagcuguucccagcucugugua

SEQ ID NO: 788031 - RNA, 22 nt, Human
uaacaacaugcaauuuaaccuu

SEQ ID NO: 788032 - RNA, 23 nt, Human
ucagucuucccugucaguaauag

SEQ ID NO: 788033 - RNA, 22 nt, Human
caucuuuguucuguaaacuuuu

SEQ ID NO: 788034 - RNA, 22 nt, Human
agcagaugaaucccagauaaag

SEQ ID NO: 788035 - RNA, 22 nt, Human
auuaaauuggacgcugggggaa

SEQ ID NO: 788036 - RNA, 22 nt, Human
cuucuuucuuuugaucacaggu

SEQ ID NO: 788037 - RNA, 22 nt, Human
guuaaauucgaugauggauaaa

SEQ ID NO: 788038 - RNA, 22 nt, Human
caucuuuguuuuggauauaauc

SEQ ID NO: 788039 - RNA, 20 nt, Human
agaggccaguuaggagucua

SEQ ID NO: 788040 - RNA, 22 nt, Human
ugaaauaacuuuugggugaguu

SEQ ID NO: 788041 - RNA, 22 nt, Human
caguuaaaagguaugcuaccaa

SEQ ID NO: 788042 - RNA, 23 nt, Human
cuggcccaggugagagguuggug

SEQ ID NO: 788043 - RNA, 19 nt, Human
ugcugcagucaggcgaggg

SEQ ID NO: 788044 - RNA, 22 nt, Human
ugcugcugaugcauagucugcu

SEQ ID NO: 788045 - RNA, 22 nt, Human
aggcaggccccugagaauagac

SEQ ID NO: 788046 - RNA, 22 nt, Human
aggccagaagccagaaaugcuu

SEQ ID NO: 788047 - RNA, 22 nt, Human
uuucuauucuggaucuguggca

SEQ ID NO: 788048 - RNA, 22 nt, Human
aaguccagaccugaggcccuca

SEQ ID NO: 788049 - RNA, 22 nt, Human
cacugugucuggagugagcugg

SEQ ID NO: 788050 - RNA, 22 nt, Human
aagcguuggccuccccugauga

SEQ ID NO: 788051 - RNA, 22 nt, Human
gggcuagaaguuagcuagagaa

SEQ ID NO: 788052 - RNA, 22 nt, Human
uccacagacuauuaagugaucu

SEQ ID NO: 788053 - RNA, 22 nt, Human
aguggagguuacagcuguacau

SEQ ID NO: 788054 - RNA, 22 nt, Human
gcccagagugaguccugggccc

SEQ ID NO: 788055 - RNA, 22 nt, Human
ccaggcucugugugggcuagag

SEQ ID NO: 788056 - RNA, 22 nt, Human
caguuaaacgggccaugugagu

SEQ ID NO: 788057 - RNA, 22 nt, Human
uggaggagggcuggugucugua

SEQ ID NO: 788058 - RNA, 22 nt, Human
caggccaggugcucuagaauca

SEQ ID NO: 788059 - RNA, 22 nt, Human
caguuaaagcugcaugugucag

SEQ ID NO: 788060 - RNA, 22 nt, Human
gccugcagugagugcagaaggu

SEQ ID NO: 788061 - RNA, 22 nt, Human
gccuggugaaaggcagagagcg

SEQ ID NO: 788062 - RNA, 19 nt, Human
uggagaggaaaugcugcuc

SEQ ID NO: 788063 - RNA, 22 nt, Human
agcccagcuuucaccccucugg

SEQ ID NO: 788064 - RNA, 22 nt, Human
uggcugcagugcuugagauguc

SEQ ID NO: 788065 - RNA, 20 nt, Human
gucugcaguaagagggaaua

SEQ ID NO: 788066 - RNA, 22 nt, Human
uccagcccugcccauucucucg

SEQ ID NO: 788067 - RNA, 22 nt, Human
aauaagauugacacaaguaccu

SEQ ID NO: 788068 - RNA, 22 nt, Human
cagagcugguguuacaagucca

SEQ ID NO: 788069 - RNA, 22 nt, Human
acaggggcaagggcucacggcc

SEQ ID NO: 788070 - RNA, 22 nt, Human
gcuggccucuggagaagggcuu

SEQ ID NO: 788071 - RNA, 22 nt, Human
aagagaagaaagugucuacaca

SEQ ID NO: 788072 - RNA, 22 nt, Human
auggccagcucagagcacucag

SEQ ID NO: 788073 - RNA, 22 nt, Human
cacagugaauuucaaguguugu

SEQ ID NO: 788074 - RNA, 22 nt, Human
agguuauucucuaucucauccc

SEQ ID NO: 788075 - RNA, 19 nt, Human
caucuuuggucaccuaguc

SEQ ID NO: 788076 - RNA, 22 nt, Human
agguggggccaaaugcuacagu

SEQ ID NO: 788077 - RNA, 22 nt, Human
aggccagguggucaugcuugcu

SEQ ID NO: 788078 - RNA, 22 nt, Human
caucuucugggacuucucaguu

SEQ ID NO: 788079 - RNA, 22 nt, Human
cacaauuauagaagaaagcaua

SEQ ID NO: 788080 - RNA, 22 nt, Human
uuucuacaugucaguaacugau

SEQ ID NO: 788081 - RNA, 22 nt, Human
ucaggggcagccggggaagcca

SEQ ID NO: 788082 - RNA, 19 nt, Human
gagcaggccacacaugugu

SEQ ID NO: 788083 - RNA, 22 nt, Human
cuuucgaucaagggucccuuca

SEQ ID NO: 788084 - RNA, 22 nt, Human
acuguguuaaauacagagaugg

SEQ ID NO: 788085 - RNA, 22 nt, Human
uccagcccuguggcuuccaccc

SEQ ID NO: 788086 - RNA, 22 nt, Human
cuggaguggccggugcuguggc

SEQ ID NO: 788087 - RNA, 22 nt, Human
auugcuggcccagaugcuuuag

SEQ ID NO: 788088 - RNA, 22 nt, Human
gacaggccagacaggagacuga

SEQ ID NO: 788089 - RNA, 22 nt, Human
cuucagugauugcagaaagccu

SEQ ID NO: 788090 - RNA, 22 nt, Human
cuuucuuucgaagacgugauua

SEQ ID NO: 788091 - RNA, 22 nt, Human
cacaguuagagguagaguccag

SEQ ID NO: 788092 - RNA, 22 nt, Human
ucacucugggcccuacugggcu

SEQ ID NO: 788093 - RNA, 22 nt, Human
uagcccagaugauugaaccaug

SEQ ID NO: 788094 - RNA, 22 nt, Human
gggcacagagggucuugaagaa

SEQ ID NO: 788095 - RNA, 22 nt, Human
ccaggccugcauucccucucag

SEQ ID NO: 788096 - RNA, 22 nt, Human
ggacaggguuggggcauauaaa

SEQ ID NO: 788097 - RNA, 22 nt, Human
ggcccagaauacaugaaguaua

SEQ ID NO: 788098 - RNA, 22 nt, Human
uuucucugcagagccccaagga

SEQ ID NO: 788099 - RNA, 22 nt, Human
gggccacacagggcagcucccu

SEQ ID NO: 788100 - RNA, 22 nt, Human
aguugcugauucugucugugau

SEQ ID NO: 788101 - RNA, 22 nt, Human
gccuggagggauagaaugcaag

SEQ ID NO: 788102 - RNA, 22 nt, Human
agguggaacguucaggugcuag

SEQ ID NO: 788103 - RNA, 22 nt, Human
ggugaggccuguacaaagcugc

SEQ ID NO: 788104 - RNA, 22 nt, Human
cuggcucuuuccuagcuaggcu

SEQ ID NO: 788105 - RNA, 22 nt, Human
aagcuguuugcaguggauggag

SEQ ID NO: 788106 - RNA, 22 nt, Human
ccagagcuugacgugcaacgga

SEQ ID NO: 788107 - RNA, 21 nt, Human
gcuggagagccaggcaggggc

SEQ ID NO: 788108 - RNA, 22 nt, Human
aaacaauguugucuccaagagg

SEQ ID NO: 788109 - RNA, 22 nt, Human
caguuaaaagaagucuaucuua

SEQ ID NO: 788110 - RNA, 22 nt, Human
ugcuguuaguaaggaacaugac

SEQ ID NO: 788111 - RNA, 22 nt, Human
ugagcaggacucacugcagccu

SEQ ID NO: 788112 - RNA, 22 nt, Human
ugcacuuugcaggcauggaaac

SEQ ID NO: 788113 - RNA, 21 nt, Human
aggacaggaacuggcugaaua

SEQ ID NO: 788114 - RNA, 23 nt, Human
ccaggccucucagagggugugcc

SEQ ID NO: 788115 - RNA, 22 nt, Human
ugggcucugcugcguaccaguu

SEQ ID NO: 788116 - RNA, 22 nt, Human
uuaagauuuguagagaaaaagc

SEQ ID NO: 788117 - RNA, 22 nt, Human
gaguggagcaaaagagguagau

SEQ ID NO: 788118 - RNA, 22 nt, Human
auggacagguacugcagugggu

SEQ ID NO: 788119 - RNA, 22 nt, Human
cccagagucaagcuuaccauua

SEQ ID NO: 788120 - RNA, 22 nt, Human
augggccacacacgauugggug

SEQ ID NO: 788121 - RNA, 22 nt, Human
caggugcugcguggcggagcug

SEQ ID NO: 788122 - RNA, 22 nt, Human
ugcaggcugggaagagggacaa

SEQ ID NO: 788123 - RNA, 22 nt, Human
aaaguaucugaccgauuauaaa

SEQ ID NO: 788124 - RNA, 22 nt, Human
ccagggccugccacuuagcaag

SEQ ID NO: 788125 - RNA, 22 nt, Human
uccucagucucucaaaugaggc

SEQ ID NO: 788126 - RNA, 22 nt, Human
aggcaggcccucuggaaaggua

SEQ ID NO: 788127 - RNA, 22 nt, Human
acagcccaagucaccugcagga

SEQ ID NO: 788128 - RNA, 22 nt, Human
caaagcaagggcugaagacucc

SEQ ID NO: 788129 - RNA, 22 nt, Human
aucagcugaugaauggaugaau

SEQ ID NO: 788130 - RNA, 22 nt, Human
ugcuggccucggcgcugggccu

SEQ ID NO: 788131 - RNA, 22 nt, Human
uuuggugagcugcgagugagga

SEQ ID NO: 788132 - RNA, 22 nt, Human
auggauaguggugaaggcugua

SEQ ID NO: 788133 - RNA, 22 nt, Human
auccacagagaggaagaauagu

SEQ ID NO: 788134 - RNA, 22 nt, Human
ccaggccaaauucagucagcag

SEQ ID NO: 788135 - RNA, 22 nt, Human
cagagccacagccuccagauuu

SEQ ID NO: 788136 - RNA, 22 nt, Human
aggcccaguagugcugccuuua

SEQ ID NO: 788137 - RNA, 22 nt, Human
uauauccauaggcugugccuag

SEQ ID NO: 788138 - RNA, 22 nt, Human
agacagggccacucauccucac

SEQ ID NO: 788139 - RNA, 22 nt, Human
ggcaggcuuucagcaucaaguc

SEQ ID NO: 788140 - RNA, 22 nt, Human
cuuugcuguuauaaugauagcu

SEQ ID NO: 788141 - RNA, 22 nt, Human
ugcuggcuacugauggcaggcc

SEQ ID NO: 788142 - RNA, 22 nt, Human
cggcugugucuucacaggagcc

SEQ ID NO: 788143 - RNA, 22 nt, Human
uauccacacucaaggggagggg

SEQ ID NO: 788144 - RNA, 22 nt, Human
agagucagcuuaugacacaguc

SEQ ID NO: 788145 - RNA, 22 nt, Human
auauacacaucuuuuuaaauau

SEQ ID NO: 788146 - RNA, 19 nt, Human
ccagcccauaguccaucac

SEQ ID NO: 788147 - RNA, 23 nt, Human
ggggaaagaccaugcuugaggac

SEQ ID NO: 788148 - RNA, 22 nt, Human
uagcaucuguuucucuuuguga

SEQ ID NO: 788149 - RNA, 22 nt, Human
cugcaggacugaaagaugaggu

SEQ ID NO: 788150 - RNA, 22 nt, Human
cugggucccacagccugcuggg

SEQ ID NO: 788151 - RNA, 22 nt, Human
uccagugcauucagacacuugg

SEQ ID NO: 788152 - RNA, 18 nt, Human
uuucuuucugccuggggc

SEQ ID NO: 788153 - RNA, 22 nt, Human
aaauacagauuccagggucuua

SEQ ID NO: 788154 - RNA, 22 nt, Human
aauauccacuucaauacaggca

SEQ ID NO: 788155 - RNA, 22 nt, Human
gccagagucuucugacccugug

SEQ ID NO: 788156 - RNA, 22 nt, Human
uuucuauuggcgucacuguugu

SEQ ID NO: 788157 - RNA, 22 nt, Human
agugugaguuacaaagugugaa

SEQ ID NO: 788158 - RNA, 22 nt, Human
uccacagggauguugaguucuu

SEQ ID NO: 788159 - RNA, 21 nt, Human
ccaggggcaaauugucguuuc

SEQ ID NO: 788160 - RNA, 22 nt, Human
ccuggcucuguccucgcgcaaa

SEQ ID NO: 788161 - RNA, 22 nt, Human
ggacagggcucuuggcacuccu

SEQ ID NO: 788162 - RNA, 22 nt, Human
aauccagaugagcaaucauacu

SEQ ID NO: 788163 - RNA, 22 nt, Human
gaagguggcgagcggauugcug

SEQ ID NO: 788164 - RNA, 19 nt, Human
ccaggccuggcgucuccgc

SEQ ID NO: 788165 - RNA, 22 nt, Human
ugagcaggucaggaaguacauu

SEQ ID NO: 788166 - RNA, 22 nt, Human
uauugcacaugcgcuagaacca

SEQ ID NO: 788167 - RNA, 22 nt, Human
auuucucauuuugcuucaaagg

SEQ ID NO: 788168 - RNA, 22 nt, Human
ggcucaggccagaccacgacuc

SEQ ID NO: 788169 - RNA, 22 nt, Human
ggcuucagugacuggugcccuc

SEQ ID NO: 788170 - RNA, 22 nt, Human
gcuccagggaacagaauguacu

SEQ ID NO: 788171 - RNA, 22 nt, Human
gcuggccugaccugaggcuggg

SEQ ID NO: 788172 - RNA, 22 nt, Human
aaauauccauaagcacaucuau

SEQ ID NO: 788173 - RNA, 22 nt, Human
uggaagugucuacauguggagu

SEQ ID NO: 788174 - RNA, 22 nt, Human
ucugggaaguccucugucaugc

SEQ ID NO: 788175 - RNA, 22 nt, Human
gccuggugguauccuggcaaga

SEQ ID NO: 788176 - RNA, 22 nt, Human
aaggugggcagaucacaagguc

SEQ ID NO: 788177 - RNA, 22 nt, Human
uauccacacugggauguuuuga

SEQ ID NO: 788178 - RNA, 22 nt, Human
gacagcagccacagggagaggg

SEQ ID NO: 788179 - RNA, 22 nt, Human
gaguggggcgaagucggcgagu

SEQ ID NO: 788180 - RNA, 22 nt, Human
agcaggccucaugcaccagcua

SEQ ID NO: 788181 - RNA, 21 nt, Human
gcuggcucaaaugcuuguguc

SEQ ID NO: 788182 - RNA, 22 nt, Human
gccuggugugcgccgcgcagcu

SEQ ID NO: 788183 - RNA, 22 nt, Human
cuggagagaaaugacaaagcua

SEQ ID NO: 788184 - RNA, 22 nt, Human
gagcccagcccagagccauaug

SEQ ID NO: 788185 - RNA, 22 nt, Human
agguggagaucagggacuaagg

SEQ ID NO: 788186 - RNA, 22 nt, Human
ucugaaauuguuaguaaaaaug

SEQ ID NO: 788187 - RNA, 22 nt, Human
gucccauaaguagugcaacuug

SEQ ID NO: 788188 - RNA, 22 nt, Human
uucuaauuguguuugcauaucu

SEQ ID NO: 788189 - RNA, 22 nt, Human
ggagaagaggagcuggaagccu

SEQ ID NO: 788190 - RNA, 21 nt, Human
ccagcccagccuccuucucuu

SEQ ID NO: 788191 - RNA, 22 nt, Human
ugggcucuggagggccuaggau

SEQ ID NO: 788192 - RNA, 22 nt, Human
aauccacacaucuggcauguga

SEQ ID NO: 788193 - RNA, 22 nt, Human
uuucuuuccaugagccuaugua

SEQ ID NO: 788194 - RNA, 23 nt, Human
ucagucuuggcuucugauuuucc

SEQ ID NO: 788195 - RNA, 22 nt, Human
uuucuuucucguaaacuuaguu

SEQ ID NO: 788196 - RNA, 22 nt, Human
caucuuuguaacuuccacauaa

SEQ ID NO: 788197 - RNA, 20 nt, Human
cuggaguguagcaguggcug

SEQ ID NO: 788198 - RNA, 22 nt, Human
uaguggagaggauguggagaaa

SEQ ID NO: 788199 - RNA, 22 nt, Human
aucagucuguuggaauaucgcu

SEQ ID NO: 788200 - RNA, 22 nt, Human
auuucucauguacaaaaacacu

SEQ ID NO: 788201 - RNA, 22 nt, Human
acaacugucuucuucaugcucc

SEQ ID NO: 788202 - RNA, 22 nt, Human
ccuggcucugcagccacuccag

SEQ ID NO: 788203 - RNA, 20 nt, Human
uaaauuagccuugaagauua

SEQ ID NO: 788204 - RNA, 22 nt, Human
cagggccuuuuagcaucuucuc

SEQ ID NO: 788205 - RNA, 22 nt, Human
ugcuggcccaguauggacugca

SEQ ID NO: 788206 - RNA, 22 nt, Human
ccaaguccucuaccauuccugg

SEQ ID NO: 788207 - RNA, 22 nt, Human
uguuucuuacguuuuuagaggc

SEQ ID NO: 788208 - RNA, 22 nt, Human
gacagggcugugggaggagcag

SEQ ID NO: 788209 - RNA, 22 nt, Human
auugcugggaggauguguguuc

SEQ ID NO: 788210 - RNA, 22 nt, Human
acaucuuuuuucucuaauugug

SEQ ID NO: 788211 - RNA, 22 nt, Human
gggucaggcuagcccagacuuc

SEQ ID NO: 788212 - RNA, 22 nt, Human
gcucagggaaagagcuccuguc

SEQ ID NO: 788213 - RNA, 22 nt, Human
caucuaccagaauugcuauaaa

SEQ ID NO: 788214 - RNA, 22 nt, Human
cagagugauaaauauagaaauu

SEQ ID NO: 788215 - RNA, 22 nt, Human
agugccagcuccacacagcagc

SEQ ID NO: 788216 - RNA, 22 nt, Human
ucuguuuuugaggcuaucuucu

SEQ ID NO: 788217 - RNA, 22 nt, Human
acuucuaugcacagagcuugga

SEQ ID NO: 788218 - RNA, 22 nt, Human
acagggccaggugagaggugcu

SEQ ID NO: 788219 - RNA, 22 nt, Human
ccacaauuuuaugauuuaggag

SEQ ID NO: 788220 - RNA, 22 nt, Human
gcugggcugcgucggggaagcc

SEQ ID NO: 788221 - RNA, 22 nt, Human
cuucuauucacuggucacaguu

SEQ ID NO: 788222 - RNA, 22 nt, Human
gcaggccuguaaugaagggaca

SEQ ID NO: 788223 - RNA, 22 nt, Human
aaguggagcuauaggcucagau

SEQ ID NO: 788224 - RNA, 22 nt, Human
ugucuccaggggcaggccagcc

SEQ ID NO: 788225 - RNA, 22 nt, Human
uagggccaguuagggaagcuuu

SEQ ID NO: 788226 - RNA, 22 nt, Human
cccuggaguccggagcucaccu

SEQ ID NO: 788227 - RNA, 22 nt, Human
ucuccagugaaucuccuccugg

SEQ ID NO: 788228 - RNA, 22 nt, Human
aacucuauuuacccuacuaaac

SEQ ID NO: 788229 - RNA, 22 nt, Human
ccagagguggugggugcuacag

SEQ ID NO: 788230 - RNA, 22 nt, Human
ugcugcaguucacccugccguc

SEQ ID NO: 788231 - RNA, 22 nt, Human
uucuuuccuugccucagugaag

SEQ ID NO: 788232 - RNA, 23 nt, Human
caguggagacucaugcuuccuua

SEQ ID NO: 788233 - RNA, 22 nt, Human
guuuccugacccuggcccagca

SEQ ID NO: 788234 - RNA, 22 nt, Human
uggacagguugaguaggaggag

SEQ ID NO: 788235 - RNA, 22 nt, Human
acacauauaccacuguaaauga

SEQ ID NO: 788236 - RNA, 18 nt, Human
cacaauuuacagaugaca

SEQ ID NO: 788237 - RNA, 22 nt, Human
guugcuggaagcuaugguccag

SEQ ID NO: 788238 - RNA, 22 nt, Human
uauacacauaucuucuaggccu

SEQ ID NO: 788239 - RNA, 22 nt, Human
agcaggugacccaagcaggcug

SEQ ID NO: 788240 - RNA, 22 nt, Human
caguguuuagcacagugcuugg

SEQ ID NO: 788241 - RNA, 22 nt, Human
accugaauuuuggaugagcugu

SEQ ID NO: 788242 - RNA, 23 nt, Human
gcugggcuuacucuuucagugag

SEQ ID NO: 788243 - RNA, 22 nt, Human
caaggguucugugccuccugcu

SEQ ID NO: 788244 - RNA, 22 nt, Human
uucuccauuuaacuuccuuaug

SEQ ID NO: 788245 - RNA, 19 nt, Human
gcaggccucuugggaauua

SEQ ID NO: 788246 - RNA, 22 nt, Human
uguuaaaugcucagcucgggga

SEQ ID NO: 788247 - RNA, 22 nt, Human
uuacagaagagaaagaauucag

SEQ ID NO: 788248 - RNA, 22 nt, Human
cagggccuccuaaggcaucuaa

SEQ ID NO: 788249 - RNA, 22 nt, Human
gcuggagaggggucacucugag

SEQ ID NO: 788250 - RNA, 22 nt, Human
guugcugggagcagggauccug

SEQ ID NO: 788251 - RNA, 22 nt, Human
ggcccugggaugcucagcagug

SEQ ID NO: 788252 - RNA, 22 nt, Human
aucaucuugaaagucuauguuu

SEQ ID NO: 788253 - RNA, 22 nt, Human
auggacagguggauagguggau

SEQ ID NO: 788254 - RNA, 22 nt, Human
cugaauauuagucaugucugau

SEQ ID NO: 788255 - RNA, 20 nt, Human
gcccaugaggacugcagcug

SEQ ID NO: 788256 - RNA, 22 nt, Human
ucacucugagaggucacuggaa

SEQ ID NO: 788257 - RNA, 22 nt, Human
gccuagagagggagugccacac

SEQ ID NO: 788258 - RNA, 22 nt, Human
gcguggagacaacucuggggug

SEQ ID NO: 788259 - RNA, 20 nt, Human
ugucuccagggcugagugga

SEQ ID NO: 788260 - RNA, 22 nt, Human
gggauggggagcuggaaagggg

SEQ ID NO: 788261 - RNA, 22 nt, Human
ugcugcagggauuucagagaca

SEQ ID NO: 788262 - RNA, 18 nt, Human
ggugggaagccagggccu

SEQ ID NO: 788263 - RNA, 22 nt, Human
agggacagaugaaugacugagu

SEQ ID NO: 788264 - RNA, 22 nt, Human
gaguggggcccacugcugggug

SEQ ID NO: 788265 - RNA, 22 nt, Human
gcucagggagagagggcagccg

SEQ ID NO: 788266 - RNA, 22 nt, Human
cagagucaauguccaagaagcu

SEQ ID NO: 788267 - RNA, 22 nt, Human
auugccaugcucauagggucga

SEQ ID NO: 788268 - RNA, 22 nt, Human
cagggccuggagcugggccugc

SEQ ID NO: 788269 - RNA, 22 nt, Human
cuuuggauggcuguguguuuau

SEQ ID NO: 788270 - RNA, 22 nt, Human
acaaaacaguguuccugccccu

SEQ ID NO: 788271 - RNA, 22 nt, Human
gcuggccuccugcuagauggaa

SEQ ID NO: 788272 - RNA, 22 nt, Human
aaguggagagcccuggaggucu

SEQ ID NO: 788273 - RNA, 22 nt, Human
cugggcucuggggucccggugc

SEQ ID NO: 788274 - RNA, 22 nt, Human
acaaauauuuacugaauccacu

SEQ ID NO: 788275 - RNA, 22 nt, Human
aggccagaguuaaggagaacag

SEQ ID NO: 788276 - RNA, 22 nt, Human
ugucuccaaaacaaucucagau

SEQ ID NO: 788277 - RNA, 19 nt, Human
agccaggguccagacaugu

SEQ ID NO: 788278 - RNA, 22 nt, Human
caggcuuggguucucugaguua

SEQ ID NO: 788279 - RNA, 22 nt, Human
gugucccaaagauuagaaauca

SEQ ID NO: 788280 - RNA, 22 nt, Human
ccuggcucugccguaaccacca

SEQ ID NO: 788281 - RNA, 22 nt, Human
auggacagcucuuaugugggca

SEQ ID NO: 788282 - RNA, 22 nt, Human
auccacagugcagcaagggccc

SEQ ID NO: 788283 - RNA, 22 nt, Human
cugggcuccacucccacagugu

SEQ ID NO: 788284 - RNA, 22 nt, Human
agcuggagccagugugaggcuu

SEQ ID NO: 788285 - RNA, 22 nt, Human
uggcugugggaugagagccuca

SEQ ID NO: 788286 - RNA, 22 nt, Human
gucaucuucgcagagugauuuu

SEQ ID NO: 788287 - RNA, 22 nt, Human
gcagguuagauuuaauccauuc

SEQ ID NO: 788288 - RNA, 22 nt, Human
gcucagagaguuucacaaguuu

SEQ ID NO: 788289 - RNA, 22 nt, Human
ggaaggggagcuggaaagggua

SEQ ID NO: 788290 - RNA, 22 nt, Human
gagauccacuuaauuuuuuugc

SEQ ID NO: 788291 - RNA, 22 nt, Human
gggaccaggucagggcucugac

SEQ ID NO: 788292 - RNA, 22 nt, Human
gacagggcauggugcagaguuc

SEQ ID NO: 788293 - RNA, 22 nt, Human
cugcaggaauucaaagugagcu

SEQ ID NO: 788294 - RNA, 22 nt, Human
ggagaugcuuuccaguggggau

SEQ ID NO: 788295 - RNA, 17 nt, Human
agcaggcugcagaggcc

SEQ ID NO: 788296 - RNA, 22 nt, Human
cuggcugugcagucuuccagaa

SEQ ID NO: 788297 - RNA, 22 nt, Human
gugucccaaucuacuuuucccu

SEQ ID NO: 788298 - RNA, 21 nt, Human
ugagcaggagucaugggaaug

SEQ ID NO: 788299 - RNA, 22 nt, Human
gagcccagggugaaauagcagc

SEQ ID NO: 788300 - RNA, 22 nt, Human
agugccaggagcaaggagcucc

SEQ ID NO: 788301 - RNA, 22 nt, Human
uuuaaauuuagaagaaacacug

SEQ ID NO: 788302 - RNA, 21 nt, Human
agccaggguggacacuguaug

SEQ ID NO: 788303 - RNA, 21 nt, Human
gcccagaguuaagcccaccca

SEQ ID NO: 788304 - RNA, 22 nt, Human
auauccaccauucugcaccuuc

SEQ ID NO: 788305 - RNA, 16 nt, Human
ggagagugucugcaaa

SEQ ID NO: 788306 - RNA, 22 nt, Human
ugcuggccugggcugcaccuug

SEQ ID NO: 788307 - RNA, 17 nt, Human
agggacagcaguuuagg

SEQ ID NO: 788308 - RNA, 22 nt, Human
cuggcccaggcuccuggggcac

SEQ ID NO: 788309 - RNA, 22 nt, Human
uuauaauucuggcauaggcugu

SEQ ID NO: 788310 - RNA, 22 nt, Human
cagcaguuuccuaugguucagc

SEQ ID NO: 788311 - RNA, 22 nt, Human
uccacagugguugaacuaguaa

SEQ ID NO: 788312 - RNA, 22 nt, Human
gaggcuuuauaacuauuuguuc

SEQ ID NO: 788313 - RNA, 22 nt, Human
ccuggcucaaggcgaggacucc

SEQ ID NO: 788314 - RNA, 22 nt, Human
ccuggcucugaaguccacauca

SEQ ID NO: 788315 - RNA, 22 nt, Human
ggcaggcucagcagccaaggag

SEQ ID NO: 788316 - RNA, 22 nt, Human
uucaggugggccuuuugagcau

SEQ ID NO: 788317 - RNA, 22 nt, Human
cuggagugauacucagaaugug

SEQ ID NO: 788318 - RNA, 22 nt, Human
auuuaagacugacuucaccagu

SEQ ID NO: 788319 - RNA, 22 nt, Human
uggagcuggcuuguggaaguug

SEQ ID NO: 788320 - RNA, 22 nt, Human
aggggagguggcagaaaugugc

SEQ ID NO: 788321 - RNA, 22 nt, Human
agugaaauagcauuuaugaagc

SEQ ID NO: 788322 - RNA, 22 nt, Human
gugcugcaugacuugcuccuga

SEQ ID NO: 788323 - RNA, 22 nt, Human
gggccagagcuuggcagcuggg

SEQ ID NO: 788324 - RNA, 18 nt, Human
aggccugggaagcugagg

SEQ ID NO: 788325 - RNA, 21 nt, Human
uagaagcacauagguucaaag

SEQ ID NO: 788326 - RNA, 22 nt, Human
gcuggagugcuggagugcagug

SEQ ID NO: 788327 - RNA, 22 nt, Human
aaaccugucugauuauggagac

SEQ ID NO: 788328 - RNA, 22 nt, Human
aauggaauaccuagguggccca

SEQ ID NO: 788329 - RNA, 22 nt, Human
aaagacagagcuguaggggaaa

SEQ ID NO: 788330 - RNA, 22 nt, Human
ccaggggccugugaaggugccc

SEQ ID NO: 788331 - RNA, 22 nt, Human
cuccacagagaugcugauugua

SEQ ID NO: 788332 - RNA, 22 nt, Human
ggcccagaagccagaagccucc

SEQ ID NO: 788333 - RNA, 21 nt, Human
ucaggggcuguguuuuccauc

SEQ ID NO: 788334 - RNA, 19 nt, Human
gcugggcuuggguuuguag

SEQ ID NO: 788335 - RNA, 22 nt, Human
uccucacagggcaggaaggagg

SEQ ID NO: 788336 - RNA, 22 nt, Human
cacguuaacagcuaacagauga

SEQ ID NO: 788337 - RNA, 22 nt, Human
uuugaaacucugaacauguuuc

SEQ ID NO: 788338 - RNA, 22 nt, Human
ccuggcucugcgugcagcuccg

SEQ ID NO: 788339 - RNA, 22 nt, Human
gcugggcucauuugugugucug

SEQ ID NO: 788340 - RNA, 20 nt, Human
agcaggccuuggggagagga

SEQ ID NO: 788341 - RNA, 22 nt, Human
ucacuucuucccuugcacauau

SEQ ID NO: 788342 - RNA, 22 nt, Human
ugggcucucagucagacuggca

SEQ ID NO: 788343 - RNA, 22 nt, Human
cagcccagcugggaucacacuc

SEQ ID NO: 788344 - RNA, 23 nt, Human
uguaacaauuucauauacaugca

SEQ ID NO: 788345 - RNA, 22 nt, Human
ggcccagagggguugagcaucu

SEQ ID NO: 788346 - RNA, 22 nt, Human
gcacagggcugccaggcggcuu

SEQ ID NO: 788347 - RNA, 22 nt, Human
caguuaaauucuccaguuacca

SEQ ID NO: 788348 - RNA, 22 nt, Human
ggcaggcugggugucauggagu

SEQ ID NO: 788349 - RNA, 22 nt, Human
ccuggcucuucugugucagccc

SEQ ID NO: 788350 - RNA, 22 nt, Human
cuucuuucaagaauggauuagg

SEQ ID NO: 788351 - RNA, 22 nt, Human
gugucccaggagaggagacaau

SEQ ID NO: 788352 - RNA, 22 nt, Human
uauugcuggugcuguucugaau

SEQ ID NO: 788353 - RNA, 22 nt, Human
cuggagugcaguggcaugauca

SEQ ID NO: 788354 - RNA, 22 nt, Human
cagggccuccccggcagucuuu

SEQ ID NO: 788355 - RNA, 22 nt, Human
agggacagucuacuguucacug

SEQ ID NO: 788356 - RNA, 21 nt, Human
ugggauagaaauauggcugcu

SEQ ID NO: 788357 - RNA, 22 nt, Human
ccccagagugagggauugagug

SEQ ID NO: 788358 - RNA, 22 nt, Human
cugguaguuugcaaaauggugu

SEQ ID NO: 788359 - RNA, 22 nt, Human
agcuggagcuucaagcagguaa

SEQ ID NO: 788360 - RNA, 22 nt, Human
cuggagagggagcccuggcagu

SEQ ID NO: 788361 - RNA, 22 nt, Human
uagcccaggcuguagugcagug

SEQ ID NO: 788362 - RNA, 22 nt, Human
ugcuggccggccaggugcugag

SEQ ID NO: 788363 - RNA, 22 nt, Human
acaucuuuuacucugguucggg

SEQ ID NO: 788364 - RNA, 22 nt, Human
ggggcuggcucacuaagagacu

SEQ ID NO: 788365 - RNA, 22 nt, Human
auggaguguggccaggcaguaa

SEQ ID NO: 788366 - RNA, 22 nt, Human
uuccuuuucuucuaccacaugu

SEQ ID NO: 788367 - RNA, 22 nt, Human
aagacacuuucuaaauagaagu

SEQ ID NO: 788368 - RNA, 19 nt, Human
cucucagccugucuccuug

SEQ ID NO: 788369 - RNA, 22 nt, Human
uccguuuucacacugcuauaaa

SEQ ID NO: 788370 - RNA, 22 nt, Human
ugcaggaacucgaaaacuauag

SEQ ID NO: 788371 - RNA, 21 nt, Human
ucugugcuuuuuuggcuccua

SEQ ID NO: 788372 - RNA, 22 nt, Human
ccaaaauauuagugcuuaagua

SEQ ID NO: 788373 - RNA, 22 nt, Human
auguacaaucuaucacaagaag

SEQ ID NO: 788374 - RNA, 22 nt, Human
cugugcuggcagaccuggaguu

SEQ ID NO: 788375 - RNA, 22 nt, Human
acaggacagucuaguaacagua

SEQ ID NO: 788376 - RNA, 22 nt, Human
ugccagcaguagcaguaggcca

SEQ ID NO: 788377 - RNA, 22 nt, Human
cagugcugcaggcgccugcggu

SEQ ID NO: 788378 - RNA, 17 nt, Human
acuuguauugugcuuua

SEQ ID NO: 788379 - RNA, 22 nt, Human
agcaauguuggccuauauaccu

SEQ ID NO: 788380 - RNA, 22 nt, Human
ugugaagcgugugcaggggaca

SEQ ID NO: 788381 - RNA, 22 nt, Human
cguggggcggguggacacuugc

SEQ ID NO: 788382 - RNA, 22 nt, Human
uguucauucugugaccugguuc

SEQ ID NO: 788383 - RNA, 22 nt, Human
auacaugugugugcauacaugu

SEQ ID NO: 788384 - RNA, 18 nt, Human
ucaugcaaacgcuucaua

SEQ ID NO: 788385 - RNA, 19 nt, Human
acacaccagugccugugac

SEQ ID NO: 788386 - RNA, 22 nt, Human
ucacacaucucagguguuuaau

SEQ ID NO: 788387 - RNA, 22 nt, Human
uuuucaguugugcucucuaguu

SEQ ID NO: 788388 - RNA, 22 nt, Human
gaccacuggggugagggccauc

SEQ ID NO: 788389 - RNA, 22 nt, Human
auggcuguguuguuccucugaa

SEQ ID NO: 788390 - RNA, 22 nt, Human
guuuacaacaucuuguccuuca

SEQ ID NO: 788391 - RNA, 18 nt, Human
aaacauggcuuaaaggcu

SEQ ID NO: 788392 - RNA, 22 nt, Human
uuguugcaagccuggaaucugg

SEQ ID NO: 788393 - RNA, 22 nt, Human
aaggcuauaucucaauacuauu

SEQ ID NO: 788394 - RNA, 22 nt, Human
aaagcacauuacaagcucaguc

SEQ ID NO: 788395 - RNA, 22 nt, Human
ucuuauugguaaugauggcauu

SEQ ID NO: 788396 - RNA, 20 nt, Human
ucacuguaauugccuacauu

SEQ ID NO: 788397 - RNA, 22 nt, Human
acauauuuugaaagcuuucuaa

SEQ ID NO: 788398 - RNA, 23 nt, Human
aauagcugguaaugauagcacaa

SEQ ID NO: 788399 - RNA, 22 nt, Human
cuaguauuaagugugaguaaaa

SEQ ID NO: 788400 - RNA, 22 nt, Human
cauuguccucugaugccuuccc

SEQ ID NO: 788401 - RNA, 22 nt, Human
uauaagaaacaaggcaaauuuu

SEQ ID NO: 788402 - RNA, 22 nt, Human
auacacauguuauuguggaagc

SEQ ID NO: 788403 - RNA, 22 nt, Human
aaaucaugguggaagaaacaga

SEQ ID NO: 788404 - RNA, 22 nt, Human
uugcaguugcuguauuuaagga

SEQ ID NO: 788405 - RNA, 22 nt, Human
cugagcugcucccgcugcagcg

SEQ ID NO: 788406 - RNA, 22 nt, Human
ucacuaugcccagaauacaguu

SEQ ID NO: 788407 - RNA, 22 nt, Human
agauggcagggguaccuggaag

SEQ ID NO: 788408 - RNA, 22 nt, Human
ucuuauugugaugaugaagaac

SEQ ID NO: 788409 - RNA, 22 nt, Human
uuuucuuggaguggcuguccuu

SEQ ID NO: 788410 - RNA, 22 nt, Human
acagagacacggaagcuaaaga

SEQ ID NO: 788411 - RNA, 22 nt, Human
ugugacguuguucuggauuccc

SEQ ID NO: 788412 - RNA, 22 nt, Human
ucuguuauaaaucacacugcau

SEQ ID NO: 788413 - RNA, 22 nt, Human
uuuucaguuccaucucugcucu

SEQ ID NO: 788414 - RNA, 22 nt, Human
uaucuguauucugacagucacu

SEQ ID NO: 788415 - RNA, 22 nt, Human
ccuuuuggccaggucagugcag

SEQ ID NO: 788416 - RNA, 22 nt, Human
auauggcuguugcacaucuaag

SEQ ID NO: 788417 - RNA, 22 nt, Human
aaugcauacguguuuguggcaa

SEQ ID NO: 788418 - RNA, 23 nt, Human
uugcauuaauguggaggcacagg

SEQ ID NO: 788419 - RNA, 22 nt, Human
aaauacaguggcagcagauaau

SEQ ID NO: 788420 - RNA, 19 nt, Human
cuucuggauccgcagggcc

SEQ ID NO: 788421 - RNA, 22 nt, Human
ggcuggaaggcccuuuguugau

SEQ ID NO: 788422 - RNA, 22 nt, Human
ccaggacacgauuuuuagucug

SEQ ID NO: 788423 - RNA, 22 nt, Human
augcacacguacccuacaaggc

SEQ ID NO: 788424 - RNA, 19 nt, Human
ucucccaugccugugucua

SEQ ID NO: 788425 - RNA, 22 nt, Human
auacaggaugcugaacaucucu

SEQ ID NO: 788426 - RNA, 22 nt, Human
uuagcugcugauuaaauauguu

SEQ ID NO: 788427 - RNA, 22 nt, Human
uugcaucagcaggcauaauugg

SEQ ID NO: 788428 - RNA, 22 nt, Human
auagcaaaggacaauagucagu

SEQ ID NO: 788429 - RNA, 22 nt, Human
aauaucuagccuuuagcagcuu

SEQ ID NO: 788430 - RNA, 20 nt, Human
uacaauauucccacuuugcu

SEQ ID NO: 788431 - RNA, 22 nt, Human
gccuguuucuccuccuuggccc

SEQ ID NO: 788432 - RNA, 23 nt, Human
uacagccaugucgcugauuuaac

SEQ ID NO: 788433 - RNA, 22 nt, Human
uguccugugcacuguagcaugu

SEQ ID NO: 788434 - RNA, 22 nt, Human
gucugugcaguuacuagcuggu

SEQ ID NO: 788435 - RNA, 22 nt, Human
gcuguauuuauaugaaggcaug

SEQ ID NO: 788436 - RNA, 22 nt, Human
uauugccaaaugucugcuggaa

SEQ ID NO: 788437 - RNA, 21 nt, Human
ugcauauauaagugcauacac

SEQ ID NO: 788438 - RNA, 22 nt, Human
uaucuguagucucaugguuccu

SEQ ID NO: 788439 - RNA, 22 nt, Human
acaugcauaaacuacuucuuau

SEQ ID NO: 788440 - RNA, 22 nt, Human
cagaaacacuguauuuagggaa

SEQ ID NO: 788441 - RNA, 22 nt, Human
augaaacaacagacuuggucaa

SEQ ID NO: 788442 - RNA, 22 nt, Human
uacuguauacuacugcuguucu

SEQ ID NO: 788443 - RNA, 22 nt, Human
ucucugagaucagccacugacu

SEQ ID NO: 788444 - RNA, 22 nt, Human
acacacagaaggaagccccacu

SEQ ID NO: 788445 - RNA, 22 nt, Human
ccaggacaagccagagggacag

SEQ ID NO: 788446 - RNA, 22 nt, Human
guggcagcggcccaggccgucu

SEQ ID NO: 788447 - RNA, 22 nt, Human
auuagguaguauaaucuuuguu

SEQ ID NO: 788448 - RNA, 22 nt, Human
aacacuaaaggucaguuagaag

SEQ ID NO: 788449 - RNA, 18 nt, Human
ugugccucugcaggacgu

SEQ ID NO: 788450 - RNA, 22 nt, Human
acaaaugcuuaguucaccaaaa

SEQ ID NO: 788451 - RNA, 22 nt, Human
aaggaucauguauauguuuaag

SEQ ID NO: 788452 - RNA, 22 nt, Human
ucuuuuaucuguuguguaacaa

SEQ ID NO: 788453 - RNA, 22 nt, Human
cagcccuugcgacacccuggcu

SEQ ID NO: 788454 - RNA, 22 nt, Human
caauguacaaaauaauuacaca

SEQ ID NO: 788455 - RNA, 22 nt, Human
ugcaaauauuccaugcuguuca

SEQ ID NO: 788456 - RNA, 22 nt, Human
ucucugagguuguuuccagcac

SEQ ID NO: 788457 - RNA, 22 nt, Human
ccugugcuucacucaacaagcc

SEQ ID NO: 788458 - RNA, 22 nt, Human
gacauacagcccucucccuggu

SEQ ID NO: 788459 - RNA, 22 nt, Human
cuguuccuccaccucaacaaac

SEQ ID NO: 788460 - RNA, 22 nt, Human
aauacagugaaagugagcaagg

SEQ ID NO: 788461 - RNA, 20 nt, Human
ugugcccaauguccagguuc

SEQ ID NO: 788462 - RNA, 22 nt, Human
ucauuguuucugcuuuucauga

SEQ ID NO: 788463 - RNA, 22 nt, Human
auuguugacuugauuacucaac

SEQ ID NO: 788464 - RNA, 22 nt, Human
cuguauaugugcauacacacac

SEQ ID NO: 788465 - RNA, 22 nt, Human
augcaggaagagcccuggagcu

SEQ ID NO: 788466 - RNA, 18 nt, Human
uauaaacacacuuagguu

SEQ ID NO: 788467 - RNA, 22 nt, Human
caggguggcaggcaccauggcc

SEQ ID NO: 788468 - RNA, 22 nt, Human
gaccacugaaugcacuucuaau

SEQ ID NO: 788469 - RNA, 22 nt, Human
uauggcaagaugacauguucuc

SEQ ID NO: 788470 - RNA, 21 nt, Human
caggccaaaagguucaacauu

SEQ ID NO: 788471 - RNA, 22 nt, Human
augcaguggcagcuccuggugu

SEQ ID NO: 788472 - RNA, 22 nt, Human
uucuuugcccauguuuccuaag

SEQ ID NO: 788473 - RNA, 22 nt, Human
uuacuguagcuugacauauguc

SEQ ID NO: 788474 - RNA, 22 nt, Human
gggcuguaggagcuggaauggg

SEQ ID NO: 788475 - RNA, 22 nt, Human
ggcagguguggugaccagagau

SEQ ID NO: 788476 - RNA, 22 nt, Human
cagaaagcaguugucaaugggc

SEQ ID NO: 788477 - RNA, 22 nt, Human
auuauguagcuaaaaauugugu

SEQ ID NO: 788478 - RNA, 22 nt, Human
uaaaacuagugguugggacuaa

SEQ ID NO: 788479 - RNA, 22 nt, Human
aauacagauggcaugugaagau

SEQ ID NO: 788480 - RNA, 22 nt, Human
aauggcagagacuguugaaaua

SEQ ID NO: 788481 - RNA, 22 nt, Human
ugcucuguucaguguaucuugu

SEQ ID NO: 788482 - RNA, 21 nt, Human
acuguauuguuuucaaggauc

SEQ ID NO: 788483 - RNA, 22 nt, Human
gcagugacagacaacuguuuga

SEQ ID NO: 788484 - RNA, 22 nt, Human
ugucuuuagccacuugccucuu

SEQ ID NO: 788485 - RNA, 22 nt, Human
guuuuaguggguggccacugau

SEQ ID NO: 788486 - RNA, 22 nt, Human
agccugugcuguguuugcucca

SEQ ID NO: 788487 - RNA, 22 nt, Human
acaguguuucacuuaaccguuu

SEQ ID NO: 788488 - RNA, 22 nt, Human
gauguaucugagcugcuuaggu

SEQ ID NO: 788489 - RNA, 22 nt, Human
cucuggaucugcccugacgcca

SEQ ID NO: 788490 - RNA, 22 nt, Human
ucccaguggcuucauaaggcag

SEQ ID NO: 788491 - RNA, 22 nt, Human
cccugauguuuucucugccuuu

SEQ ID NO: 788492 - RNA, 22 nt, Human
ugcccauggcaggauuucugaa

SEQ ID NO: 788493 - RNA, 22 nt, Human
ggcagguguuuuuauauuaaag

SEQ ID NO: 788494 - RNA, 22 nt, Human
gugcacagaaacauacaaugug

SEQ ID NO: 788495 - RNA, 22 nt, Human
gugucccaaagauuagaaauca

SEQ ID NO: 788496 - RNA, 22 nt, Human
cacagauaaggcuuugucccca

SEQ ID NO: 788497 - RNA, 22 nt, Human
ccuuuguucacuggagagugga

SEQ ID NO: 788498 - RNA, 22 nt, Human
aagcagccagccaucaugcccg

SEQ ID NO: 788499 - RNA, 22 nt, Human
ccugugguuuacucuguggcua

SEQ ID NO: 788500 - RNA, 22 nt, Human
uguacacauuaagcucuuuaga

SEQ ID NO: 788501 - RNA, 22 nt, Human
ugcucagaauugcgcuggugga

SEQ ID NO: 788502 - RNA, 19 nt, Human
guuggcacugaaaauggcu

SEQ ID NO: 788503 - RNA, 22 nt, Human
auguauacgugcaggucacagg

SEQ ID NO: 788504 - RNA, 22 nt, Human
auguggcuuucugcguuuucuc

SEQ ID NO: 788505 - RNA, 22 nt, Human
ugucauauagaauguucuauga

SEQ ID NO: 788506 - RNA, 22 nt, Human
gccauguucuugaaucuggguc

SEQ ID NO: 788507 - RNA, 22 nt, Human
ugcauaaauauuguugggagua

SEQ ID NO: 788508 - RNA, 22 nt, Human
auggccugcagugcugccacag

SEQ ID NO: 788509 - RNA, 22 nt, Human
gugccuccaggcucgacuaguc

SEQ ID NO: 788510 - RNA, 22 nt, Human
aguggcagggacuucauauaaa

SEQ ID NO: 788511 - RNA, 22 nt, Human
ucugcuggaaaaccagggaauu

SEQ ID NO: 788512 - RNA, 22 nt, Human
aauggcaaaguguuuucauacc

SEQ ID NO: 788513 - RNA, 22 nt, Human
gcagacaucaagcacaggccca

SEQ ID NO: 788514 - RNA, 18 nt, Human
cugccuguugcugagagg

SEQ ID NO: 788515 - RNA, 22 nt, Human
uuuuccuucugauacuccauuu

SEQ ID NO: 788516 - RNA, 22 nt, Human
agucauguguucaucuuucauu

SEQ ID NO: 788517 - RNA, 22 nt, Human
uccugugccuccaccugcuccg

SEQ ID NO: 788518 - RNA, 22 nt, Human
ugcccacaggaagacaccagcg

SEQ ID NO: 788519 - RNA, 22 nt, Human
aaacacaucauucaugucguca

SEQ ID NO: 788520 - RNA, 22 nt, Human
uaaauacuuuuacuccacugau

SEQ ID NO: 788521 - RNA, 22 nt, Human
guuauguaaucuaacacucagu

SEQ ID NO: 788522 - RNA, 22 nt, Human
uuccuguucaggaaaguugugu

SEQ ID NO: 788523 - RNA, 22 nt, Human
aacaguaugugagauuuacaca

SEQ ID NO: 788524 - RNA, 22 nt, Human
ccugugucaucagcuguggcua

SEQ ID NO: 788525 - RNA, 22 nt, Human
uuccaauaaaauguuauuugca

SEQ ID NO: 788526 - RNA, 22 nt, Human
cugcugagguggagauugcagu

SEQ ID NO: 788527 - RNA, 22 nt, Human
ucuguagcauucaccagcccug

SEQ ID NO: 788528 - RNA, 22 nt, Human
ugcacacaguucucaggaaaga

SEQ ID NO: 788529 - RNA, 22 nt, Human
cccaccacgugcuuugcuggag

SEQ ID NO: 788530 - RNA, 22 nt, Human
aucaugcagcaacaagcaaggc

SEQ ID NO: 788531 - RNA, 22 nt, Human
gcugcccucuguguuuguccuu

SEQ ID NO: 788532 - RNA, 22 nt, Human
agaaacaucgcuuaguccucau

SEQ ID NO: 788533 - RNA, 17 nt, Human
aacaguuaaugggggaa

SEQ ID NO: 788534 - RNA, 22 nt, Human
uacauguacaugcauagguaga

SEQ ID NO: 788535 - RNA, 22 nt, Human
ucugccaucaagaugcucuggc

SEQ ID NO: 788536 - RNA, 19 nt, Human
uaugacaaguacuaguucu

SEQ ID NO: 788537 - RNA, 22 nt, Human
uuguacuuaaauaugcaaauag

SEQ ID NO: 788538 - RNA, 22 nt, Human
gcccuguguguuugcacugauu

SEQ ID NO: 788539 - RNA, 22 nt, Human
auacaacagaaaaugauuauuc

SEQ ID NO: 788540 - RNA, 22 nt, Human
ugcauguuuuauaccaaagcuu

SEQ ID NO: 788541 - RNA, 22 nt, Human
cuccagcucgcgagcucugcuc

SEQ ID NO: 788542 - RNA, 22 nt, Human
uguauuucugcuuucucuagua

SEQ ID NO: 788543 - RNA, 20 nt, Human
ucacuguaacauuugggggg

SEQ ID NO: 788544 - RNA, 22 nt, Human
guggccuccuccguccgccucu

SEQ ID NO: 788545 - RNA, 22 nt, Human
aaugcaaugcagcaccuccuug

SEQ ID NO: 788546 - RNA, 22 nt, Human
cacuguuuuacauguuauuuaa

SEQ ID NO: 788547 - RNA, 22 nt, Human
uacuggacacguauauauagau

SEQ ID NO: 788548 - RNA, 22 nt, Human
gcugucugcugggucgcucagg

SEQ ID NO: 788549 - RNA, 22 nt, Human
gaugggcaucaaacaugacgug

SEQ ID NO: 788550 - RNA, 22 nt, Human
cuggcugguuacuauuucuggu

SEQ ID NO: 788551 - RNA, 22 nt, Human
uggggaaaagcguuaggaguuc

SEQ ID NO: 788552 - RNA, 22 nt, Human
uccucagggguuucagguguac

SEQ ID NO: 788553 - RNA, 22 nt, Human
auauacuugauuuaacugagca

SEQ ID NO: 788554 - RNA, 22 nt, Human
uagauacucagaaaugcuuuca

SEQ ID NO: 788555 - RNA, 22 nt, Human
uauauuaacuugugauccugga

SEQ ID NO: 788556 - RNA, 22 nt, Human
ccacuggcauccagcugccauc

SEQ ID NO: 788557 - RNA, 22 nt, Human
aagguccuuuugcagugugauc

SEQ ID NO: 788558 - RNA, 22 nt, Human
agugaaaugauucugagcaaga

SEQ ID NO: 788559 - RNA, 22 nt, Human
uccucaggugacuagguaucuu

SEQ ID NO: 788560 - RNA, 22 nt, Human
cuacaacauuaugcuuucuguc

SEQ ID NO: 788561 - RNA, 22 nt, Human
uauacaauggcugaaucaucca

SEQ ID NO: 788562 - RNA, 22 nt, Human
auuauaaauauuuucuaggggu

SEQ ID NO: 788563 - RNA, 22 nt, Human
aucagucauauccaaauuagca

SEQ ID NO: 788564 - RNA, 22 nt, Human
cugugggccuagucuggccuag

SEQ ID NO: 788565 - RNA, 22 nt, Human
cuggcugguccucggggacagc

SEQ ID NO: 788566 - RNA, 22 nt, Human
uggcacagggcuuggucgcuca

SEQ ID NO: 788567 - RNA, 18 nt, Human
auauucaagaagacagag

SEQ ID NO: 788568 - RNA, 22 nt, Human
aucuaaaaugugguuaguuggu

SEQ ID NO: 788569 - RNA, 19 nt, Human
acuggcaguuucugcaugg

SEQ ID NO: 788570 - RNA, 22 nt, Human
acacaguugguggcucagucug

SEQ ID NO: 788571 - RNA, 22 nt, Human
ugucauggugcuauuuaauuag

SEQ ID NO: 788572 - RNA, 22 nt, Human
aguuuaauuggaggcguggcuc

SEQ ID NO: 788573 - RNA, 19 nt, Human
gauauaaagagauggugaa

SEQ ID NO: 788574 - RNA, 22 nt, Human
ugcuauuagaagccaugcuguu

SEQ ID NO: 788575 - RNA, 22 nt, Human
uggggaaagauaguuuucucua

SEQ ID NO: 788576 - RNA, 22 nt, Human
acuaaauacacacauuuguuca

SEQ ID NO: 788577 - RNA, 22 nt, Human
uuguauucuuccuuagcaguac

SEQ ID NO: 788578 - RNA, 22 nt, Human
aaugagucaaaacagcauauag

SEQ ID NO: 788579 - RNA, 22 nt, Human
agucaguuaaccucacagcauc

SEQ ID NO: 788580 - RNA, 22 nt, Human
acauauauguaaaguacuuugu

SEQ ID NO: 788581 - RNA, 21 nt, Human
uauagucacuugagcauuauc

SEQ ID NO: 788582 - RNA, 22 nt, Human
acaaauagguagauuugcaaca

SEQ ID NO: 788583 - RNA, 22 nt, Human
uggggaaaaugcuuguagucag

SEQ ID NO: 788584 - RNA, 22 nt, Human
aguguuaaugguguauauuagg

SEQ ID NO: 788585 - RNA, 22 nt, Human
uaaaugaguaauauagcuguuu

SEQ ID NO: 788586 - RNA, 22 nt, Human
uagucacacaauuguguacauu

SEQ ID NO: 788587 - RNA, 22 nt, Human
aaauuagaaauacuuucaaagc

SEQ ID NO: 788588 - RNA, 22 nt, Human
cagggucauggcaccugcacgg

SEQ ID NO: 788589 - RNA, 22 nt, Human
caggaagggggauccuuggaag

SEQ ID NO: 788590 - RNA, 22 nt, Human
uauuaaauguuauuuggguugu

SEQ ID NO: 788591 - RNA, 22 nt, Human
auaauaaaccaggaugggucug

SEQ ID NO: 788592 - RNA, 17 nt, Human
acacagccagguucucc

SEQ ID NO: 788593 - RNA, 22 nt, Human
caguuuaagacaagggggugua

SEQ ID NO: 788594 - RNA, 22 nt, Human
uaauaauuggcaauguugagca

SEQ ID NO: 788595 - RNA, 22 nt, Human
gagguccucuguguccgcgggc

SEQ ID NO: 788596 - RNA, 22 nt, Human
cucagggggaaucaggucacag

SEQ ID NO: 788597 - RNA, 22 nt, Human
ccucagggccaucucugucccu

SEQ ID NO: 788598 - RNA, 22 nt, Human
cacauauaugaaaugaggaauu

SEQ ID NO: 788599 - RNA, 22 nt, Human
aggaaggaagagacaccauuug

SEQ ID NO: 788600 - RNA, 23 nt, Human
auuauuaaggacauggacuuugu

SEQ ID NO: 788601 - RNA, 21 nt, Human
ugcacagccauacccuccuug

SEQ ID NO: 788602 - RNA, 22 nt, Human
uugacacagaucaauauucaac

SEQ ID NO: 788603 - RNA, 22 nt, Human
gauuaauaguacagguucuuag

SEQ ID NO: 788604 - RNA, 22 nt, Human
cgggcacacacuugacagguuc

SEQ ID NO: 788605 - RNA, 22 nt, Human
aauauuaauagaagggguucua

SEQ ID NO: 788606 - RNA, 22 nt, Human
ucauaaaucauacuccauuugc

SEQ ID NO: 788607 - RNA, 22 nt, Human
acacauucuuuaaaugucuguu

SEQ ID NO: 788608 - RNA, 22 nt, Human
uagauuuugcauuucuaacaag

SEQ ID NO: 788609 - RNA, 22 nt, Human
accaguuuaauaacugcucaag

SEQ ID NO: 788610 - RNA, 22 nt, Human
ucacagccuggucacucugccc

SEQ ID NO: 788611 - RNA, 22 nt, Human
caggggaagaugccaagggaga

SEQ ID NO: 788612 - RNA, 22 nt, Human
guuauaaauaccuaauaggauu

SEQ ID NO: 788613 - RNA, 22 nt, Human
agguccugucuuaucucuguaa

SEQ ID NO: 788614 - RNA, 20 nt, Human
aauuagauguuuaaucaaua

SEQ ID NO: 788615 - RNA, 22 nt, Human
acuggcagagacccugauggcc

SEQ ID NO: 788616 - RNA, 17 nt, Human
ccacagccuggcacuug

SEQ ID NO: 788617 - RNA, 22 nt, Human
uucacagugagcuaugucuugu

SEQ ID NO: 788618 - RNA, 22 nt, Human
acauucaaggccuucugacaca

SEQ ID NO: 788619 - RNA, 21 nt, Human
caugauaaugaagguguuauu

SEQ ID NO: 788620 - RNA, 22 nt, Human
gcacagcccugagcgcaugucu

SEQ ID NO: 788621 - RNA, 22 nt, Human
auuaaauacugcaggcuaagca

SEQ ID NO: 788622 - RNA, 22 nt, Human
cugugggcugaaagugcucccg

SEQ ID NO: 788623 - RNA, 22 nt, Human
ugucaugggguuguuuuguaca

SEQ ID NO: 788624 - RNA, 22 nt, Human
aaaugccaaggagagacuguua

SEQ ID NO: 788625 - RNA, 22 nt, Human
ccucagggacuccaugcugcag

SEQ ID NO: 788626 - RNA, 22 nt, Human
caggaaugacugcagauggggc

SEQ ID NO: 788627 - RNA, 22 nt, Human
cggcacagccgggcaaggcugg

SEQ ID NO: 788628 - RNA, 22 nt, Human
uccucaggagagcuccuaugcc

SEQ ID NO: 788629 - RNA, 22 nt, Human
ucagucacuuuugccugcuaca

SEQ ID NO: 788630 - RNA, 18 nt, Human
ggggaaaagccagguguc

SEQ ID NO: 788631 - RNA, 22 nt, Human
auauuaagaugcuauugguuuu

SEQ ID NO: 788632 - RNA, 22 nt, Human
auucacaugauguauguagggc

SEQ ID NO: 788633 - RNA, 22 nt, Human
caguuucuuagugacacaaauc

SEQ ID NO: 788634 - RNA, 22 nt, Human
acacuacaaucucagaacuaua

SEQ ID NO: 788635 - RNA, 22 nt, Human
uggggaaagggauggcucccgc

SEQ ID NO: 788636 - RNA, 22 nt, Human
uuucauauuguccagucagcgc

SEQ ID NO: 788637 - RNA, 23 nt, Human
ccucagggucuagcagagagaag

SEQ ID NO: 788638 - RNA, 22 nt, Human
uaucaauacauguuaucagugu

SEQ ID NO: 788639 - RNA, 22 nt, Human
cauggggagacaccuagggaaa

SEQ ID NO: 788640 - RNA, 22 nt, Human
ggcacagcgacuaccaucgaaa

SEQ ID NO: 788641 - RNA, 22 nt, Human
uuaaugacaucauaggugaagu

SEQ ID NO: 788642 - RNA, 22 nt, Human
ugucaugguauuugugagcugc

SEQ ID NO: 788643 - RNA, 19 nt, Human
acuggcagcuguagucugu

SEQ ID NO: 788644 - RNA, 22 nt, Human
uaauuauuaugacaacaauugc

SEQ ID NO: 788645 - RNA, 22 nt, Human
ucauauaaguuuaaaacuaucu

SEQ ID NO: 788646 - RNA, 22 nt, Human
auuugucaguggaagugauuca

SEQ ID NO: 788647 - RNA, 21 nt, Human
agaaauacagcagggaugauc

SEQ ID NO: 788648 - RNA, 18 nt, Human
uagauuaaaauugaauuc

SEQ ID NO: 788649 - RNA, 22 nt, Human
cugcauccauguugcugcaaag

SEQ ID NO: 788650 - RNA, 22 nt, Human
uuaaugacuuauauuuaaagca

SEQ ID NO: 788651 - RNA, 22 nt, Human
uccucaggcggugaggaggggc

SEQ ID NO: 788652 - RNA, 22 nt, Human
uaaaugaaaggguuuaauuuau

SEQ ID NO: 788653 - RNA, 22 nt, Human
gauuaauagacacaaccaagcu

SEQ ID NO: 788654 - RNA, 21 nt, Human
uccucagggccccagagcacu

SEQ ID NO: 788655 - RNA, 22 nt, Human
ugcaaaugaguugcagaucagg

SEQ ID NO: 788656 - RNA, 22 nt, Human
aguuuucaguaaauauuaguga

SEQ ID NO: 788657 - RNA, 18 nt, Human
ugcaaauggcuguuugau

SEQ ID NO: 788658 - RNA, 21 nt, Human
uugcuuauggcacugcuuugc

SEQ ID NO: 788659 - RNA, 22 nt, Human
uggggaaacuauuuccuugucc

SEQ ID NO: 788660 - RNA, 22 nt, Human
auauuaaugagcaaguaaguga

SEQ ID NO: 788661 - RNA, 22 nt, Human
auuaguaaaacauuguauaugu

SEQ ID NO: 788662 - RNA, 22 nt, Human
auuagacaucauaugauucagc

SEQ ID NO: 788663 - RNA, 22 nt, Human
aaauagcuuuucauaauucuca

SEQ ID NO: 788664 - RNA, 22 nt, Human
cugagacaugguuugacuggca

SEQ ID NO: 788665 - RNA, 22 nt, Human
uggcacagagggacccagcagc

SEQ ID NO: 788666 - RNA, 22 nt, Human
acuggcagggggagccccgaga

SEQ ID NO: 788667 - RNA, 22 nt, Human
auuaauauacacuguuagcaug

SEQ ID NO: 788668 - RNA, 21 nt, Human
caguuuaauaacaaagaagga

SEQ ID NO: 788669 - RNA, 22 nt, Human
uaaugacuugaaggacccaugg

SEQ ID NO: 788670 - RNA, 22 nt, Human
uuuaaugaggucucucgcuggc

SEQ ID NO: 788671 - RNA, 22 nt, Human
aaugccaacuuggauauacauu

SEQ ID NO: 788672 - RNA, 22 nt, Human
aaauagauugcugaggcauuac

SEQ ID NO: 788673 - RNA, 22 nt, Human
cucugacagguggcauuaucuc

SEQ ID NO: 788674 - RNA, 22 nt, Human
ugcaaauguguagguuuacaua

SEQ ID NO: 788675 - RNA, 23 nt, Human
ccucaggggaccugugagccuga

SEQ ID NO: 788676 - RNA, 22 nt, Human
ccucagggaaugggaggcuggg

SEQ ID NO: 788677 - RNA, 22 nt, Human
ugcaguuuuggccauugaaggc

SEQ ID NO: 788678 - RNA, 23 nt, Human
aaaugccagggagacaggaacca

SEQ ID NO: 788679 - RNA, 22 nt, Human
aauaguugugaaucaggacuag

SEQ ID NO: 788680 - RNA, 22 nt, Human
gacacuacguggcucacauuuc

SEQ ID NO: 788681 - RNA, 22 nt, Human
aaaugccaggauuauuagaggc

SEQ ID NO: 788682 - RNA, 22 nt, Human
uagaauaaguugaugauauaug

SEQ ID NO: 788683 - RNA, 22 nt, Human
acaaauagaaaaucuggauugg

SEQ ID NO: 788684 - RNA, 22 nt, Human
agagccugcaucaggcuugggg

SEQ ID NO: 788685 - RNA, 20 nt, Human
agcaguuuccuaacucagcu

SEQ ID NO: 788686 - RNA, 22 nt, Human
ccacuggcuuuuccuaggucuc

SEQ ID NO: 788687 - RNA, 22 nt, Human
aguuuaauccuccagcccaacu

SEQ ID NO: 788688 - RNA, 22 nt, Human
ggcacagcaagaagggaaauga

SEQ ID NO: 788689 - RNA, 22 nt, Human
uugaucaagugggaaauaguaa

SEQ ID NO: 788690 - RNA, 19 nt, Human
gccuaugucuucaaaucau

SEQ ID NO: 788691 - RNA, 17 nt, Human
cagucacaggucuuuuc

SEQ ID NO: 788692 - RNA, 22 nt, Human
ggcaguuucucaggcaggggua

SEQ ID NO: 788693 - RNA, 22 nt, Human
ugcuauuaccugcuggacaguc

SEQ ID NO: 788694 - RNA, 21 nt, Human
guaucacauuugcaugcuuau

SEQ ID NO: 788695 - RNA, 22 nt, Human
acuggcagugucguuuacauga

SEQ ID NO: 788696 - RNA, 22 nt, Human
caaauagacuucaaucucuuga

SEQ ID NO: 788697 - RNA, 22 nt, Human
aauucauauggauaugcuagua

SEQ ID NO: 788698 - RNA, 22 nt, Human
auuauuugacuugagaacaggu

SEQ ID NO: 788699 - RNA, 22 nt, Human
aaccaguuucaaagaaaauugc

SEQ ID NO: 788700 - RNA, 22 nt, Human
ggcacagcacagagcacaugua

SEQ ID NO: 788701 - RNA, 21 nt, Human
agcacagcauauccaauguca

SEQ ID NO: 788702 - RNA, 20 nt, Human
acuggcagccugccugcugu

SEQ ID NO: 788703 - RNA, 22 nt, Human
ugcaaaugcccauuuauuuucu

SEQ ID NO: 788704 - RNA, 22 nt, Human
ucacauucauggugcuaauaaa

SEQ ID NO: 788705 - RNA, 22 nt, Human
uauuauaauuuagggcuuggau

SEQ ID NO: 788706 - RNA, 22 nt, Human
caauuauauuuagaaugauaca

SEQ ID NO: 788707 - RNA, 22 nt, Human
uaaugacuaagcaucauuaaac

SEQ ID NO: 788708 - RNA, 22 nt, Human
ugauaaauccauguaaauggua

SEQ ID NO: 788709 - RNA, 22 nt, Human
cacuggcaucuaagggugguag

SEQ ID NO: 788710 - RNA, 22 nt, Human
ucaggggacuuaggagagaagu

SEQ ID NO: 788711 - RNA, 22 nt, Human
aaccaguuguauguccuccagc

SEQ ID NO: 788712 - RNA, 22 nt, Human
auuauaaaccuuugaggguggg

SEQ ID NO: 788713 - RNA, 22 nt, Human
uauuaaauauaucuguuaguug

SEQ ID NO: 788714 - RNA, 22 nt, Human
ccucagggaggccucuguggcu

SEQ ID NO: 788715 - RNA, 22 nt, Human
uaaugacuaagcaaucaugaau

SEQ ID NO: 788716 - RNA, 18 nt, Human
aggaagcaggaggaaggc

SEQ ID NO: 788717 - RNA, 22 nt, Human
uugacacaguuuucucauuaag

SEQ ID NO: 788718 - RNA, 22 nt, Human
aucacaguuuugugccuugugg

SEQ ID NO: 788719 - RNA, 22 nt, Human
aucacagugccuucguaaauuu

SEQ ID NO: 788720 - RNA, 22 nt, Human
uggggaaaggaaaguuaaccug

SEQ ID NO: 788721 - RNA, 22 nt, Human
uccucagggcggccuccgucuu

SEQ ID NO: 788722 - RNA, 22 nt, Human
ggcaguuuuaacagagguagua

SEQ ID NO: 788723 - RNA, 22 nt, Human
uuuaaugaauaauucaaaucug

SEQ ID NO: 788724 - RNA, 22 nt, Human
ucauauaucugcaaagcaguau

SEQ ID NO: 788725 - RNA, 22 nt, Human
agcaguuuggaaaauacuagaa

SEQ ID NO: 788726 - RNA, 22 nt, Human
cucugggcggcccaggccaacc

SEQ ID NO: 788727 - RNA, 20 nt, Human
aaaugccagugauucugcuu

SEQ ID NO: 788728 - RNA, 22 nt, Human
agaaggaguguacaggucaugc

SEQ ID NO: 788729 - RNA, 22 nt, Human
gggcacagagggucuugaagaa

SEQ ID NO: 788730 - RNA, 22 nt, Human
ucucugggaauucacaagcccu

SEQ ID NO: 788731 - RNA, 22 nt, Human
uaugaauauaccacaauuuagg

SEQ ID NO: 788732 - RNA, 22 nt, Human
ucauaaauuaucuauuuggcua

SEQ ID NO: 788733 - RNA, 21 nt, Human
uccugggggguaggugaguuu

SEQ ID NO: 788734 - RNA, 22 nt, Human
aaucacagaguccagcagauga

SEQ ID NO: 788735 - RNA, 22 nt, Human
guuuccugacccuggcccagca

SEQ ID NO: 788736 - RNA, 22 nt, Human
aggaaggacugcagcauuuggu

SEQ ID NO: 788737 - RNA, 22 nt, Human
aggggaaaugccuuggugguac

SEQ ID NO: 788738 - RNA, 22 nt, Human
agaaauucaauucuaauuagcu

SEQ ID NO: 788739 - RNA, 22 nt, Human
caggaaggcgcggcugugccug

SEQ ID NO: 788740 - RNA, 22 nt, Human
aaucacauuacagcauaucugu

SEQ ID NO: 788741 - RNA, 22 nt, Human
uuauuaaucuuaucuuuggaaa

SEQ ID NO: 788742 - RNA, 22 nt, Human
agaaauucuaagcaucaauagc

SEQ ID NO: 788743 - RNA, 22 nt, Human
gagcaguugggcucuaggaagu

SEQ ID NO: 788744 - RNA, 22 nt, Human
gggcacagccuaacuauggaga

SEQ ID NO: 788745 - RNA, 22 nt, Human
auuauaaagaacaugugugugg

SEQ ID NO: 788746 - RNA, 18 nt, Human
uugauaaacaauuucauu

SEQ ID NO: 788747 - RNA, 22 nt, Human
uagucacaguacaggauaaaga

SEQ ID NO: 788748 - RNA, 22 nt, Human
aauagcuuaguccugauucugu

SEQ ID NO: 788749 - RNA, 22 nt, Human
gcauaauuaaacaggcaagauu

SEQ ID NO: 788750 - RNA, 22 nt, Human
cgccggcuugaggcaggcggca

SEQ ID NO: 788751 - RNA, 20 nt, Human
ucacaggagggaaggcaggu

SEQ ID NO: 788752 - RNA, 22 nt, Human
acuggcaguuugagaaugcauu

SEQ ID NO: 788753 - RNA, 22 nt, Human
ugcaaaugaugaaacuaacuuu

SEQ ID NO: 788754 - RNA, 20 nt, Human
auuauucauacaugugugac

SEQ ID NO: 788755 - RNA, 22 nt, Human
cuacaacauagucuucuacaga

SEQ ID NO: 788756 - RNA, 22 nt, Human
cuauaaaucuacccagcauugg

SEQ ID NO: 788757 - RNA, 22 nt, Human
aagguccuguagccacagagcc

SEQ ID NO: 788758 - RNA, 22 nt, Human
uuucauucauuauacaguagag

SEQ ID NO: 788759 - RNA, 22 nt, Human
auuauucaacacuugagaaauu

SEQ ID NO: 788760 - RNA, 22 nt, Human
uuuuagauugggaaauguaaag

SEQ ID NO: 788761 - RNA, 20 nt, Human
acacauauagcagcauaaac

SEQ ID NO: 788762 - RNA, 22 nt, Human
augccaaauucuacuuucagca

SEQ ID NO: 788763 - RNA, 22 nt, Human
uagauuucaggagacaaaaugg

SEQ ID NO: 788764 - RNA, 22 nt, Human
uacaagagacaccagggaggcu

SEQ ID NO: 788765 - RNA, 22 nt, Human
aggcaguuuaggcagcgauuua

SEQ ID NO: 788766 - RNA, 22 nt, Human
cauggggaugaggcugagacuu

SEQ ID NO: 788767 - RNA, 22 nt, Human
uuuuucaugagacuagaaguca

SEQ ID NO: 788768 - RNA, 22 nt, Human
acuauauacacauuaucuuguu

SEQ ID NO: 788769 - RNA, 22 nt, Human
gggcacagcugcuacccagugc

SEQ ID NO: 788770 - RNA, 22 nt, Human
uucacagugcugcaccuggcuu

SEQ ID NO: 788771 - RNA, 22 nt, Human
acucacagucccuguaggagug

SEQ ID NO: 788772 - RNA, 22 nt, Human
uucaauaucucuaagaaugagg

SEQ ID NO: 788773 - RNA, 22 nt, Human
ccaguuuauaagaaagaaaacc

SEQ ID NO: 788774 - RNA, 22 nt, Human
uauuauuaaauggcagaauuuu

SEQ ID NO: 788775 - RNA, 22 nt, Human
agcacagugccugacauauaug

SEQ ID NO: 788776 - RNA, 22 nt, Human
uaaugacuguaccaaggcuuca

SEQ ID NO: 788777 - RNA, 22 nt, Human
uuaaugacaggauaggcucuga

SEQ ID NO: 788778 - RNA, 22 nt, Human
gggccggagcugggucccgcgc

SEQ ID NO: 788779 - RNA, 22 nt, Human
gcacagccuugcccugugcccu

SEQ ID NO: 788780 - RNA, 22 nt, Human
gggacacuggacccagugucca

SEQ ID NO: 788781 - RNA, 22 nt, Human
gaaauauucuugucuuguuuuc

SEQ ID NO: 788782 - RNA, 20 nt, Human
auauaauaaauuuugguuac

SEQ ID NO: 788783 - RNA, 22 nt, Human
ugcaaaugggugaggguuagga

SEQ ID NO: 788784 - RNA, 22 nt, Human
auacauuagcucauaugauuaa

SEQ ID NO: 788785 - RNA, 22 nt, Human
uaaucacagaaacagacuguuu

SEQ ID NO: 788786 - RNA, 20 nt, Human
aggaaggagaaucugagcaa

SEQ ID NO: 788787 - RNA, 22 nt, Human
uauaaaugcacuuuugaaauau

SEQ ID NO: 788788 - RNA, 22 nt, Human
uaggauuuacuuugacaauauu

SEQ ID NO: 788789 - RNA, 22 nt, Human
cugugggcauuugagugugggu

SEQ ID NO: 788790 - RNA, 22 nt, Human
agacuuuaaugugcaaaugaaa

SEQ ID NO: 788791 - RNA, 22 nt, Human
caguuuaaaugagugacugcag

SEQ ID NO: 788792 - RNA, 22 nt, Human
uggggaaaggagagcauuauuu

SEQ ID NO: 788793 - RNA, 22 nt, Human
aaauaguucagcuuguaaaccc

SEQ ID NO: 788794 - RNA, 22 nt, Human
augccaaauuucuuucuguucu

SEQ ID NO: 788795 - RNA, 22 nt, Human
uccucaggaucuaggagugcuu

SEQ ID NO: 788796 - RNA, 22 nt, Human
gcgcaagccacacagccugggg

SEQ ID NO: 788797 - RNA, 22 nt, Human
agauauuaggaggauucauaau

SEQ ID NO: 788798 - RNA, 22 nt, Human
ucuauaaaugcagauaugugug

SEQ ID NO: 788799 - RNA, 22 nt, Human
agucacagaaacccaggugugg

SEQ ID NO: 788800 - RNA, 22 nt, Human
uguacacaaccuacagucugcu

SEQ ID NO: 788801 - RNA, 22 nt, Human
ucaaaugagaggcagggcagcu

SEQ ID NO: 788802 - RNA, 22 nt, Human
aaauaguuguuuggaucaauaa

SEQ ID NO: 788803 - RNA, 22 nt, Human
ucacaguacuccccaaaguuuc

SEQ ID NO: 788804 - RNA, 22 nt, Human
caguuuaaguagaacugagaau

SEQ ID NO: 788805 - RNA, 23 nt, Human
aaauagagauaggccagcuuugc

SEQ ID NO: 788806 - RNA, 22 nt, Human
aauucauacucuauauugcuuu

SEQ ID NO: 788807 - RNA, 22 nt, Human
uggggaaaaugcagaagauuac

SEQ ID NO: 788808 - RNA, 22 nt, Human
gugaggugguacaauauuaacu

SEQ ID NO: 788809 - RNA, 22 nt, Human
ugucauggacagauuagaugag

SEQ ID NO: 788810 - RNA, 22 nt, Human
cacuggcagauuugggaucugg

SEQ ID NO: 788811 - RNA, 22 nt, Human
uggggacacagagccaaacuau

SEQ ID NO: 788812 - RNA, 22 nt, Human
acacuacagggccgggauggaa

SEQ ID NO: 788813 - RNA, 22 nt, Human
uugacacagucaacuugauuuu

SEQ ID NO: 788814 - RNA, 22 nt, Human
uggaaggaaagguagcagagaa

SEQ ID NO: 788815 - RNA, 22 nt, Human
ucuggggaccauggcaucuaaa

SEQ ID NO: 788816 - RNA, 22 nt, Human
uuaauuagagcugauguucaua

SEQ ID NO: 788817 - RNA, 22 nt, Human
uuaaaugagauguucagauauu

SEQ ID NO: 788818 - RNA, 22 nt, Human
acuggcagcuguaggaugcaug

SEQ ID NO: 788819 - RNA, 22 nt, Human
agggcacaggcuccggguccag

SEQ ID NO: 788820 - RNA, 22 nt, Human
uauauuaaccauaggguucuag

SEQ ID NO: 788821 - RNA, 22 nt, Human
aaugccaauauucauuuguguu

SEQ ID NO: 788822 - RNA, 22 nt, Human
uucacaguggcugacaggcugg

SEQ ID NO: 788823 - RNA, 22 nt, Human
agcaguuuuuauaacacuggaa

SEQ ID NO: 788824 - RNA, 22 nt, Human
augccaaauucucagccucuuu

SEQ ID NO: 788825 - RNA, 22 nt, Human
aggaaggacuccaugguccguc

SEQ ID NO: 788826 - RNA, 22 nt, Human
auaguauuuccagaaauagucu

SEQ ID NO: 788827 - RNA, 22 nt, Human
aggcaguuguugcugagcagcu

SEQ ID NO: 788828 - RNA, 22 nt, Human
agucaguugcaaacaucaggca

SEQ ID NO: 788829 - RNA, 20 nt, Human
caguuuaacuuugagcaguu

SEQ ID NO: 788830 - RNA, 22 nt, Human
aguagucagcagauaauauagg

SEQ ID NO: 788831 - RNA, 22 nt, Human
cacaggagguuaggaagugguc

SEQ ID NO: 788832 - RNA, 22 nt, Human
uuuaaugauagcuguuucacau

SEQ ID NO: 788833 - RNA, 22 nt, Human
uugacacaauguauauuuucaa

SEQ ID NO: 788834 - RNA, 22 nt, Human
ucacaguuauagucuguagaau

SEQ ID NO: 788835 - RNA, 22 nt, Human
aggggagcaacauagucacucu

SEQ ID NO: 788836 - RNA, 22 nt, Human
ugucauggagcuuauauuccag

SEQ ID NO: 788837 - RNA, 22 nt, Human
uaggauuuauucuacaauauug

SEQ ID NO: 788838 - RNA, 22 nt, Human
uauuaauaaauauguaggggcc

SEQ ID NO: 788839 - RNA, 20 nt, Human
agguccugguucucugggau

SEQ ID NO: 788840 - RNA, 22 nt, Human
gaaauucaaaaugucaguauag

SEQ ID NO: 788841 - RNA, 22 nt, Human
auuauuaaagcuuaggucuuau

SEQ ID NO: 788842 - RNA, 22 nt, Human
ugcaguuuugccaggcaaugga

SEQ ID NO: 788843 - RNA, 22 nt, Human
aaauaguuagcccugcauauau

SEQ ID NO: 788844 - RNA, 22 nt, Human
uaguaaauuaaaauauugacuu

SEQ ID NO: 788845 - RNA, 22 nt, Human
cacauauaccucuucuugaguu

SEQ ID NO: 788846 - RNA, 22 nt, Human
gcacagccacugagugagaacc

SEQ ID NO: 788847 - RNA, 22 nt, Human
agcagcuuaucuuggagaggca

SEQ ID NO: 788848 - RNA, 22 nt, Human
ccaguuuaggacacaugcccac

SEQ ID NO: 788849 - RNA, 22 nt, Human
gcacagccacguaaugugguca

SEQ ID NO: 788850 - RNA, 22 nt, Human
uuaaauaguaggucuauuuugg

SEQ ID NO: 788851 - RNA, 22 nt, Human
uucaauaugauauuagcugugg

SEQ ID NO: 788852 - RNA, 22 nt, Human
cacuggcauuagucacgaggca

SEQ ID NO: 788853 - RNA, 22 nt, Human
uaauaagucuguuguuuaauug

SEQ ID NO: 788854 - RNA, 22 nt, Human
cauauuaaggucuguaaggggu

SEQ ID NO: 788855 - RNA, 22 nt, Human
ccucaggggucacugugaggag

SEQ ID NO: 788856 - RNA, 22 nt, Human
uauauuaaagugcuuugcagug

SEQ ID NO: 788857 - RNA, 22 nt, Human
ggacacuaaauggaagugucug

SEQ ID NO: 788858 - RNA, 22 nt, Human
ugcuauuaaugaggcugcauuu

SEQ ID NO: 788859 - RNA, 22 nt, Human
uauuaacaugaacugacuuuuc

SEQ ID NO: 788860 - RNA, 22 nt, Human
auuugucauguauguaaaguug

SEQ ID NO: 788861 - RNA, 22 nt, Human
gugacagugacagcuagauagu

SEQ ID NO: 788862 - RNA, 22 nt, Human
auauucaucguguagaaauacu

SEQ ID NO: 788863 - RNA, 16 nt, Human
cacauauauuuauaug

SEQ ID NO: 788864 - RNA, 20 nt, Human
uucauucacguagcuguuga

SEQ ID NO: 788865 - RNA, 22 nt, Human
uagucacaugaucacaggaucg

SEQ ID NO: 788866 - RNA, 22 nt, Human
aauuaauauuuguggaauuaau

SEQ ID NO: 788867 - RNA, 22 nt, Human
cugagacacggagaggcugugu

SEQ ID NO: 788868 - RNA, 22 nt, Human
uaucacaucaauguuuuaaaau

SEQ ID NO: 788869 - RNA, 22 nt, Human
cuacaacaccaggcacggagug

SEQ ID NO: 788870 - RNA, 22 nt, Human
gcaguuuuauuaugauggaaau

SEQ ID NO: 788871 - RNA, 22 nt, Human
uccucagggggccaacccagcc

SEQ ID NO: 788872 - RNA, 22 nt, Human
uuagucaauagugaauauagag

SEQ ID NO: 788873 - RNA, 22 nt, Human
ucauggggugaauuaguaugcu

SEQ ID NO: 788874 - RNA, 22 nt, Human
aucauaaaauugcaccauuucu

SEQ ID NO: 788875 - RNA, 22 nt, Human
ccacuggcaaccccgccucaua

SEQ ID NO: 788876 - RNA, 22 nt, Human
gcaaaugcuaaaguguagagac

SEQ ID NO: 788877 - RNA, 22 nt, Human
agugaaauuuguuuagauaggu

SEQ ID NO: 788878 - RNA, 22 nt, Human
aaucacauuuacauugcuaauu

SEQ ID NO: 788879 - RNA, 22 nt, Human
uaggauuuaggcuuuaacaucu

SEQ ID NO: 788880 - RNA, 17 nt, Human
ucacaguuggucucagu

SEQ ID NO: 788881 - RNA, 22 nt, Human
aagucacagcuaaauagcuaag

SEQ ID NO: 788882 - RNA, 22 nt, Human
gaaggagagggucaaggauaau

SEQ ID NO: 788883 - RNA, 22 nt, Human
auaguguuacccuucuuaaagu

SEQ ID NO: 788884 - RNA, 22 nt, Human
gggcacaguacuccaaucaacu

SEQ ID NO: 788885 - RNA, 22 nt, Human
aucacauugccagugauuaccc

SEQ ID NO: 788886 - RNA, 22 nt, Human
uuguucaucaggugacacauac

SEQ ID NO: 788887 - RNA, 22 nt, Human
ugcaaaugggaaacccagcagu

SEQ ID NO: 788888 - RNA, 22 nt, Human
ugucauggggaaaauaacagac

SEQ ID NO: 788889 - RNA, 22 nt, Human
ucacaguauaaccucauauagg

SEQ ID NO: 788890 - RNA, 22 nt, Human
ugucauggcacugguaggagug

SEQ ID NO: 788891 - RNA, 22 nt, Human
ugcaaauggagcauguauaaga

SEQ ID NO: 788892 - RNA, 22 nt, Human
auagcuuucuuaaauauauaaa

SEQ ID NO: 788893 - RNA, 22 nt, Human
caaggaaguuuuaggagaggaa

SEQ ID NO: 788894 - RNA, 22 nt, Human
ucauggggugacagaagggagg

SEQ ID NO: 788895 - RNA, 20 nt, Human
ugcacagcugugaauaggau

SEQ ID NO: 788896 - RNA, 22 nt, Human
agagccuguuuugugggagaug

SEQ ID NO: 788897 - RNA, 22 nt, Human
uaauuauugucugaagaguuau

SEQ ID NO: 788898 - RNA, 22 nt, Human
caguuuaaagaaggaugggagu

SEQ ID NO: 788899 - RNA, 22 nt, Human
uaauuauucuagucacauagca

SEQ ID NO: 788900 - RNA, 23 nt, Human
acaugauacacaauuagcaaacc

SEQ ID NO: 788901 - RNA, 22 nt, Human
cacuggcaaagccuguuccuua

SEQ ID NO: 788902 - RNA, 22 nt, Human
cacaggagagcugggaggugcc

SEQ ID NO: 788903 - RNA, 22 nt, Human
aaccaguuuaagcaaauaacug

SEQ ID NO: 788904 - RNA, 22 nt, Human
uaggggaauugcagugugucca

SEQ ID NO: 788905 - RNA, 22 nt, Human
caguuuaaccuauccauuaugu

SEQ ID NO: 788906 - RNA, 22 nt, Human
agucacuguucugucaugucaa

SEQ ID NO: 788907 - RNA, 22 nt, Human
uauucaaagugcgaggucaggg

SEQ ID NO: 788908 - RNA, 22 nt, Human
cacauucuuucacaguucugaa

SEQ ID NO: 788909 - RNA, 22 nt, Human
uuuagguuaaucaacaaacauu

SEQ ID NO: 788910 - RNA, 22 nt, Human
aaauaguuuagcucucauuuca

SEQ ID NO: 788911 - RNA, 22 nt, Human
uccacauagucauuaauuucug

SEQ ID NO: 788912 - RNA, 22 nt, Human
ugaggggauacgguacacauug

SEQ ID NO: 788913 - RNA, 22 nt, Human
ggacacuagauggagaagggaa

SEQ ID NO: 788914 - RNA, 22 nt, Human
uacaacauuguguugcuucaua

SEQ ID NO: 788915 - RNA, 22 nt, Human
accaguuuguaaccuguuuuca

SEQ ID NO: 788916 - RNA, 22 nt, Human
ggcacagcucaggucccagcuc

SEQ ID NO: 788917 - RNA, 22 nt, Human
acagcaggcacacaaggauaga

SEQ ID NO: 788918 - RNA, 22 nt, Human
gcaaaugcacugcauuuagauu

SEQ ID NO: 788919 - RNA, 22 nt, Human
accaguuucugggggagguugg

SEQ ID NO: 788920 - RNA, 22 nt, Human
gggggaaagcucaggagccugu

SEQ ID NO: 788921 - RNA, 22 nt, Human
uauuaauaugugugugcaugua

SEQ ID NO: 788922 - RNA, 22 nt, Human
agucacugguucuguaauuaau

SEQ ID NO: 788923 - RNA, 22 nt, Human
uggcacagaaaaaugcuccauu

SEQ ID NO: 788924 - RNA, 22 nt, Human
ggcacagccacuuuggagaacu

SEQ ID NO: 788925 - RNA, 22 nt, Human
agcacaguaauugauauuacug

SEQ ID NO: 788926 - RNA, 22 nt, Human
ugucauggacuggauuucugcu

SEQ ID NO: 788927 - RNA, 23 nt, Human
cauggggagcagugcuccugacc

SEQ ID NO: 788928 - RNA, 22 nt, Human
ugucaugggcauuuauugaggg

SEQ ID NO: 788929 - RNA, 22 nt, Human
cacagaggacuguagcggggag

SEQ ID NO: 788930 - RNA, 19 nt, Human
uaaguagucaaauaguaac

SEQ ID NO: 788931 - RNA, 22 nt, Human
uaucacauuuggagauuuauga

SEQ ID NO: 788932 - RNA, 22 nt, Human
gggggaaaguggagguucguga

SEQ ID NO: 788933 - RNA, 22 nt, Human
uguuaauauacuaaaauccacu

SEQ ID NO: 788934 - RNA, 22 nt, Human
uaguuuuauaauguuaacaucu

SEQ ID NO: 788935 - RNA, 21 nt, Human
uauuaauaugucuaagcugau

SEQ ID NO: 788936 - RNA, 18 nt, Human
cugugggcuggugcauga

SEQ ID NO: 788937 - RNA, 22 nt, Human
ggcacagcccucucuguggaca

SEQ ID NO: 788938 - RNA, 22 nt, Human
uucacaguggcugugccauuug

SEQ ID NO: 788939 - RNA, 22 nt, Human
auagaauaugacuuuuagaucc

SEQ ID NO: 788940 - RNA, 22 nt, Human
uucauauaaauggaaucagaau

SEQ ID NO: 788941 - RNA, 22 nt, Human
ccucagggucauccuaguaaua

SEQ ID NO: 788942 - RNA, 22 nt, Human
cuggcacaucacuccuaguuua

SEQ ID NO: 788943 - RNA, 22 nt, Human
ccucagggacgggaucacuugg

SEQ ID NO: 788944 - RNA, 22 nt, Human
gaggcaguggucugaugcaagg

SEQ ID NO: 788945 - RNA, 22 nt, Human
aaacauucacauuugcuaguaa

SEQ ID NO: 788946 - RNA, 22 nt, Human
ugucaugguagcugaaggaugu

SEQ ID NO: 788947 - RNA, 21 nt, Human
uaacacauuuugguacuuugg

SEQ ID NO: 788948 - RNA, 22 nt, Human
ucaggggaaaucucucagcgaa

SEQ ID NO: 788949 - RNA, 22 nt, Human
auauuaaugggauuuagucagg

SEQ ID NO: 788950 - RNA, 22 nt, Human
aaauaacuuucuguguauaguc

SEQ ID NO: 788951 - RNA, 22 nt, Human
uucacauaaucugcagcaagcg

SEQ ID NO: 788952 - RNA, 22 nt, Human
gaaauauuacaguggaggggau

SEQ ID NO: 788953 - RNA, 19 nt, Human
gggcacagccuccccccag

SEQ ID NO: 788954 - RNA, 22 nt, Human
ggcacagcaccuuuucacauug

SEQ ID NO: 788955 - RNA, 22 nt, Human
ugucaugggucuaaacauugau

SEQ ID NO: 788956 - RNA, 22 nt, Human
uucacaguggcccucucugagu

SEQ ID NO: 788957 - RNA, 22 nt, Human
gggcacagucugcagcccccca

SEQ ID NO: 788958 - RNA, 22 nt, Human
gaggcaguuccugagugacaag

SEQ ID NO: 788959 - RNA, 21 nt, Human
cucaggggauuuugagauuag

SEQ ID NO: 788960 - RNA, 22 nt, Human
aaccaguuuagucaugcuguaa

SEQ ID NO: 788961 - RNA, 22 nt, Human
uguaaauaaugcauguaaauca

SEQ ID NO: 788962 - RNA, 22 nt, Human
uacagaaagggaugauugaucu

SEQ ID NO: 788963 - RNA, 22 nt, Human
caggggaguuuuaugcaacaga

SEQ ID NO: 788964 - RNA, 22 nt, Human
uggcacaggaucucagcggcca

SEQ ID NO: 788965 - RNA, 22 nt, Human
aaugccaaugggcagaacuaga

SEQ ID NO: 788966 - RNA, 18 nt, Human
ccucagggagagagacgc

SEQ ID NO: 788967 - RNA, 22 nt, Human
uucauuugugguuauuuacaau

SEQ ID NO: 788968 - RNA, 22 nt, Human
ccucaggggugcccacagcugc

SEQ ID NO: 788969 - RNA, 22 nt, Human
auggggaagagccagugagcug

SEQ ID NO: 788970 - RNA, 22 nt, Human
agguccuguccuuggucucuga

SEQ ID NO: 788971 - RNA, 22 nt, Human
gcacagccugucccuguccugg

SEQ ID NO: 788972 - RNA, 22 nt, Human
gggcacaggagaaggaucuggc

SEQ ID NO: 788973 - RNA, 22 nt, Human
cacuggcaucuaguggguugag

SEQ ID NO: 788974 - RNA, 22 nt, Human
accaguuuauagcgaucuguca

SEQ ID NO: 788975 - RNA, 22 nt, Human
aguugucagucaaagacauuug

SEQ ID NO: 788976 - RNA, 22 nt, Human
auauuaauuauuuacacaugag

SEQ ID NO: 788977 - RNA, 22 nt, Human
cauuaauauuguucuucuuuag

SEQ ID NO: 788978 - RNA, 22 nt, Human
uuauuaauaaaguggcauagcc

SEQ ID NO: 788979 - RNA, 22 nt, Human
acuggcagcagcagcccuuggg

SEQ ID NO: 788980 - RNA, 22 nt, Human
ggggccuuggaucugugccccg

SEQ ID NO: 788981 - RNA, 22 nt, Human
aggaaauaggaccagacaaagc

SEQ ID NO: 788982 - RNA, 17 nt, Human
uaguaaaugaguagagc

SEQ ID NO: 788983 - RNA, 22 nt, Human
uaauuagaguuugguaaacaau

SEQ ID NO: 788984 - RNA, 22 nt, Human
ggcacagcugaugcagacacac

SEQ ID NO: 788985 - RNA, 21 nt, Human
ggcacagccugaaaugccuca

SEQ ID NO: 788986 - RNA, 21 nt, Human
augccaaacuucuucugcccu

SEQ ID NO: 788987 - RNA, 23 nt, Human
uucuucauuuucagaguugagca

SEQ ID NO: 788988 - RNA, 22 nt, Human
aauauguuccacuuaaagcugg

SEQ ID NO: 788989 - RNA, 22 nt, Human
ugcaaauguguuuuaaaccaaa

SEQ ID NO: 788990 - RNA, 22 nt, Human
auuugucaaaacacagagaaca

SEQ ID NO: 788991 - RNA, 22 nt, Human
ggcaguuuggcaggauggaggg

SEQ ID NO: 788992 - RNA, 22 nt, Human
gggcacugcuggaggcucccug

SEQ ID NO: 788993 - RNA, 22 nt, Human
uucauaugugaacucagugaug

SEQ ID NO: 788994 - RNA, 22 nt, Human
ccgggccucgggacaccgggua

SEQ ID NO: 788995 - RNA, 18 nt, Human
ccucagggagauccagug

SEQ ID NO: 788996 - RNA, 22 nt, Human
gacaggaagucugaaggaggga

SEQ ID NO: 788997 - RNA, 22 nt, Human
acuggcagagguuggacaccau

SEQ ID NO: 788998 - RNA, 22 nt, Human
uggaaggaagccaaggaagguu

SEQ ID NO: 788999 - RNA, 22 nt, Human
cuggcacagccacugcaggcag

SEQ ID NO: 789000 - RNA, 19 nt, Human
gaggcaguagucaaagcuu

SEQ ID NO: 789001 - RNA, 22 nt, Human
augccaaagggagcacuuuggg

SEQ ID NO: 789002 - RNA, 22 nt, Human
auauauuacaaaagaggaagga

SEQ ID NO: 789003 - RNA, 22 nt, Human
acuggcaguagagggagcgcau

SEQ ID NO: 789004 - RNA, 22 nt, Human
ccacuggcugucagcaggacuc

SEQ ID NO: 789005 - RNA, 21 nt, Human
ugucacagauucucagcuugc

SEQ ID NO: 789006 - RNA, 22 nt, Human
uauuauuauaguuauugggaag

SEQ ID NO: 789007 - RNA, 22 nt, Human
acauuuauauaacucacuagga

SEQ ID NO: 789008 - RNA, 22 nt, Human
uucauuugucugcuauagaucc

SEQ ID NO: 789009 - RNA, 22 nt, Human
acacauauaugucgaaguccuc

SEQ ID NO: 789010 - RNA, 22 nt, Human
uaugaaauuuaaacacagauca

SEQ ID NO: 789011 - RNA, 22 nt, Human
auaaguaggaaaauuugaauau

SEQ ID NO: 789012 - RNA, 22 nt, Human
uauuaauaagugacuacuagcu

SEQ ID NO: 789013 - RNA, 22 nt, Human
ugucacagaucguuuuugagcu

SEQ ID NO: 789014 - RNA, 22 nt, Human
acuggcagaacgugaugcgggu

SEQ ID NO: 789015 - RNA, 22 nt, Human
ggucacaggggagaagagugau

SEQ ID NO: 789016 - RNA, 22 nt, Human
ggcaucaggguaggaagguauc

SEQ ID NO: 789017 - RNA, 22 nt, Human
cacuggcaugugaggcgguggc

SEQ ID NO: 789018 - RNA, 22 nt, Human
aggucucugaguacugcuggac

SEQ ID NO: 789019 - RNA, 22 nt, Human
uuccauauguauauagcuguua

SEQ ID NO: 789020 - RNA, 22 nt, Human
gggcacaggaauuugggaugug

SEQ ID NO: 789021 - RNA, 22 nt, Human
ugucauggaggccuccccuaaa

SEQ ID NO: 789022 - RNA, 22 nt, Human
aguuauaaucugcuacugauau

SEQ ID NO: 789023 - RNA, 22 nt, Human
uauucacaugaaaacaaauuuu

SEQ ID NO: 789024 - RNA, 22 nt, Human
ggcauagcggcucagcguccag

SEQ ID NO: 789025 - RNA, 22 nt, Human
agucacuguuuaaucuagcuaa

SEQ ID NO: 789026 - RNA, 22 nt, Human
ucucuggguugagaacuaggac

SEQ ID NO: 789027 - RNA, 19 nt, Human
uccucaggggcucacagac

SEQ ID NO: 789028 - RNA, 23 nt, Human
uuuaaugaccaauagaaggaaca

SEQ ID NO: 789029 - RNA, 22 nt, Human
guuuugugaggcacccacaggu

SEQ ID NO: 789030 - RNA, 22 nt, Human
accaguuuuuuauacaucuucu

SEQ ID NO: 789031 - RNA, 22 nt, Human
aaauagagcuggguuaaacuuu

SEQ ID NO: 789032 - RNA, 22 nt, Human
agucagagacccuagaucuaau

SEQ ID NO: 789033 - RNA, 22 nt, Human
cgcgguggcggccuccagcgcc

SEQ ID NO: 789034 - RNA, 22 nt, Human
cugagacauuaugacaagugga

SEQ ID NO: 789035 - RNA, 22 nt, Human
cucaggggaccuggcuccgagu

SEQ ID NO: 789036 - RNA, 22 nt, Human
uaauuauuugaagacauuagag

SEQ ID NO: 789037 - RNA, 22 nt, Human
auucauaucauagaguuauuga

SEQ ID NO: 789038 - RNA, 22 nt, Human
auucaucuguacuucaauaucu

SEQ ID NO: 789039 - RNA, 22 nt, Human
aaauagauuucucuggguuugu

SEQ ID NO: 789040 - RNA, 22 nt, Human
aggugacugguuuaucuggcag

SEQ ID NO: 789041 - RNA, 22 nt, Human
uaugaaauugccauuuuuaugg

SEQ ID NO: 789042 - RNA, 22 nt, Human
ucaugggguuuggcuggauguc

SEQ ID NO: 789043 - RNA, 21 nt, Human
accaguuuggggggcuuccug

SEQ ID NO: 789044 - RNA, 22 nt, Human
caguuuaaggcaggacauggga

SEQ ID NO: 789045 - RNA, 22 nt, Human
uagucacaggaaguuucaaugu

SEQ ID NO: 789046 - RNA, 22 nt, Human
ccucaggggcuuuucguuguug

SEQ ID NO: 789047 - RNA, 22 nt, Human
aucacaguguagaccuuuuaaa

SEQ ID NO: 789048 - RNA, 22 nt, Human
ggcacagcacaguggacccagg

SEQ ID NO: 789049 - RNA, 22 nt, Human
uaaauuagggacuuuaguuaau

SEQ ID NO: 789050 - RNA, 23 nt, Human
uuauuuggauuuuaguggaaaga

SEQ ID NO: 789051 - RNA, 17 nt, Human
uggcacagaggugcuau

SEQ ID NO: 789052 - RNA, 22 nt, Human
gcacagccggaccgaggaaaag

SEQ ID NO: 789053 - RNA, 22 nt, Human
uucauuugccaucaguguaaug

SEQ ID NO: 789054 - RNA, 22 nt, Human
agggcacaggcuggcaggaucu

SEQ ID NO: 789055 - RNA, 21 nt, Human
cauauuaaaucggugccuuua

SEQ ID NO: 789056 - RNA, 22 nt, Human
uuuaaugauagucuuacgaaaa

SEQ ID NO: 789057 - RNA, 22 nt, Human
ggcacagcaggagcuaugugaa

SEQ ID NO: 789058 - RNA, 22 nt, Human
guuauaaaggugauaaugguca

SEQ ID NO: 789059 - RNA, 23 nt, Human
cacauauagcagccacuaagguc

SEQ ID NO: 789060 - RNA, 22 nt, Human
augccaaaauguuacauuucuu

SEQ ID NO: 789061 - RNA, 22 nt, Human
caguuuaaguguguugaaggua

SEQ ID NO: 789062 - RNA, 23 nt, Human
ccaguuuaucuuuaguguagauc

SEQ ID NO: 789063 - RNA, 22 nt, Human
uauauuaaaugaccaguuuuaa

SEQ ID NO: 789064 - RNA, 22 nt, Human
cauagauucuuauuuccaucuu

SEQ ID NO: 789065 - RNA, 22 nt, Human
gcaaaugcucuccagccugggu

SEQ ID NO: 789066 - RNA, 22 nt, Human
ucaggggacagccagcuggagg

SEQ ID NO: 789067 - RNA, 22 nt, Human
augccaaagauguuugauagaa

SEQ ID NO: 789068 - RNA, 22 nt, Human
auucuuauuuaaauagagucug

SEQ ID NO: 789069 - RNA, 22 nt, Human
agauauuaaucguacauaaggu

SEQ ID NO: 789070 - RNA, 22 nt, Human
caaaugccaggaaucucugaag

SEQ ID NO: 789071 - RNA, 19 nt, Human
agucacagaccuugucucc

SEQ ID NO: 789072 - RNA, 22 nt, Human
agagcagucaggcuaggacacu

SEQ ID NO: 789073 - RNA, 22 nt, Human
ggucacagggaagggcucucaa

SEQ ID NO: 789074 - RNA, 22 nt, Human
guaucacuuuugagagugagaa

SEQ ID NO: 789075 - RNA, 22 nt, Human
uauuagauuuguuucuguagau

SEQ ID NO: 789076 - RNA, 22 nt, Human
augcauaugccguagaauaagu

SEQ ID NO: 789077 - RNA, 22 nt, Human
acuuauucugagauuaugauca

SEQ ID NO: 789078 - RNA, 22 nt, Human
aggaauuauuugucuuagucuu

SEQ ID NO: 789079 - RNA, 22 nt, Human
uuagaucauuuugaacuaauuu

SEQ ID NO: 789080 - RNA, 22 nt, Human
cuuugauucagagagaauuagc

SEQ ID NO: 789081 - RNA, 22 nt, Human
ugagcaguaacagcucacaggg

SEQ ID NO: 789082 - RNA, 22 nt, Human
aucauaaagugcuaucugauug

SEQ ID NO: 789083 - RNA, 22 nt, Human
uggaaggagacugggaagugug

SEQ ID NO: 789084 - RNA, 22 nt, Human
acuggcagguccaucgcccuuu

SEQ ID NO: 789085 - RNA, 22 nt, Human
gucaaauauaugcaaaacuauu

SEQ ID NO: 789086 - RNA, 22 nt, Human
uuaaugaccuagagcaguaauu

SEQ ID NO: 789087 - RNA, 22 nt, Human
ucacagccuggacaguugccug

SEQ ID NO: 789088 - RNA, 22 nt, Human
uugugaauagugccgcuauaaa

SEQ ID NO: 789089 - RNA, 22 nt, Human
cuugccuuugucuucaaaggcu

SEQ ID NO: 789090 - RNA, 22 nt, Human
ggaaggucgagcugcaucuggc

SEQ ID NO: 789091 - RNA, 22 nt, Human
uaaucacaauucagaugucuua

SEQ ID NO: 789092 - RNA, 22 nt, Human
ccaguuuagguacuaggcucua

SEQ ID NO: 789093 - RNA, 22 nt, Human
ccucagggucucucacagcacc

SEQ ID NO: 789094 - RNA, 22 nt, Human
auuugucacugagagaguuaga

SEQ ID NO: 789095 - RNA, 23 nt, Human
uuauaaauauuuucagguguguu

SEQ ID NO: 789096 - RNA, 18 nt, Human
gucauggguaguuuagua

SEQ ID NO: 789097 - RNA, 22 nt, Human
uccucaggaugugggguagaau

SEQ ID NO: 789098 - RNA, 22 nt, Human
ucucacaggugcacguggcugu

SEQ ID NO: 789099 - RNA, 22 nt, Human
auuauucagucuuguaaggagu

SEQ ID NO: 789100 - RNA, 22 nt, Human
uugacacauuagagcuuguaaa

SEQ ID NO: 789101 - RNA, 22 nt, Human
uauauuaaacccucucuguagg

SEQ ID NO: 789102 - RNA, 22 nt, Human
aguuuaauauccuucaacuuuc

SEQ ID NO: 789103 - RNA, 22 nt, Human
gucagcagcauguuuaaucaaa

SEQ ID NO: 789104 - RNA, 22 nt, Human
ugucacagucucgugagcaucu

SEQ ID NO: 789105 - RNA, 22 nt, Human
uagauuucgcugcaucucaauc

SEQ ID NO: 789106 - RNA, 22 nt, Human
gggcacagaagucuaagacauc

SEQ ID NO: 789107 - RNA, 22 nt, Human
aggugccuaucuggucucugca

SEQ ID NO: 789108 - RNA, 22 nt, Human
aucacaguuuacaaaccugcug

SEQ ID NO: 789109 - RNA, 22 nt, Human
auucaaauuaaguuaauucagc

SEQ ID NO: 789110 - RNA, 22 nt, Human
ccucagggucugaggagaccgu

SEQ ID NO: 789111 - RNA, 19 nt, Human
aggaaggaaccugagucug

SEQ ID NO: 789112 - RNA, 22 nt, Human
ugagugcuuuaaauguuauuuu

SEQ ID NO: 789113 - RNA, 17 nt, Human
auguuaauuucacauuu

SEQ ID NO: 789114 - RNA, 19 nt, Human
ggagccuggcaggggcgug

SEQ ID NO: 789115 - RNA, 22 nt, Human
uaauacaucauucaucuaagga

SEQ ID NO: 789116 - RNA, 22 nt, Human
agguccugggaguucuagugug

SEQ ID NO: 789117 - RNA, 22 nt, Human
uaaugacugccgucucucuuca

SEQ ID NO: 789118 - RNA, 19 nt, Human
acuggcagggcugcggugg

SEQ ID NO: 789119 - RNA, 22 nt, Human
ugggcacagaauagauggccca

SEQ ID NO: 789120 - RNA, 22 nt, Human
uuuagucauuuggauuugaucu

SEQ ID NO: 789121 - RNA, 22 nt, Human
ugucauggcguuguggggacua

SEQ ID NO: 789122 - RNA, 22 nt, Human
ccucaggguggcaucagaucuu

SEQ ID NO: 789123 - RNA, 22 nt, Human
uucauucauguauugucuaugg

SEQ ID NO: 789124 - RNA, 22 nt, Human
aggcaguuuauccccagagccu

SEQ ID NO: 789125 - RNA, 23 nt, Human
aaauauucuuuuuuaguaagugc

SEQ ID NO: 789126 - RNA, 22 nt, Human
uauuggaagugaacaccaggcu

SEQ ID NO: 789127 - RNA, 22 nt, Human
uuaauuaguagaggcauuuagu

SEQ ID NO: 789128 - RNA, 22 nt, Human
ucacauauuuaagaaaguuaaa

SEQ ID NO: 789129 - RNA, 22 nt, Human
auggggaagcaauuggauuucc

SEQ ID NO: 789130 - RNA, 22 nt, Human
caggaaggcccaccuguccugu

SEQ ID NO: 789131 - RNA, 22 nt, Human
cagguccuggcaucaggcaggu

SEQ ID NO: 789132 - RNA, 22 nt, Human
ggcaucaggaucugucuugcuu

SEQ ID NO: 789133 - RNA, 19 nt, Human
caguuuaacuaauuuuauc

SEQ ID NO: 789134 - RNA, 22 nt, Human
auauuauuuucccuggaguugu

SEQ ID NO: 789135 - RNA, 22 nt, Human
aauagauacuacuuagauguag

SEQ ID NO: 789136 - RNA, 22 nt, Human
agugaaauugcuguaagaggaa

SEQ ID NO: 789137 - RNA, 22 nt, Human
gugagggguggcugagcaguuu

SEQ ID NO: 789138 - RNA, 23 nt, Human
uuuagucaguugacagccauaua

SEQ ID NO: 789139 - RNA, 21 nt, Human
aucacauuggcuguuauuauu

SEQ ID NO: 789140 - RNA, 22 nt, Human
acacaaauuguaggauaauugc

SEQ ID NO: 789141 - RNA, 22 nt, Human
uccucaggucaaagcaggagaa

SEQ ID NO: 789142 - RNA, 22 nt, Human
uauucagaaaauaaauuggauu

SEQ ID NO: 789143 - RNA, 22 nt, Human
augccaaagcccaaguucauca

SEQ ID NO: 789144 - RNA, 22 nt, Human
ugcacagcugccuccucucugc

SEQ ID NO: 789145 - RNA, 22 nt, Human
gaaauaauucugugucugaaca

SEQ ID NO: 789146 - RNA, 22 nt, Human
cauuaauaaacauuucagaaga

SEQ ID NO: 789147 - RNA, 22 nt, Human
cucugacagccuucauuaugca

SEQ ID NO: 789148 - RNA, 22 nt, Human
uauauauucuuaaguaguguag

SEQ ID NO: 789149 - RNA, 22 nt, Human
cuaauauuuuuagaaaucacga

SEQ ID NO: 789150 - RNA, 22 nt, Human
acuggcagaauugaauaguugu

SEQ ID NO: 789151 - RNA, 22 nt, Human
uggggaaagacauucauacagu

SEQ ID NO: 789152 - RNA, 22 nt, Human
agcaguuuuagggagacacauu

SEQ ID NO: 789153 - RNA, 21 nt, Human
gcagucacucgguuggcuacc

SEQ ID NO: 789154 - RNA, 22 nt, Human
uuauuaaugaguacaaguuauu

SEQ ID NO: 789155 - RNA, 22 nt, Human
gggcacagucuaaaguugggcc

SEQ ID NO: 789156 - RNA, 22 nt, Human
ugcaaaugggcaucuccaagug

SEQ ID NO: 789157 - RNA, 22 nt, Human
uggcacaguccugggugccugc

SEQ ID NO: 789158 - RNA, 22 nt, Human
acauucaacauggcuggucuag

SEQ ID NO: 789159 - RNA, 22 nt, Human
ugggcacaggggaauggaugaa

SEQ ID NO: 789160 - RNA, 19 nt, Human
ggccuugcucuguggcagc

SEQ ID NO: 789161 - RNA, 22 nt, Human
aggcacagcacaccuggccccc

SEQ ID NO: 789162 - RNA, 22 nt, Human
auauucauugaacaccuacuac

SEQ ID NO: 789163 - RNA, 22 nt, Human
acuggcagagggaaaaccauuc

SEQ ID NO: 789164 - RNA, 22 nt, Human
auucacaguuacugcugaacca

SEQ ID NO: 789165 - RNA, 22 nt, Human
aguagucacuucuauuaauggc

SEQ ID NO: 789166 - RNA, 22 nt, Human
uuaaauauuauguugucugcaa

SEQ ID NO: 789167 - RNA, 22 nt, Human
uuauucagugcauauauuaaaa

SEQ ID NO: 789168 - RNA, 22 nt, Human
cagguccuuuaguguccagaac

SEQ ID NO: 789169 - RNA, 22 nt, Human
gaauagauccucauuuauugau

SEQ ID NO: 789170 - RNA, 22 nt, Human
uccuggggccagcacuggugga

SEQ ID NO: 789171 - RNA, 22 nt, Human
ggcacagcacuguaggccuggg

SEQ ID NO: 789172 - RNA, 22 nt, Human
aggaaggagggcagauauuaag

SEQ ID NO: 789173 - RNA, 22 nt, Human
acacauauauacauauuugugc

SEQ ID NO: 789174 - RNA, 21 nt, Human
agagccugagaucuuccagca

SEQ ID NO: 789175 - RNA, 22 nt, Human
acuggcagccacaacuggcagg

SEQ ID NO: 789176 - RNA, 22 nt, Human
auaaauagugugucauaaaguc

SEQ ID NO: 789177 - RNA, 22 nt, Human
aucauuaaauauaagcuucaca

SEQ ID NO: 789178 - RNA, 22 nt, Human
aaccaguuggcaaccagcaguu

SEQ ID NO: 789179 - RNA, 20 nt, Human
agcacagcgcgguguuccuu

SEQ ID NO: 789180 - RNA, 22 nt, Human
guccuugcuugagacaggcagu

SEQ ID NO: 789181 - RNA, 22 nt, Human
acacaguucuuucacuguuggu

SEQ ID NO: 789182 - RNA, 22 nt, Human
ucauggggcucuucaaguggag

SEQ ID NO: 789183 - RNA, 22 nt, Human
gcaggagaacaaagcaagcugc

SEQ ID NO: 789184 - RNA, 22 nt, Human
aaaauggguuucuucaaccuca

SEQ ID NO: 789185 - RNA, 22 nt, Human
acggcuucuugacuguggguug

SEQ ID NO: 789186 - RNA, 22 nt, Human
ugucauggucuguaaggagccc

SEQ ID NO: 789187 - RNA, 22 nt, Human
gaaauauuguacuggagauguu

SEQ ID NO: 789188 - RNA, 22 nt, Human
uuaauagauaugccucuagagu

SEQ ID NO: 789189 - RNA, 22 nt, Human
uggggaaauguccugccuuccc

SEQ ID NO: 789190 - RNA, 22 nt, Human
gcaaaugcucuccuuggucagg

SEQ ID NO: 789191 - RNA, 22 nt, Human
uuaaugaccuggaagaagugau

SEQ ID NO: 789192 - RNA, 22 nt, Human
guugaugaaaaugaauugcaug

SEQ ID NO: 789193 - RNA, 20 nt, Human
cuaauauucuacucuaagga

SEQ ID NO: 789194 - RNA, 22 nt, Human
augggggaaaguacgagcaugg

SEQ ID NO: 789195 - RNA, 22 nt, Human
cagucacauugcccugcauuua

SEQ ID NO: 789196 - RNA, 22 nt, Human
ucaggggagguugaaucgucuc

SEQ ID NO: 789197 - RNA, 22 nt, Human
acacagaguauuuagaaggggu

SEQ ID NO: 789198 - RNA, 22 nt, Human
uaucacauaguguuuaguaaau

SEQ ID NO: 789199 - RNA, 23 nt, Human
ucacacagcuggucagguacaga

SEQ ID NO: 789200 - RNA, 22 nt, Human
uauuaaauuauggauuuaggag

SEQ ID NO: 789201 - RNA, 22 nt, Human
uaaaugagggcugacaugauug

SEQ ID NO: 789202 - RNA, 22 nt, Human
aauaauagcagaguuuacaauc

SEQ ID NO: 789203 - RNA, 22 nt, Human
ugcuauuauugucaccacugua

SEQ ID NO: 789204 - RNA, 18 nt, Human
ccucaggggaccuggcag

SEQ ID NO: 789205 - RNA, 22 nt, Human
auauaguuuaagaaaguacagu

SEQ ID NO: 789206 - RNA, 22 nt, Human
auagaguuuuauuuuccaauaa

SEQ ID NO: 789207 - RNA, 22 nt, Human
acuggcagaggauagcacuaau

SEQ ID NO: 789208 - RNA, 22 nt, Human
cuugcuuaccuaguuagcucca

SEQ ID NO: 789209 - RNA, 22 nt, Human
gacaguaacugagagauguaau

SEQ ID NO: 789210 - RNA, 22 nt, Human
acuuuccuagacuucagugaca

SEQ ID NO: 789211 - RNA, 20 nt, Human
uauaaauucagagcuuuggu

SEQ ID NO: 789212 - RNA, 22 nt, Human
uuauuaauacaugcaccugcau

SEQ ID NO: 789213 - RNA, 22 nt, Human
cagguccugcagggagaguaaa

SEQ ID NO: 789214 - RNA, 22 nt, Human
ccaguuuaagacuuaucucaau

SEQ ID NO: 789215 - RNA, 22 nt, Human
aaauacuguugaaugaaguaag

SEQ ID NO: 789216 - RNA, 22 nt, Human
uccucaggcugccuggaagacu

SEQ ID NO: 789217 - RNA, 22 nt, Human
uggggaaaacagaggaaauuag

SEQ ID NO: 789218 - RNA, 22 nt, Human
gcacagcccuggucggggcccc

SEQ ID NO: 789219 - RNA, 22 nt, Human
aggggaaaucucucgccaucug

SEQ ID NO: 789220 - RNA, 22 nt, Human
auauuaguuuggagacuacaau

SEQ ID NO: 789221 - RNA, 22 nt, Human
uuauacauguguuuugagauga

SEQ ID NO: 789222 - RNA, 22 nt, Human
augaauaaaacauuuuaaucag

SEQ ID NO: 789223 - RNA, 22 nt, Human
caggaaggggcucacucuggcc

SEQ ID NO: 789224 - RNA, 22 nt, Human
ccacuggcaguuggcuagccuu

SEQ ID NO: 789225 - RNA, 22 nt, Human
gguccuugggucuccuguguuu

SEQ ID NO: 789226 - RNA, 19 nt, Human
ugcaaaugcuguugagaau

SEQ ID NO: 789227 - RNA, 22 nt, Human
cacagcccugcgccccaguuug

SEQ ID NO: 789228 - RNA, 22 nt, Human
ggcaguuucaucaggagaaaag

SEQ ID NO: 789229 - RNA, 22 nt, Human
aauguauaaaguguuaauaacu

SEQ ID NO: 789230 - RNA, 22 nt, Human
aauagagucaguucuacauucu

SEQ ID NO: 789231 - RNA, 22 nt, Human
gggcagcagcaggaggucucug

SEQ ID NO: 789232 - RNA, 22 nt, Human
aucacaguuacucaaauaauga

SEQ ID NO: 789233 - RNA, 22 nt, Human
cagcaggacauggaggaguaaa

SEQ ID NO: 789234 - RNA, 22 nt, Human
auuauucaaucauauuaaaagu

SEQ ID NO: 789235 - RNA, 22 nt, Human
cauauauucugguuuucacugg

SEQ ID NO: 789236 - RNA, 22 nt, Human
cugugggcgccugucagccuca

SEQ ID NO: 789237 - RNA, 22 nt, Human
uggggaaaguucuugaaaguaa

SEQ ID NO: 789238 - RNA, 22 nt, Human
uauauuaacacccacuugccuc

SEQ ID NO: 789239 - RNA, 22 nt, Human
acauaugagguguuauucuaug

SEQ ID NO: 789240 - RNA, 22 nt, Human
ccucaggguucggaugagaaca

SEQ ID NO: 789241 - RNA, 22 nt, Human
ugcaaauguguggugaggcauu

SEQ ID NO: 789242 - RNA, 22 nt, Human
cacaggagaaaggggaagcucg

SEQ ID NO: 789243 - RNA, 22 nt, Human
acacaguuuaugguauucuguu

SEQ ID NO: 789244 - RNA, 22 nt, Human
ugggcacagggguaggaaugag

SEQ ID NO: 789245 - RNA, 22 nt, Human
uuauucauuaacagggaccaaa

SEQ ID NO: 789246 - RNA, 22 nt, Human
cagucacacaaguggacuuggg

SEQ ID NO: 789247 - RNA, 22 nt, Human
acacuacagggagaagacucac

SEQ ID NO: 789248 - RNA, 22 nt, Human
aaucacaucucauucaacagcc

SEQ ID NO: 789249 - RNA, 22 nt, Human
acacauuuucaacacugucaag

SEQ ID NO: 789250 - RNA, 22 nt, Human
auaugauuguccuuagcaaauu

SEQ ID NO: 789251 - RNA, 22 nt, Human
ugucauggcugaaagugggggc

SEQ ID NO: 789252 - RNA, 22 nt, Human
gggcacagagaagguuuuagug

SEQ ID NO: 789253 - RNA, 19 nt, Human
ugcaaauguaggaagaaua

SEQ ID NO: 789254 - RNA, 22 nt, Human
auauauagagcuagauguuaaa

SEQ ID NO: 789255 - RNA, 22 nt, Human
ggccacagaacagcuacaggac

SEQ ID NO: 789256 - RNA, 22 nt, Human
gcaggagaaaugaagauugggu

SEQ ID NO: 789257 - RNA, 22 nt, Human
gaagguccagcguggccaaguc

SEQ ID NO: 789258 - RNA, 22 nt, Human
uacauauacugagugauuugcu

SEQ ID NO: 789259 - RNA, 22 nt, Human
gagggaguaacguacuacagug

SEQ ID NO: 789260 - RNA, 22 nt, Human
acauaagugcacaauaaauauu

SEQ ID NO: 789261 - RNA, 22 nt, Human
uaggggagcucgggugcaaucg

SEQ ID NO: 789262 - RNA, 22 nt, Human
gccuaauacaugaugauaggua

SEQ ID NO: 789263 - RNA, 20 nt, Human
aggaaggaaguuugcaugga

SEQ ID NO: 789264 - RNA, 22 nt, Human
cagguccucgggggaggccggc

SEQ ID NO: 789265 - RNA, 22 nt, Human
ucauauaagagcuuuagaguca

SEQ ID NO: 789266 - RNA, 20 nt, Human
uaaauuagccuugaagauua

SEQ ID NO: 789267 - RNA, 22 nt, Human
ugggcacaaacaucugccuguu

SEQ ID NO: 789268 - RNA, 22 nt, Human
agucacagaaugauggcuccag

SEQ ID NO: 789269 - RNA, 22 nt, Human
uucuucaucuguaagauaagca

SEQ ID NO: 789270 - RNA, 22 nt, Human
gugggggacccaggugcugucc

SEQ ID NO: 789271 - RNA, 22 nt, Human
cacuggcaaauggagagaaugu

SEQ ID NO: 789272 - RNA, 22 nt, Human
acuggcaggcugcuggccggcg

SEQ ID NO: 789273 - RNA, 22 nt, Human
acuggcaguggcagcagaaaga

SEQ ID NO: 789274 - RNA, 18 nt, Human
aguguuaaguaaguagca

SEQ ID NO: 789275 - RNA, 20 nt, Human
uggggaaagccaucgaugag

SEQ ID NO: 789276 - RNA, 22 nt, Human
auuaauauugguucauuagcug

SEQ ID NO: 789277 - RNA, 22 nt, Human
ucaugggguagaagcauguuua

SEQ ID NO: 789278 - RNA, 22 nt, Human
uaguuuuacuugcgaugauaau

SEQ ID NO: 789279 - RNA, 21 nt, Human
ucgugcagcagcugaggcuug

SEQ ID NO: 789280 - RNA, 22 nt, Human
caaauagugucacauugugagg

SEQ ID NO: 789281 - RNA, 22 nt, Human
uaauaguugugacuuuguaaag

SEQ ID NO: 789282 - RNA, 22 nt, Human
aauaauuagugggacagagaac

SEQ ID NO: 789283 - RNA, 18 nt, Human
ccuaauaugagggguccu

SEQ ID NO: 789284 - RNA, 22 nt, Human
uuguucauaaagacaguucaga

SEQ ID NO: 789285 - RNA, 22 nt, Human
uagucacaaccuucaaguuguc

SEQ ID NO: 789286 - RNA, 22 nt, Human
uauaagauacuuggcauagugc

SEQ ID NO: 789287 - RNA, 22 nt, Human
aucucauaaacacacauauaug

SEQ ID NO: 789288 - RNA, 22 nt, Human
augcaaauaaagcaacuauaca

SEQ ID NO: 789289 - RNA, 22 nt, Human
aauagcuuaugggauagauguu

SEQ ID NO: 789290 - RNA, 22 nt, Human
ucauggggaaagcccgcccuca

SEQ ID NO: 789291 - RNA, 22 nt, Human
gggcacagcccagugggguccc

SEQ ID NO: 789292 - RNA, 22 nt, Human
ggcacagcuacuugcucacucu

SEQ ID NO: 789293 - RNA, 22 nt, Human
ugucauggcacuagaguggggu

SEQ ID NO: 789294 - RNA, 22 nt, Human
auauauucuuaaagaaucugac

SEQ ID NO: 789295 - RNA, 22 nt, Human
auauaaguguguggcuguuagu

SEQ ID NO: 789296 - RNA, 22 nt, Human
acacuacaacagcagaggugag

SEQ ID NO: 789297 - RNA, 22 nt, Human
aggacacuuggcuauuguucca

SEQ ID NO: 789298 - RNA, 22 nt, Human
aguacaguggucauaauauaaa

SEQ ID NO: 789299 - RNA, 22 nt, Human
aaaugccagcacacgucugugg

SEQ ID NO: 789300 - RNA, 22 nt, Human
auuaaucauuucugcauuaucu

SEQ ID NO: 789301 - RNA, 22 nt, Human
ugcaaaugucaaggguuagugu

SEQ ID NO: 789302 - RNA, 22 nt, Human
auagauacauuguuauauuugu

SEQ ID NO: 789303 - RNA, 22 nt, Human
aaauagauuuccuagcauugga

SEQ ID NO: 789304 - RNA, 19 nt, Human
ccauauaaccagcaagugu

SEQ ID NO: 789305 - RNA, 22 nt, Human
augcauauugauuauagauuca

SEQ ID NO: 789306 - RNA, 23 nt, Human
aggaaggagguccuaacaguauc

SEQ ID NO: 789307 - RNA, 22 nt, Human
uuacacaugcuuuguguguaug

SEQ ID NO: 789308 - RNA, 22 nt, Human
cuucccuucugugcagggcaga

SEQ ID NO: 789309 - RNA, 22 nt, Human
uuuuagauuauaagucuaauuc

SEQ ID NO: 789310 - RNA, 22 nt, Human
gcacagccagcaucugagggau

SEQ ID NO: 789311 - RNA, 22 nt, Human
aauauaauuuuauuccuagagu

SEQ ID NO: 789312 - RNA, 22 nt, Human
ggacacuacaaucugccugcau

SEQ ID NO: 789313 - RNA, 22 nt, Human
uccucagggaagaugagccuca

SEQ ID NO: 789314 - RNA, 17 nt, Human
ugucauggcuaugguug

SEQ ID NO: 789315 - RNA, 22 nt, Human
aucacaguggcuaccucuggau

SEQ ID NO: 789316 - RNA, 22 nt, Human
acuggcagaacuggugauuguc

SEQ ID NO: 789317 - RNA, 22 nt, Human
uauugauaugcagaacugacuu

SEQ ID NO: 789318 - RNA, 23 nt, Human
ucacauaucaagaaagugguaga

SEQ ID NO: 789319 - RNA, 22 nt, Human
auuaauaaaauaccacuuuguu

SEQ ID NO: 789320 - RNA, 22 nt, Human
uccucaggauguggaguagaau

SEQ ID NO: 789321 - RNA, 22 nt, Human
uuuucugaaguuuaagacauuu

SEQ ID NO: 789322 - RNA, 22 nt, Human
cacagugaccucuuuaaaaggg

SEQ ID NO: 789323 - RNA, 22 nt, Human
ggcagcuguaagaugagugaau

SEQ ID NO: 789324 - RNA, 22 nt, Human
auggaaauggagugugcuugcu

SEQ ID NO: 789325 - RNA, 22 nt, Human
agggacccauagagagaccagu

SEQ ID NO: 789326 - RNA, 22 nt, Human
gaacaaaucccuuccugucucc

SEQ ID NO: 789327 - RNA, 22 nt, Human
guccagagaguaaaggggguaa

SEQ ID NO: 789328 - RNA, 22 nt, Human
ccagaagucaaugcagauguga

SEQ ID NO: 789329 - RNA, 22 nt, Human
uucaccauuacauacaaagaug

SEQ ID NO: 789330 - RNA, 22 nt, Human
aguggcagagucaggguuugga

SEQ ID NO: 789331 - RNA, 22 nt, Human
cacucugcagcugaagggcugg

SEQ ID NO: 789332 - RNA, 22 nt, Human
ugugcugagugaucccauuccu

SEQ ID NO: 789333 - RNA, 22 nt, Human
ucuggggaccauggcaucuaaa

SEQ ID NO: 789334 - RNA, 22 nt, Human
guucacaugcucucaugcuuuu

SEQ ID NO: 789335 - RNA, 22 nt, Human
ucucccaagggcacauucaagg

SEQ ID NO: 789336 - RNA, 22 nt, Human
agcccagguggagugugugggg

SEQ ID NO: 789337 - RNA, 22 nt, Human
gaauuuccucuaaaccccugag

SEQ ID NO: 789338 - RNA, 20 nt, Human
aauaaaagaagccuucaccc

SEQ ID NO: 789339 - RNA, 22 nt, Human
gcaggacagacccaagcagucu

SEQ ID NO: 789340 - RNA, 22 nt, Human
cugauuuucaaaauguguuaaa

SEQ ID NO: 789341 - RNA, 22 nt, Human
cuuggcugcuuuugugcacauu

SEQ ID NO: 789342 - RNA, 22 nt, Human
uuuguauuuuucccagcuagcu

SEQ ID NO: 789343 - RNA, 22 nt, Human
gccauguccugggcaucugcca

SEQ ID NO: 789344 - RNA, 22 nt, Human
ugcagcuucacucaggaagcca

SEQ ID NO: 789345 - RNA, 18 nt, Human
cccagccucuccuuucua

SEQ ID NO: 789346 - RNA, 21 nt, Human
uagagaaaagaagcuguuccu

SEQ ID NO: 789347 - RNA, 22 nt, Human
uaaguucaaaucaucccaacuu

SEQ ID NO: 789348 - RNA, 22 nt, Human
uuugcaaagugcuugcagagua

SEQ ID NO: 789349 - RNA, 17 nt, Human
gcugcagcgguaggcag

SEQ ID NO: 789350 - RNA, 22 nt, Human
ucucuuggugauagucuuucuu

SEQ ID NO: 789351 - RNA, 22 nt, Human
aggaaacauugauauugggaaa

SEQ ID NO: 789352 - RNA, 22 nt, Human
ccuggucagagcagucaggauc

SEQ ID NO: 789353 - RNA, 22 nt, Human
ucugccucuuucaggccuggca

SEQ ID NO: 789354 - RNA, 22 nt, Human
gacagcaaugacggggcagcug

SEQ ID NO: 789355 - RNA, 22 nt, Human
ucuucaggaagggaaaucaucc

SEQ ID NO: 789356 - RNA, 20 nt, Human
cugcugagagccuggcuugc

SEQ ID NO: 789357 - RNA, 22 nt, Human
gcugcuggcacuggagugagcc

SEQ ID NO: 789358 - RNA, 22 nt, Human
ggcccagcugggcggggacacg

SEQ ID NO: 789359 - RNA, 22 nt, Human
aacugucuaaggagaauaugaa

SEQ ID NO: 789360 - RNA, 22 nt, Human
ccauucuuucagugucucaugu

SEQ ID NO: 789361 - RNA, 22 nt, Human
uagaaaggagcauuuuagacua

SEQ ID NO: 789362 - RNA, 22 nt, Human
aggcuuggagguucuguagcca

SEQ ID NO: 789363 - RNA, 22 nt, Human
ggcaggugcgcauguugcauua

SEQ ID NO: 789364 - RNA, 22 nt, Human
cucugccaucuuggagcucaag

SEQ ID NO: 789365 - RNA, 22 nt, Human
gagagcuggccagcuucaguau

SEQ ID NO: 789366 - RNA, 22 nt, Human
caugaaaaauuuacuguuaaca

SEQ ID NO: 789367 - RNA, 22 nt, Human
uuuuggcuccagugguuugugc

SEQ ID NO: 789368 - RNA, 17 nt, Human
aaaauucuguaaagagg

SEQ ID NO: 789369 - RNA, 22 nt, Human
guccagccccugacucccaggc

SEQ ID NO: 789370 - RNA, 22 nt, Human
gaagagcuuagacagaaucaaa

SEQ ID NO: 789371 - RNA, 22 nt, Human
uggugagcucuuuagacuggga

SEQ ID NO: 789372 - RNA, 22 nt, Human
aaaagucuacaagcuucaacaa

SEQ ID NO: 789373 - RNA, 22 nt, Human
agcaggaggagagccuggcggu

SEQ ID NO: 789374 - RNA, 22 nt, Human
aggccagcuguuacuagagcca

SEQ ID NO: 789375 - RNA, 22 nt, Human
acagcaggauuuggcgauguug

SEQ ID NO: 789376 - RNA, 22 nt, Human
ugcagugguugagagcccagac

SEQ ID NO: 789377 - RNA, 22 nt, Human
gaagccagauuaucacaagcca

SEQ ID NO: 789378 - RNA, 22 nt, Human
ccagccuucugagcugccugga

SEQ ID NO: 789379 - RNA, 20 nt, Human
auauguguacguguauacau

SEQ ID NO: 789380 - RNA, 22 nt, Human
acacacaugccuuuccuaagua

SEQ ID NO: 789381 - RNA, 20 nt, Human
gaugaaaucacugggcagcc

SEQ ID NO: 789382 - RNA, 22 nt, Human
agugcauuccuggggaagaagc

SEQ ID NO: 789383 - RNA, 22 nt, Human
aucuggcuauugacauguuaua

SEQ ID NO: 789384 - RNA, 22 nt, Human
aagucacacaguuaacaugagg

SEQ ID NO: 789385 - RNA, 22 nt, Human
uggcucagugcauucacaguaa

SEQ ID NO: 789386 - RNA, 22 nt, Human
aaagaagagcuggaaggagucu

SEQ ID NO: 789387 - RNA, 22 nt, Human
aaaaaucacuuuuauaggcagc

SEQ ID NO: 789388 - RNA, 22 nt, Human
agugacguuuauugggugugaa

SEQ ID NO: 789389 - RNA, 22 nt, Human
acugugguuaccucuugucuua

SEQ ID NO: 789390 - RNA, 22 nt, Human
aacaguaacgagauguccuaac

SEQ ID NO: 789391 - RNA, 22 nt, Human
uaaaguauauuuuuucucaaua

SEQ ID NO: 789392 - RNA, 22 nt, Human
gagacagagaucuugcugaguc

SEQ ID NO: 789393 - RNA, 22 nt, Human
gacagugauuaguuacuauaaa

SEQ ID NO: 789394 - RNA, 17 nt, Human
ugucauggcuaugguug

SEQ ID NO: 789395 - RNA, 22 nt, Human
cuggaguugggaugugccugga

SEQ ID NO: 789396 - RNA, 22 nt, Human
ccuggggcucaagauggcgccg

SEQ ID NO: 789397 - RNA, 22 nt, Human
caucaguguggcaguucacugu

SEQ ID NO: 789398 - RNA, 22 nt, Human
agcagcaggugaccucgaugcc

SEQ ID NO: 789399 - RNA, 22 nt, Human
ccacagucuaugcaacaagguc

SEQ ID NO: 789400 - RNA, 22 nt, Human
cuuucagguucuauaggaagcc

SEQ ID NO: 789401 - RNA, 22 nt, Human
agcagcaccuguccucgcugcu

SEQ ID NO: 789402 - RNA, 22 nt, Human
aucuggcuuacgaagcacuggu

SEQ ID NO: 789403 - RNA, 22 nt, Human
uaucaggaguugacaguugcua

SEQ ID NO: 789404 - RNA, 22 nt, Human
uucaucaauguguuuaauaaug

SEQ ID NO: 789405 - RNA, 22 nt, Human
uuuaaauucugucugccgcuua

SEQ ID NO: 789406 - RNA, 22 nt, Human
ucaugaaaauagaucagaaauu

SEQ ID NO: 789407 - RNA, 22 nt, Human
ugucauuuucuaaucuguuguc

SEQ ID NO: 789408 - RNA, 22 nt, Human
gccaggagaaugcuagcagagg

SEQ ID NO: 789409 - RNA, 19 nt, Human
gugcuuuuuaagagcucag

SEQ ID NO: 789410 - RNA, 22 nt, Human
ucaaauaugugauagaagcuaa

SEQ ID NO: 789411 - RNA, 19 nt, Human
ugugggcaagggauggcag

SEQ ID NO: 789412 - RNA, 22 nt, Human
uucauugaguauagggguauac

SEQ ID NO: 789413 - RNA, 22 nt, Human
cagguguuucaaaugugaaacu

SEQ ID NO: 789414 - RNA, 22 nt, Human
agcccagcuccuccacagaaua

SEQ ID NO: 789415 - RNA, 22 nt, Human
ccuccaggcugguuaucagcug

SEQ ID NO: 789416 - RNA, 22 nt, Human
uggcuucacaauuucauaacua

SEQ ID NO: 789417 - RNA, 22 nt, Human
agucugagucuaaaggcuugag

SEQ ID NO: 789418 - RNA, 23 nt, Human
acuuucccauagcauggcuuccu

SEQ ID NO: 789419 - RNA, 22 nt, Human
aacugcaaaauaaucaaguugu

SEQ ID NO: 789420 - RNA, 22 nt, Human
ccucuggaucuuucuccacacu

SEQ ID NO: 789421 - RNA, 19 nt, Human
aucuuacagagcagaguac

SEQ ID NO: 789422 - RNA, 19 nt, Human
auauagcauuauucaauuu

SEQ ID NO: 789423 - RNA, 22 nt, Human
cccuguggaggaggagagcagu

SEQ ID NO: 789424 - RNA, 21 nt, Human
ugggagaccgccuuccuggga

SEQ ID NO: 789425 - RNA, 22 nt, Human
cucuuuccucagccacagucua

SEQ ID NO: 789426 - RNA, 22 nt, Human
ccugggcucuauccugacccag

SEQ ID NO: 789427 - RNA, 22 nt, Human
aaaaauacuucacuucugggug

SEQ ID NO: 789428 - RNA, 22 nt, Human
uugcagcugaggaaauugaagc

SEQ ID NO: 789429 - RNA, 22 nt, Human
ucaggcugcagcugucagcagc

SEQ ID NO: 789430 - RNA, 22 nt, Human
uggcagauuuugaagacagaga

SEQ ID NO: 789431 - RNA, 18 nt, Human
gggcauggaugcagcauc

SEQ ID NO: 789432 - RNA, 22 nt, Human
acugucaaaagagauuauauua

SEQ ID NO: 789433 - RNA, 22 nt, Human
ggcuuggagucauacugagaau

SEQ ID NO: 789434 - RNA, 22 nt, Human
aggcagcguagcaaggcuagua

SEQ ID NO: 789435 - RNA, 22 nt, Human
cucuguguucagccuagcagaa

SEQ ID NO: 789436 - RNA, 22 nt, Human
uguuucuaucuggaucaauaga

SEQ ID NO: 789437 - RNA, 23 nt, Human
uuguauuuuuaguagagacaggg

SEQ ID NO: 789438 - RNA, 22 nt, Human
ugaaaucaauaauuggugauug

SEQ ID NO: 789439 - RNA, 22 nt, Human
gccguuauucugcuggccccgg

SEQ ID NO: 789440 - RNA, 22 nt, Human
uuuucauuagaaugacugagaa

SEQ ID NO: 789441 - RNA, 22 nt, Human
agagugagggggcacugagacg

SEQ ID NO: 789442 - RNA, 20 nt, Human
uggccucugagaugccacgg

SEQ ID NO: 789443 - RNA, 18 nt, Human
cacaggcucccagugagg

SEQ ID NO: 789444 - RNA, 21 nt, Human
gcccacagugaggaggauccc

SEQ ID NO: 789445 - RNA, 22 nt, Human
uuaaggcacagagagguuaagu

SEQ ID NO: 789446 - RNA, 22 nt, Human
agagaggcugggcguagggcuu

SEQ ID NO: 789447 - RNA, 22 nt, Human
auuuccaugccuuagcuuaagg

SEQ ID NO: 789448 - RNA, 22 nt, Human
aaagccauugcagagcaggauu

SEQ ID NO: 789449 - RNA, 22 nt, Human
acauguaugcuuuaugaaguag

SEQ ID NO: 789450 - RNA, 21 nt, Human
gggcgaggccugauguggcuc

SEQ ID NO: 789451 - RNA, 22 nt, Human
ccuggcuguuugagcggggaau

SEQ ID NO: 789452 - RNA, 19 nt, Human
gggagccagacccuuugcu

SEQ ID NO: 789453 - RNA, 22 nt, Human
aggaagagcuggaccagaggac

SEQ ID NO: 789454 - RNA, 22 nt, Human
ggaaaccauucccgacucuccu

SEQ ID NO: 789455 - RNA, 19 nt, Human
uccaccccagccagcucug

SEQ ID NO: 789456 - RNA, 22 nt, Human
agcugcaaguguugccuccuac

SEQ ID NO: 789457 - RNA, 22 nt, Human
agcuccuggggguuccaagcag

SEQ ID NO: 789458 - RNA, 22 nt, Human
aucuggaaaacacaguguagac

SEQ ID NO: 789459 - RNA, 22 nt, Human
guccugagucaagugugggcag

SEQ ID NO: 789460 - RNA, 22 nt, Human
uggagccagcccaggccccucu

SEQ ID NO: 789461 - RNA, 21 nt, Human
ugaaugaugccccagaguugu

SEQ ID NO: 789462 - RNA, 22 nt, Human
augcauacagauuuaaaauuuu

SEQ ID NO: 789463 - RNA, 22 nt, Human
agaauauaguuaccaaauucug

SEQ ID NO: 789464 - RNA, 22 nt, Human
ccaggacacugcuucacagcag

SEQ ID NO: 789465 - RNA, 22 nt, Human
aaagaauuuguacacccuacua

SEQ ID NO: 789466 - RNA, 20 nt, Human
ggcagaugcagagcuaugca

SEQ ID NO: 789467 - RNA, 22 nt, Human
ccccauggcaacugcugggggu

SEQ ID NO: 789468 - RNA, 22 nt, Human
cugcagcuccucucugugcccc

SEQ ID NO: 789469 - RNA, 22 nt, Human
aacaucuuugauaaacuuagug

SEQ ID NO: 789470 - RNA, 22 nt, Human
agcuggcauugcagggagcugc

SEQ ID NO: 789471 - RNA, 22 nt, Human
aggcaaagaaguuggucaggag

SEQ ID NO: 789472 - RNA, 22 nt, Human
ccacacagauaaguguuuucua

SEQ ID NO: 789473 - RNA, 22 nt, Human
gagaagggauaugccacucucg

SEQ ID NO: 789474 - RNA, 22 nt, Human
ccaugcaauuucuguaaaacca

SEQ ID NO: 789475 - RNA, 22 nt, Human
cucaccccuguaauuccagcac

SEQ ID NO: 789476 - RNA, 22 nt, Human
uccuggccuuagcgaggcgguc

SEQ ID NO: 789477 - RNA, 22 nt, Human
cagaagucacccucagaauaac

SEQ ID NO: 789478 - RNA, 22 nt, Human
aaacccugcucuuauggaacuu

SEQ ID NO: 789479 - RNA, 23 nt, Human
agggagcuaaaaggcuggagcag

SEQ ID NO: 789480 - RNA, 23 nt, Human
ccaggaagaggccauccacaguc

SEQ ID NO: 789481 - RNA, 17 nt, Human
ggaaaagaagaguagga

SEQ ID NO: 789482 - RNA, 22 nt, Human
ggagccagagggaugcaguuga

SEQ ID NO: 789483 - RNA, 22 nt, Human
gccucccuuggugucucccggg

SEQ ID NO: 789484 - RNA, 22 nt, Human
cagacacagauaugcauauggc

SEQ ID NO: 789485 - RNA, 22 nt, Human
guguuuuagugcugcugagcug

SEQ ID NO: 789486 - RNA, 22 nt, Human
auuacaaaagaagggagaaggu

SEQ ID NO: 789487 - RNA, 22 nt, Human
cccagcuaccucugcuaggaga

SEQ ID NO: 789488 - RNA, 22 nt, Human
cuccuuaaagggagcagcagcu

SEQ ID NO: 789489 - RNA, 22 nt, Human
uuaagucacuggacuugccuag

SEQ ID NO: 789490 - RNA, 22 nt, Human
augucaaaucaguuuuaucaga

SEQ ID NO: 789491 - RNA, 22 nt, Human
aagagggaaauuguuggcugcu

SEQ ID NO: 789492 - RNA, 22 nt, Human
agcuccugcaccaggggccccu

SEQ ID NO: 789493 - RNA, 22 nt, Human
cugggaggcacuauucaggagg

SEQ ID NO: 789494 - RNA, 22 nt, Human
uuuauaaacaguaccacggugc

SEQ ID NO: 789495 - RNA, 18 nt, Human
ucauagaagugaaucaga

SEQ ID NO: 789496 - RNA, 22 nt, Human
aggaggccaggcccucaagccu

SEQ ID NO: 789497 - RNA, 22 nt, Human
uggcccuggguggaauguccca

SEQ ID NO: 789498 - RNA, 22 nt, Human
ucaucauccuuuuuugaagagu

SEQ ID NO: 789499 - RNA, 22 nt, Human
cuaguaaaguacucaaauagcc

SEQ ID NO: 789500 - RNA, 22 nt, Human
cugggagcccugacuagccugg

SEQ ID NO: 789501 - RNA, 22 nt, Human
aggcugugagagguggcuccca

SEQ ID NO: 789502 - RNA, 23 nt, Human
acugccugugccgaucucucuca

SEQ ID NO: 789503 - RNA, 22 nt, Human
agugucaauaauuucuuuuugg

SEQ ID NO: 789504 - RNA, 22 nt, Human
auuaauguguagccaacuuaau

SEQ ID NO: 789505 - RNA, 22 nt, Human
ccaggagcauuaagagaacaua

SEQ ID NO: 789506 - RNA, 22 nt, Human
aggcauggcacugagcagcuuc

SEQ ID NO: 789507 - RNA, 22 nt, Human
aguccugugaguuuuucuaguu

SEQ ID NO: 789508 - RNA, 17 nt, Human
caagagagaugacugga

SEQ ID NO: 789509 - RNA, 22 nt, Human
ccuuuggccgcuuuauggagga

SEQ ID NO: 789510 - RNA, 22 nt, Human
cauacaaauguguccaggcucu

SEQ ID NO: 789511 - RNA, 22 nt, Human
acagaggaaggcugagcugccc

SEQ ID NO: 789512 - RNA, 22 nt, Human
ugaggcugccuugggaagaggg

SEQ ID NO: 789513 - RNA, 22 nt, Human
gauuuauugucccuguccugcu

SEQ ID NO: 789514 - RNA, 22 nt, Human
cuguuguuccgggagcugcagc

SEQ ID NO: 789515 - RNA, 22 nt, Human
cagagaaagaagcccauucauu

SEQ ID NO: 789516 - RNA, 21 nt, Human
ucagcaggcaccagaaggcug

SEQ ID NO: 789517 - RNA, 22 nt, Human
gugcuggaacugugcuaagaga

SEQ ID NO: 789518 - RNA, 22 nt, Human
caugcuggucagccaguggaug

SEQ ID NO: 789519 - RNA, 21 nt, Human
ugcaggaguguaaugugaccc

SEQ ID NO: 789520 - RNA, 22 nt, Human
gagucagaauguccuccugcgg

SEQ ID NO: 789521 - RNA, 22 nt, Human
uuucauugccauaaggugggau

SEQ ID NO: 789522 - RNA, 22 nt, Human
ccuggcugugcauguuucuaug

SEQ ID NO: 789523 - RNA, 22 nt, Human
agaggccaccacugucagggac

SEQ ID NO: 789524 - RNA, 22 nt, Human
uuggaguccuugcugcuucacu

SEQ ID NO: 789525 - RNA, 22 nt, Human
auuuucaucauggguuuaacau

SEQ ID NO: 789526 - RNA, 22 nt, Human
guauuuuucauuccaagugaga

SEQ ID NO: 789527 - RNA, 22 nt, Human
aauucuacauugguucacauuu

SEQ ID NO: 789528 - RNA, 22 nt, Human
ggaaggaagugaccaggauauc

SEQ ID NO: 789529 - RNA, 22 nt, Human
guauacaacuauuguuggguaa

SEQ ID NO: 789530 - RNA, 21 nt, Human
uuucuaagugcuugguuuggg

SEQ ID NO: 789531 - RNA, 22 nt, Human
ggggcacacuuuugguagauau

SEQ ID NO: 789532 - RNA, 22 nt, Human
uaaguccacaggcugacagcgg

SEQ ID NO: 789533 - RNA, 22 nt, Human
gggcuuggguauugugagaggu

SEQ ID NO: 789534 - RNA, 22 nt, Human
ggacaggauaagagacacugcc

SEQ ID NO: 789535 - RNA, 22 nt, Human
uuugauuuacuggauauucuca

SEQ ID NO: 789536 - RNA, 22 nt, Human
gggucuggacggcugcaggaag

SEQ ID NO: 789537 - RNA, 17 nt, Human
ugaagaugcauggcagc

SEQ ID NO: 789538 - RNA, 22 nt, Human
ucauaaaguuguuuuaauggga

SEQ ID NO: 789539 - RNA, 22 nt, Human
uugcagcuucgagucuaucugu

SEQ ID NO: 789540 - RNA, 22 nt, Human
gugggcugcauguuuacuauuc

SEQ ID NO: 789541 - RNA, 22 nt, Human
gcacagaaccagacaugaggca

SEQ ID NO: 789542 - RNA, 22 nt, Human
ugcauacauaaucgagaccagu

SEQ ID NO: 789543 - RNA, 22 nt, Human
gaaggcccugguauucuugagg

SEQ ID NO: 789544 - RNA, 22 nt, Human
ccugcccagcuucaccucaggc

SEQ ID NO: 789545 - RNA, 20 nt, Human
acauuugaguaucaucuacu

SEQ ID NO: 789546 - RNA, 22 nt, Human
uauuauugacuauucagaaugu

SEQ ID NO: 789547 - RNA, 22 nt, Human
ccaggccugcaucugcugcgca

SEQ ID NO: 789548 - RNA, 22 nt, Human
caaaagcaguucuaucugaguu

SEQ ID NO: 789549 - RNA, 22 nt, Human
gauguguuuccaggauuuguuu

SEQ ID NO: 789550 - RNA, 17 nt, Human
uucaaagcuuaucaagg

SEQ ID NO: 789551 - RNA, 19 nt, Human
gaaggcuuuugguauguuu

SEQ ID NO: 789552 - RNA, 22 nt, Human
agcagggaggcccagggcacug

SEQ ID NO: 789553 - RNA, 22 nt, Human
gccugccuuuuggaggcacauu

SEQ ID NO: 789554 - RNA, 20 nt, Human
aaugagauuccuuaugauag

SEQ ID NO: 789555 - RNA, 22 nt, Human
cuauguuuaucuguauuucugu

SEQ ID NO: 789556 - RNA, 22 nt, Human
aaugucugaggcucaucugagg

SEQ ID NO: 789557 - RNA, 21 nt, Human
ugccagggauuuacagagccu

SEQ ID NO: 789558 - RNA, 22 nt, Human
aagccagguuccauggaggagc

SEQ ID NO: 789559 - RNA, 22 nt, Human
uucuuauauugggucauggaua

SEQ ID NO: 789560 - RNA, 22 nt, Human
aacugcauucagaaagcucacu

SEQ ID NO: 789561 - RNA, 22 nt, Human
gaaauaauacagugcucuucuc

SEQ ID NO: 789562 - RNA, 22 nt, Human
ucuuucuugguauaaagcaggg

SEQ ID NO: 789563 - RNA, 22 nt, Human
uaagaaacccaggaauuucuua

SEQ ID NO: 789564 - RNA, 19 nt, Human
ucugcagaaggcauacaug

SEQ ID NO: 789565 - RNA, 22 nt, Human
caggaagaaagaggugaggugu

SEQ ID NO: 789566 - RNA, 22 nt, Human
ucuuuguaaguuauauguagua

SEQ ID NO: 789567 - RNA, 22 nt, Human
cugggccaggaccaggguugaa

SEQ ID NO: 789568 - RNA, 22 nt, Human
caggcagcgcucguggccuggc

SEQ ID NO: 789569 - RNA, 22 nt, Human
uugaaauggcagcagcugaccu

SEQ ID NO: 789570 - RNA, 22 nt, Human
gcuggcuggaggagggagguug

SEQ ID NO: 789571 - RNA, 22 nt, Human
ccagcuggugggucuuucucug

SEQ ID NO: 789572 - RNA, 22 nt, Human
ggagagucugagccugcuggag

SEQ ID NO: 789573 - RNA, 22 nt, Human
ucagcaguccuccaggaucaag

SEQ ID NO: 789574 - RNA, 22 nt, Human
ggucucugaacuuccacugcgc

SEQ ID NO: 789575 - RNA, 22 nt, Human
aaaaaugugaccacaggguguu

SEQ ID NO: 789576 - RNA, 22 nt, Human
uucucuuuucaccaguugcuaa

SEQ ID NO: 789577 - RNA, 22 nt, Human
auguuucaccaguuuuauaaga

SEQ ID NO: 789578 - RNA, 22 nt, Human
uguguacuuuuguuucuaagcc

SEQ ID NO: 789579 - RNA, 22 nt, Human
aacaagaugggagaaggaccuc

SEQ ID NO: 789580 - RNA, 22 nt, Human
agagaagacuuacagccacagu

SEQ ID NO: 789581 - RNA, 22 nt, Human
cagccuuucuguuuccuaaggu

SEQ ID NO: 789582 - RNA, 22 nt, Human
aauagaaaggaggggcucuugu

SEQ ID NO: 789583 - RNA, 22 nt, Human
auuuucuauucugcugguuuag

SEQ ID NO: 789584 - RNA, 21 nt, Human
aauacagugaagaauuucuuu

SEQ ID NO: 789585 - RNA, 22 nt, Human
aaaaaggcuaagcaucuugugc

SEQ ID NO: 789586 - RNA, 21 nt, Human
aguaguuuagcacaggguuug

SEQ ID NO: 789587 - RNA, 22 nt, Human
ucugaagagucuugcaagaaag

SEQ ID NO: 789588 - RNA, 22 nt, Human
cugcugagagcugaaggcugua

SEQ ID NO: 789589 - RNA, 21 nt, Human
cucaggggauuuugagauuag

SEQ ID NO: 789590 - RNA, 20 nt, Human
cagcugccuggcucugggau

SEQ ID NO: 789591 - RNA, 22 nt, Human
gcugcagggagcuggaaggcuc

SEQ ID NO: 789592 - RNA, 18 nt, Human
ucaagacaucaugaaaua

SEQ ID NO: 789593 - RNA, 22 nt, Human
ucugccaguauucacggcccgu

SEQ ID NO: 789594 - RNA, 22 nt, Human
ggcuggcagaggggagucugug

SEQ ID NO: 789595 - RNA, 22 nt, Human
ugggaagggucaacagcuggaa

SEQ ID NO: 789596 - RNA, 17 nt, Human
agccagguacaagucca

SEQ ID NO: 789597 - RNA, 22 nt, Human
aggagccuggcuggcccacagg

SEQ ID NO: 789598 - RNA, 22 nt, Human
gggcuuggaguaggcugaugaa

SEQ ID NO: 789599 - RNA, 22 nt, Human
ggugcaggcgguggggcaagua

SEQ ID NO: 789600 - RNA, 20 nt, Human
cuggacuugcugcucaccug

SEQ ID NO: 789601 - RNA, 22 nt, Human
aauaguugugaaucaggacuag

SEQ ID NO: 789602 - RNA, 22 nt, Human
gaaggaggcguuagcccuagga

SEQ ID NO: 789603 - RNA, 22 nt, Human
ccccaccagcacccucucuauc

SEQ ID NO: 789604 - RNA, 22 nt, Human
ucagcagggcugggagcuguga

SEQ ID NO: 789605 - RNA, 22 nt, Human
ucugaagagcuuuggaaguaug

SEQ ID NO: 789606 - RNA, 22 nt, Human
ugcagaaauaaagauauuauca

SEQ ID NO: 789607 - RNA, 17 nt, Human
uaguaaaugaguagagc

SEQ ID NO: 789608 - RNA, 22 nt, Human
uccaagaucuacagcaguuuag

SEQ ID NO: 789609 - RNA, 22 nt, Human
ggcagggguccugguguugacu

SEQ ID NO: 789610 - RNA, 22 nt, Human
ggaggucccaggccuggcagca

SEQ ID NO: 789611 - RNA, 22 nt, Human
uucuuuggcugccagucuggag

SEQ ID NO: 789612 - RNA, 22 nt, Human
uccuuuccaugcuucuagaggc

SEQ ID NO: 789613 - RNA, 22 nt, Human
agagaaaacucauugagguguc

SEQ ID NO: 789614 - RNA, 22 nt, Human
aaaccugaaguacguuacauaa

SEQ ID NO: 789615 - RNA, 22 nt, Human
cagcaggcuguggaaauccugg

SEQ ID NO: 789616 - RNA, 22 nt, Human
uucaaacacuggcuuagccaau

SEQ ID NO: 789617 - RNA, 20 nt, Human
cuguggugagcaggagagua

SEQ ID NO: 789618 - RNA, 22 nt, Human
cacccaggcuagagugcagugg

SEQ ID NO: 789619 - RNA, 18 nt, Human
aaguccuuccuuugcuuu

SEQ ID NO: 789620 - RNA, 22 nt, Human
uaagcaggggucaaguguacaa

SEQ ID NO: 789621 - RNA, 22 nt, Human
agugucauaaggagaaauuaca

SEQ ID NO: 789622 - RNA, 22 nt, Human
acagggugaaugugacauuauc

SEQ ID NO: 789623 - RNA, 22 nt, Human
auguuuauggagcagguauuag

SEQ ID NO: 789624 - RNA, 22 nt, Human
uggccagucuuagcugugccug

SEQ ID NO: 789625 - RNA, 22 nt, Human
uucaacaacuugguucaaaugg

SEQ ID NO: 789626 - RNA, 22 nt, Human
ugucugguggguugacaggcag

SEQ ID NO: 789627 - RNA, 22 nt, Human
auuuccaugaaguuuaguuaua

SEQ ID NO: 789628 - RNA, 22 nt, Human
augucuuuuauggagaugucau

SEQ ID NO: 789629 - RNA, 22 nt, Human
uggcccugggcaucuuucguga

SEQ ID NO: 789630 - RNA, 22 nt, Human
uuuuacacuucgguugugugca

SEQ ID NO: 789631 - RNA, 21 nt, Human
gccugggauaguggccuccgg

SEQ ID NO: 789632 - RNA, 22 nt, Human
aguggcuguuccaggugaggac

SEQ ID NO: 789633 - RNA, 22 nt, Human
gcagagccagaauggccaggac

SEQ ID NO: 789634 - RNA, 23 nt, Human
ucugcuggugacacggucacauu

SEQ ID NO: 789635 - RNA, 22 nt, Human
ccagggugugggcgucggcacg

SEQ ID NO: 789636 - RNA, 22 nt, Human
aggagcucugggcagggccucc

SEQ ID NO: 789637 - RNA, 22 nt, Human
caggcagaaaguauucugugua

SEQ ID NO: 789638 - RNA, 22 nt, Human
agugcucaugcacauuuauagu

SEQ ID NO: 789639 - RNA, 22 nt, Human
gaacacaugauuauaaaugcua

SEQ ID NO: 789640 - RNA, 22 nt, Human
cacugugggucccagacuggag

SEQ ID NO: 789641 - RNA, 22 nt, Human
cugagcaggcgguggagcggcu

SEQ ID NO: 789642 - RNA, 22 nt, Human
gcagggcaugggcccugucugc

SEQ ID NO: 789643 - RNA, 22 nt, Human
cauuacaacaaucugccauggc

SEQ ID NO: 789644 - RNA, 20 nt, Human
gggcaguggcgcuaucucag

SEQ ID NO: 789645 - RNA, 20 nt, Human
uacaaauuuuccauguuucc

SEQ ID NO: 789646 - RNA, 22 nt, Human
aagccaggaccaaacucauccu

SEQ ID NO: 789647 - RNA, 22 nt, Human
cagguuucauuggcagcuucau

SEQ ID NO: 789648 - RNA, 22 nt, Human
aacauucaaguucugguuuaug

SEQ ID NO: 789649 - RNA, 19 nt, Human
gcaggcagcugggguaucc

SEQ ID NO: 789650 - RNA, 22 nt, Human
ccaaauagucuuucauugaauu

SEQ ID NO: 789651 - RNA, 22 nt, Human
gucucuuagaaucgcauauugu

SEQ ID NO: 789652 - RNA, 22 nt, Human
uuacacaaacacauuccagaua

SEQ ID NO: 789653 - RNA, 22 nt, Human
cagcaacugugccugacacaca

SEQ ID NO: 789654 - RNA, 23 nt, Human
ugggagcucaagggaggcugccc

SEQ ID NO: 789655 - RNA, 20 nt, Human
agguccugguucucugggau

SEQ ID NO: 789656 - RNA, 22 nt, Human
ccacaagacucugucagcauaa

SEQ ID NO: 789657 - RNA, 22 nt, Human
acucauuuuauaacacuguagu

SEQ ID NO: 789658 - RNA, 22 nt, Human
uuacauguggugugaagaagag

SEQ ID NO: 789659 - RNA, 22 nt, Human
acccuggagcaauaaucccugg

SEQ ID NO: 789660 - RNA, 22 nt, Human
uuacauuuugcacagauguccc

SEQ ID NO: 789661 - RNA, 22 nt, Human
aacaguuugccugaaauguauu

SEQ ID NO: 789662 - RNA, 22 nt, Human
ccugaguggccaggcagcugug

SEQ ID NO: 789663 - RNA, 22 nt, Human
uuuaugauuaauccaauucugu

SEQ ID NO: 789664 - RNA, 22 nt, Human
ccuguucuguuaauuaaacuuu

SEQ ID NO: 789665 - RNA, 21 nt, Human
gcaaggcuuuuguguuuccca

SEQ ID NO: 789666 - RNA, 23 nt, Human
ccuggaguacuaaggggauggaa

SEQ ID NO: 789667 - RNA, 22 nt, Human
agggagcucuaaguagagggac

SEQ ID NO: 789668 - RNA, 22 nt, Human
ucuuugaugcuucugaaggugu

SEQ ID NO: 789669 - RNA, 22 nt, Human
agcagcugggcucagagcuggg

SEQ ID NO: 789670 - RNA, 22 nt, Human
aagggaaauccucagcccagga

SEQ ID NO: 789671 - RNA, 22 nt, Human
uuaauguuuuaaguuauagaga

SEQ ID NO: 789672 - RNA, 22 nt, Human
ucaggcucccugcugggcucug

SEQ ID NO: 789673 - RNA, 22 nt, Human
caggguggggaaauagcgcccu

SEQ ID NO: 789674 - RNA, 22 nt, Human
cauuucacuauucacuaaaagg

SEQ ID NO: 789675 - RNA, 20 nt, Human
gaggcugcggacugcuggac

SEQ ID NO: 789676 - RNA, 22 nt, Human
acagaaauucugggacagaaaa

SEQ ID NO: 789677 - RNA, 22 nt, Human
cugccaggugagcuccaggccu

SEQ ID NO: 789678 - RNA, 22 nt, Human
agggccugaggcugacggggag

SEQ ID NO: 789679 - RNA, 22 nt, Human
agugggaggcggcugacgggcg

SEQ ID NO: 789680 - RNA, 20 nt, Human
caggcuccgcaggacuaggg

SEQ ID NO: 789681 - RNA, 22 nt, Human
gcugcagugagccaagaucgug

SEQ ID NO: 789682 - RNA, 22 nt, Human
ucaaggcacuucaugucucagu

SEQ ID NO: 789683 - RNA, 22 nt, Human
agggugagggucuggccuugag

SEQ ID NO: 789684 - RNA, 22 nt, Human
aaagcaagacaggaguuucaga

SEQ ID NO: 789685 - RNA, 22 nt, Human
gguggugacuguccuagggaug

SEQ ID NO: 789686 - RNA, 22 nt, Human
gaccacagaggugugggagaga

SEQ ID NO: 789687 - RNA, 22 nt, Human
augcuucugaagaagaaaagac

SEQ ID NO: 789688 - RNA, 22 nt, Human
ucuggaguccagauccauuugg

SEQ ID NO: 789689 - RNA, 22 nt, Human
cuuucuugcauaauuugaaacc

SEQ ID NO: 789690 - RNA, 22 nt, Human
gagcugugcuuauaccaauuca

SEQ ID NO: 789691 - RNA, 22 nt, Human
aaggcagccagauccuuugggu

SEQ ID NO: 789692 - RNA, 22 nt, Human
auggggaagagccagugagcug

SEQ ID NO: 789693 - RNA, 22 nt, Human
ucuggcaguaauaggggagaga

SEQ ID NO: 789694 - RNA, 22 nt, Human
gagugucagcagggcagagcac

SEQ ID NO: 789695 - RNA, 19 nt, Human
ggcugccuucugcucaucu

SEQ ID NO: 789696 - RNA, 21 nt, Human
cccaggagaagaaaagaugca

SEQ ID NO: 789697 - RNA, 22 nt, Human
uuuuaccacugggugacaugga

SEQ ID NO: 789698 - RNA, 22 nt, Human
auuauaaaccuuugaggguggg

SEQ ID NO: 789699 - RNA, 22 nt, Human
aucuuacaauuacaagacacuc

SEQ ID NO: 789700 - RNA, 22 nt, Human
cagaaacuagauuuagacacaa

SEQ ID NO: 789701 - RNA, 22 nt, Human
aggccuuaccauagcuguagca

SEQ ID NO: 789702 - RNA, 23 nt, Human
augucucugggcaguagggcuug

SEQ ID NO: 789703 - RNA, 22 nt, Human
ugcuuaaacacauacauacaua

SEQ ID NO: 789704 - RNA, 22 nt, Human
uugauucacaauuaccaagacu

SEQ ID NO: 789705 - RNA, 22 nt, Human
uucuuuggugggagauugaggu

SEQ ID NO: 789706 - RNA, 22 nt, Human
gucauuuugcugcauauuuaga

SEQ ID NO: 789707 - RNA, 22 nt, Human
uggccugguuguugcugccguu

SEQ ID NO: 789708 - RNA, 21 nt, Human
ggggcaucaagacagaguuag

SEQ ID NO: 789709 - RNA, 22 nt, Human
cagaagucuuucuguuucaccu

SEQ ID NO: 789710 - RNA, 22 nt, Human
gcuccuggguguggcugccccu

SEQ ID NO: 789711 - RNA, 22 nt, Human
gggcagcagagcccugccgagu

SEQ ID NO: 789712 - RNA, 22 nt, Human
augaaaacuuuagccucauuag

SEQ ID NO: 789713 - RNA, 22 nt, Human
ucaaaguacuacucaguucagc

SEQ ID NO: 789714 - RNA, 21 nt, Human
ggagaaggacaauguugagua

SEQ ID NO: 789715 - RNA, 19 nt, Human
agcacaguuuccacaugca

SEQ ID NO: 789716 - RNA, 21 nt, Human
augugauuauaugacuuuuac

SEQ ID NO: 789717 - RNA, 22 nt, Human
acagugauuucauccuucuggg

SEQ ID NO: 789718 - RNA, 22 nt, Human
ggugccagaguggcccaggggc

SEQ ID NO: 789719 - RNA, 22 nt, Human
ucauggcacuuagcacaguccu

SEQ ID NO: 789720 - RNA, 22 nt, Human
acccaggcuggaaugcaguggc

SEQ ID NO: 789721 - RNA, 22 nt, Human
acccaggcuggagugcagugac

SEQ ID NO: 789722 - RNA, 22 nt, Human
ugagaaccucgaagauuuugcc

SEQ ID NO: 789723 - RNA, 22 nt, Human
ccucaaauuggcauuaauuaag

SEQ ID NO: 789724 - RNA, 22 nt, Human
ugcccucugcaggccgccaugg

SEQ ID NO: 789725 - RNA, 22 nt, Human
aaucaaagaaugggcuaguugg

SEQ ID NO: 789726 - RNA, 22 nt, Human
ucaggacagacuagacuagcgu

SEQ ID NO: 789727 - RNA, 22 nt, Human
aaucuaaggacuuagcauugcu

SEQ ID NO: 789728 - RNA, 22 nt, Human
cccccaggggcuccgccucgug

SEQ ID NO: 789729 - RNA, 22 nt, Human
cugccucugguuuuggucccug

SEQ ID NO: 789730 - RNA, 22 nt, Human
aguguauuaugcagcggagguc

SEQ ID NO: 789731 - RNA, 22 nt, Human
uaaaacugaauacauacugagg

SEQ ID NO: 789732 - RNA, 21 nt, Human
gcaggcacucuagaggagcug

SEQ ID NO: 789733 - RNA, 22 nt, Human
aacauuucauuggaagcuaugu

SEQ ID NO: 789734 - RNA, 22 nt, Human
cacccguggagaagcaggagcg

SEQ ID NO: 789735 - RNA, 22 nt, Human
augacagugggucuugcaaaga

SEQ ID NO: 789736 - RNA, 22 nt, Human
cagugcuuugggaggcugagga

SEQ ID NO: 789737 - RNA, 22 nt, Human
agacacagguguaauuucugcu

SEQ ID NO: 789738 - RNA, 22 nt, Human
caggagcugggucuggaagcag

SEQ ID NO: 789739 - RNA, 22 nt, Human
gucagcaaaaaauuuaugugag

SEQ ID NO: 789740 - RNA, 22 nt, Human
ucauggauuaaauuauuaaguu

SEQ ID NO: 789741 - RNA, 22 nt, Human
aaugucugccugaacuuuauau

SEQ ID NO: 789742 - RNA, 22 nt, Human
agcaggguuuggggauuggcac

SEQ ID NO: 789743 - RNA, 22 nt, Human
ugguauuuccaggcuuauggua

SEQ ID NO: 789744 - RNA, 22 nt, Human
agagcaagugacagaaacaggg

SEQ ID NO: 789745 - RNA, 18 nt, Human
agagggaaagcaggcuga

SEQ ID NO: 789746 - RNA, 22 nt, Human
aaguguccucauucaacaugca

SEQ ID NO: 789747 - RNA, 22 nt, Human
gggcagggguagcauuccaagu

SEQ ID NO: 789748 - RNA, 21 nt, Human
uuguuuccucccaaaaugcca

SEQ ID NO: 789749 - RNA, 19 nt, Human
acaaugaauguguucucuu

SEQ ID NO: 789750 - RNA, 22 nt, Human
ucaagaugcauggguggcauaa

SEQ ID NO: 789751 - RNA, 22 nt, Human
uacaagaauuucuuucugguug

SEQ ID NO: 789752 - RNA, 22 nt, Human
auggcccaaacugcaauuacuu

SEQ ID NO: 789753 - RNA, 22 nt, Human
aaauuuuagacuccugggucua

SEQ ID NO: 789754 - RNA, 22 nt, Human
gacauuuagaaguuagauucaa

SEQ ID NO: 789755 - RNA, 22 nt, Human
auugauucuaccagcuacuuug

SEQ ID NO: 789756 - RNA, 22 nt, Human
agccuggcacugaggcagggcg

SEQ ID NO: 789757 - RNA, 22 nt, Human
uggcuggcuagaauggaaaugu

SEQ ID NO: 789758 - RNA, 22 nt, Human
gggguggagcuaaaugucuacu

SEQ ID NO: 789759 - RNA, 22 nt, Human
uucaagucugcccagagucagc

SEQ ID NO: 789760 - RNA, 22 nt, Human
ggacaggguaaguacuagugug

SEQ ID NO: 789761 - RNA, 22 nt, Human
ugucuuuaugcacacugacuug

SEQ ID NO: 789762 - RNA, 22 nt, Human
ggucuggacccuccuggagugg

SEQ ID NO: 789763 - RNA, 22 nt, Human
cuuggccugacauguggcaggg

SEQ ID NO: 789764 - RNA, 19 nt, Human
gggcuggagggauagagcc

SEQ ID NO: 789765 - RNA, 22 nt, Human
uccuagcuggccucucaccagc

SEQ ID NO: 789766 - RNA, 22 nt, Human
aggccucugggucuccucugac

SEQ ID NO: 789767 - RNA, 22 nt, Human
gcucagaguuaaauauagugcu

SEQ ID NO: 789768 - RNA, 22 nt, Human
aacuccagggcauugucuccug

SEQ ID NO: 789769 - RNA, 22 nt, Human
aucauaauugcuccagugauau

SEQ ID NO: 789770 - RNA, 18 nt, Human
uugaauucuucuacaugu

SEQ ID NO: 789771 - RNA, 22 nt, Human
caugcaaaugugcuaaucugaa

SEQ ID NO: 789772 - RNA, 22 nt, Human
cugccucuccccagaguggccc

SEQ ID NO: 789773 - RNA, 18 nt, Human
aaggcacaggagaacauu

SEQ ID NO: 789774 - RNA, 22 nt, Human
aacuccaggcagggaggccacu

SEQ ID NO: 789775 - RNA, 22 nt, Human
caggcagaaggaaguaccaggc

SEQ ID NO: 789776 - RNA, 22 nt, Human
ucccaggcucuucaaggaagac

SEQ ID NO: 789777 - RNA, 22 nt, Human
ucuacacaagugaguggcacaa

SEQ ID NO: 789778 - RNA, 22 nt, Human
gugacucucacuuuaccugacu

SEQ ID NO: 789779 - RNA, 19 nt, Human
acaauaacucauugauugc

SEQ ID NO: 789780 - RNA, 19 nt, Human
gcauuucucuuuacagcca

SEQ ID NO: 789781 - RNA, 22 nt, Human
uaaucacagaaacagacuguuu

SEQ ID NO: 789782 - RNA, 22 nt, Human
aaauuucuguuguuuugagcca

SEQ ID NO: 789783 - RNA, 22 nt, Human
uguccugugccaccuuccugag

SEQ ID NO: 789784 - RNA, 22 nt, Human
ggcucccaggagggccuggagg

SEQ ID NO: 789785 - RNA, 22 nt, Human
acaacaaaaucacuagucuucc

SEQ ID NO: 789786 - RNA, 22 nt, Human
aggaagaacagauaauggacgc

SEQ ID NO: 789787 - RNA, 22 nt, Human
ccuggcugugugaccuuggcaa

SEQ ID NO: 789788 - RNA, 22 nt, Human
acauauugagcucuaaaaguac

SEQ ID NO: 789789 - RNA, 22 nt, Human
ccccaggacacauggaccaagu

SEQ ID NO: 789790 - RNA, 22 nt, Human
accagagaaaacacagcaggcu

SEQ ID NO: 789791 - RNA, 22 nt, Human
aaaguugagugcugaucugauu

SEQ ID NO: 789792 - RNA, 22 nt, Human
ucucaguguuuaaaaagauuuc

SEQ ID NO: 789793 - RNA, 17 nt, Human
ugauucaacuagaaacu

SEQ ID NO: 789794 - RNA, 22 nt, Human
guucacauguguuaucuucuuu

SEQ ID NO: 789795 - RNA, 22 nt, Human
gucuccagauauccuacacaac

SEQ ID NO: 789796 - RNA, 22 nt, Human
aauuuuauuagaaggcaagggg

SEQ ID NO: 789797 - RNA, 22 nt, Human
ccagaaaauauggcuaagguga

SEQ ID NO: 789798 - RNA, 22 nt, Human
aagcagaggguauggccagguu

SEQ ID NO: 789799 - RNA, 22 nt, Human
aaagcaaugggucuaagguaaa

SEQ ID NO: 789800 - RNA, 22 nt, Human
aggcuaggggcagugccagcau

SEQ ID NO: 789801 - RNA, 22 nt, Human
uuucuuaugagcaagacucuau

SEQ ID NO: 789802 - RNA, 22 nt, Human
uuggcaauauuuacugaaguug

SEQ ID NO: 789803 - RNA, 22 nt, Human
acacaucuccagccagcaggag

SEQ ID NO: 789804 - RNA, 22 nt, Human
ucauuucuccuaagugaaauau

SEQ ID NO: 789805 - RNA, 22 nt, Human
cugcagcaagagaagugcugac

SEQ ID NO: 789806 - RNA, 22 nt, Human
gggcccucugcagcugcccagg

SEQ ID NO: 789807 - RNA, 22 nt, Human
uccccagguccugucggcuccu

SEQ ID NO: 789808 - RNA, 22 nt, Human
uuucugaagucuucuaacagau

SEQ ID NO: 789809 - RNA, 22 nt, Human
ggcuacagaggccgugagccug

SEQ ID NO: 789810 - RNA, 22 nt, Human
ucaggaugagucaucaagcugc

SEQ ID NO: 789811 - RNA, 22 nt, Human
auuauuguacuuucaauaaggu

SEQ ID NO: 789812 - RNA, 17 nt, Human
agccugccccaugcugc

SEQ ID NO: 789813 - RNA, 22 nt, Human
aagcacagacucccucugagug

SEQ ID NO: 789814 - RNA, 18 nt, Human
uuucugaaugucuauuuc

SEQ ID NO: 789815 - RNA, 22 nt, Human
cccaggagagaggggauaaagc

SEQ ID NO: 789816 - RNA, 22 nt, Human
aaguccuggauauuaaauugau

SEQ ID NO: 789817 - RNA, 22 nt, Human
cagcuggcuggucagugcacaa

SEQ ID NO: 789818 - RNA, 22 nt, Human
auguacaauucuccuugguagg

SEQ ID NO: 789819 - RNA, 22 nt, Human
ccagucagucaguugcuggcau

SEQ ID NO: 789820 - RNA, 22 nt, Human
ggaugcaggggcagcagagccu

SEQ ID NO: 789821 - RNA, 22 nt, Human
agagaugcauucagcauggaug

SEQ ID NO: 789822 - RNA, 22 nt, Human
cacagcagucuuucacuaaaua

SEQ ID NO: 789823 - RNA, 22 nt, Human
uggaaggcuuggaauacuucca

SEQ ID NO: 789824 - RNA, 22 nt, Human
cugggugccagcauggcugagu

SEQ ID NO: 789825 - RNA, 19 nt, Human
acacagggaucagaggguu

SEQ ID NO: 789826 - RNA, 22 nt, Human
cauucacaaagcugauugaugg

SEQ ID NO: 789827 - RNA, 22 nt, Human
aggcuggaucucuguugccuuc

SEQ ID NO: 789828 - RNA, 22 nt, Human
aaaucagacuugaauuuucauc

SEQ ID NO: 789829 - RNA, 22 nt, Human
augagaaagaguuguaucuaga

SEQ ID NO: 789830 - RNA, 22 nt, Human
uauuugaugaagguaaagucuu

SEQ ID NO: 789831 - RNA, 22 nt, Human
cugggagcgcagcaggcacaac

SEQ ID NO: 789832 - RNA, 22 nt, Human
gggaaggcaggccucuguugga

SEQ ID NO: 789833 - RNA, 22 nt, Human
ucagggagagugacccauccac

SEQ ID NO: 789834 - RNA, 22 nt, Human
caaugauagauuuuacaaauua

SEQ ID NO: 789835 - RNA, 22 nt, Human
agcugcuguccuaggcacugua

SEQ ID NO: 789836 - RNA, 22 nt, Human
ucuauaaaugcagauaugugug

SEQ ID NO: 789837 - RNA, 22 nt, Human
ggcaggguaugauuaccucuga

SEQ ID NO: 789838 - RNA, 21 nt, Human
cuacccucuccugcucauauc

SEQ ID NO: 789839 - RNA, 22 nt, Human
aggcugaaaacgagauggcaau

SEQ ID NO: 789840 - RNA, 22 nt, Human
ccugucaggguuugccucagaa

SEQ ID NO: 789841 - RNA, 22 nt, Human
ccagcugacgaugccuggucuc

SEQ ID NO: 789842 - RNA, 22 nt, Human
acagugucuccugguacccagu

SEQ ID NO: 789843 - RNA, 23 nt, Human
auucuucauuaucuucuagaaaa

SEQ ID NO: 789844 - RNA, 22 nt, Human
aaagccagggacagugugcaug

SEQ ID NO: 789845 - RNA, 22 nt, Human
uuuguacauccuaauucugagu

SEQ ID NO: 789846 - RNA, 22 nt, Human
uuauucuuggaucugagucucu

SEQ ID NO: 789847 - RNA, 22 nt, Human
acaaagaucuugcuuuccuacu

SEQ ID NO: 789848 - RNA, 22 nt, Human
acacaguucguuguuuucuacu

SEQ ID NO: 789849 - RNA, 20 nt, Human
aagauucauuguaauuaggg

SEQ ID NO: 789850 - RNA, 19 nt, Human
ccuggcugcugugggaugc

SEQ ID NO: 789851 - RNA, 21 nt, Human
uaaauaauaaguugcugagau

SEQ ID NO: 789852 - RNA, 20 nt, Human
uugcaaauaucgugggucag

SEQ ID NO: 789853 - RNA, 22 nt, Human
ucccuggccuggaaggauauca

SEQ ID NO: 789854 - RNA, 22 nt, Human
gcagcugccgugagcucacgcc

SEQ ID NO: 789855 - RNA, 22 nt, Human
uuucuaaggcuaggucuuaagg

SEQ ID NO: 789856 - RNA, 22 nt, Human
uccugggacaagccguggaagu

SEQ ID NO: 789857 - RNA, 19 nt, Human
aauagauuaauuauccucu

SEQ ID NO: 789858 - RNA, 22 nt, Human
ugcaaauaaauuucuguucauu

SEQ ID NO: 789859 - RNA, 22 nt, Human
caggcucacuguaaggucagcu

SEQ ID NO: 789860 - RNA, 22 nt, Human
aacgucauugauugaugguagu

SEQ ID NO: 789861 - RNA, 22 nt, Human
cacaggcugcccgcagcuggga

SEQ ID NO: 789862 - RNA, 22 nt, Human
acaaugaagauaauguugcagu

SEQ ID NO: 789863 - RNA, 22 nt, Human
aauccaugcaugcaaggaaagg

SEQ ID NO: 789864 - RNA, 22 nt, Human
ucaggaaggcaaauugcaugau

SEQ ID NO: 789865 - RNA, 22 nt, Human
uggacaggcuccuagggguucc

SEQ ID NO: 789866 - RNA, 22 nt, Human
uauuucacucaguauaccauag

SEQ ID NO: 789867 - RNA, 19 nt, Human
uccugggcugggccagguc

SEQ ID NO: 789868 - RNA, 22 nt, Human
acuguauaaggcauagguaagc

SEQ ID NO: 789869 - RNA, 22 nt, Human
uauggcuucuuuugcaacuacu

SEQ ID NO: 789870 - RNA, 22 nt, Human
cagagguguacagagggaggcc

SEQ ID NO: 789871 - RNA, 22 nt, Human
acagauauuaugguuucuccuu

SEQ ID NO: 789872 - RNA, 22 nt, Human
aguuuucaauauaugauaguga

SEQ ID NO: 789873 - RNA, 22 nt, Human
caguuauaggagccauuguaua

SEQ ID NO: 789874 - RNA, 22 nt, Human
ugcagccagacuuugugcgaaa

SEQ ID NO: 789875 - RNA, 22 nt, Human
ugucaucucuugcaggaagccu

SEQ ID NO: 789876 - RNA, 22 nt, Human
ugagccaggaguuugaggcugu

SEQ ID NO: 789877 - RNA, 21 nt, Human
ucagagaauggccuacucuca

SEQ ID NO: 789878 - RNA, 22 nt, Human
ccugugcuuuaggccucaaacu

SEQ ID NO: 789879 - RNA, 22 nt, Human
ccugcugcuaugaaggugacag

SEQ ID NO: 789880 - RNA, 22 nt, Human
ccaaauuaaaucauacagacag

SEQ ID NO: 789881 - RNA, 22 nt, Human
gagaaccucuccacaagucugg

SEQ ID NO: 789882 - RNA, 19 nt, Human
uuucugcagcccagcagca

SEQ ID NO: 789883 - RNA, 22 nt, Human
ccuagccuucggccuacccauc

SEQ ID NO: 789884 - RNA, 19 nt, Human
agcagcuggagguggagug

SEQ ID NO: 789885 - RNA, 18 nt, Human
uggcaggggcaguacgcc

SEQ ID NO: 789886 - RNA, 22 nt, Human
gguucccggaucuccgaguccc

SEQ ID NO: 789887 - RNA, 22 nt, Human
uucacauuugaaaggaaagaua

SEQ ID NO: 789888 - RNA, 22 nt, Human
aguuucauugagauguuugcua

SEQ ID NO: 789889 - RNA, 22 nt, Human
aaagguuuuuauuuauccugga

SEQ ID NO: 789890 - RNA, 22 nt, Human
uggccucuuaggacauccucua

SEQ ID NO: 789891 - RNA, 22 nt, Human
caggcuggagugaguguagugg

SEQ ID NO: 789892 - RNA, 22 nt, Human
aacacauaggcagagcaugaca

SEQ ID NO: 789893 - RNA, 22 nt, Human
cugcuuauggagaugaguaaga

SEQ ID NO: 789894 - RNA, 22 nt, Human
ggcuggccagggcccucgcugg

SEQ ID NO: 789895 - RNA, 22 nt, Human
gcagccuguuguaccagccugu

SEQ ID NO: 789896 - RNA, 21 nt, Human
ucacauuucucauggguaaau

SEQ ID NO: 789897 - RNA, 22 nt, Human
uuacaaaguucugaguucaaac

SEQ ID NO: 789898 - RNA, 22 nt, Human
gaagcaaguggccugauucaga

SEQ ID NO: 789899 - RNA, 22 nt, Human
cauacauugcucauucaguauc

SEQ ID NO: 789900 - RNA, 22 nt, Human
ccucaggggugcccacagcugc

SEQ ID NO: 789901 - RNA, 22 nt, Human
uuaaaagagcagcccagcauau

SEQ ID NO: 789902 - RNA, 22 nt, Human
aauguacaucucaguguaguac

SEQ ID NO: 789903 - RNA, 22 nt, Human
ggcaggcuugguggcaccgguu

SEQ ID NO: 789904 - RNA, 22 nt, Human
guuccaauuccaaauuccaagg

SEQ ID NO: 789905 - RNA, 22 nt, Human
caagaaucuugcagcuuagacu

SEQ ID NO: 789906 - RNA, 22 nt, Human
cccucccugugugccucauuug

SEQ ID NO: 789907 - RNA, 20 nt, Human
ggcucuggaaucuggugggc

SEQ ID NO: 789908 - RNA, 22 nt, Human
auauuguugacuauaagaguaa

SEQ ID NO: 789909 - RNA, 22 nt, Human
aguuuucaguaaauauuaguga

SEQ ID NO: 789910 - RNA, 22 nt, Human
uuuuccaccuucuagagauugu

SEQ ID NO: 789911 - RNA, 22 nt, Human
ggcucuggugcccuggcuccca

SEQ ID NO: 789912 - RNA, 18 nt, Human
ugagaaacugacacaugg

SEQ ID NO: 789913 - RNA, 22 nt, Human
agcaggcacuaugccaggaucu

SEQ ID NO: 789914 - RNA, 20 nt, Human
ucaugaagccuacaaacauc

SEQ ID NO: 789915 - RNA, 22 nt, Human
ugaguugaaagacugacuucug

SEQ ID NO: 789916 - RNA, 22 nt, Human
uuucacauaugguuguugauug

SEQ ID NO: 789917 - RNA, 20 nt, Human
ugcugaggccugaggccugg

SEQ ID NO: 789918 - RNA, 21 nt, Human
ugcagcagaguaagcagggga

SEQ ID NO: 789919 - RNA, 22 nt, Human
gcugcaggcuguggcaggggag

SEQ ID NO: 789920 - RNA, 22 nt, Human
cccuuccugggugucccggagu

SEQ ID NO: 789921 - RNA, 22 nt, Human
guggugaagcauugagaaguca

SEQ ID NO: 789922 - RNA, 22 nt, Human
caccacuguaucccuagcacuu

SEQ ID NO: 789923 - RNA, 22 nt, Human
uuuccaaaggaggaaccaguuu

SEQ ID NO: 789924 - RNA, 22 nt, Human
uggcccugccgccacgacgucu

SEQ ID NO: 789925 - RNA, 22 nt, Human
uguuucugucuguuuucuacau

SEQ ID NO: 789926 - RNA, 23 nt, Human
uagugucauccucagcuucuguu

SEQ ID NO: 789927 - RNA, 22 nt, Human
uccagagaacgaugaaagcugg

SEQ ID NO: 789928 - RNA, 22 nt, Human
caagucauuguuuagucauguu

SEQ ID NO: 789929 - RNA, 22 nt, Human
accacacuggcuagugaagaag

SEQ ID NO: 789930 - RNA, 22 nt, Human
gaggacugcagaugggugcauc

SEQ ID NO: 789931 - RNA, 22 nt, Human
caauaacugcuaaauucccugu

SEQ ID NO: 789932 - RNA, 22 nt, Human
augcaacaaaugcuacgaaucg

SEQ ID NO: 789933 - RNA, 22 nt, Human
uuuccaaaaguuuguucugugc

SEQ ID NO: 789934 - RNA, 22 nt, Human
aaaguuuauuuucccugguuag

SEQ ID NO: 789935 - RNA, 22 nt, Human
ugugcccagacugccucaguga

SEQ ID NO: 789936 - RNA, 22 nt, Human
aauugucuuuaucacaguucaa

SEQ ID NO: 789937 - RNA, 19 nt, Human
aagcaauguugugaaucua

SEQ ID NO: 789938 - RNA, 23 nt, Human
uuguuucuuuguauugucucuau

SEQ ID NO: 789939 - RNA, 22 nt, Human
gcaauaaauaacauggaagaca

SEQ ID NO: 789940 - RNA, 22 nt, Human
aucugaagggaaguggaaggca

SEQ ID NO: 789941 - RNA, 22 nt, Human
aaggauauuuggcuacagaagc

SEQ ID NO: 789942 - RNA, 19 nt, Human
uuuagcuuacguuucauug

SEQ ID NO: 789943 - RNA, 20 nt, Human
uucccuggaaggagaagcag

SEQ ID NO: 789944 - RNA, 22 nt, Human
caauuauauuuagaaugauaca

SEQ ID NO: 789945 - RNA, 22 nt, Human
cauuuauucagcucagucgguu

SEQ ID NO: 789946 - RNA, 22 nt, Human
gugaggcagggaaagaggauaa

SEQ ID NO: 789947 - RNA, 22 nt, Human
caaaagcaaagucccugaaugu

SEQ ID NO: 789948 - RNA, 22 nt, Human
auauucauugaacaccuacuac

SEQ ID NO: 789949 - RNA, 22 nt, Human
acaagcagaagguggggucuua

SEQ ID NO: 789950 - RNA, 22 nt, Human
uauagcaaggacauaauaugcu

SEQ ID NO: 789951 - RNA, 22 nt, Human
uuagugaguuaaguguccugag

SEQ ID NO: 789952 - RNA, 22 nt, Human
guguuucuugcacuccccggac

SEQ ID NO: 789953 - RNA, 22 nt, Human
cagcugagcaucacuagucugg

SEQ ID NO: 789954 - RNA, 22 nt, Human
ucccugaaucucgaacuagccu

SEQ ID NO: 789955 - RNA, 22 nt, Human
accacaguaugaaaucugaaau

SEQ ID NO: 789956 - RNA, 23 nt, Human
uggggccaagugaggaagggucu

SEQ ID NO: 789957 - RNA, 22 nt, Human
uguggcaguaaaauugggcaac

SEQ ID NO: 789958 - RNA, 22 nt, Human
uuuaauuuucugggcccagcag

SEQ ID NO: 789959 - RNA, 22 nt, Human
uuggcucugugucuccacucaa

SEQ ID NO: 789960 - RNA, 20 nt, Human
cccugagaccagagagcagc

SEQ ID NO: 789961 - RNA, 22 nt, Human
aauucacaauuauguugggaga

SEQ ID NO: 789962 - RNA, 22 nt, Human
uucuuacaucaguuuauuuugu

SEQ ID NO: 789963 - RNA, 22 nt, Human
uguauauaagcauuuacuuguu

SEQ ID NO: 789964 - RNA, 22 nt, Human
ucauacaaggaggguguucaaa

SEQ ID NO: 789965 - RNA, 22 nt, Human
gcagggacagggcagggccuuu

SEQ ID NO: 789966 - RNA, 22 nt, Human
uuggcccacaguaccaugcugu

SEQ ID NO: 789967 - RNA, 22 nt, Human
cugagcugcggcaggcaccugg

SEQ ID NO: 789968 - RNA, 22 nt, Human
aaggcuggucagauguggugaa

SEQ ID NO: 789969 - RNA, 22 nt, Human
uggagaggagcaccauggccau

SEQ ID NO: 789970 - RNA, 19 nt, Human
ggaguggguaguuaguggu

SEQ ID NO: 789971 - RNA, 22 nt, Human
uucagaguacacagagaucuuc

SEQ ID NO: 789972 - RNA, 22 nt, Human
acccagccuacaaagcucaccu

SEQ ID NO: 789973 - RNA, 22 nt, Human
ggaccaggccagccucccugcg

SEQ ID NO: 789974 - RNA, 22 nt, Human
uggggccacacaucucuuucua

SEQ ID NO: 789975 - RNA, 22 nt, Human
agccugggcaacaacacagcga

SEQ ID NO: 789976 - RNA, 22 nt, Human
agcugcuaugacaacaccagcc

SEQ ID NO: 789977 - RNA, 22 nt, Human
cacagaacauccuuagcucaug

SEQ ID NO: 789978 - RNA, 22 nt, Human
agaaaauauucauugagaggcu

SEQ ID NO: 789979 - RNA, 22 nt, Human
gggugcagcagagcuccucugu

SEQ ID NO: 789980 - RNA, 22 nt, Human
cuggggcuggugaggcaggcuc

SEQ ID NO: 789981 - RNA, 22 nt, Human
aaagucugaaagauaagaguga

SEQ ID NO: 789982 - RNA, 22 nt, Human
uggcccagugcuuaugcucuga

SEQ ID NO: 789983 - RNA, 22 nt, Human
auuauucauugguaggcaagcu

SEQ ID NO: 789984 - RNA, 22 nt, Human
guuauuaaaguauuugauguua

SEQ ID NO: 789985 - RNA, 22 nt, Human
uuauaaagauuguuauguaucu

SEQ ID NO: 789986 - RNA, 22 nt, Human
cagcccugugcggagggcccug

SEQ ID NO: 789987 - RNA, 22 nt, Human
ugugagucuaggucaggguguu

SEQ ID NO: 789988 - RNA, 22 nt, Human
aaaagacaucuauuucaggcag

SEQ ID NO: 789989 - RNA, 18 nt, Human
gaguguggcacugggccc

SEQ ID NO: 789990 - RNA, 22 nt, Human
ucaguucugcuagaaaaacagu

SEQ ID NO: 789991 - RNA, 23 nt, Human
aaagugcaguugaggaaucauag

SEQ ID NO: 789992 - RNA, 22 nt, Human
cugccaggauucugugaacccc

SEQ ID NO: 789993 - RNA, 22 nt, Human
uucauuacugaauucucacuac

SEQ ID NO: 789994 - RNA, 22 nt, Human
cagggacccgcacagguagcau

SEQ ID NO: 789995 - RNA, 22 nt, Human
aaaaggcauuuugucaaccaua

SEQ ID NO: 789996 - RNA, 22 nt, Human
aguauacauauauuagccuucg

SEQ ID NO: 789997 - RNA, 22 nt, Human
ccaccagcuucagcagccgcgg

SEQ ID NO: 789998 - RNA, 22 nt, Human
cuuugaaaaaugguuuccuaga

SEQ ID NO: 789999 - RNA, 22 nt, Human
auuugcaauuuuacuuugcagu

SEQ ID NO: 790000 - RNA, 22 nt, Human
acuggcaguagagggagcgcau

SEQ ID NO: 790001 - RNA, 21 nt, Human
gccaccccuggcacaggugcu

SEQ ID NO: 790002 - RNA, 22 nt, Human
ucuauucaggcagagugcagca

SEQ ID NO: 790003 - RNA, 22 nt, Human
auucuuacaaagcagagucugu

SEQ ID NO: 790004 - RNA, 22 nt, Human
cagugaggaguccagggcagag

SEQ ID NO: 790005 - RNA, 22 nt, Human
uuucacauauaggggaagcuac

SEQ ID NO: 790006 - RNA, 22 nt, Human
uuaugcuaguugaaauaacaca

SEQ ID NO: 790007 - RNA, 18 nt, Human
uaaaccuuucuuguggca

SEQ ID NO: 790008 - RNA, 22 nt, Human
agcauggggcaaugcaugugcu

SEQ ID NO: 790009 - RNA, 22 nt, Human
cccuccuuaccaccacagcucc

SEQ ID NO: 790010 - RNA, 22 nt, Human
aggucaagauucuacauuugua

SEQ ID NO: 790011 - RNA, 22 nt, Human
uggcucagcgguggcagcagac

SEQ ID NO: 790012 - RNA, 22 nt, Human
ucacuggguaggacaugcugau

SEQ ID NO: 790013 - RNA, 22 nt, Human
uguucucucuggcugccaguac

SEQ ID NO: 790014 - RNA, 23 nt, Human
cagaaagcccuuuccccacagua

SEQ ID NO: 790015 - RNA, 22 nt, Human
caauuucaauacaaaauacauu

SEQ ID NO: 790016 - RNA, 22 nt, Human
cuggacaggaagaauugggagc

SEQ ID NO: 790017 - RNA, 22 nt, Human
cccucugcaggcuggaccugcc

SEQ ID NO: 790018 - RNA, 22 nt, Human
cuggccuggcagggagggcaug

SEQ ID NO: 790019 - RNA, 22 nt, Human
uggcuggagcgcccuccucugc

SEQ ID NO: 790020 - RNA, 22 nt, Human
uuacaaacaagaucuuauucuu

SEQ ID NO: 790021 - RNA, 22 nt, Human
acuaggggcucaggcccaggga

SEQ ID NO: 790022 - RNA, 22 nt, Human
cacugucugcuucgacucuuca

SEQ ID NO: 790023 - RNA, 21 nt, Human
cuggagucauuuucugaguag

SEQ ID NO: 790024 - RNA, 22 nt, Human
aaucuaagccaccaguaguuuc

SEQ ID NO: 790025 - RNA, 22 nt, Human
agauaaauuccuaagauuucag

SEQ ID NO: 790026 - RNA, 22 nt, Human
aaagugcagaacuguucucacu

SEQ ID NO: 790027 - RNA, 22 nt, Human
auugagaauauugugacagugu

SEQ ID NO: 790028 - RNA, 22 nt, Human
acugggguuuaggccugggcaa

SEQ ID NO: 790029 - RNA, 22 nt, Human
cacaggaaggccuucucacaau

SEQ ID NO: 790030 - RNA, 22 nt, Human
uagucucuaggaggggaaaaga

SEQ ID NO: 790031 - RNA, 22 nt, Human
aaagauuaggcggcaacugggc

SEQ ID NO: 790032 - RNA, 22 nt, Human
uucucaggaacucagugucagc

SEQ ID NO: 790033 - RNA, 22 nt, Human
guuucugaagggauuacuuggu

SEQ ID NO: 790034 - RNA, 22 nt, Human
augcaacaccccuauggaugga

SEQ ID NO: 790035 - RNA, 22 nt, Human
auggagugucaccuuccugguu

SEQ ID NO: 790036 - RNA, 22 nt, Human
uauaucuaggaacccugagauu

SEQ ID NO: 790037 - RNA, 22 nt, Human
gggaggaggaauguuuugugua

SEQ ID NO: 790038 - RNA, 22 nt, Human
uccugggcuucacagacucugu

SEQ ID NO: 790039 - RNA, 22 nt, Human
aaucagaaauucuacaucacaa

SEQ ID NO: 790040 - RNA, 22 nt, Human
agggggcaggagagaccugcug

SEQ ID NO: 790041 - RNA, 22 nt, Human
caaugucaaggagaccaaaacg

SEQ ID NO: 790042 - RNA, 22 nt, Human
uguuuauugcugcaauugugcc

SEQ ID NO: 790043 - RNA, 22 nt, Human
gcugccuccacuggcucccagu

SEQ ID NO: 790044 - RNA, 22 nt, Human
gccaccucucucuugacucgag

SEQ ID NO: 790045 - RNA, 19 nt, Human
gcuuccagcacugcaggag

SEQ ID NO: 790046 - RNA, 22 nt, Human
acacaguugguggcucagucug

SEQ ID NO: 790047 - RNA, 22 nt, Human
uccucugccccagaugaaauuu

SEQ ID NO: 790048 - RNA, 22 nt, Human
aguuuacaacaguagcuaugga

SEQ ID NO: 790049 - RNA, 22 nt, Human
cagcugccuaugaccuagccuc

SEQ ID NO: 790050 - RNA, 22 nt, Human
caugaaugcuggguucauguaa

SEQ ID NO: 790051 - RNA, 22 nt, Human
uucaguauacauuaucuaauug

SEQ ID NO: 790052 - RNA, 22 nt, Human
aaaguucugagaagcaguuuac

SEQ ID NO: 790053 - RNA, 22 nt, Human
aagcaauuguccugucucuaca

SEQ ID NO: 790054 - RNA, 22 nt, Human
cugagggcuggagcugaggccu

SEQ ID NO: 790055 - RNA, 22 nt, Human
uuugggaagaggaaucucugga

SEQ ID NO: 790056 - RNA, 22 nt, Human
uuacaaagauuauauucaguua

SEQ ID NO: 790057 - RNA, 22 nt, Human
cuuaaaaucuggcaguuagcua

SEQ ID NO: 790058 - RNA, 22 nt, Human
uaaaggccagggccugagugcu

SEQ ID NO: 790059 - RNA, 19 nt, Human
agcacagacaagaccagca

SEQ ID NO: 790060 - RNA, 22 nt, Human
gccucugcacuguggcacacca

SEQ ID NO: 790061 - RNA, 21 nt, Human
ugucuuuggccucauucccag

SEQ ID NO: 790062 - RNA, 19 nt, Human
ccagcagguucauuucagg

SEQ ID NO: 790063 - RNA, 22 nt, Human
accaguuuaauaacugcucaag

SEQ ID NO: 790064 - RNA, 22 nt, Human
aaacacauuuuaggaaaaucua

SEQ ID NO: 790065 - RNA, 22 nt, Human
gucuccagcccacucuagauau

SEQ ID NO: 790066 - RNA, 22 nt, Human
ucacaagacugagcuugcuuga

SEQ ID NO: 790067 - RNA, 22 nt, Human
ggucauuuucacuuucaaguua

SEQ ID NO: 790068 - RNA, 22 nt, Human
agcucuuugagcaaggcagcuc

SEQ ID NO: 790069 - RNA, 22 nt, Human
aaggccagagcguguccugccu

SEQ ID NO: 790070 - RNA, 22 nt, Human
uguccaggacccuauucucacu

SEQ ID NO: 790071 - RNA, 22 nt, Human
ugggugaggaugaugaggcagc

SEQ ID NO: 790072 - RNA, 22 nt, Human
ugcuggcugccagguucccugu

SEQ ID NO: 790073 - RNA, 22 nt, Human
cuucaaaucccccugaguuuga

SEQ ID NO: 790074 - RNA, 22 nt, Human
gcccaaggucccauggcagcac

SEQ ID NO: 790075 - RNA, 21 nt, Human
cagagguggccugaccucuga

SEQ ID NO: 790076 - RNA, 22 nt, Human
auucacauucuagggcccuacu

SEQ ID NO: 790077 - RNA, 22 nt, Human
uuuccucugucaugacagcuga

SEQ ID NO: 790078 - RNA, 22 nt, Human
gugggggacccaggugcugucc

SEQ ID NO: 790079 - RNA, 22 nt, Human
gcucacaucauaguaagcucau

SEQ ID NO: 790080 - RNA, 22 nt, Human
ggcagaggaggggugaauuugc

SEQ ID NO: 790081 - RNA, 22 nt, Human
cccaaccagaaauugacagaca

SEQ ID NO: 790082 - RNA, 23 nt, Human
agucugaauugagaugugcugug

SEQ ID NO: 790083 - RNA, 22 nt, Human
aaguuuguggucauuuauuaua

SEQ ID NO: 790084 - RNA, 22 nt, Human
gauagaaagaauauagauucca

SEQ ID NO: 790085 - RNA, 22 nt, Human
ucuuuguuugccuuuaucaaga

SEQ ID NO: 790086 - RNA, 20 nt, Human
ccuggcuuugcagcaugaga

SEQ ID NO: 790087 - RNA, 22 nt, Human
ucuuuucauugagaacacacug

SEQ ID NO: 790088 - RNA, 22 nt, Human
agggcagcauugccuuucucca

SEQ ID NO: 790089 - RNA, 22 nt, Human
auggcccaggcaggcugguacu

SEQ ID NO: 790090 - RNA, 22 nt, Human
uccuagccuggugagaaacugu

SEQ ID NO: 790091 - RNA, 22 nt, Human
ugggggagccuucacaguagcu

SEQ ID NO: 790092 - RNA, 22 nt, Human
uuacauaacgguaugaaaaaug

SEQ ID NO: 790093 - RNA, 22 nt, Human
ccagcuguaggcaggggguuua

SEQ ID NO: 790094 - RNA, 22 nt, Human
aucuacagugcacaggacagcc

SEQ ID NO: 790095 - RNA, 22 nt, Human
auuguauuuccagcuugaaugu

SEQ ID NO: 790096 - RNA, 22 nt, Human
caggaugguggcaugaucagaa

SEQ ID NO: 790097 - RNA, 22 nt, Human
ccuuuggcauuuugaggaugcg

SEQ ID NO: 790098 - RNA, 22 nt, Human
aagacaauuuugaguaugcaca

SEQ ID NO: 790099 - RNA, 22 nt, Human
agacccagaaagcagcugcauu

SEQ ID NO: 790100 - RNA, 22 nt, Human
cugccuguggucugugaucuaa

SEQ ID NO: 790101 - RNA, 22 nt, Human
caggagugucuccacacagcaa

SEQ ID NO: 790102 - RNA, 22 nt, Human
agucuggguggcugagcuacag

SEQ ID NO: 790103 - RNA, 22 nt, Human
agcagggccucuggcacugguc

SEQ ID NO: 790104 - RNA, 17 nt, Human
uggcccuagacuccagc

SEQ ID NO: 790105 - RNA, 22 nt, Human
agcagcccaaacagacuaagac

SEQ ID NO: 790106 - RNA, 22 nt, Human
uucaaagauaauguagcauuuu

SEQ ID NO: 790107 - RNA, 23 nt, Human
gcugauggagacuuguggccucc

SEQ ID NO: 790108 - RNA, 22 nt, Human
aaggacagaaacagauugcugg

SEQ ID NO: 790109 - RNA, 22 nt, Human
ccuggcugacagcuuaauucca

SEQ ID NO: 790110 - RNA, 22 nt, Human
cauuaauauuguucuucuuuag

SEQ ID NO: 790111 - RNA, 22 nt, Human
acuuguguuaccaagguuuggu

SEQ ID NO: 790112 - RNA, 22 nt, Human
ccaggagcagccggcccaccug

SEQ ID NO: 790113 - RNA, 22 nt, Human
uggugggcacagugcccaggcu

SEQ ID NO: 790114 - RNA, 22 nt, Human
ugaaguuuucugguugauuaag

SEQ ID NO: 790115 - RNA, 19 nt, Human
ggcucagggcgcugccgcc

SEQ ID NO: 790116 - RNA, 22 nt, Human
caagaaacaccaaugacugcug

SEQ ID NO: 790117 - RNA, 20 nt, Human
cugcucugcuuugcaggugg

SEQ ID NO: 790118 - RNA, 22 nt, Human
auauccuuuacugugucacaga

SEQ ID NO: 790119 - RNA, 22 nt, Human
acaggcauccaggacuaggccu

SEQ ID NO: 790120 - RNA, 22 nt, Human
cuggaggaccccugccuggaag

SEQ ID NO: 790121 - RNA, 22 nt, Human
gcuuucuaaucuauuuccuuac

SEQ ID NO: 790122 - RNA, 22 nt, Human
uucaauuugugcuaaggcaccg

SEQ ID NO: 790123 - RNA, 21 nt, Human
uucaaaaugguguguuugucu

SEQ ID NO: 790124 - RNA, 22 nt, Human
aaaguacaugcaauucuucuga

SEQ ID NO: 790125 - RNA, 19 nt, Human
gagguggguccccgcagcc

SEQ ID NO: 790126 - RNA, 22 nt, Human
aaauguguuccuuugcuacaga

SEQ ID NO: 790127 - RNA, 22 nt, Human
ggccucagaccggagcuggcca

SEQ ID NO: 790128 - RNA, 22 nt, Human
aggucaaggcugcagugagcug

SEQ ID NO: 790129 - RNA, 22 nt, Human
agaaguggucugucuuccagau

SEQ ID NO: 790130 - RNA, 22 nt, Human
uugcagcuucuaccacuguuuc

SEQ ID NO: 790131 - RNA, 22 nt, Human
cccacagguggaagccucggaa

SEQ ID NO: 790132 - RNA, 22 nt, Human
ggccagggggcuucagacucca

SEQ ID NO: 790133 - RNA, 22 nt, Human
uaugcauugugagacuguggga

SEQ ID NO: 790134 - RNA, 22 nt, Human
gauauuuugagaaauccuauga

SEQ ID NO: 790135 - RNA, 22 nt, Human
uacauacauauucauacaggug

SEQ ID NO: 790136 - RNA, 22 nt, Human
gauagauaaaacuauauuuuca

SEQ ID NO: 790137 - RNA, 22 nt, Human
ggcagccuugagggaggccugg

SEQ ID NO: 790138 - RNA, 19 nt, Human
ggaaggccacggcaggcuu

SEQ ID NO: 790139 - RNA, 22 nt, Human
uucauugauuccaggcucuucu

SEQ ID NO: 790140 - RNA, 22 nt, Human
aauucauacucuauauugcuuu

SEQ ID NO: 790141 - RNA, 22 nt, Human
ccaggcuggucugaauuucuag

SEQ ID NO: 790142 - RNA, 22 nt, Human
gcaccaggcagcugagcaggcc

SEQ ID NO: 790143 - RNA, 20 nt, Human
gcugugccuccagcuggugg

SEQ ID NO: 790144 - RNA, 23 nt, Human
ucuggcugcuccuuucaaugcuc

SEQ ID NO: 790145 - RNA, 22 nt, Human
gucauugcaguggcaaaucaca

SEQ ID NO: 790146 - RNA, 23 nt, Human
gcccagagaggcucaccaggaau

SEQ ID NO: 790147 - RNA, 22 nt, Human
auuccacuuuaugucuguauga

SEQ ID NO: 790148 - RNA, 22 nt, Human
uucaugaauauauugaauuagc

SEQ ID NO: 790149 - RNA, 22 nt, Human
ccuccuggcuuuucccauugaa

SEQ ID NO: 790150 - RNA, 22 nt, Human
augcagcuuccauauuuugcug

SEQ ID NO: 790151 - RNA, 22 nt, Human
agaaucagugagcaguugugau

SEQ ID NO: 790152 - RNA, 22 nt, Human
ucccugggagaugaugaugagg

SEQ ID NO: 790153 - RNA, 21 nt, Human
caguggcacgauuucggcuca

SEQ ID NO: 790154 - RNA, 22 nt, Human
ugaaggccagggauuugcagcc

SEQ ID NO: 790155 - RNA, 22 nt, Human
agguggugaugacagaagacag

SEQ ID NO: 790156 - RNA, 18 nt, Human
uauaaacacacuuagguu

SEQ ID NO: 790157 - RNA, 22 nt, Human
acuugaauuaggccuugagaga

SEQ ID NO: 790158 - RNA, 22 nt, Human
uuucuuauacuauauugucauc

SEQ ID NO: 790159 - RNA, 22 nt, Human
gacuggaaagccuguccucaga

SEQ ID NO: 790160 - RNA, 22 nt, Human
ucaccuuagcuagaggaagaga

SEQ ID NO: 790161 - RNA, 19 nt, Human
ggcagaagguguaggggga

SEQ ID NO: 790162 - RNA, 22 nt, Human
ggccagcucaggguccuugggc

SEQ ID NO: 790163 - RNA, 22 nt, Human
agacaggagagggaacugccgg

SEQ ID NO: 790164 - RNA, 20 nt, Human
ucaggaugugcugagugaag

SEQ ID NO: 790165 - RNA, 22 nt, Human
caaagugcuaggauuacaggcc

SEQ ID NO: 790166 - RNA, 22 nt, Human
gcuggcugccugguuaugccuu

SEQ ID NO: 790167 - RNA, 22 nt, Human
cugccagggcccuacucaguuu

SEQ ID NO: 790168 - RNA, 20 nt, Human
cacaagagaauacacacugg

SEQ ID NO: 790169 - RNA, 22 nt, Human
acuggcugccuccaaagugugc

SEQ ID NO: 790170 - RNA, 22 nt, Human
gccaguggcccucuggagaagg

SEQ ID NO: 790171 - RNA, 22 nt, Human
uucacauaaugauacaaagcuu

SEQ ID NO: 790172 - RNA, 22 nt, Human
ugaagaugucagcagggguggu

SEQ ID NO: 790173 - RNA, 22 nt, Human
ccuggcagcgccgaagcuggcc

SEQ ID NO: 790174 - RNA, 22 nt, Human
cauuucugucacguucuuuuau

SEQ ID NO: 790175 - RNA, 22 nt, Human
cuagggaguggcagagcuggga

SEQ ID NO: 790176 - RNA, 22 nt, Human
augauuuaaagucauugugaac

SEQ ID NO: 790177 - RNA, 22 nt, Human
ucauuuuucacacagggucacc

SEQ ID NO: 790178 - RNA, 22 nt, Human
uuagaaaaaacgucuucuagug

SEQ ID NO: 790179 - RNA, 22 nt, Human
ugcaguggaggccgugagacag

SEQ ID NO: 790180 - RNA, 22 nt, Human
aguuuucuucauuuuguggcca

SEQ ID NO: 790181 - RNA, 22 nt, Human
auguuucagauacagaucaaau

SEQ ID NO: 790182 - RNA, 22 nt, Human
ggcagccccagaaacaguucag

SEQ ID NO: 790183 - RNA, 21 nt, Human
acaugggaccugcgaaaggaa

SEQ ID NO: 790184 - RNA, 22 nt, Human
agccaagaaucaugagcuaaua

SEQ ID NO: 790185 - RNA, 22 nt, Human
cugcccacuuggccaccuucua

SEQ ID NO: 790186 - RNA, 22 nt, Human
ggcucuuuaacuugucuaaauu

SEQ ID NO: 790187 - RNA, 22 nt, Human
ccacugccaugggcuaggcaug

SEQ ID NO: 790188 - RNA, 22 nt, Human
gcugcaaguccuucccucucuu

SEQ ID NO: 790189 - RNA, 22 nt, Human
agugucaaguacaugguaguga

SEQ ID NO: 790190 - RNA, 22 nt, Human
cagugcagaggccagggaggau

SEQ ID NO: 790191 - RNA, 22 nt, Human
aaaggccagguuggcugguauu

SEQ ID NO: 790192 - RNA, 22 nt, Human
ccagggcugcugugggacucca

SEQ ID NO: 790193 - RNA, 22 nt, Human
ucuggcauggauuugagugucu

SEQ ID NO: 790194 - RNA, 22 nt, Human
uuuucaguuugcacugcagugc

SEQ ID NO: 790195 - RNA, 22 nt, Human
ucagauaaaggagagcuuagca

SEQ ID NO: 790196 - RNA, 22 nt, Human
augcugagauaaggcuuuaguc

SEQ ID NO: 790197 - RNA, 22 nt, Human
acuggagugaguaucgaugaac

SEQ ID NO: 790198 - RNA, 22 nt, Human
cuggcagcgguuugcagccugg

SEQ ID NO: 790199 - RNA, 22 nt, Human
cuggcaggcggcagagcccagg

SEQ ID NO: 790200 - RNA, 22 nt, Human
auuuaccauauguacugaguau

SEQ ID NO: 790201 - RNA, 22 nt, Human
cugcacacaucgcacugcccgu

SEQ ID NO: 790202 - RNA, 22 nt, Human
cagcagcaaggugaggguggag

SEQ ID NO: 790203 - RNA, 21 nt, Human
uuacuuuagaaauugccuuuu

SEQ ID NO: 790204 - RNA, 22 nt, Human
gggcuggauguuugaugacgaa

SEQ ID NO: 790205 - RNA, 22 nt, Human
ccauguuggaacuucacauucu

SEQ ID NO: 790206 - RNA, 22 nt, Human
uggcccugguggcacagccugc

SEQ ID NO: 790207 - RNA, 22 nt, Human
ggaacagggauuuggccugguu

SEQ ID NO: 790208 - RNA, 22 nt, Human
guauuauugucaugaaauaaua

SEQ ID NO: 790209 - RNA, 22 nt, Human
ggagccccaauugagcaguacg

SEQ ID NO: 790210 - RNA, 19 nt, Human
ugaggccagcuggcauuuu

SEQ ID NO: 790211 - RNA, 22 nt, Human
ucuucaaaaacugcaccuugcu

SEQ ID NO: 790212 - RNA, 22 nt, Human
auccuaaagaaauauuuauuaa

SEQ ID NO: 790213 - RNA, 22 nt, Human
guguuuuaucagacaaaguaua

SEQ ID NO: 790214 - RNA, 21 nt, Human
cuggacugaggagacagucgc

SEQ ID NO: 790215 - RNA, 22 nt, Human
agcuggggcugcagagaacagg

SEQ ID NO: 790216 - RNA, 20 nt, Human
ucucuggccagaaacaacag

SEQ ID NO: 790217 - RNA, 22 nt, Human
aggacuggcagugugagggguc

SEQ ID NO: 790218 - RNA, 22 nt, Human
auugagaaucugagagccuagg

SEQ ID NO: 790219 - RNA, 18 nt, Human
ucaggagacacagacgca

SEQ ID NO: 790220 - RNA, 22 nt, Human
acaggcagggaccuuggcuaag

SEQ ID NO: 790221 - RNA, 22 nt, Human
aggcugccucuuuugagagggu

SEQ ID NO: 790222 - RNA, 17 nt, Human
ugaggccauggcaccau

SEQ ID NO: 790223 - RNA, 22 nt, Human
gucccuggggaaucagcuggag

SEQ ID NO: 790224 - RNA, 22 nt, Human
aauaacagaaacuugagcauca

SEQ ID NO: 790225 - RNA, 22 nt, Human
aucauucuagcuguuguguuga

SEQ ID NO: 790226 - RNA, 22 nt, Human
aaaucagacacagugaaaguua

SEQ ID NO: 790227 - RNA, 22 nt, Human
cccagacauaacagcagagagg

SEQ ID NO: 790228 - RNA, 22 nt, Human
uaacagugaccugaaugucaau

SEQ ID NO: 790229 - RNA, 22 nt, Human
gaggcucccaaggggcuaggcc

SEQ ID NO: 790230 - RNA, 22 nt, Human
cccaggaaauagccaggaggug

SEQ ID NO: 790231 - RNA, 19 nt, Human
uccagccugcuguuucucu

SEQ ID NO: 790232 - RNA, 22 nt, Human
agugcauugcaucucugcuuca

SEQ ID NO: 790233 - RNA, 22 nt, Human
cucuugcaucuguuguauuggu

SEQ ID NO: 790234 - RNA, 22 nt, Human
ugucucuucugccuccagcugu

SEQ ID NO: 790235 - RNA, 22 nt, Human
uggagugggcaauguaggcaag

SEQ ID NO: 790236 - RNA, 22 nt, Human
caggcccaggggucuggcccac

SEQ ID NO: 790237 - RNA, 22 nt, Human
uagcuuaauaugaaacacauaa

SEQ ID NO: 790238 - RNA, 22 nt, Human
cugggagaucuccugagggcag

SEQ ID NO: 790239 - RNA, 22 nt, Human
cuccaguggugauggggaagaa

SEQ ID NO: 790240 - RNA, 22 nt, Human
uagagucagagaaucauuacag

SEQ ID NO: 790241 - RNA, 22 nt, Human
cacucccucuaguugcauucug

SEQ ID NO: 790242 - RNA, 22 nt, Human
acuggcagccacaacuggcagg

SEQ ID NO: 790243 - RNA, 20 nt, Human
acuggcugccuggaaugcgc

SEQ ID NO: 790244 - RNA, 22 nt, Human
ccucuggccuaggccgggagag

SEQ ID NO: 790245 - RNA, 22 nt, Human
aagaaaccaacccugccagcac

SEQ ID NO: 790246 - RNA, 22 nt, Human
ccucagacgcaggccuaugggc

SEQ ID NO: 790247 - RNA, 22 nt, Human
gaauuuuagaauaugugggcuu

SEQ ID NO: 790248 - RNA, 22 nt, Human
uuagucaauagugaauauagag

SEQ ID NO: 790249 - RNA, 22 nt, Human
gcuggcagugugaaugacaagc

SEQ ID NO: 790250 - RNA, 22 nt, Human
gaaaauuuaauucucuucugug

SEQ ID NO: 790251 - RNA, 18 nt, Human
cugucuuuuuucucucca

SEQ ID NO: 790252 - RNA, 22 nt, Human
ucauaaagauacuaagugaguu

SEQ ID NO: 790253 - RNA, 22 nt, Human
cuggcagcuuccuuugcaucug

SEQ ID NO: 790254 - RNA, 22 nt, Human
aaacaccagcacuguuuacaaa

SEQ ID NO: 790255 - RNA, 23 nt, Human
augcaagaguuucucaaacugga

SEQ ID NO: 790256 - RNA, 22 nt, Human
gaggccagggaugcaaugagag

SEQ ID NO: 790257 - RNA, 22 nt, Human
gacagacaggaggcauucaggg

SEQ ID NO: 790258 - RNA, 22 nt, Human
uuuuccagauggauacuagaau

SEQ ID NO: 790259 - RNA, 22 nt, Human
aauaaacaaaucuuuccugugg

SEQ ID NO: 790260 - RNA, 22 nt, Human
gcagggcggcccagagcaggcc

SEQ ID NO: 790261 - RNA, 19 nt, Human
uggcagggagaguuugaag

SEQ ID NO: 790262 - RNA, 22 nt, Human
caggcccaggugucgauguucc

SEQ ID NO: 790263 - RNA, 22 nt, Human
cucucaguuuccucaacuguaa

SEQ ID NO: 790264 - RNA, 22 nt, Human
gauauacagagcauucuuugau

SEQ ID NO: 790265 - RNA, 22 nt, Human
cugcagcugccagugauuucag

SEQ ID NO: 790266 - RNA, 22 nt, Human
cugaggcucccucgggucugcu

SEQ ID NO: 790267 - RNA, 18 nt, Human
uggcagguccagcugugg

SEQ ID NO: 790268 - RNA, 22 nt, Human
aggcagugcagaguccucuucu

SEQ ID NO: 790269 - RNA, 22 nt, Human
ccagcccucacugaggccucuc

SEQ ID NO: 790270 - RNA, 22 nt, Human
uucacagugcugcaccuggcuu

SEQ ID NO: 790271 - RNA, 22 nt, Human
agguuagugcugaaaugacaug

SEQ ID NO: 790272 - RNA, 22 nt, Human
gcugaggcuccucgggaggaca

SEQ ID NO: 790273 - RNA, 22 nt, Human
cccaggguggaugcaagcagca

SEQ ID NO: 790274 - RNA, 22 nt, Human
accagcugaguaggggagggcc

SEQ ID NO: 790275 - RNA, 22 nt, Human
ucacagaaucucugauaagucu

SEQ ID NO: 790276 - RNA, 22 nt, Human
uucaauuuagugauguuguugg

SEQ ID NO: 790277 - RNA, 22 nt, Human
ucacaguucaucugauaaacua

SEQ ID NO: 790278 - RNA, 22 nt, Human
ugcacacaccgugcuucacuga

SEQ ID NO: 790279 - RNA, 22 nt, Human
cucauaaugugacuguauuuga

SEQ ID NO: 790280 - RNA, 23 nt, Human
agcuuccuagugaccuggagucu

SEQ ID NO: 790281 - RNA, 22 nt, Human
ugagauggagccacugcacucu

SEQ ID NO: 790282 - RNA, 22 nt, Human
caguaaaugcagauauagauac

SEQ ID NO: 790283 - RNA, 22 nt, Human
accagccccaccgggacugcag

SEQ ID NO: 790284 - RNA, 22 nt, Human
caggaacccccacucucagcuc

SEQ ID NO: 790285 - RNA, 22 nt, Human
agagcccagucuuugugugaag

SEQ ID NO: 790286 - RNA, 22 nt, Human
auuacaagaugcauccauauuu

SEQ ID NO: 790287 - RNA, 22 nt, Human
uuucccaaugaguccuugagca

SEQ ID NO: 790288 - RNA, 22 nt, Human
ccucucuccuuccuuugccaaa

SEQ ID NO: 790289 - RNA, 22 nt, Human
aacauucuaugugcauucagaa

SEQ ID NO: 790290 - RNA, 20 nt, Human
uaaaugcaugaauguaaggc

SEQ ID NO: 790291 - RNA, 22 nt, Human
gggaagcaucugaggguccacu

SEQ ID NO: 790292 - RNA, 22 nt, Human
ggagccaguuuagaccucaguu

SEQ ID NO: 790293 - RNA, 22 nt, Human
ccuggcugccuuguguugaucu

SEQ ID NO: 790294 - RNA, 22 nt, Human
ccaaggagcaaggcucaacaag

SEQ ID NO: 790295 - RNA, 22 nt, Human
agguuggccucagggaggcucu

SEQ ID NO: 790296 - RNA, 22 nt, Human
uuuggcuugcacuggcaccaac

SEQ ID NO: 790297 - RNA, 22 nt, Human
gcuggggaggcagcagagaaca

SEQ ID NO: 790298 - RNA, 22 nt, Human
gugccuuccccgguggucuguu

SEQ ID NO: 790299 - RNA, 22 nt, Human
uccaggccucuagcccucucuu

SEQ ID NO: 790300 - RNA, 22 nt, Human
ugaggcucugcuucuguggcuc

SEQ ID NO: 790301 - RNA, 22 nt, Human
uggcuuccagaacugagcaaca

SEQ ID NO: 790302 - RNA, 22 nt, Human
ugugugcauguuaaugagaaaa

SEQ ID NO: 790303 - RNA, 22 nt, Human
ucccagggcucuagagugcugg

SEQ ID NO: 790304 - RNA, 22 nt, Human
uucagagaaagcagauuuacuc

SEQ ID NO: 790305 - RNA, 22 nt, Human
gggaggagggugcuggcuaaac

SEQ ID NO: 790306 - RNA, 22 nt, Human
augauacaucuucaugucagug

SEQ ID NO: 790307 - RNA, 22 nt, Human
ccucuggccacaugggacauag

SEQ ID NO: 790308 - RNA, 22 nt, Human
uguuaaaaccacaggugaggac

SEQ ID NO: 790309 - RNA, 22 nt, Human
acaaagcuagagaagagaauug

SEQ ID NO: 790310 - RNA, 22 nt, Human
cauuggaaugaucguuuugcug

SEQ ID NO: 790311 - RNA, 22 nt, Human
aggcuccauaccaucuccggag

SEQ ID NO: 790312 - RNA, 22 nt, Human
guugaugaaaaugaauugcaug

SEQ ID NO: 790313 - RNA, 22 nt, Human
uggcccugcccucuucaucuuu

SEQ ID NO: 790314 - RNA, 22 nt, Human
ugguagggacacuaugcagaaa

SEQ ID NO: 790315 - RNA, 22 nt, Human
auaugcuuacagcuuaaaaucc

SEQ ID NO: 790316 - RNA, 22 nt, Human
uguuaauauacuaaaauccacu

SEQ ID NO: 790317 - RNA, 23 nt, Human
agguagguuauugcugcuaccug

SEQ ID NO: 790318 - RNA, 22 nt, Human
uugcaaauugcaagaguuggau

SEQ ID NO: 790319 - RNA, 22 nt, Human
guucaguguuuuuauugacagg

SEQ ID NO: 790320 - RNA, 22 nt, Human
aggcuuggcuggcagcccuggg

SEQ ID NO: 790321 - RNA, 22 nt, Human
acagcauucaauaaauaauaac

SEQ ID NO: 790322 - RNA, 22 nt, Human
ggagaugcuuuccaguggggau

SEQ ID NO: 790323 - RNA, 22 nt, Human
ccacaggacggaggucuggccg

SEQ ID NO: 790324 - RNA, 22 nt, Human
cuggggccagugaggaggcuuu

SEQ ID NO: 790325 - RNA, 22 nt, Human
ucuccuggcccugucgccaucu

SEQ ID NO: 790326 - RNA, 22 nt, Human
aaacuacugauuugugaauuga

SEQ ID NO: 790327 - RNA, 22 nt, Human
ccugggaguggcacucacagca

SEQ ID NO: 790328 - RNA, 22 nt, Human
ggcucaggggccaggccugucc

SEQ ID NO: 790329 - RNA, 22 nt, Human
auguauuuacugagaaggaaac

SEQ ID NO: 790330 - RNA, 22 nt, Human
cucagugugaaugcucaguaaa

SEQ ID NO: 790331 - RNA, 22 nt, Human
agggccucugagccaguucugg

SEQ ID NO: 790332 - RNA, 22 nt, Human
auacaguaaccacauucuauag

SEQ ID NO: 790333 - RNA, 22 nt, Human
cugcacuguguauuccuuggcu

SEQ ID NO: 790334 - RNA, 22 nt, Human
ucugcagaaggaaucagcugag

SEQ ID NO: 790335 - RNA, 22 nt, Human
auuguauuagcacaauacaauu

SEQ ID NO: 790336 - RNA, 22 nt, Human
aauauuucuggugcuucucacu

SEQ ID NO: 790337 - RNA, 22 nt, Human
gcaccugcuggguguagaggcu

SEQ ID NO: 790338 - RNA, 22 nt, Human
aggccagagaggggaccagccu

SEQ ID NO: 790339 - RNA, 22 nt, Human
cuuuccaaugucacuaugaauc

SEQ ID NO: 790340 - RNA, 22 nt, Human
aaugagauggaauucccgccua

SEQ ID NO: 790341 - RNA, 22 nt, Human
ucuggaguggagcugaucauuu

SEQ ID NO: 790342 - RNA, 22 nt, Human
uggccacacugcccccacuggg

SEQ ID NO: 790343 - RNA, 22 nt, Human
ccucagggacuccaugcugcag

SEQ ID NO: 790344 - RNA, 22 nt, Human
acuggaguagaucugacugagu

SEQ ID NO: 790345 - RNA, 22 nt, Human
cagucccacuagugccaauacc

SEQ ID NO: 790346 - RNA, 22 nt, Human
cugccagguuggcgcucgcucu

SEQ ID NO: 790347 - RNA, 18 nt, Human
ggacacagauagguacag

SEQ ID NO: 790348 - RNA, 22 nt, Human
ccagcuuguuugaagcucguca

SEQ ID NO: 790349 - RNA, 22 nt, Human
auaauaacaaugccagaugccu

SEQ ID NO: 790350 - RNA, 22 nt, Human
gcugaugcaggguugagaggag

SEQ ID NO: 790351 - RNA, 22 nt, Human
uucuggaaggguggaguagcuu

SEQ ID NO: 790352 - RNA, 22 nt, Human
uguaacaguaagccugugagcu

SEQ ID NO: 790353 - RNA, 22 nt, Human
aagaaaacaaugacuugccagc

SEQ ID NO: 790354 - RNA, 22 nt, Human
uguggacauacuaggccuaggc

SEQ ID NO: 790355 - RNA, 22 nt, Human
guggcccagcccuacagaggac

SEQ ID NO: 790356 - RNA, 22 nt, Human
cauuuagaaacuguuuuuaaca

SEQ ID NO: 790357 - RNA, 22 nt, Human
ucacauuuuaguaccaugauuu

SEQ ID NO: 790358 - RNA, 22 nt, Human
uggcugugucaucauagcugug

SEQ ID NO: 790359 - RNA, 22 nt, Human
agaaucacuggaauuguuuuuu

SEQ ID NO: 790360 - RNA, 22 nt, Human
cagcugguuaucagagaggccu

SEQ ID NO: 790361 - RNA, 22 nt, Human
gauggcaccuugaacgcugcgu

SEQ ID NO: 790362 - RNA, 22 nt, Human
gcacggcuaauuuuuguauuuu

SEQ ID NO: 790363 - RNA, 22 nt, Human
uaaugcaguacugauauaaaca

SEQ ID NO: 790364 - RNA, 22 nt, Human
aggcuggcccaccucuugucuu

SEQ ID NO: 790365 - RNA, 22 nt, Human
aaagccaguuugucucuuuaaa

SEQ ID NO: 790366 - RNA, 22 nt, Human
aauaugcaaagcguguuaucug

SEQ ID NO: 790367 - RNA, 22 nt, Human
cugagaguuaagagauggggcu

SEQ ID NO: 790368 - RNA, 22 nt, Human
ggccagcugagcugcugcacag

SEQ ID NO: 790369 - RNA, 22 nt, Human
gccuggucucugggguugggua

SEQ ID NO: 790370 - RNA, 22 nt, Human
ugcccagcacccagcaugaugc

SEQ ID NO: 790371 - RNA, 22 nt, Human
uccagggacagcgcuggagcua

SEQ ID NO: 790372 - RNA, 22 nt, Human
auacuacaaucauaauuguaca

SEQ ID NO: 790373 - RNA, 22 nt, Human
uucauuuggccucugcuuaaaa

SEQ ID NO: 790374 - RNA, 19 nt, Human
aggcagcacccaguccuug

SEQ ID NO: 790375 - RNA, 22 nt, Human
uucagcacuguuauggauuugc

SEQ ID NO: 790376 - RNA, 22 nt, Human
uuuucaguggcuugcauauguu

SEQ ID NO: 790377 - RNA, 22 nt, Human
aggugaaguuaaaaaccagucu

SEQ ID NO: 790378 - RNA, 19 nt, Human
uguuucuuccuccaucuga

SEQ ID NO: 790379 - RNA, 22 nt, Human
caagcagauauuuuagucaaga

SEQ ID NO: 790380 - RNA, 22 nt, Human
gucucccaucguuugugaggaa

SEQ ID NO: 790381 - RNA, 23 nt, Human
ugaaugauuguacugagcuuuua

SEQ ID NO: 790382 - RNA, 22 nt, Human
ucaugcaaauacuguuccagaa

SEQ ID NO: 790383 - RNA, 22 nt, Human
guagaggggugauucugugaga

SEQ ID NO: 790384 - RNA, 22 nt, Human
uccaggcuagguuuacaggaca

SEQ ID NO: 790385 - RNA, 22 nt, Human
gaguccugaauccuguggcaac

SEQ ID NO: 790386 - RNA, 22 nt, Human
aaggaggaauguagccagcucc

SEQ ID NO: 790387 - RNA, 22 nt, Human
ucuggcugacauccuguaugag

SEQ ID NO: 790388 - RNA, 22 nt, Human
acagaagcagcgcggcucuucu

SEQ ID NO: 790389 - RNA, 22 nt, Human
uacaaaguuugagaaugcuuuc

SEQ ID NO: 790390 - RNA, 22 nt, Human
uguuuuccuccugguuucugcc

SEQ ID NO: 790391 - RNA, 22 nt, Human
ugcaggcaggggaugagcagcc

SEQ ID NO: 790392 - RNA, 22 nt, Human
uccucccugggagcuucugagu

SEQ ID NO: 790393 - RNA, 20 nt, Human
gagcugaguguggucauggg

SEQ ID NO: 790394 - RNA, 22 nt, Human
ugcaaaugucaaggguuagugu

SEQ ID NO: 790395 - RNA, 22 nt, Human
aggacuguuuuuucuucuaggg

SEQ ID NO: 790396 - RNA, 22 nt, Human
ccaggcacaggugggccucaga

SEQ ID NO: 790397 - RNA, 22 nt, Human
ucugcacauagguaggcuggaa

SEQ ID NO: 790398 - RNA, 22 nt, Human
guacaaguugccuaccuuaagu

SEQ ID NO: 790399 - RNA, 17 nt, Human
caucuuuaaaauccuga

SEQ ID NO: 790400 - RNA, 22 nt, Human
ggcgagggagcagugcgguggg

SEQ ID NO: 790401 - RNA, 21 nt, Human
ccgugcucggcuauggaccac

SEQ ID NO: 790402 - RNA, 22 nt, Human
aacaaaucuuaaaguaauucaa

SEQ ID NO: 790403 - RNA, 22 nt, Human
ggcaggcucagcagccaaggag

SEQ ID NO: 790404 - RNA, 22 nt, Human
ucccaggcuggggccaggugac

SEQ ID NO: 790405 - RNA, 20 nt, Human
auguccagugacuggaccau

SEQ ID NO: 790406 - RNA, 22 nt, Human
cauacuuuugcccugacauucu

SEQ ID NO: 790407 - RNA, 22 nt, Human
ggcaagauccaaggggcuagga

SEQ ID NO: 790408 - RNA, 22 nt, Human
uuccaaagugcuggaauuacau

SEQ ID NO: 790409 - RNA, 22 nt, Human
caacacagguucugcaaaggaa

SEQ ID NO: 790410 - RNA, 22 nt, Human
uuaauuuauacauaaucacagg

SEQ ID NO: 790411 - RNA, 22 nt, Human
uuucuaaaauagauuuuauggu

SEQ ID NO: 790412 - RNA, 22 nt, Human
aauccugaccugggcaugcuug

SEQ ID NO: 790413 - RNA, 22 nt, Human
cacaggccaguaagacuguguu

SEQ ID NO: 790414 - RNA, 22 nt, Human
cucccuggucuuucccaucauu

SEQ ID NO: 790415 - RNA, 22 nt, Human
acugggacuguaugugcuggac

SEQ ID NO: 790416 - RNA, 22 nt, Human
caggcuggagugcaauggugcu

SEQ ID NO: 790417 - RNA, 21 nt, Human
auacagaagguggcaaaguac

SEQ ID NO: 790418 - RNA, 22 nt, Human
ggcaggaggaagaguuagcacc

SEQ ID NO: 790419 - RNA, 22 nt, Human
uacuugcuggguguaauuuucu

SEQ ID NO: 790420 - RNA, 22 nt, Human
uggcccugcuaugauccugcaa

SEQ ID NO: 790421 - RNA, 22 nt, Human
agugcauucuggcagaacaggu

SEQ ID NO: 790422 - RNA, 22 nt, Human
ugacagccaugauccuuacugu

SEQ ID NO: 790423 - RNA, 22 nt, Human
gagggaagaaagaauugaugcg

SEQ ID NO: 790424 - RNA, 22 nt, Human
cagagcugggaucccaugggcg

SEQ ID NO: 790425 - RNA, 22 nt, Human
caagaaauucuguucagauagc

SEQ ID NO: 790426 - RNA, 22 nt, Human
gcacccagagggcagggucucc

SEQ ID NO: 790427 - RNA, 22 nt, Human
gggcuaggucugaucagagaag

SEQ ID NO: 790428 - RNA, 22 nt, Human
ccccagcagacucagggcaggu

SEQ ID NO: 790429 - RNA, 22 nt, Human
ugggagcaccuugagggcagaa

SEQ ID NO: 790430 - RNA, 22 nt, Human
uugcagcuggugguggccgugu

SEQ ID NO: 790431 - RNA, 22 nt, Human
ugcuuauucuuuccacaauuca

SEQ ID NO: 790432 - RNA, 22 nt, Human
auuuuacuuugugaauauugac

SEQ ID NO: 790433 - RNA, 18 nt, Human
cugcacuguggguagcuc

SEQ ID NO: 790434 - RNA, 22 nt, Human
agggcagccugagugcuggccc

SEQ ID NO: 790435 - RNA, 22 nt, Human
uagacacaucaaggaucaguuu

SEQ ID NO: 790436 - RNA, 22 nt, Human
gugcaaaauuuggccaauaaca

SEQ ID NO: 790437 - RNA, 22 nt, Human
gaaauauuacaguggaggggau

SEQ ID NO: 790438 - RNA, 22 nt, Human
cugcaagggaucuucagguagc

SEQ ID NO: 790439 - RNA, 22 nt, Human
gcuaaucaauguuaaggcugug

SEQ ID NO: 790440 - RNA, 22 nt, Human
accauacauuaaaugacuuuca

SEQ ID NO: 790441 - RNA, 22 nt, Human
gcucagagcaucccagugaaug

SEQ ID NO: 790442 - RNA, 22 nt, Human
guucacauguggucaugcuguc

SEQ ID NO: 790443 - RNA, 22 nt, Human
ucaaauuaguggaauaauaaug

SEQ ID NO: 790444 - RNA, 22 nt, Human
agggaagcaggaauagcucuga

SEQ ID NO: 790445 - RNA, 22 nt, Human
uagcaguauauuuuaaggaagc

SEQ ID NO: 790446 - RNA, 22 nt, Human
guccuuggagguguggaaucug

SEQ ID NO: 790447 - RNA, 22 nt, Human
aaggagaaggcaucauucaagu

SEQ ID NO: 790448 - RNA, 22 nt, Human
agcagggguaacagaaggaaag

SEQ ID NO: 790449 - RNA, 22 nt, Human
uucuuucucagugggcagauac

SEQ ID NO: 790450 - RNA, 22 nt, Human
aagcauuuuucacagcaacagc

SEQ ID NO: 790451 - RNA, 22 nt, Human
uacucaaaaaguuaugaaucau

SEQ ID NO: 790452 - RNA, 22 nt, Human
ggccagagagcagccaggauuc

SEQ ID NO: 790453 - RNA, 22 nt, Human
gccuuggagaucacugcucaug

SEQ ID NO: 790454 - RNA, 21 nt, Human
uaagugcaaagagacagauac

SEQ ID NO: 790455 - RNA, 23 nt, Human
uccaggcacgcauuucuucuagc

SEQ ID NO: 790456 - RNA, 22 nt, Human
gucaguguagcaggugcaagcc

SEQ ID NO: 790457 - RNA, 22 nt, Human
cagcgucucguugugggccucg

SEQ ID NO: 790458 - RNA, 22 nt, Human
uuauuacaaugcagaaaauaga

SEQ ID NO: 790459 - RNA, 22 nt, Human
caggcagcaucagucugcugua

SEQ ID NO: 790460 - RNA, 22 nt, Human
auccugucaucauaguacuuga

SEQ ID NO: 790461 - RNA, 22 nt, Human
gugcuggcuggacauggagcac

SEQ ID NO: 790462 - RNA, 22 nt, Human
acacagggcagagagcuggcuc

SEQ ID NO: 790463 - RNA, 22 nt, Human
cagagccaggccugcccucuuu

SEQ ID NO: 790464 - RNA, 19 nt, Human
gccaggaaagaaucaggcg

SEQ ID NO: 790465 - RNA, 22 nt, Human
ugcagaagcagagccgguggcc

SEQ ID NO: 790466 - RNA, 22 nt, Human
uaggaacaguccuagaaaucug

SEQ ID NO: 790467 - RNA, 22 nt, Human
uucauguaguguaaugucuuca

SEQ ID NO: 790468 - RNA, 22 nt, Human
gagccugaugaaacaggcagac

SEQ ID NO: 790469 - RNA, 22 nt, Human
cugcaucaggccaauuaagaau

SEQ ID NO: 790470 - RNA, 22 nt, Human
uccagccuucucaaggcuggcu

SEQ ID NO: 790471 - RNA, 21 nt, Human
uggaagucuugaguagggggc

SEQ ID NO: 790472 - RNA, 22 nt, Human
agcccagccggauucccaguuc

SEQ ID NO: 790473 - RNA, 22 nt, Human
accccuucuccuggcuguucca

SEQ ID NO: 790474 - RNA, 22 nt, Human
uggcucagugacauuccuccca

SEQ ID NO: 790475 - RNA, 22 nt, Human
gcuccagcuccggcuccgaagc

SEQ ID NO: 790476 - RNA, 22 nt, Human
aguggugaugacagcaguuucu

SEQ ID NO: 790477 - RNA, 18 nt, Human
caaauucucauugauuuc

SEQ ID NO: 790478 - RNA, 22 nt, Human
aggugcagcugacaccaugugg

SEQ ID NO: 790479 - RNA, 22 nt, Human
ccucagggucugaggagaccgu

SEQ ID NO: 790480 - RNA, 22 nt, Human
aagcuguuaucuucuggcggac

SEQ ID NO: 790481 - RNA, 22 nt, Human
gagcuuggugaugccuccuggu

SEQ ID NO: 790482 - RNA, 22 nt, Human
gaggagaggcuggacgcgguga

SEQ ID NO: 790483 - RNA, 22 nt, Human
uucaggcccaacgcacagcuuc

SEQ ID NO: 790484 - RNA, 22 nt, Human
gccagggugagggcugagaggu

SEQ ID NO: 790485 - RNA, 22 nt, Human
aguggcaguagaugagcugguu

SEQ ID NO: 790486 - RNA, 19 nt, Human
ccugggaggcggagguugc

SEQ ID NO: 790487 - RNA, 22 nt, Human
cugaggaagacagcagcugugu

SEQ ID NO: 790488 - RNA, 22 nt, Human
aaacaauguacacaugaauguu

SEQ ID NO: 790489 - RNA, 22 nt, Human
agcuuuaucagaggagucucua

SEQ ID NO: 790490 - RNA, 22 nt, Human
aaguuacuggcaagggcugcag

SEQ ID NO: 790491 - RNA, 22 nt, Human
cauuagcuaucuguuuacauua

SEQ ID NO: 790492 - RNA, 22 nt, Human
ggcuccaggagggccuuggcca

SEQ ID NO: 790493 - RNA, 22 nt, Human
ugcuccaugcgcucggccggcg

SEQ ID NO: 790494 - RNA, 17 nt, Human
gcugagaggcagcacag

SEQ ID NO: 790495 - RNA, 22 nt, Human
ugggccacugcugcggaaggcg

SEQ ID NO: 790496 - RNA, 22 nt, Human
uuucagaggugcuuggaaugcu

SEQ ID NO: 790497 - RNA, 22 nt, Human
ccaggcagcaaauuuucugaau

SEQ ID NO: 790498 - RNA, 22 nt, Human
ggguggcacaggugcagagggu

SEQ ID NO: 790499 - RNA, 22 nt, Human
caggagcaugcugaugccagaa

SEQ ID NO: 790500 - RNA, 22 nt, Human
cuguggaguggggaguacuggu

SEQ ID NO: 790501 - RNA, 22 nt, Human
aaggcccagggauuggagguca

SEQ ID NO: 790502 - RNA, 20 nt, Human
ugguaucaauuacuagauug

SEQ ID NO: 790503 - RNA, 22 nt, Human
ucaguguccugugcggugcagc

SEQ ID NO: 790504 - RNA, 22 nt, Human
uuuccaaaaugaaucuaaugca

SEQ ID NO: 790505 - RNA, 22 nt, Human
gcagcuggacccacacggcuua

SEQ ID NO: 790506 - RNA, 22 nt, Human
cagaaaauaaacauuuguggaa

SEQ ID NO: 790507 - RNA, 22 nt, Human
acacuuuuguuugaagucucca

SEQ ID NO: 790508 - RNA, 22 nt, Human
ugucacauugaauaugauuuau

SEQ ID NO: 790509 - RNA, 22 nt, Human
ugggaaggcguggaaguagaag

SEQ ID NO: 790510 - RNA, 22 nt, Human
uaguauucagcuucucaggcaa

SEQ ID NO: 790511 - RNA, 22 nt, Human
uugagaacaggaguguucuuuu

SEQ ID NO: 790512 - RNA, 17 nt, Human
cuguggccaccuggaug

SEQ ID NO: 790513 - RNA, 22 nt, Human
ugccucgugucugagucuguuc

SEQ ID NO: 790514 - RNA, 22 nt, Human
ggggauggugggaaggcaaucu

SEQ ID NO: 790515 - RNA, 22 nt, Human
uuucaaacauagaucugaauau

SEQ ID NO: 790516 - RNA, 22 nt, Human
ucaggcugcuggccagcaggcu

SEQ ID NO: 790517 - RNA, 22 nt, Human
uaucaacugagauuaaauauuu

SEQ ID NO: 790518 - RNA, 22 nt, Human
ucaggcacuggcugagugaugg

SEQ ID NO: 790519 - RNA, 22 nt, Human
agauucuacucuagauccaugg

SEQ ID NO: 790520 - RNA, 22 nt, Human
uauauauucuuaaguaguguag

SEQ ID NO: 790521 - RNA, 22 nt, Human
agagagcccgggccagggcaca

SEQ ID NO: 790522 - RNA, 22 nt, Human
uucacagucacccuucuccaug

SEQ ID NO: 790523 - RNA, 21 nt, Human
auuucagagcacacaaguaaa

SEQ ID NO: 790524 - RNA, 22 nt, Human
gccagaggggcucgaaggcgcg

SEQ ID NO: 790525 - RNA, 19 nt, Human
ggccagcacagggcucugu

SEQ ID NO: 790526 - RNA, 22 nt, Human
aaacaucuugcucugauuggua

SEQ ID NO: 790527 - RNA, 22 nt, Human
gaugcagggcuggcaggagcuu

SEQ ID NO: 790528 - RNA, 22 nt, Human
uguucuaggcaaaagcugauuu

SEQ ID NO: 790529 - RNA, 22 nt, Human
aagagcaggcugcuguggagua

SEQ ID NO: 790530 - RNA, 22 nt, Human
ucccaggcaaaggcagcucauu

SEQ ID NO: 790531 - RNA, 22 nt, Human
ucagugucagucuuuuagauau

SEQ ID NO: 790532 - RNA, 22 nt, Human
ugaaguuucuugaaucuuggag

SEQ ID NO: 790533 - RNA, 22 nt, Human
uuccuuuucuucuaccacaugu

SEQ ID NO: 790534 - RNA, 22 nt, Human
aucacaauguacguuaaaaugu

SEQ ID NO: 790535 - RNA, 18 nt, Human
aaaguucagggagaguug

SEQ ID NO: 790536 - RNA, 20 nt, Human
acuggcagccugccugcugu

SEQ ID NO: 790537 - RNA, 22 nt, Human
cucuccaggagagcacuuugag

SEQ ID NO: 790538 - RNA, 22 nt, Human
guuuuuacagcagcaaaauacu

SEQ ID NO: 790539 - RNA, 19 nt, Human
ggcaggcuggauagagagg

SEQ ID NO: 790540 - RNA, 22 nt, Human
gcggugggggaaaggagcgguu

SEQ ID NO: 790541 - RNA, 22 nt, Human
gacagcaacacaugcuuagugc

SEQ ID NO: 790542 - RNA, 22 nt, Human
aggaauucaagaccagcugggc

SEQ ID NO: 790543 - RNA, 22 nt, Human
cagaggccaggcugccugacug

SEQ ID NO: 790544 - RNA, 22 nt, Human
aucuagaaagccaggggccugc

SEQ ID NO: 790545 - RNA, 22 nt, Human
aauaacaggguugauuugcaau

SEQ ID NO: 790546 - RNA, 22 nt, Human
gggugggccacugagcagcgug

SEQ ID NO: 790547 - RNA, 22 nt, Human
acccugccgugggcugcuugug

SEQ ID NO: 790548 - RNA, 21 nt, Human
gagauggcccaguagcgggcc

SEQ ID NO: 790549 - RNA, 22 nt, Human
uaagaaacugucacaguacuau

SEQ ID NO: 790550 - RNA, 22 nt, Human
ugggcugaguguggaacuaguu

SEQ ID NO: 790551 - RNA, 22 nt, Human
gggucuucugauauagguccag

SEQ ID NO: 790552 - RNA, 22 nt, Human
agcucaggccggagcuacaggc

SEQ ID NO: 790553 - RNA, 22 nt, Human
aagauucuguauuucuaacaau

SEQ ID NO: 790554 - RNA, 19 nt, Human
aagcugagggcuguccacc

SEQ ID NO: 790555 - RNA, 22 nt, Human
agcagggcagguaaggaucaga

SEQ ID NO: 790556 - RNA, 23 nt, Human
uccagccucuugcucucacaugc

SEQ ID NO: 790557 - RNA, 22 nt, Human
uaauguauaacaaauacucauc

SEQ ID NO: 790558 - RNA, 23 nt, Human
uccagggcaguggcugggucugc

SEQ ID NO: 790559 - RNA, 22 nt, Human
cauucauucagcaacuguuauu

SEQ ID NO: 790560 - RNA, 22 nt, Human
acacagagggcagaagauacau

SEQ ID NO: 790561 - RNA, 22 nt, Human
caaaacauucagagagcucacu

SEQ ID NO: 790562 - RNA, 22 nt, Human
aguacaguggucauaauauaaa

SEQ ID NO: 790563 - RNA, 22 nt, Human
gggcauggccaggugagggguc

SEQ ID NO: 790564 - RNA, 22 nt, Human
gggagccaugcuggucuucuuu

SEQ ID NO: 790565 - RNA, 22 nt, Human
uggccuggcccugaggcccugu

SEQ ID NO: 790566 - RNA, 22 nt, Human
uguuucaaagaaagaaaauaua

SEQ ID NO: 790567 - RNA, 22 nt, Human
caguggugaagagcaggggcuc

SEQ ID NO: 790568 - RNA, 22 nt, Human
uacuuacagaaggaagcaauug

SEQ ID NO: 790569 - RNA, 22 nt, Human
ucccagggugcgccugcccucg

SEQ ID NO: 790570 - RNA, 22 nt, Human
aaguuucaaauguugauuaugc

SEQ ID NO: 790571 - RNA, 22 nt, Human
aaggcuggagaugguuggaaug

SEQ ID NO: 790572 - RNA, 22 nt, Human
aggaagcuuagugaaaggacca

SEQ ID NO: 790573 - RNA, 22 nt, Human
ugugacuuuucacaggcugguc

SEQ ID NO: 790574 - RNA, 22 nt, Human
agcuaggauaagcagagacugg

SEQ ID NO: 790575 - RNA, 19 nt, Human
aucagcaagguaggaugug

SEQ ID NO: 790576 - RNA, 22 nt, Human
acucugccuuucagcagaugaa

SEQ ID NO: 790577 - RNA, 22 nt, Human
acaguacaccacuguguacagu

SEQ ID NO: 790578 - RNA, 22 nt, Human
gcuguauuccugcacuguauag

SEQ ID NO: 790579 - RNA, 22 nt, Human
uucaaagagaaauuguauuuuc

SEQ ID NO: 790580 - RNA, 22 nt, Human
caguuuuaaauuguuagauaau

SEQ ID NO: 790581 - RNA, 22 nt, Human
aguuuuauggcucaaccuaaua

SEQ ID NO: 790582 - RNA, 22 nt, Human
uugaaugaagggaugaccgaag

SEQ ID NO: 790583 - RNA, 22 nt, Human
uagcauuuggcaccaguuauuu

SEQ ID NO: 790584 - RNA, 22 nt, Human
augacuuuguuguuuuccagcg

SEQ ID NO: 790585 - RNA, 21 nt, Human
agacagagugcagucuacaua

SEQ ID NO: 790586 - RNA, 22 nt, Human
auugagaauugugaguuuggag

SEQ ID NO: 790587 - RNA, 22 nt, Human
aggagcugugaaugggaggggu

SEQ ID NO: 790588 - RNA, 20 nt, Human
gcugggcuuugacugacaca

SEQ ID NO: 790589 - RNA, 23 nt, Human
ugagugugaaaauccuggagaug

SEQ ID NO: 790590 - RNA, 22 nt, Human
gaugugacuaacuugguaccag

SEQ ID NO: 790591 - RNA, 22 nt, Human
agguaaggcuguaagcuaagcc

SEQ ID NO: 790592 - RNA, 22 nt, Human
aacacuuuguugccuaugaacg

SEQ ID NO: 790593 - RNA, 22 nt, Human
uaaaacagcagggcagagaagu

SEQ ID NO: 790594 - RNA, 22 nt, Human
cugccuccugccgugcagcuuc

SEQ ID NO: 790595 - RNA, 22 nt, Human
uuuccaggagaaagagagccuu

SEQ ID NO: 790596 - RNA, 22 nt, Human
auucuauuaauauuucuaggaa

SEQ ID NO: 790597 - RNA, 22 nt, Human
aacgcccgugguugccaaggua

SEQ ID NO: 790598 - RNA, 22 nt, Human
ccgggccucgggacaccgggua

SEQ ID NO: 790599 - RNA, 22 nt, Human
aggcaggaaaaucgcuugaacc

SEQ ID NO: 790600 - RNA, 22 nt, Human
gucaaguuaagauaaggucaug

SEQ ID NO: 790601 - RNA, 22 nt, Human
ccucuaaauuguuugaaguugg

SEQ ID NO: 790602 - RNA, 22 nt, Human
ugaaugauauauugggaauaau

SEQ ID NO: 790603 - RNA, 22 nt, Human
gcauguggauauguuaggguga

SEQ ID NO: 790604 - RNA, 22 nt, Human
aggcuaggcugaugccucuucc

SEQ ID NO: 790605 - RNA, 22 nt, Human
aaguuucucaauggcaacuggg

SEQ ID NO: 790606 - RNA, 22 nt, Human
ccuggccagcuaauugcccauc

SEQ ID NO: 790607 - RNA, 19 nt, Human
gagaggccugugcuugaag

SEQ ID NO: 790608 - RNA, 22 nt, Human
aggcacuuaauaaggauucaau

SEQ ID NO: 790609 - RNA, 22 nt, Human
gugcacugucuggucaagagca

SEQ ID NO: 790610 - RNA, 22 nt, Human
acucagaguagaaaauagguuc

SEQ ID NO: 790611 - RNA, 22 nt, Human
aaacugcacacgaugugccuga

SEQ ID NO: 790612 - RNA, 22 nt, Human
cugagcagugcuuugcaguggg

SEQ ID NO: 790613 - RNA, 22 nt, Human
gcugcaggagcuggagcugugg

SEQ ID NO: 790614 - RNA, 22 nt, Human
uucauugaagcacaagugaucu

SEQ ID NO: 790615 - RNA, 21 nt, Human
cuggagucuggggguggcagu

SEQ ID NO: 790616 - RNA, 22 nt, Human
ccugcccccgucagaggugaug

SEQ ID NO: 790617 - RNA, 22 nt, Human
cugcagcuuucgcuccaucagc

SEQ ID NO: 790618 - RNA, 22 nt, Human
uccagcucccacucucacugcu

SEQ ID NO: 790619 - RNA, 22 nt, Human
ccucuggcuuacuguuggguuu

SEQ ID NO: 790620 - RNA, 22 nt, Human
ugggagcaagcuacuuagggaa

SEQ ID NO: 790621 - RNA, 22 nt, Human
aggcuggcugagcugcagccug

SEQ ID NO: 790622 - RNA, 22 nt, Human
cuauuuggccaagcugcccaca

SEQ ID NO: 790623 - RNA, 22 nt, Human
caaagggcauggccugagcacu

SEQ ID NO: 790624 - RNA, 22 nt, Human
gcuggagaguaguaagcaguua

SEQ ID NO: 790625 - RNA, 22 nt, Human
ugaauggauauaacaacagugu

SEQ ID NO: 790626 - RNA, 22 nt, Human
gguggcagcgucuaucugacau

SEQ ID NO: 790627 - RNA, 22 nt, Human
caggaagcugagcugcacugca

SEQ ID NO: 790628 - RNA, 22 nt, Human
aggcuucaaggaccugagggaa

SEQ ID NO: 790629 - RNA, 22 nt, Human
ugagaggcgcucacucucaggu

SEQ ID NO: 790630 - RNA, 22 nt, Human
agucccagcuucccccaugcag

SEQ ID NO: 790631 - RNA, 22 nt, Human
cugagccaaaaagcagagcuug

SEQ ID NO: 790632 - RNA, 22 nt, Human
agacacaggauucugcauuucu

SEQ ID NO: 790633 - RNA, 22 nt, Human
ucaggcuuccaacaaugauguu

SEQ ID NO: 790634 - RNA, 22 nt, Human
cuguauuuuuuaagaauaucuc

SEQ ID NO: 790635 - RNA, 22 nt, Human
cacuugaacuguuugaaugaga

SEQ ID NO: 790636 - RNA, 22 nt, Human
gugcagugagcagugcagcacc

SEQ ID NO: 790637 - RNA, 18 nt, Human
ggccagccccaggccagc

SEQ ID NO: 790638 - RNA, 23 nt, Human
uggccugcagaguuucugcuggg

SEQ ID NO: 790639 - RNA, 22 nt, Human
acagcugcuuucucuuacuaug

SEQ ID NO: 790640 - RNA, 22 nt, Human
acucuacuguaguaugggcacu

SEQ ID NO: 790641 - RNA, 22 nt, Human
uucagagugguaugaagugaug

SEQ ID NO: 790642 - RNA, 22 nt, Human
uuguguuucuggccaagaugga

SEQ ID NO: 790643 - RNA, 22 nt, Human
accuccugaugagaguaaagga

SEQ ID NO: 790644 - RNA, 22 nt, Human
agggggcugccaaggaauguaa

SEQ ID NO: 790645 - RNA, 22 nt, Human
agaagagaacugccaaacacuu

SEQ ID NO: 790646 - RNA, 22 nt, Human
ugcacacacucugcauauacuu

SEQ ID NO: 790647 - RNA, 22 nt, Human
cagagggaaaaggggaguaaua

SEQ ID NO: 790648 - RNA, 22 nt, Human
uucuuauucuugaaauguggga

SEQ ID NO: 790649 - RNA, 22 nt, Human
acaaagauaagucagaaaguca

SEQ ID NO: 790650 - RNA, 22 nt, Human
gucagcucagcaggugggagug

SEQ ID NO: 790651 - RNA, 22 nt, Human
agccucugcuggcccuggcacu

SEQ ID NO: 790652 - RNA, 22 nt, Human
ucuuuuaguaauaaauauuugu

SEQ ID NO: 790653 - RNA, 23 nt, Human
uggcccugugcaugcugcuuccc

SEQ ID NO: 790654 - RNA, 22 nt, Human
ugugcccuguuaaaugcacagu

SEQ ID NO: 790655 - RNA, 22 nt, Human
agagcuuguaauugagucaggu

SEQ ID NO: 790656 - RNA, 22 nt, Human
uagcagcacagaaagccuggag

SEQ ID NO: 790657 - RNA, 22 nt, Human
aggcaagauuaggaccagaaga

SEQ ID NO: 790658 - RNA, 22 nt, Human
ucuacaaagccauucaggaucu

SEQ ID NO: 790659 - RNA, 22 nt, Human
uucuaaaauaaguuuaucuggu

SEQ ID NO: 790660 - RNA, 22 nt, Human
gccugcuguugagggaagagcu

SEQ ID NO: 790661 - RNA, 22 nt, Human
aaacaauguuccuauauuagag

SEQ ID NO: 790662 - RNA, 22 nt, Human
ggccucagugggccgcugcagg

SEQ ID NO: 790663 - RNA, 22 nt, Human
ggcuccaggguaccccuggaug

SEQ ID NO: 790664 - RNA, 22 nt, Human
uggucgaccaguuggaaaguaa

SEQ ID NO: 790665 - RNA, 22 nt, Human
gcagagcugcagcgaggccugg

SEQ ID NO: 790666 - RNA, 22 nt, Human
auuguuucugcuuuauuuaggg

SEQ ID NO: 790667 - RNA, 22 nt, Human
gcaugcaauguaucagugauag

SEQ ID NO: 790668 - RNA, 22 nt, Human
agauggaguggagaugaguaaa

SEQ ID NO: 790669 - RNA, 22 nt, Human
ucaucugggagcuuguuagaaa

SEQ ID NO: 790670 - RNA, 22 nt, Human
caguccugggcacagcccuggg

SEQ ID NO: 790671 - RNA, 23 nt, Human
ugcaaauuaggccgggacucagc

SEQ ID NO: 790672 - RNA, 22 nt, Human
ucacaucuguugauacagcauc

SEQ ID NO: 790673 - RNA, 22 nt, Human
uggcucagcgcggccuggucuu

SEQ ID NO: 790674 - RNA, 22 nt, Human
gcugccacucugagcuugcuuc

SEQ ID NO: 790675 - RNA, 21 nt, Human
ccugggagaucagcugccuuc

SEQ ID NO: 790676 - RNA, 20 nt, Human
ccucaagcagacugacagcu

SEQ ID NO: 790677 - RNA, 20 nt, Human
agaaacagcacaauucuguu

SEQ ID NO: 790678 - RNA, 22 nt, Human
uuauaacaucaaucagaguuaa

SEQ ID NO: 790679 - RNA, 23 nt, Human
uugcacugaucaauuugauaagc

SEQ ID NO: 790680 - RNA, 22 nt, Human
cagccucugagccuuggcagau

SEQ ID NO: 790681 - RNA, 22 nt, Human
agccugagccccauccagcuga

SEQ ID NO: 790682 - RNA, 22 nt, Human
uuauucagugcauauauuaaaa

SEQ ID NO: 790683 - RNA, 22 nt, Human
ucaccccuugugaaugcugcuc

SEQ ID NO: 790684 - RNA, 22 nt, Human
cagagcugcucaugguggccag

SEQ ID NO: 790685 - RNA, 23 nt, Human
uuuaaugaccaauagaaggaaca

SEQ ID NO: 790686 - RNA, 22 nt, Human
aagagagaagucucucugguuc

SEQ ID NO: 790687 - RNA, 22 nt, Human
ugcauuaaaaccaucgaccauc

SEQ ID NO: 790688 - RNA, 22 nt, Human
ugucauaucuauuaaaugucua

SEQ ID NO: 790689 - RNA, 22 nt, Human
ccucaggguucggaugagaaca

SEQ ID NO: 790690 - RNA, 19 nt, Human
acaaagcugugagcagcuu

SEQ ID NO: 790691 - RNA, 22 nt, Human
caucaucaccugcuauacgauc

SEQ ID NO: 790692 - RNA, 22 nt, Human
aaguccugaaacuucuuucuga

SEQ ID NO: 790693 - RNA, 22 nt, Human
accccaggagcugugccuaguc

SEQ ID NO: 790694 - RNA, 22 nt, Human
cguccugggucugggaaggcau

SEQ ID NO: 790695 - RNA, 22 nt, Human
uguacauacauagauauacaca

SEQ ID NO: 790696 - RNA, 22 nt, Human
agccuggcccugcugaacucug

SEQ ID NO: 790697 - RNA, 22 nt, Human
uugacacaauguauauuuucaa

SEQ ID NO: 790698 - RNA, 22 nt, Human
guucauuuuuacuuugaucuac

SEQ ID NO: 790699 - RNA, 22 nt, Human
uaucagaaaugccuuaaauugg

SEQ ID NO: 790700 - RNA, 22 nt, Human
gguuagagggcaugcgaucuuu

SEQ ID NO: 790701 - RNA, 22 nt, Human
cucccaagggguaagggagcug

SEQ ID NO: 790702 - RNA, 22 nt, Human
aguccauuaacuguguuaacag

SEQ ID NO: 790703 - RNA, 22 nt, Human
gagagcugaggggccuggcacu

SEQ ID NO: 790704 - RNA, 22 nt, Human
aagaaaccuagucuggagcagc

SEQ ID NO: 790705 - RNA, 22 nt, Human
uugucugaggguuugagagaau

SEQ ID NO: 790706 - RNA, 22 nt, Human
cuugaaugggccauaagacggu

SEQ ID NO: 790707 - RNA, 22 nt, Human
agccaacuaauuaaacaacuuu

SEQ ID NO: 790708 - RNA, 22 nt, Human
caguccuggggaccaggcugag

SEQ ID NO: 790709 - RNA, 22 nt, Human
aauucacaauguguagucaugc

SEQ ID NO: 790710 - RNA, 23 nt, Human
ucucuuaccugagacauuuccua

SEQ ID NO: 790711 - RNA, 22 nt, Human
uaucaaauugaggcagcugggg

SEQ ID NO: 790712 - RNA, 22 nt, Human
ccuggucaccccucucucugca

SEQ ID NO: 790713 - RNA, 22 nt, Human
aaugagaaccuugaaaggaacu

SEQ ID NO: 790714 - RNA, 22 nt, Human
aucuaggauuugaaugcacagu

SEQ ID NO: 790715 - RNA, 22 nt, Human
augugacuucagucuucuuaca

SEQ ID NO: 790716 - RNA, 22 nt, Human
gcccagcccugaggucacagcu

SEQ ID NO: 790717 - RNA, 22 nt, Human
uuauuauugugguugcauuauc

SEQ ID NO: 790718 - RNA, 22 nt, Human
aauucacauguugaaguccuaa

SEQ ID NO: 790719 - RNA, 22 nt, Human
aauguacagcugcugcugaagg

SEQ ID NO: 790720 - RNA, 18 nt, Human
ggugagggagcuggaagc

SEQ ID NO: 790721 - RNA, 22 nt, Human
gccagcugcuggaacagcgcga

SEQ ID NO: 790722 - RNA, 22 nt, Human
gucugucuguuguugagaagca

SEQ ID NO: 790723 - RNA, 22 nt, Human
cacagggcuaaaugaaggguug

SEQ ID NO: 790724 - RNA, 22 nt, Human
ggcaggugaggcaugugccugg

SEQ ID NO: 790725 - RNA, 20 nt, Human
cagcaggcuauggggcaccc

SEQ ID NO: 790726 - RNA, 22 nt, Human
ggaguggcacucugaggcgggg

SEQ ID NO: 790727 - RNA, 20 nt, Human
aggcaguguagagaugagua

SEQ ID NO: 790728 - RNA, 22 nt, Human
aaaaggaucagauuuugagcag

SEQ ID NO: 790729 - RNA, 22 nt, Human
cagccagcuggugcggcagagc

SEQ ID NO: 790730 - RNA, 22 nt, Human
uacucaauuucuuauggguuuc

SEQ ID NO: 790731 - RNA, 22 nt, Human
caggguggcaggcaccauggcc

SEQ ID NO: 790732 - RNA, 22 nt, Human
ggcagcgcccgaguccgcagcu

SEQ ID NO: 790733 - RNA, 22 nt, Human
gaauacauaucagauguguuuc

SEQ ID NO: 790734 - RNA, 22 nt, Human
caggaaaugcuaucauagcuga

SEQ ID NO: 790735 - RNA, 22 nt, Human
ggaugggagcagaggacgacca

SEQ ID NO: 790736 - RNA, 22 nt, Human
uggaagcaucacuucuugccug

SEQ ID NO: 790737 - RNA, 22 nt, Human
ccauguggcuagcgugccugca

SEQ ID NO: 790738 - RNA, 18 nt, Human
ugacauuuccagagugua

SEQ ID NO: 790739 - RNA, 22 nt, Human
cacacaguggaguauuacucag

SEQ ID NO: 790740 - RNA, 21 nt, Human
acuggcugucuuccuacuggu

SEQ ID NO: 790741 - RNA, 22 nt, Human
uuucagagaugcagaauucagg

SEQ ID NO: 790742 - RNA, 22 nt, Human
agcucuuuuaucaugaggagag

SEQ ID NO: 790743 - RNA, 22 nt, Human
ccaggaguuugaggcugcagug

SEQ ID NO: 790744 - RNA, 23 nt, Human
gccuggcuuccaagguaggggag

SEQ ID NO: 790745 - RNA, 22 nt, Human
uagugucaugaaaaguacacua

SEQ ID NO: 790746 - RNA, 17 nt, Human
guaauauaauaagccuu

SEQ ID NO: 790747 - RNA, 22 nt, Human
gggcagcccagaacugcugcag

SEQ ID NO: 790748 - RNA, 21 nt, Human
cauuuacaugacagauugguu

SEQ ID NO: 790749 - RNA, 21 nt, Human
ugggagacacagccuugagcu

SEQ ID NO: 790750 - RNA, 22 nt, Human
gaaggccaagaggcuccaagau

SEQ ID NO: 790751 - RNA, 22 nt, Human
uuuaagugaugaaaugcagaua

SEQ ID NO: 790752 - RNA, 22 nt, Human
acaugcaagcagccgugcagau

SEQ ID NO: 790753 - RNA, 22 nt, Human
acaggcugcugagccauuugcu

SEQ ID NO: 790754 - RNA, 22 nt, Human
aggaaauaggaccagacaaagc

SEQ ID NO: 790755 - RNA, 22 nt, Human
acugugaguuuauuuaucugau

SEQ ID NO: 790756 - RNA, 22 nt, Human
gcaauaaaguagcagcucauca

SEQ ID NO: 790757 - RNA, 22 nt, Human
aagcugaaucugaaauagaauu

SEQ ID NO: 790758 - RNA, 22 nt, Human
gcaaacaagcugccugaagauu

SEQ ID NO: 790759 - RNA, 20 nt, Human
caguccaggcuagaaaacaa

SEQ ID NO: 790760 - RNA, 22 nt, Human
caaggcucuggaccaaauccca

SEQ ID NO: 790761 - RNA, 18 nt, Human
uuguuuuaagacucuguc

SEQ ID NO: 790762 - RNA, 22 nt, Human
ugaaaauucaucucauagcaga

SEQ ID NO: 790763 - RNA, 22 nt, Human
cauggcccucuucuggagcaau

SEQ ID NO: 790764 - RNA, 22 nt, Human
uccagcuggggccgaaguggau

SEQ ID NO: 790765 - RNA, 22 nt, Human
acaugucuacacauucugcaau

SEQ ID NO: 790766 - RNA, 22 nt, Human
gccaggcucucagugacugccc

SEQ ID NO: 790767 - RNA, 22 nt, Human
auccccuucacacccucugcau

SEQ ID NO: 790768 - RNA, 22 nt, Human
aaaauucugucauuaaauugug

SEQ ID NO: 790769 - RNA, 20 nt, Human
cacccucccagcaccuaugc

SEQ ID NO: 790770 - RNA, 22 nt, Human
ucucccaaggcacagaaagagu

SEQ ID NO: 790771 - RNA, 22 nt, Human
aaaaagacuuccaacucaggag

SEQ ID NO: 790772 - RNA, 22 nt, Human
uggcaggguacaccuuaacacc

SEQ ID NO: 790773 - RNA, 18 nt, Human
ugaggcugaggguagagg

SEQ ID NO: 790774 - RNA, 22 nt, Human
gcgcagcucagugagggaacuu

SEQ ID NO: 790775 - RNA, 22 nt, Human
cucuuuggauagaauuacaaag

SEQ ID NO: 790776 - RNA, 22 nt, Human
agcccaggagccuuuggagggu

SEQ ID NO: 790777 - RNA, 22 nt, Human
gcauggcagaacaccucgcccg

SEQ ID NO: 790778 - RNA, 22 nt, Human
gaggaggguuggccuuagguag

SEQ ID NO: 790779 - RNA, 22 nt, Human
ccuccagggcagacggggagca

SEQ ID NO: 790780 - RNA, 22 nt, Human
uuauaugaguaucauaucacuu

SEQ ID NO: 790781 - RNA, 22 nt, Human
cgagaggcuggacagggcuggg

SEQ ID NO: 790782 - RNA, 22 nt, Human
ugaucaggucugaacagggagg

SEQ ID NO: 790783 - RNA, 22 nt, Human
ccaugggagaugauggggagug

SEQ ID NO: 790784 - RNA, 22 nt, Human
ugcaggguauccuugucucugc

SEQ ID NO: 790785 - RNA, 22 nt, Human
uaugcauuauacauuaauuucu

SEQ ID NO: 790786 - RNA, 22 nt, Human
gcuagaaaucgacuucagaauu

SEQ ID NO: 790787 - RNA, 17 nt, Human
uagagcugguucaggag

SEQ ID NO: 790788 - RNA, 22 nt, Human
gguggcagagaggagguaguuu

SEQ ID NO: 790789 - RNA, 22 nt, Human
agccaagguaucaugagaggca

SEQ ID NO: 790790 - RNA, 22 nt, Human
ugccgcagugcggggagggccc

SEQ ID NO: 790791 - RNA, 18 nt, Human
ucucaaaaauaauggcuu

SEQ ID NO: 790792 - RNA, 22 nt, Human
ucuguuuuagauaagaaaggcu

SEQ ID NO: 790793 - RNA, 22 nt, Human
gaaacagugagaacuuuuccug

SEQ ID NO: 790794 - RNA, 22 nt, Human
uggcuuccgccgcgggccucgg

SEQ ID NO: 790795 - RNA, 22 nt, Human
aucaaauaaagguaccuagcuu

SEQ ID NO: 790796 - RNA, 22 nt, Human
gcugccugguuucucagcugca

SEQ ID NO: 790797 - RNA, 22 nt, Human
aagaaauuaaggaaugcaacga

SEQ ID NO: 790798 - RNA, 22 nt, Human
ugaaugaugguguguucuugcc

SEQ ID NO: 790799 - RNA, 23 nt, Human
ugcuggcugaaacagccaaagga

SEQ ID NO: 790800 - RNA, 22 nt, Human
ugccaggcgugguggugcgcac

SEQ ID NO: 790801 - RNA, 22 nt, Human
ucuccugggaggacaaggaagg

SEQ ID NO: 790802 - RNA, 22 nt, Human
uuaauuaauuaguuaagcaugu

SEQ ID NO: 790803 - RNA, 22 nt, Human
agaggcccucucugcucagucu

SEQ ID NO: 790804 - RNA, 17 nt, Human
uguaugcauaugcuuuu

SEQ ID NO: 790805 - RNA, 22 nt, Human
aggcagcucuguggccucccag

SEQ ID NO: 790806 - RNA, 22 nt, Human
uuucugaaacauggucuuugua

SEQ ID NO: 790807 - RNA, 22 nt, Human
ggccuugggcgagucccucagu

SEQ ID NO: 790808 - RNA, 22 nt, Human
uuugcaaauacagaggucuugc

SEQ ID NO: 790809 - RNA, 22 nt, Human
caucacauuuaauuaaaauguc

SEQ ID NO: 790810 - RNA, 22 nt, Human
cuucaggaguaguuaccuagca

SEQ ID NO: 790811 - RNA, 22 nt, Human
aacagcaagggcggggucaaga

SEQ ID NO: 790812 - RNA, 22 nt, Human
aggcauggauguagcagugacc

SEQ ID NO: 790813 - RNA, 22 nt, Human
uguuuacaaggaguuuauauug

SEQ ID NO: 790814 - RNA, 22 nt, Human
acacugcucacuucuucccuug

SEQ ID NO: 790815 - RNA, 23 nt, Human
uccagcucccuucaauggcacug

SEQ ID NO: 790816 - RNA, 22 nt, Human
uucuccaguuucucccuucagu

SEQ ID NO: 790817 - RNA, 22 nt, Human
cugaagaggacgcagcagcaag

SEQ ID NO: 790818 - RNA, 22 nt, Human
gagggaggggagcuccacccuc

SEQ ID NO: 790819 - RNA, 22 nt, Human
uuaaaaccaucagcuguaagau

SEQ ID NO: 790820 - RNA, 20 nt, Human
aaaugcaguucugccuuggc

SEQ ID NO: 790821 - RNA, 22 nt, Human
ugccagcuagucacauauuaga

SEQ ID NO: 790822 - RNA, 22 nt, Human
gggccccugggaauucugugau

SEQ ID NO: 790823 - RNA, 22 nt, Human
uaaaggcaugcaggugaaugua

SEQ ID NO: 790824 - RNA, 22 nt, Human
ggugagaggcagaggacagcuu

SEQ ID NO: 790825 - RNA, 17 nt, Human
aggcaggagauuggaga

SEQ ID NO: 790826 - RNA, 22 nt, Human
ccucucugucacaccaguggcc

SEQ ID NO: 790827 - RNA, 22 nt, Human
cagacuuuugggaggucugugg

SEQ ID NO: 790828 - RNA, 20 nt, Human
gguccuguacucucauugaa

SEQ ID NO: 790829 - RNA, 22 nt, Human
auuaauauugguucauuagcug

SEQ ID NO: 790830 - RNA, 22 nt, Human
caugagugugccagucugauau

SEQ ID NO: 790831 - RNA, 19 nt, Human
ggcaaauugaggccaguca

SEQ ID NO: 790832 - RNA, 22 nt, Human
cagucucacccuggaggcccca

SEQ ID NO: 790833 - RNA, 22 nt, Human
ucagagaauccguaagucacaa

SEQ ID NO: 790834 - RNA, 22 nt, Human
gaaaaggcagaguuccggggaa

SEQ ID NO: 790835 - RNA, 22 nt, Human
acauuugaggauguuaagaaug

SEQ ID NO: 790836 - RNA, 22 nt, Human
aucaggaucugggagccugaaa

SEQ ID NO: 790837 - RNA, 22 nt, Human
ucugucuuagcaucuuugcuca

SEQ ID NO: 790838 - RNA, 22 nt, Human
cuaaagaagcuagcaaucuaua

SEQ ID NO: 790839 - RNA, 22 nt, Human
ucucagcagccagauccagagc

SEQ ID NO: 790840 - RNA, 22 nt, Human
agucugaguaucucugagccag

SEQ ID NO: 790841 - RNA, 23 nt, Human
ucagagaaugguaugcuuuuccu

SEQ ID NO: 790842 - RNA, 21 nt, Human
uaggcagaggagcagguaucu

SEQ ID NO: 790843 - RNA, 22 nt, Human
ucccugcagacguccugcgggu

SEQ ID NO: 790844 - RNA, 22 nt, Human
uguccugggccggcgacugguc

SEQ ID NO: 790845 - RNA, 22 nt, Human
cacagaggauuuuuagggcagu

SEQ ID NO: 790846 - RNA, 22 nt, Human
aaaauccucuaauucuagaaua

SEQ ID NO: 790847 - RNA, 23 nt, Human
aaugacaggcaauguaauugugu

SEQ ID NO: 790848 - RNA, 22 nt, Human
cauaaucagauguguacauaag

SEQ ID NO: 790849 - RNA, 22 nt, Human
gagggccagaucccaggaggaa

SEQ ID NO: 790850 - RNA, 22 nt, Human
acuggcagagguuggacaccau

SEQ ID NO: 790851 - RNA, 22 nt, Human
gcaggagcaaacugcagugugg

SEQ ID NO: 790852 - RNA, 22 nt, Human
aaaauacuguggaguguugaaa

SEQ ID NO: 790853 - RNA, 21 nt, Human
gcccuaggcuaccuggagcgc

SEQ ID NO: 790854 - RNA, 22 nt, Human
cagcauagcugauuaaggcaaa

SEQ ID NO: 790855 - RNA, 22 nt, Human
cugugcugguccagggagcugg

SEQ ID NO: 790856 - RNA, 22 nt, Human
ccucaggccagggggcggccag

SEQ ID NO: 790857 - RNA, 22 nt, Human
ggaggccaucagggagggcauu

SEQ ID NO: 790858 - RNA, 22 nt, Human
ugccacagcagugcuuugacag

SEQ ID NO: 790859 - RNA, 22 nt, Human
uagcucuagcacuggauaaucc

SEQ ID NO: 790860 - RNA, 22 nt, Human
cacauuggcaaacgggguugca

SEQ ID NO: 790861 - RNA, 22 nt, Human
aguuuacaguucucaucgcaac

SEQ ID NO: 790862 - RNA, 22 nt, Human
aucaucuugaaagucuauguuu

SEQ ID NO: 790863 - RNA, 22 nt, Human
aauacagaggggucacaauuca

SEQ ID NO: 790864 - RNA, 22 nt, Human
gccagagguaucaaagauagua

SEQ ID NO: 790865 - RNA, 22 nt, Human
cuuugaucuacucacuaaacaa

SEQ ID NO: 790866 - RNA, 22 nt, Human
cucuuacauucuuuuacuagca

SEQ ID NO: 790867 - RNA, 22 nt, Human
acuuucccacuuaauguauuua

SEQ ID NO: 790868 - RNA, 22 nt, Human
acuggcuggccgcgcucuucgc

SEQ ID NO: 790869 - RNA, 22 nt, Human
aaggcccaggcugcccugggca

SEQ ID NO: 790870 - RNA, 22 nt, Human
uuauuuucuccucagaaagugg

SEQ ID NO: 790871 - RNA, 22 nt, Human
ggcagguagccuagaggagguu

SEQ ID NO: 790872 - RNA, 22 nt, Human
ugacaggaggguuguggcaggg

SEQ ID NO: 790873 - RNA, 22 nt, Human
gccuggugaaaggcagagagcg

SEQ ID NO: 790874 - RNA, 22 nt, Human
guccagagauggacgagcagau

SEQ ID NO: 790875 - RNA, 22 nt, Human
aagaaauaagacuucucugucc

SEQ ID NO: 790876 - RNA, 22 nt, Human
aauuauauguuaaucuucaauu

SEQ ID NO: 790877 - RNA, 22 nt, Human
uuacaagcagcuacauaucaca

SEQ ID NO: 790878 - RNA, 22 nt, Human
auaggaaagaaaauuauguagg

SEQ ID NO: 790879 - RNA, 22 nt, Human
cccagagcuccgguccugccca

SEQ ID NO: 790880 - RNA, 22 nt, Human
uucuucccagccagcacagccc

SEQ ID NO: 790881 - RNA, 22 nt, Human
uaguugacaucaucagccugga

SEQ ID NO: 790882 - RNA, 22 nt, Human
auucauguaacauuagagaaau

SEQ ID NO: 790883 - RNA, 22 nt, Human
aguuccaugucuggguuuguga

SEQ ID NO: 790884 - RNA, 22 nt, Human
cccacucuggcucccuucuagu

SEQ ID NO: 790885 - RNA, 22 nt, Human
gagcagcugugggguugaccau

SEQ ID NO: 790886 - RNA, 22 nt, Human
caugcacacugcaacaaggacu

SEQ ID NO: 790887 - RNA, 22 nt, Human
aaucuagauucggaucaaaggg

SEQ ID NO: 790888 - RNA, 22 nt, Human
augcaacagaaaauugccuggg

SEQ ID NO: 790889 - RNA, 22 nt, Human
uuucccuuugcacucuacaauu

SEQ ID NO: 790890 - RNA, 22 nt, Human
uauuucagcacaugggauaggu

SEQ ID NO: 790891 - RNA, 22 nt, Human
acaggacauguaccaggugguc

SEQ ID NO: 790892 - RNA, 22 nt, Human
ucugggggcgaccagggacugc

SEQ ID NO: 790893 - RNA, 22 nt, Human
aaucuggacuugucugugaaga

SEQ ID NO: 790894 - RNA, 22 nt, Human
aaauaguaaagugguagccauc

SEQ ID NO: 790895 - RNA, 22 nt, Human
cuauuuuaagaggccauuaggu

SEQ ID NO: 790896 - RNA, 21 nt, Human
ugggagagggcucagcuaccc

SEQ ID NO: 790897 - RNA, 22 nt, Human
gggaagauaguguugagggccc

SEQ ID NO: 790898 - RNA, 22 nt, Human
uccucaggcggugaggaggggc

SEQ ID NO: 790899 - RNA, 22 nt, Human
ggaggggucucuagcgaggaga

SEQ ID NO: 790900 - RNA, 22 nt, Human
uccugccugcaaucccagcacu

SEQ ID NO: 790901 - RNA, 22 nt, Human
cuggcucccucucccugaguca

SEQ ID NO: 790902 - RNA, 22 nt, Human
ugccacaguuucauggauucug

SEQ ID NO: 790903 - RNA, 22 nt, Human
gucuuuggauguaagauaaagu

SEQ ID NO: 790904 - RNA, 22 nt, Human
aaaaaauuaucauaguuccuga

SEQ ID NO: 790905 - RNA, 22 nt, Human
ccugagucuuucccauugcgcu

SEQ ID NO: 790906 - RNA, 23 nt, Human
ggccucagcgcacagaaacugcu

SEQ ID NO: 790907 - RNA, 22 nt, Human
acauggaaaguacuccacaauu

SEQ ID NO: 790908 - RNA, 22 nt, Human
aguggcaagagggucuauuguu

SEQ ID NO: 790909 - RNA, 22 nt, Human
agugaccgaggcacuuggcaac

SEQ ID NO: 790910 - RNA, 22 nt, Human
uaaaugaguaauauagcuguuu

SEQ ID NO: 790911 - RNA, 20 nt, Human
acuccagguggcaugaggac

SEQ ID NO: 790912 - RNA, 22 nt, Human
uuuucuguauuauugugcuuca

SEQ ID NO: 790913 - RNA, 22 nt, Human
cccaggccuggucugggccagu

SEQ ID NO: 790914 - RNA, 23 nt, Human
uucauugagcuguucuugaggau

SEQ ID NO: 790915 - RNA, 22 nt, Human
agccaggcuacuccuugcugac

SEQ ID NO: 790916 - RNA, 22 nt, Human
cagcaagauggugaaugagacg

SEQ ID NO: 790917 - RNA, 22 nt, Human
ugucauggcugaaagugggggc

SEQ ID NO: 790918 - RNA, 22 nt, Human
uucaagaagcccaaagacuagc

SEQ ID NO: 790919 - RNA, 23 nt, Human
gacagagugagaccuugucuuac

SEQ ID NO: 790920 - RNA, 22 nt, Human
auuuaucaccaguuagcugacu

SEQ ID NO: 790921 - RNA, 22 nt, Human
ucacauuuucuacuacuguacg

SEQ ID NO: 790922 - RNA, 22 nt, Human
acugucacugacagaaucaaca

SEQ ID NO: 790923 - RNA, 22 nt, Human
uggccacucagggaugcaggaa

SEQ ID NO: 790924 - RNA, 22 nt, Human
ucuuuggaucucaagguggcag

SEQ ID NO: 790925 - RNA, 22 nt, Human
aggcuaggcaugugcuaccaca

SEQ ID NO: 790926 - RNA, 22 nt, Human
aucauucugauggucaaugcua

SEQ ID NO: 790927 - RNA, 22 nt, Human
ucagcuccagaguugcacagug

SEQ ID NO: 790928 - RNA, 22 nt, Human
uguaauuuccugauguuagaac

SEQ ID NO: 790929 - RNA, 22 nt, Human
uuuuaucaaucauuaagacauu

SEQ ID NO: 790930 - RNA, 22 nt, Human
gggccaagggugcguggcagga

SEQ ID NO: 790931 - RNA, 22 nt, Human
ugaaacauuaggaaaucauuau

SEQ ID NO: 790932 - RNA, 22 nt, Human
gggagagaauuauugccagacc

SEQ ID NO: 790933 - RNA, 22 nt, Human
ccaggagcgcgugaacaggcug

SEQ ID NO: 790934 - RNA, 22 nt, Human
ggcagcuuguccuucaggagag

SEQ ID NO: 790935 - RNA, 22 nt, Human
uggauucaugcugggauuuuuc

SEQ ID NO: 790936 - RNA, 21 nt, Human
gccucuccaaauccugccuuc

SEQ ID NO: 790937 - RNA, 22 nt, Human
gggaggcacgaggcgcgcagug

SEQ ID NO: 790938 - RNA, 22 nt, Human
aggcugagugcuccccuagaug

SEQ ID NO: 790939 - RNA, 22 nt, Human
gagcucaggagcaucagaagaa

SEQ ID NO: 790940 - RNA, 21 nt, Human
ugucagagcuuguaggacauu

SEQ ID NO: 790941 - RNA, 22 nt, Human
agggccugucuguagaacugaa

SEQ ID NO: 790942 - RNA, 22 nt, Human
ccuggguuggagagcaauggug

SEQ ID NO: 790943 - RNA, 22 nt, Human
auguggcauucuuggucauuuc

SEQ ID NO: 790944 - RNA, 22 nt, Human
agccacaccuguccugccagcu

SEQ ID NO: 790945 - RNA, 22 nt, Human
ccagcuguuucugaugcuaggc

SEQ ID NO: 790946 - RNA, 22 nt, Human
uucauguucaugcuuaggaaaa

SEQ ID NO: 790947 - RNA, 22 nt, Human
gcagauggcugagccugcagau

SEQ ID NO: 790948 - RNA, 22 nt, Human
acaguguccccagcucugugag

SEQ ID NO: 790949 - RNA, 22 nt, Human
uaauuuuaauaguauguggcau

SEQ ID NO: 790950 - RNA, 22 nt, Human
auuucuguugcuuauaaauuac

SEQ ID NO: 790951 - RNA, 18 nt, Human
gacuuuaaaacacugcuc

SEQ ID NO: 790952 - RNA, 22 nt, Human
gggcccuggggauguggacgcg

SEQ ID NO: 790953 - RNA, 22 nt, Human
ucuuugauggagagauagauau

SEQ ID NO: 790954 - RNA, 22 nt, Human
agaggcucugccgccucaggua

SEQ ID NO: 790955 - RNA, 22 nt, Human
ccugcucugguuuagucagucu

SEQ ID NO: 790956 - RNA, 23 nt, Human
aucauucuccaaucuggagcagg

SEQ ID NO: 790957 - RNA, 22 nt, Human
aucacaguguagaccuuuuaaa

SEQ ID NO: 790958 - RNA, 22 nt, Human
gcauucuucacaguauuccucc

SEQ ID NO: 790959 - RNA, 22 nt, Human
cugaaugucgaucagcuugggu

SEQ ID NO: 790960 - RNA, 22 nt, Human
uugauuugauuguaauggcucu

SEQ ID NO: 790961 - RNA, 22 nt, Human
caguuucuucaucugcagaauc

SEQ ID NO: 790962 - RNA, 22 nt, Human
cagagccacuuggagaugagaa

SEQ ID NO: 790963 - RNA, 22 nt, Human
ggcuggcuugccaagcucaggg

SEQ ID NO: 790964 - RNA, 22 nt, Human
uuucuaucugagaagauaucua

SEQ ID NO: 790965 - RNA, 22 nt, Human
uauacacauuuuuaccuauagu

SEQ ID NO: 790966 - RNA, 22 nt, Human
ucccaagcaaugagucagggcc

SEQ ID NO: 790967 - RNA, 22 nt, Human
ugccagcaguagcaguaggcca

SEQ ID NO: 790968 - RNA, 22 nt, Human
uagaggccugaaagaaugauca

SEQ ID NO: 790969 - RNA, 22 nt, Human
uugggagauauuguucuuuaca

SEQ ID NO: 790970 - RNA, 22 nt, Human
uugcaaaugugaauaauuacac

SEQ ID NO: 790971 - RNA, 22 nt, Human
auccuaaaauuguucaauuucu

SEQ ID NO: 790972 - RNA, 22 nt, Human
ucaggcugcaguggcaaaagac

SEQ ID NO: 790973 - RNA, 22 nt, Human
cauucacaucuuguuccaucac

SEQ ID NO: 790974 - RNA, 22 nt, Human
agucuuuauacagaaauauaug

SEQ ID NO: 790975 - RNA, 22 nt, Human
gcucugcccaaagcuguggcug

SEQ ID NO: 790976 - RNA, 20 nt, Human
acaggaugccugccauuuca

SEQ ID NO: 790977 - RNA, 22 nt, Human
uuucuucuugauuuaaacaggg

SEQ ID NO: 790978 - RNA, 22 nt, Human
gcucuuccauuucucuugaacu

SEQ ID NO: 790979 - RNA, 23 nt, Human
ugcacaggacggccuuauaagua

SEQ ID NO: 790980 - RNA, 22 nt, Human
gcuggcugaaucuucugcaaua

SEQ ID NO: 790981 - RNA, 22 nt, Human
uucauguauugcauuguguccu

SEQ ID NO: 790982 - RNA, 22 nt, Human
aaggcaguuugggccaccaucu

SEQ ID NO: 790983 - RNA, 22 nt, Human
uucacauaaaagcuccaaagaa

SEQ ID NO: 790984 - RNA, 22 nt, Human
cucugcagaauuugagcugcuc

SEQ ID NO: 790985 - RNA, 22 nt, Human
caguugccuguuuccuugugug

SEQ ID NO: 790986 - RNA, 22 nt, Human
cuuuaaauaauacaagguccag

SEQ ID NO: 790987 - RNA, 22 nt, Human
aggaccagugagucuggcaagu

SEQ ID NO: 790988 - RNA, 22 nt, Human
ccaggcucugacauagauggga

SEQ ID NO: 790989 - RNA, 22 nt, Human
aaaagucucucugaguaaaagu

SEQ ID NO: 790990 - RNA, 17 nt, Human
uuauuuuuugggcugag

SEQ ID NO: 790991 - RNA, 22 nt, Human
gccuggcuaagcagaaggaccc

SEQ ID NO: 790992 - RNA, 22 nt, Human
acauucuuggacuccacucuag

SEQ ID NO: 790993 - RNA, 19 nt, Human
ccaguccucuuugggccug

SEQ ID NO: 790994 - RNA, 22 nt, Human
aauuugacccaucuuggaauuu

SEQ ID NO: 790995 - RNA, 22 nt, Human
cccaggggagguccucagggaa

SEQ ID NO: 790996 - RNA, 22 nt, Human
gcaggaugagugaguacauuua

SEQ ID NO: 790997 - RNA, 22 nt, Human
ucagaaguuucaaucccagcug

SEQ ID NO: 790998 - RNA, 22 nt, Human
gaaaaggcucucacucccuccg

SEQ ID NO: 790999 - RNA, 22 nt, Human
uccacagguauuucuccuugcu

SEQ ID NO: 791000 - RNA, 22 nt, Human
guuacaaaggaagcuucacugc

SEQ ID NO: 791001 - RNA, 22 nt, Human
uggggcuggggaucuugagccu

SEQ ID NO: 791002 - RNA, 22 nt, Human
cacagggccuggggcagcugcu

SEQ ID NO: 791003 - RNA, 22 nt, Human
ggcuggcacgaagcccugcugg

SEQ ID NO: 791004 - RNA, 22 nt, Human
ucccugccuccuggcagugcca

SEQ ID NO: 791005 - RNA, 22 nt, Human
aaacugcacuuuauuuugucaa

SEQ ID NO: 791006 - RNA, 22 nt, Human
gcuuccucccugcugcucacua

SEQ ID NO: 791007 - RNA, 22 nt, Human
gcugauuuugagaagcacaguc

SEQ ID NO: 791008 - RNA, 22 nt, Human
ugagaucacuuacguggcugca

SEQ ID NO: 791009 - RNA, 22 nt, Human
ugaaggcugggcucagccagcu

SEQ ID NO: 791010 - RNA, 22 nt, Human
ucuucaggcucuggcugccuuu

SEQ ID NO: 791011 - RNA, 22 nt, Human
cuucagugcauguuuauaauca

SEQ ID NO: 791012 - RNA, 22 nt, Human
ggcuccuggaaagcccucgcuc

SEQ ID NO: 791013 - RNA, 22 nt, Human
agggugguauuuaacaacugga

SEQ ID NO: 791014 - RNA, 22 nt, Human
uggcagauuuaacauuggaacu

SEQ ID NO: 791015 - RNA, 22 nt, Human
cagcucucacacccuccuccca

SEQ ID NO: 791016 - RNA, 21 nt, Human
uagaaucacuaauaagaugua

SEQ ID NO: 791017 - RNA, 22 nt, Human
uaggcagaauucauugugcugc

SEQ ID NO: 791018 - RNA, 22 nt, Human
cugccaggccuggggugcuguc

SEQ ID NO: 791019 - RNA, 22 nt, Human
agccuggcugggaagagccucu

SEQ ID NO: 791020 - RNA, 22 nt, Human
agagcuguggauaguccuggau

SEQ ID NO: 791021 - RNA, 22 nt, Human
caggaaaugaacaggaaugaac

SEQ ID NO: 791022 - RNA, 22 nt, Human
aacagucugggaguuccuuaua

SEQ ID NO: 791023 - RNA, 22 nt, Human
agucugaaccagauggcaaggu

SEQ ID NO: 791024 - RNA, 22 nt, Human
cugggaaguagaaucagaugag

SEQ ID NO: 791025 - RNA, 22 nt, Human
acagaaguguguguguaggaau

SEQ ID NO: 791026 - RNA, 22 nt, Human
aaauguguauaugaaacaugau

SEQ ID NO: 791027 - RNA, 22 nt, Human
aaaugccaggauuauuagaggc

SEQ ID NO: 791028 - RNA, 22 nt, Human
ugggcccugacuucaagcaucc

SEQ ID NO: 791029 - RNA, 22 nt, Human
uacagaguauuuuuaauauggu

SEQ ID NO: 791030 - RNA, 22 nt, Human
guugaaaauacagauuccuagg

SEQ ID NO: 791031 - RNA, 22 nt, Human
ggcaggcuagcacugauguccu

SEQ ID NO: 791032 - RNA, 20 nt, Human
cuggaauggguguggguuag

SEQ ID NO: 791033 - RNA, 22 nt, Human
uugcauguuguuuaauuucgag

SEQ ID NO: 791034 - RNA, 22 nt, Human
ucaggauguuaauauagcauua

SEQ ID NO: 791035 - RNA, 22 nt, Human
aucuucaauugaaaacuagccu

SEQ ID NO: 791036 - RNA, 22 nt, Human
auccagucaaaauuaguaaggu

SEQ ID NO: 791037 - RNA, 22 nt, Human
ucagaugguacuaauuuaagga

SEQ ID NO: 791038 - RNA, 22 nt, Human
uggucccuagcacagcuguccu

SEQ ID NO: 791039 - RNA, 22 nt, Human
agaaaacuugcucgagccuguu

SEQ ID NO: 791040 - RNA, 22 nt, Human
acuggcugaguuuauguucaca

SEQ ID NO: 791041 - RNA, 22 nt, Human
gcagaugguggaggcaagaggc

SEQ ID NO: 791042 - RNA, 22 nt, Human
uggcuggcauagccauugcucc

SEQ ID NO: 791043 - RNA, 22 nt, Human
agcaggcaggcccagcggcugg

SEQ ID NO: 791044 - RNA, 22 nt, Human
ccucccacauccuagcucugcu

SEQ ID NO: 791045 - RNA, 22 nt, Human
uaaagcuuguauugcaauauuu

SEQ ID NO: 791046 - RNA, 22 nt, Human
gggcucaguucugcuucaugcu

SEQ ID NO: 791047 - RNA, 22 nt, Human
cagacagaaggcuccuugaggu

SEQ ID NO: 791048 - RNA, 18 nt, Human
aagaggaggagcagguug

SEQ ID NO: 791049 - RNA, 22 nt, Human
ugcaucaaccuaauaucagcuc

SEQ ID NO: 791050 - RNA, 22 nt, Human
gcuccuggucuggagcuucaag

SEQ ID NO: 791051 - RNA, 22 nt, Human
gggagccagccuuugccuauaa

SEQ ID NO: 791052 - RNA, 22 nt, Human
agcaucugcauauugggagacc

SEQ ID NO: 791053 - RNA, 22 nt, Human
cugcuucuaagaaccugcagcu

SEQ ID NO: 791054 - RNA, 22 nt, Human
acaauagaguucucauaggaca

SEQ ID NO: 791055 - RNA, 22 nt, Human
uuuucaguuacuguuuauguga

SEQ ID NO: 791056 - RNA, 22 nt, Human
uccagggaagagcagaggcuac

SEQ ID NO: 791057 - RNA, 22 nt, Human
ugcugagauagcugacuaggca

SEQ ID NO: 791058 - RNA, 22 nt, Human
gcccaagccgccuuccagagac

SEQ ID NO: 791059 - RNA, 22 nt, Human
acagcagggguggaauaaacgu

SEQ ID NO: 791060 - RNA, 22 nt, Human
auuuucaaaacaucugcugugu

SEQ ID NO: 791061 - RNA, 22 nt, Human
cccagcagaaucugaugagggc

SEQ ID NO: 791062 - RNA, 19 nt, Human
uggcuuccugacucucauc

SEQ ID NO: 791063 - RNA, 22 nt, Human
gggaaggcaccaugguguucca

SEQ ID NO: 791064 - RNA, 22 nt, Human
guaaacauuuucaucugugccc

SEQ ID NO: 791065 - RNA, 22 nt, Human
ugcaggugugggcaggggagca

SEQ ID NO: 791066 - RNA, 22 nt, Human
ucagaaguauuaugcuaaagga

SEQ ID NO: 791067 - RNA, 22 nt, Human
cugagguggcauccuagcucua

SEQ ID NO: 791068 - RNA, 22 nt, Human
aggacagggauucaaacuccca

SEQ ID NO: 791069 - RNA, 20 nt, Human
gccaggcacuguucucaaua

SEQ ID NO: 791070 - RNA, 22 nt, Human
gagaggcuggcagugccagguu

SEQ ID NO: 791071 - RNA, 20 nt, Human
caguccugcaggcgggagaa

SEQ ID NO: 791072 - RNA, 22 nt, Human
ucauucuugaucacuaguuagu

SEQ ID NO: 791073 - RNA, 22 nt, Human
aaguccugugcuagagacaccu

SEQ ID NO: 791074 - RNA, 21 nt, Human
cuacccucacucccauuccuc

SEQ ID NO: 791075 - RNA, 22 nt, Human
caggcucccuaagucagcagcc

SEQ ID NO: 791076 - RNA, 22 nt, Human
gucugagggguuucccaggaca

SEQ ID NO: 791077 - RNA, 22 nt, Human
uggggccagcggggaggacuca

SEQ ID NO: 791078 - RNA, 22 nt, Human
aaaugucugagacuucugaacu

SEQ ID NO: 791079 - RNA, 22 nt, Human
gaugggcacggcagucugagag

SEQ ID NO: 791080 - RNA, 22 nt, Human
ucugagccccuagaacugagcg

SEQ ID NO: 791081 - RNA, 20 nt, Human
aagaaaacgucuucagggga

SEQ ID NO: 791082 - RNA, 22 nt, Human
uugcaaaaacugcaauuacuuu

SEQ ID NO: 791083 - RNA, 22 nt, Human
gucuggcacauaagaggagcuc

SEQ ID NO: 791084 - RNA, 22 nt, Human
cuaaacaagggauuauaauuga

SEQ ID NO: 791085 - RNA, 20 nt, Human
uaccacuuauuugaauaauu

SEQ ID NO: 791086 - RNA, 22 nt, Human
uuugcaaacauucagggcucca

SEQ ID NO: 791087 - RNA, 22 nt, Human
gcacauuucucaaagaauuguc

SEQ ID NO: 791088 - RNA, 22 nt, Human
uuuauacuucauaaugucuauu

SEQ ID NO: 791089 - RNA, 20 nt, Human
ccuggcaggcggguuacuua

SEQ ID NO: 791090 - RNA, 22 nt, Human
aacuucuggauguuucaaaugu

SEQ ID NO: 791091 - RNA, 22 nt, Human
agcaguccuucuuuagagagcc

SEQ ID NO: 791092 - RNA, 22 nt, Human
auuugcuuuaagguauaaaagg

SEQ ID NO: 791093 - RNA, 20 nt, Human
aggccugagagaugacuggg

SEQ ID NO: 791094 - RNA, 22 nt, Human
uaauagaauaguggaaacauug

SEQ ID NO: 791095 - RNA, 22 nt, Human
ccuggcugugcauugccggccc

SEQ ID NO: 791096 - RNA, 22 nt, Human
aguguuacugguucaugaaucu

SEQ ID NO: 791097 - RNA, 22 nt, Human
ggguggugagauguagcugaug

SEQ ID NO: 791098 - RNA, 20 nt, Human
gugcagaggcagccuguggg

SEQ ID NO: 791099 - RNA, 22 nt, Human
cagggagcuuugucuucucauu

SEQ ID NO: 791100 - RNA, 22 nt, Human
caggguggcacucagcgcaucu

SEQ ID NO: 791101 - RNA, 22 nt, Human
ucaggaggcucaagaccuggca

SEQ ID NO: 791102 - RNA, 22 nt, Human
ggcugccuucagacuccagcuu

SEQ ID NO: 791103 - RNA, 22 nt, Human
ucucuuccaguaagagucuuua

SEQ ID NO: 791104 - RNA, 22 nt, Human
aacugcaacuuguuugauucuu

SEQ ID NO: 791105 - RNA, 22 nt, Human
aagagcccuuguucauaauuau

SEQ ID NO: 791106 - RNA, 22 nt, Human
aauuuacacuucauuuggaggg

SEQ ID NO: 791107 - RNA, 22 nt, Human
uucuauuguaccuuuucucuca

SEQ ID NO: 791108 - RNA, 22 nt, Human
gccuggcugguagagggggcuc

SEQ ID NO: 791109 - RNA, 22 nt, Human
uuacaaguauuuaagaugcugu

SEQ ID NO: 791110 - RNA, 22 nt, Human
cauuuguaguuaaaaaugucuc

SEQ ID NO: 791111 - RNA, 22 nt, Human
uguucuuagcaggagcaucuau

SEQ ID NO: 791112 - RNA, 22 nt, Human
acagaacugggggcacagauag

SEQ ID NO: 791113 - RNA, 22 nt, Human
gcugccucugcgacucugggcg

SEQ ID NO: 791114 - RNA, 22 nt, Human
guuuacauguuuuucucuuaca

SEQ ID NO: 791115 - RNA, 22 nt, Human
aagggcagcugacagaugcuua

SEQ ID NO: 791116 - RNA, 22 nt, Human
aacuugaaugagaacuuuugcc

SEQ ID NO: 791117 - RNA, 22 nt, Human
ucccaggcugggggccugaagu

SEQ ID NO: 791118 - RNA, 22 nt, Human
uguguucaaugacuucaucuuu

SEQ ID NO: 791119 - RNA, 23 nt, Human
ucucagugaaucucagaauucgc

SEQ ID NO: 791120 - RNA, 22 nt, Human
guguuucuggggcauucauagu

SEQ ID NO: 791121 - RNA, 22 nt, Human
cccugcagagggaugggggcag

SEQ ID NO: 791122 - RNA, 22 nt, Human
ucauggcacaugcccuccaggg

SEQ ID NO: 791123 - RNA, 22 nt, Human
augugacuuugugucuuccauc

SEQ ID NO: 791124 - RNA, 21 nt, Human
guucuauuuugcaaacuucug

SEQ ID NO: 791125 - RNA, 22 nt, Human
gaggcucagagaagucauggua

SEQ ID NO: 791126 - RNA, 22 nt, Human
gggcuggagccuggcggugguu

SEQ ID NO: 791127 - RNA, 22 nt, Human
cuggcugcgucugcucugacag

SEQ ID NO: 791128 - RNA, 22 nt, Human
aagucaaaccuugcucacagga

SEQ ID NO: 791129 - RNA, 22 nt, Human
caugaaauguuagaauuagaca

SEQ ID NO: 791130 - RNA, 22 nt, Human
ccuggcagguggcgcccucggc

SEQ ID NO: 791131 - RNA, 22 nt, Human
gagcaggcaaagaugaaaggag

SEQ ID NO: 791132 - RNA, 22 nt, Human
aaaggaggccacauggcuagga

SEQ ID NO: 791133 - RNA, 22 nt, Human
gggacccagguaauccugugcu

SEQ ID NO: 791134 - RNA, 22 nt, Human
gcaggcaggcuuccuugaacug

SEQ ID NO: 791135 - RNA, 22 nt, Human
guuccagggaagggaaggcaga

SEQ ID NO: 791136 - RNA, 22 nt, Human
gucugagacugggcacauaccu

SEQ ID NO: 791137 - RNA, 22 nt, Human
ucugggaguaaggccuaggcau

SEQ ID NO: 791138 - RNA, 22 nt, Human
aucauggaaagguucagcaagc

SEQ ID NO: 791139 - RNA, 22 nt, Human
gagcauaggacacagaggugug

SEQ ID NO: 791140 - RNA, 22 nt, Human
cggccaagccggggccccgaag

SEQ ID NO: 791141 - RNA, 22 nt, Human
ccuccuggagcauuggugagga

SEQ ID NO: 791142 - RNA, 22 nt, Human
auggcagaauccauaguaggug

SEQ ID NO: 791143 - RNA, 22 nt, Human
caagaaauuucuuaagaacuaa

SEQ ID NO: 791144 - RNA, 22 nt, Human
aaaauagguacggauuagaaug

SEQ ID NO: 791145 - RNA, 22 nt, Human
cacugagggggugguuucagga

SEQ ID NO: 791146 - RNA, 22 nt, Human
ugacagcccaccucacaggauu

SEQ ID NO: 791147 - RNA, 22 nt, Human
ugucugcuaaauuacuauuaca

SEQ ID NO: 791148 - RNA, 22 nt, Human
augccacauaaccaguucacuu

SEQ ID NO: 791149 - RNA, 22 nt, Human
acaaacuuauguuucauaugua

SEQ ID NO: 791150 - RNA, 22 nt, Human
uuaauacaagcauaugcacaca

SEQ ID NO: 791151 - RNA, 22 nt, Human
aaagcucugggaaugcuuaucu

SEQ ID NO: 791152 - RNA, 22 nt, Human
uuugcauccugugugugaaagu

SEQ ID NO: 791153 - RNA, 22 nt, Human
caguagaauuauuauaaaacau

SEQ ID NO: 791154 - RNA, 22 nt, Human
ugcuggagaucauuaauguuca

SEQ ID NO: 791155 - RNA, 22 nt, Human
gaaaucaguucugaaauuuaca

SEQ ID NO: 791156 - RNA, 22 nt, Human
ccaggcucugagaggaauguga

SEQ ID NO: 791157 - RNA, 22 nt, Human
gcagagaacccagcagauuggc

SEQ ID NO: 791158 - RNA, 22 nt, Human
cugggccacuuccucaggggaa

SEQ ID NO: 791159 - RNA, 22 nt, Human
uauacacaccuccaaagcagga

SEQ ID NO: 791160 - RNA, 22 nt, Human
cuccucagcugggaggaguccc

SEQ ID NO: 791161 - RNA, 22 nt, Human
aagaggaguagaugugguuggu

SEQ ID NO: 791162 - RNA, 22 nt, Human
ccaaaggcggaacugagucucu

SEQ ID NO: 791163 - RNA, 22 nt, Human
gccacaggugggcucugggaaa

SEQ ID NO: 791164 - RNA, 22 nt, Human
gaggaggggacaguacuugugc

SEQ ID NO: 791165 - RNA, 20 nt, Human
ccaggcacugucccaugcag

SEQ ID NO: 791166 - RNA, 22 nt, Human
ugcagaauuauggugcuggcuu

SEQ ID NO: 791167 - RNA, 22 nt, Human
gaaagugcagucagacaaggca

SEQ ID NO: 791168 - RNA, 22 nt, Human
aaggaggaauuucagggugaau

SEQ ID NO: 791169 - RNA, 22 nt, Human
acauacuugaagcaagugauca

SEQ ID NO: 791170 - RNA, 22 nt, Human
ucacaauuguuuuuaggaucaa

SEQ ID NO: 791171 - RNA, 22 nt, Human
gagaaggacuacggaaaacaga

SEQ ID NO: 791172 - RNA, 22 nt, Human
agccucagcacgcagcucugug

SEQ ID NO: 791173 - RNA, 22 nt, Human
agagaauuggagcagugacagg

SEQ ID NO: 791174 - RNA, 20 nt, Human
uuucagagugucuuuccauu

SEQ ID NO: 791175 - RNA, 22 nt, Human
augcaauaguaauucuagucug

SEQ ID NO: 791176 - RNA, 22 nt, Human
gcgagggcacgcgguugaaggc

SEQ ID NO: 791177 - RNA, 22 nt, Human
uuucagaaccaagagagacauc

SEQ ID NO: 791178 - RNA, 22 nt, Human
ggcccagguccagcgaguaccu

SEQ ID NO: 791179 - RNA, 20 nt, Human
ggugcagguaacgcugugcu

SEQ ID NO: 791180 - RNA, 23 nt, Human
agcacagacuagaaaggucuuuc

SEQ ID NO: 791181 - RNA, 18 nt, Human
gagaaaccugugaaugcu

SEQ ID NO: 791182 - RNA, 22 nt, Human
cauggccaaggaugcucaacca

SEQ ID NO: 791183 - RNA, 22 nt, Human
acagggcagaaauguugcaucu

SEQ ID NO: 791184 - RNA, 18 nt, Human
ucucucagggaaacagaa

SEQ ID NO: 791185 - RNA, 22 nt, Human
caaauguuaaauguguuaagac

SEQ ID NO: 791186 - RNA, 22 nt, Human
ggcugccucaaagcucaagcuc

SEQ ID NO: 791187 - RNA, 23 nt, Human
agagcaaggaaaugaggugugau

SEQ ID NO: 791188 - RNA, 22 nt, Human
caggaggcccggccacagccca

SEQ ID NO: 791189 - RNA, 22 nt, Human
guccugcacauggagggcaaug

SEQ ID NO: 791190 - RNA, 22 nt, Human
acugaacauaugcaagaccauu

SEQ ID NO: 791191 - RNA, 22 nt, Human
acacauuuauggaucgcagaaa

SEQ ID NO: 791192 - RNA, 22 nt, Human
uccagcuuauagguagauuuaa

SEQ ID NO: 791193 - RNA, 22 nt, Human
gugcccaggugucccugagaag

SEQ ID NO: 791194 - RNA, 22 nt, Human
auacaagguggagucaggaaaa

SEQ ID NO: 791195 - RNA, 22 nt, Human
uggcccaggggcucuugguguu

SEQ ID NO: 791196 - RNA, 22 nt, Human
uuuguacugaagauuguaaacu

SEQ ID NO: 791197 - RNA, 22 nt, Human
uuuucucaggugcuuaucuaag

SEQ ID NO: 791198 - RNA, 22 nt, Human
gaugaugacagugauuagacug

SEQ ID NO: 791199 - RNA, 20 nt, Human
agaaaauguuuucagcugga

SEQ ID NO: 791200 - RNA, 22 nt, Human
uugcauguccaggguauugugg

SEQ ID NO: 791201 - RNA, 22 nt, Human
acauguaaaagauaaauuaaca

SEQ ID NO: 791202 - RNA, 22 nt, Human
aauagauggguuaaacagcaaa

SEQ ID NO: 791203 - RNA, 22 nt, Human
aucauaaaauugcaccauuucu

SEQ ID NO: 791204 - RNA, 22 nt, Human
ucuggcuguuguuagguuccug

SEQ ID NO: 791205 - RNA, 22 nt, Human
gcugggagaggcagcuuucgga

SEQ ID NO: 791206 - RNA, 22 nt, Human
guauuuuuaguagagucggggu

SEQ ID NO: 791207 - RNA, 22 nt, Human
aaacuugugagcuaaauaaaug

SEQ ID NO: 791208 - RNA, 22 nt, Human
gccucugccaagggggcugcgg

SEQ ID NO: 791209 - RNA, 22 nt, Human
acacaguuuaugguauucuguu

SEQ ID NO: 791210 - RNA, 22 nt, Human
aagacuuucuguaaagcuacag

SEQ ID NO: 791211 - RNA, 22 nt, Human
uugaggaggacagaaacauuua

SEQ ID NO: 791212 - RNA, 22 nt, Human
agagcuggauggucaagauggc

SEQ ID NO: 791213 - RNA, 22 nt, Human
uucauaaucaccaaaaacugga

SEQ ID NO: 791214 - RNA, 22 nt, Human
aguaaaacagagaaaucacuca

SEQ ID NO: 791215 - RNA, 22 nt, Human
gugggguagaucuuucucagga

SEQ ID NO: 791216 - RNA, 17 nt, Human
auacaaagccauaaacc

SEQ ID NO: 791217 - RNA, 22 nt, Human
cagcucaguuucaauaccaggu

SEQ ID NO: 791218 - RNA, 22 nt, Human
ccagcccucgguagucccauag

SEQ ID NO: 791219 - RNA, 22 nt, Human
ucugacuugcaucuuaaaggag

SEQ ID NO: 791220 - RNA, 22 nt, Human
cacagggcagugcugcccacuc

SEQ ID NO: 791221 - RNA, 22 nt, Human
gaggguggggaauagacugcua

SEQ ID NO: 791222 - RNA, 22 nt, Human
gcugaaaugggcacugaaggcc

SEQ ID NO: 791223 - RNA, 22 nt, Human
ucacugggagaugugggaaggg

SEQ ID NO: 791224 - RNA, 22 nt, Human
uaaggcagccgcucagagaggu

SEQ ID NO: 791225 - RNA, 22 nt, Human
gcaauaaacucucucaagccac

SEQ ID NO: 791226 - RNA, 21 nt, Human
uggcagggguaguaguacagc

SEQ ID NO: 791227 - RNA, 22 nt, Human
ggcagggacuauguuucaugga

SEQ ID NO: 791228 - RNA, 22 nt, Human
gcagguguucucagaggaggcu

SEQ ID NO: 791229 - RNA, 22 nt, Human
gagaggcccugaagcccacaga

SEQ ID NO: 791230 - RNA, 22 nt, Human
ugcaauuugacgucagcacagu

SEQ ID NO: 791231 - RNA, 22 nt, Human
caggcuuggcagggaggcuggu

SEQ ID NO: 791232 - RNA, 22 nt, Human
cugggagugucccucugguaau

SEQ ID NO: 791233 - RNA, 22 nt, Human
uuuggcggacugagaacgcggg

SEQ ID NO: 791234 - RNA, 19 nt, Human
ucugaagaauuagagagca

SEQ ID NO: 791235 - RNA, 22 nt, Human
agcugauuccacuuuuucccca

SEQ ID NO: 791236 - RNA, 22 nt, Human
agcuguccuggcucaggcugug

SEQ ID NO: 791237 - RNA, 22 nt, Human
acauacauauguuuaaaugcau

SEQ ID NO: 791238 - RNA, 22 nt, Human
gugcccaggggccagcugccgg

SEQ ID NO: 791239 - RNA, 22 nt, Human
uccaggagaggccugaccaggu

SEQ ID NO: 791240 - RNA, 22 nt, Human
ccacagugauucacuuuugaag

SEQ ID NO: 791241 - RNA, 22 nt, Human
gaggggagaggcuuauggauca

SEQ ID NO: 791242 - RNA, 22 nt, Human
gaugaggcaagccagaggacug

SEQ ID NO: 791243 - RNA, 22 nt, Human
aaggcagaggaaggucuaguuu

SEQ ID NO: 791244 - RNA, 22 nt, Human
ccuucugauacugacaucauuu

SEQ ID NO: 791245 - RNA, 22 nt, Human
agccccaggcccggacgccucu

SEQ ID NO: 791246 - RNA, 22 nt, Human
uuuccuuuuauaaggcuugagg

SEQ ID NO: 791247 - RNA, 22 nt, Human
ucauacauucagcagauauuug

SEQ ID NO: 791248 - RNA, 22 nt, Human
uucuauuuccaguccuucagag

SEQ ID NO: 791249 - RNA, 22 nt, Human
caggugaguaacaaugggugau

SEQ ID NO: 791250 - RNA, 22 nt, Human
acacagugugugcagucggacg

SEQ ID NO: 791251 - RNA, 22 nt, Human
cugcaaauaggggugugaauaa

SEQ ID NO: 791252 - RNA, 19 nt, Human
ucuaaacucuauacuggua

SEQ ID NO: 791253 - RNA, 22 nt, Human
cagacaaggccaucuuucauuu

SEQ ID NO: 791254 - RNA, 22 nt, Human
gggggcugaucauuuacugggc

SEQ ID NO: 791255 - RNA, 22 nt, Human
acacauaugucauugaaaaauc

SEQ ID NO: 791256 - RNA, 22 nt, Human
aaguaugcuaauuaacuagcac

SEQ ID NO: 791257 - RNA, 21 nt, Human
gcagaugggaagagacgaggc

SEQ ID NO: 791258 - RNA, 22 nt, Human
gaggcugggaaguccaagacca

SEQ ID NO: 791259 - RNA, 21 nt, Human
aaccagagccaggcucucagc

SEQ ID NO: 791260 - RNA, 22 nt, Human
caagagcauuuaguuagcuggu

SEQ ID NO: 791261 - RNA, 21 nt, Human
ugcagauaauugaaagcugac

SEQ ID NO: 791262 - RNA, 22 nt, Human
uuuugcaaaguacauuaucagg

SEQ ID NO: 791263 - RNA, 22 nt, Human
uggaagugauuacaauguagua

SEQ ID NO: 791264 - RNA, 22 nt, Human
cugguguggacuccgcgcggag

SEQ ID NO: 791265 - RNA, 22 nt, Human
ugagcucauagcucuuauuaug

SEQ ID NO: 791266 - RNA, 22 nt, Human
ucaggagcucaggcugauggaa

SEQ ID NO: 791267 - RNA, 22 nt, Human
caggacaguauaggcuuuagga

SEQ ID NO: 791268 - RNA, 22 nt, Human
ucaagaugaaccaggacauuca

SEQ ID NO: 791269 - RNA, 20 nt, Human
ucacaggagggaaggcaggu

SEQ ID NO: 791270 - RNA, 22 nt, Human
ucagggaagacuucuuagagga

SEQ ID NO: 791271 - RNA, 23 nt, Human
cacugggggcugcuacagagagg

SEQ ID NO: 791272 - RNA, 22 nt, Human
agucuaauguuuguaaaaucau

SEQ ID NO: 791273 - RNA, 22 nt, Human
ccugagagcccuagccaggcgc

SEQ ID NO: 791274 - RNA, 22 nt, Human
acagguagcauuuuuccucuuu

SEQ ID NO: 791275 - RNA, 22 nt, Human
cagcauggacagggguggcguu

SEQ ID NO: 791276 - RNA, 20 nt, Human
agagugcuggacugaggagc

SEQ ID NO: 791277 - RNA, 22 nt, Human
ugcauuaagaauuucugaggau

SEQ ID NO: 791278 - RNA, 22 nt, Human
agugaaaacacuaguucuugcc

SEQ ID NO: 791279 - RNA, 22 nt, Human
gcaggugggggucggugcaucu

SEQ ID NO: 791280 - RNA, 22 nt, Human
uggucccuaggaaagcaguguu

SEQ ID NO: 791281 - RNA, 22 nt, Human
ccaguguauuuuugggaccugc

SEQ ID NO: 791282 - RNA, 21 nt, Human
agagcugguagguagguaggu

SEQ ID NO: 791283 - RNA, 22 nt, Human
gugccugggguugagcuaugaa

SEQ ID NO: 791284 - RNA, 22 nt, Human
acuuaaaguaguuuuacugugg

SEQ ID NO: 791285 - RNA, 19 nt, Human
cuucuugauaagguucuuu

SEQ ID NO: 791286 - RNA, 22 nt, Human
ucuagauuuuugugcaccuuug

SEQ ID NO: 791287 - RNA, 22 nt, Human
cauugagaggcugccugccuga

SEQ ID NO: 791288 - RNA, 22 nt, Human
ggucaaguaacaaaucaggagc

SEQ ID NO: 791289 - RNA, 19 nt, Human
gcacaggacaucugaugga

SEQ ID NO: 791290 - RNA, 19 nt, Human
uccucccuuugguguccug

SEQ ID NO: 791291 - RNA, 20 nt, Human
cuaauauucuacucuaagga

SEQ ID NO: 791292 - RNA, 22 nt, Human
agcaauaacagaaaacuuuccu

SEQ ID NO: 791293 - RNA, 22 nt, Human
ccugcuggcagaggggguuacu

SEQ ID NO: 791294 - RNA, 22 nt, Human
ggccagcucuuguccacggagg

SEQ ID NO: 791295 - RNA, 22 nt, Human
ucagaaucucuggaggcuuggc

SEQ ID NO: 791296 - RNA, 22 nt, Human
agagauggccuuaggugggaau

SEQ ID NO: 791297 - RNA, 22 nt, Human
ugggagcaguucagguguggcu

SEQ ID NO: 791298 - RNA, 22 nt, Human
aaggccugcucagcugucugug

SEQ ID NO: 791299 - RNA, 22 nt, Human
aaagcauuucaugucuagaaag

SEQ ID NO: 791300 - RNA, 22 nt, Human
gccugcugcauccaggcuauug

SEQ ID NO: 791301 - RNA, 22 nt, Human
uuaauauguugaaauuuauuag

SEQ ID NO: 791302 - RNA, 22 nt, Human
uuacaaagaguguucuuuucca

SEQ ID NO: 791303 - RNA, 22 nt, Human
ggggaagggaguccaaguguua

SEQ ID NO: 791304 - RNA, 19 nt, Human
cucagcacuuuuacacagg

SEQ ID NO: 791305 - RNA, 22 nt, Human
uucauucuuugaaucugaggua

SEQ ID NO: 791306 - RNA, 21 nt, Human
ugggggagaauugguugcuuu

SEQ ID NO: 791307 - RNA, 22 nt, Human
agucucuuccuucaaggcuggu

SEQ ID NO: 791308 - RNA, 22 nt, Human
gugcagcugcccaagccugagc

SEQ ID NO: 791309 - RNA, 20 nt, Human
aaaaugaugggcagggcagg

SEQ ID NO: 791310 - RNA, 22 nt, Human
auacugaugaugugaagaaaca

SEQ ID NO: 791311 - RNA, 17 nt, Human
uccaggagaggcaaugg

SEQ ID NO: 791312 - RNA, 22 nt, Human
uccaggccgcaggggcagcccc

SEQ ID NO: 791313 - RNA, 22 nt, Human
augcagaucugugaaaggaaua

SEQ ID NO: 791314 - RNA, 22 nt, Human
cuggcagcaggucacacgcaga

SEQ ID NO: 791315 - RNA, 22 nt, Human
cagccaggcccagaucaugcug

SEQ ID NO: 791316 - RNA, 22 nt, Human
ccuggucagguaacugggcuga

SEQ ID NO: 791317 - RNA, 22 nt, Human
acaggacuguggaaggaucucu

SEQ ID NO: 791318 - RNA, 22 nt, Human
gaagcuuugagagcagaagccc

SEQ ID NO: 791319 - RNA, 22 nt, Human
ugugauuacugaauagaaaaua

SEQ ID NO: 791320 - RNA, 22 nt, Human
aggcagugagcagggugucaug

SEQ ID NO: 791321 - RNA, 22 nt, Human
ugaacaugcuguugauggccug

SEQ ID NO: 791322 - RNA, 22 nt, Human
ucuguauaaggacaaacauuua

SEQ ID NO: 791323 - RNA, 22 nt, Human
guucuggguagauguaucuuuu

SEQ ID NO: 791324 - RNA, 22 nt, Human
agguauguauguguguauauuu

SEQ ID NO: 791325 - RNA, 22 nt, Human
uuaaguauauccauuugacugg

SEQ ID NO: 791326 - RNA, 23 nt, Human
gcaugcaacuugcaguaguauuc

SEQ ID NO: 791327 - RNA, 22 nt, Human
ggcuggcuccaccuagguagcu

SEQ ID NO: 791328 - RNA, 22 nt, Human
gaauuuaaggaccaagcauuuu

SEQ ID NO: 791329 - RNA, 22 nt, Human
gccaggcauguccucugcagaa

SEQ ID NO: 791330 - RNA, 22 nt, Human
ucuggcuggcucggccgggagu

SEQ ID NO: 791331 - RNA, 22 nt, Human
uacaacauuguguugcuucaua

SEQ ID NO: 791332 - RNA, 22 nt, Human
ucagagucuuaacuauucagag

SEQ ID NO: 791333 - RNA, 20 nt, Human
ugugcccagcagaggcugcc

SEQ ID NO: 791334 - RNA, 22 nt, Human
uuuuuuauagcaaugaacccac

SEQ ID NO: 791335 - RNA, 20 nt, Human
cagaggcauuuucagacucu

SEQ ID NO: 791336 - RNA, 22 nt, Human
aauucacaggagguauuugucc

SEQ ID NO: 791337 - RNA, 22 nt, Human
uccugccugagcguggaggagg

SEQ ID NO: 791338 - RNA, 22 nt, Human
acauugauauuucaaauacagg

SEQ ID NO: 791339 - RNA, 22 nt, Human
aggcagauauuucaguucacau

SEQ ID NO: 791340 - RNA, 22 nt, Human
cucuggcuuugcucaugcaucc

SEQ ID NO: 791341 - RNA, 22 nt, Human
agaaauuaugcaguaguuuuau

SEQ ID NO: 791342 - RNA, 22 nt, Human
ggucccaguccucucccugcua

SEQ ID NO: 791343 - RNA, 22 nt, Human
uugucacacccuuuuuuauacc

SEQ ID NO: 791344 - RNA, 22 nt, Human
acaauguaggcugaaaaagcuu

SEQ ID NO: 791345 - RNA, 22 nt, Human
uagacaauauuugaaaguagug

SEQ ID NO: 791346 - RNA, 22 nt, Human
gggccagcucugugauguaggg

SEQ ID NO: 791347 - RNA, 22 nt, Human
cuuccagcugauuacaggcuau

SEQ ID NO: 791348 - RNA, 22 nt, Human
aauauucaaguuauucuuucuu

SEQ ID NO: 791349 - RNA, 22 nt, Human
ucaauaaauagcuuggcucagc

SEQ ID NO: 791350 - RNA, 17 nt, Human
uggaugugggaucugga

SEQ ID NO: 791351 - RNA, 22 nt, Human
aaacacuagcaggaagcacuga

SEQ ID NO: 791352 - RNA, 22 nt, Human
gcaggagccagggauuccagga

SEQ ID NO: 791353 - RNA, 22 nt, Human
acuggauucucuuacacagaug

SEQ ID NO: 791354 - RNA, 22 nt, Human
guuguuuugcaggauccuuaca

SEQ ID NO: 791355 - RNA, 22 nt, Human
agcugagagguggcaagcugua

SEQ ID NO: 791356 - RNA, 22 nt, Human
gcccuggagggccagcgacugg

SEQ ID NO: 791357 - RNA, 22 nt, Human
gggaacuguuuaacagggguuu

SEQ ID NO: 791358 - RNA, 18 nt, Human
ucauuuguuuugcaugaa

SEQ ID NO: 791359 - RNA, 22 nt, Human
uuuaaggcuucacuggaguggg

SEQ ID NO: 791360 - RNA, 22 nt, Human
acugcugauuuuaggacuguua

SEQ ID NO: 791361 - RNA, 22 nt, Human
gaagcagagccuaaggcagaca

SEQ ID NO: 791362 - RNA, 22 nt, Human
gcuucuacccacgagaugcaaa

SEQ ID NO: 791363 - RNA, 22 nt, Human
aaugggaagucacuacuguuac

SEQ ID NO: 791364 - RNA, 22 nt, Human
aauuaacagagggcuuauuacu

SEQ ID NO: 791365 - RNA, 22 nt, Human
cuuuugcaccuuuuaaguaaug

SEQ ID NO: 791366 - RNA, 22 nt, Human
aguggucuagucugaggauuau

SEQ ID NO: 791367 - RNA, 22 nt, Human
acaggacaaaaaucuggauggc

SEQ ID NO: 791368 - RNA, 22 nt, Human
aagugcauauuuuuguuguaga

SEQ ID NO: 791369 - RNA, 22 nt, Human
uggcagauaaccugcugugccc

SEQ ID NO: 791370 - RNA, 18 nt, Human
accuggcugugugagcug

SEQ ID NO: 791371 - RNA, 22 nt, Human
aaaguuuacagugcacaugggu

SEQ ID NO: 791372 - RNA, 22 nt, Human
cuggaaggcggagguuguagug

SEQ ID NO: 791373 - RNA, 22 nt, Human
ccuggcuccugccucugcaggg

SEQ ID NO: 791374 - RNA, 20 nt, Human
gcuuuuucuaauagcagucc

SEQ ID NO: 791375 - RNA, 22 nt, Human
guuuacaugcagaaaaucaaug

SEQ ID NO: 791376 - RNA, 22 nt, Human
gauuuaguggcccuugguacac

SEQ ID NO: 791377 - RNA, 22 nt, Human
ggaggagguggguuaaguugua

SEQ ID NO: 791378 - RNA, 22 nt, Human
ucucuugauauauuacauagag

SEQ ID NO: 791379 - RNA, 22 nt, Human
ugagccagcaggccuccagugg

SEQ ID NO: 791380 - RNA, 22 nt, Human
cacagcagacagggaggcggcu

SEQ ID NO: 791381 - RNA, 22 nt, Human
gggaaggcauaccugagggaga

SEQ ID NO: 791382 - RNA, 22 nt, Human
cacuggcagauuugggaucugg

SEQ ID NO: 791383 - RNA, 22 nt, Human
cagggcuguuagcugcugcucu

SEQ ID NO: 791384 - RNA, 22 nt, Human
acaggagccaaacacaugccag

SEQ ID NO: 791385 - RNA, 22 nt, Human
aagugcauuagauagaaugaug

SEQ ID NO: 791386 - RNA, 23 nt, Human
auccagccuggggguuuaaccac

SEQ ID NO: 791387 - RNA, 22 nt, Human
ugcaaaugaguugcagaucagg

SEQ ID NO: 791388 - RNA, 22 nt, Human
ugcccagcgcccacauucuguc

SEQ ID NO: 791389 - RNA, 22 nt, Human
gcagagggcagggguguuuguu

SEQ ID NO: 791390 - RNA, 21 nt, Human
uggcugcaagcagcugccucc

SEQ ID NO: 791391 - RNA, 22 nt, Human
agcagccagagaaugaugcagu

SEQ ID NO: 791392 - RNA, 22 nt, Human
gucaggggaugugcugguggcc

SEQ ID NO: 791393 - RNA, 22 nt, Human
aagacauugcugcuuuuaauug

SEQ ID NO: 791394 - RNA, 22 nt, Human
acaaugcaccuauuuuaaaacu

SEQ ID NO: 791395 - RNA, 22 nt, Human
gguccaaggcucgguggcgggg

SEQ ID NO: 791396 - RNA, 22 nt, Human
ugaggaaguugaucucaucagu

SEQ ID NO: 791397 - RNA, 22 nt, Human
uggggugacagugcagugguca

SEQ ID NO: 791398 - RNA, 22 nt, Human
ucaauucugguccucaggaacu

SEQ ID NO: 791399 - RNA, 22 nt, Human
acucacugcacuuugaaaugug

SEQ ID NO: 791400 - RNA, 22 nt, Human
uuugcuuuguuuaaaaguggua

SEQ ID NO: 791401 - RNA, 22 nt, Human
ucugcagcuuuccccugauuua

SEQ ID NO: 791402 - RNA, 22 nt, Human
gcacugcuuuuaccuaggugag

SEQ ID NO: 791403 - RNA, 22 nt, Human
gcaagcugugccuucucaggau

SEQ ID NO: 791404 - RNA, 23 nt, Human
ugauuuuaaaaaguaaguuauca

SEQ ID NO: 791405 - RNA, 22 nt, Human
ucagaacuuaaagccgauuggg

SEQ ID NO: 791406 - RNA, 22 nt, Human
guagcgguuaugucugcaggga

SEQ ID NO: 791407 - RNA, 22 nt, Human
uuucuuaugggguaguccuuua

SEQ ID NO: 791408 - RNA, 17 nt, Human
ggcaggugcggggccgc

SEQ ID NO: 791409 - RNA, 22 nt, Human
caggacugauguuccuccagcc

SEQ ID NO: 791410 - RNA, 22 nt, Human
aagcagguuaugaaauauagaa

SEQ ID NO: 791411 - RNA, 23 nt, Human
aagcagggagauucuuagcugag

SEQ ID NO: 791412 - RNA, 23 nt, Human
ucucagaggauuccugggccuug

SEQ ID NO: 791413 - RNA, 21 nt, Human
ggcugggucaugcagcuggcc

SEQ ID NO: 791414 - RNA, 22 nt, Human
auauacuugauuuaacugagca

SEQ ID NO: 791415 - RNA, 22 nt, Human
uugaaaugcaucaucauuuaga

SEQ ID NO: 791416 - RNA, 22 nt, Human
cuguggugagcaacugacugaa

SEQ ID NO: 791417 - RNA, 22 nt, Human
cugggagagaagcgaagcuggg

SEQ ID NO: 791418 - RNA, 22 nt, Human
aagcacuugcuuagaugugguu

SEQ ID NO: 791419 - RNA, 18 nt, Human
ugcugggguagaauccac

SEQ ID NO: 791420 - RNA, 22 nt, Human
guuucaaagggaagacgcugga

SEQ ID NO: 791421 - RNA, 22 nt, Human
uaggauuuaggcuuuaacaucu

SEQ ID NO: 791422 - RNA, 21 nt, Human
uucuucaggccaaugcucauu

SEQ ID NO: 791423 - RNA, 22 nt, Human
gaauucugggagagaucugaca

SEQ ID NO: 791424 - RNA, 22 nt, Human
aaucaggaacucaagugcauug

SEQ ID NO: 791425 - RNA, 22 nt, Human
gcccagccuccaagcuccaagg

SEQ ID NO: 791426 - RNA, 20 nt, Human
ggcagaccugcugagagccc

SEQ ID NO: 791427 - RNA, 22 nt, Human
aggcagugaugagucaugaaua

SEQ ID NO: 791428 - RNA, 22 nt, Human
aaaccuguuaauagagcgaugc

SEQ ID NO: 791429 - RNA, 22 nt, Human
aaaugacacucauucaguguca

SEQ ID NO: 791430 - RNA, 22 nt, Human
aaagaaaccuaucagccacaug

SEQ ID NO: 791431 - RNA, 23 nt, Human
aaggccagagagaggcuaguguc

SEQ ID NO: 791432 - RNA, 22 nt, Human
cuucccuuucuggugacuucuc

SEQ ID NO: 791433 - RNA, 22 nt, Human
caggaggcgucuucaguuuguu

SEQ ID NO: 791434 - RNA, 21 nt, Human
gcuccuggugcugcguggcgc

SEQ ID NO: 791435 - RNA, 22 nt, Human
acacagagcaaaucaugacaga

SEQ ID NO: 791436 - RNA, 19 nt, Human
ugacauagcaagacaaaac

SEQ ID NO: 791437 - RNA, 22 nt, Human
ggugggagagcucugucuccag

SEQ ID NO: 791438 - RNA, 22 nt, Human
ggcagaugacagaccaguaugu

SEQ ID NO: 791439 - RNA, 22 nt, Human
cacccagggcugugccugccca

SEQ ID NO: 791440 - RNA, 22 nt, Human
ccagggucuuggagaggagugc

SEQ ID NO: 791441 - RNA, 22 nt, Human
ugggcagggaucucuuuugcaa

SEQ ID NO: 791442 - RNA, 22 nt, Human
ggugaggccuguacaaagcugc

SEQ ID NO: 791443 - RNA, 22 nt, Human
ugccaucacugaacuucugaaa

SEQ ID NO: 791444 - RNA, 22 nt, Human
ugcaggcugugucauuuaguga

SEQ ID NO: 791445 - RNA, 22 nt, Human
guccuggaguggcauggcaugg

SEQ ID NO: 791446 - RNA, 22 nt, Human
caggaagauuagaccaagagcu

SEQ ID NO: 791447 - RNA, 22 nt, Human
aagagguugucugugaugaguu

SEQ ID NO: 791448 - RNA, 18 nt, Human
gcugagguggugucagag

SEQ ID NO: 791449 - RNA, 22 nt, Human
uuuaccaaaguacucugaggca

SEQ ID NO: 791450 - RNA, 22 nt, Human
ccagccuccauguagauagcug

SEQ ID NO: 791451 - RNA, 21 nt, Human
cacacagcugcccuuagguag

SEQ ID NO: 791452 - RNA, 22 nt, Human
cauucacauucuucuuacuguu

SEQ ID NO: 791453 - RNA, 22 nt, Human
cugcugugugaccauggacagg

SEQ ID NO: 791454 - RNA, 23 nt, Human
agaauuucaaaguccagcacauu

SEQ ID NO: 791455 - RNA, 22 nt, Human
uagccaggcgaggucagugucg

SEQ ID NO: 791456 - RNA, 22 nt, Human
ucaagagaagugcuccacagua

SEQ ID NO: 791457 - RNA, 22 nt, Human
ucuggaguuugaggacaagcuu

SEQ ID NO: 791458 - RNA, 22 nt, Human
uggcuauugagugaucucuaga

SEQ ID NO: 791459 - RNA, 22 nt, Human
cagcuucagaagaagccgugag

SEQ ID NO: 791460 - RNA, 22 nt, Human
ugacaauugugggcaguuugug

SEQ ID NO: 791461 - RNA, 22 nt, Human
ggcuggcuaucugugguugccu

SEQ ID NO: 791462 - RNA, 22 nt, Human
uuucuuuaggcuguguugccaa

SEQ ID NO: 791463 - RNA, 22 nt, Human
guaggcagguggaggagugaag

SEQ ID NO: 791464 - RNA, 22 nt, Human
uacuguuuuuaaaauugcaucc

SEQ ID NO: 791465 - RNA, 22 nt, Human
uucaauaucucuaagaaugagg

SEQ ID NO: 791466 - RNA, 22 nt, Human
augguggugaagagcacaguga

SEQ ID NO: 791467 - RNA, 22 nt, Human
aggagaaggaggccccucacac

SEQ ID NO: 791468 - RNA, 22 nt, Human
acauuuuuggguugaugucuga

SEQ ID NO: 791469 - RNA, 22 nt, Human
cauguguguggcugacaauuuu

SEQ ID NO: 791470 - RNA, 22 nt, Human
cgccaggcuugguagcucaugc

SEQ ID NO: 791471 - RNA, 22 nt, Human
uguaauauauauaacugugugc

SEQ ID NO: 791472 - RNA, 22 nt, Human
caggagagauaugaguccccac

SEQ ID NO: 791473 - RNA, 22 nt, Human
accagcuggucaccugggcacu

SEQ ID NO: 791474 - RNA, 20 nt, Human
agugaguuaucagcuacagu

SEQ ID NO: 791475 - RNA, 21 nt, Human
uccagcugcacaagcaugggg

SEQ ID NO: 791476 - RNA, 22 nt, Human
accuucauauucucugauaccu

SEQ ID NO: 791477 - RNA, 22 nt, Human
caaaguggcuggccgggagauc

SEQ ID NO: 791478 - RNA, 22 nt, Human
auauguauguacgcacauauuc

SEQ ID NO: 791479 - RNA, 22 nt, Human
agggccucucugggccuuuccu

SEQ ID NO: 791480 - RNA, 22 nt, Human
gccaggcagacaggucaucagg

SEQ ID NO: 791481 - RNA, 22 nt, Human
uucaagucagagcaagccaagu

SEQ ID NO: 791482 - RNA, 22 nt, Human
gcucaggaaauaguuuaguguu

SEQ ID NO: 791483 - RNA, 22 nt, Human
uauauuaaacccucucuguagg

SEQ ID NO: 791484 - RNA, 22 nt, Human
ugugggagaaggaagcaagcug

SEQ ID NO: 791485 - RNA, 22 nt, Human
uagggggcuguccugugcauua

SEQ ID NO: 791486 - RNA, 20 nt, Human
caggaggcaaggucaagguc

SEQ ID NO: 791487 - RNA, 22 nt, Human
gcugugauccuugagagaaggu

SEQ ID NO: 791488 - RNA, 22 nt, Human
ggccacuguuuccugggcaguu

SEQ ID NO: 791489 - RNA, 22 nt, Human
uuaccaaugugcuuuugcuaca

SEQ ID NO: 791490 - RNA, 22 nt, Human
cacaguaacuccugaccccucg

SEQ ID NO: 791491 - RNA, 22 nt, Human
ugagcugcaagaaaauuucagu

SEQ ID NO: 791492 - RNA, 22 nt, Human
aucaacuuguccuugauguuaa

SEQ ID NO: 791493 - RNA, 23 nt, Human
uccugagaugagacagugcugcc

SEQ ID NO: 791494 - RNA, 22 nt, Human
ccuccuggugggcgcuucuggc

SEQ ID NO: 791495 - RNA, 22 nt, Human
aggagauaagaggcuggugugg

SEQ ID NO: 791496 - RNA, 22 nt, Human
auuguauaagucuauuuacaau

SEQ ID NO: 791497 - RNA, 22 nt, Human
uuauucuuuaaacauauauguu

SEQ ID NO: 791498 - RNA, 22 nt, Human
guggggagcagccuuagccccu

SEQ ID NO: 791499 - RNA, 22 nt, Human
accuccccgggagcagccuccu

SEQ ID NO: 791500 - RNA, 22 nt, Human
uucugcuuuuagcuaaacuaua

SEQ ID NO: 791501 - RNA, 22 nt, Human
gugugcugcccaacucgcagau

SEQ ID NO: 791502 - RNA, 19 nt, Human
cccucuugcacaaagcaaa

SEQ ID NO: 791503 - RNA, 22 nt, Human
uugccaggagcucaucugaggg

SEQ ID NO: 791504 - RNA, 22 nt, Human
aagaagaaguguuauuuuuaga

SEQ ID NO: 791505 - RNA, 22 nt, Human
gaggcuggaggucaaagaugaa

SEQ ID NO: 791506 - RNA, 22 nt, Human
uaacauugaguccacuaaacag

SEQ ID NO: 791507 - RNA, 22 nt, Human
uuccgagggcucggcggccgcc

SEQ ID NO: 791508 - RNA, 22 nt, Human
cauuuggauuuugaagagagua

SEQ ID NO: 791509 - RNA, 22 nt, Human
ucacuucuucagcuuuccuuga

SEQ ID NO: 791510 - RNA, 22 nt, Human
gcagaggacucaaucaagguau

SEQ ID NO: 791511 - RNA, 22 nt, Human
uacaagagacaccagggaggcu

SEQ ID NO: 791512 - RNA, 22 nt, Human
ugccaggcccugugcuggaugc

SEQ ID NO: 791513 - RNA, 22 nt, Human
uggccacccagcugacgccuuc

SEQ ID NO: 791514 - RNA, 22 nt, Human
cagcagcugguugaauccuucu

SEQ ID NO: 791515 - RNA, 22 nt, Human
aggaggguacaauggguggaaa

SEQ ID NO: 791516 - RNA, 22 nt, Human
gcugggcugagaaguuaagcaa

SEQ ID NO: 791517 - RNA, 22 nt, Human
uggguagcagggcugagcugug

SEQ ID NO: 791518 - RNA, 22 nt, Human
aagccaggcaugcuuggacagu

SEQ ID NO: 791519 - RNA, 22 nt, Human
ucuuuggcuuugccacacccaa

SEQ ID NO: 791520 - RNA, 22 nt, Human
ccucugcaucuggcugcugcag

SEQ ID NO: 791521 - RNA, 22 nt, Human
uacaaaacagugcucugguccu

SEQ ID NO: 791522 - RNA, 22 nt, Human
aguagcagaaggucuugaaggg

SEQ ID NO: 791523 - RNA, 22 nt, Human
cauggcuucgucacagagggca

SEQ ID NO: 791524 - RNA, 22 nt, Human
aggagaaagacuggacagccaa

SEQ ID NO: 791525 - RNA, 22 nt, Human
aaggccaggucccugcagugca

SEQ ID NO: 791526 - RNA, 22 nt, Human
ugggccuggcccuguggaggag

SEQ ID NO: 791527 - RNA, 22 nt, Human
gcaguggccacauggaggagga

SEQ ID NO: 791528 - RNA, 22 nt, Human
gaauaauuuugaucagaaggga

SEQ ID NO: 791529 - RNA, 22 nt, Human
cuggcaggaagaggaaagguca

SEQ ID NO: 791530 - RNA, 22 nt, Human
ggaggguccccagcagcaugaa

SEQ ID NO: 791531 - RNA, 22 nt, Human
aaggcagcaagaauuccagguu

SEQ ID NO: 791532 - RNA, 22 nt, Human
ugauaugcauguaagggagaca

SEQ ID NO: 791533 - RNA, 22 nt, Human
aguuucuuuagauagaaaguuc

SEQ ID NO: 791534 - RNA, 22 nt, Human
ugaggucaccuggaggcagccu

SEQ ID NO: 791535 - RNA, 22 nt, Human
aacccaggagauggagguugug

SEQ ID NO: 791536 - RNA, 22 nt, Human
uuacagagccucauuuuagaga

SEQ ID NO: 791537 - RNA, 22 nt, Human
ccaguuuaagacuuaucucaau

SEQ ID NO: 791538 - RNA, 22 nt, Human
guuuacugucuugcacagugca

SEQ ID NO: 791539 - RNA, 22 nt, Human
uggcuggcaguaggcuaguggc

SEQ ID NO: 791540 - RNA, 22 nt, Human
uugggaaacaguauagcuaaca

SEQ ID NO: 791541 - RNA, 20 nt, Human
agcaagaguaaggacagcga

SEQ ID NO: 791542 - RNA, 22 nt, Human
ugcaaaucauaaacaauagugu

SEQ ID NO: 791543 - RNA, 22 nt, Human
guuucugauucuagaggcaggc

SEQ ID NO: 791544 - RNA, 22 nt, Human
aggcagcccugugcuggaugcu

SEQ ID NO: 791545 - RNA, 22 nt, Human
acuaaauacacacauuuguuca

SEQ ID NO: 791546 - RNA, 22 nt, Human
uacacugugagguuuccaaggg

SEQ ID NO: 791547 - RNA, 19 nt, Human
gcacacccugcaccaccau

SEQ ID NO: 791548 - RNA, 19 nt, Human
acuaaaaaugauguuugag

SEQ ID NO: 791549 - RNA, 22 nt, Human
aaaugucuguuagucauaucau

SEQ ID NO: 791550 - RNA, 18 nt, Human
gcacugaggaaaaccucu

SEQ ID NO: 791551 - RNA, 22 nt, Human
uuguuuuuaaacaugugacuga

SEQ ID NO: 791552 - RNA, 22 nt, Human
gcuggagucuggaggugugcca

SEQ ID NO: 791553 - RNA, 22 nt, Human
gucaggagagaccuguucuccu

SEQ ID NO: 791554 - RNA, 22 nt, Human
ugcaaacuagcaucaacuagua

SEQ ID NO: 791555 - RNA, 22 nt, Human
aggcuccguccagucucaggcc

SEQ ID NO: 791556 - RNA, 22 nt, Human
ccuggagaggcgcugcagagga

SEQ ID NO: 791557 - RNA, 22 nt, Human
guaaauguuugcugaugauucu

SEQ ID NO: 791558 - RNA, 22 nt, Human
gagggcucugucuggaagggaa

SEQ ID NO: 791559 - RNA, 22 nt, Human
aacuuacaauguuagagucuca

SEQ ID NO: 791560 - RNA, 22 nt, Human
uugucugauguucccucaugau

SEQ ID NO: 791561 - RNA, 22 nt, Human
ucauucucagacucuuggccuc

SEQ ID NO: 791562 - RNA, 22 nt, Human
aggcccaguagugcugccuuua

SEQ ID NO: 791563 - RNA, 22 nt, Human
gaggcauggccugaggcuagga

SEQ ID NO: 791564 - RNA, 22 nt, Human
aagucagaaauaucugccauca

SEQ ID NO: 791565 - RNA, 22 nt, Human
aaagccagagcaagcugucaca

SEQ ID NO: 791566 - RNA, 22 nt, Human
uuacaacagacacauauucuaa

SEQ ID NO: 791567 - RNA, 23 nt, Human
aggcugagcucucccagcuucag

SEQ ID NO: 791568 - RNA, 21 nt, Human
augccaaacuucuucugcccu

SEQ ID NO: 791569 - RNA, 20 nt, Human
gcccaagcgccggccgcaga

SEQ ID NO: 791570 - RNA, 22 nt, Human
gcagccagccccucugaccucu

SEQ ID NO: 791571 - RNA, 22 nt, Human
ucagaaguccccagucaaggag

SEQ ID NO: 791572 - RNA, 22 nt, Human
uacuuucauggguuuucuuuau

SEQ ID NO: 791573 - RNA, 22 nt, Human
uccagcagugcucuagagcgug

SEQ ID NO: 791574 - RNA, 22 nt, Human
uggcuucaggagcaccuggcuu

SEQ ID NO: 791575 - RNA, 22 nt, Human
ccagcugagaaguguaaaguga

SEQ ID NO: 791576 - RNA, 22 nt, Human
uuccaggaccaggaagagggga

SEQ ID NO: 791577 - RNA, 22 nt, Human
uauaauuuaucaugucacaguu

SEQ ID NO: 791578 - RNA, 22 nt, Human
cugcccccaggcugcauggcug

SEQ ID NO: 791579 - RNA, 22 nt, Human
accugccuaguugguucugccc

SEQ ID NO: 791580 - RNA, 22 nt, Human
uguuuacaugcauaagcuuaag

SEQ ID NO: 791581 - RNA, 22 nt, Human
cacacaggaugaagcagcagaa

SEQ ID NO: 791582 - RNA, 22 nt, Human
uucuuacagaguuuacagagcc

SEQ ID NO: 791583 - RNA, 22 nt, Human
ggcaguguuuauggguaacaca

SEQ ID NO: 791584 - RNA, 22 nt, Human
acauauauguaaaguacuuugu

SEQ ID NO: 791585 - RNA, 22 nt, Human
uugaggagucaggggcacggaa

SEQ ID NO: 791586 - RNA, 22 nt, Human
aggcagguagaaggaucuuuau

SEQ ID NO: 791587 - RNA, 21 nt, Human
cagaaguaaggguaacuucuc

SEQ ID NO: 791588 - RNA, 20 nt, Human
gcuggaagggcuagagggcu

SEQ ID NO: 791589 - RNA, 22 nt, Human
uggcccugugacugaguucuag

SEQ ID NO: 791590 - RNA, 22 nt, Human
augcaagacauaaauaaucuuu

SEQ ID NO: 791591 - RNA, 22 nt, Human
uccucuucuaagcucauucagg

SEQ ID NO: 791592 - RNA, 22 nt, Human
uuuguacacaggauguuauaau

SEQ ID NO: 791593 - RNA, 22 nt, Human
ugggaggaucucuugaggccag

SEQ ID NO: 791594 - RNA, 22 nt, Human
uggugggacaucugaggagagg

SEQ ID NO: 791595 - RNA, 22 nt, Human
ugaaaagucuuauauugucuga

SEQ ID NO: 791596 - RNA, 22 nt, Human
uuuggacaaaugucugacuuuc

SEQ ID NO: 791597 - RNA, 19 nt, Human
cauaaauguacaagauaca

SEQ ID NO: 791598 - RNA, 22 nt, Human
cggcagggcuccaugcauuucu

SEQ ID NO: 791599 - RNA, 22 nt, Human
ugcaagagguuggauuuuaaga

SEQ ID NO: 791600 - RNA, 22 nt, Human
aaagcucucccacuguaugaag

SEQ ID NO: 791601 - RNA, 22 nt, Human
aggcuggaaagggaccagagug

SEQ ID NO: 791602 - RNA, 22 nt, Human
aacaaucaaguuucuaaaugac

SEQ ID NO: 791603 - RNA, 22 nt, Human
ucuucagagugagcagugucau

SEQ ID NO: 791604 - RNA, 20 nt, Human
gcagagcuguucugugggga

SEQ ID NO: 791605 - RNA, 22 nt, Human
ugaaagcacucacuucugcucu

SEQ ID NO: 791606 - RNA, 22 nt, Human
aauauuucuguagcuauguucu

SEQ ID NO: 791607 - RNA, 22 nt, Human
gcagggcuccacuguggccaag

SEQ ID NO: 791608 - RNA, 22 nt, Human
uagugucaaacagggauuagaa

SEQ ID NO: 791609 - RNA, 22 nt, Human
ugguggaggugcauuucggagc

SEQ ID NO: 791610 - RNA, 22 nt, Human
gcugggcaggccucgugagggc

SEQ ID NO: 791611 - RNA, 22 nt, Human
agucucuuccucaugcauaugu

SEQ ID NO: 791612 - RNA, 22 nt, Human
cccuguccuuggcugugaggcu

SEQ ID NO: 791613 - RNA, 22 nt, Human
aagcagaauuucccacuaguug

SEQ ID NO: 791614 - RNA, 22 nt, Human
gcuuuggagggcaagagcuguu

SEQ ID NO: 791615 - RNA, 22 nt, Human
cugugagauuuuuaaauaacuu

SEQ ID NO: 791616 - RNA, 22 nt, Human
gcaggcuccaaggccugggaga

SEQ ID NO: 791617 - RNA, 22 nt, Human
agcccggcuuccccgguugcua

SEQ ID NO: 791618 - RNA, 22 nt, Human
cuggcuucccugucuuauggaa

SEQ ID NO: 791619 - RNA, 22 nt, Human
ggaccaggacuggugguaucuc

SEQ ID NO: 791620 - RNA, 22 nt, Human
acagaggccaugagcugccacc

SEQ ID NO: 791621 - RNA, 22 nt, Human
gaggugggagggcagucccuaa

SEQ ID NO: 791622 - RNA, 22 nt, Human
agugucugcucagacagcuaca

SEQ ID NO: 791623 - RNA, 19 nt, Human
acauagcuggcuacacugu

SEQ ID NO: 791624 - RNA, 22 nt, Human
agggaaagguagugaggucaca

SEQ ID NO: 791625 - RNA, 22 nt, Human
ucaagauaagucaguauaucaa

SEQ ID NO: 791626 - RNA, 22 nt, Human
ccugggguauauaggugaauau

SEQ ID NO: 791627 - RNA, 22 nt, Human
uucaaguuaccuuuaaacagcu

SEQ ID NO: 791628 - RNA, 22 nt, Human
aggucuggugagagcaggugcu

SEQ ID NO: 791629 - RNA, 22 nt, Human
gggggagaagauucugcugcuu

SEQ ID NO: 791630 - RNA, 22 nt, Human
gcacagggcccugugcguaggu

SEQ ID NO: 791631 - RNA, 20 nt, Human
acauagcuauagaaagucga

SEQ ID NO: 791632 - RNA, 22 nt, Human
aguuuuauuccaaugugcagca

SEQ ID NO: 791633 - RNA, 20 nt, Human
uuuauucagccuacccucuu

SEQ ID NO: 791634 - RNA, 22 nt, Human
guucacagucuacauaguaaag

SEQ ID NO: 791635 - RNA, 22 nt, Human
acaugcaaaugugcaugcaugu

SEQ ID NO: 791636 - RNA, 22 nt, Human
cucuuugguuaaucacacagau

SEQ ID NO: 791637 - RNA, 22 nt, Human
caagauaauuuauucugaguuu

SEQ ID NO: 791638 - RNA, 22 nt, Human
aguggcuuaucugggacagcua

SEQ ID NO: 791639 - RNA, 20 nt, Human
acucuguagguaaugagacu

SEQ ID NO: 791640 - RNA, 22 nt, Human
aaagucuucacggcacuagugu

SEQ ID NO: 791641 - RNA, 22 nt, Human
caggcuggaguuaccuuuaggg

SEQ ID NO: 791642 - RNA, 22 nt, Human
ugcagggucucugcaaaugagg

SEQ ID NO: 791643 - RNA, 22 nt, Human
ugcaggagcccuugggcucugg

SEQ ID NO: 791644 - RNA, 22 nt, Human
uguaauauuguagugacaguac

SEQ ID NO: 791645 - RNA, 23 nt, Human
uagggcagcugggagggacaugc

SEQ ID NO: 791646 - RNA, 22 nt, Human
gcacugagcaccagccacagau

SEQ ID NO: 791647 - RNA, 22 nt, Human
uugaaugaauucuacuuccaga

SEQ ID NO: 791648 - RNA, 22 nt, Human
uuagcuuuucacuugcauuauc

SEQ ID NO: 791649 - RNA, 22 nt, Human
gcagguggaagcagcagacuca

SEQ ID NO: 791650 - RNA, 22 nt, Human
gccaggcagauaugugagcuua

SEQ ID NO: 791651 - RNA, 22 nt, Human
acugccugcuccuggcuccaca

SEQ ID NO: 791652 - RNA, 22 nt, Human
acaacaguaggaaaacaugucu

SEQ ID NO: 791653 - RNA, 22 nt, Human
agaaacauuuagauuauauguc

SEQ ID NO: 791654 - RNA, 22 nt, Human
aagcaggcauuccagagacaau

SEQ ID NO: 791655 - RNA, 22 nt, Human
uggcuugguaaggaccagcagg

SEQ ID NO: 791656 - RNA, 22 nt, Human
gaggcugcuguuagcccugggc

SEQ ID NO: 791657 - RNA, 22 nt, Human
gugggggcuggaaaucuugcca

SEQ ID NO: 791658 - RNA, 22 nt, Human
aacauuuguuuggcuucaauua

SEQ ID NO: 791659 - RNA, 22 nt, Human
gacccaggagagaggguugcau

SEQ ID NO: 791660 - RNA, 22 nt, Human
ccuuggcuaggcagcggcuguc

SEQ ID NO: 791661 - RNA, 22 nt, Human
auauucacugagcauaaagcca

SEQ ID NO: 791662 - RNA, 22 nt, Human
agucuagcuuaggagccuagcu

SEQ ID NO: 791663 - RNA, 22 nt, Human
auuuauuaugggauuuggcuca

SEQ ID NO: 791664 - RNA, 22 nt, Human
cauggcagaaaccugagcugcu

SEQ ID NO: 791665 - RNA, 22 nt, Human
uuggcauaccuuagugguggag

SEQ ID NO: 791666 - RNA, 19 nt, Human
ccauggcaaugaucugaug

SEQ ID NO: 791667 - RNA, 22 nt, Human
ccaauuuuauucuucugcaagu

SEQ ID NO: 791668 - RNA, 22 nt, Human
cagcuucuccagaugacccuca

SEQ ID NO: 791669 - RNA, 22 nt, Human
caggcugucugaauggaggccc

SEQ ID NO: 791670 - RNA, 22 nt, Human
aagcuuugacuacugccucuug

SEQ ID NO: 791671 - RNA, 22 nt, Human
ggcugccugcuccuccugcacg

SEQ ID NO: 791672 - RNA, 22 nt, Human
aguuucuauguaagcuacguga

SEQ ID NO: 791673 - RNA, 22 nt, Human
uuuacagcuucuauacuaugug

SEQ ID NO: 791674 - RNA, 22 nt, Human
uuaacacagggggagacaaagu

SEQ ID NO: 791675 - RNA, 22 nt, Human
uucugggcccaacccuagagug

SEQ ID NO: 791676 - RNA, 22 nt, Human
uucuggauguuguagucugaga

SEQ ID NO: 791677 - RNA, 22 nt, Human
ugggccaggucugugucagcug

SEQ ID NO: 791678 - RNA, 22 nt, Human
uucacagugagcuaugucuugu

SEQ ID NO: 791679 - RNA, 22 nt, Human
gagcuaagagucuagaaaggcu

SEQ ID NO: 791680 - RNA, 22 nt, Human
caggccugucugcacaugaggc

SEQ ID NO: 791681 - RNA, 18 nt, Human
uccugccugugccccagg

SEQ ID NO: 791682 - RNA, 22 nt, Human
uuuggaaucauagauauauuca

SEQ ID NO: 791683 - RNA, 22 nt, Human
ucauggcacuuagugucucaaa

SEQ ID NO: 791684 - RNA, 22 nt, Human
aacuauguuaauaaguuucauu

SEQ ID NO: 791685 - RNA, 22 nt, Human
accuucaaguaugugggcugaa

SEQ ID NO: 791686 - RNA, 22 nt, Human
guggucagagaugacagugggu

SEQ ID NO: 791687 - RNA, 22 nt, Human
aaauaauugaguuggucaauau

SEQ ID NO: 791688 - RNA, 20 nt, Human
gagagcuggggaugaggcug

SEQ ID NO: 791689 - RNA, 22 nt, Human
ucagagaaaugcugagcucaug

SEQ ID NO: 791690 - RNA, 22 nt, Human
ugcaaauuugacuucacacauc

SEQ ID NO: 791691 - RNA, 22 nt, Human
ugucauggcacuagaguggggu

SEQ ID NO: 791692 - RNA, 22 nt, Human
ucagucuucuagcaaauccagg

SEQ ID NO: 791693 - RNA, 22 nt, Human
cuaaauguucacaugcaauuuu

SEQ ID NO: 791694 - RNA, 22 nt, Human
auuauuaugguugcucuuuucc

SEQ ID NO: 791695 - RNA, 22 nt, Human
cuuguggccaauguuuguuaua

SEQ ID NO: 791696 - RNA, 22 nt, Human
cccacagguccccaugaacucg

SEQ ID NO: 791697 - RNA, 22 nt, Human
uaugagaagaacaggugacuuu

SEQ ID NO: 791698 - RNA, 22 nt, Human
guuguuuugcugucugucuuag

SEQ ID NO: 791699 - RNA, 22 nt, Human
gggguagggugauugugaagua

SEQ ID NO: 791700 - RNA, 22 nt, Human
uuucacaauuuuaaggagcaaa

SEQ ID NO: 791701 - RNA, 22 nt, Human
guuuacuggagaagaugaccug

SEQ ID NO: 791702 - RNA, 22 nt, Human
uuucuuccaaaggcacguucuc

SEQ ID NO: 791703 - RNA, 22 nt, Human
gaacaaagacauggaggaggau

SEQ ID NO: 791704 - RNA, 19 nt, Human
ucuaaacuagucccauaac

SEQ ID NO: 791705 - RNA, 22 nt, Human
uaguuuguagaaaucuagaaau

SEQ ID NO: 791706 - RNA, 22 nt, Human
aagcugugugcagaugaucuca

SEQ ID NO: 791707 - RNA, 22 nt, Human
acaugagaggcuguggaguaca

SEQ ID NO: 791708 - RNA, 22 nt, Human
guuuacauuaaguauuagcauc

SEQ ID NO: 791709 - RNA, 22 nt, Human
aaauaagugugggccagucaaa

SEQ ID NO: 791710 - RNA, 22 nt, Human
uucuauugcacacaaauaauua

SEQ ID NO: 791711 - RNA, 22 nt, Human
uuuacacugcuugaacaaucuc

SEQ ID NO: 791712 - RNA, 22 nt, Human
uuauugagcaccuacuaugugu

SEQ ID NO: 791713 - RNA, 22 nt, Human
agaaaaggauugauggaucaga

SEQ ID NO: 791714 - RNA, 22 nt, Human
aguauuugaucagaugauagua

SEQ ID NO: 791715 - RNA, 20 nt, Human
auacacauauucuugcaacu

SEQ ID NO: 791716 - RNA, 22 nt, Human
cccagcaucccagugggcagca

SEQ ID NO: 791717 - RNA, 22 nt, Human
ccauccagaccaguccaugggu

SEQ ID NO: 791718 - RNA, 22 nt, Human
gcagcuucaguaggugaagaca

SEQ ID NO: 791719 - RNA, 22 nt, Human
uucuggaauucuugcagccacu

SEQ ID NO: 791720 - RNA, 22 nt, Human
auaguuuucuaugcacuguuau

SEQ ID NO: 791721 - RNA, 22 nt, Human
uauucacaggcuggagugaugu

SEQ ID NO: 791722 - RNA, 19 nt, Human
uaaaaugucuguggucagu

SEQ ID NO: 791723 - RNA, 22 nt, Human
aacaagcagaugcaaugcacuu

SEQ ID NO: 791724 - RNA, 22 nt, Human
ugugugaggugguucugagaag

SEQ ID NO: 791725 - RNA, 22 nt, Human
uuucuuccuuaccuuacuagag

SEQ ID NO: 791726 - RNA, 22 nt, Human
acccuggagcuuuucuggcccu

SEQ ID NO: 791727 - RNA, 22 nt, Human
cuggcccagucucagaguguca

SEQ ID NO: 791728 - RNA, 22 nt, Human
cugaggcuuugugugcaugccu

SEQ ID NO: 791729 - RNA, 22 nt, Human
ggugggagugggcacaguuacg

SEQ ID NO: 791730 - RNA, 19 nt, Human
uuucuaagcuaaaugcuuc

SEQ ID NO: 791731 - RNA, 22 nt, Human
uaucauuuguuauuauuagugg

SEQ ID NO: 791732 - RNA, 22 nt, Human
ccugcagcccuucaaaggcuga

SEQ ID NO: 791733 - RNA, 22 nt, Human
aucaaaguaggcauauguuuuu

SEQ ID NO: 791734 - RNA, 21 nt, Human
aaaaggaaggucuguuugggg

SEQ ID NO: 791735 - RNA, 22 nt, Human
aggcccagagagccaguuagug

SEQ ID NO: 791736 - RNA, 22 nt, Human
acaaaauuguguuaaacuuuau

SEQ ID NO: 791737 - RNA, 22 nt, Human
uuuaaaauuuagaccucuccac

SEQ ID NO: 791738 - RNA, 22 nt, Human
gaggccaggaagcccaagauca

SEQ ID NO: 791739 - RNA, 22 nt, Human
cuggcuccauccuugagcucug

SEQ ID NO: 791740 - RNA, 21 nt, Human
ugugccagggauggggagccc

SEQ ID NO: 791741 - RNA, 21 nt, Human
uaucaagauguuaugguugaa

SEQ ID NO: 791742 - RNA, 22 nt, Human
uuggaacaugccgggguccagg

SEQ ID NO: 791743 - RNA, 22 nt, Human
gccagagagagucccugggccu

SEQ ID NO: 791744 - RNA, 22 nt, Human
agcuggcauacuuugcuaggaa

SEQ ID NO: 791745 - RNA, 22 nt, Human
uacuguucaugccuucauaaag

SEQ ID NO: 791746 - RNA, 22 nt, Human
gcugcuggcgcugggcguccgg

SEQ ID NO: 791747 - RNA, 22 nt, Human
agggucucuggagagcugagga

SEQ ID NO: 791748 - RNA, 22 nt, Human
uuauucagcauuuagaggaagg

SEQ ID NO: 791749 - RNA, 22 nt, Human
ugcaggcucucugcugccagau

SEQ ID NO: 791750 - RNA, 22 nt, Human
acuuggccuuauuuccacagaa

SEQ ID NO: 791751 - RNA, 22 nt, Human
aaagaagauggagaccugacua

SEQ ID NO: 791752 - RNA, 22 nt, Human
uaggguggagacuggaagcagg

SEQ ID NO: 791753 - RNA, 22 nt, Human
auauuuucacugaaccaaagua

SEQ ID NO: 791754 - RNA, 22 nt, Human
caggcagcugcuggguucagcc

SEQ ID NO: 791755 - RNA, 22 nt, Human
aagucaauuaguaaacuuggaa

SEQ ID NO: 791756 - RNA, 22 nt, Human
uagugucaucguugcagcugag

SEQ ID NO: 791757 - RNA, 22 nt, Human
gucuuuauuugagauugucauu

SEQ ID NO: 791758 - RNA, 22 nt, Human
acacagaguuugacacauggga

SEQ ID NO: 791759 - RNA, 19 nt, Human
cagaggccagaagcacagg

SEQ ID NO: 791760 - RNA, 22 nt, Human
ggcacagcacaguggacccagg

SEQ ID NO: 791761 - RNA, 22 nt, Human
caaggcugagaaauucugcccu

SEQ ID NO: 791762 - RNA, 22 nt, Human
agacuguaauugacaugucagc

SEQ ID NO: 791763 - RNA, 22 nt, Human
agaaauucaauucuaauuagcu

SEQ ID NO: 791764 - RNA, 22 nt, Human
auguuuuccccaaaugaucuuc

SEQ ID NO: 791765 - RNA, 22 nt, Human
uaucacaucaauguuuuaaaau

SEQ ID NO: 791766 - RNA, 22 nt, Human
acuggcuggaguugccaaggcu

SEQ ID NO: 791767 - RNA, 22 nt, Human
cuucuucagcacaauauugaug

SEQ ID NO: 791768 - RNA, 22 nt, Human
uuucuagacauuucuauguaca

SEQ ID NO: 791769 - RNA, 22 nt, Human
gggaggagcuuggagauucacu

SEQ ID NO: 791770 - RNA, 22 nt, Human
uuuuggcucugucuguaucuuu

SEQ ID NO: 791771 - RNA, 22 nt, Human
agaagcaaggucugucaguaua

SEQ ID NO: 791772 - RNA, 18 nt, Human
ugggcugccuggccucug

SEQ ID NO: 791773 - RNA, 20 nt, Human
cucaguguauucugggugcu

SEQ ID NO: 791774 - RNA, 22 nt, Human
acccagcaugacaccugcacau

SEQ ID NO: 791775 - RNA, 21 nt, Human
cagagggccggcauguggucu

SEQ ID NO: 791776 - RNA, 22 nt, Human
ggccagcuggaugugggugacg

SEQ ID NO: 791777 - RNA, 22 nt, Human
agguggcugguccaggcugcag

SEQ ID NO: 791778 - RNA, 22 nt, Human
ucaguguuuauucaauguuauu

SEQ ID NO: 791779 - RNA, 22 nt, Human
guggcgaggggagguccuggcg

SEQ ID NO: 791780 - RNA, 22 nt, Human
caggccugguugagcccugaga

SEQ ID NO: 791781 - RNA, 19 nt, Human
uuuggacagaguguccagg

SEQ ID NO: 791782 - RNA, 23 nt, Human
ggucacuggcaagcagugcagag

SEQ ID NO: 791783 - RNA, 22 nt, Human
ucaaagauugaaacuaaggaga

SEQ ID NO: 791784 - RNA, 22 nt, Human
gagagcaauggggacgggcagg

SEQ ID NO: 791785 - RNA, 22 nt, Human
cuucucucggugcaucccucac

SEQ ID NO: 791786 - RNA, 22 nt, Human
ggcaaacagacuugaccaucuu

SEQ ID NO: 791787 - RNA, 22 nt, Human
uauuaacauuuuaugaaaauaa

SEQ ID NO: 791788 - RNA, 22 nt, Human
acagcaggaauuaacauauaag

SEQ ID NO: 791789 - RNA, 22 nt, Human
aggcagagcugauguucuguga

SEQ ID NO: 791790 - RNA, 22 nt, Human
gccaggcuggaaagaacagaca

SEQ ID NO: 791791 - RNA, 21 nt, Human
aaggcagaagcauggaaugag

SEQ ID NO: 791792 - RNA, 22 nt, Human
uggccagucuguggaagccagg

SEQ ID NO: 791793 - RNA, 22 nt, Human
cuuaaauccaucauuucuaauc

SEQ ID NO: 791794 - RNA, 22 nt, Human
cuggccuggagccucugggugg

SEQ ID NO: 791795 - RNA, 22 nt, Human
cucacagguuaguuguguggau

SEQ ID NO: 791796 - RNA, 22 nt, Human
agcugcugcgccucacccuggc

SEQ ID NO: 791797 - RNA, 21 nt, Human
ucccacagaaacugcgaaauu

SEQ ID NO: 791798 - RNA, 22 nt, Human
ggaggguggcagcguccugggc

SEQ ID NO: 791799 - RNA, 22 nt, Human
acuuucaaaagagaagucauga

SEQ ID NO: 791800 - RNA, 22 nt, Human
caacacauugaagcuaugauga

SEQ ID NO: 791801 - RNA, 22 nt, Human
cagagcuggcucugcauguaca

SEQ ID NO: 791802 - RNA, 22 nt, Human
ucacaguagccauuucaugagu

SEQ ID NO: 791803 - RNA, 22 nt, Human
gccccaggugguaaaccuaaga

SEQ ID NO: 791804 - RNA, 22 nt, Human
caggaaacggcuauucuuuugu

SEQ ID NO: 791805 - RNA, 22 nt, Human
gacacaggaaaagcuccagccc

SEQ ID NO: 791806 - RNA, 22 nt, Human
aggcuguggugcugaaggaggg

SEQ ID NO: 791807 - RNA, 22 nt, Human
ugagaggugaggcaugaggcau

SEQ ID NO: 791808 - RNA, 21 nt, Human
cuguuucuugugaagugacac

SEQ ID NO: 791809 - RNA, 22 nt, Human
aggcucugcuuuucuggauaua

SEQ ID NO: 791810 - RNA, 22 nt, Human
ucacagcuauucucauguauuu

SEQ ID NO: 791811 - RNA, 22 nt, Human
agaggaaguaaucaggaccugc

SEQ ID NO: 791812 - RNA, 22 nt, Human
ggacacuacaaucugccugcau

SEQ ID NO: 791813 - RNA, 22 nt, Human
gcacagaauaacacucugggcu

SEQ ID NO: 791814 - RNA, 22 nt, Human
caguugagucugcuagcuagga

SEQ ID NO: 791815 - RNA, 22 nt, Human
cugcagcuuaagggagggguug

SEQ ID NO: 791816 - RNA, 20 nt, Human
ccuccuggucaggugugcag

SEQ ID NO: 791817 - RNA, 22 nt, Human
ccaucuguaucugacaaauucu

SEQ ID NO: 791818 - RNA, 21 nt, Human
uccacaaguuagaaggaaauu

SEQ ID NO: 791819 - RNA, 22 nt, Human
uugguuuugaaauagcuuauug

SEQ ID NO: 791820 - RNA, 22 nt, Human
agaagggagagaaaguugguua

SEQ ID NO: 791821 - RNA, 22 nt, Human
ugccagcuagagaagcuagaaa

SEQ ID NO: 791822 - RNA, 22 nt, Human
uguucuuuagcagaccauguug

SEQ ID NO: 791823 - RNA, 22 nt, Human
cagucccagacccagaaggugg

SEQ ID NO: 791824 - RNA, 22 nt, Human
acaaauuuauugaagggcauau

SEQ ID NO: 791825 - RNA, 22 nt, Human
aaacagcuacuucuguauaaug

SEQ ID NO: 791826 - RNA, 22 nt, Human
gcaggugguggcgcgcgcccug

SEQ ID NO: 791827 - RNA, 22 nt, Human
gagcuugggugccaugcugagc

SEQ ID NO: 791828 - RNA, 20 nt, Human
cagaugggacguggaggagu

SEQ ID NO: 791829 - RNA, 23 nt, Human
gagugcagaauagacaugcagug

SEQ ID NO: 791830 - RNA, 22 nt, Human
acagcuggaggccccauugucc

SEQ ID NO: 791831 - RNA, 22 nt, Human
aggcacagggaugcggagccag

SEQ ID NO: 791832 - RNA, 22 nt, Human
ccaucccugggccauguccccu

SEQ ID NO: 791833 - RNA, 22 nt, Human
cugagccaaccacagcaggagc

SEQ ID NO: 791834 - RNA, 22 nt, Human
acauuguuugagaauacagaug

SEQ ID NO: 791835 - RNA, 22 nt, Human
gucuuucucuggaacaguaaaa

SEQ ID NO: 791836 - RNA, 22 nt, Human
gcuccuggcauccugcuuuuaa

SEQ ID NO: 791837 - RNA, 22 nt, Human
cuggcagugacauugcaggugc

SEQ ID NO: 791838 - RNA, 22 nt, Human
cagugcugccaaagggaccuug

SEQ ID NO: 791839 - RNA, 22 nt, Human
auguuucaugacugagcaaaau

SEQ ID NO: 791840 - RNA, 22 nt, Human
agggagaguuugauguuuccuc

SEQ ID NO: 791841 - RNA, 17 nt, Human
ccuggcugggaaucuga

SEQ ID NO: 791842 - RNA, 22 nt, Human
aaaagucugcuuucuauuauca

SEQ ID NO: 791843 - RNA, 22 nt, Human
gccagcaguccugcugugugcc

SEQ ID NO: 791844 - RNA, 22 nt, Human
cuuaaauucuuaaugcccucau

SEQ ID NO: 791845 - RNA, 21 nt, Human
aguguuaauggaaauuauauu

SEQ ID NO: 791846 - RNA, 22 nt, Human
aagcaugggaggccuggaggag

SEQ ID NO: 791847 - RNA, 22 nt, Human
aauaagaacaacuaagguuuau

SEQ ID NO: 791848 - RNA, 22 nt, Human
aaagucauuggaauauuaauga

SEQ ID NO: 791849 - RNA, 22 nt, Human
ucuacaaagaagaauuaauguc

SEQ ID NO: 791850 - RNA, 19 nt, Human
uuuauucaccuuuaccuug

SEQ ID NO: 791851 - RNA, 22 nt, Human
uguuugucaucauugugagaga

SEQ ID NO: 791852 - RNA, 22 nt, Human
gcagcuguucagcuggccagau

SEQ ID NO: 791853 - RNA, 22 nt, Human
caucaaauaggaauauuuggca

SEQ ID NO: 791854 - RNA, 22 nt, Human
agaagcagacucugaggcaagg

SEQ ID NO: 791855 - RNA, 22 nt, Human
gggccucaccucuccaccgccu

SEQ ID NO: 791856 - RNA, 22 nt, Human
gcagguuauccaacuacaaugu

SEQ ID NO: 791857 - RNA, 22 nt, Human
ucagagaacugcagcccuuccu

SEQ ID NO: 791858 - RNA, 22 nt, Human
cagcuuuguccugcaaaccuga

SEQ ID NO: 791859 - RNA, 22 nt, Human
gguggcagcauggucccagugu

SEQ ID NO: 791860 - RNA, 22 nt, Human
ucaauuauuuuggcuaugcuaa

SEQ ID NO: 791861 - RNA, 22 nt, Human
uuguuuaaugccucauacaucu

SEQ ID NO: 791862 - RNA, 22 nt, Human
agaaguuugaaauuaggagaaa

SEQ ID NO: 791863 - RNA, 22 nt, Human
ucaggccaggagaucagauuga

SEQ ID NO: 791864 - RNA, 22 nt, Human
caaguccaagaucaagaagcca

SEQ ID NO: 791865 - RNA, 19 nt, Human
gaggcaaggaguuuaagcc

SEQ ID NO: 791866 - RNA, 22 nt, Human
aagaaaugugaauauugaauag

SEQ ID NO: 791867 - RNA, 22 nt, Human
ucccagcagagccagcaagccg

SEQ ID NO: 791868 - RNA, 22 nt, Human
gcaugcaaucuauccuuaggaa

SEQ ID NO: 791869 - RNA, 22 nt, Human
agggcagcaaugcagcugcugc

SEQ ID NO: 791870 - RNA, 22 nt, Human
cuuugcaugggucugaaggcuu

SEQ ID NO: 791871 - RNA, 22 nt, Human
auccugggcagugugucacucu

SEQ ID NO: 791872 - RNA, 22 nt, Human
cucuuaaagaauguuccagcug

SEQ ID NO: 791873 - RNA, 22 nt, Human
ucucuucuagcuucuugugguu

SEQ ID NO: 791874 - RNA, 22 nt, Human
auguuucuguccuacgagauaa

SEQ ID NO: 791875 - RNA, 22 nt, Human
uggcccugcuuaugucucucuu

SEQ ID NO: 791876 - RNA, 22 nt, Human
augcaaaucuuaaguaugugug

SEQ ID NO: 791877 - RNA, 21 nt, Human
ugcaggcugugcgcuccugcc

SEQ ID NO: 791878 - RNA, 22 nt, Human
cugagggccugaggaccuagau

SEQ ID NO: 791879 - RNA, 21 nt, Human
ccaggcuggccaugguauuga

SEQ ID NO: 791880 - RNA, 22 nt, Human
aagaauauagauuuuuugaagu

SEQ ID NO: 791881 - RNA, 22 nt, Human
ccugagucccauaauguugcca

SEQ ID NO: 791882 - RNA, 22 nt, Human
uacaguaaagcugcuaugaauu

SEQ ID NO: 791883 - RNA, 22 nt, Human
acuuccuagauacgagauugaa

SEQ ID NO: 791884 - RNA, 22 nt, Human
cacccuuugcugcucuuccucc

SEQ ID NO: 791885 - RNA, 22 nt, Human
aagauuuacuagcauaauagcu

SEQ ID NO: 791886 - RNA, 20 nt, Human
agucacaugcauacacaagu

SEQ ID NO: 791887 - RNA, 22 nt, Human
uucaguguaucuugucagggag

SEQ ID NO: 791888 - RNA, 16 nt, Human
acuuccaggggagccc

SEQ ID NO: 791889 - RNA, 20 nt, Human
gcucagggccugggucugga

SEQ ID NO: 791890 - RNA, 22 nt, Human
ucuauucugauaaaugcaugga

SEQ ID NO: 791891 - RNA, 22 nt, Human
gucaaaaaguagucauuucugu

SEQ ID NO: 791892 - RNA, 22 nt, Human
aacacugcuccaaaaaaggcuu

SEQ ID NO: 791893 - RNA, 22 nt, Human
agggccagccgacuuccagccu

SEQ ID NO: 791894 - RNA, 22 nt, Human
uuucaggaaacauuuaauggca

SEQ ID NO: 791895 - RNA, 22 nt, Human
ugaguucugacugugaugccag

SEQ ID NO: 791896 - RNA, 22 nt, Human
aaaauacuacugucuucuuccc

SEQ ID NO: 791897 - RNA, 22 nt, Human
acuuuacacaucuuuucucauu

SEQ ID NO: 791898 - RNA, 22 nt, Human
cuuggcugaacuccaggaugca

SEQ ID NO: 791899 - RNA, 22 nt, Human
ccagcugggauuaagggaaaau

SEQ ID NO: 791900 - RNA, 22 nt, Human
gauuuacagguuagguccugua

SEQ ID NO: 791901 - RNA, 22 nt, Human
aaaugucaaggugauagaugca

SEQ ID NO: 791902 - RNA, 22 nt, Human
cacagguguaugaauaugucca

SEQ ID NO: 791903 - RNA, 22 nt, Human
uccagcuuucacgcuccugccu

SEQ ID NO: 791904 - RNA, 22 nt, Human
cuucacauugggcuugauauga

SEQ ID NO: 791905 - RNA, 22 nt, Human
aucuccgccaucgcgaacgccu

SEQ ID NO: 791906 - RNA, 22 nt, Human
acucauuuaaacauuuacugaa

SEQ ID NO: 791907 - RNA, 22 nt, Human
uacauccaaaguugaggugccu

SEQ ID NO: 791908 - RNA, 22 nt, Human
ccagcagcugcaaagccugggu

SEQ ID NO: 791909 - RNA, 22 nt, Human
uugcugaaguugcucagcucca

SEQ ID NO: 791910 - RNA, 22 nt, Human
cugccugugauuuuucucuagu

SEQ ID NO: 791911 - RNA, 22 nt, Human
cagagcucagagcugccaggca

SEQ ID NO: 791912 - RNA, 22 nt, Human
aaccugcuuucucagagaaggg

SEQ ID NO: 791913 - RNA, 22 nt, Human
cagauaaauagacuuggucaga

SEQ ID NO: 791914 - RNA, 22 nt, Human
ucaaacagcaggucuuucauag

SEQ ID NO: 791915 - RNA, 22 nt, Human
uaaagacauaggaucagggaga

SEQ ID NO: 791916 - RNA, 22 nt, Human
uggccugcaaagucuucuugcu

SEQ ID NO: 791917 - RNA, 22 nt, Human
ggcaggggugaggccacucuga

SEQ ID NO: 791918 - RNA, 22 nt, Human
accucagagggauguuacaggc

SEQ ID NO: 791919 - RNA, 22 nt, Human
ugcguugcgcuccugcagcagg

SEQ ID NO: 791920 - RNA, 22 nt, Human
gucaccauugcccacuccaugg

SEQ ID NO: 791921 - RNA, 22 nt, Human
cacuugaaguuugggggacucu

SEQ ID NO: 791922 - RNA, 22 nt, Human
cauggccccaaaucccaugcau

SEQ ID NO: 791923 - RNA, 22 nt, Human
agagauugcuagcuggcuuuaa

SEQ ID NO: 791924 - RNA, 22 nt, Human
uucauucuuuuacaugugaaua

SEQ ID NO: 791925 - RNA, 22 nt, Human
acuuucauguucauuuggaacc

SEQ ID NO: 791926 - RNA, 22 nt, Human
cugagccauaagggaggcuggg

SEQ ID NO: 791927 - RNA, 22 nt, Human
cagugaguaaguagacagcuua

SEQ ID NO: 791928 - RNA, 22 nt, Human
uuacagagguauguaugucucu

SEQ ID NO: 791929 - RNA, 22 nt, Human
cugugggaaaggaugagauugc

SEQ ID NO: 791930 - RNA, 22 nt, Human
auacagaaaaugaugcagaguu

SEQ ID NO: 791931 - RNA, 22 nt, Human
guggagggaaugaaucuucucu

SEQ ID NO: 791932 - RNA, 22 nt, Human
acagagcugggaucugaaccca

SEQ ID NO: 791933 - RNA, 18 nt, Human
uauaaccuguuuugaugg

SEQ ID NO: 791934 - RNA, 22 nt, Human
gaggaaaauaacaacuaagggc

SEQ ID NO: 791935 - RNA, 22 nt, Human
ucacauuugauaaugcccauug

SEQ ID NO: 791936 - RNA, 22 nt, Human
ugcuagcacugugcagucuacg

SEQ ID NO: 791937 - RNA, 22 nt, Human
uuaaaugaggcugauguagauu

SEQ ID NO: 791938 - RNA, 22 nt, Human
agucaucauguacagagagcaa

SEQ ID NO: 791939 - RNA, 23 nt, Human
gcucccugucccugcacuuaggc

SEQ ID NO: 791940 - RNA, 22 nt, Human
acccaggccauuggcaagaguc

SEQ ID NO: 791941 - RNA, 22 nt, Human
auucacauguugaagcccuaac

SEQ ID NO: 791942 - RNA, 22 nt, Human
gcaaaugcacugcauuuagauu

SEQ ID NO: 791943 - RNA, 22 nt, Human
aauaagaugugcuugaguuugg

SEQ ID NO: 791944 - RNA, 22 nt, Human
aucuagaaaaggugacuaaaau

SEQ ID NO: 791945 - RNA, 18 nt, Human
gccaggcaggguggggaa

SEQ ID NO: 791946 - RNA, 22 nt, Human
aaaagcagagacucuggagcua

SEQ ID NO: 791947 - RNA, 22 nt, Human
auauuaguuuggagacuacaau

SEQ ID NO: 791948 - RNA, 22 nt, Human
uagcugguccucagcuccagcc

SEQ ID NO: 791949 - RNA, 22 nt, Human
cugaagcaauugagagauguuu

SEQ ID NO: 791950 - RNA, 22 nt, Human
cugggaagcuucgagcaggaaa

SEQ ID NO: 791951 - RNA, 22 nt, Human
cagccugcucucagauguugag

SEQ ID NO: 791952 - RNA, 22 nt, Human
ggcagccaguagggccagccug

SEQ ID NO: 791953 - RNA, 22 nt, Human
augaaugcagcacuguuuuucu

SEQ ID NO: 791954 - RNA, 22 nt, Human
cuucagaaccagccagaagagg

SEQ ID NO: 791955 - RNA, 22 nt, Human
caguguuuguugagaaaggcaa

SEQ ID NO: 791956 - RNA, 22 nt, Human
ucccaggauguuuauggcuggu

SEQ ID NO: 791957 - RNA, 22 nt, Human
uggcaggugccuguaaucucag

SEQ ID NO: 791958 - RNA, 22 nt, Human
augucuuucuaguuaagagcua

SEQ ID NO: 791959 - RNA, 23 nt, Human
gcuuguguauacaggaggccacc

SEQ ID NO: 791960 - RNA, 22 nt, Human
ucuaaagccuuccauauaacgc

SEQ ID NO: 791961 - RNA, 22 nt, Human
ugggccaggcaugugaucagca

SEQ ID NO: 791962 - RNA, 19 nt, Human
agaaucaggucaggugaca

SEQ ID NO: 791963 - RNA, 22 nt, Human
uaauaccuggccuugauacagu

SEQ ID NO: 791964 - RNA, 22 nt, Human
uuccuaaguccugccagcaguc

SEQ ID NO: 791965 - RNA, 22 nt, Human
ucauuauccuaguaucuugaau

SEQ ID NO: 791966 - RNA, 22 nt, Human
aaaggcccacagucagucuacc

SEQ ID NO: 791967 - RNA, 22 nt, Human
aacugcaaucacuuuugcacca

SEQ ID NO: 791968 - RNA, 22 nt, Human
caccagcuccaccagggcaggu

SEQ ID NO: 791969 - RNA, 22 nt, Human
ucccagcacgucugcuguuucu

SEQ ID NO: 791970 - RNA, 22 nt, Human
augcagcugugggcaagaaaug

SEQ ID NO: 791971 - RNA, 22 nt, Human
cacuuaaaacuccuggaauugu

SEQ ID NO: 791972 - RNA, 22 nt, Human
aguuucauccgaucuggucuca

SEQ ID NO: 791973 - RNA, 22 nt, Human
uaauaaaugaaagugcuggcau

SEQ ID NO: 791974 - RNA, 22 nt, Human
cucuggggaagcagccagcugg

SEQ ID NO: 791975 - RNA, 22 nt, Human
aaaggcaaaauucuuagcagga

SEQ ID NO: 791976 - RNA, 22 nt, Human
uugcaaauguuauacugccagu

SEQ ID NO: 791977 - RNA, 22 nt, Human
acaaagcucuggaaggcucguc

SEQ ID NO: 791978 - RNA, 22 nt, Human
agaacuauacauuacucauuga

SEQ ID NO: 791979 - RNA, 22 nt, Human
ccaggccuagccccugagggua

SEQ ID NO: 791980 - RNA, 18 nt, Human
uccagcuugcacuuaaau

SEQ ID NO: 791981 - RNA, 22 nt, Human
ucucccaggugggugccuggag

SEQ ID NO: 791982 - RNA, 22 nt, Human
aacccgagggccccaggcucgg

SEQ ID NO: 791983 - RNA, 22 nt, Human
auucuacauuuggagugauguc

SEQ ID NO: 791984 - RNA, 22 nt, Human
ccucaggggcuuuucguuguug

SEQ ID NO: 791985 - RNA, 22 nt, Human
cccagcagugguucucaaacuu

SEQ ID NO: 791986 - RNA, 22 nt, Human
augcuucugcucauauuucauu

SEQ ID NO: 791987 - RNA, 22 nt, Human
uaauuuuaacugugcuguuugg

SEQ ID NO: 791988 - RNA, 21 nt, Human
gcucccugcucagcuccuggg

SEQ ID NO: 791989 - RNA, 22 nt, Human
aacuuccuucuaguucauaugu

SEQ ID NO: 791990 - RNA, 22 nt, Human
aaauuguaggaucacaugaccu

SEQ ID NO: 791991 - RNA, 22 nt, Human
ccgucugcagccuccaggaguu

SEQ ID NO: 791992 - RNA, 22 nt, Human
auaaauaucacuguugucccuc

SEQ ID NO: 791993 - RNA, 22 nt, Human
ccucccaucccugcaagagagc

SEQ ID NO: 791994 - RNA, 22 nt, Human
ggccagaaguuggaaaagagcc

SEQ ID NO: 791995 - RNA, 22 nt, Human
cagaggcaaaagagguggaggu

SEQ ID NO: 791996 - RNA, 22 nt, Human
aaagcagcuguuugacuuucca

SEQ ID NO: 791997 - RNA, 22 nt, Human
aacccaggagacagguugcagu

SEQ ID NO: 791998 - RNA, 22 nt, Human
acugaaaaugaauuagaaacag

SEQ ID NO: 791999 - RNA, 22 nt, Human
aaugcaguugaauuuggguaug

SEQ ID NO: 792000 - RNA, 22 nt, Human
gugcuuuuucaaucagaaggga

SEQ ID NO: 792001 - RNA, 22 nt, Human
gcagggccagggcucaggcugu

SEQ ID NO: 792002 - RNA, 22 nt, Human
auuguuuuccaaagaugcugcu

SEQ ID NO: 792003 - RNA, 22 nt, Human
caguaaguauucgagucuccau

SEQ ID NO: 792004 - RNA, 22 nt, Human
acaguuaccacuuagcaguuac

SEQ ID NO: 792005 - RNA, 22 nt, Human
uucuucaucuguaagauaagca

SEQ ID NO: 792006 - RNA, 22 nt, Human
auagcaaauucuuuaggugcuu

SEQ ID NO: 792007 - RNA, 22 nt, Human
uuugauuuucagcaauaguggc

SEQ ID NO: 792008 - RNA, 22 nt, Human
gacaauuucucaauauagaaac

SEQ ID NO: 792009 - RNA, 22 nt, Human
cacacaggaaaauuggaauuaa

SEQ ID NO: 792010 - RNA, 22 nt, Human
cuguuuucccuggaguucagca

SEQ ID NO: 792011 - RNA, 22 nt, Human
gcauuccuguaccucucugcua

SEQ ID NO: 792012 - RNA, 22 nt, Human
uggagaaaagguugaauccauc

SEQ ID NO: 792013 - RNA, 22 nt, Human
ucuucagaagaucacaucagug

SEQ ID NO: 792014 - RNA, 22 nt, Human
uaaauucuacaacuucaaagau

SEQ ID NO: 792015 - RNA, 22 nt, Human
agugaaaugauucugagcaaga

SEQ ID NO: 792016 - RNA, 17 nt, Human
ccaggagcgugggucuc

SEQ ID NO: 792017 - RNA, 22 nt, Human
gaggauggaggcaguuagggcc

SEQ ID NO: 792018 - RNA, 22 nt, Human
aguauguugacuuauucuugga

SEQ ID NO: 792019 - RNA, 22 nt, Human
aauguucagugccuuuaaacau

SEQ ID NO: 792020 - RNA, 22 nt, Human
cccauggcaauaaggucacagg

SEQ ID NO: 792021 - RNA, 22 nt, Human
ccugugggcccuggacagagac

SEQ ID NO: 792022 - RNA, 22 nt, Human
uaucuuacagacugaauguugg

SEQ ID NO: 792023 - RNA, 22 nt, Human
cagaaaccugucuggaguggga

SEQ ID NO: 792024 - RNA, 22 nt, Human
aggcuggcucggcuuuucuguc

SEQ ID NO: 792025 - RNA, 22 nt, Human
aggagcuggguuccuuuggugg

SEQ ID NO: 792026 - RNA, 22 nt, Human
uucuuuauguuaaugaaucuau

SEQ ID NO: 792027 - RNA, 22 nt, Human
ugggcagacgcuguuggaaggc

SEQ ID NO: 792028 - RNA, 15 nt, Human
caggaaaugaaucug

SEQ ID NO: 792029 - RNA, 22 nt, Human
aaaaguauggugguccuuuuua

SEQ ID NO: 792030 - RNA, 23 nt, Human
uggcuggcgccugccucacccug

SEQ ID NO: 792031 - RNA, 22 nt, Human
ucagggaaaccuaaggaagcca

SEQ ID NO: 792032 - RNA, 22 nt, Human
ccuuucccgcuuugagggcaag

SEQ ID NO: 792033 - RNA, 22 nt, Human
acacccagauuaugcacacaaa

SEQ ID NO: 792034 - RNA, 22 nt, Human
ugcuggagacucacucaggugc

SEQ ID NO: 792035 - RNA, 22 nt, Human
cuuaaagucuauccuuucuaga

SEQ ID NO: 792036 - RNA, 22 nt, Human
ugcaggcucugugugugccugg

SEQ ID NO: 792037 - RNA, 22 nt, Human
uucuuuaccacuacucuuccaa

SEQ ID NO: 792038 - RNA, 22 nt, Human
ugcaaauggagcauguauaaga

SEQ ID NO: 792039 - RNA, 22 nt, Human
gagcugggagcugggauuugga

SEQ ID NO: 792040 - RNA, 22 nt, Human
aauauugagaaccagcauguuu

SEQ ID NO: 792041 - RNA, 22 nt, Human
auauuauuuucccuggaguugu

SEQ ID NO: 792042 - RNA, 17 nt, Human
ccuuucucuuucaucuc

SEQ ID NO: 792043 - RNA, 22 nt, Human
cuguggcuguauuuggccagag

SEQ ID NO: 792044 - RNA, 19 nt, Human
gagcugagaguagcacugg

SEQ ID NO: 792045 - RNA, 22 nt, Human
aauaacuucauguaacauuuaa

SEQ ID NO: 792046 - RNA, 22 nt, Human
ccuccuggccugugcagagccc

SEQ ID NO: 792047 - RNA, 22 nt, Human
ggaagugguagagccaugagug

SEQ ID NO: 792048 - RNA, 22 nt, Human
gcuuuggucuucuagcugugag

SEQ ID NO: 792049 - RNA, 22 nt, Human
aacaguaauggcauugccauga

SEQ ID NO: 792050 - RNA, 22 nt, Human
ucaggggcagccggggaagcca

SEQ ID NO: 792051 - RNA, 22 nt, Human
agcuguguccugaagacacugc

SEQ ID NO: 792052 - RNA, 22 nt, Human
augucuuuggcuuugacauggc

SEQ ID NO: 792053 - RNA, 22 nt, Human
aggaccugaaauucuugcuuuu

SEQ ID NO: 792054 - RNA, 22 nt, Human
agccuggccacucagggccuga

SEQ ID NO: 792055 - RNA, 22 nt, Human
caggagccgccaggcacguugg

SEQ ID NO: 792056 - RNA, 20 nt, Human
aaguuucugguuuauaucuu

SEQ ID NO: 792057 - RNA, 22 nt, Human
gcaagcuggcuguuagaggaug

SEQ ID NO: 792058 - RNA, 22 nt, Human
caaaucauggcucuagcuuaca

SEQ ID NO: 792059 - RNA, 22 nt, Human
gccccagguugccugucccagg

SEQ ID NO: 792060 - RNA, 22 nt, Human
uggggcuggcuauugucucccu

SEQ ID NO: 792061 - RNA, 17 nt, Human
uucugagccacuuccuu

SEQ ID NO: 792062 - RNA, 22 nt, Human
cugcaaauaggaaaagggcaua

SEQ ID NO: 792063 - RNA, 21 nt, Human
ucauaaacuaguaucaaaguu

SEQ ID NO: 792064 - RNA, 22 nt, Human
agcuggauuccagugcagucac

SEQ ID NO: 792065 - RNA, 22 nt, Human
uaagaaucgauguuuauuuaga

SEQ ID NO: 792066 - RNA, 21 nt, Human
aggacaggaacuggcugaaua

SEQ ID NO: 792067 - RNA, 22 nt, Human
cugagcagucuagccagguguu

SEQ ID NO: 792068 - RNA, 22 nt, Human
ugaaaugauuauaugguguuug

SEQ ID NO: 792069 - RNA, 22 nt, Human
gcugagagaaaagugagguucu

SEQ ID NO: 792070 - RNA, 22 nt, Human
gaucccuugggccaaggaguug

SEQ ID NO: 792071 - RNA, 22 nt, Human
cugcuggcaagcccaguuggag

SEQ ID NO: 792072 - RNA, 22 nt, Human
uacacuaauguuuuugcaaagc

SEQ ID NO: 792073 - RNA, 22 nt, Human
aaagccaguucuuagagaaagc

SEQ ID NO: 792074 - RNA, 22 nt, Human
aagauacacguuguauugaaua

SEQ ID NO: 792075 - RNA, 22 nt, Human
gugaccauaauagauuaugagu

SEQ ID NO: 792076 - RNA, 22 nt, Human
uacacagggagagauuggaaac

SEQ ID NO: 792077 - RNA, 22 nt, Human
aggcccugggcaguucuguagc

SEQ ID NO: 792078 - RNA, 22 nt, Human
auaaaggauaauccauuagacu

SEQ ID NO: 792079 - RNA, 22 nt, Human
cagggccagagagggcuggcug

SEQ ID NO: 792080 - RNA, 22 nt, Human
aagcuguucuccagugacucag

SEQ ID NO: 792081 - RNA, 22 nt, Human
uuccagaggcuucagggaagaa

SEQ ID NO: 792082 - RNA, 21 nt, Human
cagaggguuucucagguguuu

SEQ ID NO: 792083 - RNA, 19 nt, Human
aagagggaaagugcuaugc

SEQ ID NO: 792084 - RNA, 22 nt, Human
aaaaagcuuaaaugagcaguuc

SEQ ID NO: 792085 - RNA, 22 nt, Human
cugggaggcggagguuguagug

SEQ ID NO: 792086 - RNA, 22 nt, Human
uaaggcagauguggaaucaauu

SEQ ID NO: 792087 - RNA, 22 nt, Human
aaaaugaugcuguaauuuggca

SEQ ID NO: 792088 - RNA, 22 nt, Human
augauguuaccaguacuuagag

SEQ ID NO: 792089 - RNA, 22 nt, Human
guggauggauugaggcaguggg

SEQ ID NO: 792090 - RNA, 22 nt, Human
gucaaauauacuaagagguaaa

SEQ ID NO: 792091 - RNA, 22 nt, Human
ugaaagcuuguuggaaauguag

SEQ ID NO: 792092 - RNA, 20 nt, Human
auaugcauguguuuucacuu

SEQ ID NO: 792093 - RNA, 22 nt, Human
gaucugggagccucauggagac

SEQ ID NO: 792094 - RNA, 22 nt, Human
uggcagcuugaaugcagucuuu

SEQ ID NO: 792095 - RNA, 22 nt, Human
uucuccauuuaacuuccuuaug

SEQ ID NO: 792096 - RNA, 22 nt, Human
uuuaggaacuuagguuuaugga

SEQ ID NO: 792097 - RNA, 20 nt, Human
aggauggcaagcaagugcau

SEQ ID NO: 792098 - RNA, 22 nt, Human
aggggugauuugggacaggaca

SEQ ID NO: 792099 - RNA, 22 nt, Human
ccuggcagcaggugggcccgug

SEQ ID NO: 792100 - RNA, 22 nt, Human
agccuggauccuaggcucagcu

SEQ ID NO: 792101 - RNA, 22 nt, Human
cgcccagggcaggaggccgcuc

SEQ ID NO: 792102 - RNA, 22 nt, Human
agaguucugaaauuaucuuuac

SEQ ID NO: 792103 - RNA, 22 nt, Human
ugcaaaaauugcuggaaucuuu

SEQ ID NO: 792104 - RNA, 22 nt, Human
cuucagaaauaacaacaauuac

SEQ ID NO: 792105 - RNA, 22 nt, Human
agcccaaggcuucccugcuggc

SEQ ID NO: 792106 - RNA, 22 nt, Human
acuggcugcgaucuuggcgcuu

SEQ ID NO: 792107 - RNA, 23 nt, Human
ggccuguguuuugucugaaguac

SEQ ID NO: 792108 - RNA, 22 nt, Human
uacauuugggacaauaagagaa

SEQ ID NO: 792109 - RNA, 22 nt, Human
uuacuuuagaucauacugugug

SEQ ID NO: 792110 - RNA, 22 nt, Human
gggcuggcaucgguugcugaga

SEQ ID NO: 792111 - RNA, 19 nt, Human
uuucccagcccuugcugug

SEQ ID NO: 792112 - RNA, 22 nt, Human
gggcugagacgauggggucuuc

SEQ ID NO: 792113 - RNA, 22 nt, Human
agauauuguuuguuucaccaau

SEQ ID NO: 792114 - RNA, 18 nt, Human
gcuuugcagaaauacaga

SEQ ID NO: 792115 - RNA, 22 nt, Human
ucagaauaugcuaaugacauuu

SEQ ID NO: 792116 - RNA, 22 nt, Human
cuggacacacuggagucuggca

SEQ ID NO: 792117 - RNA, 23 nt, Human
agcuuuuagguggaaauggcacu

SEQ ID NO: 792118 - RNA, 22 nt, Human
cccagagccucauucuguuggg

SEQ ID NO: 792119 - RNA, 22 nt, Human
uggggacauucaugcagguugu

SEQ ID NO: 792120 - RNA, 22 nt, Human
cacaugagacaauuaaagacuu

SEQ ID NO: 792121 - RNA, 22 nt, Human
gcuugucucucagccccaguca

SEQ ID NO: 792122 - RNA, 22 nt, Human
cucuccagggcaugaguuccac

SEQ ID NO: 792123 - RNA, 22 nt, Human
acaggcacaggugugccccacc

SEQ ID NO: 792124 - RNA, 22 nt, Human
cauuucaccuuagagaauuauu

SEQ ID NO: 792125 - RNA, 22 nt, Human
caucuacacugauuaggugaac

SEQ ID NO: 792126 - RNA, 22 nt, Human
agugacaagguaguuaguugga

SEQ ID NO: 792127 - RNA, 22 nt, Human
acaauauuugggggcaguuugu

SEQ ID NO: 792128 - RNA, 22 nt, Human
caaguuaauugguauuuugauc

SEQ ID NO: 792129 - RNA, 22 nt, Human
caaguauucuguaaaaagucaa

SEQ ID NO: 792130 - RNA, 21 nt, Human
auuuacaaaacagucccuucc

SEQ ID NO: 792131 - RNA, 22 nt, Human
ugcuucugcaggagcuccugau

SEQ ID NO: 792132 - RNA, 22 nt, Human
ucagagugaccuuacauggucu

SEQ ID NO: 792133 - RNA, 22 nt, Human
agugguucaguuuuggucuggc

SEQ ID NO: 792134 - RNA, 22 nt, Human
acagggcucugacaccaaggua

SEQ ID NO: 792135 - RNA, 22 nt, Human
cuucuuuaauguauacaaaaga

SEQ ID NO: 792136 - RNA, 21 nt, Human
gaguccuggcuaggguggcag

SEQ ID NO: 792137 - RNA, 22 nt, Human
agaaauagaggaaagguuugac

SEQ ID NO: 792138 - RNA, 22 nt, Human
uacaagaaacuacaugaaugca

SEQ ID NO: 792139 - RNA, 22 nt, Human
auaccauuuccauguuacauua

SEQ ID NO: 792140 - RNA, 21 nt, Human
cucuuugggaucuuuggaaag

SEQ ID NO: 792141 - RNA, 21 nt, Human
uuucucaguugugugagcagc

SEQ ID NO: 792142 - RNA, 22 nt, Human
acauaacacucuucucuaguga

SEQ ID NO: 792143 - RNA, 22 nt, Human
cagcaggacguccaagugcuau

SEQ ID NO: 792144 - RNA, 22 nt, Human
uccugccucuuuucuuauucca

SEQ ID NO: 792145 - RNA, 22 nt, Human
cgcagagggagccgcgggcugc

SEQ ID NO: 792146 - RNA, 19 nt, Human
cccuggcaggcaagccugg

SEQ ID NO: 792147 - RNA, 20 nt, Human
agccaauacagcaaaauuug

SEQ ID NO: 792148 - RNA, 22 nt, Human
guccccagagcugguggugguu

SEQ ID NO: 792149 - RNA, 22 nt, Human
uaguccaguaaaacagcuaacg

SEQ ID NO: 792150 - RNA, 22 nt, Human
uuuuuccaggguuagauguuua

SEQ ID NO: 792151 - RNA, 22 nt, Human
uggauggcuggggaagagcagg

SEQ ID NO: 792152 - RNA, 20 nt, Human
uucagagucagcaaaugcag

SEQ ID NO: 792153 - RNA, 22 nt, Human
ggccucugguucguggugaccu

SEQ ID NO: 792154 - RNA, 22 nt, Human
cacaugagguggagaugaauga

SEQ ID NO: 792155 - RNA, 22 nt, Human
guuuuuauuguguaaauguggg

SEQ ID NO: 792156 - RNA, 22 nt, Human
auucuaaaucagagagcucugu

SEQ ID NO: 792157 - RNA, 22 nt, Human
cccucccaggaguggccagaga

SEQ ID NO: 792158 - RNA, 22 nt, Human
uaacuacaagggcggucucugu

SEQ ID NO: 792159 - RNA, 22 nt, Human
uaaacagugauacguuccagcu

SEQ ID NO: 792160 - RNA, 22 nt, Human
uccacagggccuuucuggugug

SEQ ID NO: 792161 - RNA, 22 nt, Human
augaaaugcuauuuuggcuaga

SEQ ID NO: 792162 - RNA, 22 nt, Human
acuggcuggacucugaccucuu

SEQ ID NO: 792163 - RNA, 19 nt, Human
uccuucuccggccaccccg

SEQ ID NO: 792164 - RNA, 22 nt, Human
acauuuguuucucuagaguagg

SEQ ID NO: 792165 - RNA, 22 nt, Human
aacauuguuuucccuauaucca

SEQ ID NO: 792166 - RNA, 22 nt, Human
uauuuacccuggcagcuguagc

SEQ ID NO: 792167 - RNA, 22 nt, Human
gauuuuaucgucauccuucugg

SEQ ID NO: 792168 - RNA, 22 nt, Human
uuggagucauauggaauucaca

SEQ ID NO: 792169 - RNA, 22 nt, Human
agcaggacacgaugcggcagga

SEQ ID NO: 792170 - RNA, 22 nt, Human
aggcuauuuccacucuucucau

SEQ ID NO: 792171 - RNA, 22 nt, Human
ccuagaggcugcaaggagaggc

SEQ ID NO: 792172 - RNA, 22 nt, Human
uggcuacagcaagaggaaagaa

SEQ ID NO: 792173 - RNA, 22 nt, Human
ucuaguguuaaggcaaaguaaa

SEQ ID NO: 792174 - RNA, 22 nt, Human
cucucccccacagcagccuucu

SEQ ID NO: 792175 - RNA, 22 nt, Human
ugcaaacaauuuccuauaaagu

SEQ ID NO: 792176 - RNA, 22 nt, Human
uuguuucuucauuuagaagcuu

SEQ ID NO: 792177 - RNA, 22 nt, Human
cagauauauuuuauuuggucaa

SEQ ID NO: 792178 - RNA, 22 nt, Human
uggcccugugugcaggcugcac

SEQ ID NO: 792179 - RNA, 22 nt, Human
uucuucaauuauuggaaagaaa

SEQ ID NO: 792180 - RNA, 22 nt, Human
uaacaacuggacaauguugcuc

SEQ ID NO: 792181 - RNA, 22 nt, Human
ccccagcccacaagcauauuaa

SEQ ID NO: 792182 - RNA, 22 nt, Human
uuuaauuuguauuucuagaggg

SEQ ID NO: 792183 - RNA, 22 nt, Human
caugcaaaauguauuuuauuag

SEQ ID NO: 792184 - RNA, 22 nt, Human
ugucauuuggugccaggaaaga

SEQ ID NO: 792185 - RNA, 22 nt, Human
cucuuuggcguuggcagagcca

SEQ ID NO: 792186 - RNA, 18 nt, Human
ccuggagcuccacagcaa

SEQ ID NO: 792187 - RNA, 22 nt, Human
aggccuguaguuccucuuucca

SEQ ID NO: 792188 - RNA, 22 nt, Human
gcagauaggguauuaggaguaa

SEQ ID NO: 792189 - RNA, 22 nt, Human
cagcaggaccauugaggcauca

SEQ ID NO: 792190 - RNA, 17 nt, Human
gggugggcacugcuggc

SEQ ID NO: 792191 - RNA, 22 nt, Human
uccuuaaauccuucagagauua

SEQ ID NO: 792192 - RNA, 22 nt, Human
uguguuuagagagcacauucag

SEQ ID NO: 792193 - RNA, 20 nt, Human
ucccaggcuccacccuagac

SEQ ID NO: 792194 - RNA, 22 nt, Human
uuccaggaagacaucucaggaa

SEQ ID NO: 792195 - RNA, 22 nt, Human
uuucuucuuaauacuggcugcu

SEQ ID NO: 792196 - RNA, 21 nt, Human
aguuucaggaaguucagcugc

SEQ ID NO: 792197 - RNA, 22 nt, Human
gccugccuuugugaggaagcgg

SEQ ID NO: 792198 - RNA, 20 nt, Human
cccugcagccaugggagugg

SEQ ID NO: 792199 - RNA, 22 nt, Human
ucacaguauagaguuauuuugg

SEQ ID NO: 792200 - RNA, 22 nt, Human
aaggcugguggauuaugagguc

SEQ ID NO: 792201 - RNA, 22 nt, Human
cugggggucuugaaagggagag

SEQ ID NO: 792202 - RNA, 22 nt, Human
cacagucacauaucuaugugug

SEQ ID NO: 792203 - RNA, 22 nt, Human
aauuacaaauguagacucucau

SEQ ID NO: 792204 - RNA, 22 nt, Human
uggcucaggauaauuuucccaa

SEQ ID NO: 792205 - RNA, 22 nt, Human
auauacuuggagacuaucauug

SEQ ID NO: 792206 - RNA, 22 nt, Human
ugacaggaguggcuagugggag

SEQ ID NO: 792207 - RNA, 20 nt, Human
ucugcacuccugcaugugcc

SEQ ID NO: 792208 - RNA, 22 nt, Human
gccucugcucggacuuugccuc

SEQ ID NO: 792209 - RNA, 22 nt, Human
gaaauauucuugucuuguuuuc

SEQ ID NO: 792210 - RNA, 22 nt, Human
caggauggugugagugugagga

SEQ ID NO: 792211 - RNA, 22 nt, Human
cuagcuuagggaaacugacaga

SEQ ID NO: 792212 - RNA, 22 nt, Human
aauaacuugaagaucucuucca

SEQ ID NO: 792213 - RNA, 22 nt, Human
ucuucccagaccuuacauguga

SEQ ID NO: 792214 - RNA, 22 nt, Human
agcaggcuuucaagagucuucu

SEQ ID NO: 792215 - RNA, 22 nt, Human
gucaggagaggccaucagcuuu

SEQ ID NO: 792216 - RNA, 22 nt, Human
aaaaggcuaauuaaguuuugga

SEQ ID NO: 792217 - RNA, 22 nt, Human
uucaguuugaauucuguagaac

SEQ ID NO: 792218 - RNA, 22 nt, Human
uaugcaaaugacugguauguuu

SEQ ID NO: 792219 - RNA, 22 nt, Human
acauggcagcugaugauuggaa

SEQ ID NO: 792220 - RNA, 22 nt, Human
ccacagcaugcaggccugacac

SEQ ID NO: 792221 - RNA, 22 nt, Human
gcuuggcuggagaaaguuaccu

SEQ ID NO: 792222 - RNA, 22 nt, Human
cagugguggaaugaggaauugu

SEQ ID NO: 792223 - RNA, 21 nt, Human
gcuggcugucucuuacacggu

SEQ ID NO: 792224 - RNA, 22 nt, Human
cagggagcuuucccaggacccu

SEQ ID NO: 792225 - RNA, 22 nt, Human
uuugaacaugcugcaugauaau

SEQ ID NO: 792226 - RNA, 22 nt, Human
uccuggcagcccgcaggugcug

SEQ ID NO: 792227 - RNA, 22 nt, Human
uacagaggcuggguuuucaggg

SEQ ID NO: 792228 - RNA, 22 nt, Human
guggugaagccccaucucugcu

SEQ ID NO: 792229 - RNA, 22 nt, Human
uggcugggagcuggaacugggc

SEQ ID NO: 792230 - RNA, 22 nt, Human
caggcagccugcggucugcaca

SEQ ID NO: 792231 - RNA, 22 nt, Human
gugcagcugggcgcugaccuuc

SEQ ID NO: 792232 - RNA, 22 nt, Human
gggcuggcgggaaaggcaauuc

SEQ ID NO: 792233 - RNA, 22 nt, Human
cuacugaugauguugguugugg

SEQ ID NO: 792234 - RNA, 22 nt, Human
cagggcucgcucuugcccuucg

SEQ ID NO: 792235 - RNA, 22 nt, Human
aacauuguuuugcacaacucuu

SEQ ID NO: 792236 - RNA, 18 nt, Human
cagggcuguggggucacu

SEQ ID NO: 792237 - RNA, 21 nt, Human
aacugcaaaucuuagacugca

SEQ ID NO: 792238 - RNA, 22 nt, Human
uaaugucuccaggguugaccua

SEQ ID NO: 792239 - RNA, 22 nt, Human
aacaaacaaacauuuugucauc

SEQ ID NO: 792240 - RNA, 21 nt, Human
auauuguagguaaagugcagg

SEQ ID NO: 792241 - RNA, 22 nt, Human
cagcccugcugguuuugggcaa

SEQ ID NO: 792242 - RNA, 22 nt, Human
uuaauacagaagcaagacacug

SEQ ID NO: 792243 - RNA, 22 nt, Human
ggcaggcuuugagaaagagcau

SEQ ID NO: 792244 - RNA, 22 nt, Human
ucuccuggauagauacuaucca

SEQ ID NO: 792245 - RNA, 22 nt, Human
gaacauaacuauugugaauagu

SEQ ID NO: 792246 - RNA, 22 nt, Human
aauagaauguaaucuaauacau

SEQ ID NO: 792247 - RNA, 22 nt, Human
gcucagggaguuucacagugua

SEQ ID NO: 792248 - RNA, 22 nt, Human
ggaggugguggcagugacaauu

SEQ ID NO: 792249 - RNA, 22 nt, Human
gcuccuggcuucacugacauca

SEQ ID NO: 792250 - RNA, 22 nt, Human
uuacauuuugggguaaggauaa

SEQ ID NO: 792251 - RNA, 22 nt, Human
agggaccagggguagcugagau

SEQ ID NO: 792252 - RNA, 22 nt, Human
caggccugcaggaaaggcuccc

SEQ ID NO: 792253 - RNA, 22 nt, Human
gaaggcugcugggaaguguggu

SEQ ID NO: 792254 - RNA, 22 nt, Human
ggcuguagguuggugcuggaca

SEQ ID NO: 792255 - RNA, 22 nt, Human
aaauuauuacaagcuaguuggc

SEQ ID NO: 792256 - RNA, 22 nt, Human
aaagccaggguccaggccugcc

SEQ ID NO: 792257 - RNA, 22 nt, Human
aggaguggugcaggaccugcca

SEQ ID NO: 792258 - RNA, 22 nt, Human
gggccaccuggauuccaugugu

SEQ ID NO: 792259 - RNA, 21 nt, Human
uugcuuauggcacugcuuugc

SEQ ID NO: 792260 - RNA, 22 nt, Human
ugcauuuaagaaaacaugaguc

SEQ ID NO: 792261 - RNA, 22 nt, Human
ccaagcaaggcuaauucacuug

SEQ ID NO: 792262 - RNA, 22 nt, Human
aggcccauguucacuugcucag

SEQ ID NO: 792263 - RNA, 22 nt, Human
uauuguaucuucuguuuagaag

SEQ ID NO: 792264 - RNA, 19 nt, Human
ggcuccuggggcucagccc

SEQ ID NO: 792265 - RNA, 22 nt, Human
ucaaaaauaagauauucuggac

SEQ ID NO: 792266 - RNA, 22 nt, Human
ccagauaucacugccguguugu

SEQ ID NO: 792267 - RNA, 22 nt, Human
ccuguucuguggcucucaaagg

SEQ ID NO: 792268 - RNA, 22 nt, Human
gucuuagauuucaccgauaaug

SEQ ID NO: 792269 - RNA, 22 nt, Human
ccagggccuacagcuuaagucc

SEQ ID NO: 792270 - RNA, 22 nt, Human
cuccuggaucuuagccagauuc

SEQ ID NO: 792271 - RNA, 22 nt, Human
ccuggccaggcuccaaguacug

SEQ ID NO: 792272 - RNA, 22 nt, Human
ucauuuacuucuaugacaacau

SEQ ID NO: 792273 - RNA, 22 nt, Human
ggcagacacaaaaacauaaggu

SEQ ID NO: 792274 - RNA, 22 nt, Human
cugccaggggccucacaggcca

SEQ ID NO: 792275 - RNA, 22 nt, Human
ccuggccagggucugggcugcu

SEQ ID NO: 792276 - RNA, 22 nt, Human
gcccuggauggcaggagccauc

SEQ ID NO: 792277 - RNA, 22 nt, Human
cagcccugcuuccccgcuaguu

SEQ ID NO: 792278 - RNA, 22 nt, Human
gugcucuccuggcugcccugac

SEQ ID NO: 792279 - RNA, 17 nt, Human
acagaggcaggagugga

SEQ ID NO: 792280 - RNA, 22 nt, Human
uuucugcacauuucuaaaguug

SEQ ID NO: 792281 - RNA, 22 nt, Human
ccugcagagggacuggcaggaa

SEQ ID NO: 792282 - RNA, 22 nt, Human
ugcagagggaaaaggugcuccu

SEQ ID NO: 792283 - RNA, 22 nt, Human
aucuucaucaaguucacagugg

SEQ ID NO: 792284 - RNA, 22 nt, Human
aucuagaaaguguugaagauca

SEQ ID NO: 792285 - RNA, 22 nt, Human
ugggccaguccagccccaggga

SEQ ID NO: 792286 - RNA, 22 nt, Human
cuagagaaaauguuaauacagu

SEQ ID NO: 792287 - RNA, 21 nt, Human
acuagcuuucuggagaagugu

SEQ ID NO: 792288 - RNA, 22 nt, Human
ugaaagcuguccacuaggcugu

SEQ ID NO: 792289 - RNA, 22 nt, Human
ugucucuagggcaaugugaacu

SEQ ID NO: 792290 - RNA, 22 nt, Human
ugguucauugagaagacugaag

SEQ ID NO: 792291 - RNA, 22 nt, Human
cagucccaugagcccagaacau

SEQ ID NO: 792292 - RNA, 22 nt, Human
caaggcagugggcuaggaaccu

SEQ ID NO: 792293 - RNA, 22 nt, Human
aaccaguuuaagcaaauaacug

SEQ ID NO: 792294 - RNA, 22 nt, Human
uaaaugugcacuuuacuuuuca

SEQ ID NO: 792295 - RNA, 22 nt, Human
uauuuccaggccccacucuaga

SEQ ID NO: 792296 - RNA, 22 nt, Human
uacaacaguaaucaagguuuuu

SEQ ID NO: 792297 - RNA, 22 nt, Human
ggcuccagggucucuccuugug

SEQ ID NO: 792298 - RNA, 22 nt, Human
uggcuggcuguccagcugggca

SEQ ID NO: 792299 - RNA, 22 nt, Human
uucacuguccugcaacucuaga

SEQ ID NO: 792300 - RNA, 22 nt, Human
uguuuucuggguggaagguacu

SEQ ID NO: 792301 - RNA, 22 nt, Human
cauagaaaagaguagguaaugu

SEQ ID NO: 792302 - RNA, 22 nt, Human
ugauugauggaggugauuuacc

SEQ ID NO: 792303 - RNA, 22 nt, Human
uggcuuccacugugugcccccu

SEQ ID NO: 792304 - RNA, 18 nt, Human
cuuggcugaugggggugu

SEQ ID NO: 792305 - RNA, 22 nt, Human
ccacaguccgggcuggcaggac

SEQ ID NO: 792306 - RNA, 18 nt, Human
auaucugugggauggaga

SEQ ID NO: 792307 - RNA, 22 nt, Human
ccugccugauuccaggauggcu

SEQ ID NO: 792308 - RNA, 23 nt, Human
gcucuaucaggaacaagccaggu

SEQ ID NO: 792309 - RNA, 19 nt, Human
guauuucaggacaagacgu

SEQ ID NO: 792310 - RNA, 17 nt, Human
cugcagcuggagggcca

SEQ ID NO: 792311 - RNA, 22 nt, Human
gaccucagugaauggucaugua

SEQ ID NO: 792312 - RNA, 23 nt, Human
ucaauaacucggguuaaaauaga

SEQ ID NO: 792313 - RNA, 22 nt, Human
gcagauggcagcccaggcuggg

SEQ ID NO: 792314 - RNA, 23 nt, Human
ggccuggcccagggcccugauga

SEQ ID NO: 792315 - RNA, 22 nt, Human
ucaggcugguggucagauggcu

SEQ ID NO: 792316 - RNA, 22 nt, Human
guggcagagaacaaggagaggu

SEQ ID NO: 792317 - RNA, 18 nt, Human
ugccugccccguaagggu

SEQ ID NO: 792318 - RNA, 22 nt, Human
ggcuggacuuucugcugggcuc

SEQ ID NO: 792319 - RNA, 22 nt, Human
augcuauuccagaauguaaauu

SEQ ID NO: 792320 - RNA, 22 nt, Human
accuuuuuguucuguucucagc

SEQ ID NO: 792321 - RNA, 22 nt, Human
cugggaccuccucacuguucua

SEQ ID NO: 792322 - RNA, 22 nt, Human
gccugccugcugugugcaaguu

SEQ ID NO: 792323 - RNA, 22 nt, Human
gugcagcuacuccuugguccua

SEQ ID NO: 792324 - RNA, 22 nt, Human
cuuuggcuugcccuggcaguac

SEQ ID NO: 792325 - RNA, 22 nt, Human
cucaggaggccauucucaaggu

SEQ ID NO: 792326 - RNA, 21 nt, Human
aggcuuggaucuagacaggcc

SEQ ID NO: 792327 - RNA, 22 nt, Human
aaaaguuuaagacucauucuag

SEQ ID NO: 792328 - RNA, 22 nt, Human
ccuggccagcgccggcugcucg

SEQ ID NO: 792329 - RNA, 22 nt, Human
uuccugguccuauuauauacac

SEQ ID NO: 792330 - RNA, 22 nt, Human
aagucacagcuaaauagcuaag

SEQ ID NO: 792331 - RNA, 22 nt, Human
uauuauuaaauggcagaauuuu

SEQ ID NO: 792332 - RNA, 22 nt, Human
agcccuggauucugagguccaa

SEQ ID NO: 792333 - RNA, 22 nt, Human
cuaaaugugcuaauagcaugaa

SEQ ID NO: 792334 - RNA, 19 nt, Human
cuucacaucugugagggga

SEQ ID NO: 792335 - RNA, 22 nt, Human
agccaggccuuagggagaggca

SEQ ID NO: 792336 - RNA, 22 nt, Human
cagaauguauaugaucuaaggu

SEQ ID NO: 792337 - RNA, 19 nt, Human
acuggcaaaaaagguuaau

SEQ ID NO: 792338 - RNA, 22 nt, Human
agaggcucagaggccugguccu

SEQ ID NO: 792339 - RNA, 22 nt, Human
agggcuggcaucucuaaugcug

SEQ ID NO: 792340 - RNA, 17 nt, Human
ggacacagcucauggcu

SEQ ID NO: 792341 - RNA, 22 nt, Human
uugucugugaaauggaaauagu

SEQ ID NO: 792342 - RNA, 22 nt, Human
uacacaggggagcaugguugac

SEQ ID NO: 792343 - RNA, 22 nt, Human
augacaaauucagaccauagca

SEQ ID NO: 792344 - RNA, 19 nt, Human
uccaggcugagagucagcu

SEQ ID NO: 792345 - RNA, 22 nt, Human
ugcaauaaggaguaauaguaaa

SEQ ID NO: 792346 - RNA, 22 nt, Human
aggccagcucacccuggcuccu

SEQ ID NO: 792347 - RNA, 19 nt, Human
gauuuaaacguggcucuau

SEQ ID NO: 792348 - RNA, 22 nt, Human
acaagagacaagagguucuucu

SEQ ID NO: 792349 - RNA, 22 nt, Human
aauaauuagugggacagagaac

SEQ ID NO: 792350 - RNA, 22 nt, Human
gcaguggauggccagcaggggc

SEQ ID NO: 792351 - RNA, 21 nt, Human
agagcuggccugccaggcccu

SEQ ID NO: 792352 - RNA, 22 nt, Human
gaggagcugggacccugucauc

SEQ ID NO: 792353 - RNA, 22 nt, Human
cauauacugcauacauaugugu

SEQ ID NO: 792354 - RNA, 22 nt, Human
gacauuuaaauugcaggcagcc

SEQ ID NO: 792355 - RNA, 22 nt, Human
acaaagaaggaauuggucuuua

SEQ ID NO: 792356 - RNA, 22 nt, Human
aagccaguaaguuuuugucauu

SEQ ID NO: 792357 - RNA, 22 nt, Human
gaauacauggcagggagucauc

SEQ ID NO: 792358 - RNA, 22 nt, Human
cuccuggugcuggggcugccgc

SEQ ID NO: 792359 - RNA, 22 nt, Human
uuauauuucugguagccuucag

SEQ ID NO: 792360 - RNA, 22 nt, Human
ugcuggaggcaguggaggugcc

SEQ ID NO: 792361 - RNA, 21 nt, Human
gaaaagcaagggaguagaaca

SEQ ID NO: 792362 - RNA, 22 nt, Human
gagcccagcuguccuuggcaaa

SEQ ID NO: 792363 - RNA, 22 nt, Human
agagcagauggagcuggaagag

SEQ ID NO: 792364 - RNA, 19 nt, Human
ccagugucuagcgcacagc

SEQ ID NO: 792365 - RNA, 22 nt, Human
aucaguguuccuugagacugcc

SEQ ID NO: 792366 - RNA, 22 nt, Human
uguauguuucuaaaugauugcu

SEQ ID NO: 792367 - RNA, 22 nt, Human
cauggcuuaccccaggagcagc

SEQ ID NO: 792368 - RNA, 22 nt, Human
uggcccaggaggccagagggca

SEQ ID NO: 792369 - RNA, 22 nt, Human
ccugggagaacugcuggguugg

SEQ ID NO: 792370 - RNA, 22 nt, Human
aggaggaaagaaggcccccagc

SEQ ID NO: 792371 - RNA, 22 nt, Human
ucagcaggguuugacuucuaau

SEQ ID NO: 792372 - RNA, 22 nt, Human
ugcucuggacgcugagugguuu

SEQ ID NO: 792373 - RNA, 22 nt, Human
gccucaggugcaucucucauuc

SEQ ID NO: 792374 - RNA, 22 nt, Human
ugcagcccuuccuuccucuggg

SEQ ID NO: 792375 - RNA, 22 nt, Human
ggagguucugauuugucacaac

SEQ ID NO: 792376 - RNA, 22 nt, Human
agggaaauuaaugugagcaaug

SEQ ID NO: 792377 - RNA, 22 nt, Human
aaauuucaguuggaaugagcuc

SEQ ID NO: 792378 - RNA, 22 nt, Human
aggcaguuggucauugcucuuu

SEQ ID NO: 792379 - RNA, 22 nt, Human
ucacauuuuccuugguaucugu

SEQ ID NO: 792380 - RNA, 22 nt, Human
aaaguuuaucauagccggggac

SEQ ID NO: 792381 - RNA, 21 nt, Human
ugggacagugauggcuccucc

SEQ ID NO: 792382 - RNA, 19 nt, Human
gggagacagcucugggcug

SEQ ID NO: 792383 - RNA, 22 nt, Human
ugggaaaguaauugucauccuu

SEQ ID NO: 792384 - RNA, 22 nt, Human
gggcuggcucccagguguugaa

SEQ ID NO: 792385 - RNA, 22 nt, Human
uuucuaaaggguagauuuggcc

SEQ ID NO: 792386 - RNA, 22 nt, Human
uuauauauauguagaggucacg

SEQ ID NO: 792387 - RNA, 22 nt, Human
caacaacaugggauucauuucu

SEQ ID NO: 792388 - RNA, 22 nt, Human
aggcugucuuccucccucuugg

SEQ ID NO: 792389 - RNA, 22 nt, Human
cugcaagguccaccugcuacau

SEQ ID NO: 792390 - RNA, 21 nt, Human
agaggucuaagauucuagcuu

SEQ ID NO: 792391 - RNA, 22 nt, Human
ucaugcaacaacacauucuggc

SEQ ID NO: 792392 - RNA, 22 nt, Human
uacugaaaaagaauccagaccu

SEQ ID NO: 792393 - RNA, 22 nt, Human
uaauaacaauuguaggacauga

SEQ ID NO: 792394 - RNA, 22 nt, Human
auaaggcuuaaaccuuguugcc

SEQ ID NO: 792395 - RNA, 22 nt, Human
ucaguguccauaaauaaaguuu

SEQ ID NO: 792396 - RNA, 22 nt, Human
caacuauagaucaaaugaguuu

SEQ ID NO: 792397 - RNA, 22 nt, Human
acuggcagaauugaauaguugu

SEQ ID NO: 792398 - RNA, 22 nt, Human
accagcucagaagccagaaaga

SEQ ID NO: 792399 - RNA, 22 nt, Human
ugccagcccaccuuggggccuc

SEQ ID NO: 792400 - RNA, 22 nt, Human
gggagucagagagguaauggga

SEQ ID NO: 792401 - RNA, 22 nt, Human
aaugcaaacuucuuguuacuug

SEQ ID NO: 792402 - RNA, 22 nt, Human
uggaguucucaggugagggcuu

SEQ ID NO: 792403 - RNA, 18 nt, Human
acucacagcagaagaagg

SEQ ID NO: 792404 - RNA, 22 nt, Human
caggugcugcguggcggagcug

SEQ ID NO: 792405 - RNA, 22 nt, Human
aggcaugugcuguuugucucca

SEQ ID NO: 792406 - RNA, 22 nt, Human
ugcaaaaacugcaauugcuuuu

SEQ ID NO: 792407 - RNA, 22 nt, Human
cagugagcuccugucugucccu

SEQ ID NO: 792408 - RNA, 22 nt, Human
uuuauauuguaaaaaugguucu

SEQ ID NO: 792409 - RNA, 22 nt, Human
uuugaagacuacugggagugaa

SEQ ID NO: 792410 - RNA, 19 nt, Human
guauauuuauauggcugua

SEQ ID NO: 792411 - RNA, 20 nt, Human
aacuccuagccucaagugau

SEQ ID NO: 792412 - RNA, 22 nt, Human
agcaauaauuuaggccuuuccu

SEQ ID NO: 792413 - RNA, 22 nt, Human
acagugucaucaguuucucaac

SEQ ID NO: 792414 - RNA, 22 nt, Human
uccuggcagaaauggggcugug

SEQ ID NO: 792415 - RNA, 22 nt, Human
ucuggcuccuggcuccacugcc

SEQ ID NO: 792416 - RNA, 22 nt, Human
uggggaaaacagaggaaauuag

SEQ ID NO: 792417 - RNA, 22 nt, Human
gucacuggggccacaugcagaa

SEQ ID NO: 792418 - RNA, 22 nt, Human
gccagggugugcagggacagga

SEQ ID NO: 792419 - RNA, 22 nt, Human
agaggccagggacacugcucaa

SEQ ID NO: 792420 - RNA, 22 nt, Human
uuuacacauaaauguguagaca

SEQ ID NO: 792421 - RNA, 22 nt, Human
gggccagagcuuggcagcuggg

SEQ ID NO: 792422 - RNA, 22 nt, Human
uacauaguguuuugaagaauua

SEQ ID NO: 792423 - RNA, 22 nt, Human
cagagcugcagauugaaggcau

SEQ ID NO: 792424 - RNA, 22 nt, Human
uaaagugcugggauuauaggcc

SEQ ID NO: 792425 - RNA, 22 nt, Human
uaagccugcaugaaccaugaga

SEQ ID NO: 792426 - RNA, 22 nt, Human
uaaacuaucuguguuugaaguu

SEQ ID NO: 792427 - RNA, 22 nt, Human
gcuuucaaauccuaauuccaac

SEQ ID NO: 792428 - RNA, 22 nt, Human
cagcagccacuagagggcucac

SEQ ID NO: 792429 - RNA, 22 nt, Human
ggugggcaggcgaggcccaggu

SEQ ID NO: 792430 - RNA, 22 nt, Human
uagucuuuugagaaguauaucu

SEQ ID NO: 792431 - RNA, 22 nt, Human
gcacacagaaucagugggcaua

SEQ ID NO: 792432 - RNA, 22 nt, Human
auaaaaguuuccaaucaugccu

SEQ ID NO: 792433 - RNA, 22 nt, Human
uucaaacauucaaauaaaccgg

SEQ ID NO: 792434 - RNA, 22 nt, Human
uuugcuuucuguugaacagagu

SEQ ID NO: 792435 - RNA, 22 nt, Human
auuugucauguauguaaaguug

SEQ ID NO: 792436 - RNA, 22 nt, Human
cugcaggauuucaugggcugac

SEQ ID NO: 792437 - RNA, 22 nt, Human
acaggcugaaaguuaaguucug

SEQ ID NO: 792438 - RNA, 22 nt, Human
gcugggauggagacugcaguga

SEQ ID NO: 792439 - RNA, 17 nt, Human
uuucccuccuuccacuc

SEQ ID NO: 792440 - RNA, 22 nt, Human
uuauugucaaaaacaggacacu

SEQ ID NO: 792441 - RNA, 21 nt, Human
ugcuggugagcucauguggcu

SEQ ID NO: 792442 - RNA, 22 nt, Human
uccuuuuugguccaaggugacc

SEQ ID NO: 792443 - RNA, 22 nt, Human
uagaauaugugguguauacuuu

SEQ ID NO: 792444 - RNA, 20 nt, Human
uugcaaauaucuauugauug

SEQ ID NO: 792445 - RNA, 22 nt, Human
uaggcagauuccauauuuuggc

SEQ ID NO: 792446 - RNA, 22 nt, Human
ccugggagagcugcccggguga

SEQ ID NO: 792447 - RNA, 22 nt, Human
gcuggcaguaaaggguuuggca

SEQ ID NO: 792448 - RNA, 22 nt, Human
aaaauuuugcccuauccuucau

SEQ ID NO: 792449 - RNA, 22 nt, Human
gugagggguggcugagcaguuu

SEQ ID NO: 792450 - RNA, 22 nt, Human
ucaucagucagaacuuaagcuu

SEQ ID NO: 792451 - RNA, 22 nt, Human
aguagcaugugcacaguaauuu

SEQ ID NO: 792452 - RNA, 22 nt, Human
uuugucugccuugcuggacugu

SEQ ID NO: 792453 - RNA, 22 nt, Human
aguccuggacuuggagucaggg

SEQ ID NO: 792454 - RNA, 22 nt, Human
cccaggcucagacuggcuuguu

SEQ ID NO: 792455 - RNA, 22 nt, Human
ugggccucaucuucaaugaguc

SEQ ID NO: 792456 - RNA, 22 nt, Human
aguguauucugcaugggagacu

SEQ ID NO: 792457 - RNA, 22 nt, Human
uccagccuuucuacucacugag

SEQ ID NO: 792458 - RNA, 22 nt, Human
ugacuuccagcaacuuccucca

SEQ ID NO: 792459 - RNA, 22 nt, Human
caggcaggucagugaagaagga

SEQ ID NO: 792460 - RNA, 22 nt, Human
aguccuaggcccugcuccagau

SEQ ID NO: 792461 - RNA, 22 nt, Human
uacaugcuucuauaugugaagu

SEQ ID NO: 792462 - RNA, 22 nt, Human
uuucagagcugagaugccacag

SEQ ID NO: 792463 - RNA, 18 nt, Human
cuagggcuguggcucuca

SEQ ID NO: 792464 - RNA, 22 nt, Human
ugaucaaagugcuggaauuaca

SEQ ID NO: 792465 - RNA, 22 nt, Human
gggcacaggagaaggaucuggc

SEQ ID NO: 792466 - RNA, 22 nt, Human
gacaaaacugagaucacacugu

SEQ ID NO: 792467 - RNA, 18 nt, Human
gggaggccccagcaggag

SEQ ID NO: 792468 - RNA, 19 nt, Human
ucaaggcucccugagggau

SEQ ID NO: 792469 - RNA, 22 nt, Human
aggcaguggagcuggaauaggc

SEQ ID NO: 792470 - RNA, 22 nt, Human
cacccaggcaaggauucugcaa

SEQ ID NO: 792471 - RNA, 22 nt, Human
ggcuacaguggcacugggcuuu

SEQ ID NO: 792472 - RNA, 22 nt, Human
uaagcaaauaaugcaucaaggg

SEQ ID NO: 792473 - RNA, 22 nt, Human
caguugccuuauuuccuugcug

SEQ ID NO: 792474 - RNA, 22 nt, Human
uugagaugacuuaaauuuggga

SEQ ID NO: 792475 - RNA, 21 nt, Human
ccuagccucuuacccagcuuu

SEQ ID NO: 792476 - RNA, 22 nt, Human
gccuggccgcuccgagcuccgc

SEQ ID NO: 792477 - RNA, 22 nt, Human
augacucuaagaauucuagaug

SEQ ID NO: 792478 - RNA, 22 nt, Human
auggcagaagucaagaugaguu

SEQ ID NO: 792479 - RNA, 22 nt, Human
aggccaagugcugggacaggug

SEQ ID NO: 792480 - RNA, 19 nt, Human
caggacaguuugccaagaa

SEQ ID NO: 792481 - RNA, 23 nt, Human
ccagggaaggccaucuucaacug

SEQ ID NO: 792482 - RNA, 22 nt, Human
augggcagcugcagcaguggug

SEQ ID NO: 792483 - RNA, 22 nt, Human
auccugggccucagaggugugu

SEQ ID NO: 792484 - RNA, 22 nt, Human
aggagggagcacuauaugggga

SEQ ID NO: 792485 - RNA, 20 nt, Human
cccuggccuguuucaugccc

SEQ ID NO: 792486 - RNA, 22 nt, Human
ugcacuuuaaaaaauggugaug

SEQ ID NO: 792487 - RNA, 22 nt, Human
aagacaauccuggacagucagc

SEQ ID NO: 792488 - RNA, 22 nt, Human
uggcuucuuagaccaguggccu

SEQ ID NO: 792489 - RNA, 22 nt, Human
auuuuucucuuuccacugagau

SEQ ID NO: 792490 - RNA, 22 nt, Human
guacacacuguuugaucauuuc

SEQ ID NO: 792491 - RNA, 23 nt, Human
uucauauguugcugaaaacagca

SEQ ID NO: 792492 - RNA, 22 nt, Human
accccuuuuauagaagaacaga

SEQ ID NO: 792493 - RNA, 23 nt, Human
ugagcccaggaggucaaggcugc

SEQ ID NO: 792494 - RNA, 22 nt, Human
acagcagagccaguggcucuag

SEQ ID NO: 792495 - RNA, 22 nt, Human
acugcuauuuuauaacagaaga

SEQ ID NO: 792496 - RNA, 22 nt, Human
uggcccgccggaagaagauguc

SEQ ID NO: 792497 - RNA, 22 nt, Human
gcuucugaggaaggcucagccu

SEQ ID NO: 792498 - RNA, 22 nt, Human
ugccaggcuaaguggaggacuu

SEQ ID NO: 792499 - RNA, 22 nt, Human
uuccucagcucagcgagagaga

SEQ ID NO: 792500 - RNA, 22 nt, Human
ggucagaauuaggucuagagua

SEQ ID NO: 792501 - RNA, 20 nt, Human
caaagacaugcuaggggugg

SEQ ID NO: 792502 - RNA, 22 nt, Human
guuucauauauaguaacugaaa

SEQ ID NO: 792503 - RNA, 22 nt, Human
gggcagcucuggcugugggaag

SEQ ID NO: 792504 - RNA, 22 nt, Human
cagcugaguuacucugaggucu

SEQ ID NO: 792505 - RNA, 17 nt, Human
ugccagccugucccagg

SEQ ID NO: 792506 - RNA, 20 nt, Human
ugcuggcaugcaagagggaa

SEQ ID NO: 792507 - RNA, 17 nt, Human
auuucccagcagugcua

SEQ ID NO: 792508 - RNA, 22 nt, Human
gccacccuuaucccaugcuucu

SEQ ID NO: 792509 - RNA, 22 nt, Human
uacaacaauuuccacauuagaa

SEQ ID NO: 792510 - RNA, 23 nt, Human
gggaaaggauaugauccuagggg

SEQ ID NO: 792511 - RNA, 22 nt, Human
ugcuccugagguuggagaucca

SEQ ID NO: 792512 - RNA, 22 nt, Human
cugaaaugacgguuuggggcaa

SEQ ID NO: 792513 - RNA, 22 nt, Human
uagaaaguaaacacgaagucuc

SEQ ID NO: 792514 - RNA, 22 nt, Human
cugcagcuccugagcucagaga

SEQ ID NO: 792515 - RNA, 22 nt, Human
ugaggggagguuggggcacauc

SEQ ID NO: 792516 - RNA, 22 nt, Human
acugagguugaaauagugaugu

SEQ ID NO: 792517 - RNA, 22 nt, Human
uuuauuccaugugucuaugacc

SEQ ID NO: 792518 - RNA, 22 nt, Human
guuucauaauucaaucaaauga

SEQ ID NO: 792519 - RNA, 22 nt, Human
agaagggaacucagagaugauu

SEQ ID NO: 792520 - RNA, 22 nt, Human
acaauauacacauccuaauggg

SEQ ID NO: 792521 - RNA, 22 nt, Human
cacuguggugugagggcugaug

SEQ ID NO: 792522 - RNA, 22 nt, Human
auguuuaugcaaacaugugagu

SEQ ID NO: 792523 - RNA, 22 nt, Human
gauguacuugccuuaucuaucc

SEQ ID NO: 792524 - RNA, 22 nt, Human
gcuggccucgcaggcaggaugu

SEQ ID NO: 792525 - RNA, 22 nt, Human
aacagcaugcuggguaacauug

SEQ ID NO: 792526 - RNA, 22 nt, Human
guuauaaaaugcacaguuguuu

SEQ ID NO: 792527 - RNA, 22 nt, Human
aguaauagugaaucgacuauga

SEQ ID NO: 792528 - RNA, 22 nt, Human
agcaggagagcagugcgugguc

SEQ ID NO: 792529 - RNA, 21 nt, Human
agcugagcccagaagacuggu

SEQ ID NO: 792530 - RNA, 22 nt, Human
uucuuuggcauuuccuguaugu

SEQ ID NO: 792531 - RNA, 17 nt, Human
uacaggagagcaggaac

SEQ ID NO: 792532 - RNA, 22 nt, Human
augaaaugauugaaaucuuuac

SEQ ID NO: 792533 - RNA, 22 nt, Human
auauauuuacucuccuguugca

SEQ ID NO: 792534 - RNA, 22 nt, Human
ggcuggcugauaaaggguugag

SEQ ID NO: 792535 - RNA, 22 nt, Human
gagucucuggaggggucagacc

SEQ ID NO: 792536 - RNA, 20 nt, Human
aggcucacucaccuugugga

SEQ ID NO: 792537 - RNA, 22 nt, Human
agagccuguacuuuucugugaa

SEQ ID NO: 792538 - RNA, 22 nt, Human
acuuaaaguuauaauuugcuaa

SEQ ID NO: 792539 - RNA, 22 nt, Human
uuuaaugauagcuguuucacau

SEQ ID NO: 792540 - RNA, 22 nt, Human
agcucuuuggcacugagcagca

SEQ ID NO: 792541 - RNA, 22 nt, Human
ggcagcccaccagcccacgucu

SEQ ID NO: 792542 - RNA, 23 nt, Human
uaagaacagacaagcauuuacau

SEQ ID NO: 792543 - RNA, 22 nt, Human
ggcuggauguacuuuggggcug

SEQ ID NO: 792544 - RNA, 22 nt, Human
ugaauacuauuucauaaugugg

SEQ ID NO: 792545 - RNA, 22 nt, Human
gaaaucaggaugauguuccaga

SEQ ID NO: 792546 - RNA, 22 nt, Human
ucacuggggccaugugagggac

SEQ ID NO: 792547 - RNA, 22 nt, Human
acagcaaaagacaagaacuuaa

SEQ ID NO: 792548 - RNA, 22 nt, Human
aaacauguaauucugcuuaaga

SEQ ID NO: 792549 - RNA, 20 nt, Human
ugagaaggggucagcuguac

SEQ ID NO: 792550 - RNA, 22 nt, Human
cuacaaaaguaauugugguuuu

SEQ ID NO: 792551 - RNA, 22 nt, Human
ccagugucugugguauagaaag

SEQ ID NO: 792552 - RNA, 22 nt, Human
aaacaguucucauuuguuuaga

SEQ ID NO: 792553 - RNA, 22 nt, Human
gggacgagaucuuggcagugug

SEQ ID NO: 792554 - RNA, 22 nt, Human
ucauaaacacacuaguaugauu

SEQ ID NO: 792555 - RNA, 22 nt, Human
uuuccucuucuggcaggcaggg

SEQ ID NO: 792556 - RNA, 20 nt, Human
uaaauuagccuugaagauua

SEQ ID NO: 792557 - RNA, 22 nt, Human
aauuuuguucuuggaaaucagg

SEQ ID NO: 792558 - RNA, 22 nt, Human
aacaugaaacccaaacagaaua

SEQ ID NO: 792559 - RNA, 22 nt, Human
agguaggguuaauggagauaua

SEQ ID NO: 792560 - RNA, 22 nt, Human
gggaagagaccguacccuggcc

SEQ ID NO: 792561 - RNA, 22 nt, Human
aucuacaaugucuggcugcacu

SEQ ID NO: 792562 - RNA, 22 nt, Human
cugaaaauguuacacaggaaga

SEQ ID NO: 792563 - RNA, 22 nt, Human
aagcaggagaugcaggaaugua

SEQ ID NO: 792564 - RNA, 22 nt, Human
cacagugcgaaagaaacccagc

SEQ ID NO: 792565 - RNA, 22 nt, Human
caguccugggagacuuacccag

SEQ ID NO: 792566 - RNA, 21 nt, Human
agcagaggcagaauguaugca

SEQ ID NO: 792567 - RNA, 22 nt, Human
ucuccugguauguaugcaccug

SEQ ID NO: 792568 - RNA, 19 nt, Human
aaacucauagacucauauu

SEQ ID NO: 792569 - RNA, 22 nt, Human
uaguaaaaguuuaguugaaagu

SEQ ID NO: 792570 - RNA, 22 nt, Human
cugccucugcgucccacagagu

SEQ ID NO: 792571 - RNA, 22 nt, Human
cucaaggaaagucuggagaaga

SEQ ID NO: 792572 - RNA, 22 nt, Human
ccaggaaguaugacccaacaga

SEQ ID NO: 792573 - RNA, 22 nt, Human
ugagggagagggcgaaaaugaa

SEQ ID NO: 792574 - RNA, 22 nt, Human
ggccuuggccuagcccuccagg

SEQ ID NO: 792575 - RNA, 22 nt, Human
cuggaggcaguugccccaguca

SEQ ID NO: 792576 - RNA, 22 nt, Human
caggguggugaauagcuauagu

SEQ ID NO: 792577 - RNA, 22 nt, Human
ccacaguguuuugucacauuag

SEQ ID NO: 792578 - RNA, 19 nt, Human
cugacagcgccugauaaga

SEQ ID NO: 792579 - RNA, 23 nt, Human
uggaggaaacacaucagaagacc

SEQ ID NO: 792580 - RNA, 19 nt, Human
acagaaauguaagugagac

SEQ ID NO: 792581 - RNA, 22 nt, Human
aggccucuggagguggcagugu

SEQ ID NO: 792582 - RNA, 22 nt, Human
ugaucauuaucaaacuggucau

SEQ ID NO: 792583 - RNA, 22 nt, Human
uacaaaggaaacuucuuuuccc

SEQ ID NO: 792584 - RNA, 22 nt, Human
cagacagaaggaaggccaacau

SEQ ID NO: 792585 - RNA, 22 nt, Human
aauuucaccuaucacuuaagcc

SEQ ID NO: 792586 - RNA, 22 nt, Human
ugccaggaggaggugggacaga

SEQ ID NO: 792587 - RNA, 22 nt, Human
aagugauucauugaugaugagg

SEQ ID NO: 792588 - RNA, 20 nt, Human
acaaaguauugaggacaagu

SEQ ID NO: 792589 - RNA, 22 nt, Human
auuacaauaauacaugcucauu

SEQ ID NO: 792590 - RNA, 22 nt, Human
cagcagcagcuuaguggucccc

SEQ ID NO: 792591 - RNA, 22 nt, Human
gcucaaaugucauggggagccu

SEQ ID NO: 792592 - RNA, 22 nt, Human
accagagagccuaggcugggca

SEQ ID NO: 792593 - RNA, 22 nt, Human
aaauaaagguccacuuuagggc

SEQ ID NO: 792594 - RNA, 22 nt, Human
aguaaugaauacgguauuugaa

SEQ ID NO: 792595 - RNA, 22 nt, Human
acagugcugucaaauauguuuu

SEQ ID NO: 792596 - RNA, 22 nt, Human
ugcaaaaagagcgaggagcccu

SEQ ID NO: 792597 - RNA, 22 nt, Human
auuucccaggacuagaaauaua

SEQ ID NO: 792598 - RNA, 21 nt, Human
cuggagcuuggugagaagugu

SEQ ID NO: 792599 - RNA, 22 nt, Human
acaaacaucuugaccucagauu

SEQ ID NO: 792600 - RNA, 22 nt, Human
agccucugauggcucccaagga

SEQ ID NO: 792601 - RNA, 19 nt, Human
agcuguggggccuagcacc

SEQ ID NO: 792602 - RNA, 18 nt, Human
ccagcccugcagcaccug

SEQ ID NO: 792603 - RNA, 22 nt, Human
cuucauuuccauccaacuggga

SEQ ID NO: 792604 - RNA, 23 nt, Human
aaauaggaguaucuggaucauga

SEQ ID NO: 792605 - RNA, 22 nt, Human
uggauucugggcuguuugcauu

SEQ ID NO: 792606 - RNA, 22 nt, Human
cucaggacccgguccagguggg

SEQ ID NO: 792607 - RNA, 22 nt, Human
caagauuacuauccacugcugg

SEQ ID NO: 792608 - RNA, 22 nt, Human
aagcacagugccaaguucuauu

SEQ ID NO: 792609 - RNA, 22 nt, Human
uggcagcugucuguggggucuc

SEQ ID NO: 792610 - RNA, 22 nt, Human
caggcauggagaggcagagacu

SEQ ID NO: 792611 - RNA, 22 nt, Human
ccaggccagggcugcagcgagc

SEQ ID NO: 792612 - RNA, 20 nt, Human
caccaggcgcucugagaaca

SEQ ID NO: 792613 - RNA, 22 nt, Human
uauacagaacugcacgugcacg

SEQ ID NO: 792614 - RNA, 22 nt, Human
cagcugaauucuucagacucca

SEQ ID NO: 792615 - RNA, 22 nt, Human
cauggcagcuuugggaggagga

SEQ ID NO: 792616 - RNA, 22 nt, Human
uuucacaacguuguggugagag

SEQ ID NO: 792617 - RNA, 20 nt, Human
uucuuuacgaccuuucugca

SEQ ID NO: 792618 - RNA, 22 nt, Human
ggcugcugaguuggccaggaga

SEQ ID NO: 792619 - RNA, 22 nt, Human
aggagggagcuuaagccaggca

SEQ ID NO: 792620 - RNA, 22 nt, Human
agccccaggaugggccgcagga

SEQ ID NO: 792621 - RNA, 22 nt, Human
ccuggccacagggcucugcauu

SEQ ID NO: 792622 - RNA, 22 nt, Human
uggcucagaaggcugccuucac

SEQ ID NO: 792623 - RNA, 22 nt, Human
ugggccaguagcuacucgcaag

SEQ ID NO: 792624 - RNA, 22 nt, Human
cugagcuguuacucuguccucg

SEQ ID NO: 792625 - RNA, 22 nt, Human
aaacccauggcugauaucacua

SEQ ID NO: 792626 - RNA, 22 nt, Human
aguggccagugcugcucugggg

SEQ ID NO: 792627 - RNA, 22 nt, Human
ucucuggcagaggcccuauccc

SEQ ID NO: 792628 - RNA, 22 nt, Human
aaaauuuucagcuugacuugau

SEQ ID NO: 792629 - RNA, 22 nt, Human
cuucugaauggcuguguaugcu

SEQ ID NO: 792630 - RNA, 22 nt, Human
ugagauggagucuugcucuguu

SEQ ID NO: 792631 - RNA, 22 nt, Human
aacagaaaucauuuagggcucu

SEQ ID NO: 792632 - RNA, 22 nt, Human
uggggaaagggauggcucccgc

SEQ ID NO: 792633 - RNA, 22 nt, Human
auuauuaaagcuuaggucuuau

SEQ ID NO: 792634 - RNA, 22 nt, Human
cucuuuggggcuggaagccuag

SEQ ID NO: 792635 - RNA, 20 nt, Human
auacaaagagauugauguau

SEQ ID NO: 792636 - RNA, 22 nt, Human
ggcagccacccugggaggcaga

SEQ ID NO: 792637 - RNA, 22 nt, Human
aaguccuuuccaguccugugau

SEQ ID NO: 792638 - RNA, 22 nt, Human
aauaccuuuucagugcacaaaa

SEQ ID NO: 792639 - RNA, 22 nt, Human
uaaagacaaacccacuaggguu

SEQ ID NO: 792640 - RNA, 22 nt, Human
gugcaaaugauucuaaugggua

SEQ ID NO: 792641 - RNA, 22 nt, Human
gcaggagagucugugccagguu

SEQ ID NO: 792642 - RNA, 22 nt, Human
aacuaaaacugguuuguucucu

SEQ ID NO: 792643 - RNA, 22 nt, Human
agguggggaggagugucucuuu

SEQ ID NO: 792644 - RNA, 22 nt, Human
ccagcuggugacauccccaacc

SEQ ID NO: 792645 - RNA, 22 nt, Human
gucuuuggagaggugccauuuc

SEQ ID NO: 792646 - RNA, 22 nt, Human
cugguucacaucuguuuaucug

SEQ ID NO: 792647 - RNA, 23 nt, Human
cagagcuggcucagagcugccug

SEQ ID NO: 792648 - RNA, 22 nt, Human
gugcuuccuguauugauuccau

SEQ ID NO: 792649 - RNA, 22 nt, Human
gccaggcuggucuugaacuccu

SEQ ID NO: 792650 - RNA, 21 nt, Human
cucugcugucuaccagcuguu

SEQ ID NO: 792651 - RNA, 23 nt, Human
uucauguucccuccuucugguga

SEQ ID NO: 792652 - RNA, 22 nt, Human
gcugccuggagcucagccugcc

SEQ ID NO: 792653 - RNA, 22 nt, Human
ccaggccucccuuuuccagcca

SEQ ID NO: 792654 - RNA, 22 nt, Human
aaacauucaaagcaggaugugu

SEQ ID NO: 792655 - RNA, 22 nt, Human
uuccaggaauucagcucucagu

SEQ ID NO: 792656 - RNA, 21 nt, Human
ccacaggggcuccccugucag

SEQ ID NO: 792657 - RNA, 22 nt, Human
cuggcuggaacgccgaggcggc

SEQ ID NO: 792658 - RNA, 22 nt, Human
agcuggggguuggauaagggua

SEQ ID NO: 792659 - RNA, 22 nt, Human
cagaggcccagugagagggcug

SEQ ID NO: 792660 - RNA, 22 nt, Human
gagccagccgcaagagcuguga

SEQ ID NO: 792661 - RNA, 22 nt, Human
cugccuggagcauucugaaggu

SEQ ID NO: 792662 - RNA, 22 nt, Human
cagcuugggucaggugccugcu

SEQ ID NO: 792663 - RNA, 22 nt, Human
ccagggugggaggcugaaggcg

SEQ ID NO: 792664 - RNA, 22 nt, Human
aggccaagugaacaaugcuagu

SEQ ID NO: 792665 - RNA, 22 nt, Human
gggcugggauggcuugaagauu

SEQ ID NO: 792666 - RNA, 22 nt, Human
acugggaggcaucuggagcuga

SEQ ID NO: 792667 - RNA, 22 nt, Human
aaaagcagguacucagcuuggg

SEQ ID NO: 792668 - RNA, 22 nt, Human
acauacauugccucauugguaa

SEQ ID NO: 792669 - RNA, 23 nt, Human
ggccacuuugugucaguaugugc

SEQ ID NO: 792670 - RNA, 22 nt, Human
ccugucuacauaacugugugaa

SEQ ID NO: 792671 - RNA, 22 nt, Human
augcauucaugaagauugcaca

SEQ ID NO: 792672 - RNA, 22 nt, Human
aaagugcagcugaaaacauccu

SEQ ID NO: 792673 - RNA, 22 nt, Human
gccugagagaacugaccaagag

SEQ ID NO: 792674 - RNA, 22 nt, Human
ggucagccuuggauuugguagc

SEQ ID NO: 792675 - RNA, 22 nt, Human
aucucacacuggguuugagggu

SEQ ID NO: 792676 - RNA, 22 nt, Human
uggcagugaaccaaggcuccaa

SEQ ID NO: 792677 - RNA, 22 nt, Human
gguggcaguuacaggggcaaau

SEQ ID NO: 792678 - RNA, 22 nt, Human
auaugccagcuccaaguaagag

SEQ ID NO: 792679 - RNA, 22 nt, Human
acagucuuuaauuucuuugugg

SEQ ID NO: 792680 - RNA, 22 nt, Human
auacagaaguuuuccacuuauu

SEQ ID NO: 792681 - RNA, 22 nt, Human
uaucaggaggaaauuuccauug

SEQ ID NO: 792682 - RNA, 18 nt, Human
uguuuauuuuucucuuac

SEQ ID NO: 792683 - RNA, 22 nt, Human
gagaggcugguaaagucugaac

SEQ ID NO: 792684 - RNA, 22 nt, Human
aggaaacaggcagccuuugaac

SEQ ID NO: 792685 - RNA, 22 nt, Human
guuuauuccagcaaucugcuua

SEQ ID NO: 792686 - RNA, 22 nt, Human
ccagccuggagggcaguggugg

SEQ ID NO: 792687 - RNA, 22 nt, Human
gauacaaaauauaaauggagag

SEQ ID NO: 792688 - RNA, 22 nt, Human
ccuccuuccugggacagagcug

SEQ ID NO: 792689 - RNA, 22 nt, Human
ucagaaggaaacgaugccagcu

SEQ ID NO: 792690 - RNA, 22 nt, Human
caugcaaacacguaaacauuca

SEQ ID NO: 792691 - RNA, 21 nt, Human
agguggcugcauccucagaag

SEQ ID NO: 792692 - RNA, 22 nt, Human
uguuuacaagccacuuguuaag

SEQ ID NO: 792693 - RNA, 22 nt, Human
uccuggggccagcacuggugga

SEQ ID NO: 792694 - RNA, 22 nt, Human
gccaggguccugaagaccaagu

SEQ ID NO: 792695 - RNA, 22 nt, Human
uaacaugagagcuaagacauua

SEQ ID NO: 792696 - RNA, 22 nt, Human
cccagggcccuggacagcuaca

SEQ ID NO: 792697 - RNA, 22 nt, Human
aaauagcacagcagcugaggcu

SEQ ID NO: 792698 - RNA, 22 nt, Human
auagaauguauuauaguacaga

SEQ ID NO: 792699 - RNA, 22 nt, Human
cauugcuuugugcauauuuaaa

SEQ ID NO: 792700 - RNA, 22 nt, Human
cuggcagcauggagccugugcu

SEQ ID NO: 792701 - RNA, 22 nt, Human
aggcugagggcuccugagggca

SEQ ID NO: 792702 - RNA, 22 nt, Human
gcauuccuacaggcugcuauga

SEQ ID NO: 792703 - RNA, 22 nt, Human
cugccuggaaugccagcuucuc

SEQ ID NO: 792704 - RNA, 22 nt, Human
ugauucaacuuucuugaaugca

SEQ ID NO: 792705 - RNA, 22 nt, Human
ugacaaagaggaacagcagggg

SEQ ID NO: 792706 - RNA, 19 nt, Human
uacaauuggcuuuccauug

SEQ ID NO: 792707 - RNA, 22 nt, Human
aggagccaggccccauggggcu

SEQ ID NO: 792708 - RNA, 22 nt, Human
uaguuucucagggaggaaagaa

SEQ ID NO: 792709 - RNA, 22 nt, Human
cugggcugcgggcgccccucca

SEQ ID NO: 792710 - RNA, 22 nt, Human
agaaacugacaggaaaugaauu

SEQ ID NO: 792711 - RNA, 22 nt, Human
gaaauauuguacuggagauguu

SEQ ID NO: 792712 - RNA, 22 nt, Human
gccuccggagucacagugucuu

SEQ ID NO: 792713 - RNA, 22 nt, Human
uccucaggcugccuggaagacu

SEQ ID NO: 792714 - RNA, 22 nt, Human
agugcagugguuaggagccagg

SEQ ID NO: 792715 - RNA, 22 nt, Human
ccucucccagggagagccugag

SEQ ID NO: 792716 - RNA, 18 nt, Human
gcuggcugcacuucugcu

SEQ ID NO: 792717 - RNA, 22 nt, Human
uagaaacccugccuuaguagcu

SEQ ID NO: 792718 - RNA, 22 nt, Human
guacauauuauaaaauacagcu

SEQ ID NO: 792719 - RNA, 22 nt, Human
uucucuuuuugcaucucaaccu

SEQ ID NO: 792720 - RNA, 22 nt, Human
uagauacauacauuuuaaaaug

SEQ ID NO: 792721 - RNA, 22 nt, Human
uguguaaaaucugauuaauacu

SEQ ID NO: 792722 - RNA, 23 nt, Human
cugggcugcuugagucccuggcu

SEQ ID NO: 792723 - RNA, 22 nt, Human
cugcugggcagaggcugcauga

SEQ ID NO: 792724 - RNA, 22 nt, Human
cugggcacaaguggcccuggau

SEQ ID NO: 792725 - RNA, 22 nt, Human
aggaaagguagcgugccagcag

SEQ ID NO: 792726 - RNA, 22 nt, Human
ccuccugguaauuagcgaaagg

SEQ ID NO: 792727 - RNA, 22 nt, Human
ucagaagguggagguugcagug

SEQ ID NO: 792728 - RNA, 22 nt, Human
gaaagugcuuagagugugguau

SEQ ID NO: 792729 - RNA, 22 nt, Human
auggaguucugccagcgcugcu

SEQ ID NO: 792730 - RNA, 22 nt, Human
guggcaguguggagggaggagu

SEQ ID NO: 792731 - RNA, 22 nt, Human
ucagugucuucucuuuccuacc

SEQ ID NO: 792732 - RNA, 21 nt, Human
acagaacuguauagugauaaa

SEQ ID NO: 792733 - RNA, 22 nt, Human
uaggaaauuuuacuggucuggg

SEQ ID NO: 792734 - RNA, 22 nt, Human
ugaugcuucacgcugaauaugc

SEQ ID NO: 792735 - RNA, 22 nt, Human
gcugcaggcagaaucucccaau

SEQ ID NO: 792736 - RNA, 22 nt, Human
ugucuugacuuuagagccagga

SEQ ID NO: 792737 - RNA, 22 nt, Human
uauuacauccacuuuuauugca

SEQ ID NO: 792738 - RNA, 18 nt, Human
ugggugguuuuucucucc

SEQ ID NO: 792739 - RNA, 22 nt, Human
cagcuuuggcccagucgggagg

SEQ ID NO: 792740 - RNA, 22 nt, Human
uuucacaaagcauagcacuuua

SEQ ID NO: 792741 - RNA, 22 nt, Human
ucccagggugaaaugcaguagg

SEQ ID NO: 792742 - RNA, 22 nt, Human
ccucugagccugugugcggcac

SEQ ID NO: 792743 - RNA, 22 nt, Human
gagccaagggcgugcuggagag

SEQ ID NO: 792744 - RNA, 22 nt, Human
ggcugagggucccagacccuaa

SEQ ID NO: 792745 - RNA, 22 nt, Human
agaaauguggaucguuuuaaaa

SEQ ID NO: 792746 - RNA, 22 nt, Human
uucuauuuuuguggaacuguag

SEQ ID NO: 792747 - RNA, 22 nt, Human
uccaggcccugggaugggagca

SEQ ID NO: 792748 - RNA, 19 nt, Human
cuggccuguguccugugcu

SEQ ID NO: 792749 - RNA, 19 nt, Human
uggcagggagugauauuag

SEQ ID NO: 792750 - RNA, 22 nt, Human
uuugucauuucccugauuaaag

SEQ ID NO: 792751 - RNA, 22 nt, Human
cuaaacaaugaacaaagcacug

SEQ ID NO: 792752 - RNA, 22 nt, Human
ucugcagcccaaagucucuuag

SEQ ID NO: 792753 - RNA, 22 nt, Human
acuauacaccaaaauauuaagg

SEQ ID NO: 792754 - RNA, 22 nt, Human
uuugcaaaguuauuuagacuca

SEQ ID NO: 792755 - RNA, 22 nt, Human
ggcacacagauggagcacuagc

SEQ ID NO: 792756 - RNA, 22 nt, Human
ugcagagguguugcugagauaa

SEQ ID NO: 792757 - RNA, 18 nt, Human
gcuccugguuggaaagaa

SEQ ID NO: 792758 - RNA, 22 nt, Human
aucuucaacuuuggggcugccu

SEQ ID NO: 792759 - RNA, 22 nt, Human
agugcauucaguauucauaggc

SEQ ID NO: 792760 - RNA, 22 nt, Human
gacauucuaaaaaauauggaag

SEQ ID NO: 792761 - RNA, 22 nt, Human
uaugacaagaaauacagaggua

SEQ ID NO: 792762 - RNA, 22 nt, Human
cacaauaaauguuugcugauga

SEQ ID NO: 792763 - RNA, 22 nt, Human
cagggcaguuugugccuaugag

SEQ ID NO: 792764 - RNA, 22 nt, Human
agaaauacugccuaagacugua

SEQ ID NO: 792765 - RNA, 22 nt, Human
cuugccugcuggagcagggcuc

SEQ ID NO: 792766 - RNA, 22 nt, Human
guccucugucccuggggcacgg

SEQ ID NO: 792767 - RNA, 22 nt, Human
acaggcagcaaaaucagccuca

SEQ ID NO: 792768 - RNA, 22 nt, Human
auugauuugaacaaagauauua

SEQ ID NO: 792769 - RNA, 22 nt, Human
aaggcagauaagaauucagcaa

SEQ ID NO: 792770 - RNA, 22 nt, Human
gaauuuaucuacguuaaguaug

SEQ ID NO: 792771 - RNA, 22 nt, Human
ucuuaaugcuagccaauagaga

SEQ ID NO: 792772 - RNA, 22 nt, Human
accccagcgcauauggucugcg

SEQ ID NO: 792773 - RNA, 22 nt, Human
auuuuuccugggugcuuuaguu

SEQ ID NO: 792774 - RNA, 22 nt, Human
uggcuuccccuaccuuccaauu

SEQ ID NO: 792775 - RNA, 22 nt, Human
uugaaugagaaguuauugccau

SEQ ID NO: 792776 - RNA, 22 nt, Human
agaauaaaugcuaccuaucaca

SEQ ID NO: 792777 - RNA, 22 nt, Human
ugcuggagcuccgggcuguagg

SEQ ID NO: 792778 - RNA, 22 nt, Human
agcuucuugaccaagccuguaa

SEQ ID NO: 792779 - RNA, 22 nt, Human
accucaggauguggacacagaa

SEQ ID NO: 792780 - RNA, 22 nt, Human
aguccuggccccaaggaaggau

SEQ ID NO: 792781 - RNA, 22 nt, Human
ggcaguguccagcuuccuggag

SEQ ID NO: 792782 - RNA, 19 nt, Human
gcagaugaugaggcugguc

SEQ ID NO: 792783 - RNA, 22 nt, Human
gguggggcccaggcaucugaug

SEQ ID NO: 792784 - RNA, 22 nt, Human
auuuccaguacccagaacagag

SEQ ID NO: 792785 - RNA, 22 nt, Human
uagugucauuucaguggaguuu

SEQ ID NO: 792786 - RNA, 22 nt, Human
caggacagcugggccaccacca

SEQ ID NO: 792787 - RNA, 22 nt, Human
ccuucugagcuucaauuucagu

SEQ ID NO: 792788 - RNA, 22 nt, Human
cucucucaguguaauacaggau

SEQ ID NO: 792789 - RNA, 22 nt, Human
aggucaagguucacaggggauc

SEQ ID NO: 792790 - RNA, 22 nt, Human
ccaggagcaaagaucacuggga

SEQ ID NO: 792791 - RNA, 22 nt, Human
auguucuuggauguuguguaua

SEQ ID NO: 792792 - RNA, 22 nt, Human
auuugucaaaacacagagaaca

SEQ ID NO: 792793 - RNA, 22 nt, Human
uaaagugaguacaaaaugaggg

SEQ ID NO: 792794 - RNA, 22 nt, Human
acaggaaauuggcauaucaguu

SEQ ID NO: 792795 - RNA, 22 nt, Human
gaaaacauccagagauagaccu

SEQ ID NO: 792796 - RNA, 22 nt, Human
aaaggcauguggucaaggcuca

SEQ ID NO: 792797 - RNA, 22 nt, Human
aacauucugguucuaaaaaccu

SEQ ID NO: 792798 - RNA, 22 nt, Human
cacagggaaccaaggcugggcc

SEQ ID NO: 792799 - RNA, 22 nt, Human
ucaguucuuauuuucaugaaua

SEQ ID NO: 792800 - RNA, 17 nt, Human
aauugucagcaguagcu

SEQ ID NO: 792801 - RNA, 22 nt, Human
auguauuugcguauggacauac

SEQ ID NO: 792802 - RNA, 22 nt, Human
uuccucagcuguguccuggcga

SEQ ID NO: 792803 - RNA, 22 nt, Human
uauacaguuaaguuucuucagu

SEQ ID NO: 792804 - RNA, 22 nt, Human
acagcagggaauaugggaauug

SEQ ID NO: 792805 - RNA, 20 nt, Human
ggggggcuucagggccugug

SEQ ID NO: 792806 - RNA, 22 nt, Human
cugagcagcaauugcuggccca

SEQ ID NO: 792807 - RNA, 22 nt, Human
aaagcuauagggucaagcauuu

SEQ ID NO: 792808 - RNA, 20 nt, Human
cccuggagagaagcuccacg

SEQ ID NO: 792809 - RNA, 22 nt, Human
aggccagguggucaugcuugcu

SEQ ID NO: 792810 - RNA, 22 nt, Human
auguacaaaauguuuugaaaug

SEQ ID NO: 792811 - RNA, 22 nt, Human
cugcccuguggcucugagucau

SEQ ID NO: 792812 - RNA, 22 nt, Human
ugcaggcucaccugccagggcc

SEQ ID NO: 792813 - RNA, 17 nt, Human
ugggccaguagaaggga

SEQ ID NO: 792814 - RNA, 22 nt, Human
augacacaagagcagaagccau

SEQ ID NO: 792815 - RNA, 22 nt, Human
caggcccacugcuugucuaguc

SEQ ID NO: 792816 - RNA, 22 nt, Human
ucacaauuuggauacagcuaug

SEQ ID NO: 792817 - RNA, 22 nt, Human
ggccuagggaguggccaugccu

SEQ ID NO: 792818 - RNA, 22 nt, Human
cauggcagagccugcagguggg

SEQ ID NO: 792819 - RNA, 22 nt, Human
gagcugagcagggagccucacu

SEQ ID NO: 792820 - RNA, 22 nt, Human
gaauuacauaguuucuagguuc

SEQ ID NO: 792821 - RNA, 22 nt, Human
uuccagaguauugguagcuaua

SEQ ID NO: 792822 - RNA, 22 nt, Human
aagcaauagcaacaacuuuaca

SEQ ID NO: 792823 - RNA, 22 nt, Human
uagcuuugcuggcaagcauguc

SEQ ID NO: 792824 - RNA, 22 nt, Human
gcagcugaaagggaucucuaca

SEQ ID NO: 792825 - RNA, 20 nt, Human
caccagcagcagcugccacc

SEQ ID NO: 792826 - RNA, 22 nt, Human
agaaauuauuagugaauagucu

SEQ ID NO: 792827 - RNA, 22 nt, Human
aggccugggucucgugccuacc

SEQ ID NO: 792828 - RNA, 18 nt, Human
aagcugggaaggagacag

SEQ ID NO: 792829 - RNA, 22 nt, Human
caaggcaguuccccagagggcu

SEQ ID NO: 792830 - RNA, 22 nt, Human
cuggcucccgaagcccucagug

SEQ ID NO: 792831 - RNA, 22 nt, Human
ugccuggcugaggugacagguu

SEQ ID NO: 792832 - RNA, 22 nt, Human
auccauuuccuccacuauaaag

SEQ ID NO: 792833 - RNA, 22 nt, Human
ugggaccacacuuugaacaaca

SEQ ID NO: 792834 - RNA, 22 nt, Human
ugggccugccccaggcuucagc

SEQ ID NO: 792835 - RNA, 22 nt, Human
gucagcaaggaaaaugugucac

SEQ ID NO: 792836 - RNA, 21 nt, Human
aucaacauugaaagagcugga

SEQ ID NO: 792837 - RNA, 22 nt, Human
acgaauaaaucuauuucacaca

SEQ ID NO: 792838 - RNA, 22 nt, Human
cugcuggcaccgaugaaagaca

SEQ ID NO: 792839 - RNA, 22 nt, Human
ggaggcugagaaguccaagauc

SEQ ID NO: 792840 - RNA, 22 nt, Human
gaguccaggcuggucaaauagc

SEQ ID NO: 792841 - RNA, 22 nt, Human
gaggagcaugggaaggcucugg

SEQ ID NO: 792842 - RNA, 22 nt, Human
agugagucaaacauauccugac

SEQ ID NO: 792843 - RNA, 22 nt, Human
augcacaucacucugaagaaaa

SEQ ID NO: 792844 - RNA, 20 nt, Human
aaaugcuuuugacacauauu

SEQ ID NO: 792845 - RNA, 22 nt, Human
cuaaaauuaccuaccaguuuag

SEQ ID NO: 792846 - RNA, 22 nt, Human
ugggaagggaguuucuuggagu

SEQ ID NO: 792847 - RNA, 22 nt, Human
accacaggaggauggcugcugg

SEQ ID NO: 792848 - RNA, 22 nt, Human
ccuuggcuugugggcugcagcc

SEQ ID NO: 792849 - RNA, 20 nt, Human
agucucugcaacauagugca

SEQ ID NO: 792850 - RNA, 22 nt, Human
caaagucagcugccagucccaa

SEQ ID NO: 792851 - RNA, 22 nt, Human
agccucucacugucacccuccc

SEQ ID NO: 792852 - RNA, 22 nt, Human
ucuugggagucccaggacauag

SEQ ID NO: 792853 - RNA, 22 nt, Human
gcagcugcgcugguguggggca

SEQ ID NO: 792854 - RNA, 22 nt, Human
gugaggugggcuggccagagac

SEQ ID NO: 792855 - RNA, 22 nt, Human
uucuuacauuacuuuacaugug

SEQ ID NO: 792856 - RNA, 22 nt, Human
uacacauacauugcuuacaagg

SEQ ID NO: 792857 - RNA, 20 nt, Human
gagcacaguaaugacugcua

SEQ ID NO: 792858 - RNA, 22 nt, Human
caggcuguguuccuggaacccc

SEQ ID NO: 792859 - RNA, 22 nt, Human
agccucugaugaucacaggggg

SEQ ID NO: 792860 - RNA, 22 nt, Human
cuucuugugcacucucuaugua

SEQ ID NO: 792861 - RNA, 22 nt, Human
cugggcagaauuuuaggauggc

SEQ ID NO: 792862 - RNA, 22 nt, Human
uaguacaguuuacuuucagcgc

SEQ ID NO: 792863 - RNA, 22 nt, Human
acuuauucugagauuaugauca

SEQ ID NO: 792864 - RNA, 22 nt, Human
uggcccugacagguccugggca

SEQ ID NO: 792865 - RNA, 22 nt, Human
ggagccugacagugcccagcau

SEQ ID NO: 792866 - RNA, 22 nt, Human
gccuccccaggggugucaugag

SEQ ID NO: 792867 - RNA, 22 nt, Human
cacagagacagaucuauuuugc

SEQ ID NO: 792868 - RNA, 22 nt, Human
cuguggcugaacucugaagagg

SEQ ID NO: 792869 - RNA, 22 nt, Human
cggacaggcuccuggagcuccu

SEQ ID NO: 792870 - RNA, 22 nt, Human
cccaggagguggagguugcggu

SEQ ID NO: 792871 - RNA, 23 nt, Human
agaaaagcuuggacacauggccu

SEQ ID NO: 792872 - RNA, 22 nt, Human
aggccuggcaugagaccugaga

SEQ ID NO: 792873 - RNA, 22 nt, Human
acccagagauggaccuggcugc

SEQ ID NO: 792874 - RNA, 22 nt, Human
agcacagaugcaugaucaccag

SEQ ID NO: 792875 - RNA, 22 nt, Human
ugcagcugcucauucucucagu

SEQ ID NO: 792876 - RNA, 22 nt, Human
aaauggauguugaguuaaaugu

SEQ ID NO: 792877 - RNA, 22 nt, Human
uagaaaugauugagcuguaaua

SEQ ID NO: 792878 - RNA, 20 nt, Human
cucucccagcacagcuuccu

SEQ ID NO: 792879 - RNA, 22 nt, Human
uguaacaucacagugauguuug

SEQ ID NO: 792880 - RNA, 19 nt, Human
ugcugcuguccuugcaggg

SEQ ID NO: 792881 - RNA, 23 nt, Human
ggagugcaauggcgccaucucgg

SEQ ID NO: 792882 - RNA, 22 nt, Human
cugugacuuuugcccuguacca

SEQ ID NO: 792883 - RNA, 23 nt, Human
agcagcccaauggcaagcucugg

SEQ ID NO: 792884 - RNA, 22 nt, Human
uggcuccaggggacacgcagua

SEQ ID NO: 792885 - RNA, 22 nt, Human
cuggagggaggaggcugcuauu

SEQ ID NO: 792886 - RNA, 23 nt, Human
gcuggcuggcaguaaagguuguu

SEQ ID NO: 792887 - RNA, 19 nt, Human
uuugauaucugaauuaugc

SEQ ID NO: 792888 - RNA, 22 nt, Human
aaaagucugcucucauuucaga

SEQ ID NO: 792889 - RNA, 22 nt, Human
acuauauacacauuaucuuguu

SEQ ID NO: 792890 - RNA, 22 nt, Human
caggcugggaacgccacccgcu

SEQ ID NO: 792891 - RNA, 22 nt, Human
cuuuacaaauagggagggagug

SEQ ID NO: 792892 - RNA, 22 nt, Human
aauguacagcugucuuuccucc

SEQ ID NO: 792893 - RNA, 22 nt, Human
agaaaggucacuuagccucagc

SEQ ID NO: 792894 - RNA, 22 nt, Human
gccggggcuggggagagacaug

SEQ ID NO: 792895 - RNA, 22 nt, Human
uucaacaaggcugucaaaaguu

SEQ ID NO: 792896 - RNA, 22 nt, Human
uauguuacaaaguuuuucuaaa

SEQ ID NO: 792897 - RNA, 22 nt, Human
uuuggagagaugaaguucugug

SEQ ID NO: 792898 - RNA, 22 nt, Human
uggagagguuuaaacaaaaguu

SEQ ID NO: 792899 - RNA, 23 nt, Human
aggaaacugaaggggcccucuau

SEQ ID NO: 792900 - RNA, 22 nt, Human
uggugggaguccgcugugcugc

SEQ ID NO: 792901 - RNA, 22 nt, Human
cacaguuugcauaggaaaaaca

SEQ ID NO: 792902 - RNA, 22 nt, Human
cauucucaauaguagaugagua

SEQ ID NO: 792903 - RNA, 20 nt, Human
uacaaagagccccucucuuc

SEQ ID NO: 792904 - RNA, 22 nt, Human
uucaaacuguguaauuuauaaa

SEQ ID NO: 792905 - RNA, 22 nt, Human
aggacaguccgggguccuccac

SEQ ID NO: 792906 - RNA, 20 nt, Human
aacacaggguuaccaucaga

SEQ ID NO: 792907 - RNA, 22 nt, Human
ccaggcuccccaggaggcccuu

SEQ ID NO: 792908 - RNA, 22 nt, Human
ccugcuggccaguggagggcug

SEQ ID NO: 792909 - RNA, 22 nt, Human
acaaucacacaugcaauuauac

SEQ ID NO: 792910 - RNA, 22 nt, Human
ucauagaaugaguuaaugaacu

SEQ ID NO: 792911 - RNA, 22 nt, Human
ggcagaggaagcuggaaguggg

SEQ ID NO: 792912 - RNA, 22 nt, Human
ggcaggacagucccaguucaaa

SEQ ID NO: 792913 - RNA, 22 nt, Human
uaaguucaaugaacucaguucu

SEQ ID NO: 792914 - RNA, 23 nt, Human
aacauuuguaaggugauuuuguu

SEQ ID NO: 792915 - RNA, 22 nt, Human
gccaccaguagcuaacaacagu

SEQ ID NO: 792916 - RNA, 22 nt, Human
gcacacaguacuauaugcuaca

SEQ ID NO: 792917 - RNA, 22 nt, Human
aaauaauuauagcgagucuauc

SEQ ID NO: 792918 - RNA, 22 nt, Human
cagcugggccuccugagcccug

SEQ ID NO: 792919 - RNA, 22 nt, Human
agccagggauggcagugcccag

SEQ ID NO: 792920 - RNA, 22 nt, Human
ucagcacugaaauucuucacau

SEQ ID NO: 792921 - RNA, 22 nt, Human
gaccuucuguuggaggcauuua

SEQ ID NO: 792922 - RNA, 22 nt, Human
uuucacaugugcuguugucaau

SEQ ID NO: 792923 - RNA, 22 nt, Human
aaauaaaggaacuguuuuccca

SEQ ID NO: 792924 - RNA, 22 nt, Human
aggcucagcccaagguggagag

SEQ ID NO: 792925 - RNA, 22 nt, Human
uuugcauuaucucacuuauaua

SEQ ID NO: 792926 - RNA, 22 nt, Human
caaaugcaugagaaauaagagg

SEQ ID NO: 792927 - RNA, 22 nt, Human
uuucucauggaacauagcuccu

SEQ ID NO: 792928 - RNA, 22 nt, Human
ucccagcagggccgaccagccu

SEQ ID NO: 792929 - RNA, 20 nt, Human
cuggcuucgggaacuaguuu

SEQ ID NO: 792930 - RNA, 22 nt, Human
acuggcagugucguuuacauga

SEQ ID NO: 792931 - RNA, 22 nt, Human
cuggaaugaagcuauguacauu

SEQ ID NO: 792932 - RNA, 22 nt, Human
uuauuuuuaaaaguucacacag

SEQ ID NO: 792933 - RNA, 22 nt, Human
uccuagaaugcaccucugcugu

SEQ ID NO: 792934 - RNA, 22 nt, Human
uggcagcuccuggggccagcac

SEQ ID NO: 792935 - RNA, 22 nt, Human
uaggaaauuucauuugaggucu

SEQ ID NO: 792936 - RNA, 22 nt, Human
gagcccaggcagagguugcagu

SEQ ID NO: 792937 - RNA, 22 nt, Human
cacaugcaucugucauguuugg

SEQ ID NO: 792938 - RNA, 22 nt, Human
gaagcaagugcaaggaagaggc

SEQ ID NO: 792939 - RNA, 22 nt, Human
cacuuuacuaucuauaaaauaa

SEQ ID NO: 792940 - RNA, 22 nt, Human
agcaaauuaggucaaggagaug

SEQ ID NO: 792941 - RNA, 22 nt, Human
gggggugagccugccaggccca

SEQ ID NO: 792942 - RNA, 22 nt, Human
aggcacuuuccuugaggaguuu

SEQ ID NO: 792943 - RNA, 19 nt, Human
ugaggggaggagaggccug

SEQ ID NO: 792944 - RNA, 22 nt, Human
cagucuggaggucagcuggcuu

SEQ ID NO: 792945 - RNA, 22 nt, Human
caucacaggcauuuugaguguc

SEQ ID NO: 792946 - RNA, 22 nt, Human
aaguaaggccuucuugagcaug

SEQ ID NO: 792947 - RNA, 22 nt, Human
uucuaugugaacguuauaguuu

SEQ ID NO: 792948 - RNA, 22 nt, Human
cuccugguuccugucuuaaaua

SEQ ID NO: 792949 - RNA, 22 nt, Human
gcugccucaggcaccuccuggc

SEQ ID NO: 792950 - RNA, 22 nt, Human
guggcccucagcaguugccaag

SEQ ID NO: 792951 - RNA, 22 nt, Human
guacauuucucuuguucuuauu

SEQ ID NO: 792952 - RNA, 22 nt, Human
ucaauagauaaagcuacauaaa

SEQ ID NO: 792953 - RNA, 22 nt, Human
uuacaaaguuuaagguggcacu

SEQ ID NO: 792954 - RNA, 22 nt, Human
uuuccuugggucucuuaguggc

SEQ ID NO: 792955 - RNA, 22 nt, Human
uagcuuuguuuaucaaggggca

SEQ ID NO: 792956 - RNA, 22 nt, Human
agaaguuuguuauguaaacaaa

SEQ ID NO: 792957 - RNA, 22 nt, Human
aaugucaacacaagagaaaugc

SEQ ID NO: 792958 - RNA, 22 nt, Human
aucaucuucgaaaaaagucaga

SEQ ID NO: 792959 - RNA, 22 nt, Human
ccuucucucugaagaccccaaa

SEQ ID NO: 792960 - RNA, 22 nt, Human
ccugggcuuugagggcaggaug

SEQ ID NO: 792961 - RNA, 22 nt, Human
ucaaaucucacucugcauuucu

SEQ ID NO: 792962 - RNA, 22 nt, Human
acaacauucuuaaauacacuga

SEQ ID NO: 792963 - RNA, 19 nt, Human
acagaagcauagaaaagga

SEQ ID NO: 792964 - RNA, 22 nt, Human
acugaaauacugcucuuggauu

SEQ ID NO: 792965 - RNA, 22 nt, Human
ccuggcugcuuucacuauggag

SEQ ID NO: 792966 - RNA, 22 nt, Human
gggugggccccagguaucugua

SEQ ID NO: 792967 - RNA, 22 nt, Human
cacccaggacaggccagaugug

SEQ ID NO: 792968 - RNA, 22 nt, Human
gcacccagaggucagcagugcu

SEQ ID NO: 792969 - RNA, 22 nt, Human
aggagccauuuuccaagggcga

SEQ ID NO: 792970 - RNA, 18 nt, Human
ucuacccucucagagucu

SEQ ID NO: 792971 - RNA, 22 nt, Human
gccagugccucgccgcgcuccu

SEQ ID NO: 792972 - RNA, 20 nt, Human
gaggccucagccucagcucc

SEQ ID NO: 792973 - RNA, 22 nt, Human
acauguaaaaggaacaugcaug

SEQ ID NO: 792974 - RNA, 22 nt, Human
cugggcagagcuaacaccugag

SEQ ID NO: 792975 - RNA, 22 nt, Human
cagucucucugaaguauuaaga

SEQ ID NO: 792976 - RNA, 22 nt, Human
uuaauacagucuccagaaguaa

SEQ ID NO: 792977 - RNA, 22 nt, Human
aaacauguuuagaaagcagcug

SEQ ID NO: 792978 - RNA, 22 nt, Human
accuccccugacucgaaaccca

SEQ ID NO: 792979 - RNA, 22 nt, Human
augccagguacagggguagggu

SEQ ID NO: 792980 - RNA, 22 nt, Human
caaauagacuucaaucucuuga

SEQ ID NO: 792981 - RNA, 22 nt, Human
ggaaaaaugacacauaucucaa

SEQ ID NO: 792982 - RNA, 22 nt, Human
uggcuagauuuauugcugagca

SEQ ID NO: 792983 - RNA, 22 nt, Human
uuacacaauuuuauugaccuaa

SEQ ID NO: 792984 - RNA, 22 nt, Human
acagcaggcacacaaggauaga

SEQ ID NO: 792985 - RNA, 22 nt, Human
ugucuuuaguugcuuagauuug

SEQ ID NO: 792986 - RNA, 20 nt, Human
cacagcuugccuuuuaugac

SEQ ID NO: 792987 - RNA, 22 nt, Human
agcaggguucucaguuggugcu

SEQ ID NO: 792988 - RNA, 22 nt, Human
gccucugcucucagguagccuc

SEQ ID NO: 792989 - RNA, 22 nt, Human
cugccuggaccggcagcccucc

SEQ ID NO: 792990 - RNA, 22 nt, Human
aauguacaaggguuccaguuuu

SEQ ID NO: 792991 - RNA, 22 nt, Human
agccugggcaugggacgggagg

SEQ ID NO: 792992 - RNA, 22 nt, Human
uaguaaauuaaaauauugacuu

SEQ ID NO: 792993 - RNA, 19 nt, Human
ucucugcagcgcgcccggc

SEQ ID NO: 792994 - RNA, 22 nt, Human
uauugauuccugcuuucugcuc

SEQ ID NO: 792995 - RNA, 22 nt, Human
cuccuggcucgcccccagcuga

SEQ ID NO: 792996 - RNA, 22 nt, Human
auguuucaucaguaagguuuug

SEQ ID NO: 792997 - RNA, 22 nt, Human
uugauuuuuuucuacuaugcgc

SEQ ID NO: 792998 - RNA, 22 nt, Human
agacaauggagggaaauacuuc

SEQ ID NO: 792999 - RNA, 22 nt, Human
ugcaauuucaaauaucagaaag

SEQ ID NO: 793000 - RNA, 23 nt, Human
aagaacuuugguccugcagaguc

SEQ ID NO: 793001 - RNA, 22 nt, Human
cagcccugcuggcaaugaugag

SEQ ID NO: 793002 - RNA, 22 nt, Human
aaacuucaaggauuugcaaauc

SEQ ID NO: 793003 - RNA, 22 nt, Human
uuccuauuuccaugaaacacaa

SEQ ID NO: 793004 - RNA, 22 nt, Human
caggguggaauggaaugcuggc

SEQ ID NO: 793005 - RNA, 22 nt, Human
uuugacaaauaggggaauaagg

SEQ ID NO: 793006 - RNA, 22 nt, Human
guuuuauaggugaaauauuacu

SEQ ID NO: 793007 - RNA, 22 nt, Human
cccugcacagccuggcucucuu

SEQ ID NO: 793008 - RNA, 22 nt, Human
uacuuguuuuguguuccuaaac

SEQ ID NO: 793009 - RNA, 19 nt, Human
cuuuucaagccaucaguuu

SEQ ID NO: 793010 - RNA, 22 nt, Human
gggcccugccuaaggaacacac

SEQ ID NO: 793011 - RNA, 22 nt, Human
cagcaggugggcuuugcggaug

SEQ ID NO: 793012 - RNA, 22 nt, Human
cugagcagcacagggcgccagg

SEQ ID NO: 793013 - RNA, 22 nt, Human
uuuucaaagacuggaggcugau

SEQ ID NO: 793014 - RNA, 22 nt, Human
ggacaggaugcugaagaugaag

SEQ ID NO: 793015 - RNA, 22 nt, Human
cuggcuggagcaggcaucuugu

SEQ ID NO: 793016 - RNA, 22 nt, Human
uuaagacaugugagcauaacuu

SEQ ID NO: 793017 - RNA, 22 nt, Human
agaugaagacucaggagcaggu

SEQ ID NO: 793018 - RNA, 22 nt, Human
accagagagagacaggguugug

SEQ ID NO: 793019 - RNA, 22 nt, Human
aaucaggagcugagguuuagcc

SEQ ID NO: 793020 - RNA, 22 nt, Human
auuacaaucgagagaaacaaau

SEQ ID NO: 793021 - RNA, 22 nt, Human
cuuaaaaguugcuucccuaacu

SEQ ID NO: 793022 - RNA, 22 nt, Human
aauguaugugcaucauuuacau

SEQ ID NO: 793023 - RNA, 22 nt, Human
ugguucuaaaggacuauacaga

SEQ ID NO: 793024 - RNA, 21 nt, Human
aaggucuguaaagugacagga

SEQ ID NO: 793025 - RNA, 22 nt, Human
gcccagcuggcuuccagcacau

SEQ ID NO: 793026 - RNA, 22 nt, Human
ucaggccugagaaaaauccuuu

SEQ ID NO: 793027 - RNA, 22 nt, Human
cguguacagucuaucuuuuuuc

SEQ ID NO: 793028 - RNA, 21 nt, Human
gcuggcuggcugaccggccuu

SEQ ID NO: 793029 - RNA, 22 nt, Human
ggguaggaaauccagagguggc

SEQ ID NO: 793030 - RNA, 22 nt, Human
uacaaacuaacaugucucaucc

SEQ ID NO: 793031 - RNA, 22 nt, Human
ggugcaggacgaaguggggguu

SEQ ID NO: 793032 - RNA, 22 nt, Human
ugguccagucguuccuuuccuu

SEQ ID NO: 793033 - RNA, 22 nt, Human
gugucucuuccuuucaaguggg

SEQ ID NO: 793034 - RNA, 22 nt, Human
agucacuguuuaaucuagcuaa

SEQ ID NO: 793035 - RNA, 22 nt, Human
acauucaagaugcauucacuua

SEQ ID NO: 793036 - RNA, 22 nt, Human
aaaaugaauaaguuaacccagg

SEQ ID NO: 793037 - RNA, 22 nt, Human
uaaagucaucuuuaaacaugcc

SEQ ID NO: 793038 - RNA, 19 nt, Human
ucccuucuauaguaauaaa

SEQ ID NO: 793039 - RNA, 22 nt, Human
uuugucuucauccuucgagcug

SEQ ID NO: 793040 - RNA, 22 nt, Human
cucuccagccaggggcuuccug

SEQ ID NO: 793041 - RNA, 22 nt, Human
uguguucaguaugacauucaca

SEQ ID NO: 793042 - RNA, 22 nt, Human
ggugccagccuagugcaguggu

SEQ ID NO: 793043 - RNA, 22 nt, Human
ucagcuuggacagcuugguuga

SEQ ID NO: 793044 - RNA, 22 nt, Human
uucauugacugguucguuaagu

SEQ ID NO: 793045 - RNA, 22 nt, Human
caacuacaggaaaagucauuca

SEQ ID NO: 793046 - RNA, 22 nt, Human
cccugaggaccaggaaggaggg

SEQ ID NO: 793047 - RNA, 22 nt, Human
uguuaaaaauucagcucuagau

SEQ ID NO: 793048 - RNA, 20 nt, Human
gaauuuuaugaacacuacca

SEQ ID NO: 793049 - RNA, 23 nt, Human
uuuaaaaguuguaauguaggcuu

SEQ ID NO: 793050 - RNA, 22 nt, Human
aagaaauacaugguuuuugagu

SEQ ID NO: 793051 - RNA, 22 nt, Human
gugacaggcccagugggaugca

SEQ ID NO: 793052 - RNA, 22 nt, Human
caaaggaagcuccuugauggcg

SEQ ID NO: 793053 - RNA, 22 nt, Human
aaggcuggggugcagacggccu

SEQ ID NO: 793054 - RNA, 22 nt, Human
gguuaaaaucuaaaaugugacu

SEQ ID NO: 793055 - RNA, 22 nt, Human
gcagggcuguggacacuuuggu

SEQ ID NO: 793056 - RNA, 23 nt, Human
auuaccagccugacaccaacaaa

SEQ ID NO: 793057 - RNA, 22 nt, Human
ucacaggacccugaggguggcg

SEQ ID NO: 793058 - RNA, 23 nt, Human
acugcagccuccgccugccgggu

SEQ ID NO: 793059 - RNA, 22 nt, Human
auccugggaagcugacauugaa

SEQ ID NO: 793060 - RNA, 22 nt, Human
caggccucuuccaugcagcagc

SEQ ID NO: 793061 - RNA, 22 nt, Human
cagagggcguccggguuaacuu

SEQ ID NO: 793062 - RNA, 22 nt, Human
auugucauuggcuucuaugucu

SEQ ID NO: 793063 - RNA, 20 nt, Human
guggcaggcagugaaggagc

SEQ ID NO: 793064 - RNA, 22 nt, Human
gaaugcuuugggaauucagaau

SEQ ID NO: 793065 - RNA, 22 nt, Human
acaugcaacuaaagggugccac

SEQ ID NO: 793066 - RNA, 22 nt, Human
ugucuuuaguuuuacugucugg

SEQ ID NO: 793067 - RNA, 22 nt, Human
aagccaguuagcacaucauugc

SEQ ID NO: 793068 - RNA, 19 nt, Human
augucuguugaauuucaua

SEQ ID NO: 793069 - RNA, 22 nt, Human
agcccaggcagagggaugcuug

SEQ ID NO: 793070 - RNA, 19 nt, Human
uugguucauggaugcccaa

SEQ ID NO: 793071 - RNA, 22 nt, Human
cuggcacacagaggcccucggg

SEQ ID NO: 793072 - RNA, 22 nt, Human
acuucucuucauagguggcaau

SEQ ID NO: 793073 - RNA, 22 nt, Human
agggggcauuaugaggcuuuuc

SEQ ID NO: 793074 - RNA, 22 nt, Human
gggcacugugcuaggugcugag

SEQ ID NO: 793075 - RNA, 22 nt, Human
gccuggagacaaggacaaaggg

SEQ ID NO: 793076 - RNA, 22 nt, Human
aaaacaguuuaggcaucacagu

SEQ ID NO: 793077 - RNA, 22 nt, Human
cuuuuuguuguauaagcccuuu

SEQ ID NO: 793078 - RNA, 22 nt, Human
cccugcugucaggugcugggag

SEQ ID NO: 793079 - RNA, 22 nt, Human
gggagcugagcuggaagagaau

SEQ ID NO: 793080 - RNA, 22 nt, Human
caagccagugacagccagggaa

SEQ ID NO: 793081 - RNA, 22 nt, Human
gcggaaggcugccuggcuugag

SEQ ID NO: 793082 - RNA, 22 nt, Human
acaaacuuccaucaugaauuuu

SEQ ID NO: 793083 - RNA, 22 nt, Human
aguuucauguagccauauuuac

SEQ ID NO: 793084 - RNA, 21 nt, Human
ccugugcuaucagcuuggguu

SEQ ID NO: 793085 - RNA, 22 nt, Human
auucuaagucuuguucacauuc

SEQ ID NO: 793086 - RNA, 17 nt, Human
uggcuucccugggccac

SEQ ID NO: 793087 - RNA, 22 nt, Human
ccauggcaacuggcguccaggg

SEQ ID NO: 793088 - RNA, 22 nt, Human
gacaauaaaaugaucuuacagu

SEQ ID NO: 793089 - RNA, 22 nt, Human
cuuggauuccgugaacuuaacc

SEQ ID NO: 793090 - RNA, 22 nt, Human
uggcuccagauuuccugcugca

SEQ ID NO: 793091 - RNA, 22 nt, Human
aaagucacuuccuucugucagc

SEQ ID NO: 793092 - RNA, 22 nt, Human
ucuauuuuguuuccagcucuac

SEQ ID NO: 793093 - RNA, 19 nt, Human
accaggagacagugagcuu

SEQ ID NO: 793094 - RNA, 22 nt, Human
ccuggggcuccagagcagcgga

SEQ ID NO: 793095 - RNA, 22 nt, Human
uuccaggaugcugcugcuuuuu

SEQ ID NO: 793096 - RNA, 22 nt, Human
uccuggccaaguagauguggcg

SEQ ID NO: 793097 - RNA, 22 nt, Human
ucaggcuguggcuuugaccgca

SEQ ID NO: 793098 - RNA, 22 nt, Human
gaagcaaagagcuagugccgcu

SEQ ID NO: 793099 - RNA, 22 nt, Human
agaaacuauccugaguagcaaa

SEQ ID NO: 793100 - RNA, 21 nt, Human
uauuuauuaauuuguaaggcu

SEQ ID NO: 793101 - RNA, 22 nt, Human
uucagaaucuaugugccagcuc

SEQ ID NO: 793102 - RNA, 22 nt, Human
gagacagaugcugcuggagcau

SEQ ID NO: 793103 - RNA, 22 nt, Human
acaaagagaccaugagccaaac

SEQ ID NO: 793104 - RNA, 22 nt, Human
gccaggcuaagaaaggugugau

SEQ ID NO: 793105 - RNA, 22 nt, Human
uauaccuuccacaaaacagcuu

SEQ ID NO: 793106 - RNA, 22 nt, Human
caucaguguucacuauuccuuc

SEQ ID NO: 793107 - RNA, 22 nt, Human
uggcuuccugcauggauccucu

SEQ ID NO: 793108 - RNA, 22 nt, Human
agagagagggaaacugcuaaac

SEQ ID NO: 793109 - RNA, 23 nt, Human
uucuggaagauuuacuugagaca

SEQ ID NO: 793110 - RNA, 22 nt, Human
gguggguaaaacugcuggcacu

SEQ ID NO: 793111 - RNA, 22 nt, Human
guaggcugugugaggcuagaga

SEQ ID NO: 793112 - RNA, 22 nt, Human
uacugaaaguggucaacagugg

SEQ ID NO: 793113 - RNA, 22 nt, Human
aucaagcagugaaaaaugcuag

SEQ ID NO: 793114 - RNA, 22 nt, Human
uuugucauucuguguauuuaaa

SEQ ID NO: 793115 - RNA, 22 nt, Human
ccaccccuguagagggacagac

SEQ ID NO: 793116 - RNA, 22 nt, Human
caugcuaagucauaaaagagua

SEQ ID NO: 793117 - RNA, 22 nt, Human
uacaagaaugucuuaaaagcuc

SEQ ID NO: 793118 - RNA, 22 nt, Human
agggggugaaugucugucuaca

SEQ ID NO: 793119 - RNA, 22 nt, Human
ugcugagcgcauccggcggccg

SEQ ID NO: 793120 - RNA, 22 nt, Human
gaaaggaaauauucuaagcacu

SEQ ID NO: 793121 - RNA, 21 nt, Human
ugcuggcugaaaggcacagag

SEQ ID NO: 793122 - RNA, 22 nt, Human
cugggggccuuacggaacucca

SEQ ID NO: 793123 - RNA, 22 nt, Human
gcugcagguuugucuagucugg

SEQ ID NO: 793124 - RNA, 21 nt, Human
ccaggcuccugaggcugguca

SEQ ID NO: 793125 - RNA, 22 nt, Human
aaugcaaagugaggugaguggc

SEQ ID NO: 793126 - RNA, 22 nt, Human
ugauguucuguauaucauauag

SEQ ID NO: 793127 - RNA, 22 nt, Human
ccugugccaaaaucuaggcagu

SEQ ID NO: 793128 - RNA, 21 nt, Human
ucagaauuaccccuggaucug

SEQ ID NO: 793129 - RNA, 20 nt, Human
ucagggcaugggacagcccc

SEQ ID NO: 793130 - RNA, 22 nt, Human
ucccugaaacauaauagaugcc

SEQ ID NO: 793131 - RNA, 22 nt, Human
ccagagcugagggagccugagc

SEQ ID NO: 793132 - RNA, 22 nt, Human
aaauauguuuuccaguugucau

SEQ ID NO: 793133 - RNA, 22 nt, Human
acuggcuggccacacccuggua

SEQ ID NO: 793134 - RNA, 22 nt, Human
ugcagucuuccagcugcacaaa

SEQ ID NO: 793135 - RNA, 20 nt, Human
agcaggccuuggggagagga

SEQ ID NO: 793136 - RNA, 22 nt, Human
cccugggcucagagcagguagc

SEQ ID NO: 793137 - RNA, 22 nt, Human
guggcccaggcuuggcgcuggc

SEQ ID NO: 793138 - RNA, 22 nt, Human
agcagggcuugccgcuuguccu

SEQ ID NO: 793139 - RNA, 22 nt, Human
agcccaggucucaaaguacagg

SEQ ID NO: 793140 - RNA, 22 nt, Human
cagugcaguugguggcaggggu

SEQ ID NO: 793141 - RNA, 22 nt, Human
uuucccaagugaagugaagcca

SEQ ID NO: 793142 - RNA, 22 nt, Human
ccccugccauagucaaaucuaa

SEQ ID NO: 793143 - RNA, 22 nt, Human
ugccagcuguucccacccaaaa

SEQ ID NO: 793144 - RNA, 22 nt, Human
agucucugggcaugguugugac

SEQ ID NO: 793145 - RNA, 22 nt, Human
ccucccaccauuuagagagagc

SEQ ID NO: 793146 - RNA, 22 nt, Human
caaagcagagaacugucucauu

SEQ ID NO: 793147 - RNA, 20 nt, Human
agcaggaaugaugcuuucau

SEQ ID NO: 793148 - RNA, 22 nt, Human
auaugacagaauguguguguau

SEQ ID NO: 793149 - RNA, 22 nt, Human
gcucagagauggggaaugaaaa

SEQ ID NO: 793150 - RNA, 22 nt, Human
uggcuggcaguuaucuuuggau

SEQ ID NO: 793151 - RNA, 22 nt, Human
ucagaaggaagaagucauggga

SEQ ID NO: 793152 - RNA, 22 nt, Human
cugggaguguucuaggucacau

SEQ ID NO: 793153 - RNA, 17 nt, Human
uggaaggcuucaauauu

SEQ ID NO: 793154 - RNA, 22 nt, Human
gcaggccuguaaugaagggaca

SEQ ID NO: 793155 - RNA, 22 nt, Human
auauagaaggugcuauuuacau

SEQ ID NO: 793156 - RNA, 22 nt, Human
uauguuaagugggauaaucaaa

SEQ ID NO: 793157 - RNA, 22 nt, Human
aaggagauuguuaaagcuauau

SEQ ID NO: 793158 - RNA, 22 nt, Human
acaggacaauuuauaaugggca

SEQ ID NO: 793159 - RNA, 22 nt, Human
agucuuuccuuuuggaagaaaa

SEQ ID NO: 793160 - RNA, 19 nt, Human
cgcaggagccgaggugacc

SEQ ID NO: 793161 - RNA, 22 nt, Human
ucaggagcagcaugggugagag

SEQ ID NO: 793162 - RNA, 22 nt, Human
ugccugccugcauagucccacg

SEQ ID NO: 793163 - RNA, 22 nt, Human
ugaggcuuccaacaugugagaa

SEQ ID NO: 793164 - RNA, 22 nt, Human
ugccccugaccucaggcgaagg

SEQ ID NO: 793165 - RNA, 22 nt, Human
agagggugggcacgugauggau

SEQ ID NO: 793166 - RNA, 20 nt, Human
guauccccgcguggggaagg

SEQ ID NO: 793167 - RNA, 22 nt, Human
ggccacaugaauucuuggacag

SEQ ID NO: 793168 - RNA, 19 nt, Human
auguuuuaugcugauggga

SEQ ID NO: 793169 - RNA, 22 nt, Human
ggccuugguacuguaaaccgag

SEQ ID NO: 793170 - RNA, 21 nt, Human
gcagaggaaugguauacauaa

SEQ ID NO: 793171 - RNA, 22 nt, Human
cagcucugaggaacacuccuuu

SEQ ID NO: 793172 - RNA, 22 nt, Human
uggcucaggguccccaaauggu

SEQ ID NO: 793173 - RNA, 22 nt, Human
aggcaguggaugucaggaaugg

SEQ ID NO: 793174 - RNA, 22 nt, Human
guggcagucaucaaggacagau

SEQ ID NO: 793175 - RNA, 22 nt, Human
aagcacagacacaaaaggcuuu

SEQ ID NO: 793176 - RNA, 22 nt, Human
caguuauuaugaggucauuagg

SEQ ID NO: 793177 - RNA, 22 nt, Human
ccacauucaguccaggcuugga

SEQ ID NO: 793178 - RNA, 22 nt, Human
gagggaggugauacugaacgua

SEQ ID NO: 793179 - RNA, 22 nt, Human
caugaaauggccaaccuucggc

SEQ ID NO: 793180 - RNA, 22 nt, Human
uaguaauaaguugugcuuugau

SEQ ID NO: 793181 - RNA, 22 nt, Human
gacaggaacauaaauguaggag

SEQ ID NO: 793182 - RNA, 21 nt, Human
uauugauucaauuucuugagu

SEQ ID NO: 793183 - RNA, 22 nt, Human
agugaguggauguaggaauugg

SEQ ID NO: 793184 - RNA, 22 nt, Human
uagggagaggaagcaggccgcu

SEQ ID NO: 793185 - RNA, 18 nt, Human
cagaagcaggcagugcag

SEQ ID NO: 793186 - RNA, 22 nt, Human
gagcucugacugcugggugaca

SEQ ID NO: 793187 - RNA, 22 nt, Human
cagagggcccccuggccacagu

SEQ ID NO: 793188 - RNA, 22 nt, Human
ucaaaguagccggauggaauuu

SEQ ID NO: 793189 - RNA, 22 nt, Human
uucacaauaauguccauccucu

SEQ ID NO: 793190 - RNA, 22 nt, Human
caguuugucuugauucagaaca

SEQ ID NO: 793191 - RNA, 22 nt, Human
gaucaggaauauuggaaaguac

SEQ ID NO: 793192 - RNA, 22 nt, Human
acccaggcuggagugcaguguc

SEQ ID NO: 793193 - RNA, 22 nt, Human
ggcucuuuggcgggccuugaac

SEQ ID NO: 793194 - RNA, 19 nt, Human
uagugucaaggaggagggu

SEQ ID NO: 793195 - RNA, 22 nt, Human
gugaggagggcuggucccaggc

SEQ ID NO: 793196 - RNA, 22 nt, Human
gcaauguuuuuccuuccauauu

SEQ ID NO: 793197 - RNA, 22 nt, Human
ucucuuagucuuauauguaaaa

SEQ ID NO: 793198 - RNA, 22 nt, Human
cugaggugagaggaggccaugu

SEQ ID NO: 793199 - RNA, 22 nt, Human
caggccugcuucuuacccuuca

SEQ ID NO: 793200 - RNA, 22 nt, Human
aauaagauaagauuucugcucu

SEQ ID NO: 793201 - RNA, 22 nt, Human
auggcccaggccuccuguggcu

SEQ ID NO: 793202 - RNA, 22 nt, Human
accagcaguuaugaggccagga

SEQ ID NO: 793203 - RNA, 22 nt, Human
aaggccagcuggagggaugagg

SEQ ID NO: 793204 - RNA, 22 nt, Human
gacaauaagaaaagaggaggca

SEQ ID NO: 793205 - RNA, 22 nt, Human
gcccagcagcugguggagaagg

SEQ ID NO: 793206 - RNA, 22 nt, Human
uagaaaauguuccacugccauu

SEQ ID NO: 793207 - RNA, 22 nt, Human
uccugcuucuucgagcuucugg

SEQ ID NO: 793208 - RNA, 21 nt, Human
gcuuucuguggacucugcacc

SEQ ID NO: 793209 - RNA, 22 nt, Human
uucaguguuaaauucaaagagu

SEQ ID NO: 793210 - RNA, 22 nt, Human
uucauagaaagugcuuagauug

SEQ ID NO: 793211 - RNA, 22 nt, Human
acagugucucacugcugaaauc

SEQ ID NO: 793212 - RNA, 22 nt, Human
auuucagugagaaagcaaucaa

SEQ ID NO: 793213 - RNA, 22 nt, Human
gcaccugcuggggcugaugaga

SEQ ID NO: 793214 - RNA, 22 nt, Human
accccaagacaguagaagagaa

SEQ ID NO: 793215 - RNA, 22 nt, Human
auaugcauucauacuuagugga

SEQ ID NO: 793216 - RNA, 22 nt, Human
ucccuagucgcaucuguggaga

SEQ ID NO: 793217 - RNA, 22 nt, Human
uccagggaaggugugaggcugg

SEQ ID NO: 793218 - RNA, 22 nt, Human
uuuguuugaaagucucuacagc

SEQ ID NO: 793219 - RNA, 22 nt, Human
uggggaaggcggagcuugcagc

SEQ ID NO: 793220 - RNA, 22 nt, Human
uuuuucuuaaauguggguuggc

SEQ ID NO: 793221 - RNA, 22 nt, Human
acagcagguuauuguuauggca

SEQ ID NO: 793222 - RNA, 22 nt, Human
uccaguguggucaaaggggaau

SEQ ID NO: 793223 - RNA, 22 nt, Human
acacagugguguuuacaaaauu

SEQ ID NO: 793224 - RNA, 22 nt, Human
uaggcugggccugccuuccagg

SEQ ID NO: 793225 - RNA, 22 nt, Human
uggaaaaugugacuauucuaaa

SEQ ID NO: 793226 - RNA, 23 nt, Human
aaacaugcagcacaugaaugcua

SEQ ID NO: 793227 - RNA, 22 nt, Human
ucuaaacauaacuuugugugau

SEQ ID NO: 793228 - RNA, 22 nt, Human
acauacauggugcuuucuuggu

SEQ ID NO: 793229 - RNA, 22 nt, Human
ugccuccaggaggggcagcucu

SEQ ID NO: 793230 - RNA, 22 nt, Human
ucccagccaggcucuaccacuu

SEQ ID NO: 793231 - RNA, 22 nt, Human
ccacguccagcuaauuuucgua

SEQ ID NO: 793232 - RNA, 22 nt, Human
acaauuucuaauauagaucuua

SEQ ID NO: 793233 - RNA, 22 nt, Human
cagugcaguggcugagcuggag

SEQ ID NO: 793234 - RNA, 22 nt, Human
auggagggugucagagagcgaa

SEQ ID NO: 793235 - RNA, 22 nt, Human
cuggaaugagagcccggggauc

SEQ ID NO: 793236 - RNA, 16 nt, Human
aggagcuggguaggag

SEQ ID NO: 793237 - RNA, 22 nt, Human
ucuaaacugcgagcaugccccc

SEQ ID NO: 793238 - RNA, 22 nt, Human
gaaggcuuccuggaggaggugg

SEQ ID NO: 793239 - RNA, 22 nt, Human
gcuggccauauauuuugcuguu

SEQ ID NO: 793240 - RNA, 22 nt, Human
agugcaaaauucagaagcaauu

SEQ ID NO: 793241 - RNA, 22 nt, Human
gccacacuuauucucaugcaca

SEQ ID NO: 793242 - RNA, 22 nt, Human
ugggugagugggaaaagcccag

SEQ ID NO: 793243 - RNA, 22 nt, Human
ugcaggugauucugaugcaguu

SEQ ID NO: 793244 - RNA, 22 nt, Human
uagaaaugugauaauagcuuaa

SEQ ID NO: 793245 - RNA, 22 nt, Human
gcagauggugccaugucuugug

SEQ ID NO: 793246 - RNA, 22 nt, Human
ucaaauaaggagucaugaccau

SEQ ID NO: 793247 - RNA, 22 nt, Human
uugcauguguaauuuuucuaaa

SEQ ID NO: 793248 - RNA, 22 nt, Human
aagcacauuauagcuaucuagg

SEQ ID NO: 793249 - RNA, 21 nt, Human
ugcauauauaagugcauacac

SEQ ID NO: 793250 - RNA, 22 nt, Human
uccuggcagagagcaugaggcc

SEQ ID NO: 793251 - RNA, 20 nt, Human
cuggggagccucgcgguggc

SEQ ID NO: 793252 - RNA, 22 nt, Human
uaaacagagugcuaguucacgg

SEQ ID NO: 793253 - RNA, 22 nt, Human
ucauaaauucuggugcugugag

SEQ ID NO: 793254 - RNA, 22 nt, Human
ccugacagcgugucccuggccc

SEQ ID NO: 793255 - RNA, 22 nt, Human
cagaggccucacuuccagccag

SEQ ID NO: 793256 - RNA, 22 nt, Human
gccaggaaggcugaagccagaa

SEQ ID NO: 793257 - RNA, 22 nt, Human
gccaggguugccaaugggggca

SEQ ID NO: 793258 - RNA, 22 nt, Human
ggccaccaguccucuggcaggg

SEQ ID NO: 793259 - RNA, 22 nt, Human
agcagcuuagggaauucucccu

SEQ ID NO: 793260 - RNA, 22 nt, Human
cagcugugcugauugcucagua

SEQ ID NO: 793261 - RNA, 22 nt, Human
caaggcagaauucagacucagg

SEQ ID NO: 793262 - RNA, 22 nt, Human
uccuggggcucuuugaugugau

SEQ ID NO: 793263 - RNA, 22 nt, Human
agaaagcuggagucaagcagag

SEQ ID NO: 793264 - RNA, 22 nt, Human
gucugcugugccuuggggaaaa

SEQ ID NO: 793265 - RNA, 22 nt, Human
caauaguucgguccugaaggcc

SEQ ID NO: 793266 - RNA, 22 nt, Human
auuuacagccuugaaaacagca

SEQ ID NO: 793267 - RNA, 22 nt, Human
cuuuccuuaauaagcagguaua

SEQ ID NO: 793268 - RNA, 19 nt, Human
ggagaggcuggagggaugc

SEQ ID NO: 793269 - RNA, 22 nt, Human
gaggcucaccuagggagcacug

SEQ ID NO: 793270 - RNA, 20 nt, Human
ggaccagguggggcgguggc

SEQ ID NO: 793271 - RNA, 22 nt, Human
agaggccagcagugccuaucug

SEQ ID NO: 793272 - RNA, 22 nt, Human
auucacaguuacugcugaacca

SEQ ID NO: 793273 - RNA, 22 nt, Human
aauuuuaagcauaugacugguu

SEQ ID NO: 793274 - RNA, 22 nt, Human
uggacccaggcaggucuguccu

SEQ ID NO: 793275 - RNA, 22 nt, Human
ggcagggcaggaaagucaggaa

SEQ ID NO: 793276 - RNA, 22 nt, Human
ggagaggaaaugccagcacuuc

SEQ ID NO: 793277 - RNA, 22 nt, Human
uggccucuuaaggaugacacaa

SEQ ID NO: 793278 - RNA, 22 nt, Human
uggagcaagcuggagagaacau

SEQ ID NO: 793279 - RNA, 22 nt, Human
uggagggcaucuguggucaggc

SEQ ID NO: 793280 - RNA, 22 nt, Human
cuuuauggaaucaaagacugga

SEQ ID NO: 793281 - RNA, 22 nt, Human
uggacucuaugaugcgccagca

SEQ ID NO: 793282 - RNA, 22 nt, Human
uggccaguugaagacaaugcuc

SEQ ID NO: 793283 - RNA, 22 nt, Human
agaagcaggccucacagaucug

SEQ ID NO: 793284 - RNA, 22 nt, Human
uuaguugaucauucaacauggg

SEQ ID NO: 793285 - RNA, 22 nt, Human
acaugaaugaagacuuuacaau

SEQ ID NO: 793286 - RNA, 22 nt, Human
ugucgcagcugaaaaucucaau

SEQ ID NO: 793287 - RNA, 22 nt, Human
cuuucuuuguccaccaacaaug

SEQ ID NO: 793288 - RNA, 22 nt, Human
ucugcagccagaggcaugaaaa

SEQ ID NO: 793289 - RNA, 22 nt, Human
acauuugaaauaaacucaagug

SEQ ID NO: 793290 - RNA, 22 nt, Human
ccuggggucagggacgcugugc

SEQ ID NO: 793291 - RNA, 22 nt, Human
uuucucaaauugcaugaguagc

SEQ ID NO: 793292 - RNA, 22 nt, Human
uguuuacacaauagucucucuc

SEQ ID NO: 793293 - RNA, 22 nt, Human
cugccucuauaggaguccacca

SEQ ID NO: 793294 - RNA, 22 nt, Human
uggaaaccuacugauacaggag

SEQ ID NO: 793295 - RNA, 22 nt, Human
aaaggcagaguuguuggaggca

SEQ ID NO: 793296 - RNA, 22 nt, Human
aaagguaacaguuauaaccagg

SEQ ID NO: 793297 - RNA, 22 nt, Human
gagggucccugcucagggccag

SEQ ID NO: 793298 - RNA, 22 nt, Human
cauguacaugccuacuaucaau

SEQ ID NO: 793299 - RNA, 22 nt, Human
aaggacagagagccauuccaga

SEQ ID NO: 793300 - RNA, 22 nt, Human
gcuggcuguggcuuaagcaaac

SEQ ID NO: 793301 - RNA, 22 nt, Human
aagcacauuuuccagcagcucu

SEQ ID NO: 793302 - RNA, 22 nt, Human
uucaaagauuuucccaaagcuc

SEQ ID NO: 793303 - RNA, 22 nt, Human
uauuucuuguuauucucguuga

SEQ ID NO: 793304 - RNA, 22 nt, Human
cagccugagccuucuguagcaa

SEQ ID NO: 793305 - RNA, 22 nt, Human
agcagccauccuuagagaaaga

SEQ ID NO: 793306 - RNA, 22 nt, Human
gagcuaagaacugugccaggug

SEQ ID NO: 793307 - RNA, 22 nt, Human
aagaaacaaccacugcucuccu

SEQ ID NO: 793308 - RNA, 22 nt, Human
uggcagauguauaucacagcuu

SEQ ID NO: 793309 - RNA, 22 nt, Human
aaucaggacccacucuacaguu

SEQ ID NO: 793310 - RNA, 22 nt, Human
uagcuuaaggcaggcccuuguc

SEQ ID NO: 793311 - RNA, 22 nt, Human
uuucucccuuuauaagacugua

SEQ ID NO: 793312 - RNA, 22 nt, Human
uggagccaggcuggcccugcca

SEQ ID NO: 793313 - RNA, 20 nt, Human
gaucaggaagcggcuuggga

SEQ ID NO: 793314 - RNA, 22 nt, Human
ucaggacacccugugcuuccuu

SEQ ID NO: 793315 - RNA, 22 nt, Human
uuucugaauaacucuaugauau

SEQ ID NO: 793316 - RNA, 22 nt, Human
auauucacacuguuuaguuaca

SEQ ID NO: 793317 - RNA, 22 nt, Human
uaggaacaguuucaggauguuu

SEQ ID NO: 793318 - RNA, 22 nt, Human
aggcagcaugcucugcuucuac

SEQ ID NO: 793319 - RNA, 22 nt, Human
cuggcuguuucaggcagugucc

SEQ ID NO: 793320 - RNA, 22 nt, Human
acucagaggaaaguugagauug

SEQ ID NO: 793321 - RNA, 22 nt, Human
cacaccuguaauaccagcuacu

SEQ ID NO: 793322 - RNA, 22 nt, Human
uaaacauuuguuauucuuguuu

SEQ ID NO: 793323 - RNA, 22 nt, Human
aacaggcaaacugugggauccc

SEQ ID NO: 793324 - RNA, 22 nt, Human
ccaggcuguaaacaccuucaaa

SEQ ID NO: 793325 - RNA, 22 nt, Human
gcucccuccaugaggcagaccg

SEQ ID NO: 793326 - RNA, 22 nt, Human
ugcccagcacugugccagucac

SEQ ID NO: 793327 - RNA, 22 nt, Human
gccugcuggaggagccucaggg

SEQ ID NO: 793328 - RNA, 22 nt, Human
uaggcuggggguaggaauugag

SEQ ID NO: 793329 - RNA, 22 nt, Human
augaacaaugacuacauauuga

SEQ ID NO: 793330 - RNA, 22 nt, Human
uagaaaacuaauacaugcuuga

SEQ ID NO: 793331 - RNA, 22 nt, Human
cuggaaaucacuacuagucaau

SEQ ID NO: 793332 - RNA, 22 nt, Human
caguuuucuaugguagaagcau

SEQ ID NO: 793333 - RNA, 22 nt, Human
auacaugacagcauagcauccu

SEQ ID NO: 793334 - RNA, 22 nt, Human
acaggacaggcugggcuagacu

SEQ ID NO: 793335 - RNA, 22 nt, Human
ucagugucauaucaagaagaug

SEQ ID NO: 793336 - RNA, 22 nt, Human
cugucaggggcggguggagcgg

SEQ ID NO: 793337 - RNA, 20 nt, Human
cagggccacgcuccaaggca

SEQ ID NO: 793338 - RNA, 22 nt, Human
ggccagcugggccaccaggugc

SEQ ID NO: 793339 - RNA, 22 nt, Human
cauuuauucauuugcuagggcu

SEQ ID NO: 793340 - RNA, 22 nt, Human
uuauauaaagauaacuuuucuu

SEQ ID NO: 793341 - RNA, 22 nt, Human
ggcaggcuugauauggggggac

SEQ ID NO: 793342 - RNA, 22 nt, Human
auuauaaagaacaugugugugg

SEQ ID NO: 793343 - RNA, 22 nt, Human
aagaaguuagguguaacaauau

SEQ ID NO: 793344 - RNA, 22 nt, Human
cugagaggaugcugcaguggag

SEQ ID NO: 793345 - RNA, 22 nt, Human
cugcuggugcagaguggggcug

SEQ ID NO: 793346 - RNA, 22 nt, Human
aacaaguuagauuuugugucuu

SEQ ID NO: 793347 - RNA, 21 nt, Human
gacaaacauuucauagcuuua

SEQ ID NO: 793348 - RNA, 22 nt, Human
aggcaggccccugagaauagac

SEQ ID NO: 793349 - RNA, 23 nt, Human
uuauaaauauuuucagguguguu

SEQ ID NO: 793350 - RNA, 22 nt, Human
gauuaguauccuuauuaagaga

SEQ ID NO: 793351 - RNA, 20 nt, Human
uucuggaggcuacaagucug

SEQ ID NO: 793352 - RNA, 22 nt, Human
gcagugucuuugaccuccaccc

SEQ ID NO: 793353 - RNA, 22 nt, Human
ucugcagguguuggaaggguca

SEQ ID NO: 793354 - RNA, 22 nt, Human
agccaggggagucagcugcugg

SEQ ID NO: 793355 - RNA, 22 nt, Human
aaguuucaaauauaaaauuaca

SEQ ID NO: 793356 - RNA, 22 nt, Human
uaugccuggggugcucaggcca

SEQ ID NO: 793357 - RNA, 22 nt, Human
ucucuugacugcuaaaauuaga

SEQ ID NO: 793358 - RNA, 22 nt, Human
gcuggaguccaguggcaugauc

SEQ ID NO: 793359 - RNA, 22 nt, Human
guucugaaugugccuguacucu

SEQ ID NO: 793360 - RNA, 22 nt, Human
uucacaguggcccucucugagu

SEQ ID NO: 793361 - RNA, 22 nt, Human
gaugccugcauuucaggagagu

SEQ ID NO: 793362 - RNA, 18 nt, Human
aacaugcauuagaacugc

SEQ ID NO: 793363 - RNA, 22 nt, Human
ugcaggugcuccgggggugccc

SEQ ID NO: 793364 - RNA, 22 nt, Human
agccaggucagcucacccugcu

SEQ ID NO: 793365 - RNA, 22 nt, Human
uguggcagggauacugaggcag

SEQ ID NO: 793366 - RNA, 22 nt, Human
ggcuggcuacauuggaggaagg

SEQ ID NO: 793367 - RNA, 22 nt, Human
ggccugugcacaugugcaggaa

SEQ ID NO: 793368 - RNA, 22 nt, Human
cugguucauccccuuccaggaa

SEQ ID NO: 793369 - RNA, 22 nt, Human
ggugagugucaaugguuagagu

SEQ ID NO: 793370 - RNA, 22 nt, Human
uaugcuuuaacauuaaacaaca

SEQ ID NO: 793371 - RNA, 22 nt, Human
aggcagcagggccacuggcuga

SEQ ID NO: 793372 - RNA, 22 nt, Human
gccugagaucagccaagccccu

SEQ ID NO: 793373 - RNA, 22 nt, Human
ucaacacuaaagaauaaucuuu

SEQ ID NO: 793374 - RNA, 22 nt, Human
gcacccugcucuauccuugcua

SEQ ID NO: 793375 - RNA, 22 nt, Human
gagaggcucugaggacuggggu

SEQ ID NO: 793376 - RNA, 22 nt, Human
uucauugaugugguuuaaugua

SEQ ID NO: 793377 - RNA, 22 nt, Human
gcugggccagagcagcagcacu

SEQ ID NO: 793378 - RNA, 22 nt, Human
uauguacauaacaugaaaugca

SEQ ID NO: 793379 - RNA, 22 nt, Human
cauucauuugcccaguaaguca

SEQ ID NO: 793380 - RNA, 22 nt, Human
agagccagccuucucagcuuac

SEQ ID NO: 793381 - RNA, 22 nt, Human
ucccuguguccaugccaggagg

SEQ ID NO: 793382 - RNA, 22 nt, Human
gauggcaggcaggugaguagag

SEQ ID NO: 793383 - RNA, 22 nt, Human
ucuuggacucaaaauugccuua

SEQ ID NO: 793384 - RNA, 21 nt, Human
ugcagcuggguucugguuugc

SEQ ID NO: 793385 - RNA, 22 nt, Human
uuuccacagcuguauaaaauaa

SEQ ID NO: 793386 - RNA, 22 nt, Human
uucugcaguguuaacaauguca

SEQ ID NO: 793387 - RNA, 22 nt, Human
aacaguaaugugguguuggguu

SEQ ID NO: 793388 - RNA, 18 nt, Human
ugacagaaccuggagccu

SEQ ID NO: 793389 - RNA, 23 nt, Human
aaaugccagggagacaggaacca

SEQ ID NO: 793390 - RNA, 22 nt, Human
ggguccagauggugagaguuaa

SEQ ID NO: 793391 - RNA, 22 nt, Human
aagcagggucuuccucaguugg

SEQ ID NO: 793392 - RNA, 19 nt, Human
ccaugcagccugggggcag

SEQ ID NO: 793393 - RNA, 22 nt, Human
uuuacuaagcccaguuauaugc

SEQ ID NO: 793394 - RNA, 20 nt, Human
ugcagguguuggagaaggua

SEQ ID NO: 793395 - RNA, 22 nt, Human
aggcugaggugugcugugaucg

SEQ ID NO: 793396 - RNA, 22 nt, Human
ggccaagguguucugauaugcc

SEQ ID NO: 793397 - RNA, 22 nt, Human
gcaugaugaaggaggaggaguc

SEQ ID NO: 793398 - RNA, 22 nt, Human
aacugcuuagugauggaugacc

SEQ ID NO: 793399 - RNA, 22 nt, Human
agagaagcagggagucaucugu

SEQ ID NO: 793400 - RNA, 22 nt, Human
uggcucagucauggaugaguaa

SEQ ID NO: 793401 - RNA, 22 nt, Human
aggcuucuaggguuggcagcgg

SEQ ID NO: 793402 - RNA, 22 nt, Human
agggugggcuagacucuucccc

SEQ ID NO: 793403 - RNA, 22 nt, Human
uggagaugcacgagcaggugga

SEQ ID NO: 793404 - RNA, 22 nt, Human
ucuuuaagccaagauauauuua

SEQ ID NO: 793405 - RNA, 22 nt, Human
uaugagauauucccagcgucua

SEQ ID NO: 793406 - RNA, 18 nt, Human
cagccucugauugguugc

SEQ ID NO: 793407 - RNA, 22 nt, Human
agugaaaaccuaaucaugcagu

SEQ ID NO: 793408 - RNA, 22 nt, Human
caucaaauacuacauggguugg

SEQ ID NO: 793409 - RNA, 22 nt, Human
uguggcagaaagcauguggaca

SEQ ID NO: 793410 - RNA, 22 nt, Human
ucuggaguuacugcuggcuuug

SEQ ID NO: 793411 - RNA, 21 nt, Human
gugcccuguucccacaugccc

SEQ ID NO: 793412 - RNA, 23 nt, Human
ucaagcaauaauugguaauagug

SEQ ID NO: 793413 - RNA, 22 nt, Human
uuuaaacaucuuguugccuuaa

SEQ ID NO: 793414 - RNA, 22 nt, Human
ucucucagaaagcccaugucug

SEQ ID NO: 793415 - RNA, 22 nt, Human
caggaaauucccagaaggacug

SEQ ID NO: 793416 - RNA, 22 nt, Human
gggcugagugucccaggccgaa

SEQ ID NO: 793417 - RNA, 16 nt, Human
ugcuggggcgccgucc

SEQ ID NO: 793418 - RNA, 22 nt, Human
uaacuuuaggaauagguaaucu

SEQ ID NO: 793419 - RNA, 22 nt, Human
uuuauuuauccuucuggauugc

SEQ ID NO: 793420 - RNA, 22 nt, Human
ggggaggcaagaugaagugagg

SEQ ID NO: 793421 - RNA, 22 nt, Human
caggauccuggcugcauggacg

SEQ ID NO: 793422 - RNA, 22 nt, Human
gccugccuggagcuugagguga

SEQ ID NO: 793423 - RNA, 22 nt, Human
aacaguugauguagcuuuggag

SEQ ID NO: 793424 - RNA, 22 nt, Human
cucccaggcagggcugcccacu

SEQ ID NO: 793425 - RNA, 22 nt, Human
ccugugggcgcagcuggaguca

SEQ ID NO: 793426 - RNA, 22 nt, Human
ucucccacugcaagcccaggcu

SEQ ID NO: 793427 - RNA, 22 nt, Human
gaaagcaauuuguguaaucugu

SEQ ID NO: 793428 - RNA, 22 nt, Human
uggcccugaggacccagugugg

SEQ ID NO: 793429 - RNA, 22 nt, Human
auguuuucaaaguaaacuugua

SEQ ID NO: 793430 - RNA, 22 nt, Human
auacuucuuuagcauauugaac

SEQ ID NO: 793431 - RNA, 22 nt, Human
acaaggaacaagcauguaguuu

SEQ ID NO: 793432 - RNA, 22 nt, Human
uggugagauguauggaggguug

SEQ ID NO: 793433 - RNA, 18 nt, Human
uggcuucuugagcuaaca

SEQ ID NO: 793434 - RNA, 22 nt, Human
caaggcagcuuaauagaauuug

SEQ ID NO: 793435 - RNA, 18 nt, Human
uaggcugggggcuguagu

SEQ ID NO: 793436 - RNA, 22 nt, Human
caguccagcccccugcuaaaag

SEQ ID NO: 793437 - RNA, 18 nt, Human
gauguaaaauaguagcuu

SEQ ID NO: 793438 - RNA, 22 nt, Human
acauuuauauaacucacuagga

SEQ ID NO: 793439 - RNA, 22 nt, Human
auauuauagacagagucuucug

SEQ ID NO: 793440 - RNA, 22 nt, Human
uguccaggcggccuugccuguu

SEQ ID NO: 793441 - RNA, 22 nt, Human
uacuuugagaugaugcugaucg

SEQ ID NO: 793442 - RNA, 22 nt, Human
gccagcugaauuuccaacuguu

SEQ ID NO: 793443 - RNA, 19 nt, Human
ugcagcuguaugagcuuaa

SEQ ID NO: 793444 - RNA, 22 nt, Human
agcaagcuggaggggcucauga

SEQ ID NO: 793445 - RNA, 22 nt, Human
aucugcuuccugggcuccauga

SEQ ID NO: 793446 - RNA, 22 nt, Human
ugagggagcugaccuuucugug

SEQ ID NO: 793447 - RNA, 22 nt, Human
ccuggagcuuuuccauccugga

SEQ ID NO: 793448 - RNA, 22 nt, Human
cuguuuaaugagguguaacaac

SEQ ID NO: 793449 - RNA, 22 nt, Human
uugaaaaaauugguagaggaug

SEQ ID NO: 793450 - RNA, 22 nt, Human
uagggcagauucgguggaguuu

SEQ ID NO: 793451 - RNA, 22 nt, Human
uaaauguauaggcacuaaaccu

SEQ ID NO: 793452 - RNA, 19 nt, Human
gcugugccccugccgcuug

SEQ ID NO: 793453 - RNA, 22 nt, Human
gcuuugcuuccuguucuagccu

SEQ ID NO: 793454 - RNA, 22 nt, Human
aggaauuaacaauauauuuagg

SEQ ID NO: 793455 - RNA, 22 nt, Human
uggcuggaguauaggaguagga

SEQ ID NO: 793456 - RNA, 22 nt, Human
ggcugccugugcccaggcacac

SEQ ID NO: 793457 - RNA, 19 nt, Human
uguucuagcggcaccaggc

SEQ ID NO: 793458 - RNA, 22 nt, Human
acagugauauuuuuacucaaau

SEQ ID NO: 793459 - RNA, 22 nt, Human
aaaauaguuaacguucagagua

SEQ ID NO: 793460 - RNA, 22 nt, Human
cagaggcaggauaagaacugcg

SEQ ID NO: 793461 - RNA, 20 nt, Human
aucuuuggcucagaagccuu

SEQ ID NO: 793462 - RNA, 22 nt, Human
gaaggcuuaugugugacuuucg

SEQ ID NO: 793463 - RNA, 22 nt, Human
ucugaagcagaaaauggggaua

SEQ ID NO: 793464 - RNA, 22 nt, Human
aagcuuuggaagggcaggguug

SEQ ID NO: 793465 - RNA, 22 nt, Human
aaaugucuuuaucucauguaac

SEQ ID NO: 793466 - RNA, 22 nt, Human
ccaggacauguugcaaguuuau

SEQ ID NO: 793467 - RNA, 18 nt, Human
gcucugcccaggcugccc

SEQ ID NO: 793468 - RNA, 22 nt, Human
aacaguaauuugcgguuuuugc

SEQ ID NO: 793469 - RNA, 22 nt, Human
cuggugcccuguguggcaggag

SEQ ID NO: 793470 - RNA, 22 nt, Human
guuguuuauaaaaauaucuagc

SEQ ID NO: 793471 - RNA, 22 nt, Human
agcagccaaccuuacauucauc

SEQ ID NO: 793472 - RNA, 22 nt, Human
aaaguuugcaauuuauguuaau

SEQ ID NO: 793473 - RNA, 22 nt, Human
ggacaagccugugaguggguuu

SEQ ID NO: 793474 - RNA, 22 nt, Human
ucacauuucgcaucaguccgau

SEQ ID NO: 793475 - RNA, 22 nt, Human
gcuguggcuugcagcuggggcu

SEQ ID NO: 793476 - RNA, 22 nt, Human
cauggcaggaaggacaugcacu

SEQ ID NO: 793477 - RNA, 22 nt, Human
uggaaauguuucuugagcucag

SEQ ID NO: 793478 - RNA, 22 nt, Human
uaauagcugugggaaauaaaag

SEQ ID NO: 793479 - RNA, 22 nt, Human
uaaggcaguagugucuguaggg

SEQ ID NO: 793480 - RNA, 22 nt, Human
cugcugggucccccugcugauu

SEQ ID NO: 793481 - RNA, 22 nt, Human
ggaagcugaacuuagcaaggaa

SEQ ID NO: 793482 - RNA, 22 nt, Human
gccaggcacaguucuaggugcu

SEQ ID NO: 793483 - RNA, 22 nt, Human
uguugagacugagggagucagc

SEQ ID NO: 793484 - RNA, 22 nt, Human
gcuggaguaucuggggaaggag

SEQ ID NO: 793485 - RNA, 22 nt, Human
gugcccagugcaggcccgcagg

SEQ ID NO: 793486 - RNA, 22 nt, Human
aaugauaagacaugaguagagg

SEQ ID NO: 793487 - RNA, 22 nt, Human
ccaggagcagggcuggcugcac

SEQ ID NO: 793488 - RNA, 22 nt, Human
agagaugguagaacagucauaa

SEQ ID NO: 793489 - RNA, 22 nt, Human
ucaggccugcaaggagaguccc

SEQ ID NO: 793490 - RNA, 22 nt, Human
uaacauccacauuagaugauuc

SEQ ID NO: 793491 - RNA, 22 nt, Human
ggccacugcccuggcuacaccg

SEQ ID NO: 793492 - RNA, 22 nt, Human
aggcuuggaaaauuuacagugu

SEQ ID NO: 793493 - RNA, 20 nt, Human
aggaaggcuguuggccuugc

SEQ ID NO: 793494 - RNA, 21 nt, Human
uggacauuauggagagaguag

SEQ ID NO: 793495 - RNA, 22 nt, Human
cuucauuaaccaaaaugcaaua

SEQ ID NO: 793496 - RNA, 22 nt, Human
ggcacuguguacacacagagac

SEQ ID NO: 793497 - RNA, 23 nt, Human
uugcauguagcccaugaguaacu

SEQ ID NO: 793498 - RNA, 22 nt, Human
aaggcugugguucuauacagaa

SEQ ID NO: 793499 - RNA, 22 nt, Human
ugcaaauagccugaugaaagaa

SEQ ID NO: 793500 - RNA, 22 nt, Human
cagagaacuuagcuaguuuucc

SEQ ID NO: 793501 - RNA, 22 nt, Human
cagcugccugucuggaggcaau

SEQ ID NO: 793502 - RNA, 22 nt, Human
acuccuggguucuaaauuugaa

SEQ ID NO: 793503 - RNA, 22 nt, Human
uugcaaauucauggaucugaau

SEQ ID NO: 793504 - RNA, 22 nt, Human
aguaaaugauuauuuugccaac

SEQ ID NO: 793505 - RNA, 22 nt, Human
uucugaaaccacugaccaacua

SEQ ID NO: 793506 - RNA, 22 nt, Human
cgaggaggaaacgcggagaacu

SEQ ID NO: 793507 - RNA, 22 nt, Human
ccugccuggcuuccagaagaga

SEQ ID NO: 793508 - RNA, 22 nt, Human
uuucccuucuuuccugaguaau

SEQ ID NO: 793509 - RNA, 22 nt, Human
aacagacauauuuuuaauaugc

SEQ ID NO: 793510 - RNA, 20 nt, Human
ccacauuuuacuguuugcca

SEQ ID NO: 793511 - RNA, 22 nt, Human
cugaggcuuguccucucagcuu

SEQ ID NO: 793512 - RNA, 22 nt, Human
aggcuucugucuuuaggaguug

SEQ ID NO: 793513 - RNA, 22 nt, Human
ugacaagcuuuacagaauugaa

SEQ ID NO: 793514 - RNA, 22 nt, Human
agcugccagcaaguuucaaaca

SEQ ID NO: 793515 - RNA, 22 nt, Human
caaauguaauaaggaguuuccc

SEQ ID NO: 793516 - RNA, 22 nt, Human
uguggcagaacugggacucaaa

SEQ ID NO: 793517 - RNA, 18 nt, Human
ccucagggagagagacgc

SEQ ID NO: 793518 - RNA, 21 nt, Human
gcagaugggagucaucaggcu

SEQ ID NO: 793519 - RNA, 22 nt, Human
ccaggccuuucuucuuggucug

SEQ ID NO: 793520 - RNA, 22 nt, Human
gacaauaaagugauacauggga

SEQ ID NO: 793521 - RNA, 21 nt, Human
ucuccuggguccaacccaugc

SEQ ID NO: 793522 - RNA, 21 nt, Human
cagcuucuucugugaccuggu

SEQ ID NO: 793523 - RNA, 22 nt, Human
uuucauuggcucccugaugaau

SEQ ID NO: 793524 - RNA, 22 nt, Human
ucaggagggugacaggcccugg

SEQ ID NO: 793525 - RNA, 22 nt, Human
uccaggccuggcuccauucagu

SEQ ID NO: 793526 - RNA, 22 nt, Human
cuccugggggacagcggcaggg

SEQ ID NO: 793527 - RNA, 22 nt, Human
cuguccuccagacgacaguccc

SEQ ID NO: 793528 - RNA, 22 nt, Human
acacauuaucucauuaaauacu

SEQ ID NO: 793529 - RNA, 22 nt, Human
aggccuccuggcuccaggccuu

SEQ ID NO: 793530 - RNA, 22 nt, Human
gcagcagggugccagcuuugca

SEQ ID NO: 793531 - RNA, 22 nt, Human
ccucuuuaaucccauccaugug

SEQ ID NO: 793532 - RNA, 22 nt, Human
aggcagggugaugauaaugauu

SEQ ID NO: 793533 - RNA, 22 nt, Human
cucacuguccaacaggcuuuac

SEQ ID NO: 793534 - RNA, 20 nt, Human
gucucaaguaucucacaguc

SEQ ID NO: 793535 - RNA, 22 nt, Human
auggcucucuccuuacugcugc

SEQ ID NO: 793536 - RNA, 22 nt, Human
aauaguacaaucuacagacaua

SEQ ID NO: 793537 - RNA, 22 nt, Human
aggcaguggaaggagaaagcaa

SEQ ID NO: 793538 - RNA, 22 nt, Human
gcccagucucuucuggcccugu

SEQ ID NO: 793539 - RNA, 22 nt, Human
guucuuggaccagcagcauuga

SEQ ID NO: 793540 - RNA, 22 nt, Human
cucaggcacgggucagugagcg

SEQ ID NO: 793541 - RNA, 22 nt, Human
aaaacauucugugaacucucaa

SEQ ID NO: 793542 - RNA, 22 nt, Human
uccagcuggcccggccaugaau

SEQ ID NO: 793543 - RNA, 22 nt, Human
uaaaacuucucauuuuuauggu

SEQ ID NO: 793544 - RNA, 22 nt, Human
caggaggcagaggaugcccagu

SEQ ID NO: 793545 - RNA, 22 nt, Human
augcuucuuguauuuggcugac

SEQ ID NO: 793546 - RNA, 22 nt, Human
aaagucaaaaugcucuccuguc

SEQ ID NO: 793547 - RNA, 22 nt, Human
acagugauuggcacugauucag

SEQ ID NO: 793548 - RNA, 21 nt, Human
ucuuuucucugcaggauuccu

SEQ ID NO: 793549 - RNA, 22 nt, Human
aaacuucagggaauaaaagagu

SEQ ID NO: 793550 - RNA, 22 nt, Human
ggugcaggaaaauuaccuggag

SEQ ID NO: 793551 - RNA, 19 nt, Human
ucaugcaaucagugaacug

SEQ ID NO: 793552 - RNA, 22 nt, Human
cuggcuguggucacagguaacu

SEQ ID NO: 793553 - RNA, 22 nt, Human
cuguucugaccagugcagggau

SEQ ID NO: 793554 - RNA, 20 nt, Human
agaggcuuucuuguagucag

SEQ ID NO: 793555 - RNA, 22 nt, Human
cuuggaggaugugcggcugccc

SEQ ID NO: 793556 - RNA, 22 nt, Human
aaaaugugaucuacaaaugcaa

SEQ ID NO: 793557 - RNA, 22 nt, Human
aaucaggauagaaccucacgug

SEQ ID NO: 793558 - RNA, 22 nt, Human
aaugucaaucucagagaacaca

SEQ ID NO: 793559 - RNA, 22 nt, Human
ucugcuggaaaaccagggaauu

SEQ ID NO: 793560 - RNA, 22 nt, Human
uccaggaguccugggagugauu

SEQ ID NO: 793561 - RNA, 22 nt, Human
gaagaauauucuugaucuuaga

SEQ ID NO: 793562 - RNA, 22 nt, Human
gccaggcagcuagcaaccccug

SEQ ID NO: 793563 - RNA, 22 nt, Human
aaguaaauaucuguagucuuua

SEQ ID NO: 793564 - RNA, 22 nt, Human
ccccuccuggccacacugucag

SEQ ID NO: 793565 - RNA, 22 nt, Human
gcccuggauguacaggcauguu

SEQ ID NO: 793566 - RNA, 22 nt, Human
augggggaaaguacgagcaugg

SEQ ID NO: 793567 - RNA, 22 nt, Human
uucaccaugggaugacaacagu

SEQ ID NO: 793568 - RNA, 22 nt, Human
uaccaauucuauuuuggauuga

SEQ ID NO: 793569 - RNA, 22 nt, Human
cuuuguaucuaaauaucuugaa

SEQ ID NO: 793570 - RNA, 22 nt, Human
caagaauuaagaauuuugaugu

SEQ ID NO: 793571 - RNA, 22 nt, Human
aaaaccuucagguuuggaguuu

SEQ ID NO: 793572 - RNA, 22 nt, Human
aaucauaauucaaauaagcuua

SEQ ID NO: 793573 - RNA, 22 nt, Human
guucuaggcuaggggaguaaga

SEQ ID NO: 793574 - RNA, 22 nt, Human
cccaggcagcggggucuccuug

SEQ ID NO: 793575 - RNA, 22 nt, Human
acuuucugucaucuagacaagu

SEQ ID NO: 793576 - RNA, 22 nt, Human
cugcacagcugggcaagauaua

SEQ ID NO: 793577 - RNA, 22 nt, Human
ucuuuacaagucacauuuucug

SEQ ID NO: 793578 - RNA, 22 nt, Human
ccugggcagguguggcuucccc

SEQ ID NO: 793579 - RNA, 22 nt, Human
uggccuagagaagccaaaagau

SEQ ID NO: 793580 - RNA, 22 nt, Human
agaaauguugaauacacaaaau

SEQ ID NO: 793581 - RNA, 22 nt, Human
uagcuuugccugaaguaaucag

SEQ ID NO: 793582 - RNA, 22 nt, Human
aggcagccaucugcaggaagga

SEQ ID NO: 793583 - RNA, 22 nt, Human
uccacugcagcuucugauggaa

SEQ ID NO: 793584 - RNA, 22 nt, Human
cuggccuggggccucagcugcu

SEQ ID NO: 793585 - RNA, 22 nt, Human
gaggucaggggagaggcugaug

SEQ ID NO: 793586 - RNA, 22 nt, Human
gaggcaagaaaggacuuucuag

SEQ ID NO: 793587 - RNA, 22 nt, Human
acuggcagaggauagcacuaau

SEQ ID NO: 793588 - RNA, 22 nt, Human
aucaagaauugggagcuauuga

SEQ ID NO: 793589 - RNA, 22 nt, Human
auacaaguugcccaaaugauua

SEQ ID NO: 793590 - RNA, 20 nt, Human
agggcccaggaagagaguua

SEQ ID NO: 793591 - RNA, 22 nt, Human
cuggggagacgaucgauguucu

SEQ ID NO: 793592 - RNA, 22 nt, Human
acauuguauaaugauuaucaca

SEQ ID NO: 793593 - RNA, 20 nt, Human
cagcaggaaaagugccucag

SEQ ID NO: 793594 - RNA, 22 nt, Human
ucucccacuggccuuguaugau

SEQ ID NO: 793595 - RNA, 22 nt, Human
cccaggagacauauagaaggac

SEQ ID NO: 793596 - RNA, 22 nt, Human
uucagauaaacuacaaauaauu

SEQ ID NO: 793597 - RNA, 22 nt, Human
cacaugaguguaggaagaggga

SEQ ID NO: 793598 - RNA, 22 nt, Human
agguggagugugcagggagagc

SEQ ID NO: 793599 - RNA, 22 nt, Human
gcagggcauagaggcacggagg

SEQ ID NO: 793600 - RNA, 20 nt, Human
ggaaacauuuuuauuuccau

SEQ ID NO: 793601 - RNA, 22 nt, Human
caaauucucacccuguuugauu

SEQ ID NO: 793602 - RNA, 22 nt, Human
cagcugucagccggugcaggcu

SEQ ID NO: 793603 - RNA, 18 nt, Human
cagcugcaggcucaggac

SEQ ID NO: 793604 - RNA, 17 nt, Human
gcccacccuuaggagcu

SEQ ID NO: 793605 - RNA, 22 nt, Human
guuuuuccuugcugaggacccg

SEQ ID NO: 793606 - RNA, 22 nt, Human
aucacaguuacucaaauaauga

SEQ ID NO: 793607 - RNA, 22 nt, Human
cuuuggaggucauagccaagag

SEQ ID NO: 793608 - RNA, 22 nt, Human
gggugggcccagcccagagaag

SEQ ID NO: 793609 - RNA, 22 nt, Human
acaggcugcccgcuccccaccu

SEQ ID NO: 793610 - RNA, 22 nt, Human
ugcagguggacacgggagacgg

SEQ ID NO: 793611 - RNA, 22 nt, Human
uggcccagcacuccaaguaggg

SEQ ID NO: 793612 - RNA, 22 nt, Human
cacauuucucuaccucacacaa

SEQ ID NO: 793613 - RNA, 18 nt, Human
aucucccauuggccaagg

SEQ ID NO: 793614 - RNA, 22 nt, Human
ccugugucugaccaugcacaug

SEQ ID NO: 793615 - RNA, 22 nt, Human
gcucagggagagagggcagccg

SEQ ID NO: 793616 - RNA, 22 nt, Human
gaugagcauuguuucauguguu

SEQ ID NO: 793617 - RNA, 22 nt, Human
aggucaagggcaagagugaggu

SEQ ID NO: 793618 - RNA, 22 nt, Human
aguaaauaacagagaaaauggg

SEQ ID NO: 793619 - RNA, 22 nt, Human
auagauauuagcaaaauuuuau

SEQ ID NO: 793620 - RNA, 19 nt, Human
ccuugccugucccugcagc

SEQ ID NO: 793621 - RNA, 22 nt, Human
caggagaggaggcuacuucuua

SEQ ID NO: 793622 - RNA, 22 nt, Human
acuuguuucaacuguacucucc

SEQ ID NO: 793623 - RNA, 22 nt, Human
uuuauucuagcucagaauaguu

SEQ ID NO: 793624 - RNA, 22 nt, Human
uucugagauuguuaggcacuaa

SEQ ID NO: 793625 - RNA, 23 nt, Human
aucuagaaaccugaugacucugu

SEQ ID NO: 793626 - RNA, 22 nt, Human
gccccuccgggcgcgucauagc

SEQ ID NO: 793627 - RNA, 22 nt, Human
ccaguaaaaagcgacaggaagu

SEQ ID NO: 793628 - RNA, 22 nt, Human
cuggcagggcagggguuugugc

SEQ ID NO: 793629 - RNA, 22 nt, Human
agcaaauacuugaauaaaaaga

SEQ ID NO: 793630 - RNA, 22 nt, Human
auuaaucauuucugcauuaucu

SEQ ID NO: 793631 - RNA, 22 nt, Human
gcagcuggagccagccagacac

SEQ ID NO: 793632 - RNA, 20 nt, Human
uuguuucugcuauuuucuaa

SEQ ID NO: 793633 - RNA, 22 nt, Human
agggggcucagcaggcucugga

SEQ ID NO: 793634 - RNA, 23 nt, Human
auauaaacaccagauagauugua

SEQ ID NO: 793635 - RNA, 22 nt, Human
gagcuaaguuucuggaggcaga

SEQ ID NO: 793636 - RNA, 22 nt, Human
ggaagggguuaggggucccuga

SEQ ID NO: 793637 - RNA, 22 nt, Human
ccagcaggagagaacauuuccc

SEQ ID NO: 793638 - RNA, 22 nt, Human
ugggugguuuaugaguggguuu

SEQ ID NO: 793639 - RNA, 22 nt, Human
ucugugguggagugggcaugag

SEQ ID NO: 793640 - RNA, 22 nt, Human
auguuauuuuggaaaauacaaa

SEQ ID NO: 793641 - RNA, 22 nt, Human
aggcugcccugccgccaguggg

SEQ ID NO: 793642 - RNA, 22 nt, Human
acagggccuuauauccagaagg

SEQ ID NO: 793643 - RNA, 22 nt, Human
caucagcucuucauucuugauu

SEQ ID NO: 793644 - RNA, 22 nt, Human
aaggaaaucuuuguaacaucuu

SEQ ID NO: 793645 - RNA, 22 nt, Human
uaaugacugccgucucucuuca

SEQ ID NO: 793646 - RNA, 23 nt, Human
gggugggccaaauuagguagccu

SEQ ID NO: 793647 - RNA, 22 nt, Human
caggcuugggagcagagccacu

SEQ ID NO: 793648 - RNA, 21 nt, Human
gaaggagaaagcaagugcugc

SEQ ID NO: 793649 - RNA, 22 nt, Human
cuuguauucuuguaccuuucaa

SEQ ID NO: 793650 - RNA, 22 nt, Human
aaggcacaugaccuaggccugg

SEQ ID NO: 793651 - RNA, 22 nt, Human
ggguaggcucugcaggcugggu

SEQ ID NO: 793652 - RNA, 22 nt, Human
cugugagagugguggccuaggc

SEQ ID NO: 793653 - RNA, 22 nt, Human
ucaaaguauaauugcuuuuuug

SEQ ID NO: 793654 - RNA, 22 nt, Human
ccaggagccugggccaggcugg

SEQ ID NO: 793655 - RNA, 22 nt, Human
ucccugcaggugugcaagcuga

SEQ ID NO: 793656 - RNA, 22 nt, Human
ugcacacauguuuacaagcauc

SEQ ID NO: 793657 - RNA, 22 nt, Human
acuaaagcucacagaguugaac

SEQ ID NO: 793658 - RNA, 22 nt, Human
uucacauuguuuuaaugugaau

SEQ ID NO: 793659 - RNA, 22 nt, Human
uguagacuuucuuuguguuagu

SEQ ID NO: 793660 - RNA, 22 nt, Human
gcccagugguaaaagcaggccu

SEQ ID NO: 793661 - RNA, 22 nt, Human
ccugugcuggacagggcugggc

SEQ ID NO: 793662 - RNA, 22 nt, Human
cuuaaagaaauugaggagagga

SEQ ID NO: 793663 - RNA, 22 nt, Human
aauuugauucccugcaccuguu

SEQ ID NO: 793664 - RNA, 22 nt, Human
gggcaccagcggccgcacugcc

SEQ ID NO: 793665 - RNA, 22 nt, Human
cucagggacuuggauccuggcc

SEQ ID NO: 793666 - RNA, 22 nt, Human
gucucccaauccgggacagccu

SEQ ID NO: 793667 - RNA, 22 nt, Human
ugggacaguuguccuccacucu

SEQ ID NO: 793668 - RNA, 22 nt, Human
ugcacacacacguagagaaaag

SEQ ID NO: 793669 - RNA, 19 nt, Human
agauggcaaaaugcaaaga

SEQ ID NO: 793670 - RNA, 22 nt, Human
uacauucuggaaaggcacagac

SEQ ID NO: 793671 - RNA, 22 nt, Human
guggcagaaacuggcagaggag

SEQ ID NO: 793672 - RNA, 22 nt, Human
caccaggcacauaguaggcacu

SEQ ID NO: 793673 - RNA, 22 nt, Human
ugucuccacaggugucagcuca

SEQ ID NO: 793674 - RNA, 22 nt, Human
auucaagguuuauucaguuuag

SEQ ID NO: 793675 - RNA, 22 nt, Human
cagggcuggauuucauuucuag

SEQ ID NO: 793676 - RNA, 23 nt, Human
uuuauauuccuaaugucuugagc

SEQ ID NO: 793677 - RNA, 22 nt, Human
aaggcccagccuggagcuuguu

SEQ ID NO: 793678 - RNA, 22 nt, Human
cauacaguuuucccuagaugug

SEQ ID NO: 793679 - RNA, 22 nt, Human
agccuauuccaggaugagcuca

SEQ ID NO: 793680 - RNA, 22 nt, Human
caggcagagcugaagauagaug

SEQ ID NO: 793681 - RNA, 22 nt, Human
agaguggcccguuggccugaac

SEQ ID NO: 793682 - RNA, 22 nt, Human
cuggggcccgagccuugggcca

SEQ ID NO: 793683 - RNA, 22 nt, Human
uggcacugaaaaaggagagguu

SEQ ID NO: 793684 - RNA, 22 nt, Human
aggccaguuuuuggagggaaac

SEQ ID NO: 793685 - RNA, 22 nt, Human
agugaucuuuuaaaaagaagug

SEQ ID NO: 793686 - RNA, 22 nt, Human
gcagcugcaggcaggcuugcug

SEQ ID NO: 793687 - RNA, 22 nt, Human
gcugcugggucccucugugcca

SEQ ID NO: 793688 - RNA, 22 nt, Human
aggcagggucuugcuauguugc

SEQ ID NO: 793689 - RNA, 22 nt, Human
guggccagccagggugcugaug

SEQ ID NO: 793690 - RNA, 22 nt, Human
ugugucaacaacagccuuggau

SEQ ID NO: 793691 - RNA, 22 nt, Human
uccccaggaguuuuacuuugca

SEQ ID NO: 793692 - RNA, 21 nt, Human
aggaggcugucucuuucagcu

SEQ ID NO: 793693 - RNA, 22 nt, Human
agcagcuuccuguuugcaggca

SEQ ID NO: 793694 - RNA, 22 nt, Human
caucaggacagcuucuuuucac

SEQ ID NO: 793695 - RNA, 22 nt, Human
uucugggacaucuggacaguuu

SEQ ID NO: 793696 - RNA, 23 nt, Human
cugguucauagucaagagauuga

SEQ ID NO: 793697 - RNA, 22 nt, Human
uuucauguuacaguguaaaagu

SEQ ID NO: 793698 - RNA, 22 nt, Human
ggcccagcaucuugugaaguuu

SEQ ID NO: 793699 - RNA, 20 nt, Human
aggcaugggaugcccagauu

SEQ ID NO: 793700 - RNA, 22 nt, Human
guauuauuaaguguauuugacc

SEQ ID NO: 793701 - RNA, 22 nt, Human
gucuccaguguucaggugacug

SEQ ID NO: 793702 - RNA, 22 nt, Human
cagauuaagugcucaacagugu

SEQ ID NO: 793703 - RNA, 22 nt, Human
uggcaggcagugugggagcugg

SEQ ID NO: 793704 - RNA, 17 nt, Human
ugggauccgucucugug

SEQ ID NO: 793705 - RNA, 22 nt, Human
agucauaugacccuucacaaac

SEQ ID NO: 793706 - RNA, 22 nt, Human
cccacagggcugcugauggcag

SEQ ID NO: 793707 - RNA, 22 nt, Human
uugcaaauggaggccuggcagc

SEQ ID NO: 793708 - RNA, 22 nt, Human
ugcuauuuggcacuuuugaccu

SEQ ID NO: 793709 - RNA, 22 nt, Human
agcagugcuauggccaggcuaa

SEQ ID NO: 793710 - RNA, 22 nt, Human
acauacauggauucauggauuc

SEQ ID NO: 793711 - RNA, 22 nt, Human
ucccagccggugccuggguccc

SEQ ID NO: 793712 - RNA, 22 nt, Human
cccagggagguagcaggagaaa

SEQ ID NO: 793713 - RNA, 19 nt, Human
agcccccagacagcaggcc

SEQ ID NO: 793714 - RNA, 22 nt, Human
gaaggugcaguggcuggaggcu

SEQ ID NO: 793715 - RNA, 22 nt, Human
agggagacaaaagcagcugcca

SEQ ID NO: 793716 - RNA, 22 nt, Human
auaauuaauuucaguaaucucc

SEQ ID NO: 793717 - RNA, 22 nt, Human
ugcaauauuuggcacugagaug

SEQ ID NO: 793718 - RNA, 22 nt, Human
uagggcaggggaggaaucugaa

SEQ ID NO: 793719 - RNA, 22 nt, Human
uugaucaucuaagaguaauagu

SEQ ID NO: 793720 - RNA, 22 nt, Human
uacagaauaaagcgugaagcuu

SEQ ID NO: 793721 - RNA, 22 nt, Human
ugcuagggauauaguggcgagu

SEQ ID NO: 793722 - RNA, 22 nt, Human
gugcaaauuccacuggaaagcu

SEQ ID NO: 793723 - RNA, 22 nt, Human
cagucauuuuauuugaaaauua

SEQ ID NO: 793724 - RNA, 22 nt, Human
uccagcuggggacaugggcuuc

SEQ ID NO: 793725 - RNA, 22 nt, Human
ggcugagggccagggcuagucu

SEQ ID NO: 793726 - RNA, 18 nt, Human
ucuggggugugcugugua

SEQ ID NO: 793727 - RNA, 22 nt, Human
gaaggcagguuuuucaaaacug

SEQ ID NO: 793728 - RNA, 22 nt, Human
gcagggcagcucacugugguuc

SEQ ID NO: 793729 - RNA, 22 nt, Human
cuuuuuccucguagagccuaau

SEQ ID NO: 793730 - RNA, 22 nt, Human
uuacauuucccccuuggaggcu

SEQ ID NO: 793731 - RNA, 22 nt, Human
aagagaauucugguuuuccuau

SEQ ID NO: 793732 - RNA, 22 nt, Human
cccugaggaaaggguggagggc

SEQ ID NO: 793733 - RNA, 16 nt, Human
cgccucccucccucgc

SEQ ID NO: 793734 - RNA, 22 nt, Human
ugcuggcucuaggcugagacag

SEQ ID NO: 793735 - RNA, 21 nt, Human
auuuccaaggguaccuaagau

SEQ ID NO: 793736 - RNA, 22 nt, Human
ucauuuuggccaugauacagac

SEQ ID NO: 793737 - RNA, 22 nt, Human
aaagaccugaaauauaaucuag

SEQ ID NO: 793738 - RNA, 22 nt, Human
gcagaggacacaggagggcaag

SEQ ID NO: 793739 - RNA, 22 nt, Human
ccugggucccaucccagaguga

SEQ ID NO: 793740 - RNA, 22 nt, Human
ggaguucacugugcaggcucug

SEQ ID NO: 793741 - RNA, 22 nt, Human
ggagggcucccugggaguggau

SEQ ID NO: 793742 - RNA, 21 nt, Human
cacagaggcgcuguauggcug

SEQ ID NO: 793743 - RNA, 22 nt, Human
aauaaaugaacaaagcagguug

SEQ ID NO: 793744 - RNA, 22 nt, Human
agaaaacugggaggagagcuuc

SEQ ID NO: 793745 - RNA, 22 nt, Human
cuggaggggccauccacagucu

SEQ ID NO: 793746 - RNA, 22 nt, Human
uaaggcagaaauaugagcaggg

SEQ ID NO: 793747 - RNA, 22 nt, Human
ccacagcuucgcagucugcugc

SEQ ID NO: 793748 - RNA, 22 nt, Human
uucugaaagucuuuuuaaguua

SEQ ID NO: 793749 - RNA, 22 nt, Human
ccccaggccuguuggauggcgc

SEQ ID NO: 793750 - RNA, 19 nt, Human
ucagggcaguccggucccc

SEQ ID NO: 793751 - RNA, 18 nt, Human
uuugcaaaggaaguaugg

SEQ ID NO: 793752 - RNA, 22 nt, Human
gggaaacuguccaguucucccc

SEQ ID NO: 793753 - RNA, 22 nt, Human
uucauaugugaacucagugaug

SEQ ID NO: 793754 - RNA, 22 nt, Human
ucuaaacauuaugauaguagag

SEQ ID NO: 793755 - RNA, 22 nt, Human
gccaccagcagaaaaggggcca

SEQ ID NO: 793756 - RNA, 22 nt, Human
ugggcuuaggucggaggcggcc

SEQ ID NO: 793757 - RNA, 22 nt, Human
cugugggagaggugccuggauu

SEQ ID NO: 793758 - RNA, 22 nt, Human
gccugagagucuccagaccuug

SEQ ID NO: 793759 - RNA, 22 nt, Human
aagaacuagucuuacagccuca

SEQ ID NO: 793760 - RNA, 22 nt, Human
uugcagcuucaagcagguugac

SEQ ID NO: 793761 - RNA, 22 nt, Human
ucucuugggaggaaagagagaa

SEQ ID NO: 793762 - RNA, 22 nt, Human
auguucuuaucauucuuucgga

SEQ ID NO: 793763 - RNA, 20 nt, Human
ggcccagugaaccaggacgg

SEQ ID NO: 793764 - RNA, 22 nt, Human
aaagcuuuguaaauaaacaggu

SEQ ID NO: 793765 - RNA, 22 nt, Human
uauuuucaccauguaucccugu

SEQ ID NO: 793766 - RNA, 22 nt, Human
augguggaagagcaucagaaag

SEQ ID NO: 793767 - RNA, 21 nt, Human
ugggccaguagaaaggaaggc

SEQ ID NO: 793768 - RNA, 22 nt, Human
aaaugacacuaggcuuuuugca

SEQ ID NO: 793769 - RNA, 22 nt, Human
cuucacauguuggaguccuuug

SEQ ID NO: 793770 - RNA, 22 nt, Human
agacaaugucaaggugaucauc

SEQ ID NO: 793771 - RNA, 22 nt, Human
ccacauuuuugauacucucacu

SEQ ID NO: 793772 - RNA, 22 nt, Human
uggcuuccagagcugcuccacc

SEQ ID NO: 793773 - RNA, 22 nt, Human
gugccagaggccccaaacaagu

SEQ ID NO: 793774 - RNA, 22 nt, Human
cuccugugcaccuccagcggca

SEQ ID NO: 793775 - RNA, 22 nt, Human
ugagaaccaccuggaggugacu

SEQ ID NO: 793776 - RNA, 20 nt, Human
aaaaacaguaaugcugaaga

SEQ ID NO: 793777 - RNA, 22 nt, Human
uauguuucugggcuugauauuu

SEQ ID NO: 793778 - RNA, 22 nt, Human
uuauugagcacauaguaugugg

SEQ ID NO: 793779 - RNA, 22 nt, Human
agcccagcugcuauguaccugg

SEQ ID NO: 793780 - RNA, 22 nt, Human
uaagaaauuuaguuauagaaug

SEQ ID NO: 793781 - RNA, 22 nt, Human
ucaggcuguagggccccuggag

SEQ ID NO: 793782 - RNA, 22 nt, Human
ccaguguucccucggguucaug

SEQ ID NO: 793783 - RNA, 22 nt, Human
acuuuaaaacugaucaucagag

SEQ ID NO: 793784 - RNA, 22 nt, Human
gagcaggcucugccuguguguc

SEQ ID NO: 793785 - RNA, 22 nt, Human
caguguuuagcacagugcuugg

SEQ ID NO: 793786 - RNA, 22 nt, Human
cauagaaacugagacaaggauu

SEQ ID NO: 793787 - RNA, 22 nt, Human
gauggagucugaagcugggaac

SEQ ID NO: 793788 - RNA, 22 nt, Human
uccuggcccacuaugccagcau

SEQ ID NO: 793789 - RNA, 22 nt, Human
uucauucuuauuugugaucugg

SEQ ID NO: 793790 - RNA, 22 nt, Human
uguuucuguaugaucaauauug

SEQ ID NO: 793791 - RNA, 23 nt, Human
uguuucuagaaucauugaugucu

SEQ ID NO: 793792 - RNA, 22 nt, Human
uuuacuuugugucaagucaaga

SEQ ID NO: 793793 - RNA, 22 nt, Human
ggcugccugccuccaagccggg

SEQ ID NO: 793794 - RNA, 22 nt, Human
aauauucauuugcagaagaagu

SEQ ID NO: 793795 - RNA, 22 nt, Human
cugcacugagcucucccagccc

SEQ ID NO: 793796 - RNA, 22 nt, Human
uucuucagugccccucuaguag

SEQ ID NO: 793797 - RNA, 22 nt, Human
uauaaaguuucgaaagauguau

SEQ ID NO: 793798 - RNA, 22 nt, Human
cuggguggcgucuggggccagu

SEQ ID NO: 793799 - RNA, 22 nt, Human
agaaguuugguccuauaaacuc

SEQ ID NO: 793800 - RNA, 22 nt, Human
uuucaucugugcugccaagacu

SEQ ID NO: 793801 - RNA, 22 nt, Human
gcucagggccuggcugcggacu

SEQ ID NO: 793802 - RNA, 22 nt, Human
gcugcuggggccuucccucggg

SEQ ID NO: 793803 - RNA, 22 nt, Human
aaacucaaggauuuagacgaag

SEQ ID NO: 793804 - RNA, 22 nt, Human
ccugggcuggaguacagcagug

SEQ ID NO: 793805 - RNA, 22 nt, Human
acaggcugggcgcuuccugcgg

SEQ ID NO: 793806 - RNA, 22 nt, Human
caauggccucccaagcaggggg

SEQ ID NO: 793807 - RNA, 22 nt, Human
aaucaggaugacugucauuuca

SEQ ID NO: 793808 - RNA, 22 nt, Human
uuugccugggaauucuagugua

SEQ ID NO: 793809 - RNA, 22 nt, Human
gaugcuggccuggccaucuggg

SEQ ID NO: 793810 - RNA, 22 nt, Human
acagaaacccagaaaaccucuc

SEQ ID NO: 793811 - RNA, 22 nt, Human
agguaggauggguggagaugau

SEQ ID NO: 793812 - RNA, 22 nt, Human
gaggcugggaaguccaauauca

SEQ ID NO: 793813 - RNA, 22 nt, Human
ggggcagcuaccggaaguaggg

SEQ ID NO: 793814 - RNA, 22 nt, Human
cucuccaggcgagguccuacug

SEQ ID NO: 793815 - RNA, 22 nt, Human
aaagacaugacacauuggagag

SEQ ID NO: 793816 - RNA, 22 nt, Human
agugucugugaugaggucagga

SEQ ID NO: 793817 - RNA, 22 nt, Human
gcuguuggggccagcaggucau

SEQ ID NO: 793818 - RNA, 22 nt, Human
guacccuguggccagccagcca

SEQ ID NO: 793819 - RNA, 22 nt, Human
auauacacauuugcuuaugugu

SEQ ID NO: 793820 - RNA, 22 nt, Human
agccacagggggugagggacaa

SEQ ID NO: 793821 - RNA, 22 nt, Human
agcccagcaaagggagguucag

SEQ ID NO: 793822 - RNA, 22 nt, Human
ccugcagccguccuguuugucu

SEQ ID NO: 793823 - RNA, 22 nt, Human
uaggccugguacuguguuaaua

SEQ ID NO: 793824 - RNA, 22 nt, Human
gggacgacaggcucugugguag

SEQ ID NO: 793825 - RNA, 22 nt, Human
ccucaaauugucaaauaagaau

SEQ ID NO: 793826 - RNA, 22 nt, Human
ugucauauguugaugaaagaga

SEQ ID NO: 793827 - RNA, 22 nt, Human
cccugagaugccucacccuagu

SEQ ID NO: 793828 - RNA, 22 nt, Human
gaggagagagggacugucugca

SEQ ID NO: 793829 - RNA, 22 nt, Human
gaaauaauucugugucugaaca

SEQ ID NO: 793830 - RNA, 22 nt, Human
aggcuggaugugccucaccgag

SEQ ID NO: 793831 - RNA, 23 nt, Human
uucuuauuuacuuuggaaucucc

SEQ ID NO: 793832 - RNA, 19 nt, Human
aaacuaaggggaaauguuu

SEQ ID NO: 793833 - RNA, 22 nt, Human
uuacaauaguuccuucuuuugu

SEQ ID NO: 793834 - RNA, 22 nt, Human
accugaggccuccccagcagac

SEQ ID NO: 793835 - RNA, 22 nt, Human
agaagaauuucucucaugauuu

SEQ ID NO: 793836 - RNA, 23 nt, Human
gcuaggugcuuccacacgugcug

SEQ ID NO: 793837 - RNA, 22 nt, Human
uggcagggugggcuucagcccc

SEQ ID NO: 793838 - RNA, 21 nt, Human
uauguuagugauguuuguagg

SEQ ID NO: 793839 - RNA, 22 nt, Human
ugggaaaguguagccugcaggc

SEQ ID NO: 793840 - RNA, 22 nt, Human
ucaaagauggguuuuguuugau

SEQ ID NO: 793841 - RNA, 22 nt, Human
aggccaaguagcuagcauugaa

SEQ ID NO: 793842 - RNA, 22 nt, Human
auagcuuucuuaaauauauaaa

SEQ ID NO: 793843 - RNA, 22 nt, Human
aagagucagcuucuguaugggu

SEQ ID NO: 793844 - RNA, 22 nt, Human
auccaauucuaauauuguguuu

SEQ ID NO: 793845 - RNA, 22 nt, Human
uguucuaugcucuuuaagguga

SEQ ID NO: 793846 - RNA, 22 nt, Human
caaguccaucagauaagcaaga

SEQ ID NO: 793847 - RNA, 22 nt, Human
uuugccaggcuugcaugaauuu

SEQ ID NO: 793848 - RNA, 22 nt, Human
aaauccaugguaaucuguuaca

SEQ ID NO: 793849 - RNA, 22 nt, Human
uugaucauuuuucugguaaaau

SEQ ID NO: 793850 - RNA, 22 nt, Human
cuucaugaggguaaucuacaaa

SEQ ID NO: 793851 - RNA, 22 nt, Human
ggaagggccucgggcgugggac

SEQ ID NO: 793852 - RNA, 22 nt, Human
ccagggucacaaauaacugcag

SEQ ID NO: 793853 - RNA, 22 nt, Human
auugagaauaugauuuaguaua

SEQ ID NO: 793854 - RNA, 22 nt, Human
aguuuacagaugcuacaggagc

SEQ ID NO: 793855 - RNA, 23 nt, Human
aaaaucuucugccuaugaagaaa

SEQ ID NO: 793856 - RNA, 22 nt, Human
ccuccaggauaagucagggccu

SEQ ID NO: 793857 - RNA, 22 nt, Human
gcaggagaacaaagcaagcugc

SEQ ID NO: 793858 - RNA, 22 nt, Human
ugaacuuuguaguaauggagau

SEQ ID NO: 793859 - RNA, 22 nt, Human
cacauacaaugguguuauuugg

SEQ ID NO: 793860 - RNA, 22 nt, Human
gagaugagugggggaucucuca

SEQ ID NO: 793861 - RNA, 22 nt, Human
cacacagcucaggggcacugcc

SEQ ID NO: 793862 - RNA, 22 nt, Human
gugcugggauuacaggugugag

SEQ ID NO: 793863 - RNA, 23 nt, Human
ugaaggcccuggagccacgaggc

SEQ ID NO: 793864 - RNA, 22 nt, Human
cagcauugaucccaggcugugg

SEQ ID NO: 793865 - RNA, 22 nt, Human
uuucacaucaugggauggaagc

SEQ ID NO: 793866 - RNA, 22 nt, Human
gcagagccaggagcccaggauc

SEQ ID NO: 793867 - RNA, 22 nt, Human
cccagagccgguggugcucaca

SEQ ID NO: 793868 - RNA, 22 nt, Human
acaggcugauagaccauaaaua

SEQ ID NO: 793869 - RNA, 22 nt, Human
auaaacucugccucagaagagc

SEQ ID NO: 793870 - RNA, 22 nt, Human
aggcuggcuuugguagcauggu

SEQ ID NO: 793871 - RNA, 22 nt, Human
ccugggaccucgcgggaagcgg

SEQ ID NO: 793872 - RNA, 22 nt, Human
agcugcugcaaguggugcuaac

SEQ ID NO: 793873 - RNA, 22 nt, Human
aaaauggguuucuucaaccuca

SEQ ID NO: 793874 - RNA, 22 nt, Human
auagauauuugaguuguuucca

SEQ ID NO: 793875 - RNA, 20 nt, Human
uggcugcacaccaggacagg

SEQ ID NO: 793876 - RNA, 22 nt, Human
cuucaguguucccaucuguaaa

SEQ ID NO: 793877 - RNA, 22 nt, Human
ucacagaagcuugaagauuuuc

SEQ ID NO: 793878 - RNA, 22 nt, Human
acagcaggcaugaagaaauguu

SEQ ID NO: 793879 - RNA, 22 nt, Human
gcuggaguuaggugggcuugaa

SEQ ID NO: 793880 - RNA, 22 nt, Human
cuguuucuccacacucuuccca

SEQ ID NO: 793881 - RNA, 22 nt, Human
cgucuaggccgugcccugaggu

SEQ ID NO: 793882 - RNA, 22 nt, Human
cagggcagccaggccccguggg

SEQ ID NO: 793883 - RNA, 21 nt, Human
uggagagcccuugccugaguc

SEQ ID NO: 793884 - RNA, 22 nt, Human
ucagagucauugcaaguagaag

SEQ ID NO: 793885 - RNA, 22 nt, Human
ugcugcucaagcugcagcaaaa

SEQ ID NO: 793886 - RNA, 17 nt, Human
ugcagcugauggggaaa

SEQ ID NO: 793887 - RNA, 22 nt, Human
caucacauuagucucaagagaa

SEQ ID NO: 793888 - RNA, 22 nt, Human
caaaacauucucugcagcaggg

SEQ ID NO: 793889 - RNA, 22 nt, Human
aagccaggcugcacuugcuggg

SEQ ID NO: 793890 - RNA, 22 nt, Human
cuuccagaguugcguucucggu

SEQ ID NO: 793891 - RNA, 21 nt, Human
uucaucagccagaaaucaagc

SEQ ID NO: 793892 - RNA, 22 nt, Human
gaguaaaaguuggauuacaaag

SEQ ID NO: 793893 - RNA, 22 nt, Human
caucagcacuaugauuaaagua

SEQ ID NO: 793894 - RNA, 22 nt, Human
gugaggcuacucagcuguccga

SEQ ID NO: 793895 - RNA, 22 nt, Human
gccugggagugcacagugaggu

SEQ ID NO: 793896 - RNA, 22 nt, Human
uauguauauguguguugacaac

SEQ ID NO: 793897 - RNA, 22 nt, Human
ucuuugguuucugucucuguaa

SEQ ID NO: 793898 - RNA, 22 nt, Human
aaacauuguaauuuuagcaugg

SEQ ID NO: 793899 - RNA, 22 nt, Human
aauauaugugguauugaccagc

SEQ ID NO: 793900 - RNA, 20 nt, Human
uguuucugacgguaggagag

SEQ ID NO: 793901 - RNA, 22 nt, Human
acaggguggggauggugagcuu

SEQ ID NO: 793902 - RNA, 22 nt, Human
gcugccaucuccugaggacagg

SEQ ID NO: 793903 - RNA, 22 nt, Human
ucagaauuguggagaaagggga

SEQ ID NO: 793904 - RNA, 22 nt, Human
agcagggcagcugaugcgcacg

SEQ ID NO: 793905 - RNA, 22 nt, Human
cucugacagccuucauuaugca

SEQ ID NO: 793906 - RNA, 22 nt, Human
gccuggcugagguggggaggca

SEQ ID NO: 793907 - RNA, 22 nt, Human
ucaagucucaauguauuauggu

SEQ ID NO: 793908 - RNA, 22 nt, Human
augcaauaaauacuuuccagcu

SEQ ID NO: 793909 - RNA, 22 nt, Human
gccugguggacacugggcauca

SEQ ID NO: 793910 - RNA, 22 nt, Human
ugguucaggcaggguguugcug

SEQ ID NO: 793911 - RNA, 22 nt, Human
ggucuccugaggcugccacacc

SEQ ID NO: 793912 - RNA, 22 nt, Human
cccagcacucagcaggcucaua

SEQ ID NO: 793913 - RNA, 18 nt, Human
aguguuaaguaaguagca

SEQ ID NO: 793914 - RNA, 22 nt, Human
ucacaguuucuuuucugauaaa

SEQ ID NO: 793915 - RNA, 22 nt, Human
cuagggagggauguuggcauga

SEQ ID NO: 793916 - RNA, 20 nt, Human
cccugagacaaaggaggggc

SEQ ID NO: 793917 - RNA, 22 nt, Human
gaagccucaacaucucugcguc

SEQ ID NO: 793918 - RNA, 22 nt, Human
aucuuuggugcuuggugcuccc

SEQ ID NO: 793919 - RNA, 20 nt, Human
cuucaggacccauccucccc

SEQ ID NO: 793920 - RNA, 22 nt, Human
ugcuggaguggcacuguguggc

SEQ ID NO: 793921 - RNA, 22 nt, Human
aagcagugcgcucaucuaaggg

SEQ ID NO: 793922 - RNA, 17 nt, Human
aagucccagcuaacaca

SEQ ID NO: 793923 - RNA, 22 nt, Human
uuucccuugaauaaagauaucu

SEQ ID NO: 793924 - RNA, 22 nt, Human
uccuuuggcaagcucugcucuu

SEQ ID NO: 793925 - RNA, 22 nt, Human
ugaaaauuaagcagaugaauga

SEQ ID NO: 793926 - RNA, 22 nt, Human
ugcauuuaguuuuaauaaagga

SEQ ID NO: 793927 - RNA, 22 nt, Human
gauuuguuucaaguuagcaucu

SEQ ID NO: 793928 - RNA, 22 nt, Human
uuaagucauuucugauuauaga

SEQ ID NO: 793929 - RNA, 22 nt, Human
guuucaugguuguuugauggca

SEQ ID NO: 793930 - RNA, 22 nt, Human
uccagagauccaaagaauauga

SEQ ID NO: 793931 - RNA, 22 nt, Human
ugcaggguggagcggaagcgga

SEQ ID NO: 793932 - RNA, 22 nt, Human
agugucuguugaguuucaaaag

SEQ ID NO: 793933 - RNA, 22 nt, Human
gaauagauccucauuuauugau

SEQ ID NO: 793934 - RNA, 22 nt, Human
agcuccagggaaagaguggauc

SEQ ID NO: 793935 - RNA, 22 nt, Human
acugcuauugaugucacacuuu

SEQ ID NO: 793936 - RNA, 22 nt, Human
agcaagcauugcugguuagguc

SEQ ID NO: 793937 - RNA, 22 nt, Human
uagacucugcauuuaccuccca

SEQ ID NO: 793938 - RNA, 22 nt, Human
aaaugacuaaugauccugggca

SEQ ID NO: 793939 - RNA, 22 nt, Human
ucuuuguuuguacuguuagaau

SEQ ID NO: 793940 - RNA, 22 nt, Human
aggcuagcugauugccuuagaa

SEQ ID NO: 793941 - RNA, 22 nt, Human
ugcccuccacaguggcuccacc

SEQ ID NO: 793942 - RNA, 22 nt, Human
auuuuucucuccacuccauuaa

SEQ ID NO: 793943 - RNA, 22 nt, Human
ugagcagaaaagaaugcugagc

SEQ ID NO: 793944 - RNA, 22 nt, Human
ggggauggaauguaguagugau

SEQ ID NO: 793945 - RNA, 22 nt, Human
gccugcugagggaaguugggca

SEQ ID NO: 793946 - RNA, 22 nt, Human
ccuucuuaaacaucauuuuggc

SEQ ID NO: 793947 - RNA, 22 nt, Human
ucuauuuucuugccaaaacugc

SEQ ID NO: 793948 - RNA, 22 nt, Human
cucagaauuaauaaccacaagg

SEQ ID NO: 793949 - RNA, 22 nt, Human
cugcaaaugccucggugugcgg

SEQ ID NO: 793950 - RNA, 22 nt, Human
uuucuaaucuuuaguuacaaaa

SEQ ID NO: 793951 - RNA, 22 nt, Human
caagagcacgugcccuccauaa

SEQ ID NO: 793952 - RNA, 22 nt, Human
acauggcacccagaucucaaaa

SEQ ID NO: 793953 - RNA, 22 nt, Human
agcagaaagcuuauuuugacug

SEQ ID NO: 793954 - RNA, 22 nt, Human
ucucaguggaucucagaauuuu

SEQ ID NO: 793955 - RNA, 22 nt, Human
agaggcuggguacgggccaccu

SEQ ID NO: 793956 - RNA, 22 nt, Human
uucaacuuuaugcauauguauu

SEQ ID NO: 793957 - RNA, 22 nt, Human
agggaagccccgaggaggcacc

SEQ ID NO: 793958 - RNA, 22 nt, Human
gccucugcggagcuguacauca

SEQ ID NO: 793959 - RNA, 22 nt, Human
ggcugucuugggagcucccccg

SEQ ID NO: 793960 - RNA, 22 nt, Human
aggcuuggcucuccuaugagaa

SEQ ID NO: 793961 - RNA, 22 nt, Human
gcuaggaagcuggggagaaguc

SEQ ID NO: 793962 - RNA, 19 nt, Human
ugagcugcugcugcccauc

SEQ ID NO: 793963 - RNA, 22 nt, Human
gcuggcaggauaacuucuaagc

SEQ ID NO: 793964 - RNA, 22 nt, Human
gagaaagggauaauuugaagag

SEQ ID NO: 793965 - RNA, 22 nt, Human
gccugcuguuaacugcaggaau

SEQ ID NO: 793966 - RNA, 22 nt, Human
agcaaagaaggguucuucauua

SEQ ID NO: 793967 - RNA, 22 nt, Human
acuuguuuuaucugucaauaga

SEQ ID NO: 793968 - RNA, 23 nt, Human
gcugccucuguuggucuucaguu

SEQ ID NO: 793969 - RNA, 22 nt, Human
gcucagagauguucaguagcuu

SEQ ID NO: 793970 - RNA, 22 nt, Human
gcugagggcauguguggcgacu

SEQ ID NO: 793971 - RNA, 23 nt, Human
gcugccuccuacaaaagcccagc

SEQ ID NO: 793972 - RNA, 22 nt, Human
uccagggagcaagucaggccgg

SEQ ID NO: 793973 - RNA, 22 nt, Human
uaaguaauugcagcaauuugcc

SEQ ID NO: 793974 - RNA, 22 nt, Human
augcaaauaaacagucuaguug

SEQ ID NO: 793975 - RNA, 23 nt, Human
cccuggagcuagucugagcagag

SEQ ID NO: 793976 - RNA, 17 nt, Human
gaggagcuccaguaggu

SEQ ID NO: 793977 - RNA, 22 nt, Human
ggaguggccucuccugugcagg

SEQ ID NO: 793978 - RNA, 22 nt, Human
uaaccaaagggccuaaggaaug

SEQ ID NO: 793979 - RNA, 22 nt, Human
aaagugcaucaaaugacuuccc

SEQ ID NO: 793980 - RNA, 22 nt, Human
acaaaguaggaagauuagcuga

SEQ ID NO: 793981 - RNA, 22 nt, Human
guauauuuugaucacccucuau

SEQ ID NO: 793982 - RNA, 22 nt, Human
ccucugggugggaggccgggcg

SEQ ID NO: 793983 - RNA, 22 nt, Human
gcucugccagacacuguggcca

SEQ ID NO: 793984 - RNA, 22 nt, Human
ugcagaaaccaauucaaguaag

SEQ ID NO: 793985 - RNA, 23 nt, Human
ugaaugauggugcuccucaucuu

SEQ ID NO: 793986 - RNA, 22 nt, Human
aguccacagagucucuccugaa

SEQ ID NO: 793987 - RNA, 22 nt, Human
cugagggcaccgacagagugga

SEQ ID NO: 793988 - RNA, 22 nt, Human
cccaacacucaccuccggauua

SEQ ID NO: 793989 - RNA, 22 nt, Human
cgcauccagggcgcaggaucug

SEQ ID NO: 793990 - RNA, 22 nt, Human
uccaggagaaaacugacggugg

SEQ ID NO: 793991 - RNA, 22 nt, Human
uuuguguuuguacaaugcacua

SEQ ID NO: 793992 - RNA, 22 nt, Human
cucagggaguagcacaugugga

SEQ ID NO: 793993 - RNA, 22 nt, Human
agaacaaaucgauggaagccug

SEQ ID NO: 793994 - RNA, 23 nt, Human
ggcuccuggauucaaauccugcc

SEQ ID NO: 793995 - RNA, 22 nt, Human
acagucuugagcaucagccaga

SEQ ID NO: 793996 - RNA, 22 nt, Human
ccacagggaacaugacagccuu

SEQ ID NO: 793997 - RNA, 22 nt, Human
agccaacuuagaagaaauuuga

SEQ ID NO: 793998 - RNA, 22 nt, Human
cccaggagauggugcguggucu

SEQ ID NO: 793999 - RNA, 22 nt, Human
auguauuugcuuguuauggauu

SEQ ID NO: 794000 - RNA, 22 nt, Human
uacuuuaaagagguguaaugag

SEQ ID NO: 794001 - RNA, 21 nt, Human
cagcccagcuucuuccccagu

SEQ ID NO: 794002 - RNA, 22 nt, Human
cauuuauugguuaggccagcag

SEQ ID NO: 794003 - RNA, 23 nt, Human
gcucaucaggcuuagagucaagg

SEQ ID NO: 794004 - RNA, 22 nt, Human
ucauccuuuugcaugggaaggc

SEQ ID NO: 794005 - RNA, 22 nt, Human
auaauuuuuguuugauguccaa

SEQ ID NO: 794006 - RNA, 22 nt, Human
cccgcuccuuaccuguccaacc

SEQ ID NO: 794007 - RNA, 17 nt, Human
ugcagcugcucccaggc

SEQ ID NO: 794008 - RNA, 22 nt, Human
ugauaaacuuagaaagaauguu

SEQ ID NO: 794009 - RNA, 22 nt, Human
uagggcagcugcaucaggcacu

SEQ ID NO: 794010 - RNA, 22 nt, Human
gaguccuggagaaacgcaggug

SEQ ID NO: 794011 - RNA, 22 nt, Human
auucuggacaaggcaagcuccu

SEQ ID NO: 794012 - RNA, 22 nt, Human
gcucuguccagcgugcacagaa

SEQ ID NO: 794013 - RNA, 22 nt, Human
ucacagaaauaagauaguuauu

SEQ ID NO: 794014 - RNA, 22 nt, Human
agcugcaguaaagcucuccagg

SEQ ID NO: 794015 - RNA, 22 nt, Human
uauaaagaaggcacagcaagac

SEQ ID NO: 794016 - RNA, 22 nt, Human
aagcacagagaugggcacgccu

SEQ ID NO: 794017 - RNA, 22 nt, Human
uggggugugcucagagcagggg

SEQ ID NO: 794018 - RNA, 22 nt, Human
ccagggagccuggugugucagc

SEQ ID NO: 794019 - RNA, 22 nt, Human
ugggggcauggaccagccuggc

SEQ ID NO: 794020 - RNA, 22 nt, Human
gggacaggccccucgcuagcuu

SEQ ID NO: 794021 - RNA, 22 nt, Human
ggcuguggggccggguacagug

SEQ ID NO: 794022 - RNA, 22 nt, Human
agacauuuauguuucucuagga

SEQ ID NO: 794023 - RNA, 20 nt, Human
uggagggauuguuggcaaau

SEQ ID NO: 794024 - RNA, 22 nt, Human
auucacauugagcuucacugug

SEQ ID NO: 794025 - RNA, 22 nt, Human
aaguacagaaauagcaggugca

SEQ ID NO: 794026 - RNA, 18 nt, Human
cugaggcuggcaggagcc

SEQ ID NO: 794027 - RNA, 22 nt, Human
cuucuggcguuggaggucugag

SEQ ID NO: 794028 - RNA, 22 nt, Human
aggcucuggaguguggugcugg

SEQ ID NO: 794029 - RNA, 19 nt, Human
ugggaguggggaagguccu

SEQ ID NO: 794030 - RNA, 22 nt, Human
cgccccagucuguaggugcccc

SEQ ID NO: 794031 - RNA, 22 nt, Human
caacauauaauauuugaguucu

SEQ ID NO: 794032 - RNA, 22 nt, Human
uucaacaaacuguucacgaaug

SEQ ID NO: 794033 - RNA, 22 nt, Human
ugcaagaggcaucuuuuaaaaa

SEQ ID NO: 794034 - RNA, 22 nt, Human
aaggaaaugugccugacacugc

SEQ ID NO: 794035 - RNA, 22 nt, Human
aggcuucaggaagucuccuggg

SEQ ID NO: 794036 - RNA, 22 nt, Human
cgggucaccuaucaauuuugug

SEQ ID NO: 794037 - RNA, 22 nt, Human
gaaagcaguaaaugggucccau

SEQ ID NO: 794038 - RNA, 22 nt, Human
cagauaaaggcuuacuaguagu

SEQ ID NO: 794039 - RNA, 22 nt, Human
uggagagcuguugaaaugcaga

SEQ ID NO: 794040 - RNA, 22 nt, Human
ccaugccauacuggccacccgg

SEQ ID NO: 794041 - RNA, 22 nt, Human
auaaacugaagggaacacugag

SEQ ID NO: 794042 - RNA, 22 nt, Human
uugguucaguaggcaugccugg

SEQ ID NO: 794043 - RNA, 22 nt, Human
ugcagcugaugauacccccaug

SEQ ID NO: 794044 - RNA, 22 nt, Human
ugucuuuaauucuacauaucuc

SEQ ID NO: 794045 - RNA, 22 nt, Human
gcagacugcgagcgugcuggug

SEQ ID NO: 794046 - RNA, 22 nt, Human
uuuuauucucaagacaauggga

SEQ ID NO: 794047 - RNA, 22 nt, Human
uucauucucuuagcauaguccu

SEQ ID NO: 794048 - RNA, 22 nt, Human
cugagacauuaugacaagugga

SEQ ID NO: 794049 - RNA, 22 nt, Human
ugggaaugggccuagaaggcug

SEQ ID NO: 794050 - RNA, 22 nt, Human
auuucugauaaacguaagcugc

SEQ ID NO: 794051 - RNA, 20 nt, Human
augauucaugaugaugucuc

SEQ ID NO: 794052 - RNA, 22 nt, Human
uggggccagguggcugcagguc

SEQ ID NO: 794053 - RNA, 22 nt, Human
gcugugcaucuucauucuggac

SEQ ID NO: 794054 - RNA, 23 nt, Human
aaagcaaggaauuggcaacagag

SEQ ID NO: 794055 - RNA, 22 nt, Human
cagaggcagaggucaucucugg

SEQ ID NO: 794056 - RNA, 22 nt, Human
auuuccaugucgguauuuuaua

SEQ ID NO: 794057 - RNA, 22 nt, Human
ugaagaggccgugugcagguga

SEQ ID NO: 794058 - RNA, 22 nt, Human
acuauaaccuguuagaauagau

SEQ ID NO: 794059 - RNA, 22 nt, Human
cuggggcuucaaugcuucggug

SEQ ID NO: 794060 - RNA, 22 nt, Human
aaguuauugcagcaauccaagu

SEQ ID NO: 794061 - RNA, 22 nt, Human
gccucugcaucaucacuccagc

SEQ ID NO: 794062 - RNA, 22 nt, Human
ugcuggagugcaguggcuuaac

SEQ ID NO: 794063 - RNA, 22 nt, Human
uuuauauuaccuggaauagcuu

SEQ ID NO: 794064 - RNA, 22 nt, Human
ggagcagcuugcaugcucaggg

SEQ ID NO: 794065 - RNA, 22 nt, Human
uuauuuauggcacuguuggugg

SEQ ID NO: 794066 - RNA, 22 nt, Human
uguucuuaacuuuuguguauau

SEQ ID NO: 794067 - RNA, 22 nt, Human
gcaacauuaaaccaauaauugu

SEQ ID NO: 794068 - RNA, 22 nt, Human
aaaggcagagugcucagcuggc

SEQ ID NO: 794069 - RNA, 22 nt, Human
augcuaaacuaugaucauuuuc

SEQ ID NO: 794070 - RNA, 22 nt, Human
aggagccaugagcaggaggcaa

SEQ ID NO: 794071 - RNA, 22 nt, Human
auuguaacauguucagaucacu

SEQ ID NO: 794072 - RNA, 22 nt, Human
uacagaaggaaguuuagcuaaa

SEQ ID NO: 794073 - RNA, 22 nt, Human
ucccuccccacuucugagcuuu

SEQ ID NO: 794074 - RNA, 17 nt, Human
cacuugcuggucuaccu

SEQ ID NO: 794075 - RNA, 22 nt, Human
uaaauuagggacuuuaguuaau

SEQ ID NO: 794076 - RNA, 22 nt, Human
agaagccacaggaaagcagcuu

SEQ ID NO: 794077 - RNA, 22 nt, Human
uaaggcagcauaauuaggccac

SEQ ID NO: 794078 - RNA, 22 nt, Human
uuccucagggaggcuagcagua

SEQ ID NO: 794079 - RNA, 22 nt, Human
acaguguaauaugggagucagu

SEQ ID NO: 794080 - RNA, 22 nt, Human
cccugaggauagggcaggaccc

SEQ ID NO: 794081 - RNA, 23 nt, Human
ccucagcauggcaggagcccagc

SEQ ID NO: 794082 - RNA, 22 nt, Human
auggcccaggccaggauccagc

SEQ ID NO: 794083 - RNA, 22 nt, Human
gucuccacagcccagcugccac

SEQ ID NO: 794084 - RNA, 18 nt, Human
gccacccuccucgucucc

SEQ ID NO: 794085 - RNA, 22 nt, Human
ccuggcugcaguuuuugcagaa

SEQ ID NO: 794086 - RNA, 22 nt, Human
gugcagagaaggagcaguaguu

SEQ ID NO: 794087 - RNA, 22 nt, Human
uggcuucaaaaucuaguggucu

SEQ ID NO: 794088 - RNA, 22 nt, Human
ugcagcccaggcgucagguggu

SEQ ID NO: 794089 - RNA, 22 nt, Human
cacuuagauacuagaucacaaa

SEQ ID NO: 794090 - RNA, 22 nt, Human
aaaguucuauguaauguuuuuu

SEQ ID NO: 794091 - RNA, 22 nt, Human
ccagcuccaaguuugggcauca

SEQ ID NO: 794092 - RNA, 22 nt, Human
aagccuguguuucugcuagucu

SEQ ID NO: 794093 - RNA, 22 nt, Human
cagccuggagccacagcccagg

SEQ ID NO: 794094 - RNA, 22 nt, Human
gcuggcuuuauggggcuugugg

SEQ ID NO: 794095 - RNA, 19 nt, Human
cccagucuagguccuagga

SEQ ID NO: 794096 - RNA, 22 nt, Human
uauaacacucagaaagaaucau

SEQ ID NO: 794097 - RNA, 22 nt, Human
gggcaagaagcuggaagcauuc

SEQ ID NO: 794098 - RNA, 19 nt, Human
ugagcuggcugagccucuc

SEQ ID NO: 794099 - RNA, 17 nt, Human
aacaguaagcccuguuu

SEQ ID NO: 794100 - RNA, 22 nt, Human
uggccagugggguugagcagga

SEQ ID NO: 794101 - RNA, 22 nt, Human
uuaauagauaugccucuagagu

SEQ ID NO: 794102 - RNA, 22 nt, Human
acaacaguuuagguauuuguag

SEQ ID NO: 794103 - RNA, 22 nt, Human
uagauacucagaaaugcuuuca

SEQ ID NO: 794104 - RNA, 22 nt, Human
agaacauaucuguuuucuaacu

SEQ ID NO: 794105 - RNA, 22 nt, Human
aagucaagauaaaggugcuggc

SEQ ID NO: 794106 - RNA, 22 nt, Human
gcuggcuggagugagcuacccu

SEQ ID NO: 794107 - RNA, 22 nt, Human
caguugccuacuacauggcagg

SEQ ID NO: 794108 - RNA, 22 nt, Human
ugggccaggggccucuucugau

SEQ ID NO: 794109 - RNA, 22 nt, Human
gaugaaauagcaaaggcauuug

SEQ ID NO: 794110 - RNA, 22 nt, Human
acaaggcugaacagugaagccg

SEQ ID NO: 794111 - RNA, 22 nt, Human
gccaggcugacucccccggccu

SEQ ID NO: 794112 - RNA, 22 nt, Human
auuuuucaacuuuggaaauggc

SEQ ID NO: 794113 - RNA, 22 nt, Human
cuggauggucccaugagcagcu

SEQ ID NO: 794114 - RNA, 22 nt, Human
cuguuguauuauucaauauuau

SEQ ID NO: 794115 - RNA, 22 nt, Human
uuucauugucaauaaacuguau

SEQ ID NO: 794116 - RNA, 22 nt, Human
gagguccacugaggcaacaggg

SEQ ID NO: 794117 - RNA, 19 nt, Human
agcccagcuuauuugucag

SEQ ID NO: 794118 - RNA, 17 nt, Human
ccugcccagagacagau

SEQ ID NO: 794119 - RNA, 20 nt, Human
ugcuggggacauacagggug

SEQ ID NO: 794120 - RNA, 22 nt, Human
cagcauggagacaaagugggca

SEQ ID NO: 794121 - RNA, 22 nt, Human
gcaugcaaggaccaagggagca

SEQ ID NO: 794122 - RNA, 22 nt, Human
cuagcagggauugggcacuggg

SEQ ID NO: 794123 - RNA, 23 nt, Human
uuucaacaaugcuuagagaaaac

SEQ ID NO: 794124 - RNA, 22 nt, Human
cagcuuugcccuuugcccaauc

SEQ ID NO: 794125 - RNA, 21 nt, Human
auguuuacacugacuacugug

SEQ ID NO: 794126 - RNA, 22 nt, Human
cuggaagggagcacuguagaga

SEQ ID NO: 794127 - RNA, 22 nt, Human
aggcucaguucuguggugagcc

SEQ ID NO: 794128 - RNA, 22 nt, Human
gagccacagaaggaaauugggg

SEQ ID NO: 794129 - RNA, 22 nt, Human
gggagcugagcucugagccacg

SEQ ID NO: 794130 - RNA, 22 nt, Human
uuuacaaccucauauucugaug

SEQ ID NO: 794131 - RNA, 22 nt, Human
caggucagagguagaugagaug

SEQ ID NO: 794132 - RNA, 22 nt, Human
ucauaauuguauacauuuaugg

SEQ ID NO: 794133 - RNA, 22 nt, Human
cagcagcacucugcgggucccc

SEQ ID NO: 794134 - RNA, 22 nt, Human
cagaaaaggaagagcuauguaa

SEQ ID NO: 794135 - RNA, 22 nt, Human
caccagcccccucacgcuguca

SEQ ID NO: 794136 - RNA, 22 nt, Human
uuuuugaaggcugaugugauua

SEQ ID NO: 794137 - RNA, 22 nt, Human
ugagaaauggcagcauuacugg

SEQ ID NO: 794138 - RNA, 22 nt, Human
aggccagcccugggcugagaga

SEQ ID NO: 794139 - RNA, 22 nt, Human
ugagcuagguccugugucagcu

SEQ ID NO: 794140 - RNA, 22 nt, Human
agucucaaguguuaguauuauu

SEQ ID NO: 794141 - RNA, 22 nt, Human
cugaggcuucucuaguucagcu

SEQ ID NO: 794142 - RNA, 22 nt, Human
cugucuuugguccugucuguua

SEQ ID NO: 794143 - RNA, 22 nt, Human
agcugugguguuuucaagcccu

SEQ ID NO: 794144 - RNA, 22 nt, Human
cuuaaauuuucaucuacaagaa

SEQ ID NO: 794145 - RNA, 22 nt, Human
agaggccaauaguagguggcau

SEQ ID NO: 794146 - RNA, 22 nt, Human
uuccagccaugguuucccuaug

SEQ ID NO: 794147 - RNA, 22 nt, Human
cugggagauugcuagagaugca

SEQ ID NO: 794148 - RNA, 22 nt, Human
agguggaaauggcuuuccuagg

SEQ ID NO: 794149 - RNA, 22 nt, Human
gugcaucugaauuugaaaaucu

SEQ ID NO: 794150 - RNA, 22 nt, Human
gcagggcagugugucugugggg

SEQ ID NO: 794151 - RNA, 22 nt, Human
uuccucuccucccaccagguga

SEQ ID NO: 794152 - RNA, 19 nt, Human
cuaaggcaagaaacuggac

SEQ ID NO: 794153 - RNA, 22 nt, Human
gcuguggcccuuggcaucugcg

SEQ ID NO: 794154 - RNA, 22 nt, Human
acauacauaugacaacuuuccu

SEQ ID NO: 794155 - RNA, 22 nt, Human
aauguuuuaaaagagauugaga

SEQ ID NO: 794156 - RNA, 22 nt, Human
uguuucuuacguuuuuagaggc

SEQ ID NO: 794157 - RNA, 21 nt, Human
uagggcucuauuuuuauuuca

SEQ ID NO: 794158 - RNA, 22 nt, Human
uaagacaaauacuauuucaaga

SEQ ID NO: 794159 - RNA, 22 nt, Human
gaggugagaagggggucagaug

SEQ ID NO: 794160 - RNA, 22 nt, Human
gggcccugccccguggcucuga

SEQ ID NO: 794161 - RNA, 19 nt, Human
uagucuuuauucuuaauuu

SEQ ID NO: 794162 - RNA, 22 nt, Human
cuccaggaccagggcuccugga

SEQ ID NO: 794163 - RNA, 22 nt, Human
uugcacuccagcccgagcaaca

SEQ ID NO: 794164 - RNA, 22 nt, Human
aguuucaguguugacagauggu

SEQ ID NO: 794165 - RNA, 22 nt, Human
aacaaugaggaucuguucugag

SEQ ID NO: 794166 - RNA, 22 nt, Human
acagucuuaugcauacacuauu

SEQ ID NO: 794167 - RNA, 22 nt, Human
aagucuuucauaagucucuuau

SEQ ID NO: 794168 - RNA, 22 nt, Human
gcgcaagccacacagccugggg

SEQ ID NO: 794169 - RNA, 22 nt, Human
aaacaaacauagguuugaaagu

SEQ ID NO: 794170 - RNA, 22 nt, Human
uaagucauuuggagccacugga

SEQ ID NO: 794171 - RNA, 22 nt, Human
cauugagagugacuuggacaau

SEQ ID NO: 794172 - RNA, 22 nt, Human
caucuucagguucauggucaua

SEQ ID NO: 794173 - RNA, 22 nt, Human
agaggcaaguucagagcuagga

SEQ ID NO: 794174 - RNA, 22 nt, Human
cagaaaauaaaguuucuacgca

SEQ ID NO: 794175 - RNA, 22 nt, Human
ugccaggcccagcuccagagcu

SEQ ID NO: 794176 - RNA, 22 nt, Human
cugaagccacgauagcuuccua

SEQ ID NO: 794177 - RNA, 22 nt, Human
auuacaugagagaauguaaaua

SEQ ID NO: 794178 - RNA, 22 nt, Human
aacccaggaggcagaggcugca

SEQ ID NO: 794179 - RNA, 22 nt, Human
cauuaaauuccuuguucucaaa

SEQ ID NO: 794180 - RNA, 22 nt, Human
gagccacagcaaccucaaagga

SEQ ID NO: 794181 - RNA, 22 nt, Human
guucaaguuucugagcuuuaau

SEQ ID NO: 794182 - RNA, 22 nt, Human
cuuuuucauuggcuuuaggaca

SEQ ID NO: 794183 - RNA, 22 nt, Human
ucacagagagaauauuguguuu

SEQ ID NO: 794184 - RNA, 22 nt, Human
uuccagaggccugggcacacuc

SEQ ID NO: 794185 - RNA, 22 nt, Human
acaauacaggcuucuggacuua

SEQ ID NO: 794186 - RNA, 22 nt, Human
uuauuaagugccuacaauaaag

SEQ ID NO: 794187 - RNA, 17 nt, Human
uauacacagacagacug

SEQ ID NO: 794188 - RNA, 22 nt, Human
cagcacugugauaacugagcca

SEQ ID NO: 794189 - RNA, 22 nt, Human
auggggugaccaugagcauuua

SEQ ID NO: 794190 - RNA, 21 nt, Human
uacaaguugcuuuugaagucc

SEQ ID NO: 794191 - RNA, 22 nt, Human
gugcagcucaguugaaaugcag

SEQ ID NO: 794192 - RNA, 22 nt, Human
acagcagguagcuuugugccuc

SEQ ID NO: 794193 - RNA, 22 nt, Human
auccagagacuggggcugggau

SEQ ID NO: 794194 - RNA, 22 nt, Human
agaggcccugggcuggugugcu

SEQ ID NO: 794195 - RNA, 22 nt, Human
ccugcuggacguggaggagggg

SEQ ID NO: 794196 - RNA, 22 nt, Human
uuaaaugaacgagauaugcaac

SEQ ID NO: 794197 - RNA, 20 nt, Human
ucagagaagggacugagauu

SEQ ID NO: 794198 - RNA, 22 nt, Human
uuguuacaucuuauguaagugg

SEQ ID NO: 794199 - RNA, 22 nt, Human
aaggaagguucauagucaaaga

SEQ ID NO: 794200 - RNA, 22 nt, Human
cugggugcgugagcgcaugcgu

SEQ ID NO: 794201 - RNA, 22 nt, Human
aggcuugucucagaagaugcug

SEQ ID NO: 794202 - RNA, 22 nt, Human
ucaugcaaacucuaguccuuua

SEQ ID NO: 794203 - RNA, 22 nt, Human
gcugcaggaugaggcucugcuc

SEQ ID NO: 794204 - RNA, 20 nt, Human
ucaauguaaucauaucauca

SEQ ID NO: 794205 - RNA, 20 nt, Human
aggcucagagcaguaguaca

SEQ ID NO: 794206 - RNA, 22 nt, Human
uguaaauaaugcauguaaauca

SEQ ID NO: 794207 - RNA, 22 nt, Human
gccaggcauuuguuaggugcug

SEQ ID NO: 794208 - RNA, 22 nt, Human
ugaaugagaacacugaaagagg

SEQ ID NO: 794209 - RNA, 22 nt, Human
aaauuaguacauugcaaagucc

SEQ ID NO: 794210 - RNA, 22 nt, Human
gaguucauauucagagaucgcu

SEQ ID NO: 794211 - RNA, 22 nt, Human
uuucaggauuuuaugagauagu

SEQ ID NO: 794212 - RNA, 22 nt, Human
cugagacaugguuugacuggca

SEQ ID NO: 794213 - RNA, 22 nt, Human
auguuuuacccuuugcacaaac

SEQ ID NO: 794214 - RNA, 21 nt, Human
aguacaaaaauuccuuucuca

SEQ ID NO: 794215 - RNA, 22 nt, Human
ugaggggauacgguacacauug

SEQ ID NO: 794216 - RNA, 21 nt, Human
cagccugcugcuccagggcca

SEQ ID NO: 794217 - RNA, 22 nt, Human
uuuuaagaaauguaugacuguc

SEQ ID NO: 794218 - RNA, 21 nt, Human
uuacaacauuuguguucuaug

SEQ ID NO: 794219 - RNA, 22 nt, Human
auaccaauuagaguuuguugca

SEQ ID NO: 794220 - RNA, 22 nt, Human
ugucuuuggggcuguaccuguu

SEQ ID NO: 794221 - RNA, 19 nt, Human
ggcacuggggccaggacca

SEQ ID NO: 794222 - RNA, 22 nt, Human
augcuggcagccgagugcucca

SEQ ID NO: 794223 - RNA, 22 nt, Human
gcccagcacaucuggccuugaa

SEQ ID NO: 794224 - RNA, 22 nt, Human
accuucaauuauuuuuguucca

SEQ ID NO: 794225 - RNA, 22 nt, Human
acuucccauuucucugcuuuag

SEQ ID NO: 794226 - RNA, 22 nt, Human
caugugggaagaggccagcugg

SEQ ID NO: 794227 - RNA, 22 nt, Human
caggcuucgcucugugggcagg

SEQ ID NO: 794228 - RNA, 22 nt, Human
ugaggaagcaaaggcuugugug

SEQ ID NO: 794229 - RNA, 22 nt, Human
aaggacugaauaauucucuuuc

SEQ ID NO: 794230 - RNA, 18 nt, Human
acaaaggaucaugaggga

SEQ ID NO: 794231 - RNA, 22 nt, Human
uaggcuggaacuuaggcagagg

SEQ ID NO: 794232 - RNA, 21 nt, Human
cucccagggugacuguucaac

SEQ ID NO: 794233 - RNA, 22 nt, Human
uucaucuggaaguucccaaggc

SEQ ID NO: 794234 - RNA, 22 nt, Human
gcuggagugaguauguguaguc

SEQ ID NO: 794235 - RNA, 22 nt, Human
uuguuucuuugaaguuucuaga

SEQ ID NO: 794236 - RNA, 22 nt, Human
guacauuuaggauucauugaaa

SEQ ID NO: 794237 - RNA, 22 nt, Human
ugauacuuuggagacuugagua

SEQ ID NO: 794238 - RNA, 22 nt, Human
acuugaauuauauuucuagaga

SEQ ID NO: 794239 - RNA, 22 nt, Human
uggccccugaggagcgucagcc

SEQ ID NO: 794240 - RNA, 22 nt, Human
agagaugaaucuugagacucug

SEQ ID NO: 794241 - RNA, 22 nt, Human
caucuuuaaaggggagacaccc

SEQ ID NO: 794242 - RNA, 22 nt, Human
cagugcaguuucccagaugcug

SEQ ID NO: 794243 - RNA, 22 nt, Human
ccugucugaaggcagggggaug

SEQ ID NO: 794244 - RNA, 22 nt, Human
aaacacaagaggcaggguacag

SEQ ID NO: 794245 - RNA, 22 nt, Human
uuccaagugcccauauuucauc

SEQ ID NO: 794246 - RNA, 22 nt, Human
aguuauuuuggaaaaugaguca

SEQ ID NO: 794247 - RNA, 22 nt, Human
ucaaauuuuaacaugcauuaga

SEQ ID NO: 794248 - RNA, 22 nt, Human
uuugcagagugcagaagcaucu

SEQ ID NO: 794249 - RNA, 22 nt, Human
acuauucauguuuccuaacuau

SEQ ID NO: 794250 - RNA, 22 nt, Human
gugcagugacccuggagagcug

SEQ ID NO: 794251 - RNA, 22 nt, Human
aaaauuaagugucugggaagcc

SEQ ID NO: 794252 - RNA, 22 nt, Human
guacauuucauuuaaaugaugu

SEQ ID NO: 794253 - RNA, 22 nt, Human
uugcccagagucacccagcuca

SEQ ID NO: 794254 - RNA, 22 nt, Human
ugggggcagccaggcugucaag

SEQ ID NO: 794255 - RNA, 22 nt, Human
ucacaguacugugugacuugag

SEQ ID NO: 794256 - RNA, 22 nt, Human
ggcccagcuuucauuccuugcu

SEQ ID NO: 794257 - RNA, 22 nt, Human
uguauuaucaaguaaauacaug

SEQ ID NO: 794258 - RNA, 22 nt, Human
uaggaaauggcucaguuacugc

SEQ ID NO: 794259 - RNA, 20 nt, Human
aggguggggacguucugacu

SEQ ID NO: 794260 - RNA, 22 nt, Human
acagaauuaucaggaaauguua

SEQ ID NO: 794261 - RNA, 22 nt, Human
cugggccauggaagucucugcc

SEQ ID NO: 794262 - RNA, 22 nt, Human
ugccugcccuuuccacacagcc

SEQ ID NO: 794263 - RNA, 22 nt, Human
ccaguuuauaagaaagaaaacc

SEQ ID NO: 794264 - RNA, 22 nt, Human
cuccuaggugcucacugggguc

SEQ ID NO: 794265 - RNA, 22 nt, Human
acuaaacacaugagauuccugc

SEQ ID NO: 794266 - RNA, 22 nt, Human
ugcaggaaaaauaaauaguguu

SEQ ID NO: 794267 - RNA, 22 nt, Human
acacauuaaccuuugaaauucu

SEQ ID NO: 794268 - RNA, 22 nt, Human
ccuucucuaccaugugaggaaa

SEQ ID NO: 794269 - RNA, 22 nt, Human
agccucucuuucugguggcuaa

SEQ ID NO: 794270 - RNA, 22 nt, Human
gcagcaggucugucaaugucau

SEQ ID NO: 794271 - RNA, 22 nt, Human
aaacacagauuucuuuguccca

SEQ ID NO: 794272 - RNA, 22 nt, Human
ggcagaagauaggacagggaau

SEQ ID NO: 794273 - RNA, 22 nt, Human
agcaccugcuaugugucaggga

SEQ ID NO: 794274 - RNA, 22 nt, Human
ugauuuuauugaaacuucacuu

SEQ ID NO: 794275 - RNA, 22 nt, Human
acaggcacuuugacaugccauc

SEQ ID NO: 794276 - RNA, 20 nt, Human
guucaugucucaaauagaaa

SEQ ID NO: 794277 - RNA, 21 nt, Human
aucuuaaaaggucuuaacuuu

SEQ ID NO: 794278 - RNA, 22 nt, Human
uuuuuggcccuuagcucuguau

SEQ ID NO: 794279 - RNA, 22 nt, Human
uguggcacuuacauccuaguuu

SEQ ID NO: 794280 - RNA, 22 nt, Human
uugcuuuagaaucugcuucugg

SEQ ID NO: 794281 - RNA, 22 nt, Human
guucuuaagaccacaauaaaaa

SEQ ID NO: 794282 - RNA, 22 nt, Human
ucugcacccugugguccucuag

SEQ ID NO: 794283 - RNA, 20 nt, Human
cagaggcaaggagacuugga

SEQ ID NO: 794284 - RNA, 22 nt, Human
aggaacaucuaucacauaaacg

SEQ ID NO: 794285 - RNA, 22 nt, Human
cauaacauguacauauaaaugc

SEQ ID NO: 794286 - RNA, 22 nt, Human
cagaguggugcaagggcagugu

SEQ ID NO: 794287 - RNA, 22 nt, Human
ccuccugggccuugcucuguga

SEQ ID NO: 794288 - RNA, 22 nt, Human
acaaauuuguguaguuauggca

SEQ ID NO: 794289 - RNA, 22 nt, Human
uuugaggacauuuuagaaaguu

SEQ ID NO: 794290 - RNA, 22 nt, Human
aaauauagcaauuaugccuacu

SEQ ID NO: 794291 - RNA, 22 nt, Human
ggagccuggcccggcccuuggc

SEQ ID NO: 794292 - RNA, 22 nt, Human
gagggccaauggauuucaacug

SEQ ID NO: 794293 - RNA, 22 nt, Human
gugcugggcccugagaccaggg

SEQ ID NO: 794294 - RNA, 19 nt, Human
aggccugggguuuugcacu

SEQ ID NO: 794295 - RNA, 22 nt, Human
cuucauuucaggcugaagaaua

SEQ ID NO: 794296 - RNA, 22 nt, Human
uuuugcaaugagaugcuuguca

SEQ ID NO: 794297 - RNA, 22 nt, Human
uggugguccacaaauggguaca

SEQ ID NO: 794298 - RNA, 22 nt, Human
gcacagggagacagccguggcc

SEQ ID NO: 794299 - RNA, 22 nt, Human
guuguuuuugaacggugguggc

SEQ ID NO: 794300 - RNA, 22 nt, Human
cuacaacauuaugcuuucuguc

SEQ ID NO: 794301 - RNA, 22 nt, Human
guaggaagcucugaggcuaguu

SEQ ID NO: 794302 - RNA, 22 nt, Human
augcauauaaggcacauguauu

SEQ ID NO: 794303 - RNA, 22 nt, Human
ugcacagagggaggcauaaaau

SEQ ID NO: 794304 - RNA, 22 nt, Human
acccacgaagaugagcggcaug

SEQ ID NO: 794305 - RNA, 22 nt, Human
auucuuacuccauagaaugaau

SEQ ID NO: 794306 - RNA, 22 nt, Human
guagaaaauuaggaugaggcuu

SEQ ID NO: 794307 - RNA, 22 nt, Human
uagcauuagagauagaaauagu

SEQ ID NO: 794308 - RNA, 22 nt, Human
auucuugauauagauaguuaau

SEQ ID NO: 794309 - RNA, 22 nt, Human
cuuuggauggcuguguguuuau

SEQ ID NO: 794310 - RNA, 22 nt, Human
cucagaagaacaaaggcucuac

SEQ ID NO: 794311 - RNA, 22 nt, Human
aacaugcauguuauuuaucagu

SEQ ID NO: 794312 - RNA, 22 nt, Human
uuaauggcagggcagaauauua

SEQ ID NO: 794313 - RNA, 22 nt, Human
gcaggcugaaacucggggucua

SEQ ID NO: 794314 - RNA, 22 nt, Human
aagagcagauuccuaguggagc

SEQ ID NO: 794315 - RNA, 22 nt, Human
ugcacacagaugguacaugcau

SEQ ID NO: 794316 - RNA, 22 nt, Human
uuugaucuaugcgugguuuccc

SEQ ID NO: 794317 - RNA, 22 nt, Human
acaauuagcugugugucuaucu

SEQ ID NO: 794318 - RNA, 23 nt, Human
uuucccacccucucucauugcug

SEQ ID NO: 794319 - RNA, 22 nt, Human
ggcaggugugagaucgaggcca

SEQ ID NO: 794320 - RNA, 22 nt, Human
cuauucaauuuugcuauuguag

SEQ ID NO: 794321 - RNA, 22 nt, Human
cagggggcagcguagaaaauga

SEQ ID NO: 794322 - RNA, 22 nt, Human
agcagggcuggggcacgagcca

SEQ ID NO: 794323 - RNA, 22 nt, Human
gcagcccuggccuggccuacuu

SEQ ID NO: 794324 - RNA, 22 nt, Human
uacagucucugauaacugucag

SEQ ID NO: 794325 - RNA, 22 nt, Human
caugagauaauuuuucuccagu

SEQ ID NO: 794326 - RNA, 22 nt, Human
gcagcagcucugaaugggcccc

SEQ ID NO: 794327 - RNA, 22 nt, Human
gugcagcugcuugccugguuag

SEQ ID NO: 794328 - RNA, 22 nt, Human
aauaacuucaguucuuacauua

SEQ ID NO: 794329 - RNA, 22 nt, Human
uucauugaaauuaagcccaacu

SEQ ID NO: 794330 - RNA, 22 nt, Human
ggucagagccguuagcauucag

SEQ ID NO: 794331 - RNA, 22 nt, Human
aauucacagcauuugcccaucu

SEQ ID NO: 794332 - RNA, 22 nt, Human
aaaaugaggaacggaucauggc

SEQ ID NO: 794333 - RNA, 22 nt, Human
ucacagagcacacaagaauugc

SEQ ID NO: 794334 - RNA, 19 nt, Human
gaucaggagccgacaacug

SEQ ID NO: 794335 - RNA, 22 nt, Human
gccagaagacuggagucagcug

SEQ ID NO: 794336 - RNA, 22 nt, Human
ugggagcacucuuugggaagca

SEQ ID NO: 794337 - RNA, 22 nt, Human
uugugcuaagugcuaugaaggc

SEQ ID NO: 794338 - RNA, 22 nt, Human
aggaggccuacgcacaugucua

SEQ ID NO: 794339 - RNA, 22 nt, Human
aucuuugggcaaugaugaggga

SEQ ID NO: 794340 - RNA, 22 nt, Human
aagccaagugcuggccaugggc

SEQ ID NO: 794341 - RNA, 22 nt, Human
aaaagcaaguugccuagguuga

SEQ ID NO: 794342 - RNA, 22 nt, Human
uacaugaauguuucaauauugu

SEQ ID NO: 794343 - RNA, 22 nt, Human
ucaucaucacucuggcaagcau

SEQ ID NO: 794344 - RNA, 22 nt, Human
aagaguuuccaguuguggcuca

SEQ ID NO: 794345 - RNA, 22 nt, Human
uggugagauaacuuucggcaag

SEQ ID NO: 794346 - RNA, 19 nt, Human
ucaggcaguuauucacaaa

SEQ ID NO: 794347 - RNA, 21 nt, Human
ggaagcaguggcggcaacucc

SEQ ID NO: 794348 - RNA, 22 nt, Human
cagcagcagagauacugguuuc

SEQ ID NO: 794349 - RNA, 22 nt, Human
ucacaagaguaaguucaugccu

SEQ ID NO: 794350 - RNA, 22 nt, Human
gugcauuauucuuaccuuucuu

SEQ ID NO: 794351 - RNA, 22 nt, Human
ucaggucccacugcuaguaagu

SEQ ID NO: 794352 - RNA, 22 nt, Human
aggcagauuuucuuuacucagu

SEQ ID NO: 794353 - RNA, 22 nt, Human
ggcuggcuugcggagucacaga

SEQ ID NO: 794354 - RNA, 22 nt, Human
caucacaugccuaucaugagcu

SEQ ID NO: 794355 - RNA, 22 nt, Human
gaacaucaugaagaaaacauau

SEQ ID NO: 794356 - RNA, 20 nt, Human
gcuguggcaaagcuuugugu

SEQ ID NO: 794357 - RNA, 22 nt, Human
caggcugcagcagcaguggccc

SEQ ID NO: 794358 - RNA, 20 nt, Human
ccagcugagccaaggggaga

SEQ ID NO: 794359 - RNA, 22 nt, Human
ccaaggaggccccaggucagcu

SEQ ID NO: 794360 - RNA, 22 nt, Human
aggaggccccuccuggguugcu

SEQ ID NO: 794361 - RNA, 22 nt, Human
caacauaugauuuuguauauaa

SEQ ID NO: 794362 - RNA, 22 nt, Human
uggcccagagcacugcugggca

SEQ ID NO: 794363 - RNA, 22 nt, Human
aggccucuucagggagcaugga

SEQ ID NO: 794364 - RNA, 22 nt, Human
uuuucagagagcuuuuaugucc

SEQ ID NO: 794365 - RNA, 22 nt, Human
ucugugcugagcucugagaugu

SEQ ID NO: 794366 - RNA, 22 nt, Human
gagcagcuagauaaagcccuuc

SEQ ID NO: 794367 - RNA, 19 nt, Human
uucagugugcuggcuccug

SEQ ID NO: 794368 - RNA, 22 nt, Human
uuagaggggcugcugaauggga

SEQ ID NO: 794369 - RNA, 22 nt, Human
uaggaggguuagagggaaauau

SEQ ID NO: 794370 - RNA, 22 nt, Human
cccaggauggggcugcaguuau

SEQ ID NO: 794371 - RNA, 22 nt, Human
ugcacaguaaacaugacuggag

SEQ ID NO: 794372 - RNA, 22 nt, Human
ggcaugggguguauguggcacg

SEQ ID NO: 794373 - RNA, 22 nt, Human
gcauccuggcucuaggugucau

SEQ ID NO: 794374 - RNA, 22 nt, Human
gaggacaggagacucacuguuu

SEQ ID NO: 794375 - RNA, 22 nt, Human
guucuagguuagaaggacagau

SEQ ID NO: 794376 - RNA, 22 nt, Human
aaucaggagcuagggggcaaug

SEQ ID NO: 794377 - RNA, 22 nt, Human
caagcagccccaacaugaggau

SEQ ID NO: 794378 - RNA, 22 nt, Human
gcauggcaagaucaggagacca

SEQ ID NO: 794379 - RNA, 22 nt, Human
cugugacuguguuggaugcaca

SEQ ID NO: 794380 - RNA, 22 nt, Human
ucuacuuuucccuauacaguuu

SEQ ID NO: 794381 - RNA, 22 nt, Human
ucccugaaacaucucuguggau

SEQ ID NO: 794382 - RNA, 22 nt, Human
uuccucagagagacagaaacua

SEQ ID NO: 794383 - RNA, 23 nt, Human
aggcugcagaagaauagggucau

SEQ ID NO: 794384 - RNA, 22 nt, Human
aagccaggauaaaguuguuuua

SEQ ID NO: 794385 - RNA, 22 nt, Human
uucaguguggcccaugaagagg

SEQ ID NO: 794386 - RNA, 22 nt, Human
aaagugcaaucaguuagaccau

SEQ ID NO: 794387 - RNA, 23 nt, Human
agccuuggagguugaggcugcag

SEQ ID NO: 794388 - RNA, 22 nt, Human
uagugucagagaaucuugguuu

SEQ ID NO: 794389 - RNA, 22 nt, Human
ggaggccagggacccagucagc

SEQ ID NO: 794390 - RNA, 22 nt, Human
gcucagcugcaccuggagagcc

SEQ ID NO: 794391 - RNA, 22 nt, Human
cuggaaguauaggggagaugau

SEQ ID NO: 794392 - RNA, 22 nt, Human
aaaauauuuuagggccaggaga

SEQ ID NO: 794393 - RNA, 22 nt, Human
gcuucuccucccgcucccaggc

SEQ ID NO: 794394 - RNA, 22 nt, Human
ggcagcuucuuaauauggagac

SEQ ID NO: 794395 - RNA, 18 nt, Human
acacaggcugacagcacc

SEQ ID NO: 794396 - RNA, 22 nt, Human
ugcuagggaagaacgagggaau

SEQ ID NO: 794397 - RNA, 22 nt, Human
agcucugggggaaagucugcuc

SEQ ID NO: 794398 - RNA, 22 nt, Human
cuggacauuucgcacccuucca

SEQ ID NO: 794399 - RNA, 22 nt, Human
aggagcugucagagugccagag

SEQ ID NO: 794400 - RNA, 22 nt, Human
auauauaugcugauggcugcca

SEQ ID NO: 794401 - RNA, 22 nt, Human
cacaggaaucagcauuaauggc

SEQ ID NO: 794402 - RNA, 16 nt, Human
ucagugucagcuccug

SEQ ID NO: 794403 - RNA, 22 nt, Human
uucauagugacaugcauucugg

SEQ ID NO: 794404 - RNA, 22 nt, Human
uuugcuuugggagguugucugg

SEQ ID NO: 794405 - RNA, 22 nt, Human
uagcuuuagaaauauucucaga

SEQ ID NO: 794406 - RNA, 22 nt, Human
agcuuucagucucugaaggaac

SEQ ID NO: 794407 - RNA, 22 nt, Human
gaaggcucuugaggccagguaa

SEQ ID NO: 794408 - RNA, 20 nt, Human
agucucucccagaaugagca

SEQ ID NO: 794409 - RNA, 22 nt, Human
uggcucagcugacucggcuucu

SEQ ID NO: 794410 - RNA, 22 nt, Human
ugcuugucaggauaagcucugg

SEQ ID NO: 794411 - RNA, 22 nt, Human
uuccagccuuuauccauccaga

SEQ ID NO: 794412 - RNA, 22 nt, Human
gaggagaggggcucccaagagc

SEQ ID NO: 794413 - RNA, 22 nt, Human
aucacaguuuugugccuugugg

SEQ ID NO: 794414 - RNA, 22 nt, Human
ugcaggaacuugguuuuacuca

SEQ ID NO: 794415 - RNA, 22 nt, Human
ggcaaaaaccauaauuacuuuu

SEQ ID NO: 794416 - RNA, 22 nt, Human
agauuauuuaagacaggaacca

SEQ ID NO: 794417 - RNA, 22 nt, Human
uaggcagauguuaacaggaaaa

SEQ ID NO: 794418 - RNA, 22 nt, Human
gugugcccgggggaagcaggug

SEQ ID NO: 794419 - RNA, 22 nt, Human
gccaggcuccccggaucccugg

SEQ ID NO: 794420 - RNA, 19 nt, Human
aggaggccaugccacuaga

SEQ ID NO: 794421 - RNA, 22 nt, Human
ucucucagggggaaggcugaag

SEQ ID NO: 794422 - RNA, 22 nt, Human
uuauuauugugaccugagaaug

SEQ ID NO: 794423 - RNA, 22 nt, Human
gggcaugguggcaggcaccugu

SEQ ID NO: 794424 - RNA, 22 nt, Human
acuuccagaauuagaauuuaag

SEQ ID NO: 794425 - RNA, 22 nt, Human
ucagagcuaaggggagagcaaa

SEQ ID NO: 794426 - RNA, 22 nt, Human
auuucugauacccggucacccu

SEQ ID NO: 794427 - RNA, 22 nt, Human
acugguugaagaaaagcuagua

SEQ ID NO: 794428 - RNA, 22 nt, Human
auugagaaaauucgagcaaguu

SEQ ID NO: 794429 - RNA, 22 nt, Human
ccagcugauucgguggugguug

SEQ ID NO: 794430 - RNA, 22 nt, Human
cugugcuggauucugaggcuac

SEQ ID NO: 794431 - RNA, 22 nt, Human
gcaccccuggacgguagggcca

SEQ ID NO: 794432 - RNA, 22 nt, Human
auguucuuguucaaaugucagu

SEQ ID NO: 794433 - RNA, 22 nt, Human
uggcgaggccaggccagggccu

SEQ ID NO: 794434 - RNA, 22 nt, Human
aagauacaucauucaggaguga

SEQ ID NO: 794435 - RNA, 22 nt, Human
gaaacauaguugagacacugcu

SEQ ID NO: 794436 - RNA, 22 nt, Human
auguaugucugaugcacaugca

SEQ ID NO: 794437 - RNA, 23 nt, Human
gaauacagagauaaauagaacac

SEQ ID NO: 794438 - RNA, 22 nt, Human
acuuuguuuucaugaaacagcu

SEQ ID NO: 794439 - RNA, 22 nt, Human
aguggggacaaugagagcaggu

SEQ ID NO: 794440 - RNA, 22 nt, Human
uguacuguauucaucuuuaacu

SEQ ID NO: 794441 - RNA, 22 nt, Human
aagugcaucacuacucauuaca

SEQ ID NO: 794442 - RNA, 22 nt, Human
aaaucagagugguuggucaucc

SEQ ID NO: 794443 - RNA, 22 nt, Human
ucucuuggagguucuuccuguu

SEQ ID NO: 794444 - RNA, 22 nt, Human
ucacucuggaguccgcuaccag

SEQ ID NO: 794445 - RNA, 22 nt, Human
uugccugugaacgcugaguccu

SEQ ID NO: 794446 - RNA, 22 nt, Human
gauucacaacugcccugaaggg

SEQ ID NO: 794447 - RNA, 22 nt, Human
cuguuuuauaaaguccaaaagu

SEQ ID NO: 794448 - RNA, 18 nt, Human
cuauuacaaugcaguggu

SEQ ID NO: 794449 - RNA, 22 nt, Human
uaugcacaacaugcagguuugu

SEQ ID NO: 794450 - RNA, 22 nt, Human
ccugugcugggugugagggaca

SEQ ID NO: 794451 - RNA, 22 nt, Human
agguccugaugaucucugagag

SEQ ID NO: 794452 - RNA, 22 nt, Human
cuggacuuuggcccaucugcca

SEQ ID NO: 794453 - RNA, 22 nt, Human
aacaugagugauaaaauuaccu

SEQ ID NO: 794454 - RNA, 22 nt, Human
aagacagagacucugcaacagg

SEQ ID NO: 794455 - RNA, 22 nt, Human
aauucacauccgaccaggucaa

SEQ ID NO: 794456 - RNA, 22 nt, Human
uccaggaggcagggcugugccc

SEQ ID NO: 794457 - RNA, 22 nt, Human
gccaguggagcacauggugaag

SEQ ID NO: 794458 - RNA, 22 nt, Human
gcaggcagagguggaggagaca

SEQ ID NO: 794459 - RNA, 22 nt, Human
gaauuuuaucuuauuacuugca

SEQ ID NO: 794460 - RNA, 22 nt, Human
gccuaggagacaagcgugaaag

SEQ ID NO: 794461 - RNA, 22 nt, Human
cuggggcucacuccagcccugg

SEQ ID NO: 794462 - RNA, 22 nt, Human
ugagcugggcugggcugagcug

SEQ ID NO: 794463 - RNA, 22 nt, Human
gaauaauugugaugcuugaagu

SEQ ID NO: 794464 - RNA, 22 nt, Human
gcugagagugggugcagugcuu

SEQ ID NO: 794465 - RNA, 22 nt, Human
aggggagccagggcugcgaguu

SEQ ID NO: 794466 - RNA, 22 nt, Human
cagcuccccucuguggggcagu

SEQ ID NO: 794467 - RNA, 22 nt, Human
agcuccaggauaagacaggugc

SEQ ID NO: 794468 - RNA, 21 nt, Human
auuuucucuggaugaugguca

SEQ ID NO: 794469 - RNA, 22 nt, Human
gguggcaggcuggcauuggcaa

SEQ ID NO: 794470 - RNA, 22 nt, Human
uaacaguguguccagucaguuu

SEQ ID NO: 794471 - RNA, 22 nt, Human
aggcaguguguagcuggaagag

SEQ ID NO: 794472 - RNA, 22 nt, Human
caggagcuacucagguuggguu

SEQ ID NO: 794473 - RNA, 20 nt, Human
guccagaguaaugugcugac

SEQ ID NO: 794474 - RNA, 22 nt, Human
aauacauauggaauuccauguu

SEQ ID NO: 794475 - RNA, 22 nt, Human
uucaagaugcacaguggcauuc

SEQ ID NO: 794476 - RNA, 22 nt, Human
agccagcuaagggaagcaugau

SEQ ID NO: 794477 - RNA, 22 nt, Human
cagcuggccccacaguagaggc

SEQ ID NO: 794478 - RNA, 22 nt, Human
cuggucaccagguagcauugua

SEQ ID NO: 794479 - RNA, 22 nt, Human
ccacuguaaguuugaaaauaac

SEQ ID NO: 794480 - RNA, 22 nt, Human
cccuaggaauucuauggccaag

SEQ ID NO: 794481 - RNA, 22 nt, Human
aacugcaauuacuuuugcgcca

SEQ ID NO: 794482 - RNA, 22 nt, Human
cacugugggguuuggcuggaac

SEQ ID NO: 794483 - RNA, 22 nt, Human
uauaccaaaaaaauucuugucu

SEQ ID NO: 794484 - RNA, 22 nt, Human
aggaagcugccugggaugggaa

SEQ ID NO: 794485 - RNA, 21 nt, Human
gggcuggaggaugggaagccc

SEQ ID NO: 794486 - RNA, 22 nt, Human
auugucuucuggucuuaucuuu

SEQ ID NO: 794487 - RNA, 22 nt, Human
uccuggcccuguggccugcagu

SEQ ID NO: 794488 - RNA, 22 nt, Human
ugucauuuugucucacugcuau

SEQ ID NO: 794489 - RNA, 22 nt, Human
uugcugcucccaagaggcagcu

SEQ ID NO: 794490 - RNA, 22 nt, Human
agaaggcuggcccuggguggcc

SEQ ID NO: 794491 - RNA, 22 nt, Human
cucuccagucauauucucaguc

SEQ ID NO: 794492 - RNA, 22 nt, Human
ccagggcauguaacuaauggug

SEQ ID NO: 794493 - RNA, 22 nt, Human
uuccuuuuuacauaaucacauu

SEQ ID NO: 794494 - RNA, 22 nt, Human
cucaggaugcaauuccaucaag

SEQ ID NO: 794495 - RNA, 22 nt, Human
aaugucaaaggcuauacauuca

SEQ ID NO: 794496 - RNA, 22 nt, Human
aauagcaccugagguaguuugu

SEQ ID NO: 794497 - RNA, 22 nt, Human
gggagccacucagcugagaguu

SEQ ID NO: 794498 - RNA, 22 nt, Human
guuguuuuauugugagucccau

SEQ ID NO: 794499 - RNA, 22 nt, Human
ucgaaauaauuuagaauauaga

SEQ ID NO: 794500 - RNA, 22 nt, Human
gcagcaccaaccagggccuguu

SEQ ID NO: 794501 - RNA, 22 nt, Human
aggcugcucaguagauggagcu

SEQ ID NO: 794502 - RNA, 22 nt, Human
uggcaaugaggucagaugucuu

SEQ ID NO: 794503 - RNA, 22 nt, Human
gcagaaguuaaucgaaggccau

SEQ ID NO: 794504 - RNA, 17 nt, Human
uugggagagaaagguau

SEQ ID NO: 794505 - RNA, 22 nt, Human
ccagagcuccagggcuacagaa

SEQ ID NO: 794506 - RNA, 22 nt, Human
agccacagucugaugccugaga

SEQ ID NO: 794507 - RNA, 22 nt, Human
cugggaccugugugccugggcc

SEQ ID NO: 794508 - RNA, 22 nt, Human
cagaagugauguugagcuaguc

SEQ ID NO: 794509 - RNA, 22 nt, Human
caaaauguucuggcaccuuuaa

SEQ ID NO: 794510 - RNA, 19 nt, Human
cucuggagaacaauagugc

SEQ ID NO: 794511 - RNA, 22 nt, Human
uaccauaacguaaugaacuuga

SEQ ID NO: 794512 - RNA, 22 nt, Human
cugggagcuagcucugagcuga

SEQ ID NO: 794513 - RNA, 19 nt, Human
ccucacccugcagaggagg

SEQ ID NO: 794514 - RNA, 22 nt, Human
auagacacauguuauuauacuu

SEQ ID NO: 794515 - RNA, 22 nt, Human
ugaucccaaucuuuccugcucc

SEQ ID NO: 794516 - RNA, 22 nt, Human
caggguucuggaauauaaugug

SEQ ID NO: 794517 - RNA, 22 nt, Human
ugaaauguuuggguccagaagu

SEQ ID NO: 794518 - RNA, 22 nt, Human
uagccucucuccuccacaaccu

SEQ ID NO: 794519 - RNA, 22 nt, Human
gcagauggcgcaguggaaguuc

SEQ ID NO: 794520 - RNA, 22 nt, Human
gaaaugaacugauuaucauugc

SEQ ID NO: 794521 - RNA, 22 nt, Human
cuggagcugucuucacaggccu

SEQ ID NO: 794522 - RNA, 22 nt, Human
agguggagaagagaugggcagu

SEQ ID NO: 794523 - RNA, 22 nt, Human
aguuuuaugcaguguucugaua

SEQ ID NO: 794524 - RNA, 22 nt, Human
caugauuauguguuagaguuug

SEQ ID NO: 794525 - RNA, 22 nt, Human
cugaagcaggaacagcgagauu

SEQ ID NO: 794526 - RNA, 22 nt, Human
acccagccauguucaguucucu

SEQ ID NO: 794527 - RNA, 22 nt, Human
ugagaguacuuauaugaacauu

SEQ ID NO: 794528 - RNA, 22 nt, Human
agcaagcugucaagagagcuga

SEQ ID NO: 794529 - RNA, 22 nt, Human
cauguuggugugcugcacccau

SEQ ID NO: 794530 - RNA, 22 nt, Human
gcauaugaucacgugugucggu

SEQ ID NO: 794531 - RNA, 18 nt, Human
aaugcaauguauuugcag

SEQ ID NO: 794532 - RNA, 23 nt, Human
gacacaggagcacccagcugagc

SEQ ID NO: 794533 - RNA, 22 nt, Human
ucaaaucuuuaacaugugcaaa

SEQ ID NO: 794534 - RNA, 22 nt, Human
ucccaggcgccugguggggagc

SEQ ID NO: 794535 - RNA, 22 nt, Human
uuccuuccacuucaggauuuug

SEQ ID NO: 794536 - RNA, 22 nt, Human
ucuuccuuucauucauguguua

SEQ ID NO: 794537 - RNA, 22 nt, Human
cuggguugcaaagcgcuggcug

SEQ ID NO: 794538 - RNA, 22 nt, Human
aaugucagccugaaagcuauuc

SEQ ID NO: 794539 - RNA, 22 nt, Human
agguccagagguugaacggugg

SEQ ID NO: 794540 - RNA, 22 nt, Human
uuauuauagauuaugcaagauu

SEQ ID NO: 794541 - RNA, 20 nt, Human
augcagcuggaguuggggug

SEQ ID NO: 794542 - RNA, 22 nt, Human
ugucauuucacaauaucacuca

SEQ ID NO: 794543 - RNA, 17 nt, Human
cugcuggcuggggcuug

SEQ ID NO: 794544 - RNA, 22 nt, Human
agugcauuauauguuucaaugg

SEQ ID NO: 794545 - RNA, 22 nt, Human
uggggaccagauuagaccaugg

SEQ ID NO: 794546 - RNA, 22 nt, Human
ugagcugggaagagcagccaga

SEQ ID NO: 794547 - RNA, 22 nt, Human
acaguacaagcaugauacauaa

SEQ ID NO: 794548 - RNA, 22 nt, Human
aacaacaacggagaaaggguug

SEQ ID NO: 794549 - RNA, 22 nt, Human
auuugucaguggaagugauuca

SEQ ID NO: 794550 - RNA, 22 nt, Human
aauaauagcagaguuuacaauc

SEQ ID NO: 794551 - RNA, 17 nt, Human
cugauuuauuagcagac

SEQ ID NO: 794552 - RNA, 22 nt, Human
gcggucggcagaggggcucugc

SEQ ID NO: 794553 - RNA, 22 nt, Human
gccauccucugagcacuaggca

SEQ ID NO: 794554 - RNA, 22 nt, Human
agcaggugagcacagccaggcu

SEQ ID NO: 794555 - RNA, 19 nt, Human
uuuuccuucuccucuuaau

SEQ ID NO: 794556 - RNA, 22 nt, Human
uugcauaugaagcugacuuaaa

SEQ ID NO: 794557 - RNA, 22 nt, Human
uuuucauuuuuguagaugcaag

SEQ ID NO: 794558 - RNA, 22 nt, Human
cuguucuucugggaauggcccu

SEQ ID NO: 794559 - RNA, 22 nt, Human
ucagggcauacucuucaagguc

SEQ ID NO: 794560 - RNA, 22 nt, Human
ucuuucccuguguuagccugua

SEQ ID NO: 794561 - RNA, 22 nt, Human
cuucaaggcuuauuccaguugu

SEQ ID NO: 794562 - RNA, 22 nt, Human
gaaaaggcugcccacuuauuga

SEQ ID NO: 794563 - RNA, 23 nt, Human
cagaagcaccuguugacugcugc

SEQ ID NO: 794564 - RNA, 22 nt, Human
ucaggcugagaaaaucuggacc

SEQ ID NO: 794565 - RNA, 22 nt, Human
guaaaacauguuuuaacuagga

SEQ ID NO: 794566 - RNA, 22 nt, Human
aguucaaagucaaggaaacugu

SEQ ID NO: 794567 - RNA, 22 nt, Human
aaucaggauaugaacccaggua

SEQ ID NO: 794568 - RNA, 22 nt, Human
uggcccugaggggcugugcccc

SEQ ID NO: 794569 - RNA, 22 nt, Human
auucuuauuauaguaaaacagu

SEQ ID NO: 794570 - RNA, 23 nt, Human
uaaaguggcgcuguuacugccag

SEQ ID NO: 794571 - RNA, 22 nt, Human
gacaguaagucagagacuuggu

SEQ ID NO: 794572 - RNA, 22 nt, Human
aguaaaauuguauuggaaaaca

SEQ ID NO: 794573 - RNA, 22 nt, Human
aaguuugugguuauacuugauu

SEQ ID NO: 794574 - RNA, 20 nt, Human
ucugggcagggcacauggaa

SEQ ID NO: 794575 - RNA, 22 nt, Human
ccagugucuagucacagguacu

SEQ ID NO: 794576 - RNA, 22 nt, Human
uggaaggggccaggcgcggagu

SEQ ID NO: 794577 - RNA, 22 nt, Human
ugauguucaacaaguacauauu

SEQ ID NO: 794578 - RNA, 22 nt, Human
aaaauagcaugaaaggccuuug

SEQ ID NO: 794579 - RNA, 21 nt, Human
ccauugagaccauggaggagu

SEQ ID NO: 794580 - RNA, 22 nt, Human
agucuuaugguuaaauagaugc

SEQ ID NO: 794581 - RNA, 22 nt, Human
ccagaggagggcucugaugagg

SEQ ID NO: 794582 - RNA, 22 nt, Human
uaggaaauuggaaacucuucac

SEQ ID NO: 794583 - RNA, 22 nt, Human
ugggccacggggguggagagcu

SEQ ID NO: 794584 - RNA, 21 nt, Human
augggcagaggcagagaggcu

SEQ ID NO: 794585 - RNA, 22 nt, Human
ucauuuauuugacuuuggagug

SEQ ID NO: 794586 - RNA, 21 nt, Human
uggggaggggaccugauuaug

SEQ ID NO: 794587 - RNA, 22 nt, Human
uuguguuaaggugcaucuagug

SEQ ID NO: 794588 - RNA, 22 nt, Human
aggcucugggaagcagugaguu

SEQ ID NO: 794589 - RNA, 20 nt, Human
ucacaucuggcagcugauga

SEQ ID NO: 794590 - RNA, 22 nt, Human
uucaaagaccuuacuuggcaaa

SEQ ID NO: 794591 - RNA, 22 nt, Human
uuuucaagagaguguucuaugu

SEQ ID NO: 794592 - RNA, 22 nt, Human
acaaaguccugguguauggcca

SEQ ID NO: 794593 - RNA, 22 nt, Human
uacaaagucacauugaaaugaa

SEQ ID NO: 794594 - RNA, 22 nt, Human
uuugucuuguaaguuaaauuca

SEQ ID NO: 794595 - RNA, 22 nt, Human
aggaggcaggaagucuauggga

SEQ ID NO: 794596 - RNA, 22 nt, Human
aaaggaaugagcuucuguuagg

SEQ ID NO: 794597 - RNA, 22 nt, Human
ucuuccagcaaugugaaaucac

SEQ ID NO: 794598 - RNA, 17 nt, Human
uccuggcaguccccugg

SEQ ID NO: 794599 - RNA, 22 nt, Human
ucaggggagguugaaucgucuc

SEQ ID NO: 794600 - RNA, 22 nt, Human
caagaaaugggauuugacugcc

SEQ ID NO: 794601 - RNA, 21 nt, Human
ggugggcacaggagagcagag

SEQ ID NO: 794602 - RNA, 22 nt, Human
uauuucuuuucgugacuuauug

SEQ ID NO: 794603 - RNA, 22 nt, Human
acagaauuaacauuugaugaau

SEQ ID NO: 794604 - RNA, 22 nt, Human
caggcuccacuguaggcagcuc

SEQ ID NO: 794605 - RNA, 22 nt, Human
uccuggggaggguucuggcucc

SEQ ID NO: 794606 - RNA, 22 nt, Human
gccugcccugaaagaggugaag

SEQ ID NO: 794607 - RNA, 22 nt, Human
uccccaccccagaacuacuagg

SEQ ID NO: 794608 - RNA, 22 nt, Human
cacagcugaaguagccaugugg

SEQ ID NO: 794609 - RNA, 22 nt, Human
acaguagauggcucagagacag

SEQ ID NO: 794610 - RNA, 22 nt, Human
ggccugaggcgucccagcugug

SEQ ID NO: 794611 - RNA, 17 nt, Human
ccucccacaccgcccug

SEQ ID NO: 794612 - RNA, 20 nt, Human
cuccaguguucaggggagug

SEQ ID NO: 794613 - RNA, 23 nt, Human
cuguuaaauuccuuaagagcagg

SEQ ID NO: 794614 - RNA, 22 nt, Human
ugcuuaauauugugauguaaua

SEQ ID NO: 794615 - RNA, 22 nt, Human
uuucuuugagucucaguuugcu

SEQ ID NO: 794616 - RNA, 20 nt, Human
uuucauugucagaaucuuau

SEQ ID NO: 794617 - RNA, 22 nt, Human
guacauuuacugaugaaaagua

SEQ ID NO: 794618 - RNA, 22 nt, Human
aagcucauuaauuagaagcuaa

SEQ ID NO: 794619 - RNA, 23 nt, Human
agaggccagccuuuggagacacc

SEQ ID NO: 794620 - RNA, 17 nt, Human
caaauccuaggaugucu

SEQ ID NO: 794621 - RNA, 22 nt, Human
aucauacauguaacuaaguaaa

SEQ ID NO: 794622 - RNA, 22 nt, Human
agcauuccacacugaagucugc

SEQ ID NO: 794623 - RNA, 22 nt, Human
uucagagguagagaggaucuug

SEQ ID NO: 794624 - RNA, 22 nt, Human
aacacagaguauuugaagcauu

SEQ ID NO: 794625 - RNA, 22 nt, Human
ggagcccugcccuaggcagcuc

SEQ ID NO: 794626 - RNA, 22 nt, Human
aguauacuccccauccuagaaa

SEQ ID NO: 794627 - RNA, 20 nt, Human
ugagggaguauugauuuccc

SEQ ID NO: 794628 - RNA, 22 nt, Human
auucugaguuagagucagccag

SEQ ID NO: 794629 - RNA, 22 nt, Human
gagcuggaggaccaggacuggg

SEQ ID NO: 794630 - RNA, 22 nt, Human
gaggcugggggcugccuuccuc

SEQ ID NO: 794631 - RNA, 22 nt, Human
uuugagaagaguuugagguauu

SEQ ID NO: 794632 - RNA, 22 nt, Human
ucuauuacuuaccacuaauuca

SEQ ID NO: 794633 - RNA, 22 nt, Human
ugcuggcugucccuaccuggcu

SEQ ID NO: 794634 - RNA, 22 nt, Human
ugaaggaaugagggaguggguc

SEQ ID NO: 794635 - RNA, 22 nt, Human
cagcagccuggccccuccucgg

SEQ ID NO: 794636 - RNA, 22 nt, Human
aaacaagucacuuuaucuugaa

SEQ ID NO: 794637 - RNA, 22 nt, Human
ugucuuuauauauuuggaaaau

SEQ ID NO: 794638 - RNA, 22 nt, Human
aagagucacuccauaaauccca

SEQ ID NO: 794639 - RNA, 22 nt, Human
uuacacagugguuaagucuggg

SEQ ID NO: 794640 - RNA, 22 nt, Human
cacaggagauugaucuauuggu

SEQ ID NO: 794641 - RNA, 22 nt, Human
uggcaccuggugcaggguggcc

SEQ ID NO: 794642 - RNA, 22 nt, Human
uucucaggucaccagggugcca

SEQ ID NO: 794643 - RNA, 22 nt, Human
ucauugaguugcacuuuuacua

SEQ ID NO: 794644 - RNA, 22 nt, Human
gccaggcaggccacgcuguguu

SEQ ID NO: 794645 - RNA, 22 nt, Human
ugucacagggauaccauggggc

SEQ ID NO: 794646 - RNA, 22 nt, Human
uucauguaacuuuucuucucca

SEQ ID NO: 794647 - RNA, 22 nt, Human
gcaagcuguccuuuugcauggc

SEQ ID NO: 794648 - RNA, 22 nt, Human
gcagcuuuguggagaggcccau

SEQ ID NO: 794649 - RNA, 22 nt, Human
gguauaaaugaucagaucgcug

SEQ ID NO: 794650 - RNA, 22 nt, Human
aggcuuugcaaaaaagcucaua

SEQ ID NO: 794651 - RNA, 22 nt, Human
gucugaggguugugcuggagga

SEQ ID NO: 794652 - RNA, 22 nt, Human
acuuuacaagcuuauagccuag

SEQ ID NO: 794653 - RNA, 22 nt, Human
uauagacuagcagcagaauuua

SEQ ID NO: 794654 - RNA, 22 nt, Human
ccugggucuguauugguaggua

SEQ ID NO: 794655 - RNA, 22 nt, Human
caaaguacagugcuuccuggga

SEQ ID NO: 794656 - RNA, 23 nt, Human
ucacauaauccuucauccacagg

SEQ ID NO: 794657 - RNA, 22 nt, Human
ccugccuggaucagccauccug

SEQ ID NO: 794658 - RNA, 22 nt, Human
aaaugccaaggagagacuguua

SEQ ID NO: 794659 - RNA, 22 nt, Human
agucugggagggaugccagugu

SEQ ID NO: 794660 - RNA, 22 nt, Human
cugcaaaucaaguucuuauaau

SEQ ID NO: 794661 - RNA, 22 nt, Human
agccagcuaccggggcuccugg

SEQ ID NO: 794662 - RNA, 22 nt, Human
ccagaggugagggggauucuug

SEQ ID NO: 794663 - RNA, 22 nt, Human
uauacagucuuuugcuauauuc

SEQ ID NO: 794664 - RNA, 22 nt, Human
cagagcaggcccacugcccucc

SEQ ID NO: 794665 - RNA, 22 nt, Human
auuugcauuuacauagcauaga

SEQ ID NO: 794666 - RNA, 22 nt, Human
ccugaccuauuuuucucagcug

SEQ ID NO: 794667 - RNA, 22 nt, Human
aguucaguaguccuucauugua

SEQ ID NO: 794668 - RNA, 22 nt, Human
acacauuugcuaaaaugagcuc

SEQ ID NO: 794669 - RNA, 22 nt, Human
ggggagcaggcugggcugucug

SEQ ID NO: 794670 - RNA, 22 nt, Human
augcagaauugcuaaguaucug

SEQ ID NO: 794671 - RNA, 22 nt, Human
cuggcuccaaggaagagguuuu

SEQ ID NO: 794672 - RNA, 18 nt, Human
auguuccugaggagaggu

SEQ ID NO: 794673 - RNA, 20 nt, Human
ggcugcugugggcagagagg

SEQ ID NO: 794674 - RNA, 22 nt, Human
ggugggcaacauuuggccugag

SEQ ID NO: 794675 - RNA, 22 nt, Human
guggaagggucacagccccuac

SEQ ID NO: 794676 - RNA, 22 nt, Human
uguacaaaguuaaaccuauaua

SEQ ID NO: 794677 - RNA, 21 nt, Human
caugauaaugaagguguuauu

SEQ ID NO: 794678 - RNA, 21 nt, Human
ugggccagaucugaguuucua

SEQ ID NO: 794679 - RNA, 22 nt, Human
gccaggcuggccagcaccuucu

SEQ ID NO: 794680 - RNA, 22 nt, Human
agccagggugggugaaugcuau

SEQ ID NO: 794681 - RNA, 22 nt, Human
aggcuuuacugccucaggacuc

SEQ ID NO: 794682 - RNA, 22 nt, Human
agcugccgaugcccagcugcau

SEQ ID NO: 794683 - RNA, 22 nt, Human
uuuuuuccugagccuugugguc

SEQ ID NO: 794684 - RNA, 22 nt, Human
aauauuaucaaaagcuuuuuca

SEQ ID NO: 794685 - RNA, 22 nt, Human
gccucugcaccaguacugugcc

SEQ ID NO: 794686 - RNA, 22 nt, Human
ugucugaacgaaguagguccac

SEQ ID NO: 794687 - RNA, 22 nt, Human
ucauaaauuaucuauuuggcua

SEQ ID NO: 794688 - RNA, 18 nt, Human
gcugccugcauuccucac

SEQ ID NO: 794689 - RNA, 22 nt, Human
cuuuggaggaaaauugagguca

SEQ ID NO: 794690 - RNA, 22 nt, Human
ugacaauuguugugaauucuuc

SEQ ID NO: 794691 - RNA, 22 nt, Human
caggguggaaaagcuaguugga

SEQ ID NO: 794692 - RNA, 18 nt, Human
caguggugcugggaugug

SEQ ID NO: 794693 - RNA, 22 nt, Human
cuggcacaugcucccugagugg

SEQ ID NO: 794694 - RNA, 22 nt, Human
ucagcaggcaccggaaguguuu

SEQ ID NO: 794695 - RNA, 22 nt, Human
gccacagcagggcccucucagg

SEQ ID NO: 794696 - RNA, 22 nt, Human
caaaugcaaaauauaacccugu

SEQ ID NO: 794697 - RNA, 22 nt, Human
aaguaucuuucuagcaacuaaa

SEQ ID NO: 794698 - RNA, 22 nt, Human
uauucacaaaaugagguccuca

SEQ ID NO: 794699 - RNA, 22 nt, Human
uuucacauccugaagccccacu

SEQ ID NO: 794700 - RNA, 22 nt, Human
gccuuggcuguuggagcuugau

SEQ ID NO: 794701 - RNA, 22 nt, Human
gaaugcuuggaaccugaaguuc

SEQ ID NO: 794702 - RNA, 22 nt, Human
uggccaggccucuuggugccca

SEQ ID NO: 794703 - RNA, 20 nt, Human
caaaagcaaugaaguuauga

SEQ ID NO: 794704 - RNA, 22 nt, Human
caggcuggcaaugcgucaagca

SEQ ID NO: 794705 - RNA, 21 nt, Human
cagcagaagcaucuauggaag

SEQ ID NO: 794706 - RNA, 22 nt, Human
gccaggccacucccggguccug

SEQ ID NO: 794707 - RNA, 22 nt, Human
auuauucuuaugucaucauggc

SEQ ID NO: 794708 - RNA, 22 nt, Human
aggaagggauacauaggauagu

SEQ ID NO: 794709 - RNA, 19 nt, Human
guuguuuuucuuauuaugg

SEQ ID NO: 794710 - RNA, 22 nt, Human
ugggcugcggauaggccucgga

SEQ ID NO: 794711 - RNA, 22 nt, Human
cccuggccagcucaugucugag

SEQ ID NO: 794712 - RNA, 19 nt, Human
ccagggcuccaagcugagu

SEQ ID NO: 794713 - RNA, 22 nt, Human
cagucagaaggaagaugcuuaa

SEQ ID NO: 794714 - RNA, 22 nt, Human
cuggcucccagcuuucagggag

SEQ ID NO: 794715 - RNA, 19 nt, Human
uagcccagagccuggcuac

SEQ ID NO: 794716 - RNA, 22 nt, Human
aaugauaccgccaauauuacca

SEQ ID NO: 794717 - RNA, 22 nt, Human
gaaagugccagaauaggaggcc

SEQ ID NO: 794718 - RNA, 22 nt, Human
ccagccagcaagcucccaguuc

SEQ ID NO: 794719 - RNA, 22 nt, Human
uuucuuuaaaggaacucuguuu

SEQ ID NO: 794720 - RNA, 22 nt, Human
aacacuuaaggagagaucaaau

SEQ ID NO: 794721 - RNA, 22 nt, Human
acgagguuggagaguuguuugg

SEQ ID NO: 794722 - RNA, 22 nt, Human
uggcuggcuuguucacugacug

SEQ ID NO: 794723 - RNA, 22 nt, Human
agaucagaaauguaauggcagu

SEQ ID NO: 794724 - RNA, 22 nt, Human
ucaggcagaaaaaucacuaauu

SEQ ID NO: 794725 - RNA, 22 nt, Human
auaaacucaugccaagaaauga

SEQ ID NO: 794726 - RNA, 22 nt, Human
cagcagccuacaaugcacagaa

SEQ ID NO: 794727 - RNA, 20 nt, Human
ggcuuccccgccaucuuccg

SEQ ID NO: 794728 - RNA, 22 nt, Human
gagucuuucugggcuuguucuu

SEQ ID NO: 794729 - RNA, 22 nt, Human
ugugaaccuuggugagucagua

SEQ ID NO: 794730 - RNA, 22 nt, Human
aggugaaguugaggaggcagaa

SEQ ID NO: 794731 - RNA, 19 nt, Human
accuucugggaaacauucc

SEQ ID NO: 794732 - RNA, 20 nt, Human
cccaggagcugugccccauc

SEQ ID NO: 794733 - RNA, 22 nt, Human
cagggugccucccgcucgccgg

SEQ ID NO: 794734 - RNA, 23 nt, Human
ugcugguguuuuugggaccaggg

SEQ ID NO: 794735 - RNA, 22 nt, Human
caggaaauagacacuguaugau

SEQ ID NO: 794736 - RNA, 22 nt, Human
cugcuaggguucagcagugccu

SEQ ID NO: 794737 - RNA, 21 nt, Human
agguaccaaaagccugcauga

SEQ ID NO: 794738 - RNA, 22 nt, Human
gccaagcuggaugaagagguug

SEQ ID NO: 794739 - RNA, 22 nt, Human
aggugcuguuggcagcgggcag

SEQ ID NO: 794740 - RNA, 22 nt, Human
gcuggcugagaucuguuuuccu

SEQ ID NO: 794741 - RNA, 22 nt, Human
uuguguuucccuugcauauucc

SEQ ID NO: 794742 - RNA, 22 nt, Human
uggagggcgcuuagauggaggg

SEQ ID NO: 794743 - RNA, 21 nt, Human
uuagaguugccauuauaugua

SEQ ID NO: 794744 - RNA, 22 nt, Human
augcuauacucaaagaaauuca

SEQ ID NO: 794745 - RNA, 22 nt, Human
cagccucuaagcacagccucuc

SEQ ID NO: 794746 - RNA, 18 nt, Human
cuccagggaacucaguca

SEQ ID NO: 794747 - RNA, 22 nt, Human
aucauuuugugacaaugccugu

SEQ ID NO: 794748 - RNA, 22 nt, Human
uaggauuuauucuacaauauug

SEQ ID NO: 794749 - RNA, 22 nt, Human
cacgcacgcuggguggaggcgc

SEQ ID NO: 794750 - RNA, 22 nt, Human
ugcugugguucccagaguggau

SEQ ID NO: 794751 - RNA, 22 nt, Human
cagugauuuucucagaacuuga

SEQ ID NO: 794752 - RNA, 22 nt, Human
gaggcagugcauugucuagggg

SEQ ID NO: 794753 - RNA, 22 nt, Human
gcugagacuuccacugccaucu

SEQ ID NO: 794754 - RNA, 22 nt, Human
gccaggcaugggcuucugggcg

SEQ ID NO: 794755 - RNA, 22 nt, Human
caguaacugaugugaucaaacg

SEQ ID NO: 794756 - RNA, 22 nt, Human
uuucauaaacaguagaagacua

SEQ ID NO: 794757 - RNA, 22 nt, Human
ugaguggagacuguguguagag

SEQ ID NO: 794758 - RNA, 22 nt, Human
aggcacagaauggcauucagug

SEQ ID NO: 794759 - RNA, 22 nt, Human
gacaggccaggggcugaggugg

SEQ ID NO: 794760 - RNA, 22 nt, Human
ugugggcaaaggguagcugggu

SEQ ID NO: 794761 - RNA, 22 nt, Human
ucccaucaucuguucuggcuac

SEQ ID NO: 794762 - RNA, 22 nt, Human
augucacaguugcaacaugaau

SEQ ID NO: 794763 - RNA, 21 nt, Human
uuccuggggaaggagcugccu

SEQ ID NO: 794764 - RNA, 19 nt, Human
agggccugcagcucaagcu

SEQ ID NO: 794765 - RNA, 22 nt, Human
ucaaaugagaggcagggcagcu

SEQ ID NO: 794766 - RNA, 22 nt, Human
ggcaguagccagggacuggcag

SEQ ID NO: 794767 - RNA, 22 nt, Human
agcccagcuuugaaccauauca

SEQ ID NO: 794768 - RNA, 22 nt, Human
augaaauuaaucaacacauaca

SEQ ID NO: 794769 - RNA, 22 nt, Human
aggccaggccuuucuccauucc

SEQ ID NO: 794770 - RNA, 22 nt, Human
uggcccagcugcagauggugga

SEQ ID NO: 794771 - RNA, 22 nt, Human
uacuuuucauaaugaagcagca

SEQ ID NO: 794772 - RNA, 22 nt, Human
uaucuuaaaugcaugauagaca

SEQ ID NO: 794773 - RNA, 23 nt, Human
aggcuggcuucaggagccucucc

SEQ ID NO: 794774 - RNA, 22 nt, Human
ccucagcuugauuucugcagag

SEQ ID NO: 794775 - RNA, 22 nt, Human
uuuuaaugugcucugcaaugau

SEQ ID NO: 794776 - RNA, 22 nt, Human
aggcugagaaagugggaagaug

SEQ ID NO: 794777 - RNA, 22 nt, Human
aaggcagugguugugauacugu

SEQ ID NO: 794778 - RNA, 22 nt, Human
ccuggcucuagaggccacuccu

SEQ ID NO: 794779 - RNA, 22 nt, Human
cuccacagguguacuguaccuu

SEQ ID NO: 794780 - RNA, 22 nt, Human
ccugaggacaucagcaucaccu

SEQ ID NO: 794781 - RNA, 22 nt, Human
aguguuuugcuaauccuauuaa

SEQ ID NO: 794782 - RNA, 22 nt, Human
cacccaguaagcaugaggcccu

SEQ ID NO: 794783 - RNA, 22 nt, Human
cuggaggucuacagugguagcu

SEQ ID NO: 794784 - RNA, 22 nt, Human
ucaggagcuauggacugucaaa

SEQ ID NO: 794785 - RNA, 22 nt, Human
ugggcugcacccucagccucug

SEQ ID NO: 794786 - RNA, 22 nt, Human
gcacucugccaggucuccugau

SEQ ID NO: 794787 - RNA, 22 nt, Human
ggcuuaaaacuuugaaaguguu

SEQ ID NO: 794788 - RNA, 22 nt, Human
ccugcucugccaaguccucuuu

SEQ ID NO: 794789 - RNA, 22 nt, Human
cugaggagcaaccccgugcccu

SEQ ID NO: 794790 - RNA, 22 nt, Human
cagcagagcugugugggaaggg

SEQ ID NO: 794791 - RNA, 22 nt, Human
uggcuuccaaauuaucccuaga

SEQ ID NO: 794792 - RNA, 22 nt, Human
cugagaagcacugucugcaaga

SEQ ID NO: 794793 - RNA, 22 nt, Human
ucaggcacccucuauuuucauc

SEQ ID NO: 794794 - RNA, 22 nt, Human
cuugaauguaaauaauguacag

SEQ ID NO: 794795 - RNA, 22 nt, Human
gagaagcaaucaguggccaccc

SEQ ID NO: 794796 - RNA, 22 nt, Human
gcaggagcuggaaagugauguu

SEQ ID NO: 794797 - RNA, 22 nt, Human
cuggaaggagaaggaggcugug

SEQ ID NO: 794798 - RNA, 22 nt, Human
ggggugagaucaaggaagcccu

SEQ ID NO: 794799 - RNA, 18 nt, Human
uccagcaggucugaggug

SEQ ID NO: 794800 - RNA, 22 nt, Human
uuucauagccuucuaaugaguu

SEQ ID NO: 794801 - RNA, 22 nt, Human
ugcaagaggauuguaucaauaa

SEQ ID NO: 794802 - RNA, 22 nt, Human
gggcaggggucaguggccccaa

SEQ ID NO: 794803 - RNA, 21 nt, Human
agccaggguggacacuguaug

SEQ ID NO: 794804 - RNA, 22 nt, Human
ucucaaguuauguaacagcugu

SEQ ID NO: 794805 - RNA, 18 nt, Human
auuuuucccagauggaua

SEQ ID NO: 794806 - RNA, 22 nt, Human
aaagcagcaaguauuuguuacu

SEQ ID NO: 794807 - RNA, 22 nt, Human
aaaaaccuuucccauacuaaga

SEQ ID NO: 794808 - RNA, 22 nt, Human
uucaacucuucaagaucacauc

SEQ ID NO: 794809 - RNA, 22 nt, Human
ccuuguuucucucccagauaag

SEQ ID NO: 794810 - RNA, 22 nt, Human
gaauuuuaauaaagguuuauca

SEQ ID NO: 794811 - RNA, 22 nt, Human
agaaagacgugaugaagaagua

SEQ ID NO: 794812 - RNA, 21 nt, Human
caggcucugcuagaggagccu

SEQ ID NO: 794813 - RNA, 22 nt, Human
ccugggcuuucaaaaccagccu

SEQ ID NO: 794814 - RNA, 22 nt, Human
cuggagucuucagcuugcugcc

SEQ ID NO: 794815 - RNA, 22 nt, Human
gguucaguuuacauuaaaaucu

SEQ ID NO: 794816 - RNA, 22 nt, Human
agggcagcugugagccacugug

SEQ ID NO: 794817 - RNA, 22 nt, Human
uacacaggguauggcuugagga

SEQ ID NO: 794818 - RNA, 17 nt, Human
gcagccucuugguagug

SEQ ID NO: 794819 - RNA, 22 nt, Human
agccacaggccaugagauacca

SEQ ID NO: 794820 - RNA, 22 nt, Human
uggcacuugauauuugauuugc

SEQ ID NO: 794821 - RNA, 22 nt, Human
ggaacauaccgaaaauacuuaa

SEQ ID NO: 794822 - RNA, 22 nt, Human
gagcaaauggagcuugucuacu

SEQ ID NO: 794823 - RNA, 22 nt, Human
uagaaaguacuaaauuuaacug

SEQ ID NO: 794824 - RNA, 22 nt, Human
aucuuucuuauuugaagaaaga

SEQ ID NO: 794825 - RNA, 22 nt, Human
ccccagcacaggcuccucagau

SEQ ID NO: 794826 - RNA, 22 nt, Human
aguauacugaaaguaaauauga

SEQ ID NO: 794827 - RNA, 15 nt, Human
uggugguguugagac

SEQ ID NO: 794828 - RNA, 22 nt, Human
cucaaauaccucuccaugugac

SEQ ID NO: 794829 - RNA, 22 nt, Human
cuagaaaucucuguuuacauca

SEQ ID NO: 794830 - RNA, 22 nt, Human
uuacuugauuguggagucugag

SEQ ID NO: 794831 - RNA, 22 nt, Human
ucuggguguagggccuggcaac

SEQ ID NO: 794832 - RNA, 22 nt, Human
aaaacaguuauaaacagaguca

SEQ ID NO: 794833 - RNA, 22 nt, Human
caggaucccuggccuccgccca

SEQ ID NO: 794834 - RNA, 22 nt, Human
ucccaggcaggugacaggggga

SEQ ID NO: 794835 - RNA, 22 nt, Human
ucaggcugaaucauccuagcuu

SEQ ID NO: 794836 - RNA, 22 nt, Human
cuggugccuccucucccagguc

SEQ ID NO: 794837 - RNA, 22 nt, Human
aacauuucuucugaaacugagu

SEQ ID NO: 794838 - RNA, 22 nt, Human
auuucccuccagggaaagcuua

SEQ ID NO: 794839 - RNA, 22 nt, Human
agaugcagugguuaacaauaca

SEQ ID NO: 794840 - RNA, 22 nt, Human
ggcccagccuggcaacaaugac

SEQ ID NO: 794841 - RNA, 22 nt, Human
ccuggcucgcugaccucagggg

SEQ ID NO: 794842 - RNA, 22 nt, Human
cugucuguugaccauaguuugc

SEQ ID NO: 794843 - RNA, 22 nt, Human
ggucagugacuuuuuucugugg

SEQ ID NO: 794844 - RNA, 22 nt, Human
ucaggagggaguguggauagag

SEQ ID NO: 794845 - RNA, 23 nt, Human
aggcccagguauguuuguuuugg

SEQ ID NO: 794846 - RNA, 22 nt, Human
aucucacauccucaguagugca

SEQ ID NO: 794847 - RNA, 22 nt, Human
uaggaagguguuuuuaaggagc

SEQ ID NO: 794848 - RNA, 19 nt, Human
ucuuuagccagagcucugg

SEQ ID NO: 794849 - RNA, 22 nt, Human
cagguggguacaucacagagac

SEQ ID NO: 794850 - RNA, 23 nt, Human
acacugucucauggauagacugc

SEQ ID NO: 794851 - RNA, 22 nt, Human
gcugcuguugauuuaguccaau

SEQ ID NO: 794852 - RNA, 22 nt, Human
caggcagaguuagugauuuagg

SEQ ID NO: 794853 - RNA, 22 nt, Human
caauauauaggaacaacuuagg

SEQ ID NO: 794854 - RNA, 22 nt, Human
agcuuguuauaaaugcagaaug

SEQ ID NO: 794855 - RNA, 22 nt, Human
agcaggaccaagaaggggaaaa

SEQ ID NO: 794856 - RNA, 22 nt, Human
ggcaguguggcauaacauguag

SEQ ID NO: 794857 - RNA, 22 nt, Human
aggcuggagugugcaguggcgc

SEQ ID NO: 794858 - RNA, 22 nt, Human
acagcagggggagcuguuggac

SEQ ID NO: 794859 - RNA, 22 nt, Human
aaauauacuagaugaugaccca

SEQ ID NO: 794860 - RNA, 20 nt, Human
aacaaacuacaaaauuaugu

SEQ ID NO: 794861 - RNA, 22 nt, Human
cccagagagcacaggugguggg

SEQ ID NO: 794862 - RNA, 22 nt, Human
gaggguggcuccucccugggcc

SEQ ID NO: 794863 - RNA, 22 nt, Human
uggcagaaguucacuaguagcu

SEQ ID NO: 794864 - RNA, 23 nt, Human
ugcaugcuaacacagugcacagg

SEQ ID NO: 794865 - RNA, 22 nt, Human
uggacagcuugcagagccaccc

SEQ ID NO: 794866 - RNA, 22 nt, Human
auauuauucuagcucuugugug

SEQ ID NO: 794867 - RNA, 22 nt, Human
ugcagcugccuccuucccuugu

SEQ ID NO: 794868 - RNA, 22 nt, Human
agcagccuuagguauugugauu

SEQ ID NO: 794869 - RNA, 22 nt, Human
agcuguaugcccaagaugcuau

SEQ ID NO: 794870 - RNA, 19 nt, Human
ucagaaggcaggagaggcc

SEQ ID NO: 794871 - RNA, 22 nt, Human
uggcugugugccaggcugucug

SEQ ID NO: 794872 - RNA, 22 nt, Human
uaagacagggagggcucucagc

SEQ ID NO: 794873 - RNA, 22 nt, Human
gcucugaggcugggagcacucu

SEQ ID NO: 794874 - RNA, 22 nt, Human
aagcaggcaggguggagaguuu

SEQ ID NO: 794875 - RNA, 22 nt, Human
ggucagugcgauuucccacucc

SEQ ID NO: 794876 - RNA, 22 nt, Human
uguguucauguauguauacaua

SEQ ID NO: 794877 - RNA, 22 nt, Human
aagggggcccagcacuaaguug

SEQ ID NO: 794878 - RNA, 22 nt, Human
gcaggaaaaccuucccauguuu

SEQ ID NO: 794879 - RNA, 22 nt, Human
ggcagcuggguuggccagaaac

SEQ ID NO: 794880 - RNA, 22 nt, Human
aggcuuguuuuacuaaaagcaa

SEQ ID NO: 794881 - RNA, 21 nt, Human
ggcaugagggcagugagcaga

SEQ ID NO: 794882 - RNA, 20 nt, Human
caggcacacucauuccugcu

SEQ ID NO: 794883 - RNA, 22 nt, Human
ggcuccagauguccccuggcaa

SEQ ID NO: 794884 - RNA, 22 nt, Human
cuguauguuucuaugaauguga

SEQ ID NO: 794885 - RNA, 22 nt, Human
ucccugggcuucuccagacuug

SEQ ID NO: 794886 - RNA, 22 nt, Human
cuauuugggguagaagauggau

SEQ ID NO: 794887 - RNA, 22 nt, Human
uuuuaaguuaauauaauugagg

SEQ ID NO: 794888 - RNA, 22 nt, Human
agcugcuccuuggcugugguuc

SEQ ID NO: 794889 - RNA, 20 nt, Human
acccuccacuguucacugug

SEQ ID NO: 794890 - RNA, 22 nt, Human
cuuugcuucuccaaccugcuca

SEQ ID NO: 794891 - RNA, 22 nt, Human
cacagugauugauuuuuacuuu

SEQ ID NO: 794892 - RNA, 22 nt, Human
ccccuggguccaggcuucucug

SEQ ID NO: 794893 - RNA, 22 nt, Human
ggguugaggcggaugucggcgg

SEQ ID NO: 794894 - RNA, 22 nt, Human
acuggcaguuugagaaugcauu

SEQ ID NO: 794895 - RNA, 22 nt, Human
uauguauuauucaucaguggga

SEQ ID NO: 794896 - RNA, 22 nt, Human
cauucauucacauuuugucuau

SEQ ID NO: 794897 - RNA, 22 nt, Human
gccagcuguaucuuuggccagc

SEQ ID NO: 794898 - RNA, 22 nt, Human
acacagagcuggaacugcuuca

SEQ ID NO: 794899 - RNA, 22 nt, Human
gaaggcuuagaaacaagggagc

SEQ ID NO: 794900 - RNA, 22 nt, Human
cucagcagugacaagagaguau

SEQ ID NO: 794901 - RNA, 22 nt, Human
gagugucagugcuuggggcuac

SEQ ID NO: 794902 - RNA, 22 nt, Human
uaggguccugccuacagagaca

SEQ ID NO: 794903 - RNA, 22 nt, Human
uuuaaagagaaugugaaggagu

SEQ ID NO: 794904 - RNA, 22 nt, Human
acuuuaaagcagaauggcuaug

SEQ ID NO: 794905 - RNA, 22 nt, Human
cuggcugcaggaaggagugggc

SEQ ID NO: 794906 - RNA, 20 nt, Human
cgcccaggagggcccaugug

SEQ ID NO: 794907 - RNA, 22 nt, Human
uugccugcuacggucuucacug

SEQ ID NO: 794908 - RNA, 22 nt, Human
uuauucaccaguguaaaacacu

SEQ ID NO: 794909 - RNA, 22 nt, Human
gggcccagcacuggcugggauc

SEQ ID NO: 794910 - RNA, 22 nt, Human
aaaguuuaggcuuugaaaccag

SEQ ID NO: 794911 - RNA, 22 nt, Human
uggcagaauuucuagcagauuc

SEQ ID NO: 794912 - RNA, 22 nt, Human
ucaguaaaauuacagaucuaca

SEQ ID NO: 794913 - RNA, 22 nt, Human
aagggcagggaguuugugucua

SEQ ID NO: 794914 - RNA, 23 nt, Human
ugcuggaguuuacucaggccagc

SEQ ID NO: 794915 - RNA, 22 nt, Human
ugcacagaugggcuuguucaua

SEQ ID NO: 794916 - RNA, 22 nt, Human
ccugggagugucagacuugcuu

SEQ ID NO: 794917 - RNA, 22 nt, Human
ucagugucugugggcaggaugg

SEQ ID NO: 794918 - RNA, 22 nt, Human
gaguccucagauagaaagugcg

SEQ ID NO: 794919 - RNA, 22 nt, Human
auagcaaauauuuuaaugagca

SEQ ID NO: 794920 - RNA, 22 nt, Human
gguggguggaaacagcauguac

SEQ ID NO: 794921 - RNA, 22 nt, Human
uucacaguggcugacaggcugg

SEQ ID NO: 794922 - RNA, 22 nt, Human
caccucauggauaagauaaacu

SEQ ID NO: 794923 - RNA, 22 nt, Human
uucucuuuuagaggcuccauga

SEQ ID NO: 794924 - RNA, 20 nt, Human
uaaugcuuaacacauccccu

SEQ ID NO: 794925 - RNA, 22 nt, Human
acaauaguaagguauauuguca

SEQ ID NO: 794926 - RNA, 22 nt, Human
ugccccaggugcugagguugga

SEQ ID NO: 794927 - RNA, 22 nt, Human
gaggagcuucagaggaaucuua

SEQ ID NO: 794928 - RNA, 22 nt, Human
uucauuuaaucagaaucucuaa

SEQ ID NO: 794929 - RNA, 22 nt, Human
cagagcuguugcggggcuuggc

SEQ ID NO: 794930 - RNA, 22 nt, Human
ucauacaauucaaucucugauu

SEQ ID NO: 794931 - RNA, 22 nt, Human
uaaugcaguagguauuaaagaa

SEQ ID NO: 794932 - RNA, 22 nt, Human
ugcaaauguguggugaggcauu

SEQ ID NO: 794933 - RNA, 20 nt, Human
agacaaugagugacagaguu

SEQ ID NO: 794934 - RNA, 23 nt, Human
gaaaucuagucauuuuuagucug

SEQ ID NO: 794935 - RNA, 22 nt, Human
ucucauuugugugcaauucaga

SEQ ID NO: 794936 - RNA, 22 nt, Human
uaaauuaugucacaugacucug

SEQ ID NO: 794937 - RNA, 23 nt, Human
aggcuccacaugggcacuuugca

SEQ ID NO: 794938 - RNA, 22 nt, Human
ucagcaggcucugguugaccau

SEQ ID NO: 794939 - RNA, 22 nt, Human
uuucaugcucauggaacacagc

SEQ ID NO: 794940 - RNA, 22 nt, Human
acagccagucaucucagcaggg

SEQ ID NO: 794941 - RNA, 22 nt, Human
cagcucagcuuccugggugugu

SEQ ID NO: 794942 - RNA, 22 nt, Human
ugcaggaaacagaggcucaaau

SEQ ID NO: 794943 - RNA, 22 nt, Human
uggacucugaacuggcacugac

SEQ ID NO: 794944 - RNA, 23 nt, Human
uucauugauugcaaggagauugg

SEQ ID NO: 794945 - RNA, 22 nt, Human
uagaaaguaaaucaguuuuauu

SEQ ID NO: 794946 - RNA, 22 nt, Human
auacauuagcucauaugauuaa

SEQ ID NO: 794947 - RNA, 22 nt, Human
aagggcaggcagagaucauaua

SEQ ID NO: 794948 - RNA, 17 nt, Human
uguucucuucagaaauc

SEQ ID NO: 794949 - RNA, 22 nt, Human
ccugcugugugacgggauguua

SEQ ID NO: 794950 - RNA, 22 nt, Human
cugcugucuaguaucuuaaaaa

SEQ ID NO: 794951 - RNA, 22 nt, Human
aaauagacaggcuuaaauagga

SEQ ID NO: 794952 - RNA, 22 nt, Human
cgaaacaucuaugaucauuaau

SEQ ID NO: 794953 - RNA, 20 nt, Human
cuggggagcugcucccacga

SEQ ID NO: 794954 - RNA, 22 nt, Human
ugcaaggguagaagugauggca

SEQ ID NO: 794955 - RNA, 22 nt, Human
ggcaggcagccuccauccacag

SEQ ID NO: 794956 - RNA, 22 nt, Human
ugagccaguggaagauggcagu

SEQ ID NO: 794957 - RNA, 22 nt, Human
ccagggcuucaguuagugguga

SEQ ID NO: 794958 - RNA, 22 nt, Human
acuugaauucaaagcgaaagca

SEQ ID NO: 794959 - RNA, 22 nt, Human
uuaaauaguaggucuauuuugg

SEQ ID NO: 794960 - RNA, 22 nt, Human
cucccagggccaucgagucacu

SEQ ID NO: 794961 - RNA, 22 nt, Human
uuguaccagcucauuucagaac

SEQ ID NO: 794962 - RNA, 22 nt, Human
aauaccuuccacagugaccuug

SEQ ID NO: 794963 - RNA, 22 nt, Human
accuuuccuggcugaccgagga

SEQ ID NO: 794964 - RNA, 22 nt, Human
ucugagaauagugccacugugg

SEQ ID NO: 794965 - RNA, 22 nt, Human
gggcugggcaugguguucccuc

SEQ ID NO: 794966 - RNA, 23 nt, Human
uggcuggcagaaacugaagcaug

SEQ ID NO: 794967 - RNA, 22 nt, Human
acacacagaguuuauacaggca

SEQ ID NO: 794968 - RNA, 22 nt, Human
gaagccaagggcugcuuuuccu

SEQ ID NO: 794969 - RNA, 22 nt, Human
cagucccaguuugagacucugg

SEQ ID NO: 794970 - RNA, 22 nt, Human
uuuuaaacugcagaauuuagaa

SEQ ID NO: 794971 - RNA, 22 nt, Human
uaaguaaauuuauaaugugauu

SEQ ID NO: 794972 - RNA, 20 nt, Human
acacacuuugaucuugagcc

SEQ ID NO: 794973 - RNA, 22 nt, Human
cagacacacaagcaaucuaagu

SEQ ID NO: 794974 - RNA, 17 nt, Human
agcugccucucccacca

SEQ ID NO: 794975 - RNA, 22 nt, Human
ucagugucucauaugagguuuc

SEQ ID NO: 794976 - RNA, 22 nt, Human
ggcagcuuucaauaggguuaug

SEQ ID NO: 794977 - RNA, 22 nt, Human
ccaggcccugcuccucacacca

SEQ ID NO: 794978 - RNA, 22 nt, Human
gugagccaauaccaugcuguuc

SEQ ID NO: 794979 - RNA, 22 nt, Human
gccagugcuuguggagcuggca

SEQ ID NO: 794980 - RNA, 22 nt, Human
uggacaggauagugcaguacgc

SEQ ID NO: 794981 - RNA, 22 nt, Human
ccccagcagcaccuggggcagu

SEQ ID NO: 794982 - RNA, 22 nt, Human
aaaugcagaucccugaaucuca

SEQ ID NO: 794983 - RNA, 22 nt, Human
cgcagcugcacggggcugagcc

SEQ ID NO: 794984 - RNA, 22 nt, Human
uuuguggaacucucuucuugca

SEQ ID NO: 794985 - RNA, 22 nt, Human
aacaugcaaugucugaaaaucc

SEQ ID NO: 794986 - RNA, 22 nt, Human
aauaaagaauggaugagaucgu

SEQ ID NO: 794987 - RNA, 22 nt, Human
gagcagcuggcuguauugguuu

SEQ ID NO: 794988 - RNA, 22 nt, Human
auuaaauacugcaggcuaagca

SEQ ID NO: 794989 - RNA, 22 nt, Human
ucagaauuuucuggaauggagc

SEQ ID NO: 794990 - RNA, 22 nt, Human
caauuucauuaauagauauaga

SEQ ID NO: 794991 - RNA, 22 nt, Human
cagcaugguuggguucugggga

SEQ ID NO: 794992 - RNA, 17 nt, Human
cacuuuguugcuguggg

SEQ ID NO: 794993 - RNA, 22 nt, Human
uguaaaauaccauuccuuguca

SEQ ID NO: 794994 - RNA, 22 nt, Human
uuauauaucuugauuuguucca

SEQ ID NO: 794995 - RNA, 22 nt, Human
gacaguaacugagagauguaau

SEQ ID NO: 794996 - RNA, 22 nt, Human
cagcaaaauuugaggauugccu

SEQ ID NO: 794997 - RNA, 22 nt, Human
aaacagcaauggagaagccagg

SEQ ID NO: 794998 - RNA, 23 nt, Human
aaacugcaucucugagccucagc

SEQ ID NO: 794999 - RNA, 22 nt, Human
agaagccaacagggcaggagag

SEQ ID NO: 795000 - RNA, 22 nt, Human
cugcacauaguaaguacucaau

SEQ ID NO: 795001 - RNA, 22 nt, Human
agaaauguugaauacaucagga

SEQ ID NO: 795002 - RNA, 22 nt, Human
aaggcuccagugaaugcuggca

SEQ ID NO: 795003 - RNA, 22 nt, Human
aggaggaggugggacacaguga

SEQ ID NO: 795004 - RNA, 23 nt, Human
gcccacccucagcguccucacgg

SEQ ID NO: 795005 - RNA, 22 nt, Human
uguuucauuaguacugacaaua

SEQ ID NO: 795006 - RNA, 22 nt, Human
cgggugguuuucaucaagaugg

SEQ ID NO: 795007 - RNA, 22 nt, Human
auguuaaaugguuuauuauuaa

SEQ ID NO: 795008 - RNA, 18 nt, Human
cuacauucauaggaaagg

SEQ ID NO: 795009 - RNA, 22 nt, Human
auaguacaaucaguuaauuagu

SEQ ID NO: 795010 - RNA, 22 nt, Human
uucuggaaaugcacaacuaauu

SEQ ID NO: 795011 - RNA, 22 nt, Human
gggugaggagcugccagucaug

SEQ ID NO: 795012 - RNA, 22 nt, Human
ugccuucuucucccuggcucag

SEQ ID NO: 795013 - RNA, 22 nt, Human
agucaucaucugcccucacugg

SEQ ID NO: 795014 - RNA, 22 nt, Human
ugucuaggucuagguuggcaau

SEQ ID NO: 795015 - RNA, 23 nt, Human
uggacccugcacaccagcucuac

SEQ ID NO: 795016 - RNA, 22 nt, Human
ggcaggcucuuggccuuaugag

SEQ ID NO: 795017 - RNA, 22 nt, Human
gucugggcaccuggccugggaa

SEQ ID NO: 795018 - RNA, 22 nt, Human
ugucauggacuggauuucugcu

SEQ ID NO: 795019 - RNA, 22 nt, Human
agaaacaucauuggaacacaag

SEQ ID NO: 795020 - RNA, 21 nt, Human
ucugggcccaugcugccucac

SEQ ID NO: 795021 - RNA, 22 nt, Human
gucaggauuauaauccccaugg

SEQ ID NO: 795022 - RNA, 22 nt, Human
gaauauaggaccucugggaaca

SEQ ID NO: 795023 - RNA, 22 nt, Human
uuagauaacaguagaauaucaa

SEQ ID NO: 795024 - RNA, 22 nt, Human
ugcaaauauuccaugcuguuca

SEQ ID NO: 795025 - RNA, 22 nt, Human
agucucugcugguugugccuau

SEQ ID NO: 795026 - RNA, 22 nt, Human
auuuuuuagaaccuggccugau

SEQ ID NO: 795027 - RNA, 22 nt, Human
ggacccuggagacccacuggga

SEQ ID NO: 795028 - RNA, 22 nt, Human
uggcugaggagggucuucuggu

SEQ ID NO: 795029 - RNA, 22 nt, Human
cugccccugccaggcagcuguc

SEQ ID NO: 795030 - RNA, 22 nt, Human
cuggccgguauuugccucuggg

SEQ ID NO: 795031 - RNA, 17 nt, Human
agucugggaccugcgug

SEQ ID NO: 795032 - RNA, 22 nt, Human
uaagaacuuuguagccuguucu

SEQ ID NO: 795033 - RNA, 22 nt, Human
aggacaguuaaaaauagauggc

SEQ ID NO: 795034 - RNA, 22 nt, Human
aaaaacacaacugucuuucucu

SEQ ID NO: 795035 - RNA, 22 nt, Human
agcccagccacuauuaaauguu

SEQ ID NO: 795036 - RNA, 22 nt, Human
aagggucuuagagguucauuuu

SEQ ID NO: 795037 - RNA, 22 nt, Human
uuucaagcauaacugggaagag

SEQ ID NO: 795038 - RNA, 19 nt, Human
uguggccaugguucagcug

SEQ ID NO: 795039 - RNA, 22 nt, Human
ccugagugaccugaggucuagu

SEQ ID NO: 795040 - RNA, 22 nt, Human
gaggccuggguuggaggugcau

SEQ ID NO: 795041 - RNA, 22 nt, Human
uuucacauaaauggaguaaaga

SEQ ID NO: 795042 - RNA, 22 nt, Human
aacuccagcaggaaggugagaa

SEQ ID NO: 795043 - RNA, 22 nt, Human
uggcccuauuuggaaauagagc

SEQ ID NO: 795044 - RNA, 23 nt, Human
ccaguucuccuuugaacagugac

SEQ ID NO: 795045 - RNA, 22 nt, Human
gaagccacguuaaauuggcugu

SEQ ID NO: 795046 - RNA, 18 nt, Human
cacccuccgcggcugccc

SEQ ID NO: 795047 - RNA, 22 nt, Human
uggaagugucuacauguggagu

SEQ ID NO: 795048 - RNA, 22 nt, Human
cucugcccgcggaugccacguc

SEQ ID NO: 795049 - RNA, 22 nt, Human
auuuauucuccagauggcgaga

SEQ ID NO: 795050 - RNA, 22 nt, Human
gccuggcugggcaccaggggag

SEQ ID NO: 795051 - RNA, 22 nt, Human
uccaagaguaagaggacucuuu

SEQ ID NO: 795052 - RNA, 22 nt, Human
ccagcagggcagugcccuggac

SEQ ID NO: 795053 - RNA, 22 nt, Human
ucucaagagggaggcaaucaug

SEQ ID NO: 795054 - RNA, 22 nt, Human
auucacauuuagacaucaggua

SEQ ID NO: 795055 - RNA, 22 nt, Human
aauugcauguuaaugacuaagu

SEQ ID NO: 795056 - RNA, 22 nt, Human
ugggagcagcauugccaugugc

SEQ ID NO: 795057 - RNA, 22 nt, Human
uagccaguuucuuuaacagcaa

SEQ ID NO: 795058 - RNA, 22 nt, Human
auagacaaacacgaagaugaca

SEQ ID NO: 795059 - RNA, 22 nt, Human
ucaauuucaacagcugauaaga

SEQ ID NO: 795060 - RNA, 22 nt, Human
ucuggcauuuuggcugggaaac

SEQ ID NO: 795061 - RNA, 22 nt, Human
uucccugguuaaccauuuucug

SEQ ID NO: 795062 - RNA, 22 nt, Human
aacaauuaucauauacauugca

SEQ ID NO: 795063 - RNA, 22 nt, Human
uuucacagaaaggauaacauua

SEQ ID NO: 795064 - RNA, 22 nt, Human
cacccugucaguugcaggauag

SEQ ID NO: 795065 - RNA, 22 nt, Human
aagcuuugcaccgguggcugga

SEQ ID NO: 795066 - RNA, 22 nt, Human
agcuuugaaaauccaaauuaca

SEQ ID NO: 795067 - RNA, 22 nt, Human
gucucuuagucucauuuucugc

SEQ ID NO: 795068 - RNA, 22 nt, Human
uggggccuggucagagcugcac

SEQ ID NO: 795069 - RNA, 22 nt, Human
gauucaaagacagacucauuuc

SEQ ID NO: 795070 - RNA, 22 nt, Human
uuucagaaagcugaacauauga

SEQ ID NO: 795071 - RNA, 22 nt, Human
gacuucugaauuccuaucaggu

SEQ ID NO: 795072 - RNA, 22 nt, Human
cucuccagggguagaugccuuc

SEQ ID NO: 795073 - RNA, 19 nt, Human
ucccucccuguaaucucac

SEQ ID NO: 795074 - RNA, 22 nt, Human
ccucacaugaauguaagcucca

SEQ ID NO: 795075 - RNA, 21 nt, Human
aggcuguccuuugccagcccu

SEQ ID NO: 795076 - RNA, 22 nt, Human
aaaagguaguugccaaauaagg

SEQ ID NO: 795077 - RNA, 22 nt, Human
ggguccaggucuucaggcagag

SEQ ID NO: 795078 - RNA, 22 nt, Human
cagcacugcugcuguacacaca

SEQ ID NO: 795079 - RNA, 22 nt, Human
uacaaagucagaauaacaggug

SEQ ID NO: 795080 - RNA, 22 nt, Human
auacuuugcuacauuguacauu

SEQ ID NO: 795081 - RNA, 20 nt, Human
gcaaaauaggcucuguuggu

SEQ ID NO: 795082 - RNA, 21 nt, Human
agccagcuaucacacagcauu

SEQ ID NO: 795083 - RNA, 23 nt, Human
ccucaaauguagccuuuuuccca

SEQ ID NO: 795084 - RNA, 22 nt, Human
aggagaaguaaggcuagaugau

SEQ ID NO: 795085 - RNA, 22 nt, Human
uagauuucgcugcaucucaauc

SEQ ID NO: 795086 - RNA, 18 nt, Human
ggguccccagcugcaggg

SEQ ID NO: 795087 - RNA, 22 nt, Human
ucauuauaaacauaugcuaaag

SEQ ID NO: 795088 - RNA, 22 nt, Human
cacacagggagaaagaaagccu

SEQ ID NO: 795089 - RNA, 21 nt, Human
ccuggcugcacaguugcuggu

SEQ ID NO: 795090 - RNA, 22 nt, Human
augcaugcauuguuuaucaugg

SEQ ID NO: 795091 - RNA, 22 nt, Human
caggaaugccaaccagugcaug

SEQ ID NO: 795092 - RNA, 22 nt, Human
aaugaacgguguccaucuguuu

SEQ ID NO: 795093 - RNA, 22 nt, Human
uucucaacucucaagagaagcu

SEQ ID NO: 795094 - RNA, 22 nt, Human
aggcuucagccuagagcuggag

SEQ ID NO: 795095 - RNA, 22 nt, Human
gcaggcuguagacaccaaacua

SEQ ID NO: 795096 - RNA, 22 nt, Human
cacaguaaccccaggacuggga

SEQ ID NO: 795097 - RNA, 22 nt, Human
cagaggccagggggcucacaaa

SEQ ID NO: 795098 - RNA, 21 nt, Human
ugcagugucccuaacaguggu

SEQ ID NO: 795099 - RNA, 22 nt, Human
ugcacacaguggacaagucuug

SEQ ID NO: 795100 - RNA, 22 nt, Human
auacaucaccuauauauucaca

SEQ ID NO: 795101 - RNA, 22 nt, Human
auaacauggaguuugucauuua

SEQ ID NO: 795102 - RNA, 22 nt, Human
uagcauuuauuccagauuugga

SEQ ID NO: 795103 - RNA, 22 nt, Human
uuauuucauguaaaauuuaugu

SEQ ID NO: 795104 - RNA, 22 nt, Human
gcuggccacacugcugauggag

SEQ ID NO: 795105 - RNA, 22 nt, Human
ugcagaggagcuggaaggcugg

SEQ ID NO: 795106 - RNA, 22 nt, Human
aguguuuuuggguagggugagu

SEQ ID NO: 795107 - RNA, 22 nt, Human
uccucagggguuucagguguac

SEQ ID NO: 795108 - RNA, 22 nt, Human
aaugccuugccugcuacaacuu

SEQ ID NO: 795109 - RNA, 22 nt, Human
uuucuaaguaaacacagcauac

SEQ ID NO: 795110 - RNA, 22 nt, Human
aagcaagaguuggagugauguu

SEQ ID NO: 795111 - RNA, 22 nt, Human
uuggagggucuuccacagccau

SEQ ID NO: 795112 - RNA, 22 nt, Human
cagagaagagucuggccucucu

SEQ ID NO: 795113 - RNA, 22 nt, Human
gaagcagucagcagcaccuuug

SEQ ID NO: 795114 - RNA, 22 nt, Human
gacccagcuaaccaggugggga

SEQ ID NO: 795115 - RNA, 22 nt, Human
agagaggauuuguuuuucuccu

SEQ ID NO: 795116 - RNA, 22 nt, Human
gcagcugguuaaugggagaauu

SEQ ID NO: 795117 - RNA, 22 nt, Human
cuagggucaggggccugcgucg

SEQ ID NO: 795118 - RNA, 22 nt, Human
uaaugacuguaccaaggcuuca

SEQ ID NO: 795119 - RNA, 22 nt, Human
aucaucuggguuaaugugcuca

SEQ ID NO: 795120 - RNA, 22 nt, Human
caguuuaaguagaacugagaau

SEQ ID NO: 795121 - RNA, 22 nt, Human
uggccuggcucacagugagauu

SEQ ID NO: 795122 - RNA, 22 nt, Human
caggacacuuguucuucucugc

SEQ ID NO: 795123 - RNA, 20 nt, Human
aggcugccuaaggcucugca

SEQ ID NO: 795124 - RNA, 22 nt, Human
ccugggagcuguggaaaggcug

SEQ ID NO: 795125 - RNA, 22 nt, Human
auguuuucuagaguuuaaaauc

SEQ ID NO: 795126 - RNA, 22 nt, Human
cagaggccuauccaguguccau

SEQ ID NO: 795127 - RNA, 22 nt, Human
uuccagccacuuuauacugcua

SEQ ID NO: 795128 - RNA, 22 nt, Human
augaauguaccugaaauagccu

SEQ ID NO: 795129 - RNA, 22 nt, Human
uugcaaauuauauaagggaugc

SEQ ID NO: 795130 - RNA, 22 nt, Human
uguuuuuaaaauguccugguua

SEQ ID NO: 795131 - RNA, 22 nt, Human
aagauacauuuucuucagagaa

SEQ ID NO: 795132 - RNA, 22 nt, Human
uaaaagagaauggauaacagag

SEQ ID NO: 795133 - RNA, 22 nt, Human
ucagugcuguaaacaaaaggaa

SEQ ID NO: 795134 - RNA, 22 nt, Human
caaauacaaauacgggcagcuu

SEQ ID NO: 795135 - RNA, 22 nt, Human
gggggcuggaauauccaucaac

SEQ ID NO: 795136 - RNA, 22 nt, Human
agggaagccaagccuuagagaa

SEQ ID NO: 795137 - RNA, 22 nt, Human
ugguggagagacaguguauugg

SEQ ID NO: 795138 - RNA, 22 nt, Human
gagggagugcuuucugauaguu

SEQ ID NO: 795139 - RNA, 22 nt, Human
ggcugcaagcaugcacagauac

SEQ ID NO: 795140 - RNA, 22 nt, Human
gcugugauaaaugcagauguca

SEQ ID NO: 795141 - RNA, 22 nt, Human
aacauauaaacucuuaaguuca

SEQ ID NO: 795142 - RNA, 21 nt, Human
ucuguuggaggccucucuucc

SEQ ID NO: 795143 - RNA, 22 nt, Human
uaggaaaugccagccuuccucc

SEQ ID NO: 795144 - RNA, 22 nt, Human
agcugggccugagcuggaagcu

SEQ ID NO: 795145 - RNA, 22 nt, Human
cccuccucucccuaagagucac

SEQ ID NO: 795146 - RNA, 22 nt, Human
agcaggcugcuggcguugaagu

SEQ ID NO: 795147 - RNA, 22 nt, Human
caauacaauuaccaguuaauca

SEQ ID NO: 795148 - RNA, 22 nt, Human
cagccagggagggcaaaugaga

SEQ ID NO: 795149 - RNA, 18 nt, Human
uggauugaauugagaggu

SEQ ID NO: 795150 - RNA, 22 nt, Human
ugcaggcuuuagccccauggcu

SEQ ID NO: 795151 - RNA, 22 nt, Human
ucuggagaaaguugaguuugug

SEQ ID NO: 795152 - RNA, 22 nt, Human
uggcuucugggguggccugcau

SEQ ID NO: 795153 - RNA, 22 nt, Human
ggaggugggcuaaggacucucu

SEQ ID NO: 795154 - RNA, 22 nt, Human
cagucucucuccuugcaggcgu

SEQ ID NO: 795155 - RNA, 22 nt, Human
cucucaaauguaauuugagguu

SEQ ID NO: 795156 - RNA, 22 nt, Human
agcaggcacgcucccugcgcga

SEQ ID NO: 795157 - RNA, 22 nt, Human
uaggaaaugaggccaacaugug

SEQ ID NO: 795158 - RNA, 22 nt, Human
cuuuacaaauuagcucucggga

SEQ ID NO: 795159 - RNA, 18 nt, Human
cuguugagauguggcuga

SEQ ID NO: 795160 - RNA, 22 nt, Human
aggcugagacugugcauuagug

SEQ ID NO: 795161 - RNA, 22 nt, Human
acaggaacgaauguacauuguu

SEQ ID NO: 795162 - RNA, 22 nt, Human
aggacagagggaccagagccca

SEQ ID NO: 795163 - RNA, 22 nt, Human
auuuauuauugugguuacuucu

SEQ ID NO: 795164 - RNA, 22 nt, Human
gaccugcuccacgacaaguggu

SEQ ID NO: 795165 - RNA, 22 nt, Human
ggagggcugccagguggagcgg

SEQ ID NO: 795166 - RNA, 22 nt, Human
uaauuauuugaagacauuagag

SEQ ID NO: 795167 - RNA, 22 nt, Human
ucaggaaggcuucacacgagug

SEQ ID NO: 795168 - RNA, 22 nt, Human
agucucuugcacauuguauuaa

SEQ ID NO: 795169 - RNA, 22 nt, Human
cagggacaauggcagagccuga

SEQ ID NO: 795170 - RNA, 22 nt, Human
ugcuggcuggaucagagauugg

SEQ ID NO: 795171 - RNA, 22 nt, Human
cuggcagaggauggggacccag

SEQ ID NO: 795172 - RNA, 22 nt, Human
gacaaacugaaguauauuuaga

SEQ ID NO: 795173 - RNA, 22 nt, Human
auuauaggcuugagccaccgug

SEQ ID NO: 795174 - RNA, 22 nt, Human
gcagaagcugggcagcgaggug

SEQ ID NO: 795175 - RNA, 22 nt, Human
auuuuccucugguuuccccaga

SEQ ID NO: 795176 - RNA, 22 nt, Human
ggagagcugguauaugaagaca

SEQ ID NO: 795177 - RNA, 22 nt, Human
ucugcagcacuuaauguuucgu

SEQ ID NO: 795178 - RNA, 22 nt, Human
aguuggagugaacaugagauug

SEQ ID NO: 795179 - RNA, 22 nt, Human
aaaugucuguaggggcugcagg

SEQ ID NO: 795180 - RNA, 22 nt, Human
auacaaaguauugauccugagu

SEQ ID NO: 795181 - RNA, 22 nt, Human
guccucugggcuuugagcaguc

SEQ ID NO: 795182 - RNA, 22 nt, Human
uuguuuacaaguuacucagucu

SEQ ID NO: 795183 - RNA, 22 nt, Human
aggcagugugggccaagcuucc

SEQ ID NO: 795184 - RNA, 22 nt, Human
uucuuugcccuuaaugaaauaa

SEQ ID NO: 795185 - RNA, 22 nt, Human
gucugcucaugcuaccgcgggc

SEQ ID NO: 795186 - RNA, 22 nt, Human
agggcuggccacaugauuuggu

SEQ ID NO: 795187 - RNA, 22 nt, Human
acagcagaccccagugccaugg

SEQ ID NO: 795188 - RNA, 22 nt, Human
uuuuagauugggaaauguaaag

SEQ ID NO: 795189 - RNA, 22 nt, Human
aaauaucauuuauaacuuuuaa

SEQ ID NO: 795190 - RNA, 22 nt, Human
cagcaaggguuauaucaaagau

SEQ ID NO: 795191 - RNA, 22 nt, Human
gaggcggcggccgagccuggcu

SEQ ID NO: 795192 - RNA, 22 nt, Human
cugcacugcugaucccaggucu

SEQ ID NO: 795193 - RNA, 22 nt, Human
ucccuagguccuagucacagua

SEQ ID NO: 795194 - RNA, 22 nt, Human
auuauucaaucauauuaaaagu

SEQ ID NO: 795195 - RNA, 22 nt, Human
aaauuagucauguuguauuacu

SEQ ID NO: 795196 - RNA, 22 nt, Human
uccaggauugucagccagaagg

SEQ ID NO: 795197 - RNA, 22 nt, Human
gagcugggaguuauagcauguu

SEQ ID NO: 795198 - RNA, 16 nt, Human
ggcacuggcagguccu

SEQ ID NO: 795199 - RNA, 22 nt, Human
aucuuugggauccugauuuacu

SEQ ID NO: 795200 - RNA, 22 nt, Human
gcugggagucgcgucuguggcc

SEQ ID NO: 795201 - RNA, 22 nt, Human
gcagaagcugggagaagggauu

SEQ ID NO: 795202 - RNA, 21 nt, Human
uuguacacccacagaucagcc

SEQ ID NO: 795203 - RNA, 22 nt, Human
aaaucagaaaauauggagagga

SEQ ID NO: 795204 - RNA, 22 nt, Human
caauuucauggauaaaagaugu

SEQ ID NO: 795205 - RNA, 22 nt, Human
acugccaaugguaguuugaugg

SEQ ID NO: 795206 - RNA, 22 nt, Human
uuugaucucccagacuaaggag

SEQ ID NO: 795207 - RNA, 22 nt, Human
gcccugacacuuugcagcugag

SEQ ID NO: 795208 - RNA, 22 nt, Human
cuucuaauucuuauguaagcuu

SEQ ID NO: 795209 - RNA, 22 nt, Human
aggccacaguugaggccagcaa

SEQ ID NO: 795210 - RNA, 22 nt, Human
aggccucaguucuugccaggug

SEQ ID NO: 795211 - RNA, 22 nt, Human
cagcccacuucccagcaccuac

SEQ ID NO: 795212 - RNA, 22 nt, Human
accacaggggaggaaugaugcc

SEQ ID NO: 795213 - RNA, 22 nt, Human
cagggagaggcaucauagggaa

SEQ ID NO: 795214 - RNA, 22 nt, Human
uuuaauaucucacacuuccaug

SEQ ID NO: 795215 - RNA, 22 nt, Human
auuuacugagcagcuaccaugu

SEQ ID NO: 795216 - RNA, 23 nt, Human
ugcuggagaagcaaaguucugag

SEQ ID NO: 795217 - RNA, 22 nt, Human
aagccaggagcgaggccucggc

SEQ ID NO: 795218 - RNA, 22 nt, Human
cuuuuuauagcuauguccuaug

SEQ ID NO: 795219 - RNA, 18 nt, Human
cugcugugucgucugggc

SEQ ID NO: 795220 - RNA, 22 nt, Human
uuuggugagcugcgagugagga

SEQ ID NO: 795221 - RNA, 22 nt, Human
cugcacaguaagcuucagagau

SEQ ID NO: 795222 - RNA, 22 nt, Human
acuauacauugaauguuaaggu

SEQ ID NO: 795223 - RNA, 22 nt, Human
gagucagaagaaacuauuuaca

SEQ ID NO: 795224 - RNA, 22 nt, Human
cagcagggcccccgggugcgcc

SEQ ID NO: 795225 - RNA, 22 nt, Human
gagaauacaaccagaagcugag

SEQ ID NO: 795226 - RNA, 22 nt, Human
caucaggaauaaaugaggcugu

SEQ ID NO: 795227 - RNA, 22 nt, Human
ucuggggucaccuggggugcuu

SEQ ID NO: 795228 - RNA, 22 nt, Human
acugcagcuggugguggcucug

SEQ ID NO: 795229 - RNA, 22 nt, Human
ggcagggagagcaugcugauaa

SEQ ID NO: 795230 - RNA, 22 nt, Human
uauuaaauauaucuguuaguug

SEQ ID NO: 795231 - RNA, 20 nt, Human
caaauucuguugaauacacc

SEQ ID NO: 795232 - RNA, 19 nt, Human
gagaaaccccgucuuuagg

SEQ ID NO: 795233 - RNA, 19 nt, Human
cagucccaaauucuuguca

SEQ ID NO: 795234 - RNA, 21 nt, Human
uagaaagucaaagcuaucagc

SEQ ID NO: 795235 - RNA, 22 nt, Human
cucuucaggauggcuugugaug

SEQ ID NO: 795236 - RNA, 18 nt, Human
ucaguauuaccucaggca

SEQ ID NO: 795237 - RNA, 21 nt, Human
uagggcaggcauuggaagaga

SEQ ID NO: 795238 - RNA, 22 nt, Human
aggagugcaaauaguccagaga

SEQ ID NO: 795239 - RNA, 22 nt, Human
cugggagcugaggcugacgcug

SEQ ID NO: 795240 - RNA, 22 nt, Human
ccuggccucuccgaguaaccug

SEQ ID NO: 795241 - RNA, 22 nt, Human
gggugcaugguguaugacugga

SEQ ID NO: 795242 - RNA, 22 nt, Human
augcagaaagagaauguaaugu

SEQ ID NO: 795243 - RNA, 22 nt, Human
gcugcuuccuuuccugcugacc

SEQ ID NO: 795244 - RNA, 22 nt, Human
cagcugaacauguagagcaucu

SEQ ID NO: 795245 - RNA, 22 nt, Human
aagcuuugggcagaagaggauu

SEQ ID NO: 795246 - RNA, 22 nt, Human
aggcugaggggcgagggacccu

SEQ ID NO: 795247 - RNA, 22 nt, Human
cacuuaaaucuguugagaaaaa

SEQ ID NO: 795248 - RNA, 22 nt, Human
augcaacaggucagccaggaag

SEQ ID NO: 795249 - RNA, 22 nt, Human
agugaggggcagcugagugggc

SEQ ID NO: 795250 - RNA, 22 nt, Human
uagcuucuaauacuuaccaauu

SEQ ID NO: 795251 - RNA, 22 nt, Human
acagcaaaggacgaacacucug

SEQ ID NO: 795252 - RNA, 22 nt, Human
auucucauuuuuauagaugaga

SEQ ID NO: 795253 - RNA, 22 nt, Human
ggagcccaagucugcacucggc

SEQ ID NO: 795254 - RNA, 21 nt, Human
uuucauugaaugagauaaggu

SEQ ID NO: 795255 - RNA, 22 nt, Human
ccugccagauccccugagcuga

SEQ ID NO: 795256 - RNA, 22 nt, Human
aaagaacaucggagugggcggg

SEQ ID NO: 795257 - RNA, 22 nt, Human
guuuucauuacugcugugauuu

SEQ ID NO: 795258 - RNA, 22 nt, Human
aggcuacagauacagaggcuac

SEQ ID NO: 795259 - RNA, 22 nt, Human
ucaccuuaacaaucugaccauc

SEQ ID NO: 795260 - RNA, 22 nt, Human
aagcaauaaucccaaagugcug

SEQ ID NO: 795261 - RNA, 22 nt, Human
ugcauuaagcacacuuuugaau

SEQ ID NO: 795262 - RNA, 22 nt, Human
ucuuugggagaaggggucccag

SEQ ID NO: 795263 - RNA, 22 nt, Human
uuucaucuuauuugucuacauc

SEQ ID NO: 795264 - RNA, 22 nt, Human
gcccuugacaguggcagaagca

SEQ ID NO: 795265 - RNA, 22 nt, Human
uucauuguagcuugacuaauua

SEQ ID NO: 795266 - RNA, 22 nt, Human
uuuacaagaaaucaugaugcua

SEQ ID NO: 795267 - RNA, 22 nt, Human
auauuuucacagaacuugcaaa

SEQ ID NO: 795268 - RNA, 15 nt, Human
ccaggcugggugagc

SEQ ID NO: 795269 - RNA, 22 nt, Human
ucccugaagccagggaaggaag

SEQ ID NO: 795270 - RNA, 22 nt, Human
uucauugauuuccuuggaauaa

SEQ ID NO: 795271 - RNA, 22 nt, Human
uaggacaguuuacuuugguuac

SEQ ID NO: 795272 - RNA, 22 nt, Human
agccacagucaaccuguccaua

SEQ ID NO: 795273 - RNA, 21 nt, Human
ccugccaggaaacugaguguc

SEQ ID NO: 795274 - RNA, 22 nt, Human
ccucaggggucacugugaggag

SEQ ID NO: 795275 - RNA, 22 nt, Human
cucaagucuauugauaagugca

SEQ ID NO: 795276 - RNA, 21 nt, Human
gcugccaccgcgugcuccagg

SEQ ID NO: 795277 - RNA, 22 nt, Human
uagaaaguagggaagguaggau

SEQ ID NO: 795278 - RNA, 22 nt, Human
auuucuuucuggccacgguuuu

SEQ ID NO: 795279 - RNA, 20 nt, Human
auacacauucauagaaaaau

SEQ ID NO: 795280 - RNA, 21 nt, Human
aaagagcuuuugugcuaguua

SEQ ID NO: 795281 - RNA, 22 nt, Human
uccugccuagcaggugaccuau

SEQ ID NO: 795282 - RNA, 22 nt, Human
uuauuuccaaacuggauauacc

SEQ ID NO: 795283 - RNA, 22 nt, Human
acacaucuauauugcaucugca

SEQ ID NO: 795284 - RNA, 22 nt, Human
caggaaaugcguaguugaacuu

SEQ ID NO: 795285 - RNA, 19 nt, Human
agcaggcagguggcccagg

SEQ ID NO: 795286 - RNA, 19 nt, Human
uuggaugcuaccagguacc

SEQ ID NO: 795287 - RNA, 22 nt, Human
uccagcugacaguucaaaauga

SEQ ID NO: 795288 - RNA, 22 nt, Human
uuccuggggcuuagcaauggag

SEQ ID NO: 795289 - RNA, 22 nt, Human
aggacaggauugagcugaacug

SEQ ID NO: 795290 - RNA, 20 nt, Human
ucaaagacaagcucucaucc

SEQ ID NO: 795291 - RNA, 22 nt, Human
auaguguuacccuucuuaaagu

SEQ ID NO: 795292 - RNA, 22 nt, Human
uaaugacuaagcaaucaugaau

SEQ ID NO: 795293 - RNA, 19 nt, Human
cgccuggcaggcccugcgc

SEQ ID NO: 795294 - RNA, 22 nt, Human
cacacaugucucuccaugcucu

SEQ ID NO: 795295 - RNA, 22 nt, Human
uaggcugggcauucuggccagg

SEQ ID NO: 795296 - RNA, 22 nt, Human
acggaaugagucuugaaaagug

SEQ ID NO: 795297 - RNA, 22 nt, Human
ccuuucuacagaugccucuugc

SEQ ID NO: 795298 - RNA, 22 nt, Human
ucaggcucagguuaggggccaa

SEQ ID NO: 795299 - RNA, 19 nt, Human
ucagugucccuguuaauau

SEQ ID NO: 795300 - RNA, 22 nt, Human
guuguuuucagcaguuuaugac

SEQ ID NO: 795301 - RNA, 22 nt, Human
aaaagcaaggcagucugucuga

SEQ ID NO: 795302 - RNA, 22 nt, Human
ugcuggcugggcugcuggagac

SEQ ID NO: 795303 - RNA, 22 nt, Human
uuugaugaaagcuacuauuuac

SEQ ID NO: 795304 - RNA, 22 nt, Human
acauucuguuuccccaaagaga

SEQ ID NO: 795305 - RNA, 23 nt, Human
uacagcaaggacaacauaggugg

SEQ ID NO: 795306 - RNA, 22 nt, Human
uacuacaagggcccuaaaaggu

SEQ ID NO: 795307 - RNA, 22 nt, Human
ccaggagucaauaaaggaagcu

SEQ ID NO: 795308 - RNA, 22 nt, Human
cucucagggcagguggccuuuc

SEQ ID NO: 795309 - RNA, 22 nt, Human
aaacugcagccuugaguucagg

SEQ ID NO: 795310 - RNA, 22 nt, Human
aaagaacuaccuguaugauauu

SEQ ID NO: 795311 - RNA, 22 nt, Human
uaggaaauaauucacucuggcu

SEQ ID NO: 795312 - RNA, 22 nt, Human
cuggucaccuccuucccagcua

SEQ ID NO: 795313 - RNA, 20 nt, Human
uccagcugggaacagcugau

SEQ ID NO: 795314 - RNA, 22 nt, Human
ggaugggaacuugguagggcau

SEQ ID NO: 795315 - RNA, 22 nt, Human
cagcucagucuggagagaugca

SEQ ID NO: 795316 - RNA, 22 nt, Human
cuuccucuauguucagguagaa

SEQ ID NO: 795317 - RNA, 22 nt, Human
gagccugggacugggggucaug

SEQ ID NO: 795318 - RNA, 22 nt, Human
aagggggcgaagacgugauuga

SEQ ID NO: 795319 - RNA, 22 nt, Human
gugcaaauguaauugcaguuuu

SEQ ID NO: 795320 - RNA, 22 nt, Human
uacagaggagaccaaggcucag

SEQ ID NO: 795321 - RNA, 22 nt, Human
ucucugcccauccucaguccac

SEQ ID NO: 795322 - RNA, 22 nt, Human
gugacucuuaaagcaaaucuug

SEQ ID NO: 795323 - RNA, 22 nt, Human
cuggucagcugaagccccacac

SEQ ID NO: 795324 - RNA, 22 nt, Human
gcaguuugaaaguaugagucca

SEQ ID NO: 795325 - RNA, 22 nt, Human
cagccagccucucaaccaugca

SEQ ID NO: 795326 - RNA, 22 nt, Human
aaugagaagccuagguguacug

SEQ ID NO: 795327 - RNA, 18 nt, Human
agcccagcggagugaauc

SEQ ID NO: 795328 - RNA, 22 nt, Human
aaaaucuugacuguuuuuagaa

SEQ ID NO: 795329 - RNA, 22 nt, Human
accugagggcccaaacuuggua

SEQ ID NO: 795330 - RNA, 22 nt, Human
caauguuugugaucuacugacu

SEQ ID NO: 795331 - RNA, 22 nt, Human
acacauuuuguuaaacccugug

SEQ ID NO: 795332 - RNA, 22 nt, Human
cagcugcccaggccaccuggag

SEQ ID NO: 795333 - RNA, 22 nt, Human
cagggccauuggaacaaagagg

SEQ ID NO: 795334 - RNA, 22 nt, Human
aacaaguucuaagugucuacuu

SEQ ID NO: 795335 - RNA, 22 nt, Human
aagaacuaucucuggcuguagg

SEQ ID NO: 795336 - RNA, 22 nt, Human
gcugagggcuguaacagcagag

SEQ ID NO: 795337 - RNA, 22 nt, Human
uacauacaguggaugcuuuagg

SEQ ID NO: 795338 - RNA, 22 nt, Human
ugggccacaagccaugggacca

SEQ ID NO: 795339 - RNA, 21 nt, Human
uuucuuaucuguaaaguggga

SEQ ID NO: 795340 - RNA, 22 nt, Human
cacauucuuucacaguucugaa

SEQ ID NO: 795341 - RNA, 22 nt, Human
aggggagccgaggggcaucugu

SEQ ID NO: 795342 - RNA, 22 nt, Human
ugaugaaacugagguuccaaga

SEQ ID NO: 795343 - RNA, 22 nt, Human
gccuggcuccuaaggacuggcu

SEQ ID NO: 795344 - RNA, 22 nt, Human
uaagucauaagucaugauguua

SEQ ID NO: 795345 - RNA, 22 nt, Human
uauucacauguacauaugcuca

SEQ ID NO: 795346 - RNA, 22 nt, Human
acaaaguaggucaucaaagcuc

SEQ ID NO: 795347 - RNA, 22 nt, Human
acaggugaccugcucauaugaa

SEQ ID NO: 795348 - RNA, 22 nt, Human
aaagcuggccucucaggcuuua

SEQ ID NO: 795349 - RNA, 21 nt, Human
gaugguagccucauagaagua

SEQ ID NO: 795350 - RNA, 22 nt, Human
caggcagaaugagauuacuuca

SEQ ID NO: 795351 - RNA, 22 nt, Human
uguguucugaaggagaagagug

SEQ ID NO: 795352 - RNA, 22 nt, Human
caggaaccauuuucucuuuaua

SEQ ID NO: 795353 - RNA, 22 nt, Human
agaggcugugcagagggagugc

SEQ ID NO: 795354 - RNA, 22 nt, Human
gccuuuccugcucuggcauuca

SEQ ID NO: 795355 - RNA, 21 nt, Human
gcagucacucgguuggcuacc

SEQ ID NO: 795356 - RNA, 22 nt, Human
guugaguggguuaggaugcuga

SEQ ID NO: 795357 - RNA, 22 nt, Human
uggggccacagccuccuagcuu

SEQ ID NO: 795358 - RNA, 22 nt, Human
gugcagagugucuguggacuga

SEQ ID NO: 795359 - RNA, 22 nt, Human
caaggcaggaagccugucuuau

SEQ ID NO: 795360 - RNA, 22 nt, Human
ggcccugggcccucuagcuugu

SEQ ID NO: 795361 - RNA, 22 nt, Human
gagcacagcugucuugcaagcu

SEQ ID NO: 795362 - RNA, 22 nt, Human
cugaagagaaagggagcucuuc

SEQ ID NO: 795363 - RNA, 22 nt, Human
ucccaggguccucuucuggaau

SEQ ID NO: 795364 - RNA, 22 nt, Human
ggugaagggccuuaggagacag

SEQ ID NO: 795365 - RNA, 22 nt, Human
ccuuccccagugauucucucag

SEQ ID NO: 795366 - RNA, 22 nt, Human
ggagccagcagggugacacuga

SEQ ID NO: 795367 - RNA, 22 nt, Human
ugaaaucaguaugucuuucuca

SEQ ID NO: 795368 - RNA, 22 nt, Human
aggaaaacagaccaaggagcuc

SEQ ID NO: 795369 - RNA, 19 nt, Human
ccuccccuuggaccagcaa

SEQ ID NO: 795370 - RNA, 22 nt, Human
uuucugcaaguguagauaccca

SEQ ID NO: 795371 - RNA, 22 nt, Human
ugaggagccacucuagcaguca

SEQ ID NO: 795372 - RNA, 22 nt, Human
uucuuaagacugcaaaucaacc

SEQ ID NO: 795373 - RNA, 22 nt, Human
ugcuagugugugagauguucaa

SEQ ID NO: 795374 - RNA, 22 nt, Human
gccuggaggggccaggguggua

SEQ ID NO: 795375 - RNA, 22 nt, Human
auauauuuugaauagccucugu

SEQ ID NO: 795376 - RNA, 22 nt, Human
aggaaagcucccaguagggcuc

SEQ ID NO: 795377 - RNA, 21 nt, Human
cacucaauaaaugucauaugc

SEQ ID NO: 795378 - RNA, 22 nt, Human
aucagaauacuaucaacaguga

SEQ ID NO: 795379 - RNA, 22 nt, Human
agcuuuaccugccuuggggcac

SEQ ID NO: 795380 - RNA, 22 nt, Human
cccugaaauccugugcucugug

SEQ ID NO: 795381 - RNA, 22 nt, Human
cuccuggaggcuccaagggaga

SEQ ID NO: 795382 - RNA, 22 nt, Human
ugauccuauuucaguguauguu

SEQ ID NO: 795383 - RNA, 22 nt, Human
ugggggugguucuugccuccag

SEQ ID NO: 795384 - RNA, 21 nt, Human
agcugagguaaggcaagagag

SEQ ID NO: 795385 - RNA, 22 nt, Human
aucaaagugguuuucugugcuu

SEQ ID NO: 795386 - RNA, 22 nt, Human
gcaggccacaguggagucucug

SEQ ID NO: 795387 - RNA, 22 nt, Human
agaggcugucccuugcuauucc

SEQ ID NO: 795388 - RNA, 22 nt, Human
ugaaauauuuagagaguaaguu

SEQ ID NO: 795389 - RNA, 22 nt, Human
gccaagccuguagacacaagcu

SEQ ID NO: 795390 - RNA, 22 nt, Human
gcugccucugcacagcucacuc

SEQ ID NO: 795391 - RNA, 22 nt, Human
cucuggucagugaauuccuagu

SEQ ID NO: 795392 - RNA, 22 nt, Human
cugccuuccaaccccagacucc

SEQ ID NO: 795393 - RNA, 22 nt, Human
cuuuggaggaccuaugugcaau

SEQ ID NO: 795394 - RNA, 18 nt, Human
aguaggcacugugggguu

SEQ ID NO: 795395 - RNA, 22 nt, Human
gcuuaaauuguuuguggauagu

SEQ ID NO: 795396 - RNA, 22 nt, Human
uucugaagcucccuuuuguagu

SEQ ID NO: 795397 - RNA, 22 nt, Human
cagugcuuuucaaaguucuaug

SEQ ID NO: 795398 - RNA, 22 nt, Human
aaagccaggcuggccugggguu

SEQ ID NO: 795399 - RNA, 22 nt, Human
ggggccagagaggacccaggug

SEQ ID NO: 795400 - RNA, 22 nt, Human
guauauaugugugaacauguau

SEQ ID NO: 795401 - RNA, 22 nt, Human
ucuagaacuucucuaaaaugaa

SEQ ID NO: 795402 - RNA, 22 nt, Human
caggguggcacaucacagcauu

SEQ ID NO: 795403 - RNA, 22 nt, Human
ugccuucuugaauaugguucuu

SEQ ID NO: 795404 - RNA, 22 nt, Human
ccagcugucuugagaggaggca

SEQ ID NO: 795405 - RNA, 22 nt, Human
auaugcuuacacuacaagauga

SEQ ID NO: 795406 - RNA, 22 nt, Human
aucaaaaugcuccagugauggu

SEQ ID NO: 795407 - RNA, 22 nt, Human
gcaggucucaaucugagcaggc

SEQ ID NO: 795408 - RNA, 22 nt, Human
uggcagagcccagacuccaguc

SEQ ID NO: 795409 - RNA, 22 nt, Human
aaucauaauuuugugaauguag

SEQ ID NO: 795410 - RNA, 22 nt, Human
cccaggcacauccacucuguga

SEQ ID NO: 795411 - RNA, 22 nt, Human
ucucccuagggccgcuggcuaa

SEQ ID NO: 795412 - RNA, 22 nt, Human
ucuggcugaauuagccuugggu

SEQ ID NO: 795413 - RNA, 22 nt, Human
cacugcagccucgcucuccuga

SEQ ID NO: 795414 - RNA, 22 nt, Human
uggacaggcaagcaagacauac

SEQ ID NO: 795415 - RNA, 22 nt, Human
cagcuguucacauuuccaaaac

SEQ ID NO: 795416 - RNA, 22 nt, Human
gugagcauauauguaaucguuu

SEQ ID NO: 795417 - RNA, 22 nt, Human
cauguaaagaauuucacacaag

SEQ ID NO: 795418 - RNA, 22 nt, Human
agaugugggcaauggaauggag

SEQ ID NO: 795419 - RNA, 22 nt, Human
aagcagcuuaaauuagagccug

SEQ ID NO: 795420 - RNA, 22 nt, Human
aagccacagaucguucugucac

SEQ ID NO: 795421 - RNA, 22 nt, Human
augguggacucuugauucaggc

SEQ ID NO: 795422 - RNA, 22 nt, Human
uggcagggaguucguucacaac

SEQ ID NO: 795423 - RNA, 20 nt, Human
ugcauuaaguggcauugagc

SEQ ID NO: 795424 - RNA, 22 nt, Human
aacagcagggaugggguggcca

SEQ ID NO: 795425 - RNA, 22 nt, Human
ugucaugguagcugaaggaugu

SEQ ID NO: 795426 - RNA, 22 nt, Human
aauauauuugaaucaggaacaa

SEQ ID NO: 795427 - RNA, 22 nt, Human
ggaucuucagccagcaggugcc

SEQ ID NO: 795428 - RNA, 22 nt, Human
uacuacuuucccccacauauuu

SEQ ID NO: 795429 - RNA, 22 nt, Human
ccaggcuuucccagccucucca

SEQ ID NO: 795430 - RNA, 20 nt, Human
aaucacaguuaacucuuucu

SEQ ID NO: 795431 - RNA, 22 nt, Human
uucauugaaauacagucuugac

SEQ ID NO: 795432 - RNA, 22 nt, Human
cugcagcuuuuugugcuuguaa

SEQ ID NO: 795433 - RNA, 22 nt, Human
ugccugggacaugcuguggacu

SEQ ID NO: 795434 - RNA, 22 nt, Human
ucagauguugaaaaggaaaagu

SEQ ID NO: 795435 - RNA, 22 nt, Human
cauucagagcuuucuuaucaua

SEQ ID NO: 795436 - RNA, 22 nt, Human
acagugucaugucguguucccc

SEQ ID NO: 795437 - RNA, 22 nt, Human
ccugguggagaggggcggagcg

SEQ ID NO: 795438 - RNA, 22 nt, Human
gcccagcaggacagagugguuu

SEQ ID NO: 795439 - RNA, 21 nt, Human
caguccugcaaauaauucuuu

SEQ ID NO: 795440 - RNA, 22 nt, Human
uggccaggaggcugcuucugac

SEQ ID NO: 795441 - RNA, 22 nt, Human
aaacaugcuggauuuagaauau

SEQ ID NO: 795442 - RNA, 22 nt, Human
ugggcuccguugccuggggcag

SEQ ID NO: 795443 - RNA, 22 nt, Human
agugugagaugauugaggagca

SEQ ID NO: 795444 - RNA, 22 nt, Human
gcccagccagagcugugugaug

SEQ ID NO: 795445 - RNA, 22 nt, Human
caggcuugcugcuagagcacuu

SEQ ID NO: 795446 - RNA, 22 nt, Human
aucacaguggcuaccucuggau

SEQ ID NO: 795447 - RNA, 19 nt, Human
agcaggccaggcagguggc

SEQ ID NO: 795448 - RNA, 20 nt, Human
aguaccuuuuguauguuacc

SEQ ID NO: 795449 - RNA, 21 nt, Human
uuacuaaacaaaacaugcagg

SEQ ID NO: 795450 - RNA, 23 nt, Human
uuucacauuuacuguuagauggc

SEQ ID NO: 795451 - RNA, 22 nt, Human
cuccucuccaucagcgccaccc

SEQ ID NO: 795452 - RNA, 22 nt, Human
ugcuuaaucaagaagccuauuu

SEQ ID NO: 795453 - RNA, 19 nt, Human
acagcagggauuuuuggag

SEQ ID NO: 795454 - RNA, 22 nt, Human
uggcagauuuucucuggaggag

SEQ ID NO: 795455 - RNA, 22 nt, Human
uacaauguuaaggaaagagaga

SEQ ID NO: 795456 - RNA, 22 nt, Human
acauucuuaacaguuaaaaacu

SEQ ID NO: 795457 - RNA, 22 nt, Human
gccugccuuuguaugacccuga

SEQ ID NO: 795458 - RNA, 23 nt, Human
cugcaagguacaagaugcuggau

SEQ ID NO: 795459 - RNA, 22 nt, Human
guggcucuugcauggggucucu

SEQ ID NO: 795460 - RNA, 22 nt, Human
aaguuucaugauguaauuauug

SEQ ID NO: 795461 - RNA, 22 nt, Human
cuucuuaaaguugucacagcug

SEQ ID NO: 795462 - RNA, 22 nt, Human
cugugucucuccuuacaagacu

SEQ ID NO: 795463 - RNA, 15 nt, Human
cagucccagggaccc

SEQ ID NO: 795464 - RNA, 22 nt, Human
gcuucccauuauggaaacucuu

SEQ ID NO: 795465 - RNA, 22 nt, Human
gcaauaaagauuuuacugucag

SEQ ID NO: 795466 - RNA, 22 nt, Human
ugaggugguuacuguggugcuc

SEQ ID NO: 795467 - RNA, 22 nt, Human
aaggggccucacagaugggcuu

SEQ ID NO: 795468 - RNA, 22 nt, Human
ucuuauuuuuuaaugacagaga

SEQ ID NO: 795469 - RNA, 21 nt, Human
acagaugggaugagcacacug

SEQ ID NO: 795470 - RNA, 22 nt, Human
agcccuuuccaauuugauuuau

SEQ ID NO: 795471 - RNA, 22 nt, Human
ccccagagaaagucagcagcau

SEQ ID NO: 795472 - RNA, 22 nt, Human
uggcagcuacagacagagguga

SEQ ID NO: 795473 - RNA, 22 nt, Human
acagaggcugcgcuugggaacg

SEQ ID NO: 795474 - RNA, 22 nt, Human
uucagcagugcagacacccagu

SEQ ID NO: 795475 - RNA, 22 nt, Human
cagcccugcagagggcgcuccu

SEQ ID NO: 795476 - RNA, 23 nt, Human
gaggagggucugacaaguguagc

SEQ ID NO: 795477 - RNA, 23 nt, Human
agucaagaugcaucugugaggaa

SEQ ID NO: 795478 - RNA, 22 nt, Human
cugccucucagccugaccgcca

SEQ ID NO: 795479 - RNA, 22 nt, Human
accuccuggugcccaaguguuu

SEQ ID NO: 795480 - RNA, 22 nt, Human
ucagcccugggcuuccucaugg

SEQ ID NO: 795481 - RNA, 22 nt, Human
cccaggcugucuguccuuugcu

SEQ ID NO: 795482 - RNA, 22 nt, Human
gacccuccacucacugcugugu

SEQ ID NO: 795483 - RNA, 22 nt, Human
acaacacagcuuuccucaaguu

SEQ ID NO: 795484 - RNA, 22 nt, Human
uuccugguuuauggaaagcaug

SEQ ID NO: 795485 - RNA, 22 nt, Human
cugcagcuaaggaaugugguug

SEQ ID NO: 795486 - RNA, 22 nt, Human
agagcugggugguggugacuca

SEQ ID NO: 795487 - RNA, 22 nt, Human
uugcaaaucuuugccagaaggc

SEQ ID NO: 795488 - RNA, 22 nt, Human
uagcaggcucgcaauaaaaugu

SEQ ID NO: 795489 - RNA, 22 nt, Human
acauuugagcaucuacuaagug

SEQ ID NO: 795490 - RNA, 22 nt, Human
ucaggagcagccuuggagagcg

SEQ ID NO: 795491 - RNA, 22 nt, Human
agagggagcccagucauagcug

SEQ ID NO: 795492 - RNA, 20 nt, Human
ugccccaggccugcaccugc

SEQ ID NO: 795493 - RNA, 20 nt, Human
gccacaguuuucucacugca

SEQ ID NO: 795494 - RNA, 22 nt, Human
ugccagcuccgaggagcugcag

SEQ ID NO: 795495 - RNA, 22 nt, Human
ugagcagacuugaugaggcagc

SEQ ID NO: 795496 - RNA, 22 nt, Human
uuguuuuaucuuucuacagacu

SEQ ID NO: 795497 - RNA, 22 nt, Human
ugcuuaaacauacuauuuauau

SEQ ID NO: 795498 - RNA, 22 nt, Human
ugagccaggcuccaugccaccu

SEQ ID NO: 795499 - RNA, 22 nt, Human
uagcuuugaccaacgacugguc

SEQ ID NO: 795500 - RNA, 22 nt, Human
auuuccuugcaaguuucuguaa

SEQ ID NO: 795501 - RNA, 20 nt, Human
aggcccagugaauauauugc

SEQ ID NO: 795502 - RNA, 22 nt, Human
uaaaggccuaguaaguugagac

SEQ ID NO: 795503 - RNA, 22 nt, Human
agaaguuaccacauacuucucu

SEQ ID NO: 795504 - RNA, 22 nt, Human
acaagauagcuuagaagauuca

SEQ ID NO: 795505 - RNA, 22 nt, Human
uuucauugugaugcuuuuauca

SEQ ID NO: 795506 - RNA, 22 nt, Human
agaaggcuaaagaaacagauug

SEQ ID NO: 795507 - RNA, 22 nt, Human
uguuuuguagcuaauagcuauu

SEQ ID NO: 795508 - RNA, 22 nt, Human
gaggcccaaggacucugucccg

SEQ ID NO: 795509 - RNA, 22 nt, Human
aaggcuucuuuaguguccuaau

SEQ ID NO: 795510 - RNA, 22 nt, Human
uuugcauuuugauaagaucacu

SEQ ID NO: 795511 - RNA, 22 nt, Human
ucaggacaacaagacuuguuua

SEQ ID NO: 795512 - RNA, 22 nt, Human
acagacaucaucaacaucuucc

SEQ ID NO: 795513 - RNA, 22 nt, Human
gcuuccaguccucagaggcugg

SEQ ID NO: 795514 - RNA, 22 nt, Human
aguucucauugcaugagacaga

SEQ ID NO: 795515 - RNA, 22 nt, Human
uuuuggcucugcagguuugcac

SEQ ID NO: 795516 - RNA, 22 nt, Human
ugagcccagaagcccacucggc

SEQ ID NO: 795517 - RNA, 22 nt, Human
agcacuuugugcauuucugaag

SEQ ID NO: 795518 - RNA, 22 nt, Human
cccagcaggcauguugggagga

SEQ ID NO: 795519 - RNA, 22 nt, Human
ugaggccaggacccccagcagg

SEQ ID NO: 795520 - RNA, 22 nt, Human
uuggcugguuucaagaaggcau

SEQ ID NO: 795521 - RNA, 22 nt, Human
cuucuggaggacacuggcccca

SEQ ID NO: 795522 - RNA, 22 nt, Human
caggcagagguaccaagauuga

SEQ ID NO: 795523 - RNA, 22 nt, Human
caggcagaaauuuuguuucauu

SEQ ID NO: 795524 - RNA, 22 nt, Human
ugcagaugaaugcugagacacu

SEQ ID NO: 795525 - RNA, 22 nt, Human
gcugucuggcauggcguggcug

SEQ ID NO: 795526 - RNA, 22 nt, Human
cuagagaauugucuugagaguu

SEQ ID NO: 795527 - RNA, 22 nt, Human
cugugcugucuugggagccuua

SEQ ID NO: 795528 - RNA, 22 nt, Human
ucccugggaccggcagcucaca

SEQ ID NO: 795529 - RNA, 22 nt, Human
cucucuucccgugaguguugca

SEQ ID NO: 795530 - RNA, 22 nt, Human
ggagggcccugggugcagcucu

SEQ ID NO: 795531 - RNA, 22 nt, Human
uccagcagguuggucaggugca

SEQ ID NO: 795532 - RNA, 22 nt, Human
uggcagcugcaggccuccugag

SEQ ID NO: 795533 - RNA, 22 nt, Human
uaugccuggaaccuuucucuuu

SEQ ID NO: 795534 - RNA, 22 nt, Human
cugacucuccucaagcauaaau

SEQ ID NO: 795535 - RNA, 22 nt, Human
auuuaauggguagacauuguua

SEQ ID NO: 795536 - RNA, 22 nt, Human
agccugagugcuuaggacuguu

SEQ ID NO: 795537 - RNA, 22 nt, Human
gaggacagcucuaacuaaaguc

SEQ ID NO: 795538 - RNA, 22 nt, Human
acaugcuuguuuuucacaaccu

SEQ ID NO: 795539 - RNA, 22 nt, Human
uacaaaguagaaauucaguaaa

SEQ ID NO: 795540 - RNA, 22 nt, Human
ggagcaggcucugugguuucca

SEQ ID NO: 795541 - RNA, 22 nt, Human
aaggccaaggcugcagugagcc

SEQ ID NO: 795542 - RNA, 21 nt, Human
cagcuuugucugucuucgggg

SEQ ID NO: 795543 - RNA, 22 nt, Human
ucagagaaggcaauuuuauggu

SEQ ID NO: 795544 - RNA, 21 nt, Human
ccugcagcaccagaaggagau

SEQ ID NO: 795545 - RNA, 22 nt, Human
acaggggcuccgaaggugaggg

SEQ ID NO: 795546 - RNA, 22 nt, Human
augggaggcaaagaucgcagaa

SEQ ID NO: 795547 - RNA, 22 nt, Human
ucaaaggcuugugguucuggga

SEQ ID NO: 795548 - RNA, 22 nt, Human
caugaugguucuuacaaaggug

SEQ ID NO: 795549 - RNA, 22 nt, Human
ucaggccaaagaaacagcauga

SEQ ID NO: 795550 - RNA, 22 nt, Human
ggguaggagaggugucugugug

SEQ ID NO: 795551 - RNA, 21 nt, Human
cagagggcuuuucucuguucu

SEQ ID NO: 795552 - RNA, 22 nt, Human
agucacaggcaagagggcucca

SEQ ID NO: 795553 - RNA, 21 nt, Human
auguaggguuugccuucucua

SEQ ID NO: 795554 - RNA, 22 nt, Human
agggaagcaaugauuauuauuc

SEQ ID NO: 795555 - RNA, 22 nt, Human
uuuuucuggauaacuguaucuc

SEQ ID NO: 795556 - RNA, 22 nt, Human
aggaacaauugauaaacucaca

SEQ ID NO: 795557 - RNA, 22 nt, Human
ccugggucacucaggcaggcgg

SEQ ID NO: 795558 - RNA, 22 nt, Human
gcucccugcacucugcagcccu

SEQ ID NO: 795559 - RNA, 22 nt, Human
cagcugugucuaauuauggcug

SEQ ID NO: 795560 - RNA, 22 nt, Human
ggucugagugccagggagagaa

SEQ ID NO: 795561 - RNA, 22 nt, Human
gaguauuccucagucauuuugu

SEQ ID NO: 795562 - RNA, 20 nt, Human
agcuggcccccgguggccug

SEQ ID NO: 795563 - RNA, 22 nt, Human
guacauauggcacaugcuauuu

SEQ ID NO: 795564 - RNA, 22 nt, Human
cccuugggccccagcucagggc

SEQ ID NO: 795565 - RNA, 22 nt, Human
uaaacauggcuguuucaguuau

SEQ ID NO: 795566 - RNA, 22 nt, Human
agagccuggagguucugcugaa

SEQ ID NO: 795567 - RNA, 22 nt, Human
cuuuggcugggcaaagggaggu

SEQ ID NO: 795568 - RNA, 22 nt, Human
uccuuucccuuuccauccuggc

SEQ ID NO: 795569 - RNA, 22 nt, Human
uuauugcagauggugugagaga

SEQ ID NO: 795570 - RNA, 22 nt, Human
aaacuacacuuugggaccagca

SEQ ID NO: 795571 - RNA, 22 nt, Human
uuuauucagcagcagcaguggu

SEQ ID NO: 795572 - RNA, 22 nt, Human
agauuucccacuccauguauug

SEQ ID NO: 795573 - RNA, 22 nt, Human
ccacccaugugacuaccucaug

SEQ ID NO: 795574 - RNA, 22 nt, Human
gggaagagugucgguugaagug

SEQ ID NO: 795575 - RNA, 22 nt, Human
gcugccucuccugaguugacag

SEQ ID NO: 795576 - RNA, 22 nt, Human
uaaaggcagccuaggaaguguu

SEQ ID NO: 795577 - RNA, 20 nt, Human
ucuaaaguacaguuugugug

SEQ ID NO: 795578 - RNA, 22 nt, Human
caggcaugaugggaagugccug

SEQ ID NO: 795579 - RNA, 22 nt, Human
acagcaggcccauacuggaagg

SEQ ID NO: 795580 - RNA, 22 nt, Human
accccaggaaguggaggucaug

SEQ ID NO: 795581 - RNA, 22 nt, Human
gcagcaaacuuccacaaguaga

SEQ ID NO: 795582 - RNA, 22 nt, Human
aacugcaaguggggcuugucau

SEQ ID NO: 795583 - RNA, 22 nt, Human
uauuugcaggacauagauaugg

SEQ ID NO: 795584 - RNA, 21 nt, Human
ugcuuuaugggaaaaauguca

SEQ ID NO: 795585 - RNA, 22 nt, Human
ccugggccaggcuugggaaugc

SEQ ID NO: 795586 - RNA, 22 nt, Human
gacugaggccuuuauugagaca

SEQ ID NO: 795587 - RNA, 22 nt, Human
ucucaaacuacacuguaaauug

SEQ ID NO: 795588 - RNA, 17 nt, Human
uggucuggaagaacuga

SEQ ID NO: 795589 - RNA, 22 nt, Human
aggcaaauugugagaaaaugaa

SEQ ID NO: 795590 - RNA, 22 nt, Human
caaugaaauugagauccagaga

SEQ ID NO: 795591 - RNA, 22 nt, Human
ccuuucaaaacagaacacuagc

SEQ ID NO: 795592 - RNA, 22 nt, Human
ccucacccagucaccuaggugg

SEQ ID NO: 795593 - RNA, 22 nt, Human
aaacuagguucugauuuccaag

SEQ ID NO: 795594 - RNA, 20 nt, Human
uggcccagcacgacgaggac

SEQ ID NO: 795595 - RNA, 22 nt, Human
ucaggccacuucacaggugauu

SEQ ID NO: 795596 - RNA, 22 nt, Human
aaacuuugguauguagcaaaac

SEQ ID NO: 795597 - RNA, 22 nt, Human
augcuggauugagagcaagggg

SEQ ID NO: 795598 - RNA, 22 nt, Human
uggaagugcuaaacuggagugu

SEQ ID NO: 795599 - RNA, 16 nt, Human
auuguuuucaauuaga

SEQ ID NO: 795600 - RNA, 22 nt, Human
uuggagggacagauggcuaggc

SEQ ID NO: 795601 - RNA, 22 nt, Human
auuuaaaugcuuaagaggguuu

SEQ ID NO: 795602 - RNA, 22 nt, Human
ccaugcaaggagaacucucacu

SEQ ID NO: 795603 - RNA, 22 nt, Human
aaggcagagggcuggaucagag

SEQ ID NO: 795604 - RNA, 22 nt, Human
uaaaaguauacuuucaaaggag

SEQ ID NO: 795605 - RNA, 22 nt, Human
uccagggaccucccugagagcu

SEQ ID NO: 795606 - RNA, 21 nt, Human
aagcuguguuccacugauagc

SEQ ID NO: 795607 - RNA, 23 nt, Human
gcccucccucccagguggguguu

SEQ ID NO: 795608 - RNA, 21 nt, Human
ccccugggagcccugucagua

SEQ ID NO: 795609 - RNA, 22 nt, Human
uauucacaguugauuuacaguu

SEQ ID NO: 795610 - RNA, 22 nt, Human
aaugaaaugaagauaugaucag

SEQ ID NO: 795611 - RNA, 22 nt, Human
ggcaggugcucugugggccugg

SEQ ID NO: 795612 - RNA, 22 nt, Human
aauaaauguuaagauugucuca

SEQ ID NO: 795613 - RNA, 22 nt, Human
ucccccaacucuuagcacugua

SEQ ID NO: 795614 - RNA, 22 nt, Human
cucccaggccaugcucuagcca

SEQ ID NO: 795615 - RNA, 22 nt, Human
agcagagaagacacaggcuuca

SEQ ID NO: 795616 - RNA, 22 nt, Human
aaauuccauuaugauaauuucg

SEQ ID NO: 795617 - RNA, 22 nt, Human
uguuuuaugagccauauaaccu

SEQ ID NO: 795618 - RNA, 22 nt, Human
gaggaagccccauugaagccag

SEQ ID NO: 795619 - RNA, 22 nt, Human
uggaagagcaggcagacaaugc

SEQ ID NO: 795620 - RNA, 22 nt, Human
accuuuuuucagaacucuaaag

SEQ ID NO: 795621 - RNA, 22 nt, Human
cagggugggcacccagccucca

SEQ ID NO: 795622 - RNA, 21 nt, Human
ggcagcccgcccucuccuggc

SEQ ID NO: 795623 - RNA, 20 nt, Human
ucuguaggcaaguuagcagg

SEQ ID NO: 795624 - RNA, 22 nt, Human
ccaggcugcuuagccuuaucuu

SEQ ID NO: 795625 - RNA, 22 nt, Human
agauuagguaugguuuaaguag

SEQ ID NO: 795626 - RNA, 22 nt, Human
auuucuguggcuucauucuccu

SEQ ID NO: 795627 - RNA, 21 nt, Human
gccugccugcgugacccucuu

SEQ ID NO: 795628 - RNA, 22 nt, Human
gaccuuccuucuuugcuccggg

SEQ ID NO: 795629 - RNA, 22 nt, Human
guccagggaaauagcgacaggg

SEQ ID NO: 795630 - RNA, 22 nt, Human
ggcccucuggcuuccgcauggg

SEQ ID NO: 795631 - RNA, 22 nt, Human
agacaauuucaaaguaauauua

SEQ ID NO: 795632 - RNA, 22 nt, Human
uuuuggcacugcgucuacaugg

SEQ ID NO: 795633 - RNA, 22 nt, Human
cacagugcuguuuguaaagaga

SEQ ID NO: 795634 - RNA, 22 nt, Human
auuaaauuaaguggcuaauuua

SEQ ID NO: 795635 - RNA, 22 nt, Human
cuccagccucaucuccuggcug

SEQ ID NO: 795636 - RNA, 22 nt, Human
gaaaggaacuugugagugggag

SEQ ID NO: 795637 - RNA, 22 nt, Human
gcacaggcaauagauacagcua

SEQ ID NO: 795638 - RNA, 20 nt, Human
ccaauaaagcucuauaggga

SEQ ID NO: 795639 - RNA, 22 nt, Human
ccuccccacagcccaggagacu

SEQ ID NO: 795640 - RNA, 22 nt, Human
cugaaugaggaaaagagugagg

SEQ ID NO: 795641 - RNA, 22 nt, Human
aacaaauuuagcucugagugcu

SEQ ID NO: 795642 - RNA, 22 nt, Human
acagucuuucaguaauaauacu

SEQ ID NO: 795643 - RNA, 22 nt, Human
gccagcaguauguccuggcagu

SEQ ID NO: 795644 - RNA, 22 nt, Human
uggccccauuuuacagaugaaa

SEQ ID NO: 795645 - RNA, 22 nt, Human
aauucaaucuaagaaaugauca

SEQ ID NO: 795646 - RNA, 22 nt, Human
uaucaguccaggguuuugugac

SEQ ID NO: 795647 - RNA, 22 nt, Human
ucagcagggccuccuugugcag

SEQ ID NO: 795648 - RNA, 22 nt, Human
acaagaauaaggauaagagauu

SEQ ID NO: 795649 - RNA, 22 nt, Human
gcugccuguccugaggaguccg

SEQ ID NO: 795650 - RNA, 22 nt, Human
agaaggccagauggacggggcu

SEQ ID NO: 795651 - RNA, 22 nt, Human
agugcaggagccuggccagagc

SEQ ID NO: 795652 - RNA, 22 nt, Human
uuucaauuuccaggcuagaauu

SEQ ID NO: 795653 - RNA, 22 nt, Human
ggcagguggaaguuggcagagc

SEQ ID NO: 795654 - RNA, 22 nt, Human
caucaggaaaaaacuggagcca

SEQ ID NO: 795655 - RNA, 22 nt, Human
gguucacacuaagcuuaagugg

SEQ ID NO: 795656 - RNA, 22 nt, Human
aguuuucugauguguagugaga

SEQ ID NO: 795657 - RNA, 23 nt, Human
auuguuuuuggcucucagggaau

SEQ ID NO: 795658 - RNA, 23 nt, Human
augaaaugauacuuuauucacug

SEQ ID NO: 795659 - RNA, 22 nt, Human
gaaaggggcauguagggaucac

SEQ ID NO: 795660 - RNA, 20 nt, Human
aagcacauuucuacaauaau

SEQ ID NO: 795661 - RNA, 22 nt, Human
agccaaugcguaaaaagaucua

SEQ ID NO: 795662 - RNA, 22 nt, Human
uuucaugucauuccauuucaga

SEQ ID NO: 795663 - RNA, 22 nt, Human
auguuccuuccagagagcagaa

SEQ ID NO: 795664 - RNA, 20 nt, Human
uggcucucacccugugcgau

SEQ ID NO: 795665 - RNA, 22 nt, Human
ucuuuaaaguuggagcuugcaa

SEQ ID NO: 795666 - RNA, 22 nt, Human
uaggacaggcuaaaagggauaa

SEQ ID NO: 795667 - RNA, 22 nt, Human
gcccagccccuggguggacgug

SEQ ID NO: 795668 - RNA, 17 nt, Human
ggccacagagcuugggg

SEQ ID NO: 795669 - RNA, 22 nt, Human
gcuggcauggagacucuggguc

SEQ ID NO: 795670 - RNA, 22 nt, Human
uggaggugggagggacuguccu

SEQ ID NO: 795671 - RNA, 22 nt, Human
guauuuuacugcucaaagcucu

SEQ ID NO: 795672 - RNA, 22 nt, Human
cucuggaggccuaaggaagugg

SEQ ID NO: 795673 - RNA, 20 nt, Human
gaggaaccacugggaggaga

SEQ ID NO: 795674 - RNA, 20 nt, Human
aggaaggaaguuugcaugga

SEQ ID NO: 795675 - RNA, 22 nt, Human
augaacauccuaggaggcauuu

SEQ ID NO: 795676 - RNA, 22 nt, Human
gaauuuaagaggaugaaucugu

SEQ ID NO: 795677 - RNA, 20 nt, Human
guggcagugguggcagcagu

SEQ ID NO: 795678 - RNA, 22 nt, Human
ggaauacuaaaggaagcaauug

SEQ ID NO: 795679 - RNA, 22 nt, Human
agggccuggaacugugggcagg

SEQ ID NO: 795680 - RNA, 23 nt, Human
cagaaaguuugagaagauacauc

SEQ ID NO: 795681 - RNA, 22 nt, Human
ccagcugcaggggagcagugga

SEQ ID NO: 795682 - RNA, 22 nt, Human
gcagaggccuagguggaaggcc

SEQ ID NO: 795683 - RNA, 22 nt, Human
caaaguaugaaccaguuucucu

SEQ ID NO: 795684 - RNA, 22 nt, Human
uguucucuaagaaaagaagcau

SEQ ID NO: 795685 - RNA, 22 nt, Human
gggcacaccuugucugagcaca

SEQ ID NO: 795686 - RNA, 22 nt, Human
cgcuggcuuccuccuggggcca

SEQ ID NO: 795687 - RNA, 22 nt, Human
aaccaguuucaaagaaaauugc

SEQ ID NO: 795688 - RNA, 22 nt, Human
caggcugugaaacugagaugcg

SEQ ID NO: 795689 - RNA, 22 nt, Human
aaacacacagaaaugaaugagg

SEQ ID NO: 795690 - RNA, 22 nt, Human
gaaggcuggggcaucagugaaa

SEQ ID NO: 795691 - RNA, 22 nt, Human
cuuggccucuucucaggguggg

SEQ ID NO: 795692 - RNA, 22 nt, Human
ggcucaggccagaccacgacuc

SEQ ID NO: 795693 - RNA, 22 nt, Human
uaaauuauguuccauguccuuu

SEQ ID NO: 795694 - RNA, 22 nt, Human
uucaacaagucuuuuuucacug

SEQ ID NO: 795695 - RNA, 21 nt, Human
aggcccaggaauaugcauuuu

SEQ ID NO: 795696 - RNA, 22 nt, Human
auggagugccuguggcaguggg

SEQ ID NO: 795697 - RNA, 22 nt, Human
uuuauucugugcuacaugaaga

SEQ ID NO: 795698 - RNA, 22 nt, Human
ucaaaguauuuuaacuguaucc

SEQ ID NO: 795699 - RNA, 22 nt, Human
aguucaaaaagguaaaguuuau

SEQ ID NO: 795700 - RNA, 22 nt, Human
auuuuucagcuucauugaggca

SEQ ID NO: 795701 - RNA, 22 nt, Human
uucuggaaguggaauuuuugua

SEQ ID NO: 795702 - RNA, 22 nt, Human
uggagguggcacaagggagguc

SEQ ID NO: 795703 - RNA, 22 nt, Human
augcaaaauaaggcagaaacau

SEQ ID NO: 795704 - RNA, 22 nt, Human
auauuuacugcuguggugaagg

SEQ ID NO: 795705 - RNA, 22 nt, Human
guuguuuuaaaauacuccagaa

SEQ ID NO: 795706 - RNA, 22 nt, Human
agugggagagaagcaaguagua

SEQ ID NO: 795707 - RNA, 22 nt, Human
uuggcagggccaggcucucucu

SEQ ID NO: 795708 - RNA, 22 nt, Human
ugagccaaggccucaagaauuu

SEQ ID NO: 795709 - RNA, 22 nt, Human
agauuuccucuuuuguaaagug

SEQ ID NO: 795710 - RNA, 22 nt, Human
aggcuuggaaguggcagaacug

SEQ ID NO: 795711 - RNA, 22 nt, Human
ccuggcucauuaugugccccca

SEQ ID NO: 795712 - RNA, 22 nt, Human
gucauucucuggugugguuguu

SEQ ID NO: 795713 - RNA, 22 nt, Human
agacaaaugguaauuaugucua

SEQ ID NO: 795714 - RNA, 19 nt, Human
acagucuuacaaaugucca

SEQ ID NO: 795715 - RNA, 22 nt, Human
gggcccuggggccugauuugca

SEQ ID NO: 795716 - RNA, 22 nt, Human
ccucaaauugcucagcgucuag

SEQ ID NO: 795717 - RNA, 22 nt, Human
aaauauacggucccuaacaguc

SEQ ID NO: 795718 - RNA, 22 nt, Human
ucauaaaaauagacucuaaagu

SEQ ID NO: 795719 - RNA, 22 nt, Human
aagcagcauucagugaaaugug

SEQ ID NO: 795720 - RNA, 22 nt, Human
cugccuagaaaaccaggcuccu

SEQ ID NO: 795721 - RNA, 17 nt, Human
agcuagggccuagaauc

SEQ ID NO: 795722 - RNA, 22 nt, Human
cccaggaggcgcagguugcggu

SEQ ID NO: 795723 - RNA, 22 nt, Human
agguuuggguucauugcuggcu

SEQ ID NO: 795724 - RNA, 22 nt, Human
uucaccauuucccacuaaacca

SEQ ID NO: 795725 - RNA, 22 nt, Human
ggcgccagcacugcagcgccuc

SEQ ID NO: 795726 - RNA, 21 nt, Human
gccucugcugucuuauuguga

SEQ ID NO: 795727 - RNA, 22 nt, Human
ccacagcaccugcagccaguug

SEQ ID NO: 795728 - RNA, 22 nt, Human
acacacagguaaaggagccugg

SEQ ID NO: 795729 - RNA, 22 nt, Human
ggcccugcaagguacccaggcc

SEQ ID NO: 795730 - RNA, 22 nt, Human
ggcugaggcucaugccaucuug

SEQ ID NO: 795731 - RNA, 22 nt, Human
acaauauaguccaugagcaugc

SEQ ID NO: 795732 - RNA, 22 nt, Human
cuacacaguucugccuaauggc

SEQ ID NO: 795733 - RNA, 22 nt, Human
ccauuuguuguguauuaauauu

SEQ ID NO: 795734 - RNA, 22 nt, Human
agccacagagagggagcugcaa

SEQ ID NO: 795735 - RNA, 22 nt, Human
ucccaggguuacagccagggca

SEQ ID NO: 795736 - RNA, 22 nt, Human
cucuuuggggugccccacuggu

SEQ ID NO: 795737 - RNA, 22 nt, Human
uaggcagugcucugugcuucag

SEQ ID NO: 795738 - RNA, 22 nt, Human
aaauagaauuaacuagcuacug

SEQ ID NO: 795739 - RNA, 22 nt, Human
aagcuguuuuuagguggaggua

SEQ ID NO: 795740 - RNA, 22 nt, Human
cuugaauugggggaagaucacu

SEQ ID NO: 795741 - RNA, 22 nt, Human
gcugcagcagcugcaggguugu

SEQ ID NO: 795742 - RNA, 22 nt, Human
cugccaugcucaagaagucuuu

SEQ ID NO: 795743 - RNA, 22 nt, Human
ucaggacagaaggcugccaggg

SEQ ID NO: 795744 - RNA, 21 nt, Human
ucagaacuggugcagaugaau

SEQ ID NO: 795745 - RNA, 22 nt, Human
ugccagcucccuuuucuccucc

SEQ ID NO: 795746 - RNA, 22 nt, Human
ugccaggccucaggagucucca

SEQ ID NO: 795747 - RNA, 22 nt, Human
aucaaagagcuugacaauccua

SEQ ID NO: 795748 - RNA, 22 nt, Human
ggcagauggaagaggcuggguc

SEQ ID NO: 795749 - RNA, 22 nt, Human
ugcuggcucugggccaagcagg

SEQ ID NO: 795750 - RNA, 22 nt, Human
aagccagggucaggggccuccu

SEQ ID NO: 795751 - RNA, 22 nt, Human
uacagaaagggaugauugaucu

SEQ ID NO: 795752 - RNA, 22 nt, Human
ugcagcaccacaccuggcuaau

SEQ ID NO: 795753 - RNA, 22 nt, Human
uucuugauguaccaacuuggga

SEQ ID NO: 795754 - RNA, 22 nt, Human
gacagggcauggugcagaguuc

SEQ ID NO: 795755 - RNA, 22 nt, Human
uacuauuuggaauuuuaaauug

SEQ ID NO: 795756 - RNA, 17 nt, Human
agauggcaggaggcaga

SEQ ID NO: 795757 - RNA, 22 nt, Human
ggcucugccgugugcucacaug

SEQ ID NO: 795758 - RNA, 22 nt, Human
gagauauuuauucauacuguca

SEQ ID NO: 795759 - RNA, 22 nt, Human
gugcuuauccccauucuggagg

SEQ ID NO: 795760 - RNA, 23 nt, Human
ugcuucucugcuugacaguucug

SEQ ID NO: 795761 - RNA, 20 nt, Human
aaguccugaccuagucuaaa

SEQ ID NO: 795762 - RNA, 22 nt, Human
ccugagccgagcgcucuuucuc

SEQ ID NO: 795763 - RNA, 18 nt, Human
gcagagcagaagcucaag

SEQ ID NO: 795764 - RNA, 22 nt, Human
uuuuauuaguggcuagaugggg

SEQ ID NO: 795765 - RNA, 22 nt, Human
agaaauuaggaaaguaacacuu

SEQ ID NO: 795766 - RNA, 23 nt, Human
cagcugaagcagccugggcugga

SEQ ID NO: 795767 - RNA, 22 nt, Human
ucaccccuggcccagucuugga

SEQ ID NO: 795768 - RNA, 22 nt, Human
agcagcugagccccagcuguga

SEQ ID NO: 795769 - RNA, 21 nt, Human
uucaacaaagggaauaaguuu

SEQ ID NO: 795770 - RNA, 17 nt, Human
gcugccaccuuuggagc

SEQ ID NO: 795771 - RNA, 22 nt, Human
aaucagaacuucucaggguggg

SEQ ID NO: 795772 - RNA, 22 nt, Human
agcugcagucaagcugggccac

SEQ ID NO: 795773 - RNA, 22 nt, Human
guucuauucauugcuccacgag

SEQ ID NO: 795774 - RNA, 22 nt, Human
agccacagcgaaccucucuucc

SEQ ID NO: 795775 - RNA, 22 nt, Human
cccucccagaugggcuugaggu

SEQ ID NO: 795776 - RNA, 22 nt, Human
cugcccucuagggaugcacugg

SEQ ID NO: 795777 - RNA, 22 nt, Human
uugggggcauauugaguagugg

SEQ ID NO: 795778 - RNA, 22 nt, Human
cagugucaggaucaguauauuu

SEQ ID NO: 795779 - RNA, 20 nt, Human
aguacaauguaugauucaga

SEQ ID NO: 795780 - RNA, 22 nt, Human
aggaaaaugaaacagcaacugu

SEQ ID NO: 795781 - RNA, 22 nt, Human
aggcugugggaguugagagucu

SEQ ID NO: 795782 - RNA, 22 nt, Human
agccaaggacacggagccuccu

SEQ ID NO: 795783 - RNA, 22 nt, Human
caauagaaaacucaauacuuaa

SEQ ID NO: 795784 - RNA, 22 nt, Human
acucugccccgaguucugggaa

SEQ ID NO: 795785 - RNA, 22 nt, Human
gaggagcuggcagcgucuccgc

SEQ ID NO: 795786 - RNA, 23 nt, Human
uuguuuaccguaggacuuuuaac

SEQ ID NO: 795787 - RNA, 22 nt, Human
uccaggccauugacugcauccu

SEQ ID NO: 795788 - RNA, 22 nt, Human
gggaggugauggcaagcagcgg

SEQ ID NO: 795789 - RNA, 21 nt, Human
agcaggaggcagucacagcuc

SEQ ID NO: 795790 - RNA, 19 nt, Human
auucauuuuugccuucuaa

SEQ ID NO: 795791 - RNA, 22 nt, Human
gagcauggauagaaggugggau

SEQ ID NO: 795792 - RNA, 22 nt, Human
aucaaagauguuucagggugua

SEQ ID NO: 795793 - RNA, 22 nt, Human
uggggaaaagcguuaggaguuc

SEQ ID NO: 795794 - RNA, 22 nt, Human
aaaaguucauuagugagcuucu

SEQ ID NO: 795795 - RNA, 22 nt, Human
aagcuuuaagugucagucagcc

SEQ ID NO: 795796 - RNA, 22 nt, Human
uuauuuaauuuucucacucaga

SEQ ID NO: 795797 - RNA, 22 nt, Human
aauucacaccuccgguuuuucu

SEQ ID NO: 795798 - RNA, 22 nt, Human
aggcccagcuugaagugggaag

SEQ ID NO: 795799 - RNA, 19 nt, Human
agaaggcuccuguuggaga

SEQ ID NO: 795800 - RNA, 22 nt, Human
uggcuggaagucagaaauggga

SEQ ID NO: 795801 - RNA, 22 nt, Human
auguauaugugaaagauguuua

SEQ ID NO: 795802 - RNA, 22 nt, Human
uuacauaaaaguucacguaggc

SEQ ID NO: 795803 - RNA, 22 nt, Human
uuguauacauuauccuguuuca

SEQ ID NO: 795804 - RNA, 22 nt, Human
acaaacagaguugaaaaauagg

SEQ ID NO: 795805 - RNA, 22 nt, Human
ccuggcuguuuauuucggggcu

SEQ ID NO: 795806 - RNA, 19 nt, Human
cuguuucugagcuugcuuu

SEQ ID NO: 795807 - RNA, 22 nt, Human
uacacaguauaugggaucacag

SEQ ID NO: 795808 - RNA, 22 nt, Human
cggccgcagcagugucggccca

SEQ ID NO: 795809 - RNA, 22 nt, Human
cucuuuggauguuuaugauaag

SEQ ID NO: 795810 - RNA, 22 nt, Human
gauagaaagguguugaaaucca

SEQ ID NO: 795811 - RNA, 22 nt, Human
ggagggagggcuagaccaaaga

SEQ ID NO: 795812 - RNA, 22 nt, Human
ugcuggcugcagugcugucaaa

SEQ ID NO: 795813 - RNA, 20 nt, Human
agcucuuuuuagcuaaggua

SEQ ID NO: 795814 - RNA, 22 nt, Human
acaugugcucuugcuguacagc

SEQ ID NO: 795815 - RNA, 22 nt, Human
aagaagcagcugccaggccagu

SEQ ID NO: 795816 - RNA, 22 nt, Human
caguuauaagacuaagcuauuc

SEQ ID NO: 795817 - RNA, 22 nt, Human
ggagccagagcacuggggagcc

SEQ ID NO: 795818 - RNA, 22 nt, Human
gagcccagucugcuccugcgcc

SEQ ID NO: 795819 - RNA, 22 nt, Human
aacccaggagccggagguugug

SEQ ID NO: 795820 - RNA, 22 nt, Human
gcugcagcuuuaggauccagug

SEQ ID NO: 795821 - RNA, 22 nt, Human
gcuggccugcgagggcaggcug

SEQ ID NO: 795822 - RNA, 22 nt, Human
cucuuuggcccccgaugauuca

SEQ ID NO: 795823 - RNA, 22 nt, Human
cugaaaagcuuugaaccguuaa

SEQ ID NO: 795824 - RNA, 22 nt, Human
ccuggcucugaaguccacauca

SEQ ID NO: 795825 - RNA, 21 nt, Human
gucaggagccgucuuacauuc

SEQ ID NO: 795826 - RNA, 22 nt, Human
gggaagcugaagcuagagaaaa

SEQ ID NO: 795827 - RNA, 22 nt, Human
ccuggcagcuguuuggcuuggc

SEQ ID NO: 795828 - RNA, 22 nt, Human
aggcccaugugagucuuguccu

SEQ ID NO: 795829 - RNA, 22 nt, Human
agacuucuugagcuggcacuuc

SEQ ID NO: 795830 - RNA, 22 nt, Human
uccagccuugccacuuuucugu

SEQ ID NO: 795831 - RNA, 22 nt, Human
agcaggcaggaaugguggaaca

SEQ ID NO: 795832 - RNA, 22 nt, Human
gauuucugggcuuuauuucaga

SEQ ID NO: 795833 - RNA, 22 nt, Human
gagguccagccaagcggcaagg

SEQ ID NO: 795834 - RNA, 23 nt, Human
ggguccagagaagccauuagggc

SEQ ID NO: 795835 - RNA, 22 nt, Human
aaaauguaaagcuugaguguag

SEQ ID NO: 795836 - RNA, 22 nt, Human
ucuccuuugaaaguuaggacug

SEQ ID NO: 795837 - RNA, 22 nt, Human
aggcaaaucucaguuggccucu

SEQ ID NO: 795838 - RNA, 22 nt, Human
caggaugggauguagugggccc

SEQ ID NO: 795839 - RNA, 22 nt, Human
gaaaacuuggaucucuagaaug

SEQ ID NO: 795840 - RNA, 22 nt, Human
aaugacaagacauagucucuga

SEQ ID NO: 795841 - RNA, 22 nt, Human
gccucugcggggcccgagcccg

SEQ ID NO: 795842 - RNA, 22 nt, Human
uuuccagggcucuguagaagaa

SEQ ID NO: 795843 - RNA, 22 nt, Human
accagaaaggaauaauagaauu

SEQ ID NO: 795844 - RNA, 22 nt, Human
ugacagccucacuuuguuaauu

SEQ ID NO: 795845 - RNA, 22 nt, Human
gccaggcauuauuccgaucccu

SEQ ID NO: 795846 - RNA, 19 nt, Human
acccagcccaggaguggca

SEQ ID NO: 795847 - RNA, 22 nt, Human
aggcccagcugggccaggaaca

SEQ ID NO: 795848 - RNA, 22 nt, Human
agucugggcugucugcaggagu

SEQ ID NO: 795849 - RNA, 22 nt, Human
ggagggccccuccagugggcag

SEQ ID NO: 795850 - RNA, 22 nt, Human
uggaaugaauauguuuuaagga

SEQ ID NO: 795851 - RNA, 22 nt, Human
gucuaaacuuagggaucgaaca

SEQ ID NO: 795852 - RNA, 22 nt, Human
gucccuggaucugggacagcug

SEQ ID NO: 795853 - RNA, 22 nt, Human
ucugggggaggaggcauggccc

SEQ ID NO: 795854 - RNA, 22 nt, Human
ucacagaagaugcuggauguug

SEQ ID NO: 795855 - RNA, 22 nt, Human
gggcugugagaguggggcugcu

SEQ ID NO: 795856 - RNA, 22 nt, Human
aacaaaguuucaggaagauaga

SEQ ID NO: 795857 - RNA, 22 nt, Human
ucuuuacacaagacaagaauaa

SEQ ID NO: 795858 - RNA, 22 nt, Human
guccagagaggcaggaggcuac

SEQ ID NO: 795859 - RNA, 22 nt, Human
auaaacugugcuggaugaugag

SEQ ID NO: 795860 - RNA, 22 nt, Human
ccaguguccuuccuuuccaugg

SEQ ID NO: 795861 - RNA, 22 nt, Human
ugcuuaaaauaguucauuuuug

SEQ ID NO: 795862 - RNA, 22 nt, Human
aagguaauccauaauaguuacu

SEQ ID NO: 795863 - RNA, 22 nt, Human
cuuggcuccaaucccagcucug

SEQ ID NO: 795864 - RNA, 20 nt, Human
uucaaaguguaugauaugca

SEQ ID NO: 795865 - RNA, 22 nt, Human
gauucaaaguuaaugaagaugc

SEQ ID NO: 795866 - RNA, 22 nt, Human
ccagggcagaaaaagagggaau

SEQ ID NO: 795867 - RNA, 22 nt, Human
aaauucucuaaagaaaacauga

SEQ ID NO: 795868 - RNA, 22 nt, Human
ucuuuaagaguucauuugcaug

SEQ ID NO: 795869 - RNA, 22 nt, Human
caaauguuuuuauucuacaaca

SEQ ID NO: 795870 - RNA, 22 nt, Human
cuauacacuuuuugaaaauaga

SEQ ID NO: 795871 - RNA, 22 nt, Human
aucaacagagcaaagccugaac

SEQ ID NO: 795872 - RNA, 22 nt, Human
agcugugugugaauuuggccua

SEQ ID NO: 795873 - RNA, 22 nt, Human
acuccugguucccaguugagau

SEQ ID NO: 795874 - RNA, 22 nt, Human
uccaggcauguggccaguacuc

SEQ ID NO: 795875 - RNA, 19 nt, Human
ugaacagagaggacucugg

SEQ ID NO: 795876 - RNA, 22 nt, Human
ucacaggaaggguaaauauuua

SEQ ID NO: 795877 - RNA, 22 nt, Human
uaacuuguguuacauuacucuu

SEQ ID NO: 795878 - RNA, 22 nt, Human
acaggcugccuaccaaguauca

SEQ ID NO: 795879 - RNA, 17 nt, Human
acagcagggaaguguug

SEQ ID NO: 795880 - RNA, 22 nt, Human
auguuauuucugaaagaucauu

SEQ ID NO: 795881 - RNA, 22 nt, Human
ucacauuuuuuacuggacuuaa

SEQ ID NO: 795882 - RNA, 22 nt, Human
uuuucauuguuccucgagcauu

SEQ ID NO: 795883 - RNA, 22 nt, Human
caugccuguaaucccagcucuu

SEQ ID NO: 795884 - RNA, 22 nt, Human
gucauauagguaggauucagcu

SEQ ID NO: 795885 - RNA, 22 nt, Human
ggcucagggaaugaggaagaau

SEQ ID NO: 795886 - RNA, 22 nt, Human
uuucuucuaagauuucaaacua

SEQ ID NO: 795887 - RNA, 18 nt, Human
acugccuggcgaagauag

SEQ ID NO: 795888 - RNA, 22 nt, Human
uauuuaauaaaacuauggcaug

SEQ ID NO: 795889 - RNA, 22 nt, Human
uugggcccauggggcuaagcua

SEQ ID NO: 795890 - RNA, 22 nt, Human
ugccuggguccaggccaagccu

SEQ ID NO: 795891 - RNA, 22 nt, Human
uuucauuucauagaauuguguu

SEQ ID NO: 795892 - RNA, 22 nt, Human
cacauagauaggcagaagaaca

SEQ ID NO: 795893 - RNA, 19 nt, Human
ugagcaugcgagcugagaa

SEQ ID NO: 795894 - RNA, 22 nt, Human
caggaaaaggagacuuuagcac

SEQ ID NO: 795895 - RNA, 23 nt, Human
ugcuggcuaagaaucugcauuuu

SEQ ID NO: 795896 - RNA, 22 nt, Human
uucuggaugcuguuaagaugua

SEQ ID NO: 795897 - RNA, 17 nt, Human
ggcucugggugucacau

SEQ ID NO: 795898 - RNA, 22 nt, Human
cagguucuggagaugcagagau

SEQ ID NO: 795899 - RNA, 22 nt, Human
uucauuugugguuauuuacaau

SEQ ID NO: 795900 - RNA, 22 nt, Human
uccugugccaucucuagagacu

SEQ ID NO: 795901 - RNA, 22 nt, Human
uuucugcaaaauaaauagugac

SEQ ID NO: 795902 - RNA, 22 nt, Human
uuuucuguaagaggacuuuaau

SEQ ID NO: 795903 - RNA, 22 nt, Human
uuucauguuacauuuaaaaugu

SEQ ID NO: 795904 - RNA, 21 nt, Human
auacauucuauuaagcauuua

SEQ ID NO: 795905 - RNA, 22 nt, Human
uuagugucuuucaaaagguuua

SEQ ID NO: 795906 - RNA, 22 nt, Human
agaucuggaacugagguuuauu

SEQ ID NO: 795907 - RNA, 22 nt, Human
cuggccaacaucuggggcacau

SEQ ID NO: 795908 - RNA, 22 nt, Human
acauaguuagcuuagagauacu

SEQ ID NO: 795909 - RNA, 22 nt, Human
aaagcagugcugugagaacacu

SEQ ID NO: 795910 - RNA, 22 nt, Human
uuauuuauuguguaccuacugu

SEQ ID NO: 795911 - RNA, 22 nt, Human
uuagauaaaaguguucaauaaa

SEQ ID NO: 795912 - RNA, 22 nt, Human
ucuccuucgaggcccagcuccc

SEQ ID NO: 795913 - RNA, 22 nt, Human
cugauuuagauuucacacguga

SEQ ID NO: 795914 - RNA, 22 nt, Human
gggcugaugaugagcagaggug

SEQ ID NO: 795915 - RNA, 20 nt, Human
auguacuccccacaagcaac

SEQ ID NO: 795916 - RNA, 21 nt, Human
aaauucaccuaguaaaacuuc

SEQ ID NO: 795917 - RNA, 22 nt, Human
aggccuggugaaugaaguaucu

SEQ ID NO: 795918 - RNA, 22 nt, Human
ccuugaaagccaggcagaggaa

SEQ ID NO: 795919 - RNA, 22 nt, Human
gcaaauucaacagcacauucuc

SEQ ID NO: 795920 - RNA, 22 nt, Human
cuuggccugggccgcagccacu

SEQ ID NO: 795921 - RNA, 22 nt, Human
uagauuugugcaagaagggauu

SEQ ID NO: 795922 - RNA, 22 nt, Human
aauaaaauggucaguuuucuca

SEQ ID NO: 795923 - RNA, 22 nt, Human
agaagucaaugaugagagugcu

SEQ ID NO: 795924 - RNA, 22 nt, Human
aaagaacuuauccuagaauuug

SEQ ID NO: 795925 - RNA, 22 nt, Human
aauguauuuugggaguuucuuu

SEQ ID NO: 795926 - RNA, 22 nt, Human
cuaguuguuuaauauugauuga

SEQ ID NO: 795927 - RNA, 22 nt, Human
guucagcucaagcaauaauuuu

SEQ ID NO: 795928 - RNA, 22 nt, Human
gaguuaauguguacacaaaggg

SEQ ID NO: 795929 - RNA, 22 nt, Human
ucaggaggcgucucgcuggggc

SEQ ID NO: 795930 - RNA, 22 nt, Human
ccugccagcccgcguucaugcc

SEQ ID NO: 795931 - RNA, 22 nt, Human
ggagggccaucuugggugugau

SEQ ID NO: 795932 - RNA, 22 nt, Human
uugcaucagguagacaacuaua

SEQ ID NO: 795933 - RNA, 22 nt, Human
agcagaaauagaagucaaugau

SEQ ID NO: 795934 - RNA, 22 nt, Human
gaggcacaguguuuggucagug

SEQ ID NO: 795935 - RNA, 22 nt, Human
uuuacacuccuggaaaugauau

SEQ ID NO: 795936 - RNA, 22 nt, Human
aggcuguagaucuagacaugua

SEQ ID NO: 795937 - RNA, 22 nt, Human
uacagaggguaauugaucaagg

SEQ ID NO: 795938 - RNA, 22 nt, Human
caauuucacuaauaauauuuac

SEQ ID NO: 795939 - RNA, 22 nt, Human
gguagacugagcuccuugagga

SEQ ID NO: 795940 - RNA, 22 nt, Human
aaauucaauuaacuuucaugcu

SEQ ID NO: 795941 - RNA, 22 nt, Human
uauauuaacacccacuugccuc

SEQ ID NO: 795942 - RNA, 21 nt, Human
ggagggcagcccagacuggcu

SEQ ID NO: 795943 - RNA, 23 nt, Human
acuuaaaugguucuuuaucucag

SEQ ID NO: 795944 - RNA, 22 nt, Human
aagccuucccuuuuugagcuca

SEQ ID NO: 795945 - RNA, 23 nt, Human
aaacaagucucucaauggcuugc

SEQ ID NO: 795946 - RNA, 22 nt, Human
ucaugcaaucucuuguucagga

SEQ ID NO: 795947 - RNA, 22 nt, Human
cuucucccugggggcucuuuau

SEQ ID NO: 795948 - RNA, 22 nt, Human
ucaggaggaugucggcaaauuu

SEQ ID NO: 795949 - RNA, 22 nt, Human
caaaagucuuccuauucucuua

SEQ ID NO: 795950 - RNA, 22 nt, Human
agaggccagaucaucauagaug

SEQ ID NO: 795951 - RNA, 23 nt, Human
ugaauguuuauucucggugcaga

SEQ ID NO: 795952 - RNA, 22 nt, Human
cccaggguaaucaugugaagcc

SEQ ID NO: 795953 - RNA, 22 nt, Human
cuacaaaguaccacagacuggg

SEQ ID NO: 795954 - RNA, 22 nt, Human
ccaggcugugguuuagauagag

SEQ ID NO: 795955 - RNA, 22 nt, Human
acagcuuuuuacuaauagauug

SEQ ID NO: 795956 - RNA, 22 nt, Human
ccuggcaggacuguuguaagaa

SEQ ID NO: 795957 - RNA, 22 nt, Human
gcaaagacccaggugucuaucc

SEQ ID NO: 795958 - RNA, 22 nt, Human
uuagaggacuguaggugggaau

SEQ ID NO: 795959 - RNA, 22 nt, Human
cugggagcccgcguccuggugg

SEQ ID NO: 795960 - RNA, 22 nt, Human
uuuguaaaaggaggaagcaugg

SEQ ID NO: 795961 - RNA, 22 nt, Human
uacacauaggucugaauaaaaa

SEQ ID NO: 795962 - RNA, 22 nt, Human
cacagagaaugaugagucacug

SEQ ID NO: 795963 - RNA, 22 nt, Human
gaguuaaaguaccuuuguaugu

SEQ ID NO: 795964 - RNA, 21 nt, Human
agaaacaugaucaaaggaacc

SEQ ID NO: 795965 - RNA, 22 nt, Human
uuucaggagagaccagaaauga

SEQ ID NO: 795966 - RNA, 22 nt, Human
gccagcuggagugagagugggc

SEQ ID NO: 795967 - RNA, 22 nt, Human
uaggcagagguaugguaaggac

SEQ ID NO: 795968 - RNA, 22 nt, Human
aaaauagcuauggaaugucacu

SEQ ID NO: 795969 - RNA, 22 nt, Human
ucacuauaauaugucaaaauac

SEQ ID NO: 795970 - RNA, 22 nt, Human
agucagcagugaaagcacagcc

SEQ ID NO: 795971 - RNA, 22 nt, Human
ucugaauguaucgaauugaggc

SEQ ID NO: 795972 - RNA, 22 nt, Human
uucuuuguagcaaaacguguau

SEQ ID NO: 795973 - RNA, 21 nt, Human
gccaagaacaagacagacaug

SEQ ID NO: 795974 - RNA, 22 nt, Human
auguggcaccgaucuuuagcca

SEQ ID NO: 795975 - RNA, 22 nt, Human
ccacagggucagccacucugca

SEQ ID NO: 795976 - RNA, 22 nt, Human
uaggcaaguggaccagagguuu

SEQ ID NO: 795977 - RNA, 22 nt, Human
uggcuggagccccucaagagca

SEQ ID NO: 795978 - RNA, 22 nt, Human
ugguuagaugaggcugguuuca

SEQ ID NO: 795979 - RNA, 22 nt, Human
gcaaacaaggacauacauccug

SEQ ID NO: 795980 - RNA, 22 nt, Human
cccugcuguguagcggaggaac

SEQ ID NO: 795981 - RNA, 22 nt, Human
guggggugggcugaguuaggcc

SEQ ID NO: 795982 - RNA, 22 nt, Human
aaggaaauuagguuauuuugcu

SEQ ID NO: 795983 - RNA, 22 nt, Human
augacaaacccaggauguaaca

SEQ ID NO: 795984 - RNA, 22 nt, Human
gggcagguuauuggaguaggga

SEQ ID NO: 795985 - RNA, 22 nt, Human
aggcccugcugaggccucccuc

SEQ ID NO: 795986 - RNA, 22 nt, Human
gaggagggagcuggaagcucuu

SEQ ID NO: 795987 - RNA, 22 nt, Human
auucauacaggcuuugcucuua

SEQ ID NO: 795988 - RNA, 18 nt, Human
ccucagggagauccagug

SEQ ID NO: 795989 - RNA, 22 nt, Human
uuugguaaaugcagguucuucu

SEQ ID NO: 795990 - RNA, 22 nt, Human
uugcauguuauuuaaucuguau

SEQ ID NO: 795991 - RNA, 22 nt, Human
agggaauucacuggaacgcccu

SEQ ID NO: 795992 - RNA, 22 nt, Human
cccagggguaaggcgcagcgug

SEQ ID NO: 795993 - RNA, 22 nt, Human
cagguccuuuaguguccagaac

SEQ ID NO: 795994 - RNA, 22 nt, Human
ccaggcaguggaagcuaaaauu

SEQ ID NO: 795995 - RNA, 22 nt, Human
agcagccccucggcgggugcgc

SEQ ID NO: 795996 - RNA, 22 nt, Human
uugaaugaaugguccauauaga

SEQ ID NO: 795997 - RNA, 22 nt, Human
acuggcuguguaaccucaggca

SEQ ID NO: 795998 - RNA, 22 nt, Human
agcaggcuuguuaugucugaga

SEQ ID NO: 795999 - RNA, 22 nt, Human
uuucuuuguuguuaucacauca

SEQ ID NO: 796000 - RNA, 22 nt, Human
auuuaguagagaaauuaagaaa

SEQ ID NO: 796001 - RNA, 22 nt, Human
augccuggacugacaugcacug

SEQ ID NO: 796002 - RNA, 22 nt, Human
ugcuggagugagauuaugaguu

SEQ ID NO: 796003 - RNA, 22 nt, Human
agucuccgcucucggagucggc

SEQ ID NO: 796004 - RNA, 21 nt, Human
agaggaagugauuggucuggc

SEQ ID NO: 796005 - RNA, 22 nt, Human
ucaggcagugguaaaugaguua

SEQ ID NO: 796006 - RNA, 22 nt, Human
gaccccagaggaaggggcgccg

SEQ ID NO: 796007 - RNA, 22 nt, Human
acacagagccagggaauacagu

SEQ ID NO: 796008 - RNA, 22 nt, Human
ggguggcauagggugauggcuu

SEQ ID NO: 796009 - RNA, 22 nt, Human
gccuccggaguugcagugucuu

SEQ ID NO: 796010 - RNA, 22 nt, Human
acagggagucugaggggauagu

SEQ ID NO: 796011 - RNA, 22 nt, Human
ggcuggcaggggaugucagaug

SEQ ID NO: 796012 - RNA, 22 nt, Human
uauacacaggaaucugugaaaa

SEQ ID NO: 796013 - RNA, 23 nt, Human
ucaucaaaggaaguacgugucac

SEQ ID NO: 796014 - RNA, 22 nt, Human
ccaggagcagauauggacauaa

SEQ ID NO: 796015 - RNA, 20 nt, Human
cugccgaccacagccaugga

SEQ ID NO: 796016 - RNA, 22 nt, Human
gagaggcugaaaucacaggagc

SEQ ID NO: 796017 - RNA, 22 nt, Human
aauguuacaggacaaagaugga

SEQ ID NO: 796018 - RNA, 22 nt, Human
aaggccagcccuaaugaugcuc

SEQ ID NO: 796019 - RNA, 22 nt, Human
uuucugggacuggggagauucu

SEQ ID NO: 796020 - RNA, 22 nt, Human
caggaaggaccguccagaucag

SEQ ID NO: 796021 - RNA, 22 nt, Human
ucuugaggucaucaucugaaac

SEQ ID NO: 796022 - RNA, 22 nt, Human
gugcagcugagggccucuucua

SEQ ID NO: 796023 - RNA, 22 nt, Human
ucuugauuaauaccuuagcccu

SEQ ID NO: 796024 - RNA, 22 nt, Human
ucaggcugcccguucagggcuc

SEQ ID NO: 796025 - RNA, 22 nt, Human
gcccugagccuaugagccucuc

SEQ ID NO: 796026 - RNA, 22 nt, Human
gcccaggcuagcguagagugca

SEQ ID NO: 796027 - RNA, 22 nt, Human
ccagccaguauauuccaaagcc

SEQ ID NO: 796028 - RNA, 22 nt, Human
caguggcacccacgggcugggc

SEQ ID NO: 796029 - RNA, 22 nt, Human
aaucagaaagaucuugaugaga

SEQ ID NO: 796030 - RNA, 22 nt, Human
cuggaggggcuggcaugguagc

SEQ ID NO: 796031 - RNA, 22 nt, Human
auaaacugguaggaaaacagua

SEQ ID NO: 796032 - RNA, 22 nt, Human
aaugcaaggccuguaucugauu

SEQ ID NO: 796033 - RNA, 22 nt, Human
agcucagaacugcagacaugug

SEQ ID NO: 796034 - RNA, 20 nt, Human
aauguauuguuuuguuucag

SEQ ID NO: 796035 - RNA, 22 nt, Human
ucaggccuagggagaaaauuca

SEQ ID NO: 796036 - RNA, 22 nt, Human
aauuugauucagcaaauguuca

SEQ ID NO: 796037 - RNA, 22 nt, Human
agccacucagugcuguauugac

SEQ ID NO: 796038 - RNA, 22 nt, Human
guggugugugcuuagggcuagg

SEQ ID NO: 796039 - RNA, 22 nt, Human
uccucuggcucuuucccuagga

SEQ ID NO: 796040 - RNA, 22 nt, Human
cagcccugucccugagggaccu

SEQ ID NO: 796041 - RNA, 22 nt, Human
cuucuggagcucaccaacuucc

SEQ ID NO: 796042 - RNA, 22 nt, Human
ucacaagaauuuguagaugaaa

SEQ ID NO: 796043 - RNA, 22 nt, Human
agcuggcuucucugcagacauu

SEQ ID NO: 796044 - RNA, 22 nt, Human
ugggaagguguagaaagaacaa

SEQ ID NO: 796045 - RNA, 22 nt, Human
uagguucaggagauauugcaca

SEQ ID NO: 796046 - RNA, 22 nt, Human
uugcuucagagggagacacuuu

SEQ ID NO: 796047 - RNA, 22 nt, Human
gucugcuggugccuggccugcg

SEQ ID NO: 796048 - RNA, 22 nt, Human
gaggcuggugguuaguuccauu

SEQ ID NO: 796049 - RNA, 22 nt, Human
ccuuggcaaaccagggcagcug

SEQ ID NO: 796050 - RNA, 22 nt, Human
ccaagcuuucgaucaaccagaa

SEQ ID NO: 796051 - RNA, 22 nt, Human
aaaggcuccuucucccaugacc

SEQ ID NO: 796052 - RNA, 22 nt, Human
augagauguucaggagucugag

SEQ ID NO: 796053 - RNA, 22 nt, Human
acacuuggagcaacacuuaugg

SEQ ID NO: 796054 - RNA, 22 nt, Human
gaauucuuugaucuuaaucuug

SEQ ID NO: 796055 - RNA, 22 nt, Human
ggcugcagcggauuggggauug

SEQ ID NO: 796056 - RNA, 22 nt, Human
uggggaggaagucagauuucag

SEQ ID NO: 796057 - RNA, 22 nt, Human
aggcagcuuaagcccuggccca

SEQ ID NO: 796058 - RNA, 22 nt, Human
cagagccagcccacuguucccg

SEQ ID NO: 796059 - RNA, 22 nt, Human
augcaacagcugggaauaugua

SEQ ID NO: 796060 - RNA, 22 nt, Human
cuucauuaacuauuggaaugca

SEQ ID NO: 796061 - RNA, 22 nt, Human
gugcagagaaaugagaagucga

SEQ ID NO: 796062 - RNA, 22 nt, Human
augccccaggaggugccaucca

SEQ ID NO: 796063 - RNA, 22 nt, Human
gacagcaagagacagagcaucc

SEQ ID NO: 796064 - RNA, 22 nt, Human
uauaauuuuaagugguaaauua

SEQ ID NO: 796065 - RNA, 22 nt, Human
uuaaaugagauguucagauauu

SEQ ID NO: 796066 - RNA, 22 nt, Human
aaguaaggcagugaaugagauu

SEQ ID NO: 796067 - RNA, 22 nt, Human
uuuacacauaccucuuuaaagu

SEQ ID NO: 796068 - RNA, 22 nt, Human
ucaggagcagggggaagcucug

SEQ ID NO: 796069 - RNA, 22 nt, Human
gcuggcugcgucaucacagggc

SEQ ID NO: 796070 - RNA, 19 nt, Human
aaaguugagaaacaaugga

SEQ ID NO: 796071 - RNA, 22 nt, Human
ggcgguggcgugaagguggcug

SEQ ID NO: 796072 - RNA, 22 nt, Human
aaguggcaguucaggaagcaga

SEQ ID NO: 796073 - RNA, 22 nt, Human
gggaccaggucagggcucugac

SEQ ID NO: 796074 - RNA, 22 nt, Human
cagcccucagguccucagcagc

SEQ ID NO: 796075 - RNA, 22 nt, Human
caaggaaucccauuucuaacuc

SEQ ID NO: 796076 - RNA, 22 nt, Human
uugaaugaccaugaugcaaggg

SEQ ID NO: 796077 - RNA, 22 nt, Human
caugcuguugaauaugacauug

SEQ ID NO: 796078 - RNA, 19 nt, Human
aaugcuuaggacagugccu

SEQ ID NO: 796079 - RNA, 22 nt, Human
gccaggcagccacccucugcga

SEQ ID NO: 796080 - RNA, 22 nt, Human
ccuacagagcagcaggaccaga

SEQ ID NO: 796081 - RNA, 22 nt, Human
ucagugucuauagauaagguuu

SEQ ID NO: 796082 - RNA, 22 nt, Human
caacuacuggugcucaggaaau

SEQ ID NO: 796083 - RNA, 23 nt, Human
cacaggcagaaaucaagacggua

SEQ ID NO: 796084 - RNA, 22 nt, Human
acacaggcaaugugagugggag

SEQ ID NO: 796085 - RNA, 22 nt, Human
cucuaaauccaaauaagugucc

SEQ ID NO: 796086 - RNA, 22 nt, Human
cagcuuugugacuucggacaag

SEQ ID NO: 796087 - RNA, 20 nt, Human
uucauuugggaaaaucugcg

SEQ ID NO: 796088 - RNA, 22 nt, Human
uugagaacucuguauguccagc

SEQ ID NO: 796089 - RNA, 22 nt, Human
ucaguggucuaggcaauauaua

SEQ ID NO: 796090 - RNA, 22 nt, Human
cuggggaggcagggcugccccu

SEQ ID NO: 796091 - RNA, 22 nt, Human
gccaggcagcugggagggugcc

SEQ ID NO: 796092 - RNA, 22 nt, Human
aguaaugaggauguuugcaaaa

SEQ ID NO: 796093 - RNA, 22 nt, Human
aaguacauguugcucaacagcc

SEQ ID NO: 796094 - RNA, 22 nt, Human
ccuggcuguggcggugcucuca

SEQ ID NO: 796095 - RNA, 22 nt, Human
uccagggagagccgcugcucca

SEQ ID NO: 796096 - RNA, 22 nt, Human
gcaauaaacauguuugaugcgc

SEQ ID NO: 796097 - RNA, 22 nt, Human
cugcccagaaucacucacucga

SEQ ID NO: 796098 - RNA, 22 nt, Human
cacagcugcccuacuccaugug

SEQ ID NO: 796099 - RNA, 22 nt, Human
agaaaauaaauugaugguggaa

SEQ ID NO: 796100 - RNA, 22 nt, Human
uuaaagagucuacugcacaucc

SEQ ID NO: 796101 - RNA, 22 nt, Human
ugcuggggagugauugaccauc

SEQ ID NO: 796102 - RNA, 22 nt, Human
uagacauuugucaagaaugacu

SEQ ID NO: 796103 - RNA, 22 nt, Human
auucuuauuuaaauagagucug

SEQ ID NO: 796104 - RNA, 22 nt, Human
ugaauucuuuuagaauucagug

SEQ ID NO: 796105 - RNA, 22 nt, Human
gcaggcagaucaccugucagga

SEQ ID NO: 796106 - RNA, 22 nt, Human
aggcuggagguuuguugcggcu

SEQ ID NO: 796107 - RNA, 22 nt, Human
ugggcaggcaagugaauaccuu

SEQ ID NO: 796108 - RNA, 22 nt, Human
uuuuuaagagauucuccagucu

SEQ ID NO: 796109 - RNA, 22 nt, Human
cauucacagagggggaagcauc

SEQ ID NO: 796110 - RNA, 22 nt, Human
aguguaucuagguaucuauagu

SEQ ID NO: 796111 - RNA, 21 nt, Human
guuuuaagggagaaaaccuag

SEQ ID NO: 796112 - RNA, 22 nt, Human
aggcuucccagcugagcucagc

SEQ ID NO: 796113 - RNA, 22 nt, Human
caggcugggacugaccccugcu

SEQ ID NO: 796114 - RNA, 22 nt, Human
acagugguaggauaacuguuuu

SEQ ID NO: 796115 - RNA, 22 nt, Human
uaacuaacuaguguucaaaaua

SEQ ID NO: 796116 - RNA, 22 nt, Human
gugccagagauuccuaaacuuu

SEQ ID NO: 796117 - RNA, 22 nt, Human
cucaguguuaaauauaagguau

SEQ ID NO: 796118 - RNA, 20 nt, Human
ccugugcugcccucggggcc

SEQ ID NO: 796119 - RNA, 21 nt, Human
ucaggcaggcgcagagggaag

SEQ ID NO: 796120 - RNA, 20 nt, Human
gcagggcaagggauaugaaa

SEQ ID NO: 796121 - RNA, 22 nt, Human
gcuuggggucaugaggcugcug

SEQ ID NO: 796122 - RNA, 22 nt, Human
agaacauagauaccuaagacag

SEQ ID NO: 796123 - RNA, 22 nt, Human
caguguguggauccucccagga

SEQ ID NO: 796124 - RNA, 22 nt, Human
guuauaaaggugauaaugguca

SEQ ID NO: 796125 - RNA, 22 nt, Human
aggcagugccuggaccccagcu

SEQ ID NO: 796126 - RNA, 22 nt, Human
augcagaagacugaaaagcuga

SEQ ID NO: 796127 - RNA, 23 nt, Human
agaguggccuacucacacucauu

SEQ ID NO: 796128 - RNA, 22 nt, Human
gaaaucuacgauuagugaaaau

SEQ ID NO: 796129 - RNA, 22 nt, Human
uguauuguaagugguuauaugc

SEQ ID NO: 796130 - RNA, 22 nt, Human
cucguugcugaagccaaaguca

SEQ ID NO: 796131 - RNA, 22 nt, Human
cacaugcaguuuuccagcaguc

SEQ ID NO: 796132 - RNA, 22 nt, Human
acuucuggugucauacugcauu

SEQ ID NO: 796133 - RNA, 22 nt, Human
cacacacuggagcaaggagaug

SEQ ID NO: 796134 - RNA, 22 nt, Human
ugucaacauuuaucaaguuauu

SEQ ID NO: 796135 - RNA, 22 nt, Human
ucuggaguggaggugccuuggg

SEQ ID NO: 796136 - RNA, 21 nt, Human
uggauugaggugacagugugc

SEQ ID NO: 796137 - RNA, 22 nt, Human
gcaggagcugcucuccugacga

SEQ ID NO: 796138 - RNA, 22 nt, Human
ugucuuuaaaauuaaacacauc

SEQ ID NO: 796139 - RNA, 22 nt, Human
gacaugcaguucucaaggguag

SEQ ID NO: 796140 - RNA, 20 nt, Human
cucagcucuucagggcaagu

SEQ ID NO: 796141 - RNA, 22 nt, Human
cagugcuguguuugcugccugg

SEQ ID NO: 796142 - RNA, 19 nt, Human
guuuuucccagacgaggca

SEQ ID NO: 796143 - RNA, 22 nt, Human
aucagaaaaacauaauguuauu

SEQ ID NO: 796144 - RNA, 22 nt, Human
gcugccgacccacagggguuaa

SEQ ID NO: 796145 - RNA, 20 nt, Human
agaaacauuucuugagaacu

SEQ ID NO: 796146 - RNA, 19 nt, Human
ucugaaguccagggcauac

SEQ ID NO: 796147 - RNA, 22 nt, Human
auguacauacugcauuuucaaa

SEQ ID NO: 796148 - RNA, 22 nt, Human
caggaaaugaggcugaagggug

SEQ ID NO: 796149 - RNA, 22 nt, Human
cccuggcugcuaccagguagcu

SEQ ID NO: 796150 - RNA, 22 nt, Human
aacauaaauuugaaguggcaaa

SEQ ID NO: 796151 - RNA, 22 nt, Human
gucuuuauauuuacuaaagaau

SEQ ID NO: 796152 - RNA, 22 nt, Human
uagcuucucauaauuuaugcug

SEQ ID NO: 796153 - RNA, 22 nt, Human
caguagggaaugugggaggcug

SEQ ID NO: 796154 - RNA, 22 nt, Human
auucacaguucauuagcuguaa

SEQ ID NO: 796155 - RNA, 22 nt, Human
uagcauuuauggucaugugucc

SEQ ID NO: 796156 - RNA, 22 nt, Human
acagcccagaaagccuaagggg

SEQ ID NO: 796157 - RNA, 22 nt, Human
agacagcaggggagucugguuu

SEQ ID NO: 796158 - RNA, 22 nt, Human
aaugaaaauuggacccuagaac

SEQ ID NO: 796159 - RNA, 22 nt, Human
cuugcugggguaagucugugcu

SEQ ID NO: 796160 - RNA, 22 nt, Human
ucaaauauuggcuauuucacau

SEQ ID NO: 796161 - RNA, 22 nt, Human
cucuuggccagacacagaggca

SEQ ID NO: 796162 - RNA, 23 nt, Human
ucuuuagaagaacaucagaaaug

SEQ ID NO: 796163 - RNA, 22 nt, Human
aaaauugucgaacaguaguaac

SEQ ID NO: 796164 - RNA, 22 nt, Human
gcauggcuauuaugaggcagaa

SEQ ID NO: 796165 - RNA, 22 nt, Human
uuucuaagaaaguaaugguuau

SEQ ID NO: 796166 - RNA, 22 nt, Human
cacucaauacaaugguuggcac

SEQ ID NO: 796167 - RNA, 22 nt, Human
agcugugugacucuaagcaagu

SEQ ID NO: 796168 - RNA, 22 nt, Human
gcacacaggcaguuuccagcca

SEQ ID NO: 796169 - RNA, 22 nt, Human
augacucagaagauauuuucca

SEQ ID NO: 796170 - RNA, 22 nt, Human
agaagccagccuugccuccuuu

SEQ ID NO: 796171 - RNA, 22 nt, Human
gaugcaaagcauuuuugugugu

SEQ ID NO: 796172 - RNA, 22 nt, Human
uuucacagagaaauauaacagg

SEQ ID NO: 796173 - RNA, 22 nt, Human
gcuggagaccucagagaaccca

SEQ ID NO: 796174 - RNA, 22 nt, Human
uggccugccuucgcugagcuga

SEQ ID NO: 796175 - RNA, 22 nt, Human
caugugcauccuuaaucucccu

SEQ ID NO: 796176 - RNA, 22 nt, Human
uagaaaagauaacauucugugc

SEQ ID NO: 796177 - RNA, 22 nt, Human
aaaaaccucaauuacuuuugca

SEQ ID NO: 796178 - RNA, 22 nt, Human
gugaccauccugguaaugaauc

SEQ ID NO: 796179 - RNA, 22 nt, Human
agggcugcccagugugagagcu

SEQ ID NO: 796180 - RNA, 22 nt, Human
ugguguugaaccucagcagggg

SEQ ID NO: 796181 - RNA, 22 nt, Human
uagcuuugcccgugcuggauuu

SEQ ID NO: 796182 - RNA, 22 nt, Human
uccaugaggcagggaggcuggc

SEQ ID NO: 796183 - RNA, 22 nt, Human
gggcaccuugggucucaggcaa

SEQ ID NO: 796184 - RNA, 22 nt, Human
agaaacuaaccugguaggguuc

SEQ ID NO: 796185 - RNA, 22 nt, Human
gcugcccuguccggcucuccug

SEQ ID NO: 796186 - RNA, 22 nt, Human
gcaggaacuugggugaagucag

SEQ ID NO: 796187 - RNA, 22 nt, Human
aaacuuuaagacaguccucaag

SEQ ID NO: 796188 - RNA, 22 nt, Human
auauacagggagaaacagcuua

SEQ ID NO: 796189 - RNA, 20 nt, Human
uggacaggggcauagguugc

SEQ ID NO: 796190 - RNA, 22 nt, Human
uagguaggugcaauuaaaagua

SEQ ID NO: 796191 - RNA, 19 nt, Human
agacacacuuacguggaau

SEQ ID NO: 796192 - RNA, 22 nt, Human
uucauugaguuacugccugggc

SEQ ID NO: 796193 - RNA, 22 nt, Human
guuucucaucaguuucugauau

SEQ ID NO: 796194 - RNA, 22 nt, Human
agcacuggaguuuagugggauu

SEQ ID NO: 796195 - RNA, 22 nt, Human
ggcuagggagacagagggcaug

SEQ ID NO: 796196 - RNA, 22 nt, Human
acaaaaauuagcugggcauggu

SEQ ID NO: 796197 - RNA, 22 nt, Human
ucaggauggagucuauccagug

SEQ ID NO: 796198 - RNA, 22 nt, Human
cacaggcucuucucacuugauu

SEQ ID NO: 796199 - RNA, 22 nt, Human
agcaaggauuauccugggaagg

SEQ ID NO: 796200 - RNA, 22 nt, Human
uggggcuaacgagagagcagag

SEQ ID NO: 796201 - RNA, 20 nt, Human
uucacauuucuguagugauu

SEQ ID NO: 796202 - RNA, 22 nt, Human
uuuuggcaaaggcauucucuuu

SEQ ID NO: 796203 - RNA, 22 nt, Human
cagggcucaccacugggauccu

SEQ ID NO: 796204 - RNA, 21 nt, Human
guccagagagccggcuccuga

SEQ ID NO: 796205 - RNA, 22 nt, Human
cagggagcggagucccaugccu

SEQ ID NO: 796206 - RNA, 22 nt, Human
aaugucauagcaaagagaguga

SEQ ID NO: 796207 - RNA, 22 nt, Human
acauuucagcgugcaugacaug

SEQ ID NO: 796208 - RNA, 22 nt, Human
gccuagguaccagcagagagcc

SEQ ID NO: 796209 - RNA, 22 nt, Human
aauaugacauagaauugagaug

SEQ ID NO: 796210 - RNA, 22 nt, Human
agcaggcuaaauaauaauacau

SEQ ID NO: 796211 - RNA, 22 nt, Human
uucuaagcucugaaauaaaucu

SEQ ID NO: 796212 - RNA, 22 nt, Human
auggcagacacaggcaggcaga

SEQ ID NO: 796213 - RNA, 23 nt, Human
caguggagacucaugcuuccuua

SEQ ID NO: 796214 - RNA, 22 nt, Human
gaacaguauuuccaggaauccc

SEQ ID NO: 796215 - RNA, 19 nt, Human
ggcugugguggugccuugc

SEQ ID NO: 796216 - RNA, 22 nt, Human
agcacagaguugcagagagcgu

SEQ ID NO: 796217 - RNA, 22 nt, Human
uugaaauuggguguggcuguca

SEQ ID NO: 796218 - RNA, 22 nt, Human
gucagcagcauguuuaaucaaa

SEQ ID NO: 796219 - RNA, 21 nt, Human
caguggucugucuccauuuuu

SEQ ID NO: 796220 - RNA, 22 nt, Human
uccagagauaacuauuuaggag

SEQ ID NO: 796221 - RNA, 22 nt, Human
aguugucaccucuauucaaauc

SEQ ID NO: 796222 - RNA, 22 nt, Human
gcccuggggaaggugucuccaa

SEQ ID NO: 796223 - RNA, 22 nt, Human
ccaggcaggcagcguucucagg

SEQ ID NO: 796224 - RNA, 22 nt, Human
gcagcccaauggacugagacag

SEQ ID NO: 796225 - RNA, 16 nt, Human
accuccagucaagggu

SEQ ID NO: 796226 - RNA, 22 nt, Human
ucacauuuuauaucucugguuu

SEQ ID NO: 796227 - RNA, 22 nt, Human
cagucccagaagagccugggag

SEQ ID NO: 796228 - RNA, 22 nt, Human
ucaugcuuaaaagacacuugag

SEQ ID NO: 796229 - RNA, 22 nt, Human
acugauugcauucauaggguuu

SEQ ID NO: 796230 - RNA, 22 nt, Human
agccaagggucagcugcacaga

SEQ ID NO: 796231 - RNA, 22 nt, Human
ugcgauggcguagacaaauccc

SEQ ID NO: 796232 - RNA, 22 nt, Human
ggcaguggguggaucucaggga

SEQ ID NO: 796233 - RNA, 22 nt, Human
ucagaagcugguguccuuugaa

SEQ ID NO: 796234 - RNA, 22 nt, Human
auguuugcauucuuauuaucgu

SEQ ID NO: 796235 - RNA, 22 nt, Human
uggcagagagacucuccuugau

SEQ ID NO: 796236 - RNA, 22 nt, Human
uuugcugucagccgcuauuuuc

SEQ ID NO: 796237 - RNA, 22 nt, Human
uggagccagagcgcagccuggg

SEQ ID NO: 796238 - RNA, 22 nt, Human
caguuuguauuuauuacucaua

SEQ ID NO: 796239 - RNA, 20 nt, Human
ucuaaacaguuggcaugggg

SEQ ID NO: 796240 - RNA, 22 nt, Human
uuguuaguaagugacaaaaauc

SEQ ID NO: 796241 - RNA, 22 nt, Human
gugcucuguguauuaggauguc

SEQ ID NO: 796242 - RNA, 22 nt, Human
ccaggaaauagugcugugaucu

SEQ ID NO: 796243 - RNA, 22 nt, Human
acaauuacucaacuuugcugcu

SEQ ID NO: 796244 - RNA, 22 nt, Human
cagugcugcaggcgccugcggu

SEQ ID NO: 796245 - RNA, 22 nt, Human
ugaaaauuuccaucaguuauau

SEQ ID NO: 796246 - RNA, 22 nt, Human
cccaggaaacccgaaggcgacc

SEQ ID NO: 796247 - RNA, 22 nt, Human
gaccucucaggaaucucacaug

SEQ ID NO: 796248 - RNA, 22 nt, Human
uaagcaaauagcuagaucagag

SEQ ID NO: 796249 - RNA, 22 nt, Human
ucaggaaguugaggcguagaga

SEQ ID NO: 796250 - RNA, 22 nt, Human
gggcccugugauuucuugagga

SEQ ID NO: 796251 - RNA, 22 nt, Human
uggcagggaguugcaggauuuc

SEQ ID NO: 796252 - RNA, 22 nt, Human
uugcaaauaaacaaguauacau

SEQ ID NO: 796253 - RNA, 22 nt, Human
agggcagcccuucugggagggc

SEQ ID NO: 796254 - RNA, 22 nt, Human
cucugcccucgcacaucugcca

SEQ ID NO: 796255 - RNA, 22 nt, Human
cacuuucucaugaauuuggccc

SEQ ID NO: 796256 - RNA, 22 nt, Human
aaggaaauagaugcagauggua

SEQ ID NO: 796257 - RNA, 22 nt, Human
uuucauauuauuccuugagucu

SEQ ID NO: 796258 - RNA, 22 nt, Human
uucuggaacauagcaagaaguu

SEQ ID NO: 796259 - RNA, 22 nt, Human
gagcagcucugggugacccagu

SEQ ID NO: 796260 - RNA, 22 nt, Human
aguaagugagucacugugcugg

SEQ ID NO: 796261 - RNA, 22 nt, Human
uguggaagggacacuggacugg

SEQ ID NO: 796262 - RNA, 22 nt, Human
uacaaagucaccagcuucuugc

SEQ ID NO: 796263 - RNA, 22 nt, Human
aaagacuuucaccuagcaaaga

SEQ ID NO: 796264 - RNA, 22 nt, Human
ggccuggccuccagaugugggc

SEQ ID NO: 796265 - RNA, 22 nt, Human
cccucaccaggcuccaggcaug

SEQ ID NO: 796266 - RNA, 22 nt, Human
uccuggacagauccccaucauc

SEQ ID NO: 796267 - RNA, 22 nt, Human
ugagaaccacgacugugcuuaa

SEQ ID NO: 796268 - RNA, 22 nt, Human
gacagcuuagugaaaauguaaa

SEQ ID NO: 796269 - RNA, 22 nt, Human
cagcacagugaccagacccacu

SEQ ID NO: 796270 - RNA, 22 nt, Human
uuaaauuuuagaaacagacucu

SEQ ID NO: 796271 - RNA, 22 nt, Human
agccaggauggucucgaucggc

SEQ ID NO: 796272 - RNA, 22 nt, Human
uuucagagccuuuaucucucua

SEQ ID NO: 796273 - RNA, 21 nt, Human
ugcugcugaucgggguuggcu

SEQ ID NO: 796274 - RNA, 22 nt, Human
ggagggagcagagaacccaacc

SEQ ID NO: 796275 - RNA, 22 nt, Human
cauauucuguuggucacauaga

SEQ ID NO: 796276 - RNA, 22 nt, Human
uccacaggaaagcaccucccau

SEQ ID NO: 796277 - RNA, 22 nt, Human
uacaacauaacgggcauucagu

SEQ ID NO: 796278 - RNA, 22 nt, Human
guuucauaugcaguuaacagca

SEQ ID NO: 796279 - RNA, 21 nt, Human
aggcagcgugagggccacuca

SEQ ID NO: 796280 - RNA, 22 nt, Human
ucacagagaaaagcuaucacaa

SEQ ID NO: 796281 - RNA, 22 nt, Human
ugagcugguucuugaggcauga

SEQ ID NO: 796282 - RNA, 21 nt, Human
aaguuuuauguugccauuugu

SEQ ID NO: 796283 - RNA, 22 nt, Human
ggccucaggguugggcccauua

SEQ ID NO: 796284 - RNA, 22 nt, Human
cagagaguggcaguuacugaag

SEQ ID NO: 796285 - RNA, 22 nt, Human
gccagaggcccaaggacagcug

SEQ ID NO: 796286 - RNA, 22 nt, Human
gcucccacaaccuucuugcucc

SEQ ID NO: 796287 - RNA, 22 nt, Human
uauucuuacucucgacugcauu

SEQ ID NO: 796288 - RNA, 22 nt, Human
cagagcuuuggcuagaugguug

SEQ ID NO: 796289 - RNA, 22 nt, Human
acauuugagucauauuugcuua

SEQ ID NO: 796290 - RNA, 22 nt, Human
aggcagggcugggauuagacuc

SEQ ID NO: 796291 - RNA, 22 nt, Human
cuuuggcuuuuagauauccauu

SEQ ID NO: 796292 - RNA, 22 nt, Human
aaacagauaaugcuauaaaugg

SEQ ID NO: 796293 - RNA, 22 nt, Human
gcugccuccgccggcuccacag

SEQ ID NO: 796294 - RNA, 22 nt, Human
acaggacagucuaguaacagua

SEQ ID NO: 796295 - RNA, 22 nt, Human
accaauauaaguauagguaagu

SEQ ID NO: 796296 - RNA, 22 nt, Human
ugcuauaagaauuauauuacuc

SEQ ID NO: 796297 - RNA, 22 nt, Human
agccucagugucaccaucuacc

SEQ ID NO: 796298 - RNA, 22 nt, Human
uuuaauuuuccucuuccuggag

SEQ ID NO: 796299 - RNA, 22 nt, Human
ucuucagguuaacuugucuuuu

SEQ ID NO: 796300 - RNA, 19 nt, Human
ugccacagauaaaaacuga

SEQ ID NO: 796301 - RNA, 22 nt, Human
caggaaauucaagagaggcugc

SEQ ID NO: 796302 - RNA, 22 nt, Human
gucagugugagauaaucuugga

SEQ ID NO: 796303 - RNA, 21 nt, Human
ucagggcagugggagguuccu

SEQ ID NO: 796304 - RNA, 22 nt, Human
ucacauuuuaucugagauugac

SEQ ID NO: 796305 - RNA, 22 nt, Human
uccugggcgagguacuggggcu

SEQ ID NO: 796306 - RNA, 22 nt, Human
uggcccugacacgugguacugg

SEQ ID NO: 796307 - RNA, 22 nt, Human
ggcagccaugcuccaggugcag

SEQ ID NO: 796308 - RNA, 22 nt, Human
ggaguggugucacugagaggaa

SEQ ID NO: 796309 - RNA, 17 nt, Human
uucauuaauaaaagcaa

SEQ ID NO: 796310 - RNA, 23 nt, Human
acaguuauagcugugaauaacau

SEQ ID NO: 796311 - RNA, 22 nt, Human
uuuucuaucuccuagaacugcc

SEQ ID NO: 796312 - RNA, 19 nt, Human
acauuuaaauucagaucuc

SEQ ID NO: 796313 - RNA, 22 nt, Human
gcuggucccaauguguuuccuu

SEQ ID NO: 796314 - RNA, 22 nt, Human
uacaaagagguaauugcauaua

SEQ ID NO: 796315 - RNA, 21 nt, Human
gucuuuaaaaaaggcugauac

SEQ ID NO: 796316 - RNA, 22 nt, Human
uaggaaauauugauuucaguca

SEQ ID NO: 796317 - RNA, 22 nt, Human
gagcagcugguaggugaaccca

SEQ ID NO: 796318 - RNA, 18 nt, Human
uaaaggaagugggagagg

SEQ ID NO: 796319 - RNA, 22 nt, Human
cagggagcacugcgagcggcag

SEQ ID NO: 796320 - RNA, 22 nt, Human
cuggcccagagagcagagcuua

SEQ ID NO: 796321 - RNA, 22 nt, Human
ggcagggguucauuuugucuua

SEQ ID NO: 796322 - RNA, 22 nt, Human
ucaaugucagcugguaggaaau

SEQ ID NO: 796323 - RNA, 21 nt, Human
agcaggcuuuggaguggggcu

SEQ ID NO: 796324 - RNA, 22 nt, Human
gguuuuauagcaguacuaucag

SEQ ID NO: 796325 - RNA, 22 nt, Human
ucugagugaucagaugcauugc

SEQ ID NO: 796326 - RNA, 22 nt, Human
ugucaacagauacuagagagcu

SEQ ID NO: 796327 - RNA, 21 nt, Human
uucaaagagugggcauuguca

SEQ ID NO: 796328 - RNA, 17 nt, Human
auguuaauuucacauuu

SEQ ID NO: 796329 - RNA, 22 nt, Human
aaacaaugaaauucauucuuca

SEQ ID NO: 796330 - RNA, 22 nt, Human
ugcuggggauccguaccaaccc

SEQ ID NO: 796331 - RNA, 22 nt, Human
cagugcagcugccccgcuggua

SEQ ID NO: 796332 - RNA, 22 nt, Human
uggcuuggacuaaauggaccgu

SEQ ID NO: 796333 - RNA, 22 nt, Human
acacaaauuguaggauaauugc

SEQ ID NO: 796334 - RNA, 22 nt, Human
agaaggaaggaagcauucuguu

SEQ ID NO: 796335 - RNA, 22 nt, Human
ugucaagagugcacacaucugc

SEQ ID NO: 796336 - RNA, 22 nt, Human
ugaggcugaaacuggcgauaga

SEQ ID NO: 796337 - RNA, 22 nt, Human
ccacuggcugucagcaggacuc

SEQ ID NO: 796338 - RNA, 22 nt, Human
aagagagacaauagguagcauu

SEQ ID NO: 796339 - RNA, 22 nt, Human
acuuuucaaaugggaaacucag

SEQ ID NO: 796340 - RNA, 22 nt, Human
aaauuucaguuaccuuuacguu

SEQ ID NO: 796341 - RNA, 22 nt, Human
cugcuguguggauucaauggcu

SEQ ID NO: 796342 - RNA, 22 nt, Human
ugcacacacgcggcacaucugu

SEQ ID NO: 796343 - RNA, 22 nt, Human
aaagauuauggcauugaaauac

SEQ ID NO: 796344 - RNA, 22 nt, Human
uucucuugugccaaguuguugc

SEQ ID NO: 796345 - RNA, 22 nt, Human
auauaauacaaccugcuaagug

SEQ ID NO: 796346 - RNA, 22 nt, Human
acauggcaggaaucauguguuu

SEQ ID NO: 796347 - RNA, 22 nt, Human
gugauaaaauucaaauagcucu

SEQ ID NO: 796348 - RNA, 22 nt, Human
uuccuucucagcccucgaggau

SEQ ID NO: 796349 - RNA, 22 nt, Human
cacauacauacguauguauaca

SEQ ID NO: 796350 - RNA, 22 nt, Human
ugugucaaccuguggccgggug

SEQ ID NO: 796351 - RNA, 22 nt, Human
gacaaggagccaccagucacgu

SEQ ID NO: 796352 - RNA, 22 nt, Human
cagcaggaggugaguagcaggu

SEQ ID NO: 796353 - RNA, 21 nt, Human
ugagccaggcugacggcugug

SEQ ID NO: 796354 - RNA, 17 nt, Human
ucagcaggggccaagcu

SEQ ID NO: 796355 - RNA, 22 nt, Human
cuggagcccaggccuggugucu

SEQ ID NO: 796356 - RNA, 22 nt, Human
ucucugcauccccagggcucuc

SEQ ID NO: 796357 - RNA, 22 nt, Human
caggguuucaccauguuagcag

SEQ ID NO: 796358 - RNA, 22 nt, Human
aaauguaagucuuuguuucuua

SEQ ID NO: 796359 - RNA, 22 nt, Human
caucauuuguuugcaugcagga

SEQ ID NO: 796360 - RNA, 22 nt, Human
ugagaauuuuuugucaugcauu

SEQ ID NO: 796361 - RNA, 22 nt, Human
uaugaaaugauggggaaaauag

SEQ ID NO: 796362 - RNA, 22 nt, Human
acuucccacacccuguuuucuc

SEQ ID NO: 796363 - RNA, 22 nt, Human
gucagugugaguugauuccaua

SEQ ID NO: 796364 - RNA, 19 nt, Human
ucagaggauuuggcuauga

SEQ ID NO: 796365 - RNA, 22 nt, Human
ugggcuccagcaccugugcucu

SEQ ID NO: 796366 - RNA, 22 nt, Human
agcugggguugcacacauuuug

SEQ ID NO: 796367 - RNA, 22 nt, Human
ucccugcuuucuugugagggga

SEQ ID NO: 796368 - RNA, 22 nt, Human
gacccugguguccagguccugc

SEQ ID NO: 796369 - RNA, 22 nt, Human
ucuuggauuuuaauggaucaaa

SEQ ID NO: 796370 - RNA, 22 nt, Human
ucaggaaagaguguauccauca

SEQ ID NO: 796371 - RNA, 22 nt, Human
uucauucuugggaucagagagu

SEQ ID NO: 796372 - RNA, 22 nt, Human
guggggggagcugcaagcugga

SEQ ID NO: 796373 - RNA, 22 nt, Human
cagccucuguggcugccacacc

SEQ ID NO: 796374 - RNA, 22 nt, Human
cagcuucuagcaucggcuuuga

SEQ ID NO: 796375 - RNA, 20 nt, Human
aggaaaaggguggugguaga

SEQ ID NO: 796376 - RNA, 22 nt, Human
gugccucugagcucugcuacag

SEQ ID NO: 796377 - RNA, 22 nt, Human
gcccaggaguuggaggcugcag

SEQ ID NO: 796378 - RNA, 19 nt, Human
uaaaggaagaggaagggaa

SEQ ID NO: 796379 - RNA, 22 nt, Human
ugucugaacugcacugaaagac

SEQ ID NO: 796380 - RNA, 22 nt, Human
gagcaacaguuuaugguuuuuc

SEQ ID NO: 796381 - RNA, 22 nt, Human
augucuuucuugugucccaaga

SEQ ID NO: 796382 - RNA, 21 nt, Human
aaaugcagucucugagaucug

SEQ ID NO: 796383 - RNA, 22 nt, Human
caggaaauuagucucucuguug

SEQ ID NO: 796384 - RNA, 22 nt, Human
cacacauugguuuuacuccuuu

SEQ ID NO: 796385 - RNA, 22 nt, Human
acaagaaagguaggauucaggu

SEQ ID NO: 796386 - RNA, 22 nt, Human
aaaucagaucuuacacaauugu

SEQ ID NO: 796387 - RNA, 22 nt, Human
ucccagcaggaguccaguuccc

SEQ ID NO: 796388 - RNA, 22 nt, Human
ucaauguaauaaaauacucuau

SEQ ID NO: 796389 - RNA, 22 nt, Human
uacaucuagccuuacaauuauu

SEQ ID NO: 796390 - RNA, 22 nt, Human
uggugcugagaugaagugcucc

SEQ ID NO: 796391 - RNA, 22 nt, Human
auggugguagaagcacuaugug

SEQ ID NO: 796392 - RNA, 23 nt, Human
ggagcugcuguugggggagcugc

SEQ ID NO: 796393 - RNA, 22 nt, Human
ccaguucuaaacauaaagcuaa

SEQ ID NO: 796394 - RNA, 22 nt, Human
uuuuucuugugcuggaucuaau

SEQ ID NO: 796395 - RNA, 22 nt, Human
uaacaauuugcuucauuuguuu

SEQ ID NO: 796396 - RNA, 18 nt, Human
ucaguguagaucugugua

SEQ ID NO: 796397 - RNA, 22 nt, Human
uguauuuucugaagauaaucaa

SEQ ID NO: 796398 - RNA, 22 nt, Human
ucuuucaaaugcuugaauugga

SEQ ID NO: 796399 - RNA, 22 nt, Human
cugcugugaguuuggaggucua

SEQ ID NO: 796400 - RNA, 22 nt, Human
cagacagggaccucgcuccaga

SEQ ID NO: 796401 - RNA, 22 nt, Human
uuaaauguuuaaucuaacuuga

SEQ ID NO: 796402 - RNA, 22 nt, Human
agugugagugcucauguccauc

SEQ ID NO: 796403 - RNA, 22 nt, Human
cuggagcccugaaugggcagga

SEQ ID NO: 796404 - RNA, 22 nt, Human
agcucagaaaugccaguaggua

SEQ ID NO: 796405 - RNA, 23 nt, Human
agcaggcugcuucuccacagcug

SEQ ID NO: 796406 - RNA, 22 nt, Human
uguguucauguugauucauagc

SEQ ID NO: 796407 - RNA, 22 nt, Human
agcauggacaguggcagcagug

SEQ ID NO: 796408 - RNA, 23 nt, Human
acagugucugcugcaagauaucu

SEQ ID NO: 796409 - RNA, 22 nt, Human
aaaagagucuuaggcagucaua

SEQ ID NO: 796410 - RNA, 22 nt, Human
uagcuuugaacuucugggcuca

SEQ ID NO: 796411 - RNA, 22 nt, Human
ucuuugcauuccugugugcuuu

SEQ ID NO: 796412 - RNA, 22 nt, Human
aguggugaugucucuauuauug

SEQ ID NO: 796413 - RNA, 22 nt, Human
uaggggagcucgggugcaaucg

SEQ ID NO: 796414 - RNA, 22 nt, Human
acucagagaaacagcagggugu

SEQ ID NO: 796415 - RNA, 22 nt, Human
aaacaugaguuaaaaguaacug

SEQ ID NO: 796416 - RNA, 22 nt, Human
auucuucauguugaagcuguca

SEQ ID NO: 796417 - RNA, 19 nt, Human
uaacaaagucugaagucag

SEQ ID NO: 796418 - RNA, 23 nt, Human
uaucauuucagcucucugccugg

SEQ ID NO: 796419 - RNA, 22 nt, Human
gcacauggcggccagcagguga

SEQ ID NO: 796420 - RNA, 22 nt, Human
ucagcaggcagugggucacaau

SEQ ID NO: 796421 - RNA, 19 nt, Human
ccugcugaagugaugcagc

SEQ ID NO: 796422 - RNA, 22 nt, Human
caagcaggguuuaugcauggag

SEQ ID NO: 796423 - RNA, 22 nt, Human
cagguaaaaauaaauuugugag

SEQ ID NO: 796424 - RNA, 22 nt, Human
cagcccuguccaaugucugcuc

SEQ ID NO: 796425 - RNA, 22 nt, Human
uuuauuucacucuccggauacu

SEQ ID NO: 796426 - RNA, 22 nt, Human
uuccuuccgggcaccaggcacu

SEQ ID NO: 796427 - RNA, 17 nt, Human
aaacugaaaaauucacu

SEQ ID NO: 796428 - RNA, 22 nt, Human
ugcaggcugcagucucaggugg

SEQ ID NO: 796429 - RNA, 22 nt, Human
uguggugagaaacugguagauu

SEQ ID NO: 796430 - RNA, 22 nt, Human
agcaggaguguccccuggcugu

SEQ ID NO: 796431 - RNA, 22 nt, Human
uuuauugacuucagugagucuu

SEQ ID NO: 796432 - RNA, 22 nt, Human
acaccauacucauguugguucc

SEQ ID NO: 796433 - RNA, 23 nt, Human
caggaaaugcuuggaggggcugg

SEQ ID NO: 796434 - RNA, 22 nt, Human
aucuacagcugucugcacagua

SEQ ID NO: 796435 - RNA, 22 nt, Human
uuucuguuguauggcuucugca

SEQ ID NO: 796436 - RNA, 20 nt, Human
agauuaggggcuuucuucuu

SEQ ID NO: 796437 - RNA, 22 nt, Human
aagccagggguugguaugcuau

SEQ ID NO: 796438 - RNA, 22 nt, Human
ggcuguggacacugagcucaga

SEQ ID NO: 796439 - RNA, 22 nt, Human
guucacaucacuucacugaacc

SEQ ID NO: 796440 - RNA, 22 nt, Human
ggcccagccggcgagucucgcg

SEQ ID NO: 796441 - RNA, 22 nt, Human
ccugcccugucacuggcuaggg

SEQ ID NO: 796442 - RNA, 22 nt, Human
ggugggccaggaaggccgccag

SEQ ID NO: 796443 - RNA, 22 nt, Human
agggcugguauguccaugaaag

SEQ ID NO: 796444 - RNA, 18 nt, Human
gaggauggaaggagaugc

SEQ ID NO: 796445 - RNA, 22 nt, Human
aggcgagaggcuugggcuagua

SEQ ID NO: 796446 - RNA, 22 nt, Human
uggcaauauuaacaguacuuau

SEQ ID NO: 796447 - RNA, 22 nt, Human
gagccaagcaccacauuaaguu

SEQ ID NO: 796448 - RNA, 22 nt, Human
agucccagaucuacaggaggga

SEQ ID NO: 796449 - RNA, 22 nt, Human
ucacauuuucauauucucugag

SEQ ID NO: 796450 - RNA, 22 nt, Human
gcugggcugcgucggggaagcc

SEQ ID NO: 796451 - RNA, 22 nt, Human
caggagaagguuuggagugcag

SEQ ID NO: 796452 - RNA, 22 nt, Human
cagucuuaggagaaacuacaga

SEQ ID NO: 796453 - RNA, 22 nt, Human
ucccagcauaacaaacugcccg

SEQ ID NO: 796454 - RNA, 22 nt, Human
acuugauuuuuauaauaaaugg

SEQ ID NO: 796455 - RNA, 22 nt, Human
auugugauuagagaauauagag

SEQ ID NO: 796456 - RNA, 22 nt, Human
cacagugcaugaugggcagaag

SEQ ID NO: 796457 - RNA, 22 nt, Human
gcccccagaccucagugggcug

SEQ ID NO: 796458 - RNA, 22 nt, Human
acaugagauuuggguggugaua

SEQ ID NO: 796459 - RNA, 22 nt, Human
uuucuucuguuuguaguuacac

SEQ ID NO: 796460 - RNA, 19 nt, Human
cuuuucaucaacagccaau

SEQ ID NO: 796461 - RNA, 22 nt, Human
uuuccaaagguggcaggaacaa

SEQ ID NO: 796462 - RNA, 22 nt, Human
cucccuggaggcccagaccugg

SEQ ID NO: 796463 - RNA, 22 nt, Human
agcuggaggauaacucacuucu

SEQ ID NO: 796464 - RNA, 22 nt, Human
cagaagcaaaugccuugcugag

SEQ ID NO: 796465 - RNA, 22 nt, Human
auggcccacucuggucccggca

SEQ ID NO: 796466 - RNA, 22 nt, Human
aguauuuagagacacaagaugg

SEQ ID NO: 796467 - RNA, 22 nt, Human
gggauuacagaugugagccauu

SEQ ID NO: 796468 - RNA, 23 nt, Human
gucucuagaguguggagcaaaga

SEQ ID NO: 796469 - RNA, 22 nt, Human
ucugacauuuugagaaugacau

SEQ ID NO: 796470 - RNA, 22 nt, Human
aggcuugguuaauucuguguga

SEQ ID NO: 796471 - RNA, 22 nt, Human
aaugucauagcauuucuucaau

SEQ ID NO: 796472 - RNA, 22 nt, Human
uaggggugaggccaggcaucag

SEQ ID NO: 796473 - RNA, 22 nt, Human
aguguuuuuacaagcacucugg

SEQ ID NO: 796474 - RNA, 22 nt, Human
ucuuccagucuguaggacuagg

SEQ ID NO: 796475 - RNA, 22 nt, Human
auggcaggauacccaguccggc

SEQ ID NO: 796476 - RNA, 22 nt, Human
ugcucugcaagcaggagcaaga

SEQ ID NO: 796477 - RNA, 22 nt, Human
agggaagagcuugcaagaaacc

SEQ ID NO: 796478 - RNA, 22 nt, Human
ucauaaaaguacucauguucau

SEQ ID NO: 796479 - RNA, 18 nt, Human
ucacaugacagcuguugc

SEQ ID NO: 796480 - RNA, 22 nt, Human
ugaaggccuaacuuccagugcu

SEQ ID NO: 796481 - RNA, 22 nt, Human
uaguuucuucaccuguaaaaug

SEQ ID NO: 796482 - RNA, 22 nt, Human
aggcaaggugcuacagacagug

SEQ ID NO: 796483 - RNA, 22 nt, Human
cuaguguacaagugguggagau

SEQ ID NO: 796484 - RNA, 22 nt, Human
aggcaggcucuggguaugugca

SEQ ID NO: 796485 - RNA, 22 nt, Human
caaagucuuggugaucaacuuu

SEQ ID NO: 796486 - RNA, 22 nt, Human
ggaggccaucuggcuggaggcu

SEQ ID NO: 796487 - RNA, 20 nt, Human
gauaaauugucucuuaagug

SEQ ID NO: 796488 - RNA, 22 nt, Human
aauguuacauaacccauugucc

SEQ ID NO: 796489 - RNA, 22 nt, Human
acuugaauuuaguuuuuccuaa

SEQ ID NO: 796490 - RNA, 22 nt, Human
aaauaacuugguuucaucagag

SEQ ID NO: 796491 - RNA, 22 nt, Human
gucacagaucucuugagucaag

SEQ ID NO: 796492 - RNA, 22 nt, Human
cagcuucuggcguggagccuga

SEQ ID NO: 796493 - RNA, 22 nt, Human
aguggagaagaggauggucucc

SEQ ID NO: 796494 - RNA, 22 nt, Human
uuagaacaauauucucccuaca

SEQ ID NO: 796495 - RNA, 22 nt, Human
ucaggacagggaucacaucauc

SEQ ID NO: 796496 - RNA, 22 nt, Human
ucucaggaauagaguggcagca

SEQ ID NO: 796497 - RNA, 22 nt, Human
gcaggcuuugacuuggggcagc

SEQ ID NO: 796498 - RNA, 23 nt, Human
aggaacugaggccuagggaggua

SEQ ID NO: 796499 - RNA, 21 nt, Human
aggugggcagguggaguggcc

SEQ ID NO: 796500 - RNA, 22 nt, Human
ggcagggacuuugcaaaucuuu

SEQ ID NO: 796501 - RNA, 22 nt, Human
agaagccaauucugugugaguc

SEQ ID NO: 796502 - RNA, 22 nt, Human
caaggcaggccaguuucaaggc

SEQ ID NO: 796503 - RNA, 22 nt, Human
ugaaauaggaaacagauguuuc

SEQ ID NO: 796504 - RNA, 22 nt, Human
uccagggagauggcagaggcug

SEQ ID NO: 796505 - RNA, 22 nt, Human
gacaguuuaagcaccuaauauu

SEQ ID NO: 796506 - RNA, 22 nt, Human
cccaggcacucuuggucauuuu

SEQ ID NO: 796507 - RNA, 17 nt, Human
cuuggcugcugugcgau

SEQ ID NO: 796508 - RNA, 23 nt, Human
ugguucaagugagaaguaauguu

SEQ ID NO: 796509 - RNA, 22 nt, Human
caagcuggagguuggagcuacu

SEQ ID NO: 796510 - RNA, 22 nt, Human
caugcuaaaccagaacauagga

SEQ ID NO: 796511 - RNA, 22 nt, Human
gcuugcagcaggugcuuaggaa

SEQ ID NO: 796512 - RNA, 22 nt, Human
ugguggagccuaggcuaagucu

SEQ ID NO: 796513 - RNA, 22 nt, Human
acaaucuuauuaguaguauaga

SEQ ID NO: 796514 - RNA, 22 nt, Human
agcagggggaguuagacuagau

SEQ ID NO: 796515 - RNA, 22 nt, Human
aucucagggcuggagcccugga

SEQ ID NO: 796516 - RNA, 22 nt, Human
caggcagcucuaauggaaagug

SEQ ID NO: 796517 - RNA, 22 nt, Human
ucugugcuaaugcuucacaaua

SEQ ID NO: 796518 - RNA, 22 nt, Human
agcccugggcguuacugggaug

SEQ ID NO: 796519 - RNA, 22 nt, Human
ugagcugaguggcaggucucag

SEQ ID NO: 796520 - RNA, 22 nt, Human
gacauuuauuagaaaacuauca

SEQ ID NO: 796521 - RNA, 22 nt, Human
agaaaucagaacccugaaguuc

SEQ ID NO: 796522 - RNA, 22 nt, Human
aauccauguugauguauauuuu

SEQ ID NO: 796523 - RNA, 22 nt, Human
auaaacuggguaucaagaggcc

SEQ ID NO: 796524 - RNA, 22 nt, Human
cccagcagggucucugugucua

SEQ ID NO: 796525 - RNA, 23 nt, Human
cccugcacuaagaggagaaggug

SEQ ID NO: 796526 - RNA, 18 nt, Human
gacccagcagaugggcuu

SEQ ID NO: 796527 - RNA, 22 nt, Human
ucaggaagggcucagucugugc

SEQ ID NO: 796528 - RNA, 22 nt, Human
aucuuacauucccucaccauuu

SEQ ID NO: 796529 - RNA, 22 nt, Human
gacuccccugggccccauccag

SEQ ID NO: 796530 - RNA, 18 nt, Human
ggccucagccuggccgga

SEQ ID NO: 796531 - RNA, 20 nt, Human
uucuauggaccaguauauuu

SEQ ID NO: 796532 - RNA, 22 nt, Human
cucugggaagggcugagcacug

SEQ ID NO: 796533 - RNA, 22 nt, Human
ucaggcagaugcagggauggau

SEQ ID NO: 796534 - RNA, 22 nt, Human
ugguggcagugagaaggagagg

SEQ ID NO: 796535 - RNA, 22 nt, Human
uuuuugucuagcgucucuaguu

SEQ ID NO: 796536 - RNA, 22 nt, Human
aucacagagauugcuuuuaaaa

SEQ ID NO: 796537 - RNA, 22 nt, Human
acaguucaagucuuagacaaca

SEQ ID NO: 796538 - RNA, 22 nt, Human
aguccauaggcaguucauaaca

SEQ ID NO: 796539 - RNA, 22 nt, Human
ucccagccacaguuuccaccug

SEQ ID NO: 796540 - RNA, 22 nt, Human
ugaggcccagccgcccugagag

SEQ ID NO: 796541 - RNA, 22 nt, Human
auaacaugaccugugcuucaca

SEQ ID NO: 796542 - RNA, 22 nt, Human
aagugaugcuacgacuuugaca

SEQ ID NO: 796543 - RNA, 20 nt, Human
agcuccuggacuagagagug

SEQ ID NO: 796544 - RNA, 22 nt, Human
aaucaacauuguuuuaagucaa

SEQ ID NO: 796545 - RNA, 22 nt, Human
caugcaaaggucaagaucagga

SEQ ID NO: 796546 - RNA, 22 nt, Human
caccugcagggggagucaagag

SEQ ID NO: 796547 - RNA, 22 nt, Human
uuccuuccuccuccaguucugg

SEQ ID NO: 796548 - RNA, 22 nt, Human
gggugggaugccgcugucucca

SEQ ID NO: 796549 - RNA, 22 nt, Human
uuuagagacccucugcuauuuu

SEQ ID NO: 796550 - RNA, 22 nt, Human
aggagagagaacacuugggucc

SEQ ID NO: 796551 - RNA, 22 nt, Human
ccacagaaaauaaagcacgauu

SEQ ID NO: 796552 - RNA, 22 nt, Human
acaaguuaccaaaaaagauuca

SEQ ID NO: 796553 - RNA, 22 nt, Human
cuuuacaaacuauaaagugcgg

SEQ ID NO: 796554 - RNA, 22 nt, Human
gccuaauacaugaugauaggua

SEQ ID NO: 796555 - RNA, 22 nt, Human
gaguuucuccagugcuaguugu

SEQ ID NO: 796556 - RNA, 22 nt, Human
gccaucucggagcuaucaaagg

SEQ ID NO: 796557 - RNA, 22 nt, Human
agggcugccugacuccagagcc

SEQ ID NO: 796558 - RNA, 22 nt, Human
uucuuacaaguaugacguagca

SEQ ID NO: 796559 - RNA, 22 nt, Human
agaaaguacagaugagacacuu

SEQ ID NO: 796560 - RNA, 22 nt, Human
uugguucaacuuuucuaaguag

SEQ ID NO: 796561 - RNA, 22 nt, Human
uaucacaauuccuauaguuugu

SEQ ID NO: 796562 - RNA, 22 nt, Human
acauuuaaauaccuauguuucu

SEQ ID NO: 796563 - RNA, 22 nt, Human
ugcuuuauaacuuaguuuaugg

SEQ ID NO: 796564 - RNA, 22 nt, Human
agaacuuaggaacaacagcuua

SEQ ID NO: 796565 - RNA, 22 nt, Human
uuccagaguccauguuggcuca

SEQ ID NO: 796566 - RNA, 22 nt, Human
guuucauaggcaugugaccuau

SEQ ID NO: 796567 - RNA, 22 nt, Human
cuccuggcccugagcucccagg

SEQ ID NO: 796568 - RNA, 22 nt, Human
uauuucagacacugaucuugca

SEQ ID NO: 796569 - RNA, 22 nt, Human
ggcuggcacugaggagagcucu

SEQ ID NO: 796570 - RNA, 22 nt, Human
aaggcagagauauucuugaucu

SEQ ID NO: 796571 - RNA, 22 nt, Human
ugaaaucauugccaaguauuga

SEQ ID NO: 796572 - RNA, 22 nt, Human
ucucagugcagcaaggaauuua

SEQ ID NO: 796573 - RNA, 22 nt, Human
acaguacaagcaaugcauuuuu

SEQ ID NO: 796574 - RNA, 22 nt, Human
cuucacaugauguccgugcugu

SEQ ID NO: 796575 - RNA, 22 nt, Human
acauagaaccuggcacauagua

SEQ ID NO: 796576 - RNA, 23 nt, Human
uuccagaggaagaagucaugacu

SEQ ID NO: 796577 - RNA, 22 nt, Human
aacauagcuuuacucaaaugac

SEQ ID NO: 796578 - RNA, 22 nt, Human
aaagcaagucucuacaaaguac

SEQ ID NO: 796579 - RNA, 22 nt, Human
ugcuggaggccugacuguguuu

SEQ ID NO: 796580 - RNA, 22 nt, Human
gauggaggagauggcagggugc

SEQ ID NO: 796581 - RNA, 22 nt, Human
gcauguggugcugaggcugucg

SEQ ID NO: 796582 - RNA, 22 nt, Human
aggcauggcauggggcagaugu

SEQ ID NO: 796583 - RNA, 22 nt, Human
uaaaugagauguacauaacuca

SEQ ID NO: 796584 - RNA, 22 nt, Human
gcuggcuuaauagggaugggcu

SEQ ID NO: 796585 - RNA, 22 nt, Human
ggagugggaacaaugacauggu

SEQ ID NO: 796586 - RNA, 22 nt, Human
gaggcagcuuggggcugugggu

SEQ ID NO: 796587 - RNA, 22 nt, Human
agcacagacuggucccaggucu

SEQ ID NO: 796588 - RNA, 17 nt, Human
gcccugccugcugcccu

SEQ ID NO: 796589 - RNA, 22 nt, Human
gaauuacauaauaaaaugagag

SEQ ID NO: 796590 - RNA, 22 nt, Human
gcaagcacagauagacucagcc

SEQ ID NO: 796591 - RNA, 22 nt, Human
cugggggcaagcagacagcugu

SEQ ID NO: 796592 - RNA, 22 nt, Human
agauuuauguggucacacucag

SEQ ID NO: 796593 - RNA, 22 nt, Human
aaguuacaguuauuauuuaaaa

SEQ ID NO: 796594 - RNA, 22 nt, Human
gcaggugggagccgcugccuga

SEQ ID NO: 796595 - RNA, 22 nt, Human
auccuuaauuuacuugcaucuu

SEQ ID NO: 796596 - RNA, 22 nt, Human
ucaagagacaggacguguuuca

SEQ ID NO: 796597 - RNA, 22 nt, Human
gcaacagcauucucauugacau

SEQ ID NO: 796598 - RNA, 22 nt, Human
cagaggaaggcucugggaaugu

SEQ ID NO: 796599 - RNA, 18 nt, Human
uggacacauggccugggu

SEQ ID NO: 796600 - RNA, 22 nt, Human
agcugaaagcuugacuggggcu

SEQ ID NO: 796601 - RNA, 22 nt, Human
aggcugagguaggaggaucgcu

SEQ ID NO: 796602 - RNA, 22 nt, Human
acauuucucagguaagucauuu

SEQ ID NO: 796603 - RNA, 22 nt, Human
auuauuauuguugauguuaggg

SEQ ID NO: 796604 - RNA, 22 nt, Human
uugguucaauacuaacuugaac

SEQ ID NO: 796605 - RNA, 22 nt, Human
cuagaaauauuuuacagucaag

SEQ ID NO: 796606 - RNA, 22 nt, Human
cccaggcagccccagaagcuug

SEQ ID NO: 796607 - RNA, 22 nt, Human
caggcagagcaacugguccaga

SEQ ID NO: 796608 - RNA, 22 nt, Human
cuggcuggccaugcagcgccag

SEQ ID NO: 796609 - RNA, 18 nt, Human
cugugggaaggcuuucua

SEQ ID NO: 796610 - RNA, 22 nt, Human
uuccucaguuagugccugaggc

SEQ ID NO: 796611 - RNA, 22 nt, Human
cccaggaggaggaaaaagcucg

SEQ ID NO: 796612 - RNA, 22 nt, Human
aucgcaaguuuaaaaaucuuug

SEQ ID NO: 796613 - RNA, 22 nt, Human
uuucacauucuucugaaucuac

SEQ ID NO: 796614 - RNA, 22 nt, Human
gccacagcucacguuccccauu

SEQ ID NO: 796615 - RNA, 22 nt, Human
uauuaacaugaacugacuuuuc

SEQ ID NO: 796616 - RNA, 18 nt, Human
ucagacaaguuagacagg

SEQ ID NO: 796617 - RNA, 20 nt, Human
ucuuugugucagauggacag

SEQ ID NO: 796618 - RNA, 19 nt, Human
agaaauagccuuccuuguc

SEQ ID NO: 796619 - RNA, 22 nt, Human
ccacaggcugcugcaggucccg

SEQ ID NO: 796620 - RNA, 22 nt, Human
ugauaaacagcugaugaagacc

SEQ ID NO: 796621 - RNA, 20 nt, Human
agccaggguucuggaugcac

SEQ ID NO: 796622 - RNA, 18 nt, Human
guuuacauuacugaauag

SEQ ID NO: 796623 - RNA, 22 nt, Human
uggugagaaguuuugagauucu

SEQ ID NO: 796624 - RNA, 22 nt, Human
gcccagcccagaaagguucgga

SEQ ID NO: 796625 - RNA, 22 nt, Human
gcagcugagcgugaggaagagu

SEQ ID NO: 796626 - RNA, 22 nt, Human
acaggcaccugccaccacaucu

SEQ ID NO: 796627 - RNA, 21 nt, Human
aucugaaguuugagaggaaag

SEQ ID NO: 796628 - RNA, 22 nt, Human
acagggcagagaggcaggcuug

SEQ ID NO: 796629 - RNA, 22 nt, Human
aauccauagaauaaaauugcag

SEQ ID NO: 796630 - RNA, 18 nt, Human
ggaugcugugugcuccuu

SEQ ID NO: 796631 - RNA, 22 nt, Human
cugggcuggagugcaauggcgc

SEQ ID NO: 796632 - RNA, 19 nt, Human
uugagaacaccaaguacug

SEQ ID NO: 796633 - RNA, 22 nt, Human
ggagccugggccuccugcccuu

SEQ ID NO: 796634 - RNA, 22 nt, Human
uaaaggcacggaguuguuaugg

SEQ ID NO: 796635 - RNA, 22 nt, Human
uauauuaacuugugauccugga

SEQ ID NO: 796636 - RNA, 18 nt, Human
ucacagaauauugagugg

SEQ ID NO: 796637 - RNA, 22 nt, Human
ugccgcuccaggucucgcggug

SEQ ID NO: 796638 - RNA, 22 nt, Human
uuugauaugcaaaauuauggac

SEQ ID NO: 796639 - RNA, 22 nt, Human
uggcuucccauagcuugcuagu

SEQ ID NO: 796640 - RNA, 22 nt, Human
uccuggaagccagaguugagga

SEQ ID NO: 796641 - RNA, 22 nt, Human
aggcaagaccagaaagggcuga

SEQ ID NO: 796642 - RNA, 22 nt, Human
agccagcugccuuucacaucug

SEQ ID NO: 796643 - RNA, 18 nt, Human
ucaggcuggaaguuugcc

SEQ ID NO: 796644 - RNA, 22 nt, Human
cuucuauuuucaugccuggguc

SEQ ID NO: 796645 - RNA, 22 nt, Human
gccuccccugcaauuguccuug

SEQ ID NO: 796646 - RNA, 22 nt, Human
gcuggcuggcacguucgcacgu

SEQ ID NO: 796647 - RNA, 22 nt, Human
cagaagcauugacuccuugcuc

SEQ ID NO: 796648 - RNA, 22 nt, Human
gcucagaguggccuggcuaggg

SEQ ID NO: 796649 - RNA, 22 nt, Human
cugugacugcagcaccaaguaa

SEQ ID NO: 796650 - RNA, 23 nt, Human
gagagcaaugagauguaaacacu

SEQ ID NO: 796651 - RNA, 22 nt, Human
agaaacauccugcuuuccauuu

SEQ ID NO: 796652 - RNA, 22 nt, Human
cugcacuguguaacagauaacu

SEQ ID NO: 796653 - RNA, 22 nt, Human
ucaggaacauaaugugagucag

SEQ ID NO: 796654 - RNA, 22 nt, Human
uccuaggcuccagaacugugaa

SEQ ID NO: 796655 - RNA, 22 nt, Human
ugacauuuaucaaagaaauggu

SEQ ID NO: 796656 - RNA, 22 nt, Human
ggcaggugacggggaugaguau

SEQ ID NO: 796657 - RNA, 18 nt, Human
ccaggacaggcaaaaggu

SEQ ID NO: 796658 - RNA, 21 nt, Human
aaaaugugagcgugaugcuua

SEQ ID NO: 796659 - RNA, 22 nt, Human
agaugcugaauuauugugcuuu

SEQ ID NO: 796660 - RNA, 22 nt, Human
agccucucuguuagucacuggg

SEQ ID NO: 796661 - RNA, 22 nt, Human
uuucugcaaacuuccacgucuc

SEQ ID NO: 796662 - RNA, 22 nt, Human
uggggaaaguucuugaaaguaa

SEQ ID NO: 796663 - RNA, 22 nt, Human
acaacaguagccuuuacaaggc

SEQ ID NO: 796664 - RNA, 22 nt, Human
gacuuuggauucauuaucugga

SEQ ID NO: 796665 - RNA, 22 nt, Human
agugugacuacauuacaagagu

SEQ ID NO: 796666 - RNA, 22 nt, Human
gucccugggaaaggagagggca

SEQ ID NO: 796667 - RNA, 22 nt, Human
cagccugacuauggcugcaggu

SEQ ID NO: 796668 - RNA, 21 nt, Human
uccuccuggccaggcggcccc

SEQ ID NO: 796669 - RNA, 22 nt, Human
uuucuuauauucugucauuguu

SEQ ID NO: 796670 - RNA, 22 nt, Human
acgggcagacagagcuacucgc

SEQ ID NO: 796671 - RNA, 22 nt, Human
gcuaagggaggcaugccguggu

SEQ ID NO: 796672 - RNA, 18 nt, Human
caaauacuguugucuuau

SEQ ID NO: 796673 - RNA, 22 nt, Human
auauauuuuuugagacagaguc

SEQ ID NO: 796674 - RNA, 22 nt, Human
auauuaaugggauuuagucagg

SEQ ID NO: 796675 - RNA, 22 nt, Human
ggaggccaggugggagucaucu

SEQ ID NO: 796676 - RNA, 22 nt, Human
ugaacuuuuauuugaugacagg

SEQ ID NO: 796677 - RNA, 22 nt, Human
cugagcagcguggggagcuggc

SEQ ID NO: 796678 - RNA, 22 nt, Human
aaaagguagauucuccuucuau

SEQ ID NO: 796679 - RNA, 22 nt, Human
gaaaauacaaauagccuugaaa

SEQ ID NO: 796680 - RNA, 22 nt, Human
guuucugagagccacacacagc

SEQ ID NO: 796681 - RNA, 22 nt, Human
uacagaauguuaugaagcauag

SEQ ID NO: 796682 - RNA, 22 nt, Human
uccagcagaaccagagaccugg

SEQ ID NO: 796683 - RNA, 22 nt, Human
gcagcugaauguccauugcugc

SEQ ID NO: 796684 - RNA, 22 nt, Human
gccugccucaaaaucccaguuc

SEQ ID NO: 796685 - RNA, 22 nt, Human
uccagagaucacacugggcagg

SEQ ID NO: 796686 - RNA, 22 nt, Human
gccuuggacucggguggacuca

SEQ ID NO: 796687 - RNA, 22 nt, Human
agucuucccugugccagagugu

SEQ ID NO: 796688 - RNA, 22 nt, Human
gucuagggcuccucagugacaa

SEQ ID NO: 796689 - RNA, 22 nt, Human
caucaggaucucucuggaaugc

SEQ ID NO: 796690 - RNA, 22 nt, Human
uggggaaaaugcuuguagucag

SEQ ID NO: 796691 - RNA, 22 nt, Human
aggcccagggcugcucucugaa

SEQ ID NO: 796692 - RNA, 22 nt, Human
ugggagauauugcuguggcugu

SEQ ID NO: 796693 - RNA, 21 nt, Human
aacauuuggcuggcuuuugug

SEQ ID NO: 796694 - RNA, 22 nt, Human
gaauguaauagucaguagaaca

SEQ ID NO: 796695 - RNA, 22 nt, Human
caagaugccccugguagggauc

SEQ ID NO: 796696 - RNA, 22 nt, Human
cacaggcuccggccuugcagcc

SEQ ID NO: 796697 - RNA, 22 nt, Human
aagaugauguuguguuuucacu

SEQ ID NO: 796698 - RNA, 22 nt, Human
agccagggcugcgagcagacag

SEQ ID NO: 796699 - RNA, 22 nt, Human
cagagaaacucagauagcugau

SEQ ID NO: 796700 - RNA, 22 nt, Human
aucuagaacaauuauugucaca

SEQ ID NO: 796701 - RNA, 22 nt, Human
gcugcaggcauuuuccugggca

SEQ ID NO: 796702 - RNA, 22 nt, Human
gucauuuucuagaauuauuuga

SEQ ID NO: 796703 - RNA, 22 nt, Human
auagauacauuguuauauuugu

SEQ ID NO: 796704 - RNA, 22 nt, Human
acagcaggaagcuggagggaaa

SEQ ID NO: 796705 - RNA, 22 nt, Human
aagucagagaucaaggugucua

SEQ ID NO: 796706 - RNA, 19 nt, Human
caggccagugucagggggc

SEQ ID NO: 796707 - RNA, 22 nt, Human
ccaggaagguguuuaacuagag

SEQ ID NO: 796708 - RNA, 20 nt, Human
gcagccguggagacuaggag

SEQ ID NO: 796709 - RNA, 22 nt, Human
ggcucugccugcccagcagcac

SEQ ID NO: 796710 - RNA, 22 nt, Human
cauggccacaucuagcugcaag

SEQ ID NO: 796711 - RNA, 22 nt, Human
uuaagucacuuaucuaaagaca

SEQ ID NO: 796712 - RNA, 22 nt, Human
ucaguguccaaaaagaggcaag

SEQ ID NO: 796713 - RNA, 22 nt, Human
gcuucauuacugacagucugug

SEQ ID NO: 796714 - RNA, 18 nt, Human
acccaggcucaugguccu

SEQ ID NO: 796715 - RNA, 21 nt, Human
ugggccucaaguggguggcag

SEQ ID NO: 796716 - RNA, 18 nt, Human
gucauggguaguuuagua

SEQ ID NO: 796717 - RNA, 22 nt, Human
ggaaacauuccaagaguugaaa

SEQ ID NO: 796718 - RNA, 22 nt, Human
cccagccuacucugccauagca

SEQ ID NO: 796719 - RNA, 22 nt, Human
gugcaggagcaggagccauguc

SEQ ID NO: 796720 - RNA, 22 nt, Human
agcuuccuugaauucuguagaa

SEQ ID NO: 796721 - RNA, 22 nt, Human
auugagaagcuugcagauuuuu

SEQ ID NO: 796722 - RNA, 22 nt, Human
aucaaagaaugugacugaaaua

SEQ ID NO: 796723 - RNA, 22 nt, Human
auauauaagcugaugagccaca

SEQ ID NO: 796724 - RNA, 22 nt, Human
agccuggcuuagcucucucacu

SEQ ID NO: 796725 - RNA, 22 nt, Human
agccaaggcagcuagagcucug

SEQ ID NO: 796726 - RNA, 22 nt, Human
uucaaacucugaguaguucugc

SEQ ID NO: 796727 - RNA, 22 nt, Human
cuuuuuccagcuucaggguggg

SEQ ID NO: 796728 - RNA, 22 nt, Human
auucugaguacaacaagauguu

SEQ ID NO: 796729 - RNA, 21 nt, Human
agcaaaggcaggagagguuuc

SEQ ID NO: 796730 - RNA, 22 nt, Human
accacaguuucauucaugcagg

SEQ ID NO: 796731 - RNA, 22 nt, Human
accuccuggcugcucauggaac

SEQ ID NO: 796732 - RNA, 22 nt, Human
ggccuugguucugucacagccg

SEQ ID NO: 796733 - RNA, 22 nt, Human
caggcagcugcgacaagagagc

SEQ ID NO: 796734 - RNA, 22 nt, Human
aaggcucugcaaaaccuccaag

SEQ ID NO: 796735 - RNA, 22 nt, Human
cagggauggccuggcgggccac

SEQ ID NO: 796736 - RNA, 22 nt, Human
uacucaaucuagguggcuuacc

SEQ ID NO: 796737 - RNA, 22 nt, Human
agcuagccuaggcagagugcau

SEQ ID NO: 796738 - RNA, 19 nt, Human
agcugcugauugguggagg

SEQ ID NO: 796739 - RNA, 22 nt, Human
gcaaagacugcaauuacuuuug

SEQ ID NO: 796740 - RNA, 22 nt, Human
gcuggagaaacaggaggaggaa

SEQ ID NO: 796741 - RNA, 22 nt, Human
gagccagaaaagcugccugacu

SEQ ID NO: 796742 - RNA, 22 nt, Human
agggugaaucucacaacucuua

SEQ ID NO: 796743 - RNA, 22 nt, Human
caggcaguggccauguugggag

SEQ ID NO: 796744 - RNA, 16 nt, Human
ccaccugcagcucuca

SEQ ID NO: 796745 - RNA, 22 nt, Human
uccucaggagagcuccuaugcc

SEQ ID NO: 796746 - RNA, 23 nt, Human
cuauuucucauaguucaggucuu

SEQ ID NO: 796747 - RNA, 22 nt, Human
ggagggggaauucagccccagc

SEQ ID NO: 796748 - RNA, 22 nt, Human
acuccuggggauccauuccuuu

SEQ ID NO: 796749 - RNA, 22 nt, Human
caggcaguggcucacagcaacc

SEQ ID NO: 796750 - RNA, 22 nt, Human
gcuguggguuuccaauccugga

SEQ ID NO: 796751 - RNA, 22 nt, Human
gggacaggcaaagguaugcuuc

SEQ ID NO: 796752 - RNA, 19 nt, Human
ugcaaauucuaaaaacuga

SEQ ID NO: 796753 - RNA, 23 nt, Human
ugcaguguuuaacaaugacuuga

SEQ ID NO: 796754 - RNA, 22 nt, Human
ccugccacuguaggugacaguu

SEQ ID NO: 796755 - RNA, 22 nt, Human
uuucacaaguuucaggauucug

SEQ ID NO: 796756 - RNA, 22 nt, Human
auggaaauguuccauauauuga

SEQ ID NO: 796757 - RNA, 22 nt, Human
uaguauuuauaaucaugcuuaa

SEQ ID NO: 796758 - RNA, 22 nt, Human
gggccacauugaagggugggua

SEQ ID NO: 796759 - RNA, 22 nt, Human
caggcagagaacucauccguga

SEQ ID NO: 796760 - RNA, 22 nt, Human
ucaggacaacauguugcuaauc

SEQ ID NO: 796761 - RNA, 22 nt, Human
uacaaagugugcccaugcugag

SEQ ID NO: 796762 - RNA, 22 nt, Human
gcuuguuugugauuucuccaga

SEQ ID NO: 796763 - RNA, 22 nt, Human
agcuccugucucaagggagccu

SEQ ID NO: 796764 - RNA, 22 nt, Human
ggcaggcaucauguggucauua

SEQ ID NO: 796765 - RNA, 22 nt, Human
uccucagggggccaacccagcc

SEQ ID NO: 796766 - RNA, 22 nt, Human
aaaagcagaccacgcuuugugg

SEQ ID NO: 796767 - RNA, 22 nt, Human
cuggggaggaugcuacgaccug

SEQ ID NO: 796768 - RNA, 22 nt, Human
cucaggcuugggaggaggccca

SEQ ID NO: 796769 - RNA, 22 nt, Human
caggaaauuggcuauuugggau

SEQ ID NO: 796770 - RNA, 18 nt, Human
gaaagugcggggcagggg

SEQ ID NO: 796771 - RNA, 22 nt, Human
caggcucccgcuccacugggca

SEQ ID NO: 796772 - RNA, 22 nt, Human
cagcuuugugcaaugcagucuc

SEQ ID NO: 796773 - RNA, 19 nt, Human
gcacccuggccacucccac

SEQ ID NO: 796774 - RNA, 20 nt, Human
gcaaggcacagugaggaggg

SEQ ID NO: 796775 - RNA, 22 nt, Human
ggcugccuucccugagccccgg

SEQ ID NO: 796776 - RNA, 22 nt, Human
ucccacauuacccugacugaca

SEQ ID NO: 796777 - RNA, 22 nt, Human
uggcagcugaggggaggcuuug

SEQ ID NO: 796778 - RNA, 22 nt, Human
aaggacaaagcagagcuggaug

SEQ ID NO: 796779 - RNA, 22 nt, Human
gagcuggcuccgccaugcugcu

SEQ ID NO: 796780 - RNA, 22 nt, Human
ccuggcacagagcgguggucac

SEQ ID NO: 796781 - RNA, 22 nt, Human
uaaagacacugguuuuaaucau

SEQ ID NO: 796782 - RNA, 22 nt, Human
gcuggccaguguggugaccacc

SEQ ID NO: 796783 - RNA, 22 nt, Human
aggaagcacuggaagggguugg

SEQ ID NO: 796784 - RNA, 17 nt, Human
gaugaaaugaugcacac

SEQ ID NO: 796785 - RNA, 22 nt, Human
agcuuucugucaccugugcuug

SEQ ID NO: 796786 - RNA, 22 nt, Human
gaguccugcccuuguguagucc

SEQ ID NO: 796787 - RNA, 22 nt, Human
ucagaggcuucuggccagucug

SEQ ID NO: 796788 - RNA, 22 nt, Human
aagccaggccauucucugguuc

SEQ ID NO: 796789 - RNA, 22 nt, Human
cugccugggccggccacccucu

SEQ ID NO: 796790 - RNA, 22 nt, Human
uagccagugagacccagaaaua

SEQ ID NO: 796791 - RNA, 22 nt, Human
gaaaauacuucaguguucuggc

SEQ ID NO: 796792 - RNA, 21 nt, Human
aggcacuuaaccaauguuagc

SEQ ID NO: 796793 - RNA, 22 nt, Human
ugucaacaggcuuucuaaggca

SEQ ID NO: 796794 - RNA, 22 nt, Human
ugacuuccugcacucaggugau

SEQ ID NO: 796795 - RNA, 22 nt, Human
cauguuggcacugucucugccu

SEQ ID NO: 796796 - RNA, 22 nt, Human
ugaaacauaaaguuaucuucag

SEQ ID NO: 796797 - RNA, 22 nt, Human
cucaagaugucagggcaccugc

SEQ ID NO: 796798 - RNA, 22 nt, Human
uucucuugacuaccaguuagga

SEQ ID NO: 796799 - RNA, 22 nt, Human
uguguuuuaucuauuguaucuu

SEQ ID NO: 796800 - RNA, 18 nt, Human
uuuccaagaagagagcuc

SEQ ID NO: 796801 - RNA, 22 nt, Human
ugugaagcuggauccuggagcu

SEQ ID NO: 796802 - RNA, 22 nt, Human
uuaauacaacuguugucacugg

SEQ ID NO: 796803 - RNA, 22 nt, Human
aguauacaaauaaauguguaau

SEQ ID NO: 796804 - RNA, 22 nt, Human
ucagaugagugcuuucagcugc

SEQ ID NO: 796805 - RNA, 22 nt, Human
uggcuggcguuggggccaguga

SEQ ID NO: 796806 - RNA, 22 nt, Human
ucugcagcgugcaggcuggugc

SEQ ID NO: 796807 - RNA, 22 nt, Human
uggcucuggggacaguaagucc

SEQ ID NO: 796808 - RNA, 22 nt, Human
ggugcuggacacguggcacucc

SEQ ID NO: 796809 - RNA, 22 nt, Human
cucagagagugaauuccugccu

SEQ ID NO: 796810 - RNA, 22 nt, Human
agaauacuugggaauggguuaa

SEQ ID NO: 796811 - RNA, 22 nt, Human
ucccagccuccugacaguuuug

SEQ ID NO: 796812 - RNA, 22 nt, Human
ggggccacuggcaggaccuugg

SEQ ID NO: 796813 - RNA, 22 nt, Human
aggaagaggugugcaauggugu

SEQ ID NO: 796814 - RNA, 19 nt, Human
gaaaacaugggugaggguc

SEQ ID NO: 796815 - RNA, 22 nt, Human
aagugaaacauguaucucuuua

SEQ ID NO: 796816 - RNA, 22 nt, Human
uggugucaggcacuagcaugca

SEQ ID NO: 796817 - RNA, 19 nt, Human
gggguggcuggggcuccag

SEQ ID NO: 796818 - RNA, 22 nt, Human
caugugcagacucugacaggcu

SEQ ID NO: 796819 - RNA, 22 nt, Human
ccugccagcauggcuuaucucc

SEQ ID NO: 796820 - RNA, 22 nt, Human
cacagcuuaugccacugauugg

SEQ ID NO: 796821 - RNA, 22 nt, Human
ugcuggcuuagauaucacugcc

SEQ ID NO: 796822 - RNA, 22 nt, Human
ugucacagaucguuuuugagcu

SEQ ID NO: 796823 - RNA, 22 nt, Human
acuuuuucucagaaggauuggu

SEQ ID NO: 796824 - RNA, 22 nt, Human
auuugucacacauaguuuaucc

SEQ ID NO: 796825 - RNA, 20 nt, Human
aggcuggcacuccuggccag

SEQ ID NO: 796826 - RNA, 22 nt, Human
cacagugcacuaagcuccgggg

SEQ ID NO: 796827 - RNA, 22 nt, Human
ucaagagauugaauaauaacug

SEQ ID NO: 796828 - RNA, 22 nt, Human
caguaaacacuagcauucuugg

SEQ ID NO: 796829 - RNA, 22 nt, Human
cuugccuuugucuucaaaggcu

SEQ ID NO: 796830 - RNA, 22 nt, Human
gcuggaggcaguucagacacca

SEQ ID NO: 796831 - RNA, 22 nt, Human
ccuccucuggugcugccaaccc

SEQ ID NO: 796832 - RNA, 22 nt, Human
guggcagucucaucuguggcuc

SEQ ID NO: 796833 - RNA, 22 nt, Human
caguuuaaguguguugaaggua

SEQ ID NO: 796834 - RNA, 22 nt, Human
auguuuaaaggagucagagacu

SEQ ID NO: 796835 - RNA, 22 nt, Human
gccagcugagcaaauuccagcu

SEQ ID NO: 796836 - RNA, 22 nt, Human
uauaaagagucucaaagaaguu

SEQ ID NO: 796837 - RNA, 22 nt, Human
cuucacauuaguuuggaucaaa

SEQ ID NO: 796838 - RNA, 22 nt, Human
acugugauguucucuaucuugg

SEQ ID NO: 796839 - RNA, 22 nt, Human
cagggcucccuugcaaggaggg

SEQ ID NO: 796840 - RNA, 22 nt, Human
agccaggcugcaguuggcuggc

SEQ ID NO: 796841 - RNA, 20 nt, Human
guuucugauucaguaggucu

SEQ ID NO: 796842 - RNA, 22 nt, Human
cuggaggguggagagaagucuc

SEQ ID NO: 796843 - RNA, 22 nt, Human
auuuaagauugcguauucaugu

SEQ ID NO: 796844 - RNA, 22 nt, Human
acacauuucuaaauuuuuaccg

SEQ ID NO: 796845 - RNA, 22 nt, Human
auuguccuaucucagugccaug

SEQ ID NO: 796846 - RNA, 22 nt, Human
ucugcuggucaaggcugggucc

SEQ ID NO: 796847 - RNA, 22 nt, Human
uagacauuuggcaugguuuuca

SEQ ID NO: 796848 - RNA, 22 nt, Human
ugcuggcuccaaccuggcaucu

SEQ ID NO: 796849 - RNA, 22 nt, Human
ugcaggcuguuugguggaucuc

SEQ ID NO: 796850 - RNA, 22 nt, Human
acugaaauggggacaguccuua

SEQ ID NO: 796851 - RNA, 22 nt, Human
aggcagaucacuugaggccagg

SEQ ID NO: 796852 - RNA, 22 nt, Human
uauuuugcuuuagcugacuguu

SEQ ID NO: 796853 - RNA, 22 nt, Human
gauuucuuggcccacucucaga

SEQ ID NO: 796854 - RNA, 22 nt, Human
cuggagccggcgagccccagcc

SEQ ID NO: 796855 - RNA, 22 nt, Human
cacccaggcagguggcugagaa

SEQ ID NO: 796856 - RNA, 22 nt, Human
gcagggcuggggcugcuccuga

SEQ ID NO: 796857 - RNA, 22 nt, Human
cagcugugcuguauuaagcucu

SEQ ID NO: 796858 - RNA, 22 nt, Human
cagcagcagccccaggaagguu

SEQ ID NO: 796859 - RNA, 22 nt, Human
cuuggccugcaggcagcagcgc

SEQ ID NO: 796860 - RNA, 22 nt, Human
agcuucaagguucaaggaugcu

SEQ ID NO: 796861 - RNA, 23 nt, Human
cuugccuggccucucugcccaga

SEQ ID NO: 796862 - RNA, 22 nt, Human
acuggaguguuuggaggaugca

SEQ ID NO: 796863 - RNA, 22 nt, Human
cagaauacccuauagacagaau

SEQ ID NO: 796864 - RNA, 22 nt, Human
uaacacauauuugcaguaagca

SEQ ID NO: 796865 - RNA, 22 nt, Human
uuacuugauguaugaugaguag

SEQ ID NO: 796866 - RNA, 22 nt, Human
gccucugcccuccugggacugc

SEQ ID NO: 796867 - RNA, 22 nt, Human
uauacacauaucuucuaggccu

SEQ ID NO: 796868 - RNA, 22 nt, Human
gaaaucauuagcaaagauaugu

SEQ ID NO: 796869 - RNA, 21 nt, Human
uggcggggacuuguggcugcc

SEQ ID NO: 796870 - RNA, 22 nt, Human
ugagacuugugaguccuucuag

SEQ ID NO: 796871 - RNA, 22 nt, Human
aggcagcagaaaacaaaugguu

SEQ ID NO: 796872 - RNA, 22 nt, Human
aagcccuuggcagaguucccca

SEQ ID NO: 796873 - RNA, 22 nt, Human
cagggccuuguucaggagugaa

SEQ ID NO: 796874 - RNA, 22 nt, Human
gcuggcagagacaagaagacua

SEQ ID NO: 796875 - RNA, 22 nt, Human
aaauuuuagaccaggcaaaacu

SEQ ID NO: 796876 - RNA, 22 nt, Human
cagugcaauauucaaaguggag

SEQ ID NO: 796877 - RNA, 22 nt, Human
uaagaaacauuuuuaugacagu

SEQ ID NO: 796878 - RNA, 22 nt, Human
ugagccaguucuucagauccau

SEQ ID NO: 796879 - RNA, 22 nt, Human
acaguaaaaagccuuagaauuu

SEQ ID NO: 796880 - RNA, 22 nt, Human
agcaggcagcugggggaguuga

SEQ ID NO: 796881 - RNA, 22 nt, Human
ucugccagcuucuggugguugc

SEQ ID NO: 796882 - RNA, 22 nt, Human
gccuccacuuuugcuggcuucu

SEQ ID NO: 796883 - RNA, 22 nt, Human
gccagcagggcccaaaugcugg

SEQ ID NO: 796884 - RNA, 22 nt, Human
cugggagucuggaauuuuggua

SEQ ID NO: 796885 - RNA, 22 nt, Human
acauacaugggauuaaaaaauu

SEQ ID NO: 796886 - RNA, 22 nt, Human
ugagccaggucucacucaccuu

SEQ ID NO: 796887 - RNA, 22 nt, Human
ucuguuuuggucaccuuuauau

SEQ ID NO: 796888 - RNA, 22 nt, Human
cauuaacaaugacugcuugacu

SEQ ID NO: 796889 - RNA, 22 nt, Human
ucccaggccacacuuggggaac

SEQ ID NO: 796890 - RNA, 22 nt, Human
gcuggagggguaauaggauggg

SEQ ID NO: 796891 - RNA, 22 nt, Human
ucaggggacuuaggagagaagu

SEQ ID NO: 796892 - RNA, 22 nt, Human
acagcuguauccccagagcuca

SEQ ID NO: 796893 - RNA, 22 nt, Human
ucaguguccuucguucuuguug

SEQ ID NO: 796894 - RNA, 22 nt, Human
auuguaaauagugccacaauaa

SEQ ID NO: 796895 - RNA, 22 nt, Human
ucagaagcaggagugugcacaa

SEQ ID NO: 796896 - RNA, 22 nt, Human
aggugccagaugcacagcugaa

SEQ ID NO: 796897 - RNA, 22 nt, Human
uuucauugcagagucugugugc

SEQ ID NO: 796898 - RNA, 22 nt, Human
agggugcagucacaggaaaugu

SEQ ID NO: 796899 - RNA, 22 nt, Human
ucccucacugguucugcauccc

SEQ ID NO: 796900 - RNA, 22 nt, Human
uacacauccuucugaacaaccu

SEQ ID NO: 796901 - RNA, 22 nt, Human
cacaggaaaugauucugcagca

SEQ ID NO: 796902 - RNA, 22 nt, Human
uggauucugggagaguucuaua

SEQ ID NO: 796903 - RNA, 21 nt, Human
cugcaaauaccuaguuaucug

SEQ ID NO: 796904 - RNA, 22 nt, Human
gccagguccaggguggagcgcu

SEQ ID NO: 796905 - RNA, 22 nt, Human
cuccaggcuggauccaagucaa

SEQ ID NO: 796906 - RNA, 22 nt, Human
uggcagugaugcggcaggacau

SEQ ID NO: 796907 - RNA, 22 nt, Human
agagcuucacuggagagcacau

SEQ ID NO: 796908 - RNA, 22 nt, Human
ccacaguuucuucaucuauaaa

SEQ ID NO: 796909 - RNA, 22 nt, Human
ugcugccuccaacuccugggcu

SEQ ID NO: 796910 - RNA, 22 nt, Human
ucagaaaagagaaaaucuuaua

SEQ ID NO: 796911 - RNA, 23 nt, Human
uucuuuggaauugggcugcaagg

SEQ ID NO: 796912 - RNA, 22 nt, Human
uugauuuuuccagcuucuagag

SEQ ID NO: 796913 - RNA, 22 nt, Human
guggccaggucagggacuugug

SEQ ID NO: 796914 - RNA, 22 nt, Human
ugugugcauuagcauucuaggg

SEQ ID NO: 796915 - RNA, 22 nt, Human
gcugcagcccggcgcgccugag

SEQ ID NO: 796916 - RNA, 22 nt, Human
acacauuauagagaguauaaua

SEQ ID NO: 796917 - RNA, 22 nt, Human
augaguugaagcuacaagaggc

SEQ ID NO: 796918 - RNA, 22 nt, Human
gcacagccacugagugagaacc

SEQ ID NO: 796919 - RNA, 22 nt, Human
uacagaggcacaugcaauuuuc

SEQ ID NO: 796920 - RNA, 22 nt, Human
guuggggaaggugggagaaugu

SEQ ID NO: 796921 - RNA, 22 nt, Human
cacaguaagguaucccagugaa

SEQ ID NO: 796922 - RNA, 22 nt, Human
caccugggucauugcugguguu

SEQ ID NO: 796923 - RNA, 22 nt, Human
gcccagcacagcuggaagaguc

SEQ ID NO: 796924 - RNA, 22 nt, Human
aauacaagauuuauaguuguuu

SEQ ID NO: 796925 - RNA, 22 nt, Human
gucuguaauuauuaaagaaagg

SEQ ID NO: 796926 - RNA, 22 nt, Human
uaccauuugagagagaacauaa

SEQ ID NO: 796927 - RNA, 22 nt, Human
augugacuagcccuucaugacc

SEQ ID NO: 796928 - RNA, 22 nt, Human
cugccugugccaaugcuccuuu

SEQ ID NO: 796929 - RNA, 22 nt, Human
caacuauagggagagugguuaa

SEQ ID NO: 796930 - RNA, 22 nt, Human
uguuauauaacuuacaaccugu

SEQ ID NO: 796931 - RNA, 22 nt, Human
ucucuuucuauugcaccaugcu

SEQ ID NO: 796932 - RNA, 22 nt, Human
aaaggauucucuugauuucagu

SEQ ID NO: 796933 - RNA, 22 nt, Human
uaugacaagguggaguaugagu

SEQ ID NO: 796934 - RNA, 22 nt, Human
ucacugugcucucuagauaggc

SEQ ID NO: 796935 - RNA, 22 nt, Human
cuggcagguggagguugcagug

SEQ ID NO: 796936 - RNA, 22 nt, Human
auacaugaggaggcuggaaaca

SEQ ID NO: 796937 - RNA, 22 nt, Human
gagcugaggauacaucagugaa

SEQ ID NO: 796938 - RNA, 22 nt, Human
agcuggcuaugcccugugaacc

SEQ ID NO: 796939 - RNA, 22 nt, Human
agccagggggacgcuuucuggc

SEQ ID NO: 796940 - RNA, 22 nt, Human
aaggaaggaauugaucaugcgc

SEQ ID NO: 796941 - RNA, 22 nt, Human
ccagguucaaauagcuguguga

SEQ ID NO: 796942 - RNA, 22 nt, Human
caauuuuauugguccaaauaca

SEQ ID NO: 796943 - RNA, 18 nt, Human
acauacauucugucugca

SEQ ID NO: 796944 - RNA, 22 nt, Human
gcuggcuguugaauaauggcau

SEQ ID NO: 796945 - RNA, 22 nt, Human
uguuuaagcugaugagguaucg

SEQ ID NO: 796946 - RNA, 22 nt, Human
gaggccuggaccagccacagag

SEQ ID NO: 796947 - RNA, 22 nt, Human
agcaccuggucuccuggcgcug

SEQ ID NO: 796948 - RNA, 22 nt, Human
ggagacaguauggcuuguagcu

SEQ ID NO: 796949 - RNA, 22 nt, Human
ucagaaaagguagcugugacaa

SEQ ID NO: 796950 - RNA, 22 nt, Human
gauguucugggguguuuguggc

SEQ ID NO: 796951 - RNA, 22 nt, Human
acagcagggucacauucccucu

SEQ ID NO: 796952 - RNA, 22 nt, Human
agaaaggguucucugaggugcu

SEQ ID NO: 796953 - RNA, 20 nt, Human
uggcuucucuucacuccugu

SEQ ID NO: 796954 - RNA, 22 nt, Human
cuggccagugccugugggcccc

SEQ ID NO: 796955 - RNA, 22 nt, Human
acccccaaacaucaagggcuga

SEQ ID NO: 796956 - RNA, 22 nt, Human
ucccucagauuggcaauuagau

SEQ ID NO: 796957 - RNA, 22 nt, Human
gccaggcuguuuuuauuacugu

SEQ ID NO: 796958 - RNA, 22 nt, Human
uucaguauguuggacguuaugu

SEQ ID NO: 796959 - RNA, 22 nt, Human
ucuuuggcuugucuccucaguu

SEQ ID NO: 796960 - RNA, 22 nt, Human
ucccagccuuucuuuucugcug

SEQ ID NO: 796961 - RNA, 22 nt, Human
ucuggcugggugagagcuucuc

SEQ ID NO: 796962 - RNA, 22 nt, Human
uauguauagagucuuuuaaauu

SEQ ID NO: 796963 - RNA, 22 nt, Human
gcaguaggagggacaacuaccu

SEQ ID NO: 796964 - RNA, 22 nt, Human
aauaaugucugcuauuuuaaaa

SEQ ID NO: 796965 - RNA, 22 nt, Human
ccaaaucaccagcacgaucauu

SEQ ID NO: 796966 - RNA, 22 nt, Human
ucucccuacugacuccaggacc

SEQ ID NO: 796967 - RNA, 22 nt, Human
aacaugcaaagcuaugauguau

SEQ ID NO: 796968 - RNA, 22 nt, Human
uaggacagggacaucuuuuuga

SEQ ID NO: 796969 - RNA, 22 nt, Human
uaucauuuaacagaaucauugc

SEQ ID NO: 796970 - RNA, 17 nt, Human
ugcuccugggacaagga

SEQ ID NO: 796971 - RNA, 23 nt, Human
uauuacaauuggucuuauuaaga

SEQ ID NO: 796972 - RNA, 22 nt, Human
guauuuuauggccuggggccua

SEQ ID NO: 796973 - RNA, 22 nt, Human
cagagaaaaaauccugcucuca

SEQ ID NO: 796974 - RNA, 22 nt, Human
gccuuuuuuguugcucugucac

SEQ ID NO: 796975 - RNA, 19 nt, Human
ggagccagcuguggaaggc

SEQ ID NO: 796976 - RNA, 22 nt, Human
cuccucccugcgauugcucugc

SEQ ID NO: 796977 - RNA, 22 nt, Human
acccaggcuggcagaggcuccu

SEQ ID NO: 796978 - RNA, 22 nt, Human
gagggcagagucuaaugaugca

SEQ ID NO: 796979 - RNA, 19 nt, Human
auagaaaggguuaaagaca

SEQ ID NO: 796980 - RNA, 18 nt, Human
acagaggcagacauguau

SEQ ID NO: 796981 - RNA, 22 nt, Human
ccagcuaguaagcaccugcauc

SEQ ID NO: 796982 - RNA, 22 nt, Human
aggcaggauugcugacaacaau

SEQ ID NO: 796983 - RNA, 22 nt, Human
cagcaggcguugggagaaagac

SEQ ID NO: 796984 - RNA, 22 nt, Human
aaaguaacaauaagguucuauu

SEQ ID NO: 796985 - RNA, 22 nt, Human
gagagaagaaagccaugguccu

SEQ ID NO: 796986 - RNA, 22 nt, Human
aaggaaauacaacauguauuca

SEQ ID NO: 796987 - RNA, 22 nt, Human
aaccccaguaccccaggauaug

SEQ ID NO: 796988 - RNA, 22 nt, Human
ggaggugggagccuccaguggu

SEQ ID NO: 796989 - RNA, 22 nt, Human
cuucagagugcagaagauuggg

SEQ ID NO: 796990 - RNA, 22 nt, Human
aguaccauuauccaguaaagga

SEQ ID NO: 796991 - RNA, 22 nt, Human
uuuccuuugugcaggccuuggg

SEQ ID NO: 796992 - RNA, 22 nt, Human
aggcuggagagugcaguggcgu

SEQ ID NO: 796993 - RNA, 22 nt, Human
ugacaggaggcuugaggccagg

SEQ ID NO: 796994 - RNA, 22 nt, Human
aacuuaggaaaauaaggcauga

SEQ ID NO: 796995 - RNA, 22 nt, Human
cccuggcugcuuguagucuggc

SEQ ID NO: 796996 - RNA, 22 nt, Human
cccuggccagggcacagggagg

SEQ ID NO: 796997 - RNA, 22 nt, Human
ccaggcuguuuucaaacuuggg

SEQ ID NO: 796998 - RNA, 21 nt, Human
accaggcuugugggagggagc

SEQ ID NO: 796999 - RNA, 22 nt, Human
agcaggcacaagaaagggaggu

SEQ ID NO: 797000 - RNA, 22 nt, Human
ggcugccccagugcucauggcu

SEQ ID NO: 797001 - RNA, 21 nt, Human
agacuuugcuugcagagaguc

SEQ ID NO: 797002 - RNA, 22 nt, Human
uuucaugauuaacuuagugaau

SEQ ID NO: 797003 - RNA, 22 nt, Human
uggaauggaaacaaacugagga

SEQ ID NO: 797004 - RNA, 20 nt, Human
uucugcuugcaaauaucaag

SEQ ID NO: 797005 - RNA, 20 nt, Human
ggaaaaaugcaugcucaaga

SEQ ID NO: 797006 - RNA, 22 nt, Human
gcuuggcucuaagacaccuauu

SEQ ID NO: 797007 - RNA, 22 nt, Human
cauggcagggcugugggcaggu

SEQ ID NO: 797008 - RNA, 22 nt, Human
ccucccugucuaccuguugugg

SEQ ID NO: 797009 - RNA, 22 nt, Human
ucacucugacuuggccuccaac

SEQ ID NO: 797010 - RNA, 18 nt, Human
uugauucauauuaaccau

SEQ ID NO: 797011 - RNA, 22 nt, Human
cauuagcauuacuucaaagagu

SEQ ID NO: 797012 - RNA, 22 nt, Human
cauagauucuuauuuccaucuu

SEQ ID NO: 797013 - RNA, 22 nt, Human
uggccucaaucuguccuccagc

SEQ ID NO: 797014 - RNA, 22 nt, Human
ucuucagggucugccccagggg

SEQ ID NO: 797015 - RNA, 22 nt, Human
cccuaggguuuggccagagccc

SEQ ID NO: 797016 - RNA, 22 nt, Human
guacaaauacauucugaaggua

SEQ ID NO: 797017 - RNA, 22 nt, Human
ucaggccacggcucacugagac

SEQ ID NO: 797018 - RNA, 22 nt, Human
cuggcuggcagaugcucuugcu

SEQ ID NO: 797019 - RNA, 22 nt, Human
uccaggauugcaggugcacaac

SEQ ID NO: 797020 - RNA, 22 nt, Human
cagcuucucagaaagcugaggu

SEQ ID NO: 797021 - RNA, 20 nt, Human
aucuccugcuaccacccauu

SEQ ID NO: 797022 - RNA, 22 nt, Human
aaagccuuuucuguuuaacaca

SEQ ID NO: 797023 - RNA, 22 nt, Human
uaggccagaggagcagcuuugg

SEQ ID NO: 797024 - RNA, 22 nt, Human
uucaagaucgaguuuaaaguga

SEQ ID NO: 797025 - RNA, 22 nt, Human
ggcaggaagaggagggugaacu

SEQ ID NO: 797026 - RNA, 22 nt, Human
agcccagcuuccuucugucucu

SEQ ID NO: 797027 - RNA, 22 nt, Human
uguauuuuuaggaaugcgcuau

SEQ ID NO: 797028 - RNA, 22 nt, Human
guccagagggcugcaggaugcu

SEQ ID NO: 797029 - RNA, 22 nt, Human
gagcagggagacaacucuggug

SEQ ID NO: 797030 - RNA, 22 nt, Human
gugcucugccuggggucauggc

SEQ ID NO: 797031 - RNA, 22 nt, Human
gagcugaacaaauugcgagugg

SEQ ID NO: 797032 - RNA, 22 nt, Human
cagggugcgccacucagaugua

SEQ ID NO: 797033 - RNA, 22 nt, Human
aagccaggugugcccaggaucc

SEQ ID NO: 797034 - RNA, 22 nt, Human
ccaggacaagccagagggacag

SEQ ID NO: 797035 - RNA, 22 nt, Human
augucuguggcauuauauguuu

SEQ ID NO: 797036 - RNA, 22 nt, Human
ggcugcagagcuggugcccugg

SEQ ID NO: 797037 - RNA, 22 nt, Human
cugaagcaaaugaaacagcucu

SEQ ID NO: 797038 - RNA, 22 nt, Human
uugucugaauucuucuaggcag

SEQ ID NO: 797039 - RNA, 22 nt, Human
caggcaggugcagauuccucuu

SEQ ID NO: 797040 - RNA, 22 nt, Human
gaggaagcugcguggcauuuca

SEQ ID NO: 797041 - RNA, 22 nt, Human
agucacauggacucaggaugac

SEQ ID NO: 797042 - RNA, 20 nt, Human
uaguauuugcauaaggauag

SEQ ID NO: 797043 - RNA, 22 nt, Human
ucaggcuguggcuucaguucuu

SEQ ID NO: 797044 - RNA, 22 nt, Human
ucaggcaggcucagaggaaaac

SEQ ID NO: 797045 - RNA, 22 nt, Human
ccuuccuggcuguccgccugau

SEQ ID NO: 797046 - RNA, 22 nt, Human
uucagugucaauuuuuaaauau

SEQ ID NO: 797047 - RNA, 22 nt, Human
ucaggacagguucgggugggua

SEQ ID NO: 797048 - RNA, 22 nt, Human
guuuuucuagaaaucuccuccu

SEQ ID NO: 797049 - RNA, 22 nt, Human
gaaggcuucccaccugauauuu

SEQ ID NO: 797050 - RNA, 22 nt, Human
uucacaauaggagcaugcaaau

SEQ ID NO: 797051 - RNA, 22 nt, Human
gugaccaucagagaauaacaaa

SEQ ID NO: 797052 - RNA, 22 nt, Human
ccuccugguccagcaucucuuu

SEQ ID NO: 797053 - RNA, 22 nt, Human
aaguccaugaucaagauguggc

SEQ ID NO: 797054 - RNA, 18 nt, Human
guuuugaauugucuuaca

SEQ ID NO: 797055 - RNA, 22 nt, Human
aggcuuggugccaaggagccug

SEQ ID NO: 797056 - RNA, 21 nt, Human
gcaugaaaacagccugugcuc

SEQ ID NO: 797057 - RNA, 22 nt, Human
uagauaggugauuaggaaaagc

SEQ ID NO: 797058 - RNA, 22 nt, Human
ggugggaggcaggcugcuccca

SEQ ID NO: 797059 - RNA, 22 nt, Human
aaauaaguuaaacuagaaugau

SEQ ID NO: 797060 - RNA, 21 nt, Human
ugggcagauggcaguguggcu

SEQ ID NO: 797061 - RNA, 22 nt, Human
gguggcuggaggagcugaugga

SEQ ID NO: 797062 - RNA, 22 nt, Human
uuucagagucagcuccucucua

SEQ ID NO: 797063 - RNA, 22 nt, Human
ugcuggcuguauaugugagagu

SEQ ID NO: 797064 - RNA, 22 nt, Human
uucauugauuuaacaaacaagu

SEQ ID NO: 797065 - RNA, 22 nt, Human
caaguccaggucaauuuaaagc

SEQ ID NO: 797066 - RNA, 21 nt, Human
ugguggagugugcugagcaug

SEQ ID NO: 797067 - RNA, 22 nt, Human
ucccugugggaugaggacucug

SEQ ID NO: 797068 - RNA, 22 nt, Human
uguuauuuaucugagcauuuau

SEQ ID NO: 797069 - RNA, 22 nt, Human
uccuggagccaaugugcugcug

SEQ ID NO: 797070 - RNA, 22 nt, Human
aaguuuaacuugaauucuuucu

SEQ ID NO: 797071 - RNA, 22 nt, Human
aagccaggaagggagcuguccc

SEQ ID NO: 797072 - RNA, 22 nt, Human
agggccagcugcagaauuagca

SEQ ID NO: 797073 - RNA, 22 nt, Human
cugcaggcauuuauucaugcaa

SEQ ID NO: 797074 - RNA, 22 nt, Human
gaaauucacuguauuucuuggg

SEQ ID NO: 797075 - RNA, 22 nt, Human
gcaggguugguguccucugcgg

SEQ ID NO: 797076 - RNA, 20 nt, Human
uugugguuuagauuaucuga

SEQ ID NO: 797077 - RNA, 22 nt, Human
uucacauuucauaccacagcuu

SEQ ID NO: 797078 - RNA, 22 nt, Human
agguccuguuucuucccugggg

SEQ ID NO: 797079 - RNA, 22 nt, Human
ugcacacacggagauaggcuuu

SEQ ID NO: 797080 - RNA, 22 nt, Human
ccagaaaagcaucugguucuuu

SEQ ID NO: 797081 - RNA, 22 nt, Human
ucuuacaagaaauaagccaaug

SEQ ID NO: 797082 - RNA, 22 nt, Human
cccacccagccuggcugagggg

SEQ ID NO: 797083 - RNA, 22 nt, Human
gugccagccgcaccccaggaga

SEQ ID NO: 797084 - RNA, 22 nt, Human
ccuggggcucugcacagagcag

SEQ ID NO: 797085 - RNA, 22 nt, Human
cugagccagcgggcucacuuuu

SEQ ID NO: 797086 - RNA, 22 nt, Human
uguaagauucuaagaguuaaug

SEQ ID NO: 797087 - RNA, 18 nt, Human
uguagaaaagauaggaau

SEQ ID NO: 797088 - RNA, 22 nt, Human
cacauauaugaaaugaggaauu

SEQ ID NO: 797089 - RNA, 22 nt, Human
ggcgggaggcugaggaguuggu

SEQ ID NO: 797090 - RNA, 18 nt, Human
gucaggcaugaaucuggg

SEQ ID NO: 797091 - RNA, 22 nt, Human
auguuaaaaaccaguacaguug

SEQ ID NO: 797092 - RNA, 22 nt, Human
ggcucaggacacagugguuuag

SEQ ID NO: 797093 - RNA, 19 nt, Human
uaaaaggauguggaaggau

SEQ ID NO: 797094 - RNA, 22 nt, Human
ccugaagaugcuguggccuggu

SEQ ID NO: 797095 - RNA, 22 nt, Human
acaaauuucauaggcaaauuuu

SEQ ID NO: 797096 - RNA, 22 nt, Human
ugugucaaagucaggugucacu

SEQ ID NO: 797097 - RNA, 22 nt, Human
uugcaaaaucauuucucaggau

SEQ ID NO: 797098 - RNA, 22 nt, Human
ccagggcagcagaauuggggca

SEQ ID NO: 797099 - RNA, 22 nt, Human
ucuggcugaaauuagaagguuc

SEQ ID NO: 797100 - RNA, 21 nt, Human
uuggcagucagaaaugugagg

SEQ ID NO: 797101 - RNA, 22 nt, Human
uccagccacucagcagggauug

SEQ ID NO: 797102 - RNA, 22 nt, Human
auuucucaguaggugcacagug

SEQ ID NO: 797103 - RNA, 22 nt, Human
agcuggcacagaccaggagauc

SEQ ID NO: 797104 - RNA, 22 nt, Human
aguuucacuaaggucugugugu

SEQ ID NO: 797105 - RNA, 22 nt, Human
ucucuguaaggaagaauuagau

SEQ ID NO: 797106 - RNA, 22 nt, Human
uucaaaauccgggaggcgcccc

SEQ ID NO: 797107 - RNA, 22 nt, Human
agaaauucuaagcaucaauagc

SEQ ID NO: 797108 - RNA, 18 nt, Human
cuagaugagcuuggcaag

SEQ ID NO: 797109 - RNA, 22 nt, Human
agaaagugaccuugaaaacugg

SEQ ID NO: 797110 - RNA, 22 nt, Human
aaguuuguucauucauucaucc

SEQ ID NO: 797111 - RNA, 22 nt, Human
agccacagcaacaagugcaauu

SEQ ID NO: 797112 - RNA, 22 nt, Human
aggcaggcccugggccaucccg

SEQ ID NO: 797113 - RNA, 22 nt, Human
aggcagggaccaguuguuuucu

SEQ ID NO: 797114 - RNA, 22 nt, Human
agaagcaguuauuuuuugcaca

SEQ ID NO: 797115 - RNA, 22 nt, Human
gggaagagggagcuggaaugau

SEQ ID NO: 797116 - RNA, 22 nt, Human
gcagaggccaggccaccagcaa

SEQ ID NO: 797117 - RNA, 22 nt, Human
agucuuuacauguguuauauau

SEQ ID NO: 797118 - RNA, 22 nt, Human
ggagccagaggcugcugcugug

SEQ ID NO: 797119 - RNA, 19 nt, Human
augcaacaaaaguguaaga

SEQ ID NO: 797120 - RNA, 19 nt, Human
gcuggcagauguggccgug

SEQ ID NO: 797121 - RNA, 22 nt, Human
agacagcagcagaggggcuccc

SEQ ID NO: 797122 - RNA, 22 nt, Human
aggagcugguagucucauuggg

SEQ ID NO: 797123 - RNA, 22 nt, Human
caagcugcuuauucucugcucu

SEQ ID NO: 797124 - RNA, 22 nt, Human
gggagcugaucagguggauuca

SEQ ID NO: 797125 - RNA, 22 nt, Human
ucuggcugucauuggaggcccc

SEQ ID NO: 797126 - RNA, 22 nt, Human
cucuggagaacgcuauggaucu

SEQ ID NO: 797127 - RNA, 22 nt, Human
ucaggagguccgcccgggaggg

SEQ ID NO: 797128 - RNA, 22 nt, Human
caugaaauaugcuaccugucuu

SEQ ID NO: 797129 - RNA, 22 nt, Human
acuuccuugucaggugcaucau

SEQ ID NO: 797130 - RNA, 22 nt, Human
uauuaaauuauggauuuaggag

SEQ ID NO: 797131 - RNA, 22 nt, Human
cugggaguacugggggauguca

SEQ ID NO: 797132 - RNA, 20 nt, Human
ucagugauuuugaagaggaa

SEQ ID NO: 797133 - RNA, 22 nt, Human
uuaaaauuuccccaccauguau

SEQ ID NO: 797134 - RNA, 23 nt, Human
agcagcccugggaccuggccugc

SEQ ID NO: 797135 - RNA, 23 nt, Human
ggggacaguucccacuggggucu

SEQ ID NO: 797136 - RNA, 22 nt, Human
gucauuauucugggauucuaua

SEQ ID NO: 797137 - RNA, 17 nt, Human
cccuggcucuaggugga

SEQ ID NO: 797138 - RNA, 22 nt, Human
caaugcuucugagggaauuaca

SEQ ID NO: 797139 - RNA, 22 nt, Human
ugggagucaucguguuuggauc

SEQ ID NO: 797140 - RNA, 22 nt, Human
cucacuggcaagacuacaggug

SEQ ID NO: 797141 - RNA, 22 nt, Human
gagagcuguccggcugagcagc

SEQ ID NO: 797142 - RNA, 22 nt, Human
uugcuaaugcccuagaaguauu

SEQ ID NO: 797143 - RNA, 22 nt, Human
gggggugaggacaggagcacug

SEQ ID NO: 797144 - RNA, 18 nt, Human
aggcaggauccuggccuc

SEQ ID NO: 797145 - RNA, 22 nt, Human
acugcagagguggggugcagag

SEQ ID NO: 797146 - RNA, 22 nt, Human
uaacugucacuucugcacaucu

SEQ ID NO: 797147 - RNA, 19 nt, Human
uccucaggggcucacagac

SEQ ID NO: 797148 - RNA, 22 nt, Human
aaacugcaggucaugacccauu

SEQ ID NO: 797149 - RNA, 22 nt, Human
uugcagcuucuugcaucagaaa

SEQ ID NO: 797150 - RNA, 23 nt, Human
uggcucagcuaguuuuccauuuc

SEQ ID NO: 797151 - RNA, 22 nt, Human
ccuggccaguuuccaggcccug

SEQ ID NO: 797152 - RNA, 22 nt, Human
aaggcacagccacuugaucauc

SEQ ID NO: 797153 - RNA, 22 nt, Human
aaucaagagcugacuauauuuu

SEQ ID NO: 797154 - RNA, 22 nt, Human
gccugugacccagggcccagga

SEQ ID NO: 797155 - RNA, 22 nt, Human
uucauguccagaggaaguugag

SEQ ID NO: 797156 - RNA, 22 nt, Human
uaucuauaaguacuaacauggu

SEQ ID NO: 797157 - RNA, 22 nt, Human
cuucuuuacuuucuagaaauaa

SEQ ID NO: 797158 - RNA, 22 nt, Human
augggagaaacaucaugaggca

SEQ ID NO: 797159 - RNA, 22 nt, Human
ggcaggcaaugaggaugggaag

SEQ ID NO: 797160 - RNA, 22 nt, Human
aauucacaggaucacaggagag

SEQ ID NO: 797161 - RNA, 22 nt, Human
agaggcaguauacaauccgagc

SEQ ID NO: 797162 - RNA, 19 nt, Human
ucuuuucacgcauuuugaa

SEQ ID NO: 797163 - RNA, 22 nt, Human
uagcagaggaaaagagaacauu

SEQ ID NO: 797164 - RNA, 22 nt, Human
augaauugaggaaaacagucgu

SEQ ID NO: 797165 - RNA, 22 nt, Human
accacccccuuggguguggaag

SEQ ID NO: 797166 - RNA, 22 nt, Human
agcacagauucugaagaguccu

SEQ ID NO: 797167 - RNA, 22 nt, Human
caguccugaggaagagcugcug

SEQ ID NO: 797168 - RNA, 22 nt, Human
ccaggaaggcaggccuccccgc

SEQ ID NO: 797169 - RNA, 22 nt, Human
caugacaucugcuuaguaugaa

SEQ ID NO: 797170 - RNA, 22 nt, Human
ccagaaaacucuacaugcuugu

SEQ ID NO: 797171 - RNA, 22 nt, Human
uaagauuuuuaaaauguccuca

SEQ ID NO: 797172 - RNA, 22 nt, Human
agcugucuuucugccuccugau

SEQ ID NO: 797173 - RNA, 22 nt, Human
aaauuagaaauacuuucaaagc

SEQ ID NO: 797174 - RNA, 22 nt, Human
ggaggcucuugagaggggagua

SEQ ID NO: 797175 - RNA, 22 nt, Human
uccuggcccggccgggccugcu

SEQ ID NO: 797176 - RNA, 22 nt, Human
cucccugugucuucacuuggcc

SEQ ID NO: 797177 - RNA, 22 nt, Human
gcccagggcgauggucggggcc

SEQ ID NO: 797178 - RNA, 22 nt, Human
caaaguauauuggauugaaugg

SEQ ID NO: 797179 - RNA, 22 nt, Human
gaugaaaugugaaaguucuggg

SEQ ID NO: 797180 - RNA, 22 nt, Human
aauaacuuaagaaauuucccca

SEQ ID NO: 797181 - RNA, 22 nt, Human
augacaguacuggugacaauac

SEQ ID NO: 797182 - RNA, 22 nt, Human
gcgggccaccuuggagagcgcu

SEQ ID NO: 797183 - RNA, 18 nt, Human
caguuacaccuucauuca

SEQ ID NO: 797184 - RNA, 22 nt, Human
guggucaggggcugaggugccc

SEQ ID NO: 797185 - RNA, 22 nt, Human
uuaguuuucucaucuaucucac

SEQ ID NO: 797186 - RNA, 18 nt, Human
caguccuguuucuacagg

SEQ ID NO: 797187 - RNA, 22 nt, Human
ggaacauacuguguagacuuug

SEQ ID NO: 797188 - RNA, 22 nt, Human
uagggagaugcaagggacggag

SEQ ID NO: 797189 - RNA, 23 nt, Human
aguguucagcauguaguaaauac

SEQ ID NO: 797190 - RNA, 22 nt, Human
aaguaaaagcuuuaccaugcgc

SEQ ID NO: 797191 - RNA, 22 nt, Human
cccugcagccuugcaugccuuc

SEQ ID NO: 797192 - RNA, 22 nt, Human
uucucauucugacucaguguag

SEQ ID NO: 797193 - RNA, 22 nt, Human
acauacuuuuuaaaagauugcu

SEQ ID NO: 797194 - RNA, 22 nt, Human
ugagaaagugggugccuagcaa

SEQ ID NO: 797195 - RNA, 18 nt, Human
uaaaauucaaggcagggu

SEQ ID NO: 797196 - RNA, 22 nt, Human
ggagcugcacgcucugaagccu

SEQ ID NO: 797197 - RNA, 22 nt, Human
acagggagaugggugaaagcgg

SEQ ID NO: 797198 - RNA, 22 nt, Human
cugacagcaaaggccaguggcu

SEQ ID NO: 797199 - RNA, 20 nt, Human
cuucaaguuaugguuggcaa

SEQ ID NO: 797200 - RNA, 22 nt, Human
caccagggacaaugcuaggggu

SEQ ID NO: 797201 - RNA, 22 nt, Human
ggccuuggugccauggccaguu

SEQ ID NO: 797202 - RNA, 22 nt, Human
gggcagccugcuuucugaucca

SEQ ID NO: 797203 - RNA, 20 nt, Human
aggccaggaaauguaguucu

SEQ ID NO: 797204 - RNA, 22 nt, Human
aauagcacuuccugaacacauu

SEQ ID NO: 797205 - RNA, 22 nt, Human
cagggccuccccggcagucuuu

SEQ ID NO: 797206 - RNA, 22 nt, Human
auuuugaaaccaaguuauuucc

SEQ ID NO: 797207 - RNA, 22 nt, Human
ugcugggugguugcuccucccg

SEQ ID NO: 797208 - RNA, 22 nt, Human
cacaauuauagaagaaagcaua

SEQ ID NO: 797209 - RNA, 22 nt, Human
auccucaguguuucugacaucu

SEQ ID NO: 797210 - RNA, 22 nt, Human
uucagcauugguaugaaaaccc

SEQ ID NO: 797211 - RNA, 22 nt, Human
cugccaggcugucccagguccg

SEQ ID NO: 797212 - RNA, 22 nt, Human
gugugcagaacagggagugggu

SEQ ID NO: 797213 - RNA, 22 nt, Human
uccgccaggacugagggcccau

SEQ ID NO: 797214 - RNA, 19 nt, Human
uucugggcagcacaugaau

SEQ ID NO: 797215 - RNA, 22 nt, Human
gauaaacuggaaccauugccuc

SEQ ID NO: 797216 - RNA, 22 nt, Human
gcggggggaggaacaucuugca

SEQ ID NO: 797217 - RNA, 22 nt, Human
gaccuuccaugccuucuuccaa

SEQ ID NO: 797218 - RNA, 22 nt, Human
gaccuccagcggcccugcagag

SEQ ID NO: 797219 - RNA, 22 nt, Human
gagaaaaucuugggucaagaau

SEQ ID NO: 797220 - RNA, 22 nt, Human
ugugagugacaguucccuuggu

SEQ ID NO: 797221 - RNA, 22 nt, Human
gcagggcugcagagggcacugu

SEQ ID NO: 797222 - RNA, 22 nt, Human
ugauucaagauugguuagcugu

SEQ ID NO: 797223 - RNA, 22 nt, Human
ggccagaggaccucucauagcc

SEQ ID NO: 797224 - RNA, 22 nt, Human
cagucccaggguugguucagcu

SEQ ID NO: 797225 - RNA, 22 nt, Human
uaggaaauuagaacuuggaaac

SEQ ID NO: 797226 - RNA, 22 nt, Human
aggcugugcauuuuggagggcc

SEQ ID NO: 797227 - RNA, 22 nt, Human
aaauccaucaaaucuucuagaa

SEQ ID NO: 797228 - RNA, 22 nt, Human
caaaaugcaucugagaccaggc

SEQ ID NO: 797229 - RNA, 22 nt, Human
acagugaugagccggcugaggc

SEQ ID NO: 797230 - RNA, 22 nt, Human
acauucauggguuuuacauuau

SEQ ID NO: 797231 - RNA, 22 nt, Human
aaguuugugagguuaaucccuu

SEQ ID NO: 797232 - RNA, 22 nt, Human
aaagaaauagauggcauuuaaa

SEQ ID NO: 797233 - RNA, 22 nt, Human
ccucucagcgauuccucuugga

SEQ ID NO: 797234 - RNA, 22 nt, Human
uuuauucaucaucuguucauau

SEQ ID NO: 797235 - RNA, 22 nt, Human
ucuggagucuaaagaaccaaaa

SEQ ID NO: 797236 - RNA, 22 nt, Human
uaccaaauguaaucauucuaau

SEQ ID NO: 797237 - RNA, 22 nt, Human
aguggugucgugggaguggaag

SEQ ID NO: 797238 - RNA, 20 nt, Human
aggcucugcauuucugagug

SEQ ID NO: 797239 - RNA, 22 nt, Human
cuggcagguccagcuggacuca

SEQ ID NO: 797240 - RNA, 20 nt, Human
ucuuacaaucguuacaucca

SEQ ID NO: 797241 - RNA, 22 nt, Human
cagaggaagcagacacaucuug

SEQ ID NO: 797242 - RNA, 22 nt, Human
uacaauagggcuuuuguuuaug

SEQ ID NO: 797243 - RNA, 22 nt, Human
ccugguccccaucggcccagcg

SEQ ID NO: 797244 - RNA, 19 nt, Human
aggcuugguugcagcaagc

SEQ ID NO: 797245 - RNA, 22 nt, Human
ucuggagaaucugucagugugg

SEQ ID NO: 797246 - RNA, 22 nt, Human
ccuccccacgggcagccggcgc

SEQ ID NO: 797247 - RNA, 22 nt, Human
ccauuguaaauucuguggaagu

SEQ ID NO: 797248 - RNA, 22 nt, Human
gccagucugauaggggagaagu

SEQ ID NO: 797249 - RNA, 21 nt, Human
uugcaaugggcauuuuggagg

SEQ ID NO: 797250 - RNA, 22 nt, Human
aaauuccaccagaaucaguaau

SEQ ID NO: 797251 - RNA, 22 nt, Human
acagggugacuuugugacagau

SEQ ID NO: 797252 - RNA, 22 nt, Human
ugugauuauuugauuaacaugu

SEQ ID NO: 797253 - RNA, 22 nt, Human
ccuggcacauagcaaccccucc

SEQ ID NO: 797254 - RNA, 22 nt, Human
uguuucuugggugcucacauca

SEQ ID NO: 797255 - RNA, 19 nt, Human
uuucucucccucaucccga

SEQ ID NO: 797256 - RNA, 22 nt, Human
gggcagugucggggcccaggga

SEQ ID NO: 797257 - RNA, 22 nt, Human
uaaauacagucauuugagccau

SEQ ID NO: 797258 - RNA, 22 nt, Human
caaagauuuuagaauuugcaau

SEQ ID NO: 797259 - RNA, 22 nt, Human
ucuccuggcucuaaaaggcugu

SEQ ID NO: 797260 - RNA, 22 nt, Human
aauucauagcaacaaagaccca

SEQ ID NO: 797261 - RNA, 22 nt, Human
caugaggucagggggagccggu

SEQ ID NO: 797262 - RNA, 22 nt, Human
gcuggcuuugucaagggcagca

SEQ ID NO: 797263 - RNA, 22 nt, Human
uuuucaucucugcuuuguaccu

SEQ ID NO: 797264 - RNA, 22 nt, Human
uucauguguauggaacauuuuu

SEQ ID NO: 797265 - RNA, 22 nt, Human
cuacagaagaaacuaucacuau

SEQ ID NO: 797266 - RNA, 22 nt, Human
cucuguggcuugccuuucuguc

SEQ ID NO: 797267 - RNA, 22 nt, Human
cugaaaugguugccuggagaau

SEQ ID NO: 797268 - RNA, 22 nt, Human
acacauuucucuuuuuguaagu

SEQ ID NO: 797269 - RNA, 22 nt, Human
gugggcagacaugauagaagga

SEQ ID NO: 797270 - RNA, 22 nt, Human
aaacugcaauuacuuuugcagc

SEQ ID NO: 797271 - RNA, 22 nt, Human
uuuggucaaauauuauccugag

SEQ ID NO: 797272 - RNA, 22 nt, Human
ugucaacauuggcugacaguug

SEQ ID NO: 797273 - RNA, 22 nt, Human
agucugcuuccuggagaacuca

SEQ ID NO: 797274 - RNA, 22 nt, Human
aggggauggagcuggaaggcag

SEQ ID NO: 797275 - RNA, 17 nt, Human
cugucugcgcaugaggu

SEQ ID NO: 797276 - RNA, 22 nt, Human
aagggcaggaaaagauggaugu

SEQ ID NO: 797277 - RNA, 18 nt, Human
uggccccuuaucaguccu

SEQ ID NO: 797278 - RNA, 22 nt, Human
ucagggcaagucucagaagguu

SEQ ID NO: 797279 - RNA, 22 nt, Human
uacaggcauguagcauggugau

SEQ ID NO: 797280 - RNA, 22 nt, Human
cauuauauuacagcacuguuaa

SEQ ID NO: 797281 - RNA, 22 nt, Human
agagcugggugaagugccauca

SEQ ID NO: 797282 - RNA, 22 nt, Human
caguuuaagacaagggggugua

SEQ ID NO: 797283 - RNA, 22 nt, Human
gagcagcuguccccaaagcuuc

SEQ ID NO: 797284 - RNA, 22 nt, Human
ucuggcucccuggagcuccaca

SEQ ID NO: 797285 - RNA, 22 nt, Human
cacagaggcaugacccugcccu

SEQ ID NO: 797286 - RNA, 22 nt, Human
aaacacaauguuucuuuguucu

SEQ ID NO: 797287 - RNA, 22 nt, Human
ugaaccaggcacauuuccuaca

SEQ ID NO: 797288 - RNA, 22 nt, Human
gccagcucagaugcaggaagga

SEQ ID NO: 797289 - RNA, 22 nt, Human
ugcauuaaauauaaucuguuga

SEQ ID NO: 797290 - RNA, 20 nt, Human
uugaaauuggaugguagcua

SEQ ID NO: 797291 - RNA, 22 nt, Human
ucuugggaaauguuugcgagcu

SEQ ID NO: 797292 - RNA, 22 nt, Human
uagcaggcaucucagagauaau

SEQ ID NO: 797293 - RNA, 22 nt, Human
caugauuuacuaaaauuuguuu

SEQ ID NO: 797294 - RNA, 22 nt, Human
ucacacuuaucccacucaguca

SEQ ID NO: 797295 - RNA, 18 nt, Human
gaugggagcaagagaaga

SEQ ID NO: 797296 - RNA, 22 nt, Human
agugcuggaaagggacggagga

SEQ ID NO: 797297 - RNA, 21 nt, Human
gcaagccaccacugcugccac

SEQ ID NO: 797298 - RNA, 22 nt, Human
cugggagacaagagagggcuga

SEQ ID NO: 797299 - RNA, 22 nt, Human
uuuauucacucauucagccagu

SEQ ID NO: 797300 - RNA, 22 nt, Human
guccugggagaugggacccuga

SEQ ID NO: 797301 - RNA, 18 nt, Human
agaauuaccaaagugcuu

SEQ ID NO: 797302 - RNA, 22 nt, Human
ugacuuuggacuagugauuuaa

SEQ ID NO: 797303 - RNA, 22 nt, Human
augccucugcucuugguccuca

SEQ ID NO: 797304 - RNA, 22 nt, Human
aaaacuuucagggauacagaaa

SEQ ID NO: 797305 - RNA, 22 nt, Human
ugggccacucuucccugggucu

SEQ ID NO: 797306 - RNA, 17 nt, Human
aggaggaucagagagua

SEQ ID NO: 797307 - RNA, 22 nt, Human
uuauacauguguuuugagauga

SEQ ID NO: 797308 - RNA, 22 nt, Human
aggaggccuguguuugucugua

SEQ ID NO: 797309 - RNA, 22 nt, Human
cuggugccauucuguggccuag

SEQ ID NO: 797310 - RNA, 22 nt, Human
gugggagcccucagggaggugc

SEQ ID NO: 797311 - RNA, 22 nt, Human
aagaagcacuuuccuacauguu

SEQ ID NO: 797312 - RNA, 22 nt, Human
uguggcaggaagagcuucugag

SEQ ID NO: 797313 - RNA, 22 nt, Human
gcaguguuaggaauaaaaauga

SEQ ID NO: 797314 - RNA, 22 nt, Human
uuucauugagacuauagacauc

SEQ ID NO: 797315 - RNA, 22 nt, Human
uuacaagauaacggagaaagca

SEQ ID NO: 797316 - RNA, 22 nt, Human
aacaaauuaguugcaagacugg

SEQ ID NO: 797317 - RNA, 22 nt, Human
agcacagauuugucaacauaga

SEQ ID NO: 797318 - RNA, 22 nt, Human
cagaagaaaucauuaucuggac

SEQ ID NO: 797319 - RNA, 22 nt, Human
uauauuguagcugaugacaaau

SEQ ID NO: 797320 - RNA, 22 nt, Human
aagauucacagagugaaugaaa

SEQ ID NO: 797321 - RNA, 22 nt, Human
cccauggguuuuccucccugcc

SEQ ID NO: 797322 - RNA, 21 nt, Human
agagcugggacuugccugaga

SEQ ID NO: 797323 - RNA, 22 nt, Human
uaaacuacugggcaaggacagg

SEQ ID NO: 797324 - RNA, 21 nt, Human
uaaagaagaugaaugugauca

SEQ ID NO: 797325 - RNA, 22 nt, Human
gucaguguagguucaucagugg

SEQ ID NO: 797326 - RNA, 22 nt, Human
gaucuugagcaaguuguguaac

SEQ ID NO: 797327 - RNA, 22 nt, Human
ggaggcaaagcacuuugcuugg

SEQ ID NO: 797328 - RNA, 22 nt, Human
ucucaaauucccuuuuccuccu

SEQ ID NO: 797329 - RNA, 23 nt, Human
ucacauuuaaccccucagaccuc

SEQ ID NO: 797330 - RNA, 18 nt, Human
auaaagugcuaauaaugg

SEQ ID NO: 797331 - RNA, 22 nt, Human
uguguuucugagaaucccaccu

SEQ ID NO: 797332 - RNA, 22 nt, Human
ugagcagaggagugacguaggu

SEQ ID NO: 797333 - RNA, 22 nt, Human
agaacauggauugucaaaggua

SEQ ID NO: 797334 - RNA, 22 nt, Human
uggaaacacccacgcaugcaua

SEQ ID NO: 797335 - RNA, 22 nt, Human
cagcccugccauggagccuccu

SEQ ID NO: 797336 - RNA, 22 nt, Human
caaggcccugcaaccugacuug

SEQ ID NO: 797337 - RNA, 22 nt, Human
agaaagugccucccuugggagc

SEQ ID NO: 797338 - RNA, 22 nt, Human
ugaaugauaugugaaaaggaac

SEQ ID NO: 797339 - RNA, 22 nt, Human
agaaauacuaggaauauucaua

SEQ ID NO: 797340 - RNA, 22 nt, Human
caagaugaaacuacagggagga

SEQ ID NO: 797341 - RNA, 22 nt, Human
uccugguggauagaagccaagg

SEQ ID NO: 797342 - RNA, 22 nt, Human
acauagcauaaagaaugacucu

SEQ ID NO: 797343 - RNA, 20 nt, Human
uucuuaaagaccucacuuug

SEQ ID NO: 797344 - RNA, 22 nt, Human
uaaaaaguugaaaggacuuauc

SEQ ID NO: 797345 - RNA, 22 nt, Human
auacaaucaucauuauauuccc

SEQ ID NO: 797346 - RNA, 22 nt, Human
aagcacagagagguaaaguaac

SEQ ID NO: 797347 - RNA, 22 nt, Human
acagguguggggcugugguacu

SEQ ID NO: 797348 - RNA, 22 nt, Human
agccccagccccucucucacaa

SEQ ID NO: 797349 - RNA, 22 nt, Human
accugccucagugcagcuggau

SEQ ID NO: 797350 - RNA, 22 nt, Human
gaaggcuugcaagugguucaua

SEQ ID NO: 797351 - RNA, 22 nt, Human
cuucaaaugugauuuuaauaac

SEQ ID NO: 797352 - RNA, 22 nt, Human
uagggcugaggcaacaagggag

SEQ ID NO: 797353 - RNA, 22 nt, Human
auuuaccagcugugcacugaua

SEQ ID NO: 797354 - RNA, 22 nt, Human
ccagccaugggccaccuagcug

SEQ ID NO: 797355 - RNA, 22 nt, Human
uugcuuuuaaucuuuguacauc

SEQ ID NO: 797356 - RNA, 22 nt, Human
guauacagauacuuagacgugc

SEQ ID NO: 797357 - RNA, 22 nt, Human
uuuuccaaaguaccaugucccu

SEQ ID NO: 797358 - RNA, 22 nt, Human
caaacuauuguucacaagacaa

SEQ ID NO: 797359 - RNA, 22 nt, Human
aaagugaugaacucugugaccu

SEQ ID NO: 797360 - RNA, 22 nt, Human
ccagaggaaaaauaucucccua

SEQ ID NO: 797361 - RNA, 22 nt, Human
augaaugagaaagcugaaaucu

SEQ ID NO: 797362 - RNA, 22 nt, Human
cagggggcucaaaggagagugc

SEQ ID NO: 797363 - RNA, 22 nt, Human
ucagccuggugauuccucuguc

SEQ ID NO: 797364 - RNA, 22 nt, Human
aaaacacaagaagcaggguaca

SEQ ID NO: 797365 - RNA, 22 nt, Human
aaacaaccuaaaguuacugauc

SEQ ID NO: 797366 - RNA, 22 nt, Human
ccugaggcccuggcugugcuga

SEQ ID NO: 797367 - RNA, 22 nt, Human
ccaccccugggugcagggagcg

SEQ ID NO: 797368 - RNA, 22 nt, Human
gggcacaggaauuugggaugug

SEQ ID NO: 797369 - RNA, 22 nt, Human
augacuuuccuggcaaaaguug

SEQ ID NO: 797370 - RNA, 22 nt, Human
ugacaaauucauauuucagagg

SEQ ID NO: 797371 - RNA, 22 nt, Human
ucacauacugaaaguccaguga

SEQ ID NO: 797372 - RNA, 22 nt, Human
gcagcuuggauuucuguaguuu

SEQ ID NO: 797373 - RNA, 22 nt, Human
ucaccccuacauuucccuugcu

SEQ ID NO: 797374 - RNA, 21 nt, Human
ucuuuccaauauucaugucuc

SEQ ID NO: 797375 - RNA, 22 nt, Human
augcagcuauuugagcauguca

SEQ ID NO: 797376 - RNA, 22 nt, Human
cagaagaauggugucugagcuc

SEQ ID NO: 797377 - RNA, 22 nt, Human
gggucuggcaugcugagaugga

SEQ ID NO: 797378 - RNA, 22 nt, Human
aggcaggccuacacaaugggag

SEQ ID NO: 797379 - RNA, 22 nt, Human
uugucugaaucuggagcucucu

SEQ ID NO: 797380 - RNA, 22 nt, Human
agcagggcaugaauaaggguuu

SEQ ID NO: 797381 - RNA, 22 nt, Human
aaggucugaguuuugccaggcc

SEQ ID NO: 797382 - RNA, 22 nt, Human
guaaucucagcuacuugggagg

SEQ ID NO: 797383 - RNA, 22 nt, Human
gccagcugguaggcaccuagcc

SEQ ID NO: 797384 - RNA, 22 nt, Human
ucuuuguacuuucuggcugucc

SEQ ID NO: 797385 - RNA, 22 nt, Human
cugggggugagcagcagcgacg

SEQ ID NO: 797386 - RNA, 22 nt, Human
ggcccugagcugaaguacugug

SEQ ID NO: 797387 - RNA, 21 nt, Human
agcagcagaucuggugagggc

SEQ ID NO: 797388 - RNA, 22 nt, Human
aagcacauuuggaaaacaugga

SEQ ID NO: 797389 - RNA, 22 nt, Human
cugcuggaaguuugcuguggau

SEQ ID NO: 797390 - RNA, 22 nt, Human
gaggagcugggucagggagaca

SEQ ID NO: 797391 - RNA, 22 nt, Human
agaaaacauuacauaggugugu

SEQ ID NO: 797392 - RNA, 21 nt, Human
ucauguaaugcaugaaguaaa

SEQ ID NO: 797393 - RNA, 22 nt, Human
agggcagagagaugaaugggau

SEQ ID NO: 797394 - RNA, 22 nt, Human
uugcagcugcuguuccucaugg

SEQ ID NO: 797395 - RNA, 21 nt, Human
cagggcuagagagaaugacaa

SEQ ID NO: 797396 - RNA, 22 nt, Human
acugcucucugcaaguagaugg

SEQ ID NO: 797397 - RNA, 22 nt, Human
uccaggcccgagaugggcugga

SEQ ID NO: 797398 - RNA, 22 nt, Human
aguggcugcuggaguggagaug

SEQ ID NO: 797399 - RNA, 22 nt, Human
uucauugaaauguuucuagcug

SEQ ID NO: 797400 - RNA, 22 nt, Human
uugccagggucaggaugagauc

SEQ ID NO: 797401 - RNA, 22 nt, Human
cagcaagauuuuuaaagcaagg

SEQ ID NO: 797402 - RNA, 22 nt, Human
uugacuuuucuuggucacauga

SEQ ID NO: 797403 - RNA, 22 nt, Human
cuuucucuguguuucacaugcu

SEQ ID NO: 797404 - RNA, 23 nt, Human
agaucacaugcugauggaaaaug

SEQ ID NO: 797405 - RNA, 20 nt, Human
ggaccagcugucugaggggc

SEQ ID NO: 797406 - RNA, 22 nt, Human
acuccuggguuccggagauucu

SEQ ID NO: 797407 - RNA, 22 nt, Human
aauaucuucuaaggauagaacu

SEQ ID NO: 797408 - RNA, 22 nt, Human
uacacauaggaggguaauaaaa

SEQ ID NO: 797409 - RNA, 22 nt, Human
gcaggagcucguuuccaggcug

SEQ ID NO: 797410 - RNA, 20 nt, Human
ccugggguacacuggcaugu

SEQ ID NO: 797411 - RNA, 19 nt, Human
accuuacagaaacaggcau

SEQ ID NO: 797412 - RNA, 22 nt, Human
ccaugcaaagaaugugggcaua

SEQ ID NO: 797413 - RNA, 22 nt, Human
agugucaaaugugugccaagcu

SEQ ID NO: 797414 - RNA, 18 nt, Human
cuccuggcugauggugag

SEQ ID NO: 797415 - RNA, 22 nt, Human
gacuucauaauauugagcaugu

SEQ ID NO: 797416 - RNA, 22 nt, Human
acuggcuugugagacaaugccu

SEQ ID NO: 797417 - RNA, 22 nt, Human
agaggccuaaccaagauguccu

SEQ ID NO: 797418 - RNA, 22 nt, Human
ggagaggcuuggcccagccugg

SEQ ID NO: 797419 - RNA, 21 nt, Human
agcagaggcugccuggugacu

SEQ ID NO: 797420 - RNA, 22 nt, Human
agcuggagcuucaagcagguaa

SEQ ID NO: 797421 - RNA, 22 nt, Human
ccagggagcccacaggacaaug

SEQ ID NO: 797422 - RNA, 22 nt, Human
ugcaaauagccuauauuuauag

SEQ ID NO: 797423 - RNA, 22 nt, Human
agggccaguucagaggacaugg

SEQ ID NO: 797424 - RNA, 22 nt, Human
agucccagagaggucggggcca

SEQ ID NO: 797425 - RNA, 22 nt, Human
acagaaagaugauuugaaaugg

SEQ ID NO: 797426 - RNA, 19 nt, Human
uccuuugaauaucaguuga

SEQ ID NO: 797427 - RNA, 22 nt, Human
uuguuacagaucacauuucugc

SEQ ID NO: 797428 - RNA, 22 nt, Human
ugucuguuauugguguauaaga

SEQ ID NO: 797429 - RNA, 22 nt, Human
gcaaaugcuaaaguguagagac

SEQ ID NO: 797430 - RNA, 22 nt, Human
ugccagccagguucugaggcua

SEQ ID NO: 797431 - RNA, 22 nt, Human
ggcugggucccagcugggagga

SEQ ID NO: 797432 - RNA, 22 nt, Human
agaacauaauuaucauaaacug

SEQ ID NO: 797433 - RNA, 23 nt, Human
acagggcauugcuggccucgagg

SEQ ID NO: 797434 - RNA, 22 nt, Human
ggggggugacaaguagagguug

SEQ ID NO: 797435 - RNA, 22 nt, Human
ggcaggcaaggcagccugguga

SEQ ID NO: 797436 - RNA, 22 nt, Human
uggucuggggaccgaggguuac

SEQ ID NO: 797437 - RNA, 22 nt, Human
auuuacagaaacuuaaucauag

SEQ ID NO: 797438 - RNA, 22 nt, Human
cuggucaggaagguggggacag

SEQ ID NO: 797439 - RNA, 22 nt, Human
ugguggcuaccagguccugggg

SEQ ID NO: 797440 - RNA, 22 nt, Human
gcccagagugaguccugggccc

SEQ ID NO: 797441 - RNA, 22 nt, Human
gccaggcugaggcucuggaaga

SEQ ID NO: 797442 - RNA, 22 nt, Human
ugacaucuaguagguagagacc

SEQ ID NO: 797443 - RNA, 19 nt, Human
augcagcuccugccuccuu

SEQ ID NO: 797444 - RNA, 22 nt, Human
acagggagugcaauucauauug

SEQ ID NO: 797445 - RNA, 22 nt, Human
agcuguggcaaccuugucagac

SEQ ID NO: 797446 - RNA, 22 nt, Human
ucaacaaauacuuaaagcagag

SEQ ID NO: 797447 - RNA, 22 nt, Human
agcaccugcuuaaugugcagug

SEQ ID NO: 797448 - RNA, 22 nt, Human
ugaggucugcagggcugugcau

SEQ ID NO: 797449 - RNA, 22 nt, Human
uuuauuauucuguucucucuac

SEQ ID NO: 797450 - RNA, 22 nt, Human
uggccugccccgagauccuggc

SEQ ID NO: 797451 - RNA, 23 nt, Human
cacaccaggagccgucugggcca

SEQ ID NO: 797452 - RNA, 22 nt, Human
cagcaguggaacuacccaggga

SEQ ID NO: 797453 - RNA, 22 nt, Human
gcuucuauuacuacuuugagau

SEQ ID NO: 797454 - RNA, 22 nt, Human
gccugagggcuccuagcaggcu

SEQ ID NO: 797455 - RNA, 22 nt, Human
gcccugggcucccugcuccaca

SEQ ID NO: 797456 - RNA, 22 nt, Human
ucuggagaaggaagagucuuug

SEQ ID NO: 797457 - RNA, 22 nt, Human
cuucaaagggucacuauuuauc

SEQ ID NO: 797458 - RNA, 19 nt, Human
ccugggccuccaucacccc

SEQ ID NO: 797459 - RNA, 22 nt, Human
uggacaggugagugacucaggg

SEQ ID NO: 797460 - RNA, 22 nt, Human
gaggaaggauuuaguuugaggg

SEQ ID NO: 797461 - RNA, 22 nt, Human
ugagagagccugaaucucuuac

SEQ ID NO: 797462 - RNA, 22 nt, Human
aaagccaguucuuuuauauugg

SEQ ID NO: 797463 - RNA, 22 nt, Human
uccaucaccacagaggacagag

SEQ ID NO: 797464 - RNA, 22 nt, Human
aggcauggcuuuaggcaggcgu

SEQ ID NO: 797465 - RNA, 22 nt, Human
cacagcuucugagugaggauuu

SEQ ID NO: 797466 - RNA, 22 nt, Human
acccaggcuggagugcaguagc

SEQ ID NO: 797467 - RNA, 22 nt, Human
gaugcgggcccgcuccacugcc

SEQ ID NO: 797468 - RNA, 22 nt, Human
ccaaggcaaugugcagcuggug

SEQ ID NO: 797469 - RNA, 22 nt, Human
gagcaaagcuuuuagggccuuu

SEQ ID NO: 797470 - RNA, 22 nt, Human
gcacccucugagcuccgcuccg

SEQ ID NO: 797471 - RNA, 22 nt, Human
gcagaggugcucaguggcagaa

SEQ ID NO: 797472 - RNA, 22 nt, Human
uccaagaagcuuacaaucuaau

SEQ ID NO: 797473 - RNA, 22 nt, Human
gagguccaggguggggccugag

SEQ ID NO: 797474 - RNA, 22 nt, Human
ggcucagguuuccuucccagcu

SEQ ID NO: 797475 - RNA, 22 nt, Human
uaggagagcugaacuauugucu

SEQ ID NO: 797476 - RNA, 22 nt, Human
auccugggcaguuuugagugcu

SEQ ID NO: 797477 - RNA, 22 nt, Human
agcaaugaccagugaucuugua

SEQ ID NO: 797478 - RNA, 22 nt, Human
acagucuuugcaggagaaagga

SEQ ID NO: 797479 - RNA, 22 nt, Human
agggcagagaaauguaguugag

SEQ ID NO: 797480 - RNA, 22 nt, Human
gccuucagaguaccauguccuc

SEQ ID NO: 797481 - RNA, 18 nt, Human
ggguauccagaacugguc

SEQ ID NO: 797482 - RNA, 22 nt, Human
gcccuucugcuguuagguagcc

SEQ ID NO: 797483 - RNA, 22 nt, Human
acacagggggcauucuaggagu

SEQ ID NO: 797484 - RNA, 20 nt, Human
ggcaggacccgguagggagc

SEQ ID NO: 797485 - RNA, 22 nt, Human
cauuugaaauucuuagaacaaa

SEQ ID NO: 797486 - RNA, 22 nt, Human
aggcagcaugggccccagcucc

SEQ ID NO: 797487 - RNA, 22 nt, Human
gagcugccaguguaugaauucu

SEQ ID NO: 797488 - RNA, 22 nt, Human
ugaaaucaugagauagugucac

SEQ ID NO: 797489 - RNA, 22 nt, Human
gauucugaucuauaguguuaua

SEQ ID NO: 797490 - RNA, 20 nt, Human
uuugagaccagucugcccaa

SEQ ID NO: 797491 - RNA, 22 nt, Human
gaaaggccauuucugaggguuu

SEQ ID NO: 797492 - RNA, 22 nt, Human
gaaggcccgcccugagcaaggg

SEQ ID NO: 797493 - RNA, 22 nt, Human
agguacaguagacagacaguua

SEQ ID NO: 797494 - RNA, 22 nt, Human
aaauucuaugucaauguuuauu

SEQ ID NO: 797495 - RNA, 22 nt, Human
ccugcugguuuuuacaaagaug

SEQ ID NO: 797496 - RNA, 22 nt, Human
ugaacuuucacaagaauaugcu

SEQ ID NO: 797497 - RNA, 22 nt, Human
uguucuggggacagcgucccau

SEQ ID NO: 797498 - RNA, 22 nt, Human
aauuauauuguggugugaaugu

SEQ ID NO: 797499 - RNA, 23 nt, Human
cuggcuccgaagacuccaggauc

SEQ ID NO: 797500 - RNA, 22 nt, Human
gaccuagauuaacauucuguga

SEQ ID NO: 797501 - RNA, 22 nt, Human
caaacauuuugagugguuucug

SEQ ID NO: 797502 - RNA, 22 nt, Human
caguuucuucaauucagacacu

SEQ ID NO: 797503 - RNA, 22 nt, Human
uggaggcaguaacugagcaaca

SEQ ID NO: 797504 - RNA, 22 nt, Human
ggccaguccccuaauccagggc

SEQ ID NO: 797505 - RNA, 22 nt, Human
cuucugaaguguuugaugauug

SEQ ID NO: 797506 - RNA, 22 nt, Human
gaaggcuuauuuucuuuguaaa

SEQ ID NO: 797507 - RNA, 22 nt, Human
acuucuuucacaauguuucuag

SEQ ID NO: 797508 - RNA, 22 nt, Human
ucaggaggccaccaggaccugu

SEQ ID NO: 797509 - RNA, 22 nt, Human
auuuacaggacagcuuggcauu

SEQ ID NO: 797510 - RNA, 22 nt, Human
cuggcugccagcauuuggggga

SEQ ID NO: 797511 - RNA, 18 nt, Human
aggaagcaggaggaaggc

SEQ ID NO: 797512 - RNA, 22 nt, Human
cugauuuacauauacaaaagau

SEQ ID NO: 797513 - RNA, 22 nt, Human
accagcagcugccagaguggag

SEQ ID NO: 797514 - RNA, 22 nt, Human
gagaaacugaaacauagggcca

SEQ ID NO: 797515 - RNA, 22 nt, Human
agacaggcagaggcugcagagg

SEQ ID NO: 797516 - RNA, 20 nt, Human
gccugccucagcuagcugag

SEQ ID NO: 797517 - RNA, 22 nt, Human
cauaucuucugacaugaucagg

SEQ ID NO: 797518 - RNA, 22 nt, Human
auugggaugccggcugauaaga

SEQ ID NO: 797519 - RNA, 22 nt, Human
uuguauuugauugucauaucgu

SEQ ID NO: 797520 - RNA, 17 nt, Human
gcacugagccacaguuu

SEQ ID NO: 797521 - RNA, 22 nt, Human
caagcagagagguuagaacaca

SEQ ID NO: 797522 - RNA, 22 nt, Human
ucuccuggcaugugggucaucu

SEQ ID NO: 797523 - RNA, 22 nt, Human
acacuuaagcaugaaguauaaa

SEQ ID NO: 797524 - RNA, 22 nt, Human
ggaaaauacugauucaugccau

SEQ ID NO: 797525 - RNA, 22 nt, Human
uagcuguggagcagaggucucc

SEQ ID NO: 797526 - RNA, 22 nt, Human
ucauuuaucgcugccuuuuaaa

SEQ ID NO: 797527 - RNA, 22 nt, Human
ugcaagauauuaucuuugcugc

SEQ ID NO: 797528 - RNA, 22 nt, Human
ugggagacacuggugggagcuu

SEQ ID NO: 797529 - RNA, 22 nt, Human
gcugcuggaugcgcuugauggu

SEQ ID NO: 797530 - RNA, 22 nt, Human
gcuggcugggucccugagaggc

SEQ ID NO: 797531 - RNA, 22 nt, Human
cugcaagauguugucauaugcu

SEQ ID NO: 797532 - RNA, 22 nt, Human
uguccuggugcuccagguggcu

SEQ ID NO: 797533 - RNA, 22 nt, Human
agcaacaggguggucuucagaa

SEQ ID NO: 797534 - RNA, 22 nt, Human
cuggagaguaaucucuguguua

SEQ ID NO: 797535 - RNA, 22 nt, Human
acaaugucaaaauaggaaacau

SEQ ID NO: 797536 - RNA, 22 nt, Human
ucauuugugcugucagcaugca

SEQ ID NO: 797537 - RNA, 22 nt, Human
ccaggcagccugcuccauucug

SEQ ID NO: 797538 - RNA, 22 nt, Human
ugugucaaauuguuuuacacag

SEQ ID NO: 797539 - RNA, 22 nt, Human
cugcagcucuagcuuuugaccu

SEQ ID NO: 797540 - RNA, 22 nt, Human
aagucagagcaacugagacauu

SEQ ID NO: 797541 - RNA, 22 nt, Human
gcacugcagguggguggagagg

SEQ ID NO: 797542 - RNA, 22 nt, Human
gagugcagaugaacagaagauu

SEQ ID NO: 797543 - RNA, 22 nt, Human
augauauuugcaaugugcuugc

SEQ ID NO: 797544 - RNA, 19 nt, Human
cacacccaugcuugccaag

SEQ ID NO: 797545 - RNA, 22 nt, Human
auucauuggcuugaacuccacc

SEQ ID NO: 797546 - RNA, 22 nt, Human
ccucaugcugcaucucugaggu

SEQ ID NO: 797547 - RNA, 22 nt, Human
ccacuggcaguuggcuagccuu

SEQ ID NO: 797548 - RNA, 22 nt, Human
gaguaauauucuguacuggagg

SEQ ID NO: 797549 - RNA, 22 nt, Human
ccuuggcaagacaguggagggu

SEQ ID NO: 797550 - RNA, 22 nt, Human
ggguggagaggcuaaguccagu

SEQ ID NO: 797551 - RNA, 22 nt, Human
uggaccagcuccucgggagacg

SEQ ID NO: 797552 - RNA, 22 nt, Human
uugguguacaucuccccuucau

SEQ ID NO: 797553 - RNA, 22 nt, Human
ucuucccagcugcugcgaugcc

SEQ ID NO: 797554 - RNA, 23 nt, Human
ucagaagugggauacaaagcuga

SEQ ID NO: 797555 - RNA, 22 nt, Human
acaggcagagaguggcggacuc

SEQ ID NO: 797556 - RNA, 22 nt, Human
uuggccaagggcucuuuaggcu

SEQ ID NO: 797557 - RNA, 22 nt, Human
acccaggcuggaaugcaguggu

SEQ ID NO: 797558 - RNA, 22 nt, Human
cacagugcuuuaugagagaucu

SEQ ID NO: 797559 - RNA, 21 nt, Human
cagaggcagguccugggacgg

SEQ ID NO: 797560 - RNA, 22 nt, Human
uguacuugcuuauuagaaaucu

SEQ ID NO: 797561 - RNA, 22 nt, Human
gcuggcucaagugugcuuccca

SEQ ID NO: 797562 - RNA, 22 nt, Human
uggauugauaaaaugggauguu

SEQ ID NO: 797563 - RNA, 22 nt, Human
aaaggcucagaugaggcccugg

SEQ ID NO: 797564 - RNA, 22 nt, Human
cuggcucagacagcugugcagu

SEQ ID NO: 797565 - RNA, 22 nt, Human
ggagggucuaagggagaacuga

SEQ ID NO: 797566 - RNA, 22 nt, Human
cuccccacgccuggacuaagag

SEQ ID NO: 797567 - RNA, 22 nt, Human
ggggugagguuuauguucuggg

SEQ ID NO: 797568 - RNA, 22 nt, Human
uuuucauuuacauuagggaaga

SEQ ID NO: 797569 - RNA, 21 nt, Human
uuacauucagaggaguggaag

SEQ ID NO: 797570 - RNA, 22 nt, Human
aggagcuucagagagaaccugg

SEQ ID NO: 797571 - RNA, 22 nt, Human
gaaugauaaauggaagcagcau

SEQ ID NO: 797572 - RNA, 22 nt, Human
acucuuggccacucuugguguc

SEQ ID NO: 797573 - RNA, 22 nt, Human
ucagguguuagaagaaauuuca

SEQ ID NO: 797574 - RNA, 22 nt, Human
uacaaaguuugggguccucaaa

SEQ ID NO: 797575 - RNA, 22 nt, Human
auucagcauaaucaguagcuug

SEQ ID NO: 797576 - RNA, 22 nt, Human
aagacugaguggcuuaagaaaa

SEQ ID NO: 797577 - RNA, 22 nt, Human
aggcaagugcauuagaagagca

SEQ ID NO: 797578 - RNA, 22 nt, Human
cagagguguuggugaauggaga

SEQ ID NO: 797579 - RNA, 22 nt, Human
agacagcagaaacuagagcacu

SEQ ID NO: 797580 - RNA, 22 nt, Human
cagggagcaggcucuguccauc

SEQ ID NO: 797581 - RNA, 22 nt, Human
uccagccucauuucuccugcuu

SEQ ID NO: 797582 - RNA, 22 nt, Human
gaggccuguagucauggaugua

SEQ ID NO: 797583 - RNA, 22 nt, Human
ucccaaagucaagcugugucuu

SEQ ID NO: 797584 - RNA, 22 nt, Human
aauguguuuucacugaagauuc

SEQ ID NO: 797585 - RNA, 22 nt, Human
caguccaguccaauccucaaug

SEQ ID NO: 797586 - RNA, 22 nt, Human
uuagccaaacaggugaaauuga

SEQ ID NO: 797587 - RNA, 22 nt, Human
ccuguggcuuccacgaccuaau

SEQ ID NO: 797588 - RNA, 22 nt, Human
uucuauguggauauagaacugc

SEQ ID NO: 797589 - RNA, 20 nt, Human
ucaaaggcaaaggugggugu

SEQ ID NO: 797590 - RNA, 22 nt, Human
agugaaauuuguuuagauaggu

SEQ ID NO: 797591 - RNA, 23 nt, Human
aacugagauaauguauguaaagc

SEQ ID NO: 797592 - RNA, 22 nt, Human
uccaggagggguaggcaguaug

SEQ ID NO: 797593 - RNA, 22 nt, Human
acuucuugaugaaaaugguacu

SEQ ID NO: 797594 - RNA, 21 nt, Human
aaucaggaaguguguguccug

SEQ ID NO: 797595 - RNA, 22 nt, Human
uugcugaaaguggcaagaagua

SEQ ID NO: 797596 - RNA, 22 nt, Human
ugccauauuauugagcauauua

SEQ ID NO: 797597 - RNA, 22 nt, Human
agcagggcccacuaggggagau

SEQ ID NO: 797598 - RNA, 22 nt, Human
ugagggccgaggagcugugggu

SEQ ID NO: 797599 - RNA, 22 nt, Human
agagccaaggcugagagcuauu

SEQ ID NO: 797600 - RNA, 22 nt, Human
gggagcucucccugaggccugg

SEQ ID NO: 797601 - RNA, 22 nt, Human
uggagggcucuuucaccuggua

SEQ ID NO: 797602 - RNA, 22 nt, Human
cucccagggucuaggcugcugg

SEQ ID NO: 797603 - RNA, 22 nt, Human
gugaaaaaugauuuguuaacug

SEQ ID NO: 797604 - RNA, 22 nt, Human
uccagggaucuuuagagucuuu

SEQ ID NO: 797605 - RNA, 22 nt, Human
uacccagcaaucccuagagguu

SEQ ID NO: 797606 - RNA, 22 nt, Human
uuuaagcacagggauaaaguua

SEQ ID NO: 797607 - RNA, 22 nt, Human
ugcuggagaugaaagggcccug

SEQ ID NO: 797608 - RNA, 22 nt, Human
agggaaggcuuuugacauuucc

SEQ ID NO: 797609 - RNA, 22 nt, Human
gagcugagaagcagcgcuugau

SEQ ID NO: 797610 - RNA, 21 nt, Human
agaggcccucggacugggcgu

SEQ ID NO: 797611 - RNA, 22 nt, Human
gugaguuacucugguucucauu

SEQ ID NO: 797612 - RNA, 22 nt, Human
acucagagauauggugguugau

SEQ ID NO: 797613 - RNA, 21 nt, Human
ggccucagccaccuggcucug

SEQ ID NO: 797614 - RNA, 22 nt, Human
ucaguaaaugaaugaauauaug

SEQ ID NO: 797615 - RNA, 22 nt, Human
agagaagcauucuucucagggc

SEQ ID NO: 797616 - RNA, 22 nt, Human
ucccagagccaagcuauggaug

SEQ ID NO: 797617 - RNA, 22 nt, Human
cucggguaccaugcuaggcacu

SEQ ID NO: 797618 - RNA, 22 nt, Human
ggaggcgcggcucggcugugcc

SEQ ID NO: 797619 - RNA, 22 nt, Human
gagcugagccuggguggaccgc

SEQ ID NO: 797620 - RNA, 22 nt, Human
uuaacagagaacauagaaguag

SEQ ID NO: 797621 - RNA, 22 nt, Human
ggacacuagauggagaagggaa

SEQ ID NO: 797622 - RNA, 22 nt, Human
uguggaaagucaaguuccagga

SEQ ID NO: 797623 - RNA, 18 nt, Human
ggcagugcagucucaggg

SEQ ID NO: 797624 - RNA, 22 nt, Human
uaugaaauuuaaacacagauca

SEQ ID NO: 797625 - RNA, 22 nt, Human
ugaggcuguucuaccagggcca

SEQ ID NO: 797626 - RNA, 22 nt, Human
aaaggauaagguuaucaauuuu

SEQ ID NO: 797627 - RNA, 17 nt, Human
ugagacagggcaggccc

SEQ ID NO: 797628 - RNA, 22 nt, Human
caguaacaugaagagacaugga

SEQ ID NO: 797629 - RNA, 22 nt, Human
acuccuggguugcaguccucaa

SEQ ID NO: 797630 - RNA, 21 nt, Human
ucaggaagagccaguucaugc

SEQ ID NO: 797631 - RNA, 20 nt, Human
gauuacaaaaugaaaugcau

SEQ ID NO: 797632 - RNA, 22 nt, Human
gagcccagguucugcuuccagc

SEQ ID NO: 797633 - RNA, 22 nt, Human
cauauuaaggucuguaaggggu

SEQ ID NO: 797634 - RNA, 22 nt, Human
aacauuuaugguagucauugca

SEQ ID NO: 797635 - RNA, 22 nt, Human
cacagagaccccuucuggggcc

SEQ ID NO: 797636 - RNA, 22 nt, Human
caagcuuuccauuacacacauu

SEQ ID NO: 797637 - RNA, 22 nt, Human
uagaaaguagccacuuacagag

SEQ ID NO: 797638 - RNA, 22 nt, Human
uguaucuucaguuugucuuucc

SEQ ID NO: 797639 - RNA, 18 nt, Human
ucagagagcagcuuuauu

SEQ ID NO: 797640 - RNA, 23 nt, Human
ccagggagugcuacuaucaagcc

SEQ ID NO: 797641 - RNA, 21 nt, Human
aagaugauauuuuaucuguag

SEQ ID NO: 797642 - RNA, 22 nt, Human
caaaaaacacagaugucugugu

SEQ ID NO: 797643 - RNA, 22 nt, Human
cugugcugaggaugcaguuucu

SEQ ID NO: 797644 - RNA, 22 nt, Human
gcagcugggucugugugggcug

SEQ ID NO: 797645 - RNA, 22 nt, Human
ugauuuaccaguuacuaucuug

SEQ ID NO: 797646 - RNA, 22 nt, Human
gagcuuggugcugccuguuguc

SEQ ID NO: 797647 - RNA, 22 nt, Human
gccagcugugcuuuuccuaaaa

SEQ ID NO: 797648 - RNA, 22 nt, Human
uuguuuaaaauguagcaagaaa

SEQ ID NO: 797649 - RNA, 22 nt, Human
cccugcagaaccacagacaaac

SEQ ID NO: 797650 - RNA, 22 nt, Human
agggaugugggaacugcagguu

SEQ ID NO: 797651 - RNA, 18 nt, Human
gaggcacauaguuggggc

SEQ ID NO: 797652 - RNA, 22 nt, Human
gggaugagagcugggacagaag

SEQ ID NO: 797653 - RNA, 22 nt, Human
ggaggccuccugggggagguuc

SEQ ID NO: 797654 - RNA, 22 nt, Human
cauuaauaaacauuucagaaga

SEQ ID NO: 797655 - RNA, 22 nt, Human
ucuaggagcugagaguguguac

SEQ ID NO: 797656 - RNA, 22 nt, Human
cagagcaguaaaucuggggcac

SEQ ID NO: 797657 - RNA, 22 nt, Human
aacagauaauuucuaaguuacu

SEQ ID NO: 797658 - RNA, 22 nt, Human
gaguuaauucgaauauucuagc

SEQ ID NO: 797659 - RNA, 22 nt, Human
ggagucugggaauuggagagaa

SEQ ID NO: 797660 - RNA, 22 nt, Human
auacaaagcuaaauaugguuuc

SEQ ID NO: 797661 - RNA, 22 nt, Human
uaugcaacagcauuauuacaau

SEQ ID NO: 797662 - RNA, 22 nt, Human
acacggcacuuuaggaaggggc

SEQ ID NO: 797663 - RNA, 22 nt, Human
uuuguuuacaaaaauaagcagu

SEQ ID NO: 797664 - RNA, 22 nt, Human
ucauugcagacuaacaaucuca

SEQ ID NO: 797665 - RNA, 22 nt, Human
caucaguguugauccaccagca

SEQ ID NO: 797666 - RNA, 18 nt, Human
ugcaggcuguugaaacug

SEQ ID NO: 797667 - RNA, 22 nt, Human
uggaagaucaaccaggauugac

SEQ ID NO: 797668 - RNA, 22 nt, Human
ugaaaaaacaaguuggcccauu

SEQ ID NO: 797669 - RNA, 22 nt, Human
cugagaggcggagcuugcagug

SEQ ID NO: 797670 - RNA, 22 nt, Human
gcagaagcccggucagcgcacg

SEQ ID NO: 797671 - RNA, 22 nt, Human
uuuugauaucaugaugaacaga

SEQ ID NO: 797672 - RNA, 22 nt, Human
auucuauuuuuuaagaaguagu

SEQ ID NO: 797673 - RNA, 19 nt, Human
uaaguagucaaauaguaac

SEQ ID NO: 797674 - RNA, 22 nt, Human
gagguagguguaggaggccugc

SEQ ID NO: 797675 - RNA, 22 nt, Human
auuaauaaaauaccacuuuguu

SEQ ID NO: 797676 - RNA, 22 nt, Human
aauaaugugugcugcagucuua

SEQ ID NO: 797677 - RNA, 22 nt, Human
ggcugggccagggccuguggac

SEQ ID NO: 797678 - RNA, 22 nt, Human
gcagcaaaaaaguaauauuuau

SEQ ID NO: 797679 - RNA, 22 nt, Human
cuccacagccccuccaguggca

SEQ ID NO: 797680 - RNA, 22 nt, Human
gcuggcugcagauuuuagaggu

SEQ ID NO: 797681 - RNA, 22 nt, Human
gaggacagcuuagggcuuccug

SEQ ID NO: 797682 - RNA, 22 nt, Human
caggccugaguguggaagucuu

SEQ ID NO: 797683 - RNA, 22 nt, Human
uugcaaaugggcaaagcagauc

SEQ ID NO: 797684 - RNA, 22 nt, Human
aaagcauuguuucaagauuaac

SEQ ID NO: 797685 - RNA, 22 nt, Human
uggcuccaucauccaugcaaga

SEQ ID NO: 797686 - RNA, 22 nt, Human
uccaggcauaaugcccaguggu

SEQ ID NO: 797687 - RNA, 22 nt, Human
cugcagccacgagucacagccc

SEQ ID NO: 797688 - RNA, 22 nt, Human
cugagccagggccacacaugga

SEQ ID NO: 797689 - RNA, 22 nt, Human
ccagccuggacugggucuugug

SEQ ID NO: 797690 - RNA, 22 nt, Human
ucaguauuucuaaacauuggcu

SEQ ID NO: 797691 - RNA, 22 nt, Human
aaggacagguuggggcuucagg

SEQ ID NO: 797692 - RNA, 22 nt, Human
gggcagugucugcaaaugaaca

SEQ ID NO: 797693 - RNA, 19 nt, Human
gccugagccagccaugcaa

SEQ ID NO: 797694 - RNA, 22 nt, Human
augacaaaaugaaugcagcuag

SEQ ID NO: 797695 - RNA, 22 nt, Human
aggaaagggguagguguggacg

SEQ ID NO: 797696 - RNA, 22 nt, Human
uauuuguauguguguacauaua

SEQ ID NO: 797697 - RNA, 22 nt, Human
auacaaaaauuagccgggagua

SEQ ID NO: 797698 - RNA, 22 nt, Human
gagcuaguagaacaagugagga

SEQ ID NO: 797699 - RNA, 22 nt, Human
aagcaggcaagguuguggggca

SEQ ID NO: 797700 - RNA, 22 nt, Human
uuuuauacuuaagacagaguuu

SEQ ID NO: 797701 - RNA, 22 nt, Human
acaguagacccuggauaaacau

SEQ ID NO: 797702 - RNA, 22 nt, Human
uaggacaggaucaugaugcugg

SEQ ID NO: 797703 - RNA, 22 nt, Human
uuugaauaucacaaacuuucaa

SEQ ID NO: 797704 - RNA, 22 nt, Human
ucugcagggaugugagggguga

SEQ ID NO: 797705 - RNA, 22 nt, Human
aauuagaagcuguuagcaaaau

SEQ ID NO: 797706 - RNA, 22 nt, Human
uccuggagcuuccuucauggua

SEQ ID NO: 797707 - RNA, 22 nt, Human
aggccagccucaggcagggacc

SEQ ID NO: 797708 - RNA, 16 nt, Human
guucuauuuucguccu

SEQ ID NO: 797709 - RNA, 22 nt, Human
uuagaugugcaggacuuuuauc

SEQ ID NO: 797710 - RNA, 22 nt, Human
cccuggugguacggcacuggca

SEQ ID NO: 797711 - RNA, 23 nt, Human
ucguugaauagcaauagcacaac

SEQ ID NO: 797712 - RNA, 22 nt, Human
gucacuggaauuacaggcaugc

SEQ ID NO: 797713 - RNA, 22 nt, Human
acagcagagacacucaggaggc

SEQ ID NO: 797714 - RNA, 22 nt, Human
ucugugauaggaaaauaaaugg

SEQ ID NO: 797715 - RNA, 22 nt, Human
agaaacuacuuggaggaaagau

SEQ ID NO: 797716 - RNA, 22 nt, Human
gcaggacagcaggaugcuuaga

SEQ ID NO: 797717 - RNA, 22 nt, Human
cacaauuuuccuuuaaguguau

SEQ ID NO: 797718 - RNA, 22 nt, Human
agugagauguguaaucaggggu

SEQ ID NO: 797719 - RNA, 22 nt, Human
aagccagguguugugguaagag

SEQ ID NO: 797720 - RNA, 22 nt, Human
uauaacuaauacuggccaugag

SEQ ID NO: 797721 - RNA, 22 nt, Human
aggcuggcgacaucuggcgggc

SEQ ID NO: 797722 - RNA, 22 nt, Human
acaauguuucucuuuagucauu

SEQ ID NO: 797723 - RNA, 22 nt, Human
uaaggguucagaaugcaguggu

SEQ ID NO: 797724 - RNA, 22 nt, Human
uccagagcuaauucagcagcug

SEQ ID NO: 797725 - RNA, 22 nt, Human
cugcagcuguagaggacagugg

SEQ ID NO: 797726 - RNA, 22 nt, Human
ugcuucucccaaccagggccug

SEQ ID NO: 797727 - RNA, 22 nt, Human
auuauuucagucagacacuggc

SEQ ID NO: 797728 - RNA, 22 nt, Human
augcaagacccagaaaucauua

SEQ ID NO: 797729 - RNA, 22 nt, Human
uccacauagucauuaauuucug

SEQ ID NO: 797730 - RNA, 22 nt, Human
ccucuucugagugagacucccu

SEQ ID NO: 797731 - RNA, 22 nt, Human
uccagcugcaaggggcacagcu

SEQ ID NO: 797732 - RNA, 22 nt, Human
agucauaauuauaaacaucagu

SEQ ID NO: 797733 - RNA, 22 nt, Human
ggugcagaggagccagcugggg

SEQ ID NO: 797734 - RNA, 22 nt, Human
acuuaaaaacagauccagcagg

SEQ ID NO: 797735 - RNA, 22 nt, Human
uaaguucaccaguuguaauaag

SEQ ID NO: 797736 - RNA, 22 nt, Human
aaugcagaccaguaugaaaaac

SEQ ID NO: 797737 - RNA, 22 nt, Human
uggucaagggacagagcugaac

SEQ ID NO: 797738 - RNA, 21 nt, Human
agaaaaguauuugaaucaaga

SEQ ID NO: 797739 - RNA, 22 nt, Human
cacaguaacuggcguguaguaa

SEQ ID NO: 797740 - RNA, 22 nt, Human
gcacugggagucuguggggguu

SEQ ID NO: 797741 - RNA, 20 nt, Human
uaggaaauauguuuuuaccc

SEQ ID NO: 797742 - RNA, 22 nt, Human
gcccuggagcuagacuaggaca

SEQ ID NO: 797743 - RNA, 22 nt, Human
cuucuugcaauuuucaucuuau

SEQ ID NO: 797744 - RNA, 22 nt, Human
aaagcacauuacaagcucaguc

SEQ ID NO: 797745 - RNA, 22 nt, Human
ggcccagcacagugcuuggggg

SEQ ID NO: 797746 - RNA, 22 nt, Human
acaggcuucucacagaaaaggg

SEQ ID NO: 797747 - RNA, 22 nt, Human
caggccuggcugcagcucgccu

SEQ ID NO: 797748 - RNA, 22 nt, Human
aaaggcaagcauuuauauagga

SEQ ID NO: 797749 - RNA, 20 nt, Human
aaagugcacagauacagcuc

SEQ ID NO: 797750 - RNA, 22 nt, Human
gauuaauaguacagguucuuag

SEQ ID NO: 797751 - RNA, 22 nt, Human
uugauuuuaaaauagugacacu

SEQ ID NO: 797752 - RNA, 22 nt, Human
auguauuuuaagauuugccuca

SEQ ID NO: 797753 - RNA, 21 nt, Human
auggcugguggcucagccucc

SEQ ID NO: 797754 - RNA, 22 nt, Human
gagaguggauggagcugcgaag

SEQ ID NO: 797755 - RNA, 19 nt, Human
gagcaggccacacaugugu

SEQ ID NO: 797756 - RNA, 22 nt, Human
cagagcagggguuucccagguu

SEQ ID NO: 797757 - RNA, 22 nt, Human
ccauuguaguaucuguuuuagu

SEQ ID NO: 797758 - RNA, 22 nt, Human
ucacaggccuggggcagagggc

SEQ ID NO: 797759 - RNA, 22 nt, Human
acagauaaggcaguuaagaguu

SEQ ID NO: 797760 - RNA, 22 nt, Human
uguccagggauggggucaggga

SEQ ID NO: 797761 - RNA, 22 nt, Human
cucuggagggaggcugagcugg

SEQ ID NO: 797762 - RNA, 22 nt, Human
ccccagaaagccuggcacuagg

SEQ ID NO: 797763 - RNA, 22 nt, Human
gauucacagaacuuagucaagc

SEQ ID NO: 797764 - RNA, 22 nt, Human
aaggcacagaggcagggcacuu

SEQ ID NO: 797765 - RNA, 22 nt, Human
uuuuacaagcugagucguuaaa

SEQ ID NO: 797766 - RNA, 22 nt, Human
agaaguuuccagucuaguaagg

SEQ ID NO: 797767 - RNA, 17 nt, Human
aggaaacauuuucuuuc

SEQ ID NO: 797768 - RNA, 22 nt, Human
agcuccugcgcacggugcacac

SEQ ID NO: 797769 - RNA, 22 nt, Human
aagggggcacagucacuguaau

SEQ ID NO: 797770 - RNA, 22 nt, Human
aaaccacuuauaucgugauuug

SEQ ID NO: 797771 - RNA, 22 nt, Human
uccagccaggauggcccaggga

SEQ ID NO: 797772 - RNA, 22 nt, Human
aauuucuucagcucuaaaaugg

SEQ ID NO: 797773 - RNA, 22 nt, Human
cugagaaaagacauuucuagau

SEQ ID NO: 797774 - RNA, 22 nt, Human
ugcuuucaaugaauuguauacu

SEQ ID NO: 797775 - RNA, 21 nt, Human
ugauugauauuugcaaacaga

SEQ ID NO: 797776 - RNA, 22 nt, Human
ugcuauuaccugcuggacaguc

SEQ ID NO: 797777 - RNA, 22 nt, Human
uucucuuuauguauuuaguggg

SEQ ID NO: 797778 - RNA, 22 nt, Human
auuuguaucaaucucaauauau

SEQ ID NO: 797779 - RNA, 22 nt, Human
cgcccagcugaaaucuccaggc

SEQ ID NO: 797780 - RNA, 22 nt, Human
agucugaagauauucuugcagg

SEQ ID NO: 797781 - RNA, 22 nt, Human
ucagcuuauauuuuuaguguaa

SEQ ID NO: 797782 - RNA, 22 nt, Human
caggcccagcccuuagccaggu

SEQ ID NO: 797783 - RNA, 20 nt, Human
aggaugcagggagucugcag

SEQ ID NO: 797784 - RNA, 20 nt, Human
aaaaagacaaaacgaguugg

SEQ ID NO: 797785 - RNA, 22 nt, Human
gaaaaaugagcugaugucaggg

SEQ ID NO: 797786 - RNA, 22 nt, Human
ucauaaaguuacccaaauuuua

SEQ ID NO: 797787 - RNA, 22 nt, Human
ugucugaagcagccagugcugu

SEQ ID NO: 797788 - RNA, 22 nt, Human
uaucaggaagaacacgugaaau

SEQ ID NO: 797789 - RNA, 22 nt, Human
gcagauguaauggcuggagguc

SEQ ID NO: 797790 - RNA, 22 nt, Human
ugggaugaguuguuaggacuga

SEQ ID NO: 797791 - RNA, 22 nt, Human
ugcuuccuucccguucuucucc

SEQ ID NO: 797792 - RNA, 22 nt, Human
ggacacuaaauggaagugucug

SEQ ID NO: 797793 - RNA, 22 nt, Human
ccucucuccaauuuucaccuca

SEQ ID NO: 797794 - RNA, 22 nt, Human
gucaguguuuaacaaccagcuc

SEQ ID NO: 797795 - RNA, 22 nt, Human
gcuggccauggggagugaggag

SEQ ID NO: 797796 - RNA, 22 nt, Human
aaugauacauauguaucguuag

SEQ ID NO: 797797 - RNA, 22 nt, Human
uuagauuuacaagcacuguuua

SEQ ID NO: 797798 - RNA, 22 nt, Human
guucacauuaacucaccggugc

SEQ ID NO: 797799 - RNA, 22 nt, Human
auuuggcuauugaauuauuccu

SEQ ID NO: 797800 - RNA, 22 nt, Human
cccaggagcuucucucugccuc

SEQ ID NO: 797801 - RNA, 22 nt, Human
uccagccuaggggaacagcugc

SEQ ID NO: 797802 - RNA, 22 nt, Human
augcuccucgagugucucacag

SEQ ID NO: 797803 - RNA, 22 nt, Human
gcagggcaaauguggaaaggag

SEQ ID NO: 797804 - RNA, 22 nt, Human
agagcugcgucuauucacaauc

SEQ ID NO: 797805 - RNA, 22 nt, Human
gacagacaugggacuucauacu

SEQ ID NO: 797806 - RNA, 22 nt, Human
uccagccaacugccuagggagc

SEQ ID NO: 797807 - RNA, 22 nt, Human
uaggaaauuaagucucuuuugu

SEQ ID NO: 797808 - RNA, 22 nt, Human
cucacaggguucuaucgaagag

SEQ ID NO: 797809 - RNA, 22 nt, Human
aucuguaaagauaaucauaugu

SEQ ID NO: 797810 - RNA, 21 nt, Human
aggagaaacacaggucagccc

SEQ ID NO: 797811 - RNA, 22 nt, Human
gcuuccagcaccagcagagggg

SEQ ID NO: 797812 - RNA, 22 nt, Human
aggagguggcugaacuugaggg

SEQ ID NO: 797813 - RNA, 22 nt, Human
gcaggacaggcguugguccagu

SEQ ID NO: 797814 - RNA, 22 nt, Human
uggcuggagcauuccuugucuu

SEQ ID NO: 797815 - RNA, 22 nt, Human
uaccaaaagcuuguuucauaca

SEQ ID NO: 797816 - RNA, 22 nt, Human
agugacaacaaguugacuagaa

SEQ ID NO: 797817 - RNA, 22 nt, Human
cuacugccauugucucugccau

SEQ ID NO: 797818 - RNA, 22 nt, Human
uucauagacccaugugaggaag

SEQ ID NO: 797819 - RNA, 20 nt, Human
ccacaggaguccagucgacc

SEQ ID NO: 797820 - RNA, 22 nt, Human
agaggccagaaaguaugccacc

SEQ ID NO: 797821 - RNA, 23 nt, Human
ugcaacaaugaggaaagcuacug

SEQ ID NO: 797822 - RNA, 22 nt, Human
aagucagaaaacagagcaauua

SEQ ID NO: 797823 - RNA, 22 nt, Human
auaaugucugcagagccacaca

SEQ ID NO: 797824 - RNA, 22 nt, Human
cugagccaugagccugcgccca

SEQ ID NO: 797825 - RNA, 22 nt, Human
aagacaaugcauuacuaagaag

SEQ ID NO: 797826 - RNA, 22 nt, Human
ugaaauguugccaugaggucuc

SEQ ID NO: 797827 - RNA, 22 nt, Human
uagcaggguccaaugugaggca

SEQ ID NO: 797828 - RNA, 22 nt, Human
acccaggcuagagugcaguggu

SEQ ID NO: 797829 - RNA, 22 nt, Human
gauucuuaagacauuauguauu

SEQ ID NO: 797830 - RNA, 22 nt, Human
aauuaaauugguuuagagagga

SEQ ID NO: 797831 - RNA, 22 nt, Human
gauuuuauauggcauacugugg

SEQ ID NO: 797832 - RNA, 22 nt, Human
cuuuugcacccagaguuauuug

SEQ ID NO: 797833 - RNA, 22 nt, Human
ugggagcagccaacauggccuu

SEQ ID NO: 797834 - RNA, 22 nt, Human
cagucuuagccuucccucaccc

SEQ ID NO: 797835 - RNA, 20 nt, Human
caucaggacccucaguuuuu

SEQ ID NO: 797836 - RNA, 22 nt, Human
uuagaacauagcaacagaauua

SEQ ID NO: 797837 - RNA, 22 nt, Human
agcacagugccugacauauaug

SEQ ID NO: 797838 - RNA, 19 nt, Human
ugcaaaugcuguugagaau

SEQ ID NO: 797839 - RNA, 22 nt, Human
uuuauugacccaaagcgagagu

SEQ ID NO: 797840 - RNA, 22 nt, Human
augcagcugacauuuucauguu

SEQ ID NO: 797841 - RNA, 22 nt, Human
ccugggcaucaacaagcagaga

SEQ ID NO: 797842 - RNA, 22 nt, Human
cugucuuuuacuaucauuuacu

SEQ ID NO: 797843 - RNA, 22 nt, Human
caggcugggcugguguuagagu

SEQ ID NO: 797844 - RNA, 22 nt, Human
caggcucccgaaaucacccaug

SEQ ID NO: 797845 - RNA, 22 nt, Human
cuuguuuuggcuaguaugaugu

SEQ ID NO: 797846 - RNA, 22 nt, Human
acuguguauuccuauauaguaa

SEQ ID NO: 797847 - RNA, 22 nt, Human
auauuucacguagguuguuuuc

SEQ ID NO: 797848 - RNA, 22 nt, Human
auuuuccaaaauaauuguuacu

SEQ ID NO: 797849 - RNA, 22 nt, Human
uggcccugucugcacacaggau

SEQ ID NO: 797850 - RNA, 22 nt, Human
acggugccgguggugaugagcc

SEQ ID NO: 797851 - RNA, 22 nt, Human
ggcaguguucugguugucagga

SEQ ID NO: 797852 - RNA, 22 nt, Human
acauucuuugaguuuuguuaaa

SEQ ID NO: 797853 - RNA, 18 nt, Human
ggguccugugggagacag

SEQ ID NO: 797854 - RNA, 22 nt, Human
ugggccuggacaaggccacuag

SEQ ID NO: 797855 - RNA, 22 nt, Human
auuguuuuguagaaugacccuu

SEQ ID NO: 797856 - RNA, 22 nt, Human
cucuauuuuucuuggcuagugu

SEQ ID NO: 797857 - RNA, 22 nt, Human
uugagcuguauaccuaugacug

SEQ ID NO: 797858 - RNA, 22 nt, Human
caagaugaucccugaaggcagc

SEQ ID NO: 797859 - RNA, 22 nt, Human
gcagcagggagcagggguguca

SEQ ID NO: 797860 - RNA, 22 nt, Human
gagcuaggcuagggggagucgc

SEQ ID NO: 797861 - RNA, 22 nt, Human
ucuggacuaacagcagccucag

SEQ ID NO: 797862 - RNA, 22 nt, Human
ccuggagauuauuugguccaau

SEQ ID NO: 797863 - RNA, 22 nt, Human
acuuggcugggagaguugaaga

SEQ ID NO: 797864 - RNA, 17 nt, Human
acaguaacuauguuaug

SEQ ID NO: 797865 - RNA, 22 nt, Human
cugggaugugaggagcgccucu

SEQ ID NO: 797866 - RNA, 22 nt, Human
agaacaauugccccaaagcuug

SEQ ID NO: 797867 - RNA, 22 nt, Human
gucggccacgcaggugcgguag

SEQ ID NO: 797868 - RNA, 22 nt, Human
ucuauuucgcauauaaguuuug

SEQ ID NO: 797869 - RNA, 20 nt, Human
auucuaaagcucugcucuuu

SEQ ID NO: 797870 - RNA, 22 nt, Human
agcagcagauuauggucuacau

SEQ ID NO: 797871 - RNA, 22 nt, Human
uucuucuuuccuauaauuaauu

SEQ ID NO: 797872 - RNA, 22 nt, Human
uacuugcuuggauuucaccaga

SEQ ID NO: 797873 - RNA, 22 nt, Human
gcaggcugaugacuggaguugg

SEQ ID NO: 797874 - RNA, 22 nt, Human
ggggccucugcagucacgcugg

SEQ ID NO: 797875 - RNA, 22 nt, Human
gaaacauugagcagaaggagaa

SEQ ID NO: 797876 - RNA, 22 nt, Human
agcaugaaagcauaggacaguc

SEQ ID NO: 797877 - RNA, 17 nt, Human
aucugcuucacccagca

SEQ ID NO: 797878 - RNA, 22 nt, Human
aggaaaggugagagcggccgcg

SEQ ID NO: 797879 - RNA, 20 nt, Human
aggaaguauugucaugaagg

SEQ ID NO: 797880 - RNA, 22 nt, Human
uaacacauaagcugagaccaug

SEQ ID NO: 797881 - RNA, 22 nt, Human
cgauuuccgcuugaucugaucu

SEQ ID NO: 797882 - RNA, 22 nt, Human
aaagccagaguguguuagagac

SEQ ID NO: 797883 - RNA, 22 nt, Human
cagucccagcugcucagaaggc

SEQ ID NO: 797884 - RNA, 22 nt, Human
auuguuuuguuucccagugacu

SEQ ID NO: 797885 - RNA, 22 nt, Human
gccaaagcagucuugccucugc

SEQ ID NO: 797886 - RNA, 22 nt, Human
uacauauacugagugauuugcu

SEQ ID NO: 797887 - RNA, 22 nt, Human
aaaugucuuugaguauuucugc

SEQ ID NO: 797888 - RNA, 18 nt, Human
gcuggcuugcuggguuug

SEQ ID NO: 797889 - RNA, 22 nt, Human
cuacagcagagaccagccacau

SEQ ID NO: 797890 - RNA, 22 nt, Human
auuuaucucuggaaacuaagca

SEQ ID NO: 797891 - RNA, 19 nt, Human
cagcccucuuaccacugug

SEQ ID NO: 797892 - RNA, 22 nt, Human
gcagggcagcuuagucccuguc

SEQ ID NO: 797893 - RNA, 22 nt, Human
aagcaggcuugguguggccgcu

SEQ ID NO: 797894 - RNA, 22 nt, Human
ggugggagccaacacccuucug

SEQ ID NO: 797895 - RNA, 22 nt, Human
cacccuggcuggaggugcagug

SEQ ID NO: 797896 - RNA, 22 nt, Human
gccaguaaaacaaaggccaugu

SEQ ID NO: 797897 - RNA, 22 nt, Human
uaugagaagguauggugacuug

SEQ ID NO: 797898 - RNA, 22 nt, Human
uaguuuuagcagcaaugggaug

SEQ ID NO: 797899 - RNA, 22 nt, Human
ucagccagaggcuucuugguuu

SEQ ID NO: 797900 - RNA, 22 nt, Human
uauucagaggugaaguagggag

SEQ ID NO: 797901 - RNA, 22 nt, Human
uugcuuccuggaugugacuuug

SEQ ID NO: 797902 - RNA, 22 nt, Human
auguaaauuguacugacacacg

SEQ ID NO: 797903 - RNA, 22 nt, Human
uucucugggacaggaacaguuu

SEQ ID NO: 797904 - RNA, 22 nt, Human
auucuuaauugccaugcuguau

SEQ ID NO: 797905 - RNA, 22 nt, Human
uuagugucuggcuauauuuaaa

SEQ ID NO: 797906 - RNA, 22 nt, Human
cugugagggucacagccaugcc

SEQ ID NO: 797907 - RNA, 22 nt, Human
gauaacaauaugaaguagauau

SEQ ID NO: 797908 - RNA, 19 nt, Human
ucagcaucaauuugguccu

SEQ ID NO: 797909 - RNA, 22 nt, Human
gucaaauaauuuucucaauagu

SEQ ID NO: 797910 - RNA, 22 nt, Human
ucccaggacaggccacauggaa

SEQ ID NO: 797911 - RNA, 22 nt, Human
agacaggaugcauacucuuggu

SEQ ID NO: 797912 - RNA, 22 nt, Human
auggcagggaccaagcugucau

SEQ ID NO: 797913 - RNA, 22 nt, Human
gggauggaucuuggcugaggcu

SEQ ID NO: 797914 - RNA, 18 nt, Human
aaugaaauguacaccuuu

SEQ ID NO: 797915 - RNA, 22 nt, Human
agggauggagugcggcccggac

SEQ ID NO: 797916 - RNA, 22 nt, Human
acuuauuuauucauucagcuca

SEQ ID NO: 797917 - RNA, 22 nt, Human
cacaggcuugucagcaugaggc

SEQ ID NO: 797918 - RNA, 23 nt, Human
uccucaguauauaaaggcagaug

SEQ ID NO: 797919 - RNA, 22 nt, Human
uucauucaucucuaaaaugccu

SEQ ID NO: 797920 - RNA, 22 nt, Human
acuuggcucagauaccaugccc

SEQ ID NO: 797921 - RNA, 22 nt, Human
gggagcuguaagggacagguag

SEQ ID NO: 797922 - RNA, 22 nt, Human
uagagggaaggaagaauggauu

SEQ ID NO: 797923 - RNA, 22 nt, Human
uggggagguucgggaaucuugu

SEQ ID NO: 797924 - RNA, 22 nt, Human
aaaggcuucuuugcuccauguc

SEQ ID NO: 797925 - RNA, 22 nt, Human
aggcccugcaggaagcaggaug

SEQ ID NO: 797926 - RNA, 22 nt, Human
ugauuuuuggaucugagcugca

SEQ ID NO: 797927 - RNA, 22 nt, Human
cagcauggggcuuggagucagc

SEQ ID NO: 797928 - RNA, 22 nt, Human
agcacuuuccuggcaaaugugg

SEQ ID NO: 797929 - RNA, 22 nt, Human
aaguuacuaugacucuucuuuu

SEQ ID NO: 797930 - RNA, 22 nt, Human
uggcccagcaguucugccccag

SEQ ID NO: 797931 - RNA, 22 nt, Human
acccuccacuuuaucugucuuu

SEQ ID NO: 797932 - RNA, 22 nt, Human
cucccacuccuggcucaccaca

SEQ ID NO: 797933 - RNA, 22 nt, Human
ggcagugucaaaauaggcagaa

SEQ ID NO: 797934 - RNA, 22 nt, Human
ccuggaagagcugaaucaggca

SEQ ID NO: 797935 - RNA, 22 nt, Human
caggcugccaaggcuggggagg

SEQ ID NO: 797936 - RNA, 22 nt, Human
uguuuauagggucugucacuug

SEQ ID NO: 797937 - RNA, 22 nt, Human
agcuguaauauaagcaaugaaa

SEQ ID NO: 797938 - RNA, 20 nt, Human
ucugccacugcacucugccc

SEQ ID NO: 797939 - RNA, 22 nt, Human
ucuaaagcuccuuccacuaaaa

SEQ ID NO: 797940 - RNA, 22 nt, Human
uccugccucacaguugaaguuu

SEQ ID NO: 797941 - RNA, 22 nt, Human
uucuuugcccauguuuccuaag

SEQ ID NO: 797942 - RNA, 22 nt, Human
ugucaugggcauuuauugaggg

SEQ ID NO: 797943 - RNA, 23 nt, Human
cuccuugguaugccaugcccagc

SEQ ID NO: 797944 - RNA, 22 nt, Human
uaauguuuccagucuaugaugg

SEQ ID NO: 797945 - RNA, 22 nt, Human
ucuucccacugcccaugggcag

SEQ ID NO: 797946 - RNA, 22 nt, Human
agcccagcggagcgggcccggg

SEQ ID NO: 797947 - RNA, 20 nt, Human
uggggaguugagcacgagca

SEQ ID NO: 797948 - RNA, 22 nt, Human
gcagggaccugccacugcuguc

SEQ ID NO: 797949 - RNA, 22 nt, Human
auacuucuuuaagaguaagucu

SEQ ID NO: 797950 - RNA, 21 nt, Human
ugcaggcuacuucugacucua

SEQ ID NO: 797951 - RNA, 22 nt, Human
caagaaacuuuauucugccaua

SEQ ID NO: 797952 - RNA, 22 nt, Human
auacaaagacaaaucucaaucu

SEQ ID NO: 797953 - RNA, 22 nt, Human
uuggagggacugagcuucaguc

SEQ ID NO: 797954 - RNA, 22 nt, Human
ccuccugggacaggcuggcaca

SEQ ID NO: 797955 - RNA, 22 nt, Human
guuucuuauuucaacuggaaca

SEQ ID NO: 797956 - RNA, 22 nt, Human
cugcugugcuuguggccacccg

SEQ ID NO: 797957 - RNA, 22 nt, Human
gcugggcucagaccuagugaac

SEQ ID NO: 797958 - RNA, 22 nt, Human
uuugcaaaccggagcucugcaa

SEQ ID NO: 797959 - RNA, 22 nt, Human
uuucacauuuuauacuuaagcc

SEQ ID NO: 797960 - RNA, 22 nt, Human
uauauuaucauaaaaccauuca

SEQ ID NO: 797961 - RNA, 18 nt, Human
gccucccuggcuacacuu

SEQ ID NO: 797962 - RNA, 22 nt, Human
agugcagagaccuggucaggca

SEQ ID NO: 797963 - RNA, 22 nt, Human
caaguucauuguagcauuauug

SEQ ID NO: 797964 - RNA, 21 nt, Human
aaaaguuugacaggaaaggga

SEQ ID NO: 797965 - RNA, 22 nt, Human
uucaaagaauuuugagaccuga

SEQ ID NO: 797966 - RNA, 22 nt, Human
uuauuuaggaggaaacugaggu

SEQ ID NO: 797967 - RNA, 22 nt, Human
gggagccacaguagcagcuacu

SEQ ID NO: 797968 - RNA, 22 nt, Human
uucaaacucuugcucugcuagu

SEQ ID NO: 797969 - RNA, 22 nt, Human
caggaaccaggagagucccuga

SEQ ID NO: 797970 - RNA, 21 nt, Human
cuuggccucuagcuagagcug

SEQ ID NO: 797971 - RNA, 22 nt, Human
aaacugcacaugaggcuggugc

SEQ ID NO: 797972 - RNA, 18 nt, Human
acagcagguuucauucuu

SEQ ID NO: 797973 - RNA, 22 nt, Human
gauauaaauuaaucaagugcaa

SEQ ID NO: 797974 - RNA, 22 nt, Human
augcuaaauguuaauguuaccu

SEQ ID NO: 797975 - RNA, 22 nt, Human
agggcagcuggaagguggcuuc

SEQ ID NO: 797976 - RNA, 22 nt, Human
ugcagcuugcuguaggcuaagu

SEQ ID NO: 797977 - RNA, 22 nt, Human
caggcaaggagcuggcucaagu

SEQ ID NO: 797978 - RNA, 22 nt, Human
agccaggcgggucuuugcuccu

SEQ ID NO: 797979 - RNA, 22 nt, Human
caggaagcucuuagcagucacc

SEQ ID NO: 797980 - RNA, 22 nt, Human
auggcucucuugaccuaggcac

SEQ ID NO: 797981 - RNA, 22 nt, Human
auguuuccaucaaauuugauga

SEQ ID NO: 797982 - RNA, 17 nt, Human
aagacaagacaaaugca

SEQ ID NO: 797983 - RNA, 22 nt, Human
aauacaaucaaauucacuagca

SEQ ID NO: 797984 - RNA, 22 nt, Human
acuguggauaagucagagaugu

SEQ ID NO: 797985 - RNA, 21 nt, Human
agaauucuuaaguauucuaau

SEQ ID NO: 797986 - RNA, 22 nt, Human
aacccuggagaaggcuuuggau

SEQ ID NO: 797987 - RNA, 22 nt, Human
augcuccaccuuuugcaggaac

SEQ ID NO: 797988 - RNA, 22 nt, Human
ugggguaggagucagcgagaga

SEQ ID NO: 797989 - RNA, 22 nt, Human
aggaaaguggugggaaaucagg

SEQ ID NO: 797990 - RNA, 22 nt, Human
ucugcaggcucuagaugagguu

SEQ ID NO: 797991 - RNA, 22 nt, Human
uagaaacaaagaccugggugcu

SEQ ID NO: 797992 - RNA, 22 nt, Human
ucauaaauugauuaugugcuuu

SEQ ID NO: 797993 - RNA, 22 nt, Human
ugaaagaugcucaaugaauggu

SEQ ID NO: 797994 - RNA, 22 nt, Human
gcaggcugugaggcucagaugg

SEQ ID NO: 797995 - RNA, 22 nt, Human
ugcuggaggaguuuacuguggc

SEQ ID NO: 797996 - RNA, 22 nt, Human
uugcaaauaauagccugaaacu

SEQ ID NO: 797997 - RNA, 22 nt, Human
gaaggaaaucugugauuuaugc

SEQ ID NO: 797998 - RNA, 22 nt, Human
uccucagaaaccccugugaggu

SEQ ID NO: 797999 - RNA, 22 nt, Human
uucauucugggcucuaaggaac

SEQ ID NO: 798000 - RNA, 22 nt, Human
ggagaggguguggaaaguuauc

SEQ ID NO: 798001 - RNA, 22 nt, Human
guuucuaauuggaacuuugagg

SEQ ID NO: 798002 - RNA, 22 nt, Human
agauggaaaauauagacagaga

SEQ ID NO: 798003 - RNA, 22 nt, Human
uuuacaaguuuacagaaugaug

SEQ ID NO: 798004 - RNA, 22 nt, Human
aacucagauaugauagcaggag

SEQ ID NO: 798005 - RNA, 22 nt, Human
aaaaguauuggccaccauuucu

SEQ ID NO: 798006 - RNA, 22 nt, Human
ggcaggguuuacaauagcaaua

SEQ ID NO: 798007 - RNA, 22 nt, Human
uaaaauugcggugaauauuucc

SEQ ID NO: 798008 - RNA, 22 nt, Human
ugccacaggguccucaggccag

SEQ ID NO: 798009 - RNA, 22 nt, Human
uguucccugguaaacugacucc

SEQ ID NO: 798010 - RNA, 22 nt, Human
ucuucaaauacagucauauuga

SEQ ID NO: 798011 - RNA, 22 nt, Human
aagcacagaugcaagggggacc

SEQ ID NO: 798012 - RNA, 22 nt, Human
cggcuuccaacaagcuuugcug

SEQ ID NO: 798013 - RNA, 22 nt, Human
agaagcugugguaugaaaugug

SEQ ID NO: 798014 - RNA, 22 nt, Human
gcaggguucucagcagugaugg

SEQ ID NO: 798015 - RNA, 17 nt, Human
gagacagcaggagcccc

SEQ ID NO: 798016 - RNA, 20 nt, Human
acaguguaauauucacauuc

SEQ ID NO: 798017 - RNA, 22 nt, Human
cauuuacaauguacagguugug

SEQ ID NO: 798018 - RNA, 22 nt, Human
ccaggccuuccaguacgcagaa

SEQ ID NO: 798019 - RNA, 22 nt, Human
uucugaaauuucaacuuuacua

SEQ ID NO: 798020 - RNA, 17 nt, Human
gcucugccaggaaagag

SEQ ID NO: 798021 - RNA, 22 nt, Human
ugcuggagagcuaguucugcag

SEQ ID NO: 798022 - RNA, 22 nt, Human
aaacaguuuauaacaugauacu

SEQ ID NO: 798023 - RNA, 20 nt, Human
ucagagaaggagcuuuccug

SEQ ID NO: 798024 - RNA, 22 nt, Human
uuacauucaauuucuagaggua

SEQ ID NO: 798025 - RNA, 22 nt, Human
cagaagcagaacacuagauuua

SEQ ID NO: 798026 - RNA, 19 nt, Human
aggagccuugagcagugag

SEQ ID NO: 798027 - RNA, 22 nt, Human
ggguggaggagaacaggcccca

SEQ ID NO: 798028 - RNA, 22 nt, Human
ggcacagggagccgcaguugca

SEQ ID NO: 798029 - RNA, 22 nt, Human
auauaacauacauacagaaaag

SEQ ID NO: 798030 - RNA, 22 nt, Human
agcugacaggauggcauuauua

SEQ ID NO: 798031 - RNA, 22 nt, Human
guuauauauaguauuucucuga

SEQ ID NO: 798032 - RNA, 22 nt, Human
ugcauaaagugccauaguauua

SEQ ID NO: 798033 - RNA, 22 nt, Human
uacccagagggagagcaacuau

SEQ ID NO: 798034 - RNA, 22 nt, Human
aggcucuguuauucuagagggc

SEQ ID NO: 798035 - RNA, 22 nt, Human
aagaagcauggcuguagauucc

SEQ ID NO: 798036 - RNA, 23 nt, Human
acucguggaauucucugcgaucg

SEQ ID NO: 798037 - RNA, 22 nt, Human
ggcagccaugucccagggcuuc

SEQ ID NO: 798038 - RNA, 22 nt, Human
uuacaagugucagguacuggca

SEQ ID NO: 798039 - RNA, 22 nt, Human
gcucccacgcaauucuuuucag

SEQ ID NO: 798040 - RNA, 22 nt, Human
cagucccaccaggaucgcucuu

SEQ ID NO: 798041 - RNA, 22 nt, Human
uucugagccucauucaugaggc

SEQ ID NO: 798042 - RNA, 22 nt, Human
gccugagcaggcguggaccaug

SEQ ID NO: 798043 - RNA, 22 nt, Human
ucagcagggcauacugagccua

SEQ ID NO: 798044 - RNA, 22 nt, Human
agcuggagaucaugcugauacu

SEQ ID NO: 798045 - RNA, 22 nt, Human
cugggagucaccaggagcaagg

SEQ ID NO: 798046 - RNA, 22 nt, Human
ccaggcuuuuagcugcauggca

SEQ ID NO: 798047 - RNA, 22 nt, Human
uuccagccagauuugcuggguu

SEQ ID NO: 798048 - RNA, 22 nt, Human
gcuuccaaugcuucuaucacau

SEQ ID NO: 798049 - RNA, 22 nt, Human
ugaacauugucacauuccuagc

SEQ ID NO: 798050 - RNA, 23 nt, Human
uaaagcaaagucaagugcacucc

SEQ ID NO: 798051 - RNA, 21 nt, Human
aggcagaaagagcccaggcug

SEQ ID NO: 798052 - RNA, 22 nt, Human
ggcaggcuggcuuuguuccagg

SEQ ID NO: 798053 - RNA, 22 nt, Human
uuuuccuucaccucuugagccu

SEQ ID NO: 798054 - RNA, 22 nt, Human
cuuggcugucuauaggaaagag

SEQ ID NO: 798055 - RNA, 20 nt, Human
ggccggggagcucuccaggg

SEQ ID NO: 798056 - RNA, 22 nt, Human
cugcuggagguuggagcaugca

SEQ ID NO: 798057 - RNA, 22 nt, Human
ccuggcuccgugucacgugccc

SEQ ID NO: 798058 - RNA, 22 nt, Human
ucaggaaauacaagugacauca

SEQ ID NO: 798059 - RNA, 19 nt, Human
cuggaaggagggacuguuc

SEQ ID NO: 798060 - RNA, 22 nt, Human
uaacagaauccuguuauugcca

SEQ ID NO: 798061 - RNA, 22 nt, Human
aaguacauguuguucaaaagcc

SEQ ID NO: 798062 - RNA, 22 nt, Human
gagugccaagagaagaggcugg

SEQ ID NO: 798063 - RNA, 22 nt, Human
cugcacagcuggccagggagag

SEQ ID NO: 798064 - RNA, 22 nt, Human
ucaggcagaauuaucaaaagau

SEQ ID NO: 798065 - RNA, 22 nt, Human
ucacaggagcccaggggagcug

SEQ ID NO: 798066 - RNA, 22 nt, Human
gccagcugagaaaucauugaua

SEQ ID NO: 798067 - RNA, 22 nt, Human
uucauagaagcagaaaguaaac

SEQ ID NO: 798068 - RNA, 22 nt, Human
caggcagauauguucgcuuuaa

SEQ ID NO: 798069 - RNA, 18 nt, Human
gcaggccuagaacuuggu

SEQ ID NO: 798070 - RNA, 22 nt, Human
gcugagaggcagccagacccuc

SEQ ID NO: 798071 - RNA, 22 nt, Human
aagccagugggcauagcaguug

SEQ ID NO: 798072 - RNA, 22 nt, Human
ggcaggcacauuugggggccgu

SEQ ID NO: 798073 - RNA, 22 nt, Human
gccuaggaguacagaaugguuu

SEQ ID NO: 798074 - RNA, 22 nt, Human
auauacuuuucacuaauggcua

SEQ ID NO: 798075 - RNA, 22 nt, Human
aguuuucuuucgcaaagguaca

SEQ ID NO: 798076 - RNA, 22 nt, Human
ugaaacauugcacuguaugaau

SEQ ID NO: 798077 - RNA, 22 nt, Human
cucugcccacgucuugcccaga

SEQ ID NO: 798078 - RNA, 22 nt, Human
cuggcagauuggggucagcagu

SEQ ID NO: 798079 - RNA, 16 nt, Human
gugcagcugccuggua

SEQ ID NO: 798080 - RNA, 22 nt, Human
ggcagauguuauaugaucugag

SEQ ID NO: 798081 - RNA, 19 nt, Human
uccuuaaaaaagcaguucu

SEQ ID NO: 798082 - RNA, 22 nt, Human
uucaacuuuaggcaaagaaaac

SEQ ID NO: 798083 - RNA, 22 nt, Human
ucagaggacgcacuaggguugu

SEQ ID NO: 798084 - RNA, 22 nt, Human
auauauaucgaguucaugucuc

SEQ ID NO: 798085 - RNA, 22 nt, Human
gcaggcagccacgauucccuug

SEQ ID NO: 798086 - RNA, 22 nt, Human
uaucauuuuacugugacauuuu

SEQ ID NO: 798087 - RNA, 22 nt, Human
ccuggccagcagccccuuccuc

SEQ ID NO: 798088 - RNA, 22 nt, Human
guuggagugcagcuugugcgau

SEQ ID NO: 798089 - RNA, 22 nt, Human
agccucucuuaucccuucaaag

SEQ ID NO: 798090 - RNA, 22 nt, Human
augcagcugcucuuccucuauu

SEQ ID NO: 798091 - RNA, 18 nt, Human
ugagccgguagauggggu

SEQ ID NO: 798092 - RNA, 22 nt, Human
ccugcagcuccggauuucuggg

SEQ ID NO: 798093 - RNA, 22 nt, Human
aggaauuugggguuacaugaug

SEQ ID NO: 798094 - RNA, 22 nt, Human
auauuauucuaguaacagugau

SEQ ID NO: 798095 - RNA, 21 nt, Human
ccuucuccacagggucuccgg

SEQ ID NO: 798096 - RNA, 22 nt, Human
ucuucaguauuuggauaacauu

SEQ ID NO: 798097 - RNA, 22 nt, Human
uccuggcacuuugggggcucgc

SEQ ID NO: 798098 - RNA, 22 nt, Human
gcuuuaaugaagucacgcaaag

SEQ ID NO: 798099 - RNA, 22 nt, Human
guuacaaaggacugggggccac

SEQ ID NO: 798100 - RNA, 22 nt, Human
cuacauucaacagcagaguuuu

SEQ ID NO: 798101 - RNA, 22 nt, Human
auaacccucuggauaggacagg

SEQ ID NO: 798102 - RNA, 22 nt, Human
uuagauaaauuaagacuuuaca

SEQ ID NO: 798103 - RNA, 22 nt, Human
aguugcuaucgugaagcacgug

SEQ ID NO: 798104 - RNA, 22 nt, Human
ugcucaggugccuuggcugcug

SEQ ID NO: 798105 - RNA, 22 nt, Human
aaacacuucaaggacuucuguc

SEQ ID NO: 798106 - RNA, 22 nt, Human
augcacaugaggcaagcaaaau

SEQ ID NO: 798107 - RNA, 22 nt, Human
cugcagcuuauuugcuguguga

SEQ ID NO: 798108 - RNA, 22 nt, Human
ggagagccuccacggcuucugu

SEQ ID NO: 798109 - RNA, 22 nt, Human
cugggcugagccugggcugugu

SEQ ID NO: 798110 - RNA, 22 nt, Human
agccacaggaaacagagacagc

SEQ ID NO: 798111 - RNA, 22 nt, Human
ugugccucauguaucuggauga

SEQ ID NO: 798112 - RNA, 22 nt, Human
aguucaaacucuauaagaacuu

SEQ ID NO: 798113 - RNA, 22 nt, Human
uauuuucuggacagucuugcuu

SEQ ID NO: 798114 - RNA, 22 nt, Human
ucgcgcccccaagcgucauugg

SEQ ID NO: 798115 - RNA, 18 nt, Human
ucauggcuuuagucccuc

SEQ ID NO: 798116 - RNA, 22 nt, Human
ucuuuccccuacauuugguuaa

SEQ ID NO: 798117 - RNA, 23 nt, Human
cuggcccaggugagagguuggug

SEQ ID NO: 798118 - RNA, 22 nt, Human
gccccaccugcuaccuuccagc

SEQ ID NO: 798119 - RNA, 22 nt, Human
ccuggcuccagcugccuguccu

SEQ ID NO: 798120 - RNA, 20 nt, Human
uucauucauuccacaacuuc

SEQ ID NO: 798121 - RNA, 22 nt, Human
caucguauggccgaauguacau

SEQ ID NO: 798122 - RNA, 22 nt, Human
uguguaaauuuauuuacauaaa

SEQ ID NO: 798123 - RNA, 21 nt, Human
uuuguucaggcaaguuacagu

SEQ ID NO: 798124 - RNA, 22 nt, Human
acugggagucaugaggaaggag

SEQ ID NO: 798125 - RNA, 22 nt, Human
ccuggcaguucaucaaauggca

SEQ ID NO: 798126 - RNA, 22 nt, Human
caggucagaggcgcagccccca

SEQ ID NO: 798127 - RNA, 22 nt, Human
gcagccagguuugaggaccacu

SEQ ID NO: 798128 - RNA, 22 nt, Human
gcagaggacagggauuuagauu

SEQ ID NO: 798129 - RNA, 22 nt, Human
uacugaaacuuuucuucaacug

SEQ ID NO: 798130 - RNA, 22 nt, Human
cuguauauggcuuacuuuauau

SEQ ID NO: 798131 - RNA, 22 nt, Human
guguuaaugguagaaucugagu

SEQ ID NO: 798132 - RNA, 22 nt, Human
aaggccagauucucucuagggg

SEQ ID NO: 798133 - RNA, 22 nt, Human
ggcaggaacacagauggugccg

SEQ ID NO: 798134 - RNA, 22 nt, Human
guacuaaaaaaugaucaguuug

SEQ ID NO: 798135 - RNA, 22 nt, Human
gaucaggacauagcuauaggcu

SEQ ID NO: 798136 - RNA, 22 nt, Human
auguuuuaaauauguguguaaa

SEQ ID NO: 798137 - RNA, 22 nt, Human
ugccugggacuguacuaaauuu

SEQ ID NO: 798138 - RNA, 22 nt, Human
uaauauauuucugcuaagcuca

SEQ ID NO: 798139 - RNA, 22 nt, Human
aaauguuucuacuugugagcau

SEQ ID NO: 798140 - RNA, 22 nt, Human
ccuggagguggagguugcagug

SEQ ID NO: 798141 - RNA, 22 nt, Human
ucauuauuugcuuuaguuaugu

SEQ ID NO: 798142 - RNA, 22 nt, Human
ugcucugaaggggaagggaugg

SEQ ID NO: 798143 - RNA, 22 nt, Human
ugucauuuuagugcaucacuca

SEQ ID NO: 798144 - RNA, 19 nt, Human
cuuccccuguuaccucacu

SEQ ID NO: 798145 - RNA, 22 nt, Human
uagcuuuguuagaaugucuuca

SEQ ID NO: 798146 - RNA, 22 nt, Human
uuucauugucagagcuuugaau

SEQ ID NO: 798147 - RNA, 22 nt, Human
ugguggccuugauggcaucugc

SEQ ID NO: 798148 - RNA, 22 nt, Human
ccucagggaaugggaggcuggg

SEQ ID NO: 798149 - RNA, 22 nt, Human
aauauagauuuacucaagagaa

SEQ ID NO: 798150 - RNA, 22 nt, Human
ucaggcagguuggcugcagguc

SEQ ID NO: 798151 - RNA, 22 nt, Human
caggcucagcucuggccagugc

SEQ ID NO: 798152 - RNA, 22 nt, Human
cagcccaguaccaagcaguugg

SEQ ID NO: 798153 - RNA, 22 nt, Human
uccucuccauauuuucugauuu

SEQ ID NO: 798154 - RNA, 22 nt, Human
cacagugaagcaugcagacauc

SEQ ID NO: 798155 - RNA, 22 nt, Human
cccuuuaaggucugauuuucag

SEQ ID NO: 798156 - RNA, 22 nt, Human
acauucugucaacagugagcag

SEQ ID NO: 798157 - RNA, 22 nt, Human
uugguucagaugggaucugcga

SEQ ID NO: 798158 - RNA, 22 nt, Human
ucacaucauggagaauuauggg

SEQ ID NO: 798159 - RNA, 22 nt, Human
ucacauuuuguucaaggcuagu

SEQ ID NO: 798160 - RNA, 20 nt, Human
ucaugcaagauucauaaagg

SEQ ID NO: 798161 - RNA, 23 nt, Human
cauaugaauuuuagaggcaguuu

SEQ ID NO: 798162 - RNA, 22 nt, Human
augauguaaauagagccuaggu

SEQ ID NO: 798163 - RNA, 22 nt, Human
cacagggcuucucauggggugc

SEQ ID NO: 798164 - RNA, 22 nt, Human
ugcaauaaagugcuauaaaucc

SEQ ID NO: 798165 - RNA, 22 nt, Human
caggccaggguugagaagagaa

SEQ ID NO: 798166 - RNA, 22 nt, Human
caaauaguuuuucauguauuau

SEQ ID NO: 798167 - RNA, 22 nt, Human
agccaagaggagccuaaagcga

SEQ ID NO: 798168 - RNA, 23 nt, Human
uugggaaauaguuaagacaugag

SEQ ID NO: 798169 - RNA, 22 nt, Human
ugggggaguauagucuggccuc

SEQ ID NO: 798170 - RNA, 17 nt, Human
ugaaggaaggaugaugu

SEQ ID NO: 798171 - RNA, 22 nt, Human
ucccagccauuccuuuaggugu

SEQ ID NO: 798172 - RNA, 21 nt, Human
ucugucuuccucagccuaagg

SEQ ID NO: 798173 - RNA, 22 nt, Human
uacauucuauaucuguuacauc

SEQ ID NO: 798174 - RNA, 22 nt, Human
cucaagucagaaauaaaagcau

SEQ ID NO: 798175 - RNA, 22 nt, Human
ucugagcuucugccugcugcaa

SEQ ID NO: 798176 - RNA, 22 nt, Human
uuucugaaaugcuggcuuugga

SEQ ID NO: 798177 - RNA, 22 nt, Human
aggcuggcuggcaggggacaca

SEQ ID NO: 798178 - RNA, 23 nt, Human
ugcaaauaccaugcuguccuguc

SEQ ID NO: 798179 - RNA, 19 nt, Human
cagaugagaaaagugaggu

SEQ ID NO: 798180 - RNA, 22 nt, Human
gagaggcugacuggcuguccug

SEQ ID NO: 798181 - RNA, 22 nt, Human
ucaggagcugugaauacaaagg

SEQ ID NO: 798182 - RNA, 22 nt, Human
ggcuuaaaaggaaaaugagagu

SEQ ID NO: 798183 - RNA, 22 nt, Human
gcagagaaaguuuuguccucag

SEQ ID NO: 798184 - RNA, 22 nt, Human
ugaacuucagugcauaauuauc

SEQ ID NO: 798185 - RNA, 18 nt, Human
cugccugcucuccagcuu

SEQ ID NO: 798186 - RNA, 22 nt, Human
agauaacauuuauugaauguaa

SEQ ID NO: 798187 - RNA, 22 nt, Human
cagcuguguaaacacaugugua

SEQ ID NO: 798188 - RNA, 22 nt, Human
gcacacagagaggugguauguc

SEQ ID NO: 798189 - RNA, 22 nt, Human
aacaggaaugaggagaaaaggu

SEQ ID NO: 798190 - RNA, 22 nt, Human
ccaugcugacccugugcaggca

SEQ ID NO: 798191 - RNA, 22 nt, Human
uacaugcauguguguaaauaua

SEQ ID NO: 798192 - RNA, 22 nt, Human
aaaaugagacacaugugacucc

SEQ ID NO: 798193 - RNA, 22 nt, Human
ugcuauuuaacuuuuaugugua

SEQ ID NO: 798194 - RNA, 22 nt, Human
acugcagccuagggaccacagu

SEQ ID NO: 798195 - RNA, 22 nt, Human
ggucuggaauggaguaggggug

SEQ ID NO: 798196 - RNA, 22 nt, Human
ggcagcuuucaccugucuuccu

SEQ ID NO: 798197 - RNA, 22 nt, Human
ucaguguccggagccugagugc

SEQ ID NO: 798198 - RNA, 22 nt, Human
gacaggaaauauggggguuguu

SEQ ID NO: 798199 - RNA, 22 nt, Human
acggugaccaagcaucaccgag

SEQ ID NO: 798200 - RNA, 22 nt, Human
ugggugagggacaaaaguuucu

SEQ ID NO: 798201 - RNA, 22 nt, Human
cugugccagccugucccaggag

SEQ ID NO: 798202 - RNA, 22 nt, Human
cagccuuuauggaaaggccugg

SEQ ID NO: 798203 - RNA, 22 nt, Human
ugcagagauagaacuacuuucu

SEQ ID NO: 798204 - RNA, 22 nt, Human
aggaugaggcuggcaggucuug

SEQ ID NO: 798205 - RNA, 22 nt, Human
cuccuuaaguaugggcugugca

SEQ ID NO: 798206 - RNA, 21 nt, Human
uuucuggguggcugcauagug

SEQ ID NO: 798207 - RNA, 22 nt, Human
ucucuuuaaguauaaucuuaua

SEQ ID NO: 798208 - RNA, 22 nt, Human
gccaccagccccaugcgcugug

SEQ ID NO: 798209 - RNA, 22 nt, Human
cuccauggaaccggggcugcuu

SEQ ID NO: 798210 - RNA, 22 nt, Human
caauuuuuguacuuauaguacu

SEQ ID NO: 798211 - RNA, 22 nt, Human
uuuaaugaggucucucgcuggc

SEQ ID NO: 798212 - RNA, 22 nt, Human
acaugucuuuuaaagucuaaua

SEQ ID NO: 798213 - RNA, 22 nt, Human
ccuuaaaagaacuaucucuucu

SEQ ID NO: 798214 - RNA, 23 nt, Human
ggcugagaagucccaugauaggu

SEQ ID NO: 798215 - RNA, 22 nt, Human
ugggccaguuucucauugaaau

SEQ ID NO: 798216 - RNA, 22 nt, Human
agccugcuugagaguccuggcu

SEQ ID NO: 798217 - RNA, 22 nt, Human
gcuccuggugcuguagagauuu

SEQ ID NO: 798218 - RNA, 22 nt, Human
aaaauacacauacuaggggaaa

SEQ ID NO: 798219 - RNA, 22 nt, Human
uacaaagucccauugccaugga

SEQ ID NO: 798220 - RNA, 22 nt, Human
uccugccucuugccuucuucac

SEQ ID NO: 798221 - RNA, 18 nt, Human
uuacuguuaucaaaacag

SEQ ID NO: 798222 - RNA, 22 nt, Human
ggcucaggaugagccuucucau

SEQ ID NO: 798223 - RNA, 22 nt, Human
gccaggaggggagaguguguca

SEQ ID NO: 798224 - RNA, 22 nt, Human
cugcccugagucaugccagaug

SEQ ID NO: 798225 - RNA, 22 nt, Human
auguauaugaagcuaguauuuu

SEQ ID NO: 798226 - RNA, 22 nt, Human
aggagguguugauagaagguuu

SEQ ID NO: 798227 - RNA, 22 nt, Human
gaggccuggcugggaggaggug

SEQ ID NO: 798228 - RNA, 22 nt, Human
auaauacaugguuaaccucuuu

SEQ ID NO: 798229 - RNA, 22 nt, Human
uuuagacaggggcaaaauaagg

SEQ ID NO: 798230 - RNA, 22 nt, Human
auuguauuuguacaagacaugu

SEQ ID NO: 798231 - RNA, 22 nt, Human
guccagcccucugccuccaggu

SEQ ID NO: 798232 - RNA, 22 nt, Human
acaguaaacaaugcagcaaauu

SEQ ID NO: 798233 - RNA, 22 nt, Human
aggccugaaguguggagugggg

SEQ ID NO: 798234 - RNA, 19 nt, Human
aaauacagcagcuguuucc

SEQ ID NO: 798235 - RNA, 22 nt, Human
ugucuuuguguacaggaucgcc

SEQ ID NO: 798236 - RNA, 22 nt, Human
uugcugauuuguuucuauucca

SEQ ID NO: 798237 - RNA, 22 nt, Human
aagcccuuuucaagauacaaca

SEQ ID NO: 798238 - RNA, 22 nt, Human
uguuaggacuccccagaagcug

SEQ ID NO: 798239 - RNA, 20 nt, Human
uuucacaucugucccuuuaa

SEQ ID NO: 798240 - RNA, 22 nt, Human
aggcaggcugcuauggaguaga

SEQ ID NO: 798241 - RNA, 22 nt, Human
auguuuuauuaccaacuuguac

SEQ ID NO: 798242 - RNA, 22 nt, Human
aacagaggcucccugcacuugu

SEQ ID NO: 798243 - RNA, 22 nt, Human
auauuuuccgaacuugagguag

SEQ ID NO: 798244 - RNA, 22 nt, Human
gccucagagggcccuagggaca

SEQ ID NO: 798245 - RNA, 23 nt, Human
ugcagagggacugaagccagcuu

SEQ ID NO: 798246 - RNA, 22 nt, Human
ggcccaguguaccccaggcagu

SEQ ID NO: 798247 - RNA, 22 nt, Human
cuggaauguucuccagcauggc

SEQ ID NO: 798248 - RNA, 22 nt, Human
aaucaggaggaagccuugggca

SEQ ID NO: 798249 - RNA, 22 nt, Human
agagggcauaaaauagagcacg

SEQ ID NO: 798250 - RNA, 22 nt, Human
accugcaagcauuacacuucua

SEQ ID NO: 798251 - RNA, 22 nt, Human
agccaagagaugaggcugcagg

SEQ ID NO: 798252 - RNA, 22 nt, Human
uccugccucuccaugcuaacua

SEQ ID NO: 798253 - RNA, 22 nt, Human
cacagcagggaugaauggagug

SEQ ID NO: 798254 - RNA, 23 nt, Human
gcacugggcucucagcaaggugu

SEQ ID NO: 798255 - RNA, 22 nt, Human
aaagugcaguaacuugcccaag

SEQ ID NO: 798256 - RNA, 22 nt, Human
ucuaaacucucuuugaauuaug

SEQ ID NO: 798257 - RNA, 22 nt, Human
uagagagguuugaauuggcugc

SEQ ID NO: 798258 - RNA, 22 nt, Human
uggcaggguggcaacuuuuggu

SEQ ID NO: 798259 - RNA, 22 nt, Human
uggcucagaugcucuuccagug

SEQ ID NO: 798260 - RNA, 22 nt, Human
guaaaugugcuaaaaugugucg

SEQ ID NO: 798261 - RNA, 22 nt, Human
ucaggaagugcugaggcugcuu

SEQ ID NO: 798262 - RNA, 18 nt, Human
caagaaucucuaaagaag

SEQ ID NO: 798263 - RNA, 22 nt, Human
uuucugaagguuaaggaauuag

SEQ ID NO: 798264 - RNA, 22 nt, Human
aacaauaauugcgguucucuau

SEQ ID NO: 798265 - RNA, 22 nt, Human
ccugauggcugucugggccuga

SEQ ID NO: 798266 - RNA, 22 nt, Human
gggcccagcgugguuccaucug

SEQ ID NO: 798267 - RNA, 22 nt, Human
cagaaauauuuauugagugaca

SEQ ID NO: 798268 - RNA, 22 nt, Human
cuuguauagggaaagauaaauc

SEQ ID NO: 798269 - RNA, 22 nt, Human
uaaagcaaggaauagaguaguc

SEQ ID NO: 798270 - RNA, 22 nt, Human
uccucaggaucuaggagugcuu

SEQ ID NO: 798271 - RNA, 22 nt, Human
gccucaggccuauagcugcugu

SEQ ID NO: 798272 - RNA, 22 nt, Human
gccagagggauuccuggugugu

SEQ ID NO: 798273 - RNA, 22 nt, Human
cccuggacuguucagggccuga

SEQ ID NO: 798274 - RNA, 22 nt, Human
agcagcuuguuaaaaaguucca

SEQ ID NO: 798275 - RNA, 22 nt, Human
uccaggaguccuggguggcccc

SEQ ID NO: 798276 - RNA, 22 nt, Human
uagaauguggagguaacagacu

SEQ ID NO: 798277 - RNA, 22 nt, Human
uggacagggcagagaccgaguc

SEQ ID NO: 798278 - RNA, 22 nt, Human
uggcccaggcgaggugggcaga

SEQ ID NO: 798279 - RNA, 22 nt, Human
agggcagacuaggauggaagug

SEQ ID NO: 798280 - RNA, 22 nt, Human
uauugauaugcagaacugacuu

SEQ ID NO: 798281 - RNA, 22 nt, Human
gaggccagaguuccccgaguca

SEQ ID NO: 798282 - RNA, 22 nt, Human
aucacagugccuucguaaauuu

SEQ ID NO: 798283 - RNA, 22 nt, Human
uuuaucaucuuguuuuuaaagc

SEQ ID NO: 798284 - RNA, 22 nt, Human
cccaggagagagacuugaaucu

SEQ ID NO: 798285 - RNA, 22 nt, Human
ugcuucuaaucuacugcauuag

SEQ ID NO: 798286 - RNA, 22 nt, Human
cugugcagugugggguaggccu

SEQ ID NO: 798287 - RNA, 22 nt, Human
gccaccccaaccucccuaaguu

SEQ ID NO: 798288 - RNA, 22 nt, Human
ccauaaucguguguuaaauaau

SEQ ID NO: 798289 - RNA, 22 nt, Human
ugauucaucagaauaggaguuu

SEQ ID NO: 798290 - RNA, 22 nt, Human
ucccagcuuagauuugcucauu

SEQ ID NO: 798291 - RNA, 22 nt, Human
cagucucuuuauccaccaagcc

SEQ ID NO: 798292 - RNA, 22 nt, Human
agcacuuuagaauuuagaguug

SEQ ID NO: 798293 - RNA, 22 nt, Human
uaaaggccaugauggaggauca

SEQ ID NO: 798294 - RNA, 20 nt, Human
agacaaaaugacuucaugca

SEQ ID NO: 798295 - RNA, 22 nt, Human
cccugaggggaguggugaggug

SEQ ID NO: 798296 - RNA, 22 nt, Human
gugccagaagguucccgcugca

SEQ ID NO: 798297 - RNA, 22 nt, Human
gcugccugaucauacaccaggg

SEQ ID NO: 798298 - RNA, 22 nt, Human
ucuaauuuuaggcauuuguuca

SEQ ID NO: 798299 - RNA, 22 nt, Human
aaagccagcaaggugaguuuca

SEQ ID NO: 798300 - RNA, 22 nt, Human
caguuaaacgggccaugugagu

SEQ ID NO: 798301 - RNA, 22 nt, Human
cuggagggacaagguaugcauu

SEQ ID NO: 798302 - RNA, 22 nt, Human
guccaggcugcccaggguccug

SEQ ID NO: 798303 - RNA, 21 nt, Human
ggccacaguuagggcucagga

SEQ ID NO: 798304 - RNA, 19 nt, Human
augacucuuauugucugaa

SEQ ID NO: 798305 - RNA, 22 nt, Human
aggcacuuguaauugcagucau

SEQ ID NO: 798306 - RNA, 22 nt, Human
ugggagcacccugaggagcuuc

SEQ ID NO: 798307 - RNA, 22 nt, Human
ugccucagucuaaagucucuca

SEQ ID NO: 798308 - RNA, 22 nt, Human
cucucuggcuuggcacggagau

SEQ ID NO: 798309 - RNA, 22 nt, Human
ugauuuuuagcuauucugaaga

SEQ ID NO: 798310 - RNA, 22 nt, Human
agugcauucugucaucuugguu

SEQ ID NO: 798311 - RNA, 22 nt, Human
agcauuuucugagaguauagau

SEQ ID NO: 798312 - RNA, 22 nt, Human
ugauuuacacaccuaugauuua

SEQ ID NO: 798313 - RNA, 22 nt, Human
ccagugucagaaagauuauccu

SEQ ID NO: 798314 - RNA, 22 nt, Human
accugcugucuugggggaaugc

SEQ ID NO: 798315 - RNA, 22 nt, Human
gagcucuuagauagggcaggaa

SEQ ID NO: 798316 - RNA, 22 nt, Human
ggcaggcaggucuucauggccc

SEQ ID NO: 798317 - RNA, 22 nt, Human
ugcacuuuuauaucacucuggc

SEQ ID NO: 798318 - RNA, 21 nt, Human
acaggcucuggggaugcuggg

SEQ ID NO: 798319 - RNA, 22 nt, Human
guggcucuaggugagcauggag

SEQ ID NO: 798320 - RNA, 22 nt, Human
acucucaaauauuaaucuuugg

SEQ ID NO: 798321 - RNA, 20 nt, Human
aaaugcagggcugcugcgga

SEQ ID NO: 798322 - RNA, 23 nt, Human
gauucacagggugguuuaugggg

SEQ ID NO: 798323 - RNA, 22 nt, Human
aggcuucgcaagguuagagcug

SEQ ID NO: 798324 - RNA, 22 nt, Human
cagagcagaagcgguccucaca

SEQ ID NO: 798325 - RNA, 21 nt, Human
ggguccugggaugggauccag

SEQ ID NO: 798326 - RNA, 22 nt, Human
ugcaauaauguaugucacuccc

SEQ ID NO: 798327 - RNA, 22 nt, Human
aagagcaguguuuuacucagcu

SEQ ID NO: 798328 - RNA, 22 nt, Human
gccaggcuggugucacaacucu

SEQ ID NO: 798329 - RNA, 22 nt, Human
ugcccucagcagcagcuccugc

SEQ ID NO: 798330 - RNA, 22 nt, Human
agcuuugauaguacaggggcuu

SEQ ID NO: 798331 - RNA, 22 nt, Human
uaaggcucauguaauuagagau

SEQ ID NO: 798332 - RNA, 22 nt, Human
agaaccauuuugacagauauac

SEQ ID NO: 798333 - RNA, 22 nt, Human
cuucucuugguaguucuuguug

SEQ ID NO: 798334 - RNA, 22 nt, Human
ucucuuggaacacuugcucuua

SEQ ID NO: 798335 - RNA, 19 nt, Human
gcuugcuggcgggggucug

SEQ ID NO: 798336 - RNA, 22 nt, Human
ccaggcugaauauguuccaggg

SEQ ID NO: 798337 - RNA, 22 nt, Human
caauuuuacucuuccucuucca

SEQ ID NO: 798338 - RNA, 21 nt, Human
agggcacccccgcugccuacc

SEQ ID NO: 798339 - RNA, 22 nt, Human
ugaaugauacagaauuauguag

SEQ ID NO: 798340 - RNA, 22 nt, Human
uucauucauguauugucuaugg

SEQ ID NO: 798341 - RNA, 22 nt, Human
caggcacaguguugcuguucaa

SEQ ID NO: 798342 - RNA, 22 nt, Human
uacauacaagauguguuuaaaa

SEQ ID NO: 798343 - RNA, 22 nt, Human
uucaaaguugcaugacagcuua

SEQ ID NO: 798344 - RNA, 22 nt, Human
aggcacagccucccuucacaug

SEQ ID NO: 798345 - RNA, 22 nt, Human
ugccaggacaaggaccacaugg

SEQ ID NO: 798346 - RNA, 22 nt, Human
cagcccagacaccaucauucua

SEQ ID NO: 798347 - RNA, 22 nt, Human
uucuucuugaaacuuuagguug

SEQ ID NO: 798348 - RNA, 22 nt, Human
aggaaauuuugaaucagugucu

SEQ ID NO: 798349 - RNA, 22 nt, Human
cucuuuggucgcaucauccauu

SEQ ID NO: 798350 - RNA, 22 nt, Human
ugcaaauuccauuuaaacacua

SEQ ID NO: 798351 - RNA, 18 nt, Human
auggaggcagagagcuga

SEQ ID NO: 798352 - RNA, 22 nt, Human
aagugugggacuagggcuccag

SEQ ID NO: 798353 - RNA, 22 nt, Human
agugucaauucucaaaucucgg

SEQ ID NO: 798354 - RNA, 22 nt, Human
guucugggaagguggaccuguu

SEQ ID NO: 798355 - RNA, 22 nt, Human
uucuaguguccuuggacuugcu

SEQ ID NO: 798356 - RNA, 19 nt, Human
cuccucagucccagagguc

SEQ ID NO: 798357 - RNA, 22 nt, Human
gcuaggugcagcagacagcuua

SEQ ID NO: 798358 - RNA, 22 nt, Human
uugcaugugugcauauauuugc

SEQ ID NO: 798359 - RNA, 22 nt, Human
aggcuggcagccaccucagcag

SEQ ID NO: 798360 - RNA, 22 nt, Human
uaaggcaggaacuggcuguuuu

SEQ ID NO: 798361 - RNA, 22 nt, Human
cuggcagagucugcugucugca

SEQ ID NO: 798362 - RNA, 23 nt, Human
aggaagaggcaauuucucuuaga

SEQ ID NO: 798363 - RNA, 22 nt, Human
guccucuguguaggcugcagac

SEQ ID NO: 798364 - RNA, 22 nt, Human
uucuuugggcaauugcuggccc

SEQ ID NO: 798365 - RNA, 22 nt, Human
ggcugccccaugggcugggcug

SEQ ID NO: 798366 - RNA, 18 nt, Human
gguggcggggauggaggu

SEQ ID NO: 798367 - RNA, 22 nt, Human
ucaggcugccuaucagacugug

SEQ ID NO: 798368 - RNA, 22 nt, Human
ccagcuccucuucccaguguca

SEQ ID NO: 798369 - RNA, 22 nt, Human
auccagugagugcagcuguugu

SEQ ID NO: 798370 - RNA, 22 nt, Human
ugccaggagagugcaugcaggg

SEQ ID NO: 798371 - RNA, 22 nt, Human
acaguucaagacaucaguauga

SEQ ID NO: 798372 - RNA, 22 nt, Human
gaacagcuucuugggagcuggg

SEQ ID NO: 798373 - RNA, 22 nt, Human
auauuugcaggaaacuaguuuu

SEQ ID NO: 798374 - RNA, 22 nt, Human
acuggcagagacccugauggcc

SEQ ID NO: 798375 - RNA, 22 nt, Human
uggggugugagaaguagaggga

SEQ ID NO: 798376 - RNA, 22 nt, Human
caggcagacauuuuugacauag

SEQ ID NO: 798377 - RNA, 22 nt, Human
gggguagggcgauugcugcuuu

SEQ ID NO: 798378 - RNA, 19 nt, Human
uucagaauugggaggugau

SEQ ID NO: 798379 - RNA, 22 nt, Human
uacacaucucugucaguaguga

SEQ ID NO: 798380 - RNA, 22 nt, Human
agcuuuaaaucaauccagugag

SEQ ID NO: 798381 - RNA, 22 nt, Human
uggcaggguuggccaccuuacc

SEQ ID NO: 798382 - RNA, 22 nt, Human
aaagauuuaagaauaauuugug

SEQ ID NO: 798383 - RNA, 22 nt, Human
acauuuaaugauccuacuguga

SEQ ID NO: 798384 - RNA, 22 nt, Human
cccuuuccugaagaauauuuuu

SEQ ID NO: 798385 - RNA, 22 nt, Human
cuggcaggcaaauuggugggag

SEQ ID NO: 798386 - RNA, 22 nt, Human
ugugggaggaacacagccagaa

SEQ ID NO: 798387 - RNA, 22 nt, Human
ucaggcuggaaugcaguggggc

SEQ ID NO: 798388 - RNA, 22 nt, Human
cuggcaggucucgcugacgugu

SEQ ID NO: 798389 - RNA, 22 nt, Human
agugcuucuggugggcgugagg

SEQ ID NO: 798390 - RNA, 22 nt, Human
cuggcugguaauggaacgacag

SEQ ID NO: 798391 - RNA, 22 nt, Human
gagucagaccgacugggcucau

SEQ ID NO: 798392 - RNA, 22 nt, Human
aggggagcgacauuccgugccg

SEQ ID NO: 798393 - RNA, 22 nt, Human
uccucacagaguggcaggcaau

SEQ ID NO: 798394 - RNA, 22 nt, Human
auuuugcacacuaugcagcuuu

SEQ ID NO: 798395 - RNA, 22 nt, Human
uuugugcacuucuguagcugcc

SEQ ID NO: 798396 - RNA, 22 nt, Human
gcucuuggucucagccucugaa

SEQ ID NO: 798397 - RNA, 22 nt, Human
caugcagugaugcacugcauca

SEQ ID NO: 798398 - RNA, 22 nt, Human
uuugcaaacacuuaagaagaga

SEQ ID NO: 798399 - RNA, 22 nt, Human
uuucauaauacuguacaugaaa

SEQ ID NO: 798400 - RNA, 22 nt, Human
uuccaggaagcucucggccucu

SEQ ID NO: 798401 - RNA, 22 nt, Human
ugcacacacaugaaguagcaug

SEQ ID NO: 798402 - RNA, 22 nt, Human
gcuguccuuccuggcuggggug

SEQ ID NO: 798403 - RNA, 22 nt, Human
auaaggaaguugcagaagugga

SEQ ID NO: 798404 - RNA, 22 nt, Human
gcaggagcagucaggggcagcu

SEQ ID NO: 798405 - RNA, 22 nt, Human
gagccaagcaauauacccaacc

SEQ ID NO: 798406 - RNA, 22 nt, Human
gccccagccugggaacuggagg

SEQ ID NO: 798407 - RNA, 22 nt, Human
ccagcuugaagaugugcugguu

SEQ ID NO: 798408 - RNA, 22 nt, Human
aggucccagucugugaugacuc

SEQ ID NO: 798409 - RNA, 22 nt, Human
uuuaucacagaauaagaaguca

SEQ ID NO: 798410 - RNA, 22 nt, Human
ggcugccuucauagaccauggg

SEQ ID NO: 798411 - RNA, 22 nt, Human
uggcuggaccugggcuggaauu

SEQ ID NO: 798412 - RNA, 22 nt, Human
ucuucaauauguguuuaauauu

SEQ ID NO: 798413 - RNA, 22 nt, Human
agggauggaucuuggcccugga

SEQ ID NO: 798414 - RNA, 22 nt, Human
agcugaaaauuagugauaguuu

SEQ ID NO: 798415 - RNA, 22 nt, Human
cacaccagauggcagcguggga

SEQ ID NO: 798416 - RNA, 22 nt, Human
ugcccugggcuuugcuaugacu

SEQ ID NO: 798417 - RNA, 22 nt, Human
uagaaagucaaaacacuguguu

SEQ ID NO: 798418 - RNA, 22 nt, Human
uggugccacuucuuaggcuggu

SEQ ID NO: 798419 - RNA, 22 nt, Human
agaaaagcggucaggacccuca

SEQ ID NO: 798420 - RNA, 22 nt, Human
uguaaagauccuuagcaacauc

SEQ ID NO: 798421 - RNA, 22 nt, Human
augucucuuuagagcaacagua

SEQ ID NO: 798422 - RNA, 19 nt, Human
gauauaaagagauggugaa

SEQ ID NO: 798423 - RNA, 22 nt, Human
uuucucagcucagcaucugggu

SEQ ID NO: 798424 - RNA, 22 nt, Human
aggcuguccaagguggcgaagu

SEQ ID NO: 798425 - RNA, 21 nt, Human
caauuacagauggcucagggg

SEQ ID NO: 798426 - RNA, 22 nt, Human
agguccugggaguucuagugug

SEQ ID NO: 798427 - RNA, 22 nt, Human
uucauuugaguuuauaguugcu

SEQ ID NO: 798428 - RNA, 22 nt, Human
gaaacauucagucaacaguguu

SEQ ID NO: 798429 - RNA, 22 nt, Human
aguguaucaugguuggcagaca

SEQ ID NO: 798430 - RNA, 22 nt, Human
ucacaguuuuagaaaauagaua

SEQ ID NO: 798431 - RNA, 22 nt, Human
agcugccacagagccuggccag

SEQ ID NO: 798432 - RNA, 22 nt, Human
uaucaggacuucauuccuuuua

SEQ ID NO: 798433 - RNA, 22 nt, Human
ccacagugaucccugccugcga

SEQ ID NO: 798434 - RNA, 22 nt, Human
agccugagcugccugccgccuc

SEQ ID NO: 798435 - RNA, 22 nt, Human
aucacagauuugauacuuuugu

SEQ ID NO: 798436 - RNA, 18 nt, Human
ucaaagucuggcuccacu

SEQ ID NO: 798437 - RNA, 22 nt, Human
aaugaauguuuguugagugaag

SEQ ID NO: 798438 - RNA, 22 nt, Human
guguuucccuggcacaagaacc

SEQ ID NO: 798439 - RNA, 22 nt, Human
cugcagcuauauuuucccacag

SEQ ID NO: 798440 - RNA, 22 nt, Human
ggguggaauuguuggcaucgga

SEQ ID NO: 798441 - RNA, 22 nt, Human
uuuagagagaaauaaaugagau

SEQ ID NO: 798442 - RNA, 22 nt, Human
ucaagauguccagugccuauaa

SEQ ID NO: 798443 - RNA, 22 nt, Human
gcuuagagcagcucacaacaug

SEQ ID NO: 798444 - RNA, 22 nt, Human
guuacaaacucaggugccaaaa

SEQ ID NO: 798445 - RNA, 22 nt, Human
uauaccuuuaccuugaccaaau

SEQ ID NO: 798446 - RNA, 22 nt, Human
uuucagagagaucaacauagcu

SEQ ID NO: 798447 - RNA, 22 nt, Human
agcagcacacgggagaaagaca

SEQ ID NO: 798448 - RNA, 22 nt, Human
uucaauguuaagaagaauaugu

SEQ ID NO: 798449 - RNA, 22 nt, Human
aagauuuacuuucuuuguaaua

SEQ ID NO: 798450 - RNA, 22 nt, Human
gcccaagcagcuucccgagcuu

SEQ ID NO: 798451 - RNA, 22 nt, Human
uuugcuauugugaauagugcca

SEQ ID NO: 798452 - RNA, 22 nt, Human
ugcaauguguuagaugguuuua

SEQ ID NO: 798453 - RNA, 22 nt, Human
aagcugccuagaguugaauguc

SEQ ID NO: 798454 - RNA, 19 nt, Human
gcagccaggugcucuaccu

SEQ ID NO: 798455 - RNA, 22 nt, Human
aguuuccaggcaggagcuaauu

SEQ ID NO: 798456 - RNA, 22 nt, Human
agcugcagcccuccugcauggc

SEQ ID NO: 798457 - RNA, 22 nt, Human
auuucugugcaguaaaugguga

SEQ ID NO: 798458 - RNA, 22 nt, Human
uuaagauuuucuucaguauuau

SEQ ID NO: 798459 - RNA, 22 nt, Human
uauuuauuggacaguguugcug

SEQ ID NO: 798460 - RNA, 22 nt, Human
uuuggauugcuuggaugcuucg

SEQ ID NO: 798461 - RNA, 17 nt, Human
ugacuuuauuugcuugg

SEQ ID NO: 798462 - RNA, 22 nt, Human
agcuggccauugugaguggccu

SEQ ID NO: 798463 - RNA, 21 nt, Human
cugucccucuuugcuucccuc

SEQ ID NO: 798464 - RNA, 22 nt, Human
auugcuaggaacagguugcacc

SEQ ID NO: 798465 - RNA, 22 nt, Human
gagagcuggguucaaguagcug

SEQ ID NO: 798466 - RNA, 22 nt, Human
cccaggaguuagagguuguggu

SEQ ID NO: 798467 - RNA, 22 nt, Human
uccuggagcuggugucuuuccc

SEQ ID NO: 798468 - RNA, 19 nt, Human
agaggcaaggguggaagua

SEQ ID NO: 798469 - RNA, 22 nt, Human
uaaaguggaaggauccacuaag

SEQ ID NO: 798470 - RNA, 22 nt, Human
aaaugcuucaccucauuaaacu

SEQ ID NO: 798471 - RNA, 22 nt, Human
uccagaggugaacacccaggca

SEQ ID NO: 798472 - RNA, 22 nt, Human
aauagagucaguucuacauucu

SEQ ID NO: 798473 - RNA, 22 nt, Human
auaaacuauguaauuugcucua

SEQ ID NO: 798474 - RNA, 22 nt, Human
cauacaagcguucaauagaugu

SEQ ID NO: 798475 - RNA, 22 nt, Human
ugagcccaggaguaugaggcug

SEQ ID NO: 798476 - RNA, 22 nt, Human
agaggccaugcuagaggccugg

SEQ ID NO: 798477 - RNA, 22 nt, Human
gcaagcaaauuauuuauaggca

SEQ ID NO: 798478 - RNA, 22 nt, Human
auuaaauuggacgcugggggaa

SEQ ID NO: 798479 - RNA, 22 nt, Human
aggacaguguggaagagggugc

SEQ ID NO: 798480 - RNA, 22 nt, Human
ugagcagauggaggcuucugca

SEQ ID NO: 798481 - RNA, 22 nt, Human
uacaaacuguuauuauuauugu

SEQ ID NO: 798482 - RNA, 22 nt, Human
aaauguucuacuuugauaauua

SEQ ID NO: 798483 - RNA, 22 nt, Human
aggugcaggagcugugcaggga

SEQ ID NO: 798484 - RNA, 18 nt, Human
ggcacuggugaugcagag

SEQ ID NO: 798485 - RNA, 22 nt, Human
acacaguaggccaccaugucau

SEQ ID NO: 798486 - RNA, 22 nt, Human
cuucuaggcuucucagggggca

SEQ ID NO: 798487 - RNA, 22 nt, Human
uuuacagauguggaaagugagc

SEQ ID NO: 798488 - RNA, 20 nt, Human
auucacauauaccagggagg

SEQ ID NO: 798489 - RNA, 22 nt, Human
uuuagguuaaucaacaaacauu

SEQ ID NO: 798490 - RNA, 22 nt, Human
agugcuggauuacaggcgugag

SEQ ID NO: 798491 - RNA, 22 nt, Human
uuguguuuucuuauggcauaaa

SEQ ID NO: 798492 - RNA, 22 nt, Human
ccucaagaacaauccaccauua

SEQ ID NO: 798493 - RNA, 22 nt, Human
uugcagagaucagcagguuuga

SEQ ID NO: 798494 - RNA, 22 nt, Human
gagguggccucaagcagucuuc

SEQ ID NO: 798495 - RNA, 22 nt, Human
aauaagauuacugguugucuga

SEQ ID NO: 798496 - RNA, 22 nt, Human
ucagcuccucaugcaggggaua

SEQ ID NO: 798497 - RNA, 22 nt, Human
ucacaguauaaccucauauagg

SEQ ID NO: 798498 - RNA, 22 nt, Human
ugccuggguucccaccccaaag

SEQ ID NO: 798499 - RNA, 22 nt, Human
gaggaagcagggcuuggcugag

SEQ ID NO: 798500 - RNA, 18 nt, Human
ugaacuuuggugucucuc

SEQ ID NO: 798501 - RNA, 22 nt, Human
acaaaauuaccuaguuauuuuc

SEQ ID NO: 798502 - RNA, 22 nt, Human
augcugggaaguccuaaccaca

SEQ ID NO: 798503 - RNA, 22 nt, Human
guuuacuguuuucugauaagug

SEQ ID NO: 798504 - RNA, 22 nt, Human
cuuggcugucauaagguccugg

SEQ ID NO: 798505 - RNA, 22 nt, Human
ccagauguuccccuggaggccu

SEQ ID NO: 798506 - RNA, 22 nt, Human
gcccuagggggaaccgaggacu

SEQ ID NO: 798507 - RNA, 22 nt, Human
ucucuuggugacuuaaaauguu

SEQ ID NO: 798508 - RNA, 22 nt, Human
gcucagcuacuuacagguggcu

SEQ ID NO: 798509 - RNA, 22 nt, Human
aggcuucaguuguaccuucuug

SEQ ID NO: 798510 - RNA, 22 nt, Human
ccugugccauccugagcauccc

SEQ ID NO: 798511 - RNA, 22 nt, Human
uuucucauagucaugccucuua

SEQ ID NO: 798512 - RNA, 22 nt, Human
ugaucugaaggacaugggaccc

SEQ ID NO: 798513 - RNA, 22 nt, Human
aaaaguguccagauuaugaaga

SEQ ID NO: 798514 - RNA, 22 nt, Human
gugccagagacaugacuagcug

SEQ ID NO: 798515 - RNA, 22 nt, Human
uugcaaauuccaauccaauauu

SEQ ID NO: 798516 - RNA, 22 nt, Human
aaaggcuuuugguauauaggag

SEQ ID NO: 798517 - RNA, 22 nt, Human
ccagccagcugguuggacgccu

SEQ ID NO: 798518 - RNA, 22 nt, Human
acccaggcagcaggagcuaaag

SEQ ID NO: 798519 - RNA, 22 nt, Human
acugagaagcucgcagugaugc

SEQ ID NO: 798520 - RNA, 22 nt, Human
cuaggcaaaguauuaaugagug

SEQ ID NO: 798521 - RNA, 22 nt, Human
cagaaacuguuuguuaauauuu

SEQ ID NO: 798522 - RNA, 22 nt, Human
agugucaaaucagcaucugggu

SEQ ID NO: 798523 - RNA, 22 nt, Human
agucucugccagcuuguccucu

SEQ ID NO: 798524 - RNA, 17 nt, Human
uccaggcagcaacugag

SEQ ID NO: 798525 - RNA, 22 nt, Human
cagcuccuagaucggcgaagug

SEQ ID NO: 798526 - RNA, 22 nt, Human
auguuuauuuugcagaguaggg

SEQ ID NO: 798527 - RNA, 22 nt, Human
aucuaaacuauaguaccuaguc

SEQ ID NO: 798528 - RNA, 22 nt, Human
aggcucugugacaaucaagcug

SEQ ID NO: 798529 - RNA, 22 nt, Human
ucacauuuuaucuauuuuaagu

SEQ ID NO: 798530 - RNA, 22 nt, Human
cugccuggccugaucuccacgc

SEQ ID NO: 798531 - RNA, 22 nt, Human
ucaggcugugucuuuaaacaau

SEQ ID NO: 798532 - RNA, 22 nt, Human
gcuggaguacaucuuuggcggc

SEQ ID NO: 798533 - RNA, 22 nt, Human
aggcuacauguugggguggaag

SEQ ID NO: 798534 - RNA, 22 nt, Human
cagcagcagauucagcgucugg

SEQ ID NO: 798535 - RNA, 19 nt, Human
aggcuucauccugggcagc

SEQ ID NO: 798536 - RNA, 22 nt, Human
caaaauuagaaaugcagcuguu

SEQ ID NO: 798537 - RNA, 22 nt, Human
gaggcaagagaagccagcuuuc

SEQ ID NO: 798538 - RNA, 20 nt, Human
ugggaguacaaucaugagca

SEQ ID NO: 798539 - RNA, 22 nt, Human
auucugagaggcacaaugugga

SEQ ID NO: 798540 - RNA, 21 nt, Human
cauuacaugguuuuagugaac

SEQ ID NO: 798541 - RNA, 22 nt, Human
augucaaagcagacugagagcg

SEQ ID NO: 798542 - RNA, 22 nt, Human
auuucccacucuacuacaugcu

SEQ ID NO: 798543 - RNA, 22 nt, Human
aauucauugccagaaucuauga

SEQ ID NO: 798544 - RNA, 22 nt, Human
ccagcaggggaauauuuuuagg

SEQ ID NO: 798545 - RNA, 22 nt, Human
uggauuuaaggcagagagggcc

SEQ ID NO: 798546 - RNA, 22 nt, Human
uuuacauuucccucugucaguu

SEQ ID NO: 798547 - RNA, 22 nt, Human
auuuauugagacuuaacaaccc

SEQ ID NO: 798548 - RNA, 22 nt, Human
ggcugcuggggacgugggagag

SEQ ID NO: 798549 - RNA, 22 nt, Human
ugcacuuuauuuccucucacac

SEQ ID NO: 798550 - RNA, 22 nt, Human
aacgaauagggauuuuucuaac

SEQ ID NO: 798551 - RNA, 22 nt, Human
agaauuacagcuuuuagaauag

SEQ ID NO: 798552 - RNA, 18 nt, Human
ugggagugggaguggaua

SEQ ID NO: 798553 - RNA, 19 nt, Human
gccugccagccugaaucug

SEQ ID NO: 798554 - RNA, 22 nt, Human
cagcugccuguauuguccucau

SEQ ID NO: 798555 - RNA, 22 nt, Human
acuuuugaagaauuaugcaaaa

SEQ ID NO: 798556 - RNA, 22 nt, Human
uuacacaacagugcaucagcag

SEQ ID NO: 798557 - RNA, 22 nt, Human
ugggccugggagggcagacgcu

SEQ ID NO: 798558 - RNA, 22 nt, Human
ucagcaggugcuuuguuuacuc

SEQ ID NO: 798559 - RNA, 22 nt, Human
cuggcucccuggacauggggcc

SEQ ID NO: 798560 - RNA, 22 nt, Human
agcacaguaaagcagugucaca

SEQ ID NO: 798561 - RNA, 22 nt, Human
uguuucaugaaacauguuuagg

SEQ ID NO: 798562 - RNA, 20 nt, Human
ggacaggaagacaaccuacc

SEQ ID NO: 798563 - RNA, 22 nt, Human
gggaagugauggagccaggauu

SEQ ID NO: 798564 - RNA, 22 nt, Human
auuucauguugaucuuucgagg

SEQ ID NO: 798565 - RNA, 22 nt, Human
cugguucaaguccuggcucugu

SEQ ID NO: 798566 - RNA, 22 nt, Human
ugaaaucauaacaguuuggcuu

SEQ ID NO: 798567 - RNA, 22 nt, Human
cuccugugguacucccagggcc

SEQ ID NO: 798568 - RNA, 22 nt, Human
uaugcaaagccacccagggacg

SEQ ID NO: 798569 - RNA, 22 nt, Human
gaccuugugcuccgaggcgggc

SEQ ID NO: 798570 - RNA, 22 nt, Human
gugguguggcuggcagaguuua

SEQ ID NO: 798571 - RNA, 22 nt, Human
gucaaauauuaugcagcuugga

SEQ ID NO: 798572 - RNA, 22 nt, Human
ccagggccaagagaccucgagg

SEQ ID NO: 798573 - RNA, 22 nt, Human
uaaugacuugaaggacccaugg

SEQ ID NO: 798574 - RNA, 22 nt, Human
gccagaaacauacacaucacuu

SEQ ID NO: 798575 - RNA, 22 nt, Human
gagcuagguuuuccagucgcau

SEQ ID NO: 798576 - RNA, 22 nt, Human
gaugaguucuuucuauucuauu

SEQ ID NO: 798577 - RNA, 18 nt, Human
uggaggaaucacaauggc

SEQ ID NO: 798578 - RNA, 22 nt, Human
gcagggcuagauauuugcaagu

SEQ ID NO: 798579 - RNA, 21 nt, Human
uccagcacagaugaccucccc

SEQ ID NO: 798580 - RNA, 22 nt, Human
guaaaacaagcuuuaugguucc

SEQ ID NO: 798581 - RNA, 22 nt, Human
gguugcauuucucaguggaaua

SEQ ID NO: 798582 - RNA, 22 nt, Human
gugugcaucuugguaauggagc

SEQ ID NO: 798583 - RNA, 22 nt, Human
uuccauauguauauagcuguua

SEQ ID NO: 798584 - RNA, 22 nt, Human
aggcccugaagucggccccuca

SEQ ID NO: 798585 - RNA, 22 nt, Human
agaguggggaagguguugagaa

SEQ ID NO: 798586 - RNA, 22 nt, Human
uggagaggaaagugcaguuuug

SEQ ID NO: 798587 - RNA, 22 nt, Human
gcaugcugcugaggcuggaaua

SEQ ID NO: 798588 - RNA, 22 nt, Human
cucagacuuucaggguaggcca

SEQ ID NO: 798589 - RNA, 22 nt, Human
cucagggggaaucaggucacag

SEQ ID NO: 798590 - RNA, 22 nt, Human
gcccagcacuccucucugacau

SEQ ID NO: 798591 - RNA, 22 nt, Human
ucucaaauauuuggagagagga

SEQ ID NO: 798592 - RNA, 22 nt, Human
gaauaauagcagaaauuagcag

SEQ ID NO: 798593 - RNA, 23 nt, Human
acaugcaaaaaucacagucuccu

SEQ ID NO: 798594 - RNA, 22 nt, Human
agguuucuccuuuaaagcaugg

SEQ ID NO: 798595 - RNA, 22 nt, Human
uggcaggaaggagacucagccc

SEQ ID NO: 798596 - RNA, 22 nt, Human
cucugugggccugugcuuuagu

SEQ ID NO: 798597 - RNA, 22 nt, Human
cuggggugugcucagagcaggg

SEQ ID NO: 798598 - RNA, 22 nt, Human
ucacagagagguuaagcaguug

SEQ ID NO: 798599 - RNA, 22 nt, Human
uuucuuuauccuccuuugcaca

SEQ ID NO: 798600 - RNA, 22 nt, Human
ucaucuucuauuaauagggaga

SEQ ID NO: 798601 - RNA, 22 nt, Human
ugugggaggucuggaaggcucc

SEQ ID NO: 798602 - RNA, 22 nt, Human
cugccagggcauccuguggugg

SEQ ID NO: 798603 - RNA, 22 nt, Human
ugggccagagaguaagaaaggu

SEQ ID NO: 798604 - RNA, 22 nt, Human
acagcuggcaggggggcaugaa

SEQ ID NO: 798605 - RNA, 22 nt, Human
ggcacagagguugccuccagau

SEQ ID NO: 798606 - RNA, 22 nt, Human
gccuggugauaagcagugaccu

SEQ ID NO: 798607 - RNA, 22 nt, Human
caaauuuuguguguucucuagu

SEQ ID NO: 798608 - RNA, 22 nt, Human
auggccuuagugaugauuaaua

SEQ ID NO: 798609 - RNA, 22 nt, Human
uuucaaacauaucuucauuacu

SEQ ID NO: 798610 - RNA, 22 nt, Human
uggaggugaaaugagauuuugu

SEQ ID NO: 798611 - RNA, 22 nt, Human
cagugaaauaguggacaucaaa

SEQ ID NO: 798612 - RNA, 23 nt, Human
ucuccuggcugcacuguggccac

SEQ ID NO: 798613 - RNA, 22 nt, Human
cagcagccuagaagcucuacca

SEQ ID NO: 798614 - RNA, 20 nt, Human
aguagcaguaauauggaaga

SEQ ID NO: 798615 - RNA, 22 nt, Human
ggcauggccuguaagacggaga

SEQ ID NO: 798616 - RNA, 22 nt, Human
agcugugugguuugggcaaauu

SEQ ID NO: 798617 - RNA, 22 nt, Human
ucaaagaugauaggaaaucaua

SEQ ID NO: 798618 - RNA, 22 nt, Human
aaugcuuugacuauaucuauaa

SEQ ID NO: 798619 - RNA, 22 nt, Human
gcugugaguggaguucugugcu

SEQ ID NO: 798620 - RNA, 23 nt, Human
uuagacaauccucaaaagguaau

SEQ ID NO: 798621 - RNA, 22 nt, Human
auuuuggcaacagccaugagcc

SEQ ID NO: 798622 - RNA, 22 nt, Human
acugugaaagcuaacaucuuag

SEQ ID NO: 798623 - RNA, 22 nt, Human
caggcccaucugcucccaggcu

SEQ ID NO: 798624 - RNA, 22 nt, Human
gagcuuuggugccaaguauuug

SEQ ID NO: 798625 - RNA, 22 nt, Human
cagggcaaagagagcacaugcu

SEQ ID NO: 798626 - RNA, 22 nt, Human
guaacaaaggauaacuugguuu

SEQ ID NO: 798627 - RNA, 22 nt, Human
acuccuggggcugccaucacag

SEQ ID NO: 798628 - RNA, 22 nt, Human
agacagaauuugucagauaaau

SEQ ID NO: 798629 - RNA, 22 nt, Human
ccagcagaggggcggagugcag

SEQ ID NO: 798630 - RNA, 19 nt, Human
acagccuguugguggggcu

SEQ ID NO: 798631 - RNA, 22 nt, Human
acacuugaggaauguggugauu

SEQ ID NO: 798632 - RNA, 22 nt, Human
aagcacaggggaaauaaguugu

SEQ ID NO: 798633 - RNA, 22 nt, Human
uccuggccaugcaagaugagga

SEQ ID NO: 798634 - RNA, 22 nt, Human
cagcuggcccuuugguagccuu

SEQ ID NO: 798635 - RNA, 22 nt, Human
uuccuguggccuuacaucugug

SEQ ID NO: 798636 - RNA, 22 nt, Human
gcaagcaaaaugggagauuccc

SEQ ID NO: 798637 - RNA, 23 nt, Human
ugaguucuaggcuuaaaacuagc

SEQ ID NO: 798638 - RNA, 23 nt, Human
cccaggagccugaguccucucug

SEQ ID NO: 798639 - RNA, 22 nt, Human
gcacccaggcuugggcagcaac

SEQ ID NO: 798640 - RNA, 22 nt, Human
agcagcuugaggcuggauucca

SEQ ID NO: 798641 - RNA, 22 nt, Human
gccuccagcuggggcauuucag

SEQ ID NO: 798642 - RNA, 22 nt, Human
agucagcagccuggccaggaga

SEQ ID NO: 798643 - RNA, 22 nt, Human
uccagagagauaguggcuaaua

SEQ ID NO: 798644 - RNA, 22 nt, Human
aauguugauguuuucagugagc

SEQ ID NO: 798645 - RNA, 22 nt, Human
cagagcagccuccagggggagc

SEQ ID NO: 798646 - RNA, 22 nt, Human
aagugauuuagucuuauaaagg

SEQ ID NO: 798647 - RNA, 22 nt, Human
gaagagcuauguccagggagca

SEQ ID NO: 798648 - RNA, 22 nt, Human
gagaggcccuguggucccagcu

SEQ ID NO: 798649 - RNA, 22 nt, Human
caaauguuuuuuaguauaagua

SEQ ID NO: 798650 - RNA, 16 nt, Human
cacauauauuuauaug

SEQ ID NO: 798651 - RNA, 22 nt, Human
cuauuuaugugcuauuuuguau

SEQ ID NO: 798652 - RNA, 22 nt, Human
ggcuggcuuggugagcugucac

SEQ ID NO: 798653 - RNA, 22 nt, Human
caggcacacccacuggugcaga

SEQ ID NO: 798654 - RNA, 22 nt, Human
gcagccuuccguggaccuggac

SEQ ID NO: 798655 - RNA, 22 nt, Human
agggccagagucuguguagaua

SEQ ID NO: 798656 - RNA, 22 nt, Human
aaacuuuuuauucuaaugucua

SEQ ID NO: 798657 - RNA, 22 nt, Human
ucaguuuauagauauugcugau

SEQ ID NO: 798658 - RNA, 22 nt, Human
aaugcacaugucuuggccucac

SEQ ID NO: 798659 - RNA, 22 nt, Human
auauguuuugugcuucauuggu

SEQ ID NO: 798660 - RNA, 22 nt, Human
uuucauaauauccagagauuuu

SEQ ID NO: 798661 - RNA, 22 nt, Human
agucugaaguagucuuuagugu

SEQ ID NO: 798662 - RNA, 22 nt, Human
aaugucugagucucuguauccc

SEQ ID NO: 798663 - RNA, 22 nt, Human
cagaaaccaaaugggaugggga

SEQ ID NO: 798664 - RNA, 22 nt, Human
cagaggcugcucuggguggcau

SEQ ID NO: 798665 - RNA, 22 nt, Human
accucuggacacugcauccuuc

SEQ ID NO: 798666 - RNA, 23 nt, Human
aaaugcagggucgcagguuacag

SEQ ID NO: 798667 - RNA, 22 nt, Human
ggacagcauaucagcagggcag

SEQ ID NO: 798668 - RNA, 22 nt, Human
uauacacauccuccaaagauag

SEQ ID NO: 798669 - RNA, 21 nt, Human
ggcuggucgcgugcaugucuc

SEQ ID NO: 798670 - RNA, 22 nt, Human
uugagggucuggaucugcugcu

SEQ ID NO: 798671 - RNA, 22 nt, Human
ucugccagaagccagggucugg

SEQ ID NO: 798672 - RNA, 22 nt, Human
gcguuggggaccccgaagcugg

SEQ ID NO: 798673 - RNA, 22 nt, Human
aaguauuucguucugaaaaagu

SEQ ID NO: 798674 - RNA, 22 nt, Human
aauuaccaggauuuuucaguau

SEQ ID NO: 798675 - RNA, 23 nt, Human
uccucccugacuucuacagcaca

SEQ ID NO: 798676 - RNA, 22 nt, Human
uacuugcuguuaguauuuuaca

SEQ ID NO: 798677 - RNA, 22 nt, Human
caugacaauaagccagcagaaa

SEQ ID NO: 798678 - RNA, 22 nt, Human
ucauugacaguuguuucaaaua

SEQ ID NO: 798679 - RNA, 22 nt, Human
ugucauggugcuauuuaauuag

SEQ ID NO: 798680 - RNA, 22 nt, Human
uuuuuuaucuaugguaguacca

SEQ ID NO: 798681 - RNA, 22 nt, Human
ugaggagaaaugcucagagcca

SEQ ID NO: 798682 - RNA, 22 nt, Human
ggagcuguuggcagcuaucuug

SEQ ID NO: 798683 - RNA, 22 nt, Human
ugcccuggggagcccagccagg

SEQ ID NO: 798684 - RNA, 22 nt, Human
cuggguggcuguccagccagcc

SEQ ID NO: 798685 - RNA, 22 nt, Human
caggagcagaggguggucagca

SEQ ID NO: 798686 - RNA, 22 nt, Human
ggccuugggguggccuuguccc

SEQ ID NO: 798687 - RNA, 22 nt, Human
ucuggcucuauaacuccuagcu

SEQ ID NO: 798688 - RNA, 22 nt, Human
agcagggcuuugucucugugaa

SEQ ID NO: 798689 - RNA, 22 nt, Human
auuacacuaaugugacaacaau

SEQ ID NO: 798690 - RNA, 22 nt, Human
gcaguuuggaaaaugugccucu

SEQ ID NO: 798691 - RNA, 22 nt, Human
caguuuaaaugagugacugcag

SEQ ID NO: 798692 - RNA, 22 nt, Human
uuacauguucucauacacagag

SEQ ID NO: 798693 - RNA, 22 nt, Human
ccagggcaugggaagaacugaa

SEQ ID NO: 798694 - RNA, 22 nt, Human
agcagggcagugcuucagcucu

SEQ ID NO: 798695 - RNA, 22 nt, Human
cugguucagugaaaggcauggg

SEQ ID NO: 798696 - RNA, 22 nt, Human
ucuggaggcucugagggugagu

SEQ ID NO: 798697 - RNA, 22 nt, Human
gucaggaaaacccggguugacu

SEQ ID NO: 798698 - RNA, 22 nt, Human
uggcagcuguguccagguagaa

SEQ ID NO: 798699 - RNA, 22 nt, Human
caaggcuggcucacaauaauga

SEQ ID NO: 798700 - RNA, 22 nt, Human
cagggcagagccaggauuucaa

SEQ ID NO: 798701 - RNA, 22 nt, Human
cuuaaagaguauuuaauauaau

SEQ ID NO: 798702 - RNA, 22 nt, Human
aggugcugaacuggugaggucu

SEQ ID NO: 798703 - RNA, 23 nt, Human
gccugggacucaggaggagcuca

SEQ ID NO: 798704 - RNA, 22 nt, Human
auucugcaugguggugucucug

SEQ ID NO: 798705 - RNA, 22 nt, Human
aauauaaugcuguuuuaugcca

SEQ ID NO: 798706 - RNA, 22 nt, Human
ucaucuuuccucaaaagaucca

SEQ ID NO: 798707 - RNA, 22 nt, Human
uuacagaguagggaauugaagu

SEQ ID NO: 798708 - RNA, 22 nt, Human
gugcagauccugauugcaguuc

SEQ ID NO: 798709 - RNA, 22 nt, Human
aacaaguuguugaaaauaauua

SEQ ID NO: 798710 - RNA, 22 nt, Human
cuuuugcagccauuauugcugc

SEQ ID NO: 798711 - RNA, 22 nt, Human
uucuacauucauguauuaccuc

SEQ ID NO: 798712 - RNA, 22 nt, Human
cgagcaugaugacggcuguggc

SEQ ID NO: 798713 - RNA, 22 nt, Human
uggcaugaagucagcagcuggg

SEQ ID NO: 798714 - RNA, 22 nt, Human
uuaaaggcgauaaggcaguguu

SEQ ID NO: 798715 - RNA, 22 nt, Human
gugaacaaaauagcacauauua

SEQ ID NO: 798716 - RNA, 22 nt, Human
ucaggaagggugguccacaggg

SEQ ID NO: 798717 - RNA, 22 nt, Human
uccaggagguugagacugcagu

SEQ ID NO: 798718 - RNA, 22 nt, Human
uggaggaaaauuacuggggucu

SEQ ID NO: 798719 - RNA, 22 nt, Human
accugccuauggagccacaugg

SEQ ID NO: 798720 - RNA, 22 nt, Human
uguucuggugaggccauggggu

SEQ ID NO: 798721 - RNA, 22 nt, Human
cucagauaaucuuugagucuuc

SEQ ID NO: 798722 - RNA, 22 nt, Human
augaaaugagucaaugcgacua

SEQ ID NO: 798723 - RNA, 22 nt, Human
cagcuuuggagugugagugcug

SEQ ID NO: 798724 - RNA, 22 nt, Human
cauuucaaugccuucaacauag

SEQ ID NO: 798725 - RNA, 22 nt, Human
uagucacaggaaguuucaaugu

SEQ ID NO: 798726 - RNA, 22 nt, Human
uugugaauagugccacaauaaa

SEQ ID NO: 798727 - RNA, 22 nt, Human
gcagcguggggcugagucagcu

SEQ ID NO: 798728 - RNA, 22 nt, Human
cccuggaggaccccaauguggc

SEQ ID NO: 798729 - RNA, 22 nt, Human
ccacagugggcacagcaggacu

SEQ ID NO: 798730 - RNA, 22 nt, Human
cuggugggagcagcaggcagcu

SEQ ID NO: 798731 - RNA, 17 nt, Human
uacaaugugauucaauc

SEQ ID NO: 798732 - RNA, 22 nt, Human
cacugagggaggguuucuucug

SEQ ID NO: 798733 - RNA, 22 nt, Human
cugccagacacguuaugcucau

SEQ ID NO: 798734 - RNA, 22 nt, Human
cucucuagaggcccaccuugag

SEQ ID NO: 798735 - RNA, 22 nt, Human
auauuaagaugcuauugguuuu

SEQ ID NO: 798736 - RNA, 22 nt, Human
uauuucugucagccagauaugg

SEQ ID NO: 798737 - RNA, 22 nt, Human
aagucaauuuauguucucagac

SEQ ID NO: 798738 - RNA, 22 nt, Human
acagcaggcaugaaugacacug

SEQ ID NO: 798739 - RNA, 22 nt, Human
agggucacaaugugugaauugg

SEQ ID NO: 798740 - RNA, 23 nt, Human
acucuguaggcuguccaugugca

SEQ ID NO: 798741 - RNA, 22 nt, Human
gagcacagauccuggagccaca

SEQ ID NO: 798742 - RNA, 22 nt, Human
uaagucauaagucaacaaagga

SEQ ID NO: 798743 - RNA, 22 nt, Human
uuuacuacuugugauaacugaa

SEQ ID NO: 798744 - RNA, 22 nt, Human
ucaaacauaucugauuuuccau

SEQ ID NO: 798745 - RNA, 22 nt, Human
uuuacagaugaggaaacugaga

SEQ ID NO: 798746 - RNA, 22 nt, Human
ggcagcugauuagcaucaagga

SEQ ID NO: 798747 - RNA, 22 nt, Human
agucacagaaugauggcuccag

SEQ ID NO: 798748 - RNA, 22 nt, Human
aaaaguuugugcaaacacucag

SEQ ID NO: 798749 - RNA, 22 nt, Human
gagggaccccaggcuggcccuu

SEQ ID NO: 798750 - RNA, 22 nt, Human
gcacccaggccggcgacugcag

SEQ ID NO: 798751 - RNA, 22 nt, Human
ucuuuggcuaugauuuacuguu

SEQ ID NO: 798752 - RNA, 22 nt, Human
accugaggcuguuagucuaggu

SEQ ID NO: 798753 - RNA, 22 nt, Human
auuaaauuuucacuaggcuccc

SEQ ID NO: 798754 - RNA, 22 nt, Human
aguggggaagagcaugggcccu

SEQ ID NO: 798755 - RNA, 22 nt, Human
agggcccucuggcaggccaggc

SEQ ID NO: 798756 - RNA, 22 nt, Human
gagaggaacucccagugccugg

SEQ ID NO: 798757 - RNA, 22 nt, Human
gaggcucagagggagcaugguc

SEQ ID NO: 798758 - RNA, 22 nt, Human
aaaagacaggugucugcggccc

SEQ ID NO: 798759 - RNA, 22 nt, Human
cugucccuucccaagcccagcc

SEQ ID NO: 798760 - RNA, 22 nt, Human
uucccucccccagccuggcagg

SEQ ID NO: 798761 - RNA, 22 nt, Human
augagauuuuauagugucuuga

SEQ ID NO: 798762 - RNA, 22 nt, Human
ccuggccacccagccuuggcca

SEQ ID NO: 798763 - RNA, 22 nt, Human
ggagaaagggacugaucugcuc

SEQ ID NO: 798764 - RNA, 22 nt, Human
cagcagcaguggcugcagaaca

SEQ ID NO: 798765 - RNA, 22 nt, Human
ucagagaaaauggaaacuuuua

SEQ ID NO: 798766 - RNA, 22 nt, Human
cuucaaguccagcucaugcucu

SEQ ID NO: 798767 - RNA, 22 nt, Human
uuaguaauuagaaaguaauucu

SEQ ID NO: 798768 - RNA, 22 nt, Human
cagcuucuuagucuuuccuugu

SEQ ID NO: 798769 - RNA, 22 nt, Human
uugucugaagucacacagaugc

SEQ ID NO: 798770 - RNA, 22 nt, Human
uucacagugguagugcauuuag

SEQ ID NO: 798771 - RNA, 22 nt, Human
uaccagggaacagggauauuaa

SEQ ID NO: 798772 - RNA, 22 nt, Human
gcacacuggagccuggaagauu

SEQ ID NO: 798773 - RNA, 22 nt, Human
uggcuggaggcaugcaagcucc

SEQ ID NO: 798774 - RNA, 22 nt, Human
cacagcuuccauuagaaugaga

SEQ ID NO: 798775 - RNA, 22 nt, Human
ucagaaguuaauacgaggagaa

SEQ ID NO: 798776 - RNA, 22 nt, Human
gcuggcuggaaugggagaagaa

SEQ ID NO: 798777 - RNA, 22 nt, Human
agcagaaacagccagucuggac

SEQ ID NO: 798778 - RNA, 22 nt, Human
ggccuuggaaagauacccagcu

SEQ ID NO: 798779 - RNA, 22 nt, Human
cccagcauccucagggagcggg

SEQ ID NO: 798780 - RNA, 22 nt, Human
aggaaacaugaaucugccuuga

SEQ ID NO: 798781 - RNA, 22 nt, Human
cucuuugaaauccaucacugcu

SEQ ID NO: 798782 - RNA, 22 nt, Human
guacuaaacagagaaccaauau

SEQ ID NO: 798783 - RNA, 22 nt, Human
ucagagaaaggccaaaauauca

SEQ ID NO: 798784 - RNA, 22 nt, Human
gaaggcagggaauguggugcua

SEQ ID NO: 798785 - RNA, 22 nt, Human
uggauucucaugggaccaguag

SEQ ID NO: 798786 - RNA, 22 nt, Human
aggcucuggcaacagcuggugu

SEQ ID NO: 798787 - RNA, 22 nt, Human
auguuauuuauugaaacacuuu

SEQ ID NO: 798788 - RNA, 22 nt, Human
cacaggagaacccacagauucu

SEQ ID NO: 798789 - RNA, 22 nt, Human
gaaggcugagcagacaggccaa

SEQ ID NO: 798790 - RNA, 21 nt, Human
agcaauuuuuccuccucugca

SEQ ID NO: 798791 - RNA, 22 nt, Human
ucuuucaaugagcauucuuucc

SEQ ID NO: 798792 - RNA, 22 nt, Human
uguuuacuucaucgaguacuuc

SEQ ID NO: 798793 - RNA, 22 nt, Human
cagagggcuucagguucaggau

SEQ ID NO: 798794 - RNA, 22 nt, Human
ucuaguuuaagaucuguuaguc

SEQ ID NO: 798795 - RNA, 18 nt, Human
cugugggaagaguuuggg

SEQ ID NO: 798796 - RNA, 22 nt, Human
agagucaacaucgagccacugg

SEQ ID NO: 798797 - RNA, 22 nt, Human
gugcuggggguuucuguagguc

SEQ ID NO: 798798 - RNA, 22 nt, Human
ccugucucugcagggcccugcc

SEQ ID NO: 798799 - RNA, 21 nt, Human
aaggcuccuccucuaggccuc

SEQ ID NO: 798800 - RNA, 23 nt, Human
ucucaaaucuuugcguuguaucu

SEQ ID NO: 798801 - RNA, 22 nt, Human
uucuuucucaacaugaauguuu

SEQ ID NO: 798802 - RNA, 22 nt, Human
aaagccaggcagccaagccagu

SEQ ID NO: 798803 - RNA, 22 nt, Human
ugcauuaauuuuugccagguuc

SEQ ID NO: 798804 - RNA, 22 nt, Human
aagcaaaagguuacacuucugg

SEQ ID NO: 798805 - RNA, 22 nt, Human
acaaaugucuacauugagaaua

SEQ ID NO: 798806 - RNA, 22 nt, Human
aaccaguuuagucaugcuguaa

SEQ ID NO: 798807 - RNA, 22 nt, Human
cuggaggaaaacaacugcagac

SEQ ID NO: 798808 - RNA, 22 nt, Human
gcuuucccugcccucagaagga

SEQ ID NO: 798809 - RNA, 22 nt, Human
gccugcuggacauuggccggcc

SEQ ID NO: 798810 - RNA, 22 nt, Human
ccuggcagaauauuaaagugca

SEQ ID NO: 798811 - RNA, 22 nt, Human
uuacuucuugucucaugccuau

SEQ ID NO: 798812 - RNA, 22 nt, Human
agcugaaauuuuacugaguaua

SEQ ID NO: 798813 - RNA, 21 nt, Human
uuuaaagaauaggaagggagg

SEQ ID NO: 798814 - RNA, 16 nt, Human
agugggaggagaaaga

SEQ ID NO: 798815 - RNA, 22 nt, Human
ugucucccaggugugcccagug

SEQ ID NO: 798816 - RNA, 22 nt, Human
ucaaggaaugacuauaugagga

SEQ ID NO: 798817 - RNA, 22 nt, Human
uuauuuccucucuaauagggua

SEQ ID NO: 798818 - RNA, 20 nt, Human
caccuucaaauuuccuggca

SEQ ID NO: 798819 - RNA, 22 nt, Human
uuucuucucacccaggacagag

SEQ ID NO: 798820 - RNA, 22 nt, Human
guccuuggcauucugagucuug

SEQ ID NO: 798821 - RNA, 17 nt, Human
caguggcagaucuucuc

SEQ ID NO: 798822 - RNA, 22 nt, Human
uguguauuaauguuuguauaug

SEQ ID NO: 798823 - RNA, 22 nt, Human
auuuguuuaucgucgauuguag

SEQ ID NO: 798824 - RNA, 17 nt, Human
ccagaugcccugucucc

SEQ ID NO: 798825 - RNA, 21 nt, Human
uucugggccggagaaggggcg

SEQ ID NO: 798826 - RNA, 22 nt, Human
ggggcccagggcagcagugcag

SEQ ID NO: 798827 - RNA, 22 nt, Human
aaggcucuccaaaugauauaau

SEQ ID NO: 798828 - RNA, 22 nt, Human
gugggagaaauuagcucuaguu

SEQ ID NO: 798829 - RNA, 22 nt, Human
cugcagcuccuucuggcaugug

SEQ ID NO: 798830 - RNA, 22 nt, Human
uggccccugaggagcaucagcc

SEQ ID NO: 798831 - RNA, 22 nt, Human
ugagcauggugggugcagagca

SEQ ID NO: 798832 - RNA, 22 nt, Human
uuucaaagaguuguaaauuacu

SEQ ID NO: 798833 - RNA, 22 nt, Human
ggccugcacagagguggcucua

SEQ ID NO: 798834 - RNA, 22 nt, Human
uuucacauaucaacucuauccu

SEQ ID NO: 798835 - RNA, 22 nt, Human
cagcucuuuuuugcagcagcug

SEQ ID NO: 798836 - RNA, 22 nt, Human
auuuucacccugaauauauuga

SEQ ID NO: 798837 - RNA, 22 nt, Human
caggaaaugggucguuuuauaa

SEQ ID NO: 798838 - RNA, 22 nt, Human
auugcaaauaaugcgagccagu

SEQ ID NO: 798839 - RNA, 22 nt, Human
uuucuaagugugauuuuagauu

SEQ ID NO: 798840 - RNA, 22 nt, Human
auuuccauacacccauuucuga

SEQ ID NO: 798841 - RNA, 22 nt, Human
cacuucaaggaauaucuagaaa

SEQ ID NO: 798842 - RNA, 22 nt, Human
agcugagcugcagaugacugua

SEQ ID NO: 798843 - RNA, 22 nt, Human
uguuuacuuuccuucucacagg

SEQ ID NO: 798844 - RNA, 22 nt, Human
cugaguggaacauaggaugaua

SEQ ID NO: 798845 - RNA, 22 nt, Human
augugacuccaggcaguuuugu

SEQ ID NO: 798846 - RNA, 22 nt, Human
ugcauuuccagauuucuggagu

SEQ ID NO: 798847 - RNA, 22 nt, Human
cauuuacacuucuaaccacaag

SEQ ID NO: 798848 - RNA, 22 nt, Human
ucucacauuucauugacagcug

SEQ ID NO: 798849 - RNA, 22 nt, Human
cccaccacgugcuuugcuggag

SEQ ID NO: 798850 - RNA, 19 nt, Human
agagaggcugugugaggga

SEQ ID NO: 798851 - RNA, 22 nt, Human
agcaggguauguuagagcugua

SEQ ID NO: 798852 - RNA, 22 nt, Human
gaggcagugucgguggcaggau

SEQ ID NO: 798853 - RNA, 23 nt, Human
agucucaagcuggagaauuaccu

SEQ ID NO: 798854 - RNA, 22 nt, Human
uccagggaugccagccauguug

SEQ ID NO: 798855 - RNA, 22 nt, Human
aaagcaauggaugagaaucugu

SEQ ID NO: 798856 - RNA, 22 nt, Human
uggcagccuucucugagaaggu

SEQ ID NO: 798857 - RNA, 22 nt, Human
ucaggggcuugaggugcauguc

SEQ ID NO: 798858 - RNA, 22 nt, Human
uugguucauugcaggcgccggg

SEQ ID NO: 798859 - RNA, 22 nt, Human
ggcucagguuuaaagugcuuua

SEQ ID NO: 798860 - RNA, 20 nt, Human
aagcaauauagugcaaaugu

SEQ ID NO: 798861 - RNA, 22 nt, Human
uaagaaacuauugucucugaac

SEQ ID NO: 798862 - RNA, 22 nt, Human
caggucugcaggcuggagucca

SEQ ID NO: 798863 - RNA, 22 nt, Human
uuuacugagugaccuagaauaa

SEQ ID NO: 798864 - RNA, 22 nt, Human
ggugaaggucagagcaggaaaa

SEQ ID NO: 798865 - RNA, 22 nt, Human
uccaggaggugaggggaccaaa

SEQ ID NO: 798866 - RNA, 22 nt, Human
uacaucaagauaaaaacuguca

SEQ ID NO: 798867 - RNA, 22 nt, Human
gaggccucugucccaccaggga

SEQ ID NO: 798868 - RNA, 22 nt, Human
acuucacagauauuuauuuggu

SEQ ID NO: 798869 - RNA, 22 nt, Human
gcaaauucuuaacuggacugug

SEQ ID NO: 798870 - RNA, 22 nt, Human
ccugcugucaguggggcaggca

SEQ ID NO: 798871 - RNA, 22 nt, Human
aaauuuaaaaagcagcauugca

SEQ ID NO: 798872 - RNA, 22 nt, Human
aguccaaagcagaugagggcca

SEQ ID NO: 798873 - RNA, 22 nt, Human
ucauuuguuuagguagcaccau

SEQ ID NO: 798874 - RNA, 22 nt, Human
uacaaagugauuuuggaauuga

SEQ ID NO: 798875 - RNA, 22 nt, Human
ucccauauaugcaaaaauguaa

SEQ ID NO: 798876 - RNA, 22 nt, Human
aagccaaggagaauggccucag

SEQ ID NO: 798877 - RNA, 22 nt, Human
aaacugcaauuacuuuugcacc

SEQ ID NO: 798878 - RNA, 22 nt, Human
caggcagaagaaguggaaggac

SEQ ID NO: 798879 - RNA, 22 nt, Human
ucaugggguuuggcuggauguc

SEQ ID NO: 798880 - RNA, 22 nt, Human
cugccuggucucaggcaugggg

SEQ ID NO: 798881 - RNA, 22 nt, Human
uuagcuuucagccuuucucacc

SEQ ID NO: 798882 - RNA, 22 nt, Human
ucagugucccgucucuuaacuc

SEQ ID NO: 798883 - RNA, 22 nt, Human
gaguaaggcugcugauggagug

SEQ ID NO: 798884 - RNA, 22 nt, Human
acuggcagagggaaaaccauuc

SEQ ID NO: 798885 - RNA, 19 nt, Human
aaggaauggcuuuaaguag

SEQ ID NO: 798886 - RNA, 22 nt, Human
ucuucaggguaugggaaaggga

SEQ ID NO: 798887 - RNA, 22 nt, Human
aaagugcauuguuuguguuccu

SEQ ID NO: 798888 - RNA, 22 nt, Human
uacucauuucaaacagcacaaa

SEQ ID NO: 798889 - RNA, 22 nt, Human
gcaaacauuccacagaaggaag

SEQ ID NO: 798890 - RNA, 22 nt, Human
aaguccugccaccuauaagccu

SEQ ID NO: 798891 - RNA, 22 nt, Human
gagggagggaaaguuuaacacu

SEQ ID NO: 798892 - RNA, 22 nt, Human
uggcuggagagggucccaugag

SEQ ID NO: 798893 - RNA, 22 nt, Human
ugugauuauauuguaguacauu

SEQ ID NO: 798894 - RNA, 19 nt, Human
ucuuuagucacauuuuuau

SEQ ID NO: 798895 - RNA, 18 nt, Human
uguuuauucuccugacag

SEQ ID NO: 798896 - RNA, 21 nt, Human
uuccuggggacuuccguggga

SEQ ID NO: 798897 - RNA, 22 nt, Human
ucauuuuuugcauaccuguguc

SEQ ID NO: 798898 - RNA, 22 nt, Human
ugaaacaauuagaauguaauga

SEQ ID NO: 798899 - RNA, 22 nt, Human
agaacuuacauuauagagcugu

SEQ ID NO: 798900 - RNA, 22 nt, Human
cuccccacauuucucccugucu

SEQ ID NO: 798901 - RNA, 22 nt, Human
uauauuaaccauaggguucuag

SEQ ID NO: 798902 - RNA, 22 nt, Human
ugcaaauuucuuuaguacauaa

SEQ ID NO: 798903 - RNA, 22 nt, Human
auaauuuacaacugcuuuuaau

SEQ ID NO: 798904 - RNA, 22 nt, Human
agucaaauaagacugucauaag

SEQ ID NO: 798905 - RNA, 19 nt, Human
gcuugcugcuagguaggga

SEQ ID NO: 798906 - RNA, 22 nt, Human
cggcugagcagugcugauggaa

SEQ ID NO: 798907 - RNA, 22 nt, Human
cucucagggacccagccagccu

SEQ ID NO: 798908 - RNA, 22 nt, Human
gcaggagccaggccgagcuggu

SEQ ID NO: 798909 - RNA, 22 nt, Human
agccaggguaagguacuuagua

SEQ ID NO: 798910 - RNA, 22 nt, Human
cagggcaguuuuacuucucucu

SEQ ID NO: 798911 - RNA, 18 nt, Human
ggagcccacggcguccca

SEQ ID NO: 798912 - RNA, 21 nt, Human
uggcccuggccacggcugcca

SEQ ID NO: 798913 - RNA, 22 nt, Human
cuggcagguuuggugucuggug

SEQ ID NO: 798914 - RNA, 22 nt, Human
cagaagccugccucagaugcac

SEQ ID NO: 798915 - RNA, 22 nt, Human
cacauucaauuacacagauagg

SEQ ID NO: 798916 - RNA, 22 nt, Human
cagaggcugccagccaugugca

SEQ ID NO: 798917 - RNA, 22 nt, Human
uaagccauacauuucagacucu

SEQ ID NO: 798918 - RNA, 22 nt, Human
gcucccuguucucagccaugau

SEQ ID NO: 798919 - RNA, 22 nt, Human
gguccccguggaggcuggagcg

SEQ ID NO: 798920 - RNA, 22 nt, Human
aaaugcauuucacuaauguuuc

SEQ ID NO: 798921 - RNA, 22 nt, Human
acugcacuuacauagaggaggc

SEQ ID NO: 798922 - RNA, 22 nt, Human
aaaugugucauauucaaaguca

SEQ ID NO: 798923 - RNA, 22 nt, Human
caguacuuuucuggcuuucuac

SEQ ID NO: 798924 - RNA, 22 nt, Human
acacagggauauuucagguggu

SEQ ID NO: 798925 - RNA, 22 nt, Human
guucacauccuggcugugccac

SEQ ID NO: 798926 - RNA, 22 nt, Human
ccuggaaggacaauagauagug

SEQ ID NO: 798927 - RNA, 22 nt, Human
cugcccucccaguugguccgug

SEQ ID NO: 798928 - RNA, 22 nt, Human
uguuuacaaaaccgugguacug

SEQ ID NO: 798929 - RNA, 22 nt, Human
gaaagugcuuuugagugugugc

SEQ ID NO: 798930 - RNA, 22 nt, Human
aacauuaauuacagucaaacau

SEQ ID NO: 798931 - RNA, 22 nt, Human
agcaaggccgagaggaugcuau

SEQ ID NO: 798932 - RNA, 20 nt, Human
ggcaagcaacugagggagga

SEQ ID NO: 798933 - RNA, 22 nt, Human
uggugcugugauacgaggcacu

SEQ ID NO: 798934 - RNA, 22 nt, Human
ucacauuuguuccucugcacuu

SEQ ID NO: 798935 - RNA, 22 nt, Human
ccucugagaccagcucugcacc

SEQ ID NO: 798936 - RNA, 20 nt, Human
cuggguggcaagcaaggggg

SEQ ID NO: 798937 - RNA, 21 nt, Human
ugucagaaauaagcaugugau

SEQ ID NO: 798938 - RNA, 22 nt, Human
cugcagagcaugaggaggucug

SEQ ID NO: 798939 - RNA, 22 nt, Human
ugggagcaaaugacugggagau

SEQ ID NO: 798940 - RNA, 22 nt, Human
gcugccucccagagcccugcag

SEQ ID NO: 798941 - RNA, 22 nt, Human
ucucuaggcagugucagaauca

SEQ ID NO: 798942 - RNA, 22 nt, Human
aucccucucugcaugacugugu

SEQ ID NO: 798943 - RNA, 22 nt, Human
ugagccaggcucaagugauccu

SEQ ID NO: 798944 - RNA, 22 nt, Human
gggacacagagaaacuggagaa

SEQ ID NO: 798945 - RNA, 18 nt, Human
auccaaaaagauggaagu

SEQ ID NO: 798946 - RNA, 22 nt, Human
auacaaaguauuaauccuggau

SEQ ID NO: 798947 - RNA, 22 nt, Human
uccaugacuaggaaaccaguuu

SEQ ID NO: 798948 - RNA, 22 nt, Human
acagcacuuuacuucucaguga

SEQ ID NO: 798949 - RNA, 22 nt, Human
acuggcaggcugcuggccggcg

SEQ ID NO: 798950 - RNA, 22 nt, Human
cugacagcucuggcuaguagaa

SEQ ID NO: 798951 - RNA, 22 nt, Human
agggaagcugcuggguccaccu

SEQ ID NO: 798952 - RNA, 22 nt, Human
acugugagaguuuuucuaggag

SEQ ID NO: 798953 - RNA, 19 nt, Human
agccacagaacuugcagga

SEQ ID NO: 798954 - RNA, 22 nt, Human
uugacaaaacaacacagauuuc

SEQ ID NO: 798955 - RNA, 22 nt, Human
ggucccagaauugguuagcaca

SEQ ID NO: 798956 - RNA, 21 nt, Human
acagcagggcuggcaugacag

SEQ ID NO: 798957 - RNA, 22 nt, Human
uuugagaaggugacaaauucua

SEQ ID NO: 798958 - RNA, 22 nt, Human
ccagagguuccaggcuagggag

SEQ ID NO: 798959 - RNA, 22 nt, Human
gcgagugccgagagggcagggc

SEQ ID NO: 798960 - RNA, 22 nt, Human
ccucccucuuucagucccacag

SEQ ID NO: 798961 - RNA, 22 nt, Human
cccugcugcaggcuucaggagg

SEQ ID NO: 798962 - RNA, 22 nt, Human
ugcauuuuugagguuaacucaa

SEQ ID NO: 798963 - RNA, 22 nt, Human
caggaaauggcugaauaaauuc

SEQ ID NO: 798964 - RNA, 22 nt, Human
uggcucucagcucccagcagcc

SEQ ID NO: 798965 - RNA, 22 nt, Human
ggaaaucaaggggacaaauugu

SEQ ID NO: 798966 - RNA, 22 nt, Human
ccaaugaaaggucaauucuaua

SEQ ID NO: 798967 - RNA, 22 nt, Human
gcagggacuuuggcaacaggug

SEQ ID NO: 798968 - RNA, 22 nt, Human
gggcacagccuaacuauggaga

SEQ ID NO: 798969 - RNA, 22 nt, Human
agaaacagaagggaaagcuuuu

SEQ ID NO: 798970 - RNA, 22 nt, Human
gcugcugugccccaucugcaga

SEQ ID NO: 798971 - RNA, 22 nt, Human
ucugugcaccagaaugauauuu

SEQ ID NO: 798972 - RNA, 22 nt, Human
ucccagcaagaaaggggguggc

SEQ ID NO: 798973 - RNA, 22 nt, Human
agauggagaccuuggaugaacu

SEQ ID NO: 798974 - RNA, 22 nt, Human
cagaggcuaagaugagugggug

SEQ ID NO: 798975 - RNA, 22 nt, Human
ugacagagccaagaucaguacu

SEQ ID NO: 798976 - RNA, 22 nt, Human
auguacauucuucucaccgaag

SEQ ID NO: 798977 - RNA, 22 nt, Human
gucuuuagagcuccuggcaucu

SEQ ID NO: 798978 - RNA, 22 nt, Human
ccacauuuacuggaugcucagg

SEQ ID NO: 798979 - RNA, 22 nt, Human
aaggcccuuggaaaaugcagua

SEQ ID NO: 798980 - RNA, 22 nt, Human
uuaagcucucauuauuauuauu

SEQ ID NO: 798981 - RNA, 22 nt, Human
ucagaauauauucauguuguca

SEQ ID NO: 798982 - RNA, 22 nt, Human
ccaaagugcugagauuacaggu

SEQ ID NO: 798983 - RNA, 22 nt, Human
agggaagcagcagccgccuguc

SEQ ID NO: 798984 - RNA, 22 nt, Human
auucauaucauagaguuauuga

SEQ ID NO: 798985 - RNA, 22 nt, Human
acacauuuaaaaaggaacauau

SEQ ID NO: 798986 - RNA, 22 nt, Human
gcaagcaagcagguagagcuga

SEQ ID NO: 798987 - RNA, 23 nt, Human
gcucagagguuuuucucuggaug

SEQ ID NO: 798988 - RNA, 22 nt, Human
caaauuuagguaacagucugua

SEQ ID NO: 798989 - RNA, 19 nt, Human
gccucugcuggggacaggc

SEQ ID NO: 798990 - RNA, 22 nt, Human
gcccaagcuccgccuccugucg

SEQ ID NO: 798991 - RNA, 19 nt, Human
ucccaggcaaaggcuucuc

SEQ ID NO: 798992 - RNA, 22 nt, Human
uugucugacuucuuuaguuacu

SEQ ID NO: 798993 - RNA, 22 nt, Human
uauaagauacuuggcauagugc

SEQ ID NO: 798994 - RNA, 22 nt, Human
cuggcuggagcuguuguaggcu

SEQ ID NO: 798995 - RNA, 22 nt, Human
uacaacagaccuagaugaauga

SEQ ID NO: 798996 - RNA, 22 nt, Human
aguguucauuuauucauucacu

SEQ ID NO: 798997 - RNA, 22 nt, Human
agcugaaaggguguuggagugu

SEQ ID NO: 798998 - RNA, 22 nt, Human
gaaggaaaaauacucuguaagg

SEQ ID NO: 798999 - RNA, 22 nt, Human
uuuaucuuuggaucuucagaaa

SEQ ID NO: 799000 - RNA, 22 nt, Human
aaucaggacugugccaaaccua

SEQ ID NO: 799001 - RNA, 22 nt, Human
ucaauauagcaguguacuugag

SEQ ID NO: 799002 - RNA, 22 nt, Human
gaaauacaggaaugccacacag

SEQ ID NO: 799003 - RNA, 22 nt, Human
uuguauauauucuuaaagaugu

SEQ ID NO: 799004 - RNA, 22 nt, Human
ccuccugggagagcacggaggg

SEQ ID NO: 799005 - RNA, 22 nt, Human
cuggcagauagccacgccuguc

SEQ ID NO: 799006 - RNA, 22 nt, Human
ggcccacacugacagcugagcu

SEQ ID NO: 799007 - RNA, 22 nt, Human
gcucagagaaucagcagacacc

SEQ ID NO: 799008 - RNA, 22 nt, Human
aggcuguggcccuggucuagca

SEQ ID NO: 799009 - RNA, 22 nt, Human
uuugguuugccugaguacccuc

SEQ ID NO: 799010 - RNA, 22 nt, Human
cuggcuggggaagucauuugau

SEQ ID NO: 799011 - RNA, 22 nt, Human
uugcaaagagucauguaaguca

SEQ ID NO: 799012 - RNA, 22 nt, Human
ugcuggccucggcgcugggccu

SEQ ID NO: 799013 - RNA, 21 nt, Human
uuacuuuugcagcaaccuaau

SEQ ID NO: 799014 - RNA, 22 nt, Human
gccuuugaauuguuguggugag

SEQ ID NO: 799015 - RNA, 23 nt, Human
ccacucucccaccauaucuguau

SEQ ID NO: 799016 - RNA, 22 nt, Human
aaugcaagucaaugcuauaccc

SEQ ID NO: 799017 - RNA, 22 nt, Human
cucaggaguuggaggcuacagu

SEQ ID NO: 799018 - RNA, 22 nt, Human
ccuggcacauagugggcaugca

SEQ ID NO: 799019 - RNA, 22 nt, Human
cucugccaagaugacagguaag

SEQ ID NO: 799020 - RNA, 22 nt, Human
acauuucucccugcaugccugc

SEQ ID NO: 799021 - RNA, 22 nt, Human
augccaaauuucuuucuguucu

SEQ ID NO: 799022 - RNA, 22 nt, Human
ugccuucucuucccugggagcu

SEQ ID NO: 799023 - RNA, 22 nt, Human
aaaauaacuucuacuauuugca

SEQ ID NO: 799024 - RNA, 22 nt, Human
gaucugcacucugagaggcuug

SEQ ID NO: 799025 - RNA, 22 nt, Human
gugggggcuggcucguccugug

SEQ ID NO: 799026 - RNA, 22 nt, Human
agucucugcaugccugcugugc

SEQ ID NO: 799027 - RNA, 22 nt, Human
ucauuugggucaguuuuccaua

SEQ ID NO: 799028 - RNA, 22 nt, Human
caguaaaaauguugucaaggca

SEQ ID NO: 799029 - RNA, 22 nt, Human
ugugacuggcuuauuucacuua

SEQ ID NO: 799030 - RNA, 22 nt, Human
acuuuuaaggggccuugauuua

SEQ ID NO: 799031 - RNA, 22 nt, Human
ugcugccagccaggccauggag

SEQ ID NO: 799032 - RNA, 22 nt, Human
uuccagcuaacucacaucccuu

SEQ ID NO: 799033 - RNA, 22 nt, Human
gguggcagucuuaagagaucuu

SEQ ID NO: 799034 - RNA, 22 nt, Human
acuccuggugcugaugaagaga

SEQ ID NO: 799035 - RNA, 22 nt, Human
cugaagccaugugcucacuggu

SEQ ID NO: 799036 - RNA, 22 nt, Human
ugucugaauuuuggaaucaagu

SEQ ID NO: 799037 - RNA, 22 nt, Human
ugcagaagaccuuccagggcug

SEQ ID NO: 799038 - RNA, 22 nt, Human
gggcuggcugauuuuccucucu

SEQ ID NO: 799039 - RNA, 22 nt, Human
uucuaggaagggaagcauggca

SEQ ID NO: 799040 - RNA, 22 nt, Human
aggcuggccagugcugcagugg

SEQ ID NO: 799041 - RNA, 22 nt, Human
agccaggcagacucucuuucuu

SEQ ID NO: 799042 - RNA, 22 nt, Human
uucagaggggcuaaguacuugc

SEQ ID NO: 799043 - RNA, 22 nt, Human
guacaauuaagugcacaaauag

SEQ ID NO: 799044 - RNA, 22 nt, Human
ugcuuaaacccugaucaugugu

SEQ ID NO: 799045 - RNA, 22 nt, Human
gaacaacuccaagggacaucau

SEQ ID NO: 799046 - RNA, 22 nt, Human
gcuggcuuugcacugggugcau

SEQ ID NO: 799047 - RNA, 19 nt, Human
uccagcuguuuugagucac

SEQ ID NO: 799048 - RNA, 22 nt, Human
gccucugcgccucagccgaccu

SEQ ID NO: 799049 - RNA, 22 nt, Human
agcccagguugaggcugcagug

SEQ ID NO: 799050 - RNA, 23 nt, Human
agcaguaacuucagaaacaucag

SEQ ID NO: 799051 - RNA, 22 nt, Human
uuuuaaaggauacucuugucua

SEQ ID NO: 799052 - RNA, 22 nt, Human
agaagccaagaacagacagugc

SEQ ID NO: 799053 - RNA, 22 nt, Human
auugagaaugaagggacauuuu

SEQ ID NO: 799054 - RNA, 22 nt, Human
uagaaaagccccagcuggaggg

SEQ ID NO: 799055 - RNA, 22 nt, Human
auguauuugcgagguuaggaaa

SEQ ID NO: 799056 - RNA, 22 nt, Human
caggcaugggccaugggaagug

SEQ ID NO: 799057 - RNA, 22 nt, Human
uagaggaaauuuccaaggugag

SEQ ID NO: 799058 - RNA, 22 nt, Human
gugggcagaauugaaucuuuaa

SEQ ID NO: 799059 - RNA, 20 nt, Human
gggguuggcuggcacaggga

SEQ ID NO: 799060 - RNA, 22 nt, Human
aauugcauaaaauucaacucug

SEQ ID NO: 799061 - RNA, 22 nt, Human
aucuuaaacagaggaaugacuu

SEQ ID NO: 799062 - RNA, 22 nt, Human
ugcaggugugugcaagggaggg

SEQ ID NO: 799063 - RNA, 21 nt, Human
uucuccccagcgaauccucgg

SEQ ID NO: 799064 - RNA, 23 nt, Human
uagcaggcuuucuuuucucucac

SEQ ID NO: 799065 - RNA, 20 nt, Human
aauaaacuacugagagaugu

SEQ ID NO: 799066 - RNA, 22 nt, Human
cccagccugaucucggccagcu

SEQ ID NO: 799067 - RNA, 22 nt, Human
cuuccucccccacacacucacu

SEQ ID NO: 799068 - RNA, 22 nt, Human
gagguggcacugugaggagcac

SEQ ID NO: 799069 - RNA, 22 nt, Human
augaacaucucugauccaagca

SEQ ID NO: 799070 - RNA, 22 nt, Human
uaugaaauugccauuuuuaugg

SEQ ID NO: 799071 - RNA, 20 nt, Human
cagcaacuuuggacugaguu

SEQ ID NO: 799072 - RNA, 22 nt, Human
caguggcacuugucauuucuga

SEQ ID NO: 799073 - RNA, 22 nt, Human
gcuuaaaagccacuuagucuau

SEQ ID NO: 799074 - RNA, 22 nt, Human
ccuggcugccgagugugcagcg

SEQ ID NO: 799075 - RNA, 22 nt, Human
cccaggaguuggaggcuacggu

SEQ ID NO: 799076 - RNA, 22 nt, Human
aacuguggagauucggaaggua

SEQ ID NO: 799077 - RNA, 22 nt, Human
gagaaaccgauucugcauguca

SEQ ID NO: 799078 - RNA, 20 nt, Human
augcaaaucccaaaaucagg

SEQ ID NO: 799079 - RNA, 22 nt, Human
ugccagcuuuugacuaucuuag

SEQ ID NO: 799080 - RNA, 22 nt, Human
gcagggcucugcuguaguccua

SEQ ID NO: 799081 - RNA, 22 nt, Human
cagugggaagggcagaggcuuu

SEQ ID NO: 799082 - RNA, 22 nt, Human
ggcaggaauaaauuauggacuu

SEQ ID NO: 799083 - RNA, 22 nt, Human
ggggcagggagguuaucgccga

SEQ ID NO: 799084 - RNA, 20 nt, Human
cccagggaccugagcuccau

SEQ ID NO: 799085 - RNA, 21 nt, Human
acagaaguggcuuggucucag

SEQ ID NO: 799086 - RNA, 22 nt, Human
agggggcucagcauggauggag

SEQ ID NO: 799087 - RNA, 22 nt, Human
cagugccaugucugagccccua

SEQ ID NO: 799088 - RNA, 22 nt, Human
uugcuaaucauauuucaucacu

SEQ ID NO: 799089 - RNA, 22 nt, Human
aauaauguaggaugauaaauga

SEQ ID NO: 799090 - RNA, 19 nt, Human
gacaggaaggcuaccagua

SEQ ID NO: 799091 - RNA, 22 nt, Human
ucccagggacuggaugaugcag

SEQ ID NO: 799092 - RNA, 22 nt, Human
aggucagaugggagaugggaug

SEQ ID NO: 799093 - RNA, 22 nt, Human
gcaaaugcucuccuuggucagg

SEQ ID NO: 799094 - RNA, 22 nt, Human
cauuuauuaguuaguucgaugu

SEQ ID NO: 799095 - RNA, 22 nt, Human
ucagggaguguuggcaggauca

SEQ ID NO: 799096 - RNA, 22 nt, Human
ugcuauuauugucaccacugua

SEQ ID NO: 799097 - RNA, 22 nt, Human
gcuggccaaaguguaccuggag

SEQ ID NO: 799098 - RNA, 22 nt, Human
guguuaaugaaaaacaacucau

SEQ ID NO: 799099 - RNA, 22 nt, Human
ggacccagguagggaggaagau

SEQ ID NO: 799100 - RNA, 22 nt, Human
agugcugggauuacaggcauaa

SEQ ID NO: 799101 - RNA, 22 nt, Human
agugcugggauugcaggcauga

SEQ ID NO: 799102 - RNA, 22 nt, Human
ucaaaguaccagagugaacuga

SEQ ID NO: 799103 - RNA, 22 nt, Human
auuucuguauccugcugucaga

SEQ ID NO: 799104 - RNA, 22 nt, Human
ggcaagagugaggagugucucu

SEQ ID NO: 799105 - RNA, 22 nt, Human
gccacagcggggccgcuagagc

SEQ ID NO: 799106 - RNA, 22 nt, Human
uaggauuuacuuugacaauauu

SEQ ID NO: 799107 - RNA, 22 nt, Human
cccaggaguaagugacauuguu

SEQ ID NO: 799108 - RNA, 19 nt, Human
acucaagucuaaugaaauc

SEQ ID NO: 799109 - RNA, 20 nt, Human
gcccacucuaauccacuguc

SEQ ID NO: 799110 - RNA, 22 nt, Human
uguuucaaaacagugauaauuu

SEQ ID NO: 799111 - RNA, 22 nt, Human
uugcaaauauuccccuaggucu

SEQ ID NO: 799112 - RNA, 22 nt, Human
acagucuugcacuucuaucagc

SEQ ID NO: 799113 - RNA, 22 nt, Human
uggcacauagaaaaggaucaau

SEQ ID NO: 799114 - RNA, 22 nt, Human
uucuuuuaaugucuggcuuuca

SEQ ID NO: 799115 - RNA, 22 nt, Human
uaaggaaaguacauguuuugac

SEQ ID NO: 799116 - RNA, 22 nt, Human
ucucaaauguaaagcaugauuu

SEQ ID NO: 799117 - RNA, 22 nt, Human
cugaggcuaaccucgagagaca

SEQ ID NO: 799118 - RNA, 22 nt, Human
aggcagugagaaauagcaagau

SEQ ID NO: 799119 - RNA, 22 nt, Human
cagguccucugagaugggaggu

SEQ ID NO: 799120 - RNA, 22 nt, Human
gcugcaggggggucuggacuug

SEQ ID NO: 799121 - RNA, 22 nt, Human
uguucuggcuccuuuuaaaugu

SEQ ID NO: 799122 - RNA, 22 nt, Human
uucuuacaucuauaaaguuggg

SEQ ID NO: 799123 - RNA, 22 nt, Human
auccaauuacguuuuuugucau

SEQ ID NO: 799124 - RNA, 22 nt, Human
aaacaagagucuugcuccaccu

SEQ ID NO: 799125 - RNA, 21 nt, Human
ucuuuuaacaccaggaauucc

SEQ ID NO: 799126 - RNA, 22 nt, Human
cucagucaugacgcucaggacc

SEQ ID NO: 799127 - RNA, 22 nt, Human
uaggacagagcugguuacaaug

SEQ ID NO: 799128 - RNA, 22 nt, Human
uucugaaaauugggucauacuu

SEQ ID NO: 799129 - RNA, 22 nt, Human
gagaaacuuggaguuauucugg

SEQ ID NO: 799130 - RNA, 22 nt, Human
agcugaaauucuuuguccucag

SEQ ID NO: 799131 - RNA, 22 nt, Human
cucagugucuuauuugaguucu

SEQ ID NO: 799132 - RNA, 22 nt, Human
gcuucccacagcuggacugggg

SEQ ID NO: 799133 - RNA, 18 nt, Human
uggagcaggaagccuggc

SEQ ID NO: 799134 - RNA, 22 nt, Human
cuucagaacuauaaaaaguacu

SEQ ID NO: 799135 - RNA, 22 nt, Human
ugacaucauuggccauugggga

SEQ ID NO: 799136 - RNA, 22 nt, Human
aaucuauaugcuuuucacauac

SEQ ID NO: 799137 - RNA, 22 nt, Human
ucugggcugucuacagguuggc

SEQ ID NO: 799138 - RNA, 22 nt, Human
cagggcaguaccgcccucuggc

SEQ ID NO: 799139 - RNA, 22 nt, Human
aaauaacuuucuguguauaguc

SEQ ID NO: 799140 - RNA, 20 nt, Human
agugggagagggcagacugc

SEQ ID NO: 799141 - RNA, 22 nt, Human
ucuuggccagguguggugccuc

SEQ ID NO: 799142 - RNA, 22 nt, Human
auaaaaguaggaccaacuuaca

SEQ ID NO: 799143 - RNA, 20 nt, Human
acauuuuggcauacucucaa

SEQ ID NO: 799144 - RNA, 23 nt, Human
agagcuuucuaaaauguaaaucu

SEQ ID NO: 799145 - RNA, 22 nt, Human
aaugauauuuauugaauagaug

SEQ ID NO: 799146 - RNA, 22 nt, Human
auuccaaacuuaccccagagga

SEQ ID NO: 799147 - RNA, 22 nt, Human
gagaaggcugauccuuggaguu

SEQ ID NO: 799148 - RNA, 22 nt, Human
acauaccaucuccuggaaagcu

SEQ ID NO: 799149 - RNA, 22 nt, Human
cucuccccacacccucugcaug

SEQ ID NO: 799150 - RNA, 22 nt, Human
cauccagaccgugccaugcugc

SEQ ID NO: 799151 - RNA, 20 nt, Human
ugccuggccuuucucugccc

SEQ ID NO: 799152 - RNA, 22 nt, Human
gcagggcuggguccugucucau

SEQ ID NO: 799153 - RNA, 22 nt, Human
cagggcuuuguaauaugagcac

SEQ ID NO: 799154 - RNA, 22 nt, Human
agguguggcuggggcagaggcc

SEQ ID NO: 799155 - RNA, 22 nt, Human
uggcccugcacccagagcaguu

SEQ ID NO: 799156 - RNA, 22 nt, Human
uggcuggcugucaaggaaagcc

SEQ ID NO: 799157 - RNA, 22 nt, Human
uggcagccuggaaucucucagc

SEQ ID NO: 799158 - RNA, 22 nt, Human
ucuucaauuuagaauggauuua

SEQ ID NO: 799159 - RNA, 21 nt, Human
aaacugaccuugccugagaca

SEQ ID NO: 799160 - RNA, 22 nt, Human
gaaugauauuauuucgugcugg

SEQ ID NO: 799161 - RNA, 22 nt, Human
uuucagaauagcaaagcaagcu

SEQ ID NO: 799162 - RNA, 22 nt, Human
uagggggcuuugcugcuugaca

SEQ ID NO: 799163 - RNA, 22 nt, Human
accuuaaaacugacacauggag

SEQ ID NO: 799164 - RNA, 22 nt, Human
gaggcucaacccacagggguug

SEQ ID NO: 799165 - RNA, 23 nt, Human
ccaguuuaucuuuaguguagauc

SEQ ID NO: 799166 - RNA, 22 nt, Human
cugcaccacagccugaggcagc

SEQ ID NO: 799167 - RNA, 22 nt, Human
ucuggaguaugugugaacggug

SEQ ID NO: 799168 - RNA, 18 nt, Human
agucuuuauuucuuucau

SEQ ID NO: 799169 - RNA, 22 nt, Human
cauaacauugagcagcauuccu

SEQ ID NO: 799170 - RNA, 22 nt, Human
uguauuaugauuguuguucaug

SEQ ID NO: 799171 - RNA, 21 nt, Human
ggagcuggggagcuggcccca

SEQ ID NO: 799172 - RNA, 22 nt, Human
uacauuuccugucagagauaua

SEQ ID NO: 799173 - RNA, 22 nt, Human
uggcagcaugucccggccucag

SEQ ID NO: 799174 - RNA, 22 nt, Human
uagcuuugcaaaggaaguuuua

SEQ ID NO: 799175 - RNA, 19 nt, Human
caggaacauggagggaggg

SEQ ID NO: 799176 - RNA, 22 nt, Human
cugggacccccacugcguagcu

SEQ ID NO: 799177 - RNA, 17 nt, Human
uccagagaggcuucccu

SEQ ID NO: 799178 - RNA, 22 nt, Human
cccagccucuggauucugcccu

SEQ ID NO: 799179 - RNA, 22 nt, Human
agagcccugccaauggaugagg

SEQ ID NO: 799180 - RNA, 22 nt, Human
auguucugaauaaugugcauua

SEQ ID NO: 799181 - RNA, 21 nt, Human
aagaggucaaauuauaaaugg

SEQ ID NO: 799182 - RNA, 22 nt, Human
uaucaggaauugaauggcuuca

SEQ ID NO: 799183 - RNA, 22 nt, Human
uuacuugacauaaaugaguuua

SEQ ID NO: 799184 - RNA, 22 nt, Human
ucuggagaggggccuagaauuu

SEQ ID NO: 799185 - RNA, 22 nt, Human
acauauaagggaucagugacag

SEQ ID NO: 799186 - RNA, 22 nt, Human
guuuucagccaggagcacauuu

SEQ ID NO: 799187 - RNA, 22 nt, Human
ugcuucuuuacuauaggcaauu

SEQ ID NO: 799188 - RNA, 22 nt, Human
gugacucuuaccuacccagccu

SEQ ID NO: 799189 - RNA, 22 nt, Human
gaaaagggcaagagagagggca

SEQ ID NO: 799190 - RNA, 22 nt, Human
agccaaauacaaacuggggugg

SEQ ID NO: 799191 - RNA, 22 nt, Human
guuacaauguccuuacaugaaa

SEQ ID NO: 799192 - RNA, 22 nt, Human
gaugauuacacuuuuaaaacag

SEQ ID NO: 799193 - RNA, 22 nt, Human
auuauuuuaugugcggccugau

SEQ ID NO: 799194 - RNA, 22 nt, Human
cacagcugccauggcugcacuu

SEQ ID NO: 799195 - RNA, 22 nt, Human
gcauggcaagacccugucucua

SEQ ID NO: 799196 - RNA, 22 nt, Human
uccagagagguuucuccaugcu

SEQ ID NO: 799197 - RNA, 22 nt, Human
acuggcugaguugcuucagcaa

SEQ ID NO: 799198 - RNA, 23 nt, Human
agggcccaagccuggacagcagg

SEQ ID NO: 799199 - RNA, 22 nt, Human
gcagcuggggaggucgugggga

SEQ ID NO: 799200 - RNA, 22 nt, Human
ugagcagggagcugggcugagc

SEQ ID NO: 799201 - RNA, 22 nt, Human
aauaccuugcucauagggcuga

SEQ ID NO: 799202 - RNA, 22 nt, Human
agucucuuucuaaauaagguca

SEQ ID NO: 799203 - RNA, 22 nt, Human
uuauuauuccccaagucauuau

SEQ ID NO: 799204 - RNA, 22 nt, Human
guggcucuccauugacauggaa

SEQ ID NO: 799205 - RNA, 22 nt, Human
aaggcaauguuagcaacauaau

SEQ ID NO: 799206 - RNA, 21 nt, Human
agcugggccucagccugcagu

SEQ ID NO: 799207 - RNA, 22 nt, Human
cccagaaggcuaagcguggauu

SEQ ID NO: 799208 - RNA, 22 nt, Human
uuuguacauauaaaucuuguau

SEQ ID NO: 799209 - RNA, 22 nt, Human
uggacaggaucugagacugaga

SEQ ID NO: 799210 - RNA, 22 nt, Human
agaaggggcccaaggaugucag

SEQ ID NO: 799211 - RNA, 22 nt, Human
caguccugagcuccugggcuga

SEQ ID NO: 799212 - RNA, 17 nt, Human
ugguggcuggagucagg

SEQ ID NO: 799213 - RNA, 22 nt, Human
uaaggaaaauggacaucaaaca

SEQ ID NO: 799214 - RNA, 22 nt, Human
cagcuuugucauuugauuuggg

SEQ ID NO: 799215 - RNA, 22 nt, Human
aggaggccgauuucagaggucg

SEQ ID NO: 799216 - RNA, 22 nt, Human
gcuggagugaugccugugucuc

SEQ ID NO: 799217 - RNA, 22 nt, Human
gaaagugccucaguccucuuau

SEQ ID NO: 799218 - RNA, 22 nt, Human
ggguggugggcacagaaucugg

SEQ ID NO: 799219 - RNA, 22 nt, Human
uuucuacagaagauacacugcu

SEQ ID NO: 799220 - RNA, 22 nt, Human
acuuuggcacagaacuuccauu

SEQ ID NO: 799221 - RNA, 22 nt, Human
gagggcaggggucuugcacggu

SEQ ID NO: 799222 - RNA, 18 nt, Human
uaagucauuuugccagca

SEQ ID NO: 799223 - RNA, 22 nt, Human
cacuugaagugaauugcucacc

SEQ ID NO: 799224 - RNA, 22 nt, Human
agaggagguccuuuucugaugu

SEQ ID NO: 799225 - RNA, 22 nt, Human
ggaaggggagcuggaaagggua

SEQ ID NO: 799226 - RNA, 22 nt, Human
agaaagagcucgggauuaacag

SEQ ID NO: 799227 - RNA, 22 nt, Human
gccuggggcaugcagcugauac

SEQ ID NO: 799228 - RNA, 22 nt, Human
uauacagauaucuaagauguaa

SEQ ID NO: 799229 - RNA, 22 nt, Human
cccuccccacaaagcuucacac

SEQ ID NO: 799230 - RNA, 22 nt, Human
ccuggcaguggugaagaagagg

SEQ ID NO: 799231 - RNA, 22 nt, Human
caauaaagaagauuuuugcaau

SEQ ID NO: 799232 - RNA, 22 nt, Human
uggccagcccucuucccacacu

SEQ ID NO: 799233 - RNA, 22 nt, Human
uauauagaaaagcagauguugg

SEQ ID NO: 799234 - RNA, 22 nt, Human
aucaguguuucaaauguaaucu

SEQ ID NO: 799235 - RNA, 22 nt, Human
uuaaacauuuuugaugaucgau

SEQ ID NO: 799236 - RNA, 22 nt, Human
caagccauauuuugaagaauga

SEQ ID NO: 799237 - RNA, 22 nt, Human
aggcuggugauuagaagcagcc

SEQ ID NO: 799238 - RNA, 22 nt, Human
uugcauuuugguuguaaauaug

SEQ ID NO: 799239 - RNA, 22 nt, Human
uaucuuuagaggaagagaaucu

SEQ ID NO: 799240 - RNA, 22 nt, Human
agcuggagccagugugaggcuu

SEQ ID NO: 799241 - RNA, 19 nt, Human
ugguggaggugcaccugac

SEQ ID NO: 799242 - RNA, 22 nt, Human
accaugucauuuauuggccaaa

SEQ ID NO: 799243 - RNA, 22 nt, Human
uuguauuucuuccggucucauu

SEQ ID NO: 799244 - RNA, 22 nt, Human
caguucucuugaucgucucuug

SEQ ID NO: 799245 - RNA, 22 nt, Human
gggcaauggaugugaugacucc

SEQ ID NO: 799246 - RNA, 22 nt, Human
ucccagcauuaaugccugucag

SEQ ID NO: 799247 - RNA, 22 nt, Human
cugggccagggaggugucugua

SEQ ID NO: 799248 - RNA, 22 nt, Human
uucuuugugcauccaauuuucu

SEQ ID NO: 799249 - RNA, 22 nt, Human
gcaggcacuccuaggaccauca

SEQ ID NO: 799250 - RNA, 22 nt, Human
ggcugcagauagccagccacca

SEQ ID NO: 799251 - RNA, 22 nt, Human
acucagagaauaucuagaagga

SEQ ID NO: 799252 - RNA, 22 nt, Human
gcuggcagccaagugaagaggg

SEQ ID NO: 799253 - RNA, 22 nt, Human
uaaggaaagugccaugauuucu

SEQ ID NO: 799254 - RNA, 22 nt, Human
gagagcccuuagguuuagaguu

SEQ ID NO: 799255 - RNA, 22 nt, Human
ggccagcccagugguccucucu

SEQ ID NO: 799256 - RNA, 22 nt, Human
acauaagugcacaauaaauauu

SEQ ID NO: 799257 - RNA, 22 nt, Human
ccagcugugccuaggagcaggg

SEQ ID NO: 799258 - RNA, 22 nt, Human
agucuucuugaucuuuucagug

SEQ ID NO: 799259 - RNA, 22 nt, Human
guccagccaggcugcagcaccc

SEQ ID NO: 799260 - RNA, 22 nt, Human
uuauuaaucuuaucuuuggaaa

SEQ ID NO: 799261 - RNA, 22 nt, Human
ccagucagggcaggagccuggu

SEQ ID NO: 799262 - RNA, 22 nt, Human
uauuuguagaauggauuaaggg

SEQ ID NO: 799263 - RNA, 22 nt, Human
acugcuuuagaccuagagcucu

SEQ ID NO: 799264 - RNA, 15 nt, Human
aaagugcacccaaua

SEQ ID NO: 799265 - RNA, 22 nt, Human
uacauucugguggagaaaguaa

SEQ ID NO: 799266 - RNA, 22 nt, Human
auuauucauggucuuccacaau

SEQ ID NO: 799267 - RNA, 22 nt, Human
cucagggacguuagaggacagg

SEQ ID NO: 799268 - RNA, 20 nt, Human
ucaggcaguggggaaaggca

SEQ ID NO: 799269 - RNA, 22 nt, Human
auauuuugguagcucucaauga

SEQ ID NO: 799270 - RNA, 22 nt, Human
accuuaaacuuuacagccaagu

SEQ ID NO: 799271 - RNA, 22 nt, Human
cucaaauauaagcuaaaugugg

SEQ ID NO: 799272 - RNA, 20 nt, Human
uggagucugacagaugggua

SEQ ID NO: 799273 - RNA, 22 nt, Human
aaaaaccuuucauugcaaaugu

SEQ ID NO: 799274 - RNA, 22 nt, Human
gagcucagcccaaagagcagug

SEQ ID NO: 799275 - RNA, 22 nt, Human
cuggagggagauucaaaggagg

SEQ ID NO: 799276 - RNA, 22 nt, Human
agcuggcuuugagcugggaggu

SEQ ID NO: 799277 - RNA, 22 nt, Human
cuggcucugugggaccuggccu

SEQ ID NO: 799278 - RNA, 22 nt, Human
aacacaggggcguggcucuuac

SEQ ID NO: 799279 - RNA, 22 nt, Human
gcagugcuaaguagcuggccca

SEQ ID NO: 799280 - RNA, 22 nt, Human
aauuucuguaugaauagagaaa

SEQ ID NO: 799281 - RNA, 22 nt, Human
uuugacaugugcuuauaacuuu

SEQ ID NO: 799282 - RNA, 22 nt, Human
acauuuuacaguugucuggcua

SEQ ID NO: 799283 - RNA, 22 nt, Human
agaacaaugcguauuuuacucc

SEQ ID NO: 799284 - RNA, 22 nt, Human
uaggaaauugccaauauaugac

SEQ ID NO: 799285 - RNA, 22 nt, Human
aggccuggccccaguugcuagg

SEQ ID NO: 799286 - RNA, 22 nt, Human
aaaauucauggcuugggaaaag

SEQ ID NO: 799287 - RNA, 22 nt, Human
cgcugggggaacuucagccaau

SEQ ID NO: 799288 - RNA, 22 nt, Human
cuuccuaaaagcuucaagagaa

SEQ ID NO: 799289 - RNA, 22 nt, Human
acccaggcgggagugcaguguc

SEQ ID NO: 799290 - RNA, 22 nt, Human
ggcugccucagauuugcugacu

SEQ ID NO: 799291 - RNA, 22 nt, Human
ccuggccaggcauggagucaca

SEQ ID NO: 799292 - RNA, 22 nt, Human
gcauagcuguuaauuugguuuc

SEQ ID NO: 799293 - RNA, 22 nt, Human
uuggagucauuggccuggguga

SEQ ID NO: 799294 - RNA, 22 nt, Human
aggcacagcacaccuggccccc

SEQ ID NO: 799295 - RNA, 22 nt, Human
uugauuucaaaauauaugcuug

SEQ ID NO: 799296 - RNA, 22 nt, Human
gggcugugaggugagaacuuac

SEQ ID NO: 799297 - RNA, 22 nt, Human
guacaauuauuuaaauggugaa

SEQ ID NO: 799298 - RNA, 22 nt, Human
gcugggucuggaugcucaggug

SEQ ID NO: 799299 - RNA, 22 nt, Human
gggcugagagcuggaaucugag

SEQ ID NO: 799300 - RNA, 22 nt, Human
gaauaauauugacuuugcaggc

SEQ ID NO: 799301 - RNA, 22 nt, Human
uguccaggucagcagcagggac

SEQ ID NO: 799302 - RNA, 22 nt, Human
agccagagauugagaugcaggc

SEQ ID NO: 799303 - RNA, 22 nt, Human
uuauggcuuaaauacuacaggg

SEQ ID NO: 799304 - RNA, 22 nt, Human
gaggcugguucugaaguacugu

SEQ ID NO: 799305 - RNA, 22 nt, Human
agcaggagaacacuguggcucu

SEQ ID NO: 799306 - RNA, 22 nt, Human
gugcagcugugguggagccagg

SEQ ID NO: 799307 - RNA, 22 nt, Human
uuguauuaauugaaaugaaugc

SEQ ID NO: 799308 - RNA, 22 nt, Human
uugcaaaugaccauugccacau

SEQ ID NO: 799309 - RNA, 22 nt, Human
cuuaauuucaaacugcuaguga

SEQ ID NO: 799310 - RNA, 22 nt, Human
acaaaccagcuuaagcaagaug

SEQ ID NO: 799311 - RNA, 22 nt, Human
ucacagagaaauguggcacaaa

SEQ ID NO: 799312 - RNA, 22 nt, Human
uuugucaucaguuauuaauaug

SEQ ID NO: 799313 - RNA, 22 nt, Human
guggucaggggcuguggcuaug

SEQ ID NO: 799314 - RNA, 22 nt, Human
ucaggaaaguguucucagagga

SEQ ID NO: 799315 - RNA, 22 nt, Human
uguuuucauuugauguaacaaa

SEQ ID NO: 799316 - RNA, 22 nt, Human
cccaggcagugcugaucccuca

SEQ ID NO: 799317 - RNA, 22 nt, Human
aucauuuaaaacaagucucuau

SEQ ID NO: 799318 - RNA, 22 nt, Human
ggaagaggaggagccaggcuuu

SEQ ID NO: 799319 - RNA, 22 nt, Human
gccuccugagaagccacaggcu

SEQ ID NO: 799320 - RNA, 22 nt, Human
cagagccaaaccucagggcccg

SEQ ID NO: 799321 - RNA, 22 nt, Human
uuucccaagaaaaauaauugga

SEQ ID NO: 799322 - RNA, 22 nt, Human
agaacacacugggggaaacaag

SEQ ID NO: 799323 - RNA, 20 nt, Human
ucuuaaauccccagggccau

SEQ ID NO: 799324 - RNA, 22 nt, Human
uacaaaguaauguauaauaucg

SEQ ID NO: 799325 - RNA, 22 nt, Human
aucacacagagcauuaggggcc

SEQ ID NO: 799326 - RNA, 22 nt, Human
uuucuuuguaguagcauaauca

SEQ ID NO: 799327 - RNA, 22 nt, Human
aagcugccuuccaugugaggaa

SEQ ID NO: 799328 - RNA, 22 nt, Human
gucaacuuuuucauagcucugc

SEQ ID NO: 799329 - RNA, 22 nt, Human
cauggccagcccugagguucag

SEQ ID NO: 799330 - RNA, 22 nt, Human
ccuccuggaaaaauucccuggc

SEQ ID NO: 799331 - RNA, 22 nt, Human
aguggcagagccaggguuggga

SEQ ID NO: 799332 - RNA, 22 nt, Human
uaacacauagauauuuuaacuu

SEQ ID NO: 799333 - RNA, 22 nt, Human
uggcuucuagagcccauccuuc

SEQ ID NO: 799334 - RNA, 22 nt, Human
acaggacaacucagcagccagc

SEQ ID NO: 799335 - RNA, 22 nt, Human
aaacugcaauuauguuugcaga

SEQ ID NO: 799336 - RNA, 22 nt, Human
uucuggagaggaacagaaaggu

SEQ ID NO: 799337 - RNA, 22 nt, Human
uggccaguguuggcuagggaca

SEQ ID NO: 799338 - RNA, 22 nt, Human
gugggcagcaccagggaagugu

SEQ ID NO: 799339 - RNA, 22 nt, Human
ucacaauucagaaaccaaguag

SEQ ID NO: 799340 - RNA, 22 nt, Human
aggaggcuguggagcacuccau

SEQ ID NO: 799341 - RNA, 22 nt, Human
gcacuguucucagagcauuaga

SEQ ID NO: 799342 - RNA, 22 nt, Human
caucacagaaauaaacauaccu

SEQ ID NO: 799343 - RNA, 22 nt, Human
gaaagugcuaggaaguguuaga

SEQ ID NO: 799344 - RNA, 22 nt, Human
auugauucuguaagucaacaau

SEQ ID NO: 799345 - RNA, 22 nt, Human
agccagcuggugggucagcugg

SEQ ID NO: 799346 - RNA, 22 nt, Human
aauauguuccacuuaaagcugg

SEQ ID NO: 799347 - RNA, 22 nt, Human
gccacccugacgccgcagaccc

SEQ ID NO: 799348 - RNA, 22 nt, Human
uuccaggaggagguacuagagg

SEQ ID NO: 799349 - RNA, 22 nt, Human
agcuggaggaguuucuccuagc

SEQ ID NO: 799350 - RNA, 22 nt, Human
ucccaggcuaggccucugcguu

SEQ ID NO: 799351 - RNA, 22 nt, Human
caggcagcagaggaguguggga

SEQ ID NO: 799352 - RNA, 22 nt, Human
auguggcuagugcaacugagaa

SEQ ID NO: 799353 - RNA, 22 nt, Human
augccaaaauguuacauuucuu

SEQ ID NO: 799354 - RNA, 22 nt, Human
ucagcugaaguggagaagcaga

SEQ ID NO: 799355 - RNA, 22 nt, Human
ugccuggcaccccagucugcac

SEQ ID NO: 799356 - RNA, 22 nt, Human
ggcuggcucuuaccgacagcgu

SEQ ID NO: 799357 - RNA, 22 nt, Human
aaugacaauaaucauuaacuuu

SEQ ID NO: 799358 - RNA, 22 nt, Human
cacucugugauugcagcauucc

SEQ ID NO: 799359 - RNA, 22 nt, Human
uugacaauguccuuugaauuuc

SEQ ID NO: 799360 - RNA, 22 nt, Human
agcucuuuugcucuccaaguuu

SEQ ID NO: 799361 - RNA, 22 nt, Human
uucacuauaaaguuucaacuuu

SEQ ID NO: 799362 - RNA, 22 nt, Human
ucuuccaaaugaauaugguuuu

SEQ ID NO: 799363 - RNA, 22 nt, Human
gaguccuguaacuuucuuccua

SEQ ID NO: 799364 - RNA, 22 nt, Human
ccucacccacuacacucaaggg

SEQ ID NO: 799365 - RNA, 22 nt, Human
acuuucaagaacuucuuuaaug

SEQ ID NO: 799366 - RNA, 17 nt, Human
aguguucuggguugccc

SEQ ID NO: 799367 - RNA, 22 nt, Human
ggcaggcagauggcugcaccaa

SEQ ID NO: 799368 - RNA, 22 nt, Human
agugucaacugucuacagggag

SEQ ID NO: 799369 - RNA, 22 nt, Human
gagcccagcugcggcccucagc

SEQ ID NO: 799370 - RNA, 22 nt, Human
aauugagaugacagaggaauag

SEQ ID NO: 799371 - RNA, 22 nt, Human
aaucacaucacugagaaugagg

SEQ ID NO: 799372 - RNA, 22 nt, Human
ucugcagcuucuugccagagag

SEQ ID NO: 799373 - RNA, 22 nt, Human
cuggccaggcggccccugcaug

SEQ ID NO: 799374 - RNA, 22 nt, Human
ugcagagguuugugguguugcu

SEQ ID NO: 799375 - RNA, 22 nt, Human
caggaaggggcucacucuggcc

SEQ ID NO: 799376 - RNA, 22 nt, Human
agagagcaguggaucaccuagc

SEQ ID NO: 799377 - RNA, 18 nt, Human
gugggguguugugaggau

SEQ ID NO: 799378 - RNA, 22 nt, Human
agcagcuggggccugugacgau

SEQ ID NO: 799379 - RNA, 23 nt, Human
ugagaaauuuugauucaguagga

SEQ ID NO: 799380 - RNA, 22 nt, Human
uuuccugugcuuaacaaauauu

SEQ ID NO: 799381 - RNA, 22 nt, Human
ccaggcccguucccuucuccag

SEQ ID NO: 799382 - RNA, 22 nt, Human
uaggaaauuuauagagguguuu

SEQ ID NO: 799383 - RNA, 20 nt, Human
aacuuguuuuguuuucuaau

SEQ ID NO: 799384 - RNA, 22 nt, Human
agccuggaguucccaggagaag

SEQ ID NO: 799385 - RNA, 22 nt, Human
cccaggugcugaaggaggccgc

SEQ ID NO: 799386 - RNA, 22 nt, Human
agagccaggccaggccggggca

SEQ ID NO: 799387 - RNA, 22 nt, Human
uuuuuaagagucuggaaauagu

SEQ ID NO: 799388 - RNA, 22 nt, Human
guccuuggagucaggcaaggcu

SEQ ID NO: 799389 - RNA, 22 nt, Human
ugcagcagagugggccugggug

SEQ ID NO: 799390 - RNA, 22 nt, Human
acagcuucacccauuaucccug

SEQ ID NO: 799391 - RNA, 22 nt, Human
acccaggcuagggugcaguggc

SEQ ID NO: 799392 - RNA, 22 nt, Human
aucaaauauaauaauuuucgcu

SEQ ID NO: 799393 - RNA, 22 nt, Human
ccauuuaacacagaguuuucca

SEQ ID NO: 799394 - RNA, 22 nt, Human
aagucagaccuuguugauagcu

SEQ ID NO: 799395 - RNA, 22 nt, Human
cagggcucuuccggagcaggga

SEQ ID NO: 799396 - RNA, 22 nt, Human
aaagauuaaaucaaauugguca

SEQ ID NO: 799397 - RNA, 22 nt, Human
uuuugggugaauuugccaguua

SEQ ID NO: 799398 - RNA, 22 nt, Human
cuggccucuguguucaccauag

SEQ ID NO: 799399 - RNA, 22 nt, Human
cucccugcuuguuucccuucag

SEQ ID NO: 799400 - RNA, 22 nt, Human
acaguauaccauugugacuuug

SEQ ID NO: 799401 - RNA, 22 nt, Human
agcacagagguggaaguguaua

SEQ ID NO: 799402 - RNA, 22 nt, Human
cacugaggcuuccuuaggcaau

SEQ ID NO: 799403 - RNA, 22 nt, Human
acucugccaucccaggugcugu

SEQ ID NO: 799404 - RNA, 22 nt, Human
ucuaaacagccucuuaccaacu

SEQ ID NO: 799405 - RNA, 22 nt, Human
aaaagcacuacaauuucgcuuc

SEQ ID NO: 799406 - RNA, 22 nt, Human
ccaggcuguaagagugauguug

SEQ ID NO: 799407 - RNA, 23 nt, Human
uggcucugagagguucagaugcu

SEQ ID NO: 799408 - RNA, 22 nt, Human
gaggcccaguccugcaagcacg

SEQ ID NO: 799409 - RNA, 22 nt, Human
acacagggcggaaagcaugaga

SEQ ID NO: 799410 - RNA, 22 nt, Human
aggcuggcgucaggggcuguac

SEQ ID NO: 799411 - RNA, 22 nt, Human
ugcaggugaaaauuaugaggau

SEQ ID NO: 799412 - RNA, 22 nt, Human
aggguggggugcuacaucuuua

SEQ ID NO: 799413 - RNA, 22 nt, Human
uguguuuuccagaaugguguuu

SEQ ID NO: 799414 - RNA, 17 nt, Human
uuuguucauugaagaga

SEQ ID NO: 799415 - RNA, 22 nt, Human
uaggacaggugaggggcugugg

SEQ ID NO: 799416 - RNA, 22 nt, Human
caccccaaguucuguccacugc

SEQ ID NO: 799417 - RNA, 22 nt, Human
aaauuuuaaggcuggaacuuaa

SEQ ID NO: 799418 - RNA, 22 nt, Human
auuguaaaaguauucuaagauu

SEQ ID NO: 799419 - RNA, 22 nt, Human
ucagaaggaugugcagguggca

SEQ ID NO: 799420 - RNA, 22 nt, Human
ggggugaguuagcgucggcuug

SEQ ID NO: 799421 - RNA, 22 nt, Human
aaggccagggaugccagcucgg

SEQ ID NO: 799422 - RNA, 22 nt, Human
uugauuaaaaugagacaucauu

SEQ ID NO: 799423 - RNA, 20 nt, Human
cagauaaacgggaaagaagc

SEQ ID NO: 799424 - RNA, 22 nt, Human
guucagugccaguucuaagacu

SEQ ID NO: 799425 - RNA, 22 nt, Human
gccugccaguguuugaggauug

SEQ ID NO: 799426 - RNA, 22 nt, Human
ugagccugggagauggaggcug

SEQ ID NO: 799427 - RNA, 22 nt, Human
caugcagguuauaugugcuucu

SEQ ID NO: 799428 - RNA, 22 nt, Human
aaaacucugcaguuaguuucua

SEQ ID NO: 799429 - RNA, 22 nt, Human
uuggugaacacauacacauuuu

SEQ ID NO: 799430 - RNA, 22 nt, Human
cagcugggugaucuugggcagg

SEQ ID NO: 799431 - RNA, 22 nt, Human
uggcuuccaguaaucaggauuu

SEQ ID NO: 799432 - RNA, 22 nt, Human
ccaaggcuggagugcaguggcg

SEQ ID NO: 799433 - RNA, 22 nt, Human
cccagggaggcccaggcucugc

SEQ ID NO: 799434 - RNA, 22 nt, Human
gggaccaggugggugcauuccg

SEQ ID NO: 799435 - RNA, 22 nt, Human
uccagcagugcucaggacucac

SEQ ID NO: 799436 - RNA, 22 nt, Human
uguacaaauucauugaacugua

SEQ ID NO: 799437 - RNA, 22 nt, Human
uagugcuuauuacugugcuguc

SEQ ID NO: 799438 - RNA, 22 nt, Human
cuggcccauggugagcucuggg

SEQ ID NO: 799439 - RNA, 22 nt, Human
cagggugcauacccaugcauac

SEQ ID NO: 799440 - RNA, 22 nt, Human
agauauaauaauuuacaagugu

SEQ ID NO: 799441 - RNA, 22 nt, Human
uucuuguuuauuaagauauaaa

SEQ ID NO: 799442 - RNA, 22 nt, Human
aggcugugaacucuaugcugaa

SEQ ID NO: 799443 - RNA, 19 nt, Human
ggccaggcugacugugguc

SEQ ID NO: 799444 - RNA, 22 nt, Human
guggguggaucaccugagguca

SEQ ID NO: 799445 - RNA, 22 nt, Human
cucccaggguagggagagacua

SEQ ID NO: 799446 - RNA, 22 nt, Human
guccccagaaaggugaggcagg

SEQ ID NO: 799447 - RNA, 22 nt, Human
ugaggcaggacauggacaacug

SEQ ID NO: 799448 - RNA, 22 nt, Human
auauaacucuuguucuuauagu

SEQ ID NO: 799449 - RNA, 22 nt, Human
ggggccagcaauguugaggaau

SEQ ID NO: 799450 - RNA, 22 nt, Human
aguuuuucuccccuggcuucau

SEQ ID NO: 799451 - RNA, 22 nt, Human
gugucugaguuuggaaagucca

SEQ ID NO: 799452 - RNA, 22 nt, Human
gguuaaaacugauauuaugggu

SEQ ID NO: 799453 - RNA, 22 nt, Human
gguuaaaaauaauuuacuuggc

SEQ ID NO: 799454 - RNA, 22 nt, Human
cuguggcuaugguguacauacu

SEQ ID NO: 799455 - RNA, 22 nt, Human
guguggggucuucucuuggccu

SEQ ID NO: 799456 - RNA, 22 nt, Human
ccagaacacaguggaagaauau

SEQ ID NO: 799457 - RNA, 17 nt, Human
aagauuucauuagcuga

SEQ ID NO: 799458 - RNA, 22 nt, Human
agcucaggcucugcagggacua

SEQ ID NO: 799459 - RNA, 22 nt, Human
ucaggcugauaggaggaacuga

SEQ ID NO: 799460 - RNA, 22 nt, Human
ucaggaaagguuuguugaaugg

SEQ ID NO: 799461 - RNA, 22 nt, Human
ggcccagccuugggguuucuuu

SEQ ID NO: 799462 - RNA, 22 nt, Human
aaguuauaucaucucauugacg

SEQ ID NO: 799463 - RNA, 22 nt, Human
caggaggacauacuggcucaca

SEQ ID NO: 799464 - RNA, 22 nt, Human
aucuuuggguacaaacuugccu

SEQ ID NO: 799465 - RNA, 20 nt, Human
ucucccugcccaucucagau

SEQ ID NO: 799466 - RNA, 22 nt, Human
aaggcagauauaaagacuagag

SEQ ID NO: 799467 - RNA, 22 nt, Human
auuucucaucuuugugaauggu

SEQ ID NO: 799468 - RNA, 22 nt, Human
agaggcuguuacacucccagau

SEQ ID NO: 799469 - RNA, 22 nt, Human
uggaaauaugcuccauucuuuu

SEQ ID NO: 799470 - RNA, 22 nt, Human
caauaacuaguaauuauuccgg

SEQ ID NO: 799471 - RNA, 22 nt, Human
cuccaggauguuagacguccag

SEQ ID NO: 799472 - RNA, 22 nt, Human
agaaagcacucugucuuuuacc

SEQ ID NO: 799473 - RNA, 22 nt, Human
caagacaagaucuaagcaugcu

SEQ ID NO: 799474 - RNA, 20 nt, Human
uugauucaagggcugaugga

SEQ ID NO: 799475 - RNA, 22 nt, Human
uaaaaagcagcugagauuuucu

SEQ ID NO: 799476 - RNA, 22 nt, Human
cacaugggugugccuggaggaa

SEQ ID NO: 799477 - RNA, 22 nt, Human
gcaguccucucauuggccuccu

SEQ ID NO: 799478 - RNA, 22 nt, Human
ucccuccuggccgucaccgcug

SEQ ID NO: 799479 - RNA, 19 nt, Human
cacagugcagccauuucuc

SEQ ID NO: 799480 - RNA, 20 nt, Human
ggcagggcaucaacagcucu

SEQ ID NO: 799481 - RNA, 23 nt, Human
uagcagcauuuuuagccucuguc

SEQ ID NO: 799482 - RNA, 22 nt, Human
aguuuuaucuguaagcuguuca

SEQ ID NO: 799483 - RNA, 22 nt, Human
acugccuguuuggcauggcccc

SEQ ID NO: 799484 - RNA, 22 nt, Human
ucuggcugggaagggggcccga

SEQ ID NO: 799485 - RNA, 22 nt, Human
aagcacaauuuaggacugaaau

SEQ ID NO: 799486 - RNA, 22 nt, Human
cuucaguguugguucauuacga

SEQ ID NO: 799487 - RNA, 22 nt, Human
cuggcaaguacugggccagcuc

SEQ ID NO: 799488 - RNA, 22 nt, Human
acagggcaccugagguaggaag

SEQ ID NO: 799489 - RNA, 22 nt, Human
acccaggcuagaagugaauuau

SEQ ID NO: 799490 - RNA, 22 nt, Human
gaggcucccuuuagguccagau

SEQ ID NO: 799491 - RNA, 22 nt, Human
ggggaggaguguacagguuuau

SEQ ID NO: 799492 - RNA, 22 nt, Human
cagcccugcugacacugucuga

SEQ ID NO: 799493 - RNA, 22 nt, Human
ccaugcaagaaguccaaccauc

SEQ ID NO: 799494 - RNA, 22 nt, Human
ugcauuaagggccuggagauac

SEQ ID NO: 799495 - RNA, 22 nt, Human
gaggcuggggucugccuuucug

SEQ ID NO: 799496 - RNA, 22 nt, Human
ugggaacucucugggaggcauc

SEQ ID NO: 799497 - RNA, 22 nt, Human
cugggccuccagcucugccagc

SEQ ID NO: 799498 - RNA, 20 nt, Human
agguggcuccugcugggggu

SEQ ID NO: 799499 - RNA, 22 nt, Human
cacagaaaaaggcuugaaaauc

SEQ ID NO: 799500 - RNA, 22 nt, Human
uccauauacaacuuaaucuuua

SEQ ID NO: 799501 - RNA, 22 nt, Human
ccaggcugggcggggaaccugg

SEQ ID NO: 799502 - RNA, 22 nt, Human
aaugcucuuuaaccuauucuga

SEQ ID NO: 799503 - RNA, 22 nt, Human
cugugacuugccaaaggucauu

SEQ ID NO: 799504 - RNA, 22 nt, Human
guggaugagauaacuguagaag

SEQ ID NO: 799505 - RNA, 22 nt, Human
ugcaggcugccuucacagagcc

SEQ ID NO: 799506 - RNA, 22 nt, Human
aaggaagagucuagaacaggca

SEQ ID NO: 799507 - RNA, 22 nt, Human
ucuguaggguaguaguggagau

SEQ ID NO: 799508 - RNA, 22 nt, Human
aaaggcagugugauacuguggu

SEQ ID NO: 799509 - RNA, 22 nt, Human
gucuucuguuuacuuugaaguu

SEQ ID NO: 799510 - RNA, 22 nt, Human
uucaagucauguuaacugcuuc

SEQ ID NO: 799511 - RNA, 22 nt, Human
gggcuuggcacaugggcucagc

SEQ ID NO: 799512 - RNA, 22 nt, Human
aacauaagggagcuucaaaacu

SEQ ID NO: 799513 - RNA, 22 nt, Human
uaucucuuuauugacaauaaaa

SEQ ID NO: 799514 - RNA, 22 nt, Human
cuggagggauguaggguguauu

SEQ ID NO: 799515 - RNA, 22 nt, Human
uauuaaauguuauuuggguugu

SEQ ID NO: 799516 - RNA, 22 nt, Human
gcaaagugcuucagugggagcu

SEQ ID NO: 799517 - RNA, 22 nt, Human
ggcugguguuacagucggcagc

SEQ ID NO: 799518 - RNA, 22 nt, Human
gcuggcugugauuuugccaaca

SEQ ID NO: 799519 - RNA, 22 nt, Human
aggcagcauuucugcuuaucca

SEQ ID NO: 799520 - RNA, 22 nt, Human
cuugccaaugguacaaacgauu

SEQ ID NO: 799521 - RNA, 22 nt, Human
agcaggguuccaggaguugcag

SEQ ID NO: 799522 - RNA, 22 nt, Human
gcacuugugacaguuccuggca

SEQ ID NO: 799523 - RNA, 22 nt, Human
cccaggagagaggccaguuggc

SEQ ID NO: 799524 - RNA, 22 nt, Human
aggcgcugugcuuggggcugga

SEQ ID NO: 799525 - RNA, 22 nt, Human
uccaggaguggggcagaggucu

SEQ ID NO: 799526 - RNA, 22 nt, Human
uagucacaaccuucaaguuguc

SEQ ID NO: 799527 - RNA, 21 nt, Human
ucacaggcucagggagagagu

SEQ ID NO: 799528 - RNA, 22 nt, Human
cagcagugucuccagcaucaca

SEQ ID NO: 799529 - RNA, 22 nt, Human
ugcaaggguguuugagcugccc

SEQ ID NO: 799530 - RNA, 22 nt, Human
uuuaaaagggguauuaagucca

SEQ ID NO: 799531 - RNA, 22 nt, Human
ugguauaagcugugucagagcc

SEQ ID NO: 799532 - RNA, 22 nt, Human
gcuucccaaacuuguggauaga

SEQ ID NO: 799533 - RNA, 22 nt, Human
cagagaaagggugaauuccuuc

SEQ ID NO: 799534 - RNA, 22 nt, Human
aaauuacagaucaccaaugcau

SEQ ID NO: 799535 - RNA, 22 nt, Human
ggcacuggaaggaucaugugag

SEQ ID NO: 799536 - RNA, 22 nt, Human
aucaguguaccuuauggauuuu

SEQ ID NO: 799537 - RNA, 22 nt, Human
uauucacaugaaaacaaauuuu

SEQ ID NO: 799538 - RNA, 22 nt, Human
caaacauagugaagcaaugaca

SEQ ID NO: 799539 - RNA, 23 nt, Human
gcuucccagacaauacugcuucc

SEQ ID NO: 799540 - RNA, 22 nt, Human
uggcccgaccucugcucaugca

SEQ ID NO: 799541 - RNA, 22 nt, Human
gcgucucaaggcccccaggcca

SEQ ID NO: 799542 - RNA, 22 nt, Human
gucaguguuauaaguuuagcca

SEQ ID NO: 799543 - RNA, 22 nt, Human
ugccucauuaacuguccuuaau

SEQ ID NO: 799544 - RNA, 22 nt, Human
gcuucccaggcgccugaccuuu

SEQ ID NO: 799545 - RNA, 22 nt, Human
aaaauucucuugaucuugacag

SEQ ID NO: 799546 - RNA, 23 nt, Human
uggccacaguccaugcaugccca

SEQ ID NO: 799547 - RNA, 22 nt, Human
aagcagaauuuaauagaaaggu

SEQ ID NO: 799548 - RNA, 22 nt, Human
cuggcugguccucggggacagc

SEQ ID NO: 799549 - RNA, 22 nt, Human
ucagaggcuugaagcccaagcc

SEQ ID NO: 799550 - RNA, 22 nt, Human
aagcuucuuagaaugcaugugc

SEQ ID NO: 799551 - RNA, 22 nt, Human
uggccaugacauggaggcuuug

SEQ ID NO: 799552 - RNA, 22 nt, Human
aauagcaaaguuaucaaauuaa

SEQ ID NO: 799553 - RNA, 19 nt, Human
gcaggguguugacuguccc

SEQ ID NO: 799554 - RNA, 22 nt, Human
aucuacaggcugaggugggagg

SEQ ID NO: 799555 - RNA, 17 nt, Human
cucugcagugcauggcu

SEQ ID NO: 799556 - RNA, 22 nt, Human
ggcccagcccgagucagccuuc

SEQ ID NO: 799557 - RNA, 18 nt, Human
uccagucccaaggccagc

SEQ ID NO: 799558 - RNA, 22 nt, Human
cagugagguggauggauggccu

SEQ ID NO: 799559 - RNA, 22 nt, Human
ucacagaguuaaaaguuucuuu

SEQ ID NO: 799560 - RNA, 22 nt, Human
gcuggcugccaauuucagagcu

SEQ ID NO: 799561 - RNA, 22 nt, Human
aacugcaaagccaaucucagga

SEQ ID NO: 799562 - RNA, 23 nt, Human
cacggcagccuccgagggugcug

SEQ ID NO: 799563 - RNA, 22 nt, Human
uacagcaaugcuacaagaugac

SEQ ID NO: 799564 - RNA, 19 nt, Human
cccaggguuuccucucucc

SEQ ID NO: 799565 - RNA, 22 nt, Human
gcaugcaggaagggcuugggga

SEQ ID NO: 799566 - RNA, 22 nt, Human
cacacagguaagccucuuucaa

SEQ ID NO: 799567 - RNA, 22 nt, Human
gccuguggccgacugagagccu

SEQ ID NO: 799568 - RNA, 22 nt, Human
uuuaaauuuagaagaaacacug

SEQ ID NO: 799569 - RNA, 22 nt, Human
uugacacagaucaauauucaac

SEQ ID NO: 799570 - RNA, 22 nt, Human
ugauucaagccaccacauacug

SEQ ID NO: 799571 - RNA, 22 nt, Human
aaagguuuugcccuggguauuc

SEQ ID NO: 799572 - RNA, 21 nt, Human
aagcaggcuguaaucaugugg

SEQ ID NO: 799573 - RNA, 22 nt, Human
gucaggagauagggcaagcuuc

SEQ ID NO: 799574 - RNA, 22 nt, Human
acauacacaagcguacaugaac

SEQ ID NO: 799575 - RNA, 22 nt, Human
caggagcuucugcccauggcca

SEQ ID NO: 799576 - RNA, 22 nt, Human
aggcugggaaauguagucuucc

SEQ ID NO: 799577 - RNA, 22 nt, Human
cugcuggacuacaggaagaguu

SEQ ID NO: 799578 - RNA, 22 nt, Human
agcugccaggccccugagaacc

SEQ ID NO: 799579 - RNA, 23 nt, Human
ugccagaggcagucacaguggug

SEQ ID NO: 799580 - RNA, 22 nt, Human
gcagaaggucaaagcaagaugu

SEQ ID NO: 799581 - RNA, 22 nt, Human
aucugguucuucuuaggcauca

SEQ ID NO: 799582 - RNA, 22 nt, Human
accucucaggucuuccucauau

SEQ ID NO: 799583 - RNA, 22 nt, Human
ggagccauguuuucagcaugau

SEQ ID NO: 799584 - RNA, 22 nt, Human
ugauaaacauuuuaggaacuaa

SEQ ID NO: 799585 - RNA, 22 nt, Human
agcaggcugagcacccaggggg

SEQ ID NO: 799586 - RNA, 22 nt, Human
agccucucuuuauucccagcua

SEQ ID NO: 799587 - RNA, 22 nt, Human
ugggaaaguguugaggugucuu

SEQ ID NO: 799588 - RNA, 21 nt, Human
uguggcagagacaaugcuagu

SEQ ID NO: 799589 - RNA, 22 nt, Human
ucugcaagauggucuuagaggu

SEQ ID NO: 799590 - RNA, 22 nt, Human
uuguaaauaguaguaagaugcc

SEQ ID NO: 799591 - RNA, 17 nt, Human
agaaaagagaccagcag

SEQ ID NO: 799592 - RNA, 22 nt, Human
gugccagccuggugcgccuggg

SEQ ID NO: 799593 - RNA, 22 nt, Human
uccucagggaagaugagccuca

SEQ ID NO: 799594 - RNA, 22 nt, Human
cucagacuugcuuuuuauggaa

SEQ ID NO: 799595 - RNA, 22 nt, Human
uguuuuaaucucccauugcucu

SEQ ID NO: 799596 - RNA, 22 nt, Human
ucacugaagacugggcucuaaa

SEQ ID NO: 799597 - RNA, 22 nt, Human
ccucaaaucuuuagaguuauuu

SEQ ID NO: 799598 - RNA, 22 nt, Human
uguagauguagacacaggucua

SEQ ID NO: 799599 - RNA, 22 nt, Human
guaguucugcagugucaccuga

SEQ ID NO: 799600 - RNA, 22 nt, Human
uuggcuugaugacuggcagugu

SEQ ID NO: 799601 - RNA, 23 nt, Human
agcugggaauuuucugaagcuuu

SEQ ID NO: 799602 - RNA, 22 nt, Human
uagugucagggagugauaaaug

SEQ ID NO: 799603 - RNA, 22 nt, Human
uugacacauuagagcuuguaaa

SEQ ID NO: 799604 - RNA, 22 nt, Human
caagucaacucaaauuguuauc

SEQ ID NO: 799605 - RNA, 22 nt, Human
agggugcauguuugcaagagug

SEQ ID NO: 799606 - RNA, 22 nt, Human
ugauucaagcuacuguuacugg

SEQ ID NO: 799607 - RNA, 22 nt, Human
aaucuagagugcuaggucugug

SEQ ID NO: 799608 - RNA, 22 nt, Human
gaguaguugcugcagagaauac

SEQ ID NO: 799609 - RNA, 22 nt, Human
ugcuauuagaagccaugcuguu

SEQ ID NO: 799610 - RNA, 18 nt, Human
aggagccuuugcacugga

SEQ ID NO: 799611 - RNA, 22 nt, Human
gcuuggcuggaaauagguugag

SEQ ID NO: 799612 - RNA, 22 nt, Human
acucuugauugauuuagucuuu

SEQ ID NO: 799613 - RNA, 22 nt, Human
aauaagaauuuacuugucaaga

SEQ ID NO: 799614 - RNA, 22 nt, Human
gaggcagagacuccaccuucag

SEQ ID NO: 799615 - RNA, 22 nt, Human
ugcagcugcuugauucaucuug

SEQ ID NO: 799616 - RNA, 22 nt, Human
ucacaucauuaagacuucuccu

SEQ ID NO: 799617 - RNA, 22 nt, Human
uugcuuuauguguaugacuuga

SEQ ID NO: 799618 - RNA, 22 nt, Human
uuggagauaucacaccuucaca

SEQ ID NO: 799619 - RNA, 22 nt, Human
caacagagagaccagaaacagg

SEQ ID NO: 799620 - RNA, 22 nt, Human
aaauugcagaugcuaaaugacu

SEQ ID NO: 799621 - RNA, 22 nt, Human
uccaggaggccucauuuccugu

SEQ ID NO: 799622 - RNA, 22 nt, Human
cccuggaggcaaagguugcagu

SEQ ID NO: 799623 - RNA, 23 nt, Human
gacagggcugacuuggcagcugc

SEQ ID NO: 799624 - RNA, 22 nt, Human
agaggccaggcagcccaaggug

SEQ ID NO: 799625 - RNA, 22 nt, Human
cucugcacuguccggcuuucuu

SEQ ID NO: 799626 - RNA, 17 nt, Human
ggcagccucaggcguuu

SEQ ID NO: 799627 - RNA, 22 nt, Human
uugcaaauguuucauaacagua

SEQ ID NO: 799628 - RNA, 22 nt, Human
cuuaaggcuucagcacagguau

SEQ ID NO: 799629 - RNA, 22 nt, Human
ugguaagaauaggggcuuugga

SEQ ID NO: 799630 - RNA, 22 nt, Human
ggcuggacauagacauagccau

SEQ ID NO: 799631 - RNA, 22 nt, Human
gcacacagacuaaccauauuuc

SEQ ID NO: 799632 - RNA, 22 nt, Human
ucuagaaucuaaacuauaguuu

SEQ ID NO: 799633 - RNA, 22 nt, Human
gcuggcaggauagaagucuaau

SEQ ID NO: 799634 - RNA, 22 nt, Human
cacagggcuuugauggcugagu

SEQ ID NO: 799635 - RNA, 22 nt, Human
gaagacauguggauucuaguuu

SEQ ID NO: 799636 - RNA, 22 nt, Human
gcugggaaccaugggaaggcag

SEQ ID NO: 799637 - RNA, 22 nt, Human
uccugccuguuuaccuguacuu

SEQ ID NO: 799638 - RNA, 22 nt, Human
acauuccucagugccaguugag

SEQ ID NO: 799639 - RNA, 22 nt, Human
uaugacuuauuucaucaguucu

SEQ ID NO: 799640 - RNA, 22 nt, Human
acagcuuagccagucaagcucu

SEQ ID NO: 799641 - RNA, 22 nt, Human
uuucagagaugucuagccuauu

SEQ ID NO: 799642 - RNA, 22 nt, Human
uuucuuccuaaauaugauuucc

SEQ ID NO: 799643 - RNA, 22 nt, Human
uucagggacuuagugucaguuu

SEQ ID NO: 799644 - RNA, 22 nt, Human
gucuucauucaacaaauauuca

SEQ ID NO: 799645 - RNA, 22 nt, Human
cugugcaguccagcccuggaca

SEQ ID NO: 799646 - RNA, 22 nt, Human
agugccaagguauuaauuuaua

SEQ ID NO: 799647 - RNA, 22 nt, Human
uuuacacuugaggaaacugagg

SEQ ID NO: 799648 - RNA, 22 nt, Human
gcagaaacuuggagaagccagg

SEQ ID NO: 799649 - RNA, 19 nt, Human
cucucacucgccacauccu

SEQ ID NO: 799650 - RNA, 19 nt, Human
agggaaggauucugucauu

SEQ ID NO: 799651 - RNA, 22 nt, Human
aucagaauaauuagauuucaga

SEQ ID NO: 799652 - RNA, 22 nt, Human
gcugcagcaagcccuccagggg

SEQ ID NO: 799653 - RNA, 22 nt, Human
aggcccuguuaugagccacugu

SEQ ID NO: 799654 - RNA, 22 nt, Human
cacuauaugccuuugaaauaca

SEQ ID NO: 799655 - RNA, 22 nt, Human
ucuggcuguuaggccugaccuu

SEQ ID NO: 799656 - RNA, 22 nt, Human
gcuggcuggaugguugguucgc

SEQ ID NO: 799657 - RNA, 22 nt, Human
agcagggaggucuagcacgugg

SEQ ID NO: 799658 - RNA, 22 nt, Human
agcaccuggagggcugggaccu

SEQ ID NO: 799659 - RNA, 22 nt, Human
acaugcaauauugagacuuucu

SEQ ID NO: 799660 - RNA, 22 nt, Human
cugaagcuuaguuuacgcucca

SEQ ID NO: 799661 - RNA, 19 nt, Human
uucauucuuucuacuuacc

SEQ ID NO: 799662 - RNA, 22 nt, Human
gcuggaguuguggguuuacuaa

SEQ ID NO: 799663 - RNA, 22 nt, Human
cagccucugacaccacagucgu

SEQ ID NO: 799664 - RNA, 22 nt, Human
cccugaggcugaggauaggugg

SEQ ID NO: 799665 - RNA, 22 nt, Human
ccuggcucuucugugucagccc

SEQ ID NO: 799666 - RNA, 22 nt, Human
uuccaaaguuauucaagcagua

SEQ ID NO: 799667 - RNA, 22 nt, Human
gaggcagagguuguugcaguga

SEQ ID NO: 799668 - RNA, 22 nt, Human
caaaacuaucaggcucaaagcu

SEQ ID NO: 799669 - RNA, 23 nt, Human
uuuauuuauuuaggcugagggau

SEQ ID NO: 799670 - RNA, 22 nt, Human
agaguacacuguacacacaauu

SEQ ID NO: 799671 - RNA, 23 nt, Human
ucagagaaguuguaggcugggga

SEQ ID NO: 799672 - RNA, 22 nt, Human
acagcaguggauuagaggaugg

SEQ ID NO: 799673 - RNA, 18 nt, Human
uacuguuuaauugauuac

SEQ ID NO: 799674 - RNA, 22 nt, Human
gcugccauguugugaggacacu

SEQ ID NO: 799675 - RNA, 21 nt, Human
ugagagaguagcaggacauau

SEQ ID NO: 799676 - RNA, 22 nt, Human
auuugucaauaagaugaacaua

SEQ ID NO: 799677 - RNA, 22 nt, Human
gagcuggccgcagagagggcag

SEQ ID NO: 799678 - RNA, 22 nt, Human
gacaguaagguggcuucuucuu

SEQ ID NO: 799679 - RNA, 22 nt, Human
uaauuauucuagucacauagca

SEQ ID NO: 799680 - RNA, 22 nt, Human
aucugcacuuaagcgaggccug

SEQ ID NO: 799681 - RNA, 22 nt, Human
acccaggguagagugcaguggc

SEQ ID NO: 799682 - RNA, 22 nt, Human
ggcucugcuucagaaggcucau

SEQ ID NO: 799683 - RNA, 22 nt, Human
gggagcauuuauuuuccguuag

SEQ ID NO: 799684 - RNA, 22 nt, Human
gacaucaauucagcauuuuaag

SEQ ID NO: 799685 - RNA, 22 nt, Human
agcagggcagcuuuuuucagaa

SEQ ID NO: 799686 - RNA, 22 nt, Human
caggaaauauaggaaaaggaac

SEQ ID NO: 799687 - RNA, 22 nt, Human
cagaagcaagggccaaagucuu

SEQ ID NO: 799688 - RNA, 22 nt, Human
agccucugguccucccucagcu

SEQ ID NO: 799689 - RNA, 22 nt, Human
ugauuguaugauugaaauauuu

SEQ ID NO: 799690 - RNA, 19 nt, Human
aggugugggggcugcagac

SEQ ID NO: 799691 - RNA, 22 nt, Human
aaggccagaguacuagaggcug

SEQ ID NO: 799692 - RNA, 22 nt, Human
uugcauuacauuugcucagucu

SEQ ID NO: 799693 - RNA, 22 nt, Human
ugacuuugugccauuuuuauaa

SEQ ID NO: 799694 - RNA, 22 nt, Human
ggguccagacacuccagaggaa

SEQ ID NO: 799695 - RNA, 22 nt, Human
cauuucauuccuuugaaagugg

SEQ ID NO: 799696 - RNA, 22 nt, Human
cagcagccucuugugccugugg

SEQ ID NO: 799697 - RNA, 22 nt, Human
gagcagcugcagugcagacccu

SEQ ID NO: 799698 - RNA, 18 nt, Human
aagcacagguguuucagg

SEQ ID NO: 799699 - RNA, 22 nt, Human
gccagcuguaagcuggggugau

SEQ ID NO: 799700 - RNA, 22 nt, Human
acucaugauaugccuauaagau

SEQ ID NO: 799701 - RNA, 22 nt, Human
cuguguuucuaaguaaaggagc

SEQ ID NO: 799702 - RNA, 22 nt, Human
uuucccaagaccauagauggaa

SEQ ID NO: 799703 - RNA, 22 nt, Human
gagcccagggcaggcaaggcag

SEQ ID NO: 799704 - RNA, 22 nt, Human
ucugagaaugaguguuuucuua

SEQ ID NO: 799705 - RNA, 22 nt, Human
auuaaauuagcaaacugugaaa

SEQ ID NO: 799706 - RNA, 22 nt, Human
uggcaccaccagacaccaggag

SEQ ID NO: 799707 - RNA, 22 nt, Human
gggcaaugggcuuuucuguaag

SEQ ID NO: 799708 - RNA, 22 nt, Human
ggggagcaauugcccccuuaga

SEQ ID NO: 799709 - RNA, 22 nt, Human
auucuuacaaaugaaacugcaa

SEQ ID NO: 799710 - RNA, 21 nt, Human
ugcuucucuagaucaacuacu

SEQ ID NO: 799711 - RNA, 22 nt, Human
uaccauuucaguaaaaacuuag

SEQ ID NO: 799712 - RNA, 22 nt, Human
ucugaggcugcaucuaugugac

SEQ ID NO: 799713 - RNA, 22 nt, Human
gcagagugguuucagaguugag

SEQ ID NO: 799714 - RNA, 22 nt, Human
ucuuuagagcacgggaaaaaca

SEQ ID NO: 799715 - RNA, 22 nt, Human
caguccucucacucaggccuuu

SEQ ID NO: 799716 - RNA, 22 nt, Human
gcuuuggaacuuaaauccuugg

SEQ ID NO: 799717 - RNA, 19 nt, Human
gggcccagcauggaggguu

SEQ ID NO: 799718 - RNA, 22 nt, Human
uaaggcagugagaagaaacagg

SEQ ID NO: 799719 - RNA, 21 nt, Human
uaacacauuuugguacuuugg

SEQ ID NO: 799720 - RNA, 22 nt, Human
uaggcugggagccugaggcuag

SEQ ID NO: 799721 - RNA, 22 nt, Human
ggagcccucaccggcgagugcc

SEQ ID NO: 799722 - RNA, 22 nt, Human
gaaccauuucugaauaguuugu

SEQ ID NO: 799723 - RNA, 22 nt, Human
aaagcuuuucaguauguucaug

SEQ ID NO: 799724 - RNA, 22 nt, Human
aguuucucuagagucuuugaaa

SEQ ID NO: 799725 - RNA, 22 nt, Human
cccugcaggggaccugcagccu

SEQ ID NO: 799726 - RNA, 22 nt, Human
ugucucuuggcucuaucacuua

SEQ ID NO: 799727 - RNA, 20 nt, Human
uaggacagggccuggcuucu

SEQ ID NO: 799728 - RNA, 22 nt, Human
uccugcagcucugagaagcauc

SEQ ID NO: 799729 - RNA, 22 nt, Human
gaaaauaguucaucacaaugau

SEQ ID NO: 799730 - RNA, 22 nt, Human
ccccagggucaguguguggagg

SEQ ID NO: 799731 - RNA, 22 nt, Human
aacaaguguauuaauggaaaua

SEQ ID NO: 799732 - RNA, 22 nt, Human
gcaaggcugugcacuuugcauu

SEQ ID NO: 799733 - RNA, 23 nt, Human
ucacuaaaguguuuagugcagau

SEQ ID NO: 799734 - RNA, 22 nt, Human
guggagagagauaagccugguc

SEQ ID NO: 799735 - RNA, 22 nt, Human
ucucccucuuugucugcuuugg

SEQ ID NO: 799736 - RNA, 22 nt, Human
gcugguagaccucacugcacuc

SEQ ID NO: 799737 - RNA, 20 nt, Human
gugcuggaguuaggaaaggu

SEQ ID NO: 799738 - RNA, 22 nt, Human
auguccuuguuuuggugacacu

SEQ ID NO: 799739 - RNA, 22 nt, Human
ugccuggcccugacagcccugg

SEQ ID NO: 799740 - RNA, 21 nt, Human
auugcucuguugugucuagaa

SEQ ID NO: 799741 - RNA, 22 nt, Human
augcaacaggguugggaggcgg

SEQ ID NO: 799742 - RNA, 22 nt, Human
cuggcccagguggucguugagg

SEQ ID NO: 799743 - RNA, 22 nt, Human
gccaggaaugcauaaaugaccu

SEQ ID NO: 799744 - RNA, 22 nt, Human
gagccaggggucagcuccgagg

SEQ ID NO: 799745 - RNA, 22 nt, Human
agcuguugaaaaugguguccua

SEQ ID NO: 799746 - RNA, 22 nt, Human
ugcugaaacaauaacauacugg

SEQ ID NO: 799747 - RNA, 22 nt, Human
ccucuguguccuggucauugaa

SEQ ID NO: 799748 - RNA, 22 nt, Human
cugacagguugguagcuuugga

SEQ ID NO: 799749 - RNA, 22 nt, Human
aacacagggcagcugcugggaa

SEQ ID NO: 799750 - RNA, 22 nt, Human
uggcucagcagguuagaaacua

SEQ ID NO: 799751 - RNA, 22 nt, Human
gggaagaguaacuagcccaugu

SEQ ID NO: 799752 - RNA, 22 nt, Human
ccuggugcccccaagccagcug

SEQ ID NO: 799753 - RNA, 22 nt, Human
aagauaauguucuagcugucag

SEQ ID NO: 799754 - RNA, 20 nt, Human
uggcuccagccuccccuacc

SEQ ID NO: 799755 - RNA, 22 nt, Human
gcuggccugggcagaggcuaug

SEQ ID NO: 799756 - RNA, 22 nt, Human
ugagcccauguagcacuuccau

SEQ ID NO: 799757 - RNA, 22 nt, Human
aaauagcauaaaauaggaagcu

SEQ ID NO: 799758 - RNA, 22 nt, Human
uguuuacacuucaagguuaagg

SEQ ID NO: 799759 - RNA, 22 nt, Human
acugggagggucuugaagaggg

SEQ ID NO: 799760 - RNA, 18 nt, Human
auauucaagaagacagag

SEQ ID NO: 799761 - RNA, 22 nt, Human
ggcccagcucuauugaauuaca

SEQ ID NO: 799762 - RNA, 22 nt, Human
aaucuugguugcaguauauccg

SEQ ID NO: 799763 - RNA, 17 nt, Human
cugccuggagucccauc

SEQ ID NO: 799764 - RNA, 22 nt, Human
auuguuuccccggaauuauuca

SEQ ID NO: 799765 - RNA, 22 nt, Human
gagcuuugugcugguagguggu

SEQ ID NO: 799766 - RNA, 22 nt, Human
caggggcugagaaggaacgucc

SEQ ID NO: 799767 - RNA, 22 nt, Human
ccuccuggauggauuuggugga

SEQ ID NO: 799768 - RNA, 22 nt, Human
ugcaaauguguuuuaaaccaaa

SEQ ID NO: 799769 - RNA, 17 nt, Human
cagucacaggucuuuuc

SEQ ID NO: 799770 - RNA, 22 nt, Human
ugcauuaaaaugugccucucuu

SEQ ID NO: 799771 - RNA, 21 nt, Human
gaaaauacaaugagcuugacc

SEQ ID NO: 799772 - RNA, 20 nt, Human
cugcaucaugguuaagaaca

SEQ ID NO: 799773 - RNA, 22 nt, Human
gcugcagggcucucacaggggg

SEQ ID NO: 799774 - RNA, 22 nt, Human
uacugaggcugaauucuuagca

SEQ ID NO: 799775 - RNA, 22 nt, Human
ucuggagugggacuuugcaucu

SEQ ID NO: 799776 - RNA, 22 nt, Human
ucccucagaaauucucucugaa

SEQ ID NO: 799777 - RNA, 22 nt, Human
ugugccaggcccuggggaccaa

SEQ ID NO: 799778 - RNA, 22 nt, Human
aagauaaugugucugucuuugc

SEQ ID NO: 799779 - RNA, 17 nt, Human
cuggagcuguguaaccu

SEQ ID NO: 799780 - RNA, 22 nt, Human
aguuauuuggcuauagauggua

SEQ ID NO: 799781 - RNA, 22 nt, Human
gucaauaauugauagauauugg

SEQ ID NO: 799782 - RNA, 20 nt, Human
aaacauucauguacaaguga

SEQ ID NO: 799783 - RNA, 22 nt, Human
uaggaaauaaauacuuaugguu

SEQ ID NO: 799784 - RNA, 16 nt, Human
cuggcuggaagccugg

SEQ ID NO: 799785 - RNA, 22 nt, Human
gccaggcuggugcaaggauauu

SEQ ID NO: 799786 - RNA, 21 nt, Human
agauuacaggugugauccacc

SEQ ID NO: 799787 - RNA, 22 nt, Human
auguauguuaguguauuaucua

SEQ ID NO: 799788 - RNA, 22 nt, Human
agugaguggagagcucuagguu

SEQ ID NO: 799789 - RNA, 22 nt, Human
uuguuucucuggucuugaguga

SEQ ID NO: 799790 - RNA, 22 nt, Human
gcccaaggucacacacaggaag

SEQ ID NO: 799791 - RNA, 21 nt, Human
auaaacugcaucaaguuggug

SEQ ID NO: 799792 - RNA, 19 nt, Human
aacaccagagucaggaguc

SEQ ID NO: 799793 - RNA, 22 nt, Human
gauauauuuuccauggucugca

SEQ ID NO: 799794 - RNA, 22 nt, Human
gggggcuagagagaugaaauau

SEQ ID NO: 799795 - RNA, 22 nt, Human
agcucuuugagaaggcagugug

SEQ ID NO: 799796 - RNA, 22 nt, Human
uuucauugucuacauaugacau

SEQ ID NO: 799797 - RNA, 22 nt, Human
gagcagcucgagaaggaagcag

SEQ ID NO: 799798 - RNA, 22 nt, Human
cugccugacugauaaucucuga

SEQ ID NO: 799799 - RNA, 22 nt, Human
gaucaauacuauuaagaucaua

SEQ ID NO: 799800 - RNA, 22 nt, Human
acuuccagcaccucaagcggaa

SEQ ID NO: 799801 - RNA, 22 nt, Human
ggguggucaucugaaggucugg

SEQ ID NO: 799802 - RNA, 22 nt, Human
cucugcaccuuguaggaggcaa

SEQ ID NO: 799803 - RNA, 22 nt, Human
ugguaagauaagagccaggccu

SEQ ID NO: 799804 - RNA, 22 nt, Human
aagcagaaguugaucuaccaua

SEQ ID NO: 799805 - RNA, 22 nt, Human
uuucucuuugacaggaaucaga

SEQ ID NO: 799806 - RNA, 22 nt, Human
cagaaacacuuguagagaaguu

SEQ ID NO: 799807 - RNA, 22 nt, Human
aauguuauuacacuugugaaau

SEQ ID NO: 799808 - RNA, 22 nt, Human
agaggccggccgagcccauggg

SEQ ID NO: 799809 - RNA, 22 nt, Human
gcagacuguaccuggaagaggg

SEQ ID NO: 799810 - RNA, 22 nt, Human
guggagggugauugccggcugu

SEQ ID NO: 799811 - RNA, 22 nt, Human
ccaugcaacagaauccagauuu

SEQ ID NO: 799812 - RNA, 22 nt, Human
aguacaauuuaaugaagauagc

SEQ ID NO: 799813 - RNA, 22 nt, Human
uuuugccuaagaaucucucuga

SEQ ID NO: 799814 - RNA, 22 nt, Human
ugaacacacaccuauguacaaa

SEQ ID NO: 799815 - RNA, 22 nt, Human
uucaaguagcuaaauuagcugc

SEQ ID NO: 799816 - RNA, 22 nt, Human
cugcuguguuucugcuagaaaa

SEQ ID NO: 799817 - RNA, 22 nt, Human
agucuauauugugaaaguaaaa

SEQ ID NO: 799818 - RNA, 22 nt, Human
uuuuccucugcaauaaaagcag

SEQ ID NO: 799819 - RNA, 22 nt, Human
agucuuuauugucgucacuaga

SEQ ID NO: 799820 - RNA, 22 nt, Human
caguaggaaggaugcagaaaaa

SEQ ID NO: 799821 - RNA, 16 nt, Human
gcagagcucagggacu

SEQ ID NO: 799822 - RNA, 18 nt, Human
gagcugggagaaggaagg

SEQ ID NO: 799823 - RNA, 22 nt, Human
ugggaaggaacugccuuuagcu

SEQ ID NO: 799824 - RNA, 22 nt, Human
aggcugugggugauuuacugug

SEQ ID NO: 799825 - RNA, 22 nt, Human
guauuucuuuccauuauaguca

SEQ ID NO: 799826 - RNA, 22 nt, Human
gcagcccaagccugagcauccu

SEQ ID NO: 799827 - RNA, 22 nt, Human
uuucuagaguucaucaugguaa

SEQ ID NO: 799828 - RNA, 22 nt, Human
aggaccuacugauaucuuagca

SEQ ID NO: 799829 - RNA, 22 nt, Human
ggcaccugguaagugcucagua

SEQ ID NO: 799830 - RNA, 22 nt, Human
ugggucacucuauccugcuuag

SEQ ID NO: 799831 - RNA, 22 nt, Human
ucugucuuggccagccaucugg

SEQ ID NO: 799832 - RNA, 22 nt, Human
uuuggauuccaugcucuccggg

SEQ ID NO: 799833 - RNA, 22 nt, Human
ucuacagggucagaguuucaug

SEQ ID NO: 799834 - RNA, 22 nt, Human
uucacaauuaacuuuauacuua

SEQ ID NO: 799835 - RNA, 22 nt, Human
ggguccugcgugggcccaggac

SEQ ID NO: 799836 - RNA, 22 nt, Human
auacaacugcucucagauaagu

SEQ ID NO: 799837 - RNA, 22 nt, Human
ggaggcugcugccucacguggg

SEQ ID NO: 799838 - RNA, 22 nt, Human
ccaggccuccugugaguggacc

SEQ ID NO: 799839 - RNA, 22 nt, Human
cagggagccugaauguuccagg

SEQ ID NO: 799840 - RNA, 22 nt, Human
cagcaucucccaggcauuugcc

SEQ ID NO: 799841 - RNA, 22 nt, Human
uggcagaaagaaccaugugcaa

SEQ ID NO: 799842 - RNA, 22 nt, Human
uagaaacaaguuucucuuuggg

SEQ ID NO: 799843 - RNA, 22 nt, Human
cugcuggagggagcugauagug

SEQ ID NO: 799844 - RNA, 22 nt, Human
auuucuacugugagaaacauga

SEQ ID NO: 799845 - RNA, 23 nt, Human
ugggcuucugagaaagcaccuaa

SEQ ID NO: 799846 - RNA, 22 nt, Human
uucagaggacaaccagccaucu

SEQ ID NO: 799847 - RNA, 22 nt, Human
uuucuggcagcgggacaggggu

SEQ ID NO: 799848 - RNA, 22 nt, Human
gcaggcugcccucuuguguuga

SEQ ID NO: 799849 - RNA, 22 nt, Human
ugcagcuuaucucuuuggcagu

SEQ ID NO: 799850 - RNA, 22 nt, Human
cccugugauguagcuagaguag

SEQ ID NO: 799851 - RNA, 19 nt, Human
gaggagcuaucggagacag

SEQ ID NO: 799852 - RNA, 22 nt, Human
uuuccuuugggagcaugaauuu

SEQ ID NO: 799853 - RNA, 22 nt, Human
cuggccucucugagcagggagc

SEQ ID NO: 799854 - RNA, 22 nt, Human
uacaaagcuuguacugugugac

SEQ ID NO: 799855 - RNA, 22 nt, Human
ucauagaaauggaaaguauauu

SEQ ID NO: 799856 - RNA, 22 nt, Human
uguggcagaguaaggacccagu

SEQ ID NO: 799857 - RNA, 22 nt, Human
ggcuggauaccaggagacaggg

SEQ ID NO: 799858 - RNA, 22 nt, Human
cugcaggacugaaagaugaggu

SEQ ID NO: 799859 - RNA, 22 nt, Human
ccaggagaauaauggcagauua

SEQ ID NO: 799860 - RNA, 22 nt, Human
ggaagaggcugguagugcccgu

SEQ ID NO: 799861 - RNA, 22 nt, Human
gagggccacuugaauguuuuca

SEQ ID NO: 799862 - RNA, 22 nt, Human
aaagcagaacugagagagcugg

SEQ ID NO: 799863 - RNA, 22 nt, Human
ugcugagggagcaucaaagaaa

SEQ ID NO: 799864 - RNA, 22 nt, Human
uaaggcagguagaugacuacgg

SEQ ID NO: 799865 - RNA, 22 nt, Human
uuaaagucccugccuuaauucc

SEQ ID NO: 799866 - RNA, 22 nt, Human
uucuauugacauucacuguaac

SEQ ID NO: 799867 - RNA, 22 nt, Human
guuuacauugcuguuugugucu

SEQ ID NO: 799868 - RNA, 22 nt, Human
gacaaaacacauuaguuuaaaa

SEQ ID NO: 799869 - RNA, 22 nt, Human
acauggcauucacucccacagg

SEQ ID NO: 799870 - RNA, 22 nt, Human
agaggcugcacuugcucaugau

SEQ ID NO: 799871 - RNA, 22 nt, Human
ccagggcagugggagaaggugc

SEQ ID NO: 799872 - RNA, 22 nt, Human
ggccccagauucugggcugggu

SEQ ID NO: 799873 - RNA, 22 nt, Human
ggcaguguccuugcagcucuac

SEQ ID NO: 799874 - RNA, 22 nt, Human
gggcagagaaauggacaguugg

SEQ ID NO: 799875 - RNA, 22 nt, Human
ugcagccuuuagaaguucagau

SEQ ID NO: 799876 - RNA, 22 nt, Human
acagaaaaaugagggagcugga

SEQ ID NO: 799877 - RNA, 22 nt, Human
gaagaggcuuuccuagggcaag

SEQ ID NO: 799878 - RNA, 22 nt, Human
acacuacagggccgggauggaa

SEQ ID NO: 799879 - RNA, 22 nt, Human
uucauacuguguuuccaaguuu

SEQ ID NO: 799880 - RNA, 22 nt, Human
cuucuuucccaggcauguuuua

SEQ ID NO: 799881 - RNA, 22 nt, Human
uuacaaacuccagugagugagc

SEQ ID NO: 799882 - RNA, 22 nt, Human
gcaaagauauuagaauagagua

SEQ ID NO: 799883 - RNA, 22 nt, Human
auuucagcccaguaugagcccc

SEQ ID NO: 799884 - RNA, 22 nt, Human
uguuucuaggucaauaauuuuu

SEQ ID NO: 799885 - RNA, 22 nt, Human
gggauggggagcuggaaagggg

SEQ ID NO: 799886 - RNA, 22 nt, Human
cagcaggacauggaggaguaaa

SEQ ID NO: 799887 - RNA, 22 nt, Human
acaguucugagcuauaauugcu

SEQ ID NO: 799888 - RNA, 22 nt, Human
ggcaugugccugaggucacaca

SEQ ID NO: 799889 - RNA, 22 nt, Human
ccauuuggaggucauuaggaca

SEQ ID NO: 799890 - RNA, 22 nt, Human
cuucuggguguggagugaggac

SEQ ID NO: 799891 - RNA, 22 nt, Human
uaucuuugcaaauaucucuaag

SEQ ID NO: 799892 - RNA, 22 nt, Human
uucuuauugggagaccuuuucu

SEQ ID NO: 799893 - RNA, 17 nt, Human
cugggauguggacucuu

SEQ ID NO: 799894 - RNA, 19 nt, Human
acaguccagcuguuuguac

SEQ ID NO: 799895 - RNA, 22 nt, Human
auuuagcaagaguacaaaauaa

SEQ ID NO: 799896 - RNA, 22 nt, Human
uacauaguauucacauuguuuu

SEQ ID NO: 799897 - RNA, 22 nt, Human
caggaagcuggucagauccugu

SEQ ID NO: 799898 - RNA, 20 nt, Human
uaggaaaucgaggcagggug

SEQ ID NO: 799899 - RNA, 22 nt, Human
cagaaaccucccugaauauuuu

SEQ ID NO: 799900 - RNA, 22 nt, Human
guuuuauaauugcuucauaaga

SEQ ID NO: 799901 - RNA, 21 nt, Human
acaguaaauucccugcaaaga

SEQ ID NO: 799902 - RNA, 22 nt, Human
agggagccuuccuggcuguggu

SEQ ID NO: 799903 - RNA, 22 nt, Human
augcaauauagggaagauagau

SEQ ID NO: 799904 - RNA, 22 nt, Human
uuuuuuccagcuucuagaggcc

SEQ ID NO: 799905 - RNA, 22 nt, Human
cccuguggaggcagcauccugc

SEQ ID NO: 799906 - RNA, 22 nt, Human
uuauucaguuuguguagaggug

SEQ ID NO: 799907 - RNA, 21 nt, Human
uggaaggcugcucugccaggg

SEQ ID NO: 799908 - RNA, 22 nt, Human
cuaaggcaccgaggcaggagcg

SEQ ID NO: 799909 - RNA, 22 nt, Human
cagcuuugcaggcuggucagug

SEQ ID NO: 799910 - RNA, 22 nt, Human
cuccuggcacucaguguggaag

SEQ ID NO: 799911 - RNA, 22 nt, Human
cacaugaggugacuuccaagcu

SEQ ID NO: 799912 - RNA, 22 nt, Human
ugcuucuggcacuugagggggu

SEQ ID NO: 799913 - RNA, 22 nt, Human
guaaauaacugguaauuggggu

SEQ ID NO: 799914 - RNA, 22 nt, Human
augucuguacgaguuacaaugg

SEQ ID NO: 799915 - RNA, 22 nt, Human
uuuugcuuuuguaacacagugu

SEQ ID NO: 799916 - RNA, 22 nt, Human
gcaugcaaauagucaugcuucc

SEQ ID NO: 799917 - RNA, 22 nt, Human
uaugcaaacuaaguuguuuccu

SEQ ID NO: 799918 - RNA, 22 nt, Human
acagcaacuccugcuucugagu

SEQ ID NO: 799919 - RNA, 22 nt, Human
cccagaaggcuugccaggaagc

SEQ ID NO: 799920 - RNA, 22 nt, Human
aaacaguuuucucauuuagugu

SEQ ID NO: 799921 - RNA, 22 nt, Human
ggagccaguauuuaguggucuu

SEQ ID NO: 799922 - RNA, 21 nt, Human
cccaccccauaaggcagaacc

SEQ ID NO: 799923 - RNA, 22 nt, Human
aggcucuauaccgcugggaguu

SEQ ID NO: 799924 - RNA, 22 nt, Human
acagugauuuuuucgagcagaa

SEQ ID NO: 799925 - RNA, 22 nt, Human
gacaaggcagaaagcuuaaagg

SEQ ID NO: 799926 - RNA, 17 nt, Human
gcuucuggagcuucugu

SEQ ID NO: 799927 - RNA, 22 nt, Human
auaucacaggaaaggaagauac

SEQ ID NO: 799928 - RNA, 23 nt, Human
uacauucuguauuuuuauagagu

SEQ ID NO: 799929 - RNA, 22 nt, Human
ugggcagcuuccacuuaguuag

SEQ ID NO: 799930 - RNA, 22 nt, Human
uccucagcauuagcacagacau

SEQ ID NO: 799931 - RNA, 22 nt, Human
ugcagggaaucuguggcuggac

SEQ ID NO: 799932 - RNA, 22 nt, Human
ugccucagcugaggccgcucca

SEQ ID NO: 799933 - RNA, 22 nt, Human
ugcuguuauacuuagcugguua

SEQ ID NO: 799934 - RNA, 22 nt, Human
ucagagaaaugacaauauauag

SEQ ID NO: 799935 - RNA, 22 nt, Human
ugugcaauaaucauagugauuu

SEQ ID NO: 799936 - RNA, 22 nt, Human
aaauacaauuucaggcuguaau

SEQ ID NO: 799937 - RNA, 22 nt, Human
cuuuaguuguaucagucaaguu

SEQ ID NO: 799938 - RNA, 22 nt, Human
uauguauuagagcuccaugagg

SEQ ID NO: 799939 - RNA, 19 nt, Human
gccuuggcauucucugcuu

SEQ ID NO: 799940 - RNA, 22 nt, Human
aucagcugaaaaacaggcagca

SEQ ID NO: 799941 - RNA, 22 nt, Human
uaaaaccaggucuugggauuua

SEQ ID NO: 799942 - RNA, 22 nt, Human
ucccugcccucagugcacccgg

SEQ ID NO: 799943 - RNA, 22 nt, Human
ugggugguccaggcucagcaga

SEQ ID NO: 799944 - RNA, 19 nt, Human
gggcuuggggcugaagccu

SEQ ID NO: 799945 - RNA, 20 nt, Human
ccagacagcaccugccuggu

SEQ ID NO: 799946 - RNA, 18 nt, Human
ugcacuagaugcuggcag

SEQ ID NO: 799947 - RNA, 22 nt, Human
agaaaagaggcuuucuaagcau

SEQ ID NO: 799948 - RNA, 22 nt, Human
ccagcugaggcagccacacagg

SEQ ID NO: 799949 - RNA, 20 nt, Human
cuucuucagccuaugcuuca

SEQ ID NO: 799950 - RNA, 22 nt, Human
gcuggccucuggagaagggcuu

SEQ ID NO: 799951 - RNA, 22 nt, Human
caggcaagcaaggggucuugaa

SEQ ID NO: 799952 - RNA, 22 nt, Human
ccaggcacuucaucauuagggu

SEQ ID NO: 799953 - RNA, 22 nt, Human
agucauauuuauauaauuuccc

SEQ ID NO: 799954 - RNA, 22 nt, Human
aggcaguguauugcuagcggcu

SEQ ID NO: 799955 - RNA, 22 nt, Human
cugucucaagacugcaggcacu

SEQ ID NO: 799956 - RNA, 22 nt, Human
gccaguggcuugccaggcagga

SEQ ID NO: 799957 - RNA, 22 nt, Human
aaagucauacauggugcuuacu

SEQ ID NO: 799958 - RNA, 22 nt, Human
uccuggcucggcuuggggacuu

SEQ ID NO: 799959 - RNA, 23 nt, Human
ggaugggcaagccuagugccuac

SEQ ID NO: 799960 - RNA, 22 nt, Human
uacaguaaugugucccugcagg

SEQ ID NO: 799961 - RNA, 22 nt, Human
gccugagaaggacacagcaggu

SEQ ID NO: 799962 - RNA, 22 nt, Human
cagaaauaucaguugaaagugc

SEQ ID NO: 799963 - RNA, 22 nt, Human
uguggaugaauaaagugcagac

SEQ ID NO: 799964 - RNA, 22 nt, Human
uuccuaggauggugaagcagga

SEQ ID NO: 799965 - RNA, 18 nt, Human
cauaauuuucuuucuuua

SEQ ID NO: 799966 - RNA, 22 nt, Human
agauaauaagucugguaauaau

SEQ ID NO: 799967 - RNA, 22 nt, Human
gggaaggcugccugagggaugg

SEQ ID NO: 799968 - RNA, 22 nt, Human
uuucuauucuggaucuguggca

SEQ ID NO: 799969 - RNA, 22 nt, Human
agcugguaugaacaggauagga

SEQ ID NO: 799970 - RNA, 22 nt, Human
gaaucuagggccuagaucacag

SEQ ID NO: 799971 - RNA, 22 nt, Human
ugacaacuuuacaaaauucuuc

SEQ ID NO: 799972 - RNA, 22 nt, Human
uucuggaauauuugacacaauu

SEQ ID NO: 799973 - RNA, 22 nt, Human
caaacauugcacuuucugcuau

SEQ ID NO: 799974 - RNA, 22 nt, Human
ugauucaacuuucauaacaaaa

SEQ ID NO: 799975 - RNA, 22 nt, Human
uucuuucccaguagaugugaaa

SEQ ID NO: 799976 - RNA, 17 nt, Human
gggcagggacuccuggg

SEQ ID NO: 799977 - RNA, 22 nt, Human
ucuuuuagagcauuucugauuc

SEQ ID NO: 799978 - RNA, 22 nt, Human
ugcuggggcucugaccacucca

SEQ ID NO: 799979 - RNA, 22 nt, Human
gcaggggcugagcaccagcggg

SEQ ID NO: 799980 - RNA, 22 nt, Human
cccaggcugauguucagcgggu

SEQ ID NO: 799981 - RNA, 22 nt, Human
uucagagcaucucuaaagccag

SEQ ID NO: 799982 - RNA, 22 nt, Human
cugcagcugugagugcuggaug

SEQ ID NO: 799983 - RNA, 22 nt, Human
agcugggaggugggcagugaga

SEQ ID NO: 799984 - RNA, 22 nt, Human
ugaaaugacaaagguuuuucuu

SEQ ID NO: 799985 - RNA, 22 nt, Human
acuucccaacacuuuugagaug

SEQ ID NO: 799986 - RNA, 22 nt, Human
gcugcugcuugaaggcucggag

SEQ ID NO: 799987 - RNA, 22 nt, Human
aaaaccuucuagacuuuauauu

SEQ ID NO: 799988 - RNA, 22 nt, Human
ugcacagagagaugagacacgu

SEQ ID NO: 799989 - RNA, 22 nt, Human
aggcccaguagucgacggcgcu

SEQ ID NO: 799990 - RNA, 18 nt, Human
uacaaacuccuugaaggc

SEQ ID NO: 799991 - RNA, 22 nt, Human
gcaggcuggucugaccaucccu

SEQ ID NO: 799992 - RNA, 22 nt, Human
gucacuuuggccucuacagcca

SEQ ID NO: 799993 - RNA, 22 nt, Human
uucuuuuacauuaagauuucag

SEQ ID NO: 799994 - RNA, 22 nt, Human
uuguuuuaacgacucagcuugu

SEQ ID NO: 799995 - RNA, 22 nt, Human
uggaggaaguggcuggccagaa

SEQ ID NO: 799996 - RNA, 22 nt, Human
uggccaguuugcucaggcaguc

SEQ ID NO: 799997 - RNA, 22 nt, Human
aaaaccugauugaauucuauuu

SEQ ID NO: 799998 - RNA, 22 nt, Human
uggaggaaucagggcuuaggcu

SEQ ID NO: 799999 - RNA, 22 nt, Human
gcacacaggggaguucucagaa

SEQ ID NO: 800000 - RNA, 22 nt, Human
aggaaagaaaggaggugcauuu

SEQ ID NO: 800001 - RNA, 22 nt, Human
gugcagcugcaggagucagguc

SEQ ID NO: 800002 - RNA, 22 nt, Human
uccucccuaaauccuagacugu

SEQ ID NO: 800003 - RNA, 22 nt, Human
ccaggauggggagcagauagaa

SEQ ID NO: 800004 - RNA, 22 nt, Human
cauuuauucaugaucuguagcu

SEQ ID NO: 800005 - RNA, 22 nt, Human
guggggugcagcaguacugugu

SEQ ID NO: 800006 - RNA, 22 nt, Human
acuucauuucauuugcacagug

SEQ ID NO: 800007 - RNA, 22 nt, Human
caaaauucugcauuucuaauaa

SEQ ID NO: 800008 - RNA, 21 nt, Human
agcuggcucucucuggagaga

SEQ ID NO: 800009 - RNA, 20 nt, Human
ucagaagugcagcugccccu

SEQ ID NO: 800010 - RNA, 22 nt, Human
ugccaagagguccaggugggaa

SEQ ID NO: 800011 - RNA, 22 nt, Human
aucacaaucuucaaaucgauuc

SEQ ID NO: 800012 - RNA, 23 nt, Human
ucucacagcgaucuaggaagagg

SEQ ID NO: 800013 - RNA, 19 nt, Human
ugcauaaauuauauacuuu

SEQ ID NO: 800014 - RNA, 22 nt, Human
ugcauggaggauaauaauugag

SEQ ID NO: 800015 - RNA, 22 nt, Human
cugggcacagacccccugggcc

SEQ ID NO: 800016 - RNA, 21 nt, Human
aguuacauguauagauaaagu

SEQ ID NO: 800017 - RNA, 22 nt, Human
agaugggcgcgcugcucugaug

SEQ ID NO: 800018 - RNA, 22 nt, Human
cauucaaauuaagauuuuguua

SEQ ID NO: 800019 - RNA, 22 nt, Human
ugcuggagucucuugacccugg

SEQ ID NO: 800020 - RNA, 22 nt, Human
gcaugcaauuaugguauuagau

SEQ ID NO: 800021 - RNA, 22 nt, Human
ggagccaggggaccuucacaga

SEQ ID NO: 800022 - RNA, 22 nt, Human
gauacccagcaaaaugcaggag

SEQ ID NO: 800023 - RNA, 22 nt, Human
ggcgggaaguucuugcccacuu

SEQ ID NO: 800024 - RNA, 22 nt, Human
caggagugucgggucacuaggu

SEQ ID NO: 800025 - RNA, 22 nt, Human
acauuucacuguucacagcagg

SEQ ID NO: 800026 - RNA, 22 nt, Human
acuucaaacaauuaacagagaa

SEQ ID NO: 800027 - RNA, 22 nt, Human
aggcaaauuauuguaugcaguu

SEQ ID NO: 800028 - RNA, 22 nt, Human
ugggugguggcaguaaugagaa

SEQ ID NO: 800029 - RNA, 22 nt, Human
uuuaccaaggcauaguaaucuc

SEQ ID NO: 800030 - RNA, 22 nt, Human
cgcaggcuuuagaaucugcuac

SEQ ID NO: 800031 - RNA, 22 nt, Human
cucugucaggcugcagaugcuc

SEQ ID NO: 800032 - RNA, 22 nt, Human
ucaucuugcugccauugcuuua

SEQ ID NO: 800033 - RNA, 21 nt, Human
guucaaauccugacacuacac

SEQ ID NO: 800034 - RNA, 22 nt, Human
uuucccaaagccuggggugagu

SEQ ID NO: 800035 - RNA, 22 nt, Human
uuucaguuguccuguuaauagc

SEQ ID NO: 800036 - RNA, 22 nt, Human
caggacagaccaagaucgugcu

SEQ ID NO: 800037 - RNA, 22 nt, Human
acuugaauaggaaagccacaaa

SEQ ID NO: 800038 - RNA, 22 nt, Human
uuauaggcuuaguucugugugu

SEQ ID NO: 800039 - RNA, 22 nt, Human
cugcagcugcucauguuacuug

SEQ ID NO: 800040 - RNA, 22 nt, Human
aaacaaauuucaagcugugaca

SEQ ID NO: 800041 - RNA, 22 nt, Human
agcugcagccgcagcuguggcc

SEQ ID NO: 800042 - RNA, 22 nt, Human
uauacagaaccgccugaagucu

SEQ ID NO: 800043 - RNA, 23 nt, Human
acagacaacacugaugagagaaa

SEQ ID NO: 800044 - RNA, 22 nt, Human
aggagguggccugagcgugccc

SEQ ID NO: 800045 - RNA, 22 nt, Human
gauuuuauuagcccaaacuuug

SEQ ID NO: 800046 - RNA, 22 nt, Human
ucauugagcgguucuuaaccca

SEQ ID NO: 800047 - RNA, 22 nt, Human
aaccaacauaggaaugcagaga

SEQ ID NO: 800048 - RNA, 22 nt, Human
ugccuggggauugcucugggcc

SEQ ID NO: 800049 - RNA, 22 nt, Human
cagcuuugaccuaaaguaggaa

SEQ ID NO: 800050 - RNA, 22 nt, Human
ggugcugguucaggguggcugu

SEQ ID NO: 800051 - RNA, 22 nt, Human
ucaaacuggcagacuucuacuu

SEQ ID NO: 800052 - RNA, 22 nt, Human
caugcaguguguaucuacuuaa

SEQ ID NO: 800053 - RNA, 22 nt, Human
ucuuucuacaucauuugcuucu

SEQ ID NO: 800054 - RNA, 22 nt, Human
aaacagaaauuuccucaugcuc

SEQ ID NO: 800055 - RNA, 22 nt, Human
uugaucucuuguguaugguaga

SEQ ID NO: 800056 - RNA, 22 nt, Human
ucaggagacuuaugucacagug

SEQ ID NO: 800057 - RNA, 22 nt, Human
ucaaauaccagcaauuucaugu

SEQ ID NO: 800058 - RNA, 22 nt, Human
ccaggagaagcaucugagugua

SEQ ID NO: 800059 - RNA, 22 nt, Human
uuccagcaggcagacaggagau

SEQ ID NO: 800060 - RNA, 18 nt, Human
uccucucuuuccccaggg

SEQ ID NO: 800061 - RNA, 22 nt, Human
aggagcugcauggauaccuggu

SEQ ID NO: 800062 - RNA, 22 nt, Human
agaaggcucacuaagagugacu

SEQ ID NO: 800063 - RNA, 22 nt, Human
cuggaagggucagagugaugag

SEQ ID NO: 800064 - RNA, 22 nt, Human
cauucuuacacaauauuuuaau

SEQ ID NO: 800065 - RNA, 22 nt, Human
acaguuuuuucaacauuggaau

SEQ ID NO: 800066 - RNA, 20 nt, Human
gugccuggagaagaggcugu

SEQ ID NO: 800067 - RNA, 22 nt, Human
ccugacagugguagccuuggca

SEQ ID NO: 800068 - RNA, 22 nt, Human
ggcaguguuauuuuucagaaau

SEQ ID NO: 800069 - RNA, 22 nt, Human
uccaccauguaacaagcucugu

SEQ ID NO: 800070 - RNA, 22 nt, Human
ugccacagaggugaagcccacu

SEQ ID NO: 800071 - RNA, 22 nt, Human
uggcucaggcuugaaaauagau

SEQ ID NO: 800072 - RNA, 23 nt, Human
gccaggcacaugguggacacgca

SEQ ID NO: 800073 - RNA, 23 nt, Human
auuucccauugugucagcagagc

SEQ ID NO: 800074 - RNA, 22 nt, Human
ccacccugccuugggccaguga

SEQ ID NO: 800075 - RNA, 22 nt, Human
cugacuuugacuuggucauuga

SEQ ID NO: 800076 - RNA, 22 nt, Human
gaaaacuaacggaaaaguuagg

SEQ ID NO: 800077 - RNA, 22 nt, Human
auuuguucauggguuguuaugc

SEQ ID NO: 800078 - RNA, 22 nt, Human
gcaggcauggucgcugccaggu

SEQ ID NO: 800079 - RNA, 22 nt, Human
aacacaugccuuaagaauaagu

SEQ ID NO: 800080 - RNA, 22 nt, Human
ugugcagaguaaggcagcuguu

SEQ ID NO: 800081 - RNA, 22 nt, Human
gagcugaauuacggugagucau

SEQ ID NO: 800082 - RNA, 22 nt, Human
gaaggccaguuuugagauaggu

SEQ ID NO: 800083 - RNA, 22 nt, Human
cccagcacuuugaauaugucac

SEQ ID NO: 800084 - RNA, 22 nt, Human
ggcugcaguuugucuuuugcuu

SEQ ID NO: 800085 - RNA, 22 nt, Human
uucaaacagaugacucugcucu

SEQ ID NO: 800086 - RNA, 22 nt, Human
uggugccacccuccuucagcug

SEQ ID NO: 800087 - RNA, 22 nt, Human
caauaacuuugauauuuugcgg

SEQ ID NO: 800088 - RNA, 22 nt, Human
cagcucugucuguagaaacuuc

SEQ ID NO: 800089 - RNA, 22 nt, Human
ugaaugaugcauuuguuuccca

SEQ ID NO: 800090 - RNA, 15 nt, Human
gccccaggaaucaaa

SEQ ID NO: 800091 - RNA, 20 nt, Human
aagggcagagggaacagacu

SEQ ID NO: 800092 - RNA, 22 nt, Human
aaagagcaagcugagauuugaa

SEQ ID NO: 800093 - RNA, 22 nt, Human
uggggccugagguggagcugca

SEQ ID NO: 800094 - RNA, 22 nt, Human
uuuauugcccuguaguacagga

SEQ ID NO: 800095 - RNA, 22 nt, Human
auauaaguguguggcuguuagu

SEQ ID NO: 800096 - RNA, 23 nt, Human
gcugggcuuacucuuucagugag

SEQ ID NO: 800097 - RNA, 22 nt, Human
aaggcuucuggagcuugcuggc

SEQ ID NO: 800098 - RNA, 22 nt, Human
gaggcacagucccgaggcaagg

SEQ ID NO: 800099 - RNA, 22 nt, Human
gauauacauagguuucuaugca

SEQ ID NO: 800100 - RNA, 21 nt, Human
cggaaaggacuagggcucaga

SEQ ID NO: 800101 - RNA, 22 nt, Human
aacuuaguuuaggguauugauu

SEQ ID NO: 800102 - RNA, 22 nt, Human
gaaaguauuuacauuaacaucu

SEQ ID NO: 800103 - RNA, 22 nt, Human
acuucauucauuuucacgaaug

SEQ ID NO: 800104 - RNA, 17 nt, Human
ggcuggagcagcucccc

SEQ ID NO: 800105 - RNA, 22 nt, Human
uucuuuagguagauccaguuuu

SEQ ID NO: 800106 - RNA, 22 nt, Human
ucagggcagccuaaggcaccuc

SEQ ID NO: 800107 - RNA, 22 nt, Human
cagcauggacccaucgcugagu

SEQ ID NO: 800108 - RNA, 22 nt, Human
gcggcaggaagagcgcagcccc

SEQ ID NO: 800109 - RNA, 22 nt, Human
gucuuucugcugcacggacugc

SEQ ID NO: 800110 - RNA, 22 nt, Human
caagugaucagacacugaaguc

SEQ ID NO: 800111 - RNA, 19 nt, Human
aggcacagguugucuggac

SEQ ID NO: 800112 - RNA, 22 nt, Human
uggcugcagaucaagggcaggc

SEQ ID NO: 800113 - RNA, 22 nt, Human
uucauagugcuuaauuugauaa

SEQ ID NO: 800114 - RNA, 21 nt, Human
cagcuucugaagguguaggaa

SEQ ID NO: 800115 - RNA, 22 nt, Human
aaaggcucacgcaguuagugau

SEQ ID NO: 800116 - RNA, 22 nt, Human
gcacauuuaacugagcucagga

SEQ ID NO: 800117 - RNA, 22 nt, Human
gauuuauuggucuuucauuggu

SEQ ID NO: 800118 - RNA, 22 nt, Human
ucaggguuucggcucaacagaa

SEQ ID NO: 800119 - RNA, 22 nt, Human
ccaggaaccgaugaucagaggg

SEQ ID NO: 800120 - RNA, 22 nt, Human
agcacuuugggagauaaagcug

SEQ ID NO: 800121 - RNA, 22 nt, Human
aagggcuuaggauuuugcugug

SEQ ID NO: 800122 - RNA, 22 nt, Human
acaggagcucuagggacagcac

SEQ ID NO: 800123 - RNA, 22 nt, Human
gggcuggauuacugaacugagu

SEQ ID NO: 800124 - RNA, 22 nt, Human
agggaagggcagggucuaugca

SEQ ID NO: 800125 - RNA, 22 nt, Human
cagggugccuguccucagcaaa

SEQ ID NO: 800126 - RNA, 18 nt, Human
auuaaucauaaaaugcug

SEQ ID NO: 800127 - RNA, 22 nt, Human
cccuguggauuucaguuugugu

SEQ ID NO: 800128 - RNA, 22 nt, Human
agcucucaagauaagaaagaac

SEQ ID NO: 800129 - RNA, 22 nt, Human
cuggaaagugcugagacaauug

SEQ ID NO: 800130 - RNA, 22 nt, Human
auaaaugauucagcaggaaaua

SEQ ID NO: 800131 - RNA, 22 nt, Human
ccaggacaaguguggccauggc

SEQ ID NO: 800132 - RNA, 22 nt, Human
agaaacagcauuagcaucaauu

SEQ ID NO: 800133 - RNA, 22 nt, Human
ucaggcugaggucaucugcauc

SEQ ID NO: 800134 - RNA, 23 nt, Human
auauuuccagguuagugagguaa

SEQ ID NO: 800135 - RNA, 22 nt, Human
acaacaguccaguauagacugu

SEQ ID NO: 800136 - RNA, 19 nt, Human
gaggcgaggcgugcaggag

SEQ ID NO: 800137 - RNA, 22 nt, Human
aguagucagcagauaauauagg

SEQ ID NO: 800138 - RNA, 22 nt, Human
gagucuaucucacucccccagg

SEQ ID NO: 800139 - RNA, 22 nt, Human
acugaaaaaguaugauucacug

SEQ ID NO: 800140 - RNA, 22 nt, Human
ucugccaggcauugugcugcuc

SEQ ID NO: 800141 - RNA, 21 nt, Human
gugcucugggcagcagagggc

SEQ ID NO: 800142 - RNA, 22 nt, Human
ccaaacaaauccccauucuuag

SEQ ID NO: 800143 - RNA, 22 nt, Human
uccaggcugggcugaagggugc

SEQ ID NO: 800144 - RNA, 23 nt, Human
augaacauuaguuucagauauug

SEQ ID NO: 800145 - RNA, 22 nt, Human
gcugggaagaacaggagagaau

SEQ ID NO: 800146 - RNA, 22 nt, Human
acuggacagguucaugguuuua

SEQ ID NO: 800147 - RNA, 22 nt, Human
gucucaaacuccuaggcuaaag

SEQ ID NO: 800148 - RNA, 22 nt, Human
guucuauuucaguaagcaggca

SEQ ID NO: 800149 - RNA, 22 nt, Human
ugaacugagcaguuuccuggga

SEQ ID NO: 800150 - RNA, 22 nt, Human
ggaaggcuuucuguucugugac

SEQ ID NO: 800151 - RNA, 22 nt, Human
ucaagcaggguagcaagcuggu

SEQ ID NO: 800152 - RNA, 17 nt, Human
gcagccagugcagcagg

SEQ ID NO: 800153 - RNA, 22 nt, Human
cauuccaaguauauacaugaua

SEQ ID NO: 800154 - RNA, 22 nt, Human
aaguuugagagccuuuaguaua

SEQ ID NO: 800155 - RNA, 22 nt, Human
ucugaaauaggaaagcaaaugg

SEQ ID NO: 800156 - RNA, 22 nt, Human
augcacaauuaggauauagcuu

SEQ ID NO: 800157 - RNA, 22 nt, Human
uauuucagcucuuuggauuauc

SEQ ID NO: 800158 - RNA, 22 nt, Human
uuacacagugaauuuacucaag

SEQ ID NO: 800159 - RNA, 22 nt, Human
uuccuaaugucuacuuuaguuc

SEQ ID NO: 800160 - RNA, 21 nt, Human
ucugccagcugaagaggugga

SEQ ID NO: 800161 - RNA, 22 nt, Human
aaucuggacacaguucucaugc

SEQ ID NO: 800162 - RNA, 22 nt, Human
agaggucuuuuggucugcagaa

SEQ ID NO: 800163 - RNA, 22 nt, Human
uauacagaacauuaagaacugu

SEQ ID NO: 800164 - RNA, 22 nt, Human
ggcagcucacgggcauggggug

SEQ ID NO: 800165 - RNA, 22 nt, Human
gcaaaaaaugcuuguugcuuag

SEQ ID NO: 800166 - RNA, 22 nt, Human
ugauucuauggaaggcauaagg

SEQ ID NO: 800167 - RNA, 22 nt, Human
ugagaguauuuuggcauuauca

SEQ ID NO: 800168 - RNA, 22 nt, Human
ucugcccuaauucagugcuuag

SEQ ID NO: 800169 - RNA, 22 nt, Human
cugcuguccaaccugcacucgc

SEQ ID NO: 800170 - RNA, 22 nt, Human
gaaagugcaugugcccaccauu

SEQ ID NO: 800171 - RNA, 22 nt, Human
aaaguuuguuauaugauaagga

SEQ ID NO: 800172 - RNA, 22 nt, Human
ggguaggaugguagaagggacc

SEQ ID NO: 800173 - RNA, 22 nt, Human
gaaauacaauuuugucccagcu

SEQ ID NO: 800174 - RNA, 22 nt, Human
ucaggcugugggcacuggccau

SEQ ID NO: 800175 - RNA, 22 nt, Human
uccaggaggaggaaggcugcca

SEQ ID NO: 800176 - RNA, 22 nt, Human
uaggcuugcaauuaggauggaa

SEQ ID NO: 800177 - RNA, 22 nt, Human
auggugguuugggagaaaaagc

SEQ ID NO: 800178 - RNA, 21 nt, Human
cgcagagcgaacuugcggcgc

SEQ ID NO: 800179 - RNA, 22 nt, Human
ucagggcaaaagggaaaccauu

SEQ ID NO: 800180 - RNA, 22 nt, Human
uucuuacaaacaagaucauuga

SEQ ID NO: 800181 - RNA, 22 nt, Human
acccagagugucugucucaguc

SEQ ID NO: 800182 - RNA, 22 nt, Human
aggcuucagcagcccucucuug

SEQ ID NO: 800183 - RNA, 22 nt, Human
uggcaccugaacuuagaggugu

SEQ ID NO: 800184 - RNA, 22 nt, Human
ggcagcuguuggcucucuagga

SEQ ID NO: 800185 - RNA, 21 nt, Human
gcucugccacuuaccagauuu

SEQ ID NO: 800186 - RNA, 23 nt, Human
uaaagucacauauuagagugagc

SEQ ID NO: 800187 - RNA, 22 nt, Human
caaggcagcuguagggauuugg

SEQ ID NO: 800188 - RNA, 22 nt, Human
uuggaaggagccuaaaagagac

SEQ ID NO: 800189 - RNA, 22 nt, Human
agaagaauacuugauguucaug

SEQ ID NO: 800190 - RNA, 22 nt, Human
uauuaaguaucuugaugacaaa

SEQ ID NO: 800191 - RNA, 22 nt, Human
ugggccuccuuuccauucagag

SEQ ID NO: 800192 - RNA, 22 nt, Human
gcugguggcagagacaucaggu

SEQ ID NO: 800193 - RNA, 22 nt, Human
ccuggccuuaagggcagggagc

SEQ ID NO: 800194 - RNA, 22 nt, Human
acaguacagugcagaggaagau

SEQ ID NO: 800195 - RNA, 22 nt, Human
ggugguugcauaggccagcagc

SEQ ID NO: 800196 - RNA, 22 nt, Human
cagaagggcagcacugggaagg

SEQ ID NO: 800197 - RNA, 22 nt, Human
gagcucauuguggauggauggg

SEQ ID NO: 800198 - RNA, 22 nt, Human
uaguuuaguaagaggagagcug

SEQ ID NO: 800199 - RNA, 22 nt, Human
ugggaguagaugaggagugggc

SEQ ID NO: 800200 - RNA, 22 nt, Human
cugggguggagauuggcaaucu

SEQ ID NO: 800201 - RNA, 22 nt, Human
uggcuuccuaggagcccgugcu

SEQ ID NO: 800202 - RNA, 22 nt, Human
ucacauuucucagcacugauga

SEQ ID NO: 800203 - RNA, 22 nt, Human
gcaaagcugggugugaaugcac

SEQ ID NO: 800204 - RNA, 22 nt, Human
cuggggccacaacggcgcacgc

SEQ ID NO: 800205 - RNA, 18 nt, Human
aguggucuguuauaucau

SEQ ID NO: 800206 - RNA, 22 nt, Human
acaggcugaggaugauugcauc

SEQ ID NO: 800207 - RNA, 22 nt, Human
cuucccaagcuuuaguuauuuu

SEQ ID NO: 800208 - RNA, 21 nt, Human
caguuuaauaacaaagaagga

SEQ ID NO: 800209 - RNA, 22 nt, Human
gagcuaaggcacaggcaggcuu

SEQ ID NO: 800210 - RNA, 22 nt, Human
caauugucagugcuguuuaaau

SEQ ID NO: 800211 - RNA, 22 nt, Human
aggggugaaagagggcccucaa

SEQ ID NO: 800212 - RNA, 22 nt, Human
ugucaucagcauauaagacagu

SEQ ID NO: 800213 - RNA, 22 nt, Human
ucagaagucacuuaggaaaggg

SEQ ID NO: 800214 - RNA, 22 nt, Human
agcagggcuguguagguaauga

SEQ ID NO: 800215 - RNA, 22 nt, Human
uggaugaaauauugcauuuaug

SEQ ID NO: 800216 - RNA, 22 nt, Human
aucauuaaauauaagcuucaca

SEQ ID NO: 800217 - RNA, 22 nt, Human
gccuccaccccuggggagugga

SEQ ID NO: 800218 - RNA, 22 nt, Human
agagggagugaaauggaauaga

SEQ ID NO: 800219 - RNA, 22 nt, Human
gggccaaggggagcuggaaggg

SEQ ID NO: 800220 - RNA, 22 nt, Human
cugacagcuguugcagugaaug

SEQ ID NO: 800221 - RNA, 22 nt, Human
ucaauaaaucccucugacccug

SEQ ID NO: 800222 - RNA, 22 nt, Human
ucagggagauuuggggacucaa

SEQ ID NO: 800223 - RNA, 22 nt, Human
cugugacugggugacaguccuc

SEQ ID NO: 800224 - RNA, 22 nt, Human
cucauucuuucacagucugugg

SEQ ID NO: 800225 - RNA, 23 nt, Human
caggaaauguucuugaagccuga

SEQ ID NO: 800226 - RNA, 22 nt, Human
cuggguugcccugggccuguga

SEQ ID NO: 800227 - RNA, 22 nt, Human
aaaguagcuuaguugauauuuc

SEQ ID NO: 800228 - RNA, 22 nt, Human
gaacaguagaugagaugcuaga

SEQ ID NO: 800229 - RNA, 22 nt, Human
ggcugugccucuggcagcacau

SEQ ID NO: 800230 - RNA, 22 nt, Human
uccggcagcagcucugaaggag

SEQ ID NO: 800231 - RNA, 22 nt, Human
gugacagagugagacccugucu

SEQ ID NO: 800232 - RNA, 22 nt, Human
gcaguggggcgcugggaguugg

SEQ ID NO: 800233 - RNA, 22 nt, Human
ggagggcaacuuuucaguaggu

SEQ ID NO: 800234 - RNA, 22 nt, Human
uaagcacuuuauaugcuuuauc

SEQ ID NO: 800235 - RNA, 22 nt, Human
gcuggcugggacagauuccauu

SEQ ID NO: 800236 - RNA, 22 nt, Human
uaugccaaggaucaauauguau

SEQ ID NO: 800237 - RNA, 22 nt, Human
gccagugggacccgcugugggc

SEQ ID NO: 800238 - RNA, 22 nt, Human
uggguggaauaaaucaguucug

SEQ ID NO: 800239 - RNA, 22 nt, Human
cuccuucaugucauguguccgg

SEQ ID NO: 800240 - RNA, 22 nt, Human
cacaguuuugcccagggcuucu

SEQ ID NO: 800241 - RNA, 22 nt, Human
gcuccuggcucucugagggcug

SEQ ID NO: 800242 - RNA, 22 nt, Human
uguauuuuuagaccuuuagacc

SEQ ID NO: 800243 - RNA, 20 nt, Human
ggcuucuucaggugucuauu

SEQ ID NO: 800244 - RNA, 22 nt, Human
ugagggcugcuuccagagcuag

SEQ ID NO: 800245 - RNA, 22 nt, Human
uucaagaucuuccaaaggauac

SEQ ID NO: 800246 - RNA, 22 nt, Human
agugauuucaucauuuuaucaa

SEQ ID NO: 800247 - RNA, 22 nt, Human
ccugugggagguucugugaguc

SEQ ID NO: 800248 - RNA, 22 nt, Human
gggcagugucgaggucuggucc

SEQ ID NO: 800249 - RNA, 22 nt, Human
uacuuuuuaugauaagaacuga

SEQ ID NO: 800250 - RNA, 22 nt, Human
uaaaggaacagaggacucauuu

SEQ ID NO: 800251 - RNA, 22 nt, Human
acuuaaaaagaaucuuuucacg

SEQ ID NO: 800252 - RNA, 22 nt, Human
ccugugggagcccaggcagaua

SEQ ID NO: 800253 - RNA, 21 nt, Human
gcuggcugucccagggaagca

SEQ ID NO: 800254 - RNA, 22 nt, Human
uccagagacuugcaugugcuug

SEQ ID NO: 800255 - RNA, 21 nt, Human
aaugucauugaauggugagac

SEQ ID NO: 800256 - RNA, 22 nt, Human
uuuacaaguacaccuaacagcu

SEQ ID NO: 800257 - RNA, 22 nt, Human
ucacaggcuccagggccuggau

SEQ ID NO: 800258 - RNA, 22 nt, Human
ucccagcagcauagcucagaau

SEQ ID NO: 800259 - RNA, 22 nt, Human
ugaggaagccaaacagcuacac

SEQ ID NO: 800260 - RNA, 22 nt, Human
uucucuucaucucaguaaaugu

SEQ ID NO: 800261 - RNA, 23 nt, Human
aggaggccugaaacugaggcuga

SEQ ID NO: 800262 - RNA, 19 nt, Human
cucuggcuuccaaagcauc

SEQ ID NO: 800263 - RNA, 22 nt, Human
ggcaggguaaaccgagguaagu

SEQ ID NO: 800264 - RNA, 22 nt, Human
ugugucaauuuucauuccuacu

SEQ ID NO: 800265 - RNA, 22 nt, Human
uccucauucuuggugcaucaaa

SEQ ID NO: 800266 - RNA, 22 nt, Human
aacuaaaagugugucucuugua

SEQ ID NO: 800267 - RNA, 22 nt, Human
gccuggagugcaguggcgugau

SEQ ID NO: 800268 - RNA, 22 nt, Human
ucauguuuggaguuugcucacu

SEQ ID NO: 800269 - RNA, 22 nt, Human
uuccaggaagcaguuagcagcc

SEQ ID NO: 800270 - RNA, 22 nt, Human
uggucugccuggaucacagccc

SEQ ID NO: 800271 - RNA, 22 nt, Human
ccucgcggcacucgggccggau

SEQ ID NO: 800272 - RNA, 22 nt, Human
agcuagggacagauaccagcca

SEQ ID NO: 800273 - RNA, 15 nt, Human
auucacauugcuuca

SEQ ID NO: 800274 - RNA, 22 nt, Human
ucugugucugcagaaguucagc

SEQ ID NO: 800275 - RNA, 22 nt, Human
acagguagauacauacuucuaa

SEQ ID NO: 800276 - RNA, 22 nt, Human
acaauguuuugaaacaucuagg

SEQ ID NO: 800277 - RNA, 22 nt, Human
aauguacaauaagacaaagagg

SEQ ID NO: 800278 - RNA, 22 nt, Human
acagcacaaucugagucccaga

SEQ ID NO: 800279 - RNA, 22 nt, Human
ccuggcagguagcauugaggag

SEQ ID NO: 800280 - RNA, 22 nt, Human
acagugucugacacguaggaag

SEQ ID NO: 800281 - RNA, 23 nt, Human
gccaggcuccggucuguggccac

SEQ ID NO: 800282 - RNA, 19 nt, Human
ugucacugucauggcccag

SEQ ID NO: 800283 - RNA, 22 nt, Human
uuuucuucuaccugcuguccaa

SEQ ID NO: 800284 - RNA, 22 nt, Human
uggggagaagcaauagacucua

SEQ ID NO: 800285 - RNA, 22 nt, Human
ucauuguauucagaacugaaga

SEQ ID NO: 800286 - RNA, 22 nt, Human
gggugguggccagcagugggca

SEQ ID NO: 800287 - RNA, 22 nt, Human
gcuggcaguuuccucaccgagg

SEQ ID NO: 800288 - RNA, 22 nt, Human
gagggaagauuccccauauggg

SEQ ID NO: 800289 - RNA, 22 nt, Human
agcuggcuccagaaggagucgu

SEQ ID NO: 800290 - RNA, 22 nt, Human
agcuggggcauuuauccacuaa

SEQ ID NO: 800291 - RNA, 22 nt, Human
ucuuucaagggcccuaguuugg

SEQ ID NO: 800292 - RNA, 22 nt, Human
uucuuugggauuguagcugucu

SEQ ID NO: 800293 - RNA, 21 nt, Human
ccaggcagagcugugaguucu

SEQ ID NO: 800294 - RNA, 22 nt, Human
gccuccugguugcuucuccaac

SEQ ID NO: 800295 - RNA, 22 nt, Human
ccagcugucagugugaaaauaa

SEQ ID NO: 800296 - RNA, 22 nt, Human
auguuucaggaaaucagcuaga

SEQ ID NO: 800297 - RNA, 22 nt, Human
uggcccaggccaaagcccugga

SEQ ID NO: 800298 - RNA, 22 nt, Human
aaguccugagaccagaaaaugg

SEQ ID NO: 800299 - RNA, 22 nt, Human
cugugucuucugcuuacagucu

SEQ ID NO: 800300 - RNA, 22 nt, Human
aaauuauaggugccaccuugga

SEQ ID NO: 800301 - RNA, 23 nt, Human
cccaagccugugcccucugacuc

SEQ ID NO: 800302 - RNA, 22 nt, Human
augcagaaagcggcaaacaggu

SEQ ID NO: 800303 - RNA, 22 nt, Human
auucuuuaauucaauugaagga

SEQ ID NO: 800304 - RNA, 22 nt, Human
guucaugugacuacuaugaccu

SEQ ID NO: 800305 - RNA, 22 nt, Human
aguccugugaggggugcagcuu

SEQ ID NO: 800306 - RNA, 22 nt, Human
cacacacuguuaauguaggagu

SEQ ID NO: 800307 - RNA, 22 nt, Human
aguuuaauuggaggcguggcuc

SEQ ID NO: 800308 - RNA, 22 nt, Human
cccaggcagggacgugcucugg

SEQ ID NO: 800309 - RNA, 22 nt, Human
uacuguaaugagauuagcuucc

SEQ ID NO: 800310 - RNA, 22 nt, Human
uaacacuaagaaucuaaauuua

SEQ ID NO: 800311 - RNA, 22 nt, Human
aaggaaaugagguugauggaug

SEQ ID NO: 800312 - RNA, 22 nt, Human
guggggaggccuaagcaaguug

SEQ ID NO: 800313 - RNA, 22 nt, Human
gcuggcagcauuagacccuggg

SEQ ID NO: 800314 - RNA, 22 nt, Human
gaaccagcaguugccugaaaaa

SEQ ID NO: 800315 - RNA, 22 nt, Human
auuucucaaccaggucaaaaag

SEQ ID NO: 800316 - RNA, 22 nt, Human
agcagcaguccuuuguguaauu

SEQ ID NO: 800317 - RNA, 22 nt, Human
ucuagggagaagcucugucugu

SEQ ID NO: 800318 - RNA, 23 nt, Human
cuugaaugggauggaauucacug

SEQ ID NO: 800319 - RNA, 22 nt, Human
ucuugaaaguaucuuauuuugu

SEQ ID NO: 800320 - RNA, 22 nt, Human
acauugagaguuuugaagagua

SEQ ID NO: 800321 - RNA, 22 nt, Human
uuucaaacuuuacucuugaauc

SEQ ID NO: 800322 - RNA, 22 nt, Human
aacaaguaaguuuauauauauu

SEQ ID NO: 800323 - RNA, 22 nt, Human
ucuccggguggcggcgaaggga

SEQ ID NO: 800324 - RNA, 22 nt, Human
cugcugaaaacaauaaugauga

SEQ ID NO: 800325 - RNA, 22 nt, Human
acugcagcaaagcccgugucuu

SEQ ID NO: 800326 - RNA, 22 nt, Human
ugagaauuugcauuucuaacaa

SEQ ID NO: 800327 - RNA, 22 nt, Human
ccacggccacccgcucaugggc

SEQ ID NO: 800328 - RNA, 22 nt, Human
cagccugacaccagcuuugggc

SEQ ID NO: 800329 - RNA, 22 nt, Human
cucucaaaguaagguguauaca

SEQ ID NO: 800330 - RNA, 22 nt, Human
gguggcaggcccugagcauccc

SEQ ID NO: 800331 - RNA, 22 nt, Human
ggugcagugguguggcaaaggg

SEQ ID NO: 800332 - RNA, 19 nt, Human
uucuuuggugguggugacc

SEQ ID NO: 800333 - RNA, 18 nt, Human
ucacaucaucccaugcuu

SEQ ID NO: 800334 - RNA, 22 nt, Human
cuuuccuccacucccuaggcuu

SEQ ID NO: 800335 - RNA, 22 nt, Human
acccugggcuuggccugcucag

SEQ ID NO: 800336 - RNA, 23 nt, Human
ugggccagggaguccgguuucuu

SEQ ID NO: 800337 - RNA, 22 nt, Human
gcuggagugcuggagugcagug

SEQ ID NO: 800338 - RNA, 22 nt, Human
ugucuuuacuuagaaguucagg

SEQ ID NO: 800339 - RNA, 22 nt, Human
ccaggugccuccagucacagug

SEQ ID NO: 800340 - RNA, 22 nt, Human
uagaaaccaucucacugcucag

SEQ ID NO: 800341 - RNA, 20 nt, Human
uccaauuaaaaauuguaugc

SEQ ID NO: 800342 - RNA, 22 nt, Human
uagauuuuacuucugucauuac

SEQ ID NO: 800343 - RNA, 22 nt, Human
ucuggagauaagacagacagau

SEQ ID NO: 800344 - RNA, 22 nt, Human
gaacauuugaugaugacauugg

SEQ ID NO: 800345 - RNA, 22 nt, Human
aagcagguuacauacauuaucu

SEQ ID NO: 800346 - RNA, 22 nt, Human
cagcaggcccaggugcugguga

SEQ ID NO: 800347 - RNA, 22 nt, Human
acaugcuucuguuucaagaacu

SEQ ID NO: 800348 - RNA, 22 nt, Human
aacacuuauccacauuugaaag

SEQ ID NO: 800349 - RNA, 22 nt, Human
cagggcaggaugcugugauuau

SEQ ID NO: 800350 - RNA, 22 nt, Human
aaacacuuccuguaacaugaca

SEQ ID NO: 800351 - RNA, 22 nt, Human
aaauauuguuuugguaagcuuc

SEQ ID NO: 800352 - RNA, 22 nt, Human
auuaaauguuccuuaaauuaua

SEQ ID NO: 800353 - RNA, 22 nt, Human
gcuggcucuuuuugccgggcuc

SEQ ID NO: 800354 - RNA, 22 nt, Human
ucuuagaaaugaaguucuuucu

SEQ ID NO: 800355 - RNA, 22 nt, Human
gacaaagugcuaaaccacagag

SEQ ID NO: 800356 - RNA, 22 nt, Human
cagcacagugcagaugcugacu

SEQ ID NO: 800357 - RNA, 22 nt, Human
gcugaagcugcagcaggaggaa

SEQ ID NO: 800358 - RNA, 22 nt, Human
uuuuccuacugauaaacaguua

SEQ ID NO: 800359 - RNA, 22 nt, Human
gggucaggccucaaggugggcu

SEQ ID NO: 800360 - RNA, 22 nt, Human
cagaaacugcuuguggucaucu

SEQ ID NO: 800361 - RNA, 22 nt, Human
uucuuacagcccuauuacuaaa

SEQ ID NO: 800362 - RNA, 19 nt, Human
agccaggguccagacaugu

SEQ ID NO: 800363 - RNA, 22 nt, Human
uggaggagggcuggugucugua

SEQ ID NO: 800364 - RNA, 22 nt, Human
uguucuggagauaagagguaga

SEQ ID NO: 800365 - RNA, 22 nt, Human
ugcugccuucuaggcgugcccu

SEQ ID NO: 800366 - RNA, 22 nt, Human
gauggaaugucacuucuguggu

SEQ ID NO: 800367 - RNA, 22 nt, Human
ccaggugugauuuggcaguguc

SEQ ID NO: 800368 - RNA, 22 nt, Human
aaagucacauagcaucacuucu

SEQ ID NO: 800369 - RNA, 22 nt, Human
agacaauauguauauuaagaau

SEQ ID NO: 800370 - RNA, 22 nt, Human
cagcccugggaguuggggccga

SEQ ID NO: 800371 - RNA, 22 nt, Human
uucuggagccccaagaucugua

SEQ ID NO: 800372 - RNA, 22 nt, Human
auagacaaugguuugccaagaa

SEQ ID NO: 800373 - RNA, 22 nt, Human
cagcaacucuccugugcucaaa

SEQ ID NO: 800374 - RNA, 23 nt, Human
uugcaaauuucaguuaguucaug

SEQ ID NO: 800375 - RNA, 22 nt, Human
gccagcugcuucuccagaauuu

SEQ ID NO: 800376 - RNA, 20 nt, Human
uggaaggcaucugcauuauu

SEQ ID NO: 800377 - RNA, 22 nt, Human
cucuccaguuaccuaggucuga

SEQ ID NO: 800378 - RNA, 22 nt, Human
ccacugggggcugcucccaggu

SEQ ID NO: 800379 - RNA, 22 nt, Human
ugccauauugcaaagugucugc

SEQ ID NO: 800380 - RNA, 22 nt, Human
uauuccuuggcaaaaaauauau

SEQ ID NO: 800381 - RNA, 22 nt, Human
acacaguaguguggaaaaacau

SEQ ID NO: 800382 - RNA, 22 nt, Human
gcugcucagugggccugagccu

SEQ ID NO: 800383 - RNA, 22 nt, Human
gugugggaauggcggucgugca

SEQ ID NO: 800384 - RNA, 22 nt, Human
gcuucucaauucucacccucca

SEQ ID NO: 800385 - RNA, 22 nt, Human
ugagcuggucacuccuucugaa

SEQ ID NO: 800386 - RNA, 22 nt, Human
acaaauuaccauggaauuuggg

SEQ ID NO: 800387 - RNA, 22 nt, Human
acuaaaacaguggcuaguagac

SEQ ID NO: 800388 - RNA, 21 nt, Human
ugaauuucccucuaucauucu

SEQ ID NO: 800389 - RNA, 22 nt, Human
ccugcaccaggcccagcauggu

SEQ ID NO: 800390 - RNA, 22 nt, Human
cggcacagccgggcaaggcugg

SEQ ID NO: 800391 - RNA, 22 nt, Human
augcaauuuacuguacauaaau

SEQ ID NO: 800392 - RNA, 22 nt, Human
ucuggaguaugucccuggugaa

SEQ ID NO: 800393 - RNA, 22 nt, Human
aagaaacuggaauauagagagc

SEQ ID NO: 800394 - RNA, 17 nt, Human
uacugaggggucuggag

SEQ ID NO: 800395 - RNA, 22 nt, Human
gcugugaguggaggaggcugag

SEQ ID NO: 800396 - RNA, 22 nt, Human
ucgggugcuuuuagauauguag

SEQ ID NO: 800397 - RNA, 22 nt, Human
agaggccaggcugcagagggau

SEQ ID NO: 800398 - RNA, 22 nt, Human
auaaucagaauucaugaaagau

SEQ ID NO: 800399 - RNA, 22 nt, Human
aggcuggagacccgccaagaaa

SEQ ID NO: 800400 - RNA, 22 nt, Human
gugggcagccuguccggagacc

SEQ ID NO: 800401 - RNA, 22 nt, Human
gucccagggcaaggcuguuucu

SEQ ID NO: 800402 - RNA, 22 nt, Human
ggcuucaauguauucacauuca

SEQ ID NO: 800403 - RNA, 22 nt, Human
uuauuaaugaguacaaguuauu

SEQ ID NO: 800404 - RNA, 22 nt, Human
uucacauugaaggugcuuucuu

SEQ ID NO: 800405 - RNA, 22 nt, Human
gugcuggcugccaggaggcugc

SEQ ID NO: 800406 - RNA, 22 nt, Human
aucuggauagguuguuuugcau

SEQ ID NO: 800407 - RNA, 22 nt, Human
aagcacaguaaaagcagauuuu

SEQ ID NO: 800408 - RNA, 22 nt, Human
ucacaugccuuuuacucugcac

SEQ ID NO: 800409 - RNA, 22 nt, Human
ugucaaaaagcugggacaagca

SEQ ID NO: 800410 - RNA, 22 nt, Human
cagcuggcguggagugauugca

SEQ ID NO: 800411 - RNA, 22 nt, Human
gaggaggggcacuugucuccua

SEQ ID NO: 800412 - RNA, 22 nt, Human
aggcuggcuucccaagcguccu

SEQ ID NO: 800413 - RNA, 22 nt, Human
ggucacaggggagaagagugau

SEQ ID NO: 800414 - RNA, 22 nt, Human
uggcagcuggagggcaauggcc

SEQ ID NO: 800415 - RNA, 22 nt, Human
guauuuuaagugacuacuaggu

SEQ ID NO: 800416 - RNA, 22 nt, Human
guuuuucugugagcgguaaagg

SEQ ID NO: 800417 - RNA, 22 nt, Human
uugguucauuauugaaugugcu

SEQ ID NO: 800418 - RNA, 22 nt, Human
uuggagucacaggagaagaaug

SEQ ID NO: 800419 - RNA, 19 nt, Human
uuucuguuugcuucugguu

SEQ ID NO: 800420 - RNA, 22 nt, Human
uucaacaaguaguacacacagu

SEQ ID NO: 800421 - RNA, 22 nt, Human
uggcauggacuagugcugaggu

SEQ ID NO: 800422 - RNA, 22 nt, Human
uagcauuucccaaaugcauuug

SEQ ID NO: 800423 - RNA, 22 nt, Human
accuuuauguuugauuacaauu

SEQ ID NO: 800424 - RNA, 19 nt, Human
ugcauauaucuaugaaaga

SEQ ID NO: 800425 - RNA, 22 nt, Human
caguggcaaggacaguaauaau

SEQ ID NO: 800426 - RNA, 19 nt, Human
ggcagagcuccugcuuucu

SEQ ID NO: 800427 - RNA, 22 nt, Human
auuuugaaucaccuuggaagaa

SEQ ID NO: 800428 - RNA, 22 nt, Human
uucaguauuugaaaccauaggc

SEQ ID NO: 800429 - RNA, 22 nt, Human
agguggcugaagagugggugag

SEQ ID NO: 800430 - RNA, 22 nt, Human
gauuucuugauaauucaaaucc

SEQ ID NO: 800431 - RNA, 22 nt, Human
ccaggggcucucagggugugug

SEQ ID NO: 800432 - RNA, 22 nt, Human
cagggagccccaauuccaugcc

SEQ ID NO: 800433 - RNA, 22 nt, Human
aaggcagucugguuucaaagca

SEQ ID NO: 800434 - RNA, 22 nt, Human
cucccuccaaauaagacucggg

SEQ ID NO: 800435 - RNA, 22 nt, Human
ugaggccaggcaaaggcgaucu

SEQ ID NO: 800436 - RNA, 19 nt, Human
aagaagcaauaagcuguga

SEQ ID NO: 800437 - RNA, 22 nt, Human
gcuggcagguccaagauagagc

SEQ ID NO: 800438 - RNA, 22 nt, Human
aauuguaacuacauugagaaca

SEQ ID NO: 800439 - RNA, 22 nt, Human
acaagcaugugguaaaaagacc

SEQ ID NO: 800440 - RNA, 22 nt, Human
acuuuggacgccaugcuguuug

SEQ ID NO: 800441 - RNA, 22 nt, Human
cuggagugaggucugggagccu

SEQ ID NO: 800442 - RNA, 22 nt, Human
ucaggaggccugaguagcucua

SEQ ID NO: 800443 - RNA, 22 nt, Human
agugucaacucggaauaaggau

SEQ ID NO: 800444 - RNA, 22 nt, Human
cgcaggcucgguucacagagca

SEQ ID NO: 800445 - RNA, 22 nt, Human
gucauauacacugcauguaauc

SEQ ID NO: 800446 - RNA, 22 nt, Human
ucagggcugugguuccuuuucu

SEQ ID NO: 800447 - RNA, 22 nt, Human
acaugacagugcuuagcaaacu

SEQ ID NO: 800448 - RNA, 22 nt, Human
uuacaacacuacuuauccuuga

SEQ ID NO: 800449 - RNA, 22 nt, Human
acuucuucuucagcugggggau

SEQ ID NO: 800450 - RNA, 22 nt, Human
uuauaaagugagaagugcuaug

SEQ ID NO: 800451 - RNA, 18 nt, Human
gccagagggcccaagguc

SEQ ID NO: 800452 - RNA, 21 nt, Human
cauaccauucucuaagcaaaa

SEQ ID NO: 800453 - RNA, 22 nt, Human
ucaccccuaccaaggagcacug

SEQ ID NO: 800454 - RNA, 23 nt, Human
agaagcugggagccuggggaugg

SEQ ID NO: 800455 - RNA, 22 nt, Human
gaguggagcaaaagagguagau

SEQ ID NO: 800456 - RNA, 22 nt, Human
gcaggcuggaggcuguucuggg

SEQ ID NO: 800457 - RNA, 22 nt, Human
ggacauggagcuccauggaggc

SEQ ID NO: 800458 - RNA, 20 nt, Human
ucaggcuggugggcuuuccc

SEQ ID NO: 800459 - RNA, 22 nt, Human
uggugcugccaccuccucugcu

SEQ ID NO: 800460 - RNA, 22 nt, Human
uauucugugugauauguaaaug

SEQ ID NO: 800461 - RNA, 22 nt, Human
guggcaugacagugaaugggca

SEQ ID NO: 800462 - RNA, 20 nt, Human
cuggcuggaaacuuagccuu

SEQ ID NO: 800463 - RNA, 22 nt, Human
auaaauucaaagcauuuaggac

SEQ ID NO: 800464 - RNA, 22 nt, Human
caaagcagaagguucuguggua

SEQ ID NO: 800465 - RNA, 22 nt, Human
aggaggaaaaaggccacagcaa

SEQ ID NO: 800466 - RNA, 22 nt, Human
agaaaucaggaacaguaaggag

SEQ ID NO: 800467 - RNA, 22 nt, Human
agagcaauuagcuuagguaaaa

SEQ ID NO: 800468 - RNA, 22 nt, Human
cuuuggcugcauucgaguugcu

SEQ ID NO: 800469 - RNA, 22 nt, Human
aagaaacguuugagcuuugacu

SEQ ID NO: 800470 - RNA, 22 nt, Human
auuguucauuguacaccuagua

SEQ ID NO: 800471 - RNA, 22 nt, Human
agggaugggaacuccuccagca

SEQ ID NO: 800472 - RNA, 22 nt, Human
caggcagaggaggccuucuccu

SEQ ID NO: 800473 - RNA, 20 nt, Human
ugccugggaaggcguggagg

SEQ ID NO: 800474 - RNA, 22 nt, Human
agccagggaagaggccuaccuc

SEQ ID NO: 800475 - RNA, 22 nt, Human
uggacucuaagcagaggaucua

SEQ ID NO: 800476 - RNA, 22 nt, Human
uauggaaaaauguaucuuguca

SEQ ID NO: 800477 - RNA, 22 nt, Human
ucaggaggccggcaggauuuga

SEQ ID NO: 800478 - RNA, 22 nt, Human
auuucucugccucagcuucugc

SEQ ID NO: 800479 - RNA, 22 nt, Human
gugggcagccccuucaaggcca

SEQ ID NO: 800480 - RNA, 22 nt, Human
uuacuguuugaaaaaugaaugu

SEQ ID NO: 800481 - RNA, 22 nt, Human
uccuuaaaugaacucugcauga

SEQ ID NO: 800482 - RNA, 21 nt, Human
gcugggucagcagguccucug

SEQ ID NO: 800483 - RNA, 22 nt, Human
guucugggagaucuugagcuuc

SEQ ID NO: 800484 - RNA, 22 nt, Human
acuggcugaucaccugccucag

SEQ ID NO: 800485 - RNA, 22 nt, Human
cccagccucugggcucacccaa

SEQ ID NO: 800486 - RNA, 22 nt, Human
uagcuuuguccuccacccucag

SEQ ID NO: 800487 - RNA, 22 nt, Human
ugcuaggggcacuaaaagcuga

SEQ ID NO: 800488 - RNA, 22 nt, Human
cagcugagaccagaaugcaggu

SEQ ID NO: 800489 - RNA, 22 nt, Human
agcagcuggguccggcggagca

SEQ ID NO: 800490 - RNA, 22 nt, Human
ugggagcaagcuggugcuggag

SEQ ID NO: 800491 - RNA, 22 nt, Human
uuucagagcucagcagcuagag

SEQ ID NO: 800492 - RNA, 22 nt, Human
gcaagcugcucuuauguggagg

SEQ ID NO: 800493 - RNA, 22 nt, Human
cacagcaaaggcuucggcugau

SEQ ID NO: 800494 - RNA, 21 nt, Human
aaauguguuccauaaugcuuu

SEQ ID NO: 800495 - RNA, 22 nt, Human
cagagcagaagguccaagccug

SEQ ID NO: 800496 - RNA, 22 nt, Human
ccuugaaucucugcucuagaac

SEQ ID NO: 800497 - RNA, 22 nt, Human
aagcugaggauacaugaagccu

SEQ ID NO: 800498 - RNA, 18 nt, Human
agugccagcucugcuuuc

SEQ ID NO: 800499 - RNA, 22 nt, Human
acacaaaguuggaugacaaaau

SEQ ID NO: 800500 - RNA, 23 nt, Human
agcaccugugauuuccuagcucu

SEQ ID NO: 800501 - RNA, 22 nt, Human
ucaaugaaagagcaugcauuuu

SEQ ID NO: 800502 - RNA, 22 nt, Human
ugcagcucaggauucucagggc

SEQ ID NO: 800503 - RNA, 22 nt, Human
uggggacacagagccaaacuau

SEQ ID NO: 800504 - RNA, 23 nt, Human
agggccaggugcggaaacagcuc

SEQ ID NO: 800505 - RNA, 22 nt, Human
auauuuuuccaugugggacucu

SEQ ID NO: 800506 - RNA, 22 nt, Human
cagagacccuucucaguggcca

SEQ ID NO: 800507 - RNA, 22 nt, Human
guucauaauuugaaggaauagg

SEQ ID NO: 800508 - RNA, 22 nt, Human
ucuuagaaacuguaucgauuag

SEQ ID NO: 800509 - RNA, 22 nt, Human
gccucagggauaggaugagcau

SEQ ID NO: 800510 - RNA, 22 nt, Human
cagugcagccaaggacaggcac

SEQ ID NO: 800511 - RNA, 22 nt, Human
uuugcaaacuuuccucuggacc

SEQ ID NO: 800512 - RNA, 18 nt, Human
ggcuccaggaccuaccca

SEQ ID NO: 800513 - RNA, 22 nt, Human
agcaggcagccauuuggaaggc

SEQ ID NO: 800514 - RNA, 22 nt, Human
gccuaggaguggggauggcggu

SEQ ID NO: 800515 - RNA, 22 nt, Human
acaggcagcgucauugcugcuc

SEQ ID NO: 800516 - RNA, 19 nt, Human
ggcucucccuugagagagc

SEQ ID NO: 800517 - RNA, 22 nt, Human
aaucuaacuucauagcugauuu

SEQ ID NO: 800518 - RNA, 22 nt, Human
ucucagaguuuagagcugagcc

SEQ ID NO: 800519 - RNA, 22 nt, Human
ccagcauccaugcucccucggg

SEQ ID NO: 800520 - RNA, 18 nt, Human
ugucaucuguuuaaaacc

SEQ ID NO: 800521 - RNA, 22 nt, Human
agccuggguuuuuauuaaggag

SEQ ID NO: 800522 - RNA, 22 nt, Human
ggcugccuccucgagacaggau

SEQ ID NO: 800523 - RNA, 22 nt, Human
caggaaauaucuccuggcagag

SEQ ID NO: 800524 - RNA, 22 nt, Human
acaguguagaauccuguacuua

SEQ ID NO: 800525 - RNA, 23 nt, Human
ucccagggaaggugagcgaggcu

SEQ ID NO: 800526 - RNA, 22 nt, Human
aaggaacacuacaaggcuggga

SEQ ID NO: 800527 - RNA, 22 nt, Human
ucuuucuuuaucaccugauaug

SEQ ID NO: 800528 - RNA, 22 nt, Human
auagcaaaagcaugugcaauac

SEQ ID NO: 800529 - RNA, 22 nt, Human
guuuauaaauucugcuuuuguu

SEQ ID NO: 800530 - RNA, 22 nt, Human
auauuagcagugaucaaaaugg

SEQ ID NO: 800531 - RNA, 19 nt, Human
gaggaggcuucagcuuucu

SEQ ID NO: 800532 - RNA, 22 nt, Human
uucugcaugauauuaaauguaa

SEQ ID NO: 800533 - RNA, 22 nt, Human
uagcuguguagacacucagagc

SEQ ID NO: 800534 - RNA, 22 nt, Human
uacaucauuuuggagaugagca

SEQ ID NO: 800535 - RNA, 22 nt, Human
cagcaagucauccaggaugaug

SEQ ID NO: 800536 - RNA, 20 nt, Human
ucccuaggcaggagggcacu

SEQ ID NO: 800537 - RNA, 22 nt, Human
guuucauauaccaagcacuuga

SEQ ID NO: 800538 - RNA, 22 nt, Human
aguaaaaauugaggugcaaaau

SEQ ID NO: 800539 - RNA, 22 nt, Human
gcagaagucagaccaucugaau

SEQ ID NO: 800540 - RNA, 22 nt, Human
uucacaaagcuggagcauuucc

SEQ ID NO: 800541 - RNA, 21 nt, Human
ccauaaucuuaggaucaaaau

SEQ ID NO: 800542 - RNA, 22 nt, Human
cauggcagugauucagccuuug

SEQ ID NO: 800543 - RNA, 22 nt, Human
cacagucuccucucuuagccug

SEQ ID NO: 800544 - RNA, 22 nt, Human
acacuacaaucucagaacuaua

SEQ ID NO: 800545 - RNA, 22 nt, Human
caaaagcagcaaguuuauaugu

SEQ ID NO: 800546 - RNA, 22 nt, Human
ccagggcaauuauuuggagggu

SEQ ID NO: 800547 - RNA, 22 nt, Human
gcaggacauucagugaaugggc

SEQ ID NO: 800548 - RNA, 22 nt, Human
cuggggacgucgggcaguguuc

SEQ ID NO: 800549 - RNA, 22 nt, Human
uauguacaguccuuaacuuaaa

SEQ ID NO: 800550 - RNA, 22 nt, Human
acagugucugacacauuguagc

SEQ ID NO: 800551 - RNA, 22 nt, Human
acugccugugucccuucagugc

SEQ ID NO: 800552 - RNA, 22 nt, Human
agaugcuggggccccucggaug

SEQ ID NO: 800553 - RNA, 22 nt, Human
cccuguggcaggaggaggagca

SEQ ID NO: 800554 - RNA, 22 nt, Human
ugcuuaauaggaguugaacauu

SEQ ID NO: 800555 - RNA, 22 nt, Human
ccaccaggacagcccugagggg

SEQ ID NO: 800556 - RNA, 20 nt, Human
aggagggaccuggauuggcg

SEQ ID NO: 800557 - RNA, 22 nt, Human
aagaacaacugcuuuaaaagca

SEQ ID NO: 800558 - RNA, 22 nt, Human
cauuugcaagagauaaauguuu

SEQ ID NO: 800559 - RNA, 22 nt, Human
acaggcacugucaagucaugaa

SEQ ID NO: 800560 - RNA, 23 nt, Human
ugcaggcuaggaagagagccuuc

SEQ ID NO: 800561 - RNA, 22 nt, Human
gcuggagguuucaccugaguuu

SEQ ID NO: 800562 - RNA, 22 nt, Human
cuaaagaauuuugcuugaccag

SEQ ID NO: 800563 - RNA, 22 nt, Human
gccagcuuggcaugugaggagu

SEQ ID NO: 800564 - RNA, 22 nt, Human
uuucuacauuuguaaccagauu

SEQ ID NO: 800565 - RNA, 22 nt, Human
gccugcucuggaauccauguaa

SEQ ID NO: 800566 - RNA, 22 nt, Human
cucaggaguaguucagcagcug

SEQ ID NO: 800567 - RNA, 22 nt, Human
cagagagagugggguguggauu

SEQ ID NO: 800568 - RNA, 22 nt, Human
ggcauugaugggagauggugga

SEQ ID NO: 800569 - RNA, 17 nt, Human
agagggaaaaugcgguu

SEQ ID NO: 800570 - RNA, 22 nt, Human
uuagagguucuaugugucugga

SEQ ID NO: 800571 - RNA, 22 nt, Human
uuuacuuuugguaaggucauuu

SEQ ID NO: 800572 - RNA, 22 nt, Human
uaggacaguagcuggugcacag

SEQ ID NO: 800573 - RNA, 22 nt, Human
uccugaaaaauuacauguucag

SEQ ID NO: 800574 - RNA, 22 nt, Human
aaucuuaagcugaauucucucc

SEQ ID NO: 800575 - RNA, 22 nt, Human
aaacucaaauuaaacuagcuua

SEQ ID NO: 800576 - RNA, 22 nt, Human
caggcuggucccagagcauugc

SEQ ID NO: 800577 - RNA, 23 nt, Human
acagaagccaggagccgcugggc

SEQ ID NO: 800578 - RNA, 22 nt, Human
uuuuuggaaggagauccacacu

SEQ ID NO: 800579 - RNA, 22 nt, Human
auaaaaaggacagauguggucu

SEQ ID NO: 800580 - RNA, 22 nt, Human
aguaaacauaauuuaccuguag

SEQ ID NO: 800581 - RNA, 22 nt, Human
agguccuggacugcucuuguua

SEQ ID NO: 800582 - RNA, 22 nt, Human
ugcaaaugggaaacccagcagu

SEQ ID NO: 800583 - RNA, 22 nt, Human
uuguuacacauaauaacauuuu

SEQ ID NO: 800584 - RNA, 22 nt, Human
ugcaggagcaccagcucacccu

SEQ ID NO: 800585 - RNA, 22 nt, Human
ggcaagggacggccgugagaca

SEQ ID NO: 800586 - RNA, 22 nt, Human
uugccuggagggacauggagac

SEQ ID NO: 800587 - RNA, 22 nt, Human
agccaacuuggaaagucagauu

SEQ ID NO: 800588 - RNA, 22 nt, Human
gcagggugauagugaggcucag

SEQ ID NO: 800589 - RNA, 22 nt, Human
cucucagugccugcccuaggcu

SEQ ID NO: 800590 - RNA, 22 nt, Human
gcagcaggauggccaauugcca

SEQ ID NO: 800591 - RNA, 22 nt, Human
cuuauucagaaggagaaaugga

SEQ ID NO: 800592 - RNA, 22 nt, Human
caaaucuaggaugcauguagug

SEQ ID NO: 800593 - RNA, 22 nt, Human
ccugagccugaguggugcaggg

SEQ ID NO: 800594 - RNA, 22 nt, Human
ccuggcaguuuugcccaggauu

SEQ ID NO: 800595 - RNA, 22 nt, Human
aggggugaaggcccgauaggag

SEQ ID NO: 800596 - RNA, 23 nt, Human
auaguuuucccugguucuugcca

SEQ ID NO: 800597 - RNA, 22 nt, Human
ugcugucuguuuacuggcuaua

SEQ ID NO: 800598 - RNA, 22 nt, Human
gcagggccagugcagagaggaa

SEQ ID NO: 800599 - RNA, 22 nt, Human
gauuucuugagcaaguugcuua

SEQ ID NO: 800600 - RNA, 22 nt, Human
cuugucacucuggcuccagagc

SEQ ID NO: 800601 - RNA, 23 nt, Human
acagaaaucauuuguaagguacc

SEQ ID NO: 800602 - RNA, 22 nt, Human
cauuugcaaaccaacaagauga

SEQ ID NO: 800603 - RNA, 22 nt, Human
ccuggcugaggggccaaggacc

SEQ ID NO: 800604 - RNA, 22 nt, Human
cugggaccaucugugucuacuu

SEQ ID NO: 800605 - RNA, 22 nt, Human
accuugucuuuuauagaacaag

SEQ ID NO: 800606 - RNA, 22 nt, Human
ugacugaggcagccugaguuau

SEQ ID NO: 800607 - RNA, 22 nt, Human
aguuauguccucagcaaaucaa

SEQ ID NO: 800608 - RNA, 22 nt, Human
cagcaggauuugaaaggaagag

SEQ ID NO: 800609 - RNA, 22 nt, Human
cuuguuuaauaauaccuuagca

SEQ ID NO: 800610 - RNA, 18 nt, Human
ucacauuauaauguaaca

SEQ ID NO: 800611 - RNA, 22 nt, Human
aaugcaaugcagcaccuccuug

SEQ ID NO: 800612 - RNA, 22 nt, Human
uagcuuuguauuaucagcauug

SEQ ID NO: 800613 - RNA, 22 nt, Human
acuuucuuaggcuguauaaaug

SEQ ID NO: 800614 - RNA, 22 nt, Human
ucugagagucucugaggcagau

SEQ ID NO: 800615 - RNA, 22 nt, Human
aagcuuuguccaaggccaugca

SEQ ID NO: 800616 - RNA, 22 nt, Human
uguucuuaugaauucaagacac

SEQ ID NO: 800617 - RNA, 22 nt, Human
acugcagcagguaagagcauuu

SEQ ID NO: 800618 - RNA, 21 nt, Human
uucuccaggcaaccauuucag

SEQ ID NO: 800619 - RNA, 22 nt, Human
aagagaagaaagugucuacaca

SEQ ID NO: 800620 - RNA, 22 nt, Human
cugcccucuagaggaggacuga

SEQ ID NO: 800621 - RNA, 22 nt, Human
acacugguguaguuuucugcag

SEQ ID NO: 800622 - RNA, 22 nt, Human
ggccuuggaguccuccacugga

SEQ ID NO: 800623 - RNA, 22 nt, Human
caguuuaaggcaggacauggga

SEQ ID NO: 800624 - RNA, 22 nt, Human
ccaggguggcguagaugcuggg

SEQ ID NO: 800625 - RNA, 22 nt, Human
ucaaauacauggucaaucaacu

SEQ ID NO: 800626 - RNA, 22 nt, Human
ugucacaugaagccaacauagc

SEQ ID NO: 800627 - RNA, 22 nt, Human
ucuaggguccacagggucagcc

SEQ ID NO: 800628 - RNA, 22 nt, Human
aguuucuucauccaaaaaaugg

SEQ ID NO: 800629 - RNA, 20 nt, Human
ugcagcugguuucacaggga

SEQ ID NO: 800630 - RNA, 22 nt, Human
ccugggagggcaagugcugaug

SEQ ID NO: 800631 - RNA, 22 nt, Human
uuuuauguugcuauaauaggua

SEQ ID NO: 800632 - RNA, 22 nt, Human
cgcaggggaggaagguacaccu

SEQ ID NO: 800633 - RNA, 22 nt, Human
cuuugcuuacuggugucugcau

SEQ ID NO: 800634 - RNA, 22 nt, Human
aaaaauagaaggauugacugag

SEQ ID NO: 800635 - RNA, 22 nt, Human
uuuacaaggcagaacugauuaa

SEQ ID NO: 800636 - RNA, 22 nt, Human
ccuggcagguggagguugcagu

SEQ ID NO: 800637 - RNA, 22 nt, Human
accagcugugugaccugaggca

SEQ ID NO: 800638 - RNA, 22 nt, Human
caggcagcugggucaccguccc

SEQ ID NO: 800639 - RNA, 22 nt, Human
cccacugcugcucuccauggca

SEQ ID NO: 800640 - RNA, 22 nt, Human
ccugggcucugaggagggaguc

SEQ ID NO: 800641 - RNA, 22 nt, Human
guggggaguguucugugauugg

SEQ ID NO: 800642 - RNA, 22 nt, Human
uggcacagacagcacagcaaug

SEQ ID NO: 800643 - RNA, 22 nt, Human
ugcuggggguagcucugcguag

SEQ ID NO: 800644 - RNA, 22 nt, Human
aaguuuuauuggcuauagcacu

SEQ ID NO: 800645 - RNA, 22 nt, Human
agcuuagaagugugcugagagg

SEQ ID NO: 800646 - RNA, 22 nt, Human
gaggugggaugugugugcuacu

SEQ ID NO: 800647 - RNA, 16 nt, Human
augcugcuauuagagg

SEQ ID NO: 800648 - RNA, 22 nt, Human
uucaaagucagccaucuggcua

SEQ ID NO: 800649 - RNA, 22 nt, Human
agggccaggaucacagccaaga

SEQ ID NO: 800650 - RNA, 22 nt, Human
cauucacaauaguugaaaggug

SEQ ID NO: 800651 - RNA, 19 nt, Human
gucuuacaggcaacaugag

SEQ ID NO: 800652 - RNA, 22 nt, Human
cuacaaagaaaguauacuggac

SEQ ID NO: 800653 - RNA, 22 nt, Human
cugaagcagggagugaugaagu

SEQ ID NO: 800654 - RNA, 22 nt, Human
aucacauauuuaagaaacaugu

SEQ ID NO: 800655 - RNA, 22 nt, Human
auuaagagccuacuaugugccg

SEQ ID NO: 800656 - RNA, 22 nt, Human
gaggcccagagagguugcauga

SEQ ID NO: 800657 - RNA, 22 nt, Human
cucauuuacucaucugcaaaac

SEQ ID NO: 800658 - RNA, 22 nt, Human
ugcagggaggccccgcagcccu

SEQ ID NO: 800659 - RNA, 22 nt, Human
ucugugcacuaacauuccuggu

SEQ ID NO: 800660 - RNA, 22 nt, Human
uggugcugauaauggcaggauu

SEQ ID NO: 800661 - RNA, 22 nt, Human
cuucucucccuggcacucagac

SEQ ID NO: 800662 - RNA, 22 nt, Human
acauuguauacagacuuaguca

SEQ ID NO: 800663 - RNA, 22 nt, Human
cagcccucaucccgccugcguu

SEQ ID NO: 800664 - RNA, 22 nt, Human
ucccccucauuaccucauucaa

SEQ ID NO: 800665 - RNA, 22 nt, Human
gcugagagcacauagaaggggc

SEQ ID NO: 800666 - RNA, 22 nt, Human
cuggacaggcuggggacugcaa

SEQ ID NO: 800667 - RNA, 22 nt, Human
ugcagggauccuagcugaagag

SEQ ID NO: 800668 - RNA, 22 nt, Human
gcugccuuuuaaagccucgcuu

SEQ ID NO: 800669 - RNA, 22 nt, Human
uagcuuuaaaaaucaucaaagc

SEQ ID NO: 800670 - RNA, 22 nt, Human
cugggucaaggaaugcuggugg

SEQ ID NO: 800671 - RNA, 22 nt, Human
ggaagacaagcaguggcugagc

SEQ ID NO: 800672 - RNA, 22 nt, Human
ugucuauuugaauuauccuaau

SEQ ID NO: 800673 - RNA, 22 nt, Human
ucauuucaaugauacuacuaag

SEQ ID NO: 800674 - RNA, 22 nt, Human
gacacaguuuuucucacggugg

SEQ ID NO: 800675 - RNA, 20 nt, Human
gcaggcagggaaugggggug

SEQ ID NO: 800676 - RNA, 18 nt, Human
cuucucccaucuuggcca

SEQ ID NO: 800677 - RNA, 22 nt, Human
cuuggcagcuuuuggaggagcc

SEQ ID NO: 800678 - RNA, 22 nt, Human
agcuggauuaaauauagcuuuc

SEQ ID NO: 800679 - RNA, 19 nt, Human
gaauguuuguauucagcgc

SEQ ID NO: 800680 - RNA, 23 nt, Human
uguuuuucauucacaugggcugu

SEQ ID NO: 800681 - RNA, 22 nt, Human
gcacaggaggccgaugcucaug

SEQ ID NO: 800682 - RNA, 22 nt, Human
caguggagugggacuggucuga

SEQ ID NO: 800683 - RNA, 22 nt, Human
gcccagguuggagagcaguggc

SEQ ID NO: 800684 - RNA, 22 nt, Human
gggggugacgauggcagcuggu

SEQ ID NO: 800685 - RNA, 22 nt, Human
uugaacaauuugguauacaaac

SEQ ID NO: 800686 - RNA, 22 nt, Human
ucagugcauggacagauuuaga

SEQ ID NO: 800687 - RNA, 22 nt, Human
agugucaagugaggagggaaag

SEQ ID NO: 800688 - RNA, 22 nt, Human
caucagaagaaagacaaaugau

SEQ ID NO: 800689 - RNA, 22 nt, Human
caggagcccguugcuccggcgg

SEQ ID NO: 800690 - RNA, 22 nt, Human
ggacagagcccugguggccuaa

SEQ ID NO: 800691 - RNA, 22 nt, Human
guuucuaaauguucugaguuuu

SEQ ID NO: 800692 - RNA, 22 nt, Human
guuuacauaugucugucugcac

SEQ ID NO: 800693 - RNA, 19 nt, Human
agcaggccacagggccagc

SEQ ID NO: 800694 - RNA, 22 nt, Human
uauuauuauaguuauugggaag

SEQ ID NO: 800695 - RNA, 22 nt, Human
agcugccaucagccuuuggaug

SEQ ID NO: 800696 - RNA, 22 nt, Human
cucucccuaugccucccaggag

SEQ ID NO: 800697 - RNA, 22 nt, Human
cacugaggcugggggagaaggu

SEQ ID NO: 800698 - RNA, 22 nt, Human
gauucacaguuuaggcugggcu

SEQ ID NO: 800699 - RNA, 22 nt, Human
ugcccugguuacacuggagucc

SEQ ID NO: 800700 - RNA, 22 nt, Human
aguuggugagcgugugguaauc

SEQ ID NO: 800701 - RNA, 22 nt, Human
gcuggcagguaaagccccgggg

SEQ ID NO: 800702 - RNA, 19 nt, Human
gcaagguucacucccagag

SEQ ID NO: 800703 - RNA, 18 nt, Human
uguggcaggggugggaga

SEQ ID NO: 800704 - RNA, 22 nt, Human
ugggugaguggagggcauucua

SEQ ID NO: 800705 - RNA, 22 nt, Human
ggagcccuucuauuccauggag

SEQ ID NO: 800706 - RNA, 22 nt, Human
cccuccauuaaaacagaccuau

SEQ ID NO: 800707 - RNA, 22 nt, Human
acuugucuuuguaaaauagaaa

SEQ ID NO: 800708 - RNA, 22 nt, Human
cccaggcuggaauuccaggccu

SEQ ID NO: 800709 - RNA, 22 nt, Human
acuggcugugcccauagagcuc

SEQ ID NO: 800710 - RNA, 22 nt, Human
uuggcacacaguaagcccuaag

SEQ ID NO: 800711 - RNA, 22 nt, Human
agcucugguuauugaagcaggg

SEQ ID NO: 800712 - RNA, 22 nt, Human
acaaugaagggagacacuugcu

SEQ ID NO: 800713 - RNA, 22 nt, Human
aggacuggugugugaucagcau

SEQ ID NO: 800714 - RNA, 22 nt, Human
agaguggcuucuuugacaugcu

SEQ ID NO: 800715 - RNA, 22 nt, Human
uacagauauagagauuuauaga

SEQ ID NO: 800716 - RNA, 22 nt, Human
uauuuaguuaucuuucauaaaa

SEQ ID NO: 800717 - RNA, 22 nt, Human
acuggcagaacuggugauuguc

SEQ ID NO: 800718 - RNA, 22 nt, Human
uacagcuuuagcaaauuaccua

SEQ ID NO: 800719 - RNA, 22 nt, Human
aacugaaacguauuuuugagau

SEQ ID NO: 800720 - RNA, 23 nt, Human
uggcaaggaaugggauggagacu

SEQ ID NO: 800721 - RNA, 22 nt, Human
aaucacagccacaaccuggggg

SEQ ID NO: 800722 - RNA, 22 nt, Human
uaauuuuacuuccugagcaccu

SEQ ID NO: 800723 - RNA, 19 nt, Human
ugccagcucacaggagcuc

SEQ ID NO: 800724 - RNA, 22 nt, Human
agauguuuauaacucaugagug

SEQ ID NO: 800725 - RNA, 22 nt, Human
guuuuuauauccuguggagugu

SEQ ID NO: 800726 - RNA, 22 nt, Human
caaaauaccacgacuuguuuua

SEQ ID NO: 800727 - RNA, 23 nt, Human
ccucaggggaccugugagccuga

SEQ ID NO: 800728 - RNA, 22 nt, Human
gggagcaggagccugccugcca

SEQ ID NO: 800729 - RNA, 22 nt, Human
gcugugugcugggcauggcacu

SEQ ID NO: 800730 - RNA, 22 nt, Human
uaugcacauucacacaaaaaug

SEQ ID NO: 800731 - RNA, 18 nt, Human
ccugcagcccaggaggcc

SEQ ID NO: 800732 - RNA, 22 nt, Human
gcuggccaggaagagucucaga

SEQ ID NO: 800733 - RNA, 22 nt, Human
uucguauuuauauucucaauac

SEQ ID NO: 800734 - RNA, 23 nt, Human
gcugcagcuguggauguucucag

SEQ ID NO: 800735 - RNA, 22 nt, Human
uuauuucuacuauuuugccuga

SEQ ID NO: 800736 - RNA, 22 nt, Human
guccugggcccaggggcugccu

SEQ ID NO: 800737 - RNA, 22 nt, Human
aaaguauauuuacuuacuguga

SEQ ID NO: 800738 - RNA, 22 nt, Human
uguaguaagugcgcaauaaaua

SEQ ID NO: 800739 - RNA, 22 nt, Human
ucagcaggcugucagcaggggc

SEQ ID NO: 800740 - RNA, 22 nt, Human
acacuacaacagcagaggugag

SEQ ID NO: 800741 - RNA, 22 nt, Human
acauuucuuuucaucucuauau

SEQ ID NO: 800742 - RNA, 22 nt, Human
aaaagccaugcauaccuaagag

SEQ ID NO: 800743 - RNA, 22 nt, Human
aagaguuuaauuuugucuagac

SEQ ID NO: 800744 - RNA, 22 nt, Human
cacagugcucaaacacaagugc

SEQ ID NO: 800745 - RNA, 22 nt, Human
cugcugggucuaugcaagugga

SEQ ID NO: 800746 - RNA, 22 nt, Human
uuagucaaaucauucuguuucu

SEQ ID NO: 800747 - RNA, 22 nt, Human
cagagagaauauguaguaugga

SEQ ID NO: 800748 - RNA, 22 nt, Human
aguuucuaacauauagcauugg

SEQ ID NO: 800749 - RNA, 22 nt, Human
uugcuucagaaguucugcuugu

SEQ ID NO: 800750 - RNA, 22 nt, Human
ggugcaggaaucugcaauugaa

SEQ ID NO: 800751 - RNA, 22 nt, Human
aaguuucugggcaagacaaggc

SEQ ID NO: 800752 - RNA, 22 nt, Human
ggaagaggcugagccagguccc

SEQ ID NO: 800753 - RNA, 22 nt, Human
gaaggcucuggggauugagaua

SEQ ID NO: 800754 - RNA, 22 nt, Human
uaggaacacagggacuugauga

SEQ ID NO: 800755 - RNA, 22 nt, Human
cugggagaucuguugggacugg

SEQ ID NO: 800756 - RNA, 22 nt, Human
gcuuucuucauacucaagcauc

SEQ ID NO: 800757 - RNA, 22 nt, Human
ucccugggguuccuccagccac

SEQ ID NO: 800758 - RNA, 22 nt, Human
uggcccugcuggccaaaggcua

SEQ ID NO: 800759 - RNA, 22 nt, Human
aggagcugcagauucugccuug

SEQ ID NO: 800760 - RNA, 22 nt, Human
ucauuuacacuucacaaaugga

SEQ ID NO: 800761 - RNA, 22 nt, Human
cuggagcugguauagggacaaa

SEQ ID NO: 800762 - RNA, 22 nt, Human
ucuggaguuuuuucugucugug

SEQ ID NO: 800763 - RNA, 22 nt, Human
uucaaacaacucauuuaugcaa

SEQ ID NO: 800764 - RNA, 22 nt, Human
ucugcuugugucuguccagccu

SEQ ID NO: 800765 - RNA, 22 nt, Human
aucaaauacaaagggcauaagg

SEQ ID NO: 800766 - RNA, 22 nt, Human
gaaggcuugauugaggaaugcc

SEQ ID NO: 800767 - RNA, 23 nt, Human
ucuuuccuaaugaaacagugaaa

SEQ ID NO: 800768 - RNA, 22 nt, Human
cauggcagagaaggggaacugg

SEQ ID NO: 800769 - RNA, 22 nt, Human
uuugcuuugacugucagcaagu

SEQ ID NO: 800770 - RNA, 22 nt, Human
acuggcugaggaaguugccacu

SEQ ID NO: 800771 - RNA, 22 nt, Human
ucacauuuggagaaagccugcc

SEQ ID NO: 800772 - RNA, 22 nt, Human
uuuauauugggagucguuuuga

SEQ ID NO: 800773 - RNA, 22 nt, Human
gcuauuuuugagccauuuauaa

SEQ ID NO: 800774 - RNA, 22 nt, Human
uuuuagauuauaagucuaauuc

SEQ ID NO: 800775 - RNA, 22 nt, Human
ucaguucuuaguaaugcagucu

SEQ ID NO: 800776 - RNA, 22 nt, Human
ggggacaguuaaagaccaagac

SEQ ID NO: 800777 - RNA, 22 nt, Human
gcuggcuguuggagguaccugc

SEQ ID NO: 800778 - RNA, 22 nt, Human
agcagcccaguuguacugagug

SEQ ID NO: 800779 - RNA, 22 nt, Human
cuccaggacccaguggcuccag

SEQ ID NO: 800780 - RNA, 22 nt, Human
agggucaccugcuugccagggc

SEQ ID NO: 800781 - RNA, 22 nt, Human
uaggagggggaacaaggcauac

SEQ ID NO: 800782 - RNA, 22 nt, Human
agggggugcccagaugaaggau

SEQ ID NO: 800783 - RNA, 22 nt, Human
cuucuugcugggggccucagug

SEQ ID NO: 800784 - RNA, 22 nt, Human
agauggcaggcccugugggggu

SEQ ID NO: 800785 - RNA, 23 nt, Human
uuauuuggauuuuaguggaaaga

SEQ ID NO: 800786 - RNA, 22 nt, Human
acaggcaggcuucggccagagc

SEQ ID NO: 800787 - RNA, 22 nt, Human
gggaccacuccgacauguaggg

SEQ ID NO: 800788 - RNA, 20 nt, Human
agcaggcugcagggugaaau

SEQ ID NO: 800789 - RNA, 22 nt, Human
cuggcuccauuacucagcaucu

SEQ ID NO: 800790 - RNA, 22 nt, Human
ggcucccugccuguccucaguc

SEQ ID NO: 800791 - RNA, 22 nt, Human
gacagcaacacucaauucugca

SEQ ID NO: 800792 - RNA, 22 nt, Human
caggaggcagagguugcagcga

SEQ ID NO: 800793 - RNA, 17 nt, Human
ugguccagguggagcca

SEQ ID NO: 800794 - RNA, 22 nt, Human
ugcugccugguuucuucuugcu

SEQ ID NO: 800795 - RNA, 22 nt, Human
cccagccugugacagccguccu

SEQ ID NO: 800796 - RNA, 22 nt, Human
aaucagaacuccuaccacagag

SEQ ID NO: 800797 - RNA, 22 nt, Human
uuucuguuaggcaucauuuuaa

SEQ ID NO: 800798 - RNA, 22 nt, Human
cugugucggacgugggcagcag

SEQ ID NO: 800799 - RNA, 22 nt, Human
uaccaaaaagugagccccagag

SEQ ID NO: 800800 - RNA, 22 nt, Human
gaaagcacaguucugaccaugu

SEQ ID NO: 800801 - RNA, 22 nt, Human
guggcagagagcaagugucuga

SEQ ID NO: 800802 - RNA, 22 nt, Human
uuauagaauguuuccaaugccu

SEQ ID NO: 800803 - RNA, 22 nt, Human
ccugaggauauucaccagcaug

SEQ ID NO: 800804 - RNA, 22 nt, Human
acagugaugccgggcgagaaug

SEQ ID NO: 800805 - RNA, 22 nt, Human
ggcucucugaggaaacccuucc

SEQ ID NO: 800806 - RNA, 22 nt, Human
uccagcagguccgagacaaguu

SEQ ID NO: 800807 - RNA, 22 nt, Human
agugcauuugggguaguggaag

SEQ ID NO: 800808 - RNA, 22 nt, Human
gguucuaggucuggggauaaug

SEQ ID NO: 800809 - RNA, 22 nt, Human
ugccagcucagaguuaggacug

SEQ ID NO: 800810 - RNA, 22 nt, Human
gcucugagcagggagaaacagg

SEQ ID NO: 800811 - RNA, 22 nt, Human
auauacacauguguauacauuu

SEQ ID NO: 800812 - RNA, 21 nt, Human
agaguucuugcugagcaagcc

SEQ ID NO: 800813 - RNA, 22 nt, Human
aguuucucuuugacaccaaaau

SEQ ID NO: 800814 - RNA, 22 nt, Human
gcuccaggagcucacagcucgc

SEQ ID NO: 800815 - RNA, 23 nt, Human
acugcugucuuugaagugcuuga

SEQ ID NO: 800816 - RNA, 22 nt, Human
augucuguucauuauuaacugc

SEQ ID NO: 800817 - RNA, 22 nt, Human
uaaagacaaaugacauuacggc

SEQ ID NO: 800818 - RNA, 21 nt, Human
uguuuacucccugcaagcacg

SEQ ID NO: 800819 - RNA, 23 nt, Human
cucagugugugacccauggccuc

SEQ ID NO: 800820 - RNA, 22 nt, Human
uucauaaacaaauuaaggccug

SEQ ID NO: 800821 - RNA, 22 nt, Human
aaucacaucucauucaacagcc

SEQ ID NO: 800822 - RNA, 22 nt, Human
ugggaggcccaggccuggcagg

SEQ ID NO: 800823 - RNA, 22 nt, Human
auguuacagaaagcaaagauga

SEQ ID NO: 800824 - RNA, 22 nt, Human
caaauacuaaacauaagauuuu

SEQ ID NO: 800825 - RNA, 22 nt, Human
agcugaaggcuagaacagcugg

SEQ ID NO: 800826 - RNA, 22 nt, Human
gcugcugcuggucuggggccac

SEQ ID NO: 800827 - RNA, 22 nt, Human
aucugaaguccuuauaaucuga

SEQ ID NO: 800828 - RNA, 22 nt, Human
gacagagguguccuugagucca

SEQ ID NO: 800829 - RNA, 22 nt, Human
aucaauuuugaggauacaagaa

SEQ ID NO: 800830 - RNA, 22 nt, Human
uuccagaggggagguggcagcc

SEQ ID NO: 800831 - RNA, 22 nt, Human
uaacagcaguccucuucucaug

SEQ ID NO: 800832 - RNA, 22 nt, Human
uuguucaugguuguaaguuuga

SEQ ID NO: 800833 - RNA, 22 nt, Human
acaguacagcuaaugucauuag

SEQ ID NO: 800834 - RNA, 22 nt, Human
cucagagaaaaggagcaagggu

SEQ ID NO: 800835 - RNA, 22 nt, Human
gagaucgguaaagagcaugcac

SEQ ID NO: 800836 - RNA, 22 nt, Human
agaugaaaagauaagcagcaau

SEQ ID NO: 800837 - RNA, 22 nt, Human
aucugaagaaugaauggaauua

SEQ ID NO: 800838 - RNA, 22 nt, Human
gaccacagcagugcaagaggag

SEQ ID NO: 800839 - RNA, 22 nt, Human
agggccagggaaacgaucagca

SEQ ID NO: 800840 - RNA, 22 nt, Human
caugcaagaagauagauuaaau

SEQ ID NO: 800841 - RNA, 22 nt, Human
cgcugggggaacagcgagggug

SEQ ID NO: 800842 - RNA, 17 nt, Human
ucuucucuuccagucuu

SEQ ID NO: 800843 - RNA, 22 nt, Human
aguaaaaaguucagaaugguug

SEQ ID NO: 800844 - RNA, 22 nt, Human
agucaggcugacaggcuaggag

SEQ ID NO: 800845 - RNA, 22 nt, Human
ugcacuuugcaggcauggaaac

SEQ ID NO: 800846 - RNA, 22 nt, Human
aggacacagacugauugcagca

SEQ ID NO: 800847 - RNA, 22 nt, Human
ggcugcugguagggguaggaag

SEQ ID NO: 800848 - RNA, 21 nt, Human
agcuuguguguaucacagugu

SEQ ID NO: 800849 - RNA, 22 nt, Human
uugaaguuuaaugguagauucc

SEQ ID NO: 800850 - RNA, 19 nt, Human
uccuggggaggggcauggc

SEQ ID NO: 800851 - RNA, 19 nt, Human
cuggagguagaggguuagu

SEQ ID NO: 800852 - RNA, 22 nt, Human
ucagaagcaaacaucacucuag

SEQ ID NO: 800853 - RNA, 22 nt, Human
gacaggaaacaagaaggcagga

SEQ ID NO: 800854 - RNA, 22 nt, Human
gaacauaauuaaauguccuggg

SEQ ID NO: 800855 - RNA, 22 nt, Human
ugcaggcuggcagauaucucau

SEQ ID NO: 800856 - RNA, 22 nt, Human
caaauguguaaggaaguguuag

SEQ ID NO: 800857 - RNA, 22 nt, Human
uggcucaguuaggucagaaaca

SEQ ID NO: 800858 - RNA, 22 nt, Human
aaaugcuguaacugauauucug

SEQ ID NO: 800859 - RNA, 22 nt, Human
aaaguauauaugcacuuuagaa

SEQ ID NO: 800860 - RNA, 22 nt, Human
agccccaguaagggagggccug

SEQ ID NO: 800861 - RNA, 22 nt, Human
cagugcuuggggagcggagaga

SEQ ID NO: 800862 - RNA, 22 nt, Human
uugacuuuacaguuuucuuagg

SEQ ID NO: 800863 - RNA, 22 nt, Human
gcugccucacuccagcccaaua

SEQ ID NO: 800864 - RNA, 22 nt, Human
agggaagcaauauuagauauca

SEQ ID NO: 800865 - RNA, 22 nt, Human
aaagcaaugcccguucauuauc

SEQ ID NO: 800866 - RNA, 22 nt, Human
uggcccaguagaaaagggaucg

SEQ ID NO: 800867 - RNA, 21 nt, Human
ucucuacacuuucacuaggcu

SEQ ID NO: 800868 - RNA, 22 nt, Human
gcugcaggcgccugcggucucu

SEQ ID NO: 800869 - RNA, 22 nt, Human
agggcagcaauuugguuccugg

SEQ ID NO: 800870 - RNA, 22 nt, Human
uuuaaacauaucuguugaggga

SEQ ID NO: 800871 - RNA, 22 nt, Human
aucaaaguaucucaauauggua

SEQ ID NO: 800872 - RNA, 22 nt, Human
gcaugcaugugugcagacaguc

SEQ ID NO: 800873 - RNA, 22 nt, Human
guuucucacuuccaguagccaa

SEQ ID NO: 800874 - RNA, 22 nt, Human
ccagcagggaaaaacccaccaa

SEQ ID NO: 800875 - RNA, 22 nt, Human
cccaggcagagagcuggugagc

SEQ ID NO: 800876 - RNA, 23 nt, Human
acauacauaagcaccacauuuug

SEQ ID NO: 800877 - RNA, 22 nt, Human
uggggugggcaugcgcuguccu

SEQ ID NO: 800878 - RNA, 22 nt, Human
ccugaggggcugcaggccagcu

SEQ ID NO: 800879 - RNA, 22 nt, Human
acagccuguuugaucuggugcu

SEQ ID NO: 800880 - RNA, 22 nt, Human
agaguaugcaucuauuguaccu

SEQ ID NO: 800881 - RNA, 22 nt, Human
aaguuucugauauuguuaaagc

SEQ ID NO: 800882 - RNA, 22 nt, Human
cuuacaacuuguaugugauugu

SEQ ID NO: 800883 - RNA, 22 nt, Human
ugcacugggaaagaaggaggga

SEQ ID NO: 800884 - RNA, 22 nt, Human
gaggauggugagcaggacccag

SEQ ID NO: 800885 - RNA, 22 nt, Human
guuacaaaggucauaaaagugu

SEQ ID NO: 800886 - RNA, 22 nt, Human
ucuuuagagcucagaaauacag

SEQ ID NO: 800887 - RNA, 22 nt, Human
uauccaaaguggcauauuauag

SEQ ID NO: 800888 - RNA, 18 nt, Human
uagauuaaaauugaauuc

SEQ ID NO: 800889 - RNA, 22 nt, Human
caauacuauucggaccaucucu

SEQ ID NO: 800890 - RNA, 22 nt, Human
uacaaagugacaagcucugcug

SEQ ID NO: 800891 - RNA, 22 nt, Human
caaaugcuaacuucuuuccaaa

SEQ ID NO: 800892 - RNA, 22 nt, Human
acuuuuaugauaaucaauguuc

SEQ ID NO: 800893 - RNA, 22 nt, Human
aguauuacccucagaacuugau

SEQ ID NO: 800894 - RNA, 22 nt, Human
cagacuugacggcagcugcuuu

SEQ ID NO: 800895 - RNA, 22 nt, Human
uuucaugaggggcaaaaucuca

SEQ ID NO: 800896 - RNA, 20 nt, Human
caggccagagguuugauggc

SEQ ID NO: 800897 - RNA, 22 nt, Human
uaauuacagagguuugccaguu

SEQ ID NO: 800898 - RNA, 22 nt, Human
ucagggagaggugagagccugu

SEQ ID NO: 800899 - RNA, 22 nt, Human
gggcagcucggaagugggaaag

SEQ ID NO: 800900 - RNA, 17 nt, Human
agguguggucaagggag

SEQ ID NO: 800901 - RNA, 22 nt, Human
uagaggcauaagagggaagcag

SEQ ID NO: 800902 - RNA, 22 nt, Human
guaaagaaggcaaccugguuau

SEQ ID NO: 800903 - RNA, 20 nt, Human
uccuggaggcuucauccaua

SEQ ID NO: 800904 - RNA, 21 nt, Human
uaaacauaaccuuguauggcu

SEQ ID NO: 800905 - RNA, 22 nt, Human
cccaggaggcagagauagcagu

SEQ ID NO: 800906 - RNA, 22 nt, Human
acuguucauuuggauuucucug

SEQ ID NO: 800907 - RNA, 21 nt, Human
ucagaggcugggggaaugccc

SEQ ID NO: 800908 - RNA, 22 nt, Human
aagggcagccugacucacgguc

SEQ ID NO: 800909 - RNA, 22 nt, Human
ugucuuuuggagcaucuuucuu

SEQ ID NO: 800910 - RNA, 22 nt, Human
guuucaaagcacagcucacauu

SEQ ID NO: 800911 - RNA, 22 nt, Human
cugccaggcagggagauggcug

SEQ ID NO: 800912 - RNA, 22 nt, Human
uuguuacagcagugauuucaga

SEQ ID NO: 800913 - RNA, 22 nt, Human
ucaggaaauggaauucuugugu

SEQ ID NO: 800914 - RNA, 22 nt, Human
caggaaagggaugggcugccac

SEQ ID NO: 800915 - RNA, 22 nt, Human
acacuucucuuugaagaacaau

SEQ ID NO: 800916 - RNA, 20 nt, Human
ccuugccaguagggcuggga

SEQ ID NO: 800917 - RNA, 22 nt, Human
cagaacagacuuaacagggcug

SEQ ID NO: 800918 - RNA, 22 nt, Human
acaaaagugagugugucucaga

SEQ ID NO: 800919 - RNA, 22 nt, Human
ggcaggguggcccuccagugag

SEQ ID NO: 800920 - RNA, 22 nt, Human
gaggccugaggcugccuggagc

SEQ ID NO: 800921 - RNA, 22 nt, Human
cagcugcucuucuggccuguca

SEQ ID NO: 800922 - RNA, 22 nt, Human
caggcagugugacgcuaggguu

SEQ ID NO: 800923 - RNA, 22 nt, Human
uggccucuggcugaggacuaac

SEQ ID NO: 800924 - RNA, 22 nt, Human
ugcccagcugucaaaguagaua

SEQ ID NO: 800925 - RNA, 22 nt, Human
gcccggccaggaacagaguaua

SEQ ID NO: 800926 - RNA, 22 nt, Human
uucaacugggcggaucugagaa

SEQ ID NO: 800927 - RNA, 22 nt, Human
uggauucuaaugcacuucaaau

SEQ ID NO: 800928 - RNA, 22 nt, Human
ggugcagaaggaagggagcugg

SEQ ID NO: 800929 - RNA, 22 nt, Human
cugcugagguauacuaugugac

SEQ ID NO: 800930 - RNA, 23 nt, Human
ugagcaagugaccaacugucugu

SEQ ID NO: 800931 - RNA, 22 nt, Human
uuuagacauagcugaaaucauu

SEQ ID NO: 800932 - RNA, 22 nt, Human
cucccaggcacagggaggagcc

SEQ ID NO: 800933 - RNA, 22 nt, Human
caccaggcugaaccagagggga

SEQ ID NO: 800934 - RNA, 22 nt, Human
ggcaggcauggccacucccuag

SEQ ID NO: 800935 - RNA, 22 nt, Human
cuguggcaccaauacauuuuuc

SEQ ID NO: 800936 - RNA, 22 nt, Human
caguccugcuggccuucccugg

SEQ ID NO: 800937 - RNA, 19 nt, Human
cacauuuugagucugagau

SEQ ID NO: 800938 - RNA, 22 nt, Human
gcacuugaagaauugaacugga

SEQ ID NO: 800939 - RNA, 19 nt, Human
ugaggagcagcugguugau

SEQ ID NO: 800940 - RNA, 22 nt, Human
cacugccuccccaggcuccaca

SEQ ID NO: 800941 - RNA, 22 nt, Human
aaagugcagggugcucugguau

SEQ ID NO: 800942 - RNA, 22 nt, Human
caggacagagcccagacugugu

SEQ ID NO: 800943 - RNA, 22 nt, Human
agcuucuuguagaacucaaaag

SEQ ID NO: 800944 - RNA, 22 nt, Human
gagugucaaggcucucuuuggc

SEQ ID NO: 800945 - RNA, 22 nt, Human
aagcaggagaugggugcuuuuc

SEQ ID NO: 800946 - RNA, 22 nt, Human
ugcuggaggggccugaccagga

SEQ ID NO: 800947 - RNA, 22 nt, Human
ucaggaugaagucagagggguc

SEQ ID NO: 800948 - RNA, 22 nt, Human
aguuuuuccugauuuuacagaa

SEQ ID NO: 800949 - RNA, 22 nt, Human
caggcugccgugggguccaggc

SEQ ID NO: 800950 - RNA, 22 nt, Human
caguuuuagggcaaugugaaga

SEQ ID NO: 800951 - RNA, 19 nt, Human
ccagagguuugcugggccu

SEQ ID NO: 800952 - RNA, 22 nt, Human
uggggacagggcucagcaauuu

SEQ ID NO: 800953 - RNA, 22 nt, Human
caggggaagaugccaagggaga

SEQ ID NO: 800954 - RNA, 22 nt, Human
agugauuaauuguaaaaauucu

SEQ ID NO: 800955 - RNA, 22 nt, Human
ccagccucaucgccugccuguc

SEQ ID NO: 800956 - RNA, 22 nt, Human
augaaaagggagugauauuugu

SEQ ID NO: 800957 - RNA, 22 nt, Human
gacagcagggaaaguccagacc

SEQ ID NO: 800958 - RNA, 22 nt, Human
gaggcuagagcaggggcucaau

SEQ ID NO: 800959 - RNA, 22 nt, Human
uuucaguucaccugggaacccg

SEQ ID NO: 800960 - RNA, 22 nt, Human
cacagcagagggagccauugaa

SEQ ID NO: 800961 - RNA, 22 nt, Human
acugcacuucacccugggugac

SEQ ID NO: 800962 - RNA, 22 nt, Human
uguuuuaagagcgcacuuuaua

SEQ ID NO: 800963 - RNA, 22 nt, Human
uucauauaaauggaaucagaau

SEQ ID NO: 800964 - RNA, 22 nt, Human
uucuuuccaaccagauauuggu

SEQ ID NO: 800965 - RNA, 22 nt, Human
ugggggcacuucgaggucgccu

SEQ ID NO: 800966 - RNA, 22 nt, Human
gagcccaggaaguggaggcuga

SEQ ID NO: 800967 - RNA, 21 nt, Human
aagucaauacagauaagucuu

SEQ ID NO: 800968 - RNA, 22 nt, Human
ucggagagcucacagcuguggc

SEQ ID NO: 800969 - RNA, 21 nt, Human
ucugcacagccccgcaggagg

SEQ ID NO: 800970 - RNA, 22 nt, Human
cugagcugggaguagagacucu

SEQ ID NO: 800971 - RNA, 22 nt, Human
ugccagggagcccugcugacca

SEQ ID NO: 800972 - RNA, 22 nt, Human
auugagaaaauaaguauggaua

SEQ ID NO: 800973 - RNA, 22 nt, Human
cagaaucucugggaguggauca

SEQ ID NO: 800974 - RNA, 22 nt, Human
cuggaaugccucccugucagag

SEQ ID NO: 800975 - RNA, 22 nt, Human
uaaggcagagguaccacuaggc

SEQ ID NO: 800976 - RNA, 22 nt, Human
ugucuaaugaauuaauuaauua

SEQ ID NO: 800977 - RNA, 22 nt, Human
cugugggugaagacaagggaga

SEQ ID NO: 800978 - RNA, 22 nt, Human
uccagagaauucuacgcagugc

SEQ ID NO: 800979 - RNA, 21 nt, Human
agaauaaugguaucauuugcu

SEQ ID NO: 800980 - RNA, 22 nt, Human
gcuggaguuagaacuagccugg

SEQ ID NO: 800981 - RNA, 22 nt, Human
aauacuuuccuauauaaggugc

SEQ ID NO: 800982 - RNA, 22 nt, Human
caagcuuuauccgccauguagg

SEQ ID NO: 800983 - RNA, 22 nt, Human
auauccauaguaaaagucauua

SEQ ID NO: 800984 - RNA, 22 nt, Human
uaauauuucuacccugcugccu

SEQ ID NO: 800985 - RNA, 22 nt, Human
uccagggagucaaaugaacuac

SEQ ID NO: 800986 - RNA, 22 nt, Human
caggacaguuggcaucugcugc

SEQ ID NO: 800987 - RNA, 22 nt, Human
aucuuugggauauuugugauua

SEQ ID NO: 800988 - RNA, 22 nt, Human
cuucuuaaugacagauuaaaau

SEQ ID NO: 800989 - RNA, 22 nt, Human
ugaugcucuccuaauaugaaaa

SEQ ID NO: 800990 - RNA, 22 nt, Human
gugaccagugaugcugaggagu

SEQ ID NO: 800991 - RNA, 22 nt, Human
gcagcugaagcugcaguuccag

SEQ ID NO: 800992 - RNA, 22 nt, Human
gagaaaccuguaaggaaggaag

SEQ ID NO: 800993 - RNA, 22 nt, Human
ggugagggaguggaacgaggug

SEQ ID NO: 800994 - RNA, 22 nt, Human
ucaugcaaagccaauuccagcu

SEQ ID NO: 800995 - RNA, 22 nt, Human
aggucuggaaacagcagggaga

SEQ ID NO: 800996 - RNA, 22 nt, Human
acagcugggugcugcucagagc

SEQ ID NO: 800997 - RNA, 22 nt, Human
cuccuggcaguuccccuuguca

SEQ ID NO: 800998 - RNA, 22 nt, Human
aaagacauuagauuaacguaca

SEQ ID NO: 800999 - RNA, 22 nt, Human
gacccaggcucgugggacggcu

SEQ ID NO: 801000 - RNA, 20 nt, Human
gcuucccaauucuugaucug

SEQ ID NO: 801001 - RNA, 22 nt, Human
agcuggcuugcaugcuaaggag

SEQ ID NO: 801002 - RNA, 22 nt, Human
ggcagggugccuggcuccuguu

SEQ ID NO: 801003 - RNA, 22 nt, Human
ucauucagguugggcaaguguc

SEQ ID NO: 801004 - RNA, 22 nt, Human
aggccagacagcuagaaacagg

SEQ ID NO: 801005 - RNA, 22 nt, Human
cacccaggcuggagugcagggg

SEQ ID NO: 801006 - RNA, 22 nt, Human
auaagaaacauuauucuuucca

SEQ ID NO: 801007 - RNA, 22 nt, Human
gucugcugcagagcauggcuuu

SEQ ID NO: 801008 - RNA, 22 nt, Human
aggcucauucuugccucugagc

SEQ ID NO: 801009 - RNA, 22 nt, Human
ucaggcuggagugcaguggcgc

SEQ ID NO: 801010 - RNA, 22 nt, Human
cccucccaagcacucugacaua

SEQ ID NO: 801011 - RNA, 22 nt, Human
uagucuuuuuaauaaauaaugc

SEQ ID NO: 801012 - RNA, 22 nt, Human
gcuucccagcagaggaaagacu

SEQ ID NO: 801013 - RNA, 22 nt, Human
uucagagacauguucuagauca

SEQ ID NO: 801014 - RNA, 22 nt, Human
ggcucagcuuggugcgcagaaa

SEQ ID NO: 801015 - RNA, 22 nt, Human
gagagcugcagccgagaggggg

SEQ ID NO: 801016 - RNA, 22 nt, Human
uucuggaauacuaaguuccuuu

SEQ ID NO: 801017 - RNA, 22 nt, Human
cagauggcugccaagaugggcu

SEQ ID NO: 801018 - RNA, 22 nt, Human
cagucucucuuguagugcagcu

SEQ ID NO: 801019 - RNA, 22 nt, Human
aaauauagugacacuuauaguc

SEQ ID NO: 801020 - RNA, 22 nt, Human
agugacaaggugguaaugaagc

SEQ ID NO: 801021 - RNA, 22 nt, Human
ucagggcagaauccaaagaauu

SEQ ID NO: 801022 - RNA, 22 nt, Human
cauauauucugguuuucacugg

SEQ ID NO: 801023 - RNA, 22 nt, Human
guucuaggagccaagaauauag

SEQ ID NO: 801024 - RNA, 22 nt, Human
uauuaaagggaaguuaugcaug

SEQ ID NO: 801025 - RNA, 22 nt, Human
cccaggaguucgaggcuguagu

SEQ ID NO: 801026 - RNA, 20 nt, Human
uacaauauucccacuuugcu

SEQ ID NO: 801027 - RNA, 22 nt, Human
agcugugugaccuagggcaagc

SEQ ID NO: 801028 - RNA, 22 nt, Human
aacucuguguaggaaccagguc

SEQ ID NO: 801029 - RNA, 22 nt, Human
aaauaguuuagcucucauuuca

SEQ ID NO: 801030 - RNA, 22 nt, Human
ugagaugaauaacuccugcuaa

SEQ ID NO: 801031 - RNA, 22 nt, Human
acaguguauaaaaucuuaaaga

SEQ ID NO: 801032 - RNA, 22 nt, Human
aucagaauuagccagugaggcu

SEQ ID NO: 801033 - RNA, 22 nt, Human
auuuacacauucauaagauuuc

SEQ ID NO: 801034 - RNA, 22 nt, Human
ccucaggcuuacgggcaaugga

SEQ ID NO: 801035 - RNA, 22 nt, Human
uauucacauuaauaagucuuca

SEQ ID NO: 801036 - RNA, 22 nt, Human
cucaggucuuaguucugucauc

SEQ ID NO: 801037 - RNA, 21 nt, Human
cauauuaaaucggugccuuua

SEQ ID NO: 801038 - RNA, 22 nt, Human
cauuuacauaacaguaacgcug

SEQ ID NO: 801039 - RNA, 22 nt, Human
aagcaaagaguuuaguggguga

SEQ ID NO: 801040 - RNA, 22 nt, Human
aaggaagguacucagugauucu

SEQ ID NO: 801041 - RNA, 22 nt, Human
uggccaguagauaggcaggcaa

SEQ ID NO: 801042 - RNA, 22 nt, Human
caggugggagcgaggagcuacu

SEQ ID NO: 801043 - RNA, 22 nt, Human
gcaggcugaguugggaaaccaa

SEQ ID NO: 801044 - RNA, 22 nt, Human
ccuagaauguacuuaauagaug

SEQ ID NO: 801045 - RNA, 21 nt, Human
aggcccagagucuugggggga

SEQ ID NO: 801046 - RNA, 22 nt, Human
agcagcuugggucucuccugcu

SEQ ID NO: 801047 - RNA, 22 nt, Human
cucagcuggcaauucuggcucc

SEQ ID NO: 801048 - RNA, 22 nt, Human
ucaagaaagggcuucaccagga

SEQ ID NO: 801049 - RNA, 22 nt, Human
uugagaacuagcauggucuauc

SEQ ID NO: 801050 - RNA, 22 nt, Human
uuacaaaguguuaugauaaaca

SEQ ID NO: 801051 - RNA, 22 nt, Human
aagucagagaugccaaagauua

SEQ ID NO: 801052 - RNA, 22 nt, Human
cccaggguagcugagcuggcag

SEQ ID NO: 801053 - RNA, 22 nt, Human
uaucaauaucucagugugcuuc

SEQ ID NO: 801054 - RNA, 22 nt, Human
uggcuggcgccgggcuagccac

SEQ ID NO: 801055 - RNA, 22 nt, Human
aaguaacaggcaugugaaugac

SEQ ID NO: 801056 - RNA, 22 nt, Human
aaaggacaugucaauaucaggc

SEQ ID NO: 801057 - RNA, 20 nt, Human
uguagguguacaguaaggag

SEQ ID NO: 801058 - RNA, 19 nt, Human
cccaaggcccugggcaggc

SEQ ID NO: 801059 - RNA, 20 nt, Human
uugaaugaaugucuggcuca

SEQ ID NO: 801060 - RNA, 19 nt, Human
uccuagcaccuggcacaua

SEQ ID NO: 801061 - RNA, 22 nt, Human
ucccagcccagauuugugugac

SEQ ID NO: 801062 - RNA, 22 nt, Human
gaaggaaaggucucaugccuuu

SEQ ID NO: 801063 - RNA, 22 nt, Human
agaauaaucacugaaguucaaa

SEQ ID NO: 801064 - RNA, 22 nt, Human
ggugcagaagaaagcagucauu

SEQ ID NO: 801065 - RNA, 22 nt, Human
cccugccuuguuggagccuaug

SEQ ID NO: 801066 - RNA, 20 nt, Human
ucagaaggcuccagagcaga

SEQ ID NO: 801067 - RNA, 20 nt, Human
ggcacuggaagcacacagga

SEQ ID NO: 801068 - RNA, 22 nt, Human
auuagaaugaaguauaggauuu

SEQ ID NO: 801069 - RNA, 22 nt, Human
uugucgggcuuacgcagggcca

SEQ ID NO: 801070 - RNA, 22 nt, Human
cauuuggaccaaaauagccaac

SEQ ID NO: 801071 - RNA, 22 nt, Human
gcuggcucccauugguccuucc

SEQ ID NO: 801072 - RNA, 17 nt, Human
cuccuggcagccucagg

SEQ ID NO: 801073 - RNA, 22 nt, Human
ugaguggacgugaggcugagua

SEQ ID NO: 801074 - RNA, 22 nt, Human
agggaaggaaaagcugucgcuu

SEQ ID NO: 801075 - RNA, 22 nt, Human
uugggguggaagugaggaucau

SEQ ID NO: 801076 - RNA, 22 nt, Human
uggcuucagacuucugcuacgu

SEQ ID NO: 801077 - RNA, 22 nt, Human
ugcuggagaagcuccugggacu

SEQ ID NO: 801078 - RNA, 22 nt, Human
guggguggaggcgucgagggca

SEQ ID NO: 801079 - RNA, 16 nt, Human
gcagaggaaaggggag

SEQ ID NO: 801080 - RNA, 22 nt, Human
uaggccaggacagagcuuccag

SEQ ID NO: 801081 - RNA, 23 nt, Human
uggggagaguuacccuggaagcg

SEQ ID NO: 801082 - RNA, 22 nt, Human
guaaaaggucaaggccaagucu

SEQ ID NO: 801083 - RNA, 22 nt, Human
auacauaguucugugaaaagua

SEQ ID NO: 801084 - RNA, 22 nt, Human
uucuacuuucucugucauuaaa

SEQ ID NO: 801085 - RNA, 18 nt, Human
ggagcccagaggacagga

SEQ ID NO: 801086 - RNA, 22 nt, Human
ugcuuaaaguaguggauuguua

SEQ ID NO: 801087 - RNA, 22 nt, Human
aggcagcagccacaaggccuga

SEQ ID NO: 801088 - RNA, 22 nt, Human
gagaggagacuuauccagauug

SEQ ID NO: 801089 - RNA, 22 nt, Human
ccagggaagauuagaagccacu

SEQ ID NO: 801090 - RNA, 22 nt, Human
auguguuuguccugcagaaaua

SEQ ID NO: 801091 - RNA, 22 nt, Human
ugaggcuuuauguaagggugca

SEQ ID NO: 801092 - RNA, 22 nt, Human
aggccucagcucagugugacag

SEQ ID NO: 801093 - RNA, 22 nt, Human
cuuuucaaacgcugaugucagu

SEQ ID NO: 801094 - RNA, 22 nt, Human
ugcugcuuggaaauggggcuga

SEQ ID NO: 801095 - RNA, 22 nt, Human
cugggagucccuggaauagcuc

SEQ ID NO: 801096 - RNA, 22 nt, Human
ucacaggcuaaauuuaugcagg

SEQ ID NO: 801097 - RNA, 22 nt, Human
uacaguaauaaaaugagcuaca

SEQ ID NO: 801098 - RNA, 22 nt, Human
cugaggcugaagagggccuacg

SEQ ID NO: 801099 - RNA, 22 nt, Human
ggcucuggguucugcaaugcgu

SEQ ID NO: 801100 - RNA, 22 nt, Human
uuauuauugauucgcucucaaa

SEQ ID NO: 801101 - RNA, 19 nt, Human
aucuacaauuauucucagu

SEQ ID NO: 801102 - RNA, 22 nt, Human
ccuggcucugguucccucagcu

SEQ ID NO: 801103 - RNA, 22 nt, Human
guuucuuucuauugacugaaca

SEQ ID NO: 801104 - RNA, 22 nt, Human
auauaguuggguuucauucuac

SEQ ID NO: 801105 - RNA, 22 nt, Human
cuggccagccucccagguaccc

SEQ ID NO: 801106 - RNA, 22 nt, Human
gcaugcaaggggugugaaguga

SEQ ID NO: 801107 - RNA, 22 nt, Human
aacauacagugagcaguggacu

SEQ ID NO: 801108 - RNA, 23 nt, Human
uuugaacauuucuagauuacaua

SEQ ID NO: 801109 - RNA, 23 nt, Human
cuggaagugcuuuuauagcuuug

SEQ ID NO: 801110 - RNA, 22 nt, Human
uuacaaagaaaauuaggcauuu

SEQ ID NO: 801111 - RNA, 22 nt, Human
cuguucugaacugccugcaugc

SEQ ID NO: 801112 - RNA, 22 nt, Human
uggaagggguuacgcagcagga

SEQ ID NO: 801113 - RNA, 22 nt, Human
gcacugggugggagaucugaau

SEQ ID NO: 801114 - RNA, 22 nt, Human
uggacaguuacugagcuugagu

SEQ ID NO: 801115 - RNA, 22 nt, Human
agaaaauuuaaagagacacaca

SEQ ID NO: 801116 - RNA, 23 nt, Human
agguggagcugugcagccggggc

SEQ ID NO: 801117 - RNA, 22 nt, Human
ggcagaggugacagugucuuuu

SEQ ID NO: 801118 - RNA, 22 nt, Human
ccaggcugcuuuauuacucugu

SEQ ID NO: 801119 - RNA, 22 nt, Human
ucugccagugccagaguacaua

SEQ ID NO: 801120 - RNA, 22 nt, Human
ucacaagauacaguuagaagca

SEQ ID NO: 801121 - RNA, 22 nt, Human
caggcauggaucuggaaucauu

SEQ ID NO: 801122 - RNA, 22 nt, Human
agagggcaugcuugguggccug

SEQ ID NO: 801123 - RNA, 22 nt, Human
aauguauucugggaaaauguua

SEQ ID NO: 801124 - RNA, 22 nt, Human
uacaaaucagaucaugaguuua

SEQ ID NO: 801125 - RNA, 22 nt, Human
gcuggggcugggcugaggaaga

SEQ ID NO: 801126 - RNA, 22 nt, Human
auaucagaaauaguaagcagag

SEQ ID NO: 801127 - RNA, 22 nt, Human
augacaauacuucaauaagcug

SEQ ID NO: 801128 - RNA, 22 nt, Human
uggagccaguguugcccaacac

SEQ ID NO: 801129 - RNA, 22 nt, Human
uggcccuguggaggucagugag

SEQ ID NO: 801130 - RNA, 22 nt, Human
accuccccucaccaaucugguu

SEQ ID NO: 801131 - RNA, 22 nt, Human
uaguauuuuagaaaaccaugaa

SEQ ID NO: 801132 - RNA, 22 nt, Human
ugggggugcccuaugaggaagc

SEQ ID NO: 801133 - RNA, 22 nt, Human
cccagcaggaggagguugcagu

SEQ ID NO: 801134 - RNA, 22 nt, Human
caggcaaggaggcacugaggga

SEQ ID NO: 801135 - RNA, 22 nt, Human
uagauuuguuuccuucucucca

SEQ ID NO: 801136 - RNA, 22 nt, Human
auacaugugggucuaaacauau

SEQ ID NO: 801137 - RNA, 22 nt, Human
ccuggcucugcgugcagcuccg

SEQ ID NO: 801138 - RNA, 22 nt, Human
agcaaagauguccggggcaagc

SEQ ID NO: 801139 - RNA, 22 nt, Human
ggaccaggggcgcacucccugc

SEQ ID NO: 801140 - RNA, 22 nt, Human
gccucugcaacuccgccuuggu

SEQ ID NO: 801141 - RNA, 22 nt, Human
ccugcagcuuugccuccugaac

SEQ ID NO: 801142 - RNA, 22 nt, Human
gggcagcauucugugggcaggu

SEQ ID NO: 801143 - RNA, 22 nt, Human
aauaugaguuugccuuuccugc

SEQ ID NO: 801144 - RNA, 22 nt, Human
cccugcagccggccagcucauu

SEQ ID NO: 801145 - RNA, 22 nt, Human
aucccaggcggcacagguugca

SEQ ID NO: 801146 - RNA, 22 nt, Human
uuccaggaacaaacucaccuua

SEQ ID NO: 801147 - RNA, 22 nt, Human
aaaauaugacugugcuccuuaa

SEQ ID NO: 801148 - RNA, 22 nt, Human
uuugcaaaugaagcucugagga

SEQ ID NO: 801149 - RNA, 20 nt, Human
uggcaggaauagggccagag

SEQ ID NO: 801150 - RNA, 22 nt, Human
uccccagucccggcggugggug

SEQ ID NO: 801151 - RNA, 22 nt, Human
uucuacauauauuuuucucacu

SEQ ID NO: 801152 - RNA, 22 nt, Human
augcaaauaagugcaggcgugg

SEQ ID NO: 801153 - RNA, 22 nt, Human
ugaggaaguuguuucucuucua

SEQ ID NO: 801154 - RNA, 22 nt, Human
uucucccugccaaagcugccuc

SEQ ID NO: 801155 - RNA, 22 nt, Human
gcucccugacucaguuccugag

SEQ ID NO: 801156 - RNA, 22 nt, Human
uugcaugugacucuauuuaugc

SEQ ID NO: 801157 - RNA, 22 nt, Human
uuacaaguacugaauaugauuu

SEQ ID NO: 801158 - RNA, 22 nt, Human
uggcccaggugcacccagaggc

SEQ ID NO: 801159 - RNA, 22 nt, Human
agcuaggggaccaagguggccc

SEQ ID NO: 801160 - RNA, 22 nt, Human
ucaggcaaggcuggucucauac

SEQ ID NO: 801161 - RNA, 22 nt, Human
gcuggcaguguauuguuagcug

SEQ ID NO: 801162 - RNA, 22 nt, Human
auaugcaucugugugcgugucu

SEQ ID NO: 801163 - RNA, 22 nt, Human
aggcugugaaauguggcaagga

SEQ ID NO: 801164 - RNA, 22 nt, Human
cuaauauuuuuagaaaucacga

SEQ ID NO: 801165 - RNA, 22 nt, Human
gcuggucagagagaaaggaggc

SEQ ID NO: 801166 - RNA, 22 nt, Human
gccaggguggcagaaggcccca

SEQ ID NO: 801167 - RNA, 22 nt, Human
acuuucccucucagaacucuua

SEQ ID NO: 801168 - RNA, 22 nt, Human
cacacaugguagcagguacaag

SEQ ID NO: 801169 - RNA, 22 nt, Human
ccagcccugccucucagggccc

SEQ ID NO: 801170 - RNA, 22 nt, Human
agggaggcauuagcuacugcga

SEQ ID NO: 801171 - RNA, 22 nt, Human
ugggagaacccagggucaggcu

SEQ ID NO: 801172 - RNA, 22 nt, Human
ggcccacuugaaauggagcuca

SEQ ID NO: 801173 - RNA, 22 nt, Human
guauuuucaagagcaguaguau

SEQ ID NO: 801174 - RNA, 22 nt, Human
ugggagcaggugugcuagggaa

SEQ ID NO: 801175 - RNA, 22 nt, Human
ucuucauuuuauagcaucugug

SEQ ID NO: 801176 - RNA, 22 nt, Human
gagcugagauuugaagcaaguu

SEQ ID NO: 801177 - RNA, 22 nt, Human
caaguugugaaugacagacuuc

SEQ ID NO: 801178 - RNA, 20 nt, Human
gaggcccagagaggugaagc

SEQ ID NO: 801179 - RNA, 22 nt, Human
ucagugcagacuguaaguugga

SEQ ID NO: 801180 - RNA, 22 nt, Human
auuaaacaauguaaaguucuug

SEQ ID NO: 801181 - RNA, 22 nt, Human
ucagauaagugaagcaaaguuu

SEQ ID NO: 801182 - RNA, 22 nt, Human
caucacagauguuguguggagu

SEQ ID NO: 801183 - RNA, 22 nt, Human
agccagggaugcagcacaguga

SEQ ID NO: 801184 - RNA, 22 nt, Human
agaggccagcaaccacaguaaa

SEQ ID NO: 801185 - RNA, 16 nt, Human
gcaggcagaucacaug

SEQ ID NO: 801186 - RNA, 22 nt, Human
ucucaaauuuauacagaguuca

SEQ ID NO: 801187 - RNA, 22 nt, Human
aaacccugcccuucccaagaug

SEQ ID NO: 801188 - RNA, 19 nt, Human
agcuggcucuucuuugucu

SEQ ID NO: 801189 - RNA, 22 nt, Human
ccucaggcucugggugccuacc

SEQ ID NO: 801190 - RNA, 22 nt, Human
aaagccaaaugaaagaugguuc

SEQ ID NO: 801191 - RNA, 22 nt, Human
auuaaggaagccuauucucucc

SEQ ID NO: 801192 - RNA, 19 nt, Human
aacaaguaggaauggaaga

SEQ ID NO: 801193 - RNA, 22 nt, Human
acauuguaaauaccuuuaucac

SEQ ID NO: 801194 - RNA, 22 nt, Human
cucagugucacguuuugccuua

SEQ ID NO: 801195 - RNA, 22 nt, Human
cagcaggagcagucagacuccu

SEQ ID NO: 801196 - RNA, 22 nt, Human
aaacuagccacacagaauacac

SEQ ID NO: 801197 - RNA, 22 nt, Human
cugaggaaaguauugccuggug

SEQ ID NO: 801198 - RNA, 22 nt, Human
auggcagaaagaauagaggcua

SEQ ID NO: 801199 - RNA, 22 nt, Human
ugcuggcuccucgaggcuucgu

SEQ ID NO: 801200 - RNA, 22 nt, Human
uguuuacagggugauuuuaccu

SEQ ID NO: 801201 - RNA, 22 nt, Human
cggggcugcgcucuuccugccg

SEQ ID NO: 801202 - RNA, 22 nt, Human
cagaguuuaaacaaaugaaaua

SEQ ID NO: 801203 - RNA, 18 nt, Human
cagaaaguuauuuacucu

SEQ ID NO: 801204 - RNA, 22 nt, Human
gcuuuggaguuaggacucggcc

SEQ ID NO: 801205 - RNA, 22 nt, Human
ugggccagauccauggcaauaa

SEQ ID NO: 801206 - RNA, 22 nt, Human
uuuacuaaguacuuguaucccu

SEQ ID NO: 801207 - RNA, 22 nt, Human
ccuggcugguugucugauucua

SEQ ID NO: 801208 - RNA, 19 nt, Human
caucuggaugauucuccug

SEQ ID NO: 801209 - RNA, 22 nt, Human
agccagcuguacugccugcuca

SEQ ID NO: 801210 - RNA, 22 nt, Human
uaagaacuuggcagcaagaaau

SEQ ID NO: 801211 - RNA, 22 nt, Human
gcccagcaggggauggcagcuc

SEQ ID NO: 801212 - RNA, 23 nt, Human
gggcuucauuuuaauucagcugc

SEQ ID NO: 801213 - RNA, 22 nt, Human
gggcagcucagccaccaugcag

SEQ ID NO: 801214 - RNA, 22 nt, Human
cacagcuggugcacuagcucug

SEQ ID NO: 801215 - RNA, 22 nt, Human
uaauauaccaaacuguaauuuu

SEQ ID NO: 801216 - RNA, 22 nt, Human
ucaggaugaccacgagccucua

SEQ ID NO: 801217 - RNA, 22 nt, Human
cugaaauaaaguugcuaaaauu

SEQ ID NO: 801218 - RNA, 22 nt, Human
cccugccuacaggguuuucuuu

SEQ ID NO: 801219 - RNA, 22 nt, Human
agacaaacccaguggcuguuuu

SEQ ID NO: 801220 - RNA, 22 nt, Human
caggcacaugggagcucaucau

SEQ ID NO: 801221 - RNA, 22 nt, Human
uggcagggucuugcuguguugc

SEQ ID NO: 801222 - RNA, 22 nt, Human
agacagugauaccuugggaugu

SEQ ID NO: 801223 - RNA, 22 nt, Human
caguuucuucaucaguuaagca

SEQ ID NO: 801224 - RNA, 22 nt, Human
gcuguggguaaacgcugagggu

SEQ ID NO: 801225 - RNA, 22 nt, Human
ccaggcaauucugaaagcauuu

SEQ ID NO: 801226 - RNA, 22 nt, Human
uggacaggugcacacagcagcc

SEQ ID NO: 801227 - RNA, 22 nt, Human
auccacccugugguggcuuucu

SEQ ID NO: 801228 - RNA, 22 nt, Human
ggagaggcgaugagucacagcc

SEQ ID NO: 801229 - RNA, 22 nt, Human
gaaacuuacuuacucacauuuc

SEQ ID NO: 801230 - RNA, 22 nt, Human
uggaaggcaacggagugagcug

SEQ ID NO: 801231 - RNA, 22 nt, Human
auacaucauuuauggaauaagg

SEQ ID NO: 801232 - RNA, 22 nt, Human
uuugacuucuaucuaguaagaa

SEQ ID NO: 801233 - RNA, 22 nt, Human
aggaggugagcggucauguggu

SEQ ID NO: 801234 - RNA, 22 nt, Human
aacuauacucuguaaaugugcu

SEQ ID NO: 801235 - RNA, 22 nt, Human
uuaaugacaucauaggugaagu

SEQ ID NO: 801236 - RNA, 22 nt, Human
aggccagugguucucugugucc

SEQ ID NO: 801237 - RNA, 22 nt, Human
ggcaaaaacagcaaugacuuuu

SEQ ID NO: 801238 - RNA, 20 nt, Human
auaaaauaacugccacaaga

SEQ ID NO: 801239 - RNA, 22 nt, Human
aaauguauugcauaggauauuu

SEQ ID NO: 801240 - RNA, 21 nt, Human
acaugcauagagagauuucug

SEQ ID NO: 801241 - RNA, 22 nt, Human
agaguggcagcaagucagguag

SEQ ID NO: 801242 - RNA, 22 nt, Human
uuugcaauaguccuggccugua

SEQ ID NO: 801243 - RNA, 22 nt, Human
ccucuuaauuguacuccuucag

SEQ ID NO: 801244 - RNA, 22 nt, Human
cagggagcuggugccagccgac

SEQ ID NO: 801245 - RNA, 22 nt, Human
ucuuuggaugcguuacuuuuac

SEQ ID NO: 801246 - RNA, 22 nt, Human
ccggagagucagagcgcggccc

SEQ ID NO: 801247 - RNA, 22 nt, Human
ucauuuaucauuugugcuguag

SEQ ID NO: 801248 - RNA, 22 nt, Human
uggcugaggucuggggcuucug

SEQ ID NO: 801249 - RNA, 22 nt, Human
gcugccugucccaggaugagga

SEQ ID NO: 801250 - RNA, 22 nt, Human
aggaggcugguucaggccauau

SEQ ID NO: 801251 - RNA, 22 nt, Human
gccugcuggauguggccaggcc

SEQ ID NO: 801252 - RNA, 22 nt, Human
gccucagcucccagcccaggcu

SEQ ID NO: 801253 - RNA, 22 nt, Human
ccagccacagcuuccagcuccu

SEQ ID NO: 801254 - RNA, 22 nt, Human
aaauuagucgguuuaggaauuu

SEQ ID NO: 801255 - RNA, 19 nt, Human
uacuuuuucaggacagagu

SEQ ID NO: 801256 - RNA, 22 nt, Human
uucaugugccagagcugaaaau

SEQ ID NO: 801257 - RNA, 22 nt, Human
ugccagcugacagcagagacaa

SEQ ID NO: 801258 - RNA, 22 nt, Human
auaaauucucugauguauagua

SEQ ID NO: 801259 - RNA, 22 nt, Human
caggcagugucccaggaagcca

SEQ ID NO: 801260 - RNA, 22 nt, Human
gggugggauggcaggagccgcu

SEQ ID NO: 801261 - RNA, 22 nt, Human
gggaggugauuaggaccaugua

SEQ ID NO: 801262 - RNA, 22 nt, Human
acagaggccccgugggagagcc

SEQ ID NO: 801263 - RNA, 22 nt, Human
gauucaagaccuagcucagcca

SEQ ID NO: 801264 - RNA, 22 nt, Human
agcaggcuuuccacagaaggag

SEQ ID NO: 801265 - RNA, 22 nt, Human
aggucugaguauggccugagaa

SEQ ID NO: 801266 - RNA, 22 nt, Human
uuguauuuuguuaugcuacugc

SEQ ID NO: 801267 - RNA, 22 nt, Human
ccugcugggacgugugguugcc

SEQ ID NO: 801268 - RNA, 22 nt, Human
cuguggcuaggaagcuguggga

SEQ ID NO: 801269 - RNA, 22 nt, Human
guguucauggaugucaauuuga

SEQ ID NO: 801270 - RNA, 22 nt, Human
gcagugggcaacaagagcugga

SEQ ID NO: 801271 - RNA, 22 nt, Human
ucacagaaagcuguguccugac

SEQ ID NO: 801272 - RNA, 22 nt, Human
cucuugguaagacauuagaggu

SEQ ID NO: 801273 - RNA, 22 nt, Human
ccuugucuugcacagaugcagc

SEQ ID NO: 801274 - RNA, 22 nt, Human
aaaggcaugugggcugguugua

SEQ ID NO: 801275 - RNA, 22 nt, Human
accucccuugcuaaagacugug

SEQ ID NO: 801276 - RNA, 22 nt, Human
ugccuggcucuaucaguggugg

SEQ ID NO: 801277 - RNA, 22 nt, Human
caguguuuagaucaagaaggcc

SEQ ID NO: 801278 - RNA, 20 nt, Human
ccugcuguuuccauggggcc

SEQ ID NO: 801279 - RNA, 22 nt, Human
aagugcuuggauugcagguaug

SEQ ID NO: 801280 - RNA, 22 nt, Human
agagaggcauucggugauccca

SEQ ID NO: 801281 - RNA, 22 nt, Human
cagcucugguuccugggcccag

SEQ ID NO: 801282 - RNA, 18 nt, Human
ucaggcugcccugugucu

SEQ ID NO: 801283 - RNA, 22 nt, Human
cagcccuggcuagggcgagggc

SEQ ID NO: 801284 - RNA, 22 nt, Human
auggguggagggugacacggau

SEQ ID NO: 801285 - RNA, 22 nt, Human
gauuuauuuuuaaucagcaggg

SEQ ID NO: 801286 - RNA, 22 nt, Human
ucacaguauucaugaacaugga

SEQ ID NO: 801287 - RNA, 22 nt, Human
agggaaauggagaguguaguuu

SEQ ID NO: 801288 - RNA, 22 nt, Human
acagggagccccagcauuucca

SEQ ID NO: 801289 - RNA, 22 nt, Human
gcccaggcuggagugcaguagc

SEQ ID NO: 801290 - RNA, 22 nt, Human
gaggagccaagguauguguguu

SEQ ID NO: 801291 - RNA, 22 nt, Human
aucauaagacccagccaguauu

SEQ ID NO: 801292 - RNA, 22 nt, Human
uccugucuuaaugaucucgugc

SEQ ID NO: 801293 - RNA, 22 nt, Human
aaauucuuucauggcuaauaag

SEQ ID NO: 801294 - RNA, 22 nt, Human
ccaggcucaggccugcucguug

SEQ ID NO: 801295 - RNA, 22 nt, Human
gacuuaaguggugugauaagug

SEQ ID NO: 801296 - RNA, 22 nt, Human
acugugaacggacugaagccca

SEQ ID NO: 801297 - RNA, 21 nt, Human
uguuucaugcuauuuucuugu

SEQ ID NO: 801298 - RNA, 22 nt, Human
ucaggacaguucccugcaaauu

SEQ ID NO: 801299 - RNA, 22 nt, Human
uuucugaagauacagcuuugcu

SEQ ID NO: 801300 - RNA, 22 nt, Human
cugagccaugggucuaagcacu

SEQ ID NO: 801301 - RNA, 22 nt, Human
caggcagggagcuggaaaggau

SEQ ID NO: 801302 - RNA, 22 nt, Human
cugguucaauacuaaacuucuu

SEQ ID NO: 801303 - RNA, 22 nt, Human
ugauauuuuaugagcuuucaua

SEQ ID NO: 801304 - RNA, 22 nt, Human
agcuggcaguugcgauaaugca

SEQ ID NO: 801305 - RNA, 22 nt, Human
gccucugcugacaagauggaca

SEQ ID NO: 801306 - RNA, 22 nt, Human
ugacaggauaguaggaagaucu

SEQ ID NO: 801307 - RNA, 22 nt, Human
aauaacagagucuucaagauag

SEQ ID NO: 801308 - RNA, 22 nt, Human
agcauauaaauggacauauuug

SEQ ID NO: 801309 - RNA, 22 nt, Human
cuucuucaaccugaaaguuuca

SEQ ID NO: 801310 - RNA, 22 nt, Human
auugucauuccagucauuguua

SEQ ID NO: 801311 - RNA, 22 nt, Human
auugagaauccauuugagauga

SEQ ID NO: 801312 - RNA, 22 nt, Human
aguauuuucgccaucacaagaa

SEQ ID NO: 801313 - RNA, 22 nt, Human
aaaaguuaccucuguaauauaa

SEQ ID NO: 801314 - RNA, 20 nt, Human
cacagaacaaauugcaggac

SEQ ID NO: 801315 - RNA, 22 nt, Human
uggggaaaggaaaguuaaccug

SEQ ID NO: 801316 - RNA, 22 nt, Human
ucuccugucuucucagcacccc

SEQ ID NO: 801317 - RNA, 22 nt, Human
cucucagaaguuuaugucagaa

SEQ ID NO: 801318 - RNA, 20 nt, Human
agcuggcccacagguguggg

SEQ ID NO: 801319 - RNA, 22 nt, Human
uuucucauggacccuucaugau

SEQ ID NO: 801320 - RNA, 22 nt, Human
ucuucagaggaagucagucuuu

SEQ ID NO: 801321 - RNA, 22 nt, Human
cauaaaagccaccuauuuaaag

SEQ ID NO: 801322 - RNA, 22 nt, Human
agggucccgaaggagacagcaa

SEQ ID NO: 801323 - RNA, 22 nt, Human
cuuagaugaagucacagaaccc

SEQ ID NO: 801324 - RNA, 22 nt, Human
ucccaggaugugcgugccgccg

SEQ ID NO: 801325 - RNA, 22 nt, Human
uucagugugaagcuucugaaag

SEQ ID NO: 801326 - RNA, 22 nt, Human
agaaaauuuauucauguuaguu

SEQ ID NO: 801327 - RNA, 22 nt, Human
ugcagcugggucugcccuggcu

SEQ ID NO: 801328 - RNA, 22 nt, Human
gguccuggcagcucugugucca

SEQ ID NO: 801329 - RNA, 22 nt, Human
uuucccuuguuccuuccucuga

SEQ ID NO: 801330 - RNA, 22 nt, Human
uuauuuaaugugaucugaagag

SEQ ID NO: 801331 - RNA, 22 nt, Human
uuuuuaagcuccuuugauguca

SEQ ID NO: 801332 - RNA, 22 nt, Human
cucaaacugugcuuguaaauuc

SEQ ID NO: 801333 - RNA, 22 nt, Human
gcccagaguggccacuuggcuc

SEQ ID NO: 801334 - RNA, 22 nt, Human
ugcuauuucuaucucauuuaaa

SEQ ID NO: 801335 - RNA, 22 nt, Human
uuuacuucugcauuuccccuag

SEQ ID NO: 801336 - RNA, 22 nt, Human
gagcaggaaggccagaaggguc

SEQ ID NO: 801337 - RNA, 22 nt, Human
uucaaaaugcacaaagggcuag

SEQ ID NO: 801338 - RNA, 22 nt, Human
gcacccaguuugucucaggguu

SEQ ID NO: 801339 - RNA, 22 nt, Human
aacaagaacaccuacaguucua

SEQ ID NO: 801340 - RNA, 22 nt, Human
cucuucagauauacaguacucu

SEQ ID NO: 801341 - RNA, 22 nt, Human
uggcugggggugcuauagcugc

SEQ ID NO: 801342 - RNA, 22 nt, Human
ucacaagauggcugcugcagcc

SEQ ID NO: 801343 - RNA, 22 nt, Human
aagcagaaaaacugagcuccaa

SEQ ID NO: 801344 - RNA, 22 nt, Human
gggauaggagauugggaguguu

SEQ ID NO: 801345 - RNA, 22 nt, Human
auuaauauacacuguuagcaug

SEQ ID NO: 801346 - RNA, 22 nt, Human
uuacagagcuggguggagagag

SEQ ID NO: 801347 - RNA, 22 nt, Human
uuucucuguucucuaacuguaa

SEQ ID NO: 801348 - RNA, 22 nt, Human
gagccacagugguggcccacgu

SEQ ID NO: 801349 - RNA, 22 nt, Human
uuuacugaccuccaaucccacu

SEQ ID NO: 801350 - RNA, 22 nt, Human
uuauugcugcuaacauuuuaug

SEQ ID NO: 801351 - RNA, 20 nt, Human
cugggucacuuggcugcucu

SEQ ID NO: 801352 - RNA, 22 nt, Human
uacuuuggggacaauauggaau

SEQ ID NO: 801353 - RNA, 22 nt, Human
ugucccuggacuccaggagcca

SEQ ID NO: 801354 - RNA, 22 nt, Human
gagcagcucugugccuggagac

SEQ ID NO: 801355 - RNA, 22 nt, Human
uucauucagguguauuuauggg

SEQ ID NO: 801356 - RNA, 20 nt, Human
uggagguggucugcuguccu

SEQ ID NO: 801357 - RNA, 22 nt, Human
ucucaaauggacaauauugugg

SEQ ID NO: 801358 - RNA, 22 nt, Human
ucagcaggcaggaggcaugcca

SEQ ID NO: 801359 - RNA, 22 nt, Human
uugguuuucucagcuggaccau

SEQ ID NO: 801360 - RNA, 22 nt, Human
ggagaaagcuguaguggaaugu

SEQ ID NO: 801361 - RNA, 20 nt, Human
aaauguauaggacccuucua

SEQ ID NO: 801362 - RNA, 18 nt, Human
acagacaaaauggaaaug

SEQ ID NO: 801363 - RNA, 22 nt, Human
aggcuccaggcaaaauuucgga

SEQ ID NO: 801364 - RNA, 22 nt, Human
cagcuucuuugggauucuuuau

SEQ ID NO: 801365 - RNA, 22 nt, Human
ucccaagugucuuggaccaggg

SEQ ID NO: 801366 - RNA, 22 nt, Human
gcugcaggcucugcaggaauug

SEQ ID NO: 801367 - RNA, 22 nt, Human
uucuauaagacucauauuucuu

SEQ ID NO: 801368 - RNA, 22 nt, Human
aaaucaugguggaagaaacaga

SEQ ID NO: 801369 - RNA, 21 nt, Human
ucagaggcacugagagcaaug

SEQ ID NO: 801370 - RNA, 22 nt, Human
gucuuuggaggcacuguugagu

SEQ ID NO: 801371 - RNA, 22 nt, Human
gcagggaagaucuuggagcugc

SEQ ID NO: 801372 - RNA, 22 nt, Human
agggucccgucccucugcaccc

SEQ ID NO: 801373 - RNA, 22 nt, Human
cuggcagcuuagcacucugguu

SEQ ID NO: 801374 - RNA, 22 nt, Human
uagggcagaguccaggaugggc

SEQ ID NO: 801375 - RNA, 22 nt, Human
gagggaaaauaaaauugcagua

SEQ ID NO: 801376 - RNA, 21 nt, Human
aauaaaacaguuggugucaau

SEQ ID NO: 801377 - RNA, 22 nt, Human
aagcaaauauuucuagagacug

SEQ ID NO: 801378 - RNA, 22 nt, Human
ccagagcccgggaccuggacuu

SEQ ID NO: 801379 - RNA, 21 nt, Human
cccagagccuagggagggcac

SEQ ID NO: 801380 - RNA, 22 nt, Human
cuggcugggagcgagcugcuca

SEQ ID NO: 801381 - RNA, 22 nt, Human
ucauguguccuaguucauauaa

SEQ ID NO: 801382 - RNA, 22 nt, Human
uggcaaggccacaggugcaguu

SEQ ID NO: 801383 - RNA, 22 nt, Human
cuggcugucuucugggagcugu

SEQ ID NO: 801384 - RNA, 22 nt, Human
gcccuagcgccagcucagcacc

SEQ ID NO: 801385 - RNA, 22 nt, Human
aauaguuguaguaucuaucucg

SEQ ID NO: 801386 - RNA, 22 nt, Human
aaagaaauaccuuucucagcuu

SEQ ID NO: 801387 - RNA, 22 nt, Human
cccaggacccuucaauggcucc

SEQ ID NO: 801388 - RNA, 22 nt, Human
uuuuccaaauuagaaguagaga

SEQ ID NO: 801389 - RNA, 22 nt, Human
uuguucuauggugaggcagcca

SEQ ID NO: 801390 - RNA, 22 nt, Human
gggugguguauuagagcugcag

SEQ ID NO: 801391 - RNA, 22 nt, Human
ugggagaagcauggggugcaga

SEQ ID NO: 801392 - RNA, 23 nt, Human
ugggucacuguuucaccauugcu

SEQ ID NO: 801393 - RNA, 22 nt, Human
cuggguguucacccgaggcgcu

SEQ ID NO: 801394 - RNA, 21 nt, Human
ccaaagaacugccauuuguca

SEQ ID NO: 801395 - RNA, 22 nt, Human
agcugucugucuccugaggaga

SEQ ID NO: 801396 - RNA, 22 nt, Human
cagaggccaguggacaagggcc

SEQ ID NO: 801397 - RNA, 22 nt, Human
agcacuccugucuuuccccuuu

SEQ ID NO: 801398 - RNA, 22 nt, Human
ugcaaagaugaaauauuaaagg

SEQ ID NO: 801399 - RNA, 22 nt, Human
aaauaagaggacagauguuugg

SEQ ID NO: 801400 - RNA, 22 nt, Human
ggcuccugggcagcugcucccu

SEQ ID NO: 801401 - RNA, 22 nt, Human
gagcuuugccuaaaacuagaau

SEQ ID NO: 801402 - RNA, 22 nt, Human
acugccuguagcccugagaugu

SEQ ID NO: 801403 - RNA, 22 nt, Human
acuggcagguccaucgcccuuu

SEQ ID NO: 801404 - RNA, 22 nt, Human
ggagagcugaagcauggacagg

SEQ ID NO: 801405 - RNA, 22 nt, Human
ugagcagcaggaucuucuggua

SEQ ID NO: 801406 - RNA, 22 nt, Human
caagaaguugacagccagguga

SEQ ID NO: 801407 - RNA, 22 nt, Human
gaagaagacauggaacaauagu

SEQ ID NO: 801408 - RNA, 22 nt, Human
gcacacccucucaccagcacug

SEQ ID NO: 801409 - RNA, 22 nt, Human
uagggugguuagaaggaguaug

SEQ ID NO: 801410 - RNA, 22 nt, Human
ugagccagauaagggcucacgc

SEQ ID NO: 801411 - RNA, 22 nt, Human
ccucuccaguuuuaacgugacc

SEQ ID NO: 801412 - RNA, 22 nt, Human
uaagucaucccauaacagugcu

SEQ ID NO: 801413 - RNA, 22 nt, Human
aaauacauuagacggagaguua

SEQ ID NO: 801414 - RNA, 22 nt, Human
agcagcacccagagccaugucu

SEQ ID NO: 801415 - RNA, 22 nt, Human
agucaggaagcuggagcugggg

SEQ ID NO: 801416 - RNA, 22 nt, Human
cugccaggccuccgcugucccc

SEQ ID NO: 801417 - RNA, 22 nt, Human
cuuguguggucuggucuugcua

SEQ ID NO: 801418 - RNA, 22 nt, Human
ugagccagguuaagacaggagc

SEQ ID NO: 801419 - RNA, 22 nt, Human
uaaaucacaaauuuucucauuu

SEQ ID NO: 801420 - RNA, 22 nt, Human
ucagagcuuuggagaccaggaa

SEQ ID NO: 801421 - RNA, 22 nt, Human
uacaauguaauucugauuaugu

SEQ ID NO: 801422 - RNA, 22 nt, Human
gcugugcagccaagugccucug

SEQ ID NO: 801423 - RNA, 22 nt, Human
ccuaggcccucaaagagcauaa

SEQ ID NO: 801424 - RNA, 19 nt, Human
ccauauaaccagcaagugu

SEQ ID NO: 801425 - RNA, 22 nt, Human
cugcagcauccuagggucugug

SEQ ID NO: 801426 - RNA, 22 nt, Human
uagaggaaccaggcaggcugag

SEQ ID NO: 801427 - RNA, 22 nt, Human
gcccaagguauaucagagacag

SEQ ID NO: 801428 - RNA, 21 nt, Human
gcccucaggggaggauggccu

SEQ ID NO: 801429 - RNA, 22 nt, Human
ugcaccacccgugggaggacug

SEQ ID NO: 801430 - RNA, 22 nt, Human
ggguccagaaugagaaugggcu

SEQ ID NO: 801431 - RNA, 22 nt, Human
gcaaacauaauaugaagacacu

SEQ ID NO: 801432 - RNA, 22 nt, Human
uccuuaaagugcaccuccucau

SEQ ID NO: 801433 - RNA, 22 nt, Human
agccacaugagugagccaucuu

SEQ ID NO: 801434 - RNA, 22 nt, Human
uuuucccaucuacaaagcaggg

SEQ ID NO: 801435 - RNA, 22 nt, Human
uacaugcacaugaacaugugug

SEQ ID NO: 801436 - RNA, 22 nt, Human
cagugagauaccacagagcaaa

SEQ ID NO: 801437 - RNA, 22 nt, Human
ggcacugggcaccggcugaggg

SEQ ID NO: 801438 - RNA, 22 nt, Human
ucaggacagccagggugcagac

SEQ ID NO: 801439 - RNA, 22 nt, Human
uauuacaagaaagggcaugaau

SEQ ID NO: 801440 - RNA, 22 nt, Human
ggcaggcaggagcgugcuuggg

SEQ ID NO: 801441 - RNA, 22 nt, Human
gcaggcuuugacuuggggcaac

SEQ ID NO: 801442 - RNA, 22 nt, Human
ucacaggacagccuuccacccg

SEQ ID NO: 801443 - RNA, 22 nt, Human
ugcaaucucggcacuuugggag

SEQ ID NO: 801444 - RNA, 22 nt, Human
guacauuuuacuuuguuugaau

SEQ ID NO: 801445 - RNA, 22 nt, Human
ugagguguguccccagggaggu

SEQ ID NO: 801446 - RNA, 22 nt, Human
gcccagcaaggaccaagggccg

SEQ ID NO: 801447 - RNA, 22 nt, Human
aggcagaucaguacaggguuaa

SEQ ID NO: 801448 - RNA, 22 nt, Human
ccaggguguagggauuccagau

SEQ ID NO: 801449 - RNA, 22 nt, Human
ccagggccucguguucugagug

SEQ ID NO: 801450 - RNA, 22 nt, Human
ugcacccauagcacacacuccu

SEQ ID NO: 801451 - RNA, 22 nt, Human
acuuguuucaacuguacucuca

SEQ ID NO: 801452 - RNA, 22 nt, Human
acagagaaagugggcugaagau

SEQ ID NO: 801453 - RNA, 22 nt, Human
agauaaaaugguucaaaggcua

SEQ ID NO: 801454 - RNA, 22 nt, Human
caguuucucucauacauauuug

SEQ ID NO: 801455 - RNA, 22 nt, Human
ugggagaaagaacccugaguga

SEQ ID NO: 801456 - RNA, 22 nt, Human
gcugggagaggcccugaaguga

SEQ ID NO: 801457 - RNA, 21 nt, Human
acccaggggaagcagaaacug

SEQ ID NO: 801458 - RNA, 22 nt, Human
ugggagccuggcaggccagagg

SEQ ID NO: 801459 - RNA, 22 nt, Human
uacaugcuccuuaugagaaucu

SEQ ID NO: 801460 - RNA, 22 nt, Human
guggcccaggcacccugaugac

SEQ ID NO: 801461 - RNA, 22 nt, Human
cagugaggcucugcugagcggu

SEQ ID NO: 801462 - RNA, 22 nt, Human
ucacaggcccaaaccacgcuua

SEQ ID NO: 801463 - RNA, 22 nt, Human
acauuugugcaacguauccaca

SEQ ID NO: 801464 - RNA, 22 nt, Human
ucuggcugauucccugggacug

SEQ ID NO: 801465 - RNA, 18 nt, Human
gaucaggaucaaucaccc

SEQ ID NO: 801466 - RNA, 22 nt, Human
ggcccugcucaggcugcgauga

SEQ ID NO: 801467 - RNA, 20 nt, Human
ugcccagcaagagugcaguu

SEQ ID NO: 801468 - RNA, 19 nt, Human
cucuggagcagacacugga

SEQ ID NO: 801469 - RNA, 22 nt, Human
gucagaggaauggaugagugau

SEQ ID NO: 801470 - RNA, 22 nt, Human
cacugggucaggauagagccca

SEQ ID NO: 801471 - RNA, 22 nt, Human
uuauggaaaauacaauuauaag

SEQ ID NO: 801472 - RNA, 22 nt, Human
aaugaaauaguuggcuguagag

SEQ ID NO: 801473 - RNA, 22 nt, Human
uggucucucuccugcaacaacu

SEQ ID NO: 801474 - RNA, 22 nt, Human
ccuggagcaaaaaucuaaggag

SEQ ID NO: 801475 - RNA, 22 nt, Human
ccagaaguggcuuucucaggga

SEQ ID NO: 801476 - RNA, 22 nt, Human
uuucaucuuccuuggcauaggu

SEQ ID NO: 801477 - RNA, 22 nt, Human
acagagcauuugggacagagag

SEQ ID NO: 801478 - RNA, 16 nt, Human
uggagguguuucuagu

SEQ ID NO: 801479 - RNA, 22 nt, Human
agaaacaacuuguuucucuugc

SEQ ID NO: 801480 - RNA, 22 nt, Human
ugucauggcacugguaggagug

SEQ ID NO: 801481 - RNA, 22 nt, Human
uuggcuucauugaucucacuuu

SEQ ID NO: 801482 - RNA, 22 nt, Human
ccccagggaagcuuugcuuacu

SEQ ID NO: 801483 - RNA, 22 nt, Human
agccaggggauucaucagggac

SEQ ID NO: 801484 - RNA, 22 nt, Human
acacauauaugucgaaguccuc

SEQ ID NO: 801485 - RNA, 22 nt, Human
ugugaggaguaggcugagggug

SEQ ID NO: 801486 - RNA, 22 nt, Human
aagggcagcuuaaauugguagc

SEQ ID NO: 801487 - RNA, 22 nt, Human
ggcucucuccuuggcuuucaga

SEQ ID NO: 801488 - RNA, 22 nt, Human
uuugcaugggagguaguaauca

SEQ ID NO: 801489 - RNA, 22 nt, Human
ucacauauuuaagaaaguuaaa

SEQ ID NO: 801490 - RNA, 22 nt, Human
uacuuucuuucccaagaggugg

SEQ ID NO: 801491 - RNA, 22 nt, Human
caggccugacccugagcuucac

SEQ ID NO: 801492 - RNA, 22 nt, Human
gcucagggcgcgagggacgugg

SEQ ID NO: 801493 - RNA, 22 nt, Human
ucucauucauacccuacaugcu

SEQ ID NO: 801494 - RNA, 22 nt, Human
gagugucacaggguaauuguuu

SEQ ID NO: 801495 - RNA, 22 nt, Human
acacagaagcuuuuucuauucc

SEQ ID NO: 801496 - RNA, 22 nt, Human
auuugugggacuauaaugcagg

SEQ ID NO: 801497 - RNA, 22 nt, Human
aauguauaaaguguuaauaacu

SEQ ID NO: 801498 - RNA, 22 nt, Human
gagcuuuggggaagaauacaga

SEQ ID NO: 801499 - RNA, 20 nt, Human
uggcacagaacccuugccua

SEQ ID NO: 801500 - RNA, 22 nt, Human
acacaguucaggaucaaauagc

SEQ ID NO: 801501 - RNA, 22 nt, Human
ugucauggaggccuccccuaaa

SEQ ID NO: 801502 - RNA, 22 nt, Human
uacuuuuugucucuuugaaugu

SEQ ID NO: 801503 - RNA, 22 nt, Human
aaggccuggauuuagguuguga

SEQ ID NO: 801504 - RNA, 22 nt, Human
agccagagaguguuggagaugu

SEQ ID NO: 801505 - RNA, 22 nt, Human
cagcuguccaaacacauuaacu

SEQ ID NO: 801506 - RNA, 22 nt, Human
uuauugagaccguaagucaggu

SEQ ID NO: 801507 - RNA, 22 nt, Human
ucaaaguagaguucagugcagc

SEQ ID NO: 801508 - RNA, 20 nt, Human
auuauucauacaugugugac

SEQ ID NO: 801509 - RNA, 21 nt, Human
ucagaagugcagcccaggaau

SEQ ID NO: 801510 - RNA, 22 nt, Human
agggaacagugaaaggcaucag

SEQ ID NO: 801511 - RNA, 22 nt, Human
acaauagaaggaaacugacaua

SEQ ID NO: 801512 - RNA, 22 nt, Human
guggaguggccuggcccugaga

SEQ ID NO: 801513 - RNA, 22 nt, Human
accaggcaugauguggagcaca

SEQ ID NO: 801514 - RNA, 22 nt, Human
aaacaaguguaaacuagucugu

SEQ ID NO: 801515 - RNA, 22 nt, Human
aagaauuuaaacuaaccauaug

SEQ ID NO: 801516 - RNA, 22 nt, Human
ucucagaguuccucuggagucc

SEQ ID NO: 801517 - RNA, 22 nt, Human
gcuggagcugcagccugggccu

SEQ ID NO: 801518 - RNA, 22 nt, Human
uuggaggcaaugggaaggaggc

SEQ ID NO: 801519 - RNA, 22 nt, Human
acauguuugccugcaggcuuag

SEQ ID NO: 801520 - RNA, 22 nt, Human
ugcugccuugaccuccugggcu

SEQ ID NO: 801521 - RNA, 22 nt, Human
aagcuuugcaaugcuucauuau

SEQ ID NO: 801522 - RNA, 22 nt, Human
ucuuggaaguagaacacagucu

SEQ ID NO: 801523 - RNA, 22 nt, Human
gaggaggccaguggaaggaagc

SEQ ID NO: 801524 - RNA, 22 nt, Human
auguucccaagggauagaaaga

SEQ ID NO: 801525 - RNA, 22 nt, Human
augaggaggccaguaagagccu

SEQ ID NO: 801526 - RNA, 22 nt, Human
ugccaccaggagaaccagugca

SEQ ID NO: 801527 - RNA, 23 nt, Human
gccucugcagccuaguuaguguc

SEQ ID NO: 801528 - RNA, 22 nt, Human
uauuugcaacauaaaacucuga

SEQ ID NO: 801529 - RNA, 22 nt, Human
gagcuuugucuccuggagaccc

SEQ ID NO: 801530 - RNA, 22 nt, Human
gcagccucugcaguucaggagg

SEQ ID NO: 801531 - RNA, 22 nt, Human
ccaggaagaaacagucuuuaua

SEQ ID NO: 801532 - RNA, 19 nt, Human
aaaaacuuaguccagaaag

SEQ ID NO: 801533 - RNA, 22 nt, Human
ugucuuuggaauauuuagcuga

SEQ ID NO: 801534 - RNA, 22 nt, Human
aaggcagaaagggaugugagug

SEQ ID NO: 801535 - RNA, 22 nt, Human
cauggcugaggcagaggacuga

SEQ ID NO: 801536 - RNA, 23 nt, Human
aucuccugagaacccacaguggu

SEQ ID NO: 801537 - RNA, 22 nt, Human
uacuuugaauuaaauauuucag

SEQ ID NO: 801538 - RNA, 22 nt, Human
ucuggaaauaaaauuauaguug

SEQ ID NO: 801539 - RNA, 22 nt, Human
caaagugcuggaauuacaggug

SEQ ID NO: 801540 - RNA, 22 nt, Human
aggccggcgcuucccaggaggc

SEQ ID NO: 801541 - RNA, 22 nt, Human
acaggcugacuuccugccaugu

SEQ ID NO: 801542 - RNA, 22 nt, Human
aggcagcuggcagcacccaggg

SEQ ID NO: 801543 - RNA, 22 nt, Human
aacaauaacuagacaugccaug

SEQ ID NO: 801544 - RNA, 18 nt, Human
gcucagcuaugggagguu

SEQ ID NO: 801545 - RNA, 22 nt, Human
uccuggccgccgcguggggccg

SEQ ID NO: 801546 - RNA, 19 nt, Human
gaagaagcuugagaaguag

SEQ ID NO: 801547 - RNA, 22 nt, Human
cagcagcauugcucuggauucc

SEQ ID NO: 801548 - RNA, 22 nt, Human
uugcaaauuaaagaggauagca

SEQ ID NO: 801549 - RNA, 22 nt, Human
uuaauaaaguaugaauuggaaa

SEQ ID NO: 801550 - RNA, 22 nt, Human
ucugcccacugcucugcugccc

SEQ ID NO: 801551 - RNA, 22 nt, Human
caaagcucaugcucuuagccau

SEQ ID NO: 801552 - RNA, 22 nt, Human
uaaaucacuccuaauaaucagu

SEQ ID NO: 801553 - RNA, 23 nt, Human
ugccuccaccgagggccaggcau

SEQ ID NO: 801554 - RNA, 22 nt, Human
acuccaggauguagaaucagag

SEQ ID NO: 801555 - RNA, 22 nt, Human
acauguuuaaguuuaaugaaaa

SEQ ID NO: 801556 - RNA, 22 nt, Human
uggugccauuagcccugcuguu

SEQ ID NO: 801557 - RNA, 22 nt, Human
acagcugcuguggagguuuuca

SEQ ID NO: 801558 - RNA, 21 nt, Human
gaggaaaugcucugguguuca

SEQ ID NO: 801559 - RNA, 22 nt, Human
ugcacacacaugcagagggaga

SEQ ID NO: 801560 - RNA, 22 nt, Human
gaggaaggagggaaagcgcgcg

SEQ ID NO: 801561 - RNA, 22 nt, Human
cagagucaguauugaauugaaa

SEQ ID NO: 801562 - RNA, 22 nt, Human
uuacugauggaacagagauaga

SEQ ID NO: 801563 - RNA, 22 nt, Human
ggacagaggguugacagaguau

SEQ ID NO: 801564 - RNA, 22 nt, Human
aaaggucuucucaaacauccca

SEQ ID NO: 801565 - RNA, 22 nt, Human
cugcugucucacuggugugguu

SEQ ID NO: 801566 - RNA, 22 nt, Human
gcugggaugcgucuucccaggc

SEQ ID NO: 801567 - RNA, 22 nt, Human
ccuccugguugcaaugaaaugg

SEQ ID NO: 801568 - RNA, 22 nt, Human
ucucccaagccuggcaggggca

SEQ ID NO: 801569 - RNA, 23 nt, Human
agagggagauguuuuucucaaga

SEQ ID NO: 801570 - RNA, 22 nt, Human
ucccuuaaccguaggacagucu

SEQ ID NO: 801571 - RNA, 22 nt, Human
uuucacauuggcuucuauuucu

SEQ ID NO: 801572 - RNA, 22 nt, Human
ucaaauugucaucuugauaaug

SEQ ID NO: 801573 - RNA, 22 nt, Human
uuuacacaaaagauagcacacc

SEQ ID NO: 801574 - RNA, 22 nt, Human
uacaguaaccagucuacuuaga

SEQ ID NO: 801575 - RNA, 21 nt, Human
cuuguuuugaaaggacuggcc

SEQ ID NO: 801576 - RNA, 22 nt, Human
ggcuggcacagagggcuggugu

SEQ ID NO: 801577 - RNA, 22 nt, Human
ggcagcagaacuggcccuguau

SEQ ID NO: 801578 - RNA, 22 nt, Human
ugguccugggcacaguauaugc

SEQ ID NO: 801579 - RNA, 23 nt, Human
gaauucuuaaggucacuaaaguc

SEQ ID NO: 801580 - RNA, 22 nt, Human
aaugaauggguuuaauauuuua

SEQ ID NO: 801581 - RNA, 22 nt, Human
ucagugucacaggaugcuaugc

SEQ ID NO: 801582 - RNA, 22 nt, Human
gcagagcugagcggcugcccgg

SEQ ID NO: 801583 - RNA, 22 nt, Human
gcacacagaacauuuggauccu

SEQ ID NO: 801584 - RNA, 22 nt, Human
gucccucaguagugcacagugg

SEQ ID NO: 801585 - RNA, 22 nt, Human
acaggcagcacuaaucucuggu

SEQ ID NO: 801586 - RNA, 21 nt, Human
aaggagccuaggaggcucagg

SEQ ID NO: 801587 - RNA, 23 nt, Human
uuaugcaagcuuccuggucucag

SEQ ID NO: 801588 - RNA, 22 nt, Human
caguccugugucccuugguggg

SEQ ID NO: 801589 - RNA, 21 nt, Human
aguuuacaacuguccagcccc

SEQ ID NO: 801590 - RNA, 22 nt, Human
uugcauguguaagguuguuuau

SEQ ID NO: 801591 - RNA, 22 nt, Human
cagcccagugcacgcccguuuc

SEQ ID NO: 801592 - RNA, 22 nt, Human
uuggcccagggucagcggcgcu

SEQ ID NO: 801593 - RNA, 22 nt, Human
cuguuuauggagguaaggcauc

SEQ ID NO: 801594 - RNA, 22 nt, Human
gacagcagaugaagccugcaga

SEQ ID NO: 801595 - RNA, 22 nt, Human
uuaauuacuaagcacaaugcaa

SEQ ID NO: 801596 - RNA, 22 nt, Human
ccaaagugcugggguuacaggc

SEQ ID NO: 801597 - RNA, 22 nt, Human
gcucugagaggugcagcaguaa

SEQ ID NO: 801598 - RNA, 22 nt, Human
cucaguguuaaagacuuuccag

SEQ ID NO: 801599 - RNA, 22 nt, Human
uuaguggagaguuauuaucagc

SEQ ID NO: 801600 - RNA, 22 nt, Human
uuguacaaguauuaugugaaca

SEQ ID NO: 801601 - RNA, 22 nt, Human
aacauuucagcaccugauuccu

SEQ ID NO: 801602 - RNA, 22 nt, Human
gcugccuccaaucugugccccg

SEQ ID NO: 801603 - RNA, 22 nt, Human
ucuuuggcugccugaagcccaa

SEQ ID NO: 801604 - RNA, 22 nt, Human
uaaacaagcugucugauauucu

SEQ ID NO: 801605 - RNA, 22 nt, Human
ucauuucuguugugcaucacug

SEQ ID NO: 801606 - RNA, 22 nt, Human
cccagagcugagggggcacguu

SEQ ID NO: 801607 - RNA, 22 nt, Human
gcccugcccugagccguagacc

SEQ ID NO: 801608 - RNA, 22 nt, Human
aaauaguccugggaauaguacu

SEQ ID NO: 801609 - RNA, 19 nt, Human
accuuuccuuucucagaug

SEQ ID NO: 801610 - RNA, 22 nt, Human
aagacauucacaaauguucacu

SEQ ID NO: 801611 - RNA, 22 nt, Human
uuaaaagaauccuguuauccuc

SEQ ID NO: 801612 - RNA, 22 nt, Human
cucuggcuuguuaaugcauauu

SEQ ID NO: 801613 - RNA, 22 nt, Human
aaugcuuucuuauaaccacugc

SEQ ID NO: 801614 - RNA, 22 nt, Human
acuacaguacuauaucuauagg

SEQ ID NO: 801615 - RNA, 20 nt, Human
agccugccagcuggcccaga

SEQ ID NO: 801616 - RNA, 22 nt, Human
uaaggcagugaaacuauucugu

SEQ ID NO: 801617 - RNA, 22 nt, Human
acugcacuccagcccgagcaac

SEQ ID NO: 801618 - RNA, 19 nt, Human
uggcuuggcugcagaugcu

SEQ ID NO: 801619 - RNA, 17 nt, Human
aguguuuccuuaucauu

SEQ ID NO: 801620 - RNA, 22 nt, Human
aucauucuaguccuuauggucu

SEQ ID NO: 801621 - RNA, 22 nt, Human
aucuuacacgauaacuguuagu

SEQ ID NO: 801622 - RNA, 22 nt, Human
aauaauacuucguaaaguuguu

SEQ ID NO: 801623 - RNA, 22 nt, Human
uugguucauuuucucaucuaga

SEQ ID NO: 801624 - RNA, 22 nt, Human
aggcaaaagaaugucauaaaug

SEQ ID NO: 801625 - RNA, 22 nt, Human
caggcacagcugggcaauugcg

SEQ ID NO: 801626 - RNA, 22 nt, Human
agcuagagcugagaagcacuug

SEQ ID NO: 801627 - RNA, 22 nt, Human
agaguccacccuggggucaggc

SEQ ID NO: 801628 - RNA, 22 nt, Human
uagcuuugccacacauguagau

SEQ ID NO: 801629 - RNA, 22 nt, Human
uguuuacuuaugugggucacau

SEQ ID NO: 801630 - RNA, 22 nt, Human
cagggagaaaucuccaggaggu

SEQ ID NO: 801631 - RNA, 22 nt, Human
uucuucuucuggcugcaccugg

SEQ ID NO: 801632 - RNA, 22 nt, Human
ccuguuuaccacugaggggcag

SEQ ID NO: 801633 - RNA, 22 nt, Human
auggaagaguccccauggauga

SEQ ID NO: 801634 - RNA, 22 nt, Human
cagcaaagguagaagcacagga

SEQ ID NO: 801635 - RNA, 22 nt, Human
gaauucuaaccauuaagccaag

SEQ ID NO: 801636 - RNA, 22 nt, Human
cucagcucuuuauacuagcugu

SEQ ID NO: 801637 - RNA, 22 nt, Human
acaugcaaagccacaggacccg

SEQ ID NO: 801638 - RNA, 22 nt, Human
uucagggacuuugauguaucag

SEQ ID NO: 801639 - RNA, 22 nt, Human
auauguuucaguauucaaguca

SEQ ID NO: 801640 - RNA, 22 nt, Human
gagggccaaagagcaagagccu

SEQ ID NO: 801641 - RNA, 22 nt, Human
caugugcauuggggccagggag

SEQ ID NO: 801642 - RNA, 19 nt, Human
agcauggccuacagugugc

SEQ ID NO: 801643 - RNA, 21 nt, Human
guugugguuggggcugcagcu

SEQ ID NO: 801644 - RNA, 22 nt, Human
aaugcuuauuauuaauagaaug

SEQ ID NO: 801645 - RNA, 22 nt, Human
agcucuuugcuggcaguaggcu

SEQ ID NO: 801646 - RNA, 22 nt, Human
ugccugguauuugaauaaagag

SEQ ID NO: 801647 - RNA, 21 nt, Human
gccucaccaugucaagccagg

SEQ ID NO: 801648 - RNA, 22 nt, Human
ggugguggagccagcugggagu

SEQ ID NO: 801649 - RNA, 22 nt, Human
cugaggcucugggugucacugu

SEQ ID NO: 801650 - RNA, 21 nt, Human
ugaggcuguuguaccagggag

SEQ ID NO: 801651 - RNA, 22 nt, Human
gccagcugaagcccugguggaa

SEQ ID NO: 801652 - RNA, 22 nt, Human
caaauguuaagacaggaucaag

SEQ ID NO: 801653 - RNA, 22 nt, Human
uccaggccuaggccaagugauu

SEQ ID NO: 801654 - RNA, 22 nt, Human
ugggccucaccuucuuggcagc

SEQ ID NO: 801655 - RNA, 22 nt, Human
agacugaauaggaaagagggaa

SEQ ID NO: 801656 - RNA, 22 nt, Human
aagguuuccagugauauugugg

SEQ ID NO: 801657 - RNA, 22 nt, Human
cuuucucaaugccggaaggcac

SEQ ID NO: 801658 - RNA, 22 nt, Human
aaugucugccagaacugaucau

SEQ ID NO: 801659 - RNA, 22 nt, Human
ggucagaaggauucugggaaau

SEQ ID NO: 801660 - RNA, 22 nt, Human
auggagugguacuuacuuggcu

SEQ ID NO: 801661 - RNA, 22 nt, Human
auacauuccuacugacuagcua

SEQ ID NO: 801662 - RNA, 19 nt, Human
gcaggcaguggcauucgga

SEQ ID NO: 801663 - RNA, 21 nt, Human
acuuggccaggcccccaccug

SEQ ID NO: 801664 - RNA, 22 nt, Human
acagggcaugugcaagagacau

SEQ ID NO: 801665 - RNA, 22 nt, Human
ucauuuauagcuaaccuugaau

SEQ ID NO: 801666 - RNA, 22 nt, Human
gucauaaaaggaccaccuauug

SEQ ID NO: 801667 - RNA, 22 nt, Human
ugauaaauccauguaaauggua

SEQ ID NO: 801668 - RNA, 22 nt, Human
cagcuucagcgugacaccagug

SEQ ID NO: 801669 - RNA, 22 nt, Human
aggagccaagaugcugucuggc

SEQ ID NO: 801670 - RNA, 21 nt, Human
uccacccucucugcucccagu

SEQ ID NO: 801671 - RNA, 22 nt, Human
uaggggaauugcagugugucca

SEQ ID NO: 801672 - RNA, 22 nt, Human
gggaagcugcguggucuagggc

SEQ ID NO: 801673 - RNA, 22 nt, Human
ggcucaagcagucugccugccu

SEQ ID NO: 801674 - RNA, 22 nt, Human
aaaugcugcagcuaguguguuu

SEQ ID NO: 801675 - RNA, 22 nt, Human
cuggcccauugccuucucucuc

SEQ ID NO: 801676 - RNA, 20 nt, Human
uaggacaggcagccgagggg

SEQ ID NO: 801677 - RNA, 21 nt, Human
uucauugaacuauuuguggag

SEQ ID NO: 801678 - RNA, 22 nt, Human
uuuuuuccaacuuaagacuuca

SEQ ID NO: 801679 - RNA, 22 nt, Human
uaaguucaguuggucgaaguag

SEQ ID NO: 801680 - RNA, 22 nt, Human
agucucucuccucgugguaacc

SEQ ID NO: 801681 - RNA, 22 nt, Human
aggugcuguuugucagcaguuu

SEQ ID NO: 801682 - RNA, 22 nt, Human
ucagcagggagaggagaaugca

SEQ ID NO: 801683 - RNA, 22 nt, Human
uccucagauauaaaugagggug

SEQ ID NO: 801684 - RNA, 22 nt, Human
uacuuauugguucagaaguuua

SEQ ID NO: 801685 - RNA, 22 nt, Human
aaauuguaaugacuucacuuga

SEQ ID NO: 801686 - RNA, 22 nt, Human
uuuuccucugagcuuugaauaa

SEQ ID NO: 801687 - RNA, 22 nt, Human
uggggcuucuccuguaggcuca

SEQ ID NO: 801688 - RNA, 22 nt, Human
ccuccaaguuugacucaggaca

SEQ ID NO: 801689 - RNA, 22 nt, Human
agccuggcggucgucggucagg

SEQ ID NO: 801690 - RNA, 22 nt, Human
uggcuugcuucuucugcugucg

SEQ ID NO: 801691 - RNA, 22 nt, Human
ggcugccuuuagaacggaugcu

SEQ ID NO: 801692 - RNA, 22 nt, Human
gagaaauagauucaugguagau

SEQ ID NO: 801693 - RNA, 22 nt, Human
aaguaaaagcaggugugcuggg

SEQ ID NO: 801694 - RNA, 16 nt, Human
ucccaggccaggugga

SEQ ID NO: 801695 - RNA, 22 nt, Human
aaagaaugucugaacagcuggc

SEQ ID NO: 801696 - RNA, 22 nt, Human
cccaggcagugugugcaugcgu

SEQ ID NO: 801697 - RNA, 19 nt, Human
cuggaauguggcuggugca

SEQ ID NO: 801698 - RNA, 22 nt, Human
cuaggcuguaaccccugccagg

SEQ ID NO: 801699 - RNA, 22 nt, Human
cagucuuugaugcauccuagcc

SEQ ID NO: 801700 - RNA, 20 nt, Human
acaaaauagguacuggguag

SEQ ID NO: 801701 - RNA, 22 nt, Human
ggcuucucucccccagcuccac

SEQ ID NO: 801702 - RNA, 22 nt, Human
aggcugaggagggauguugcuu

SEQ ID NO: 801703 - RNA, 20 nt, Human
agaggccaguuaggagucua

SEQ ID NO: 801704 - RNA, 22 nt, Human
acuccugggugcauuucugauu

SEQ ID NO: 801705 - RNA, 19 nt, Human
ugcacacagauaaguaucu

SEQ ID NO: 801706 - RNA, 22 nt, Human
uucagaauguacugauagaaca

SEQ ID NO: 801707 - RNA, 22 nt, Human
ugcaaauguguagguuuacaua

SEQ ID NO: 801708 - RNA, 22 nt, Human
agggagcagggcuccuuugggu

SEQ ID NO: 801709 - RNA, 17 nt, Human
ccagggaggggccgcgc

SEQ ID NO: 801710 - RNA, 22 nt, Human
aaggacaggagaaaacgggauc

SEQ ID NO: 801711 - RNA, 19 nt, Human
ccacuuugcuucucugggu

SEQ ID NO: 801712 - RNA, 22 nt, Human
ucaaaauucuagggagaauggu

SEQ ID NO: 801713 - RNA, 22 nt, Human
aacuucauggguucaaagcugg

SEQ ID NO: 801714 - RNA, 22 nt, Human
aggacagcccuugagagcacau

SEQ ID NO: 801715 - RNA, 22 nt, Human
aauguuuugcauuaguuuucua

SEQ ID NO: 801716 - RNA, 22 nt, Human
aaguuugagaagcuuauagaua

SEQ ID NO: 801717 - RNA, 22 nt, Human
ucccagccugacagugcaucaa

SEQ ID NO: 801718 - RNA, 22 nt, Human
uuuacagacaacuuaauagggg

SEQ ID NO: 801719 - RNA, 20 nt, Human
gcauggcauguagugaagug

SEQ ID NO: 801720 - RNA, 22 nt, Human
ccccuuccuuccucagacagcc

SEQ ID NO: 801721 - RNA, 22 nt, Human
uggcccagggcacagcagggag

SEQ ID NO: 801722 - RNA, 22 nt, Human
uccacaggcugaggcccuucug

SEQ ID NO: 801723 - RNA, 17 nt, Human
ucuuucccugggagaug

SEQ ID NO: 801724 - RNA, 22 nt, Human
cuuucauuugauaagaaugcca

SEQ ID NO: 801725 - RNA, 22 nt, Human
ucacagagaacuauaauccauc

SEQ ID NO: 801726 - RNA, 22 nt, Human
ugguuccaguuuucaauagagc

SEQ ID NO: 801727 - RNA, 22 nt, Human
acacauaagccuaaucaucucc

SEQ ID NO: 801728 - RNA, 20 nt, Human
agcuccugguauaggugccu

SEQ ID NO: 801729 - RNA, 22 nt, Human
cuauuugaauugucacaggcua

SEQ ID NO: 801730 - RNA, 22 nt, Human
ggaagggcggauaguauaaguu

SEQ ID NO: 801731 - RNA, 22 nt, Human
uucauuugugugccugaugcaa

SEQ ID NO: 801732 - RNA, 22 nt, Human
agcuggaugaauuuggaacacu

SEQ ID NO: 801733 - RNA, 22 nt, Human
gcaggcaccgcggcggcagguu

SEQ ID NO: 801734 - RNA, 22 nt, Human
uuucauugucaucuaucuuaga

SEQ ID NO: 801735 - RNA, 22 nt, Human
cccugcugaugccuugauuuug

SEQ ID NO: 801736 - RNA, 22 nt, Human
ucucuucuuguguuuuccugcc

SEQ ID NO: 801737 - RNA, 22 nt, Human
ucauugaguucaaauccuucau

SEQ ID NO: 801738 - RNA, 22 nt, Human
uggcucagcauucacuggucuu

SEQ ID NO: 801739 - RNA, 22 nt, Human
cuacauuuugugauuaugaaau

SEQ ID NO: 801740 - RNA, 22 nt, Human
agguaagguuuggaggcagugg

SEQ ID NO: 801741 - RNA, 22 nt, Human
caggaaggcgcggcugugccug

SEQ ID NO: 801742 - RNA, 16 nt, Human
agcagggcgggaagga

SEQ ID NO: 801743 - RNA, 22 nt, Human
caguuuaaccuauccauuaugu

SEQ ID NO: 801744 - RNA, 22 nt, Human
aaacaguauuaucaauauauuu

SEQ ID NO: 801745 - RNA, 22 nt, Human
accaguuuguaaccuguuuuca

SEQ ID NO: 801746 - RNA, 22 nt, Human
cucugggugagacagaccuggu

SEQ ID NO: 801747 - RNA, 22 nt, Human
ucuuagauguuagcucugugug

SEQ ID NO: 801748 - RNA, 22 nt, Human
aggaagccaagccugacacuca

SEQ ID NO: 801749 - RNA, 22 nt, Human
uagauacauuuuucuuuccugu

SEQ ID NO: 801750 - RNA, 22 nt, Human
gaaggcuugcagcucuguggca

SEQ ID NO: 801751 - RNA, 22 nt, Human
aaucuacauagagaucaaauga

SEQ ID NO: 801752 - RNA, 22 nt, Human
ucaggcagagggagaagccaag

SEQ ID NO: 801753 - RNA, 22 nt, Human
cuggccaggcucucacgugguc

SEQ ID NO: 801754 - RNA, 22 nt, Human
uagauuaagaugccaguuuuga

SEQ ID NO: 801755 - RNA, 22 nt, Human
agaccccauaccucagcaggua

SEQ ID NO: 801756 - RNA, 22 nt, Human
cacaucauguuaauucauuaca

SEQ ID NO: 801757 - RNA, 22 nt, Human
gcacugcuccagguguggcuug

SEQ ID NO: 801758 - RNA, 22 nt, Human
uuucuacaugucaguaacugau

SEQ ID NO: 801759 - RNA, 22 nt, Human
ccucagaguaggucucagcugu

SEQ ID NO: 801760 - RNA, 22 nt, Human
cuggagcuaauaauccaucuga

SEQ ID NO: 801761 - RNA, 22 nt, Human
cccacagaaugccaaugagacc

SEQ ID NO: 801762 - RNA, 22 nt, Human
cagccucuugcacuuugaaggc

SEQ ID NO: 801763 - RNA, 22 nt, Human
cagaggccuuucuacagugaua

SEQ ID NO: 801764 - RNA, 22 nt, Human
ggccccagcagacccuccucug

SEQ ID NO: 801765 - RNA, 22 nt, Human
uuucaacuuguuugcuuccaua

SEQ ID NO: 801766 - RNA, 22 nt, Human
ggcccucuguggcugccaugga

SEQ ID NO: 801767 - RNA, 22 nt, Human
agacaauggagagcagaguacu

SEQ ID NO: 801768 - RNA, 23 nt, Human
auuauuaaggacauggacuuugu

SEQ ID NO: 801769 - RNA, 22 nt, Human
caucauuuuauuaaccaagaaa

SEQ ID NO: 801770 - RNA, 22 nt, Human
auauaauaguuucauaaaggcu

SEQ ID NO: 801771 - RNA, 22 nt, Human
ccucccucccucuuaugguuua

SEQ ID NO: 801772 - RNA, 22 nt, Human
cugguucaucgcggccacuuau

SEQ ID NO: 801773 - RNA, 22 nt, Human
cccagcagugacccagugauac

SEQ ID NO: 801774 - RNA, 22 nt, Human
ugcccagccuaaacuuggcaag

SEQ ID NO: 801775 - RNA, 22 nt, Human
ccugaggacacacgcugcagga

SEQ ID NO: 801776 - RNA, 22 nt, Human
agaggccaucugcucugugggg

SEQ ID NO: 801777 - RNA, 22 nt, Human
agcuuucuucuaguuguacagu

SEQ ID NO: 801778 - RNA, 22 nt, Human
uuuuccucuguauuugaaaugc

SEQ ID NO: 801779 - RNA, 22 nt, Human
aagagggcugcaaucuuauugc

SEQ ID NO: 801780 - RNA, 22 nt, Human
cuggcuggucaugucaugagcc

SEQ ID NO: 801781 - RNA, 22 nt, Human
gacaauuagaucauuccuuuga

SEQ ID NO: 801782 - RNA, 22 nt, Human
uagcuuuacaaagugcugcacc

SEQ ID NO: 801783 - RNA, 22 nt, Human
cccauucauccucgcuuccuuc

SEQ ID NO: 801784 - RNA, 22 nt, Human
uuucuuuaucauagcaucuuug

SEQ ID NO: 801785 - RNA, 22 nt, Human
acagaacugggaaaugcacaua

SEQ ID NO: 801786 - RNA, 22 nt, Human
agcaacagcaacgacauuucuc

SEQ ID NO: 801787 - RNA, 22 nt, Human
ucaaauaguugacauuaacuug

SEQ ID NO: 801788 - RNA, 22 nt, Human
auuuuuccauucucuguuagua

SEQ ID NO: 801789 - RNA, 22 nt, Human
uaugaauauaccacaauuuagg

SEQ ID NO: 801790 - RNA, 22 nt, Human
uugguucaaagggauucaauuu

SEQ ID NO: 801791 - RNA, 22 nt, Human
uaaauuuacccaaggaacaugu

SEQ ID NO: 801792 - RNA, 22 nt, Human
ugggggugaaagucuggacagu

SEQ ID NO: 801793 - RNA, 22 nt, Human
acauucuuauaagagugaggca

SEQ ID NO: 801794 - RNA, 22 nt, Human
uaguggauggguaaaguauuuu

SEQ ID NO: 801795 - RNA, 22 nt, Human
caggaggaggugagguagaacu

SEQ ID NO: 801796 - RNA, 22 nt, Human
cagagccaggucuaggagucuc

SEQ ID NO: 801797 - RNA, 22 nt, Human
aauuaaaagauaacccaugagu

SEQ ID NO: 801798 - RNA, 22 nt, Human
acugcuagugagaaaauaacca

SEQ ID NO: 801799 - RNA, 22 nt, Human
uuuuuacagucauggucacuca

SEQ ID NO: 801800 - RNA, 22 nt, Human
gcucaaagcauaagacaucuaa

SEQ ID NO: 801801 - RNA, 22 nt, Human
agcugcuguuucuugcacguau

SEQ ID NO: 801802 - RNA, 22 nt, Human
aucugacaaccuauugacuuga

SEQ ID NO: 801803 - RNA, 22 nt, Human
caauguuuucaacugacaagua

SEQ ID NO: 801804 - RNA, 22 nt, Human
ccuucuccugccuuggguucau

SEQ ID NO: 801805 - RNA, 22 nt, Human
cagggaugggauggagucaguu

SEQ ID NO: 801806 - RNA, 23 nt, Human
acugcuuuauucaugaggcucuc

SEQ ID NO: 801807 - RNA, 23 nt, Human
agcuucaucuugcugugucucag

SEQ ID NO: 801808 - RNA, 22 nt, Human
agcaggugguaggcagucagca

SEQ ID NO: 801809 - RNA, 22 nt, Human
accaagcuguauauuauugguu

SEQ ID NO: 801810 - RNA, 22 nt, Human
gaggaggcuguuucucugcauu

SEQ ID NO: 801811 - RNA, 22 nt, Human
uagggaggaggguuuucaaauc

SEQ ID NO: 801812 - RNA, 22 nt, Human
aauaaaaugaacugguagaguu

SEQ ID NO: 801813 - RNA, 22 nt, Human
acugcagcccccuauuaggacu

SEQ ID NO: 801814 - RNA, 22 nt, Human
cugagggauguggauuuugguc

SEQ ID NO: 801815 - RNA, 22 nt, Human
aaugacaguguugggccagaug

SEQ ID NO: 801816 - RNA, 22 nt, Human
ucacaggaagaggugucuaucu

SEQ ID NO: 801817 - RNA, 22 nt, Human
cucagacuggagccccaaggac

SEQ ID NO: 801818 - RNA, 22 nt, Human
acacuaaaugagucuacaguac

SEQ ID NO: 801819 - RNA, 22 nt, Human
cagggucauggcaccugcacgg

SEQ ID NO: 801820 - RNA, 22 nt, Human
gcagugauaacuuuacucuuuu

SEQ ID NO: 801821 - RNA, 22 nt, Human
acaaaguagucaaaguagauga

SEQ ID NO: 801822 - RNA, 22 nt, Human
agcugccuccuggugccccauc

SEQ ID NO: 801823 - RNA, 22 nt, Human
uccugucugcucacagagcugg

SEQ ID NO: 801824 - RNA, 22 nt, Human
uuucacauggacuuuuuguucu

SEQ ID NO: 801825 - RNA, 22 nt, Human
gugcagaggacguggcggccuc

SEQ ID NO: 801826 - RNA, 22 nt, Human
uuaagugagcuugaauaaucuu

SEQ ID NO: 801827 - RNA, 22 nt, Human
gcuccaaaguacagugacuuac

SEQ ID NO: 801828 - RNA, 22 nt, Human
uuuguacacaggucauucaggg

SEQ ID NO: 801829 - RNA, 22 nt, Human
uuacaaacaacagacauuuauu

SEQ ID NO: 801830 - RNA, 22 nt, Human
uucacaaaaugguuuguugaug

SEQ ID NO: 801831 - RNA, 22 nt, Human
augcuuucuucuuuccuguaag

SEQ ID NO: 801832 - RNA, 22 nt, Human
cagcagaaguccgacuccaguc

SEQ ID NO: 801833 - RNA, 22 nt, Human
cuguuuauacgacagguggagg

SEQ ID NO: 801834 - RNA, 22 nt, Human
agccuaggggguccugggccac

SEQ ID NO: 801835 - RNA, 22 nt, Human
uggggaagggcacccuggagac

SEQ ID NO: 801836 - RNA, 22 nt, Human
uuguuuuuagagaagcccugaa

SEQ ID NO: 801837 - RNA, 23 nt, Human
acuuccaguuauaggaacucuuc

SEQ ID NO: 801838 - RNA, 23 nt, Human
cugaggggaaaagggcuucaggc

SEQ ID NO: 801839 - RNA, 21 nt, Human
aggauggaaaggacuaggggu

SEQ ID NO: 801840 - RNA, 22 nt, Human
gccugaggaauugaggggguaa

SEQ ID NO: 801841 - RNA, 22 nt, Human
ucauuuugccugccauuugagu

SEQ ID NO: 801842 - RNA, 19 nt, Human
ucaaaacacaaaugguuga

SEQ ID NO: 801843 - RNA, 22 nt, Human
caggccagggagaauaugaagc

SEQ ID NO: 801844 - RNA, 22 nt, Human
agcugcuguuuggugagucuug

SEQ ID NO: 801845 - RNA, 19 nt, Human
aacuggauaauggccacau

SEQ ID NO: 801846 - RNA, 22 nt, Human
acauaaauagauuauugggagg

SEQ ID NO: 801847 - RNA, 22 nt, Human
gcccagcacuaaaagcuuugcu

SEQ ID NO: 801848 - RNA, 22 nt, Human
guucuuaaagauucaucaagca

SEQ ID NO: 801849 - RNA, 22 nt, Human
ucucaagaucucaagauggccc

SEQ ID NO: 801850 - RNA, 22 nt, Human
cacaggcuuccaguccccagcu

SEQ ID NO: 801851 - RNA, 22 nt, Human
uuuuuacacuuagcauugagcg

SEQ ID NO: 801852 - RNA, 22 nt, Human
aagcgcagacacagagagugga

SEQ ID NO: 801853 - RNA, 20 nt, Human
caggcaguuugugguuaggg

SEQ ID NO: 801854 - RNA, 18 nt, Human
cucaguguuugcugaaaa

SEQ ID NO: 801855 - RNA, 20 nt, Human
ugacaucuguugaggaggaa

SEQ ID NO: 801856 - RNA, 22 nt, Human
gcaggcagagaaggaacauuua

SEQ ID NO: 801857 - RNA, 22 nt, Human
ggagaaggaauauuggaguagg

SEQ ID NO: 801858 - RNA, 22 nt, Human
uggcaaggcugugggggcagag

SEQ ID NO: 801859 - RNA, 22 nt, Human
uugguucacauuagauuuccuu

SEQ ID NO: 801860 - RNA, 22 nt, Human
agccccaguccgcugcgggcgg

SEQ ID NO: 801861 - RNA, 22 nt, Human
cuugggugcucagggaaagcuu

SEQ ID NO: 801862 - RNA, 22 nt, Human
ggcagagguagcuggaaccagg

SEQ ID NO: 801863 - RNA, 22 nt, Human
aagccaguauucaauggggcua

SEQ ID NO: 801864 - RNA, 22 nt, Human
ggcugccuugacccuggcuccg

SEQ ID NO: 801865 - RNA, 22 nt, Human
uaauauacuucccauaguuuga

SEQ ID NO: 801866 - RNA, 22 nt, Human
auacacuuccaaauauugauua

SEQ ID NO: 801867 - RNA, 21 nt, Human
aggagcuguguuagcuggucg

SEQ ID NO: 801868 - RNA, 18 nt, Human
gcagggacacagggucac

SEQ ID NO: 801869 - RNA, 22 nt, Human
uggugccaucauagcucacugc

SEQ ID NO: 801870 - RNA, 22 nt, Human
aagcuggcaauuaucaaaacug

SEQ ID NO: 801871 - RNA, 22 nt, Human
ucuccugguuuguuaaauaauu

SEQ ID NO: 801872 - RNA, 21 nt, Human
ucuugaaaaguuagauucucu

SEQ ID NO: 801873 - RNA, 22 nt, Human
uaucauucuaauucuccucgua

SEQ ID NO: 801874 - RNA, 19 nt, Human
acuggcaguuucugcaugg

SEQ ID NO: 801875 - RNA, 19 nt, Human
uaugacaaguacuaguucu

SEQ ID NO: 801876 - RNA, 22 nt, Human
cagggacauugguggccagguu

SEQ ID NO: 801877 - RNA, 17 nt, Human
ccugagugggagaggaa

SEQ ID NO: 801878 - RNA, 22 nt, Human
cuuauggccugcccacaguagu

SEQ ID NO: 801879 - RNA, 22 nt, Human
aaugccaacuuggauauacauu

SEQ ID NO: 801880 - RNA, 22 nt, Human
uucuuuggggaauauucugguu

SEQ ID NO: 801881 - RNA, 22 nt, Human
cuggucugcgggaaggcguggg

SEQ ID NO: 801882 - RNA, 21 nt, Human
ucaggaaacaccucuuaagga

SEQ ID NO: 801883 - RNA, 22 nt, Human
agagaaauuucccugccuucug

SEQ ID NO: 801884 - RNA, 22 nt, Human
ucagggaaaggggagagucauu

SEQ ID NO: 801885 - RNA, 22 nt, Human
aaaguucuaaaacucuuuguga

SEQ ID NO: 801886 - RNA, 22 nt, Human
aguggcaaugggaguggagaca

SEQ ID NO: 801887 - RNA, 20 nt, Human
ucaagaugaggucauacugg

SEQ ID NO: 801888 - RNA, 22 nt, Human
ugcugaggagguggcugugcuu

SEQ ID NO: 801889 - RNA, 22 nt, Human
aagcaguguucccagcuggccc

SEQ ID NO: 801890 - RNA, 22 nt, Human
cagucccaaggaggaagcaguc

SEQ ID NO: 801891 - RNA, 22 nt, Human
gcaguccuccugccucagccuc

SEQ ID NO: 801892 - RNA, 19 nt, Human
ccuggcccugcugcgcggg

SEQ ID NO: 801893 - RNA, 22 nt, Human
guguguacaaauuucauguaaa

SEQ ID NO: 801894 - RNA, 22 nt, Human
agcugagccagcagcaacagga

SEQ ID NO: 801895 - RNA, 22 nt, Human
aaaaaaucagaucuuugguuaa

SEQ ID NO: 801896 - RNA, 22 nt, Human
uccccaccuacacacugcuccu

SEQ ID NO: 801897 - RNA, 22 nt, Human
uggucccauuguucugcccagg

SEQ ID NO: 801898 - RNA, 22 nt, Human
auguguuaguuugugauuauac

SEQ ID NO: 801899 - RNA, 19 nt, Human
ucucccagcugagaagggc

SEQ ID NO: 801900 - RNA, 22 nt, Human
cugcagagcuaggcugagugaa

SEQ ID NO: 801901 - RNA, 22 nt, Human
ucaggaagucucaauuagcuac

SEQ ID NO: 801902 - RNA, 22 nt, Human
gcccauggaaaaccuguccucu

SEQ ID NO: 801903 - RNA, 22 nt, Human
ucuuuggaucccaacuggcugg

SEQ ID NO: 801904 - RNA, 22 nt, Human
agcuggcauuacaggagcaugc

SEQ ID NO: 801905 - RNA, 22 nt, Human
aacauucuacuguacugcauug

SEQ ID NO: 801906 - RNA, 19 nt, Human
aggcuuggauuguggccaa

SEQ ID NO: 801907 - RNA, 20 nt, Human
ucaaaauaggugugggcgga

SEQ ID NO: 801908 - RNA, 22 nt, Human
caggcuggaguacaauugugug

SEQ ID NO: 801909 - RNA, 22 nt, Human
aguccuguaucugagcugaguc

SEQ ID NO: 801910 - RNA, 22 nt, Human
ucaggcugcuguacugugaaug

SEQ ID NO: 801911 - RNA, 22 nt, Human
agcugcccccagggcugugcuu

SEQ ID NO: 801912 - RNA, 22 nt, Human
ugggccugauuuaucaucuuca

SEQ ID NO: 801913 - RNA, 22 nt, Human
aggaaagcaauggcugagaaca

SEQ ID NO: 801914 - RNA, 22 nt, Human
uuauuuagucuagaugaauuuu

SEQ ID NO: 801915 - RNA, 20 nt, Human
uucuccaaaggagacacuag

SEQ ID NO: 801916 - RNA, 22 nt, Human
gaugcaaaaguaucauuuuaau

SEQ ID NO: 801917 - RNA, 22 nt, Human
ccugggcuuugcuggcaaggcc

SEQ ID NO: 801918 - RNA, 22 nt, Human
uucuacaaauauuuacuguucc

SEQ ID NO: 801919 - RNA, 22 nt, Human
acacauuuucaacacugucaag

SEQ ID NO: 801920 - RNA, 22 nt, Human
cacagaacauuuuuagaugcag

SEQ ID NO: 801921 - RNA, 19 nt, Human
uuugaauauaaugcagcua

SEQ ID NO: 801922 - RNA, 22 nt, Human
auugagaaugcaaucuacuaug

SEQ ID NO: 801923 - RNA, 22 nt, Human
gcucugagcccccagaagcaga

SEQ ID NO: 801924 - RNA, 22 nt, Human
ucaggcugauuucuuuugaggg

SEQ ID NO: 801925 - RNA, 22 nt, Human
accaugcaucaguuaaaaggag

SEQ ID NO: 801926 - RNA, 22 nt, Human
gcacaaggguggucucuggagc

SEQ ID NO: 801927 - RNA, 21 nt, Human
ugcuggccaugugcugggcau

SEQ ID NO: 801928 - RNA, 22 nt, Human
aaaauauguauaacucuucugc

SEQ ID NO: 801929 - RNA, 22 nt, Human
gucccagggaugcagacaugag

SEQ ID NO: 801930 - RNA, 22 nt, Human
gacagccaucagcacacgcugc

SEQ ID NO: 801931 - RNA, 22 nt, Human
cugccuccaggcucaccuugac

SEQ ID NO: 801932 - RNA, 19 nt, Human
cugcucccuccuucuggca

SEQ ID NO: 801933 - RNA, 22 nt, Human
aagggcagcuauuaucgucauc

SEQ ID NO: 801934 - RNA, 22 nt, Human
cacaggaagcaagccuggggcc

SEQ ID NO: 801935 - RNA, 23 nt, Human
uauuuuccaaaugaugacuacau

SEQ ID NO: 801936 - RNA, 22 nt, Human
aggcagagaaaaaccagauaug

SEQ ID NO: 801937 - RNA, 22 nt, Human
agccuccaucucccaucuguga

SEQ ID NO: 801938 - RNA, 22 nt, Human
ucagaaguugauaaaguaguug

SEQ ID NO: 801939 - RNA, 22 nt, Human
gucuccagaauucuugggaggg

SEQ ID NO: 801940 - RNA, 22 nt, Human
cugggggcaauggucagagugu

SEQ ID NO: 801941 - RNA, 22 nt, Human
uccauuauacuucugauucaaa

SEQ ID NO: 801942 - RNA, 22 nt, Human
agugagggacuccaugacuccu

SEQ ID NO: 801943 - RNA, 22 nt, Human
uauuucugagaaccaacuuacc

SEQ ID NO: 801944 - RNA, 18 nt, Human
aaacagugccuaaguguc

SEQ ID NO: 801945 - RNA, 18 nt, Human
augcaagcuauggauuug

SEQ ID NO: 801946 - RNA, 19 nt, Human
cuuuuucaccuucuagaag

SEQ ID NO: 801947 - RNA, 22 nt, Human
auguauguaguguacauauaca

SEQ ID NO: 801948 - RNA, 18 nt, Human
uugcuucuuuucucuagg

SEQ ID NO: 801949 - RNA, 22 nt, Human
caucaggauaaguuccaggugg

SEQ ID NO: 801950 - RNA, 22 nt, Human
agcagcucauggaguaggcacu

SEQ ID NO: 801951 - RNA, 22 nt, Human
cuccacucaccagaugccagga

SEQ ID NO: 801952 - RNA, 22 nt, Human
ucagaggaaaggucagauggcu

SEQ ID NO: 801953 - RNA, 22 nt, Human
gaauaucccgcuaugcaaagua

SEQ ID NO: 801954 - RNA, 17 nt, Human
uuccaguuuaguauugu

SEQ ID NO: 801955 - RNA, 22 nt, Human
ugcagccugguggucacuggag

SEQ ID NO: 801956 - RNA, 22 nt, Human
acaaaaagggagaugagguaga

SEQ ID NO: 801957 - RNA, 21 nt, Human
uaacaaucucuacuucucauu

SEQ ID NO: 801958 - RNA, 22 nt, Human
ucuuuagaaacuuuucuucaug

SEQ ID NO: 801959 - RNA, 21 nt, Human
ucugagaacuucugcugcagc

SEQ ID NO: 801960 - RNA, 22 nt, Human
gcagcaggcuuuucauaccuug

SEQ ID NO: 801961 - RNA, 22 nt, Human
ucccagcagaugagcugaccua

SEQ ID NO: 801962 - RNA, 22 nt, Human
ucaaaguaagaauuuauuacaa

SEQ ID NO: 801963 - RNA, 22 nt, Human
aguacaaaugcagccagaguag

SEQ ID NO: 801964 - RNA, 20 nt, Human
uccuggucauguggcugggc

SEQ ID NO: 801965 - RNA, 22 nt, Human
ccucugacuccacacuugaacu

SEQ ID NO: 801966 - RNA, 22 nt, Human
cuggagggcugcagcgaggcug

SEQ ID NO: 801967 - RNA, 22 nt, Human
ccucugcacuucaccuuagcuc

SEQ ID NO: 801968 - RNA, 20 nt, Human
aagcccauuaccaugcuugg

SEQ ID NO: 801969 - RNA, 22 nt, Human
caggcaccccaggugagcacug

SEQ ID NO: 801970 - RNA, 22 nt, Human
acauuaaugaggugaugacaca

SEQ ID NO: 801971 - RNA, 22 nt, Human
ugcauuaagguaauuguauaau

SEQ ID NO: 801972 - RNA, 22 nt, Human
ugagggaguguggauacaguag

SEQ ID NO: 801973 - RNA, 22 nt, Human
ugaaaugaagggcuuguucugg

SEQ ID NO: 801974 - RNA, 22 nt, Human
uauucagaaaauaaauuggauu

SEQ ID NO: 801975 - RNA, 22 nt, Human
uaaagacaugguguaggugaac

SEQ ID NO: 801976 - RNA, 22 nt, Human
auggcccaagugcccugaccug

SEQ ID NO: 801977 - RNA, 16 nt, Human
cucuuugggcuuccag

SEQ ID NO: 801978 - RNA, 22 nt, Human
gcugagaaucaagauggagagg

SEQ ID NO: 801979 - RNA, 22 nt, Human
acucccacuccagaguagaagc

SEQ ID NO: 801980 - RNA, 17 nt, Human
caucugcucugccccuu

SEQ ID NO: 801981 - RNA, 22 nt, Human
ucauguuugagacuaauuuuuc

SEQ ID NO: 801982 - RNA, 22 nt, Human
aggccuguuuccuuggguugcu

SEQ ID NO: 801983 - RNA, 21 nt, Human
ugcauaaagaaauacaaauac

SEQ ID NO: 801984 - RNA, 22 nt, Human
aggaaaaucgagucuggaggca

SEQ ID NO: 801985 - RNA, 19 nt, Human
acaugcaaggcaccugcag

SEQ ID NO: 801986 - RNA, 22 nt, Human
auucauagcucaguacagacuc

SEQ ID NO: 801987 - RNA, 21 nt, Human
agaagucaauugaacugaaau

SEQ ID NO: 801988 - RNA, 22 nt, Human
auguucuuugaaauauuuuaga

SEQ ID NO: 801989 - RNA, 22 nt, Human
caggguggcccuguggucucau

SEQ ID NO: 801990 - RNA, 22 nt, Human
ugcuuuaacauaagauaucuuu

SEQ ID NO: 801991 - RNA, 22 nt, Human
gagcuuggcuggaccucacgga

SEQ ID NO: 801992 - RNA, 23 nt, Human
cagaaauaaacugguuuguagau

SEQ ID NO: 801993 - RNA, 22 nt, Human
cccuggaggaagaaacaauggc

SEQ ID NO: 801994 - RNA, 22 nt, Human
ggcagugaaaaaguauguuucc

SEQ ID NO: 801995 - RNA, 22 nt, Human
ggagaagaggagcuggaagccu

SEQ ID NO: 801996 - RNA, 23 nt, Human
gagauuuagcagacaaagcucuu

SEQ ID NO: 801997 - RNA, 22 nt, Human
cugcagcugucucuacugggca

SEQ ID NO: 801998 - RNA, 22 nt, Human
aauaagaacuccauuuacucgu

SEQ ID NO: 801999 - RNA, 22 nt, Human
agcugaguuaauucaucacuua

SEQ ID NO: 802000 - RNA, 22 nt, Human
ccagggaggagcauuucauggu

SEQ ID NO: 802001 - RNA, 22 nt, Human
cugcugucaaaaaucacuccau

SEQ ID NO: 802002 - RNA, 22 nt, Human
uaaaggaaucaguuuuagagau

SEQ ID NO: 802003 - RNA, 22 nt, Human
augucucuuuacucuuagaacc

SEQ ID NO: 802004 - RNA, 22 nt, Human
gccaggagcccugggcaaguuc

SEQ ID NO: 802005 - RNA, 23 nt, Human
uucaugaugauuaaucagcuaca

SEQ ID NO: 802006 - RNA, 22 nt, Human
uucaguguucuuuucuguuagc

SEQ ID NO: 802007 - RNA, 22 nt, Human
augcuuaacucuguacauaguu

SEQ ID NO: 802008 - RNA, 20 nt, Human
cacaggccuugugagcagac

SEQ ID NO: 802009 - RNA, 22 nt, Human
gagggaugcagaaacagaggcc

SEQ ID NO: 802010 - RNA, 22 nt, Human
aaucaacuguuuccacagggag

SEQ ID NO: 802011 - RNA, 23 nt, Human
aauauauguguuuuucugcuuca

SEQ ID NO: 802012 - RNA, 21 nt, Human
caucaacucuugugcucacac

SEQ ID NO: 802013 - RNA, 22 nt, Human
uucuccaaguagaagcuaaguu

SEQ ID NO: 802014 - RNA, 22 nt, Human
ccugcugagacccugagguggg

SEQ ID NO: 802015 - RNA, 22 nt, Human
ucuaaacauugugauagaccuu

SEQ ID NO: 802016 - RNA, 22 nt, Human
uguauuuucugaggagcauuag

SEQ ID NO: 802017 - RNA, 22 nt, Human
ccuggagaccugauggcagcgg

SEQ ID NO: 802018 - RNA, 19 nt, Human
gcaucugcaugaugggguu

SEQ ID NO: 802019 - RNA, 22 nt, Human
gugcaaauacauaugcugugga

SEQ ID NO: 802020 - RNA, 22 nt, Human
uugcagcuguuacugauagaua

SEQ ID NO: 802021 - RNA, 22 nt, Human
cccugcugaaucccauggaguc

SEQ ID NO: 802022 - RNA, 22 nt, Human
uaauaagucuguuguuuaauug

SEQ ID NO: 802023 - RNA, 22 nt, Human
aaacuugacagugagacaguuu

SEQ ID NO: 802024 - RNA, 21 nt, Human
accuucaguguucucagcugc

SEQ ID NO: 802025 - RNA, 22 nt, Human
ucugcacccuucuggguuggaa

SEQ ID NO: 802026 - RNA, 22 nt, Human
agcuguguuaggauguuaauaa

SEQ ID NO: 802027 - RNA, 22 nt, Human
augcuucuccugaacaucccug

SEQ ID NO: 802028 - RNA, 22 nt, Human
cccagucauccugcaggugaaa

SEQ ID NO: 802029 - RNA, 22 nt, Human
uccaaagccgacugacaucuga

SEQ ID NO: 802030 - RNA, 22 nt, Human
caggcaccucacguggguccca

SEQ ID NO: 802031 - RNA, 22 nt, Human
uccucaggugacuagguaucuu

SEQ ID NO: 802032 - RNA, 22 nt, Human
cagcugucuuuucuaaauauua

SEQ ID NO: 802033 - RNA, 22 nt, Human
agcccuccuuuguucaugcugc

SEQ ID NO: 802034 - RNA, 22 nt, Human
ccugugggucacaugggugacu

SEQ ID NO: 802035 - RNA, 22 nt, Human
auacagaagaacuauagccacu

SEQ ID NO: 802036 - RNA, 22 nt, Human
ugcaagggcuuagggggcugug

SEQ ID NO: 802037 - RNA, 22 nt, Human
cucuuaguuuguaaaaauaauu

SEQ ID NO: 802038 - RNA, 22 nt, Human
uucugucuucucgguuguuuac

SEQ ID NO: 802039 - RNA, 19 nt, Human
ucaggaggucgaccuggca

SEQ ID NO: 802040 - RNA, 22 nt, Human
ucauauaccagagaguuuauau

SEQ ID NO: 802041 - RNA, 20 nt, Human
ccacccugcuaagaauacac

SEQ ID NO: 802042 - RNA, 22 nt, Human
agcagcaggguguaauugggca

SEQ ID NO: 802043 - RNA, 22 nt, Human
aaagccaguuucuggaaguacc

SEQ ID NO: 802044 - RNA, 22 nt, Human
auaugacagcggauucacauau

SEQ ID NO: 802045 - RNA, 22 nt, Human
aggccgugugagcaugugugag

SEQ ID NO: 802046 - RNA, 22 nt, Human
acaaauguggacauggauaaug

SEQ ID NO: 802047 - RNA, 22 nt, Human
cagcccaggacugcagguguuu

SEQ ID NO: 802048 - RNA, 20 nt, Human
ggagcuggcauccagccucu

SEQ ID NO: 802049 - RNA, 22 nt, Human
ucagggaguaguuugugcuaug

SEQ ID NO: 802050 - RNA, 22 nt, Human
aggaaggcaugagguguucaca

SEQ ID NO: 802051 - RNA, 20 nt, Human
auugaaauuuuucugagauu

SEQ ID NO: 802052 - RNA, 22 nt, Human
ucuugcugugccccagcagggc

SEQ ID NO: 802053 - RNA, 22 nt, Human
uuuguguggauggaaggcagua

SEQ ID NO: 802054 - RNA, 21 nt, Human
gagugcaggucugaugccauc

SEQ ID NO: 802055 - RNA, 22 nt, Human
uccuggggcugcaaggccuguc

SEQ ID NO: 802056 - RNA, 22 nt, Human
cuggcacaucacuccuaguuua

SEQ ID NO: 802057 - RNA, 21 nt, Human
uuuauuuauauaggacacaug

SEQ ID NO: 802058 - RNA, 22 nt, Human
ucggaaggggccgcgcucggac

SEQ ID NO: 802059 - RNA, 22 nt, Human
uuaaaagagacuuccuuuguuu

SEQ ID NO: 802060 - RNA, 22 nt, Human
gaguuuaugucuuucauuguuc

SEQ ID NO: 802061 - RNA, 22 nt, Human
ugaaugaucuaguuuuguagac

SEQ ID NO: 802062 - RNA, 22 nt, Human
uugaaaugagcaaacugucagc

SEQ ID NO: 802063 - RNA, 22 nt, Human
aucuuuggucuugagugcaucu

SEQ ID NO: 802064 - RNA, 22 nt, Human
ucaaaacaaucauuggaugugc

SEQ ID NO: 802065 - RNA, 22 nt, Human
aauaaaguguauucuuugucau

SEQ ID NO: 802066 - RNA, 22 nt, Human
cugcacccucaaacuccugggc

SEQ ID NO: 802067 - RNA, 22 nt, Human
guguuuuaagaaagaagcucag

SEQ ID NO: 802068 - RNA, 22 nt, Human
uaugagauaaauggugcccccu

SEQ ID NO: 802069 - RNA, 22 nt, Human
agcagggcugugcuccuuccga

SEQ ID NO: 802070 - RNA, 20 nt, Human
agcccaggccugugugaguc

SEQ ID NO: 802071 - RNA, 22 nt, Human
acuccagguuuuuucacugaag

SEQ ID NO: 802072 - RNA, 22 nt, Human
acuagccaaguuuuacgacuaa

SEQ ID NO: 802073 - RNA, 22 nt, Human
uaggaugguacaaggcaggggu

SEQ ID NO: 802074 - RNA, 22 nt, Human
aauagacaauucuagccaacau

SEQ ID NO: 802075 - RNA, 22 nt, Human
uuucagagguaugcugcuuauc

SEQ ID NO: 802076 - RNA, 22 nt, Human
agcugccaccucugccuuuggg

SEQ ID NO: 802077 - RNA, 22 nt, Human
guggugaguucaggcuggggug

SEQ ID NO: 802078 - RNA, 22 nt, Human
cuuucuuucgaagacgugauua

SEQ ID NO: 802079 - RNA, 22 nt, Human
ggcacagggaggcccuggugug

SEQ ID NO: 802080 - RNA, 22 nt, Human
gagauauaagaucuagaaagga

SEQ ID NO: 802081 - RNA, 22 nt, Human
aguagcacaauuuugucccuaa

SEQ ID NO: 802082 - RNA, 22 nt, Human
gggcaagcagugaggacagcac

SEQ ID NO: 802083 - RNA, 22 nt, Human
cacaggagugcugcuauuguug

SEQ ID NO: 802084 - RNA, 22 nt, Human
agaaaacauaggagacaggaaa

SEQ ID NO: 802085 - RNA, 22 nt, Human
uaagagaacuggauagauagga

SEQ ID NO: 802086 - RNA, 22 nt, Human
aaacauugaugggaaguuuaau

SEQ ID NO: 802087 - RNA, 22 nt, Human
agagaaacugauguccuuugaa

SEQ ID NO: 802088 - RNA, 22 nt, Human
ucaagucauuugacuguguguu

SEQ ID NO: 802089 - RNA, 22 nt, Human
agccagcucccuccccugcagg

SEQ ID NO: 802090 - RNA, 22 nt, Human
agcuccuggucuuuguccagag

SEQ ID NO: 802091 - RNA, 22 nt, Human
agaguucucucucauuugagcu

SEQ ID NO: 802092 - RNA, 22 nt, Human
uuuacacauuauuuucagugug

SEQ ID NO: 802093 - RNA, 22 nt, Human
aaggccaggggcuggcgccucc

SEQ ID NO: 802094 - RNA, 22 nt, Human
ccugaggaccagcacccaucug

SEQ ID NO: 802095 - RNA, 19 nt, Human
ugcagaggguaggaaggcc

SEQ ID NO: 802096 - RNA, 19 nt, Human
gcugugggacagcagggug

SEQ ID NO: 802097 - RNA, 22 nt, Human
agugggagccagcagcuugggg

SEQ ID NO: 802098 - RNA, 18 nt, Human
gagucuuuguuacugcug

SEQ ID NO: 802099 - RNA, 22 nt, Human
ccaaggcuucccagagaugcuc

SEQ ID NO: 802100 - RNA, 22 nt, Human
cagccagcugaauguaccauga

SEQ ID NO: 802101 - RNA, 22 nt, Human
gcaggcagguggcaucuuguga

SEQ ID NO: 802102 - RNA, 22 nt, Human
cuggcugggcagacagaaugcu

SEQ ID NO: 802103 - RNA, 22 nt, Human
guuuucaaggggauuuaacuga

SEQ ID NO: 802104 - RNA, 22 nt, Human
uaggcugggaagaaagauucuc

SEQ ID NO: 802105 - RNA, 23 nt, Human
ccuccccaccagacucuaacaua

SEQ ID NO: 802106 - RNA, 20 nt, Human
uuuggcuucaagugcauugc

SEQ ID NO: 802107 - RNA, 22 nt, Human
uucucagggucuggauggccug

SEQ ID NO: 802108 - RNA, 22 nt, Human
auugcacaucugcacuacagcc

SEQ ID NO: 802109 - RNA, 22 nt, Human
uuuucuaaaagaagucacugau

SEQ ID NO: 802110 - RNA, 22 nt, Human
cagaugugcaugaugggaaggg

SEQ ID NO: 802111 - RNA, 22 nt, Human
ccuggcagcuccuccccggcgg

SEQ ID NO: 802112 - RNA, 22 nt, Human
uaauuacuggaaauuucaaaua

SEQ ID NO: 802113 - RNA, 22 nt, Human
gccccaggggaggugcccugca

SEQ ID NO: 802114 - RNA, 22 nt, Human
augucuuucuuauggucuguug

SEQ ID NO: 802115 - RNA, 22 nt, Human
aggugacaucccggcagcagag

SEQ ID NO: 802116 - RNA, 22 nt, Human
gagcaggccuggggugaggccu

SEQ ID NO: 802117 - RNA, 22 nt, Human
uuuguuuacucauucauugaug

SEQ ID NO: 802118 - RNA, 22 nt, Human
acacaggggaaaguggagcuga

SEQ ID NO: 802119 - RNA, 22 nt, Human
auugagaaggagauuggcaucu

SEQ ID NO: 802120 - RNA, 22 nt, Human
aacaagauagauaucacuuagg

SEQ ID NO: 802121 - RNA, 22 nt, Human
aaauauuugucugaggcgguug

SEQ ID NO: 802122 - RNA, 22 nt, Human
aaugcaaacuccacuggagcag

SEQ ID NO: 802123 - RNA, 22 nt, Human
aaacugcaugaagcugauuuua

SEQ ID NO: 802124 - RNA, 22 nt, Human
ugcacaguuggcuacaucgugg

SEQ ID NO: 802125 - RNA, 22 nt, Human
ugcugggggugucucaccaggc

SEQ ID NO: 802126 - RNA, 22 nt, Human
aguuuaauauccuucaacuuuc

SEQ ID NO: 802127 - RNA, 22 nt, Human
gaaacaauuuuuguugucuaag

SEQ ID NO: 802128 - RNA, 22 nt, Human
aggguggaagauggcacuaucu

SEQ ID NO: 802129 - RNA, 22 nt, Human
ccaccuccuaggccuggagaag

SEQ ID NO: 802130 - RNA, 22 nt, Human
gcaaggcuuugugaauuuuaaa

SEQ ID NO: 802131 - RNA, 22 nt, Human
acagaugguacuaaacccauau

SEQ ID NO: 802132 - RNA, 22 nt, Human
ggcagggaggaggugaaaguga

SEQ ID NO: 802133 - RNA, 22 nt, Human
gagcccagcccagagccauaug

SEQ ID NO: 802134 - RNA, 22 nt, Human
ucuccugugcacccucccugug

SEQ ID NO: 802135 - RNA, 22 nt, Human
ugacauuuuuauaagagucaaa

SEQ ID NO: 802136 - RNA, 22 nt, Human
uggagcccacggaugucgcuuu

SEQ ID NO: 802137 - RNA, 22 nt, Human
uggcucaguggcagccgcagcu

SEQ ID NO: 802138 - RNA, 22 nt, Human
augcuuuauacaaaacacuuaa

SEQ ID NO: 802139 - RNA, 22 nt, Human
uucuuuuccuacacagcgauuu

SEQ ID NO: 802140 - RNA, 22 nt, Human
uuggaggggccacugcagagcu

SEQ ID NO: 802141 - RNA, 22 nt, Human
gcagggcuaauggggcaaguag

SEQ ID NO: 802142 - RNA, 22 nt, Human
aggaagagcauucacaugguag

SEQ ID NO: 802143 - RNA, 22 nt, Human
agagagggaauauuugggguau

SEQ ID NO: 802144 - RNA, 22 nt, Human
caggcuguggaucaggagccuu

SEQ ID NO: 802145 - RNA, 22 nt, Human
ucaacuuggcuuuuuaaagucc

SEQ ID NO: 802146 - RNA, 22 nt, Human
ucaaguauaucuagucauuagg

SEQ ID NO: 802147 - RNA, 22 nt, Human
ucauugaggaaagguaguggcu

SEQ ID NO: 802148 - RNA, 21 nt, Human
ucaggcagugcaaauacaugg

SEQ ID NO: 802149 - RNA, 22 nt, Human
agggggcuccuccggugcuucc

SEQ ID NO: 802150 - RNA, 22 nt, Human
auuugcauaaggaugcuacugu

SEQ ID NO: 802151 - RNA, 22 nt, Human
uaguccagccuuggguguagcc

SEQ ID NO: 802152 - RNA, 22 nt, Human
aucaaaucauugcauuaauguu

SEQ ID NO: 802153 - RNA, 22 nt, Human
uagaaacagauguuuuugaaga

SEQ ID NO: 802154 - RNA, 22 nt, Human
acaguucuuaaaacuugaauua

SEQ ID NO: 802155 - RNA, 22 nt, Human
cagcucugcugguggugccagg

SEQ ID NO: 802156 - RNA, 22 nt, Human
aauagauacuacuuagauguag

SEQ ID NO: 802157 - RNA, 22 nt, Human
uggccaugaaggaggcagcaga

SEQ ID NO: 802158 - RNA, 22 nt, Human
gaggcacagagcccuaggagcu

SEQ ID NO: 802159 - RNA, 22 nt, Human
aggcaggaggaucauggaugca

SEQ ID NO: 802160 - RNA, 22 nt, Human
auacuuuagagcuagauugccu

SEQ ID NO: 802161 - RNA, 18 nt, Human
ggcaugugagugcugagg

SEQ ID NO: 802162 - RNA, 22 nt, Human
agcccaggaaguugaggcuugc

SEQ ID NO: 802163 - RNA, 22 nt, Human
gucucuaucauagcugaacccu

SEQ ID NO: 802164 - RNA, 22 nt, Human
ucguuuuaccaaauugaauguu

SEQ ID NO: 802165 - RNA, 22 nt, Human
uauuuauucuuuguacugccuu

SEQ ID NO: 802166 - RNA, 20 nt, Human
acaggagaucugaggaaagg

SEQ ID NO: 802167 - RNA, 22 nt, Human
gugcagagaggaccuuggggag

SEQ ID NO: 802168 - RNA, 22 nt, Human
ucauuguagggcauuuagagag

SEQ ID NO: 802169 - RNA, 21 nt, Human
ugaauagggccagaaccaaag

SEQ ID NO: 802170 - RNA, 22 nt, Human
auguauguucaagcaaugauua

SEQ ID NO: 802171 - RNA, 22 nt, Human
agaggaggcucugggaucgucc

SEQ ID NO: 802172 - RNA, 20 nt, Human
ccucucugcaugcucccuga

SEQ ID NO: 802173 - RNA, 22 nt, Human
uuacaugacaaagcuuuggcuc

SEQ ID NO: 802174 - RNA, 23 nt, Human
cccacaugucugagucagugcca

SEQ ID NO: 802175 - RNA, 22 nt, Human
uugcagauuaaaacacugagcu

SEQ ID NO: 802176 - RNA, 22 nt, Human
cccagggucccugcucucugug

SEQ ID NO: 802177 - RNA, 22 nt, Human
acagggccaggugagaggugcu

SEQ ID NO: 802178 - RNA, 20 nt, Human
aaaagcagccagagauggua

SEQ ID NO: 802179 - RNA, 22 nt, Human
ccagagaagguggagcuugugu

SEQ ID NO: 802180 - RNA, 22 nt, Human
gcugcuggcaucuagggggugg

SEQ ID NO: 802181 - RNA, 22 nt, Human
gaggcaggcagauugcuugagg

SEQ ID NO: 802182 - RNA, 22 nt, Human
uaauuuuuccacguacacuggg

SEQ ID NO: 802183 - RNA, 22 nt, Human
cugggagcggcugucacugguu

SEQ ID NO: 802184 - RNA, 22 nt, Human
ccccaccugugcgucugccgca

SEQ ID NO: 802185 - RNA, 22 nt, Human
gcagggcaaacccagguguuca

SEQ ID NO: 802186 - RNA, 22 nt, Human
gaggaaggaaugcaguguaugc

SEQ ID NO: 802187 - RNA, 23 nt, Human
uccagcagccaagaaggguagaa

SEQ ID NO: 802188 - RNA, 22 nt, Human
cuguccagcugaccagagcagc

SEQ ID NO: 802189 - RNA, 22 nt, Human
acuuccaggguagaggggaaga

SEQ ID NO: 802190 - RNA, 22 nt, Human
uuuguguuguuuuaagccacua

SEQ ID NO: 802191 - RNA, 22 nt, Human
guauuugucuuguuggucucca

SEQ ID NO: 802192 - RNA, 22 nt, Human
agacagcaugauacaugaugcu

SEQ ID NO: 802193 - RNA, 22 nt, Human
aggacaguggacacuagucccu

SEQ ID NO: 802194 - RNA, 22 nt, Human
uggcuuccugcacagugucugc

SEQ ID NO: 802195 - RNA, 22 nt, Human
gcauuaauguaagacccacucc

SEQ ID NO: 802196 - RNA, 22 nt, Human
aggcagauuacuugaggccagg

SEQ ID NO: 802197 - RNA, 22 nt, Human
augcaaacaugaagagaaagag

SEQ ID NO: 802198 - RNA, 20 nt, Human
auuccucagccccagccuca

SEQ ID NO: 802199 - RNA, 22 nt, Human
cuggcuuccugaguccauuacc

SEQ ID NO: 802200 - RNA, 22 nt, Human
aaaauuauggaguaucccaaag

SEQ ID NO: 802201 - RNA, 22 nt, Human
gagagcugucagcguagcaccg

SEQ ID NO: 802202 - RNA, 22 nt, Human
cuaaacaagauacuaaugaggu

SEQ ID NO: 802203 - RNA, 22 nt, Human
ccuggaguugaaggaagguggg

SEQ ID NO: 802204 - RNA, 21 nt, Human
uuugcauuuuacaugugggga

SEQ ID NO: 802205 - RNA, 22 nt, Human
gaacacagcagggauaaccacu

SEQ ID NO: 802206 - RNA, 22 nt, Human
uugcaaaaaccacaauuacuuu

SEQ ID NO: 802207 - RNA, 20 nt, Human
guggaugaucaguguagugg

SEQ ID NO: 802208 - RNA, 20 nt, Human
aaaaucucccagaaacuuau

SEQ ID NO: 802209 - RNA, 22 nt, Human
uacaaagauaguguuagaguaa

SEQ ID NO: 802210 - RNA, 22 nt, Human
aguggcuggagccccaggcugg

SEQ ID NO: 802211 - RNA, 19 nt, Human
ccacuggggcuccacauua

SEQ ID NO: 802212 - RNA, 22 nt, Human
uuuaugcaucucuaggaagggc

SEQ ID NO: 802213 - RNA, 23 nt, Human
gcaguguuugcuucaucuuaucc

SEQ ID NO: 802214 - RNA, 22 nt, Human
cugucagguuggucucagagcu

SEQ ID NO: 802215 - RNA, 22 nt, Human
ucaggagcagcuguaggaaggg

SEQ ID NO: 802216 - RNA, 22 nt, Human
cacuugaaugaaagagacuccu

SEQ ID NO: 802217 - RNA, 22 nt, Human
uuagaucaauacuaaagaaguu

SEQ ID NO: 802218 - RNA, 22 nt, Human
uucuuuccccauggaguucgga

SEQ ID NO: 802219 - RNA, 22 nt, Human
aaaagcaauugcaguucuugcc

SEQ ID NO: 802220 - RNA, 22 nt, Human
uuuaaauuuguguuuagagggu

SEQ ID NO: 802221 - RNA, 22 nt, Human
auaaucugacaaagacuuaagc

SEQ ID NO: 802222 - RNA, 22 nt, Human
uagggcagccacccaggcugcu

SEQ ID NO: 802223 - RNA, 22 nt, Human
ucaggcaggcagagggcaaaug

SEQ ID NO: 802224 - RNA, 22 nt, Human
uaaaaggcaauacuagaugagu

SEQ ID NO: 802225 - RNA, 22 nt, Human
cacacauuaauaucaaaggcuc

SEQ ID NO: 802226 - RNA, 22 nt, Human
agauggcagggguaccuggaag

SEQ ID NO: 802227 - RNA, 22 nt, Human
aucuuucuauuucuaaaaacua

SEQ ID NO: 802228 - RNA, 22 nt, Human
uuugaaauuaagauauugucca

SEQ ID NO: 802229 - RNA, 22 nt, Human
uuaaagaauagugccccuauug

SEQ ID NO: 802230 - RNA, 22 nt, Human
acuggaguauuguuuaauacca

SEQ ID NO: 802231 - RNA, 19 nt, Human
aggcugcccagucucugcc

SEQ ID NO: 802232 - RNA, 19 nt, Human
uggcccagaugguccuggg

SEQ ID NO: 802233 - RNA, 22 nt, Human
uccugggguuuuggccgcagcu

SEQ ID NO: 802234 - RNA, 22 nt, Human
ggccauguuuggcagaaggauu

SEQ ID NO: 802235 - RNA, 22 nt, Human
ucccguugaugacggugcaucc

SEQ ID NO: 802236 - RNA, 22 nt, Human
cccaugcacccucuaagaagga

SEQ ID NO: 802237 - RNA, 22 nt, Human
ugcacugguggugagugaggga

SEQ ID NO: 802238 - RNA, 22 nt, Human
gagcccuuuuccuagauacugu

SEQ ID NO: 802239 - RNA, 22 nt, Human
gucaacuuuaagaugaucuuuu

SEQ ID NO: 802240 - RNA, 23 nt, Human
gcccugcccuuagcacacucaca

SEQ ID NO: 802241 - RNA, 22 nt, Human
gacauuuaugaaggagauaugc

SEQ ID NO: 802242 - RNA, 22 nt, Human
caguccuugauccaauaguggg

SEQ ID NO: 802243 - RNA, 22 nt, Human
aauaacagugccaugaaauuga

SEQ ID NO: 802244 - RNA, 22 nt, Human
cucagacuggggcucccugagu

SEQ ID NO: 802245 - RNA, 22 nt, Human
agcccagcugccugccugcugu

SEQ ID NO: 802246 - RNA, 20 nt, Human
ggccugagcauggcuggcag

SEQ ID NO: 802247 - RNA, 22 nt, Human
auaaaaguucaagagaguacag

SEQ ID NO: 802248 - RNA, 22 nt, Human
cagcaccuuccuuaacuccagg

SEQ ID NO: 802249 - RNA, 22 nt, Human
aagggcaggagaagacggauau

SEQ ID NO: 802250 - RNA, 22 nt, Human
agcaacaggcauaauguguuga

SEQ ID NO: 802251 - RNA, 22 nt, Human
uuucugaacuugguacuggagc

SEQ ID NO: 802252 - RNA, 22 nt, Human
ggccuuggcuccugcagggagu

SEQ ID NO: 802253 - RNA, 19 nt, Human
aggcaugggaagagaaguc

SEQ ID NO: 802254 - RNA, 22 nt, Human
auucccagauuuauauugauag

SEQ ID NO: 802255 - RNA, 22 nt, Human
cauguuuucuaggcuuucacaa

SEQ ID NO: 802256 - RNA, 22 nt, Human
ccagcaggagacuagcaacaua

SEQ ID NO: 802257 - RNA, 22 nt, Human
uuuuacuuaauucuuggucaug

SEQ ID NO: 802258 - RNA, 22 nt, Human
cugggucuggccacaggaagua

SEQ ID NO: 802259 - RNA, 22 nt, Human
auaaguuugucuuuguaaagau

SEQ ID NO: 802260 - RNA, 22 nt, Human
cugccagggaggcugggaaguu

SEQ ID NO: 802261 - RNA, 22 nt, Human
acuuucaagcaagaacacuuug

SEQ ID NO: 802262 - RNA, 22 nt, Human
gcucaaagaauauucagaauga

SEQ ID NO: 802263 - RNA, 22 nt, Human
uagaaagaacuucauguaaaac

SEQ ID NO: 802264 - RNA, 22 nt, Human
cuauuuauguccaaguguuuua

SEQ ID NO: 802265 - RNA, 22 nt, Human
accugccucuaagcagcaggug

SEQ ID NO: 802266 - RNA, 22 nt, Human
cuggcccuucucuugcuuccug

SEQ ID NO: 802267 - RNA, 22 nt, Human
auuguuaaacugaagcauuacu

SEQ ID NO: 802268 - RNA, 22 nt, Human
gagccucguggcggccacugcg

SEQ ID NO: 802269 - RNA, 22 nt, Human
uggcugagccacuuguucagau

SEQ ID NO: 802270 - RNA, 22 nt, Human
aggagaauuaggaacucaagau

SEQ ID NO: 802271 - RNA, 22 nt, Human
gccaggcugcuggcugcugucc

SEQ ID NO: 802272 - RNA, 22 nt, Human
uaauuauugucugaagaguuau

SEQ ID NO: 802273 - RNA, 22 nt, Human
aagcugccacacggugaguacu

SEQ ID NO: 802274 - RNA, 16 nt, Human
gcuggagggagggguu

SEQ ID NO: 802275 - RNA, 22 nt, Human
cagcuugcuaacugguaggggu

SEQ ID NO: 802276 - RNA, 20 nt, Human
agccuggcaaacacccccag

SEQ ID NO: 802277 - RNA, 22 nt, Human
ggagggaaugucuagcauucuu

SEQ ID NO: 802278 - RNA, 19 nt, Human
uucuaaguuuugcuugcug

SEQ ID NO: 802279 - RNA, 22 nt, Human
uuacacagaaacacuguucaga

SEQ ID NO: 802280 - RNA, 22 nt, Human
cccaggguugccugccucugcu

SEQ ID NO: 802281 - RNA, 22 nt, Human
auugacauguaggcuacaagga

SEQ ID NO: 802282 - RNA, 22 nt, Human
uauacaaugaguacauucuggg

SEQ ID NO: 802283 - RNA, 22 nt, Human
ggcaggcauggggucugccauu

SEQ ID NO: 802284 - RNA, 21 nt, Human
acuguuauucccauuuucacc

SEQ ID NO: 802285 - RNA, 22 nt, Human
gagucaggaguccugugugaga

SEQ ID NO: 802286 - RNA, 19 nt, Human
uguuggaggugcugaauua

SEQ ID NO: 802287 - RNA, 23 nt, Human
cuuuucauugccuuagcgcagag

SEQ ID NO: 802288 - RNA, 22 nt, Human
ugugcucuaccucagugucauu

SEQ ID NO: 802289 - RNA, 22 nt, Human
uaacauuagguagacauaagcc

SEQ ID NO: 802290 - RNA, 22 nt, Human
ugccuggaaggcccaugggaag

SEQ ID NO: 802291 - RNA, 22 nt, Human
gccucccuccaccacugcaggu

SEQ ID NO: 802292 - RNA, 22 nt, Human
uuggcucugaaacccaagcucu

SEQ ID NO: 802293 - RNA, 22 nt, Human
uauucacagguucuggggauca

SEQ ID NO: 802294 - RNA, 22 nt, Human
cuggucaggggauggggcucag

SEQ ID NO: 802295 - RNA, 22 nt, Human
aacaugcaugaagaaguuauau

SEQ ID NO: 802296 - RNA, 19 nt, Human
gccaggccuggaccugcag

SEQ ID NO: 802297 - RNA, 22 nt, Human
ggcuggcaagucagugcugaug

SEQ ID NO: 802298 - RNA, 22 nt, Human
cuggguccccucagugacacug

SEQ ID NO: 802299 - RNA, 22 nt, Human
uugucuuagagugaaaacuuua

SEQ ID NO: 802300 - RNA, 22 nt, Human
cuggcaggagcauucacagagg

SEQ ID NO: 802301 - RNA, 18 nt, Human
gcuccuggagucugacuc

SEQ ID NO: 802302 - RNA, 22 nt, Human
acagugacguuuauuugagacg

SEQ ID NO: 802303 - RNA, 22 nt, Human
acaugcuuccaaauuauguugg

SEQ ID NO: 802304 - RNA, 22 nt, Human
cacugcagucuucaucaaccaa

SEQ ID NO: 802305 - RNA, 23 nt, Human
ccuccugggcacaggccugaugg

SEQ ID NO: 802306 - RNA, 21 nt, Human
aggcccagcuuuccucuugcu

SEQ ID NO: 802307 - RNA, 22 nt, Human
ugagcccaggaggcagagguug

SEQ ID NO: 802308 - RNA, 22 nt, Human
ccaguccucagauggucugugc

SEQ ID NO: 802309 - RNA, 18 nt, Human
ggcaggagcaagaauagg

SEQ ID NO: 802310 - RNA, 18 nt, Human
aaauguacuguccauggc

SEQ ID NO: 802311 - RNA, 22 nt, Human
ggcagggguggccuuccuuugg

SEQ ID NO: 802312 - RNA, 18 nt, Human
gacacaggagagaguccc

SEQ ID NO: 802313 - RNA, 22 nt, Human
acccagagcccuuagcacagac

SEQ ID NO: 802314 - RNA, 22 nt, Human
aaauauaguaaaugcauaguuc

SEQ ID NO: 802315 - RNA, 22 nt, Human
aaacuguccucccgagguuucc

SEQ ID NO: 802316 - RNA, 20 nt, Human
agaagucagcucagaaguga

SEQ ID NO: 802317 - RNA, 22 nt, Human
uggcccugaaucaaggccagca

SEQ ID NO: 802318 - RNA, 22 nt, Human
gggcucaggccuggccucucac

SEQ ID NO: 802319 - RNA, 22 nt, Human
agaaaugaagcaggaguuauua

SEQ ID NO: 802320 - RNA, 22 nt, Human
ggcaggcuccagagcccucucc

SEQ ID NO: 802321 - RNA, 22 nt, Human
uggggugggguuacucauucug

SEQ ID NO: 802322 - RNA, 22 nt, Human
aagagaauaucgauagcacucu

SEQ ID NO: 802323 - RNA, 22 nt, Human
uauucaaagugcgaggucaggg

SEQ ID NO: 802324 - RNA, 22 nt, Human
gugggcagaggagagaacauua

SEQ ID NO: 802325 - RNA, 22 nt, Human
gcaggagcccuggcauguucuu

SEQ ID NO: 802326 - RNA, 22 nt, Human
ugcaggcugaggcuggcucaac

SEQ ID NO: 802327 - RNA, 22 nt, Human
uacuuguuaaaauauuagcuau

SEQ ID NO: 802328 - RNA, 22 nt, Human
auuauacauuuuguguagagau

SEQ ID NO: 802329 - RNA, 22 nt, Human
ggauggcagucugcaugagaaa

SEQ ID NO: 802330 - RNA, 23 nt, Human
uuuuccuuuggacaggcuguauu

SEQ ID NO: 802331 - RNA, 22 nt, Human
ugaggccauggaacuagcuugg

SEQ ID NO: 802332 - RNA, 22 nt, Human
cuguaaaaugaaccuagucauc

SEQ ID NO: 802333 - RNA, 22 nt, Human
ggccagcuuauuagcucagagg

SEQ ID NO: 802334 - RNA, 22 nt, Human
uagauuuuaggagauuuuacug

SEQ ID NO: 802335 - RNA, 22 nt, Human
uggcucaguuucugcccagcug

SEQ ID NO: 802336 - RNA, 22 nt, Human
gaaggcccuguuuucccuauuu

SEQ ID NO: 802337 - RNA, 22 nt, Human
uauguuacucacauguucuugc

SEQ ID NO: 802338 - RNA, 22 nt, Human
gcuggggccugaacagucagcu

SEQ ID NO: 802339 - RNA, 22 nt, Human
agagggcugccucagucagcua

SEQ ID NO: 802340 - RNA, 22 nt, Human
ggugcggagacuccaugaggcc

SEQ ID NO: 802341 - RNA, 22 nt, Human
ucucagagaugucaagagucua

SEQ ID NO: 802342 - RNA, 22 nt, Human
ucauaaaucauacuccauuugc

SEQ ID NO: 802343 - RNA, 22 nt, Human
guuuacauauuuuaauugguga

SEQ ID NO: 802344 - RNA, 22 nt, Human
augccaaagcccaaguucauca

SEQ ID NO: 802345 - RNA, 22 nt, Human
uuacaacuugcagaggauguug

SEQ ID NO: 802346 - RNA, 22 nt, Human
ugcuggagacauagcaggcagc

SEQ ID NO: 802347 - RNA, 22 nt, Human
ucacauaaauuauacaauuuca

SEQ ID NO: 802348 - RNA, 22 nt, Human
uucauguuucaauuguuaaugu

SEQ ID NO: 802349 - RNA, 16 nt, Human
gggcaggaaucagggu

SEQ ID NO: 802350 - RNA, 22 nt, Human
cuccuggugacucccagauaaa

SEQ ID NO: 802351 - RNA, 22 nt, Human
uuaaauauuauguugucugcaa

SEQ ID NO: 802352 - RNA, 22 nt, Human
ggaggcccagaaggaagcccag

SEQ ID NO: 802353 - RNA, 22 nt, Human
accacugcccauggugaaaacu

SEQ ID NO: 802354 - RNA, 22 nt, Human
cagaggcaggaagaugggcagu

SEQ ID NO: 802355 - RNA, 22 nt, Human
uagaggcacagucuauguagag

SEQ ID NO: 802356 - RNA, 22 nt, Human
auguuuacagaggaagugccuc

SEQ ID NO: 802357 - RNA, 22 nt, Human
gcugccccagcugggggcugga

SEQ ID NO: 802358 - RNA, 22 nt, Human
augaaaauguacauguguauaa

SEQ ID NO: 802359 - RNA, 19 nt, Human
uacuuauuagaaauauggg

SEQ ID NO: 802360 - RNA, 22 nt, Human
ugagggagcacacacugaagug

SEQ ID NO: 802361 - RNA, 22 nt, Human
cagcucagucuugaagcacugg

SEQ ID NO: 802362 - RNA, 22 nt, Human
cugcacugagacccucuuugcu

SEQ ID NO: 802363 - RNA, 22 nt, Human
caucaggagaccagguccugcu

SEQ ID NO: 802364 - RNA, 22 nt, Human
ggaaacaugccugcuggacagu

SEQ ID NO: 802365 - RNA, 22 nt, Human
gaggagcucugcuccauccuuc

SEQ ID NO: 802366 - RNA, 22 nt, Human
gcuggcugaguucugucgucug

SEQ ID NO: 802367 - RNA, 22 nt, Human
aggcaggagugacccugacagg

SEQ ID NO: 802368 - RNA, 20 nt, Human
aacacagauaccaaagguug

SEQ ID NO: 802369 - RNA, 22 nt, Human
aggccucaguuugucaucugua

SEQ ID NO: 802370 - RNA, 22 nt, Human
acuguucugcauguaccugagg

SEQ ID NO: 802371 - RNA, 23 nt, Human
gcaggugguucgaacagaaguuu

SEQ ID NO: 802372 - RNA, 22 nt, Human
uaucaucacuguaauccguuga

SEQ ID NO: 802373 - RNA, 20 nt, Human
aggcacaguuccuaguuggg

SEQ ID NO: 802374 - RNA, 22 nt, Human
uucuuuccacagaggggaugau

SEQ ID NO: 802375 - RNA, 22 nt, Human
cacaaaauaucaagcacuuuua

SEQ ID NO: 802376 - RNA, 22 nt, Human
agcagcuuuaagucacugguua

SEQ ID NO: 802377 - RNA, 22 nt, Human
gggcuggcucugucuagaaagg

SEQ ID NO: 802378 - RNA, 22 nt, Human
uggcccaguauguauaaucuua

SEQ ID NO: 802379 - RNA, 22 nt, Human
cacagaggagugcacacucucu

SEQ ID NO: 802380 - RNA, 22 nt, Human
uaaggcaggcuuucauccagag

SEQ ID NO: 802381 - RNA, 22 nt, Human
uuuuuuauaucaacugaagucu

SEQ ID NO: 802382 - RNA, 23 nt, Human
uccaggagcaugcuggcuggcga

SEQ ID NO: 802383 - RNA, 22 nt, Human
guuuuuaucuaauagcaguuau

SEQ ID NO: 802384 - RNA, 22 nt, Human
gccaggcucagcagucaaccug

SEQ ID NO: 802385 - RNA, 22 nt, Human
caguguaagcucuagacuagaa

SEQ ID NO: 802386 - RNA, 21 nt, Human
uccugcugagaaacagauggu

SEQ ID NO: 802387 - RNA, 22 nt, Human
uugagcaaugucacugaggcuu

SEQ ID NO: 802388 - RNA, 17 nt, Human
cccugggugaguucuca

SEQ ID NO: 802389 - RNA, 21 nt, Human
ccugagggugguugugaagau

SEQ ID NO: 802390 - RNA, 22 nt, Human
ugugauuagcugaauacacugg

SEQ ID NO: 802391 - RNA, 22 nt, Human
ccucugccugcacaucauccug

SEQ ID NO: 802392 - RNA, 22 nt, Human
uuuaugaacuacagauauaacu

SEQ ID NO: 802393 - RNA, 22 nt, Human
ccugcuggaccucaacacauuu

SEQ ID NO: 802394 - RNA, 22 nt, Human
ucagucauuguccuuaaaacac

SEQ ID NO: 802395 - RNA, 22 nt, Human
ccucaggcaggaaacugucccg

SEQ ID NO: 802396 - RNA, 22 nt, Human
ucaggagcucuucccuggugug

SEQ ID NO: 802397 - RNA, 19 nt, Human
cucugccucccuccugggu

SEQ ID NO: 802398 - RNA, 22 nt, Human
aggaggcugcaacccugaggcc

SEQ ID NO: 802399 - RNA, 22 nt, Human
ccagcccuguuuaugugucacu

SEQ ID NO: 802400 - RNA, 22 nt, Human
caccaggcuggagugcagaggu

SEQ ID NO: 802401 - RNA, 22 nt, Human
uccaggagauucauuaggucau

SEQ ID NO: 802402 - RNA, 22 nt, Human
acuggcagcagcagcccuuggg

SEQ ID NO: 802403 - RNA, 22 nt, Human
ccaggacaauucgucacuuucu

SEQ ID NO: 802404 - RNA, 22 nt, Human
gaaaauuauugaaaauggcucu

SEQ ID NO: 802405 - RNA, 22 nt, Human
agacaucauguuacagauuaag

SEQ ID NO: 802406 - RNA, 22 nt, Human
agcaggcuaagggaccuguuua

SEQ ID NO: 802407 - RNA, 22 nt, Human
ccuuggcccuagccucaggcaa

SEQ ID NO: 802408 - RNA, 22 nt, Human
aacccuggggcugcucugccug

SEQ ID NO: 802409 - RNA, 22 nt, Human
acaguguucacuuaacaaugga

SEQ ID NO: 802410 - RNA, 22 nt, Human
uggcccuguggcuucagaacag

SEQ ID NO: 802411 - RNA, 22 nt, Human
gagagggcaagguagaugcuac

SEQ ID NO: 802412 - RNA, 22 nt, Human
acacaucuuagacugaaauaug

SEQ ID NO: 802413 - RNA, 22 nt, Human
uuuguaaaauuagggaauucaa

SEQ ID NO: 802414 - RNA, 22 nt, Human
gaggcucccucaacucugggug

SEQ ID NO: 802415 - RNA, 22 nt, Human
uugagcaagccugcggcgggaa

SEQ ID NO: 802416 - RNA, 22 nt, Human
guccuggcccacuggcaggcug

SEQ ID NO: 802417 - RNA, 20 nt, Human
ggcaggaccccaguggcauc

SEQ ID NO: 802418 - RNA, 23 nt, Human
agccacagccagagcuaucucca

SEQ ID NO: 802419 - RNA, 22 nt, Human
cuccagagagaaaggaggccgc

SEQ ID NO: 802420 - RNA, 18 nt, Human
ugagaaccauguucauuc

SEQ ID NO: 802421 - RNA, 22 nt, Human
uagaaacauguucuguucuguu

SEQ ID NO: 802422 - RNA, 19 nt, Human
acauguuuugcagaacagc

SEQ ID NO: 802423 - RNA, 22 nt, Human
ccucugcccuuuuccuguauca

SEQ ID NO: 802424 - RNA, 22 nt, Human
uucuuuagcaacuuggauuuag

SEQ ID NO: 802425 - RNA, 20 nt, Human
aaacuugauggcauagaaua

SEQ ID NO: 802426 - RNA, 21 nt, Human
agcugcuuucagcuccuagag

SEQ ID NO: 802427 - RNA, 22 nt, Human
ggauggagguucucagaugcuc

SEQ ID NO: 802428 - RNA, 22 nt, Human
uaucacauuuggagauuuauga

SEQ ID NO: 802429 - RNA, 22 nt, Human
gcucaggcucucccaggggaau

SEQ ID NO: 802430 - RNA, 22 nt, Human
uguuuacagaaggcagacuucc

SEQ ID NO: 802431 - RNA, 22 nt, Human
agcugagcacauucaaacaggu

SEQ ID NO: 802432 - RNA, 22 nt, Human
cucagacuagccuguaccgaca

SEQ ID NO: 802433 - RNA, 22 nt, Human
gcuggagguagggagguccugu

SEQ ID NO: 802434 - RNA, 22 nt, Human
auguuuuaugcuucagaugagg

SEQ ID NO: 802435 - RNA, 22 nt, Human
uuguuuuaaccuaguguuuaug

SEQ ID NO: 802436 - RNA, 22 nt, Human
cugccuagcgccaucugccucu

SEQ ID NO: 802437 - RNA, 18 nt, Human
uacaggaagggguucucg

SEQ ID NO: 802438 - RNA, 22 nt, Human
caccccugggcugggcacacag

SEQ ID NO: 802439 - RNA, 22 nt, Human
ucuuccuugccuugcuucauca

SEQ ID NO: 802440 - RNA, 21 nt, Human
gaggccacuaauaggggcaga

SEQ ID NO: 802441 - RNA, 20 nt, Human
ugucaauagcacugaggcug

SEQ ID NO: 802442 - RNA, 22 nt, Human
uucucucugugucauuauggac

SEQ ID NO: 802443 - RNA, 21 nt, Human
ucaggcugucugcugguucca

SEQ ID NO: 802444 - RNA, 22 nt, Human
ugguggcuucugaggauggcga

SEQ ID NO: 802445 - RNA, 22 nt, Human
ucauuuacagacugugugggug

SEQ ID NO: 802446 - RNA, 22 nt, Human
aggugggcaccaggcuuguggu

SEQ ID NO: 802447 - RNA, 22 nt, Human
aacucauuugcauuuuuccugu

SEQ ID NO: 802448 - RNA, 22 nt, Human
uagauuaacaguuuuguugaag

SEQ ID NO: 802449 - RNA, 19 nt, Human
ggcuggcaagugacagugu

SEQ ID NO: 802450 - RNA, 22 nt, Human
agucagcuuggcuccucccaug

SEQ ID NO: 802451 - RNA, 22 nt, Human
gccaagcuguuuuucagagacg

SEQ ID NO: 802452 - RNA, 22 nt, Human
aggaaggggagaaguuaaagcu

SEQ ID NO: 802453 - RNA, 22 nt, Human
aaguuuguagcuggaugucugu

SEQ ID NO: 802454 - RNA, 22 nt, Human
agcccugggcaccugugagggg

SEQ ID NO: 802455 - RNA, 22 nt, Human
cucaggagagucuuauaucucc

SEQ ID NO: 802456 - RNA, 22 nt, Human
aaaaguauuuugagcacuuuau

SEQ ID NO: 802457 - RNA, 20 nt, Human
caggacagcgcaaucggagg

SEQ ID NO: 802458 - RNA, 22 nt, Human
ucuucacaggagccugccugcc

SEQ ID NO: 802459 - RNA, 22 nt, Human
gaaauguuccugaucccugauu

SEQ ID NO: 802460 - RNA, 22 nt, Human
cucagagaaaugucacaacaau

SEQ ID NO: 802461 - RNA, 22 nt, Human
ggccugaggccaccagcagccc

SEQ ID NO: 802462 - RNA, 22 nt, Human
agggucucugggaguagggcac

SEQ ID NO: 802463 - RNA, 22 nt, Human
aggcaggcccucuggaaaggua

SEQ ID NO: 802464 - RNA, 22 nt, Human
acucugcuguuuacucucuaua

SEQ ID NO: 802465 - RNA, 22 nt, Human
gcucagaguuaauuggaugggu

SEQ ID NO: 802466 - RNA, 22 nt, Human
cuaaaugucagaguagcuugca

SEQ ID NO: 802467 - RNA, 22 nt, Human
uuugagaaaaagugaugaugau

SEQ ID NO: 802468 - RNA, 22 nt, Human
uaaaauuugucccugaguguug

SEQ ID NO: 802469 - RNA, 22 nt, Human
ccaaaauauuagugcuuaagua

SEQ ID NO: 802470 - RNA, 22 nt, Human
uggaggaaguugcuggaaguca

SEQ ID NO: 802471 - RNA, 22 nt, Human
gggcaggcugagcaugucaccu

SEQ ID NO: 802472 - RNA, 22 nt, Human
uucuaaguccuaccugaaagca

SEQ ID NO: 802473 - RNA, 22 nt, Human
aacuucuugguccugagcuguu

SEQ ID NO: 802474 - RNA, 23 nt, Human
gccucagagaaacagcugcacac

SEQ ID NO: 802475 - RNA, 22 nt, Human
aaaaugagcauauugauccuuu

SEQ ID NO: 802476 - RNA, 22 nt, Human
aggcuaggguaacagauguggc

SEQ ID NO: 802477 - RNA, 22 nt, Human
accaggcuggagugcaguggcg

SEQ ID NO: 802478 - RNA, 22 nt, Human
gcugcagcccugcggaucacuu

SEQ ID NO: 802479 - RNA, 22 nt, Human
auuuaagacugacuucaccagu

SEQ ID NO: 802480 - RNA, 22 nt, Human
cugagccaccggcagggacauc

SEQ ID NO: 802481 - RNA, 21 nt, Human
gcagagccggggcgagaaggc

SEQ ID NO: 802482 - RNA, 22 nt, Human
ucuuccuuguaagggcuuuaga

SEQ ID NO: 802483 - RNA, 22 nt, Human
aaaugucagaaaacauggagug

SEQ ID NO: 802484 - RNA, 21 nt, Human
uauacagaggggaacaggaga

SEQ ID NO: 802485 - RNA, 22 nt, Human
uuuucauguuccuuguuaagug

SEQ ID NO: 802486 - RNA, 22 nt, Human
gaagagaagcaucaauagguaa

SEQ ID NO: 802487 - RNA, 22 nt, Human
aguuucaauucuuuucacaaag

SEQ ID NO: 802488 - RNA, 22 nt, Human
aggagccaaauuacuagcucug

SEQ ID NO: 802489 - RNA, 22 nt, Human
ucugcaggcauuuuugguuguc

SEQ ID NO: 802490 - RNA, 22 nt, Human
cagcuugggaguuugguuuuau

SEQ ID NO: 802491 - RNA, 22 nt, Human
uccagccuccuauuuacccuaa

SEQ ID NO: 802492 - RNA, 22 nt, Human
ggaaggcucuguuccuugacuu

SEQ ID NO: 802493 - RNA, 22 nt, Human
uacucacauucuguuucuugcu

SEQ ID NO: 802494 - RNA, 22 nt, Human
gauaacaugguuaguguuuuua

SEQ ID NO: 802495 - RNA, 22 nt, Human
gcuggcuggaguaaggagggag

SEQ ID NO: 802496 - RNA, 22 nt, Human
ccaaggcagaagauggcucuug

SEQ ID NO: 802497 - RNA, 22 nt, Human
gagcaauggaagauagauaaca

SEQ ID NO: 802498 - RNA, 22 nt, Human
agguaggggguuugggaacugc

SEQ ID NO: 802499 - RNA, 22 nt, Human
ucuucuuccuccacagggccca

SEQ ID NO: 802500 - RNA, 22 nt, Human
gcccuuucuucuucuggacugg

SEQ ID NO: 802501 - RNA, 22 nt, Human
ccuggcagcuccguggccuucc

SEQ ID NO: 802502 - RNA, 22 nt, Human
agccaaggucgccccagggcaa

SEQ ID NO: 802503 - RNA, 22 nt, Human
gacaagcaggcuccugaagaaa

SEQ ID NO: 802504 - RNA, 22 nt, Human
aaagcagcugcucuggccuuga

SEQ ID NO: 802505 - RNA, 22 nt, Human
aguacaauuauauuuagauggu

SEQ ID NO: 802506 - RNA, 22 nt, Human
ccugucucccuggcauggcuca

SEQ ID NO: 802507 - RNA, 22 nt, Human
aaacacuucuuaggucuuaagu

SEQ ID NO: 802508 - RNA, 22 nt, Human
gcuccuggugcaaaguuucuuc

SEQ ID NO: 802509 - RNA, 22 nt, Human
ucccaagaugacacaguggacg

SEQ ID NO: 802510 - RNA, 22 nt, Human
gacuucuguuaacuuguaagag

SEQ ID NO: 802511 - RNA, 22 nt, Human
ugagaaggugaaaguguggaga

SEQ ID NO: 802512 - RNA, 23 nt, Human
ugucauugugacuacagaaccag

SEQ ID NO: 802513 - RNA, 22 nt, Human
ccggcaggcggaguugcaguga

SEQ ID NO: 802514 - RNA, 23 nt, Human
auguaaacuucagagucauugcc

SEQ ID NO: 802515 - RNA, 22 nt, Human
agacuggguuugagacuuagca

SEQ ID NO: 802516 - RNA, 22 nt, Human
cagucucugggaaagaggacag

SEQ ID NO: 802517 - RNA, 22 nt, Human
ccacuguauaagcaaaaugaaa

SEQ ID NO: 802518 - RNA, 22 nt, Human
auaaccaugauuaaucuaagaa

SEQ ID NO: 802519 - RNA, 22 nt, Human
augaaacaugagaaauggagag

SEQ ID NO: 802520 - RNA, 22 nt, Human
gcaaagugaaauggggcagaga

SEQ ID NO: 802521 - RNA, 22 nt, Human
aaugaacacagcccucuacuuu

SEQ ID NO: 802522 - RNA, 22 nt, Human
acaauguaggauauguacuugu

SEQ ID NO: 802523 - RNA, 22 nt, Human
caggcagcugacugucagauau

SEQ ID NO: 802524 - RNA, 22 nt, Human
acagugaaugagaauggagaaa

SEQ ID NO: 802525 - RNA, 22 nt, Human
gacaguaacuacaguucugugg

SEQ ID NO: 802526 - RNA, 22 nt, Human
gcagagaagaugcccaggcuuc

SEQ ID NO: 802527 - RNA, 19 nt, Human
uaaaaacugaaggaagcag

SEQ ID NO: 802528 - RNA, 22 nt, Human
aacuuuaaggcuauaaauuaug

SEQ ID NO: 802529 - RNA, 22 nt, Human
acagcuggaggucugugagcac

SEQ ID NO: 802530 - RNA, 22 nt, Human
acaguguagcaugguagcaaug

SEQ ID NO: 802531 - RNA, 22 nt, Human
cuggcaugccuugggugccucu

SEQ ID NO: 802532 - RNA, 22 nt, Human
gaacaacuuugaaacaugaaga

SEQ ID NO: 802533 - RNA, 22 nt, Human
guggcagugaggcaggagcagu

SEQ ID NO: 802534 - RNA, 22 nt, Human
aguucuuuugugaacauaugcu

SEQ ID NO: 802535 - RNA, 22 nt, Human
gaacuuguuguaagaaaauaug

SEQ ID NO: 802536 - RNA, 22 nt, Human
ccagaggacuugggggcugaau

SEQ ID NO: 802537 - RNA, 20 nt, Human
ccuggccaaugagauaggaa

SEQ ID NO: 802538 - RNA, 22 nt, Human
cuggcccagagcucuggccuuu

SEQ ID NO: 802539 - RNA, 22 nt, Human
guacuuuagaguaaaauagacc

SEQ ID NO: 802540 - RNA, 21 nt, Human
aggcagcaggauccagggaca

SEQ ID NO: 802541 - RNA, 22 nt, Human
uuucauugaacuaaagaaucug

SEQ ID NO: 802542 - RNA, 22 nt, Human
gcuggcugacagagauuuaaaa

SEQ ID NO: 802543 - RNA, 22 nt, Human
uuagcaaaccuggacuacagau

SEQ ID NO: 802544 - RNA, 19 nt, Human
ucagggaaguucaaagcuc

SEQ ID NO: 802545 - RNA, 22 nt, Human
acauuuacuuaucaaaagucag

SEQ ID NO: 802546 - RNA, 22 nt, Human
gagcuuaggccagggacaggga

SEQ ID NO: 802547 - RNA, 22 nt, Human
cugagccaaggggacagugaca

SEQ ID NO: 802548 - RNA, 22 nt, Human
guuuauaaggcccaauauuucu

SEQ ID NO: 802549 - RNA, 22 nt, Human
uuuccucuuugugacacagcug

SEQ ID NO: 802550 - RNA, 22 nt, Human
cugaggugggaguuuuucucau

SEQ ID NO: 802551 - RNA, 21 nt, Human
gcccagcaaggugagaaggcc

SEQ ID NO: 802552 - RNA, 22 nt, Human
gcacccagggcaggaagugagg

SEQ ID NO: 802553 - RNA, 22 nt, Human
agcaggguccugaggugaguca

SEQ ID NO: 802554 - RNA, 22 nt, Human
uuccucagcacaaagccaagau

SEQ ID NO: 802555 - RNA, 19 nt, Human
ucagggaguuuacagcaug

SEQ ID NO: 802556 - RNA, 22 nt, Human
cagaauggcuuuuauggcucag

SEQ ID NO: 802557 - RNA, 22 nt, Human
gggcagcucugcccaucagagg

SEQ ID NO: 802558 - RNA, 22 nt, Human
gaaauacagaaagggcugaaug

SEQ ID NO: 802559 - RNA, 22 nt, Human
ugucauuuggacuuugguauua

SEQ ID NO: 802560 - RNA, 22 nt, Human
gcaggcugugguauguugggca

SEQ ID NO: 802561 - RNA, 22 nt, Human
caugucaacaggcccagaaaau

SEQ ID NO: 802562 - RNA, 22 nt, Human
acacauuauaggcaaucaaaag

SEQ ID NO: 802563 - RNA, 22 nt, Human
ugguuuuauuuauguugaguca

SEQ ID NO: 802564 - RNA, 22 nt, Human
caggcccaugagggcagccaca

SEQ ID NO: 802565 - RNA, 22 nt, Human
uucuccuuauucauaguugucu

SEQ ID NO: 802566 - RNA, 18 nt, Human
gagcugagaagaggaugc

SEQ ID NO: 802567 - RNA, 17 nt, Human
acccucaaucuccugca

SEQ ID NO: 802568 - RNA, 22 nt, Human
uucuguuuuagaaauaaguagu

SEQ ID NO: 802569 - RNA, 22 nt, Human
cagaggccuggcuuggacaccu

SEQ ID NO: 802570 - RNA, 22 nt, Human
ucuuccucuucugcugagaagu

SEQ ID NO: 802571 - RNA, 22 nt, Human
agcugccucagucacucauggc

SEQ ID NO: 802572 - RNA, 22 nt, Human
gcaggcugcugagauccuuagg

SEQ ID NO: 802573 - RNA, 22 nt, Human
cugcugugugcuuacuuggguu

SEQ ID NO: 802574 - RNA, 22 nt, Human
ccaguggguaggccauggugag

SEQ ID NO: 802575 - RNA, 22 nt, Human
uguuuacaaggagaauuugagg

SEQ ID NO: 802576 - RNA, 22 nt, Human
ucuuuggaaugcuagcauucua

SEQ ID NO: 802577 - RNA, 22 nt, Human
aaagauuucagaagccugugcc

SEQ ID NO: 802578 - RNA, 22 nt, Human
ccagaggucuccugcacgggau

SEQ ID NO: 802579 - RNA, 22 nt, Human
uugaaugaauaguugcuagaag

SEQ ID NO: 802580 - RNA, 22 nt, Human
ucuuuggcaucagggccagcua

SEQ ID NO: 802581 - RNA, 22 nt, Human
ccuuuugcucucccauccagaa

SEQ ID NO: 802582 - RNA, 22 nt, Human
uaggcagaaaggaaggcaaguu

SEQ ID NO: 802583 - RNA, 22 nt, Human
ugcaggcugggaagagggacaa

SEQ ID NO: 802584 - RNA, 22 nt, Human
guucaguguuuacaugauuguu

SEQ ID NO: 802585 - RNA, 21 nt, Human
ucugggggugagccuagaaau

SEQ ID NO: 802586 - RNA, 22 nt, Human
caggaaauaucucaacacuuua

SEQ ID NO: 802587 - RNA, 22 nt, Human
gucccagcuucccacuagcagc

SEQ ID NO: 802588 - RNA, 22 nt, Human
aagauucuuugaggauuuuacu

SEQ ID NO: 802589 - RNA, 22 nt, Human
gggcggggggagcuggaaugaa

SEQ ID NO: 802590 - RNA, 22 nt, Human
ugccaaggguaugggcaagaua

SEQ ID NO: 802591 - RNA, 22 nt, Human
uucaaguuuguauuucuguauu

SEQ ID NO: 802592 - RNA, 22 nt, Human
uacuuugauaagguucuucuau

SEQ ID NO: 802593 - RNA, 22 nt, Human
uuacauucuuaucucaguuauu

SEQ ID NO: 802594 - RNA, 22 nt, Human
aaguucuagagguugauuuggu

SEQ ID NO: 802595 - RNA, 22 nt, Human
uguaucuuucuguacuuuuaug

SEQ ID NO: 802596 - RNA, 22 nt, Human
agugggaggaaguggugauauu

SEQ ID NO: 802597 - RNA, 22 nt, Human
agccacagagcaggagaccuuu

SEQ ID NO: 802598 - RNA, 22 nt, Human
ccagcucagggucacauggcac

SEQ ID NO: 802599 - RNA, 22 nt, Human
gccugccugaaggcuguaccag

SEQ ID NO: 802600 - RNA, 22 nt, Human
uccuccaggauaaaauguguug

SEQ ID NO: 802601 - RNA, 22 nt, Human
cugggguggugcaggccucaug

SEQ ID NO: 802602 - RNA, 22 nt, Human
agugucaaugccaacaguauau

SEQ ID NO: 802603 - RNA, 23 nt, Human
uccagcagagccuuccaggaggg

SEQ ID NO: 802604 - RNA, 22 nt, Human
cagacacacacccuggccuagc

SEQ ID NO: 802605 - RNA, 22 nt, Human
uucucuucuguucagugcccaa

SEQ ID NO: 802606 - RNA, 22 nt, Human
gggacgagccccaggcuggagg

SEQ ID NO: 802607 - RNA, 22 nt, Human
auaguuuuaaaaccucaggaag

SEQ ID NO: 802608 - RNA, 22 nt, Human
aauuuauuauauccuaggggaa

SEQ ID NO: 802609 - RNA, 22 nt, Human
auucuucauuuacuguuacuug

SEQ ID NO: 802610 - RNA, 22 nt, Human
ugcuggagaacugcucuguguu

SEQ ID NO: 802611 - RNA, 22 nt, Human
aauagacaagcacccugguaaa

SEQ ID NO: 802612 - RNA, 16 nt, Human
ccagguggggcuguga

SEQ ID NO: 802613 - RNA, 19 nt, Human
cugaaaaacauucucagga

SEQ ID NO: 802614 - RNA, 22 nt, Human
uuacacauugcagaucaaaaug

SEQ ID NO: 802615 - RNA, 22 nt, Human
uuauguaaguggagucauauag

SEQ ID NO: 802616 - RNA, 22 nt, Human
acugcagccuuugggcucauaa

SEQ ID NO: 802617 - RNA, 22 nt, Human
ucagaauuuaaaauguguagau

SEQ ID NO: 802618 - RNA, 19 nt, Human
uggcuuccaucucucucau

SEQ ID NO: 802619 - RNA, 22 nt, Human
cagugaaaucacaacuuuaguu

SEQ ID NO: 802620 - RNA, 22 nt, Human
gaugaacauuuaaagccucuug

SEQ ID NO: 802621 - RNA, 22 nt, Human
aauuuacaguugcugaugguac

SEQ ID NO: 802622 - RNA, 22 nt, Human
ugcccagccaauuuguuauguu

SEQ ID NO: 802623 - RNA, 22 nt, Human
agcagagccugggcuaggggug

SEQ ID NO: 802624 - RNA, 22 nt, Human
guguuuccaguucagaaagcaa

SEQ ID NO: 802625 - RNA, 22 nt, Human
ggcaauguuucgaugggagcug

SEQ ID NO: 802626 - RNA, 23 nt, Human
cucaacccuaguaagggaguagg

SEQ ID NO: 802627 - RNA, 22 nt, Human
agauuauuuccagacuaaugaa

SEQ ID NO: 802628 - RNA, 22 nt, Human
cccugccugugggcaucaacau

SEQ ID NO: 802629 - RNA, 22 nt, Human
accggguaggugucaacucuga

SEQ ID NO: 802630 - RNA, 22 nt, Human
aacagcgacguccuccccaaca

SEQ ID NO: 802631 - RNA, 22 nt, Human
uucuuguuuugcccaaguugua

SEQ ID NO: 802632 - RNA, 22 nt, Human
uggccagugugugcugccggcu

SEQ ID NO: 802633 - RNA, 22 nt, Human
aaacauugagcacuugcuauuu

SEQ ID NO: 802634 - RNA, 22 nt, Human
ucaguguuggucaagaaucagu

SEQ ID NO: 802635 - RNA, 22 nt, Human
caaguacaaaaugauauuuagu

SEQ ID NO: 802636 - RNA, 19 nt, Human
uuugggaagcccagagugu

SEQ ID NO: 802637 - RNA, 22 nt, Human
ugauuuacuucuggauaaaucc

SEQ ID NO: 802638 - RNA, 22 nt, Human
auuucuucaggucagaaauaga

SEQ ID NO: 802639 - RNA, 22 nt, Human
ucccugaaauuugaagaggaau

SEQ ID NO: 802640 - RNA, 22 nt, Human
ggggccuauuuguucaacuucc

SEQ ID NO: 802641 - RNA, 22 nt, Human
acaaaguauuuuuagguuugua

SEQ ID NO: 802642 - RNA, 22 nt, Human
uguacaaagguacuuugauguu

SEQ ID NO: 802643 - RNA, 22 nt, Human
uguaaacucaguauguuuuacu

SEQ ID NO: 802644 - RNA, 22 nt, Human
uuauuucauugauuucuaagac

SEQ ID NO: 802645 - RNA, 22 nt, Human
gucuuuggaaagacaaaguuca

SEQ ID NO: 802646 - RNA, 22 nt, Human
gauuguaauucuacuuuccgcu

SEQ ID NO: 802647 - RNA, 22 nt, Human
ugcaaauuuaaugaaacuaugu

SEQ ID NO: 802648 - RNA, 22 nt, Human
ucaagcagagucaaaaguacca

SEQ ID NO: 802649 - RNA, 22 nt, Human
uacaaaguuuucuuggauugag

SEQ ID NO: 802650 - RNA, 22 nt, Human
ggcuucccuaaaccuuuccacu

SEQ ID NO: 802651 - RNA, 22 nt, Human
acauacuuauguguauaugugu

SEQ ID NO: 802652 - RNA, 22 nt, Human
guauuuuuagguaaggaaagua

SEQ ID NO: 802653 - RNA, 22 nt, Human
augccaaagauguuugauagaa

SEQ ID NO: 802654 - RNA, 18 nt, Human
ugaaauugcauccaugag

SEQ ID NO: 802655 - RNA, 22 nt, Human
aguggaguugaguugauggauu

SEQ ID NO: 802656 - RNA, 22 nt, Human
uuuguuuucuguaggccuuucc

SEQ ID NO: 802657 - RNA, 22 nt, Human
uuucacauaaauauuaugccua

SEQ ID NO: 802658 - RNA, 22 nt, Human
ucuacagaaacuggcuacucuc

SEQ ID NO: 802659 - RNA, 22 nt, Human
gcagggugccgacuucagggau

SEQ ID NO: 802660 - RNA, 18 nt, Human
gauauauaggaggaaagu

SEQ ID NO: 802661 - RNA, 22 nt, Human
uugauguugcucuuaacaguau

SEQ ID NO: 802662 - RNA, 22 nt, Human
gcccgcagagaucuuuaacaaa

SEQ ID NO: 802663 - RNA, 22 nt, Human
gaguccaggcuguugcucaucu

SEQ ID NO: 802664 - RNA, 22 nt, Human
gaaacuguuucuggcuuuggug

SEQ ID NO: 802665 - RNA, 22 nt, Human
auaauaaaccaggaugggucug

SEQ ID NO: 802666 - RNA, 22 nt, Human
gacacagggacgugcucugccu

SEQ ID NO: 802667 - RNA, 22 nt, Human
aagaaauauugggccuuauaaa

SEQ ID NO: 802668 - RNA, 22 nt, Human
agggcuggagccacagcuggga

SEQ ID NO: 802669 - RNA, 22 nt, Human
ucccagagcccaaguuggagag

SEQ ID NO: 802670 - RNA, 22 nt, Human
cugcacugagcaucuaaccuua

SEQ ID NO: 802671 - RNA, 22 nt, Human
ggcaggcacugugcuaggcgcu

SEQ ID NO: 802672 - RNA, 22 nt, Human
ugcaggcagcuaaaccauguaa

SEQ ID NO: 802673 - RNA, 22 nt, Human
cuuguuuuaaacuguuguggcu

SEQ ID NO: 802674 - RNA, 20 nt, Human
guacauuuucaggaggggau

SEQ ID NO: 802675 - RNA, 22 nt, Human
acagggcagagggcaguuggua

SEQ ID NO: 802676 - RNA, 22 nt, Human
cuggccauguugccucugagac

SEQ ID NO: 802677 - RNA, 22 nt, Human
uuccuagggcagagccgcuggg

SEQ ID NO: 802678 - RNA, 17 nt, Human
uuguuucuucucugugg

SEQ ID NO: 802679 - RNA, 22 nt, Human
aggcgugguugaggcgagcaua

SEQ ID NO: 802680 - RNA, 22 nt, Human
gugcugcagggucagcacccuc

SEQ ID NO: 802681 - RNA, 22 nt, Human
cagcugcaugucuguggugguc

SEQ ID NO: 802682 - RNA, 22 nt, Human
cccuccagggagccaugcuggg

SEQ ID NO: 802683 - RNA, 17 nt, Human
acccaggcucuaucuug

SEQ ID NO: 802684 - RNA, 22 nt, Human
gcucagcugagcgaaggacaug

SEQ ID NO: 802685 - RNA, 21 nt, Human
ggaacauuguuaauagucucu

SEQ ID NO: 802686 - RNA, 21 nt, Human
uccaggaaugucuguucaucu

SEQ ID NO: 802687 - RNA, 22 nt, Human
uuugaacaggaguaucuauagu

SEQ ID NO: 802688 - RNA, 22 nt, Human
uuucaggacucaaaacgauaau

SEQ ID NO: 802689 - RNA, 23 nt, Human
uucucuuuagauuuacauuacuc

SEQ ID NO: 802690 - RNA, 22 nt, Human
ucaagucuugaugagacaaacc

SEQ ID NO: 802691 - RNA, 22 nt, Human
aaucacaaauuuagacagagcu

SEQ ID NO: 802692 - RNA, 22 nt, Human
uugcuucuuagauauuccucuc

SEQ ID NO: 802693 - RNA, 22 nt, Human
gagcugagggucuaggaggguu

SEQ ID NO: 802694 - RNA, 22 nt, Human
cauaccuuucucaagcacaugu

SEQ ID NO: 802695 - RNA, 22 nt, Human
uaccaugcuugagauacaguga

SEQ ID NO: 802696 - RNA, 23 nt, Human
uggcucugugucacauacaggau

SEQ ID NO: 802697 - RNA, 22 nt, Human
cagaggaccuguguggccagag

SEQ ID NO: 802698 - RNA, 22 nt, Human
cagccagguaugggcgugcggg

SEQ ID NO: 802699 - RNA, 21 nt, Human
auuauuauuucuguguccagc

SEQ ID NO: 802700 - RNA, 22 nt, Human
cugguaggggugacuguuaucg

SEQ ID NO: 802701 - RNA, 22 nt, Human
gaggggggcgcccugcagugca

SEQ ID NO: 802702 - RNA, 22 nt, Human
cagcagcaugaauucgagccac

SEQ ID NO: 802703 - RNA, 22 nt, Human
uggcuucucccuacaacaugcc

SEQ ID NO: 802704 - RNA, 22 nt, Human
uagaaauguuagauguauugag

SEQ ID NO: 802705 - RNA, 22 nt, Human
gcuggcucuucaguggagauag

SEQ ID NO: 802706 - RNA, 22 nt, Human
aauggagaggcugugagugaga

SEQ ID NO: 802707 - RNA, 22 nt, Human
acauauauuacuaguaaagaca

SEQ ID NO: 802708 - RNA, 22 nt, Human
ucauggggaaagcccgcccuca

SEQ ID NO: 802709 - RNA, 23 nt, Human
uagugucaagagggaguguaauu

SEQ ID NO: 802710 - RNA, 22 nt, Human
uuuccuucccuggaugagaagu

SEQ ID NO: 802711 - RNA, 22 nt, Human
uacuagaaaaacacaugcucug

SEQ ID NO: 802712 - RNA, 22 nt, Human
acacaucuaucucuacacaagg

SEQ ID NO: 802713 - RNA, 22 nt, Human
ggcacaggaaucugugaagugc

SEQ ID NO: 802714 - RNA, 18 nt, Human
ucaugcaaacgcuucaua

SEQ ID NO: 802715 - RNA, 22 nt, Human
aaagauuugaguucugcuuaua

SEQ ID NO: 802716 - RNA, 22 nt, Human
cuggggaauagagcuggagacc

SEQ ID NO: 802717 - RNA, 22 nt, Human
gcaggcaguuauuuaguagaau

SEQ ID NO: 802718 - RNA, 19 nt, Human
gaauacagauaauaagcag

SEQ ID NO: 802719 - RNA, 22 nt, Human
aguaaaaucaccaucucuuugu

SEQ ID NO: 802720 - RNA, 22 nt, Human
ccucaggugugggccagcuguc

SEQ ID NO: 802721 - RNA, 22 nt, Human
aauucccauuugcagaaaauca

SEQ ID NO: 802722 - RNA, 22 nt, Human
ccucugacuucucuuuauuggc

SEQ ID NO: 802723 - RNA, 17 nt, Human
auccccagcaucuagaa

SEQ ID NO: 802724 - RNA, 20 nt, Human
agaagaggauacaaccaggc

SEQ ID NO: 802725 - RNA, 22 nt, Human
cuuagaaaugcagauucucagg

SEQ ID NO: 802726 - RNA, 22 nt, Human
agggcagcagcugucccugaga

SEQ ID NO: 802727 - RNA, 22 nt, Human
uuauuaauaaaguggcauagcc

SEQ ID NO: 802728 - RNA, 22 nt, Human
gcagggcacagacagugccaag

SEQ ID NO: 802729 - RNA, 22 nt, Human
ucaggcaggaagggaggacuug

SEQ ID NO: 802730 - RNA, 22 nt, Human
acuaucuuccuuaugccuauca

SEQ ID NO: 802731 - RNA, 22 nt, Human
cuacuguaauagaugaauuuga

SEQ ID NO: 802732 - RNA, 22 nt, Human
uguccuggccaaggccuugcuu

SEQ ID NO: 802733 - RNA, 18 nt, Human
ugaacuuuuccugcugcu

SEQ ID NO: 802734 - RNA, 22 nt, Human
uuagaaaaaggcuguggucuua

SEQ ID NO: 802735 - RNA, 23 nt, Human
aguuuuuaauggucauagcugag

SEQ ID NO: 802736 - RNA, 22 nt, Human
gcagggccuuagcagcggcugc

SEQ ID NO: 802737 - RNA, 22 nt, Human
gagccaggucgggccgcggcga

SEQ ID NO: 802738 - RNA, 22 nt, Human
uuauugaguuguaagagcucuu

SEQ ID NO: 802739 - RNA, 22 nt, Human
cuccuggagcagcaggcgcagg

SEQ ID NO: 802740 - RNA, 22 nt, Human
ucaggaugagcucauaacuaug

SEQ ID NO: 802741 - RNA, 22 nt, Human
ccucagcauccuccugcucagu

SEQ ID NO: 802742 - RNA, 22 nt, Human
gcagguggauuaucagaagugc

SEQ ID NO: 802743 - RNA, 22 nt, Human
aaagagcacccucaaugucuga

SEQ ID NO: 802744 - RNA, 22 nt, Human
ugcagccucucugcuucaggaa

SEQ ID NO: 802745 - RNA, 20 nt, Human
gggaggcauuggucccucac

SEQ ID NO: 802746 - RNA, 22 nt, Human
auguaaggagccacaguggggg

SEQ ID NO: 802747 - RNA, 22 nt, Human
uuauugaguaucugcuuggugu

SEQ ID NO: 802748 - RNA, 22 nt, Human
aguucuggugguuuggagaucu

SEQ ID NO: 802749 - RNA, 22 nt, Human
uccucagggcggccuccgucuu

SEQ ID NO: 802750 - RNA, 18 nt, Human
cuuuaugugcagagcuuu

SEQ ID NO: 802751 - RNA, 22 nt, Human
augguauugcaacaacugucau

SEQ ID NO: 802752 - RNA, 22 nt, Human
gaaaauuuagaacugaacuucu

SEQ ID NO: 802753 - RNA, 22 nt, Human
uaaagucaucuuuacaucuuug

SEQ ID NO: 802754 - RNA, 22 nt, Human
aaauauaccaguugccugcauc

SEQ ID NO: 802755 - RNA, 23 nt, Human
caggaagcagaugggguagaaga

SEQ ID NO: 802756 - RNA, 22 nt, Human
uucauacauuuuuacuaacagc

SEQ ID NO: 802757 - RNA, 18 nt, Human
gggcccuggcguccgccc

SEQ ID NO: 802758 - RNA, 22 nt, Human
aagaaaugcagaaaugugcugg

SEQ ID NO: 802759 - RNA, 22 nt, Human
ucaggcugcaucuguaagggug

SEQ ID NO: 802760 - RNA, 21 nt, Human
uacaaagggaaauucuggcuc

SEQ ID NO: 802761 - RNA, 22 nt, Human
aaacauucacauuugcuaguaa

SEQ ID NO: 802762 - RNA, 22 nt, Human
cccagcaguaaccaguggaaau

SEQ ID NO: 802763 - RNA, 22 nt, Human
gucagaggggcagcugccaggc

SEQ ID NO: 802764 - RNA, 22 nt, Human
uuucaggauuaguuuaagcagg

SEQ ID NO: 802765 - RNA, 22 nt, Human
ucacaucuugugauguuuucau

SEQ ID NO: 802766 - RNA, 22 nt, Human
uaggagggcccugaaaauggca

SEQ ID NO: 802767 - RNA, 22 nt, Human
cuuggcccaguugccaaggaaa

SEQ ID NO: 802768 - RNA, 22 nt, Human
uuuaugcuacucaauagucagu

SEQ ID NO: 802769 - RNA, 18 nt, Human
aagccaggucaagauaag

SEQ ID NO: 802770 - RNA, 22 nt, Human
ugagcugagaacacuugggcua

SEQ ID NO: 802771 - RNA, 22 nt, Human
cuggagccgcauggagcaggga

SEQ ID NO: 802772 - RNA, 22 nt, Human
ucaggagcaacaucuuugaauc

SEQ ID NO: 802773 - RNA, 18 nt, Human
gggaagaggaucuggccc

SEQ ID NO: 802774 - RNA, 22 nt, Human
auggccaguguugagaucaggc

SEQ ID NO: 802775 - RNA, 22 nt, Human
aggcccuggcccccagagauuc

SEQ ID NO: 802776 - RNA, 22 nt, Human
ggggugggagugccauccuuga

SEQ ID NO: 802777 - RNA, 22 nt, Human
aacauuugcaugcuuuauuaga

SEQ ID NO: 802778 - RNA, 22 nt, Human
ccaggcugcagucaaggggcau

SEQ ID NO: 802779 - RNA, 22 nt, Human
agcacucuaagugcaagacacu

SEQ ID NO: 802780 - RNA, 22 nt, Human
cugcucuccccaggccagucug

SEQ ID NO: 802781 - RNA, 22 nt, Human
gguggcagggagugucccuggg

SEQ ID NO: 802782 - RNA, 22 nt, Human
uagcuuugacaguugcaggcag

SEQ ID NO: 802783 - RNA, 22 nt, Human
ucgcuggccuggaggggagcca

SEQ ID NO: 802784 - RNA, 22 nt, Human
uucauguaauaggauguguuaa

SEQ ID NO: 802785 - RNA, 22 nt, Human
aucauaaaccacuuuguaaucu

SEQ ID NO: 802786 - RNA, 22 nt, Human
acacauuugcauaauaccucau

SEQ ID NO: 802787 - RNA, 22 nt, Human
aaaauuuuacugguguuuccuu

SEQ ID NO: 802788 - RNA, 22 nt, Human
gggccagacccuuggcgaucug

SEQ ID NO: 802789 - RNA, 22 nt, Human
cagcacaggccccucucuccca

SEQ ID NO: 802790 - RNA, 22 nt, Human
ucuugauuguuuucugaccuua

SEQ ID NO: 802791 - RNA, 22 nt, Human
acucuucaugcuaugcucaacu

SEQ ID NO: 802792 - RNA, 22 nt, Human
aagaagcagagcuguggguguu

SEQ ID NO: 802793 - RNA, 22 nt, Human
cugccuggaugaauggcgccuu

SEQ ID NO: 802794 - RNA, 22 nt, Human
ggccuggcugguucaguacccu

SEQ ID NO: 802795 - RNA, 22 nt, Human
agcagggcaguuaaaggguccu

SEQ ID NO: 802796 - RNA, 22 nt, Human
cagaggcagccgggggagaacg

SEQ ID NO: 802797 - RNA, 22 nt, Human
ugaggggcggccugcagaggcc

SEQ ID NO: 802798 - RNA, 22 nt, Human
cauucacaauggauugcuucaa

SEQ ID NO: 802799 - RNA, 22 nt, Human
cucuccaggcugggacaggacc

SEQ ID NO: 802800 - RNA, 22 nt, Human
gcagcuggagaaauaccacccu

SEQ ID NO: 802801 - RNA, 22 nt, Human
acaugacauaguagaaaagccc

SEQ ID NO: 802802 - RNA, 22 nt, Human
ggaggguccacugugaggcaga

SEQ ID NO: 802803 - RNA, 22 nt, Human
acaguguacuaaauaguaagag

SEQ ID NO: 802804 - RNA, 22 nt, Human
ugcucuggcugggaugagugca

SEQ ID NO: 802805 - RNA, 22 nt, Human
auuauuuauccucuuggucuau

SEQ ID NO: 802806 - RNA, 22 nt, Human
gacccagaggccugacagugug

SEQ ID NO: 802807 - RNA, 22 nt, Human
uuacagagaggugauugugaag

SEQ ID NO: 802808 - RNA, 19 nt, Human
gggcaguggcacuagggag

SEQ ID NO: 802809 - RNA, 22 nt, Human
agacaauuguucuaaguaaaaa

SEQ ID NO: 802810 - RNA, 22 nt, Human
cucaggggaccuggcuccgagu

SEQ ID NO: 802811 - RNA, 22 nt, Human
uuaauuuucucaucugugaaau

SEQ ID NO: 802812 - RNA, 19 nt, Human
gcaggaaaugagugauugc

SEQ ID NO: 802813 - RNA, 22 nt, Human
uaagauaauaaguaugucuaug

SEQ ID NO: 802814 - RNA, 22 nt, Human
ucuugauuuauucuacccagaa

SEQ ID NO: 802815 - RNA, 22 nt, Human
ugggagugauacaguauggaau

SEQ ID NO: 802816 - RNA, 22 nt, Human
auauauuacaaaagaggaagga

SEQ ID NO: 802817 - RNA, 22 nt, Human
acaacaaagacacuugaaauga

SEQ ID NO: 802818 - RNA, 22 nt, Human
cccuggaguccggagcucaccu

SEQ ID NO: 802819 - RNA, 22 nt, Human
cucuggaguaagagcuaugaaa

SEQ ID NO: 802820 - RNA, 22 nt, Human
ggaggguccaucuugugaaaag

SEQ ID NO: 802821 - RNA, 22 nt, Human
guguuuuauuggugcagucaga

SEQ ID NO: 802822 - RNA, 22 nt, Human
cuugcuuuaucugguuucucau

SEQ ID NO: 802823 - RNA, 22 nt, Human
gaggacagagccgccuggcaag

SEQ ID NO: 802824 - RNA, 22 nt, Human
cuguucuuaucgucuuaauauc

SEQ ID NO: 802825 - RNA, 22 nt, Human
gagucagauugcagacagggcu

SEQ ID NO: 802826 - RNA, 22 nt, Human
caaggacacugauguucauccu

SEQ ID NO: 802827 - RNA, 22 nt, Human
cuggaggcaaagcagaggcaug

SEQ ID NO: 802828 - RNA, 22 nt, Human
aaagacauggaacuagagaugg

SEQ ID NO: 802829 - RNA, 22 nt, Human
ugaggaaggaauugagguuuua

SEQ ID NO: 802830 - RNA, 22 nt, Human
gaccucagauuuucccaggcca

SEQ ID NO: 802831 - RNA, 22 nt, Human
agaggcucuaauccccuccaca

SEQ ID NO: 802832 - RNA, 22 nt, Human
uuuaagauucaguaaggcaaac

SEQ ID NO: 802833 - RNA, 22 nt, Human
ucuuagaaugucaacugauguu

SEQ ID NO: 802834 - RNA, 22 nt, Human
ccuggagacgaggcuggaccau

SEQ ID NO: 802835 - RNA, 22 nt, Human
cccagguggcagaagcugcagu

SEQ ID NO: 802836 - RNA, 22 nt, Human
aauuucaaugcacucaugguug

SEQ ID NO: 802837 - RNA, 22 nt, Human
uuucuauuuuaaaggcauaugg

SEQ ID NO: 802838 - RNA, 22 nt, Human
uuucggaauaaauacgaacauc

SEQ ID NO: 802839 - RNA, 22 nt, Human
uuaaugacuuauauuuaaagca

SEQ ID NO: 802840 - RNA, 22 nt, Human
ggagguggcagagggacauucu

SEQ ID NO: 802841 - RNA, 22 nt, Human
cuuucucaguguuaauuacuuu

SEQ ID NO: 802842 - RNA, 22 nt, Human
uguuuacauauuuggucucaga

SEQ ID NO: 802843 - RNA, 22 nt, Human
agggccaaguccaggaccucgg

SEQ ID NO: 802844 - RNA, 22 nt, Human
ugcaagagauucaaaccauaaa

SEQ ID NO: 802845 - RNA, 22 nt, Human
uggcaguccccugugccuggaa

SEQ ID NO: 802846 - RNA, 22 nt, Human
agcccuccaucugugcucaggc

SEQ ID NO: 802847 - RNA, 22 nt, Human
ccagggaaggcugcuggcugug

SEQ ID NO: 802848 - RNA, 22 nt, Human
uuccuuuucuuaaacauaugug

SEQ ID NO: 802849 - RNA, 20 nt, Human
cucugcugcgcaucccacuu

SEQ ID NO: 802850 - RNA, 22 nt, Human
ucaggacaaccuguuuucagac

SEQ ID NO: 802851 - RNA, 22 nt, Human
uuucuaaguaucuugcaguuuu

SEQ ID NO: 802852 - RNA, 22 nt, Human
cucuuccucucaugcggucaua

SEQ ID NO: 802853 - RNA, 22 nt, Human
gcacccugaguguucagcucca

SEQ ID NO: 802854 - RNA, 22 nt, Human
uggcucagagcagggacucugg

SEQ ID NO: 802855 - RNA, 22 nt, Human
cacagcaaagacacucucaacu

SEQ ID NO: 802856 - RNA, 22 nt, Human
aagccacaaucugcaucagcau

SEQ ID NO: 802857 - RNA, 22 nt, Human
ggcuugcacacagccucaguuu

SEQ ID NO: 802858 - RNA, 22 nt, Human
uuguuucugaguuuucauguau

SEQ ID NO: 802859 - RNA, 22 nt, Human
caggcccacgaggcacacagag

SEQ ID NO: 802860 - RNA, 22 nt, Human
aagauacauauuuguucuagug

SEQ ID NO: 802861 - RNA, 22 nt, Human
ucucuugaagauugaagacaaa

SEQ ID NO: 802862 - RNA, 22 nt, Human
uuguaagaauaugaauacaaau

SEQ ID NO: 802863 - RNA, 22 nt, Human
aauguuguguuucaguucaaga

SEQ ID NO: 802864 - RNA, 22 nt, Human
aagaugugaacagaaccacagg

SEQ ID NO: 802865 - RNA, 22 nt, Human
aggaacaacugauucagucaac

SEQ ID NO: 802866 - RNA, 22 nt, Human
cucagggaggagcuucugggcc

SEQ ID NO: 802867 - RNA, 22 nt, Human
aacauacauauuucagugucca

SEQ ID NO: 802868 - RNA, 22 nt, Human
ggcuggcacccuuggggauagg

SEQ ID NO: 802869 - RNA, 22 nt, Human
aaacccagagacuagaaagacc

SEQ ID NO: 802870 - RNA, 22 nt, Human
aaccauuagucaaucagcaaga

SEQ ID NO: 802871 - RNA, 22 nt, Human
ucagaauucugaagggcacaaa

SEQ ID NO: 802872 - RNA, 22 nt, Human
gcagccaggaaagcuggacccu

SEQ ID NO: 802873 - RNA, 22 nt, Human
cagcuucugcucauggaggggu

SEQ ID NO: 802874 - RNA, 22 nt, Human
acagucagggcuuacucaggga

SEQ ID NO: 802875 - RNA, 22 nt, Human
ugccagggucagcugcagcucu

SEQ ID NO: 802876 - RNA, 21 nt, Human
uguggcagauguugggaggca

SEQ ID NO: 802877 - RNA, 22 nt, Human
ugcuauuaaugaggcugcauuu

SEQ ID NO: 802878 - RNA, 22 nt, Human
ugcaggcuauaucuuauuugac

SEQ ID NO: 802879 - RNA, 22 nt, Human
gaggcagaggaagguggucucu

SEQ ID NO: 802880 - RNA, 19 nt, Human
aucuuuggguccugaaggg

SEQ ID NO: 802881 - RNA, 22 nt, Human
caguuguucccagcaaugaaag

SEQ ID NO: 802882 - RNA, 22 nt, Human
uuuuuguauagaaaugaacuaa

SEQ ID NO: 802883 - RNA, 22 nt, Human
uggacaggggcugcuguuguca

SEQ ID NO: 802884 - RNA, 22 nt, Human
acacuuaaucuuacugaggauc

SEQ ID NO: 802885 - RNA, 22 nt, Human
aaggcugacguuuguguuuauu

SEQ ID NO: 802886 - RNA, 22 nt, Human
gcagcagcucagccgggcacug

SEQ ID NO: 802887 - RNA, 22 nt, Human
ggcaggguccacaccugggaaa

SEQ ID NO: 802888 - RNA, 22 nt, Human
auuucuuacauaacaaauuguu

SEQ ID NO: 802889 - RNA, 22 nt, Human
ucuuccagcccuucuaauggua

SEQ ID NO: 802890 - RNA, 22 nt, Human
cuggagauaagcagucccaggc

SEQ ID NO: 802891 - RNA, 22 nt, Human
gcaguguccaggguggucugca

SEQ ID NO: 802892 - RNA, 22 nt, Human
gcagggacgccagggacagcaa

SEQ ID NO: 802893 - RNA, 22 nt, Human
ugccugccaugcagaaagcuga

SEQ ID NO: 802894 - RNA, 22 nt, Human
aaaaucuaaguagcgaguaagg

SEQ ID NO: 802895 - RNA, 22 nt, Human
aagcacagaccagaucuccagg

SEQ ID NO: 802896 - RNA, 22 nt, Human
agaucuggcccucagcuugauu

SEQ ID NO: 802897 - RNA, 22 nt, Human
auuuaauuuucucaacagugcu

SEQ ID NO: 802898 - RNA, 22 nt, Human
augggcugugggacccuggacc

SEQ ID NO: 802899 - RNA, 19 nt, Human
cugcacugagaaaaggagg

SEQ ID NO: 802900 - RNA, 22 nt, Human
uggcugccugaucgagcaggug

SEQ ID NO: 802901 - RNA, 20 nt, Human
ccagcauguacacaugugga

SEQ ID NO: 802902 - RNA, 22 nt, Human
gcaggguggauggcagggccag

SEQ ID NO: 802903 - RNA, 22 nt, Human
cagcuggccugagcgguggcgg

SEQ ID NO: 802904 - RNA, 22 nt, Human
uccagagcagguggucagaagg

SEQ ID NO: 802905 - RNA, 22 nt, Human
acgcaguuuguggacauuuuuu

SEQ ID NO: 802906 - RNA, 18 nt, Human
agcaggcguugccuggga

SEQ ID NO: 802907 - RNA, 22 nt, Human
uaguccuggauugguggaggca

SEQ ID NO: 802908 - RNA, 22 nt, Human
gagggccagaguccugggguca

SEQ ID NO: 802909 - RNA, 18 nt, Human
uggcuggcucugucaucu

SEQ ID NO: 802910 - RNA, 22 nt, Human
gcaagcugugauuuaugugaau

SEQ ID NO: 802911 - RNA, 21 nt, Human
uauuucuuugacucucucccu

SEQ ID NO: 802912 - RNA, 22 nt, Human
uggagguguccaacucgugggu

SEQ ID NO: 802913 - RNA, 22 nt, Human
aggucagaaaaggagagcauug

SEQ ID NO: 802914 - RNA, 22 nt, Human
aaaacagacagccaguguagag

SEQ ID NO: 802915 - RNA, 22 nt, Human
gcugccugcuucaugugggaga

SEQ ID NO: 802916 - RNA, 22 nt, Human
uacuguauuguuggcucuuuug

SEQ ID NO: 802917 - RNA, 22 nt, Human
uucuucaguuugguaaauguaa

SEQ ID NO: 802918 - RNA, 22 nt, Human
auacaugugucccugauuuauu

SEQ ID NO: 802919 - RNA, 22 nt, Human
auacagaacucucaguuguaua

SEQ ID NO: 802920 - RNA, 22 nt, Human
agcugagcucaggcugauguaa

SEQ ID NO: 802921 - RNA, 22 nt, Human
cugccaggcagcagagggagaa

SEQ ID NO: 802922 - RNA, 22 nt, Human
gcacagcacagcaacauguuuu

SEQ ID NO: 802923 - RNA, 22 nt, Human
aaacaucuuucuauugcaaguu

SEQ ID NO: 802924 - RNA, 22 nt, Human
acaauacuauuuucaguauccu

SEQ ID NO: 802925 - RNA, 22 nt, Human
cagggacaaagugagaaaggaa

SEQ ID NO: 802926 - RNA, 22 nt, Human
gucucucugacugguccacacc

SEQ ID NO: 802927 - RNA, 22 nt, Human
cggcaggguugguuuucucuga

SEQ ID NO: 802928 - RNA, 22 nt, Human
gcugggcaugugaccaacagaa

SEQ ID NO: 802929 - RNA, 22 nt, Human
caggccuggguucaaaucccuu

SEQ ID NO: 802930 - RNA, 22 nt, Human
cuuucccuuuugccuugcgugg

SEQ ID NO: 802931 - RNA, 22 nt, Human
augucucucagguuuaacuuua

SEQ ID NO: 802932 - RNA, 23 nt, Human
ccuggggcacuugaguccucauc

SEQ ID NO: 802933 - RNA, 22 nt, Human
ucaauaaguaggauaucaagau

SEQ ID NO: 802934 - RNA, 21 nt, Human
gaaggcuucugccuggaggag

SEQ ID NO: 802935 - RNA, 22 nt, Human
uugggaguuccuacugcgguuu

SEQ ID NO: 802936 - RNA, 22 nt, Human
acaggugauucaggcucuggga

SEQ ID NO: 802937 - RNA, 22 nt, Human
ucagaggaauuugcuuuucaug

SEQ ID NO: 802938 - RNA, 22 nt, Human
acagauaaauuuauaggagugu

SEQ ID NO: 802939 - RNA, 22 nt, Human
gacucugggaguuuaugugauu

SEQ ID NO: 802940 - RNA, 22 nt, Human
cagcaggauaugguggagagag

SEQ ID NO: 802941 - RNA, 22 nt, Human
ucacuuagauggggaucaucac

SEQ ID NO: 802942 - RNA, 22 nt, Human
ccaggagcaggagcuggacaga

SEQ ID NO: 802943 - RNA, 22 nt, Human
ucuguuuuguaccagauacagc

SEQ ID NO: 802944 - RNA, 22 nt, Human
ucuggagaggaggauguggaca

SEQ ID NO: 802945 - RNA, 22 nt, Human
ucagcaggcgguuccuuguggg

SEQ ID NO: 802946 - RNA, 22 nt, Human
gcugggagccguaccugucacg

SEQ ID NO: 802947 - RNA, 22 nt, Human
ggagaagggacagacucagcuu

SEQ ID NO: 802948 - RNA, 22 nt, Human
agaaauacaaaguacuaagaua

SEQ ID NO: 802949 - RNA, 22 nt, Human
aggcuucaguagggagcauguc

SEQ ID NO: 802950 - RNA, 22 nt, Human
aaguccugccagcaaauguaua

SEQ ID NO: 802951 - RNA, 22 nt, Human
gcaggacacagaugcaaggcca

SEQ ID NO: 802952 - RNA, 23 nt, Human
acucagagaccccgggaagugac

SEQ ID NO: 802953 - RNA, 22 nt, Human
aguuuaauccuccagcccaacu

SEQ ID NO: 802954 - RNA, 22 nt, Human
cagccuggacagcgaccagagu

SEQ ID NO: 802955 - RNA, 22 nt, Human
gggaaccaccccucugcccuga

SEQ ID NO: 802956 - RNA, 19 nt, Human
auggaaaauuguacucaau

SEQ ID NO: 802957 - RNA, 22 nt, Human
ugcuggcacgugacugggaagu

SEQ ID NO: 802958 - RNA, 19 nt, Human
caauauauagugaguggau

SEQ ID NO: 802959 - RNA, 22 nt, Human
gugaggggccaagaguagggca

SEQ ID NO: 802960 - RNA, 18 nt, Human
ggcagggaaaagauaggg

SEQ ID NO: 802961 - RNA, 19 nt, Human
uauauuuguugaauaaaaa

SEQ ID NO: 802962 - RNA, 22 nt, Human
aacuguagcaaagaacagcucu

SEQ ID NO: 802963 - RNA, 22 nt, Human
aggcacagguggacuucacagu

SEQ ID NO: 802964 - RNA, 22 nt, Human
aauuucagaccauuugcaauua

SEQ ID NO: 802965 - RNA, 20 nt, Human
gccagaggccggcaggggcu

SEQ ID NO: 802966 - RNA, 22 nt, Human
aguggcaagucaaugauaguga

SEQ ID NO: 802967 - RNA, 22 nt, Human
acaaauuugaauccugacuucu

SEQ ID NO: 802968 - RNA, 22 nt, Human
ugaacaacugcaaaaaucucca

SEQ ID NO: 802969 - RNA, 22 nt, Human
uugacuuuaaagcuuugucucu

SEQ ID NO: 802970 - RNA, 22 nt, Human
ugagcaggacucacugcagccu

SEQ ID NO: 802971 - RNA, 22 nt, Human
gcucccaccuuugcuaucagua

SEQ ID NO: 802972 - RNA, 22 nt, Human
gagccagccuucuucugagguc

SEQ ID NO: 802973 - RNA, 22 nt, Human
aaggcccuagaaucuauauugc

SEQ ID NO: 802974 - RNA, 22 nt, Human
ugacaggaugaugagcaggggg

SEQ ID NO: 802975 - RNA, 22 nt, Human
gaccucaguauuguucaggaug

SEQ ID NO: 802976 - RNA, 22 nt, Human
agccacagcacauuguaagaaa

SEQ ID NO: 802977 - RNA, 18 nt, Human
ggcagaugacaggagaga

SEQ ID NO: 802978 - RNA, 20 nt, Human
uacaacaaguagagacauac

SEQ ID NO: 802979 - RNA, 22 nt, Human
agacaaauaacuuuuuaugucc

SEQ ID NO: 802980 - RNA, 22 nt, Human
uuucuccugaguuccacgcuac

SEQ ID NO: 802981 - RNA, 22 nt, Human
ugcaaacagccuugaaagaggg

SEQ ID NO: 802982 - RNA, 22 nt, Human
acacuugauaggucaaaucagu

SEQ ID NO: 802983 - RNA, 22 nt, Human
aaaucucacuguagucaaagug

SEQ ID NO: 802984 - RNA, 22 nt, Human
agccagcugcucgggggaaaca

SEQ ID NO: 802985 - RNA, 22 nt, Human
guuacucuugagaggcugaggu

SEQ ID NO: 802986 - RNA, 22 nt, Human
ugcaagggugacagguugcucu

SEQ ID NO: 802987 - RNA, 22 nt, Human
auacauucagcagugcucauga

SEQ ID NO: 802988 - RNA, 22 nt, Human
agugucaaugcucuguuaaaaa

SEQ ID NO: 802989 - RNA, 22 nt, Human
aggccagcaugcaguucuaagg

SEQ ID NO: 802990 - RNA, 22 nt, Human
acaaugaaccaaauuuaccaau

SEQ ID NO: 802991 - RNA, 22 nt, Human
ggucagaggggauuccuuggga

SEQ ID NO: 802992 - RNA, 22 nt, Human
aagccaggaagagagccuucac

SEQ ID NO: 802993 - RNA, 22 nt, Human
cuaggcugcagaugcauggaau

SEQ ID NO: 802994 - RNA, 22 nt, Human
ugaggccacuuccccacagccc

SEQ ID NO: 802995 - RNA, 21 nt, Human
gucagagaugcccaacugccu

SEQ ID NO: 802996 - RNA, 21 nt, Human
cagaggcaggcucugugugug

SEQ ID NO: 802997 - RNA, 22 nt, Human
uuuaaauaggacuccugggggu

SEQ ID NO: 802998 - RNA, 22 nt, Human
ggagauggcuggcagguagaug

SEQ ID NO: 802999 - RNA, 22 nt, Human
ugcacuccaggcugggugacag

SEQ ID NO: 803000 - RNA, 22 nt, Human
uucacugugaacucauauucag

SEQ ID NO: 803001 - RNA, 22 nt, Human
agggccagcccauaaugccaaa

SEQ ID NO: 803002 - RNA, 22 nt, Human
ggacccaccaggccgggcucca

SEQ ID NO: 803003 - RNA, 18 nt, Human
cuggaaguuagucuuugg

SEQ ID NO: 803004 - RNA, 22 nt, Human
cugccaggcacugggcucugca

SEQ ID NO: 803005 - RNA, 22 nt, Human
uaccucauuacaucugcaauga

SEQ ID NO: 803006 - RNA, 22 nt, Human
gagcggaggcuuggaggccagc

SEQ ID NO: 803007 - RNA, 22 nt, Human
gaugaaaugcugagccugaguu

SEQ ID NO: 803008 - RNA, 22 nt, Human
ggaaggaauuccaagacuaaag

SEQ ID NO: 803009 - RNA, 22 nt, Human
cucuuuccucgaugggcuccug

SEQ ID NO: 803010 - RNA, 22 nt, Human
aaucagaaccuugggucauaac

SEQ ID NO: 803011 - RNA, 22 nt, Human
ucacugcuuugagccacugagc

SEQ ID NO: 803012 - RNA, 22 nt, Human
ccucgcugugugaccuugggug

SEQ ID NO: 803013 - RNA, 22 nt, Human
uuguuucaaauauuucagaaua

SEQ ID NO: 803014 - RNA, 22 nt, Human
gaguugccucuaagucccuggu

SEQ ID NO: 803015 - RNA, 22 nt, Human
cuggaaugcggagaguuggaga

SEQ ID NO: 803016 - RNA, 22 nt, Human
agugucaaauuaaauaaucugg

SEQ ID NO: 803017 - RNA, 22 nt, Human
acaggcaagucacacaacuugu

SEQ ID NO: 803018 - RNA, 22 nt, Human
acacacuucagauguaauuugu

SEQ ID NO: 803019 - RNA, 22 nt, Human
aaaccacuccugauucacuuca

SEQ ID NO: 803020 - RNA, 22 nt, Human
cagcaucuucaugugcaucucc

SEQ ID NO: 803021 - RNA, 22 nt, Human
uuguuaaauggaugcagaauaa

SEQ ID NO: 803022 - RNA, 22 nt, Human
cugagcugggcucucuugaggg

SEQ ID NO: 803023 - RNA, 22 nt, Human
caggaaggcccaccuguccugu

SEQ ID NO: 803024 - RNA, 22 nt, Human
gcugaagggagugcugagucug

SEQ ID NO: 803025 - RNA, 17 nt, Human
agcaggcugcagaggcc

SEQ ID NO: 803026 - RNA, 20 nt, Human
aaggcagaguggguuggagc

SEQ ID NO: 803027 - RNA, 22 nt, Human
ccuacaguuauauucuugauug

SEQ ID NO: 803028 - RNA, 22 nt, Human
aggaagaggguggcagauaauc

SEQ ID NO: 803029 - RNA, 22 nt, Human
uccaaauacauuuacuguauuu

SEQ ID NO: 803030 - RNA, 22 nt, Human
ucuguguauuugugaccuguau

SEQ ID NO: 803031 - RNA, 22 nt, Human
ugaccauuugaucuacauucca

SEQ ID NO: 803032 - RNA, 22 nt, Human
cagccccuuccuggcaucugga

SEQ ID NO: 803033 - RNA, 20 nt, Human
cagcuuggaugagaggcuga

SEQ ID NO: 803034 - RNA, 22 nt, Human
uuuucuauucauugucuauggu

SEQ ID NO: 803035 - RNA, 22 nt, Human
uguuugaugacgacauuguaga

SEQ ID NO: 803036 - RNA, 21 nt, Human
cgacaggagaggcagccagcc

SEQ ID NO: 803037 - RNA, 22 nt, Human
uaagauaauccauuauaauguu

SEQ ID NO: 803038 - RNA, 22 nt, Human
gcuggcuggcugugcaaaggca

SEQ ID NO: 803039 - RNA, 22 nt, Human
uccucccuguaccauuccucug

SEQ ID NO: 803040 - RNA, 22 nt, Human
ccagcagcuuuauuggcucucc

SEQ ID NO: 803041 - RNA, 20 nt, Human
ucccaggcugggcuccagcu

SEQ ID NO: 803042 - RNA, 22 nt, Human
ucccagcccagguaugaugaua

SEQ ID NO: 803043 - RNA, 22 nt, Human
uuugcaaugugaaauuaaagaa

SEQ ID NO: 803044 - RNA, 22 nt, Human
uuucugcagguauugcauaagu

SEQ ID NO: 803045 - RNA, 17 nt, Human
ucaggcugugccuggua

SEQ ID NO: 803046 - RNA, 22 nt, Human
caggaggcccaaagggcgcaga

SEQ ID NO: 803047 - RNA, 22 nt, Human
accugcugaggagggggaauua

SEQ ID NO: 803048 - RNA, 22 nt, Human
gaauuacagccagaagaaugaa

SEQ ID NO: 803049 - RNA, 22 nt, Human
cagcaaaugaguggcagggcag

SEQ ID NO: 803050 - RNA, 22 nt, Human
uaggaaaagucuagauugauga

SEQ ID NO: 803051 - RNA, 22 nt, Human
cuuuauauauucccaggcugcc

SEQ ID NO: 803052 - RNA, 22 nt, Human
cuggcugugaaauggcaguguc

SEQ ID NO: 803053 - RNA, 22 nt, Human
aguuucuugaagacugauguuu

SEQ ID NO: 803054 - RNA, 19 nt, Human
cuuggcaucugugaaguga

SEQ ID NO: 803055 - RNA, 22 nt, Human
aggacacacuucugaggucuuu

SEQ ID NO: 803056 - RNA, 22 nt, Human
gagcuggcuaauacugacuuau

SEQ ID NO: 803057 - RNA, 22 nt, Human
gaaauacuguaaaguuauuauu

SEQ ID NO: 803058 - RNA, 19 nt, Human
gcaggguggcagagcucuu

SEQ ID NO: 803059 - RNA, 22 nt, Human
ucuggcuguguaauauguguag

SEQ ID NO: 803060 - RNA, 22 nt, Human
uccucuuucucaacauuaguua

SEQ ID NO: 803061 - RNA, 22 nt, Human
caaaggaaauacuaaucuggaa

SEQ ID NO: 803062 - RNA, 22 nt, Human
guccugggccugcugaggcuga

SEQ ID NO: 803063 - RNA, 22 nt, Human
uucacacacagcuuccuauugu

SEQ ID NO: 803064 - RNA, 22 nt, Human
uaaaggguagguuuuacuguaa

SEQ ID NO: 803065 - RNA, 22 nt, Human
cacaucugacuuccagugcagg

SEQ ID NO: 803066 - RNA, 22 nt, Human
ucauuucuauugcuacugucug

SEQ ID NO: 803067 - RNA, 22 nt, Human
gcugcagccuuugggaaggaca

SEQ ID NO: 803068 - RNA, 22 nt, Human
aagcaggcaugggaggccaucc

SEQ ID NO: 803069 - RNA, 22 nt, Human
uagaaaugaauguuuaaaaguc

SEQ ID NO: 803070 - RNA, 22 nt, Human
cagaguuucgguaagcauagaa

SEQ ID NO: 803071 - RNA, 22 nt, Human
cagggcucacucggcuggcguc

SEQ ID NO: 803072 - RNA, 22 nt, Human
uucauuuguccaaauacuaugu

SEQ ID NO: 803073 - RNA, 22 nt, Human
accauuuaaggaaaauguauca

SEQ ID NO: 803074 - RNA, 22 nt, Human
cuuucccugcuuagaaggauuu

SEQ ID NO: 803075 - RNA, 22 nt, Human
uaagaaacuuaacugggaacua

SEQ ID NO: 803076 - RNA, 22 nt, Human
ggcccaggaugcaagaacugaa

SEQ ID NO: 803077 - RNA, 22 nt, Human
uggaccagggucccagaguaug

SEQ ID NO: 803078 - RNA, 22 nt, Human
aggcuuccucgugccuuagaua

SEQ ID NO: 803079 - RNA, 17 nt, Human
ucaaaguauucugaugc

SEQ ID NO: 803080 - RNA, 22 nt, Human
agaaacuaaagccaagggcucu

SEQ ID NO: 803081 - RNA, 22 nt, Human
aauauaugagggagcuauuuga

SEQ ID NO: 803082 - RNA, 22 nt, Human
gcagcaggagaguaauagcggu

SEQ ID NO: 803083 - RNA, 22 nt, Human
uagggcagagcuuguacacgau

SEQ ID NO: 803084 - RNA, 22 nt, Human
acugcagccuugaacucugggc

SEQ ID NO: 803085 - RNA, 22 nt, Human
aggacagagccugugcagaccg

SEQ ID NO: 803086 - RNA, 22 nt, Human
gcaguggggaaugcuggggaga

SEQ ID NO: 803087 - RNA, 21 nt, Human
aucacauuggcuguuauuauu

SEQ ID NO: 803088 - RNA, 22 nt, Human
gucugcugcagucguggcucua

SEQ ID NO: 803089 - RNA, 22 nt, Human
cuggaagguggauggcgaggcc

SEQ ID NO: 803090 - RNA, 22 nt, Human
uggcccugcugggucagagcug

SEQ ID NO: 803091 - RNA, 22 nt, Human
uuugacaucuaagaauucuuac

SEQ ID NO: 803092 - RNA, 20 nt, Human
cagagacccaggcuucagcu

SEQ ID NO: 803093 - RNA, 22 nt, Human
augaagcagcguuguagaguga

SEQ ID NO: 803094 - RNA, 18 nt, Human
uggcagggaggaaauaua

SEQ ID NO: 803095 - RNA, 22 nt, Human
uaaaaguaggaaugaaacgcau

SEQ ID NO: 803096 - RNA, 22 nt, Human
aagaacaugaguuaugaugauu

SEQ ID NO: 803097 - RNA, 22 nt, Human
ucuuuuuauauugacaaaaggu

SEQ ID NO: 803098 - RNA, 23 nt, Human
uuucugaaguugagauggacuuu

SEQ ID NO: 803099 - RNA, 22 nt, Human
auucuucacuguuucagaauga

SEQ ID NO: 803100 - RNA, 22 nt, Human
ggcuuaaaguuuucuagaauaa

SEQ ID NO: 803101 - RNA, 22 nt, Human
uggaaugcagugggagcuuacc

SEQ ID NO: 803102 - RNA, 22 nt, Human
ugcagccaucuuucuuggagga

SEQ ID NO: 803103 - RNA, 22 nt, Human
ugauuuacaauuguaaaaguuu

SEQ ID NO: 803104 - RNA, 22 nt, Human
agcaaggcagucagcuggcugg

SEQ ID NO: 803105 - RNA, 22 nt, Human
aggcuucuacguggucccaggg

SEQ ID NO: 803106 - RNA, 22 nt, Human
caggaaaggugugucaugaugg

SEQ ID NO: 803107 - RNA, 22 nt, Human
aagauauacuauuaaguaccau

SEQ ID NO: 803108 - RNA, 22 nt, Human
aggaaaagugugaaguauggag

SEQ ID NO: 803109 - RNA, 22 nt, Human
ccauuucacccacugcuuuagg

SEQ ID NO: 803110 - RNA, 22 nt, Human
cagcuaccaugguuuguuccag

SEQ ID NO: 803111 - RNA, 22 nt, Human
agaaacuaagucauaacucuuu

SEQ ID NO: 803112 - RNA, 22 nt, Human
ugucaugggucuaaacauugau

SEQ ID NO: 803113 - RNA, 22 nt, Human
uugaauguaggucuuggugagc

SEQ ID NO: 803114 - RNA, 22 nt, Human
ccugucugcaugagugagcaua

SEQ ID NO: 803115 - RNA, 22 nt, Human
uacauucucuucccauugucuc

SEQ ID NO: 803116 - RNA, 22 nt, Human
cugggccagcaacugcaaugga

SEQ ID NO: 803117 - RNA, 22 nt, Human
ugaaaauauaguuuuccagacu

SEQ ID NO: 803118 - RNA, 22 nt, Human
aggcagaaccagcugggacuuu

SEQ ID NO: 803119 - RNA, 22 nt, Human
uuauuguuuggguauaauuuga

SEQ ID NO: 803120 - RNA, 22 nt, Human
gaugaaauucagaauugagggg

SEQ ID NO: 803121 - RNA, 22 nt, Human
ucagaagccggaagugcuccuc

SEQ ID NO: 803122 - RNA, 22 nt, Human
gccacccugcaaaugcccagga

SEQ ID NO: 803123 - RNA, 22 nt, Human
uggcccaggucucucugagccc

SEQ ID NO: 803124 - RNA, 22 nt, Human
uuggaaacuuucaagcauaaug

SEQ ID NO: 803125 - RNA, 22 nt, Human
cugcaaauccucagaaaggguu

SEQ ID NO: 803126 - RNA, 22 nt, Human
uaggaaaucagagaaagaggug

SEQ ID NO: 803127 - RNA, 20 nt, Human
aaccaguacccaaguaggaa

SEQ ID NO: 803128 - RNA, 23 nt, Human
caggagggaaugaaguuagacaa

SEQ ID NO: 803129 - RNA, 22 nt, Human
acucccuccaaaucugcacagu

SEQ ID NO: 803130 - RNA, 22 nt, Human
ugugggcccuaggcaccuuguc

SEQ ID NO: 803131 - RNA, 22 nt, Human
uuguauuuuuuccuggcggugg

SEQ ID NO: 803132 - RNA, 20 nt, Human
auacaagaugaguaauuucu

SEQ ID NO: 803133 - RNA, 22 nt, Human
gcagauggagauaaauggaacu

SEQ ID NO: 803134 - RNA, 22 nt, Human
gggcaggugugcagagcuguug

SEQ ID NO: 803135 - RNA, 22 nt, Human
auuuuucucucacacuuaccag

SEQ ID NO: 803136 - RNA, 22 nt, Human
aaugagaauguaagugaagaga

SEQ ID NO: 803137 - RNA, 22 nt, Human
uagguauacagagauuucuggg

SEQ ID NO: 803138 - RNA, 21 nt, Human
uacaacagguuuuauuucgau

SEQ ID NO: 803139 - RNA, 22 nt, Human
guguuuaacaucugguuuauac

SEQ ID NO: 803140 - RNA, 22 nt, Human
uguggagcagcgucacagccuu

SEQ ID NO: 803141 - RNA, 22 nt, Human
ucccuuaagcaccugaguaguc

SEQ ID NO: 803142 - RNA, 22 nt, Human
uauguucauagaaaucaugacc

SEQ ID NO: 803143 - RNA, 22 nt, Human
ugacaauagcgauuuaucuugc

SEQ ID NO: 803144 - RNA, 22 nt, Human
ccacauuuggagaagauacuuu

SEQ ID NO: 803145 - RNA, 22 nt, Human
caucuuaaauuaaagcuuaagg

SEQ ID NO: 803146 - RNA, 22 nt, Human
auucacauuuacaaagcacuca

SEQ ID NO: 803147 - RNA, 22 nt, Human
ucauggaugggcccagcucugu

SEQ ID NO: 803148 - RNA, 19 nt, Human
aucccaucugguuuuuccc

SEQ ID NO: 803149 - RNA, 22 nt, Human
cagggagaagucuggucagucc

SEQ ID NO: 803150 - RNA, 22 nt, Human
gcuggcugagcacugguuuaua

SEQ ID NO: 803151 - RNA, 22 nt, Human
agcaaugacuuugaaaucauga

SEQ ID NO: 803152 - RNA, 22 nt, Human
agcacauuuucucaaagcucau

SEQ ID NO: 803153 - RNA, 19 nt, Human
cauuuucccaucauccuuu

SEQ ID NO: 803154 - RNA, 22 nt, Human
cuaaauaaucccucuggucuua

SEQ ID NO: 803155 - RNA, 22 nt, Human
ccagcuuuucagaaucugccug

SEQ ID NO: 803156 - RNA, 22 nt, Human
gcuggcugcuguugagacuugu

SEQ ID NO: 803157 - RNA, 22 nt, Human
cacuggcaucuaagggugguag

SEQ ID NO: 803158 - RNA, 22 nt, Human
uacucaaugaaguagccugguu

SEQ ID NO: 803159 - RNA, 22 nt, Human
uugcaauugcuauggagagcgu

SEQ ID NO: 803160 - RNA, 22 nt, Human
aggagaggcaucaagaaaaucg

SEQ ID NO: 803161 - RNA, 22 nt, Human
cugggaggauucauugagguga

SEQ ID NO: 803162 - RNA, 22 nt, Human
ucuuguuaaagugaagauacug

SEQ ID NO: 803163 - RNA, 22 nt, Human
ucagugacaacuaugaauauuu

SEQ ID NO: 803164 - RNA, 22 nt, Human
ugagaaauauugcacagugagg

SEQ ID NO: 803165 - RNA, 22 nt, Human
agaaggcaucagaaguguguag

SEQ ID NO: 803166 - RNA, 22 nt, Human
gacagacacaauugauccauga

SEQ ID NO: 803167 - RNA, 22 nt, Human
cagggcaguaacgggaacaucu

SEQ ID NO: 803168 - RNA, 22 nt, Human
gcauuccuuguuagcauuugau

SEQ ID NO: 803169 - RNA, 21 nt, Human
uaccaauugccuucuaguugu

SEQ ID NO: 803170 - RNA, 22 nt, Human
ggagcuggagagcuagccuagg

SEQ ID NO: 803171 - RNA, 22 nt, Human
uuucuaaguguguuucauagga

SEQ ID NO: 803172 - RNA, 22 nt, Human
gccuccccaaagugcugacagc

SEQ ID NO: 803173 - RNA, 22 nt, Human
uuucuguaaguggcaaauaaug

SEQ ID NO: 803174 - RNA, 22 nt, Human
cucaaauagaacugaucuauaa

SEQ ID NO: 803175 - RNA, 22 nt, Human
aagcaaauuggaugucugugag

SEQ ID NO: 803176 - RNA, 22 nt, Human
gcuuuucauagauaaaauucua

SEQ ID NO: 803177 - RNA, 22 nt, Human
aguaaauggugguuuuuaucau

SEQ ID NO: 803178 - RNA, 22 nt, Human
ugcuggcucccaggagccgcug

SEQ ID NO: 803179 - RNA, 22 nt, Human
aaagguuuauuuaaucagggag

SEQ ID NO: 803180 - RNA, 22 nt, Human
ucagccugcuccaagugcugcc

SEQ ID NO: 803181 - RNA, 19 nt, Human
uuucuaauguguuuuucuu

SEQ ID NO: 803182 - RNA, 21 nt, Human
aggagcauuguugugguggag

SEQ ID NO: 803183 - RNA, 19 nt, Human
gagcagcuuccuaucuggu

SEQ ID NO: 803184 - RNA, 22 nt, Human
auuuauuaccucggaguuucug

SEQ ID NO: 803185 - RNA, 22 nt, Human
cugggacagcugagacaggaga

SEQ ID NO: 803186 - RNA, 22 nt, Human
gacccaggcccaaggcugccag

SEQ ID NO: 803187 - RNA, 22 nt, Human
ggaugggcccgggacggcgcug

SEQ ID NO: 803188 - RNA, 22 nt, Human
cuuggcaugcagcaggcacuca

SEQ ID NO: 803189 - RNA, 22 nt, Human
ugcauauuuguaugauguuuag

SEQ ID NO: 803190 - RNA, 22 nt, Human
guucugggugaugagguuggcu

SEQ ID NO: 803191 - RNA, 22 nt, Human
ucagaaagacgaaacagauggg

SEQ ID NO: 803192 - RNA, 22 nt, Human
agacaaauuuccugcaaugaag

SEQ ID NO: 803193 - RNA, 22 nt, Human
ucaguucuaagugcuuuacaug

SEQ ID NO: 803194 - RNA, 22 nt, Human
ggcaggcugcuugggucauguc

SEQ ID NO: 803195 - RNA, 22 nt, Human
acacagagcuucucaacuggga

SEQ ID NO: 803196 - RNA, 22 nt, Human
ccuuaaauucuccauuugaaag

SEQ ID NO: 803197 - RNA, 22 nt, Human
cuggcuggccggaggcaucccu

SEQ ID NO: 803198 - RNA, 22 nt, Human
acauuuuacaccaagacuucuu

SEQ ID NO: 803199 - RNA, 22 nt, Human
guccugggcggagggcugcugu

SEQ ID NO: 803200 - RNA, 22 nt, Human
uagagaaaagcagggaucagga

SEQ ID NO: 803201 - RNA, 22 nt, Human
aucacauauaugcaccaagaca

SEQ ID NO: 803202 - RNA, 22 nt, Human
gcaugagguucuuggccagcau

SEQ ID NO: 803203 - RNA, 22 nt, Human
cuggcuccaccccaggaggaug

SEQ ID NO: 803204 - RNA, 22 nt, Human
ugacaaaacugcaauuacuuuu

SEQ ID NO: 803205 - RNA, 22 nt, Human
ccaggccagagugcaguggcac

SEQ ID NO: 803206 - RNA, 22 nt, Human
uacaagagaacuaauguaaguc

SEQ ID NO: 803207 - RNA, 22 nt, Human
agaauuacauaaauacaugaau

SEQ ID NO: 803208 - RNA, 22 nt, Human
uggcccagcucagggugggcgg

SEQ ID NO: 803209 - RNA, 22 nt, Human
ccaugcaauauauauccucaag

SEQ ID NO: 803210 - RNA, 22 nt, Human
ggacccagcucugagacccugc

SEQ ID NO: 803211 - RNA, 23 nt, Human
agaagcagcuucuggaguaucgg

SEQ ID NO: 803212 - RNA, 22 nt, Human
agcuagggcaaauaugagauac

SEQ ID NO: 803213 - RNA, 22 nt, Human
uacaaagugagcaaccucuuuu

SEQ ID NO: 803214 - RNA, 22 nt, Human
aagugucuucugauggggugug

SEQ ID NO: 803215 - RNA, 23 nt, Human
uaauuuuagccuuacaggacccu

SEQ ID NO: 803216 - RNA, 22 nt, Human
aaagugcagcuugugaucccua

SEQ ID NO: 803217 - RNA, 22 nt, Human
gggguggauuucaggcgguguc

SEQ ID NO: 803218 - RNA, 22 nt, Human
caaacauuugacuucucucagg

SEQ ID NO: 803219 - RNA, 22 nt, Human
cucugaggcuccaugcaggcuu

SEQ ID NO: 803220 - RNA, 22 nt, Human
ucccugcaguaggcagcccucc

SEQ ID NO: 803221 - RNA, 22 nt, Human
acauccauuuuguucaaaagca

SEQ ID NO: 803222 - RNA, 22 nt, Human
ugaucuuuccucuuguuugucu

SEQ ID NO: 803223 - RNA, 22 nt, Human
cacaugaguccugccagguaug

SEQ ID NO: 803224 - RNA, 22 nt, Human
agccagccccugacuguguccu

SEQ ID NO: 803225 - RNA, 22 nt, Human
cagcccugucuaugacugauga

SEQ ID NO: 803226 - RNA, 22 nt, Human
guuaaauucgaugauggauaaa

SEQ ID NO: 803227 - RNA, 22 nt, Human
aaaauuauagaucuagugccug

SEQ ID NO: 803228 - RNA, 16 nt, Human
gagggcagaggcggaa

SEQ ID NO: 803229 - RNA, 22 nt, Human
agucauuuucugccuguaaucu

SEQ ID NO: 803230 - RNA, 22 nt, Human
cgcuggggcuuuuugcuugaga

SEQ ID NO: 803231 - RNA, 22 nt, Human
gcuccuggcucuggccaaggga

SEQ ID NO: 803232 - RNA, 22 nt, Human
auaguuuuauagauauugugua

SEQ ID NO: 803233 - RNA, 22 nt, Human
uaacauucuuaacuuagaaaca

SEQ ID NO: 803234 - RNA, 22 nt, Human
acucuguaauucugaagcaccu

SEQ ID NO: 803235 - RNA, 22 nt, Human
acaggaugagaauaucauauuu

SEQ ID NO: 803236 - RNA, 22 nt, Human
aagucaaucaaggguguaggca

SEQ ID NO: 803237 - RNA, 22 nt, Human
gccaggcuggggggagaugucu

SEQ ID NO: 803238 - RNA, 22 nt, Human
uuuuacuuuggauacaguacuu

SEQ ID NO: 803239 - RNA, 22 nt, Human
accuggcacuacaggcaccugu

SEQ ID NO: 803240 - RNA, 22 nt, Human
ugauuaaaauuuaacuuaguua

SEQ ID NO: 803241 - RNA, 22 nt, Human
ccaggcagaaugaaaccccugu

SEQ ID NO: 803242 - RNA, 22 nt, Human
cugggagcaagaggcugcaaau

SEQ ID NO: 803243 - RNA, 22 nt, Human
gagcuaagcuauguuaugcagc

SEQ ID NO: 803244 - RNA, 22 nt, Human
auuguuuuaauuccauugugaa

SEQ ID NO: 803245 - RNA, 22 nt, Human
aaauacaaaaauuagccaggca

SEQ ID NO: 803246 - RNA, 22 nt, Human
aaauacauacacuguacguggc

SEQ ID NO: 803247 - RNA, 22 nt, Human
aaauaguuguuuggaucaauaa

SEQ ID NO: 803248 - RNA, 22 nt, Human
uuugacauuaaggaacauauau

SEQ ID NO: 803249 - RNA, 22 nt, Human
ccaggcagucaggguugugugu

SEQ ID NO: 803250 - RNA, 18 nt, Human
ugcauauacugccuaucu

SEQ ID NO: 803251 - RNA, 22 nt, Human
guucuuuaggggcccaauuucc

SEQ ID NO: 803252 - RNA, 22 nt, Human
gagucagaaacucacucuauag

SEQ ID NO: 803253 - RNA, 22 nt, Human
aauuacuuaagagaaacuuuga

SEQ ID NO: 803254 - RNA, 22 nt, Human
ccuugggucuaggccagggagu

SEQ ID NO: 803255 - RNA, 22 nt, Human
ccccagcucagugcagggacau

SEQ ID NO: 803256 - RNA, 22 nt, Human
ucuugugugguggaagauaugg

SEQ ID NO: 803257 - RNA, 22 nt, Human
ucaggcuugucucuagagcaau

SEQ ID NO: 803258 - RNA, 22 nt, Human
ucacaucugaaaaaauauugag

SEQ ID NO: 803259 - RNA, 22 nt, Human
caguuucucucaauaagcaucg

SEQ ID NO: 803260 - RNA, 22 nt, Human
aaaguuuucugccuucauuaga

SEQ ID NO: 803261 - RNA, 22 nt, Human
gauacaaauucaugucugaauu

SEQ ID NO: 803262 - RNA, 22 nt, Human
gagagcccuacaaggcguuuug

SEQ ID NO: 803263 - RNA, 22 nt, Human
gagucacauacuauguaauaga

SEQ ID NO: 803264 - RNA, 22 nt, Human
acaauacuuaccaauguuuuug

SEQ ID NO: 803265 - RNA, 22 nt, Human
uucguugcuuuaagccacuacg

SEQ ID NO: 803266 - RNA, 22 nt, Human
uucagaaugugaccuuauuugg

SEQ ID NO: 803267 - RNA, 22 nt, Human
agcugcaauuaaagacugugaa

SEQ ID NO: 803268 - RNA, 22 nt, Human
ggaggcggacacagguaguguu

SEQ ID NO: 803269 - RNA, 22 nt, Human
cagucucugccacuucuaagcu

SEQ ID NO: 803270 - RNA, 22 nt, Human
uuucugaagggcagcagacucu

SEQ ID NO: 803271 - RNA, 22 nt, Human
acucucccugagagggaggcau

SEQ ID NO: 803272 - RNA, 22 nt, Human
ucaggauggagggaagcacaga

SEQ ID NO: 803273 - RNA, 22 nt, Human
gaaucacacucguaagugaguu

SEQ ID NO: 803274 - RNA, 22 nt, Human
ugcagcuucucugcaacaggag

SEQ ID NO: 803275 - RNA, 22 nt, Human
ccaggagcgggaaaaggaagaa

SEQ ID NO: 803276 - RNA, 22 nt, Human
cacaucuucuuaacuccaaagu

SEQ ID NO: 803277 - RNA, 21 nt, Human
uggaggaauaaagcacagaag

SEQ ID NO: 803278 - RNA, 22 nt, Human
caggagguuguaagagcaggcc

SEQ ID NO: 803279 - RNA, 22 nt, Human
ucaauucuagagccuuacauug

SEQ ID NO: 803280 - RNA, 22 nt, Human
uuguauuaaaauguguuucugu

SEQ ID NO: 803281 - RNA, 21 nt, Human
acacaacaggcagucauuuuc

SEQ ID NO: 803282 - RNA, 22 nt, Human
aguaaaauuucugcugaggaga

SEQ ID NO: 803283 - RNA, 22 nt, Human
caggaggcagcgcucucaggac

SEQ ID NO: 803284 - RNA, 22 nt, Human
agggcccaugugggagcacuug

SEQ ID NO: 803285 - RNA, 22 nt, Human
gcuggcuggcgggugcguccuc

SEQ ID NO: 803286 - RNA, 22 nt, Human
ugagcuagggcuggugaggagc

SEQ ID NO: 803287 - RNA, 22 nt, Human
gaugcacggucaugucuuuuca

SEQ ID NO: 803288 - RNA, 22 nt, Human
gggcugugggacccggcacuuu

SEQ ID NO: 803289 - RNA, 20 nt, Human
agcuggccuguccuaggccu

SEQ ID NO: 803290 - RNA, 22 nt, Human
aagugcuuggcuaaugguuaug

SEQ ID NO: 803291 - RNA, 22 nt, Human
acaagcaguaaaggccacaguc

SEQ ID NO: 803292 - RNA, 22 nt, Human
aggcucagauucacauuugguu

SEQ ID NO: 803293 - RNA, 22 nt, Human
auuaguaaaacauuguauaugu

SEQ ID NO: 803294 - RNA, 22 nt, Human
uccaggagcauccaggugaagc

SEQ ID NO: 803295 - RNA, 22 nt, Human
cccuuuccauggcucuccuagg

SEQ ID NO: 803296 - RNA, 22 nt, Human
uaucacacuguuuuaauuacuu

SEQ ID NO: 803297 - RNA, 22 nt, Human
ccuacagacaaaccagugacua

SEQ ID NO: 803298 - RNA, 20 nt, Human
acugggagcuaacggagauu

SEQ ID NO: 803299 - RNA, 22 nt, Human
cuccaggacugaggacagagcu

SEQ ID NO: 803300 - RNA, 22 nt, Human
uucaguaucugcaaaaugggga

SEQ ID NO: 803301 - RNA, 22 nt, Human
ugugagaagggcaugcagggag

SEQ ID NO: 803302 - RNA, 22 nt, Human
gcuguggucugugagcuccaaa

SEQ ID NO: 803303 - RNA, 22 nt, Human
gacaggcuggcaaugcccugcu

SEQ ID NO: 803304 - RNA, 20 nt, Human
uugguugagccagggccugg

SEQ ID NO: 803305 - RNA, 22 nt, Human
aacaaugugaagugcuguucag

SEQ ID NO: 803306 - RNA, 22 nt, Human
ugggagucacuguuguugaggg

SEQ ID NO: 803307 - RNA, 22 nt, Human
aggcauggacauuucggcagcu

SEQ ID NO: 803308 - RNA, 21 nt, Human
uccucugcucucauaccacaa

SEQ ID NO: 803309 - RNA, 22 nt, Human
agcagcugcagggagggucugc

SEQ ID NO: 803310 - RNA, 22 nt, Human
uccuucagggcugaccacaggc

SEQ ID NO: 803311 - RNA, 22 nt, Human
ucugaaauauugguaauacuuu

SEQ ID NO: 803312 - RNA, 22 nt, Human
agcaggcuaaucuugcugaaca

SEQ ID NO: 803313 - RNA, 22 nt, Human
agaaacuauuaugguaaacaaa

SEQ ID NO: 803314 - RNA, 22 nt, Human
auacaaggucaugaagguuuac

SEQ ID NO: 803315 - RNA, 22 nt, Human
aaccaguuguauguccuccagc

SEQ ID NO: 803316 - RNA, 22 nt, Human
ucuuuaugccuaccugggaaga

SEQ ID NO: 803317 - RNA, 22 nt, Human
gugugcagaggcaggaggugcu

SEQ ID NO: 803318 - RNA, 22 nt, Human
ucuggggacggggcccagcaau

SEQ ID NO: 803319 - RNA, 22 nt, Human
auugucuuuaaaaauauacaac

SEQ ID NO: 803320 - RNA, 22 nt, Human
cuauuuuaacuugauuaccucu

SEQ ID NO: 803321 - RNA, 22 nt, Human
accagccugucugagucguggg

SEQ ID NO: 803322 - RNA, 22 nt, Human
cucuucaguuguugcauauucu

SEQ ID NO: 803323 - RNA, 22 nt, Human
aaacaguuguuauuuuuauaug

SEQ ID NO: 803324 - RNA, 19 nt, Human
uacagugaaccaggaggag

SEQ ID NO: 803325 - RNA, 22 nt, Human
acagcucacucacagggcuagu

SEQ ID NO: 803326 - RNA, 22 nt, Human
aucauaaagugcuaucugauug

SEQ ID NO: 803327 - RNA, 22 nt, Human
gagucuuugguaaagucugcug

SEQ ID NO: 803328 - RNA, 22 nt, Human
ucacaaaagcuuuugaauuugg

SEQ ID NO: 803329 - RNA, 22 nt, Human
gaagagaagguguaggccaucc

SEQ ID NO: 803330 - RNA, 22 nt, Human
aaugcucugucucugacagugg

SEQ ID NO: 803331 - RNA, 22 nt, Human
agaaggcugagacugggaugaa

SEQ ID NO: 803332 - RNA, 22 nt, Human
uauuuuacaaaugggaaugcug

SEQ ID NO: 803333 - RNA, 22 nt, Human
acaauuucuuauaguucaauuc

SEQ ID NO: 803334 - RNA, 22 nt, Human
ucaauaaaauuguuuuccuauc

SEQ ID NO: 803335 - RNA, 22 nt, Human
gcaggucuagaagcugccucug

SEQ ID NO: 803336 - RNA, 21 nt, Human
ggguggucugcugaagaggga

SEQ ID NO: 803337 - RNA, 18 nt, Human
cuccagagcugugagaca

SEQ ID NO: 803338 - RNA, 22 nt, Human
caggccuggagugcaauggcac

SEQ ID NO: 803339 - RNA, 22 nt, Human
cucuucaguuggucacuauucu

SEQ ID NO: 803340 - RNA, 22 nt, Human
ucagagucuuggcaauagguua

SEQ ID NO: 803341 - RNA, 20 nt, Human
ggcagagggccugggagaag

SEQ ID NO: 803342 - RNA, 22 nt, Human
aguggugagaccuggugcuuuc

SEQ ID NO: 803343 - RNA, 22 nt, Human
caugcauaugucaaaaaagcua

SEQ ID NO: 803344 - RNA, 22 nt, Human
caaauagauuguucaauccuga

SEQ ID NO: 803345 - RNA, 22 nt, Human
uacauuucagagcuccucucug

SEQ ID NO: 803346 - RNA, 22 nt, Human
auuuugaagggaauugaaguuc

SEQ ID NO: 803347 - RNA, 22 nt, Human
ugguggucaaagccaguguucu

SEQ ID NO: 803348 - RNA, 22 nt, Human
auguuaggcaaucuuucuuguu

SEQ ID NO: 803349 - RNA, 22 nt, Human
ugggcaggauaauaucucaugu

SEQ ID NO: 803350 - RNA, 22 nt, Human
cagaggugcuggagugaguccu

SEQ ID NO: 803351 - RNA, 22 nt, Human
uuuuuauaccaccucucacuua

SEQ ID NO: 803352 - RNA, 22 nt, Human
caggagcucuuaaggaugugau

SEQ ID NO: 803353 - RNA, 22 nt, Human
guguuuuauggagucauaacgu

SEQ ID NO: 803354 - RNA, 22 nt, Human
ugggaguguucuuggcuugcuu

SEQ ID NO: 803355 - RNA, 22 nt, Human
ugauucaauaggaauugaguag

SEQ ID NO: 803356 - RNA, 22 nt, Human
ugaaggaaagagggaacauccc

SEQ ID NO: 803357 - RNA, 22 nt, Human
cccaaccagaaauugacagaga

SEQ ID NO: 803358 - RNA, 22 nt, Human
uacacuuguucaaacagcaaaa

SEQ ID NO: 803359 - RNA, 22 nt, Human
gcagaagcagggcaggggcaaa

SEQ ID NO: 803360 - RNA, 22 nt, Human
uccuuacaacuuguuauuuuuc

SEQ ID NO: 803361 - RNA, 22 nt, Human
cuuuggcugacgaggaggaggc

SEQ ID NO: 803362 - RNA, 22 nt, Human
cuucaguguccucucuaguaga

SEQ ID NO: 803363 - RNA, 22 nt, Human
gcuccuguuuucuuccagaaau

SEQ ID NO: 803364 - RNA, 22 nt, Human
acagugauaaaauuucacaugu

SEQ ID NO: 803365 - RNA, 17 nt, Human
gcucugccucucccacc

SEQ ID NO: 803366 - RNA, 22 nt, Human
ucagagaagacaucauugugaa

SEQ ID NO: 803367 - RNA, 22 nt, Human
cugcaaggcuggggugagcugg

SEQ ID NO: 803368 - RNA, 22 nt, Human
acaauaacuucuguuuccuugc

SEQ ID NO: 803369 - RNA, 22 nt, Human
auucuuuacauuggcuucuucc

SEQ ID NO: 803370 - RNA, 22 nt, Human
uucugagaagggugggucuggc

SEQ ID NO: 803371 - RNA, 22 nt, Human
uggggaaacuauuuccuugucc

SEQ ID NO: 803372 - RNA, 22 nt, Human
ucagaaaaugaaauggacucuc

SEQ ID NO: 803373 - RNA, 22 nt, Human
uauauguguggauucuuguaga

SEQ ID NO: 803374 - RNA, 22 nt, Human
gccagaugccguaaagaugggc

SEQ ID NO: 803375 - RNA, 21 nt, Human
uuuaaggccagcaggagguga

SEQ ID NO: 803376 - RNA, 22 nt, Human
ucugagcuguaaguagacaagg

SEQ ID NO: 803377 - RNA, 22 nt, Human
uccaggccccugccugggccug

SEQ ID NO: 803378 - RNA, 22 nt, Human
augacucuccagagcugcagau

SEQ ID NO: 803379 - RNA, 22 nt, Human
ucaaagacuauauauuuuauuu

SEQ ID NO: 803380 - RNA, 22 nt, Human
ucugcacaggagggccguggug

SEQ ID NO: 803381 - RNA, 20 nt, Human
ccuggcugguggaggaaagg

SEQ ID NO: 803382 - RNA, 22 nt, Human
ggccucucuagcauccagccug

SEQ ID NO: 803383 - RNA, 22 nt, Human
ugaggaggucagagucuggcug

SEQ ID NO: 803384 - RNA, 22 nt, Human
ugaagcuuuaggauggguucau

SEQ ID NO: 803385 - RNA, 22 nt, Human
uuuccaaauaaggucacauucu

SEQ ID NO: 803386 - RNA, 22 nt, Human
cuggcuucagcugccaucaaug

SEQ ID NO: 803387 - RNA, 22 nt, Human
gcagcaggagaguuuguccugc

SEQ ID NO: 803388 - RNA, 22 nt, Human
auggagggugguaagacagaga

SEQ ID NO: 803389 - RNA, 22 nt, Human
uaaggcaggacuggauagcuau

SEQ ID NO: 803390 - RNA, 22 nt, Human
uuuauuaauguagcauccaugg

SEQ ID NO: 803391 - RNA, 22 nt, Human
augucugucuuuguacuccaca

SEQ ID NO: 803392 - RNA, 22 nt, Human
caguggcaugguugacugcagu

SEQ ID NO: 803393 - RNA, 22 nt, Human
caacauauuuuccaagagugaa

SEQ ID NO: 803394 - RNA, 22 nt, Human
acacaucaugccaaguuucacc

SEQ ID NO: 803395 - RNA, 22 nt, Human
aagcuuuaaggaauuuuaugga

SEQ ID NO: 803396 - RNA, 22 nt, Human
cuucucagcauuuugucagucu

SEQ ID NO: 803397 - RNA, 22 nt, Human
uguucuuaugaugaagcacuga

SEQ ID NO: 803398 - RNA, 22 nt, Human
cuuguaaaauauccaguuaagg

SEQ ID NO: 803399 - RNA, 20 nt, Human
uccagagaguggcaaagcuc

SEQ ID NO: 803400 - RNA, 22 nt, Human
uuaaauauuuucagcaggguca

SEQ ID NO: 803401 - RNA, 22 nt, Human
agcugcugccucacuggucugu

SEQ ID NO: 803402 - RNA, 22 nt, Human
aauaccuugcuguagccacgca

SEQ ID NO: 803403 - RNA, 22 nt, Human
aggaggugacagccugcaucug

SEQ ID NO: 803404 - RNA, 22 nt, Human
cagcuuuguggccuugaccucg

SEQ ID NO: 803405 - RNA, 22 nt, Human
uucuaaaaccaauucugcuucu

SEQ ID NO: 803406 - RNA, 22 nt, Human
ccugcccuucuuuccccagcau

SEQ ID NO: 803407 - RNA, 22 nt, Human
gggaagggacuuguuuaagguc

SEQ ID NO: 803408 - RNA, 22 nt, Human
cuuuaugacugaguugucaauu

SEQ ID NO: 803409 - RNA, 22 nt, Human
uucucaggcuguggagccgucu

SEQ ID NO: 803410 - RNA, 22 nt, Human
gcuggcugcuaggacagcuaca

SEQ ID NO: 803411 - RNA, 22 nt, Human
agagagaggcagcagugcucac

SEQ ID NO: 803412 - RNA, 22 nt, Human
ugcagcugccuagggcuggcuu

SEQ ID NO: 803413 - RNA, 22 nt, Human
uuucaugucugaauucuuuagu

SEQ ID NO: 803414 - RNA, 22 nt, Human
cucugacagguggcauuaucuc

SEQ ID NO: 803415 - RNA, 22 nt, Human
auuuuagagcuccaaguacagc

SEQ ID NO: 803416 - RNA, 23 nt, Human
ugcaaaauuugcagaguucgaug

SEQ ID NO: 803417 - RNA, 22 nt, Human
acaggcagagaacucagccaga

SEQ ID NO: 803418 - RNA, 22 nt, Human
gacaggaaaggggucuguuuuc

SEQ ID NO: 803419 - RNA, 22 nt, Human
aaggccaggcagggagcuguga

SEQ ID NO: 803420 - RNA, 22 nt, Human
aaauaagaaauucuucuuugca

SEQ ID NO: 803421 - RNA, 22 nt, Human
uaagaaacuaaugcaauaagag

SEQ ID NO: 803422 - RNA, 22 nt, Human
uggucaagauuacacacuggug

SEQ ID NO: 803423 - RNA, 22 nt, Human
cuccugggcugucggcgcucug

SEQ ID NO: 803424 - RNA, 22 nt, Human
ggcagugcaaggcagccuggau

SEQ ID NO: 803425 - RNA, 22 nt, Human
uaaaaucauucuggugucagua

SEQ ID NO: 803426 - RNA, 19 nt, Human
ugagugucacgucagugcc

SEQ ID NO: 803427 - RNA, 22 nt, Human
gugcaguugaagcauggggaga

SEQ ID NO: 803428 - RNA, 22 nt, Human
uugcagcugugagcuuuacacg

SEQ ID NO: 803429 - RNA, 22 nt, Human
uacaaagucuuggguucuaggc

SEQ ID NO: 803430 - RNA, 22 nt, Human
cagaggccaccuguggccacug

SEQ ID NO: 803431 - RNA, 22 nt, Human
cugguggagagugggcucugga

SEQ ID NO: 803432 - RNA, 22 nt, Human
gccacaugucaugugcucagua

SEQ ID NO: 803433 - RNA, 22 nt, Human
uucaguuuugcuuuuaaucaug

SEQ ID NO: 803434 - RNA, 22 nt, Human
ucccaggcuggcaggcagcagu

SEQ ID NO: 803435 - RNA, 22 nt, Human
cugguucauuagguauuagugg

SEQ ID NO: 803436 - RNA, 22 nt, Human
cuggcccaggagagcaggcauu

SEQ ID NO: 803437 - RNA, 22 nt, Human
agcuguggaagacugucagggu

SEQ ID NO: 803438 - RNA, 22 nt, Human
cccuuucccuucuggcucaggg

SEQ ID NO: 803439 - RNA, 22 nt, Human
ucagcagggaggcucugugccc

SEQ ID NO: 803440 - RNA, 22 nt, Human
gcaggcugagaguccaagaagg

SEQ ID NO: 803441 - RNA, 22 nt, Human
aaggcauugagcaguuacagua

SEQ ID NO: 803442 - RNA, 22 nt, Human
ucaugcuuauugcauauuugga

SEQ ID NO: 803443 - RNA, 22 nt, Human
ugaaacuaggccaaucaaauua

SEQ ID NO: 803444 - RNA, 22 nt, Human
ucccagggucaguggugaggcc

SEQ ID NO: 803445 - RNA, 22 nt, Human
uuuagaaugugacuguauuuga

SEQ ID NO: 803446 - RNA, 22 nt, Human
uuaguugauagccaaaauuuau

SEQ ID NO: 803447 - RNA, 22 nt, Human
aggccagggucccacacucgca

SEQ ID NO: 803448 - RNA, 22 nt, Human
guaaacaacacaaaucauuuga

SEQ ID NO: 803449 - RNA, 22 nt, Human
uugucugaaccaucucccuggc

SEQ ID NO: 803450 - RNA, 22 nt, Human
cccacaggcaggugcaugggcu

SEQ ID NO: 803451 - RNA, 22 nt, Human
uccagggauguccuguagcacu

SEQ ID NO: 803452 - RNA, 22 nt, Human
cacauccgaggagggugagaug

SEQ ID NO: 803453 - RNA, 22 nt, Human
gaagaaggaagaucaugcuuga

SEQ ID NO: 803454 - RNA, 20 nt, Human
auuguuucauuuaauguaca

SEQ ID NO: 803455 - RNA, 22 nt, Human
cagcagaguaauucucaccucu

SEQ ID NO: 803456 - RNA, 22 nt, Human
ccaggcucugccaggcccuuga

SEQ ID NO: 803457 - RNA, 22 nt, Human
cugccagcucaaagcgcagcua

SEQ ID NO: 803458 - RNA, 22 nt, Human
uccccagggcugcagagggugu

SEQ ID NO: 803459 - RNA, 22 nt, Human
ugcucacugaacucuugcuguc

SEQ ID NO: 803460 - RNA, 22 nt, Human
uauuuugacgauuuuaugcaaa

SEQ ID NO: 803461 - RNA, 22 nt, Human
uuucaaguuguugcauuaaaug

SEQ ID NO: 803462 - RNA, 22 nt, Human
ugagugaggcugggcagucccu

SEQ ID NO: 803463 - RNA, 22 nt, Human
cuggggagaagcgacucggcug

SEQ ID NO: 803464 - RNA, 22 nt, Human
agcaccugugugguagggaggu

SEQ ID NO: 803465 - RNA, 20 nt, Human
acguggccaccaguggcuua

SEQ ID NO: 803466 - RNA, 22 nt, Human
ugggaugaauacaaugggauca

SEQ ID NO: 803467 - RNA, 22 nt, Human
ugcacagaucugguggcaagga

SEQ ID NO: 803468 - RNA, 22 nt, Human
acacauacauggggaagaugag

SEQ ID NO: 803469 - RNA, 22 nt, Human
uccucugccaaagggaguugcc

SEQ ID NO: 803470 - RNA, 22 nt, Human
uggcaugauaggaggugcagaa

SEQ ID NO: 803471 - RNA, 22 nt, Human
ucuacagugucaaugugucuug

SEQ ID NO: 803472 - RNA, 22 nt, Human
ugucccuuuguguucugaaacu

SEQ ID NO: 803473 - RNA, 22 nt, Human
ggcacuggaagucccauugucu

SEQ ID NO: 803474 - RNA, 22 nt, Human
uagucuuucauuuggagcauuu

SEQ ID NO: 803475 - RNA, 22 nt, Human
ggaggcugagaggucgcagugg

SEQ ID NO: 803476 - RNA, 22 nt, Human
uugagaaauaagcaugucuaga

SEQ ID NO: 803477 - RNA, 22 nt, Human
gcagggaccaaaagaggcagua

SEQ ID NO: 803478 - RNA, 22 nt, Human
agccugccugugaggcuuugag

SEQ ID NO: 803479 - RNA, 22 nt, Human
uucauacucacuccaauaacug

SEQ ID NO: 803480 - RNA, 23 nt, Human
ggcagcuuauacuuucauagaca

SEQ ID NO: 803481 - RNA, 22 nt, Human
auuuacuggaaaaacuaugagc

SEQ ID NO: 803482 - RNA, 22 nt, Human
uuucuaguaaucaauauaaagu

SEQ ID NO: 803483 - RNA, 22 nt, Human
cacagguguguccuggucuugu

SEQ ID NO: 803484 - RNA, 22 nt, Human
aaagugauuaugcugucaaaga

SEQ ID NO: 803485 - RNA, 23 nt, Human
caguggucagaacgugggagggu

SEQ ID NO: 803486 - RNA, 22 nt, Human
uuucacauguauauaggcauua

SEQ ID NO: 803487 - RNA, 22 nt, Human
gcuccuggcaggcagugugugu

SEQ ID NO: 803488 - RNA, 22 nt, Human
auuuaauuuacauuugacagag

SEQ ID NO: 803489 - RNA, 22 nt, Human
uugauucauuuauugagugccu

SEQ ID NO: 803490 - RNA, 22 nt, Human
gccacagcccgagcaccaugag

SEQ ID NO: 803491 - RNA, 21 nt, Human
uccugccuuaguccagagcag

SEQ ID NO: 803492 - RNA, 22 nt, Human
ucauacaacuaagaguuucaga

SEQ ID NO: 803493 - RNA, 22 nt, Human
aggagccagcguuccucaggau

SEQ ID NO: 803494 - RNA, 22 nt, Human
gcaggcuucaagcacagcuuuu

SEQ ID NO: 803495 - RNA, 22 nt, Human
acagaaguggcuucaaagagca

SEQ ID NO: 803496 - RNA, 22 nt, Human
ucuauaaauuaugcagucucag

SEQ ID NO: 803497 - RNA, 22 nt, Human
uagucacaugaucacaggaucg

SEQ ID NO: 803498 - RNA, 22 nt, Human
gagggccuacuggacaugucag

SEQ ID NO: 803499 - RNA, 22 nt, Human
aaggaagagcaaagaauuaugu

SEQ ID NO: 803500 - RNA, 22 nt, Human
ggcuggcagaagugugcuggcu

SEQ ID NO: 803501 - RNA, 22 nt, Human
uaguacaguggcauucaaacuu

SEQ ID NO: 803502 - RNA, 22 nt, Human
uucaagucuuccaugguauucu

SEQ ID NO: 803503 - RNA, 22 nt, Human
ggcagauggaaugagcugucua

SEQ ID NO: 803504 - RNA, 22 nt, Human
ugccugggccuucccaccucug

SEQ ID NO: 803505 - RNA, 22 nt, Human
cuggcaggcggagguugcagug

SEQ ID NO: 803506 - RNA, 22 nt, Human
gugcuugcagugagaugagaug

SEQ ID NO: 803507 - RNA, 22 nt, Human
cccagguguuuguggcagaggu

SEQ ID NO: 803508 - RNA, 20 nt, Human
ccuggcugcauucaggacgg

SEQ ID NO: 803509 - RNA, 22 nt, Human
acaaugcaccagcaucuucacc

SEQ ID NO: 803510 - RNA, 22 nt, Human
uuuauugaguaucuacuaugug

SEQ ID NO: 803511 - RNA, 22 nt, Human
cuggaaguuuccuuccugguca

SEQ ID NO: 803512 - RNA, 22 nt, Human
auuucuguuugcuacuauaagu

SEQ ID NO: 803513 - RNA, 22 nt, Human
aaggcucccucuucucgagugu

SEQ ID NO: 803514 - RNA, 22 nt, Human
auucaucuguacuucaauaucu

SEQ ID NO: 803515 - RNA, 22 nt, Human
caauucuuucagcugcauuugu

SEQ ID NO: 803516 - RNA, 22 nt, Human
ccagcccugucaccaacuggag

SEQ ID NO: 803517 - RNA, 22 nt, Human
gagccccaggacagcucuaguu

SEQ ID NO: 803518 - RNA, 22 nt, Human
ccugggcuuucggcggcuuccu

SEQ ID NO: 803519 - RNA, 22 nt, Human
cagcuuuagagaaaacauauuu

SEQ ID NO: 803520 - RNA, 22 nt, Human
auucagcaguuccugcuucagu

SEQ ID NO: 803521 - RNA, 21 nt, Human
aaucaaaugucauauccccag

SEQ ID NO: 803522 - RNA, 22 nt, Human
uaaggaagucacaagaaucgcu

SEQ ID NO: 803523 - RNA, 22 nt, Human
ggccccagccucaguccccuga

SEQ ID NO: 803524 - RNA, 22 nt, Human
ugcaacuaggagguucuuagcu

SEQ ID NO: 803525 - RNA, 22 nt, Human
ugaaggcccagccacagaaugg

SEQ ID NO: 803526 - RNA, 22 nt, Human
ucagaauuggaacgugaagauu

SEQ ID NO: 803527 - RNA, 22 nt, Human
ugcagcugcaggagggugggag

SEQ ID NO: 803528 - RNA, 22 nt, Human
aaaaauagcuucucuugucccu

SEQ ID NO: 803529 - RNA, 22 nt, Human
aggagcuggaguccaggcaagu

SEQ ID NO: 803530 - RNA, 22 nt, Human
aucacaucucaccacugcaacc

SEQ ID NO: 803531 - RNA, 22 nt, Human
agcaaacagugugcuaagaaau

SEQ ID NO: 803532 - RNA, 22 nt, Human
cauggccagggcagauggcagg

SEQ ID NO: 803533 - RNA, 22 nt, Human
guuuccuuuuucugcccucaau

SEQ ID NO: 803534 - RNA, 22 nt, Human
cuggcccuggagggcugugcga

SEQ ID NO: 803535 - RNA, 22 nt, Human
agacagcaauaugggagacgga

SEQ ID NO: 803536 - RNA, 22 nt, Human
gcccaggccggagagcagugcu

SEQ ID NO: 803537 - RNA, 22 nt, Human
ucaggcugguccccacagugga

SEQ ID NO: 803538 - RNA, 22 nt, Human
ugccucugcugcuguggcauca

SEQ ID NO: 803539 - RNA, 22 nt, Human
aaaauucauuccucagacugcc

SEQ ID NO: 803540 - RNA, 22 nt, Human
ccuuggcuguguugccugcccu

SEQ ID NO: 803541 - RNA, 22 nt, Human
aacauucuuaagauuugugucu

SEQ ID NO: 803542 - RNA, 22 nt, Human
uuuauauagagauuugugcaug

SEQ ID NO: 803543 - RNA, 22 nt, Human
cugcagcuggcucaugggauau

SEQ ID NO: 803544 - RNA, 22 nt, Human
gggaggcuggcucuggccacag

SEQ ID NO: 803545 - RNA, 22 nt, Human
gagccagcagccggcaccacca

SEQ ID NO: 803546 - RNA, 22 nt, Human
cucagaaguucagccuagagua

SEQ ID NO: 803547 - RNA, 22 nt, Human
aaugcaagaucaaaucuaacac

SEQ ID NO: 803548 - RNA, 22 nt, Human
uuuuuucagccugucugugcca

SEQ ID NO: 803549 - RNA, 18 nt, Human
aaguaacagaagagcaca

SEQ ID NO: 803550 - RNA, 22 nt, Human
aagugauucuagucaugauucu

SEQ ID NO: 803551 - RNA, 22 nt, Human
ccggggugcgaggagcgucuuu

SEQ ID NO: 803552 - RNA, 22 nt, Human
cuuguaauagauaggaucaaau

SEQ ID NO: 803553 - RNA, 22 nt, Human
ugcaucuuuuuccaaguuuauu

SEQ ID NO: 803554 - RNA, 22 nt, Human
ccccaggagauuugggagcaca

SEQ ID NO: 803555 - RNA, 22 nt, Human
cagcuuugucugauuccucuuu

SEQ ID NO: 803556 - RNA, 22 nt, Human
auguuucugaaguuuacagaua

SEQ ID NO: 803557 - RNA, 22 nt, Human
aagugcaugguauggucuccau

SEQ ID NO: 803558 - RNA, 22 nt, Human
auucuuauuaaauagccagaag

SEQ ID NO: 803559 - RNA, 22 nt, Human
aucuuuggccacuugugcugca

SEQ ID NO: 803560 - RNA, 18 nt, Human
ugcaaauggcuguuugau

SEQ ID NO: 803561 - RNA, 22 nt, Human
ucaggcaccccuugaguagggg

SEQ ID NO: 803562 - RNA, 22 nt, Human
guggagggugagcucauguuug

SEQ ID NO: 803563 - RNA, 22 nt, Human
uuuugucagugagaacagaguu

SEQ ID NO: 803564 - RNA, 22 nt, Human
aaagugcacucucagugcugcu

SEQ ID NO: 803565 - RNA, 22 nt, Human
cuuuuccuauugauucuguuac

SEQ ID NO: 803566 - RNA, 22 nt, Human
cuguccccugugcuuucacuug

SEQ ID NO: 803567 - RNA, 22 nt, Human
uuccauuuggcacuucacugag

SEQ ID NO: 803568 - RNA, 22 nt, Human
cagggcagggauguugcggcag

SEQ ID NO: 803569 - RNA, 22 nt, Human
acuuuacaauauccugugacuu

SEQ ID NO: 803570 - RNA, 22 nt, Human
ugauuaaguucaaaauauagaa

SEQ ID NO: 803571 - RNA, 22 nt, Human
ucauacaucuuguauaucuauc

SEQ ID NO: 803572 - RNA, 22 nt, Human
acaguuuaggaugagagaacac

SEQ ID NO: 803573 - RNA, 22 nt, Human
ucuacauuuucuuuauguacau

SEQ ID NO: 803574 - RNA, 17 nt, Human
ugaguggccgggggaca

SEQ ID NO: 803575 - RNA, 22 nt, Human
cucuucaguaaaugacacuguu

SEQ ID NO: 803576 - RNA, 22 nt, Human
uugcuuauuugauuaaaugucu

SEQ ID NO: 803577 - RNA, 22 nt, Human
caggccagagcgcgugguuggg

SEQ ID NO: 803578 - RNA, 22 nt, Human
caagagcucaccggagagcauu

SEQ ID NO: 803579 - RNA, 22 nt, Human
acuggcugaaguuuacuuuuug

SEQ ID NO: 803580 - RNA, 22 nt, Human
ccugugcuggcuuuauucucag

SEQ ID NO: 803581 - RNA, 22 nt, Human
gggaugagaguagggugugaaa

SEQ ID NO: 803582 - RNA, 22 nt, Human
gagguggcuggcucagagccag

SEQ ID NO: 803583 - RNA, 22 nt, Human
caccugagugucaguauucuca

SEQ ID NO: 803584 - RNA, 22 nt, Human
ugcuuaaaaacaguaugguagu

SEQ ID NO: 803585 - RNA, 19 nt, Human
uuccacuuggguuagaauu

SEQ ID NO: 803586 - RNA, 22 nt, Human
ugcauguuaagaaaauauugag

SEQ ID NO: 803587 - RNA, 22 nt, Human
ccaggcugcuguugguguccgc

SEQ ID NO: 803588 - RNA, 22 nt, Human
ccuguuuaucuaucuagagaug

SEQ ID NO: 803589 - RNA, 22 nt, Human
agucaagauucuggcacuagca

SEQ ID NO: 803590 - RNA, 22 nt, Human
ucuucaaaugcuaguaauauca

SEQ ID NO: 803591 - RNA, 22 nt, Human
aggcuugguuuauagaaguaau

SEQ ID NO: 803592 - RNA, 22 nt, Human
gcuuaaaauccaugauuuuuac

SEQ ID NO: 803593 - RNA, 22 nt, Human
gcucagagcccgaggcuugcau

SEQ ID NO: 803594 - RNA, 22 nt, Human
ugcacaccucuccaccacucuc

SEQ ID NO: 803595 - RNA, 19 nt, Human
ggacacagaaagcugcauu

SEQ ID NO: 803596 - RNA, 22 nt, Human
gcaggcugggguagccccacuu

SEQ ID NO: 803597 - RNA, 22 nt, Human
aaaaaugaauucuucaguggca

SEQ ID NO: 803598 - RNA, 22 nt, Human
ccaggccucaccugcccaccua

SEQ ID NO: 803599 - RNA, 22 nt, Human
gagcuuugaucgcuaagccuca

SEQ ID NO: 803600 - RNA, 22 nt, Human
caggccaggugcucuagaauca

SEQ ID NO: 803601 - RNA, 22 nt, Human
uaaacaugcccagugacaggga

SEQ ID NO: 803602 - RNA, 21 nt, Human
agucuucuccagaggcugggg

SEQ ID NO: 803603 - RNA, 19 nt, Human
agugaaauggaguauucaa

SEQ ID NO: 803604 - RNA, 22 nt, Human
aauagacauuauuucucuauga

SEQ ID NO: 803605 - RNA, 21 nt, Human
ugcagcugacacugguaugcc

SEQ ID NO: 803606 - RNA, 22 nt, Human
uucagugugccuaagucaguug

SEQ ID NO: 803607 - RNA, 22 nt, Human
ccacagggccuuuccugcuggc

SEQ ID NO: 803608 - RNA, 22 nt, Human
agccuggcacugccccauccau

SEQ ID NO: 803609 - RNA, 22 nt, Human
auuuccaguacuauuuucugcu

SEQ ID NO: 803610 - RNA, 22 nt, Human
guuucucaaauuauuucagcuu

SEQ ID NO: 803611 - RNA, 18 nt, Human
cuggagucacagugggga

SEQ ID NO: 803612 - RNA, 22 nt, Human
ucuuuguguucaggagccacgu

SEQ ID NO: 803613 - RNA, 22 nt, Human
gaagccaggggccugacaggca

SEQ ID NO: 803614 - RNA, 22 nt, Human
caauaauauccugugcuguuug

SEQ ID NO: 803615 - RNA, 22 nt, Human
ccagggucuucgaggcagcaau

SEQ ID NO: 803616 - RNA, 22 nt, Human
ugcuuccaguuccucaccacau

SEQ ID NO: 803617 - RNA, 22 nt, Human
uuacuguaaaggucacauggug

SEQ ID NO: 803618 - RNA, 20 nt, Human
caaggcagaccagagugagu

SEQ ID NO: 803619 - RNA, 22 nt, Human
cugggcugcaggaguggggcaa

SEQ ID NO: 803620 - RNA, 22 nt, Human
cucuccaggagcucagagucua

SEQ ID NO: 803621 - RNA, 22 nt, Human
aggggaaaucucucgccaucug

SEQ ID NO: 803622 - RNA, 22 nt, Human
gagcuggcugugguugagugca

SEQ ID NO: 803623 - RNA, 22 nt, Human
aagcacaggagacgcacagcca

SEQ ID NO: 803624 - RNA, 22 nt, Human
caugcaggucuggagcuugggg

SEQ ID NO: 803625 - RNA, 22 nt, Human
acaguguacuccuuuaccggag

SEQ ID NO: 803626 - RNA, 22 nt, Human
guuucuuuugugaucaccaacc

SEQ ID NO: 803627 - RNA, 22 nt, Human
uccaggagguugagugaguucc

SEQ ID NO: 803628 - RNA, 22 nt, Human
cuggcuggucugagcagucgca

SEQ ID NO: 803629 - RNA, 22 nt, Human
cagugaguucaucaagacauga

SEQ ID NO: 803630 - RNA, 22 nt, Human
uuucuucuugaguaaccagauu

SEQ ID NO: 803631 - RNA, 22 nt, Human
cccucugccugcgcccuggugu

SEQ ID NO: 803632 - RNA, 21 nt, Human
gcagggacaaagcuucaggag

SEQ ID NO: 803633 - RNA, 22 nt, Human
augaauaaaacauuuuaaucag

SEQ ID NO: 803634 - RNA, 22 nt, Human
uaaaucacuguacuuuauuccu

SEQ ID NO: 803635 - RNA, 20 nt, Human
cacaggaaagcuacucaguu

SEQ ID NO: 803636 - RNA, 22 nt, Human
agcagggggcauccuugcccuu

SEQ ID NO: 803637 - RNA, 22 nt, Human
ugacaaaccaguagcaauaaag

SEQ ID NO: 803638 - RNA, 22 nt, Human
uaagucaguagaacugugguca

SEQ ID NO: 803639 - RNA, 20 nt, Human
aacauugcuucaauguaacc

SEQ ID NO: 803640 - RNA, 22 nt, Human
cagcauggguuccgggggccug

SEQ ID NO: 803641 - RNA, 22 nt, Human
auuagaaugacagaaaugaggc

SEQ ID NO: 803642 - RNA, 22 nt, Human
uaagaguuagggcuagcaauau

SEQ ID NO: 803643 - RNA, 22 nt, Human
auaaccuuggcuaguauugugc

SEQ ID NO: 803644 - RNA, 22 nt, Human
cuauaaaucuacccagcauugg

SEQ ID NO: 803645 - RNA, 22 nt, Human
caggguccccgggucuccugug

SEQ ID NO: 803646 - RNA, 22 nt, Human
gaaaauaggcugcaucuccuuc

SEQ ID NO: 803647 - RNA, 22 nt, Human
auacaguauaacuaauaaaccc

SEQ ID NO: 803648 - RNA, 22 nt, Human
cagcuuggaggaggaucuaaga

SEQ ID NO: 803649 - RNA, 22 nt, Human
cauugagaaucugggcuacagc

SEQ ID NO: 803650 - RNA, 22 nt, Human
ucuuuuguagcuaacacauuca

SEQ ID NO: 803651 - RNA, 22 nt, Human
gcuaugaacaugagaaugcaaa

SEQ ID NO: 803652 - RNA, 19 nt, Human
gcuaggugaccagcuggau

SEQ ID NO: 803653 - RNA, 22 nt, Human
cugacagaugcugcuggcagua

SEQ ID NO: 803654 - RNA, 22 nt, Human
uggggugagauucagauauuca

SEQ ID NO: 803655 - RNA, 22 nt, Human
caucuuugaacucuguauaaac

SEQ ID NO: 803656 - RNA, 23 nt, Human
ugcugggguaguuuguggcacag

SEQ ID NO: 803657 - RNA, 22 nt, Human
acagcagguuacaguggcacag

SEQ ID NO: 803658 - RNA, 22 nt, Human
cugaccaggguagaggugagag

SEQ ID NO: 803659 - RNA, 22 nt, Human
uguuuugguuuucaccgagucc

SEQ ID NO: 803660 - RNA, 22 nt, Human
gccaguggguaguuggagcugg

SEQ ID NO: 803661 - RNA, 22 nt, Human
ggcagcacugcagcuuguuggg

SEQ ID NO: 803662 - RNA, 22 nt, Human
guccugugggcccaccaugagc

SEQ ID NO: 803663 - RNA, 22 nt, Human
ccucagggccaucucugucccu

SEQ ID NO: 803664 - RNA, 22 nt, Human
acucuguagccuguaagagagc

SEQ ID NO: 803665 - RNA, 22 nt, Human
ccaggacagugaacauguaaga

SEQ ID NO: 803666 - RNA, 22 nt, Human
aaaaauguuaucuacuguccga

SEQ ID NO: 803667 - RNA, 22 nt, Human
uccucccugcacucagugaagu

SEQ ID NO: 803668 - RNA, 22 nt, Human
aggcugugagaaguccuucagu

SEQ ID NO: 803669 - RNA, 22 nt, Human
gaugaacauauuccucuccaga

SEQ ID NO: 803670 - RNA, 19 nt, Human
ccaggagcaguggugagcu

SEQ ID NO: 803671 - RNA, 22 nt, Human
gugcuagggacaaagcagugaa

SEQ ID NO: 803672 - RNA, 22 nt, Human
aaugugucccuuauuucacagg

SEQ ID NO: 803673 - RNA, 22 nt, Human
ucugagagauacaaggaggcaa

SEQ ID NO: 803674 - RNA, 22 nt, Human
caaagucauaaaacuuguaagu

SEQ ID NO: 803675 - RNA, 22 nt, Human
auuucagauucagaaauguagg

SEQ ID NO: 803676 - RNA, 22 nt, Human
gaauuggggguuuugcaaggca

SEQ ID NO: 803677 - RNA, 22 nt, Human
gggugggaucuguggagccuca

SEQ ID NO: 803678 - RNA, 22 nt, Human
aaacugcaauuauuuuugcaau

SEQ ID NO: 803679 - RNA, 22 nt, Human
cugcagaggguuugagcauccu

SEQ ID NO: 803680 - RNA, 22 nt, Human
gaggagcuguucccucaccucu

SEQ ID NO: 803681 - RNA, 22 nt, Human
uuagauaauguagagauaugag

SEQ ID NO: 803682 - RNA, 21 nt, Human
uucuucaugaugauuaauggc

SEQ ID NO: 803683 - RNA, 22 nt, Human
ugacucuuaaauauacuguuga

SEQ ID NO: 803684 - RNA, 22 nt, Human
ucucuucuugauuuucacugga

SEQ ID NO: 803685 - RNA, 20 nt, Human
cuugcccagggucuccugcc

SEQ ID NO: 803686 - RNA, 22 nt, Human
ucaguguaaguuauguagaugu

SEQ ID NO: 803687 - RNA, 22 nt, Human
cagugcuuuuuuaccuuccaac

SEQ ID NO: 803688 - RNA, 22 nt, Human
ucagggcagguuaacuugggug

SEQ ID NO: 803689 - RNA, 22 nt, Human
agcuguggcagcagccguggca

SEQ ID NO: 803690 - RNA, 22 nt, Human
ccuccugggcuccugucugcac

SEQ ID NO: 803691 - RNA, 22 nt, Human
gcugugagggcuucugaggcau

SEQ ID NO: 803692 - RNA, 19 nt, Human
ucuaaacacagggacaagc

SEQ ID NO: 803693 - RNA, 22 nt, Human
auauuaauuauuuacacaugag

SEQ ID NO: 803694 - RNA, 22 nt, Human
cccaggcagccugcagggaagg

SEQ ID NO: 803695 - RNA, 22 nt, Human
ucaguguuacauuauauagaac

SEQ ID NO: 803696 - RNA, 22 nt, Human
auguauuucuauguagugaaga

SEQ ID NO: 803697 - RNA, 22 nt, Human
ugauaaacuggagagguggagg

SEQ ID NO: 803698 - RNA, 22 nt, Human
agucucuuuugcgaagaguguu

SEQ ID NO: 803699 - RNA, 22 nt, Human
uguucugggguugagagacaau

SEQ ID NO: 803700 - RNA, 22 nt, Human
aacugcaagaguaaaugucuag

SEQ ID NO: 803701 - RNA, 22 nt, Human
acauuugagcauauuucuuguc

SEQ ID NO: 803702 - RNA, 22 nt, Human
uuagcuaaacuguaacuagaau

SEQ ID NO: 803703 - RNA, 22 nt, Human
agcaggguuccuuaaggccaua

SEQ ID NO: 803704 - RNA, 18 nt, Human
agucuucugauccauuuu

SEQ ID NO: 803705 - RNA, 22 nt, Human
cacuggaaguucauucucagaa

SEQ ID NO: 803706 - RNA, 22 nt, Human
caucagagugguggccuggugu

SEQ ID NO: 803707 - RNA, 22 nt, Human
gcugggcuguaguuugcugacc

SEQ ID NO: 803708 - RNA, 23 nt, Human
ugccacccuucucuucccagcuu

SEQ ID NO: 803709 - RNA, 22 nt, Human
ugaaacauuauagaauauuuau

SEQ ID NO: 803710 - RNA, 19 nt, Human
aaaucagaaucugcauuuu

SEQ ID NO: 803711 - RNA, 22 nt, Human
ggcugugguggcaucccugagc

SEQ ID NO: 803712 - RNA, 22 nt, Human
cagagauuauuauaacuaauua

SEQ ID NO: 803713 - RNA, 22 nt, Human
uugcaaaucagaaguauagauu

SEQ ID NO: 803714 - RNA, 23 nt, Human
uccucccaaauuucagccucauu

SEQ ID NO: 803715 - RNA, 22 nt, Human
ucucaaggacuuugggcacuaa

SEQ ID NO: 803716 - RNA, 22 nt, Human
auauuaaugagcaaguaaguga

SEQ ID NO: 803717 - RNA, 22 nt, Human
caagcaggaugaagcccaggga

SEQ ID NO: 803718 - RNA, 23 nt, Human
uggggagggaagucauuucugua

SEQ ID NO: 803719 - RNA, 22 nt, Human
cucugcugucucagaugggcca

SEQ ID NO: 803720 - RNA, 19 nt, Human
gccugccuggguuucugag

SEQ ID NO: 803721 - RNA, 22 nt, Human
ggcucccugggugcuccugcuc

SEQ ID NO: 803722 - RNA, 22 nt, Human
uauauuauaagcccuuucagaa

SEQ ID NO: 803723 - RNA, 22 nt, Human
uggucagaacucagcgugcuug

SEQ ID NO: 803724 - RNA, 22 nt, Human
aagcaggcuagauugaagggcu

SEQ ID NO: 803725 - RNA, 22 nt, Human
uucaguguauauuuuuugagua

SEQ ID NO: 803726 - RNA, 22 nt, Human
caggcucagaagccaguggagc

SEQ ID NO: 803727 - RNA, 22 nt, Human
agaaaagguugaaaguaggauu

SEQ ID NO: 803728 - RNA, 19 nt, Human
acuccagggaugacagaag

SEQ ID NO: 803729 - RNA, 22 nt, Human
ugcagccuugccuccucccagc

SEQ ID NO: 803730 - RNA, 22 nt, Human
caggcuccuucccagggauggu

SEQ ID NO: 803731 - RNA, 20 nt, Human
aacucagagaugaaaaagac

SEQ ID NO: 803732 - RNA, 22 nt, Human
ucaccuaauugaagucaggagu

SEQ ID NO: 803733 - RNA, 22 nt, Human
gccccaggauaaauuuguaaga

SEQ ID NO: 803734 - RNA, 22 nt, Human
gaaaauguuuccuguuauuugc

SEQ ID NO: 803735 - RNA, 22 nt, Human
aaaugcuugcucuugauuauuu

SEQ ID NO: 803736 - RNA, 22 nt, Human
ucaguucuuuauuucacaguga

SEQ ID NO: 803737 - RNA, 22 nt, Human
gaguccaguuguucacagaggc

SEQ ID NO: 803738 - RNA, 22 nt, Human
ccacaggcggaguggcgggcag

SEQ ID NO: 803739 - RNA, 22 nt, Human
cugggagcuggaaugggagaag

SEQ ID NO: 803740 - RNA, 22 nt, Human
auaaacaguaaaugugagcagu

SEQ ID NO: 803741 - RNA, 22 nt, Human
uaggcuuguuacaaaacaguca

SEQ ID NO: 803742 - RNA, 22 nt, Human
gggagcauaaacucagauuuca

SEQ ID NO: 803743 - RNA, 22 nt, Human
aaucaagucaaccaucaugugc

SEQ ID NO: 803744 - RNA, 20 nt, Human
uauauuuucucuuuggccuu

SEQ ID NO: 803745 - RNA, 22 nt, Human
uacagagggauuaucuaagggu

SEQ ID NO: 803746 - RNA, 22 nt, Human
gugcucuaggaccuuagaagug

SEQ ID NO: 803747 - RNA, 22 nt, Human
gcagagcuguuaauggagcuga

SEQ ID NO: 803748 - RNA, 22 nt, Human
aaucaggagugugcacuuugau

SEQ ID NO: 803749 - RNA, 22 nt, Human
cugaguuuccagauaagaccuu

SEQ ID NO: 803750 - RNA, 22 nt, Human
gcccucagcauccucagggcca

SEQ ID NO: 803751 - RNA, 22 nt, Human
caguguggagggagagagccug

SEQ ID NO: 803752 - RNA, 22 nt, Human
gaggaccuuuaguagaagugca

SEQ ID NO: 803753 - RNA, 22 nt, Human
cugggcugcuguccacuagggu

SEQ ID NO: 803754 - RNA, 21 nt, Human
gcuggcuuuccuggaugugca

SEQ ID NO: 803755 - RNA, 22 nt, Human
uauuugaaggcauacauuuuga

SEQ ID NO: 803756 - RNA, 22 nt, Human
gccuggcauuacagcacuccug

SEQ ID NO: 803757 - RNA, 22 nt, Human
aauaacuucaucuucaggauag

SEQ ID NO: 803758 - RNA, 20 nt, Human
uucuugagccaaaaggcaua

SEQ ID NO: 803759 - RNA, 22 nt, Human
ucaggcagaguggaagcugcaa

SEQ ID NO: 803760 - RNA, 22 nt, Human
uuuacauguaauguuauacaaa

SEQ ID NO: 803761 - RNA, 22 nt, Human
gccugcugccacccuggcuccg

SEQ ID NO: 803762 - RNA, 21 nt, Human
cacaugcaugcacagguugua

SEQ ID NO: 803763 - RNA, 22 nt, Human
caucaggaaaggacgucuagcc

SEQ ID NO: 803764 - RNA, 22 nt, Human
ugggucacuauuugcagagacg

SEQ ID NO: 803765 - RNA, 22 nt, Human
auuauucagucuuguaaggagu

SEQ ID NO: 803766 - RNA, 22 nt, Human
ucaguauuccuggaaauacaag

SEQ ID NO: 803767 - RNA, 22 nt, Human
gucccuggagcugagcagugcu

SEQ ID NO: 803768 - RNA, 22 nt, Human
uaguuuuaugaauugguauaau

SEQ ID NO: 803769 - RNA, 20 nt, Human
auguucuucauuuaauguuc

SEQ ID NO: 803770 - RNA, 22 nt, Human
aggcaagcagucagucuaugag

SEQ ID NO: 803771 - RNA, 22 nt, Human
guucacauccuugugaggauuu

SEQ ID NO: 803772 - RNA, 19 nt, Human
cucuuggguggcagaggcc

SEQ ID NO: 803773 - RNA, 18 nt, Human
cugucccauccucagguu

SEQ ID NO: 803774 - RNA, 22 nt, Human
gcagggcuaggucuucuagggc

SEQ ID NO: 803775 - RNA, 22 nt, Human
agucuacaguucccucaggucc

SEQ ID NO: 803776 - RNA, 22 nt, Human
aggcuggcaaggcagaugugug

SEQ ID NO: 803777 - RNA, 22 nt, Human
uaguuaaagauucuguuaagag

SEQ ID NO: 803778 - RNA, 22 nt, Human
ccuggccuccuggccuucucau

SEQ ID NO: 803779 - RNA, 22 nt, Human
ucuugggcauguguuugauuuc

SEQ ID NO: 803780 - RNA, 22 nt, Human
acaggcugguuuguaaaagaug

SEQ ID NO: 803781 - RNA, 22 nt, Human
agaagcagggcagggaaaagca

SEQ ID NO: 803782 - RNA, 22 nt, Human
uuuuucaucugauugauaacuc

SEQ ID NO: 803783 - RNA, 22 nt, Human
uuucauugaugggugauagaaa

SEQ ID NO: 803784 - RNA, 22 nt, Human
aaggccagaguugaacugcucc

SEQ ID NO: 803785 - RNA, 22 nt, Human
cagagcugagaauguugaugcu

SEQ ID NO: 803786 - RNA, 22 nt, Human
ucauguauuugugauagaugac

SEQ ID NO: 803787 - RNA, 18 nt, Human
aucuuuccauagcauguu

SEQ ID NO: 803788 - RNA, 22 nt, Human
ucucaggagccacagcgggagu

SEQ ID NO: 803789 - RNA, 22 nt, Human
uacaaagugaaauaauucugag

SEQ ID NO: 803790 - RNA, 22 nt, Human
gacuccaggugcaggaggagcc

SEQ ID NO: 803791 - RNA, 22 nt, Human
acaaauagaaaaucuggauugg

SEQ ID NO: 803792 - RNA, 22 nt, Human
acaguguauauuguuuaucugg

SEQ ID NO: 803793 - RNA, 22 nt, Human
ggcagcagggcugucucccuac

SEQ ID NO: 803794 - RNA, 22 nt, Human
gcccucagaguuccccacagug

SEQ ID NO: 803795 - RNA, 18 nt, Human
cuuguucuucucuuggcg

SEQ ID NO: 803796 - RNA, 22 nt, Human
cucugggcaggacgccaggccu

SEQ ID NO: 803797 - RNA, 22 nt, Human
agggcuggcuaggugcguuccc

SEQ ID NO: 803798 - RNA, 22 nt, Human
cagccccucacagagcuguccu

SEQ ID NO: 803799 - RNA, 22 nt, Human
cagaguggagauguguguggaa

SEQ ID NO: 803800 - RNA, 22 nt, Human
aggcuggcuuggcucuccugug

SEQ ID NO: 803801 - RNA, 22 nt, Human
uguaaacaaaugcauucuugcu

SEQ ID NO: 803802 - RNA, 22 nt, Human
acagaggaagcauauagcacaa

SEQ ID NO: 803803 - RNA, 22 nt, Human
gagcucuuauaguucuagcagu

SEQ ID NO: 803804 - RNA, 20 nt, Human
uccuggccuucucgggcagu

SEQ ID NO: 803805 - RNA, 22 nt, Human
auugagaaaggcuuauguuugc

SEQ ID NO: 803806 - RNA, 22 nt, Human
uuuuaaugggcgacuauuaugg

SEQ ID NO: 803807 - RNA, 22 nt, Human
uacuguuagagccagaaaccua

SEQ ID NO: 803808 - RNA, 23 nt, Human
gcugugcacgagccacugccugu

SEQ ID NO: 803809 - RNA, 22 nt, Human
aacuccagugucagcugcaaug

SEQ ID NO: 803810 - RNA, 22 nt, Human
ucugcagcuuuuugguggggug

SEQ ID NO: 803811 - RNA, 22 nt, Human
gaaggcuuccugaugccaacca

SEQ ID NO: 803812 - RNA, 22 nt, Human
uaaggcccgugaguuucauauc

SEQ ID NO: 803813 - RNA, 17 nt, Human
auaaaggcaaguauuau

SEQ ID NO: 803814 - RNA, 22 nt, Human
agcaaaauaagguaauuuauug

SEQ ID NO: 803815 - RNA, 22 nt, Human
ucuguagguuaaaaguagacaa

SEQ ID NO: 803816 - RNA, 22 nt, Human
ugcaggguagaugcaggcugug

SEQ ID NO: 803817 - RNA, 22 nt, Human
caggcugcggucggcucugguc

SEQ ID NO: 803818 - RNA, 22 nt, Human
gcaaaugcucuccagccugggu

SEQ ID NO: 803819 - RNA, 22 nt, Human
uaauaauuggcuaacccuggga

SEQ ID NO: 803820 - RNA, 22 nt, Human
auugucuuuggugcuuccagga

SEQ ID NO: 803821 - RNA, 23 nt, Human
ucccuguguacagccugcaugag

SEQ ID NO: 803822 - RNA, 22 nt, Human
aaggcuccuuuguaguucuuuu

SEQ ID NO: 803823 - RNA, 22 nt, Human
gaauacaaacuuaaggcuuuac

SEQ ID NO: 803824 - RNA, 22 nt, Human
ucaucuaagagucuuacauuua

SEQ ID NO: 803825 - RNA, 22 nt, Human
uccucagagcauagcgcugucu

SEQ ID NO: 803826 - RNA, 22 nt, Human
agccagcuucuuuacgguggca

SEQ ID NO: 803827 - RNA, 22 nt, Human
cuauauauaucaucuuccaguu

SEQ ID NO: 803828 - RNA, 22 nt, Human
uguuucuagagaaaauauuuac

SEQ ID NO: 803829 - RNA, 22 nt, Human
uuucacauagaaagugauuuac

SEQ ID NO: 803830 - RNA, 22 nt, Human
ugggagccauuuuagaggcugc

SEQ ID NO: 803831 - RNA, 22 nt, Human
aauacuuuugaacugaaaggca

SEQ ID NO: 803832 - RNA, 22 nt, Human
uagggcuggguacacucuugcc

SEQ ID NO: 803833 - RNA, 22 nt, Human
uuccaggacucguucuggcuca

SEQ ID NO: 803834 - RNA, 22 nt, Human
cucuggucuucaaggccaccuc

SEQ ID NO: 803835 - RNA, 22 nt, Human
aagaacuuugauuucauugcau

SEQ ID NO: 803836 - RNA, 22 nt, Human
ucaggguucuuucaguuaaguu

SEQ ID NO: 803837 - RNA, 22 nt, Human
ucuaaacacuaagucuugaugc

SEQ ID NO: 803838 - RNA, 22 nt, Human
gccuucucugugagcuccuagg

SEQ ID NO: 803839 - RNA, 22 nt, Human
auuuccauguccaaaaauuagu

SEQ ID NO: 803840 - RNA, 22 nt, Human
gggaggucagggugccugcugg

SEQ ID NO: 803841 - RNA, 22 nt, Human
ccucuacuuaccacucagccag

SEQ ID NO: 803842 - RNA, 22 nt, Human
gggccuccgugugcuggugcuc

SEQ ID NO: 803843 - RNA, 22 nt, Human
ugcuggcuggccuggccuggac

SEQ ID NO: 803844 - RNA, 22 nt, Human
gcagcaggcacuuaccguugcu

SEQ ID NO: 803845 - RNA, 22 nt, Human
guccacagcuggccagggccuc

SEQ ID NO: 803846 - RNA, 16 nt, Human
gcacugggaugucuuc

SEQ ID NO: 803847 - RNA, 22 nt, Human
uuuuucugagaauaugagagga

SEQ ID NO: 803848 - RNA, 22 nt, Human
uuguacacaauucuuaacauac

SEQ ID NO: 803849 - RNA, 22 nt, Human
ugccuggcugggcugcucaugg

SEQ ID NO: 803850 - RNA, 22 nt, Human
caagucaucauagaaguucccc

SEQ ID NO: 803851 - RNA, 22 nt, Human
gcuggcuguguuucaucucuga

SEQ ID NO: 803852 - RNA, 22 nt, Human
cugggcagcuaccaccacugcu

SEQ ID NO: 803853 - RNA, 22 nt, Human
guuuuccugagcccagagaugc

SEQ ID NO: 803854 - RNA, 22 nt, Human
aggcccuggcacugccugggag

SEQ ID NO: 803855 - RNA, 22 nt, Human
uggcagagcuggcugcggauga

SEQ ID NO: 803856 - RNA, 22 nt, Human
caaagcaagggcugaagacucc

SEQ ID NO: 803857 - RNA, 22 nt, Human
gcaggggcugcugggaacucgg

SEQ ID NO: 803858 - RNA, 22 nt, Human
gggaggcugccauccuucagga

SEQ ID NO: 803859 - RNA, 20 nt, Human
accuccuggaagcaggugcc

SEQ ID NO: 803860 - RNA, 22 nt, Human
gugggcagagcaagggaacuca

SEQ ID NO: 803861 - RNA, 22 nt, Human
acacuucagcaguaugcuuggg

SEQ ID NO: 803862 - RNA, 22 nt, Human
uugcagcuccauuuuaauggcu

SEQ ID NO: 803863 - RNA, 22 nt, Human
cauuuauugaguggccacagug

SEQ ID NO: 803864 - RNA, 22 nt, Human
uggcaggaaauacccugccuag

SEQ ID NO: 803865 - RNA, 22 nt, Human
aggcugaggcuuuccuuggaga

SEQ ID NO: 803866 - RNA, 22 nt, Human
ugcgcggcucagucaucuccag

SEQ ID NO: 803867 - RNA, 22 nt, Human
auuuuguggcagaugcagaacc

SEQ ID NO: 803868 - RNA, 22 nt, Human
acaauuagugaucagugaugcc

SEQ ID NO: 803869 - RNA, 22 nt, Human
agagcuggggccagagucaagg

SEQ ID NO: 803870 - RNA, 22 nt, Human
uggcccuguucuguaccucaua

SEQ ID NO: 803871 - RNA, 22 nt, Human
uaagucauagauuaauggccac

SEQ ID NO: 803872 - RNA, 22 nt, Human
caaagugggugcccugaugcuc

SEQ ID NO: 803873 - RNA, 22 nt, Human
cagaguggcgacccccucagcu

SEQ ID NO: 803874 - RNA, 22 nt, Human
ccuccccucagacagagacugg

SEQ ID NO: 803875 - RNA, 21 nt, Human
gagugcucaguuaaguggaga

SEQ ID NO: 803876 - RNA, 22 nt, Human
agcugccugcuuaugagcucca

SEQ ID NO: 803877 - RNA, 22 nt, Human
cagcugggcuaagaguagaggc

SEQ ID NO: 803878 - RNA, 22 nt, Human
aggcaugaugugcaguggcaaa

SEQ ID NO: 803879 - RNA, 22 nt, Human
gaacauuauuguacaaaugucu

SEQ ID NO: 803880 - RNA, 22 nt, Human
aggaaauaagggcacuucagau

SEQ ID NO: 803881 - RNA, 22 nt, Human
cugcugccggcgagccucccuu

SEQ ID NO: 803882 - RNA, 22 nt, Human
ucuuaaaugacugauaagagga

SEQ ID NO: 803883 - RNA, 22 nt, Human
ggaggaugagcuacgaggagcu

SEQ ID NO: 803884 - RNA, 22 nt, Human
uggcagcuggcucugcgcaggc

SEQ ID NO: 803885 - RNA, 22 nt, Human
cuggcugugucuuggaggagcu

SEQ ID NO: 803886 - RNA, 22 nt, Human
gcacccagcccagggcgugaug

SEQ ID NO: 803887 - RNA, 22 nt, Human
acccaggcugcuucucaguggc

SEQ ID NO: 803888 - RNA, 22 nt, Human
uagucagagucuucucuguugu

SEQ ID NO: 803889 - RNA, 22 nt, Human
uuaauauacaauuuuacgggcu

SEQ ID NO: 803890 - RNA, 22 nt, Human
acugggaggcaaagagcaagga

SEQ ID NO: 803891 - RNA, 22 nt, Human
cuggcuccauccuaggcaaaug

SEQ ID NO: 803892 - RNA, 22 nt, Human
auaaauagugugucauaaaguc

SEQ ID NO: 803893 - RNA, 22 nt, Human
cuguaaauaugaagaauauaug

SEQ ID NO: 803894 - RNA, 22 nt, Human
agaacagcaggaaggccaggua

SEQ ID NO: 803895 - RNA, 22 nt, Human
caguaauuccaagugcuuauac

SEQ ID NO: 803896 - RNA, 22 nt, Human
ugaggggagacagaguggacuc

SEQ ID NO: 803897 - RNA, 21 nt, Human
ucuggggaagacaucuaggau

SEQ ID NO: 803898 - RNA, 20 nt, Human
uggcggggaugagggaguua

SEQ ID NO: 803899 - RNA, 22 nt, Human
uaaggcagguaugguaccaggc

SEQ ID NO: 803900 - RNA, 17 nt, Human
acagugucuaugaaaug

SEQ ID NO: 803901 - RNA, 22 nt, Human
uggcagguuucguuaaaaaugg

SEQ ID NO: 803902 - RNA, 22 nt, Human
ucccccacucuaaaggagccuu

SEQ ID NO: 803903 - RNA, 22 nt, Human
cuggcugguuuuuaaagcuagg

SEQ ID NO: 803904 - RNA, 22 nt, Human
gacuucuucaugucuuuuccac

SEQ ID NO: 803905 - RNA, 22 nt, Human
guuagagggaaaaaucauuugc

SEQ ID NO: 803906 - RNA, 22 nt, Human
ucagagaagguaagugaccugc

SEQ ID NO: 803907 - RNA, 22 nt, Human
ucugaaggugcuagagaaagcu

SEQ ID NO: 803908 - RNA, 16 nt, Human
acagugucucaagcac

SEQ ID NO: 803909 - RNA, 22 nt, Human
agucacaugggauuagaaccca

SEQ ID NO: 803910 - RNA, 22 nt, Human
ucacauuucacaugggaggagg

SEQ ID NO: 803911 - RNA, 22 nt, Human
aggugguguuugguuacaugag

SEQ ID NO: 803912 - RNA, 22 nt, Human
aaauguguuucgaaaacuggug

SEQ ID NO: 803913 - RNA, 22 nt, Human
agucugaagacucaugucugaa

SEQ ID NO: 803914 - RNA, 22 nt, Human
augggcaguuaggaggccagga

SEQ ID NO: 803915 - RNA, 22 nt, Human
cuuugcuuuacucccacugugu

SEQ ID NO: 803916 - RNA, 22 nt, Human
uuuuuaucuacagauucucagc

SEQ ID NO: 803917 - RNA, 22 nt, Human
acagagacuaagcuuuucauca

SEQ ID NO: 803918 - RNA, 22 nt, Human
gaggcugguucccuugaucuuu

SEQ ID NO: 803919 - RNA, 17 nt, Human
gcucccugaggacagcu

SEQ ID NO: 803920 - RNA, 22 nt, Human
uccagcaccuggaggcgucccc

SEQ ID NO: 803921 - RNA, 22 nt, Human
ucagggagggaccugaggcugg

SEQ ID NO: 803922 - RNA, 22 nt, Human
ugcuaggggucagcaccauauc

SEQ ID NO: 803923 - RNA, 22 nt, Human
aggcuucugauaccaugagaga

SEQ ID NO: 803924 - RNA, 22 nt, Human
aguguuuuauuucagcacuuug

SEQ ID NO: 803925 - RNA, 21 nt, Human
gcagugucaugguuucaaguu

SEQ ID NO: 803926 - RNA, 22 nt, Human
aggaucagugaauacucagggu

SEQ ID NO: 803927 - RNA, 22 nt, Human
gguccuggaaguguaaguggca

SEQ ID NO: 803928 - RNA, 18 nt, Human
cagagcaguaugaauguu

SEQ ID NO: 803929 - RNA, 22 nt, Human
ucauguuuuaaugccuuuuucu

SEQ ID NO: 803930 - RNA, 22 nt, Human
gaagagcauaugaagagcauau

SEQ ID NO: 803931 - RNA, 22 nt, Human
ugggcccaagagagucuccaac

SEQ ID NO: 803932 - RNA, 22 nt, Human
ugaguucucacccauucuucuu

SEQ ID NO: 803933 - RNA, 22 nt, Human
accagaaggaccagaggcaagg

SEQ ID NO: 803934 - RNA, 22 nt, Human
gggaacagagugccagacugac

SEQ ID NO: 803935 - RNA, 22 nt, Human
cacaguaagaaaugaagaggua

SEQ ID NO: 803936 - RNA, 22 nt, Human
cuggcaggaaguuagaugguaa

SEQ ID NO: 803937 - RNA, 22 nt, Human
uagaaacccauguuuauucagu

SEQ ID NO: 803938 - RNA, 21 nt, Human
cagaggcugagagggcaaucu

SEQ ID NO: 803939 - RNA, 22 nt, Human
acugcaauuauuuguucaccaa

SEQ ID NO: 803940 - RNA, 22 nt, Human
ggcuccaguuugugccuucagc

SEQ ID NO: 803941 - RNA, 22 nt, Human
agcagggguggaagguagcuuu

SEQ ID NO: 803942 - RNA, 22 nt, Human
cacagcaagagcuaaaugacca

SEQ ID NO: 803943 - RNA, 22 nt, Human
uguauuaacauuaauaaaaugg

SEQ ID NO: 803944 - RNA, 22 nt, Human
uggugccaagcaugaggacucu

SEQ ID NO: 803945 - RNA, 22 nt, Human
acugggaagauggaggcaagca

SEQ ID NO: 803946 - RNA, 22 nt, Human
gaaugauagagcugccuucgga

SEQ ID NO: 803947 - RNA, 22 nt, Human
cagucagggacaccagcuagga

SEQ ID NO: 803948 - RNA, 22 nt, Human
agcacaguaauugauauuacug

SEQ ID NO: 803949 - RNA, 22 nt, Human
ucccuggggaagggcaagcaag

SEQ ID NO: 803950 - RNA, 22 nt, Human
guuuauugauaaaagcuggaca

SEQ ID NO: 803951 - RNA, 22 nt, Human
ugggccaggugcagugcuuuag

SEQ ID NO: 803952 - RNA, 19 nt, Human
gggagagccaggcucaccc

SEQ ID NO: 803953 - RNA, 22 nt, Human
gcagauggugggggaggaguac

SEQ ID NO: 803954 - RNA, 22 nt, Human
gggaaggccgguccagucaggu

SEQ ID NO: 803955 - RNA, 22 nt, Human
agcacugugauuuauaacauuu

SEQ ID NO: 803956 - RNA, 22 nt, Human
cagcccagcgcaaacaacuggc

SEQ ID NO: 803957 - RNA, 22 nt, Human
ucuuuuuuuccugugcagagcu

SEQ ID NO: 803958 - RNA, 22 nt, Human
agugcauaaaggaaaaacugaa

SEQ ID NO: 803959 - RNA, 22 nt, Human
uccccuccaacuccaacuaugg

SEQ ID NO: 803960 - RNA, 22 nt, Human
cugguucaauggggcugagccc

SEQ ID NO: 803961 - RNA, 22 nt, Human
ggaggccagccugaggcugagg

SEQ ID NO: 803962 - RNA, 22 nt, Human
agcucuuuauggguaaaugcca

SEQ ID NO: 803963 - RNA, 22 nt, Human
acaggcuguacuucuaaucauc

SEQ ID NO: 803964 - RNA, 22 nt, Human
aggcucugaucagguggcugug

SEQ ID NO: 803965 - RNA, 22 nt, Human
gccagcugacaccuugauuuug

SEQ ID NO: 803966 - RNA, 22 nt, Human
gcagaggccugaagguggcggg

SEQ ID NO: 803967 - RNA, 22 nt, Human
ugaaugauguauaauauugaga

SEQ ID NO: 803968 - RNA, 21 nt, Human
ugcagcugacacccuuuggga

SEQ ID NO: 803969 - RNA, 22 nt, Human
aauaggaagcaccaaauucucc

SEQ ID NO: 803970 - RNA, 22 nt, Human
gagggagaaggacuaucaggcu

SEQ ID NO: 803971 - RNA, 22 nt, Human
cuacaacaccaggcacggagug

SEQ ID NO: 803972 - RNA, 22 nt, Human
gauguaaacugggacuuccuag

SEQ ID NO: 803973 - RNA, 22 nt, Human
acauagaaggaagaguaguagg

SEQ ID NO: 803974 - RNA, 22 nt, Human
acaggacagguaggauucgcag

SEQ ID NO: 803975 - RNA, 22 nt, Human
gcuuuggaaacuggcccugcgc

SEQ ID NO: 803976 - RNA, 22 nt, Human
ggggccagguccagcuuccaaa

SEQ ID NO: 803977 - RNA, 22 nt, Human
cucugagguccuucccagcucu

SEQ ID NO: 803978 - RNA, 22 nt, Human
cugcaaaugggcuuuagguggc

SEQ ID NO: 803979 - RNA, 22 nt, Human
ucuccugggcuugguugaaguu

SEQ ID NO: 803980 - RNA, 22 nt, Human
ucaggcagaccaccgugggcag

SEQ ID NO: 803981 - RNA, 22 nt, Human
uauuucauucuuuaucaggagc

SEQ ID NO: 803982 - RNA, 22 nt, Human
agguccuggucuugagucuuaa

SEQ ID NO: 803983 - RNA, 22 nt, Human
acaggcugccacuugcauccaa

SEQ ID NO: 803984 - RNA, 22 nt, Human
aguuuucugggaucacuggaau

SEQ ID NO: 803985 - RNA, 22 nt, Human
auaucacagguguuuaccugau

SEQ ID NO: 803986 - RNA, 22 nt, Human
caugcuguacucugugucagaa

SEQ ID NO: 803987 - RNA, 21 nt, Human
uggaccaggaaggugguggug

SEQ ID NO: 803988 - RNA, 22 nt, Human
ccuggcagcgugccgagcugcg

SEQ ID NO: 803989 - RNA, 22 nt, Human
aaauucacuugccugcuuagcu

SEQ ID NO: 803990 - RNA, 20 nt, Human
ucucuuuuagcuuacagcug

SEQ ID NO: 803991 - RNA, 22 nt, Human
gaaagcauaacuaauauuuauu

SEQ ID NO: 803992 - RNA, 22 nt, Human
aagaaauuaaugugccauuacu

SEQ ID NO: 803993 - RNA, 22 nt, Human
gaugaaauuugggcagguuaaa

SEQ ID NO: 803994 - RNA, 19 nt, Human
ccucccacggauuccuucc

SEQ ID NO: 803995 - RNA, 22 nt, Human
ccugaggcuggcccuuccaucc

SEQ ID NO: 803996 - RNA, 22 nt, Human
ggcucuggugaggguaggagau

SEQ ID NO: 803997 - RNA, 22 nt, Human
gcagaggaggacccaggaauua

SEQ ID NO: 803998 - RNA, 22 nt, Human
uagcaaaauguggauguaguug

SEQ ID NO: 803999 - RNA, 22 nt, Human
ccugccucaggacucugcauau

SEQ ID NO: 804000 - RNA, 20 nt, Human
cuuuggagaaagaugcaaua

SEQ ID NO: 804001 - RNA, 22 nt, Human
aauagcucacugauuucucuuu

SEQ ID NO: 804002 - RNA, 22 nt, Human
cacagcagaaaguguaggagga

SEQ ID NO: 804003 - RNA, 22 nt, Human
cugugacuggaaucuggcucuu

SEQ ID NO: 804004 - RNA, 22 nt, Human
aggugggggcuguguccuugac

SEQ ID NO: 804005 - RNA, 22 nt, Human
gcuccugggcucuaccuugcua

SEQ ID NO: 804006 - RNA, 18 nt, Human
caauuuuacccagucccu

SEQ ID NO: 804007 - RNA, 22 nt, Human
gccagccccagacauccuaucg

SEQ ID NO: 804008 - RNA, 22 nt, Human
uauauuguaggugcuauuugaa

SEQ ID NO: 804009 - RNA, 22 nt, Human
aguugucagucaaagacauuug

SEQ ID NO: 804010 - RNA, 22 nt, Human
aggcaugacuuuggcugaagaa

SEQ ID NO: 804011 - RNA, 22 nt, Human
ugccucuguggaaauggugguc

SEQ ID NO: 804012 - RNA, 21 nt, Human
ucaggcugaugucgauguuag

SEQ ID NO: 804013 - RNA, 20 nt, Human
uccuagcuucucucuguaca

SEQ ID NO: 804014 - RNA, 22 nt, Human
accuucaagauugugggucaau

SEQ ID NO: 804015 - RNA, 22 nt, Human
gacaagcucuuguuucaugguu

SEQ ID NO: 804016 - RNA, 22 nt, Human
uaaccaugcaugucucuaguuu

SEQ ID NO: 804017 - RNA, 22 nt, Human
agaaaacuugucacagcucuca

SEQ ID NO: 804018 - RNA, 22 nt, Human
cagcagcaaaucuagaagagga

SEQ ID NO: 804019 - RNA, 22 nt, Human
augauugaaaaugacauugcca

SEQ ID NO: 804020 - RNA, 22 nt, Human
ucaggcuguuagccaccuccuc

SEQ ID NO: 804021 - RNA, 22 nt, Human
ucacguuuuacugagugagaua

SEQ ID NO: 804022 - RNA, 22 nt, Human
agguccuggugaccauggaguu

SEQ ID NO: 804023 - RNA, 20 nt, Human
ucauaaagaggaaauaaaua

SEQ ID NO: 804024 - RNA, 22 nt, Human
ugcaggcugcucaagacuuagu

SEQ ID NO: 804025 - RNA, 22 nt, Human
uccuggaagugcuuggugaggg

SEQ ID NO: 804026 - RNA, 22 nt, Human
uaaggccaccguuauagaacca

SEQ ID NO: 804027 - RNA, 22 nt, Human
gucuggagccccagucaaugag

SEQ ID NO: 804028 - RNA, 22 nt, Human
ucacagagcucacaguuuagca

SEQ ID NO: 804029 - RNA, 22 nt, Human
guuuacuguuaaccaacgaaug

SEQ ID NO: 804030 - RNA, 21 nt, Human
uugauuuuaggaaguuuguca

SEQ ID NO: 804031 - RNA, 22 nt, Human
uugcauuugacaaauuauuuaa

SEQ ID NO: 804032 - RNA, 22 nt, Human
cagcagggggcagcgcagauca

SEQ ID NO: 804033 - RNA, 22 nt, Human
cagaaauguacugacaugcagu

SEQ ID NO: 804034 - RNA, 20 nt, Human
ucacuucuuccuuuugucua

SEQ ID NO: 804035 - RNA, 22 nt, Human
cuucgauuuaauucuuaaccuu

SEQ ID NO: 804036 - RNA, 22 nt, Human
uggcccugggcagaggcaacau

SEQ ID NO: 804037 - RNA, 17 nt, Human
auguauauuaacucuga

SEQ ID NO: 804038 - RNA, 18 nt, Human
acaggcugugggaauggu

SEQ ID NO: 804039 - RNA, 22 nt, Human
agagccugcaucaggcuugggg

SEQ ID NO: 804040 - RNA, 22 nt, Human
gccacccuggacgcacuguucg

SEQ ID NO: 804041 - RNA, 22 nt, Human
ucccaggaggugcuuccuagga

SEQ ID NO: 804042 - RNA, 22 nt, Human
uugauuucuauugaguuccugu

SEQ ID NO: 804043 - RNA, 22 nt, Human
auucuacaaucauguagauccu

SEQ ID NO: 804044 - RNA, 22 nt, Human
agaagcagaaggaagcagggcc

SEQ ID NO: 804045 - RNA, 22 nt, Human
cuggagauguccgggugcuguu

SEQ ID NO: 804046 - RNA, 22 nt, Human
gcucucucccuaggcaagugag

SEQ ID NO: 804047 - RNA, 21 nt, Human
aggauuuuguugaaguuucug

SEQ ID NO: 804048 - RNA, 22 nt, Human
agcccccucccuagugacugga

SEQ ID NO: 804049 - RNA, 16 nt, Human
aaagaaacaggugucc

SEQ ID NO: 804050 - RNA, 22 nt, Human
uaaggacauugguuuugaguaa

SEQ ID NO: 804051 - RNA, 17 nt, Human
aggaagcgagcuggccu

SEQ ID NO: 804052 - RNA, 22 nt, Human
uuucacauucucugguuaucga

SEQ ID NO: 804053 - RNA, 22 nt, Human
gaaacauuguguucuacagauu

SEQ ID NO: 804054 - RNA, 22 nt, Human
gcuggagagugaggggagcaag

SEQ ID NO: 804055 - RNA, 22 nt, Human
uucuuacauauuuucauauggu

SEQ ID NO: 804056 - RNA, 22 nt, Human
aauguguuuaguuaaugaguug

SEQ ID NO: 804057 - RNA, 22 nt, Human
cccaguuguugccggcucugga

SEQ ID NO: 804058 - RNA, 22 nt, Human
caggauugagcaaauggauuau

SEQ ID NO: 804059 - RNA, 22 nt, Human
ccacugccagcuuuguccuccc

SEQ ID NO: 804060 - RNA, 22 nt, Human
cugucucugucuuaacucccag

SEQ ID NO: 804061 - RNA, 22 nt, Human
cucuucccagcuccacgagagg

SEQ ID NO: 804062 - RNA, 22 nt, Human
uaagaacagugucugucucaca

SEQ ID NO: 804063 - RNA, 22 nt, Human
ccuuucaaaguuuugccaugcu

SEQ ID NO: 804064 - RNA, 22 nt, Human
ucaaaggcugcuugucuucugg

SEQ ID NO: 804065 - RNA, 22 nt, Human
gcuagccugcaguggcuauggu

SEQ ID NO: 804066 - RNA, 22 nt, Human
uccaggaggguuuucugccuuc

SEQ ID NO: 804067 - RNA, 22 nt, Human
gacaggcaggccagggcugugg

SEQ ID NO: 804068 - RNA, 23 nt, Human
caugggagugagaaugccagcuc

SEQ ID NO: 804069 - RNA, 20 nt, Human
uaccaacagcaggaagcaua

SEQ ID NO: 804070 - RNA, 22 nt, Human
caagagcugcaaauagcgugac

SEQ ID NO: 804071 - RNA, 22 nt, Human
ccucagggucauccuaguaaua

SEQ ID NO: 804072 - RNA, 22 nt, Human
uaagucaggaggucuccugaca

SEQ ID NO: 804073 - RNA, 22 nt, Human
gcugauggcuugcuggcugaca

SEQ ID NO: 804074 - RNA, 22 nt, Human
ccucucccgggugccgcugggc

SEQ ID NO: 804075 - RNA, 22 nt, Human
uuaaggaaggugaauuucuugg

SEQ ID NO: 804076 - RNA, 22 nt, Human
agcucagggcuccaggaccgcu

SEQ ID NO: 804077 - RNA, 22 nt, Human
acauuucagugagcuauugaag

SEQ ID NO: 804078 - RNA, 22 nt, Human
aucuacaggauuuuacagaguu

SEQ ID NO: 804079 - RNA, 18 nt, Human
agacaaacuucuucugcc

SEQ ID NO: 804080 - RNA, 22 nt, Human
uguuuacaguuuuuaguacccu

SEQ ID NO: 804081 - RNA, 22 nt, Human
aaguucaaucagaugaaaaagc

SEQ ID NO: 804082 - RNA, 22 nt, Human
guuacucuuccccggggucugg

SEQ ID NO: 804083 - RNA, 22 nt, Human
ccugcagaggucaggccagaaa

SEQ ID NO: 804084 - RNA, 22 nt, Human
cagggcuccaugcagggacucc

SEQ ID NO: 804085 - RNA, 21 nt, Human
acaguuuuaaggagcacaugg

SEQ ID NO: 804086 - RNA, 22 nt, Human
aacuaaaucuggcauuuagagc

SEQ ID NO: 804087 - RNA, 22 nt, Human
aggcuggucuauacggagacga

SEQ ID NO: 804088 - RNA, 22 nt, Human
uacauggugguggcacuugacu

SEQ ID NO: 804089 - RNA, 22 nt, Human
cacagaggaaaggcaguuggua

SEQ ID NO: 804090 - RNA, 19 nt, Human
ucauaaaaaugguaaccca

SEQ ID NO: 804091 - RNA, 22 nt, Human
aaauuucaagcaaaguagcuau

SEQ ID NO: 804092 - RNA, 22 nt, Human
ugggaaagccagcagugucacc

SEQ ID NO: 804093 - RNA, 22 nt, Human
cuucacaucucccuaaaacagc

SEQ ID NO: 804094 - RNA, 22 nt, Human
guggagaggaacccagcucugu

SEQ ID NO: 804095 - RNA, 22 nt, Human
cucccaggggaacuaucaagua

SEQ ID NO: 804096 - RNA, 22 nt, Human
agaaaauaauuucuuggcuggu

SEQ ID NO: 804097 - RNA, 22 nt, Human
acaggcuuuuuuagaaugacau

SEQ ID NO: 804098 - RNA, 22 nt, Human
uucacuaugcuuggaaacuucu

SEQ ID NO: 804099 - RNA, 22 nt, Human
uuucuauuggcgucacuguugu

SEQ ID NO: 804100 - RNA, 22 nt, Human
ucaccggcagacguggccugau

SEQ ID NO: 804101 - RNA, 22 nt, Human
gggcucuaggccaagagucccg

SEQ ID NO: 804102 - RNA, 22 nt, Human
caaacuuucaguuauaacauga

SEQ ID NO: 804103 - RNA, 22 nt, Human
acagauuauggauauaugugga

SEQ ID NO: 804104 - RNA, 22 nt, Human
cuggccagcugacagcagggcu

SEQ ID NO: 804105 - RNA, 22 nt, Human
ccuggcaggccccuccuggauu

SEQ ID NO: 804106 - RNA, 23 nt, Human
ccugcagcugcuggggcuccacc

SEQ ID NO: 804107 - RNA, 22 nt, Human
uuucacauucagauauagacuu

SEQ ID NO: 804108 - RNA, 22 nt, Human
aucuuucagggccauuuguauu

SEQ ID NO: 804109 - RNA, 22 nt, Human
gccagcagggcggagccaucua

SEQ ID NO: 804110 - RNA, 20 nt, Human
cugccuggaggccucuaccu

SEQ ID NO: 804111 - RNA, 22 nt, Human
uuguuaaaaugaggucauucug

SEQ ID NO: 804112 - RNA, 22 nt, Human
uccuggcuccacugagcaggcc

SEQ ID NO: 804113 - RNA, 22 nt, Human
caaguaaagaaucacauuucuu

SEQ ID NO: 804114 - RNA, 21 nt, Human
ggccuuggcgggggccgaauu

SEQ ID NO: 804115 - RNA, 22 nt, Human
auaugcuuaugaugucucaagu

SEQ ID NO: 804116 - RNA, 22 nt, Human
gagcuggcaaugacuuguguau

SEQ ID NO: 804117 - RNA, 22 nt, Human
auagaauaugacuuuuagaucc

SEQ ID NO: 804118 - RNA, 22 nt, Human
gcugagggcagccuccuagguc

SEQ ID NO: 804119 - RNA, 22 nt, Human
agggcagaccacgugcaaggau

SEQ ID NO: 804120 - RNA, 22 nt, Human
cacuugaauggcauuguuccuu

SEQ ID NO: 804121 - RNA, 22 nt, Human
ugucauggcguuguggggacua

SEQ ID NO: 804122 - RNA, 22 nt, Human
aggccagaaaugucagggagug

SEQ ID NO: 804123 - RNA, 22 nt, Human
ucaaaaauguuuuauauuggua

SEQ ID NO: 804124 - RNA, 19 nt, Human
cucuccagcuccaguagcu

SEQ ID NO: 804125 - RNA, 22 nt, Human
uugugaauagugccgcuauaaa

SEQ ID NO: 804126 - RNA, 22 nt, Human
gcagaggagaugaagauacuuu

SEQ ID NO: 804127 - RNA, 22 nt, Human
ugggugccaaccucugguggcc

SEQ ID NO: 804128 - RNA, 22 nt, Human
gcgguggggaaaggaggugcug

SEQ ID NO: 804129 - RNA, 22 nt, Human
ucccagaguucaaugggaaggu

SEQ ID NO: 804130 - RNA, 22 nt, Human
ccccagccagcaggaccucuga

SEQ ID NO: 804131 - RNA, 22 nt, Human
ucuuuggaagcuuucagagaag

SEQ ID NO: 804132 - RNA, 22 nt, Human
gaagucagaaaagaauuaggga

SEQ ID NO: 804133 - RNA, 22 nt, Human
ugcaaauuggugaggaccacuu

SEQ ID NO: 804134 - RNA, 22 nt, Human
gcagaauacauuuuguuuuccu

SEQ ID NO: 804135 - RNA, 22 nt, Human
aggcacuuuacaaugugugaca

SEQ ID NO: 804136 - RNA, 22 nt, Human
cugcagcugcaguucugagaga

SEQ ID NO: 804137 - RNA, 17 nt, Human
gaggacagggaaguagg

SEQ ID NO: 804138 - RNA, 22 nt, Human
ccucaggcuagcuacugucccu

SEQ ID NO: 804139 - RNA, 22 nt, Human
agguagggaagaaggcaugaaa

SEQ ID NO: 804140 - RNA, 22 nt, Human
aauuuuaugccuugcacguugg

SEQ ID NO: 804141 - RNA, 22 nt, Human
uugaacaaucaaaagaauucau

SEQ ID NO: 804142 - RNA, 18 nt, Human
ugccagccgacuggccug

SEQ ID NO: 804143 - RNA, 22 nt, Human
aggcuugggucagaaggcuugu

SEQ ID NO: 804144 - RNA, 22 nt, Human
cugcugagccuggugcgggaug

SEQ ID NO: 804145 - RNA, 22 nt, Human
aaucacauuacagcauaucugu

SEQ ID NO: 804146 - RNA, 22 nt, Human
uccagcuguuguuuuaucucag

SEQ ID NO: 804147 - RNA, 22 nt, Human
ggagccagagucugcaguguaa

SEQ ID NO: 804148 - RNA, 22 nt, Human
guuguuuuauaauugauugcaa

SEQ ID NO: 804149 - RNA, 22 nt, Human
ucaugcaacgauccuccaaaug

SEQ ID NO: 804150 - RNA, 22 nt, Human
ugaggccaaugacccugggcag

SEQ ID NO: 804151 - RNA, 22 nt, Human
cccuugggguggagguugcagu

SEQ ID NO: 804152 - RNA, 22 nt, Human
gagaggcuuaagggcugugaag

SEQ ID NO: 804153 - RNA, 22 nt, Human
accagcuguuaggcuuggugcu

SEQ ID NO: 804154 - RNA, 22 nt, Human
cagagggucaccaggaagugca

SEQ ID NO: 804155 - RNA, 22 nt, Human
agaggcccuggcuagagcagcu

SEQ ID NO: 804156 - RNA, 22 nt, Human
cacaguuugguuuugcuguaau

SEQ ID NO: 804157 - RNA, 21 nt, Human
ugaggcucuguugugccugca

SEQ ID NO: 804158 - RNA, 22 nt, Human
ccucugcagcagagagccagag

SEQ ID NO: 804159 - RNA, 22 nt, Human
ucaugcaauguuaguuugaaag

SEQ ID NO: 804160 - RNA, 22 nt, Human
cugggagcaccauacuuguuuc

SEQ ID NO: 804161 - RNA, 23 nt, Human
ugcuggcuuuuaucuggucccua

SEQ ID NO: 804162 - RNA, 22 nt, Human
ucccagccuggacccugccagu

SEQ ID NO: 804163 - RNA, 21 nt, Human
ucaaaucagguaucacuauug

SEQ ID NO: 804164 - RNA, 20 nt, Human
uucauucacguagcuguuga

SEQ ID NO: 804165 - RNA, 22 nt, Human
ucuacaaagguugaggugcccu

SEQ ID NO: 804166 - RNA, 22 nt, Human
gauuucuguggcuuguacauau

SEQ ID NO: 804167 - RNA, 22 nt, Human
aacuacucaacucugccauugu

SEQ ID NO: 804168 - RNA, 22 nt, Human
cugccuggugcggugcccaccc

SEQ ID NO: 804169 - RNA, 22 nt, Human
aaggcagccuuuugaguugauu

SEQ ID NO: 804170 - RNA, 22 nt, Human
agaagccacuggagguugagau

SEQ ID NO: 804171 - RNA, 22 nt, Human
ggcagaagaaaggcuaagucuc

SEQ ID NO: 804172 - RNA, 22 nt, Human
ucauuuaauugguuuugcucgu

SEQ ID NO: 804173 - RNA, 20 nt, Human
uguggcaggaugagggcgga

SEQ ID NO: 804174 - RNA, 22 nt, Human
gcauuuaaauuugaacuucaga

SEQ ID NO: 804175 - RNA, 22 nt, Human
aagaguuuccaugcucugugcu

SEQ ID NO: 804176 - RNA, 22 nt, Human
acagugaucuuuuaguuggaac

SEQ ID NO: 804177 - RNA, 19 nt, Human
uggccagguacugucugcu

SEQ ID NO: 804178 - RNA, 22 nt, Human
cguggccacccaguggugcgug

SEQ ID NO: 804179 - RNA, 21 nt, Human
agaggaagaagaguguauuau

SEQ ID NO: 804180 - RNA, 22 nt, Human
cagaagacagcuguuucacucg

SEQ ID NO: 804181 - RNA, 21 nt, Human
acuuaaauuccuugauauuua

SEQ ID NO: 804182 - RNA, 22 nt, Human
aggcagcuggaggcagagacua

SEQ ID NO: 804183 - RNA, 22 nt, Human
uuauuucauauaauguuaucaa

SEQ ID NO: 804184 - RNA, 21 nt, Human
uggcaggcagcuggaagcuug

SEQ ID NO: 804185 - RNA, 22 nt, Human
aggcaggggagcuggaagggua

SEQ ID NO: 804186 - RNA, 22 nt, Human
agauuuccuaugguaauuauag

SEQ ID NO: 804187 - RNA, 20 nt, Human
aaagagaagccucaccuugu

SEQ ID NO: 804188 - RNA, 22 nt, Human
uccuccuguuucucaggccugg

SEQ ID NO: 804189 - RNA, 22 nt, Human
auugcuuuucagacaaugaggc

SEQ ID NO: 804190 - RNA, 22 nt, Human
aggcugccuggcugugagugaa

SEQ ID NO: 804191 - RNA, 22 nt, Human
uuccuggaaauuaugcucaccu

SEQ ID NO: 804192 - RNA, 22 nt, Human
ucucuuggaaagcuugcccacu

SEQ ID NO: 804193 - RNA, 22 nt, Human
aaggcaaguuuuaguuuucugg

SEQ ID NO: 804194 - RNA, 22 nt, Human
agcuuucaguuacuaaugaagg

SEQ ID NO: 804195 - RNA, 23 nt, Human
acuggacagaguggacgaggcug

SEQ ID NO: 804196 - RNA, 22 nt, Human
ccucagggucucucacagcacc

SEQ ID NO: 804197 - RNA, 22 nt, Human
cugaagaugucugagaugcuca

SEQ ID NO: 804198 - RNA, 22 nt, Human
acucuaaaaugcuaugagaucu

SEQ ID NO: 804199 - RNA, 22 nt, Human
agucucagcaagcauggcuagu

SEQ ID NO: 804200 - RNA, 22 nt, Human
gccacagacagagagucuagug

SEQ ID NO: 804201 - RNA, 18 nt, Human
ugcuuacaggaguuccug

SEQ ID NO: 804202 - RNA, 22 nt, Human
auacauacguacauacguaugu

SEQ ID NO: 804203 - RNA, 22 nt, Human
auacaguagggaccaugucuga

SEQ ID NO: 804204 - RNA, 22 nt, Human
ggcuggcugugcccuguacucu

SEQ ID NO: 804205 - RNA, 22 nt, Human
ccugccaggacauugcuugaag

SEQ ID NO: 804206 - RNA, 17 nt, Human
agccugggaaggaguga

SEQ ID NO: 804207 - RNA, 22 nt, Human
cagcuuggcuucacauucugua

SEQ ID NO: 804208 - RNA, 22 nt, Human
uauuucuugaguggucaguuuc

SEQ ID NO: 804209 - RNA, 22 nt, Human
aauaaugagacagcuuauuuaa

SEQ ID NO: 804210 - RNA, 22 nt, Human
cagugucaccaggcgagucucc

SEQ ID NO: 804211 - RNA, 22 nt, Human
caauuacuuuugcaccaauaua

SEQ ID NO: 804212 - RNA, 22 nt, Human
agggcugcaggcaagauauggc

SEQ ID NO: 804213 - RNA, 21 nt, Human
ugacagcauagagcagggagg

SEQ ID NO: 804214 - RNA, 20 nt, Human
aacacacugguggcaucagg

SEQ ID NO: 804215 - RNA, 17 nt, Human
aguuuugauauaauggc

SEQ ID NO: 804216 - RNA, 22 nt, Human
ggcuccagggaguggagagaag

SEQ ID NO: 804217 - RNA, 22 nt, Human
gacaguaagaccuuaccagccu

SEQ ID NO: 804218 - RNA, 22 nt, Human
augcagcugaggguaguggagc

SEQ ID NO: 804219 - RNA, 22 nt, Human
ugaggcuuagagaagaugggau

SEQ ID NO: 804220 - RNA, 22 nt, Human
uagaaagugguugagaguuuag

SEQ ID NO: 804221 - RNA, 22 nt, Human
gcugcuucuccucccuggggau

SEQ ID NO: 804222 - RNA, 22 nt, Human
gcagcccagguguagcucuuug

SEQ ID NO: 804223 - RNA, 22 nt, Human
uacaaacucuuuauauuucaua

SEQ ID NO: 804224 - RNA, 22 nt, Human
guagaaaaagcaguaagucuca

SEQ ID NO: 804225 - RNA, 22 nt, Human
agcuuguuuuguugaauacuua

SEQ ID NO: 804226 - RNA, 22 nt, Human
uaguggaggggaugcaaagcuu

SEQ ID NO: 804227 - RNA, 22 nt, Human
ucuauuuuauacucaaaucuuc

SEQ ID NO: 804228 - RNA, 18 nt, Human
ggugggaagccagggccu

SEQ ID NO: 804229 - RNA, 22 nt, Human
agggaugcugcuaaguggucua

SEQ ID NO: 804230 - RNA, 22 nt, Human
aagcaggcccugggccagggga

SEQ ID NO: 804231 - RNA, 22 nt, Human
ucccugggcggacauucuccca

SEQ ID NO: 804232 - RNA, 22 nt, Human
caggaaauuuauguucuacuua

SEQ ID NO: 804233 - RNA, 22 nt, Human
gcucugaguaaaugaaagcauu

SEQ ID NO: 804234 - RNA, 21 nt, Human
aguuuucugaguuauaaaaua

SEQ ID NO: 804235 - RNA, 22 nt, Human
cucagccagacaugacccaguc

SEQ ID NO: 804236 - RNA, 22 nt, Human
gaagccagcaguggagaaagga

SEQ ID NO: 804237 - RNA, 22 nt, Human
ggagcugggacccugucaucug

SEQ ID NO: 804238 - RNA, 22 nt, Human
auuuacacugguucucagagcu

SEQ ID NO: 804239 - RNA, 22 nt, Human
uuuggcuuaacuuacaugauau

SEQ ID NO: 804240 - RNA, 22 nt, Human
aggcccagacucagcggggcgg

SEQ ID NO: 804241 - RNA, 22 nt, Human
ccuuggcuggaauuacucuggg

SEQ ID NO: 804242 - RNA, 22 nt, Human
uguuuacuaugauguaaccuau

SEQ ID NO: 804243 - RNA, 23 nt, Human
cagaugugcaacucuaggcaaug

SEQ ID NO: 804244 - RNA, 22 nt, Human
aaggcaugaaagcgaaaugaga

SEQ ID NO: 804245 - RNA, 22 nt, Human
aaggaacugaugcucaaagaau

SEQ ID NO: 804246 - RNA, 22 nt, Human
ggcuccaggaaccuccucuccu

SEQ ID NO: 804247 - RNA, 22 nt, Human
ccaaaauaacagcccaauucac

SEQ ID NO: 804248 - RNA, 22 nt, Human
caccugcugagcugcugggggu

SEQ ID NO: 804249 - RNA, 22 nt, Human
ccaggccuggccaggggaugcc

SEQ ID NO: 804250 - RNA, 21 nt, Human
agaauuaaauuggauuugugu

SEQ ID NO: 804251 - RNA, 22 nt, Human
ucuuaugggaaagauguaauua

SEQ ID NO: 804252 - RNA, 22 nt, Human
ccagaggugcugggagaggucu

SEQ ID NO: 804253 - RNA, 22 nt, Human
ccaggaagacacaugcucaucc

SEQ ID NO: 804254 - RNA, 22 nt, Human
cugccucuggccucaggcccag

SEQ ID NO: 804255 - RNA, 22 nt, Human
agccacagugcaagagagaaaa

SEQ ID NO: 804256 - RNA, 22 nt, Human
augugcaaagggacuugcacau

SEQ ID NO: 804257 - RNA, 22 nt, Human
uagaaagucaugaauuacacca

SEQ ID NO: 804258 - RNA, 22 nt, Human
cagaugugagcuggggagagug

SEQ ID NO: 804259 - RNA, 22 nt, Human
cuucaauugccaccagcuagca

SEQ ID NO: 804260 - RNA, 22 nt, Human
uuuuuccuagcgauuugucagc

SEQ ID NO: 804261 - RNA, 22 nt, Human
gucauuuuuuucguaauagugg

SEQ ID NO: 804262 - RNA, 19 nt, Human
agacaaugggguuggcagu

SEQ ID NO: 804263 - RNA, 22 nt, Human
auuaaauuggaucugcauaguu

SEQ ID NO: 804264 - RNA, 22 nt, Human
ggacacagauaaucacacagau

SEQ ID NO: 804265 - RNA, 20 nt, Human
aguggggagucaggagugcc

SEQ ID NO: 804266 - RNA, 22 nt, Human
agcugccaaguuggaguagcaa

SEQ ID NO: 804267 - RNA, 22 nt, Human
uaaaaucaugacagauugacau

SEQ ID NO: 804268 - RNA, 22 nt, Human
uugcuucauauuuguggcuugc

SEQ ID NO: 804269 - RNA, 22 nt, Human
cugucugcccuggccagagccc

SEQ ID NO: 804270 - RNA, 22 nt, Human
uaggcagaauuguugaaugaag

SEQ ID NO: 804271 - RNA, 21 nt, Human
agcaggugcuguuggaggaaa

SEQ ID NO: 804272 - RNA, 22 nt, Human
aaauucuaaggucacaauguug

SEQ ID NO: 804273 - RNA, 22 nt, Human
gcugggcuggaaggccaaggca

SEQ ID NO: 804274 - RNA, 22 nt, Human
aaaauaugaaguugucaguaug

SEQ ID NO: 804275 - RNA, 22 nt, Human
guacauuuauuuuugcagcaua

SEQ ID NO: 804276 - RNA, 22 nt, Human
caggguggaagcuguagagugg

SEQ ID NO: 804277 - RNA, 22 nt, Human
acaaugauuuuuuagaguaguu

SEQ ID NO: 804278 - RNA, 22 nt, Human
cuggcuucugggccagggcaga

SEQ ID NO: 804279 - RNA, 22 nt, Human
gggcaggagaagguggaugucc

SEQ ID NO: 804280 - RNA, 22 nt, Human
cacuugaaauauuaggggugau

SEQ ID NO: 804281 - RNA, 22 nt, Human
aucuguaauuuugaaugcaaau

SEQ ID NO: 804282 - RNA, 22 nt, Human
uuuaucuuuaggacuuugcaga

SEQ ID NO: 804283 - RNA, 22 nt, Human
guggucagaauggagcccagga

SEQ ID NO: 804284 - RNA, 22 nt, Human
ucucaaacuaacaaugauuaua

SEQ ID NO: 804285 - RNA, 23 nt, Human
gggaagcuccauggaggugcugg

SEQ ID NO: 804286 - RNA, 18 nt, Human
accugccuguucuucucu

SEQ ID NO: 804287 - RNA, 23 nt, Human
ucaguagugcauugaauaagugc

SEQ ID NO: 804288 - RNA, 22 nt, Human
gcuggaggcuggagugcagugg

SEQ ID NO: 804289 - RNA, 22 nt, Human
ugucauuuccugaaugcugagu

SEQ ID NO: 804290 - RNA, 22 nt, Human
acuggcugcgggguggaagaag

SEQ ID NO: 804291 - RNA, 22 nt, Human
gcaucuaagguggauaacuucu

SEQ ID NO: 804292 - RNA, 22 nt, Human
ucccagccuuccagucugguuu

SEQ ID NO: 804293 - RNA, 22 nt, Human
aagcaggcgagggccuggagca

SEQ ID NO: 804294 - RNA, 17 nt, Human
agcugccuugcuugagc

SEQ ID NO: 804295 - RNA, 22 nt, Human
uauuaauaagugacuacuagcu

SEQ ID NO: 804296 - RNA, 22 nt, Human
agaggcugcaggcuggaaauca

SEQ ID NO: 804297 - RNA, 22 nt, Human
uauuggaagugaacaccaggcu

SEQ ID NO: 804298 - RNA, 22 nt, Human
auacugauuaguugagaaagca

SEQ ID NO: 804299 - RNA, 22 nt, Human
uggcagaguaggauggcccugu

SEQ ID NO: 804300 - RNA, 22 nt, Human
guaugaaggcgagagcccacua

SEQ ID NO: 804301 - RNA, 22 nt, Human
cuauuucugccuaaugaccugu

SEQ ID NO: 804302 - RNA, 22 nt, Human
aauauauagaaguacccguugu

SEQ ID NO: 804303 - RNA, 22 nt, Human
gggcccugcguccggaagucug

SEQ ID NO: 804304 - RNA, 22 nt, Human
ccugagcuagggaaggaagacc

SEQ ID NO: 804305 - RNA, 19 nt, Human
aaaaggaauauucuuuggg

SEQ ID NO: 804306 - RNA, 19 nt, Human
ccccaggguaggcuagggg

SEQ ID NO: 804307 - RNA, 16 nt, Human
cagccugcagugguca

SEQ ID NO: 804308 - RNA, 22 nt, Human
acaggacagggaauucgaaauu

SEQ ID NO: 804309 - RNA, 22 nt, Human
aacuuccuuggguaugaaaaca

SEQ ID NO: 804310 - RNA, 22 nt, Human
gagagaggccuccauguacuga

SEQ ID NO: 804311 - RNA, 22 nt, Human
gaaacauacgauuuaggagaaa

SEQ ID NO: 804312 - RNA, 22 nt, Human
cacaauuagcagcucuuuauuu

SEQ ID NO: 804313 - RNA, 22 nt, Human
uauagcaagcaggacagucuca

SEQ ID NO: 804314 - RNA, 22 nt, Human
cuaccugaaaagguugugguga

SEQ ID NO: 804315 - RNA, 22 nt, Human
acuaucaacaucauugcucuag

SEQ ID NO: 804316 - RNA, 22 nt, Human
gcucagggccauggaccagcag

SEQ ID NO: 804317 - RNA, 22 nt, Human
agaaggcucauuugacugcauu

SEQ ID NO: 804318 - RNA, 22 nt, Human
uaagaaacaugauacuuuuccu

SEQ ID NO: 804319 - RNA, 22 nt, Human
ucacaggaggacugaaagauau

SEQ ID NO: 804320 - RNA, 22 nt, Human
gggggcuaccgucucuggagcu

SEQ ID NO: 804321 - RNA, 22 nt, Human
cuccccagguucaggagguggg

SEQ ID NO: 804322 - RNA, 22 nt, Human
gccucugcccauccaccaucag

SEQ ID NO: 804323 - RNA, 22 nt, Human
gaaacccaaacuaagacaguag

SEQ ID NO: 804324 - RNA, 22 nt, Human
uucuauguaccuagcguuguau

SEQ ID NO: 804325 - RNA, 22 nt, Human
aagccaguguggucugcccauu

SEQ ID NO: 804326 - RNA, 22 nt, Human
ccugaagagcacucuagaguug

SEQ ID NO: 804327 - RNA, 22 nt, Human
aggcuggccuauuucuuuaucg

SEQ ID NO: 804328 - RNA, 22 nt, Human
agugauucuuuaaagugguauu

SEQ ID NO: 804329 - RNA, 20 nt, Human
aaacacagccucucuuuaca

SEQ ID NO: 804330 - RNA, 20 nt, Human
agccccacccuuguccuggc

SEQ ID NO: 804331 - RNA, 22 nt, Human
cagcuuuaggacucauaauaaa

SEQ ID NO: 804332 - RNA, 22 nt, Human
ggcagguguggugaccagagau

SEQ ID NO: 804333 - RNA, 22 nt, Human
gcccuggccuucaucucagaca

SEQ ID NO: 804334 - RNA, 22 nt, Human
ucagaaucuaaauaggcuccag

SEQ ID NO: 804335 - RNA, 22 nt, Human
ugcccaggauugugaggucagg

SEQ ID NO: 804336 - RNA, 22 nt, Human
ccugggauuuccugagcacucu

SEQ ID NO: 804337 - RNA, 22 nt, Human
uuucaaauagaaucuuuccaaa

SEQ ID NO: 804338 - RNA, 22 nt, Human
aaaacaguuuuugcuaacugcu

SEQ ID NO: 804339 - RNA, 22 nt, Human
uucaggcaucccuacaguuagg

SEQ ID NO: 804340 - RNA, 22 nt, Human
cuggcccaggaagacguguccc

SEQ ID NO: 804341 - RNA, 22 nt, Human
gggggaaaguggagguucguga

SEQ ID NO: 804342 - RNA, 22 nt, Human
gcagggcagccacaggcccccu

SEQ ID NO: 804343 - RNA, 22 nt, Human
ucuuccuucuuugaugacaagg

SEQ ID NO: 804344 - RNA, 22 nt, Human
gcuccuggcuccaggcagccaa

SEQ ID NO: 804345 - RNA, 22 nt, Human
aacauauuuggcugauauuccc

SEQ ID NO: 804346 - RNA, 22 nt, Human
ccauuuaguaaggaagaacagc

SEQ ID NO: 804347 - RNA, 22 nt, Human
aucaagaaaagugcuuucggcu

SEQ ID NO: 804348 - RNA, 22 nt, Human
gccagccauaggccagcacugg

SEQ ID NO: 804349 - RNA, 22 nt, Human
gcugggcucaccaggccacuag

SEQ ID NO: 804350 - RNA, 21 nt, Human
uauagucacuugagcauuauc

SEQ ID NO: 804351 - RNA, 22 nt, Human
uggcuucugagucuccugacau

SEQ ID NO: 804352 - RNA, 19 nt, Human
ccuggcugugaagccugca

SEQ ID NO: 804353 - RNA, 22 nt, Human
gccacagggcgagcggaggcca

SEQ ID NO: 804354 - RNA, 22 nt, Human
ccauguacaugaacacggcggc

SEQ ID NO: 804355 - RNA, 22 nt, Human
uuuccaaauaaggucacacuca

SEQ ID NO: 804356 - RNA, 22 nt, Human
aggacaauuuuggcauaguucu

SEQ ID NO: 804357 - RNA, 22 nt, Human
uucugaagggcuaagugucuau

SEQ ID NO: 804358 - RNA, 22 nt, Human
cacacauucaccaugacugaaa

SEQ ID NO: 804359 - RNA, 22 nt, Human
gugcagggcagccgaaugggcu

SEQ ID NO: 804360 - RNA, 20 nt, Human
aaaagagugcuucaacugcu

SEQ ID NO: 804361 - RNA, 22 nt, Human
cacuuagaaaacuugagcaagu

SEQ ID NO: 804362 - RNA, 22 nt, Human
uugguuuucauagcuccacucu

SEQ ID NO: 804363 - RNA, 22 nt, Human
ucuuccagcuccccacgguguc

SEQ ID NO: 804364 - RNA, 22 nt, Human
cuguucaauuuguuucaguuau

SEQ ID NO: 804365 - RNA, 22 nt, Human
aguuugcagauuauauuagugu

SEQ ID NO: 804366 - RNA, 22 nt, Human
augaaugcaugcuuauuuugca

SEQ ID NO: 804367 - RNA, 22 nt, Human
uguacaaagaguauagcuuuga

SEQ ID NO: 804368 - RNA, 22 nt, Human
cagcuggcagcccuggcccugc

SEQ ID NO: 804369 - RNA, 22 nt, Human
agaaaaagaaaguggauuuguc

SEQ ID NO: 804370 - RNA, 22 nt, Human
ucauuguauacuuuauuuauga

SEQ ID NO: 804371 - RNA, 22 nt, Human
aagcagcauaugacagcaucca

SEQ ID NO: 804372 - RNA, 23 nt, Human
caggaaaucaauucuuccagcau

SEQ ID NO: 804373 - RNA, 22 nt, Human
gaggccacaguccugaggcauc

SEQ ID NO: 804374 - RNA, 22 nt, Human
aaauagauugcugaggcauuac

SEQ ID NO: 804375 - RNA, 22 nt, Human
uauuucuauuccccaggcaagu

SEQ ID NO: 804376 - RNA, 22 nt, Human
acagugcgggcugcgguggguc

SEQ ID NO: 804377 - RNA, 22 nt, Human
agaaucuaaguacacagacaga

SEQ ID NO: 804378 - RNA, 22 nt, Human
uucuuauuucccccuucaucau

SEQ ID NO: 804379 - RNA, 22 nt, Human
aauucauauggauaugcuagua

SEQ ID NO: 804380 - RNA, 22 nt, Human
gccagcagcugugggguggcca

SEQ ID NO: 804381 - RNA, 22 nt, Human
acaauuuuccccauagguuauc

SEQ ID NO: 804382 - RNA, 21 nt, Human
aggugggagaccauguagguc

SEQ ID NO: 804383 - RNA, 23 nt, Human
aaauauucuuuuuuaguaagugc

SEQ ID NO: 804384 - RNA, 22 nt, Human
uucccagaaugaauggauggag

SEQ ID NO: 804385 - RNA, 22 nt, Human
guaggagcauugaggguaugga

SEQ ID NO: 804386 - RNA, 22 nt, Human
agucacagaaacccaggugugg

SEQ ID NO: 804387 - RNA, 22 nt, Human
agccuuagauuugggcaagaac

SEQ ID NO: 804388 - RNA, 22 nt, Human
gugggagcugcggaggccuggg

SEQ ID NO: 804389 - RNA, 22 nt, Human
cagggcagagggaaacuccuuu

SEQ ID NO: 804390 - RNA, 22 nt, Human
ucagaguuccucauagauccag

SEQ ID NO: 804391 - RNA, 22 nt, Human
agcuuaauggaacuugcucaaa

SEQ ID NO: 804392 - RNA, 22 nt, Human
cuggcuggaaguuagagaacuu

SEQ ID NO: 804393 - RNA, 22 nt, Human
ucagggauugcaaaauucaucc

SEQ ID NO: 804394 - RNA, 22 nt, Human
cuaagucauggaaagugugugu

SEQ ID NO: 804395 - RNA, 22 nt, Human
aguggugcugcgcgcggagcuc

SEQ ID NO: 804396 - RNA, 22 nt, Human
cccagccuuccacccuggacua

SEQ ID NO: 804397 - RNA, 22 nt, Human
ugcaugcuucaggcuggcucug

SEQ ID NO: 804398 - RNA, 22 nt, Human
uagcuuugugaaguuuacagac

SEQ ID NO: 804399 - RNA, 22 nt, Human
cauuuauuggcauguaguaggu

SEQ ID NO: 804400 - RNA, 22 nt, Human
aggccagggcacugcucuuuag

SEQ ID NO: 804401 - RNA, 18 nt, Human
ugauucaaguugcccucc

SEQ ID NO: 804402 - RNA, 22 nt, Human
cucugggaccauggcaagugcg

SEQ ID NO: 804403 - RNA, 22 nt, Human
agcuccuggcaaggucauggug

SEQ ID NO: 804404 - RNA, 22 nt, Human
aaaaguucccugguuagaaaag

SEQ ID NO: 804405 - RNA, 22 nt, Human
cacugcuuuucagacaguuauu

SEQ ID NO: 804406 - RNA, 22 nt, Human
augcaacaguucauaguuuuau

SEQ ID NO: 804407 - RNA, 21 nt, Human
cuaagcaaggagcagggguag

SEQ ID NO: 804408 - RNA, 22 nt, Human
cauggcugccuguggacacugc

SEQ ID NO: 804409 - RNA, 22 nt, Human
aacuucugccaaacagcuguua

SEQ ID NO: 804410 - RNA, 22 nt, Human
cagcugucucagggaggugauc

SEQ ID NO: 804411 - RNA, 21 nt, Human
ccaagacucccaucuaguggu

SEQ ID NO: 804412 - RNA, 22 nt, Human
uauuccaaaaucccaaacugcc

SEQ ID NO: 804413 - RNA, 22 nt, Human
ccuggccagaggcgugccugug

SEQ ID NO: 804414 - RNA, 22 nt, Human
ccaggcaaggucuccuagagag

SEQ ID NO: 804415 - RNA, 22 nt, Human
guuuaauaauguugaauuacua

SEQ ID NO: 804416 - RNA, 22 nt, Human
ucaguaaaugagcaaaaauuuc

SEQ ID NO: 804417 - RNA, 22 nt, Human
cauguaaaacacucagaacagu

SEQ ID NO: 804418 - RNA, 22 nt, Human
augcagaaucuugagaaaaauu

SEQ ID NO: 804419 - RNA, 22 nt, Human
uaugagaaucugcaguaugcuu

SEQ ID NO: 804420 - RNA, 22 nt, Human
aauccaugaagugaacaaucug

SEQ ID NO: 804421 - RNA, 18 nt, Human
cccacccuggcucuuagu

SEQ ID NO: 804422 - RNA, 22 nt, Human
cuguuuucuagggcugagguga

SEQ ID NO: 804423 - RNA, 22 nt, Human
cucauuuaacagauuaaaaagu

SEQ ID NO: 804424 - RNA, 22 nt, Human
caauaacugcugaggagaagca

SEQ ID NO: 804425 - RNA, 22 nt, Human
ucacugggcccugaggugggac

SEQ ID NO: 804426 - RNA, 22 nt, Human
auuucaguauuauacaacugcu

SEQ ID NO: 804427 - RNA, 22 nt, Human
uacaaugugugcuucuugucac

SEQ ID NO: 804428 - RNA, 22 nt, Human
auacaggaugcugaacaucucu

SEQ ID NO: 804429 - RNA, 22 nt, Human
gcugggaggaauuuggggaaua

SEQ ID NO: 804430 - RNA, 22 nt, Human
gauucaaaaguuugagcuccaa

SEQ ID NO: 804431 - RNA, 20 nt, Human
auuuguuucuacucucugac

SEQ ID NO: 804432 - RNA, 22 nt, Human
aagucauagucgggaaagacau

SEQ ID NO: 804433 - RNA, 22 nt, Human
aaggaagaagggaaguuacuua

SEQ ID NO: 804434 - RNA, 22 nt, Human
gugggcugcccuugaggucagc

SEQ ID NO: 804435 - RNA, 22 nt, Human
uuguuucuccuggugccugaua

SEQ ID NO: 804436 - RNA, 22 nt, Human
cuggagccggaccagggacggu

SEQ ID NO: 804437 - RNA, 21 nt, Human
acacaggcagugucccgaggu

SEQ ID NO: 804438 - RNA, 20 nt, Human
gccucagccaacccaugggg

SEQ ID NO: 804439 - RNA, 22 nt, Human
aagacauuuauuugaaucaauu

SEQ ID NO: 804440 - RNA, 22 nt, Human
agguaaggaaauugaggcaauu

SEQ ID NO: 804441 - RNA, 22 nt, Human
gcauuucugugcauacacauga

SEQ ID NO: 804442 - RNA, 22 nt, Human
acggggcuagagaagguuucuu

SEQ ID NO: 804443 - RNA, 22 nt, Human
ugaaagaguuugacaugauucu

SEQ ID NO: 804444 - RNA, 22 nt, Human
uuuauuuaaagucguguguuaa

SEQ ID NO: 804445 - RNA, 22 nt, Human
ucauguauugaaaagcauuuua

SEQ ID NO: 804446 - RNA, 22 nt, Human
cagggagcucugggccggacuc

SEQ ID NO: 804447 - RNA, 22 nt, Human
gcugcaagucacagaaacagug

SEQ ID NO: 804448 - RNA, 22 nt, Human
auuuacauaauagacuuuaggu

SEQ ID NO: 804449 - RNA, 22 nt, Human
aaggcagcucagcucauggcag

SEQ ID NO: 804450 - RNA, 22 nt, Human
cccugggaggcuuccaggcaga

SEQ ID NO: 804451 - RNA, 22 nt, Human
uucauacaugagacuagaugca

SEQ ID NO: 804452 - RNA, 22 nt, Human
augagggaggcaaggagaugcu

SEQ ID NO: 804453 - RNA, 22 nt, Human
caaauucucuuacuguuugaca

SEQ ID NO: 804454 - RNA, 22 nt, Human
ucaauuacagcaaugacuguac

SEQ ID NO: 804455 - RNA, 22 nt, Human
aaagacauauuucuaaguuuau

SEQ ID NO: 804456 - RNA, 22 nt, Human
caggaugauguuaauugaaguu

SEQ ID NO: 804457 - RNA, 22 nt, Human
caggaagaaggguggugagucc

SEQ ID NO: 804458 - RNA, 22 nt, Human
auuccagacagguaaauuaggu

SEQ ID NO: 804459 - RNA, 22 nt, Human
augauuuccaguuguugcuaag

SEQ ID NO: 804460 - RNA, 22 nt, Human
ggcacagagcuuugucccaguu

SEQ ID NO: 804461 - RNA, 22 nt, Human
gaaacacuaugccaagacaggg

SEQ ID NO: 804462 - RNA, 22 nt, Human
cugccucuuaaguggauggagu

SEQ ID NO: 804463 - RNA, 22 nt, Human
agcuugaguuuuggaugaagug

SEQ ID NO: 804464 - RNA, 21 nt, Human
gccugcccucugugauggcca

SEQ ID NO: 804465 - RNA, 22 nt, Human
aaugucauuuaaaauaauucug

SEQ ID NO: 804466 - RNA, 19 nt, Human
uuucaaagggcauaagccu

SEQ ID NO: 804467 - RNA, 22 nt, Human
agagcccagguccuggagaggg

SEQ ID NO: 804468 - RNA, 22 nt, Human
caaauagugucacauugugagg

SEQ ID NO: 804469 - RNA, 22 nt, Human
auuucauguuaacugaacagaa

SEQ ID NO: 804470 - RNA, 22 nt, Human
ugaaauguuuaucucuccugcu

SEQ ID NO: 804471 - RNA, 20 nt, Human
uuuacauuuugaaacaguga

SEQ ID NO: 804472 - RNA, 22 nt, Human
acagaacugcagacagugccaa

SEQ ID NO: 804473 - RNA, 22 nt, Human
uacugucuaauaagauugaugg

SEQ ID NO: 804474 - RNA, 22 nt, Human
uagauuugauguaagcauaguc

SEQ ID NO: 804475 - RNA, 22 nt, Human
cuuccuggcaaagcaaucagag

SEQ ID NO: 804476 - RNA, 22 nt, Human
uuucuaagaauauugcucuuaa

SEQ ID NO: 804477 - RNA, 22 nt, Human
auggaagcagacagguaauucc

SEQ ID NO: 804478 - RNA, 22 nt, Human
aguugcagccuucaggagaccc

SEQ ID NO: 804479 - RNA, 22 nt, Human
uguagauauagaaaaagacuga

SEQ ID NO: 804480 - RNA, 22 nt, Human
gaggccagcgcgcagcacuuuu

SEQ ID NO: 804481 - RNA, 22 nt, Human
uauucacagguuccggagauua

SEQ ID NO: 804482 - RNA, 22 nt, Human
agggcagccucucagccuaggu

SEQ ID NO: 804483 - RNA, 19 nt, Human
uggucccauacugcuggcc

SEQ ID NO: 804484 - RNA, 22 nt, Human
gucuggggaagucagggcauca

SEQ ID NO: 804485 - RNA, 22 nt, Human
gaguguuuuacucaaagaaaga

SEQ ID NO: 804486 - RNA, 22 nt, Human
cuguggagugcuuggcucagug

SEQ ID NO: 804487 - RNA, 22 nt, Human
augagaugugucuaauggaacc

SEQ ID NO: 804488 - RNA, 22 nt, Human
ugguguguuagagcucagggca

SEQ ID NO: 804489 - RNA, 22 nt, Human
aaacagcagcuguuuaauuugc

SEQ ID NO: 804490 - RNA, 22 nt, Human
guuacaaaugccaaagcugaga

SEQ ID NO: 804491 - RNA, 22 nt, Human
aggaaaauggaccagaguuguu

SEQ ID NO: 804492 - RNA, 22 nt, Human
gugguuuuuagauuucuacagu

SEQ ID NO: 804493 - RNA, 22 nt, Human
gaaagugcucucucuauacaca

SEQ ID NO: 804494 - RNA, 22 nt, Human
ucacaugcuugaggaaagaaaa

SEQ ID NO: 804495 - RNA, 22 nt, Human
uacaggugguaaaaauauuguu

SEQ ID NO: 804496 - RNA, 22 nt, Human
guuuaugaauugcauucccuuu

SEQ ID NO: 804497 - RNA, 22 nt, Human
agggcagcagcggcccaggccu

SEQ ID NO: 804498 - RNA, 22 nt, Human
agcugccugcugcacucggugc

SEQ ID NO: 804499 - RNA, 21 nt, Human
uucccagcaccuagcacaggu

SEQ ID NO: 804500 - RNA, 22 nt, Human
cucaccauggaucuuccauuuc

SEQ ID NO: 804501 - RNA, 22 nt, Human
agaaaagggcaggagggauaca

SEQ ID NO: 804502 - RNA, 22 nt, Human
cagguggggcagcugugggagc

SEQ ID NO: 804503 - RNA, 22 nt, Human
uucaguguacagugaagggauu

SEQ ID NO: 804504 - RNA, 22 nt, Human
ugcagaagcagagaguugccaa

SEQ ID NO: 804505 - RNA, 22 nt, Human
ggcuggaccaugcugccccuuc

SEQ ID NO: 804506 - RNA, 22 nt, Human
acuccuggaaaagaacgcaggg

SEQ ID NO: 804507 - RNA, 22 nt, Human
ucuccuggauggaccuucucuu

SEQ ID NO: 804508 - RNA, 22 nt, Human
uaaacaagcuggacugauaagu

SEQ ID NO: 804509 - RNA, 22 nt, Human
caggcacacaggcucccugggc

SEQ ID NO: 804510 - RNA, 22 nt, Human
auaaaugccucagaaucauccc

SEQ ID NO: 804511 - RNA, 22 nt, Human
ugcugccaccugugguagucug

SEQ ID NO: 804512 - RNA, 22 nt, Human
ucagcugaguucuagagcacuc

SEQ ID NO: 804513 - RNA, 22 nt, Human
accagcacggauuagaaugcuu

SEQ ID NO: 804514 - RNA, 22 nt, Human
aacaucuuuuuguuugcugaaa

SEQ ID NO: 804515 - RNA, 22 nt, Human
uuaugagacuguuuuacacacu

SEQ ID NO: 804516 - RNA, 22 nt, Human
ucuuugauuuuguuacuaagac

SEQ ID NO: 804517 - RNA, 22 nt, Human
uguggcagauuuuauaaauugc

SEQ ID NO: 804518 - RNA, 22 nt, Human
auaacacuaaauguauguaaca

SEQ ID NO: 804519 - RNA, 22 nt, Human
auuguuuuauuaaaugagcccu

SEQ ID NO: 804520 - RNA, 22 nt, Human
ggugggaaggccacugaagguu

SEQ ID NO: 804521 - RNA, 22 nt, Human
ugcuggaguaacaagacacuca

SEQ ID NO: 804522 - RNA, 22 nt, Human
uucucagguagugcugaugcug

SEQ ID NO: 804523 - RNA, 22 nt, Human
cauguuuuguguacagaauauu

SEQ ID NO: 804524 - RNA, 19 nt, Human
agcagcucagggaggcacc

SEQ ID NO: 804525 - RNA, 22 nt, Human
gccaggaggcuuaacuggacag

SEQ ID NO: 804526 - RNA, 22 nt, Human
cagccuguagaauacaguaaau

SEQ ID NO: 804527 - RNA, 22 nt, Human
ucuacuauguaugcuuuaugcg

SEQ ID NO: 804528 - RNA, 22 nt, Human
uggccaccccuuucucugcacu

SEQ ID NO: 804529 - RNA, 22 nt, Human
uaaccauauucacacuaugccc

SEQ ID NO: 804530 - RNA, 22 nt, Human
cuucaaauacaaguagauuaug

SEQ ID NO: 804531 - RNA, 22 nt, Human
ccaggcagagugcuccagaaag

SEQ ID NO: 804532 - RNA, 22 nt, Human
uggaccagcagccccagugccu

SEQ ID NO: 804533 - RNA, 22 nt, Human
aacuuccugacuucuaaugagu

SEQ ID NO: 804534 - RNA, 22 nt, Human
cugucugaauccuaagcuuccu

SEQ ID NO: 804535 - RNA, 22 nt, Human
uuucugaauuccuaggauguug

SEQ ID NO: 804536 - RNA, 22 nt, Human
auuuacagaagcauguaauagc

SEQ ID NO: 804537 - RNA, 22 nt, Human
uaauacagggcacuuugaguga

SEQ ID NO: 804538 - RNA, 22 nt, Human
uucuucagauccuacaagucug

SEQ ID NO: 804539 - RNA, 22 nt, Human
uuuuuauaggucagggcaaguc

SEQ ID NO: 804540 - RNA, 22 nt, Human
gucauucuuaacaacucaguag

SEQ ID NO: 804541 - RNA, 22 nt, Human
ucuucagguagugaguggggug

SEQ ID NO: 804542 - RNA, 22 nt, Human
uccccucccuuccaacagagcu

SEQ ID NO: 804543 - RNA, 22 nt, Human
aauauaauuuuauuccuagagu

SEQ ID NO: 804544 - RNA, 22 nt, Human
aauccagaugagcaaucauacu

SEQ ID NO: 804545 - RNA, 23 nt, Human
guucauuuuauugucugauugcu

SEQ ID NO: 804546 - RNA, 22 nt, Human
aucuuucucugcacuauacaau

SEQ ID NO: 804547 - RNA, 22 nt, Human
uuucucaaccucaacacuauuu

SEQ ID NO: 804548 - RNA, 22 nt, Human
uggaaauagauaguaucauuca

SEQ ID NO: 804549 - RNA, 22 nt, Human
auuucaguagaaaaucuugauu

SEQ ID NO: 804550 - RNA, 19 nt, Human
uguuuuguuaaagcagucc

SEQ ID NO: 804551 - RNA, 22 nt, Human
acacauaagaaacuacaaagag

SEQ ID NO: 804552 - RNA, 22 nt, Human
aggcagcagagguugaggaaag

SEQ ID NO: 804553 - RNA, 22 nt, Human
aggcuguucuaggagaguggga

SEQ ID NO: 804554 - RNA, 22 nt, Human
gaauucacuugucuuccauuuu

SEQ ID NO: 804555 - RNA, 22 nt, Human
aaauguacugauacuuauuuua

SEQ ID NO: 804556 - RNA, 22 nt, Human
ucagcaacuauuuaucaaauuc

SEQ ID NO: 804557 - RNA, 22 nt, Human
gcaaggcagcgcggaguagcua

SEQ ID NO: 804558 - RNA, 22 nt, Human
ccaggcacucagagacugggac

SEQ ID NO: 804559 - RNA, 22 nt, Human
aaacaccaagagcuagcuauua

SEQ ID NO: 804560 - RNA, 22 nt, Human
gggcugacgaaggccaugugug

SEQ ID NO: 804561 - RNA, 22 nt, Human
gcaggccuuggcaaugagccug

SEQ ID NO: 804562 - RNA, 22 nt, Human
caaggcagucccuacucccugc

SEQ ID NO: 804563 - RNA, 22 nt, Human
ucucaggacuccucuggccaua

SEQ ID NO: 804564 - RNA, 22 nt, Human
aaaguauuugugauuuuuacca

SEQ ID NO: 804565 - RNA, 22 nt, Human
augcaacaaauugugugcaaua

SEQ ID NO: 804566 - RNA, 22 nt, Human
ugagccugcugucgcuggaccc

SEQ ID NO: 804567 - RNA, 22 nt, Human
ucagauaauuaaucaugaaauu

SEQ ID NO: 804568 - RNA, 19 nt, Human
cccaggagucuggcugguu

SEQ ID NO: 804569 - RNA, 22 nt, Human
uaggccaguugguggcccugga

SEQ ID NO: 804570 - RNA, 22 nt, Human
ggcucagcuuaucugggcaggc

SEQ ID NO: 804571 - RNA, 22 nt, Human
ggcuucucucuucacauggcuu

SEQ ID NO: 804572 - RNA, 22 nt, Human
agagggagaagcuaaaauaacu

SEQ ID NO: 804573 - RNA, 22 nt, Human
ucugaagcuggaggaagcuuug

SEQ ID NO: 804574 - RNA, 22 nt, Human
aguggcagagaccccagccagc

SEQ ID NO: 804575 - RNA, 22 nt, Human
ucuaaaaaagucuguucacuug

SEQ ID NO: 804576 - RNA, 22 nt, Human
aaggaaucacuucuuuaaauga

SEQ ID NO: 804577 - RNA, 22 nt, Human
uuucauguuuucuuaaauggca

SEQ ID NO: 804578 - RNA, 22 nt, Human
uggccaggcuggucuggaacgc

SEQ ID NO: 804579 - RNA, 22 nt, Human
agcuccugcuugacagaagagg

SEQ ID NO: 804580 - RNA, 22 nt, Human
uucuucaggaagagccuggacu

SEQ ID NO: 804581 - RNA, 22 nt, Human
guuucuacaugccucuuucacc

SEQ ID NO: 804582 - RNA, 22 nt, Human
ggcccucugaguagcugcaaac

SEQ ID NO: 804583 - RNA, 22 nt, Human
ucaggagguaggacauacuggu

SEQ ID NO: 804584 - RNA, 22 nt, Human
acauucaaggccuucugacaca

SEQ ID NO: 804585 - RNA, 18 nt, Human
uuucauugagugugauau

SEQ ID NO: 804586 - RNA, 18 nt, Human
aagcugcccucaggcagg

SEQ ID NO: 804587 - RNA, 22 nt, Human
auuuaagaggcugcuagaguau

SEQ ID NO: 804588 - RNA, 22 nt, Human
acagugaugagggaauuuugug

SEQ ID NO: 804589 - RNA, 22 nt, Human
gacuucaugugcaagcgcuuug

SEQ ID NO: 804590 - RNA, 22 nt, Human
ccagcugugccggggaccuggg

SEQ ID NO: 804591 - RNA, 22 nt, Human
acaggcagugauuuccucuggu

SEQ ID NO: 804592 - RNA, 22 nt, Human
ugaggccagccacagccacccu

SEQ ID NO: 804593 - RNA, 19 nt, Human
aggaaagguggccuuagca

SEQ ID NO: 804594 - RNA, 22 nt, Human
aacuagaaagaacauauuucca

SEQ ID NO: 804595 - RNA, 22 nt, Human
uggauggauugacgaaggcagc

SEQ ID NO: 804596 - RNA, 17 nt, Human
aauacuuccaacuagug

SEQ ID NO: 804597 - RNA, 22 nt, Human
uuucccaauugagagguucugu

SEQ ID NO: 804598 - RNA, 22 nt, Human
uuuaaucuucaaaauagucuua

SEQ ID NO: 804599 - RNA, 22 nt, Human
uugcuaaaaauggaauuauagg

SEQ ID NO: 804600 - RNA, 22 nt, Human
uguggcagaaccagaauucaaa

SEQ ID NO: 804601 - RNA, 22 nt, Human
accaaaaauuguggggcugaau

SEQ ID NO: 804602 - RNA, 22 nt, Human
aaaugcaugagaaaguauucug

SEQ ID NO: 804603 - RNA, 22 nt, Human
caggaagagguaucaccgagca

SEQ ID NO: 804604 - RNA, 22 nt, Human
gggcgagggcgaaagcgagagc

SEQ ID NO: 804605 - RNA, 22 nt, Human
acauguuagcuacuauuguuau

SEQ ID NO: 804606 - RNA, 22 nt, Human
ccucagaggugaacaucagugc

SEQ ID NO: 804607 - RNA, 19 nt, Human
cugugggugugcaagggug

SEQ ID NO: 804608 - RNA, 22 nt, Human
ggacauggaaaucggcuugcuc

SEQ ID NO: 804609 - RNA, 22 nt, Human
ccauguggggucaguguuuggg

SEQ ID NO: 804610 - RNA, 22 nt, Human
acagcucagacaucacugcucu

SEQ ID NO: 804611 - RNA, 22 nt, Human
accaggcacucuuguggcagug

SEQ ID NO: 804612 - RNA, 22 nt, Human
cuggcacacagcaggcucucag

SEQ ID NO: 804613 - RNA, 22 nt, Human
uuaaagaggcaugggaauguau

SEQ ID NO: 804614 - RNA, 22 nt, Human
acacagagguggccacucuuuu

SEQ ID NO: 804615 - RNA, 22 nt, Human
agccagcuguccucccuuuccu

SEQ ID NO: 804616 - RNA, 22 nt, Human
acaaaauagaguucuccccugg

SEQ ID NO: 804617 - RNA, 22 nt, Human
gaggugaguggaucacgagguc

SEQ ID NO: 804618 - RNA, 22 nt, Human
ucagugcuccuaaagugaaugc

SEQ ID NO: 804619 - RNA, 22 nt, Human
gcacugggugugaggcagcguc

SEQ ID NO: 804620 - RNA, 23 nt, Human
gggcauggaguguagguggaagg

SEQ ID NO: 804621 - RNA, 22 nt, Human
gucuccagggcugcuggcgccu

SEQ ID NO: 804622 - RNA, 18 nt, Human
ucugaaggaaugauucca

SEQ ID NO: 804623 - RNA, 22 nt, Human
ccugggcuuuggaacaguacuu

SEQ ID NO: 804624 - RNA, 22 nt, Human
uauuuugcaaaccugaguuuga

SEQ ID NO: 804625 - RNA, 22 nt, Human
guuauauuggcagaagagaaga

SEQ ID NO: 804626 - RNA, 22 nt, Human
uuucaagucaguagcuaaucau

SEQ ID NO: 804627 - RNA, 22 nt, Human
cagcaggcugcgauugcucauu

SEQ ID NO: 804628 - RNA, 22 nt, Human
uuugcuuucuugauucagauua

SEQ ID NO: 804629 - RNA, 22 nt, Human
gcacacagaauugauucacugu

SEQ ID NO: 804630 - RNA, 22 nt, Human
uaagaacuucggacauguuauc

SEQ ID NO: 804631 - RNA, 22 nt, Human
aagagggaagucaccuggaggu

SEQ ID NO: 804632 - RNA, 22 nt, Human
gugcagcugccgaucagauagg

SEQ ID NO: 804633 - RNA, 22 nt, Human
ucuccuggccuuuagguuaagg

SEQ ID NO: 804634 - RNA, 22 nt, Human
cauggcuugcuaguggcccaag

SEQ ID NO: 804635 - RNA, 22 nt, Human
uuggaaacgucaccuuuuccuu

SEQ ID NO: 804636 - RNA, 22 nt, Human
gguugguaacucccugugcagu

SEQ ID NO: 804637 - RNA, 23 nt, Human
uaucuuuuucaauguuggaaaua

SEQ ID NO: 804638 - RNA, 22 nt, Human
uguuuacagcacugcacacugc

SEQ ID NO: 804639 - RNA, 22 nt, Human
ugcacaguguaaugaaucagaa

SEQ ID NO: 804640 - RNA, 22 nt, Human
augcuuuuccaggagaaauaua

SEQ ID NO: 804641 - RNA, 22 nt, Human
agcugccugccaugccgcuggu

SEQ ID NO: 804642 - RNA, 22 nt, Human
cagggugguaccagcaucuagu

SEQ ID NO: 804643 - RNA, 23 nt, Human
aaaggcaggccuaggacauauug

SEQ ID NO: 804644 - RNA, 22 nt, Human
aggcccuguaagguguggagau

SEQ ID NO: 804645 - RNA, 22 nt, Human
auuuugcugcuaugccuugcaa

SEQ ID NO: 804646 - RNA, 19 nt, Human
caggccucuggucugcugu

SEQ ID NO: 804647 - RNA, 22 nt, Human
gaaaggccagcucacagaugag

SEQ ID NO: 804648 - RNA, 22 nt, Human
aagcuuuguucuucacagagug

SEQ ID NO: 804649 - RNA, 22 nt, Human
uccccaguaagccugcacugug

SEQ ID NO: 804650 - RNA, 22 nt, Human
cugagcagugguucuugagcgc

SEQ ID NO: 804651 - RNA, 22 nt, Human
aagcaauauacugauaugauua

SEQ ID NO: 804652 - RNA, 22 nt, Human
uuacacagacauggcaucauga

SEQ ID NO: 804653 - RNA, 22 nt, Human
uggcccugcagaacuagccugg

SEQ ID NO: 804654 - RNA, 22 nt, Human
cuccugggaaaugaaggggcag

SEQ ID NO: 804655 - RNA, 22 nt, Human
uagugcuuaacacaaagugauu

SEQ ID NO: 804656 - RNA, 22 nt, Human
gcagcugccuaaagugcuaaga

SEQ ID NO: 804657 - RNA, 22 nt, Human
gaauuguaaguaccagcaugcu

SEQ ID NO: 804658 - RNA, 22 nt, Human
ggggacccucaggacugcgucu

SEQ ID NO: 804659 - RNA, 22 nt, Human
caggccagugugcuucccaggc

SEQ ID NO: 804660 - RNA, 22 nt, Human
ucacagaaguugaauuugcaug

SEQ ID NO: 804661 - RNA, 22 nt, Human
cuggcacaguuaacauaugcua

SEQ ID NO: 804662 - RNA, 22 nt, Human
uuuauuuaccuuauguccucca

SEQ ID NO: 804663 - RNA, 18 nt, Human
gacccaggaaagaguccu

SEQ ID NO: 804664 - RNA, 19 nt, Human
cuucugcagggugacagug

SEQ ID NO: 804665 - RNA, 22 nt, Human
ccagccucacuggcaucaccua

SEQ ID NO: 804666 - RNA, 22 nt, Human
cugaaaugggcaaaaguagauu

SEQ ID NO: 804667 - RNA, 22 nt, Human
cgccggcuugaggcaggcggca

SEQ ID NO: 804668 - RNA, 22 nt, Human
ugcaaauauuuccuuauagcca

SEQ ID NO: 804669 - RNA, 22 nt, Human
agagaagggccuguauguaauc

SEQ ID NO: 804670 - RNA, 22 nt, Human
uugacaaaaaccucauuucacc

SEQ ID NO: 804671 - RNA, 22 nt, Human
ccaggcucagcgcgcacgucug

SEQ ID NO: 804672 - RNA, 22 nt, Human
gcuuuuucaaaugaaagcuggu

SEQ ID NO: 804673 - RNA, 18 nt, Human
gaugaggcugucugagaa

SEQ ID NO: 804674 - RNA, 22 nt, Human
uuucuaagaugugguuucaagg

SEQ ID NO: 804675 - RNA, 22 nt, Human
uucagaaugacuuauguaaggc

SEQ ID NO: 804676 - RNA, 22 nt, Human
guggugcaggccagcaggggcg

SEQ ID NO: 804677 - RNA, 22 nt, Human
uuuguauaaauuggagcaaugu

SEQ ID NO: 804678 - RNA, 22 nt, Human
ccuacauaacacugccaaacug

SEQ ID NO: 804679 - RNA, 22 nt, Human
uucuuuucuuggcaggaguaga

SEQ ID NO: 804680 - RNA, 22 nt, Human
cuacaacauagucuucuacaga

SEQ ID NO: 804681 - RNA, 22 nt, Human
gcaaaucaccaccuagcuggau

SEQ ID NO: 804682 - RNA, 22 nt, Human
agggccugguucuguguaggga

SEQ ID NO: 804683 - RNA, 22 nt, Human
augccaaauucucagccucuuu

SEQ ID NO: 804684 - RNA, 22 nt, Human
uuuggagagcagcuaggcccuu

SEQ ID NO: 804685 - RNA, 22 nt, Human
aagcaggcaucuuggaggucaa

SEQ ID NO: 804686 - RNA, 22 nt, Human
ccagugucuucagaguaaaucu

SEQ ID NO: 804687 - RNA, 22 nt, Human
ugggacucacucuuuuggccag

SEQ ID NO: 804688 - RNA, 20 nt, Human
cuuugccuauucucugccug

SEQ ID NO: 804689 - RNA, 22 nt, Human
aauaccuuccaacaucaagaca

SEQ ID NO: 804690 - RNA, 22 nt, Human
ugucugaggaagucagcccuuu

SEQ ID NO: 804691 - RNA, 22 nt, Human
cagcuucaacugcacagucaac

SEQ ID NO: 804692 - RNA, 17 nt, Human
gcuggcugacccaugcc

SEQ ID NO: 804693 - RNA, 22 nt, Human
aggcccuggacacucaagccgg

SEQ ID NO: 804694 - RNA, 22 nt, Human
cagagggagcccuccaggagca

SEQ ID NO: 804695 - RNA, 22 nt, Human
aaggcuggguaaccuguccacu

SEQ ID NO: 804696 - RNA, 22 nt, Human
ucuuuccuagaggcugaugagu

SEQ ID NO: 804697 - RNA, 17 nt, Human
cccagcuggcagugccg

SEQ ID NO: 804698 - RNA, 20 nt, Human
ugcacagacaaugagcccag

SEQ ID NO: 804699 - RNA, 22 nt, Human
ccaggcugugcuuuucauaaau

SEQ ID NO: 804700 - RNA, 22 nt, Human
agcagggcagugaucagaaagg

SEQ ID NO: 804701 - RNA, 22 nt, Human
ugugcucugcaaucaguucuuu

SEQ ID NO: 804702 - RNA, 22 nt, Human
gaaucagaaucucuaagguggg

SEQ ID NO: 804703 - RNA, 22 nt, Human
uugucuuucccagcuucuagag

SEQ ID NO: 804704 - RNA, 22 nt, Human
agggggaggcugugcugcgucu

SEQ ID NO: 804705 - RNA, 22 nt, Human
agaggcugggcaggacccacag

SEQ ID NO: 804706 - RNA, 22 nt, Human
ggagaaaggcauagcagaaccu

SEQ ID NO: 804707 - RNA, 22 nt, Human
uuucuugugccuaauuuugggc

SEQ ID NO: 804708 - RNA, 22 nt, Human
ugcugggcuagaagcugaggcc

SEQ ID NO: 804709 - RNA, 22 nt, Human
ccugacaguuaauuguccugua

SEQ ID NO: 804710 - RNA, 22 nt, Human
accaggcaaaaccacaggagca

SEQ ID NO: 804711 - RNA, 22 nt, Human
aggaaacagagugaagcuuggg

SEQ ID NO: 804712 - RNA, 22 nt, Human
gggacagacccaugggccaggu

SEQ ID NO: 804713 - RNA, 19 nt, Human
uaaaggaagaagggaggau

SEQ ID NO: 804714 - RNA, 22 nt, Human
cacccaggcuggagugcauugg

SEQ ID NO: 804715 - RNA, 22 nt, Human
aaguuucaugacuugguuauua

SEQ ID NO: 804716 - RNA, 22 nt, Human
cuuacaaauacacuuaggagag

SEQ ID NO: 804717 - RNA, 22 nt, Human
uggagaagucaaagugaacagg

SEQ ID NO: 804718 - RNA, 22 nt, Human
uauguuuaaauguauguguaug

SEQ ID NO: 804719 - RNA, 22 nt, Human
uuucacaugguacugccuguuu

SEQ ID NO: 804720 - RNA, 22 nt, Human
gcaaagcaagauucagauguag

SEQ ID NO: 804721 - RNA, 22 nt, Human
uccagugaucuagggagcugga

SEQ ID NO: 804722 - RNA, 22 nt, Human
aguuuuauguagacaauucauu

SEQ ID NO: 804723 - RNA, 22 nt, Human
uugacacaguuuucucauuaag

SEQ ID NO: 804724 - RNA, 22 nt, Human
gcagugauggggaucucacugg

SEQ ID NO: 804725 - RNA, 22 nt, Human
uuacaacaccaggcaguauccu

SEQ ID NO: 804726 - RNA, 22 nt, Human
acauacaucaaguaucacaaga

SEQ ID NO: 804727 - RNA, 19 nt, Human
cuuugucagaacaugcuuc

SEQ ID NO: 804728 - RNA, 22 nt, Human
uucuucagacuacugaugauug

SEQ ID NO: 804729 - RNA, 22 nt, Human
caaggaaaaagcgagcucgggg

SEQ ID NO: 804730 - RNA, 22 nt, Human
ucuuuuguggaugaagaaaugg

SEQ ID NO: 804731 - RNA, 22 nt, Human
cuccagaggaugcaggugaggg

SEQ ID NO: 804732 - RNA, 22 nt, Human
aggcacugugcugaugucuuau

SEQ ID NO: 804733 - RNA, 22 nt, Human
ugccaggggaccuagggauguc

SEQ ID NO: 804734 - RNA, 22 nt, Human
aggccaaauguguauaaaacau

SEQ ID NO: 804735 - RNA, 22 nt, Human
gcagcagcccagggcucucaga

SEQ ID NO: 804736 - RNA, 20 nt, Human
acugcuucuuucucugaccu

SEQ ID NO: 804737 - RNA, 22 nt, Human
uccagagagaaaaacaagcuuu

SEQ ID NO: 804738 - RNA, 22 nt, Human
aucuacaaaaacugucucagga

SEQ ID NO: 804739 - RNA, 22 nt, Human
uauuucugggaguucagaaauu

SEQ ID NO: 804740 - RNA, 22 nt, Human
ugucauuuaaagcuuuccagau

SEQ ID NO: 804741 - RNA, 22 nt, Human
ucuucccagaggaggugccagc

SEQ ID NO: 804742 - RNA, 22 nt, Human
caggcuacauuugcucugagaa

SEQ ID NO: 804743 - RNA, 18 nt, Human
cccugaggcuagcaugcu

SEQ ID NO: 804744 - RNA, 22 nt, Human
cagggagaggccucuguugccc

SEQ ID NO: 804745 - RNA, 22 nt, Human
gcagcaggaauaggauaagcaa

SEQ ID NO: 804746 - RNA, 22 nt, Human
agacacagugaguuucuuuccc

SEQ ID NO: 804747 - RNA, 19 nt, Human
ugggcagguucaguaaugg

SEQ ID NO: 804748 - RNA, 22 nt, Human
aaaacauuuuacugccaucuca

SEQ ID NO: 804749 - RNA, 22 nt, Human
cagcaucucuuuuugcauuccu

SEQ ID NO: 804750 - RNA, 22 nt, Human
uauacaaguaaugcugaaugau

SEQ ID NO: 804751 - RNA, 22 nt, Human
gagggggcucccugaagccagu

SEQ ID NO: 804752 - RNA, 22 nt, Human
ucuuuaguauugaguuauggua

SEQ ID NO: 804753 - RNA, 22 nt, Human
aacccgggaggcagagguugug

SEQ ID NO: 804754 - RNA, 22 nt, Human
caguguacuuggaauguaacag

SEQ ID NO: 804755 - RNA, 22 nt, Human
ucucugaaagcagcugcucauc

SEQ ID NO: 804756 - RNA, 22 nt, Human
aguuuuauaucuuccauugguu

SEQ ID NO: 804757 - RNA, 22 nt, Human
ucucuuggacauguggcucugc

SEQ ID NO: 804758 - RNA, 20 nt, Human
cugcuguguuauuguagaac

SEQ ID NO: 804759 - RNA, 22 nt, Human
cgaggccaugcaugcugaggac

SEQ ID NO: 804760 - RNA, 22 nt, Human
uucucucuuacugccaugcugu

SEQ ID NO: 804761 - RNA, 22 nt, Human
caguggaggccuugggaccuuu

SEQ ID NO: 804762 - RNA, 22 nt, Human
uggaaauauuggguaauaguug

SEQ ID NO: 804763 - RNA, 22 nt, Human
ccacaugaugaggaagcugaac

SEQ ID NO: 804764 - RNA, 22 nt, Human
cugccuggcuaaacucaagucg

SEQ ID NO: 804765 - RNA, 22 nt, Human
uauggcaauugucuaaguuuua

SEQ ID NO: 804766 - RNA, 22 nt, Human
ucuuucuucuuucauaguguga

SEQ ID NO: 804767 - RNA, 18 nt, Human
uggguggcuagggaguuu

SEQ ID NO: 804768 - RNA, 22 nt, Human
ucagggcugcauacaggagaua

SEQ ID NO: 804769 - RNA, 22 nt, Human
cauaucaaagagaaggauagga

SEQ ID NO: 804770 - RNA, 22 nt, Human
ggagccugagcggcccagggcc

SEQ ID NO: 804771 - RNA, 22 nt, Human
acacagaguaucuuuugccuag

SEQ ID NO: 804772 - RNA, 22 nt, Human
auuuguucagcauugaauuugg

SEQ ID NO: 804773 - RNA, 22 nt, Human
gugucuuuauuccucuauguuu

SEQ ID NO: 804774 - RNA, 22 nt, Human
uguuuuucaaauauugcucugu

SEQ ID NO: 804775 - RNA, 22 nt, Human
ccugucuaccagucacuuagcg

SEQ ID NO: 804776 - RNA, 22 nt, Human
ccugcacuucucacagcugcug

SEQ ID NO: 804777 - RNA, 22 nt, Human
gaaaauuucugccacaugugug

SEQ ID NO: 804778 - RNA, 22 nt, Human
aacuacauuuuacagaagauga

SEQ ID NO: 804779 - RNA, 22 nt, Human
uuugaaaaaggccuuugguaug

SEQ ID NO: 804780 - RNA, 22 nt, Human
aguuucauauuaccaugucacc

SEQ ID NO: 804781 - RNA, 22 nt, Human
ugcagggccccucugcaugagu

SEQ ID NO: 804782 - RNA, 22 nt, Human
aagccaguccucuacugggcac

SEQ ID NO: 804783 - RNA, 22 nt, Human
uccucuucugcccaucagaggc

SEQ ID NO: 804784 - RNA, 22 nt, Human
caggacaggaguggggucaaag

SEQ ID NO: 804785 - RNA, 22 nt, Human
ucaugcacuacauaacgauguu

SEQ ID NO: 804786 - RNA, 22 nt, Human
acagguagguuaaaauguguca

SEQ ID NO: 804787 - RNA, 22 nt, Human
gccucccuguagaggccagccu

SEQ ID NO: 804788 - RNA, 23 nt, Human
ggaaagagaggaguugugcauag

SEQ ID NO: 804789 - RNA, 20 nt, Human
agguccugggacuggcagag

SEQ ID NO: 804790 - RNA, 22 nt, Human
uccaggcucucaggugucagca

SEQ ID NO: 804791 - RNA, 22 nt, Human
accagcagggcugggccaaugg

SEQ ID NO: 804792 - RNA, 22 nt, Human
gaacuggguccuugagucuaga

SEQ ID NO: 804793 - RNA, 22 nt, Human
uggugccacaagaauacaaagc

SEQ ID NO: 804794 - RNA, 22 nt, Human
ucuuuggcauuuaggagcagga

SEQ ID NO: 804795 - RNA, 22 nt, Human
ugcaggcuccaggugcacauau

SEQ ID NO: 804796 - RNA, 22 nt, Human
gaaggcccagucaaggggcuag

SEQ ID NO: 804797 - RNA, 22 nt, Human
aaucagaaucaguugacacagc

SEQ ID NO: 804798 - RNA, 22 nt, Human
aaagugcaguccaugaaauuaa

SEQ ID NO: 804799 - RNA, 22 nt, Human
caggcagagccaaucguggggu

SEQ ID NO: 804800 - RNA, 22 nt, Human
cauggggaugaggcugagacuu

SEQ ID NO: 804801 - RNA, 22 nt, Human
uuacuuuucuauucgauaugug

SEQ ID NO: 804802 - RNA, 22 nt, Human
gcacacagcuagauuaccauuc

SEQ ID NO: 804803 - RNA, 20 nt, Human
cccucccagaugcuucccaa

SEQ ID NO: 804804 - RNA, 22 nt, Human
auauauuuugcggucacguggc

SEQ ID NO: 804805 - RNA, 22 nt, Human
augaaaugugaaugcuuuucau

SEQ ID NO: 804806 - RNA, 22 nt, Human
ucuucuuuggaugaaagaauau

SEQ ID NO: 804807 - RNA, 21 nt, Human
gccagggaagagaguuggcug

SEQ ID NO: 804808 - RNA, 22 nt, Human
uagaaagugaagguuaauuaau

SEQ ID NO: 804809 - RNA, 22 nt, Human
gauagaaagagugguucuuuuu

SEQ ID NO: 804810 - RNA, 20 nt, Human
aaucagaaagugugagcucu

SEQ ID NO: 804811 - RNA, 20 nt, Human
auguuuuauaaaagaacggg

SEQ ID NO: 804812 - RNA, 22 nt, Human
uggugagaccuuguuccuuaug

SEQ ID NO: 804813 - RNA, 22 nt, Human
acuggcugaaaguaaagaacac

SEQ ID NO: 804814 - RNA, 22 nt, Human
ccagcacugcucucagacugag

SEQ ID NO: 804815 - RNA, 22 nt, Human
caggagugaaaugaggcccagg

SEQ ID NO: 804816 - RNA, 22 nt, Human
cuggcaguuggcagggcugcca

SEQ ID NO: 804817 - RNA, 20 nt, Human
agaaccuaaguuaaaacaca

SEQ ID NO: 804818 - RNA, 22 nt, Human
cugccaggacugacgucuucag

SEQ ID NO: 804819 - RNA, 22 nt, Human
cagaaaauagaguuucucugag

SEQ ID NO: 804820 - RNA, 22 nt, Human
uucuuuucccaauauuuugcug

SEQ ID NO: 804821 - RNA, 22 nt, Human
cacaggcuuuuuuggcugaugu

SEQ ID NO: 804822 - RNA, 18 nt, Human
uggagccauugccaccau

SEQ ID NO: 804823 - RNA, 22 nt, Human
accaaaaccugcuacuaaagga

SEQ ID NO: 804824 - RNA, 22 nt, Human
uuuuucaugagacuagaaguca

SEQ ID NO: 804825 - RNA, 22 nt, Human
ucaaaagaaacaccauguuccu

SEQ ID NO: 804826 - RNA, 22 nt, Human
auucacauuuuauuucacugga

SEQ ID NO: 804827 - RNA, 22 nt, Human
ccauuguaaagaguauacuuug

SEQ ID NO: 804828 - RNA, 22 nt, Human
auaucaaaauaaacagcaugca

SEQ ID NO: 804829 - RNA, 22 nt, Human
agaaagugugucauacuaagug

SEQ ID NO: 804830 - RNA, 20 nt, Human
gggaggccagccucagagaa

SEQ ID NO: 804831 - RNA, 22 nt, Human
aacacuuuuuauauauuguauc

SEQ ID NO: 804832 - RNA, 22 nt, Human
acuggacagaggaaauauggag

SEQ ID NO: 804833 - RNA, 22 nt, Human
ggguccagggccaguggcugag

SEQ ID NO: 804834 - RNA, 22 nt, Human
ugcuuaaacauccagacaguau

SEQ ID NO: 804835 - RNA, 22 nt, Human
cccaggagaccugugaaaggac

SEQ ID NO: 804836 - RNA, 22 nt, Human
caggggcuguggcacauggugu

SEQ ID NO: 804837 - RNA, 22 nt, Human
gcugcagcucgccuuccggccu

SEQ ID NO: 804838 - RNA, 22 nt, Human
ggcuggcuggaugaauggauua

SEQ ID NO: 804839 - RNA, 22 nt, Human
ucagaaaggccacauggugcag

SEQ ID NO: 804840 - RNA, 22 nt, Human
cauuuuauccucugggaagcua

SEQ ID NO: 804841 - RNA, 22 nt, Human
uuuuaaagagaugcugugcaua

SEQ ID NO: 804842 - RNA, 22 nt, Human
cccuccagagcuugaccugcug

SEQ ID NO: 804843 - RNA, 22 nt, Human
cuuuuuauaccgugccaguuga

SEQ ID NO: 804844 - RNA, 22 nt, Human
uuaaauuauugagggauuguca

SEQ ID NO: 804845 - RNA, 21 nt, Human
accaaaaccuauacuuucugu

SEQ ID NO: 804846 - RNA, 22 nt, Human
uaaugagaucauaucuucugag

SEQ ID NO: 804847 - RNA, 22 nt, Human
agcugcccuuaauaggcauuca

SEQ ID NO: 804848 - RNA, 22 nt, Human
auauacuguaggccacuauaag

SEQ ID NO: 804849 - RNA, 22 nt, Human
caggccugggcuucggggcuga

SEQ ID NO: 804850 - RNA, 22 nt, Human
ggcuguggcagcuggaaguggu

SEQ ID NO: 804851 - RNA, 22 nt, Human
cagugcaauguuaaauaggaaa

SEQ ID NO: 804852 - RNA, 22 nt, Human
ccuccuggguucaagcgauucu

SEQ ID NO: 804853 - RNA, 22 nt, Human
uuucaacauauaccauaaugcc

SEQ ID NO: 804854 - RNA, 22 nt, Human
aauuaauauuuguggaauuaau

SEQ ID NO: 804855 - RNA, 20 nt, Human
gagauggacagaugaagggg

SEQ ID NO: 804856 - RNA, 22 nt, Human
uaaaagaagcuucaaggccggc

SEQ ID NO: 804857 - RNA, 22 nt, Human
gaaacauucauaugagaaaccu

SEQ ID NO: 804858 - RNA, 22 nt, Human
uccugcugcucuugggaaaccu

SEQ ID NO: 804859 - RNA, 21 nt, Human
agggagcuuuagguagaaguu

SEQ ID NO: 804860 - RNA, 22 nt, Human
gugggcugaggggacaccaagg

SEQ ID NO: 804861 - RNA, 22 nt, Human
ggcaggagggcggacaaugacc

SEQ ID NO: 804862 - RNA, 22 nt, Human
uugcauguccuacaucuguguc

SEQ ID NO: 804863 - RNA, 22 nt, Human
agcagcucaacagugucucuau

SEQ ID NO: 804864 - RNA, 22 nt, Human
aucuuuggacggucccaacuga

SEQ ID NO: 804865 - RNA, 22 nt, Human
gagcuuugcuggaagccugggg

SEQ ID NO: 804866 - RNA, 22 nt, Human
ugcugaggucaccuugcugcua

SEQ ID NO: 804867 - RNA, 22 nt, Human
gccagcugccaaguugugagau

SEQ ID NO: 804868 - RNA, 17 nt, Human
ggcaccagacggagagu

SEQ ID NO: 804869 - RNA, 22 nt, Human
cugcugagacuggcuuuguguc

SEQ ID NO: 804870 - RNA, 20 nt, Human
agggccugcucugugguguc

SEQ ID NO: 804871 - RNA, 22 nt, Human
aggcugugcgaggucucagagu

SEQ ID NO: 804872 - RNA, 18 nt, Human
uguauuucuaacagcuaa

SEQ ID NO: 804873 - RNA, 22 nt, Human
uucugagcugcaacacuaacau

SEQ ID NO: 804874 - RNA, 22 nt, Human
aacugcaauuacuuuugcacca

SEQ ID NO: 804875 - RNA, 22 nt, Human
aguagcaguuuggcugaauuua

SEQ ID NO: 804876 - RNA, 22 nt, Human
auacacauauguguguauaugu

SEQ ID NO: 804877 - RNA, 22 nt, Human
ugucugaaucgcuuccuagagg

SEQ ID NO: 804878 - RNA, 22 nt, Human
acaggcagagucagguuggguu

SEQ ID NO: 804879 - RNA, 22 nt, Human
caggcuggagugcagugucgcc

SEQ ID NO: 804880 - RNA, 22 nt, Human
uuucccucugugccagcuucuc

SEQ ID NO: 804881 - RNA, 22 nt, Human
gacacaggauuccuggcucugc

SEQ ID NO: 804882 - RNA, 22 nt, Human
cacaugaaggcuggggucguga

SEQ ID NO: 804883 - RNA, 22 nt, Human
cugagggucaacuugauuguau

SEQ ID NO: 804884 - RNA, 23 nt, Human
auuuaaugcugaguugaauguua

SEQ ID NO: 804885 - RNA, 22 nt, Human
gugugcaacuuucauuaauauu

SEQ ID NO: 804886 - RNA, 22 nt, Human
agagaauuaauuaggagcacug

SEQ ID NO: 804887 - RNA, 22 nt, Human
gcagaggcacagccccagauga

SEQ ID NO: 804888 - RNA, 21 nt, Human
aauguauguuuaucucacagu

SEQ ID NO: 804889 - RNA, 22 nt, Human
agcccuccuggggccacgcugg

SEQ ID NO: 804890 - RNA, 19 nt, Human
gcacccugaggucauggcc

SEQ ID NO: 804891 - RNA, 22 nt, Human
acaggcucucuauugagugcag

SEQ ID NO: 804892 - RNA, 21 nt, Human
accucaagcaacaaccaaggu

SEQ ID NO: 804893 - RNA, 22 nt, Human
augcagcuucaggauuaugaug

SEQ ID NO: 804894 - RNA, 22 nt, Human
cugggaccuccugagguggagc

SEQ ID NO: 804895 - RNA, 22 nt, Human
uguuuuaguucugucuugcaug

SEQ ID NO: 804896 - RNA, 22 nt, Human
aaugauguauguauaaggcagg

SEQ ID NO: 804897 - RNA, 22 nt, Human
uuaugcuaaccucaucuucucc

SEQ ID NO: 804898 - RNA, 22 nt, Human
gcaguggcaugaugugggcuca

SEQ ID NO: 804899 - RNA, 22 nt, Human
aaauuguugaucuacaguaagg

SEQ ID NO: 804900 - RNA, 22 nt, Human
ccaagcuggauuuagcugcaca

SEQ ID NO: 804901 - RNA, 22 nt, Human
ccugcugugaaacuggcauaug

SEQ ID NO: 804902 - RNA, 22 nt, Human
augcaacagucaguacauccgg

SEQ ID NO: 804903 - RNA, 21 nt, Human
ccaggcugggagggcaguucc

SEQ ID NO: 804904 - RNA, 22 nt, Human
uugcagaacuuaaagacagagu

SEQ ID NO: 804905 - RNA, 17 nt, Human
ggaagaaaaggaucauc

SEQ ID NO: 804906 - RNA, 22 nt, Human
uauguucuaaccuugucuuucc

SEQ ID NO: 804907 - RNA, 22 nt, Human
cuucauagaacagaaauuuaau

SEQ ID NO: 804908 - RNA, 22 nt, Human
aagaaacugaaaguggcuucau

SEQ ID NO: 804909 - RNA, 22 nt, Human
uaguaaaaggucuuccuuuguu

SEQ ID NO: 804910 - RNA, 22 nt, Human
aaauuuuaguaaggaaguugag

SEQ ID NO: 804911 - RNA, 22 nt, Human
cuuaauaaaugguagcuguuau

SEQ ID NO: 804912 - RNA, 22 nt, Human
cagagggaguuucugagguugc

SEQ ID NO: 804913 - RNA, 18 nt, Human
cuaucccuggagcuuggg

SEQ ID NO: 804914 - RNA, 22 nt, Human
ugcugcucaaugagaugccauc

SEQ ID NO: 804915 - RNA, 22 nt, Human
aaacucuuccuuucuuuaaagu

SEQ ID NO: 804916 - RNA, 22 nt, Human
ugguugugcacggagcugcagg

SEQ ID NO: 804917 - RNA, 22 nt, Human
ucuccaaauaguuauauuuaga

SEQ ID NO: 804918 - RNA, 21 nt, Human
uuaauuuauucaugauagcua

SEQ ID NO: 804919 - RNA, 22 nt, Human
auacucaagguuaaugauugaa

SEQ ID NO: 804920 - RNA, 22 nt, Human
auacuuuuaauuccuucugagu

SEQ ID NO: 804921 - RNA, 22 nt, Human
ggcugcagguugguuggcagcu

SEQ ID NO: 804922 - RNA, 22 nt, Human
acucauuugcaugaugugcuau

SEQ ID NO: 804923 - RNA, 22 nt, Human
cuuuucaugagucuguuauggg

SEQ ID NO: 804924 - RNA, 22 nt, Human
agcacuuuaagcaacagaucaa

SEQ ID NO: 804925 - RNA, 22 nt, Human
aucauucuauuguugagcugcc

SEQ ID NO: 804926 - RNA, 22 nt, Human
ugggugagcggcugcacacccg

SEQ ID NO: 804927 - RNA, 22 nt, Human
uaacaaacuggaaauugacauu

SEQ ID NO: 804928 - RNA, 22 nt, Human
ugcagaagcugcaggucagugg

SEQ ID NO: 804929 - RNA, 22 nt, Human
uacuacaaggccgaagcucuca

SEQ ID NO: 804930 - RNA, 22 nt, Human
uagaaauggggaaguaguuagg

SEQ ID NO: 804931 - RNA, 19 nt, Human
cuggcugcaaugccagggu

SEQ ID NO: 804932 - RNA, 18 nt, Human
uuuauauggauagagacc

SEQ ID NO: 804933 - RNA, 22 nt, Human
acaggcagugggccagauuugu

SEQ ID NO: 804934 - RNA, 22 nt, Human
caaacauuuucuacuuccagga

SEQ ID NO: 804935 - RNA, 22 nt, Human
uuuuggcucuugguaggucaga

SEQ ID NO: 804936 - RNA, 16 nt, Human
gcuccugggcccucga

SEQ ID NO: 804937 - RNA, 22 nt, Human
gugacagugacagcuagauagu

SEQ ID NO: 804938 - RNA, 22 nt, Human
cagagggccaucucuaucuuca

SEQ ID NO: 804939 - RNA, 22 nt, Human
uaaauagaaucuaaacugcuca

SEQ ID NO: 804940 - RNA, 22 nt, Human
uaaguaauuugugcagagauac

SEQ ID NO: 804941 - RNA, 20 nt, Human
augcaaacucacaaaauacc

SEQ ID NO: 804942 - RNA, 19 nt, Human
gggccucacccacaccucc

SEQ ID NO: 804943 - RNA, 22 nt, Human
uccuggccgcuggccccugaga

SEQ ID NO: 804944 - RNA, 21 nt, Human
gggcucagcgcucggcuccuc

SEQ ID NO: 804945 - RNA, 22 nt, Human
caggcaggagccagggauucca

SEQ ID NO: 804946 - RNA, 22 nt, Human
ccaggagagcaggcgugcagcu

SEQ ID NO: 804947 - RNA, 22 nt, Human
aggacgcucucgcugaacuucu

SEQ ID NO: 804948 - RNA, 22 nt, Human
gauuuuauagucaggaaaaaga

SEQ ID NO: 804949 - RNA, 22 nt, Human
agaguguaccaaauauccuaca

SEQ ID NO: 804950 - RNA, 22 nt, Human
ucuauuguaggcauguagcuug

SEQ ID NO: 804951 - RNA, 22 nt, Human
caggaaauucuuuuguuugugc

SEQ ID NO: 804952 - RNA, 22 nt, Human
gaagacagaaaccuguuuggcu

SEQ ID NO: 804953 - RNA, 22 nt, Human
auucuucacaccuguuccuguu

SEQ ID NO: 804954 - RNA, 22 nt, Human
uaauagcauuaucaucaaaacu

SEQ ID NO: 804955 - RNA, 22 nt, Human
ccaggcaggcgauggugcagug

SEQ ID NO: 804956 - RNA, 22 nt, Human
gcagagccccauugcuggcggg

SEQ ID NO: 804957 - RNA, 22 nt, Human
aagccagguguuuaggccagcg

SEQ ID NO: 804958 - RNA, 22 nt, Human
cugaaauguuaaauacuuggcu

SEQ ID NO: 804959 - RNA, 22 nt, Human
cccuaggcugaggccagggugc

SEQ ID NO: 804960 - RNA, 22 nt, Human
ggaugcuggggaccaaucucug

SEQ ID NO: 804961 - RNA, 23 nt, Human
uucaaagaucuucugaaaucugu

SEQ ID NO: 804962 - RNA, 22 nt, Human
agccacauggaccugaugcuag

SEQ ID NO: 804963 - RNA, 22 nt, Human
uuuuaucuaccuaugcucauuu

SEQ ID NO: 804964 - RNA, 22 nt, Human
auuugauuagcuguguaauuuu

SEQ ID NO: 804965 - RNA, 22 nt, Human
acugcguggggagcugugacua

SEQ ID NO: 804966 - RNA, 22 nt, Human
uggcccugcuguaucaucugcu

SEQ ID NO: 804967 - RNA, 22 nt, Human
aauauaguucuagaaauauuuu

SEQ ID NO: 804968 - RNA, 22 nt, Human
acucgugucaagauccuaaguc

SEQ ID NO: 804969 - RNA, 22 nt, Human
uggccaugggauagugcagggg

SEQ ID NO: 804970 - RNA, 22 nt, Human
cacaggagaaaggggaagcucg

SEQ ID NO: 804971 - RNA, 22 nt, Human
uggccaguaauagcuucuggug

SEQ ID NO: 804972 - RNA, 22 nt, Human
ugggcgaggcccagggcugcgu

SEQ ID NO: 804973 - RNA, 22 nt, Human
auuuacauuuauuugagaaggu

SEQ ID NO: 804974 - RNA, 22 nt, Human
uaggcuggaggaagcagugccu

SEQ ID NO: 804975 - RNA, 22 nt, Human
ccucccacauugaggacaugcu

SEQ ID NO: 804976 - RNA, 22 nt, Human
gcugccuccugaaagcgcucug

SEQ ID NO: 804977 - RNA, 22 nt, Human
uuacagaguggucuggcuaugu

SEQ ID NO: 804978 - RNA, 22 nt, Human
uaacaauacccauucuaauuac

SEQ ID NO: 804979 - RNA, 22 nt, Human
uccuggcaggguggcagcgggu

SEQ ID NO: 804980 - RNA, 22 nt, Human
ugaggccaggaucccaggcucu

SEQ ID NO: 804981 - RNA, 22 nt, Human
gaaauacaguugggaggaggua

SEQ ID NO: 804982 - RNA, 22 nt, Human
cugagaggcggagguugcagug

SEQ ID NO: 804983 - RNA, 22 nt, Human
uuaaugccaacaaagugauuuu

SEQ ID NO: 804984 - RNA, 22 nt, Human
ugagcagaggccagcaccuggg

SEQ ID NO: 804985 - RNA, 22 nt, Human
ggcagauggggugacaagagag

SEQ ID NO: 804986 - RNA, 22 nt, Human
uggucagguaccucuggcuguc

SEQ ID NO: 804987 - RNA, 22 nt, Human
caggcuggacauuagauacaua

SEQ ID NO: 804988 - RNA, 21 nt, Human
ccaggaaggacugagcucccu

SEQ ID NO: 804989 - RNA, 22 nt, Human
gcagcccucggguacucacgug

SEQ ID NO: 804990 - RNA, 22 nt, Human
uccaggcuggacaugaggcggg

SEQ ID NO: 804991 - RNA, 22 nt, Human
acaggcagguccugucccagcu

SEQ ID NO: 804992 - RNA, 20 nt, Human
uguggaugagguaaggauag

SEQ ID NO: 804993 - RNA, 22 nt, Human
accuuguuguagguacaaaaga

SEQ ID NO: 804994 - RNA, 22 nt, Human
aaacauguuuucugaauauuuu

SEQ ID NO: 804995 - RNA, 22 nt, Human
ugguucuaggcuuugucuuuug

SEQ ID NO: 804996 - RNA, 22 nt, Human
accagcuguguccuggcugcag

SEQ ID NO: 804997 - RNA, 22 nt, Human
aagugacauaccuuacauaugu

SEQ ID NO: 804998 - RNA, 22 nt, Human
ccaggggaaacagggagcacuc

SEQ ID NO: 804999 - RNA, 22 nt, Human
cuggagcucagcccagguucca

SEQ ID NO: 805000 - RNA, 22 nt, Human
agguggcagccgagacauaagg

SEQ ID NO: 805001 - RNA, 22 nt, Human
cuacauuuacacaguuaggcuu

SEQ ID NO: 805002 - RNA, 22 nt, Human
cuuggauuugggcccuuaaauu

SEQ ID NO: 805003 - RNA, 22 nt, Human
uggcccagcccugcucuagggc

SEQ ID NO: 805004 - RNA, 22 nt, Human
aaagcagggaugaggcuagagg

SEQ ID NO: 805005 - RNA, 22 nt, Human
gccaggcuggcaaaaggaaacc

SEQ ID NO: 805006 - RNA, 22 nt, Human
ggcggugguugagaggacggcg

SEQ ID NO: 805007 - RNA, 20 nt, Human
ucauggcagccacccacagg

SEQ ID NO: 805008 - RNA, 22 nt, Human
caaggacagcgucaggugcaac

SEQ ID NO: 805009 - RNA, 22 nt, Human
ggaaagagcuaaaagggugaga

SEQ ID NO: 805010 - RNA, 22 nt, Human
cccccaggcucugacacaggag

SEQ ID NO: 805011 - RNA, 22 nt, Human
aaauaaacugaagcacagagag

SEQ ID NO: 805012 - RNA, 22 nt, Human
cauugcaacuucaaacuccugg

SEQ ID NO: 805013 - RNA, 22 nt, Human
ucauaaaguucuaagaauugua

SEQ ID NO: 805014 - RNA, 22 nt, Human
uuuggaggggaagaccuuggag

SEQ ID NO: 805015 - RNA, 22 nt, Human
augcuggggccucagaccagaa

SEQ ID NO: 805016 - RNA, 22 nt, Human
ucaaggaauggguccuucccuu

SEQ ID NO: 805017 - RNA, 22 nt, Human
aggcccagugccauuaguuuug

SEQ ID NO: 805018 - RNA, 22 nt, Human
uagugucagcaucucauugagc

SEQ ID NO: 805019 - RNA, 22 nt, Human
auuucauguuucaucuaccuaa

SEQ ID NO: 805020 - RNA, 23 nt, Human
ucauaaauauuagcacaguagga

SEQ ID NO: 805021 - RNA, 22 nt, Human
aaggcugguuccaucccuggug

SEQ ID NO: 805022 - RNA, 22 nt, Human
gugcauuaggcuggaauguuga

SEQ ID NO: 805023 - RNA, 22 nt, Human
ugaauguuugaugagaaauaga

SEQ ID NO: 805024 - RNA, 22 nt, Human
caggccucuauggucagcugag

SEQ ID NO: 805025 - RNA, 22 nt, Human
uaguuaaugcuaauuaacaaau

SEQ ID NO: 805026 - RNA, 22 nt, Human
agccaauacacugaagaucuaa

SEQ ID NO: 805027 - RNA, 22 nt, Human
ucuggcugaaaggggcugugcc

SEQ ID NO: 805028 - RNA, 22 nt, Human
cagagaugugauccagcugucu

SEQ ID NO: 805029 - RNA, 20 nt, Human
cagcccugugaccuggcccu

SEQ ID NO: 805030 - RNA, 22 nt, Human
cagcuggcgggcagagccgcca

SEQ ID NO: 805031 - RNA, 22 nt, Human
gggcucagaggaguggccuggg

SEQ ID NO: 805032 - RNA, 22 nt, Human
gugucaaauccacuccucuuuu

SEQ ID NO: 805033 - RNA, 19 nt, Human
gcugcagcagagaaacugg

SEQ ID NO: 805034 - RNA, 22 nt, Human
uauacagaaagaauucaagucu

SEQ ID NO: 805035 - RNA, 23 nt, Human
uuguuuuuagagguggcaugaga

SEQ ID NO: 805036 - RNA, 22 nt, Human
agggugcaaaagcaaggacagu

SEQ ID NO: 805037 - RNA, 22 nt, Human
gaggugguuuguggugacucau

SEQ ID NO: 805038 - RNA, 22 nt, Human
aguuucuaugugaaaugcacau

SEQ ID NO: 805039 - RNA, 22 nt, Human
aaagagaaacuuagaagccuga

SEQ ID NO: 805040 - RNA, 22 nt, Human
uaggaaauauuugaacauagga

SEQ ID NO: 805041 - RNA, 22 nt, Human
gggcuguguacuaugaggaggg

SEQ ID NO: 805042 - RNA, 22 nt, Human
agucucuuuguauaaauaggca

SEQ ID NO: 805043 - RNA, 22 nt, Human
caggguagggcaagggaaccug

SEQ ID NO: 805044 - RNA, 22 nt, Human
aacaucuacagugagauguuag

SEQ ID NO: 805045 - RNA, 22 nt, Human
auaagcagggucaaaugccuac

SEQ ID NO: 805046 - RNA, 23 nt, Human
caugcaaacacuauugcauuugg

SEQ ID NO: 805047 - RNA, 22 nt, Human
aguaugucagagugaaaauggu

SEQ ID NO: 805048 - RNA, 22 nt, Human
gaaggcuuuuuggguaauugua

SEQ ID NO: 805049 - RNA, 22 nt, Human
gcacagagagcagugggggaca

SEQ ID NO: 805050 - RNA, 21 nt, Human
aggcagcucaggcccagagag

SEQ ID NO: 805051 - RNA, 21 nt, Human
gcccagagggagccaagccca

SEQ ID NO: 805052 - RNA, 22 nt, Human
agccuggccugggcaggcacau

SEQ ID NO: 805053 - RNA, 22 nt, Human
gcugcugggauccugggucuca

SEQ ID NO: 805054 - RNA, 22 nt, Human
augcauucuggaaaguagcaau

SEQ ID NO: 805055 - RNA, 22 nt, Human
gcaggaacccagacaaccaggg

SEQ ID NO: 805056 - RNA, 23 nt, Human
gcuugucuagugaauucauaucu

SEQ ID NO: 805057 - RNA, 17 nt, Human
auggucucacugagcaa

SEQ ID NO: 805058 - RNA, 19 nt, Human
uuucaggagcuaugcaggg

SEQ ID NO: 805059 - RNA, 22 nt, Human
gggagggaggugaugcuuggcu

SEQ ID NO: 805060 - RNA, 22 nt, Human
cugagaaggaagccuccacucu

SEQ ID NO: 805061 - RNA, 22 nt, Human
gagucagacagggucacccaga

SEQ ID NO: 805062 - RNA, 22 nt, Human
accaccccagaauuuuucaagg

SEQ ID NO: 805063 - RNA, 22 nt, Human
auguuuauguugggcuauauuu

SEQ ID NO: 805064 - RNA, 22 nt, Human
aggaugaauauuuagugggaua

SEQ ID NO: 805065 - RNA, 23 nt, Human
ugagcugguauuguccaucucca

SEQ ID NO: 805066 - RNA, 22 nt, Human
ccagggcuggugggagaugcug

SEQ ID NO: 805067 - RNA, 23 nt, Human
gugcugcaaaaucggccacugca

SEQ ID NO: 805068 - RNA, 20 nt, Human
auauaccaucccacaacagg

SEQ ID NO: 805069 - RNA, 22 nt, Human
gucaagucaugacucaaaggaa

SEQ ID NO: 805070 - RNA, 22 nt, Human
gcagagguggcaucugggcucu

SEQ ID NO: 805071 - RNA, 22 nt, Human
agcuuugcacaacagagaggug

SEQ ID NO: 805072 - RNA, 22 nt, Human
aguccaggaagcaucauggucu

SEQ ID NO: 805073 - RNA, 22 nt, Human
gaagccaagugcaaaugccuua

SEQ ID NO: 805074 - RNA, 22 nt, Human
ucugcuggccuuagcaggucua

SEQ ID NO: 805075 - RNA, 22 nt, Human
cuccugucccggggaccgccga

SEQ ID NO: 805076 - RNA, 22 nt, Human
cuggcagucugguggaaggccu

SEQ ID NO: 805077 - RNA, 19 nt, Human
gccaggcuccauagccggc

SEQ ID NO: 805078 - RNA, 22 nt, Human
aaggcaguaggaucuuccacag

SEQ ID NO: 805079 - RNA, 18 nt, Human
ugcagccuguagucuugu

SEQ ID NO: 805080 - RNA, 22 nt, Human
gguggcagagacauaggacaua

SEQ ID NO: 805081 - RNA, 22 nt, Human
ucaaauaaugccauucaucauc

SEQ ID NO: 805082 - RNA, 22 nt, Human
aguuauucauuuauucuguaca

SEQ ID NO: 805083 - RNA, 22 nt, Human
cauaauaucuccgauuacuugc

SEQ ID NO: 805084 - RNA, 22 nt, Human
ccuggcucaggcacgcauggcu

SEQ ID NO: 805085 - RNA, 22 nt, Human
aaaaguacuauuuuaacaaagu

SEQ ID NO: 805086 - RNA, 22 nt, Human
aggaacccggucugucacugug

SEQ ID NO: 805087 - RNA, 22 nt, Human
gcagugggccugaggaagggug

SEQ ID NO: 805088 - RNA, 22 nt, Human
uuaaggaaacauuuuuccauag

SEQ ID NO: 805089 - RNA, 22 nt, Human
ucuuugaugggagaucugagag

SEQ ID NO: 805090 - RNA, 22 nt, Human
uuguuucuccagucuaggaaaa

SEQ ID NO: 805091 - RNA, 22 nt, Human
gaggccaggagugcuguaaguu

SEQ ID NO: 805092 - RNA, 22 nt, Human
ccucaaauagcccccagucuag

SEQ ID NO: 805093 - RNA, 22 nt, Human
acaauuuuaagccagagugggu

SEQ ID NO: 805094 - RNA, 22 nt, Human
cccacaggcaggggcagagaca

SEQ ID NO: 805095 - RNA, 22 nt, Human
gaggcaggcccugaaugaguca

SEQ ID NO: 805096 - RNA, 22 nt, Human
caggcugaggguuaggccuuag

SEQ ID NO: 805097 - RNA, 22 nt, Human
ugcagaggcuggcucgccgggu

SEQ ID NO: 805098 - RNA, 22 nt, Human
aggcuccauucaugugaaggca

SEQ ID NO: 805099 - RNA, 22 nt, Human
uuacaacaaaggcacgugcaug

SEQ ID NO: 805100 - RNA, 22 nt, Human
ugccagggacccugucggcccu

SEQ ID NO: 805101 - RNA, 22 nt, Human
gaggccugguuugcaugagaau

SEQ ID NO: 805102 - RNA, 22 nt, Human
uccugccuaccuugcggaggug

SEQ ID NO: 805103 - RNA, 22 nt, Human
acugucuccucaucaugccugg

SEQ ID NO: 805104 - RNA, 22 nt, Human
agccacagguguuggccagugu

SEQ ID NO: 805105 - RNA, 22 nt, Human
caggcagaugcugacaagaguu

SEQ ID NO: 805106 - RNA, 22 nt, Human
agcagccacccagcugcucauu

SEQ ID NO: 805107 - RNA, 23 nt, Human
agggugagcaagcuauggagacc

SEQ ID NO: 805108 - RNA, 22 nt, Human
acuuucaauuugcacuaaccua

SEQ ID NO: 805109 - RNA, 19 nt, Human
ugccagcauuaggcugaag

SEQ ID NO: 805110 - RNA, 22 nt, Human
aaagaagacagacauuucuuuc

SEQ ID NO: 805111 - RNA, 22 nt, Human
uaaggaaacaacuuguauuuuu

SEQ ID NO: 805112 - RNA, 22 nt, Human
aagauaaacucuugauuucuga

SEQ ID NO: 805113 - RNA, 22 nt, Human
ugccacagagacuuucauugua

SEQ ID NO: 805114 - RNA, 22 nt, Human
uuuccucuccaccaggaggucu

SEQ ID NO: 805115 - RNA, 22 nt, Human
gcuggcuccucuguccucacgg

SEQ ID NO: 805116 - RNA, 22 nt, Human
uggauaaacucacuguaaguug

SEQ ID NO: 805117 - RNA, 17 nt, Human
gugcagggaugaaggau

SEQ ID NO: 805118 - RNA, 18 nt, Human
gccuucagacugcaugcu

SEQ ID NO: 805119 - RNA, 22 nt, Human
ucaggcugaaggaggccuaucu

SEQ ID NO: 805120 - RNA, 22 nt, Human
aggcugugcaauuaggguaaga

SEQ ID NO: 805121 - RNA, 22 nt, Human
uccaggagaaggccauccagcg

SEQ ID NO: 805122 - RNA, 22 nt, Human
uagggcugugucuccaggacca

SEQ ID NO: 805123 - RNA, 21 nt, Human
gagcccaggcaucucauuaau

SEQ ID NO: 805124 - RNA, 22 nt, Human
agucccaacagcuuacaaggaa

SEQ ID NO: 805125 - RNA, 22 nt, Human
ggugcagagcagugucagagca

SEQ ID NO: 805126 - RNA, 22 nt, Human
gacaggcccccucaggacugau

SEQ ID NO: 805127 - RNA, 22 nt, Human
auauauucuuaaagaaucugac

SEQ ID NO: 805128 - RNA, 22 nt, Human
gaggcacaucacuuggugcauu

SEQ ID NO: 805129 - RNA, 22 nt, Human
aagcaggcucacgccaggcagu

SEQ ID NO: 805130 - RNA, 22 nt, Human
uugacacagucaacuugauuuu

SEQ ID NO: 805131 - RNA, 20 nt, Human
uucuaaacuguuaggcuugc

SEQ ID NO: 805132 - RNA, 20 nt, Human
gcagggcaucuuggccccca

SEQ ID NO: 805133 - RNA, 22 nt, Human
uguauuuugaguccaaucuccu

SEQ ID NO: 805134 - RNA, 22 nt, Human
aggcugcuggcaggcguggacg

SEQ ID NO: 805135 - RNA, 22 nt, Human
aucacaggugguaggaaaagaa

SEQ ID NO: 805136 - RNA, 22 nt, Human
ccaguaaauuacuugaugucau

SEQ ID NO: 805137 - RNA, 22 nt, Human
ucacacaggguucuggucucau

SEQ ID NO: 805138 - RNA, 22 nt, Human
auucaacuuauaagauauuaau

SEQ ID NO: 805139 - RNA, 21 nt, Human
uucaucauugguaaaaagugg

SEQ ID NO: 805140 - RNA, 22 nt, Human
uucaacaaugcacuugaguaua

SEQ ID NO: 805141 - RNA, 22 nt, Human
gaggcugguuugccuuuuggca

SEQ ID NO: 805142 - RNA, 22 nt, Human
aauaaacaaauccuuccuuccc

SEQ ID NO: 805143 - RNA, 22 nt, Human
cacauacaugcacaccuaaaua

SEQ ID NO: 805144 - RNA, 22 nt, Human
uucauuugggaugagucagaag

SEQ ID NO: 805145 - RNA, 22 nt, Human
augcauaugccguagaauaagu

SEQ ID NO: 805146 - RNA, 22 nt, Human
agagaugacugauggcugauua

SEQ ID NO: 805147 - RNA, 22 nt, Human
uuagaaauacaagugagguuga

SEQ ID NO: 805148 - RNA, 22 nt, Human
ucccugccugacagcacccacc

SEQ ID NO: 805149 - RNA, 22 nt, Human
cagcugcugcccuuggcugcag

SEQ ID NO: 805150 - RNA, 22 nt, Human
ggucugaggcuccaaggaggug

SEQ ID NO: 805151 - RNA, 18 nt, Human
uacaugcauaaaugaagc

SEQ ID NO: 805152 - RNA, 22 nt, Human
cccagccuggugcacugugggg

SEQ ID NO: 805153 - RNA, 22 nt, Human
ugcuuauuugaauuuauucuca

SEQ ID NO: 805154 - RNA, 22 nt, Human
ugccaggagucaggccaggcag

SEQ ID NO: 805155 - RNA, 22 nt, Human
ccagugggagggagcuaggcca

SEQ ID NO: 805156 - RNA, 22 nt, Human
caguggagaggcaugcuuggca

SEQ ID NO: 805157 - RNA, 22 nt, Human
ugggaagguacacgggaaagag

SEQ ID NO: 805158 - RNA, 22 nt, Human
aacauaauguggccaaagucac

SEQ ID NO: 805159 - RNA, 22 nt, Human
ccugcagagcaggagaggcauc

SEQ ID NO: 805160 - RNA, 19 nt, Human
agcagcuuaauuuuguagc

SEQ ID NO: 805161 - RNA, 22 nt, Human
uuucuugagcuaggaaccuggg

SEQ ID NO: 805162 - RNA, 22 nt, Human
augauacaucuuguuuauuuca

SEQ ID NO: 805163 - RNA, 22 nt, Human
ggaagcuguugugagugcagca

SEQ ID NO: 805164 - RNA, 22 nt, Human
cuccugggcucaagugauccuc

SEQ ID NO: 805165 - RNA, 22 nt, Human
acaggcaacuucaaaucucacu

SEQ ID NO: 805166 - RNA, 22 nt, Human
ugcggaaggcagcgcagggugg

SEQ ID NO: 805167 - RNA, 22 nt, Human
caggcagaggcuuuucauggcu

SEQ ID NO: 805168 - RNA, 22 nt, Human
uggcugugucccuguccagagu

SEQ ID NO: 805169 - RNA, 22 nt, Human
ggcacagcgacuaccaucgaaa

SEQ ID NO: 805170 - RNA, 22 nt, Human
uuccuggguuuacguauugggu

SEQ ID NO: 805171 - RNA, 22 nt, Human
auucacaugcccaagcagcacc

SEQ ID NO: 805172 - RNA, 22 nt, Human
ucucuucugaaaccugucuuua

SEQ ID NO: 805173 - RNA, 21 nt, Human
acuggcuggcugaguuuccug

SEQ ID NO: 805174 - RNA, 22 nt, Human
aaguuugucucauuugaucuuc

SEQ ID NO: 805175 - RNA, 22 nt, Human
uuucuuuugcccuguggguuag

SEQ ID NO: 805176 - RNA, 22 nt, Human
aacagcuuugcuucuggagaca

SEQ ID NO: 805177 - RNA, 21 nt, Human
gcugagagguugggaaguuca

SEQ ID NO: 805178 - RNA, 22 nt, Human
uucuacaucacuuaacaugcua

SEQ ID NO: 805179 - RNA, 22 nt, Human
cuccugggaggaugcggacccg

SEQ ID NO: 805180 - RNA, 22 nt, Human
ggaggaggcggcagaaguuccu

SEQ ID NO: 805181 - RNA, 22 nt, Human
cagacaaagcggaaacuguuua

SEQ ID NO: 805182 - RNA, 22 nt, Human
ugcuucaugagguaguggcagu

SEQ ID NO: 805183 - RNA, 22 nt, Human
aggggagcuugccuggucaccc

SEQ ID NO: 805184 - RNA, 20 nt, Human
accagagauagcaauagugc

SEQ ID NO: 805185 - RNA, 22 nt, Human
ucauugaguaauacuguagugu

SEQ ID NO: 805186 - RNA, 22 nt, Human
aggcaagcccccagugaggcuc

SEQ ID NO: 805187 - RNA, 22 nt, Human
gucagaggaggcugaguaggaa

SEQ ID NO: 805188 - RNA, 22 nt, Human
caugcuccagcuccagacaggu

SEQ ID NO: 805189 - RNA, 22 nt, Human
uguuauuugggaaaguuguaca

SEQ ID NO: 805190 - RNA, 22 nt, Human
ucacaucuuuaggcuuacaggu

SEQ ID NO: 805191 - RNA, 22 nt, Human
uccagcagaccaucaaggcuca

SEQ ID NO: 805192 - RNA, 20 nt, Human
agacagaaucagagauaaag

SEQ ID NO: 805193 - RNA, 22 nt, Human
gcucaaaucccagcgggcuccu

SEQ ID NO: 805194 - RNA, 22 nt, Human
ccuaaauagagucagauguaau

SEQ ID NO: 805195 - RNA, 22 nt, Human
aaaggcucaugaaccaggcucg

SEQ ID NO: 805196 - RNA, 22 nt, Human
uaugaauucuguucauugauga

SEQ ID NO: 805197 - RNA, 22 nt, Human
uauuagauuuguuucuguagau

SEQ ID NO: 805198 - RNA, 22 nt, Human
uuagugaucaaaaucaaaauug

SEQ ID NO: 805199 - RNA, 22 nt, Human
cuccaggagggcuuccugugau

SEQ ID NO: 805200 - RNA, 18 nt, Human
ucugcccugccauucacu

SEQ ID NO: 805201 - RNA, 22 nt, Human
ccagagccggcucccucagcuu

SEQ ID NO: 805202 - RNA, 21 nt, Human
cacagcaggguuccugggcuc

SEQ ID NO: 805203 - RNA, 21 nt, Human
cauucacagucuggcucuuga

SEQ ID NO: 805204 - RNA, 22 nt, Human
ugcacagaugcuaggaggugaa

SEQ ID NO: 805205 - RNA, 22 nt, Human
ucugagccagacaagacagcca

SEQ ID NO: 805206 - RNA, 21 nt, Human
cugcaaaugcaaggugaccag

SEQ ID NO: 805207 - RNA, 22 nt, Human
aggcugagucgggaggaucacu

SEQ ID NO: 805208 - RNA, 22 nt, Human
ugcaccguugcacuccagagug

SEQ ID NO: 805209 - RNA, 22 nt, Human
ccacagaauucugucuccagga

SEQ ID NO: 805210 - RNA, 22 nt, Human
aaugcucucugccauagcuaac

SEQ ID NO: 805211 - RNA, 23 nt, Human
ugguugcagugccaaguaucacg

SEQ ID NO: 805212 - RNA, 22 nt, Human
ccaggagcaccaggccugugcc

SEQ ID NO: 805213 - RNA, 22 nt, Human
uagagcugauaaugaggccaag

SEQ ID NO: 805214 - RNA, 22 nt, Human
gcucccaccuccagccugaguu

SEQ ID NO: 805215 - RNA, 22 nt, Human
aguagaaauguaagaaggauua

SEQ ID NO: 805216 - RNA, 20 nt, Human
aaaggaauauaugaaguaua

SEQ ID NO: 805217 - RNA, 22 nt, Human
caguggcagagaacagagaccu

SEQ ID NO: 805218 - RNA, 18 nt, Human
ucccuucucccuugccuc

SEQ ID NO: 805219 - RNA, 22 nt, Human
uagacuuugauauuguacaccc

SEQ ID NO: 805220 - RNA, 23 nt, Human
acauagaacagaauauauuugug

SEQ ID NO: 805221 - RNA, 22 nt, Human
caggcucccugggcaguggcag

SEQ ID NO: 805222 - RNA, 22 nt, Human
gguagggaaggcucugcgggga

SEQ ID NO: 805223 - RNA, 22 nt, Human
accugucugcaugaucuaaaac

SEQ ID NO: 805224 - RNA, 22 nt, Human
uaugacauuucucugauuugug

SEQ ID NO: 805225 - RNA, 22 nt, Human
cccuccucaacucuggcuucca

SEQ ID NO: 805226 - RNA, 22 nt, Human
cagaggagaauugcgggaucau

SEQ ID NO: 805227 - RNA, 22 nt, Human
cagcccagccuugucucuuuau

SEQ ID NO: 805228 - RNA, 22 nt, Human
cacaggaggaggugcccgggcc

SEQ ID NO: 805229 - RNA, 22 nt, Human
aacagucuuggaagucuuguua

SEQ ID NO: 805230 - RNA, 22 nt, Human
uggacagguuugggugccuguu

SEQ ID NO: 805231 - RNA, 22 nt, Human
auucacaugauguauguagggc

SEQ ID NO: 805232 - RNA, 23 nt, Human
cuggucagaggcugcuggaaggg

SEQ ID NO: 805233 - RNA, 17 nt, Human
cauuugcugguuggcuc

SEQ ID NO: 805234 - RNA, 22 nt, Human
cuggcacauagucagcacucaa

SEQ ID NO: 805235 - RNA, 22 nt, Human
gaacagcugcuagagaucugug

SEQ ID NO: 805236 - RNA, 22 nt, Human
cccucuacagggaagcgcuuuc

SEQ ID NO: 805237 - RNA, 22 nt, Human
cgcagagggcaggcagugcugg

SEQ ID NO: 805238 - RNA, 22 nt, Human
uaauacaaggcaggaagcagua

SEQ ID NO: 805239 - RNA, 22 nt, Human
caggcagaaugaccgaccucgc

SEQ ID NO: 805240 - RNA, 22 nt, Human
ggcugccucugaugugcagacg

SEQ ID NO: 805241 - RNA, 22 nt, Human
ggagagagagcucauuagcugc

SEQ ID NO: 805242 - RNA, 22 nt, Human
gaggcagagaccuucaggaccu

SEQ ID NO: 805243 - RNA, 22 nt, Human
gacugaggugcccagaggugac

SEQ ID NO: 805244 - RNA, 22 nt, Human
cccuggcucugccucagagccc

SEQ ID NO: 805245 - RNA, 20 nt, Human
ugugagaggguggcuugccc

SEQ ID NO: 805246 - RNA, 22 nt, Human
agucacuuucuacuugguuucu

SEQ ID NO: 805247 - RNA, 20 nt, Human
gaaacauuggcagcaacuga

SEQ ID NO: 805248 - RNA, 22 nt, Human
cuggacagaucccuuguagcuu

SEQ ID NO: 805249 - RNA, 22 nt, Human
gucagugugguugcuggcuugg

SEQ ID NO: 805250 - RNA, 22 nt, Human
cugggaguggugacagcucucg

SEQ ID NO: 805251 - RNA, 22 nt, Human
cagcagaggcacgucugugaau

SEQ ID NO: 805252 - RNA, 22 nt, Human
caguaauagcagagucuuccau

SEQ ID NO: 805253 - RNA, 18 nt, Human
cacaggagccacacucac

SEQ ID NO: 805254 - RNA, 19 nt, Human
gcugcuggcucuggcugga

SEQ ID NO: 805255 - RNA, 22 nt, Human
cccagcaucuccaggcauggcc

SEQ ID NO: 805256 - RNA, 22 nt, Human
cugccucuauucacugaggcag

SEQ ID NO: 805257 - RNA, 22 nt, Human
cugucccagauguucucagcac

SEQ ID NO: 805258 - RNA, 22 nt, Human
ccuuuggagcaacugagagcua

SEQ ID NO: 805259 - RNA, 22 nt, Human
aggcagaaaauagucauccaaa

SEQ ID NO: 805260 - RNA, 22 nt, Human
cgcaggcaagagaguacaguua

SEQ ID NO: 805261 - RNA, 22 nt, Human
uuguuacauacagcagaacaua

SEQ ID NO: 805262 - RNA, 22 nt, Human
uuuucuaacaucuaguaauuug

SEQ ID NO: 805263 - RNA, 22 nt, Human
ucauggggcucuucaaguggag

SEQ ID NO: 805264 - RNA, 22 nt, Human
gcugugcugcgggaggauuccg

SEQ ID NO: 805265 - RNA, 22 nt, Human
gagggggcgaacagaagcaagg

SEQ ID NO: 805266 - RNA, 22 nt, Human
guccugugugagugcaccaccu

SEQ ID NO: 805267 - RNA, 22 nt, Human
aggggaaaugccuuggugguac

SEQ ID NO: 805268 - RNA, 22 nt, Human
acuauacauaaaacauuugggu

SEQ ID NO: 805269 - RNA, 22 nt, Human
cagaauguagaucaucaucaag

SEQ ID NO: 805270 - RNA, 18 nt, Human
uauuucccaauggaaaca

SEQ ID NO: 805271 - RNA, 22 nt, Human
acagccuugcuuauuugucucu

SEQ ID NO: 805272 - RNA, 19 nt, Human
uccagcugguaugcccaga

SEQ ID NO: 805273 - RNA, 22 nt, Human
aguguacaguucuaugaauuuc

SEQ ID NO: 805274 - RNA, 22 nt, Human
acaacauuauacauagaaagcu

SEQ ID NO: 805275 - RNA, 17 nt, Human
cugggccucugcccuuu

SEQ ID NO: 805276 - RNA, 22 nt, Human
augaaaugucuggaucuuuuuc

SEQ ID NO: 805277 - RNA, 22 nt, Human
gggauggccuagacuagcuugg

SEQ ID NO: 805278 - RNA, 22 nt, Human
auuuuauccccacuggauuaca

SEQ ID NO: 805279 - RNA, 22 nt, Human
cacacaggagagugcuggaggu

SEQ ID NO: 805280 - RNA, 22 nt, Human
gcacaguaccugucacagaggc

SEQ ID NO: 805281 - RNA, 22 nt, Human
acacaaacagucuauagcacca

SEQ ID NO: 805282 - RNA, 22 nt, Human
caugcauagaaugaagaggcug

SEQ ID NO: 805283 - RNA, 22 nt, Human
uaugcaaaucauuagauuuccu

SEQ ID NO: 805284 - RNA, 22 nt, Human
agcagggcugcggccccaccac

SEQ ID NO: 805285 - RNA, 22 nt, Human
gaggggcaaugagggaaagagu

SEQ ID NO: 805286 - RNA, 22 nt, Human
ucacaucuuggauuacaauuuu

SEQ ID NO: 805287 - RNA, 19 nt, Human
cuguggccuccaggaggga

SEQ ID NO: 805288 - RNA, 22 nt, Human
acuucauguuguuuacaacuua

SEQ ID NO: 805289 - RNA, 19 nt, Human
gcuugggagagggagcuaa

SEQ ID NO: 805290 - RNA, 22 nt, Human
uggcacacagagaagacacuug

SEQ ID NO: 805291 - RNA, 22 nt, Human
gcacaggaaaugacucauguua

SEQ ID NO: 805292 - RNA, 21 nt, Human
cucuggaguuugaaggcuggg

SEQ ID NO: 805293 - RNA, 22 nt, Human
ugggagaaucuugcucugcuac

SEQ ID NO: 805294 - RNA, 22 nt, Human
uccugcagaccucagucagguc

SEQ ID NO: 805295 - RNA, 22 nt, Human
cagcagcuaccugcucuugugg

SEQ ID NO: 805296 - RNA, 22 nt, Human
ggccaggagaggagggcacuga

SEQ ID NO: 805297 - RNA, 22 nt, Human
uuuuaucugcuucauuaguuga

SEQ ID NO: 805298 - RNA, 22 nt, Human
agagaaggucacuaaggaccca

SEQ ID NO: 805299 - RNA, 22 nt, Human
aagcuuuaugaucucucagcua

SEQ ID NO: 805300 - RNA, 22 nt, Human
agaaaaaucuuggcgcuugucu

SEQ ID NO: 805301 - RNA, 22 nt, Human
aagcugccaaugguaagcugcu

SEQ ID NO: 805302 - RNA, 22 nt, Human
agugucugcgggcagaggagcg

SEQ ID NO: 805303 - RNA, 22 nt, Human
caggaaaucagaacucaagugg

SEQ ID NO: 805304 - RNA, 22 nt, Human
uggggagugaugccucggauaa

SEQ ID NO: 805305 - RNA, 22 nt, Human
uuuguuucugcaauaccuauag

SEQ ID NO: 805306 - RNA, 19 nt, Human
cuggggcuuugguacugcc

SEQ ID NO: 805307 - RNA, 22 nt, Human
aaguggcagaauaguggcagga

SEQ ID NO: 805308 - RNA, 22 nt, Human
cagagagcuuagugugcugcau

SEQ ID NO: 805309 - RNA, 20 nt, Human
agcuggagaagggcccuucc

SEQ ID NO: 805310 - RNA, 22 nt, Human
agcaggggucucugcuaaugaa

SEQ ID NO: 805311 - RNA, 22 nt, Human
ucauuucuaucuaugcagcuuc

SEQ ID NO: 805312 - RNA, 22 nt, Human
uaaaaguuagcuaggacaaagu

SEQ ID NO: 805313 - RNA, 22 nt, Human
cuguucaugcugauucuguaug

SEQ ID NO: 805314 - RNA, 22 nt, Human
cucagugugagugagaagugca

SEQ ID NO: 805315 - RNA, 22 nt, Human
ccuccugggacucauuagcacc

SEQ ID NO: 805316 - RNA, 22 nt, Human
uagaaacaucagcuaaccaaaa

SEQ ID NO: 805317 - RNA, 22 nt, Human
uuggcaaucaauucugacgucu

SEQ ID NO: 805318 - RNA, 22 nt, Human
ucuguaggacagagaaaugggg

SEQ ID NO: 805319 - RNA, 22 nt, Human
ugggcccaagugcaaugcagug

SEQ ID NO: 805320 - RNA, 22 nt, Human
agcuccugugugaagccucccu

SEQ ID NO: 805321 - RNA, 22 nt, Human
uugaaaauaucacaggagcagc

SEQ ID NO: 805322 - RNA, 22 nt, Human
gacuugggugucggggcagucu

SEQ ID NO: 805323 - RNA, 22 nt, Human
acaagcuuccaggugaugcuga

SEQ ID NO: 805324 - RNA, 20 nt, Human
aaguuacauuguauuguacc

SEQ ID NO: 805325 - RNA, 22 nt, Human
ggcgccagcgguaaguaagaca

SEQ ID NO: 805326 - RNA, 22 nt, Human
gcaggccuccccugcuggagcu

SEQ ID NO: 805327 - RNA, 22 nt, Human
uucaguguggugcacaguuuug

SEQ ID NO: 805328 - RNA, 22 nt, Human
uggaagugagaaguuuccucag

SEQ ID NO: 805329 - RNA, 22 nt, Human
acuucugauuaaggaugaaugc

SEQ ID NO: 805330 - RNA, 22 nt, Human
uggagggcuaagcugagggaua

SEQ ID NO: 805331 - RNA, 20 nt, Human
gacaacacagcuucaggucc

SEQ ID NO: 805332 - RNA, 22 nt, Human
gugccagaguuugaggacaauu

SEQ ID NO: 805333 - RNA, 22 nt, Human
ugggcaggagagaagcuaaaga

SEQ ID NO: 805334 - RNA, 22 nt, Human
ggcugccuagacuuggaauuuc

SEQ ID NO: 805335 - RNA, 22 nt, Human
caaauguuucuuaucuauuguu

SEQ ID NO: 805336 - RNA, 22 nt, Human
agggccugcaucaggagcuugg

SEQ ID NO: 805337 - RNA, 22 nt, Human
gaggcugcggggaggagccugc

SEQ ID NO: 805338 - RNA, 21 nt, Human
uucuccuguuuugcaccacag

SEQ ID NO: 805339 - RNA, 22 nt, Human
uggcccagggucuacagccuca

SEQ ID NO: 805340 - RNA, 22 nt, Human
agcacaggaccaaggaagcugu

SEQ ID NO: 805341 - RNA, 22 nt, Human
uuuguuuagaugguaaaucagu

SEQ ID NO: 805342 - RNA, 19 nt, Human
ugccuggcaccagcuccac

SEQ ID NO: 805343 - RNA, 22 nt, Human
cagagacacuuaacaggaaugg

SEQ ID NO: 805344 - RNA, 22 nt, Human
uccugccucaggcucuggagua

SEQ ID NO: 805345 - RNA, 22 nt, Human
agggggcucagugacugaagug

SEQ ID NO: 805346 - RNA, 22 nt, Human
guggaugauugacucuguagac

SEQ ID NO: 805347 - RNA, 22 nt, Human
uuucuccccagucuaaucugga

SEQ ID NO: 805348 - RNA, 22 nt, Human
aggcauggguagaagagaagcc

SEQ ID NO: 805349 - RNA, 18 nt, Human
ggcucaggcuauccuaac

SEQ ID NO: 805350 - RNA, 22 nt, Human
ugaguucuccaagagaagguau

SEQ ID NO: 805351 - RNA, 22 nt, Human
auauuucuugagcaccugguau

SEQ ID NO: 805352 - RNA, 22 nt, Human
cagagcugagucuucaagguug

SEQ ID NO: 805353 - RNA, 22 nt, Human
ugugcccauuacacagaggcau

SEQ ID NO: 805354 - RNA, 22 nt, Human
ucagcagguggugggcagguga

SEQ ID NO: 805355 - RNA, 22 nt, Human
augcaacauccaauuccuuuug

SEQ ID NO: 805356 - RNA, 22 nt, Human
uuauuccauagaagucaaggaa

SEQ ID NO: 805357 - RNA, 22 nt, Human
aaugacagccagauucuucucu

SEQ ID NO: 805358 - RNA, 22 nt, Human
ucuggggguuaagugaggacaa

SEQ ID NO: 805359 - RNA, 22 nt, Human
ucuuucaauccauucauauguc

SEQ ID NO: 805360 - RNA, 22 nt, Human
aucuuacagcagcaaggaagua

SEQ ID NO: 805361 - RNA, 22 nt, Human
ucuuuuaagccucuggcauagg

SEQ ID NO: 805362 - RNA, 22 nt, Human
gaaugauauauuagcagauuuu

SEQ ID NO: 805363 - RNA, 22 nt, Human
agccagaggucaugagcacagg

SEQ ID NO: 805364 - RNA, 22 nt, Human
acacaguaugcaucuagaaauu

SEQ ID NO: 805365 - RNA, 22 nt, Human
gcugaaauuggaaccugggccu

SEQ ID NO: 805366 - RNA, 22 nt, Human
ugguccuggagaguguuccaua

SEQ ID NO: 805367 - RNA, 20 nt, Human
uugcacagagaaggaggcag

SEQ ID NO: 805368 - RNA, 18 nt, Human
agcagaauucuaggguuc

SEQ ID NO: 805369 - RNA, 22 nt, Human
uccuccccugcccaugaggagg

SEQ ID NO: 805370 - RNA, 22 nt, Human
ugcccaggcuggagugcagagg

SEQ ID NO: 805371 - RNA, 22 nt, Human
aaauucacucuguuccucaugg

SEQ ID NO: 805372 - RNA, 20 nt, Human
gccacugggcaccagcaggg

SEQ ID NO: 805373 - RNA, 22 nt, Human
uagauaaaagggcaaagggcau

SEQ ID NO: 805374 - RNA, 22 nt, Human
uggugggagugagggcaugcca

SEQ ID NO: 805375 - RNA, 23 nt, Human
ucacagagcauacugcauuuugc

SEQ ID NO: 805376 - RNA, 22 nt, Human
acaggcagguugagaaacauuu

SEQ ID NO: 805377 - RNA, 22 nt, Human
gggcccagcccucugcucacug

SEQ ID NO: 805378 - RNA, 22 nt, Human
aggggccaccuguggcacccug

SEQ ID NO: 805379 - RNA, 22 nt, Human
aagcccuguucuuucucucacc

SEQ ID NO: 805380 - RNA, 22 nt, Human
auagucuuagaucagauaaagu

SEQ ID NO: 805381 - RNA, 22 nt, Human
aaagguuuauugauucugcucu

SEQ ID NO: 805382 - RNA, 22 nt, Human
ucacauuuauacuccauuugca

SEQ ID NO: 805383 - RNA, 22 nt, Human
ucaauaauggcaggauaaauuu

SEQ ID NO: 805384 - RNA, 22 nt, Human
ucugcaagugacccgggcccag

SEQ ID NO: 805385 - RNA, 22 nt, Human
auacaauaguguuuguuuugag

SEQ ID NO: 805386 - RNA, 22 nt, Human
auguauguuucuauauaugaca

SEQ ID NO: 805387 - RNA, 22 nt, Human
ggacaagccucagacaaaacuc

SEQ ID NO: 805388 - RNA, 22 nt, Human
cucagcagcagggaagagguca

SEQ ID NO: 805389 - RNA, 22 nt, Human
gccucagggggagaggccagcu

SEQ ID NO: 805390 - RNA, 22 nt, Human
uucuuuaaaauagugagaaaga

SEQ ID NO: 805391 - RNA, 22 nt, Human
gcugagguuuucugccugcuca

SEQ ID NO: 805392 - RNA, 22 nt, Human
auucacaacugauccuugcuca

SEQ ID NO: 805393 - RNA, 22 nt, Human
ucagaagcuaaauuugauauuu

SEQ ID NO: 805394 - RNA, 22 nt, Human
uaggaaauuugaaauauguggg

SEQ ID NO: 805395 - RNA, 22 nt, Human
gccaggagagcuccuucagguu

SEQ ID NO: 805396 - RNA, 22 nt, Human
ggcacuggcaaagcaaagucug

SEQ ID NO: 805397 - RNA, 23 nt, Human
uuccagagucuucgacgguaggc

SEQ ID NO: 805398 - RNA, 22 nt, Human
gugacgugaggggcuccuguug

SEQ ID NO: 805399 - RNA, 22 nt, Human
gauuacaaaacucaucuaugac

SEQ ID NO: 805400 - RNA, 20 nt, Human
uccagggcccuggcuccucu

SEQ ID NO: 805401 - RNA, 19 nt, Human
agugcauuuuauguuucaa

SEQ ID NO: 805402 - RNA, 22 nt, Human
auuuuuuauauaccaagguggg

SEQ ID NO: 805403 - RNA, 22 nt, Human
ggcugcccuagagcuggcaagg

SEQ ID NO: 805404 - RNA, 22 nt, Human
gccaggcgggucucaaacuccu

SEQ ID NO: 805405 - RNA, 22 nt, Human
ggguccagaguugaagagguua

SEQ ID NO: 805406 - RNA, 22 nt, Human
ccacugccuauuugcagggccc

SEQ ID NO: 805407 - RNA, 22 nt, Human
aaggacaggcuaaccugacauu

SEQ ID NO: 805408 - RNA, 22 nt, Human
ugucaaaaugacuuuacuacag

SEQ ID NO: 805409 - RNA, 22 nt, Human
ggcucuggagacauguggagag

SEQ ID NO: 805410 - RNA, 22 nt, Human
gggagaaaugucuggccugcug

SEQ ID NO: 805411 - RNA, 18 nt, Human
aggcaggugcuggaaguc

SEQ ID NO: 805412 - RNA, 22 nt, Human
acaaugaaaaaauuuacugugg

SEQ ID NO: 805413 - RNA, 22 nt, Human
agucagaguuuugaggugugac

SEQ ID NO: 805414 - RNA, 19 nt, Human
acagcagguguggggauaa

SEQ ID NO: 805415 - RNA, 22 nt, Human
gucuaaaccucaaaucaguguc

SEQ ID NO: 805416 - RNA, 23 nt, Human
agagaaaaauaucugggcacauu

SEQ ID NO: 805417 - RNA, 22 nt, Human
gggaaagagagguggacgcagg

SEQ ID NO: 805418 - RNA, 22 nt, Human
cagcccugcugccuuagugccu

SEQ ID NO: 805419 - RNA, 22 nt, Human
cuggggucagggaucagagagc

SEQ ID NO: 805420 - RNA, 22 nt, Human
aaccacagagcccccucagaug

SEQ ID NO: 805421 - RNA, 22 nt, Human
acuggcugugcagagggcagua

SEQ ID NO: 805422 - RNA, 18 nt, Human
cauugacaguauaucuuu

SEQ ID NO: 805423 - RNA, 22 nt, Human
caccugccccagucuuggagcu

SEQ ID NO: 805424 - RNA, 22 nt, Human
ccaggagaugggaaaguagcag

SEQ ID NO: 805425 - RNA, 22 nt, Human
aguggugaggggcaugugugau

SEQ ID NO: 805426 - RNA, 22 nt, Human
acuucugauaaagagcaugugc

SEQ ID NO: 805427 - RNA, 22 nt, Human
uuacuggcugggccugagggcu

SEQ ID NO: 805428 - RNA, 22 nt, Human
gaauacuuuuguuaggaaaacg

SEQ ID NO: 805429 - RNA, 20 nt, Human
caguuuaacuuugagcaguu

SEQ ID NO: 805430 - RNA, 20 nt, Human
cuggcccaggaugauggcgc

SEQ ID NO: 805431 - RNA, 22 nt, Human
cuuguagcugacuaucuuguuc

SEQ ID NO: 805432 - RNA, 22 nt, Human
auuacagauagacuuugaagcu

SEQ ID NO: 805433 - RNA, 22 nt, Human
ccaggugugcucugcaguggau

SEQ ID NO: 805434 - RNA, 22 nt, Human
cccacccugggaagcuaggcag

SEQ ID NO: 805435 - RNA, 22 nt, Human
ucugggcuuuugcacuggccau

SEQ ID NO: 805436 - RNA, 22 nt, Human
acagugaauccaaauuccuacc

SEQ ID NO: 805437 - RNA, 22 nt, Human
uaggcagagaggccauaagaau

SEQ ID NO: 805438 - RNA, 22 nt, Human
uauuucacuauucucuguaacu

SEQ ID NO: 805439 - RNA, 20 nt, Human
agugggugaugaaggaauag

SEQ ID NO: 805440 - RNA, 22 nt, Human
uggccucuccuggcagcaucca

SEQ ID NO: 805441 - RNA, 22 nt, Human
uuugguuaauuuaggcuugcau

SEQ ID NO: 805442 - RNA, 22 nt, Human
uuucuucagagagagcuuuccc

SEQ ID NO: 805443 - RNA, 22 nt, Human
ggugacgaauccauagcaucga

SEQ ID NO: 805444 - RNA, 23 nt, Human
acuuuauugaccccaggucaguu

SEQ ID NO: 805445 - RNA, 22 nt, Human
agguaagggucacaguucauau

SEQ ID NO: 805446 - RNA, 22 nt, Human
uuaaagcaucacacuauuaauu

SEQ ID NO: 805447 - RNA, 22 nt, Human
uucugauucaugauccaguucu

SEQ ID NO: 805448 - RNA, 22 nt, Human
uuuucucuuguuaauguacuga

SEQ ID NO: 805449 - RNA, 22 nt, Human
auaaucauucacauaaggugcu

SEQ ID NO: 805450 - RNA, 22 nt, Human
cucagugucuggggccccaggg

SEQ ID NO: 805451 - RNA, 22 nt, Human
acauaacauaguugacauuuuu

SEQ ID NO: 805452 - RNA, 22 nt, Human
uggccagugucggaggccagga

SEQ ID NO: 805453 - RNA, 22 nt, Human
uaguuucugaggauugaaagau

SEQ ID NO: 805454 - RNA, 22 nt, Human
uuuucauuguuacuaugagcua

SEQ ID NO: 805455 - RNA, 22 nt, Human
uaagcaaugagauaaucauggg

SEQ ID NO: 805456 - RNA, 22 nt, Human
uauauuaaagugcuuugcagug

SEQ ID NO: 805457 - RNA, 22 nt, Human
uaauaguugugacuuuguaaag

SEQ ID NO: 805458 - RNA, 22 nt, Human
cauuuacacacagaggugugcu

SEQ ID NO: 805459 - RNA, 22 nt, Human
ugcaaacauccgacugaaagcc

SEQ ID NO: 805460 - RNA, 22 nt, Human
cugugacaguuucucagacuuu

SEQ ID NO: 805461 - RNA, 22 nt, Human
uugcacuguaagcaucuguguc

SEQ ID NO: 805462 - RNA, 22 nt, Human
uucauucuugucuuuguauagu

SEQ ID NO: 805463 - RNA, 22 nt, Human
cuggacacaaacaucuccucug

SEQ ID NO: 805464 - RNA, 22 nt, Human
aacuuguuagaaaugcagaauc

SEQ ID NO: 805465 - RNA, 22 nt, Human
accuccccauuaggucacccac

SEQ ID NO: 805466 - RNA, 22 nt, Human
aaucaacaggaugugcauugua

SEQ ID NO: 805467 - RNA, 18 nt, Human
agggagcaucugguugcc

SEQ ID NO: 805468 - RNA, 22 nt, Human
aggugcuggagucugggcagga

SEQ ID NO: 805469 - RNA, 22 nt, Human
gucagugucuuaacagagauua

SEQ ID NO: 805470 - RNA, 22 nt, Human
agggagcucaguuggaagcggu

SEQ ID NO: 805471 - RNA, 22 nt, Human
cugggagagccuuuccugaguc

SEQ ID NO: 805472 - RNA, 22 nt, Human
aauaaacugcucaauugcauca

SEQ ID NO: 805473 - RNA, 22 nt, Human
aucuacaacggguggaguaggg

SEQ ID NO: 805474 - RNA, 21 nt, Human
ugggggugaggccuaggaauc

SEQ ID NO: 805475 - RNA, 22 nt, Human
gaauaacauuuuuuccuuuaca

SEQ ID NO: 805476 - RNA, 22 nt, Human
ucagggaaauagcagggcugaa

SEQ ID NO: 805477 - RNA, 22 nt, Human
gagcccuguucaggccuccuca

SEQ ID NO: 805478 - RNA, 22 nt, Human
uuacacaauauaugguacuugg

SEQ ID NO: 805479 - RNA, 22 nt, Human
cggcaggugugcucacucugcc

SEQ ID NO: 805480 - RNA, 22 nt, Human
gcagauggcucagacacugggg

SEQ ID NO: 805481 - RNA, 22 nt, Human
aauaagaucuuaaagguuauau

SEQ ID NO: 805482 - RNA, 22 nt, Human
ucauggggugacagaagggagg

SEQ ID NO: 805483 - RNA, 22 nt, Human
cuugggugcuggaggcugccgc

SEQ ID NO: 805484 - RNA, 22 nt, Human
gaguccucaacggggagaggcg

SEQ ID NO: 805485 - RNA, 22 nt, Human
uaaagcaggugcucagugacca

SEQ ID NO: 805486 - RNA, 22 nt, Human
gcaguuugagguuuucugaugu

SEQ ID NO: 805487 - RNA, 17 nt, Human
agcagaagucagaggga

SEQ ID NO: 805488 - RNA, 22 nt, Human
uuugauaucuugguauacagau

SEQ ID NO: 805489 - RNA, 22 nt, Human
acacuaaucuuuuauuugguuu

SEQ ID NO: 805490 - RNA, 20 nt, Human
uaggcagagcugugcagccu

SEQ ID NO: 805491 - RNA, 22 nt, Human
gcagcaggacugccguuaaagu

SEQ ID NO: 805492 - RNA, 22 nt, Human
ucaaaucuuugaccacuuaugu

SEQ ID NO: 805493 - RNA, 22 nt, Human
ugggaccaagucauuucuuuag

SEQ ID NO: 805494 - RNA, 22 nt, Human
uucucuggguuaggggaacuau

SEQ ID NO: 805495 - RNA, 22 nt, Human
acacccaggaauaaggacuggg

SEQ ID NO: 805496 - RNA, 22 nt, Human
gcuggcugcacaggggcucacu

SEQ ID NO: 805497 - RNA, 22 nt, Human
uucaaaucucuccuaauccacu

SEQ ID NO: 805498 - RNA, 22 nt, Human
ucugggcugcuaugaggcagag

SEQ ID NO: 805499 - RNA, 22 nt, Human
gugugcaguagagaaagagcag

SEQ ID NO: 805500 - RNA, 22 nt, Human
ccucccacuucuugcugagguc

SEQ ID NO: 805501 - RNA, 20 nt, Human
uuccagccgccacuuccgcc

SEQ ID NO: 805502 - RNA, 22 nt, Human
gaggcugccaaugugugcaugu

SEQ ID NO: 805503 - RNA, 22 nt, Human
ggucacagggaagggcucucaa

SEQ ID NO: 805504 - RNA, 22 nt, Human
caggcccaggguuauugggaaa

SEQ ID NO: 805505 - RNA, 22 nt, Human
auuucuuaugaauauugacugu

SEQ ID NO: 805506 - RNA, 22 nt, Human
ggguuggauuacuuagggagaa

SEQ ID NO: 805507 - RNA, 22 nt, Human
agcagaagugccuuagcaauca

SEQ ID NO: 805508 - RNA, 22 nt, Human
uaauaauuuuaaagaaggcuag

SEQ ID NO: 805509 - RNA, 22 nt, Human
gcccaggaguucaagucuagug

SEQ ID NO: 805510 - RNA, 20 nt, Human
ccaggcuggcaaaugggggc

SEQ ID NO: 805511 - RNA, 22 nt, Human
agcuuugcacugagacagcuca

SEQ ID NO: 805512 - RNA, 22 nt, Human
uuucacaacugcuuauuugaga

SEQ ID NO: 805513 - RNA, 22 nt, Human
acagaggacaacuaggcgcuca

SEQ ID NO: 805514 - RNA, 22 nt, Human
ugagaaccaugaaaagcuguca

SEQ ID NO: 805515 - RNA, 22 nt, Human
ucugucuuagccaucucaggcu

SEQ ID NO: 805516 - RNA, 22 nt, Human
uggagagaagaggcagugugcu

SEQ ID NO: 805517 - RNA, 22 nt, Human
auucaaauuaaguuaauucagc

SEQ ID NO: 805518 - RNA, 23 nt, Human
agcuuugaggacuuuaaaagaua

SEQ ID NO: 805519 - RNA, 22 nt, Human
cagagcugcacauucuaugaug

SEQ ID NO: 805520 - RNA, 22 nt, Human
ccgggagcaggcgccaccgcca

SEQ ID NO: 805521 - RNA, 22 nt, Human
uuuaaugaauaauucaaaucug

SEQ ID NO: 805522 - RNA, 22 nt, Human
uucuagagaacucgagugccuu

SEQ ID NO: 805523 - RNA, 22 nt, Human
cagccaggacucccauuuagga

SEQ ID NO: 805524 - RNA, 22 nt, Human
cugggagucuaagcuagcaccg

SEQ ID NO: 805525 - RNA, 22 nt, Human
agaggaggaagagcuuuaaaau

SEQ ID NO: 805526 - RNA, 19 nt, Human
caugugcaugagcacagga

SEQ ID NO: 805527 - RNA, 22 nt, Human
ccauuggagccaagaguuuuac

SEQ ID NO: 805528 - RNA, 19 nt, Human
cuuuggaggaugaggcugg

SEQ ID NO: 805529 - RNA, 22 nt, Human
cagaaguaaugaugucauuccu

SEQ ID NO: 805530 - RNA, 22 nt, Human
agccuccaaaugucaggucccg

SEQ ID NO: 805531 - RNA, 22 nt, Human
ucagaaucuuucuagagucuag

SEQ ID NO: 805532 - RNA, 22 nt, Human
gccaggcccugggcacuucgug

SEQ ID NO: 805533 - RNA, 22 nt, Human
auaugauuccacuauuguaugg

SEQ ID NO: 805534 - RNA, 22 nt, Human
agaagcuaggcuagacaaguga

SEQ ID NO: 805535 - RNA, 22 nt, Human
uugucugaauauguauguaucc

SEQ ID NO: 805536 - RNA, 22 nt, Human
auuucccaauacgcuaagugga

SEQ ID NO: 805537 - RNA, 22 nt, Human
aaaccuauauagucuuagaagc

SEQ ID NO: 805538 - RNA, 22 nt, Human
uuucaugugcaauuagcaauau

SEQ ID NO: 805539 - RNA, 22 nt, Human
aacaauuagacugacgguauua

SEQ ID NO: 805540 - RNA, 22 nt, Human
caggccagcguccagaacaagc

SEQ ID NO: 805541 - RNA, 22 nt, Human
aauaaagccuuauugauuuuac

SEQ ID NO: 805542 - RNA, 22 nt, Human
uccaucagcaugcaggcuguuc

SEQ ID NO: 805543 - RNA, 17 nt, Human
ucugucuugacugucac

SEQ ID NO: 805544 - RNA, 22 nt, Human
agagaugaaaaguggagacugg

SEQ ID NO: 805545 - RNA, 22 nt, Human
ucugcuucuccuacuucauggg

SEQ ID NO: 805546 - RNA, 22 nt, Human
agauauguuuguauauauuugu

SEQ ID NO: 805547 - RNA, 22 nt, Human
cucaggacuugguuaguguuuu

SEQ ID NO: 805548 - RNA, 22 nt, Human
cccaggaggcggagguuguggu

SEQ ID NO: 805549 - RNA, 22 nt, Human
aggcuaggccuugcccuggaac

SEQ ID NO: 805550 - RNA, 22 nt, Human
uugggaaagaaugagaagguga

SEQ ID NO: 805551 - RNA, 22 nt, Human
agucacuguucugucaugucaa

SEQ ID NO: 805552 - RNA, 18 nt, Human
gacaguaaacuuccccau

SEQ ID NO: 805553 - RNA, 20 nt, Human
agugauuuaucuuuuuccac

SEQ ID NO: 805554 - RNA, 23 nt, Human
aggcagcagguuguccaggguga

SEQ ID NO: 805555 - RNA, 22 nt, Human
gcagggcagcugaagcuaggug

SEQ ID NO: 805556 - RNA, 22 nt, Human
ugggggcagaggauucaggaau

SEQ ID NO: 805557 - RNA, 22 nt, Human
aaaugcagcagcuaauugaaaa

SEQ ID NO: 805558 - RNA, 22 nt, Human
aaauaguucagcuuguaaaccc

SEQ ID NO: 805559 - RNA, 18 nt, Human
ggagcugggccugguucc

SEQ ID NO: 805560 - RNA, 22 nt, Human
uguuaaaaaugcagauuccuau

SEQ ID NO: 805561 - RNA, 22 nt, Human
cuuauauuuuaggaacagacaa

SEQ ID NO: 805562 - RNA, 22 nt, Human
auucagcauucauuuccaacuu

SEQ ID NO: 805563 - RNA, 22 nt, Human
auaaaacuuggguaugaucccu

SEQ ID NO: 805564 - RNA, 22 nt, Human
cauggcaauuucauaaacaggu

SEQ ID NO: 805565 - RNA, 22 nt, Human
cucagugucuuauuguacacau

SEQ ID NO: 805566 - RNA, 22 nt, Human
gccaggccugcaagugcuggug

SEQ ID NO: 805567 - RNA, 22 nt, Human
uuuauggcacacaaauaucaaa

SEQ ID NO: 805568 - RNA, 22 nt, Human
ucauauaacuggauauuuucaa

SEQ ID NO: 805569 - RNA, 22 nt, Human
ugaaugauuucuuaggcaauug

SEQ ID NO: 805570 - RNA, 22 nt, Human
cugguucauauaggcaaguuua

SEQ ID NO: 805571 - RNA, 22 nt, Human
gcagcaggaauuuaaauuuaua

SEQ ID NO: 805572 - RNA, 22 nt, Human
agaaaauuagauuuuacugugu

SEQ ID NO: 805573 - RNA, 22 nt, Human
caugagcauuuuggucuaguuu

SEQ ID NO: 805574 - RNA, 22 nt, Human
gucugcacggggaggaugggcu

SEQ ID NO: 805575 - RNA, 22 nt, Human
ggggccgaccgcgguucaggcc

SEQ ID NO: 805576 - RNA, 22 nt, Human
uuguugggcaugcaguggcugu

SEQ ID NO: 805577 - RNA, 22 nt, Human
uuuuucuacugcccacauugua

SEQ ID NO: 805578 - RNA, 22 nt, Human
acaacuagcagguauuaauuuu

SEQ ID NO: 805579 - RNA, 22 nt, Human
aacaaccaaaaagaugaaugua

SEQ ID NO: 805580 - RNA, 22 nt, Human
cugagcaggacagugggagacc

SEQ ID NO: 805581 - RNA, 22 nt, Human
cucucagugccacacagccauu

SEQ ID NO: 805582 - RNA, 22 nt, Human
ucugcaggauggaugcucagaa

SEQ ID NO: 805583 - RNA, 22 nt, Human
aaaaugaggucaauauccuuuu

SEQ ID NO: 805584 - RNA, 22 nt, Human
guggagcccugguagggacccc

SEQ ID NO: 805585 - RNA, 22 nt, Human
aagaggaagucuccauggagag

SEQ ID NO: 805586 - RNA, 23 nt, Human
acuuuucaauuagcuaugcuuaa

SEQ ID NO: 805587 - RNA, 22 nt, Human
cuggcccaggcuccuggggcac

SEQ ID NO: 805588 - RNA, 22 nt, Human
augcaaaaacugcacuuacgcu

SEQ ID NO: 805589 - RNA, 22 nt, Human
uuucugcauuuacaaaaugagg

SEQ ID NO: 805590 - RNA, 22 nt, Human
uggcagggccugaaucuuauac

SEQ ID NO: 805591 - RNA, 22 nt, Human
uggucaggauucucagcccuuc

SEQ ID NO: 805592 - RNA, 22 nt, Human
ccagagguccugcucacuggug

SEQ ID NO: 805593 - RNA, 20 nt, Human
ugcaggcuucgcucuaggag

SEQ ID NO: 805594 - RNA, 22 nt, Human
gcacaggagccagguccuucac

SEQ ID NO: 805595 - RNA, 22 nt, Human
uuugggaagugggagcaaggug

SEQ ID NO: 805596 - RNA, 22 nt, Human
uaacauuaaaagagauaauuga

SEQ ID NO: 805597 - RNA, 22 nt, Human
agugggagggccauauggugaa

SEQ ID NO: 805598 - RNA, 22 nt, Human
cucaggagacaguguccacaug

SEQ ID NO: 805599 - RNA, 22 nt, Human
ugaguucuaggcuuaaaacuaa

SEQ ID NO: 805600 - RNA, 22 nt, Human
cuagaaaaauacuuuauuguga

SEQ ID NO: 805601 - RNA, 22 nt, Human
gggagccacagugaggugcaug

SEQ ID NO: 805602 - RNA, 22 nt, Human
uccuggccacccgacagaaguc

SEQ ID NO: 805603 - RNA, 22 nt, Human
gccccagcccuguggaccaugg

SEQ ID NO: 805604 - RNA, 22 nt, Human
ccuggcaggcaagaggaaggga

SEQ ID NO: 805605 - RNA, 22 nt, Human
aggcaggccgugucccuccuca

SEQ ID NO: 805606 - RNA, 22 nt, Human
ggcacagaguuggcagagcugc

SEQ ID NO: 805607 - RNA, 21 nt, Human
agcuggcuauaguuagugaug

SEQ ID NO: 805608 - RNA, 22 nt, Human
gguucuaggauuaggaggccca

SEQ ID NO: 805609 - RNA, 22 nt, Human
aaguuucugccauacuguggug

SEQ ID NO: 805610 - RNA, 22 nt, Human
ccaggaggucugaguguggaca

SEQ ID NO: 805611 - RNA, 22 nt, Human
ccuucuggaagcucuaagggag

SEQ ID NO: 805612 - RNA, 22 nt, Human
aaauaacagucagggacaacau

SEQ ID NO: 805613 - RNA, 22 nt, Human
uggggcugaggagccucacucu

SEQ ID NO: 805614 - RNA, 22 nt, Human
uauagcaauucagaauacaugu

SEQ ID NO: 805615 - RNA, 22 nt, Human
aggaagagcccgggugacauaa

SEQ ID NO: 805616 - RNA, 22 nt, Human
aaagucaugcaguugaacuuuu

SEQ ID NO: 805617 - RNA, 22 nt, Human
gaugagaaauggacaggagugg

SEQ ID NO: 805618 - RNA, 22 nt, Human
cugcaaggucaugacucucugg

SEQ ID NO: 805619 - RNA, 22 nt, Human
gagcccagggugaaauagcagc

SEQ ID NO: 805620 - RNA, 22 nt, Human
auuugcauaauagugauuugua

SEQ ID NO: 805621 - RNA, 22 nt, Human
cuucacauggguacugcugauc

SEQ ID NO: 805622 - RNA, 22 nt, Human
auauaguuuagguucgaauggg

SEQ ID NO: 805623 - RNA, 22 nt, Human
aggcuucauguagaugguuccc

SEQ ID NO: 805624 - RNA, 22 nt, Human
cagugcaggaagugagaugccu

SEQ ID NO: 805625 - RNA, 22 nt, Human
ggcuccaggagaugcugggcag

SEQ ID NO: 805626 - RNA, 22 nt, Human
uucaaggcagaguguaguuaaa

SEQ ID NO: 805627 - RNA, 21 nt, Human
ugucacagauucucagcuugc

SEQ ID NO: 805628 - RNA, 22 nt, Human
gcuggccauggccugcgccauc

SEQ ID NO: 805629 - RNA, 22 nt, Human
uugauauucccgauuuaaggua

SEQ ID NO: 805630 - RNA, 21 nt, Human
cacuugaaugguguuuuacaa

SEQ ID NO: 805631 - RNA, 22 nt, Human
agaaagugaacguguucaguuu

SEQ ID NO: 805632 - RNA, 23 nt, Human
uuccaagugcuuuacuuaauccu

SEQ ID NO: 805633 - RNA, 22 nt, Human
gcuggccuuugaggaagcugcg

SEQ ID NO: 805634 - RNA, 22 nt, Human
uugauucaaaggggacaagugg

SEQ ID NO: 805635 - RNA, 21 nt, Human
cuacuuaaguaggggauuagg

SEQ ID NO: 805636 - RNA, 22 nt, Human
cuggagggcuggacuaaggaaa

SEQ ID NO: 805637 - RNA, 22 nt, Human
uauaacaccauguucuacagau

SEQ ID NO: 805638 - RNA, 22 nt, Human
uccaggaggcucugguugacgu

SEQ ID NO: 805639 - RNA, 22 nt, Human
ucagagaauguccuucuucauu

SEQ ID NO: 805640 - RNA, 22 nt, Human
caguagaagcuuguuuuucaga

SEQ ID NO: 805641 - RNA, 22 nt, Human
ccuggcucccugcacagggcuc

SEQ ID NO: 805642 - RNA, 22 nt, Human
gcauuuuaaugagguuuaugag

SEQ ID NO: 805643 - RNA, 22 nt, Human
augggcaguguauuggaaggaa

SEQ ID NO: 805644 - RNA, 22 nt, Human
aauuuauucccgucucugggcu

SEQ ID NO: 805645 - RNA, 19 nt, Human
aucacaugucaagagcagg

SEQ ID NO: 805646 - RNA, 22 nt, Human
auuucauauguaucaccuagcc

SEQ ID NO: 805647 - RNA, 22 nt, Human
ggucucugcucagaugccacuu

SEQ ID NO: 805648 - RNA, 22 nt, Human
guucuauuacucccugcuucuu

SEQ ID NO: 805649 - RNA, 22 nt, Human
ugucacaugacacaaauaucua

SEQ ID NO: 805650 - RNA, 22 nt, Human
guuucauggagagcugaauauu

SEQ ID NO: 805651 - RNA, 22 nt, Human
uggcuggaggguuagugagaua

SEQ ID NO: 805652 - RNA, 22 nt, Human
ugcccagcagggagcuaccugg

SEQ ID NO: 805653 - RNA, 22 nt, Human
ugaguauuuuaaguucucaauc

SEQ ID NO: 805654 - RNA, 22 nt, Human
acuuauguaguaccucuuaugu

SEQ ID NO: 805655 - RNA, 22 nt, Human
accccaggucuccaggcucugg

SEQ ID NO: 805656 - RNA, 22 nt, Human
uccaggaacagaauguuagugc

SEQ ID NO: 805657 - RNA, 22 nt, Human
acaguucacuuuuuauaucaaa

SEQ ID NO: 805658 - RNA, 22 nt, Human
uucuggaaaagaaaguuaagau

SEQ ID NO: 805659 - RNA, 22 nt, Human
uagaaauggagaacagauuaau

SEQ ID NO: 805660 - RNA, 22 nt, Human
ccagagcugaggagaugggcuu

SEQ ID NO: 805661 - RNA, 22 nt, Human
acucaggagggaucagcuauca

SEQ ID NO: 805662 - RNA, 22 nt, Human
caaacauucagaugcaauggua

SEQ ID NO: 805663 - RNA, 22 nt, Human
acacauuuagcaccagguuuau

SEQ ID NO: 805664 - RNA, 22 nt, Human
guggaaggaagagauggcccca

SEQ ID NO: 805665 - RNA, 22 nt, Human
gcagggcagaccuccagccuau

SEQ ID NO: 805666 - RNA, 22 nt, Human
uguagcucuccagccagcaagg

SEQ ID NO: 805667 - RNA, 22 nt, Human
agugggagauaacuuaacagcu

SEQ ID NO: 805668 - RNA, 22 nt, Human
agcuggagaugcccagcaccgg

SEQ ID NO: 805669 - RNA, 22 nt, Human
accucccugccucuuggcguca

SEQ ID NO: 805670 - RNA, 22 nt, Human
uuagcuuuagagccauuacugg

SEQ ID NO: 805671 - RNA, 22 nt, Human
cccugagagugagugccaccuu

SEQ ID NO: 805672 - RNA, 22 nt, Human
agugggggccaacgagggcagc

SEQ ID NO: 805673 - RNA, 22 nt, Human
aucagugugucaaaagcacaaa

SEQ ID NO: 805674 - RNA, 22 nt, Human
ggcagcuuuuaucccugacaga

SEQ ID NO: 805675 - RNA, 22 nt, Human
gaggccagaagugccucgggcu

SEQ ID NO: 805676 - RNA, 22 nt, Human
ccaggagguggagauugcagug

SEQ ID NO: 805677 - RNA, 22 nt, Human
ugggcagguuguuauuugacau

SEQ ID NO: 805678 - RNA, 22 nt, Human
agccugggaauuuagaguucgg

SEQ ID NO: 805679 - RNA, 22 nt, Human
guaauagguuuucuugcuccag

SEQ ID NO: 805680 - RNA, 22 nt, Human
caugacauuuuaaaaagaacau

SEQ ID NO: 805681 - RNA, 22 nt, Human
uaauaauuaguuauugaucgug

SEQ ID NO: 805682 - RNA, 22 nt, Human
uaguacaguuccaucaaagcag

SEQ ID NO: 805683 - RNA, 22 nt, Human
ccucugccaccucccacgaggc

SEQ ID NO: 805684 - RNA, 22 nt, Human
uuucuaaggugagguagaaaau

SEQ ID NO: 805685 - RNA, 22 nt, Human
ugcaggagcagagauggcugga

SEQ ID NO: 805686 - RNA, 22 nt, Human
gaaaaggccacuccuaggagcu

SEQ ID NO: 805687 - RNA, 22 nt, Human
uuucauguggcgaugucucugg

SEQ ID NO: 805688 - RNA, 22 nt, Human
gcccugagacugagcauggguu

SEQ ID NO: 805689 - RNA, 22 nt, Human
cagagaugggucgcagagaugg

SEQ ID NO: 805690 - RNA, 22 nt, Human
acuuuucccuugguagaguugc

SEQ ID NO: 805691 - RNA, 22 nt, Human
ugcuggaggagaagguugcuca

SEQ ID NO: 805692 - RNA, 22 nt, Human
ggcuucccugccucacuuauuc

SEQ ID NO: 805693 - RNA, 22 nt, Human
gcagugcuuuagucuguccuuu

SEQ ID NO: 805694 - RNA, 22 nt, Human
uuuuucccauauagaaagccaa

SEQ ID NO: 805695 - RNA, 22 nt, Human
ucugccagcucugugggucucg

SEQ ID NO: 805696 - RNA, 18 nt, Human
auugcuuuuguaccaacc

SEQ ID NO: 805697 - RNA, 22 nt, Human
ccugggccucacccagcucuug

SEQ ID NO: 805698 - RNA, 22 nt, Human
ucagugacuggguauuaaauca

SEQ ID NO: 805699 - RNA, 22 nt, Human
cugcacagccugucugggggcc

SEQ ID NO: 805700 - RNA, 22 nt, Human
caucucaguguacagggagucu

SEQ ID NO: 805701 - RNA, 22 nt, Human
uccucaggucaaagcaggagaa

SEQ ID NO: 805702 - RNA, 22 nt, Human
guccuguguaaguacuugcuca

SEQ ID NO: 805703 - RNA, 22 nt, Human
ggaggagcacuucugagcucag

SEQ ID NO: 805704 - RNA, 22 nt, Human
guuguuuuauaggcucaugccu

SEQ ID NO: 805705 - RNA, 22 nt, Human
aggugggcccagugggcuccag

SEQ ID NO: 805706 - RNA, 21 nt, Human
agaaaauggcguuuuagauuu

SEQ ID NO: 805707 - RNA, 19 nt, Human
cagagcugcuggccucguc

SEQ ID NO: 805708 - RNA, 22 nt, Human
gcugcagcagaaguucucagag

SEQ ID NO: 805709 - RNA, 22 nt, Human
ugcagcaguuuaaugcaggguu

SEQ ID NO: 805710 - RNA, 22 nt, Human
aaaggccaauaaagacaagcug

SEQ ID NO: 805711 - RNA, 22 nt, Human
cccagggcugcagauggaggcu

SEQ ID NO: 805712 - RNA, 22 nt, Human
aauaagaaagagucagcuucag

SEQ ID NO: 805713 - RNA, 18 nt, Human
gguccugggccuggcuca

SEQ ID NO: 805714 - RNA, 22 nt, Human
uccgggagcugaacgucuugcg

SEQ ID NO: 805715 - RNA, 22 nt, Human
acugggaguucuccaugucccu

SEQ ID NO: 805716 - RNA, 22 nt, Human
aggcugagcuggcccuugaaau

SEQ ID NO: 805717 - RNA, 22 nt, Human
ucauuauucucuuuaauguucu

SEQ ID NO: 805718 - RNA, 22 nt, Human
gagcucuugcuucuaguccagg

SEQ ID NO: 805719 - RNA, 18 nt, Human
gccuccaccauggagggu

SEQ ID NO: 805720 - RNA, 22 nt, Human
auaucaaacgaaguuauuuuaa

SEQ ID NO: 805721 - RNA, 22 nt, Human
cggagcugcgccgggacacggg

SEQ ID NO: 805722 - RNA, 22 nt, Human
ccacagaaugaugacacuucag

SEQ ID NO: 805723 - RNA, 22 nt, Human
uccucccuugacuccugcuuuu

SEQ ID NO: 805724 - RNA, 22 nt, Human
gagucagaauuguauuuuaaac

SEQ ID NO: 805725 - RNA, 22 nt, Human
agccugccuugggcugcuugag

SEQ ID NO: 805726 - RNA, 22 nt, Human
uuuaucugaggaaagcagacaa

SEQ ID NO: 805727 - RNA, 22 nt, Human
aacugcaagcucuuuacugcua

SEQ ID NO: 805728 - RNA, 22 nt, Human
gaccuccguguacaccucccag

SEQ ID NO: 805729 - RNA, 22 nt, Human
gcucagcuugggagcgcccggu

SEQ ID NO: 805730 - RNA, 22 nt, Human
uacaagaaauuucugcauauau

SEQ ID NO: 805731 - RNA, 22 nt, Human
uuuacacaaaauguuaguagau

SEQ ID NO: 805732 - RNA, 19 nt, Human
ggcaagcacaaaagcuuug

SEQ ID NO: 805733 - RNA, 22 nt, Human
ggugaccucaccuggucccacc

SEQ ID NO: 805734 - RNA, 22 nt, Human
ucaguaguucagcaaauauuuu

SEQ ID NO: 805735 - RNA, 22 nt, Human
acaggcuguugggguccagggu

SEQ ID NO: 805736 - RNA, 22 nt, Human
agagacaggguuuugucguguu

SEQ ID NO: 805737 - RNA, 22 nt, Human
ggcaaaaaccgcaauaacuucu

SEQ ID NO: 805738 - RNA, 21 nt, Human
ucuugauuauuggccucacac

SEQ ID NO: 805739 - RNA, 22 nt, Human
ccagggcucaggcucccagugg

SEQ ID NO: 805740 - RNA, 22 nt, Human
gcuggccauagaagccaaagag

SEQ ID NO: 805741 - RNA, 22 nt, Human
auaugauuguccuuagcaaauu

SEQ ID NO: 805742 - RNA, 22 nt, Human
acaugcaaagggaugcaauuau

SEQ ID NO: 805743 - RNA, 22 nt, Human
aggucacacaacugucagaggc

SEQ ID NO: 805744 - RNA, 22 nt, Human
gcugccuuuugcuccucccacc

SEQ ID NO: 805745 - RNA, 23 nt, Human
ucaucaaacagcugcucaagaaa

SEQ ID NO: 805746 - RNA, 22 nt, Human
gccuggugcuaugagggccagc

SEQ ID NO: 805747 - RNA, 20 nt, Human
uccugcaguuccuaggaggg

SEQ ID NO: 805748 - RNA, 22 nt, Human
gagucagaaaguagugugccua

SEQ ID NO: 805749 - RNA, 22 nt, Human
accaggagaggcacuugcaaug

SEQ ID NO: 805750 - RNA, 22 nt, Human
gggcccaggccuccuuccuucc

SEQ ID NO: 805751 - RNA, 22 nt, Human
caagagcuuuagaaaugcucau

SEQ ID NO: 805752 - RNA, 22 nt, Human
gcuggcuguaucaccuggccag

SEQ ID NO: 805753 - RNA, 22 nt, Human
auaugcuugggacugauacagu

SEQ ID NO: 805754 - RNA, 23 nt, Human
uggugccacagcugaagucaggu

SEQ ID NO: 805755 - RNA, 22 nt, Human
ugguccaguaaggguggagaga

SEQ ID NO: 805756 - RNA, 22 nt, Human
agcagagcccuuccauggccuu

SEQ ID NO: 805757 - RNA, 22 nt, Human
aggagcugauagucuauggaga

SEQ ID NO: 805758 - RNA, 22 nt, Human
cccaggagguguagcugcgugg

SEQ ID NO: 805759 - RNA, 22 nt, Human
acagauggggcacaaagccaca

SEQ ID NO: 805760 - RNA, 22 nt, Human
aagaacauuuuguagaaugaca

SEQ ID NO: 805761 - RNA, 22 nt, Human
aggcagugcaugcaaaggucgg

SEQ ID NO: 805762 - RNA, 22 nt, Human
agaggaagauuuuauuaaccag

SEQ ID NO: 805763 - RNA, 22 nt, Human
uagagcuggaaaacugcaggua

SEQ ID NO: 805764 - RNA, 23 nt, Human
cugggcauggagcuucagaggcu

SEQ ID NO: 805765 - RNA, 19 nt, Human
acagggcagcaauaggaua

SEQ ID NO: 805766 - RNA, 22 nt, Human
uccggcagcaucuggagggaug

SEQ ID NO: 805767 - RNA, 22 nt, Human
cugccucaugcugccugcagcc

SEQ ID NO: 805768 - RNA, 22 nt, Human
ccuggcugcugucacugaccau

SEQ ID NO: 805769 - RNA, 22 nt, Human
ugggccuggaguuuguccagag

SEQ ID NO: 805770 - RNA, 22 nt, Human
aagcagaggccacagagugggc

SEQ ID NO: 805771 - RNA, 22 nt, Human
gauaauaagcacagcaggaugu

SEQ ID NO: 805772 - RNA, 22 nt, Human
ggcuucuccccuuugagucuuc

SEQ ID NO: 805773 - RNA, 22 nt, Human
uuucaggacaccuuuaaaaacg

SEQ ID NO: 805774 - RNA, 19 nt, Human
auacacuaauauaaaccac

SEQ ID NO: 805775 - RNA, 22 nt, Human
gucugaggucauuagcucucuu

SEQ ID NO: 805776 - RNA, 22 nt, Human
agaggaugauuuuaaggacacu

SEQ ID NO: 805777 - RNA, 22 nt, Human
cugcugggccuggucucugagg

SEQ ID NO: 805778 - RNA, 22 nt, Human
uccaagcauguggucaggagcc

SEQ ID NO: 805779 - RNA, 22 nt, Human
aggcagaauguuggaaaggaag

SEQ ID NO: 805780 - RNA, 22 nt, Human
uacuuguucuuucaagagauag

SEQ ID NO: 805781 - RNA, 22 nt, Human
ugcuggcauggucuuggugaca

SEQ ID NO: 805782 - RNA, 18 nt, Human
ucugcacuccugagagag

SEQ ID NO: 805783 - RNA, 22 nt, Human
gggccaggaguggagauauggg

SEQ ID NO: 805784 - RNA, 18 nt, Human
ccugccagucuggagcag

SEQ ID NO: 805785 - RNA, 22 nt, Human
cucagaggucaagagcagagcu

SEQ ID NO: 805786 - RNA, 22 nt, Human
agcuccugauucucagagauag

SEQ ID NO: 805787 - RNA, 21 nt, Human
guaucacauuugcaugcuuau

SEQ ID NO: 805788 - RNA, 22 nt, Human
cagcauaggauguggagccagg

SEQ ID NO: 805789 - RNA, 22 nt, Human
gaugaaauuguuuugauacuuu

SEQ ID NO: 805790 - RNA, 22 nt, Human
uucaacaugcuuuauuucuaaa

SEQ ID NO: 805791 - RNA, 22 nt, Human
cacacugucagguaaauaacac

SEQ ID NO: 805792 - RNA, 22 nt, Human
gacauuuacugaauacugauua

SEQ ID NO: 805793 - RNA, 22 nt, Human
cagcuucaugacaaacaguuuu

SEQ ID NO: 805794 - RNA, 22 nt, Human
auaaaaacugacccauccuuug

SEQ ID NO: 805795 - RNA, 22 nt, Human
cucucagaaguagcacgugggc

SEQ ID NO: 805796 - RNA, 22 nt, Human
cuuccucccggcccaugcucug

SEQ ID NO: 805797 - RNA, 22 nt, Human
aguggcagggcuggcugcugca

SEQ ID NO: 805798 - RNA, 22 nt, Human
ugagagguaggaaaugaacaag

SEQ ID NO: 805799 - RNA, 22 nt, Human
cgcaggcacagaguggacagcg

SEQ ID NO: 805800 - RNA, 22 nt, Human
cugcaauaugaugucugagaaa

SEQ ID NO: 805801 - RNA, 20 nt, Human
ggcaugagaugugagggagg

SEQ ID NO: 805802 - RNA, 23 nt, Human
aauaaggccaaacuaucuggucu

SEQ ID NO: 805803 - RNA, 22 nt, Human
uuuaccuaguauaaugcaaccu

SEQ ID NO: 805804 - RNA, 22 nt, Human
aaaguacagccacauccaagua

SEQ ID NO: 805805 - RNA, 22 nt, Human
guacuuuaaaucaauguagauu

SEQ ID NO: 805806 - RNA, 22 nt, Human
augagagguuucgucagaggaa

SEQ ID NO: 805807 - RNA, 18 nt, Human
ucaaaauauuucugugga

SEQ ID NO: 805808 - RNA, 22 nt, Human
ggcucuugaaauguggcuggcg

SEQ ID NO: 805809 - RNA, 22 nt, Human
caaagcagaccuuuacccuuua

SEQ ID NO: 805810 - RNA, 21 nt, Human
agcugccuccacuucugaggc

SEQ ID NO: 805811 - RNA, 22 nt, Human
cugaagaaugacagugcuuuga

SEQ ID NO: 805812 - RNA, 22 nt, Human
ucaggggacagccagcuggagg

SEQ ID NO: 805813 - RNA, 22 nt, Human
ggaauaaaaauuguuuacugua

SEQ ID NO: 805814 - RNA, 22 nt, Human
ucccaggcuaccagugagguca

SEQ ID NO: 805815 - RNA, 22 nt, Human
gcuggggugugguggauaagcu

SEQ ID NO: 805816 - RNA, 22 nt, Human
uauuaauaaauauguaggggcc

SEQ ID NO: 805817 - RNA, 22 nt, Human
aacucaaagaugcaugacgcuu

SEQ ID NO: 805818 - RNA, 22 nt, Human
gugcuggggagauaggaagaga

SEQ ID NO: 805819 - RNA, 22 nt, Human
agggagacacaugaggaaguca

SEQ ID NO: 805820 - RNA, 22 nt, Human
caaggaaaacagaugaucaaca

SEQ ID NO: 805821 - RNA, 22 nt, Human
ucagaaaagaccacauuauucu

SEQ ID NO: 805822 - RNA, 22 nt, Human
uguauauuguucugucucuuca

SEQ ID NO: 805823 - RNA, 22 nt, Human
ggccuugggcagacacgucaca

SEQ ID NO: 805824 - RNA, 22 nt, Human
cacaugagugagaacaugcagu

SEQ ID NO: 805825 - RNA, 19 nt, Human
gggaucagcccagggcucu

SEQ ID NO: 805826 - RNA, 20 nt, Human
gcagcugaaaguaugacacc

SEQ ID NO: 805827 - RNA, 22 nt, Human
cagauauguggauucuauuagc

SEQ ID NO: 805828 - RNA, 22 nt, Human
gacagcaaccucaugagaaacu

SEQ ID NO: 805829 - RNA, 22 nt, Human
cugggcagaguccggaagaugg

SEQ ID NO: 805830 - RNA, 22 nt, Human
uggaucuaucuccagggguccu

SEQ ID NO: 805831 - RNA, 22 nt, Human
ucuuucuugguauucugagcua

SEQ ID NO: 805832 - RNA, 22 nt, Human
uugucuuaaauggauggacaau

SEQ ID NO: 805833 - RNA, 22 nt, Human
ucguuuuagguggacauugugu

SEQ ID NO: 805834 - RNA, 22 nt, Human
ggcccagcuguauauuacaguu

SEQ ID NO: 805835 - RNA, 22 nt, Human
agcagggcucugccaugggccc

SEQ ID NO: 805836 - RNA, 22 nt, Human
agaaggcugaagaagauccguu

SEQ ID NO: 805837 - RNA, 22 nt, Human
gugaaaaaucaucaugacuuga

SEQ ID NO: 805838 - RNA, 22 nt, Human
cuuuacaaagcaauuuugucuc

SEQ ID NO: 805839 - RNA, 22 nt, Human
guggggaggcauucuucucccu

SEQ ID NO: 805840 - RNA, 22 nt, Human
agugucugcuuugagucaggug

SEQ ID NO: 805841 - RNA, 22 nt, Human
agccuguggaucccugcacugg

SEQ ID NO: 805842 - RNA, 21 nt, Human
gugcugggacacagccaggcu

SEQ ID NO: 805843 - RNA, 22 nt, Human
uucacauucagaaaaagcccgu

SEQ ID NO: 805844 - RNA, 22 nt, Human
agagggaaauccaggagugcuu

SEQ ID NO: 805845 - RNA, 16 nt, Human
agccaggcugccucgg

SEQ ID NO: 805846 - RNA, 21 nt, Human
cccagggaagccgcagucacc

SEQ ID NO: 805847 - RNA, 22 nt, Human
agacccuuugggucugugcagg

SEQ ID NO: 805848 - RNA, 22 nt, Human
caggcagagaggagcauuuaau

SEQ ID NO: 805849 - RNA, 22 nt, Human
cuuugcugccagaacccagcag

SEQ ID NO: 805850 - RNA, 22 nt, Human
aggccuggugugccggaugcag

SEQ ID NO: 805851 - RNA, 22 nt, Human
cuuugguucuguccuucccaga

SEQ ID NO: 805852 - RNA, 22 nt, Human
ugcagccuagacauucugguca

SEQ ID NO: 805853 - RNA, 22 nt, Human
gugauucauccuggcauucauu

SEQ ID NO: 805854 - RNA, 22 nt, Human
agcaaggaaacuauggagagau

SEQ ID NO: 805855 - RNA, 23 nt, Human
acacuucacccauugugauagga

SEQ ID NO: 805856 - RNA, 22 nt, Human
auuuaugauuagccuauuguug

SEQ ID NO: 805857 - RNA, 22 nt, Human
cagcucugugcaggccugggga

SEQ ID NO: 805858 - RNA, 22 nt, Human
aggagccaggaaaccugcucug

SEQ ID NO: 805859 - RNA, 22 nt, Human
acauuacuuaccuuggguucua

SEQ ID NO: 805860 - RNA, 22 nt, Human
ggagggagguuagauucaagcu

SEQ ID NO: 805861 - RNA, 19 nt, Human
ggcugccuccugggagauu

SEQ ID NO: 805862 - RNA, 22 nt, Human
ucccagcccagacuucuccagu

SEQ ID NO: 805863 - RNA, 22 nt, Human
aaacaccagucccaguauacac

SEQ ID NO: 805864 - RNA, 22 nt, Human
aguuggugggugugagcuggac

SEQ ID NO: 805865 - RNA, 17 nt, Human
aggagcuggggguggug

SEQ ID NO: 805866 - RNA, 22 nt, Human
uuaucugaaaaccucaaaauau

SEQ ID NO: 805867 - RNA, 22 nt, Human
aacaaauguguuuuguaauuaa

SEQ ID NO: 805868 - RNA, 22 nt, Human
uuggcccacucucagaaugugg

SEQ ID NO: 805869 - RNA, 22 nt, Human
uggcugcagaucugugggacac

SEQ ID NO: 805870 - RNA, 22 nt, Human
uccugcaggccuguucccagua

SEQ ID NO: 805871 - RNA, 21 nt, Human
cagaggccucaugcucugugc

SEQ ID NO: 805872 - RNA, 16 nt, Human
gcacacagccagccuu

SEQ ID NO: 805873 - RNA, 22 nt, Human
caggaggcuuugggauccaagu

SEQ ID NO: 805874 - RNA, 22 nt, Human
uacuccugcugauccugccagc

SEQ ID NO: 805875 - RNA, 22 nt, Human
ggcaggcuguucaccugcuuuu

SEQ ID NO: 805876 - RNA, 22 nt, Human
aggcuggcuggggaugcgucuu

SEQ ID NO: 805877 - RNA, 22 nt, Human
gaauucuucugucuuuaacuga

SEQ ID NO: 805878 - RNA, 22 nt, Human
gggcacagagggucuugaagaa

SEQ ID NO: 805879 - RNA, 22 nt, Human
ugugucugcacugaguccucac

SEQ ID NO: 805880 - RNA, 22 nt, Human
acaaaaccagaaaaucucuacc

SEQ ID NO: 805881 - RNA, 22 nt, Human
cuucuucaagagaaugggagac

SEQ ID NO: 805882 - RNA, 22 nt, Human
ccugagacaugaaccaggcucc

SEQ ID NO: 805883 - RNA, 22 nt, Human
aggaaacaguugguaaugcaua

SEQ ID NO: 805884 - RNA, 22 nt, Human
uuuaccagaauugccaccagaa

SEQ ID NO: 805885 - RNA, 22 nt, Human
cacaagagagugcgcguugcaa

SEQ ID NO: 805886 - RNA, 22 nt, Human
ggccugagcuugggcagcguau

SEQ ID NO: 805887 - RNA, 22 nt, Human
ggaaacuagaagaauacuaguc

SEQ ID NO: 805888 - RNA, 23 nt, Human
ugccuuaguuagcacauuucuaa

SEQ ID NO: 805889 - RNA, 22 nt, Human
cugggagcucagcccuggggug

SEQ ID NO: 805890 - RNA, 22 nt, Human
auaacagacugauuuuuaaaug

SEQ ID NO: 805891 - RNA, 22 nt, Human
uucuuuggaauaagucaagcug

SEQ ID NO: 805892 - RNA, 22 nt, Human
ccucccaccguaucucaguggc

SEQ ID NO: 805893 - RNA, 22 nt, Human
gcuggaggauggacuggaagaa

SEQ ID NO: 805894 - RNA, 22 nt, Human
uaaaggcaaauguguguuugug

SEQ ID NO: 805895 - RNA, 22 nt, Human
uuuuaugaagauaauuuucuga

SEQ ID NO: 805896 - RNA, 22 nt, Human
uucuuauagaagcaaccauugu

SEQ ID NO: 805897 - RNA, 22 nt, Human
gccagcuggagacuggcagggg

SEQ ID NO: 805898 - RNA, 22 nt, Human
ucaugggguagaagcauguuua

SEQ ID NO: 805899 - RNA, 22 nt, Human
acuggcagcuguaggaugcaug

SEQ ID NO: 805900 - RNA, 22 nt, Human
ucugcaccccgcagggucaggu

SEQ ID NO: 805901 - RNA, 22 nt, Human
ucuuuagacauccaguuucucu

SEQ ID NO: 805902 - RNA, 22 nt, Human
cuucccugauaagagccucaga

SEQ ID NO: 805903 - RNA, 22 nt, Human
guauaugugugggccugcauau

SEQ ID NO: 805904 - RNA, 20 nt, Human
uuauuucaguugcuagauug

SEQ ID NO: 805905 - RNA, 23 nt, Human
caagucauggauuggaguuucag

SEQ ID NO: 805906 - RNA, 22 nt, Human
cugcugauucuuaaaugugguu

SEQ ID NO: 805907 - RNA, 17 nt, Human
cuuguuuuccacuggga

SEQ ID NO: 805908 - RNA, 22 nt, Human
agcagagcagaaugugaaggug

SEQ ID NO: 805909 - RNA, 22 nt, Human
caccccuugucuuuggggucgu

SEQ ID NO: 805910 - RNA, 22 nt, Human
gggcagauggggcacaggcuga

SEQ ID NO: 805911 - RNA, 22 nt, Human
ggaugcaggaguugaagaagga

SEQ ID NO: 805912 - RNA, 22 nt, Human
ugcuggagaccugcuugcacca

SEQ ID NO: 805913 - RNA, 22 nt, Human
cuacauuuggagaguauaggaa

SEQ ID NO: 805914 - RNA, 22 nt, Human
augaaaugcugagaggugcuuc

SEQ ID NO: 805915 - RNA, 22 nt, Human
gacccugagcaaaagcaguucu

SEQ ID NO: 805916 - RNA, 22 nt, Human
agcuagcuuagccugugaggua

SEQ ID NO: 805917 - RNA, 22 nt, Human
ccaguucugagaugaauaucca

SEQ ID NO: 805918 - RNA, 22 nt, Human
aaaauagauucuaggaugucuu

SEQ ID NO: 805919 - RNA, 18 nt, Human
agcagggcauuuugccau

SEQ ID NO: 805920 - RNA, 22 nt, Human
uuaauuagagcugauguucaua

SEQ ID NO: 805921 - RNA, 22 nt, Human
uucuauuaauauguuaauucug

SEQ ID NO: 805922 - RNA, 22 nt, Human
augucagaagcuggaugacagc

SEQ ID NO: 805923 - RNA, 22 nt, Human
uuuuauguuccugaagcuaucu

SEQ ID NO: 805924 - RNA, 22 nt, Human
ugcuuccugaggccgucuucuc

SEQ ID NO: 805925 - RNA, 22 nt, Human
caccagggcagcagccuagucu

SEQ ID NO: 805926 - RNA, 22 nt, Human
agagcuggcugugggugacuuu

SEQ ID NO: 805927 - RNA, 22 nt, Human
ucuccagaaauggggcugggga

SEQ ID NO: 805928 - RNA, 22 nt, Human
uucuaaagccuguccuaucaga

SEQ ID NO: 805929 - RNA, 22 nt, Human
gagcagcuggacaggccucccu

SEQ ID NO: 805930 - RNA, 22 nt, Human
cucaggaggaggaaguucauug

SEQ ID NO: 805931 - RNA, 22 nt, Human
acauacauguaaaggaaauuau

SEQ ID NO: 805932 - RNA, 22 nt, Human
auuuuuaugacaaaccauccuc

SEQ ID NO: 805933 - RNA, 22 nt, Human
gggcaugagaggcaggcaagug

SEQ ID NO: 805934 - RNA, 22 nt, Human
ucacaugucagucuuaaacaga

SEQ ID NO: 805935 - RNA, 22 nt, Human
gagccaggcccguacuugcugu

SEQ ID NO: 805936 - RNA, 22 nt, Human
cagccaggacagggaaacuagu

SEQ ID NO: 805937 - RNA, 22 nt, Human
uuaaggaauuacgaaaauauuu

SEQ ID NO: 805938 - RNA, 23 nt, Human
agauuuggaaagcugaguggcgu

SEQ ID NO: 805939 - RNA, 22 nt, Human
uggcugauugauuuccuaugua

SEQ ID NO: 805940 - RNA, 22 nt, Human
acuauaacccauggaauauaag

SEQ ID NO: 805941 - RNA, 22 nt, Human
gagcacaggcuuugguggacac

SEQ ID NO: 805942 - RNA, 22 nt, Human
uccuuggaagagcauucccagg

SEQ ID NO: 805943 - RNA, 22 nt, Human
aggaggugcuagagaagauguu

SEQ ID NO: 805944 - RNA, 22 nt, Human
auacaaugggugcaaagaugug

SEQ ID NO: 805945 - RNA, 22 nt, Human
caguuucuguggucucuuuuca

SEQ ID NO: 805946 - RNA, 22 nt, Human
ucagaggcuuccuuccucggag

SEQ ID NO: 805947 - RNA, 22 nt, Human
cuggagugcaaugaacaagguc

SEQ ID NO: 805948 - RNA, 22 nt, Human
uucuaagucacucagauuuugg

SEQ ID NO: 805949 - RNA, 17 nt, Human
caggcuccuuccagauu

SEQ ID NO: 805950 - RNA, 22 nt, Human
agugucugccuauuuuucaagc

SEQ ID NO: 805951 - RNA, 22 nt, Human
gugggagcauggucccagugcc

SEQ ID NO: 805952 - RNA, 22 nt, Human
uuucuguuguacuuaaacuagg

SEQ ID NO: 805953 - RNA, 22 nt, Human
aggcaggcuagucgcuugagcc

SEQ ID NO: 805954 - RNA, 22 nt, Human
ucagcugagcuccagcucauag

SEQ ID NO: 805955 - RNA, 22 nt, Human
aaguuucuuuauuagcuugucc

SEQ ID NO: 805956 - RNA, 22 nt, Human
aagccaguguccagaaugggca

SEQ ID NO: 805957 - RNA, 16 nt, Human
gcaggacacucagaca

SEQ ID NO: 805958 - RNA, 22 nt, Human
uuucacaucagagguagauuag

SEQ ID NO: 805959 - RNA, 22 nt, Human
uucccuggcccuggcacgcucu

SEQ ID NO: 805960 - RNA, 22 nt, Human
ggguguccagggcgugucugga

SEQ ID NO: 805961 - RNA, 22 nt, Human
auagaaacagggaagcaaagca

SEQ ID NO: 805962 - RNA, 22 nt, Human
ggucccaguugcccaggucagg

SEQ ID NO: 805963 - RNA, 22 nt, Human
ucaggaucaggggccuuuccuu

SEQ ID NO: 805964 - RNA, 22 nt, Human
uguguauucugagguagguaua

SEQ ID NO: 805965 - RNA, 22 nt, Human
caggagcuggauaggaccacaa

SEQ ID NO: 805966 - RNA, 22 nt, Human
gggagccuugggagugccagcc

SEQ ID NO: 805967 - RNA, 22 nt, Human
acagugaugggggugcaggaag

SEQ ID NO: 805968 - RNA, 22 nt, Human
ucuaaacauugguauggagcag

SEQ ID NO: 805969 - RNA, 22 nt, Human
cauucuuauauuuacucauuca

SEQ ID NO: 805970 - RNA, 21 nt, Human
uccucagggccccagagcacu

SEQ ID NO: 805971 - RNA, 22 nt, Human
uugauucauauagauaugcgug

SEQ ID NO: 805972 - RNA, 22 nt, Human
uggaggaaaaaaccaggcagag

SEQ ID NO: 805973 - RNA, 22 nt, Human
ucuucauacaauuucagacauc

SEQ ID NO: 805974 - RNA, 22 nt, Human
cuggcuuccaccauggccccug

SEQ ID NO: 805975 - RNA, 22 nt, Human
auaaggacacccuucucuuuac

SEQ ID NO: 805976 - RNA, 22 nt, Human
cugccuggcccagggaugggcc

SEQ ID NO: 805977 - RNA, 23 nt, Human
auuuacagguuaaaugaaaucag

SEQ ID NO: 805978 - RNA, 22 nt, Human
uucuggagacccagcaacaggg

SEQ ID NO: 805979 - RNA, 22 nt, Human
auacaagugagaaaacugaaga

SEQ ID NO: 805980 - RNA, 22 nt, Human
cugcuuggaguccuccagcacc

SEQ ID NO: 805981 - RNA, 22 nt, Human
agcuggccuccgggugccuggg

SEQ ID NO: 805982 - RNA, 22 nt, Human
gaaggcugaugacagauucugc

SEQ ID NO: 805983 - RNA, 22 nt, Human
auuauauaaaauucuggaagcu

SEQ ID NO: 805984 - RNA, 19 nt, Human
ccuggcucugagcccagcc

SEQ ID NO: 805985 - RNA, 22 nt, Human
ugcauuccuccaccuccugcac

SEQ ID NO: 805986 - RNA, 23 nt, Human
ugucuuugaaugggcuguagaca

SEQ ID NO: 805987 - RNA, 22 nt, Human
ccuuuuucccuggagggacagc

SEQ ID NO: 805988 - RNA, 22 nt, Human
ugagugaggaagcgguggagga

SEQ ID NO: 805989 - RNA, 22 nt, Human
uggcagggccugcucaucaucc

SEQ ID NO: 805990 - RNA, 22 nt, Human
ggugggaguggaacguggaaga

SEQ ID NO: 805991 - RNA, 22 nt, Human
gcagagguccuagccaggaguc

SEQ ID NO: 805992 - RNA, 22 nt, Human
gccuucaggaaaucaguccuug

SEQ ID NO: 805993 - RNA, 22 nt, Human
cugagcagcagggagacuggug

SEQ ID NO: 805994 - RNA, 22 nt, Human
auaucacagaugcagaaagaga

SEQ ID NO: 805995 - RNA, 22 nt, Human
aggaaauugagaaucagaauaa

SEQ ID NO: 805996 - RNA, 22 nt, Human
augcagaagcagaacuuacaca

SEQ ID NO: 805997 - RNA, 22 nt, Human
cagagucaauguccaagaagcu

SEQ ID NO: 805998 - RNA, 22 nt, Human
aaauaguuagcccugcauauau

SEQ ID NO: 805999 - RNA, 22 nt, Human
cuguggcuccagugaaccaaug

SEQ ID NO: 806000 - RNA, 22 nt, Human
gugggagcuuuggcaucaggcu

SEQ ID NO: 806001 - RNA, 22 nt, Human
cauuucugcagaauugcucuuc

SEQ ID NO: 806002 - RNA, 22 nt, Human
aagcuguuagggagugguaggu

SEQ ID NO: 806003 - RNA, 22 nt, Human
augcaacacauuugaugagcga

SEQ ID NO: 806004 - RNA, 22 nt, Human
aaguccugaagacacagaaaag

SEQ ID NO: 806005 - RNA, 22 nt, Human
agugucuuaguccauuugggcu

SEQ ID NO: 806006 - RNA, 22 nt, Human
uagugucuagugaguuugaugc

SEQ ID NO: 806007 - RNA, 22 nt, Human
uuucugauuugacuugaaguau

SEQ ID NO: 806008 - RNA, 22 nt, Human
augacacauaaaacaaggacug

SEQ ID NO: 806009 - RNA, 23 nt, Human
cccaacacauuccuuuucuucug

SEQ ID NO: 806010 - RNA, 22 nt, Human
gaaggcugcgaggggagugccg

SEQ ID NO: 806011 - RNA, 22 nt, Human
ugcaauaacccaugagauagaa

SEQ ID NO: 806012 - RNA, 22 nt, Human
uggaaggcgcagugaugaugcu

SEQ ID NO: 806013 - RNA, 22 nt, Human
ugcugguaccgcgccuccgcca

SEQ ID NO: 806014 - RNA, 22 nt, Human
guucacagcuucuuaggucaua

SEQ ID NO: 806015 - RNA, 22 nt, Human
agccugccucagacucaggaua

SEQ ID NO: 806016 - RNA, 20 nt, Human
aaaguucauguuugcacuuu

SEQ ID NO: 806017 - RNA, 22 nt, Human
guggaggguuugcaaugugcag

SEQ ID NO: 806018 - RNA, 22 nt, Human
ucagaaauguaagcugaugacu

SEQ ID NO: 806019 - RNA, 22 nt, Human
ugggaaagacucaggacaggag

SEQ ID NO: 806020 - RNA, 22 nt, Human
acuuuucucccuccugccuuca

SEQ ID NO: 806021 - RNA, 22 nt, Human
uuucuauuguaagucuccuaua

SEQ ID NO: 806022 - RNA, 22 nt, Human
uauuuucuggggagagugaacc

SEQ ID NO: 806023 - RNA, 22 nt, Human
aauauuucugcagaaugguuuu

SEQ ID NO: 806024 - RNA, 22 nt, Human
uuucaguuguuuuagcucugug

SEQ ID NO: 806025 - RNA, 20 nt, Human
gggcuggcucaacuggaucc

SEQ ID NO: 806026 - RNA, 20 nt, Human
caucagaaauccugacccac

SEQ ID NO: 806027 - RNA, 22 nt, Human
uuuauuauccaguguugucaug

SEQ ID NO: 806028 - RNA, 22 nt, Human
cacaugugugcugaggacugug

SEQ ID NO: 806029 - RNA, 22 nt, Human
uacuguuagagcgauuuguccu

SEQ ID NO: 806030 - RNA, 21 nt, Human
aggaggagagcuuggccuacc

SEQ ID NO: 806031 - RNA, 22 nt, Human
cugaggcuuggaggggucuggu

SEQ ID NO: 806032 - RNA, 22 nt, Human
guuuacugcucuagguugcaca

SEQ ID NO: 806033 - RNA, 20 nt, Human
cuggcaggagcgagucuacc

SEQ ID NO: 806034 - RNA, 20 nt, Human
auggccugcuagaagucugu

SEQ ID NO: 806035 - RNA, 22 nt, Human
uuccaagugggggaagcugagu

SEQ ID NO: 806036 - RNA, 22 nt, Human
ugcauuucagaagaaaauucgg

SEQ ID NO: 806037 - RNA, 22 nt, Human
agaggcuggauugagcauagac

SEQ ID NO: 806038 - RNA, 22 nt, Human
caggugucaaaauacuaagugg

SEQ ID NO: 806039 - RNA, 23 nt, Human
ucacauauguagaaguggaauuc

SEQ ID NO: 806040 - RNA, 22 nt, Human
auuuucaagggagaggccucug

SEQ ID NO: 806041 - RNA, 22 nt, Human
agaaaccucacagcaauucuga

SEQ ID NO: 806042 - RNA, 21 nt, Human
ugcaggcuguuuaagaggcaa

SEQ ID NO: 806043 - RNA, 22 nt, Human
acagaauugaagcugaguaaau

SEQ ID NO: 806044 - RNA, 22 nt, Human
agaggccccaggugagcaugcc

SEQ ID NO: 806045 - RNA, 22 nt, Human
aguucgagaucugcugaugaga

SEQ ID NO: 806046 - RNA, 22 nt, Human
auaaaagaaguuuugguacuug

SEQ ID NO: 806047 - RNA, 22 nt, Human
aaagcaggcagcaggcuggauu

SEQ ID NO: 806048 - RNA, 22 nt, Human
ccuggggagagaaagcccagcc

SEQ ID NO: 806049 - RNA, 22 nt, Human
aaaucaugugcagagaucagga

SEQ ID NO: 806050 - RNA, 22 nt, Human
gcagaggcaaucagguaugugg

SEQ ID NO: 806051 - RNA, 22 nt, Human
ucacaguaucacacaaggauua

SEQ ID NO: 806052 - RNA, 22 nt, Human
aggcuggaguguagcagugcag

SEQ ID NO: 806053 - RNA, 22 nt, Human
cgcagcuguccauguguggggg

SEQ ID NO: 806054 - RNA, 22 nt, Human
cagggcagaaggcacucuacuc

SEQ ID NO: 806055 - RNA, 21 nt, Human
aguccaggaggaggccagguu

SEQ ID NO: 806056 - RNA, 22 nt, Human
gaaggcccagcuugaaugcugc

SEQ ID NO: 806057 - RNA, 22 nt, Human
cuggcccaguucugcguuuugc

SEQ ID NO: 806058 - RNA, 23 nt, Human
aaauggccaaaaccaggugguua

SEQ ID NO: 806059 - RNA, 22 nt, Human
uuauugacuuguuuguccuggu

SEQ ID NO: 806060 - RNA, 18 nt, Human
cagagcuccuggaugcag

SEQ ID NO: 806061 - RNA, 22 nt, Human
uauucuugacugcuuacuaugu

SEQ ID NO: 806062 - RNA, 23 nt, Human
uguuuucuuguccugguauaauu

SEQ ID NO: 806063 - RNA, 22 nt, Human
caccacuggaggucuuggcuuu

SEQ ID NO: 806064 - RNA, 22 nt, Human
uacaccauucccagguggauuu

SEQ ID NO: 806065 - RNA, 22 nt, Human
uucugcacauuuuagcaaagua

SEQ ID NO: 806066 - RNA, 22 nt, Human
ugcuggaggggaugccuucacu

SEQ ID NO: 806067 - RNA, 18 nt, Human
cuucuuguuugauuuggg

SEQ ID NO: 806068 - RNA, 22 nt, Human
uaaaaggauuagcaggaugggc

SEQ ID NO: 806069 - RNA, 22 nt, Human
auuucucaguuccuacuguuua

SEQ ID NO: 806070 - RNA, 22 nt, Human
uauguacacauacacuuguaau

SEQ ID NO: 806071 - RNA, 22 nt, Human
ucuugauucauguucccugcau

SEQ ID NO: 806072 - RNA, 20 nt, Human
aagauucugauuuguagcgu

SEQ ID NO: 806073 - RNA, 22 nt, Human
auguuuucuccauguuaugcuu

SEQ ID NO: 806074 - RNA, 22 nt, Human
acuucacagguuuucauaaaac

SEQ ID NO: 806075 - RNA, 22 nt, Human
ugggucacaaaggccagaugau

SEQ ID NO: 806076 - RNA, 22 nt, Human
uuucuauuuacagugcuaggua

SEQ ID NO: 806077 - RNA, 22 nt, Human
aaugccaaugggcagaacuaga

SEQ ID NO: 806078 - RNA, 22 nt, Human
agaaggcuuuaaguacuggcau

SEQ ID NO: 806079 - RNA, 22 nt, Human
uuaagagguggucgugucugug

SEQ ID NO: 806080 - RNA, 22 nt, Human
aaggcagagauuagcagaauga

SEQ ID NO: 806081 - RNA, 22 nt, Human
ggcacagcugaugcagacacac

SEQ ID NO: 806082 - RNA, 23 nt, Human
accccaggcaucgcauuccucuu

SEQ ID NO: 806083 - RNA, 22 nt, Human
uagcuucucuuuucaacaucuu

SEQ ID NO: 806084 - RNA, 22 nt, Human
aaauacagaguugcuuaaaagc

SEQ ID NO: 806085 - RNA, 22 nt, Human
cagcccugggaucuuagugccu

SEQ ID NO: 806086 - RNA, 22 nt, Human
ccuagacuagaggcagggagcc

SEQ ID NO: 806087 - RNA, 22 nt, Human
ggcaggcaagucugcucuguga

SEQ ID NO: 806088 - RNA, 22 nt, Human
aaaguuuaguguccucuaccac

SEQ ID NO: 806089 - RNA, 22 nt, Human
gggcuuggccccagaagagcua

SEQ ID NO: 806090 - RNA, 22 nt, Human
agagaacagcauugcagcuuug

SEQ ID NO: 806091 - RNA, 22 nt, Human
gcucccugguauugcugccacu

SEQ ID NO: 806092 - RNA, 22 nt, Human
uuucugaaaucucuuuugagga

SEQ ID NO: 806093 - RNA, 22 nt, Human
aguggggacuuaugccagcauu

SEQ ID NO: 806094 - RNA, 22 nt, Human
aaaugcuuagagguguucaaau

SEQ ID NO: 806095 - RNA, 22 nt, Human
ugcccuggugaagugcucuccu

SEQ ID NO: 806096 - RNA, 21 nt, Human
aagcagggacugcccaggucc

SEQ ID NO: 806097 - RNA, 17 nt, Human
cuaagggcccacucuuc

SEQ ID NO: 806098 - RNA, 22 nt, Human
uaugacaaaugauauauuuggc

SEQ ID NO: 806099 - RNA, 22 nt, Human
aacacauagacguuugauauca

SEQ ID NO: 806100 - RNA, 22 nt, Human
gggaggcauguguuauccacuu

SEQ ID NO: 806101 - RNA, 22 nt, Human
ucuauuuuuauaguugaagugc

SEQ ID NO: 806102 - RNA, 22 nt, Human
uaacaucuuuagcagcucgaac

SEQ ID NO: 806103 - RNA, 22 nt, Human
agacuuuaaugugcaaaugaaa

SEQ ID NO: 806104 - RNA, 19 nt, Human
cacaugagggcugagggac

SEQ ID NO: 806105 - RNA, 22 nt, Human
aaaccagugauagacuagacac

SEQ ID NO: 806106 - RNA, 22 nt, Human
agucugaaggcaaucugcugac

SEQ ID NO: 806107 - RNA, 21 nt, Human
aggagggcacaaggccaggaa

SEQ ID NO: 806108 - RNA, 22 nt, Human
aguuucuugccgugcuuuccau

SEQ ID NO: 806109 - RNA, 22 nt, Human
ugucugaaucucgguuuccuca

SEQ ID NO: 806110 - RNA, 22 nt, Human
uugcaaaucucuuguguuuggu

SEQ ID NO: 806111 - RNA, 21 nt, Human
cauugagauaggagagauugu

SEQ ID NO: 806112 - RNA, 22 nt, Human
gaguuaaaagcccucucagcag

SEQ ID NO: 806113 - RNA, 22 nt, Human
cugcaaaugccgugagagcagg

SEQ ID NO: 806114 - RNA, 22 nt, Human
gaaaugcaggcuuggauucagc

SEQ ID NO: 806115 - RNA, 22 nt, Human
caaggcucugcuucuaucacau

SEQ ID NO: 806116 - RNA, 19 nt, Human
gccaggagggcucuggcug

SEQ ID NO: 806117 - RNA, 22 nt, Human
aacauuucauaacuugacuuuu

SEQ ID NO: 806118 - RNA, 22 nt, Human
uuuuucaagacaaccugcaugu

SEQ ID NO: 806119 - RNA, 22 nt, Human
uugggaaauuacucugcuagga

SEQ ID NO: 806120 - RNA, 22 nt, Human
agaucugguuggaguccugaca

SEQ ID NO: 806121 - RNA, 17 nt, Human
agcuuguuuuugaaagc

SEQ ID NO: 806122 - RNA, 22 nt, Human
uuuguguuuuagcuggugaggc

SEQ ID NO: 806123 - RNA, 22 nt, Human
uaggcccaguuccgccucccgg

SEQ ID NO: 806124 - RNA, 22 nt, Human
gguggccucgguggugcacagg

SEQ ID NO: 806125 - RNA, 22 nt, Human
acaagaauuauuucuaguuaac

SEQ ID NO: 806126 - RNA, 19 nt, Human
gcugucugaugcugagguc

SEQ ID NO: 806127 - RNA, 22 nt, Human
uagaaaugauugguugagcucu

SEQ ID NO: 806128 - RNA, 22 nt, Human
ucauggggugaauuaguaugcu

SEQ ID NO: 806129 - RNA, 22 nt, Human
ucuggagaacuugcaagaggau

SEQ ID NO: 806130 - RNA, 22 nt, Human
auuuagaaauuccaaaaguauu

SEQ ID NO: 806131 - RNA, 22 nt, Human
ggucugcuuuccuugccacugu

SEQ ID NO: 806132 - RNA, 22 nt, Human
cagcaaauacuacuaguuuuua

SEQ ID NO: 806133 - RNA, 23 nt, Human
ucacugcuacucagccugagauu

SEQ ID NO: 806134 - RNA, 23 nt, Human
gaaauguuucuugauuaauccua

SEQ ID NO: 806135 - RNA, 22 nt, Human
gagggccaggcagcaagaaggc

SEQ ID NO: 806136 - RNA, 22 nt, Human
gcuggcagacugggggcagaac

SEQ ID NO: 806137 - RNA, 22 nt, Human
aaagagcaagggcuuugaggcu

SEQ ID NO: 806138 - RNA, 22 nt, Human
cucugacauucugugacucuga

SEQ ID NO: 806139 - RNA, 22 nt, Human
aggggagcaacauagucacucu

SEQ ID NO: 806140 - RNA, 22 nt, Human
agguggagacccagagaaggcg

SEQ ID NO: 806141 - RNA, 22 nt, Human
ugcaggcagcugaaaggugccu

SEQ ID NO: 806142 - RNA, 22 nt, Human
cagaagcaaguagugauucuuu

SEQ ID NO: 806143 - RNA, 22 nt, Human
uaacuaggauuacaagcgugcg

SEQ ID NO: 806144 - RNA, 22 nt, Human
ccuuggcuuccuucccucuaga

SEQ ID NO: 806145 - RNA, 22 nt, Human
uucagugugugauaccugcugu

SEQ ID NO: 806146 - RNA, 22 nt, Human
aggcucuguuugcugugguacc

SEQ ID NO: 806147 - RNA, 22 nt, Human
gggaguggguuuggccuaggcc

SEQ ID NO: 806148 - RNA, 22 nt, Human
aggcagcaugggcccagagucc

SEQ ID NO: 806149 - RNA, 22 nt, Human
auuuuuccaauuaggauaaaga

SEQ ID NO: 806150 - RNA, 22 nt, Human
gcaaugcaaucagaugauuauu

SEQ ID NO: 806151 - RNA, 22 nt, Human
acaggacauggcuucugugacg

SEQ ID NO: 806152 - RNA, 22 nt, Human
gugauucauucgauuaguauuu

SEQ ID NO: 806153 - RNA, 22 nt, Human
ucaauucugcauacauuucacu

SEQ ID NO: 806154 - RNA, 22 nt, Human
cugugggagggaaggcgcggcc

SEQ ID NO: 806155 - RNA, 22 nt, Human
cugggcagugguggcaucuuug

SEQ ID NO: 806156 - RNA, 22 nt, Human
ugugucaauuuaugucauucau

SEQ ID NO: 806157 - RNA, 21 nt, Human
acaggcuuuagaaaaugacuc

SEQ ID NO: 806158 - RNA, 21 nt, Human
gccagcggccgcccuccagga

SEQ ID NO: 806159 - RNA, 22 nt, Human
cccaggagaugcacuccauugg

SEQ ID NO: 806160 - RNA, 22 nt, Human
gacaaauaggucaacaggaggg

SEQ ID NO: 806161 - RNA, 22 nt, Human
ggcucaggaccugggauugcca

SEQ ID NO: 806162 - RNA, 22 nt, Human
aaguguuuuggcuucuguacac

SEQ ID NO: 806163 - RNA, 22 nt, Human
cuucugaagagguuaucauaga

SEQ ID NO: 806164 - RNA, 22 nt, Human
ugggaugggaucucgcuguguc

SEQ ID NO: 806165 - RNA, 22 nt, Human
gagccacagacuguauuuggga

SEQ ID NO: 806166 - RNA, 20 nt, Human
acacagugacaggaaagaga

SEQ ID NO: 806167 - RNA, 22 nt, Human
acaauuguggcaauuuguaugu

SEQ ID NO: 806168 - RNA, 22 nt, Human
auggcagaccugggcuggagaa

SEQ ID NO: 806169 - RNA, 22 nt, Human
ucuauaaagggccagauaguag

SEQ ID NO: 806170 - RNA, 22 nt, Human
ugugaaaagggcuuuguacaaa

SEQ ID NO: 806171 - RNA, 22 nt, Human
gcagggcugggugggagacaga

SEQ ID NO: 806172 - RNA, 22 nt, Human
uucaagugaggcugucuuuaga

SEQ ID NO: 806173 - RNA, 19 nt, Human
cacauacagaaaagaguaa

SEQ ID NO: 806174 - RNA, 22 nt, Human
cagucauuccuaaccaagaaca

SEQ ID NO: 806175 - RNA, 22 nt, Human
ccaggcuggagugcaguagugu

SEQ ID NO: 806176 - RNA, 22 nt, Human
cuucacauuugcgaaggccaaa

SEQ ID NO: 806177 - RNA, 22 nt, Human
ugauaugugaagcuauuaguuc

SEQ ID NO: 806178 - RNA, 22 nt, Human
ggccaccaaaguccuguggcuu

SEQ ID NO: 806179 - RNA, 21 nt, Human
acuggcugccaugauccaggg

SEQ ID NO: 806180 - RNA, 22 nt, Human
ucuccuggccgggcuguccccu

SEQ ID NO: 806181 - RNA, 20 nt, Human
ugugggcccuuggcuggcaa

SEQ ID NO: 806182 - RNA, 22 nt, Human
caugacagaugcaaaggauugg

SEQ ID NO: 806183 - RNA, 22 nt, Human
cacacagugggaaaaccugaag

SEQ ID NO: 806184 - RNA, 18 nt, Human
uccugccugcgggcuccc

SEQ ID NO: 806185 - RNA, 22 nt, Human
acuucccacugcagugacugag

SEQ ID NO: 806186 - RNA, 22 nt, Human
uacaucuaucuagaugcucaga

SEQ ID NO: 806187 - RNA, 22 nt, Human
ugaguuaagcagguagcaagcu

SEQ ID NO: 806188 - RNA, 22 nt, Human
gcugggcugagcuagacuuggc

SEQ ID NO: 806189 - RNA, 22 nt, Human
caggcuccuuaucuuacaacuu

SEQ ID NO: 806190 - RNA, 22 nt, Human
aaauucacaagagcauugccug

SEQ ID NO: 806191 - RNA, 22 nt, Human
aagugggucagggacagaucuu

SEQ ID NO: 806192 - RNA, 22 nt, Human
aggcagcccacaggacacagga

SEQ ID NO: 806193 - RNA, 23 nt, Human
uaauucacauauacauugcuuca

SEQ ID NO: 806194 - RNA, 22 nt, Human
uaggacaguggagauaaccaga

SEQ ID NO: 806195 - RNA, 22 nt, Human
aguccagggcuuagucagcggg

SEQ ID NO: 806196 - RNA, 22 nt, Human
aguggcuggaauugcaggugcg

SEQ ID NO: 806197 - RNA, 22 nt, Human
auuucucacaaaguugcuuauc

SEQ ID NO: 806198 - RNA, 22 nt, Human
ucaaucuagagauuaaaauagg

SEQ ID NO: 806199 - RNA, 22 nt, Human
ccagcccuucccaacuggccag

SEQ ID NO: 806200 - RNA, 22 nt, Human
ugggugaggagaggcugucuaa

SEQ ID NO: 806201 - RNA, 21 nt, Human
ccuggcagaagccugauaugc

SEQ ID NO: 806202 - RNA, 22 nt, Human
augcucacuucagagaagauga

SEQ ID NO: 806203 - RNA, 22 nt, Human
ucuccuggguaaaaggguugau

SEQ ID NO: 806204 - RNA, 22 nt, Human
gccaggcacugcucuaagcccu

SEQ ID NO: 806205 - RNA, 23 nt, Human
auuuuuccuggaacagucaccca

SEQ ID NO: 806206 - RNA, 22 nt, Human
uaaaguuuauuugaacaucucu

SEQ ID NO: 806207 - RNA, 22 nt, Human
aacccaggucuuuggcuuccag

SEQ ID NO: 806208 - RNA, 22 nt, Human
augaaaagcauaaacgcugaag

SEQ ID NO: 806209 - RNA, 22 nt, Human
ucugcagcuugcacaggcaggc

SEQ ID NO: 806210 - RNA, 22 nt, Human
cuccugucagaagcauccugag

SEQ ID NO: 806211 - RNA, 22 nt, Human
ccagggcaacgcugucucagag

SEQ ID NO: 806212 - RNA, 22 nt, Human
uggcuggggccacaguuuuccu

SEQ ID NO: 806213 - RNA, 22 nt, Human
ugagaagauugggcagagugga

SEQ ID NO: 806214 - RNA, 22 nt, Human
gcugcaagcaugucauccucac

SEQ ID NO: 806215 - RNA, 22 nt, Human
ggcuagaguggaacuggagcgg

SEQ ID NO: 806216 - RNA, 22 nt, Human
gaggcagaaguugcagugagca

SEQ ID NO: 806217 - RNA, 22 nt, Human
ggccaugcaggucagagguggg

SEQ ID NO: 806218 - RNA, 22 nt, Human
aggcacuuuaggaucagguuga

SEQ ID NO: 806219 - RNA, 22 nt, Human
ccaggaggggucucugucuccc

SEQ ID NO: 806220 - RNA, 22 nt, Human
acaugacagugacuuuauaaga

SEQ ID NO: 806221 - RNA, 22 nt, Human
aggcuggugcuuccuagggcag

SEQ ID NO: 806222 - RNA, 22 nt, Human
uacagaggaggugguugggagu

SEQ ID NO: 806223 - RNA, 22 nt, Human
ccugaauacuggugcugaaagu

SEQ ID NO: 806224 - RNA, 22 nt, Human
gagccagcuauguagcaagagg

SEQ ID NO: 806225 - RNA, 21 nt, Human
ucccagggccaggugccauca

SEQ ID NO: 806226 - RNA, 22 nt, Human
cauuaauuguauuuuucaaagu

SEQ ID NO: 806227 - RNA, 22 nt, Human
uuuggcggggcaauucugaagc

SEQ ID NO: 806228 - RNA, 22 nt, Human
gccaggcuguggggaacuugaa

SEQ ID NO: 806229 - RNA, 22 nt, Human
ugaaugaugcaguauaaugaua

SEQ ID NO: 806230 - RNA, 22 nt, Human
cuagcuguaagagggauguggc

SEQ ID NO: 806231 - RNA, 18 nt, Human
gucuuuggaguggaggua

SEQ ID NO: 806232 - RNA, 22 nt, Human
auaacaauagugguagugcugg

SEQ ID NO: 806233 - RNA, 22 nt, Human
ugcaaaugggcaucuccaagug

SEQ ID NO: 806234 - RNA, 22 nt, Human
gacagacauuuccugauccaau

SEQ ID NO: 806235 - RNA, 22 nt, Human
caggcagagacgucaguguagg

SEQ ID NO: 806236 - RNA, 19 nt, Human
aggcuggagacaccaggcc

SEQ ID NO: 806237 - RNA, 22 nt, Human
ucacauuucugauuauaccaaa

SEQ ID NO: 806238 - RNA, 22 nt, Human
uugagaggcuguugacauucug

SEQ ID NO: 806239 - RNA, 22 nt, Human
aaagaccugugguagcucuaaa

SEQ ID NO: 806240 - RNA, 22 nt, Human
agcagagccagaauuggaccag

SEQ ID NO: 806241 - RNA, 22 nt, Human
gggugccacagagcuuccacuu

SEQ ID NO: 806242 - RNA, 22 nt, Human
aaguucugggguaaugagaauu

SEQ ID NO: 806243 - RNA, 22 nt, Human
cuuggcaggguggaggaugcag

SEQ ID NO: 806244 - RNA, 22 nt, Human
uggauuuaguucuucacaggcc

SEQ ID NO: 806245 - RNA, 22 nt, Human
ugcuggcuuuagugauuggggu

SEQ ID NO: 806246 - RNA, 21 nt, Human
gggguuggcaagagcagagac

SEQ ID NO: 806247 - RNA, 22 nt, Human
aggccaggguagggcccauugu

SEQ ID NO: 806248 - RNA, 17 nt, Human
ccacagccuggcacuug

SEQ ID NO: 806249 - RNA, 22 nt, Human
ucuggcugcugcgugagugcuu

SEQ ID NO: 806250 - RNA, 22 nt, Human
caucauuuguucacuugauucc

SEQ ID NO: 806251 - RNA, 22 nt, Human
aggaggagguaagaaaagcaua

SEQ ID NO: 806252 - RNA, 20 nt, Human
acaugaaaggaaacaggaaa

SEQ ID NO: 806253 - RNA, 23 nt, Human
gccugccugaccugugcaaaguc

SEQ ID NO: 806254 - RNA, 22 nt, Human
uggggaagacagcagacacugu

SEQ ID NO: 806255 - RNA, 22 nt, Human
ugucacagagcgugcaacagaa

SEQ ID NO: 806256 - RNA, 22 nt, Human
ucagaagguacagaagggaggu

SEQ ID NO: 806257 - RNA, 22 nt, Human
gagggagggccaggucccaacc

SEQ ID NO: 806258 - RNA, 22 nt, Human
agccacagcauguguguaugua

SEQ ID NO: 806259 - RNA, 20 nt, Human
acucuaccagggcagcagca

SEQ ID NO: 806260 - RNA, 21 nt, Human
ugcagaaaugguuuuucuaag

SEQ ID NO: 806261 - RNA, 22 nt, Human
cuuguuuugaaagcaguggcca

SEQ ID NO: 806262 - RNA, 22 nt, Human
aacacaguuucucuaugagagu

SEQ ID NO: 806263 - RNA, 22 nt, Human
aagaugugcaguucauggcagg

SEQ ID NO: 806264 - RNA, 20 nt, Human
aagcuggguaggagaggagc

SEQ ID NO: 806265 - RNA, 22 nt, Human
uacugaaacucuuguaaauauc

SEQ ID NO: 806266 - RNA, 17 nt, Human
cauaaaacaguucuauu

SEQ ID NO: 806267 - RNA, 22 nt, Human
ggcagcaacucggagagaagag

SEQ ID NO: 806268 - RNA, 22 nt, Human
cagccacagcugggugccugac

SEQ ID NO: 806269 - RNA, 22 nt, Human
ugcaggcuggggaggcagacuu

SEQ ID NO: 806270 - RNA, 22 nt, Human
uggcucuggauuaaucuaggaa

SEQ ID NO: 806271 - RNA, 22 nt, Human
ccaggagcagaguagguguuca

SEQ ID NO: 806272 - RNA, 22 nt, Human
ugugcuucuugcagcuccugua

SEQ ID NO: 806273 - RNA, 22 nt, Human
aaguuugucgaaauuaucagca

SEQ ID NO: 806274 - RNA, 22 nt, Human
gccaggcuccaggcccuccuga

SEQ ID NO: 806275 - RNA, 22 nt, Human
cugcugagcauuugcagggaca

SEQ ID NO: 806276 - RNA, 22 nt, Human
uguacacaaccuacagucugcu

SEQ ID NO: 806277 - RNA, 22 nt, Human
ucuccuggcucaccaggcugga

SEQ ID NO: 806278 - RNA, 22 nt, Human
uuggagucagaugacuguagga

SEQ ID NO: 806279 - RNA, 22 nt, Human
ugagggaggccuccaucugcca

SEQ ID NO: 806280 - RNA, 22 nt, Human
uuacagaagagaaagaauucag

SEQ ID NO: 806281 - RNA, 22 nt, Human
gcaggaagaugagcucagguaa

SEQ ID NO: 806282 - RNA, 22 nt, Human
cucaggcacuuuugucacagac

SEQ ID NO: 806283 - RNA, 22 nt, Human
cagggccugcaagagaccuggg

SEQ ID NO: 806284 - RNA, 22 nt, Human
caugaaaugauauuuggguggg

SEQ ID NO: 806285 - RNA, 22 nt, Human
ccucagggacgggaucacuugg

SEQ ID NO: 806286 - RNA, 18 nt, Human
aggcaggcuggagugacu

SEQ ID NO: 806287 - RNA, 20 nt, Human
cugaagagacuggaggggca

SEQ ID NO: 806288 - RNA, 22 nt, Human
aaucuggaauauuugcauugua

SEQ ID NO: 806289 - RNA, 22 nt, Human
caaagucauggggaugcagguc

SEQ ID NO: 806290 - RNA, 22 nt, Human
gcauguggccuucaggcuggaa

SEQ ID NO: 806291 - RNA, 22 nt, Human
cagcauccuuugcugguuuccc

SEQ ID NO: 806292 - RNA, 22 nt, Human
acaaugaauacuaagcaccagg

SEQ ID NO: 806293 - RNA, 22 nt, Human
gauaacauuuugaagugcuagu

SEQ ID NO: 806294 - RNA, 22 nt, Human
agcaggaaguagucuguaagca

SEQ ID NO: 806295 - RNA, 22 nt, Human
gagggagggacuagcauucucu

SEQ ID NO: 806296 - RNA, 22 nt, Human
uacauuuucuaggggaccaaga

SEQ ID NO: 806297 - RNA, 22 nt, Human
uccuggccucgcuguccaccuu

SEQ ID NO: 806298 - RNA, 22 nt, Human
uccuuaaauauuuacuguuaac

SEQ ID NO: 806299 - RNA, 22 nt, Human
gaaaugcaaauucucucucgcu

SEQ ID NO: 806300 - RNA, 21 nt, Human
ugccagcauguaggcuaguug

SEQ ID NO: 806301 - RNA, 22 nt, Human
uccugggguuuagagggaagug

SEQ ID NO: 806302 - RNA, 22 nt, Human
guuuacauguacucauuauacu

SEQ ID NO: 806303 - RNA, 21 nt, Human
acagagaaagagcagccuccu

SEQ ID NO: 806304 - RNA, 22 nt, Human
gguaggaguauuuugcagcagu

SEQ ID NO: 806305 - RNA, 22 nt, Human
gcacacagggauuuuugaaugg

SEQ ID NO: 806306 - RNA, 22 nt, Human
gccaggaguucagaugcauguu

SEQ ID NO: 806307 - RNA, 22 nt, Human
ugcaggcuggaggagggacuaa

SEQ ID NO: 806308 - RNA, 22 nt, Human
agggacuauuuacccaucucac

SEQ ID NO: 806309 - RNA, 22 nt, Human
agcuuguuagaaauguagacuc

SEQ ID NO: 806310 - RNA, 22 nt, Human
ugcuuaaaaugaugauuauuuu

SEQ ID NO: 806311 - RNA, 22 nt, Human
agagaccuuuugccuucuaguu

SEQ ID NO: 806312 - RNA, 22 nt, Human
aggcuggcugacuucugaagca

SEQ ID NO: 806313 - RNA, 22 nt, Human
agguccaguuuucugacaaggg

SEQ ID NO: 806314 - RNA, 22 nt, Human
uugguucaaaacauggaagggu

SEQ ID NO: 806315 - RNA, 22 nt, Human
ggcugggagcuggacaggccgg

SEQ ID NO: 806316 - RNA, 22 nt, Human
aaauagcuuuucauaauucuca

SEQ ID NO: 806317 - RNA, 22 nt, Human
uucugggcuguccagaggguga

SEQ ID NO: 806318 - RNA, 22 nt, Human
aagucagaaaucaucuagugua

SEQ ID NO: 806319 - RNA, 22 nt, Human
ucaggauggcacccaagcucuu

SEQ ID NO: 806320 - RNA, 22 nt, Human
aaugucugugccuuaaaacuuc

SEQ ID NO: 806321 - RNA, 22 nt, Human
gcagggcuguucaggagggugg

SEQ ID NO: 806322 - RNA, 20 nt, Human
gcuguguagcagugugcagu

SEQ ID NO: 806323 - RNA, 21 nt, Human
ggggccucuccacacagccgg

SEQ ID NO: 806324 - RNA, 22 nt, Human
caggaaaugggguuuaguuauu

SEQ ID NO: 806325 - RNA, 22 nt, Human
uugcagcuucuaacagcuucag

SEQ ID NO: 806326 - RNA, 19 nt, Human
cugcagcugcaccauccca

SEQ ID NO: 806327 - RNA, 22 nt, Human
uccacccccagacagcugguga

SEQ ID NO: 806328 - RNA, 22 nt, Human
ucuccucccaggcucuuccagg

SEQ ID NO: 806329 - RNA, 22 nt, Human
cagaugagaguggccaggguuc

SEQ ID NO: 806330 - RNA, 22 nt, Human
ugucucuucagcccauggcuuc

SEQ ID NO: 806331 - RNA, 22 nt, Human
ugcuagggauguagcagugaag

SEQ ID NO: 806332 - RNA, 21 nt, Human
ggcugcugggagagcugcgug

SEQ ID NO: 806333 - RNA, 22 nt, Human
agauacauuguucuaagcauug

SEQ ID NO: 806334 - RNA, 22 nt, Human
agugaggcuaauaggcaauggu

SEQ ID NO: 806335 - RNA, 22 nt, Human
gagggcugcaaugagacagaga

SEQ ID NO: 806336 - RNA, 22 nt, Human
cuacaaauauaaaacacagaua

SEQ ID NO: 806337 - RNA, 19 nt, Human
ugaagcaggcagagaagau

SEQ ID NO: 806338 - RNA, 22 nt, Human
agcaagcuguucuuggagagua

SEQ ID NO: 806339 - RNA, 21 nt, Human
gcaguuuauguaauaugcacu

SEQ ID NO: 806340 - RNA, 22 nt, Human
cuaggcugagcugggcugagcu

SEQ ID NO: 806341 - RNA, 22 nt, Human
auacagaauucacuacaguuuc

SEQ ID NO: 806342 - RNA, 22 nt, Human
auguggggacucugagagaauu

SEQ ID NO: 806343 - RNA, 22 nt, Human
agacaggacacaagcugcauaa

SEQ ID NO: 806344 - RNA, 22 nt, Human
acagccuggacuggcucucugc

SEQ ID NO: 806345 - RNA, 22 nt, Human
gagccacaguggauugauucca

SEQ ID NO: 806346 - RNA, 22 nt, Human
ucaggacauuugucagcaggag

SEQ ID NO: 806347 - RNA, 22 nt, Human
cagagggcugcccugaguucgu

SEQ ID NO: 806348 - RNA, 22 nt, Human
uaucaauacauguuaucagugu

SEQ ID NO: 806349 - RNA, 22 nt, Human
gagguggcuccaggagcaaugc

SEQ ID NO: 806350 - RNA, 22 nt, Human
agugcuggagggaggcagguuc

SEQ ID NO: 806351 - RNA, 22 nt, Human
aggucaaggccaaaagaguggu

SEQ ID NO: 806352 - RNA, 22 nt, Human
gaucauuugcaggaaacauuaa

SEQ ID NO: 806353 - RNA, 22 nt, Human
cauuuggaaagagacuagagaa

SEQ ID NO: 806354 - RNA, 22 nt, Human
ucaggcaggaucccagggaagg

SEQ ID NO: 806355 - RNA, 22 nt, Human
ucuuugauacagauguaagcug

SEQ ID NO: 806356 - RNA, 22 nt, Human
gagugacggcucaucucuggaa

SEQ ID NO: 806357 - RNA, 22 nt, Human
ggcaggugguaaggauuucaua

SEQ ID NO: 806358 - RNA, 22 nt, Human
gcaaacauccacugcccuugua

SEQ ID NO: 806359 - RNA, 22 nt, Human
agcagggcuucugugccugugc

SEQ ID NO: 806360 - RNA, 22 nt, Human
uggagcagaggcugagguuggg

SEQ ID NO: 806361 - RNA, 19 nt, Human
ccaggccuccugggagguc

SEQ ID NO: 806362 - RNA, 22 nt, Human
uaguuaaaauaauggagauguu

SEQ ID NO: 806363 - RNA, 22 nt, Human
gagcugcccugagcuuugcaug

SEQ ID NO: 806364 - RNA, 22 nt, Human
uugagggaacaugagaaucauc

SEQ ID NO: 806365 - RNA, 22 nt, Human
accaggagggacccugguggcc

SEQ ID NO: 806366 - RNA, 22 nt, Human
auuaaggugucaauguauuugg

SEQ ID NO: 806367 - RNA, 21 nt, Human
aucccagcacccaggagugca

SEQ ID NO: 806368 - RNA, 22 nt, Human
uccacagggaugccugcggcuu

SEQ ID NO: 806369 - RNA, 22 nt, Human
ucagugguggaagcagcaaacc

SEQ ID NO: 806370 - RNA, 22 nt, Human
cuguuauucaagacaaaggcag

SEQ ID NO: 806371 - RNA, 22 nt, Human
guacaaguguauuuggcuugau

SEQ ID NO: 806372 - RNA, 22 nt, Human
ccuccuggcccugggccuggaa

SEQ ID NO: 806373 - RNA, 22 nt, Human
gggcccuggauuuaagcaugga

SEQ ID NO: 806374 - RNA, 22 nt, Human
aggcuggcugaaaaacacccuu

SEQ ID NO: 806375 - RNA, 20 nt, Human
gggaggccccagaguccagg

SEQ ID NO: 806376 - RNA, 22 nt, Human
cugaagcugggcacuuccuuuu

SEQ ID NO: 806377 - RNA, 22 nt, Human
ggcccagcugugcuuccagccc

SEQ ID NO: 806378 - RNA, 22 nt, Human
uguaaguacauugaaacaucuu

SEQ ID NO: 806379 - RNA, 22 nt, Human
cucugcugagccagagucccca

SEQ ID NO: 806380 - RNA, 22 nt, Human
gccaggggugcccacccaagga

SEQ ID NO: 806381 - RNA, 22 nt, Human
ucacaaaggaugaugaauucug

SEQ ID NO: 806382 - RNA, 22 nt, Human
uugaacauuaacuucagucuau

SEQ ID NO: 806383 - RNA, 22 nt, Human
augauucagcccaauuuuucua

SEQ ID NO: 806384 - RNA, 22 nt, Human
ucagaauugucuggggaauguu

SEQ ID NO: 806385 - RNA, 22 nt, Human
cagcaggcucugaguggcugcc

SEQ ID NO: 806386 - RNA, 22 nt, Human
ggcagcuuucucacccaugacc

SEQ ID NO: 806387 - RNA, 22 nt, Human
agcagggugugguggcccugga

SEQ ID NO: 806388 - RNA, 22 nt, Human
gcuagcuggguuucacugugga

SEQ ID NO: 806389 - RNA, 22 nt, Human
caggcacacagcacauggccug

SEQ ID NO: 806390 - RNA, 22 nt, Human
aacugcaauuacuuuugcacua

SEQ ID NO: 806391 - RNA, 22 nt, Human
gagcuggcacagaaggaucuua

SEQ ID NO: 806392 - RNA, 22 nt, Human
ccugccaggcuuugggcuucug

SEQ ID NO: 806393 - RNA, 22 nt, Human
auguauuugaaauuugagacau

SEQ ID NO: 806394 - RNA, 22 nt, Human
uccucaguuauaaauaggaaac

SEQ ID NO: 806395 - RNA, 22 nt, Human
cuucuauucacuggucacaguu

SEQ ID NO: 806396 - RNA, 22 nt, Human
ucacaugucaaaaacuacauaa

SEQ ID NO: 806397 - RNA, 22 nt, Human
agagagguuggcuaggauguuu

SEQ ID NO: 806398 - RNA, 22 nt, Human
uuguuauaaagacuaaauaugu

SEQ ID NO: 806399 - RNA, 22 nt, Human
aguuguaauaacaauaccaaaa

SEQ ID NO: 806400 - RNA, 19 nt, Human
aaggcuggagaaggccucu

SEQ ID NO: 806401 - RNA, 22 nt, Human
acaaauuauagaaaauugagcu

SEQ ID NO: 806402 - RNA, 21 nt, Human
uaauauagguucacaacuagu

SEQ ID NO: 806403 - RNA, 22 nt, Human
uccaauauuucucauauaugga

SEQ ID NO: 806404 - RNA, 22 nt, Human
ccugggcucaagugaugguccc

SEQ ID NO: 806405 - RNA, 22 nt, Human
gcagggucugaggccacagagg

SEQ ID NO: 806406 - RNA, 22 nt, Human
acagaaaaguuuacuuuugcuc

SEQ ID NO: 806407 - RNA, 22 nt, Human
ucccagccuuucuuucuccagc

SEQ ID NO: 806408 - RNA, 22 nt, Human
agcccuggguuagggugggagc

SEQ ID NO: 806409 - RNA, 22 nt, Human
agugcaggcucgcuugugaggc

SEQ ID NO: 806410 - RNA, 22 nt, Human
cuuugacauccuuguuccucag

SEQ ID NO: 806411 - RNA, 22 nt, Human
uuugcauuuguuuagaaccuga

SEQ ID NO: 806412 - RNA, 22 nt, Human
cuguccucaccuuggcaggggg

SEQ ID NO: 806413 - RNA, 22 nt, Human
cacuggcaaagccuguuccuua

SEQ ID NO: 806414 - RNA, 22 nt, Human
ugggaaggacgugucaguggca

SEQ ID NO: 806415 - RNA, 22 nt, Human
acauuuaaccaaacuguuuaau

SEQ ID NO: 806416 - RNA, 22 nt, Human
ugcccagccccuaucccuggga

SEQ ID NO: 806417 - RNA, 22 nt, Human
agaguggcuugcucagcuagca

SEQ ID NO: 806418 - RNA, 22 nt, Human
ggaaaugguggaggaaggcuua

SEQ ID NO: 806419 - RNA, 22 nt, Human
uaaggaagagcuugguaauagg

SEQ ID NO: 806420 - RNA, 19 nt, Human
ugucugcugaugacucuau

SEQ ID NO: 806421 - RNA, 22 nt, Human
acacauauauacauauuugugc

SEQ ID NO: 806422 - RNA, 22 nt, Human
cccagccucuggguucugccgg

SEQ ID NO: 806423 - RNA, 18 nt, Human
uccagggcuuccuccucu

SEQ ID NO: 806424 - RNA, 22 nt, Human
gcuggaguaggaccaugcuuga

SEQ ID NO: 806425 - RNA, 22 nt, Human
guuucucaacaugcuuucuaac

SEQ ID NO: 806426 - RNA, 22 nt, Human
uuacacaguauccaagguucuu

SEQ ID NO: 806427 - RNA, 22 nt, Human
acccgcuuccggagcugcagug

SEQ ID NO: 806428 - RNA, 22 nt, Human
ugaaaugagcauuuauucuuua

SEQ ID NO: 806429 - RNA, 22 nt, Human
agagcugggacuuggacucaau

SEQ ID NO: 806430 - RNA, 22 nt, Human
cugccuggccacaacccagggu

SEQ ID NO: 806431 - RNA, 22 nt, Human
uacaagagugagauuaucaugu

SEQ ID NO: 806432 - RNA, 22 nt, Human
auuugccuugugauuuguaagu

SEQ ID NO: 806433 - RNA, 22 nt, Human
ccaggccuguguuguguggagg

SEQ ID NO: 806434 - RNA, 22 nt, Human
ugcuuccuugaucauucccaaa

SEQ ID NO: 806435 - RNA, 22 nt, Human
uuucacauuuguuuuaagaagu

SEQ ID NO: 806436 - RNA, 22 nt, Human
ugucccagggaaggcccagcac

SEQ ID NO: 806437 - RNA, 22 nt, Human
aauaugcagcuuaucuucuagg

SEQ ID NO: 806438 - RNA, 23 nt, Human
ugagcugggccugcaggggucuc

SEQ ID NO: 806439 - RNA, 22 nt, Human
cugcacacauauggcuucucuc

SEQ ID NO: 806440 - RNA, 22 nt, Human
cccagcaguacccaagcccuug

SEQ ID NO: 806441 - RNA, 18 nt, Human
ucaggcuuugagagaauc

SEQ ID NO: 806442 - RNA, 22 nt, Human
aaaguaucaagggaagcauuuu

SEQ ID NO: 806443 - RNA, 22 nt, Human
uggagaagauuggucaccauuc

SEQ ID NO: 806444 - RNA, 22 nt, Human
uucagagaaacugagguuuaga

SEQ ID NO: 806445 - RNA, 22 nt, Human
uucaaagaguugggugucuggg

SEQ ID NO: 806446 - RNA, 22 nt, Human
uuaauuaguagaggcauuuagu

SEQ ID NO: 806447 - RNA, 22 nt, Human
ugggcagcaaagacugugugcu

SEQ ID NO: 806448 - RNA, 22 nt, Human
gcuggaggaggaagugugaggg

SEQ ID NO: 806449 - RNA, 22 nt, Human
acuccugggugcugaccagcgu

SEQ ID NO: 806450 - RNA, 22 nt, Human
acagcagcuaaccccugggcca

SEQ ID NO: 806451 - RNA, 22 nt, Human
cugucaaauucauaacacuuau

SEQ ID NO: 806452 - RNA, 22 nt, Human
gaugucuuuuuccaggcucuuu

SEQ ID NO: 806453 - RNA, 22 nt, Human
aaggccagcuuguagggcuggu

SEQ ID NO: 806454 - RNA, 22 nt, Human
gcaaucaaugauuuauauuugu

SEQ ID NO: 806455 - RNA, 22 nt, Human
aaugauuuggcaaaggaaucca

SEQ ID NO: 806456 - RNA, 22 nt, Human
acagcaggagccuucauaugcu

SEQ ID NO: 806457 - RNA, 22 nt, Human
cuauguaugcgauuagaauuuu

SEQ ID NO: 806458 - RNA, 22 nt, Human
ugcuuucuccugucugaaagau

SEQ ID NO: 806459 - RNA, 22 nt, Human
uugcuucuggaacuuucuguuc

SEQ ID NO: 806460 - RNA, 22 nt, Human
agcugguaaguggcagagauuc

SEQ ID NO: 806461 - RNA, 22 nt, Human
gcacccagggacuuggcuggcc

SEQ ID NO: 806462 - RNA, 22 nt, Human
agaugacaugggagcaagcacu

SEQ ID NO: 806463 - RNA, 22 nt, Human
ggaagcagccugaagccaaggg

SEQ ID NO: 806464 - RNA, 22 nt, Human
caagcaacgacuuucaagcugu

SEQ ID NO: 806465 - RNA, 18 nt, Human
ugugcaauauuaaccacc

SEQ ID NO: 806466 - RNA, 19 nt, Human
auucacaucccugggaagg

SEQ ID NO: 806467 - RNA, 22 nt, Human
augugucuuggaguuuuaaugu

SEQ ID NO: 806468 - RNA, 22 nt, Human
auauauauugcccaggcugguu

SEQ ID NO: 806469 - RNA, 22 nt, Human
cucuuuggcuuugacucccauu

SEQ ID NO: 806470 - RNA, 20 nt, Human
uuaagaaaagcacauccugc

SEQ ID NO: 806471 - RNA, 22 nt, Human
gcugcccagggcugaguguccu

SEQ ID NO: 806472 - RNA, 22 nt, Human
gcugccuguguggccacucacu

SEQ ID NO: 806473 - RNA, 22 nt, Human
guuuuacacaccuaugaaagac

SEQ ID NO: 806474 - RNA, 22 nt, Human
gauaacauacuugcauguguau

SEQ ID NO: 806475 - RNA, 22 nt, Human
uagggcuguggucaguccucua

SEQ ID NO: 806476 - RNA, 22 nt, Human
cuacaaagcucuucuacaggca

SEQ ID NO: 806477 - RNA, 22 nt, Human
caugaaaucacaagcugaggac

SEQ ID NO: 806478 - RNA, 22 nt, Human
uccuguccacagcccugaccuc

SEQ ID NO: 806479 - RNA, 22 nt, Human
aacacauauuuauauaugcaca

SEQ ID NO: 806480 - RNA, 22 nt, Human
acuggcuguggccacggcugcu

SEQ ID NO: 806481 - RNA, 22 nt, Human
aggcuguguuuccccuggagcu

SEQ ID NO: 806482 - RNA, 22 nt, Human
agggccuggugaccuggguccu

SEQ ID NO: 806483 - RNA, 22 nt, Human
uugaucaaaucagcuacugagg

SEQ ID NO: 806484 - RNA, 22 nt, Human
caggauagaaaggccauggagu

SEQ ID NO: 806485 - RNA, 22 nt, Human
gcccacagucuaucaguuugcg

SEQ ID NO: 806486 - RNA, 22 nt, Human
ugcaggugguuuggacacugcu

SEQ ID NO: 806487 - RNA, 22 nt, Human
acccucaacaaauucacucuau

SEQ ID NO: 806488 - RNA, 22 nt, Human
agauauguuacugcaucauggg

SEQ ID NO: 806489 - RNA, 22 nt, Human
uuaacaaaguaacgggaaaaga

SEQ ID NO: 806490 - RNA, 22 nt, Human
uaguuuagcacuaagaaaaaca

SEQ ID NO: 806491 - RNA, 22 nt, Human
ugagaggcuagaucagcucugu

SEQ ID NO: 806492 - RNA, 22 nt, Human
augcaaauugccauaaaguggg

SEQ ID NO: 806493 - RNA, 22 nt, Human
uugcagcucucugaagguugca

SEQ ID NO: 806494 - RNA, 22 nt, Human
aacaucuaguuccuauauaaua

SEQ ID NO: 806495 - RNA, 22 nt, Human
aggcagcuaagauggauaauga

SEQ ID NO: 806496 - RNA, 22 nt, Human
cuucuagggcaucaugacaaau

SEQ ID NO: 806497 - RNA, 22 nt, Human
aagaggagggcagauucaaggc

SEQ ID NO: 806498 - RNA, 22 nt, Human
aaucagaaaauucaguggaauu

SEQ ID NO: 806499 - RNA, 22 nt, Human
ucuuccagagccuccaucccua

SEQ ID NO: 806500 - RNA, 22 nt, Human
ucugcuguguugaaugauuggu

SEQ ID NO: 806501 - RNA, 22 nt, Human
cuggggcugcgguggaggagcc

SEQ ID NO: 806502 - RNA, 22 nt, Human
ugucuucuguauucaagucuau

SEQ ID NO: 806503 - RNA, 22 nt, Human
aguccauaguuuacauuacagc

SEQ ID NO: 806504 - RNA, 17 nt, Human
ugggugguagggagagg

SEQ ID NO: 806505 - RNA, 22 nt, Human
cugccugaguacaagucccaga

SEQ ID NO: 806506 - RNA, 22 nt, Human
uagauuugccugggaaagcuca

SEQ ID NO: 806507 - RNA, 22 nt, Human
ugaccccacugugcucagaggu

SEQ ID NO: 806508 - RNA, 22 nt, Human
cuggcuggccggagcgaggcgg

SEQ ID NO: 806509 - RNA, 22 nt, Human
uucaagauggcugcaaauacuu

SEQ ID NO: 806510 - RNA, 22 nt, Human
gauuuuaucuuugugugcagua

SEQ ID NO: 806511 - RNA, 22 nt, Human
ccaguucuuucugugugcaaca

SEQ ID NO: 806512 - RNA, 22 nt, Human
augugguugaagaauuacaucu

SEQ ID NO: 806513 - RNA, 22 nt, Human
uauggaaacuaauucauuuuuc

SEQ ID NO: 806514 - RNA, 22 nt, Human
cuuguggcccauggcuuccugc

SEQ ID NO: 806515 - RNA, 22 nt, Human
cuuggcagagggcugggcucag

SEQ ID NO: 806516 - RNA, 22 nt, Human
cugcagcugggccagggccacc

SEQ ID NO: 806517 - RNA, 22 nt, Human
gauucaggccugcaucucagca

SEQ ID NO: 806518 - RNA, 22 nt, Human
cugggcugcagcgggagcgacg

SEQ ID NO: 806519 - RNA, 22 nt, Human
cugcccugcagcuccacggacu

SEQ ID NO: 806520 - RNA, 23 nt, Human
agcuauaaaaucugugacagcag

SEQ ID NO: 806521 - RNA, 19 nt, Human
ccucucccaugcuuaccuc

SEQ ID NO: 806522 - RNA, 22 nt, Human
gcaaaugaguuguaacauaaaa

SEQ ID NO: 806523 - RNA, 22 nt, Human
cggggugggaauagaccugucu

SEQ ID NO: 806524 - RNA, 22 nt, Human
uaggcagaauugugggcucuaa

SEQ ID NO: 806525 - RNA, 22 nt, Human
cagagggugugaaggggaugaa

SEQ ID NO: 806526 - RNA, 22 nt, Human
ugcaagagcccaaacuauauac

SEQ ID NO: 806527 - RNA, 22 nt, Human
agaaaucaauaucuauauguug

SEQ ID NO: 806528 - RNA, 22 nt, Human
aauaauacaugagauuaauguu

SEQ ID NO: 806529 - RNA, 22 nt, Human
uaggccagauuacuagaguagg

SEQ ID NO: 806530 - RNA, 23 nt, Human
agccuggcaccugcagaucggag

SEQ ID NO: 806531 - RNA, 21 nt, Human
uaugagauauacuuauucuuu

SEQ ID NO: 806532 - RNA, 22 nt, Human
gucuaaacuuuacagagucaag

SEQ ID NO: 806533 - RNA, 22 nt, Human
caggaagcugugaaggagacgg

SEQ ID NO: 806534 - RNA, 22 nt, Human
ugggccagcucccugccccugg

SEQ ID NO: 806535 - RNA, 22 nt, Human
uacaaaaguaauuacgguuuuu

SEQ ID NO: 806536 - RNA, 22 nt, Human
auuguaaaguacuguguacaau

SEQ ID NO: 806537 - RNA, 22 nt, Human
aucugugagaaaggcuugugcu

SEQ ID NO: 806538 - RNA, 22 nt, Human
agcugugauuauccacuggaau

SEQ ID NO: 806539 - RNA, 22 nt, Human
auccuuaauuuccugggccuca

SEQ ID NO: 806540 - RNA, 23 nt, Human
ggcuagaguggaggggaacugca

SEQ ID NO: 806541 - RNA, 22 nt, Human
accuuaaaggccgaaguaaaga

SEQ ID NO: 806542 - RNA, 22 nt, Human
agggggcaucagguccuggcuc

SEQ ID NO: 806543 - RNA, 23 nt, Human
aguaacaugcaaauaacagucug

SEQ ID NO: 806544 - RNA, 22 nt, Human
acaucucaaauuccaggcucca

SEQ ID NO: 806545 - RNA, 22 nt, Human
aaaacauugaauugcacacuau

SEQ ID NO: 806546 - RNA, 22 nt, Human
cugugggagaaguugcuggagu

SEQ ID NO: 806547 - RNA, 22 nt, Human
agcccagcagaaaguccagccu

SEQ ID NO: 806548 - RNA, 22 nt, Human
caaagcagagccagagcuuguc

SEQ ID NO: 806549 - RNA, 22 nt, Human
gcaugcugagcccacgccuggg

SEQ ID NO: 806550 - RNA, 22 nt, Human
uccaaagggaagcgcuuucugu

SEQ ID NO: 806551 - RNA, 22 nt, Human
acagcauuuaaagaaaaugaac

SEQ ID NO: 806552 - RNA, 22 nt, Human
ccagcuggggaaguggggcaua

SEQ ID NO: 806553 - RNA, 22 nt, Human
uacaaaaaauugauacugacga

SEQ ID NO: 806554 - RNA, 22 nt, Human
auuucucacugagcagauaaaa

SEQ ID NO: 806555 - RNA, 22 nt, Human
gcugggccccuugaaaggcguc

SEQ ID NO: 806556 - RNA, 22 nt, Human
uaagagcagagguugaauaaau

SEQ ID NO: 806557 - RNA, 19 nt, Human
uaaggcagcagugacaggc

SEQ ID NO: 806558 - RNA, 22 nt, Human
cuucuucauaggcaguccuguu

SEQ ID NO: 806559 - RNA, 22 nt, Human
gugcaaauguaauugugauuuu

SEQ ID NO: 806560 - RNA, 22 nt, Human
ggcacuuuucuccccggucaug

SEQ ID NO: 806561 - RNA, 22 nt, Human
uggcagauggccuggaaccaaa

SEQ ID NO: 806562 - RNA, 20 nt, Human
caguccugucccugcugccc

SEQ ID NO: 806563 - RNA, 22 nt, Human
aagacucaaggaacaacacagu

SEQ ID NO: 806564 - RNA, 22 nt, Human
ucuugggaccauuuacacauac

SEQ ID NO: 806565 - RNA, 22 nt, Human
ugaggaggcccagguuggggcu

SEQ ID NO: 806566 - RNA, 22 nt, Human
auuuuguggguucugcugaugu

SEQ ID NO: 806567 - RNA, 22 nt, Human
accaguuuauagcgaucuguca

SEQ ID NO: 806568 - RNA, 22 nt, Human
aauguugaggauaucagaaaau

SEQ ID NO: 806569 - RNA, 22 nt, Human
ggagauuuauagcacacuucag

SEQ ID NO: 806570 - RNA, 22 nt, Human
cccugaggcacaggccacguau

SEQ ID NO: 806571 - RNA, 22 nt, Human
uuucauuaaagucaaaucuggu

SEQ ID NO: 806572 - RNA, 20 nt, Human
agaaauauugaguucagagg

SEQ ID NO: 806573 - RNA, 17 nt, Human
agcagcuggcacaggag

SEQ ID NO: 806574 - RNA, 22 nt, Human
gcagcaggcacggucucgacau

SEQ ID NO: 806575 - RNA, 22 nt, Human
ccacugccucuccagggccauc

SEQ ID NO: 806576 - RNA, 22 nt, Human
aaguggacuaauacaaggacua

SEQ ID NO: 806577 - RNA, 22 nt, Human
ggaagaggcucucauugagggc

SEQ ID NO: 806578 - RNA, 22 nt, Human
gcugggaaugauuuuggagagg

SEQ ID NO: 806579 - RNA, 22 nt, Human
caggcugcugacaggcuuggag

SEQ ID NO: 806580 - RNA, 22 nt, Human
uaauuuaugaugcaaagaaaag

SEQ ID NO: 806581 - RNA, 22 nt, Human
agcaggcugccuuccaaagccu

SEQ ID NO: 806582 - RNA, 22 nt, Human
agauaaacccaacuuaaugaag

SEQ ID NO: 806583 - RNA, 22 nt, Human
gccugcuggaucaagcuuaugc

SEQ ID NO: 806584 - RNA, 22 nt, Human
guaaagaaguuuuugaaugcau

SEQ ID NO: 806585 - RNA, 22 nt, Human
ccacagagacucugcaggacug

SEQ ID NO: 806586 - RNA, 22 nt, Human
cagaggcauuacugaaaaggug

SEQ ID NO: 806587 - RNA, 22 nt, Human
aaccccaggcuggaggagucuc

SEQ ID NO: 806588 - RNA, 22 nt, Human
aaagacauugaagaaggacuua

SEQ ID NO: 806589 - RNA, 22 nt, Human
gggguccuggaggccagcugga

SEQ ID NO: 806590 - RNA, 22 nt, Human
gggacaucuuucuagucagggu

SEQ ID NO: 806591 - RNA, 22 nt, Human
ucuuccucccuacagagcucag

SEQ ID NO: 806592 - RNA, 22 nt, Human
ugaguuuagugugagacuuauc

SEQ ID NO: 806593 - RNA, 23 nt, Human
aggcuuccuaucuuagagcuggg

SEQ ID NO: 806594 - RNA, 19 nt, Human
gucaauaaaaguuaggggu

SEQ ID NO: 806595 - RNA, 22 nt, Human
aaagaggcagguguuacuggaa

SEQ ID NO: 806596 - RNA, 22 nt, Human
uguaucuuagugugaaaauauu

SEQ ID NO: 806597 - RNA, 23 nt, Human
ccuggcagcaaacgaggagguua

SEQ ID NO: 806598 - RNA, 22 nt, Human
agugggagaaugaauaagggcc

SEQ ID NO: 806599 - RNA, 19 nt, Human
guuuugcaggcagagggga

SEQ ID NO: 806600 - RNA, 22 nt, Human
uggauggccccacuggauccau

SEQ ID NO: 806601 - RNA, 22 nt, Human
gcucagggaacuuuuugcaggc

SEQ ID NO: 806602 - RNA, 22 nt, Human
gguggggccagggcuccaaccu

SEQ ID NO: 806603 - RNA, 22 nt, Human
aauauuuccaaggccugucagg

SEQ ID NO: 806604 - RNA, 22 nt, Human
augaaauguaaguagagaguuu

SEQ ID NO: 806605 - RNA, 22 nt, Human
ucucuagguugauauaaauuau

SEQ ID NO: 806606 - RNA, 22 nt, Human
uggaacgucguaauguugguua

SEQ ID NO: 806607 - RNA, 22 nt, Human
aaaaaauuccauucugugccuu

SEQ ID NO: 806608 - RNA, 22 nt, Human
cauuuguacuguucaaugucau

SEQ ID NO: 806609 - RNA, 22 nt, Human
ucuuugcagaacgaugaagaug

SEQ ID NO: 806610 - RNA, 22 nt, Human
gaggagggagaauuaggcuuaa

SEQ ID NO: 806611 - RNA, 22 nt, Human
ugcugccucagcuuccugggcu

SEQ ID NO: 806612 - RNA, 22 nt, Human
auugaaaauaaggccagaaaca

SEQ ID NO: 806613 - RNA, 20 nt, Human
caugcaacagauuauuuccc

SEQ ID NO: 806614 - RNA, 22 nt, Human
uugcaaauucgucacuguuaaa

SEQ ID NO: 806615 - RNA, 22 nt, Human
ucuugggaucaccuccuggcuu

SEQ ID NO: 806616 - RNA, 22 nt, Human
gccucugcaugcucagcaccca

SEQ ID NO: 806617 - RNA, 22 nt, Human
ucucccacgguacaggauaaac

SEQ ID NO: 806618 - RNA, 22 nt, Human
cauuuacagcagacugaugaaa

SEQ ID NO: 806619 - RNA, 22 nt, Human
agcccaggagguggagguugca

SEQ ID NO: 806620 - RNA, 22 nt, Human
gccuggcucugagggagcuccu

SEQ ID NO: 806621 - RNA, 23 nt, Human
uuuaacauuugaacauguggcca

SEQ ID NO: 806622 - RNA, 22 nt, Human
uuccuggagaguuuucccaaag

SEQ ID NO: 806623 - RNA, 22 nt, Human
cagggcuguaaauuagugcuga

SEQ ID NO: 806624 - RNA, 22 nt, Human
ccuuuggcugcauagggaaggg

SEQ ID NO: 806625 - RNA, 22 nt, Human
uuggcaucaguguaggaccugu

SEQ ID NO: 806626 - RNA, 22 nt, Human
gaggagcuggcugucgggaggc

SEQ ID NO: 806627 - RNA, 22 nt, Human
ucauaagcuagcugcaccauau

SEQ ID NO: 806628 - RNA, 22 nt, Human
ucccccaaaugaaugaggaaua

SEQ ID NO: 806629 - RNA, 22 nt, Human
gggaagugagcuggaaucaagg

SEQ ID NO: 806630 - RNA, 21 nt, Human
gcagaggcacggcaccaaggg

SEQ ID NO: 806631 - RNA, 22 nt, Human
ugggcccaucauugcugugggc

SEQ ID NO: 806632 - RNA, 22 nt, Human
auaaacaagacuggccaacuuu

SEQ ID NO: 806633 - RNA, 22 nt, Human
gaauauuaguaucaguuauacc

SEQ ID NO: 806634 - RNA, 22 nt, Human
caaguaauucugcaagaaacca

SEQ ID NO: 806635 - RNA, 22 nt, Human
ggcucugggucuguggggagcg

SEQ ID NO: 806636 - RNA, 22 nt, Human
aaacuacuaugggaauguacuu

SEQ ID NO: 806637 - RNA, 22 nt, Human
uuggcccagacucggggacuga

SEQ ID NO: 806638 - RNA, 22 nt, Human
gagcuuugagauucuuauggua

SEQ ID NO: 806639 - RNA, 22 nt, Human
ucucaaauuuguuagauaaaau

SEQ ID NO: 806640 - RNA, 19 nt, Human
ugccaggaauacuccagaa

SEQ ID NO: 806641 - RNA, 22 nt, Human
uuuuugcuaauccccagccacu

SEQ ID NO: 806642 - RNA, 22 nt, Human
cagcacuggggccacuggaguu

SEQ ID NO: 806643 - RNA, 22 nt, Human
ucagagaacuccacaccuuagg

SEQ ID NO: 806644 - RNA, 16 nt, Human
gcugggagggagaggu

SEQ ID NO: 806645 - RNA, 22 nt, Human
aucacaucacagguugagcuag

SEQ ID NO: 806646 - RNA, 22 nt, Human
ugcagaagugagucaugaggaa

SEQ ID NO: 806647 - RNA, 23 nt, Human
uucaggaaaugaauacagacaca

SEQ ID NO: 806648 - RNA, 22 nt, Human
ggaggaggggugacugaaugcu

SEQ ID NO: 806649 - RNA, 22 nt, Human
caggcaugcuucugucugggca

SEQ ID NO: 806650 - RNA, 22 nt, Human
caggggaguuuuaugcaacaga

SEQ ID NO: 806651 - RNA, 22 nt, Human
uauuauaauuuagggcuuggau

SEQ ID NO: 806652 - RNA, 22 nt, Human
uccugguguaaugguaagcaug

SEQ ID NO: 806653 - RNA, 22 nt, Human
aauaauaagauacuaagggagu

SEQ ID NO: 806654 - RNA, 19 nt, Human
ccaccccuuugcugggccc

SEQ ID NO: 806655 - RNA, 22 nt, Human
caaaguggagagccugugguug

SEQ ID NO: 806656 - RNA, 22 nt, Human
uuaauguaugggguugagauga

SEQ ID NO: 806657 - RNA, 22 nt, Human
uucuuuccuugccucagugaag

SEQ ID NO: 806658 - RNA, 20 nt, Human
accuggcuugggggaggagu

SEQ ID NO: 806659 - RNA, 22 nt, Human
auuuuacauaaggaagguuuaa

SEQ ID NO: 806660 - RNA, 22 nt, Human
agugguucuugaucuguagagu

SEQ ID NO: 806661 - RNA, 22 nt, Human
cugcuccugugggccaguggcc

SEQ ID NO: 806662 - RNA, 22 nt, Human
uagcuuuagugaaaaauaucag

SEQ ID NO: 806663 - RNA, 22 nt, Human
ggugucaaugcucccaccuugg

SEQ ID NO: 806664 - RNA, 22 nt, Human
ggccuugggaggagggucagaa

SEQ ID NO: 806665 - RNA, 22 nt, Human
uccagccacuugcacaguuaaa

SEQ ID NO: 806666 - RNA, 22 nt, Human
cuuucccuuagccccauucuau

SEQ ID NO: 806667 - RNA, 22 nt, Human
gcacccagaauaaggacaggac

SEQ ID NO: 806668 - RNA, 22 nt, Human
gcagaaguaccucguucuaguu

SEQ ID NO: 806669 - RNA, 18 nt, Human
uaggaaauagggcuguga

SEQ ID NO: 806670 - RNA, 20 nt, Human
uuucaagucagcaauucuca

SEQ ID NO: 806671 - RNA, 22 nt, Human
uacaaguuccauuuugaaagug

SEQ ID NO: 806672 - RNA, 22 nt, Human
accagccuccuagcugcuccug

SEQ ID NO: 806673 - RNA, 22 nt, Human
cagaggcagugggguugcuccu

SEQ ID NO: 806674 - RNA, 22 nt, Human
agauguggccggcuagggagag

SEQ ID NO: 806675 - RNA, 19 nt, Human
uccugaaaacuucuggaau

SEQ ID NO: 806676 - RNA, 22 nt, Human
augucugcuuuccuuuuaauca

SEQ ID NO: 806677 - RNA, 22 nt, Human
uuccucagagggcgcuggggaa

SEQ ID NO: 806678 - RNA, 22 nt, Human
ucucccacagccgugcuucaag

SEQ ID NO: 806679 - RNA, 22 nt, Human
auaaucaaaguccuaugacauc

SEQ ID NO: 806680 - RNA, 22 nt, Human
augcagcuagauuuuccagugu

SEQ ID NO: 806681 - RNA, 22 nt, Human
acagugauugggguaucugcag

SEQ ID NO: 806682 - RNA, 22 nt, Human
acgugcaggaucugguuggcga

SEQ ID NO: 806683 - RNA, 22 nt, Human
acaauguucuacauauacauaa

SEQ ID NO: 806684 - RNA, 21 nt, Human
acauuacagggugaugugucu

SEQ ID NO: 806685 - RNA, 23 nt, Human
uggaaacauucugaauguccauc

SEQ ID NO: 806686 - RNA, 22 nt, Human
agucuuuaaguaaugauaggca

SEQ ID NO: 806687 - RNA, 22 nt, Human
auuauaaauauuuucuaggggu

SEQ ID NO: 806688 - RNA, 22 nt, Human
gcuggcaucacuggcuucggug

SEQ ID NO: 806689 - RNA, 22 nt, Human
ucaucaucugcaagcucauguc

SEQ ID NO: 806690 - RNA, 22 nt, Human
cagcacauaagccgaagacugu

SEQ ID NO: 806691 - RNA, 22 nt, Human
uagcuuuuaguacuuaauggcu

SEQ ID NO: 806692 - RNA, 22 nt, Human
aagcccugcagucucugccaca

SEQ ID NO: 806693 - RNA, 22 nt, Human
guuuacaugcaugcaagaauga

SEQ ID NO: 806694 - RNA, 18 nt, Human
agcagagcccaugcauuc

SEQ ID NO: 806695 - RNA, 22 nt, Human
cagaugugauucuucccucagc

SEQ ID NO: 806696 - RNA, 22 nt, Human
uuuccucugaugcugacuugga

SEQ ID NO: 806697 - RNA, 22 nt, Human
ucuaaacacgucucuuugaaua

SEQ ID NO: 806698 - RNA, 22 nt, Human
ucuuuuccuucccuacagaucu

SEQ ID NO: 806699 - RNA, 22 nt, Human
gcagaagguuguuugggaaagg

SEQ ID NO: 806700 - RNA, 21 nt, Human
uagcaauuauagaugucuaaa

SEQ ID NO: 806701 - RNA, 22 nt, Human
ccaguguauuauuugagaaauu

SEQ ID NO: 806702 - RNA, 22 nt, Human
uugcaaaugugguuagggcuuu

SEQ ID NO: 806703 - RNA, 21 nt, Human
ccuucucuugcuucagcuuca

SEQ ID NO: 806704 - RNA, 23 nt, Human
uacuugguuuugauagaaaucca

SEQ ID NO: 806705 - RNA, 22 nt, Human
ucagcaggcacaccaaaaacug

SEQ ID NO: 806706 - RNA, 16 nt, Human
acaaauacaacugcug

SEQ ID NO: 806707 - RNA, 23 nt, Human
uuacuuuugcaccaaccuaauau

SEQ ID NO: 806708 - RNA, 22 nt, Human
uuaaggcugauaagucagauau

SEQ ID NO: 806709 - RNA, 22 nt, Human
acaauguuuuuguucaaagagu

SEQ ID NO: 806710 - RNA, 22 nt, Human
agcagggcacuggaaggcacug

SEQ ID NO: 806711 - RNA, 22 nt, Human
acagucugccucucagagcagc

SEQ ID NO: 806712 - RNA, 22 nt, Human
cugcugggcuccucaugugacu

SEQ ID NO: 806713 - RNA, 22 nt, Human
agcucaagcuacacacagaguc

SEQ ID NO: 806714 - RNA, 22 nt, Human
gugcaaaugagauggauucaag

SEQ ID NO: 806715 - RNA, 22 nt, Human
agggcagagaucugagugggca

SEQ ID NO: 806716 - RNA, 22 nt, Human
accagacacugugaagacaggc

SEQ ID NO: 806717 - RNA, 22 nt, Human
gaaggcuugguuuuuucaacac

SEQ ID NO: 806718 - RNA, 22 nt, Human
gcugccucccccauggcuggaa

SEQ ID NO: 806719 - RNA, 22 nt, Human
agcacaggugaaacagucaggu

SEQ ID NO: 806720 - RNA, 22 nt, Human
aaucuucacucauucagaguug

SEQ ID NO: 806721 - RNA, 22 nt, Human
uagaaauggguuacauuuagag

SEQ ID NO: 806722 - RNA, 22 nt, Human
gcccuggaaucucuccauggga

SEQ ID NO: 806723 - RNA, 22 nt, Human
agaaaucacuuagaggaaguga

SEQ ID NO: 806724 - RNA, 22 nt, Human
uaaaaccauaaggcuggaagga

SEQ ID NO: 806725 - RNA, 22 nt, Human
auuuccuucggacaguuugggu

SEQ ID NO: 806726 - RNA, 22 nt, Human
ugcagcugacccacuccagucc

SEQ ID NO: 806727 - RNA, 22 nt, Human
uggcagugggaauggacaaaca

SEQ ID NO: 806728 - RNA, 22 nt, Human
uuaaagcauguugcuuaacagg

SEQ ID NO: 806729 - RNA, 22 nt, Human
agcagaugugucucugcacugu

SEQ ID NO: 806730 - RNA, 22 nt, Human
cacaugcauuggcaaaagugua

SEQ ID NO: 806731 - RNA, 22 nt, Human
accuccuggcuuaucauggaca

SEQ ID NO: 806732 - RNA, 22 nt, Human
aaauguguguauguacauauau

SEQ ID NO: 806733 - RNA, 22 nt, Human
agacagcauggagcugauaaca

SEQ ID NO: 806734 - RNA, 22 nt, Human
cuugaaugguaugagaguaauu

SEQ ID NO: 806735 - RNA, 23 nt, Human
aggcaggcaguucagcuguuguu

SEQ ID NO: 806736 - RNA, 22 nt, Human
aagacuauaccaucuuaguuac

SEQ ID NO: 806737 - RNA, 22 nt, Human
ugggagcccaagggagcugccg

SEQ ID NO: 806738 - RNA, 22 nt, Human
gcugcagccaaauucauuguca

SEQ ID NO: 806739 - RNA, 22 nt, Human
guuucaaagucagaaaaggagg

SEQ ID NO: 806740 - RNA, 22 nt, Human
cauuuauucucagauccuuguc

SEQ ID NO: 806741 - RNA, 22 nt, Human
uauauuaaaugaccaguuuuaa

SEQ ID NO: 806742 - RNA, 21 nt, Human
uacauugacuacaaauaaagc

SEQ ID NO: 806743 - RNA, 22 nt, Human
aaucuuaaagaauauucuacca

SEQ ID NO: 806744 - RNA, 22 nt, Human
guccaggccaugguggacacag

SEQ ID NO: 806745 - RNA, 22 nt, Human
uaagagcagaacagcaacauau

SEQ ID NO: 806746 - RNA, 22 nt, Human
acugccucuuggugcugagaga

SEQ ID NO: 806747 - RNA, 22 nt, Human
gcuggcuguguuccuucugcca

SEQ ID NO: 806748 - RNA, 22 nt, Human
uucagagccacuucaagucuaa

SEQ ID NO: 806749 - RNA, 22 nt, Human
aggcaggcagcugucaccacuc

SEQ ID NO: 806750 - RNA, 22 nt, Human
uccccaccuaagauacccaucu

SEQ ID NO: 806751 - RNA, 22 nt, Human
uggcagggugccaguugcgagu

SEQ ID NO: 806752 - RNA, 22 nt, Human
uucacauugugcagauuauggu

SEQ ID NO: 806753 - RNA, 22 nt, Human
guuuauuauucaacuucauguu

SEQ ID NO: 806754 - RNA, 22 nt, Human
agcuggcuucacaggcagugug

SEQ ID NO: 806755 - RNA, 20 nt, Human
gggugugggcccggccaggc

SEQ ID NO: 806756 - RNA, 22 nt, Human
aauaacuuuuaaaagacccugg

SEQ ID NO: 806757 - RNA, 22 nt, Human
agaggcacuguucuuagcgacu

SEQ ID NO: 806758 - RNA, 22 nt, Human
agggaagcccuggcugagaccc

SEQ ID NO: 806759 - RNA, 22 nt, Human
cacagaacaccaaagaaccuuc

SEQ ID NO: 806760 - RNA, 22 nt, Human
caccccuguggagcaugguggc

SEQ ID NO: 806761 - RNA, 22 nt, Human
aaaggaaaauaaguaguuccau

SEQ ID NO: 806762 - RNA, 22 nt, Human
gggccagguggaccccagccuc

SEQ ID NO: 806763 - RNA, 19 nt, Human
caucagagggcauaggaug

SEQ ID NO: 806764 - RNA, 22 nt, Human
uucuguaagcuaccaaguuugu

SEQ ID NO: 806765 - RNA, 22 nt, Human
aauucaacagucaguuaucuca

SEQ ID NO: 806766 - RNA, 22 nt, Human
ugugucaaguggaauuucaggg

SEQ ID NO: 806767 - RNA, 19 nt, Human
agcagagcccugaagaucc

SEQ ID NO: 806768 - RNA, 22 nt, Human
cucauuuaccuuugcaaucaag

SEQ ID NO: 806769 - RNA, 22 nt, Human
gcagccaggggcugugaccugu

SEQ ID NO: 806770 - RNA, 22 nt, Human
gcugucugagaacaugguggaa

SEQ ID NO: 806771 - RNA, 22 nt, Human
acauuguaguuguucugcagca

SEQ ID NO: 806772 - RNA, 22 nt, Human
ugcagguggcuccagggacugc

SEQ ID NO: 806773 - RNA, 22 nt, Human
ugguggagggaacuauuuccag

SEQ ID NO: 806774 - RNA, 22 nt, Human
cuguggcaggaagggacuagca

SEQ ID NO: 806775 - RNA, 22 nt, Human
uggcagcugccauguccacgug

SEQ ID NO: 806776 - RNA, 22 nt, Human
gagguucugggggucugccugg

SEQ ID NO: 806777 - RNA, 22 nt, Human
ugggcaucucugcugccggccu

SEQ ID NO: 806778 - RNA, 22 nt, Human
cuucuccagccacgcccacucc

SEQ ID NO: 806779 - RNA, 22 nt, Human
aguauaaagugguuuucagcac

SEQ ID NO: 806780 - RNA, 22 nt, Human
cuuguccuuuacuugagacuca

SEQ ID NO: 806781 - RNA, 18 nt, Human
ggcaggcucucuggguca

SEQ ID NO: 806782 - RNA, 19 nt, Human
ggccagccaccucgccugg

SEQ ID NO: 806783 - RNA, 22 nt, Human
cagcugcucugguggucucucc

SEQ ID NO: 806784 - RNA, 22 nt, Human
ccagcagaagcucccgcugggu

SEQ ID NO: 806785 - RNA, 22 nt, Human
cuacugaugcuauacuucucag

SEQ ID NO: 806786 - RNA, 22 nt, Human
uucauguauuuaucauguaaau

SEQ ID NO: 806787 - RNA, 22 nt, Human
aaagcuuucuagcuauguucua

SEQ ID NO: 806788 - RNA, 22 nt, Human
ugucugaaacuugguccuaugc

SEQ ID NO: 806789 - RNA, 22 nt, Human
ccagaggaugcuggucagccuc

SEQ ID NO: 806790 - RNA, 18 nt, Human
agucuuuaaagauguuac

SEQ ID NO: 806791 - RNA, 22 nt, Human
ccagggcaggagaaagacucac

SEQ ID NO: 806792 - RNA, 22 nt, Human
uuugaguagugagacuaggcag

SEQ ID NO: 806793 - RNA, 22 nt, Human
uguuucacuaagcagaaauaua

SEQ ID NO: 806794 - RNA, 22 nt, Human
aggcuggcggugacugcucuga

SEQ ID NO: 806795 - RNA, 22 nt, Human
uuuuucacacauguggcuugau

SEQ ID NO: 806796 - RNA, 22 nt, Human
augcaauguuacagaauguacu

SEQ ID NO: 806797 - RNA, 22 nt, Human
agcugcuuagagucucuucuua

SEQ ID NO: 806798 - RNA, 22 nt, Human
aauguuauuguccuuuccaaaa

SEQ ID NO: 806799 - RNA, 22 nt, Human
uaguuuuacaucagccauuguu

SEQ ID NO: 806800 - RNA, 22 nt, Human
gcuuccaaaucuguucaaaaug

SEQ ID NO: 806801 - RNA, 22 nt, Human
caaggagaaaacggcuucugaa

SEQ ID NO: 806802 - RNA, 22 nt, Human
aacuaacagucauuaaaagaac

SEQ ID NO: 806803 - RNA, 22 nt, Human
aggcacugacagauucuguguc

SEQ ID NO: 806804 - RNA, 22 nt, Human
cagaaucugagucgugauugua

SEQ ID NO: 806805 - RNA, 22 nt, Human
uucuuugggcucagagagggag

SEQ ID NO: 806806 - RNA, 22 nt, Human
ucaaagagcuauucaguugugg

SEQ ID NO: 806807 - RNA, 22 nt, Human
guccagccacucaccuuccagc

SEQ ID NO: 806808 - RNA, 22 nt, Human
uaaaaaguagugagaauggcgc

SEQ ID NO: 806809 - RNA, 22 nt, Human
cacauauaccucuucuugaguu

SEQ ID NO: 806810 - RNA, 22 nt, Human
aggaaucccgcaccagcugcug

SEQ ID NO: 806811 - RNA, 22 nt, Human
acauuguugccuagccaugagu

SEQ ID NO: 806812 - RNA, 22 nt, Human
uuccuaauggcaaaacauguuu

SEQ ID NO: 806813 - RNA, 22 nt, Human
agccugccaggcgcugccugga

SEQ ID NO: 806814 - RNA, 22 nt, Human
auacagggacauccaguuuuuc

SEQ ID NO: 806815 - RNA, 19 nt, Human
cgugaacaugacugcaugg

SEQ ID NO: 806816 - RNA, 22 nt, Human
ucagcaggugccucagauucuu

SEQ ID NO: 806817 - RNA, 22 nt, Human
ucagcagggcugugguguggcu

SEQ ID NO: 806818 - RNA, 22 nt, Human
aagucauuaucucuucuaaucu

SEQ ID NO: 806819 - RNA, 22 nt, Human
aaaaaugcuuggacuuaauaaa

SEQ ID NO: 806820 - RNA, 22 nt, Human
ggcaaggccuugcccagcauuc

SEQ ID NO: 806821 - RNA, 22 nt, Human
ucacacuaagacaaaauaauuu

SEQ ID NO: 806822 - RNA, 21 nt, Human
ucuggaagaaaaaaguauuau

SEQ ID NO: 806823 - RNA, 22 nt, Human
uaccaaguguauuaugcuuugu

SEQ ID NO: 806824 - RNA, 22 nt, Human
ucagcuguaucagaaauacaau

SEQ ID NO: 806825 - RNA, 21 nt, Human
aguuuuuacucuuaacugugg

SEQ ID NO: 806826 - RNA, 22 nt, Human
uucuccuuuguaauucucaucc

SEQ ID NO: 806827 - RNA, 22 nt, Human
uuuaugcagauuuguacaguga

SEQ ID NO: 806828 - RNA, 22 nt, Human
ggcucagauuccgaguggcccu

SEQ ID NO: 806829 - RNA, 22 nt, Human
ggcuguggcauuaggugaggcc

SEQ ID NO: 806830 - RNA, 22 nt, Human
uaagucaucacauugcagagau

SEQ ID NO: 806831 - RNA, 22 nt, Human
uccgaggccaaagcugugaaua

SEQ ID NO: 806832 - RNA, 22 nt, Human
uuuguagagaauguuaagcacu

SEQ ID NO: 806833 - RNA, 22 nt, Human
gauaauaucugguuuauucacc

SEQ ID NO: 806834 - RNA, 22 nt, Human
auccaugacccucucaacaacc

SEQ ID NO: 806835 - RNA, 22 nt, Human
gcaggagccacuucagggaugc

SEQ ID NO: 806836 - RNA, 22 nt, Human
ugucauauagauauuagacagg

SEQ ID NO: 806837 - RNA, 22 nt, Human
cuucuagaguaaggaacaaaug

SEQ ID NO: 806838 - RNA, 22 nt, Human
gugacaggcauggggucaugca

SEQ ID NO: 806839 - RNA, 22 nt, Human
aucaaaguuucccagaaguugu

SEQ ID NO: 806840 - RNA, 22 nt, Human
uuuggacauguugagucugaua

SEQ ID NO: 806841 - RNA, 22 nt, Human
augcccccaucucuguuggcuc

SEQ ID NO: 806842 - RNA, 22 nt, Human
uuaaugaccuagagcaguaauu

SEQ ID NO: 806843 - RNA, 22 nt, Human
ccaggagccacucaggcccaca

SEQ ID NO: 806844 - RNA, 18 nt, Human
cacagugacuucugauac

SEQ ID NO: 806845 - RNA, 22 nt, Human
uguguuaauuuauugccucaga

SEQ ID NO: 806846 - RNA, 22 nt, Human
ugggguugaagaaaggaucuag

SEQ ID NO: 806847 - RNA, 22 nt, Human
cuucccugagcuuucucaggcu

SEQ ID NO: 806848 - RNA, 22 nt, Human
gcagggcaguaagagcuagagu

SEQ ID NO: 806849 - RNA, 17 nt, Human
cccagggaccacugcuu

SEQ ID NO: 806850 - RNA, 22 nt, Human
aguccauagaggcugcuuucau

SEQ ID NO: 806851 - RNA, 22 nt, Human
ugcaaaugcccauuuauuuucu

SEQ ID NO: 806852 - RNA, 22 nt, Human
uucauacaaugggauauuauga

SEQ ID NO: 806853 - RNA, 22 nt, Human
caaguccuuuucuuggcucagg

SEQ ID NO: 806854 - RNA, 22 nt, Human
aaaauugugaagguuucugaaa

SEQ ID NO: 806855 - RNA, 22 nt, Human
cucuggcuggcauugcuggacu

SEQ ID NO: 806856 - RNA, 22 nt, Human
cuggggggcuacugacagagga

SEQ ID NO: 806857 - RNA, 22 nt, Human
agcaaauggguuuauauuugac

SEQ ID NO: 806858 - RNA, 19 nt, Human
acacauuugcacaauccac

SEQ ID NO: 806859 - RNA, 22 nt, Human
caccagcagaagacugagggug

SEQ ID NO: 806860 - RNA, 22 nt, Human
ugcuucccugcucugcacaccu

SEQ ID NO: 806861 - RNA, 22 nt, Human
gaaacagucaacuuucuuuccc

SEQ ID NO: 806862 - RNA, 22 nt, Human
ucagaauucagagggagugggg

SEQ ID NO: 806863 - RNA, 22 nt, Human
uguaagaacaacugucaaaugu

SEQ ID NO: 806864 - RNA, 22 nt, Human
agcccuggagcaaaggugucuu

SEQ ID NO: 806865 - RNA, 22 nt, Human
aauaaugucuuuggcuugacca

SEQ ID NO: 806866 - RNA, 22 nt, Human
ucaugcaaaagacuugaacuuu

SEQ ID NO: 806867 - RNA, 22 nt, Human
uggcaggggaggugcuugcuua

SEQ ID NO: 806868 - RNA, 19 nt, Human
uuuucccacccuuuagaau

SEQ ID NO: 806869 - RNA, 22 nt, Human
gcagauggagacgagguuccgc

SEQ ID NO: 806870 - RNA, 22 nt, Human
aacaagugauauauaauggaag

SEQ ID NO: 806871 - RNA, 22 nt, Human
ugucaacacaccuaucucaauu

SEQ ID NO: 806872 - RNA, 22 nt, Human
aauaauguugacgauagucuua

SEQ ID NO: 806873 - RNA, 22 nt, Human
uugcagcuuagugauguuaucu

SEQ ID NO: 806874 - RNA, 22 nt, Human
uggcccugccacucacugcuga

SEQ ID NO: 806875 - RNA, 22 nt, Human
ucaggccugcccugaaagcaca

SEQ ID NO: 806876 - RNA, 22 nt, Human
ggugccaggcuguagucagggu

SEQ ID NO: 806877 - RNA, 22 nt, Human
gucaauaaguuuguaacuggau

SEQ ID NO: 806878 - RNA, 22 nt, Human
acuucccaggugguguggaguu

SEQ ID NO: 806879 - RNA, 22 nt, Human
auugagaagaaaaucuaauaua

SEQ ID NO: 806880 - RNA, 19 nt, Human
gcagguggauguggucagc

SEQ ID NO: 806881 - RNA, 22 nt, Human
auacacauuacuuucugucuga

SEQ ID NO: 806882 - RNA, 22 nt, Human
uggcccugagggcucggagcca

SEQ ID NO: 806883 - RNA, 22 nt, Human
aaagagaaaaagaucccggcuc

SEQ ID NO: 806884 - RNA, 19 nt, Human
caguuuguccagaggggac

SEQ ID NO: 806885 - RNA, 22 nt, Human
aguccugugcaaaugcaucuga

SEQ ID NO: 806886 - RNA, 22 nt, Human
cuguuaaaugagaaagcagacu

SEQ ID NO: 806887 - RNA, 22 nt, Human
uucuucagucccacuagccaca

SEQ ID NO: 806888 - RNA, 22 nt, Human
gccagguggagguugcagugag

SEQ ID NO: 806889 - RNA, 22 nt, Human
uauugcuaugagcauuguucuu

SEQ ID NO: 806890 - RNA, 22 nt, Human
caccagggcucugagcucugaa

SEQ ID NO: 806891 - RNA, 22 nt, Human
aagcugaauuuucuaaaagaau

SEQ ID NO: 806892 - RNA, 23 nt, Human
cacauauagcagccacuaagguc

SEQ ID NO: 806893 - RNA, 22 nt, Human
aaucauugagacaaauuagcuu

SEQ ID NO: 806894 - RNA, 22 nt, Human
aaaggccaccaacaugaagcau

SEQ ID NO: 806895 - RNA, 22 nt, Human
gccccugggagcagagccacca

SEQ ID NO: 806896 - RNA, 22 nt, Human
uugcagcucugauccagggacc

SEQ ID NO: 806897 - RNA, 22 nt, Human
uggagauguaaagcaaggcuua

SEQ ID NO: 806898 - RNA, 22 nt, Human
aauuaugguauguucaacaacu

SEQ ID NO: 806899 - RNA, 22 nt, Human
cccugcaggcucagacuggagu

SEQ ID NO: 806900 - RNA, 22 nt, Human
uuucacauuagauaugucauuu

SEQ ID NO: 806901 - RNA, 22 nt, Human
ggcaggcugggagucaucagag

SEQ ID NO: 806902 - RNA, 22 nt, Human
ugcagagguuuccaggcaaguu

SEQ ID NO: 806903 - RNA, 22 nt, Human
auuguucaauguaauaauuuug

SEQ ID NO: 806904 - RNA, 23 nt, Human
cuuugccacccagagccugacag

SEQ ID NO: 806905 - RNA, 22 nt, Human
cugacagcagcaaauggagaua

SEQ ID NO: 806906 - RNA, 22 nt, Human
ucugggcugggagcguguggac

SEQ ID NO: 806907 - RNA, 22 nt, Human
ugaggcugacaaaagaugaggu

SEQ ID NO: 806908 - RNA, 17 nt, Human
uucaagauauugaaaug

SEQ ID NO: 806909 - RNA, 22 nt, Human
cauuuguauagugcuuagacca

SEQ ID NO: 806910 - RNA, 22 nt, Human
ucacaucugugugauugucauu

SEQ ID NO: 806911 - RNA, 22 nt, Human
ucucuaagauaggaauacaguu

SEQ ID NO: 806912 - RNA, 22 nt, Human
aggaagagguagcugucaaggg

SEQ ID NO: 806913 - RNA, 22 nt, Human
aacugcaaaaaugguagucuua

SEQ ID NO: 806914 - RNA, 22 nt, Human
cagcccugcucuuagugucucc

SEQ ID NO: 806915 - RNA, 18 nt, Human
aagcaggguccauugugc

SEQ ID NO: 806916 - RNA, 22 nt, Human
ugggugaccccagaagaggauc

SEQ ID NO: 806917 - RNA, 22 nt, Human
aaauucaguuuuaauaaucacu

SEQ ID NO: 806918 - RNA, 22 nt, Human
cacaggaggaggccagagcgua

SEQ ID NO: 806919 - RNA, 22 nt, Human
caagaggcuaaacugggcuauu

SEQ ID NO: 806920 - RNA, 20 nt, Human
uucauuuguugagcaccuuc

SEQ ID NO: 806921 - RNA, 22 nt, Human
cucucccagucaggcucaggau

SEQ ID NO: 806922 - RNA, 22 nt, Human
uuauuuccugacacagcugauu

SEQ ID NO: 806923 - RNA, 22 nt, Human
ccugcugucucugggcaggcag

SEQ ID NO: 806924 - RNA, 22 nt, Human
auagaauagcauagaaaauuga

SEQ ID NO: 806925 - RNA, 19 nt, Human
acuguucuaacuugcagcu

SEQ ID NO: 806926 - RNA, 19 nt, Human
uccaggcuccauuggcaga

SEQ ID NO: 806927 - RNA, 22 nt, Human
gaggcuguguuucagugaggcc

SEQ ID NO: 806928 - RNA, 22 nt, Human
gacugaggugaccuaggacuac

SEQ ID NO: 806929 - RNA, 22 nt, Human
cuccagagguccccgcggcacu

SEQ ID NO: 806930 - RNA, 22 nt, Human
gccuggcugaggccucugcuaa

SEQ ID NO: 806931 - RNA, 23 nt, Human
auaauaauuauggcagcaaagug

SEQ ID NO: 806932 - RNA, 22 nt, Human
ugaaauagucuaaaaaaccaga

SEQ ID NO: 806933 - RNA, 22 nt, Human
uucaacaauuaaguaucagccu

SEQ ID NO: 806934 - RNA, 22 nt, Human
cuguuuauaaauagaggggagu

SEQ ID NO: 806935 - RNA, 22 nt, Human
uaucacaggugugauuuacauu

SEQ ID NO: 806936 - RNA, 18 nt, Human
gcaaggcucaggccaggc

SEQ ID NO: 806937 - RNA, 21 nt, Human
ucugugcugccgucaacaucc

SEQ ID NO: 806938 - RNA, 22 nt, Human
uaugagauuuggauucagugaa

SEQ ID NO: 806939 - RNA, 22 nt, Human
aguuuauuuuugauaagucuug

SEQ ID NO: 806940 - RNA, 22 nt, Human
uuugaaauaugaggcauuauga

SEQ ID NO: 806941 - RNA, 22 nt, Human
ucccucucuagccuguucagua

SEQ ID NO: 806942 - RNA, 22 nt, Human
accacaggacccaugagucagu

SEQ ID NO: 806943 - RNA, 22 nt, Human
gcagggcagggcaagaacuggg

SEQ ID NO: 806944 - RNA, 22 nt, Human
uugcagcugcaguaaauguuca

SEQ ID NO: 806945 - RNA, 22 nt, Human
ggccaagaucccauuauacaaa

SEQ ID NO: 806946 - RNA, 22 nt, Human
acauguauacaauguguaauga

SEQ ID NO: 806947 - RNA, 22 nt, Human
gggcuucaggagggucagccca

SEQ ID NO: 806948 - RNA, 22 nt, Human
caggcugggcuccggagauaaa

SEQ ID NO: 806949 - RNA, 22 nt, Human
cagaaacuucuggugucaaaua

SEQ ID NO: 806950 - RNA, 22 nt, Human
cucucaguccugcgcgccucug

SEQ ID NO: 806951 - RNA, 22 nt, Human
uucaaacaguugcacaacuuau

SEQ ID NO: 806952 - RNA, 22 nt, Human
uggcccagggaguucauggugu

SEQ ID NO: 806953 - RNA, 22 nt, Human
gauuucuucauucauuagaugg

SEQ ID NO: 806954 - RNA, 22 nt, Human
cuauuuggauguuagccucagu

SEQ ID NO: 806955 - RNA, 22 nt, Human
ugggaguggggcauagaaggua

SEQ ID NO: 806956 - RNA, 22 nt, Human
gcagaugggagccccaggggag

SEQ ID NO: 806957 - RNA, 23 nt, Human
agaggccaacuucuugccccucc

SEQ ID NO: 806958 - RNA, 22 nt, Human
ccaccagcuuugccacccugcu

SEQ ID NO: 806959 - RNA, 22 nt, Human
uggggaaagauaguuuucucua

SEQ ID NO: 806960 - RNA, 22 nt, Human
aaauagcugaaaguuccuagau

SEQ ID NO: 806961 - RNA, 22 nt, Human
uuucagaggaaaucucauugag

SEQ ID NO: 806962 - RNA, 22 nt, Human
gaaggcuggcucagcuuuccag

SEQ ID NO: 806963 - RNA, 22 nt, Human
aggcagugguguuugcuggugg

SEQ ID NO: 806964 - RNA, 22 nt, Human
gauucaaaaauaagcuccuauu

SEQ ID NO: 806965 - RNA, 22 nt, Human
gguccugucugacaucacugcu

SEQ ID NO: 806966 - RNA, 22 nt, Human
ugguaucaaacaauuaauuaga

SEQ ID NO: 806967 - RNA, 21 nt, Human
aacacauccagaguauuugac

SEQ ID NO: 806968 - RNA, 22 nt, Human
uuagaauuucugcucacuuuga

SEQ ID NO: 806969 - RNA, 22 nt, Human
aagcacagggacucaggaccgg

SEQ ID NO: 806970 - RNA, 22 nt, Human
aagggaaaucauauggugcagu

SEQ ID NO: 806971 - RNA, 17 nt, Human
guggaggugcucuggua

SEQ ID NO: 806972 - RNA, 22 nt, Human
caaggcaggucugaggagguug

SEQ ID NO: 806973 - RNA, 23 nt, Human
aacugcaagguugcugggaagua

SEQ ID NO: 806974 - RNA, 22 nt, Human
uggcacaggagcacugcccugg

SEQ ID NO: 806975 - RNA, 22 nt, Human
cccccaccguguuccugcucgg

SEQ ID NO: 806976 - RNA, 22 nt, Human
agugacagucucagagaucagg

SEQ ID NO: 806977 - RNA, 22 nt, Human
ucaacagaagugauagcuauua

SEQ ID NO: 806978 - RNA, 22 nt, Human
caggcacacauccgugagagau

SEQ ID NO: 806979 - RNA, 22 nt, Human
cagaugcuaaguuaucagcagg

SEQ ID NO: 806980 - RNA, 22 nt, Human
acccuuuguccaauagaaauga

SEQ ID NO: 806981 - RNA, 22 nt, Human
gcaaggagacuguagggccaag

SEQ ID NO: 806982 - RNA, 22 nt, Human
ugagaacauuccucuuccuggc

SEQ ID NO: 806983 - RNA, 22 nt, Human
cuccugaggggacaggacucau

SEQ ID NO: 806984 - RNA, 22 nt, Human
uacaacacugguucgacaugug

SEQ ID NO: 806985 - RNA, 22 nt, Human
ugcaagaaugacccaucuaccc

SEQ ID NO: 806986 - RNA, 22 nt, Human
uucuccugcgcaggcccaggga

SEQ ID NO: 806987 - RNA, 22 nt, Human
gacaguaagagugucuggguuc

SEQ ID NO: 806988 - RNA, 22 nt, Human
auucauuugcuauuguguaugg

SEQ ID NO: 806989 - RNA, 22 nt, Human
uuguauuucuccacuuucuguu

SEQ ID NO: 806990 - RNA, 22 nt, Human
accccaggcccagggaagaggc

SEQ ID NO: 806991 - RNA, 22 nt, Human
ccuccccugcucagaacucugg

SEQ ID NO: 806992 - RNA, 22 nt, Human
aucacauugccagugauuaccc

SEQ ID NO: 806993 - RNA, 19 nt, Human
agcuggggcgguguguguu

SEQ ID NO: 806994 - RNA, 22 nt, Human
uuugucuuuccccuccucauug

SEQ ID NO: 806995 - RNA, 22 nt, Human
ucacauuuucuuaggaaacuua

SEQ ID NO: 806996 - RNA, 19 nt, Human
ucuauguggcagugauggc

SEQ ID NO: 806997 - RNA, 22 nt, Human
ucaggcagcuccaggaauggua

SEQ ID NO: 806998 - RNA, 22 nt, Human
cuccucccaauugccaagugcu

SEQ ID NO: 806999 - RNA, 22 nt, Human
agcacuuuauucaggaacucca

SEQ ID NO: 807000 - RNA, 18 nt, Human
aguuucagggcaggaaac

SEQ ID NO: 807001 - RNA, 22 nt, Human
uguggaaaagccccacaggacu

SEQ ID NO: 807002 - RNA, 22 nt, Human
uuuaaccaguuuacaaagaauu

SEQ ID NO: 807003 - RNA, 22 nt, Human
ucacaguuauagucuguagaau

SEQ ID NO: 807004 - RNA, 22 nt, Human
cuaggcuggagugcauuggcgu

SEQ ID NO: 807005 - RNA, 18 nt, Human
gccagagggaagcaggug

SEQ ID NO: 807006 - RNA, 20 nt, Human
cagggcacacugcagccucg

SEQ ID NO: 807007 - RNA, 22 nt, Human
cuggcaguguccagcucgugau

SEQ ID NO: 807008 - RNA, 22 nt, Human
uuguaucagugccuauaaaaug

SEQ ID NO: 807009 - RNA, 20 nt, Human
uauuucugggcaaccauuua

SEQ ID NO: 807010 - RNA, 22 nt, Human
aaacagugacugguacauaaua

SEQ ID NO: 807011 - RNA, 20 nt, Human
ggaaggggcaaaguguguga

SEQ ID NO: 807012 - RNA, 23 nt, Human
acacauuuuucccguucugaggu

SEQ ID NO: 807013 - RNA, 22 nt, Human
uacagauauuguacaguuauag

SEQ ID NO: 807014 - RNA, 22 nt, Human
uugguuuugggauguacaaagg

SEQ ID NO: 807015 - RNA, 22 nt, Human
gagcccagcucuaccucagacu

SEQ ID NO: 807016 - RNA, 22 nt, Human
acuuccagaggguguggaaaua

SEQ ID NO: 807017 - RNA, 22 nt, Human
aaguccugggcauuugaacagg

SEQ ID NO: 807018 - RNA, 22 nt, Human
uccagagaggcauauuuacaag

SEQ ID NO: 807019 - RNA, 22 nt, Human
ugcugggcuucaacugccugag

SEQ ID NO: 807020 - RNA, 22 nt, Human
gaauuguauugauuuuucagag

SEQ ID NO: 807021 - RNA, 22 nt, Human
cucaggaugucggugacuauug

SEQ ID NO: 807022 - RNA, 22 nt, Human
cugcaaaucccuacugggcaca

SEQ ID NO: 807023 - RNA, 22 nt, Human
gagguggcuccuucagggaaua

SEQ ID NO: 807024 - RNA, 22 nt, Human
aagcgccaugguuccugcgcag

SEQ ID NO: 807025 - RNA, 22 nt, Human
guagggagcccagagcccagug

SEQ ID NO: 807026 - RNA, 22 nt, Human
gggcuggcaucaguugccgaga

SEQ ID NO: 807027 - RNA, 22 nt, Human
caugcugggccuugggugcacu

SEQ ID NO: 807028 - RNA, 22 nt, Human
uuaaaauuauggcccauuugga

SEQ ID NO: 807029 - RNA, 22 nt, Human
guggucuggggucaggccugag

SEQ ID NO: 807030 - RNA, 22 nt, Human
gaaggcugucagagaggagggc

SEQ ID NO: 807031 - RNA, 19 nt, Human
agcagagcaaaguggcuga

SEQ ID NO: 807032 - RNA, 22 nt, Human
ccaggaugacccccacuuuccu

SEQ ID NO: 807033 - RNA, 22 nt, Human
uuucaacagaauaugaucagag

SEQ ID NO: 807034 - RNA, 19 nt, Human
ucugcaagugucagaggcg

SEQ ID NO: 807035 - RNA, 22 nt, Human
gacaaggaaauuacuagcugga

SEQ ID NO: 807036 - RNA, 20 nt, Human
cagugaggaggugcuggggg

SEQ ID NO: 807037 - RNA, 21 nt, Human
ggaagggcucugaggacggcu

SEQ ID NO: 807038 - RNA, 22 nt, Human
agcaggcaggcugccagugaau

SEQ ID NO: 807039 - RNA, 22 nt, Human
caguggagagacuuuuacucuu

SEQ ID NO: 807040 - RNA, 22 nt, Human
ugcaggaguccaaucaggagac

SEQ ID NO: 807041 - RNA, 22 nt, Human
aagcacagcuggaacagcagga

SEQ ID NO: 807042 - RNA, 22 nt, Human
gagcagcuaaaauucucaugca

SEQ ID NO: 807043 - RNA, 22 nt, Human
aaauacuguccaccauggagca

SEQ ID NO: 807044 - RNA, 22 nt, Human
aaaucuuccugaaauuuguuca

SEQ ID NO: 807045 - RNA, 22 nt, Human
augagguggucuucaguagguc

SEQ ID NO: 807046 - RNA, 18 nt, Human
uugcaaauucuucccugu

SEQ ID NO: 807047 - RNA, 22 nt, Human
uuauuuaggagaaggaacccug

SEQ ID NO: 807048 - RNA, 22 nt, Human
cugccuggggcaucagucaagg

SEQ ID NO: 807049 - RNA, 23 nt, Human
cagaggcaucggauucaacauca

SEQ ID NO: 807050 - RNA, 23 nt, Human
uggccaggcauaaaggugggugg

SEQ ID NO: 807051 - RNA, 18 nt, Human
gcauucuguuaaugugga

SEQ ID NO: 807052 - RNA, 22 nt, Human
acacaauaaauuuauccuuuga

SEQ ID NO: 807053 - RNA, 22 nt, Human
ccuugacuguaauggaguaggg

SEQ ID NO: 807054 - RNA, 22 nt, Human
gaaaccacaguacccaggaaaa

SEQ ID NO: 807055 - RNA, 22 nt, Human
uagaaacagaauaugagugaga

SEQ ID NO: 807056 - RNA, 20 nt, Human
augguucaggccagcugucu

SEQ ID NO: 807057 - RNA, 22 nt, Human
uauagacuuggcaugcauguuc

SEQ ID NO: 807058 - RNA, 22 nt, Human
aaucacaguggguacuagauug

SEQ ID NO: 807059 - RNA, 22 nt, Human
acagucucuguugcugcuguuu

SEQ ID NO: 807060 - RNA, 22 nt, Human
agcagggaagccuccagaaccu

SEQ ID NO: 807061 - RNA, 20 nt, Human
gacacaggcaguccucagag

SEQ ID NO: 807062 - RNA, 22 nt, Human
cuacaaagaauuucucuagcuc

SEQ ID NO: 807063 - RNA, 23 nt, Human
cccaggaguuucacugcaaaggu

SEQ ID NO: 807064 - RNA, 17 nt, Human
cgggcauggagggcagg

SEQ ID NO: 807065 - RNA, 19 nt, Human
cacagaugauugacacaua

SEQ ID NO: 807066 - RNA, 22 nt, Human
uaguguuuucuagaaugguuuu

SEQ ID NO: 807067 - RNA, 22 nt, Human
gacauuuguuccucuaagugac

SEQ ID NO: 807068 - RNA, 22 nt, Human
agcccaggucuggcccagccug

SEQ ID NO: 807069 - RNA, 22 nt, Human
uggagggucaccccuugcugag

SEQ ID NO: 807070 - RNA, 20 nt, Human
gccaggagggugugaugagc

SEQ ID NO: 807071 - RNA, 22 nt, Human
aagccaacaugauuacuauaau

SEQ ID NO: 807072 - RNA, 22 nt, Human
aggcccagcuggacaaacugcu

SEQ ID NO: 807073 - RNA, 22 nt, Human
cccagggcuuuucucacuagac

SEQ ID NO: 807074 - RNA, 22 nt, Human
agggucuguauuucuggcaagc

SEQ ID NO: 807075 - RNA, 22 nt, Human
ucaagaugaaagauguagccau

SEQ ID NO: 807076 - RNA, 22 nt, Human
caucacaucuacuauaagugau

SEQ ID NO: 807077 - RNA, 22 nt, Human
ccaggcccccgagcagaagaca

SEQ ID NO: 807078 - RNA, 22 nt, Human
ucugaaggaaaaggguagauau

SEQ ID NO: 807079 - RNA, 22 nt, Human
gcacugggaaugagggcagcuu

SEQ ID NO: 807080 - RNA, 22 nt, Human
cugcacaggggaugagggcagu

SEQ ID NO: 807081 - RNA, 22 nt, Human
auuucuguaguccacauucuuu

SEQ ID NO: 807082 - RNA, 22 nt, Human
uggaaauaguaaugcauaagug

SEQ ID NO: 807083 - RNA, 22 nt, Human
ugagggcuaaauuguggcaggu

SEQ ID NO: 807084 - RNA, 22 nt, Human
auuuaucaucagaccuuuuaaa

SEQ ID NO: 807085 - RNA, 22 nt, Human
ccagccacugggccacugccag

SEQ ID NO: 807086 - RNA, 22 nt, Human
uaaugacuaagcaucauuaaac

SEQ ID NO: 807087 - RNA, 22 nt, Human
ugcccagcuucuuacuuuuaaa

SEQ ID NO: 807088 - RNA, 22 nt, Human
aagucauuccugcuuguugccc

SEQ ID NO: 807089 - RNA, 22 nt, Human
gaggaggcuuccgggaggcacg

SEQ ID NO: 807090 - RNA, 22 nt, Human
aguuuucugcuaaaccagcuaa

SEQ ID NO: 807091 - RNA, 22 nt, Human
cuaguauuuaaaggcuaugauu

SEQ ID NO: 807092 - RNA, 22 nt, Human
agcuggaggggccagcaggugu

SEQ ID NO: 807093 - RNA, 21 nt, Human
uuuuuucuugcgugaggccug

SEQ ID NO: 807094 - RNA, 22 nt, Human
uucuaaacggcuucacaggaau

SEQ ID NO: 807095 - RNA, 22 nt, Human
cugggagucuggccucuggucc

SEQ ID NO: 807096 - RNA, 22 nt, Human
agucagagacccuagaucuaau

SEQ ID NO: 807097 - RNA, 22 nt, Human
gcugccacgaucucugcuguag

SEQ ID NO: 807098 - RNA, 22 nt, Human
ggucagagggugggcugccugu

SEQ ID NO: 807099 - RNA, 22 nt, Human
ucacauuuguucuugaaucuaa

SEQ ID NO: 807100 - RNA, 22 nt, Human
cugcagcuggagcaucuucuca

SEQ ID NO: 807101 - RNA, 22 nt, Human
ggaacuccugcuccaagcagcu

SEQ ID NO: 807102 - RNA, 22 nt, Human
cugagcugugugguccugggca

SEQ ID NO: 807103 - RNA, 22 nt, Human
agagucaaguagggcaugggcu

SEQ ID NO: 807104 - RNA, 22 nt, Human
ccugccucccagagguccucua

SEQ ID NO: 807105 - RNA, 22 nt, Human
agcuggggguagugagaaauaa

SEQ ID NO: 807106 - RNA, 22 nt, Human
uuagaguuuuuguaaguacaau

SEQ ID NO: 807107 - RNA, 22 nt, Human
cugccugcugacauucuuuaua

SEQ ID NO: 807108 - RNA, 22 nt, Human
augcaaauggcaaugagugacc

SEQ ID NO: 807109 - RNA, 22 nt, Human
gccugccuguuggcugaggugc

SEQ ID NO: 807110 - RNA, 22 nt, Human
ugggguggauagaaagugaugu

SEQ ID NO: 807111 - RNA, 22 nt, Human
uggaagagguggaaguggcuuc

SEQ ID NO: 807112 - RNA, 22 nt, Human
auaacuuaaugggucaugcucu

SEQ ID NO: 807113 - RNA, 22 nt, Human
aggccugucccagcugaggacg

SEQ ID NO: 807114 - RNA, 22 nt, Human
acacuagagagcaggcauuccc

SEQ ID NO: 807115 - RNA, 22 nt, Human
agauauuaggaggauucauaau

SEQ ID NO: 807116 - RNA, 22 nt, Human
acccgugguuuuauacuacuuc

SEQ ID NO: 807117 - RNA, 22 nt, Human
ugggcagaggacagggaagauc

SEQ ID NO: 807118 - RNA, 22 nt, Human
ucuuuauuuaagucuguuguaa

SEQ ID NO: 807119 - RNA, 22 nt, Human
ggccacagcagaugcuucagau

SEQ ID NO: 807120 - RNA, 22 nt, Human
uuugcaaauucuugucuagccu

SEQ ID NO: 807121 - RNA, 22 nt, Human
ugagaaguacuacaagagaggg

SEQ ID NO: 807122 - RNA, 21 nt, Human
ugccagcauuaaacagucauu

SEQ ID NO: 807123 - RNA, 22 nt, Human
uagugaaagucaaagacagcua

SEQ ID NO: 807124 - RNA, 22 nt, Human
acaguucuuuggauggaagaau

SEQ ID NO: 807125 - RNA, 22 nt, Human
auacauguugagaaaauaucug

SEQ ID NO: 807126 - RNA, 22 nt, Human
cacaggagcuguggggcagugu

SEQ ID NO: 807127 - RNA, 22 nt, Human
cagcuggcuccaccucugggcu

SEQ ID NO: 807128 - RNA, 22 nt, Human
aaacaagagcuuacauggcugc

SEQ ID NO: 807129 - RNA, 22 nt, Human
auaaagauuucuuuuucucuac

SEQ ID NO: 807130 - RNA, 20 nt, Human
agcagcagauguuggaggug

SEQ ID NO: 807131 - RNA, 17 nt, Human
ucuccuggcucuaucag

SEQ ID NO: 807132 - RNA, 22 nt, Human
gggcuggaguugggaagacaaa

SEQ ID NO: 807133 - RNA, 22 nt, Human
cacaguauuuguuuuucugagu

SEQ ID NO: 807134 - RNA, 22 nt, Human
gggacaggcugagacuugagcu

SEQ ID NO: 807135 - RNA, 22 nt, Human
ggccucucauucucccuggucc

SEQ ID NO: 807136 - RNA, 21 nt, Human
auuucauggugcuuuuaagaa

SEQ ID NO: 807137 - RNA, 22 nt, Human
cuguguuuuuggucugaucuau

SEQ ID NO: 807138 - RNA, 22 nt, Human
aaacugcagagccaugguucaa

SEQ ID NO: 807139 - RNA, 22 nt, Human
aauuuuauuaacuggauguagc

SEQ ID NO: 807140 - RNA, 22 nt, Human
cagccucucuguaucucaggau

SEQ ID NO: 807141 - RNA, 22 nt, Human
gggaagcaggugcagcucgccu

SEQ ID NO: 807142 - RNA, 22 nt, Human
gcagggcagaaggugcugagga

SEQ ID NO: 807143 - RNA, 17 nt, Human
ucaggcugggugcagug

SEQ ID NO: 807144 - RNA, 22 nt, Human
ccacaguguggcauaaacugua

SEQ ID NO: 807145 - RNA, 22 nt, Human
gagggcaguagccucguacccu

SEQ ID NO: 807146 - RNA, 22 nt, Human
ugaaauauccagcccagcagga

SEQ ID NO: 807147 - RNA, 22 nt, Human
aagaugugcugucuugccacuc

SEQ ID NO: 807148 - RNA, 22 nt, Human
gugccuggaacuggguaggcug

SEQ ID NO: 807149 - RNA, 22 nt, Human
acacuugagguuuuuaggugcg

SEQ ID NO: 807150 - RNA, 22 nt, Human
acaguguccuuguggucccugu

SEQ ID NO: 807151 - RNA, 22 nt, Human
aguacaaacuguuucaaaguag

SEQ ID NO: 807152 - RNA, 16 nt, Human
aagccaguucagcauu

SEQ ID NO: 807153 - RNA, 22 nt, Human
gcagcugagagaagaacagggc

SEQ ID NO: 807154 - RNA, 22 nt, Human
uuaaaacagcgugaaucuggca

SEQ ID NO: 807155 - RNA, 22 nt, Human
ucuugauuuacucuaauagcuu

SEQ ID NO: 807156 - RNA, 22 nt, Human
ugcuguggauucagagaugaaa

SEQ ID NO: 807157 - RNA, 22 nt, Human
uuuuugcaccaaccuaauagaa

SEQ ID NO: 807158 - RNA, 22 nt, Human
ucuccuggucaccucagaaguc

SEQ ID NO: 807159 - RNA, 22 nt, Human
aauguuauuucugcauaguagu

SEQ ID NO: 807160 - RNA, 22 nt, Human
cccuggagaggacucaccccug

SEQ ID NO: 807161 - RNA, 22 nt, Human
uguccuggagacacaagguggu

SEQ ID NO: 807162 - RNA, 22 nt, Human
uucaaacaguguagaauauaug

SEQ ID NO: 807163 - RNA, 19 nt, Human
uugguggugguuuugguuc

SEQ ID NO: 807164 - RNA, 22 nt, Human
cuguuuuucagaagguaaggga

SEQ ID NO: 807165 - RNA, 20 nt, Human
uccuuuccuccuucuaaaug

SEQ ID NO: 807166 - RNA, 22 nt, Human
agcugccuuuugagaaagcuca

SEQ ID NO: 807167 - RNA, 22 nt, Human
ccaggcagaugggccggcuuca

SEQ ID NO: 807168 - RNA, 22 nt, Human
aauaaccuuuauuucaaagugu

SEQ ID NO: 807169 - RNA, 22 nt, Human
uuauucagcucucuagaggcac

SEQ ID NO: 807170 - RNA, 22 nt, Human
cuucuagagcuggagcaaaugu

SEQ ID NO: 807171 - RNA, 22 nt, Human
cugacagcugaagggucccaga

SEQ ID NO: 807172 - RNA, 22 nt, Human
uggccuggugucugcgaggccu

SEQ ID NO: 807173 - RNA, 22 nt, Human
ggcaauaguuguggguucuuua

SEQ ID NO: 807174 - RNA, 22 nt, Human
cuggcccucagacucaugggca

SEQ ID NO: 807175 - RNA, 22 nt, Human
ucacagaaggaccuuguuucau

SEQ ID NO: 807176 - RNA, 22 nt, Human
caacugcuuggaggaauacugc

SEQ ID NO: 807177 - RNA, 22 nt, Human
ggagugaggcauuuguagcuga

SEQ ID NO: 807178 - RNA, 22 nt, Human
gcagaaaccacagugucuuuua

SEQ ID NO: 807179 - RNA, 19 nt, Human
gaggaggaaaacuagugua

SEQ ID NO: 807180 - RNA, 22 nt, Human
aaauggaucuuuuuauaaugca

SEQ ID NO: 807181 - RNA, 22 nt, Human
uacuugaguauagucgcuucac

SEQ ID NO: 807182 - RNA, 22 nt, Human
agaaggcagaugggacggagca

SEQ ID NO: 807183 - RNA, 22 nt, Human
uccccagggucccugcuuccau

SEQ ID NO: 807184 - RNA, 22 nt, Human
ccaggcucugcgcuggacaugg

SEQ ID NO: 807185 - RNA, 22 nt, Human
ugaguugcccugcccugugcuu

SEQ ID NO: 807186 - RNA, 22 nt, Human
auuaaagaaacccagcauguga

SEQ ID NO: 807187 - RNA, 22 nt, Human
gggcccugcgacucgcggcgga

SEQ ID NO: 807188 - RNA, 22 nt, Human
gcugggacggcucaguaagaag

SEQ ID NO: 807189 - RNA, 23 nt, Human
auaaacugucaaaagccagcccu

SEQ ID NO: 807190 - RNA, 23 nt, Human
ccacaggcacagaggcuugcauc

SEQ ID NO: 807191 - RNA, 22 nt, Human
gcucaaugcucaaugcugcaaa

SEQ ID NO: 807192 - RNA, 22 nt, Human
acacuagaugccaauagcaccc

SEQ ID NO: 807193 - RNA, 19 nt, Human
uuucuuccaaagacuaugg

SEQ ID NO: 807194 - RNA, 22 nt, Human
uuucacauguggaaugccaggu

SEQ ID NO: 807195 - RNA, 22 nt, Human
ggacacaggcagcugggugggu

SEQ ID NO: 807196 - RNA, 22 nt, Human
gcauaauuaaacaggcaagauu

SEQ ID NO: 807197 - RNA, 22 nt, Human
agggagagguugaaaccucagu

SEQ ID NO: 807198 - RNA, 20 nt, Human
aucagacuuuuaggaacaua

SEQ ID NO: 807199 - RNA, 22 nt, Human
gaagaugggaaugaugaguggg

SEQ ID NO: 807200 - RNA, 22 nt, Human
cucccagccuucgccagucuga

SEQ ID NO: 807201 - RNA, 22 nt, Human
aaauacauuuacagucguggcu

SEQ ID NO: 807202 - RNA, 22 nt, Human
uaugugaccuucugaaugagua

SEQ ID NO: 807203 - RNA, 22 nt, Human
ugugucaagacauuuagucauu

SEQ ID NO: 807204 - RNA, 22 nt, Human
cccaggagguuggggcuacagu

SEQ ID NO: 807205 - RNA, 22 nt, Human
aagaaaagauguuugguuuuca

SEQ ID NO: 807206 - RNA, 22 nt, Human
uucuuguuccaugaaagacaga

SEQ ID NO: 807207 - RNA, 22 nt, Human
ugucucuugaguuuguuuuaau

SEQ ID NO: 807208 - RNA, 22 nt, Human
aaucaggaggauaagggggucc

SEQ ID NO: 807209 - RNA, 22 nt, Human
uaauuacagguccaaaacaauc

SEQ ID NO: 807210 - RNA, 22 nt, Human
uucagugugucaguuucagcag

SEQ ID NO: 807211 - RNA, 17 nt, Human
cagaaggaagcauggca

SEQ ID NO: 807212 - RNA, 22 nt, Human
agaguccaggggccuggugugu

SEQ ID NO: 807213 - RNA, 22 nt, Human
cugaggagaccaucaacuaauu

SEQ ID NO: 807214 - RNA, 22 nt, Human
ugacagcauaacacuggucuug

SEQ ID NO: 807215 - RNA, 22 nt, Human
ccccuucuguguccugucagcc

SEQ ID NO: 807216 - RNA, 22 nt, Human
ugcccagcaauaaaccagaaga

SEQ ID NO: 807217 - RNA, 22 nt, Human
gggccucagcucugcucugcaa

SEQ ID NO: 807218 - RNA, 22 nt, Human
aucaaaguccaucagaagguag

SEQ ID NO: 807219 - RNA, 20 nt, Human
uggggaaagccaucgaugag

SEQ ID NO: 807220 - RNA, 22 nt, Human
gccagccugugcuuggccaggc

SEQ ID NO: 807221 - RNA, 22 nt, Human
cccucccugaagaaguuacucu

SEQ ID NO: 807222 - RNA, 22 nt, Human
ccacuauuacuguguggcaguc

SEQ ID NO: 807223 - RNA, 22 nt, Human
ggcugccucuauuuaggaucaa

SEQ ID NO: 807224 - RNA, 22 nt, Human
ccaguuuaggacacaugcccac

SEQ ID NO: 807225 - RNA, 22 nt, Human
cagucuuugacaagcccuuuca

SEQ ID NO: 807226 - RNA, 22 nt, Human
uccagccaugcaugacaaucac

SEQ ID NO: 807227 - RNA, 22 nt, Human
aagagagaacucccuucgccag

SEQ ID NO: 807228 - RNA, 22 nt, Human
cagagacaaccugguagagaaa

SEQ ID NO: 807229 - RNA, 22 nt, Human
cagagagggcggcccuggcuuc

SEQ ID NO: 807230 - RNA, 22 nt, Human
aggcugugcacagggcaccugc

SEQ ID NO: 807231 - RNA, 22 nt, Human
gcaccugcucacacaugugacu

SEQ ID NO: 807232 - RNA, 22 nt, Human
gcagcuggcucagagagguggg

SEQ ID NO: 807233 - RNA, 22 nt, Human
acagaaagauaggcacaagguc

SEQ ID NO: 807234 - RNA, 22 nt, Human
gugcagcugguggagucugggg

SEQ ID NO: 807235 - RNA, 18 nt, Human
cucucuuuccacucuuug

SEQ ID NO: 807236 - RNA, 22 nt, Human
uuuucuccaacucaaaggaaag

SEQ ID NO: 807237 - RNA, 22 nt, Human
aggcugugggaauggcugcuug

SEQ ID NO: 807238 - RNA, 22 nt, Human
ggugcugggaacgaggaauuca

SEQ ID NO: 807239 - RNA, 22 nt, Human
uggcggugacggcggcgccugg

SEQ ID NO: 807240 - RNA, 22 nt, Human
cuggggugaaggauuaccugag

SEQ ID NO: 807241 - RNA, 23 nt, Human
aggcaguggugguaacaugucaa

SEQ ID NO: 807242 - RNA, 22 nt, Human
agguggcaggaggucagagaaa

SEQ ID NO: 807243 - RNA, 20 nt, Human
acacuugacaccagaaaugg

SEQ ID NO: 807244 - RNA, 22 nt, Human
caucaaagcuuuuuucuguguu

SEQ ID NO: 807245 - RNA, 22 nt, Human
gucauaggcauggauguggguu

SEQ ID NO: 807246 - RNA, 22 nt, Human
ucaggaagugguaaaggauguu

SEQ ID NO: 807247 - RNA, 22 nt, Human
uucaaagugcauguuccucaga

SEQ ID NO: 807248 - RNA, 22 nt, Human
auucuuuuuuaaggaauagaac

SEQ ID NO: 807249 - RNA, 22 nt, Human
ugaguuuaauuggagccugaau

SEQ ID NO: 807250 - RNA, 22 nt, Human
ugguuagacucaccuuauaguu

SEQ ID NO: 807251 - RNA, 22 nt, Human
caggaggcagagguugcaguga

SEQ ID NO: 807252 - RNA, 22 nt, Human
ugaaacagucuccagacuugga

SEQ ID NO: 807253 - RNA, 22 nt, Human
gucagaagcauuuguggcugaa

SEQ ID NO: 807254 - RNA, 22 nt, Human
uaaaugcuuagauucauagaaa

SEQ ID NO: 807255 - RNA, 22 nt, Human
agcccagcaaagggguuugaga

SEQ ID NO: 807256 - RNA, 22 nt, Human
agcagcucuggcacuguagcau

SEQ ID NO: 807257 - RNA, 22 nt, Human
aggggagcaucugugaugguua

SEQ ID NO: 807258 - RNA, 22 nt, Human
aaagcucacaguaauacaaggc

SEQ ID NO: 807259 - RNA, 22 nt, Human
cagcagccgagagggggcucug

SEQ ID NO: 807260 - RNA, 22 nt, Human
cuuccucuagccuaguaaugcc

SEQ ID NO: 807261 - RNA, 22 nt, Human
gauuaguaagaguuuaccuauu

SEQ ID NO: 807262 - RNA, 22 nt, Human
cuauuucuaaaccuauaaguga

SEQ ID NO: 807263 - RNA, 22 nt, Human
ccagcugcugugcagggaggcu

SEQ ID NO: 807264 - RNA, 22 nt, Human
cgucaucacggcaagcaucucc

SEQ ID NO: 807265 - RNA, 22 nt, Human
aaguuuaagguggaaguggugg

SEQ ID NO: 807266 - RNA, 22 nt, Human
agauacaacuguuuaaacauua

SEQ ID NO: 807267 - RNA, 22 nt, Human
cugggagcugucaggagcgugu

SEQ ID NO: 807268 - RNA, 22 nt, Human
ucacagccuggacaguugccug

SEQ ID NO: 807269 - RNA, 22 nt, Human
cugggacccugcccuguggccu

SEQ ID NO: 807270 - RNA, 22 nt, Human
gcagcaggcauggccgcccugg

SEQ ID NO: 807271 - RNA, 22 nt, Human
acaaguuucauuguuuagaacc

SEQ ID NO: 807272 - RNA, 22 nt, Human
cccaggaggcagaaguugcagu

SEQ ID NO: 807273 - RNA, 22 nt, Human
cguggccagcacaaggcaguga

SEQ ID NO: 807274 - RNA, 22 nt, Human
agcuccugcccaggaaggcucu

SEQ ID NO: 807275 - RNA, 22 nt, Human
gaggucaggcucaagcugggcc

SEQ ID NO: 807276 - RNA, 22 nt, Human
aacauuucugagaauaucaguu

SEQ ID NO: 807277 - RNA, 22 nt, Human
cugucccauccuuacucuaccc

SEQ ID NO: 807278 - RNA, 22 nt, Human
aaagaggggacuguuaauucca

SEQ ID NO: 807279 - RNA, 22 nt, Human
uugcuuuguuacugcaguuucc

SEQ ID NO: 807280 - RNA, 22 nt, Human
cuggcagcugcccgagaugccc

SEQ ID NO: 807281 - RNA, 22 nt, Human
uggauggguugaaaugugagcc

SEQ ID NO: 807282 - RNA, 22 nt, Human
gucugcuggcacgucacagaua

SEQ ID NO: 807283 - RNA, 22 nt, Human
uacaaagaguuuggucucuaga

SEQ ID NO: 807284 - RNA, 22 nt, Human
acccaggccugagagacaggag

SEQ ID NO: 807285 - RNA, 20 nt, Human
uccugcugaccuucacaagc

SEQ ID NO: 807286 - RNA, 22 nt, Human
augaaaugaaguuggccuggcu

SEQ ID NO: 807287 - RNA, 22 nt, Human
ugccacagagcaauucugcuga

SEQ ID NO: 807288 - RNA, 22 nt, Human
acccggagucggagguugcagu

SEQ ID NO: 807289 - RNA, 22 nt, Human
acucugcuuauugcugcaggca

SEQ ID NO: 807290 - RNA, 22 nt, Human
aggugggcgcugcucccgcugg

SEQ ID NO: 807291 - RNA, 22 nt, Human
caugcauagccagcauuguaug

SEQ ID NO: 807292 - RNA, 23 nt, Human
gugagcagcaccaugaggcuaga

SEQ ID NO: 807293 - RNA, 22 nt, Human
agagucagaaccaagaugaggc

SEQ ID NO: 807294 - RNA, 22 nt, Human
ugaagaacgugagauccagaaa

SEQ ID NO: 807295 - RNA, 22 nt, Human
aacacagguugcugggccucac

SEQ ID NO: 807296 - RNA, 22 nt, Human
ugcagcugcuggcccaggugcu

SEQ ID NO: 807297 - RNA, 18 nt, Human
gccagugcccuggcucac

SEQ ID NO: 807298 - RNA, 22 nt, Human
uacauucugaaauaaaugguuu

SEQ ID NO: 807299 - RNA, 22 nt, Human
acacagauaaugcucauauagg

SEQ ID NO: 807300 - RNA, 20 nt, Human
gcuggcagaugucuugagau

SEQ ID NO: 807301 - RNA, 22 nt, Human
caagaaucaacauuauuuagug

SEQ ID NO: 807302 - RNA, 22 nt, Human
uguaauauaagcauuaauaguu

SEQ ID NO: 807303 - RNA, 22 nt, Human
ggugugugguuuugauacaguc

SEQ ID NO: 807304 - RNA, 22 nt, Human
acauaugagguguuauucuaug

SEQ ID NO: 807305 - RNA, 22 nt, Human
ccagaagcaaaacagacaguuu

SEQ ID NO: 807306 - RNA, 22 nt, Human
uacaagagguauauagaaacag

SEQ ID NO: 807307 - RNA, 22 nt, Human
acucagaguuuuacccagagac

SEQ ID NO: 807308 - RNA, 22 nt, Human
acaagauaaggugucagugugu

SEQ ID NO: 807309 - RNA, 22 nt, Human
aauuuaaggaggccuucacucu

SEQ ID NO: 807310 - RNA, 22 nt, Human
uggugcugcaggugggcacagu

SEQ ID NO: 807311 - RNA, 22 nt, Human
uggcuucuaguuugaggaaaaa

SEQ ID NO: 807312 - RNA, 23 nt, Human
ccuggcuggauucucugcauuca

SEQ ID NO: 807313 - RNA, 22 nt, Human
uguauccccugcagguugcuau

SEQ ID NO: 807314 - RNA, 22 nt, Human
uucaacauguucuacauaaggg

SEQ ID NO: 807315 - RNA, 22 nt, Human
agucaggggaucuagacuugaa

SEQ ID NO: 807316 - RNA, 22 nt, Human
gcuuguuugugccucugcagaa

SEQ ID NO: 807317 - RNA, 22 nt, Human
gaaauucaggacaaagacucuu

SEQ ID NO: 807318 - RNA, 22 nt, Human
ccagagacgucggucagggcgc

SEQ ID NO: 807319 - RNA, 22 nt, Human
auucugcacauccaagaacagg

SEQ ID NO: 807320 - RNA, 22 nt, Human
ucaauuaagaggcuaaguuacu

SEQ ID NO: 807321 - RNA, 22 nt, Human
aagaacaugaagucacaaaugc

SEQ ID NO: 807322 - RNA, 22 nt, Human
ccuggagcaggagcugcagagg

SEQ ID NO: 807323 - RNA, 22 nt, Human
gagcaggaacugaaaaugagac

SEQ ID NO: 807324 - RNA, 22 nt, Human
uauuucucuuuguagggauaua

SEQ ID NO: 807325 - RNA, 22 nt, Human
acacacuguaaggacuaucacu

SEQ ID NO: 807326 - RNA, 22 nt, Human
gauuuacaaagcucucuagugu

SEQ ID NO: 807327 - RNA, 22 nt, Human
gcagcuuggugaaaggugaugg

SEQ ID NO: 807328 - RNA, 22 nt, Human
gaaggcuccuugagggaaggac

SEQ ID NO: 807329 - RNA, 22 nt, Human
aguguauuugccuauaaaaaug

SEQ ID NO: 807330 - RNA, 22 nt, Human
caggaaauaggcguuuguccuc

SEQ ID NO: 807331 - RNA, 22 nt, Human
cuucucucugcauaggcauggg

SEQ ID NO: 807332 - RNA, 22 nt, Human
acacuacagggagaagacucac

SEQ ID NO: 807333 - RNA, 22 nt, Human
uaacaauaguguuugcuaguca

SEQ ID NO: 807334 - RNA, 22 nt, Human
cagaggcauacucccagucuug

SEQ ID NO: 807335 - RNA, 22 nt, Human
ucuuuucacagacaaauggaga

SEQ ID NO: 807336 - RNA, 22 nt, Human
caucuccuuuggucuacuucca

SEQ ID NO: 807337 - RNA, 18 nt, Human
ucagaggagauaccuaaa

SEQ ID NO: 807338 - RNA, 22 nt, Human
ucuccccagcugagcugcccuu

SEQ ID NO: 807339 - RNA, 23 nt, Human
gcaugcaaagaauauagguguuc

SEQ ID NO: 807340 - RNA, 22 nt, Human
aagcaggagagccugggugagc

SEQ ID NO: 807341 - RNA, 22 nt, Human
ugcaugcucuguagaaagcagg

SEQ ID NO: 807342 - RNA, 22 nt, Human
ucaucaaagucaaagaaugacu

SEQ ID NO: 807343 - RNA, 22 nt, Human
cugggagcuggaugcccugccc

SEQ ID NO: 807344 - RNA, 22 nt, Human
guagucugaacaguaauuuugu

SEQ ID NO: 807345 - RNA, 22 nt, Human
ccagcaggaaagugacguuuga

SEQ ID NO: 807346 - RNA, 19 nt, Human
agcugccugugcgcgcccg

SEQ ID NO: 807347 - RNA, 22 nt, Human
auuuuguugagguaauugucaa

SEQ ID NO: 807348 - RNA, 22 nt, Human
uuacaguacagaaaauaacaga

SEQ ID NO: 807349 - RNA, 22 nt, Human
gugcuucuccguucugcagcac

SEQ ID NO: 807350 - RNA, 22 nt, Human
uuaacaaaaauaucaggcauca

SEQ ID NO: 807351 - RNA, 22 nt, Human
cagcugaggucaaagaagcagg

SEQ ID NO: 807352 - RNA, 18 nt, Human
gcugugugcaccugauaa

SEQ ID NO: 807353 - RNA, 22 nt, Human
ggggauggaggcgugugguccu

SEQ ID NO: 807354 - RNA, 22 nt, Human
aaauagaauuggaagcagaguu

SEQ ID NO: 807355 - RNA, 22 nt, Human
ggcacugggagaggugagacgg

SEQ ID NO: 807356 - RNA, 22 nt, Human
ccucaggguggcaucagaucuu

SEQ ID NO: 807357 - RNA, 22 nt, Human
ucucacagccauuucucccucu

SEQ ID NO: 807358 - RNA, 22 nt, Human
gaaacauuggucugccccuuau

SEQ ID NO: 807359 - RNA, 22 nt, Human
aggccaggggugagcacuucug

SEQ ID NO: 807360 - RNA, 22 nt, Human
gggaaggcaggauucucuggug

SEQ ID NO: 807361 - RNA, 22 nt, Human
ccucucggcagcccaucuuguc

SEQ ID NO: 807362 - RNA, 22 nt, Human
cagggguguuuuuggccaggag

SEQ ID NO: 807363 - RNA, 22 nt, Human
cagugcugcaucuccaugccag

SEQ ID NO: 807364 - RNA, 22 nt, Human
uccugcagcugaagcucaugug

SEQ ID NO: 807365 - RNA, 22 nt, Human
cuacuucugugaugaaacuaca

SEQ ID NO: 807366 - RNA, 22 nt, Human
agcuuucuaccagguccugucu

SEQ ID NO: 807367 - RNA, 22 nt, Human
ugcuuauuuagguagauauuaa

SEQ ID NO: 807368 - RNA, 22 nt, Human
agcagcuucuuucacuccugga

SEQ ID NO: 807369 - RNA, 22 nt, Human
ccaggcagagggaauagcaagu

SEQ ID NO: 807370 - RNA, 22 nt, Human
uaaagcacaguaugagcauugg

SEQ ID NO: 807371 - RNA, 22 nt, Human
uucacugugauggugcagaggc

SEQ ID NO: 807372 - RNA, 22 nt, Human
ggaagaaaucugguuaagagau

SEQ ID NO: 807373 - RNA, 22 nt, Human
cccaggaugucgaggcugcagu

SEQ ID NO: 807374 - RNA, 21 nt, Human
auuugcauuaaaauauuacgc

SEQ ID NO: 807375 - RNA, 22 nt, Human
gggugaagcuccugcaggggcc

SEQ ID NO: 807376 - RNA, 22 nt, Human
caggcuggagugcaauggcaca

SEQ ID NO: 807377 - RNA, 22 nt, Human
guggaucuacuguaugggauag

SEQ ID NO: 807378 - RNA, 22 nt, Human
ggaagggcaaaagagaugaacu

SEQ ID NO: 807379 - RNA, 23 nt, Human
cucccuggcccuugggagaccug

SEQ ID NO: 807380 - RNA, 22 nt, Human
auauuuuguaacuuggaauagg

SEQ ID NO: 807381 - RNA, 23 nt, Human
ugcugccaagcacgaguugaguu

SEQ ID NO: 807382 - RNA, 21 nt, Human
gccauguuuccuuacuaagag

SEQ ID NO: 807383 - RNA, 22 nt, Human
uuucucuggcauuagguauaaa

SEQ ID NO: 807384 - RNA, 22 nt, Human
caucugucuuuuguuacaaggc

SEQ ID NO: 807385 - RNA, 22 nt, Human
agugucugccugggaggagcau

SEQ ID NO: 807386 - RNA, 22 nt, Human
augcaaaugcuagagaauguug

SEQ ID NO: 807387 - RNA, 22 nt, Human
uccacagguaugaggccccacc

SEQ ID NO: 807388 - RNA, 20 nt, Human
ucagugucaguagccacuac

SEQ ID NO: 807389 - RNA, 22 nt, Human
uucuaaacuucaauucuaaauu

SEQ ID NO: 807390 - RNA, 22 nt, Human
auuuacugcuugacacauuggu

SEQ ID NO: 807391 - RNA, 22 nt, Human
ggccugagucacaucaggagag

SEQ ID NO: 807392 - RNA, 22 nt, Human
aggaggguucucuggacagagg

SEQ ID NO: 807393 - RNA, 22 nt, Human
ggucagaagugcaaaaucaguu

SEQ ID NO: 807394 - RNA, 22 nt, Human
cagauuaguugugcuauggccu

SEQ ID NO: 807395 - RNA, 22 nt, Human
agaagccauugaagcagaccuc

SEQ ID NO: 807396 - RNA, 22 nt, Human
cagcugagcucccaggccauca

SEQ ID NO: 807397 - RNA, 22 nt, Human
aaacacauuagcccuguggaaa

SEQ ID NO: 807398 - RNA, 22 nt, Human
uugcugaugguauuaugcuagu

SEQ ID NO: 807399 - RNA, 22 nt, Human
ccaggcugcucacaagcugccc

SEQ ID NO: 807400 - RNA, 22 nt, Human
uggcagcugaauggcuggaugg

SEQ ID NO: 807401 - RNA, 22 nt, Human
aucacaguuuacaaaccugcug

SEQ ID NO: 807402 - RNA, 22 nt, Human
caacacagggguuaugccaugg

SEQ ID NO: 807403 - RNA, 20 nt, Human
cagagcagugcccaggcggc

SEQ ID NO: 807404 - RNA, 18 nt, Human
guggaggguucucagaau

SEQ ID NO: 807405 - RNA, 22 nt, Human
ccugcuggcgcuugucugggag

SEQ ID NO: 807406 - RNA, 22 nt, Human
ucccaggaauugaagccagugu

SEQ ID NO: 807407 - RNA, 22 nt, Human
ccagggcucuaugaggguggag

SEQ ID NO: 807408 - RNA, 22 nt, Human
gccuuucacagagauuuaaaaa

SEQ ID NO: 807409 - RNA, 22 nt, Human
uguuugaauaacuuggauauau

SEQ ID NO: 807410 - RNA, 22 nt, Human
gcagaggcugggugucccaguc

SEQ ID NO: 807411 - RNA, 22 nt, Human
agaaaaugugaacuugugaauu

SEQ ID NO: 807412 - RNA, 22 nt, Human
auucaacuauguauagucuucu

SEQ ID NO: 807413 - RNA, 22 nt, Human
caggaugggugucggccagcac

SEQ ID NO: 807414 - RNA, 22 nt, Human
uuccagagcuuugcgcuuggaa

SEQ ID NO: 807415 - RNA, 22 nt, Human
uacagagaggugacccuugggc

SEQ ID NO: 807416 - RNA, 22 nt, Human
auaaaucuauuggacaugugug

SEQ ID NO: 807417 - RNA, 20 nt, Human
uggcccaguggggcagggug

SEQ ID NO: 807418 - RNA, 22 nt, Human
guuuaguguuucaagacucuuu

SEQ ID NO: 807419 - RNA, 22 nt, Human
uuuggaauauuaaaaugucuca

SEQ ID NO: 807420 - RNA, 22 nt, Human
agcaggcuccaggcuggccauc

SEQ ID NO: 807421 - RNA, 22 nt, Human
uuacacaacaucuguauuauua

SEQ ID NO: 807422 - RNA, 22 nt, Human
ucagaaguccaauaccauggga

SEQ ID NO: 807423 - RNA, 22 nt, Human
ucacaucaggugucuccccaag

SEQ ID NO: 807424 - RNA, 22 nt, Human
ugucacagucucgugagcaucu

SEQ ID NO: 807425 - RNA, 23 nt, Human
uuucacauuaauguuuagcagga

SEQ ID NO: 807426 - RNA, 22 nt, Human
gcuggcuggaacuagcaguugg

SEQ ID NO: 807427 - RNA, 22 nt, Human
cacaggcaccccugacugcuca

SEQ ID NO: 807428 - RNA, 22 nt, Human
augccaaauucuacuuucagca

SEQ ID NO: 807429 - RNA, 22 nt, Human
uugcaaaucacaagagcagagc

SEQ ID NO: 807430 - RNA, 22 nt, Human
uaaacaagaaacauuuucuguu

SEQ ID NO: 807431 - RNA, 22 nt, Human
gcacagggccuggcacauaaga

SEQ ID NO: 807432 - RNA, 19 nt, Human
gccuaugucuucaaaucau

SEQ ID NO: 807433 - RNA, 18 nt, Human
ucaggcugggccuccuuc

SEQ ID NO: 807434 - RNA, 22 nt, Human
gauaaacacaaggugauuucau

SEQ ID NO: 807435 - RNA, 22 nt, Human
aaggcuggcaauauauuuguua

SEQ ID NO: 807436 - RNA, 22 nt, Human
gacauuagacuaauguagcauu

SEQ ID NO: 807437 - RNA, 22 nt, Human
ccuccuggaggcucuaagggag

SEQ ID NO: 807438 - RNA, 22 nt, Human
aggccacauagcuugcauguag

SEQ ID NO: 807439 - RNA, 22 nt, Human
cagcuugggggcgcuggccuca

SEQ ID NO: 807440 - RNA, 22 nt, Human
acaaaucuguuuuauagacuuu

SEQ ID NO: 807441 - RNA, 22 nt, Human
ugacuucuagcauuuagcaacc

SEQ ID NO: 807442 - RNA, 22 nt, Human
uccacaagaugauaaagagagg

SEQ ID NO: 807443 - RNA, 22 nt, Human
ucaaggaagggauauucuugaa

SEQ ID NO: 807444 - RNA, 22 nt, Human
cucccucagaggagcaccuguu

SEQ ID NO: 807445 - RNA, 17 nt, Human
ugcaggcuccugucccu

SEQ ID NO: 807446 - RNA, 22 nt, Human
gggaggcgccgaggguagcuaa

SEQ ID NO: 807447 - RNA, 22 nt, Human
agugucauuuccacgacauuca

SEQ ID NO: 807448 - RNA, 22 nt, Human
aggugagggugccagugcaugg

SEQ ID NO: 807449 - RNA, 20 nt, Human
uuucuguagcucaguauuca

SEQ ID NO: 807450 - RNA, 22 nt, Human
ugacaaauguuaauucagugga

SEQ ID NO: 807451 - RNA, 19 nt, Human
aagauuuggucauugauaa

SEQ ID NO: 807452 - RNA, 17 nt, Human
ccaggagagaugcuugu

SEQ ID NO: 807453 - RNA, 21 nt, Human
uuucucauaaaauacucauua

SEQ ID NO: 807454 - RNA, 22 nt, Human
ggacaggcccggggagccugga

SEQ ID NO: 807455 - RNA, 22 nt, Human
uaugagaaauugcugauauuug

SEQ ID NO: 807456 - RNA, 22 nt, Human
uaaucacaauucagaugucuua

SEQ ID NO: 807457 - RNA, 22 nt, Human
gagaggcaggaauccuggguga

SEQ ID NO: 807458 - RNA, 22 nt, Human
ggugucaaaauaccauuucagg

SEQ ID NO: 807459 - RNA, 22 nt, Human
auagaauuuguacuuguagaac

SEQ ID NO: 807460 - RNA, 22 nt, Human
cuuguuuucuucugcagucuau

SEQ ID NO: 807461 - RNA, 23 nt, Human
aggcaaggguguaaaggaaauga

SEQ ID NO: 807462 - RNA, 22 nt, Human
uagucagauauaugacuuacgu

SEQ ID NO: 807463 - RNA, 22 nt, Human
gaguccuggaacccugaaugcu

SEQ ID NO: 807464 - RNA, 22 nt, Human
ucaggcuguuccuguccaaaau

SEQ ID NO: 807465 - RNA, 22 nt, Human
aagacaauguuucugauagaua

SEQ ID NO: 807466 - RNA, 22 nt, Human
auacccuuuacaggaacagcaa

SEQ ID NO: 807467 - RNA, 22 nt, Human
caaguuguuuaggagguguugu

SEQ ID NO: 807468 - RNA, 19 nt, Human
aaucaggagccuaauuagg

SEQ ID NO: 807469 - RNA, 22 nt, Human
cugggggcagcaagaagccaug

SEQ ID NO: 807470 - RNA, 22 nt, Human
ucucacagcaggggccaggucu

SEQ ID NO: 807471 - RNA, 22 nt, Human
cuacacuagaguugcaauggaa

SEQ ID NO: 807472 - RNA, 22 nt, Human
cuccugucaauaggcuccuggc

SEQ ID NO: 807473 - RNA, 18 nt, Human
ccucaggggaccuggcag

SEQ ID NO: 807474 - RNA, 22 nt, Human
uccagggacacagaguccuucu

SEQ ID NO: 807475 - RNA, 22 nt, Human
aagaacauugauauugucuaug

SEQ ID NO: 807476 - RNA, 22 nt, Human
uccuccccucagggcaacggau

SEQ ID NO: 807477 - RNA, 22 nt, Human
gggcaaggcagaagaguuggag

SEQ ID NO: 807478 - RNA, 22 nt, Human
guaaacaucagccacucuauuu

SEQ ID NO: 807479 - RNA, 22 nt, Human
cuggagucucuucuguagcuac

SEQ ID NO: 807480 - RNA, 22 nt, Human
ccuguguccuaauccaucaggc

SEQ ID NO: 807481 - RNA, 19 nt, Human
ccauuguaaagaaaaaugu

SEQ ID NO: 807482 - RNA, 19 nt, Human
ggcuccuguggcugcagcc

SEQ ID NO: 807483 - RNA, 22 nt, Human
ggagccugcgggagcucccauu

SEQ ID NO: 807484 - RNA, 22 nt, Human
guuuuuacuaagguugcuaagu

SEQ ID NO: 807485 - RNA, 22 nt, Human
acuccugguuuguguccuggcu

SEQ ID NO: 807486 - RNA, 22 nt, Human
aaaggcucuaacaaggagagag

SEQ ID NO: 807487 - RNA, 22 nt, Human
ggagccagaguuuaauguggag

SEQ ID NO: 807488 - RNA, 22 nt, Human
accccaggucaucugagagucc

SEQ ID NO: 807489 - RNA, 22 nt, Human
agucuucugcucugucacuaac

SEQ ID NO: 807490 - RNA, 22 nt, Human
uugcaaauuauuuuagucccuu

SEQ ID NO: 807491 - RNA, 22 nt, Human
accaggcugugaagugagacua

SEQ ID NO: 807492 - RNA, 22 nt, Human
gaggccauaagaaguucuuggg

SEQ ID NO: 807493 - RNA, 22 nt, Human
ggcaggcagaaaaauagaauau

SEQ ID NO: 807494 - RNA, 23 nt, Human
ugggguugaauuguagcugugcc

SEQ ID NO: 807495 - RNA, 22 nt, Human
auaugggggggcgugcagagga

SEQ ID NO: 807496 - RNA, 22 nt, Human
uggcccugcuggacacgccugc

SEQ ID NO: 807497 - RNA, 22 nt, Human
caucacaaauguaauaaugucu

SEQ ID NO: 807498 - RNA, 22 nt, Human
agucucuuaauuuuuucuaagu

SEQ ID NO: 807499 - RNA, 22 nt, Human
auagaaacagaggucaggcauu

SEQ ID NO: 807500 - RNA, 22 nt, Human
cugugcuugcggguguggagcc

SEQ ID NO: 807501 - RNA, 22 nt, Human
agaaauguucuucauuugccau

SEQ ID NO: 807502 - RNA, 22 nt, Human
ucaggauccauagacucccaaa

SEQ ID NO: 807503 - RNA, 23 nt, Human
ugccagcagggaaugggaaggac

SEQ ID NO: 807504 - RNA, 22 nt, Human
ucuccuggagcaggaagguggg

SEQ ID NO: 807505 - RNA, 22 nt, Human
acuuagcugugugauuuccauu

SEQ ID NO: 807506 - RNA, 22 nt, Human
ccucagcauccucaugcucagu

SEQ ID NO: 807507 - RNA, 22 nt, Human
cugcugagaaaagacugaggga

SEQ ID NO: 807508 - RNA, 22 nt, Human
agggcagcggugcuuguguuau

SEQ ID NO: 807509 - RNA, 22 nt, Human
aaagugcauucgaaaguccauc

SEQ ID NO: 807510 - RNA, 22 nt, Human
uuuucuccuuucaagauagcau

SEQ ID NO: 807511 - RNA, 23 nt, Human
uauacacauguggcaguauagug

SEQ ID NO: 807512 - RNA, 22 nt, Human
cuggaaggcagagguugcagug

SEQ ID NO: 807513 - RNA, 22 nt, Human
ucacaagauauuucaguccuuu

SEQ ID NO: 807514 - RNA, 22 nt, Human
uguggaaaaaccacaaguuugg

SEQ ID NO: 807515 - RNA, 22 nt, Human
aguucuuucuagacacguagac

SEQ ID NO: 807516 - RNA, 22 nt, Human
aggccuggccuuuauguucaag

SEQ ID NO: 807517 - RNA, 22 nt, Human
aaauuuuguauucuaguucuag

SEQ ID NO: 807518 - RNA, 22 nt, Human
gagaggcugauccugcagagaa

SEQ ID NO: 807519 - RNA, 22 nt, Human
ucagcaaggcugcauucucauc

SEQ ID NO: 807520 - RNA, 22 nt, Human
gucccaggcagagucaggaggg

SEQ ID NO: 807521 - RNA, 22 nt, Human
gcagcuggugcaaaugucacuc

SEQ ID NO: 807522 - RNA, 23 nt, Human
cagaagacagucucaagacaagg

SEQ ID NO: 807523 - RNA, 22 nt, Human
ggugggugaaaucuaggugugu

SEQ ID NO: 807524 - RNA, 22 nt, Human
uggaagucccuguguguggccu

SEQ ID NO: 807525 - RNA, 20 nt, Human
ugucugaaaaggaagcuauc

SEQ ID NO: 807526 - RNA, 16 nt, Human
cagcuuugucuccucg

SEQ ID NO: 807527 - RNA, 22 nt, Human
ggagaugggggauuuuacagcg

SEQ ID NO: 807528 - RNA, 22 nt, Human
ugggccagcaauugcugcucag

SEQ ID NO: 807529 - RNA, 22 nt, Human
aacaguaguauuuaaacugaac

SEQ ID NO: 807530 - RNA, 22 nt, Human
uuuuaugucauaaggacacuca

SEQ ID NO: 807531 - RNA, 22 nt, Human
agcaggaggguuuuguagaguc

SEQ ID NO: 807532 - RNA, 22 nt, Human
gugcaauauugccauguucuug

SEQ ID NO: 807533 - RNA, 22 nt, Human
agcagaaaacuuucaugcucug

SEQ ID NO: 807534 - RNA, 22 nt, Human
gcagggaccuaugacgauggaa

SEQ ID NO: 807535 - RNA, 22 nt, Human
aucaugcugacacaguuuaucu

SEQ ID NO: 807536 - RNA, 22 nt, Human
cuuauacacccucuucccaggc

SEQ ID NO: 807537 - RNA, 22 nt, Human
guuauauaagacaaaucagagu

SEQ ID NO: 807538 - RNA, 22 nt, Human
gucaacuugcaagaugcugggc

SEQ ID NO: 807539 - RNA, 22 nt, Human
uaaagacaauuucgagcuguag

SEQ ID NO: 807540 - RNA, 22 nt, Human
ucaguuuuaagguuugagaauu

SEQ ID NO: 807541 - RNA, 22 nt, Human
aaggccucuucucucuggagau

SEQ ID NO: 807542 - RNA, 22 nt, Human
gugccagggggcacugaacaga

SEQ ID NO: 807543 - RNA, 18 nt, Human
acagggagggcgcugggg

SEQ ID NO: 807544 - RNA, 22 nt, Human
acuuuggacaauuuauuacugu

SEQ ID NO: 807545 - RNA, 22 nt, Human
gcaggcaccacggcucaggucu

SEQ ID NO: 807546 - RNA, 22 nt, Human
uuucuacaugucaauccaaacc

SEQ ID NO: 807547 - RNA, 22 nt, Human
ugccaggauggccagggggcca

SEQ ID NO: 807548 - RNA, 22 nt, Human
acaggcuuacaggcugcaagua

SEQ ID NO: 807549 - RNA, 22 nt, Human
auacaaguugugauaauguaaa

SEQ ID NO: 807550 - RNA, 22 nt, Human
cagcugcuuucagcaggaggga

SEQ ID NO: 807551 - RNA, 22 nt, Human
ugggccagaggcauggagcuau

SEQ ID NO: 807552 - RNA, 22 nt, Human
acaugcaagccccugaacacau

SEQ ID NO: 807553 - RNA, 22 nt, Human
ugucauggacagauuagaugag

SEQ ID NO: 807554 - RNA, 23 nt, Human
uucuucagccuuauagcccuggg

SEQ ID NO: 807555 - RNA, 23 nt, Human
gggaccaggcccuuccugguuug

SEQ ID NO: 807556 - RNA, 22 nt, Human
aaaguagcccuucuggaauuua

SEQ ID NO: 807557 - RNA, 22 nt, Human
aacccaggguggagguugcagu

SEQ ID NO: 807558 - RNA, 22 nt, Human
ugcccagccaguuuaugguaau

SEQ ID NO: 807559 - RNA, 22 nt, Human
gcuccaggagagggaagcagau

SEQ ID NO: 807560 - RNA, 22 nt, Human
acacacagcgccuaccaugugc

SEQ ID NO: 807561 - RNA, 22 nt, Human
uccuuuuuaagucguuguggua

SEQ ID NO: 807562 - RNA, 22 nt, Human
acuaaacauucuugucucucaa

SEQ ID NO: 807563 - RNA, 22 nt, Human
aacaauguucuuuuagcuugaa

SEQ ID NO: 807564 - RNA, 22 nt, Human
cuuuggaaucauugcuuauuca

SEQ ID NO: 807565 - RNA, 22 nt, Human
gccucugcugcaagccugguug

SEQ ID NO: 807566 - RNA, 22 nt, Human
guuccugggaggcaugggcugg

SEQ ID NO: 807567 - RNA, 22 nt, Human
uagggcaggugaagaaaagcua

SEQ ID NO: 807568 - RNA, 23 nt, Human
ccaguaaacccuuccucaguguc

SEQ ID NO: 807569 - RNA, 22 nt, Human
auuuucaguguaaauguuuuau

SEQ ID NO: 807570 - RNA, 22 nt, Human
cugacagcugcugccgccgcau

SEQ ID NO: 807571 - RNA, 22 nt, Human
cuggcugggguccauccucuaa

SEQ ID NO: 807572 - RNA, 22 nt, Human
uuccccucucagaucuggccua

SEQ ID NO: 807573 - RNA, 22 nt, Human
gaacacagcggggcuuacccgg

SEQ ID NO: 807574 - RNA, 22 nt, Human
uaggcaugcaaauaaaugugca

SEQ ID NO: 807575 - RNA, 22 nt, Human
cagaagccuaaauagugcacca

SEQ ID NO: 807576 - RNA, 22 nt, Human
guguucuuuauuuagugaugcu

SEQ ID NO: 807577 - RNA, 22 nt, Human
ugagcauuggaucaaaugacuu

SEQ ID NO: 807578 - RNA, 22 nt, Human
aggcacaggaaugucauccagu

SEQ ID NO: 807579 - RNA, 22 nt, Human
uggccccuggcacacggaggau

SEQ ID NO: 807580 - RNA, 22 nt, Human
ugcuggaaaguuaaauuuugga

SEQ ID NO: 807581 - RNA, 22 nt, Human
ugaggcuggcaaggcugguauu

SEQ ID NO: 807582 - RNA, 22 nt, Human
ucagaggagcaaaagaggggau

SEQ ID NO: 807583 - RNA, 22 nt, Human
gagcuuugcauuauucagaagc

SEQ ID NO: 807584 - RNA, 22 nt, Human
uugagaagguggucauuugcaa

SEQ ID NO: 807585 - RNA, 22 nt, Human
uuauuucuugucuauguagcca

SEQ ID NO: 807586 - RNA, 22 nt, Human
gagguagggcagaggcugaaug

SEQ ID NO: 807587 - RNA, 22 nt, Human
gguccaggaucaaggcaucacc

SEQ ID NO: 807588 - RNA, 22 nt, Human
uauuagaaagcuuaauaucgug

SEQ ID NO: 807589 - RNA, 22 nt, Human
aauagcaaacagacaugcacaa

SEQ ID NO: 807590 - RNA, 22 nt, Human
acacauucuuuaaaugucuguu

SEQ ID NO: 807591 - RNA, 20 nt, Human
uccugggguaagccaugguc

SEQ ID NO: 807592 - RNA, 23 nt, Human
aauuaccaugcaacuugugaaac

SEQ ID NO: 807593 - RNA, 22 nt, Human
ugcacuggggucccagcgcacg

SEQ ID NO: 807594 - RNA, 22 nt, Human
aguauuuguugauugauaugaa

SEQ ID NO: 807595 - RNA, 22 nt, Human
cccagggacagaugggcagcua

SEQ ID NO: 807596 - RNA, 22 nt, Human
aagacaagccuuguuuuucugc

SEQ ID NO: 807597 - RNA, 22 nt, Human
auggaggaugugcagcaugggc

SEQ ID NO: 807598 - RNA, 17 nt, Human
uuacaacaauucaugag

SEQ ID NO: 807599 - RNA, 17 nt, Human
caggcagacauguaagc

SEQ ID NO: 807600 - RNA, 22 nt, Human
uucaacuagaggugauuuugcc

SEQ ID NO: 807601 - RNA, 22 nt, Human
acuguuuuccuaaugagcaaga

SEQ ID NO: 807602 - RNA, 22 nt, Human
aaguucacagaagauuccaauu

SEQ ID NO: 807603 - RNA, 22 nt, Human
agagcuggaagcugcucuuaga

SEQ ID NO: 807604 - RNA, 22 nt, Human
agcuucaacuuacuaaaagaua

SEQ ID NO: 807605 - RNA, 22 nt, Human
acagauaauuagcauaaaugcu

SEQ ID NO: 807606 - RNA, 22 nt, Human
cagcugagucugagguucuuug

SEQ ID NO: 807607 - RNA, 22 nt, Human
gaguggcauaugugccugugaa

SEQ ID NO: 807608 - RNA, 22 nt, Human
uuaagucaauaucaaucucagc

SEQ ID NO: 807609 - RNA, 23 nt, Human
ucucauuucccuugaucuaucuu

SEQ ID NO: 807610 - RNA, 22 nt, Human
uacaaaguauauuucuagcugu

SEQ ID NO: 807611 - RNA, 22 nt, Human
gccucucugggcugccgaggcu

SEQ ID NO: 807612 - RNA, 22 nt, Human
auauuucaugggguuccauacu

SEQ ID NO: 807613 - RNA, 22 nt, Human
gcagaggauagcauaugaaccu

SEQ ID NO: 807614 - RNA, 22 nt, Human
gaaauacaaagccagccauuuu

SEQ ID NO: 807615 - RNA, 22 nt, Human
cagugcaauuacaagcuaauuc

SEQ ID NO: 807616 - RNA, 22 nt, Human
auauauacaacuagauuaaaag

SEQ ID NO: 807617 - RNA, 22 nt, Human
uccagggcaggugcugggcucu

SEQ ID NO: 807618 - RNA, 22 nt, Human
aucuuuggugcaugauacuuug

SEQ ID NO: 807619 - RNA, 22 nt, Human
ggcuggcaagugucugcucaug

SEQ ID NO: 807620 - RNA, 22 nt, Human
aguaaauuauuuagcuuccaga

SEQ ID NO: 807621 - RNA, 22 nt, Human
ugugucaaggcaucagcccagc

SEQ ID NO: 807622 - RNA, 22 nt, Human
gcuuuggaugugugccugaggu

SEQ ID NO: 807623 - RNA, 22 nt, Human
agcaacuauauugaaagccacc

SEQ ID NO: 807624 - RNA, 19 nt, Human
cuuccuggaggagagccuc

SEQ ID NO: 807625 - RNA, 22 nt, Human
agcagagcuuuuuggacucaga

SEQ ID NO: 807626 - RNA, 22 nt, Human
uaaauuagagccagguaaguuu

SEQ ID NO: 807627 - RNA, 22 nt, Human
aggcagggcucauuucuuaggc

SEQ ID NO: 807628 - RNA, 22 nt, Human
aaacucuaagacacuguacaau

SEQ ID NO: 807629 - RNA, 22 nt, Human
cagucccacaagaucuccacaa

SEQ ID NO: 807630 - RNA, 22 nt, Human
caugcuauuuauacauaagucu

SEQ ID NO: 807631 - RNA, 22 nt, Human
uuugaaaacuuaauuuggucgu

SEQ ID NO: 807632 - RNA, 23 nt, Human
acagagacaaugguuucaucuug

SEQ ID NO: 807633 - RNA, 22 nt, Human
uugggagauggggagauaauau

SEQ ID NO: 807634 - RNA, 22 nt, Human
auaaaauuugcuacuguuaaau

SEQ ID NO: 807635 - RNA, 22 nt, Human
gcuguauuuauuuucuaggguu

SEQ ID NO: 807636 - RNA, 22 nt, Human
cagaggcugaugugggaugggc

SEQ ID NO: 807637 - RNA, 22 nt, Human
agacaggccacucuggucuggu

SEQ ID NO: 807638 - RNA, 22 nt, Human
ccuggcugaacaaagucccucc

SEQ ID NO: 807639 - RNA, 22 nt, Human
agagucagcuuaugacacaguc

SEQ ID NO: 807640 - RNA, 22 nt, Human
gagggaggcaucaugaauccag

SEQ ID NO: 807641 - RNA, 22 nt, Human
aaugucugaaaaucagacugca

SEQ ID NO: 807642 - RNA, 22 nt, Human
ugagcuggcuugucaaccaggg

SEQ ID NO: 807643 - RNA, 22 nt, Human
agucuuauaucacuaugcucug

SEQ ID NO: 807644 - RNA, 22 nt, Human
gaaauauacauugcaggaagag

SEQ ID NO: 807645 - RNA, 22 nt, Human
agccagaaaaacaccaagagga

SEQ ID NO: 807646 - RNA, 22 nt, Human
aauauuaauagaagggguucua

SEQ ID NO: 807647 - RNA, 22 nt, Human
guuacaaauguaaauucugggg

SEQ ID NO: 807648 - RNA, 22 nt, Human
uaacaacucaguuuguuccuug

SEQ ID NO: 807649 - RNA, 17 nt, Human
aggccucccuccaggcc

SEQ ID NO: 807650 - RNA, 22 nt, Human
uggaaccaucaaagagauccug

SEQ ID NO: 807651 - RNA, 22 nt, Human
aaugucugcucuacucaggagg

SEQ ID NO: 807652 - RNA, 22 nt, Human
cagcuuugaaacauggcucuag

SEQ ID NO: 807653 - RNA, 22 nt, Human
uuauuuaaaagugguaagauuc

SEQ ID NO: 807654 - RNA, 22 nt, Human
uacacaugcauguacuccagga

SEQ ID NO: 807655 - RNA, 22 nt, Human
caguaaggaugcacauaacuag

SEQ ID NO: 807656 - RNA, 22 nt, Human
ucuaucuggccccuuuuauaua

SEQ ID NO: 807657 - RNA, 22 nt, Human
gugugcagggggccagcgcagc

SEQ ID NO: 807658 - RNA, 22 nt, Human
uuccaggauagcuuucaggaau

SEQ ID NO: 807659 - RNA, 22 nt, Human
uccagagagccacggacagggg

SEQ ID NO: 807660 - RNA, 22 nt, Human
ccugugccagcugggcccugcc

SEQ ID NO: 807661 - RNA, 22 nt, Human
cuucuucagaggccagccucug

SEQ ID NO: 807662 - RNA, 22 nt, Human
gggccccacuggggcugccugc

SEQ ID NO: 807663 - RNA, 22 nt, Human
agagccuguuuugugggagaug

SEQ ID NO: 807664 - RNA, 22 nt, Human
uuuaaaaaacuagucugagucu

SEQ ID NO: 807665 - RNA, 17 nt, Human
aggcuggccuucacagu

SEQ ID NO: 807666 - RNA, 22 nt, Human
agaaacucauccuggagaugac

SEQ ID NO: 807667 - RNA, 22 nt, Human
agccaggcucaaggccugcucc

SEQ ID NO: 807668 - RNA, 22 nt, Human
gcuggaggaucacuugagccca

SEQ ID NO: 807669 - RNA, 22 nt, Human
ugcccaggcuucacccucagag

SEQ ID NO: 807670 - RNA, 22 nt, Human
gcacugggaaugugagcagcug

SEQ ID NO: 807671 - RNA, 22 nt, Human
gcaggucuugaaggugugauuu

SEQ ID NO: 807672 - RNA, 22 nt, Human
aauucacaaaaccagauugcuu

SEQ ID NO: 807673 - RNA, 22 nt, Human
aaacauagauaauagauagaug

SEQ ID NO: 807674 - RNA, 22 nt, Human
ugcuggaguucgacauugcaaa

SEQ ID NO: 807675 - RNA, 22 nt, Human
uugaccacugaaugguucugaa

SEQ ID NO: 807676 - RNA, 22 nt, Human
ccaggcacuuguuugccaggca

SEQ ID NO: 807677 - RNA, 22 nt, Human
aacugcaauaacuugugcacca

SEQ ID NO: 807678 - RNA, 19 nt, Human
ugggccucucauaucugcc

SEQ ID NO: 807679 - RNA, 22 nt, Human
ggcugaggguauagcuguccca

SEQ ID NO: 807680 - RNA, 22 nt, Human
agacagggucuugaucagagcu

SEQ ID NO: 807681 - RNA, 22 nt, Human
aggcucaagcacugauauuuuu

SEQ ID NO: 807682 - RNA, 22 nt, Human
cacauaaauggugccauguuuu

SEQ ID NO: 807683 - RNA, 23 nt, Human
uggacaggguaacuggugguuuu

SEQ ID NO: 807684 - RNA, 22 nt, Human
caguuauuuugaggauuaaaug

SEQ ID NO: 807685 - RNA, 22 nt, Human
acagaaauucaaacuggaauuu

SEQ ID NO: 807686 - RNA, 22 nt, Human
aggaaggguucuuucuguuuau

SEQ ID NO: 807687 - RNA, 22 nt, Human
gcuggcaggagaaacggggugc

SEQ ID NO: 807688 - RNA, 22 nt, Human
caggguggccagguagauaaua

SEQ ID NO: 807689 - RNA, 22 nt, Human
uccccaggaaauucugauucuu

SEQ ID NO: 807690 - RNA, 22 nt, Human
gcuggcucgggaagcaggggau

SEQ ID NO: 807691 - RNA, 22 nt, Human
gaaauuuauuaucuacaucauu

SEQ ID NO: 807692 - RNA, 22 nt, Human
uagcuuugccuguuaaucacaa

SEQ ID NO: 807693 - RNA, 23 nt, Human
uuuagucaguugacagccauaua

SEQ ID NO: 807694 - RNA, 22 nt, Human
uucugaaaacacacuuugcagc

SEQ ID NO: 807695 - RNA, 22 nt, Human
gcuggcagagagcuggugagga

SEQ ID NO: 807696 - RNA, 22 nt, Human
aggcagcuuucagugucucuca

SEQ ID NO: 807697 - RNA, 21 nt, Human
cuggaggcagguggugccagg

SEQ ID NO: 807698 - RNA, 22 nt, Human
gcauggcagccaguacauggug

SEQ ID NO: 807699 - RNA, 22 nt, Human
uagccagugaauguuuccagug

SEQ ID NO: 807700 - RNA, 22 nt, Human
uggcagauaaaauaauagggaa

SEQ ID NO: 807701 - RNA, 22 nt, Human
aaguaaauguuggagcucaaau

SEQ ID NO: 807702 - RNA, 22 nt, Human
acccagccacagcauugaggga

SEQ ID NO: 807703 - RNA, 22 nt, Human
uagaaacaaugacaugcuugua

SEQ ID NO: 807704 - RNA, 22 nt, Human
uucuggauuauguguaagugaa

SEQ ID NO: 807705 - RNA, 22 nt, Human
ggcuaggggaauaaucuguggu

SEQ ID NO: 807706 - RNA, 22 nt, Human
augaaggcaguuuuauaagauu

SEQ ID NO: 807707 - RNA, 22 nt, Human
ggcucagcaaugaugagccccu

SEQ ID NO: 807708 - RNA, 22 nt, Human
uggggcugucccgguuuggcga

SEQ ID NO: 807709 - RNA, 22 nt, Human
auuaauuuuucugacagccaca

SEQ ID NO: 807710 - RNA, 22 nt, Human
uccaggcaaagugcugggcugc

SEQ ID NO: 807711 - RNA, 19 nt, Human
caguggagauuggaggagg

SEQ ID NO: 807712 - RNA, 22 nt, Human
gcucaggaaggcucaaccagga

SEQ ID NO: 807713 - RNA, 22 nt, Human
ugcaauaaguauugcuuacaug

SEQ ID NO: 807714 - RNA, 22 nt, Human
uggagccagcgagccgaggcgg

SEQ ID NO: 807715 - RNA, 22 nt, Human
gaggcagcugggcuggugguuu

SEQ ID NO: 807716 - RNA, 22 nt, Human
cugccagcucaccggcucagac

SEQ ID NO: 807717 - RNA, 20 nt, Human
uuuauucacagagaagaguu

SEQ ID NO: 807718 - RNA, 22 nt, Human
acauuucagauguaaugugaug

SEQ ID NO: 807719 - RNA, 22 nt, Human
guugcugcaaaggaguguaggu

SEQ ID NO: 807720 - RNA, 22 nt, Human
ucacaggguaucugggauggau

SEQ ID NO: 807721 - RNA, 23 nt, Human
agguuaugauuauagagcgagga

SEQ ID NO: 807722 - RNA, 22 nt, Human
aguacaaaggcccuugauuacu

SEQ ID NO: 807723 - RNA, 22 nt, Human
aggcaguguucuucuaagggca

SEQ ID NO: 807724 - RNA, 22 nt, Human
uugcaaaugguaccaagggucu

SEQ ID NO: 807725 - RNA, 22 nt, Human
aagcagggcuagaccaagaaga

SEQ ID NO: 807726 - RNA, 22 nt, Human
ucauauauuuuggcagugauca

SEQ ID NO: 807727 - RNA, 22 nt, Human
ugggccagggcacccaguccag

SEQ ID NO: 807728 - RNA, 23 nt, Human
ugcuggcuguguuauugccaaca

SEQ ID NO: 807729 - RNA, 22 nt, Human
gugaggagcugacacuggggug

SEQ ID NO: 807730 - RNA, 23 nt, Human
cccuggccuuggggcacaggcug

SEQ ID NO: 807731 - RNA, 22 nt, Human
ugugucuuuggcgaugucugga

SEQ ID NO: 807732 - RNA, 22 nt, Human
cauguauugaagugugcaucug

SEQ ID NO: 807733 - RNA, 22 nt, Human
acaucaucgugcacauacauaa

SEQ ID NO: 807734 - RNA, 23 nt, Human
ggguccagagacaggcaugggug

SEQ ID NO: 807735 - RNA, 22 nt, Human
caucacaguuugucagaaauca

SEQ ID NO: 807736 - RNA, 22 nt, Human
gcagagauccuugcuggaugac

SEQ ID NO: 807737 - RNA, 22 nt, Human
ugcaauaacuacuuuaauguug

SEQ ID NO: 807738 - RNA, 22 nt, Human
cagcaggccaugcugcuuuuca

SEQ ID NO: 807739 - RNA, 22 nt, Human
caggaaauuuaagaguguacaa

SEQ ID NO: 807740 - RNA, 22 nt, Human
ggauguucugggguucucuugu

SEQ ID NO: 807741 - RNA, 22 nt, Human
uucuucagagaguagaagcaag

SEQ ID NO: 807742 - RNA, 22 nt, Human
uuaacauuguccuuagcagauu

SEQ ID NO: 807743 - RNA, 22 nt, Human
aaguguuuacuuaaagucaugg

SEQ ID NO: 807744 - RNA, 22 nt, Human
uccuggcacauugcaggggcuc

SEQ ID NO: 807745 - RNA, 22 nt, Human
ggcugcuggcauugagguaggu

SEQ ID NO: 807746 - RNA, 22 nt, Human
aaaaagacagaggaugaggcag

SEQ ID NO: 807747 - RNA, 22 nt, Human
agaauaaaauagucugaagaug

SEQ ID NO: 807748 - RNA, 22 nt, Human
gcugccauccccugcugggcug

SEQ ID NO: 807749 - RNA, 22 nt, Human
ugggccagcacugggugcucau

SEQ ID NO: 807750 - RNA, 22 nt, Human
uaugcaaacaguucaggugaca

SEQ ID NO: 807751 - RNA, 22 nt, Human
aaagcagagguugcagugagcu

SEQ ID NO: 807752 - RNA, 22 nt, Human
uucuuugguguuacccagcuca

SEQ ID NO: 807753 - RNA, 22 nt, Human
cugggagcuuguuaggaaugca

SEQ ID NO: 807754 - RNA, 22 nt, Human
caggagcucucaucgucagggc

SEQ ID NO: 807755 - RNA, 21 nt, Human
uuuggcuucucugcugcagcc

SEQ ID NO: 807756 - RNA, 20 nt, Human
aguggccacugcagagaugc

SEQ ID NO: 807757 - RNA, 22 nt, Human
augaaauggugguuuuccauuu

SEQ ID NO: 807758 - RNA, 22 nt, Human
ggccuccaucuuaucuuacucu

SEQ ID NO: 807759 - RNA, 22 nt, Human
uccucaggauguggaguagaau

SEQ ID NO: 807760 - RNA, 22 nt, Human
acuauguacccaaagaucugau

SEQ ID NO: 807761 - RNA, 22 nt, Human
ucuccuggaagugauuccccug

SEQ ID NO: 807762 - RNA, 22 nt, Human
augcaaauucuuugcuucuucu

SEQ ID NO: 807763 - RNA, 22 nt, Human
uggagaugccuggagauuaggg

SEQ ID NO: 807764 - RNA, 22 nt, Human
uggcuggcugucaguaggcugu

SEQ ID NO: 807765 - RNA, 22 nt, Human
uagaaacauucaguugcagucc

SEQ ID NO: 807766 - RNA, 22 nt, Human
ucaaaacacuauuaccuuuaau

SEQ ID NO: 807767 - RNA, 22 nt, Human
cugacagccauguuuuagagaa

SEQ ID NO: 807768 - RNA, 22 nt, Human
aauaagauccugaagauauguu

SEQ ID NO: 807769 - RNA, 22 nt, Human
uauuauugaaucaguucuuuga

SEQ ID NO: 807770 - RNA, 23 nt, Human
ugccaggguuuguuugugguuca

SEQ ID NO: 807771 - RNA, 22 nt, Human
aaagccagguugugugcaggaa

SEQ ID NO: 807772 - RNA, 22 nt, Human
agagcuggcugguagcccugau

SEQ ID NO: 807773 - RNA, 22 nt, Human
agcagcugguucccgagggcgu

SEQ ID NO: 807774 - RNA, 22 nt, Human
ugggacagauuauaagucugca

SEQ ID NO: 807775 - RNA, 22 nt, Human
uggcaaagauuaccacaucuac

SEQ ID NO: 807776 - RNA, 22 nt, Human
uucuuuaccagugaaauguuau

SEQ ID NO: 807777 - RNA, 22 nt, Human
uccucagcauggaaucuggacu

SEQ ID NO: 807778 - RNA, 22 nt, Human
gcagaggagcaagcuggacacc

SEQ ID NO: 807779 - RNA, 22 nt, Human
cacuugaacccgggaggcugag

SEQ ID NO: 807780 - RNA, 22 nt, Human
agcuuguaacagacauaaaaau

SEQ ID NO: 807781 - RNA, 22 nt, Human
acacaguauugugacuauaacu

SEQ ID NO: 807782 - RNA, 22 nt, Human
aaucacaauuacuuuugcacca

SEQ ID NO: 807783 - RNA, 22 nt, Human
augcaacauacauucugaagcu

SEQ ID NO: 807784 - RNA, 22 nt, Human
uauuauugcaaguauauaaagu

SEQ ID NO: 807785 - RNA, 22 nt, Human
cauuucauaguugucacaauaa

SEQ ID NO: 807786 - RNA, 22 nt, Human
ccuggcuaggagagcugggcuc

SEQ ID NO: 807787 - RNA, 22 nt, Human
gauuuugucaaauuccaaaugu

SEQ ID NO: 807788 - RNA, 22 nt, Human
gccacagggcagaugcgcagag

SEQ ID NO: 807789 - RNA, 22 nt, Human
aggcacagugccuggaaucaaa

SEQ ID NO: 807790 - RNA, 22 nt, Human
gccccaccgagggugcaguccu

SEQ ID NO: 807791 - RNA, 22 nt, Human
gcuggagaaacugcagcugagg

SEQ ID NO: 807792 - RNA, 22 nt, Human
acugucaagagauucaaauuca

SEQ ID NO: 807793 - RNA, 22 nt, Human
gcagugggagcuuaggcagugc

SEQ ID NO: 807794 - RNA, 22 nt, Human
augcaaaugaacauguugcuag

SEQ ID NO: 807795 - RNA, 22 nt, Human
auguauugucucuuuuccuuaa

SEQ ID NO: 807796 - RNA, 22 nt, Human
cauggggcccaugugcuccaag

SEQ ID NO: 807797 - RNA, 22 nt, Human
agucacugguucuguaauuaau

SEQ ID NO: 807798 - RNA, 22 nt, Human
gccuggcuggucacugccuggc

SEQ ID NO: 807799 - RNA, 22 nt, Human
ggccugcugcagugugacaguu

SEQ ID NO: 807800 - RNA, 22 nt, Human
gggcccaguacccucugccaag

SEQ ID NO: 807801 - RNA, 22 nt, Human
accuccccacaugguagugagu

SEQ ID NO: 807802 - RNA, 22 nt, Human
uuuauaugugaagguuugcaga

SEQ ID NO: 807803 - RNA, 22 nt, Human
acuuugaaacuaaaauucauua

SEQ ID NO: 807804 - RNA, 22 nt, Human
uccugggcuuaguggcuagguc

SEQ ID NO: 807805 - RNA, 22 nt, Human
uggcaggagccugcggggaggu

SEQ ID NO: 807806 - RNA, 22 nt, Human
cuuucagggcaacacuucuuuu

SEQ ID NO: 807807 - RNA, 22 nt, Human
aucagaauggagcccacauggu

SEQ ID NO: 807808 - RNA, 22 nt, Human
gggcagaugucuggacaccuca

SEQ ID NO: 807809 - RNA, 22 nt, Human
cagauaaauagauagauaaacu

SEQ ID NO: 807810 - RNA, 22 nt, Human
ugacagaaauaguucuuaauuu

SEQ ID NO: 807811 - RNA, 22 nt, Human
gauagagacuauaaugcucuuu

SEQ ID NO: 807812 - RNA, 22 nt, Human
auacaugucaucauauguuugu

SEQ ID NO: 807813 - RNA, 22 nt, Human
ugucauuuucagcuuaugcuuc

SEQ ID NO: 807814 - RNA, 22 nt, Human
uugggaaagccacaaauuggag

SEQ ID NO: 807815 - RNA, 22 nt, Human
caggcucuagguuaguaggaga

SEQ ID NO: 807816 - RNA, 22 nt, Human
uaauaauuaacagugauggguc

SEQ ID NO: 807817 - RNA, 22 nt, Human
ccccugccagcuaucccugaac

SEQ ID NO: 807818 - RNA, 22 nt, Human
cucuuuggagaagcacguauua

SEQ ID NO: 807819 - RNA, 22 nt, Human
uccugcuguuuaccuacaaugg

SEQ ID NO: 807820 - RNA, 22 nt, Human
ugaugcaauguuuacaucuuga

SEQ ID NO: 807821 - RNA, 22 nt, Human
agaaaccuggggguuguacaua

SEQ ID NO: 807822 - RNA, 22 nt, Human
gccuccuggguucaugccauuc

SEQ ID NO: 807823 - RNA, 22 nt, Human
agccagcuguucuggggcagca

SEQ ID NO: 807824 - RNA, 22 nt, Human
cagggacagagacugcaccuug

SEQ ID NO: 807825 - RNA, 18 nt, Human
gcagcugcaguuguagcu

SEQ ID NO: 807826 - RNA, 22 nt, Human
ucauuuuuagcgcgcaaaaguu

SEQ ID NO: 807827 - RNA, 22 nt, Human
agagaucaaagcuugccaagua

SEQ ID NO: 807828 - RNA, 22 nt, Human
aaaguuuuagaacuaggaagca

SEQ ID NO: 807829 - RNA, 22 nt, Human
ucacauuuguguuuuauuagag

SEQ ID NO: 807830 - RNA, 22 nt, Human
auggccagcucagagcacucag

SEQ ID NO: 807831 - RNA, 22 nt, Human
auaugugugccauuucagcagu

SEQ ID NO: 807832 - RNA, 22 nt, Human
cagaugcuuuugauucuggggu

SEQ ID NO: 807833 - RNA, 22 nt, Human
gugcuggacccuggaagguggu

SEQ ID NO: 807834 - RNA, 22 nt, Human
gcuucuccagaccuucaucccc

SEQ ID NO: 807835 - RNA, 22 nt, Human
ucauauuuaggccuuuaauuca

SEQ ID NO: 807836 - RNA, 22 nt, Human
ggaggccaaggaggagcuugcc

SEQ ID NO: 807837 - RNA, 22 nt, Human
ucucauuugccucaucuauaaa

SEQ ID NO: 807838 - RNA, 22 nt, Human
uucauauucaaauacucugcuu

SEQ ID NO: 807839 - RNA, 22 nt, Human
uugaaugaaauugcuguguuau

SEQ ID NO: 807840 - RNA, 22 nt, Human
gcuggccuugugucugaggaag

SEQ ID NO: 807841 - RNA, 22 nt, Human
caaacuuuugaggaguucagga

SEQ ID NO: 807842 - RNA, 22 nt, Human
aaaauugaagugaucaggaacu

SEQ ID NO: 807843 - RNA, 22 nt, Human
uaaguucauuagacuacagaua

SEQ ID NO: 807844 - RNA, 22 nt, Human
cucccuggcagccgcacuccug

SEQ ID NO: 807845 - RNA, 22 nt, Human
uggcucagauuuuuguaggcuu

SEQ ID NO: 807846 - RNA, 22 nt, Human
acugcccuggagacagcagagu

SEQ ID NO: 807847 - RNA, 22 nt, Human
aaaugucuguaugagaaagaga

SEQ ID NO: 807848 - RNA, 21 nt, Human
auuuucauuaauucagugugg

SEQ ID NO: 807849 - RNA, 22 nt, Human
uuucacacaacgugaauauacu

SEQ ID NO: 807850 - RNA, 22 nt, Human
acugccugccuuccagguacug

SEQ ID NO: 807851 - RNA, 22 nt, Human
agaggccagcccaggccaccga

SEQ ID NO: 807852 - RNA, 22 nt, Human
aguggugauaaccgcuaucaua

SEQ ID NO: 807853 - RNA, 20 nt, Human
gaaggcuuggacagugacag

SEQ ID NO: 807854 - RNA, 22 nt, Human
aggggagccccugguccuggug

SEQ ID NO: 807855 - RNA, 22 nt, Human
augcuuaacuuccuagucuaua

SEQ ID NO: 807856 - RNA, 22 nt, Human
ugauucaagagaguugggguau

SEQ ID NO: 807857 - RNA, 22 nt, Human
aggcccuguccauggugcugaa

SEQ ID NO: 807858 - RNA, 22 nt, Human
caaagugcugagauuacaggua

SEQ ID NO: 807859 - RNA, 22 nt, Human
cuggcuggcaaguagaacacaa

SEQ ID NO: 807860 - RNA, 22 nt, Human
uauuuuaucugccagaguggag

SEQ ID NO: 807861 - RNA, 22 nt, Human
ccagggaaguaguugugagagc

SEQ ID NO: 807862 - RNA, 22 nt, Human
gcagccauugagcgaaaaaauc

SEQ ID NO: 807863 - RNA, 22 nt, Human
agugucaagguugagaaacccu

SEQ ID NO: 807864 - RNA, 22 nt, Human
ugcaggcucacccuggagcuga

SEQ ID NO: 807865 - RNA, 22 nt, Human
ucucugaguuguaaaaaauagu

SEQ ID NO: 807866 - RNA, 22 nt, Human
uggcugugggauaugugacuga

SEQ ID NO: 807867 - RNA, 22 nt, Human
acuguucacccagcacuagcag

SEQ ID NO: 807868 - RNA, 22 nt, Human
ggucugaguagagggcuggcga

SEQ ID NO: 807869 - RNA, 22 nt, Human
gagcuggaggcagugcugaggu

SEQ ID NO: 807870 - RNA, 22 nt, Human
ucauuucuuaacuagagugaac

SEQ ID NO: 807871 - RNA, 23 nt, Human
uggcuccaggagaagccagaagc

SEQ ID NO: 807872 - RNA, 22 nt, Human
agacaucaaugaucagagguag

SEQ ID NO: 807873 - RNA, 22 nt, Human
acagggccucagccagggcaga

SEQ ID NO: 807874 - RNA, 22 nt, Human
acaggcuggugguccuggccau

SEQ ID NO: 807875 - RNA, 22 nt, Human
uucuuuuggacucaaagagaac

SEQ ID NO: 807876 - RNA, 22 nt, Human
ugccaggauauaagagugcgau

SEQ ID NO: 807877 - RNA, 22 nt, Human
uagcaaauaaaacaguauugaa

SEQ ID NO: 807878 - RNA, 22 nt, Human
auuuguaaagugcuuaaaagua

SEQ ID NO: 807879 - RNA, 22 nt, Human
aggcuggcauacauuuguucuu

SEQ ID NO: 807880 - RNA, 22 nt, Human
aaaguauucaaaaauauuuggu

SEQ ID NO: 807881 - RNA, 22 nt, Human
guagaauauaugguuaguauug

SEQ ID NO: 807882 - RNA, 22 nt, Human
gaagcacauggcugugagcaac

SEQ ID NO: 807883 - RNA, 22 nt, Human
cugggccaucucucugcaagug

SEQ ID NO: 807884 - RNA, 22 nt, Human
aaaaaugucauuauggaacuga

SEQ ID NO: 807885 - RNA, 22 nt, Human
uguaaauugaaggaaauuugug

SEQ ID NO: 807886 - RNA, 21 nt, Human
ugcuccaggagggggcagucc

SEQ ID NO: 807887 - RNA, 22 nt, Human
cagggcagugaagaacacacgu

SEQ ID NO: 807888 - RNA, 21 nt, Human
gcccagaguuaagcccaccca

SEQ ID NO: 807889 - RNA, 22 nt, Human
cuuuuucccagguggagagagg

SEQ ID NO: 807890 - RNA, 22 nt, Human
uacaugcaugauacaaaguugc

SEQ ID NO: 807891 - RNA, 23 nt, Human
aauuacaaccaagaacuggaagg

SEQ ID NO: 807892 - RNA, 22 nt, Human
agcaggagcugugggaagaugg

SEQ ID NO: 807893 - RNA, 22 nt, Human
aucauacacucacauaaacaga

SEQ ID NO: 807894 - RNA, 22 nt, Human
gugcuucucuucacacccaacu

SEQ ID NO: 807895 - RNA, 22 nt, Human
agcaggcauagaguagcacuca

SEQ ID NO: 807896 - RNA, 22 nt, Human
uuucccaaguguaaacauggca

SEQ ID NO: 807897 - RNA, 22 nt, Human
uuucauguacuuuuuugauaga

SEQ ID NO: 807898 - RNA, 22 nt, Human
uccagcacucgcccagggcuug

SEQ ID NO: 807899 - RNA, 22 nt, Human
caggggcugaaauguugggguu

SEQ ID NO: 807900 - RNA, 22 nt, Human
aaaauugucagaaguugaucuu

SEQ ID NO: 807901 - RNA, 22 nt, Human
uugaggagcaggaugggaggcu

SEQ ID NO: 807902 - RNA, 22 nt, Human
uaggcugggcugagcuggacgg

SEQ ID NO: 807903 - RNA, 21 nt, Human
cagcuccacuaaagcagcugu

SEQ ID NO: 807904 - RNA, 22 nt, Human
auggacaaugccaauacaguuu

SEQ ID NO: 807905 - RNA, 22 nt, Human
ucccugcacccuugcugggccc

SEQ ID NO: 807906 - RNA, 22 nt, Human
cgcaggcuccggggugcccugg

SEQ ID NO: 807907 - RNA, 22 nt, Human
gagggggcgugcaaggcuccgc

SEQ ID NO: 807908 - RNA, 22 nt, Human
agaaacaucauuguuugguauu

SEQ ID NO: 807909 - RNA, 20 nt, Human
cccucugcacauggcugugg

SEQ ID NO: 807910 - RNA, 22 nt, Human
accucccagcucugagcuuggg

SEQ ID NO: 807911 - RNA, 22 nt, Human
agcuacaacuuuuccaugagca

SEQ ID NO: 807912 - RNA, 22 nt, Human
agaauuguucuguagcuuggcu

SEQ ID NO: 807913 - RNA, 20 nt, Human
acaauacagguugugucuga

SEQ ID NO: 807914 - RNA, 22 nt, Human
cugagggaggagaauugcuuga

SEQ ID NO: 807915 - RNA, 22 nt, Human
uacaaacuccgaaguuuguacc

SEQ ID NO: 807916 - RNA, 22 nt, Human
uuuauucacuucagugccaaag

SEQ ID NO: 807917 - RNA, 22 nt, Human
gguaccaccaauucagcugcca

SEQ ID NO: 807918 - RNA, 22 nt, Human
caguggcaagaacaguaauaau

SEQ ID NO: 807919 - RNA, 22 nt, Human
cucugggaccacgugacucugc

SEQ ID NO: 807920 - RNA, 17 nt, Human
aguggcaggcagauggg

SEQ ID NO: 807921 - RNA, 22 nt, Human
uuuacagagagagaacuggacu

SEQ ID NO: 807922 - RNA, 22 nt, Human
uagaaacagcauauauuagccc

SEQ ID NO: 807923 - RNA, 22 nt, Human
ccuccagcauuacuggcccaug

SEQ ID NO: 807924 - RNA, 19 nt, Human
gucaccauuuccaaaugcc

SEQ ID NO: 807925 - RNA, 22 nt, Human
ugggagaacacugcucuggaug

SEQ ID NO: 807926 - RNA, 22 nt, Human
ucagagcugcccaugcaagggg

SEQ ID NO: 807927 - RNA, 22 nt, Human
agugucuggugagggcucucuc

SEQ ID NO: 807928 - RNA, 22 nt, Human
ugcagaggagucagccugggca

SEQ ID NO: 807929 - RNA, 20 nt, Human
gcagugaucucaucggucug

SEQ ID NO: 807930 - RNA, 22 nt, Human
gcaggcucguuggaaguccccu

SEQ ID NO: 807931 - RNA, 22 nt, Human
cauagacaaagaucagaagagu

SEQ ID NO: 807932 - RNA, 22 nt, Human
aauaagaauugccagauuugaa

SEQ ID NO: 807933 - RNA, 22 nt, Human
aacuacuaccacagucaagaca

SEQ ID NO: 807934 - RNA, 19 nt, Human
cucagcuguagcucaugug

SEQ ID NO: 807935 - RNA, 22 nt, Human
uggggccagagauggggcgcag

SEQ ID NO: 807936 - RNA, 22 nt, Human
caggcucuuuugguggcaagga

SEQ ID NO: 807937 - RNA, 22 nt, Human
aaaugucuuucaauagagaaau

SEQ ID NO: 807938 - RNA, 22 nt, Human
uugcuucuaaguauaaauauga

SEQ ID NO: 807939 - RNA, 21 nt, Human
cagggcaaccaaguccagaga

SEQ ID NO: 807940 - RNA, 22 nt, Human
uuuauaaaauagacugggucua

SEQ ID NO: 807941 - RNA, 18 nt, Human
ccuagccuccaagcucau

SEQ ID NO: 807942 - RNA, 22 nt, Human
uuuaccacagaaaaaaguaacu

SEQ ID NO: 807943 - RNA, 22 nt, Human
uuucacauggaagcucucgaga

SEQ ID NO: 807944 - RNA, 22 nt, Human
caugcaaaugguggcuaaaugg

SEQ ID NO: 807945 - RNA, 22 nt, Human
ggggaggccaguggaccguccc

SEQ ID NO: 807946 - RNA, 22 nt, Human
ugucuuuagaaagaagcagaca

SEQ ID NO: 807947 - RNA, 22 nt, Human
ucagggcaggcgagcagcugcu

SEQ ID NO: 807948 - RNA, 22 nt, Human
auacugugugcagaguccuaau

SEQ ID NO: 807949 - RNA, 22 nt, Human
ugcuggcuuucugucccuggca

SEQ ID NO: 807950 - RNA, 22 nt, Human
uccugcugccauuucaagugcu

SEQ ID NO: 807951 - RNA, 22 nt, Human
ccugaguccccucauucacucu

SEQ ID NO: 807952 - RNA, 22 nt, Human
ccaggcugccgaggaaagaaag

SEQ ID NO: 807953 - RNA, 22 nt, Human
ugaaggcuuuuuaaagcauuug

SEQ ID NO: 807954 - RNA, 22 nt, Human
ggcagugccacuaagcucugcu

SEQ ID NO: 807955 - RNA, 22 nt, Human
acacaguucgugcuuuucuauu

SEQ ID NO: 807956 - RNA, 22 nt, Human
cuggcagcucuacucagagccu

SEQ ID NO: 807957 - RNA, 22 nt, Human
ucugguaaccuuuaucccuccu

SEQ ID NO: 807958 - RNA, 22 nt, Human
auaguguugauagcaguggagu

SEQ ID NO: 807959 - RNA, 22 nt, Human
cuggucagggcucuuugggagc

SEQ ID NO: 807960 - RNA, 22 nt, Human
uuucauguuauuaauagugcug

SEQ ID NO: 807961 - RNA, 22 nt, Human
aggcagcuuucuguaggggugu

SEQ ID NO: 807962 - RNA, 22 nt, Human
cuaggaccacuguaacaaagua

SEQ ID NO: 807963 - RNA, 22 nt, Human
uugagagaggaaacauagucuc

SEQ ID NO: 807964 - RNA, 19 nt, Human
agcagcagaagugugccuu

SEQ ID NO: 807965 - RNA, 19 nt, Human
aaggcagaaguuggauaug

SEQ ID NO: 807966 - RNA, 22 nt, Human
ugcauuaaggccauugaaauuu

SEQ ID NO: 807967 - RNA, 22 nt, Human
gaagagaaaggcaaggaguuuu

SEQ ID NO: 807968 - RNA, 22 nt, Human
augcaaauucuuaggcuccauc

SEQ ID NO: 807969 - RNA, 19 nt, Human
acccucucagugccugagg

SEQ ID NO: 807970 - RNA, 22 nt, Human
ggcccagccucagacaugcccu

SEQ ID NO: 807971 - RNA, 22 nt, Human
augaguuuugggggauguuaga

SEQ ID NO: 807972 - RNA, 18 nt, Human
aggccacacuccagaaca

SEQ ID NO: 807973 - RNA, 22 nt, Human
uucuugauucuuccuugaagga

SEQ ID NO: 807974 - RNA, 22 nt, Human
aaaccugaauguaugucagaag

SEQ ID NO: 807975 - RNA, 22 nt, Human
ucagugcuuccuggaggaagcc

SEQ ID NO: 807976 - RNA, 22 nt, Human
caggcugggcagccuccccggc

SEQ ID NO: 807977 - RNA, 22 nt, Human
auguuucuacagcguccacuga

SEQ ID NO: 807978 - RNA, 22 nt, Human
uaugcacaguuacaagaauauc

SEQ ID NO: 807979 - RNA, 22 nt, Human
cacuuuacccuuguuacucaug

SEQ ID NO: 807980 - RNA, 19 nt, Human
ccugucugucuucagcuag

SEQ ID NO: 807981 - RNA, 22 nt, Human
uggugggagugacguugccuuc

SEQ ID NO: 807982 - RNA, 23 nt, Human
caucauuguuaugggugcuacua

SEQ ID NO: 807983 - RNA, 22 nt, Human
uucuuuuaaaagagagcagaaa

SEQ ID NO: 807984 - RNA, 22 nt, Human
cuggggaacgcagcgagcagcg

SEQ ID NO: 807985 - RNA, 22 nt, Human
uaguuuuauaauguuaacaucu

SEQ ID NO: 807986 - RNA, 22 nt, Human
ggcuccuguccccucagcugcu

SEQ ID NO: 807987 - RNA, 20 nt, Human
gccugagcuauugccaggau

SEQ ID NO: 807988 - RNA, 22 nt, Human
aagaguuuuuaauggguacugg

SEQ ID NO: 807989 - RNA, 22 nt, Human
ucuggucaucggaaagaucaaa

SEQ ID NO: 807990 - RNA, 22 nt, Human
gggcuucaaaauuggcacucuu

SEQ ID NO: 807991 - RNA, 22 nt, Human
ggcuccugggaugggacugagc

SEQ ID NO: 807992 - RNA, 22 nt, Human
uuucauugacaguugggggaaa

SEQ ID NO: 807993 - RNA, 22 nt, Human
uucccaagucuccaauguggga

SEQ ID NO: 807994 - RNA, 22 nt, Human
aaacuaaggugcuguggacuga

SEQ ID NO: 807995 - RNA, 22 nt, Human
agccucccuaugcaccuucagg

SEQ ID NO: 807996 - RNA, 20 nt, Human
ggccuuggaauagcacagcu

SEQ ID NO: 807997 - RNA, 17 nt, Human
ugccuccagcaggguga

SEQ ID NO: 807998 - RNA, 22 nt, Human
aggcaucugaguuugcaagcuu

SEQ ID NO: 807999 - RNA, 22 nt, Human
ggcuccagaugucuccuggcaa

SEQ ID NO: 808000 - RNA, 22 nt, Human
uaaaucaagaauaucagcuugu

SEQ ID NO: 808001 - RNA, 22 nt, Human
ucagucuuugcuuaugacaaua

SEQ ID NO: 808002 - RNA, 22 nt, Human
caccacugcuuccugccaucug

SEQ ID NO: 808003 - RNA, 21 nt, Human
uugguuuucugagucuguaca

SEQ ID NO: 808004 - RNA, 22 nt, Human
aagccuucaguccguugcagag

SEQ ID NO: 808005 - RNA, 22 nt, Human
aaacuucuugcugcauuuucug

SEQ ID NO: 808006 - RNA, 22 nt, Human
aagcuucaaugagauaauuguu

SEQ ID NO: 808007 - RNA, 22 nt, Human
ggccacagugggaaauccuggg

SEQ ID NO: 808008 - RNA, 22 nt, Human
gcuggccugaccugaggcuggg

SEQ ID NO: 808009 - RNA, 22 nt, Human
acacaguggugagucuggaccu

SEQ ID NO: 808010 - RNA, 22 nt, Human
acagcuccuaacaaaggcucuc

SEQ ID NO: 808011 - RNA, 22 nt, Human
auaauaacaccugaauaggaaa

SEQ ID NO: 808012 - RNA, 22 nt, Human
cacuggcaugugaggcgguggc

SEQ ID NO: 808013 - RNA, 22 nt, Human
aaaggcaggcuuucacaucuca

SEQ ID NO: 808014 - RNA, 22 nt, Human
uugcaaaagccgaggcacucca

SEQ ID NO: 808015 - RNA, 22 nt, Human
ucccuggagauaacuucuggga

SEQ ID NO: 808016 - RNA, 22 nt, Human
gcagcugggacacugaggccag

SEQ ID NO: 808017 - RNA, 22 nt, Human
augaaugcugggacaaauauau

SEQ ID NO: 808018 - RNA, 22 nt, Human
gcagggccagguacaagaagca

SEQ ID NO: 808019 - RNA, 22 nt, Human
augaaccuugauuuguucaucu

SEQ ID NO: 808020 - RNA, 22 nt, Human
aguggcaguggcugggcagagc

SEQ ID NO: 808021 - RNA, 22 nt, Human
guauauaucggcacuauuuuaa

SEQ ID NO: 808022 - RNA, 22 nt, Human
auuucaugugaagaagagauaa

SEQ ID NO: 808023 - RNA, 22 nt, Human
gcagcuggucuggccuagagua

SEQ ID NO: 808024 - RNA, 22 nt, Human
uuuauaauuaucucuacucuua

SEQ ID NO: 808025 - RNA, 18 nt, Human
acagugauuguucuaugc

SEQ ID NO: 808026 - RNA, 22 nt, Human
cacagugcaaucggccacaaau

SEQ ID NO: 808027 - RNA, 22 nt, Human
caaaaggccaguacuuuguuug

SEQ ID NO: 808028 - RNA, 23 nt, Human
guuaauaaugaacacuuucuccc

SEQ ID NO: 808029 - RNA, 22 nt, Human
agcuuguuggggaaggagaaag

SEQ ID NO: 808030 - RNA, 22 nt, Human
gaggcagcauucgcauagacag

SEQ ID NO: 808031 - RNA, 22 nt, Human
guuucuuuuaaaauauguagac

SEQ ID NO: 808032 - RNA, 22 nt, Human
ucagaagcauguggggagccug

SEQ ID NO: 808033 - RNA, 22 nt, Human
ugccugcaucuuggaggcccca

SEQ ID NO: 808034 - RNA, 22 nt, Human
cccuccccagggucauauugaa

SEQ ID NO: 808035 - RNA, 22 nt, Human
caggcccauucuaggcuugcua

SEQ ID NO: 808036 - RNA, 22 nt, Human
ugcuggcacgaaagggugucca

SEQ ID NO: 808037 - RNA, 22 nt, Human
ucagggcaaagggcagaguuug

SEQ ID NO: 808038 - RNA, 22 nt, Human
cauggauugaauauaaauuaga

SEQ ID NO: 808039 - RNA, 22 nt, Human
ggcagggaguggagacucccua

SEQ ID NO: 808040 - RNA, 20 nt, Human
guuuuaugccaguucugugu

SEQ ID NO: 808041 - RNA, 22 nt, Human
ccagcaggacuuuggaaauaug

SEQ ID NO: 808042 - RNA, 22 nt, Human
ucucccucauuccugcuuccau

SEQ ID NO: 808043 - RNA, 22 nt, Human
uuuuauucucagcuccagagag

SEQ ID NO: 808044 - RNA, 22 nt, Human
gcuggcuccaaaagcaggggcu

SEQ ID NO: 808045 - RNA, 22 nt, Human
gggaaaggaucagugggaggcu

SEQ ID NO: 808046 - RNA, 22 nt, Human
caggaagagaacauggaggcug

SEQ ID NO: 808047 - RNA, 22 nt, Human
gauuuacagaucuaagggucac

SEQ ID NO: 808048 - RNA, 22 nt, Human
ucaagaaacugugcuacagagu

SEQ ID NO: 808049 - RNA, 22 nt, Human
uagacaggagucaggcuagaau

SEQ ID NO: 808050 - RNA, 20 nt, Human
uggcaggaggcagcagugga

SEQ ID NO: 808051 - RNA, 23 nt, Human
cagaggguuccauggagcauggu

SEQ ID NO: 808052 - RNA, 22 nt, Human
acagugaaugcccaagaaaagu

SEQ ID NO: 808053 - RNA, 22 nt, Human
cugggagcaagucaggaaaggu

SEQ ID NO: 808054 - RNA, 22 nt, Human
ggcagauggagaagcagcaggu

SEQ ID NO: 808055 - RNA, 23 nt, Human
agaggcugcaggguauugagaau

SEQ ID NO: 808056 - RNA, 23 nt, Human
ugcaggguguuccugccuuugcu

SEQ ID NO: 808057 - RNA, 22 nt, Human
aacugugaggaugugcaaauuc

SEQ ID NO: 808058 - RNA, 22 nt, Human
aacauuuccggccuuuuguucu

SEQ ID NO: 808059 - RNA, 22 nt, Human
aucagaaucauuucaucccuau

SEQ ID NO: 808060 - RNA, 22 nt, Human
uggaaggaaagguagcagagaa

SEQ ID NO: 808061 - RNA, 22 nt, Human
ccuugcucaagcuagugacggg

SEQ ID NO: 808062 - RNA, 22 nt, Human
auaaguaggaaaauuugaauau

SEQ ID NO: 808063 - RNA, 22 nt, Human
ccagcccugaacccugcugcau

SEQ ID NO: 808064 - RNA, 22 nt, Human
ucauuguauuaaaauauugguu

SEQ ID NO: 808065 - RNA, 22 nt, Human
aaagccaggaggagggcgcucg

SEQ ID NO: 808066 - RNA, 22 nt, Human
caugucuuucaaaccacacagu

SEQ ID NO: 808067 - RNA, 22 nt, Human
aaagcagauucugaugcaguag

SEQ ID NO: 808068 - RNA, 22 nt, Human
agcuggcuuuaugguuggcuaa

SEQ ID NO: 808069 - RNA, 22 nt, Human
uuguaaacuguuaaaagccaga

SEQ ID NO: 808070 - RNA, 22 nt, Human
acauuugucuucuuucagauua

SEQ ID NO: 808071 - RNA, 22 nt, Human
ucaggaaggagcuggccugcca

SEQ ID NO: 808072 - RNA, 22 nt, Human
ucagcaggggccguugggugga

SEQ ID NO: 808073 - RNA, 21 nt, Human
acacaaaccuccucagccugg

SEQ ID NO: 808074 - RNA, 22 nt, Human
uuacagaguagugcagaacuca

SEQ ID NO: 808075 - RNA, 18 nt, Human
agcuggggccucuggucc

SEQ ID NO: 808076 - RNA, 22 nt, Human
gagggagagugauggaccauug

SEQ ID NO: 808077 - RNA, 22 nt, Human
ucugcccucauugcugccugga

SEQ ID NO: 808078 - RNA, 22 nt, Human
uucaucaucuacaaccaggacc

SEQ ID NO: 808079 - RNA, 22 nt, Human
aagugcauaauaacucccaagu

SEQ ID NO: 808080 - RNA, 22 nt, Human
gugauucaaauguaacuaauua

SEQ ID NO: 808081 - RNA, 22 nt, Human
ggcauuuuugacaaagagcaau

SEQ ID NO: 808082 - RNA, 22 nt, Human
ucuuuuguugccuacuuauuaa

SEQ ID NO: 808083 - RNA, 22 nt, Human
cacagugacuggcacauaguaa

SEQ ID NO: 808084 - RNA, 22 nt, Human
uagcuuugaaguuauuuaacag

SEQ ID NO: 808085 - RNA, 22 nt, Human
uaugagaaaggagaaugacuuu

SEQ ID NO: 808086 - RNA, 22 nt, Human
ccaggagcuggagggugcagug

SEQ ID NO: 808087 - RNA, 22 nt, Human
gagccaggaagaaggccuuacu

SEQ ID NO: 808088 - RNA, 22 nt, Human
agcaacagcccuguuucauuag

SEQ ID NO: 808089 - RNA, 22 nt, Human
ggaggagggguuuacauuggaa

SEQ ID NO: 808090 - RNA, 22 nt, Human
ucacaucuauacccaauaauuu

SEQ ID NO: 808091 - RNA, 22 nt, Human
ggagcugcuucuugcugugggu

SEQ ID NO: 808092 - RNA, 22 nt, Human
cagaaaucuccaugucagacau

SEQ ID NO: 808093 - RNA, 22 nt, Human
caggcagagugagguggucuaa

SEQ ID NO: 808094 - RNA, 23 nt, Human
aaugggugcaacuauccaugaca

SEQ ID NO: 808095 - RNA, 22 nt, Human
augugacuccacagcugugcug

SEQ ID NO: 808096 - RNA, 22 nt, Human
uggagucugugaugcucugggu

SEQ ID NO: 808097 - RNA, 21 nt, Human
cugugggaccaagcacuggga

SEQ ID NO: 808098 - RNA, 22 nt, Human
gugcacagauuuaauuuuauuc

SEQ ID NO: 808099 - RNA, 22 nt, Human
auagaauucguguuuguaauuc

SEQ ID NO: 808100 - RNA, 21 nt, Human
cugcaaauguaaugaguuugg

SEQ ID NO: 808101 - RNA, 22 nt, Human
ggguaaugaacagguggcagag

SEQ ID NO: 808102 - RNA, 22 nt, Human
gcccuggaugcucauggcauca

SEQ ID NO: 808103 - RNA, 21 nt, Human
agcagcuugagucuggagcuc

SEQ ID NO: 808104 - RNA, 22 nt, Human
agucuuuaugauugucaaagua

SEQ ID NO: 808105 - RNA, 22 nt, Human
ugcaaaaacagccuugaggccu

SEQ ID NO: 808106 - RNA, 22 nt, Human
cagagccacugucugccaggca

SEQ ID NO: 808107 - RNA, 22 nt, Human
aaucuacaugcaauauuuuuag

SEQ ID NO: 808108 - RNA, 22 nt, Human
aaauuccaguucuuuuaccugc

SEQ ID NO: 808109 - RNA, 22 nt, Human
cagcacuguucccagaccacug

SEQ ID NO: 808110 - RNA, 22 nt, Human
ggcuuugacaugcugaauuaaa

SEQ ID NO: 808111 - RNA, 20 nt, Human
gagggcaggcacccauuuca

SEQ ID NO: 808112 - RNA, 22 nt, Human
uagaaugugccuggaauacagu

SEQ ID NO: 808113 - RNA, 22 nt, Human
uugaaugaguguuuuacucaug

SEQ ID NO: 808114 - RNA, 22 nt, Human
guuguuuucacaaacccaugau

SEQ ID NO: 808115 - RNA, 22 nt, Human
aagcaauaaauaauuuuuagua

SEQ ID NO: 808116 - RNA, 22 nt, Human
auuauucaacacuugagaaauu

SEQ ID NO: 808117 - RNA, 22 nt, Human
uucuguuacaagugaaaaaaug

SEQ ID NO: 808118 - RNA, 22 nt, Human
ugagaacggauacuaagggcug

SEQ ID NO: 808119 - RNA, 22 nt, Human
cccuggagaucgggagaggaag

SEQ ID NO: 808120 - RNA, 22 nt, Human
caaagcugugaauuccuacaaa

SEQ ID NO: 808121 - RNA, 22 nt, Human
agcuccuguucugagagcagga

SEQ ID NO: 808122 - RNA, 22 nt, Human
cugccagagaucugggcagagu

SEQ ID NO: 808123 - RNA, 22 nt, Human
ucugcagcaaccuuucaccucc

SEQ ID NO: 808124 - RNA, 22 nt, Human
cugacaggguagacagagggca

SEQ ID NO: 808125 - RNA, 22 nt, Human
acaaauccagugaacuccagug

SEQ ID NO: 808126 - RNA, 22 nt, Human
uggcuggcuggaccacaccugc

SEQ ID NO: 808127 - RNA, 22 nt, Human
aaggcucuuggagugaaugcag

SEQ ID NO: 808128 - RNA, 22 nt, Human
caggccugggcuggguaucagg

SEQ ID NO: 808129 - RNA, 22 nt, Human
uucaagucuguuucauugcaug

SEQ ID NO: 808130 - RNA, 22 nt, Human
auauguuuuuggaaagaacaca

SEQ ID NO: 808131 - RNA, 22 nt, Human
gcugagacugacaugaagaggu

SEQ ID NO: 808132 - RNA, 22 nt, Human
uuucuucuuucccagugauggg

SEQ ID NO: 808133 - RNA, 22 nt, Human
ugcaggguagacaggugagguc

SEQ ID NO: 808134 - RNA, 22 nt, Human
uauuuuugccucucagauaaaa

SEQ ID NO: 808135 - RNA, 22 nt, Human
aggcagaagccagccagggucc

SEQ ID NO: 808136 - RNA, 22 nt, Human
uuucauugccuuuggaaggucu

SEQ ID NO: 808137 - RNA, 22 nt, Human
agcuccuggcuuuccucucacc

SEQ ID NO: 808138 - RNA, 22 nt, Human
acaaguauuuaagguuaguaua

SEQ ID NO: 808139 - RNA, 22 nt, Human
cagaggcugggaccucaggcau

SEQ ID NO: 808140 - RNA, 22 nt, Human
ggcugugccucaaggcuacuca

SEQ ID NO: 808141 - RNA, 22 nt, Human
uuucaaagucaagaaggauacu

SEQ ID NO: 808142 - RNA, 21 nt, Human
aaggccugcuuacugcuaguu

SEQ ID NO: 808143 - RNA, 22 nt, Human
ccugggcauaaaucacuccaag

SEQ ID NO: 808144 - RNA, 22 nt, Human
uggaaauauacaaugugucucu

SEQ ID NO: 808145 - RNA, 22 nt, Human
acaaauauuuacugaauccacu

SEQ ID NO: 808146 - RNA, 22 nt, Human
caugcaaagcguuuugaccagc

SEQ ID NO: 808147 - RNA, 22 nt, Human
gggguguggacggcugugccag

SEQ ID NO: 808148 - RNA, 22 nt, Human
uccacagaauguaagauccaca

SEQ ID NO: 808149 - RNA, 22 nt, Human
acaaauuguugggacucagccc

SEQ ID NO: 808150 - RNA, 22 nt, Human
uauuguccaauaggauguuccu

SEQ ID NO: 808151 - RNA, 22 nt, Human
caguuuuugccauuaagaguaa

SEQ ID NO: 808152 - RNA, 22 nt, Human
ggcaggguguggaguugggaca

SEQ ID NO: 808153 - RNA, 22 nt, Human
uucuucaggauacgucauccag

SEQ ID NO: 808154 - RNA, 22 nt, Human
gucuguuagugauaacuguuuu

SEQ ID NO: 808155 - RNA, 22 nt, Human
uuacagaggcuuccagggccca

SEQ ID NO: 808156 - RNA, 22 nt, Human
uggggaaauguccugccuuccc

SEQ ID NO: 808157 - RNA, 22 nt, Human
auguuucaaauauauagaguug

SEQ ID NO: 808158 - RNA, 22 nt, Human
caggcaccugugugucucaggg

SEQ ID NO: 808159 - RNA, 22 nt, Human
aacacagguucauucugugagg

SEQ ID NO: 808160 - RNA, 22 nt, Human
cacaggcaggagguucuccagu

SEQ ID NO: 808161 - RNA, 22 nt, Human
aaggcaguucacucacgcagcc

SEQ ID NO: 808162 - RNA, 22 nt, Human
gcggcccgagcaggacgggugg

SEQ ID NO: 808163 - RNA, 22 nt, Human
uugcaaauauguucuccuauuc

SEQ ID NO: 808164 - RNA, 20 nt, Human
cagucccaauccagggccag

SEQ ID NO: 808165 - RNA, 22 nt, Human
ccucagggaggccucuguggcu

SEQ ID NO: 808166 - RNA, 22 nt, Human
aaggcaguagguguuucaaacu

SEQ ID NO: 808167 - RNA, 22 nt, Human
auuuauuaagcaucugcuaugu

SEQ ID NO: 808168 - RNA, 22 nt, Human
uaagcaaaguuuauaaggcucu

SEQ ID NO: 808169 - RNA, 22 nt, Human
aggaaaaaagucugugauuaua

SEQ ID NO: 808170 - RNA, 22 nt, Human
gggagacacgcugcaggcauaa

SEQ ID NO: 808171 - RNA, 22 nt, Human
uguuuaaauagaacauacugca

SEQ ID NO: 808172 - RNA, 22 nt, Human
guccauacaguggcacacaucu

SEQ ID NO: 808173 - RNA, 22 nt, Human
cuacauucugggaaaucagaug

SEQ ID NO: 808174 - RNA, 14 nt, Human
gcaggcggaucacu

SEQ ID NO: 808175 - RNA, 22 nt, Human
uucauugucucuguuugccuuc

SEQ ID NO: 808176 - RNA, 22 nt, Human
gagggccagaaaguuauugaga

SEQ ID NO: 808177 - RNA, 22 nt, Human
aacagacagaaaaaugugaucu

SEQ ID NO: 808178 - RNA, 22 nt, Human
ccacagugaaaucuugauggag

SEQ ID NO: 808179 - RNA, 19 nt, Human
uuuuccacagaaauauguu

SEQ ID NO: 808180 - RNA, 22 nt, Human
agcugcaggccucuccugggga

SEQ ID NO: 808181 - RNA, 18 nt, Human
ggagggcuuuggggacug

SEQ ID NO: 808182 - RNA, 22 nt, Human
uuucacaguagaaaucauuaug

SEQ ID NO: 808183 - RNA, 22 nt, Human
aauauuucaaaaggaaacacag

SEQ ID NO: 808184 - RNA, 23 nt, Human
gcauuguagaauguuuagcagca

SEQ ID NO: 808185 - RNA, 22 nt, Human
uuaaauuucuacgugauccagg

SEQ ID NO: 808186 - RNA, 22 nt, Human
uuccaggaugggcuguccuacu

SEQ ID NO: 808187 - RNA, 22 nt, Human
aucagaauguuuuggugugcuc

SEQ ID NO: 808188 - RNA, 21 nt, Human
acugccugucuccauagucua

SEQ ID NO: 808189 - RNA, 22 nt, Human
ccccagccuuccaugggaauug

SEQ ID NO: 808190 - RNA, 22 nt, Human
uuucagaaagcaucaucaaagu

SEQ ID NO: 808191 - RNA, 22 nt, Human
uaaaugaaaggguuuaauuuau

SEQ ID NO: 808192 - RNA, 22 nt, Human
gucugagggacagaguccuggc

SEQ ID NO: 808193 - RNA, 22 nt, Human
agggaccacauccccucugugg

SEQ ID NO: 808194 - RNA, 22 nt, Human
gucugaggcgaggccugagaac

SEQ ID NO: 808195 - RNA, 22 nt, Human
uuguuucuucaggcuuuuagga

SEQ ID NO: 808196 - RNA, 22 nt, Human
aguuaaaugucaguagcuuaac

SEQ ID NO: 808197 - RNA, 22 nt, Human
acaggagcaacagacuaagaca

SEQ ID NO: 808198 - RNA, 22 nt, Human
cgcgcuguuuacgugacuuaau

SEQ ID NO: 808199 - RNA, 22 nt, Human
ucaguaaauaacucagaugcuc

SEQ ID NO: 808200 - RNA, 22 nt, Human
uccacgugagcuucgugugcag

SEQ ID NO: 808201 - RNA, 22 nt, Human
aguuucuagccucacuguuuag

SEQ ID NO: 808202 - RNA, 22 nt, Human
gaaauuuacaacuuucucaugg

SEQ ID NO: 808203 - RNA, 22 nt, Human
aggcagccaguucagguuucuu

SEQ ID NO: 808204 - RNA, 22 nt, Human
ucucauuuacuuccacaggcug

SEQ ID NO: 808205 - RNA, 22 nt, Human
auguuuguguuucccauucagg

SEQ ID NO: 808206 - RNA, 22 nt, Human
aggagccagaauccagacucgg

SEQ ID NO: 808207 - RNA, 22 nt, Human
cugacuuugcucauaggucaaa

SEQ ID NO: 808208 - RNA, 22 nt, Human
auggagggaaaaguggagagcc

SEQ ID NO: 808209 - RNA, 22 nt, Human
acucauugaaacuuaagaucua

SEQ ID NO: 808210 - RNA, 22 nt, Human
uagccaggcaauuaugggugau

SEQ ID NO: 808211 - RNA, 22 nt, Human
cucccacauggaauagcaggga

SEQ ID NO: 808212 - RNA, 22 nt, Human
uugcugaucugugaaucagcca

SEQ ID NO: 808213 - RNA, 22 nt, Human
gcaagauguuaacauagggaga

SEQ ID NO: 808214 - RNA, 19 nt, Human
ccugggagucagcugaagg

SEQ ID NO: 808215 - RNA, 22 nt, Human
accaaaugcuuggcugcuguga

SEQ ID NO: 808216 - RNA, 22 nt, Human
aaugucauugagcuccaauccu

SEQ ID NO: 808217 - RNA, 23 nt, Human
caggaaaugaauccaggaggaug

SEQ ID NO: 808218 - RNA, 22 nt, Human
aggcucuggacagugaggaguu

SEQ ID NO: 808219 - RNA, 22 nt, Human
ucagaggcuacagucugggagu

SEQ ID NO: 808220 - RNA, 22 nt, Human
ugaacaaaugaaucaguguagc

SEQ ID NO: 808221 - RNA, 22 nt, Human
cagaagcugcagugaucuggga

SEQ ID NO: 808222 - RNA, 22 nt, Human
gccacccugagcugggccaggg

SEQ ID NO: 808223 - RNA, 22 nt, Human
aagaguuuuuggagugugaguu

SEQ ID NO: 808224 - RNA, 22 nt, Human
ccacaguuuaggaagucacucu

SEQ ID NO: 808225 - RNA, 22 nt, Human
cacaguggaaguccaggauccc

SEQ ID NO: 808226 - RNA, 22 nt, Human
acaaagcacgagugccauggac

SEQ ID NO: 808227 - RNA, 22 nt, Human
cugcauccauguugcugcaaag

SEQ ID NO: 808228 - RNA, 22 nt, Human
ggcagggucuggacugaaagcu

SEQ ID NO: 808229 - RNA, 22 nt, Human
aucucauuuugguuucuacuua

SEQ ID NO: 808230 - RNA, 20 nt, Human
cugcaagcagguuauuccag

SEQ ID NO: 808231 - RNA, 22 nt, Human
caucuuuauuuauauagacagg

SEQ ID NO: 808232 - RNA, 22 nt, Human
ccugagggaaggaugcuaccca

SEQ ID NO: 808233 - RNA, 19 nt, Human
uuggggugaaugccagaca

SEQ ID NO: 808234 - RNA, 22 nt, Human
agaaauaugcugauuagaugaa

SEQ ID NO: 808235 - RNA, 22 nt, Human
agaaaauuacuccagagacaag

SEQ ID NO: 808236 - RNA, 22 nt, Human
uuggcccagcaugcgggucugu

SEQ ID NO: 808237 - RNA, 22 nt, Human
uugaaaugaucuauuucaguag

SEQ ID NO: 808238 - RNA, 22 nt, Human
auguuauuaaaguacagauucu

SEQ ID NO: 808239 - RNA, 22 nt, Human
uagcaaaggaugacuauguacc

SEQ ID NO: 808240 - RNA, 22 nt, Human
guucuggguucaaaccccggcc

SEQ ID NO: 808241 - RNA, 22 nt, Human
cccugaggcaaaggcuagaguu

SEQ ID NO: 808242 - RNA, 22 nt, Human
ucaagauaccaccauuauaugu

SEQ ID NO: 808243 - RNA, 22 nt, Human
cagcagcaucaggucugugguu

SEQ ID NO: 808244 - RNA, 21 nt, Human
ugccagcugcugcaucugucu

SEQ ID NO: 808245 - RNA, 22 nt, Human
ccaaaugugccuguuucaacaa

SEQ ID NO: 808246 - RNA, 22 nt, Human
agucuauugccuaacagagagg

SEQ ID NO: 808247 - RNA, 22 nt, Human
gcuggggucugugaggagggcu

SEQ ID NO: 808248 - RNA, 22 nt, Human
gucuccuggaaauaugcccaua

SEQ ID NO: 808249 - RNA, 22 nt, Human
auauuuugaaguuaauaaugug

SEQ ID NO: 808250 - RNA, 22 nt, Human
cauuuacagugagaguuuuuac

SEQ ID NO: 808251 - RNA, 22 nt, Human
uugaaguugcacauuauaauuu

SEQ ID NO: 808252 - RNA, 22 nt, Human
cuacaagauuuuuaaaacugua

SEQ ID NO: 808253 - RNA, 22 nt, Human
gcaggcaggagcccaacugccu

SEQ ID NO: 808254 - RNA, 22 nt, Human
caggacagcucaacaccuccuc

SEQ ID NO: 808255 - RNA, 22 nt, Human
ugccuucauccauguuauagug

SEQ ID NO: 808256 - RNA, 21 nt, Human
caaaaggauaggaaauuaggg

SEQ ID NO: 808257 - RNA, 22 nt, Human
aaacaagguccuucugugacau

SEQ ID NO: 808258 - RNA, 22 nt, Human
gcccaaagccagugugcucucc

SEQ ID NO: 808259 - RNA, 22 nt, Human
ccuggagccccucuggccagcc

SEQ ID NO: 808260 - RNA, 22 nt, Human
gggugaggccuugcugccauca

SEQ ID NO: 808261 - RNA, 22 nt, Human
ucagaauuuugguuugguuggu

SEQ ID NO: 808262 - RNA, 22 nt, Human
gugcauuaguuuccuauugcug

SEQ ID NO: 808263 - RNA, 22 nt, Human
ccucucagccggacugucaggc

SEQ ID NO: 808264 - RNA, 22 nt, Human
aagucauagucuaacccagcca

SEQ ID NO: 808265 - RNA, 22 nt, Human
cugggcuguaauguggcacuga

SEQ ID NO: 808266 - RNA, 22 nt, Human
gagcaggcaacucugcagugcc

SEQ ID NO: 808267 - RNA, 22 nt, Human
uguuuauaaauuuucuugccau

SEQ ID NO: 808268 - RNA, 22 nt, Human
ucugcugguuccgaauuaggcc

SEQ ID NO: 808269 - RNA, 22 nt, Human
acacuaguggaaauugauuugu

SEQ ID NO: 808270 - RNA, 22 nt, Human
auacuacauacuauguaaacau

SEQ ID NO: 808271 - RNA, 19 nt, Human
ggagccuggcaggggcgug

SEQ ID NO: 808272 - RNA, 22 nt, Human
ucugcaggcuuauaggaugggu

SEQ ID NO: 808273 - RNA, 21 nt, Human
ucccagggucuuaugggaugu

SEQ ID NO: 808274 - RNA, 22 nt, Human
cgcgguggcggccuccagcgcc

SEQ ID NO: 808275 - RNA, 22 nt, Human
agggaagcuuguuacugagaag

SEQ ID NO: 808276 - RNA, 22 nt, Human
agaagucagccacagugggaga

SEQ ID NO: 808277 - RNA, 22 nt, Human
acagggcaaccucugggagacu

SEQ ID NO: 808278 - RNA, 19 nt, Human
cugucccagacucugcucu

SEQ ID NO: 808279 - RNA, 22 nt, Human
uggugcugacaguucugagugc

SEQ ID NO: 808280 - RNA, 22 nt, Human
aagucuuuuugaaucuauaacu

SEQ ID NO: 808281 - RNA, 22 nt, Human
gaggaggcacuaguuagugaca

SEQ ID NO: 808282 - RNA, 22 nt, Human
uagcuucagggaaaccacugcu

SEQ ID NO: 808283 - RNA, 22 nt, Human
uguccagggggcuuaccuggag

SEQ ID NO: 808284 - RNA, 22 nt, Human
uuucauuacguguuugacuugu

SEQ ID NO: 808285 - RNA, 22 nt, Human
caggaggagcauuagcgucuca

SEQ ID NO: 808286 - RNA, 22 nt, Human
gaugauuuuguuggugauucaa

SEQ ID NO: 808287 - RNA, 22 nt, Human
aggacuggugccagacaaggua

SEQ ID NO: 808288 - RNA, 22 nt, Human
acugaaauauuuagaagugaag

SEQ ID NO: 808289 - RNA, 22 nt, Human
gccaaggaaggcuuccuggaag

SEQ ID NO: 808290 - RNA, 22 nt, Human
auuagacaucauaugauucagc

SEQ ID NO: 808291 - RNA, 22 nt, Human
gaugaaauccagaucacaggug

SEQ ID NO: 808292 - RNA, 22 nt, Human
aaauacaguguguguucuuuga

SEQ ID NO: 808293 - RNA, 22 nt, Human
gcacccuguuuauccugaguuc

SEQ ID NO: 808294 - RNA, 22 nt, Human
aucuagaacuuaaagucaguca

SEQ ID NO: 808295 - RNA, 22 nt, Human
agggccaccagggagucucagg

SEQ ID NO: 808296 - RNA, 22 nt, Human
ugcaggcugcuggcaguagcuu

SEQ ID NO: 808297 - RNA, 22 nt, Human
caggcacaagaucggcuagaua

SEQ ID NO: 808298 - RNA, 22 nt, Human
aaaggcaggacugcagcauagg

SEQ ID NO: 808299 - RNA, 17 nt, Human
ugccugccagcauugga

SEQ ID NO: 808300 - RNA, 22 nt, Human
guuucugagcacuuuuauugca

SEQ ID NO: 808301 - RNA, 22 nt, Human
cucccuggcacagcgagagguu

SEQ ID NO: 808302 - RNA, 22 nt, Human
cauucacaacugagcauuguug

SEQ ID NO: 808303 - RNA, 22 nt, Human
aaaguuacacaucuaguaagug

SEQ ID NO: 808304 - RNA, 22 nt, Human
uuuaagguggacaucuaaguca

SEQ ID NO: 808305 - RNA, 22 nt, Human
acuccugugggcauggcacccc

SEQ ID NO: 808306 - RNA, 22 nt, Human
ugguuagacacaugcaugucau

SEQ ID NO: 808307 - RNA, 22 nt, Human
gggcuggcuaagacuuuucugu

SEQ ID NO: 808308 - RNA, 22 nt, Human
uagcuuugggaaugcucuccug

SEQ ID NO: 808309 - RNA, 16 nt, Human
ggugggaggugaggug

SEQ ID NO: 808310 - RNA, 22 nt, Human
ugcuuaaaaagcuccaucaaua

SEQ ID NO: 808311 - RNA, 22 nt, Human
caagcuggcugggagaggcacg

SEQ ID NO: 808312 - RNA, 22 nt, Human
uuuuauuggagugauaccaagc

SEQ ID NO: 808313 - RNA, 22 nt, Human
gggcccuggacguggcggcaga

SEQ ID NO: 808314 - RNA, 19 nt, Human
uagcccuggccaucaugag

SEQ ID NO: 808315 - RNA, 22 nt, Human
cugagccacugcuuguucagug

SEQ ID NO: 808316 - RNA, 22 nt, Human
aauucacaguucugcaccuuac

SEQ ID NO: 808317 - RNA, 22 nt, Human
ugggccucaguuugcuuaaugu

SEQ ID NO: 808318 - RNA, 22 nt, Human
ugacaggauugguugcuucuga

SEQ ID NO: 808319 - RNA, 22 nt, Human
gggcaguguggucgugccuuug

SEQ ID NO: 808320 - RNA, 22 nt, Human
cucaguguuggagaccuucagg

SEQ ID NO: 808321 - RNA, 22 nt, Human
ggaccaggagcucagagcccuc

SEQ ID NO: 808322 - RNA, 22 nt, Human
cuggagccccagacagggagag

SEQ ID NO: 808323 - RNA, 22 nt, Human
gccugugccucagccugcagcc

SEQ ID NO: 808324 - RNA, 22 nt, Human
aggaauuauuugucuuagucuu

SEQ ID NO: 808325 - RNA, 22 nt, Human
cuuguuuuuaagagauguuuac

SEQ ID NO: 808326 - RNA, 22 nt, Human
ggcaggugcuaagagagguaaa

SEQ ID NO: 808327 - RNA, 22 nt, Human
acagugauuucugcaagggcuc

SEQ ID NO: 808328 - RNA, 22 nt, Human
ggcugcuggcagauguaguuua

SEQ ID NO: 808329 - RNA, 22 nt, Human
gcuucccaaugugcuaguuucu

SEQ ID NO: 808330 - RNA, 22 nt, Human
cccuggaggucagaggccuggg

SEQ ID NO: 808331 - RNA, 22 nt, Human
gucccaggcuccauggcagcca

SEQ ID NO: 808332 - RNA, 22 nt, Human
uugagaacuacuuuauuauucu

SEQ ID NO: 808333 - RNA, 22 nt, Human
uuucuaaacuggauucagccug

SEQ ID NO: 808334 - RNA, 22 nt, Human
uugaucaagugggaaauaguaa

SEQ ID NO: 808335 - RNA, 22 nt, Human
ugccagcaagaauagacaguaa

SEQ ID NO: 808336 - RNA, 20 nt, Human
ucugcagcacuugacaaugu

SEQ ID NO: 808337 - RNA, 22 nt, Human
aauagaggagcuuuggacuccc

SEQ ID NO: 808338 - RNA, 22 nt, Human
aagccagggauuccugagggag

SEQ ID NO: 808339 - RNA, 22 nt, Human
uaaaaugguaacuuucauuugc

SEQ ID NO: 808340 - RNA, 21 nt, Human
gccagccuguuuaccuguggu

SEQ ID NO: 808341 - RNA, 23 nt, Human
aagcacagaaugguuuaggaguu

SEQ ID NO: 808342 - RNA, 22 nt, Human
gcuggaguuggcaaggcaugua

SEQ ID NO: 808343 - RNA, 22 nt, Human
uuuuaagaugcuaguauuucag

SEQ ID NO: 808344 - RNA, 19 nt, Human
acagauggaggaaucuggg

SEQ ID NO: 808345 - RNA, 22 nt, Human
aaaauucauagaacuguacgcu

SEQ ID NO: 808346 - RNA, 22 nt, Human
aagauaauauucauuaacuaga

SEQ ID NO: 808347 - RNA, 22 nt, Human
ucuaaaaugcagaucuacuggu

SEQ ID NO: 808348 - RNA, 22 nt, Human
gggcuucaggguacuuccuccu

SEQ ID NO: 808349 - RNA, 22 nt, Human
ugcagaggcgccgugggugggg

SEQ ID NO: 808350 - RNA, 22 nt, Human
agugcagaggcugggaaaugcu

SEQ ID NO: 808351 - RNA, 22 nt, Human
uccugggcaaagaggggcagug

SEQ ID NO: 808352 - RNA, 22 nt, Human
aaacucaagucuaugaacaagg

SEQ ID NO: 808353 - RNA, 22 nt, Human
gccagcagcucuugggcgggca

SEQ ID NO: 808354 - RNA, 22 nt, Human
gagggcagaaaauuaugcggug

SEQ ID NO: 808355 - RNA, 22 nt, Human
guacaauaacuagucuuauagu

SEQ ID NO: 808356 - RNA, 22 nt, Human
gcucagcucuauggacacaaag

SEQ ID NO: 808357 - RNA, 23 nt, Human
uucuucauuuucagaguugagca

SEQ ID NO: 808358 - RNA, 22 nt, Human
uggauaaaaucuguaaggcuca

SEQ ID NO: 808359 - RNA, 22 nt, Human
cucuccaggacuuuggcccaau

SEQ ID NO: 808360 - RNA, 19 nt, Human
cagggauggguagggacuc

SEQ ID NO: 808361 - RNA, 22 nt, Human
ccagcaggguugguuucuucug

SEQ ID NO: 808362 - RNA, 22 nt, Human
agcaggcuuaugguugaaggga

SEQ ID NO: 808363 - RNA, 22 nt, Human
gcccuggagagggauauggcau

SEQ ID NO: 808364 - RNA, 22 nt, Human
uaggaaggaggccaucuuggcg

SEQ ID NO: 808365 - RNA, 23 nt, Human
uuucucauccagagagucagucc

SEQ ID NO: 808366 - RNA, 22 nt, Human
aguggcaauguagagagugauc

SEQ ID NO: 808367 - RNA, 22 nt, Human
ugucaugucuguaaauacacca

SEQ ID NO: 808368 - RNA, 17 nt, Human
uuucaaagcagucagga

SEQ ID NO: 808369 - RNA, 22 nt, Human
agcagagucuucaagggcaggc

SEQ ID NO: 808370 - RNA, 22 nt, Human
uggcuggacagugggcagugga

SEQ ID NO: 808371 - RNA, 22 nt, Human
aggcuucaccugcaccugagcu

SEQ ID NO: 808372 - RNA, 22 nt, Human
caguuucuuaucuucaaaauug

SEQ ID NO: 808373 - RNA, 17 nt, Human
cagugcuucugcuucuu

SEQ ID NO: 808374 - RNA, 22 nt, Human
gugcuuaugugggagggagagg

SEQ ID NO: 808375 - RNA, 23 nt, Human
ugggcagcuucugcaugcccacc

SEQ ID NO: 808376 - RNA, 22 nt, Human
ccugcccacuccaggagcaacu

SEQ ID NO: 808377 - RNA, 22 nt, Human
uugguuuucaggggcaggauaa

SEQ ID NO: 808378 - RNA, 22 nt, Human
ugggccaggucugcggucauuu

SEQ ID NO: 808379 - RNA, 22 nt, Human
agcuggcuggccccuuccugcc

SEQ ID NO: 808380 - RNA, 22 nt, Human
ccucugcaaagaauuugucucc

SEQ ID NO: 808381 - RNA, 22 nt, Human
agguggagugaaggaaaggcag

SEQ ID NO: 808382 - RNA, 22 nt, Human
auuucaugaguuauuauagugg

SEQ ID NO: 808383 - RNA, 22 nt, Human
cuguuuuugugcugugucuccc

SEQ ID NO: 808384 - RNA, 22 nt, Human
cuggcaguuugccaggagcucg

SEQ ID NO: 808385 - RNA, 18 nt, Human
cacaggagaugaccugac

SEQ ID NO: 808386 - RNA, 19 nt, Human
ucagaacucagaaugugua

SEQ ID NO: 808387 - RNA, 22 nt, Human
ucaggcuguaaauggugugggu

SEQ ID NO: 808388 - RNA, 22 nt, Human
cugggcucuagaaaggaaagaa

SEQ ID NO: 808389 - RNA, 22 nt, Human
agggugguggcgaugaggacau

SEQ ID NO: 808390 - RNA, 22 nt, Human
gcuaggcucggaagcagcaggg

SEQ ID NO: 808391 - RNA, 22 nt, Human
aacacaaagaagcugcaggauc

SEQ ID NO: 808392 - RNA, 22 nt, Human
ucagagaauucucagaugacuc

SEQ ID NO: 808393 - RNA, 22 nt, Human
agcuucaugccuaaagacagcg

SEQ ID NO: 808394 - RNA, 23 nt, Human
ugcaauaugucagugcaaagugg

SEQ ID NO: 808395 - RNA, 22 nt, Human
uuuguucaccuagcaaacuuuu

SEQ ID NO: 808396 - RNA, 22 nt, Human
cacccccagcagggaaaggagg

SEQ ID NO: 808397 - RNA, 22 nt, Human
cccaggaggucgaagcugcagu

SEQ ID NO: 808398 - RNA, 22 nt, Human
caggaggaggguacaccaucag

SEQ ID NO: 808399 - RNA, 22 nt, Human
agaagcuauaacaacaauuaua

SEQ ID NO: 808400 - RNA, 22 nt, Human
augcaaaugucaccacuucuaa

SEQ ID NO: 808401 - RNA, 22 nt, Human
cgaggaagaaguuugagucaag

SEQ ID NO: 808402 - RNA, 22 nt, Human
cugcccugucugcagccuggcu

SEQ ID NO: 808403 - RNA, 22 nt, Human
gauaucaugggaagguguacuu

SEQ ID NO: 808404 - RNA, 22 nt, Human
uuucauagucaaguguguauga

SEQ ID NO: 808405 - RNA, 22 nt, Human
aucucauaaacacacauauaug

SEQ ID NO: 808406 - RNA, 22 nt, Human
gaaggcuucaaaagguguaauu

SEQ ID NO: 808407 - RNA, 22 nt, Human
agcagaaaugaugguaugggac

SEQ ID NO: 808408 - RNA, 22 nt, Human
uaaaccuuauuugaauaccaac

SEQ ID NO: 808409 - RNA, 22 nt, Human
uuggucagcuaauaaggacagg

SEQ ID NO: 808410 - RNA, 22 nt, Human
cuuacaaaggagaggagauagg

SEQ ID NO: 808411 - RNA, 22 nt, Human
aaaucacagggucucuaaguau

SEQ ID NO: 808412 - RNA, 22 nt, Human
augaaauaucuugaagaaauuc

SEQ ID NO: 808413 - RNA, 22 nt, Human
aggugccagcucucaggcagga

SEQ ID NO: 808414 - RNA, 22 nt, Human
cacagugcucggguuuuauguc

SEQ ID NO: 808415 - RNA, 22 nt, Human
uguccagguggccucugcugcu

SEQ ID NO: 808416 - RNA, 17 nt, Human
ugaaacaccaagacugu

SEQ ID NO: 808417 - RNA, 22 nt, Human
auagaguuuuauuuuccaauaa

SEQ ID NO: 808418 - RNA, 22 nt, Human
aggcugcagugcagguaggauu

SEQ ID NO: 808419 - RNA, 22 nt, Human
cagcuggcugcaugaugccaaa

SEQ ID NO: 808420 - RNA, 22 nt, Human
ugccaggguccugagggccuug

SEQ ID NO: 808421 - RNA, 22 nt, Human
caagauggagaagcagcaaggg

SEQ ID NO: 808422 - RNA, 22 nt, Human
gggcagagacucagaaacagaa

SEQ ID NO: 808423 - RNA, 22 nt, Human
ccuguaggcgagggauggacag

SEQ ID NO: 808424 - RNA, 22 nt, Human
agaaaugucaggaaagaagucc

SEQ ID NO: 808425 - RNA, 22 nt, Human
agaacagccuauaguggccuuu

SEQ ID NO: 808426 - RNA, 22 nt, Human
uucaacaaauauuuauugagcu

SEQ ID NO: 808427 - RNA, 22 nt, Human
gaagccuugaacugcaaacccc

SEQ ID NO: 808428 - RNA, 22 nt, Human
ucaaaguauaucccuucgaaac

SEQ ID NO: 808429 - RNA, 20 nt, Human
ugcagaagaacguucugguu

SEQ ID NO: 808430 - RNA, 22 nt, Human
cugggcaggauacuucauggga

SEQ ID NO: 808431 - RNA, 22 nt, Human
ucaggaaauggacaucuuugcu

SEQ ID NO: 808432 - RNA, 22 nt, Human
agcaaauaaagacaauuauguc

SEQ ID NO: 808433 - RNA, 21 nt, Human
agcugaaaaguuguuuacaag

SEQ ID NO: 808434 - RNA, 22 nt, Human
cauggcaggcuucuucagccuu

SEQ ID NO: 808435 - RNA, 22 nt, Human
gcagggcaucccugagcgggug

SEQ ID NO: 808436 - RNA, 22 nt, Human
gaggccaggggucagcaauugg

SEQ ID NO: 808437 - RNA, 22 nt, Human
cuuaauaauaggugaggcuaug

SEQ ID NO: 808438 - RNA, 22 nt, Human
uggggccagagcugcagggagc

SEQ ID NO: 808439 - RNA, 22 nt, Human
uuuuucccaaaggcaauugccu

SEQ ID NO: 808440 - RNA, 22 nt, Human
uuuccuagagucucuagaagaa

SEQ ID NO: 808441 - RNA, 22 nt, Human
gguggcccuaaccgcagccucc

SEQ ID NO: 808442 - RNA, 22 nt, Human
gcagcugccccgacugugaguc

SEQ ID NO: 808443 - RNA, 22 nt, Human
auacaaauuuauagaugcauuu

SEQ ID NO: 808444 - RNA, 22 nt, Human
agggaggcaggaaaguugucug

SEQ ID NO: 808445 - RNA, 22 nt, Human
ucacaagagcuggacugucuuu

SEQ ID NO: 808446 - RNA, 22 nt, Human
ucccucucccuauugccuggag

SEQ ID NO: 808447 - RNA, 22 nt, Human
gagaagccgagucagcugagcc

SEQ ID NO: 808448 - RNA, 22 nt, Human
uagauuucaggagacaaaaugg

SEQ ID NO: 808449 - RNA, 22 nt, Human
uuacauauuauccaaaacugcu

SEQ ID NO: 808450 - RNA, 22 nt, Human
ugucauggagcuuauauuccag

SEQ ID NO: 808451 - RNA, 22 nt, Human
acagagagaggcccgaggcugc

SEQ ID NO: 808452 - RNA, 19 nt, Human
ccuggccagacuucugccc

SEQ ID NO: 808453 - RNA, 22 nt, Human
aagcuuuaugacuuggagacag

SEQ ID NO: 808454 - RNA, 22 nt, Human
cccagcuccagagccagaaaca

SEQ ID NO: 808455 - RNA, 22 nt, Human
aguguuucuggcaaaugaaagu

SEQ ID NO: 808456 - RNA, 22 nt, Human
ggaggagcacuugacggggucu

SEQ ID NO: 808457 - RNA, 22 nt, Human
acagaaaaugccagaagggugg

SEQ ID NO: 808458 - RNA, 22 nt, Human
acagaaaugauguuuggcaaua

SEQ ID NO: 808459 - RNA, 22 nt, Human
cagugggauaugggggcagcau

SEQ ID NO: 808460 - RNA, 22 nt, Human
gccacccuggaccacccugggc

SEQ ID NO: 808461 - RNA, 22 nt, Human
uuucugaacaaagccauuauca

SEQ ID NO: 808462 - RNA, 22 nt, Human
cuauucaacuugacuguuucac

SEQ ID NO: 808463 - RNA, 22 nt, Human
acacaggaagucagcacugaug

SEQ ID NO: 808464 - RNA, 22 nt, Human
aagaacaugaacacaauguuua

SEQ ID NO: 808465 - RNA, 18 nt, Human
ccagagcuggcuccucgc

SEQ ID NO: 808466 - RNA, 22 nt, Human
acacaguucuuucacuguuggu

SEQ ID NO: 808467 - RNA, 22 nt, Human
cuuguuuuggaacagagugaau

SEQ ID NO: 808468 - RNA, 23 nt, Human
ccuuaaauaucuacccuguggca

SEQ ID NO: 808469 - RNA, 22 nt, Human
gcaggggcuacucugagcuucc

SEQ ID NO: 808470 - RNA, 20 nt, Human
cauuucauugugucuucacu

SEQ ID NO: 808471 - RNA, 22 nt, Human
ucaaguauuauuacagauguag

SEQ ID NO: 808472 - RNA, 22 nt, Human
cccucagucuggcugggaagac

SEQ ID NO: 808473 - RNA, 22 nt, Human
cuuauggaagaaaccucagaga

SEQ ID NO: 808474 - RNA, 22 nt, Human
cugaggugugagccacuucccc

SEQ ID NO: 808475 - RNA, 22 nt, Human
uagcaaaugucugaaggaauag

SEQ ID NO: 808476 - RNA, 22 nt, Human
caugagugaguaucucaagaua

SEQ ID NO: 808477 - RNA, 22 nt, Human
gaagcaguauccugacagcacc

SEQ ID NO: 808478 - RNA, 22 nt, Human
ggcuuugggauucagcaugaga

SEQ ID NO: 808479 - RNA, 18 nt, Human
aaaaugcaggcgacaugg

SEQ ID NO: 808480 - RNA, 22 nt, Human
uaaaccuucaugauggucauua

SEQ ID NO: 808481 - RNA, 22 nt, Human
uccugaaaugugcacaugacau

SEQ ID NO: 808482 - RNA, 22 nt, Human
guuuuuccugcugacuuggguc

SEQ ID NO: 808483 - RNA, 22 nt, Human
gcugcccaguucugcugcugcc

SEQ ID NO: 808484 - RNA, 22 nt, Human
gaagauaauuccuacuuauaac

SEQ ID NO: 808485 - RNA, 21 nt, Human
ggacuuggaugguggcaguag

SEQ ID NO: 808486 - RNA, 22 nt, Human
uacuauuuuugcaacguauaca

SEQ ID NO: 808487 - RNA, 22 nt, Human
cagguggguguaugaaugcaaa

SEQ ID NO: 808488 - RNA, 22 nt, Human
gccuagugcacuggcagggcuc

SEQ ID NO: 808489 - RNA, 21 nt, Human
gccugcugccuguggccgguc

SEQ ID NO: 808490 - RNA, 22 nt, Human
cccaggcaggagugugguggcu

SEQ ID NO: 808491 - RNA, 22 nt, Human
agcagggcaaagucaggcuaac

SEQ ID NO: 808492 - RNA, 22 nt, Human
gcaaagacaaauuagaacuccu

SEQ ID NO: 808493 - RNA, 22 nt, Human
aaauacuauugaccaggucucu

SEQ ID NO: 808494 - RNA, 22 nt, Human
gcacauuugccacugagcuccu

SEQ ID NO: 808495 - RNA, 22 nt, Human
auuaguaguaguuagcagccuc

SEQ ID NO: 808496 - RNA, 22 nt, Human
ccuccuggggugaaggauggga

SEQ ID NO: 808497 - RNA, 22 nt, Human
ugagcuggaggacaggagggua

SEQ ID NO: 808498 - RNA, 22 nt, Human
ugggcucauggcccagcacugg

SEQ ID NO: 808499 - RNA, 22 nt, Human
cuuugcaggaguaugugauaau

SEQ ID NO: 808500 - RNA, 22 nt, Human
cacacuugugaccgauauaaug

SEQ ID NO: 808501 - RNA, 22 nt, Human
uuucucagugcaguuucuacgu

SEQ ID NO: 808502 - RNA, 22 nt, Human
gauuuugaauauuaaagaagag

SEQ ID NO: 808503 - RNA, 22 nt, Human
agcuucucaggagucugaggca

SEQ ID NO: 808504 - RNA, 22 nt, Human
agcaggugggaucaagcuggca

SEQ ID NO: 808505 - RNA, 22 nt, Human
uaaagugggcaaacucucaugg

SEQ ID NO: 808506 - RNA, 22 nt, Human
agauauuuaaaucagacaaaga

SEQ ID NO: 808507 - RNA, 22 nt, Human
aggcccaguccucugccgucug

SEQ ID NO: 808508 - RNA, 22 nt, Human
uuccaacaauguguuauuguuc

SEQ ID NO: 808509 - RNA, 22 nt, Human
agcagcuuaucuuggagaggca

SEQ ID NO: 808510 - RNA, 22 nt, Human
aaguccugggugagaacugucc

SEQ ID NO: 808511 - RNA, 22 nt, Human
cacuuuuaacaggagaauuccc

SEQ ID NO: 808512 - RNA, 22 nt, Human
aaagugcaaggauuacaggcau

SEQ ID NO: 808513 - RNA, 22 nt, Human
cucucuuugauguauaaauaau

SEQ ID NO: 808514 - RNA, 22 nt, Human
uggggugaaucuuuguuguccg

SEQ ID NO: 808515 - RNA, 22 nt, Human
uguuuugugcauuuacaacaug

SEQ ID NO: 808516 - RNA, 22 nt, Human
agucagucaccauuuaagaaca

SEQ ID NO: 808517 - RNA, 22 nt, Human
augcaaauaaagcaacuauaca

SEQ ID NO: 808518 - RNA, 22 nt, Human
cuggaagcuuguuugccagucu

SEQ ID NO: 808519 - RNA, 22 nt, Human
cacaggagcccugaggccuccc

SEQ ID NO: 808520 - RNA, 22 nt, Human
ugcagaaguauuccaggcccca

SEQ ID NO: 808521 - RNA, 22 nt, Human
gugcccaguugaggccaggacu

SEQ ID NO: 808522 - RNA, 22 nt, Human
augacaaaagaagacaugaggu

SEQ ID NO: 808523 - RNA, 22 nt, Human
gcagauguuguugcugggaguu

SEQ ID NO: 808524 - RNA, 22 nt, Human
ugcagcagcagggaggaggcuc

SEQ ID NO: 808525 - RNA, 22 nt, Human
acacauuucucccagucuccau

SEQ ID NO: 808526 - RNA, 22 nt, Human
uuauuaauacaugcaccugcau

SEQ ID NO: 808527 - RNA, 22 nt, Human
uagugucaaauagccugagcuu

SEQ ID NO: 808528 - RNA, 22 nt, Human
cuggagcauuuucugcuucugc

SEQ ID NO: 808529 - RNA, 17 nt, Human
uccuuggcaaccaguuc

SEQ ID NO: 808530 - RNA, 22 nt, Human
uuauaugauugaagugcauaag

SEQ ID NO: 808531 - RNA, 22 nt, Human
caacuacauccacacuuuguua

SEQ ID NO: 808532 - RNA, 22 nt, Human
aguuguaagagacagauauaaa

SEQ ID NO: 808533 - RNA, 22 nt, Human
aucuagaagucauggcuuucuu

SEQ ID NO: 808534 - RNA, 19 nt, Human
auaaauaaaaagugggaga

SEQ ID NO: 808535 - RNA, 17 nt, Human
aggcagcucagaacauc

SEQ ID NO: 808536 - RNA, 22 nt, Human
uguuuucuauuaccugagauug

SEQ ID NO: 808537 - RNA, 18 nt, Human
aaauggcagaauggauag

SEQ ID NO: 808538 - RNA, 21 nt, Human
uauacaugugcacacacaugc

SEQ ID NO: 808539 - RNA, 18 nt, Human
uuggcuuugagaacuggu

SEQ ID NO: 808540 - RNA, 22 nt, Human
gagaaacaacacuugaugccuu

SEQ ID NO: 808541 - RNA, 22 nt, Human
uuggcugaccagaaccugcccc

SEQ ID NO: 808542 - RNA, 22 nt, Human
cugaagcaggaggggaggcgcu

SEQ ID NO: 808543 - RNA, 22 nt, Human
ucuuaaaaguaugccaauugga

SEQ ID NO: 808544 - RNA, 22 nt, Human
uucuaaacugaaguauuuuaaa

SEQ ID NO: 808545 - RNA, 22 nt, Human
uagcccagaugauugaaccaug

SEQ ID NO: 808546 - RNA, 22 nt, Human
uuucauguguugaauguguaca

SEQ ID NO: 808547 - RNA, 20 nt, Human
ucaggagccuaggacaugau

SEQ ID NO: 808548 - RNA, 21 nt, Human
auucaacuagaugauuauuuc

SEQ ID NO: 808549 - RNA, 23 nt, Human
agcuccugaggccagccucuccu

SEQ ID NO: 808550 - RNA, 22 nt, Human
ggcagagcuaguggcuucucuu

SEQ ID NO: 808551 - RNA, 22 nt, Human
ucagauauucucuaagaacaau

SEQ ID NO: 808552 - RNA, 22 nt, Human
aggagaggcucuaacucugugu

SEQ ID NO: 808553 - RNA, 22 nt, Human
cagagcugucauuugccaguga

SEQ ID NO: 808554 - RNA, 18 nt, Human
ggcugagguugacuagaa

SEQ ID NO: 808555 - RNA, 22 nt, Human
cuggagccuucaccaggggaaa

SEQ ID NO: 808556 - RNA, 22 nt, Human
cccuggaaaugaggcaugugcg

SEQ ID NO: 808557 - RNA, 22 nt, Human
uucagaaugcuauuucugaaau

SEQ ID NO: 808558 - RNA, 22 nt, Human
ugcuggagcggaggugagccag

SEQ ID NO: 808559 - RNA, 22 nt, Human
agcccuggcagagccagguagu

SEQ ID NO: 808560 - RNA, 22 nt, Human
augcauauugauuauagauuca

SEQ ID NO: 808561 - RNA, 22 nt, Human
gaggcagcagggcugguuccuu

SEQ ID NO: 808562 - RNA, 23 nt, Human
acugccugcuacuaugcccacgg

SEQ ID NO: 808563 - RNA, 22 nt, Human
acuggcccgggagcagaggccu

SEQ ID NO: 808564 - RNA, 22 nt, Human
agagccugcaguggagaccuug

SEQ ID NO: 808565 - RNA, 22 nt, Human
agauuucaauggauauugcaag

SEQ ID NO: 808566 - RNA, 22 nt, Human
uggacagguugaguaggaggag

SEQ ID NO: 808567 - RNA, 21 nt, Human
ggugacacguggccccgcucu

SEQ ID NO: 808568 - RNA, 19 nt, Human
acuggcagggcugcggugg

SEQ ID NO: 808569 - RNA, 22 nt, Human
cagagggcuguguaaggauguu

SEQ ID NO: 808570 - RNA, 22 nt, Human
uggccucaaccguccuaagcac

SEQ ID NO: 808571 - RNA, 22 nt, Human
cauugucacccaaagcucauag

SEQ ID NO: 808572 - RNA, 22 nt, Human
gucuuauaguacaauuugaagu

SEQ ID NO: 808573 - RNA, 22 nt, Human
aggauggcuugcaggaggcugu

SEQ ID NO: 808574 - RNA, 22 nt, Human
ucaggaagccacuccacagaga

SEQ ID NO: 808575 - RNA, 22 nt, Human
aggggagcaaggccguggugua

SEQ ID NO: 808576 - RNA, 22 nt, Human
cuggagggacuuucucacggau

SEQ ID NO: 808577 - RNA, 22 nt, Human
uggcugaagugggcaggaggga

SEQ ID NO: 808578 - RNA, 22 nt, Human
gcagcugcagacccucagugcu

SEQ ID NO: 808579 - RNA, 22 nt, Human
auggcagcuggcuugggcaccu

SEQ ID NO: 808580 - RNA, 22 nt, Human
uccaggccaauguagcaggccc

SEQ ID NO: 808581 - RNA, 22 nt, Human
uagagaugaauucugcagucuu

SEQ ID NO: 808582 - RNA, 22 nt, Human
uuaacacauauuuaucaauugc

SEQ ID NO: 808583 - RNA, 22 nt, Human
uccaggagauacacugcaccag

SEQ ID NO: 808584 - RNA, 22 nt, Human
agcagcuuuccucuggggucag

SEQ ID NO: 808585 - RNA, 22 nt, Human
ggagggcugagacuggggucug

SEQ ID NO: 808586 - RNA, 22 nt, Human
auauacaaagggcaaccucgcu

SEQ ID NO: 808587 - RNA, 22 nt, Human
aacaguaaaaaucauuuaguug

SEQ ID NO: 808588 - RNA, 22 nt, Human
aagagagagcauucuucuguua

SEQ ID NO: 808589 - RNA, 22 nt, Human
gaguggggcuuuaaaggcucag

SEQ ID NO: 808590 - RNA, 22 nt, Human
gaaauguuaugagauauguacu

SEQ ID NO: 808591 - RNA, 22 nt, Human
ccccuucucugcaagccugcuc

SEQ ID NO: 808592 - RNA, 22 nt, Human
agcugaggcauggacaggcugc

SEQ ID NO: 808593 - RNA, 22 nt, Human
aauguugcagagugauugucca

SEQ ID NO: 808594 - RNA, 22 nt, Human
cccugcaguccuuucuuggcuc

SEQ ID NO: 808595 - RNA, 22 nt, Human
cuuucuuugcagugagccagag

SEQ ID NO: 808596 - RNA, 22 nt, Human
gaggcuggcagaaaagcacagg

SEQ ID NO: 808597 - RNA, 17 nt, Human
acagcaggcccggaggg

SEQ ID NO: 808598 - RNA, 23 nt, Human
uuuuaauuuggacauaagaagau

SEQ ID NO: 808599 - RNA, 20 nt, Human
uggccucuguagaggccaag

SEQ ID NO: 808600 - RNA, 22 nt, Human
ucaauucugccucuaaauauuu

SEQ ID NO: 808601 - RNA, 22 nt, Human
cucagggaggcccugggacccu

SEQ ID NO: 808602 - RNA, 22 nt, Human
ggcugugcagggcagagucuca

SEQ ID NO: 808603 - RNA, 22 nt, Human
ugagcaguggcaccaggucacc

SEQ ID NO: 808604 - RNA, 22 nt, Human
gagguggcugcuugcugggaaa

SEQ ID NO: 808605 - RNA, 22 nt, Human
uaaaggaacugcugcuauggaa

SEQ ID NO: 808606 - RNA, 22 nt, Human
ccucgaccuccccaggcucagg

SEQ ID NO: 808607 - RNA, 18 nt, Human
acgugcugugccuuuugc

SEQ ID NO: 808608 - RNA, 22 nt, Human
cugcugugucagaguccagggg

SEQ ID NO: 808609 - RNA, 22 nt, Human
ggccagcagaccucagggacuc

SEQ ID NO: 808610 - RNA, 17 nt, Human
ggcuggaggggacccgg

SEQ ID NO: 808611 - RNA, 22 nt, Human
ccaucagauuagcaaaauccag

SEQ ID NO: 808612 - RNA, 22 nt, Human
caacaauaugcugaguuuuuca

SEQ ID NO: 808613 - RNA, 22 nt, Human
cagucacacaaguggacuuggg

SEQ ID NO: 808614 - RNA, 18 nt, Human
guccacagcccucacagc

SEQ ID NO: 808615 - RNA, 22 nt, Human
auguccaauuucagagucucau

SEQ ID NO: 808616 - RNA, 22 nt, Human
caggagccacauuccaccuuga

SEQ ID NO: 808617 - RNA, 22 nt, Human
uuuacagaugaggauacugagg

SEQ ID NO: 808618 - RNA, 19 nt, Human
ggaaggagagaaaugcaug

SEQ ID NO: 808619 - RNA, 20 nt, Human
uguccaggggaucguuggcc

SEQ ID NO: 808620 - RNA, 22 nt, Human
caggcacaaugagcgccaucuu

SEQ ID NO: 808621 - RNA, 22 nt, Human
aacaguaagagauguuuuaucu

SEQ ID NO: 808622 - RNA, 22 nt, Human
uccugcuggaaguagggaauga

SEQ ID NO: 808623 - RNA, 22 nt, Human
uuacaugacugcccuugucagg

SEQ ID NO: 808624 - RNA, 22 nt, Human
gcaggccucuguugagggccuu

SEQ ID NO: 808625 - RNA, 22 nt, Human
ucucucuugucaccccaucugc

SEQ ID NO: 808626 - RNA, 22 nt, Human
agucaguagauccaaacuuuug

SEQ ID NO: 808627 - RNA, 22 nt, Human
uggcccugacuuggaggccuga

SEQ ID NO: 808628 - RNA, 22 nt, Human
ucuccugggugcuuuaucagaa

SEQ ID NO: 808629 - RNA, 18 nt, Human
cuccuuggagaagaggcc

SEQ ID NO: 808630 - RNA, 22 nt, Human
aaauuuuccugguaaagaugga

SEQ ID NO: 808631 - RNA, 22 nt, Human
augaaacaguguguauagcaaa

SEQ ID NO: 808632 - RNA, 22 nt, Human
uaucagaugacaucuucuaugg

SEQ ID NO: 808633 - RNA, 22 nt, Human
ggagugacucucggggccacua

SEQ ID NO: 808634 - RNA, 22 nt, Human
ugucuuuacuuaauaaauauac

SEQ ID NO: 808635 - RNA, 22 nt, Human
acaggggcaggcaggacccuuu

SEQ ID NO: 808636 - RNA, 22 nt, Human
ccacauuucuucacuuguccca

SEQ ID NO: 808637 - RNA, 22 nt, Human
uuacaaguuucuggcuucaucc

SEQ ID NO: 808638 - RNA, 22 nt, Human
uucauaugcagauuaacaaaua

SEQ ID NO: 808639 - RNA, 22 nt, Human
cuuuacuucagcaagcuuuccu

SEQ ID NO: 808640 - RNA, 22 nt, Human
aguggcugauguaggcaguggg

SEQ ID NO: 808641 - RNA, 22 nt, Human
agugggcaggcagggugcgcag

SEQ ID NO: 808642 - RNA, 22 nt, Human
caagggugaaggcuccuccagg

SEQ ID NO: 808643 - RNA, 22 nt, Human
aucccccucuuggauggcggca

SEQ ID NO: 808644 - RNA, 22 nt, Human
guacauucuguggacuuggaca

SEQ ID NO: 808645 - RNA, 22 nt, Human
aauagcuuaugggauagauguu

SEQ ID NO: 808646 - RNA, 22 nt, Human
gccacaggaaagcacccuggag

SEQ ID NO: 808647 - RNA, 22 nt, Human
auuuguaagcuagagccaugau

SEQ ID NO: 808648 - RNA, 22 nt, Human
uguuuacauggagguuuucagc

SEQ ID NO: 808649 - RNA, 22 nt, Human
cuacagaaaccuuuuucauaca

SEQ ID NO: 808650 - RNA, 22 nt, Human
guauuacaaauaaauguuacug

SEQ ID NO: 808651 - RNA, 22 nt, Human
agacaauauauaauuuuaguug

SEQ ID NO: 808652 - RNA, 22 nt, Human
aaaggaagauugagcuuuucca

SEQ ID NO: 808653 - RNA, 22 nt, Human
aucuaacugggcuauuuuauug

SEQ ID NO: 808654 - RNA, 22 nt, Human
agagucaagguggcauuuagcu

SEQ ID NO: 808655 - RNA, 22 nt, Human
ucuggcuggcagugauggugug

SEQ ID NO: 808656 - RNA, 22 nt, Human
guucacauggcauuuucacauc

SEQ ID NO: 808657 - RNA, 22 nt, Human
acaaaaaccguggauucagcau

SEQ ID NO: 808658 - RNA, 22 nt, Human
ccagggcaaaugagaucauagc

SEQ ID NO: 808659 - RNA, 22 nt, Human
gccagcucccaagugagccccu

SEQ ID NO: 808660 - RNA, 22 nt, Human
caacaauaugccagacucaauu

SEQ ID NO: 808661 - RNA, 22 nt, Human
acaaaguaggcagugggcugga

SEQ ID NO: 808662 - RNA, 22 nt, Human
ccagcucaucucagugaaaugc

SEQ ID NO: 808663 - RNA, 22 nt, Human
uuacugauacacauaagaauuu

SEQ ID NO: 808664 - RNA, 22 nt, Human
uccagcacccaauguggcuaag

SEQ ID NO: 808665 - RNA, 22 nt, Human
uuugugcuaaugcuagauuacu

SEQ ID NO: 808666 - RNA, 22 nt, Human
aaauaucuuaggaguauaugag

SEQ ID NO: 808667 - RNA, 22 nt, Human
uuucagaguugucuucuugacc

SEQ ID NO: 808668 - RNA, 21 nt, Human
gcagagcuggaaccaggaccc

SEQ ID NO: 808669 - RNA, 22 nt, Human
uuugcaaauuucgucuccucag

SEQ ID NO: 808670 - RNA, 22 nt, Human
uuuuuaaccuaccuuaagagca

SEQ ID NO: 808671 - RNA, 22 nt, Human
aggcuaggggaacacuagaauc

SEQ ID NO: 808672 - RNA, 22 nt, Human
gccagcaguggccaccaccagg

SEQ ID NO: 808673 - RNA, 22 nt, Human
uucguuuucuaggaccaacaga

SEQ ID NO: 808674 - RNA, 22 nt, Human
uccagcagacucaucagcaagg

SEQ ID NO: 808675 - RNA, 22 nt, Human
gaauucuaccagggcaagaggg

SEQ ID NO: 808676 - RNA, 22 nt, Human
gauuguaaaacagaucauuauc

SEQ ID NO: 808677 - RNA, 22 nt, Human
ccugccaggccagugagcuucc

SEQ ID NO: 808678 - RNA, 22 nt, Human
uuaaacaguauaucugagcaag

SEQ ID NO: 808679 - RNA, 22 nt, Human
cuuuccucuggcacugucuggu

SEQ ID NO: 808680 - RNA, 22 nt, Human
auguuuuugagauacaaacaga

SEQ ID NO: 808681 - RNA, 22 nt, Human
aacagauauaggcagaacuuug

SEQ ID NO: 808682 - RNA, 22 nt, Human
gagcuuuuacugcuguauugaa

SEQ ID NO: 808683 - RNA, 22 nt, Human
aagauauagauaaaacuaugca

SEQ ID NO: 808684 - RNA, 22 nt, Human
gcagaggcuguagggaagguug

SEQ ID NO: 808685 - RNA, 22 nt, Human
ccagggugggguccaggaacca

SEQ ID NO: 808686 - RNA, 22 nt, Human
ucauuucuccgaccugcugucc

SEQ ID NO: 808687 - RNA, 22 nt, Human
cuccuagaugucuucagagaaa

SEQ ID NO: 808688 - RNA, 22 nt, Human
gccaggacugagaaugggagca

SEQ ID NO: 808689 - RNA, 22 nt, Human
agcuggccggccuccaggugga

SEQ ID NO: 808690 - RNA, 22 nt, Human
gggugggccugucuggccaugu

SEQ ID NO: 808691 - RNA, 22 nt, Human
uuucucuaaauagggaggcuua

SEQ ID NO: 808692 - RNA, 22 nt, Human
cugugcuugacagugggaagca

SEQ ID NO: 808693 - RNA, 22 nt, Human
aacuacagaaaagguaagcucu

SEQ ID NO: 808694 - RNA, 22 nt, Human
aagcaggagagccugggcgagc

SEQ ID NO: 808695 - RNA, 21 nt, Human
cucuucaguggugagcucuuc

SEQ ID NO: 808696 - RNA, 22 nt, Human
cagcaggcggcccgcgggcccg

SEQ ID NO: 808697 - RNA, 22 nt, Human
gcggcggagacagcaggaagcc

SEQ ID NO: 808698 - RNA, 22 nt, Human
cugggcugcuugcugaaggggu

SEQ ID NO: 808699 - RNA, 22 nt, Human
aguacaaaaugcagcaucauca

SEQ ID NO: 808700 - RNA, 22 nt, Human
ucaaaguaccauuaucagugga

SEQ ID NO: 808701 - RNA, 22 nt, Human
aagccaguggugagaagauagc

SEQ ID NO: 808702 - RNA, 23 nt, Human
cuguccaggauucuugagagaac

SEQ ID NO: 808703 - RNA, 22 nt, Human
augcaauaccuucugaaaauaa

SEQ ID NO: 808704 - RNA, 22 nt, Human
ucagaauuggacaauagaagca

SEQ ID NO: 808705 - RNA, 22 nt, Human
uagaaacccaggauuuguauuu

SEQ ID NO: 808706 - RNA, 22 nt, Human
ugcagguggcagcggggcacca

SEQ ID NO: 808707 - RNA, 22 nt, Human
uauucaaaguaccuucauugcc

SEQ ID NO: 808708 - RNA, 22 nt, Human
uccauggagauggaugacugua

SEQ ID NO: 808709 - RNA, 22 nt, Human
ggcagaccucuccagccccaca

SEQ ID NO: 808710 - RNA, 22 nt, Human
gccucugcaucuucgccgcacu

SEQ ID NO: 808711 - RNA, 22 nt, Human
caagaggcaaauugucuagaag

SEQ ID NO: 808712 - RNA, 22 nt, Human
gaagaauauauaaugauuuugu

SEQ ID NO: 808713 - RNA, 21 nt, Human
cauuucuauugaugagaaaag

SEQ ID NO: 808714 - RNA, 22 nt, Human
aaauucuggccuaucacaguga

SEQ ID NO: 808715 - RNA, 22 nt, Human
uuaaauuccagccucauaauag

SEQ ID NO: 808716 - RNA, 22 nt, Human
gcucaaauuucagacucaugaa

SEQ ID NO: 808717 - RNA, 22 nt, Human
aaaucaaaagacauguguuuua

SEQ ID NO: 808718 - RNA, 21 nt, Human
ucagcuguagagauuacauuc

SEQ ID NO: 808719 - RNA, 22 nt, Human
cacauuuagagguuagcauggu

SEQ ID NO: 808720 - RNA, 22 nt, Human
guucacaucccagaaagagcau

SEQ ID NO: 808721 - RNA, 20 nt, Human
agcuacaaugcgaagcuggc

SEQ ID NO: 808722 - RNA, 22 nt, Human
aaggcuggaccuggaugaaucu

SEQ ID NO: 808723 - RNA, 22 nt, Human
auugaaugcuugcuaacacuuu

SEQ ID NO: 808724 - RNA, 22 nt, Human
aucuuuggggcauccaggaaaa

SEQ ID NO: 808725 - RNA, 22 nt, Human
ccaucuccacugucccugucaa

SEQ ID NO: 808726 - RNA, 22 nt, Human
aggcccugagcauccgagggca

SEQ ID NO: 808727 - RNA, 22 nt, Human
uucacaaacaccagaauggcua

SEQ ID NO: 808728 - RNA, 22 nt, Human
aggaggcccuagagcucuagag

SEQ ID NO: 808729 - RNA, 22 nt, Human
auaugcauauaaagcuuuuagu

SEQ ID NO: 808730 - RNA, 22 nt, Human
uuaaagagaacucaaugaauga

SEQ ID NO: 808731 - RNA, 21 nt, Human
ugaaacagauggaaguauuug

SEQ ID NO: 808732 - RNA, 22 nt, Human
cuaaaauuaucaagauaauucc

SEQ ID NO: 808733 - RNA, 22 nt, Human
gcaggagcaauggccuaucaga

SEQ ID NO: 808734 - RNA, 22 nt, Human
gaggagcugaggcugaggccuc

SEQ ID NO: 808735 - RNA, 22 nt, Human
gggaggaaagagaaguggucca

SEQ ID NO: 808736 - RNA, 22 nt, Human
gugugcagugagcaaaagaucu

SEQ ID NO: 808737 - RNA, 22 nt, Human
aaucaaguauuuuccaguggca

SEQ ID NO: 808738 - RNA, 22 nt, Human
cugucuuuaguacaaaaaaugu

SEQ ID NO: 808739 - RNA, 22 nt, Human
ccaggcacucacggggcacugg

SEQ ID NO: 808740 - RNA, 22 nt, Human
ucuaggaguugauaaaagggcu

SEQ ID NO: 808741 - RNA, 22 nt, Human
gaagaaacaggggcuuggggag

SEQ ID NO: 808742 - RNA, 22 nt, Human
uuucugaaaacugaaguagugc

SEQ ID NO: 808743 - RNA, 22 nt, Human
auuucuguaacuuaugaaaguu

SEQ ID NO: 808744 - RNA, 22 nt, Human
gcugccuccugagauuugggca

SEQ ID NO: 808745 - RNA, 22 nt, Human
gccacagucaggacggggagag

SEQ ID NO: 808746 - RNA, 22 nt, Human
ggaacuuauacugccagauucu

SEQ ID NO: 808747 - RNA, 22 nt, Human
aguggcaggcggagauguagga

SEQ ID NO: 808748 - RNA, 22 nt, Human
cuuuacaauucaagggaacucu

SEQ ID NO: 808749 - RNA, 22 nt, Human
auuuccauuaucaugacaaauu

SEQ ID NO: 808750 - RNA, 22 nt, Human
caaggcagcccgcugaaccaca

SEQ ID NO: 808751 - RNA, 22 nt, Human
aguggcagacacaaugugggca

SEQ ID NO: 808752 - RNA, 22 nt, Human
ccacagcuccucagccucuuuc

SEQ ID NO: 808753 - RNA, 22 nt, Human
cugacuuuagaacccaaaaagu

SEQ ID NO: 808754 - RNA, 22 nt, Human
cuuauauuugucaacuuuacaa

SEQ ID NO: 808755 - RNA, 22 nt, Human
ugcagcagucagucaggccugg

SEQ ID NO: 808756 - RNA, 22 nt, Human
uucaguguuuguagagauaacu

SEQ ID NO: 808757 - RNA, 22 nt, Human
ugucauuauuugccuacugacu

SEQ ID NO: 808758 - RNA, 22 nt, Human
ugcaaaugggugaggguuagga

SEQ ID NO: 808759 - RNA, 22 nt, Human
aggcagugcucaagacagcagc

SEQ ID NO: 808760 - RNA, 22 nt, Human
ucucacagugcaggucugucuc

SEQ ID NO: 808761 - RNA, 22 nt, Human
auuucucagugaaaugacaggc

SEQ ID NO: 808762 - RNA, 20 nt, Human
auuuauguauagcuuguugu

SEQ ID NO: 808763 - RNA, 22 nt, Human
ugauucaaauauuguguaugau

SEQ ID NO: 808764 - RNA, 21 nt, Human
cccaggaggcugagaagagca

SEQ ID NO: 808765 - RNA, 22 nt, Human
aaacaucuacuguaggcuggag

SEQ ID NO: 808766 - RNA, 21 nt, Human
acagucuccccagaucucucc

SEQ ID NO: 808767 - RNA, 22 nt, Human
agggcagcacagcugugcuccu

SEQ ID NO: 808768 - RNA, 22 nt, Human
ccuggcagacugugagggcagg

SEQ ID NO: 808769 - RNA, 22 nt, Human
uggagcagcauucauccagcag

SEQ ID NO: 808770 - RNA, 22 nt, Human
aaaucauguuggcacaauaaaa

SEQ ID NO: 808771 - RNA, 22 nt, Human
gccagcagggaagccuugggcu

SEQ ID NO: 808772 - RNA, 22 nt, Human
gaaacauauuaauccagugaaa

SEQ ID NO: 808773 - RNA, 22 nt, Human
agcaccugugcccugauggaga

SEQ ID NO: 808774 - RNA, 22 nt, Human
gggaagagaggaggugguuucg

SEQ ID NO: 808775 - RNA, 22 nt, Human
cgcaccacugaauuccagccug

SEQ ID NO: 808776 - RNA, 22 nt, Human
aagugcauaaguaugauuauuu

SEQ ID NO: 808777 - RNA, 22 nt, Human
aauuuuaaucaguggugcugag

SEQ ID NO: 808778 - RNA, 22 nt, Human
agaggccagaaggcgcaccccg

SEQ ID NO: 808779 - RNA, 22 nt, Human
gaaacauuuguugaguacuugc

SEQ ID NO: 808780 - RNA, 22 nt, Human
aggccaggaccauuagcccaga

SEQ ID NO: 808781 - RNA, 22 nt, Human
caagugcaugguggcaaagaau

SEQ ID NO: 808782 - RNA, 22 nt, Human
caggaaaucacucugauuuugg

SEQ ID NO: 808783 - RNA, 22 nt, Human
caggaagggaaaauaguucggg

SEQ ID NO: 808784 - RNA, 22 nt, Human
ugcuuauaauguuacugacaac

SEQ ID NO: 808785 - RNA, 22 nt, Human
aaaugcaguugguggggauaug

SEQ ID NO: 808786 - RNA, 18 nt, Human
cagucccaaaccuuagga

SEQ ID NO: 808787 - RNA, 22 nt, Human
aagccaagguuuuggucacagc

SEQ ID NO: 808788 - RNA, 22 nt, Human
gggcaguguugugguucucuau

SEQ ID NO: 808789 - RNA, 22 nt, Human
ccuucccaggcuagaccaacau

SEQ ID NO: 808790 - RNA, 22 nt, Human
cucugcacccccggcuccucgu

SEQ ID NO: 808791 - RNA, 22 nt, Human
aggaggcugaacuagggucugg

SEQ ID NO: 808792 - RNA, 22 nt, Human
gucaaauauaugcaaaacuauu

SEQ ID NO: 808793 - RNA, 22 nt, Human
uaaggcaaguuuuuaguggaca

SEQ ID NO: 808794 - RNA, 22 nt, Human
aaaugcagacagcuucacacac

SEQ ID NO: 808795 - RNA, 22 nt, Human
cuggagggggaaauguucauug

SEQ ID NO: 808796 - RNA, 22 nt, Human
agagccccugguggagugagaa

SEQ ID NO: 808797 - RNA, 22 nt, Human
aaaugugucaguuucauucucu

SEQ ID NO: 808798 - RNA, 20 nt, Human
ugcagcacgggcccuuucca

SEQ ID NO: 808799 - RNA, 22 nt, Human
aacugcaacuucguaaagugag

SEQ ID NO: 808800 - RNA, 22 nt, Human
uuugauuuacuauaagcagcac

SEQ ID NO: 808801 - RNA, 22 nt, Human
caggcaggcugcuuuuuguuca

SEQ ID NO: 808802 - RNA, 22 nt, Human
aacuguggacuugagacugaug

SEQ ID NO: 808803 - RNA, 22 nt, Human
agagguggagcucuuggcauca

SEQ ID NO: 808804 - RNA, 22 nt, Human
guagaggcugaaaucugagggc

SEQ ID NO: 808805 - RNA, 22 nt, Human
auucuacaacccaauaauaauu

SEQ ID NO: 808806 - RNA, 22 nt, Human
aacaguaaagacagaauuuauc

SEQ ID NO: 808807 - RNA, 22 nt, Human
aaccaguuggcaaccagcaguu

SEQ ID NO: 808808 - RNA, 22 nt, Human
ugucauuuaauagauaugaugg

SEQ ID NO: 808809 - RNA, 22 nt, Human
aucauuuuauggcugagaggac

SEQ ID NO: 808810 - RNA, 22 nt, Human
ggccucagagaaggcugugcgg

SEQ ID NO: 808811 - RNA, 22 nt, Human
uucuuuauugagacuucauugu

SEQ ID NO: 808812 - RNA, 22 nt, Human
gacacaggggggcgcuagaaga

SEQ ID NO: 808813 - RNA, 22 nt, Human
ucauauaucugcaaagcaguau

SEQ ID NO: 808814 - RNA, 22 nt, Human
ugcuggcuuccugugcacagca

SEQ ID NO: 808815 - RNA, 22 nt, Human
uggaagcagugauucuugucug

SEQ ID NO: 808816 - RNA, 22 nt, Human
accccagggcugccagccuccu

SEQ ID NO: 808817 - RNA, 22 nt, Human
cuaaacauguuggugcuuuaaa

SEQ ID NO: 808818 - RNA, 22 nt, Human
ucuggaguaggaccugaaaaua

SEQ ID NO: 808819 - RNA, 22 nt, Human
cugggcugucaauggcccucug

SEQ ID NO: 808820 - RNA, 22 nt, Human
caggauggucucgaucuccuga

SEQ ID NO: 808821 - RNA, 19 nt, Human
agucacagaccuugucucc

SEQ ID NO: 808822 - RNA, 22 nt, Human
cuuaucugagaaagaugcuaca

SEQ ID NO: 808823 - RNA, 22 nt, Human
uuccuggguugugcauuguaca

SEQ ID NO: 808824 - RNA, 22 nt, Human
acaggauggccagcugauauug

SEQ ID NO: 808825 - RNA, 22 nt, Human
gugccaggugcuaagcugugcu

SEQ ID NO: 808826 - RNA, 22 nt, Human
ugucaugguauuugugagcugc

SEQ ID NO: 808827 - RNA, 22 nt, Human
aaugucaagggaagcaggaaau

SEQ ID NO: 808828 - RNA, 22 nt, Human
guuagagggcugccuuuuguuu

SEQ ID NO: 808829 - RNA, 22 nt, Human
ccagaggugaacaggaggcugu

SEQ ID NO: 808830 - RNA, 22 nt, Human
ggcaagugugagaagggacugg

SEQ ID NO: 808831 - RNA, 22 nt, Human
uucauuuguaacucuguuaggg

SEQ ID NO: 808832 - RNA, 21 nt, Human
aguuuuauauuauaagcuaaa

SEQ ID NO: 808833 - RNA, 22 nt, Human
aacauucuucaaauaucacucu

SEQ ID NO: 808834 - RNA, 22 nt, Human
caguuugugcuaggcacuauuu

SEQ ID NO: 808835 - RNA, 22 nt, Human
gaacacagguggcccggcaggg

SEQ ID NO: 808836 - RNA, 22 nt, Human
agcagcagagcucuggucugca

SEQ ID NO: 808837 - RNA, 22 nt, Human
acuguuuugugccuuaguuucc

SEQ ID NO: 808838 - RNA, 22 nt, Human
caggaggaaacuggauucacuu

SEQ ID NO: 808839 - RNA, 22 nt, Human
ugugucaaaguguggaguauuu

SEQ ID NO: 808840 - RNA, 22 nt, Human
agucuuuauuuagaguuaggac

SEQ ID NO: 808841 - RNA, 22 nt, Human
ucugagggugggagaaggagcu

SEQ ID NO: 808842 - RNA, 22 nt, Human
gaaggcuuuucuaccagaucuu

SEQ ID NO: 808843 - RNA, 22 nt, Human
uauuuucauucugugugacugu

SEQ ID NO: 808844 - RNA, 22 nt, Human
aguuguaagaggcacaaggaag

SEQ ID NO: 808845 - RNA, 22 nt, Human
ggugacggggcccagguuuccu

SEQ ID NO: 808846 - RNA, 22 nt, Human
caggaaauguauaauuuuauaa

SEQ ID NO: 808847 - RNA, 22 nt, Human
gaagagcugugauucaggcuua

SEQ ID NO: 808848 - RNA, 22 nt, Human
aaaagcucuuucugcuguagau

SEQ ID NO: 808849 - RNA, 22 nt, Human
aggcucuggcuacuacagagcu

SEQ ID NO: 808850 - RNA, 22 nt, Human
ugggagaaacugucucucccac

SEQ ID NO: 808851 - RNA, 19 nt, Human
auuuauuguaugauuccau

SEQ ID NO: 808852 - RNA, 22 nt, Human
cagcucacagccacgccauucc

SEQ ID NO: 808853 - RNA, 22 nt, Human
caggacagguguucuagaucag

SEQ ID NO: 808854 - RNA, 22 nt, Human
uagggguguuucgagagagguu

SEQ ID NO: 808855 - RNA, 22 nt, Human
uccagcagccacaccucuggac

SEQ ID NO: 808856 - RNA, 19 nt, Human
ugaguuuaaugcaaaacug

SEQ ID NO: 808857 - RNA, 18 nt, Human
ucuccuggguaggggccu

SEQ ID NO: 808858 - RNA, 22 nt, Human
uaguaaaaagcaauggugagua

SEQ ID NO: 808859 - RNA, 22 nt, Human
ccuuuuucaauauagaauugca

SEQ ID NO: 808860 - RNA, 22 nt, Human
auaugcauaugucaaaacuuau

SEQ ID NO: 808861 - RNA, 22 nt, Human
aagcugcccaagacugaagcau

SEQ ID NO: 808862 - RNA, 22 nt, Human
aggcugugaugagccucaugga

SEQ ID NO: 808863 - RNA, 22 nt, Human
cugggaggacaacuuggagcuc

SEQ ID NO: 808864 - RNA, 22 nt, Human
uugggcugaucuguggaagaag

SEQ ID NO: 808865 - RNA, 22 nt, Human
cccuucucuuucacucacuauu

SEQ ID NO: 808866 - RNA, 22 nt, Human
acacuguuccacacuaagaagg

SEQ ID NO: 808867 - RNA, 22 nt, Human
guggcccacacagacagcaucu

SEQ ID NO: 808868 - RNA, 23 nt, Human
aaacuugcuauggcugaaaucau

SEQ ID NO: 808869 - RNA, 22 nt, Human
uccccaggaaggcccuuccugg

SEQ ID NO: 808870 - RNA, 22 nt, Human
agcugcugagccaggcugaugu

SEQ ID NO: 808871 - RNA, 22 nt, Human
ccagcagguguagggcucaugg

SEQ ID NO: 808872 - RNA, 22 nt, Human
gauggcagcagcagccagggau

SEQ ID NO: 808873 - RNA, 17 nt, Human
acuccuggucugaaggg

SEQ ID NO: 808874 - RNA, 22 nt, Human
guuuccaggcacuuuuucugcu

SEQ ID NO: 808875 - RNA, 22 nt, Human
ucuggcuguuuuagaugagcuc

SEQ ID NO: 808876 - RNA, 22 nt, Human
cugggacacccaaggaaagagc

SEQ ID NO: 808877 - RNA, 23 nt, Human
acuauaaaguuguucugauuuac

SEQ ID NO: 808878 - RNA, 22 nt, Human
uggacaaauagcaugacacuug

SEQ ID NO: 808879 - RNA, 22 nt, Human
agagaugcaggguacauggaau

SEQ ID NO: 808880 - RNA, 22 nt, Human
uucuguuuacucagaaauacaa

SEQ ID NO: 808881 - RNA, 22 nt, Human
augcaacagagaaaauauugag

SEQ ID NO: 808882 - RNA, 22 nt, Human
aacuuauugaacauucucgaau

SEQ ID NO: 808883 - RNA, 22 nt, Human
gaggcugaggguuagagaguca

SEQ ID NO: 808884 - RNA, 21 nt, Human
ccuggccaaucugauaggguu

SEQ ID NO: 808885 - RNA, 22 nt, Human
agggucaccaguucauaggcac

SEQ ID NO: 808886 - RNA, 22 nt, Human
uauggucauuuguuagugcuuu

SEQ ID NO: 808887 - RNA, 22 nt, Human
ugucauuuaguccucugugugu

SEQ ID NO: 808888 - RNA, 22 nt, Human
aggcccugcccagugccacaag

SEQ ID NO: 808889 - RNA, 22 nt, Human
gcccucagaggacagcugacuu

SEQ ID NO: 808890 - RNA, 22 nt, Human
aggaaccugagucugaucauuu

SEQ ID NO: 808891 - RNA, 19 nt, Human
cugagcagcggcagcacuu

SEQ ID NO: 808892 - RNA, 22 nt, Human
cugggaagaagugggcuacauu

SEQ ID NO: 808893 - RNA, 22 nt, Human
aggaaacauccuuaucuauucu

SEQ ID NO: 808894 - RNA, 22 nt, Human
ccugccaggagcuggugcugca

SEQ ID NO: 808895 - RNA, 17 nt, Human
uccuccccgcaguugca

SEQ ID NO: 808896 - RNA, 22 nt, Human
ucuggcucagggcucugaggga

SEQ ID NO: 808897 - RNA, 19 nt, Human
ucugccucuggucaggcuc

SEQ ID NO: 808898 - RNA, 22 nt, Human
cugcucuggggaagccagaugu

SEQ ID NO: 808899 - RNA, 22 nt, Human
aagugucaauauuuuuguaggu

SEQ ID NO: 808900 - RNA, 22 nt, Human
acaggaagaaagugcaguagau

SEQ ID NO: 808901 - RNA, 22 nt, Human
ucuagaaaaacaaaguaucuga

SEQ ID NO: 808902 - RNA, 22 nt, Human
uauugacagugacuauugguag

SEQ ID NO: 808903 - RNA, 22 nt, Human
cugccuggcauagucuggucga

SEQ ID NO: 808904 - RNA, 22 nt, Human
cagcccugaaacaaccuccucu

SEQ ID NO: 808905 - RNA, 16 nt, Human
uagcuuuguguugugg

SEQ ID NO: 808906 - RNA, 22 nt, Human
ggaagcuccccaagccugcccu

SEQ ID NO: 808907 - RNA, 22 nt, Human
uuguuaguuuauauaauguagu

SEQ ID NO: 808908 - RNA, 20 nt, Human
gggcuggcgcauggggaaag

SEQ ID NO: 808909 - RNA, 22 nt, Human
uccucccacauaggacaauggg

SEQ ID NO: 808910 - RNA, 19 nt, Human
ugagaaauuccacaggaug

SEQ ID NO: 808911 - RNA, 22 nt, Human
agcugaaacuucccauuaauug

SEQ ID NO: 808912 - RNA, 22 nt, Human
aggcaggagcaagcccuacaag

SEQ ID NO: 808913 - RNA, 22 nt, Human
aucagucauauccaaauuagca

SEQ ID NO: 808914 - RNA, 19 nt, Human
agcugcuggcccagggacc

SEQ ID NO: 808915 - RNA, 22 nt, Human
aauacauaauaaguuuugucug

SEQ ID NO: 808916 - RNA, 22 nt, Human
uuuuucauauuccccucucugg

SEQ ID NO: 808917 - RNA, 22 nt, Human
gcagcgcuguaggcccaaggca

SEQ ID NO: 808918 - RNA, 22 nt, Human
ucugcccuggggucagccucca

SEQ ID NO: 808919 - RNA, 22 nt, Human
uacuuuuaaaauucacagguau

SEQ ID NO: 808920 - RNA, 22 nt, Human
ucagcaggcagaaaucugcaga

SEQ ID NO: 808921 - RNA, 22 nt, Human
aacccuggggcagcugcuaggg

SEQ ID NO: 808922 - RNA, 22 nt, Human
uucuucugauugccuucugcaa

SEQ ID NO: 808923 - RNA, 22 nt, Human
gcagggcagagggagaaucucu

SEQ ID NO: 808924 - RNA, 19 nt, Human
augcaaauagauuuggaau

SEQ ID NO: 808925 - RNA, 22 nt, Human
ugaguggagaacagaggcucuc

SEQ ID NO: 808926 - RNA, 22 nt, Human
uccagaggggcagcccugugcu

SEQ ID NO: 808927 - RNA, 22 nt, Human
ggccccaggccuuuggucuggc

SEQ ID NO: 808928 - RNA, 22 nt, Human
cugaggaaagcugcagcgguac

SEQ ID NO: 808929 - RNA, 21 nt, Human
uacaguaaguugggugguccu

SEQ ID NO: 808930 - RNA, 22 nt, Human
gcagcgcuacucacagcucuga

SEQ ID NO: 808931 - RNA, 22 nt, Human
cuugucuugcacacgguugcca

SEQ ID NO: 808932 - RNA, 22 nt, Human
cagagggcucggcggccgcucc

SEQ ID NO: 808933 - RNA, 22 nt, Human
uggaggagugugauugucugcc

SEQ ID NO: 808934 - RNA, 22 nt, Human
ggaccagcuaucaaugccaggg

SEQ ID NO: 808935 - RNA, 22 nt, Human
agagaagagcaaugauaaauuu

SEQ ID NO: 808936 - RNA, 22 nt, Human
auuuguuucagggccuugguau

SEQ ID NO: 808937 - RNA, 22 nt, Human
uauugugcucaccauuacaucc

SEQ ID NO: 808938 - RNA, 22 nt, Human
uaggaaauucucuugcuaaguu

SEQ ID NO: 808939 - RNA, 22 nt, Human
aggaggaacucagaaagaaggu

SEQ ID NO: 808940 - RNA, 22 nt, Human
gaacaauagugguaacaaagcc

SEQ ID NO: 808941 - RNA, 22 nt, Human
gggcccuggccgaaucccucug

SEQ ID NO: 808942 - RNA, 22 nt, Human
uagguagcuuuggcguuucuug

SEQ ID NO: 808943 - RNA, 22 nt, Human
uugagaaccacugaguuagaua

SEQ ID NO: 808944 - RNA, 22 nt, Human
gaaggcuucuccagggcuuacu

SEQ ID NO: 808945 - RNA, 22 nt, Human
aaugagaaaacacagaggaggu

SEQ ID NO: 808946 - RNA, 22 nt, Human
ccugggcuuccacgagcagagg

SEQ ID NO: 808947 - RNA, 22 nt, Human
ugaguuaaaugagaacaugaaa

SEQ ID NO: 808948 - RNA, 22 nt, Human
ggcagaggagcuggaaacaugg

SEQ ID NO: 808949 - RNA, 18 nt, Human
aggcagcagcaucuucuc

SEQ ID NO: 808950 - RNA, 22 nt, Human
caaagcaaggcucaguuugaac

SEQ ID NO: 808951 - RNA, 22 nt, Human
gguaacugaggccauauucuga

SEQ ID NO: 808952 - RNA, 22 nt, Human
cucagagggucuccuccagaau

SEQ ID NO: 808953 - RNA, 22 nt, Human
gcuuacaaucauuucaguuuag

SEQ ID NO: 808954 - RNA, 22 nt, Human
augcaaaugcagccauugcaga

SEQ ID NO: 808955 - RNA, 22 nt, Human
gcagugcuaaggauucugccuu

SEQ ID NO: 808956 - RNA, 22 nt, Human
gccuggagcucaugugggcauu

SEQ ID NO: 808957 - RNA, 22 nt, Human
cuacauuuguucuauagcuuuu

SEQ ID NO: 808958 - RNA, 22 nt, Human
gcuggcagcuggaaguugggcu

SEQ ID NO: 808959 - RNA, 22 nt, Human
aggauggcgauucgagcaccuc

SEQ ID NO: 808960 - RNA, 22 nt, Human
ugucugaauucaagaaauucaa

SEQ ID NO: 808961 - RNA, 22 nt, Human
gugccagcucuccccacaucug

SEQ ID NO: 808962 - RNA, 22 nt, Human
cccaggcaucccauuaaggagc

SEQ ID NO: 808963 - RNA, 22 nt, Human
uaggaaaugcuccauugcauaa

SEQ ID NO: 808964 - RNA, 22 nt, Human
ccuauuuguaggcugggccagu

SEQ ID NO: 808965 - RNA, 22 nt, Human
caauaauuuacauuggauacca

SEQ ID NO: 808966 - RNA, 22 nt, Human
cucugauuuauauuauaaagug

SEQ ID NO: 808967 - RNA, 22 nt, Human
auacagauguugaauguuauau

SEQ ID NO: 808968 - RNA, 22 nt, Human
ccaggacaggaguuggcuucgc

SEQ ID NO: 808969 - RNA, 22 nt, Human
uauucacaggcacgaaauauug

SEQ ID NO: 808970 - RNA, 22 nt, Human
gaauauuuuuaaagggacuaau

SEQ ID NO: 808971 - RNA, 19 nt, Human
uaaggccaaaaguaagugu

SEQ ID NO: 808972 - RNA, 22 nt, Human
acauucugugagucauguuuua

SEQ ID NO: 808973 - RNA, 22 nt, Human
agcugcugagagucugccgggc

SEQ ID NO: 808974 - RNA, 21 nt, Human
gcaugccugcaucuuaguguu

SEQ ID NO: 808975 - RNA, 22 nt, Human
caggccuccacuccacgcagac

SEQ ID NO: 808976 - RNA, 22 nt, Human
cuaaaugucauggaguuguaga

SEQ ID NO: 808977 - RNA, 22 nt, Human
gugauucugccuggaagguccu

SEQ ID NO: 808978 - RNA, 22 nt, Human
gcaagcugaugugauagugaaa

SEQ ID NO: 808979 - RNA, 22 nt, Human
aggcucaguauagcuggcaagu

SEQ ID NO: 808980 - RNA, 22 nt, Human
gagccugaaauacaggucacug

SEQ ID NO: 808981 - RNA, 22 nt, Human
cuugaauguccuguggcaaagu

SEQ ID NO: 808982 - RNA, 23 nt, Human
ugguggucagcccuuucuggagg

SEQ ID NO: 808983 - RNA, 22 nt, Human
aguguuaaugguguauauuagg

SEQ ID NO: 808984 - RNA, 22 nt, Human
cuccuggcuuucccagaccagg

SEQ ID NO: 808985 - RNA, 20 nt, Human
ucccaucacgccugugccag

SEQ ID NO: 808986 - RNA, 21 nt, Human
ucaguguauuuaagaauguug

SEQ ID NO: 808987 - RNA, 22 nt, Human
aacccaggaguuggaggcugug

SEQ ID NO: 808988 - RNA, 22 nt, Human
cagucagucaauacucuuugag

SEQ ID NO: 808989 - RNA, 22 nt, Human
gcccugggauuggguggaggcu

SEQ ID NO: 808990 - RNA, 23 nt, Human
uauuugcuacugguaauucugga

SEQ ID NO: 808991 - RNA, 22 nt, Human
caguuuauauauaagcacauug

SEQ ID NO: 808992 - RNA, 22 nt, Human
uguaugcaccauuguauuaccu

SEQ ID NO: 808993 - RNA, 22 nt, Human
gcccaggaguucaaggcugcag

SEQ ID NO: 808994 - RNA, 20 nt, Human
aaaauauguauaacucuucu

SEQ ID NO: 808995 - RNA, 22 nt, Human
agaaauguauucuguauguuuu

SEQ ID NO: 808996 - RNA, 22 nt, Human
caaacauugggggcuucaacac

SEQ ID NO: 808997 - RNA, 22 nt, Human
agacucuggaggggcugguccu

SEQ ID NO: 808998 - RNA, 23 nt, Human
aaauagagauaggccagcuuugc

SEQ ID NO: 808999 - RNA, 22 nt, Human
uguccaggcucccuuggugcug

SEQ ID NO: 809000 - RNA, 22 nt, Human
cuuguauuccccuaucucuaaa

SEQ ID NO: 809001 - RNA, 22 nt, Human
auuauuugacuugagaacaggu

SEQ ID NO: 809002 - RNA, 22 nt, Human
cugacauguauaagcuuuaagu

SEQ ID NO: 809003 - RNA, 22 nt, Human
cacaugagagcccccaagagca

SEQ ID NO: 809004 - RNA, 22 nt, Human
gauuuacagcuauacccaaugg

SEQ ID NO: 809005 - RNA, 22 nt, Human
acaguuaucuuugaaauagaga

SEQ ID NO: 809006 - RNA, 18 nt, Human
ggguggugugcucuucgc

SEQ ID NO: 809007 - RNA, 22 nt, Human
gcagggcuuagaaaugguggcu

SEQ ID NO: 809008 - RNA, 22 nt, Human
uuguauuuccuauaaccuuucu

SEQ ID NO: 809009 - RNA, 22 nt, Human
acauguaaaaauuaagguaaga

SEQ ID NO: 809010 - RNA, 22 nt, Human
uccuuccuggggucucugcugc

SEQ ID NO: 809011 - RNA, 22 nt, Human
agaaugauuuuggacaauaugg

SEQ ID NO: 809012 - RNA, 22 nt, Human
ugugaaaagcguguguucuagg

SEQ ID NO: 809013 - RNA, 22 nt, Human
uucuuacacucuuaaaaaucau

SEQ ID NO: 809014 - RNA, 22 nt, Human
uugauuucuauucagauguaga

SEQ ID NO: 809015 - RNA, 22 nt, Human
uuugcaaagaaauuauugcugu

SEQ ID NO: 809016 - RNA, 22 nt, Human
auugcaaaggucccauucaaga

SEQ ID NO: 809017 - RNA, 22 nt, Human
aauuguaagugcugaguuaagg

SEQ ID NO: 809018 - RNA, 22 nt, Human
cuggcugguuggggagaagaca

SEQ ID NO: 809019 - RNA, 20 nt, Human
aaaugccagugauucugcuu

SEQ ID NO: 809020 - RNA, 22 nt, Human
ggagggcaucaaucaggccugg

SEQ ID NO: 809021 - RNA, 20 nt, Human
ugcagcugcaggaggguggg

SEQ ID NO: 809022 - RNA, 22 nt, Human
gauuacauucuccuuguauuag

SEQ ID NO: 809023 - RNA, 22 nt, Human
gggaaggcagugggaggaacug

SEQ ID NO: 809024 - RNA, 22 nt, Human
auaguauuuccagaaauagucu

SEQ ID NO: 809025 - RNA, 22 nt, Human
acagaggccucguagguacaac

SEQ ID NO: 809026 - RNA, 22 nt, Human
agucuggaauuuggccugagca

SEQ ID NO: 809027 - RNA, 22 nt, Human
gauuaaguggaaugaguauuug

SEQ ID NO: 809028 - RNA, 22 nt, Human
ccucaggauacaggagccacag

SEQ ID NO: 809029 - RNA, 22 nt, Human
cuaucuguaaauuugagguucu

SEQ ID NO: 809030 - RNA, 22 nt, Human
gugggcaggccccaaagcaggg

SEQ ID NO: 809031 - RNA, 22 nt, Human
caggguucagugggcccucuug

SEQ ID NO: 809032 - RNA, 18 nt, Human
aggccugggaagcugagg

SEQ ID NO: 809033 - RNA, 22 nt, Human
ucugcaggagcagggcguggag

SEQ ID NO: 809034 - RNA, 22 nt, Human
cagucccagacauaguaaggga

SEQ ID NO: 809035 - RNA, 22 nt, Human
ucacaggagucauaauuacagu

SEQ ID NO: 809036 - RNA, 22 nt, Human
auagccuugguccuugcuccac

SEQ ID NO: 809037 - RNA, 22 nt, Human
ccaggagcaacuugaaggcaag

SEQ ID NO: 809038 - RNA, 22 nt, Human
uccagcuccugaguucacugcu

SEQ ID NO: 809039 - RNA, 22 nt, Human
acaugcaacaaaguaccugcaa

SEQ ID NO: 809040 - RNA, 22 nt, Human
ucacaggaaccaucagagaaau

SEQ ID NO: 809041 - RNA, 22 nt, Human
uucagaaugagaauggaugggu

SEQ ID NO: 809042 - RNA, 22 nt, Human
cuccuggacauggagcggagga

SEQ ID NO: 809043 - RNA, 22 nt, Human
auggcauuguuuauagauugca

SEQ ID NO: 809044 - RNA, 22 nt, Human
caacuauauagaaauugauugu

SEQ ID NO: 809045 - RNA, 22 nt, Human
uuggcagggcugcuugucuagg

SEQ ID NO: 809046 - RNA, 22 nt, Human
ggccucaguuucuccauggguu

SEQ ID NO: 809047 - RNA, 22 nt, Human
gauuaauagacacaaccaagcu

SEQ ID NO: 809048 - RNA, 22 nt, Human
aguauauugguguuauuccuca

SEQ ID NO: 809049 - RNA, 22 nt, Human
uucaaagugcuuuuaaccuuua

SEQ ID NO: 809050 - RNA, 22 nt, Human
agaauuucaaaaggaagccagc

SEQ ID NO: 809051 - RNA, 22 nt, Human
ugggugcucugcgaccguaggg

SEQ ID NO: 809052 - RNA, 22 nt, Human
ggacuuggggaaggcacaguua

SEQ ID NO: 809053 - RNA, 22 nt, Human
ggaaaacugaggcucucagcag

SEQ ID NO: 809054 - RNA, 22 nt, Human
gacacagagauaggccuguguu

SEQ ID NO: 809055 - RNA, 22 nt, Human
aggccacaguacuuugcagacc

SEQ ID NO: 809056 - RNA, 22 nt, Human
ggcuggcuggcugguagacaag

SEQ ID NO: 809057 - RNA, 22 nt, Human
acccagggucaccccguagggu

SEQ ID NO: 809058 - RNA, 22 nt, Human
uugauucaguaaagcuaaauuu

SEQ ID NO: 809059 - RNA, 22 nt, Human
cucugcacacaaguaauuucau

SEQ ID NO: 809060 - RNA, 22 nt, Human
agacaaauugggacauuguguu

SEQ ID NO: 809061 - RNA, 17 nt, Human
uuuuguucaucuucaaa

SEQ ID NO: 809062 - RNA, 22 nt, Human
caggccucaccagcggagcugc

SEQ ID NO: 809063 - RNA, 22 nt, Human
ggcagggcagcgcugauuaggg

SEQ ID NO: 809064 - RNA, 20 nt, Human
ccucaaauaagugccagcau

SEQ ID NO: 809065 - RNA, 22 nt, Human
aguuuucucacaucaaaaauga

SEQ ID NO: 809066 - RNA, 22 nt, Human
aaagagaugugccaaauagccu

SEQ ID NO: 809067 - RNA, 22 nt, Human
ccugugucuuccccacuggugu

SEQ ID NO: 809068 - RNA, 22 nt, Human
aaggcuccacccucauggaugc

SEQ ID NO: 809069 - RNA, 22 nt, Human
agcaggugacagggcuguggug

SEQ ID NO: 809070 - RNA, 22 nt, Human
uucagugucccuaguagaaguu

SEQ ID NO: 809071 - RNA, 22 nt, Human
uuuuuauacuuugcucaagauu

SEQ ID NO: 809072 - RNA, 22 nt, Human
gaggcuccauggaggaguaugg

SEQ ID NO: 809073 - RNA, 22 nt, Human
ccacucugauuucaagggagau

SEQ ID NO: 809074 - RNA, 22 nt, Human
aaggaagcagcaaugcaugauu

SEQ ID NO: 809075 - RNA, 22 nt, Human
uuuucuauuaacucauuuugca

SEQ ID NO: 809076 - RNA, 22 nt, Human
gcccagggugaagugcaguugu

SEQ ID NO: 809077 - RNA, 22 nt, Human
acccagggcucaagcguaggca

SEQ ID NO: 809078 - RNA, 22 nt, Human
aagccaggguuuguggaucuau

SEQ ID NO: 809079 - RNA, 22 nt, Human
cagggaugagaaagcucucuaa

SEQ ID NO: 809080 - RNA, 22 nt, Human
accagggcuuacagcaguagcu

SEQ ID NO: 809081 - RNA, 22 nt, Human
uuuguucaugccuauauucuca

SEQ ID NO: 809082 - RNA, 22 nt, Human
uccuuaaaugugaucuagauuu

SEQ ID NO: 809083 - RNA, 19 nt, Human
cucuuuggagauccuugga

SEQ ID NO: 809084 - RNA, 23 nt, Human
auugauucccucuuggaagggau

SEQ ID NO: 809085 - RNA, 22 nt, Human
aaucauaauuguauacauucau

SEQ ID NO: 809086 - RNA, 22 nt, Human
uuugcuauaaaagggucacacg

SEQ ID NO: 809087 - RNA, 22 nt, Human
gcugaaauucagauuccuaggc

SEQ ID NO: 809088 - RNA, 23 nt, Human
cagcccugaaaucgaggugacac

SEQ ID NO: 809089 - RNA, 22 nt, Human
ccuggcugggccugauuucuca

SEQ ID NO: 809090 - RNA, 22 nt, Human
ucagccuccgaaagugcuggga

SEQ ID NO: 809091 - RNA, 22 nt, Human
ggaagauucaguuaucucauga

SEQ ID NO: 809092 - RNA, 22 nt, Human
guuccaaagucucugagcugag

SEQ ID NO: 809093 - RNA, 22 nt, Human
auguuuguugaacaucuacugc

SEQ ID NO: 809094 - RNA, 22 nt, Human
uagauuuugcauuucuaacaag

SEQ ID NO: 809095 - RNA, 22 nt, Human
cagggcagggccacacccccug

SEQ ID NO: 809096 - RNA, 22 nt, Human
uuuauuuauaagccacuugcug

SEQ ID NO: 809097 - RNA, 22 nt, Human
uuugcauuauauuuauagaaga

SEQ ID NO: 809098 - RNA, 22 nt, Human
cagggacagccuugggguggcg

SEQ ID NO: 809099 - RNA, 22 nt, Human
ugccauguuuaaaguugaaggg

SEQ ID NO: 809100 - RNA, 22 nt, Human
uggguuggaagcaggaggcacc

SEQ ID NO: 809101 - RNA, 19 nt, Human
uugaaauuguuugauaugg

SEQ ID NO: 809102 - RNA, 21 nt, Human
ccaggcaugacugcagagagc

SEQ ID NO: 809103 - RNA, 22 nt, Human
cugagacacggagaggcugugu

SEQ ID NO: 809104 - RNA, 20 nt, Human
uuacaaagaggcaucgcuuu

SEQ ID NO: 809105 - RNA, 22 nt, Human
cagaaagugauuugcuauucca

SEQ ID NO: 809106 - RNA, 22 nt, Human
ucagcaggcccauccuccaggc

SEQ ID NO: 809107 - RNA, 22 nt, Human
cagaggcacaagaaagcaaggc

SEQ ID NO: 809108 - RNA, 22 nt, Human
gcuuggcuccuggcucacaggu

SEQ ID NO: 809109 - RNA, 22 nt, Human
ggaggcagaauagagugugggu

SEQ ID NO: 809110 - RNA, 22 nt, Human
gauuucuguugagaaacauggg

SEQ ID NO: 809111 - RNA, 17 nt, Human
ugcuggaggcgggguau

SEQ ID NO: 809112 - RNA, 22 nt, Human
ggccaggugcgguggcucacac

SEQ ID NO: 809113 - RNA, 22 nt, Human
cuguuucacguguuuaagccca

SEQ ID NO: 809114 - RNA, 22 nt, Human
uggcagagagagugcagucgac

SEQ ID NO: 809115 - RNA, 22 nt, Human
ucugacauuagauuaauuggaa

SEQ ID NO: 809116 - RNA, 22 nt, Human
aaaggcaugcauggucugcucc

SEQ ID NO: 809117 - RNA, 22 nt, Human
ccuggccauagggcccaggaaa

SEQ ID NO: 809118 - RNA, 23 nt, Human
ccaggcaguagcuauugaaguga

SEQ ID NO: 809119 - RNA, 22 nt, Human
cagugcaggcuuguggccgcag

SEQ ID NO: 809120 - RNA, 22 nt, Human
gaagaaacugaaagggguuggu

SEQ ID NO: 809121 - RNA, 22 nt, Human
ggcagggacaggauaggguuuu

SEQ ID NO: 809122 - RNA, 22 nt, Human
uaucaaaguuguccugugaagu

SEQ ID NO: 809123 - RNA, 22 nt, Human
ggccccagggauuaggccaacc

SEQ ID NO: 809124 - RNA, 18 nt, Human
acaguaaagaaaggaauu

SEQ ID NO: 809125 - RNA, 22 nt, Human
ugcaggaauagcuacagagcug

SEQ ID NO: 809126 - RNA, 22 nt, Human
uuccagaggcucuaggggagaa

SEQ ID NO: 809127 - RNA, 22 nt, Human
ugggcagcagcaaagccagacu

SEQ ID NO: 809128 - RNA, 22 nt, Human
ugccuaggaaaccucaugcuuc

SEQ ID NO: 809129 - RNA, 22 nt, Human
caggccagugggaaauagggau

SEQ ID NO: 809130 - RNA, 22 nt, Human
gcugcagccuucuugccauuaa

SEQ ID NO: 809131 - RNA, 22 nt, Human
ugggccucaugcccagccaccc

SEQ ID NO: 809132 - RNA, 22 nt, Human
cggucaggugcagcguuggcac

SEQ ID NO: 809133 - RNA, 22 nt, Human
agcuccuguggcugaaagagga

SEQ ID NO: 809134 - RNA, 22 nt, Human
agagcugguuuacucaggaauu

SEQ ID NO: 809135 - RNA, 22 nt, Human
ugaaaaacacuaauuggaaagc

SEQ ID NO: 809136 - RNA, 22 nt, Human
gcugagucuugagcacugagca

SEQ ID NO: 809137 - RNA, 23 nt, Human
ggacccuguggagggugagaguc

SEQ ID NO: 809138 - RNA, 22 nt, Human
caggcagauuugcugcccucca

SEQ ID NO: 809139 - RNA, 22 nt, Human
acaugacaaaaugcacaggauu

SEQ ID NO: 809140 - RNA, 22 nt, Human
aagaauacguaucaacaauggu

SEQ ID NO: 809141 - RNA, 22 nt, Human
ggugucaaauuauugaguuuca

SEQ ID NO: 809142 - RNA, 22 nt, Human
gcugggagcaaguacucaucuu

SEQ ID NO: 809143 - RNA, 22 nt, Human
aaagccagaauucguccagccu

SEQ ID NO: 809144 - RNA, 22 nt, Human
ccagcaggcagucauauccuuu

SEQ ID NO: 809145 - RNA, 22 nt, Human
ccucagccuuggccccaggcag

SEQ ID NO: 809146 - RNA, 22 nt, Human
guacauaagaaauuacuacaga

SEQ ID NO: 809147 - RNA, 22 nt, Human
caguuucucagacuucccuugu

SEQ ID NO: 809148 - RNA, 22 nt, Human
ucccagccacagguguagcccu

SEQ ID NO: 809149 - RNA, 22 nt, Human
ggggucggggcauagccacuua

SEQ ID NO: 809150 - RNA, 22 nt, Human
ggccuugggauguggcugcagc

SEQ ID NO: 809151 - RNA, 22 nt, Human
ugccuggcacagagcagguggc

SEQ ID NO: 809152 - RNA, 22 nt, Human
agucuuugguuauaagagacag

SEQ ID NO: 809153 - RNA, 22 nt, Human
ugguuagaggcuucuugcuugg

SEQ ID NO: 809154 - RNA, 22 nt, Human
ggcaucuuguugcucaaaucua

SEQ ID NO: 809155 - RNA, 22 nt, Human
acaguguuuuagaaaagcuuga

SEQ ID NO: 809156 - RNA, 22 nt, Human
uucaguaugacagacgcauugg

SEQ ID NO: 809157 - RNA, 22 nt, Human
aauaauguacauacauauuucg

SEQ ID NO: 809158 - RNA, 22 nt, Human
cugccguccaucuacgucucag

SEQ ID NO: 809159 - RNA, 23 nt, Human
acaaaguaauuccugcuuccaaa

SEQ ID NO: 809160 - RNA, 20 nt, Human
caauaauuuacuucccuauu

SEQ ID NO: 809161 - RNA, 22 nt, Human
gaagccagauuuggggcauauc

SEQ ID NO: 809162 - RNA, 22 nt, Human
gucccugcaucugcaggccaug

SEQ ID NO: 809163 - RNA, 22 nt, Human
aagaacauaacagaagcugugu

SEQ ID NO: 809164 - RNA, 22 nt, Human
uuccagcccgcgacuuguucag

SEQ ID NO: 809165 - RNA, 22 nt, Human
guucauuuuuagaaugcuagua

SEQ ID NO: 809166 - RNA, 22 nt, Human
aggagucuguugaaaugucuau

SEQ ID NO: 809167 - RNA, 22 nt, Human
acagugaucaguuacugucugu

SEQ ID NO: 809168 - RNA, 22 nt, Human
auuauuauaaagugcaugaccu

SEQ ID NO: 809169 - RNA, 21 nt, Human
aacugcaaaugaugcuggaga

SEQ ID NO: 809170 - RNA, 22 nt, Human
gugggugauguacuggaggcca

SEQ ID NO: 809171 - RNA, 22 nt, Human
aucuacaaccccucaaacugug

SEQ ID NO: 809172 - RNA, 18 nt, Human
aggagaaagggaccaggg

SEQ ID NO: 809173 - RNA, 18 nt, Human
ggagccagucugucucug

SEQ ID NO: 809174 - RNA, 22 nt, Human
caggcacaaauuucuagauaag

SEQ ID NO: 809175 - RNA, 22 nt, Human
cucaaguaauuagcaacaaaua

SEQ ID NO: 809176 - RNA, 22 nt, Human
gaccagcucucugaagaaagag

SEQ ID NO: 809177 - RNA, 22 nt, Human
auaggacagcagacaauuagua

SEQ ID NO: 809178 - RNA, 22 nt, Human
agggagcaugggugaagcaggc

SEQ ID NO: 809179 - RNA, 21 nt, Human
caaauacuuagaaacuuaaga

SEQ ID NO: 809180 - RNA, 22 nt, Human
cugcaggcaucuaacugugggc

SEQ ID NO: 809181 - RNA, 22 nt, Human
ugccuggcaaugccagaagcca

SEQ ID NO: 809182 - RNA, 22 nt, Human
aguaaugaagauuuguugcaca

SEQ ID NO: 809183 - RNA, 22 nt, Human
agcaggcugggcaauaugggca

SEQ ID NO: 809184 - RNA, 22 nt, Human
guuguuuuuguucucuauagcu

SEQ ID NO: 809185 - RNA, 20 nt, Human
uuguuuuaaauccuggauga

SEQ ID NO: 809186 - RNA, 22 nt, Human
aggccugggacgggagccguga

SEQ ID NO: 809187 - RNA, 22 nt, Human
ccucagaccccugcugagcuuc

SEQ ID NO: 809188 - RNA, 22 nt, Human
cauauaaauacaacauguguua

SEQ ID NO: 809189 - RNA, 22 nt, Human
uuucuucugagaucagggagaa

SEQ ID NO: 809190 - RNA, 22 nt, Human
ccugggugucaugggcagcugg

SEQ ID NO: 809191 - RNA, 22 nt, Human
aauuuacaggugcacucgccau

SEQ ID NO: 809192 - RNA, 22 nt, Human
aaaagcaagaggcuggauuaaa

SEQ ID NO: 809193 - RNA, 22 nt, Human
uaaagugcuuccuaacccagag

SEQ ID NO: 809194 - RNA, 22 nt, Human
ucuguaaaacuucuuuguaaau

SEQ ID NO: 809195 - RNA, 22 nt, Human
agcuggccagcaccuccagguc

SEQ ID NO: 809196 - RNA, 22 nt, Human
gaggggaguguccuccgggccc

SEQ ID NO: 809197 - RNA, 22 nt, Human
aggcuggcccuacuggcugccu

SEQ ID NO: 809198 - RNA, 22 nt, Human
ugcaaauauuagcauucgauau

SEQ ID NO: 809199 - RNA, 22 nt, Human
gcacugggaaugcugaugggcu

SEQ ID NO: 809200 - RNA, 22 nt, Human
guggucagaaaucucaguggca

SEQ ID NO: 809201 - RNA, 21 nt, Human
gcucaggcucagguucagguu

SEQ ID NO: 809202 - RNA, 22 nt, Human
gaccacagcuacaagggcaagg

SEQ ID NO: 809203 - RNA, 22 nt, Human
aaagucauggaaaaucuuggaa

SEQ ID NO: 809204 - RNA, 22 nt, Human
acuuucaagcccucuagagaca

SEQ ID NO: 809205 - RNA, 22 nt, Human
auuugacauugacacaccuaug

SEQ ID NO: 809206 - RNA, 22 nt, Human
cagcuggccugaucccuguggc

SEQ ID NO: 809207 - RNA, 22 nt, Human
cauggcuuagaaguuccagccc

SEQ ID NO: 809208 - RNA, 22 nt, Human
auuagaauuaugcuugcuaaug

SEQ ID NO: 809209 - RNA, 22 nt, Human
augguggauuugugauucagcu

SEQ ID NO: 809210 - RNA, 16 nt, Human
uuuauuuacuaguguu

SEQ ID NO: 809211 - RNA, 19 nt, Human
aaggcugguaccauagguu

SEQ ID NO: 809212 - RNA, 22 nt, Human
accuuaaaugugacauagucua

SEQ ID NO: 809213 - RNA, 17 nt, Human
auuuagcaaguagacag

SEQ ID NO: 809214 - RNA, 22 nt, Human
ugaggaagugguuguaugguuu

SEQ ID NO: 809215 - RNA, 22 nt, Human
agguccugucuuaucucuguaa

SEQ ID NO: 809216 - RNA, 22 nt, Human
uagcaccuuaacucugcugcgu

SEQ ID NO: 809217 - RNA, 22 nt, Human
uucacaguggcugugccauuug

SEQ ID NO: 809218 - RNA, 22 nt, Human
uccugccuugccugggacauca

SEQ ID NO: 809219 - RNA, 22 nt, Human
aaguccugugugcuuacacuug

SEQ ID NO: 809220 - RNA, 22 nt, Human
uuagcuuucaugaaccuggucg

SEQ ID NO: 809221 - RNA, 22 nt, Human
caggcaggagacauuugguugg

SEQ ID NO: 809222 - RNA, 21 nt, Human
auacacauacacauaaaugug

SEQ ID NO: 809223 - RNA, 18 nt, Human
agucuuguucuguugccc

SEQ ID NO: 809224 - RNA, 22 nt, Human
gcucaaagaccagacagaggag

SEQ ID NO: 809225 - RNA, 22 nt, Human
uagugaaaugauaacagagcag

SEQ ID NO: 809226 - RNA, 22 nt, Human
gccaggcagcagcgaggauggu

SEQ ID NO: 809227 - RNA, 22 nt, Human
uccauugugauuauauacaaaa

SEQ ID NO: 809228 - RNA, 22 nt, Human
uacacauuacauaauacuaucu

SEQ ID NO: 809229 - RNA, 22 nt, Human
caaacaauuugcauuuccuuag

SEQ ID NO: 809230 - RNA, 22 nt, Human
auccaaaauuuacuguagcauu

SEQ ID NO: 809231 - RNA, 22 nt, Human
acaggcaaggccagugagaaau

SEQ ID NO: 809232 - RNA, 21 nt, Human
aauauaugcaaugcuuucugc

SEQ ID NO: 809233 - RNA, 22 nt, Human
uccaggagguuuggaggaagca

SEQ ID NO: 809234 - RNA, 20 nt, Human
ugcacagggugggaagcaac

SEQ ID NO: 809235 - RNA, 22 nt, Human
aggcaggcucaggcccaugcuu

SEQ ID NO: 809236 - RNA, 22 nt, Human
ugccuuccuggagcugaaggcu

SEQ ID NO: 809237 - RNA, 20 nt, Human
acucuugagaaauucucugu

SEQ ID NO: 809238 - RNA, 22 nt, Human
gaggcucuuuucugcugugucu

SEQ ID NO: 809239 - RNA, 22 nt, Human
gagaggcuggguuggagaucga

SEQ ID NO: 809240 - RNA, 22 nt, Human
ggagccugguuacuagagccug

SEQ ID NO: 809241 - RNA, 22 nt, Human
aaaucugggucaagguggagug

SEQ ID NO: 809242 - RNA, 22 nt, Human
uugauucagagaagauuggccc

SEQ ID NO: 809243 - RNA, 22 nt, Human
caguuucuacgacuuaagcaca

SEQ ID NO: 809244 - RNA, 22 nt, Human
uuaaggcuguggggauuacugc

SEQ ID NO: 809245 - RNA, 22 nt, Human
uaagacaauucuucagucacaa

SEQ ID NO: 809246 - RNA, 22 nt, Human
acuaaagaugucuaaauauauu

SEQ ID NO: 809247 - RNA, 22 nt, Human
cgucccaguuccagccgcgcug

SEQ ID NO: 809248 - RNA, 21 nt, Human
uuacuuuugcaccaaccuaau

SEQ ID NO: 809249 - RNA, 22 nt, Human
caaaaccaagaacauucauuuc

SEQ ID NO: 809250 - RNA, 22 nt, Human
gaggccucugucccgccaggga

SEQ ID NO: 809251 - RNA, 22 nt, Human
ucucaagcuuguugguauguuu

SEQ ID NO: 809252 - RNA, 22 nt, Human
ccugccugcaccuucucugggg

SEQ ID NO: 809253 - RNA, 22 nt, Human
ucagcaggcacggacaggcugc

SEQ ID NO: 809254 - RNA, 22 nt, Human
ggcagcccuuucuggccagcuc

SEQ ID NO: 809255 - RNA, 22 nt, Human
cccuggagggauuucucaauca

SEQ ID NO: 809256 - RNA, 22 nt, Human
acaaguuuauuugauuagaaca

SEQ ID NO: 809257 - RNA, 22 nt, Human
ucugaagauucuuuccacuauu

SEQ ID NO: 809258 - RNA, 22 nt, Human
ggcaggcuccaagcauccuaug

SEQ ID NO: 809259 - RNA, 23 nt, Human
caaauucuaggcaggcucuuuug

SEQ ID NO: 809260 - RNA, 22 nt, Human
ggcaggaggugaguggcgggug

SEQ ID NO: 809261 - RNA, 22 nt, Human
aaaugcagugguucuacuucuc

SEQ ID NO: 809262 - RNA, 21 nt, Human
ggcagcguguggacaggaagg

SEQ ID NO: 809263 - RNA, 19 nt, Human
aaaggcaguggguggcgug

SEQ ID NO: 809264 - RNA, 22 nt, Human
gccugccuagaauugcagcuuu

SEQ ID NO: 809265 - RNA, 22 nt, Human
ucaguucuaacaguuuagaaca

SEQ ID NO: 809266 - RNA, 22 nt, Human
gcuggcugaggucuagcucuuu

SEQ ID NO: 809267 - RNA, 22 nt, Human
cacagagcugaaccugggucau

SEQ ID NO: 809268 - RNA, 22 nt, Human
uguucuaaguguuuuguucaug

SEQ ID NO: 809269 - RNA, 22 nt, Human
uucauauauaugcacuacguac

SEQ ID NO: 809270 - RNA, 22 nt, Human
gucuccuggcugcagcuaagac

SEQ ID NO: 809271 - RNA, 22 nt, Human
uaauaccuagagaugauacaaa

SEQ ID NO: 809272 - RNA, 22 nt, Human
cuagaacagaaaguacaggaaa

SEQ ID NO: 809273 - RNA, 22 nt, Human
caggacaggcccuguggggucu

SEQ ID NO: 809274 - RNA, 22 nt, Human
uggcccugccgcacuauccuca

SEQ ID NO: 809275 - RNA, 22 nt, Human
ucaauuaugccauugcaauauu

SEQ ID NO: 809276 - RNA, 21 nt, Human
aaaugaaugugguagugcaag

SEQ ID NO: 809277 - RNA, 22 nt, Human
aaacagcugucauuguuuuaaa

SEQ ID NO: 809278 - RNA, 22 nt, Human
agcacuguaguuauagcuaaca

SEQ ID NO: 809279 - RNA, 23 nt, Human
gcagagcugcccuauugccuugg

SEQ ID NO: 809280 - RNA, 20 nt, Human
ugccagggccagcagaggcu

SEQ ID NO: 809281 - RNA, 22 nt, Human
gcugcuguccuucaagucugcg

SEQ ID NO: 809282 - RNA, 22 nt, Human
uuucaacagcucucaaaugauc

SEQ ID NO: 809283 - RNA, 22 nt, Human
gcugggaagugcaagaucaagg

SEQ ID NO: 809284 - RNA, 20 nt, Human
ggcagcaggaguuuccucuu

SEQ ID NO: 809285 - RNA, 22 nt, Human
aaagucaucuguccuaggcucu

SEQ ID NO: 809286 - RNA, 22 nt, Human
uggcacauaguaggugcucaau

SEQ ID NO: 809287 - RNA, 22 nt, Human
aaggccagauucacuuuacaau

SEQ ID NO: 809288 - RNA, 22 nt, Human
gcacuggggucauagccuccag

SEQ ID NO: 809289 - RNA, 22 nt, Human
uugaaugaauaaaagaguaagg

SEQ ID NO: 809290 - RNA, 22 nt, Human
uuucauuggcagagccuguuuu

SEQ ID NO: 809291 - RNA, 22 nt, Human
agcagggccaacaguaaacacc

SEQ ID NO: 809292 - RNA, 22 nt, Human
aaaaauuuaugguucuucucug

SEQ ID NO: 809293 - RNA, 23 nt, Human
cagcugguugugggaguggcugc

SEQ ID NO: 809294 - RNA, 22 nt, Human
uggcuggcuuucuuguauuuac

SEQ ID NO: 809295 - RNA, 23 nt, Human
aagucagagccaagucaaugaga

SEQ ID NO: 809296 - RNA, 22 nt, Human
uggccucucuaccaggcagccu

SEQ ID NO: 809297 - RNA, 22 nt, Human
aauuacugggucugagauuaau

SEQ ID NO: 809298 - RNA, 22 nt, Human
ugccugugcccuucuuggcauu

SEQ ID NO: 809299 - RNA, 22 nt, Human
cacaggagggagcgggcagcca

SEQ ID NO: 809300 - RNA, 22 nt, Human
gccucugcaauuacauugugcc

SEQ ID NO: 809301 - RNA, 23 nt, Human
uuguggagugguuguuuucuagg

SEQ ID NO: 809302 - RNA, 22 nt, Human
cagucacauugcccugcauuua

SEQ ID NO: 809303 - RNA, 22 nt, Human
ccaugccuuccuuucccuggaa

SEQ ID NO: 809304 - RNA, 22 nt, Human
agccucuccagagccuggcaga

SEQ ID NO: 809305 - RNA, 22 nt, Human
uguguagaaagaucuccaagau

SEQ ID NO: 809306 - RNA, 22 nt, Human
aaagcugcugccaaucaggcuu

SEQ ID NO: 809307 - RNA, 22 nt, Human
uuuucuguuacaaaguacagcg

SEQ ID NO: 809308 - RNA, 22 nt, Human
accuuucacgguaucagacauc

SEQ ID NO: 809309 - RNA, 22 nt, Human
uuggccucauggacagcucauc

SEQ ID NO: 809310 - RNA, 22 nt, Human
gacacuacguggcucacauuuc

SEQ ID NO: 809311 - RNA, 17 nt, Human
gcaggcacugcugccug

SEQ ID NO: 809312 - RNA, 22 nt, Human
ugcuggggucucuccggugccc

SEQ ID NO: 809313 - RNA, 22 nt, Human
auaaaaaugagggcgguagcua

SEQ ID NO: 809314 - RNA, 22 nt, Human
acaggugguaaaauggacuguc

SEQ ID NO: 809315 - RNA, 22 nt, Human
uuaaaauagccagugccccucu

SEQ ID NO: 809316 - RNA, 22 nt, Human
caucuuaaaaugugucauaacu

SEQ ID NO: 809317 - RNA, 22 nt, Human
ugccucuuggagccuuuccucu

SEQ ID NO: 809318 - RNA, 21 nt, Human
gggccuggcugcgcaggacgg

SEQ ID NO: 809319 - RNA, 22 nt, Human
gauccagcuucuacacagagcu

SEQ ID NO: 809320 - RNA, 21 nt, Human
uuuguucauagcucacucuuu

SEQ ID NO: 809321 - RNA, 22 nt, Human
gauuguaauuuucaagagguaa

SEQ ID NO: 809322 - RNA, 22 nt, Human
gccuggcuccuaagagcacaac

SEQ ID NO: 809323 - RNA, 18 nt, Human
gcagcugacacuggaguu

SEQ ID NO: 809324 - RNA, 21 nt, Human
agcagguguaaaggaggaaau

SEQ ID NO: 809325 - RNA, 22 nt, Human
uaggaaaugaaugcaggcuccc

SEQ ID NO: 809326 - RNA, 22 nt, Human
ggagcuggagaguacagaguuu

SEQ ID NO: 809327 - RNA, 22 nt, Human
uuauauuguguaauaagugaag

SEQ ID NO: 809328 - RNA, 22 nt, Human
aaaaguauuuuggaucucagau

SEQ ID NO: 809329 - RNA, 22 nt, Human
uuucuggaaccacaaaaguaug

SEQ ID NO: 809330 - RNA, 22 nt, Human
gaaaggccacgugccaagauua

SEQ ID NO: 809331 - RNA, 22 nt, Human
uguggcaggcauucugaggcug

SEQ ID NO: 809332 - RNA, 22 nt, Human
cccaggccccagggcuugucag

SEQ ID NO: 809333 - RNA, 22 nt, Human
gccugagccgccugagcggcgg

SEQ ID NO: 809334 - RNA, 22 nt, Human
gcaagcaggguuccuuagggca

SEQ ID NO: 809335 - RNA, 22 nt, Human
augcuucugguauaagaaaaau

SEQ ID NO: 809336 - RNA, 22 nt, Human
aaucaggaaacuaucaacacau

SEQ ID NO: 809337 - RNA, 22 nt, Human
cagccugcagggcugccuguug

SEQ ID NO: 809338 - RNA, 22 nt, Human
ucacugacguggggcuacuuga

SEQ ID NO: 809339 - RNA, 22 nt, Human
aaggacaggcacagugguggag

SEQ ID NO: 809340 - RNA, 22 nt, Human
auucuucugccuacuuucaucc

SEQ ID NO: 809341 - RNA, 22 nt, Human
caggccauuaccgcugagaccc

SEQ ID NO: 809342 - RNA, 22 nt, Human
cggggcaccgaccuccugccgc

SEQ ID NO: 809343 - RNA, 22 nt, Human
gggauggacugacgguagcgcg

SEQ ID NO: 809344 - RNA, 21 nt, Human
agggccucucauuugugccag

SEQ ID NO: 809345 - RNA, 22 nt, Human
cauggcaggaggcugcuggcag

SEQ ID NO: 809346 - RNA, 22 nt, Human
uccauauaaugggauuccuuau

SEQ ID NO: 809347 - RNA, 22 nt, Human
caugcacagagcuuggucauug

SEQ ID NO: 809348 - RNA, 22 nt, Human
agccacagucuguagccagcuu

SEQ ID NO: 809349 - RNA, 22 nt, Human
ucuuucccuuagaacauuaaca

SEQ ID NO: 809350 - RNA, 22 nt, Human
ccagggccugagggcgacgccc

SEQ ID NO: 809351 - RNA, 22 nt, Human
cugccuggcauggagaagagaa

SEQ ID NO: 809352 - RNA, 22 nt, Human
cagggcucaggcucugggauuc

SEQ ID NO: 809353 - RNA, 22 nt, Human
cuguuuuaauggagacugaugu

SEQ ID NO: 809354 - RNA, 22 nt, Human
uagcauaacagguaagagugag

SEQ ID NO: 809355 - RNA, 22 nt, Human
uuggcuucuguuuuggcucugu

SEQ ID NO: 809356 - RNA, 22 nt, Human
aggcagguccccuggaaggcac

SEQ ID NO: 809357 - RNA, 22 nt, Human
uucucucuguggucccauuuug

SEQ ID NO: 809358 - RNA, 22 nt, Human
accucagagaccucucaggugc

SEQ ID NO: 809359 - RNA, 22 nt, Human
cagcagaguauggcacucaacu

SEQ ID NO: 809360 - RNA, 22 nt, Human
aaacugcacaagggugcauagc

SEQ ID NO: 809361 - RNA, 22 nt, Human
uccauuuacuauucucauaucg

SEQ ID NO: 809362 - RNA, 22 nt, Human
agcuguggggaggaggcuagca

SEQ ID NO: 809363 - RNA, 22 nt, Human
uucagaaguagcuaagcaguca

SEQ ID NO: 809364 - RNA, 22 nt, Human
agauaauaaauguuuuagguuu

SEQ ID NO: 809365 - RNA, 22 nt, Human
cugugccacugccccaggccuc

SEQ ID NO: 809366 - RNA, 22 nt, Human
auucacauuuagccucugacau

SEQ ID NO: 809367 - RNA, 22 nt, Human
gcagggcacaaggacgcacagg

SEQ ID NO: 809368 - RNA, 22 nt, Human
aacagugagaagguggacagga

SEQ ID NO: 809369 - RNA, 22 nt, Human
ugagugcuuuaaauguuauuuu

SEQ ID NO: 809370 - RNA, 22 nt, Human
uuuguacacugucuacuaugaa

SEQ ID NO: 809371 - RNA, 19 nt, Human
cuugccuguuccuacagcu

SEQ ID NO: 809372 - RNA, 22 nt, Human
ccaguuuagguacuaggcucua

SEQ ID NO: 809373 - RNA, 22 nt, Human
aauagcuuaguccugauucugu

SEQ ID NO: 809374 - RNA, 22 nt, Human
gcugcuggagagcgagacuguu

SEQ ID NO: 809375 - RNA, 22 nt, Human
ugccaaaauggccaaaagcuag

SEQ ID NO: 809376 - RNA, 22 nt, Human
uagauguuccacauauauaugu

SEQ ID NO: 809377 - RNA, 22 nt, Human
agaggagcugggaggcccucgu

SEQ ID NO: 809378 - RNA, 22 nt, Human
cagggggcuguggcuguccagu

SEQ ID NO: 809379 - RNA, 22 nt, Human
ggagugacucacagcugggaca

SEQ ID NO: 809380 - RNA, 22 nt, Human
ccugggaggcuguuuccagccu

SEQ ID NO: 809381 - RNA, 22 nt, Human
gacacagguagaauaaaguacu

SEQ ID NO: 809382 - RNA, 22 nt, Human
agggagaguagauaucaggugu

SEQ ID NO: 809383 - RNA, 21 nt, Human
aaggcuggagaugcaggucug

SEQ ID NO: 809384 - RNA, 22 nt, Human
gcuggcucugaugggcuccagg

SEQ ID NO: 809385 - RNA, 22 nt, Human
aggugggcacaccucccuucuc

SEQ ID NO: 809386 - RNA, 22 nt, Human
aaaaagagaaaugcucuagucc

SEQ ID NO: 809387 - RNA, 20 nt, Human
caacagaggggucuggagua

SEQ ID NO: 809388 - RNA, 22 nt, Human
gugguucagugucauauuaacg

SEQ ID NO: 809389 - RNA, 22 nt, Human
uucaaauacauucuuugccacu

SEQ ID NO: 809390 - RNA, 22 nt, Human
ugaagaaacgcagagagguagg

SEQ ID NO: 809391 - RNA, 22 nt, Human
ugagaguagagucuucaucugu

SEQ ID NO: 809392 - RNA, 22 nt, Human
ccaggcugggcuacaaguugag

SEQ ID NO: 809393 - RNA, 22 nt, Human
acauaguucagagcagcagacc

SEQ ID NO: 809394 - RNA, 22 nt, Human
accugggauggggccagguuua

SEQ ID NO: 809395 - RNA, 22 nt, Human
agauauaguuguugagaagaac

SEQ ID NO: 809396 - RNA, 22 nt, Human
uuccacagguuucagacuguuc

SEQ ID NO: 809397 - RNA, 22 nt, Human
gcagggacaaggcagguguucu

SEQ ID NO: 809398 - RNA, 22 nt, Human
gaggaaaugguuguucaggugg

SEQ ID NO: 809399 - RNA, 20 nt, Human
gcuccccuucucugggccuc

SEQ ID NO: 809400 - RNA, 22 nt, Human
cugccaggcacgugcagcauca

SEQ ID NO: 809401 - RNA, 22 nt, Human
uacucaaacucacuaagacaga

SEQ ID NO: 809402 - RNA, 22 nt, Human
cccuggagggcagacagaugcc

SEQ ID NO: 809403 - RNA, 22 nt, Human
aaauagagcuggguuaaacuuu

SEQ ID NO: 809404 - RNA, 22 nt, Human
cagcaggaagguuuccccugca

SEQ ID NO: 809405 - RNA, 22 nt, Human
cuuaaagaugucaaggcuguuu

SEQ ID NO: 809406 - RNA, 22 nt, Human
ggcucuggcuccuggcuuugug

SEQ ID NO: 809407 - RNA, 22 nt, Human
uaacaacuugcuuuuaucuuag

SEQ ID NO: 809408 - RNA, 22 nt, Human
ccagcugcuugggaaaaugucu

SEQ ID NO: 809409 - RNA, 22 nt, Human
aggaggagcagcuuuuugucuc

SEQ ID NO: 809410 - RNA, 22 nt, Human
ucuggagugcccugcucugccc

SEQ ID NO: 809411 - RNA, 22 nt, Human
aaccagagugacacucuacaga

SEQ ID NO: 809412 - RNA, 22 nt, Human
uacaacaggaauuucaacuuug

SEQ ID NO: 809413 - RNA, 22 nt, Human
ucuucuuccucauuuauacaua

SEQ ID NO: 809414 - RNA, 22 nt, Human
aggccccaaagcagugcaagua

SEQ ID NO: 809415 - RNA, 22 nt, Human
agccuauucaucugaucuugaa

SEQ ID NO: 809416 - RNA, 22 nt, Human
auauauagagcuagauguuaaa

SEQ ID NO: 809417 - RNA, 22 nt, Human
ugcuggagugagugguuucuua

SEQ ID NO: 809418 - RNA, 22 nt, Human
aucugccuccaaguccaugugu

SEQ ID NO: 809419 - RNA, 22 nt, Human
ccucagcugcuucccuggagcc

SEQ ID NO: 809420 - RNA, 22 nt, Human
cagaacuggccuuucaucaguc

SEQ ID NO: 809421 - RNA, 22 nt, Human
ugucugaaagaggacgagcugg

SEQ ID NO: 809422 - RNA, 22 nt, Human
ccucuccagcggccucagggcc

SEQ ID NO: 809423 - RNA, 22 nt, Human
agaaaacagaaagucauuggug

SEQ ID NO: 809424 - RNA, 18 nt, Human
ugguccaguucagauaua

SEQ ID NO: 809425 - RNA, 22 nt, Human
aucacauucuuucaaagcaguc

SEQ ID NO: 809426 - RNA, 22 nt, Human
auuuacuaaugucauaucgcgu

SEQ ID NO: 809427 - RNA, 22 nt, Human
cuuacauacugagaaaauaucc

SEQ ID NO: 809428 - RNA, 22 nt, Human
gagccagguuugaaucucaguc

SEQ ID NO: 809429 - RNA, 22 nt, Human
uagcaccugcaggaugugcaca

SEQ ID NO: 809430 - RNA, 22 nt, Human
ggcacagcucaggucccagcuc

SEQ ID NO: 809431 - RNA, 22 nt, Human
ccugggcucgcgcacuucaccc

SEQ ID NO: 809432 - RNA, 22 nt, Human
guccugcggccucaguggugag

SEQ ID NO: 809433 - RNA, 22 nt, Human
augcaauauguguuucuguuua

SEQ ID NO: 809434 - RNA, 22 nt, Human
uuucaaguaagauacauuucag

SEQ ID NO: 809435 - RNA, 22 nt, Human
gcccagagagaugaagugaugg

SEQ ID NO: 809436 - RNA, 22 nt, Human
ugcccucuuaggucugcgcagc

SEQ ID NO: 809437 - RNA, 22 nt, Human
acuaaauaguuuugacagaaca

SEQ ID NO: 809438 - RNA, 21 nt, Human
cagugcagggguuagcgugua

SEQ ID NO: 809439 - RNA, 22 nt, Human
ccaccaggcacucacagggaag

SEQ ID NO: 809440 - RNA, 22 nt, Human
agcucuuuugugagcauuuggc

SEQ ID NO: 809441 - RNA, 22 nt, Human
cagaaaaggguguuuguucagg

SEQ ID NO: 809442 - RNA, 22 nt, Human
uccuggaagaucucugugagau

SEQ ID NO: 809443 - RNA, 22 nt, Human
acaugcaaaaauauauuuauga

SEQ ID NO: 809444 - RNA, 22 nt, Human
gucaacaaagaaaauuguuaau

SEQ ID NO: 809445 - RNA, 19 nt, Human
agccuggcuuugcucugcu

SEQ ID NO: 809446 - RNA, 22 nt, Human
agggccuccagggcagcagugg

SEQ ID NO: 809447 - RNA, 22 nt, Human
ucaaagaugaugcugaaguuau

SEQ ID NO: 809448 - RNA, 22 nt, Human
aucuucucauguguaaugaggu

SEQ ID NO: 809449 - RNA, 22 nt, Human
ccacagcaggacuggagccgcc

SEQ ID NO: 809450 - RNA, 22 nt, Human
gcaggcugauagaggauuccau

SEQ ID NO: 809451 - RNA, 22 nt, Human
gcuggcugccuuacuuugugga

SEQ ID NO: 809452 - RNA, 22 nt, Human
augucugauaaauaaugcauaa

SEQ ID NO: 809453 - RNA, 22 nt, Human
auucaaaagaccaugcagacuc

SEQ ID NO: 809454 - RNA, 19 nt, Human
aaacacagauuucuuacca

SEQ ID NO: 809455 - RNA, 22 nt, Human
aagaggaggauugaugugggag

SEQ ID NO: 809456 - RNA, 22 nt, Human
uacauucuacuuuuucacuccc

SEQ ID NO: 809457 - RNA, 22 nt, Human
cccagccucagcuuuacuucca

SEQ ID NO: 809458 - RNA, 22 nt, Human
uagaaaauggccaagcaggacu

SEQ ID NO: 809459 - RNA, 22 nt, Human
gugcagcugugugagagcucca

SEQ ID NO: 809460 - RNA, 22 nt, Human
acacauuuauuacaugcaugug

SEQ ID NO: 809461 - RNA, 22 nt, Human
ggucccagcuggucacugucag

SEQ ID NO: 809462 - RNA, 22 nt, Human
cuuaagaagcaagucucagcaa

SEQ ID NO: 809463 - RNA, 22 nt, Human
ugcauucuuggaagaagcucuc

SEQ ID NO: 809464 - RNA, 22 nt, Human
caggcaagauccagaggcugcu

SEQ ID NO: 809465 - RNA, 22 nt, Human
gggcagguacuggguggugagc

SEQ ID NO: 809466 - RNA, 22 nt, Human
uuucuccuaacucaaauuuaag

SEQ ID NO: 809467 - RNA, 22 nt, Human
ggcuggcacucuguccaguguc

SEQ ID NO: 809468 - RNA, 22 nt, Human
ugaguucuaguggcugcagauu

SEQ ID NO: 809469 - RNA, 22 nt, Human
aaggccuccgccaauggcagag

SEQ ID NO: 809470 - RNA, 20 nt, Human
ucaaagcacugccugucauc

SEQ ID NO: 809471 - RNA, 22 nt, Human
uuuucacuuaaggaauuucaug

SEQ ID NO: 809472 - RNA, 22 nt, Human
cgcugccuucaucccacgccua

SEQ ID NO: 809473 - RNA, 22 nt, Human
agacaaugcaagcagggagugg

SEQ ID NO: 809474 - RNA, 22 nt, Human
uauuucucuucaaaauugaugu

SEQ ID NO: 809475 - RNA, 22 nt, Human
uuacaagacagugugguaaaua

SEQ ID NO: 809476 - RNA, 22 nt, Human
acaacagagcuggacugagagg

SEQ ID NO: 809477 - RNA, 22 nt, Human
ucauaaauuagcugucuuugaa

SEQ ID NO: 809478 - RNA, 22 nt, Human
cuccagugagugagcaggcgac

SEQ ID NO: 809479 - RNA, 22 nt, Human
uggcgcaguuucucugcugccu

SEQ ID NO: 809480 - RNA, 21 nt, Human
aacauuucaggauccaaauug

SEQ ID NO: 809481 - RNA, 22 nt, Human
uaaucugaagaaacaggacuug

SEQ ID NO: 809482 - RNA, 22 nt, Human
uuacauucuuggaaucuuguuu

SEQ ID NO: 809483 - RNA, 22 nt, Human
ucucagcucuuuuuucacagaa

SEQ ID NO: 809484 - RNA, 22 nt, Human
gccagccccuuagggcucuccc

SEQ ID NO: 809485 - RNA, 18 nt, Human
augcuucugauagaagca

SEQ ID NO: 809486 - RNA, 22 nt, Human
uacauuaucuuguuaucuuuca

SEQ ID NO: 809487 - RNA, 22 nt, Human
aaagugcacuagaauccagauu

SEQ ID NO: 809488 - RNA, 22 nt, Human
agugaagauauacuguuguccu

SEQ ID NO: 809489 - RNA, 16 nt, Human
gaggcuggcagauguc

SEQ ID NO: 809490 - RNA, 22 nt, Human
cucuugcaugagauccaggagu

SEQ ID NO: 809491 - RNA, 22 nt, Human
uccucaguauuguggagcagau

SEQ ID NO: 809492 - RNA, 22 nt, Human
aaacuugacaguagacagauua

SEQ ID NO: 809493 - RNA, 22 nt, Human
cucagccaggagaguguucaca

SEQ ID NO: 809494 - RNA, 22 nt, Human
ucccagcacuguaauucuuugg

SEQ ID NO: 809495 - RNA, 22 nt, Human
uuacaaacugucauauaguauu

SEQ ID NO: 809496 - RNA, 22 nt, Human
gggcuucucccuaaggacucug

SEQ ID NO: 809497 - RNA, 22 nt, Human
aagggcaggugggcauuucugg

SEQ ID NO: 809498 - RNA, 22 nt, Human
gccaggaaggcucccuggucac

SEQ ID NO: 809499 - RNA, 22 nt, Human
ggcaaaaaccacaauuacuuuu

SEQ ID NO: 809500 - RNA, 22 nt, Human
gaggucaggcuugcagcagggu

SEQ ID NO: 809501 - RNA, 20 nt, Human
uagcaugggugaggguagag

SEQ ID NO: 809502 - RNA, 22 nt, Human
aagucagaaauuauucaggaau

SEQ ID NO: 809503 - RNA, 22 nt, Human
cuauuuauuguggguauccagg

SEQ ID NO: 809504 - RNA, 22 nt, Human
aagugcauacacuaguuaauug

SEQ ID NO: 809505 - RNA, 22 nt, Human
acagugauuauuaguugguggu

SEQ ID NO: 809506 - RNA, 22 nt, Human
gagguggguguaucacagguca

SEQ ID NO: 809507 - RNA, 22 nt, Human
gcuggagugcaguugcacaguc

SEQ ID NO: 809508 - RNA, 22 nt, Human
gcugaggauauagcaggaacaa

SEQ ID NO: 809509 - RNA, 22 nt, Human
guaaaauucuagcaucugaaag

SEQ ID NO: 809510 - RNA, 22 nt, Human
gaggcugguaggaaaggaaaca

SEQ ID NO: 809511 - RNA, 22 nt, Human
ggcaggcauugcaacauguaca

SEQ ID NO: 809512 - RNA, 22 nt, Human
aacuguagugcuuauagacucu

SEQ ID NO: 809513 - RNA, 22 nt, Human
cugcagggcuuaccuugcucug

SEQ ID NO: 809514 - RNA, 22 nt, Human
ccagccuggggaggcagcuucu

SEQ ID NO: 809515 - RNA, 22 nt, Human
agugggagcggcagucggggac

SEQ ID NO: 809516 - RNA, 22 nt, Human
aaauagcagaagcagagggggu

SEQ ID NO: 809517 - RNA, 22 nt, Human
ugccagggccauagggagucua

SEQ ID NO: 809518 - RNA, 22 nt, Human
uucuuacaaguauuccaggucc

SEQ ID NO: 809519 - RNA, 22 nt, Human
uacagaggggacauggaagaca

SEQ ID NO: 809520 - RNA, 22 nt, Human
guggggggacguuggucacuuu

SEQ ID NO: 809521 - RNA, 22 nt, Human
cugaaagcaaauacaugaaucu

SEQ ID NO: 809522 - RNA, 22 nt, Human
aggcaaagcgauaccagagcua

SEQ ID NO: 809523 - RNA, 22 nt, Human
ucaggcucuacacuugacacac

SEQ ID NO: 809524 - RNA, 22 nt, Human
uggcccuggcugaguuagauuu

SEQ ID NO: 809525 - RNA, 22 nt, Human
ugcauuuuuaacaaggcuaauu

SEQ ID NO: 809526 - RNA, 22 nt, Human
uccccaggaaucaggugguugc

SEQ ID NO: 809527 - RNA, 22 nt, Human
aaguccuguuccucauacuucc

SEQ ID NO: 809528 - RNA, 22 nt, Human
gccugccuucggugcgcagcgg

SEQ ID NO: 809529 - RNA, 22 nt, Human
gcaggcugaguauuacccuagu

SEQ ID NO: 809530 - RNA, 21 nt, Human
auucugaguugucagucuuca

SEQ ID NO: 809531 - RNA, 22 nt, Human
cuggccucauagccaagcugug

SEQ ID NO: 809532 - RNA, 21 nt, Human
cuugucuugcuuagaauagac

SEQ ID NO: 809533 - RNA, 22 nt, Human
ucuuuaugagaaaaagauugua

SEQ ID NO: 809534 - RNA, 22 nt, Human
gcuuaaugagcagagaaucuac

SEQ ID NO: 809535 - RNA, 22 nt, Human
aggugcuggcgccccaggagac

SEQ ID NO: 809536 - RNA, 22 nt, Human
gcacugggagcugccugccggu

SEQ ID NO: 809537 - RNA, 22 nt, Human
aguuaauaauggaaagacacau

SEQ ID NO: 809538 - RNA, 22 nt, Human
ccauccagaaggguuugaaaga

SEQ ID NO: 809539 - RNA, 22 nt, Human
ggccugccucacagucagcacc

SEQ ID NO: 809540 - RNA, 18 nt, Human
uugauaaacaauuucauu

SEQ ID NO: 809541 - RNA, 22 nt, Human
uguuuuaucaagauggcauguc

SEQ ID NO: 809542 - RNA, 22 nt, Human
ucagcucuguguacaguuagca

SEQ ID NO: 809543 - RNA, 23 nt, Human
cagaugagguuggcagcaugguc

SEQ ID NO: 809544 - RNA, 22 nt, Human
gggggaaagcucaggagccugu

SEQ ID NO: 809545 - RNA, 22 nt, Human
ccagcaggagaugccugugucu

SEQ ID NO: 809546 - RNA, 22 nt, Human
gaaaggccaccaugccagggac

SEQ ID NO: 809547 - RNA, 17 nt, Human
uccagccuccucugcug

SEQ ID NO: 809548 - RNA, 22 nt, Human
cugcagggacccaagucuuugg

SEQ ID NO: 809549 - RNA, 22 nt, Human
aggcuggggaauugaauuugcu

SEQ ID NO: 809550 - RNA, 21 nt, Human
ucuugugugggaaacaauuug

SEQ ID NO: 809551 - RNA, 22 nt, Human
gugcauuacauguaauaaaaua

SEQ ID NO: 809552 - RNA, 22 nt, Human
cgcacuggagcuggaacgaguc

SEQ ID NO: 809553 - RNA, 22 nt, Human
uaaaugaagaaauggagauugu

SEQ ID NO: 809554 - RNA, 22 nt, Human
cguggcaguggaaggcugggug

SEQ ID NO: 809555 - RNA, 22 nt, Human
ccuggcuccugcacagaucuuu

SEQ ID NO: 809556 - RNA, 22 nt, Human
gggagacaagaaguagccugcu

SEQ ID NO: 809557 - RNA, 22 nt, Human
uacagcaaugguucuaagaguc

SEQ ID NO: 809558 - RNA, 22 nt, Human
acaugcauaaacuacuucuuau

SEQ ID NO: 809559 - RNA, 22 nt, Human
aagccaguguuuuugagaguug

SEQ ID NO: 809560 - RNA, 22 nt, Human
uuccaggacuucauggcucuga

SEQ ID NO: 809561 - RNA, 22 nt, Human
uuacauuuuaguuaaccuguga

SEQ ID NO: 809562 - RNA, 22 nt, Human
uuucauguuaguugguucuugg

SEQ ID NO: 809563 - RNA, 22 nt, Human
ggcagcucaccucugguccagg

SEQ ID NO: 809564 - RNA, 22 nt, Human
auucuuugaacaguuuuccugu

SEQ ID NO: 809565 - RNA, 22 nt, Human
caguggcgugaucucugcucac

SEQ ID NO: 809566 - RNA, 22 nt, Human
aaugccaguguguugauuccag

SEQ ID NO: 809567 - RNA, 22 nt, Human
ccugguggcuucuggguggacg

SEQ ID NO: 809568 - RNA, 22 nt, Human
ccaggcagccaagugugugugu

SEQ ID NO: 809569 - RNA, 22 nt, Human
ugcagggugcacaguggggugc

SEQ ID NO: 809570 - RNA, 22 nt, Human
aacauuuguguuugcuaaaaau

SEQ ID NO: 809571 - RNA, 22 nt, Human
uacaguaaucuggacaugauuu

SEQ ID NO: 809572 - RNA, 22 nt, Human
auuuuguuauagaacucuguga

SEQ ID NO: 809573 - RNA, 22 nt, Human
uagaaaagaagucuggccggga

SEQ ID NO: 809574 - RNA, 22 nt, Human
cuccagccagagugccucuguu

SEQ ID NO: 809575 - RNA, 22 nt, Human
ugcagaaagcauugacucuucc

SEQ ID NO: 809576 - RNA, 22 nt, Human
ggaaauauuuugucuaauuugu

SEQ ID NO: 809577 - RNA, 22 nt, Human
gcaggguacauugggaugggau

SEQ ID NO: 809578 - RNA, 22 nt, Human
uuugcaaauaccaugaaacuug

SEQ ID NO: 809579 - RNA, 22 nt, Human
agcucuuugacuaaucuugcuu

SEQ ID NO: 809580 - RNA, 22 nt, Human
caggcagccuucucgucucaca

SEQ ID NO: 809581 - RNA, 23 nt, Human
ccucagggucuagcagagagaag

SEQ ID NO: 809582 - RNA, 22 nt, Human
ucaagagagugcugcuuggggu

SEQ ID NO: 809583 - RNA, 22 nt, Human
uccucugcuguucugguucuuu

SEQ ID NO: 809584 - RNA, 22 nt, Human
agcccagguucuaaagccaaac

SEQ ID NO: 809585 - RNA, 22 nt, Human
gcuggguuuucuuccgggccua

SEQ ID NO: 809586 - RNA, 22 nt, Human
agcugugguuagauagaguccu

SEQ ID NO: 809587 - RNA, 22 nt, Human
auuugcuuuuacuauguuaaaa

SEQ ID NO: 809588 - RNA, 22 nt, Human
auacucaauuuguuggaaagca

SEQ ID NO: 809589 - RNA, 22 nt, Human
uuuuuauaacucuuuugugaca

SEQ ID NO: 809590 - RNA, 22 nt, Human
gaagagcugucagaaaagcuaa

SEQ ID NO: 809591 - RNA, 22 nt, Human
ucccagggcuuuucucaugcuu

SEQ ID NO: 809592 - RNA, 22 nt, Human
ucuuacaagaaggaaaagggag

SEQ ID NO: 809593 - RNA, 22 nt, Human
cuuacauaugcaagacaaaggg

SEQ ID NO: 809594 - RNA, 22 nt, Human
uuccuguguguugguggcagaa

SEQ ID NO: 809595 - RNA, 22 nt, Human
gccagccacuucccagacuggc

SEQ ID NO: 809596 - RNA, 22 nt, Human
ggcaccaggcugggcauaggcc

SEQ ID NO: 809597 - RNA, 22 nt, Human
gacugagguauuaagauggcuu

SEQ ID NO: 809598 - RNA, 22 nt, Human
augcaggcagacacugugggca

SEQ ID NO: 809599 - RNA, 22 nt, Human
caaaugccaggaaucucugaag

SEQ ID NO: 809600 - RNA, 18 nt, Human
uccagcucacagaugggc

SEQ ID NO: 809601 - RNA, 22 nt, Human
ugggccuccugcccuggccuag

SEQ ID NO: 809602 - RNA, 22 nt, Human
uacaguaaccuuauuugucauu

SEQ ID NO: 809603 - RNA, 22 nt, Human
uacauacagagaugcuaguuaa

SEQ ID NO: 809604 - RNA, 22 nt, Human
cagcucugaagaaaggugucua

SEQ ID NO: 809605 - RNA, 22 nt, Human
agagccaggcucccauggggca

SEQ ID NO: 809606 - RNA, 22 nt, Human
gcccuccccucuggguggugag

SEQ ID NO: 809607 - RNA, 22 nt, Human
ccauuuggcaagaaagagucau

SEQ ID NO: 809608 - RNA, 22 nt, Human
gggccugcagguucugagaggc

SEQ ID NO: 809609 - RNA, 22 nt, Human
uuccugugugaccgagacagug

SEQ ID NO: 809610 - RNA, 22 nt, Human
cuccauuguucgcgcagcugca

SEQ ID NO: 809611 - RNA, 23 nt, Human
acauacauggagauaaagugaug

SEQ ID NO: 809612 - RNA, 22 nt, Human
ucuacugccacuuaagacauuu

SEQ ID NO: 809613 - RNA, 22 nt, Human
ucugggugacccugggcaaggc

SEQ ID NO: 809614 - RNA, 22 nt, Human
acucuguaucccucucaaauug

SEQ ID NO: 809615 - RNA, 22 nt, Human
cugccagcagaggccagcgcug

SEQ ID NO: 809616 - RNA, 22 nt, Human
accgugucugacacuuugggcg

SEQ ID NO: 809617 - RNA, 22 nt, Human
guggcuuggaccagucacagug

SEQ ID NO: 809618 - RNA, 22 nt, Human
cuucaguauccuccacauguua

SEQ ID NO: 809619 - RNA, 23 nt, Human
auccaugcuuaaguaaucauuug

SEQ ID NO: 809620 - RNA, 22 nt, Human
gaaggcuguggcuggucucagu

SEQ ID NO: 809621 - RNA, 20 nt, Human
ugggugagaguguuugcucu

SEQ ID NO: 809622 - RNA, 22 nt, Human
ccauggcagccaugggagccac

SEQ ID NO: 809623 - RNA, 22 nt, Human
agcagcacgaguccacaaaucc

SEQ ID NO: 809624 - RNA, 22 nt, Human
cagguggggagaguguggagca

SEQ ID NO: 809625 - RNA, 22 nt, Human
ucuuauuuuguuagaugcugua

SEQ ID NO: 809626 - RNA, 22 nt, Human
augacucaaaauuauuguuuug

SEQ ID NO: 809627 - RNA, 22 nt, Human
uagcuuugccaucugucacaua

SEQ ID NO: 809628 - RNA, 22 nt, Human
uccuggcaggucagcaggagca

SEQ ID NO: 809629 - RNA, 22 nt, Human
gauaaaauucuuauuuuacccg

SEQ ID NO: 809630 - RNA, 23 nt, Human
cauuucugggagauuuauaaaau

SEQ ID NO: 809631 - RNA, 22 nt, Human
uaacaaggagauggugggucau

SEQ ID NO: 809632 - RNA, 22 nt, Human
gacaguaaaugcagucuagcac

SEQ ID NO: 809633 - RNA, 22 nt, Human
auugagaaauauaaucuggaaa

SEQ ID NO: 809634 - RNA, 22 nt, Human
ucugaagcacagcaggaagggu

SEQ ID NO: 809635 - RNA, 22 nt, Human
ucacaugucaagaagauaauuu

SEQ ID NO: 809636 - RNA, 22 nt, Human
ggcagguggauuuucuacucua

SEQ ID NO: 809637 - RNA, 22 nt, Human
ucagcauuguggcagagaaugg

SEQ ID NO: 809638 - RNA, 22 nt, Human
auucauuuagguauucacuuac

SEQ ID NO: 809639 - RNA, 22 nt, Human
auggcuggaagagucgaagagu

SEQ ID NO: 809640 - RNA, 22 nt, Human
aggcugugacagggucauggag

SEQ ID NO: 809641 - RNA, 20 nt, Human
gcagugcuggugccucugcu

SEQ ID NO: 809642 - RNA, 22 nt, Human
ggggggcagcuguccuggccau

SEQ ID NO: 809643 - RNA, 22 nt, Human
uaaaugagggcugacaugauug

SEQ ID NO: 809644 - RNA, 22 nt, Human
aaacagauaagggacaauuuca

SEQ ID NO: 809645 - RNA, 22 nt, Human
uugauauuagaguauuuguuug

SEQ ID NO: 809646 - RNA, 22 nt, Human
aaauuugauaagccauuguuac

SEQ ID NO: 809647 - RNA, 22 nt, Human
auguuucaccagcaaauuaccu

SEQ ID NO: 809648 - RNA, 22 nt, Human
acauguuuugugccuugacuag

SEQ ID NO: 809649 - RNA, 22 nt, Human
gcagaggaucaggcucuggaaa

SEQ ID NO: 809650 - RNA, 22 nt, Human
uggcccaagucugcuagaagag

SEQ ID NO: 809651 - RNA, 22 nt, Human
aggcucagugcaaaucauucug

SEQ ID NO: 809652 - RNA, 22 nt, Human
auuuuccuucuaagaggaaggu

SEQ ID NO: 809653 - RNA, 22 nt, Human
uuuauucacuggggucugcccg

SEQ ID NO: 809654 - RNA, 22 nt, Human
uguuuccuucugucucuuugga

SEQ ID NO: 809655 - RNA, 22 nt, Human
uuucauuguccccaggcaagac

SEQ ID NO: 809656 - RNA, 22 nt, Human
ccagcacuguucuaaggaaaca

SEQ ID NO: 809657 - RNA, 22 nt, Human
ugauuuacaguagugucuaaac

SEQ ID NO: 809658 - RNA, 22 nt, Human
cauaacauuaagccucuauuuc

SEQ ID NO: 809659 - RNA, 22 nt, Human
aggcucugucaggcggagcagc

SEQ ID NO: 809660 - RNA, 22 nt, Human
uaccacaggccaaauuugaggu

SEQ ID NO: 809661 - RNA, 21 nt, Human
ggccagcugcauaugucacug

SEQ ID NO: 809662 - RNA, 22 nt, Human
ggaggccaugaggcucuaggug

SEQ ID NO: 809663 - RNA, 22 nt, Human
uugcacauguugguucuugaaa

SEQ ID NO: 809664 - RNA, 22 nt, Human
gcugccugccuugccuggagga

SEQ ID NO: 809665 - RNA, 22 nt, Human
caagcugccaccagaagagcau

SEQ ID NO: 809666 - RNA, 22 nt, Human
agagucagaaagcagacagggg

SEQ ID NO: 809667 - RNA, 22 nt, Human
uuuguuuucaaugugucauuca

SEQ ID NO: 809668 - RNA, 22 nt, Human
uuugaaaagaaccaucgccuua

SEQ ID NO: 809669 - RNA, 22 nt, Human
ucuuuauaaaagucauuauguc

SEQ ID NO: 809670 - RNA, 21 nt, Human
uccagccuuucccucacuucc

SEQ ID NO: 809671 - RNA, 22 nt, Human
uccccaggggcaucucucugcu

SEQ ID NO: 809672 - RNA, 22 nt, Human
uuuaugauuauuuuaaagcagc

SEQ ID NO: 809673 - RNA, 22 nt, Human
ggccaguuuccaugcacuauuu

SEQ ID NO: 809674 - RNA, 22 nt, Human
gggcuugguggagagaaugcug

SEQ ID NO: 809675 - RNA, 22 nt, Human
acuacuuugggccauuuguuua

SEQ ID NO: 809676 - RNA, 20 nt, Human
caggcagaggaugcugacca

SEQ ID NO: 809677 - RNA, 22 nt, Human
cagggagcagccccuagaagua

SEQ ID NO: 809678 - RNA, 19 nt, Human
agcaaauauaauaguguuc

SEQ ID NO: 809679 - RNA, 22 nt, Human
ucccagccuuaucuccccuggc

SEQ ID NO: 809680 - RNA, 22 nt, Human
cuggcuuuaaugucaucuuucu

SEQ ID NO: 809681 - RNA, 22 nt, Human
ucaguuuuguauguuguaaguc

SEQ ID NO: 809682 - RNA, 19 nt, Human
caguuuaacuaauuuuauc

SEQ ID NO: 809683 - RNA, 22 nt, Human
uggcacagaaaaaugcuccauu

SEQ ID NO: 809684 - RNA, 22 nt, Human
agcugcaggcccaugcucaguc

SEQ ID NO: 809685 - RNA, 22 nt, Human
uaaagcaauuugagcaaguucu

SEQ ID NO: 809686 - RNA, 22 nt, Human
ccuggggaaucuugcaggggaa

SEQ ID NO: 809687 - RNA, 21 nt, Human
ugguaucaaacuauacaauau

SEQ ID NO: 809688 - RNA, 22 nt, Human
uacugaaagaauacauaauuuc

SEQ ID NO: 809689 - RNA, 22 nt, Human
gugugcagaagacacaagacau

SEQ ID NO: 809690 - RNA, 23 nt, Human
gggcccagcacaggaccuggcag

SEQ ID NO: 809691 - RNA, 22 nt, Human
uuuaauguuugagucaguauau

SEQ ID NO: 809692 - RNA, 22 nt, Human
agggcagcucucaccucuggcc

SEQ ID NO: 809693 - RNA, 22 nt, Human
uauuucuucgggauucaagcua

SEQ ID NO: 809694 - RNA, 22 nt, Human
uauagcaacuccaaagagacuu

SEQ ID NO: 809695 - RNA, 22 nt, Human
ugcagauggggaucaguggcuc

SEQ ID NO: 809696 - RNA, 22 nt, Human
aaucuuuaaggacucagucucu

SEQ ID NO: 809697 - RNA, 22 nt, Human
agacccaggauuggggcugccg

SEQ ID NO: 809698 - RNA, 22 nt, Human
acagcagcgucaacuuaaaauu

SEQ ID NO: 809699 - RNA, 22 nt, Human
aaaugucuaucuggcauauucc

SEQ ID NO: 809700 - RNA, 22 nt, Human
aagcuguagaggcaguacauuu

SEQ ID NO: 809701 - RNA, 22 nt, Human
aaacauuccauuucuauguaag

SEQ ID NO: 809702 - RNA, 22 nt, Human
ggagcugcuuugaucugaagaa

SEQ ID NO: 809703 - RNA, 22 nt, Human
ucuccugguacccuuccuagca

SEQ ID NO: 809704 - RNA, 22 nt, Human
gcauguggcccaaggaggcugu

SEQ ID NO: 809705 - RNA, 22 nt, Human
aacauucugucaauugaugacc

SEQ ID NO: 809706 - RNA, 22 nt, Human
acagcuauagacgauguauaga

SEQ ID NO: 809707 - RNA, 22 nt, Human
ucagaaaggaguuagaggucuc

SEQ ID NO: 809708 - RNA, 22 nt, Human
uucauuugucugcuauagaucc

SEQ ID NO: 809709 - RNA, 22 nt, Human
ugauuaaauuaauuaagaugag

SEQ ID NO: 809710 - RNA, 22 nt, Human
aggccagugcagcuggaacaga

SEQ ID NO: 809711 - RNA, 22 nt, Human
auuuguuccacacauauuuacu

SEQ ID NO: 809712 - RNA, 22 nt, Human
ucaggacaauagugauuuuuac

SEQ ID NO: 809713 - RNA, 22 nt, Human
uuucauucauuauacaguagag

SEQ ID NO: 809714 - RNA, 23 nt, Human
ccucccaccuauuucacuuucuu

SEQ ID NO: 809715 - RNA, 22 nt, Human
uauuucuuucagguauguguug

SEQ ID NO: 809716 - RNA, 22 nt, Human
uaagaaacuauggagaagaacu

SEQ ID NO: 809717 - RNA, 21 nt, Human
aggcccuggaggucagagaaa

SEQ ID NO: 809718 - RNA, 22 nt, Human
caggaaauuuugugaucuguuc

SEQ ID NO: 809719 - RNA, 22 nt, Human
uuucaaguucuguuccuaaacu

SEQ ID NO: 809720 - RNA, 22 nt, Human
gaggaccacagaugagccugca

SEQ ID NO: 809721 - RNA, 22 nt, Human
uggcuggcuagugggcaggauu

SEQ ID NO: 809722 - RNA, 22 nt, Human
augucuguggcaauuguugaug

SEQ ID NO: 809723 - RNA, 23 nt, Human
ccucuccagacacugggccuugu

SEQ ID NO: 809724 - RNA, 22 nt, Human
auacuuuggggguuaguguaga

SEQ ID NO: 809725 - RNA, 22 nt, Human
cccugccuugggguccacaccg

SEQ ID NO: 809726 - RNA, 22 nt, Human
agacagugugguuggugguucc

SEQ ID NO: 809727 - RNA, 22 nt, Human
agaggcucuaauaccagcaugg

SEQ ID NO: 809728 - RNA, 22 nt, Human
aagcacaguucuuagaguuaca

SEQ ID NO: 809729 - RNA, 22 nt, Human
cuggaauggcaaugggaagucc

SEQ ID NO: 809730 - RNA, 22 nt, Human
gugaucuuguaauugggcaaug

SEQ ID NO: 809731 - RNA, 22 nt, Human
uucuuacauuagucugugcuuu

SEQ ID NO: 809732 - RNA, 22 nt, Human
aggccacagagagugcaugugc

SEQ ID NO: 809733 - RNA, 22 nt, Human
augcuucuguguauguuucagg

SEQ ID NO: 809734 - RNA, 22 nt, Human
cugccuggaaggagcaagggga

SEQ ID NO: 809735 - RNA, 22 nt, Human
cucuuguauuggaguuaguggg

SEQ ID NO: 809736 - RNA, 22 nt, Human
uggcccugacugauguggaggg

SEQ ID NO: 809737 - RNA, 22 nt, Human
gcaaggcugcugccacccaucu

SEQ ID NO: 809738 - RNA, 22 nt, Human
caucaaaugccauauaugguug

SEQ ID NO: 809739 - RNA, 22 nt, Human
ggccugcugggccccacagucc

SEQ ID NO: 809740 - RNA, 22 nt, Human
ugaggcuuggcaaaagaguggu

SEQ ID NO: 809741 - RNA, 22 nt, Human
ugaaugaugaggggagaauaau

SEQ ID NO: 809742 - RNA, 22 nt, Human
cacauuucugugagucaauauu

SEQ ID NO: 809743 - RNA, 21 nt, Human
acagccugucaucucaugguc

SEQ ID NO: 809744 - RNA, 22 nt, Human
ccuccuggugacaaggcaaagc

SEQ ID NO: 809745 - RNA, 22 nt, Human
uuuucuuuaaucugguggggug

SEQ ID NO: 809746 - RNA, 22 nt, Human
cagcagccugccuugggagcuu

SEQ ID NO: 809747 - RNA, 22 nt, Human
gcugcacauggcagaggccuuu

SEQ ID NO: 809748 - RNA, 22 nt, Human
ggucaggaaaagacuccccaga

SEQ ID NO: 809749 - RNA, 22 nt, Human
caaaguggaggcucuggggcca

SEQ ID NO: 809750 - RNA, 22 nt, Human
gccucugcaggugcgguuaucc

SEQ ID NO: 809751 - RNA, 22 nt, Human
ugaccaggauacugcagggaug

SEQ ID NO: 809752 - RNA, 22 nt, Human
agcagccaggaaucugcagagc

SEQ ID NO: 809753 - RNA, 22 nt, Human
ggcaggcaccagcucagcaaua

SEQ ID NO: 809754 - RNA, 22 nt, Human
uaggacagaguucccugauggc

SEQ ID NO: 809755 - RNA, 22 nt, Human
gugcccagcuccaccucacaga

SEQ ID NO: 809756 - RNA, 19 nt, Human
aggcccagcgcugggggcu

SEQ ID NO: 809757 - RNA, 19 nt, Human
uccaugcccaggcaccaag

SEQ ID NO: 809758 - RNA, 22 nt, Human
cacuugaaaaucagaggaaauu

SEQ ID NO: 809759 - RNA, 22 nt, Human
cuuccaggacaccaggguagua

SEQ ID NO: 809760 - RNA, 22 nt, Human
uuucauugagaauauaagauuu

SEQ ID NO: 809761 - RNA, 22 nt, Human
ugaggcucagagaagugcuguu

SEQ ID NO: 809762 - RNA, 22 nt, Human
uugcuaauagaagauuugggaa

SEQ ID NO: 809763 - RNA, 22 nt, Human
aggcccugaccugggagaucua

SEQ ID NO: 809764 - RNA, 22 nt, Human
ugccagcuuguggucagaggcu

SEQ ID NO: 809765 - RNA, 22 nt, Human
aagcuggccucaaacuccuagc

SEQ ID NO: 809766 - RNA, 22 nt, Human
agucuauuuucagaagcaguuu

SEQ ID NO: 809767 - RNA, 22 nt, Human
uagcuguguaacaugagaaugu

SEQ ID NO: 809768 - RNA, 22 nt, Human
agcagagcauggugggaagggc

SEQ ID NO: 809769 - RNA, 22 nt, Human
ugucacauaauuuaucuguagg

SEQ ID NO: 809770 - RNA, 22 nt, Human
caaaguuuuaguaaacauauau

SEQ ID NO: 809771 - RNA, 22 nt, Human
uguggcugacuccuggucccca

SEQ ID NO: 809772 - RNA, 22 nt, Human
uccugcagccacugcaggcaga

SEQ ID NO: 809773 - RNA, 22 nt, Human
ggcuggcucagggcuugagaga

SEQ ID NO: 809774 - RNA, 22 nt, Human
ugaaugaucuccgauuaguccu

SEQ ID NO: 809775 - RNA, 22 nt, Human
gcuccuggauguucaagucggc

SEQ ID NO: 809776 - RNA, 22 nt, Human
auucaagguuggcucaggaauu

SEQ ID NO: 809777 - RNA, 22 nt, Human
gagaggaguaggcugauggugc

SEQ ID NO: 809778 - RNA, 22 nt, Human
ccagccagaugauaagcucuau

SEQ ID NO: 809779 - RNA, 22 nt, Human
guacauuucucccaacacuaaa

SEQ ID NO: 809780 - RNA, 22 nt, Human
ucaggcugaccagguuuugcuc

SEQ ID NO: 809781 - RNA, 22 nt, Human
auggcccaaaaccuccucccuc

SEQ ID NO: 809782 - RNA, 22 nt, Human
gccucuccuggagaaggcaggg

SEQ ID NO: 809783 - RNA, 22 nt, Human
uccuggccuagcucacccugga

SEQ ID NO: 809784 - RNA, 22 nt, Human
uucccucugcgcauugaauuuc

SEQ ID NO: 809785 - RNA, 22 nt, Human
gccacagucacugcugcagggg

SEQ ID NO: 809786 - RNA, 22 nt, Human
uuucaaguguccugauuaaugg

SEQ ID NO: 809787 - RNA, 22 nt, Human
cccagggugcuaauuaaauaug

SEQ ID NO: 809788 - RNA, 22 nt, Human
ugucaaagacagaaggaaaugg

SEQ ID NO: 809789 - RNA, 22 nt, Human
caggaggaaaguuccacucaac

SEQ ID NO: 809790 - RNA, 22 nt, Human
uaguuucuagucaaucuucuuu

SEQ ID NO: 809791 - RNA, 22 nt, Human
gaaggcuggggccuucucaucu

SEQ ID NO: 809792 - RNA, 22 nt, Human
aaaguucuggagaaaauaauga

SEQ ID NO: 809793 - RNA, 22 nt, Human
ugcaggcuguaaucugaggcua

SEQ ID NO: 809794 - RNA, 23 nt, Human
uucuggauguucuagucugagag

SEQ ID NO: 809795 - RNA, 21 nt, Human
cuacagaaucgagcauucugg

SEQ ID NO: 809796 - RNA, 22 nt, Human
gucuaaacacaaugcaagaagu

SEQ ID NO: 809797 - RNA, 22 nt, Human
gaggagaaagcagugauuugug

SEQ ID NO: 809798 - RNA, 22 nt, Human
ucugagcuuacucagggauaca

SEQ ID NO: 809799 - RNA, 18 nt, Human
ugagaggcagguagagga

SEQ ID NO: 809800 - RNA, 22 nt, Human
acuugaauaggugucaaggcca

SEQ ID NO: 809801 - RNA, 22 nt, Human
guaaacaggaauguggucaugg

SEQ ID NO: 809802 - RNA, 22 nt, Human
ugaaacauuugaugaucuuugg

SEQ ID NO: 809803 - RNA, 22 nt, Human
uacaaagugggaaacgaagguu

SEQ ID NO: 809804 - RNA, 22 nt, Human
uccuuucuucuucugcccaugg

SEQ ID NO: 809805 - RNA, 22 nt, Human
uggcagaguucgcugugccuuu

SEQ ID NO: 809806 - RNA, 21 nt, Human
uuucuaaguaacuggcagcau

SEQ ID NO: 809807 - RNA, 22 nt, Human
ucaaacagaggaacaauuguuu

SEQ ID NO: 809808 - RNA, 22 nt, Human
agaaaacacugcccccucucuc

SEQ ID NO: 809809 - RNA, 22 nt, Human
agauuccaggccuggggccaag

SEQ ID NO: 809810 - RNA, 22 nt, Human
uuagcugucaagguggcugcag

SEQ ID NO: 809811 - RNA, 22 nt, Human
agagaacaaauuaaaggugguu

SEQ ID NO: 809812 - RNA, 22 nt, Human
uccagccugaacuuuguccaga

SEQ ID NO: 809813 - RNA, 22 nt, Human
auaacuuagaguaggcaaaagu

SEQ ID NO: 809814 - RNA, 22 nt, Human
uuacuaaguuuuaugcaacuua

SEQ ID NO: 809815 - RNA, 17 nt, Human
ugcauguccuuuguucc

SEQ ID NO: 809816 - RNA, 22 nt, Human
acaauacucaugcucuuuuucu

SEQ ID NO: 809817 - RNA, 22 nt, Human
uguacaaauucaguucuagggu

SEQ ID NO: 809818 - RNA, 22 nt, Human
ccuuucucuaucgacccaucgc

SEQ ID NO: 809819 - RNA, 22 nt, Human
ccuggcuccaaagcugugacuc

SEQ ID NO: 809820 - RNA, 22 nt, Human
cucuuuggccagaaaauguuuu

SEQ ID NO: 809821 - RNA, 22 nt, Human
uucaguguuaaucuugggagaa

SEQ ID NO: 809822 - RNA, 22 nt, Human
caggacagaaauaaggaauaua

SEQ ID NO: 809823 - RNA, 22 nt, Human
uccugguguuacuaaauugaaa

SEQ ID NO: 809824 - RNA, 22 nt, Human
uacacaaaggcacucuguuguu

SEQ ID NO: 809825 - RNA, 22 nt, Human
aaggcagaaauucaacuacugg

SEQ ID NO: 809826 - RNA, 22 nt, Human
ucacauuugcaauugcauuguu

SEQ ID NO: 809827 - RNA, 22 nt, Human
ggggugagcugggccugugccu

SEQ ID NO: 809828 - RNA, 23 nt, Human
ugcaaagaaaucugggucauugu

SEQ ID NO: 809829 - RNA, 22 nt, Human
uugccuuguuauucucucagaa

SEQ ID NO: 809830 - RNA, 22 nt, Human
aaauaagcacuuaacuguauca

SEQ ID NO: 809831 - RNA, 22 nt, Human
ucagugucuugaccugggugug

SEQ ID NO: 809832 - RNA, 22 nt, Human
acucuguagaguauaccaaugu

SEQ ID NO: 809833 - RNA, 17 nt, Human
uuuagaauacaauguuu

SEQ ID NO: 809834 - RNA, 22 nt, Human
uccagccugguugcgggcaucc

SEQ ID NO: 809835 - RNA, 22 nt, Human
aggcccuggucaggucuggcug

SEQ ID NO: 809836 - RNA, 22 nt, Human
uagcauaggaaaguacugggaa

SEQ ID NO: 809837 - RNA, 22 nt, Human
aucuaaaaugugguuaguuggu

SEQ ID NO: 809838 - RNA, 22 nt, Human
aaaugcuguagaucagugaguu

SEQ ID NO: 809839 - RNA, 22 nt, Human
caaguuuacaauguguaugugu

SEQ ID NO: 809840 - RNA, 22 nt, Human
uuuucuuacugucugugauccu

SEQ ID NO: 809841 - RNA, 22 nt, Human
cugacagcuccuagugcucacu

SEQ ID NO: 809842 - RNA, 20 nt, Human
uccucccccaccuuugcagc

SEQ ID NO: 809843 - RNA, 22 nt, Human
ugccuucucccuuggacccuga

SEQ ID NO: 809844 - RNA, 22 nt, Human
agaaaacucuacaucuguaugu

SEQ ID NO: 809845 - RNA, 22 nt, Human
uuucaaagaccauuaacuauca

SEQ ID NO: 809846 - RNA, 22 nt, Human
gcugcugugaauuuuuuaaaug

SEQ ID NO: 809847 - RNA, 19 nt, Human
ucugcuggcagaauucccu

SEQ ID NO: 809848 - RNA, 22 nt, Human
aaggaagggaaauagugauguc

SEQ ID NO: 809849 - RNA, 22 nt, Human
caggagccccaggcugacaaua

SEQ ID NO: 809850 - RNA, 22 nt, Human
ucagggaggugucugccagaga

SEQ ID NO: 809851 - RNA, 22 nt, Human
augcacaagaggcuagaaaaga

SEQ ID NO: 809852 - RNA, 22 nt, Human
gccucaggacuggcauacucau

SEQ ID NO: 809853 - RNA, 22 nt, Human
gagcacagcuggagguagcauu

SEQ ID NO: 809854 - RNA, 22 nt, Human
cagcccugagagaaccaucuau

SEQ ID NO: 809855 - RNA, 22 nt, Human
aguagcagugacagcugaggua

SEQ ID NO: 809856 - RNA, 22 nt, Human
uaguuucuugauuagccacuuu

SEQ ID NO: 809857 - RNA, 22 nt, Human
aguauguugaguuuugcuuuag

SEQ ID NO: 809858 - RNA, 21 nt, Human
uuuuaacaaggauuucccuag

SEQ ID NO: 809859 - RNA, 22 nt, Human
aagacaagcaucaaaucaggca

SEQ ID NO: 809860 - RNA, 22 nt, Human
auaauguuuuuguauaagcaug

SEQ ID NO: 809861 - RNA, 18 nt, Human
aggccagcccugcuacug

SEQ ID NO: 809862 - RNA, 22 nt, Human
uugcaaauauuguuuaccuuuc

SEQ ID NO: 809863 - RNA, 22 nt, Human
uuuuagcacuaagugauaugcu

SEQ ID NO: 809864 - RNA, 22 nt, Human
agcaaauucagaagcagaaugg

SEQ ID NO: 809865 - RNA, 19 nt, Human
guggccagggcaggggcug

SEQ ID NO: 809866 - RNA, 22 nt, Human
uuuguuuugaacuagcucagaa

SEQ ID NO: 809867 - RNA, 22 nt, Human
uuugacaauaauugcauuuaua

SEQ ID NO: 809868 - RNA, 22 nt, Human
ucaggcagagcuguggagcucu

SEQ ID NO: 809869 - RNA, 22 nt, Human
aaaugcagaaugauuucaucua

SEQ ID NO: 809870 - RNA, 22 nt, Human
uggucaaggcuuggagauagua

SEQ ID NO: 809871 - RNA, 22 nt, Human
ggggccuuuucugaauguggaa

SEQ ID NO: 809872 - RNA, 22 nt, Human
auuucacuuaguguaaugucuu

SEQ ID NO: 809873 - RNA, 22 nt, Human
agccucuguagaaagcagugug

SEQ ID NO: 809874 - RNA, 22 nt, Human
aaauguuuugcucccauguggu

SEQ ID NO: 809875 - RNA, 22 nt, Human
uauaccuugagcagggcggccc

SEQ ID NO: 809876 - RNA, 22 nt, Human
agaggccaccagagguggugcc

SEQ ID NO: 809877 - RNA, 22 nt, Human
cucuauuuauggcaucuuuaug

SEQ ID NO: 809878 - RNA, 22 nt, Human
uaugagauacuacagauuguga

SEQ ID NO: 809879 - RNA, 22 nt, Human
accugccuaucagcugccugcu

SEQ ID NO: 809880 - RNA, 22 nt, Human
gucugcacgugccagggagggg

SEQ ID NO: 809881 - RNA, 22 nt, Human
uucagugacuuaccuggagcca

SEQ ID NO: 809882 - RNA, 22 nt, Human
aggcagcauuugaauccagguc

SEQ ID NO: 809883 - RNA, 22 nt, Human
gaaggcuugccgggaagcggca

SEQ ID NO: 809884 - RNA, 21 nt, Human
uccagggaacuucucaggaau

SEQ ID NO: 809885 - RNA, 22 nt, Human
aucaaagagugagauuuuuacu

SEQ ID NO: 809886 - RNA, 22 nt, Human
ucaggcucucagaccaacagca

SEQ ID NO: 809887 - RNA, 22 nt, Human
caagagcaucccugcauccagc

SEQ ID NO: 809888 - RNA, 22 nt, Human
uaaaguaauccuucauaaggag

SEQ ID NO: 809889 - RNA, 22 nt, Human
aagucaaagcuuucagaggaaa

SEQ ID NO: 809890 - RNA, 22 nt, Human
acauacuuaugcuaaaaauaua

SEQ ID NO: 809891 - RNA, 22 nt, Human
ucccagcagucagagcuaugug

SEQ ID NO: 809892 - RNA, 22 nt, Human
aaagucauuuagccuuaucucc

SEQ ID NO: 809893 - RNA, 23 nt, Human
ugaaacauuuaggguagaauuuc

SEQ ID NO: 809894 - RNA, 22 nt, Human
aagucagaauaauguuucuuuu

SEQ ID NO: 809895 - RNA, 21 nt, Human
uucauuuguuauagacaaagu

SEQ ID NO: 809896 - RNA, 22 nt, Human
guaucacuuuugagagugagaa

SEQ ID NO: 809897 - RNA, 23 nt, Human
uggcccugaaucuguccuggagg

SEQ ID NO: 809898 - RNA, 22 nt, Human
uauguuucaucaggcauggagu

SEQ ID NO: 809899 - RNA, 22 nt, Human
ccuuuggcccugagagaugauu

SEQ ID NO: 809900 - RNA, 22 nt, Human
caauauauaaugaguacuuucc

SEQ ID NO: 809901 - RNA, 21 nt, Human
gcaggguccuuuccauuccua

SEQ ID NO: 809902 - RNA, 22 nt, Human
gcugagcugaggcagggcuggg

SEQ ID NO: 809903 - RNA, 22 nt, Human
ugugauauuugaguauugucaa

SEQ ID NO: 809904 - RNA, 22 nt, Human
ugucaugggguuguuuuguaca

SEQ ID NO: 809905 - RNA, 22 nt, Human
ugcaggcuggcagugcugaaau

SEQ ID NO: 809906 - RNA, 22 nt, Human
uauguauaaucacagaguguca

SEQ ID NO: 809907 - RNA, 22 nt, Human
ugggguggaacccuucugcugg

SEQ ID NO: 809908 - RNA, 22 nt, Human
uacaguaagaugaaauagcaau

SEQ ID NO: 809909 - RNA, 22 nt, Human
uuucacagaggaggaagcugag

SEQ ID NO: 809910 - RNA, 22 nt, Human
uugucucuaagugugaucuuca

SEQ ID NO: 809911 - RNA, 22 nt, Human
ccugggcaggaugggcccggug

SEQ ID NO: 809912 - RNA, 22 nt, Human
gucuaugauauuuuguuauagc

SEQ ID NO: 809913 - RNA, 23 nt, Human
uguaaauuuuguagucacauuuu

SEQ ID NO: 809914 - RNA, 22 nt, Human
ucagaagguacugaagacaugg

SEQ ID NO: 809915 - RNA, 22 nt, Human
ucuggaguaacucuguuucugg

SEQ ID NO: 809916 - RNA, 22 nt, Human
aauagcauguucaugauaaaau

SEQ ID NO: 809917 - RNA, 22 nt, Human
caggcagaguuagagcaacugg

SEQ ID NO: 809918 - RNA, 22 nt, Human
gcugcagcuguaggacacaauu

SEQ ID NO: 809919 - RNA, 22 nt, Human
aauuauacaauugucaaguucu

SEQ ID NO: 809920 - RNA, 22 nt, Human
uauuucugaauccaaaagguca

SEQ ID NO: 809921 - RNA, 22 nt, Human
agguuugggaguagaaaucaga

SEQ ID NO: 809922 - RNA, 22 nt, Human
gcuggcuggaggugaggaagaa

SEQ ID NO: 809923 - RNA, 22 nt, Human
cagagacaggaucucgaagacu

SEQ ID NO: 809924 - RNA, 22 nt, Human
gaggagagaugguagauugggu

SEQ ID NO: 809925 - RNA, 22 nt, Human
uggggcacagcugagaaagcac

SEQ ID NO: 809926 - RNA, 17 nt, Human
gugcuggccuggggcuc

SEQ ID NO: 809927 - RNA, 22 nt, Human
aucugucaucagcaccacaggu

SEQ ID NO: 809928 - RNA, 20 nt, Human
ugcuggcacggguggacucc

SEQ ID NO: 809929 - RNA, 22 nt, Human
aauucacaaaaguuagauccau

SEQ ID NO: 809930 - RNA, 22 nt, Human
uuugcaaauaaauaagugcucg

SEQ ID NO: 809931 - RNA, 18 nt, Human
cucucugggugaggacaa

SEQ ID NO: 809932 - RNA, 22 nt, Human
gcauagcuuugaugcugccuua

SEQ ID NO: 809933 - RNA, 22 nt, Human
ucuucacaugaccuucaugucu

SEQ ID NO: 809934 - RNA, 22 nt, Human
cauuuguaucugggcugcugug

SEQ ID NO: 809935 - RNA, 22 nt, Human
uuuauucuauaggcauuaagca

SEQ ID NO: 809936 - RNA, 22 nt, Human
auaaggaaccugggcuuaagag

SEQ ID NO: 809937 - RNA, 21 nt, Human
ccagcuuucccaagucccuuu

SEQ ID NO: 809938 - RNA, 22 nt, Human
caaaguauauuucauagucuca

SEQ ID NO: 809939 - RNA, 22 nt, Human
ucaggcugaaaggacuccaguu

SEQ ID NO: 809940 - RNA, 22 nt, Human
augcagaugguggauggagaaa

SEQ ID NO: 809941 - RNA, 21 nt, Human
agaaggcaaaagcagacaucu

SEQ ID NO: 809942 - RNA, 22 nt, Human
uuggucuguguuacaucauuua

SEQ ID NO: 809943 - RNA, 22 nt, Human
cgguccuggcacuugcggcucc

SEQ ID NO: 809944 - RNA, 22 nt, Human
gaaugagacuaugcgaguguga

SEQ ID NO: 809945 - RNA, 22 nt, Human
cccugcugacaacuugauuuug

SEQ ID NO: 809946 - RNA, 22 nt, Human
ucaggcugggcuccucucccca

SEQ ID NO: 809947 - RNA, 22 nt, Human
ugcugccuccuuccugccagga

SEQ ID NO: 809948 - RNA, 21 nt, Human
guuuucaugauagagucugua

SEQ ID NO: 809949 - RNA, 19 nt, Human
ucacaggcaucuccccaga

SEQ ID NO: 809950 - RNA, 22 nt, Human
uuccauacgacugaggucucgg

SEQ ID NO: 809951 - RNA, 23 nt, Human
gaagucagcccuacagagagcag

SEQ ID NO: 809952 - RNA, 22 nt, Human
ggcccaugcauccugugcagcc

SEQ ID NO: 809953 - RNA, 22 nt, Human
uuuuauaagcaagaaagggaaa

SEQ ID NO: 809954 - RNA, 22 nt, Human
uuguuguuauaggugguacaag

SEQ ID NO: 809955 - RNA, 22 nt, Human
auguuucaggcgaacuaacaug

SEQ ID NO: 809956 - RNA, 22 nt, Human
cuccaggcuggggugcagguug

SEQ ID NO: 809957 - RNA, 22 nt, Human
gcaaagcaaucaggaguagcau

SEQ ID NO: 809958 - RNA, 22 nt, Human
ucuugaaagcauuuucuucauc

SEQ ID NO: 809959 - RNA, 22 nt, Human
aacuauacauauuuacauagac

SEQ ID NO: 809960 - RNA, 22 nt, Human
cacaggagguuaggaagugguc

SEQ ID NO: 809961 - RNA, 22 nt, Human
gcagguggugggggagccguuc

SEQ ID NO: 809962 - RNA, 22 nt, Human
caaggaaacaugaaaugcauug

SEQ ID NO: 809963 - RNA, 22 nt, Human
gggagccagagucaccuagaga

SEQ ID NO: 809964 - RNA, 22 nt, Human
ucaagaaaugugcuuggauaua

SEQ ID NO: 809965 - RNA, 22 nt, Human
uaugccagcacuuagaugagau

SEQ ID NO: 809966 - RNA, 22 nt, Human
ucauauaaguuuaaaacuaucu

SEQ ID NO: 809967 - RNA, 22 nt, Human
uccuggcccgaucccugugaag

SEQ ID NO: 809968 - RNA, 22 nt, Human
cacacgugugagagcuguggca

SEQ ID NO: 809969 - RNA, 22 nt, Human
uuucacaucccgcgcgcccuua

SEQ ID NO: 809970 - RNA, 22 nt, Human
ucacaagacaagacaaauugca

SEQ ID NO: 809971 - RNA, 22 nt, Human
uuuccuuccuaaggugaagcaa

SEQ ID NO: 809972 - RNA, 22 nt, Human
ugugggaggaauuagaauggga

SEQ ID NO: 809973 - RNA, 21 nt, Human
guuuaugaaucuuguccugcu

SEQ ID NO: 809974 - RNA, 22 nt, Human
aauaguaaaagauacagcuaau

SEQ ID NO: 809975 - RNA, 22 nt, Human
ucacuuuugaucccuaugcagu

SEQ ID NO: 809976 - RNA, 22 nt, Human
agcucugggucacggcugccga

SEQ ID NO: 809977 - RNA, 22 nt, Human
cuuuauggagugacacaauggg

SEQ ID NO: 809978 - RNA, 22 nt, Human
guuuuauaguucgggaccuguu

SEQ ID NO: 809979 - RNA, 22 nt, Human
cuucuucaauagcaagcgcaua

SEQ ID NO: 809980 - RNA, 22 nt, Human
gagaagcaaucgugacaucucc

SEQ ID NO: 809981 - RNA, 22 nt, Human
aaggaaaugaagcugauguugg

SEQ ID NO: 809982 - RNA, 22 nt, Human
gcccucagcuccuggacacaug

SEQ ID NO: 809983 - RNA, 22 nt, Human
gagcugccuguugcauagcaac

SEQ ID NO: 809984 - RNA, 22 nt, Human
agggauguuaguugugagcuca

SEQ ID NO: 809985 - RNA, 22 nt, Human
gccagccuucuguggccugcaa

SEQ ID NO: 809986 - RNA, 22 nt, Human
aggccugagguuccugugcuca

SEQ ID NO: 809987 - RNA, 22 nt, Human
agugcauacccuucuaaaaagu

SEQ ID NO: 809988 - RNA, 19 nt, Human
gcagugucaugguaggagc

SEQ ID NO: 809989 - RNA, 22 nt, Human
aggcccugcccagagcuccucg

SEQ ID NO: 809990 - RNA, 22 nt, Human
gagcuggcaggaggcuccccga

SEQ ID NO: 809991 - RNA, 22 nt, Human
ugcacacacaggagucuccucc

SEQ ID NO: 809992 - RNA, 22 nt, Human
uucugccacgagcaguuucuuc

SEQ ID NO: 809993 - RNA, 22 nt, Human
guuauucaauggcuuauaagga

SEQ ID NO: 809994 - RNA, 22 nt, Human
cccugagcccauaguugacauu

SEQ ID NO: 809995 - RNA, 22 nt, Human
auaaggaaaauuggagaaauug

SEQ ID NO: 809996 - RNA, 22 nt, Human
uaagagaauguuguggcuaggu

SEQ ID NO: 809997 - RNA, 22 nt, Human
gcacugggggcagcagugaggg

SEQ ID NO: 809998 - RNA, 21 nt, Human
aaagaaaucucccauugguag

SEQ ID NO: 809999 - RNA, 22 nt, Human
uauuuagcuggagucagugcuu

SEQ ID NO: 810000 - RNA, 22 nt, Human
guuuauauucaacggaguaucu

SEQ ID NO: 810001 - RNA, 22 nt, Human
uagucacaguacaggauaaaga

SEQ ID NO: 810002 - RNA, 22 nt, Human
uucuggaagccccagagucaga

SEQ ID NO: 810003 - RNA, 22 nt, Human
gcacacaguagggauucaauga

SEQ ID NO: 810004 - RNA, 22 nt, Human
ggcugggagccccacagaguca

SEQ ID NO: 810005 - RNA, 22 nt, Human
acuucagugugguauaaaacgu

SEQ ID NO: 810006 - RNA, 22 nt, Human
aggagcuggccuagaaaggaga

SEQ ID NO: 810007 - RNA, 22 nt, Human
caagauguggugggcugaguuu

SEQ ID NO: 810008 - RNA, 22 nt, Human
uccaggaguuugagacugcagu

SEQ ID NO: 810009 - RNA, 22 nt, Human
uuccuagaaugguuagaaaaua

SEQ ID NO: 810010 - RNA, 22 nt, Human
ucacauuucuuuauguagucuu

SEQ ID NO: 810011 - RNA, 22 nt, Human
aauaauuauuugagagcagacc

SEQ ID NO: 810012 - RNA, 22 nt, Human
caaguuuaaggcacugauaagu

SEQ ID NO: 810013 - RNA, 22 nt, Human
gaauguaagugggcagaagaca

SEQ ID NO: 810014 - RNA, 22 nt, Human
gagaugaauguaaacaaaggca

SEQ ID NO: 810015 - RNA, 22 nt, Human
uuggccagagguuucucucaug

SEQ ID NO: 810016 - RNA, 19 nt, Human
ccuuuuuuaacuucagcaa

SEQ ID NO: 810017 - RNA, 22 nt, Human
auuugcauuuagaaagaucacu

SEQ ID NO: 810018 - RNA, 22 nt, Human
ugggcagaaugugggauccaga

SEQ ID NO: 810019 - RNA, 22 nt, Human
ccauaaucuggcuuugagagag

SEQ ID NO: 810020 - RNA, 22 nt, Human
ugcuugugagaguuuuuucaga

SEQ ID NO: 810021 - RNA, 22 nt, Human
aagaacaugauggccaugugca

SEQ ID NO: 810022 - RNA, 22 nt, Human
uaggcagaguuuaaugguuaag

SEQ ID NO: 810023 - RNA, 22 nt, Human
ugcagcuguaacagaggccuca

SEQ ID NO: 810024 - RNA, 22 nt, Human
cccagcagccuugucccuucuc

SEQ ID NO: 810025 - RNA, 22 nt, Human
gcugcuggggucacaugguaag

SEQ ID NO: 810026 - RNA, 22 nt, Human
ggcagcauauauucagugggca

SEQ ID NO: 810027 - RNA, 22 nt, Human
aauaccuuuccugccauucacu

SEQ ID NO: 810028 - RNA, 22 nt, Human
ugccacaggcaaucccugcacg

SEQ ID NO: 810029 - RNA, 22 nt, Human
ucuuucccgccagagcaugagu

SEQ ID NO: 810030 - RNA, 19 nt, Human
gacaauuagagaucacuca

SEQ ID NO: 810031 - RNA, 22 nt, Human
acuugccuaaggucaugcaacu

SEQ ID NO: 810032 - RNA, 22 nt, Human
cuggcagcagcuucuggaucga

SEQ ID NO: 810033 - RNA, 22 nt, Human
ccuggcagcccagagcgccgcu

SEQ ID NO: 810034 - RNA, 22 nt, Human
aggugccaagaugucacagaca

SEQ ID NO: 810035 - RNA, 22 nt, Human
gucaggaaaaauugauaauuuu

SEQ ID NO: 810036 - RNA, 22 nt, Human
ucaagagaaggggaaauagacu

SEQ ID NO: 810037 - RNA, 22 nt, Human
cucugagguccuacagugaccc

SEQ ID NO: 810038 - RNA, 22 nt, Human
ucacauuugcuaucccacuccu

SEQ ID NO: 810039 - RNA, 22 nt, Human
caaguccaggugggcaaauaaa

SEQ ID NO: 810040 - RNA, 22 nt, Human
uauuuugacuauuaaaccaaca

SEQ ID NO: 810041 - RNA, 22 nt, Human
cacaaggcuuucaucuggcaua

SEQ ID NO: 810042 - RNA, 22 nt, Human
acaugccagccucagcagcagu

SEQ ID NO: 810043 - RNA, 22 nt, Human
uggcagcaguggagguagaaag

SEQ ID NO: 810044 - RNA, 22 nt, Human
auuucccagggcccucauaguu

SEQ ID NO: 810045 - RNA, 22 nt, Human
ccuuggcuugcacacggccacc

SEQ ID NO: 810046 - RNA, 22 nt, Human
augcuucagugcuaccuucaaa

SEQ ID NO: 810047 - RNA, 22 nt, Human
caaauacuuuauauacuucaaa

SEQ ID NO: 810048 - RNA, 22 nt, Human
agugggcccuugucacacugau

SEQ ID NO: 810049 - RNA, 22 nt, Human
uagugucaggagggaaaugcaa

SEQ ID NO: 810050 - RNA, 22 nt, Human
acauuccuuucuugagcacagu

SEQ ID NO: 810051 - RNA, 22 nt, Human
gaucaggagauggccucagacc

SEQ ID NO: 810052 - RNA, 22 nt, Human
uccccuuggcuuggucaagagg

SEQ ID NO: 810053 - RNA, 22 nt, Human
ugcuggagcaucugagagcauc

SEQ ID NO: 810054 - RNA, 22 nt, Human
aacauacuuauacuaaauaaug

SEQ ID NO: 810055 - RNA, 22 nt, Human
auccagagacccaaggacagaa

SEQ ID NO: 810056 - RNA, 18 nt, Human
uuugaggaaauguccuga

SEQ ID NO: 810057 - RNA, 22 nt, Human
agagaggcugcuggacuauaug

SEQ ID NO: 810058 - RNA, 22 nt, Human
cagcuucucgggagcgcaugug

SEQ ID NO: 810059 - RNA, 22 nt, Human
ucuguugguucuguuucucuga

SEQ ID NO: 810060 - RNA, 22 nt, Human
cuggcucuaagugucagcuccc

SEQ ID NO: 810061 - RNA, 22 nt, Human
uguuuacauaguagcugcccug

SEQ ID NO: 810062 - RNA, 22 nt, Human
aaaacauaaacugacagcccau

SEQ ID NO: 810063 - RNA, 22 nt, Human
cuggagcuccagggucuccucu

SEQ ID NO: 810064 - RNA, 22 nt, Human
cagaggcauauaauugcugggg

SEQ ID NO: 810065 - RNA, 19 nt, Human
uaccaaauugcauuauggc

SEQ ID NO: 810066 - RNA, 22 nt, Human
guuaauaaagguauagaaucag

SEQ ID NO: 810067 - RNA, 22 nt, Human
acaacuuuguagcaauuccacg

SEQ ID NO: 810068 - RNA, 22 nt, Human
agaggcacaacagucccauugu

SEQ ID NO: 810069 - RNA, 22 nt, Human
cuugcuuaccuaguuagcucca

SEQ ID NO: 810070 - RNA, 22 nt, Human
agucuucagcauagcauauggc

SEQ ID NO: 810071 - RNA, 22 nt, Human
cugaagcagauguggcugagau

SEQ ID NO: 810072 - RNA, 22 nt, Human
cuggagucacucauguagcugc

SEQ ID NO: 810073 - RNA, 22 nt, Human
gaggaaaauauucagggagguu

SEQ ID NO: 810074 - RNA, 19 nt, Human
uccugggcugcgucuugcc

SEQ ID NO: 810075 - RNA, 22 nt, Human
aguggagaccccacuucuacau

SEQ ID NO: 810076 - RNA, 22 nt, Human
ggagaaagcuaugugggggagu

SEQ ID NO: 810077 - RNA, 22 nt, Human
gaaugcagugacggaggcuuac

SEQ ID NO: 810078 - RNA, 22 nt, Human
gaguccaggauuugagcucugu

SEQ ID NO: 810079 - RNA, 22 nt, Human
agggaaggaggccauguguccc

SEQ ID NO: 810080 - RNA, 19 nt, Human
uuacaucugcaacacuggu

SEQ ID NO: 810081 - RNA, 22 nt, Human
uuuguguaccuuguacauuugu

SEQ ID NO: 810082 - RNA, 22 nt, Human
uguacagcugccuuuuuuacuu

SEQ ID NO: 810083 - RNA, 22 nt, Human
aggugccuuccgcggagcucgc

SEQ ID NO: 810084 - RNA, 22 nt, Human
ucacagccuggucacucugccc

SEQ ID NO: 810085 - RNA, 22 nt, Human
ggcaggcaguguggugugaaac

SEQ ID NO: 810086 - RNA, 22 nt, Human
acaagagucugcauuucuaaca

SEQ ID NO: 810087 - RNA, 22 nt, Human
gggcugcacguauucugcucac

SEQ ID NO: 810088 - RNA, 22 nt, Human
gcugggcaaggcugaagcuacc

SEQ ID NO: 810089 - RNA, 22 nt, Human
aaacuguauagggaaaaguaga

SEQ ID NO: 810090 - RNA, 22 nt, Human
uggggucgaggguucucuggca

SEQ ID NO: 810091 - RNA, 22 nt, Human
uucauauuugaaacagaaguua

SEQ ID NO: 810092 - RNA, 22 nt, Human
ugaagccacacuagcuuguccu

SEQ ID NO: 810093 - RNA, 23 nt, Human
gcagauggccccagagugcugcc

SEQ ID NO: 810094 - RNA, 22 nt, Human
uuacauucagaaagauuugagu

SEQ ID NO: 810095 - RNA, 22 nt, Human
aacagaaaagguagguggcuuu

SEQ ID NO: 810096 - RNA, 22 nt, Human
aaagccagcucugagcugcacc

SEQ ID NO: 810097 - RNA, 22 nt, Human
cucuggagguggagguugcagu

SEQ ID NO: 810098 - RNA, 22 nt, Human
uuacacaauuacucacuccugg

SEQ ID NO: 810099 - RNA, 22 nt, Human
uagcuucugggaguguuuacua

SEQ ID NO: 810100 - RNA, 22 nt, Human
agcugggaugauaaccucaguc

SEQ ID NO: 810101 - RNA, 22 nt, Human
ucaauuuauguggcuauucauu

SEQ ID NO: 810102 - RNA, 22 nt, Human
cucagccaugggguggaucagc

SEQ ID NO: 810103 - RNA, 22 nt, Human
uauacauguuuuacauaaguga

SEQ ID NO: 810104 - RNA, 22 nt, Human
uuggaacacaauguuucuuuca

SEQ ID NO: 810105 - RNA, 22 nt, Human
aggcagaggagaaugaucuucc

SEQ ID NO: 810106 - RNA, 22 nt, Human
uguccuagagacaucagauguu

SEQ ID NO: 810107 - RNA, 22 nt, Human
aacuuguuucuuccauucaaca

SEQ ID NO: 810108 - RNA, 22 nt, Human
ugaugaaaauguucagcaauua

SEQ ID NO: 810109 - RNA, 23 nt, Human
agcccagcagagaaccuaggucc

SEQ ID NO: 810110 - RNA, 23 nt, Human
ucacuugaagcuagaaucugccc

SEQ ID NO: 810111 - RNA, 22 nt, Human
cugcagcuuuggaaaccuguuu

SEQ ID NO: 810112 - RNA, 22 nt, Human
aauacuauguagccaaaauaau

SEQ ID NO: 810113 - RNA, 22 nt, Human
uuugcaaaugcucugcagagcu

SEQ ID NO: 810114 - RNA, 22 nt, Human
acauucaacauggcuggucuag

SEQ ID NO: 810115 - RNA, 22 nt, Human
aaacacaucauucaugucguca

SEQ ID NO: 810116 - RNA, 22 nt, Human
ccacagugguucucaaccaggg

SEQ ID NO: 810117 - RNA, 22 nt, Human
gggcagcugccagaggccaugg

SEQ ID NO: 810118 - RNA, 21 nt, Human
aaaguucaugcuuuaauauuc

SEQ ID NO: 810119 - RNA, 22 nt, Human
cugcuccaggaacagagcugcu

SEQ ID NO: 810120 - RNA, 22 nt, Human
cgcaggcuggcgcggaguggca

SEQ ID NO: 810121 - RNA, 22 nt, Human
cagaaacuauguaagaaaguga

SEQ ID NO: 810122 - RNA, 22 nt, Human
ccugggucaccaggcccaggca

SEQ ID NO: 810123 - RNA, 22 nt, Human
uguagaaaauuggagcauucau

SEQ ID NO: 810124 - RNA, 22 nt, Human
agggccaguaaauguuuccuca

SEQ ID NO: 810125 - RNA, 22 nt, Human
uugcuuuguggugguucuucca

SEQ ID NO: 810126 - RNA, 19 nt, Human
cugucaggggcuggauguu

SEQ ID NO: 810127 - RNA, 22 nt, Human
cagcuuugagaguugcauuuua

SEQ ID NO: 810128 - RNA, 20 nt, Human
cuggcccaucuaccgcucug

SEQ ID NO: 810129 - RNA, 22 nt, Human
ugcuucuggggacaggcugccu

SEQ ID NO: 810130 - RNA, 22 nt, Human
cagugcagaggugcaagcaugu

SEQ ID NO: 810131 - RNA, 22 nt, Human
acagugauugguuuggggguga

SEQ ID NO: 810132 - RNA, 21 nt, Human
cugccaggauagcaugcaggc

SEQ ID NO: 810133 - RNA, 22 nt, Human
gcugccuggagaggcagggaug

SEQ ID NO: 810134 - RNA, 22 nt, Human
ccuuggcugaggagggagcuga

SEQ ID NO: 810135 - RNA, 22 nt, Human
aaggcagcccuggcucagccug

SEQ ID NO: 810136 - RNA, 22 nt, Human
ggaggcucagugaggaaaugga

SEQ ID NO: 810137 - RNA, 17 nt, Human
agcugccagggagugug

SEQ ID NO: 810138 - RNA, 22 nt, Human
agucuuaauagagaaaaacugu

SEQ ID NO: 810139 - RNA, 22 nt, Human
cugccaggcgauggauuggcug

SEQ ID NO: 810140 - RNA, 21 nt, Human
ugggccucaggcagcugugac

SEQ ID NO: 810141 - RNA, 22 nt, Human
gaugaaauagaauuaauuuagg

SEQ ID NO: 810142 - RNA, 22 nt, Human
gcuuaaaguuguaaauuagaga

SEQ ID NO: 810143 - RNA, 22 nt, Human
cugggauccacgggcucccaag

SEQ ID NO: 810144 - RNA, 22 nt, Human
augaaauaaauacccacacaua

SEQ ID NO: 810145 - RNA, 22 nt, Human
uggcacagagggacccagcagc

SEQ ID NO: 810146 - RNA, 22 nt, Human
ggccuuggauccaagcugcggc

SEQ ID NO: 810147 - RNA, 22 nt, Human
caugagcugcugggagccuguc

SEQ ID NO: 810148 - RNA, 21 nt, Human
cuggaggguagaguugggcug

SEQ ID NO: 810149 - RNA, 22 nt, Human
aggcugaguuucucauucucgc

SEQ ID NO: 810150 - RNA, 22 nt, Human
aaagaacuaaugugcaagguuu

SEQ ID NO: 810151 - RNA, 22 nt, Human
gguggcagaggugcaucagccc

SEQ ID NO: 810152 - RNA, 22 nt, Human
caguggcaguuagaaaauauuc

SEQ ID NO: 810153 - RNA, 22 nt, Human
cucugcaacuucuagcaguguc

SEQ ID NO: 810154 - RNA, 22 nt, Human
aggcuccaccagucaggugcau

SEQ ID NO: 810155 - RNA, 20 nt, Human
uacaaagaaugagguucagg

SEQ ID NO: 810156 - RNA, 22 nt, Human
uucugaaaugagauauaaggua

SEQ ID NO: 810157 - RNA, 22 nt, Human
cagguguuggaagggcaguggg

SEQ ID NO: 810158 - RNA, 22 nt, Human
cugaagcugaaaacuuccagca

SEQ ID NO: 810159 - RNA, 18 nt, Human
ggccagagggaggguccc

SEQ ID NO: 810160 - RNA, 22 nt, Human
agcaggggcuccuccacagcca

SEQ ID NO: 810161 - RNA, 22 nt, Human
uucuauugaaugauaaucuaua

SEQ ID NO: 810162 - RNA, 22 nt, Human
guacaaaaguuauugcgguuuu

SEQ ID NO: 810163 - RNA, 22 nt, Human
ucauauaagagcuuuagaguca

SEQ ID NO: 810164 - RNA, 22 nt, Human
uuuauauguuuguacaauuaag

SEQ ID NO: 810165 - RNA, 22 nt, Human
cuuugacuccaucucucuuugu

SEQ ID NO: 810166 - RNA, 22 nt, Human
uuucaggccauagcacagggaa

SEQ ID NO: 810167 - RNA, 22 nt, Human
caauaauugcuuuccagaguua

SEQ ID NO: 810168 - RNA, 22 nt, Human
ggcaggaaaugggauaagggcu

SEQ ID NO: 810169 - RNA, 22 nt, Human
gcuggcugugggcuccacgcuc

SEQ ID NO: 810170 - RNA, 22 nt, Human
aggacagguguagugggcucug

SEQ ID NO: 810171 - RNA, 22 nt, Human
aaaucacugauuaaaguuagaa

SEQ ID NO: 810172 - RNA, 22 nt, Human
ucaggaaggcgccccaucagga

SEQ ID NO: 810173 - RNA, 22 nt, Human
ccugcccuaugaccagcuucac

SEQ ID NO: 810174 - RNA, 22 nt, Human
acacaaaaucaaaguccuaggc

SEQ ID NO: 810175 - RNA, 22 nt, Human
uggcacagcccauucagagaag

SEQ ID NO: 810176 - RNA, 22 nt, Human
auauuacauaaacaugagugaa

SEQ ID NO: 810177 - RNA, 22 nt, Human
gacuauuuaguuucagauuagu

SEQ ID NO: 810178 - RNA, 22 nt, Human
aggaagaguguuaccuaugggu

SEQ ID NO: 810179 - RNA, 22 nt, Human
cacaugcucauuggcacuguuc

SEQ ID NO: 810180 - RNA, 22 nt, Human
cagaauuucagugauguuuucu

SEQ ID NO: 810181 - RNA, 22 nt, Human
agacaauguuuggucuacacuu

SEQ ID NO: 810182 - RNA, 22 nt, Human
ggcuggagugggcuccagaguu

SEQ ID NO: 810183 - RNA, 19 nt, Human
gcuucccaccagccagccc

SEQ ID NO: 810184 - RNA, 22 nt, Human
gaggcugcuuugaugacaggag

SEQ ID NO: 810185 - RNA, 22 nt, Human
gaauuuuaaguguucgccucuu

SEQ ID NO: 810186 - RNA, 22 nt, Human
agagcucaagacgcucacagua

SEQ ID NO: 810187 - RNA, 22 nt, Human
gcugagguaggagguugcagug

SEQ ID NO: 810188 - RNA, 22 nt, Human
aggugggaacccagcagggccc

SEQ ID NO: 810189 - RNA, 22 nt, Human
acuuaaaaccagacagcgucau

SEQ ID NO: 810190 - RNA, 22 nt, Human
ggcugcaggcuucccuccagca

SEQ ID NO: 810191 - RNA, 18 nt, Human
uggcucagauggcuuuaa

SEQ ID NO: 810192 - RNA, 22 nt, Human
ugggaggcagguaggugaugau

SEQ ID NO: 810193 - RNA, 22 nt, Human
ggccagccuggggcucccagac

SEQ ID NO: 810194 - RNA, 22 nt, Human
agcagcuuccugcucuucgccu

SEQ ID NO: 810195 - RNA, 22 nt, Human
ucaggaugguguggaggaaaua

SEQ ID NO: 810196 - RNA, 19 nt, Human
aagaacuaugugauuacag

SEQ ID NO: 810197 - RNA, 22 nt, Human
gacuuauucacgcagcuauacu

SEQ ID NO: 810198 - RNA, 22 nt, Human
ggcugggcuccgggagcaugcg

SEQ ID NO: 810199 - RNA, 22 nt, Human
cagccaggagccucugcaacua

SEQ ID NO: 810200 - RNA, 21 nt, Human
ugcauuccuccauccaacagg

SEQ ID NO: 810201 - RNA, 22 nt, Human
ugagaaccaagaccaagggccu

SEQ ID NO: 810202 - RNA, 22 nt, Human
uucuuacagauuuggugaauga

SEQ ID NO: 810203 - RNA, 22 nt, Human
cccccaccugaggacagucuua

SEQ ID NO: 810204 - RNA, 22 nt, Human
gagcagugggaaggaacagggu

SEQ ID NO: 810205 - RNA, 22 nt, Human
cagacugggcugguggaaagcu

SEQ ID NO: 810206 - RNA, 22 nt, Human
gaaggcuuuagagagauauaaa

SEQ ID NO: 810207 - RNA, 22 nt, Human
aacauaucuacggauacgauua

SEQ ID NO: 810208 - RNA, 22 nt, Human
ccuggccugugaaucugagagc

SEQ ID NO: 810209 - RNA, 22 nt, Human
gcuggcagggugguugagagag

SEQ ID NO: 810210 - RNA, 22 nt, Human
cccaggaggguggccucugccc

SEQ ID NO: 810211 - RNA, 22 nt, Human
aaagucaaugauuucuccugga

SEQ ID NO: 810212 - RNA, 22 nt, Human
cugaguccagggacagaggcgu

SEQ ID NO: 810213 - RNA, 22 nt, Human
ugugcccaucccucuggagugu

SEQ ID NO: 810214 - RNA, 22 nt, Human
uaguuuaggucguacaagcaaa

SEQ ID NO: 810215 - RNA, 22 nt, Human
gggcuuggcucauaaguggaug

SEQ ID NO: 810216 - RNA, 22 nt, Human
ccacaggaggauguucagacaa

SEQ ID NO: 810217 - RNA, 22 nt, Human
ucuaccaugugcugugcauugg

SEQ ID NO: 810218 - RNA, 22 nt, Human
aggcaguggagaagguuuguga

SEQ ID NO: 810219 - RNA, 22 nt, Human
gggcugccuuucuucugggagc

SEQ ID NO: 810220 - RNA, 22 nt, Human
uucauugcauuccagccugggu

SEQ ID NO: 810221 - RNA, 22 nt, Human
caggguggaacaggcaauacuu

SEQ ID NO: 810222 - RNA, 22 nt, Human
cuuguauucugccuaaccuuca

SEQ ID NO: 810223 - RNA, 20 nt, Human
aacagggcagaagcggagac

SEQ ID NO: 810224 - RNA, 22 nt, Human
gcuggacuuagagguggaaaag

SEQ ID NO: 810225 - RNA, 22 nt, Human
gcugccugaagugucuacacug

SEQ ID NO: 810226 - RNA, 22 nt, Human
accugucaaguccagcgcaaca

SEQ ID NO: 810227 - RNA, 20 nt, Human
guuaggagguuggacaugga

SEQ ID NO: 810228 - RNA, 22 nt, Human
gcagcagcaggcgcucggccgu

SEQ ID NO: 810229 - RNA, 22 nt, Human
gcugggagcaaagccaugcaua

SEQ ID NO: 810230 - RNA, 22 nt, Human
agggcagcuaaggugcugacug

SEQ ID NO: 810231 - RNA, 22 nt, Human
aguccuagacuuuucugccacu

SEQ ID NO: 810232 - RNA, 22 nt, Human
agagauauuauuuaccaaguua

SEQ ID NO: 810233 - RNA, 21 nt, Human
agaaaaacacgauauaagccc

SEQ ID NO: 810234 - RNA, 22 nt, Human
uuguauucuuccuuagcaguac

SEQ ID NO: 810235 - RNA, 22 nt, Human
gauuauuuugugcaauaaucgg

SEQ ID NO: 810236 - RNA, 22 nt, Human
uauaaaacagaaagcacuaccu

SEQ ID NO: 810237 - RNA, 22 nt, Human
uaacacauauuucaagaguagu

SEQ ID NO: 810238 - RNA, 22 nt, Human
aggaagcuuggggcagggcuac

SEQ ID NO: 810239 - RNA, 22 nt, Human
uacaguaacauguuguacaagc

SEQ ID NO: 810240 - RNA, 22 nt, Human
aaguuacagucagagguuaaca

SEQ ID NO: 810241 - RNA, 22 nt, Human
uuccaauaaaauguuauuugca

SEQ ID NO: 810242 - RNA, 22 nt, Human
ccugcuggcggggacccaguga

SEQ ID NO: 810243 - RNA, 22 nt, Human
uucucaggccccugccuggacu

SEQ ID NO: 810244 - RNA, 22 nt, Human
ccuggcucccggaacagggucu

SEQ ID NO: 810245 - RNA, 22 nt, Human
uuuguaagugguagaucuaaga

SEQ ID NO: 810246 - RNA, 22 nt, Human
gcuaggcuucaaaaucucccug

SEQ ID NO: 810247 - RNA, 22 nt, Human
ccucugcaccauagccuucagc

SEQ ID NO: 810248 - RNA, 19 nt, Human
caaaguaccuggcacagug

SEQ ID NO: 810249 - RNA, 22 nt, Human
gggagccagcagggcauggagc

SEQ ID NO: 810250 - RNA, 22 nt, Human
uaaacuacccaugacaguuuca

SEQ ID NO: 810251 - RNA, 22 nt, Human
aggcugaggcgggaggaucacu

SEQ ID NO: 810252 - RNA, 22 nt, Human
aggcaggcaaccaccugggaag

SEQ ID NO: 810253 - RNA, 22 nt, Human
uuucagagaacugaguccuugc

SEQ ID NO: 810254 - RNA, 22 nt, Human
acacaauuucauaaacaccaug

SEQ ID NO: 810255 - RNA, 22 nt, Human
cuuggccugcccagccagaagg

SEQ ID NO: 810256 - RNA, 22 nt, Human
gacauacaagcugguaccuccu

SEQ ID NO: 810257 - RNA, 22 nt, Human
ugcuggcuacugauggcaggcc

SEQ ID NO: 810258 - RNA, 22 nt, Human
uacaauauguggccuuuuguga

SEQ ID NO: 810259 - RNA, 22 nt, Human
cuguuuaucccuuuggucagca

SEQ ID NO: 810260 - RNA, 22 nt, Human
ucuggagagucacagugccaga

SEQ ID NO: 810261 - RNA, 22 nt, Human
cccuggagguggagguugcagg

SEQ ID NO: 810262 - RNA, 22 nt, Human
augagguuugagccucuugacc

SEQ ID NO: 810263 - RNA, 22 nt, Human
caggagcccugguggguggaca

SEQ ID NO: 810264 - RNA, 22 nt, Human
ugcugggauauagcuucuaggg

SEQ ID NO: 810265 - RNA, 22 nt, Human
uuuuguauagucaaagacaaga

SEQ ID NO: 810266 - RNA, 22 nt, Human
auacauaauuacuuccgauguu

SEQ ID NO: 810267 - RNA, 22 nt, Human
cugagccagcuggcaugugcua

SEQ ID NO: 810268 - RNA, 22 nt, Human
gcuggaucccugugggaguggu

SEQ ID NO: 810269 - RNA, 22 nt, Human
aaggcccugucuccaaauacag

SEQ ID NO: 810270 - RNA, 22 nt, Human
guccagcccgggcuccgccagc

SEQ ID NO: 810271 - RNA, 19 nt, Human
aaagugauuuuuucuggca

SEQ ID NO: 810272 - RNA, 22 nt, Human
ggcuucccagucccugcucuca

SEQ ID NO: 810273 - RNA, 22 nt, Human
gcacggcaagacggggccuccu

SEQ ID NO: 810274 - RNA, 22 nt, Human
ucagaauuuuaaaccaaggaaa

SEQ ID NO: 810275 - RNA, 22 nt, Human
auauaguuuaagaaaguacagu

SEQ ID NO: 810276 - RNA, 22 nt, Human
ugcaggcucaucucaagaguag

SEQ ID NO: 810277 - RNA, 22 nt, Human
ucucccucucagauuuauucac

SEQ ID NO: 810278 - RNA, 22 nt, Human
agcccugaagcuggccaugucc

SEQ ID NO: 810279 - RNA, 23 nt, Human
gggagccaggaccucgcgcccca

SEQ ID NO: 810280 - RNA, 22 nt, Human
agcagagcugcaguggccugcu

SEQ ID NO: 810281 - RNA, 22 nt, Human
agacaaaccuuguuuuaugaug

SEQ ID NO: 810282 - RNA, 22 nt, Human
cugcagcugcgggaccggagcg

SEQ ID NO: 810283 - RNA, 22 nt, Human
agcccagggacagggcggaugu

SEQ ID NO: 810284 - RNA, 22 nt, Human
gaccugcccacucugaggacau

SEQ ID NO: 810285 - RNA, 22 nt, Human
aacauaucauaggaugucauug

SEQ ID NO: 810286 - RNA, 22 nt, Human
gccagagcaugcacugccugca

SEQ ID NO: 810287 - RNA, 22 nt, Human
uucaaaguaccguacuuaaugg

SEQ ID NO: 810288 - RNA, 22 nt, Human
cccucccuuugcagcagugcau

SEQ ID NO: 810289 - RNA, 22 nt, Human
uuguuacagcagcaauagaaaa

SEQ ID NO: 810290 - RNA, 22 nt, Human
ucuuaaugaaagugaaauauca

SEQ ID NO: 810291 - RNA, 22 nt, Human
aggcaguguggagggcuguugc

SEQ ID NO: 810292 - RNA, 22 nt, Human
uucugaaggucagcagcuuggu

SEQ ID NO: 810293 - RNA, 22 nt, Human
uaaugucuaugggccagauaau

SEQ ID NO: 810294 - RNA, 19 nt, Human
agaagcccagaucccagcc

SEQ ID NO: 810295 - RNA, 22 nt, Human
auuccugguggcagaaacauga

SEQ ID NO: 810296 - RNA, 22 nt, Human
cagcuggcagaaccugcaucca

SEQ ID NO: 810297 - RNA, 22 nt, Human
ccaggcagagggauccccaucc

SEQ ID NO: 810298 - RNA, 22 nt, Human
uaacauuuaaauuuuucacaua

SEQ ID NO: 810299 - RNA, 22 nt, Human
cagggcacagaucggggcgcac

SEQ ID NO: 810300 - RNA, 22 nt, Human
uucuggaucagcaucaugagau

SEQ ID NO: 810301 - RNA, 22 nt, Human
cuggauccaucgggucccgagu

SEQ ID NO: 810302 - RNA, 22 nt, Human
acauuucucuugaugucucuau

SEQ ID NO: 810303 - RNA, 22 nt, Human
gcagcuucagccagagggccag

SEQ ID NO: 810304 - RNA, 22 nt, Human
ucacaguaaauccagaagaaau

SEQ ID NO: 810305 - RNA, 22 nt, Human
gccagaggaacgcugcgcgccc

SEQ ID NO: 810306 - RNA, 22 nt, Human
auaaagcuucugagucuagauc

SEQ ID NO: 810307 - RNA, 22 nt, Human
uuuuucauugcagccucucucc

SEQ ID NO: 810308 - RNA, 23 nt, Human
cagcuucuuugggauucuuuaua

SEQ ID NO: 810309 - RNA, 16 nt, Human
uggcuucccagagaua

SEQ ID NO: 810310 - RNA, 22 nt, Human
uaauacaucauucaucuaagga

SEQ ID NO: 810311 - RNA, 22 nt, Human
cacagcagggcauggcuguugu

SEQ ID NO: 810312 - RNA, 22 nt, Human
ucuucccucuucugccaaauac

SEQ ID NO: 810313 - RNA, 22 nt, Human
uuauuauaaugagggauaaaaa

SEQ ID NO: 810314 - RNA, 22 nt, Human
acaacaucagcugagaccuuca

SEQ ID NO: 810315 - RNA, 22 nt, Human
gccaggucuggguagcagagga

SEQ ID NO: 810316 - RNA, 22 nt, Human
caggaaauucuuuuuaacagaa

SEQ ID NO: 810317 - RNA, 22 nt, Human
ggcaggcagaggcugagacagg

SEQ ID NO: 810318 - RNA, 22 nt, Human
cagcuggcgccuggggaccaga

SEQ ID NO: 810319 - RNA, 22 nt, Human
caguguuuugagaagggcacgu

SEQ ID NO: 810320 - RNA, 22 nt, Human
ucacaggcucuagggauuaaga

SEQ ID NO: 810321 - RNA, 22 nt, Human
cauagcuuagggguuaaacuca

SEQ ID NO: 810322 - RNA, 22 nt, Human
cugcaaauugguggugaggcaa

SEQ ID NO: 810323 - RNA, 22 nt, Human
ucagcagggccaugcucucucu

SEQ ID NO: 810324 - RNA, 22 nt, Human
cugccucuugacagaucguggc

SEQ ID NO: 810325 - RNA, 22 nt, Human
augccaaagggagcacuuuggg

SEQ ID NO: 810326 - RNA, 22 nt, Human
ugauuauauucuaacuucauaa

SEQ ID NO: 810327 - RNA, 22 nt, Human
acaagcacuucacuguccucug

SEQ ID NO: 810328 - RNA, 20 nt, Human
cuggggaggaggauguguuc

SEQ ID NO: 810329 - RNA, 22 nt, Human
aaucaggagagcugcgaacguu

SEQ ID NO: 810330 - RNA, 22 nt, Human
cccaggcagaauuaguguuuca

SEQ ID NO: 810331 - RNA, 22 nt, Human
cacagaggugauaguggucaag

SEQ ID NO: 810332 - RNA, 19 nt, Human
ugaggccaaggucacagau

SEQ ID NO: 810333 - RNA, 22 nt, Human
ggaugucgaggaugggguagca

SEQ ID NO: 810334 - RNA, 22 nt, Human
ccacuggcuuuuccuaggucuc

SEQ ID NO: 810335 - RNA, 22 nt, Human
ccugggccuugaccucgugggc

SEQ ID NO: 810336 - RNA, 20 nt, Human
cgcccagugcgguucugacc

SEQ ID NO: 810337 - RNA, 22 nt, Human
uuauugcuggcaccuucaauuc

SEQ ID NO: 810338 - RNA, 22 nt, Human
auuucacauuaauuugaugcuc

SEQ ID NO: 810339 - RNA, 22 nt, Human
gcgagaaacuaagugcccuuug

SEQ ID NO: 810340 - RNA, 22 nt, Human
aacauuuguacuaaagaaguuc

SEQ ID NO: 810341 - RNA, 22 nt, Human
agcccagcacugggggcccagc

SEQ ID NO: 810342 - RNA, 22 nt, Human
agccugagagccaagcugugca

SEQ ID NO: 810343 - RNA, 22 nt, Human
agguuugguuugacaagacuga

SEQ ID NO: 810344 - RNA, 22 nt, Human
uccacaggcaagucucuuggca

SEQ ID NO: 810345 - RNA, 22 nt, Human
cugggccagauccagccucaca

SEQ ID NO: 810346 - RNA, 22 nt, Human
gugcaaauguaauugccauuga

SEQ ID NO: 810347 - RNA, 22 nt, Human
cagcucauuccucaaucuagga

SEQ ID NO: 810348 - RNA, 18 nt, Human
agcccaggcaucgucugc

SEQ ID NO: 810349 - RNA, 22 nt, Human
uggcuuccuguuucccagaaag

SEQ ID NO: 810350 - RNA, 22 nt, Human
cugcacagggauauggggagcu

SEQ ID NO: 810351 - RNA, 22 nt, Human
caaggcagcguuccuuucugga

SEQ ID NO: 810352 - RNA, 22 nt, Human
guuuuauaugucucugcugaca

SEQ ID NO: 810353 - RNA, 22 nt, Human
aaaucucugaacuuaauaaugc

SEQ ID NO: 810354 - RNA, 18 nt, Human
ucucauuacaaucuuugu

SEQ ID NO: 810355 - RNA, 22 nt, Human
ucucuccuuaucauuguguuua

SEQ ID NO: 810356 - RNA, 22 nt, Human
cccuggaggcuggaggcaguag

SEQ ID NO: 810357 - RNA, 22 nt, Human
uggcaguggcaucaccccaaua

SEQ ID NO: 810358 - RNA, 21 nt, Human
uccugggggguaggugaguuu

SEQ ID NO: 810359 - RNA, 22 nt, Human
uaacacauuuuccucauacgga

SEQ ID NO: 810360 - RNA, 22 nt, Human
agcaggcaggaaggcagcacug

SEQ ID NO: 810361 - RNA, 22 nt, Human
uccccaggacuaaguugcaauc

SEQ ID NO: 810362 - RNA, 22 nt, Human
ccaggcguggcuucagcagccc

SEQ ID NO: 810363 - RNA, 20 nt, Human
aagaaacuugaaaguacaag

SEQ ID NO: 810364 - RNA, 22 nt, Human
uggggugaggcagccacauuua

SEQ ID NO: 810365 - RNA, 21 nt, Human
uaggacagccccccugcccuc

SEQ ID NO: 810366 - RNA, 22 nt, Human
acucagagccucgagggacugc

SEQ ID NO: 810367 - RNA, 22 nt, Human
uagagaaauaagcuuugccuug

SEQ ID NO: 810368 - RNA, 22 nt, Human
uuccagaguugggggagugguu

SEQ ID NO: 810369 - RNA, 22 nt, Human
acuguugaagugccagcuugau

SEQ ID NO: 810370 - RNA, 19 nt, Human
aggcuuggaacagccuuau

SEQ ID NO: 810371 - RNA, 22 nt, Human
uguauacaggcauaagagauac

SEQ ID NO: 810372 - RNA, 22 nt, Human
uucauauuaugauuugaaaugc

SEQ ID NO: 810373 - RNA, 22 nt, Human
cacugagagaugugucacagca

SEQ ID NO: 810374 - RNA, 22 nt, Human
ccaugcaagggucugguccugc

SEQ ID NO: 810375 - RNA, 22 nt, Human
uggggaaagacauucauacagu

SEQ ID NO: 810376 - RNA, 21 nt, Human
caggcucugcugggugcuggg

SEQ ID NO: 810377 - RNA, 22 nt, Human
cugccuggguucaaguccuguu

SEQ ID NO: 810378 - RNA, 22 nt, Human
agcuggcuuuugugaagguuuu

SEQ ID NO: 810379 - RNA, 22 nt, Human
ucuuaggaguagaauucucaca

SEQ ID NO: 810380 - RNA, 22 nt, Human
gcuggcagucccaucagcuggg

SEQ ID NO: 810381 - RNA, 18 nt, Human
acauuucuaugcuucugg

SEQ ID NO: 810382 - RNA, 22 nt, Human
ucaaaggaguuuaaguuacugg

SEQ ID NO: 810383 - RNA, 22 nt, Human
ugagcuuuuaauauacaggugu

SEQ ID NO: 810384 - RNA, 22 nt, Human
auccacagucagaacgggccua

SEQ ID NO: 810385 - RNA, 16 nt, Human
gugagggacauagcuu

SEQ ID NO: 810386 - RNA, 20 nt, Human
acacauauagcagcauaaac

SEQ ID NO: 810387 - RNA, 22 nt, Human
uccaagagaauacuggagagua

SEQ ID NO: 810388 - RNA, 18 nt, Human
guuugcuacauucacuug

SEQ ID NO: 810389 - RNA, 22 nt, Human
uccugggcuugcuccuccagcu

SEQ ID NO: 810390 - RNA, 22 nt, Human
ucuggcuguguaagguagcacc

SEQ ID NO: 810391 - RNA, 22 nt, Human
cagcuuuauuaaugauugucuu

SEQ ID NO: 810392 - RNA, 23 nt, Human
cagcacaguacauuuccugucuc

SEQ ID NO: 810393 - RNA, 22 nt, Human
ucucccaggcugcccuguggac

SEQ ID NO: 810394 - RNA, 22 nt, Human
ugucauuuauuuugcugucugu

SEQ ID NO: 810395 - RNA, 23 nt, Human
agcugcugggccugccguggccu

SEQ ID NO: 810396 - RNA, 22 nt, Human
ccagggcuccccagaaguaccc

SEQ ID NO: 810397 - RNA, 22 nt, Human
gcaccccugcgugccuucccuu

SEQ ID NO: 810398 - RNA, 22 nt, Human
caggaggaaaugugacccugcu

SEQ ID NO: 810399 - RNA, 22 nt, Human
uaggaaaugcugucuuauugua

SEQ ID NO: 810400 - RNA, 20 nt, Human
ugggccucuggugccucugg

SEQ ID NO: 810401 - RNA, 22 nt, Human
ugccacagacaggacagaacag

SEQ ID NO: 810402 - RNA, 22 nt, Human
acugugagagagguucuuggua

SEQ ID NO: 810403 - RNA, 21 nt, Human
ugaaacuaccuacaagcuacc

SEQ ID NO: 810404 - RNA, 22 nt, Human
ucuuuacaguccucugucaauc

SEQ ID NO: 810405 - RNA, 18 nt, Human
agaugaaagcaaaugaca

SEQ ID NO: 810406 - RNA, 22 nt, Human
uauuuucaccuucucuggauau

SEQ ID NO: 810407 - RNA, 22 nt, Human
cccucugcucaggugcauaggc

SEQ ID NO: 810408 - RNA, 22 nt, Human
agcuuuaugcuuccuacaagcu

SEQ ID NO: 810409 - RNA, 17 nt, Human
ucuggaugucauggaag

SEQ ID NO: 810410 - RNA, 22 nt, Human
ggcagggaaacagcugauccca

SEQ ID NO: 810411 - RNA, 22 nt, Human
ggcacuuuccagucuauagagc

SEQ ID NO: 810412 - RNA, 23 nt, Human
ugccagggcccugugugcaaugc

SEQ ID NO: 810413 - RNA, 22 nt, Human
gaggccaggacaugaaagcuga

SEQ ID NO: 810414 - RNA, 19 nt, Human
gauaaguuuccagguaacu

SEQ ID NO: 810415 - RNA, 22 nt, Human
gagaagggauauggcuucuuga

SEQ ID NO: 810416 - RNA, 21 nt, Human
agcugccugcucuggaccugg

SEQ ID NO: 810417 - RNA, 22 nt, Human
acacuguugcuggcacagacag

SEQ ID NO: 810418 - RNA, 22 nt, Human
ugggagagaauucuggugacug

SEQ ID NO: 810419 - RNA, 20 nt, Human
aauuagauguuuaaucaaua

SEQ ID NO: 810420 - RNA, 22 nt, Human
uuucuauugaucuaauaaacau

SEQ ID NO: 810421 - RNA, 22 nt, Human
uugaaugauuaaagucaucuga

SEQ ID NO: 810422 - RNA, 22 nt, Human
cugcagugcaagcccagaugga

SEQ ID NO: 810423 - RNA, 22 nt, Human
cuuguuuaaauaagauagcagu

SEQ ID NO: 810424 - RNA, 22 nt, Human
ugggagaagcagcagccaagug

SEQ ID NO: 810425 - RNA, 22 nt, Human
ugggucaccacuucagaggaga

SEQ ID NO: 810426 - RNA, 20 nt, Human
cagcagagacccauggggag

SEQ ID NO: 810427 - RNA, 22 nt, Human
acagucuuaauggauaggagcu

SEQ ID NO: 810428 - RNA, 22 nt, Human
agugcaggccccaggccaggcc

SEQ ID NO: 810429 - RNA, 22 nt, Human
ugaauaaauugagagcgaaugu

SEQ ID NO: 810430 - RNA, 19 nt, Human
agcaggcuaggcugccucu

SEQ ID NO: 810431 - RNA, 22 nt, Human
gcagcugccuauucagggcuug

SEQ ID NO: 810432 - RNA, 22 nt, Human
uucacauuugcccuuaugugug

SEQ ID NO: 810433 - RNA, 22 nt, Human
caggcccagugaucagggcucu

SEQ ID NO: 810434 - RNA, 22 nt, Human
ugagaagauuugcucuucugag

SEQ ID NO: 810435 - RNA, 21 nt, Human
ucauuuuuauugcuaccuugc

SEQ ID NO: 810436 - RNA, 22 nt, Human
gagagcacggucuugggcaugg

SEQ ID NO: 810437 - RNA, 22 nt, Human
auagcuuuuugucauagagucu

SEQ ID NO: 810438 - RNA, 22 nt, Human
uugacuuuauguguauguuuac

SEQ ID NO: 810439 - RNA, 22 nt, Human
gcagaugccacuaggugaagug

SEQ ID NO: 810440 - RNA, 22 nt, Human
aaaggcucagaaucggcagacc

SEQ ID NO: 810441 - RNA, 22 nt, Human
ucagaggccugaaagaauuugg

SEQ ID NO: 810442 - RNA, 22 nt, Human
uuacaaagcaggucagcugaaa

SEQ ID NO: 810443 - RNA, 22 nt, Human
cuggcagcauuaacagagagca

SEQ ID NO: 810444 - RNA, 22 nt, Human
aagauuuaccacuuuauucaag

SEQ ID NO: 810445 - RNA, 22 nt, Human
aaaauagcauauugcuuucuuu

SEQ ID NO: 810446 - RNA, 22 nt, Human
gucuuauuagguuaacccugcu

SEQ ID NO: 810447 - RNA, 22 nt, Human
auaucaaagcuaguggaaauuu

SEQ ID NO: 810448 - RNA, 22 nt, Human
cuccaggccagggaaguggaca

SEQ ID NO: 810449 - RNA, 22 nt, Human
ugcaggguguccggaggaucac

SEQ ID NO: 810450 - RNA, 22 nt, Human
cuuuuguucuacagcuggggaa

SEQ ID NO: 810451 - RNA, 22 nt, Human
agcccagcaguaagauuagaga

SEQ ID NO: 810452 - RNA, 22 nt, Human
gcagccagggcuaagcugggga

SEQ ID NO: 810453 - RNA, 22 nt, Human
caggggccuggcugucuaggaa

SEQ ID NO: 810454 - RNA, 22 nt, Human
guucuacaguuccuauuacuua

SEQ ID NO: 810455 - RNA, 22 nt, Human
uagaauaaguugaugauauaug

SEQ ID NO: 810456 - RNA, 22 nt, Human
gcagcuggauuucaagagggag

SEQ ID NO: 810457 - RNA, 22 nt, Human
gcuggcagagcucugggcuggg

SEQ ID NO: 810458 - RNA, 22 nt, Human
cuggaaugagcagggcuuaugg

SEQ ID NO: 810459 - RNA, 22 nt, Human
agcccagcuuucaccccucugg

SEQ ID NO: 810460 - RNA, 22 nt, Human
cuggcacauaguaggugcacag

SEQ ID NO: 810461 - RNA, 22 nt, Human
ucguucuugucaguuuauaaag

SEQ ID NO: 810462 - RNA, 22 nt, Human
ugcuggcuggagugccucugga

SEQ ID NO: 810463 - RNA, 22 nt, Human
uguguuucucugaggggucccu

SEQ ID NO: 810464 - RNA, 21 nt, Human
cacaggugggucagugaggcc

SEQ ID NO: 810465 - RNA, 22 nt, Human
ggcccucugccugugcuggcga

SEQ ID NO: 810466 - RNA, 22 nt, Human
caugaaauucagcaggugagua

SEQ ID NO: 810467 - RNA, 22 nt, Human
ucuaaagauguuuauugacaua

SEQ ID NO: 810468 - RNA, 22 nt, Human
guuuuucuuugugugaagacaa

SEQ ID NO: 810469 - RNA, 22 nt, Human
agaaggccaagaagaagccuau

SEQ ID NO: 810470 - RNA, 22 nt, Human
ugaggcugagauaucagggagg

SEQ ID NO: 810471 - RNA, 22 nt, Human
gggaagagauuuccacaucauu

SEQ ID NO: 810472 - RNA, 23 nt, Human
auuugacagagcauagcauuucu

SEQ ID NO: 810473 - RNA, 19 nt, Human
gucccugggcagaggcacc

SEQ ID NO: 810474 - RNA, 22 nt, Human
aucuuugguacuauucuuauca

SEQ ID NO: 810475 - RNA, 22 nt, Human
ugcccagcuauuccuuucuuag

SEQ ID NO: 810476 - RNA, 22 nt, Human
caagucaaagacuagaacuagu

SEQ ID NO: 810477 - RNA, 22 nt, Human
ucuaggagcuuaaaggaggcca

SEQ ID NO: 810478 - RNA, 22 nt, Human
gccugcagaggugcugcuagcu

SEQ ID NO: 810479 - RNA, 18 nt, Human
gugcaaauacuugcugac

SEQ ID NO: 810480 - RNA, 22 nt, Human
ggcuuaaagaauuaacagagau

SEQ ID NO: 810481 - RNA, 22 nt, Human
gcaggaacuggagcuggauguu

SEQ ID NO: 810482 - RNA, 22 nt, Human
gugaggugggcugggcucuaug

SEQ ID NO: 810483 - RNA, 22 nt, Human
ucugaggaaucuugacacauuu

SEQ ID NO: 810484 - RNA, 22 nt, Human
aaguccagcucuaaauaucuga

SEQ ID NO: 810485 - RNA, 22 nt, Human
ugaaggccagcagagugaaggc

SEQ ID NO: 810486 - RNA, 22 nt, Human
uucuucaugcuguugcugcuug

SEQ ID NO: 810487 - RNA, 22 nt, Human
uucaguuuccacuuacauuuaa

SEQ ID NO: 810488 - RNA, 23 nt, Human
gccagccagaauuucuccacugu

SEQ ID NO: 810489 - RNA, 22 nt, Human
aacaucuuguacugcacauuuu

SEQ ID NO: 810490 - RNA, 22 nt, Human
agggaccaaucaccgacaggcu

SEQ ID NO: 810491 - RNA, 22 nt, Human
aagaacuugggcugagugaaag

SEQ ID NO: 810492 - RNA, 22 nt, Human
guccccagcugugacgagagcc

SEQ ID NO: 810493 - RNA, 22 nt, Human
gagggagccgccacagacuggg

SEQ ID NO: 810494 - RNA, 22 nt, Human
agaugaaaauacgugacuuuaa

SEQ ID NO: 810495 - RNA, 22 nt, Human
cucugcugaucucagcugggcu

SEQ ID NO: 810496 - RNA, 22 nt, Human
aacagauuguaaccugauagcc

SEQ ID NO: 810497 - RNA, 22 nt, Human
uuguugucauuguagaggauuu

SEQ ID NO: 810498 - RNA, 23 nt, Human
gggagccauggguggucauggag

SEQ ID NO: 810499 - RNA, 22 nt, Human
ugucucuuacuuugauucuugg

SEQ ID NO: 810500 - RNA, 22 nt, Human
ggcaguggcauguggguagugg

SEQ ID NO: 810501 - RNA, 22 nt, Human
gcaccccucagcuuguuuacua

SEQ ID NO: 810502 - RNA, 19 nt, Human
uacauacuuauucuaaaag

SEQ ID NO: 810503 - RNA, 22 nt, Human
uccagggagauacuggcugcca

SEQ ID NO: 810504 - RNA, 22 nt, Human
ugucauggggaaaauaacagac

SEQ ID NO: 810505 - RNA, 22 nt, Human
ugcuggagcccaggcggccuuu

SEQ ID NO: 810506 - RNA, 22 nt, Human
uuuaccacaauuuuaaacaaug

SEQ ID NO: 810507 - RNA, 22 nt, Human
uaggccaggaaucagcaagcuu

SEQ ID NO: 810508 - RNA, 22 nt, Human
gaggaaagaaccccagucaaua

SEQ ID NO: 810509 - RNA, 22 nt, Human
ggcaagaaggcuucagguagcu

SEQ ID NO: 810510 - RNA, 22 nt, Human
uaugagaacugacagagugcca

SEQ ID NO: 810511 - RNA, 22 nt, Human
aguauauaugaggaaccacaaa

SEQ ID NO: 810512 - RNA, 22 nt, Human
gcugcugucacccacaucuguc

SEQ ID NO: 810513 - RNA, 22 nt, Human
cagggguggcugcagcagaggu

SEQ ID NO: 810514 - RNA, 22 nt, Human
gagguggcccuugcucagccuu

SEQ ID NO: 810515 - RNA, 22 nt, Human
guuacaaagcacuucaagugaa

SEQ ID NO: 810516 - RNA, 22 nt, Human
ucagugcauuaauaauaucagu

SEQ ID NO: 810517 - RNA, 22 nt, Human
gcuggagaacccaggaggaaga

SEQ ID NO: 810518 - RNA, 22 nt, Human
agcugaggccacgagugaaggg

SEQ ID NO: 810519 - RNA, 22 nt, Human
uggcaucuccgacagucuugau

SEQ ID NO: 810520 - RNA, 22 nt, Human
gcucaggaaacagcagggcuug

SEQ ID NO: 810521 - RNA, 18 nt, Human
uauguauaacauaguuca

SEQ ID NO: 810522 - RNA, 21 nt, Human
ccacucugaguguugaacaga

SEQ ID NO: 810523 - RNA, 22 nt, Human
aaaugcauguagaauaauagag

SEQ ID NO: 810524 - RNA, 22 nt, Human
accaggaguugggggugggacc

SEQ ID NO: 810525 - RNA, 22 nt, Human
uuacuuuugcaccaaacuaaua

SEQ ID NO: 810526 - RNA, 22 nt, Human
ccagggcccacggccagaauag

SEQ ID NO: 810527 - RNA, 22 nt, Human
uuaaugacaggauaggcucuga

SEQ ID NO: 810528 - RNA, 22 nt, Human
guuuacauguaauguguuauug

SEQ ID NO: 810529 - RNA, 22 nt, Human
aggccagaguuaaggagaacag

SEQ ID NO: 810530 - RNA, 22 nt, Human
ugggagugcaccugggacacga

SEQ ID NO: 810531 - RNA, 22 nt, Human
uguggcucuccuccugcugccc

SEQ ID NO: 810532 - RNA, 21 nt, Human
ccagccucagaucagggagcu

SEQ ID NO: 810533 - RNA, 22 nt, Human
ccugggaagucagccaaggacg

SEQ ID NO: 810534 - RNA, 22 nt, Human
agaaggccuaacuugggggcaa

SEQ ID NO: 810535 - RNA, 22 nt, Human
ccaucccuucucuggccagcag

SEQ ID NO: 810536 - RNA, 22 nt, Human
gcacagggcugccaggcggcuu

SEQ ID NO: 810537 - RNA, 22 nt, Human
ccacuggcauccagcugccauc

SEQ ID NO: 810538 - RNA, 22 nt, Human
aaacagugccaggcagaugcca

SEQ ID NO: 810539 - RNA, 22 nt, Human
acugcaaucuggauccuagaag

SEQ ID NO: 810540 - RNA, 22 nt, Human
auguguuuugguaauuucugcu

SEQ ID NO: 810541 - RNA, 21 nt, Human
ucaggagagcccaucuacaaa

SEQ ID NO: 810542 - RNA, 22 nt, Human
cugagaggaacaucuuaugcuu

SEQ ID NO: 810543 - RNA, 22 nt, Human
aggcccaguguggcuuccugga

SEQ ID NO: 810544 - RNA, 22 nt, Human
uaguauagauugaagcagauca

SEQ ID NO: 810545 - RNA, 21 nt, Human
uggccagcuggagucuccaca

SEQ ID NO: 810546 - RNA, 22 nt, Human
aauguauaaccauaggaaauuu

SEQ ID NO: 810547 - RNA, 22 nt, Human
ugccagggugucaggagagcua

SEQ ID NO: 810548 - RNA, 22 nt, Human
cugguucaugguggaaugacau

SEQ ID NO: 810549 - RNA, 22 nt, Human
auguuuguguuacacucugcag

SEQ ID NO: 810550 - RNA, 22 nt, Human
ggccccaguucacuccuggccg

SEQ ID NO: 810551 - RNA, 22 nt, Human
gggugguggcggaggcuccagg

SEQ ID NO: 810552 - RNA, 22 nt, Human
cugccaaaaggugcaccugcug

SEQ ID NO: 810553 - RNA, 22 nt, Human
ucucugucugagccuggcagac

SEQ ID NO: 810554 - RNA, 22 nt, Human
uucccuuccucacucuacuugu

SEQ ID NO: 810555 - RNA, 22 nt, Human
gucccagggagguucagggcuu

SEQ ID NO: 810556 - RNA, 22 nt, Human
gauggcagucaaccaggugagg

SEQ ID NO: 810557 - RNA, 22 nt, Human
cuccagaggaaagcacauagug

SEQ ID NO: 810558 - RNA, 22 nt, Human
auuucuuuucaagagggugcuu

SEQ ID NO: 810559 - RNA, 22 nt, Human
gcaguaagauguuucccagagc

SEQ ID NO: 810560 - RNA, 22 nt, Human
aguauuuucaaccauagccugg

SEQ ID NO: 810561 - RNA, 21 nt, Human
uaucacaguagaauaggaucu

SEQ ID NO: 810562 - RNA, 22 nt, Human
cugaggagaaagaugguccaag

SEQ ID NO: 810563 - RNA, 22 nt, Human
uggcagaaguacacaagcaugc

SEQ ID NO: 810564 - RNA, 21 nt, Human
accaguuuggggggcuuccug

SEQ ID NO: 810565 - RNA, 22 nt, Human
gaggccuggugcuguguccaca

SEQ ID NO: 810566 - RNA, 22 nt, Human
ggcagcuuccugagccagcagc

SEQ ID NO: 810567 - RNA, 22 nt, Human
ucaguguuuguggcaaauguua

SEQ ID NO: 810568 - RNA, 22 nt, Human
ccuuggguuccaagucacugaa

SEQ ID NO: 810569 - RNA, 22 nt, Human
uucauugauaguuuuauguaug

SEQ ID NO: 810570 - RNA, 22 nt, Human
uuugaaauaugugaugagagag

SEQ ID NO: 810571 - RNA, 22 nt, Human
aauacuugaauuucaugucagg

SEQ ID NO: 810572 - RNA, 22 nt, Human
cgaaaauagaucuguuucccag

SEQ ID NO: 810573 - RNA, 22 nt, Human
uaugaaaauuuagcugaagcau

SEQ ID NO: 810574 - RNA, 23 nt, Human
ucagugucuaguuguggaauuga

SEQ ID NO: 810575 - RNA, 23 nt, Human
ccaggccucucagagggugugcc

SEQ ID NO: 810576 - RNA, 22 nt, Human
gcagcuuuuuggaugucaguua

SEQ ID NO: 810577 - RNA, 22 nt, Human
cagcagaagcaacauucaggcu

SEQ ID NO: 810578 - RNA, 22 nt, Human
ccugugcuucagcuggaggagg

SEQ ID NO: 810579 - RNA, 22 nt, Human
gugcaaauguaauugugguuuu

SEQ ID NO: 810580 - RNA, 22 nt, Human
cccuggagcugcuugcauguug

SEQ ID NO: 810581 - RNA, 22 nt, Human
uauugauucugucccaaguuga

SEQ ID NO: 810582 - RNA, 22 nt, Human
uacaagaaggauggagcccacu

SEQ ID NO: 810583 - RNA, 19 nt, Human
ugugugcaaauggaagcca

SEQ ID NO: 810584 - RNA, 22 nt, Human
ucacauuuaaacaggaggauua

SEQ ID NO: 810585 - RNA, 22 nt, Human
gacccguggcaggcugccugcu

SEQ ID NO: 810586 - RNA, 22 nt, Human
uccauaaaccagaaaaucaaga

SEQ ID NO: 810587 - RNA, 22 nt, Human
cugguagggccccacauccuua

SEQ ID NO: 810588 - RNA, 22 nt, Human
aagucagacagcugagcugccu

SEQ ID NO: 810589 - RNA, 22 nt, Human
gcuccagcucguggcucccagc

SEQ ID NO: 810590 - RNA, 22 nt, Human
uccccaggagcaaugauucagu

SEQ ID NO: 810591 - RNA, 22 nt, Human
aagaacauguuaaaagauucac

SEQ ID NO: 810592 - RNA, 22 nt, Human
agaguugcuauagaaggaugga

SEQ ID NO: 810593 - RNA, 22 nt, Human
uaaaaggcacuuggaugcugag

SEQ ID NO: 810594 - RNA, 22 nt, Human
acuguucugccaagaucaacgu

SEQ ID NO: 810595 - RNA, 19 nt, Human
agauuauugcacauucaug

SEQ ID NO: 810596 - RNA, 22 nt, Human
aagccaggggcugcuuaggaga

SEQ ID NO: 810597 - RNA, 22 nt, Human
guaauuacaugaguacuguaag

SEQ ID NO: 810598 - RNA, 22 nt, Human
gagcugaguguccuaggcaugg

SEQ ID NO: 810599 - RNA, 22 nt, Human
aggcagcugcccucuccuuccu

SEQ ID NO: 810600 - RNA, 22 nt, Human
cuuuccccaagcaccacagugc

SEQ ID NO: 810601 - RNA, 22 nt, Human
gaaggcaggcuucugauuaggu

SEQ ID NO: 810602 - RNA, 20 nt, Human
cagaugcuggaucuuggucc

SEQ ID NO: 810603 - RNA, 22 nt, Human
cuccugguucagagagcugaga

SEQ ID NO: 810604 - RNA, 22 nt, Human
uggcuggaugugagaucaagag

SEQ ID NO: 810605 - RNA, 22 nt, Human
agccuggguggggguucggaga

SEQ ID NO: 810606 - RNA, 22 nt, Human
cugagcagaccauggcagaggu

SEQ ID NO: 810607 - RNA, 22 nt, Human
uaguccugaccagcuggauguu

SEQ ID NO: 810608 - RNA, 22 nt, Human
gggacacuggacccagugucca

SEQ ID NO: 810609 - RNA, 22 nt, Human
agcccagggcuaauaggaacca

SEQ ID NO: 810610 - RNA, 22 nt, Human
agcuggcucagccggguggucu

SEQ ID NO: 810611 - RNA, 22 nt, Human
caaaauuagggagugagcugga

SEQ ID NO: 810612 - RNA, 22 nt, Human
aauggaauaccuagguggccca

SEQ ID NO: 810613 - RNA, 22 nt, Human
ucacagaacaagccugguggag

SEQ ID NO: 810614 - RNA, 22 nt, Human
ccagaggaucaguacuggcugg

SEQ ID NO: 810615 - RNA, 22 nt, Human
cagucccaucucccagguggcu

SEQ ID NO: 810616 - RNA, 22 nt, Human
caugcaugccgggcugacagag

SEQ ID NO: 810617 - RNA, 22 nt, Human
uugcaacauuguaaguuuauau

SEQ ID NO: 810618 - RNA, 22 nt, Human
ucccacaugugaauccucaggu

SEQ ID NO: 810619 - RNA, 22 nt, Human
aucugccucuucuucauugcga

SEQ ID NO: 810620 - RNA, 20 nt, Human
aagggagaauaaugauugua

SEQ ID NO: 810621 - RNA, 22 nt, Human
caggagccagaggcggauggag

SEQ ID NO: 810622 - RNA, 22 nt, Human
gcuggcagggacagcugcgugu

SEQ ID NO: 810623 - RNA, 22 nt, Human
augaaauguaugagucuggguu

SEQ ID NO: 810624 - RNA, 22 nt, Human
agcugcucauuacuuucuguug

SEQ ID NO: 810625 - RNA, 22 nt, Human
ggcuucuccagguacugagcau

SEQ ID NO: 810626 - RNA, 22 nt, Human
cuggggggagcugcguccagca

SEQ ID NO: 810627 - RNA, 22 nt, Human
ucacuuuagaggaaacauugag

SEQ ID NO: 810628 - RNA, 22 nt, Human
uggccagugccugccagugcag

SEQ ID NO: 810629 - RNA, 22 nt, Human
ucagaguccaugguacuuaauu

SEQ ID NO: 810630 - RNA, 22 nt, Human
ccuuccagaggcgugacacccu

SEQ ID NO: 810631 - RNA, 19 nt, Human
aggaauggaauuaauucug

SEQ ID NO: 810632 - RNA, 22 nt, Human
uauacaauggcugaaucaucca

SEQ ID NO: 810633 - RNA, 22 nt, Human
agcaaauaauugucuuugaggg

SEQ ID NO: 810634 - RNA, 22 nt, Human
uauugacauuuuuauagcuuga

SEQ ID NO: 810635 - RNA, 22 nt, Human
gcagguggcagaggugggaucu

SEQ ID NO: 810636 - RNA, 22 nt, Human
ggcaguguggccugaguaaguc

SEQ ID NO: 810637 - RNA, 22 nt, Human
aauccacacaucuggcauguga

SEQ ID NO: 810638 - RNA, 20 nt, Human
ucuccuggucugguccgugc

SEQ ID NO: 810639 - RNA, 22 nt, Human
uaccacaguuuaucuauucagc

SEQ ID NO: 810640 - RNA, 22 nt, Human
cauuuccacuucugaaaacugg

SEQ ID NO: 810641 - RNA, 22 nt, Human
gucaaguuuauccgcucauuca

SEQ ID NO: 810642 - RNA, 22 nt, Human
uggcagauguggcauagagcau

SEQ ID NO: 810643 - RNA, 22 nt, Human
ccaggaagcucugcuccacggg

SEQ ID NO: 810644 - RNA, 22 nt, Human
aggcugugaguaguucuuguug

SEQ ID NO: 810645 - RNA, 22 nt, Human
auguacaagcuguuuuacugca

SEQ ID NO: 810646 - RNA, 22 nt, Human
cuggaagguuccucccagcucc

SEQ ID NO: 810647 - RNA, 21 nt, Human
aauuuugaaggaagauuaagg

SEQ ID NO: 810648 - RNA, 22 nt, Human
aaagucauugcuguuaucaaug

SEQ ID NO: 810649 - RNA, 22 nt, Human
acagucuuucuacauucugugc

SEQ ID NO: 810650 - RNA, 22 nt, Human
ucccagccuuccuuguggugaa

SEQ ID NO: 810651 - RNA, 22 nt, Human
ucaagucuggagaucuggaacu

SEQ ID NO: 810652 - RNA, 22 nt, Human
gcagcuguacuggcagcauugu

SEQ ID NO: 810653 - RNA, 22 nt, Human
gggcccugggauucagagcaag

SEQ ID NO: 810654 - RNA, 22 nt, Human
aaagcaggguccaaggagaugu

SEQ ID NO: 810655 - RNA, 22 nt, Human
gucauaaagacagaaacauucc

SEQ ID NO: 810656 - RNA, 23 nt, Human
cuucacaaucaaaaucaguucug

SEQ ID NO: 810657 - RNA, 22 nt, Human
ucuggaguguccaguucuacuc

SEQ ID NO: 810658 - RNA, 22 nt, Human
agagaacaugacguaauagugg

SEQ ID NO: 810659 - RNA, 22 nt, Human
ucacaguacugugacuauugac

SEQ ID NO: 810660 - RNA, 22 nt, Human
ugagugucuggucauggcaggc

SEQ ID NO: 810661 - RNA, 22 nt, Human
accagcagaguugaggaggaca

SEQ ID NO: 810662 - RNA, 22 nt, Human
caggcagagacccucuccuaaa

SEQ ID NO: 810663 - RNA, 19 nt, Human
cgcaggcuucgggucgcuc

SEQ ID NO: 810664 - RNA, 23 nt, Human
auugagaaggauacauuguucuc

SEQ ID NO: 810665 - RNA, 22 nt, Human
cacagagaucggaacagaagua

SEQ ID NO: 810666 - RNA, 22 nt, Human
cucacagguucugcagcucaca

SEQ ID NO: 810667 - RNA, 22 nt, Human
ugacaauggauauuaguugugg

SEQ ID NO: 810668 - RNA, 22 nt, Human
ugacaggaaacaugcagugauu

SEQ ID NO: 810669 - RNA, 19 nt, Human
gcuccuggaugaccugugg

SEQ ID NO: 810670 - RNA, 22 nt, Human
uucuacaauaugaauaaugaag

SEQ ID NO: 810671 - RNA, 22 nt, Human
cuaggcuugcaggguggacaug

SEQ ID NO: 810672 - RNA, 22 nt, Human
gcagcccucuuggucacuaggc

SEQ ID NO: 810673 - RNA, 22 nt, Human
ugguggcagagcaagagcugga

SEQ ID NO: 810674 - RNA, 22 nt, Human
agagcuguuuggacaucugagu

SEQ ID NO: 810675 - RNA, 19 nt, Human
acagugucuguauauaaau

SEQ ID NO: 810676 - RNA, 22 nt, Human
gaaaaccaccucccaucaagca

SEQ ID NO: 810677 - RNA, 22 nt, Human
uuuagguuuuuucacguggcua

SEQ ID NO: 810678 - RNA, 22 nt, Human
gaggagagaagcuaacggugcu

SEQ ID NO: 810679 - RNA, 22 nt, Human
gguggugaagacaaguggaagu

SEQ ID NO: 810680 - RNA, 22 nt, Human
uauugcaucucuucauaucugu

SEQ ID NO: 810681 - RNA, 17 nt, Human
uggggaagcucagauuu

SEQ ID NO: 810682 - RNA, 22 nt, Human
gucuuucuuaaacaacagaaca

SEQ ID NO: 810683 - RNA, 22 nt, Human
agcucuuucuacaagcaggcag

SEQ ID NO: 810684 - RNA, 22 nt, Human
ucugcaggaggcuggcugcagg

SEQ ID NO: 810685 - RNA, 22 nt, Human
agaggccaccuucucuugagaa

SEQ ID NO: 810686 - RNA, 22 nt, Human
uggcccugaaggccuugagcau

SEQ ID NO: 810687 - RNA, 22 nt, Human
agggccagcugaugagaaugag

SEQ ID NO: 810688 - RNA, 22 nt, Human
cuggcaggagcuguggccguag

SEQ ID NO: 810689 - RNA, 22 nt, Human
ggggaggaagcucucaguucca

SEQ ID NO: 810690 - RNA, 22 nt, Human
gucccugggucuaaggcaguaa

SEQ ID NO: 810691 - RNA, 19 nt, Human
agcagcagcaccagggauu

SEQ ID NO: 810692 - RNA, 22 nt, Human
cuacuauaaaauacacaucugu

SEQ ID NO: 810693 - RNA, 22 nt, Human
gcuggcugguccagcaggggcu

SEQ ID NO: 810694 - RNA, 22 nt, Human
cuaaaucaggccuuacagcuuc

SEQ ID NO: 810695 - RNA, 22 nt, Human
gccagcugaggccgugcaggcu

SEQ ID NO: 810696 - RNA, 21 nt, Human
cagcaaaucauugggcagacu

SEQ ID NO: 810697 - RNA, 18 nt, Human
aaugcacacauuuacucc

SEQ ID NO: 810698 - RNA, 22 nt, Human
auuuuagauuuaagaauaaggu

SEQ ID NO: 810699 - RNA, 22 nt, Human
gccagagcagaauagaguggcc

SEQ ID NO: 810700 - RNA, 22 nt, Human
uuuagcuucaguucuagcuucu

SEQ ID NO: 810701 - RNA, 20 nt, Human
ucugucucugagcuagacuu

SEQ ID NO: 810702 - RNA, 22 nt, Human
gcugcuggaacaaaucacccca

SEQ ID NO: 810703 - RNA, 22 nt, Human
ggacauuuagaacagaguauuu

SEQ ID NO: 810704 - RNA, 22 nt, Human
agcagagcggggccuccggaag

SEQ ID NO: 810705 - RNA, 22 nt, Human
ggcccugggacacaacaccgaa

SEQ ID NO: 810706 - RNA, 22 nt, Human
agcugugucauccuggaaaaug

SEQ ID NO: 810707 - RNA, 22 nt, Human
agaggccagcacugcagggaag

SEQ ID NO: 810708 - RNA, 22 nt, Human
ggcuagggaaaaugauuggaua

SEQ ID NO: 810709 - RNA, 22 nt, Human
uuuacugucucagagagacaaa

SEQ ID NO: 810710 - RNA, 22 nt, Human
ucugaagaacugaguaaacaug

SEQ ID NO: 810711 - RNA, 22 nt, Human
gacacagggggauguguggacg

SEQ ID NO: 810712 - RNA, 22 nt, Human
aguuuacacuuuugauucuuau

SEQ ID NO: 810713 - RNA, 22 nt, Human
aggccagcaccagagucaagaa

SEQ ID NO: 810714 - RNA, 22 nt, Human
cucuggauugcugugagaugcu

SEQ ID NO: 810715 - RNA, 22 nt, Human
ugcaggugucuccagggcaggu

SEQ ID NO: 810716 - RNA, 22 nt, Human
agcugcugugugcucaggcagg

SEQ ID NO: 810717 - RNA, 22 nt, Human
ugcaggagggaggguuacaguu

SEQ ID NO: 810718 - RNA, 22 nt, Human
aauauaguguuagcucauuuga

SEQ ID NO: 810719 - RNA, 22 nt, Human
aggagcugggcugcugcuggga

SEQ ID NO: 810720 - RNA, 22 nt, Human
uagcaguauggagcgaggccca

SEQ ID NO: 810721 - RNA, 22 nt, Human
ucaaaguaaaaguauagaguuu

SEQ ID NO: 810722 - RNA, 22 nt, Human
ucuacaaauaaauuacuaugua

SEQ ID NO: 810723 - RNA, 22 nt, Human
ggggaaaggccauggcaagaac

SEQ ID NO: 810724 - RNA, 22 nt, Human
aggugccaauuuucagugaaca

SEQ ID NO: 810725 - RNA, 22 nt, Human
uguccugggaaugggaugcagu

SEQ ID NO: 810726 - RNA, 22 nt, Human
ugacagggacaguggagaugga

SEQ ID NO: 810727 - RNA, 22 nt, Human
agggucuaucucucugccuuug

SEQ ID NO: 810728 - RNA, 22 nt, Human
uuucacauacaguguauaguag

SEQ ID NO: 810729 - RNA, 17 nt, Human
agcaggcacgucagcac

SEQ ID NO: 810730 - RNA, 22 nt, Human
ggagugaguacuggaguagcug

SEQ ID NO: 810731 - RNA, 22 nt, Human
agguggcuaugaggaugcaguc

SEQ ID NO: 810732 - RNA, 22 nt, Human
ucaugcaagcaggcacugggaa

SEQ ID NO: 810733 - RNA, 22 nt, Human
aaagucaucuaggagcagauuu

SEQ ID NO: 810734 - RNA, 22 nt, Human
agaaggcuggccauggugcccu

SEQ ID NO: 810735 - RNA, 22 nt, Human
aucuuuggaucgcucccccuuc

SEQ ID NO: 810736 - RNA, 22 nt, Human
gaacacagucaagggcugcugu

SEQ ID NO: 810737 - RNA, 22 nt, Human
aaucaaaaccuacagagguaau

SEQ ID NO: 810738 - RNA, 22 nt, Human
gcagagccccucaagccagccu

SEQ ID NO: 810739 - RNA, 22 nt, Human
aaaacauguccauacagaaacu

SEQ ID NO: 810740 - RNA, 22 nt, Human
uccucuggggcgugguccugga

SEQ ID NO: 810741 - RNA, 22 nt, Human
caagccauacugggugaaauca

SEQ ID NO: 810742 - RNA, 17 nt, Human
cugagccccgggcagcu

SEQ ID NO: 810743 - RNA, 22 nt, Human
ugccugucuucaggagugucac

SEQ ID NO: 810744 - RNA, 22 nt, Human
auuauuuagaaaucgauugaaa

SEQ ID NO: 810745 - RNA, 22 nt, Human
auaacuuauuagauuggagcug

SEQ ID NO: 810746 - RNA, 22 nt, Human
gcuucagaaguugggcucugac

SEQ ID NO: 810747 - RNA, 22 nt, Human
uggggacaggagacuuacagcu

SEQ ID NO: 810748 - RNA, 22 nt, Human
gagcuuuguuccgugguggcac

SEQ ID NO: 810749 - RNA, 22 nt, Human
aucagaauagugggggacaguc

SEQ ID NO: 810750 - RNA, 22 nt, Human
cauuguaagaggcuuugcagca

SEQ ID NO: 810751 - RNA, 22 nt, Human
ucacacagcuaguaagggccga

SEQ ID NO: 810752 - RNA, 22 nt, Human
gggcucagcuccuuccuuccua

SEQ ID NO: 810753 - RNA, 22 nt, Human
auaaacacuucuagggcacaca

SEQ ID NO: 810754 - RNA, 22 nt, Human
agagccugagccugaucuugaa

SEQ ID NO: 810755 - RNA, 22 nt, Human
ugaguucuccaagagaagguaa

SEQ ID NO: 810756 - RNA, 22 nt, Human
aggacaggauuccuugccuugc

SEQ ID NO: 810757 - RNA, 18 nt, Human
ggggaaaagccagguguc

SEQ ID NO: 810758 - RNA, 22 nt, Human
agaggccacuuugccugugaug

SEQ ID NO: 810759 - RNA, 23 nt, Human
ugcaaauaacaaggaguuuaagg

SEQ ID NO: 810760 - RNA, 17 nt, Human
acacaucuuggcuuugc

SEQ ID NO: 810761 - RNA, 22 nt, Human
gcugcaagucauggcuuuugca

SEQ ID NO: 810762 - RNA, 22 nt, Human
uucuggauagggguauggagcu

SEQ ID NO: 810763 - RNA, 22 nt, Human
acuauauaagauuggcauuuuu

SEQ ID NO: 810764 - RNA, 17 nt, Human
gccucugcuugugucau

SEQ ID NO: 810765 - RNA, 22 nt, Human
aaggagaaggguaaucaacaca

SEQ ID NO: 810766 - RNA, 22 nt, Human
uggguccauggaacagaggugc

SEQ ID NO: 810767 - RNA, 22 nt, Human
ggcagccuccagggcacuggug

SEQ ID NO: 810768 - RNA, 22 nt, Human
auacaguauuaccuguucagga

SEQ ID NO: 810769 - RNA, 22 nt, Human
cuuggggaagccacugaucccu

SEQ ID NO: 810770 - RNA, 21 nt, Human
ugccaggccugagcugggguc

SEQ ID NO: 810771 - RNA, 22 nt, Human
cuaggcagggugcugugccaug

SEQ ID NO: 810772 - RNA, 22 nt, Human
cuggagagggagcuguuggaag

SEQ ID NO: 810773 - RNA, 22 nt, Human
agccacuuuacuuucauauuuu

SEQ ID NO: 810774 - RNA, 22 nt, Human
ugcuggcaucuuaauguucugu

SEQ ID NO: 810775 - RNA, 22 nt, Human
agaggcucuuugagcugggaga

SEQ ID NO: 810776 - RNA, 22 nt, Human
acugugcugcucuccgcagccc

SEQ ID NO: 810777 - RNA, 22 nt, Human
gggcacuuaaugggcacagaga

SEQ ID NO: 810778 - RNA, 22 nt, Human
gucucuuagucaauauuuucug

SEQ ID NO: 810779 - RNA, 22 nt, Human
aaagccaggggagggauuccca

SEQ ID NO: 810780 - RNA, 22 nt, Human
aaugucauuuuuaaaugugaga

SEQ ID NO: 810781 - RNA, 22 nt, Human
ccaggaagccugugucucugga

SEQ ID NO: 810782 - RNA, 22 nt, Human
uggcuggcaaggcuggagucag

SEQ ID NO: 810783 - RNA, 22 nt, Human
agaugguggacuaucugacuug

SEQ ID NO: 810784 - RNA, 22 nt, Human
cuuuccaguuucuaaguacagu

SEQ ID NO: 810785 - RNA, 22 nt, Human
uggagcugagagccaggcuggc

SEQ ID NO: 810786 - RNA, 22 nt, Human
cacagggcagagaccugggugc

SEQ ID NO: 810787 - RNA, 22 nt, Human
ucuguuuaggcaaaauagcuac

SEQ ID NO: 810788 - RNA, 22 nt, Human
gugcugagcaucaugaggcacu

SEQ ID NO: 810789 - RNA, 22 nt, Human
uacaaagugcuuuagaaaugaa

SEQ ID NO: 810790 - RNA, 22 nt, Human
cacuggcaucuaguggguugag

SEQ ID NO: 810791 - RNA, 22 nt, Human
uagaaacaugagagaaacucuu

SEQ ID NO: 810792 - RNA, 20 nt, Human
cucugcuuuaggagagucag

SEQ ID NO: 810793 - RNA, 22 nt, Human
gagcccaggaugguguauggcu

SEQ ID NO: 810794 - RNA, 22 nt, Human
ugggaccagauaaagggagguc

SEQ ID NO: 810795 - RNA, 22 nt, Human
aaacauguaaguucagaucacc

SEQ ID NO: 810796 - RNA, 22 nt, Human
uaaaauguguuucuguaugguu

SEQ ID NO: 810797 - RNA, 22 nt, Human
agagcaggggcaauguguugca

SEQ ID NO: 810798 - RNA, 19 nt, Human
aauacaguguuauagaauu

SEQ ID NO: 810799 - RNA, 22 nt, Human
guuuauuagaguuuucugucug

SEQ ID NO: 810800 - RNA, 22 nt, Human
uuacauucccagugugcagcau

SEQ ID NO: 810801 - RNA, 22 nt, Human
agcugagcauuugauccaccuc

SEQ ID NO: 810802 - RNA, 22 nt, Human
caagaaauguuuacugagcauc

SEQ ID NO: 810803 - RNA, 22 nt, Human
acaggcugcugggcuccgugcu

SEQ ID NO: 810804 - RNA, 22 nt, Human
cuggggcugcggacgggagccc

SEQ ID NO: 810805 - RNA, 18 nt, Human
uaacauguuuucauuaag

SEQ ID NO: 810806 - RNA, 22 nt, Human
gcugugcuugcaugagugucug

SEQ ID NO: 810807 - RNA, 22 nt, Human
ccaggccuucugaggacacucu

SEQ ID NO: 810808 - RNA, 22 nt, Human
cuacauuuguucaaauaagcug

SEQ ID NO: 810809 - RNA, 21 nt, Human
ugcccaggggccaaccgcugc

SEQ ID NO: 810810 - RNA, 22 nt, Human
uucaacaaaauauauuuuucca

SEQ ID NO: 810811 - RNA, 22 nt, Human
uucacagauuucccugcacaug

SEQ ID NO: 810812 - RNA, 21 nt, Human
ucuuguauuggaucugugugu

SEQ ID NO: 810813 - RNA, 22 nt, Human
ugcacagagcaggcaccagcgg

SEQ ID NO: 810814 - RNA, 22 nt, Human
ugaacuugaauuuuggaaauac

SEQ ID NO: 810815 - RNA, 22 nt, Human
cauuguaagcuguugaauccuc

SEQ ID NO: 810816 - RNA, 22 nt, Human
ggcacuguuuuuguauucaguu

SEQ ID NO: 810817 - RNA, 21 nt, Human
uauuaauaugucuaagcugau

SEQ ID NO: 810818 - RNA, 22 nt, Human
agagggagcuuuauuuuucugu

SEQ ID NO: 810819 - RNA, 22 nt, Human
auagaaauguauuuuggacuag

SEQ ID NO: 810820 - RNA, 22 nt, Human
aagccagugugacaggaaacuu

SEQ ID NO: 810821 - RNA, 22 nt, Human
gaguggagaucgugccacugca

SEQ ID NO: 810822 - RNA, 22 nt, Human
acuggcugauauggcuaggaag

SEQ ID NO: 810823 - RNA, 22 nt, Human
cuggcaggcucucuggucgguu

SEQ ID NO: 810824 - RNA, 22 nt, Human
caggaaauaaaugguaaugcau

SEQ ID NO: 810825 - RNA, 22 nt, Human
uagauaaauuagaaaguuuacu

SEQ ID NO: 810826 - RNA, 22 nt, Human
cccagagaagugaagugacuug

SEQ ID NO: 810827 - RNA, 22 nt, Human
auucuacaaaagaacuggaucu

SEQ ID NO: 810828 - RNA, 22 nt, Human
cuuggcccggagccccaugaag

SEQ ID NO: 810829 - RNA, 22 nt, Human
aaguaacaucugaacaugaugu

SEQ ID NO: 810830 - RNA, 22 nt, Human
augcagauguuccuacuguguu

SEQ ID NO: 810831 - RNA, 22 nt, Human
gaagaaauugaauucaugagcu

SEQ ID NO: 810832 - RNA, 22 nt, Human
aggucuggaggcggagucagga

SEQ ID NO: 810833 - RNA, 22 nt, Human
uccaaaggaagaggcugucagu

SEQ ID NO: 810834 - RNA, 22 nt, Human
uucauugagugguuuauucuaa

SEQ ID NO: 810835 - RNA, 22 nt, Human
agccaauaaauuuacaacuaga

SEQ ID NO: 810836 - RNA, 22 nt, Human
uauucacauucucaggccuggu

SEQ ID NO: 810837 - RNA, 22 nt, Human
auuacaguaacagcuacaaugc

SEQ ID NO: 810838 - RNA, 22 nt, Human
ggcaggacaggggaauguuugg

SEQ ID NO: 810839 - RNA, 22 nt, Human
ccagggcuuugccaaaguccag

SEQ ID NO: 810840 - RNA, 22 nt, Human
uuugggcauauagcuguucccu

SEQ ID NO: 810841 - RNA, 22 nt, Human
ccaggcucaccuggagccccug

SEQ ID NO: 810842 - RNA, 22 nt, Human
cccugccucugaagcugcucag

SEQ ID NO: 810843 - RNA, 18 nt, Human
gcuccuggaccaggucac

SEQ ID NO: 810844 - RNA, 22 nt, Human
aaagcagucuguuuuaaccuga

SEQ ID NO: 810845 - RNA, 20 nt, Human
ugaguggccacugggucgca

SEQ ID NO: 810846 - RNA, 22 nt, Human
ccccagccagcuuguaguagaa

SEQ ID NO: 810847 - RNA, 20 nt, Human
ucaccuaaaccagcaguuuc

SEQ ID NO: 810848 - RNA, 22 nt, Human
ugcaaacuauugguagagaugg

SEQ ID NO: 810849 - RNA, 22 nt, Human
agcccagaggguagcagaagaa

SEQ ID NO: 810850 - RNA, 22 nt, Human
ggggaaggauaugauuagacua

SEQ ID NO: 810851 - RNA, 22 nt, Human
cagaaagguaugugugccuuug

SEQ ID NO: 810852 - RNA, 22 nt, Human
uucauacauguguacuguucca

SEQ ID NO: 810853 - RNA, 22 nt, Human
cuuauucaaugcuggaaauguu

SEQ ID NO: 810854 - RNA, 22 nt, Human
agugccagcuccacacagcagc

SEQ ID NO: 810855 - RNA, 22 nt, Human
uaggaagaugaguaucaacuug

SEQ ID NO: 810856 - RNA, 22 nt, Human
acugcacaccuccagggcacua

SEQ ID NO: 810857 - RNA, 22 nt, Human
aaacaacucggcaacugcuuuu

SEQ ID NO: 810858 - RNA, 22 nt, Human
aagggggcggcagccaguggaa

SEQ ID NO: 810859 - RNA, 22 nt, Human
cacagagaauucccauauguga

SEQ ID NO: 810860 - RNA, 22 nt, Human
ccccaggcagggccuaacagag

SEQ ID NO: 810861 - RNA, 22 nt, Human
gcagcagguccgcaucaucauc

SEQ ID NO: 810862 - RNA, 16 nt, Human
cucuuuggcuuccaag

SEQ ID NO: 810863 - RNA, 22 nt, Human
gagccacuguugggcacuuucc

SEQ ID NO: 810864 - RNA, 22 nt, Human
agauuucugucaccuucuaugc

SEQ ID NO: 810865 - RNA, 22 nt, Human
ucuucaggagcugaaagccugc

SEQ ID NO: 810866 - RNA, 22 nt, Human
uugcaaaugugaguuuagacug

SEQ ID NO: 810867 - RNA, 22 nt, Human
uuucaggaucaaaugaaaucgu

SEQ ID NO: 810868 - RNA, 22 nt, Human
gagagaagaauguuccgaggcc

SEQ ID NO: 810869 - RNA, 20 nt, Human
uggcccuguuuucuccaggc

SEQ ID NO: 810870 - RNA, 22 nt, Human
cuucccaagacuguauugcaag

SEQ ID NO: 810871 - RNA, 22 nt, Human
gccccuggcuggccagcuccuc

SEQ ID NO: 810872 - RNA, 22 nt, Human
gaggagcacaugaggcugaggg

SEQ ID NO: 810873 - RNA, 22 nt, Human
aauaacuuguaugguuauucca

SEQ ID NO: 810874 - RNA, 22 nt, Human
gcuuuuguggcugucuucauug

SEQ ID NO: 810875 - RNA, 22 nt, Human
aguuucauuucuuaguaccagu

SEQ ID NO: 810876 - RNA, 22 nt, Human
cuaguucuagaucccugaggaa

SEQ ID NO: 810877 - RNA, 22 nt, Human
ccuggccauuugaacuucagac

SEQ ID NO: 810878 - RNA, 22 nt, Human
ccugauggagcccugcugcaug

SEQ ID NO: 810879 - RNA, 23 nt, Human
cccagcagagaugaggagggguc

SEQ ID NO: 810880 - RNA, 22 nt, Human
uauuaauucuugccaauucucc

SEQ ID NO: 810881 - RNA, 16 nt, Human
uggggauggggaagag

SEQ ID NO: 810882 - RNA, 21 nt, Human
ccagcccagcugugucccagc

SEQ ID NO: 810883 - RNA, 22 nt, Human
guggccagucccgaugcuuguu

SEQ ID NO: 810884 - RNA, 22 nt, Human
gcugagagaucaaggcaggauu

SEQ ID NO: 810885 - RNA, 22 nt, Human
auaugaaaguaagcaugugugu

SEQ ID NO: 810886 - RNA, 23 nt, Human
cagaggugucagugcccaguguc

SEQ ID NO: 810887 - RNA, 20 nt, Human
uuugauuucacaaggccagu

SEQ ID NO: 810888 - RNA, 22 nt, Human
ccugagucuguguuuuccuaag

SEQ ID NO: 810889 - RNA, 22 nt, Human
uuggcaggaggcuucaguuccu

SEQ ID NO: 810890 - RNA, 22 nt, Human
gagcaggcauucuaguggcuga

SEQ ID NO: 810891 - RNA, 22 nt, Human
cccacccugggcuacacaucca

SEQ ID NO: 810892 - RNA, 22 nt, Human
gugcgcacccucccggcauccc

SEQ ID NO: 810893 - RNA, 22 nt, Human
caccaggcugcccaggacaggg

SEQ ID NO: 810894 - RNA, 23 nt, Human
ucacauaucaagaaagugguaga

SEQ ID NO: 810895 - RNA, 19 nt, Human
agccagggugagaaggagc

SEQ ID NO: 810896 - RNA, 22 nt, Human
caggacagacagaaugccuaac

SEQ ID NO: 810897 - RNA, 22 nt, Human
ucaggguugugaaggaaagggg

SEQ ID NO: 810898 - RNA, 22 nt, Human
gcagcaggugugcuuuuaauga

SEQ ID NO: 810899 - RNA, 22 nt, Human
aaggggcaugcuuuugccagga

SEQ ID NO: 810900 - RNA, 23 nt, Human
uaggacagaaugcagaaaaauac

SEQ ID NO: 810901 - RNA, 22 nt, Human
cauuucuguucucuuccuguac

SEQ ID NO: 810902 - RNA, 22 nt, Human
uguaguagcauucacgaagugu

SEQ ID NO: 810903 - RNA, 22 nt, Human
uuuccucugacugcuccccugc

SEQ ID NO: 810904 - RNA, 22 nt, Human
gcuaggaggcccugcacgcuua

SEQ ID NO: 810905 - RNA, 22 nt, Human
aguguccuuguuauuacugcuc

SEQ ID NO: 810906 - RNA, 22 nt, Human
cuuugaaaacuuaaauaacagc

SEQ ID NO: 810907 - RNA, 22 nt, Human
ugccaaaugccaccacagcugc

SEQ ID NO: 810908 - RNA, 22 nt, Human
gcacagggcaacaggucuguua

SEQ ID NO: 810909 - RNA, 22 nt, Human
aaggcccacagaacugucucca

SEQ ID NO: 810910 - RNA, 22 nt, Human
auuucuugccccugcucccuga

SEQ ID NO: 810911 - RNA, 22 nt, Human
ucacauuuauuucaaaguuacu

SEQ ID NO: 810912 - RNA, 22 nt, Human
uguggcaguauaagagcuagaa

SEQ ID NO: 810913 - RNA, 22 nt, Human
ggcagggcuugucucugugaug

SEQ ID NO: 810914 - RNA, 22 nt, Human
ccugagugcuuccagagucaug

SEQ ID NO: 810915 - RNA, 22 nt, Human
ccuccagccuuccugaagagcc

SEQ ID NO: 810916 - RNA, 22 nt, Human
acuuccuguauuuauccauagc

SEQ ID NO: 810917 - RNA, 22 nt, Human
auguuaugucugggaaggggua

SEQ ID NO: 810918 - RNA, 22 nt, Human
uauggcaauauguaucaagauc

SEQ ID NO: 810919 - RNA, 21 nt, Human
agaaaaaccagcauguuuuca

SEQ ID NO: 810920 - RNA, 22 nt, Human
guugagaguuaagcgggcuaau

SEQ ID NO: 810921 - RNA, 22 nt, Human
gguggugggagagcuuucugga

SEQ ID NO: 810922 - RNA, 22 nt, Human
uuagaguuuuaucauugccuua

SEQ ID NO: 810923 - RNA, 22 nt, Human
acaggcaguugagguuugugug

SEQ ID NO: 810924 - RNA, 22 nt, Human
agugaaauugcuguaagaggaa

SEQ ID NO: 810925 - RNA, 20 nt, Human
ggcuggaaguguggguuugg

SEQ ID NO: 810926 - RNA, 22 nt, Human
ccaggggcugcagauccauggu

SEQ ID NO: 810927 - RNA, 22 nt, Human
ggaggccuagaaaagugguucu

SEQ ID NO: 810928 - RNA, 22 nt, Human
cccugguguccacuggaggaag

SEQ ID NO: 810929 - RNA, 20 nt, Human
ggcaggcuuuauauggaggg

SEQ ID NO: 810930 - RNA, 21 nt, Human
uuacaggucauccaagucacc

SEQ ID NO: 810931 - RNA, 22 nt, Human
cagcuuggcuuccgcuuuacug

SEQ ID NO: 810932 - RNA, 23 nt, Human
ccugcagcugccacgcccugcuc

SEQ ID NO: 810933 - RNA, 22 nt, Human
aagugcauaguaauggagucaa

SEQ ID NO: 810934 - RNA, 20 nt, Human
ucacuguaacauuugggggg

SEQ ID NO: 810935 - RNA, 22 nt, Human
ccagcuggaagagugcagaacu

SEQ ID NO: 810936 - RNA, 22 nt, Human
gcugcucucagagcucaugcug

SEQ ID NO: 810937 - RNA, 22 nt, Human
uguaagauuugcuauguguugu

SEQ ID NO: 810938 - RNA, 22 nt, Human
aucaguguuugcaugggagcuu

SEQ ID NO: 810939 - RNA, 22 nt, Human
accaggcagagcugggccuuaa

SEQ ID NO: 810940 - RNA, 22 nt, Human
ugccagcuccugcagcuccugu

SEQ ID NO: 810941 - RNA, 22 nt, Human
augacugcucugggcucccaug

SEQ ID NO: 810942 - RNA, 22 nt, Human
ucuuauuauuguuguaaaagca

SEQ ID NO: 810943 - RNA, 22 nt, Human
uaauaauagcaguagcugccac

SEQ ID NO: 810944 - RNA, 22 nt, Human
cucccugguguccccuccagga

SEQ ID NO: 810945 - RNA, 22 nt, Human
uuguuuucagggugucauucac

SEQ ID NO: 810946 - RNA, 22 nt, Human
aacugaaacggugaucuuuuaa

SEQ ID NO: 810947 - RNA, 19 nt, Human
gcaggcuugggucucccca

SEQ ID NO: 810948 - RNA, 22 nt, Human
cccaggaggcagagguuggagc

SEQ ID NO: 810949 - RNA, 22 nt, Human
agaauacaguaugcaaaaagau

SEQ ID NO: 810950 - RNA, 22 nt, Human
auguuucugaguguauauacau

SEQ ID NO: 810951 - RNA, 22 nt, Human
acccuugguuuugcagagcugu

SEQ ID NO: 810952 - RNA, 22 nt, Human
ggcacuggagacuguuaugaga

SEQ ID NO: 810953 - RNA, 20 nt, Human
uggacacagcccuguugagu

SEQ ID NO: 810954 - RNA, 20 nt, Human
cagagccaagagcagcaucu

SEQ ID NO: 810955 - RNA, 22 nt, Human
acacuuuuaagacuuuaaugaa

SEQ ID NO: 810956 - RNA, 22 nt, Human
gaggcaaggccgcacgucucag

SEQ ID NO: 810957 - RNA, 22 nt, Human
agcagcaggcuagggaacugcu

SEQ ID NO: 810958 - RNA, 22 nt, Human
gccuuggcugccaagcugcuga

SEQ ID NO: 810959 - RNA, 22 nt, Human
gcaacagcccagguucugugug

SEQ ID NO: 810960 - RNA, 22 nt, Human
uugggguguuggauggagcaag

SEQ ID NO: 810961 - RNA, 22 nt, Human
aggagcuggccacuaggaugca

SEQ ID NO: 810962 - RNA, 22 nt, Human
gcuggcagaauuucuucuugcu

SEQ ID NO: 810963 - RNA, 21 nt, Human
gagugucagcaagagguuugg

SEQ ID NO: 810964 - RNA, 22 nt, Human
acaggugugagaacaugccuug

SEQ ID NO: 810965 - RNA, 22 nt, Human
gaguccugcuuucaauucuuuu

SEQ ID NO: 810966 - RNA, 22 nt, Human
uuuuauguaauccuuacugucg

SEQ ID NO: 810967 - RNA, 22 nt, Human
ucaggggaaaucucucagcgaa

SEQ ID NO: 810968 - RNA, 22 nt, Human
uaagcucuccaggugaucauga

SEQ ID NO: 810969 - RNA, 22 nt, Human
gcuguggcuguacagagaccau

SEQ ID NO: 810970 - RNA, 18 nt, Human
uccagagagggagaagug

SEQ ID NO: 810971 - RNA, 22 nt, Human
caagcauacugugagaguuuua

SEQ ID NO: 810972 - RNA, 22 nt, Human
ucugcacaccgccaggcugacu

SEQ ID NO: 810973 - RNA, 22 nt, Human
gcuggcucccagaggccccagc

SEQ ID NO: 810974 - RNA, 22 nt, Human
uuucuaaguguauugagcuugg

SEQ ID NO: 810975 - RNA, 22 nt, Human
aguuauuacucuuuaacauauu

SEQ ID NO: 810976 - RNA, 22 nt, Human
gaggaaaucuuaggccccaacc

SEQ ID NO: 810977 - RNA, 19 nt, Human
gcuccugggccucacucau

SEQ ID NO: 810978 - RNA, 22 nt, Human
gugcccaguccugccuugacag

SEQ ID NO: 810979 - RNA, 22 nt, Human
ccaggaagcauaauguaguggg

SEQ ID NO: 810980 - RNA, 17 nt, Human
cuuguggccaguuuuua

SEQ ID NO: 810981 - RNA, 22 nt, Human
uuggagaauguuuuccugcagu

SEQ ID NO: 810982 - RNA, 22 nt, Human
ggaaggugcucccuggacagag

SEQ ID NO: 810983 - RNA, 22 nt, Human
aucaucuuaaaucuagaaugug

SEQ ID NO: 810984 - RNA, 22 nt, Human
cagcccaggccgacaguuccuc

SEQ ID NO: 810985 - RNA, 22 nt, Human
ugcagcugguuuagaacuagau

SEQ ID NO: 810986 - RNA, 22 nt, Human
gaguuaauacugaguuuauuaa

SEQ ID NO: 810987 - RNA, 22 nt, Human
agcaccugugugagcuagaugu

SEQ ID NO: 810988 - RNA, 22 nt, Human
acacauuuacauguuuacguau

SEQ ID NO: 810989 - RNA, 22 nt, Human
cauuuuauguuuauggagugcu

SEQ ID NO: 810990 - RNA, 22 nt, Human
gcucaagagagaugcaguucuu

SEQ ID NO: 810991 - RNA, 20 nt, Human
gcuuccuucccagcccccac

SEQ ID NO: 810992 - RNA, 22 nt, Human
cugagaggggaccaggguguuu

SEQ ID NO: 810993 - RNA, 22 nt, Human
uagccggguguugugucaugca

SEQ ID NO: 810994 - RNA, 22 nt, Human
auaaagcaaauaggacuauugc

SEQ ID NO: 810995 - RNA, 22 nt, Human
gauguagacacuuggaggcuua

SEQ ID NO: 810996 - RNA, 22 nt, Human
guccagagguccaggaucaagg

SEQ ID NO: 810997 - RNA, 22 nt, Human
auggcagacgaggcagcagggg

SEQ ID NO: 810998 - RNA, 23 nt, Human
gcaggacaacagagugggaaggc

SEQ ID NO: 810999 - RNA, 20 nt, Human
uaguugccaaaaugcccugc

SEQ ID NO: 811000 - RNA, 21 nt, Human
ccuggacuaaaaccaggccac

SEQ ID NO: 811001 - RNA, 22 nt, Human
uuaaugaccuggaagaagugau

SEQ ID NO: 811002 - RNA, 22 nt, Human
uuguauuuggguaguauagaga

SEQ ID NO: 811003 - RNA, 22 nt, Human
ucaauuauuugauaugaaaggg

SEQ ID NO: 811004 - RNA, 22 nt, Human
accauucugucucuuuacaaau

SEQ ID NO: 811005 - RNA, 22 nt, Human
gcucugcugcuuacuagauggu

SEQ ID NO: 811006 - RNA, 22 nt, Human
uauauuaccugccugaucuaua

SEQ ID NO: 811007 - RNA, 22 nt, Human
ugcagaaacagucauuaaugua

SEQ ID NO: 811008 - RNA, 22 nt, Human
uuuucaguaaugucuacauaau

SEQ ID NO: 811009 - RNA, 22 nt, Human
ucagggaaaagucacacugggu

SEQ ID NO: 811010 - RNA, 22 nt, Human
uucaaagugcuguucaaaguag

SEQ ID NO: 811011 - RNA, 22 nt, Human
aucagaaugcagccagcaguua

SEQ ID NO: 811012 - RNA, 22 nt, Human
gagucagaugaagauaaaaggg

SEQ ID NO: 811013 - RNA, 18 nt, Human
gccagcugcacggcccuc

SEQ ID NO: 811014 - RNA, 17 nt, Human
ucacaguuggucucagu

SEQ ID NO: 811015 - RNA, 22 nt, Human
caggaaauaguucagucaaacu

SEQ ID NO: 811016 - RNA, 22 nt, Human
uggggacacagagguucguugg

SEQ ID NO: 811017 - RNA, 18 nt, Human
ggacccagggccucaccc

SEQ ID NO: 811018 - RNA, 22 nt, Human
cugccauccucaccagagcagc

SEQ ID NO: 811019 - RNA, 22 nt, Human
cacaucaagcauccaugaguuu

SEQ ID NO: 811020 - RNA, 22 nt, Human
acacacaacucauuguguaaua

SEQ ID NO: 811021 - RNA, 22 nt, Human
ucucuuuaaaaauagugaaaua

SEQ ID NO: 811022 - RNA, 22 nt, Human
ggucucuguugccuccaucaag

SEQ ID NO: 811023 - RNA, 22 nt, Human
ucugacuuggcgcucuugucuu

SEQ ID NO: 811024 - RNA, 22 nt, Human
agcuguggucuucaaguugccu

SEQ ID NO: 811025 - RNA, 22 nt, Human
auuaagaucauuguagaagauu

SEQ ID NO: 811026 - RNA, 22 nt, Human
ucuucacaccgggcagcaggaa

SEQ ID NO: 811027 - RNA, 22 nt, Human
ugcuucuuuaaaugauagucaa

SEQ ID NO: 811028 - RNA, 22 nt, Human
gacagcaaagcagagccaaggc

SEQ ID NO: 811029 - RNA, 22 nt, Human
uacaguaacuggaauucuucuu

SEQ ID NO: 811030 - RNA, 21 nt, Human
uagggggcagugggaugcuua

SEQ ID NO: 811031 - RNA, 21 nt, Human
gcaggcuggucaaaccucagu

SEQ ID NO: 811032 - RNA, 22 nt, Human
aaaagccaagguccucuucaga

SEQ ID NO: 811033 - RNA, 22 nt, Human
gugcagagcaagggcugagggc

SEQ ID NO: 811034 - RNA, 22 nt, Human
ggucaagacgggcucugcccuu

SEQ ID NO: 811035 - RNA, 22 nt, Human
gguccagguauguggugugaau

SEQ ID NO: 811036 - RNA, 21 nt, Human
agaaauacagcagggaugauc

SEQ ID NO: 811037 - RNA, 22 nt, Human
ugcaaaugaugaaacuaacuuu

SEQ ID NO: 811038 - RNA, 22 nt, Human
cagcagcaacaauagcggucac

SEQ ID NO: 811039 - RNA, 22 nt, Human
agcuuucugguuacagucuuca

SEQ ID NO: 811040 - RNA, 22 nt, Human
guccucugcccaggucaagguu

SEQ ID NO: 811041 - RNA, 22 nt, Human
cauuucugugacacuuccaucu

SEQ ID NO: 811042 - RNA, 23 nt, Human
cgcccagccucagugaccugggc

SEQ ID NO: 811043 - RNA, 22 nt, Human
gcagugucagugccuggguggu

SEQ ID NO: 811044 - RNA, 22 nt, Human
ccagccugaaaugccucauccu

SEQ ID NO: 811045 - RNA, 22 nt, Human
uuucucuucacugugugccuca

SEQ ID NO: 811046 - RNA, 22 nt, Human
uucaaauuaccacauuugcuua

SEQ ID NO: 811047 - RNA, 22 nt, Human
auauuuuggggugaugugcauc

SEQ ID NO: 811048 - RNA, 18 nt, Human
ucacagugcucuugccua

SEQ ID NO: 811049 - RNA, 22 nt, Human
ccaaggagaaugacaccaugga

SEQ ID NO: 811050 - RNA, 23 nt, Human
ucacagggcacuggcugggguug

SEQ ID NO: 811051 - RNA, 22 nt, Human
uuucuagaaauagagauagagu

SEQ ID NO: 811052 - RNA, 20 nt, Human
cacaggccccaagaccugua

SEQ ID NO: 811053 - RNA, 20 nt, Human
gcuggcugaacugaaagcaa

SEQ ID NO: 811054 - RNA, 22 nt, Human
auauucaucguguagaaauacu

SEQ ID NO: 811055 - RNA, 22 nt, Human
aguuauaaucugcuacugauau

SEQ ID NO: 811056 - RNA, 22 nt, Human
ccagggaggguccuguggcuuc

SEQ ID NO: 811057 - RNA, 22 nt, Human
uaucugauacaacagaauaaca

SEQ ID NO: 811058 - RNA, 22 nt, Human
uaugagaucccuuuuccuagag

SEQ ID NO: 811059 - RNA, 22 nt, Human
aaacaugaauagauauuaaaca

SEQ ID NO: 811060 - RNA, 22 nt, Human
uuccugggcaggacgagagucu

SEQ ID NO: 811061 - RNA, 22 nt, Human
cagaagcacauguuuacaugua

SEQ ID NO: 811062 - RNA, 22 nt, Human
uuugcauucuagaaaaauuucu

SEQ ID NO: 811063 - RNA, 23 nt, Human
cucugcaccaggugguuuucagc

SEQ ID NO: 811064 - RNA, 22 nt, Human
acuggcugcguuccugugagac

SEQ ID NO: 811065 - RNA, 18 nt, Human
cuguucuagaacuccugu

SEQ ID NO: 811066 - RNA, 22 nt, Human
aaacugaaguagauucugaaau

SEQ ID NO: 811067 - RNA, 22 nt, Human
caguaaaagauggaaauagaau

SEQ ID NO: 811068 - RNA, 22 nt, Human
cuucacuguuugguucacagca

SEQ ID NO: 811069 - RNA, 22 nt, Human
agcagggcucuguggagggugg

SEQ ID NO: 811070 - RNA, 22 nt, Human
uccucugcuccaucuuuacugu

SEQ ID NO: 811071 - RNA, 22 nt, Human
agcagauguucccuggucccuu

SEQ ID NO: 811072 - RNA, 22 nt, Human
gcccuccaccagagcccuucuc

SEQ ID NO: 811073 - RNA, 22 nt, Human
uuuauauaacagagacugcuau

SEQ ID NO: 811074 - RNA, 22 nt, Human
gccuccuggauuuuagugccau

SEQ ID NO: 811075 - RNA, 22 nt, Human
uggcagcacggcauccacucuc

SEQ ID NO: 811076 - RNA, 22 nt, Human
cccgacuagcugggauuacagg

SEQ ID NO: 811077 - RNA, 22 nt, Human
gagagaaaaaugagcuucauug

SEQ ID NO: 811078 - RNA, 22 nt, Human
cuuggagugaaugggggcaggu

SEQ ID NO: 811079 - RNA, 18 nt, Human
guggccagccuggucuug

SEQ ID NO: 811080 - RNA, 22 nt, Human
caauuucaaugaggccacaggg

SEQ ID NO: 811081 - RNA, 22 nt, Human
ggagcugugggacgcuguccca

SEQ ID NO: 811082 - RNA, 22 nt, Human
agaagcacaccugaccucuagc

SEQ ID NO: 811083 - RNA, 19 nt, Human
ugaguucugugguucucaa

SEQ ID NO: 811084 - RNA, 20 nt, Human
ccacaguggagacuggagac

SEQ ID NO: 811085 - RNA, 22 nt, Human
cuuuauuccuacaagauuuucu

SEQ ID NO: 811086 - RNA, 22 nt, Human
ccucucaguauugaacuuuaua

SEQ ID NO: 811087 - RNA, 22 nt, Human
ccaggacuuuaaguccagcacu

SEQ ID NO: 811088 - RNA, 22 nt, Human
ggcaggaaaacaaugagccagg

SEQ ID NO: 811089 - RNA, 22 nt, Human
uaguccacagacucuacagcau

SEQ ID NO: 811090 - RNA, 22 nt, Human
aauguacaaaccuucuuuguag

SEQ ID NO: 811091 - RNA, 16 nt, Human
uacauucugaucacug

SEQ ID NO: 811092 - RNA, 22 nt, Human
ucucugaagagucagacauaac

SEQ ID NO: 811093 - RNA, 21 nt, Human
uucccuucugguuuugagaga

SEQ ID NO: 811094 - RNA, 22 nt, Human
guacauuuugagguuaaaacaa

SEQ ID NO: 811095 - RNA, 22 nt, Human
ggaguaggccccgggagagagu

SEQ ID NO: 811096 - RNA, 22 nt, Human
cccuggagugccggaaucaaga

SEQ ID NO: 811097 - RNA, 22 nt, Human
aaguuuguuuuagucuaaugau

SEQ ID NO: 811098 - RNA, 22 nt, Human
agagcagccugugaugaugcac

SEQ ID NO: 811099 - RNA, 22 nt, Human
ugggggagaguuuagaugauuu

SEQ ID NO: 811100 - RNA, 22 nt, Human
uccugcugaccaguaaaugaau

SEQ ID NO: 811101 - RNA, 22 nt, Human
ugcauucaguuggucagcuuuu

SEQ ID NO: 811102 - RNA, 22 nt, Human
accagagaggcugcagugugug

SEQ ID NO: 811103 - RNA, 22 nt, Human
uaaggcagcugagcuucuaaca

SEQ ID NO: 811104 - RNA, 22 nt, Human
ggccucugcuuaugcugaugac

SEQ ID NO: 811105 - RNA, 22 nt, Human
caaggcagcuauugucuccaua

SEQ ID NO: 811106 - RNA, 22 nt, Human
uaccugagcccagugcagcaua

SEQ ID NO: 811107 - RNA, 22 nt, Human
agaaguuuugggaaauacugau

SEQ ID NO: 811108 - RNA, 22 nt, Human
cagaggaagcuggguguggagu

SEQ ID NO: 811109 - RNA, 22 nt, Human
ggccaggaacuuuugggauggg

SEQ ID NO: 811110 - RNA, 23 nt, Human
uuucuguuccucuagcuuugcau

SEQ ID NO: 811111 - RNA, 22 nt, Human
gcucagaggguuuuggccaagu

SEQ ID NO: 811112 - RNA, 22 nt, Human
augagaaauuuauuacaagcua

SEQ ID NO: 811113 - RNA, 23 nt, Human
acaugauacacaauuagcaaacc

SEQ ID NO: 811114 - RNA, 22 nt, Human
aggcacagauuuggggaaagca

SEQ ID NO: 811115 - RNA, 22 nt, Human
acauagcuuaaaugagaagaua

SEQ ID NO: 811116 - RNA, 22 nt, Human
ggcugccuccugcugggcugga

SEQ ID NO: 811117 - RNA, 22 nt, Human
cuggcugggguaccaguugaac

SEQ ID NO: 811118 - RNA, 22 nt, Human
uaaaugucaaugugauuuauaa

SEQ ID NO: 811119 - RNA, 22 nt, Human
ccugggugguuccggcaaggag

SEQ ID NO: 811120 - RNA, 22 nt, Human
gggucuggagauccgggugaag

SEQ ID NO: 811121 - RNA, 19 nt, Human
aggcagcauucuggggcuu

SEQ ID NO: 811122 - RNA, 23 nt, Human
accuuggacuucccagcuuccag

SEQ ID NO: 811123 - RNA, 21 nt, Human
uuauaggcugggguuugcuuu

SEQ ID NO: 811124 - RNA, 22 nt, Human
ggggacugaggcacugaaggug

SEQ ID NO: 811125 - RNA, 23 nt, Human
uugauuucaaaugcagagaacac

SEQ ID NO: 811126 - RNA, 22 nt, Human
gcacuguucuaggugcagagcu

SEQ ID NO: 811127 - RNA, 22 nt, Human
ugcagaagacacaagguaacgu

SEQ ID NO: 811128 - RNA, 22 nt, Human
acagaaguuggaauuagauacu

SEQ ID NO: 811129 - RNA, 22 nt, Human
gccugcccacggggcuggcaua

SEQ ID NO: 811130 - RNA, 22 nt, Human
gagccuggauugucaccgacuu

SEQ ID NO: 811131 - RNA, 22 nt, Human
gagcuagggaggaggcuugcuc

SEQ ID NO: 811132 - RNA, 22 nt, Human
uuccagagguucucagcccugu

SEQ ID NO: 811133 - RNA, 22 nt, Human
gugcaggagccagggguaggaa

SEQ ID NO: 811134 - RNA, 22 nt, Human
auucuucaguauguguggauug

SEQ ID NO: 811135 - RNA, 22 nt, Human
uucuaguuaaaguauguauuag

SEQ ID NO: 811136 - RNA, 22 nt, Human
ugagcuggcaggggcucaggga

SEQ ID NO: 811137 - RNA, 22 nt, Human
acagcugcucuauaucucagcc

SEQ ID NO: 811138 - RNA, 22 nt, Human
ugcgcccagccaagucuggcac

SEQ ID NO: 811139 - RNA, 22 nt, Human
gcaggugaugugaugugagcau

SEQ ID NO: 811140 - RNA, 22 nt, Human
uaaggcaguuuugccugagaua

SEQ ID NO: 811141 - RNA, 22 nt, Human
aaaguacacacagagccaagaa

SEQ ID NO: 811142 - RNA, 22 nt, Human
agugucaugaaucaaagauuau

SEQ ID NO: 811143 - RNA, 22 nt, Human
uggauuuaacagaauaccaggu

SEQ ID NO: 811144 - RNA, 22 nt, Human
ggcccagagcucccuggcaccu

SEQ ID NO: 811145 - RNA, 22 nt, Human
ugggcaggggcccugcuuccgu

SEQ ID NO: 811146 - RNA, 22 nt, Human
cucaaaaugguuaauuuuaaua

SEQ ID NO: 811147 - RNA, 19 nt, Human
cugcugggugcugagggag

SEQ ID NO: 811148 - RNA, 22 nt, Human
aaaugccagcacacgucugugg

SEQ ID NO: 811149 - RNA, 22 nt, Human
agcuuuuaguacguuaaaauug

SEQ ID NO: 811150 - RNA, 22 nt, Human
caguccagagcccaccagagga

SEQ ID NO: 811151 - RNA, 21 nt, Human
agaagcuagucacuaaaucca

SEQ ID NO: 811152 - RNA, 22 nt, Human
uuuucugacucuauugagguau

SEQ ID NO: 811153 - RNA, 22 nt, Human
cuuuggauuuuuaucaggcaau

SEQ ID NO: 811154 - RNA, 22 nt, Human
uguauuucugcuuucucuagua

SEQ ID NO: 811155 - RNA, 18 nt, Human
guuucaugcaugugaaac

SEQ ID NO: 811156 - RNA, 16 nt, Human
ggggaaggcaagaggg

SEQ ID NO: 811157 - RNA, 22 nt, Human
ccuggcagucaggggaguccuu

SEQ ID NO: 811158 - RNA, 22 nt, Human
uggcagcugauuagauggugcc

SEQ ID NO: 811159 - RNA, 23 nt, Human
ccacaguucaucguucacucacc

SEQ ID NO: 811160 - RNA, 22 nt, Human
gguucacauauugagaguauuc

SEQ ID NO: 811161 - RNA, 22 nt, Human
uggccagcacuuagcccuuacc

SEQ ID NO: 811162 - RNA, 22 nt, Human
gccugccugcugucaucugccu

SEQ ID NO: 811163 - RNA, 22 nt, Human
ugcagaaauaacucauauugca

SEQ ID NO: 811164 - RNA, 22 nt, Human
ggguggcaggauuggcaggagu

SEQ ID NO: 811165 - RNA, 22 nt, Human
ccaggacucaaugaccacaggg

SEQ ID NO: 811166 - RNA, 22 nt, Human
aggcccaguuauccuacuuguu

SEQ ID NO: 811167 - RNA, 23 nt, Human
aggcagguuugggcucuucuugu

SEQ ID NO: 811168 - RNA, 22 nt, Human
ucugccaggccacacagggcac

SEQ ID NO: 811169 - RNA, 22 nt, Human
cuuguuuucuaaaacaucauuu

SEQ ID NO: 811170 - RNA, 22 nt, Human
agaggccccaugggauggcggu

SEQ ID NO: 811171 - RNA, 22 nt, Human
aauuuauuuccugccaguacac

SEQ ID NO: 811172 - RNA, 22 nt, Human
uucucucccaugaagcuucuau

SEQ ID NO: 811173 - RNA, 22 nt, Human
ccuuccccaggugcucacuguc

SEQ ID NO: 811174 - RNA, 21 nt, Human
uuucugaaggcaacaucuauc

SEQ ID NO: 811175 - RNA, 22 nt, Human
cagcuucugagcaagccagggg

SEQ ID NO: 811176 - RNA, 22 nt, Human
ggugagcaaagcuucaucugua

SEQ ID NO: 811177 - RNA, 18 nt, Human
uuugcuuuccuucuucag

SEQ ID NO: 811178 - RNA, 22 nt, Human
guccagccugaagagugggggc

SEQ ID NO: 811179 - RNA, 22 nt, Human
cucaaauauguggucagaaagc

SEQ ID NO: 811180 - RNA, 23 nt, Human
uggacaggacccccuucggaccc

SEQ ID NO: 811181 - RNA, 22 nt, Human
aacagcagcaugacagcugggu

SEQ ID NO: 811182 - RNA, 22 nt, Human
uggggaaaaugcagaagauuac

SEQ ID NO: 811183 - RNA, 22 nt, Human
aagauacacggucaacucucaa

SEQ ID NO: 811184 - RNA, 22 nt, Human
aauaaaucaauccuauugguag

SEQ ID NO: 811185 - RNA, 22 nt, Human
auucacacuguauacacaggau

SEQ ID NO: 811186 - RNA, 17 nt, Human
cauguauuugaaacaga

SEQ ID NO: 811187 - RNA, 18 nt, Human
gccagagguacuacugau

SEQ ID NO: 811188 - RNA, 22 nt, Human
gaaccauuguugaaaagaauag

SEQ ID NO: 811189 - RNA, 22 nt, Human
cuggcuggacuugugcauguca

SEQ ID NO: 811190 - RNA, 22 nt, Human
ucugggcccuaaaccagcucua

SEQ ID NO: 811191 - RNA, 22 nt, Human
ggccugcuaaccugaaacggag

SEQ ID NO: 811192 - RNA, 22 nt, Human
uuaagagaaggaaugaccuagc

SEQ ID NO: 811193 - RNA, 22 nt, Human
guuucaaguagcugcugauuau

SEQ ID NO: 811194 - RNA, 22 nt, Human
gcccagagggaagaggugucau

SEQ ID NO: 811195 - RNA, 22 nt, Human
gaugaaauuugaaaauaguguu

SEQ ID NO: 811196 - RNA, 22 nt, Human
uuauucauuaacagggaccaaa

SEQ ID NO: 811197 - RNA, 16 nt, Human
gaaggcuuacugcagg

SEQ ID NO: 811198 - RNA, 22 nt, Human
uucuaugugcuggagaauauuu

SEQ ID NO: 811199 - RNA, 21 nt, Human
uccaggacuugagaauuccag

SEQ ID NO: 811200 - RNA, 22 nt, Human
gaggcagagucacaaagagucu

SEQ ID NO: 811201 - RNA, 22 nt, Human
ggccagcugccaccagcccuau

SEQ ID NO: 811202 - RNA, 22 nt, Human
gcugcugccgcggccgcuggga

SEQ ID NO: 811203 - RNA, 22 nt, Human
gcaugcaacucccaguucugcc

SEQ ID NO: 811204 - RNA, 22 nt, Human
gggaugccaguccuggcccugc

SEQ ID NO: 811205 - RNA, 22 nt, Human
ccuggggagccgccugagcccc

SEQ ID NO: 811206 - RNA, 22 nt, Human
gaaaggaaauugagggacgcau

SEQ ID NO: 811207 - RNA, 22 nt, Human
gaagagagagcccugggguccg

SEQ ID NO: 811208 - RNA, 23 nt, Human
gugcgccaggacaaccugacgga

SEQ ID NO: 811209 - RNA, 23 nt, Human
augcaacauugccaguaugggca

SEQ ID NO: 811210 - RNA, 22 nt, Human
cuccuggcuaugacuacauuuc

SEQ ID NO: 811211 - RNA, 22 nt, Human
aggcucugcagugcuggaggac

SEQ ID NO: 811212 - RNA, 22 nt, Human
aaggugaacugguaaugacaga

SEQ ID NO: 811213 - RNA, 22 nt, Human
aguccauacauugagaauaaca

SEQ ID NO: 811214 - RNA, 22 nt, Human
acuucuugggacccuggcaccg

SEQ ID NO: 811215 - RNA, 22 nt, Human
gacaggguacgggcuaggcaca

SEQ ID NO: 811216 - RNA, 22 nt, Human
agcgcaggaacacgucugccuu

SEQ ID NO: 811217 - RNA, 22 nt, Human
gguggccuccagggcauaggug

SEQ ID NO: 811218 - RNA, 22 nt, Human
uauugcuuucucagacguuuag

SEQ ID NO: 811219 - RNA, 22 nt, Human
augcaaauguuuaaguuacuau

SEQ ID NO: 811220 - RNA, 22 nt, Human
caguccugucuuuaugacuuca

SEQ ID NO: 811221 - RNA, 22 nt, Human
ggaguggcagcuaggcugucag

SEQ ID NO: 811222 - RNA, 22 nt, Human
uaaacaauuccucucuaggcau

SEQ ID NO: 811223 - RNA, 18 nt, Human
gucagaggauggggaaau

SEQ ID NO: 811224 - RNA, 22 nt, Human
ugccugggagugaccaagacuc

SEQ ID NO: 811225 - RNA, 22 nt, Human
gagguggucgaggagggguacc

SEQ ID NO: 811226 - RNA, 22 nt, Human
uccuggggaggucgaggcugag

SEQ ID NO: 811227 - RNA, 22 nt, Human
ugcccuggaaaugagaggugug

SEQ ID NO: 811228 - RNA, 22 nt, Human
ucaggagcagggucuguuacca

SEQ ID NO: 811229 - RNA, 20 nt, Human
aggccccaggaaacucucag

SEQ ID NO: 811230 - RNA, 22 nt, Human
ugcagcugauuaaagggcagac

SEQ ID NO: 811231 - RNA, 20 nt, Human
cacaggcuauaugagagcca

SEQ ID NO: 811232 - RNA, 22 nt, Human
cuggcucaugugaugagggcaa

SEQ ID NO: 811233 - RNA, 22 nt, Human
auuuugcuuuauguaaauaugu

SEQ ID NO: 811234 - RNA, 22 nt, Human
ccagcucuagccccauguggcu

SEQ ID NO: 811235 - RNA, 22 nt, Human
gcuggugauugccucaggaggc

SEQ ID NO: 811236 - RNA, 20 nt, Human
cagggcucugggccuggccu

SEQ ID NO: 811237 - RNA, 22 nt, Human
cccagaggugcuucagaggugc

SEQ ID NO: 811238 - RNA, 22 nt, Human
uugaaugauccuaucuagcaca

SEQ ID NO: 811239 - RNA, 22 nt, Human
ggguagggugacuuaggcuggc

SEQ ID NO: 811240 - RNA, 22 nt, Human
uucuaaacacuacgggauuugg

SEQ ID NO: 811241 - RNA, 22 nt, Human
guggcagucggaagucaggaga

SEQ ID NO: 811242 - RNA, 22 nt, Human
auaacaugagccagauugaaag

SEQ ID NO: 811243 - RNA, 22 nt, Human
gacuccagguguccaggccucc

SEQ ID NO: 811244 - RNA, 22 nt, Human
ucuucccauuaguaaugaagug

SEQ ID NO: 811245 - RNA, 22 nt, Human
ggcuggagauaugucuggaaca

SEQ ID NO: 811246 - RNA, 22 nt, Human
uuuaagaaguuauguuauaaau

SEQ ID NO: 811247 - RNA, 22 nt, Human
uuagaucauuuugaacuaauuu

SEQ ID NO: 811248 - RNA, 22 nt, Human
gauaccuuuuguuggaauuucc

SEQ ID NO: 811249 - RNA, 22 nt, Human
gcagugauuggaucagagaugg

SEQ ID NO: 811250 - RNA, 21 nt, Human
aaauccaaacacuaguccaca

SEQ ID NO: 811251 - RNA, 22 nt, Human
uauguauucucagauuuacuaa

SEQ ID NO: 811252 - RNA, 22 nt, Human
agcuuagucacucuuaaauuua

SEQ ID NO: 811253 - RNA, 22 nt, Human
cuucuuucuuuugaucacaggu

SEQ ID NO: 811254 - RNA, 22 nt, Human
agcuuucacugauaugcuuuga

SEQ ID NO: 811255 - RNA, 22 nt, Human
uaaagugcuuaugauaaccaag

SEQ ID NO: 811256 - RNA, 22 nt, Human
uggcccaaagcagcccagcagg

SEQ ID NO: 811257 - RNA, 22 nt, Human
auuuccugaucuguaaaauagc

SEQ ID NO: 811258 - RNA, 22 nt, Human
agcuuugcuucugggagccaag

SEQ ID NO: 811259 - RNA, 22 nt, Human
cuggaagguucuuugugugccu

SEQ ID NO: 811260 - RNA, 22 nt, Human
ucauuuguuacagccacauacc

SEQ ID NO: 811261 - RNA, 22 nt, Human
ugggcagauguggcucuccuug

SEQ ID NO: 811262 - RNA, 22 nt, Human
agcaccagagcuaugggccugc

SEQ ID NO: 811263 - RNA, 18 nt, Human
ugguggugacagggucau

SEQ ID NO: 811264 - RNA, 22 nt, Human
cagggagaucuuggcuccuggu

SEQ ID NO: 811265 - RNA, 22 nt, Human
gaauauuuucaguacagauggu

SEQ ID NO: 811266 - RNA, 22 nt, Human
cuggguggaaagugcugagaau

SEQ ID NO: 811267 - RNA, 20 nt, Human
aggcuuggcuuggcaggaac

SEQ ID NO: 811268 - RNA, 22 nt, Human
aggcacuuaaccuacuaacuga

SEQ ID NO: 811269 - RNA, 22 nt, Human
ugcagagggagugacgguucac

SEQ ID NO: 811270 - RNA, 22 nt, Human
uuucaguguaucuuccaaaagc

SEQ ID NO: 811271 - RNA, 22 nt, Human
aggggcugccuggcuuggcacu

SEQ ID NO: 811272 - RNA, 22 nt, Human
ccauggaacucaguaaauuaua

SEQ ID NO: 811273 - RNA, 22 nt, Human
ggagcggcagauggagugggag

SEQ ID NO: 811274 - RNA, 22 nt, Human
auauuauaaguuauuucaaguu

SEQ ID NO: 811275 - RNA, 22 nt, Human
gggcagugaauauuggugggaa

SEQ ID NO: 811276 - RNA, 22 nt, Human
gaccacagauuccuaaguggca

SEQ ID NO: 811277 - RNA, 22 nt, Human
gggccugcuccccaucgcugcu

SEQ ID NO: 811278 - RNA, 22 nt, Human
acaggcagggaccucuugaguu

SEQ ID NO: 811279 - RNA, 17 nt, Human
uucuccucuguguccuu

SEQ ID NO: 811280 - RNA, 22 nt, Human
aaauuccagaaacucaguauau

SEQ ID NO: 811281 - RNA, 22 nt, Human
gggauccauccgugcagcagag

SEQ ID NO: 811282 - RNA, 22 nt, Human
aauuuuaucucuaagcaggcuu

SEQ ID NO: 811283 - RNA, 22 nt, Human
gccugcugaagccagagugugu

SEQ ID NO: 811284 - RNA, 22 nt, Human
augcagcugucagggagaacau

SEQ ID NO: 811285 - RNA, 22 nt, Human
guuucucaguuuggucugcaga

SEQ ID NO: 811286 - RNA, 22 nt, Human
agcuuugcaaccugaggccagu

SEQ ID NO: 811287 - RNA, 22 nt, Human
ugaaugauuugggugcauucag

SEQ ID NO: 811288 - RNA, 22 nt, Human
aagcagaacugggaaguagugg

SEQ ID NO: 811289 - RNA, 22 nt, Human
guucugggucuggacacacaga

SEQ ID NO: 811290 - RNA, 22 nt, Human
uuagcuuuuaagugugcuacau

SEQ ID NO: 811291 - RNA, 22 nt, Human
cuaagcaagaaugagugcaaca

SEQ ID NO: 811292 - RNA, 22 nt, Human
gaggaggcuaagugggcucugg

SEQ ID NO: 811293 - RNA, 22 nt, Human
aauaaaggcaccauaaggcaaa

SEQ ID NO: 811294 - RNA, 22 nt, Human
uggggacccggacuccuggguc

SEQ ID NO: 811295 - RNA, 22 nt, Human
cugcuguguuggcauuggauag

SEQ ID NO: 811296 - RNA, 22 nt, Human
ugcaauaacccaguaucuguga

SEQ ID NO: 811297 - RNA, 22 nt, Human
cucagggccaaggaugcuguug

SEQ ID NO: 811298 - RNA, 22 nt, Human
acaaauuuggugagaguaaaua

SEQ ID NO: 811299 - RNA, 22 nt, Human
cugagagaguaaaguagaauua

SEQ ID NO: 811300 - RNA, 22 nt, Human
ccauggccgccgcugcucagga

SEQ ID NO: 811301 - RNA, 22 nt, Human
gaaauucaaaaugucaguauag

SEQ ID NO: 811302 - RNA, 22 nt, Human
ccagcugugcuguuggcuuguc

SEQ ID NO: 811303 - RNA, 19 nt, Human
uuugauagggcauaauaua

SEQ ID NO: 811304 - RNA, 22 nt, Human
ugcuucaaggacacugacuuuu

SEQ ID NO: 811305 - RNA, 22 nt, Human
aauuuaucuuuaguaagcuucu

SEQ ID NO: 811306 - RNA, 22 nt, Human
cugggagugaaaggagggcugc

SEQ ID NO: 811307 - RNA, 22 nt, Human
gcagaaggauccgcaggugcaa

SEQ ID NO: 811308 - RNA, 22 nt, Human
aaaguguggcacaagucacauc

SEQ ID NO: 811309 - RNA, 22 nt, Human
acccaggcuggagugcaguggu

SEQ ID NO: 811310 - RNA, 22 nt, Human
uccagcagaaaagagguaggga

SEQ ID NO: 811311 - RNA, 23 nt, Human
ggucccaguggagaggccucacc

SEQ ID NO: 811312 - RNA, 22 nt, Human
ucaguguucuuauuuaauuagg

SEQ ID NO: 811313 - RNA, 18 nt, Human
gcugcugguggagggagc

SEQ ID NO: 811314 - RNA, 22 nt, Human
gagcagugagugaauguugccu

SEQ ID NO: 811315 - RNA, 23 nt, Human
aaacuacaacgccaggcacugag

SEQ ID NO: 811316 - RNA, 22 nt, Human
ugggccagaaguaugcauguuu

SEQ ID NO: 811317 - RNA, 22 nt, Human
auauacuuccccauuauggggg

SEQ ID NO: 811318 - RNA, 22 nt, Human
cagcccugaguuagcccacgga

SEQ ID NO: 811319 - RNA, 22 nt, Human
uaagaaacaugauuaauggcag

SEQ ID NO: 811320 - RNA, 23 nt, Human
agcuaaggaagcugaggcacagu

SEQ ID NO: 811321 - RNA, 22 nt, Human
uggcagaauuuuaaagacagau

SEQ ID NO: 811322 - RNA, 22 nt, Human
ccugugggagggagcggcugga

SEQ ID NO: 811323 - RNA, 22 nt, Human
ggugcaugugagaaagacuggg

SEQ ID NO: 811324 - RNA, 22 nt, Human
uagcuuuggauucuuuggggaa

SEQ ID NO: 811325 - RNA, 17 nt, Human
ggaccagggguugccau

SEQ ID NO: 811326 - RNA, 22 nt, Human
ugagccugcaauaagcacagcc

SEQ ID NO: 811327 - RNA, 22 nt, Human
acacuuaacuucugagaauaaa

SEQ ID NO: 811328 - RNA, 22 nt, Human
caggcagaggaagucugggucu

SEQ ID NO: 811329 - RNA, 22 nt, Human
uauccauaguuuauagaucaag

SEQ ID NO: 811330 - RNA, 22 nt, Human
caggacaguuugcuuugcccug

SEQ ID NO: 811331 - RNA, 22 nt, Human
uggcaggaaaaagggccagagg

SEQ ID NO: 811332 - RNA, 22 nt, Human
uagcuuaaggaguaccagauca

SEQ ID NO: 811333 - RNA, 22 nt, Human
cccagcagccagaaugaggagc

SEQ ID NO: 811334 - RNA, 22 nt, Human
acccaggguagaaccucagagc

SEQ ID NO: 811335 - RNA, 22 nt, Human
acuaaaaacuacugccaauagc

SEQ ID NO: 811336 - RNA, 22 nt, Human
cuggcugucuuggaggaaggag

SEQ ID NO: 811337 - RNA, 16 nt, Human
uugaaugacugugugc

SEQ ID NO: 811338 - RNA, 20 nt, Human
cuuuggagaaagcuaacaga

SEQ ID NO: 811339 - RNA, 22 nt, Human
aauauccuuuccagaguacagu

SEQ ID NO: 811340 - RNA, 22 nt, Human
uucaaagauaauuaccaaacau

SEQ ID NO: 811341 - RNA, 22 nt, Human
gagcucagagccuauaguuggu

SEQ ID NO: 811342 - RNA, 22 nt, Human
ucagcaggucugaggcggggcc

SEQ ID NO: 811343 - RNA, 22 nt, Human
uggcagccucagacaaggaccu

SEQ ID NO: 811344 - RNA, 22 nt, Human
cuuuaugguaaguauagaugac

SEQ ID NO: 811345 - RNA, 22 nt, Human
ggcaggguuucuccauucugcc

SEQ ID NO: 811346 - RNA, 22 nt, Human
guuucucaagcuugaaugcaca

SEQ ID NO: 811347 - RNA, 22 nt, Human
agcugccagaugacagugcuau

SEQ ID NO: 811348 - RNA, 22 nt, Human
cuacauuucccagcugccuucc

SEQ ID NO: 811349 - RNA, 22 nt, Human
uuugcaaaguccauugaaguua

SEQ ID NO: 811350 - RNA, 22 nt, Human
uuaaguguuuaguaagagaugu

SEQ ID NO: 811351 - RNA, 22 nt, Human
aacauugccaugguuaauuuua

SEQ ID NO: 811352 - RNA, 22 nt, Human
ucccgcuucuuccgaaucgcga

SEQ ID NO: 811353 - RNA, 22 nt, Human
aacacaguuuuccaaaauagag

SEQ ID NO: 811354 - RNA, 22 nt, Human
gaugaaaaauugcugugucaua

SEQ ID NO: 811355 - RNA, 22 nt, Human
ugucugaacaaacucugccucc

SEQ ID NO: 811356 - RNA, 20 nt, Human
agggucagagagcgugagug

SEQ ID NO: 811357 - RNA, 22 nt, Human
gggcagcuccuguggaauccac

SEQ ID NO: 811358 - RNA, 21 nt, Human
agccugggaggcggagguugc

SEQ ID NO: 811359 - RNA, 22 nt, Human
aacaaguuagggucuuuuacuu

SEQ ID NO: 811360 - RNA, 22 nt, Human
guuuugcagagugcaauaaauc

SEQ ID NO: 811361 - RNA, 23 nt, Human
acagaggcuuaaaugaguggcag

SEQ ID NO: 811362 - RNA, 22 nt, Human
ugcuggcuuuuugguccuugcu

SEQ ID NO: 811363 - RNA, 22 nt, Human
uuucaaaugcaugucuuuccuc

SEQ ID NO: 811364 - RNA, 22 nt, Human
caggguccggcugccuggcugu

SEQ ID NO: 811365 - RNA, 22 nt, Human
uucucacaggauuucuuuuagu

SEQ ID NO: 811366 - RNA, 22 nt, Human
uuuaccaagcuuuaauuacaua

SEQ ID NO: 811367 - RNA, 22 nt, Human
uuauuauuuuguguacagcaaa

SEQ ID NO: 811368 - RNA, 22 nt, Human
gaggcugcccaacuggagugga

SEQ ID NO: 811369 - RNA, 22 nt, Human
gcagggaagacccggagcagcg

SEQ ID NO: 811370 - RNA, 19 nt, Human
ugcaaauguaggaagaaua

SEQ ID NO: 811371 - RNA, 22 nt, Human
uauuucuaagcuguaagucuga

SEQ ID NO: 811372 - RNA, 22 nt, Human
gcagcagcucaguucugggagg

SEQ ID NO: 811373 - RNA, 22 nt, Human
gcagggauugugcagggggcua

SEQ ID NO: 811374 - RNA, 22 nt, Human
agcagggcuccauuucacugcc

SEQ ID NO: 811375 - RNA, 22 nt, Human
uuugacaaaggaaaaaugcaca

SEQ ID NO: 811376 - RNA, 22 nt, Human
uuucagaaauggcacugaaauc

SEQ ID NO: 811377 - RNA, 22 nt, Human
cugccucuguugggcauggucu

SEQ ID NO: 811378 - RNA, 22 nt, Human
gagcuuuguagcaggaaggaag

SEQ ID NO: 811379 - RNA, 22 nt, Human
aguggcuaugcaugacuggaau

SEQ ID NO: 811380 - RNA, 22 nt, Human
gagcaggcuugcagagaagggg

SEQ ID NO: 811381 - RNA, 22 nt, Human
uccaggagucuagccucaggcc

SEQ ID NO: 811382 - RNA, 22 nt, Human
cagugacguaaacugcaugugc

SEQ ID NO: 811383 - RNA, 22 nt, Human
aagccaggaauggagucuucgc

SEQ ID NO: 811384 - RNA, 22 nt, Human
guggcagagggugagcuggacu

SEQ ID NO: 811385 - RNA, 22 nt, Human
cacccucccgucagccccuggg

SEQ ID NO: 811386 - RNA, 22 nt, Human
augggcagaguggggacaggaa

SEQ ID NO: 811387 - RNA, 22 nt, Human
cuggcuccaucacugggugaug

SEQ ID NO: 811388 - RNA, 22 nt, Human
ucucauaauagcauuucucacc

SEQ ID NO: 811389 - RNA, 22 nt, Human
cuccagugcgcaggacagcccc

SEQ ID NO: 811390 - RNA, 22 nt, Human
ggccccagguagaagauauaga

SEQ ID NO: 811391 - RNA, 22 nt, Human
uggggaugaaacccaggcaucu

SEQ ID NO: 811392 - RNA, 22 nt, Human
cagggugcagugucgcugcuag

SEQ ID NO: 811393 - RNA, 22 nt, Human
uucuuauaaguuaauauuucca

SEQ ID NO: 811394 - RNA, 22 nt, Human
ugggcagaguagcucagaagaa

SEQ ID NO: 811395 - RNA, 22 nt, Human
aaggcuggguuugggaugugau

SEQ ID NO: 811396 - RNA, 22 nt, Human
uugcagcuguugcaaagucucu

SEQ ID NO: 811397 - RNA, 22 nt, Human
ccaucaguuuuaucugacaaaa

SEQ ID NO: 811398 - RNA, 22 nt, Human
gacaauaagaacagauacugug

SEQ ID NO: 811399 - RNA, 22 nt, Human
gcugugagccgcugcugagcau

SEQ ID NO: 811400 - RNA, 22 nt, Human
auuauuaaagcuacaucaagga

SEQ ID NO: 811401 - RNA, 22 nt, Human
aaaguacaggaaagccuagcca

SEQ ID NO: 811402 - RNA, 22 nt, Human
gugccugguauguagguagcgg

SEQ ID NO: 811403 - RNA, 22 nt, Human
uucuaguuuugccuuaucaaca

SEQ ID NO: 811404 - RNA, 22 nt, Human
ccugucuggccaccagggcgau

SEQ ID NO: 811405 - RNA, 22 nt, Human
caccccuaccugagucaggagu

SEQ ID NO: 811406 - RNA, 22 nt, Human
aggcugagccacggggcuggcu

SEQ ID NO: 811407 - RNA, 22 nt, Human
auuugucacugagagaguuaga

SEQ ID NO: 811408 - RNA, 22 nt, Human
aagaagaugguuaacuuucagu

SEQ ID NO: 811409 - RNA, 22 nt, Human
ucugcaagggguucuuuaggcc

SEQ ID NO: 811410 - RNA, 22 nt, Human
agcagcugucccuuaacaucag

SEQ ID NO: 811411 - RNA, 22 nt, Human
ugucuuuuaccuaaugagcugg

SEQ ID NO: 811412 - RNA, 20 nt, Human
gcagaugagacucacagagg

SEQ ID NO: 811413 - RNA, 22 nt, Human
ugcuggaggccagaagucugag

SEQ ID NO: 811414 - RNA, 22 nt, Human
cuacagagaacucagcugcccu

SEQ ID NO: 811415 - RNA, 22 nt, Human
cagcuuugauucacugccuagu

SEQ ID NO: 811416 - RNA, 23 nt, Human
ggacacagagauaagugagacaa

SEQ ID NO: 811417 - RNA, 22 nt, Human
gcagagccaggcuggggcaggu

SEQ ID NO: 811418 - RNA, 22 nt, Human
uugucugagagauggcagaggu

SEQ ID NO: 811419 - RNA, 22 nt, Human
uaccucaugcuguacagcacgu

SEQ ID NO: 811420 - RNA, 22 nt, Human
cucauugcagcugcauuacugu

SEQ ID NO: 811421 - RNA, 22 nt, Human
aaagacauuagcuuagauguca

SEQ ID NO: 811422 - RNA, 22 nt, Human
caaggaaggagagaugaugggu

SEQ ID NO: 811423 - RNA, 22 nt, Human
uacaguuaaaaaguucaauggu

SEQ ID NO: 811424 - RNA, 22 nt, Human
gagugcuccgucuuggacaggg

SEQ ID NO: 811425 - RNA, 22 nt, Human
aauucacagaaccauggugcuc

SEQ ID NO: 811426 - RNA, 22 nt, Human
aguuuacacuaugaaaagacua

SEQ ID NO: 811427 - RNA, 22 nt, Human
cugggaguuucuagagaaagac

SEQ ID NO: 811428 - RNA, 22 nt, Human
caggccucaggggcucaggcug

SEQ ID NO: 811429 - RNA, 22 nt, Human
ggcagcuguuuguccuccuguu

SEQ ID NO: 811430 - RNA, 17 nt, Human
accagccucuccugggg

SEQ ID NO: 811431 - RNA, 22 nt, Human
ggcuagggaucuagaccaggac

SEQ ID NO: 811432 - RNA, 22 nt, Human
agcugggaagacuggaagacag

SEQ ID NO: 811433 - RNA, 22 nt, Human
gggcuccagcccgggaccaggu

SEQ ID NO: 811434 - RNA, 23 nt, Human
ucacaucugccguaguguauucu

SEQ ID NO: 811435 - RNA, 22 nt, Human
aaacaguggccaauucuggaga

SEQ ID NO: 811436 - RNA, 22 nt, Human
cugagccaguagucagggacaa

SEQ ID NO: 811437 - RNA, 22 nt, Human
uuuucaguuauagaaugguaga

SEQ ID NO: 811438 - RNA, 22 nt, Human
uuucucagucacaugaaccaau

SEQ ID NO: 811439 - RNA, 21 nt, Human
uccuccuguagaggguccugg

SEQ ID NO: 811440 - RNA, 22 nt, Human
uucaugugucuguagcacauau

SEQ ID NO: 811441 - RNA, 20 nt, Human
cuccugguccaggagccuga

SEQ ID NO: 811442 - RNA, 22 nt, Human
ggcugcccucgucuacugccca

SEQ ID NO: 811443 - RNA, 22 nt, Human
gcuacugauugaccuuggagag

SEQ ID NO: 811444 - RNA, 22 nt, Human
cauucacagcaggucagcugaa

SEQ ID NO: 811445 - RNA, 18 nt, Human
aggucugaggaagagccu

SEQ ID NO: 811446 - RNA, 22 nt, Human
aguuuaacuuuggaaaacuaua

SEQ ID NO: 811447 - RNA, 22 nt, Human
gagaaaauagcauguguaguau

SEQ ID NO: 811448 - RNA, 22 nt, Human
agcagcuguacuuucaucuguu

SEQ ID NO: 811449 - RNA, 22 nt, Human
ucucuuugucugcucuuaguug

SEQ ID NO: 811450 - RNA, 22 nt, Human
ucagaggcaucauucauaguua

SEQ ID NO: 811451 - RNA, 22 nt, Human
gaggaaaucauuccagaaaagg

SEQ ID NO: 811452 - RNA, 22 nt, Human
uucuggaaguguuagaaucugg

SEQ ID NO: 811453 - RNA, 19 nt, Human
agcagggacauggaacuuu

SEQ ID NO: 811454 - RNA, 21 nt, Human
uaauaauuccacuacagagua

SEQ ID NO: 811455 - RNA, 22 nt, Human
cacuugaaaguaaugguugugc

SEQ ID NO: 811456 - RNA, 22 nt, Human
aucuucugggcagugaaaauug

SEQ ID NO: 811457 - RNA, 19 nt, Human
augucucuguagcacauac

SEQ ID NO: 811458 - RNA, 22 nt, Human
cagcccacgucagggccacuca

SEQ ID NO: 811459 - RNA, 22 nt, Human
aaaguacaugagauucaagggg

SEQ ID NO: 811460 - RNA, 22 nt, Human
ggcaggcacuguguuuuguguu

SEQ ID NO: 811461 - RNA, 22 nt, Human
cugggagccuggcaguugcuga

SEQ ID NO: 811462 - RNA, 22 nt, Human
gcugggcaccggagagacccca

SEQ ID NO: 811463 - RNA, 21 nt, Human
ugaucauuuguguaaaggaga

SEQ ID NO: 811464 - RNA, 22 nt, Human
ugggaagcugcauuuuaacaag

SEQ ID NO: 811465 - RNA, 22 nt, Human
agucagaauucgaucccagguc

SEQ ID NO: 811466 - RNA, 22 nt, Human
aguucaauagaaaaauauauua

SEQ ID NO: 811467 - RNA, 22 nt, Human
uggaagcucaaggcagggugag

SEQ ID NO: 811468 - RNA, 21 nt, Human
agagggagaguggcccuucca

SEQ ID NO: 811469 - RNA, 21 nt, Human
uguguaauauguauaagaaua

SEQ ID NO: 811470 - RNA, 22 nt, Human
gaggguggccuuuagagcccau

SEQ ID NO: 811471 - RNA, 22 nt, Human
gaaggcugcauggaggcugugg

SEQ ID NO: 811472 - RNA, 22 nt, Human
gccaccagugggggccugggca

SEQ ID NO: 811473 - RNA, 22 nt, Human
uuuacaaggaucaagggaucuc

SEQ ID NO: 811474 - RNA, 22 nt, Human
aggaaaggccucagcagaaacc

SEQ ID NO: 811475 - RNA, 22 nt, Human
cccugguguggaugugauuggc

SEQ ID NO: 811476 - RNA, 22 nt, Human
ugcagcugugccugaaaaguac

SEQ ID NO: 811477 - RNA, 22 nt, Human
cuggcugccuggagugagggag

SEQ ID NO: 811478 - RNA, 22 nt, Human
uccuggagagugggcgagcaca

SEQ ID NO: 811479 - RNA, 22 nt, Human
cugccuguuuccucuugcuccc

SEQ ID NO: 811480 - RNA, 22 nt, Human
uggcacagcuugucauaaacuc

SEQ ID NO: 811481 - RNA, 22 nt, Human
aaauagauuucucuggguuugu

SEQ ID NO: 811482 - RNA, 23 nt, Human
agugaucuguguuugaagaaugc

SEQ ID NO: 811483 - RNA, 23 nt, Human
gcaggaacucaggguaggcagca

SEQ ID NO: 811484 - RNA, 22 nt, Human
ggggaaggaaaguuauuagcag

SEQ ID NO: 811485 - RNA, 22 nt, Human
agcaggcuaggaaccucacugc

SEQ ID NO: 811486 - RNA, 22 nt, Human
ucucucauagagaaaaauauau

SEQ ID NO: 811487 - RNA, 21 nt, Human
caggaaaucagugugaauuag

SEQ ID NO: 811488 - RNA, 22 nt, Human
acagccugcagccccaggucgc

SEQ ID NO: 811489 - RNA, 21 nt, Human
ucauauuucucuugcuauugu

SEQ ID NO: 811490 - RNA, 22 nt, Human
cacagugaauuucaaguguugu

SEQ ID NO: 811491 - RNA, 22 nt, Human
uauggaaaguguuuucuucugu

SEQ ID NO: 811492 - RNA, 19 nt, Human
cugcuccaggagcugggga

SEQ ID NO: 811493 - RNA, 20 nt, Human
gugaagggagucaggugugc

SEQ ID NO: 811494 - RNA, 22 nt, Human
agccagggacgcugcaggcuac

SEQ ID NO: 811495 - RNA, 22 nt, Human
acugaaauuuauauuuugggca

SEQ ID NO: 811496 - RNA, 22 nt, Human
augguucauauuaugcaucuga

SEQ ID NO: 811497 - RNA, 22 nt, Human
uggcccugucccuggagccugg

SEQ ID NO: 811498 - RNA, 22 nt, Human
aaaugcagcugggcaugagagg

SEQ ID NO: 811499 - RNA, 22 nt, Human
caaagucuucaguugauucuga

SEQ ID NO: 811500 - RNA, 22 nt, Human
cagccagguucaaguccuuaua

SEQ ID NO: 811501 - RNA, 22 nt, Human
ggcaggcaacggaccacuaguc

SEQ ID NO: 811502 - RNA, 22 nt, Human
ucuaaacugcuagcugacugag

SEQ ID NO: 811503 - RNA, 22 nt, Human
cagcaccuguuagcauuaaaua

SEQ ID NO: 811504 - RNA, 22 nt, Human
uccuuuuuauaguuagagaaac

SEQ ID NO: 811505 - RNA, 22 nt, Human
uggcucucccaauaccuuucug

SEQ ID NO: 811506 - RNA, 22 nt, Human
uugagcaaguguacgagcaggc

SEQ ID NO: 811507 - RNA, 19 nt, Human
uuuuuacaaguagguguga

SEQ ID NO: 811508 - RNA, 22 nt, Human
gggcugaguuccugccucacuc

SEQ ID NO: 811509 - RNA, 22 nt, Human
gcucagcuggagagggacgggu

SEQ ID NO: 811510 - RNA, 22 nt, Human
aggagcaaaugaugagacagca

SEQ ID NO: 811511 - RNA, 22 nt, Human
ccaggacagggagacgggagcc

SEQ ID NO: 811512 - RNA, 22 nt, Human
ccaggaggaugaggggcauaga

SEQ ID NO: 811513 - RNA, 22 nt, Human
guucugaguggcccaagcccug

SEQ ID NO: 811514 - RNA, 22 nt, Human
gugauaaaauagaaacaguggu

SEQ ID NO: 811515 - RNA, 22 nt, Human
gggaaggcagugucugguugaa

SEQ ID NO: 811516 - RNA, 22 nt, Human
caggcacagcuaagacuggcca

SEQ ID NO: 811517 - RNA, 19 nt, Human
cagagcagugguuccugaa

SEQ ID NO: 811518 - RNA, 22 nt, Human
auccaguagugacuuuuacauu

SEQ ID NO: 811519 - RNA, 22 nt, Human
gcaaggcugagcacauuugcau

SEQ ID NO: 811520 - RNA, 22 nt, Human
ucucucccaaaucugcagauag

SEQ ID NO: 811521 - RNA, 22 nt, Human
agauacaaaggccuacagagca

SEQ ID NO: 811522 - RNA, 22 nt, Human
ucccagggacccagccugauac

SEQ ID NO: 811523 - RNA, 22 nt, Human
agagcccugaagcagagcuaaa

SEQ ID NO: 811524 - RNA, 22 nt, Human
uugauucagaaaaagauggaga

SEQ ID NO: 811525 - RNA, 22 nt, Human
agcagggcuuugcagacuuggg

SEQ ID NO: 811526 - RNA, 22 nt, Human
uggaggcaguuuaagucugaga

SEQ ID NO: 811527 - RNA, 22 nt, Human
agucccuugagggaguacuguu

SEQ ID NO: 811528 - RNA, 22 nt, Human
aagcugccagcugagcugaggc

SEQ ID NO: 811529 - RNA, 22 nt, Human
ggcagauguugcagugagcaga

SEQ ID NO: 811530 - RNA, 22 nt, Human
cugucucagcaggaagucauca

SEQ ID NO: 811531 - RNA, 22 nt, Human
cugaggcugggcauggggucca

SEQ ID NO: 811532 - RNA, 22 nt, Human
gaguuaaaugacuugguuaagg

SEQ ID NO: 811533 - RNA, 22 nt, Human
ugagccagguuuuccaucauuc

SEQ ID NO: 811534 - RNA, 22 nt, Human
ucaaggcuaaacuuucagagua

SEQ ID NO: 811535 - RNA, 20 nt, Human
uucuaguuuggaguuauuaa

SEQ ID NO: 811536 - RNA, 21 nt, Human
auuuuguacauagaauuuguc

SEQ ID NO: 811537 - RNA, 22 nt, Human
cagcuuugagcagccaguggca

SEQ ID NO: 811538 - RNA, 22 nt, Human
ugauuucccucaucauaacaga

SEQ ID NO: 811539 - RNA, 22 nt, Human
gaaaggaagaaaggucauuuua

SEQ ID NO: 811540 - RNA, 22 nt, Human
agccagcuuucacaaaugaaga

SEQ ID NO: 811541 - RNA, 22 nt, Human
gcugccccccggacucggcggg

SEQ ID NO: 811542 - RNA, 22 nt, Human
cauuuguaauacugacuugcag

SEQ ID NO: 811543 - RNA, 22 nt, Human
uucucuagguuuuagaugaaga

SEQ ID NO: 811544 - RNA, 22 nt, Human
agggaccagcgugagucugagg

SEQ ID NO: 811545 - RNA, 21 nt, Human
gcaggguuugugcugugaguu

SEQ ID NO: 811546 - RNA, 22 nt, Human
aggccagcagacgugggacuga

SEQ ID NO: 811547 - RNA, 22 nt, Human
cccagcucccauguucuccaau

SEQ ID NO: 811548 - RNA, 22 nt, Human
agcccccaggagucuccacgcc

SEQ ID NO: 811549 - RNA, 22 nt, Human
aaggaacuugccacagaaaaga

SEQ ID NO: 811550 - RNA, 22 nt, Human
aucauuuaugccccaauuagau

SEQ ID NO: 811551 - RNA, 22 nt, Human
gucccagggaagaaggcagcac

SEQ ID NO: 811552 - RNA, 22 nt, Human
uggcucagcuuuccccaucugg

SEQ ID NO: 811553 - RNA, 22 nt, Human
ugguggaguuucucuuucaaac

SEQ ID NO: 811554 - RNA, 22 nt, Human
acaggcuggaggaggaccaaga

SEQ ID NO: 811555 - RNA, 22 nt, Human
agcuccuggacgaacagggagu

SEQ ID NO: 811556 - RNA, 22 nt, Human
cugucuuuucauacuuucccuc

SEQ ID NO: 811557 - RNA, 22 nt, Human
cuuucucuucacugucaugauc

SEQ ID NO: 811558 - RNA, 20 nt, Human
agcuuucuccuuggagcucc

SEQ ID NO: 811559 - RNA, 23 nt, Human
aggaagagagagugccucuuucu

SEQ ID NO: 811560 - RNA, 22 nt, Human
aaguuucaagagguucuuugaa

SEQ ID NO: 811561 - RNA, 22 nt, Human
ggagggguggucgcgaagagca

SEQ ID NO: 811562 - RNA, 22 nt, Human
accugccuucucaaggacauga

SEQ ID NO: 811563 - RNA, 23 nt, Human
agcuccagcugacgugggcagcc

SEQ ID NO: 811564 - RNA, 22 nt, Human
ucacaucacuagcugguaauga

SEQ ID NO: 811565 - RNA, 20 nt, Human
gagauuaacugagaaucuag

SEQ ID NO: 811566 - RNA, 22 nt, Human
cuggcucaccuccgcuccagca

SEQ ID NO: 811567 - RNA, 22 nt, Human
gagcuuugucccuugggggcuc

SEQ ID NO: 811568 - RNA, 22 nt, Human
aggcucuucuuuuauuaacuga

SEQ ID NO: 811569 - RNA, 22 nt, Human
aacuauucuguggacucuuaua

SEQ ID NO: 811570 - RNA, 18 nt, Human
uuucucaaggcugacauu

SEQ ID NO: 811571 - RNA, 22 nt, Human
cgcgcugcagacagcggaggcc

SEQ ID NO: 811572 - RNA, 22 nt, Human
gaaacaaucaucaugugauuug

SEQ ID NO: 811573 - RNA, 22 nt, Human
agaagcugacagaugcagcagg

SEQ ID NO: 811574 - RNA, 22 nt, Human
guucacauccugcuuuuucccu

SEQ ID NO: 811575 - RNA, 22 nt, Human
caagagcaggugcugcuuccau

SEQ ID NO: 811576 - RNA, 22 nt, Human
uucauugagcuguacacuuagg

SEQ ID NO: 811577 - RNA, 22 nt, Human
aggcaguggcuuuuguuguguu

SEQ ID NO: 811578 - RNA, 22 nt, Human
aaucacauuuacauugcuaauu

SEQ ID NO: 811579 - RNA, 22 nt, Human
guuuucuuugaaugcuucuaga

SEQ ID NO: 811580 - RNA, 22 nt, Human
ggcccagugcuguucacccagu

SEQ ID NO: 811581 - RNA, 22 nt, Human
uuuuuauaugaaggauagugcg

SEQ ID NO: 811582 - RNA, 22 nt, Human
cucugcagaggcccaaggcuga

SEQ ID NO: 811583 - RNA, 22 nt, Human
caugaaaauaacauuguuguga

SEQ ID NO: 811584 - RNA, 22 nt, Human
ccacauuuacugauguauguau

SEQ ID NO: 811585 - RNA, 22 nt, Human
gcugggagccccgagccagcgc

SEQ ID NO: 811586 - RNA, 22 nt, Human
ucacugugaauguuaucaucuu

SEQ ID NO: 811587 - RNA, 22 nt, Human
augcaaauuaacauauaguaga

SEQ ID NO: 811588 - RNA, 22 nt, Human
cuaaaaauccacacuaggugaa

SEQ ID NO: 811589 - RNA, 22 nt, Human
gaaaauguuagcuucauaguca

SEQ ID NO: 811590 - RNA, 22 nt, Human
ucccacugagccccugcuggug

SEQ ID NO: 811591 - RNA, 22 nt, Human
acaccaggucccgucuguaccu

SEQ ID NO: 811592 - RNA, 22 nt, Human
cuaggcuggagugcaguggcau

SEQ ID NO: 811593 - RNA, 22 nt, Human
uaacacaugguuaguacacaau

SEQ ID NO: 811594 - RNA, 22 nt, Human
caguggccuuuccugcugcuca

SEQ ID NO: 811595 - RNA, 20 nt, Human
agagagcacaggcaggaaag

SEQ ID NO: 811596 - RNA, 22 nt, Human
aggcuaggaaucaagccuuucu

SEQ ID NO: 811597 - RNA, 22 nt, Human
acauuucauguuuuccagagca

SEQ ID NO: 811598 - RNA, 22 nt, Human
ggcuggcuggcuuagcagagga

SEQ ID NO: 811599 - RNA, 22 nt, Human
agcguggauguggggcgcggcu

SEQ ID NO: 811600 - RNA, 22 nt, Human
ucaggccugugcuggaggagau

SEQ ID NO: 811601 - RNA, 22 nt, Human
cccugccuucuuggccuuuaaa

SEQ ID NO: 811602 - RNA, 22 nt, Human
cauucacaaaaccacaugccau

SEQ ID NO: 811603 - RNA, 22 nt, Human
uggcucagccagcccuaggaac

SEQ ID NO: 811604 - RNA, 22 nt, Human
agugaaauuccuggucuuuguu

SEQ ID NO: 811605 - RNA, 22 nt, Human
agagucaagggugcagaggaag

SEQ ID NO: 811606 - RNA, 22 nt, Human
gaggacagugugaucugccagc

SEQ ID NO: 811607 - RNA, 22 nt, Human
cauagaaaucaggugagaaucu

SEQ ID NO: 811608 - RNA, 22 nt, Human
aggcuucacgaugggugaggug

SEQ ID NO: 811609 - RNA, 20 nt, Human
gucagugucuucaguaguga

SEQ ID NO: 811610 - RNA, 20 nt, Human
uacucacaaaugguuuagca

SEQ ID NO: 811611 - RNA, 22 nt, Human
gaggcugggaaguccaagauca

SEQ ID NO: 811612 - RNA, 22 nt, Human
agaugcuggauggaaaaugauc

SEQ ID NO: 811613 - RNA, 22 nt, Human
auucacacacauuuagagcaga

SEQ ID NO: 811614 - RNA, 22 nt, Human
caggcagagucagauuagacuu

SEQ ID NO: 811615 - RNA, 22 nt, Human
caaagaaucacucaucuuuagc

SEQ ID NO: 811616 - RNA, 22 nt, Human
gcugaggaagucagguggccca

SEQ ID NO: 811617 - RNA, 22 nt, Human
uggcagagacaaggccgggccu

SEQ ID NO: 811618 - RNA, 22 nt, Human
cuguccucuguccucagcagga

SEQ ID NO: 811619 - RNA, 22 nt, Human
agagcaggcauaaagcuuugaa

SEQ ID NO: 811620 - RNA, 22 nt, Human
agaauucugacaauagaauugg

SEQ ID NO: 811621 - RNA, 22 nt, Human
acauuuggcaucuuguaacacu

SEQ ID NO: 811622 - RNA, 22 nt, Human
agcaggcuuacuuucugauuag

SEQ ID NO: 811623 - RNA, 22 nt, Human
cacaggccaauacccucucucu

SEQ ID NO: 811624 - RNA, 22 nt, Human
caggaggcaucauggagcggac

SEQ ID NO: 811625 - RNA, 22 nt, Human
uaaauugcauaaguacaaauga

SEQ ID NO: 811626 - RNA, 22 nt, Human
caaacuauuuacaauggaauca

SEQ ID NO: 811627 - RNA, 22 nt, Human
acaaaaagcuccauuacugucc

SEQ ID NO: 811628 - RNA, 22 nt, Human
aagaggcauaaaauuuauaugg

SEQ ID NO: 811629 - RNA, 17 nt, Human
uaaauacacaaggguau

SEQ ID NO: 811630 - RNA, 22 nt, Human
uuucuuuaauucucacagcaau

SEQ ID NO: 811631 - RNA, 22 nt, Human
guggcaggaucacggcucacug

SEQ ID NO: 811632 - RNA, 22 nt, Human
uccaguccauggccucagucuu

SEQ ID NO: 811633 - RNA, 22 nt, Human
cugagaggugacagcgugcugg

SEQ ID NO: 811634 - RNA, 22 nt, Human
ucagaagguuuuuagcaaagga

SEQ ID NO: 811635 - RNA, 20 nt, Human
ugccugcccagguccugcac

SEQ ID NO: 811636 - RNA, 22 nt, Human
uugagagugccaagcauccucc

SEQ ID NO: 811637 - RNA, 22 nt, Human
cuuuguuuauauuucuccucga

SEQ ID NO: 811638 - RNA, 22 nt, Human
uucuacuucugacacuguuugu

SEQ ID NO: 811639 - RNA, 22 nt, Human
aggcuccacccuacagagcucc

SEQ ID NO: 811640 - RNA, 22 nt, Human
ucucucccuuuccuuaucaguu

SEQ ID NO: 811641 - RNA, 22 nt, Human
ucccaggccauaaaacucagag

SEQ ID NO: 811642 - RNA, 22 nt, Human
auuuuuccaugauacuuaucug

SEQ ID NO: 811643 - RNA, 22 nt, Human
gagcuuaaaacauagccagacu

SEQ ID NO: 811644 - RNA, 22 nt, Human
guuauauaauuccugugguagu

SEQ ID NO: 811645 - RNA, 22 nt, Human
ccuggcugguggcagcgacaag

SEQ ID NO: 811646 - RNA, 22 nt, Human
uugcauauccuccaacacaugg

SEQ ID NO: 811647 - RNA, 22 nt, Human
auaugcauuaacauuguaggag

SEQ ID NO: 811648 - RNA, 22 nt, Human
cuggagggcuucugcagguuac

SEQ ID NO: 811649 - RNA, 22 nt, Human
acaguaaaucaacagaauaucu

SEQ ID NO: 811650 - RNA, 22 nt, Human
gcugagcucccagcaguaucug

SEQ ID NO: 811651 - RNA, 22 nt, Human
uguuuucucuugaaaagcaguc

SEQ ID NO: 811652 - RNA, 22 nt, Human
caggagagcccggguccgggcu

SEQ ID NO: 811653 - RNA, 22 nt, Human
uauucacagcugccgcacucag

SEQ ID NO: 811654 - RNA, 22 nt, Human
uggcucaggggucuggcucugu

SEQ ID NO: 811655 - RNA, 22 nt, Human
aguguuaagagaaaauucugcu

SEQ ID NO: 811656 - RNA, 22 nt, Human
gugcagcugaaggcuggccagc

SEQ ID NO: 811657 - RNA, 23 nt, Human
agaggggagcaucugcuggcuga

SEQ ID NO: 811658 - RNA, 22 nt, Human
cuggucccagcagagcucugag

SEQ ID NO: 811659 - RNA, 22 nt, Human
augcagcucauuuguuuaaaag

SEQ ID NO: 811660 - RNA, 22 nt, Human
cccaggaggcagagcuugcagu

SEQ ID NO: 811661 - RNA, 22 nt, Human
aaauagauuuccuagcauugga

SEQ ID NO: 811662 - RNA, 21 nt, Human
cccugcaggccagggcugagc

SEQ ID NO: 811663 - RNA, 22 nt, Human
ggccaggagcaagccaggcucu

SEQ ID NO: 811664 - RNA, 22 nt, Human
ccugcucggggugcagugggcu

SEQ ID NO: 811665 - RNA, 18 nt, Human
caaagcucacguuccauc

SEQ ID NO: 811666 - RNA, 22 nt, Human
agcaggcaguguagagccuuca

SEQ ID NO: 811667 - RNA, 22 nt, Human
cccucaguuuuccagugugggc

SEQ ID NO: 811668 - RNA, 22 nt, Human
uacaagagcaguaagcuugucc

SEQ ID NO: 811669 - RNA, 22 nt, Human
gaaaagcuaggccaguucagcu

SEQ ID NO: 811670 - RNA, 22 nt, Human
agccuggcuguaaccucauggu

SEQ ID NO: 811671 - RNA, 22 nt, Human
uguagaaacuacacaugcaaca

SEQ ID NO: 811672 - RNA, 22 nt, Human
agucuggcuuuuugaugagcuu

SEQ ID NO: 811673 - RNA, 18 nt, Human
ugagaggcuauuuuuugc

SEQ ID NO: 811674 - RNA, 22 nt, Human
aacaggcacuaagcaugugggg

SEQ ID NO: 811675 - RNA, 22 nt, Human
acauuuaaauaugccuuauauu

SEQ ID NO: 811676 - RNA, 22 nt, Human
uauuucuguaugcauaaaagga

SEQ ID NO: 811677 - RNA, 22 nt, Human
auuuaaugucgagcuauuguag

SEQ ID NO: 811678 - RNA, 22 nt, Human
ccagugucuagcagaugacagg

SEQ ID NO: 811679 - RNA, 22 nt, Human
uugauucaaccacuuaauaauc

SEQ ID NO: 811680 - RNA, 22 nt, Human
uuucuaaucugauucuccuacc

SEQ ID NO: 811681 - RNA, 22 nt, Human
cuuccagcugauuggcauccag

SEQ ID NO: 811682 - RNA, 22 nt, Human
ggcacugggaaugcagugauga

SEQ ID NO: 811683 - RNA, 22 nt, Human
aagaaaaucaguucuggucagu

SEQ ID NO: 811684 - RNA, 22 nt, Human
agggccagaaucccucagucua

SEQ ID NO: 811685 - RNA, 22 nt, Human
aggcuccaccccgccagaccuu

SEQ ID NO: 811686 - RNA, 22 nt, Human
caugugcagacggugggcugga

SEQ ID NO: 811687 - RNA, 22 nt, Human
gccuccugaagugcugggauua

SEQ ID NO: 811688 - RNA, 22 nt, Human
ccacauuuugcuuugccuaggu

SEQ ID NO: 811689 - RNA, 22 nt, Human
aacacaggccagccugugcagu

SEQ ID NO: 811690 - RNA, 22 nt, Human
aucaacagguauggaugagauu

SEQ ID NO: 811691 - RNA, 22 nt, Human
uguuggagcccgagucagggag

SEQ ID NO: 811692 - RNA, 22 nt, Human
ucacugaauacuugucucaucc

SEQ ID NO: 811693 - RNA, 22 nt, Human
ucuuuggugauaucucuuuggu

SEQ ID NO: 811694 - RNA, 18 nt, Human
gaggaaacaaggcagagg

SEQ ID NO: 811695 - RNA, 22 nt, Human
ggcuggcagugugagagaggga

SEQ ID NO: 811696 - RNA, 22 nt, Human
agaggcugugcccaccaggcaa

SEQ ID NO: 811697 - RNA, 22 nt, Human
agaaacucuaggucaauugagg

SEQ ID NO: 811698 - RNA, 22 nt, Human
ggcuucccuguuugcugugccu

SEQ ID NO: 811699 - RNA, 22 nt, Human
auggcucugagaaccugagcua

SEQ ID NO: 811700 - RNA, 22 nt, Human
uuccucaugggguuccuucaga

SEQ ID NO: 811701 - RNA, 22 nt, Human
ucaaaugaggcugaugaaugug

SEQ ID NO: 811702 - RNA, 22 nt, Human
auauuucucucagacauggaag

SEQ ID NO: 811703 - RNA, 17 nt, Human
caaagggagcccaccaa

SEQ ID NO: 811704 - RNA, 22 nt, Human
cacaguggcaaaggggcuuggg

SEQ ID NO: 811705 - RNA, 22 nt, Human
gccuucugcgcucgugucuccg

SEQ ID NO: 811706 - RNA, 22 nt, Human
ucacaguacuccccaaaguuuc

SEQ ID NO: 811707 - RNA, 19 nt, Human
cugggaguucacugcugcc

SEQ ID NO: 811708 - RNA, 22 nt, Human
ugcccagguuugagugcccaag

SEQ ID NO: 811709 - RNA, 22 nt, Human
uggcagaugagccgcgcuccaa

SEQ ID NO: 811710 - RNA, 22 nt, Human
gagaggcugugugccauuguug

SEQ ID NO: 811711 - RNA, 22 nt, Human
gggcuggaggugagcaggacag

SEQ ID NO: 811712 - RNA, 22 nt, Human
uaaaugauuuauguaugugaaa

SEQ ID NO: 811713 - RNA, 22 nt, Human
aucucaacuaagccuaacuuuu

SEQ ID NO: 811714 - RNA, 22 nt, Human
cccagcagauggcuaugugcua

SEQ ID NO: 811715 - RNA, 22 nt, Human
aguuuacaugacguguauuuca

SEQ ID NO: 811716 - RNA, 22 nt, Human
gaggcucagagagguccacaua

SEQ ID NO: 811717 - RNA, 22 nt, Human
agacagcugcucgcagagcuau

SEQ ID NO: 811718 - RNA, 22 nt, Human
auuucuguuauaccuuucucag

SEQ ID NO: 811719 - RNA, 22 nt, Human
uugauucaaaacaggagguagg

SEQ ID NO: 811720 - RNA, 22 nt, Human
aacagugauaucaagacagaca

SEQ ID NO: 811721 - RNA, 22 nt, Human
gagaagggcuugggagucaaca

SEQ ID NO: 811722 - RNA, 22 nt, Human
aauucacaugcaugucugugca

SEQ ID NO: 811723 - RNA, 23 nt, Human
cagaaaugacaguaagcacccug

SEQ ID NO: 811724 - RNA, 22 nt, Human
caguauucaucuaaggagcuug

SEQ ID NO: 811725 - RNA, 23 nt, Human
ugcuggcuuccagcugcucccuc

SEQ ID NO: 811726 - RNA, 22 nt, Human
uguauuuucagaguggcauuuc

SEQ ID NO: 811727 - RNA, 22 nt, Human
uuacagagcucauuucuaaggg

SEQ ID NO: 811728 - RNA, 22 nt, Human
aaugaaauguagcuuauccaua

SEQ ID NO: 811729 - RNA, 22 nt, Human
cucaggccagguuucucccaca

SEQ ID NO: 811730 - RNA, 22 nt, Human
augggaagcugaccugcaugga

SEQ ID NO: 811731 - RNA, 22 nt, Human
ugcacacagcugggccuggcug

SEQ ID NO: 811732 - RNA, 22 nt, Human
acauuugacucuguucauauua

SEQ ID NO: 811733 - RNA, 22 nt, Human
uuucacauuuaggcgugaauug

SEQ ID NO: 811734 - RNA, 21 nt, Human
uuacaaagcaagugcuguguc

SEQ ID NO: 811735 - RNA, 21 nt, Human
gacagcaacuguaguccucuu

SEQ ID NO: 811736 - RNA, 19 nt, Human
ugagcugccgucuucccug

SEQ ID NO: 811737 - RNA, 22 nt, Human
ccugccaugccagcaugcccgu

SEQ ID NO: 811738 - RNA, 22 nt, Human
aaauuuucagagcacuagagaa

SEQ ID NO: 811739 - RNA, 22 nt, Human
aaaaucuggcaacacuaaguuu

SEQ ID NO: 811740 - RNA, 22 nt, Human
gcccagcaccucucucaggguu

SEQ ID NO: 811741 - RNA, 22 nt, Human
acucuucaucccuuuaucagga

SEQ ID NO: 811742 - RNA, 22 nt, Human
gcaggaaagguugagacuuugc

SEQ ID NO: 811743 - RNA, 22 nt, Human
uacaacagaaguguuuauuuag

SEQ ID NO: 811744 - RNA, 22 nt, Human
agacaaauggaguaugagcaac

SEQ ID NO: 811745 - RNA, 22 nt, Human
agaagcagcuuucaaggugauu

SEQ ID NO: 811746 - RNA, 22 nt, Human
cuggucacuggucucauccagc

SEQ ID NO: 811747 - RNA, 22 nt, Human
uucagaguaggauacuagcuua

SEQ ID NO: 811748 - RNA, 22 nt, Human
cuucugcaggcccugucugacc

SEQ ID NO: 811749 - RNA, 21 nt, Human
cuuggaguugguugaggaugc

SEQ ID NO: 811750 - RNA, 22 nt, Human
aaacuucauggauaauauaaag

SEQ ID NO: 811751 - RNA, 22 nt, Human
ugcucauuaggacugcaaauuc

SEQ ID NO: 811752 - RNA, 22 nt, Human
agagaccuuuguuauucuagga

SEQ ID NO: 811753 - RNA, 22 nt, Human
ucagaaucugaaaagcgcuugg

SEQ ID NO: 811754 - RNA, 22 nt, Human
aaaauugaggcucauguuaaau

SEQ ID NO: 811755 - RNA, 22 nt, Human
ugcaggcuccaugaggacaggc

SEQ ID NO: 811756 - RNA, 22 nt, Human
caaauacuguacugaacacugu

SEQ ID NO: 811757 - RNA, 17 nt, Human
aggugccagugauauac

SEQ ID NO: 811758 - RNA, 22 nt, Human
gaccugggguggaaggaaggca

SEQ ID NO: 811759 - RNA, 22 nt, Human
aggcugggaaaccugaaguugu

SEQ ID NO: 811760 - RNA, 22 nt, Human
guuucauuaccugacccaugag

SEQ ID NO: 811761 - RNA, 22 nt, Human
augcuucuguaaugugggaaug

SEQ ID NO: 811762 - RNA, 22 nt, Human
acauccaucuuaugagauaggu

SEQ ID NO: 811763 - RNA, 22 nt, Human
gcccuccagcuguugcgcgucg

SEQ ID NO: 811764 - RNA, 23 nt, Human
agggccucugucccccagcacuc

SEQ ID NO: 811765 - RNA, 22 nt, Human
uugguucaggacauauuugagu

SEQ ID NO: 811766 - RNA, 22 nt, Human
aucaaauuaugugcuacaagaa

SEQ ID NO: 811767 - RNA, 22 nt, Human
agcaucuggucaugagugagaa

SEQ ID NO: 811768 - RNA, 22 nt, Human
uggguggucuugcuucccagga

SEQ ID NO: 811769 - RNA, 22 nt, Human
guucauguuuguguauugcuca

SEQ ID NO: 811770 - RNA, 22 nt, Human
agugugacauuuucaugaauuu

SEQ ID NO: 811771 - RNA, 22 nt, Human
gccaggcugcuccagggaggcc

SEQ ID NO: 811772 - RNA, 22 nt, Human
uuguugcagagaugaaugacau

SEQ ID NO: 811773 - RNA, 22 nt, Human
uauuacaaauuauaaugggaga

SEQ ID NO: 811774 - RNA, 21 nt, Human
gggcucaguggaaaagagugu

SEQ ID NO: 811775 - RNA, 18 nt, Human
guucaagccaacaucaag

SEQ ID NO: 811776 - RNA, 22 nt, Human
auuuucucuuuguauaugcuag

SEQ ID NO: 811777 - RNA, 22 nt, Human
gaaccucuauauuugugacauc

SEQ ID NO: 811778 - RNA, 22 nt, Human
ggcagugaaugaaacagaggcu

SEQ ID NO: 811779 - RNA, 22 nt, Human
caguuguccccaaaauauacgg

SEQ ID NO: 811780 - RNA, 22 nt, Human
ugcauuaaaaugauggagaaau

SEQ ID NO: 811781 - RNA, 22 nt, Human
ucugaagguugagaagggcuga

SEQ ID NO: 811782 - RNA, 22 nt, Human
ugagagugaaaugucacauguc

SEQ ID NO: 811783 - RNA, 22 nt, Human
gucaggggccaugggccaagga

SEQ ID NO: 811784 - RNA, 22 nt, Human
gcagcugcuggagggaggcagg

SEQ ID NO: 811785 - RNA, 18 nt, Human
uuggggugaggccaggaa

SEQ ID NO: 811786 - RNA, 22 nt, Human
gguguggaucaucugaggucag

SEQ ID NO: 811787 - RNA, 22 nt, Human
uucauucuguuuggaaaggugg

SEQ ID NO: 811788 - RNA, 22 nt, Human
ccaggacacgauuuuuagucug

SEQ ID NO: 811789 - RNA, 22 nt, Human
uugcucugauuagguggaaaca

SEQ ID NO: 811790 - RNA, 22 nt, Human
uuacagagggcuucucugaacu

SEQ ID NO: 811791 - RNA, 22 nt, Human
aaggaaauacuucugcagagca

SEQ ID NO: 811792 - RNA, 22 nt, Human
uuugcaaaaugaggugaagagu

SEQ ID NO: 811793 - RNA, 22 nt, Human
caccuaggguuucgccuuucuu

SEQ ID NO: 811794 - RNA, 22 nt, Human
agcaggcuccuuccuucucugg

SEQ ID NO: 811795 - RNA, 22 nt, Human
aggggcuggcuuaucugagagu

SEQ ID NO: 811796 - RNA, 22 nt, Human
ccagccagccuugaucugagua

SEQ ID NO: 811797 - RNA, 20 nt, Human
uauuuacaacuuagagccuc

SEQ ID NO: 811798 - RNA, 22 nt, Human
guucuagaugacugagcagcug

SEQ ID NO: 811799 - RNA, 22 nt, Human
uaggccuggaucucugggagca

SEQ ID NO: 811800 - RNA, 22 nt, Human
caguuuaaagaaggaugggagu

SEQ ID NO: 811801 - RNA, 22 nt, Human
ggcugagcacuuuaggcaggag

SEQ ID NO: 811802 - RNA, 22 nt, Human
auuauuucucacucacauaaua

SEQ ID NO: 811803 - RNA, 22 nt, Human
caaagaaugagugaguacauaa

SEQ ID NO: 811804 - RNA, 21 nt, Human
auggagggaccagggaagcag

SEQ ID NO: 811805 - RNA, 22 nt, Human
gccugcucagaccuagcaggcc

SEQ ID NO: 811806 - RNA, 22 nt, Human
gccauguucuugaaucuggguc

SEQ ID NO: 811807 - RNA, 22 nt, Human
auacaaguuaaugagaaugaca

SEQ ID NO: 811808 - RNA, 22 nt, Human
uaaaaugacuuccuccaacauc

SEQ ID NO: 811809 - RNA, 22 nt, Human
ucugagcugggcacagaaggcg

SEQ ID NO: 811810 - RNA, 22 nt, Human
ccuggcucuucagagguuccua

SEQ ID NO: 811811 - RNA, 22 nt, Human
cagcccagagccaguucccgcu

SEQ ID NO: 811812 - RNA, 22 nt, Human
cccaggagguggagcuugcagu

SEQ ID NO: 811813 - RNA, 22 nt, Human
aauaggacuuugguccuagcuc

SEQ ID NO: 811814 - RNA, 22 nt, Human
cagagacaggagugcucccagu

SEQ ID NO: 811815 - RNA, 22 nt, Human
cauugagagaaucacauagaag

SEQ ID NO: 811816 - RNA, 22 nt, Human
uucacauaaucugcagcaagcg

SEQ ID NO: 811817 - RNA, 22 nt, Human
ucauaaaacacaccagguaguu

SEQ ID NO: 811818 - RNA, 22 nt, Human
ucccugggcaaguuuacucuuc

SEQ ID NO: 811819 - RNA, 22 nt, Human
agucagaguucuuggggagaca

SEQ ID NO: 811820 - RNA, 22 nt, Human
ucagcugcucuguugagcugaa

SEQ ID NO: 811821 - RNA, 18 nt, Human
ucuuuuccuuccacuucc

SEQ ID NO: 811822 - RNA, 22 nt, Human
ugggguugccucccgcccugga

SEQ ID NO: 811823 - RNA, 22 nt, Human
uagaaaccucagggaaaucuuu

SEQ ID NO: 811824 - RNA, 22 nt, Human
cuucuuugaaaaaggcagucag

SEQ ID NO: 811825 - RNA, 22 nt, Human
uaauuauuaugacaacaauugc

SEQ ID NO: 811826 - RNA, 22 nt, Human
uuuaaauuauaguuaaugucug

SEQ ID NO: 811827 - RNA, 22 nt, Human
cuacauuuuaauaagcugcuua

SEQ ID NO: 811828 - RNA, 21 nt, Human
gguuaaaagacacaucuguuu

SEQ ID NO: 811829 - RNA, 22 nt, Human
aaagucaagguuuagacuagag

SEQ ID NO: 811830 - RNA, 22 nt, Human
cccucuggcucuucucaggccg

SEQ ID NO: 811831 - RNA, 22 nt, Human
ccagugucuacuguggcauauc

SEQ ID NO: 811832 - RNA, 22 nt, Human
cagcaaggccauuggaugcagu

SEQ ID NO: 811833 - RNA, 22 nt, Human
guggcauuuggaaagagcacua

SEQ ID NO: 811834 - RNA, 22 nt, Human
cccacgucgaacuugcuccaga

SEQ ID NO: 811835 - RNA, 22 nt, Human
gcccuggacagugacggugacc

SEQ ID NO: 811836 - RNA, 23 nt, Human
guuuucaacacaauaaauguaac

SEQ ID NO: 811837 - RNA, 22 nt, Human
ggagaugcgacucgcggggcug

SEQ ID NO: 811838 - RNA, 22 nt, Human
auacauggaagaugcuuagcac

SEQ ID NO: 811839 - RNA, 22 nt, Human
ucuggaauuaaacucaggagac

SEQ ID NO: 811840 - RNA, 22 nt, Human
uaccacagacagauuucaguaa

SEQ ID NO: 811841 - RNA, 22 nt, Human
uugcagcuagaagauucacugu

SEQ ID NO: 811842 - RNA, 22 nt, Human
ucagagaacacagaggugaugu

SEQ ID NO: 811843 - RNA, 22 nt, Human
uacugucuggcaauuaagaauc

SEQ ID NO: 811844 - RNA, 22 nt, Human
aaagcugcccuugugaaacaag

SEQ ID NO: 811845 - RNA, 22 nt, Human
ugccagcuucuuacggcugccu

SEQ ID NO: 811846 - RNA, 22 nt, Human
ucagagaagcuuaagcuguaau

SEQ ID NO: 811847 - RNA, 22 nt, Human
uuuuuuccaggaagccacugga

SEQ ID NO: 811848 - RNA, 22 nt, Human
uuaaaaauauguagggcccgau

SEQ ID NO: 811849 - RNA, 22 nt, Human
gacagacaggagcucacaggca

SEQ ID NO: 811850 - RNA, 22 nt, Human
auugacaaaucugaacauacgg

SEQ ID NO: 811851 - RNA, 22 nt, Human
gggaccagaggcugugcacaau

SEQ ID NO: 811852 - RNA, 22 nt, Human
gugcauuaacaacccagaacuc

SEQ ID NO: 811853 - RNA, 22 nt, Human
gcaccugcuggaaucagucugu

SEQ ID NO: 811854 - RNA, 22 nt, Human
caguccuguuccuggaguaguu

SEQ ID NO: 811855 - RNA, 22 nt, Human
cucuuuggugcaccuugcaguc

SEQ ID NO: 811856 - RNA, 22 nt, Human
uguagggacugaggcuggagag

SEQ ID NO: 811857 - RNA, 22 nt, Human
aacuucugaccucaagaacugu

SEQ ID NO: 811858 - RNA, 22 nt, Human
cugacagcuauuuuuguagaua

SEQ ID NO: 811859 - RNA, 22 nt, Human
cgcuggcauuagggcaguggcc

SEQ ID NO: 811860 - RNA, 22 nt, Human
gucuuucuaugcauagagcaga

SEQ ID NO: 811861 - RNA, 22 nt, Human
ggagguggagguugcaaugagc

SEQ ID NO: 811862 - RNA, 22 nt, Human
cugacagcgagagaguugcccc

SEQ ID NO: 811863 - RNA, 22 nt, Human
guacauuucaguuuccuuaaga

SEQ ID NO: 811864 - RNA, 22 nt, Human
aacaaaacauuugucuuguuuc

SEQ ID NO: 811865 - RNA, 22 nt, Human
acagaggccucggccugcccag

SEQ ID NO: 811866 - RNA, 22 nt, Human
caggaaauaaaaaguaucuucu

SEQ ID NO: 811867 - RNA, 22 nt, Human
aggucaagggagcugagggcca

SEQ ID NO: 811868 - RNA, 22 nt, Human
cugugcccucuuugcuggccuu

SEQ ID NO: 811869 - RNA, 22 nt, Human
ugcauacauguuuguguauuuu

SEQ ID NO: 811870 - RNA, 22 nt, Human
aaacaauguacauuuauaaugc

SEQ ID NO: 811871 - RNA, 22 nt, Human
uucaauucaauucuaaauauau

SEQ ID NO: 811872 - RNA, 21 nt, Human
uaucagaagagaaagaaugau

SEQ ID NO: 811873 - RNA, 22 nt, Human
uggauuuauuagguuggugaaa

SEQ ID NO: 811874 - RNA, 23 nt, Human
ucagaggaucaucaaacguuuuc

SEQ ID NO: 811875 - RNA, 22 nt, Human
agggcagcagcuccuccuagcu

SEQ ID NO: 811876 - RNA, 22 nt, Human
acuguuugcugauagauauuua

SEQ ID NO: 811877 - RNA, 22 nt, Human
ugccacaguuguuugugcucua

SEQ ID NO: 811878 - RNA, 17 nt, Human
aagagaggcugagcugg

SEQ ID NO: 811879 - RNA, 22 nt, Human
acaguacaaaacccaccagagg

SEQ ID NO: 811880 - RNA, 22 nt, Human
ugccagcagaaauaaauacuug

SEQ ID NO: 811881 - RNA, 22 nt, Human
agugcagauuuuuagucagcuu

SEQ ID NO: 811882 - RNA, 22 nt, Human
gcugucuccauagcuguguguc

SEQ ID NO: 811883 - RNA, 22 nt, Human
augggcaguaacaguggcaguc

SEQ ID NO: 811884 - RNA, 22 nt, Human
caaguuauuccuuuacacuaua

SEQ ID NO: 811885 - RNA, 22 nt, Human
agucagagcaaacuggacagac

SEQ ID NO: 811886 - RNA, 22 nt, Human
ggagaaggaagaaagcuacuau

SEQ ID NO: 811887 - RNA, 22 nt, Human
auaaauuuucuugcuguacuua

SEQ ID NO: 811888 - RNA, 22 nt, Human
uauuaauaugugugugcaugua

SEQ ID NO: 811889 - RNA, 22 nt, Human
agcaggcuacuccuguguucgu

SEQ ID NO: 811890 - RNA, 19 nt, Human
acuggcagcuguagucugu

SEQ ID NO: 811891 - RNA, 20 nt, Human
acuccugguaacuuuuguga

SEQ ID NO: 811892 - RNA, 22 nt, Human
uucucucuuccaguucccacuu

SEQ ID NO: 811893 - RNA, 22 nt, Human
cagggaugagcagauggagcaa

SEQ ID NO: 811894 - RNA, 22 nt, Human
aauggcuggguuucauuuugua

SEQ ID NO: 811895 - RNA, 20 nt, Human
ucagaggcugccagcugggg

SEQ ID NO: 811896 - RNA, 22 nt, Human
uguguauuaccauuuuacagcu

SEQ ID NO: 811897 - RNA, 22 nt, Human
ggacacaguggaagacagcuug

SEQ ID NO: 811898 - RNA, 22 nt, Human
gcagaaguggauucuacaauuu

SEQ ID NO: 811899 - RNA, 22 nt, Human
ggagaggcuuccagagucgugc

SEQ ID NO: 811900 - RNA, 22 nt, Human
caggcagacuuugagaaugaug

SEQ ID NO: 811901 - RNA, 22 nt, Human
caagacaauggguaaguguaac

SEQ ID NO: 811902 - RNA, 22 nt, Human
uauauauaugcacacacaccua

SEQ ID NO: 811903 - RNA, 22 nt, Human
uuuugccugcacuguauauaua

SEQ ID NO: 811904 - RNA, 22 nt, Human
ucuucucucauguaggagggaa

SEQ ID NO: 811905 - RNA, 22 nt, Human
cacagagcuggaaaggcugggc

SEQ ID NO: 811906 - RNA, 22 nt, Human
gagcuagcuucuuccagguuuc

SEQ ID NO: 811907 - RNA, 22 nt, Human
uucagugucacaagagcaagcc

SEQ ID NO: 811908 - RNA, 22 nt, Human
uagaaguuaggaaauaggaaua

SEQ ID NO: 811909 - RNA, 22 nt, Human
cacaggcacgccucuggccagg

SEQ ID NO: 811910 - RNA, 18 nt, Human
gccaggaagaggaaugug

SEQ ID NO: 811911 - RNA, 22 nt, Human
ggcccagcgaggccaccuacag

SEQ ID NO: 811912 - RNA, 23 nt, Human
uguuccagauacgccuuuuccuc

SEQ ID NO: 811913 - RNA, 22 nt, Human
caaaggccugagaacugagggg

SEQ ID NO: 811914 - RNA, 22 nt, Human
aaguaaaauucaaucuucacug

SEQ ID NO: 811915 - RNA, 22 nt, Human
auauauaaccuggauaaggcuu

SEQ ID NO: 811916 - RNA, 22 nt, Human
cguuguuugagauuuucagaau

SEQ ID NO: 811917 - RNA, 22 nt, Human
ggagugcuuugaagccuucauu

SEQ ID NO: 811918 - RNA, 22 nt, Human
ugauuuacacaucaaagcagca

SEQ ID NO: 811919 - RNA, 22 nt, Human
caguguuuguauagaauaugca

SEQ ID NO: 811920 - RNA, 22 nt, Human
ggcugccugaacuuuggggaaa

SEQ ID NO: 811921 - RNA, 22 nt, Human
auugcuucaacuguucaauggg

SEQ ID NO: 811922 - RNA, 22 nt, Human
uggcuucucccgacacccuggc

SEQ ID NO: 811923 - RNA, 22 nt, Human
cccucucagucagagccagaua

SEQ ID NO: 811924 - RNA, 22 nt, Human
ccucccucuguuagagcugucu

SEQ ID NO: 811925 - RNA, 22 nt, Human
ggacccugggcuugcuccuggg

SEQ ID NO: 811926 - RNA, 17 nt, Human
acacagggagagggagc

SEQ ID NO: 811927 - RNA, 22 nt, Human
acugcuuacaaaaggaaagaau

SEQ ID NO: 811928 - RNA, 22 nt, Human
caucuuaauuucuaacaggcac

SEQ ID NO: 811929 - RNA, 22 nt, Human
agcaggcagccuaggaagugaa

SEQ ID NO: 811930 - RNA, 21 nt, Human
agagagaaggccauauggucc

SEQ ID NO: 811931 - RNA, 22 nt, Human
gcuggagugcugaggugcagug

SEQ ID NO: 811932 - RNA, 22 nt, Human
ggcaguggaggacccugugucu

SEQ ID NO: 811933 - RNA, 22 nt, Human
ucuggcuccacucugugcaugc

SEQ ID NO: 811934 - RNA, 21 nt, Human
auccauccaucuuggccuaac

SEQ ID NO: 811935 - RNA, 22 nt, Human
auacaucucauguaagagauaa

SEQ ID NO: 811936 - RNA, 22 nt, Human
uagcuuguacugcaguagagaa

SEQ ID NO: 811937 - RNA, 22 nt, Human
aggacugggugcagagggcauc

SEQ ID NO: 811938 - RNA, 22 nt, Human
gagagaagggggauaugagccu

SEQ ID NO: 811939 - RNA, 22 nt, Human
acacagggucuagaguuaggcc

SEQ ID NO: 811940 - RNA, 22 nt, Human
uuuccacaucaccaugagguga

SEQ ID NO: 811941 - RNA, 22 nt, Human
gaacaauacaggcuuuauuccu

SEQ ID NO: 811942 - RNA, 22 nt, Human
ugcuggcugaggccugagcggg

SEQ ID NO: 811943 - RNA, 22 nt, Human
auuuguaucuucuaauauuauc

SEQ ID NO: 811944 - RNA, 22 nt, Human
ucugaggcccaguucaacucuu

SEQ ID NO: 811945 - RNA, 22 nt, Human
uugguuuuaucuuaagauucuu

SEQ ID NO: 811946 - RNA, 22 nt, Human
cuuuuguuaggagaaaacauca

SEQ ID NO: 811947 - RNA, 22 nt, Human
aaguuuuaacaaguacuuacua

SEQ ID NO: 811948 - RNA, 17 nt, Human
gauggggcugacaucag

SEQ ID NO: 811949 - RNA, 22 nt, Human
uuucauauuguccagucagcgc

SEQ ID NO: 811950 - RNA, 22 nt, Human
ggcaguguuccagaccuucacc

SEQ ID NO: 811951 - RNA, 22 nt, Human
augaaauauuucagagcagagu

SEQ ID NO: 811952 - RNA, 22 nt, Human
cucugcaccuacacaacaggaa

SEQ ID NO: 811953 - RNA, 22 nt, Human
acagagcuucccagccugagca

SEQ ID NO: 811954 - RNA, 22 nt, Human
agucagauuuaaagcuguuuga

SEQ ID NO: 811955 - RNA, 22 nt, Human
ccucaaguuggaaauaaaaugu

SEQ ID NO: 811956 - RNA, 22 nt, Human
cuacauuuuucaccgagccucu

SEQ ID NO: 811957 - RNA, 22 nt, Human
augcuucuguugcuuaggaggu

SEQ ID NO: 811958 - RNA, 19 nt, Human
gccugccagauaguaauga

SEQ ID NO: 811959 - RNA, 22 nt, Human
ucagugcuguguaaauguauua

SEQ ID NO: 811960 - RNA, 22 nt, Human
uugaacauuagaauaaguaauu

SEQ ID NO: 811961 - RNA, 22 nt, Human
uuuuuuccuucaugacuuaaga

SEQ ID NO: 811962 - RNA, 20 nt, Human
ucccuggggcccuacuuccu

SEQ ID NO: 811963 - RNA, 22 nt, Human
agcagcaguguguggucauguu

SEQ ID NO: 811964 - RNA, 22 nt, Human
gaggcuggagauauuccaaucu

SEQ ID NO: 811965 - RNA, 22 nt, Human
gcccagcacauugcugaggacc

SEQ ID NO: 811966 - RNA, 22 nt, Human
ggaacacaaaugggagagcugg

SEQ ID NO: 811967 - RNA, 22 nt, Human
cuuuuuacucuguugucucagc

SEQ ID NO: 811968 - RNA, 22 nt, Human
guuuucaugucuauugggcaua

SEQ ID NO: 811969 - RNA, 22 nt, Human
aaagaaguguugaauuugcaag

SEQ ID NO: 811970 - RNA, 22 nt, Human
ggacccagaggggagucuggca

SEQ ID NO: 811971 - RNA, 22 nt, Human
aaaugcugaguguuuagagauc

SEQ ID NO: 811972 - RNA, 22 nt, Human
uagcuuuguguaugaugucugu

SEQ ID NO: 811973 - RNA, 22 nt, Human
ucucagugggaagggcacaguu

SEQ ID NO: 811974 - RNA, 22 nt, Human
ugcaacaaggccucauuucuug

SEQ ID NO: 811975 - RNA, 22 nt, Human
acaaauagguagauuugcaaca

SEQ ID NO: 811976 - RNA, 22 nt, Human
ugcuucccucacuucaccuggc

SEQ ID NO: 811977 - RNA, 22 nt, Human
aggccucaugucaaagcagcaa

SEQ ID NO: 811978 - RNA, 17 nt, Human
gagcagggaugcgguuc

SEQ ID NO: 811979 - RNA, 21 nt, Human
cucagggcuugguguccucau

SEQ ID NO: 811980 - RNA, 22 nt, Human
ggucacccaugaucacaucacc

SEQ ID NO: 811981 - RNA, 22 nt, Human
ccugccugcguccucugagggc

SEQ ID NO: 811982 - RNA, 22 nt, Human
caguuucuguuuuaaauagcag

SEQ ID NO: 811983 - RNA, 19 nt, Human
gaauuuuaggacuucagca

SEQ ID NO: 811984 - RNA, 22 nt, Human
ugcaggcuuggaucacaucucc

SEQ ID NO: 811985 - RNA, 22 nt, Human
acuauaaaaggauaaaccagaa

SEQ ID NO: 811986 - RNA, 21 nt, Human
uucaagucucuaggacuucuc

SEQ ID NO: 811987 - RNA, 22 nt, Human
gggcaucugguggagccucagg

SEQ ID NO: 811988 - RNA, 22 nt, Human
uaagucauggagcugggauuga

SEQ ID NO: 811989 - RNA, 22 nt, Human
aggcugaggcaagaggaucacu

SEQ ID NO: 811990 - RNA, 22 nt, Human
gcauggcaaauaucgagggcag

SEQ ID NO: 811991 - RNA, 22 nt, Human
aaaaaucuaugacugcuucucc

SEQ ID NO: 811992 - RNA, 22 nt, Human
uuucccaacagucucucucaaa

SEQ ID NO: 811993 - RNA, 22 nt, Human
cuggggugagcagaaacagggg

SEQ ID NO: 811994 - RNA, 22 nt, Human
cccaggcacacugaagugacau

SEQ ID NO: 811995 - RNA, 22 nt, Human
gcucagagaguuucacaaguuu

SEQ ID NO: 811996 - RNA, 22 nt, Human
ugaggccacaggaaagggcccg

SEQ ID NO: 811997 - RNA, 22 nt, Human
gcuucccauaguggaauucggg

SEQ ID NO: 811998 - RNA, 22 nt, Human
uuuuauugucaaugaagacaga

SEQ ID NO: 811999 - RNA, 22 nt, Human
cagcagcaacaacggaagccuu

SEQ ID NO: 812000 - RNA, 22 nt, Human
uucauuugccaucaguguaaug

SEQ ID NO: 812001 - RNA, 22 nt, Human
ugcaggcuauccuuugcugcaa

SEQ ID NO: 812002 - RNA, 22 nt, Human
cugacuuuuuucagccacagug

SEQ ID NO: 812003 - RNA, 22 nt, Human
gcacauccaaugauuguuuuga

SEQ ID NO: 812004 - RNA, 22 nt, Human
cugggccaugggccagcgaggc

SEQ ID NO: 812005 - RNA, 22 nt, Human
ggcuccuggaggcaccacuggu

SEQ ID NO: 812006 - RNA, 23 nt, Human
auacauggccggauaugauguuc

SEQ ID NO: 812007 - RNA, 22 nt, Human
guaaaaaggccaagcccuugug

SEQ ID NO: 812008 - RNA, 22 nt, Human
acuuuguuuggcuauuagaguc

SEQ ID NO: 812009 - RNA, 17 nt, Human
aggcuggcucacaggga

SEQ ID NO: 812010 - RNA, 22 nt, Human
ucaggaaauggcuucaugguuu

SEQ ID NO: 812011 - RNA, 22 nt, Human
aucuaugugccuuuguauagaa

SEQ ID NO: 812012 - RNA, 22 nt, Human
gggaaaggauuuacaguuugau

SEQ ID NO: 812013 - RNA, 22 nt, Human
aaggcagggaaaguggauuagg

SEQ ID NO: 812014 - RNA, 22 nt, Human
uuucugugaauuauaaaauuug

SEQ ID NO: 812015 - RNA, 22 nt, Human
uuuuauaaagagagucaguugg

SEQ ID NO: 812016 - RNA, 22 nt, Human
aggaggccgcugaugggcuccc

SEQ ID NO: 812017 - RNA, 22 nt, Human
ggaggggagucucccaaagccg

SEQ ID NO: 812018 - RNA, 22 nt, Human
auugucuuggaaccaaggucuu

SEQ ID NO: 812019 - RNA, 22 nt, Human
uauuuuacagacuacuuuagau

SEQ ID NO: 812020 - RNA, 22 nt, Human
ccuggcugagccuccaggaaga

SEQ ID NO: 812021 - RNA, 22 nt, Human
uugcauguaugugaucuguuca

SEQ ID NO: 812022 - RNA, 22 nt, Human
ucaugcaaggcugaaacauggu

SEQ ID NO: 812023 - RNA, 22 nt, Human
gggcagugacaaaggggaugaa

SEQ ID NO: 812024 - RNA, 22 nt, Human
gaggcuggacgugcauuucuac

SEQ ID NO: 812025 - RNA, 22 nt, Human
uuccggaagguucucuagaauu

SEQ ID NO: 812026 - RNA, 22 nt, Human
ggcacuggguuguaggaauuaa

SEQ ID NO: 812027 - RNA, 22 nt, Human
ucuaaacuaggguuaaaggaaa

SEQ ID NO: 812028 - RNA, 22 nt, Human
aucugggagacccuugcgggaa

SEQ ID NO: 812029 - RNA, 22 nt, Human
gaaauagacacuuucuaugaau

SEQ ID NO: 812030 - RNA, 22 nt, Human
uugguuuucuauccucugcaau

SEQ ID NO: 812031 - RNA, 22 nt, Human
aguaaggcaaugccacuaagau

SEQ ID NO: 812032 - RNA, 18 nt, Human
agccugggcucugccugg

SEQ ID NO: 812033 - RNA, 21 nt, Human
aaguaaaucagagaaauaacc

SEQ ID NO: 812034 - RNA, 22 nt, Human
gcccugagcacugcugcugggg

SEQ ID NO: 812035 - RNA, 22 nt, Human
uguuuacagcugaucaggcauc

SEQ ID NO: 812036 - RNA, 22 nt, Human
gcaauaaaauguaaugauuggg

SEQ ID NO: 812037 - RNA, 22 nt, Human
agcaaauauuuuguugaagugc

SEQ ID NO: 812038 - RNA, 22 nt, Human
uauuuauucauucagcaagcau

SEQ ID NO: 812039 - RNA, 22 nt, Human
gagugucacuugaugcagggca

SEQ ID NO: 812040 - RNA, 22 nt, Human
ucacauacacuaggauauuuuu

SEQ ID NO: 812041 - RNA, 20 nt, Human
uggugagagcaccugauggg

SEQ ID NO: 812042 - RNA, 22 nt, Human
caggucuggcaucagcugugug

SEQ ID NO: 812043 - RNA, 18 nt, Human
gagaggagccagaauuuu

SEQ ID NO: 812044 - RNA, 22 nt, Human
acagauaaagaaacaaucacag

SEQ ID NO: 812045 - RNA, 22 nt, Human
uggcagauacccaggcaaaugg

SEQ ID NO: 812046 - RNA, 22 nt, Human
agaggaaacauagguuuuuaaa

SEQ ID NO: 812047 - RNA, 22 nt, Human
ucaggacacuuggcacaagguc

SEQ ID NO: 812048 - RNA, 22 nt, Human
acuacacagggaugugacuacc

SEQ ID NO: 812049 - RNA, 22 nt, Human
uccaggagucagacagauggug

SEQ ID NO: 812050 - RNA, 22 nt, Human
ccaggagcuauguacacacuau

SEQ ID NO: 812051 - RNA, 22 nt, Human
cauuacuucucaugcuucaugc

SEQ ID NO: 812052 - RNA, 22 nt, Human
cuggcugcaggaugaggcugcc

SEQ ID NO: 812053 - RNA, 22 nt, Human
aguucccuggaugagcuaaaaa

SEQ ID NO: 812054 - RNA, 22 nt, Human
uuuccucuccggggccuccagg

SEQ ID NO: 812055 - RNA, 22 nt, Human
gcaugcaaaaaauguauuuguu

SEQ ID NO: 812056 - RNA, 22 nt, Human
caggaaaugaaagcuagcuaau

SEQ ID NO: 812057 - RNA, 22 nt, Human
agcaaggcuaaauuucaguuau

SEQ ID NO: 812058 - RNA, 22 nt, Human
ugggaggcuuccagaccuugcu

SEQ ID NO: 812059 - RNA, 22 nt, Human
aguccuggguccagcagguccu

SEQ ID NO: 812060 - RNA, 22 nt, Human
augcaacaauguauuuauguau

SEQ ID NO: 812061 - RNA, 22 nt, Human
cagccuccugggacacucaccg

SEQ ID NO: 812062 - RNA, 22 nt, Human
cacugcacaauguagcaaagaa

SEQ ID NO: 812063 - RNA, 21 nt, Human
ccccauggaguacaguugggc

SEQ ID NO: 812064 - RNA, 22 nt, Human
caggaggcccacaggccccugc

SEQ ID NO: 812065 - RNA, 22 nt, Human
gcucccacugcagcccugagcc

SEQ ID NO: 812066 - RNA, 22 nt, Human
ggcaggugcaccugagccaucu

SEQ ID NO: 812067 - RNA, 22 nt, Human
agggaccagccugcccagggcu

SEQ ID NO: 812068 - RNA, 22 nt, Human
aauggcacuuuauaaauguuaa

SEQ ID NO: 812069 - RNA, 19 nt, Human
uguuuacauguuucuucag

SEQ ID NO: 812070 - RNA, 22 nt, Human
guggcagguuccguagacagca

SEQ ID NO: 812071 - RNA, 22 nt, Human
uggcccagaucucugaccuuga

SEQ ID NO: 812072 - RNA, 22 nt, Human
cugggaccagugaagcaacuca

SEQ ID NO: 812073 - RNA, 22 nt, Human
aagaguuugucagaucugcacg

SEQ ID NO: 812074 - RNA, 22 nt, Human
uguagugaggaaagacugguug

SEQ ID NO: 812075 - RNA, 22 nt, Human
auggagucuacaaaguguugga

SEQ ID NO: 812076 - RNA, 22 nt, Human
agagaaaagaguucaggcuuug

SEQ ID NO: 812077 - RNA, 22 nt, Human
agcaggaguuugaugcuuuuau

SEQ ID NO: 812078 - RNA, 22 nt, Human
acauuugauaauuauaaagaca

SEQ ID NO: 812079 - RNA, 21 nt, Human
ugaagccugaggcauagcccc

SEQ ID NO: 812080 - RNA, 22 nt, Human
aggagccugaaucagaggguga

SEQ ID NO: 812081 - RNA, 22 nt, Human
cacaggagagcugggaggugcc

SEQ ID NO: 812082 - RNA, 22 nt, Human
cagagauggggccagcugcucc

SEQ ID NO: 812083 - RNA, 22 nt, Human
aucccagauggaggcuggucac

SEQ ID NO: 812084 - RNA, 20 nt, Human
gcugggggugugcugaguga

SEQ ID NO: 812085 - RNA, 22 nt, Human
ucucauuuggcuuuguuuuaaa

SEQ ID NO: 812086 - RNA, 22 nt, Human
uccucaggaugugggguagaau

SEQ ID NO: 812087 - RNA, 22 nt, Human
agugcuggcccauagcugcugg

SEQ ID NO: 812088 - RNA, 22 nt, Human
uuacagaguucgcaccuggugg

SEQ ID NO: 812089 - RNA, 22 nt, Human
caggaaugggugacagucagcu

SEQ ID NO: 812090 - RNA, 22 nt, Human
gaccacagguaugggcuuggca

SEQ ID NO: 812091 - RNA, 22 nt, Human
ugucugaguggugcaaggcuga

SEQ ID NO: 812092 - RNA, 22 nt, Human
uggcuggagaacuuggggaucu

SEQ ID NO: 812093 - RNA, 22 nt, Human
acagaugagacuccaggaccuu

SEQ ID NO: 812094 - RNA, 23 nt, Human
gccucugcucugcguuggggacu

SEQ ID NO: 812095 - RNA, 22 nt, Human
ugcauuaagugucugcauaugg

SEQ ID NO: 812096 - RNA, 22 nt, Human
cucagagagguugaacaacuug

SEQ ID NO: 812097 - RNA, 22 nt, Human
ccugccucaucaacuugucgug

SEQ ID NO: 812098 - RNA, 22 nt, Human
agcccugagcuggccugggcuu

SEQ ID NO: 812099 - RNA, 22 nt, Human
augcacauguaucuauauacaa

SEQ ID NO: 812100 - RNA, 22 nt, Human
gaaaguauuagccuagaaguca

SEQ ID NO: 812101 - RNA, 20 nt, Human
ucaauuuucuacaacauuug

SEQ ID NO: 812102 - RNA, 22 nt, Human
aaacuacuggauuaguaacuua

SEQ ID NO: 812103 - RNA, 22 nt, Human
cagcuguccuuccuggugggcg

SEQ ID NO: 812104 - RNA, 22 nt, Human
cagagggcacaugguuuccuca

SEQ ID NO: 812105 - RNA, 22 nt, Human
cuacauuucauccagggagagc

SEQ ID NO: 812106 - RNA, 22 nt, Human
uguaaguagaacaacauaaucu

SEQ ID NO: 812107 - RNA, 22 nt, Human
agccucuggcccuagacugcuu

SEQ ID NO: 812108 - RNA, 22 nt, Human
uaaacugcuucucucagucugu

SEQ ID NO: 812109 - RNA, 22 nt, Human
ccaggagcaggagcugcagcug

SEQ ID NO: 812110 - RNA, 22 nt, Human
ucaggcuggggugcuaaggugu

SEQ ID NO: 812111 - RNA, 22 nt, Human
gaaaccucuuagccucucuuug

SEQ ID NO: 812112 - RNA, 22 nt, Human
cagaggcacagugcgggccacu

SEQ ID NO: 812113 - RNA, 22 nt, Human
ccaucaguggcaaauaaacacc

SEQ ID NO: 812114 - RNA, 22 nt, Human
cagauaugcugagacuccugug

SEQ ID NO: 812115 - RNA, 22 nt, Human
agaggcucuggugcagcaugca

SEQ ID NO: 812116 - RNA, 22 nt, Human
ucuggcugcaccauuauaguag

SEQ ID NO: 812117 - RNA, 22 nt, Human
gggccugccauugcugccccag

SEQ ID NO: 812118 - RNA, 22 nt, Human
caaagacacgggaaacaacguu

SEQ ID NO: 812119 - RNA, 22 nt, Human
ucugccuccugcuugucccgac

SEQ ID NO: 812120 - RNA, 22 nt, Human
gacagcuguacacuccugguua

SEQ ID NO: 812121 - RNA, 22 nt, Human
cgcagcagccccgugguaggug

SEQ ID NO: 812122 - RNA, 22 nt, Human
aagccaguggcuucucccugcu

SEQ ID NO: 812123 - RNA, 22 nt, Human
aaagugcauagaguagugccua

SEQ ID NO: 812124 - RNA, 22 nt, Human
ggcuagggacuccuccucaggg

SEQ ID NO: 812125 - RNA, 22 nt, Human
uucuuuaucaguuacucauagg

SEQ ID NO: 812126 - RNA, 22 nt, Human
uggguggagcuccacaaccugu

SEQ ID NO: 812127 - RNA, 22 nt, Human
ugccugggugcccucugcuccu

SEQ ID NO: 812128 - RNA, 22 nt, Human
caaacauuuguuggaaccccug

SEQ ID NO: 812129 - RNA, 22 nt, Human
uucaguguggaaugugaacugc

SEQ ID NO: 812130 - RNA, 22 nt, Human
aguccagaccccggcagcuggu

SEQ ID NO: 812131 - RNA, 19 nt, Human
cuacuuuauaauaugccuc

SEQ ID NO: 812132 - RNA, 22 nt, Human
aacuucauuuauaaugucauua

SEQ ID NO: 812133 - RNA, 19 nt, Human
aggcagcaggccagggaug

SEQ ID NO: 812134 - RNA, 22 nt, Human
ggcaggcugggugucauggagu

SEQ ID NO: 812135 - RNA, 22 nt, Human
uugaaugaauuugagcagagau

SEQ ID NO: 812136 - RNA, 22 nt, Human
aagcuuuggagaggcgggcagg

SEQ ID NO: 812137 - RNA, 22 nt, Human
uauguugagugaaagaagcuag

SEQ ID NO: 812138 - RNA, 22 nt, Human
agccuggcuuaauccuccuuuu

SEQ ID NO: 812139 - RNA, 22 nt, Human
gaaggaaaacagaucugccuga

SEQ ID NO: 812140 - RNA, 21 nt, Human
uccucugcagugagguggccu

SEQ ID NO: 812141 - RNA, 22 nt, Human
cagagccauaaaggugaaagag

SEQ ID NO: 812142 - RNA, 22 nt, Human
agagaaggguguagccugggcc

SEQ ID NO: 812143 - RNA, 22 nt, Human
aagcugaagccggaucaaaaag

SEQ ID NO: 812144 - RNA, 22 nt, Human
acaguguaugauauuucacagu

SEQ ID NO: 812145 - RNA, 22 nt, Human
ggggucacacuguggugacugg

SEQ ID NO: 812146 - RNA, 19 nt, Human
agggccaggauucuggaac

SEQ ID NO: 812147 - RNA, 22 nt, Human
uagccacaugcagacuuucaug

SEQ ID NO: 812148 - RNA, 23 nt, Human
ccagugauugccuggaaggaggu

SEQ ID NO: 812149 - RNA, 22 nt, Human
augcagcugcugacagcuuuca

SEQ ID NO: 812150 - RNA, 19 nt, Human
ugcuggagugacauucuga

SEQ ID NO: 812151 - RNA, 22 nt, Human
ucagccucauuuucugcucugu

SEQ ID NO: 812152 - RNA, 22 nt, Human
aggcagugcugugcccugaacc

SEQ ID NO: 812153 - RNA, 22 nt, Human
uaggaaauacuguaaguuuggg

SEQ ID NO: 812154 - RNA, 22 nt, Human
cuuugcagauuuguuuagugcu

SEQ ID NO: 812155 - RNA, 23 nt, Human
agcuucauuauuuuccaugaucu

SEQ ID NO: 812156 - RNA, 22 nt, Human
cccuccagccauggacccaggu

SEQ ID NO: 812157 - RNA, 22 nt, Human
acuucugagaaauuuaaggaca

SEQ ID NO: 812158 - RNA, 22 nt, Human
aggccugagcagaggaguggac

SEQ ID NO: 812159 - RNA, 19 nt, Human
cucagagaggggcagugcc

SEQ ID NO: 812160 - RNA, 22 nt, Human
acaaugaugcagaugaguaaga

SEQ ID NO: 812161 - RNA, 22 nt, Human
gcagggcgcguuugagcgggcu

SEQ ID NO: 812162 - RNA, 22 nt, Human
ccugcagcuguaggagaaggcg

SEQ ID NO: 812163 - RNA, 22 nt, Human
aagugauuuuccuacuugcuaa

SEQ ID NO: 812164 - RNA, 22 nt, Human
uuaugauuuagaaagauucacu

SEQ ID NO: 812165 - RNA, 22 nt, Human
agcugcugguuuaagggauggg

SEQ ID NO: 812166 - RNA, 22 nt, Human
aguagaaagaaggcacugggcc

SEQ ID NO: 812167 - RNA, 22 nt, Human
ugccucccucucugccacugga

SEQ ID NO: 812168 - RNA, 22 nt, Human
gccuggagccucagcaaggagg

SEQ ID NO: 812169 - RNA, 22 nt, Human
ccccaugaaguagggucucuga

SEQ ID NO: 812170 - RNA, 22 nt, Human
auacagaagccuguauuucugg

SEQ ID NO: 812171 - RNA, 22 nt, Human
uaugcaacaucugguagaaauc

SEQ ID NO: 812172 - RNA, 22 nt, Human
caugguacugccacagaagagu

SEQ ID NO: 812173 - RNA, 22 nt, Human
ucaaacaugaaagcuugauuuu

SEQ ID NO: 812174 - RNA, 22 nt, Human
caggcauggaaaagcccagagg

SEQ ID NO: 812175 - RNA, 22 nt, Human
uccaaggacgcuggaccccugc

SEQ ID NO: 812176 - RNA, 22 nt, Human
uugauucauggacaggccaggu

SEQ ID NO: 812177 - RNA, 22 nt, Human
gcacagggaggcuggccuggcc

SEQ ID NO: 812178 - RNA, 22 nt, Human
acauagcucaguaucacuuacu

SEQ ID NO: 812179 - RNA, 22 nt, Human
gcacugggcuccaggaaggagg

SEQ ID NO: 812180 - RNA, 22 nt, Human
cagcuggcaaguggagcagggu

SEQ ID NO: 812181 - RNA, 17 nt, Human
guccugggaggagagag

SEQ ID NO: 812182 - RNA, 22 nt, Human
uuuccuacccuuccaggcagag

SEQ ID NO: 812183 - RNA, 22 nt, Human
acucucccuuggagccucaggc

SEQ ID NO: 812184 - RNA, 22 nt, Human
uaaggcucccuuugccacuugu

SEQ ID NO: 812185 - RNA, 22 nt, Human
guggcccacuuacgucaugugu

SEQ ID NO: 812186 - RNA, 22 nt, Human
uauuugcaggcuuuugucaugg

SEQ ID NO: 812187 - RNA, 22 nt, Human
gcugccuguugaagggucugug

SEQ ID NO: 812188 - RNA, 22 nt, Human
gccaggaggcugcuguguaggc

SEQ ID NO: 812189 - RNA, 22 nt, Human
gcugauuuugucacauagcaag

SEQ ID NO: 812190 - RNA, 23 nt, Human
ggugguggugagucacgggcuca

SEQ ID NO: 812191 - RNA, 22 nt, Human
gcagauggaucaccugaggucg

SEQ ID NO: 812192 - RNA, 19 nt, Human
uucauucucuuauuguugu

SEQ ID NO: 812193 - RNA, 22 nt, Human
aguugaaauuagaguccuggcu

SEQ ID NO: 812194 - RNA, 17 nt, Human
cagugaucauuacauua

SEQ ID NO: 812195 - RNA, 22 nt, Human
aaaacacugcaaagcugauugg

SEQ ID NO: 812196 - RNA, 22 nt, Human
uccugccuucauacugcuguau

SEQ ID NO: 812197 - RNA, 22 nt, Human
uccugagaugagacagugcugc

SEQ ID NO: 812198 - RNA, 22 nt, Human
gggaggagcugagugugugugc

SEQ ID NO: 812199 - RNA, 21 nt, Human
gccagugcugucugugugauc

SEQ ID NO: 812200 - RNA, 22 nt, Human
agccaagacauuuagaaaagcu

SEQ ID NO: 812201 - RNA, 22 nt, Human
ccuggcugcauuuugcuggaug

SEQ ID NO: 812202 - RNA, 22 nt, Human
acugcaacaccuccuggguuca

SEQ ID NO: 812203 - RNA, 22 nt, Human
auagcaaaggacaauagucagu

SEQ ID NO: 812204 - RNA, 22 nt, Human
uacaaacuguccagcccagagg

SEQ ID NO: 812205 - RNA, 22 nt, Human
aaguugagaugucauaggagac

SEQ ID NO: 812206 - RNA, 20 nt, Human
cuccagccccugcccugguc

SEQ ID NO: 812207 - RNA, 22 nt, Human
aaaugcagguaguauuuauuuu

SEQ ID NO: 812208 - RNA, 23 nt, Human
uucaaagcuuaagcucuuuccac

SEQ ID NO: 812209 - RNA, 22 nt, Human
cagcugauuugagaaagaauga

SEQ ID NO: 812210 - RNA, 22 nt, Human
uguaugcauaaaauuauuuaca

SEQ ID NO: 812211 - RNA, 22 nt, Human
gggaccagaagaaggaugguga

SEQ ID NO: 812212 - RNA, 22 nt, Human
ugaaaugaucaguuugguuacu

SEQ ID NO: 812213 - RNA, 22 nt, Human
uguuucaaguuugcucaaagga

SEQ ID NO: 812214 - RNA, 22 nt, Human
gcugagcugggacaguccuggg

SEQ ID NO: 812215 - RNA, 23 nt, Human
aggcagugucucuuauccugucc

SEQ ID NO: 812216 - RNA, 22 nt, Human
gaagauuuuucuuaaugcuccg

SEQ ID NO: 812217 - RNA, 22 nt, Human
uccucagaagaaccccuagauu

SEQ ID NO: 812218 - RNA, 22 nt, Human
gaggagcuugaggcuaggagcc

SEQ ID NO: 812219 - RNA, 22 nt, Human
acuggcaguggcagcagaaaga

SEQ ID NO: 812220 - RNA, 22 nt, Human
aucugacaucucccucugacau

SEQ ID NO: 812221 - RNA, 22 nt, Human
gaauuugaaaagugaugggaau

SEQ ID NO: 812222 - RNA, 22 nt, Human
ugucugaaggcagguggagaac

SEQ ID NO: 812223 - RNA, 22 nt, Human
aaaccauuagguuuuaucuacu

SEQ ID NO: 812224 - RNA, 22 nt, Human
aagaggaacugggggcugaguc

SEQ ID NO: 812225 - RNA, 22 nt, Human
ggguccagagccucagcccaga

SEQ ID NO: 812226 - RNA, 22 nt, Human
ccaggcugagcaugauuggagc

SEQ ID NO: 812227 - RNA, 22 nt, Human
agcugggaagaguuuucugcag

SEQ ID NO: 812228 - RNA, 22 nt, Human
ggcuguggucucaucuagccuu

SEQ ID NO: 812229 - RNA, 22 nt, Human
uuuagucauuuggauuugaucu

SEQ ID NO: 812230 - RNA, 22 nt, Human
gggcacuucuaagcauggggcu

SEQ ID NO: 812231 - RNA, 22 nt, Human
caccugcccagcaccugggauc

SEQ ID NO: 812232 - RNA, 22 nt, Human
agcagggcuccugaaagccgcg

SEQ ID NO: 812233 - RNA, 22 nt, Human
aacuuaaacccacucauguaga

SEQ ID NO: 812234 - RNA, 22 nt, Human
cuaaacaugcaagagcuucugg

SEQ ID NO: 812235 - RNA, 22 nt, Human
cugcuguccaggagugcccugu

SEQ ID NO: 812236 - RNA, 22 nt, Human
aaccucaaacucuugggcuuaa

SEQ ID NO: 812237 - RNA, 22 nt, Human
guuuuauaggcuguugcuauau

SEQ ID NO: 812238 - RNA, 22 nt, Human
ccugcugggccugagcaaugag

SEQ ID NO: 812239 - RNA, 20 nt, Human
augaguuuaaacauucagag

SEQ ID NO: 812240 - RNA, 22 nt, Human
aaggcugguuuccuugauguuu

SEQ ID NO: 812241 - RNA, 18 nt, Human
gggugcaggcacugacug

SEQ ID NO: 812242 - RNA, 22 nt, Human
cuauuaaauacucuucaaauug

SEQ ID NO: 812243 - RNA, 22 nt, Human
ccugacaggagaagcgcagcau

SEQ ID NO: 812244 - RNA, 20 nt, Human
auggaggaagggcaagagaa

SEQ ID NO: 812245 - RNA, 22 nt, Human
ggcuagggaaauccugauccaa

SEQ ID NO: 812246 - RNA, 22 nt, Human
cuggcucacaggugagaugcau

SEQ ID NO: 812247 - RNA, 22 nt, Human
aggcaguggcugagaccagggg

SEQ ID NO: 812248 - RNA, 22 nt, Human
uugauucaucuucuaauaccca

SEQ ID NO: 812249 - RNA, 22 nt, Human
uccugcuggaauggaaaaugaa

SEQ ID NO: 812250 - RNA, 22 nt, Human
augcuauguaacuggcagauag

SEQ ID NO: 812251 - RNA, 22 nt, Human
aacuucuaaucuguacaguuuu

SEQ ID NO: 812252 - RNA, 22 nt, Human
gcaaacauucaggaguacagga

SEQ ID NO: 812253 - RNA, 22 nt, Human
cuugcuguugugggagacuggg

SEQ ID NO: 812254 - RNA, 22 nt, Human
uuugauaauacacaagagaaag

SEQ ID NO: 812255 - RNA, 22 nt, Human
gcugccucuguagcuuuggacc

SEQ ID NO: 812256 - RNA, 22 nt, Human
cagcacaguuucccccaugagc

SEQ ID NO: 812257 - RNA, 22 nt, Human
cugccucucaggucccugagau

SEQ ID NO: 812258 - RNA, 22 nt, Human
uagggcuggcgugcucagggaa

SEQ ID NO: 812259 - RNA, 22 nt, Human
uugggguguucaggguacuucu

SEQ ID NO: 812260 - RNA, 22 nt, Human
aaggcuccgugacuggggcuga

SEQ ID NO: 812261 - RNA, 22 nt, Human
ugaagcaguuacuggguguuaa

SEQ ID NO: 812262 - RNA, 22 nt, Human
uagagcaguuggcagcuguauu

SEQ ID NO: 812263 - RNA, 22 nt, Human
ccaccaugggaagagagacuaa

SEQ ID NO: 812264 - RNA, 22 nt, Human
acuuguaaacaaaucuaaugua

SEQ ID NO: 812265 - RNA, 22 nt, Human
acagugugguuguuucugguua

SEQ ID NO: 812266 - RNA, 22 nt, Human
gggcccugaucugugagcgcag

SEQ ID NO: 812267 - RNA, 22 nt, Human
uuucaaguggcgagauaaggaa

SEQ ID NO: 812268 - RNA, 22 nt, Human
uaauuuuaugacaguguauuuu

SEQ ID NO: 812269 - RNA, 18 nt, Human
aaaggcagauuacuggga

SEQ ID NO: 812270 - RNA, 22 nt, Human
cuguauuuaguuaaaaugcuaa

SEQ ID NO: 812271 - RNA, 22 nt, Human
uccagcucuaaggcugauagcc

SEQ ID NO: 812272 - RNA, 22 nt, Human
agguagggcuaggcugcgucug

SEQ ID NO: 812273 - RNA, 22 nt, Human
gaaaaagugaccuugguagcua

SEQ ID NO: 812274 - RNA, 22 nt, Human
cacacaaauauucuggaggcaa

SEQ ID NO: 812275 - RNA, 20 nt, Human
gucagaggacccuagagcga

SEQ ID NO: 812276 - RNA, 22 nt, Human
cauggcugcgagaagagugggu

SEQ ID NO: 812277 - RNA, 22 nt, Human
ugaguuuaaugauauuuauaug

SEQ ID NO: 812278 - RNA, 22 nt, Human
aaucagaaaggcuaaggaagca

SEQ ID NO: 812279 - RNA, 22 nt, Human
cuggaagugggguuggcuugaa

SEQ ID NO: 812280 - RNA, 22 nt, Human
agagguggccaugggcgcugga

SEQ ID NO: 812281 - RNA, 22 nt, Human
aggguccaucaaggacugcaca

SEQ ID NO: 812282 - RNA, 22 nt, Human
cagaggaagagauacaagcccu

SEQ ID NO: 812283 - RNA, 22 nt, Human
cuggagagggagcccuggcagu

SEQ ID NO: 812284 - RNA, 22 nt, Human
agcaggcaccagggcucguccu

SEQ ID NO: 812285 - RNA, 22 nt, Human
ugcuggcuguucuagggaggcc

SEQ ID NO: 812286 - RNA, 22 nt, Human
agucaauauucaaguguaaaua

SEQ ID NO: 812287 - RNA, 22 nt, Human
agccagcuguggcuauggcucc

SEQ ID NO: 812288 - RNA, 22 nt, Human
uucaauaugauauuagcugugg

SEQ ID NO: 812289 - RNA, 18 nt, Human
uauauucugugcccuggu

SEQ ID NO: 812290 - RNA, 22 nt, Human
guggcagggugcucaucaugca

SEQ ID NO: 812291 - RNA, 22 nt, Human
gaacacagaagaauuucuaaga

SEQ ID NO: 812292 - RNA, 22 nt, Human
acagucuucaugcuagaauggc

SEQ ID NO: 812293 - RNA, 22 nt, Human
gcugcuggaagcaugcgaugaa

SEQ ID NO: 812294 - RNA, 19 nt, Human
ccucugccagcccgccucu

SEQ ID NO: 812295 - RNA, 22 nt, Human
uuacacaugcuuuguguguaug

SEQ ID NO: 812296 - RNA, 22 nt, Human
acacauuuucuaacagggauca

SEQ ID NO: 812297 - RNA, 22 nt, Human
auugaaaaaugacuauugcuua

SEQ ID NO: 812298 - RNA, 22 nt, Human
ccagagaggccuuggcaagaca

SEQ ID NO: 812299 - RNA, 22 nt, Human
cuuuacaaccuaaguugaagcu

SEQ ID NO: 812300 - RNA, 22 nt, Human
uucccucuuucacugugauuuu

SEQ ID NO: 812301 - RNA, 22 nt, Human
aagggggccacaccugguguga

SEQ ID NO: 812302 - RNA, 22 nt, Human
gccaguaagugguagaguugag

SEQ ID NO: 812303 - RNA, 22 nt, Human
cuguauuuucaugccuacguac

SEQ ID NO: 812304 - RNA, 22 nt, Human
ugcagcuggaacuuagaggaga

SEQ ID NO: 812305 - RNA, 22 nt, Human
uggggcuguccuuagucugaga

SEQ ID NO: 812306 - RNA, 22 nt, Human
ggcaccuggauguagcagugaa

SEQ ID NO: 812307 - RNA, 22 nt, Human
acaggcaggcgggacagcccga

SEQ ID NO: 812308 - RNA, 22 nt, Human
gauaaacuuguggaguuuuggu

SEQ ID NO: 812309 - RNA, 19 nt, Human
uguggggagucagggggcu

SEQ ID NO: 812310 - RNA, 22 nt, Human
acugccuggccuggccucacug

SEQ ID NO: 812311 - RNA, 22 nt, Human
ugccuuugcaauugaggaggau

SEQ ID NO: 812312 - RNA, 22 nt, Human
aauuucacuggaaaagauaauu

SEQ ID NO: 812313 - RNA, 22 nt, Human
uuugauaguugauuaaauucca

SEQ ID NO: 812314 - RNA, 22 nt, Human
ggaccaggcugagcaccugccu

SEQ ID NO: 812315 - RNA, 19 nt, Human
ucugggguguggccuggca

SEQ ID NO: 812316 - RNA, 22 nt, Human
acaggaugggcgcacagagcua

SEQ ID NO: 812317 - RNA, 22 nt, Human
aacauucucauugggauaugug

SEQ ID NO: 812318 - RNA, 22 nt, Human
auaccuuuuacucauuauccau

SEQ ID NO: 812319 - RNA, 22 nt, Human
gagcaggccagcaauggaaggg

SEQ ID NO: 812320 - RNA, 22 nt, Human
caggaaaaaugccaggagucag

SEQ ID NO: 812321 - RNA, 22 nt, Human
aagggcagaauagagaagaugg

SEQ ID NO: 812322 - RNA, 22 nt, Human
ucauuauagaguuguauuuuag

SEQ ID NO: 812323 - RNA, 22 nt, Human
cucagacugguggguaaaaccu

SEQ ID NO: 812324 - RNA, 22 nt, Human
gagggcagugaauuuugaagcu

SEQ ID NO: 812325 - RNA, 22 nt, Human
ugcacagggagggggccagcuc

SEQ ID NO: 812326 - RNA, 22 nt, Human
uuuccuucaucaucugagagcu

SEQ ID NO: 812327 - RNA, 22 nt, Human
ucaaguaugacaucaaguuucu

SEQ ID NO: 812328 - RNA, 22 nt, Human
gagaggagaagccugcgcuuca

SEQ ID NO: 812329 - RNA, 22 nt, Human
ugagccagucugucugggugaa

SEQ ID NO: 812330 - RNA, 22 nt, Human
cccagggauguggcagauguua

SEQ ID NO: 812331 - RNA, 22 nt, Human
auguuacauaguccuuauuugu

SEQ ID NO: 812332 - RNA, 22 nt, Human
ugucucugugcauuugugcuuc

SEQ ID NO: 812333 - RNA, 22 nt, Human
auauauuugagaauauucauga

SEQ ID NO: 812334 - RNA, 22 nt, Human
ccagccuucaccugcucugguc

SEQ ID NO: 812335 - RNA, 22 nt, Human
agaacauuugucgaucaauuug

SEQ ID NO: 812336 - RNA, 22 nt, Human
uacaauuacucagcucugcugu

SEQ ID NO: 812337 - RNA, 22 nt, Human
cugcccucgggcccucccauag

SEQ ID NO: 812338 - RNA, 22 nt, Human
ccagagcagggcagcagggcuc

SEQ ID NO: 812339 - RNA, 22 nt, Human
gaagccaacauuccaaguagaa

SEQ ID NO: 812340 - RNA, 22 nt, Human
ggagcccagguuguuugugcag

SEQ ID NO: 812341 - RNA, 22 nt, Human
uggccacuccucccugcaggcu

SEQ ID NO: 812342 - RNA, 22 nt, Human
agcuggagaauguggaugaucc

SEQ ID NO: 812343 - RNA, 22 nt, Human
uagucagacccaagagagccau

SEQ ID NO: 812344 - RNA, 22 nt, Human
agauauuaaucguacauaaggu

SEQ ID NO: 812345 - RNA, 22 nt, Human
gccagcccagcuccaggggaaa

SEQ ID NO: 812346 - RNA, 22 nt, Human
cucugcaggcacccaggguggg

SEQ ID NO: 812347 - RNA, 22 nt, Human
uagcuugucagugaauagcugu

SEQ ID NO: 812348 - RNA, 22 nt, Human
ccuggcaggcuggggacagugc

SEQ ID NO: 812349 - RNA, 22 nt, Human
acccagcccagaaucuggggcc

SEQ ID NO: 812350 - RNA, 22 nt, Human
ugcaaaaugacuucugaaaaga

SEQ ID NO: 812351 - RNA, 22 nt, Human
ugccagggcugcuacuggcuga

SEQ ID NO: 812352 - RNA, 22 nt, Human
ggcaggugaucuagagucaaua

SEQ ID NO: 812353 - RNA, 22 nt, Human
cauuuucagcacccaucugaaa

SEQ ID NO: 812354 - RNA, 22 nt, Human
aagcugaggcccauggcaaggu

SEQ ID NO: 812355 - RNA, 22 nt, Human
uuucaaguuguuuauauccaga

SEQ ID NO: 812356 - RNA, 22 nt, Human
accuuuccaaguaucagguggu

SEQ ID NO: 812357 - RNA, 22 nt, Human
uggcuggcccugggagugcaga

SEQ ID NO: 812358 - RNA, 22 nt, Human
cugcaauaguuuagaauaauug

SEQ ID NO: 812359 - RNA, 22 nt, Human
uggagggaacccaggcugcucu

SEQ ID NO: 812360 - RNA, 22 nt, Human
uuugucuuggccucaguuuucu

SEQ ID NO: 812361 - RNA, 22 nt, Human
acagaaauugggcaaauggaag

SEQ ID NO: 812362 - RNA, 22 nt, Human
agugcauucucuaauuacaggu

SEQ ID NO: 812363 - RNA, 22 nt, Human
ucuuucccaguagcucucccag

SEQ ID NO: 812364 - RNA, 22 nt, Human
accaguuuuuuauacaucuucu

SEQ ID NO: 812365 - RNA, 23 nt, Human
uaggcaggacucagauaugacag

SEQ ID NO: 812366 - RNA, 22 nt, Human
cggauccucagucgugcgggag

SEQ ID NO: 812367 - RNA, 20 nt, Human
agugugcauuuagagucugc

SEQ ID NO: 812368 - RNA, 22 nt, Human
gaguccugauccuuagcucucc

SEQ ID NO: 812369 - RNA, 22 nt, Human
cugaagagacuggagggggcau

SEQ ID NO: 812370 - RNA, 22 nt, Human
auacacaucuauuuaagagaca

SEQ ID NO: 812371 - RNA, 22 nt, Human
ggccagggaggagaggccccug

SEQ ID NO: 812372 - RNA, 22 nt, Human
guuauaaauaccuaauaggauu

SEQ ID NO: 812373 - RNA, 22 nt, Human
ucaugcaacggcucgcugagcc

SEQ ID NO: 812374 - RNA, 19 nt, Human
aggguccaggcccugugga

SEQ ID NO: 812375 - RNA, 22 nt, Human
uacaguuuuucacugaagaugu

SEQ ID NO: 812376 - RNA, 18 nt, Human
ccuaauaugagggguccu

SEQ ID NO: 812377 - RNA, 20 nt, Human
uauaaauucagagcuuuggu

SEQ ID NO: 812378 - RNA, 22 nt, Human
uuuggcuuuagugccuucugau

SEQ ID NO: 812379 - RNA, 22 nt, Human
aagucagauaggugaguccaaa

SEQ ID NO: 812380 - RNA, 22 nt, Human
agaaggccaauagggugcacug

SEQ ID NO: 812381 - RNA, 22 nt, Human
ugcacacauaugagcaugugug

SEQ ID NO: 812382 - RNA, 22 nt, Human
cuggagugaagucuggcagcuu

SEQ ID NO: 812383 - RNA, 22 nt, Human
ucuaaggccuucaugucaguau

SEQ ID NO: 812384 - RNA, 22 nt, Human
cagguaugaggacacugacagc

SEQ ID NO: 812385 - RNA, 21 nt, Human
ggccugaguauaggacaggcc

SEQ ID NO: 812386 - RNA, 22 nt, Human
ugcuggaauuuuucuaggauuu

SEQ ID NO: 812387 - RNA, 19 nt, Human
uggagaggaaaugcugcuc

SEQ ID NO: 812388 - RNA, 22 nt, Human
ugugggcaggcccgggucugag

SEQ ID NO: 812389 - RNA, 22 nt, Human
gccaggagaaaaggcgaaugau

SEQ ID NO: 812390 - RNA, 22 nt, Human
aaagauguuuuauaaguuaugg

SEQ ID NO: 812391 - RNA, 22 nt, Human
auugcuaaugugcgaaugugua

SEQ ID NO: 812392 - RNA, 22 nt, Human
gcugccugccuaguuccacagu

SEQ ID NO: 812393 - RNA, 22 nt, Human
ccaggccugugcaaggagggag

SEQ ID NO: 812394 - RNA, 22 nt, Human
ugcugggggcuuucuggauacc

SEQ ID NO: 812395 - RNA, 22 nt, Human
cuagggaaugagagacuggauc

SEQ ID NO: 812396 - RNA, 22 nt, Human
cuggcagaguugggucucaaau

SEQ ID NO: 812397 - RNA, 22 nt, Human
cagcaggcaggugggccaaguc

SEQ ID NO: 812398 - RNA, 22 nt, Human
ucuugauuuugugaauaaguug

SEQ ID NO: 812399 - RNA, 21 nt, Human
ugaaaugagaaugcugagcac

SEQ ID NO: 812400 - RNA, 22 nt, Human
gccuccuguuaugccaugugcc

SEQ ID NO: 812401 - RNA, 22 nt, Human
augggguggaguccgggcagcg

SEQ ID NO: 812402 - RNA, 20 nt, Human
accuggcucucaggagcaac

SEQ ID NO: 812403 - RNA, 22 nt, Human
gaggccugggagaacuguuuuu

SEQ ID NO: 812404 - RNA, 22 nt, Human
auugucucuuucaauaacuugu

SEQ ID NO: 812405 - RNA, 22 nt, Human
gaagcagugugaacccauguaa

SEQ ID NO: 812406 - RNA, 22 nt, Human
ucacaugagguuaugacaaagc

SEQ ID NO: 812407 - RNA, 22 nt, Human
guucuggguucuggguuauugg

SEQ ID NO: 812408 - RNA, 22 nt, Human
ugaaugauuaaaacccggacua

SEQ ID NO: 812409 - RNA, 22 nt, Human
cugggagaggaaccucgagggu

SEQ ID NO: 812410 - RNA, 22 nt, Human
auucaacuagugauuguguuau

SEQ ID NO: 812411 - RNA, 22 nt, Human
uuugcaaacggcccugaguccc

SEQ ID NO: 812412 - RNA, 22 nt, Human
auggacagcuggccucaaggga

SEQ ID NO: 812413 - RNA, 22 nt, Human
aucuuuggaaagccaagcacag

SEQ ID NO: 812414 - RNA, 22 nt, Human
aaauauugguaggaugcuuguu

SEQ ID NO: 812415 - RNA, 22 nt, Human
uuugaaauuggcucauugguuu

SEQ ID NO: 812416 - RNA, 19 nt, Human
ucucagagcccuagaggcc

SEQ ID NO: 812417 - RNA, 22 nt, Human
ugggauggcauccugggccuug

SEQ ID NO: 812418 - RNA, 22 nt, Human
acagggagauaucuucaauauc

SEQ ID NO: 812419 - RNA, 22 nt, Human
uagcaaaaacugcaguuacuuu

SEQ ID NO: 812420 - RNA, 22 nt, Human
ccagaggcuggguucaccucag

SEQ ID NO: 812421 - RNA, 22 nt, Human
uaacaaaguaccauagauuggg

SEQ ID NO: 812422 - RNA, 22 nt, Human
gcuggggagcaagaguagugag

SEQ ID NO: 812423 - RNA, 19 nt, Human
cuggccaggccaggggccc

SEQ ID NO: 812424 - RNA, 22 nt, Human
uagcagagcagggaucagagcc

SEQ ID NO: 812425 - RNA, 22 nt, Human
gaggcacagaguaggugcacac

SEQ ID NO: 812426 - RNA, 22 nt, Human
uuuaagaugguauuuuauaaag

SEQ ID NO: 812427 - RNA, 22 nt, Human
ccccugaagacaauggagaggu

SEQ ID NO: 812428 - RNA, 22 nt, Human
ucagaaucugcauuuaacaaaa

SEQ ID NO: 812429 - RNA, 22 nt, Human
accugucuauaaaagugaauac

SEQ ID NO: 812430 - RNA, 22 nt, Human
uuuucugaccuaucuacauuua

SEQ ID NO: 812431 - RNA, 22 nt, Human
cagcuuugccaaguaaggucuu

SEQ ID NO: 812432 - RNA, 22 nt, Human
gcacuuguggauuugauauaca

SEQ ID NO: 812433 - RNA, 22 nt, Human
agccucucauguucucccccag

SEQ ID NO: 812434 - RNA, 22 nt, Human
uuauugcugauaguguuuauaa

SEQ ID NO: 812435 - RNA, 22 nt, Human
uaaaggaagaauucucugugau

SEQ ID NO: 812436 - RNA, 22 nt, Human
caggccucgaggagacagcuac

SEQ ID NO: 812437 - RNA, 22 nt, Human
acaagaguaucuuugacuuuag

SEQ ID NO: 812438 - RNA, 22 nt, Human
uucuuuggggucuccagcauag

SEQ ID NO: 812439 - RNA, 22 nt, Human
ugcuucacaagaauucaggacc

SEQ ID NO: 812440 - RNA, 22 nt, Human
uggcucaguuugggggauugaa

SEQ ID NO: 812441 - RNA, 22 nt, Human
cacaggaauauaaguuugaguu

SEQ ID NO: 812442 - RNA, 22 nt, Human
gaaacucucgcauccugggaac

SEQ ID NO: 812443 - RNA, 22 nt, Human
augcuauaaacucuaggucauu

SEQ ID NO: 812444 - RNA, 22 nt, Human
ucagcaccaguuauccucaggg

SEQ ID NO: 812445 - RNA, 22 nt, Human
uaagagaaggaucuguuccagg

SEQ ID NO: 812446 - RNA, 22 nt, Human
gccaggcaggugucggagcccu

SEQ ID NO: 812447 - RNA, 22 nt, Human
auucacaugugcuucuuaucac

SEQ ID NO: 812448 - RNA, 22 nt, Human
cccaggaguuugaguucagcau

SEQ ID NO: 812449 - RNA, 22 nt, Human
ugagccaugggacuccaaggga

SEQ ID NO: 812450 - RNA, 22 nt, Human
acagaacugcaggaggaaaagc

SEQ ID NO: 812451 - RNA, 22 nt, Human
uuuauucaagaugagguucaug

SEQ ID NO: 812452 - RNA, 22 nt, Human
ggccugagcagacagcaugaug

SEQ ID NO: 812453 - RNA, 22 nt, Human
uuuacuguguccaucugugacu

SEQ ID NO: 812454 - RNA, 22 nt, Human
aggcuccaaauuaccaagcucu

SEQ ID NO: 812455 - RNA, 22 nt, Human
uaguuuuacuugcgaugauaau

SEQ ID NO: 812456 - RNA, 22 nt, Human
guucuauuccccuuaucuguga

SEQ ID NO: 812457 - RNA, 22 nt, Human
uucuaagugauucuagcuggac

SEQ ID NO: 812458 - RNA, 22 nt, Human
uggcagggccuaccccaauauc

SEQ ID NO: 812459 - RNA, 22 nt, Human
caagucauuacugaaaugucac

SEQ ID NO: 812460 - RNA, 17 nt, Human
caggcacaugaagccag

SEQ ID NO: 812461 - RNA, 20 nt, Human
uaaagcagccguggagggua

SEQ ID NO: 812462 - RNA, 22 nt, Human
cacaauuuuaauacacagucaa

SEQ ID NO: 812463 - RNA, 22 nt, Human
acagugauuuuaggauagaugg

SEQ ID NO: 812464 - RNA, 22 nt, Human
uguuuacuuaaauguuuucaua

SEQ ID NO: 812465 - RNA, 22 nt, Human
gagcuuuguaaaaaacuugcac

SEQ ID NO: 812466 - RNA, 22 nt, Human
acuggggugaaauuggaguguc

SEQ ID NO: 812467 - RNA, 22 nt, Human
gcacaacaccaagggagguauc

SEQ ID NO: 812468 - RNA, 22 nt, Human
aucaguguuguugauuggauag

SEQ ID NO: 812469 - RNA, 19 nt, Human
ccaggccugcgggcguugg

SEQ ID NO: 812470 - RNA, 22 nt, Human
ugagccguggucucugagggug

SEQ ID NO: 812471 - RNA, 22 nt, Human
aaucacagaguccagcagauga

SEQ ID NO: 812472 - RNA, 21 nt, Human
auauuuuuguuuggacuguca

SEQ ID NO: 812473 - RNA, 18 nt, Human
uuggaggauguccaugaa

SEQ ID NO: 812474 - RNA, 22 nt, Human
ucuucuuaugugccauuaucuc

SEQ ID NO: 812475 - RNA, 17 nt, Human
ggccuuggggccucagu

SEQ ID NO: 812476 - RNA, 22 nt, Human
acugggcauuuugaacguucuu

SEQ ID NO: 812477 - RNA, 22 nt, Human
guucuauucuccaguuacauau

SEQ ID NO: 812478 - RNA, 17 nt, Human
ugaaagaaucagggaga

SEQ ID NO: 812479 - RNA, 22 nt, Human
cugaggcugggcuugccuucuu

SEQ ID NO: 812480 - RNA, 22 nt, Human
gccagcuuuggcacaggguggu

SEQ ID NO: 812481 - RNA, 22 nt, Human
ggagagaggagcccacugcugu

SEQ ID NO: 812482 - RNA, 22 nt, Human
uucuucauggguucuuuuagga

SEQ ID NO: 812483 - RNA, 22 nt, Human
uccagcaguccaugugagacac

SEQ ID NO: 812484 - RNA, 22 nt, Human
aaaaccugugaauaguuaacuc

SEQ ID NO: 812485 - RNA, 22 nt, Human
cauuucuaccaaaugugacugg

SEQ ID NO: 812486 - RNA, 22 nt, Human
ccagcugguuuauauuccccac

SEQ ID NO: 812487 - RNA, 22 nt, Human
cugaggagagguggccuguguu

SEQ ID NO: 812488 - RNA, 22 nt, Human
uuuuuguucccagagaauuugu

SEQ ID NO: 812489 - RNA, 22 nt, Human
cugggcugccagguaggcacac

SEQ ID NO: 812490 - RNA, 22 nt, Human
ccugcagggugcugccacagau

SEQ ID NO: 812491 - RNA, 22 nt, Human
ugucuuuagccagcagucuucu

SEQ ID NO: 812492 - RNA, 22 nt, Human
ggcuagggacacagcucugcuc

SEQ ID NO: 812493 - RNA, 18 nt, Human
gccugccuagagcuugcc

SEQ ID NO: 812494 - RNA, 22 nt, Human
uggcucagagccuugagagcug

SEQ ID NO: 812495 - RNA, 22 nt, Human
caaagccucugauuucacuugu

SEQ ID NO: 812496 - RNA, 22 nt, Human
cagaggaaaugggaaggagaua

SEQ ID NO: 812497 - RNA, 22 nt, Human
agugcaauuuugcuuucccaau

SEQ ID NO: 812498 - RNA, 22 nt, Human
acacaauuuccuguccauaugu

SEQ ID NO: 812499 - RNA, 22 nt, Human
cagaugaggacagaugacuggg

SEQ ID NO: 812500 - RNA, 22 nt, Human
uguacaaagccagaacucccaa

SEQ ID NO: 812501 - RNA, 22 nt, Human
cgggggcacccacaaaugagga

SEQ ID NO: 812502 - RNA, 23 nt, Human
cugaaauaccagaaaaucagugu

SEQ ID NO: 812503 - RNA, 23 nt, Human
aaauaccugaauuagauauuauc

SEQ ID NO: 812504 - RNA, 22 nt, Human
cuucuaggucuugauugaaugu

SEQ ID NO: 812505 - RNA, 22 nt, Human
gcagcagcugacagugggugcc

SEQ ID NO: 812506 - RNA, 22 nt, Human
ucauugagcuguauggacacaa

SEQ ID NO: 812507 - RNA, 22 nt, Human
ucagugucuagggacaguaauc

SEQ ID NO: 812508 - RNA, 22 nt, Human
aguaaacauuucagauuuauuu

SEQ ID NO: 812509 - RNA, 22 nt, Human
uuuacagaagagaaggaugcuu

SEQ ID NO: 812510 - RNA, 20 nt, Human
uauuuagauucaaguaugga

SEQ ID NO: 812511 - RNA, 22 nt, Human
acauucugaaaaacaguguuuu

SEQ ID NO: 812512 - RNA, 22 nt, Human
uuucagaguuggggaaaagcag

SEQ ID NO: 812513 - RNA, 22 nt, Human
cuugccaaauuaacauacagaa

SEQ ID NO: 812514 - RNA, 22 nt, Human
accaggcaguauggugcugcaa

SEQ ID NO: 812515 - RNA, 22 nt, Human
gcucuucuaaagaauguacagg

SEQ ID NO: 812516 - RNA, 22 nt, Human
cugcagcuccccugagaucaag

SEQ ID NO: 812517 - RNA, 22 nt, Human
cuguuuauuacacuggauagca

SEQ ID NO: 812518 - RNA, 22 nt, Human
guggaagggacugccuagagga

SEQ ID NO: 812519 - RNA, 22 nt, Human
ucacauuucaagugcucaaaag

SEQ ID NO: 812520 - RNA, 22 nt, Human
aggcagccuauggggagcucag

SEQ ID NO: 812521 - RNA, 22 nt, Human
gaagagcugcucagaacaugau

SEQ ID NO: 812522 - RNA, 22 nt, Human
ggccaaggcucuugagggcuga

SEQ ID NO: 812523 - RNA, 22 nt, Human
uucuggagauugagaaggcauu

SEQ ID NO: 812524 - RNA, 22 nt, Human
aauguguaaaagguuuucuuca

SEQ ID NO: 812525 - RNA, 22 nt, Human
uuuuccuuuggaagaugcauau

SEQ ID NO: 812526 - RNA, 22 nt, Human
ugcacauggcaaugcugcuccc

SEQ ID NO: 812527 - RNA, 22 nt, Human
gcagcagaugugggcccagagc

SEQ ID NO: 812528 - RNA, 22 nt, Human
cacuggcauuagucacgaggca

SEQ ID NO: 812529 - RNA, 19 nt, Human
ggcuggagaaaggaaucag

SEQ ID NO: 812530 - RNA, 22 nt, Human
cuccugaguaguagcauuguca

SEQ ID NO: 812531 - RNA, 20 nt, Human
cacaagaggaguucccugag

SEQ ID NO: 812532 - RNA, 22 nt, Human
cucugcugcaggaaggcgugca

SEQ ID NO: 812533 - RNA, 22 nt, Human
uaagucauuaggcugaguucaa

SEQ ID NO: 812534 - RNA, 22 nt, Human
uuacauuuggcuauguccucua

SEQ ID NO: 812535 - RNA, 22 nt, Human
acuggcagggggagccccgaga

SEQ ID NO: 812536 - RNA, 22 nt, Human
ucucuuaauucagaggcaguua

SEQ ID NO: 812537 - RNA, 22 nt, Human
ccuuuccccgcgggaggugcca

SEQ ID NO: 812538 - RNA, 22 nt, Human
uguauuuugugaggaucacucu

SEQ ID NO: 812539 - RNA, 22 nt, Human
ugagccuggcggaagcagcgug

SEQ ID NO: 812540 - RNA, 22 nt, Human
agcugggagcugaaggcugauu

SEQ ID NO: 812541 - RNA, 22 nt, Human
augucuguuuucauaucagaua

SEQ ID NO: 812542 - RNA, 22 nt, Human
uucaguauguguaaacuacuuu

SEQ ID NO: 812543 - RNA, 22 nt, Human
uguaaacauauguauguaugua

SEQ ID NO: 812544 - RNA, 22 nt, Human
gugcugggugcugcagacaggu

SEQ ID NO: 812545 - RNA, 22 nt, Human
uaggacagagauuuguuuuaug

SEQ ID NO: 812546 - RNA, 22 nt, Human
acauuguagacuuuucauaugu

SEQ ID NO: 812547 - RNA, 20 nt, Human
ccucaguguccuggacuggg

SEQ ID NO: 812548 - RNA, 22 nt, Human
ccauggcaauggucagucuauu

SEQ ID NO: 812549 - RNA, 22 nt, Human
uggagcaggaagucuauggcug

SEQ ID NO: 812550 - RNA, 22 nt, Human
ccaccgcugaaggcacuggcau

SEQ ID NO: 812551 - RNA, 22 nt, Human
uccagagaaaucuagucuuaca

SEQ ID NO: 812552 - RNA, 20 nt, Human
aagcagaagcugcucucagc

SEQ ID NO: 812553 - RNA, 20 nt, Human
uuucaaguuguaagguauca

SEQ ID NO: 812554 - RNA, 22 nt, Human
gcagaggggaagcugaggaauu

SEQ ID NO: 812555 - RNA, 22 nt, Human
ggucugagauauuuguucagcu

SEQ ID NO: 812556 - RNA, 22 nt, Human
agaugaaagauuuuuauagaga

SEQ ID NO: 812557 - RNA, 22 nt, Human
uccaggaccucccaggcuagag

SEQ ID NO: 812558 - RNA, 22 nt, Human
ugcaguggaagagguggagauc

SEQ ID NO: 812559 - RNA, 21 nt, Human
cauuucaugauuauagaaaug

SEQ ID NO: 812560 - RNA, 22 nt, Human
ggucagggggaucugugaggua

SEQ ID NO: 812561 - RNA, 22 nt, Human
ucaugcaaugagucaggaggca

SEQ ID NO: 812562 - RNA, 22 nt, Human
agaagccauucccuguaggcuc

SEQ ID NO: 812563 - RNA, 22 nt, Human
guguuuaauagguagcugaauc

SEQ ID NO: 812564 - RNA, 22 nt, Human
acaggcugagcguccaucuuca

SEQ ID NO: 812565 - RNA, 18 nt, Human
uggagcagguaggcauga

SEQ ID NO: 812566 - RNA, 22 nt, Human
ggccaaggaugguggcucuggu

SEQ ID NO: 812567 - RNA, 22 nt, Human
aaagcagguugcaauuacagug

SEQ ID NO: 812568 - RNA, 22 nt, Human
cagagacaggaaucagcugcag

SEQ ID NO: 812569 - RNA, 22 nt, Human
gagauggagucuuuuucuguca

SEQ ID NO: 812570 - RNA, 22 nt, Human
ucaugaaguccaaacuaaagca

SEQ ID NO: 812571 - RNA, 22 nt, Human
acuuggcuuuaguaguaacuga

SEQ ID NO: 812572 - RNA, 20 nt, Human
accagagacuggggacaagu

SEQ ID NO: 812573 - RNA, 22 nt, Human
gagcagcuuaugucaagccaga

SEQ ID NO: 812574 - RNA, 22 nt, Human
auaaaaugucuccacugggcuc

SEQ ID NO: 812575 - RNA, 22 nt, Human
auguaauuuauguuauccauaa

SEQ ID NO: 812576 - RNA, 22 nt, Human
cagcuucuguuucuagccccug

SEQ ID NO: 812577 - RNA, 20 nt, Human
uggcuggcuuguauuuccuu

SEQ ID NO: 812578 - RNA, 22 nt, Human
gcaguguuuuucaaugcuucca

SEQ ID NO: 812579 - RNA, 22 nt, Human
cagacagacagccguggccacc

SEQ ID NO: 812580 - RNA, 22 nt, Human
ugggccagcugaagugccgccc

SEQ ID NO: 812581 - RNA, 21 nt, Human
ugacauuuaguagcauuguca

SEQ ID NO: 812582 - RNA, 22 nt, Human
ugcacaggugagacucaggaag

SEQ ID NO: 812583 - RNA, 22 nt, Human
aacacagaagugccaagagcca

SEQ ID NO: 812584 - RNA, 22 nt, Human
agcaggcugaugggcaugcuug

SEQ ID NO: 812585 - RNA, 22 nt, Human
uaguaaaucucagaaaaagauc

SEQ ID NO: 812586 - RNA, 22 nt, Human
aaagucaucauuucuuuucaaa

SEQ ID NO: 812587 - RNA, 22 nt, Human
ucucaaauaggccuugguccug

SEQ ID NO: 812588 - RNA, 22 nt, Human
uucagcuugcuuagucuccuuc

SEQ ID NO: 812589 - RNA, 19 nt, Human
ucucuggcaguucagagca

SEQ ID NO: 812590 - RNA, 22 nt, Human
ggggacagucgaucuagugauu

SEQ ID NO: 812591 - RNA, 22 nt, Human
uuuucauugagcaccugaguaa

SEQ ID NO: 812592 - RNA, 22 nt, Human
uccucagaauggauggcagggg

SEQ ID NO: 812593 - RNA, 22 nt, Human
cccuaggcccaaagggugacau

SEQ ID NO: 812594 - RNA, 22 nt, Human
aggaagcuaaccagggagugag

SEQ ID NO: 812595 - RNA, 22 nt, Human
uaaauaucaguccagcucuucc

SEQ ID NO: 812596 - RNA, 22 nt, Human
acagcagguuuuaacuuugaag

SEQ ID NO: 812597 - RNA, 22 nt, Human
agucccagcuacucaagaggcu

SEQ ID NO: 812598 - RNA, 23 nt, Human
uugagaacaggugugagaauggc

SEQ ID NO: 812599 - RNA, 22 nt, Human
caggaggccaacugugggacuu

SEQ ID NO: 812600 - RNA, 22 nt, Human
gccaugcuugguaugcugugag

SEQ ID NO: 812601 - RNA, 22 nt, Human
cagucuuuguucccauuacuga

SEQ ID NO: 812602 - RNA, 22 nt, Human
uucuccuugguuuaugggacau

SEQ ID NO: 812603 - RNA, 22 nt, Human
aggguccauucuuugccuuuuc

SEQ ID NO: 812604 - RNA, 22 nt, Human
ccugcagacacuuguccagcaa

SEQ ID NO: 812605 - RNA, 19 nt, Human
gcacacaguagggcuggca

SEQ ID NO: 812606 - RNA, 22 nt, Human
gggcccuggcuuuccuguucuu

SEQ ID NO: 812607 - RNA, 22 nt, Human
caggaaaauggaaucaccugua

SEQ ID NO: 812608 - RNA, 17 nt, Human
uguuuucugcuaccuuu

SEQ ID NO: 812609 - RNA, 22 nt, Human
gccagucucccucaguccucug

SEQ ID NO: 812610 - RNA, 22 nt, Human
ggcagcugcaaaucugcucugu

SEQ ID NO: 812611 - RNA, 22 nt, Human
ugauuuuacuuagcaugauguu

SEQ ID NO: 812612 - RNA, 22 nt, Human
gucuuuaguugaaacauguggu

SEQ ID NO: 812613 - RNA, 22 nt, Human
auacuucuagaaauacuaugca

SEQ ID NO: 812614 - RNA, 22 nt, Human
cccuaggcugggcucuuggcuu

SEQ ID NO: 812615 - RNA, 22 nt, Human
auuuucucacaaugcagaagga

SEQ ID NO: 812616 - RNA, 22 nt, Human
ggcuaggccucaggccugccug

SEQ ID NO: 812617 - RNA, 22 nt, Human
uuacaucacuuuacuuaauaau

SEQ ID NO: 812618 - RNA, 22 nt, Human
ccccacuuugaguagcacuuga

SEQ ID NO: 812619 - RNA, 22 nt, Human
ucauaaaaugcuccugauauug

SEQ ID NO: 812620 - RNA, 22 nt, Human
caugagauuugggaggggccag

SEQ ID NO: 812621 - RNA, 22 nt, Human
ccagcugggucccugcuggggc

SEQ ID NO: 812622 - RNA, 22 nt, Human
agcugugggagaaucucugggu

SEQ ID NO: 812623 - RNA, 22 nt, Human
cagcuucuauuuaucuuugugu

SEQ ID NO: 812624 - RNA, 22 nt, Human
auucaagguauuuaaaacauaa

SEQ ID NO: 812625 - RNA, 22 nt, Human
acagaauuuacacaucucuaaa

SEQ ID NO: 812626 - RNA, 22 nt, Human
cucauuuauuucucccaaaaca

SEQ ID NO: 812627 - RNA, 22 nt, Human
aauguuaauucacagccaaaua

SEQ ID NO: 812628 - RNA, 22 nt, Human
ccacagugaguuagauugacca

SEQ ID NO: 812629 - RNA, 22 nt, Human
ggcuggcaccugcccuccgcug

SEQ ID NO: 812630 - RNA, 22 nt, Human
cuuugcagcaauuucuguuaaa

SEQ ID NO: 812631 - RNA, 22 nt, Human
gcaguaagaaagucaagcaguu

SEQ ID NO: 812632 - RNA, 22 nt, Human
gauauacaauccacaguugauu

SEQ ID NO: 812633 - RNA, 22 nt, Human
ugcagggccaugguggcggcug

SEQ ID NO: 812634 - RNA, 22 nt, Human
gcucccaccaggcagaccuacc

SEQ ID NO: 812635 - RNA, 22 nt, Human
uggggguguccuggugcacaca

SEQ ID NO: 812636 - RNA, 22 nt, Human
caaggcaggcaguucacuugag

SEQ ID NO: 812637 - RNA, 22 nt, Human
aggcucauccccacaaagcaaa

SEQ ID NO: 812638 - RNA, 22 nt, Human
uacauacacaaauauacuguuu

SEQ ID NO: 812639 - RNA, 22 nt, Human
uuccugcagcaaggagaagcug

SEQ ID NO: 812640 - RNA, 22 nt, Human
aaaguacauagcauauuccaac

SEQ ID NO: 812641 - RNA, 22 nt, Human
cucugcccgugccuuucccagu

SEQ ID NO: 812642 - RNA, 22 nt, Human
agaaaugacaagacugaucagg

SEQ ID NO: 812643 - RNA, 22 nt, Human
aaugucuuuaaagugcaauaga

SEQ ID NO: 812644 - RNA, 22 nt, Human
agaggccaagccagacugugca

SEQ ID NO: 812645 - RNA, 22 nt, Human
accccagguccagguuacagag

SEQ ID NO: 812646 - RNA, 22 nt, Human
cuuugauucagagagaauuagc

SEQ ID NO: 812647 - RNA, 23 nt, Human
cagcagcugccugguuuuuuggu

SEQ ID NO: 812648 - RNA, 22 nt, Human
ccaggccuggaccaugccaggg

SEQ ID NO: 812649 - RNA, 22 nt, Human
uuguauacaggucuuguccauu

SEQ ID NO: 812650 - RNA, 22 nt, Human
cuauagaaacaaccucucuuuc

SEQ ID NO: 812651 - RNA, 22 nt, Human
uuuacaugaguagcagauguuc

SEQ ID NO: 812652 - RNA, 22 nt, Human
uaaaguuuggcagacaauaaca

SEQ ID NO: 812653 - RNA, 22 nt, Human
aggaggaauacaauccagcagc

SEQ ID NO: 812654 - RNA, 22 nt, Human
uuuguguggcguuggccggcgg

SEQ ID NO: 812655 - RNA, 23 nt, Human
ucugggccacuugucugcacuuc

SEQ ID NO: 812656 - RNA, 22 nt, Human
gaauauuuguaauuacuguuga

SEQ ID NO: 812657 - RNA, 22 nt, Human
uaggaaauugacaccugcuuga

SEQ ID NO: 812658 - RNA, 22 nt, Human
ucaggcugggagacaaucacug

SEQ ID NO: 812659 - RNA, 22 nt, Human
gggcuaggcuuggccagcacug

SEQ ID NO: 812660 - RNA, 22 nt, Human
ugcagggucccgaagggaagac

SEQ ID NO: 812661 - RNA, 22 nt, Human
gaaaaguauguuuauuuugacu

SEQ ID NO: 812662 - RNA, 21 nt, Human
agagccugagaucuuccagca

SEQ ID NO: 812663 - RNA, 22 nt, Human
aaggcacacaguuagauagagc

SEQ ID NO: 812664 - RNA, 22 nt, Human
uaguuugucaaccacugucaca

SEQ ID NO: 812665 - RNA, 22 nt, Human
aguguuuuggagugggaaggca

SEQ ID NO: 812666 - RNA, 19 nt, Human
ccagggcuuuaaguugagg

SEQ ID NO: 812667 - RNA, 22 nt, Human
aggagcccugcgggaggcagag

SEQ ID NO: 812668 - RNA, 22 nt, Human
ccuuuaaauggauguucaacug

SEQ ID NO: 812669 - RNA, 22 nt, Human
uagggcuguuuaaaagugaggu

SEQ ID NO: 812670 - RNA, 22 nt, Human
aaggaagacucgcaggucuaug

SEQ ID NO: 812671 - RNA, 22 nt, Human
ugcugcugacauuuggggcuug

SEQ ID NO: 812672 - RNA, 22 nt, Human
uuaaggcauucuccuacuaaua

SEQ ID NO: 812673 - RNA, 22 nt, Human
gacagggcugugggaggagcag

SEQ ID NO: 812674 - RNA, 22 nt, Human
gaggcuggaauauuagaaaugu

SEQ ID NO: 812675 - RNA, 22 nt, Human
auuucucagugugaucaggccu

SEQ ID NO: 812676 - RNA, 22 nt, Human
accaggcaacugugaaugggcu

SEQ ID NO: 812677 - RNA, 21 nt, Human
gugcagaggaauguagggggc

SEQ ID NO: 812678 - RNA, 22 nt, Human
agcagccuugcaggggucgcac

SEQ ID NO: 812679 - RNA, 22 nt, Human
cuggcuggguuccaggauucca

SEQ ID NO: 812680 - RNA, 20 nt, Human
caguccugccccuuggggac

SEQ ID NO: 812681 - RNA, 22 nt, Human
uggggauguaaaugaggugaua

SEQ ID NO: 812682 - RNA, 22 nt, Human
ucuggaaagaucauuaaaucca

SEQ ID NO: 812683 - RNA, 22 nt, Human
cacucccuucaggagccuagga

SEQ ID NO: 812684 - RNA, 20 nt, Human
cugagccaacucucuucuug

SEQ ID NO: 812685 - RNA, 22 nt, Human
gaauauauuggugaaaauaguu

SEQ ID NO: 812686 - RNA, 22 nt, Human
agccagcucugaguugaaguac

SEQ ID NO: 812687 - RNA, 20 nt, Human
accaggccccgggcccugca

SEQ ID NO: 812688 - RNA, 22 nt, Human
gccaaggccucugcaggaugag

SEQ ID NO: 812689 - RNA, 22 nt, Human
agucuauuuuagcugcauaugu

SEQ ID NO: 812690 - RNA, 22 nt, Human
acaaauggagaaacugaggccc

SEQ ID NO: 812691 - RNA, 22 nt, Human
acuguucuucauuuagcaaaga

SEQ ID NO: 812692 - RNA, 20 nt, Human
aauuuuaucuccauccuuug

SEQ ID NO: 812693 - RNA, 22 nt, Human
ucugggaguggguccaaggaau

SEQ ID NO: 812694 - RNA, 22 nt, Human
auauucaaauuacauuuacuaa

SEQ ID NO: 812695 - RNA, 19 nt, Human
agagucugugcucuuccua

SEQ ID NO: 812696 - RNA, 22 nt, Human
uggucaaguuaagauaagguga

SEQ ID NO: 812697 - RNA, 21 nt, Human
uagaggcaggagggacugcag

SEQ ID NO: 812698 - RNA, 22 nt, Human
cagcccuggaacagcugacuca

SEQ ID NO: 812699 - RNA, 22 nt, Human
uuuccucacacagaagaucuug

SEQ ID NO: 812700 - RNA, 22 nt, Human
agagugcucagaugcaugucuu

SEQ ID NO: 812701 - RNA, 20 nt, Human
uguuucauaagcuguccuau

SEQ ID NO: 812702 - RNA, 22 nt, Human
gcaucuucacacaaagccagug

SEQ ID NO: 812703 - RNA, 22 nt, Human
agagggagaaaagaaucaguug

SEQ ID NO: 812704 - RNA, 22 nt, Human
aaauccauucuguuuuaaaagu

SEQ ID NO: 812705 - RNA, 22 nt, Human
uggcccuguguccugcugccag

SEQ ID NO: 812706 - RNA, 22 nt, Human
aaggcaccauaggcaaauccag

SEQ ID NO: 812707 - RNA, 22 nt, Human
ccagcagagggucuuggccauu

SEQ ID NO: 812708 - RNA, 22 nt, Human
gugaccauuugacauauccuug

SEQ ID NO: 812709 - RNA, 22 nt, Human
caugaagucaggauuuccauga

SEQ ID NO: 812710 - RNA, 22 nt, Human
auguuuuauguuccacucaagg

SEQ ID NO: 812711 - RNA, 22 nt, Human
auuuggagacaggauuuuucag

SEQ ID NO: 812712 - RNA, 22 nt, Human
caggcuggagugcaguugugca

SEQ ID NO: 812713 - RNA, 23 nt, Human
ugagcagcuaaaggugaugcggg

SEQ ID NO: 812714 - RNA, 22 nt, Human
uugaaugaagucccuuuuuacu

SEQ ID NO: 812715 - RNA, 22 nt, Human
agaggcgcagacucuugagugu

SEQ ID NO: 812716 - RNA, 22 nt, Human
auguuuuuaaauagacuuacag

SEQ ID NO: 812717 - RNA, 22 nt, Human
gagggggcuagcgcagugccca

SEQ ID NO: 812718 - RNA, 23 nt, Human
guuucuaugucuugugccuucau

SEQ ID NO: 812719 - RNA, 22 nt, Human
uucuuuugcaagacuauugauu

SEQ ID NO: 812720 - RNA, 22 nt, Human
ccauuuggcaaacauuuuacag

SEQ ID NO: 812721 - RNA, 22 nt, Human
gcacaggcacagagggccacug

SEQ ID NO: 812722 - RNA, 22 nt, Human
acuuguuugaaucucucuagag

SEQ ID NO: 812723 - RNA, 22 nt, Human
gagguaauuacuauguucagau

SEQ ID NO: 812724 - RNA, 22 nt, Human
cuucugagauguuguuuuacag

SEQ ID NO: 812725 - RNA, 22 nt, Human
gaaacaacuacuauugauuucu

SEQ ID NO: 812726 - RNA, 22 nt, Human
uacaauguugguaaaguaucau

SEQ ID NO: 812727 - RNA, 22 nt, Human
agaaaaagucaaggaauuggac

SEQ ID NO: 812728 - RNA, 22 nt, Human
cagaagcagauucuaaagcaag

SEQ ID NO: 812729 - RNA, 21 nt, Human
cuggcccagggaucugcauuu

SEQ ID NO: 812730 - RNA, 22 nt, Human
aggaagcucggagagggcaaau

SEQ ID NO: 812731 - RNA, 22 nt, Human
cuuuuuuaagguagcuccuccu

SEQ ID NO: 812732 - RNA, 22 nt, Human
cucccgugauccuggaggagag

SEQ ID NO: 812733 - RNA, 21 nt, Human
gcuuauagaaacaucaccaga

SEQ ID NO: 812734 - RNA, 22 nt, Human
ugggaagcauuaaugauagggg

SEQ ID NO: 812735 - RNA, 22 nt, Human
ccuaccaguaggaggccagaga

SEQ ID NO: 812736 - RNA, 22 nt, Human
gcagaggcauuucugacgcugc

SEQ ID NO: 812737 - RNA, 22 nt, Human
cacaauuauuaucucuuucuac

SEQ ID NO: 812738 - RNA, 22 nt, Human
auuuucuauguuguaauuguua

SEQ ID NO: 812739 - RNA, 19 nt, Human
cccaguccuuguccugggc

SEQ ID NO: 812740 - RNA, 22 nt, Human
cugaagcuaggucaaaaaaggg

SEQ ID NO: 812741 - RNA, 17 nt, Human
agcagcuggguugaucu

SEQ ID NO: 812742 - RNA, 22 nt, Human
ccugacaggcggaggcugcagu

SEQ ID NO: 812743 - RNA, 22 nt, Human
aggacagaccuaggacuggagc

SEQ ID NO: 812744 - RNA, 22 nt, Human
guguuuccccuccuggagaagg

SEQ ID NO: 812745 - RNA, 22 nt, Human
cccuucccuucugggagaucca

SEQ ID NO: 812746 - RNA, 22 nt, Human
acuuuguauaagacaauaaaga

SEQ ID NO: 812747 - RNA, 21 nt, Human
ucuuugauuaagcuugacuag

SEQ ID NO: 812748 - RNA, 22 nt, Human
caggagcccagaguccucagcu

SEQ ID NO: 812749 - RNA, 22 nt, Human
ugaugaaaguguuuacucaccu

SEQ ID NO: 812750 - RNA, 19 nt, Human
acugccugaggcucacagg

SEQ ID NO: 812751 - RNA, 22 nt, Human
uucuuaaaacuuauggacaggu

SEQ ID NO: 812752 - RNA, 22 nt, Human
acuacagucccucauauguugg

SEQ ID NO: 812753 - RNA, 22 nt, Human
cagccaggccuggugaccaaag

SEQ ID NO: 812754 - RNA, 19 nt, Human
aauggacaggcaauagucu

SEQ ID NO: 812755 - RNA, 22 nt, Human
uccugccuuagagcaaggaaaa

SEQ ID NO: 812756 - RNA, 19 nt, Human
gcugggagcagacccuccc

SEQ ID NO: 812757 - RNA, 20 nt, Human
gcagugauuugucuauguuu

SEQ ID NO: 812758 - RNA, 22 nt, Human
ccagcccgaaucccuaaagcaa

SEQ ID NO: 812759 - RNA, 22 nt, Human
gagugcuugcauauuuauuguc

SEQ ID NO: 812760 - RNA, 22 nt, Human
ccucugcaugugcaguaccgag

SEQ ID NO: 812761 - RNA, 22 nt, Human
cuggcagguggauggggacucc

SEQ ID NO: 812762 - RNA, 22 nt, Human
gaagccacagagauuguggggg

SEQ ID NO: 812763 - RNA, 22 nt, Human
cuauggcucaauucuagugguu

SEQ ID NO: 812764 - RNA, 20 nt, Human
uccccagggcaucaggagca

SEQ ID NO: 812765 - RNA, 22 nt, Human
ggccugagggugggcucucagu

SEQ ID NO: 812766 - RNA, 22 nt, Human
gacacaggaaucaccuuggaug

SEQ ID NO: 812767 - RNA, 22 nt, Human
auacaaaauauauacuggagac

SEQ ID NO: 812768 - RNA, 22 nt, Human
uagcuuguuacacagcaauguu

SEQ ID NO: 812769 - RNA, 22 nt, Human
uugauuuauagaauguucaagc

SEQ ID NO: 812770 - RNA, 22 nt, Human
cuuuccuucucgugguucucac

SEQ ID NO: 812771 - RNA, 22 nt, Human
aaacagaaggguagguaaacau

SEQ ID NO: 812772 - RNA, 22 nt, Human
agggauggaagcucgucugcaa

SEQ ID NO: 812773 - RNA, 22 nt, Human
agaaggaagccaggagggugca

SEQ ID NO: 812774 - RNA, 22 nt, Human
uugcaacacaaaguuugauucc

SEQ ID NO: 812775 - RNA, 22 nt, Human
uucuggcucauaugcuaagaag

SEQ ID NO: 812776 - RNA, 22 nt, Human
ccagaagucaggaaugagucuu

SEQ ID NO: 812777 - RNA, 22 nt, Human
gggcuggcaggaccugggcuga

SEQ ID NO: 812778 - RNA, 22 nt, Human
agugcaaacuuuauugugaccu

SEQ ID NO: 812779 - RNA, 22 nt, Human
ucuuaauucugugucuucacua

SEQ ID NO: 812780 - RNA, 20 nt, Human
uaugagauuugaccucaaca

SEQ ID NO: 812781 - RNA, 22 nt, Human
ugcuggcucaguuugcagacuc

SEQ ID NO: 812782 - RNA, 22 nt, Human
gcccugagugguaccugugggu

SEQ ID NO: 812783 - RNA, 22 nt, Human
uauauaauuuguaaaagcaccu

SEQ ID NO: 812784 - RNA, 22 nt, Human
ugggggagagugcaagcaugaa

SEQ ID NO: 812785 - RNA, 22 nt, Human
uucauugaaccacuuuauucuu

SEQ ID NO: 812786 - RNA, 22 nt, Human
gcccaggaaguugaggcugccg

SEQ ID NO: 812787 - RNA, 22 nt, Human
ggcagccaugugggcagcgagu

SEQ ID NO: 812788 - RNA, 22 nt, Human
cagagccucccuccucugccau

SEQ ID NO: 812789 - RNA, 22 nt, Human
uuacauucaaggaacucauucu

SEQ ID NO: 812790 - RNA, 22 nt, Human
aauaauauuugaagcuucaaag

SEQ ID NO: 812791 - RNA, 22 nt, Human
caauuucaucuugugcuucaau

SEQ ID NO: 812792 - RNA, 22 nt, Human
gcagccuuuggaauuagagacu

SEQ ID NO: 812793 - RNA, 22 nt, Human
cuggcagcgugagcagcaucca

SEQ ID NO: 812794 - RNA, 22 nt, Human
aagcuggagaguuaggugaaua

SEQ ID NO: 812795 - RNA, 22 nt, Human
ccaggguaccccaagggcaggu

SEQ ID NO: 812796 - RNA, 22 nt, Human
cuggcagggcucuuugggugcu

SEQ ID NO: 812797 - RNA, 22 nt, Human
caguguucccugaacauauguu

SEQ ID NO: 812798 - RNA, 22 nt, Human
cuggcacaugugagccacauca

SEQ ID NO: 812799 - RNA, 22 nt, Human
uucuuucccagaagauauguuu

SEQ ID NO: 812800 - RNA, 22 nt, Human
acaagauagguugagucuagcc

SEQ ID NO: 812801 - RNA, 22 nt, Human
gccagccugugggggcucugug

SEQ ID NO: 812802 - RNA, 22 nt, Human
acgcccggucuccauaguuuuu

SEQ ID NO: 812803 - RNA, 22 nt, Human
cagagguuaccuagagcaagaa

SEQ ID NO: 812804 - RNA, 22 nt, Human
agaaguuugguccuuuucaagg

SEQ ID NO: 812805 - RNA, 22 nt, Human
ugagccaggcacugcuccugga

SEQ ID NO: 812806 - RNA, 20 nt, Human
cacagacuguaugggcacca

SEQ ID NO: 812807 - RNA, 22 nt, Human
gcuggcagaagagcugguucaa

SEQ ID NO: 812808 - RNA, 22 nt, Human
gcaggaagggaaagguugacuc

SEQ ID NO: 812809 - RNA, 22 nt, Human
ugccaggaagugugugggccug

SEQ ID NO: 812810 - RNA, 22 nt, Human
cacugcaaaggggaaagaagca

SEQ ID NO: 812811 - RNA, 20 nt, Human
gggugggagagucugagggu

SEQ ID NO: 812812 - RNA, 22 nt, Human
acacagauauuguacuugaucc

SEQ ID NO: 812813 - RNA, 22 nt, Human
aaagucaguuggccagaucacu

SEQ ID NO: 812814 - RNA, 22 nt, Human
ggcagugugcaucuguguggcc

SEQ ID NO: 812815 - RNA, 22 nt, Human
aucucacaggacugaaacguaa

SEQ ID NO: 812816 - RNA, 22 nt, Human
uuauaaagguuugugcauauuu

SEQ ID NO: 812817 - RNA, 22 nt, Human
augcauauauacauacacaguc

SEQ ID NO: 812818 - RNA, 22 nt, Human
agcccagcccgggcugcgcuuu

SEQ ID NO: 812819 - RNA, 22 nt, Human
cuggcuggaggugagucacuga

SEQ ID NO: 812820 - RNA, 22 nt, Human
ccugcagcagcugaaaucacag

SEQ ID NO: 812821 - RNA, 22 nt, Human
aggcagugagugugacuucaca

SEQ ID NO: 812822 - RNA, 20 nt, Human
acuuuacagagaagacugac

SEQ ID NO: 812823 - RNA, 22 nt, Human
uuugcauuuauaaguuggugga

SEQ ID NO: 812824 - RNA, 19 nt, Human
uaacuuguagauaugaagu

SEQ ID NO: 812825 - RNA, 22 nt, Human
ucuuuggccuuaggagcccuug

SEQ ID NO: 812826 - RNA, 19 nt, Human
uucauuuguaucugcucac

SEQ ID NO: 812827 - RNA, 22 nt, Human
gagcucuuuaccaggucaggac

SEQ ID NO: 812828 - RNA, 22 nt, Human
agucucuuuaaucacagugucu

SEQ ID NO: 812829 - RNA, 22 nt, Human
cagcaacuuggacagcagucuu

SEQ ID NO: 812830 - RNA, 22 nt, Human
acaugcauggagggaaaauguc

SEQ ID NO: 812831 - RNA, 22 nt, Human
agcuggcuauacuugaaaaguc

SEQ ID NO: 812832 - RNA, 22 nt, Human
uuuauucucuaguuggucagau

SEQ ID NO: 812833 - RNA, 22 nt, Human
acuuaaauagaacuccucaaua

SEQ ID NO: 812834 - RNA, 22 nt, Human
aaagggccuccgccugggcagg

SEQ ID NO: 812835 - RNA, 20 nt, Human
agacaggagcccccauucag

SEQ ID NO: 812836 - RNA, 22 nt, Human
uucagagggcuugcuauguaca

SEQ ID NO: 812837 - RNA, 22 nt, Human
aaguuuguucagggcuuacauu

SEQ ID NO: 812838 - RNA, 22 nt, Human
uggucagaaggaagggcuccua

SEQ ID NO: 812839 - RNA, 22 nt, Human
aagcaggaagcucagguccuug

SEQ ID NO: 812840 - RNA, 22 nt, Human
ccuggcucaaggcgaggacucc

SEQ ID NO: 812841 - RNA, 19 nt, Human
uuagaaacuguugacacug

SEQ ID NO: 812842 - RNA, 22 nt, Human
uuucaagagggaacugaacaca

SEQ ID NO: 812843 - RNA, 19 nt, Human
gaguccugugcuccuuguu

SEQ ID NO: 812844 - RNA, 22 nt, Human
cuucagugaauguugaguaagg

SEQ ID NO: 812845 - RNA, 22 nt, Human
ggaggcugaggccccucacagg

SEQ ID NO: 812846 - RNA, 22 nt, Human
ccugcagccucuucugaaaauc

SEQ ID NO: 812847 - RNA, 22 nt, Human
gccaggguucgaauccguaugg

SEQ ID NO: 812848 - RNA, 22 nt, Human
cuucacauaaacaaagggccau

SEQ ID NO: 812849 - RNA, 22 nt, Human
uuugcacacacaauaacaaaug

SEQ ID NO: 812850 - RNA, 22 nt, Human
auauuucuccaaauguuuucaa

SEQ ID NO: 812851 - RNA, 22 nt, Human
gcuggcaggguucucacugaaa

SEQ ID NO: 812852 - RNA, 21 nt, Human
aggaggggucuuucccacuga

SEQ ID NO: 812853 - RNA, 22 nt, Human
ccacaagaugcaaacucuaaca

SEQ ID NO: 812854 - RNA, 22 nt, Human
cucuguuucucagccuauuucc

SEQ ID NO: 812855 - RNA, 22 nt, Human
gcagcugccuucagcuggaugg

SEQ ID NO: 812856 - RNA, 22 nt, Human
gcugccagcucacucuccugag

SEQ ID NO: 812857 - RNA, 22 nt, Human
aggcccagcccguccucgugcu

SEQ ID NO: 812858 - RNA, 22 nt, Human
gcugagcuagcuaucucagucu

SEQ ID NO: 812859 - RNA, 23 nt, Human
cuucucaguaguacacacacuau

SEQ ID NO: 812860 - RNA, 22 nt, Human
gcuuggcauuugcugggagcug

SEQ ID NO: 812861 - RNA, 22 nt, Human
ccagccccuauccucgcuccac

SEQ ID NO: 812862 - RNA, 22 nt, Human
uccugcuggcaaggaagggacu

SEQ ID NO: 812863 - RNA, 22 nt, Human
uguauuuaagcuuuaccuaaaa

SEQ ID NO: 812864 - RNA, 22 nt, Human
gaacucauuagccugcuuucag

SEQ ID NO: 812865 - RNA, 22 nt, Human
gcagcugauggaaguccuauug

SEQ ID NO: 812866 - RNA, 20 nt, Human
agaggcuuccuugggaggag

SEQ ID NO: 812867 - RNA, 22 nt, Human
aaugcuuugucugcuccagacu

SEQ ID NO: 812868 - RNA, 22 nt, Human
uccuggcucucuacaaaccaga

SEQ ID NO: 812869 - RNA, 22 nt, Human
aaagagaaaaugaucuguacau

SEQ ID NO: 812870 - RNA, 22 nt, Human
cucugaggucuaggaccauggc

SEQ ID NO: 812871 - RNA, 22 nt, Human
uucucagaaaagcaagcuuucu

SEQ ID NO: 812872 - RNA, 22 nt, Human
auuugcuuucagguauaaaagg

SEQ ID NO: 812873 - RNA, 22 nt, Human
cuggcugugcugacugagaggg

SEQ ID NO: 812874 - RNA, 22 nt, Human
cugcugagguccuugcucagac

SEQ ID NO: 812875 - RNA, 22 nt, Human
ugcuucauuaaaacaauauuuu

SEQ ID NO: 812876 - RNA, 22 nt, Human
cugaggcugggcugaggguaua

SEQ ID NO: 812877 - RNA, 22 nt, Human
gauccagauauuugggcuggua

SEQ ID NO: 812878 - RNA, 22 nt, Human
cacuuagagccagaugcauagu

SEQ ID NO: 812879 - RNA, 22 nt, Human
uuguuuauuagcaauuauccug

SEQ ID NO: 812880 - RNA, 22 nt, Human
gccuucccaagacgccugaguu

SEQ ID NO: 812881 - RNA, 22 nt, Human
cacaccaaaguauuugguauuu

SEQ ID NO: 812882 - RNA, 22 nt, Human
acccaggacacagagaugaccc

SEQ ID NO: 812883 - RNA, 22 nt, Human
aaguguuuuguaaacagaaaag

SEQ ID NO: 812884 - RNA, 22 nt, Human
uuuauauauggcuggucuggau

SEQ ID NO: 812885 - RNA, 22 nt, Human
aaugagucaaaacagcauauag

SEQ ID NO: 812886 - RNA, 22 nt, Human
uucaauuucauaauaucuagcu

SEQ ID NO: 812887 - RNA, 22 nt, Human
aauucacauauacauuauuccu

SEQ ID NO: 812888 - RNA, 22 nt, Human
gcugagaaaugcagacaugcug

SEQ ID NO: 812889 - RNA, 19 nt, Human
gcuggggaauggauauuga

SEQ ID NO: 812890 - RNA, 22 nt, Human
gucacuguauccagguuccagc

SEQ ID NO: 812891 - RNA, 22 nt, Human
agacagagauacuauguuguca

SEQ ID NO: 812892 - RNA, 22 nt, Human
caggguggggcuggcuaucaaa

SEQ ID NO: 812893 - RNA, 22 nt, Human
aaggcugggaaacaugcaggcc

SEQ ID NO: 812894 - RNA, 22 nt, Human
ucaggaagcuacugccagcagc

SEQ ID NO: 812895 - RNA, 22 nt, Human
cagucuuuuguauauuagcaga

SEQ ID NO: 812896 - RNA, 22 nt, Human
uuacaaagcgcuuuaccucuga

SEQ ID NO: 812897 - RNA, 23 nt, Human
aggcagugggggccacuuugcuu

SEQ ID NO: 812898 - RNA, 22 nt, Human
acagaagcagccgucacagaua

SEQ ID NO: 812899 - RNA, 17 nt, Human
augcacauguaagagga

SEQ ID NO: 812900 - RNA, 22 nt, Human
ggggaugguagaccggugacgu

SEQ ID NO: 812901 - RNA, 22 nt, Human
aaauguguuugauaggaauauu

SEQ ID NO: 812902 - RNA, 22 nt, Human
cauggcggucaggauguaggug

SEQ ID NO: 812903 - RNA, 22 nt, Human
aaauacuagaauucagaguuga

SEQ ID NO: 812904 - RNA, 22 nt, Human
gugcuaggauuacaggcauggg

SEQ ID NO: 812905 - RNA, 22 nt, Human
uagcauuaaagguaagacauua

SEQ ID NO: 812906 - RNA, 22 nt, Human
ucccugcccugccuucaugguu

SEQ ID NO: 812907 - RNA, 22 nt, Human
cacugcaguaacucuaggacug

SEQ ID NO: 812908 - RNA, 22 nt, Human
uaaauguguuguggaugaaguu

SEQ ID NO: 812909 - RNA, 22 nt, Human
acacaggcauagccauacaugu

SEQ ID NO: 812910 - RNA, 21 nt, Human
gcuggcuuccugagggcugag

SEQ ID NO: 812911 - RNA, 22 nt, Human
cuggagggaguuaggacccgga

SEQ ID NO: 812912 - RNA, 22 nt, Human
uucugcacuaaauaucaaauau

SEQ ID NO: 812913 - RNA, 22 nt, Human
uccagcucugcuucacagucuc

SEQ ID NO: 812914 - RNA, 19 nt, Human
ggccuggcuaucccugcug

SEQ ID NO: 812915 - RNA, 22 nt, Human
ugggaagcuacucaugcaggca

SEQ ID NO: 812916 - RNA, 22 nt, Human
caggcugcagaggccuuucaug

SEQ ID NO: 812917 - RNA, 18 nt, Human
cagagcagagguggagcg

SEQ ID NO: 812918 - RNA, 23 nt, Human
uaugccaaaauggaaaguguaua

SEQ ID NO: 812919 - RNA, 22 nt, Human
gaguuaaauagcuuaggauuca

SEQ ID NO: 812920 - RNA, 22 nt, Human
ugagccagccuugcagcugugc

SEQ ID NO: 812921 - RNA, 22 nt, Human
acaggcagauuaaggguaggca

SEQ ID NO: 812922 - RNA, 22 nt, Human
ggacagagggcaggagcccaga

SEQ ID NO: 812923 - RNA, 17 nt, Human
gcccuggagccaggcua

SEQ ID NO: 812924 - RNA, 22 nt, Human
aaucaagaguuguguaauauuu

SEQ ID NO: 812925 - RNA, 22 nt, Human
augacagcauuuucuucuaagg

SEQ ID NO: 812926 - RNA, 22 nt, Human
aaacauuagacaccauaugcuc

SEQ ID NO: 812927 - RNA, 22 nt, Human
ucagcaggugaacaucaugcca

SEQ ID NO: 812928 - RNA, 23 nt, Human
ggcucugugcugggccugcagga

SEQ ID NO: 812929 - RNA, 22 nt, Human
uuccuucuuccaaacccaucau

SEQ ID NO: 812930 - RNA, 22 nt, Human
ucaggcugcuuucaugcuuaga

SEQ ID NO: 812931 - RNA, 22 nt, Human
uccagggacaguauagaggauc

SEQ ID NO: 812932 - RNA, 23 nt, Human
uugcuucugugcaauucaguacu

SEQ ID NO: 812933 - RNA, 20 nt, Human
aggcagagcgcacuuuuaga

SEQ ID NO: 812934 - RNA, 22 nt, Human
acagaaguccccaugaagaagc

SEQ ID NO: 812935 - RNA, 22 nt, Human
aaaguguaaaagcauguuaggg

SEQ ID NO: 812936 - RNA, 22 nt, Human
uguucuuacggaacuuaucuuu

SEQ ID NO: 812937 - RNA, 22 nt, Human
uuucucucuacaguacuuucau

SEQ ID NO: 812938 - RNA, 22 nt, Human
ucccagcacagggcagauguga

SEQ ID NO: 812939 - RNA, 22 nt, Human
uggagguguauaagguagcuuc

SEQ ID NO: 812940 - RNA, 22 nt, Human
ccaggucuaucaaguugggcuc

SEQ ID NO: 812941 - RNA, 22 nt, Human
cuaggcuguucaugcucagacc

SEQ ID NO: 812942 - RNA, 22 nt, Human
aauauaguucugguauuguuaa

SEQ ID NO: 812943 - RNA, 17 nt, Human
uccuggcucugccacug

SEQ ID NO: 812944 - RNA, 22 nt, Human
gagugucagugccuggcuuguu

SEQ ID NO: 812945 - RNA, 22 nt, Human
cacagcaauagcuaacugauac

SEQ ID NO: 812946 - RNA, 22 nt, Human
gccuggagaagauggaacuagc

SEQ ID NO: 812947 - RNA, 22 nt, Human
augaaacaugcuuuguggauga

SEQ ID NO: 812948 - RNA, 21 nt, Human
cuuugguuuccuccugccuuc

SEQ ID NO: 812949 - RNA, 22 nt, Human
uuuacaagucagggacuguucu

SEQ ID NO: 812950 - RNA, 22 nt, Human
uaagucaugauucuguguuacu

SEQ ID NO: 812951 - RNA, 22 nt, Human
aggaggcugggcacaguggccu

SEQ ID NO: 812952 - RNA, 22 nt, Human
guaaaauugcaauuacuuuugc

SEQ ID NO: 812953 - RNA, 22 nt, Human
ccagaauccaaaacguuuugag

SEQ ID NO: 812954 - RNA, 22 nt, Human
uuucauuacuuguuaaggguag

SEQ ID NO: 812955 - RNA, 22 nt, Human
accacaggaauugcucuguggu

SEQ ID NO: 812956 - RNA, 22 nt, Human
acaauuuauccauuguauaguu

SEQ ID NO: 812957 - RNA, 22 nt, Human
gcaggagguugagccaggacug

SEQ ID NO: 812958 - RNA, 23 nt, Human
ucuuuucaaugguucuuuaugug

SEQ ID NO: 812959 - RNA, 22 nt, Human
gaagauguuauggagagcucag

SEQ ID NO: 812960 - RNA, 20 nt, Human
auucuacaagaauaagcaug

SEQ ID NO: 812961 - RNA, 22 nt, Human
aaagucauuguaauauaugcua

SEQ ID NO: 812962 - RNA, 22 nt, Human
uucuucaaccaucuacauaaac

SEQ ID NO: 812963 - RNA, 22 nt, Human
gagccgaggcgcacagcucggg

SEQ ID NO: 812964 - RNA, 22 nt, Human
ugauucaauuaucugaugcuuu

SEQ ID NO: 812965 - RNA, 22 nt, Human
gaaacuuuuaaaccucaugagu

SEQ ID NO: 812966 - RNA, 22 nt, Human
ccugcugugaccggggagcagg

SEQ ID NO: 812967 - RNA, 22 nt, Human
ccuggcucagaccccaguucug

SEQ ID NO: 812968 - RNA, 22 nt, Human
uguuuacuugagguggaaacaa

SEQ ID NO: 812969 - RNA, 22 nt, Human
caggcacacagggaauuuggcu

SEQ ID NO: 812970 - RNA, 22 nt, Human
aggcacuuugaaauuuggagcu

SEQ ID NO: 812971 - RNA, 22 nt, Human
gaguccuguugucccagauggg

SEQ ID NO: 812972 - RNA, 22 nt, Human
ucucugaagagcucagacuagu

SEQ ID NO: 812973 - RNA, 22 nt, Human
uggcccagucagcaggagaggg

SEQ ID NO: 812974 - RNA, 22 nt, Human
ggcaggacucucaggaccaagc

SEQ ID NO: 812975 - RNA, 22 nt, Human
acacauuuuggcuagguggaga

SEQ ID NO: 812976 - RNA, 22 nt, Human
gucaccauggauaagaaucacu

SEQ ID NO: 812977 - RNA, 17 nt, Human
uuacagagguaauuaag

SEQ ID NO: 812978 - RNA, 23 nt, Human
gagaaaccucgguaagcaggagg

SEQ ID NO: 812979 - RNA, 22 nt, Human
cagcuggcugcggugaggggac

SEQ ID NO: 812980 - RNA, 22 nt, Human
acauucacaagccuacaagguu

SEQ ID NO: 812981 - RNA, 22 nt, Human
cccagggugcggcccuggcugg

SEQ ID NO: 812982 - RNA, 22 nt, Human
cuuccuccgaagaaguugcugg

SEQ ID NO: 812983 - RNA, 22 nt, Human
gggccggagcugggucccgcgc

SEQ ID NO: 812984 - RNA, 22 nt, Human
ucaggcuguauaucuugcacuc

SEQ ID NO: 812985 - RNA, 22 nt, Human
cugugccauucuuuguagcaug

SEQ ID NO: 812986 - RNA, 19 nt, Human
accuucagaguggcacaaa

SEQ ID NO: 812987 - RNA, 22 nt, Human
uccagcagagucucugaggggg

SEQ ID NO: 812988 - RNA, 22 nt, Human
uccacugcucauuccacaggca

SEQ ID NO: 812989 - RNA, 22 nt, Human
agcagagugugaaggcagggcu

SEQ ID NO: 812990 - RNA, 22 nt, Human
uacagagaacucauagaaagaa

SEQ ID NO: 812991 - RNA, 22 nt, Human
cuuugauauaaguauacauagu

SEQ ID NO: 812992 - RNA, 22 nt, Human
agucuuuauucacuauugauaa

SEQ ID NO: 812993 - RNA, 22 nt, Human
gcuccaaaguccagcuguuucc

SEQ ID NO: 812994 - RNA, 22 nt, Human
cuaaaugugacucaccaucuca

SEQ ID NO: 812995 - RNA, 22 nt, Human
uggacccaccccagggccugcu

SEQ ID NO: 812996 - RNA, 22 nt, Human
uggaaauacaagaaguauguca

SEQ ID NO: 812997 - RNA, 22 nt, Human
uucauucuucagagcugcgcuu

SEQ ID NO: 812998 - RNA, 22 nt, Human
agcagggacugagccaguggga

SEQ ID NO: 812999 - RNA, 22 nt, Human
agagaauacaggguaacaggaa

SEQ ID NO: 813000 - RNA, 22 nt, Human
uuuccaaaguugccauaagcuu

SEQ ID NO: 813001 - RNA, 22 nt, Human
ccagcagcucccucaggguccg

SEQ ID NO: 813002 - RNA, 22 nt, Human
ucuagaaaaccaauauuacaug

SEQ ID NO: 813003 - RNA, 22 nt, Human
ugcuggggguucagaugaguaa

SEQ ID NO: 813004 - RNA, 22 nt, Human
ugcuggggucauggggcgcccg

SEQ ID NO: 813005 - RNA, 22 nt, Human
ugggcagggagcuggaaccaca

SEQ ID NO: 813006 - RNA, 22 nt, Human
uggcagggaauacagauguuua

SEQ ID NO: 813007 - RNA, 22 nt, Human
acaggacaaggggaagaagaua

SEQ ID NO: 813008 - RNA, 22 nt, Human
ggcaggguggcagaggcucaga

SEQ ID NO: 813009 - RNA, 22 nt, Human
caugaggugauaaagcugggau

SEQ ID NO: 813010 - RNA, 22 nt, Human
gcuccaggcgagcuggaccaga

SEQ ID NO: 813011 - RNA, 22 nt, Human
cccagcaguuguuggugcacau

SEQ ID NO: 813012 - RNA, 22 nt, Human
ccagcagagcauggggaggaag

SEQ ID NO: 813013 - RNA, 22 nt, Human
cacaucauagagacucaaucca

SEQ ID NO: 813014 - RNA, 22 nt, Human
auacauucaucacuuuuggucc

SEQ ID NO: 813015 - RNA, 22 nt, Human
ggagcuaggcaaagcucacgga

SEQ ID NO: 813016 - RNA, 22 nt, Human
gcugcucugugacagccuccgg

SEQ ID NO: 813017 - RNA, 22 nt, Human
gaggcuccgugcugcugcccug

SEQ ID NO: 813018 - RNA, 22 nt, Human
cagagagaggccacugcuauua

SEQ ID NO: 813019 - RNA, 22 nt, Human
cauuuacauuuaagguuaauau

SEQ ID NO: 813020 - RNA, 22 nt, Human
acuuacaagcuagggaagcuug

SEQ ID NO: 813021 - RNA, 20 nt, Human
cucaguguggccugaguguu

SEQ ID NO: 813022 - RNA, 22 nt, Human
cugggccacuccagaugcccac

SEQ ID NO: 813023 - RNA, 22 nt, Human
aggcuaggaacagcccggcccu

SEQ ID NO: 813024 - RNA, 22 nt, Human
gggcagaggcucuggcccaucc

SEQ ID NO: 813025 - RNA, 22 nt, Human
ugcaauaaguuguguuaucacu

SEQ ID NO: 813026 - RNA, 22 nt, Human
ucuccuggaagaauaccacacu

SEQ ID NO: 813027 - RNA, 22 nt, Human
cucuccuugaggcuuggacuuc

SEQ ID NO: 813028 - RNA, 22 nt, Human
ugggaagaagcagagaacugga

SEQ ID NO: 813029 - RNA, 22 nt, Human
caggauaaauaguaaauguaag

SEQ ID NO: 813030 - RNA, 22 nt, Human
ccagccucaucauauuccugcu

SEQ ID NO: 813031 - RNA, 18 nt, Human
aauuuccauaugaauugc

SEQ ID NO: 813032 - RNA, 22 nt, Human
aggucccucagaggccucaccg

SEQ ID NO: 813033 - RNA, 22 nt, Human
ugcggccgggcaucguauggcg

SEQ ID NO: 813034 - RNA, 22 nt, Human
gucaauaauuuuauggagagaa

SEQ ID NO: 813035 - RNA, 22 nt, Human
aggccuggcuuugguuugcuga

SEQ ID NO: 813036 - RNA, 22 nt, Human
cccaagccagacccugacccug

SEQ ID NO: 813037 - RNA, 22 nt, Human
ucuccuggcauuugguugagua

SEQ ID NO: 813038 - RNA, 22 nt, Human
ggcggcccugcacgugcugagg

SEQ ID NO: 813039 - RNA, 22 nt, Human
uccccaggggccugggcacagu

SEQ ID NO: 813040 - RNA, 22 nt, Human
cauuucaagcauugacuucuau

SEQ ID NO: 813041 - RNA, 17 nt, Human
auacaguuuauuuuaca

SEQ ID NO: 813042 - RNA, 22 nt, Human
caauuuccuucauagaugacug

SEQ ID NO: 813043 - RNA, 20 nt, Human
uccagggcuagggagcucau

SEQ ID NO: 813044 - RNA, 22 nt, Human
gcaggacaaaauuuccagggug

SEQ ID NO: 813045 - RNA, 22 nt, Human
aauguuacgaucaacaacacau

SEQ ID NO: 813046 - RNA, 22 nt, Human
gcuggccugggcagccugucgg

SEQ ID NO: 813047 - RNA, 22 nt, Human
cuucucccuggcuucugcacac

SEQ ID NO: 813048 - RNA, 22 nt, Human
gagcagcuccagccgcaugacu

SEQ ID NO: 813049 - RNA, 22 nt, Human
acuggcagaacgugaugcgggu

SEQ ID NO: 813050 - RNA, 17 nt, Human
cccugcacccuacucuc

SEQ ID NO: 813051 - RNA, 18 nt, Human
accuccccauuuucugaa

SEQ ID NO: 813052 - RNA, 22 nt, Human
uuuuaauacugcuauuguagga

SEQ ID NO: 813053 - RNA, 22 nt, Human
cagucagagucacaguaauuug

SEQ ID NO: 813054 - RNA, 22 nt, Human
agccaacagccagcaucaacca

SEQ ID NO: 813055 - RNA, 22 nt, Human
uuuucugugauucugagguugg

SEQ ID NO: 813056 - RNA, 22 nt, Human
ccauuggagaguuuuaagaagg

SEQ ID NO: 813057 - RNA, 22 nt, Human
ugggagcagcuuugcgagggag

SEQ ID NO: 813058 - RNA, 22 nt, Human
cuaaggcagguccauuccagga

SEQ ID NO: 813059 - RNA, 22 nt, Human
ccaggaaggcguuguuccucuc

SEQ ID NO: 813060 - RNA, 22 nt, Human
cuuaaauuggaugaguuaaguu

SEQ ID NO: 813061 - RNA, 22 nt, Human
agggccagggaagcuguauuuu

SEQ ID NO: 813062 - RNA, 23 nt, Human
agcaggcaucuguggcacaaggc

SEQ ID NO: 813063 - RNA, 22 nt, Human
uuacauucauugaagugauuca

SEQ ID NO: 813064 - RNA, 22 nt, Human
ccaggagcuggcauguggagag

SEQ ID NO: 813065 - RNA, 22 nt, Human
uacaagaggauguggacaugga

SEQ ID NO: 813066 - RNA, 22 nt, Human
accuguuuaccugcaccuguuu

SEQ ID NO: 813067 - RNA, 22 nt, Human
uuuccucugggcccugccaccc

SEQ ID NO: 813068 - RNA, 22 nt, Human
cacaccuuaggccugagcgcuu

SEQ ID NO: 813069 - RNA, 22 nt, Human
aggcuagggccauggcugguga

SEQ ID NO: 813070 - RNA, 22 nt, Human
ggggccagcacugugccuuugu

SEQ ID NO: 813071 - RNA, 22 nt, Human
aggccacagccugggaggugac

SEQ ID NO: 813072 - RNA, 22 nt, Human
aucaagaacuuauuuuggaaau

SEQ ID NO: 813073 - RNA, 22 nt, Human
cagcaggugucuagcaaggguc

SEQ ID NO: 813074 - RNA, 22 nt, Human
agcugacauaagcacuuucuaa

SEQ ID NO: 813075 - RNA, 21 nt, Human
ggcuguggagccaugacucac

SEQ ID NO: 813076 - RNA, 21 nt, Human
acauacauuaucuuuuuaaaa

SEQ ID NO: 813077 - RNA, 23 nt, Human
ccagcccuccaccagcucuaggc

SEQ ID NO: 813078 - RNA, 22 nt, Human
uucaaaauuguucuaagcucug

SEQ ID NO: 813079 - RNA, 22 nt, Human
agaggaaggaugcauauccaaa

SEQ ID NO: 813080 - RNA, 22 nt, Human
uggugcugccaggcuccugcca

SEQ ID NO: 813081 - RNA, 22 nt, Human
uaagaugucaaagggucacagu

SEQ ID NO: 813082 - RNA, 22 nt, Human
uggcccaggugcaagagacaga

SEQ ID NO: 813083 - RNA, 22 nt, Human
ccuggcuucuauaccaccaggu

SEQ ID NO: 813084 - RNA, 22 nt, Human
uucaugaauguuccaugugagu

SEQ ID NO: 813085 - RNA, 22 nt, Human
ucagugucaucacuuaauauaa

SEQ ID NO: 813086 - RNA, 22 nt, Human
uacagugaaugaauggcugugc

SEQ ID NO: 813087 - RNA, 22 nt, Human
ggugcugacauucagagucugg

SEQ ID NO: 813088 - RNA, 22 nt, Human
cuacagaaaaucagccacaggc

SEQ ID NO: 813089 - RNA, 22 nt, Human
ggggaggcugaugugggcaaag

SEQ ID NO: 813090 - RNA, 22 nt, Human
uggccacaugcgucugugaggc

SEQ ID NO: 813091 - RNA, 21 nt, Human
uuacaaagcuacagauguugc

SEQ ID NO: 813092 - RNA, 22 nt, Human
uaauagaaagguauuuuuugca

SEQ ID NO: 813093 - RNA, 22 nt, Human
auugauucucauaggaccaucu

SEQ ID NO: 813094 - RNA, 22 nt, Human
agcccagccugauucuacaccc

SEQ ID NO: 813095 - RNA, 23 nt, Human
agccagggcacugguggagauug

SEQ ID NO: 813096 - RNA, 22 nt, Human
caucaggaggagaugaagaaaa

SEQ ID NO: 813097 - RNA, 22 nt, Human
ggcagugagucccggagaggcc

SEQ ID NO: 813098 - RNA, 22 nt, Human
aauauguucaaaauagaucacu

SEQ ID NO: 813099 - RNA, 22 nt, Human
gaaggaagugcucauacuaguu

SEQ ID NO: 813100 - RNA, 22 nt, Human
uccuggggcucaugggauuugu

SEQ ID NO: 813101 - RNA, 22 nt, Human
caggaguguugauugcucagga

SEQ ID NO: 813102 - RNA, 22 nt, Human
ggcaugaguaacgugagugagg

SEQ ID NO: 813103 - RNA, 22 nt, Human
uuuaaugauagucuuacgaaaa

SEQ ID NO: 813104 - RNA, 22 nt, Human
gggagcugaauggcaauggaga

SEQ ID NO: 813105 - RNA, 22 nt, Human
cauauacacuuccaccucugug

SEQ ID NO: 813106 - RNA, 22 nt, Human
uucuauugggcagcauugcuuc

SEQ ID NO: 813107 - RNA, 22 nt, Human
aaaaguauaggguuuggaguca

SEQ ID NO: 813108 - RNA, 22 nt, Human
gccagcagguugucaaggagcu

SEQ ID NO: 813109 - RNA, 22 nt, Human
cuugaaugaaaccaacugauga

SEQ ID NO: 813110 - RNA, 22 nt, Human
gcuggagucccugccuuuccuu

SEQ ID NO: 813111 - RNA, 22 nt, Human
cgcugccucucuggggcccugg

SEQ ID NO: 813112 - RNA, 22 nt, Human
gugcagcuuccuggucucagcc

SEQ ID NO: 813113 - RNA, 22 nt, Human
ugaaaauuguuguacuugauaa

SEQ ID NO: 813114 - RNA, 20 nt, Human
ggccuuggguuucgccuguu

SEQ ID NO: 813115 - RNA, 22 nt, Human
aggccugccuggaucacacaga

SEQ ID NO: 813116 - RNA, 21 nt, Human
gcucuaucaggccaaaauguc

SEQ ID NO: 813117 - RNA, 22 nt, Human
agacaauggcuaaguaaccugu

SEQ ID NO: 813118 - RNA, 22 nt, Human
gacccaggguauccagagcugc

SEQ ID NO: 813119 - RNA, 22 nt, Human
aguuucuaccgguacauucagg

SEQ ID NO: 813120 - RNA, 22 nt, Human
cauacaaucaaguucuuuauua

SEQ ID NO: 813121 - RNA, 22 nt, Human
ccagggcuccauugcucauccu

SEQ ID NO: 813122 - RNA, 22 nt, Human
cuggaaugucugcucaauguuu

SEQ ID NO: 813123 - RNA, 22 nt, Human
ucuuccagccaauagcguccuu

SEQ ID NO: 813124 - RNA, 22 nt, Human
uauuugauagagauaaaugaua

SEQ ID NO: 813125 - RNA, 22 nt, Human
ggagcuggcagcgcaacccaga

SEQ ID NO: 813126 - RNA, 22 nt, Human
uuugacauugaaagcagaaucg

SEQ ID NO: 813127 - RNA, 22 nt, Human
ugucauggucuguaaggagccc

SEQ ID NO: 813128 - RNA, 22 nt, Human
ucuggggaugaggaccuagaug

SEQ ID NO: 813129 - RNA, 22 nt, Human
cacuugaaugagaauuuccugg

SEQ ID NO: 813130 - RNA, 22 nt, Human
agguaggauagauaggaagacc

SEQ ID NO: 813131 - RNA, 22 nt, Human
cccaggcugaguuagagguguc

SEQ ID NO: 813132 - RNA, 22 nt, Human
augaaauguauucagauaugua

SEQ ID NO: 813133 - RNA, 22 nt, Human
gugcugagauuggagugagcag

SEQ ID NO: 813134 - RNA, 22 nt, Human
guccaggagcucagggcuuauu

SEQ ID NO: 813135 - RNA, 22 nt, Human
acauggaauguguacuaaguua

SEQ ID NO: 813136 - RNA, 22 nt, Human
aaagucaucagaaccuuccaga

SEQ ID NO: 813137 - RNA, 22 nt, Human
acaaaguaagggcuaaugagca

SEQ ID NO: 813138 - RNA, 22 nt, Human
gggugggaacaggaugccagga

SEQ ID NO: 813139 - RNA, 22 nt, Human
ggcuguggccagcggggcugag

SEQ ID NO: 813140 - RNA, 22 nt, Human
ugggaggcagaaguugacugga

SEQ ID NO: 813141 - RNA, 20 nt, Human
aaacaagguugcucugagga

SEQ ID NO: 813142 - RNA, 22 nt, Human
uuucugaauuuacucaagguca

SEQ ID NO: 813143 - RNA, 22 nt, Human
aaagccagugguaugagagaaa

SEQ ID NO: 813144 - RNA, 22 nt, Human
ucugggcucugucagcaccucu

SEQ ID NO: 813145 - RNA, 22 nt, Human
aguaauaauagcuguaaagugc

SEQ ID NO: 813146 - RNA, 22 nt, Human
acuuauaggccaaguagacugu

SEQ ID NO: 813147 - RNA, 22 nt, Human
cugggcccacgagggcucuggg

SEQ ID NO: 813148 - RNA, 23 nt, Human
agaugaaagcuucccaucacagu

SEQ ID NO: 813149 - RNA, 22 nt, Human
aaaguucuuugcaucuuugcuc

SEQ ID NO: 813150 - RNA, 22 nt, Human
aggcucugugcagccugcaucu

SEQ ID NO: 813151 - RNA, 22 nt, Human
caacagaaggaagcagggucag

SEQ ID NO: 813152 - RNA, 22 nt, Human
caggaaauugcaacagucugag

SEQ ID NO: 813153 - RNA, 22 nt, Human
ccaggcacugcucgaggugcua

SEQ ID NO: 813154 - RNA, 22 nt, Human
uggcuucugcucccagaaugau

SEQ ID NO: 813155 - RNA, 19 nt, Human
ggaccagguccugggcagc

SEQ ID NO: 813156 - RNA, 22 nt, Human
aguggagugaguggcagaagga

SEQ ID NO: 813157 - RNA, 22 nt, Human
uccagcucaggguuggcucaag

SEQ ID NO: 813158 - RNA, 22 nt, Human
uuuucacacaaggugauaaguu

SEQ ID NO: 813159 - RNA, 22 nt, Human
gaaggaggcuccccaaagucug

SEQ ID NO: 813160 - RNA, 22 nt, Human
aauaaaguagcguuuaaggugc

SEQ ID NO: 813161 - RNA, 22 nt, Human
ggcaaggggucaggcugagaca

SEQ ID NO: 813162 - RNA, 19 nt, Human
uggguuggaagggaaugaa

SEQ ID NO: 813163 - RNA, 22 nt, Human
auuguggugucaguuauaggca

SEQ ID NO: 813164 - RNA, 22 nt, Human
ugcaggaagacuucccaagcca

SEQ ID NO: 813165 - RNA, 22 nt, Human
agagcccugugguucugguaag

SEQ ID NO: 813166 - RNA, 22 nt, Human
uugaaugaggaagagcacuggc

SEQ ID NO: 813167 - RNA, 22 nt, Human
cccucccuauguagaugauguu

SEQ ID NO: 813168 - RNA, 19 nt, Human
caggacagacuucaaagcc

SEQ ID NO: 813169 - RNA, 22 nt, Human
aacucugguucagugauuucag

SEQ ID NO: 813170 - RNA, 19 nt, Human
cuggcagccugucuguguc

SEQ ID NO: 813171 - RNA, 22 nt, Human
aaggcagagucuaucuuggaag

SEQ ID NO: 813172 - RNA, 22 nt, Human
acaguuacucauagaagcacuu

SEQ ID NO: 813173 - RNA, 22 nt, Human
ccaggcuggaaucaauauucug

SEQ ID NO: 813174 - RNA, 18 nt, Human
aggcuugggcccagcagc

SEQ ID NO: 813175 - RNA, 22 nt, Human
aggagcugggcccaaggaugcu

SEQ ID NO: 813176 - RNA, 22 nt, Human
cccuggagugugacgaggcauu

SEQ ID NO: 813177 - RNA, 22 nt, Human
uuuuuuccucugugauggcaaa

SEQ ID NO: 813178 - RNA, 22 nt, Human
aggacacuuggcuauuguucca

SEQ ID NO: 813179 - RNA, 22 nt, Human
ucccaggcagcuucuuucauca

SEQ ID NO: 813180 - RNA, 22 nt, Human
agccuggcuaaauucucccaug

SEQ ID NO: 813181 - RNA, 22 nt, Human
gucuggggcagcaaggcgcgcg

SEQ ID NO: 813182 - RNA, 22 nt, Human
gcucuuggccaaguggaagggu

SEQ ID NO: 813183 - RNA, 22 nt, Human
cuccagagaguccagcucuggg

SEQ ID NO: 813184 - RNA, 20 nt, Human
gaagccagaggggaaaggag

SEQ ID NO: 813185 - RNA, 19 nt, Human
cacaauuaugagacacuua

SEQ ID NO: 813186 - RNA, 22 nt, Human
cagagaagaaagugacuauaau

SEQ ID NO: 813187 - RNA, 22 nt, Human
uguccugugcacuguagcaugu

SEQ ID NO: 813188 - RNA, 22 nt, Human
ucuucacauggagaagcaacuc

SEQ ID NO: 813189 - RNA, 19 nt, Human
aaaagucuauucaauuaca

SEQ ID NO: 813190 - RNA, 22 nt, Human
ucagucacuuuugccugcuaca

SEQ ID NO: 813191 - RNA, 22 nt, Human
guuucuaagcacaugugagugu

SEQ ID NO: 813192 - RNA, 22 nt, Human
ucccugggguaucgcugaggca

SEQ ID NO: 813193 - RNA, 22 nt, Human
uucuacuuuagcaugcucauuc

SEQ ID NO: 813194 - RNA, 20 nt, Human
ucuccuggugacaguaccca

SEQ ID NO: 813195 - RNA, 22 nt, Human
aaagaagggacagacugccucu

SEQ ID NO: 813196 - RNA, 22 nt, Human
aaagaaucuauauaucaccacc

SEQ ID NO: 813197 - RNA, 22 nt, Human
uacaaaggcgguuuuucugggc

SEQ ID NO: 813198 - RNA, 22 nt, Human
ccuggcagacagcacugaagcu

SEQ ID NO: 813199 - RNA, 22 nt, Human
auaaagcuuugaaauggagaua

SEQ ID NO: 813200 - RNA, 22 nt, Human
uagaaacauauguuugagacau

SEQ ID NO: 813201 - RNA, 19 nt, Human
gcuggcuggaggagggaca

SEQ ID NO: 813202 - RNA, 23 nt, Human
auguauuuaaauuucagugauga

SEQ ID NO: 813203 - RNA, 22 nt, Human
cuuucaaagaccuuggcauggg

SEQ ID NO: 813204 - RNA, 22 nt, Human
acuauacaagauuagggauuug

SEQ ID NO: 813205 - RNA, 22 nt, Human
ggcugccugaggcugaggcccg

SEQ ID NO: 813206 - RNA, 22 nt, Human
ggggagcaauaguugaggugug

SEQ ID NO: 813207 - RNA, 22 nt, Human
auuugcaugcuucuauugugaa

SEQ ID NO: 813208 - RNA, 22 nt, Human
auacuaaaguauagaacuuagu

SEQ ID NO: 813209 - RNA, 22 nt, Human
uuuaucuguauaucucaagugu

SEQ ID NO: 813210 - RNA, 22 nt, Human
uacugucuauacacuugauuac

SEQ ID NO: 813211 - RNA, 22 nt, Human
auuuuuccugcuggaucugcuc

SEQ ID NO: 813212 - RNA, 22 nt, Human
aacaggcaauuuaggacucuuu

SEQ ID NO: 813213 - RNA, 22 nt, Human
cagcuggccaaucagggcgccc

SEQ ID NO: 813214 - RNA, 22 nt, Human
cugucccaggauccugacucca

SEQ ID NO: 813215 - RNA, 22 nt, Human
gccaggaggucagccccucaac

SEQ ID NO: 813216 - RNA, 22 nt, Human
gaaauacaaaugccuagauccu

SEQ ID NO: 813217 - RNA, 22 nt, Human
gagcugaggcucaggcuggcgu

SEQ ID NO: 813218 - RNA, 22 nt, Human
aucacaaaggcugcuucaugau

SEQ ID NO: 813219 - RNA, 22 nt, Human
uuuauucauuguuucgucgcag

SEQ ID NO: 813220 - RNA, 22 nt, Human
accaguuucugggggagguugg

SEQ ID NO: 813221 - RNA, 22 nt, Human
uggaagcacuuggguuuuguug

SEQ ID NO: 813222 - RNA, 22 nt, Human
cuucucuuccuuugucaacuga

SEQ ID NO: 813223 - RNA, 22 nt, Human
uuucaaugacacaaaagagaaa

SEQ ID NO: 813224 - RNA, 22 nt, Human
uauaaagugugaacugugagua

SEQ ID NO: 813225 - RNA, 22 nt, Human
uuaugauuugccacagauuggu

SEQ ID NO: 813226 - RNA, 22 nt, Human
aggcuugggacugcuuaggagc

SEQ ID NO: 813227 - RNA, 20 nt, Human
augucugaaguaauccauuu

SEQ ID NO: 813228 - RNA, 22 nt, Human
uuuuucucuucuguaaaguggu

SEQ ID NO: 813229 - RNA, 22 nt, Human
cuuuuuaucucuuaaugauguu

SEQ ID NO: 813230 - RNA, 22 nt, Human
ugacgguauuuagggagcagcg

SEQ ID NO: 813231 - RNA, 22 nt, Human
aaagcccauguggaaguacagg

SEQ ID NO: 813232 - RNA, 22 nt, Human
gccccucccagucaggagcacu

SEQ ID NO: 813233 - RNA, 22 nt, Human
uccagcagcccgaaggcccauc

SEQ ID NO: 813234 - RNA, 22 nt, Human
gcaggucuaucaggcugcaggu

SEQ ID NO: 813235 - RNA, 23 nt, Human
aggagaagagauuuccacaugca

SEQ ID NO: 813236 - RNA, 22 nt, Human
aacuuauuccauaggcucacug

SEQ ID NO: 813237 - RNA, 22 nt, Human
uagucacacaauuguguacauu

SEQ ID NO: 813238 - RNA, 22 nt, Human
aaagcagguuaugaccauggcc

SEQ ID NO: 813239 - RNA, 22 nt, Human
ucaugcaagaauaauaggaagg

SEQ ID NO: 813240 - RNA, 22 nt, Human
agaggccugugugcuccagugg

SEQ ID NO: 813241 - RNA, 22 nt, Human
gaaggcaguaaauggcuguuuu

SEQ ID NO: 813242 - RNA, 22 nt, Human
cacuguucacauuuuagucuau

SEQ ID NO: 813243 - RNA, 22 nt, Human
ggaggaaauccuuaguaaggca

SEQ ID NO: 813244 - RNA, 22 nt, Human
cugccaggugccagggcgcggc

SEQ ID NO: 813245 - RNA, 22 nt, Human
acagcuuuaucucagggaucag

SEQ ID NO: 813246 - RNA, 22 nt, Human
auggcccagacucagacuggug

SEQ ID NO: 813247 - RNA, 22 nt, Human
aaagagaacuuuuacccaagaa

SEQ ID NO: 813248 - RNA, 20 nt, Human
uccuggccucccuggggcuc

SEQ ID NO: 813249 - RNA, 22 nt, Human
uucaccauaaugcaaaguggga

SEQ ID NO: 813250 - RNA, 22 nt, Human
caucaggaauuauccuaauuau

SEQ ID NO: 813251 - RNA, 22 nt, Human
agaaaggaggaagaaugaccuc

SEQ ID NO: 813252 - RNA, 22 nt, Human
uauaaaugcacuuuugaaauau

SEQ ID NO: 813253 - RNA, 22 nt, Human
cuucacugcagucauggcucug

SEQ ID NO: 813254 - RNA, 22 nt, Human
ucacaggcuggucuccgaggac

SEQ ID NO: 813255 - RNA, 22 nt, Human
ugagugagacauccugucuuaa

SEQ ID NO: 813256 - RNA, 22 nt, Human
ucugaggaguugggccagugcu

SEQ ID NO: 813257 - RNA, 22 nt, Human
ucccacagggcuucucuguaca

SEQ ID NO: 813258 - RNA, 22 nt, Human
uggugagagcugaccgugcgag

SEQ ID NO: 813259 - RNA, 22 nt, Human
uuaauaacauuguguaucaccc

SEQ ID NO: 813260 - RNA, 22 nt, Human
ugguaaguaagugaaacaucca

SEQ ID NO: 813261 - RNA, 22 nt, Human
uuuuuguagucauuagaagagg

SEQ ID NO: 813262 - RNA, 22 nt, Human
uucaagaggcuuaauucuggau

SEQ ID NO: 813263 - RNA, 22 nt, Human
gccucagccggcggacgccagg

SEQ ID NO: 813264 - RNA, 23 nt, Human
auugaccagcugucucauuuuca

SEQ ID NO: 813265 - RNA, 22 nt, Human
gcaguccucauccuuuagcagu

SEQ ID NO: 813266 - RNA, 22 nt, Human
ugaguaacacaguaugcuuaca

SEQ ID NO: 813267 - RNA, 22 nt, Human
gcuccuggagagauugagaaag

SEQ ID NO: 813268 - RNA, 22 nt, Human
caggacuguauccuuggagaaa

SEQ ID NO: 813269 - RNA, 22 nt, Human
gccucuuguuuccuuacaugga

SEQ ID NO: 813270 - RNA, 22 nt, Human
uuaaggaacaauucuacacacc

SEQ ID NO: 813271 - RNA, 22 nt, Human
gcaguacacacauauguauucg

SEQ ID NO: 813272 - RNA, 22 nt, Human
cugggcaggagaggugguugga

SEQ ID NO: 813273 - RNA, 19 nt, Human
accaggcuuauggucagug

SEQ ID NO: 813274 - RNA, 22 nt, Human
aaaauagcagggaugugggaaa

SEQ ID NO: 813275 - RNA, 17 nt, Human
ggcagggugcuggguau

SEQ ID NO: 813276 - RNA, 22 nt, Human
ucauaagugguuuauaugcuug

SEQ ID NO: 813277 - RNA, 22 nt, Human
uuaauaaacaggugcagcugaa

SEQ ID NO: 813278 - RNA, 22 nt, Human
ggacaggagugaggcggguucc

SEQ ID NO: 813279 - RNA, 22 nt, Human
ucaggaugacuucaaggaggaa

SEQ ID NO: 813280 - RNA, 22 nt, Human
ccucucuguguggccucuccau

SEQ ID NO: 813281 - RNA, 22 nt, Human
ugaguuaucuaaaauagucaaa

SEQ ID NO: 813282 - RNA, 22 nt, Human
ccccagggacugguuucaugga

SEQ ID NO: 813283 - RNA, 22 nt, Human
cuggggugucucgucugccauu

SEQ ID NO: 813284 - RNA, 22 nt, Human
uuccauuuauucuuguccagau

SEQ ID NO: 813285 - RNA, 22 nt, Human
auggcccagaaguuuggaaagg

SEQ ID NO: 813286 - RNA, 22 nt, Human
uccuuuccagccucaccucagc

SEQ ID NO: 813287 - RNA, 22 nt, Human
uucaagaugucuucacaauagu

SEQ ID NO: 813288 - RNA, 22 nt, Human
uggcagaugugguuugagacag

SEQ ID NO: 813289 - RNA, 22 nt, Human
uccuggaggagauccaaucuga

SEQ ID NO: 813290 - RNA, 22 nt, Human
uaugcucugagaccuuugugca

SEQ ID NO: 813291 - RNA, 22 nt, Human
uuuuaauucaaagugaauagug

SEQ ID NO: 813292 - RNA, 22 nt, Human
ucaguguguaguaaauuguagg

SEQ ID NO: 813293 - RNA, 22 nt, Human
uucuucaaaauccagcaugauu

SEQ ID NO: 813294 - RNA, 22 nt, Human
uaguccagguuuccaucuccac

SEQ ID NO: 813295 - RNA, 18 nt, Human
uggcuggcagugggcagc

SEQ ID NO: 813296 - RNA, 20 nt, Human
uauuuugcaauuaugguuca

SEQ ID NO: 813297 - RNA, 22 nt, Human
gaaaggcaguacagcugagccu

SEQ ID NO: 813298 - RNA, 22 nt, Human
cagcaagggauaaacaaggacg

SEQ ID NO: 813299 - RNA, 22 nt, Human
aaaggaggaauggagagaugcu

SEQ ID NO: 813300 - RNA, 23 nt, Human
guccucuggagagaaaggcagua

SEQ ID NO: 813301 - RNA, 22 nt, Human
auuucucauuaagaucuuccaa

SEQ ID NO: 813302 - RNA, 22 nt, Human
ccacccagccagaugcaggaag

SEQ ID NO: 813303 - RNA, 22 nt, Human
cagcuguuugggcauggccaga

SEQ ID NO: 813304 - RNA, 22 nt, Human
ucucccacagucucccauggcu

SEQ ID NO: 813305 - RNA, 22 nt, Human
gcacuggaaauaccuagaugaa

SEQ ID NO: 813306 - RNA, 19 nt, Human
ccugggacuuaggcugggu

SEQ ID NO: 813307 - RNA, 22 nt, Human
agggagugguuaagaaggugca

SEQ ID NO: 813308 - RNA, 22 nt, Human
acaggcucucagccaguuggca

SEQ ID NO: 813309 - RNA, 22 nt, Human
ccaggcuggagugcaauggugc

SEQ ID NO: 813310 - RNA, 22 nt, Human
aucagagguuauguggagggga

SEQ ID NO: 813311 - RNA, 22 nt, Human
cuucuucaucuguaaaacuugg

SEQ ID NO: 813312 - RNA, 23 nt, Human
agcuggaggcugucuacucccaa

SEQ ID NO: 813313 - RNA, 22 nt, Human
gccuucaguagugucagcugua

SEQ ID NO: 813314 - RNA, 20 nt, Human
uuugcuaugcauaucugacc

SEQ ID NO: 813315 - RNA, 22 nt, Human
ugcagaggugaaagacuagcaa

SEQ ID NO: 813316 - RNA, 22 nt, Human
cugugacaguuucucagaauuu

SEQ ID NO: 813317 - RNA, 22 nt, Human
agcugugguacuugauucacaa

SEQ ID NO: 813318 - RNA, 22 nt, Human
acacauuugggcuccuacauaa

SEQ ID NO: 813319 - RNA, 22 nt, Human
cagucagaggucuucuaaaaca

SEQ ID NO: 813320 - RNA, 22 nt, Human
aggggcaucaguugcacauuuu

SEQ ID NO: 813321 - RNA, 23 nt, Human
gcccaugcuguugggcccgagca

SEQ ID NO: 813322 - RNA, 22 nt, Human
ggcagcugagaucaugcuguug

SEQ ID NO: 813323 - RNA, 22 nt, Human
gcacugggaagaaugagccugu

SEQ ID NO: 813324 - RNA, 22 nt, Human
gaaaaggccuccccauaggaau

SEQ ID NO: 813325 - RNA, 22 nt, Human
aggcaggcucaaugcccagucu

SEQ ID NO: 813326 - RNA, 22 nt, Human
agcuaggaaauugaggcugaga

SEQ ID NO: 813327 - RNA, 22 nt, Human
aaagcagcaaauacuuuugcac

SEQ ID NO: 813328 - RNA, 22 nt, Human
caggacagugcagguccauccu

SEQ ID NO: 813329 - RNA, 22 nt, Human
cagaaacuguggauucauuaaa

SEQ ID NO: 813330 - RNA, 20 nt, Human
auauaauaaauuuugguuac

SEQ ID NO: 813331 - RNA, 22 nt, Human
cuccucccucuuugccacacau

SEQ ID NO: 813332 - RNA, 22 nt, Human
ucagcugcaguuucacaagcac

SEQ ID NO: 813333 - RNA, 22 nt, Human
uuuuaugugugaaaugcugucu

SEQ ID NO: 813334 - RNA, 22 nt, Human
acauuuuucacauuuguagggu

SEQ ID NO: 813335 - RNA, 22 nt, Human
caccugagcacuggggccgccc

SEQ ID NO: 813336 - RNA, 22 nt, Human
acaguguuuaaaauaauaugcu

SEQ ID NO: 813337 - RNA, 22 nt, Human
uuacagagauaaacuguaagug

SEQ ID NO: 813338 - RNA, 20 nt, Human
cauauauaccuagaagugga

SEQ ID NO: 813339 - RNA, 22 nt, Human
guccagagagaucuucugauag

SEQ ID NO: 813340 - RNA, 22 nt, Human
uuacacaaaaauaagauauggc

SEQ ID NO: 813341 - RNA, 22 nt, Human
auucucauuugcuggcuauaug

SEQ ID NO: 813342 - RNA, 22 nt, Human
uauuauugacauuuacuuggug

SEQ ID NO: 813343 - RNA, 22 nt, Human
uggcccagacucugcucuuauc

SEQ ID NO: 813344 - RNA, 22 nt, Human
ucuaaacaguuucacucuuaau

SEQ ID NO: 813345 - RNA, 19 nt, Human
agccagaguggcccagggg

SEQ ID NO: 813346 - RNA, 22 nt, Human
ccacuggcaaccccgccucaua

SEQ ID NO: 813347 - RNA, 22 nt, Human
cagcugaguguuggcauguuca

SEQ ID NO: 813348 - RNA, 22 nt, Human
cacuggcaaauggagagaaugu

SEQ ID NO: 813349 - RNA, 22 nt, Human
uucaacaaguauuuauugagca

SEQ ID NO: 813350 - RNA, 22 nt, Human
acaacacauguguauaugugug

SEQ ID NO: 813351 - RNA, 22 nt, Human
augcauucuagccuggacaaca

SEQ ID NO: 813352 - RNA, 22 nt, Human
uauacacaaggugugcauuugu

SEQ ID NO: 813353 - RNA, 22 nt, Human
aaaucaaggagggauuauauuu

SEQ ID NO: 813354 - RNA, 22 nt, Human
uaacauuacagacaccuugugu

SEQ ID NO: 813355 - RNA, 18 nt, Human
cccggcuaauuuuuggua

SEQ ID NO: 813356 - RNA, 22 nt, Human
caagccuuggaaauccauucug

SEQ ID NO: 813357 - RNA, 22 nt, Human
ugcagggugguuugaagggucu

SEQ ID NO: 813358 - RNA, 22 nt, Human
acaguguacuagguacauguuc

SEQ ID NO: 813359 - RNA, 22 nt, Human
uucaaagugugaccugacaagc

SEQ ID NO: 813360 - RNA, 22 nt, Human
cacagcuugggcucugacaaua

SEQ ID NO: 813361 - RNA, 22 nt, Human
cucucuggcacuucauugcugu

SEQ ID NO: 813362 - RNA, 22 nt, Human
ggguggaagccagagaggucau

SEQ ID NO: 813363 - RNA, 22 nt, Human
uuucacaugcagcagggaagug

SEQ ID NO: 813364 - RNA, 22 nt, Human
uuaacaauagaguuucuucagg

SEQ ID NO: 813365 - RNA, 22 nt, Human
gccaggcugccuuaucucuagc

SEQ ID NO: 813366 - RNA, 21 nt, Human
ugaaugaucugguugccuuuu

SEQ ID NO: 813367 - RNA, 22 nt, Human
uguacuugaacuugacuguaga

SEQ ID NO: 813368 - RNA, 22 nt, Human
ugaggcuugucucagauggggg

SEQ ID NO: 813369 - RNA, 22 nt, Human
uaaagccacgcuggaaaucagg

SEQ ID NO: 813370 - RNA, 22 nt, Human
acacagcaaggucugacuuugg

SEQ ID NO: 813371 - RNA, 22 nt, Human
uuuugguucugggauacagaga

SEQ ID NO: 813372 - RNA, 22 nt, Human
uagcuuuguguccugauuuagc

SEQ ID NO: 813373 - RNA, 22 nt, Human
gcuguauuuaacaacuggcuca

SEQ ID NO: 813374 - RNA, 22 nt, Human
ugcuggggcagaagagccaaga

SEQ ID NO: 813375 - RNA, 17 nt, Human
uguuuucauucauugcu

SEQ ID NO: 813376 - RNA, 22 nt, Human
caguauaagagugaggaagggc

SEQ ID NO: 813377 - RNA, 22 nt, Human
cuggagccacugggucuuguau

SEQ ID NO: 813378 - RNA, 22 nt, Human
acauuuugcccuuauuugcuga

SEQ ID NO: 813379 - RNA, 22 nt, Human
ccucuuccacugggccccaucc

SEQ ID NO: 813380 - RNA, 22 nt, Human
gcaggcuugggacgagcuggag

SEQ ID NO: 813381 - RNA, 22 nt, Human
auggcagcauaguggcaaguua

SEQ ID NO: 813382 - RNA, 22 nt, Human
guuagaaacacauucuuauuga

SEQ ID NO: 813383 - RNA, 22 nt, Human
gccaggguucaagcuauucucc

SEQ ID NO: 813384 - RNA, 22 nt, Human
aaaaucucauuaucaggaaggg

SEQ ID NO: 813385 - RNA, 22 nt, Human
ugcuuucagcugguaaagaaac

SEQ ID NO: 813386 - RNA, 22 nt, Human
guccccucauuuuagagaaaga

SEQ ID NO: 813387 - RNA, 22 nt, Human
uucuuuggcuuacgucuggccu

SEQ ID NO: 813388 - RNA, 22 nt, Human
ggccaggcuggucucagacuuc

SEQ ID NO: 813389 - RNA, 22 nt, Human
aaacuguaagagaauaaacuac

SEQ ID NO: 813390 - RNA, 22 nt, Human
gcuccuggccagcacagggccc

SEQ ID NO: 813391 - RNA, 20 nt, Human
ccucucugcccugcaaggcc

SEQ ID NO: 813392 - RNA, 23 nt, Human
ugucugucauggaauuucaaggu

SEQ ID NO: 813393 - RNA, 22 nt, Human
aucacuaugggcauuauauuua

SEQ ID NO: 813394 - RNA, 22 nt, Human
uucagugugcuucaggacguua

SEQ ID NO: 813395 - RNA, 22 nt, Human
agcccuggcucccagcagcgcu

SEQ ID NO: 813396 - RNA, 22 nt, Human
uagaaacacagaucugguguca

SEQ ID NO: 813397 - RNA, 22 nt, Human
agugcauucuccaucaucuagg

SEQ ID NO: 813398 - RNA, 22 nt, Human
cagcuuugauucuuucugccau

SEQ ID NO: 813399 - RNA, 22 nt, Human
ugcuggcuuuuccuucaggcag

SEQ ID NO: 813400 - RNA, 22 nt, Human
cauucuugaaccaggcacugug

SEQ ID NO: 813401 - RNA, 22 nt, Human
gaggcuggucagcccuaagauc

SEQ ID NO: 813402 - RNA, 22 nt, Human
aaagugcaccugcuucuucuug

SEQ ID NO: 813403 - RNA, 22 nt, Human
cauacauuuauacacaucuaug

SEQ ID NO: 813404 - RNA, 22 nt, Human
cugucuuuucuucucauugaug

SEQ ID NO: 813405 - RNA, 22 nt, Human
gcugccugggcaggaggcgcug

SEQ ID NO: 813406 - RNA, 18 nt, Human
uaagagcagacuguaggc

SEQ ID NO: 813407 - RNA, 22 nt, Human
uggcccuguccucauuucaucu

SEQ ID NO: 813408 - RNA, 22 nt, Human
aagcuuugauaauuggauuacu

SEQ ID NO: 813409 - RNA, 22 nt, Human
uggcuggauaucaggcaagggg

SEQ ID NO: 813410 - RNA, 22 nt, Human
uuacgaauguuagauugcaucu

SEQ ID NO: 813411 - RNA, 22 nt, Human
uucacaauuucccuucaucagg

SEQ ID NO: 813412 - RNA, 22 nt, Human
uggggaaaggagagcauuauuu

SEQ ID NO: 813413 - RNA, 21 nt, Human
auuuucauuuccaggggagga

SEQ ID NO: 813414 - RNA, 22 nt, Human
agguaaugcauauaaagugcuu

SEQ ID NO: 813415 - RNA, 22 nt, Human
cccaggguccggauaacccugg

SEQ ID NO: 813416 - RNA, 22 nt, Human
augcuauacauaugacaucaca

SEQ ID NO: 813417 - RNA, 22 nt, Human
uggaagagggagcuggguggcc

SEQ ID NO: 813418 - RNA, 22 nt, Human
ucaggacagagaucagaacuuc

SEQ ID NO: 813419 - RNA, 22 nt, Human
auaccuaugugacaguauuauu

SEQ ID NO: 813420 - RNA, 22 nt, Human
uuucauguuuauggaaaaugag

SEQ ID NO: 813421 - RNA, 22 nt, Human
gucauuuuugacuuugaaguga

SEQ ID NO: 813422 - RNA, 22 nt, Human
caggugccucaggaugagacaa

SEQ ID NO: 813423 - RNA, 22 nt, Human
uucuggcuuugaccaaguucaa

SEQ ID NO: 813424 - RNA, 22 nt, Human
cccagccucuguuugcuccucu

SEQ ID NO: 813425 - RNA, 22 nt, Human
acacuuuaucaauauucaaaaa

SEQ ID NO: 813426 - RNA, 22 nt, Human
gagaaacugaauauuuaacggg

SEQ ID NO: 813427 - RNA, 22 nt, Human
uaauuagaguuugguaaacaau

SEQ ID NO: 813428 - RNA, 22 nt, Human
gcaggugguccccguggagugg

SEQ ID NO: 813429 - RNA, 22 nt, Human
uauuaugcaaauauuccuaccu

SEQ ID NO: 813430 - RNA, 22 nt, Human
uuucugcaugcauuuaauuaaa

SEQ ID NO: 813431 - RNA, 18 nt, Human
uggacaggguggagaaaa

SEQ ID NO: 813432 - RNA, 22 nt, Human
ucuggcaucacucgcaagagca

SEQ ID NO: 813433 - RNA, 22 nt, Human
gcuggcauuacaggagagaacc

SEQ ID NO: 813434 - RNA, 22 nt, Human
gaggaggcugaacaaugcccug

SEQ ID NO: 813435 - RNA, 22 nt, Human
guggcccucugauagggucagg

SEQ ID NO: 813436 - RNA, 23 nt, Human
cauggggagcagugcuccugacc

SEQ ID NO: 813437 - RNA, 22 nt, Human
aguggcagagugcacucaggca

SEQ ID NO: 813438 - RNA, 22 nt, Human
ccugcuucagggaugauggcac

SEQ ID NO: 813439 - RNA, 19 nt, Human
cuggaaugagaacaugccc

SEQ ID NO: 813440 - RNA, 22 nt, Human
uggaaggaagccaaggaagguu

SEQ ID NO: 813441 - RNA, 22 nt, Human
cauucaaacauuaauuuauuca

SEQ ID NO: 813442 - RNA, 22 nt, Human
guuucucuuaacacauaaagua

SEQ ID NO: 813443 - RNA, 22 nt, Human
aauaucuggagaugcuuuuugu

SEQ ID NO: 813444 - RNA, 23 nt, Human
ccuggcugaccugaagguguagu

SEQ ID NO: 813445 - RNA, 22 nt, Human
gagggccagcagccucagcaug

SEQ ID NO: 813446 - RNA, 22 nt, Human
aaaaagacuagucgagugcagu

SEQ ID NO: 813447 - RNA, 22 nt, Human
cauggggagacaccuagggaaa

SEQ ID NO: 813448 - RNA, 22 nt, Human
uaccaggcagcugcacagaggc

SEQ ID NO: 813449 - RNA, 22 nt, Human
agcugcccuguggggaggguug

SEQ ID NO: 813450 - RNA, 22 nt, Human
cauacagagaaggauaauaaag

SEQ ID NO: 813451 - RNA, 22 nt, Human
ugaggccagggauuccaucauu

SEQ ID NO: 813452 - RNA, 22 nt, Human
uugucugagaaagugaguugcu

SEQ ID NO: 813453 - RNA, 22 nt, Human
aucaguguauucauagggaaua

SEQ ID NO: 813454 - RNA, 21 nt, Human
aggcaugagcccugcauggac

SEQ ID NO: 813455 - RNA, 22 nt, Human
caggccagcuuccugacauccu

SEQ ID NO: 813456 - RNA, 22 nt, Human
uauaagucuggcauauguaugc

SEQ ID NO: 813457 - RNA, 22 nt, Human
gaggcuguuagggccugaggua

SEQ ID NO: 813458 - RNA, 23 nt, Human
ucagaaggugccacugacgcuuu

SEQ ID NO: 813459 - RNA, 22 nt, Human
uugaaauguaguccugccuuca

SEQ ID NO: 813460 - RNA, 22 nt, Human
agccuggccaggccugcccagg

SEQ ID NO: 813461 - RNA, 22 nt, Human
augucuuugccauaguucauau

SEQ ID NO: 813462 - RNA, 22 nt, Human
acaggcucuggggcaggauggc

SEQ ID NO: 813463 - RNA, 22 nt, Human
agaaaucugacugcugugcaca

SEQ ID NO: 813464 - RNA, 22 nt, Human
ugggaggaucgcuugagcccag

SEQ ID NO: 813465 - RNA, 22 nt, Human
uucaguguuacucaaggggcag

SEQ ID NO: 813466 - RNA, 22 nt, Human
guuacauuuauuagaggucucu

SEQ ID NO: 813467 - RNA, 22 nt, Human
auuauauaggacuugcccuucc

SEQ ID NO: 813468 - RNA, 22 nt, Human
uguguuucagaaccuucuuuca

SEQ ID NO: 813469 - RNA, 22 nt, Human
ccagggcugagcugugaccaug

SEQ ID NO: 813470 - RNA, 22 nt, Human
cuggcacagccacugcaggcag

SEQ ID NO: 813471 - RNA, 22 nt, Human
gagggggcucugccaaccuguc

SEQ ID NO: 813472 - RNA, 22 nt, Human
ccaggcuggaguguagucgcau

SEQ ID NO: 813473 - RNA, 22 nt, Human
gauuaaguaacugaacacuuug

SEQ ID NO: 813474 - RNA, 22 nt, Human
acccagagucagacagccaugg

SEQ ID NO: 813475 - RNA, 19 nt, Human
uaugagcugacaaaggccu

SEQ ID NO: 813476 - RNA, 22 nt, Human
ucccugcaguaguggcuaagau

SEQ ID NO: 813477 - RNA, 22 nt, Human
aaauucauauguugaaaugcua

SEQ ID NO: 813478 - RNA, 22 nt, Human
cacugagggcggagcccaggga

SEQ ID NO: 813479 - RNA, 22 nt, Human
ggagcuggcuacagagaacucc

SEQ ID NO: 813480 - RNA, 22 nt, Human
uucuaaagugcaaucugacaga

SEQ ID NO: 813481 - RNA, 22 nt, Human
ggugguguuuggaaggaggugc

SEQ ID NO: 813482 - RNA, 22 nt, Human
ccuccuggaggcucuagggaaa

SEQ ID NO: 813483 - RNA, 22 nt, Human
uggggcauggaugauaagcugg

SEQ ID NO: 813484 - RNA, 22 nt, Human
aggcccauaguagcucugggca

SEQ ID NO: 813485 - RNA, 19 nt, Human
ucaagauggauggcuccca

SEQ ID NO: 813486 - RNA, 22 nt, Human
ggacuggguaggagcccagggc

SEQ ID NO: 813487 - RNA, 22 nt, Human
ucuggaguguguguauucagcu

SEQ ID NO: 813488 - RNA, 22 nt, Human
agcacagauaacauggagugga

SEQ ID NO: 813489 - RNA, 22 nt, Human
guccugggaacuggacagcuaa

SEQ ID NO: 813490 - RNA, 22 nt, Human
cagggcauaagaugaggcugua

SEQ ID NO: 813491 - RNA, 22 nt, Human
ucugcagcuuacuuucacauga

SEQ ID NO: 813492 - RNA, 22 nt, Human
gcaggcugccaccuucugaguu

SEQ ID NO: 813493 - RNA, 20 nt, Human
cuguuugcuaucaugagcug

SEQ ID NO: 813494 - RNA, 22 nt, Human
ggaagaugagaaguggggcucc

SEQ ID NO: 813495 - RNA, 22 nt, Human
uaacaaggcaauuugugauccu

SEQ ID NO: 813496 - RNA, 22 nt, Human
uucugguaugggaaauuucaag

SEQ ID NO: 813497 - RNA, 22 nt, Human
cuguuuuaucucaagaguucaa

SEQ ID NO: 813498 - RNA, 22 nt, Human
uugauaaaaugaugaaaucacu

SEQ ID NO: 813499 - RNA, 22 nt, Human
uaguggagaaguggagucugug

SEQ ID NO: 813500 - RNA, 23 nt, Human
acaggaggggacagguggccgug

SEQ ID NO: 813501 - RNA, 22 nt, Human
caaggaaaagaaguauuucaga

SEQ ID NO: 813502 - RNA, 22 nt, Human
uccuggugguuugaaaacugaa

SEQ ID NO: 813503 - RNA, 22 nt, Human
aacaaauguaaaaugcagaugc

SEQ ID NO: 813504 - RNA, 22 nt, Human
uugaucuugugauaguucaacu

SEQ ID NO: 813505 - RNA, 22 nt, Human
cuggggcugugggagacaaggc

SEQ ID NO: 813506 - RNA, 22 nt, Human
accaggagccacaggaggagcc

SEQ ID NO: 813507 - RNA, 22 nt, Human
cacagguaauagccuaggcuau

SEQ ID NO: 813508 - RNA, 22 nt, Human
gcuccugggcccugggcuaacu

SEQ ID NO: 813509 - RNA, 22 nt, Human
uaagacagggucuauucuuagu

SEQ ID NO: 813510 - RNA, 22 nt, Human
uaggacaguuauggguuuuauu

SEQ ID NO: 813511 - RNA, 16 nt, Human
gggggugagagagagu

SEQ ID NO: 813512 - RNA, 22 nt, Human
caaauuacccucaacaucuaga

SEQ ID NO: 813513 - RNA, 22 nt, Human
guguuuccucuagaagccaugg

SEQ ID NO: 813514 - RNA, 22 nt, Human
cacauuuuuacugccaacuuaa

SEQ ID NO: 813515 - RNA, 17 nt, Human
aaggcacagggcacugg

SEQ ID NO: 813516 - RNA, 18 nt, Human
ggcuucccuacucacuuc

SEQ ID NO: 813517 - RNA, 22 nt, Human
ggcuuccccuccagugcucugu

SEQ ID NO: 813518 - RNA, 22 nt, Human
aaggcuggaguacagugcagug

SEQ ID NO: 813519 - RNA, 19 nt, Human
aaaccuguuaguagagcac

SEQ ID NO: 813520 - RNA, 22 nt, Human
acagucugcagggugaacaugu

SEQ ID NO: 813521 - RNA, 22 nt, Human
ugaaggcacguggguggauacu

SEQ ID NO: 813522 - RNA, 22 nt, Human
cccucgcucuaggcagcccugu

SEQ ID NO: 813523 - RNA, 22 nt, Human
uuuuaucauuacccagcugaaa

SEQ ID NO: 813524 - RNA, 22 nt, Human
aucccuggacggcgccucccca

SEQ ID NO: 813525 - RNA, 22 nt, Human
uuuggagauagggccuagcaau

SEQ ID NO: 813526 - RNA, 22 nt, Human
acauuaaauuucauagugauua

SEQ ID NO: 813527 - RNA, 22 nt, Human
uacaguaaaugugguagaaacu

SEQ ID NO: 813528 - RNA, 22 nt, Human
gcugcaaguuaguauacauucu

SEQ ID NO: 813529 - RNA, 22 nt, Human
ucuggaguggcagucaucugaa

SEQ ID NO: 813530 - RNA, 18 nt, Human
ggacaggagacaugggug

SEQ ID NO: 813531 - RNA, 22 nt, Human
caucaucuugaaugacugugau

SEQ ID NO: 813532 - RNA, 22 nt, Human
gcaaaaguacagccggauuucu

SEQ ID NO: 813533 - RNA, 22 nt, Human
ucauuucagccauuuuuaaaug

SEQ ID NO: 813534 - RNA, 22 nt, Human
auguuauucaauuugaauccaa

SEQ ID NO: 813535 - RNA, 21 nt, Human
ugcacuuugggggacaggcug

SEQ ID NO: 813536 - RNA, 22 nt, Human
uagcaaauguguuaugcuaugc

SEQ ID NO: 813537 - RNA, 23 nt, Human
uccagugugugcagauuaagugc

SEQ ID NO: 813538 - RNA, 22 nt, Human
uugacaaagauauauucaugcu

SEQ ID NO: 813539 - RNA, 21 nt, Human
agccuggcccagggggaggcu

SEQ ID NO: 813540 - RNA, 22 nt, Human
caucuucacauauuuccaauga

SEQ ID NO: 813541 - RNA, 22 nt, Human
uaaagucacagagcaggugcaa

SEQ ID NO: 813542 - RNA, 22 nt, Human
ugcucugcacaucccucacaaa

SEQ ID NO: 813543 - RNA, 22 nt, Human
aggagagaauguuccaggcuug

SEQ ID NO: 813544 - RNA, 22 nt, Human
aaagcugggggcccuggucuag

SEQ ID NO: 813545 - RNA, 22 nt, Human
ggcuguggucugggugcucccc

SEQ ID NO: 813546 - RNA, 22 nt, Human
uuuguaaagucuguucugaguu

SEQ ID NO: 813547 - RNA, 22 nt, Human
gucuacaaagcauauaaaagag

SEQ ID NO: 813548 - RNA, 22 nt, Human
uaaauaaguucuucauuguuug

SEQ ID NO: 813549 - RNA, 22 nt, Human
cagcuggguuuaguggggugug

SEQ ID NO: 813550 - RNA, 22 nt, Human
aaacugcaaugacagguaggag

SEQ ID NO: 813551 - RNA, 22 nt, Human
uagaaaagaauuuuauuugaua

SEQ ID NO: 813552 - RNA, 22 nt, Human
ggagcugggaacuauguaguau

SEQ ID NO: 813553 - RNA, 22 nt, Human
cuuuaugugcugggcauuaagg

SEQ ID NO: 813554 - RNA, 22 nt, Human
ugacaggacagagaaaugaccu

SEQ ID NO: 813555 - RNA, 22 nt, Human
gggggugguucuaaguccuaua

SEQ ID NO: 813556 - RNA, 22 nt, Human
acaguaaaacauuuuuauuagg

SEQ ID NO: 813557 - RNA, 22 nt, Human
gaaaggugccccauaggcagga

SEQ ID NO: 813558 - RNA, 22 nt, Human
gagcucuuccuuucaggaggcc

SEQ ID NO: 813559 - RNA, 22 nt, Human
agaagccagcuucagcugcccg

SEQ ID NO: 813560 - RNA, 22 nt, Human
ggggaggaccuuuccaaggcuu

SEQ ID NO: 813561 - RNA, 23 nt, Human
gcagcugguuagaagggaaggag

SEQ ID NO: 813562 - RNA, 22 nt, Human
gacagaggagaagaugcugugg

SEQ ID NO: 813563 - RNA, 22 nt, Human
uuacaauugagucuauuguaug

SEQ ID NO: 813564 - RNA, 22 nt, Human
uuagaaguucaggucuguaauc

SEQ ID NO: 813565 - RNA, 22 nt, Human
cccuguuuauuuuuggagagaa

SEQ ID NO: 813566 - RNA, 22 nt, Human
cugcagcuuaaaggaguucaau

SEQ ID NO: 813567 - RNA, 22 nt, Human
gccucuggucccucaugcugug

SEQ ID NO: 813568 - RNA, 22 nt, Human
uaucacauaguguuuaguaaau

SEQ ID NO: 813569 - RNA, 22 nt, Human
caugcaguuucucuaugcguag

SEQ ID NO: 813570 - RNA, 22 nt, Human
agccagggcucuccuucgcgug

SEQ ID NO: 813571 - RNA, 22 nt, Human
ccagggcacguugggacaguac

SEQ ID NO: 813572 - RNA, 22 nt, Human
cagcuaguacaaugggagagca

SEQ ID NO: 813573 - RNA, 21 nt, Human
ucugagcugaguccucuaggu

SEQ ID NO: 813574 - RNA, 22 nt, Human
agugaccaaucacugaaugauu

SEQ ID NO: 813575 - RNA, 21 nt, Human
acuggcugguggcuaagaauc

SEQ ID NO: 813576 - RNA, 22 nt, Human
ugcuggagaaaguuuuucugaa

SEQ ID NO: 813577 - RNA, 22 nt, Human
uuuggucaggguaggacaguug

SEQ ID NO: 813578 - RNA, 22 nt, Human
ccccacuugcucagcaugucca

SEQ ID NO: 813579 - RNA, 22 nt, Human
uuacacaaaguuagcucuugca

SEQ ID NO: 813580 - RNA, 22 nt, Human
uggaugaaaaaugagaauuuuc

SEQ ID NO: 813581 - RNA, 21 nt, Human
aggugccaaggagaagcaggc

SEQ ID NO: 813582 - RNA, 20 nt, Human
cuguuaaaagguaugaauuc

SEQ ID NO: 813583 - RNA, 23 nt, Human
ugcuggagacaagugugagaagg

SEQ ID NO: 813584 - RNA, 22 nt, Human
aagacagagggaagcaaugaug

SEQ ID NO: 813585 - RNA, 22 nt, Human
uacaagaaggaaaacuagcaau

SEQ ID NO: 813586 - RNA, 23 nt, Human
cccagggacacgaugacaccucc

SEQ ID NO: 813587 - RNA, 22 nt, Human
ugacuccugguauggaugacag

SEQ ID NO: 813588 - RNA, 23 nt, Human
uuacaaguucugaaauuuccuuc

SEQ ID NO: 813589 - RNA, 22 nt, Human
gcauuuuaauaagauucauagg

SEQ ID NO: 813590 - RNA, 22 nt, Human
uaaaaaucuuaugaauggcaag

SEQ ID NO: 813591 - RNA, 22 nt, Human
uggcagggagccaccggucaug

SEQ ID NO: 813592 - RNA, 22 nt, Human
uuguucauaaagacaguucaga

SEQ ID NO: 813593 - RNA, 20 nt, Human
ugcugagguugacaugccca

SEQ ID NO: 813594 - RNA, 23 nt, Human
ucucagugcacgcaccaugccug

SEQ ID NO: 813595 - RNA, 20 nt, Human
cucucucuccauucccaggg

SEQ ID NO: 813596 - RNA, 22 nt, Human
ggaggccuagccagcuccaguu

SEQ ID NO: 813597 - RNA, 22 nt, Human
uucaaacuuaaggagcagcaga

SEQ ID NO: 813598 - RNA, 22 nt, Human
uuguucaucaggugacacauac

SEQ ID NO: 813599 - RNA, 22 nt, Human
ccaggagacuguacugauauuu

SEQ ID NO: 813600 - RNA, 22 nt, Human
gcuuaaaucccaaugcuagacc

SEQ ID NO: 813601 - RNA, 22 nt, Human
uguaauuuucucaaguuucuac

SEQ ID NO: 813602 - RNA, 22 nt, Human
agucaaggcuauuaugugggaa

SEQ ID NO: 813603 - RNA, 22 nt, Human
uccagcagguguuugccaacuu

SEQ ID NO: 813604 - RNA, 22 nt, Human
ugcugguggagaaaguggaggu

SEQ ID NO: 813605 - RNA, 22 nt, Human
ugggccaguccugccuaaggug

SEQ ID NO: 813606 - RNA, 22 nt, Human
uuuucauuguaaaucaggaaac

SEQ ID NO: 813607 - RNA, 22 nt, Human
ugccucaguuucaucugcagaa

SEQ ID NO: 813608 - RNA, 22 nt, Human
gccauauacccacugucuccau

SEQ ID NO: 813609 - RNA, 22 nt, Human
auuuuuuagccaagacucugca

SEQ ID NO: 813610 - RNA, 22 nt, Human
cagggcucugccuugagggaug

SEQ ID NO: 813611 - RNA, 22 nt, Human
aucaugaaucuuguguucuaug

SEQ ID NO: 813612 - RNA, 22 nt, Human
ucuugggaaauaaacagauuga

SEQ ID NO: 813613 - RNA, 22 nt, Human
uggagagguugaauaacuuguc

SEQ ID NO: 813614 - RNA, 22 nt, Human
ugcaggcugcaccccugcccug

SEQ ID NO: 813615 - RNA, 22 nt, Human
gucugaagccagugguaguccg

SEQ ID NO: 813616 - RNA, 23 nt, Human
uuugcaaauuuuccugacuacuc

SEQ ID NO: 813617 - RNA, 20 nt, Human
cacugaggugcagcucaugc

SEQ ID NO: 813618 - RNA, 22 nt, Human
uccagcucugauucucacuagc

SEQ ID NO: 813619 - RNA, 22 nt, Human
aaugccaauauucauuuguguu

SEQ ID NO: 813620 - RNA, 22 nt, Human
aagaacuuuuggcaaguguuau

SEQ ID NO: 813621 - RNA, 22 nt, Human
cugccugugccaccgccucauu

SEQ ID NO: 813622 - RNA, 22 nt, Human
acauuaccuggcauuugaucuu

SEQ ID NO: 813623 - RNA, 23 nt, Human
gggaccagcuagggcugugaccu

SEQ ID NO: 813624 - RNA, 22 nt, Human
aagaggcgccggguacguggcg

SEQ ID NO: 813625 - RNA, 22 nt, Human
gccuggcuugccagcccuggcg

SEQ ID NO: 813626 - RNA, 22 nt, Human
ccuuggcugugcugcccuuugc

SEQ ID NO: 813627 - RNA, 22 nt, Human
cucagucaguuuuugugagaga

SEQ ID NO: 813628 - RNA, 22 nt, Human
cagaaaaccugacucuagaacu

SEQ ID NO: 813629 - RNA, 22 nt, Human
aagcuuuagagaugaguuccuu

SEQ ID NO: 813630 - RNA, 22 nt, Human
uccagccuaauguucuucccac

SEQ ID NO: 813631 - RNA, 22 nt, Human
uaccauuucuacauaucuuguc

SEQ ID NO: 813632 - RNA, 22 nt, Human
uuuacuuucucaaguauauagg

SEQ ID NO: 813633 - RNA, 22 nt, Human
uucauugaaggagggacuugcu

SEQ ID NO: 813634 - RNA, 22 nt, Human
cuggagggugagccucaucucu

SEQ ID NO: 813635 - RNA, 22 nt, Human
acuggaguacaguggcgugaac

SEQ ID NO: 813636 - RNA, 20 nt, Human
acaugcuugagaggaugcag

SEQ ID NO: 813637 - RNA, 22 nt, Human
aaucuggagagucaucucugac

SEQ ID NO: 813638 - RNA, 22 nt, Human
ucuuuauuuuaugcuugugcaa

SEQ ID NO: 813639 - RNA, 22 nt, Human
uucugacacauuacuacaugga

SEQ ID NO: 813640 - RNA, 22 nt, Human
uaagugucucucgaauuaugcu

SEQ ID NO: 813641 - RNA, 21 nt, Human
ggacucuacacaggccaucuu

SEQ ID NO: 813642 - RNA, 22 nt, Human
aagaauguucuuguagucauga

SEQ ID NO: 813643 - RNA, 17 nt, Human
ggcucccugacuaugga

SEQ ID NO: 813644 - RNA, 22 nt, Human
caggcagagugagaagcccuug

SEQ ID NO: 813645 - RNA, 22 nt, Human
agcuccugauacaugcaggaau

SEQ ID NO: 813646 - RNA, 23 nt, Human
ggacacaggccuugucugcgccu

SEQ ID NO: 813647 - RNA, 22 nt, Human
cucuuuguggaacggcaguguc

SEQ ID NO: 813648 - RNA, 22 nt, Human
cugugcugcuagaccuggauuc

SEQ ID NO: 813649 - RNA, 22 nt, Human
gauuucuuugcaagcuguguuc

SEQ ID NO: 813650 - RNA, 22 nt, Human
auaaaaucagaguuggauugga

SEQ ID NO: 813651 - RNA, 22 nt, Human
uucagcagucguccaggaaaag

SEQ ID NO: 813652 - RNA, 22 nt, Human
uaaggcagccucaggguagggu

SEQ ID NO: 813653 - RNA, 22 nt, Human
gcacauuugagacauccaggca

SEQ ID NO: 813654 - RNA, 22 nt, Human
ucagugucuugggcuugaaugc

SEQ ID NO: 813655 - RNA, 22 nt, Human
gagucaggcuagggugacaggc

SEQ ID NO: 813656 - RNA, 22 nt, Human
ugaaggcuugguggcagccucu

SEQ ID NO: 813657 - RNA, 22 nt, Human
gcagcuuccugaguguggacag

SEQ ID NO: 813658 - RNA, 22 nt, Human
aaaggcaguggguauguggauc

SEQ ID NO: 813659 - RNA, 22 nt, Human
agcacagggcccagccuaggcc

SEQ ID NO: 813660 - RNA, 22 nt, Human
cagagagagucaaaucuuugcu

SEQ ID NO: 813661 - RNA, 22 nt, Human
aagaagcaggucacagacaggg

SEQ ID NO: 813662 - RNA, 22 nt, Human
ucacauucauggugcuaauaaa

SEQ ID NO: 813663 - RNA, 21 nt, Human
gcaaccagaccacagggcagu

SEQ ID NO: 813664 - RNA, 22 nt, Human
gaggcagagugcaccccaggag

SEQ ID NO: 813665 - RNA, 22 nt, Human
uugaagaauuaggacgugagua

SEQ ID NO: 813666 - RNA, 22 nt, Human
uacagaggaggggauuuuaaua

SEQ ID NO: 813667 - RNA, 22 nt, Human
caggaaaaugucaauggaaagc

SEQ ID NO: 813668 - RNA, 22 nt, Human
ccacuuugaaccacugaggugg

SEQ ID NO: 813669 - RNA, 22 nt, Human
aauagcaauuacccuucaacuc

SEQ ID NO: 813670 - RNA, 18 nt, Human
agaggcuggacaggggau

SEQ ID NO: 813671 - RNA, 22 nt, Human
ugaaaagugaucauggauuagg

SEQ ID NO: 813672 - RNA, 22 nt, Human
caggacuggaagucucaagaga

SEQ ID NO: 813673 - RNA, 22 nt, Human
aguagucacuucuauuaauggc

SEQ ID NO: 813674 - RNA, 22 nt, Human
gggccaggucggugaaugguca

SEQ ID NO: 813675 - RNA, 22 nt, Human
uagaauguagugcuucaagauu

SEQ ID NO: 813676 - RNA, 22 nt, Human
augcaaauauuaaugguaugac

SEQ ID NO: 813677 - RNA, 22 nt, Human
aaggagaguacaggaguuggua

SEQ ID NO: 813678 - RNA, 19 nt, Human
uggucucugucucuuugca

SEQ ID NO: 813679 - RNA, 22 nt, Human
gagaggcagaggccugaaaccg

SEQ ID NO: 813680 - RNA, 22 nt, Human
uaauucaugggcccagugauau

SEQ ID NO: 813681 - RNA, 22 nt, Human
cacacaucaaccuagacauugu

SEQ ID NO: 813682 - RNA, 22 nt, Human
ccuggagagcucgggccaggca

SEQ ID NO: 813683 - RNA, 22 nt, Human
ucauuuugcagagcugaggaac

SEQ ID NO: 813684 - RNA, 19 nt, Human
cagaggcaccagguauaga

SEQ ID NO: 813685 - RNA, 22 nt, Human
aaggacagggaugguugauugu

SEQ ID NO: 813686 - RNA, 18 nt, Human
ucagccuguugucugccu

SEQ ID NO: 813687 - RNA, 22 nt, Human
augaaacucuaacuuaacaagu

SEQ ID NO: 813688 - RNA, 22 nt, Human
aggcccagagcaggaaaggguu

SEQ ID NO: 813689 - RNA, 22 nt, Human
ucuaaauggaaagaaaauaccu

SEQ ID NO: 813690 - RNA, 20 nt, Human
aggggugaucgggugacacu

SEQ ID NO: 813691 - RNA, 22 nt, Human
cugaggcugcccagggccaggu

SEQ ID NO: 813692 - RNA, 22 nt, Human
aaauacuguugaaugaaguaag

SEQ ID NO: 813693 - RNA, 22 nt, Human
cuggcaggaucuaaccagggaa

SEQ ID NO: 813694 - RNA, 22 nt, Human
aguggggagguccaggccaccc

SEQ ID NO: 813695 - RNA, 22 nt, Human
gcauucuugguggagugcuaaa

SEQ ID NO: 813696 - RNA, 22 nt, Human
acagugauucugcaaaccauau

SEQ ID NO: 813697 - RNA, 22 nt, Human
ggccagggccaaggcuuuccca

SEQ ID NO: 813698 - RNA, 22 nt, Human
uaauaauuggcaauguugagca

SEQ ID NO: 813699 - RNA, 22 nt, Human
uaaauucagugaguaauuucug

SEQ ID NO: 813700 - RNA, 22 nt, Human
ggaugggcugaaagguagcccc

SEQ ID NO: 813701 - RNA, 22 nt, Human
uuucugcuuucagagugagaca

SEQ ID NO: 813702 - RNA, 22 nt, Human
cucugccugugucgccaccaca

SEQ ID NO: 813703 - RNA, 22 nt, Human
ccaggcuggauuuugcaguuca

SEQ ID NO: 813704 - RNA, 22 nt, Human
ccccagcacuuggaguggggag

SEQ ID NO: 813705 - RNA, 22 nt, Human
aguacagauuuagacacgauag

SEQ ID NO: 813706 - RNA, 22 nt, Human
auuuacacuugguuuacuagag

SEQ ID NO: 813707 - RNA, 22 nt, Human
ugggccaguuggaauggauacu

SEQ ID NO: 813708 - RNA, 22 nt, Human
ugagcaguucgacuucuucccc

SEQ ID NO: 813709 - RNA, 22 nt, Human
ccuggcaagugggcucccagau

SEQ ID NO: 813710 - RNA, 22 nt, Human
ggcuggcaggcacaguaugcaa

SEQ ID NO: 813711 - RNA, 22 nt, Human
agccagcuggagaccacuguuu

SEQ ID NO: 813712 - RNA, 22 nt, Human
cuuuauucugcaaauugccuug

SEQ ID NO: 813713 - RNA, 22 nt, Human
agcaggcuugguccccagccuc

SEQ ID NO: 813714 - RNA, 22 nt, Human
uuucaugugcauuuagguucau

SEQ ID NO: 813715 - RNA, 22 nt, Human
uuucaaguggggacauuugaga

SEQ ID NO: 813716 - RNA, 22 nt, Human
caggaaacauaugugcuugagg

SEQ ID NO: 813717 - RNA, 22 nt, Human
gacccaggguuucugcacaggg

SEQ ID NO: 813718 - RNA, 22 nt, Human
cuguggcucaauugccuacuga

SEQ ID NO: 813719 - RNA, 22 nt, Human
cucuuugggaugggcucugcug

SEQ ID NO: 813720 - RNA, 22 nt, Human
caaauuuaaguuagaaagcaau

SEQ ID NO: 813721 - RNA, 22 nt, Human
ucacaggagucaaggaauagua

SEQ ID NO: 813722 - RNA, 22 nt, Human
guccuuaaccacuuguguuuau

SEQ ID NO: 813723 - RNA, 22 nt, Human
agcaagcuaacauaggagauug

SEQ ID NO: 813724 - RNA, 22 nt, Human
aauguauuauacauaauuugug

SEQ ID NO: 813725 - RNA, 22 nt, Human
gcugcugguccucagagcucau

SEQ ID NO: 813726 - RNA, 22 nt, Human
auggggaagcaauuggauuucc

SEQ ID NO: 813727 - RNA, 22 nt, Human
agacaauacauuuauucccuuu

SEQ ID NO: 813728 - RNA, 22 nt, Human
uccagagaucucucuucccugu

SEQ ID NO: 813729 - RNA, 23 nt, Human
ugucuuuguuaggacuguguuua

SEQ ID NO: 813730 - RNA, 22 nt, Human
ggaguagcugcauuccgagcac

SEQ ID NO: 813731 - RNA, 22 nt, Human
gagccagacugccugaagcuca

SEQ ID NO: 813732 - RNA, 22 nt, Human
guccuguguaagccaggacaau

SEQ ID NO: 813733 - RNA, 22 nt, Human
ccaggcucaggugcgagagaca

SEQ ID NO: 813734 - RNA, 22 nt, Human
gggcucugggauucagagcaag

SEQ ID NO: 813735 - RNA, 22 nt, Human
aagcuggagaguuucacagaug

SEQ ID NO: 813736 - RNA, 22 nt, Human
uuuguguuuaauacaaggaccu

SEQ ID NO: 813737 - RNA, 22 nt, Human
uuucacagcuuccacuuaagga

SEQ ID NO: 813738 - RNA, 22 nt, Human
cacaugcaggagccaauguaca

SEQ ID NO: 813739 - RNA, 22 nt, Human
auaauauuugcauuacugugau

SEQ ID NO: 813740 - RNA, 22 nt, Human
uucacauaaauagaucacauca

SEQ ID NO: 813741 - RNA, 22 nt, Human
uacagcaaugccugaaauagua

SEQ ID NO: 813742 - RNA, 22 nt, Human
uuuguauaagaacauucuagca

SEQ ID NO: 813743 - RNA, 22 nt, Human
cugagagguaagcagcgcagug

SEQ ID NO: 813744 - RNA, 19 nt, Human
aggguccagggagcggcuc

SEQ ID NO: 813745 - RNA, 22 nt, Human
uccuagcuugucaguucucuaa

SEQ ID NO: 813746 - RNA, 22 nt, Human
ugagggaggcccuuugagcaga

SEQ ID NO: 813747 - RNA, 22 nt, Human
acugcucaaggaucugguaggg

SEQ ID NO: 813748 - RNA, 22 nt, Human
ugugaggccuagacagccuggg

SEQ ID NO: 813749 - RNA, 22 nt, Human
agcugcagagguuugugcaaca

SEQ ID NO: 813750 - RNA, 22 nt, Human
accaggguugagucagcugcgu

SEQ ID NO: 813751 - RNA, 22 nt, Human
gcaugugggaacacuuaggcac

SEQ ID NO: 813752 - RNA, 22 nt, Human
ugcccccugguggccagagccg

SEQ ID NO: 813753 - RNA, 22 nt, Human
agaugggccuucgagcaugccc

SEQ ID NO: 813754 - RNA, 22 nt, Human
cugaaauucugccucugcacaa

SEQ ID NO: 813755 - RNA, 22 nt, Human
uaacaaaguauuguuuguguau

SEQ ID NO: 813756 - RNA, 22 nt, Human
gccucugcaccaguacugugcc

SEQ ID NO: 813757 - RNA, 22 nt, Human
cauguguauuauucuuguggaa

SEQ ID NO: 813758 - RNA, 22 nt, Human
aggcuguccucucuugcucagu

SEQ ID NO: 813759 - RNA, 22 nt, Human
cuuuacagauggauaauuguuu

SEQ ID NO: 813760 - RNA, 22 nt, Human
ugcauguuucuguauguuaaug

SEQ ID NO: 813761 - RNA, 22 nt, Human
uagcaggagagaaguuuuaagu

SEQ ID NO: 813762 - RNA, 22 nt, Human
uuuugguaauuaaguagauauu

SEQ ID NO: 813763 - RNA, 22 nt, Human
ggaccugcucucccaguucucu

SEQ ID NO: 813764 - RNA, 22 nt, Human
acaacuuuaauggguuucagcu

SEQ ID NO: 813765 - RNA, 22 nt, Human
auuaauaucccccgccguucug

SEQ ID NO: 813766 - RNA, 22 nt, Human
uugcuauuuugagagucauagu

SEQ ID NO: 813767 - RNA, 21 nt, Human
guucaauagcucuuugaaugc

SEQ ID NO: 813768 - RNA, 22 nt, Human
ccauuuguaccauuucuuugua

SEQ ID NO: 813769 - RNA, 22 nt, Human
cuacauuauguuuauugggacu

SEQ ID NO: 813770 - RNA, 22 nt, Human
caaacuuacuguguuuaaagag

SEQ ID NO: 813771 - RNA, 22 nt, Human
aaugccuuggagagccuagagg

SEQ ID NO: 813772 - RNA, 19 nt, Human
auacacguguauacauaca

SEQ ID NO: 813773 - RNA, 22 nt, Human
uaaggacagcagcuacuuuucc

SEQ ID NO: 813774 - RNA, 22 nt, Human
acauauuuugaaagcuuucuaa

SEQ ID NO: 813775 - RNA, 22 nt, Human
aggauugugccuccagucagaa

SEQ ID NO: 813776 - RNA, 22 nt, Human
uacuacauacagaauuuagaga

SEQ ID NO: 813777 - RNA, 22 nt, Human
caauguuuuuccuuccuuaaua

SEQ ID NO: 813778 - RNA, 22 nt, Human
uaccaaaaccaagccauuaucu

SEQ ID NO: 813779 - RNA, 22 nt, Human
acaccuuuuauucgccaggcac

SEQ ID NO: 813780 - RNA, 19 nt, Human
caggauuguuuaaagcuuu

SEQ ID NO: 813781 - RNA, 22 nt, Human
aagacacuuucuaaauagaagu

SEQ ID NO: 813782 - RNA, 22 nt, Human
ccuccccacagcccaggagacu

SEQ ID NO: 813783 - RNA, 22 nt, Human
auacaacagaaaaugauuauuc

SEQ ID NO: 813784 - RNA, 22 nt, Human
uaucuuugguagcuuuccuaag

SEQ ID NO: 813785 - RNA, 22 nt, Human
uuacuguagcuugacauauguc

SEQ ID NO: 813786 - RNA, 17 nt, Human
uguguaaguugcauaga

SEQ ID NO: 813787 - RNA, 22 nt, Human
aguaacagguguacagacuauc

SEQ ID NO: 813788 - RNA, 22 nt, Human
ugcuuguauucauaucacagcu

SEQ ID NO: 813789 - RNA, 22 nt, Human
auacaggaugcugaacaucucu

SEQ ID NO: 813790 - RNA, 22 nt, Human
auacaugugugugcauacaugu

SEQ ID NO: 813791 - RNA, 22 nt, Human
guuuccaagucucucaacaccc

SEQ ID NO: 813792 - RNA, 20 nt, Human
uuucacaaugaacaugucuc

SEQ ID NO: 813793 - RNA, 22 nt, Human
uuuccuguccugguacuuggca

SEQ ID NO: 813794 - RNA, 22 nt, Human
cugacagcgagagaguugcccc

SEQ ID NO: 813795 - RNA, 22 nt, Human
aguaucagaugugauuaaaggg

SEQ ID NO: 813796 - RNA, 22 nt, Human
uguacacauuaagcucuuuaga

SEQ ID NO: 813797 - RNA, 20 nt, Human
uaugauaauuacaaaauagu

SEQ ID NO: 813798 - RNA, 22 nt, Human
uuguagucuaggauagauuuuu

SEQ ID NO: 813799 - RNA, 22 nt, Human
caaucaaugcugcuaguuccuu

SEQ ID NO: 813800 - RNA, 22 nt, Human
cugucacagcccgcgucuccuc

SEQ ID NO: 813801 - RNA, 22 nt, Human
auacacauguuauuguggaagc

SEQ ID NO: 813802 - RNA, 22 nt, Human
auauaguuggguuucauucuac

SEQ ID NO: 813803 - RNA, 22 nt, Human
ucagcacaggucuugcaaaaca

SEQ ID NO: 813804 - RNA, 22 nt, Human
uuuccacacucacugcacucau

SEQ ID NO: 813805 - RNA, 22 nt, Human
auagcaaaggacaauagucagu

SEQ ID NO: 813806 - RNA, 22 nt, Human
gcugucugcugggucgcucagg

SEQ ID NO: 813807 - RNA, 22 nt, Human
aaaagagccacuuaugaccuca

SEQ ID NO: 813808 - RNA, 22 nt, Human
auaggcauaacacugauguccu

SEQ ID NO: 813809 - RNA, 22 nt, Human
acaugacagugacuuuauaaga

SEQ ID NO: 813810 - RNA, 22 nt, Human
auauggcuguugcacaucuaag

SEQ ID NO: 813811 - RNA, 22 nt, Human
cagaaagcaguugucaaugggc

SEQ ID NO: 813812 - RNA, 22 nt, Human
augcauugaggaugacaugagu

SEQ ID NO: 813813 - RNA, 22 nt, Human
uacauguacaugcauagguaga

SEQ ID NO: 813814 - RNA, 22 nt, Human
ccagcuggaacggcagcccagc

SEQ ID NO: 813815 - RNA, 22 nt, Human
cauagacauugauagguuauau

SEQ ID NO: 813816 - RNA, 22 nt, Human
uaucacauacuucucauccagg

SEQ ID NO: 813817 - RNA, 22 nt, Human
gaccacugaaugcacuucuaau

SEQ ID NO: 813818 - RNA, 22 nt, Human
uauacuacgcaccaaacaaagg

SEQ ID NO: 813819 - RNA, 22 nt, Human
cucagcuucuaccuccugagug

SEQ ID NO: 813820 - RNA, 22 nt, Human
acaagucaguggaauuaauauu

SEQ ID NO: 813821 - RNA, 22 nt, Human
auuagguaguauaaucuuuguu

SEQ ID NO: 813822 - RNA, 22 nt, Human
ugucuuacagcaaucuguucug

SEQ ID NO: 813823 - RNA, 22 nt, Human
aagauuuaccacuuuauucaag

SEQ ID NO: 813824 - RNA, 22 nt, Human
auucccagauuuauauugauag

SEQ ID NO: 813825 - RNA, 20 nt, Human
uacaauauucccacuuugcu

SEQ ID NO: 813826 - RNA, 22 nt, Human
ucuccccaguauggauucucug

SEQ ID NO: 813827 - RNA, 23 nt, Human
ucuggcugcuccuuucaaugcuc

SEQ ID NO: 813828 - RNA, 22 nt, Human
uccugucucaguguauuugcag

SEQ ID NO: 813829 - RNA, 22 nt, Human
augaacaguacaaagcacagac

SEQ ID NO: 813830 - RNA, 22 nt, Human
auugucgucaauggacacauag

SEQ ID NO: 813831 - RNA, 20 nt, Human
aauagcacagcucaaacauu

SEQ ID NO: 813832 - RNA, 22 nt, Human
uaaaaucaugacagauugacau

SEQ ID NO: 813833 - RNA, 22 nt, Human
auggugguagaagcacuaugug

SEQ ID NO: 813834 - RNA, 22 nt, Human
gcaguaaauugagagucauguu

SEQ ID NO: 813835 - RNA, 22 nt, Human
auacaugacucacacauucugc

SEQ ID NO: 813836 - RNA, 22 nt, Human
gagguauaguucuauuagauga

SEQ ID NO: 813837 - RNA, 23 nt, Human
uugcauuaauguggaggcacagg

SEQ ID NO: 813838 - RNA, 22 nt, Human
agccacugugugaccagcuguc

SEQ ID NO: 813839 - RNA, 19 nt, Human
aaauccaagcucaggccuc

SEQ ID NO: 813840 - RNA, 22 nt, Human
aaagcacauuacaagcucaguc

SEQ ID NO: 813841 - RNA, 22 nt, Human
uaggcacugguuguggauaguu

SEQ ID NO: 813842 - RNA, 22 nt, Human
ccgcuguccuggagcugcugcu

SEQ ID NO: 813843 - RNA, 22 nt, Human
ugcuugcugaaaggcauuuaga

SEQ ID NO: 813844 - RNA, 22 nt, Human
uuuccagaaauaccauuuggug

SEQ ID NO: 813845 - RNA, 21 nt, Human
acaguacuugagaucuuuuga

SEQ ID NO: 813846 - RNA, 22 nt, Human
augacagcucuagcacacagua

SEQ ID NO: 813847 - RNA, 22 nt, Human
agcugucuaccugcagaguccu

SEQ ID NO: 813848 - RNA, 22 nt, Human
auuuccagcagcauauuugucu

SEQ ID NO: 813849 - RNA, 22 nt, Human
ugcaugguuauauacuacuagu

SEQ ID NO: 813850 - RNA, 22 nt, Human
acaugcacccaguuacacucuc

SEQ ID NO: 813851 - RNA, 22 nt, Human
aauaaguacuuggggauaacuu

SEQ ID NO: 813852 - RNA, 22 nt, Human
cugcuucacccugccugagaac

SEQ ID NO: 813853 - RNA, 22 nt, Human
uccguuuucacacugcuauaaa

SEQ ID NO: 813854 - RNA, 22 nt, Human
guuauguaaucuaacacucagu

SEQ ID NO: 813855 - RNA, 22 nt, Human
ucccuguccugggcaaucccag

SEQ ID NO: 813856 - RNA, 22 nt, Human
aauuauguuugcuuuagaugga

SEQ ID NO: 813857 - RNA, 22 nt, Human
cucugaauggacacuccagugu

SEQ ID NO: 813858 - RNA, 22 nt, Human
uugacuauacucuggcggaaaa

SEQ ID NO: 813859 - RNA, 20 nt, Human
ucauaugugguuguauacaa

SEQ ID NO: 813860 - RNA, 22 nt, Human
gcuuccaaugcuucuaucacau

SEQ ID NO: 813861 - RNA, 22 nt, Human
auguacaaucuaucacaagaag

SEQ ID NO: 813862 - RNA, 22 nt, Human
aguccccucuaacccaacuuua

SEQ ID NO: 813863 - RNA, 22 nt, Human
uuauuuaaaagugguaagauuc

SEQ ID NO: 813864 - RNA, 22 nt, Human
gacauacagcccucucccuggu

SEQ ID NO: 813865 - RNA, 22 nt, Human
gucuccugaggcauccauugaa

SEQ ID NO: 813866 - RNA, 22 nt, Human
guguaucaacauguuuuuugug

SEQ ID NO: 813867 - RNA, 22 nt, Human
acaagauagcuuagaagauuca

SEQ ID NO: 813868 - RNA, 22 nt, Human
acagcuggccgaggcucaggga

SEQ ID NO: 813869 - RNA, 22 nt, Human
ucacacaucucagguguuuaau

SEQ ID NO: 813870 - RNA, 22 nt, Human
cugcauaucaaauuacuccugg

SEQ ID NO: 813871 - RNA, 22 nt, Human
ugcaugguguaauucuaaugcu

SEQ ID NO: 813872 - RNA, 22 nt, Human
acucauuugcaugaugugcuau

SEQ ID NO: 813873 - RNA, 20 nt, Human
aaagauacuuuuuguaaugg

SEQ ID NO: 813874 - RNA, 22 nt, Human
uucaguaugcugaaugauuuuu

SEQ ID NO: 813875 - RNA, 22 nt, Human
ugcauaaacuucucugguguga

SEQ ID NO: 813876 - RNA, 22 nt, Human
uaucuguuuuuacagugucuuu

SEQ ID NO: 813877 - RNA, 22 nt, Human
uccccaguaagccugcacugug

SEQ ID NO: 813878 - RNA, 22 nt, Human
aguuuccacuggagacacugug

SEQ ID NO: 813879 - RNA, 22 nt, Human
guacauauccuuuacguuuugu

SEQ ID NO: 813880 - RNA, 22 nt, Human
caacagcuggaggcuuggcccg

SEQ ID NO: 813881 - RNA, 22 nt, Human
guguacacuugaacugacgguu

SEQ ID NO: 813882 - RNA, 22 nt, Human
uuuccagucucugccuccaagg

SEQ ID NO: 813883 - RNA, 22 nt, Human
uucuuugcccauguuuccuaag

SEQ ID NO: 813884 - RNA, 22 nt, Human
ucugcuguuuacugugugauau

SEQ ID NO: 813885 - RNA, 22 nt, Human
cuguuccuccaccucaacaaac

SEQ ID NO: 813886 - RNA, 22 nt, Human
uacauguuauuucacuauuggu

SEQ ID NO: 813887 - RNA, 22 nt, Human
gucugugcaguuacuagcuggu

SEQ ID NO: 813888 - RNA, 22 nt, Human
cugcaguucuucuccucaaggc

SEQ ID NO: 813889 - RNA, 22 nt, Human
auuggccagacuuauccuucag

SEQ ID NO: 813890 - RNA, 19 nt, Human
aggucuaaucauaagacaa

SEQ ID NO: 813891 - RNA, 22 nt, Human
cagcuggaggagcagcuuccag

SEQ ID NO: 813892 - RNA, 22 nt, Human
ccugucugaaggcagggggaug

SEQ ID NO: 813893 - RNA, 22 nt, Human
augcacacguacccuacaaggc

SEQ ID NO: 813894 - RNA, 22 nt, Human
uuauuuaaaauguagguuggga

SEQ ID NO: 813895 - RNA, 22 nt, Human
cuauacagcagcuuacuaguua

SEQ ID NO: 813896 - RNA, 22 nt, Human
agccuauucaucugaucuugaa

SEQ ID NO: 813897 - RNA, 18 nt, Human
uauaaacacacuuagguu

SEQ ID NO: 813898 - RNA, 22 nt, Human
uucaguuuugcuuuuaaucaug

SEQ ID NO: 813899 - RNA, 22 nt, Human
cacaucauguuaauucauuaca

SEQ ID NO: 813900 - RNA, 22 nt, Human
uuugacaugugcuuauaacuuu

SEQ ID NO: 813901 - RNA, 22 nt, Human
aaugguaauauuucauaguugu

SEQ ID NO: 813902 - RNA, 22 nt, Human
aagcauuucagguagagauauu

SEQ ID NO: 813903 - RNA, 22 nt, Human
cucccucaggccuuagcccugc

SEQ ID NO: 813904 - RNA, 23 nt, Human
aguguucagcauguaguaaauac

SEQ ID NO: 813905 - RNA, 22 nt, Human
aacaguaugugagauuuacaca

SEQ ID NO: 813906 - RNA, 22 nt, Human
uugcaaauaauagccugaaacu

SEQ ID NO: 813907 - RNA, 22 nt, Human
uuaaguauauccauuugacugg

SEQ ID NO: 813908 - RNA, 22 nt, Human
acagagacacggaagcuaaaga

SEQ ID NO: 813909 - RNA, 22 nt, Human
ucauacauguuguguucaaaug

SEQ ID NO: 813910 - RNA, 22 nt, Human
ucacagcugggguuuuggcagc

SEQ ID NO: 813911 - RNA, 22 nt, Human
caggaacacaaugagucucaaa

SEQ ID NO: 813912 - RNA, 21 nt, Human
ugcauauauaagugcauacac

SEQ ID NO: 813913 - RNA, 22 nt, Human
agccugugcuguguuugcucca

SEQ ID NO: 813914 - RNA, 22 nt, Human
uauaugcagauuuucaucaucg

SEQ ID NO: 813915 - RNA, 22 nt, Human
ucugccaucaagaugcucuggc

SEQ ID NO: 813916 - RNA, 20 nt, Human
aaaaacaguaaugcugaaga

SEQ ID NO: 813917 - RNA, 22 nt, Human
uugcaguugcuguauuuaagga

SEQ ID NO: 813918 - RNA, 22 nt, Human
uuaagguucagaaaucaauacc

SEQ ID NO: 813919 - RNA, 22 nt, Human
auauuuguuuggcagaguucag

SEQ ID NO: 813920 - RNA, 22 nt, Human
uugaguuuccugacagcgaagg

SEQ ID NO: 813921 - RNA, 22 nt, Human
auuuacugagguaaauaaacug

SEQ ID NO: 813922 - RNA, 22 nt, Human
uuaauggauuggagguuucaau

SEQ ID NO: 813923 - RNA, 22 nt, Human
aauaucuagccuuuagcagcuu

SEQ ID NO: 813924 - RNA, 21 nt, Human
uaaacauaaccuuguauggcu

SEQ ID NO: 813925 - RNA, 22 nt, Human
gucuugcacuuaccuaagaacu

SEQ ID NO: 813926 - RNA, 22 nt, Human
ucugcuugugucuguccagccu

SEQ ID NO: 813927 - RNA, 22 nt, Human
ucuggauggucagcucuuccug

SEQ ID NO: 813928 - RNA, 20 nt, Human
uguauuuaaugaaggcuuuu

SEQ ID NO: 813929 - RNA, 22 nt, Human
gucaggaugagggaugaggagu

SEQ ID NO: 813930 - RNA, 22 nt, Human
uuccaauaaaauguuauuugca

SEQ ID NO: 813931 - RNA, 22 nt, Human
uaguauuuccuguaagcuauag

SEQ ID NO: 813932 - RNA, 22 nt, Human
ggagcugugcugggugaucagg

SEQ ID NO: 813933 - RNA, 21 nt, Human
uuggccgugcagaugaacagc

SEQ ID NO: 813934 - RNA, 22 nt, Human
gcuucugcagagccguccugag

SEQ ID NO: 813935 - RNA, 22 nt, Human
uaucuguagucucaugguuccu

SEQ ID NO: 813936 - RNA, 22 nt, Human
uuccccuugauaaugcaguaag

SEQ ID NO: 813937 - RNA, 22 nt, Human
cuggugcuguagccugauugag

SEQ ID NO: 813938 - RNA, 22 nt, Human
augcacaagguagauuauuauu

SEQ ID NO: 813939 - RNA, 22 nt, Human
uacuguauacuacugcuguucu

SEQ ID NO: 813940 - RNA, 22 nt, Human
guguuucccuggcacaagaacc

SEQ ID NO: 813941 - RNA, 22 nt, Human
acagcugggaacucacacagca

SEQ ID NO: 813942 - RNA, 22 nt, Human
acacacagaaggaagccccacu

SEQ ID NO: 813943 - RNA, 22 nt, Human
auuccucagcaggccuuuuguu

SEQ ID NO: 813944 - RNA, 22 nt, Human
uaaaaguuagcuaggacaaagu

SEQ ID NO: 813945 - RNA, 22 nt, Human
ugguaaaugucuaacaaucacu

SEQ ID NO: 813946 - RNA, 22 nt, Human
aguaauggguugaaauuuaguu

SEQ ID NO: 813947 - RNA, 22 nt, Human
uucaaacaguguagaauauaug

SEQ ID NO: 813948 - RNA, 22 nt, Human
caauaguaaauuacggaggaga

SEQ ID NO: 813949 - RNA, 22 nt, Human
uugcauauccuccaacacaugg

SEQ ID NO: 813950 - RNA, 21 nt, Human
ucugugcuuuuuuggcuccua

SEQ ID NO: 813951 - RNA, 22 nt, Human
uaaagcauguuucaguaagguu

SEQ ID NO: 813952 - RNA, 19 nt, Human
guuggcacugaaaauggcu

SEQ ID NO: 813953 - RNA, 22 nt, Human
cuugcuuuaucugguuucucau

SEQ ID NO: 813954 - RNA, 22 nt, Human
augcugugccuggaaagcggcu

SEQ ID NO: 813955 - RNA, 22 nt, Human
gccuuugcugugacaaugcugg

SEQ ID NO: 813956 - RNA, 22 nt, Human
ccucuaaauuguuugaaguugg

SEQ ID NO: 813957 - RNA, 22 nt, Human
gcacaguauuuaguagaaugag

SEQ ID NO: 813958 - RNA, 22 nt, Human
auguaguauuuggaaauguaaa

SEQ ID NO: 813959 - RNA, 22 nt, Human
cuggcucgcauuauauuuuggg

SEQ ID NO: 813960 - RNA, 22 nt, Human
ucauacauguuguguucaaaug

SEQ ID NO: 813961 - RNA, 22 nt, Human
uacuguauacuacugcuguucu

SEQ ID NO: 813962 - RNA, 22 nt, Human
ugcuuuauucgacaucugguag

SEQ ID NO: 813963 - RNA, 22 nt, Human
cugccguguuuuucauguuaaa

SEQ ID NO: 813964 - RNA, 21 nt, Human
gcccacagugaggaggauccc

SEQ ID NO: 813965 - RNA, 22 nt, Human
cagcaugaauguguucguaggg

SEQ ID NO: 813966 - RNA, 22 nt, Human
auacaacagaaaaugauuauuc

SEQ ID NO: 813967 - RNA, 22 nt, Human
ugcuaauaaacuccaggcugag

SEQ ID NO: 813968 - RNA, 22 nt, Human
uucuguaauucuguuaguuuca

SEQ ID NO: 813969 - RNA, 22 nt, Human
aaauugcauuuuaaagguagau

SEQ ID NO: 813970 - RNA, 22 nt, Human
augcuugcccauguuucugaag

SEQ ID NO: 813971 - RNA, 22 nt, Human
caggcacaaugagcgccaucuu

SEQ ID NO: 813972 - RNA, 22 nt, Human
auggaguguggccaggcaguaa

SEQ ID NO: 813973 - RNA, 22 nt, Human
gugucccaaagauuagaaauca

SEQ ID NO: 813974 - RNA, 22 nt, Human
uaagaaacauuuuuaugacagu

SEQ ID NO: 813975 - RNA, 22 nt, Human
uccagccauaucuuguagcccu

SEQ ID NO: 813976 - RNA, 22 nt, Human
acaugcuuucuagguccuucug

SEQ ID NO: 813977 - RNA, 23 nt, Human
aagaaugcuucugaagagcugcc

SEQ ID NO: 813978 - RNA, 22 nt, Human
auuauguagcuaaaaauugugu

SEQ ID NO: 813979 - RNA, 22 nt, Human
uaaagcaaugaaaguuuugcag

SEQ ID NO: 813980 - RNA, 22 nt, Human
aacacauggcaagagcaggaaa

SEQ ID NO: 813981 - RNA, 22 nt, Human
auguacauuauucgagugaugg

SEQ ID NO: 813982 - RNA, 22 nt, Human
cacaauuuccauugagcagcag

SEQ ID NO: 813983 - RNA, 22 nt, Human
auguggcuuucugcguuuucuc

SEQ ID NO: 813984 - RNA, 22 nt, Human
uuccauacgacugaggucucgg

SEQ ID NO: 813985 - RNA, 22 nt, Human
ccugugcaugccaggguacacc

SEQ ID NO: 813986 - RNA, 22 nt, Human
ugcugcccacuguauuucucca

SEQ ID NO: 813987 - RNA, 21 nt, Human
uugcuguuuucccaaugcagu

SEQ ID NO: 813988 - RNA, 22 nt, Human
aauuauguuugcuuuagaugga

SEQ ID NO: 813989 - RNA, 22 nt, Human
gcacaaaagguacuucauguag

SEQ ID NO: 813990 - RNA, 22 nt, Human
guuuuaguggguggccacugau

SEQ ID NO: 813991 - RNA, 22 nt, Human
gagcugcauagcugggauccuc

SEQ ID NO: 813992 - RNA, 22 nt, Human
auauggcuguugcacaucuaag

SEQ ID NO: 813993 - RNA, 22 nt, Human
augcacaagguagauuauuauu

SEQ ID NO: 813994 - RNA, 22 nt, Human
aacaggcuaaauuguccauuuc

SEQ ID NO: 813995 - RNA, 22 nt, Human
gaauacaaauaauaccaaggug

SEQ ID NO: 813996 - RNA, 22 nt, Human
ugcugcucuucaccauggccuc

SEQ ID NO: 813997 - RNA, 22 nt, Human
aaaugcacaauaaaguaaaggc

SEQ ID NO: 813998 - RNA, 22 nt, Human
auguauacgugcaggucacagg

SEQ ID NO: 813999 - RNA, 22 nt, Human
gacauacagcccucucccuggu

SEQ ID NO: 814000 - RNA, 21 nt, Human
uaaacauaaccuuguauggcu

SEQ ID NO: 814001 - RNA, 22 nt, Human
ugcaaauauuccaugcuguuca

SEQ ID NO: 814002 - RNA, 18 nt, Human
aguaaauguuaaauauug

SEQ ID NO: 814003 - RNA, 22 nt, Human
uuucuacacuucgugguguuuu

SEQ ID NO: 814004 - RNA, 22 nt, Human
uccugugccuccaccugcuccg

SEQ ID NO: 814005 - RNA, 22 nt, Human
augcacacguacccuacaaggc

SEQ ID NO: 814006 - RNA, 22 nt, Human
cagcugcuguucaguuuuguuu

SEQ ID NO: 814007 - RNA, 22 nt, Human
acuguagucuaaauauagucuu

SEQ ID NO: 814008 - RNA, 22 nt, Human
aucugccuggcuccaggugagc

SEQ ID NO: 814009 - RNA, 22 nt, Human
ugcacacaguucucaggaaaga

SEQ ID NO: 814010 - RNA, 22 nt, Human
uguucauaucauuuugaaagcu

SEQ ID NO: 814011 - RNA, 22 nt, Human
caguuaaacagauugaguguua

SEQ ID NO: 814012 - RNA, 22 nt, Human
uuguacuuaaauaugcaaauag

SEQ ID NO: 814013 - RNA, 18 nt, Human
ggaggcucugugguuucc

SEQ ID NO: 814014 - RNA, 22 nt, Human
aaagcacauuacaagcucaguc

SEQ ID NO: 814015 - RNA, 22 nt, Human
aaggcacauauuuuagagucac

SEQ ID NO: 814016 - RNA, 22 nt, Human
uugcugccagcgcccugcaggg

SEQ ID NO: 814017 - RNA, 18 nt, Human
cugccuguugcugagagg

SEQ ID NO: 814018 - RNA, 22 nt, Human
aauuauugagcaucuacugugu

SEQ ID NO: 814019 - RNA, 22 nt, Human
cauugcugugggcauuugcugc

SEQ ID NO: 814020 - RNA, 22 nt, Human
aucauccuagaaggaagcuagg

SEQ ID NO: 814021 - RNA, 22 nt, Human
gcuguaacuuuuucauuuucaa

SEQ ID NO: 814022 - RNA, 22 nt, Human
augcccugggagugcuguacca

SEQ ID NO: 814023 - RNA, 22 nt, Human
uaaaaucaugacagauugacau

SEQ ID NO: 814024 - RNA, 22 nt, Human
cuacuguaguuaaaguuuugua

SEQ ID NO: 814025 - RNA, 22 nt, Human
acaaaugcuuaguucaccaaaa

SEQ ID NO: 814026 - RNA, 22 nt, Human
uuacuguagcuugacauauguc

SEQ ID NO: 814027 - RNA, 22 nt, Human
auauaguuggguuucauucuac

SEQ ID NO: 814028 - RNA, 22 nt, Human
uguaauguuagaaacaauugcu

SEQ ID NO: 814029 - RNA, 22 nt, Human
aauugcuuuacaagccguuuaa

SEQ ID NO: 814030 - RNA, 22 nt, Human
ccacuguuuccuuucugcuggc

SEQ ID NO: 814031 - RNA, 22 nt, Human
uucaguaugcugaaugauuuuu

SEQ ID NO: 814032 - RNA, 22 nt, Human
cauuguccucugaugccuuccc

SEQ ID NO: 814033 - RNA, 22 nt, Human
uucacauaaucugcagcaagcg

SEQ ID NO: 814034 - RNA, 22 nt, Human
ugcagugaugcuucuggcucag

SEQ ID NO: 814035 - RNA, 22 nt, Human
agcugcaccggcuggaccacug

SEQ ID NO: 814036 - RNA, 22 nt, Human
aaucuguugucaggaauccaca

SEQ ID NO: 814037 - RNA, 19 nt, Human
ccauucugucucugccaca

SEQ ID NO: 814038 - RNA, 22 nt, Human
uuucuacauuuguaaccagauu

SEQ ID NO: 814039 - RNA, 22 nt, Human
cauucauaggaggagaugauua

SEQ ID NO: 814040 - RNA, 22 nt, Human
auacacauguuauuguggaagc

SEQ ID NO: 814041 - RNA, 22 nt, Human
auagcaaaggacaauagucagu

SEQ ID NO: 814042 - RNA, 22 nt, Human
accuuguuguagguacaaaaga

SEQ ID NO: 814043 - RNA, 22 nt, Human
cugcauaucaaauuacuccugg

SEQ ID NO: 814044 - RNA, 22 nt, Human
uugcaguugcuguauuuaagga

SEQ ID NO: 814045 - RNA, 22 nt, Human
cugugcuggcagaccuggaguu

SEQ ID NO: 814046 - RNA, 19 nt, Human
auacacguguauacauaca

SEQ ID NO: 814047 - RNA, 22 nt, Human
ugcugcucaagcugcagcaaaa

SEQ ID NO: 814048 - RNA, 22 nt, Human
gugcacagaaacauacaaugug

SEQ ID NO: 814049 - RNA, 21 nt, Human
agccugcaauguagguaccgg

SEQ ID NO: 814050 - RNA, 22 nt, Human
cccuuguuuuugaguacaauag

SEQ ID NO: 814051 - RNA, 22 nt, Human
uguaucauauggggaagcuuca

SEQ ID NO: 814052 - RNA, 22 nt, Human
gccuguuucuccuccuuggccc

SEQ ID NO: 814053 - RNA, 22 nt, Human
aauacagugaaagugagcaagg

SEQ ID NO: 814054 - RNA, 20 nt, Human
uaugugcaguuugguuuauc

SEQ ID NO: 814055 - RNA, 19 nt, Human
aaauccaagcucaggccuc

SEQ ID NO: 814056 - RNA, 22 nt, Human
auggccugcagugcugccacag

SEQ ID NO: 814057 - RNA, 22 nt, Human
cuuugugauaguguuaagacca

SEQ ID NO: 814058 - RNA, 20 nt, Human
aauagcacagcucaaacauu

SEQ ID NO: 814059 - RNA, 22 nt, Human
uccucuucaaaauagcucugaa

SEQ ID NO: 814060 - RNA, 22 nt, Human
ugcauguuuuauaccaaagcuu

SEQ ID NO: 814061 - RNA, 22 nt, Human
uucaaacaguguagaauauaug

SEQ ID NO: 814062 - RNA, 22 nt, Human
cugcccaucuggccacacacag

SEQ ID NO: 814063 - RNA, 22 nt, Human
ucacacaucucagguguuuaau

SEQ ID NO: 814064 - RNA, 22 nt, Human
ccugugucaucagcuguggcua

SEQ ID NO: 814065 - RNA, 22 nt, Human
gauguauagcuuuaacugaccc

SEQ ID NO: 814066 - RNA, 22 nt, Human
auggcuguguuguuccucugaa

SEQ ID NO: 814067 - RNA, 22 nt, Human
uguguacauguaucaacuaucg

SEQ ID NO: 814068 - RNA, 22 nt, Human
aaguuacacauuuucauuguaa

SEQ ID NO: 814069 - RNA, 22 nt, Human
aaaugcaugugcuauagaugug

SEQ ID NO: 814070 - RNA, 22 nt, Human
cuuccugcaacaccuguguugc

SEQ ID NO: 814071 - RNA, 22 nt, Human
acagugucuccugguacccagu

SEQ ID NO: 814072 - RNA, 22 nt, Human
aucauccauggcugaucauaaa

SEQ ID NO: 814073 - RNA, 22 nt, Human
uuuuccuucugauacuccauuu

SEQ ID NO: 814074 - RNA, 22 nt, Human
acaguaaucugggaacuuguua

SEQ ID NO: 814075 - RNA, 20 nt, Human
aaaaacaguaaugcugaaga

SEQ ID NO: 814076 - RNA, 22 nt, Human
ugcaucauuaagguacaguugg

SEQ ID NO: 814077 - RNA, 22 nt, Human
auugcacaucugcacuacagcc

SEQ ID NO: 814078 - RNA, 22 nt, Human
uuccaauaaaauguuauuugca

SEQ ID NO: 814079 - RNA, 22 nt, Human
cauugcuuugugcauauuuaaa

SEQ ID NO: 814080 - RNA, 22 nt, Human
auacaugacucacacauucugc

SEQ ID NO: 814081 - RNA, 22 nt, Human
uuugcaaaguccauugaaguua

SEQ ID NO: 814082 - RNA, 22 nt, Human
cauuuuccucugcugguguuca

SEQ ID NO: 814083 - RNA, 22 nt, Human
uuuucuuggaguggcuguccuu

SEQ ID NO: 814084 - RNA, 22 nt, Human
ucaccuguucaacagcaauaau

SEQ ID NO: 814085 - RNA, 22 nt, Human
uacauguacaugcauagguaga

SEQ ID NO: 814086 - RNA, 22 nt, Human
cugcaucaguggauaugauggu

SEQ ID NO: 814087 - RNA, 22 nt, Human
uaucaguagaacaauggacauu

SEQ ID NO: 814088 - RNA, 22 nt, Human
uucaauagaaagucccuaguua

SEQ ID NO: 814089 - RNA, 22 nt, Human
cacuguuuuacauguuauuuaa

SEQ ID NO: 814090 - RNA, 22 nt, Human
uuaccacagugccugucuaaug

SEQ ID NO: 814091 - RNA, 22 nt, Human
aaauacaguggcagcagauaau

SEQ ID NO: 814092 - RNA, 22 nt, Human
auacaugugugugcauacaugu

SEQ ID NO: 814093 - RNA, 22 nt, Human
ucuguuauaaaucacacugcau

SEQ ID NO: 814094 - RNA, 22 nt, Human
caggguggcaggcaccauggcc

SEQ ID NO: 814095 - RNA, 22 nt, Human
cacaguuuuaucuuauacugau

SEQ ID NO: 814096 - RNA, 22 nt, Human
uaucuguauucugacagucacu

SEQ ID NO: 814097 - RNA, 22 nt, Human
aaaggugccucuuacaaggcuu

SEQ ID NO: 814098 - RNA, 22 nt, Human
uacaguaaccagucuacuuaga

SEQ ID NO: 814099 - RNA, 20 nt, Human
auuugcuuaccuuguuucua

SEQ ID NO: 814100 - RNA, 22 nt, Human
ccuuuguucacuggagagugga

SEQ ID NO: 814101 - RNA, 22 nt, Human
gagcugcagcggcugacgcaac

SEQ ID NO: 814102 - RNA, 22 nt, Human
auggcauuugaaucugucuuuu

SEQ ID NO: 814103 - RNA, 22 nt, Human
guuuccaggcuuugguaugguu

SEQ ID NO: 814104 - RNA, 22 nt, Human
gcuuccaaugcuucuaucacau

SEQ ID NO: 814105 - RNA, 19 nt, Human
ucaaagucugagucacuuu

SEQ ID NO: 814106 - RNA, 22 nt, Human
uucuuugcccauguuuccuaag

SEQ ID NO: 814107 - RNA, 22 nt, Human
agagucaguuaugucaagugcu

SEQ ID NO: 814108 - RNA, 22 nt, Human
uccuuagagugguugugcuaug

SEQ ID NO: 814109 - RNA, 22 nt, Human
auguccaggaagucuuaacuca

SEQ ID NO: 814110 - RNA, 22 nt, Human
gacuacaggugugugccaccau

SEQ ID NO: 814111 - RNA, 22 nt, Human
gaauaauugugaugcuugaagu

SEQ ID NO: 814112 - RNA, 22 nt, Human
ugucccuggacuccaggagcca

SEQ ID NO: 814113 - RNA, 22 nt, Human
agucagcuugucucuaggguug

SEQ ID NO: 814114 - RNA, 22 nt, Human
uccccaguaagccugcacugug

SEQ ID NO: 814115 - RNA, 22 nt, Human
ucugcucagccgaucugcuccg

SEQ ID NO: 814116 - RNA, 22 nt, Human
acugugugccaggcgcuggucu

SEQ ID NO: 814117 - RNA, 22 nt, Human
uaauuuugucacagugacaugc

SEQ ID NO: 814118 - RNA, 22 nt, Human
acagugcaaauaggacugucuu

SEQ ID NO: 814119 - RNA, 22 nt, Human
acuucagugugguauaaaacgu

SEQ ID NO: 814120 - RNA, 22 nt, Human
cuacagcuguguguuuaugugc

SEQ ID NO: 814121 - RNA, 22 nt, Human
ugcucccaggcauucucuguug

SEQ ID NO: 814122 - RNA, 22 nt, Human
uuguacuuaaauaugcaaauag

SEQ ID NO: 814123 - RNA, 22 nt, Human
ugucuuuagccacuugccucuu

SEQ ID NO: 814124 - RNA, 22 nt, Human
agcaccauugcaaauauggcag

SEQ ID NO: 814125 - RNA, 22 nt, Human
gcuucugcagagccguccugag

SEQ ID NO: 814126 - RNA, 22 nt, Human
gccuucugaucgcuggacugac

SEQ ID NO: 814127 - RNA, 22 nt, Human
acauauuuugaaagcuuucuaa

SEQ ID NO: 814128 - RNA, 19 nt, Human
cuucaguguucaccuggcc

SEQ ID NO: 814129 - RNA, 22 nt, Human
uuccuccagccuggagcacuuc

SEQ ID NO: 814130 - RNA, 22 nt, Human
auguaguauuuggaaauguaaa

SEQ ID NO: 814131 - RNA, 18 nt, Human
cuuuagcugucaucuuug

SEQ ID NO: 814132 - RNA, 22 nt, Human
ugccauagcaaugguaagcuga

SEQ ID NO: 814133 - RNA, 22 nt, Human
uggcucaucuuuuuagacuuau

SEQ ID NO: 814134 - RNA, 22 nt, Human
cccagguaaggaugcuccucau

SEQ ID NO: 814135 - RNA, 22 nt, Human
gagguccacugaggcaacaggg

SEQ ID NO: 814136 - RNA, 22 nt, Human
gucuggagccacugcugcugcu

SEQ ID NO: 814137 - RNA, 22 nt, Human
caagggcagcagccucaagcgg

SEQ ID NO: 814138 - RNA, 22 nt, Human
auuaguagcacacagagaucag

SEQ ID NO: 814139 - RNA, 22 nt, Human
ugcccugcagacccugcagugu

SEQ ID NO: 814140 - RNA, 22 nt, Human
cccugccuacaggguuuucuuu

SEQ ID NO: 814141 - RNA, 22 nt, Human
ucaucuccauacggucucgcag

SEQ ID NO: 814142 - RNA, 22 nt, Human
uuggcaauauuuacugaaguug

SEQ ID NO: 814143 - RNA, 22 nt, Human
aggaaauuuugaaucagugucu

SEQ ID NO: 814144 - RNA, 22 nt, Human
uugcaaauaauagccugaaacu

SEQ ID NO: 814145 - RNA, 22 nt, Human
cugaccaguccuuagcaccugg

SEQ ID NO: 814146 - RNA, 22 nt, Human
uaucuguauucugacagucacu

SEQ ID NO: 814147 - RNA, 22 nt, Human
cuuccugcaacaccuguguugc

SEQ ID NO: 814148 - RNA, 22 nt, Human
aauguuaaguuuagauuauaac

SEQ ID NO: 814149 - RNA, 22 nt, Human
uuugggcaggcuuuucccuaga

SEQ ID NO: 814150 - RNA, 22 nt, Human
acagggcaccugagguaggaag

SEQ ID NO: 814151 - RNA, 22 nt, Human
auuuccuggaggaauggaagca

SEQ ID NO: 814152 - RNA, 22 nt, Human
uaguauuuccuguaagcuauag

SEQ ID NO: 814153 - RNA, 22 nt, Human
ugcagcaucuccuugugccaug

SEQ ID NO: 814154 - RNA, 22 nt, Human
uccucagcaaacacuucacucu

SEQ ID NO: 814155 - RNA, 22 nt, Human
gaccaaggaagaggggagccag

SEQ ID NO: 814156 - RNA, 22 nt, Human
aauagcaaaugcucauuugaaa

SEQ ID NO: 814157 - RNA, 22 nt, Human
caugaaaugauauuuggguggg

SEQ ID NO: 814158 - RNA, 22 nt, Human
caauguuuuuccuuccuuaaua

SEQ ID NO: 814159 - RNA, 21 nt, Human
uccugccuuaguccagagcag

SEQ ID NO: 814160 - RNA, 22 nt, Human
ugccuaggcuggaaugcagugg

SEQ ID NO: 814161 - RNA, 22 nt, Human
gcucgcuuagauuuuccucuga

SEQ ID NO: 814162 - RNA, 22 nt, Human
agcaaauaauugucuuugaggg

SEQ ID NO: 814163 - RNA, 22 nt, Human
ccagucagccaagcugcagcgg

SEQ ID NO: 814164 - RNA, 22 nt, Human
cucagcuucuaccuccugagug

SEQ ID NO: 814165 - RNA, 22 nt, Human
cugcagaugguauuguucuggu

SEQ ID NO: 814166 - RNA, 22 nt, Human
uguuaguauuggcaaauuuguu

SEQ ID NO: 814167 - RNA, 22 nt, Human
cuaaagucauacaaggugggag

SEQ ID NO: 814168 - RNA, 22 nt, Human
agagcuccaggguuuuguagug

SEQ ID NO: 814169 - RNA, 22 nt, Human
auguccagaguaaagcacauuc

SEQ ID NO: 814170 - RNA, 22 nt, Human
uuugaaauguaucaguauaggu

SEQ ID NO: 814171 - RNA, 22 nt, Human
uucaguaagcacuucuagagcu

SEQ ID NO: 814172 - RNA, 22 nt, Human
gucuccugaggcauccauugaa

SEQ ID NO: 814173 - RNA, 22 nt, Human
guugaaauccuaacccccuagu

SEQ ID NO: 814174 - RNA, 22 nt, Human
gggcagcaaaucugagucuggu

SEQ ID NO: 814175 - RNA, 22 nt, Human
aaauacaguggcagcagauaau

SEQ ID NO: 814176 - RNA, 22 nt, Human
ugcccucagcagcagcuccugc

SEQ ID NO: 814177 - RNA, 22 nt, Human
gccugccuucggugcgcagcgg

SEQ ID NO: 814178 - RNA, 22 nt, Human
auacacauguuauuguggaagc

SEQ ID NO: 814179 - RNA, 22 nt, Human
aauacagauggcaugugaagau

SEQ ID NO: 814180 - RNA, 16 nt, Human
ucauugaagacaguac

SEQ ID NO: 814181 - RNA, 22 nt, Human
cagguuccaguugcagggacuu

SEQ ID NO: 814182 - RNA, 22 nt, Human
ugagcuucuuuauuuggccaga

SEQ ID NO: 814183 - RNA, 22 nt, Human
aacaucuagguucucaucgaua

SEQ ID NO: 814184 - RNA, 22 nt, Human
ccuccccacagcccaggagacu

SEQ ID NO: 814185 - RNA, 18 nt, Human
aguaaauguuaaauauug

SEQ ID NO: 814186 - RNA, 23 nt, Human
aguacauuugacccaaauaagcu

SEQ ID NO: 814187 - RNA, 22 nt, Human
acucacagggccucaguuuucc

SEQ ID NO: 814188 - RNA, 22 nt, Human
uguuccucugaacuucuuccaa

SEQ ID NO: 814189 - RNA, 22 nt, Human
agccugugcuguguuugcucca

SEQ ID NO: 814190 - RNA, 22 nt, Human
gccuucugauugcuggacugac

SEQ ID NO: 814191 - RNA, 22 nt, Human
uggaaauacaagaaguauguca

SEQ ID NO: 814192 - RNA, 22 nt, Human
gagcugcauagcugggauccuc

SEQ ID NO: 814193 - RNA, 22 nt, Human
aaucuguugucaggaauccaca

SEQ ID NO: 814194 - RNA, 22 nt, Human
uucaguuuugcuuuuaaucaug

SEQ ID NO: 814195 - RNA, 22 nt, Human
uccugaccacuaggaccaggcu

SEQ ID NO: 814196 - RNA, 22 nt, Human
uacaccagauuauuuauaacau

SEQ ID NO: 814197 - RNA, 22 nt, Human
aucuguucuucaaaauauuaca

SEQ ID NO: 814198 - RNA, 22 nt, Human
auagcaaaggacaauagucagu

SEQ ID NO: 814199 - RNA, 22 nt, Human
uccucuucaaaauagcucugaa

SEQ ID NO: 814200 - RNA, 22 nt, Human
uuagcaaacaucuucgugugag

SEQ ID NO: 814201 - RNA, 22 nt, Human
agcucugcuucuugggaagaug

SEQ ID NO: 814202 - RNA, 22 nt, Human
uaucuguuuuuacagugucuuu

SEQ ID NO: 814203 - RNA, 22 nt, Human
cucaguguuaaagacuuuccag

SEQ ID NO: 814204 - RNA, 22 nt, Human
acagcuucgaggaucucauccc

SEQ ID NO: 814205 - RNA, 22 nt, Human
uugucaggaacuaugauuaugc

SEQ ID NO: 814206 - RNA, 22 nt, Human
uauuacaguucgaguuucuagg

SEQ ID NO: 814207 - RNA, 22 nt, Human
uaaaugcaguacaaauuguucu

SEQ ID NO: 814208 - RNA, 22 nt, Human
caagucugaccucugggugaag

SEQ ID NO: 814209 - RNA, 22 nt, Human
uagcuucccugcuggaucauaa

SEQ ID NO: 814210 - RNA, 22 nt, Human
ugcuccaucuagagcucugcag

SEQ ID NO: 814211 - RNA, 22 nt, Human
ggcucugcugguaagaugccuc

SEQ ID NO: 814212 - RNA, 21 nt, Human
uuccuccucuggagaagaaga

SEQ ID NO: 814213 - RNA, 22 nt, Human
aacugguucuggaggcugcagg

SEQ ID NO: 814214 - RNA, 22 nt, Human
uguuccugacggccaaagaggu

SEQ ID NO: 814215 - RNA, 22 nt, Human
uugggagaaauaguugauccgc

SEQ ID NO: 814216 - RNA, 22 nt, Human
ugagcugcuucuuauaaugugu

SEQ ID NO: 814217 - RNA, 22 nt, Human
uaccaaaaccaagccauuaucu

SEQ ID NO: 814218 - RNA, 22 nt, Human
ugauuugaaaccuuuggcaaga

SEQ ID NO: 814219 - RNA, 22 nt, Human
aagcaaaagguuacacuucugg

SEQ ID NO: 814220 - RNA, 20 nt, Human
augucaggaagggagucagg

SEQ ID NO: 814221 - RNA, 22 nt, Human
acucauguccuaggaguaaagc

SEQ ID NO: 814222 - RNA, 21 nt, Human
cugcacugugauuuaaaaugu

SEQ ID NO: 814223 - RNA, 22 nt, Human
acucagaguuugcguuccauac

SEQ ID NO: 814224 - RNA, 22 nt, Human
uuccuuggaaagagacgucgcu

SEQ ID NO: 814225 - RNA, 22 nt, Human
uugcuuuauuccuagcccuugu

SEQ ID NO: 814226 - RNA, 22 nt, Human
ccgcuguccuggagcugcugcu

SEQ ID NO: 814227 - RNA, 22 nt, Human
cuuuggaaaaauaccuggcaua

SEQ ID NO: 814228 - RNA, 22 nt, Human
gucauuuuugacuuugaaguga

SEQ ID NO: 814229 - RNA, 22 nt, Human
cuguuccuccaccucaacaaac

SEQ ID NO: 814230 - RNA, 22 nt, Human
aggcuguccucucuugcucagu

SEQ ID NO: 814231 - RNA, 22 nt, Human
cacaucauguuaauucauuaca

SEQ ID NO: 814232 - RNA, 22 nt, Human
aaugugcugguaacugcuuugc

SEQ ID NO: 814233 - RNA, 22 nt, Human
caguguuuagcacagugcuugg

SEQ ID NO: 814234 - RNA, 22 nt, Human
ugaguguuguaaccauaugauu

SEQ ID NO: 814235 - RNA, 22 nt, Human
uaucacauacuucucauccagg

SEQ ID NO: 814236 - RNA, 22 nt, Human
ucaucuguuaugggaguuuuug

SEQ ID NO: 814237 - RNA, 22 nt, Human
auguccagaguaaagcacauuc

SEQ ID NO: 814238 - RNA, 22 nt, Human
caugcauuucuaccaaggaaua

SEQ ID NO: 814239 - RNA, 22 nt, Human
uagcugucagcaaucaaguggu

SEQ ID NO: 814240 - RNA, 22 nt, Human
gacauuuauuggauuuuacgag

SEQ ID NO: 814241 - RNA, 22 nt, Human
gccagguaugaauuacgcacga

SEQ ID NO: 814242 - RNA, 22 nt, Human
guuguacauaugaggauaaguu

SEQ ID NO: 814243 - RNA, 22 nt, Human
agaaucugcauuuuaacaagau

SEQ ID NO: 814244 - RNA, 22 nt, Human
cuugacacugucacucaggcca

SEQ ID NO: 814245 - RNA, 22 nt, Human
gagcuguucugugauugaucua

SEQ ID NO: 814246 - RNA, 22 nt, Human
ugcacccacuuagcugaaguuc

SEQ ID NO: 814247 - RNA, 22 nt, Human
cacaguuuugucuugguuucca

SEQ ID NO: 814248 - RNA, 22 nt, Human
uggaaauacaagaaguauguca

SEQ ID NO: 814249 - RNA, 20 nt, Human
ucaggguuucccauucuugg

SEQ ID NO: 814250 - RNA, 22 nt, Human
gauacuuuguggaauccuggau

SEQ ID NO: 814251 - RNA, 22 nt, Human
aucccugugacgagcaucccua

SEQ ID NO: 814252 - RNA, 22 nt, Human
uuggaaaugcauuuguuauuau

SEQ ID NO: 814253 - RNA, 22 nt, Human
guuuacaacaucuuguccuuca

SEQ ID NO: 814254 - RNA, 18 nt, Human
uauaaacacacuuagguu

SEQ ID NO: 814255 - RNA, 22 nt, Human
uaaguauguuagaaaaucaagu

SEQ ID NO: 814256 - RNA, 22 nt, Human
cauaaauuguacccauuccaac

SEQ ID NO: 814257 - RNA, 21 nt, Human
ugcauauauaagugcauacac

SEQ ID NO: 814258 - RNA, 22 nt, Human
uuuucuuggaguggcuguccuu

SEQ ID NO: 814259 - RNA, 22 nt, Human
ucccacugucuucucgugcucg

SEQ ID NO: 814260 - RNA, 22 nt, Human
ugcauguuucuguauguuaaug

SEQ ID NO: 814261 - RNA, 22 nt, Human
auguaacauaugugaucgcauu

SEQ ID NO: 814262 - RNA, 22 nt, Human
gcugucugcugggucgcucagg

SEQ ID NO: 814263 - RNA, 22 nt, Human
uauaugcagauuuucaucaucg

SEQ ID NO: 814264 - RNA, 20 nt, Human
uacaauauucccacuuugcu

SEQ ID NO: 814265 - RNA, 22 nt, Human
aguacaagugaugugguaaaaa

SEQ ID NO: 814266 - RNA, 22 nt, Human
acaauuucuaauauagaucuua

SEQ ID NO: 814267 - RNA, 22 nt, Human
ucugccaucaagaugcucuggc

SEQ ID NO: 814268 - RNA, 22 nt, Human
aagcauuuuagauaaagcauca

SEQ ID NO: 814269 - RNA, 22 nt, Human
ugcauuucccauuguguggcuc

SEQ ID NO: 814270 - RNA, 22 nt, Human
gacauacagcccucucccuggu

SEQ ID NO: 814271 - RNA, 22 nt, Human
uuaaguauauccauuugacugg

SEQ ID NO: 814272 - RNA, 21 nt, Human
gcaggguuugugcugugaguu

SEQ ID NO: 814273 - RNA, 22 nt, Human
auacaugugugugcauacaugu

SEQ ID NO: 814274 - RNA, 22 nt, Human
aauggcaaaguguuuucauacc

SEQ ID NO: 814275 - RNA, 22 nt, Human
cccuguccugcuaggcccuggu

SEQ ID NO: 814276 - RNA, 22 nt, Human
cacaguuuuaucuuauacugau

SEQ ID NO: 814277 - RNA, 22 nt, Human
ugggaugagcuauauagaaagu

SEQ ID NO: 814278 - RNA, 22 nt, Human
ucgcuuuaauggucuucacagc

SEQ ID NO: 814279 - RNA, 22 nt, Human
acugcauuaucaccaagaugua

SEQ ID NO: 814280 - RNA, 22 nt, Human
auuucagaguagaucguuauuu

SEQ ID NO: 814281 - RNA, 22 nt, Human
uagcagcacuauuuguuguagu

SEQ ID NO: 814282 - RNA, 22 nt, Human
ugcaugguuauauacuacuagu

SEQ ID NO: 814283 - RNA, 22 nt, Human
cccacugcugcucuccauggca

SEQ ID NO: 814284 - RNA, 22 nt, Human
agcaguuuauccucauaaugga

SEQ ID NO: 814285 - RNA, 22 nt, Human
aauaguguauuuuucaaaauua

SEQ ID NO: 814286 - RNA, 22 nt, Human
acauuuaaugauccuacuguga

SEQ ID NO: 814287 - RNA, 22 nt, Human
uccugaaggccugaguuccacc

SEQ ID NO: 814288 - RNA, 22 nt, Human
uggaaacacccacgcaugcaua

SEQ ID NO: 814289 - RNA, 19 nt, Human
cauaauacaguggaucuga

SEQ ID NO: 814290 - RNA, 22 nt, Human
ugaaaacacuuuaguuuagguc

SEQ ID NO: 814291 - RNA, 22 nt, Human
ucuguauaaaguaccgguggca

SEQ ID NO: 814292 - RNA, 22 nt, Human
aggucccugcagcagacugcca

SEQ ID NO: 814293 - RNA, 22 nt, Human
aucaucaucuaaauugugucgc

SEQ ID NO: 814294 - RNA, 20 nt, Human
ccacaguggagacuggagac

SEQ ID NO: 814295 - RNA, 22 nt, Human
cauuaacacuuuggauuuagac

SEQ ID NO: 814296 - RNA, 22 nt, Human
acucauuugcaugaugugcuau

SEQ ID NO: 814297 - RNA, 22 nt, Human
agcagugugggcugcacgcugg

SEQ ID NO: 814298 - RNA, 22 nt, Human
ucuguuauaaaucacacugcau

SEQ ID NO: 814299 - RNA, 22 nt, Human
ucacacaucucagguguuuaau

SEQ ID NO: 814300 - RNA, 22 nt, Human
cauuuacauuuaagguuaauau

SEQ ID NO: 814301 - RNA, 21 nt, Human
gccaccucaaucuucuagcgc

SEQ ID NO: 814302 - RNA, 22 nt, Human
acauucaugcaccuuccuaucc

SEQ ID NO: 814303 - RNA, 22 nt, Human
cccaccacgugcuuugcuggag

SEQ ID NO: 814304 - RNA, 17 nt, Human
acuuguauugugcuuua

SEQ ID NO: 814305 - RNA, 22 nt, Human
ucauacauguuguguucaaaug

SEQ ID NO: 814306 - RNA, 22 nt, Human
cacuuuuaacaggagaauuccc

SEQ ID NO: 814307 - RNA, 22 nt, Human
auguacaaucuaucacaagaag

SEQ ID NO: 814308 - RNA, 22 nt, Human
auacacauguuauuguggaagc

SEQ ID NO: 814309 - RNA, 22 nt, Human
uccugugccuccaccugcuccg

SEQ ID NO: 814310 - RNA, 22 nt, Human
caauaaaguggaggcccgggcu

SEQ ID NO: 814311 - RNA, 22 nt, Human
uuccaggacuggguguuugaag

SEQ ID NO: 814312 - RNA, 23 nt, Human
aguacauuugacccaaauaagcu

SEQ ID NO: 814313 - RNA, 22 nt, Human
uaaccuguuaagggcugaccca

SEQ ID NO: 814314 - RNA, 22 nt, Human
guucucugccggcaccuacccg

SEQ ID NO: 814315 - RNA, 22 nt, Human
auacaacagaaaaugauuauuc

SEQ ID NO: 814316 - RNA, 22 nt, Human
ccaugcccuugucaucuccagg

SEQ ID NO: 814317 - RNA, 22 nt, Human
gagucacauacuauguaauaga

SEQ ID NO: 814318 - RNA, 22 nt, Human
cuuuacagauggauaauuguuu

SEQ ID NO: 814319 - RNA, 22 nt, Human
ggcccucucuacauguuagacg

SEQ ID NO: 814320 - RNA, 22 nt, Human
uucaacaacuugguucaaaugg

SEQ ID NO: 814321 - RNA, 22 nt, Human
uguuaguauuggcaaauuuguu

SEQ ID NO: 814322 - RNA, 22 nt, Human
cugccaucugagccaaaagugc

SEQ ID NO: 814323 - RNA, 22 nt, Human
aaggcaguuaauuuggcuagaa

SEQ ID NO: 814324 - RNA, 22 nt, Human
cauguguauuauucuuguggaa

SEQ ID NO: 814325 - RNA, 22 nt, Human
uucacagugguaaggguuguga

SEQ ID NO: 814326 - RNA, 22 nt, Human
augcauaucuccuaucuccuca

SEQ ID NO: 814327 - RNA, 22 nt, Human
uuagcacccugauacuagaaug

SEQ ID NO: 814328 - RNA, 22 nt, Human
aaacacaucauucaugucguca

SEQ ID NO: 814329 - RNA, 22 nt, Human
acaguguuacuugauaguguau

SEQ ID NO: 814330 - RNA, 20 nt, Human
auuugcuuaccuuguuucua

SEQ ID NO: 814331 - RNA, 22 nt, Human
ggcaccuuucaucccaucuaga

SEQ ID NO: 814332 - RNA, 22 nt, Human
ccccagugguugcaacagcaga

SEQ ID NO: 814333 - RNA, 22 nt, Human
auccauuugccgugcuaugugc

SEQ ID NO: 814334 - RNA, 22 nt, Human
uaucaguagaacaauggacauu

SEQ ID NO: 814335 - RNA, 22 nt, Human
gccucugcaccaguacugugcc

SEQ ID NO: 814336 - RNA, 23 nt, Human
cagcacaguacauuuccugucuc

SEQ ID NO: 814337 - RNA, 22 nt, Human
acaagucaguggaauuaauauu

SEQ ID NO: 814338 - RNA, 22 nt, Human
acaccuuuuauucgccaggcac

SEQ ID NO: 814339 - RNA, 22 nt, Human
cuuguauuaggaagaaugcuuu

SEQ ID NO: 814340 - RNA, 22 nt, Human
uuguaacaguagcugucagcuc

SEQ ID NO: 814341 - RNA, 21 nt, Human
aggcaugagcccugcauggac

SEQ ID NO: 814342 - RNA, 22 nt, Human
uuaccacagugccugucuaaug

SEQ ID NO: 814343 - RNA, 22 nt, Human
ccacuuaagagaacagcuauag

SEQ ID NO: 814344 - RNA, 22 nt, Human
guaugucuuaggguucaguaac

SEQ ID NO: 814345 - RNA, 22 nt, Human
agcaauguuggccuauauaccu

SEQ ID NO: 814346 - RNA, 22 nt, Human
ccauuuguaccauuucuuugua

SEQ ID NO: 814347 - RNA, 22 nt, Human
ugcugcacuuauggcucugagg

SEQ ID NO: 814348 - RNA, 22 nt, Human
uguguccugugaucucuagggu

SEQ ID NO: 814349 - RNA, 22 nt, Human
uuacaguuaaugugacuaacca

SEQ ID NO: 814350 - RNA, 22 nt, Human
uucucugguuugcuguuucuga

SEQ ID NO: 814351 - RNA, 22 nt, Human
auggcuguguuguuccucugaa

SEQ ID NO: 814352 - RNA, 22 nt, Human
agcaggcauuugauauauauuu

SEQ ID NO: 814353 - RNA, 22 nt, Human
uaacacauagauauuuuaacuu

SEQ ID NO: 814354 - RNA, 22 nt, Human
uaguguguggucucucccuugu

SEQ ID NO: 814355 - RNA, 20 nt, Human
ucucccugcccaucucagau

SEQ ID NO: 814356 - RNA, 22 nt, Human
uuucaugauuaacuuagugaau

SEQ ID NO: 814357 - RNA, 22 nt, Human
gguuauuguggagaaguuccgg

SEQ ID NO: 814358 - RNA, 23 nt, Human
uguguucagucaaggaucagagu

SEQ ID NO: 814359 - RNA, 22 nt, Human
ugcaucauuaagguacaguugg

SEQ ID NO: 814360 - RNA, 22 nt, Human
uccacagggaugccugcggcuu

SEQ ID NO: 814361 - RNA, 22 nt, Human
ucucauacguuuccagguguca

SEQ ID NO: 814362 - RNA, 22 nt, Human
auauaaguguguggcuguuagu

SEQ ID NO: 814363 - RNA, 22 nt, Human
guugcauuaaucugcucaggcu

SEQ ID NO: 814364 - RNA, 22 nt, Human
auacuaagcucauuacauuuug

SEQ ID NO: 814365 - RNA, 21 nt, Human
agagacugucacugcaguacc

SEQ ID NO: 814366 - RNA, 22 nt, Human
ucuguagcauucaccagcccug

SEQ ID NO: 814367 - RNA, 23 nt, Human
ccccacuaccgugaugugcgagg

SEQ ID NO: 814368 - RNA, 22 nt, Human
uuuguguuggaagaaaugcuac

SEQ ID NO: 814369 - RNA, 22 nt, Human
uguauauacacacucccauguu

SEQ ID NO: 814370 - RNA, 22 nt, Human
acaugcacccaguuacacucuc

SEQ ID NO: 814371 - RNA, 22 nt, Human
uuuacagagaauguacauaaag

SEQ ID NO: 814372 - RNA, 22 nt, Human
uuccauacgacugaggucucgg

SEQ ID NO: 814373 - RNA, 19 nt, Human
uccugcccaccagccaggg

SEQ ID NO: 814374 - RNA, 22 nt, Human
cagccuuugggucagaagauuc

SEQ ID NO: 814375 - RNA, 22 nt, Human
uaauucuagauugacauuuuga

SEQ ID NO: 814376 - RNA, 20 nt, Human
cuguuugcuaucaugagcug

SEQ ID NO: 814377 - RNA, 22 nt, Human
uaaaugcaguacaaauuguucu

SEQ ID NO: 814378 - RNA, 22 nt, Human
auauacacuguuucaguugaag

SEQ ID NO: 814379 - RNA, 22 nt, Human
uguaccacucuacuaaggguuc

SEQ ID NO: 814380 - RNA, 22 nt, Human
uccucuucaaaauagcucugaa

SEQ ID NO: 814381 - RNA, 22 nt, Human
cacauuuaugggcugggaggca

SEQ ID NO: 814382 - RNA, 22 nt, Human
aacaguaugugagauuuacaca

SEQ ID NO: 814383 - RNA, 23 nt, Human
acauuacacgcaguaauugcccc

SEQ ID NO: 814384 - RNA, 19 nt, Human
caguuuguccagaggggac

SEQ ID NO: 814385 - RNA, 22 nt, Human
gucccugauaagagccaucgau

SEQ ID NO: 814386 - RNA, 22 nt, Human
uuugacaugugcuuauaacuuu

SEQ ID NO: 814387 - RNA, 22 nt, Human
cugccuuggcccuaguucaugg

SEQ ID NO: 814388 - RNA, 22 nt, Human
uuguugcaagccuggaaucugg

SEQ ID NO: 814389 - RNA, 22 nt, Human
augaacaguacaaagcacagac

SEQ ID NO: 814390 - RNA, 22 nt, Human
ccacccagccagaugcaggaag

SEQ ID NO: 814391 - RNA, 22 nt, Human
gccuuugcugugacaaugcugg

SEQ ID NO: 814392 - RNA, 22 nt, Human
uguguacauguaucaacuaucg

SEQ ID NO: 814393 - RNA, 22 nt, Human
acucuguuugcagguagcucag

SEQ ID NO: 814394 - RNA, 22 nt, Human
uauacuacgcaccaaacaaagg

SEQ ID NO: 814395 - RNA, 21 nt, Human
acaaauuguuuauauaggaag

SEQ ID NO: 814396 - RNA, 22 nt, Human
uugaugcugucuuucagaauca

SEQ ID NO: 814397 - RNA, 22 nt, Human
aacagguagggacucuaacuug

SEQ ID NO: 814398 - RNA, 22 nt, Human
acaaguuucauuguuuagaacc

SEQ ID NO: 814399 - RNA, 22 nt, Human
aaauugcaaaaguacuuuuagg

SEQ ID NO: 814400 - RNA, 22 nt, Human
aaguuacacauuuucauuguaa

SEQ ID NO: 814401 - RNA, 22 nt, Human
ucacuuuaccucauucaggcag

SEQ ID NO: 814402 - RNA, 22 nt, Human
uggaagguguggcaggucuagu

SEQ ID NO: 814403 - RNA, 22 nt, Human
ugucuucuaccuugacagcauu

SEQ ID NO: 814404 - RNA, 21 nt, Human
ucccacuggcccagggcucca

SEQ ID NO: 814405 - RNA, 22 nt, Human
ugucacagagcgugcaacagaa

SEQ ID NO: 814406 - RNA, 22 nt, Human
auugcacaucugcacuacagcc

SEQ ID NO: 814407 - RNA, 22 nt, Human
auggccugcagugcugccacag

SEQ ID NO: 814408 - RNA, 22 nt, Human
auuugcuuguucaccaguacuu

SEQ ID NO: 814409 - RNA, 22 nt, Human
uaaguauuggccuauagcuaga

SEQ ID NO: 814410 - RNA, 19 nt, Human
auacacguguauacauaca

SEQ ID NO: 814411 - RNA, 22 nt, Human
auggugguagaagcacuaugug

SEQ ID NO: 814412 - RNA, 22 nt, Human
ucccacugcuuugcucugcuca

SEQ ID NO: 814413 - RNA, 22 nt, Human
guuuauuggguauuguggagcc

SEQ ID NO: 814414 - RNA, 22 nt, Human
uugcauauccuccaacacaugg

SEQ ID NO: 814415 - RNA, 19 nt, Human
acacaccagugccugugac

SEQ ID NO: 814416 - RNA, 22 nt, Human
uccucagcaaacacuucacucu

SEQ ID NO: 814417 - RNA, 22 nt, Human
cauuucaaacaguuacagcugc

SEQ ID NO: 814418 - RNA, 22 nt, Human
uguacauauucaagcacuucua

SEQ ID NO: 814419 - RNA, 22 nt, Human
acaugacagugacuuuauaaga

SEQ ID NO: 814420 - RNA, 22 nt, Human
aucauccauggcugaucauaaa

SEQ ID NO: 814421 - RNA, 22 nt, Human
cauccauagauugagagauggu

SEQ ID NO: 814422 - RNA, 22 nt, Human
uugcuauuuugagagucauagu

SEQ ID NO: 814423 - RNA, 22 nt, Human
guccacauaggaacccagcuuc

SEQ ID NO: 814424 - RNA, 22 nt, Human
uucucugaguacguuucagugu

SEQ ID NO: 814425 - RNA, 22 nt, Human
augcuacauuuugguuuauaaa

SEQ ID NO: 814426 - RNA, 22 nt, Human
gucaucaucaggcagaugcugc

SEQ ID NO: 814427 - RNA, 22 nt, Human
auacaugacucacacauucugc

SEQ ID NO: 814428 - RNA, 22 nt, Human
aauggcuguucucugugauugg

SEQ ID NO: 814429 - RNA, 18 nt, Human
uacagcuugaguugacug

SEQ ID NO: 814430 - RNA, 22 nt, Human
uccacagguccucuuugcaaag

SEQ ID NO: 814431 - RNA, 22 nt, Human
guguacacuugaacugacgguu

SEQ ID NO: 814432 - RNA, 22 nt, Human
auauggcuguugcacaucuaag

SEQ ID NO: 814433 - RNA, 22 nt, Human
caauguacaaaauaauuacaca

SEQ ID NO: 814434 - RNA, 22 nt, Human
uuugcacuuaaauuuacaacac

SEQ ID NO: 814435 - RNA, 22 nt, Human
gugggugucaguaucuuuaacg

SEQ ID NO: 814436 - RNA, 22 nt, Human
guaugugucuuagaacuuggga

SEQ ID NO: 814437 - RNA, 18 nt, Human
uccaccgcgugcaccucu

SEQ ID NO: 814438 - RNA, 22 nt, Human
uacaguaaccagucuacuuaga

SEQ ID NO: 814439 - RNA, 22 nt, Human
uuagcacugucugguuaucuug

SEQ ID NO: 814440 - RNA, 22 nt, Human
cccugccuacaggguuuucuuu

SEQ ID NO: 814441 - RNA, 22 nt, Human
ucagccaggccaggcauucaca

SEQ ID NO: 814442 - RNA, 22 nt, Human
acaacuuuaauggguuucagcu

SEQ ID NO: 814443 - RNA, 22 nt, Human
cacauuuaaagguugaagcuga

SEQ ID NO: 814444 - RNA, 22 nt, Human
aauaaguacuuggggauaacuu

SEQ ID NO: 814445 - RNA, 22 nt, Human
ccugugcaugccaggguacacc

SEQ ID NO: 814446 - RNA, 22 nt, Human
uuaguguccagaguuuuuauua

SEQ ID NO: 814447 - RNA, 22 nt, Human
cugcacagucauuuccucucaa

SEQ ID NO: 814448 - RNA, 22 nt, Human
ugcauuugcaauggguacacaa

SEQ ID NO: 814449 - RNA, 22 nt, Human
aaggaggaauguagccagcucc

SEQ ID NO: 814450 - RNA, 22 nt, Human
gaugucuggcuaccacucgcac

SEQ ID NO: 814451 - RNA, 22 nt, Human
uuacaguuuacauaagaauugu

SEQ ID NO: 814452 - RNA, 22 nt, Human
uugggcugcagcaauuauuagu

SEQ ID NO: 814453 - RNA, 22 nt, Human
ugggugguugcugaggcuccuu

SEQ ID NO: 814454 - RNA, 22 nt, Human
ucacaauacucacucaauggcu

SEQ ID NO: 814455 - RNA, 22 nt, Human
uuguacacacaggaacaaacgu

SEQ ID NO: 814456 - RNA, 22 nt, Human
uauagcagcaugauuuauaguc

SEQ ID NO: 814457 - RNA, 22 nt, Human
aguaacagguguacagacuauc

SEQ ID NO: 814458 - RNA, 22 nt, Human
aaauugcauuuuaaagguagau

SEQ ID NO: 814459 - RNA, 22 nt, Human
aucauuaacccuugaugcuggg

SEQ ID NO: 814460 - RNA, 22 nt, Human
uguccugugcacuguagcaugu

SEQ ID NO: 814461 - RNA, 23 nt, Human
gcugccaaggaggcaggggugcc

SEQ ID NO: 814462 - RNA, 23 nt, Human
cagcacaguacauuuccugucuc

SEQ ID NO: 814463 - RNA, 22 nt, Human
uaaaaguuagcuaggacaaagu

SEQ ID NO: 814464 - RNA, 22 nt, Human
ggagaugccuuguuucaggaac

SEQ ID NO: 814465 - RNA, 22 nt, Human
augcugagugagugaaacccag

SEQ ID NO: 814466 - RNA, 22 nt, Human
gccacccuggacgcacuguucg

SEQ ID NO: 814467 - RNA, 22 nt, Human
aauacagugaaagugagcaagg

SEQ ID NO: 814468 - RNA, 22 nt, Human
cuucuggcguuggaggucugag

SEQ ID NO: 814469 - RNA, 22 nt, Human
ugucccuggacuccaggagcca

SEQ ID NO: 814470 - RNA, 22 nt, Human
ucuuugcauggacauguguuuu

SEQ ID NO: 814471 - RNA, 22 nt, Human
ccgcuguccuggagcugcugcu

SEQ ID NO: 814472 - RNA, 22 nt, Human
accuuuaugaaacagcugucgu

SEQ ID NO: 814473 - RNA, 22 nt, Human
acagugcaaauaggacugucuu

SEQ ID NO: 814474 - RNA, 22 nt, Human
auucuugauauagauaguuaau

SEQ ID NO: 814475 - RNA, 22 nt, Human
agagaauuaacauuccauggcu

SEQ ID NO: 814476 - RNA, 22 nt, Human
gucuccugaggcauccauugaa

SEQ ID NO: 814477 - RNA, 22 nt, Human
agcucugcuucuugggaagaug

SEQ ID NO: 814478 - RNA, 22 nt, Human
gcgcugccucugcucuccccac

SEQ ID NO: 814479 - RNA, 22 nt, Human
auguuugaaauuguaaguauau

SEQ ID NO: 814480 - RNA, 22 nt, Human
auaguguguaaagugcagugau

SEQ ID NO: 814481 - RNA, 22 nt, Human
cgauuuccgcuugaucugaucu

SEQ ID NO: 814482 - RNA, 22 nt, Human
ucugcucagccgaucugcuccg

SEQ ID NO: 814483 - RNA, 22 nt, Human
aaucugagggaacuugaacucc

SEQ ID NO: 814484 - RNA, 22 nt, Human
ugucuuaugcugcauagacuau

SEQ ID NO: 814485 - RNA, 22 nt, Human
uucuggagacccagcaacaggg

SEQ ID NO: 814486 - RNA, 22 nt, Human
aaugaacacuuagccuuucuau

SEQ ID NO: 814487 - RNA, 22 nt, Human
guuucuuauuucaacuggaaca

SEQ ID NO: 814488 - RNA, 22 nt, Human
aaacugaggcucccgagggugu

SEQ ID NO: 814489 - RNA, 22 nt, Human
caacuuuagaccccaaguagcu

SEQ ID NO: 814490 - RNA, 22 nt, Human
auugugcaccuacugugugcag

SEQ ID NO: 814491 - RNA, 22 nt, Human
guuuugaauacuacuagaacuu

SEQ ID NO: 814492 - RNA, 22 nt, Human
uaguguguggucucucccuugu

SEQ ID NO: 814493 - RNA, 22 nt, Human
ggaccugaacauaaaacgaggc

SEQ ID NO: 814494 - RNA, 22 nt, Human
guaugucaugagccuugugcgu

SEQ ID NO: 814495 - RNA, 22 nt, Human
gaauguuaaugcacuucuagcu

SEQ ID NO: 814496 - RNA, 22 nt, Human
caggcgaccccuaggagcaaca

SEQ ID NO: 814497 - RNA, 22 nt, Human
ccacugauucugccaggucucu

SEQ ID NO: 814498 - RNA, 21 nt, Human
uaaacauaaccuuguauggcu

SEQ ID NO: 814499 - RNA, 22 nt, Human
cuuggcauguucaucugcuugg

SEQ ID NO: 814500 - RNA, 22 nt, Human
uacuuugagaugaugcugaucg

SEQ ID NO: 814501 - RNA, 22 nt, Human
ucauuguuucugcuuuucauga

SEQ ID NO: 814502 - RNA, 22 nt, Human
cuaaauguuuuaucuuccuggc

SEQ ID NO: 814503 - RNA, 18 nt, Human
gccagcccuccaaccucc

SEQ ID NO: 814504 - RNA, 22 nt, Human
cugagcugcucccgcugcagcg

SEQ ID NO: 814505 - RNA, 22 nt, Human
uucaacaacuugguucaaaugg

SEQ ID NO: 814506 - RNA, 22 nt, Human
gugauuucagguuuuucauacu

SEQ ID NO: 814507 - RNA, 22 nt, Human
uucagucuuguugaaaacuugg

SEQ ID NO: 814508 - RNA, 17 nt, Human
cauucuguaaucuuucu

SEQ ID NO: 814509 - RNA, 22 nt, Human
acagcuucgaggaucucauccc

SEQ ID NO: 814510 - RNA, 22 nt, Human
aguacuuuuuguucaauugugc

SEQ ID NO: 814511 - RNA, 22 nt, Human
uguuccugacggccaaagaggu

SEQ ID NO: 814512 - RNA, 22 nt, Human
aacaugaugacauuguaagcuu

SEQ ID NO: 814513 - RNA, 21 nt, Human
cugcacugugauuuaaaaugu

SEQ ID NO: 814514 - RNA, 22 nt, Human
aagcaauucacaguucacuuaa

SEQ ID NO: 814515 - RNA, 21 nt, Human
uuccuccucuggagaagaaga

SEQ ID NO: 814516 - RNA, 22 nt, Human
ugcuccaucuagagcucugcag

SEQ ID NO: 814517 - RNA, 18 nt, Human
agcucacagaucuguuuu

SEQ ID NO: 814518 - RNA, 22 nt, Human
gcagcaaucuucacagugucau

SEQ ID NO: 814519 - RNA, 22 nt, Human
gaugcugauuuuacuguuuucu

SEQ ID NO: 814520 - RNA, 22 nt, Human
cagagcugagucuucaagguug

SEQ ID NO: 814521 - RNA, 22 nt, Human
uuccagagaguuauuccccugg

SEQ ID NO: 814522 - RNA, 22 nt, Human
agcugugaccuucaagagcuac

SEQ ID NO: 814523 - RNA, 22 nt, Human
aaauacaguggcagcagauaau

SEQ ID NO: 814524 - RNA, 22 nt, Human
agguccugucuuaucucuguaa

SEQ ID NO: 814525 - RNA, 22 nt, Human
uugauguaauacuuugcaacca

SEQ ID NO: 814526 - RNA, 19 nt, Human
ucuuucauuucuagcucug

SEQ ID NO: 814527 - RNA, 22 nt, Human
caguauuuaggauuaggagaga

SEQ ID NO: 814528 - RNA, 22 nt, Human
ggcucugcugguaagaugccuc

SEQ ID NO: 814529 - RNA, 22 nt, Human
cugagcugguucucuugugaaa

SEQ ID NO: 814530 - RNA, 22 nt, Human
cugcaucaguggauaugauggu

SEQ ID NO: 814531 - RNA, 22 nt, Human
ccuguaccgcgaucugcugcgc

SEQ ID NO: 814532 - RNA, 22 nt, Human
uguguacauguaucaacuaucg

SEQ ID NO: 814533 - RNA, 22 nt, Human
uguaccacucuacuaaggguuc

SEQ ID NO: 814534 - RNA, 21 nt, Human
uccagcacagaugaccucccc

SEQ ID NO: 814535 - RNA, 22 nt, Human
cucacucaguuuuuaguucauc

SEQ ID NO: 814536 - RNA, 21 nt, Human
uggcaggcagcuggaagcuug

SEQ ID NO: 814537 - RNA, 22 nt, Human
gcugccaauccagcugugggag

SEQ ID NO: 814538 - RNA, 22 nt, Human
augcaguuagguaauagucuca

SEQ ID NO: 814539 - RNA, 22 nt, Human
guccacauaggaacccagcuuc

SEQ ID NO: 814540 - RNA, 22 nt, Human
uuccuuggagucaaacagggag

SEQ ID NO: 814541 - RNA, 22 nt, Human
uucgcuuugcccguugucauuu

SEQ ID NO: 814542 - RNA, 22 nt, Human
aauuauugagcaucuacugugu

SEQ ID NO: 814543 - RNA, 22 nt, Human
uuccuuggaaagagacgucgcu

SEQ ID NO: 814544 - RNA, 22 nt, Human
caguauuucauucagaauuguu

SEQ ID NO: 814545 - RNA, 22 nt, Human
uugaugcugucuuucagaauca

SEQ ID NO: 814546 - RNA, 22 nt, Human
ggaccugcucucccaguucucu

SEQ ID NO: 814547 - RNA, 22 nt, Human
gugcgggccuggggguuucucu

SEQ ID NO: 814548 - RNA, 22 nt, Human
uuucugaggaauuaauacagaa

SEQ ID NO: 814549 - RNA, 22 nt, Human
aaaccuguuaauagagcgaugc

SEQ ID NO: 814550 - RNA, 22 nt, Human
cuaguagcccauuuuggauacc

SEQ ID NO: 814551 - RNA, 18 nt, Human
auuugcaggcaugcaggc

SEQ ID NO: 814552 - RNA, 22 nt, Human
aaacaucuucucuugauucuuu

SEQ ID NO: 814553 - RNA, 22 nt, Human
ccacuuaagagaacagcuauag

SEQ ID NO: 814554 - RNA, 22 nt, Human
ugcacccacuuagcugaaguuc

SEQ ID NO: 814555 - RNA, 22 nt, Human
uaucuagagccuggaagucuug

SEQ ID NO: 814556 - RNA, 22 nt, Human
ccaaaauauuagugcuuaagua

SEQ ID NO: 814557 - RNA, 20 nt, Human
ugagucagcugcaugggugg

SEQ ID NO: 814558 - RNA, 22 nt, Human
uugcaguuuugacagaccaaau

SEQ ID NO: 814559 - RNA, 22 nt, Human
cucagcuucuaccuccugagug

SEQ ID NO: 814560 - RNA, 22 nt, Human
cuccagcucgcgagcucugcuc

SEQ ID NO: 814561 - RNA, 22 nt, Human
cucuggcaauugcugcugacuc

SEQ ID NO: 814562 - RNA, 22 nt, Human
agccacugugugaccagcuguc

SEQ ID NO: 814563 - RNA, 22 nt, Human
cagcagcucaggcuccuuccca

SEQ ID NO: 814564 - RNA, 22 nt, Human
uugucaggaacuaugauuaugc

SEQ ID NO: 814565 - RNA, 18 nt, Human
uacagcuugaguugacug

SEQ ID NO: 814566 - RNA, 22 nt, Human
uccuuggcaugccgucuucucc

SEQ ID NO: 814567 - RNA, 22 nt, Human
agugaaauaugcccauugcugu

SEQ ID NO: 814568 - RNA, 22 nt, Human
cugaaagcaaaguaauucuuaa

SEQ ID NO: 814569 - RNA, 22 nt, Human
uccucagcaaacacuucacucu

SEQ ID NO: 814570 - RNA, 22 nt, Human
cacagcuucuccccgcugcggc

SEQ ID NO: 814571 - RNA, 22 nt, Human
gugagagugguuuauguccaug

SEQ ID NO: 814572 - RNA, 22 nt, Human
aaucuguuuuaaaguuugugcc

SEQ ID NO: 814573 - RNA, 22 nt, Human
uggcaacucaauuucuacaaga

SEQ ID NO: 814574 - RNA, 22 nt, Human
uucugugcucaaaacuuuccaa

SEQ ID NO: 814575 - RNA, 23 nt, Human
acagaagccaggagccgcugggc

SEQ ID NO: 814576 - RNA, 22 nt, Human
uuuggcaagcgaguacuuucug

SEQ ID NO: 814577 - RNA, 22 nt, Human
augguuuuguccucuuugguuc

SEQ ID NO: 814578 - RNA, 22 nt, Human
cacuguugaagauacuuccucu

SEQ ID NO: 814579 - RNA, 22 nt, Human
ucccacacagcccgcucaccgg

SEQ ID NO: 814580 - RNA, 22 nt, Human
ugauaguaucugauuauuucac

SEQ ID NO: 814581 - RNA, 22 nt, Human
uccacagguccucuuugcaaag

SEQ ID NO: 814582 - RNA, 22 nt, Human
agucacuguuuaaucuagcuaa

SEQ ID NO: 814583 - RNA, 22 nt, Human
caaacauuuguuggaaccccug

SEQ ID NO: 814584 - RNA, 20 nt, Human
cuguuugcuaucaugagcug

SEQ ID NO: 814585 - RNA, 22 nt, Human
gccuguuucuccuccuuggccc

SEQ ID NO: 814586 - RNA, 22 nt, Human
uucuuuucuuuaggcauugugu

SEQ ID NO: 814587 - RNA, 18 nt, Human
cugcccagagcauuucau

SEQ ID NO: 814588 - RNA, 22 nt, Human
agugcuguaacaacuuauuugg

SEQ ID NO: 814589 - RNA, 22 nt, Human
uuucugugguggguaguucaga

SEQ ID NO: 814590 - RNA, 22 nt, Human
gaggaaccaaucugugauauuc

SEQ ID NO: 814591 - RNA, 22 nt, Human
cuguauuucccacauucucuau

SEQ ID NO: 814592 - RNA, 22 nt, Human
gcuguggucugugagcuccaaa

SEQ ID NO: 814593 - RNA, 22 nt, Human
uguucuucuagauugccuuuua

SEQ ID NO: 814594 - RNA, 22 nt, Human
aggguagggccguagggccaug

SEQ ID NO: 814595 - RNA, 22 nt, Human
ggcagaggagcuggaaacaugg

SEQ ID NO: 814596 - RNA, 22 nt, Human
uuuucagugggcaaugauguga

SEQ ID NO: 814597 - RNA, 22 nt, Human
cccaagagguggagguugcagu

SEQ ID NO: 814598 - RNA, 22 nt, Human
auuacaaaagaagggagaaggu

SEQ ID NO: 814599 - RNA, 22 nt, Human
caugcugugugguuagaacugu

SEQ ID NO: 814600 - RNA, 22 nt, Human
cccaggaaugggaaggaggaau

SEQ ID NO: 814601 - RNA, 22 nt, Human
uccaggagguugagugaguucc

SEQ ID NO: 814602 - RNA, 22 nt, Human
ucaucugucauccacaaagcug

SEQ ID NO: 814603 - RNA, 22 nt, Human
agcagagccugggcuaggggug

SEQ ID NO: 814604 - RNA, 21 nt, Human
agucuguuaggaugacucuga

SEQ ID NO: 814605 - RNA, 22 nt, Human
aaggccagacaggaccacaucu

SEQ ID NO: 814606 - RNA, 19 nt, Human
uugaaauuguuugauaugg

SEQ ID NO: 814607 - RNA, 22 nt, Human
ugcauguggaccccuggugccu

SEQ ID NO: 814608 - RNA, 22 nt, Human
uccaggaguuugaccugugggc

SEQ ID NO: 814609 - RNA, 22 nt, Human
ucucaggaagauuagggcuaag

SEQ ID NO: 814610 - RNA, 22 nt, Human
agaggucagauuucuccuggug

SEQ ID NO: 814611 - RNA, 22 nt, Human
uuucacauuuaggcgugaauug

SEQ ID NO: 814612 - RNA, 22 nt, Human
caaguaaagaaucacauuucuu

SEQ ID NO: 814613 - RNA, 22 nt, Human
gaucauuugcaggaaacauuaa

SEQ ID NO: 814614 - RNA, 20 nt, Human
aggcagcuggccaggcaggu

SEQ ID NO: 814615 - RNA, 22 nt, Human
uuucuucagccacuccaaacug

SEQ ID NO: 814616 - RNA, 22 nt, Human
aggaaagguagcgugccagcag

SEQ ID NO: 814617 - RNA, 22 nt, Human
uucacagauguauuggaacucc

SEQ ID NO: 814618 - RNA, 22 nt, Human
uuugaagucaggcuuucuaccc

SEQ ID NO: 814619 - RNA, 22 nt, Human
caguucuuauuuggccaguguc

SEQ ID NO: 814620 - RNA, 22 nt, Human
acuggcagagacccugauggcc

SEQ ID NO: 814621 - RNA, 22 nt, Human
auuaaauuggaucugcauaguu

SEQ ID NO: 814622 - RNA, 22 nt, Human
uguggaaaauuggaacguuccu

SEQ ID NO: 814623 - RNA, 22 nt, Human
gagguagcaugcuggaagggac

SEQ ID NO: 814624 - RNA, 22 nt, Human
accaggaggaaguguuaaugau

SEQ ID NO: 814625 - RNA, 22 nt, Human
uugcauuucccauugaguaaug

SEQ ID NO: 814626 - RNA, 22 nt, Human
cccaggagguagagguugcagu

SEQ ID NO: 814627 - RNA, 22 nt, Human
gucuucaacaauaacuaccacu

SEQ ID NO: 814628 - RNA, 22 nt, Human
ugaugaaauguugaggcaguga

SEQ ID NO: 814629 - RNA, 22 nt, Human
uaauuauuugaagacauuagag

SEQ ID NO: 814630 - RNA, 22 nt, Human
ugcuuuggaucuauuugcugag

SEQ ID NO: 814631 - RNA, 22 nt, Human
auucauuuagguauucacuuac

SEQ ID NO: 814632 - RNA, 22 nt, Human
gauggacagccuggaaggaaag

SEQ ID NO: 814633 - RNA, 22 nt, Human
ggaggcagaauagagugugggu

SEQ ID NO: 814634 - RNA, 22 nt, Human
uuauuugcccauguuuagcaga

SEQ ID NO: 814635 - RNA, 22 nt, Human
uucauuaguucugaagaugucu

SEQ ID NO: 814636 - RNA, 22 nt, Human
uuugaaagaaaccagugaguga

SEQ ID NO: 814637 - RNA, 22 nt, Human
uauuauuaaauggcagaauuuu

SEQ ID NO: 814638 - RNA, 22 nt, Human
uugcaucuagggcaacccagag

SEQ ID NO: 814639 - RNA, 22 nt, Human
caaggccacuccagagacuggu

SEQ ID NO: 814640 - RNA, 22 nt, Human
ucuuugcaggccaaauuguuaa

SEQ ID NO: 814641 - RNA, 22 nt, Human
gacggcagaaacucaugagguc

SEQ ID NO: 814642 - RNA, 21 nt, Human
uuccagagauuguuucaccug

SEQ ID NO: 814643 - RNA, 22 nt, Human
auugaaagcacaaagaacaagu

SEQ ID NO: 814644 - RNA, 20 nt, Human
uucuucucuaguuaucuuca

SEQ ID NO: 814645 - RNA, 22 nt, Human
gucaggauuauuuuauuaaaag

SEQ ID NO: 814646 - RNA, 22 nt, Human
cacauauuguaguucaccagga

SEQ ID NO: 814647 - RNA, 22 nt, Human
agauggagaaugacaauuaagg

SEQ ID NO: 814648 - RNA, 22 nt, Human
ccaggcugcagucaaggggcau

SEQ ID NO: 814649 - RNA, 22 nt, Human
aaaugauugucaaaguucuguu

SEQ ID NO: 814650 - RNA, 22 nt, Human
ucauucuuuaccaaguugucac

SEQ ID NO: 814651 - RNA, 20 nt, Human
gcucccagccugcagucccc

SEQ ID NO: 814652 - RNA, 22 nt, Human
accauguguuuuacacauggua

SEQ ID NO: 814653 - RNA, 22 nt, Human
ucuacuguagugaugcugcagu

SEQ ID NO: 814654 - RNA, 22 nt, Human
ucacacagauugguagagcuga

SEQ ID NO: 814655 - RNA, 22 nt, Human
uggaggaaguugcuggaaguca

SEQ ID NO: 814656 - RNA, 22 nt, Human
ucuuugcacugugcaagcagaa

SEQ ID NO: 814657 - RNA, 18 nt, Human
aagaggaggaaacccagg

SEQ ID NO: 814658 - RNA, 22 nt, Human
aggccagcaagaaagagagucu

SEQ ID NO: 814659 - RNA, 19 nt, Human
ugccuggacaaaugugggg

SEQ ID NO: 814660 - RNA, 22 nt, Human
gcucaggaucagccaccucuuu

SEQ ID NO: 814661 - RNA, 22 nt, Human
gaggcagugucgguggcaggau

SEQ ID NO: 814662 - RNA, 22 nt, Human
uuugaaauuaagauauugucca

SEQ ID NO: 814663 - RNA, 22 nt, Human
caggaggaagaacucugcaaca

SEQ ID NO: 814664 - RNA, 22 nt, Human
ccuggagauuucuucaagcuuu

SEQ ID NO: 814665 - RNA, 22 nt, Human
cagggagggacaauugucaccu

SEQ ID NO: 814666 - RNA, 21 nt, Human
gaacauuuggguuguuucuac

SEQ ID NO: 814667 - RNA, 22 nt, Human
cauuuccagcuccugcaucaug

SEQ ID NO: 814668 - RNA, 22 nt, Human
uguuuuaaucucccauugcucu

SEQ ID NO: 814669 - RNA, 22 nt, Human
cauuuguauguuccuccuuagg

SEQ ID NO: 814670 - RNA, 22 nt, Human
augugucuuugagacucugcua

SEQ ID NO: 814671 - RNA, 22 nt, Human
uuucauggcuaggacuagagug

SEQ ID NO: 814672 - RNA, 22 nt, Human
acaggagaauuaucuggaacaa

SEQ ID NO: 814673 - RNA, 22 nt, Human
augauguuaccaguacuuagag

SEQ ID NO: 814674 - RNA, 22 nt, Human
ggagcacuauaauagagauuuu

SEQ ID NO: 814675 - RNA, 22 nt, Human
ugucucaguacacuccgauguu

SEQ ID NO: 814676 - RNA, 20 nt, Human
uugauaggcagcuugucagg

SEQ ID NO: 814677 - RNA, 22 nt, Human
agaggacaaaaugagaagugcu

SEQ ID NO: 814678 - RNA, 22 nt, Human
cauuugcagagggugacacucu

SEQ ID NO: 814679 - RNA, 22 nt, Human
aggaugagccgcgcaagcugac

SEQ ID NO: 814680 - RNA, 22 nt, Human
uauuuguugaguuguuaugucu

SEQ ID NO: 814681 - RNA, 22 nt, Human
cccaggaacuccagagcuccuc

SEQ ID NO: 814682 - RNA, 22 nt, Human
ccucagaugucuuaaggcacug

SEQ ID NO: 814683 - RNA, 22 nt, Human
uucucugaguacguuucagugu

SEQ ID NO: 814684 - RNA, 22 nt, Human
uuucuaggcacagugucuuccc

SEQ ID NO: 814685 - RNA, 22 nt, Human
auucuucagaauaucuggcacu

SEQ ID NO: 814686 - RNA, 22 nt, Human
ccacaucucgguccccucuuug

SEQ ID NO: 814687 - RNA, 22 nt, Human
cuuuccaagaaugcagauaccu

SEQ ID NO: 814688 - RNA, 22 nt, Human
uagaagcaguaauagaaauagg

SEQ ID NO: 814689 - RNA, 19 nt, Human
aggguggcaaaggagggug

SEQ ID NO: 814690 - RNA, 19 nt, Human
acuggcaguuucugcaugg

SEQ ID NO: 814691 - RNA, 22 nt, Human
gcagaggccuagguggaaggcc

SEQ ID NO: 814692 - RNA, 22 nt, Human
ugccuugcacauaauauacauu

SEQ ID NO: 814693 - RNA, 22 nt, Human
gcuuuggaugugugccugaggu

SEQ ID NO: 814694 - RNA, 22 nt, Human
ggcuuggaccagucacaguggu

SEQ ID NO: 814695 - RNA, 22 nt, Human
uuuucagaggccuaagagguuu

SEQ ID NO: 814696 - RNA, 22 nt, Human
acauguaaaaggaacaugcaug

SEQ ID NO: 814697 - RNA, 22 nt, Human
cuccaggaaaauagggaaugag

SEQ ID NO: 814698 - RNA, 22 nt, Human
ugaggcaggaaguuauauaaug

SEQ ID NO: 814699 - RNA, 22 nt, Human
cucagaagaacaaaggcucuac

SEQ ID NO: 814700 - RNA, 22 nt, Human
guuugcauuuauuagucuucug

SEQ ID NO: 814701 - RNA, 22 nt, Human
aggcaguguguagcuggaagag

SEQ ID NO: 814702 - RNA, 22 nt, Human
uagaaaugauugguugagcucu

SEQ ID NO: 814703 - RNA, 22 nt, Human
acacaaauuguaggauaauugc

SEQ ID NO: 814704 - RNA, 22 nt, Human
cugaacucuuuaugacagcuug

SEQ ID NO: 814705 - RNA, 22 nt, Human
aguggcaggcggagauguagga

SEQ ID NO: 814706 - RNA, 21 nt, Human
auaagcaugcugauuacauuu

SEQ ID NO: 814707 - RNA, 20 nt, Human
uauuuguauuugggaaaguu

SEQ ID NO: 814708 - RNA, 22 nt, Human
uacaaagagguaauugcauaua

SEQ ID NO: 814709 - RNA, 21 nt, Human
uggagacucugguucuuugug

SEQ ID NO: 814710 - RNA, 19 nt, Human
caggaugaucccaugacac

SEQ ID NO: 814711 - RNA, 22 nt, Human
uccauguguuuuccuguccaca

SEQ ID NO: 814712 - RNA, 22 nt, Human
ggcagcauauauucagugggca

SEQ ID NO: 814713 - RNA, 18 nt, Human
ggcaucugcacagcagcc

SEQ ID NO: 814714 - RNA, 22 nt, Human
uaucuuguaauagguccacuug

SEQ ID NO: 814715 - RNA, 22 nt, Human
gucuucuuguguugccugucuu

SEQ ID NO: 814716 - RNA, 22 nt, Human
cagugguuauacuuacuguuuc

SEQ ID NO: 814717 - RNA, 22 nt, Human
aagugagugguaaggagcaugg

SEQ ID NO: 814718 - RNA, 22 nt, Human
gugguuuugccauuacaaguaa

SEQ ID NO: 814719 - RNA, 22 nt, Human
cucccaggcacagggaggagcc

SEQ ID NO: 814720 - RNA, 22 nt, Human
gagcagcuccagccgcaugacu

SEQ ID NO: 814721 - RNA, 22 nt, Human
uucccucucacuuaaagcuugg

SEQ ID NO: 814722 - RNA, 22 nt, Human
agcuagccuaggcagagugcau

SEQ ID NO: 814723 - RNA, 22 nt, Human
ucucgacagccuggcacagugg

SEQ ID NO: 814724 - RNA, 22 nt, Human
ugguuuugcuaaaauagaaaga

SEQ ID NO: 814725 - RNA, 22 nt, Human
aaaauuauucauggcuuuugga

SEQ ID NO: 814726 - RNA, 22 nt, Human
aggcagcucuguggccucccag

SEQ ID NO: 814727 - RNA, 22 nt, Human
gugaaggacuagcauggagggc

SEQ ID NO: 814728 - RNA, 22 nt, Human
caggaugggauguagugggccc

SEQ ID NO: 814729 - RNA, 20 nt, Human
uuuuccagaaaguaucauug

SEQ ID NO: 814730 - RNA, 20 nt, Human
acuugcugggcuuuguuacc

SEQ ID NO: 814731 - RNA, 23 nt, Human
uggcagcuguguaagagaaagca

SEQ ID NO: 814732 - RNA, 22 nt, Human
gcuugaaaauucauagguauuu

SEQ ID NO: 814733 - RNA, 22 nt, Human
aaaauacuguggaguguugaaa

SEQ ID NO: 814734 - RNA, 20 nt, Human
guugaaaguaauaugaugcu

SEQ ID NO: 814735 - RNA, 22 nt, Human
ucuuagaaugucaacugauguu

SEQ ID NO: 814736 - RNA, 22 nt, Human
uuaaauuccagccucauaauag

SEQ ID NO: 814737 - RNA, 22 nt, Human
gaggccaggaagcccaagauca

SEQ ID NO: 814738 - RNA, 22 nt, Human
ugaggcaggagaaucaccggaa

SEQ ID NO: 814739 - RNA, 22 nt, Human
cccaggagagagacuugaaucu

SEQ ID NO: 814740 - RNA, 22 nt, Human
aaauauaguaaaugcauaguuc

SEQ ID NO: 814741 - RNA, 22 nt, Human
auuuugaugcuaucuaaugaau

SEQ ID NO: 814742 - RNA, 22 nt, Human
ggcagcuucucccaggcuguuu

SEQ ID NO: 814743 - RNA, 20 nt, Human
gggagucuggaugaaagaug

SEQ ID NO: 814744 - RNA, 19 nt, Human
agacagagcucaguggguu

SEQ ID NO: 814745 - RNA, 22 nt, Human
cauuuguaggaugcuucuuguu

SEQ ID NO: 814746 - RNA, 22 nt, Human
ucaguucugcuagaaaaacagu

SEQ ID NO: 814747 - RNA, 21 nt, Human
augucaaaugcuuuauuuuau

SEQ ID NO: 814748 - RNA, 22 nt, Human
uuacuuuggguccugcuuauaa

SEQ ID NO: 814749 - RNA, 18 nt, Human
uugcuuuguaagcuugca

SEQ ID NO: 814750 - RNA, 22 nt, Human
gggcagcuagcccucuagccca

SEQ ID NO: 814751 - RNA, 22 nt, Human
ggagcuguucaggacugcuuca

SEQ ID NO: 814752 - RNA, 22 nt, Human
caugcugugcaucuugaugacc

SEQ ID NO: 814753 - RNA, 22 nt, Human
ucauuuaauagcuuuugucuuu

SEQ ID NO: 814754 - RNA, 22 nt, Human
ggcaagcucaggccucaggugu

SEQ ID NO: 814755 - RNA, 22 nt, Human
uguuuuaaagccauugccuuuc

SEQ ID NO: 814756 - RNA, 22 nt, Human
gcucaggaccgaggggugggaa

SEQ ID NO: 814757 - RNA, 22 nt, Human
cauaauaucuccgauuacuugc

SEQ ID NO: 814758 - RNA, 22 nt, Human
ggccagcuuugagcugcaggaa

SEQ ID NO: 814759 - RNA, 22 nt, Human
gaggcaguuugccaugccagga

SEQ ID NO: 814760 - RNA, 22 nt, Human
aggaagcuccuggagagccagu

SEQ ID NO: 814761 - RNA, 21 nt, Human
aucauucuggaaaauucaagc

SEQ ID NO: 814762 - RNA, 22 nt, Human
gccaggagacuccauucauuug

SEQ ID NO: 814763 - RNA, 22 nt, Human
agagacugcgugucagcgcugg

SEQ ID NO: 814764 - RNA, 22 nt, Human
cuuuuauuuugaauuaagggcu

SEQ ID NO: 814765 - RNA, 22 nt, Human
cccagcaguaaccaguggaaau

SEQ ID NO: 814766 - RNA, 22 nt, Human
ggugaaggucagagcaggaaaa

SEQ ID NO: 814767 - RNA, 22 nt, Human
gguggagcuggaccaggagagg

SEQ ID NO: 814768 - RNA, 22 nt, Human
augauguugauaaauuacuuua

SEQ ID NO: 814769 - RNA, 22 nt, Human
uugaaauaucaaguuauuagug

SEQ ID NO: 814770 - RNA, 22 nt, Human
auucuucaucacuaccuuguga

SEQ ID NO: 814771 - RNA, 22 nt, Human
uccaggaggacugagggggcug

SEQ ID NO: 814772 - RNA, 22 nt, Human
gaggccaggagugcuguaaguu

SEQ ID NO: 814773 - RNA, 23 nt, Human
agaugagccaacaccuccaugcc

SEQ ID NO: 814774 - RNA, 20 nt, Human
caggagggacauuucagcau

SEQ ID NO: 814775 - RNA, 22 nt, Human
cccaggagagaggggauaaagc

SEQ ID NO: 814776 - RNA, 22 nt, Human
cagucuucuaaccuagcagccu

SEQ ID NO: 814777 - RNA, 22 nt, Human
uuauuacacugaaagaauugcg

SEQ ID NO: 814778 - RNA, 22 nt, Human
caggagaucuuaggaauucuua

SEQ ID NO: 814779 - RNA, 19 nt, Human
uuagccauccacagugaaa

SEQ ID NO: 814780 - RNA, 20 nt, Human
cauuuguuagcuuucuacug

SEQ ID NO: 814781 - RNA, 22 nt, Human
acaugcauacacguacauaccu

SEQ ID NO: 814782 - RNA, 22 nt, Human
uuuaaauuuguguuuagagggu

SEQ ID NO: 814783 - RNA, 22 nt, Human
cuguucucuggcgguggcuguu

SEQ ID NO: 814784 - RNA, 22 nt, Human
uaauacagaaguguauuaaaau

SEQ ID NO: 814785 - RNA, 22 nt, Human
aguccaaggagagacagcauuu

SEQ ID NO: 814786 - RNA, 20 nt, Human
cgugcugugaccuugagcau

SEQ ID NO: 814787 - RNA, 22 nt, Human
caggagaaauguggcugcuacc

SEQ ID NO: 814788 - RNA, 22 nt, Human
ggcagcuaggggcagggaauuc

SEQ ID NO: 814789 - RNA, 22 nt, Human
uucuucaguguagcaacuguau

SEQ ID NO: 814790 - RNA, 22 nt, Human
uuuguuaauucuuauguuagag

SEQ ID NO: 814791 - RNA, 22 nt, Human
gaggcagcaucuauggugggaa

SEQ ID NO: 814792 - RNA, 22 nt, Human
uggcagcugcguuguguuucug

SEQ ID NO: 814793 - RNA, 22 nt, Human
agggcagccucucagccuaggu

SEQ ID NO: 814794 - RNA, 22 nt, Human
uuaaaaugaauauugauuagca

SEQ ID NO: 814795 - RNA, 20 nt, Human
cugcugugauucccuccucc

SEQ ID NO: 814796 - RNA, 18 nt, Human
aagaggaggagcagguug

SEQ ID NO: 814797 - RNA, 22 nt, Human
ucaccgccuugcccggccgggc

SEQ ID NO: 814798 - RNA, 21 nt, Human
ucugagagcaacugcccuuua

SEQ ID NO: 814799 - RNA, 22 nt, Human
auccaugaagguacuucucagg

SEQ ID NO: 814800 - RNA, 22 nt, Human
cccaggagguggagguugcagu

SEQ ID NO: 814801 - RNA, 21 nt, Human
cugcuguggcccccgacaugc

SEQ ID NO: 814802 - RNA, 22 nt, Human
cuugauguauaaguugauaugu

SEQ ID NO: 814803 - RNA, 22 nt, Human
ucaggaugguguggaggaaaua

SEQ ID NO: 814804 - RNA, 22 nt, Human
guaggcagucucucaggugauc

SEQ ID NO: 814805 - RNA, 23 nt, Human
ucagucuucccugucaguaauag

SEQ ID NO: 814806 - RNA, 23 nt, Human
ucuccuccuagauacagucaugg

SEQ ID NO: 814807 - RNA, 22 nt, Human
gcaugucaugucauguaggaau

SEQ ID NO: 814808 - RNA, 22 nt, Human
uggcagcagacaaaaggccauu

SEQ ID NO: 814809 - RNA, 22 nt, Human
ucugaaggugcuagagaaagcu

SEQ ID NO: 814810 - RNA, 22 nt, Human
uucauugugaacacauucugcc

SEQ ID NO: 814811 - RNA, 22 nt, Human
cccaggaauuggaggcugcagu

SEQ ID NO: 814812 - RNA, 22 nt, Human
gcaucuaauccaguccagcauc

SEQ ID NO: 814813 - RNA, 22 nt, Human
cuacccagagugaaucucuuaa

SEQ ID NO: 814814 - RNA, 20 nt, Human
cucaggauacugcaaaguug

SEQ ID NO: 814815 - RNA, 22 nt, Human
ugcauaguucuccuuccuccuc

SEQ ID NO: 814816 - RNA, 20 nt, Human
cuucuucauuaacccuacug

SEQ ID NO: 814817 - RNA, 22 nt, Human
cugcgcagggguggcgccagaa

SEQ ID NO: 814818 - RNA, 22 nt, Human
uucuacaugguugcucagaggg

SEQ ID NO: 814819 - RNA, 21 nt, Human
ggcagcguguggacaggaagg

SEQ ID NO: 814820 - RNA, 22 nt, Human
aagagaggacauggugaaccug

SEQ ID NO: 814821 - RNA, 22 nt, Human
gugguaauagagcuccaaacua

SEQ ID NO: 814822 - RNA, 22 nt, Human
agaagucauuuauguuagauga

SEQ ID NO: 814823 - RNA, 22 nt, Human
agacgagggcccccaggacagc

SEQ ID NO: 814824 - RNA, 22 nt, Human
aaagauaauguuuccuuauucu

SEQ ID NO: 814825 - RNA, 22 nt, Human
aggcagucuaucucuggagccu

SEQ ID NO: 814826 - RNA, 22 nt, Human
aagauggagcacgagcagaagc

SEQ ID NO: 814827 - RNA, 21 nt, Human
acagucuccccagaucucucc

SEQ ID NO: 814828 - RNA, 22 nt, Human
ugaguucucacccauucuucuu

SEQ ID NO: 814829 - RNA, 22 nt, Human
aucaggaucugcaucauaagaa

SEQ ID NO: 814830 - RNA, 22 nt, Human
ugaacaaacugcauucuucacu

SEQ ID NO: 814831 - RNA, 22 nt, Human
ggcaggcagaggcugagacagg

SEQ ID NO: 814832 - RNA, 22 nt, Human
uguugauuaguguuuagacuua

SEQ ID NO: 814833 - RNA, 22 nt, Human
uuaaauuuuagaaacagacucu

SEQ ID NO: 814834 - RNA, 22 nt, Human
gugcuuucugcugcauuccucu

SEQ ID NO: 814835 - RNA, 22 nt, Human
aucaggaucagggcuagcagag

SEQ ID NO: 814836 - RNA, 22 nt, Human
aaggcagccaugugcuuugggu

SEQ ID NO: 814837 - RNA, 19 nt, Human
ucugccucuggucaggcuc

SEQ ID NO: 814838 - RNA, 22 nt, Human
aaaggccacuugaaggauuuuu

SEQ ID NO: 814839 - RNA, 20 nt, Human
uugagcuuuuaguacagaca

SEQ ID NO: 814840 - RNA, 22 nt, Human
gaggagcugggcugagaggguc

SEQ ID NO: 814841 - RNA, 22 nt, Human
caggcagaguuagagcaacugg

SEQ ID NO: 814842 - RNA, 22 nt, Human
ugaguaauaaacugucuugcuc

SEQ ID NO: 814843 - RNA, 22 nt, Human
gcauucuuuuuaggagguuccu

SEQ ID NO: 814844 - RNA, 22 nt, Human
guggcaggagacuggaagaugg

SEQ ID NO: 814845 - RNA, 21 nt, Human
uccaggaguggcugggcaggg

SEQ ID NO: 814846 - RNA, 22 nt, Human
ugcacauucacuuagguauugu

SEQ ID NO: 814847 - RNA, 22 nt, Human
ucaggauguccaaaauccagcc

SEQ ID NO: 814848 - RNA, 22 nt, Human
cagagccaggucuaggagucuc

SEQ ID NO: 814849 - RNA, 22 nt, Human
ucagugaucuaaggguauggcc

SEQ ID NO: 814850 - RNA, 22 nt, Human
gugacagucaaagacaugacuu

SEQ ID NO: 814851 - RNA, 22 nt, Human
uaaggccagccagcaaaucugu

SEQ ID NO: 814852 - RNA, 22 nt, Human
ugaggcagugcugggaagccug

SEQ ID NO: 814853 - RNA, 19 nt, Human
agccuggcuuugcucugcu

SEQ ID NO: 814854 - RNA, 22 nt, Human
guucuugccagcauccucaggu

SEQ ID NO: 814855 - RNA, 22 nt, Human
agcaccaugaccuugccauuga

SEQ ID NO: 814856 - RNA, 22 nt, Human
cuucagagugcagaagauuggg

SEQ ID NO: 814857 - RNA, 23 nt, Human
uggacgccgacuuuggaggcgcu

SEQ ID NO: 814858 - RNA, 22 nt, Human
ucucagucagccuugauguccc

SEQ ID NO: 814859 - RNA, 22 nt, Human
aaagcagagcagggcacuuaug

SEQ ID NO: 814860 - RNA, 22 nt, Human
aggucagcaugaguagaaggua

SEQ ID NO: 814861 - RNA, 22 nt, Human
gggcagcugucuugguucucaa

SEQ ID NO: 814862 - RNA, 22 nt, Human
aaggcagccucugccagccggg

SEQ ID NO: 814863 - RNA, 23 nt, Human
uccaggagcaugcuggcuggcga

SEQ ID NO: 814864 - RNA, 22 nt, Human
caggaugaagggcaaaggcaag

SEQ ID NO: 814865 - RNA, 21 nt, Human
agcaccuuacagcuauaaugg

SEQ ID NO: 814866 - RNA, 22 nt, Human
cugcuguguugccagugucacc

SEQ ID NO: 814867 - RNA, 20 nt, Human
aggcaccugucacaggugag

SEQ ID NO: 814868 - RNA, 22 nt, Human
aggguagggcccggagacagac

SEQ ID NO: 814869 - RNA, 22 nt, Human
ccaggagagcagaagcccaggc

SEQ ID NO: 814870 - RNA, 22 nt, Human
ucuuugaaagcuguucuagagu

SEQ ID NO: 814871 - RNA, 22 nt, Human
uggcagcuggagggcaauggcc

SEQ ID NO: 814872 - RNA, 22 nt, Human
gggagacacgcugcaggcauaa

SEQ ID NO: 814873 - RNA, 22 nt, Human
uucuucuuucccccugugguac

SEQ ID NO: 814874 - RNA, 22 nt, Human
ggagggacccacucuagaggug

SEQ ID NO: 814875 - RNA, 22 nt, Human
uucucagaugauucagauaaac

SEQ ID NO: 814876 - RNA, 22 nt, Human
gaaaggcaguacagcugagccu

SEQ ID NO: 814877 - RNA, 18 nt, Human
uaggagagaauuuauuua

SEQ ID NO: 814878 - RNA, 18 nt, Human
ugaauagggguuugcaga

SEQ ID NO: 814879 - RNA, 22 nt, Human
ucucaguguguuuucucucaga

SEQ ID NO: 814880 - RNA, 22 nt, Human
cugacagucucauugauuugcu

SEQ ID NO: 814881 - RNA, 22 nt, Human
uucaauucaauucuaaauauau

SEQ ID NO: 814882 - RNA, 22 nt, Human
uucauugucucuguuugccuuc

SEQ ID NO: 814883 - RNA, 22 nt, Human
uuggaaagcaagcuggacauac

SEQ ID NO: 814884 - RNA, 22 nt, Human
ugaggcagcaauuguauuguau

SEQ ID NO: 814885 - RNA, 22 nt, Human
cagcagagggagccauugaaau

SEQ ID NO: 814886 - RNA, 22 nt, Human
uuucuuauacuauauugucauc

SEQ ID NO: 814887 - RNA, 22 nt, Human
gaauagcuuccuuuuuuccaaa

SEQ ID NO: 814888 - RNA, 22 nt, Human
cucaggaugucggugacuauug

SEQ ID NO: 814889 - RNA, 20 nt, Human
augugucuguaaacaacucu

SEQ ID NO: 814890 - RNA, 22 nt, Human
uuaaauauuauguugucugcaa

SEQ ID NO: 814891 - RNA, 22 nt, Human
ccccaggagauuugggagcaca

SEQ ID NO: 814892 - RNA, 22 nt, Human
guucuucaggcugugcucuaga

SEQ ID NO: 814893 - RNA, 22 nt, Human
aucaggaugcugucaguuacca

SEQ ID NO: 814894 - RNA, 22 nt, Human
uccaugagggacacuggaugcu

SEQ ID NO: 814895 - RNA, 22 nt, Human
cagaggcauacucccagucuug

SEQ ID NO: 814896 - RNA, 21 nt, Human
uucuucaugaugauuaauggc

SEQ ID NO: 814897 - RNA, 22 nt, Human
ucugcaggcuuggaguggcagc

SEQ ID NO: 814898 - RNA, 22 nt, Human
aggcagcuggaaaacuccaggc

SEQ ID NO: 814899 - RNA, 22 nt, Human
cccaagagcuucuaggacgcug

SEQ ID NO: 814900 - RNA, 22 nt, Human
auguucuguuuuguaauucaua

SEQ ID NO: 814901 - RNA, 22 nt, Human
gcucaggaucccaggggugugc

SEQ ID NO: 814902 - RNA, 22 nt, Human
ucauuucaaguucugacagcua

SEQ ID NO: 814903 - RNA, 22 nt, Human
gccacaggcacuuaagggcugg

SEQ ID NO: 814904 - RNA, 22 nt, Human
guguuuuaagaaagaagcucag

SEQ ID NO: 814905 - RNA, 22 nt, Human
gacagaggcuggagcaccuccu

SEQ ID NO: 814906 - RNA, 22 nt, Human
ugaggcagguggauuacaaggu

SEQ ID NO: 814907 - RNA, 22 nt, Human
gcccaggaaauaaaagugggcu

SEQ ID NO: 814908 - RNA, 22 nt, Human
gaagcagcgaaguggaagggac

SEQ ID NO: 814909 - RNA, 22 nt, Human
gcagggaagaucuuggagcugc

SEQ ID NO: 814910 - RNA, 22 nt, Human
uauaucaccaaaaacaguucug

SEQ ID NO: 814911 - RNA, 22 nt, Human
ugaacucgggaggaggcugcag

SEQ ID NO: 814912 - RNA, 17 nt, Human
aggcaggcagagcggga

SEQ ID NO: 814913 - RNA, 22 nt, Human
cccaggcagccugcagggaagg

SEQ ID NO: 814914 - RNA, 21 nt, Human
uggcaggcagcuggaagcuug

SEQ ID NO: 814915 - RNA, 22 nt, Human
uauuucuaagagauaucuguac

SEQ ID NO: 814916 - RNA, 22 nt, Human
uaaggccaccguuauagaacca

SEQ ID NO: 814917 - RNA, 22 nt, Human
uuugcaaagaaauuauugcugu

SEQ ID NO: 814918 - RNA, 22 nt, Human
agcuggcaguaugacuggugac

SEQ ID NO: 814919 - RNA, 22 nt, Human
agaaaugaagagagucaagguu

SEQ ID NO: 814920 - RNA, 22 nt, Human
caggcagcguccugcuuccugu

SEQ ID NO: 814921 - RNA, 22 nt, Human
gcagcugccccgacugugaguc

SEQ ID NO: 814922 - RNA, 23 nt, Human
gcagaggagcaagcuggacacca

SEQ ID NO: 814923 - RNA, 21 nt, Human
uucucagagucuauuacaguu

SEQ ID NO: 814924 - RNA, 22 nt, Human
aucugcaggaaugugugcagag

SEQ ID NO: 814925 - RNA, 22 nt, Human
cagcagagaaauuaaacuucug

SEQ ID NO: 814926 - RNA, 22 nt, Human
acaaauguggacauggauaaug

SEQ ID NO: 814927 - RNA, 22 nt, Human
uuccugagggacuuuugagauu

SEQ ID NO: 814928 - RNA, 21 nt, Human
uaaggccaagucuauuucugu

SEQ ID NO: 814929 - RNA, 22 nt, Human
uuuucaguaaugucuacauaau

SEQ ID NO: 814930 - RNA, 22 nt, Human
ucuggcuuucauuuguuuaaag

SEQ ID NO: 814931 - RNA, 22 nt, Human
gaggcagcuuggggcugugggu

SEQ ID NO: 814932 - RNA, 22 nt, Human
cccaggaagagugaguggcauu

SEQ ID NO: 814933 - RNA, 21 nt, Human
gacaggacuagaccagagcuc

SEQ ID NO: 814934 - RNA, 22 nt, Human
ugaaagcacaaguucuaacagg

SEQ ID NO: 814935 - RNA, 22 nt, Human
auucuucacuguuucagaauga

SEQ ID NO: 814936 - RNA, 21 nt, Human
acucaggagacuaacuauguc

SEQ ID NO: 814937 - RNA, 22 nt, Human
gaggcagcugggauacaaggga

SEQ ID NO: 814938 - RNA, 22 nt, Human
aggcaguuuaggcagcgauuua

SEQ ID NO: 814939 - RNA, 22 nt, Human
agcugccccaugagaggcaggu

SEQ ID NO: 814940 - RNA, 22 nt, Human
uaaaugaagaaauggagauugu

SEQ ID NO: 814941 - RNA, 22 nt, Human
gcagcugcagacccucagugcu

SEQ ID NO: 814942 - RNA, 19 nt, Human
agauggcaaaaugcaaaga

SEQ ID NO: 814943 - RNA, 22 nt, Human
acaugauuuuaguaucauaaua

SEQ ID NO: 814944 - RNA, 22 nt, Human
ugcuuagacgucaaguacagcc

SEQ ID NO: 814945 - RNA, 22 nt, Human
agaggagguccuuuucugaugu

SEQ ID NO: 814946 - RNA, 22 nt, Human
uucaggauggcggauguugggg

SEQ ID NO: 814947 - RNA, 22 nt, Human
agugcugucaguuuuauagaua

SEQ ID NO: 814948 - RNA, 22 nt, Human
ggaggugguggcagugacaauu

SEQ ID NO: 814949 - RNA, 22 nt, Human
aaguauaagcuauucuucauga

SEQ ID NO: 814950 - RNA, 22 nt, Human
auguuucaaugcacuuuagccu

SEQ ID NO: 814951 - RNA, 22 nt, Human
cagcugacuucauaggaagaca

SEQ ID NO: 814952 - RNA, 22 nt, Human
uacuaucucuucuaacuucaga

SEQ ID NO: 814953 - RNA, 22 nt, Human
ggggcagccuccaggaaagcug

SEQ ID NO: 814954 - RNA, 22 nt, Human
aguuauaugugaaaacacguau

SEQ ID NO: 814955 - RNA, 22 nt, Human
agggggugucucugauuggguu

SEQ ID NO: 814956 - RNA, 22 nt, Human
ugaaacauuugaugaucuuugg

SEQ ID NO: 814957 - RNA, 21 nt, Human
uggaggaauaaagcacagaag

SEQ ID NO: 814958 - RNA, 17 nt, Human
aggcagcucagaacauc

SEQ ID NO: 814959 - RNA, 22 nt, Human
ccaggaagcugucugauaugaa

SEQ ID NO: 814960 - RNA, 22 nt, Human
agggagcucaguuggaagcggu

SEQ ID NO: 814961 - RNA, 22 nt, Human
uuuuuauaacucuuuugugaca

SEQ ID NO: 814962 - RNA, 22 nt, Human
cagaggcagugggguugcuccu

SEQ ID NO: 814963 - RNA, 22 nt, Human
gaggcagcauucgcauagacag

SEQ ID NO: 814964 - RNA, 22 nt, Human
aggacaggauugagcugaacug

SEQ ID NO: 814965 - RNA, 22 nt, Human
uuucuucaauugcuaacaagga

SEQ ID NO: 814966 - RNA, 18 nt, Human
cugcuugggagacgucag

SEQ ID NO: 814967 - RNA, 22 nt, Human
cauuuguuuagaagucuuuaua

SEQ ID NO: 814968 - RNA, 22 nt, Human
cuguuaaucugcuugcaugaug

SEQ ID NO: 814969 - RNA, 22 nt, Human
gagugucugaauuagagcacaa

SEQ ID NO: 814970 - RNA, 22 nt, Human
caggauggagggagggcuguua

SEQ ID NO: 814971 - RNA, 22 nt, Human
agccuauuccaggaugagcuca

SEQ ID NO: 814972 - RNA, 22 nt, Human
aggcagcagucaugaggaaaga

SEQ ID NO: 814973 - RNA, 22 nt, Human
ucauggauggccgggaggugau

SEQ ID NO: 814974 - RNA, 22 nt, Human
uauuucagguauggugugaaau

SEQ ID NO: 814975 - RNA, 19 nt, Human
cuucuucuuggcagccaag

SEQ ID NO: 814976 - RNA, 22 nt, Human
cuuaaauuggaugaguuaaguu

SEQ ID NO: 814977 - RNA, 22 nt, Human
aauugcuaaagauuauguuuuc

SEQ ID NO: 814978 - RNA, 22 nt, Human
cauuuucagcacccaucugaaa

SEQ ID NO: 814979 - RNA, 22 nt, Human
gccaggagccagcuucuuagca

SEQ ID NO: 814980 - RNA, 22 nt, Human
uccaugagaacccuuggagaua

SEQ ID NO: 814981 - RNA, 22 nt, Human
ggcaggcaaugaggaugggaag

SEQ ID NO: 814982 - RNA, 22 nt, Human
gcugcuguugauuuaguccaau

SEQ ID NO: 814983 - RNA, 22 nt, Human
cccuuagcuccaagggguuugg

SEQ ID NO: 814984 - RNA, 22 nt, Human
ggcagcaucucuggcagcagcu

SEQ ID NO: 814985 - RNA, 23 nt, Human
uugcacauuggagcuggucuucu

SEQ ID NO: 814986 - RNA, 21 nt, Human
aaaggccauaaucacggagca

SEQ ID NO: 814987 - RNA, 22 nt, Human
auucuucaaagagugucaaagu

SEQ ID NO: 814988 - RNA, 22 nt, Human
ccugucacgaugacugcacucu

SEQ ID NO: 814989 - RNA, 22 nt, Human
aaggcagcaagaauuccagguu

SEQ ID NO: 814990 - RNA, 22 nt, Human
gauuuuauuagcccaaacuuug

SEQ ID NO: 814991 - RNA, 22 nt, Human
ugccuguguccccuucuuggca

SEQ ID NO: 814992 - RNA, 22 nt, Human
uuucauuuugguuaugccauaa

SEQ ID NO: 814993 - RNA, 22 nt, Human
uggcagcucauuuggaaaugga

SEQ ID NO: 814994 - RNA, 22 nt, Human
uaaacauuuguuauucuuguuu

SEQ ID NO: 814995 - RNA, 22 nt, Human
uggccaggcagguagaacggcc

SEQ ID NO: 814996 - RNA, 22 nt, Human
ggaggacaggggcugcagcaca

SEQ ID NO: 814997 - RNA, 22 nt, Human
cugcaucacagcaggaggcaca

SEQ ID NO: 814998 - RNA, 19 nt, Human
uggagaggaaaugcugcuc

SEQ ID NO: 814999 - RNA, 22 nt, Human
uucagcaaacacgaugcuuguu

SEQ ID NO: 815000 - RNA, 22 nt, Human
gccaggaggggagaguguguca

SEQ ID NO: 815001 - RNA, 22 nt, Human
gcgucugaguugcgggggcuca

SEQ ID NO: 815002 - RNA, 22 nt, Human
auacagauguugaauguuauau

SEQ ID NO: 815003 - RNA, 22 nt, Human
aacaugcugccuuucuacgagu

SEQ ID NO: 815004 - RNA, 22 nt, Human
ugcugaaacaauaacauacugg

SEQ ID NO: 815005 - RNA, 22 nt, Human
uguguucuggaaagcucacuga

SEQ ID NO: 815006 - RNA, 22 nt, Human
uuagccauuuuauacaagugua

SEQ ID NO: 815007 - RNA, 22 nt, Human
ugaggcagcaauugauuauuca

SEQ ID NO: 815008 - RNA, 22 nt, Human
uucaggauucuuucagacuggg

SEQ ID NO: 815009 - RNA, 22 nt, Human
agaggaggcagcuuaacucagu

SEQ ID NO: 815010 - RNA, 22 nt, Human
ggcugaaggaugaaagcugcag

SEQ ID NO: 815011 - RNA, 17 nt, Human
ucaggauguagcaguag

SEQ ID NO: 815012 - RNA, 22 nt, Human
agacucaagcagauaggaauua

SEQ ID NO: 815013 - RNA, 23 nt, Human
ucguugaauagcaauagcacaac

SEQ ID NO: 815014 - RNA, 22 nt, Human
uugcauuugaucuuggguucuc

SEQ ID NO: 815015 - RNA, 22 nt, Human
ccuggagaccagaggauacuuc

SEQ ID NO: 815016 - RNA, 22 nt, Human
gaggcugcccaacuggagugga

SEQ ID NO: 815017 - RNA, 22 nt, Human
augcugugauuguagaaauauu

SEQ ID NO: 815018 - RNA, 22 nt, Human
ucccaggauguuuauggcuggu

SEQ ID NO: 815019 - RNA, 22 nt, Human
gauuucuucauuuguggugaau

SEQ ID NO: 815020 - RNA, 22 nt, Human
ccacagagcauuagauuucaga

SEQ ID NO: 815021 - RNA, 22 nt, Human
agggcagccauugagggauucu

SEQ ID NO: 815022 - RNA, 22 nt, Human
cucuucuugucucugguuagaa

SEQ ID NO: 815023 - RNA, 22 nt, Human
uugcugaauugaauccuuuggu

SEQ ID NO: 815024 - RNA, 22 nt, Human
ucagggugaaccaggcaggaau

SEQ ID NO: 815025 - RNA, 22 nt, Human
caugcuguguguuuuagcucca

SEQ ID NO: 815026 - RNA, 22 nt, Human
acagucauuagauacaaugucu

SEQ ID NO: 815027 - RNA, 22 nt, Human
guuaaauucgaugauggauaaa

SEQ ID NO: 815028 - RNA, 22 nt, Human
gaggagcuugaggcuaggagcc

SEQ ID NO: 815029 - RNA, 22 nt, Human
ggucagagggugggcugccugu

SEQ ID NO: 815030 - RNA, 22 nt, Human
augcugugcuggcuaaccaugg

SEQ ID NO: 815031 - RNA, 22 nt, Human
aggcaguggaaggagaaagcaa

SEQ ID NO: 815032 - RNA, 22 nt, Human
gagagggauacugaguuuuggu

SEQ ID NO: 815033 - RNA, 22 nt, Human
aagacugucuuuucugagugac

SEQ ID NO: 815034 - RNA, 22 nt, Human
augcugugccuucucugugcca

SEQ ID NO: 815035 - RNA, 22 nt, Human
caggagagcccggguccgggcu

SEQ ID NO: 815036 - RNA, 22 nt, Human
uuugacauggaauaacucauuu

SEQ ID NO: 815037 - RNA, 22 nt, Human
ugaggggagaagcagcagccug

SEQ ID NO: 815038 - RNA, 22 nt, Human
gcuguucucuguaacaugcauu

SEQ ID NO: 815039 - RNA, 22 nt, Human
uuuuagauaguuuaacugcacu

SEQ ID NO: 815040 - RNA, 17 nt, Human
ugauaguucauuuuaag

SEQ ID NO: 815041 - RNA, 22 nt, Human
gcggagggcgagcccgcggagc

SEQ ID NO: 815042 - RNA, 20 nt, Human
uuucugugcccaggucuguu

SEQ ID NO: 815043 - RNA, 23 nt, Human
uuucaacuccugccauuauuucu

SEQ ID NO: 815044 - RNA, 22 nt, Human
aggcagcccugugcuggaugcu

SEQ ID NO: 815045 - RNA, 18 nt, Human
ugcuggguaacuguaugg

SEQ ID NO: 815046 - RNA, 22 nt, Human
caggaggggguggaguuucgcc

SEQ ID NO: 815047 - RNA, 22 nt, Human
acaauacaggcuucuggacuua

SEQ ID NO: 815048 - RNA, 22 nt, Human
uuuccucacuucaugagaguuu

SEQ ID NO: 815049 - RNA, 22 nt, Human
uuuuaacuuaaaauacauagau

SEQ ID NO: 815050 - RNA, 22 nt, Human
caagauggguguugugaugguu

SEQ ID NO: 815051 - RNA, 21 nt, Human
auucugaguugucagucuuca

SEQ ID NO: 815052 - RNA, 22 nt, Human
ugccaggagucaggccaggcag

SEQ ID NO: 815053 - RNA, 20 nt, Human
cccaggaguuugcucuuacu

SEQ ID NO: 815054 - RNA, 22 nt, Human
ggaggaggggugacugaaugcu

SEQ ID NO: 815055 - RNA, 20 nt, Human
cccaggagugagcagcuuua

SEQ ID NO: 815056 - RNA, 22 nt, Human
aggacagcagugcuggcacuug

SEQ ID NO: 815057 - RNA, 18 nt, Human
agcuucccucugagaggg

SEQ ID NO: 815058 - RNA, 22 nt, Human
aacuuucuuggaugucucaaca

SEQ ID NO: 815059 - RNA, 22 nt, Human
ugaaaugaagggcuuguucugg

SEQ ID NO: 815060 - RNA, 22 nt, Human
gagucuuugguaaagucugcug

SEQ ID NO: 815061 - RNA, 22 nt, Human
aauaucaguauauuguaucagu

SEQ ID NO: 815062 - RNA, 22 nt, Human
auacauauaugguacuuccugg

SEQ ID NO: 815063 - RNA, 22 nt, Human
acccaggagcaggcugggcagu

SEQ ID NO: 815064 - RNA, 21 nt, Human
uaauaauuccacuacagagua

SEQ ID NO: 815065 - RNA, 22 nt, Human
aaauguuuugcucccauguggu

SEQ ID NO: 815066 - RNA, 22 nt, Human
cggagaggugggggcagcaucu

SEQ ID NO: 815067 - RNA, 22 nt, Human
uugcuuuguuacugcaguuucc

SEQ ID NO: 815068 - RNA, 22 nt, Human
ggagcuguuggcagcuaucuug

SEQ ID NO: 815069 - RNA, 23 nt, Human
cccaggaguuucacugcaaaggu

SEQ ID NO: 815070 - RNA, 22 nt, Human
ucccaggaaaacacucgaggac

SEQ ID NO: 815071 - RNA, 22 nt, Human
gucaggaucucccaguacauau

SEQ ID NO: 815072 - RNA, 21 nt, Human
uuugaaagugggugauucuuu

SEQ ID NO: 815073 - RNA, 22 nt, Human
ugaaggccucugguacaugcca

SEQ ID NO: 815074 - RNA, 22 nt, Human
ucucuucuaauuuucccgagua

SEQ ID NO: 815075 - RNA, 22 nt, Human
agagggcugcugcacagugcuc

SEQ ID NO: 815076 - RNA, 22 nt, Human
uggcagcuugaaugcagucuuu

SEQ ID NO: 815077 - RNA, 22 nt, Human
cccaggaaaagcagugccagca

SEQ ID NO: 815078 - RNA, 22 nt, Human
acccaggacaaaauaaccaggu

SEQ ID NO: 815079 - RNA, 22 nt, Human
auuugcuuuaagguauaaaagg

SEQ ID NO: 815080 - RNA, 22 nt, Human
uugaaaggaauacagaggccua

SEQ ID NO: 815081 - RNA, 22 nt, Human
cagaaggcuggcagauugagau

SEQ ID NO: 815082 - RNA, 22 nt, Human
caggcagcaucagucugcugua

SEQ ID NO: 815083 - RNA, 22 nt, Human
acuggcaggcugcuggccggcg

SEQ ID NO: 815084 - RNA, 22 nt, Human
gggcagcucggaagugggaaag

SEQ ID NO: 815085 - RNA, 22 nt, Human
ggcucagagaccugcgaucuga

SEQ ID NO: 815086 - RNA, 22 nt, Human
ucugggaacucugucauuuccc

SEQ ID NO: 815087 - RNA, 22 nt, Human
auuuucaaaacaucugcugugu

SEQ ID NO: 815088 - RNA, 22 nt, Human
aaucuguuuaguucugcguaug

SEQ ID NO: 815089 - RNA, 22 nt, Human
ucugucuucaucagcaugugau

SEQ ID NO: 815090 - RNA, 22 nt, Human
gccaucacauccaggcuaccuc

SEQ ID NO: 815091 - RNA, 22 nt, Human
cuggcaguguccagcucgugau

SEQ ID NO: 815092 - RNA, 22 nt, Human
gcaggggcuaaggacacagaga

SEQ ID NO: 815093 - RNA, 21 nt, Human
agggagcuggccacacagccu

SEQ ID NO: 815094 - RNA, 22 nt, Human
gccaggaguguguggcuauguu

SEQ ID NO: 815095 - RNA, 22 nt, Human
acccaggagguggaggcugcag

SEQ ID NO: 815096 - RNA, 22 nt, Human
ucccaggaaugucugaaaguga

SEQ ID NO: 815097 - RNA, 22 nt, Human
uuugaaagagcugauacaugaa

SEQ ID NO: 815098 - RNA, 22 nt, Human
uccuuagagacaagaccaguuu

SEQ ID NO: 815099 - RNA, 22 nt, Human
gaggcaugcagagcuggagcag

SEQ ID NO: 815100 - RNA, 22 nt, Human
uagcucuucaaucacugucucc

SEQ ID NO: 815101 - RNA, 18 nt, Human
agggagagaccgcggguc

SEQ ID NO: 815102 - RNA, 22 nt, Human
agagggauaauauguauuguaa

SEQ ID NO: 815103 - RNA, 22 nt, Human
ucuuugaauucaaacuguucaa

SEQ ID NO: 815104 - RNA, 22 nt, Human
ggaggggagguccagcugaucu

SEQ ID NO: 815105 - RNA, 22 nt, Human
uuucaaauagaaucuuuccaaa

SEQ ID NO: 815106 - RNA, 22 nt, Human
uaauuccaaguugagacaugca

SEQ ID NO: 815107 - RNA, 22 nt, Human
agucccuguacuuuccacugcc

SEQ ID NO: 815108 - RNA, 22 nt, Human
uuuacauuucccucugucaguu

SEQ ID NO: 815109 - RNA, 22 nt, Human
gccaggaggcuuaacuggacag

SEQ ID NO: 815110 - RNA, 17 nt, Human
cucacggaggaugaauc

SEQ ID NO: 815111 - RNA, 22 nt, Human
aggcacagcacaccuggccccc

SEQ ID NO: 815112 - RNA, 22 nt, Human
ggagaagggacagacucagcuu

SEQ ID NO: 815113 - RNA, 22 nt, Human
uugaaaguagcagcugcauaug

SEQ ID NO: 815114 - RNA, 22 nt, Human
ccuggagagagaggccaacugc

SEQ ID NO: 815115 - RNA, 22 nt, Human
aucaggaugacuauaaggcugc

SEQ ID NO: 815116 - RNA, 22 nt, Human
cuuaaauucuuaaugcccucau

SEQ ID NO: 815117 - RNA, 22 nt, Human
aaggcagccuuuguuugauuga

SEQ ID NO: 815118 - RNA, 22 nt, Human
auguuuuugagauacaaacaga

SEQ ID NO: 815119 - RNA, 22 nt, Human
gcugugcuugggaagaaucucu

SEQ ID NO: 815120 - RNA, 22 nt, Human
ccuucauugcaucuuuaagaga

SEQ ID NO: 815121 - RNA, 20 nt, Human
uguuaaaggacacuugcuuu

SEQ ID NO: 815122 - RNA, 22 nt, Human
ugagagggcccagagcacacca

SEQ ID NO: 815123 - RNA, 22 nt, Human
aggcagcuuucagugucucuca

SEQ ID NO: 815124 - RNA, 22 nt, Human
ucucucagaggaagaggcagug

SEQ ID NO: 815125 - RNA, 22 nt, Human
uucaauucuaaacuaauauucu

SEQ ID NO: 815126 - RNA, 22 nt, Human
acugcuuuaucugagaaguccu

SEQ ID NO: 815127 - RNA, 22 nt, Human
ucuucuucccaucccucaaaug

SEQ ID NO: 815128 - RNA, 22 nt, Human
gauuucuugauaauucaaaucc

SEQ ID NO: 815129 - RNA, 20 nt, Human
auccaugagagucuggauuc

SEQ ID NO: 815130 - RNA, 22 nt, Human
gaagcagcugccagagaugucu

SEQ ID NO: 815131 - RNA, 22 nt, Human
uugcaggauuuuagagaugaca

SEQ ID NO: 815132 - RNA, 22 nt, Human
ggcagacuguaauaggagaauu

SEQ ID NO: 815133 - RNA, 22 nt, Human
ucuuagcauuucauaacaacug

SEQ ID NO: 815134 - RNA, 22 nt, Human
ucacacagguuugcaaugauuu

SEQ ID NO: 815135 - RNA, 22 nt, Human
cagauccacccuuguagugaca

SEQ ID NO: 815136 - RNA, 22 nt, Human
uuucacagcuggguggcagagu

SEQ ID NO: 815137 - RNA, 23 nt, Human
agacaguggccgagagguacuag

SEQ ID NO: 815138 - RNA, 22 nt, Human
acagucuugcuguauggucagg

SEQ ID NO: 815139 - RNA, 22 nt, Human
agacaggaugcauacucuuggu

SEQ ID NO: 815140 - RNA, 22 nt, Human
auugaaagauauacuguucuca

SEQ ID NO: 815141 - RNA, 22 nt, Human
gugcagcugcaggagucagguc

SEQ ID NO: 815142 - RNA, 22 nt, Human
aggcaguuuauccccagagccu

SEQ ID NO: 815143 - RNA, 22 nt, Human
gcccaggaucugcucagaucau

SEQ ID NO: 815144 - RNA, 22 nt, Human
aagcagcuuuugaagagugagg

SEQ ID NO: 815145 - RNA, 22 nt, Human
cugcaucaguggauaugauggu

SEQ ID NO: 815146 - RNA, 22 nt, Human
aacaguaaagacagaauuuauc

SEQ ID NO: 815147 - RNA, 22 nt, Human
uguuuucagucauauagcaggu

SEQ ID NO: 815148 - RNA, 22 nt, Human
cuggcaaguacugggccagcuc

SEQ ID NO: 815149 - RNA, 22 nt, Human
cccaggagcuucucucugccuc

SEQ ID NO: 815150 - RNA, 22 nt, Human
ggguggagcuuggacaccagua

SEQ ID NO: 815151 - RNA, 22 nt, Human
uucaaacaguguagaauauaug

SEQ ID NO: 815152 - RNA, 22 nt, Human
cuucucaguugcaagugucaga

SEQ ID NO: 815153 - RNA, 22 nt, Human
ucucacuuuccagacuuuucaa

SEQ ID NO: 815154 - RNA, 22 nt, Human
gcaggcagagguggaggagaca

SEQ ID NO: 815155 - RNA, 22 nt, Human
uaucuguuguccaugcagaaag

SEQ ID NO: 815156 - RNA, 22 nt, Human
agggcaguucaacuucauagug

SEQ ID NO: 815157 - RNA, 22 nt, Human
auucuucauuuacuguuacuug

SEQ ID NO: 815158 - RNA, 23 nt, Human
ugcaugugaauucauacuuguuu

SEQ ID NO: 815159 - RNA, 22 nt, Human
ucaugcuuaaaagacacuugag

SEQ ID NO: 815160 - RNA, 22 nt, Human
gaauacauuggaaaucagaaua

SEQ ID NO: 815161 - RNA, 22 nt, Human
ggaaaugacuuggugcuucguu

SEQ ID NO: 815162 - RNA, 22 nt, Human
ccaggagagcauugcacagagg

SEQ ID NO: 815163 - RNA, 22 nt, Human
uccagaaacuuuuccagucuca

SEQ ID NO: 815164 - RNA, 22 nt, Human
auggaaagugcauggaagucau

SEQ ID NO: 815165 - RNA, 19 nt, Human
acauuuaaauucagaucuc

SEQ ID NO: 815166 - RNA, 22 nt, Human
ggcagcuuucucacccaugacc

SEQ ID NO: 815167 - RNA, 22 nt, Human
aucauuacuccuguaaaauugu

SEQ ID NO: 815168 - RNA, 22 nt, Human
aauaauuagugggacagagaac

SEQ ID NO: 815169 - RNA, 22 nt, Human
uuguuugaggucacugauauuu

SEQ ID NO: 815170 - RNA, 22 nt, Human
caugauuuugucuuguguuaau

SEQ ID NO: 815171 - RNA, 22 nt, Human
aaggcagcaggauuuggugacu

SEQ ID NO: 815172 - RNA, 22 nt, Human
guccucuggaagaugaguucuu

SEQ ID NO: 815173 - RNA, 22 nt, Human
uggaaggagacugggaagugug

SEQ ID NO: 815174 - RNA, 21 nt, Human
aggcagcuggaaggccuggcu

SEQ ID NO: 815175 - RNA, 22 nt, Human
aauauaauuuuauuccuagagu

SEQ ID NO: 815176 - RNA, 22 nt, Human
aggcagacucaauggcuagaua

SEQ ID NO: 815177 - RNA, 22 nt, Human
gcccaggaguucaagucuagug

SEQ ID NO: 815178 - RNA, 18 nt, Human
gagaggagccagaauuuu

SEQ ID NO: 815179 - RNA, 22 nt, Human
gaggggagacagggaaaucagu

SEQ ID NO: 815180 - RNA, 22 nt, Human
ugugaaagcaagucuaguucuc

SEQ ID NO: 815181 - RNA, 22 nt, Human
ugcauggacucaucagacaaga

SEQ ID NO: 815182 - RNA, 22 nt, Human
cugacuguaauucuguucuuaa

SEQ ID NO: 815183 - RNA, 22 nt, Human
acaucucaugaaugauaaauca

SEQ ID NO: 815184 - RNA, 22 nt, Human
gucuucaauagagccucaauuu

SEQ ID NO: 815185 - RNA, 22 nt, Human
ugaaguuauauauguugaaaau

SEQ ID NO: 815186 - RNA, 22 nt, Human
auugcuguggaaauauaagaug

SEQ ID NO: 815187 - RNA, 22 nt, Human
uuccuuaguugacugucuuagu

SEQ ID NO: 815188 - RNA, 22 nt, Human
auguuauuaaaguacagauucu

SEQ ID NO: 815189 - RNA, 22 nt, Human
gcaggcaguuauuuaguagaau

SEQ ID NO: 815190 - RNA, 22 nt, Human
gagaggaguagacacuuugguu

SEQ ID NO: 815191 - RNA, 22 nt, Human
auuucagaugaccaaauggaaa

SEQ ID NO: 815192 - RNA, 23 nt, Human
cugcccugaucuugaucuauugu

SEQ ID NO: 815193 - RNA, 19 nt, Human
uuugaaagaguuuuauugg

SEQ ID NO: 815194 - RNA, 22 nt, Human
gugcugugugauccaugcuggc

SEQ ID NO: 815195 - RNA, 22 nt, Human
acacauuucucuuuuuguaagu

SEQ ID NO: 815196 - RNA, 22 nt, Human
cuuaagauuugagauaccuaau

SEQ ID NO: 815197 - RNA, 22 nt, Human
auucuucacauaagugcuguac

SEQ ID NO: 815198 - RNA, 22 nt, Human
uaaagcacauaucuuacaauaa

SEQ ID NO: 815199 - RNA, 22 nt, Human
gcccaggaagugacucagaugu

SEQ ID NO: 815200 - RNA, 23 nt, Human
guaaaauacgcagugcaguguga

SEQ ID NO: 815201 - RNA, 22 nt, Human
gacagcuguggagaggcaugug

SEQ ID NO: 815202 - RNA, 22 nt, Human
uggagcugggguuugaaucugg

SEQ ID NO: 815203 - RNA, 20 nt, Human
cugagagucugugcuuaguc

SEQ ID NO: 815204 - RNA, 22 nt, Human
ggugaagguggaacgcagagca

SEQ ID NO: 815205 - RNA, 22 nt, Human
uugggcucaggaguuugagacc

SEQ ID NO: 815206 - RNA, 22 nt, Human
agugugucugaucacuugugag

SEQ ID NO: 815207 - RNA, 22 nt, Human
cauuuccacuucugaaaacugg

SEQ ID NO: 815208 - RNA, 22 nt, Human
ucacauucucagcaucuauaca

SEQ ID NO: 815209 - RNA, 22 nt, Human
caggguggcacucagcgcaucu

SEQ ID NO: 815210 - RNA, 22 nt, Human
cauucucaauaguagaugagua

SEQ ID NO: 815211 - RNA, 22 nt, Human
caggcagccugagggaucuggg

SEQ ID NO: 815212 - RNA, 22 nt, Human
acagaauugaaaguauaaucug

SEQ ID NO: 815213 - RNA, 22 nt, Human
cugcuguguggauucaauggcu

SEQ ID NO: 815214 - RNA, 22 nt, Human
ugcuucagaggaaaggcaaaag

SEQ ID NO: 815215 - RNA, 22 nt, Human
aggcaggcucaggcccaugcuu

SEQ ID NO: 815216 - RNA, 22 nt, Human
cugcugagaaaagacugaggga

SEQ ID NO: 815217 - RNA, 22 nt, Human
uuguuuuaucuuucuacagacu

SEQ ID NO: 815218 - RNA, 20 nt, Human
ggcaggcuuuauauggaggg

SEQ ID NO: 815219 - RNA, 22 nt, Human
uuucagaaagcugaacauauga

SEQ ID NO: 815220 - RNA, 22 nt, Human
gcuggcuugauaguuucugcuu

SEQ ID NO: 815221 - RNA, 22 nt, Human
uuaggaguccagaugucuuggg

SEQ ID NO: 815222 - RNA, 22 nt, Human
guacauuucucuuguucuuauu

SEQ ID NO: 815223 - RNA, 22 nt, Human
aggcugcuucaauggauaagau

SEQ ID NO: 815224 - RNA, 22 nt, Human
ugaggcaguauuuuagugacuu

SEQ ID NO: 815225 - RNA, 22 nt, Human
cagcugcaguucaaugcuugcu

SEQ ID NO: 815226 - RNA, 22 nt, Human
ggaggcugagaaguccaagauc

SEQ ID NO: 815227 - RNA, 22 nt, Human
cucccaggguagggagagacua

SEQ ID NO: 815228 - RNA, 22 nt, Human
cugaacuuauugagugcuugcu

SEQ ID NO: 815229 - RNA, 20 nt, Human
aggacagcagcugccacuug

SEQ ID NO: 815230 - RNA, 22 nt, Human
agucacuguucugucaugucaa

SEQ ID NO: 815231 - RNA, 22 nt, Human
ucaggagauguaaccuuagcug

SEQ ID NO: 815232 - RNA, 22 nt, Human
gcccaggaguucaaggcugcag

SEQ ID NO: 815233 - RNA, 22 nt, Human
uccaggaggcaccuuuggacca

SEQ ID NO: 815234 - RNA, 22 nt, Human
ucucuucuauuugagacuauuu

SEQ ID NO: 815235 - RNA, 17 nt, Human
uucucugagcuguauug

SEQ ID NO: 815236 - RNA, 22 nt, Human
uuuuaucuucauuccuaucuac

SEQ ID NO: 815237 - RNA, 21 nt, Human
cccaggaguccuauuuaaaug

SEQ ID NO: 815238 - RNA, 22 nt, Human
aggcagcuaagauggauaauga

SEQ ID NO: 815239 - RNA, 22 nt, Human
ucaggagagagaaauuggggcu

SEQ ID NO: 815240 - RNA, 22 nt, Human
aggcagucuaguccccaggcaa

SEQ ID NO: 815241 - RNA, 22 nt, Human
ucuucuccagugcuucugcaca

SEQ ID NO: 815242 - RNA, 22 nt, Human
cagagacauuaagugccaugau

SEQ ID NO: 815243 - RNA, 22 nt, Human
auauuguugacuauaagaguaa

SEQ ID NO: 815244 - RNA, 22 nt, Human
aggaggggcaaugauagucugg

SEQ ID NO: 815245 - RNA, 22 nt, Human
gaucuguuucauucacagucug

SEQ ID NO: 815246 - RNA, 22 nt, Human
ccagaggaaaaauaucucccua

SEQ ID NO: 815247 - RNA, 22 nt, Human
ggggcagcucccgagggcagga

SEQ ID NO: 815248 - RNA, 22 nt, Human
uuugacaugcaaagcacuuuag

SEQ ID NO: 815249 - RNA, 22 nt, Human
cagugaaaucacaacuuuaguu

SEQ ID NO: 815250 - RNA, 22 nt, Human
auugcuaggaacagguugcacc

SEQ ID NO: 815251 - RNA, 22 nt, Human
auucuucacaccuguuccuguu

SEQ ID NO: 815252 - RNA, 22 nt, Human
cuggcugugcagucuuccagaa

SEQ ID NO: 815253 - RNA, 22 nt, Human
ggacagcugcuuucaggccaca

SEQ ID NO: 815254 - RNA, 22 nt, Human
gcccaggacucagggugucgcg

SEQ ID NO: 815255 - RNA, 22 nt, Human
ggagcugugcagugacuacaga

SEQ ID NO: 815256 - RNA, 22 nt, Human
uauuuccaagcugaauccaaug

SEQ ID NO: 815257 - RNA, 22 nt, Human
uuucaaagucaauaucauuacc

SEQ ID NO: 815258 - RNA, 22 nt, Human
agagagcauugaggaaaucuuc

SEQ ID NO: 815259 - RNA, 22 nt, Human
uugcugugucauuuguuuaauc

SEQ ID NO: 815260 - RNA, 22 nt, Human
uagcacauacauaauagauaga

SEQ ID NO: 815261 - RNA, 22 nt, Human
cccaggagguggagguugcggu

SEQ ID NO: 815262 - RNA, 20 nt, Human
gaagcagcuucauguagaca

SEQ ID NO: 815263 - RNA, 22 nt, Human
gcuacugauugaccuuggagag

SEQ ID NO: 815264 - RNA, 22 nt, Human
uuacaagauaaccugaugcugu

SEQ ID NO: 815265 - RNA, 23 nt, Human
aaugauuucaugaugauagcagc

SEQ ID NO: 815266 - RNA, 22 nt, Human
agucucugcaugccugcugugc

SEQ ID NO: 815267 - RNA, 22 nt, Human
augcugugucaggaauuugaua

SEQ ID NO: 815268 - RNA, 22 nt, Human
ugaggggagguuggggcacauc

SEQ ID NO: 815269 - RNA, 22 nt, Human
caggcagcucgaugccuuguug

SEQ ID NO: 815270 - RNA, 20 nt, Human
aggagggaccuggauuggcg

SEQ ID NO: 815271 - RNA, 20 nt, Human
uacagaaugcaauaaaaugg

SEQ ID NO: 815272 - RNA, 22 nt, Human
gggauggggagcuggaaagggg

SEQ ID NO: 815273 - RNA, 22 nt, Human
gccauuuucugucuuguuuauu

SEQ ID NO: 815274 - RNA, 22 nt, Human
auguuuccauuuucuuguauca

SEQ ID NO: 815275 - RNA, 22 nt, Human
guagggagcccagagcccagug

SEQ ID NO: 815276 - RNA, 22 nt, Human
ccccaggagcuuguuuuagaga

SEQ ID NO: 815277 - RNA, 22 nt, Human
cuucaggauuuaggaagaugaa

SEQ ID NO: 815278 - RNA, 22 nt, Human
auuugcuugugcuaugaaaguu

SEQ ID NO: 815279 - RNA, 22 nt, Human
ccugcugugaagccaggccugu

SEQ ID NO: 815280 - RNA, 22 nt, Human
caggauggucucgaucuccuga

SEQ ID NO: 815281 - RNA, 22 nt, Human
uuucaguguaucuuccaaaagc

SEQ ID NO: 815282 - RNA, 22 nt, Human
uugaacaguccuaagagacccu

SEQ ID NO: 815283 - RNA, 22 nt, Human
gaugccucuuuuggcugaauua

SEQ ID NO: 815284 - RNA, 22 nt, Human
acugugugacuguuauuacugu

SEQ ID NO: 815285 - RNA, 22 nt, Human
aaauaguucagcuuguaaaccc

SEQ ID NO: 815286 - RNA, 22 nt, Human
cauucauuagaauagauaugua

SEQ ID NO: 815287 - RNA, 22 nt, Human
ugugccagccucuggcuguguc

SEQ ID NO: 815288 - RNA, 22 nt, Human
caaggccaguucaccaagggca

SEQ ID NO: 815289 - RNA, 22 nt, Human
cuucugugcuucacaguugcca

SEQ ID NO: 815290 - RNA, 23 nt, Human
aguaaagcaauuguuggcgagag

SEQ ID NO: 815291 - RNA, 22 nt, Human
cccgggaggaggaaguugcagu

SEQ ID NO: 815292 - RNA, 22 nt, Human
uuugcaaagugacuauuauaug

SEQ ID NO: 815293 - RNA, 22 nt, Human
ccaggagcagauauggacauaa

SEQ ID NO: 815294 - RNA, 22 nt, Human
cucaggaugcaauuccaucaag

SEQ ID NO: 815295 - RNA, 22 nt, Human
gaggcagcaaaauauaucauaa

SEQ ID NO: 815296 - RNA, 22 nt, Human
cccucuacagggaagcgcuuuc

SEQ ID NO: 815297 - RNA, 22 nt, Human
uugaauaggacucagcagugau

SEQ ID NO: 815298 - RNA, 22 nt, Human
ucucauugguauauacaugugu

SEQ ID NO: 815299 - RNA, 22 nt, Human
gccaggaggcugcuguguaggc

SEQ ID NO: 815300 - RNA, 22 nt, Human
uaauuauuaugacaacaauugc

SEQ ID NO: 815301 - RNA, 22 nt, Human
gaccuggaggauccucuucuug

SEQ ID NO: 815302 - RNA, 22 nt, Human
ucucuuucuauaugugagucuu

SEQ ID NO: 815303 - RNA, 22 nt, Human
ccuggacucaggcugugggcac

SEQ ID NO: 815304 - RNA, 22 nt, Human
ucauacaucuguccuggagcuc

SEQ ID NO: 815305 - RNA, 23 nt, Human
ccacuagcaccuguucaacuucu

SEQ ID NO: 815306 - RNA, 22 nt, Human
auacauacauguaugcacauac

SEQ ID NO: 815307 - RNA, 23 nt, Human
cuugcaggaagcagauggcacac

SEQ ID NO: 815308 - RNA, 22 nt, Human
ugugcaggugcaggaagggggc

SEQ ID NO: 815309 - RNA, 22 nt, Human
uagcuuuccuuguugccugugc

SEQ ID NO: 815310 - RNA, 22 nt, Human
aggcacaggccucagcacccag

SEQ ID NO: 815311 - RNA, 22 nt, Human
uucaggaugaaagugugcaaca

SEQ ID NO: 815312 - RNA, 22 nt, Human
ggggcagcuaccggaaguaggg

SEQ ID NO: 815313 - RNA, 22 nt, Human
agugagaguauuaaugugaacu

SEQ ID NO: 815314 - RNA, 17 nt, Human
aagagaggcugagcugg

SEQ ID NO: 815315 - RNA, 22 nt, Human
uagugcuugagucucuccguac

SEQ ID NO: 815316 - RNA, 22 nt, Human
ucaggagaaagccaauuagagu

SEQ ID NO: 815317 - RNA, 22 nt, Human
uucauugugauucuuggcuagc

SEQ ID NO: 815318 - RNA, 22 nt, Human
uuugcaguagacaucuuauuuu

SEQ ID NO: 815319 - RNA, 21 nt, Human
aaauacagaaacuuguuuuca

SEQ ID NO: 815320 - RNA, 22 nt, Human
uuuuccagagcugucucuugca

SEQ ID NO: 815321 - RNA, 23 nt, Human
aucauucuccaaucuggagcagg

SEQ ID NO: 815322 - RNA, 21 nt, Human
gcucagaguauugcacuguuu

SEQ ID NO: 815323 - RNA, 22 nt, Human
uuugacauugccaauuugcuca

SEQ ID NO: 815324 - RNA, 22 nt, Human
ggcagcuuguccuucaggagag

SEQ ID NO: 815325 - RNA, 22 nt, Human
ugaggcaggagaauggcgggaa

SEQ ID NO: 815326 - RNA, 22 nt, Human
ucaggagaaucagggcuguccu

SEQ ID NO: 815327 - RNA, 22 nt, Human
aucuugcauuugcuaaaaugca

SEQ ID NO: 815328 - RNA, 22 nt, Human
uagugcuuuaggccugaguguc

SEQ ID NO: 815329 - RNA, 22 nt, Human
gcucacugcaaccucugcuucc

SEQ ID NO: 815330 - RNA, 22 nt, Human
ucaagugcuugugagguauuug

SEQ ID NO: 815331 - RNA, 22 nt, Human
ucucacuggguauaaaugagua

SEQ ID NO: 815332 - RNA, 22 nt, Human
auggagggugguaagacagaga

SEQ ID NO: 815333 - RNA, 22 nt, Human
gagagcaggaggcagcgggacg

SEQ ID NO: 815334 - RNA, 22 nt, Human
ucaggagaacuuccuucuaccc

SEQ ID NO: 815335 - RNA, 22 nt, Human
gaucuucuauguaaugaagugu

SEQ ID NO: 815336 - RNA, 22 nt, Human
uccaggagggguaggcaguaug

SEQ ID NO: 815337 - RNA, 22 nt, Human
guaggcagugguuggaagagaa

SEQ ID NO: 815338 - RNA, 22 nt, Human
cucagugugaaugcucaguaaa

SEQ ID NO: 815339 - RNA, 17 nt, Human
uggcagcugaaagcucu

SEQ ID NO: 815340 - RNA, 22 nt, Human
acuuugcagggcuugauaucca

SEQ ID NO: 815341 - RNA, 22 nt, Human
caggcagcugcgacaagagagc

SEQ ID NO: 815342 - RNA, 22 nt, Human
gaacccaggcuuuugaggcugu

SEQ ID NO: 815343 - RNA, 22 nt, Human
aggcaguggcugagaccagggg

SEQ ID NO: 815344 - RNA, 22 nt, Human
aauuuccagaucagaugacuca

SEQ ID NO: 815345 - RNA, 22 nt, Human
gucuauauauugcuugaauaau

SEQ ID NO: 815346 - RNA, 22 nt, Human
gccaggaggucagccccucaac

SEQ ID NO: 815347 - RNA, 22 nt, Human
auuccaguuggguucuaauaca

SEQ ID NO: 815348 - RNA, 22 nt, Human
aaaguauuugugauuuuuacca

SEQ ID NO: 815349 - RNA, 22 nt, Human
augaggcaucugcagucacuag

SEQ ID NO: 815350 - RNA, 22 nt, Human
auuaaauuagcaaacugugaaa

SEQ ID NO: 815351 - RNA, 22 nt, Human
ggaggugggauuaggaccuaaa

SEQ ID NO: 815352 - RNA, 22 nt, Human
cuucagaaugggacuguguuug

SEQ ID NO: 815353 - RNA, 22 nt, Human
uagugcuuaacacaaagugauu

SEQ ID NO: 815354 - RNA, 22 nt, Human
ugaggcagaguaagauacauga

SEQ ID NO: 815355 - RNA, 22 nt, Human
gaggccaaucaauagggcaaua

SEQ ID NO: 815356 - RNA, 22 nt, Human
augaggcauuccacucaaacuc

SEQ ID NO: 815357 - RNA, 22 nt, Human
ucauuucucccggccaaaaacu

SEQ ID NO: 815358 - RNA, 22 nt, Human
uaucuaaaggauuuaauuuagu

SEQ ID NO: 815359 - RNA, 22 nt, Human
gaccaaggaagaggggagccag

SEQ ID NO: 815360 - RNA, 22 nt, Human
uggaggaaaaaaccaggcagag

SEQ ID NO: 815361 - RNA, 22 nt, Human
cucacugacgaggaagcugaga

SEQ ID NO: 815362 - RNA, 22 nt, Human
agagagagggaaacugcuaaac

SEQ ID NO: 815363 - RNA, 22 nt, Human
aaggcaguuugggccaccaucu

SEQ ID NO: 815364 - RNA, 22 nt, Human
cccaggaaaugggcucuugccu

SEQ ID NO: 815365 - RNA, 22 nt, Human
ucucacugcaaauauuauguau

SEQ ID NO: 815366 - RNA, 23 nt, Human
auuucuaggggauuuucuggugc

SEQ ID NO: 815367 - RNA, 22 nt, Human
uuucaugaggggcaaaaucuca

SEQ ID NO: 815368 - RNA, 22 nt, Human
cagacaggaauucuggcguggu

SEQ ID NO: 815369 - RNA, 22 nt, Human
aagcaccugcaguugacaaaaa

SEQ ID NO: 815370 - RNA, 18 nt, Human
gcaggagauggguggggu

SEQ ID NO: 815371 - RNA, 22 nt, Human
aggcacaggaaugucauccagu

SEQ ID NO: 815372 - RNA, 22 nt, Human
gugagggguggcugagcaguuu

SEQ ID NO: 815373 - RNA, 20 nt, Human
gagauggacagaugaagggg

SEQ ID NO: 815374 - RNA, 22 nt, Human
cugagggugcuauucuugccuu

SEQ ID NO: 815375 - RNA, 22 nt, Human
acaggagaaaucuggucaaaag

SEQ ID NO: 815376 - RNA, 22 nt, Human
guguugaugacauuuuagaaac

SEQ ID NO: 815377 - RNA, 22 nt, Human
ccccaggagaaaucuuaaacua

SEQ ID NO: 815378 - RNA, 21 nt, Human
gauugaaaccauggcagugag

SEQ ID NO: 815379 - RNA, 22 nt, Human
cugucauuuaagacauucugga

SEQ ID NO: 815380 - RNA, 22 nt, Human
uuucaaaguugggaauuguaau

SEQ ID NO: 815381 - RNA, 22 nt, Human
gaggcugcuguuagcccugggc

SEQ ID NO: 815382 - RNA, 22 nt, Human
ggacagcucugccaggagcuca

SEQ ID NO: 815383 - RNA, 17 nt, Human
guccuacccauggucua

SEQ ID NO: 815384 - RNA, 22 nt, Human
cccaggaggcagagguugcagu

SEQ ID NO: 815385 - RNA, 22 nt, Human
uagaaaugugauaauagcuuaa

SEQ ID NO: 815386 - RNA, 22 nt, Human
cacaaaugugcagaaaugugag

SEQ ID NO: 815387 - RNA, 23 nt, Human
ucccaggaaucugcauuuuuaac

SEQ ID NO: 815388 - RNA, 22 nt, Human
ucaggagaguguucaguggagg

SEQ ID NO: 815389 - RNA, 22 nt, Human
uauuucagcacaugggauaggu

SEQ ID NO: 815390 - RNA, 22 nt, Human
aggcaacuuuuggggaugaugg

SEQ ID NO: 815391 - RNA, 22 nt, Human
cauuuguaguaucuguuuauau

SEQ ID NO: 815392 - RNA, 22 nt, Human
agcugcuacugcucugccagag

SEQ ID NO: 815393 - RNA, 22 nt, Human
cucaugucuucacccauucuaa

SEQ ID NO: 815394 - RNA, 22 nt, Human
cccaggaagaggggucaggugu

SEQ ID NO: 815395 - RNA, 22 nt, Human
agcugcccuguggggaggguug

SEQ ID NO: 815396 - RNA, 22 nt, Human
augaaacaguguguauagcaaa

SEQ ID NO: 815397 - RNA, 22 nt, Human
auuucacucauucauguuacuu

SEQ ID NO: 815398 - RNA, 22 nt, Human
uccauuuuguagguaugcuaca

SEQ ID NO: 815399 - RNA, 22 nt, Human
auuaaauuaaguggcuaauuua

SEQ ID NO: 815400 - RNA, 22 nt, Human
uuugaagucagacacugcuuug

SEQ ID NO: 815401 - RNA, 22 nt, Human
acaugcauaggagaagucuuua

SEQ ID NO: 815402 - RNA, 22 nt, Human
ggaggggucucuagcgaggaga

SEQ ID NO: 815403 - RNA, 22 nt, Human
cccaggaaugagcaggcagggg

SEQ ID NO: 815404 - RNA, 22 nt, Human
ccuugcauauauuauaucuuug

SEQ ID NO: 815405 - RNA, 19 nt, Human
uggggcuguguuuugaccc

SEQ ID NO: 815406 - RNA, 22 nt, Human
gaaguacaguuuuaucuagcca

SEQ ID NO: 815407 - RNA, 22 nt, Human
aggcaagcgcagaagcggagga

SEQ ID NO: 815408 - RNA, 22 nt, Human
cccaggagauggagguugcagu

SEQ ID NO: 815409 - RNA, 20 nt, Human
cucaggauugucuagccccu

SEQ ID NO: 815410 - RNA, 22 nt, Human
uuuugugagcccauaaaugcca

SEQ ID NO: 815411 - RNA, 22 nt, Human
uuugagauggagucuugcucug

SEQ ID NO: 815412 - RNA, 22 nt, Human
cccaggagacagaaacagaggu

SEQ ID NO: 815413 - RNA, 22 nt, Human
uggcagcugauuagauggugcc

SEQ ID NO: 815414 - RNA, 23 nt, Human
auucuucauuaucuucuagaaaa

SEQ ID NO: 815415 - RNA, 19 nt, Human
ucucacaguuuccuugccu

SEQ ID NO: 815416 - RNA, 23 nt, Human
auuugagaaaguauuuuuaagac

SEQ ID NO: 815417 - RNA, 22 nt, Human
ccucuucuaggacguccuugug

SEQ ID NO: 815418 - RNA, 22 nt, Human
ugaggggagcccgcccuggacg

SEQ ID NO: 815419 - RNA, 22 nt, Human
aguuugaauugaaaugcagaug

SEQ ID NO: 815420 - RNA, 22 nt, Human
auauaauacaaccugcuaagug

SEQ ID NO: 815421 - RNA, 22 nt, Human
uucaggaucacuaaacccucca

SEQ ID NO: 815422 - RNA, 22 nt, Human
agaccauagggaccucagguug

SEQ ID NO: 815423 - RNA, 22 nt, Human
aauccugugugacucuggggag

SEQ ID NO: 815424 - RNA, 22 nt, Human
ggcuuggaaauugcaggacaca

SEQ ID NO: 815425 - RNA, 22 nt, Human
aaggcaguaaaaucuaccuugc

SEQ ID NO: 815426 - RNA, 22 nt, Human
cccaggaggcagauguugcagu

SEQ ID NO: 815427 - RNA, 22 nt, Human
aaaggccaauaaagacaagcug

SEQ ID NO: 815428 - RNA, 22 nt, Human
cagcaggagcagucagacuccu

SEQ ID NO: 815429 - RNA, 22 nt, Human
acuugcauuauauuuaucacaa

SEQ ID NO: 815430 - RNA, 22 nt, Human
ugaaucauggauaaauagcuua

SEQ ID NO: 815431 - RNA, 22 nt, Human
acauuuuuauucaucaaagcag

SEQ ID NO: 815432 - RNA, 22 nt, Human
uccuuagagauacugucuugaa

SEQ ID NO: 815433 - RNA, 22 nt, Human
gaaacugugaggaucuuaacuu

SEQ ID NO: 815434 - RNA, 22 nt, Human
gaggccaggacaugaaagcuga

SEQ ID NO: 815435 - RNA, 22 nt, Human
ucugcaggcucuagaugagguu

SEQ ID NO: 815436 - RNA, 22 nt, Human
uucauguguauggaacauuuuu

SEQ ID NO: 815437 - RNA, 22 nt, Human
uaucaucuuguugucaugcagc

SEQ ID NO: 815438 - RNA, 20 nt, Human
cccaggagcugugccccauc

SEQ ID NO: 815439 - RNA, 19 nt, Human
cccaggaggcggagguugc

SEQ ID NO: 815440 - RNA, 22 nt, Human
cucccagggucuaggcugcugg

SEQ ID NO: 815441 - RNA, 22 nt, Human
aucuuguuauaagagauaaugg

SEQ ID NO: 815442 - RNA, 22 nt, Human
ugccuggauucgguuguuguca

SEQ ID NO: 815443 - RNA, 21 nt, Human
uucuucuuggacuguuuuggc

SEQ ID NO: 815444 - RNA, 22 nt, Human
agaccgagaaguucuccaggcc

SEQ ID NO: 815445 - RNA, 22 nt, Human
guuuucugauuagcaaaucuga

SEQ ID NO: 815446 - RNA, 17 nt, Human
agagagagcaugccacc

SEQ ID NO: 815447 - RNA, 22 nt, Human
uucuuugaguuaguacagucca

SEQ ID NO: 815448 - RNA, 23 nt, Human
acauacauggagauaaagugaug

SEQ ID NO: 815449 - RNA, 22 nt, Human
aaggccagccugagagcuaaca

SEQ ID NO: 815450 - RNA, 22 nt, Human
uccauuuuucaugacuccucaa

SEQ ID NO: 815451 - RNA, 22 nt, Human
auuauuauuguugauguuaggg

SEQ ID NO: 815452 - RNA, 22 nt, Human
uuucaaagaguuguaaauuacu

SEQ ID NO: 815453 - RNA, 19 nt, Human
ucucugcuucucuuggcau

SEQ ID NO: 815454 - RNA, 22 nt, Human
uuacuuugcuuucucauuacag

SEQ ID NO: 815455 - RNA, 22 nt, Human
uccaggaguccugggagugauu

SEQ ID NO: 815456 - RNA, 22 nt, Human
ucuucacauggaacaugaagcu

SEQ ID NO: 815457 - RNA, 22 nt, Human
caggcagcugaggacuuugcua

SEQ ID NO: 815458 - RNA, 22 nt, Human
aaaugaugcucacagauuagug

SEQ ID NO: 815459 - RNA, 22 nt, Human
aggguccugggugcaguugcuu

SEQ ID NO: 815460 - RNA, 22 nt, Human
augugaggaagaaagagguaag

SEQ ID NO: 815461 - RNA, 22 nt, Human
gagcgauguggguauguagaag

SEQ ID NO: 815462 - RNA, 22 nt, Human
ucucuguacaguacaugccgug

SEQ ID NO: 815463 - RNA, 22 nt, Human
cucacugucuguacuagcugau

SEQ ID NO: 815464 - RNA, 22 nt, Human
uucucuuuugugaugugagaug

SEQ ID NO: 815465 - RNA, 22 nt, Human
aggagaggaaucauuauuacaa

SEQ ID NO: 815466 - RNA, 22 nt, Human
acauuucuaguuguucaucucc

SEQ ID NO: 815467 - RNA, 22 nt, Human
cucuccucagaacaggcccucu

SEQ ID NO: 815468 - RNA, 20 nt, Human
aggaagcugagauguagagg

SEQ ID NO: 815469 - RNA, 22 nt, Human
augcagcuucaggauuaugaug

SEQ ID NO: 815470 - RNA, 22 nt, Human
cagaggcagccgggggagaacg

SEQ ID NO: 815471 - RNA, 22 nt, Human
agcccagggacagggcggaugu

SEQ ID NO: 815472 - RNA, 22 nt, Human
uccucagaaaccccugugaggu

SEQ ID NO: 815473 - RNA, 22 nt, Human
cuacccagcaccuaggcugccu

SEQ ID NO: 815474 - RNA, 22 nt, Human
cugccaucugagccaaaagugc

SEQ ID NO: 815475 - RNA, 22 nt, Human
ucuuuggaucccaacuggcugg

SEQ ID NO: 815476 - RNA, 22 nt, Human
uggcagcuguguccagguagaa

SEQ ID NO: 815477 - RNA, 21 nt, Human
uguaaguuucaucugaauugg

SEQ ID NO: 815478 - RNA, 19 nt, Human
uauggcaggccgaggcacu

SEQ ID NO: 815479 - RNA, 22 nt, Human
agaccaagaaaggaugaggauc

SEQ ID NO: 815480 - RNA, 22 nt, Human
uuuggaauuggcauucuauucu

SEQ ID NO: 815481 - RNA, 22 nt, Human
uggcagcugccauguccacgug

SEQ ID NO: 815482 - RNA, 21 nt, Human
gccaggaguagauuacauuua

SEQ ID NO: 815483 - RNA, 22 nt, Human
ucucaggagccacagcgggagu

SEQ ID NO: 815484 - RNA, 22 nt, Human
ugaggcaggaguucaggcugcg

SEQ ID NO: 815485 - RNA, 19 nt, Human
uuucccagcccuugcugug

SEQ ID NO: 815486 - RNA, 22 nt, Human
uggaagggagugacagucagag

SEQ ID NO: 815487 - RNA, 22 nt, Human
aucugcagaggacaggcgagga

SEQ ID NO: 815488 - RNA, 22 nt, Human
uugaauaguuuuggauagcaua

SEQ ID NO: 815489 - RNA, 22 nt, Human
aagggagguaaagcuauuuaaa

SEQ ID NO: 815490 - RNA, 22 nt, Human
gugguaauuuaauccuacacug

SEQ ID NO: 815491 - RNA, 22 nt, Human
gcagagcuccccaagacaccaa

SEQ ID NO: 815492 - RNA, 22 nt, Human
acacauauucauauguacuuac

SEQ ID NO: 815493 - RNA, 23 nt, Human
uuagagaugauuaaaaaaucuug

SEQ ID NO: 815494 - RNA, 22 nt, Human
augcuguggggagugaggguag

SEQ ID NO: 815495 - RNA, 22 nt, Human
ugaaaugauuauaugguguuug

SEQ ID NO: 815496 - RNA, 22 nt, Human
gcccaggagaggccagggcuga

SEQ ID NO: 815497 - RNA, 22 nt, Human
uagcucuucauuucaucugauu

SEQ ID NO: 815498 - RNA, 21 nt, Human
ugcugaugucagagaagcaag

SEQ ID NO: 815499 - RNA, 22 nt, Human
ccaugagcuucaacugacacag

SEQ ID NO: 815500 - RNA, 22 nt, Human
gaggcagcgggucaggaccgug

SEQ ID NO: 815501 - RNA, 22 nt, Human
uggaguuccuuugaaaggcucu

SEQ ID NO: 815502 - RNA, 22 nt, Human
ccaaaugugccuguuucaacaa

SEQ ID NO: 815503 - RNA, 22 nt, Human
uccaggagugauaaggccacug

SEQ ID NO: 815504 - RNA, 22 nt, Human
gagacagugguugcagaagcuc

SEQ ID NO: 815505 - RNA, 22 nt, Human
ucuccuccuuuuuucaacauag

SEQ ID NO: 815506 - RNA, 22 nt, Human
cacaauuuccuugcuucacuuu

SEQ ID NO: 815507 - RNA, 22 nt, Human
cugcccaggaaggagaggaugg

SEQ ID NO: 815508 - RNA, 22 nt, Human
augcugugccuggaaagcggcu

SEQ ID NO: 815509 - RNA, 22 nt, Human
cccaggaaguggagguugcagu

SEQ ID NO: 815510 - RNA, 22 nt, Human
agcacauucugccuugcuuugc

SEQ ID NO: 815511 - RNA, 22 nt, Human
augcugugaaaaagaaggcuga

SEQ ID NO: 815512 - RNA, 22 nt, Human
uucuuuugggaauuacguaugc

SEQ ID NO: 815513 - RNA, 22 nt, Human
uugaaagaagaagcugcgaugu

SEQ ID NO: 815514 - RNA, 22 nt, Human
gagagucuaggaaccucauaua

SEQ ID NO: 815515 - RNA, 22 nt, Human
gggcagcucagccaccaugcag

SEQ ID NO: 815516 - RNA, 22 nt, Human
gcaucuaaauaaacgugggagu

SEQ ID NO: 815517 - RNA, 22 nt, Human
uuucacauuagauaugucauuu

SEQ ID NO: 815518 - RNA, 22 nt, Human
uagugcuuaauaaauuucagaa

SEQ ID NO: 815519 - RNA, 22 nt, Human
aguaaaucagaccucauuaugu

SEQ ID NO: 815520 - RNA, 22 nt, Human
cagaguggcacucugcuggaug

SEQ ID NO: 815521 - RNA, 22 nt, Human
ucauuucaaugauacuacuaag

SEQ ID NO: 815522 - RNA, 22 nt, Human
auguagagcaguguuguccaau

SEQ ID NO: 815523 - RNA, 22 nt, Human
ucuuuuggaaaugaugugcagg

SEQ ID NO: 815524 - RNA, 21 nt, Human
gcugcccaacccugcaucucc

SEQ ID NO: 815525 - RNA, 22 nt, Human
cagaagaguagcugaacaaguu

SEQ ID NO: 815526 - RNA, 22 nt, Human
cagcugccuucugcgggaaguc

SEQ ID NO: 815527 - RNA, 22 nt, Human
cauuuguuggucagauuguagu

SEQ ID NO: 815528 - RNA, 22 nt, Human
cuguaaauaugaagaauauaug

SEQ ID NO: 815529 - RNA, 22 nt, Human
cagcagaggcacgucugugaau

SEQ ID NO: 815530 - RNA, 22 nt, Human
aaccauuugccauuaucuuaag

SEQ ID NO: 815531 - RNA, 22 nt, Human
cagauggaacacagaaaggaga

SEQ ID NO: 815532 - RNA, 20 nt, Human
caggaugauuggacacgaug

SEQ ID NO: 815533 - RNA, 22 nt, Human
uucuuacagaguuuacagagcc

SEQ ID NO: 815534 - RNA, 22 nt, Human
cagaguggcgacccccucagcu

SEQ ID NO: 815535 - RNA, 23 nt, Human
accaggaguugucucaggaaaca

SEQ ID NO: 815536 - RNA, 20 nt, Human
auuuggcaugaaguauugau

SEQ ID NO: 815537 - RNA, 22 nt, Human
gcaggagacaacuguaaggaga

SEQ ID NO: 815538 - RNA, 22 nt, Human
agaaaugaaaccaaagccuaga

SEQ ID NO: 815539 - RNA, 22 nt, Human
ggugaagggccuuaggagacag

SEQ ID NO: 815540 - RNA, 22 nt, Human
cugccuccugccgugcagcuuc

SEQ ID NO: 815541 - RNA, 22 nt, Human
ugacaguuaagguauacauuca

SEQ ID NO: 815542 - RNA, 22 nt, Human
caaauaguaugagcaaugauuc

SEQ ID NO: 815543 - RNA, 22 nt, Human
cuguuucaagugaagucagaca

SEQ ID NO: 815544 - RNA, 22 nt, Human
ucuucccuaaucaccaucuuca

SEQ ID NO: 815545 - RNA, 22 nt, Human
gacagguggggaaacuaaggua

SEQ ID NO: 815546 - RNA, 22 nt, Human
uuucaaacauaucuucauuacu

SEQ ID NO: 815547 - RNA, 22 nt, Human
auugaaaggcaaaguaggaagc

SEQ ID NO: 815548 - RNA, 22 nt, Human
acccaggauagagugcugcagu

SEQ ID NO: 815549 - RNA, 22 nt, Human
agugcuuucuugcuccaucagu

SEQ ID NO: 815550 - RNA, 22 nt, Human
gaagcagcaaguauaggacagg

SEQ ID NO: 815551 - RNA, 22 nt, Human
uacaucauaauaauacuuagaa

SEQ ID NO: 815552 - RNA, 22 nt, Human
uccugucuaaagaccugcaggc

SEQ ID NO: 815553 - RNA, 22 nt, Human
ccagggaguuuccaaucugaga

SEQ ID NO: 815554 - RNA, 22 nt, Human
auacacauguguaugugcaugc

SEQ ID NO: 815555 - RNA, 22 nt, Human
uggcagcugucuguggggucuc

SEQ ID NO: 815556 - RNA, 22 nt, Human
uggcagcuuuuuguuucaggcu

SEQ ID NO: 815557 - RNA, 22 nt, Human
cucaggauguacuacagaaggc

SEQ ID NO: 815558 - RNA, 22 nt, Human
uuauccuggauuauauauguga

SEQ ID NO: 815559 - RNA, 22 nt, Human
cccaggaguaagugacauuguu

SEQ ID NO: 815560 - RNA, 22 nt, Human
uacaaaguaauguauaauaucg

SEQ ID NO: 815561 - RNA, 22 nt, Human
uguuuuaagagcgcacuuuaua

SEQ ID NO: 815562 - RNA, 22 nt, Human
gagggagggccaggucccaacc

SEQ ID NO: 815563 - RNA, 17 nt, Human
aaucuguuuacagucag

SEQ ID NO: 815564 - RNA, 22 nt, Human
uacagcuaggcaaaaaugacau

SEQ ID NO: 815565 - RNA, 19 nt, Human
ugcugcuguccuugcaggg

SEQ ID NO: 815566 - RNA, 22 nt, Human
gacccaggaagcuacuucuggu

SEQ ID NO: 815567 - RNA, 22 nt, Human
acuuuugguucuguaacuguga

SEQ ID NO: 815568 - RNA, 22 nt, Human
guggcagcggugugcaaggagg

SEQ ID NO: 815569 - RNA, 22 nt, Human
gauuuuaauuauaggagguccu

SEQ ID NO: 815570 - RNA, 22 nt, Human
ggaggggauuuaguagaugcua

SEQ ID NO: 815571 - RNA, 22 nt, Human
cauuuguaauacugacuugcag

SEQ ID NO: 815572 - RNA, 22 nt, Human
acuugcugguggcauuuacagu

SEQ ID NO: 815573 - RNA, 22 nt, Human
uuucuuaguccuagagugauuu

SEQ ID NO: 815574 - RNA, 22 nt, Human
gggagggguugcauguuugagu

SEQ ID NO: 815575 - RNA, 22 nt, Human
gucccauaaguagugcaacuug

SEQ ID NO: 815576 - RNA, 22 nt, Human
uuucauugcagagucugugugc

SEQ ID NO: 815577 - RNA, 22 nt, Human
gucugucucccugugacugaga

SEQ ID NO: 815578 - RNA, 22 nt, Human
cagaggcaaaagagguggaggu

SEQ ID NO: 815579 - RNA, 22 nt, Human
uuugcagugucagcuucugugu

SEQ ID NO: 815580 - RNA, 22 nt, Human
aagauaaacucuugauuucuga

SEQ ID NO: 815581 - RNA, 22 nt, Human
ucauuugugugagugauuugac

SEQ ID NO: 815582 - RNA, 22 nt, Human
ucagugugaggucuuccacccg

SEQ ID NO: 815583 - RNA, 22 nt, Human
uaggcagcgcuuggcugugcuu

SEQ ID NO: 815584 - RNA, 22 nt, Human
agucuugcauuuucugaagaug

SEQ ID NO: 815585 - RNA, 22 nt, Human
gaucuucucuuuaguagaaaca

SEQ ID NO: 815586 - RNA, 22 nt, Human
gcaggagagccagcaggcuucc

SEQ ID NO: 815587 - RNA, 22 nt, Human
agagggcagggcgguaaguccu

SEQ ID NO: 815588 - RNA, 22 nt, Human
ccagugcuaagguagccucugc

SEQ ID NO: 815589 - RNA, 22 nt, Human
gcccaggaggcagagguugugg

SEQ ID NO: 815590 - RNA, 22 nt, Human
auccaugauuaguaggauaaag

SEQ ID NO: 815591 - RNA, 22 nt, Human
aaagacuuggcuuaugauuugc

SEQ ID NO: 815592 - RNA, 22 nt, Human
aaauacagaguugcuuaaaagc

SEQ ID NO: 815593 - RNA, 22 nt, Human
uguccauggauagagcugcucg

SEQ ID NO: 815594 - RNA, 22 nt, Human
cccagaaggucgaggcugcagu

SEQ ID NO: 815595 - RNA, 22 nt, Human
cccaggaggucgaagcugcagu

SEQ ID NO: 815596 - RNA, 22 nt, Human
ggagaggacauggcucccacag

SEQ ID NO: 815597 - RNA, 22 nt, Human
gagacagcacaggccacuggga

SEQ ID NO: 815598 - RNA, 22 nt, Human
uguugagacugagggagucagc

SEQ ID NO: 815599 - RNA, 18 nt, Human
ggcagggaaaagauaggg

SEQ ID NO: 815600 - RNA, 22 nt, Human
gugcugugcgcuuuuucuguau

SEQ ID NO: 815601 - RNA, 22 nt, Human
cugugauuguuaguuccuauac

SEQ ID NO: 815602 - RNA, 22 nt, Human
ugaggcaggacauggacaacug

SEQ ID NO: 815603 - RNA, 22 nt, Human
ggagauggaauagauucugacu

SEQ ID NO: 815604 - RNA, 22 nt, Human
agaggacagguuuuccaugggc

SEQ ID NO: 815605 - RNA, 18 nt, Human
acucaggaaaugaugaca

SEQ ID NO: 815606 - RNA, 22 nt, Human
gcugcugucagugguggcaguu

SEQ ID NO: 815607 - RNA, 22 nt, Human
guucuucaguaaaauuaaaugu

SEQ ID NO: 815608 - RNA, 22 nt, Human
gucaggauuuacaaacuucagu

SEQ ID NO: 815609 - RNA, 22 nt, Human
cugcugugccucuuuucacgug

SEQ ID NO: 815610 - RNA, 22 nt, Human
ugcugaaaacucaaccauugug

SEQ ID NO: 815611 - RNA, 22 nt, Human
gaggagcuugugagaagauguc

SEQ ID NO: 815612 - RNA, 19 nt, Human
uuugcagugguuccuuugu

SEQ ID NO: 815613 - RNA, 22 nt, Human
caggggaguuuuaugcaacaga

SEQ ID NO: 815614 - RNA, 22 nt, Human
uuauccaagcagaagcugcaca

SEQ ID NO: 815615 - RNA, 22 nt, Human
ggggggugcugaucaguggagc

SEQ ID NO: 815616 - RNA, 22 nt, Human
cugacccauauaagaguggagg

SEQ ID NO: 815617 - RNA, 22 nt, Human
ugcugcugauggcaccuaggca

SEQ ID NO: 815618 - RNA, 22 nt, Human
gcccaggaagccaccgggaagu

SEQ ID NO: 815619 - RNA, 22 nt, Human
ggcagcuuccugagccagcagc

SEQ ID NO: 815620 - RNA, 22 nt, Human
caguugccuacuacauggcagg

SEQ ID NO: 815621 - RNA, 22 nt, Human
agagggcagucucagauuggga

SEQ ID NO: 815622 - RNA, 22 nt, Human
ucacuucacacccacuaucaug

SEQ ID NO: 815623 - RNA, 20 nt, Human
agcaagaguaaggacagcga

SEQ ID NO: 815624 - RNA, 22 nt, Human
cauuuguuaaccaguguggauu

SEQ ID NO: 815625 - RNA, 22 nt, Human
aguggcagagugcacucaggca

SEQ ID NO: 815626 - RNA, 22 nt, Human
gcaaguuauuuccauuuaaagc

SEQ ID NO: 815627 - RNA, 22 nt, Human
agaggggagagcuaagcaauuc

SEQ ID NO: 815628 - RNA, 22 nt, Human
uggagagguuuaaacaaaaguu

SEQ ID NO: 815629 - RNA, 22 nt, Human
caguuucuauggcugggcucug

SEQ ID NO: 815630 - RNA, 22 nt, Human
agaggcaggagguugacuugag

SEQ ID NO: 815631 - RNA, 22 nt, Human
guguguuucagaagccaggugu

SEQ ID NO: 815632 - RNA, 22 nt, Human
auucaaauuaaguuaauucagc

SEQ ID NO: 815633 - RNA, 22 nt, Human
gauuucuugaccccugucucag

SEQ ID NO: 815634 - RNA, 22 nt, Human
uccaggagagguguggggacug

SEQ ID NO: 815635 - RNA, 22 nt, Human
cugcauuagucaugcuuugcag

SEQ ID NO: 815636 - RNA, 22 nt, Human
aguguguccagaaaucuguauu

SEQ ID NO: 815637 - RNA, 22 nt, Human
gcccaggauggcuggaggugcu

SEQ ID NO: 815638 - RNA, 22 nt, Human
gcagcugaaagggaucucuaca

SEQ ID NO: 815639 - RNA, 22 nt, Human
cgaggcaggcaggcggaggaua

SEQ ID NO: 815640 - RNA, 22 nt, Human
gaucuucuagcagaaguaauuu

SEQ ID NO: 815641 - RNA, 22 nt, Human
uuggaauucaaguuguagcuua

SEQ ID NO: 815642 - RNA, 22 nt, Human
gugcauuugugcaugcacaugu

SEQ ID NO: 815643 - RNA, 22 nt, Human
aaggcagcagaggaaaggugcu

SEQ ID NO: 815644 - RNA, 19 nt, Human
ugcuagaaauucugugacu

SEQ ID NO: 815645 - RNA, 22 nt, Human
agcugcccagcuaggaagaagg

SEQ ID NO: 815646 - RNA, 22 nt, Human
uggaaagucucuuuugacugua

SEQ ID NO: 815647 - RNA, 22 nt, Human
uccauuuucaucucauguauaa

SEQ ID NO: 815648 - RNA, 22 nt, Human
uugguuuagagagugugguuac

SEQ ID NO: 815649 - RNA, 22 nt, Human
acuuaaaaagaaucuuuucacg

SEQ ID NO: 815650 - RNA, 22 nt, Human
agcccaggcagagggaugcuug

SEQ ID NO: 815651 - RNA, 22 nt, Human
aagcgccaugguuccugcgcag

SEQ ID NO: 815652 - RNA, 22 nt, Human
acuguguggaccacucugaggc

SEQ ID NO: 815653 - RNA, 22 nt, Human
aggaagcuccaugaaggcagag

SEQ ID NO: 815654 - RNA, 23 nt, Human
uccuuccuuugagaggcuccauc

SEQ ID NO: 815655 - RNA, 22 nt, Human
gccaggagagcuccuucagguu

SEQ ID NO: 815656 - RNA, 23 nt, Human
agaggcaggaguggcuugcccgg

SEQ ID NO: 815657 - RNA, 22 nt, Human
cuggccaggcuugggacagaca

SEQ ID NO: 815658 - RNA, 22 nt, Human
aagcagaggaccgacggaggga

SEQ ID NO: 815659 - RNA, 22 nt, Human
uugaacauuggcaauuucauau

SEQ ID NO: 815660 - RNA, 21 nt, Human
ggauggauagggaagagauuu

SEQ ID NO: 815661 - RNA, 22 nt, Human
caguuucuacgaaggucaaccc

SEQ ID NO: 815662 - RNA, 22 nt, Human
uaaauuguuuucuagaaguugu

SEQ ID NO: 815663 - RNA, 22 nt, Human
cagucuuuguucccauuacuga

SEQ ID NO: 815664 - RNA, 22 nt, Human
cccaggagaugcacuccauugg

SEQ ID NO: 815665 - RNA, 22 nt, Human
ugccuguguugauuacuuuguc

SEQ ID NO: 815666 - RNA, 22 nt, Human
uugugguuaaccgcacauuuuu

SEQ ID NO: 815667 - RNA, 22 nt, Human
aucaggauuauuaaaucuggau

SEQ ID NO: 815668 - RNA, 22 nt, Human
caggcaggucagugaagaagga

SEQ ID NO: 815669 - RNA, 22 nt, Human
uucuuuuccuacacagcgauuu

SEQ ID NO: 815670 - RNA, 22 nt, Human
uucauucuugucuuuguauagu

SEQ ID NO: 815671 - RNA, 20 nt, Human
ucucuucuggggagauaaaa

SEQ ID NO: 815672 - RNA, 22 nt, Human
acugcccucccaucuauugcaa

SEQ ID NO: 815673 - RNA, 22 nt, Human
ugcuggguagaaguauuagucu

SEQ ID NO: 815674 - RNA, 22 nt, Human
agucugucuacuuaaagucugu

SEQ ID NO: 815675 - RNA, 22 nt, Human
uugcauuugagaaaguucuccu

SEQ ID NO: 815676 - RNA, 22 nt, Human
aggaagcucaaagccaugaugu

SEQ ID NO: 815677 - RNA, 22 nt, Human
agcugcccagauaggaggaggc

SEQ ID NO: 815678 - RNA, 21 nt, Human
gggcagcucuguuuuauuuuc

SEQ ID NO: 815679 - RNA, 22 nt, Human
aggcagcuggacauaacuaacc

SEQ ID NO: 815680 - RNA, 17 nt, Human
uagcuguguuucagcua

SEQ ID NO: 815681 - RNA, 17 nt, Human
gcugacccuggagaagu

SEQ ID NO: 815682 - RNA, 22 nt, Human
ucaguucuuuauuucacaguga

SEQ ID NO: 815683 - RNA, 22 nt, Human
ucucaggaucuaauacauggua

SEQ ID NO: 815684 - RNA, 22 nt, Human
aucaggaucacagaaacuuuua

SEQ ID NO: 815685 - RNA, 22 nt, Human
ugcuagugcaggguuuucaguu

SEQ ID NO: 815686 - RNA, 22 nt, Human
ugcacauuaguguuugagaugc

SEQ ID NO: 815687 - RNA, 22 nt, Human
uugaaguuguaguucagugaag

SEQ ID NO: 815688 - RNA, 22 nt, Human
ugaggggagacagaguggacuc

SEQ ID NO: 815689 - RNA, 22 nt, Human
aagggcagccugacucacgguc

SEQ ID NO: 815690 - RNA, 22 nt, Human
gucaggauguuuauucuccagu

SEQ ID NO: 815691 - RNA, 21 nt, Human
uugaaaguaaauucagcagcu

SEQ ID NO: 815692 - RNA, 22 nt, Human
ucaggauggcuucugcaucaaa

SEQ ID NO: 815693 - RNA, 15 nt, Human
cuccaugauuuugca

SEQ ID NO: 815694 - RNA, 23 nt, Human
uuuuccagaaucgacucuguaga

SEQ ID NO: 815695 - RNA, 23 nt, Human
uacaugcuauaauuucacccuca

SEQ ID NO: 815696 - RNA, 18 nt, Human
ccagguggugacagagau

SEQ ID NO: 815697 - RNA, 22 nt, Human
ugguaaauauguccauucucuu

SEQ ID NO: 815698 - RNA, 22 nt, Human
agacaaaugguaauuaugucua

SEQ ID NO: 815699 - RNA, 22 nt, Human
cgcagggauuucaaggggccuu

SEQ ID NO: 815700 - RNA, 22 nt, Human
gauguguuuccaggauuuguuu

SEQ ID NO: 815701 - RNA, 22 nt, Human
cuucugagcagaccuccugggg

SEQ ID NO: 815702 - RNA, 22 nt, Human
gcaggagagucugugccagguu

SEQ ID NO: 815703 - RNA, 22 nt, Human
gaaggggacuggcagcugcaga

SEQ ID NO: 815704 - RNA, 22 nt, Human
cuuugcaaacgauuaccacaug

SEQ ID NO: 815705 - RNA, 22 nt, Human
uccaggagaggccugaccaggu

SEQ ID NO: 815706 - RNA, 22 nt, Human
uaagauaaguggguugagaugg

SEQ ID NO: 815707 - RNA, 22 nt, Human
ucucuucuagcuucuugugguu

SEQ ID NO: 815708 - RNA, 22 nt, Human
ggaggggagucucccaaagccg

SEQ ID NO: 815709 - RNA, 22 nt, Human
ccagaggaggggggucuuucug

SEQ ID NO: 815710 - RNA, 22 nt, Human
uuuuccagauuggacuuagucc

SEQ ID NO: 815711 - RNA, 22 nt, Human
uuucaguuacugcuauaucauu

SEQ ID NO: 815712 - RNA, 22 nt, Human
gaaggccaagaggcuccaagau

SEQ ID NO: 815713 - RNA, 22 nt, Human
cagaccagaaggaagccgacaa

SEQ ID NO: 815714 - RNA, 22 nt, Human
uucaggaugacaccauguccag

SEQ ID NO: 815715 - RNA, 22 nt, Human
ggaggaggcggcagaaguuccu

SEQ ID NO: 815716 - RNA, 22 nt, Human
aaagccauuacaaaauuucaua

SEQ ID NO: 815717 - RNA, 22 nt, Human
ugaggcagugugagauaauaaa

SEQ ID NO: 815718 - RNA, 22 nt, Human
cauguuuacuaccaggagaaug

SEQ ID NO: 815719 - RNA, 22 nt, Human
aggaggggcauagaaauguaau

SEQ ID NO: 815720 - RNA, 22 nt, Human
ucugggaagcugcgugccuguu

SEQ ID NO: 815721 - RNA, 22 nt, Human
ucccaggagcaccuuuugagcc

SEQ ID NO: 815722 - RNA, 22 nt, Human
uuguaaauaguaguaagaugcc

SEQ ID NO: 815723 - RNA, 22 nt, Human
uggggcucaccuaggcuggaag

SEQ ID NO: 815724 - RNA, 23 nt, Human
uucuuucaagaaguucacagugc

SEQ ID NO: 815725 - RNA, 17 nt, Human
gagacagcaggagcccc

SEQ ID NO: 815726 - RNA, 22 nt, Human
aaagcagaggugauaugacuua

SEQ ID NO: 815727 - RNA, 22 nt, Human
ccuggauucaagucuuucuuuc

SEQ ID NO: 815728 - RNA, 22 nt, Human
uaugaacucuggagucugagug

SEQ ID NO: 815729 - RNA, 22 nt, Human
auuuccaggagaaaggauuuua

SEQ ID NO: 815730 - RNA, 21 nt, Human
cccagggaagccgcagucacc

SEQ ID NO: 815731 - RNA, 22 nt, Human
ucaucugucccaggcuuuuuuc

SEQ ID NO: 815732 - RNA, 22 nt, Human
ccaggagaugauguuggggauu

SEQ ID NO: 815733 - RNA, 22 nt, Human
gacccaggcccaaggcugccag

SEQ ID NO: 815734 - RNA, 18 nt, Human
gugcugugggcaguggcc

SEQ ID NO: 815735 - RNA, 22 nt, Human
cuccaggaaagccugaggcccg

SEQ ID NO: 815736 - RNA, 22 nt, Human
uuccuuaggcuguuugcagugc

SEQ ID NO: 815737 - RNA, 22 nt, Human
uauaucauggagauuaacauuc

SEQ ID NO: 815738 - RNA, 22 nt, Human
ggcagcuucuuaauauggagac

SEQ ID NO: 815739 - RNA, 22 nt, Human
cugcugucauagccaucccucc

SEQ ID NO: 815740 - RNA, 22 nt, Human
agaggcggagguugcagugagc

SEQ ID NO: 815741 - RNA, 22 nt, Human
ggagguggcagagggacauucu

SEQ ID NO: 815742 - RNA, 22 nt, Human
ugcaugugcccacucuggcuua

SEQ ID NO: 815743 - RNA, 19 nt, Human
uucauucucuuauuguugu

SEQ ID NO: 815744 - RNA, 19 nt, Human
agggaguuuauauuugcac

SEQ ID NO: 815745 - RNA, 22 nt, Human
ggugaguugggguucacagguc

SEQ ID NO: 815746 - RNA, 17 nt, Human
acucaggaucugggagu

SEQ ID NO: 815747 - RNA, 22 nt, Human
uggaaggaagccaaggaagguu

SEQ ID NO: 815748 - RNA, 22 nt, Human
uauuuucuguggaggaccagau

SEQ ID NO: 815749 - RNA, 22 nt, Human
ugcuggaauaauuucauguuaa

SEQ ID NO: 815750 - RNA, 22 nt, Human
gaggcagcagaacauggaagag

SEQ ID NO: 815751 - RNA, 17 nt, Human
aggccagaugaggcaag

SEQ ID NO: 815752 - RNA, 22 nt, Human
ucuuugaauuucugacugucuu

SEQ ID NO: 815753 - RNA, 22 nt, Human
ucaggauaaaauguaauggcaa

SEQ ID NO: 815754 - RNA, 22 nt, Human
uccaggaggugaggggaccaaa

SEQ ID NO: 815755 - RNA, 22 nt, Human
gagggccagcagccucagcaug

SEQ ID NO: 815756 - RNA, 22 nt, Human
aggcagcccacaggacacagga

SEQ ID NO: 815757 - RNA, 22 nt, Human
uuaacaugucuugacuucaucu

SEQ ID NO: 815758 - RNA, 21 nt, Human
agcagaggcugccuggugacu

SEQ ID NO: 815759 - RNA, 22 nt, Human
agggagcuuccgaacuacagcu

SEQ ID NO: 815760 - RNA, 22 nt, Human
cugccaggcagcagagggagaa

SEQ ID NO: 815761 - RNA, 20 nt, Human
agcugccccugggcacugcc

SEQ ID NO: 815762 - RNA, 22 nt, Human
gggcagcucugcccaucagagg

SEQ ID NO: 815763 - RNA, 22 nt, Human
ugauuuccccagucuugcugcu

SEQ ID NO: 815764 - RNA, 22 nt, Human
cugucauugagccugucagggc

SEQ ID NO: 815765 - RNA, 22 nt, Human
ucugcaucauuuuucagagccg

SEQ ID NO: 815766 - RNA, 22 nt, Human
caggauggucagaugcauuguc

SEQ ID NO: 815767 - RNA, 22 nt, Human
gagggcuccauuccccgugccc

SEQ ID NO: 815768 - RNA, 22 nt, Human
uauuucagcaagaagaaugugg

SEQ ID NO: 815769 - RNA, 22 nt, Human
aaugagacacgugaagcagaug

SEQ ID NO: 815770 - RNA, 22 nt, Human
cugguacaaaaugcugauauca

SEQ ID NO: 815771 - RNA, 22 nt, Human
aaguguauauaugacuuauaaa

SEQ ID NO: 815772 - RNA, 19 nt, Human
uucuccaggcugcagaggg

SEQ ID NO: 815773 - RNA, 22 nt, Human
caagauggagaagcagcaaggg

SEQ ID NO: 815774 - RNA, 22 nt, Human
aguccaugguucugacucaucu

SEQ ID NO: 815775 - RNA, 21 nt, Human
aggcagcucaggcccagagag

SEQ ID NO: 815776 - RNA, 22 nt, Human
ggaggaggggcgcuuugucuau

SEQ ID NO: 815777 - RNA, 22 nt, Human
cuugaaagaagggucuuuuaau

SEQ ID NO: 815778 - RNA, 22 nt, Human
aaucauucuuauuucacagcaa

SEQ ID NO: 815779 - RNA, 22 nt, Human
acauuuaaccaaacuguuuaau

SEQ ID NO: 815780 - RNA, 22 nt, Human
uauuuuaaagacugccagccua

SEQ ID NO: 815781 - RNA, 22 nt, Human
gagugcaggccugagcaccauc

SEQ ID NO: 815782 - RNA, 22 nt, Human
aggcagcuggcagcacccaggg

SEQ ID NO: 815783 - RNA, 21 nt, Human
ggcagccugacccccagagag

SEQ ID NO: 815784 - RNA, 22 nt, Human
gagaggugaaggcugcccuggg

SEQ ID NO: 815785 - RNA, 22 nt, Human
caggacagcucaacaccuccuc

SEQ ID NO: 815786 - RNA, 22 nt, Human
uuagcaucugcuguaagcuuau

SEQ ID NO: 815787 - RNA, 22 nt, Human
uccauuuuagaagaaaauccac

SEQ ID NO: 815788 - RNA, 22 nt, Human
gagguggucgaggagggguacc

SEQ ID NO: 815789 - RNA, 22 nt, Human
gagccaggggucagcuccgagg

SEQ ID NO: 815790 - RNA, 22 nt, Human
cuuuuccacugagccucacaaa

SEQ ID NO: 815791 - RNA, 22 nt, Human
aaggcagcacagcaacugcuca

SEQ ID NO: 815792 - RNA, 22 nt, Human
ucuuuguaaaugccuagcauaa

SEQ ID NO: 815793 - RNA, 22 nt, Human
agacucaagacugcagaagacg

SEQ ID NO: 815794 - RNA, 22 nt, Human
uugcaucuaccauaucaaagau

SEQ ID NO: 815795 - RNA, 22 nt, Human
gcuguguuggugaagcuguagc

SEQ ID NO: 815796 - RNA, 22 nt, Human
ucccaggaugaagacaguguug

SEQ ID NO: 815797 - RNA, 22 nt, Human
gagggcuccucacauucucuau

SEQ ID NO: 815798 - RNA, 21 nt, Human
cuugaaagguagagucuacag

SEQ ID NO: 815799 - RNA, 22 nt, Human
ccccaggacguggcccucauag

SEQ ID NO: 815800 - RNA, 22 nt, Human
uggcagucuggguuggcaguua

SEQ ID NO: 815801 - RNA, 22 nt, Human
gaggcugccccuuccucagcug

SEQ ID NO: 815802 - RNA, 22 nt, Human
ucacagacacagggagaagcau

SEQ ID NO: 815803 - RNA, 22 nt, Human
uugaaagacuucuccugugaaa

SEQ ID NO: 815804 - RNA, 22 nt, Human
gacccaggcucgugggacggcu

SEQ ID NO: 815805 - RNA, 22 nt, Human
ggcagggaagcuggcaucacgg

SEQ ID NO: 815806 - RNA, 19 nt, Human
aucugccuuagugcugcug

SEQ ID NO: 815807 - RNA, 20 nt, Human
agcauuugaaauaugacuau

SEQ ID NO: 815808 - RNA, 22 nt, Human
uucugugaaucuuuuuucccac

SEQ ID NO: 815809 - RNA, 17 nt, Human
caaggccagcaucuuca

SEQ ID NO: 815810 - RNA, 22 nt, Human
cccaggaggguggccucugccc

SEQ ID NO: 815811 - RNA, 22 nt, Human
gcucagagcuugaaguuccacu

SEQ ID NO: 815812 - RNA, 22 nt, Human
ugcugcugaucauuuauagucu

SEQ ID NO: 815813 - RNA, 19 nt, Human
caagugaagccugggaugg

SEQ ID NO: 815814 - RNA, 22 nt, Human
agggcagcagcggcccaggccu

SEQ ID NO: 815815 - RNA, 17 nt, Human
ccuguguuugcuccuuc

SEQ ID NO: 815816 - RNA, 22 nt, Human
aagauuauggcagauaacaauu

SEQ ID NO: 815817 - RNA, 22 nt, Human
aguuucuuuagauagaaaguuc

SEQ ID NO: 815818 - RNA, 22 nt, Human
acaaaugugucuaauugugccu

SEQ ID NO: 815819 - RNA, 22 nt, Human
aacauuuaugauugagguaaau

SEQ ID NO: 815820 - RNA, 22 nt, Human
guuuuauaggugaaauauuacu

SEQ ID NO: 815821 - RNA, 22 nt, Human
uuagccaugcccuagaagagga

SEQ ID NO: 815822 - RNA, 22 nt, Human
gagcagcucugggugacccagu

SEQ ID NO: 815823 - RNA, 22 nt, Human
ugaggcaggaugcuugcacagg

SEQ ID NO: 815824 - RNA, 22 nt, Human
aaggcagccagauccuuugggu

SEQ ID NO: 815825 - RNA, 22 nt, Human
uucuucuuuaucucaguauccu

SEQ ID NO: 815826 - RNA, 22 nt, Human
agcuucuuggcucagcacuugg

SEQ ID NO: 815827 - RNA, 21 nt, Human
cccaggaggagcuccggcucc

SEQ ID NO: 815828 - RNA, 22 nt, Human
ucauuuauaaggaugcaauuaa

SEQ ID NO: 815829 - RNA, 22 nt, Human
ucucucuugucaccccaucugc

SEQ ID NO: 815830 - RNA, 22 nt, Human
auuaucuauguagaaugauuuu

SEQ ID NO: 815831 - RNA, 22 nt, Human
cugcgcagcaaucagagaggag

SEQ ID NO: 815832 - RNA, 22 nt, Human
ugucucugauaaguaguucagu

SEQ ID NO: 815833 - RNA, 22 nt, Human
uaaguggaagguuauaugcuaa

SEQ ID NO: 815834 - RNA, 22 nt, Human
cccaggaguuggaggcuacggu

SEQ ID NO: 815835 - RNA, 22 nt, Human
gggcagcuggccagguauucug

SEQ ID NO: 815836 - RNA, 22 nt, Human
cugaaugaggaaaagagugagg

SEQ ID NO: 815837 - RNA, 22 nt, Human
agggaggucuuugaggggcuua

SEQ ID NO: 815838 - RNA, 17 nt, Human
caagagagaugacugga

SEQ ID NO: 815839 - RNA, 22 nt, Human
gaaggccacaaaaaaugucaua

SEQ ID NO: 815840 - RNA, 22 nt, Human
acagucucuccacacugcaggg

SEQ ID NO: 815841 - RNA, 22 nt, Human
gcccaggaguugaaugcagcag

SEQ ID NO: 815842 - RNA, 22 nt, Human
uuucacaacugcuuauuugaga

SEQ ID NO: 815843 - RNA, 22 nt, Human
cgccucagccguggucaucuuc

SEQ ID NO: 815844 - RNA, 22 nt, Human
uagggaggaggguuuucaaauc

SEQ ID NO: 815845 - RNA, 22 nt, Human
aagaggagacuucagcaacuug

SEQ ID NO: 815846 - RNA, 16 nt, Human
ucccaggaggcggaac

SEQ ID NO: 815847 - RNA, 22 nt, Human
uauuucagggagaauaaauuug

SEQ ID NO: 815848 - RNA, 18 nt, Human
gcagcuagccaggggggc

SEQ ID NO: 815849 - RNA, 22 nt, Human
aagagggcugcaaucuuauugc

SEQ ID NO: 815850 - RNA, 22 nt, Human
gcauuuccugugcuuggcauau

SEQ ID NO: 815851 - RNA, 22 nt, Human
guugaaaguggagaaccugguu

SEQ ID NO: 815852 - RNA, 22 nt, Human
cuucugaggcagcuauucaguu

SEQ ID NO: 815853 - RNA, 22 nt, Human
gggcagcuggauaguuuuaaau

SEQ ID NO: 815854 - RNA, 17 nt, Human
acacagggagagggagc

SEQ ID NO: 815855 - RNA, 20 nt, Human
gucaggauuaguaaacucug

SEQ ID NO: 815856 - RNA, 22 nt, Human
aggcagaucacuugaggccagg

SEQ ID NO: 815857 - RNA, 22 nt, Human
agaggcagcagucauacuacag

SEQ ID NO: 815858 - RNA, 16 nt, Human
cuuccucuucacuggc

SEQ ID NO: 815859 - RNA, 23 nt, Human
auugaugacuugauuacacuuuu

SEQ ID NO: 815860 - RNA, 22 nt, Human
uuucucugcugccugugucgau

SEQ ID NO: 815861 - RNA, 22 nt, Human
ucccaggaugugcgugccgccg

SEQ ID NO: 815862 - RNA, 22 nt, Human
aagcuggaacaucuugaggaag

SEQ ID NO: 815863 - RNA, 22 nt, Human
ucuuugcaaaauacaacaaugg

SEQ ID NO: 815864 - RNA, 22 nt, Human
uccaugagcuagcuuuccaaag

SEQ ID NO: 815865 - RNA, 22 nt, Human
gagggagucugugcaaagaauu

SEQ ID NO: 815866 - RNA, 22 nt, Human
cuguaugaggaucagacuggac

SEQ ID NO: 815867 - RNA, 22 nt, Human
cugcuuuggacaacuauucuug

SEQ ID NO: 815868 - RNA, 22 nt, Human
ucuacugugguccuuguaacca

SEQ ID NO: 815869 - RNA, 22 nt, Human
gaggaaccacucugagaagcca

SEQ ID NO: 815870 - RNA, 22 nt, Human
uuaugauuugccacagauuggu

SEQ ID NO: 815871 - RNA, 19 nt, Human
uuucuuaggccuuuggccu

SEQ ID NO: 815872 - RNA, 22 nt, Human
aggaagcuggugugaggaugaa

SEQ ID NO: 815873 - RNA, 22 nt, Human
gaggcugaggguuagagaguca

SEQ ID NO: 815874 - RNA, 22 nt, Human
ucagagagccucaggcacugcc

SEQ ID NO: 815875 - RNA, 22 nt, Human
uuagaaagcuuuccauagucaa

SEQ ID NO: 815876 - RNA, 22 nt, Human
gaggccagggaugcaaugagag

SEQ ID NO: 815877 - RNA, 22 nt, Human
gaagcagcuggugagauggagc

SEQ ID NO: 815878 - RNA, 22 nt, Human
uugcagcuucgagucuaucugu

SEQ ID NO: 815879 - RNA, 22 nt, Human
cagcuggccaaucagggcgccc

SEQ ID NO: 815880 - RNA, 18 nt, Human
aggcagacacuagagguc

SEQ ID NO: 815881 - RNA, 22 nt, Human
caggacagagcccagacugugu

SEQ ID NO: 815882 - RNA, 22 nt, Human
ucuuccaagguugcacacuauc

SEQ ID NO: 815883 - RNA, 22 nt, Human
cccagcaggaggagguugcagu

SEQ ID NO: 815884 - RNA, 22 nt, Human
ugaauaguccuuggaauaacug

SEQ ID NO: 815885 - RNA, 22 nt, Human
auauucuucuuguucagacuau

SEQ ID NO: 815886 - RNA, 17 nt, Human
ugaaggccaugaccacg

SEQ ID NO: 815887 - RNA, 22 nt, Human
acaguacauaauccugagucug

SEQ ID NO: 815888 - RNA, 22 nt, Human
gucacuguuuccuauuauauuu

SEQ ID NO: 815889 - RNA, 22 nt, Human
uucagcaaauggacuguucagg

SEQ ID NO: 815890 - RNA, 22 nt, Human
caggcagcccugcaccaagugu

SEQ ID NO: 815891 - RNA, 21 nt, Human
agcagaggcagaauguaugca

SEQ ID NO: 815892 - RNA, 22 nt, Human
cauuuucaugaguuucuguuca

SEQ ID NO: 815893 - RNA, 22 nt, Human
guaucacuuuugagagugagaa

SEQ ID NO: 815894 - RNA, 22 nt, Human
uucaugugaucacagauuguaa

SEQ ID NO: 815895 - RNA, 22 nt, Human
aaggaaccuggaguagagggag

SEQ ID NO: 815896 - RNA, 23 nt, Human
gggcagcuuaagcuuguuuuucu

SEQ ID NO: 815897 - RNA, 22 nt, Human
aaggcagcaacuaauggaucuc

SEQ ID NO: 815898 - RNA, 22 nt, Human
agcauccaacaggagggaaggg

SEQ ID NO: 815899 - RNA, 22 nt, Human
uuuguaugugauaagacuauuc

SEQ ID NO: 815900 - RNA, 22 nt, Human
aggcagauauuggggugaugug

SEQ ID NO: 815901 - RNA, 22 nt, Human
uugcuuuguggugguucuucca

SEQ ID NO: 815902 - RNA, 22 nt, Human
ugugaacuggcagguggacggg

SEQ ID NO: 815903 - RNA, 22 nt, Human
gcucucuugguggcuguccugg

SEQ ID NO: 815904 - RNA, 22 nt, Human
agcccaggucucaaaguacagg

SEQ ID NO: 815905 - RNA, 21 nt, Human
ggacagcugcgcgcagggcuc

SEQ ID NO: 815906 - RNA, 22 nt, Human
ucuccucucuuaccugguacaa

SEQ ID NO: 815907 - RNA, 22 nt, Human
acuucaugcagaagagagcugu

SEQ ID NO: 815908 - RNA, 22 nt, Human
cugcagagcaaguaacauccuc

SEQ ID NO: 815909 - RNA, 22 nt, Human
ucuggcaggcaaucggcucugg

SEQ ID NO: 815910 - RNA, 17 nt, Human
agauggcaggaggcaga

SEQ ID NO: 815911 - RNA, 22 nt, Human
aguuugaaauguuggcaauauu

SEQ ID NO: 815912 - RNA, 22 nt, Human
uuucuuguaagauguuuauuaa

SEQ ID NO: 815913 - RNA, 22 nt, Human
ucacaaauagcuauauuaagga

SEQ ID NO: 815914 - RNA, 22 nt, Human
ugaggcagucacccccuccugc

SEQ ID NO: 815915 - RNA, 22 nt, Human
uagggauguccugagacuuggc

SEQ ID NO: 815916 - RNA, 22 nt, Human
ugaggcaggagguugagaacug

SEQ ID NO: 815917 - RNA, 22 nt, Human
ucaggauguuaauauagcauua

SEQ ID NO: 815918 - RNA, 22 nt, Human
uaggcagcagugcuaugauucu

SEQ ID NO: 815919 - RNA, 22 nt, Human
ugaggggaacugaugcccauug

SEQ ID NO: 815920 - RNA, 23 nt, Human
aaggccagaauuucaauggugcc

SEQ ID NO: 815921 - RNA, 22 nt, Human
gagaggauccacaaaccaggaa

SEQ ID NO: 815922 - RNA, 22 nt, Human
cugcuguguuccuccugcaucu

SEQ ID NO: 815923 - RNA, 22 nt, Human
cugggaaauggcuucgagcuca

SEQ ID NO: 815924 - RNA, 22 nt, Human
gcccaggaaagauagggccuca

SEQ ID NO: 815925 - RNA, 22 nt, Human
gguuugaacagcuuuggagaag

SEQ ID NO: 815926 - RNA, 22 nt, Human
gggaggugauggcaagcagcgg

SEQ ID NO: 815927 - RNA, 22 nt, Human
uaaggccaauuacauauguuca
